United States Patent Application Publication US 2005/0255487 A1 - sequence listing, part 75

SEQ ID NO: 2060007 - RNA, 19 nt, Homo sapiens
  misc_RNA (1)...(19): siRNA sense strand
aaauuuggaugaagaugga

SEQ ID NO: 2060008 - RNA, 19 nt, Homo sapiens
  misc_RNA (1)...(19): siRNA sense strand
ucaauuacacuucgacucu

SEQ ID NO: 2060009 - RNA, 19 nt, Homo sapiens
  misc_RNA (1)...(19): siRNA sense strand
uagcuguuguuucagagaa

SEQ ID NO: 2060010 - RNA, 19 nt, Homo sapiens
  misc_RNA (1)...(19): siRNA sense strand
cuucgacucucaaagcaau

SEQ ID NO: 2060011 - RNA, 19 nt, Homo sapiens
  misc_RNA (1)...(19): siRNA sense strand
caaagcaauaccaggauag

SEQ ID NO: 2060012 - RNA, 19 nt, Homo sapiens
  misc_RNA (1)...(19): siRNA sense strand
ggauauacucaauuacacu

SEQ ID NO: 2060013 - RNA, 19 nt, Homo sapiens
  misc_RNA (1)...(19): siRNA sense strand
gaagauggauauacucaau

SEQ ID NO: 2060014 - RNA, 19 nt, Homo sapiens
  misc_RNA (1)...(19): siRNA sense strand
caggauagcuguuguuuca

SEQ ID NO: 2060015 - RNA, 19 nt, Homo sapiens
  misc_RNA (1)...(19): siRNA sense strand
ggauagcuguuguuucaga

SEQ ID NO: 2060016 - RNA, 19 nt, Homo sapiens
  misc_RNA (1)...(19): siRNA sense strand
ucaaagcaauaccaggaua

SEQ ID NO: 2060017 - RNA, 19 nt, Homo sapiens
  misc_RNA (1)...(19): siRNA sense strand
ggaugaagauggauauacu

SEQ ID NO: 2060018 - RNA, 19 nt, Homo sapiens
  misc_RNA (1)...(19): siRNA sense strand
aaauuuggaugaagaugga

SEQ ID NO: 2060019 - RNA, 19 nt, Homo sapiens
  misc_RNA (1)...(19): siRNA sense strand
ucaauuacacuucgacucu

SEQ ID NO: 2060020 - RNA, 19 nt, Homo sapiens
  misc_RNA (1)...(19): siRNA sense strand
uagcuguuguuucagagaa

SEQ ID NO: 2060021 - RNA, 19 nt, Homo sapiens
  misc_RNA (1)...(19): siRNA sense strand
cuucgacucucaaagcaau

SEQ ID NO: 2060022 - RNA, 19 nt, Homo sapiens
  misc_RNA (1)...(19): siRNA sense strand
caaagcaauaccaggauag

SEQ ID NO: 2060023 - RNA, 19 nt, Homo sapiens
  misc_RNA (1)...(19): siRNA sense strand
ggauauacucaauuacacu

SEQ ID NO: 2060024 - RNA, 19 nt, Homo sapiens
  misc_RNA (1)...(19): siRNA sense strand
gaagauggauauacucaau

SEQ ID NO: 2060025 - RNA, 19 nt, Homo sapiens
  misc_RNA (1)...(19): siRNA sense strand
caggauagcuguuguuuca

SEQ ID NO: 2060026 - RNA, 19 nt, Homo sapiens
  misc_RNA (1)...(19): siRNA sense strand
ggauagcuguuguuucaga

SEQ ID NO: 2060027 - RNA, 19 nt, Homo sapiens
  misc_RNA (1)...(19): siRNA sense strand
ucaaagcaauaccaggaua

SEQ ID NO: 2060028 - RNA, 19 nt, Homo sapiens
  misc_RNA (1)...(19): siRNA sense strand
ggaugaagauggauauacu

SEQ ID NO: 2060029 - RNA, 19 nt, Homo sapiens
  misc_RNA (1)...(19): siRNA sense strand
aaauuuggaugaagaugga

SEQ ID NO: 2060030 - RNA, 19 nt, Homo sapiens
  misc_RNA (1)...(19): siRNA sense strand
ucaauuacacuucgacucu

SEQ ID NO: 2060031 - RNA, 19 nt, Homo sapiens
  misc_RNA (1)...(19): siRNA sense strand
uagcuguuguuucagagaa

SEQ ID NO: 2060032 - RNA, 19 nt, Homo sapiens
  misc_RNA (1)...(19): siRNA sense strand
cuucgacucucaaagcaau

SEQ ID NO: 2060033 - RNA, 19 nt, Homo sapiens
  misc_RNA (1)...(19): siRNA sense strand
caaagcaauaccaggauag

SEQ ID NO: 2060034 - RNA, 19 nt, Homo sapiens
  misc_RNA (1)...(19): siRNA sense strand
ggauauacucaauuacacu

SEQ ID NO: 2060035 - RNA, 19 nt, Homo sapiens
  misc_RNA (1)...(19): siRNA sense strand
gaagauggauauacucaau

SEQ ID NO: 2060036 - RNA, 19 nt, Homo sapiens
  misc_RNA (1)...(19): siRNA sense strand
caggauagcuguuguuuca

SEQ ID NO: 2060037 - RNA, 19 nt, Homo sapiens
  misc_RNA (1)...(19): siRNA sense strand
ggauagcuguuguuucaga

SEQ ID NO: 2060038 - RNA, 19 nt, Homo sapiens
  misc_RNA (1)...(19): siRNA sense strand
ucaaagcaauaccaggaua

SEQ ID NO: 2060039 - RNA, 19 nt, Homo sapiens
  misc_RNA (1)...(19): siRNA sense strand
ggaugaagauggauauacu

SEQ ID NO: 2060040 - RNA, 19 nt, Homo sapiens
  misc_RNA (1)...(19): siRNA sense strand
aaauuuggaugaagaugga

SEQ ID NO: 2060041 - RNA, 19 nt, Homo sapiens
  misc_RNA (1)...(19): siRNA sense strand
ucaauuacacuucgacucu

SEQ ID NO: 2060042 - RNA, 19 nt, Homo sapiens
  misc_RNA (1)...(19): siRNA sense strand
uagcuguuguuucagagaa

SEQ ID NO: 2060043 - RNA, 19 nt, Homo sapiens
  misc_RNA (1)...(19): siRNA sense strand
cuucgacucucaaagcaau

SEQ ID NO: 2060044 - RNA, 19 nt, Homo sapiens
  misc_RNA (1)...(19): siRNA sense strand
caaagcaauaccaggauag

SEQ ID NO: 2060045 - RNA, 19 nt, Homo sapiens
  misc_RNA (1)...(19): siRNA sense strand
ggauauacucaauuacacu

SEQ ID NO: 2060046 - RNA, 19 nt, Homo sapiens
  misc_RNA (1)...(19): siRNA sense strand
gaagauggauauacucaau

SEQ ID NO: 2060047 - RNA, 19 nt, Homo sapiens
  misc_RNA (1)...(19): siRNA sense strand
caggauagcuguuguuuca

SEQ ID NO: 2060048 - RNA, 19 nt, Homo sapiens
  misc_RNA (1)...(19): siRNA sense strand
ggauagcuguuguuucaga

SEQ ID NO: 2060049 - RNA, 19 nt, Homo sapiens
  misc_RNA (1)...(19): siRNA sense strand
ucaaagcaauaccaggaua

SEQ ID NO: 2060050 - RNA, 19 nt, Homo sapiens
  misc_RNA (1)...(19): siRNA sense strand
ggaugaagauggauauacu

SEQ ID NO: 2060051 - RNA, 19 nt, Homo sapiens
  misc_RNA (1)...(19): siRNA sense strand
aaauuuggaugaagaugga

SEQ ID NO: 2060052 - RNA, 19 nt, Homo sapiens
  misc_RNA (1)...(19): siRNA sense strand
ucaauuacacuucgacucu

SEQ ID NO: 2060053 - RNA, 19 nt, Homo sapiens
  misc_RNA (1)...(19): siRNA sense strand
uagcuguuguuucagagaa

SEQ ID NO: 2060054 - RNA, 19 nt, Homo sapiens
  misc_RNA (1)...(19): siRNA sense strand
cuucgacucucaaagcaau

SEQ ID NO: 2060055 - RNA, 19 nt, Homo sapiens
  misc_RNA (1)...(19): siRNA sense strand
caaagcaauaccaggauag

SEQ ID NO: 2060056 - RNA, 19 nt, Homo sapiens
  misc_RNA (1)...(19): siRNA sense strand
ggauauacucaauuacacu

SEQ ID NO: 2060057 - RNA, 19 nt, Homo sapiens
  misc_RNA (1)...(19): siRNA sense strand
gaagauggauauacucaau

SEQ ID NO: 2060058 - RNA, 19 nt, Homo sapiens
  misc_RNA (1)...(19): siRNA sense strand
caggauagcuguuguuuca

SEQ ID NO: 2060059 - RNA, 19 nt, Homo sapiens
  misc_RNA (1)...(19): siRNA sense strand
ggauagcuguuguuucaga

SEQ ID NO: 2060060 - RNA, 19 nt, Homo sapiens
  misc_RNA (1)...(19): siRNA sense strand
ucaaagcaauaccaggaua

SEQ ID NO: 2060061 - RNA, 19 nt, Homo sapiens
  misc_RNA (1)...(19): siRNA sense strand
ggaugaagauggauauacu

SEQ ID NO: 2060062 - RNA, 19 nt, Homo sapiens
  misc_RNA (1)...(19): siRNA sense strand
aaauuuggaugaagaugga

SEQ ID NO: 2060063 - RNA, 19 nt, Homo sapiens
  misc_RNA (1)...(19): siRNA sense strand
ucaauuacacuucgacucu

SEQ ID NO: 2060064 - RNA, 19 nt, Homo sapiens
  misc_RNA (1)...(19): siRNA sense strand
uagcuguuguuucagagaa

SEQ ID NO: 2060065 - RNA, 19 nt, Homo sapiens
  misc_RNA (1)...(19): siRNA sense strand
cuucgacucucaaagcaau

SEQ ID NO: 2060066 - RNA, 19 nt, Homo sapiens
  misc_RNA (1)...(19): siRNA sense strand
caaagcaauaccaggauag

SEQ ID NO: 2060067 - RNA, 19 nt, Homo sapiens
  misc_RNA (1)...(19): siRNA sense strand
ggauauacucaauuacacu

SEQ ID NO: 2060068 - RNA, 19 nt, Homo sapiens
  misc_RNA (1)...(19): siRNA sense strand
gaagauggauauacucaau

SEQ ID NO: 2060069 - RNA, 19 nt, Homo sapiens
  misc_RNA (1)...(19): siRNA sense strand
caggauagcuguuguuuca

SEQ ID NO: 2060070 - RNA, 19 nt, Homo sapiens
  misc_RNA (1)...(19): siRNA sense strand
ggauagcuguuguuucaga

SEQ ID NO: 2060071 - RNA, 19 nt, Homo sapiens
  misc_RNA (1)...(19): siRNA sense strand
ucaaagcaauaccaggaua

SEQ ID NO: 2060072 - RNA, 19 nt, Homo sapiens
  misc_RNA (1)...(19): siRNA sense strand
ggaugaagauggauauacu

SEQ ID NO: 2060073 - RNA, 19 nt, Homo sapiens
  misc_RNA (1)...(19): siRNA sense strand
aaauuuggaugaagaugga

SEQ ID NO: 2060074 - RNA, 19 nt, Homo sapiens
  misc_RNA (1)...(19): siRNA sense strand
ucaauuacacuucgacucu

SEQ ID NO: 2060075 - RNA, 19 nt, Homo sapiens
  misc_RNA (1)...(19): siRNA sense strand
uagcuguuguuucagagaa

SEQ ID NO: 2060076 - RNA, 19 nt, Homo sapiens
  misc_RNA (1)...(19): siRNA sense strand
cuucgacucucaaagcaau

SEQ ID NO: 2060077 - RNA, 19 nt, Homo sapiens
  misc_RNA (1)...(19): siRNA sense strand
caaagcaauaccaggauag

SEQ ID NO: 2060078 - RNA, 19 nt, Homo sapiens
  misc_RNA (1)...(19): siRNA sense strand
ggauauacucaauuacacu

SEQ ID NO: 2060079 - RNA, 19 nt, Homo sapiens
  misc_RNA (1)...(19): siRNA sense strand
gaagauggauauacucaau

SEQ ID NO: 2060080 - RNA, 19 nt, Homo sapiens
  misc_RNA (1)...(19): siRNA sense strand
caggauagcuguuguuuca

SEQ ID NO: 2060081 - RNA, 19 nt, Homo sapiens
  misc_RNA (1)...(19): siRNA sense strand
ggauagcuguuguuucaga

SEQ ID NO: 2060082 - RNA, 19 nt, Homo sapiens
  misc_RNA (1)...(19): siRNA sense strand
ucaaagcaauaccaggaua

SEQ ID NO: 2060083 - RNA, 19 nt, Homo sapiens
  misc_RNA (1)...(19): siRNA sense strand
ggaugaagauggauauacu

SEQ ID NO: 2060084 - RNA, 19 nt, Homo sapiens
  misc_RNA (1)...(19): siRNA sense strand
aaauuuggaugaagaugga

SEQ ID NO: 2060085 - RNA, 19 nt, Homo sapiens
  misc_RNA (1)...(19): siRNA sense strand
ucaauuacacuucgacucu

SEQ ID NO: 2060086 - RNA, 19 nt, Homo sapiens
  misc_RNA (1)...(19): siRNA sense strand
uagcuguuguuucagagaa

SEQ ID NO: 2060087 - RNA, 19 nt, Homo sapiens
  misc_RNA (1)...(19): siRNA sense strand
cuucgacucucaaagcaau

SEQ ID NO: 2060088 - RNA, 19 nt, Homo sapiens
  misc_RNA (1)...(19): siRNA sense strand
caaagcaauaccaggauag

SEQ ID NO: 2060089 - RNA, 19 nt, Homo sapiens
  misc_RNA (1)...(19): siRNA sense strand
ggauauacucaauuacacu

SEQ ID NO: 2060090 - RNA, 19 nt, Homo sapiens
  misc_RNA (1)...(19): siRNA sense strand
gaagauggauauacucaau

SEQ ID NO: 2060091 - RNA, 19 nt, Homo sapiens
  misc_RNA (1)...(19): siRNA sense strand
caggauagcuguuguuuca

SEQ ID NO: 2060092 - RNA, 19 nt, Homo sapiens
  misc_RNA (1)...(19): siRNA sense strand
ggauagcuguuguuucaga

SEQ ID NO: 2060093 - RNA, 19 nt, Homo sapiens
  misc_RNA (1)...(19): siRNA sense strand
ucaaagcaauaccaggaua

SEQ ID NO: 2060094 - RNA, 19 nt, Homo sapiens
  misc_RNA (1)...(19): siRNA sense strand
ggaugaagauggauauacu

SEQ ID NO: 2060095 - RNA, 19 nt, Homo sapiens
  misc_RNA (1)...(19): siRNA sense strand
aaauuuggaugaagaugga

SEQ ID NO: 2060096 - RNA, 19 nt, Homo sapiens
  misc_RNA (1)...(19): siRNA sense strand
ucaauuacacuucgacucu

SEQ ID NO: 2060097 - RNA, 19 nt, Homo sapiens
  misc_RNA (1)...(19): siRNA sense strand
uagcuguuguuucagagaa

SEQ ID NO: 2060098 - RNA, 19 nt, Homo sapiens
  misc_RNA (1)...(19): siRNA sense strand
cuucgacucucaaagcaau

SEQ ID NO: 2060099 - RNA, 19 nt, Homo sapiens
  misc_RNA (1)...(19): siRNA sense strand
caaagcaauaccaggauag

SEQ ID NO: 2060100 - RNA, 19 nt, Homo sapiens
  misc_RNA (1)...(19): siRNA sense strand
ggauauacucaauuacacu

SEQ ID NO: 2060101 - RNA, 19 nt, Homo sapiens
  misc_RNA (1)...(19): siRNA sense strand
gaagauggauauacucaau

SEQ ID NO: 2060102 - RNA, 19 nt, Homo sapiens
  misc_RNA (1)...(19): siRNA sense strand
caggauagcuguuguuuca

SEQ ID NO: 2060103 - RNA, 19 nt, Homo sapiens
  misc_RNA (1)...(19): siRNA sense strand
ggauagcuguuguuucaga

SEQ ID NO: 2060104 - RNA, 19 nt, Homo sapiens
  misc_RNA (1)...(19): siRNA sense strand
ucaaagcaauaccaggaua

SEQ ID NO: 2060105 - RNA, 19 nt, Homo sapiens
  misc_RNA (1)...(19): siRNA sense strand
ggaugaagauggauauacu

SEQ ID NO: 2060106 - RNA, 19 nt, Homo sapiens
  misc_RNA (1)...(19): siRNA sense strand
aaauuuggaugaagaugga

SEQ ID NO: 2060107 - RNA, 19 nt, Homo sapiens
  misc_RNA (1)...(19): siRNA sense strand
ucaauuacacuucgacucu

SEQ ID NO: 2060108 - RNA, 19 nt, Homo sapiens
  misc_RNA (1)...(19): siRNA sense strand
uagcuguuguuucagagaa

SEQ ID NO: 2060109 - RNA, 19 nt, Homo sapiens
  misc_RNA (1)...(19): siRNA sense strand
cuucgacucucaaagcaau

SEQ ID NO: 2060110 - RNA, 19 nt, Homo sapiens
  misc_RNA (1)...(19): siRNA sense strand
caaagcaauaccaggauag

SEQ ID NO: 2060111 - RNA, 19 nt, Homo sapiens
  misc_RNA (1)...(19): siRNA sense strand
ggauauacucaauuacacu

SEQ ID NO: 2060112 - RNA, 19 nt, Homo sapiens
  misc_RNA (1)...(19): siRNA sense strand
gaagauggauauacucaau

SEQ ID NO: 2060113 - RNA, 19 nt, Homo sapiens
  misc_RNA (1)...(19): siRNA sense strand
caggauagcuguuguuuca

SEQ ID NO: 2060114 - RNA, 19 nt, Homo sapiens
  misc_RNA (1)...(19): siRNA sense strand
ggauagcuguuguuucaga

SEQ ID NO: 2060115 - RNA, 19 nt, Homo sapiens
  misc_RNA (1)...(19): siRNA sense strand
ucaaagcaauaccaggaua

SEQ ID NO: 2060116 - RNA, 19 nt, Homo sapiens
  misc_RNA (1)...(19): siRNA sense strand
ggaugaagauggauauacu

SEQ ID NO: 2060117 - RNA, 19 nt, Homo sapiens
  misc_RNA (1)...(19): siRNA sense strand
aaauuuggaugaagaugga

SEQ ID NO: 2060118 - RNA, 19 nt, Homo sapiens
  misc_RNA (1)...(19): siRNA sense strand
ucaauuacacuucgacucu

SEQ ID NO: 2060119 - RNA, 19 nt, Homo sapiens
  misc_RNA (1)...(19): siRNA sense strand
uagcuguuguuucagagaa

SEQ ID NO: 2060120 - RNA, 19 nt, Homo sapiens
  misc_RNA (1)...(19): siRNA sense strand
cuucgacucucaaagcaau

SEQ ID NO: 2060121 - RNA, 19 nt, Homo sapiens
  misc_RNA (1)...(19): siRNA sense strand
caaagcaauaccaggauag

SEQ ID NO: 2060122 - RNA, 19 nt, Homo sapiens
  misc_RNA (1)...(19): siRNA sense strand
ggauauacucaauuacacu

SEQ ID NO: 2060123 - RNA, 19 nt, Homo sapiens
  misc_RNA (1)...(19): siRNA sense strand
gaagauggauauacucaau

SEQ ID NO: 2060124 - RNA, 19 nt, Homo sapiens
  misc_RNA (1)...(19): siRNA sense strand
caggauagcuguuguuuca

SEQ ID NO: 2060125 - RNA, 19 nt, Homo sapiens
  misc_RNA (1)...(19): siRNA sense strand
ggauagcuguuguuucaga

SEQ ID NO: 2060126 - RNA, 19 nt, Homo sapiens
  misc_RNA (1)...(19): siRNA sense strand
ucaaagcaauaccaggaua

SEQ ID NO: 2060127 - RNA, 19 nt, Homo sapiens
  misc_RNA (1)...(19): siRNA sense strand
ggaugaagauggauauacu

SEQ ID NO: 2060128 - RNA, 19 nt, Homo sapiens
  misc_RNA (1)...(19): siRNA sense strand
aaauuuggaugaagaugga

SEQ ID NO: 2060129 - RNA, 19 nt, Homo sapiens
  misc_RNA (1)...(19): siRNA sense strand
ucaauuacacuucgacucu

SEQ ID NO: 2060130 - RNA, 19 nt, Homo sapiens
  misc_RNA (1)...(19): siRNA sense strand
uagcuguuguuucagagaa

SEQ ID NO: 2060131 - RNA, 19 nt, Homo sapiens
  misc_RNA (1)...(19): siRNA sense strand
cuucgacucucaaagcaau

SEQ ID NO: 2060132 - RNA, 19 nt, Homo sapiens
  misc_RNA (1)...(19): siRNA sense strand
caaagcaauaccaggauag

SEQ ID NO: 2060133 - RNA, 19 nt, Homo sapiens
  misc_RNA (1)...(19): siRNA sense strand
ggauauacucaauuacacu

SEQ ID NO: 2060134 - RNA, 19 nt, Homo sapiens
  misc_RNA (1)...(19): siRNA sense strand
gaagauggauauacucaau

SEQ ID NO: 2060135 - RNA, 19 nt, Homo sapiens
  misc_RNA (1)...(19): siRNA sense strand
caggauagcuguuguuuca

SEQ ID NO: 2060136 - RNA, 19 nt, Homo sapiens
  misc_RNA (1)...(19): siRNA sense strand
ggauagcuguuguuucaga

SEQ ID NO: 2060137 - RNA, 19 nt, Homo sapiens
  misc_RNA (1)...(19): siRNA sense strand
ucaaagcaauaccaggaua

SEQ ID NO: 2060138 - RNA, 19 nt, Homo sapiens
  misc_RNA (1)...(19): siRNA sense strand
ggaugaagauggauauacu

SEQ ID NO: 2060139 - RNA, 19 nt, Homo sapiens
  misc_RNA (1)...(19): siRNA sense strand
aaauuuggaugaagaugga

SEQ ID NO: 2060140 - RNA, 19 nt, Homo sapiens
  misc_RNA (1)...(19): siRNA sense strand
ucaauuacacuucgacucu

SEQ ID NO: 2060141 - RNA, 19 nt, Homo sapiens
  misc_RNA (1)...(19): siRNA sense strand
uagcuguuguuucagagaa

SEQ ID NO: 2060142 - RNA, 19 nt, Homo sapiens
  misc_RNA (1)...(19): siRNA sense strand
cuucgacucucaaagcaau

SEQ ID NO: 2060143 - RNA, 19 nt, Homo sapiens
  misc_RNA (1)...(19): siRNA sense strand
caaagcaauaccaggauag

SEQ ID NO: 2060144 - RNA, 19 nt, Homo sapiens
  misc_RNA (1)...(19): siRNA sense strand
ggauauacucaauuacacu

SEQ ID NO: 2060145 - RNA, 19 nt, Homo sapiens
  misc_RNA (1)...(19): siRNA sense strand
gaagauggauauacucaau

SEQ ID NO: 2060146 - RNA, 19 nt, Homo sapiens
  misc_RNA (1)...(19): siRNA sense strand
caggauagcuguuguuuca

SEQ ID NO: 2060147 - RNA, 19 nt, Homo sapiens
  misc_RNA (1)...(19): siRNA sense strand
ggauagcuguuguuucaga

SEQ ID NO: 2060148 - RNA, 19 nt, Homo sapiens
  misc_RNA (1)...(19): siRNA sense strand
ucaaagcaauaccaggaua

SEQ ID NO: 2060149 - RNA, 19 nt, Homo sapiens
  misc_RNA (1)...(19): siRNA sense strand
ggaugaagauggauauacu

SEQ ID NO: 2060150 - RNA, 19 nt, Homo sapiens
  misc_RNA (1)...(19): siRNA sense strand
aaauuuggaugaagaugga

SEQ ID NO: 2060151 - RNA, 19 nt, Homo sapiens
  misc_RNA (1)...(19): siRNA sense strand
ucaauuacacuucgacucu

SEQ ID NO: 2060152 - RNA, 19 nt, Homo sapiens
  misc_RNA (1)...(19): siRNA sense strand
uagcuguuguuucagagaa

SEQ ID NO: 2060153 - RNA, 19 nt, Homo sapiens
  misc_RNA (1)...(19): siRNA sense strand
cuucgacucucaaagcaau

SEQ ID NO: 2060154 - RNA, 19 nt, Homo sapiens
  misc_RNA (1)...(19): siRNA sense strand
caaagcaauaccaggauag

SEQ ID NO: 2060155 - RNA, 19 nt, Homo sapiens
  misc_RNA (1)...(19): siRNA sense strand
ggauauacucaauuacacu

SEQ ID NO: 2060156 - RNA, 19 nt, Homo sapiens
  misc_RNA (1)...(19): siRNA sense strand
gaagauggauauacucaau

SEQ ID NO: 2060157 - RNA, 19 nt, Homo sapiens
  misc_RNA (1)...(19): siRNA sense strand
caggauagcuguuguuuca

SEQ ID NO: 2060158 - RNA, 19 nt, Homo sapiens
  misc_RNA (1)...(19): siRNA sense strand
ggauagcuguuguuucaga

SEQ ID NO: 2060159 - RNA, 19 nt, Homo sapiens
  misc_RNA (1)...(19): siRNA sense strand
ucaaagcaauaccaggaua

SEQ ID NO: 2060160 - RNA, 19 nt, Homo sapiens
  misc_RNA (1)...(19): siRNA sense strand
ggaugaagauggauauacu

SEQ ID NO: 2060161 - RNA, 19 nt, Homo sapiens
  misc_RNA (1)...(19): siRNA sense strand
aaauuuggaugaagaugga

SEQ ID NO: 2060162 - RNA, 19 nt, Homo sapiens
  misc_RNA (1)...(19): siRNA sense strand
ucaauuacacuucgacucu

SEQ ID NO: 2060163 - RNA, 19 nt, Homo sapiens
  misc_RNA (1)...(19): siRNA sense strand
uagcuguuguuucagagaa

SEQ ID NO: 2060164 - RNA, 19 nt, Homo sapiens
  misc_RNA (1)...(19): siRNA sense strand
cuucgacucucaaagcaau

SEQ ID NO: 2060165 - RNA, 19 nt, Homo sapiens
  misc_RNA (1)...(19): siRNA sense strand
caaagcaauaccaggauag

SEQ ID NO: 2060166 - RNA, 19 nt, Homo sapiens
  misc_RNA (1)...(19): siRNA sense strand
ggauauacucaauuacacu

SEQ ID NO: 2060167 - RNA, 19 nt, Homo sapiens
  misc_RNA (1)...(19): siRNA sense strand
gaagauggauauacucaau

SEQ ID NO: 2060168 - RNA, 19 nt, Homo sapiens
  misc_RNA (1)...(19): siRNA sense strand
caggauagcuguuguuuca

SEQ ID NO: 2060169 - RNA, 19 nt, Homo sapiens
  misc_RNA (1)...(19): siRNA sense strand
ggauagcuguuguuucaga

SEQ ID NO: 2060170 - RNA, 19 nt, Homo sapiens
  misc_RNA (1)...(19): siRNA sense strand
ucaaagcaauaccaggaua

SEQ ID NO: 2060171 - RNA, 19 nt, Homo sapiens
  misc_RNA (1)...(19): siRNA sense strand
ggaugaagauggauauacu

SEQ ID NO: 2060172 - RNA, 19 nt, Homo sapiens
  misc_RNA (1)...(19): siRNA sense strand
aaauuuggaugaagaugga

SEQ ID NO: 2060173 - RNA, 19 nt, Homo sapiens
  misc_RNA (1)...(19): siRNA sense strand
ucaauuacacuucgacucu

SEQ ID NO: 2060174 - RNA, 19 nt, Homo sapiens
  misc_RNA (1)...(19): siRNA sense strand
uagcuguuguuucagagaa

SEQ ID NO: 2060175 - RNA, 19 nt, Homo sapiens
  misc_RNA (1)...(19): siRNA sense strand
cuucgacucucaaagcaau

SEQ ID NO: 2060176 - RNA, 19 nt, Homo sapiens
  misc_RNA (1)...(19): siRNA sense strand
caaagcaauaccaggauag

SEQ ID NO: 2060177 - RNA, 19 nt, Homo sapiens
  misc_RNA (1)...(19): siRNA sense strand
ggauauacucaauuacacu

SEQ ID NO: 2060178 - RNA, 19 nt, Homo sapiens
  misc_RNA (1)...(19): siRNA sense strand
gaagauggauauacucaau

SEQ ID NO: 2060179 - RNA, 19 nt, Homo sapiens
  misc_RNA (1)...(19): siRNA sense strand
caggauagcuguuguuuca

SEQ ID NO: 2060180 - RNA, 19 nt, Homo sapiens
  misc_RNA (1)...(19): siRNA sense strand
ggauagcuguuguuucaga

SEQ ID NO: 2060181 - RNA, 19 nt, Homo sapiens
  misc_RNA (1)...(19): siRNA sense strand
ucaaagcaauaccaggaua

SEQ ID NO: 2060182 - RNA, 19 nt, Homo sapiens
  misc_RNA (1)...(19): siRNA sense strand
ggaugaagauggauauacu

SEQ ID NO: 2060183 - RNA, 19 nt, Homo sapiens
  misc_RNA (1)...(19): siRNA sense strand
aaauuuggaugaagaugga

SEQ ID NO: 2060184 - RNA, 19 nt, Homo sapiens
  misc_RNA (1)...(19): siRNA sense strand
ucaauuacacuucgacucu

SEQ ID NO: 2060185 - RNA, 19 nt, Homo sapiens
  misc_RNA (1)...(19): siRNA sense strand
uagcuguuguuucagagaa

SEQ ID NO: 2060186 - RNA, 19 nt, Homo sapiens
  misc_RNA (1)...(19): siRNA sense strand
cuucgacucucaaagcaau

SEQ ID NO: 2060187 - RNA, 19 nt, Homo sapiens
  misc_RNA (1)...(19): siRNA sense strand
caaagcaauaccaggauag

SEQ ID NO: 2060188 - RNA, 19 nt, Homo sapiens
  misc_RNA (1)...(19): siRNA sense strand
ggauauacucaauuacacu

SEQ ID NO: 2060189 - RNA, 19 nt, Homo sapiens
  misc_RNA (1)...(19): siRNA sense strand
gaagauggauauacucaau

SEQ ID NO: 2060190 - RNA, 19 nt, Homo sapiens
  misc_RNA (1)...(19): siRNA sense strand
caggauagcuguuguuuca

SEQ ID NO: 2060191 - RNA, 19 nt, Homo sapiens
  misc_RNA (1)...(19): siRNA sense strand
ggauagcuguuguuucaga

SEQ ID NO: 2060192 - RNA, 19 nt, Homo sapiens
  misc_RNA (1)...(19): siRNA sense strand
ucaaagcaauaccaggaua

SEQ ID NO: 2060193 - RNA, 19 nt, Homo sapiens
  misc_RNA (1)...(19): siRNA sense strand
ggaugaagauggauauacu

SEQ ID NO: 2060194 - RNA, 19 nt, Homo sapiens
  misc_RNA (1)...(19): siRNA sense strand
aaauuuggaugaagaugga

SEQ ID NO: 2060195 - RNA, 19 nt, Homo sapiens
  misc_RNA (1)...(19): siRNA sense strand
ucaauuacacuucgacucu

SEQ ID NO: 2060196 - RNA, 19 nt, Homo sapiens
  misc_RNA (1)...(19): siRNA sense strand
uagcuguuguuucagagaa

SEQ ID NO: 2060197 - RNA, 19 nt, Homo sapiens
  misc_RNA (1)...(19): siRNA sense strand
cuucgacucucaaagcaau

SEQ ID NO: 2060198 - RNA, 19 nt, Homo sapiens
  misc_RNA (1)...(19): siRNA sense strand
caaagcaauaccaggauag

SEQ ID NO: 2060199 - RNA, 19 nt, Homo sapiens
  misc_RNA (1)...(19): siRNA sense strand
ggauauacucaauuacacu

SEQ ID NO: 2060200 - RNA, 19 nt, Homo sapiens
  misc_RNA (1)...(19): siRNA sense strand
gaagauggauauacucaau

SEQ ID NO: 2060201 - RNA, 19 nt, Homo sapiens
  misc_RNA (1)...(19): siRNA sense strand
caggauagcuguuguuuca

SEQ ID NO: 2060202 - RNA, 19 nt, Homo sapiens
  misc_RNA (1)...(19): siRNA sense strand
ggauagcuguuguuucaga

SEQ ID NO: 2060203 - RNA, 19 nt, Homo sapiens
  misc_RNA (1)...(19): siRNA sense strand
ucaaagcaauaccaggaua

SEQ ID NO: 2060204 - RNA, 19 nt, Homo sapiens
  misc_RNA (1)...(19): siRNA sense strand
ggaugaagauggauauacu

SEQ ID NO: 2060205 - RNA, 19 nt, Homo sapiens
  misc_RNA (1)...(19): siRNA sense strand
aaauuuggaugaagaugga

SEQ ID NO: 2060206 - RNA, 19 nt, Homo sapiens
  misc_RNA (1)...(19): siRNA sense strand
ucaauuacacuucgacucu

SEQ ID NO: 2060207 - RNA, 19 nt, Homo sapiens
  misc_RNA (1)...(19): siRNA sense strand
uagcuguuguuucagagaa

SEQ ID NO: 2060208 - RNA, 19 nt, Homo sapiens
  misc_RNA (1)...(19): siRNA sense strand
cuucgacucucaaagcaau

SEQ ID NO: 2060209 - RNA, 19 nt, Homo sapiens
  misc_RNA (1)...(19): siRNA sense strand
caaagcaauaccaggauag

SEQ ID NO: 2060210 - RNA, 19 nt, Homo sapiens
  misc_RNA (1)...(19): siRNA sense strand
ggauauacucaauuacacu

SEQ ID NO: 2060211 - RNA, 19 nt, Homo sapiens
  misc_RNA (1)...(19): siRNA sense strand
gaagauggauauacucaau

SEQ ID NO: 2060212 - RNA, 19 nt, Homo sapiens
  misc_RNA (1)...(19): siRNA sense strand
caggauagcuguuguuuca

SEQ ID NO: 2060213 - RNA, 19 nt, Homo sapiens
  misc_RNA (1)...(19): siRNA sense strand
ggauagcuguuguuucaga

SEQ ID NO: 2060214 - RNA, 19 nt, Homo sapiens
  misc_RNA (1)...(19): siRNA sense strand
ucaaagcaauaccaggaua

SEQ ID NO: 2060215 - RNA, 19 nt, Homo sapiens
  misc_RNA (1)...(19): siRNA sense strand
ggaugaagauggauauacu

SEQ ID NO: 2060216 - RNA, 19 nt, Homo sapiens
  misc_RNA (1)...(19): siRNA sense strand
aaauuuggaugaagaugga

SEQ ID NO: 2060217 - RNA, 19 nt, Homo sapiens
  misc_RNA (1)...(19): siRNA sense strand
ucaauuacacuucgacucu

SEQ ID NO: 2060218 - RNA, 19 nt, Homo sapiens
  misc_RNA (1)...(19): siRNA sense strand
uagcuguuguuucagagaa

SEQ ID NO: 2060219 - RNA, 19 nt, Homo sapiens
  misc_RNA (1)...(19): siRNA sense strand
cuucgacucucaaagcaau

SEQ ID NO: 2060220 - RNA, 19 nt, Homo sapiens
  misc_RNA (1)...(19): siRNA sense strand
caaagcaauaccaggauag

SEQ ID NO: 2060221 - RNA, 19 nt, Homo sapiens
  misc_RNA (1)...(19): siRNA sense strand
ggauauacucaauuacacu

SEQ ID NO: 2060222 - RNA, 19 nt, Homo sapiens
  misc_RNA (1)...(19): siRNA sense strand
gaagauggauauacucaau

SEQ ID NO: 2060223 - RNA, 19 nt, Homo sapiens
  misc_RNA (1)...(19): siRNA sense strand
caggauagcuguuguuuca

SEQ ID NO: 2060224 - RNA, 19 nt, Homo sapiens
  misc_RNA (1)...(19): siRNA sense strand
ggauagcuguuguuucaga

SEQ ID NO: 2060225 - RNA, 19 nt, Homo sapiens
  misc_RNA (1)...(19): siRNA sense strand
ucaaagcaauaccaggaua

SEQ ID NO: 2060226 - RNA, 19 nt, Homo sapiens
  misc_RNA (1)...(19): siRNA sense strand
ggaugaagauggauauacu

SEQ ID NO: 2060227 - RNA, 19 nt, Homo sapiens
  misc_RNA (1)...(19): siRNA sense strand
aaauuuggaugaagaugga

SEQ ID NO: 2060228 - RNA, 19 nt, Homo sapiens
  misc_RNA (1)...(19): siRNA sense strand
ucaauuacacuucgacucu

SEQ ID NO: 2060229 - RNA, 19 nt, Homo sapiens
  misc_RNA (1)...(19): siRNA sense strand
uagcuguuguuucagagaa

SEQ ID NO: 2060230 - RNA, 19 nt, Homo sapiens
  misc_RNA (1)...(19): siRNA sense strand
cuucgacucucaaagcaau

SEQ ID NO: 2060231 - RNA, 19 nt, Homo sapiens
  misc_RNA (1)...(19): siRNA sense strand
caaagcaauaccaggauag

SEQ ID NO: 2060232 - RNA, 19 nt, Homo sapiens
  misc_RNA (1)...(19): siRNA sense strand
ggauauacucaauuacacu

SEQ ID NO: 2060233 - RNA, 19 nt, Homo sapiens
  misc_RNA (1)...(19): siRNA sense strand
gaagauggauauacucaau

SEQ ID NO: 2060234 - RNA, 19 nt, Homo sapiens
  misc_RNA (1)...(19): siRNA sense strand
caggauagcuguuguuuca

SEQ ID NO: 2060235 - RNA, 19 nt, Homo sapiens
  misc_RNA (1)...(19): siRNA sense strand
ggauagcuguuguuucaga

SEQ ID NO: 2060236 - RNA, 19 nt, Homo sapiens
  misc_RNA (1)...(19): siRNA sense strand
ucaaagcaauaccaggaua

SEQ ID NO: 2060237 - RNA, 19 nt, Homo sapiens
  misc_RNA (1)...(19): siRNA sense strand
ggaugaagauggauauacu

SEQ ID NO: 2060238 - RNA, 19 nt, Homo sapiens
  misc_RNA (1)...(19): siRNA sense strand
aaauuuggaugaagaugga

SEQ ID NO: 2060239 - RNA, 19 nt, Homo sapiens
  misc_RNA (1)...(19): siRNA sense strand
ucaauuacacuucgacucu

SEQ ID NO: 2060240 - RNA, 19 nt, Homo sapiens
  misc_RNA (1)...(19): siRNA sense strand
uagcuguuguuucagagaa

SEQ ID NO: 2060241 - RNA, 19 nt, Homo sapiens
  misc_RNA (1)...(19): siRNA sense strand
cuucgacucucaaagcaau

SEQ ID NO: 2060242 - RNA, 19 nt, Homo sapiens
  misc_RNA (1)...(19): siRNA sense strand
caaagcaauaccaggauag

SEQ ID NO: 2060243 - RNA, 19 nt, Homo sapiens
  misc_RNA (1)...(19): siRNA sense strand
ggauauacucaauuacacu

SEQ ID NO: 2060244 - RNA, 19 nt, Homo sapiens
  misc_RNA (1)...(19): siRNA sense strand
gaagauggauauacucaau

SEQ ID NO: 2060245 - RNA, 19 nt, Homo sapiens
  misc_RNA (1)...(19): siRNA sense strand
caggauagcuguuguuuca

SEQ ID NO: 2060246 - RNA, 19 nt, Homo sapiens
  misc_RNA (1)...(19): siRNA sense strand
ggauagcuguuguuucaga

SEQ ID NO: 2060247 - RNA, 19 nt, Homo sapiens
  misc_RNA (1)...(19): siRNA sense strand
ucaaagcaauaccaggaua

SEQ ID NO: 2060248 - RNA, 19 nt, Homo sapiens
  misc_RNA (1)...(19): siRNA sense strand
ggaugaagauggauauacu

SEQ ID NO: 2060249 - RNA, 19 nt, Homo sapiens
  misc_RNA (1)...(19): siRNA sense strand
aaauuuggaugaagaugga

SEQ ID NO: 2060250 - RNA, 19 nt, Homo sapiens
  misc_RNA (1)...(19): siRNA sense strand
ucaauuacacuucgacucu

SEQ ID NO: 2060251 - RNA, 19 nt, Homo sapiens
  misc_RNA (1)...(19): siRNA sense strand
uagcuguuguuucagagaa

SEQ ID NO: 2060252 - RNA, 19 nt, Homo sapiens
  misc_RNA (1)...(19): siRNA sense strand
cuucgacucucaaagcaau

SEQ ID NO: 2060253 - RNA, 19 nt, Homo sapiens
  misc_RNA (1)...(19): siRNA sense strand
caaagcaauaccaggauag

SEQ ID NO: 2060254 - RNA, 19 nt, Homo sapiens
  misc_RNA (1)...(19): siRNA sense strand
ggauauacucaauuacacu

SEQ ID NO: 2060255 - RNA, 19 nt, Homo sapiens
  misc_RNA (1)...(19): siRNA sense strand
gaagauggauauacucaau

SEQ ID NO: 2060256 - RNA, 19 nt, Homo sapiens
  misc_RNA (1)...(19): siRNA sense strand
caggauagcuguuguuuca

SEQ ID NO: 2060257 - RNA, 19 nt, Homo sapiens
  misc_RNA (1)...(19): siRNA sense strand
ggauagcuguuguuucaga

SEQ ID NO: 2060258 - RNA, 19 nt, Homo sapiens
  misc_RNA (1)...(19): siRNA sense strand
ucaaagcaauaccaggaua

SEQ ID NO: 2060259 - RNA, 19 nt, Homo sapiens
  misc_RNA (1)...(19): siRNA sense strand
ggaugaagauggauauacu

SEQ ID NO: 2060260 - RNA, 19 nt, Homo sapiens
  misc_RNA (1)...(19): siRNA sense strand
aaauuuggaugaagaugga

SEQ ID NO: 2060261 - RNA, 19 nt, Homo sapiens
  misc_RNA (1)...(19): siRNA sense strand
ucaauuacacuucgacucu

SEQ ID NO: 2060262 - RNA, 19 nt, Homo sapiens
  misc_RNA (1)...(19): siRNA sense strand
uagcuguuguuucagagaa

SEQ ID NO: 2060263 - RNA, 19 nt, Homo sapiens
  misc_RNA (1)...(19): siRNA sense strand
cuucgacucucaaagcaau

SEQ ID NO: 2060264 - RNA, 19 nt, Homo sapiens
  misc_RNA (1)...(19): siRNA sense strand
caaagcaauaccaggauag

SEQ ID NO: 2060265 - RNA, 19 nt, Homo sapiens
  misc_RNA (1)...(19): siRNA sense strand
ggauauacucaauuacacu

SEQ ID NO: 2060266 - RNA, 19 nt, Homo sapiens
  misc_RNA (1)...(19): siRNA sense strand
gaagauggauauacucaau

SEQ ID NO: 2060267 - RNA, 19 nt, Homo sapiens
  misc_RNA (1)...(19): siRNA sense strand
caggauagcuguuguuuca

SEQ ID NO: 2060268 - RNA, 19 nt, Homo sapiens
  misc_RNA (1)...(19): siRNA sense strand
ggauagcuguuguuucaga

SEQ ID NO: 2060269 - RNA, 19 nt, Homo sapiens
  misc_RNA (1)...(19): siRNA sense strand
ucaaagcaauaccaggaua

SEQ ID NO: 2060270 - RNA, 19 nt, Homo sapiens
  misc_RNA (1)...(19): siRNA sense strand
ggaugaagauggauauacu

SEQ ID NO: 2060271 - RNA, 19 nt, Homo sapiens
  misc_RNA (1)...(19): siRNA sense strand
aaauuuggaugaagaugga

SEQ ID NO: 2060272 - RNA, 19 nt, Homo sapiens
  misc_RNA (1)...(19): siRNA sense strand
ucaauuacacuucgacucu

SEQ ID NO: 2060273 - RNA, 19 nt, Homo sapiens
  misc_RNA (1)...(19): siRNA sense strand
uagcuguuguuucagagaa

SEQ ID NO: 2060274 - RNA, 19 nt, Homo sapiens
  misc_RNA (1)...(19): siRNA sense strand
cuucgacucucaaagcaau

SEQ ID NO: 2060275 - RNA, 19 nt, Homo sapiens
  misc_RNA (1)...(19): siRNA sense strand
caaagcaauaccaggauag

SEQ ID NO: 2060276 - RNA, 19 nt, Homo sapiens
  misc_RNA (1)...(19): siRNA sense strand
ggauauacucaauuacacu

SEQ ID NO: 2060277 - RNA, 19 nt, Homo sapiens
  misc_RNA (1)...(19): siRNA sense strand
gaagauggauauacucaau

SEQ ID NO: 2060278 - RNA, 19 nt, Homo sapiens
  misc_RNA (1)...(19): siRNA sense strand
caggauagcuguuguuuca

SEQ ID NO: 2060279 - RNA, 19 nt, Homo sapiens
  misc_RNA (1)...(19): siRNA sense strand
ggauagcuguuguuucaga

SEQ ID NO: 2060280 - RNA, 19 nt, Homo sapiens
  misc_RNA (1)...(19): siRNA sense strand
ucaaagcaauaccaggaua

SEQ ID NO: 2060281 - RNA, 19 nt, Homo sapiens
  misc_RNA (1)...(19): siRNA sense strand
ggaugaagauggauauacu

SEQ ID NO: 2060282 - RNA, 19 nt, Homo sapiens
  misc_RNA (1)...(19): siRNA sense strand
aaauuuggaugaagaugga

SEQ ID NO: 2060283 - RNA, 19 nt, Homo sapiens
  misc_RNA (1)...(19): siRNA sense strand
ucaauuacacuucgacucu

SEQ ID NO: 2060284 - RNA, 19 nt, Homo sapiens
  misc_RNA (1)...(19): siRNA sense strand
uagcuguuguuucagagaa

SEQ ID NO: 2060285 - RNA, 19 nt, Homo sapiens
  misc_RNA (1)...(19): siRNA sense strand
cuucgacucucaaagcaau

SEQ ID NO: 2060286 - RNA, 19 nt, Homo sapiens
  misc_RNA (1)...(19): siRNA sense strand
caaagcaauaccaggauag

SEQ ID NO: 2060287 - RNA, 19 nt, Homo sapiens
  misc_RNA (1)...(19): siRNA sense strand
ggauauacucaauuacacu

SEQ ID NO: 2060288 - RNA, 19 nt, Homo sapiens
  misc_RNA (1)...(19): siRNA sense strand
gaagauggauauacucaau

SEQ ID NO: 2060289 - RNA, 19 nt, Homo sapiens
  misc_RNA (1)...(19): siRNA sense strand
caggauagcuguuguuuca

SEQ ID NO: 2060290 - RNA, 19 nt, Homo sapiens
  misc_RNA (1)...(19): siRNA sense strand
ggauagcuguuguuucaga

SEQ ID NO: 2060291 - RNA, 19 nt, Homo sapiens
  misc_RNA (1)...(19): siRNA sense strand
ucaaagcaauaccaggaua

SEQ ID NO: 2060292 - RNA, 19 nt, Homo sapiens
  misc_RNA (1)...(19): siRNA sense strand
ggaugaagauggauauacu

SEQ ID NO: 2060293 - RNA, 19 nt, Homo sapiens
  misc_RNA (1)...(19): siRNA sense strand
aaauuuggaugaagaugga

SEQ ID NO: 2060294 - RNA, 19 nt, Homo sapiens
  misc_RNA (1)...(19): siRNA sense strand
ucaauuacacuucgacucu

SEQ ID NO: 2060295 - RNA, 19 nt, Homo sapiens
  misc_RNA (1)...(19): siRNA sense strand
uagcuguuguuucagagaa

SEQ ID NO: 2060296 - RNA, 19 nt, Homo sapiens
  misc_RNA (1)...(19): siRNA sense strand
cuucgacucucaaagcaau

SEQ ID NO: 2060297 - RNA, 19 nt, Homo sapiens
  misc_RNA (1)...(19): siRNA sense strand
caaagcaauaccaggauag

SEQ ID NO: 2060298 - RNA, 19 nt, Homo sapiens
  misc_RNA (1)...(19): siRNA sense strand
ggauauacucaauuacacu

SEQ ID NO: 2060299 - RNA, 19 nt, Homo sapiens
  misc_RNA (1)...(19): siRNA sense strand
gaagauggauauacucaau

SEQ ID NO: 2060300 - RNA, 19 nt, Homo sapiens
  misc_RNA (1)...(19): siRNA sense strand
caggauagcuguuguuuca

SEQ ID NO: 2060301 - RNA, 19 nt, Homo sapiens
  misc_RNA (1)...(19): siRNA sense strand
ggauagcuguuguuucaga

SEQ ID NO: 2060302 - RNA, 19 nt, Homo sapiens
  misc_RNA (1)...(19): siRNA sense strand
ucaaagcaauaccaggaua

SEQ ID NO: 2060303 - RNA, 19 nt, Homo sapiens
  misc_RNA (1)...(19): siRNA sense strand
ggaugaagauggauauacu

SEQ ID NO: 2060304 - RNA, 19 nt, Homo sapiens
  misc_RNA (1)...(19): siRNA sense strand
aaauuuggaugaagaugga

SEQ ID NO: 2060305 - RNA, 19 nt, Homo sapiens
  misc_RNA (1)...(19): siRNA sense strand
ucaauuacacuucgacucu

SEQ ID NO: 2060306 - RNA, 19 nt, Homo sapiens
  misc_RNA (1)...(19): siRNA sense strand
uagcuguuguuucagagaa

SEQ ID NO: 2060307 - RNA, 19 nt, Homo sapiens
  misc_RNA (1)...(19): siRNA sense strand
cuucgacucucaaagcaau

SEQ ID NO: 2060308 - RNA, 19 nt, Homo sapiens
  misc_RNA (1)...(19): siRNA sense strand
caaagcaauaccaggauag

SEQ ID NO: 2060309 - RNA, 19 nt, Homo sapiens
  misc_RNA (1)...(19): siRNA sense strand
ggauauacucaauuacacu

SEQ ID NO: 2060310 - RNA, 19 nt, Homo sapiens
  misc_RNA (1)...(19): siRNA sense strand
gaagauggauauacucaau

SEQ ID NO: 2060311 - RNA, 19 nt, Homo sapiens
  misc_RNA (1)...(19): siRNA sense strand
caggauagcuguuguuuca

SEQ ID NO: 2060312 - RNA, 19 nt, Homo sapiens
  misc_RNA (1)...(19): siRNA sense strand
ggauagcuguuguuucaga

SEQ ID NO: 2060313 - RNA, 19 nt, Homo sapiens
  misc_RNA (1)...(19): siRNA sense strand
ucaaagcaauaccaggaua

SEQ ID NO: 2060314 - RNA, 19 nt, Homo sapiens
  misc_RNA (1)...(19): siRNA sense strand
ggaugaagauggauauacu

SEQ ID NO: 2060315 - RNA, 19 nt, Homo sapiens
  misc_RNA (1)...(19): siRNA sense strand
aaauuuggaugaagaugga

SEQ ID NO: 2060316 - RNA, 19 nt, Homo sapiens
  misc_RNA (1)...(19): siRNA sense strand
ucaauuacacuucgacucu

SEQ ID NO: 2060317 - RNA, 19 nt, Homo sapiens
  misc_RNA (1)...(19): siRNA sense strand
uagcuguuguuucagagaa

SEQ ID NO: 2060318 - RNA, 19 nt, Homo sapiens
  misc_RNA (1)...(19): siRNA sense strand
cuucgacucucaaagcaau

SEQ ID NO: 2060319 - RNA, 19 nt, Homo sapiens
  misc_RNA (1)...(19): siRNA sense strand
caaagcaauaccaggauag

SEQ ID NO: 2060320 - RNA, 19 nt, Homo sapiens
  misc_RNA (1)...(19): siRNA sense strand
ggauauacucaauuacacu

SEQ ID NO: 2060321 - RNA, 19 nt, Homo sapiens
  misc_RNA (1)...(19): siRNA sense strand
gaagauggauauacucaau

SEQ ID NO: 2060322 - RNA, 19 nt, Homo sapiens
  misc_RNA (1)...(19): siRNA sense strand
caggauagcuguuguuuca

SEQ ID NO: 2060323 - RNA, 19 nt, Homo sapiens
  misc_RNA (1)...(19): siRNA sense strand
ggauagcuguuguuucaga

SEQ ID NO: 2060324 - RNA, 19 nt, Homo sapiens
  misc_RNA (1)...(19): siRNA sense strand
ucaaagcaauaccaggaua

SEQ ID NO: 2060325 - RNA, 19 nt, Homo sapiens
  misc_RNA (1)...(19): siRNA sense strand
ggaugaagauggauauacu

SEQ ID NO: 2060326 - RNA, 19 nt, Homo sapiens
  misc_RNA (1)...(19): siRNA sense strand
aaauuuggaugaagaugga

SEQ ID NO: 2060327 - RNA, 19 nt, Homo sapiens
  misc_RNA (1)...(19): siRNA sense strand
ucaauuacacuucgacucu

SEQ ID NO: 2060328 - RNA, 19 nt, Homo sapiens
  misc_RNA (1)...(19): siRNA sense strand
uagcuguuguuucagagaa

SEQ ID NO: 2060329 - RNA, 19 nt, Homo sapiens
  misc_RNA (1)...(19): siRNA sense strand
cuucgacucucaaagcaau

SEQ ID NO: 2060330 - RNA, 19 nt, Homo sapiens
  misc_RNA (1)...(19): siRNA sense strand
caaagcaauaccaggauag

SEQ ID NO: 2060331 - RNA, 19 nt, Homo sapiens
  misc_RNA (1)...(19): siRNA sense strand
ggauauacucaauuacacu

SEQ ID NO: 2060332 - RNA, 19 nt, Homo sapiens
  misc_RNA (1)...(19): siRNA sense strand
gaagauggauauacucaau

SEQ ID NO: 2060333 - RNA, 19 nt, Homo sapiens
  misc_RNA (1)...(19): siRNA sense strand
caggauagcuguuguuuca

SEQ ID NO: 2060334 - RNA, 19 nt, Homo sapiens
  misc_RNA (1)...(19): siRNA sense strand
ggauagcuguuguuucaga

SEQ ID NO: 2060335 - RNA, 19 nt, Homo sapiens
  misc_RNA (1)...(19): siRNA sense strand
ucaaagcaauaccaggaua

SEQ ID NO: 2060336 - RNA, 19 nt, Homo sapiens
  misc_RNA (1)...(19): siRNA sense strand
ggaugaagauggauauacu

SEQ ID NO: 2060337 - RNA, 19 nt, Homo sapiens
  misc_RNA (1)...(19): siRNA sense strand
aaauuuggaugaagaugga

SEQ ID NO: 2060338 - RNA, 19 nt, Homo sapiens
  misc_RNA (1)...(19): siRNA sense strand
ucaauuacacuucgacucu

SEQ ID NO: 2060339 - RNA, 19 nt, Homo sapiens
  misc_RNA (1)...(19): siRNA sense strand
uagcuguuguuucagagaa

SEQ ID NO: 2060340 - RNA, 19 nt, Homo sapiens
  misc_RNA (1)...(19): siRNA sense strand
cuucgacucucaaagcaau

SEQ ID NO: 2060341 - RNA, 19 nt, Homo sapiens
  misc_RNA (1)...(19): siRNA sense strand
caaagcaauaccaggauag

SEQ ID NO: 2060342 - RNA, 19 nt, Homo sapiens
  misc_RNA (1)...(19): siRNA sense strand
ggauauacucaauuacacu

SEQ ID NO: 2060343 - RNA, 19 nt, Homo sapiens
  misc_RNA (1)...(19): siRNA sense strand
gaagauggauauacucaau

SEQ ID NO: 2060344 - RNA, 19 nt, Homo sapiens
  misc_RNA (1)...(19): siRNA sense strand
caggauagcuguuguuuca

SEQ ID NO: 2060345 - RNA, 19 nt, Homo sapiens
  misc_RNA (1)...(19): siRNA sense strand
ggauagcuguuguuucaga

SEQ ID NO: 2060346 - RNA, 19 nt, Homo sapiens
  misc_RNA (1)...(19): siRNA sense strand
ucaaagcaauaccaggaua

SEQ ID NO: 2060347 - RNA, 19 nt, Homo sapiens
  misc_RNA (1)...(19): siRNA sense strand
ggaugaagauggauauacu

SEQ ID NO: 2060348 - RNA, 19 nt, Homo sapiens
  misc_RNA (1)...(19): siRNA sense strand
aaauuuggaugaagaugga

SEQ ID NO: 2060349 - RNA, 19 nt, Homo sapiens
  misc_RNA (1)...(19): siRNA sense strand
ucaauuacacuucgacucu

SEQ ID NO: 2060350 - RNA, 19 nt, Homo sapiens
  misc_RNA (1)...(19): siRNA sense strand
uagcuguuguuucagagaa

SEQ ID NO: 2060351 - RNA, 19 nt, Homo sapiens
  misc_RNA (1)...(19): siRNA sense strand
cuucgacucucaaagcaau

SEQ ID NO: 2060352 - RNA, 19 nt, Homo sapiens
  misc_RNA (1)...(19): siRNA sense strand
caaagcaauaccaggauag

SEQ ID NO: 2060353 - RNA, 19 nt, Homo sapiens
  misc_RNA (1)...(19): siRNA sense strand
ggauauacucaauuacacu

SEQ ID NO: 2060354 - RNA, 19 nt, Homo sapiens
  misc_RNA (1)...(19): siRNA sense strand
gaagauggauauacucaau

SEQ ID NO: 2060355 - RNA, 19 nt, Homo sapiens
  misc_RNA (1)...(19): siRNA sense strand
caggauagcuguuguuuca

SEQ ID NO: 2060356 - RNA, 19 nt, Homo sapiens
  misc_RNA (1)...(19): siRNA sense strand
ggauagcuguuguuucaga

SEQ ID NO: 2060357 - RNA, 19 nt, Homo sapiens
  misc_RNA (1)...(19): siRNA sense strand
ucaaagcaauaccaggaua

SEQ ID NO: 2060358 - RNA, 19 nt, Homo sapiens
  misc_RNA (1)...(19): siRNA sense strand
ggaugaagauggauauacu

SEQ ID NO: 2060359 - RNA, 19 nt, Homo sapiens
  misc_RNA (1)...(19): siRNA sense strand
aaauuuggaugaagaugga

SEQ ID NO: 2060360 - RNA, 19 nt, Homo sapiens
  misc_RNA (1)...(19): siRNA sense strand
ucaauuacacuucgacucu

SEQ ID NO: 2060361 - RNA, 19 nt, Homo sapiens
  misc_RNA (1)...(19): siRNA sense strand
uagcuguuguuucagagaa

SEQ ID NO: 2060362 - RNA, 19 nt, Homo sapiens
  misc_RNA (1)...(19): siRNA sense strand
cuucgacucucaaagcaau

SEQ ID NO: 2060363 - RNA, 19 nt, Homo sapiens
  misc_RNA (1)...(19): siRNA sense strand
caaagcaauaccaggauag

SEQ ID NO: 2060364 - RNA, 19 nt, Homo sapiens
  misc_RNA (1)...(19): siRNA sense strand
ggauauacucaauuacacu

SEQ ID NO: 2060365 - RNA, 19 nt, Homo sapiens
  misc_RNA (1)...(19): siRNA sense strand
gaagauggauauacucaau

SEQ ID NO: 2060366 - RNA, 19 nt, Homo sapiens
  misc_RNA (1)...(19): siRNA sense strand
caggauagcuguuguuuca

SEQ ID NO: 2060367 - RNA, 19 nt, Homo sapiens
  misc_RNA (1)...(19): siRNA sense strand
ggauagcuguuguuucaga

SEQ ID NO: 2060368 - RNA, 19 nt, Homo sapiens
  misc_RNA (1)...(19): siRNA sense strand
ucaaagcaauaccaggaua

SEQ ID NO: 2060369 - RNA, 19 nt, Homo sapiens
  misc_RNA (1)...(19): siRNA sense strand
ggaugaagauggauauacu

SEQ ID NO: 2060370 - RNA, 19 nt, Homo sapiens
  misc_RNA (1)...(19): siRNA sense strand
aaauuuggaugaagaugga

SEQ ID NO: 2060371 - RNA, 19 nt, Homo sapiens
  misc_RNA (1)...(19): siRNA sense strand
ucaauuacacuucgacucu

SEQ ID NO: 2060372 - RNA, 19 nt, Homo sapiens
  misc_RNA (1)...(19): siRNA sense strand
uagcuguuguuucagagaa

SEQ ID NO: 2060373 - RNA, 19 nt, Homo sapiens
  misc_RNA (1)...(19): siRNA sense strand
cuucgacucucaaagcaau

SEQ ID NO: 2060374 - RNA, 19 nt, Homo sapiens
  misc_RNA (1)...(19): siRNA sense strand
caaagcaauaccaggauag

SEQ ID NO: 2060375 - RNA, 19 nt, Homo sapiens
  misc_RNA (1)...(19): siRNA sense strand
ggauauacucaauuacacu

SEQ ID NO: 2060376 - RNA, 19 nt, Homo sapiens
  misc_RNA (1)...(19): siRNA sense strand
gaagauggauauacucaau

SEQ ID NO: 2060377 - RNA, 19 nt, Homo sapiens
  misc_RNA (1)...(19): siRNA sense strand
caggauagcuguuguuuca

SEQ ID NO: 2060378 - RNA, 19 nt, Homo sapiens
  misc_RNA (1)...(19): siRNA sense strand
ggauagcuguuguuucaga

SEQ ID NO: 2060379 - RNA, 19 nt, Homo sapiens
  misc_RNA (1)...(19): siRNA sense strand
ucaaagcaauaccaggaua

SEQ ID NO: 2060380 - RNA, 19 nt, Homo sapiens
  misc_RNA (1)...(19): siRNA sense strand
ggaugaagauggauauacu

SEQ ID NO: 2060381 - RNA, 19 nt, Homo sapiens
  misc_RNA (1)...(19): siRNA sense strand
aaauuuggaugaagaugga

SEQ ID NO: 2060382 - RNA, 19 nt, Homo sapiens
  misc_RNA (1)...(19): siRNA sense strand
ucaauuacacuucgacucu

SEQ ID NO: 2060383 - RNA, 19 nt, Homo sapiens
  misc_RNA (1)...(19): siRNA sense strand
uagcuguuguuucagagaa

SEQ ID NO: 2060384 - RNA, 19 nt, Homo sapiens
  misc_RNA (1)...(19): siRNA sense strand
cuucgacucucaaagcaau

SEQ ID NO: 2060385 - RNA, 19 nt, Homo sapiens
  misc_RNA (1)...(19): siRNA sense strand
caaagcaauaccaggauag

SEQ ID NO: 2060386 - RNA, 19 nt, Homo sapiens
  misc_RNA (1)...(19): siRNA sense strand
ggauauacucaauuacacu

SEQ ID NO: 2060387 - RNA, 19 nt, Homo sapiens
  misc_RNA (1)...(19): siRNA sense strand
gaagauggauauacucaau

SEQ ID NO: 2060388 - RNA, 19 nt, Homo sapiens
  misc_RNA (1)...(19): siRNA sense strand
caggauagcuguuguuuca

SEQ ID NO: 2060389 - RNA, 19 nt, Homo sapiens
  misc_RNA (1)...(19): siRNA sense strand
ggauagcuguuguuucaga

SEQ ID NO: 2060390 - RNA, 19 nt, Homo sapiens
  misc_RNA (1)...(19): siRNA sense strand
ucaaagcaauaccaggaua

SEQ ID NO: 2060391 - RNA, 19 nt, Homo sapiens
  misc_RNA (1)...(19): siRNA sense strand
ggaugaagauggauauacu

SEQ ID NO: 2060392 - RNA, 19 nt, Homo sapiens
  misc_RNA (1)...(19): siRNA sense strand
aaauuuggaugaagaugga

SEQ ID NO: 2060393 - RNA, 19 nt, Homo sapiens
  misc_RNA (1)...(19): siRNA sense strand
ucaauuacacuucgacucu

SEQ ID NO: 2060394 - RNA, 19 nt, Homo sapiens
  misc_RNA (1)...(19): siRNA sense strand
uagcuguuguuucagagaa

SEQ ID NO: 2060395 - RNA, 19 nt, Homo sapiens
  misc_RNA (1)...(19): siRNA sense strand
cuucgacucucaaagcaau

SEQ ID NO: 2060396 - RNA, 19 nt, Homo sapiens
  misc_RNA (1)...(19): siRNA sense strand
caaagcaauaccaggauag

SEQ ID NO: 2060397 - RNA, 19 nt, Homo sapiens
  misc_RNA (1)...(19): siRNA sense strand
ggauauacucaauuacacu

SEQ ID NO: 2060398 - RNA, 19 nt, Homo sapiens
  misc_RNA (1)...(19): siRNA sense strand
gaagauggauauacucaau

SEQ ID NO: 2060399 - RNA, 19 nt, Homo sapiens
  misc_RNA (1)...(19): siRNA sense strand
caggauagcuguuguuuca

SEQ ID NO: 2060400 - RNA, 19 nt, Homo sapiens
  misc_RNA (1)...(19): siRNA sense strand
ggauagcuguuguuucaga

SEQ ID NO: 2060401 - RNA, 19 nt, Homo sapiens
  misc_RNA (1)...(19): siRNA sense strand
ucaaagcaauaccaggaua

SEQ ID NO: 2060402 - RNA, 19 nt, Homo sapiens
  misc_RNA (1)...(19): siRNA sense strand
ggaugaagauggauauacu

SEQ ID NO: 2060403 - RNA, 19 nt, Homo sapiens
  misc_RNA (1)...(19): siRNA sense strand
aaauuuggaugaagaugga

SEQ ID NO: 2060404 - RNA, 19 nt, Homo sapiens
  misc_RNA (1)...(19): siRNA sense strand
ucaauuacacuucgacucu

SEQ ID NO: 2060405 - RNA, 19 nt, Homo sapiens
  misc_RNA (1)...(19): siRNA sense strand
uagcuguuguuucagagaa

SEQ ID NO: 2060406 - RNA, 19 nt, Homo sapiens
  misc_RNA (1)...(19): siRNA sense strand
cuucgacucucaaagcaau

SEQ ID NO: 2060407 - RNA, 19 nt, Homo sapiens
  misc_RNA (1)...(19): siRNA sense strand
caaagcaauaccaggauag

SEQ ID NO: 2060408 - RNA, 19 nt, Homo sapiens
  misc_RNA (1)...(19): siRNA sense strand
ggauauacucaauuacacu

SEQ ID NO: 2060409 - RNA, 19 nt, Homo sapiens
  misc_RNA (1)...(19): siRNA sense strand
gaagauggauauacucaau

SEQ ID NO: 2060410 - RNA, 19 nt, Homo sapiens
  misc_RNA (1)...(19): siRNA sense strand
caggauagcuguuguuuca

SEQ ID NO: 2060411 - RNA, 19 nt, Homo sapiens
  misc_RNA (1)...(19): siRNA sense strand
ggauagcuguuguuucaga

SEQ ID NO: 2060412 - RNA, 19 nt, Homo sapiens
  misc_RNA (1)...(19): siRNA sense strand
ucaaagcaauaccaggaua

SEQ ID NO: 2060413 - RNA, 19 nt, Homo sapiens
  misc_RNA (1)...(19): siRNA sense strand
ggaugaagauggauauacu

SEQ ID NO: 2060414 - RNA, 19 nt, Homo sapiens
  misc_RNA (1)...(19): siRNA sense strand
aaauuuggaugaagaugga

SEQ ID NO: 2060415 - RNA, 19 nt, Homo sapiens
  misc_RNA (1)...(19): siRNA sense strand
ucaauuacacuucgacucu

SEQ ID NO: 2060416 - RNA, 19 nt, Homo sapiens
  misc_RNA (1)...(19): siRNA sense strand
uagcuguuguuucagagaa

SEQ ID NO: 2060417 - RNA, 19 nt, Homo sapiens
  misc_RNA (1)...(19): siRNA sense strand
cuucgacucucaaagcaau

SEQ ID NO: 2060418 - RNA, 19 nt, Homo sapiens
  misc_RNA (1)...(19): siRNA sense strand
caaagcaauaccaggauag

SEQ ID NO: 2060419 - RNA, 19 nt, Homo sapiens
  misc_RNA (1)...(19): siRNA sense strand
ggauauacucaauuacacu

SEQ ID NO: 2060420 - RNA, 19 nt, Homo sapiens
  misc_RNA (1)...(19): siRNA sense strand
gaagauggauauacucaau

SEQ ID NO: 2060421 - RNA, 19 nt, Homo sapiens
  misc_RNA (1)...(19): siRNA sense strand
caggauagcuguuguuuca

SEQ ID NO: 2060422 - RNA, 19 nt, Homo sapiens
  misc_RNA (1)...(19): siRNA sense strand
ggauagcuguuguuucaga

SEQ ID NO: 2060423 - RNA, 19 nt, Homo sapiens
  misc_RNA (1)...(19): siRNA sense strand
ucaaagcaauaccaggaua

SEQ ID NO: 2060424 - RNA, 19 nt, Homo sapiens
  misc_RNA (1)...(19): siRNA sense strand
ggaugaagauggauauacu

SEQ ID NO: 2060425 - RNA, 19 nt, Homo sapiens
  misc_RNA (1)...(19): siRNA sense strand
aaauuuggaugaagaugga

SEQ ID NO: 2060426 - RNA, 19 nt, Homo sapiens
  misc_RNA (1)...(19): siRNA sense strand
ucaauuacacuucgacucu

SEQ ID NO: 2060427 - RNA, 19 nt, Homo sapiens
  misc_RNA (1)...(19): siRNA sense strand
uagcuguuguuucagagaa

SEQ ID NO: 2060428 - RNA, 19 nt, Homo sapiens
  misc_RNA (1)...(19): siRNA sense strand
cuucgacucucaaagcaau

SEQ ID NO: 2060429 - RNA, 19 nt, Homo sapiens
  misc_RNA (1)...(19): siRNA sense strand
caaagcaauaccaggauag

SEQ ID NO: 2060430 - RNA, 19 nt, Homo sapiens
  misc_RNA (1)...(19): siRNA sense strand
ggauauacucaauuacacu

SEQ ID NO: 2060431 - RNA, 19 nt, Homo sapiens
  misc_RNA (1)...(19): siRNA sense strand
gaagauggauauacucaau

SEQ ID NO: 2060432 - RNA, 19 nt, Homo sapiens
  misc_RNA (1)...(19): siRNA sense strand
caggauagcuguuguuuca

SEQ ID NO: 2060433 - RNA, 19 nt, Homo sapiens
  misc_RNA (1)...(19): siRNA sense strand
ggauagcuguuguuucaga

SEQ ID NO: 2060434 - RNA, 19 nt, Homo sapiens
  misc_RNA (1)...(19): siRNA sense strand
ucaaagcaauaccaggaua

SEQ ID NO: 2060435 - RNA, 19 nt, Homo sapiens
  misc_RNA (1)...(19): siRNA sense strand
ggaugaagauggauauacu

SEQ ID NO: 2060436 - RNA, 19 nt, Homo sapiens
  misc_RNA (1)...(19): siRNA sense strand
aaauuuggaugaagaugga

SEQ ID NO: 2060437 - RNA, 19 nt, Homo sapiens
  misc_RNA (1)...(19): siRNA sense strand
ucaauuacacuucgacucu

SEQ ID NO: 2060438 - RNA, 19 nt, Homo sapiens
  misc_RNA (1)...(19): siRNA sense strand
uagcuguuguuucagagaa

SEQ ID NO: 2060439 - RNA, 19 nt, Homo sapiens
  misc_RNA (1)...(19): siRNA sense strand
cuucgacucucaaagcaau

SEQ ID NO: 2060440 - RNA, 19 nt, Homo sapiens
  misc_RNA (1)...(19): siRNA sense strand
caaagcaauaccaggauag

SEQ ID NO: 2060441 - RNA, 19 nt, Homo sapiens
  misc_RNA (1)...(19): siRNA sense strand
ggauauacucaauuacacu

SEQ ID NO: 2060442 - RNA, 19 nt, Homo sapiens
  misc_RNA (1)...(19): siRNA sense strand
gaagauggauauacucaau

SEQ ID NO: 2060443 - RNA, 19 nt, Homo sapiens
  misc_RNA (1)...(19): siRNA sense strand
caggauagcuguuguuuca

SEQ ID NO: 2060444 - RNA, 19 nt, Homo sapiens
  misc_RNA (1)...(19): siRNA sense strand
ggauagcuguuguuucaga

SEQ ID NO: 2060445 - RNA, 19 nt, Homo sapiens
  misc_RNA (1)...(19): siRNA sense strand
ucaaagcaauaccaggaua

SEQ ID NO: 2060446 - RNA, 19 nt, Homo sapiens
  misc_RNA (1)...(19): siRNA sense strand
ggaugaagauggauauacu

SEQ ID NO: 2060447 - RNA, 19 nt, Homo sapiens
  misc_RNA (1)...(19): siRNA sense strand
aaauuuggaugaagaugga

SEQ ID NO: 2060448 - RNA, 19 nt, Homo sapiens
  misc_RNA (1)...(19): siRNA sense strand
ucaauuacacuucgacucu

SEQ ID NO: 2060449 - RNA, 19 nt, Homo sapiens
  misc_RNA (1)...(19): siRNA sense strand
uagcuguuguuucagagaa

SEQ ID NO: 2060450 - RNA, 19 nt, Homo sapiens
  misc_RNA (1)...(19): siRNA sense strand
cuucgacucucaaagcaau

SEQ ID NO: 2060451 - RNA, 19 nt, Homo sapiens
  misc_RNA (1)...(19): siRNA sense strand
caaagcaauaccaggauag

SEQ ID NO: 2060452 - RNA, 19 nt, Homo sapiens
  misc_RNA (1)...(19): siRNA sense strand
ggauauacucaauuacacu

SEQ ID NO: 2060453 - RNA, 19 nt, Homo sapiens
  misc_RNA (1)...(19): siRNA sense strand
gaagauggauauacucaau

SEQ ID NO: 2060454 - RNA, 19 nt, Homo sapiens
  misc_RNA (1)...(19): siRNA sense strand
caggauagcuguuguuuca

SEQ ID NO: 2060455 - RNA, 19 nt, Homo sapiens
  misc_RNA (1)...(19): siRNA sense strand
ggauagcuguuguuucaga

SEQ ID NO: 2060456 - RNA, 19 nt, Homo sapiens
  misc_RNA (1)...(19): siRNA sense strand
ucaaagcaauaccaggaua

SEQ ID NO: 2060457 - RNA, 19 nt, Homo sapiens
  misc_RNA (1)...(19): siRNA sense strand
ggaugaagauggauauacu

SEQ ID NO: 2060458 - RNA, 19 nt, Homo sapiens
  misc_RNA (1)...(19): siRNA sense strand
aaauuuggaugaagaugga

SEQ ID NO: 2060459 - RNA, 19 nt, Homo sapiens
  misc_RNA (1)...(19): siRNA sense strand
ucaauuacacuucgacucu

SEQ ID NO: 2060460 - RNA, 19 nt, Homo sapiens
  misc_RNA (1)...(19): siRNA sense strand
uagcuguuguuucagagaa

SEQ ID NO: 2060461 - RNA, 19 nt, Homo sapiens
  misc_RNA (1)...(19): siRNA sense strand
cuucgacucucaaagcaau

SEQ ID NO: 2060462 - RNA, 19 nt, Homo sapiens
  misc_RNA (1)...(19): siRNA sense strand
caaagcaauaccaggauag

SEQ ID NO: 2060463 - RNA, 19 nt, Homo sapiens
  misc_RNA (1)...(19): siRNA sense strand
ggauauacucaauuacacu

SEQ ID NO: 2060464 - RNA, 19 nt, Homo sapiens
  misc_RNA (1)...(19): siRNA sense strand
gaagauggauauacucaau

SEQ ID NO: 2060465 - RNA, 19 nt, Homo sapiens
  misc_RNA (1)...(19): siRNA sense strand
caggauagcuguuguuuca

SEQ ID NO: 2060466 - RNA, 19 nt, Homo sapiens
  misc_RNA (1)...(19): siRNA sense strand
ggauagcuguuguuucaga

SEQ ID NO: 2060467 - RNA, 19 nt, Homo sapiens
  misc_RNA (1)...(19): siRNA sense strand
ucaaagcaauaccaggaua

SEQ ID NO: 2060468 - RNA, 19 nt, Homo sapiens
  misc_RNA (1)...(19): siRNA sense strand
ggaugaagauggauauacu

SEQ ID NO: 2060469 - RNA, 19 nt, Homo sapiens
  misc_RNA (1)...(19): siRNA sense strand
aaauuuggaugaagaugga

SEQ ID NO: 2060470 - RNA, 19 nt, Homo sapiens
  misc_RNA (1)...(19): siRNA sense strand
ucaauuacacuucgacucu

SEQ ID NO: 2060471 - RNA, 19 nt, Homo sapiens
  misc_RNA (1)...(19): siRNA sense strand
uagcuguuguuucagagaa

SEQ ID NO: 2060472 - RNA, 19 nt, Homo sapiens
  misc_RNA (1)...(19): siRNA sense strand
cuucgacucucaaagcaau

SEQ ID NO: 2060473 - RNA, 19 nt, Homo sapiens
  misc_RNA (1)...(19): siRNA sense strand
caaagcaauaccaggauag

SEQ ID NO: 2060474 - RNA, 19 nt, Homo sapiens
  misc_RNA (1)...(19): siRNA sense strand
ggauauacucaauuacacu

SEQ ID NO: 2060475 - RNA, 19 nt, Homo sapiens
  misc_RNA (1)...(19): siRNA sense strand
gaagauggauauacucaau

SEQ ID NO: 2060476 - RNA, 19 nt, Homo sapiens
  misc_RNA (1)...(19): siRNA sense strand
caggauagcuguuguuuca

SEQ ID NO: 2060477 - RNA, 19 nt, Homo sapiens
  misc_RNA (1)...(19): siRNA sense strand
ggauagcuguuguuucaga

SEQ ID NO: 2060478 - RNA, 19 nt, Homo sapiens
  misc_RNA (1)...(19): siRNA sense strand
ucaaagcaauaccaggaua

SEQ ID NO: 2060479 - RNA, 19 nt, Homo sapiens
  misc_RNA (1)...(19): siRNA sense strand
ggaugaagauggauauacu

SEQ ID NO: 2060480 - RNA, 19 nt, Homo sapiens
  misc_RNA (1)...(19): siRNA sense strand
aaauuuggaugaagaugga

SEQ ID NO: 2060481 - RNA, 19 nt, Homo sapiens
  misc_RNA (1)...(19): siRNA sense strand
ucaauuacacuucgacucu

SEQ ID NO: 2060482 - RNA, 19 nt, Homo sapiens
  misc_RNA (1)...(19): siRNA sense strand
uagcuguuguuucagagaa

SEQ ID NO: 2060483 - RNA, 19 nt, Homo sapiens
  misc_RNA (1)...(19): siRNA sense strand
cuucgacucucaaagcaau

SEQ ID NO: 2060484 - RNA, 19 nt, Homo sapiens
  misc_RNA (1)...(19): siRNA sense strand
caaagcaauaccaggauag

SEQ ID NO: 2060485 - RNA, 19 nt, Homo sapiens
  misc_RNA (1)...(19): siRNA sense strand
ggauauacucaauuacacu

SEQ ID NO: 2060486 - RNA, 19 nt, Homo sapiens
  misc_RNA (1)...(19): siRNA sense strand
gaagauggauauacucaau

SEQ ID NO: 2060487 - RNA, 19 nt, Homo sapiens
  misc_RNA (1)...(19): siRNA sense strand
caggauagcuguuguuuca

SEQ ID NO: 2060488 - RNA, 19 nt, Homo sapiens
  misc_RNA (1)...(19): siRNA sense strand
ggauagcuguuguuucaga

SEQ ID NO: 2060489 - RNA, 19 nt, Homo sapiens
  misc_RNA (1)...(19): siRNA sense strand
ucaaagcaauaccaggaua

SEQ ID NO: 2060490 - RNA, 19 nt, Homo sapiens
  misc_RNA (1)...(19): siRNA sense strand
ggaugaagauggauauacu

SEQ ID NO: 2060491 - RNA, 19 nt, Homo sapiens
  misc_RNA (1)...(19): siRNA sense strand
aaauuuggaugaagaugga

SEQ ID NO: 2060492 - RNA, 19 nt, Homo sapiens
  misc_RNA (1)...(19): siRNA sense strand
ucaauuacacuucgacucu

SEQ ID NO: 2060493 - RNA, 19 nt, Homo sapiens
  misc_RNA (1)...(19): siRNA sense strand
uagcuguuguuucagagaa

SEQ ID NO: 2060494 - RNA, 19 nt, Homo sapiens
  misc_RNA (1)...(19): siRNA sense strand
cuucgacucucaaagcaau

SEQ ID NO: 2060495 - RNA, 19 nt, Homo sapiens
  misc_RNA (1)...(19): siRNA sense strand
caaagcaauaccaggauag

SEQ ID NO: 2060496 - RNA, 19 nt, Homo sapiens
  misc_RNA (1)...(19): siRNA sense strand
ggauauacucaauuacacu

SEQ ID NO: 2060497 - RNA, 19 nt, Homo sapiens
  misc_RNA (1)...(19): siRNA sense strand
gaagauggauauacucaau

SEQ ID NO: 2060498 - RNA, 19 nt, Homo sapiens
  misc_RNA (1)...(19): siRNA sense strand
caggauagcuguuguuuca

SEQ ID NO: 2060499 - RNA, 19 nt, Homo sapiens
  misc_RNA (1)...(19): siRNA sense strand
ggauagcuguuguuucaga

SEQ ID NO: 2060500 - RNA, 19 nt, Homo sapiens
  misc_RNA (1)...(19): siRNA sense strand
ucaaagcaauaccaggaua

SEQ ID NO: 2060501 - RNA, 19 nt, Homo sapiens
  misc_RNA (1)...(19): siRNA sense strand
ggaugaagauggauauacu

SEQ ID NO: 2060502 - RNA, 19 nt, Homo sapiens
  misc_RNA (1)...(19): siRNA sense strand
aaauuuggaugaagaugga

SEQ ID NO: 2060503 - RNA, 19 nt, Homo sapiens
  misc_RNA (1)...(19): siRNA sense strand
ucaauuacacuucgacucu

SEQ ID NO: 2060504 - RNA, 19 nt, Homo sapiens
  misc_RNA (1)...(19): siRNA sense strand
uagcuguuguuucagagaa

SEQ ID NO: 2060505 - RNA, 19 nt, Homo sapiens
  misc_RNA (1)...(19): siRNA sense strand
cuucgacucucaaagcaau

SEQ ID NO: 2060506 - RNA, 19 nt, Homo sapiens
  misc_RNA (1)...(19): siRNA sense strand
caaagcaauaccaggauag

SEQ ID NO: 2060507 - RNA, 19 nt, Homo sapiens
  misc_RNA (1)...(19): siRNA sense strand
ggauauacucaauuacacu

SEQ ID NO: 2060508 - RNA, 19 nt, Homo sapiens
  misc_RNA (1)...(19): siRNA sense strand
gaagauggauauacucaau

SEQ ID NO: 2060509 - RNA, 19 nt, Homo sapiens
  misc_RNA (1)...(19): siRNA sense strand
caggauagcuguuguuuca

SEQ ID NO: 2060510 - RNA, 19 nt, Homo sapiens
  misc_RNA (1)...(19): siRNA sense strand
ggauagcuguuguuucaga

SEQ ID NO: 2060511 - RNA, 19 nt, Homo sapiens
  misc_RNA (1)...(19): siRNA sense strand
ucaaagcaauaccaggaua

SEQ ID NO: 2060512 - RNA, 19 nt, Homo sapiens
  misc_RNA (1)...(19): siRNA sense strand
ggaugaagauggauauacu

SEQ ID NO: 2060513 - RNA, 19 nt, Homo sapiens
  misc_RNA (1)...(19): siRNA sense strand
aaauuuggaugaagaugga

SEQ ID NO: 2060514 - RNA, 19 nt, Homo sapiens
  misc_RNA (1)...(19): siRNA sense strand
ucaauuacacuucgacucu

SEQ ID NO: 2060515 - RNA, 19 nt, Homo sapiens
  misc_RNA (1)...(19): siRNA sense strand
uagcuguuguuucagagaa

SEQ ID NO: 2060516 - RNA, 19 nt, Homo sapiens
  misc_RNA (1)...(19): siRNA sense strand
cuucgacucucaaagcaau

SEQ ID NO: 2060517 - RNA, 19 nt, Homo sapiens
  misc_RNA (1)...(19): siRNA sense strand
caaagcaauaccaggauag

SEQ ID NO: 2060518 - RNA, 19 nt, Homo sapiens
  misc_RNA (1)...(19): siRNA sense strand
ggauauacucaauuacacu

SEQ ID NO: 2060519 - RNA, 19 nt, Homo sapiens
  misc_RNA (1)...(19): siRNA sense strand
gaagauggauauacucaau

SEQ ID NO: 2060520 - RNA, 19 nt, Homo sapiens
  misc_RNA (1)...(19): siRNA sense strand
caggauagcuguuguuuca

SEQ ID NO: 2060521 - RNA, 19 nt, Homo sapiens
  misc_RNA (1)...(19): siRNA sense strand
ggauagcuguuguuucaga

SEQ ID NO: 2060522 - RNA, 19 nt, Homo sapiens
  misc_RNA (1)...(19): siRNA sense strand
ucaaagcaauaccaggaua

SEQ ID NO: 2060523 - RNA, 19 nt, Homo sapiens
  misc_RNA (1)...(19): siRNA sense strand
ggaugaagauggauauacu

SEQ ID NO: 2060524 - RNA, 19 nt, Homo sapiens
  misc_RNA (1)...(19): siRNA sense strand
aaauuuggaugaagaugga

SEQ ID NO: 2060525 - RNA, 19 nt, Homo sapiens
  misc_RNA (1)...(19): siRNA sense strand
ucaauuacacuucgacucu

SEQ ID NO: 2060526 - RNA, 19 nt, Homo sapiens
  misc_RNA (1)...(19): siRNA sense strand
uagcuguuguuucagagaa

SEQ ID NO: 2060527 - RNA, 19 nt, Homo sapiens
  misc_RNA (1)...(19): siRNA sense strand
cuucgacucucaaagcaau

SEQ ID NO: 2060528 - RNA, 19 nt, Homo sapiens
  misc_RNA (1)...(19): siRNA sense strand
caaagcaauaccaggauag

SEQ ID NO: 2060529 - RNA, 19 nt, Homo sapiens
  misc_RNA (1)...(19): siRNA sense strand
ggauauacucaauuacacu

SEQ ID NO: 2060530 - RNA, 19 nt, Homo sapiens
  misc_RNA (1)...(19): siRNA sense strand
gaagauggauauacucaau

SEQ ID NO: 2060531 - RNA, 19 nt, Homo sapiens
  misc_RNA (1)...(19): siRNA sense strand
caggauagcuguuguuuca

SEQ ID NO: 2060532 - RNA, 19 nt, Homo sapiens
  misc_RNA (1)...(19): siRNA sense strand
ggauagcuguuguuucaga

SEQ ID NO: 2060533 - RNA, 19 nt, Homo sapiens
  misc_RNA (1)...(19): siRNA sense strand
ucaaagcaauaccaggaua

SEQ ID NO: 2060534 - RNA, 19 nt, Homo sapiens
  misc_RNA (1)...(19): siRNA sense strand
ggaugaagauggauauacu

SEQ ID NO: 2060535 - RNA, 19 nt, Homo sapiens
  misc_RNA (1)...(19): siRNA sense strand
aaauuuggaugaagaugga

SEQ ID NO: 2060536 - RNA, 19 nt, Homo sapiens
  misc_RNA (1)...(19): siRNA sense strand
ucaauuacacuucgacucu

SEQ ID NO: 2060537 - RNA, 19 nt, Homo sapiens
  misc_RNA (1)...(19): siRNA sense strand
uagcuguuguuucagagaa

SEQ ID NO: 2060538 - RNA, 19 nt, Homo sapiens
  misc_RNA (1)...(19): siRNA sense strand
cuucgacucucaaagcaau

SEQ ID NO: 2060539 - RNA, 19 nt, Homo sapiens
  misc_RNA (1)...(19): siRNA sense strand
caaagcaauaccaggauag

SEQ ID NO: 2060540 - RNA, 19 nt, Homo sapiens
  misc_RNA (1)...(19): siRNA sense strand
ggauauacucaauuacacu

SEQ ID NO: 2060541 - RNA, 19 nt, Homo sapiens
  misc_RNA (1)...(19): siRNA sense strand
gaagauggauauacucaau

SEQ ID NO: 2060542 - RNA, 19 nt, Homo sapiens
  misc_RNA (1)...(19): siRNA sense strand
caggauagcuguuguuuca

SEQ ID NO: 2060543 - RNA, 19 nt, Homo sapiens
  misc_RNA (1)...(19): siRNA sense strand
ggauagcuguuguuucaga

SEQ ID NO: 2060544 - RNA, 19 nt, Homo sapiens
  misc_RNA (1)...(19): siRNA sense strand
ucaaagcaauaccaggaua

SEQ ID NO: 2060545 - RNA, 19 nt, Homo sapiens
  misc_RNA (1)...(19): siRNA sense strand
ggaugaagauggauauacu

SEQ ID NO: 2060546 - RNA, 19 nt, Homo sapiens
  misc_RNA (1)...(19): siRNA sense strand
aaauuuggaugaagaugga

SEQ ID NO: 2060547 - RNA, 19 nt, Homo sapiens
  misc_RNA (1)...(19): siRNA sense strand
ucaauuacacuucgacucu

SEQ ID NO: 2060548 - RNA, 19 nt, Homo sapiens
  misc_RNA (1)...(19): siRNA sense strand
uagcuguuguuucagagaa

SEQ ID NO: 2060549 - RNA, 19 nt, Homo sapiens
  misc_RNA (1)...(19): siRNA sense strand
cuucgacucucaaagcaau

SEQ ID NO: 2060550 - RNA, 19 nt, Homo sapiens
  misc_RNA (1)...(19): siRNA sense strand
caaagcaauaccaggauag

SEQ ID NO: 2060551 - RNA, 19 nt, Homo sapiens
  misc_RNA (1)...(19): siRNA sense strand
ggauauacucaauuacacu

SEQ ID NO: 2060552 - RNA, 19 nt, Homo sapiens
  misc_RNA (1)...(19): siRNA sense strand
gaagauggauauacucaau

SEQ ID NO: 2060553 - RNA, 19 nt, Homo sapiens
  misc_RNA (1)...(19): siRNA sense strand
caggauagcuguuguuuca

SEQ ID NO: 2060554 - RNA, 19 nt, Homo sapiens
  misc_RNA (1)...(19): siRNA sense strand
ggauagcuguuguuucaga

SEQ ID NO: 2060555 - RNA, 19 nt, Homo sapiens
  misc_RNA (1)...(19): siRNA sense strand
ucaaagcaauaccaggaua

SEQ ID NO: 2060556 - RNA, 19 nt, Homo sapiens
  misc_RNA (1)...(19): siRNA sense strand
ggaugaagauggauauacu

SEQ ID NO: 2060557 - RNA, 19 nt, Homo sapiens
  misc_RNA (1)...(19): siRNA sense strand
aaauuuggaugaagaugga

SEQ ID NO: 2060558 - RNA, 19 nt, Homo sapiens
  misc_RNA (1)...(19): siRNA sense strand
ucaauuacacuucgacucu

SEQ ID NO: 2060559 - RNA, 19 nt, Homo sapiens
  misc_RNA (1)...(19): siRNA sense strand
uagcuguuguuucagagaa

SEQ ID NO: 2060560 - RNA, 19 nt, Homo sapiens
  misc_RNA (1)...(19): siRNA sense strand
cuucgacucucaaagcaau

SEQ ID NO: 2060561 - RNA, 19 nt, Homo sapiens
  misc_RNA (1)...(19): siRNA sense strand
caaagcaauaccaggauag

SEQ ID NO: 2060562 - RNA, 19 nt, Homo sapiens
  misc_RNA (1)...(19): siRNA sense strand
ggauauacucaauuacacu

SEQ ID NO: 2060563 - RNA, 19 nt, Homo sapiens
  misc_RNA (1)...(19): siRNA sense strand
gaagauggauauacucaau

SEQ ID NO: 2060564 - RNA, 19 nt, Homo sapiens
  misc_RNA (1)...(19): siRNA sense strand
caggauagcuguuguuuca

SEQ ID NO: 2060565 - RNA, 19 nt, Homo sapiens
  misc_RNA (1)...(19): siRNA sense strand
ggauagcuguuguuucaga

SEQ ID NO: 2060566 - RNA, 19 nt, Homo sapiens
  misc_RNA (1)...(19): siRNA sense strand
ucaaagcaauaccaggaua

SEQ ID NO: 2060567 - RNA, 19 nt, Homo sapiens
  misc_RNA (1)...(19): siRNA sense strand
ggaugaagauggauauacu

SEQ ID NO: 2060568 - RNA, 19 nt, Homo sapiens
  misc_RNA (1)...(19): siRNA sense strand
aaauuuggaugaagaugga

SEQ ID NO: 2060569 - RNA, 19 nt, Homo sapiens
  misc_RNA (1)...(19): siRNA sense strand
ucaauuacacuucgacucu

SEQ ID NO: 2060570 - RNA, 19 nt, Homo sapiens
  misc_RNA (1)...(19): siRNA sense strand
uagcuguuguuucagagaa

SEQ ID NO: 2060571 - RNA, 19 nt, Homo sapiens
  misc_RNA (1)...(19): siRNA sense strand
cuucgacucucaaagcaau

SEQ ID NO: 2060572 - RNA, 19 nt, Homo sapiens
  misc_RNA (1)...(19): siRNA sense strand
caaagcaauaccaggauag

SEQ ID NO: 2060573 - RNA, 19 nt, Homo sapiens
  misc_RNA (1)...(19): siRNA sense strand
ggauauacucaauuacacu

SEQ ID NO: 2060574 - RNA, 19 nt, Homo sapiens
  misc_RNA (1)...(19): siRNA sense strand
gaagauggauauacucaau

SEQ ID NO: 2060575 - RNA, 19 nt, Homo sapiens
  misc_RNA (1)...(19): siRNA sense strand
caggauagcuguuguuuca

SEQ ID NO: 2060576 - RNA, 19 nt, Homo sapiens
  misc_RNA (1)...(19): siRNA sense strand
ggauagcuguuguuucaga

SEQ ID NO: 2060577 - RNA, 19 nt, Homo sapiens
  misc_RNA (1)...(19): siRNA sense strand
ucaaagcaauaccaggaua

SEQ ID NO: 2060578 - RNA, 19 nt, Homo sapiens
  misc_RNA (1)...(19): siRNA sense strand
ggaugaagauggauauacu

SEQ ID NO: 2060579 - RNA, 19 nt, Homo sapiens
  misc_RNA (1)...(19): siRNA sense strand
aaauuuggaugaagaugga

SEQ ID NO: 2060580 - RNA, 19 nt, Homo sapiens
  misc_RNA (1)...(19): siRNA sense strand
ucaauuacacuucgacucu

SEQ ID NO: 2060581 - RNA, 19 nt, Homo sapiens
  misc_RNA (1)...(19): siRNA sense strand
uagcuguuguuucagagaa

SEQ ID NO: 2060582 - RNA, 19 nt, Homo sapiens
  misc_RNA (1)...(19): siRNA sense strand
cuucgacucucaaagcaau

SEQ ID NO: 2060583 - RNA, 19 nt, Homo sapiens
  misc_RNA (1)...(19): siRNA sense strand
caaagcaauaccaggauag

SEQ ID NO: 2060584 - RNA, 19 nt, Homo sapiens
  misc_RNA (1)...(19): siRNA sense strand
ggauauacucaauuacacu

SEQ ID NO: 2060585 - RNA, 19 nt, Homo sapiens
  misc_RNA (1)...(19): siRNA sense strand
gaagauggauauacucaau

SEQ ID NO: 2060586 - RNA, 19 nt, Homo sapiens
  misc_RNA (1)...(19): siRNA sense strand
caggauagcuguuguuuca

SEQ ID NO: 2060587 - RNA, 19 nt, Homo sapiens
  misc_RNA (1)...(19): siRNA sense strand
ggauagcuguuguuucaga

SEQ ID NO: 2060588 - RNA, 19 nt, Homo sapiens
  misc_RNA (1)...(19): siRNA sense strand
ucaaagcaauaccaggaua

SEQ ID NO: 2060589 - RNA, 19 nt, Homo sapiens
  misc_RNA (1)...(19): siRNA sense strand
ggaugaagauggauauacu

SEQ ID NO: 2060590 - RNA, 19 nt, Homo sapiens
  misc_RNA (1)...(19): siRNA sense strand
aaauuuggaugaagaugga

SEQ ID NO: 2060591 - RNA, 19 nt, Homo sapiens
  misc_RNA (1)...(19): siRNA sense strand
ucaauuacacuucgacucu

SEQ ID NO: 2060592 - RNA, 19 nt, Homo sapiens
  misc_RNA (1)...(19): siRNA sense strand
uagcuguuguuucagagaa

SEQ ID NO: 2060593 - RNA, 19 nt, Homo sapiens
  misc_RNA (1)...(19): siRNA sense strand
cuucgacucucaaagcaau

SEQ ID NO: 2060594 - RNA, 19 nt, Homo sapiens
  misc_RNA (1)...(19): siRNA sense strand
caaagcaauaccaggauag

SEQ ID NO: 2060595 - RNA, 19 nt, Homo sapiens
  misc_RNA (1)...(19): siRNA sense strand
ggauauacucaauuacacu

SEQ ID NO: 2060596 - RNA, 19 nt, Homo sapiens
  misc_RNA (1)...(19): siRNA sense strand
gaagauggauauacucaau

SEQ ID NO: 2060597 - RNA, 19 nt, Homo sapiens
  misc_RNA (1)...(19): siRNA sense strand
caggauagcuguuguuuca

SEQ ID NO: 2060598 - RNA, 19 nt, Homo sapiens
  misc_RNA (1)...(19): siRNA sense strand
ggauagcuguuguuucaga

SEQ ID NO: 2060599 - RNA, 19 nt, Homo sapiens
  misc_RNA (1)...(19): siRNA sense strand
ucaaagcaauaccaggaua

SEQ ID NO: 2060600 - RNA, 19 nt, Homo sapiens
  misc_RNA (1)...(19): siRNA sense strand
ggaugaagauggauauacu

SEQ ID NO: 2060601 - RNA, 19 nt, Homo sapiens
  misc_RNA (1)...(19): siRNA sense strand
aaauuuggaugaagaugga

SEQ ID NO: 2060602 - RNA, 19 nt, Homo sapiens
  misc_RNA (1)...(19): siRNA sense strand
ucaauuacacuucgacucu

SEQ ID NO: 2060603 - RNA, 19 nt, Homo sapiens
  misc_RNA (1)...(19): siRNA sense strand
uagcuguuguuucagagaa

SEQ ID NO: 2060604 - RNA, 19 nt, Homo sapiens
  misc_RNA (1)...(19): siRNA sense strand
cuucgacucucaaagcaau

SEQ ID NO: 2060605 - RNA, 19 nt, Homo sapiens
  misc_RNA (1)...(19): siRNA sense strand
caaagcaauaccaggauag

SEQ ID NO: 2060606 - RNA, 19 nt, Homo sapiens
  misc_RNA (1)...(19): siRNA sense strand
ggauauacucaauuacacu

SEQ ID NO: 2060607 - RNA, 19 nt, Homo sapiens
  misc_RNA (1)...(19): siRNA sense strand
gaagauggauauacucaau

SEQ ID NO: 2060608 - RNA, 19 nt, Homo sapiens
  misc_RNA (1)...(19): siRNA sense strand
caggauagcuguuguuuca

SEQ ID NO: 2060609 - RNA, 19 nt, Homo sapiens
  misc_RNA (1)...(19): siRNA sense strand
ggauagcuguuguuucaga

SEQ ID NO: 2060610 - RNA, 19 nt, Homo sapiens
  misc_RNA (1)...(19): siRNA sense strand
ucaaagcaauaccaggaua

SEQ ID NO: 2060611 - RNA, 19 nt, Homo sapiens
  misc_RNA (1)...(19): siRNA sense strand
ggaugaagauggauauacu

SEQ ID NO: 2060612 - RNA, 19 nt, Homo sapiens
  misc_RNA (1)...(19): siRNA sense strand
aaauuuggaugaagaugga

SEQ ID NO: 2060613 - RNA, 19 nt, Homo sapiens
  misc_RNA (1)...(19): siRNA sense strand
ucaauuacacuucgacucu

SEQ ID NO: 2060614 - RNA, 19 nt, Homo sapiens
  misc_RNA (1)...(19): siRNA sense strand
uagcuguuguuucagagaa

SEQ ID NO: 2060615 - RNA, 19 nt, Homo sapiens
  misc_RNA (1)...(19): siRNA sense strand
cuucgacucucaaagcaau

SEQ ID NO: 2060616 - RNA, 19 nt, Homo sapiens
  misc_RNA (1)...(19): siRNA sense strand
caaagcaauaccaggauag

SEQ ID NO: 2060617 - RNA, 19 nt, Homo sapiens
  misc_RNA (1)...(19): siRNA sense strand
ggauauacucaauuacacu

SEQ ID NO: 2060618 - RNA, 19 nt, Homo sapiens
  misc_RNA (1)...(19): siRNA sense strand
gaagauggauauacucaau

SEQ ID NO: 2060619 - RNA, 19 nt, Homo sapiens
  misc_RNA (1)...(19): siRNA sense strand
caggauagcuguuguuuca

SEQ ID NO: 2060620 - RNA, 19 nt, Homo sapiens
  misc_RNA (1)...(19): siRNA sense strand
ggauagcuguuguuucaga

SEQ ID NO: 2060621 - RNA, 19 nt, Homo sapiens
  misc_RNA (1)...(19): siRNA sense strand
ucaaagcaauaccaggaua

SEQ ID NO: 2060622 - RNA, 19 nt, Homo sapiens
  misc_RNA (1)...(19): siRNA sense strand
ggaugaagauggauauacu

SEQ ID NO: 2060623 - RNA, 19 nt, Homo sapiens
  misc_RNA (1)...(19): siRNA sense strand
aaauuuggaugaagaugga

SEQ ID NO: 2060624 - RNA, 19 nt, Homo sapiens
  misc_RNA (1)...(19): siRNA sense strand
ucaauuacacuucgacucu

SEQ ID NO: 2060625 - RNA, 19 nt, Homo sapiens
  misc_RNA (1)...(19): siRNA sense strand
uagcuguuguuucagagaa

SEQ ID NO: 2060626 - RNA, 19 nt, Homo sapiens
  misc_RNA (1)...(19): siRNA sense strand
cuucgacucucaaagcaau

SEQ ID NO: 2060627 - RNA, 19 nt, Homo sapiens
  misc_RNA (1)...(19): siRNA sense strand
caaagcaauaccaggauag

SEQ ID NO: 2060628 - RNA, 19 nt, Homo sapiens
  misc_RNA (1)...(19): siRNA sense strand
ggauauacucaauuacacu

SEQ ID NO: 2060629 - RNA, 19 nt, Homo sapiens
  misc_RNA (1)...(19): siRNA sense strand
gaagauggauauacucaau

SEQ ID NO: 2060630 - RNA, 19 nt, Homo sapiens
  misc_RNA (1)...(19): siRNA sense strand
caggauagcuguuguuuca

SEQ ID NO: 2060631 - RNA, 19 nt, Homo sapiens
  misc_RNA (1)...(19): siRNA sense strand
ggauagcuguuguuucaga

SEQ ID NO: 2060632 - RNA, 19 nt, Homo sapiens
  misc_RNA (1)...(19): siRNA sense strand
ucaaagcaauaccaggaua

SEQ ID NO: 2060633 - RNA, 19 nt, Homo sapiens
  misc_RNA (1)...(19): siRNA sense strand
ggaugaagauggauauacu

SEQ ID NO: 2060634 - RNA, 19 nt, Homo sapiens
  misc_RNA (1)...(19): siRNA sense strand
aaauuuggaugaagaugga

SEQ ID NO: 2060635 - RNA, 19 nt, Homo sapiens
  misc_RNA (1)...(19): siRNA sense strand
ucaauuacacuucgacucu

SEQ ID NO: 2060636 - RNA, 19 nt, Homo sapiens
  misc_RNA (1)...(19): siRNA sense strand
uagcuguuguuucagagaa

SEQ ID NO: 2060637 - RNA, 19 nt, Homo sapiens
  misc_RNA (1)...(19): siRNA sense strand
cuucgacucucaaagcaau

SEQ ID NO: 2060638 - RNA, 19 nt, Homo sapiens
  misc_RNA (1)...(19): siRNA sense strand
caaagcaauaccaggauag

SEQ ID NO: 2060639 - RNA, 19 nt, Homo sapiens
  misc_RNA (1)...(19): siRNA sense strand
ggauauacucaauuacacu

SEQ ID NO: 2060640 - RNA, 19 nt, Homo sapiens
  misc_RNA (1)...(19): siRNA sense strand
gaagauggauauacucaau

SEQ ID NO: 2060641 - RNA, 19 nt, Homo sapiens
  misc_RNA (1)...(19): siRNA sense strand
caggauagcuguuguuuca

SEQ ID NO: 2060642 - RNA, 19 nt, Homo sapiens
  misc_RNA (1)...(19): siRNA sense strand
ggauagcuguuguuucaga

SEQ ID NO: 2060643 - RNA, 19 nt, Homo sapiens
  misc_RNA (1)...(19): siRNA sense strand
ucaaagcaauaccaggaua

SEQ ID NO: 2060644 - RNA, 19 nt, Homo sapiens
  misc_RNA (1)...(19): siRNA sense strand
ggaugaagauggauauacu

SEQ ID NO: 2060645 - RNA, 19 nt, Homo sapiens
  misc_RNA (1)...(19): siRNA sense strand
aaauuuggaugaagaugga

SEQ ID NO: 2060646 - RNA, 19 nt, Homo sapiens
  misc_RNA (1)...(19): siRNA sense strand
ucaauuacacuucgacucu

SEQ ID NO: 2060647 - RNA, 19 nt, Homo sapiens
  misc_RNA (1)...(19): siRNA sense strand
uagcuguuguuucagagaa

SEQ ID NO: 2060648 - RNA, 19 nt, Homo sapiens
  misc_RNA (1)...(19): siRNA sense strand
cuucgacucucaaagcaau

SEQ ID NO: 2060649 - RNA, 19 nt, Homo sapiens
  misc_RNA (1)...(19): siRNA sense strand
caaagcaauaccaggauag

SEQ ID NO: 2060650 - RNA, 19 nt, Homo sapiens
  misc_RNA (1)...(19): siRNA sense strand
ggauauacucaauuacacu

SEQ ID NO: 2060651 - RNA, 19 nt, Homo sapiens
  misc_RNA (1)...(19): siRNA sense strand
gaagauggauauacucaau

SEQ ID NO: 2060652 - RNA, 19 nt, Homo sapiens
  misc_RNA (1)...(19): siRNA sense strand
caggauagcuguuguuuca

SEQ ID NO: 2060653 - RNA, 19 nt, Homo sapiens
  misc_RNA (1)...(19): siRNA sense strand
ggauagcuguuguuucaga

SEQ ID NO: 2060654 - RNA, 19 nt, Homo sapiens
  misc_RNA (1)...(19): siRNA sense strand
ucaaagcaauaccaggaua

SEQ ID NO: 2060655 - RNA, 19 nt, Homo sapiens
  misc_RNA (1)...(19): siRNA sense strand
ggaugaagauggauauacu

SEQ ID NO: 2060656 - RNA, 19 nt, Homo sapiens
  misc_RNA (1)...(19): siRNA sense strand
aaauuuggaugaagaugga

SEQ ID NO: 2060657 - RNA, 19 nt, Homo sapiens
  misc_RNA (1)...(19): siRNA sense strand
ucaauuacacuucgacucu

SEQ ID NO: 2060658 - RNA, 19 nt, Homo sapiens
  misc_RNA (1)...(19): siRNA sense strand
uagcuguuguuucagagaa

SEQ ID NO: 2060659 - RNA, 19 nt, Homo sapiens
  misc_RNA (1)...(19): siRNA sense strand
cuucgacucucaaagcaau

SEQ ID NO: 2060660 - RNA, 19 nt, Homo sapiens
  misc_RNA (1)...(19): siRNA sense strand
caaagcaauaccaggauag

SEQ ID NO: 2060661 - RNA, 19 nt, Homo sapiens
  misc_RNA (1)...(19): siRNA sense strand
ggauauacucaauuacacu

SEQ ID NO: 2060662 - RNA, 19 nt, Homo sapiens
  misc_RNA (1)...(19): siRNA sense strand
gaagauggauauacucaau

SEQ ID NO: 2060663 - RNA, 19 nt, Homo sapiens
  misc_RNA (1)...(19): siRNA sense strand
caggauagcuguuguuuca

SEQ ID NO: 2060664 - RNA, 19 nt, Homo sapiens
  misc_RNA (1)...(19): siRNA sense strand
ggauagcuguuguuucaga

SEQ ID NO: 2060665 - RNA, 19 nt, Homo sapiens
  misc_RNA (1)...(19): siRNA sense strand
ucaaagcaauaccaggaua

SEQ ID NO: 2060666 - RNA, 19 nt, Homo sapiens
  misc_RNA (1)...(19): siRNA sense strand
ggaugaagauggauauacu

SEQ ID NO: 2060667 - RNA, 19 nt, Homo sapiens
  misc_RNA (1)...(19): siRNA sense strand
aaauuuggaugaagaugga

SEQ ID NO: 2060668 - RNA, 19 nt, Homo sapiens
  misc_RNA (1)...(19): siRNA sense strand
ucaauuacacuucgacucu

SEQ ID NO: 2060669 - RNA, 19 nt, Homo sapiens
  misc_RNA (1)...(19): siRNA sense strand
uagcuguuguuucagagaa

SEQ ID NO: 2060670 - RNA, 19 nt, Homo sapiens
  misc_RNA (1)...(19): siRNA sense strand
cuucgacucucaaagcaau

SEQ ID NO: 2060671 - RNA, 19 nt, Homo sapiens
  misc_RNA (1)...(19): siRNA sense strand
caaagcaauaccaggauag

SEQ ID NO: 2060672 - RNA, 19 nt, Homo sapiens
  misc_RNA (1)...(19): siRNA sense strand
ggauauacucaauuacacu

SEQ ID NO: 2060673 - RNA, 19 nt, Homo sapiens
  misc_RNA (1)...(19): siRNA sense strand
gaagauggauauacucaau

SEQ ID NO: 2060674 - RNA, 19 nt, Homo sapiens
  misc_RNA (1)...(19): siRNA sense strand
caggauagcuguuguuuca

SEQ ID NO: 2060675 - RNA, 19 nt, Homo sapiens
  misc_RNA (1)...(19): siRNA sense strand
ggauagcuguuguuucaga

SEQ ID NO: 2060676 - RNA, 19 nt, Homo sapiens
  misc_RNA (1)...(19): siRNA sense strand
ucaaagcaauaccaggaua

SEQ ID NO: 2060677 - RNA, 19 nt, Homo sapiens
  misc_RNA (1)...(19): siRNA sense strand
ggaugaagauggauauacu

SEQ ID NO: 2060678 - RNA, 19 nt, Homo sapiens
  misc_RNA (1)...(19): siRNA sense strand
aaauuuggaugaagaugga

SEQ ID NO: 2060679 - RNA, 19 nt, Homo sapiens
  misc_RNA (1)...(19): siRNA sense strand
ucaauuacacuucgacucu

SEQ ID NO: 2060680 - RNA, 19 nt, Homo sapiens
  misc_RNA (1)...(19): siRNA sense strand
uagcuguuguuucagagaa

SEQ ID NO: 2060681 - RNA, 19 nt, Homo sapiens
  misc_RNA (1)...(19): siRNA sense strand
cuucgacucucaaagcaau

SEQ ID NO: 2060682 - RNA, 19 nt, Homo sapiens
  misc_RNA (1)...(19): siRNA sense strand
caaagcaauaccaggauag

SEQ ID NO: 2060683 - RNA, 19 nt, Homo sapiens
  misc_RNA (1)...(19): siRNA sense strand
ggauauacucaauuacacu

SEQ ID NO: 2060684 - RNA, 19 nt, Homo sapiens
  misc_RNA (1)...(19): siRNA sense strand
caaagaaccuuccaugaug

SEQ ID NO: 2060685 - RNA, 19 nt, Homo sapiens
  misc_RNA (1)...(19): siRNA sense strand
gaacugaacuuugacuuuc

SEQ ID NO: 2060686 - RNA, 19 nt, Homo sapiens
  misc_RNA (1)...(19): siRNA sense strand
ggaaggacuuugucucuga

SEQ ID NO: 2060687 - RNA, 19 nt, Homo sapiens
  misc_RNA (1)...(19): siRNA sense strand
gagcugaguguaagaauua

SEQ ID NO: 2060688 - RNA, 19 nt, Homo sapiens
  misc_RNA (1)...(19): siRNA sense strand
agauagagcuggccagaua

SEQ ID NO: 2060689 - RNA, 19 nt, Homo sapiens
  misc_RNA (1)...(19): siRNA sense strand
gcacacagcuguacauggu

SEQ ID NO: 2060690 - RNA, 19 nt, Homo sapiens
  misc_RNA (1)...(19): siRNA sense strand
ucaccaagcucaugaaguu

SEQ ID NO: 2060691 - RNA, 19 nt, Homo sapiens
  misc_RNA (1)...(19): siRNA sense strand
uaucagaucuugaacaaug

SEQ ID NO: 2060692 - RNA, 19 nt, Homo sapiens
  misc_RNA (1)...(19): siRNA sense strand
gcaguguccuguuggauaa

SEQ ID NO: 2060693 - RNA, 19 nt, Homo sapiens
  misc_RNA (1)...(19): siRNA sense strand
ugaaggacaucauugagua

SEQ ID NO: 2060694 - RNA, 19 nt, Homo sapiens
  misc_RNA (1)...(19): siRNA sense strand
gaagaagaauguccucauc

SEQ ID NO: 2060695 - RNA, 19 nt, Homo sapiens
  misc_RNA (1)...(19): siRNA sense strand
gaaccauucuccaguaugu

SEQ ID NO: 2060696 - RNA, 19 nt, Homo sapiens
  misc_RNA (1)...(19): siRNA sense strand
ggaaguaucagaucuugaa

SEQ ID NO: 2060697 - RNA, 19 nt, Homo sapiens
  misc_RNA (1)...(19): siRNA sense strand
cagaccagaucuuugcuua

SEQ ID NO: 2060698 - RNA, 19 nt, Homo sapiens
  misc_RNA (1)...(19): siRNA sense strand
gagccacacgcuacaauua

SEQ ID NO: 2060699 - RNA, 19 nt, Homo sapiens
  misc_RNA (1)...(19): siRNA sense strand
gcaaguucaucaacauguu

SEQ ID NO: 2060700 - RNA, 19 nt, Homo sapiens
  misc_RNA (1)...(19): siRNA sense strand
ggaacugaacuuugacuuu

SEQ ID NO: 2060701 - RNA, 19 nt, Homo sapiens
  misc_RNA (1)...(19): siRNA sense strand
ucacacaucugcucaacau

SEQ ID NO: 2060702 - RNA, 19 nt, Homo sapiens
  misc_RNA (1)...(19): siRNA sense strand
gauagaagcugaggugaac

SEQ ID NO: 2060703 - RNA, 19 nt, Homo sapiens
  misc_RNA (1)...(19): siRNA sense strand
ccaaagaaccuuccaugau

SEQ ID NO: 2060704 - RNA, 19 nt, Homo sapiens
  misc_RNA (1)...(19): siRNA sense strand
gggcaucgcuguggucaug

SEQ ID NO: 2060705 - RNA, 19 nt, Homo sapiens
  misc_RNA (1)...(19): siRNA sense strand
ucacgggcauugcaaggua

SEQ ID NO: 2060706 - RNA, 19 nt, Homo sapiens
  misc_RNA (1)...(19): siRNA sense strand
gcugguugcuccaucauug

SEQ ID NO: 2060707 - RNA, 19 nt, Homo sapiens
  misc_RNA (1)...(19): siRNA sense strand
ucauggagguguacucuug

SEQ ID NO: 2060708 - RNA, 19 nt, Homo sapiens
  misc_RNA (1)...(19): siRNA sense strand
ggaggaaggacaugaguau

SEQ ID NO: 2060709 - RNA, 19 nt, Homo sapiens
  misc_RNA (1)...(19): siRNA sense strand
aaacaguccuucuucuuca

SEQ ID NO: 2060710 - RNA, 19 nt, Homo sapiens
  misc_RNA (1)...(19): siRNA sense strand
gacuugaacagacucauua

SEQ ID NO: 2060711 - RNA, 19 nt, Homo sapiens
  misc_RNA (1)...(19): siRNA sense strand
gaagagaacaaguccaagu

SEQ ID NO: 2060712 - RNA, 19 nt, Homo sapiens
  misc_RNA (1)...(19): siRNA sense strand
gaacugcuaaagauuguga

SEQ ID NO: 2060713 - RNA, 19 nt, Homo sapiens
  misc_RNA (1)...(19): siRNA sense strand
ucugggaacugaacuuuga

SEQ ID NO: 2060714 - RNA, 19 nt, Homo sapiens
  misc_RNA (1)...(19): siRNA sense strand
gcaaugccauccucuucug

SEQ ID NO: 2060715 - RNA, 19 nt, Homo sapiens
  misc_RNA (1)...(19): siRNA sense strand
caaacuggaugccaagaag

SEQ ID NO: 2060716 - RNA, 19 nt, Homo sapiens
  misc_RNA (1)...(19): siRNA sense strand
gcuguuggguagaucaauu

SEQ ID NO: 2060717 - RNA, 19 nt, Homo sapiens
  misc_RNA (1)...(19): siRNA sense strand
aaagguggauuugauauca

SEQ ID NO: 2060718 - RNA, 19 nt, Homo sapiens
  misc_RNA (1)...(19): siRNA sense strand
gaggaacugcuaaagauug

SEQ ID NO: 2060719 - RNA, 19 nt, Homo sapiens
  misc_RNA (1)...(19): siRNA sense strand
cagcuucgaugccauguuc

SEQ ID NO: 2060720 - RNA, 19 nt, Homo sapiens
  misc_RNA (1)...(19): siRNA sense strand
gcuaucagccgcuuugaga

SEQ ID NO: 2060721 - RNA, 19 nt, Homo sapiens
  misc_RNA (1)...(19): siRNA sense strand
gagaauucuuccuggaguu

SEQ ID NO: 2060722 - RNA, 19 nt, Homo sapiens
  misc_RNA (1)...(19): siRNA sense strand
uggaggaacugcuaaagau

SEQ ID NO: 2060723 - RNA, 19 nt, Homo sapiens
  misc_RNA (1)...(19): siRNA sense strand
gauccaagccucucaacau

SEQ ID NO: 2060724 - RNA, 19 nt, Homo sapiens
  misc_RNA (1)...(19): siRNA sense strand
gaauuauggcgucaucauu

SEQ ID NO: 2060725 - RNA, 19 nt, Homo sapiens
  misc_RNA (1)...(19): siRNA sense strand
caagagggcagcacaguuc

SEQ ID NO: 2060726 - RNA, 19 nt, Homo sapiens
  misc_RNA (1)...(19): siRNA sense strand
guucacagcugagcagugu

SEQ ID NO: 2060727 - RNA, 19 nt, Homo sapiens
  misc_RNA (1)...(19): siRNA sense strand
ggaccaugcuugaaucacu

SEQ ID NO: 2060728 - RNA, 19 nt, Homo sapiens
  misc_RNA (1)...(19): siRNA sense strand
gcaccgcggaggaauauga

SEQ ID NO: 2060729 - RNA, 19 nt, Homo sapiens
  misc_RNA (1)...(19): siRNA sense strand
gaagucagacgaggaguau

SEQ ID NO: 2060730 - RNA, 19 nt, Homo sapiens
  misc_RNA (1)...(19): siRNA sense strand
caacaucuguguggauuac

SEQ ID NO: 2060731 - RNA, 19 nt, Homo sapiens
  misc_RNA (1)...(19): siRNA sense strand
gaagugaucccaggcuaug

SEQ ID NO: 2060732 - RNA, 19 nt, Homo sapiens
  misc_RNA (1)...(19): siRNA sense strand
gcuuugaccuguucgacuu

SEQ ID NO: 2060733 - RNA, 19 nt, Homo sapiens
  misc_RNA (1)...(19): siRNA sense strand
gcuguggccuguccauguu

SEQ ID NO: 2060734 - RNA, 19 nt, Homo sapiens
  misc_RNA (1)...(19): siRNA sense strand
gaccagaucuuugcuuacu

SEQ ID NO: 2060735 - RNA, 19 nt, Homo sapiens
  misc_RNA (1)...(19): siRNA sense strand
caaacaguccuucuucuuc

SEQ ID NO: 2060736 - RNA, 19 nt, Homo sapiens
  misc_RNA (1)...(19): siRNA sense strand
cauagaggacuuucacaaa

SEQ ID NO: 2060737 - RNA, 19 nt, Homo sapiens
  misc_RNA (1)...(19): siRNA sense strand
gcgagcagaugguucagau

SEQ ID NO: 2060738 - RNA, 19 nt, Homo sapiens
  misc_RNA (1)...(19): siRNA sense strand
gaagugcagcgucaagaau

SEQ ID NO: 2060739 - RNA, 19 nt, Homo sapiens
  misc_RNA (1)...(19): siRNA sense strand
gcagacuccuggguuauca

SEQ ID NO: 2060740 - RNA, 19 nt, Homo sapiens
  misc_RNA (1)...(19): siRNA sense strand
cgcagaaccuuuccauguu

SEQ ID NO: 2060741 - RNA, 19 nt, Homo sapiens
  misc_RNA (1)...(19): siRNA sense strand
cgagcugaguguaagaauu

SEQ ID NO: 2060742 - RNA, 19 nt, Homo sapiens
  misc_RNA (1)...(19): siRNA sense strand
ugaaguccguggagacaga

SEQ ID NO: 2060743 - RNA, 19 nt, Homo sapiens
  misc_RNA (1)...(19): siRNA sense strand
gaggugaugcccaagauau

SEQ ID NO: 2060744 - RNA, 19 nt, Homo sapiens
  misc_RNA (1)...(19): siRNA sense strand
aaggaaccauucuccagua

SEQ ID NO: 2060745 - RNA, 19 nt, Homo sapiens
  misc_RNA (1)...(19): siRNA sense strand
uaaagauugugaagagcuu

SEQ ID NO: 2060746 - RNA, 19 nt, Homo sapiens
  misc_RNA (1)...(19): siRNA sense strand
ccaacguccagccuuauua

SEQ ID NO: 2060747 - RNA, 19 nt, Homo sapiens
  misc_RNA (1)...(19): siRNA sense strand
uggaugagcuaaagaacau

SEQ ID NO: 2060748 - RNA, 19 nt, Homo sapiens
  misc_RNA (1)...(19): siRNA sense strand
caaaacaucuugccuagag

SEQ ID NO: 2060749 - RNA, 19 nt, Homo sapiens
  misc_RNA (1)...(19): siRNA sense strand
ggaggaacugcuaaagauu

SEQ ID NO: 2060750 - RNA, 19 nt, Homo sapiens
  misc_RNA (1)...(19): siRNA sense strand
cgcaucggcugcucuguaa

SEQ ID NO: 2060751 - RNA, 19 nt, Homo sapiens
  misc_RNA (1)...(19): siRNA sense strand
caacgacagcgccuacuau

SEQ ID NO: 2060752 - RNA, 19 nt, Homo sapiens
  misc_RNA (1)...(19): siRNA sense strand
acuaugcucugaccaaguu

SEQ ID NO: 2060753 - RNA, 19 nt, Homo sapiens
  misc_RNA (1)...(19): siRNA sense strand
agaaacauaugcuccucaa

SEQ ID NO: 2060754 - RNA, 19 nt, Homo sapiens
  misc_RNA (1)...(19): siRNA sense strand
ggaggaggucugcgauuug

SEQ ID NO: 2060755 - RNA, 19 nt, Homo sapiens
  misc_RNA (1)...(19): siRNA sense strand
ggucauggaggaacugcua

SEQ ID NO: 2060756 - RNA, 19 nt, Homo sapiens
  misc_RNA (1)...(19): siRNA sense strand
ccaccucauuucaagacua

SEQ ID NO: 2060757 - RNA, 19 nt, Homo sapiens
  misc_RNA (1)...(19): siRNA sense strand
uaagaauuauggcgucauc

SEQ ID NO: 2060758 - RNA, 19 nt, Homo sapiens
  misc_RNA (1)...(19): siRNA sense strand
uagaggacuuucacaaaca

SEQ ID NO: 2060759 - RNA, 19 nt, Homo sapiens
  misc_RNA (1)...(19): siRNA sense strand
ccuaauggauggaaauguc

SEQ ID NO: 2060760 - RNA, 19 nt, Homo sapiens
  misc_RNA (1)...(19): siRNA sense strand
ucacaaacaguccuucuuc

SEQ ID NO: 2060761 - RNA, 19 nt, Homo sapiens
  misc_RNA (1)...(19): siRNA sense strand
aguaucagaucuugaacaa

SEQ ID NO: 2060762 - RNA, 19 nt, Homo sapiens
  misc_RNA (1)...(19): siRNA sense strand
gcaccucugccgccaugua

SEQ ID NO: 2060763 - RNA, 19 nt, Homo sapiens
  misc_RNA (1)...(19): siRNA sense strand
ggcaguguccuguuggaua

SEQ ID NO: 2060764 - RNA, 19 nt, Homo sapiens
  misc_RNA (1)...(19): siRNA sense strand
gauggaguauguccucuac

SEQ ID NO: 2060765 - RNA, 19 nt, Homo sapiens
  misc_RNA (1)...(19): siRNA sense strand
ggauggaaaugucaguaac

SEQ ID NO: 2060766 - RNA, 19 nt, Homo sapiens
  misc_RNA (1)...(19): siRNA sense strand
caggaaguaucagaucuug

SEQ ID NO: 2060767 - RNA, 19 nt, Homo sapiens
  misc_RNA (1)...(19): siRNA sense strand
ucacagcugagcaguguuu

SEQ ID NO: 2060768 - RNA, 19 nt, Homo sapiens
  misc_RNA (1)...(19): siRNA sense strand
ggaccugcuugaagagcuu

SEQ ID NO: 2060769 - RNA, 19 nt, Homo sapiens
  misc_RNA (1)...(19): siRNA sense strand
gaugccaagaagagaauua

SEQ ID NO: 2060770 - RNA, 19 nt, Homo sapiens
  misc_RNA (1)...(19): siRNA sense strand
acaguccacuccagcauga

SEQ ID NO: 2060771 - RNA, 19 nt, Homo sapiens
  misc_RNA (1)...(19): siRNA sense strand
ccaagaagagaauuaaucu

SEQ ID NO: 2060772 - RNA, 19 nt, Homo sapiens
  misc_RNA (1)...(19): siRNA sense strand
caaguucaucaacauguuu

SEQ ID NO: 2060773 - RNA, 19 nt, Homo sapiens
  misc_RNA (1)...(19): siRNA sense strand
ggacgggaaggaugaaauc

SEQ ID NO: 2060774 - RNA, 19 nt, Homo sapiens
  misc_RNA (1)...(19): siRNA sense strand
aggaggaggucugcgauuu

SEQ ID NO: 2060775 - RNA, 19 nt, Homo sapiens
  misc_RNA (1)...(19): siRNA sense strand
gcuacaauggguccacuaa

SEQ ID NO: 2060776 - RNA, 19 nt, Homo sapiens
  misc_RNA (1)...(19): siRNA sense strand
ggaccugaccuccauugug

SEQ ID NO: 2060777 - RNA, 19 nt, Homo sapiens
  misc_RNA (1)...(19): siRNA sense strand
ccagaucuuugcuuacuac

SEQ ID NO: 2060778 - RNA, 19 nt, Homo sapiens
  misc_RNA (1)...(19): siRNA sense strand
gucaacaucuguguggauu

SEQ ID NO: 2060779 - RNA, 19 nt, Homo sapiens
  misc_RNA (1)...(19): siRNA sense strand
ccuaaugacccaugcuuga

SEQ ID NO: 2060780 - RNA, 19 nt, Homo sapiens
  misc_RNA (1)...(19): siRNA sense strand
ccaccuuccuccaucaugu

SEQ ID NO: 2060781 - RNA, 19 nt, Homo sapiens
  misc_RNA (1)...(19): siRNA sense strand
ucugcagacuccuggguua

SEQ ID NO: 2060782 - RNA, 19 nt, Homo sapiens
  misc_RNA (1)...(19): siRNA sense strand
cugccaacguccagccuua

SEQ ID NO: 2060783 - RNA, 19 nt, Homo sapiens
  misc_RNA (1)...(19): siRNA sense strand
gcacgucacccuggaagau

SEQ ID NO: 2060784 - RNA, 19 nt, Homo sapiens
  misc_RNA (1)...(19): siRNA sense strand
gcaaagggguggugaacaa

SEQ ID NO: 2060785 - RNA, 19 nt, Homo sapiens
  misc_RNA (1)...(19): siRNA sense strand
cagcugagguggagcagau

SEQ ID NO: 2060786 - RNA, 19 nt, Homo sapiens
  misc_RNA (1)...(19): siRNA sense strand
ucacugugcuacaucauca

SEQ ID NO: 2060787 - RNA, 19 nt, Homo sapiens
  misc_RNA (1)...(19): siRNA sense strand
gauacaggaguucaaagaa

SEQ ID NO: 2060788 - RNA, 19 nt, Homo sapiens
  misc_RNA (1)...(19): siRNA sense strand
caacgucuuuuccauguuu

SEQ ID NO: 2060789 - RNA, 19 nt, Homo sapiens
  misc_RNA (1)...(19): siRNA sense strand
auacaggaguucaaagaag

SEQ ID NO: 2060790 - RNA, 19 nt, Homo sapiens
  misc_RNA (1)...(19): siRNA sense strand
ccagauacaggaguucaaa

SEQ ID NO: 2060791 - RNA, 19 nt, Homo sapiens
  misc_RNA (1)...(19): siRNA sense strand
ucagcuguaucgaccagaa

SEQ ID NO: 2060792 - RNA, 19 nt, Homo sapiens
  misc_RNA (1)...(19): siRNA sense strand
gagacgagaaagaggaaug

SEQ ID NO: 2060793 - RNA, 19 nt, Homo sapiens
  misc_RNA (1)...(19): siRNA sense strand
acaagucacugugcuacau

SEQ ID NO: 2060794 - RNA, 19 nt, Homo sapiens
  misc_RNA (1)...(19): siRNA sense strand
cugagugccuuccgcaugu

SEQ ID NO: 2060795 - RNA, 19 nt, Homo sapiens
  misc_RNA (1)...(19): siRNA sense strand
gcagauguucgcccugaca

SEQ ID NO: 2060796 - RNA, 19 nt, Homo sapiens
  misc_RNA (1)...(19): siRNA sense strand
agauacaggaguucaaaga

SEQ ID NO: 2060797 - RNA, 19 nt, Homo sapiens
  misc_RNA (1)...(19): siRNA sense strand
gacccaggcagacaaguuc

SEQ ID NO: 2060798 - RNA, 19 nt, Homo sapiens
  misc_RNA (1)...(19): siRNA sense strand
guuugaacaagcccagaua

SEQ ID NO: 2060799 - RNA, 19 nt, Homo sapiens
  misc_RNA (1)...(19): siRNA sense strand
gggaacaucgacuacaagu

SEQ ID NO: 2060800 - RNA, 19 nt, Homo sapiens
  misc_RNA (1)...(19): siRNA sense strand
aagcccagauacaggaguu

SEQ ID NO: 2060801 - RNA, 19 nt, Homo sapiens
  misc_RNA (1)...(19): siRNA sense strand
ugacccaggcagacaaguu

SEQ ID NO: 2060802 - RNA, 19 nt, Homo sapiens
  misc_RNA (1)...(19): siRNA sense strand
acaaggaugaguucaagca

SEQ ID NO: 2060803 - RNA, 19 nt, Homo sapiens
  misc_RNA (1)...(19): siRNA sense strand
caaacccucuugauaauaa

SEQ ID NO: 2060804 - RNA, 19 nt, Homo sapiens
  misc_RNA (1)...(19): siRNA sense strand
uaacgaagauucacccaaa

SEQ ID NO: 2060805 - RNA, 19 nt, Homo sapiens
  misc_RNA (1)...(19): siRNA sense strand
gagcuucacuuagauuaua

SEQ ID NO: 2060806 - RNA, 19 nt, Homo sapiens
  misc_RNA (1)...(19): siRNA sense strand
ugaaauaccuccagauaau

SEQ ID NO: 2060807 - RNA, 19 nt, Homo sapiens
  misc_RNA (1)...(19): siRNA sense strand
guaaaugacuucuguccaa

SEQ ID NO: 2060808 - RNA, 19 nt, Homo sapiens
  misc_RNA (1)...(19): siRNA sense strand
caaccaacauuccauuuga

SEQ ID NO: 2060809 - RNA, 19 nt, Homo sapiens
  misc_RNA (1)...(19): siRNA sense strand
gaacucagaauucaugaaa

SEQ ID NO: 2060810 - RNA, 19 nt, Homo sapiens
  misc_RNA (1)...(19): siRNA sense strand
gaaauaccacuuaaucuuc

SEQ ID NO: 2060811 - RNA, 19 nt, Homo sapiens
  misc_RNA (1)...(19): siRNA sense strand
gugcaaacccucuugauaa

SEQ ID NO: 2060812 - RNA, 19 nt, Homo sapiens
  misc_RNA (1)...(19): siRNA sense strand
ucaacaacccggugaaaua

SEQ ID NO: 2060813 - RNA, 19 nt, Homo sapiens
  misc_RNA (1)...(19): siRNA sense strand
caguggaacuugaggauuu

SEQ ID NO: 2060814 - RNA, 19 nt, Homo sapiens
  misc_RNA (1)...(19): siRNA sense strand
guacauugcucagauuuag

SEQ ID NO: 2060815 - RNA, 19 nt, Homo sapiens
  misc_RNA (1)...(19): siRNA sense strand
ggacucacuucacuuuaug

SEQ ID NO: 2060816 - RNA, 19 nt, Homo sapiens
  misc_RNA (1)...(19): siRNA sense strand
gggaguaaaugacuucugu

SEQ ID NO: 2060817 - RNA, 19 nt, Homo sapiens
  misc_RNA (1)...(19): siRNA sense strand
ugaagaauaugaugcugaa

SEQ ID NO: 2060818 - RNA, 19 nt, Homo sapiens
  misc_RNA (1)...(19): siRNA sense strand
uaacauaccacgugugaga

SEQ ID NO: 2060819 - RNA, 19 nt, Homo sapiens
  misc_RNA (1)...(19): siRNA sense strand
ccuaaaggcuuaccaccaa

SEQ ID NO: 2060820 - RNA, 19 nt, Homo sapiens
  misc_RNA (1)...(19): siRNA sense strand
uagcagaacucagaauuca

SEQ ID NO: 2060821 - RNA, 19 nt, Homo sapiens
  misc_RNA (1)...(19): siRNA sense strand
gcagaacucagaauucaug

SEQ ID NO: 2060822 - RNA, 19 nt, Homo sapiens
  misc_RNA (1)...(19): siRNA sense strand
uauuggagcuucacuuaga

SEQ ID NO: 2060823 - RNA, 19 nt, Homo sapiens
  misc_RNA (1)...(19): siRNA sense strand
gcaaacccucuugauaaua

SEQ ID NO: 2060824 - RNA, 19 nt, Homo sapiens
  misc_RNA (1)...(19): siRNA sense strand
guugaaauaccuccagaua

SEQ ID NO: 2060825 - RNA, 19 nt, Homo sapiens
  misc_RNA (1)...(19): siRNA sense strand
agacacagaugaugaugau

SEQ ID NO: 2060826 - RNA, 19 nt, Homo sapiens
  misc_RNA (1)...(19): siRNA sense strand
acaacaagcuaacgaagau

SEQ ID NO: 2060827 - RNA, 19 nt, Homo sapiens
  misc_RNA (1)...(19): siRNA sense strand
caacagugccaaagaugaa

SEQ ID NO: 2060828 - RNA, 19 nt, Homo sapiens
  misc_RNA (1)...(19): siRNA sense strand
ugccaaagaugaagaaauc

SEQ ID NO: 2060829 - RNA, 19 nt, Homo sapiens
  misc_RNA (1)...(19): siRNA sense strand
gaaauacugggaaaugcaa

SEQ ID NO: 2060830 - RNA, 19 nt, Homo sapiens
  misc_RNA (1)...(19): siRNA sense strand
aaugaaugcuuuacacguu

SEQ ID NO: 2060831 - RNA, 19 nt, Homo sapiens
  misc_RNA (1)...(19): siRNA sense strand
cagaaugaguguucagcuu

SEQ ID NO: 2060832 - RNA, 19 nt, Homo sapiens
  misc_RNA (1)...(19): siRNA sense strand
gcuaacauaccacguguga

SEQ ID NO: 2060833 - RNA, 19 nt, Homo sapiens
  misc_RNA (1)...(19): siRNA sense strand
cauuugaucuguuuccaau

SEQ ID NO: 2060834 - RNA, 19 nt, Homo sapiens
  misc_RNA (1)...(19): siRNA sense strand
agaauaugaugcugaagga

SEQ ID NO: 2060835 - RNA, 19 nt, Homo sapiens
  misc_RNA (1)...(19): siRNA sense strand
aguaugugcuccuauuauu

SEQ ID NO: 2060836 - RNA, 19 nt, Homo sapiens
  misc_RNA (1)...(19): siRNA sense strand
gguguuccauaucagaauu

SEQ ID NO: 2060837 - RNA, 19 nt, Homo sapiens
  misc_RNA (1)...(19): siRNA sense strand
ggucugauccugaacaaca

SEQ ID NO: 2060838 - RNA, 19 nt, Homo sapiens
  misc_RNA (1)...(19): siRNA sense strand
acacagaugaugaugauga

SEQ ID NO: 2060839 - RNA, 19 nt, Homo sapiens
  misc_RNA (1)...(19): siRNA sense strand
ggaagacacagaugaugau

SEQ ID NO: 2060840 - RNA, 19 nt, Homo sapiens
  misc_RNA (1)...(19): siRNA sense strand
uaucagaauugcagaagca

SEQ ID NO: 2060841 - RNA, 19 nt, Homo sapiens
  misc_RNA (1)...(19): siRNA sense strand
gaaaaugggagucuugcua

SEQ ID NO: 2060842 - RNA, 19 nt, Homo sapiens
  misc_RNA (1)...(19): siRNA sense strand
gauuaccagaguugaaaua

SEQ ID NO: 2060843 - RNA, 19 nt, Homo sapiens
  misc_RNA (1)...(19): siRNA sense strand
ucagugcuauucacgaguu

SEQ ID NO: 2060844 - RNA, 19 nt, Homo sapiens
  misc_RNA (1)...(19): siRNA sense strand
aauaugaugcugaaggaua

SEQ ID NO: 2060845 - RNA, 19 nt, Homo sapiens
  misc_RNA (1)...(19): siRNA sense strand
gggugacgguguuccauau

SEQ ID NO: 2060846 - RNA, 19 nt, Homo sapiens
  misc_RNA (1)...(19): siRNA sense strand
cacuuaaucuucccaaauc

SEQ ID NO: 2060847 - RNA, 19 nt, Homo sapiens
  misc_RNA (1)...(19): siRNA sense strand
uuaaaggacucacuucacu

SEQ ID NO: 2060848 - RNA, 19 nt, Homo sapiens
  misc_RNA (1)...(19): siRNA sense strand
ucaacuaagugaaauacca

SEQ ID NO: 2060849 - RNA, 19 nt, Homo sapiens
  misc_RNA (1)...(19): siRNA sense strand
cagaugaugaugaugauga

SEQ ID NO: 2060850 - RNA, 19 nt, Homo sapiens
  misc_RNA (1)...(19): siRNA sense strand
ugggaacuuuggaauguaa

SEQ ID NO: 2060851 - RNA, 19 nt, Homo sapiens
  misc_RNA (1)...(19): siRNA sense strand
gaaauaccuccagauaauc

SEQ ID NO: 2060852 - RNA, 19 nt, Homo sapiens
  misc_RNA (1)...(19): siRNA sense strand
ucacacaucgcacugaaga

SEQ ID NO: 2060853 - RNA, 19 nt, Homo sapiens
  misc_RNA (1)...(19): siRNA sense strand
cacaaucaacuaagugaaa

SEQ ID NO: 2060854 - RNA, 19 nt, Homo sapiens
  misc_RNA (1)...(19): siRNA sense strand
acaucgcacugaagaauau

SEQ ID NO: 2060855 - RNA, 19 nt, Homo sapiens
  misc_RNA (1)...(19): siRNA sense strand
caagagugggaguaaauga

SEQ ID NO: 2060856 - RNA, 19 nt, Homo sapiens
  misc_RNA (1)...(19): siRNA sense strand
caacuuuauuggagcuuca

SEQ ID NO: 2060857 - RNA, 19 nt, Homo sapiens
  misc_RNA (1)...(19): siRNA sense strand
ugcaaacccucuugauaau

SEQ ID NO: 2060858 - RNA, 19 nt, Homo sapiens
  misc_RNA (1)...(19): siRNA sense strand
ccacuuaaucuucccaaau

SEQ ID NO: 2060859 - RNA, 19 nt, Homo sapiens
  misc_RNA (1)...(19): siRNA sense strand
ucacagauaucgaaaaugg

SEQ ID NO: 2060860 - RNA, 19 nt, Homo sapiens
  misc_RNA (1)...(19): siRNA sense strand
gaguaugugcuccuauuau

SEQ ID NO: 2060861 - RNA, 19 nt, Homo sapiens
  misc_RNA (1)...(19): siRNA sense strand
aaggacacauucaaaggaa

SEQ ID NO: 2060862 - RNA, 19 nt, Homo sapiens
  misc_RNA (1)...(19): siRNA sense strand
ggugaaauacugggaaaug

SEQ ID NO: 2060863 - RNA, 19 nt, Homo sapiens
  misc_RNA (1)...(19): siRNA sense strand
ccaaccaacauuccauuug

SEQ ID NO: 2060864 - RNA, 19 nt, Homo sapiens
  misc_RNA (1)...(19): siRNA sense strand
caacaacccggugaaauac

SEQ ID NO: 2060865 - RNA, 19 nt, Homo sapiens
  misc_RNA (1)...(19): siRNA sense strand
aggcuuaccaccaacuuua

SEQ ID NO: 2060866 - RNA, 19 nt, Homo sapiens
  misc_RNA (1)...(19): siRNA sense strand
guuguacauugcucagauu

SEQ ID NO: 2060867 - RNA, 19 nt, Homo sapiens
  misc_RNA (1)...(19): siRNA sense strand
gauaaucuuccuucauucu

SEQ ID NO: 2060868 - RNA, 19 nt, Homo sapiens
  misc_RNA (1)...(19): siRNA sense strand
gugacgguguuccauauca

SEQ ID NO: 2060869 - RNA, 19 nt, Homo sapiens
  misc_RNA (1)...(19): siRNA sense strand
ggcuguaucugucccacaa

SEQ ID NO: 2060870 - RNA, 19 nt, Homo sapiens
  misc_RNA (1)...(19): siRNA sense strand
gcaagagugggaguaaaug

SEQ ID NO: 2060871 - RNA, 19 nt, Homo sapiens
  misc_RNA (1)...(19): siRNA sense strand
guccaacagugccaaagau

SEQ ID NO: 2060872 - RNA, 19 nt, Homo sapiens
  misc_RNA (1)...(19): siRNA sense strand
ccaacaagagagccaagaa

SEQ ID NO: 2060873 - RNA, 19 nt, Homo sapiens
  misc_RNA (1)...(19): siRNA sense strand
ggauauggaagacacagau

SEQ ID NO: 2060874 - RNA, 19 nt, Homo sapiens
  misc_RNA (1)...(19): siRNA sense strand
ccaacagugccaaagauga

SEQ ID NO: 2060875 - RNA, 19 nt, Homo sapiens
  misc_RNA (1)...(19): siRNA sense strand
caaaaucacagauaucgaa

SEQ ID NO: 2060876 - RNA, 19 nt, Homo sapiens
  misc_RNA (1)...(19): siRNA sense strand
uuuauuggagcuucacuua

SEQ ID NO: 2060877 - RNA, 19 nt, Homo sapiens
  misc_RNA (1)...(19): siRNA sense strand
uugcucagauuuagguuug

SEQ ID NO: 2060878 - RNA, 19 nt, Homo sapiens
  misc_RNA (1)...(19): siRNA sense strand
caacaagagagccaagaag

SEQ ID NO: 2060879 - RNA, 19 nt, Homo sapiens
  misc_RNA (1)...(19): siRNA sense strand
aggacucacuucacuuuau

SEQ ID NO: 2060880 - RNA, 19 nt, Homo sapiens
  misc_RNA (1)...(19): siRNA sense strand
aaaggacacauucaaagga

SEQ ID NO: 2060881 - RNA, 19 nt, Homo sapiens
  misc_RNA (1)...(19): siRNA sense strand
uuugaucuguuuccaaugu

SEQ ID NO: 2060882 - RNA, 19 nt, Homo sapiens
  misc_RNA (1)...(19): siRNA sense strand
cuugggaacuuuggaaugu

SEQ ID NO: 2060883 - RNA, 19 nt, Homo sapiens
  misc_RNA (1)...(19): siRNA sense strand
ccaaaucauuagcagaacu

SEQ ID NO: 2060884 - RNA, 19 nt, Homo sapiens
  misc_RNA (1)...(19): siRNA sense strand
caacauuccauuugauacu

SEQ ID NO: 2060885 - RNA, 19 nt, Homo sapiens
  misc_RNA (1)...(19): siRNA sense strand
uuuauggucugauccugaa

SEQ ID NO: 2060886 - RNA, 19 nt, Homo sapiens
  misc_RNA (1)...(19): siRNA sense strand
ccggugaaauacugggaaa

SEQ ID NO: 2060887 - RNA, 19 nt, Homo sapiens
  misc_RNA (1)...(19): siRNA sense strand
uggaagacacagaugauga

SEQ ID NO: 2060888 - RNA, 19 nt, Homo sapiens
  misc_RNA (1)...(19): siRNA sense strand
uugaaauaccuccagauaa

SEQ ID NO: 2060889 - RNA, 19 nt, Homo sapiens
  misc_RNA (1)...(19): siRNA sense strand
gggccuaggaaacaacaaa

SEQ ID NO: 2060890 - RNA, 19 nt, Homo sapiens
  misc_RNA (1)...(19): siRNA sense strand
gaagacacagaugaugaug

SEQ ID NO: 2060891 - RNA, 19 nt, Homo sapiens
  misc_RNA (1)...(19): siRNA sense strand
ugaccucagucccaaccaa

SEQ ID NO: 2060892 - RNA, 19 nt, Homo sapiens
  misc_RNA (1)...(19): siRNA sense strand
ugggagucuugcuaacaua

SEQ ID NO: 2060893 - RNA, 19 nt, Homo sapiens
  misc_RNA (1)...(19): siRNA sense strand
auacaaagaacuacaaagg

SEQ ID NO: 2060894 - RNA, 19 nt, Homo sapiens
  misc_RNA (1)...(19): siRNA sense strand
ggagcuucacuuagauuau

SEQ ID NO: 2060895 - RNA, 19 nt, Homo sapiens
  misc_RNA (1)...(19): siRNA sense strand
ucccaaaucauuagcagaa

SEQ ID NO: 2060896 - RNA, 19 nt, Homo sapiens
  misc_RNA (1)...(19): siRNA sense strand
caaccugcaacauuucguu

SEQ ID NO: 2060897 - RNA, 19 nt, Homo sapiens
  misc_RNA (1)...(19): siRNA sense strand
gagugggaguaaaugacuu

SEQ ID NO: 2060898 - RNA, 19 nt, Homo sapiens
  misc_RNA (1)...(19): siRNA sense strand
ugaccucaguuccuaaagg

SEQ ID NO: 2060899 - RNA, 19 nt, Homo sapiens
  misc_RNA (1)...(19): siRNA sense strand
agugcaaacccucuugaua

SEQ ID NO: 2060900 - RNA, 19 nt, Homo sapiens
  misc_RNA (1)...(19): siRNA sense strand
augaaugcuuuacacguuu

SEQ ID NO: 2060901 - RNA, 19 nt, Homo sapiens
  misc_RNA (1)...(19): siRNA sense strand
acacaucgcacugaagaau

SEQ ID NO: 2060902 - RNA, 19 nt, Homo sapiens
  misc_RNA (1)...(19): siRNA sense strand
gugaaauacugggaaaugc

SEQ ID NO: 2060903 - RNA, 19 nt, Homo sapiens
  misc_RNA (1)...(19): siRNA sense strand
gaacaucagucuagaauca

SEQ ID NO: 2060904 - RNA, 19 nt, Homo sapiens
  misc_RNA (1)...(19): siRNA sense strand
cuaaauaaguccuggauua

SEQ ID NO: 2060905 - RNA, 19 nt, Homo sapiens
  misc_RNA (1)...(19): siRNA sense strand
ccacugcuguugauuauuu

SEQ ID NO: 2060906 - RNA, 19 nt, Homo sapiens
  misc_RNA (1)...(19): siRNA sense strand
gggcagggcuguuguauca

SEQ ID NO: 2060907 - RNA, 19 nt, Homo sapiens
  misc_RNA (1)...(19): siRNA sense strand
cauaagaaccgaucacaua

SEQ ID NO: 2060908 - RNA, 19 nt, Homo sapiens
  misc_RNA (1)...(19): siRNA sense strand
cuucauaucucuuuacgua

SEQ ID NO: 2060909 - RNA, 19 nt, Homo sapiens
  misc_RNA (1)...(19): siRNA sense strand
gaaccgaucacauaucaaa

SEQ ID NO: 2060910 - RNA, 19 nt, Homo sapiens
  misc_RNA (1)...(19): siRNA sense strand
uaaaggagcucuaguacca

SEQ ID NO: 2060911 - RNA, 19 nt, Homo sapiens
  misc_RNA (1)...(19): siRNA sense strand
gaucacauaucaaagacuu

SEQ ID NO: 2060912 - RNA, 19 nt, Homo sapiens
  misc_RNA (1)...(19): siRNA sense strand
ucacagcucuaaacagaaa

SEQ ID NO: 2060913 - RNA, 19 nt, Homo sapiens
  misc_RNA (1)...(19): siRNA sense strand
ggaacccagucuuuguuua

SEQ ID NO: 2060914 - RNA, 19 nt, Homo sapiens
  misc_RNA (1)...(19): siRNA sense strand
gaagcaguaucucgaagaa

SEQ ID NO: 2060915 - RNA, 19 nt, Homo sapiens
  misc_RNA (1)...(19): siRNA sense strand
ccuaauaguucccauggua

SEQ ID NO: 2060916 - RNA, 19 nt, Homo sapiens
  misc_RNA (1)...(19): siRNA sense strand
gcagggcuguuguaucaaa

SEQ ID NO: 2060917 - RNA, 19 nt, Homo sapiens
  misc_RNA (1)...(19): siRNA sense strand
ugacuuuguuguccuaaua

SEQ ID NO: 2060918 - RNA, 19 nt, Homo sapiens
  misc_RNA (1)...(19): siRNA sense strand
gaacccagucuuuguuuaa

SEQ ID NO: 2060919 - RNA, 19 nt, Homo sapiens
  misc_RNA (1)...(19): siRNA sense strand
aaucacagcucuaaacaga

SEQ ID NO: 2060920 - RNA, 19 nt, Homo sapiens
  misc_RNA (1)...(19): siRNA sense strand
gcaaacaggguuauauaug

SEQ ID NO: 2060921 - RNA, 19 nt, Homo sapiens
  misc_RNA (1)...(19): siRNA sense strand
gagcuucucgguguaauua

SEQ ID NO: 2060922 - RNA, 19 nt, Homo sapiens
  misc_RNA (1)...(19): siRNA sense strand
gaaggaagcuuuugucagu

SEQ ID NO: 2060923 - RNA, 19 nt, Homo sapiens
  misc_RNA (1)...(19): siRNA sense strand
ggacaggagcaauggauuu

SEQ ID NO: 2060924 - RNA, 19 nt, Homo sapiens
  misc_RNA (1)...(19): siRNA sense strand
gaaccaccgugcuggaaau

SEQ ID NO: 2060925 - RNA, 19 nt, Homo sapiens
  misc_RNA (1)...(19): siRNA sense strand
guaauuaccagugcguuua

SEQ ID NO: 2060926 - RNA, 19 nt, Homo sapiens
  misc_RNA (1)...(19): siRNA sense strand
gcacacggguuggucuauu

SEQ ID NO: 2060927 - RNA, 19 nt, Homo sapiens
  misc_RNA (1)...(19): siRNA sense strand
ucaaguaaauguagaagca

SEQ ID NO: 2060928 - RNA, 19 nt, Homo sapiens
  misc_RNA (1)...(19): siRNA sense strand
ccagcuagcccuugacuuu

SEQ ID NO: 2060929 - RNA, 19 nt, Homo sapiens
  misc_RNA (1)...(19): siRNA sense strand
caaacaggguuauauaugc

SEQ ID NO: 2060930 - RNA, 19 nt, Homo sapiens
  misc_RNA (1)...(19): siRNA sense strand
ggacgauuagccauuauaa

SEQ ID NO: 2060931 - RNA, 19 nt, Homo sapiens
  misc_RNA (1)...(19): siRNA sense strand
ccagucaccuguuacaaau

SEQ ID NO: 2060932 - RNA, 19 nt, Homo sapiens
  misc_RNA (1)...(19): siRNA sense strand
gacuuuaccucacugaaga

SEQ ID NO: 2060933 - RNA, 19 nt, Homo sapiens
  misc_RNA (1)...(19): siRNA sense strand
uaucaaauauaccgaagga

SEQ ID NO: 2060934 - RNA, 19 nt, Homo sapiens
  misc_RNA (1)...(19): siRNA sense strand
aaacuagauuccucacuga

SEQ ID NO: 2060935 - RNA, 19 nt, Homo sapiens
  misc_RNA (1)...(19): siRNA sense strand
cacacggguuggucuauua

SEQ ID NO: 2060936 - RNA, 19 nt, Homo sapiens
  misc_RNA (1)...(19): siRNA sense strand
gugcaaacaggguuauaua

SEQ ID NO: 2060937 - RNA, 19 nt, Homo sapiens
  misc_RNA (1)...(19): siRNA sense strand
uauaacaacuggccugauc

SEQ ID NO: 2060938 - RNA, 19 nt, Homo sapiens
  misc_RNA (1)...(19): siRNA sense strand
ccucggcauuacuguauua

SEQ ID NO: 2060939 - RNA, 19 nt, Homo sapiens
  misc_RNA (1)...(19): siRNA sense strand
agucaccuguuacaaauaa

SEQ ID NO: 2060940 - RNA, 19 nt, Homo sapiens
  misc_RNA (1)...(19): siRNA sense strand
guacucuguuuggccauua

SEQ ID NO: 2060941 - RNA, 19 nt, Homo sapiens
  misc_RNA (1)...(19): siRNA sense strand
aagaaccgaucacauauca

SEQ ID NO: 2060942 - RNA, 19 nt, Homo sapiens
  misc_RNA (1)...(19): siRNA sense strand
gcagaggguuccugaucau

SEQ ID NO: 2060943 - RNA, 19 nt, Homo sapiens
  misc_RNA (1)...(19): siRNA sense strand
guagccacuuugaccauuu

SEQ ID NO: 2060944 - RNA, 19 nt, Homo sapiens
  misc_RNA (1)...(19): siRNA sense strand
gaauggaacccagucuuug

SEQ ID NO: 2060945 - RNA, 19 nt, Homo sapiens
  misc_RNA (1)...(19): siRNA sense strand
ucacugaagagguuaauau

SEQ ID NO: 2060946 - RNA, 19 nt, Homo sapiens
  misc_RNA (1)...(19): siRNA sense strand
gguccaaauugcauuacuu

SEQ ID NO: 2060947 - RNA, 19 nt, Homo sapiens
  misc_RNA (1)...(19): siRNA sense strand
ggaguagguggcuuuguuu

SEQ ID NO: 2060948 - RNA, 19 nt, Homo sapiens
  misc_RNA (1)...(19): siRNA sense strand
uggaguagguggcuuuguu

SEQ ID NO: 2060949 - RNA, 19 nt, Homo sapiens
  misc_RNA (1)...(19): siRNA sense strand
caaacucauuguacucugu

SEQ ID NO: 2060950 - RNA, 19 nt, Homo sapiens
  misc_RNA (1)...(19): siRNA sense strand
caccacugcuguugauuau

SEQ ID NO: 2060951 - RNA, 19 nt, Homo sapiens
  misc_RNA (1)...(19): siRNA sense strand
ccauguucuuggaaacuua

SEQ ID NO: 2060952 - RNA, 19 nt, Homo sapiens
  misc_RNA (1)...(19): siRNA sense strand
cauuugggcuucauuuauc

SEQ ID NO: 2060953 - RNA, 19 nt, Homo sapiens
  misc_RNA (1)...(19): siRNA sense strand
caacuggccugaucaaccu

SEQ ID NO: 2060954 - RNA, 19 nt, Homo sapiens
  misc_RNA (1)...(19): siRNA sense strand
gauccuucuuaguaguuua

SEQ ID NO: 2060955 - RNA, 19 nt, Homo sapiens
  misc_RNA (1)...(19): siRNA sense strand
gggcuguuguaucaaauau

SEQ ID NO: 2060956 - RNA, 19 nt, Homo sapiens
  misc_RNA (1)...(19): siRNA sense strand
ucgaagaauggcaaauuua

SEQ ID NO: 2060957 - RNA, 19 nt, Homo sapiens
  misc_RNA (1)...(19): siRNA sense strand
gcgaaggaauaaucucuac

SEQ ID NO: 2060958 - RNA, 19 nt, Homo sapiens
  misc_RNA (1)...(19): siRNA sense strand
gaugguagauacauuacac

SEQ ID NO: 2060959 - RNA, 19 nt, Homo sapiens
  misc_RNA (1)...(19): siRNA sense strand
cuuauccagucaccuguua

SEQ ID NO: 2060960 - RNA, 19 nt, Homo sapiens
  misc_RNA (1)...(19): siRNA sense strand
ggauugugcuuuccugcau

SEQ ID NO: 2060961 - RNA, 19 nt, Homo sapiens
  misc_RNA (1)...(19): siRNA sense strand
ucaccuaccuggaaaacua

SEQ ID NO: 2060962 - RNA, 19 nt, Homo sapiens
  misc_RNA (1)...(19): siRNA sense strand
ggucaaucucuauauguuu

SEQ ID NO: 2060963 - RNA, 19 nt, Homo sapiens
  misc_RNA (1)...(19): siRNA sense strand
aaacaggguuauauaugca

SEQ ID NO: 2060964 - RNA, 19 nt, Homo sapiens
  misc_RNA (1)...(19): siRNA sense strand
ccaaauugcauuacuuuac

SEQ ID NO: 2060965 - RNA, 19 nt, Homo sapiens
  misc_RNA (1)...(19): siRNA sense strand
cucgaagaauggcaaauuu

SEQ ID NO: 2060966 - RNA, 19 nt, Homo sapiens
  misc_RNA (1)...(19): siRNA sense strand
ucauaucucuuuacguagu

SEQ ID NO: 2060967 - RNA, 19 nt, Homo sapiens
  misc_RNA (1)...(19): siRNA sense strand
gcauuacuuuacaaacuca

SEQ ID NO: 2060968 - RNA, 19 nt, Homo sapiens
  misc_RNA (1)...(19): siRNA sense strand
ggucugcaaugguuugucu

SEQ ID NO: 2060969 - RNA, 19 nt, Homo sapiens
  misc_RNA (1)...(19): siRNA sense strand
aauggcaaauuuagccuuu

SEQ ID NO: 2060970 - RNA, 19 nt, Homo sapiens
  misc_RNA (1)...(19): siRNA sense strand
cgaagaauggcaaauuuag

SEQ ID NO: 2060971 - RNA, 19 nt, Homo sapiens
  misc_RNA (1)...(19): siRNA sense strand
cagcuagcccuugacuuua

SEQ ID NO: 2060972 - RNA, 19 nt, Homo sapiens
  misc_RNA (1)...(19): siRNA sense strand
acaccacugcuguugauua

SEQ ID NO: 2060973 - RNA, 19 nt, Homo sapiens
  misc_RNA (1)...(19): siRNA sense strand
gguagccacuuugaccauu

SEQ ID NO: 2060974 - RNA, 19 nt, Homo sapiens
  misc_RNA (1)...(19): siRNA sense strand
ccugaugguagauacauua

SEQ ID NO: 2060975 - RNA, 19 nt, Homo sapiens
  misc_RNA (1)...(19): siRNA sense strand
agaauggaacccagucuuu

SEQ ID NO: 2060976 - RNA, 19 nt, Homo sapiens
  misc_RNA (1)...(19): siRNA sense strand
aauuaaaggagcucuagua

SEQ ID NO: 2060977 - RNA, 19 nt, Homo sapiens
  misc_RNA (1)...(19): siRNA sense strand
ggaaccaccgugcuggaaa

SEQ ID NO: 2060978 - RNA, 19 nt, Homo sapiens
  misc_RNA (1)...(19): siRNA sense strand
uauaccagcuagcccuuga

SEQ ID NO: 2060979 - RNA, 19 nt, Homo sapiens
  misc_RNA (1)...(19): siRNA sense strand
caucuccuguuuccgugua

SEQ ID NO: 2060980 - RNA, 19 nt, Homo sapiens
  misc_RNA (1)...(19): siRNA sense strand
cuagauuccucacugacuu

SEQ ID NO: 2060981 - RNA, 19 nt, Homo sapiens
  misc_RNA (1)...(19): siRNA sense strand
agcaguaucucgaagaaug

SEQ ID NO: 2060982 - RNA, 19 nt, Homo sapiens
  misc_RNA (1)...(19): siRNA sense strand
gucaguaaccucaauggaa

SEQ ID NO: 2060983 - RNA, 19 nt, Homo sapiens
  misc_RNA (1)...(19): siRNA sense strand
gugcuuuccugcauucugu

SEQ ID NO: 2060984 - RNA, 19 nt, Homo sapiens
  misc_RNA (1)...(19): siRNA sense strand
gaggguuccugaucauuuu

SEQ ID NO: 2060985 - RNA, 19 nt, Homo sapiens
  misc_RNA (1)...(19): siRNA sense strand
caagauaagacuguacaau

SEQ ID NO: 2060986 - RNA, 19 nt, Homo sapiens
  misc_RNA (1)...(19): siRNA sense strand
gauugugcuuuccugcauu

SEQ ID NO: 2060987 - RNA, 19 nt, Homo sapiens
  misc_RNA (1)...(19): siRNA sense strand
agccugauccuucuuagua

SEQ ID NO: 2060988 - RNA, 19 nt, Homo sapiens
  misc_RNA (1)...(19): siRNA sense strand
guagaagcaguaucucgaa

SEQ ID NO: 2060989 - RNA, 19 nt, Homo sapiens
  misc_RNA (1)...(19): siRNA sense strand
gaccauuugggcuucauuu

SEQ ID NO: 2060990 - RNA, 19 nt, Homo sapiens
  misc_RNA (1)...(19): siRNA sense strand
cuauuagccucuucauauc

SEQ ID NO: 2060991 - RNA, 19 nt, Homo sapiens
  misc_RNA (1)...(19): siRNA sense strand
guccaaauugcauuacuuu

SEQ ID NO: 2060992 - RNA, 19 nt, Homo sapiens
  misc_RNA (1)...(19): siRNA sense strand
ggaaggguccaaauugcau

SEQ ID NO: 2060993 - RNA, 19 nt, Homo sapiens
  misc_RNA (1)...(19): siRNA sense strand
ccauuugggcuucauuuau

SEQ ID NO: 2060994 - RNA, 19 nt, Homo sapiens
  misc_RNA (1)...(19): siRNA sense strand
ccagacugccuuuccuaaa

SEQ ID NO: 2060995 - RNA, 19 nt, Homo sapiens
  misc_RNA (1)...(19): siRNA sense strand
gaacauuuaacagaguaug

SEQ ID NO: 2060996 - RNA, 19 nt, Homo sapiens
  misc_RNA (1)...(19): siRNA sense strand
gacgauuagccauuauaaa

SEQ ID NO: 2060997 - RNA, 19 nt, Homo sapiens
  misc_RNA (1)...(19): siRNA sense strand
gccauuagucuuccuagga

SEQ ID NO: 2060998 - RNA, 19 nt, Homo sapiens
  misc_RNA (1)...(19): siRNA sense strand
gaaggguccaaauugcauu

SEQ ID NO: 2060999 - RNA, 19 nt, Homo sapiens
  misc_RNA (1)...(19): siRNA sense strand
aggaacauuuaacagagua

SEQ ID NO: 2061000 - RNA, 19 nt, Homo sapiens
  misc_RNA (1)...(19): siRNA sense strand
uaacaacuggccugaucaa

SEQ ID NO: 2061001 - RNA, 19 nt, Homo sapiens
  misc_RNA (1)...(19): siRNA sense strand
cuaguaccauguucuugga

SEQ ID NO: 2061002 - RNA, 19 nt, Homo sapiens
  misc_RNA (1)...(19): siRNA sense strand
caaccgcgaaggaauaauc

SEQ ID NO: 2061003 - RNA, 19 nt, Homo sapiens
  misc_RNA (1)...(19): siRNA sense strand
cgacagaagucaaauauaa

SEQ ID NO: 2061004 - RNA, 19 nt, Homo sapiens
  misc_RNA (1)...(19): siRNA sense strand
gagaaugacuucguuaaua

SEQ ID NO: 2061005 - RNA, 19 nt, Homo sapiens
  misc_RNA (1)...(19): siRNA sense strand
gaacagccaugaucaauag

SEQ ID NO: 2061006 - RNA, 19 nt, Homo sapiens
  misc_RNA (1)...(19): siRNA sense strand
caacaaagacccagauauu

SEQ ID NO: 2061007 - RNA, 19 nt, Homo sapiens
  misc_RNA (1)...(19): siRNA sense strand
gaacacgucuguggaagaa

SEQ ID NO: 2061008 - RNA, 19 nt, Homo sapiens
  misc_RNA (1)...(19): siRNA sense strand
ggacagaggccuacaugga

SEQ ID NO: 2061009 - RNA, 19 nt, Homo sapiens
  misc_RNA (1)...(19): siRNA sense strand
gcuuggagcuggugaggaa

SEQ ID NO: 2061010 - RNA, 19 nt, Homo sapiens
  misc_RNA (1)...(19): siRNA sense strand
gaagaaggccugcaugacu

SEQ ID NO: 2061011 - RNA, 19 nt, Homo sapiens
  misc_RNA (1)...(19): siRNA sense strand
ccaccaacguguacaacaa

SEQ ID NO: 2061012 - RNA, 19 nt, Homo sapiens
  misc_RNA (1)...(19): siRNA sense strand
aggagaacgugauggaaua

SEQ ID NO: 2061013 - RNA, 19 nt, Homo sapiens
  misc_RNA (1)...(19): siRNA sense strand
guauaacacugugaccaaa

SEQ ID NO: 2061014 - RNA, 19 nt, Homo sapiens
  misc_RNA (1)...(19): siRNA sense strand
ggauacgccuuucugaaca

SEQ ID NO: 2061015 - RNA, 19 nt, Homo sapiens
  misc_RNA (1)...(19): siRNA sense strand
gggcugaggaugacuauug

SEQ ID NO: 2061016 - RNA, 19 nt, Homo sapiens
  misc_RNA (1)...(19): siRNA sense strand
gacgugagcggcaguauga

SEQ ID NO: 2061017 - RNA, 19 nt, Homo sapiens
  misc_RNA (1)...(19): siRNA sense strand
auaacacugugaccaaaua

SEQ ID NO: 2061018 - RNA, 19 nt, Homo sapiens
  misc_RNA (1)...(19): siRNA sense strand
ggaccaagcccugagagaa

SEQ ID NO: 2061019 - RNA, 19 nt, Homo sapiens
  misc_RNA (1)...(19): siRNA sense strand
gagacaaucgagagcauuu

SEQ ID NO: 2061020 - RNA, 19 nt, Homo sapiens
  misc_RNA (1)...(19): siRNA sense strand
ggaguccaaugcucacuuc

SEQ ID NO: 2061021 - RNA, 19 nt, Homo sapiens
  misc_RNA (1)...(19): siRNA sense strand
ggagaaugacuucguuaau

SEQ ID NO: 2061022 - RNA, 19 nt, Homo sapiens
  misc_RNA (1)...(19): siRNA sense strand
caaagacccagauauuuua

SEQ ID NO: 2061023 - RNA, 19 nt, Homo sapiens
  misc_RNA (1)...(19): siRNA sense strand
uaaugccucugucaaaugu

SEQ ID NO: 2061024 - RNA, 19 nt, Homo sapiens
  misc_RNA (1)...(19): siRNA sense strand
uauaaugccucugucaaau

SEQ ID NO: 2061025 - RNA, 19 nt, Homo sapiens
  misc_RNA (1)...(19): siRNA sense strand
ugacacugcucaccacugu

SEQ ID NO: 2061026 - RNA, 19 nt, Homo sapiens
  misc_RNA (1)...(19): siRNA sense strand
uaaauggagucuacauguc

SEQ ID NO: 2061027 - RNA, 19 nt, Homo sapiens
  misc_RNA (1)...(19): siRNA sense strand
caacuggauucuucaggau

SEQ ID NO: 2061028 - RNA, 19 nt, Homo sapiens
  misc_RNA (1)...(19): siRNA sense strand
cagcagauucccaacagua

SEQ ID NO: 2061029 - RNA, 19 nt, Homo sapiens
  misc_RNA (1)...(19): siRNA sense strand
ggacuacgagccgguguuu

SEQ ID NO: 2061030 - RNA, 19 nt, Homo sapiens
  misc_RNA (1)...(19): siRNA sense strand
gccaagugacuauguauga

SEQ ID NO: 2061031 - RNA, 19 nt, Homo sapiens
  misc_RNA (1)...(19): siRNA sense strand
ugaagguuccgauggauaa

SEQ ID NO: 2061032 - RNA, 19 nt, Homo sapiens
  misc_RNA (1)...(19): siRNA sense strand
cagaggacauggagaacau

SEQ ID NO: 2061033 - RNA, 19 nt, Homo sapiens
  misc_RNA (1)...(19): siRNA sense strand
ucaaauauaaugccucugu

SEQ ID NO: 2061034 - RNA, 19 nt, Homo sapiens
  misc_RNA (1)...(19): siRNA sense strand
gaugggccgugcacacaga

SEQ ID NO: 2061035 - RNA, 19 nt, Homo sapiens
  misc_RNA (1)...(19): siRNA sense strand
aagaaggccugcaugacuu

SEQ ID NO: 2061036 - RNA, 19 nt, Homo sapiens
  misc_RNA (1)...(19): siRNA sense strand
gagaacagccaugaucaau

SEQ ID NO: 2061037 - RNA, 19 nt, Homo sapiens
  misc_RNA (1)...(19): siRNA sense strand
gggagaaugacuucguuaa

SEQ ID NO: 2061038 - RNA, 19 nt, Homo sapiens
  misc_RNA (1)...(19): siRNA sense strand
ggaugacuauugccaagca

SEQ ID NO: 2061039 - RNA, 19 nt, Homo sapiens
  misc_RNA (1)...(19): siRNA sense strand
caacguugaccuggcaaua

SEQ ID NO: 2061040 - RNA, 19 nt, Homo sapiens
  misc_RNA (1)...(19): siRNA sense strand
ccaaggacauagugauuuu

SEQ ID NO: 2061041 - RNA, 19 nt, Homo sapiens
  misc_RNA (1)...(19): siRNA sense strand
ucagccaagugacuaugua

SEQ ID NO: 2061042 - RNA, 19 nt, Homo sapiens
  misc_RNA (1)...(19): siRNA sense strand
gcagaaggaccagaaagug

SEQ ID NO: 2061043 - RNA, 19 nt, Homo sapiens
  misc_RNA (1)...(19): siRNA sense strand
gacuggaucuacugcauca

SEQ ID NO: 2061044 - RNA, 19 nt, Homo sapiens
  misc_RNA (1)...(19): siRNA sense strand
uccaagaggucccgagaga

SEQ ID NO: 2061045 - RNA, 19 nt, Homo sapiens
  misc_RNA (1)...(19): siRNA sense strand
gacaacaacggguucauuc

SEQ ID NO: 2061046 - RNA, 19 nt, Homo sapiens
  misc_RNA (1)...(19): siRNA sense strand
gcacggauacgccuuucug

SEQ ID NO: 2061047 - RNA, 19 nt, Homo sapiens
  misc_RNA (1)...(19): siRNA sense strand
cccaauuucugccuucuug

SEQ ID NO: 2061048 - RNA, 19 nt, Homo sapiens
  misc_RNA (1)...(19): siRNA sense strand
caaucgagagcauuucaaa

SEQ ID NO: 2061049 - RNA, 19 nt, Homo sapiens
  misc_RNA (1)...(19): siRNA sense strand
aacaacggguucauucuga

SEQ ID NO: 2061050 - RNA, 19 nt, Homo sapiens
  misc_RNA (1)...(19): siRNA sense strand
gggaagaccaggcugaauc

SEQ ID NO: 2061051 - RNA, 19 nt, Homo sapiens
  misc_RNA (1)...(19): siRNA sense strand
gaaguucucagaggacaug

SEQ ID NO: 2061052 - RNA, 19 nt, Homo sapiens
  misc_RNA (1)...(19): siRNA sense strand
ggaggcgacagaagucaaa

SEQ ID NO: 2061053 - RNA, 19 nt, Homo sapiens
  misc_RNA (1)...(19): siRNA sense strand
caacaacggguucauucug

SEQ ID NO: 2061054 - RNA, 19 nt, Homo sapiens
  misc_RNA (1)...(19): siRNA sense strand
gacaagaggacagccauug

SEQ ID NO: 2061055 - RNA, 19 nt, Homo sapiens
  misc_RNA (1)...(19): siRNA sense strand
ggaacacgucuguggaaga

SEQ ID NO: 2061056 - RNA, 19 nt, Homo sapiens
  misc_RNA (1)...(19): siRNA sense strand
ccacggagaauacauccuu

SEQ ID NO: 2061057 - RNA, 19 nt, Homo sapiens
  misc_RNA (1)...(19): siRNA sense strand
gaccaaugacuacuucuuc

SEQ ID NO: 2061058 - RNA, 19 nt, Homo sapiens
  misc_RNA (1)...(19): siRNA sense strand
gauaaagggaagcgaguuc

SEQ ID NO: 2061059 - RNA, 19 nt, Homo sapiens
  misc_RNA (1)...(19): siRNA sense strand
cagguacucucucgaugga

SEQ ID NO: 2061060 - RNA, 19 nt, Homo sapiens
  misc_RNA (1)...(19): siRNA sense strand
ucagcaaccugccggugaa

SEQ ID NO: 2061061 - RNA, 19 nt, Homo sapiens
  misc_RNA (1)...(19): siRNA sense strand
caucgagccuuguuuuaaa

SEQ ID NO: 2061062 - RNA, 19 nt, Homo sapiens
  misc_RNA (1)...(19): siRNA sense strand
ggacaagaggacagccauu

SEQ ID NO: 2061063 - RNA, 19 nt, Homo sapiens
  misc_RNA (1)...(19): siRNA sense strand
agaacagccaugaucaaua

SEQ ID NO: 2061064 - RNA, 19 nt, Homo sapiens
  misc_RNA (1)...(19): siRNA sense strand
ugcaggagcuggugcuguu

SEQ ID NO: 2061065 - RNA, 19 nt, Homo sapiens
  misc_RNA (1)...(19): siRNA sense strand
gcgacagaagucaaauaua

SEQ ID NO: 2061066 - RNA, 19 nt, Homo sapiens
  misc_RNA (1)...(19): siRNA sense strand
aacaaagacccagauauuu

SEQ ID NO: 2061067 - RNA, 19 nt, Homo sapiens
  misc_RNA (1)...(19): siRNA sense strand
cgacaacaacggguucauu

SEQ ID NO: 2061068 - RNA, 19 nt, Homo sapiens
  misc_RNA (1)...(19): siRNA sense strand
gcagaagaaguacaaggau

SEQ ID NO: 2061069 - RNA, 19 nt, Homo sapiens
  misc_RNA (1)...(19): siRNA sense strand
caccaacaauggcuacauc

SEQ ID NO: 2061070 - RNA, 19 nt, Homo sapiens
  misc_RNA (1)...(19): siRNA sense strand
caacaacaaaggcuacuac

SEQ ID NO: 2061071 - RNA, 19 nt, Homo sapiens
  misc_RNA (1)...(19): siRNA sense strand
cagagagacccaacguuga

SEQ ID NO: 2061072 - RNA, 19 nt, Homo sapiens
  misc_RNA (1)...(19): siRNA sense strand
ggcgacagaagucaaauau

SEQ ID NO: 2061073 - RNA, 19 nt, Homo sapiens
  misc_RNA (1)...(19): siRNA sense strand
ccaaaagugucuuccauca

SEQ ID NO: 2061074 - RNA, 19 nt, Homo sapiens
  misc_RNA (1)...(19): siRNA sense strand
aaaugaagcuggaauuccu

SEQ ID NO: 2061075 - RNA, 19 nt, Homo sapiens
  misc_RNA (1)...(19): siRNA sense strand
ggacgugagcggcaguaug

SEQ ID NO: 2061076 - RNA, 19 nt, Homo sapiens
  misc_RNA (1)...(19): siRNA sense strand
acguugaccuggcaauauu

SEQ ID NO: 2061077 - RNA, 19 nt, Homo sapiens
  misc_RNA (1)...(19): siRNA sense strand
acaacucgguccugaucaa

SEQ ID NO: 2061078 - RNA, 19 nt, Homo sapiens
  misc_RNA (1)...(19): siRNA sense strand
cgagagacgggaagauuuc

SEQ ID NO: 2061079 - RNA, 19 nt, Homo sapiens
  misc_RNA (1)...(19): siRNA sense strand
uggaaacagugaagcuaug

SEQ ID NO: 2061080 - RNA, 19 nt, Homo sapiens
  misc_RNA (1)...(19): siRNA sense strand
caacauguccgaggagucu

SEQ ID NO: 2061081 - RNA, 19 nt, Homo sapiens
  misc_RNA (1)...(19): siRNA sense strand
ggaagaccaggcugaaucu

SEQ ID NO: 2061082 - RNA, 19 nt, Homo sapiens
  misc_RNA (1)...(19): siRNA sense strand
caagaggccaagcaaggaa

SEQ ID NO: 2061083 - RNA, 19 nt, Homo sapiens
  misc_RNA (1)...(19): siRNA sense strand
gaacaugcugcggaggaaa

SEQ ID NO: 2061084 - RNA, 19 nt, Homo sapiens
  misc_RNA (1)...(19): siRNA sense strand
gaccaagcccugagagaag

SEQ ID NO: 2061085 - RNA, 19 nt, Homo sapiens
  misc_RNA (1)...(19): siRNA sense strand
ggacaccugaugagaaugg

SEQ ID NO: 2061086 - RNA, 19 nt, Homo sapiens
  misc_RNA (1)...(19): siRNA sense strand
caaugaaucccugguguuc

SEQ ID NO: 2061087 - RNA, 19 nt, Homo sapiens
  misc_RNA (1)...(19): siRNA sense strand
gaagaucgaggagguggau

SEQ ID NO: 2061088 - RNA, 19 nt, Homo sapiens
  misc_RNA (1)...(19): siRNA sense strand
ggagagaagugucuuuugc

SEQ ID NO: 2061089 - RNA, 19 nt, Homo sapiens
  misc_RNA (1)...(19): siRNA sense strand
gaaugacuucguuaauauc

SEQ ID NO: 2061090 - RNA, 19 nt, Homo sapiens
  misc_RNA (1)...(19): siRNA sense strand
uuaaauggagucuacaugu

SEQ ID NO: 2061091 - RNA, 19 nt, Homo sapiens
  misc_RNA (1)...(19): siRNA sense strand
acaaagacccagauauuuu

SEQ ID NO: 2061092 - RNA, 19 nt, Homo sapiens
  misc_RNA (1)...(19): siRNA sense strand
guacaacaaagacccagau

SEQ ID NO: 2061093 - RNA, 19 nt, Homo sapiens
  misc_RNA (1)...(19): siRNA sense strand
gcgcuggcccucaacaugu

SEQ ID NO: 2061094 - RNA, 19 nt, Homo sapiens
  misc_RNA (1)...(19): siRNA sense strand
uccgggaggugcuguuuga

SEQ ID NO: 2061095 - RNA, 19 nt, Homo sapiens
  misc_RNA (1)...(19): siRNA sense strand
gugaagguuccgauggaua

SEQ ID NO: 2061096 - RNA, 19 nt, Homo sapiens
  misc_RNA (1)...(19): siRNA sense strand
aaacagguacucucucgau

SEQ ID NO: 2061097 - RNA, 19 nt, Homo sapiens
  misc_RNA (1)...(19): siRNA sense strand
gacaaucgagagcauuuca

SEQ ID NO: 2061098 - RNA, 19 nt, Homo sapiens
  misc_RNA (1)...(19): siRNA sense strand
ccgagagacgggaagauuu

SEQ ID NO: 2061099 - RNA, 19 nt, Homo sapiens
  misc_RNA (1)...(19): siRNA sense strand
ccaaaugaagcuggaauuc

SEQ ID NO: 2061100 - RNA, 19 nt, Homo sapiens
  misc_RNA (1)...(19): siRNA sense strand
cgacaccccuuucaguuug

SEQ ID NO: 2061101 - RNA, 19 nt, Homo sapiens
  misc_RNA (1)...(19): siRNA sense strand
guguggaucucuccgaagu

SEQ ID NO: 2061102 - RNA, 19 nt, Homo sapiens
  misc_RNA (1)...(19): siRNA sense strand
gcaacaacaaaggcuacua

SEQ ID NO: 2061103 - RNA, 19 nt, Homo sapiens
  misc_RNA (1)...(19): siRNA sense strand
ggaagggauucuccaauaa

SEQ ID NO: 2061104 - RNA, 19 nt, Homo sapiens
  misc_RNA (1)...(19): siRNA sense strand
gcacaucgaaccugaguua

SEQ ID NO: 2061105 - RNA, 19 nt, Homo sapiens
  misc_RNA (1)...(19): siRNA sense strand
gagcagaaaugccaggaaa

SEQ ID NO: 2061106 - RNA, 19 nt, Homo sapiens
  misc_RNA (1)...(19): siRNA sense strand
gaggaaagccugaauauag

SEQ ID NO: 2061107 - RNA, 19 nt, Homo sapiens
  misc_RNA (1)...(19): siRNA sense strand
caggaaaucuucaacacua

SEQ ID NO: 2061108 - RNA, 19 nt, Homo sapiens
  misc_RNA (1)...(19): siRNA sense strand
caagaugacaugagaauuu

SEQ ID NO: 2061109 - RNA, 19 nt, Homo sapiens
  misc_RNA (1)...(19): siRNA sense strand
gauuagaaaugucggauug

SEQ ID NO: 2061110 - RNA, 19 nt, Homo sapiens
  misc_RNA (1)...(19): siRNA sense strand
gaagaggucaagaaacuuu

SEQ ID NO: 2061111 - RNA, 19 nt, Homo sapiens
  misc_RNA (1)...(19): siRNA sense strand
ucacagugcuggccucuga

SEQ ID NO: 2061112 - RNA, 19 nt, Homo sapiens
  misc_RNA (1)...(19): siRNA sense strand
guuguucgguguccuauaa

SEQ ID NO: 2061113 - RNA, 19 nt, Homo sapiens
  misc_RNA (1)...(19): siRNA sense strand
acagacaguucuucaauga

SEQ ID NO: 2061114 - RNA, 19 nt, Homo sapiens
  misc_RNA (1)...(19): siRNA sense strand
aggaagggauucuccaaua

SEQ ID NO: 2061115 - RNA, 19 nt, Homo sapiens
  misc_RNA (1)...(19): siRNA sense strand
ugaaggccaugagugauua

SEQ ID NO: 2061116 - RNA, 19 nt, Homo sapiens
  misc_RNA (1)...(19): siRNA sense strand
gaagagcacaguucacaug

SEQ ID NO: 2061117 - RNA, 19 nt, Homo sapiens
  misc_RNA (1)...(19): siRNA sense strand
gaaccucaaugauccagau

SEQ ID NO: 2061118 - RNA, 19 nt, Homo sapiens
  misc_RNA (1)...(19): siRNA sense strand
gaagcuauuguacaguuua

SEQ ID NO: 2061119 - RNA, 19 nt, Homo sapiens
  misc_RNA (1)...(19): siRNA sense strand
ucaacacuauggaagauuu

SEQ ID NO: 2061120 - RNA, 19 nt, Homo sapiens
  misc_RNA (1)...(19): siRNA sense strand
caaaugagguagaaaagaa

SEQ ID NO: 2061121 - RNA, 19 nt, Homo sapiens
  misc_RNA (1)...(19): siRNA sense strand
agaacaagaugacaugaga

SEQ ID NO: 2061122 - RNA, 19 nt, Homo sapiens
  misc_RNA (1)...(19): siRNA sense strand
ggaggaaagccugaauaua

SEQ ID NO: 2061123 - RNA, 19 nt, Homo sapiens
  misc_RNA (1)...(19): siRNA sense strand
gccugaauauagucaaaua

SEQ ID NO: 2061124 - RNA, 19 nt, Homo sapiens
  misc_RNA (1)...(19): siRNA sense strand
caacaacaucuucuucuug

SEQ ID NO: 2061125 - RNA, 19 nt, Homo sapiens
  misc_RNA (1)...(19): siRNA sense strand
gugaagcuauuguacaguu

SEQ ID NO: 2061126 - RNA, 19 nt, Homo sapiens
  misc_RNA (1)...(19): siRNA sense strand
caacgcaguucaacaacau

SEQ ID NO: 2061127 - RNA, 19 nt, Homo sapiens
  misc_RNA (1)...(19): siRNA sense strand
augaagagcuccauuuaau

SEQ ID NO: 2061128 - RNA, 19 nt, Homo sapiens
  misc_RNA (1)...(19): siRNA sense strand
caucuggaguggauuagaa

SEQ ID NO: 2061129 - RNA, 19 nt, Homo sapiens
  misc_RNA (1)...(19): siRNA sense strand
gaaaugccaggaaaucuuc

SEQ ID NO: 2061130 - RNA, 19 nt, Homo sapiens
  misc_RNA (1)...(19): siRNA sense strand
uaaaugaagaggucaagaa

SEQ ID NO: 2061131 - RNA, 19 nt, Homo sapiens
  misc_RNA (1)...(19): siRNA sense strand
gagcuccauuuaaucguuu

SEQ ID NO: 2061132 - RNA, 19 nt, Homo sapiens
  misc_RNA (1)...(19): siRNA sense strand
gaaauucuuccaucgguau

SEQ ID NO: 2061133 - RNA, 19 nt, Homo sapiens
  misc_RNA (1)...(19): siRNA sense strand
gcaacgcaguucaacaaca

SEQ ID NO: 2061134 - RNA, 19 nt, Homo sapiens
  misc_RNA (1)...(19): siRNA sense strand
gaagagcuccauuuaaucg

SEQ ID NO: 2061135 - RNA, 19 nt, Homo sapiens
  misc_RNA (1)...(19): siRNA sense strand
gaaccccaguuuaaguuua

SEQ ID NO: 2061136 - RNA, 19 nt, Homo sapiens
  misc_RNA (1)...(19): siRNA sense strand
gugaacaguuuaacaucaa

SEQ ID NO: 2061137 - RNA, 19 nt, Homo sapiens
  misc_RNA (1)...(19): siRNA sense strand
gcacaguucacaugaggaa

SEQ ID NO: 2061138 - RNA, 19 nt, Homo sapiens
  misc_RNA (1)...(19): siRNA sense strand
ggaugaagaugaggagauc

SEQ ID NO: 2061139 - RNA, 19 nt, Homo sapiens
  misc_RNA (1)...(19): siRNA sense strand
ggacauuuagcccaucaaa

SEQ ID NO: 2061140 - RNA, 19 nt, Homo sapiens
  misc_RNA (1)...(19): siRNA sense strand
ucaacaacaucuucuucuu

SEQ ID NO: 2061141 - RNA, 19 nt, Homo sapiens
  misc_RNA (1)...(19): siRNA sense strand
caaaccugauugaaguaaa

SEQ ID NO: 2061142 - RNA, 19 nt, Homo sapiens
  misc_RNA (1)...(19): siRNA sense strand
gcacccggauuuaaugaag

SEQ ID NO: 2061143 - RNA, 19 nt, Homo sapiens
  misc_RNA (1)...(19): siRNA sense strand
gagaagagcacaguucaca

SEQ ID NO: 2061144 - RNA, 19 nt, Homo sapiens
  misc_RNA (1)...(19): siRNA sense strand
gcucaucuggaguggauua

SEQ ID NO: 2061145 - RNA, 19 nt, Homo sapiens
  misc_RNA (1)...(19): siRNA sense strand
ucaaugauccagaugcaaa

SEQ ID NO: 2061146 - RNA, 19 nt, Homo sapiens
  misc_RNA (1)...(19): siRNA sense strand
gaacaagaugacaugagaa

SEQ ID NO: 2061147 - RNA, 19 nt, Homo sapiens
  misc_RNA (1)...(19): siRNA sense strand
ggaguggauuagaacaaga

SEQ ID NO: 2061148 - RNA, 19 nt, Homo sapiens
  misc_RNA (1)...(19): siRNA sense strand
gcagaaaugccaggaaauc

SEQ ID NO: 2061149 - RNA, 19 nt, Homo sapiens
  misc_RNA (1)...(19): siRNA sense strand
gcaaaccugauugaaguaa

SEQ ID NO: 2061150 - RNA, 19 nt, Homo sapiens
  misc_RNA (1)...(19): siRNA sense strand
ugacaucaacagugacuuu

SEQ ID NO: 2061151 - RNA, 19 nt, Homo sapiens
  misc_RNA (1)...(19): siRNA sense strand
gcggcugugugcuuuauga

SEQ ID NO: 2061152 - RNA, 19 nt, Homo sapiens
  misc_RNA (1)...(19): siRNA sense strand
caucgaaccugaguuagca

SEQ ID NO: 2061153 - RNA, 19 nt, Homo sapiens
  misc_RNA (1)...(19): siRNA sense strand
auacagaugacacuuauga

SEQ ID NO: 2061154 - RNA, 19 nt, Homo sapiens
  misc_RNA (1)...(19): siRNA sense strand
gaagggauucuccaauaag

SEQ ID NO: 2061155 - RNA, 19 nt, Homo sapiens
  misc_RNA (1)...(19): siRNA sense strand
gaaaauccaguccuuuauu

SEQ ID NO: 2061156 - RNA, 19 nt, Homo sapiens
  misc_RNA (1)...(19): siRNA sense strand
uuaugaagagcuccauuua

SEQ ID NO: 2061157 - RNA, 19 nt, Homo sapiens
  misc_RNA (1)...(19): siRNA sense strand
cagaugacacuuaugaaga

SEQ ID NO: 2061158 - RNA, 19 nt, Homo sapiens
  misc_RNA (1)...(19): siRNA sense strand
cagcucaucuggaguggau

SEQ ID NO: 2061159 - RNA, 19 nt, Homo sapiens
  misc_RNA (1)...(19): siRNA sense strand
ggguccaacuucugaaaga

SEQ ID NO: 2061160 - RNA, 19 nt, Homo sapiens
  misc_RNA (1)...(19): siRNA sense strand
ggacuccuauguuauuuug

SEQ ID NO: 2061161 - RNA, 19 nt, Homo sapiens
  misc_RNA (1)...(19): siRNA sense strand
gacaucaacagugacuuua

SEQ ID NO: 2061162 - RNA, 19 nt, Homo sapiens
  misc_RNA (1)...(19): siRNA sense strand
caguuuacaaggacauuua

SEQ ID NO: 2061163 - RNA, 19 nt, Homo sapiens
  misc_RNA (1)...(19): siRNA sense strand
gugcaacgcaguucaacaa

SEQ ID NO: 2061164 - RNA, 19 nt, Homo sapiens
  misc_RNA (1)...(19): siRNA sense strand
gcgggacuccuauguuauu

SEQ ID NO: 2061165 - RNA, 19 nt, Homo sapiens
  misc_RNA (1)...(19): siRNA sense strand
agaaagaaccccaguuuaa

SEQ ID NO: 2061166 - RNA, 19 nt, Homo sapiens
  misc_RNA (1)...(19): siRNA sense strand
uaugaagagcuccauuuaa

SEQ ID NO: 2061167 - RNA, 19 nt, Homo sapiens
  misc_RNA (1)...(19): siRNA sense strand
gaaaugucggauuguguga

SEQ ID NO: 2061168 - RNA, 19 nt, Homo sapiens
  misc_RNA (1)...(19): siRNA sense strand
aaaugaagaggucaagaaa

SEQ ID NO: 2061169 - RNA, 19 nt, Homo sapiens
  misc_RNA (1)...(19): siRNA sense strand
ucggugacaucaacaguga

SEQ ID NO: 2061170 - RNA, 19 nt, Homo sapiens
  misc_RNA (1)...(19): siRNA sense strand
cggauugugugaagcuauu

SEQ ID NO: 2061171 - RNA, 19 nt, Homo sapiens
  misc_RNA (1)...(19): siRNA sense strand
caacaucuucuucuuggau

SEQ ID NO: 2061172 - RNA, 19 nt, Homo sapiens
  misc_RNA (1)...(19): siRNA sense strand
ugaagcuauuguacaguuu

SEQ ID NO: 2061173 - RNA, 19 nt, Homo sapiens
  misc_RNA (1)...(19): siRNA sense strand
gagaaagaaccccaguuua

SEQ ID NO: 2061174 - RNA, 19 nt, Homo sapiens
  misc_RNA (1)...(19): siRNA sense strand
gagugcggcugugugcuuu

SEQ ID NO: 2061175 - RNA, 19 nt, Homo sapiens
  misc_RNA (1)...(19): siRNA sense strand
ggaaaucuucaacacuaug

SEQ ID NO: 2061176 - RNA, 19 nt, Homo sapiens
  misc_RNA (1)...(19): siRNA sense strand
aggaaagccugaauauagu

SEQ ID NO: 2061177 - RNA, 19 nt, Homo sapiens
  misc_RNA (1)...(19): siRNA sense strand
augcaaaccugauugaagu

SEQ ID NO: 2061178 - RNA, 19 nt, Homo sapiens
  misc_RNA (1)...(19): siRNA sense strand
gugaaggccaugagugauu

SEQ ID NO: 2061179 - RNA, 19 nt, Homo sapiens
  misc_RNA (1)...(19): siRNA sense strand
ugugaacaguuuaacauca

SEQ ID NO: 2061180 - RNA, 19 nt, Homo sapiens
  misc_RNA (1)...(19): siRNA sense strand
gcagauuccccaaaauuuu

SEQ ID NO: 2061181 - RNA, 19 nt, Homo sapiens
  misc_RNA (1)...(19): siRNA sense strand
cagaguggaugaagaugag

SEQ ID NO: 2061182 - RNA, 19 nt, Homo sapiens
  misc_RNA (1)...(19): siRNA sense strand
uuaauagaauggaggaaag

SEQ ID NO: 2061183 - RNA, 19 nt, Homo sapiens
  misc_RNA (1)...(19): siRNA sense strand
gcaguucaacaacaucuuc

SEQ ID NO: 2061184 - RNA, 19 nt, Homo sapiens
  misc_RNA (1)...(19): siRNA sense strand
gcuggccucugacaucugu

SEQ ID NO: 2061185 - RNA, 19 nt, Homo sapiens
  misc_RNA (1)...(19): siRNA sense strand
aagggauucuccaauaaga

SEQ ID NO: 2061186 - RNA, 19 nt, Homo sapiens
  misc_RNA (1)...(19): siRNA sense strand
gaaagccugaauauaguca

SEQ ID NO: 2061187 - RNA, 19 nt, Homo sapiens
  misc_RNA (1)...(19): siRNA sense strand
gcaggaagggauucuccaa

SEQ ID NO: 2061188 - RNA, 19 nt, Homo sapiens
  misc_RNA (1)...(19): siRNA sense strand
augaagaggucaagaaacu

SEQ ID NO: 2061189 - RNA, 19 nt, Homo sapiens
  misc_RNA (1)...(19): siRNA sense strand
acacugcuuuucucuauaa

SEQ ID NO: 2061190 - RNA, 19 nt, Homo sapiens
  misc_RNA (1)...(19): siRNA sense strand
uuagaaaugucggauugug

SEQ ID NO: 2061191 - RNA, 19 nt, Homo sapiens
  misc_RNA (1)...(19): siRNA sense strand
ccagaguggaugaagauga

SEQ ID NO: 2061192 - RNA, 19 nt, Homo sapiens
  misc_RNA (1)...(19): siRNA sense strand
guccgggucugagaaagaa

SEQ ID NO: 2061193 - RNA, 19 nt, Homo sapiens
  misc_RNA (1)...(19): siRNA sense strand
gaaaucuucaacacuaugg

SEQ ID NO: 2061194 - RNA, 19 nt, Homo sapiens
  misc_RNA (1)...(19): siRNA sense strand
gaggguccaacuucugaaa

SEQ ID NO: 2061195 - RNA, 19 nt, Homo sapiens
  misc_RNA (1)...(19): siRNA sense strand
uuaccagaguggaugaaga

SEQ ID NO: 2061196 - RNA, 19 nt, Homo sapiens
  misc_RNA (1)...(19): siRNA sense strand
gaagauucucggugacauc

SEQ ID NO: 2061197 - RNA, 19 nt, Homo sapiens
  misc_RNA (1)...(19): siRNA sense strand
agaugacacuuaugaagag

SEQ ID NO: 2061198 - RNA, 19 nt, Homo sapiens
  misc_RNA (1)...(19): siRNA sense strand
agaaaugccaggaaaucuu

SEQ ID NO: 2061199 - RNA, 19 nt, Homo sapiens
  misc_RNA (1)...(19): siRNA sense strand
gccgaagacuggacagcau

SEQ ID NO: 2061200 - RNA, 19 nt, Homo sapiens
  misc_RNA (1)...(19): siRNA sense strand
gucaagaaacuuugugcaa

SEQ ID NO: 2061201 - RNA, 19 nt, Homo sapiens
  misc_RNA (1)...(19): siRNA sense strand
uuacuggguuguuggaaag

SEQ ID NO: 2061202 - RNA, 19 nt, Homo sapiens
  misc_RNA (1)...(19): siRNA sense strand
caguuuaacaucaacaaga

SEQ ID NO: 2061203 - RNA, 19 nt, Homo sapiens
  misc_RNA (1)...(19): siRNA sense strand
ggaagggauucuccaauaa

SEQ ID NO: 2061204 - RNA, 19 nt, Homo sapiens
  misc_RNA (1)...(19): siRNA sense strand
gcacaucgaaccugaguua

SEQ ID NO: 2061205 - RNA, 19 nt, Homo sapiens
  misc_RNA (1)...(19): siRNA sense strand
gagcagaaaugccaggaaa

SEQ ID NO: 2061206 - RNA, 19 nt, Homo sapiens
  misc_RNA (1)...(19): siRNA sense strand
gaggaaagccugaauauag

SEQ ID NO: 2061207 - RNA, 19 nt, Homo sapiens
  misc_RNA (1)...(19): siRNA sense strand
caggaaaucuucaacacua

SEQ ID NO: 2061208 - RNA, 19 nt, Homo sapiens
  misc_RNA (1)...(19): siRNA sense strand
caagaugacaugagaauuu

SEQ ID NO: 2061209 - RNA, 19 nt, Homo sapiens
  misc_RNA (1)...(19): siRNA sense strand
gauuagaaaugucggauug

SEQ ID NO: 2061210 - RNA, 19 nt, Homo sapiens
  misc_RNA (1)...(19): siRNA sense strand
gaagaggucaagaaacuuu

SEQ ID NO: 2061211 - RNA, 19 nt, Homo sapiens
  misc_RNA (1)...(19): siRNA sense strand
ucacagugcuggccucuga

SEQ ID NO: 2061212 - RNA, 19 nt, Homo sapiens
  misc_RNA (1)...(19): siRNA sense strand
acagacaguucuucaauga

SEQ ID NO: 2061213 - RNA, 19 nt, Homo sapiens
  misc_RNA (1)...(19): siRNA sense strand
gcgucaagcuucugaaaga

SEQ ID NO: 2061214 - RNA, 19 nt, Homo sapiens
  misc_RNA (1)...(19): siRNA sense strand
ugaaggccaugagugauua

SEQ ID NO: 2061215 - RNA, 19 nt, Homo sapiens
  misc_RNA (1)...(19): siRNA sense strand
gaagagcacaguucacaug

SEQ ID NO: 2061216 - RNA, 19 nt, Homo sapiens
  misc_RNA (1)...(19): siRNA sense strand
gaaccucaaugauccagau

SEQ ID NO: 2061217 - RNA, 19 nt, Homo sapiens
  misc_RNA (1)...(19): siRNA sense strand
aggaagggauucuccaaua

SEQ ID NO: 2061218 - RNA, 19 nt, Homo sapiens
  misc_RNA (1)...(19): siRNA sense strand
gaagcuauuguacaguuua

SEQ ID NO: 2061219 - RNA, 19 nt, Homo sapiens
  misc_RNA (1)...(19): siRNA sense strand
ucaacacuauggaagauuu

SEQ ID NO: 2061220 - RNA, 19 nt, Homo sapiens
  misc_RNA (1)...(19): siRNA sense strand
caaaugagguagaaaagaa

SEQ ID NO: 2061221 - RNA, 19 nt, Homo sapiens
  misc_RNA (1)...(19): siRNA sense strand
agaacaagaugacaugaga

SEQ ID NO: 2061222 - RNA, 19 nt, Homo sapiens
  misc_RNA (1)...(19): siRNA sense strand
ggaggaaagccugaauaua

SEQ ID NO: 2061223 - RNA, 19 nt, Homo sapiens
  misc_RNA (1)...(19): siRNA sense strand
ggcgggagcucuauguuau

SEQ ID NO: 2061224 - RNA, 19 nt, Homo sapiens
  misc_RNA (1)...(19): siRNA sense strand
gccugaauauagucaaaua

SEQ ID NO: 2061225 - RNA, 19 nt, Homo sapiens
  misc_RNA (1)...(19): siRNA sense strand
caacaacaucuucuucuug

SEQ ID NO: 2061226 - RNA, 19 nt, Homo sapiens
  misc_RNA (1)...(19): siRNA sense strand
gugaagcuauuguacaguu

SEQ ID NO: 2061227 - RNA, 19 nt, Homo sapiens
  misc_RNA (1)...(19): siRNA sense strand
caacgcaguucaacaacau

SEQ ID NO: 2061228 - RNA, 19 nt, Homo sapiens
  misc_RNA (1)...(19): siRNA sense strand
augaagagcuccauuuaau

SEQ ID NO: 2061229 - RNA, 19 nt, Homo sapiens
  misc_RNA (1)...(19): siRNA sense strand
caucuggaguggauuagaa

SEQ ID NO: 2061230 - RNA, 19 nt, Homo sapiens
  misc_RNA (1)...(19): siRNA sense strand
gaaaugccaggaaaucuuc

SEQ ID NO: 2061231 - RNA, 19 nt, Homo sapiens
  misc_RNA (1)...(19): siRNA sense strand
uaaaugaagaggucaagaa

SEQ ID NO: 2061232 - RNA, 19 nt, Homo sapiens
  misc_RNA (1)...(19): siRNA sense strand
gagcuccauuuaaucguuu

SEQ ID NO: 2061233 - RNA, 19 nt, Homo sapiens
  misc_RNA (1)...(19): siRNA sense strand
gaaauucuuccaucgguau

SEQ ID NO: 2061234 - RNA, 19 nt, Homo sapiens
  misc_RNA (1)...(19): siRNA sense strand
gcaacgcaguucaacaaca

SEQ ID NO: 2061235 - RNA, 19 nt, Homo sapiens
  misc_RNA (1)...(19): siRNA sense strand
gaagagcuccauuuaaucg

SEQ ID NO: 2061236 - RNA, 19 nt, Homo sapiens
  misc_RNA (1)...(19): siRNA sense strand
gaaccccaguuuaaguuua

SEQ ID NO: 2061237 - RNA, 19 nt, Homo sapiens
  misc_RNA (1)...(19): siRNA sense strand
gugaacaguuuaacaucaa

SEQ ID NO: 2061238 - RNA, 19 nt, Homo sapiens
  misc_RNA (1)...(19): siRNA sense strand
ggucaugguuguucggaau

SEQ ID NO: 2061239 - RNA, 19 nt, Homo sapiens
  misc_RNA (1)...(19): siRNA sense strand
ggaugaagaugaggagauc

SEQ ID NO: 2061240 - RNA, 19 nt, Homo sapiens
  misc_RNA (1)...(19): siRNA sense strand
gcacaguucacaugaggaa

SEQ ID NO: 2061241 - RNA, 19 nt, Homo sapiens
  misc_RNA (1)...(19): siRNA sense strand
ggacauuuagcccaucaaa

SEQ ID NO: 2061242 - RNA, 19 nt, Homo sapiens
  misc_RNA (1)...(19): siRNA sense strand
ucaacaacaucuucuucuu

SEQ ID NO: 2061243 - RNA, 19 nt, Homo sapiens
  misc_RNA (1)...(19): siRNA sense strand
caaaccugauugaaguaaa

SEQ ID NO: 2061244 - RNA, 19 nt, Homo sapiens
  misc_RNA (1)...(19): siRNA sense strand
gcacccggauuuaaugaag

SEQ ID NO: 2061245 - RNA, 19 nt, Homo sapiens
  misc_RNA (1)...(19): siRNA sense strand
gagaagagcacaguucaca

SEQ ID NO: 2061246 - RNA, 19 nt, Homo sapiens
  misc_RNA (1)...(19): siRNA sense strand
gcucaucuggaguggauua

SEQ ID NO: 2061247 - RNA, 19 nt, Homo sapiens
  misc_RNA (1)...(19): siRNA sense strand
ucaaugauccagaugcaaa

SEQ ID NO: 2061248 - RNA, 19 nt, Homo sapiens
  misc_RNA (1)...(19): siRNA sense strand
gaacaagaugacaugagaa

SEQ ID NO: 2061249 - RNA, 19 nt, Homo sapiens
  misc_RNA (1)...(19): siRNA sense strand
ggaguggauuagaacaaga

SEQ ID NO: 2061250 - RNA, 19 nt, Homo sapiens
  misc_RNA (1)...(19): siRNA sense strand
gcagaaaugccaggaaauc

SEQ ID NO: 2061251 - RNA, 19 nt, Homo sapiens
  misc_RNA (1)...(19): siRNA sense strand
gcaaaccugauugaaguaa

SEQ ID NO: 2061252 - RNA, 19 nt, Homo sapiens
  misc_RNA (1)...(19): siRNA sense strand
cgggagcucuauguuauuu

SEQ ID NO: 2061253 - RNA, 19 nt, Homo sapiens
  misc_RNA (1)...(19): siRNA sense strand
ugacaucaacagugacuuu

SEQ ID NO: 2061254 - RNA, 19 nt, Homo sapiens
  misc_RNA (1)...(19): siRNA sense strand
gcggcugugugcuuuauga

SEQ ID NO: 2061255 - RNA, 19 nt, Homo sapiens
  misc_RNA (1)...(19): siRNA sense strand
caucgaaccugaguuagca

SEQ ID NO: 2061256 - RNA, 19 nt, Homo sapiens
  misc_RNA (1)...(19): siRNA sense strand
auacagaugacacuuauga

SEQ ID NO: 2061257 - RNA, 19 nt, Homo sapiens
  misc_RNA (1)...(19): siRNA sense strand
gaagggauucuccaauaag

SEQ ID NO: 2061258 - RNA, 19 nt, Homo sapiens
  misc_RNA (1)...(19): siRNA sense strand
gaaaauccaguccuuuauu

SEQ ID NO: 2061259 - RNA, 19 nt, Homo sapiens
  misc_RNA (1)...(19): siRNA sense strand
uuaugaagagcuccauuua

SEQ ID NO: 2061260 - RNA, 19 nt, Homo sapiens
  misc_RNA (1)...(19): siRNA sense strand
cagaugacacuuaugaaga

SEQ ID NO: 2061261 - RNA, 19 nt, Homo sapiens
  misc_RNA (1)...(19): siRNA sense strand
cagcucaucuggaguggau

SEQ ID NO: 2061262 - RNA, 19 nt, Homo sapiens
  misc_RNA (1)...(19): siRNA sense strand
guucggaauccuauaauug

SEQ ID NO: 2061263 - RNA, 19 nt, Homo sapiens
  misc_RNA (1)...(19): siRNA sense strand
gacaucaacagugacuuua

SEQ ID NO: 2061264 - RNA, 19 nt, Homo sapiens
  misc_RNA (1)...(19): siRNA sense strand
uaugaagagcuccauuuaa

SEQ ID NO: 2061265 - RNA, 19 nt, Homo sapiens
  misc_RNA (1)...(19): siRNA sense strand
gugcaacgcaguucaacaa

SEQ ID NO: 2061266 - RNA, 19 nt, Homo sapiens
  misc_RNA (1)...(19): siRNA sense strand
agaaagaaccccaguuuaa

SEQ ID NO: 2061267 - RNA, 19 nt, Homo sapiens
  misc_RNA (1)...(19): siRNA sense strand
caguuuacaaggacauuua

SEQ ID NO: 2061268 - RNA, 19 nt, Homo sapiens
  misc_RNA (1)...(19): siRNA sense strand
gaaaugucggauuguguga

SEQ ID NO: 2061269 - RNA, 19 nt, Homo sapiens
  misc_RNA (1)...(19): siRNA sense strand
aaaugaagaggucaagaaa

SEQ ID NO: 2061270 - RNA, 19 nt, Homo sapiens
  misc_RNA (1)...(19): siRNA sense strand
ucggugacaucaacaguga

SEQ ID NO: 2061271 - RNA, 19 nt, Homo sapiens
  misc_RNA (1)...(19): siRNA sense strand
ggaaaucuucaacacuaug

SEQ ID NO: 2061272 - RNA, 19 nt, Homo sapiens
  misc_RNA (1)...(19): siRNA sense strand
caacaucuucuucuuggau

SEQ ID NO: 2061273 - RNA, 19 nt, Homo sapiens
  misc_RNA (1)...(19): siRNA sense strand
cggauugugugaagcuauu

SEQ ID NO: 2061274 - RNA, 19 nt, Homo sapiens
  misc_RNA (1)...(19): siRNA sense strand
gagaaagaaccccaguuua

SEQ ID NO: 2061275 - RNA, 19 nt, Homo sapiens
  misc_RNA (1)...(19): siRNA sense strand
gagugcggcugugugcuuu

SEQ ID NO: 2061276 - RNA, 19 nt, Homo sapiens
  misc_RNA (1)...(19): siRNA sense strand
ugaagcuauuguacaguuu

SEQ ID NO: 2061277 - RNA, 19 nt, Homo sapiens
  misc_RNA (1)...(19): siRNA sense strand
aggaaagccugaauauagu

SEQ ID NO: 2061278 - RNA, 19 nt, Homo sapiens
  misc_RNA (1)...(19): siRNA sense strand
augcaaaccugauugaagu

SEQ ID NO: 2061279 - RNA, 19 nt, Homo sapiens
  misc_RNA (1)...(19): siRNA sense strand
gugaaggccaugagugauu

SEQ ID NO: 2061280 - RNA, 19 nt, Homo sapiens
  misc_RNA (1)...(19): siRNA sense strand
ugugaacaguuuaacauca

SEQ ID NO: 2061281 - RNA, 19 nt, Homo sapiens
  misc_RNA (1)...(19): siRNA sense strand
gcagauuccccaaaauuuu

SEQ ID NO: 2061282 - RNA, 19 nt, Homo sapiens
  misc_RNA (1)...(19): siRNA sense strand
cagaguggaugaagaugag

SEQ ID NO: 2061283 - RNA, 19 nt, Homo sapiens
  misc_RNA (1)...(19): siRNA sense strand
uuaauagaauggaggaaag

SEQ ID NO: 2061284 - RNA, 19 nt, Homo sapiens
  misc_RNA (1)...(19): siRNA sense strand
gcaguucaacaacaucuuc

SEQ ID NO: 2061285 - RNA, 19 nt, Homo sapiens
  misc_RNA (1)...(19): siRNA sense strand
gcuggccucugacaucugu

SEQ ID NO: 2061286 - RNA, 19 nt, Homo sapiens
  misc_RNA (1)...(19): siRNA sense strand
aagggauucuccaauaaga

SEQ ID NO: 2061287 - RNA, 19 nt, Homo sapiens
  misc_RNA (1)...(19): siRNA sense strand
gaaagccugaauauaguca

SEQ ID NO: 2061288 - RNA, 19 nt, Homo sapiens
  misc_RNA (1)...(19): siRNA sense strand
gcaggaagggauucuccaa

SEQ ID NO: 2061289 - RNA, 19 nt, Homo sapiens
  misc_RNA (1)...(19): siRNA sense strand
ggagcucuauguuauuuug

SEQ ID NO: 2061290 - RNA, 19 nt, Homo sapiens
  misc_RNA (1)...(19): siRNA sense strand
augaagaggucaagaaacu

SEQ ID NO: 2061291 - RNA, 19 nt, Homo sapiens
  misc_RNA (1)...(19): siRNA sense strand
acacugcuuuucucuauaa

SEQ ID NO: 2061292 - RNA, 19 nt, Homo sapiens
  misc_RNA (1)...(19): siRNA sense strand
uuagaaaugucggauugug

SEQ ID NO: 2061293 - RNA, 19 nt, Homo sapiens
  misc_RNA (1)...(19): siRNA sense strand
ccagaguggaugaagauga

SEQ ID NO: 2061294 - RNA, 19 nt, Homo sapiens
  misc_RNA (1)...(19): siRNA sense strand
gaaaucuucaacacuaugg

SEQ ID NO: 2061295 - RNA, 19 nt, Homo sapiens
  misc_RNA (1)...(19): siRNA sense strand
agaaaugccaggaaaucuu

SEQ ID NO: 2061296 - RNA, 19 nt, Homo sapiens
  misc_RNA (1)...(19): siRNA sense strand
uuaccagaguggaugaaga

SEQ ID NO: 2061297 - RNA, 19 nt, Homo sapiens
  misc_RNA (1)...(19): siRNA sense strand
gaagauucucggugacauc

SEQ ID NO: 2061298 - RNA, 19 nt, Homo sapiens
  misc_RNA (1)...(19): siRNA sense strand
agaugacacuuaugaagag

SEQ ID NO: 2061299 - RNA, 19 nt, Homo sapiens
  misc_RNA (1)...(19): siRNA sense strand
caucaaaaccugcaaaauc

SEQ ID NO: 2061300 - RNA, 19 nt, Homo sapiens
  misc_RNA (1)...(19): siRNA sense strand
gucaagaaacuuugugcaa

SEQ ID NO: 2061301 - RNA, 19 nt, Homo sapiens
  misc_RNA (1)...(19): siRNA sense strand
uuacuggguuguuggaaag

SEQ ID NO: 2061302 - RNA, 19 nt, Homo sapiens
  misc_RNA (1)...(19): siRNA sense strand
caguuuaacaucaacaaga

SEQ ID NO: 2061303 - RNA, 19 nt, Homo sapiens
  misc_RNA (1)...(19): siRNA sense strand
cauccaagcucccaagaaa

SEQ ID NO: 2061304 - RNA, 19 nt, Homo sapiens
  misc_RNA (1)...(19): siRNA sense strand
gaagcagccacccugauua

SEQ ID NO: 2061305 - RNA, 19 nt, Homo sapiens
  misc_RNA (1)...(19): siRNA sense strand
gcagccacccugauuauaa

SEQ ID NO: 2061306 - RNA, 19 nt, Homo sapiens
  misc_RNA (1)...(19): siRNA sense strand
ggaagcagccacccugauu

SEQ ID NO: 2061307 - RNA, 19 nt, Homo sapiens
  misc_RNA (1)...(19): siRNA sense strand
ggaugaacauuccucuaga

SEQ ID NO: 2061308 - RNA, 19 nt, Homo sapiens
  misc_RNA (1)...(19): siRNA sense strand
ucuagaggauauagugaua

SEQ ID NO: 2061309 - RNA, 19 nt, Homo sapiens
  misc_RNA (1)...(19): siRNA sense strand
ggauuaugcuccaccaucu

SEQ ID NO: 2061310 - RNA, 19 nt, Homo sapiens
  misc_RNA (1)...(19): siRNA sense strand
guacaaguggaaguucuua

SEQ ID NO: 2061311 - RNA, 19 nt, Homo sapiens
  misc_RNA (1)...(19): siRNA sense strand
cgacgaaacccgugguaga

SEQ ID NO: 2061312 - RNA, 19 nt, Homo sapiens
  misc_RNA (1)...(19): siRNA sense strand
caagaaaccagggauuaug

SEQ ID NO: 2061313 - RNA, 19 nt, Homo sapiens
  misc_RNA (1)...(19): siRNA sense strand
gaugaacauuccucuagag

SEQ ID NO: 2061314 - RNA, 19 nt, Homo sapiens
  misc_RNA (1)...(19): siRNA sense strand
ggcuaugcauacugugaua

SEQ ID NO: 2061315 - RNA, 19 nt, Homo sapiens
  misc_RNA (1)...(19): siRNA sense strand
acaauacacgagauacaua

SEQ ID NO: 2061316 - RNA, 19 nt, Homo sapiens
  misc_RNA (1)...(19): siRNA sense strand
gggaugaacauuccucuag

SEQ ID NO: 2061317 - RNA, 19 nt, Homo sapiens
  misc_RNA (1)...(19): siRNA sense strand
cgaaacccgugguagagau

SEQ ID NO: 2061318 - RNA, 19 nt, Homo sapiens
  misc_RNA (1)...(19): siRNA sense strand
aaguggaaguucuuacaaa

SEQ ID NO: 2061319 - RNA, 19 nt, Homo sapiens
  misc_RNA (1)...(19): siRNA sense strand
uagaggcuaugcauacugu

SEQ ID NO: 2061320 - RNA, 19 nt, Homo sapiens
  misc_RNA (1)...(19): siRNA sense strand
ggauaugggaccucucaug

SEQ ID NO: 2061321 - RNA, 19 nt, Homo sapiens
  misc_RNA (1)...(19): siRNA sense strand
ccaagaaaccagggauuau

SEQ ID NO: 2061322 - RNA, 19 nt, Homo sapiens
  misc_RNA (1)...(19): siRNA sense strand
gaucguacaaguggaaguu

SEQ ID NO: 2061323 - RNA, 19 nt, Homo sapiens
  misc_RNA (1)...(19): siRNA sense strand
uagaggauauagugauagu

SEQ ID NO: 2061324 - RNA, 19 nt, Homo sapiens
  misc_RNA (1)...(19): siRNA sense strand
cccaagaaaccagggauua

SEQ ID NO: 2061325 - RNA, 19 nt, Homo sapiens
  misc_RNA (1)...(19): siRNA sense strand
gauaauggucacucuaguc

SEQ ID NO: 2061326 - RNA, 19 nt, Homo sapiens
  misc_RNA (1)...(19): siRNA sense strand
uaacaauacacgagauaca

SEQ ID NO: 2061327 - RNA, 19 nt, Homo sapiens
  misc_RNA (1)...(19): siRNA sense strand
caaguggaaguucuuacaa

SEQ ID NO: 2061328 - RNA, 19 nt, Homo sapiens
  misc_RNA (1)...(19): siRNA sense strand
ccacccugauuauaacaau

SEQ ID NO: 2061329 - RNA, 19 nt, Homo sapiens
  misc_RNA (1)...(19): siRNA sense strand
caucuagaggcuaugcaua

SEQ ID NO: 2061330 - RNA, 19 nt, Homo sapiens
  misc_RNA (1)...(19): siRNA sense strand
cacccugauuauaacaaua

SEQ ID NO: 2061331 - RNA, 19 nt, Homo sapiens
  misc_RNA (1)...(19): siRNA sense strand
ggccucggaugucuuaugg

SEQ ID NO: 2061332 - RNA, 19 nt, Homo sapiens
  misc_RNA (1)...(19): siRNA sense strand
gaggcuaugcauacuguga

SEQ ID NO: 2061333 - RNA, 19 nt, Homo sapiens
  misc_RNA (1)...(19): siRNA sense strand
gauuaugcuccaccaucua

SEQ ID NO: 2061334 - RNA, 19 nt, Homo sapiens
  misc_RNA (1)...(19): siRNA sense strand
caauacacgagauacauag

SEQ ID NO: 2061335 - RNA, 19 nt, Homo sapiens
  misc_RNA (1)...(19): siRNA sense strand
cagccacccugauuauaac

SEQ ID NO: 2061336 - RNA, 19 nt, Homo sapiens
  misc_RNA (1)...(19): siRNA sense strand
ugauaauggucacucuagu

SEQ ID NO: 2061337 - RNA, 19 nt, Homo sapiens
  misc_RNA (1)...(19): siRNA sense strand
aagcagccacccugauuau

SEQ ID NO: 2061338 - RNA, 19 nt, Homo sapiens
  misc_RNA (1)...(19): siRNA sense strand
gacgaaacccgugguagag

SEQ ID NO: 2061339 - RNA, 19 nt, Homo sapiens
  misc_RNA (1)...(19): siRNA sense strand
gaaacccgugguagagauc

SEQ ID NO: 2061340 - RNA, 19 nt, Homo sapiens
  misc_RNA (1)...(19): siRNA sense strand
gcuaugcauacugugauaa

SEQ ID NO: 2061341 - RNA, 19 nt, Homo sapiens
  misc_RNA (1)...(19): siRNA sense strand
acaaguggaaguucuuaca

SEQ ID NO: 2061342 - RNA, 19 nt, Homo sapiens
  misc_RNA (1)...(19): siRNA sense strand
uaugcauacugugauaaug

SEQ ID NO: 2061343 - RNA, 19 nt, Homo sapiens
  misc_RNA (1)...(19): siRNA sense strand
ccaaauauguguugauuga

SEQ ID NO: 2061344 - RNA, 19 nt, Homo sapiens
  misc_RNA (1)...(19): siRNA sense strand
gcacaauacuggaagagaa

SEQ ID NO: 2061345 - RNA, 19 nt, Homo sapiens
  misc_RNA (1)...(19): siRNA sense strand
gaaacaauauggacuugga

SEQ ID NO: 2061346 - RNA, 19 nt, Homo sapiens
  misc_RNA (1)...(19): siRNA sense strand
ugacacaccuggacagauu

SEQ ID NO: 2061347 - RNA, 19 nt, Homo sapiens
  misc_RNA (1)...(19): siRNA sense strand
aagaaucgauggcacaaua

SEQ ID NO: 2061348 - RNA, 19 nt, Homo sapiens
  misc_RNA (1)...(19): siRNA sense strand
uggauuagaugaacucuuu

SEQ ID NO: 2061349 - RNA, 19 nt, Homo sapiens
  misc_RNA (1)...(19): siRNA sense strand
ccacagaguuacagaggaa

SEQ ID NO: 2061350 - RNA, 19 nt, Homo sapiens
  misc_RNA (1)...(19): siRNA sense strand
cccagaacauguccaaaua

SEQ ID NO: 2061351 - RNA, 19 nt, Homo sapiens
  misc_RNA (1)...(19): siRNA sense strand
gggaguaucguccugaaua

SEQ ID NO: 2061352 - RNA, 19 nt, Homo sapiens
  misc_RNA (1)...(19): siRNA sense strand
uggaauggaugcaggauuu

SEQ ID NO: 2061353 - RNA, 19 nt, Homo sapiens
  misc_RNA (1)...(19): siRNA sense strand
ggaguaucguccugaauau

SEQ ID NO: 2061354 - RNA, 19 nt, Homo sapiens
  misc_RNA (1)...(19): siRNA sense strand
gcagagagaacaacuggaa

SEQ ID NO: 2061355 - RNA, 19 nt, Homo sapiens
  misc_RNA (1)...(19): siRNA sense strand
uaaccugacucguucaaug

SEQ ID NO: 2061356 - RNA, 19 nt, Homo sapiens
  misc_RNA (1)...(19): siRNA sense strand
gacauugaccacagaguua

SEQ ID NO: 2061357 - RNA, 19 nt, Homo sapiens
  misc_RNA (1)...(19): siRNA sense strand
cagaacauguccaaauaug

SEQ ID NO: 2061358 - RNA, 19 nt, Homo sapiens
  misc_RNA (1)...(19): siRNA sense strand
ccaaggcacuccaccguau

SEQ ID NO: 2061359 - RNA, 19 nt, Homo sapiens
  misc_RNA (1)...(19): siRNA sense strand
caaugagccugguguuaga

SEQ ID NO: 2061360 - RNA, 19 nt, Homo sapiens
  misc_RNA (1)...(19): siRNA sense strand
aaaccaagcugccuuucau

SEQ ID NO: 2061361 - RNA, 19 nt, Homo sapiens
  misc_RNA (1)...(19): siRNA sense strand
gaaaagauauggguucugu

SEQ ID NO: 2061362 - RNA, 19 nt, Homo sapiens
  misc_RNA (1)...(19): siRNA sense strand
cagcgauacugaugacauu

SEQ ID NO: 2061363 - RNA, 19 nt, Homo sapiens
  misc_RNA (1)...(19): siRNA sense strand
gaggaaccuuggaugaaga

SEQ ID NO: 2061364 - RNA, 19 nt, Homo sapiens
  misc_RNA (1)...(19): siRNA sense strand
guccaaauauguguugauu

SEQ ID NO: 2061365 - RNA, 19 nt, Homo sapiens
  misc_RNA (1)...(19): siRNA sense strand
gcagacagcgauacugaug

SEQ ID NO: 2061366 - RNA, 19 nt, Homo sapiens
  misc_RNA (1)...(19): siRNA sense strand
gagacuacauacgucagua

SEQ ID NO: 2061367 - RNA, 19 nt, Homo sapiens
  misc_RNA (1)...(19): siRNA sense strand
caagcugccuuucauugug

SEQ ID NO: 2061368 - RNA, 19 nt, Homo sapiens
  misc_RNA (1)...(19): siRNA sense strand
uaccagugcugccgaagaa

SEQ ID NO: 2061369 - RNA, 19 nt, Homo sapiens
  misc_RNA (1)...(19): siRNA sense strand
gcugcacccuucugauuug

SEQ ID NO: 2061370 - RNA, 19 nt, Homo sapiens
  misc_RNA (1)...(19): siRNA sense strand
ucucuuugcuaccagauuu

SEQ ID NO: 2061371 - RNA, 19 nt, Homo sapiens
  misc_RNA (1)...(19): siRNA sense strand
gauauucgugauacuguaa

SEQ ID NO: 2061372 - RNA, 19 nt, Homo sapiens
  misc_RNA (1)...(19): siRNA sense strand
ugaaucaagagacuacaua

SEQ ID NO: 2061373 - RNA, 19 nt, Homo sapiens
  misc_RNA (1)...(19): siRNA sense strand
guaauggacacaucgagaa

SEQ ID NO: 2061374 - RNA, 19 nt, Homo sapiens
  misc_RNA (1)...(19): siRNA sense strand
guauucaccuggucagcuu

SEQ ID NO: 2061375 - RNA, 19 nt, Homo sapiens
  misc_RNA (1)...(19): siRNA sense strand
ggaugaagaggaugaggaa

SEQ ID NO: 2061376 - RNA, 19 nt, Homo sapiens
  misc_RNA (1)...(19): siRNA sense strand
gagaaggcccagaacaugu

SEQ ID NO: 2061377 - RNA, 19 nt, Homo sapiens
  misc_RNA (1)...(19): siRNA sense strand
ccagugcugccgaagaaua

SEQ ID NO: 2061378 - RNA, 19 nt, Homo sapiens
  misc_RNA (1)...(19): siRNA sense strand
gcacccuucugauuugauc

SEQ ID NO: 2061379 - RNA, 19 nt, Homo sapiens
  misc_RNA (1)...(19): siRNA sense strand
caacuggaacgccuucgaa

SEQ ID NO: 2061380 - RNA, 19 nt, Homo sapiens
  misc_RNA (1)...(19): siRNA sense strand
caucauugaccacagcuuu

SEQ ID NO: 2061381 - RNA, 19 nt, Homo sapiens
  misc_RNA (1)...(19): siRNA sense strand
cgaggaaccuuggaugaag

SEQ ID NO: 2061382 - RNA, 19 nt, Homo sapiens
  misc_RNA (1)...(19): siRNA sense strand
acaguugucaucuauguaa

SEQ ID NO: 2061383 - RNA, 19 nt, Homo sapiens
  misc_RNA (1)...(19): siRNA sense strand
ugauauucgugauacugua

SEQ ID NO: 2061384 - RNA, 19 nt, Homo sapiens
  misc_RNA (1)...(19): siRNA sense strand
gcccagaacauguccaaau

SEQ ID NO: 2061385 - RNA, 19 nt, Homo sapiens
  misc_RNA (1)...(19): siRNA sense strand
ugaccucacucaaucucuu

SEQ ID NO: 2061386 - RNA, 19 nt, Homo sapiens
  misc_RNA (1)...(19): siRNA sense strand
gcccuugcauccucauuuc

SEQ ID NO: 2061387 - RNA, 19 nt, Homo sapiens
  misc_RNA (1)...(19): siRNA sense strand
cuggacagauugagguauu

SEQ ID NO: 2061388 - RNA, 19 nt, Homo sapiens
  misc_RNA (1)...(19): siRNA sense strand
ugacauugaccacagaguu

SEQ ID NO: 2061389 - RNA, 19 nt, Homo sapiens
  misc_RNA (1)...(19): siRNA sense strand
guaucguccugaauaugaa

SEQ ID NO: 2061390 - RNA, 19 nt, Homo sapiens
  misc_RNA (1)...(19): siRNA sense strand
guacaugaaguucccuuuc

SEQ ID NO: 2061391 - RNA, 19 nt, Homo sapiens
  misc_RNA (1)...(19): siRNA sense strand
aaagauauggguucuguag

SEQ ID NO: 2061392 - RNA, 19 nt, Homo sapiens
  misc_RNA (1)...(19): siRNA sense strand
ucaaugagccugguguuag

SEQ ID NO: 2061393 - RNA, 19 nt, Homo sapiens
  misc_RNA (1)...(19): siRNA sense strand
ugaagaggaugaggaagca

SEQ ID NO: 2061394 - RNA, 19 nt, Homo sapiens
  misc_RNA (1)...(19): siRNA sense strand
gaauaugaacgucugaaaa

SEQ ID NO: 2061395 - RNA, 19 nt, Homo sapiens
  misc_RNA (1)...(19): siRNA sense strand
ccagaacauguccaaauau

SEQ ID NO: 2061396 - RNA, 19 nt, Homo sapiens
  misc_RNA (1)...(19): siRNA sense strand
gcacccagugugucuguug

SEQ ID NO: 2061397 - RNA, 19 nt, Homo sapiens
  misc_RNA (1)...(19): siRNA sense strand
gcaagaaucgauggcacaa

SEQ ID NO: 2061398 - RNA, 19 nt, Homo sapiens
  misc_RNA (1)...(19): siRNA sense strand
gcgauacugaugacauuga

SEQ ID NO: 2061399 - RNA, 19 nt, Homo sapiens
  misc_RNA (1)...(19): siRNA sense strand
ggauccagcaguacaugaa

SEQ ID NO: 2061400 - RNA, 19 nt, Homo sapiens
  misc_RNA (1)...(19): siRNA sense strand
auggacacaucgagaagua

SEQ ID NO: 2061401 - RNA, 19 nt, Homo sapiens
  misc_RNA (1)...(19): siRNA sense strand
ugaauaugaacgucugaaa

SEQ ID NO: 2061402 - RNA, 19 nt, Homo sapiens
  misc_RNA (1)...(19): siRNA sense strand
agaaguaccaacccaguga

SEQ ID NO: 2061403 - RNA, 19 nt, Homo sapiens
  misc_RNA (1)...(19): siRNA sense strand
ugagaaggcccagaacaug

SEQ ID NO: 2061404 - RNA, 19 nt, Homo sapiens
  misc_RNA (1)...(19): siRNA sense strand
gcacuccaccguaugugau

SEQ ID NO: 2061405 - RNA, 19 nt, Homo sapiens
  misc_RNA (1)...(19): siRNA sense strand
caggugaugaaauuuauug

SEQ ID NO: 2061406 - RNA, 19 nt, Homo sapiens
  misc_RNA (1)...(19): siRNA sense strand
cagugugucuguugguguu

SEQ ID NO: 2061407 - RNA, 19 nt, Homo sapiens
  misc_RNA (1)...(19): siRNA sense strand
aagcagacagcgauacuga

SEQ ID NO: 2061408 - RNA, 19 nt, Homo sapiens
  misc_RNA (1)...(19): siRNA sense strand
gaggaagcagacagcgaua

SEQ ID NO: 2061409 - RNA, 19 nt, Homo sapiens
  misc_RNA (1)...(19): siRNA sense strand
guaccaacccagugaccuu

SEQ ID NO: 2061410 - RNA, 19 nt, Homo sapiens
  misc_RNA (1)...(19): siRNA sense strand
ucacucaaucucuuugcua

SEQ ID NO: 2061411 - RNA, 19 nt, Homo sapiens
  misc_RNA (1)...(19): siRNA sense strand
cacaauacuggaagagaaa

SEQ ID NO: 2061412 - RNA, 19 nt, Homo sapiens
  misc_RNA (1)...(19): siRNA sense strand
gaacgccuucgaaaagaua

SEQ ID NO: 2061413 - RNA, 19 nt, Homo sapiens
  misc_RNA (1)...(19): siRNA sense strand
ccaagcugccuuucauugu

SEQ ID NO: 2061414 - RNA, 19 nt, Homo sapiens
  misc_RNA (1)...(19): siRNA sense strand
cccaauggcggcauaguga

SEQ ID NO: 2061415 - RNA, 19 nt, Homo sapiens
  misc_RNA (1)...(19): siRNA sense strand
ggacagauugagguauuca

SEQ ID NO: 2061416 - RNA, 19 nt, Homo sapiens
  misc_RNA (1)...(19): siRNA sense strand
cagaggaaagccaugaaga

SEQ ID NO: 2061417 - RNA, 19 nt, Homo sapiens
  misc_RNA (1)...(19): siRNA sense strand
cugggacaauuaucacuga

SEQ ID NO: 2061418 - RNA, 19 nt, Homo sapiens
  misc_RNA (1)...(19): siRNA sense strand
gaaucaagagacuacauac

SEQ ID NO: 2061419 - RNA, 19 nt, Homo sapiens
  misc_RNA (1)...(19): siRNA sense strand
gaccucacucaaucucuuu

SEQ ID NO: 2061420 - RNA, 19 nt, Homo sapiens
  misc_RNA (1)...(19): siRNA sense strand
uguucuggguacuggauua

SEQ ID NO: 2061421 - RNA, 19 nt, Homo sapiens
  misc_RNA (1)...(19): siRNA sense strand
ucccuuuccugccaauauu

SEQ ID NO: 2061422 - RNA, 19 nt, Homo sapiens
  misc_RNA (1)...(19): siRNA sense strand
acuggaagagaaacaauaa

SEQ ID NO: 2061423 - RNA, 19 nt, Homo sapiens
  misc_RNA (1)...(19): siRNA sense strand
ggaagcagacagcgauacu

SEQ ID NO: 2061424 - RNA, 19 nt, Homo sapiens
  misc_RNA (1)...(19): siRNA sense strand
gauuagaugaacucuuugu

SEQ ID NO: 2061425 - RNA, 19 nt, Homo sapiens
  misc_RNA (1)...(19): siRNA sense strand
guacuggauuagaugaacu

SEQ ID NO: 2061426 - RNA, 19 nt, Homo sapiens
  misc_RNA (1)...(19): siRNA sense strand
aguaucguccugaauauga

SEQ ID NO: 2061427 - RNA, 19 nt, Homo sapiens
  misc_RNA (1)...(19): siRNA sense strand
ccaugaagagccagcauuc

SEQ ID NO: 2061428 - RNA, 19 nt, Homo sapiens
  misc_RNA (1)...(19): siRNA sense strand
agacuacauacgucaguaa

SEQ ID NO: 2061429 - RNA, 19 nt, Homo sapiens
  misc_RNA (1)...(19): siRNA sense strand
ugaugacauugaccacaga

SEQ ID NO: 2061430 - RNA, 19 nt, Homo sapiens
  misc_RNA (1)...(19): siRNA sense strand
agacagcgauacugaugac

SEQ ID NO: 2061431 - RNA, 19 nt, Homo sapiens
  misc_RNA (1)...(19): siRNA sense strand
gggugucucugcuguucug

SEQ ID NO: 2061432 - RNA, 19 nt, Homo sapiens
  misc_RNA (1)...(19): siRNA sense strand
ugagccugguguuagauga

SEQ ID NO: 2061433 - RNA, 19 nt, Homo sapiens
  misc_RNA (1)...(19): siRNA sense strand
cuacauacgucaguaaccu

SEQ ID NO: 2061434 - RNA, 19 nt, Homo sapiens
  misc_RNA (1)...(19): siRNA sense strand
gcuuugcaguggaauggau

SEQ ID NO: 2061435 - RNA, 19 nt, Homo sapiens
  misc_RNA (1)...(19): siRNA sense strand
aaccuuggaugaagaggau

SEQ ID NO: 2061436 - RNA, 19 nt, Homo sapiens
  misc_RNA (1)...(19): siRNA sense strand
gugggugucucugcuguuc

SEQ ID NO: 2061437 - RNA, 19 nt, Homo sapiens
  misc_RNA (1)...(19): siRNA sense strand
cagcuucugggacaauuau

SEQ ID NO: 2061438 - RNA, 19 nt, Homo sapiens
  misc_RNA (1)...(19): siRNA sense strand
uuacagaggaaagccauga

SEQ ID NO: 2061439 - RNA, 19 nt, Homo sapiens
  misc_RNA (1)...(19): siRNA sense strand
gguacuggauuagaugaac

SEQ ID NO: 2061440 - RNA, 19 nt, Homo sapiens
  misc_RNA (1)...(19): siRNA sense strand
guugucaucuauguaaugg

SEQ ID NO: 2061441 - RNA, 19 nt, Homo sapiens
  misc_RNA (1)...(19): siRNA sense strand
ccugcagcaucuuauacaa

SEQ ID NO: 2061442 - RNA, 19 nt, Homo sapiens
  misc_RNA (1)...(19): siRNA sense strand
ggacugccaaagacagcuu

SEQ ID NO: 2061443 - RNA, 19 nt, Homo sapiens
  misc_RNA (1)...(19): siRNA sense strand
gaucaauccuccaugagua

SEQ ID NO: 2061444 - RNA, 19 nt, Homo sapiens
  misc_RNA (1)...(19): siRNA sense strand
gcagggagaggccguauua

SEQ ID NO: 2061445 - RNA, 19 nt, Homo sapiens
  misc_RNA (1)...(19): siRNA sense strand
ggacagcccaugauuaauu

SEQ ID NO: 2061446 - RNA, 19 nt, Homo sapiens
  misc_RNA (1)...(19): siRNA sense strand
guaaagaauucuccggaaa

SEQ ID NO: 2061447 - RNA, 19 nt, Homo sapiens
  misc_RNA (1)...(19): siRNA sense strand
caagaucaauccuccauga

SEQ ID NO: 2061448 - RNA, 19 nt, Homo sapiens
  misc_RNA (1)...(19): siRNA sense strand
gagcagcuauucuucuuau

SEQ ID NO: 2061449 - RNA, 19 nt, Homo sapiens
  misc_RNA (1)...(19): siRNA sense strand
gaacuucucuuggaggaau

SEQ ID NO: 2061450 - RNA, 19 nt, Homo sapiens
  misc_RNA (1)...(19): siRNA sense strand
gugagaauguuacaauuga

SEQ ID NO: 2061451 - RNA, 19 nt, Homo sapiens
  misc_RNA (1)...(19): siRNA sense strand
gcuauugacugguuugaug

SEQ ID NO: 2061452 - RNA, 19 nt, Homo sapiens
  misc_RNA (1)...(19): siRNA sense strand
gacagcccaugauuaauuu

SEQ ID NO: 2061453 - RNA, 19 nt, Homo sapiens
  misc_RNA (1)...(19): siRNA sense strand
gaccaaggaucacgucaug

SEQ ID NO: 2061454 - RNA, 19 nt, Homo sapiens
  misc_RNA (1)...(19): siRNA sense strand
ggacagcagcaaagcuaua

SEQ ID NO: 2061455 - RNA, 19 nt, Homo sapiens
  misc_RNA (1)...(19): siRNA sense strand
gaacacaggcuauggaacu

SEQ ID NO: 2061456 - RNA, 19 nt, Homo sapiens
  misc_RNA (1)...(19): siRNA sense strand
aauaugaacuucucuugga

SEQ ID NO: 2061457 - RNA, 19 nt, Homo sapiens
  misc_RNA (1)...(19): siRNA sense strand
gcagauugguauuauuaag

SEQ ID NO: 2061458 - RNA, 19 nt, Homo sapiens
  misc_RNA (1)...(19): siRNA sense strand
cgugguggcuucaauaaau

SEQ ID NO: 2061459 - RNA, 19 nt, Homo sapiens
  misc_RNA (1)...(19): siRNA sense strand
ucaagcagauugguauuau

SEQ ID NO: 2061460 - RNA, 19 nt, Homo sapiens
  misc_RNA (1)...(19): siRNA sense strand
cagcagaguuacagugguu

SEQ ID NO: 2061461 - RNA, 19 nt, Homo sapiens
  misc_RNA (1)...(19): siRNA sense strand
cagagcagcuauucuucuu

SEQ ID NO: 2061462 - RNA, 19 nt, Homo sapiens
  misc_RNA (1)...(19): siRNA sense strand
caagcagauugguauuauu

SEQ ID NO: 2061463 - RNA, 19 nt, Homo sapiens
  misc_RNA (1)...(19): siRNA sense strand
ugacccaccuucagcuaaa

SEQ ID NO: 2061464 - RNA, 19 nt, Homo sapiens
  misc_RNA (1)...(19): siRNA sense strand
cgggacagcccaugauuaa

SEQ ID NO: 2061465 - RNA, 19 nt, Homo sapiens
  misc_RNA (1)...(19): siRNA sense strand
cagcagugguggcuaugaa

SEQ ID NO: 2061466 - RNA, 19 nt, Homo sapiens
  misc_RNA (1)...(19): siRNA sense strand
gggugagaauguuacaauu

SEQ ID NO: 2061467 - RNA, 19 nt, Homo sapiens
  misc_RNA (1)...(19): siRNA sense strand
uugagucuguggcugauua

SEQ ID NO: 2061468 - RNA, 19 nt, Homo sapiens
  misc_RNA (1)...(19): siRNA sense strand
ggugagaauguuacaauug

SEQ ID NO: 2061469 - RNA, 19 nt, Homo sapiens
  misc_RNA (1)...(19): siRNA sense strand
ugacugguuugaugguaaa

SEQ ID NO: 2061470 - RNA, 19 nt, Homo sapiens
  misc_RNA (1)...(19): siRNA sense strand
gacaacaacaccaucuuug

SEQ ID NO: 2061471 - RNA, 19 nt, Homo sapiens
  misc_RNA (1)...(19): siRNA sense strand
aagcagcuauugacugguu

SEQ ID NO: 2061472 - RNA, 19 nt, Homo sapiens
  misc_RNA (1)...(19): siRNA sense strand
uaaagaauucuccggaaau

SEQ ID NO: 2061473 - RNA, 19 nt, Homo sapiens
  misc_RNA (1)...(19): siRNA sense strand
gauuauacccaacaagcaa

SEQ ID NO: 2061474 - RNA, 19 nt, Homo sapiens
  misc_RNA (1)...(19): siRNA sense strand
gugguggcuucaauaaauu

SEQ ID NO: 2061475 - RNA, 19 nt, Homo sapiens
  misc_RNA (1)...(19): siRNA sense strand
ggaaguuacgguagcaguu

SEQ ID NO: 2061476 - RNA, 19 nt, Homo sapiens
  misc_RNA (1)...(19): siRNA sense strand
ggccagagcagcuauucuu

SEQ ID NO: 2061477 - RNA, 19 nt, Homo sapiens
  misc_RNA (1)...(19): siRNA sense strand
gaaugaaugcaaccagugu

SEQ ID NO: 2061478 - RNA, 19 nt, Homo sapiens
  misc_RNA (1)...(19): siRNA sense strand
gacuggaaguguccuaauc

SEQ ID NO: 2061479 - RNA, 19 nt, Homo sapiens
  misc_RNA (1)...(19): siRNA sense strand
gcaacggucucuuuugaug

SEQ ID NO: 2061480 - RNA, 19 nt, Homo sapiens
  misc_RNA (1)...(19): siRNA sense strand
gacagcagcaaagcuauaa

SEQ ID NO: 2061481 - RNA, 19 nt, Homo sapiens
  misc_RNA (1)...(19): siRNA sense strand
agacaacaacaccaucuuu

SEQ ID NO: 2061482 - RNA, 19 nt, Homo sapiens
  misc_RNA (1)...(19): siRNA sense strand
aaagaauucuccggaaauc

SEQ ID NO: 2061483 - RNA, 19 nt, Homo sapiens
  misc_RNA (1)...(19): siRNA sense strand
gaaguuacgguagcaguuc

SEQ ID NO: 2061484 - RNA, 19 nt, Homo sapiens
  misc_RNA (1)...(19): siRNA sense strand
aaucccaccugugagaaua

SEQ ID NO: 2061485 - RNA, 19 nt, Homo sapiens
  misc_RNA (1)...(19): siRNA sense strand
ggacagcagcaaagcuaug

SEQ ID NO: 2061486 - RNA, 19 nt, Homo sapiens
  misc_RNA (1)...(19): siRNA sense strand
guccuaaucccaccuguga

SEQ ID NO: 2061487 - RNA, 19 nt, Homo sapiens
  misc_RNA (1)...(19): siRNA sense strand
cagcagaaccaguacaaca

SEQ ID NO: 2061488 - RNA, 19 nt, Homo sapiens
  misc_RNA (1)...(19): siRNA sense strand
aaacgauuauacccaacaa

SEQ ID NO: 2061489 - RNA, 19 nt, Homo sapiens
  misc_RNA (1)...(19): siRNA sense strand
gaacaggauaauucagaca

SEQ ID NO: 2061490 - RNA, 19 nt, Homo sapiens
  misc_RNA (1)...(19): siRNA sense strand
gaccgugguggcuucaaua

SEQ ID NO: 2061491 - RNA, 19 nt, Homo sapiens
  misc_RNA (1)...(19): siRNA sense strand
guggacagcagcaaagcua

SEQ ID NO: 2061492 - RNA, 19 nt, Homo sapiens
  misc_RNA (1)...(19): siRNA sense strand
gcagcuauucuucuuaugg

SEQ ID NO: 2061493 - RNA, 19 nt, Homo sapiens
  misc_RNA (1)...(19): siRNA sense strand
guaacuauggccaagauca

SEQ ID NO: 2061494 - RNA, 19 nt, Homo sapiens
  misc_RNA (1)...(19): siRNA sense strand
ggagguggagguaacuaug

SEQ ID NO: 2061495 - RNA, 19 nt, Homo sapiens
  misc_RNA (1)...(19): siRNA sense strand
acaagcaacccaaagcuau

SEQ ID NO: 2061496 - RNA, 19 nt, Homo sapiens
  misc_RNA (1)...(19): siRNA sense strand
uaacuauggccaagaucaa

SEQ ID NO: 2061497 - RNA, 19 nt, Homo sapiens
  misc_RNA (1)...(19): siRNA sense strand
gucuguggcugauuacuuc

SEQ ID NO: 2061498 - RNA, 19 nt, Homo sapiens
  misc_RNA (1)...(19): siRNA sense strand
ccgcagcagugguggcuau

SEQ ID NO: 2061499 - RNA, 19 nt, Homo sapiens
  misc_RNA (1)...(19): siRNA sense strand
ggagguggagguggaggua

SEQ ID NO: 2061500 - RNA, 19 nt, Homo sapiens
  misc_RNA (1)...(19): siRNA sense strand
gaaugcaaccaguguaagg

SEQ ID NO: 2061501 - RNA, 19 nt, Homo sapiens
  misc_RNA (1)...(19): siRNA sense strand
aucaaggucucauuugcua

SEQ ID NO: 2061502 - RNA, 19 nt, Homo sapiens
  misc_RNA (1)...(19): siRNA sense strand
cacggacacuucaggcuau

SEQ ID NO: 2061503 - RNA, 19 nt, Homo sapiens
  misc_RNA (1)...(19): siRNA sense strand
gguuugaugguaaagaauu

SEQ ID NO: 2061504 - RNA, 19 nt, Homo sapiens
  misc_RNA (1)...(19): siRNA sense strand
gaugacccaccuucagcua

SEQ ID NO: 2061505 - RNA, 19 nt, Homo sapiens
  misc_RNA (1)...(19): siRNA sense strand
uggcagcgguggcuaugga

SEQ ID NO: 2061506 - RNA, 19 nt, Homo sapiens
  misc_RNA (1)...(19): siRNA sense strand
gacagcagaaccaguacaa

SEQ ID NO: 2061507 - RNA, 19 nt, Homo sapiens
  misc_RNA (1)...(19): siRNA sense strand
ccuacggacagcagaguua

SEQ ID NO: 2061508 - RNA, 19 nt, Homo sapiens
  misc_RNA (1)...(19): siRNA sense strand
ucucagagcagcagcuaug

SEQ ID NO: 2061509 - RNA, 19 nt, Homo sapiens
  misc_RNA (1)...(19): siRNA sense strand
gagaauguuacaauugagu

SEQ ID NO: 2061510 - RNA, 19 nt, Homo sapiens
  misc_RNA (1)...(19): siRNA sense strand
caacaccaucuuugugcaa

SEQ ID NO: 2061511 - RNA, 19 nt, Homo sapiens
  misc_RNA (1)...(19): siRNA sense strand
caggauaauucagacaaca

SEQ ID NO: 2061512 - RNA, 19 nt, Homo sapiens
  misc_RNA (1)...(19): siRNA sense strand
ccgaacaggauaauucaga

SEQ ID NO: 2061513 - RNA, 19 nt, Homo sapiens
  misc_RNA (1)...(19): siRNA sense strand
caagcaacccaaagcuaug

SEQ ID NO: 2061514 - RNA, 19 nt, Homo sapiens
  misc_RNA (1)...(19): siRNA sense strand
ccagaacacaggcuaugga

SEQ ID NO: 2061515 - RNA, 19 nt, Homo sapiens
  misc_RNA (1)...(19): siRNA sense strand
cagaggaggcuaugaucga

SEQ ID NO: 2061516 - RNA, 19 nt, Homo sapiens
  misc_RNA (1)...(19): siRNA sense strand
ccggaaauccuaucaaggu

SEQ ID NO: 2061517 - RNA, 19 nt, Homo sapiens
  misc_RNA (1)...(19): siRNA sense strand
gaauucuccggaaauccua

SEQ ID NO: 2061518 - RNA, 19 nt, Homo sapiens
  misc_RNA (1)...(19): siRNA sense strand
gcgguuauggcaaucaaga

SEQ ID NO: 2061519 - RNA, 19 nt, Homo sapiens
  misc_RNA (1)...(19): siRNA sense strand
gcagcaccucgggaaguua

SEQ ID NO: 2061520 - RNA, 19 nt, Homo sapiens
  misc_RNA (1)...(19): siRNA sense strand
cugguuugaugguaaagaa

SEQ ID NO: 2061521 - RNA, 19 nt, Homo sapiens
  misc_RNA (1)...(19): siRNA sense strand
gcagaguuacagugguuau

SEQ ID NO: 2061522 - RNA, 19 nt, Homo sapiens
  misc_RNA (1)...(19): siRNA sense strand
gugcaaggccugggugaga

SEQ ID NO: 2061523 - RNA, 19 nt, Homo sapiens
  misc_RNA (1)...(19): siRNA sense strand
ugaccgugguggcuucaau

SEQ ID NO: 2061524 - RNA, 19 nt, Homo sapiens
  misc_RNA (1)...(19): siRNA sense strand
cagcagcaaagcuauaauc

SEQ ID NO: 2061525 - RNA, 19 nt, Homo sapiens
  misc_RNA (1)...(19): siRNA sense strand
gcccaugauuaauuuguac

SEQ ID NO: 2061526 - RNA, 19 nt, Homo sapiens
  misc_RNA (1)...(19): siRNA sense strand
cagaacacaggcuauggaa

SEQ ID NO: 2061527 - RNA, 19 nt, Homo sapiens
  misc_RNA (1)...(19): siRNA sense strand
ggccugggugagaauguua

SEQ ID NO: 2061528 - RNA, 19 nt, Homo sapiens
  misc_RNA (1)...(19): siRNA sense strand
ccuaaucccaccugugaga

SEQ ID NO: 2061529 - RNA, 19 nt, Homo sapiens
  misc_RNA (1)...(19): siRNA sense strand
uggcagugguggcgguuau

SEQ ID NO: 2061530 - RNA, 19 nt, Homo sapiens
  misc_RNA (1)...(19): siRNA sense strand
ccugugagaauaugaacuu

SEQ ID NO: 2061531 - RNA, 19 nt, Homo sapiens
  misc_RNA (1)...(19): siRNA sense strand
caugggccguggaggcuau

SEQ ID NO: 2061532 - RNA, 19 nt, Homo sapiens
  misc_RNA (1)...(19): siRNA sense strand
guuugaugguaaagaauuc

SEQ ID NO: 2061533 - RNA, 19 nt, Homo sapiens
  misc_RNA (1)...(19): siRNA sense strand
ggaccaaggaucacgucau

SEQ ID NO: 2061534 - RNA, 19 nt, Homo sapiens
  misc_RNA (1)...(19): siRNA sense strand
caaacgauuauacccaaca

SEQ ID NO: 2061535 - RNA, 19 nt, Homo sapiens
  misc_RNA (1)...(19): siRNA sense strand
cagaguuacagugguuaua

SEQ ID NO: 2061536 - RNA, 19 nt, Homo sapiens
  misc_RNA (1)...(19): siRNA sense strand
gggaaacuggcaagcugaa

SEQ ID NO: 2061537 - RNA, 19 nt, Homo sapiens
  misc_RNA (1)...(19): siRNA sense strand
caacaagcaacccaaagcu

SEQ ID NO: 2061538 - RNA, 19 nt, Homo sapiens
  misc_RNA (1)...(19): siRNA sense strand
gcaaggccugggugagaau

SEQ ID NO: 2061539 - RNA, 19 nt, Homo sapiens
  misc_RNA (1)...(19): siRNA sense strand
cugauuacuucaagcagau

SEQ ID NO: 2061540 - RNA, 19 nt, Homo sapiens
  misc_RNA (1)...(19): siRNA sense strand
uugacugguuugaugguaa

SEQ ID NO: 2061541 - RNA, 19 nt, Homo sapiens
  misc_RNA (1)...(19): siRNA sense strand
uacgguagcaguucucaga

SEQ ID NO: 2061542 - RNA, 19 nt, Homo sapiens
  misc_RNA (1)...(19): siRNA sense strand
agccagagcucccaaucgu

SEQ ID NO: 2061543 - RNA, 19 nt, Homo sapiens
  misc_RNA (1)...(19): siRNA sense strand
ggagaugacuuccgauaug

SEQ ID NO: 2061544 - RNA, 19 nt, Homo sapiens
  misc_RNA (1)...(19): siRNA sense strand
ucaauagcauggugucuaa

SEQ ID NO: 2061545 - RNA, 19 nt, Homo sapiens
  misc_RNA (1)...(19): siRNA sense strand
caagaucugcugccaauuu

SEQ ID NO: 2061546 - RNA, 19 nt, Homo sapiens
  misc_RNA (1)...(19): siRNA sense strand
gaggagaaccaugagauua

SEQ ID NO: 2061547 - RNA, 19 nt, Homo sapiens
  misc_RNA (1)...(19): siRNA sense strand
gggcagaggucuccuucuu

SEQ ID NO: 2061548 - RNA, 19 nt, Homo sapiens
  misc_RNA (1)...(19): siRNA sense strand
cggaggagcugccguuuga

SEQ ID NO: 2061549 - RNA, 19 nt, Homo sapiens
  misc_RNA (1)...(19): siRNA sense strand
gagauuaucagccauauca

SEQ ID NO: 2061550 - RNA, 19 nt, Homo sapiens
  misc_RNA (1)...(19): siRNA sense strand
gagaugacuuccgauauga

SEQ ID NO: 2061551 - RNA, 19 nt, Homo sapiens
  misc_RNA (1)...(19): siRNA sense strand
caaggagaccuaccacuuu

SEQ ID NO: 2061552 - RNA, 19 nt, Homo sapiens
  misc_RNA (1)...(19): siRNA sense strand
ggaugacacucgcuuaagu

SEQ ID NO: 2061553 - RNA, 19 nt, Homo sapiens
  misc_RNA (1)...(19): siRNA sense strand
caacacauccucaauagca

SEQ ID NO: 2061554 - RNA, 19 nt, Homo sapiens
  misc_RNA (1)...(19): siRNA sense strand
ccacuacuuugcauugauu

SEQ ID NO: 2061555 - RNA, 19 nt, Homo sapiens
  misc_RNA (1)...(19): siRNA sense strand
gguacccacugucugauuu

SEQ ID NO: 2061556 - RNA, 19 nt, Homo sapiens
  misc_RNA (1)...(19): siRNA sense strand
gaagaagucccagcuguuc

SEQ ID NO: 2061557 - RNA, 19 nt, Homo sapiens
  misc_RNA (1)...(19): siRNA sense strand
ggagaaccaugagauuauc

SEQ ID NO: 2061558 - RNA, 19 nt, Homo sapiens
  misc_RNA (1)...(19): siRNA sense strand
ggaagaagucccagcuguu

SEQ ID NO: 2061559 - RNA, 19 nt, Homo sapiens
  misc_RNA (1)...(19): siRNA sense strand
ggaggagaaccaugagauu

SEQ ID NO: 2061560 - RNA, 19 nt, Homo sapiens
  misc_RNA (1)...(19): siRNA sense strand
gcacucuuucugacuauuu

SEQ ID NO: 2061561 - RNA, 19 nt, Homo sapiens
  misc_RNA (1)...(19): siRNA sense strand
gaaacgggcagcuggagau

SEQ ID NO: 2061562 - RNA, 19 nt, Homo sapiens
  misc_RNA (1)...(19): siRNA sense strand
gggcugccaucuucugugu

SEQ ID NO: 2061563 - RNA, 19 nt, Homo sapiens
  misc_RNA (1)...(19): siRNA sense strand
aaggagaccuaccacuuug

SEQ ID NO: 2061564 - RNA, 19 nt, Homo sapiens
  misc_RNA (1)...(19): siRNA sense strand
cccaagaucugcugccaau

SEQ ID NO: 2061565 - RNA, 19 nt, Homo sapiens
  misc_RNA (1)...(19): siRNA sense strand
ggccaauucccacuacuuu

SEQ ID NO: 2061566 - RNA, 19 nt, Homo sapiens
  misc_RNA (1)...(19): siRNA sense strand
cgacugggaugcugaagac

SEQ ID NO: 2061567 - RNA, 19 nt, Homo sapiens
  misc_RNA (1)...(19): siRNA sense strand
ggacaggcuauuacacuuc

SEQ ID NO: 2061568 - RNA, 19 nt, Homo sapiens
  misc_RNA (1)...(19): siRNA sense strand
caacggcucuuugacuucu

SEQ ID NO: 2061569 - RNA, 19 nt, Homo sapiens
  misc_RNA (1)...(19): siRNA sense strand
acacagagcagacccaaca

SEQ ID NO: 2061570 - RNA, 19 nt, Homo sapiens
  misc_RNA (1)...(19): siRNA sense strand
gcacuaugccaucaagaag

SEQ ID NO: 2061571 - RNA, 19 nt, Homo sapiens
  misc_RNA (1)...(19): siRNA sense strand
cuucugcgcucccuuguca

SEQ ID NO: 2061572 - RNA, 19 nt, Homo sapiens
  misc_RNA (1)...(19): siRNA sense strand
aagaucugcugccaauuug

SEQ ID NO: 2061573 - RNA, 19 nt, Homo sapiens
  misc_RNA (1)...(19): siRNA sense strand
cccaacacauccucaauag

SEQ ID NO: 2061574 - RNA, 19 nt, Homo sapiens
  misc_RNA (1)...(19): siRNA sense strand
caagaccuuugacaaguac

SEQ ID NO: 2061575 - RNA, 19 nt, Homo sapiens
  misc_RNA (1)...(19): siRNA sense strand
ccgccaugcugcccuacua

SEQ ID NO: 2061576 - RNA, 19 nt, Homo sapiens
  misc_RNA (1)...(19): siRNA sense strand
caugagauuaucagccaua

SEQ ID NO: 2061577 - RNA, 19 nt, Homo sapiens
  misc_RNA (1)...(19): siRNA sense strand
cagcaggcacgaagcguuu

SEQ ID NO: 2061578 - RNA, 19 nt, Homo sapiens
  misc_RNA (1)...(19): siRNA sense strand
acaaggagaccuaccacuu

SEQ ID NO: 2061579 - RNA, 19 nt, Homo sapiens
  misc_RNA (1)...(19): siRNA sense strand
ccagaauggugggaacuuc

SEQ ID NO: 2061580 - RNA, 19 nt, Homo sapiens
  misc_RNA (1)...(19): siRNA sense strand
uccgaaggcuggugggaaa

SEQ ID NO: 2061581 - RNA, 19 nt, Homo sapiens
  misc_RNA (1)...(19): siRNA sense strand
caacuaccaacggcucuuu

SEQ ID NO: 2061582 - RNA, 19 nt, Homo sapiens
  misc_RNA (1)...(19): siRNA sense strand
ccagguuugugguccuauu

SEQ ID NO: 2061583 - RNA, 19 nt, Homo sapiens
  misc_RNA (1)...(19): siRNA sense strand
gaucugcugccaauuugau

SEQ ID NO: 2061584 - RNA, 19 nt, Homo sapiens
  misc_RNA (1)...(19): siRNA sense strand
gcacgacugggaugcugaa

SEQ ID NO: 2061585 - RNA, 19 nt, Homo sapiens
  misc_RNA (1)...(19): siRNA sense strand
guggaugacacucgcuuaa

SEQ ID NO: 2061586 - RNA, 19 nt, Homo sapiens
  misc_RNA (1)...(19): siRNA sense strand
gaagcucggcgcacauugg

SEQ ID NO: 2061587 - RNA, 19 nt, Homo sapiens
  misc_RNA (1)...(19): siRNA sense strand
cagcaggccuaaccuccau

SEQ ID NO: 2061588 - RNA, 19 nt, Homo sapiens
  misc_RNA (1)...(19): siRNA sense strand
gaggcaaggcuucgacauc

SEQ ID NO: 2061589 - RNA, 19 nt, Homo sapiens
  misc_RNA (1)...(19): siRNA sense strand
gugccaaccucaccagcau

SEQ ID NO: 2061590 - RNA, 19 nt, Homo sapiens
  misc_RNA (1)...(19): siRNA sense strand
gaccaauaccggaagaagu

SEQ ID NO: 2061591 - RNA, 19 nt, Homo sapiens
  misc_RNA (1)...(19): siRNA sense strand
gauuaucagccauaucaag

SEQ ID NO: 2061592 - RNA, 19 nt, Homo sapiens
  misc_RNA (1)...(19): siRNA sense strand
gguuugugguccuauucaa

SEQ ID NO: 2061593 - RNA, 19 nt, Homo sapiens
  misc_RNA (1)...(19): siRNA sense strand
ggauuccucgcccagguuu

SEQ ID NO: 2061594 - RNA, 19 nt, Homo sapiens
  misc_RNA (1)...(19): siRNA sense strand
gacaggaggcugggugaug

SEQ ID NO: 2061595 - RNA, 19 nt, Homo sapiens
  misc_RNA (1)...(19): siRNA sense strand
gaggagcugccguuugaca

SEQ ID NO: 2061596 - RNA, 19 nt, Homo sapiens
  misc_RNA (1)...(19): siRNA sense strand
ggaccgagugcaacacgau

SEQ ID NO: 2061597 - RNA, 19 nt, Homo sapiens
  misc_RNA (1)...(19): siRNA sense strand
caggcuggaucaagaccuu

SEQ ID NO: 2061598 - RNA, 19 nt, Homo sapiens
  misc_RNA (1)...(19): siRNA sense strand
aagcaggucaucauucaug

SEQ ID NO: 2061599 - RNA, 19 nt, Homo sapiens
  misc_RNA (1)...(19): siRNA sense strand
uggacaggcuauuacacuu

SEQ ID NO: 2061600 - RNA, 19 nt, Homo sapiens
  misc_RNA (1)...(19): siRNA sense strand
cgcaucaacugcccuugga

SEQ ID NO: 2061601 - RNA, 19 nt, Homo sapiens
  misc_RNA (1)...(19): siRNA sense strand
gcuucgacaucuccuacga

SEQ ID NO: 2061602 - RNA, 19 nt, Homo sapiens
  misc_RNA (1)...(19): siRNA sense strand
gcccagguuugugguccua

SEQ ID NO: 2061603 - RNA, 19 nt, Homo sapiens
  misc_RNA (1)...(19): siRNA sense strand
gaugacacucgcuuaaguc

SEQ ID NO: 2061604 - RNA, 19 nt, Homo sapiens
  misc_RNA (1)...(19): siRNA sense strand
gccgguacccacugucuga

SEQ ID NO: 2061605 - RNA, 19 nt, Homo sapiens
  misc_RNA (1)...(19): siRNA sense strand
ggaccgggaggaucauuac

SEQ ID NO: 2061606 - RNA, 19 nt, Homo sapiens
  misc_RNA (1)...(19): siRNA sense strand
accaacggcucuuugacuu

SEQ ID NO: 2061607 - RNA, 19 nt, Homo sapiens
  misc_RNA (1)...(19): siRNA sense strand
gggaugcccaguucuucaa

SEQ ID NO: 2061608 - RNA, 19 nt, Homo sapiens
  misc_RNA (1)...(19): siRNA sense strand
gaugacuuccgauaugaca

SEQ ID NO: 2061609 - RNA, 19 nt, Homo sapiens
  misc_RNA (1)...(19): siRNA sense strand
gagagaaaucuuggugcaa

SEQ ID NO: 2061610 - RNA, 19 nt, Homo sapiens
  misc_RNA (1)...(19): siRNA sense strand
acccaacacauccucaaua

SEQ ID NO: 2061611 - RNA, 19 nt, Homo sapiens
  misc_RNA (1)...(19): siRNA sense strand
aggagaaccaugagauuau

SEQ ID NO: 2061612 - RNA, 19 nt, Homo sapiens
  misc_RNA (1)...(19): siRNA sense strand
gaugccagaugaggccaau

SEQ ID NO: 2061613 - RNA, 19 nt, Homo sapiens
  misc_RNA (1)...(19): siRNA sense strand
ccuggugccucuuggagau

SEQ ID NO: 2061614 - RNA, 19 nt, Homo sapiens
  misc_RNA (1)...(19): siRNA sense strand
ggaccaauaccggaagaag

SEQ ID NO: 2061615 - RNA, 19 nt, Homo sapiens
  misc_RNA (1)...(19): siRNA sense strand
gagaaccaugagauuauca

SEQ ID NO: 2061616 - RNA, 19 nt, Homo sapiens
  misc_RNA (1)...(19): siRNA sense strand
aggcaaggcuucgacaucu

SEQ ID NO: 2061617 - RNA, 19 nt, Homo sapiens
  misc_RNA (1)...(19): siRNA sense strand
gaagccagagcugcagaug

SEQ ID NO: 2061618 - RNA, 19 nt, Homo sapiens
  misc_RNA (1)...(19): siRNA sense strand
ccaauucccacuacuuugc

SEQ ID NO: 2061619 - RNA, 19 nt, Homo sapiens
  misc_RNA (1)...(19): siRNA sense strand
gggauuucuucuccuaugc

SEQ ID NO: 2061620 - RNA, 19 nt, Homo sapiens
  misc_RNA (1)...(19): siRNA sense strand
gucacaugaugcccuucua

SEQ ID NO: 2061621 - RNA, 19 nt, Homo sapiens
  misc_RNA (1)...(19): siRNA sense strand
agccagagcugcagaugcu

SEQ ID NO: 2061622 - RNA, 19 nt, Homo sapiens
  misc_RNA (1)...(19): siRNA sense strand
ccucagcaaccgcuacaug

SEQ ID NO: 2061623 - RNA, 19 nt, Homo sapiens
  misc_RNA (1)...(19): siRNA sense strand
uugaugcccuguacaagag

SEQ ID NO: 2061624 - RNA, 19 nt, Homo sapiens
  misc_RNA (1)...(19): siRNA sense strand
agagugcacuaugccauca

SEQ ID NO: 2061625 - RNA, 19 nt, Homo sapiens
  misc_RNA (1)...(19): siRNA sense strand
acagcuccaccaugccuua

SEQ ID NO: 2061626 - RNA, 19 nt, Homo sapiens
  misc_RNA (1)...(19): siRNA sense strand
gccaauucccacuacuuug

SEQ ID NO: 2061627 - RNA, 19 nt, Homo sapiens
  misc_RNA (1)...(19): siRNA sense strand
gccaaguggugggacaaca

SEQ ID NO: 2061628 - RNA, 19 nt, Homo sapiens
  misc_RNA (1)...(19): siRNA sense strand
gcuacaugcaggucugguu

SEQ ID NO: 2061629 - RNA, 19 nt, Homo sapiens
  misc_RNA (1)...(19): siRNA sense strand
ccuauucaacccacuggaa

SEQ ID NO: 2061630 - RNA, 19 nt, Homo sapiens
  misc_RNA (1)...(19): siRNA sense strand
aggcuguggugguggacua

SEQ ID NO: 2061631 - RNA, 19 nt, Homo sapiens
  misc_RNA (1)...(19): siRNA sense strand
ggaagcucggcgcacauug

SEQ ID NO: 2061632 - RNA, 19 nt, Homo sapiens
  misc_RNA (1)...(19): siRNA sense strand
uuggcacucuuucugacua

SEQ ID NO: 2061633 - RNA, 19 nt, Homo sapiens
  misc_RNA (1)...(19): siRNA sense strand
cugcagaugcucacugugu

SEQ ID NO: 2061634 - RNA, 19 nt, Homo sapiens
  misc_RNA (1)...(19): siRNA sense strand
ccauaccuguggcccagau

SEQ ID NO: 2061635 - RNA, 19 nt, Homo sapiens
  misc_RNA (1)...(19): siRNA sense strand
acuaugccaucaagaagca

SEQ ID NO: 2061636 - RNA, 19 nt, Homo sapiens
  misc_RNA (1)...(19): siRNA sense strand
gaaguugccuuaaagaaua

SEQ ID NO: 2061637 - RNA, 19 nt, Homo sapiens
  misc_RNA (1)...(19): siRNA sense strand
ccucagagcuccuuaauaa

SEQ ID NO: 2061638 - RNA, 19 nt, Homo sapiens
  misc_RNA (1)...(19): siRNA sense strand
gaacaauacuuaguggaua

SEQ ID NO: 2061639 - RNA, 19 nt, Homo sapiens
  misc_RNA (1)...(19): siRNA sense strand
gcggauaccugcuucagua

SEQ ID NO: 2061640 - RNA, 19 nt, Homo sapiens
  misc_RNA (1)...(19): siRNA sense strand
gaauuaagcugagcaggaa

SEQ ID NO: 2061641 - RNA, 19 nt, Homo sapiens
  misc_RNA (1)...(19): siRNA sense strand
gagaagaccuggguacuug

SEQ ID NO: 2061642 - RNA, 19 nt, Homo sapiens
  misc_RNA (1)...(19): siRNA sense strand
ggacaaccuuuccaucaaa

SEQ ID NO: 2061643 - RNA, 19 nt, Homo sapiens
  misc_RNA (1)...(19): siRNA sense strand
gaauguccauauuguagua

SEQ ID NO: 2061644 - RNA, 19 nt, Homo sapiens
  misc_RNA (1)...(19): siRNA sense strand
cagcugagaacaauacuua

SEQ ID NO: 2061645 - RNA, 19 nt, Homo sapiens
  misc_RNA (1)...(19): siRNA sense strand
caucauauuuggugaaugu

SEQ ID NO: 2061646 - RNA, 19 nt, Homo sapiens
  misc_RNA (1)...(19): siRNA sense strand
gcaauagaaucacuaaagg

SEQ ID NO: 2061647 - RNA, 19 nt, Homo sapiens
  misc_RNA (1)...(19): siRNA sense strand
gggauaaacuuguguaugc

SEQ ID NO: 2061648 - RNA, 19 nt, Homo sapiens
  misc_RNA (1)...(19): siRNA sense strand
gaucuaaugagcuuuauga

SEQ ID NO: 2061649 - RNA, 19 nt, Homo sapiens
  misc_RNA (1)...(19): siRNA sense strand
ggaaguugccuuaaagaau

SEQ ID NO: 2061650 - RNA, 19 nt, Homo sapiens
  misc_RNA (1)...(19): siRNA sense strand
caaaguauccugcagaauc

SEQ ID NO: 2061651 - RNA, 19 nt, Homo sapiens
  misc_RNA (1)...(19): siRNA sense strand
gcagcacccuccugaucua

SEQ ID NO: 2061652 - RNA, 19 nt, Homo sapiens
  misc_RNA (1)...(19): siRNA sense strand
gcaggaacauacauuugug

SEQ ID NO: 2061653 - RNA, 19 nt, Homo sapiens
  misc_RNA (1)...(19): siRNA sense strand
acugaagaaugcaagauua

SEQ ID NO: 2061654 - RNA, 19 nt, Homo sapiens
  misc_RNA (1)...(19): siRNA sense strand
aguguugccugaagauuua

SEQ ID NO: 2061655 - RNA, 19 nt, Homo sapiens
  misc_RNA (1)...(19): siRNA sense strand
uagaaucacuaaaggcauu

SEQ ID NO: 2061656 - RNA, 19 nt, Homo sapiens
  misc_RNA (1)...(19): siRNA sense strand
ucaguaccaucaaguuaaa

SEQ ID NO: 2061657 - RNA, 19 nt, Homo sapiens
  misc_RNA (1)...(19): siRNA sense strand
uuuaaucacucucaaguug

SEQ ID NO: 2061658 - RNA, 19 nt, Homo sapiens
  misc_RNA (1)...(19): siRNA sense strand
uggauaccaucgaauagua

SEQ ID NO: 2061659 - RNA, 19 nt, Homo sapiens
  misc_RNA (1)...(19): siRNA sense strand
gcacccuccugaucuaaug

SEQ ID NO: 2061660 - RNA, 19 nt, Homo sapiens
  misc_RNA (1)...(19): siRNA sense strand
ccugagugcuucuuucuug

SEQ ID NO: 2061661 - RNA, 19 nt, Homo sapiens
  misc_RNA (1)...(19): siRNA sense strand
aaaguauccugcagaauca

SEQ ID NO: 2061662 - RNA, 19 nt, Homo sapiens
  misc_RNA (1)...(19): siRNA sense strand
ggcaaaguauccugcagaa

SEQ ID NO: 2061663 - RNA, 19 nt, Homo sapiens
  misc_RNA (1)...(19): siRNA sense strand
gcaacagcacgcagaauug

SEQ ID NO: 2061664 - RNA, 19 nt, Homo sapiens
  misc_RNA (1)...(19): siRNA sense strand
ggauaguguugccugaaga

SEQ ID NO: 2061665 - RNA, 19 nt, Homo sapiens
  misc_RNA (1)...(19): siRNA sense strand
ugagaggacuacuaacuag

SEQ ID NO: 2061666 - RNA, 19 nt, Homo sapiens
  misc_RNA (1)...(19): siRNA sense strand
ccauaaauauagagguaga

SEQ ID NO: 2061667 - RNA, 19 nt, Homo sapiens
  misc_RNA (1)...(19): siRNA sense strand
gagcaggaacauacauuug

SEQ ID NO: 2061668 - RNA, 19 nt, Homo sapiens
  misc_RNA (1)...(19): siRNA sense strand
guaaaaccccugggaauua

SEQ ID NO: 2061669 - RNA, 19 nt, Homo sapiens
  misc_RNA (1)...(19): siRNA sense strand
gaagauuuacaacugaaga

SEQ ID NO: 2061670 - RNA, 19 nt, Homo sapiens
  misc_RNA (1)...(19): siRNA sense strand
caacuugacgguaccauuc

SEQ ID NO: 2061671 - RNA, 19 nt, Homo sapiens
  misc_RNA (1)...(19): siRNA sense strand
uggaugaaaucgaugagaa

SEQ ID NO: 2061672 - RNA, 19 nt, Homo sapiens
  misc_RNA (1)...(19): siRNA sense strand
gaauagacaagagcuguau

SEQ ID NO: 2061673 - RNA, 19 nt, Homo sapiens
  misc_RNA (1)...(19): siRNA sense strand
gcagcaauagaaucacuaa

SEQ ID NO: 2061674 - RNA, 19 nt, Homo sapiens
  misc_RNA (1)...(19): siRNA sense strand
gagauaggaacucuugguu

SEQ ID NO: 2061675 - RNA, 19 nt, Homo sapiens
  misc_RNA (1)...(19): siRNA sense strand
ucaagugugugauaauucu

SEQ ID NO: 2061676 - RNA, 19 nt, Homo sapiens
  misc_RNA (1)...(19): siRNA sense strand
aaacuuguguaugcggaua

SEQ ID NO: 2061677 - RNA, 19 nt, Homo sapiens
  misc_RNA (1)...(19): siRNA sense strand
gcagaauugcauuagguaa

SEQ ID NO: 2061678 - RNA, 19 nt, Homo sapiens
  misc_RNA (1)...(19): siRNA sense strand
ucugggauguuauggauga

SEQ ID NO: 2061679 - RNA, 19 nt, Homo sapiens
  misc_RNA (1)...(19): siRNA sense strand
ccugaagauuuacaacuga

SEQ ID NO: 2061680 - RNA, 19 nt, Homo sapiens
  misc_RNA (1)...(19): siRNA sense strand
uacuauggauuguggaauu

SEQ ID NO: 2061681 - RNA, 19 nt, Homo sapiens
  misc_RNA (1)...(19): siRNA sense strand
gggauguuauggaugaaau

SEQ ID NO: 2061682 - RNA, 19 nt, Homo sapiens
  misc_RNA (1)...(19): siRNA sense strand
gacaaccuuuccaucaaau

SEQ ID NO: 2061683 - RNA, 19 nt, Homo sapiens
  misc_RNA (1)...(19): siRNA sense strand
caaccuuuccaucaaauau

SEQ ID NO: 2061684 - RNA, 19 nt, Homo sapiens
  misc_RNA (1)...(19): siRNA sense strand
ggauuuuccuguuccauuu

SEQ ID NO: 2061685 - RNA, 19 nt, Homo sapiens
  misc_RNA (1)...(19): siRNA sense strand
uaaaaccccugggaauuaa

SEQ ID NO: 2061686 - RNA, 19 nt, Homo sapiens
  misc_RNA (1)...(19): siRNA sense strand
gccugaagauuuacaacug

SEQ ID NO: 2061687 - RNA, 19 nt, Homo sapiens
  misc_RNA (1)...(19): siRNA sense strand
uaccauuccugaucaagug

SEQ ID NO: 2061688 - RNA, 19 nt, Homo sapiens
  misc_RNA (1)...(19): siRNA sense strand
agacagaguuuuaacauca

SEQ ID NO: 2061689 - RNA, 19 nt, Homo sapiens
  misc_RNA (1)...(19): siRNA sense strand
gcuuuaugauggaguugaa

SEQ ID NO: 2061690 - RNA, 19 nt, Homo sapiens
  misc_RNA (1)...(19): siRNA sense strand
ggugaauguccauauugua

SEQ ID NO: 2061691 - RNA, 19 nt, Homo sapiens
  misc_RNA (1)...(19): siRNA sense strand
agacuuccaccuuaggaua

SEQ ID NO: 2061692 - RNA, 19 nt, Homo sapiens
  misc_RNA (1)...(19): siRNA sense strand
gaugaaaucgaugagaaga

SEQ ID NO: 2061693 - RNA, 19 nt, Homo sapiens
  misc_RNA (1)...(19): siRNA sense strand
caaguugaaggcaaaguau

SEQ ID NO: 2061694 - RNA, 19 nt, Homo sapiens
  misc_RNA (1)...(19): siRNA sense strand
caguucuacucaagccuua

SEQ ID NO: 2061695 - RNA, 19 nt, Homo sapiens
  misc_RNA (1)...(19): siRNA sense strand
gaagaugcuuuuggaaguu

SEQ ID NO: 2061696 - RNA, 19 nt, Homo sapiens
  misc_RNA (1)...(19): siRNA sense strand
caucucggcucagggaaga

SEQ ID NO: 2061697 - RNA, 19 nt, Homo sapiens
  misc_RNA (1)...(19): siRNA sense strand
uggcugagaggacuacuaa

SEQ ID NO: 2061698 - RNA, 19 nt, Homo sapiens
  misc_RNA (1)...(19): siRNA sense strand
guagagagcauuuaaucac

SEQ ID NO: 2061699 - RNA, 19 nt, Homo sapiens
  misc_RNA (1)...(19): siRNA sense strand
caucgaauaguacaacaga

SEQ ID NO: 2061700 - RNA, 19 nt, Homo sapiens
  misc_RNA (1)...(19): siRNA sense strand
ggaauuuguuaugcuuauc

SEQ ID NO: 2061701 - RNA, 19 nt, Homo sapiens
  misc_RNA (1)...(19): siRNA sense strand
ggaacucuugguugggaua

SEQ ID NO: 2061702 - RNA, 19 nt, Homo sapiens
  misc_RNA (1)...(19): siRNA sense strand
guuggcagcugagaacaau

SEQ ID NO: 2061703 - RNA, 19 nt, Homo sapiens
  misc_RNA (1)...(19): siRNA sense strand
uaguggauaccaucgaaua

SEQ ID NO: 2061704 - RNA, 19 nt, Homo sapiens
  misc_RNA (1)...(19): siRNA sense strand
gugaauguccauauuguag

SEQ ID NO: 2061705 - RNA, 19 nt, Homo sapiens
  misc_RNA (1)...(19): siRNA sense strand
gguagagagcauuuaauca

SEQ ID NO: 2061706 - RNA, 19 nt, Homo sapiens
  misc_RNA (1)...(19): siRNA sense strand
cuucaguaccaucaaguua

SEQ ID NO: 2061707 - RNA, 19 nt, Homo sapiens
  misc_RNA (1)...(19): siRNA sense strand
gaauaguacaacagagaau

SEQ ID NO: 2061708 - RNA, 19 nt, Homo sapiens
  misc_RNA (1)...(19): siRNA sense strand
cgaauaguacaacagagaa

SEQ ID NO: 2061709 - RNA, 19 nt, Homo sapiens
  misc_RNA (1)...(19): siRNA sense strand
gcacgcagaauugcauuag

SEQ ID NO: 2061710 - RNA, 19 nt, Homo sapiens
  misc_RNA (1)...(19): siRNA sense strand
uaaaggcauucugggaugu

SEQ ID NO: 2061711 - RNA, 19 nt, Homo sapiens
  misc_RNA (1)...(19): siRNA sense strand
gacggaagcgagccuguug

SEQ ID NO: 2061712 - RNA, 19 nt, Homo sapiens
  misc_RNA (1)...(19): siRNA sense strand
gagcauuuaaucacucuca

SEQ ID NO: 2061713 - RNA, 19 nt, Homo sapiens
  misc_RNA (1)...(19): siRNA sense strand
gauaccugcuucaguacca

SEQ ID NO: 2061714 - RNA, 19 nt, Homo sapiens
  misc_RNA (1)...(19): siRNA sense strand
ccugaucuaaugagcuuua

SEQ ID NO: 2061715 - RNA, 19 nt, Homo sapiens
  misc_RNA (1)...(19): siRNA sense strand
gauuuacaacugaagaaug

SEQ ID NO: 2061716 - RNA, 19 nt, Homo sapiens
  misc_RNA (1)...(19): siRNA sense strand
ucuuggagcugaccaugug

SEQ ID NO: 2061717 - RNA, 19 nt, Homo sapiens
  misc_RNA (1)...(19): siRNA sense strand
gaacucuugguugggauaa

SEQ ID NO: 2061718 - RNA, 19 nt, Homo sapiens
  misc_RNA (1)...(19): siRNA sense strand
uaaugagcuuuaugaugga

SEQ ID NO: 2061719 - RNA, 19 nt, Homo sapiens
  misc_RNA (1)...(19): siRNA sense strand
gauuguggaauuuguuaug

SEQ ID NO: 2061720 - RNA, 19 nt, Homo sapiens
  misc_RNA (1)...(19): siRNA sense strand
gcugagaacaauacuuagu

SEQ ID NO: 2061721 - RNA, 19 nt, Homo sapiens
  misc_RNA (1)...(19): siRNA sense strand
gcugagaggacuacuaacu

SEQ ID NO: 2061722 - RNA, 19 nt, Homo sapiens
  misc_RNA (1)...(19): siRNA sense strand
ugagcaggaacauacauuu

SEQ ID NO: 2061723 - RNA, 19 nt, Homo sapiens
  misc_RNA (1)...(19): siRNA sense strand
caagagcuguaugcacuac

SEQ ID NO: 2061724 - RNA, 19 nt, Homo sapiens
  misc_RNA (1)...(19): siRNA sense strand
cugagaggacuacuaacua

SEQ ID NO: 2061725 - RNA, 19 nt, Homo sapiens
  misc_RNA (1)...(19): siRNA sense strand
acuauggauuguggaauuu

SEQ ID NO: 2061726 - RNA, 19 nt, Homo sapiens
  misc_RNA (1)...(19): siRNA sense strand
cuuaguggauaccaucgaa

SEQ ID NO: 2061727 - RNA, 19 nt, Homo sapiens
  misc_RNA (1)...(19): siRNA sense strand
ucuaaugagcuuuaugaug

SEQ ID NO: 2061728 - RNA, 19 nt, Homo sapiens
  misc_RNA (1)...(19): siRNA sense strand
uaguguugccugaagauuu

SEQ ID NO: 2061729 - RNA, 19 nt, Homo sapiens
  misc_RNA (1)...(19): siRNA sense strand
cugaagauuuacaacugaa

SEQ ID NO: 2061730 - RNA, 19 nt, Homo sapiens
  misc_RNA (1)...(19): siRNA sense strand
uguuauggaugaaaucgau

SEQ ID NO: 2061731 - RNA, 19 nt, Homo sapiens
  misc_RNA (1)...(19): siRNA sense strand
uagagagcauuuaaucacu

SEQ ID NO: 2061732 - RNA, 19 nt, Homo sapiens
  misc_RNA (1)...(19): siRNA sense strand
aagccuuauugaagagaua

SEQ ID NO: 2061733 - RNA, 19 nt, Homo sapiens
  misc_RNA (1)...(19): siRNA sense strand
ggucgaaaaccguguauga

SEQ ID NO: 2061734 - RNA, 19 nt, Homo sapiens
  misc_RNA (1)...(19): siRNA sense strand
ggaugaaaucgaugagaag

SEQ ID NO: 2061735 - RNA, 19 nt, Homo sapiens
  misc_RNA (1)...(19): siRNA sense strand
ucgaauaguacaacagaga

SEQ ID NO: 2061736 - RNA, 19 nt, Homo sapiens
  misc_RNA (1)...(19): siRNA sense strand
gcaccuaccugaccaaauu

SEQ ID NO: 2061737 - RNA, 19 nt, Homo sapiens
  misc_RNA (1)...(19): siRNA sense strand
caugaucgcugcaaagaug

SEQ ID NO: 2061738 - RNA, 19 nt, Homo sapiens
  misc_RNA (1)...(19): siRNA sense strand
gaaccaauucucugucaaa

SEQ ID NO: 2061739 - RNA, 19 nt, Homo sapiens
  misc_RNA (1)...(19): siRNA sense strand
acgcagcacucucgaauuu

SEQ ID NO: 2061740 - RNA, 19 nt, Homo sapiens
  misc_RNA (1)...(19): siRNA sense strand
ccaauucucugucaaaugc

SEQ ID NO: 2061741 - RNA, 19 nt, Homo sapiens
  misc_RNA (1)...(19): siRNA sense strand
gcaucucgcuguucaagug

SEQ ID NO: 2061742 - RNA, 19 nt, Homo sapiens
  misc_RNA (1)...(19): siRNA sense strand
gaaguacuuugaugguuca

SEQ ID NO: 2061743 - RNA, 19 nt, Homo sapiens
  misc_RNA (1)...(19): siRNA sense strand
ggacgaugcccgugucauu

SEQ ID NO: 2061744 - RNA, 19 nt, Homo sapiens
  misc_RNA (1)...(19): siRNA sense strand
ucaaggaaaugcugcguau

SEQ ID NO: 2061745 - RNA, 19 nt, Homo sapiens
  misc_RNA (1)...(19): siRNA sense strand
caucaacuaugccauguuc

SEQ ID NO: 2061746 - RNA, 19 nt, Homo sapiens
  misc_RNA (1)...(19): siRNA sense strand
gaccgacccugccuaugaa

SEQ ID NO: 2061747 - RNA, 19 nt, Homo sapiens
  misc_RNA (1)...(19): siRNA sense strand
guucagagcccgugcagaa

SEQ ID NO: 2061748 - RNA, 19 nt, Homo sapiens
  misc_RNA (1)...(19): siRNA sense strand
gucaacaacugucaugaga

SEQ ID NO: 2061749 - RNA, 19 nt, Homo sapiens
  misc_RNA (1)...(19): siRNA sense strand
gcaaugaggacaccaucaa

SEQ ID NO: 2061750 - RNA, 19 nt, Homo sapiens
  misc_RNA (1)...(19): siRNA sense strand
caaauucauugcccgcuau

SEQ ID NO: 2061751 - RNA, 19 nt, Homo sapiens
  misc_RNA (1)...(19): siRNA sense strand
gguguucucucgccgacua

SEQ ID NO: 2061752 - RNA, 19 nt, Homo sapiens
  misc_RNA (1)...(19): siRNA sense strand
gaaaucaugcggaaccaau

SEQ ID NO: 2061753 - RNA, 19 nt, Homo sapiens
  misc_RNA (1)...(19): siRNA sense strand
caagugaccggcuggauga

SEQ ID NO: 2061754 - RNA, 19 nt, Homo sapiens
  misc_RNA (1)...(19): siRNA sense strand
gaccucaucucccagaauc

SEQ ID NO: 2061755 - RNA, 19 nt, Homo sapiens
  misc_RNA (1)...(19): siRNA sense strand
gcagcacucucgaauuugg

SEQ ID NO: 2061756 - RNA, 19 nt, Homo sapiens
  misc_RNA (1)...(19): siRNA sense strand
gcagaggaguacauugagu

SEQ ID NO: 2061757 - RNA, 19 nt, Homo sapiens
  misc_RNA (1)...(19): siRNA sense strand
ugaccgacccugccuauga

SEQ ID NO: 2061758 - RNA, 19 nt, Homo sapiens
  misc_RNA (1)...(19): siRNA sense strand
gugcagaggaguacauuga

SEQ ID NO: 2061759 - RNA, 19 nt, Homo sapiens
  misc_RNA (1)...(19): siRNA sense strand
ugagagggccuuuguguuc

SEQ ID NO: 2061760 - RNA, 19 nt, Homo sapiens
  misc_RNA (1)...(19): siRNA sense strand
acaugaagcugcuggaaca

SEQ ID NO: 2061761 - RNA, 19 nt, Homo sapiens
  misc_RNA (1)...(19): siRNA sense strand
gagagggccuuuguguuca

SEQ ID NO: 2061762 - RNA, 19 nt, Homo sapiens
  misc_RNA (1)...(19): siRNA sense strand
gggagaucaucaacaccua

SEQ ID NO: 2061763 - RNA, 19 nt, Homo sapiens
  misc_RNA (1)...(19): siRNA sense strand
gaggacaccaucaaggaaa

SEQ ID NO: 2061764 - RNA, 19 nt, Homo sapiens
  misc_RNA (1)...(19): siRNA sense strand
gcaagcguguggugucagu

SEQ ID NO: 2061765 - RNA, 19 nt, Homo sapiens
  misc_RNA (1)...(19): siRNA sense strand
gagaugugccugcgguuug

SEQ ID NO: 2061766 - RNA, 19 nt, Homo sapiens
  misc_RNA (1)...(19): siRNA sense strand
cagaggaguacauugagua

SEQ ID NO: 2061767 - RNA, 19 nt, Homo sapiens
  misc_RNA (1)...(19): siRNA sense strand
ggaaccaauucucugucaa

SEQ ID NO: 2061768 - RNA, 19 nt, Homo sapiens
  misc_RNA (1)...(19): siRNA sense strand
ggccggaccuugucuucga

SEQ ID NO: 2061769 - RNA, 19 nt, Homo sapiens
  misc_RNA (1)...(19): siRNA sense strand
ccucgucuguggcuagauu

SEQ ID NO: 2061770 - RNA, 19 nt, Homo sapiens
  misc_RNA (1)...(19): siRNA sense strand
gacacgagaacuacgauga

SEQ ID NO: 2061771 - RNA, 19 nt, Homo sapiens
  misc_RNA (1)...(19): siRNA sense strand
gcacgggaccuguuugaac

SEQ ID NO: 2061772 - RNA, 19 nt, Homo sapiens
  misc_RNA (1)...(19): siRNA sense strand
gaaccgcguguacaaguca

SEQ ID NO: 2061773 - RNA, 19 nt, Homo sapiens
  misc_RNA (1)...(19): siRNA sense strand
ccagcaguaugacauguuc

SEQ ID NO: 2061774 - RNA, 19 nt, Homo sapiens
  misc_RNA (1)...(19): siRNA sense strand
ccagaauccggacaaggua

SEQ ID NO: 2061775 - RNA, 19 nt, Homo sapiens
  misc_RNA (1)...(19): siRNA sense strand
cuaugaagaugucaacaac

SEQ ID NO: 2061776 - RNA, 19 nt, Homo sapiens
  misc_RNA (1)...(19): siRNA sense strand
gaucaucaacaccuacaca

SEQ ID NO: 2061777 - RNA, 19 nt, Homo sapiens
  misc_RNA (1)...(19): siRNA sense strand
gcgaggaggaggaugaugu

SEQ ID NO: 2061778 - RNA, 19 nt, Homo sapiens
  misc_RNA (1)...(19): siRNA sense strand
cggaaccaauucucuguca

SEQ ID NO: 2061779 - RNA, 19 nt, Homo sapiens
  misc_RNA (1)...(19): siRNA sense strand
ggcaagcucugguguucuc

SEQ ID NO: 2061780 - RNA, 19 nt, Homo sapiens
  misc_RNA (1)...(19): siRNA sense strand
caagguacagucccucaau

SEQ ID NO: 2061781 - RNA, 19 nt, Homo sapiens
  misc_RNA (1)...(19): siRNA sense strand
gaggccauccggacaguga

SEQ ID NO: 2061782 - RNA, 19 nt, Homo sapiens
  misc_RNA (1)...(19): siRNA sense strand
acacgcaggucaacuucau

SEQ ID NO: 2061783 - RNA, 19 nt, Homo sapiens
  misc_RNA (1)...(19): siRNA sense strand
ggacaacggacagcuugga

SEQ ID NO: 2061784 - RNA, 19 nt, Homo sapiens
  misc_RNA (1)...(19): siRNA sense strand
caagcugaguccugagagu

SEQ ID NO: 2061785 - RNA, 19 nt, Homo sapiens
  misc_RNA (1)...(19): siRNA sense strand
ccagaucgucaucaacuau

SEQ ID NO: 2061786 - RNA, 19 nt, Homo sapiens
  misc_RNA (1)...(19): siRNA sense strand
caugagagggccuuugugu

SEQ ID NO: 2061787 - RNA, 19 nt, Homo sapiens
  misc_RNA (1)...(19): siRNA sense strand
caacacgcaggucaacuuc

SEQ ID NO: 2061788 - RNA, 19 nt, Homo sapiens
  misc_RNA (1)...(19): siRNA sense strand
caaaauaugccaagaccuu

SEQ ID NO: 2061789 - RNA, 19 nt, Homo sapiens
  misc_RNA (1)...(19): siRNA sense strand
uggaggagcacaaguacuu

SEQ ID NO: 2061790 - RNA, 19 nt, Homo sapiens
  misc_RNA (1)...(19): siRNA sense strand
ugacagcuacgcccaguuc

SEQ ID NO: 2061791 - RNA, 19 nt, Homo sapiens
  misc_RNA (1)...(19): siRNA sense strand
augaagaugucaacaacug

SEQ ID NO: 2061792 - RNA, 19 nt, Homo sapiens
  misc_RNA (1)...(19): siRNA sense strand
ccucgcagaugcucaaggu

SEQ ID NO: 2061793 - RNA, 19 nt, Homo sapiens
  misc_RNA (1)...(19): siRNA sense strand
agacguggaaggacuuuga

SEQ ID NO: 2061794 - RNA, 19 nt, Homo sapiens
  misc_RNA (1)...(19): siRNA sense strand
ccaccaaggccguguacga

SEQ ID NO: 2061795 - RNA, 19 nt, Homo sapiens
  misc_RNA (1)...(19): siRNA sense strand
gcagcggccauuucgagaa

SEQ ID NO: 2061796 - RNA, 19 nt, Homo sapiens
  misc_RNA (1)...(19): siRNA sense strand
cagcggccauuucgagaag

SEQ ID NO: 2061797 - RNA, 19 nt, Homo sapiens
  misc_RNA (1)...(19): siRNA sense strand
gggcacgggaccuguuuga

SEQ ID NO: 2061798 - RNA, 19 nt, Homo sapiens
  misc_RNA (1)...(19): siRNA sense strand
ucgaaguacuuugaugguu

SEQ ID NO: 2061799 - RNA, 19 nt, Homo sapiens
  misc_RNA (1)...(19): siRNA sense strand
gaugucaacaacugucaug

SEQ ID NO: 2061800 - RNA, 19 nt, Homo sapiens
  misc_RNA (1)...(19): siRNA sense strand
gagccugaaggaagacuga

SEQ ID NO: 2061801 - RNA, 19 nt, Homo sapiens
  misc_RNA (1)...(19): siRNA sense strand
cuaccugaccaaauucauu

SEQ ID NO: 2061802 - RNA, 19 nt, Homo sapiens
  misc_RNA (1)...(19): siRNA sense strand
cacaagaugccucgucugu

SEQ ID NO: 2061803 - RNA, 19 nt, Homo sapiens
  misc_RNA (1)...(19): siRNA sense strand
ucacgcagcacucucgaau

SEQ ID NO: 2061804 - RNA, 19 nt, Homo sapiens
  misc_RNA (1)...(19): siRNA sense strand
gagcaugaucgcugcaaag

SEQ ID NO: 2061805 - RNA, 19 nt, Homo sapiens
  misc_RNA (1)...(19): siRNA sense strand
cacagguguuugacagcua

SEQ ID NO: 2061806 - RNA, 19 nt, Homo sapiens
  misc_RNA (1)...(19): siRNA sense strand
ggaccuugucuucgaggaa

SEQ ID NO: 2061807 - RNA, 19 nt, Homo sapiens
  misc_RNA (1)...(19): siRNA sense strand
gugaagcaucgcuguguga

SEQ ID NO: 2061808 - RNA, 19 nt, Homo sapiens
  misc_RNA (1)...(19): siRNA sense strand
gaauuuggccccuguaucu

SEQ ID NO: 2061809 - RNA, 19 nt, Homo sapiens
  misc_RNA (1)...(19): siRNA sense strand
gcaagcucgggaagauuga

SEQ ID NO: 2061810 - RNA, 19 nt, Homo sapiens
  misc_RNA (1)...(19): siRNA sense strand
cccagaucgucaucaacua

SEQ ID NO: 2061811 - RNA, 19 nt, Homo sapiens
  misc_RNA (1)...(19): siRNA sense strand
ccuaugaagaugucaacaa

SEQ ID NO: 2061812 - RNA, 19 nt, Homo sapiens
  misc_RNA (1)...(19): siRNA sense strand
caauguggacgccaucauc

SEQ ID NO: 2061813 - RNA, 19 nt, Homo sapiens
  misc_RNA (1)...(19): siRNA sense strand
aagguacagucccucaaug

SEQ ID NO: 2061814 - RNA, 19 nt, Homo sapiens
  misc_RNA (1)...(19): siRNA sense strand
cgugccagccgcaguguuu

SEQ ID NO: 2061815 - RNA, 19 nt, Homo sapiens
  misc_RNA (1)...(19): siRNA sense strand
gacccugccuaugaagaug

SEQ ID NO: 2061816 - RNA, 19 nt, Homo sapiens
  misc_RNA (1)...(19): siRNA sense strand
uaccugaccaaauucauug

SEQ ID NO: 2061817 - RNA, 19 nt, Homo sapiens
  misc_RNA (1)...(19): siRNA sense strand
gggucgaaguacuuugaug

SEQ ID NO: 2061818 - RNA, 19 nt, Homo sapiens
  misc_RNA (1)...(19): siRNA sense strand
agaaggcucgggacgugua

SEQ ID NO: 2061819 - RNA, 19 nt, Homo sapiens
  misc_RNA (1)...(19): siRNA sense strand
gguacagucccucaaugug

SEQ ID NO: 2061820 - RNA, 19 nt, Homo sapiens
  misc_RNA (1)...(19): siRNA sense strand
cagaaccgcguguacaagu

SEQ ID NO: 2061821 - RNA, 19 nt, Homo sapiens
  misc_RNA (1)...(19): siRNA sense strand
acaacacgcaggucaacuu

SEQ ID NO: 2061822 - RNA, 19 nt, Homo sapiens
  misc_RNA (1)...(19): siRNA sense strand
ugaggacaccaucaaggaa

SEQ ID NO: 2061823 - RNA, 19 nt, Homo sapiens
  misc_RNA (1)...(19): siRNA sense strand
gagcaccuaccugaccaaa

SEQ ID NO: 2061824 - RNA, 19 nt, Homo sapiens
  misc_RNA (1)...(19): siRNA sense strand
ggaaaucaugcggaaccaa

SEQ ID NO: 2061825 - RNA, 19 nt, Homo sapiens
  misc_RNA (1)...(19): siRNA sense strand
ggacaccaucaaggaaaug

SEQ ID NO: 2061826 - RNA, 19 nt, Homo sapiens
  misc_RNA (1)...(19): siRNA sense strand
gacgaugcccgugucauuc

SEQ ID NO: 2061827 - RNA, 19 nt, Homo sapiens
  misc_RNA (1)...(19): siRNA sense strand
agagcaugaucgcugcaaa

SEQ ID NO: 2061828 - RNA, 19 nt, Homo sapiens
  misc_RNA (1)...(19): siRNA sense strand
ugggcaagcucugguguuc

SEQ ID NO: 2061829 - RNA, 19 nt, Homo sapiens
  misc_RNA (1)...(19): siRNA sense strand
ucacacccacugccugaga

SEQ ID NO: 2061830 - RNA, 19 nt, Homo sapiens
  misc_RNA (1)...(19): siRNA sense strand
gagaucaucaacaccuaca

SEQ ID NO: 2061831 - RNA, 19 nt, Homo sapiens
  misc_RNA (1)...(19): siRNA sense strand
gcagaaccgcguguacaag

SEQ ID NO: 2061832 - RNA, 19 nt, Homo sapiens
  misc_RNA (1)...(19): siRNA sense strand
ccuugcggcugcugcgaaa

SEQ ID NO: 2061833 - RNA, 19 nt, Homo sapiens
  misc_RNA (1)...(19): siRNA sense strand
cgacaugaagcugcuggaa

SEQ ID NO: 2061834 - RNA, 19 nt, Homo sapiens
  misc_RNA (1)...(19): siRNA sense strand
uugggagccugaaggaaga

SEQ ID NO: 2061835 - RNA, 19 nt, Homo sapiens
  misc_RNA (1)...(19): siRNA sense strand
cgaggacgaggacgagaug

SEQ ID NO: 2061836 - RNA, 19 nt, Homo sapiens
  misc_RNA (1)...(19): siRNA sense strand
ccaagaagauggcaaaguc

SEQ ID NO: 2061837 - RNA, 19 nt, Homo sapiens
  misc_RNA (1)...(19): siRNA sense strand
ggcaaagucuacaucaaca

SEQ ID NO: 2061838 - RNA, 19 nt, Homo sapiens
  misc_RNA (1)...(19): siRNA sense strand
cacauccucuuccugcuuu

SEQ ID NO: 2061839 - RNA, 19 nt, Homo sapiens
  misc_RNA (1)...(19): siRNA sense strand
gcacuucaggcucuuguuc

SEQ ID NO: 2061840 - RNA, 19 nt, Homo sapiens
  misc_RNA (1)...(19): siRNA sense strand
caaagucuacaucaacaug

SEQ ID NO: 2061841 - RNA, 19 nt, Homo sapiens
  misc_RNA (1)...(19): siRNA sense strand
gaagauggcaaagucuaca

SEQ ID NO: 2061842 - RNA, 19 nt, Homo sapiens
  misc_RNA (1)...(19): siRNA sense strand
uggcaucgcugcucaucgu

SEQ ID NO: 2061843 - RNA, 19 nt, Homo sapiens
  misc_RNA (1)...(19): siRNA sense strand
aagaagauggcaaagucua

SEQ ID NO: 2061844 - RNA, 19 nt, Homo sapiens
  misc_RNA (1)...(19): siRNA sense strand
gcaaagucuacaucaacau

SEQ ID NO: 2061845 - RNA, 19 nt, Homo sapiens
  misc_RNA (1)...(19): siRNA sense strand
ucacauccucuuccugcuu

SEQ ID NO: 2061846 - RNA, 19 nt, Homo sapiens
  misc_RNA (1)...(19): siRNA sense strand
ggauggaaauuucuccuuu

SEQ ID NO: 2061847 - RNA, 19 nt, Homo sapiens
  misc_RNA (1)...(19): siRNA sense strand
gggcacaugugaaaucugu

SEQ ID NO: 2061848 - RNA, 19 nt, Homo sapiens
  misc_RNA (1)...(19): siRNA sense strand
gggaaacucaggaacuuug

SEQ ID NO: 2061849 - RNA, 19 nt, Homo sapiens
  misc_RNA (1)...(19): siRNA sense strand
gaagaacucaagccucucu

SEQ ID NO: 2061850 - RNA, 19 nt, Homo sapiens
  misc_RNA (1)...(19): siRNA sense strand
gauggaaauuucuccuuuu

SEQ ID NO: 2061851 - RNA, 19 nt, Homo sapiens
  misc_RNA (1)...(19): siRNA sense strand
gaacuuuccagaagaacuc

SEQ ID NO: 2061852 - RNA, 19 nt, Homo sapiens
  misc_RNA (1)...(19): siRNA sense strand
gcccaaugcccaggagaua

SEQ ID NO: 2061853 - RNA, 19 nt, Homo sapiens
  misc_RNA (1)...(19): siRNA sense strand
ucaagccucucugcaagga

SEQ ID NO: 2061854 - RNA, 19 nt, Homo sapiens
  misc_RNA (1)...(19): siRNA sense strand
cagugaagaagcucaaaga

SEQ ID NO: 2061855 - RNA, 19 nt, Homo sapiens
  misc_RNA (1)...(19): siRNA sense strand
cgugcaggauggaaauuuc

SEQ ID NO: 2061856 - RNA, 19 nt, Homo sapiens
  misc_RNA (1)...(19): siRNA sense strand
caacccgaacuuuccagaa

SEQ ID NO: 2061857 - RNA, 19 nt, Homo sapiens
  misc_RNA (1)...(19): siRNA sense strand
uucagaggcuggaggaaau

SEQ ID NO: 2061858 - RNA, 19 nt, Homo sapiens
  misc_RNA (1)...(19): siRNA sense strand
cccgaacuuuccagaagaa

SEQ ID NO: 2061859 - RNA, 19 nt, Homo sapiens
  misc_RNA (1)...(19): siRNA sense strand
aacccgaacuuuccagaag

SEQ ID NO: 2061860 - RNA, 19 nt, Homo sapiens
  misc_RNA (1)...(19): siRNA sense strand
uugggaaacucaggaacuu

SEQ ID NO: 2061861 - RNA, 19 nt, Homo sapiens
  misc_RNA (1)...(19): siRNA sense strand
gcccaggagauacuucaga

SEQ ID NO: 2061862 - RNA, 19 nt, Homo sapiens
  misc_RNA (1)...(19): siRNA sense strand
gaaacucaggaacuuugca

SEQ ID NO: 2061863 - RNA, 19 nt, Homo sapiens
  misc_RNA (1)...(19): siRNA sense strand
ggauggaaauuucuccuuu

SEQ ID NO: 2061864 - RNA, 19 nt, Homo sapiens
  misc_RNA (1)...(19): siRNA sense strand
gggcacaugugaaaucugu

SEQ ID NO: 2061865 - RNA, 19 nt, Homo sapiens
  misc_RNA (1)...(19): siRNA sense strand
gaagaacucaagccucucu

SEQ ID NO: 2061866 - RNA, 19 nt, Homo sapiens
  misc_RNA (1)...(19): siRNA sense strand
gauggaaauuucuccuuuu

SEQ ID NO: 2061867 - RNA, 19 nt, Homo sapiens
  misc_RNA (1)...(19): siRNA sense strand
gaacuuuccagaagaacuc

SEQ ID NO: 2061868 - RNA, 19 nt, Homo sapiens
  misc_RNA (1)...(19): siRNA sense strand
gcccaaugcccaggagaua

SEQ ID NO: 2061869 - RNA, 19 nt, Homo sapiens
  misc_RNA (1)...(19): siRNA sense strand
ucaagccucucugcaagga

SEQ ID NO: 2061870 - RNA, 19 nt, Homo sapiens
  misc_RNA (1)...(19): siRNA sense strand
cagugaagaagcucaaaga

SEQ ID NO: 2061871 - RNA, 19 nt, Homo sapiens
  misc_RNA (1)...(19): siRNA sense strand
cgugcaggauggaaauuuc

SEQ ID NO: 2061872 - RNA, 19 nt, Homo sapiens
  misc_RNA (1)...(19): siRNA sense strand
caacccgaacuuuccagaa

SEQ ID NO: 2061873 - RNA, 19 nt, Homo sapiens
  misc_RNA (1)...(19): siRNA sense strand
uucagaggcuggaggaaau

SEQ ID NO: 2061874 - RNA, 19 nt, Homo sapiens
  misc_RNA (1)...(19): siRNA sense strand
cccgaacuuuccagaagaa

SEQ ID NO: 2061875 - RNA, 19 nt, Homo sapiens
  misc_RNA (1)...(19): siRNA sense strand
aacccgaacuuuccagaag

SEQ ID NO: 2061876 - RNA, 19 nt, Homo sapiens
  misc_RNA (1)...(19): siRNA sense strand
gcccaggagauacuucaga

SEQ ID NO: 2061877 - RNA, 19 nt, Homo sapiens
  misc_RNA (1)...(19): siRNA sense strand
gaagugauguuuaugacaa

SEQ ID NO: 2061878 - RNA, 19 nt, Homo sapiens
  misc_RNA (1)...(19): siRNA sense strand
ggaaauaucuugggaugga

SEQ ID NO: 2061879 - RNA, 19 nt, Homo sapiens
  misc_RNA (1)...(19): siRNA sense strand
caacuacaauggacauaaa

SEQ ID NO: 2061880 - RNA, 19 nt, Homo sapiens
  misc_RNA (1)...(19): siRNA sense strand
acauaaacgugaugacuua

SEQ ID NO: 2061881 - RNA, 19 nt, Homo sapiens
  misc_RNA (1)...(19): siRNA sense strand
acaaggaagugacauguaa

SEQ ID NO: 2061882 - RNA, 19 nt, Homo sapiens
  misc_RNA (1)...(19): siRNA sense strand
uauaacagcuccuucaaau

SEQ ID NO: 2061883 - RNA, 19 nt, Homo sapiens
  misc_RNA (1)...(19): siRNA sense strand
agacaacccuugcauaaug

SEQ ID NO: 2061884 - RNA, 19 nt, Homo sapiens
  misc_RNA (1)...(19): siRNA sense strand
caacagaccucagagaaag

SEQ ID NO: 2061885 - RNA, 19 nt, Homo sapiens
  misc_RNA (1)...(19): siRNA sense strand
ccucauuucuguacgauaa

SEQ ID NO: 2061886 - RNA, 19 nt, Homo sapiens
  misc_RNA (1)...(19): siRNA sense strand
ggaagcaaauguaccaagu

SEQ ID NO: 2061887 - RNA, 19 nt, Homo sapiens
  misc_RNA (1)...(19): siRNA sense strand
caucugugcuugugugaaa

SEQ ID NO: 2061888 - RNA, 19 nt, Homo sapiens
  misc_RNA (1)...(19): siRNA sense strand
gcaaauguaccaaguguuc

SEQ ID NO: 2061889 - RNA, 19 nt, Homo sapiens
  misc_RNA (1)...(19): siRNA sense strand
gagaugugguccucuauca

SEQ ID NO: 2061890 - RNA, 19 nt, Homo sapiens
  misc_RNA (1)...(19): siRNA sense strand
cagaagacaucaaaguaug

SEQ ID NO: 2061891 - RNA, 19 nt, Homo sapiens
  misc_RNA (1)...(19): siRNA sense strand
gcucaaauccugggaguuu

SEQ ID NO: 2061892 - RNA, 19 nt, Homo sapiens
  misc_RNA (1)...(19): siRNA sense strand
gcaacagaccucagagaaa

SEQ ID NO: 2061893 - RNA, 19 nt, Homo sapiens
  misc_RNA (1)...(19): siRNA sense strand
ggucggacauuuaacuuuc

SEQ ID NO: 2061894 - RNA, 19 nt, Homo sapiens
  misc_RNA (1)...(19): siRNA sense strand
ggaagugacauguaagaga

SEQ ID NO: 2061895 - RNA, 19 nt, Homo sapiens
  misc_RNA (1)...(19): siRNA sense strand
ggcaagcucuguggucuuu

SEQ ID NO: 2061896 - RNA, 19 nt, Homo sapiens
  misc_RNA (1)...(19): siRNA sense strand
uaacagcuccuucaaaugg

SEQ ID NO: 2061897 - RNA, 19 nt, Homo sapiens
  misc_RNA (1)...(19): siRNA sense strand
ggacggagugucgcaauaa

SEQ ID NO: 2061898 - RNA, 19 nt, Homo sapiens
  misc_RNA (1)...(19): siRNA sense strand
ugacagacaugugugaaug

SEQ ID NO: 2061899 - RNA, 19 nt, Homo sapiens
  misc_RNA (1)...(19): siRNA sense strand
ugugacaacuggaaugaaa

SEQ ID NO: 2061900 - RNA, 19 nt, Homo sapiens
  misc_RNA (1)...(19): siRNA sense strand
gaaauugguccaugcaaca

SEQ ID NO: 2061901 - RNA, 19 nt, Homo sapiens
  misc_RNA (1)...(19): siRNA sense strand
gaacaaggaagugacaugu

SEQ ID NO: 2061902 - RNA, 19 nt, Homo sapiens
  misc_RNA (1)...(19): siRNA sense strand
agagaagucugucccauuc

SEQ ID NO: 2061903 - RNA, 19 nt, Homo sapiens
  misc_RNA (1)...(19): siRNA sense strand
gcuguguuguucauuguaa

SEQ ID NO: 2061904 - RNA, 19 nt, Homo sapiens
  misc_RNA (1)...(19): siRNA sense strand
caacuggaaugaaauuggu

SEQ ID NO: 2061905 - RNA, 19 nt, Homo sapiens
  misc_RNA (1)...(19): siRNA sense strand
gaaagugaccaccaaagca

SEQ ID NO: 2061906 - RNA, 19 nt, Homo sapiens
  misc_RNA (1)...(19): siRNA sense strand
acagacaacccuugcauaa

SEQ ID NO: 2061907 - RNA, 19 nt, Homo sapiens
  misc_RNA (1)...(19): siRNA sense strand
ccagagagagggcaucaaa

SEQ ID NO: 2061908 - RNA, 19 nt, Homo sapiens
  misc_RNA (1)...(19): siRNA sense strand
gagagaagucugucccauu

SEQ ID NO: 2061909 - RNA, 19 nt, Homo sapiens
  misc_RNA (1)...(19): siRNA sense strand
gaaggaaauaccuauaaca

SEQ ID NO: 2061910 - RNA, 19 nt, Homo sapiens
  misc_RNA (1)...(19): siRNA sense strand
gaaggaagcaaauguacca

SEQ ID NO: 2061911 - RNA, 19 nt, Homo sapiens
  misc_RNA (1)...(19): siRNA sense strand
ggaggaauuucagccagaa

SEQ ID NO: 2061912 - RNA, 19 nt, Homo sapiens
  misc_RNA (1)...(19): siRNA sense strand
ccagaaggaagcaaaugua

SEQ ID NO: 2061913 - RNA, 19 nt, Homo sapiens
  misc_RNA (1)...(19): siRNA sense strand
gguccgggauguaucaaga

SEQ ID NO: 2061914 - RNA, 19 nt, Homo sapiens
  misc_RNA (1)...(19): siRNA sense strand
caggagggcuguugugaag

SEQ ID NO: 2061915 - RNA, 19 nt, Homo sapiens
  misc_RNA (1)...(19): siRNA sense strand
gcaacuacaauggacauaa

SEQ ID NO: 2061916 - RNA, 19 nt, Homo sapiens
  misc_RNA (1)...(19): siRNA sense strand
gugaauguccaguccauaa

SEQ ID NO: 2061917 - RNA, 19 nt, Homo sapiens
  misc_RNA (1)...(19): siRNA sense strand
ggacuacgccacuuucuac

SEQ ID NO: 2061918 - RNA, 19 nt, Homo sapiens
  misc_RNA (1)...(19): siRNA sense strand
ccagaagacaucaaaguau

SEQ ID NO: 2061919 - RNA, 19 nt, Homo sapiens
  misc_RNA (1)...(19): siRNA sense strand
caaacuugguccuucacaa

SEQ ID NO: 2061920 - RNA, 19 nt, Homo sapiens
  misc_RNA (1)...(19): siRNA sense strand
ggacagugcugccccaaau

SEQ ID NO: 2061921 - RNA, 19 nt, Homo sapiens
  misc_RNA (1)...(19): siRNA sense strand
cagcaaacuugguccuuca

SEQ ID NO: 2061922 - RNA, 19 nt, Homo sapiens
  misc_RNA (1)...(19): siRNA sense strand
caagggacagucaagguaa

SEQ ID NO: 2061923 - RNA, 19 nt, Homo sapiens
  misc_RNA (1)...(19): siRNA sense strand
gaaagccagugccugaacu

SEQ ID NO: 2061924 - RNA, 19 nt, Homo sapiens
  misc_RNA (1)...(19): siRNA sense strand
caaauuuggcaacaagauu

SEQ ID NO: 2061925 - RNA, 19 nt, Homo sapiens
  misc_RNA (1)...(19): siRNA sense strand
ggagggcuguugugaagag

SEQ ID NO: 2061926 - RNA, 19 nt, Homo sapiens
  misc_RNA (1)...(19): siRNA sense strand
gacaacccuugcauaaugu

SEQ ID NO: 2061927 - RNA, 19 nt, Homo sapiens
  misc_RNA (1)...(19): siRNA sense strand
ugacuuaauugguggagau

SEQ ID NO: 2061928 - RNA, 19 nt, Homo sapiens
  misc_RNA (1)...(19): siRNA sense strand
uacgauaacugcacagcuu

SEQ ID NO: 2061929 - RNA, 19 nt, Homo sapiens
  misc_RNA (1)...(19): siRNA sense strand
aagcaaauguaccaagugu

SEQ ID NO: 2061930 - RNA, 19 nt, Homo sapiens
  misc_RNA (1)...(19): siRNA sense strand
aaacuguuauugcgaguca

SEQ ID NO: 2061931 - RNA, 19 nt, Homo sapiens
  misc_RNA (1)...(19): siRNA sense strand
gacauaaacgugaugacuu

SEQ ID NO: 2061932 - RNA, 19 nt, Homo sapiens
  misc_RNA (1)...(19): siRNA sense strand
gaugugguccucuaucaau

SEQ ID NO: 2061933 - RNA, 19 nt, Homo sapiens
  misc_RNA (1)...(19): siRNA sense strand
ucaagggacagucaaggua

SEQ ID NO: 2061934 - RNA, 19 nt, Homo sapiens
  misc_RNA (1)...(19): siRNA sense strand
gcaaauuuggcaacaagau

SEQ ID NO: 2061935 - RNA, 19 nt, Homo sapiens
  misc_RNA (1)...(19): siRNA sense strand
ggugaaguccuccagauuc

SEQ ID NO: 2061936 - RNA, 19 nt, Homo sapiens
  misc_RNA (1)...(19): siRNA sense strand
caagcucuguggucuuugu

SEQ ID NO: 2061937 - RNA, 19 nt, Homo sapiens
  misc_RNA (1)...(19): siRNA sense strand
ggcuaccucuugaaaguga

SEQ ID NO: 2061938 - RNA, 19 nt, Homo sapiens
  misc_RNA (1)...(19): siRNA sense strand
gcagugcauucccaucagu

SEQ ID NO: 2061939 - RNA, 19 nt, Homo sapiens
  misc_RNA (1)...(19): siRNA sense strand
gcaucaagccaguccuuug

SEQ ID NO: 2061940 - RNA, 19 nt, Homo sapiens
  misc_RNA (1)...(19): siRNA sense strand
ugacaacuggaaugaaauu

SEQ ID NO: 2061941 - RNA, 19 nt, Homo sapiens
  misc_RNA (1)...(19): siRNA sense strand
ggaugacuuugcugaaucu

SEQ ID NO: 2061942 - RNA, 19 nt, Homo sapiens
  misc_RNA (1)...(19): siRNA sense strand
ggauggcuaccucuugaaa

SEQ ID NO: 2061943 - RNA, 19 nt, Homo sapiens
  misc_RNA (1)...(19): siRNA sense strand
ugaaggaaauaccuauaac

SEQ ID NO: 2061944 - RNA, 19 nt, Homo sapiens
  misc_RNA (1)...(19): siRNA sense strand
ggacauaaacgugaugacu

SEQ ID NO: 2061945 - RNA, 19 nt, Homo sapiens
  misc_RNA (1)...(19): siRNA sense strand
gauccucauuucuguacga

SEQ ID NO: 2061946 - RNA, 19 nt, Homo sapiens
  misc_RNA (1)...(19): siRNA sense strand
gugcagccacccaguguaa

SEQ ID NO: 2061947 - RNA, 19 nt, Homo sapiens
  misc_RNA (1)...(19): siRNA sense strand
gaagcaaauguaccaagug

SEQ ID NO: 2061948 - RNA, 19 nt, Homo sapiens
  misc_RNA (1)...(19): siRNA sense strand
guggaugacuuugcugaau

SEQ ID NO: 2061949 - RNA, 19 nt, Homo sapiens
  misc_RNA (1)...(19): siRNA sense strand
cccagaagacaucaaagua

SEQ ID NO: 2061950 - RNA, 19 nt, Homo sapiens
  misc_RNA (1)...(19): siRNA sense strand
gauaacugcacagcuugua

SEQ ID NO: 2061951 - RNA, 19 nt, Homo sapiens
  misc_RNA (1)...(19): siRNA sense strand
gcgcuguguuguucauugu

SEQ ID NO: 2061952 - RNA, 19 nt, Homo sapiens
  misc_RNA (1)...(19): siRNA sense strand
aaagcagguuuggaaauau

SEQ ID NO: 2061953 - RNA, 19 nt, Homo sapiens
  misc_RNA (1)...(19): siRNA sense strand
ccagcaccuuagucacaua

SEQ ID NO: 2061954 - RNA, 19 nt, Homo sapiens
  misc_RNA (1)...(19): siRNA sense strand
gggcaaaauucucaacaga

SEQ ID NO: 2061955 - RNA, 19 nt, Homo sapiens
  misc_RNA (1)...(19): siRNA sense strand
gguccucuaucaauuguac

SEQ ID NO: 2061956 - RNA, 19 nt, Homo sapiens
  misc_RNA (1)...(19): siRNA sense strand
cagggacucuacugugguu

SEQ ID NO: 2061957 - RNA, 19 nt, Homo sapiens
  misc_RNA (1)...(19): siRNA sense strand
uguccuauuugcacugaaa

SEQ ID NO: 2061958 - RNA, 19 nt, Homo sapiens
  misc_RNA (1)...(19): siRNA sense strand
ccaaugaguucugcaacag

SEQ ID NO: 2061959 - RNA, 19 nt, Homo sapiens
  misc_RNA (1)...(19): siRNA sense strand
caauggacauaaacgugau

SEQ ID NO: 2061960 - RNA, 19 nt, Homo sapiens
  misc_RNA (1)...(19): siRNA sense strand
cuggauggcuaccucuuga

SEQ ID NO: 2061961 - RNA, 19 nt, Homo sapiens
  misc_RNA (1)...(19): siRNA sense strand
ugugaacagugcaaagguu

SEQ ID NO: 2061962 - RNA, 19 nt, Homo sapiens
  misc_RNA (1)...(19): siRNA sense strand
gcauggugcuguguacgau

SEQ ID NO: 2061963 - RNA, 19 nt, Homo sapiens
  misc_RNA (1)...(19): siRNA sense strand
ggaauuucagccagaagga

SEQ ID NO: 2061964 - RNA, 19 nt, Homo sapiens
  misc_RNA (1)...(19): siRNA sense strand
caucaagccaguccuuugu

SEQ ID NO: 2061965 - RNA, 19 nt, Homo sapiens
  misc_RNA (1)...(19): siRNA sense strand
gggagccucagcagaauug

SEQ ID NO: 2061966 - RNA, 19 nt, Homo sapiens
  misc_RNA (1)...(19): siRNA sense strand
gcaauaagcagugcauucc

SEQ ID NO: 2061967 - RNA, 19 nt, Homo sapiens
  misc_RNA (1)...(19): siRNA sense strand
agacaucaaaguaugcaaa

SEQ ID NO: 2061968 - RNA, 19 nt, Homo sapiens
  misc_RNA (1)...(19): siRNA sense strand
gaauuucagccagaaggaa

SEQ ID NO: 2061969 - RNA, 19 nt, Homo sapiens
  misc_RNA (1)...(19): siRNA sense strand
ugaauguccaguccauaaa

SEQ ID NO: 2061970 - RNA, 19 nt, Homo sapiens
  misc_RNA (1)...(19): siRNA sense strand
ugguggagauggaaacuuc

SEQ ID NO: 2061971 - RNA, 19 nt, Homo sapiens
  misc_RNA (1)...(19): siRNA sense strand
uuugggagcugccucuuuc

SEQ ID NO: 2061972 - RNA, 19 nt, Homo sapiens
  misc_RNA (1)...(19): siRNA sense strand
uaucaauuguaccaucugu

SEQ ID NO: 2061973 - RNA, 19 nt, Homo sapiens
  misc_RNA (1)...(19): siRNA sense strand
ccacuguccagcaaacuug

SEQ ID NO: 2061974 - RNA, 19 nt, Homo sapiens
  misc_RNA (1)...(19): siRNA sense strand
gagagagggcaucaaaguc

SEQ ID NO: 2061975 - RNA, 19 nt, Homo sapiens
  misc_RNA (1)...(19): siRNA sense strand
agagagagggcaucaaagu

SEQ ID NO: 2061976 - RNA, 19 nt, Homo sapiens
  misc_RNA (1)...(19): siRNA sense strand
uaaugugugucugcuugaa

SEQ ID NO: 2061977 - RNA, 19 nt, Homo sapiens
  misc_RNA (1)...(19): siRNA sense strand
gaagugauguuuaugacaa

SEQ ID NO: 2061978 - RNA, 19 nt, Homo sapiens
  misc_RNA (1)...(19): siRNA sense strand
ggaaauaucuugggaugga

SEQ ID NO: 2061979 - RNA, 19 nt, Homo sapiens
  misc_RNA (1)...(19): siRNA sense strand
caacuacaauggacauaaa

SEQ ID NO: 2061980 - RNA, 19 nt, Homo sapiens
  misc_RNA (1)...(19): siRNA sense strand
acauaaacgugaugacuua

SEQ ID NO: 2061981 - RNA, 19 nt, Homo sapiens
  misc_RNA (1)...(19): siRNA sense strand
acaaggaagugacauguaa

SEQ ID NO: 2061982 - RNA, 19 nt, Homo sapiens
  misc_RNA (1)...(19): siRNA sense strand
uauaacagcuccuucaaau

SEQ ID NO: 2061983 - RNA, 19 nt, Homo sapiens
  misc_RNA (1)...(19): siRNA sense strand
agacaacccuugcauaaug

SEQ ID NO: 2061984 - RNA, 19 nt, Homo sapiens
  misc_RNA (1)...(19): siRNA sense strand
caacagaccucagagaaag

SEQ ID NO: 2061985 - RNA, 19 nt, Homo sapiens
  misc_RNA (1)...(19): siRNA sense strand
ccucauuucuguacgauaa

SEQ ID NO: 2061986 - RNA, 19 nt, Homo sapiens
  misc_RNA (1)...(19): siRNA sense strand
ggaagcaaauguaccaagu

SEQ ID NO: 2061987 - RNA, 19 nt, Homo sapiens
  misc_RNA (1)...(19): siRNA sense strand
caucugugcuugugugaaa

SEQ ID NO: 2061988 - RNA, 19 nt, Homo sapiens
  misc_RNA (1)...(19): siRNA sense strand
gcaaauguaccaaguguuc

SEQ ID NO: 2061989 - RNA, 19 nt, Homo sapiens
  misc_RNA (1)...(19): siRNA sense strand
gagaugugguccucuauca

SEQ ID NO: 2061990 - RNA, 19 nt, Homo sapiens
  misc_RNA (1)...(19): siRNA sense strand
cagaagacaucaaaguaug

SEQ ID NO: 2061991 - RNA, 19 nt, Homo sapiens
  misc_RNA (1)...(19): siRNA sense strand
gcucaaauccugggaguuu

SEQ ID NO: 2061992 - RNA, 19 nt, Homo sapiens
  misc_RNA (1)...(19): siRNA sense strand
gcaacagaccucagagaaa

SEQ ID NO: 2061993 - RNA, 19 nt, Homo sapiens
  misc_RNA (1)...(19): siRNA sense strand
ggucggacauuuaacuuuc

SEQ ID NO: 2061994 - RNA, 19 nt, Homo sapiens
  misc_RNA (1)...(19): siRNA sense strand
ggaagugacauguaagaga

SEQ ID NO: 2061995 - RNA, 19 nt, Homo sapiens
  misc_RNA (1)...(19): siRNA sense strand
ggcaagcucuguggucuuu

SEQ ID NO: 2061996 - RNA, 19 nt, Homo sapiens
  misc_RNA (1)...(19): siRNA sense strand
uaacagcuccuucaaaugg

SEQ ID NO: 2061997 - RNA, 19 nt, Homo sapiens
  misc_RNA (1)...(19): siRNA sense strand
ggacggagugucgcaauaa

SEQ ID NO: 2061998 - RNA, 19 nt, Homo sapiens
  misc_RNA (1)...(19): siRNA sense strand
ugacagacaugugugaaug

SEQ ID NO: 2061999 - RNA, 19 nt, Homo sapiens
  misc_RNA (1)...(19): siRNA sense strand
ugugacaacuggaaugaaa

SEQ ID NO: 2062000 - RNA, 19 nt, Homo sapiens
  misc_RNA (1)...(19): siRNA sense strand
gaaauugguccaugcaaca

SEQ ID NO: 2062001 - RNA, 19 nt, Homo sapiens
  misc_RNA (1)...(19): siRNA sense strand
gaacaaggaagugacaugu

SEQ ID NO: 2062002 - RNA, 19 nt, Homo sapiens
  misc_RNA (1)...(19): siRNA sense strand
agagaagucugucccauuc

SEQ ID NO: 2062003 - RNA, 19 nt, Homo sapiens
  misc_RNA (1)...(19): siRNA sense strand
gcuguguuguucauuguaa

SEQ ID NO: 2062004 - RNA, 19 nt, Homo sapiens
  misc_RNA (1)...(19): siRNA sense strand
caacuggaaugaaauuggu

SEQ ID NO: 2062005 - RNA, 19 nt, Homo sapiens
  misc_RNA (1)...(19): siRNA sense strand
gaaagugaccaccaaagca

SEQ ID NO: 2062006 - RNA, 19 nt, Homo sapiens
  misc_RNA (1)...(19): siRNA sense strand
acagacaacccuugcauaa

SEQ ID NO: 2062007 - RNA, 19 nt, Homo sapiens
  misc_RNA (1)...(19): siRNA sense strand
ccagagagagggcaucaaa

SEQ ID NO: 2062008 - RNA, 19 nt, Homo sapiens
  misc_RNA (1)...(19): siRNA sense strand
gagagaagucugucccauu

SEQ ID NO: 2062009 - RNA, 19 nt, Homo sapiens
  misc_RNA (1)...(19): siRNA sense strand
gaaggaaauaccuauaaca

SEQ ID NO: 2062010 - RNA, 19 nt, Homo sapiens
  misc_RNA (1)...(19): siRNA sense strand
gaaggaagcaaauguacca

SEQ ID NO: 2062011 - RNA, 19 nt, Homo sapiens
  misc_RNA (1)...(19): siRNA sense strand
ggaggaauuucagccagaa

SEQ ID NO: 2062012 - RNA, 19 nt, Homo sapiens
  misc_RNA (1)...(19): siRNA sense strand
ccagaaggaagcaaaugua

SEQ ID NO: 2062013 - RNA, 19 nt, Homo sapiens
  misc_RNA (1)...(19): siRNA sense strand
gguccgggauguaucaaga

SEQ ID NO: 2062014 - RNA, 19 nt, Homo sapiens
  misc_RNA (1)...(19): siRNA sense strand
caggagggcuguugugaag

SEQ ID NO: 2062015 - RNA, 19 nt, Homo sapiens
  misc_RNA (1)...(19): siRNA sense strand
gcaacuacaauggacauaa

SEQ ID NO: 2062016 - RNA, 19 nt, Homo sapiens
  misc_RNA (1)...(19): siRNA sense strand
gugaauguccaguccauaa

SEQ ID NO: 2062017 - RNA, 19 nt, Homo sapiens
  misc_RNA (1)...(19): siRNA sense strand
ggacuacgccacuuucuac

SEQ ID NO: 2062018 - RNA, 19 nt, Homo sapiens
  misc_RNA (1)...(19): siRNA sense strand
ccagaagacaucaaaguau

SEQ ID NO: 2062019 - RNA, 19 nt, Homo sapiens
  misc_RNA (1)...(19): siRNA sense strand
caaacuugguccuucacaa

SEQ ID NO: 2062020 - RNA, 19 nt, Homo sapiens
  misc_RNA (1)...(19): siRNA sense strand
ggacagugcugccccaaau

SEQ ID NO: 2062021 - RNA, 19 nt, Homo sapiens
  misc_RNA (1)...(19): siRNA sense strand
cagcaaacuugguccuuca

SEQ ID NO: 2062022 - RNA, 19 nt, Homo sapiens
  misc_RNA (1)...(19): siRNA sense strand
caagggacagucaagguaa

SEQ ID NO: 2062023 - RNA, 19 nt, Homo sapiens
  misc_RNA (1)...(19): siRNA sense strand
gaaagccagugccugaacu

SEQ ID NO: 2062024 - RNA, 19 nt, Homo sapiens
  misc_RNA (1)...(19): siRNA sense strand
caaauuuggcaacaagauu

SEQ ID NO: 2062025 - RNA, 19 nt, Homo sapiens
  misc_RNA (1)...(19): siRNA sense strand
ggagggcuguugugaagag

SEQ ID NO: 2062026 - RNA, 19 nt, Homo sapiens
  misc_RNA (1)...(19): siRNA sense strand
gacaacccuugcauaaugu

SEQ ID NO: 2062027 - RNA, 19 nt, Homo sapiens
  misc_RNA (1)...(19): siRNA sense strand
ugacuuaauugguggagau

SEQ ID NO: 2062028 - RNA, 19 nt, Homo sapiens
  misc_RNA (1)...(19): siRNA sense strand
uacgauaacugcacagcuu

SEQ ID NO: 2062029 - RNA, 19 nt, Homo sapiens
  misc_RNA (1)...(19): siRNA sense strand
aagcaaauguaccaagugu

SEQ ID NO: 2062030 - RNA, 19 nt, Homo sapiens
  misc_RNA (1)...(19): siRNA sense strand
aaacuguuauugcgaguca

SEQ ID NO: 2062031 - RNA, 19 nt, Homo sapiens
  misc_RNA (1)...(19): siRNA sense strand
gacauaaacgugaugacuu

SEQ ID NO: 2062032 - RNA, 19 nt, Homo sapiens
  misc_RNA (1)...(19): siRNA sense strand
gaugugguccucuaucaau

SEQ ID NO: 2062033 - RNA, 19 nt, Homo sapiens
  misc_RNA (1)...(19): siRNA sense strand
ucaagggacagucaaggua

SEQ ID NO: 2062034 - RNA, 19 nt, Homo sapiens
  misc_RNA (1)...(19): siRNA sense strand
gcaaauuuggcaacaagau

SEQ ID NO: 2062035 - RNA, 19 nt, Homo sapiens
  misc_RNA (1)...(19): siRNA sense strand
ggugaaguccuccagauuc

SEQ ID NO: 2062036 - RNA, 19 nt, Homo sapiens
  misc_RNA (1)...(19): siRNA sense strand
caagcucuguggucuuugu

SEQ ID NO: 2062037 - RNA, 19 nt, Homo sapiens
  misc_RNA (1)...(19): siRNA sense strand
ggcuaccucuugaaaguga

SEQ ID NO: 2062038 - RNA, 19 nt, Homo sapiens
  misc_RNA (1)...(19): siRNA sense strand
gcagugcauucccaucagu

SEQ ID NO: 2062039 - RNA, 19 nt, Homo sapiens
  misc_RNA (1)...(19): siRNA sense strand
gcaucaagccaguccuuug

SEQ ID NO: 2062040 - RNA, 19 nt, Homo sapiens
  misc_RNA (1)...(19): siRNA sense strand
ugacaacuggaaugaaauu

SEQ ID NO: 2062041 - RNA, 19 nt, Homo sapiens
  misc_RNA (1)...(19): siRNA sense strand
ggaugacuuugcugaaucu

SEQ ID NO: 2062042 - RNA, 19 nt, Homo sapiens
  misc_RNA (1)...(19): siRNA sense strand
ggauggcuaccucuugaaa

SEQ ID NO: 2062043 - RNA, 19 nt, Homo sapiens
  misc_RNA (1)...(19): siRNA sense strand
ugaaggaaauaccuauaac

SEQ ID NO: 2062044 - RNA, 19 nt, Homo sapiens
  misc_RNA (1)...(19): siRNA sense strand
ggacauaaacgugaugacu

SEQ ID NO: 2062045 - RNA, 19 nt, Homo sapiens
  misc_RNA (1)...(19): siRNA sense strand
gauccucauuucuguacga

SEQ ID NO: 2062046 - RNA, 19 nt, Homo sapiens
  misc_RNA (1)...(19): siRNA sense strand
gugcagccacccaguguaa

SEQ ID NO: 2062047 - RNA, 19 nt, Homo sapiens
  misc_RNA (1)...(19): siRNA sense strand
gaagcaaauguaccaagug

SEQ ID NO: 2062048 - RNA, 19 nt, Homo sapiens
  misc_RNA (1)...(19): siRNA sense strand
guggaugacuuugcugaau

SEQ ID NO: 2062049 - RNA, 19 nt, Homo sapiens
  misc_RNA (1)...(19): siRNA sense strand
cccagaagacaucaaagua

SEQ ID NO: 2062050 - RNA, 19 nt, Homo sapiens
  misc_RNA (1)...(19): siRNA sense strand
gauaacugcacagcuugua

SEQ ID NO: 2062051 - RNA, 19 nt, Homo sapiens
  misc_RNA (1)...(19): siRNA sense strand
gcgcuguguuguucauugu

SEQ ID NO: 2062052 - RNA, 19 nt, Homo sapiens
  misc_RNA (1)...(19): siRNA sense strand
aaagcagguuuggaaauau

SEQ ID NO: 2062053 - RNA, 19 nt, Homo sapiens
  misc_RNA (1)...(19): siRNA sense strand
ccagcaccuuagucacaua

SEQ ID NO: 2062054 - RNA, 19 nt, Homo sapiens
  misc_RNA (1)...(19): siRNA sense strand
gggcaaaauucucaacaga

SEQ ID NO: 2062055 - RNA, 19 nt, Homo sapiens
  misc_RNA (1)...(19): siRNA sense strand
gguccucuaucaauuguac

SEQ ID NO: 2062056 - RNA, 19 nt, Homo sapiens
  misc_RNA (1)...(19): siRNA sense strand
cagggacucuacugugguu

SEQ ID NO: 2062057 - RNA, 19 nt, Homo sapiens
  misc_RNA (1)...(19): siRNA sense strand
uguccuauuugcacugaaa

SEQ ID NO: 2062058 - RNA, 19 nt, Homo sapiens
  misc_RNA (1)...(19): siRNA sense strand
ccaaugaguucugcaacag

SEQ ID NO: 2062059 - RNA, 19 nt, Homo sapiens
  misc_RNA (1)...(19): siRNA sense strand
caauggacauaaacgugau

SEQ ID NO: 2062060 - RNA, 19 nt, Homo sapiens
  misc_RNA (1)...(19): siRNA sense strand
cuggauggcuaccucuuga

SEQ ID NO: 2062061 - RNA, 19 nt, Homo sapiens
  misc_RNA (1)...(19): siRNA sense strand
ugugaacagugcaaagguu

SEQ ID NO: 2062062 - RNA, 19 nt, Homo sapiens
  misc_RNA (1)...(19): siRNA sense strand
gcauggugcuguguacgau

SEQ ID NO: 2062063 - RNA, 19 nt, Homo sapiens
  misc_RNA (1)...(19): siRNA sense strand
ggaauuucagccagaagga

SEQ ID NO: 2062064 - RNA, 19 nt, Homo sapiens
  misc_RNA (1)...(19): siRNA sense strand
caucaagccaguccuuugu

SEQ ID NO: 2062065 - RNA, 19 nt, Homo sapiens
  misc_RNA (1)...(19): siRNA sense strand
gggagccucagcagaauug

SEQ ID NO: 2062066 - RNA, 19 nt, Homo sapiens
  misc_RNA (1)...(19): siRNA sense strand
gcaauaagcagugcauucc

SEQ ID NO: 2062067 - RNA, 19 nt, Homo sapiens
  misc_RNA (1)...(19): siRNA sense strand
agacaucaaaguaugcaaa

SEQ ID NO: 2062068 - RNA, 19 nt, Homo sapiens
  misc_RNA (1)...(19): siRNA sense strand
gaauuucagccagaaggaa

SEQ ID NO: 2062069 - RNA, 19 nt, Homo sapiens
  misc_RNA (1)...(19): siRNA sense strand
ugaauguccaguccauaaa

SEQ ID NO: 2062070 - RNA, 19 nt, Homo sapiens
  misc_RNA (1)...(19): siRNA sense strand
ugguggagauggaaacuuc

SEQ ID NO: 2062071 - RNA, 19 nt, Homo sapiens
  misc_RNA (1)...(19): siRNA sense strand
uuugggagcugccucuuuc

SEQ ID NO: 2062072 - RNA, 19 nt, Homo sapiens
  misc_RNA (1)...(19): siRNA sense strand
uaucaauuguaccaucugu

SEQ ID NO: 2062073 - RNA, 19 nt, Homo sapiens
  misc_RNA (1)...(19): siRNA sense strand
ccacuguccagcaaacuug

SEQ ID NO: 2062074 - RNA, 19 nt, Homo sapiens
  misc_RNA (1)...(19): siRNA sense strand
gagagagggcaucaaaguc

SEQ ID NO: 2062075 - RNA, 19 nt, Homo sapiens
  misc_RNA (1)...(19): siRNA sense strand
agagagagggcaucaaagu

SEQ ID NO: 2062076 - RNA, 19 nt, Homo sapiens
  misc_RNA (1)...(19): siRNA sense strand
uaaugugugucugcuugaa

SEQ ID NO: 2062077 - RNA, 19 nt, Homo sapiens
  misc_RNA (1)...(19): siRNA sense strand
gaagugauguuuaugacaa

SEQ ID NO: 2062078 - RNA, 19 nt, Homo sapiens
  misc_RNA (1)...(19): siRNA sense strand
ggaaauaucuugggaugga

SEQ ID NO: 2062079 - RNA, 19 nt, Homo sapiens
  misc_RNA (1)...(19): siRNA sense strand
caacuacaauggacauaaa

SEQ ID NO: 2062080 - RNA, 19 nt, Homo sapiens
  misc_RNA (1)...(19): siRNA sense strand
acauaaacgugaugacuua

SEQ ID NO: 2062081 - RNA, 19 nt, Homo sapiens
  misc_RNA (1)...(19): siRNA sense strand
acaaggaagugacauguaa

SEQ ID NO: 2062082 - RNA, 19 nt, Homo sapiens
  misc_RNA (1)...(19): siRNA sense strand
uauaacagcuccuucaaau

SEQ ID NO: 2062083 - RNA, 19 nt, Homo sapiens
  misc_RNA (1)...(19): siRNA sense strand
agacaacccuugcauaaug

SEQ ID NO: 2062084 - RNA, 19 nt, Homo sapiens
  misc_RNA (1)...(19): siRNA sense strand
caacagaccucagagaaag

SEQ ID NO: 2062085 - RNA, 19 nt, Homo sapiens
  misc_RNA (1)...(19): siRNA sense strand
ccucauuucuguacgauaa

SEQ ID NO: 2062086 - RNA, 19 nt, Homo sapiens
  misc_RNA (1)...(19): siRNA sense strand
ggaagcaaauguaccaagu

SEQ ID NO: 2062087 - RNA, 19 nt, Homo sapiens
  misc_RNA (1)...(19): siRNA sense strand
caucugugcuugugugaaa

SEQ ID NO: 2062088 - RNA, 19 nt, Homo sapiens
  misc_RNA (1)...(19): siRNA sense strand
gcaaauguaccaaguguuc

SEQ ID NO: 2062089 - RNA, 19 nt, Homo sapiens
  misc_RNA (1)...(19): siRNA sense strand
gagaugugguccucuauca

SEQ ID NO: 2062090 - RNA, 19 nt, Homo sapiens
  misc_RNA (1)...(19): siRNA sense strand
cagaagacaucaaaguaug

SEQ ID NO: 2062091 - RNA, 19 nt, Homo sapiens
  misc_RNA (1)...(19): siRNA sense strand
gcucaaauccugggaguuu

SEQ ID NO: 2062092 - RNA, 19 nt, Homo sapiens
  misc_RNA (1)...(19): siRNA sense strand
gcaacagaccucagagaaa

SEQ ID NO: 2062093 - RNA, 19 nt, Homo sapiens
  misc_RNA (1)...(19): siRNA sense strand
ggucggacauuuaacuuuc

SEQ ID NO: 2062094 - RNA, 19 nt, Homo sapiens
  misc_RNA (1)...(19): siRNA sense strand
ggaagugacauguaagaga

SEQ ID NO: 2062095 - RNA, 19 nt, Homo sapiens
  misc_RNA (1)...(19): siRNA sense strand
ggcaagcucuguggucuuu

SEQ ID NO: 2062096 - RNA, 19 nt, Homo sapiens
  misc_RNA (1)...(19): siRNA sense strand
uaacagcuccuucaaaugg

SEQ ID NO: 2062097 - RNA, 19 nt, Homo sapiens
  misc_RNA (1)...(19): siRNA sense strand
ggacggagugucgcaauaa

SEQ ID NO: 2062098 - RNA, 19 nt, Homo sapiens
  misc_RNA (1)...(19): siRNA sense strand
ugacagacaugugugaaug

SEQ ID NO: 2062099 - RNA, 19 nt, Homo sapiens
  misc_RNA (1)...(19): siRNA sense strand
ugugacaacuggaaugaaa

SEQ ID NO: 2062100 - RNA, 19 nt, Homo sapiens
  misc_RNA (1)...(19): siRNA sense strand
gaaauugguccaugcaaca

SEQ ID NO: 2062101 - RNA, 19 nt, Homo sapiens
  misc_RNA (1)...(19): siRNA sense strand
gaacaaggaagugacaugu

SEQ ID NO: 2062102 - RNA, 19 nt, Homo sapiens
  misc_RNA (1)...(19): siRNA sense strand
agagaagucugucccauuc

SEQ ID NO: 2062103 - RNA, 19 nt, Homo sapiens
  misc_RNA (1)...(19): siRNA sense strand
gcuguguuguucauuguaa

SEQ ID NO: 2062104 - RNA, 19 nt, Homo sapiens
  misc_RNA (1)...(19): siRNA sense strand
caacuggaaugaaauuggu

SEQ ID NO: 2062105 - RNA, 19 nt, Homo sapiens
  misc_RNA (1)...(19): siRNA sense strand
gaaagugaccaccaaagca

SEQ ID NO: 2062106 - RNA, 19 nt, Homo sapiens
  misc_RNA (1)...(19): siRNA sense strand
acagacaacccuugcauaa

SEQ ID NO: 2062107 - RNA, 19 nt, Homo sapiens
  misc_RNA (1)...(19): siRNA sense strand
ccagagagagggcaucaaa

SEQ ID NO: 2062108 - RNA, 19 nt, Homo sapiens
  misc_RNA (1)...(19): siRNA sense strand
gagagaagucugucccauu

SEQ ID NO: 2062109 - RNA, 19 nt, Homo sapiens
  misc_RNA (1)...(19): siRNA sense strand
gaaggaaauaccuauaaca

SEQ ID NO: 2062110 - RNA, 19 nt, Homo sapiens
  misc_RNA (1)...(19): siRNA sense strand
gaaggaagcaaauguacca

SEQ ID NO: 2062111 - RNA, 19 nt, Homo sapiens
  misc_RNA (1)...(19): siRNA sense strand
ggaggaauuucagccagaa

SEQ ID NO: 2062112 - RNA, 19 nt, Homo sapiens
  misc_RNA (1)...(19): siRNA sense strand
ccagaaggaagcaaaugua

SEQ ID NO: 2062113 - RNA, 19 nt, Homo sapiens
  misc_RNA (1)...(19): siRNA sense strand
gguccgggauguaucaaga

SEQ ID NO: 2062114 - RNA, 19 nt, Homo sapiens
  misc_RNA (1)...(19): siRNA sense strand
caggagggcuguugugaag

SEQ ID NO: 2062115 - RNA, 19 nt, Homo sapiens
  misc_RNA (1)...(19): siRNA sense strand
gcaacuacaauggacauaa

SEQ ID NO: 2062116 - RNA, 19 nt, Homo sapiens
  misc_RNA (1)...(19): siRNA sense strand
gugaauguccaguccauaa

SEQ ID NO: 2062117 - RNA, 19 nt, Homo sapiens
  misc_RNA (1)...(19): siRNA sense strand
ggacuacgccacuuucuac

SEQ ID NO: 2062118 - RNA, 19 nt, Homo sapiens
  misc_RNA (1)...(19): siRNA sense strand
ccagaagacaucaaaguau

SEQ ID NO: 2062119 - RNA, 19 nt, Homo sapiens
  misc_RNA (1)...(19): siRNA sense strand
caaacuugguccuucacaa

SEQ ID NO: 2062120 - RNA, 19 nt, Homo sapiens
  misc_RNA (1)...(19): siRNA sense strand
ggacagugcugccccaaau

SEQ ID NO: 2062121 - RNA, 19 nt, Homo sapiens
  misc_RNA (1)...(19): siRNA sense strand
cagcaaacuugguccuuca

SEQ ID NO: 2062122 - RNA, 19 nt, Homo sapiens
  misc_RNA (1)...(19): siRNA sense strand
caagggacagucaagguaa

SEQ ID NO: 2062123 - RNA, 19 nt, Homo sapiens
  misc_RNA (1)...(19): siRNA sense strand
gaaagccagugccugaacu

SEQ ID NO: 2062124 - RNA, 19 nt, Homo sapiens
  misc_RNA (1)...(19): siRNA sense strand
caaauuuggcaacaagauu

SEQ ID NO: 2062125 - RNA, 19 nt, Homo sapiens
  misc_RNA (1)...(19): siRNA sense strand
ggagggcuguugugaagag

SEQ ID NO: 2062126 - RNA, 19 nt, Homo sapiens
  misc_RNA (1)...(19): siRNA sense strand
gacaacccuugcauaaugu

SEQ ID NO: 2062127 - RNA, 19 nt, Homo sapiens
  misc_RNA (1)...(19): siRNA sense strand
ugacuuaauugguggagau

SEQ ID NO: 2062128 - RNA, 19 nt, Homo sapiens
  misc_RNA (1)...(19): siRNA sense strand
uacgauaacugcacagcuu

SEQ ID NO: 2062129 - RNA, 19 nt, Homo sapiens
  misc_RNA (1)...(19): siRNA sense strand
aagcaaauguaccaagugu

SEQ ID NO: 2062130 - RNA, 19 nt, Homo sapiens
  misc_RNA (1)...(19): siRNA sense strand
aaacuguuauugcgaguca

SEQ ID NO: 2062131 - RNA, 19 nt, Homo sapiens
  misc_RNA (1)...(19): siRNA sense strand
gacauaaacgugaugacuu

SEQ ID NO: 2062132 - RNA, 19 nt, Homo sapiens
  misc_RNA (1)...(19): siRNA sense strand
gaugugguccucuaucaau

SEQ ID NO: 2062133 - RNA, 19 nt, Homo sapiens
  misc_RNA (1)...(19): siRNA sense strand
ucaagggacagucaaggua

SEQ ID NO: 2062134 - RNA, 19 nt, Homo sapiens
  misc_RNA (1)...(19): siRNA sense strand
gcaaauuuggcaacaagau

SEQ ID NO: 2062135 - RNA, 19 nt, Homo sapiens
  misc_RNA (1)...(19): siRNA sense strand
ggugaaguccuccagauuc

SEQ ID NO: 2062136 - RNA, 19 nt, Homo sapiens
  misc_RNA (1)...(19): siRNA sense strand
caagcucuguggucuuugu

SEQ ID NO: 2062137 - RNA, 19 nt, Homo sapiens
  misc_RNA (1)...(19): siRNA sense strand
ggcuaccucuugaaaguga

SEQ ID NO: 2062138 - RNA, 19 nt, Homo sapiens
  misc_RNA (1)...(19): siRNA sense strand
gcagugcauucccaucagu

SEQ ID NO: 2062139 - RNA, 19 nt, Homo sapiens
  misc_RNA (1)...(19): siRNA sense strand
gcaucaagccaguccuuug

SEQ ID NO: 2062140 - RNA, 19 nt, Homo sapiens
  misc_RNA (1)...(19): siRNA sense strand
ugacaacuggaaugaaauu

SEQ ID NO: 2062141 - RNA, 19 nt, Homo sapiens
  misc_RNA (1)...(19): siRNA sense strand
ggaugacuuugcugaaucu

SEQ ID NO: 2062142 - RNA, 19 nt, Homo sapiens
  misc_RNA (1)...(19): siRNA sense strand
ggauggcuaccucuugaaa

SEQ ID NO: 2062143 - RNA, 19 nt, Homo sapiens
  misc_RNA (1)...(19): siRNA sense strand
ugaaggaaauaccuauaac

SEQ ID NO: 2062144 - RNA, 19 nt, Homo sapiens
  misc_RNA (1)...(19): siRNA sense strand
ggacauaaacgugaugacu

SEQ ID NO: 2062145 - RNA, 19 nt, Homo sapiens
  misc_RNA (1)...(19): siRNA sense strand
gauccucauuucuguacga

SEQ ID NO: 2062146 - RNA, 19 nt, Homo sapiens
  misc_RNA (1)...(19): siRNA sense strand
gugcagccacccaguguaa

SEQ ID NO: 2062147 - RNA, 19 nt, Homo sapiens
  misc_RNA (1)...(19): siRNA sense strand
gaagcaaauguaccaagug

SEQ ID NO: 2062148 - RNA, 19 nt, Homo sapiens
  misc_RNA (1)...(19): siRNA sense strand
guggaugacuuugcugaau

SEQ ID NO: 2062149 - RNA, 19 nt, Homo sapiens
  misc_RNA (1)...(19): siRNA sense strand
cccagaagacaucaaagua

SEQ ID NO: 2062150 - RNA, 19 nt, Homo sapiens
  misc_RNA (1)...(19): siRNA sense strand
gauaacugcacagcuugua

SEQ ID NO: 2062151 - RNA, 19 nt, Homo sapiens
  misc_RNA (1)...(19): siRNA sense strand
gcgcuguguuguucauugu

SEQ ID NO: 2062152 - RNA, 19 nt, Homo sapiens
  misc_RNA (1)...(19): siRNA sense strand
aaagcagguuuggaaauau

SEQ ID NO: 2062153 - RNA, 19 nt, Homo sapiens
  misc_RNA (1)...(19): siRNA sense strand
ccagcaccuuagucacaua

SEQ ID NO: 2062154 - RNA, 19 nt, Homo sapiens
  misc_RNA (1)...(19): siRNA sense strand
gggcaaaauucucaacaga

SEQ ID NO: 2062155 - RNA, 19 nt, Homo sapiens
  misc_RNA (1)...(19): siRNA sense strand
gguccucuaucaauuguac

SEQ ID NO: 2062156 - RNA, 19 nt, Homo sapiens
  misc_RNA (1)...(19): siRNA sense strand
cagggacucuacugugguu

SEQ ID NO: 2062157 - RNA, 19 nt, Homo sapiens
  misc_RNA (1)...(19): siRNA sense strand
uguccuauuugcacugaaa

SEQ ID NO: 2062158 - RNA, 19 nt, Homo sapiens
  misc_RNA (1)...(19): siRNA sense strand
ccaaugaguucugcaacag

SEQ ID NO: 2062159 - RNA, 19 nt, Homo sapiens
  misc_RNA (1)...(19): siRNA sense strand
caauggacauaaacgugau

SEQ ID NO: 2062160 - RNA, 19 nt, Homo sapiens
  misc_RNA (1)...(19): siRNA sense strand
cuggauggcuaccucuuga

SEQ ID NO: 2062161 - RNA, 19 nt, Homo sapiens
  misc_RNA (1)...(19): siRNA sense strand
ugugaacagugcaaagguu

SEQ ID NO: 2062162 - RNA, 19 nt, Homo sapiens
  misc_RNA (1)...(19): siRNA sense strand
gcauggugcuguguacgau

SEQ ID NO: 2062163 - RNA, 19 nt, Homo sapiens
  misc_RNA (1)...(19): siRNA sense strand
ggaauuucagccagaagga

SEQ ID NO: 2062164 - RNA, 19 nt, Homo sapiens
  misc_RNA (1)...(19): siRNA sense strand
caucaagccaguccuuugu

SEQ ID NO: 2062165 - RNA, 19 nt, Homo sapiens
  misc_RNA (1)...(19): siRNA sense strand
gggagccucagcagaauug

SEQ ID NO: 2062166 - RNA, 19 nt, Homo sapiens
  misc_RNA (1)...(19): siRNA sense strand
gcaauaagcagugcauucc

SEQ ID NO: 2062167 - RNA, 19 nt, Homo sapiens
  misc_RNA (1)...(19): siRNA sense strand
agacaucaaaguaugcaaa

SEQ ID NO: 2062168 - RNA, 19 nt, Homo sapiens
  misc_RNA (1)...(19): siRNA sense strand
gaauuucagccagaaggaa

SEQ ID NO: 2062169 - RNA, 19 nt, Homo sapiens
  misc_RNA (1)...(19): siRNA sense strand
ugaauguccaguccauaaa

SEQ ID NO: 2062170 - RNA, 19 nt, Homo sapiens
  misc_RNA (1)...(19): siRNA sense strand
ugguggagauggaaacuuc

SEQ ID NO: 2062171 - RNA, 19 nt, Homo sapiens
  misc_RNA (1)...(19): siRNA sense strand
uuugggagcugccucuuuc

SEQ ID NO: 2062172 - RNA, 19 nt, Homo sapiens
  misc_RNA (1)...(19): siRNA sense strand
uaucaauuguaccaucugu

SEQ ID NO: 2062173 - RNA, 19 nt, Homo sapiens
  misc_RNA (1)...(19): siRNA sense strand
ccacuguccagcaaacuug

SEQ ID NO: 2062174 - RNA, 19 nt, Homo sapiens
  misc_RNA (1)...(19): siRNA sense strand
gagagagggcaucaaaguc

SEQ ID NO: 2062175 - RNA, 19 nt, Homo sapiens
  misc_RNA (1)...(19): siRNA sense strand
agagagagggcaucaaagu

SEQ ID NO: 2062176 - RNA, 19 nt, Homo sapiens
  misc_RNA (1)...(19): siRNA sense strand
uaaugugugucugcuugaa

SEQ ID NO: 2062177 - RNA, 19 nt, Homo sapiens
  misc_RNA (1)...(19): siRNA sense strand
ggacaagacucuggacauu

SEQ ID NO: 2062178 - RNA, 19 nt, Homo sapiens
  misc_RNA (1)...(19): siRNA sense strand
acaagacucuggacauuaa

SEQ ID NO: 2062179 - RNA, 19 nt, Homo sapiens
  misc_RNA (1)...(19): siRNA sense strand
gggacccgcucacaaauaa

SEQ ID NO: 2062180 - RNA, 19 nt, Homo sapiens
  misc_RNA (1)...(19): siRNA sense strand
gaucgugucuuccauagca

SEQ ID NO: 2062181 - RNA, 19 nt, Homo sapiens
  misc_RNA (1)...(19): siRNA sense strand
gacaagacucuggacauua

SEQ ID NO: 2062182 - RNA, 19 nt, Homo sapiens
  misc_RNA (1)...(19): siRNA sense strand
acaauacccuggccauaga

SEQ ID NO: 2062183 - RNA, 19 nt, Homo sapiens
  misc_RNA (1)...(19): siRNA sense strand
gcaccuggacuuaucaaga

SEQ ID NO: 2062184 - RNA, 19 nt, Homo sapiens
  misc_RNA (1)...(19): siRNA sense strand
caacaauacccuggccaua

SEQ ID NO: 2062185 - RNA, 19 nt, Homo sapiens
  misc_RNA (1)...(19): siRNA sense strand
caaggaacauuagggugaa

SEQ ID NO: 2062186 - RNA, 19 nt, Homo sapiens
  misc_RNA (1)...(19): siRNA sense strand
ugucaacccuuucuuugga

SEQ ID NO: 2062187 - RNA, 19 nt, Homo sapiens
  misc_RNA (1)...(19): siRNA sense strand
gcaggaugcucuggaugga

SEQ ID NO: 2062188 - RNA, 19 nt, Homo sapiens
  misc_RNA (1)...(19): siRNA sense strand
ggccauggcugugaagcuu

SEQ ID NO: 2062189 - RNA, 19 nt, Homo sapiens
  misc_RNA (1)...(19): siRNA sense strand
gaggaggugugggacaaga

SEQ ID NO: 2062190 - RNA, 19 nt, Homo sapiens
  misc_RNA (1)...(19): siRNA sense strand
uugcugggccucaacaaua

SEQ ID NO: 2062191 - RNA, 19 nt, Homo sapiens
  misc_RNA (1)...(19): siRNA sense strand
ggacuuaucaagacuagcu

SEQ ID NO: 2062192 - RNA, 19 nt, Homo sapiens
  misc_RNA (1)...(19): siRNA sense strand
gcugucaacccuuucuuug

SEQ ID NO: 2062193 - RNA, 19 nt, Homo sapiens
  misc_RNA (1)...(19): siRNA sense strand
ggugaucgugucuuccaua

SEQ ID NO: 2062194 - RNA, 19 nt, Homo sapiens
  misc_RNA (1)...(19): siRNA sense strand
gaagcuucauggagguauc

SEQ ID NO: 2062195 - RNA, 19 nt, Homo sapiens
  misc_RNA (1)...(19): siRNA sense strand
ucauggagguaucgauauc

SEQ ID NO: 2062196 - RNA, 19 nt, Homo sapiens
  misc_RNA (1)...(19): siRNA sense strand
gccggaagcagcagaaugu

SEQ ID NO: 2062197 - RNA, 19 nt, Homo sapiens
  misc_RNA (1)...(19): siRNA sense strand
cuucauggagguaucgaua

SEQ ID NO: 2062198 - RNA, 19 nt, Homo sapiens
  misc_RNA (1)...(19): siRNA sense strand
ucuccuggcuucaguccuu

SEQ ID NO: 2062199 - RNA, 19 nt, Homo sapiens
  misc_RNA (1)...(19): siRNA sense strand
uggcuucaguccuuacaau

SEQ ID NO: 2062200 - RNA, 19 nt, Homo sapiens
  misc_RNA (1)...(19): siRNA sense strand
caccuggacuuaucaagac

SEQ ID NO: 2062201 - RNA, 19 nt, Homo sapiens
  misc_RNA (1)...(19): siRNA sense strand
gugaucgugucuuccauag

SEQ ID NO: 2062202 - RNA, 19 nt, Homo sapiens
  misc_RNA (1)...(19): siRNA sense strand
ccgaggaggugugggacaa

SEQ ID NO: 2062203 - RNA, 19 nt, Homo sapiens
  misc_RNA (1)...(19): siRNA sense strand
gauauccuagucuccaaug

SEQ ID NO: 2062204 - RNA, 19 nt, Homo sapiens
  misc_RNA (1)...(19): siRNA sense strand
gucaacccuuucuuuggaa

SEQ ID NO: 2062205 - RNA, 19 nt, Homo sapiens
  misc_RNA (1)...(19): siRNA sense strand
aaauaagguggcccuggua

SEQ ID NO: 2062206 - RNA, 19 nt, Homo sapiens
  misc_RNA (1)...(19): siRNA sense strand
uuggccagcuccaggauga

SEQ ID NO: 2062207 - RNA, 19 nt, Homo sapiens
  misc_RNA (1)...(19): siRNA sense strand
gggacaagacucuggacau

SEQ ID NO: 2062208 - RNA, 19 nt, Homo sapiens
  misc_RNA (1)...(19): siRNA sense strand
cuucaguccuuacaauguc

SEQ ID NO: 2062209 - RNA, 19 nt, Homo sapiens
  misc_RNA (1)...(19): siRNA sense strand
gcuucaguccuuacaaugu

SEQ ID NO: 2062210 - RNA, 19 nt, Homo sapiens
  misc_RNA (1)...(19): siRNA sense strand
caguggugaucgugucuuc

SEQ ID NO: 2062211 - RNA, 19 nt, Homo sapiens
  misc_RNA (1)...(19): siRNA sense strand
gccugcaccuggacuuauc

SEQ ID NO: 2062212 - RNA, 19 nt, Homo sapiens
  misc_RNA (1)...(19): siRNA sense strand
aauaagguggcccugguaa

SEQ ID NO: 2062213 - RNA, 19 nt, Homo sapiens
  misc_RNA (1)...(19): siRNA sense strand
augcugcugucaacccuuu

SEQ ID NO: 2062214 - RNA, 19 nt, Homo sapiens
  misc_RNA (1)...(19): siRNA sense strand
gcaguggugccagaaaugg

SEQ ID NO: 2062215 - RNA, 19 nt, Homo sapiens
  misc_RNA (1)...(19): siRNA sense strand
uuggaagccuaauggaugu

SEQ ID NO: 2062216 - RNA, 19 nt, Homo sapiens
  misc_RNA (1)...(19): siRNA sense strand
ugccagaaauggagaaacg

SEQ ID NO: 2062217 - RNA, 19 nt, Homo sapiens
  misc_RNA (1)...(19): siRNA sense strand
gaacagacaggcuuacuua

SEQ ID NO: 2062218 - RNA, 19 nt, Homo sapiens
  misc_RNA (1)...(19): siRNA sense strand
caaauaaucuggacaacaa

SEQ ID NO: 2062219 - RNA, 19 nt, Homo sapiens
  misc_RNA (1)...(19): siRNA sense strand
gaagcuacguacuuuaaua

SEQ ID NO: 2062220 - RNA, 19 nt, Homo sapiens
  misc_RNA (1)...(19): siRNA sense strand
gcaaggccuucaaauauaa

SEQ ID NO: 2062221 - RNA, 19 nt, Homo sapiens
  misc_RNA (1)...(19): siRNA sense strand
ggacacagguucugaaaca

SEQ ID NO: 2062222 - RNA, 19 nt, Homo sapiens
  misc_RNA (1)...(19): siRNA sense strand
ccacaugucuguacucaaa

SEQ ID NO: 2062223 - RNA, 19 nt, Homo sapiens
  misc_RNA (1)...(19): siRNA sense strand
caacauauccacuccauuu

SEQ ID NO: 2062224 - RNA, 19 nt, Homo sapiens
  misc_RNA (1)...(19): siRNA sense strand
ggaagaggaagaugaaaua

SEQ ID NO: 2062225 - RNA, 19 nt, Homo sapiens
  misc_RNA (1)...(19): siRNA sense strand
ggagacagaucaguaauau

SEQ ID NO: 2062226 - RNA, 19 nt, Homo sapiens
  misc_RNA (1)...(19): siRNA sense strand
ggcaaggccuucaaauaua

SEQ ID NO: 2062227 - RNA, 19 nt, Homo sapiens
  misc_RNA (1)...(19): siRNA sense strand
ccacaucagugucagauuu

SEQ ID NO: 2062228 - RNA, 19 nt, Homo sapiens
  misc_RNA (1)...(19): siRNA sense strand
gaaacaaguuggagaaugg

SEQ ID NO: 2062229 - RNA, 19 nt, Homo sapiens
  misc_RNA (1)...(19): siRNA sense strand
gcacaugaaucacagguau

SEQ ID NO: 2062230 - RNA, 19 nt, Homo sapiens
  misc_RNA (1)...(19): siRNA sense strand
guaaauggccgaaugagaa

SEQ ID NO: 2062231 - RNA, 19 nt, Homo sapiens
  misc_RNA (1)...(19): siRNA sense strand
cagaagaaaugaaggaaga

SEQ ID NO: 2062232 - RNA, 19 nt, Homo sapiens
  misc_RNA (1)...(19): siRNA sense strand
ugaaggagcacaucaagua

SEQ ID NO: 2062233 - RNA, 19 nt, Homo sapiens
  misc_RNA (1)...(19): siRNA sense strand
cugcaaggcugaagaaauu

SEQ ID NO: 2062234 - RNA, 19 nt, Homo sapiens
  misc_RNA (1)...(19): siRNA sense strand
uauggaagauggcauguaa

SEQ ID NO: 2062235 - RNA, 19 nt, Homo sapiens
  misc_RNA (1)...(19): siRNA sense strand
ccaccgagcugcugaugaa

SEQ ID NO: 2062236 - RNA, 19 nt, Homo sapiens
  misc_RNA (1)...(19): siRNA sense strand
ccaaacagcuucucuucug

SEQ ID NO: 2062237 - RNA, 19 nt, Homo sapiens
  misc_RNA (1)...(19): siRNA sense strand
gagaagcuacguacuuuaa

SEQ ID NO: 2062238 - RNA, 19 nt, Homo sapiens
  misc_RNA (1)...(19): siRNA sense strand
ggugaacuaugacaaugua

SEQ ID NO: 2062239 - RNA, 19 nt, Homo sapiens
  misc_RNA (1)...(19): siRNA sense strand
ggacagaucagcaccaaau

SEQ ID NO: 2062240 - RNA, 19 nt, Homo sapiens
  misc_RNA (1)...(19): siRNA sense strand
uaauaaagcccuccucuug

SEQ ID NO: 2062241 - RNA, 19 nt, Homo sapiens
  misc_RNA (1)...(19): siRNA sense strand
ggaagacuaugacacuaug

SEQ ID NO: 2062242 - RNA, 19 nt, Homo sapiens
  misc_RNA (1)...(19): siRNA sense strand
guugaaagguuaucacaug

SEQ ID NO: 2062243 - RNA, 19 nt, Homo sapiens
  misc_RNA (1)...(19): siRNA sense strand
gcacuagucccuuuaugaa

SEQ ID NO: 2062244 - RNA, 19 nt, Homo sapiens
  misc_RNA (1)...(19): siRNA sense strand
gaaagaacaccugcgaauu

SEQ ID NO: 2062245 - RNA, 19 nt, Homo sapiens
  misc_RNA (1)...(19): siRNA sense strand
uaauagauuuggucacuga

SEQ ID NO: 2062246 - RNA, 19 nt, Homo sapiens
  misc_RNA (1)...(19): siRNA sense strand
gaaagguuaucacaugaag

SEQ ID NO: 2062247 - RNA, 19 nt, Homo sapiens
  misc_RNA (1)...(19): siRNA sense strand
gauacgagaugaagaagag

SEQ ID NO: 2062248 - RNA, 19 nt, Homo sapiens
  misc_RNA (1)...(19): siRNA sense strand
gcaugaacguuaccuuugu

SEQ ID NO: 2062249 - RNA, 19 nt, Homo sapiens
  misc_RNA (1)...(19): siRNA sense strand
gcaagaaauguauugguuu

SEQ ID NO: 2062250 - RNA, 19 nt, Homo sapiens
  misc_RNA (1)...(19): siRNA sense strand
gagcuugacuacugacuca

SEQ ID NO: 2062251 - RNA, 19 nt, Homo sapiens
  misc_RNA (1)...(19): siRNA sense strand
gaaggaaugguuugaacaa

SEQ ID NO: 2062252 - RNA, 19 nt, Homo sapiens
  misc_RNA (1)...(19): siRNA sense strand
uaauacuccuucucccuua

SEQ ID NO: 2062253 - RNA, 19 nt, Homo sapiens
  misc_RNA (1)...(19): siRNA sense strand
uaagaugaaugaagagauc

SEQ ID NO: 2062254 - RNA, 19 nt, Homo sapiens
  misc_RNA (1)...(19): siRNA sense strand
gcaugugacuuaugugaca

SEQ ID NO: 2062255 - RNA, 19 nt, Homo sapiens
  misc_RNA (1)...(19): siRNA sense strand
uaacaaaaccuucccauuu

SEQ ID NO: 2062256 - RNA, 19 nt, Homo sapiens
  misc_RNA (1)...(19): siRNA sense strand
ggaaugguuugaacaacga

SEQ ID NO: 2062257 - RNA, 19 nt, Homo sapiens
  misc_RNA (1)...(19): siRNA sense strand
aagagaagcuacguacuuu

SEQ ID NO: 2062258 - RNA, 19 nt, Homo sapiens
  misc_RNA (1)...(19): siRNA sense strand
guaagaaagcguuuaaaca

SEQ ID NO: 2062259 - RNA, 19 nt, Homo sapiens
  misc_RNA (1)...(19): siRNA sense strand
ccucugaacuugacuuuua

SEQ ID NO: 2062260 - RNA, 19 nt, Homo sapiens
  misc_RNA (1)...(19): siRNA sense strand
gaagaggaagaugaaauaa

SEQ ID NO: 2062261 - RNA, 19 nt, Homo sapiens
  misc_RNA (1)...(19): siRNA sense strand
ugacuuaugugacaagaca

SEQ ID NO: 2062262 - RNA, 19 nt, Homo sapiens
  misc_RNA (1)...(19): siRNA sense strand
gcacaucagcagcaagaaa

SEQ ID NO: 2062263 - RNA, 19 nt, Homo sapiens
  misc_RNA (1)...(19): siRNA sense strand
gaagaaugaagagaacuuu

SEQ ID NO: 2062264 - RNA, 19 nt, Homo sapiens
  misc_RNA (1)...(19): siRNA sense strand
gaaaguaccagcggaaaca

SEQ ID NO: 2062265 - RNA, 19 nt, Homo sapiens
  misc_RNA (1)...(19): siRNA sense strand
caaacagcuucucuucuga

SEQ ID NO: 2062266 - RNA, 19 nt, Homo sapiens
  misc_RNA (1)...(19): siRNA sense strand
cauaacaucaccaucuaua

SEQ ID NO: 2062267 - RNA, 19 nt, Homo sapiens
  misc_RNA (1)...(19): siRNA sense strand
caaggagacagaucaguaa

SEQ ID NO: 2062268 - RNA, 19 nt, Homo sapiens
  misc_RNA (1)...(19): siRNA sense strand
gaaggaagacuaugacacu

SEQ ID NO: 2062269 - RNA, 19 nt, Homo sapiens
  misc_RNA (1)...(19): siRNA sense strand
caaaucagaccacgaggaa

SEQ ID NO: 2062270 - RNA, 19 nt, Homo sapiens
  misc_RNA (1)...(19): siRNA sense strand
gaagaggaagaaagugaaa

SEQ ID NO: 2062271 - RNA, 19 nt, Homo sapiens
  misc_RNA (1)...(19): siRNA sense strand
cuaauucuguuucuucuuc

SEQ ID NO: 2062272 - RNA, 19 nt, Homo sapiens
  misc_RNA (1)...(19): siRNA sense strand
agaaagcguuuaaacacaa

SEQ ID NO: 2062273 - RNA, 19 nt, Homo sapiens
  misc_RNA (1)...(19): siRNA sense strand
gacagagaguggcauguau

SEQ ID NO: 2062274 - RNA, 19 nt, Homo sapiens
  misc_RNA (1)...(19): siRNA sense strand
gaacccauuuagugccaaa

SEQ ID NO: 2062275 - RNA, 19 nt, Homo sapiens
  misc_RNA (1)...(19): siRNA sense strand
ucaaggagacagaucagua

SEQ ID NO: 2062276 - RNA, 19 nt, Homo sapiens
  misc_RNA (1)...(19): siRNA sense strand
ugacaagacauuccagaaa

SEQ ID NO: 2062277 - RNA, 19 nt, Homo sapiens
  misc_RNA (1)...(19): siRNA sense strand
gcacaacaacgagauucua

SEQ ID NO: 2062278 - RNA, 19 nt, Homo sapiens
  misc_RNA (1)...(19): siRNA sense strand
agaaggagcacgagaaaga

SEQ ID NO: 2062279 - RNA, 19 nt, Homo sapiens
  misc_RNA (1)...(19): siRNA sense strand
gacaagacauuccagaaaa

SEQ ID NO: 2062280 - RNA, 19 nt, Homo sapiens
  misc_RNA (1)...(19): siRNA sense strand
caugaacguuaccuuugua

SEQ ID NO: 2062281 - RNA, 19 nt, Homo sapiens
  misc_RNA (1)...(19): siRNA sense strand
caccagcccuuuaggaguu

SEQ ID NO: 2062282 - RNA, 19 nt, Homo sapiens
  misc_RNA (1)...(19): siRNA sense strand
aaagaacaccugcgaauuc

SEQ ID NO: 2062283 - RNA, 19 nt, Homo sapiens
  misc_RNA (1)...(19): siRNA sense strand
uggcaaggccuucaaauau

SEQ ID NO: 2062284 - RNA, 19 nt, Homo sapiens
  misc_RNA (1)...(19): siRNA sense strand
caucagauuuugaggaaua

SEQ ID NO: 2062285 - RNA, 19 nt, Homo sapiens
  misc_RNA (1)...(19): siRNA sense strand
ggaggaagaggaagaaagu

SEQ ID NO: 2062286 - RNA, 19 nt, Homo sapiens
  misc_RNA (1)...(19): siRNA sense strand
aaacacaagcaccaccuua

SEQ ID NO: 2062287 - RNA, 19 nt, Homo sapiens
  misc_RNA (1)...(19): siRNA sense strand
guaugcaugugacuuaugu

SEQ ID NO: 2062288 - RNA, 19 nt, Homo sapiens
  misc_RNA (1)...(19): siRNA sense strand
uagcagaacuccacaacag

SEQ ID NO: 2062289 - RNA, 19 nt, Homo sapiens
  misc_RNA (1)...(19): siRNA sense strand
gagaggaagaggaagauga

SEQ ID NO: 2062290 - RNA, 19 nt, Homo sapiens
  misc_RNA (1)...(19): siRNA sense strand
gaacaaggaguuacuucuc

SEQ ID NO: 2062291 - RNA, 19 nt, Homo sapiens
  misc_RNA (1)...(19): siRNA sense strand
ccacuagacuucaaugacu

SEQ ID NO: 2062292 - RNA, 19 nt, Homo sapiens
  misc_RNA (1)...(19): siRNA sense strand
cgaaugagaaacaauauca

SEQ ID NO: 2062293 - RNA, 19 nt, Homo sapiens
  misc_RNA (1)...(19): siRNA sense strand
caacaacgagauucuacaa

SEQ ID NO: 2062294 - RNA, 19 nt, Homo sapiens
  misc_RNA (1)...(19): siRNA sense strand
agaggaagaugaaauaagg

SEQ ID NO: 2062295 - RNA, 19 nt, Homo sapiens
  misc_RNA (1)...(19): siRNA sense strand
uagauuuggucacugauga

SEQ ID NO: 2062296 - RNA, 19 nt, Homo sapiens
  misc_RNA (1)...(19): siRNA sense strand
aaacagaaccacuagacuu

SEQ ID NO: 2062297 - RNA, 19 nt, Homo sapiens
  misc_RNA (1)...(19): siRNA sense strand
gaacaccugcgaauucaca

SEQ ID NO: 2062298 - RNA, 19 nt, Homo sapiens
  misc_RNA (1)...(19): siRNA sense strand
ggaacgcgauggucaugca

SEQ ID NO: 2062299 - RNA, 19 nt, Homo sapiens
  misc_RNA (1)...(19): siRNA sense strand
ggaagacaauauggaagau

SEQ ID NO: 2062300 - RNA, 19 nt, Homo sapiens
  misc_RNA (1)...(19): siRNA sense strand
ggaagaggaagaaagugaa

SEQ ID NO: 2062301 - RNA, 19 nt, Homo sapiens
  misc_RNA (1)...(19): siRNA sense strand
gaaagaacccaaaaguauu

SEQ ID NO: 2062302 - RNA, 19 nt, Homo sapiens
  misc_RNA (1)...(19): siRNA sense strand
gccguuagcucccaacagu

SEQ ID NO: 2062303 - RNA, 19 nt, Homo sapiens
  misc_RNA (1)...(19): siRNA sense strand
uaagaaacaaguuggagaa

SEQ ID NO: 2062304 - RNA, 19 nt, Homo sapiens
  misc_RNA (1)...(19): siRNA sense strand
uaaacaccaucugaaagaa

SEQ ID NO: 2062305 - RNA, 19 nt, Homo sapiens
  misc_RNA (1)...(19): siRNA sense strand
uaacaaugguacagugaag

SEQ ID NO: 2062306 - RNA, 19 nt, Homo sapiens
  misc_RNA (1)...(19): siRNA sense strand
cgacauaaauacgaacaca

SEQ ID NO: 2062307 - RNA, 19 nt, Homo sapiens
  misc_RNA (1)...(19): siRNA sense strand
caacuggagcagcuacuuu

SEQ ID NO: 2062308 - RNA, 19 nt, Homo sapiens
  misc_RNA (1)...(19): siRNA sense strand
ugccaaaccuuuauacaca

SEQ ID NO: 2062309 - RNA, 19 nt, Homo sapiens
  misc_RNA (1)...(19): siRNA sense strand
ggacugcaaggcugaagaa

SEQ ID NO: 2062310 - RNA, 19 nt, Homo sapiens
  misc_RNA (1)...(19): siRNA sense strand
guggcaaggccuucaaaua

SEQ ID NO: 2062311 - RNA, 19 nt, Homo sapiens
  misc_RNA (1)...(19): siRNA sense strand
gcaucaguuuagaucauaa

SEQ ID NO: 2062312 - RNA, 19 nt, Homo sapiens
  misc_RNA (1)...(19): siRNA sense strand
ugucuguacucaaagcaua

SEQ ID NO: 2062313 - RNA, 19 nt, Homo sapiens
  misc_RNA (1)...(19): siRNA sense strand
gauugagaaccacaacaua

SEQ ID NO: 2062314 - RNA, 19 nt, Homo sapiens
  misc_RNA (1)...(19): siRNA sense strand
gcuacguacuuuaauagau

SEQ ID NO: 2062315 - RNA, 19 nt, Homo sapiens
  misc_RNA (1)...(19): siRNA sense strand
aaagagaagcuacguacuu

SEQ ID NO: 2062316 - RNA, 19 nt, Homo sapiens
  misc_RNA (1)...(19): siRNA sense strand
cgagaaagggcacuuggaa

SEQ ID NO: 2062317 - RNA, 19 nt, Homo sapiens
  misc_RNA (1)...(19): siRNA sense strand
gaagagaaaugccauaaau

SEQ ID NO: 2062318 - RNA, 19 nt, Homo sapiens
  misc_RNA (1)...(19): siRNA sense strand
gcacauaccuuauacaaca

SEQ ID NO: 2062319 - RNA, 19 nt, Homo sapiens
  misc_RNA (1)...(19): siRNA sense strand
gaaagacccuaucagugua

SEQ ID NO: 2062320 - RNA, 19 nt, Homo sapiens
  misc_RNA (1)...(19): siRNA sense strand
gaaauucauugcuuguuga

SEQ ID NO: 2062321 - RNA, 19 nt, Homo sapiens
  misc_RNA (1)...(19): siRNA sense strand
guauaaagaugucaugaug

SEQ ID NO: 2062322 - RNA, 19 nt, Homo sapiens
  misc_RNA (1)...(19): siRNA sense strand
aagaagagcuuuagucgaa

SEQ ID NO: 2062323 - RNA, 19 nt, Homo sapiens
  misc_RNA (1)...(19): siRNA sense strand
ggaaaucacaccuuauuga

SEQ ID NO: 2062324 - RNA, 19 nt, Homo sapiens
  misc_RNA (1)...(19): siRNA sense strand
ggagaagacuuauccauac

SEQ ID NO: 2062325 - RNA, 19 nt, Homo sapiens
  misc_RNA (1)...(19): siRNA sense strand
ccaaauugcagucuuguua

SEQ ID NO: 2062326 - RNA, 19 nt, Homo sapiens
  misc_RNA (1)...(19): siRNA sense strand
gaaaagcccuaucuaugua

SEQ ID NO: 2062327 - RNA, 19 nt, Homo sapiens
  misc_RNA (1)...(19): siRNA sense strand
ugagaaaccuuaucacugu

SEQ ID NO: 2062328 - RNA, 19 nt, Homo sapiens
  misc_RNA (1)...(19): siRNA sense strand
gaacaucagaggauccaua

SEQ ID NO: 2062329 - RNA, 19 nt, Homo sapiens
  misc_RNA (1)...(19): siRNA sense strand
agucggagcucauuccuua

SEQ ID NO: 2062330 - RNA, 19 nt, Homo sapiens
  misc_RNA (1)...(19): siRNA sense strand
gaaaugccauaaaugugaa

SEQ ID NO: 2062331 - RNA, 19 nt, Homo sapiens
  misc_RNA (1)...(19): siRNA sense strand
acacuaacauuauccguaa

SEQ ID NO: 2062332 - RNA, 19 nt, Homo sapiens
  misc_RNA (1)...(19): siRNA sense strand
agagaaaccuuauaagugu

SEQ ID NO: 2062333 - RNA, 19 nt, Homo sapiens
  misc_RNA (1)...(19): siRNA sense strand
gaaaggcccuaugagugua

SEQ ID NO: 2062334 - RNA, 19 nt, Homo sapiens
  misc_RNA (1)...(19): siRNA sense strand
gcaguucauuuguuauuga

SEQ ID NO: 2062335 - RNA, 19 nt, Homo sapiens
  misc_RNA (1)...(19): siRNA sense strand
cagagaauguucagagaaa

SEQ ID NO: 2062336 - RNA, 19 nt, Homo sapiens
  misc_RNA (1)...(19): siRNA sense strand
gagagaaaccuuauaagug

SEQ ID NO: 2062337 - RNA, 19 nt, Homo sapiens
  misc_RNA (1)...(19): siRNA sense strand
agccggagcucauuucuua

SEQ ID NO: 2062338 - RNA, 19 nt, Homo sapiens
  misc_RNA (1)...(19): siRNA sense strand
gaacagagauaaggaugag

SEQ ID NO: 2062339 - RNA, 19 nt, Homo sapiens
  misc_RNA (1)...(19): siRNA sense strand
ccauaaaugugaugaaugu

SEQ ID NO: 2062340 - RNA, 19 nt, Homo sapiens
  misc_RNA (1)...(19): siRNA sense strand
aguagaagcucaggucuua

SEQ ID NO: 2062341 - RNA, 19 nt, Homo sapiens
  misc_RNA (1)...(19): siRNA sense strand
ccauaaaugugaagaaugu

SEQ ID NO: 2062342 - RNA, 19 nt, Homo sapiens
  misc_RNA (1)...(19): siRNA sense strand
gcucaacccuuauuagaca

SEQ ID NO: 2062343 - RNA, 19 nt, Homo sapiens
  misc_RNA (1)...(19): siRNA sense strand
agagaagccuguauaaaga

SEQ ID NO: 2062344 - RNA, 19 nt, Homo sapiens
  misc_RNA (1)...(19): siRNA sense strand
gggagaagacuuauccaua

SEQ ID NO: 2062345 - RNA, 19 nt, Homo sapiens
  misc_RNA (1)...(19): siRNA sense strand
ggaaaggcccuaugagugu

SEQ ID NO: 2062346 - RNA, 19 nt, Homo sapiens
  misc_RNA (1)...(19): siRNA sense strand
ccauaaauguggugaaugu

SEQ ID NO: 2062347 - RNA, 19 nt, Homo sapiens
  misc_RNA (1)...(19): siRNA sense strand
cgaaauucauugcuuguug

SEQ ID NO: 2062348 - RNA, 19 nt, Homo sapiens
  misc_RNA (1)...(19): siRNA sense strand
agugugagcucaacccuua

SEQ ID NO: 2062349 - RNA, 19 nt, Homo sapiens
  misc_RNA (1)...(19): siRNA sense strand
ccacaggguguaauaguua

SEQ ID NO: 2062350 - RNA, 19 nt, Homo sapiens
  misc_RNA (1)...(19): siRNA sense strand
ccaagaaacccaugaaugu

SEQ ID NO: 2062351 - RNA, 19 nt, Homo sapiens
  misc_RNA (1)...(19): siRNA sense strand
ggagagaaaccuuauaagu

SEQ ID NO: 2062352 - RNA, 19 nt, Homo sapiens
  misc_RNA (1)...(19): siRNA sense strand
gggaaagccuucaguugga

SEQ ID NO: 2062353 - RNA, 19 nt, Homo sapiens
  misc_RNA (1)...(19): siRNA sense strand
gaagagcuuuagucgaaau

SEQ ID NO: 2062354 - RNA, 19 nt, Homo sapiens
  misc_RNA (1)...(19): siRNA sense strand
gcucagagaagccuguaua

SEQ ID NO: 2062355 - RNA, 19 nt, Homo sapiens
  misc_RNA (1)...(19): siRNA sense strand
gauccaaauugcagucuug

SEQ ID NO: 2062356 - RNA, 19 nt, Homo sapiens
  misc_RNA (1)...(19): siRNA sense strand
gaagacuuauccauacaau

SEQ ID NO: 2062357 - RNA, 19 nt, Homo sapiens
  misc_RNA (1)...(19): siRNA sense strand
ggagaaagacccuaucagu

SEQ ID NO: 2062358 - RNA, 19 nt, Homo sapiens
  misc_RNA (1)...(19): siRNA sense strand
gcucauuucuuauugaaca

SEQ ID NO: 2062359 - RNA, 19 nt, Homo sapiens
  misc_RNA (1)...(19): siRNA sense strand
gagcucauuucuuauugaa

SEQ ID NO: 2062360 - RNA, 19 nt, Homo sapiens
  misc_RNA (1)...(19): siRNA sense strand
gagaaaccuuaucacugua

SEQ ID NO: 2062361 - RNA, 19 nt, Homo sapiens
  misc_RNA (1)...(19): siRNA sense strand
caacagcgcagucuuguca

SEQ ID NO: 2062362 - RNA, 19 nt, Homo sapiens
  misc_RNA (1)...(19): siRNA sense strand
gauccauacuggugaaaga

SEQ ID NO: 2062363 - RNA, 19 nt, Homo sapiens
  misc_RNA (1)...(19): siRNA sense strand
gagaaacauuugaacuugu

SEQ ID NO: 2062364 - RNA, 19 nt, Homo sapiens
  misc_RNA (1)...(19): siRNA sense strand
gcucauuccuuauugaaca

SEQ ID NO: 2062365 - RNA, 19 nt, Homo sapiens
  misc_RNA (1)...(19): siRNA sense strand
agacuuauccauacaauga

SEQ ID NO: 2062366 - RNA, 19 nt, Homo sapiens
  misc_RNA (1)...(19): siRNA sense strand
ggaaccacaggguguaaua

SEQ ID NO: 2062367 - RNA, 19 nt, Homo sapiens
  misc_RNA (1)...(19): siRNA sense strand
agucagcuuuguaaucuua

SEQ ID NO: 2062368 - RNA, 19 nt, Homo sapiens
  misc_RNA (1)...(19): siRNA sense strand
ggagcucauuucuuauuga

SEQ ID NO: 2062369 - RNA, 19 nt, Homo sapiens
  misc_RNA (1)...(19): siRNA sense strand
gagaagacuuauccauaca

SEQ ID NO: 2062370 - RNA, 19 nt, Homo sapiens
  misc_RNA (1)...(19): siRNA sense strand
ggaaagaccccauaaaugu

SEQ ID NO: 2062371 - RNA, 19 nt, Homo sapiens
  misc_RNA (1)...(19): siRNA sense strand
ggaaagccuucaguuggaa

SEQ ID NO: 2062372 - RNA, 19 nt, Homo sapiens
  misc_RNA (1)...(19): siRNA sense strand
gaacaucagagaauucaca

SEQ ID NO: 2062373 - RNA, 19 nt, Homo sapiens
  misc_RNA (1)...(19): siRNA sense strand
gagcucaacccuuauuaga

SEQ ID NO: 2062374 - RNA, 19 nt, Homo sapiens
  misc_RNA (1)...(19): siRNA sense strand
cagagaagccuguauaaag

SEQ ID NO: 2062375 - RNA, 19 nt, Homo sapiens
  misc_RNA (1)...(19): siRNA sense strand
gaugaggagccaacuguaa

SEQ ID NO: 2062376 - RNA, 19 nt, Homo sapiens
  misc_RNA (1)...(19): siRNA sense strand
agagaaacauuugaacuug

SEQ ID NO: 2062377 - RNA, 19 nt, Homo sapiens
  misc_RNA (1)...(19): siRNA sense strand
agucgcaguucauuuguua

SEQ ID NO: 2062378 - RNA, 19 nt, Homo sapiens
  misc_RNA (1)...(19): siRNA sense strand
gaaauugaccaggauccua

SEQ ID NO: 2062379 - RNA, 19 nt, Homo sapiens
  misc_RNA (1)...(19): siRNA sense strand
gaacucgggucuuauucag

SEQ ID NO: 2062380 - RNA, 19 nt, Homo sapiens
  misc_RNA (1)...(19): siRNA sense strand
ggagcucauuccuuauuga

SEQ ID NO: 2062381 - RNA, 19 nt, Homo sapiens
  misc_RNA (1)...(19): siRNA sense strand
agaaagacccuaucagugu

SEQ ID NO: 2062382 - RNA, 19 nt, Homo sapiens
  misc_RNA (1)...(19): siRNA sense strand
caggagagaaaccuuauaa

SEQ ID NO: 2062383 - RNA, 19 nt, Homo sapiens
  misc_RNA (1)...(19): siRNA sense strand
auaaagaugucaugaugga

SEQ ID NO: 2062384 - RNA, 19 nt, Homo sapiens
  misc_RNA (1)...(19): siRNA sense strand
gagcuuuagucgaaauuca

SEQ ID NO: 2062385 - RNA, 19 nt, Homo sapiens
  misc_RNA (1)...(19): siRNA sense strand
ugaagaaauugaggaagaa

SEQ ID NO: 2062386 - RNA, 19 nt, Homo sapiens
  misc_RNA (1)...(19): siRNA sense strand
gcaaggcccauuucauuca

SEQ ID NO: 2062387 - RNA, 19 nt, Homo sapiens
  misc_RNA (1)...(19): siRNA sense strand
ugaacuuguugguagguua

SEQ ID NO: 2062388 - RNA, 19 nt, Homo sapiens
  misc_RNA (1)...(19): siRNA sense strand
gccuuuaauugccguauuu

SEQ ID NO: 2062389 - RNA, 19 nt, Homo sapiens
  misc_RNA (1)...(19): siRNA sense strand
ccauaaaugugaggaaugu

SEQ ID NO: 2062390 - RNA, 19 nt, Homo sapiens
  misc_RNA (1)...(19): siRNA sense strand
agaaaugccauaaauguga

SEQ ID NO: 2062391 - RNA, 19 nt, Homo sapiens
  misc_RNA (1)...(19): siRNA sense strand
ccgcaaggcccauuucauu

SEQ ID NO: 2062392 - RNA, 19 nt, Homo sapiens
  misc_RNA (1)...(19): siRNA sense strand
gguccauacuggugagaaa

SEQ ID NO: 2062393 - RNA, 19 nt, Homo sapiens
  misc_RNA (1)...(19): siRNA sense strand
gaaaucacaccuuauugag

SEQ ID NO: 2062394 - RNA, 19 nt, Homo sapiens
  misc_RNA (1)...(19): siRNA sense strand
ccauaaauguagugacugu

SEQ ID NO: 2062395 - RNA, 19 nt, Homo sapiens
  misc_RNA (1)...(19): siRNA sense strand
uguaaucaguguaaacaga

SEQ ID NO: 2062396 - RNA, 19 nt, Homo sapiens
  misc_RNA (1)...(19): siRNA sense strand
caaugaaacuaaggaaagu

SEQ ID NO: 2062397 - RNA, 19 nt, Homo sapiens
  misc_RNA (1)...(19): siRNA sense strand
uugaagaaauugaggaaga

SEQ ID NO: 2062398 - RNA, 19 nt, Homo sapiens
  misc_RNA (1)...(19): siRNA sense strand
gugcucaucuuguacaaca

SEQ ID NO: 2062399 - RNA, 19 nt, Homo sapiens
  misc_RNA (1)...(19): siRNA sense strand
gagaaaugccauaaaugug

SEQ ID NO: 2062400 - RNA, 19 nt, Homo sapiens
  misc_RNA (1)...(19): siRNA sense strand
guaauaaaccccauaaaug

SEQ ID NO: 2062401 - RNA, 19 nt, Homo sapiens
  misc_RNA (1)...(19): siRNA sense strand
ggugagagacccuaucugu

SEQ ID NO: 2062402 - RNA, 19 nt, Homo sapiens
  misc_RNA (1)...(19): siRNA sense strand
agagaaaugccauaaaugu

SEQ ID NO: 2062403 - RNA, 19 nt, Homo sapiens
  misc_RNA (1)...(19): siRNA sense strand
ggugaaagaccuuaucagu

SEQ ID NO: 2062404 - RNA, 19 nt, Homo sapiens
  misc_RNA (1)...(19): siRNA sense strand
ggaaauaccaagggaaucu

SEQ ID NO: 2062405 - RNA, 19 nt, Homo sapiens
  misc_RNA (1)...(19): siRNA sense strand
uguuagugcucaucuugua

SEQ ID NO: 2062406 - RNA, 19 nt, Homo sapiens
  misc_RNA (1)...(19): siRNA sense strand
agucagcuuugcaaccuua

SEQ ID NO: 2062407 - RNA, 19 nt, Homo sapiens
  misc_RNA (1)...(19): siRNA sense strand
gaggauccauacuggugaa

SEQ ID NO: 2062408 - RNA, 19 nt, Homo sapiens
  misc_RNA (1)...(19): siRNA sense strand
gauccuauggguagagaaa

SEQ ID NO: 2062409 - RNA, 19 nt, Homo sapiens
  misc_RNA (1)...(19): siRNA sense strand
acacaggagagaaaccuua

SEQ ID NO: 2062410 - RNA, 19 nt, Homo sapiens
  misc_RNA (1)...(19): siRNA sense strand
caacaucaaaggguccaua

SEQ ID NO: 2062411 - RNA, 19 nt, Homo sapiens
  misc_RNA (1)...(19): siRNA sense strand
agaccaaacucagaagaga

SEQ ID NO: 2062412 - RNA, 19 nt, Homo sapiens
  misc_RNA (1)...(19): siRNA sense strand
gugcaaagagugugggaaa

SEQ ID NO: 2062413 - RNA, 19 nt, Homo sapiens
  misc_RNA (1)...(19): siRNA sense strand
caaggcccauuucauucaa

SEQ ID NO: 2062414 - RNA, 19 nt, Homo sapiens
  misc_RNA (1)...(19): siRNA sense strand
caaauugcagucuuguuau

SEQ ID NO: 2062415 - RNA, 19 nt, Homo sapiens
  misc_RNA (1)...(19): siRNA sense strand
gauggagaauuauggaaac

SEQ ID NO: 2062416 - RNA, 19 nt, Homo sapiens
  misc_RNA (1)...(19): siRNA sense strand
guggugaagccuuuaauug

SEQ ID NO: 2062417 - RNA, 19 nt, Homo sapiens
  misc_RNA (1)...(19): siRNA sense strand
gaagagaaaugccauaaau

SEQ ID NO: 2062418 - RNA, 19 nt, Homo sapiens
  misc_RNA (1)...(19): siRNA sense strand
gcacauaccuuauacaaca

SEQ ID NO: 2062419 - RNA, 19 nt, Homo sapiens
  misc_RNA (1)...(19): siRNA sense strand
gaaagacccuaucagugua

SEQ ID NO: 2062420 - RNA, 19 nt, Homo sapiens
  misc_RNA (1)...(19): siRNA sense strand
gaaauucauugcuuguuga

SEQ ID NO: 2062421 - RNA, 19 nt, Homo sapiens
  misc_RNA (1)...(19): siRNA sense strand
aagaagagcuuuagucgaa

SEQ ID NO: 2062422 - RNA, 19 nt, Homo sapiens
  misc_RNA (1)...(19): siRNA sense strand
ggaaaucacaccuuauuga

SEQ ID NO: 2062423 - RNA, 19 nt, Homo sapiens
  misc_RNA (1)...(19): siRNA sense strand
ggagaagacuuauccauac

SEQ ID NO: 2062424 - RNA, 19 nt, Homo sapiens
  misc_RNA (1)...(19): siRNA sense strand
ccaaauugcagucuuguua

SEQ ID NO: 2062425 - RNA, 19 nt, Homo sapiens
  misc_RNA (1)...(19): siRNA sense strand
gaaaagcccuaucuaugua

SEQ ID NO: 2062426 - RNA, 19 nt, Homo sapiens
  misc_RNA (1)...(19): siRNA sense strand
ugagaaaccuuaucacugu

SEQ ID NO: 2062427 - RNA, 19 nt, Homo sapiens
  misc_RNA (1)...(19): siRNA sense strand
gaacaucagaggauccaua

SEQ ID NO: 2062428 - RNA, 19 nt, Homo sapiens
  misc_RNA (1)...(19): siRNA sense strand
agucggagcucauuccuua

SEQ ID NO: 2062429 - RNA, 19 nt, Homo sapiens
  misc_RNA (1)...(19): siRNA sense strand
gaaaugccauaaaugugaa

SEQ ID NO: 2062430 - RNA, 19 nt, Homo sapiens
  misc_RNA (1)...(19): siRNA sense strand
acacuaacauuauccguaa

SEQ ID NO: 2062431 - RNA, 19 nt, Homo sapiens
  misc_RNA (1)...(19): siRNA sense strand
agagaaaccuuauaagugu

SEQ ID NO: 2062432 - RNA, 19 nt, Homo sapiens
  misc_RNA (1)...(19): siRNA sense strand
gaaaggcccuaugagugua

SEQ ID NO: 2062433 - RNA, 19 nt, Homo sapiens
  misc_RNA (1)...(19): siRNA sense strand
gcaguucauuuguuauuga

SEQ ID NO: 2062434 - RNA, 19 nt, Homo sapiens
  misc_RNA (1)...(19): siRNA sense strand
cagagaauguucagagaaa

SEQ ID NO: 2062435 - RNA, 19 nt, Homo sapiens
  misc_RNA (1)...(19): siRNA sense strand
gagagaaaccuuauaagug

SEQ ID NO: 2062436 - RNA, 19 nt, Homo sapiens
  misc_RNA (1)...(19): siRNA sense strand
agccggagcucauuucuua

SEQ ID NO: 2062437 - RNA, 19 nt, Homo sapiens
  misc_RNA (1)...(19): siRNA sense strand
ccauaaaugugaagaaugu

SEQ ID NO: 2062438 - RNA, 19 nt, Homo sapiens
  misc_RNA (1)...(19): siRNA sense strand
ccauaaaugugaugaaugu

SEQ ID NO: 2062439 - RNA, 19 nt, Homo sapiens
  misc_RNA (1)...(19): siRNA sense strand
gaacagagauaaggaugag

SEQ ID NO: 2062440 - RNA, 19 nt, Homo sapiens
  misc_RNA (1)...(19): siRNA sense strand
aguagaagcucaggucuua

SEQ ID NO: 2062441 - RNA, 19 nt, Homo sapiens
  misc_RNA (1)...(19): siRNA sense strand
gcucaacccuuauuagaca

SEQ ID NO: 2062442 - RNA, 19 nt, Homo sapiens
  misc_RNA (1)...(19): siRNA sense strand
gggagaagacuuauccaua

SEQ ID NO: 2062443 - RNA, 19 nt, Homo sapiens
  misc_RNA (1)...(19): siRNA sense strand
ggaaaggcccuaugagugu

SEQ ID NO: 2062444 - RNA, 19 nt, Homo sapiens
  misc_RNA (1)...(19): siRNA sense strand
ccauaaauguggugaaugu

SEQ ID NO: 2062445 - RNA, 19 nt, Homo sapiens
  misc_RNA (1)...(19): siRNA sense strand
cgaaauucauugcuuguug

SEQ ID NO: 2062446 - RNA, 19 nt, Homo sapiens
  misc_RNA (1)...(19): siRNA sense strand
agugugagcucaacccuua

SEQ ID NO: 2062447 - RNA, 19 nt, Homo sapiens
  misc_RNA (1)...(19): siRNA sense strand
ccacaggguguaauaguua

SEQ ID NO: 2062448 - RNA, 19 nt, Homo sapiens
  misc_RNA (1)...(19): siRNA sense strand
ccaagaaacccaugaaugu

SEQ ID NO: 2062449 - RNA, 19 nt, Homo sapiens
  misc_RNA (1)...(19): siRNA sense strand
ggagagaaaccuuauaagu

SEQ ID NO: 2062450 - RNA, 19 nt, Homo sapiens
  misc_RNA (1)...(19): siRNA sense strand
gggaaagccuucaguugga

SEQ ID NO: 2062451 - RNA, 19 nt, Homo sapiens
  misc_RNA (1)...(19): siRNA sense strand
gaagagcuuuagucgaaau

SEQ ID NO: 2062452 - RNA, 19 nt, Homo sapiens
  misc_RNA (1)...(19): siRNA sense strand
gauccaaauugcagucuug

SEQ ID NO: 2062453 - RNA, 19 nt, Homo sapiens
  misc_RNA (1)...(19): siRNA sense strand
gaagacuuauccauacaau

SEQ ID NO: 2062454 - RNA, 19 nt, Homo sapiens
  misc_RNA (1)...(19): siRNA sense strand
ggagaaagacccuaucagu

SEQ ID NO: 2062455 - RNA, 19 nt, Homo sapiens
  misc_RNA (1)...(19): siRNA sense strand
gcucauuucuuauugaaca

SEQ ID NO: 2062456 - RNA, 19 nt, Homo sapiens
  misc_RNA (1)...(19): siRNA sense strand
gagcucauuucuuauugaa

SEQ ID NO: 2062457 - RNA, 19 nt, Homo sapiens
  misc_RNA (1)...(19): siRNA sense strand
gagaaaccuuaucacugua

SEQ ID NO: 2062458 - RNA, 19 nt, Homo sapiens
  misc_RNA (1)...(19): siRNA sense strand
caacagcgcagucuuguca

SEQ ID NO: 2062459 - RNA, 19 nt, Homo sapiens
  misc_RNA (1)...(19): siRNA sense strand
gauccauacuggugaaaga

SEQ ID NO: 2062460 - RNA, 19 nt, Homo sapiens
  misc_RNA (1)...(19): siRNA sense strand
gagaaacauuugaacuugu

SEQ ID NO: 2062461 - RNA, 19 nt, Homo sapiens
  misc_RNA (1)...(19): siRNA sense strand
gcucauuccuuauugaaca

SEQ ID NO: 2062462 - RNA, 19 nt, Homo sapiens
  misc_RNA (1)...(19): siRNA sense strand
agacuuauccauacaauga

SEQ ID NO: 2062463 - RNA, 19 nt, Homo sapiens
  misc_RNA (1)...(19): siRNA sense strand
gaacaucagagaauucaca

SEQ ID NO: 2062464 - RNA, 19 nt, Homo sapiens
  misc_RNA (1)...(19): siRNA sense strand
agucagcuuuguaaucuua

SEQ ID NO: 2062465 - RNA, 19 nt, Homo sapiens
  misc_RNA (1)...(19): siRNA sense strand
ggagcucauuucuuauuga

SEQ ID NO: 2062466 - RNA, 19 nt, Homo sapiens
  misc_RNA (1)...(19): siRNA sense strand
gagaagacuuauccauaca

SEQ ID NO: 2062467 - RNA, 19 nt, Homo sapiens
  misc_RNA (1)...(19): siRNA sense strand
ggaaccacaggguguaaua

SEQ ID NO: 2062468 - RNA, 19 nt, Homo sapiens
  misc_RNA (1)...(19): siRNA sense strand
ggaaagaccccauaaaugu

SEQ ID NO: 2062469 - RNA, 19 nt, Homo sapiens
  misc_RNA (1)...(19): siRNA sense strand
ggaaagccuucaguuggaa

SEQ ID NO: 2062470 - RNA, 19 nt, Homo sapiens
  misc_RNA (1)...(19): siRNA sense strand
gaugaggagccaacuguaa

SEQ ID NO: 2062471 - RNA, 19 nt, Homo sapiens
  misc_RNA (1)...(19): siRNA sense strand
gagcucaacccuuauuaga

SEQ ID NO: 2062472 - RNA, 19 nt, Homo sapiens
  misc_RNA (1)...(19): siRNA sense strand
agagaaacauuugaacuug

SEQ ID NO: 2062473 - RNA, 19 nt, Homo sapiens
  misc_RNA (1)...(19): siRNA sense strand
agucgcaguucauuuguua

SEQ ID NO: 2062474 - RNA, 19 nt, Homo sapiens
  misc_RNA (1)...(19): siRNA sense strand
gaaauugaccaggauccua

SEQ ID NO: 2062475 - RNA, 19 nt, Homo sapiens
  misc_RNA (1)...(19): siRNA sense strand
gaacucgggucuuauucag

SEQ ID NO: 2062476 - RNA, 19 nt, Homo sapiens
  misc_RNA (1)...(19): siRNA sense strand
ggagcucauuccuuauuga

SEQ ID NO: 2062477 - RNA, 19 nt, Homo sapiens
  misc_RNA (1)...(19): siRNA sense strand
agaaagacccuaucagugu

SEQ ID NO: 2062478 - RNA, 19 nt, Homo sapiens
  misc_RNA (1)...(19): siRNA sense strand
caggagagaaaccuuauaa

SEQ ID NO: 2062479 - RNA, 19 nt, Homo sapiens
  misc_RNA (1)...(19): siRNA sense strand
gagcuuuagucgaaauuca

SEQ ID NO: 2062480 - RNA, 19 nt, Homo sapiens
  misc_RNA (1)...(19): siRNA sense strand
gcaaggcccauuucauuca

SEQ ID NO: 2062481 - RNA, 19 nt, Homo sapiens
  misc_RNA (1)...(19): siRNA sense strand
ugaagaaauugaggaagaa

SEQ ID NO: 2062482 - RNA, 19 nt, Homo sapiens
  misc_RNA (1)...(19): siRNA sense strand
ugaacuuguugguagguua

SEQ ID NO: 2062483 - RNA, 19 nt, Homo sapiens
  misc_RNA (1)...(19): siRNA sense strand
gccuuuaauugccguauuu

SEQ ID NO: 2062484 - RNA, 19 nt, Homo sapiens
  misc_RNA (1)...(19): siRNA sense strand
ccauaaaugugaggaaugu

SEQ ID NO: 2062485 - RNA, 19 nt, Homo sapiens
  misc_RNA (1)...(19): siRNA sense strand
agaaaugccauaaauguga

SEQ ID NO: 2062486 - RNA, 19 nt, Homo sapiens
  misc_RNA (1)...(19): siRNA sense strand
ccgcaaggcccauuucauu

SEQ ID NO: 2062487 - RNA, 19 nt, Homo sapiens
  misc_RNA (1)...(19): siRNA sense strand
gguccauacuggugagaaa

SEQ ID NO: 2062488 - RNA, 19 nt, Homo sapiens
  misc_RNA (1)...(19): siRNA sense strand
gaaaucacaccuuauugag

SEQ ID NO: 2062489 - RNA, 19 nt, Homo sapiens
  misc_RNA (1)...(19): siRNA sense strand
ccauaaauguagugacugu

SEQ ID NO: 2062490 - RNA, 19 nt, Homo sapiens
  misc_RNA (1)...(19): siRNA sense strand
uguaaucaguguaaacaga

SEQ ID NO: 2062491 - RNA, 19 nt, Homo sapiens
  misc_RNA (1)...(19): siRNA sense strand
caaugaaacuaaggaaagu

SEQ ID NO: 2062492 - RNA, 19 nt, Homo sapiens
  misc_RNA (1)...(19): siRNA sense strand
uugaagaaauugaggaaga

SEQ ID NO: 2062493 - RNA, 19 nt, Homo sapiens
  misc_RNA (1)...(19): siRNA sense strand
gugcucaucuuguacaaca

SEQ ID NO: 2062494 - RNA, 19 nt, Homo sapiens
  misc_RNA (1)...(19): siRNA sense strand
gagaaaugccauaaaugug

SEQ ID NO: 2062495 - RNA, 19 nt, Homo sapiens
  misc_RNA (1)...(19): siRNA sense strand
guaauaaaccccauaaaug

SEQ ID NO: 2062496 - RNA, 19 nt, Homo sapiens
  misc_RNA (1)...(19): siRNA sense strand
ggugagagacccuaucugu

SEQ ID NO: 2062497 - RNA, 19 nt, Homo sapiens
  misc_RNA (1)...(19): siRNA sense strand
agagaaaugccauaaaugu

SEQ ID NO: 2062498 - RNA, 19 nt, Homo sapiens
  misc_RNA (1)...(19): siRNA sense strand
ggugaaagaccuuaucagu

SEQ ID NO: 2062499 - RNA, 19 nt, Homo sapiens
  misc_RNA (1)...(19): siRNA sense strand
ggaaauaccaagggaaucu

SEQ ID NO: 2062500 - RNA, 19 nt, Homo sapiens
  misc_RNA (1)...(19): siRNA sense strand
uguuagugcucaucuugua

SEQ ID NO: 2062501 - RNA, 19 nt, Homo sapiens
  misc_RNA (1)...(19): siRNA sense strand
agucagcuuugcaaccuua

SEQ ID NO: 2062502 - RNA, 19 nt, Homo sapiens
  misc_RNA (1)...(19): siRNA sense strand
gaggauccauacuggugaa

SEQ ID NO: 2062503 - RNA, 19 nt, Homo sapiens
  misc_RNA (1)...(19): siRNA sense strand
agaccaaacucagaagaga

SEQ ID NO: 2062504 - RNA, 19 nt, Homo sapiens
  misc_RNA (1)...(19): siRNA sense strand
acacaggagagaaaccuua

SEQ ID NO: 2062505 - RNA, 19 nt, Homo sapiens
  misc_RNA (1)...(19): siRNA sense strand
caacaucaaaggguccaua

SEQ ID NO: 2062506 - RNA, 19 nt, Homo sapiens
  misc_RNA (1)...(19): siRNA sense strand
gauccuauggguagagaaa

SEQ ID NO: 2062507 - RNA, 19 nt, Homo sapiens
  misc_RNA (1)...(19): siRNA sense strand
gugcaaagagugugggaaa

SEQ ID NO: 2062508 - RNA, 19 nt, Homo sapiens
  misc_RNA (1)...(19): siRNA sense strand
gauggagaauuauggaaac

SEQ ID NO: 2062509 - RNA, 19 nt, Homo sapiens
  misc_RNA (1)...(19): siRNA sense strand
caaauugcagucuuguuau

SEQ ID NO: 2062510 - RNA, 19 nt, Homo sapiens
  misc_RNA (1)...(19): siRNA sense strand
caaggcccauuucauucaa

SEQ ID NO: 2062511 - RNA, 19 nt, Homo sapiens
  misc_RNA (1)...(19): siRNA sense strand
gaguguaauuacuguggaa

SEQ ID NO: 2062512 - RNA, 19 nt, Homo sapiens
  misc_RNA (1)...(19): siRNA sense strand
guggugaagccuuuaauug

SEQ ID NO: 2062513 - RNA, 19 nt, Homo sapiens
  misc_RNA (1)...(19): siRNA sense strand
ggaacucgggucuuauuca

SEQ ID NO: 2062514 - RNA, 19 nt, Homo sapiens
  misc_RNA (1)...(19): siRNA sense strand
uagaagcucaggucuuauu

SEQ ID NO: 2062515 - RNA, 19 nt, Homo sapiens
  misc_RNA (1)...(19): siRNA sense strand
ccuuaucacuguaccaaau

SEQ ID NO: 2062516 - RNA, 19 nt, Homo sapiens
  misc_RNA (1)...(19): siRNA sense strand
aguuggaaaucacaccuua

SEQ ID NO: 2062517 - RNA, 19 nt, Homo sapiens
  misc_RNA (1)...(19): siRNA sense strand
caacguaucucuuacauug

SEQ ID NO: 2062518 - RNA, 19 nt, Homo sapiens
  misc_RNA (1)...(19): siRNA sense strand
gcaccuacauuaaugcuaa

SEQ ID NO: 2062519 - RNA, 19 nt, Homo sapiens
  misc_RNA (1)...(19): siRNA sense strand
caaagugaauucauggaaa

SEQ ID NO: 2062520 - RNA, 19 nt, Homo sapiens
  misc_RNA (1)...(19): siRNA sense strand
gagaagaggguccaacgua

SEQ ID NO: 2062521 - RNA, 19 nt, Homo sapiens
  misc_RNA (1)...(19): siRNA sense strand
gaaagaagaaggaguugug

SEQ ID NO: 2062522 - RNA, 19 nt, Homo sapiens
  misc_RNA (1)...(19): siRNA sense strand
gucaacagcugaaagaaga

SEQ ID NO: 2062523 - RNA, 19 nt, Homo sapiens
  misc_RNA (1)...(19): siRNA sense strand
ucauugagcaccuacauua

SEQ ID NO: 2062524 - RNA, 19 nt, Homo sapiens
  misc_RNA (1)...(19): siRNA sense strand
cccaacaugugaagcauua

SEQ ID NO: 2062525 - RNA, 19 nt, Homo sapiens
  misc_RNA (1)...(19): siRNA sense strand
caaagguacugaauguugu

SEQ ID NO: 2062526 - RNA, 19 nt, Homo sapiens
  misc_RNA (1)...(19): siRNA sense strand
ccagugagcaguaugaauu

SEQ ID NO: 2062527 - RNA, 19 nt, Homo sapiens
  misc_RNA (1)...(19): siRNA sense strand
gauuucagcuuuccuuaag

SEQ ID NO: 2062528 - RNA, 19 nt, Homo sapiens
  misc_RNA (1)...(19): siRNA sense strand
gaagaagacagacuugcuu

SEQ ID NO: 2062529 - RNA, 19 nt, Homo sapiens
  misc_RNA (1)...(19): siRNA sense strand
ucacaagacuccagacagu

SEQ ID NO: 2062530 - RNA, 19 nt, Homo sapiens
  misc_RNA (1)...(19): siRNA sense strand
ccaaagaaauugauauucc

SEQ ID NO: 2062531 - RNA, 19 nt, Homo sapiens
  misc_RNA (1)...(19): siRNA sense strand
cguggcaaguucacauuua

SEQ ID NO: 2062532 - RNA, 19 nt, Homo sapiens
  misc_RNA (1)...(19): siRNA sense strand
ccaaagguacugaauguug

SEQ ID NO: 2062533 - RNA, 19 nt, Homo sapiens
  misc_RNA (1)...(19): siRNA sense strand
gcagaugguuuggcaggaa

SEQ ID NO: 2062534 - RNA, 19 nt, Homo sapiens
  misc_RNA (1)...(19): siRNA sense strand
ucaacaccguggaugauuu

SEQ ID NO: 2062535 - RNA, 19 nt, Homo sapiens
  misc_RNA (1)...(19): siRNA sense strand
gaagguagcaauggaguau

SEQ ID NO: 2062536 - RNA, 19 nt, Homo sapiens
  misc_RNA (1)...(19): siRNA sense strand
gcagucagccagccgaauu

SEQ ID NO: 2062537 - RNA, 19 nt, Homo sapiens
  misc_RNA (1)...(19): siRNA sense strand
gaaaagagagggauauaug

SEQ ID NO: 2062538 - RNA, 19 nt, Homo sapiens
  misc_RNA (1)...(19): siRNA sense strand
cucagcaucuuuguuauua

SEQ ID NO: 2062539 - RNA, 19 nt, Homo sapiens
  misc_RNA (1)...(19): siRNA sense strand
gggagaagguagcaaugga

SEQ ID NO: 2062540 - RNA, 19 nt, Homo sapiens
  misc_RNA (1)...(19): siRNA sense strand
cguguuugaugauucuuua

SEQ ID NO: 2062541 - RNA, 19 nt, Homo sapiens
  misc_RNA (1)...(19): siRNA sense strand
gaacauugaacccuuugug

SEQ ID NO: 2062542 - RNA, 19 nt, Homo sapiens
  misc_RNA (1)...(19): siRNA sense strand
gguuaucaguguaaaugaa

SEQ ID NO: 2062543 - RNA, 19 nt, Homo sapiens
  misc_RNA (1)...(19): siRNA sense strand
auaguaacguguuugauga

SEQ ID NO: 2062544 - RNA, 19 nt, Homo sapiens
  misc_RNA (1)...(19): siRNA sense strand
cauaggacuucaagagaga

SEQ ID NO: 2062545 - RNA, 19 nt, Homo sapiens
  misc_RNA (1)...(19): siRNA sense strand
agaaaugugugcuauacug

SEQ ID NO: 2062546 - RNA, 19 nt, Homo sapiens
  misc_RNA (1)...(19): siRNA sense strand
agaagaggguccaacguau

SEQ ID NO: 2062547 - RNA, 19 nt, Homo sapiens
  misc_RNA (1)...(19): siRNA sense strand
agagagggauauauggaaa

SEQ ID NO: 2062548 - RNA, 19 nt, Homo sapiens
  misc_RNA (1)...(19): siRNA sense strand
cacauuuacuccaaaguga

SEQ ID NO: 2062549 - RNA, 19 nt, Homo sapiens
  misc_RNA (1)...(19): siRNA sense strand
ugugauaacuacaccauuc

SEQ ID NO: 2062550 - RNA, 19 nt, Homo sapiens
  misc_RNA (1)...(19): siRNA sense strand
ggauguagaagaagacaga

SEQ ID NO: 2062551 - RNA, 19 nt, Homo sapiens
  misc_RNA (1)...(19): siRNA sense strand
caaagacaguccacagcau

SEQ ID NO: 2062552 - RNA, 19 nt, Homo sapiens
  misc_RNA (1)...(19): siRNA sense strand
gcugaaagaagaaggaguu

SEQ ID NO: 2062553 - RNA, 19 nt, Homo sapiens
  misc_RNA (1)...(19): siRNA sense strand
caugcuggauguagaagaa

SEQ ID NO: 2062554 - RNA, 19 nt, Homo sapiens
  misc_RNA (1)...(19): siRNA sense strand
ugagaaaugugugcuauac

SEQ ID NO: 2062555 - RNA, 19 nt, Homo sapiens
  misc_RNA (1)...(19): siRNA sense strand
cagcagaguguguuuaaga

SEQ ID NO: 2062556 - RNA, 19 nt, Homo sapiens
  misc_RNA (1)...(19): siRNA sense strand
uucgaaaccuugucuuaaa

SEQ ID NO: 2062557 - RNA, 19 nt, Homo sapiens
  misc_RNA (1)...(19): siRNA sense strand
gaaaccuugucuuaaagca

SEQ ID NO: 2062558 - RNA, 19 nt, Homo sapiens
  misc_RNA (1)...(19): siRNA sense strand
uuucucagcaucuuuguua

SEQ ID NO: 2062559 - RNA, 19 nt, Homo sapiens
  misc_RNA (1)...(19): siRNA sense strand
guaacguguuugaugauuc

SEQ ID NO: 2062560 - RNA, 19 nt, Homo sapiens
  misc_RNA (1)...(19): siRNA sense strand
uaacguguuugaugauucu

SEQ ID NO: 2062561 - RNA, 19 nt, Homo sapiens
  misc_RNA (1)...(19): siRNA sense strand
gaagaggguccaacguauc

SEQ ID NO: 2062562 - RNA, 19 nt, Homo sapiens
  misc_RNA (1)...(19): siRNA sense strand
gacaaaaucuggagcaaag

SEQ ID NO: 2062563 - RNA, 19 nt, Homo sapiens
  misc_RNA (1)...(19): siRNA sense strand
uauaguaacguguuugaug

SEQ ID NO: 2062564 - RNA, 19 nt, Homo sapiens
  misc_RNA (1)...(19): siRNA sense strand
ucucuuacauuggacauga

SEQ ID NO: 2062565 - RNA, 19 nt, Homo sapiens
  misc_RNA (1)...(19): siRNA sense strand
gagcaaagaaggauuuuau

SEQ ID NO: 2062566 - RNA, 19 nt, Homo sapiens
  misc_RNA (1)...(19): siRNA sense strand
ccaaagugaauucauggaa

SEQ ID NO: 2062567 - RNA, 19 nt, Homo sapiens
  misc_RNA (1)...(19): siRNA sense strand
gcucugugccuguaugaga

SEQ ID NO: 2062568 - RNA, 19 nt, Homo sapiens
  misc_RNA (1)...(19): siRNA sense strand
aaaguugagguucugguua

SEQ ID NO: 2062569 - RNA, 19 nt, Homo sapiens
  misc_RNA (1)...(19): siRNA sense strand
gaucccaaagaaauugaua

SEQ ID NO: 2062570 - RNA, 19 nt, Homo sapiens
  misc_RNA (1)...(19): siRNA sense strand
uaagacaagacaaagagaa

SEQ ID NO: 2062571 - RNA, 19 nt, Homo sapiens
  misc_RNA (1)...(19): siRNA sense strand
cauucgaaaccuugucuua

SEQ ID NO: 2062572 - RNA, 19 nt, Homo sapiens
  misc_RNA (1)...(19): siRNA sense strand
gugcuauacuggccggaaa

SEQ ID NO: 2062573 - RNA, 19 nt, Homo sapiens
  misc_RNA (1)...(19): siRNA sense strand
ggaagccacacccaacaug

SEQ ID NO: 2062574 - RNA, 19 nt, Homo sapiens
  misc_RNA (1)...(19): siRNA sense strand
cuacauccauuggcuguca

SEQ ID NO: 2062575 - RNA, 19 nt, Homo sapiens
  misc_RNA (1)...(19): siRNA sense strand
cagcuuuccuuaagacaag

SEQ ID NO: 2062576 - RNA, 19 nt, Homo sapiens
  misc_RNA (1)...(19): siRNA sense strand
ccucauggccugaucacaa

SEQ ID NO: 2062577 - RNA, 19 nt, Homo sapiens
  misc_RNA (1)...(19): siRNA sense strand
gauaacuacaccauucgaa

SEQ ID NO: 2062578 - RNA, 19 nt, Homo sapiens
  misc_RNA (1)...(19): siRNA sense strand
aaguugagguucugguuau

SEQ ID NO: 2062579 - RNA, 19 nt, Homo sapiens
  misc_RNA (1)...(19): siRNA sense strand
gaagccacacccaacaugu

SEQ ID NO: 2062580 - RNA, 19 nt, Homo sapiens
  misc_RNA (1)...(19): siRNA sense strand
aaugagaaaugugugcuau

SEQ ID NO: 2062581 - RNA, 19 nt, Homo sapiens
  misc_RNA (1)...(19): siRNA sense strand
ccuaucgcccaucacauua

SEQ ID NO: 2062582 - RNA, 19 nt, Homo sapiens
  misc_RNA (1)...(19): siRNA sense strand
caacaccguggaugauuuc

SEQ ID NO: 2062583 - RNA, 19 nt, Homo sapiens
  misc_RNA (1)...(19): siRNA sense strand
ggguccaacguaucucuua

SEQ ID NO: 2062584 - RNA, 19 nt, Homo sapiens
  misc_RNA (1)...(19): siRNA sense strand
guagaagaagacagacuug

SEQ ID NO: 2062585 - RNA, 19 nt, Homo sapiens
  misc_RNA (1)...(19): siRNA sense strand
gaucacaagacuccagaca

SEQ ID NO: 2062586 - RNA, 19 nt, Homo sapiens
  misc_RNA (1)...(19): siRNA sense strand
aaagagagggauauaugga

SEQ ID NO: 2062587 - RNA, 19 nt, Homo sapiens
  misc_RNA (1)...(19): siRNA sense strand
uugagcaccuacauuaaug

SEQ ID NO: 2062588 - RNA, 19 nt, Homo sapiens
  misc_RNA (1)...(19): siRNA sense strand
ucacauuuacuccaaagug

SEQ ID NO: 2062589 - RNA, 19 nt, Homo sapiens
  misc_RNA (1)...(19): siRNA sense strand
gcucaugcuggauguagaa

SEQ ID NO: 2062590 - RNA, 19 nt, Homo sapiens
  misc_RNA (1)...(19): siRNA sense strand
ucgaaaccuugucuuaaag

SEQ ID NO: 2062591 - RNA, 19 nt, Homo sapiens
  misc_RNA (1)...(19): siRNA sense strand
gcccugugauuguuaugau

SEQ ID NO: 2062592 - RNA, 19 nt, Homo sapiens
  misc_RNA (1)...(19): siRNA sense strand
acuccaaagugaauucaug

SEQ ID NO: 2062593 - RNA, 19 nt, Homo sapiens
  misc_RNA (1)...(19): siRNA sense strand
ccgaggugcuccugagauc

SEQ ID NO: 2062594 - RNA, 19 nt, Homo sapiens
  misc_RNA (1)...(19): siRNA sense strand
ugagcaguaugaauuugug

SEQ ID NO: 2062595 - RNA, 19 nt, Homo sapiens
  misc_RNA (1)...(19): siRNA sense strand
aaaccagugagcaguauga

SEQ ID NO: 2062596 - RNA, 19 nt, Homo sapiens
  misc_RNA (1)...(19): siRNA sense strand
cuacaccauucgaaaccuu

SEQ ID NO: 2062597 - RNA, 19 nt, Homo sapiens
  misc_RNA (1)...(19): siRNA sense strand
caguguaaaugaaugugau

SEQ ID NO: 2062598 - RNA, 19 nt, Homo sapiens
  misc_RNA (1)...(19): siRNA sense strand
ggacgucguggcaaguuca

SEQ ID NO: 2062599 - RNA, 19 nt, Homo sapiens
  misc_RNA (1)...(19): siRNA sense strand
caacaccacgggagaaggu

SEQ ID NO: 2062600 - RNA, 19 nt, Homo sapiens
  misc_RNA (1)...(19): siRNA sense strand
gcccauaggacuucaagag

SEQ ID NO: 2062601 - RNA, 19 nt, Homo sapiens
  misc_RNA (1)...(19): siRNA sense strand
gcaggaauagguagaacag

SEQ ID NO: 2062602 - RNA, 19 nt, Homo sapiens
  misc_RNA (1)...(19): siRNA sense strand
aagacaagacaaagagaaa

SEQ ID NO: 2062603 - RNA, 19 nt, Homo sapiens
  misc_RNA (1)...(19): siRNA sense strand
ucagccagccgaauucuca

SEQ ID NO: 2062604 - RNA, 19 nt, Homo sapiens
  misc_RNA (1)...(19): siRNA sense strand
uaacuacaccauucgaaac

SEQ ID NO: 2062605 - RNA, 19 nt, Homo sapiens
  misc_RNA (1)...(19): siRNA sense strand
cauugagcaccuacauuaa

SEQ ID NO: 2062606 - RNA, 19 nt, Homo sapiens
  misc_RNA (1)...(19): siRNA sense strand
uaccaccgcuaccucuguu

SEQ ID NO: 2062607 - RNA, 19 nt, Homo sapiens
  misc_RNA (1)...(19): siRNA sense strand
agaagaaggaguuguggau

SEQ ID NO: 2062608 - RNA, 19 nt, Homo sapiens
  misc_RNA (1)...(19): siRNA sense strand
gaucacaaaacucaaagaa

SEQ ID NO: 2062609 - RNA, 19 nt, Homo sapiens
  misc_RNA (1)...(19): siRNA sense strand
guucacauuuacuccaaag

SEQ ID NO: 2062610 - RNA, 19 nt, Homo sapiens
  misc_RNA (1)...(19): siRNA sense strand
gguccaacguaucucuuac

SEQ ID NO: 2062611 - RNA, 19 nt, Homo sapiens
  misc_RNA (1)...(19): siRNA sense strand
cagugagcaguaugaauuu

SEQ ID NO: 2062612 - RNA, 19 nt, Homo sapiens
  misc_RNA (1)...(19): siRNA sense strand
ggaguuguggaugcacuaa

SEQ ID NO: 2062613 - RNA, 19 nt, Homo sapiens
  misc_RNA (1)...(19): siRNA sense strand
ccaccuaucgcccaucaca

SEQ ID NO: 2062614 - RNA, 19 nt, Homo sapiens
  misc_RNA (1)...(19): siRNA sense strand
guggcaaguucacauuuac

SEQ ID NO: 2062615 - RNA, 19 nt, Homo sapiens
  misc_RNA (1)...(19): siRNA sense strand
acguaucucuuacauugga

SEQ ID NO: 2062616 - RNA, 19 nt, Homo sapiens
  misc_RNA (1)...(19): siRNA sense strand
gcaugaagcggacaaaauc

SEQ ID NO: 2062617 - RNA, 19 nt, Homo sapiens
  misc_RNA (1)...(19): siRNA sense strand
caacguaucucuuacauug

SEQ ID NO: 2062618 - RNA, 19 nt, Homo sapiens
  misc_RNA (1)...(19): siRNA sense strand
gcaccuacauuaaugcuaa

SEQ ID NO: 2062619 - RNA, 19 nt, Homo sapiens
  misc_RNA (1)...(19): siRNA sense strand
caaagugaauucauggaaa

SEQ ID NO: 2062620 - RNA, 19 nt, Homo sapiens
  misc_RNA (1)...(19): siRNA sense strand
gagaagaggguccaacgua

SEQ ID NO: 2062621 - RNA, 19 nt, Homo sapiens
  misc_RNA (1)...(19): siRNA sense strand
gaaagaagaaggaguugug

SEQ ID NO: 2062622 - RNA, 19 nt, Homo sapiens
  misc_RNA (1)...(19): siRNA sense strand
gucaacagcugaaagaaga

SEQ ID NO: 2062623 - RNA, 19 nt, Homo sapiens
  misc_RNA (1)...(19): siRNA sense strand
ucauugagcaccuacauua

SEQ ID NO: 2062624 - RNA, 19 nt, Homo sapiens
  misc_RNA (1)...(19): siRNA sense strand
cccaacaugugaagcauua

SEQ ID NO: 2062625 - RNA, 19 nt, Homo sapiens
  misc_RNA (1)...(19): siRNA sense strand
caaagguacugaauguugu

SEQ ID NO: 2062626 - RNA, 19 nt, Homo sapiens
  misc_RNA (1)...(19): siRNA sense strand
ccagugagcaguaugaauu

SEQ ID NO: 2062627 - RNA, 19 nt, Homo sapiens
  misc_RNA (1)...(19): siRNA sense strand
gauuucagcuuuccuuaag

SEQ ID NO: 2062628 - RNA, 19 nt, Homo sapiens
  misc_RNA (1)...(19): siRNA sense strand
gaagaagacagacuugcuu

SEQ ID NO: 2062629 - RNA, 19 nt, Homo sapiens
  misc_RNA (1)...(19): siRNA sense strand
ucacaagacuccagacagu

SEQ ID NO: 2062630 - RNA, 19 nt, Homo sapiens
  misc_RNA (1)...(19): siRNA sense strand
ccaaagaaauugauauucc

SEQ ID NO: 2062631 - RNA, 19 nt, Homo sapiens
  misc_RNA (1)...(19): siRNA sense strand
cguggcaaguucacauuua

SEQ ID NO: 2062632 - RNA, 19 nt, Homo sapiens
  misc_RNA (1)...(19): siRNA sense strand
ccaaagguacugaauguug

SEQ ID NO: 2062633 - RNA, 19 nt, Homo sapiens
  misc_RNA (1)...(19): siRNA sense strand
gcagaugguuuggcaggaa

SEQ ID NO: 2062634 - RNA, 19 nt, Homo sapiens
  misc_RNA (1)...(19): siRNA sense strand
ucaacaccguggaugauuu

SEQ ID NO: 2062635 - RNA, 19 nt, Homo sapiens
  misc_RNA (1)...(19): siRNA sense strand
gaagguagcaauggaguau

SEQ ID NO: 2062636 - RNA, 19 nt, Homo sapiens
  misc_RNA (1)...(19): siRNA sense strand
gcagucagccagccgaauu

SEQ ID NO: 2062637 - RNA, 19 nt, Homo sapiens
  misc_RNA (1)...(19): siRNA sense strand
gaaaagagagggauauaug

SEQ ID NO: 2062638 - RNA, 19 nt, Homo sapiens
  misc_RNA (1)...(19): siRNA sense strand
gggagaagguagcaaugga

SEQ ID NO: 2062639 - RNA, 19 nt, Homo sapiens
  misc_RNA (1)...(19): siRNA sense strand
gaacauugaacccuuugug

SEQ ID NO: 2062640 - RNA, 19 nt, Homo sapiens
  misc_RNA (1)...(19): siRNA sense strand
gguuaucaguguaaaugaa

SEQ ID NO: 2062641 - RNA, 19 nt, Homo sapiens
  misc_RNA (1)...(19): siRNA sense strand
cauaggacuucaagagaga

SEQ ID NO: 2062642 - RNA, 19 nt, Homo sapiens
  misc_RNA (1)...(19): siRNA sense strand
agaaaugugugcuauacug

SEQ ID NO: 2062643 - RNA, 19 nt, Homo sapiens
  misc_RNA (1)...(19): siRNA sense strand
agaagaggguccaacguau

SEQ ID NO: 2062644 - RNA, 19 nt, Homo sapiens
  misc_RNA (1)...(19): siRNA sense strand
agagagggauauauggaaa

SEQ ID NO: 2062645 - RNA, 19 nt, Homo sapiens
  misc_RNA (1)...(19): siRNA sense strand
cacauuuacuccaaaguga

SEQ ID NO: 2062646 - RNA, 19 nt, Homo sapiens
  misc_RNA (1)...(19): siRNA sense strand
ugugauaacuacaccauuc

SEQ ID NO: 2062647 - RNA, 19 nt, Homo sapiens
  misc_RNA (1)...(19): siRNA sense strand
ggauguagaagaagacaga

SEQ ID NO: 2062648 - RNA, 19 nt, Homo sapiens
  misc_RNA (1)...(19): siRNA sense strand
caaagacaguccacagcau

SEQ ID NO: 2062649 - RNA, 19 nt, Homo sapiens
  misc_RNA (1)...(19): siRNA sense strand
gcugaaagaagaaggaguu

SEQ ID NO: 2062650 - RNA, 19 nt, Homo sapiens
  misc_RNA (1)...(19): siRNA sense strand
caugcuggauguagaagaa

SEQ ID NO: 2062651 - RNA, 19 nt, Homo sapiens
  misc_RNA (1)...(19): siRNA sense strand
ugagaaaugugugcuauac

SEQ ID NO: 2062652 - RNA, 19 nt, Homo sapiens
  misc_RNA (1)...(19): siRNA sense strand
cagcagaguguguuuaaga

SEQ ID NO: 2062653 - RNA, 19 nt, Homo sapiens
  misc_RNA (1)...(19): siRNA sense strand
uucgaaaccuugucuuaaa

SEQ ID NO: 2062654 - RNA, 19 nt, Homo sapiens
  misc_RNA (1)...(19): siRNA sense strand
gaaaccuugucuuaaagca

SEQ ID NO: 2062655 - RNA, 19 nt, Homo sapiens
  misc_RNA (1)...(19): siRNA sense strand
gaagaggguccaacguauc

SEQ ID NO: 2062656 - RNA, 19 nt, Homo sapiens
  misc_RNA (1)...(19): siRNA sense strand
ucucuuacauuggacauga

SEQ ID NO: 2062657 - RNA, 19 nt, Homo sapiens
  misc_RNA (1)...(19): siRNA sense strand
ccaaagugaauucauggaa

SEQ ID NO: 2062658 - RNA, 19 nt, Homo sapiens
  misc_RNA (1)...(19): siRNA sense strand
gcucugugccuguaugaga

SEQ ID NO: 2062659 - RNA, 19 nt, Homo sapiens
  misc_RNA (1)...(19): siRNA sense strand
aaaguugagguucugguua

SEQ ID NO: 2062660 - RNA, 19 nt, Homo sapiens
  misc_RNA (1)...(19): siRNA sense strand
gaucccaaagaaauugaua

SEQ ID NO: 2062661 - RNA, 19 nt, Homo sapiens
  misc_RNA (1)...(19): siRNA sense strand
uaagacaagacaaagagaa

SEQ ID NO: 2062662 - RNA, 19 nt, Homo sapiens
  misc_RNA (1)...(19): siRNA sense strand
cauucgaaaccuugucuua

SEQ ID NO: 2062663 - RNA, 19 nt, Homo sapiens
  misc_RNA (1)...(19): siRNA sense strand
gugcuauacuggccggaaa

SEQ ID NO: 2062664 - RNA, 19 nt, Homo sapiens
  misc_RNA (1)...(19): siRNA sense strand
cagcuuuccuuaagacaag

SEQ ID NO: 2062665 - RNA, 19 nt, Homo sapiens
  misc_RNA (1)...(19): siRNA sense strand
cuacauccauuggcuguca

SEQ ID NO: 2062666 - RNA, 19 nt, Homo sapiens
  misc_RNA (1)...(19): siRNA sense strand
ccucauggccugaucacaa

SEQ ID NO: 2062667 - RNA, 19 nt, Homo sapiens
  misc_RNA (1)...(19): siRNA sense strand
ggaagccacacccaacaug

SEQ ID NO: 2062668 - RNA, 19 nt, Homo sapiens
  misc_RNA (1)...(19): siRNA sense strand
gauaacuacaccauucgaa

SEQ ID NO: 2062669 - RNA, 19 nt, Homo sapiens
  misc_RNA (1)...(19): siRNA sense strand
aaguugagguucugguuau

SEQ ID NO: 2062670 - RNA, 19 nt, Homo sapiens
  misc_RNA (1)...(19): siRNA sense strand
gaagccacacccaacaugu

SEQ ID NO: 2062671 - RNA, 19 nt, Homo sapiens
  misc_RNA (1)...(19): siRNA sense strand
aaugagaaaugugugcuau

SEQ ID NO: 2062672 - RNA, 19 nt, Homo sapiens
  misc_RNA (1)...(19): siRNA sense strand
caacaccguggaugauuuc

SEQ ID NO: 2062673 - RNA, 19 nt, Homo sapiens
  misc_RNA (1)...(19): siRNA sense strand
ccuaucgcccaucacauua

SEQ ID NO: 2062674 - RNA, 19 nt, Homo sapiens
  misc_RNA (1)...(19): siRNA sense strand
ggguccaacguaucucuua

SEQ ID NO: 2062675 - RNA, 19 nt, Homo sapiens
  misc_RNA (1)...(19): siRNA sense strand
guagaagaagacagacuug

SEQ ID NO: 2062676 - RNA, 19 nt, Homo sapiens
  misc_RNA (1)...(19): siRNA sense strand
gaucacaagacuccagaca

SEQ ID NO: 2062677 - RNA, 19 nt, Homo sapiens
  misc_RNA (1)...(19): siRNA sense strand
aaagagagggauauaugga

SEQ ID NO: 2062678 - RNA, 19 nt, Homo sapiens
  misc_RNA (1)...(19): siRNA sense strand
uugagcaccuacauuaaug

SEQ ID NO: 2062679 - RNA, 19 nt, Homo sapiens
  misc_RNA (1)...(19): siRNA sense strand
ucacauuuacuccaaagug

SEQ ID NO: 2062680 - RNA, 19 nt, Homo sapiens
  misc_RNA (1)...(19): siRNA sense strand
gcucaugcuggauguagaa

SEQ ID NO: 2062681 - RNA, 19 nt, Homo sapiens
  misc_RNA (1)...(19): siRNA sense strand
ucgaaaccuugucuuaaag

SEQ ID NO: 2062682 - RNA, 19 nt, Homo sapiens
  misc_RNA (1)...(19): siRNA sense strand
gcccugugauuguuaugau

SEQ ID NO: 2062683 - RNA, 19 nt, Homo sapiens
  misc_RNA (1)...(19): siRNA sense strand
acuccaaagugaauucaug

SEQ ID NO: 2062684 - RNA, 19 nt, Homo sapiens
  misc_RNA (1)...(19): siRNA sense strand
caacaccacgggagaaggu

SEQ ID NO: 2062685 - RNA, 19 nt, Homo sapiens
  misc_RNA (1)...(19): siRNA sense strand
ugagcaguaugaauuugug

SEQ ID NO: 2062686 - RNA, 19 nt, Homo sapiens
  misc_RNA (1)...(19): siRNA sense strand
aaaccagugagcaguauga

SEQ ID NO: 2062687 - RNA, 19 nt, Homo sapiens
  misc_RNA (1)...(19): siRNA sense strand
ccgaggugcuccugagauc

SEQ ID NO: 2062688 - RNA, 19 nt, Homo sapiens
  misc_RNA (1)...(19): siRNA sense strand
cuacaccauucgaaaccuu

SEQ ID NO: 2062689 - RNA, 19 nt, Homo sapiens
  misc_RNA (1)...(19): siRNA sense strand
caguguaaaugaaugugau

SEQ ID NO: 2062690 - RNA, 19 nt, Homo sapiens
  misc_RNA (1)...(19): siRNA sense strand
ggacgucguggcaaguuca

SEQ ID NO: 2062691 - RNA, 19 nt, Homo sapiens
  misc_RNA (1)...(19): siRNA sense strand
gcccauaggacuucaagag

SEQ ID NO: 2062692 - RNA, 19 nt, Homo sapiens
  misc_RNA (1)...(19): siRNA sense strand
gcaggaauagguagaacag

SEQ ID NO: 2062693 - RNA, 19 nt, Homo sapiens
  misc_RNA (1)...(19): siRNA sense strand
aagacaagacaaagagaaa

SEQ ID NO: 2062694 - RNA, 19 nt, Homo sapiens
  misc_RNA (1)...(19): siRNA sense strand
ucagccagccgaauucuca

SEQ ID NO: 2062695 - RNA, 19 nt, Homo sapiens
  misc_RNA (1)...(19): siRNA sense strand
uaacuacaccauucgaaac

SEQ ID NO: 2062696 - RNA, 19 nt, Homo sapiens
  misc_RNA (1)...(19): siRNA sense strand
cauugagcaccuacauuaa

SEQ ID NO: 2062697 - RNA, 19 nt, Homo sapiens
  misc_RNA (1)...(19): siRNA sense strand
guucacauuuacuccaaag

SEQ ID NO: 2062698 - RNA, 19 nt, Homo sapiens
  misc_RNA (1)...(19): siRNA sense strand
agaagaaggaguuguggau

SEQ ID NO: 2062699 - RNA, 19 nt, Homo sapiens
  misc_RNA (1)...(19): siRNA sense strand
gaucacaaaacucaaagaa

SEQ ID NO: 2062700 - RNA, 19 nt, Homo sapiens
  misc_RNA (1)...(19): siRNA sense strand
uaccaccgcuaccucuguu

SEQ ID NO: 2062701 - RNA, 19 nt, Homo sapiens
  misc_RNA (1)...(19): siRNA sense strand
gguccaacguaucucuuac

SEQ ID NO: 2062702 - RNA, 19 nt, Homo sapiens
  misc_RNA (1)...(19): siRNA sense strand
cagugagcaguaugaauuu

SEQ ID NO: 2062703 - RNA, 19 nt, Homo sapiens
  misc_RNA (1)...(19): siRNA sense strand
ggaguuguggaugcacuaa

SEQ ID NO: 2062704 - RNA, 19 nt, Homo sapiens
  misc_RNA (1)...(19): siRNA sense strand
ccaccuaucgcccaucaca

SEQ ID NO: 2062705 - RNA, 19 nt, Homo sapiens
  misc_RNA (1)...(19): siRNA sense strand
guggcaaguucacauuuac

SEQ ID NO: 2062706 - RNA, 19 nt, Homo sapiens
  misc_RNA (1)...(19): siRNA sense strand
acguaucucuuacauugga

SEQ ID NO: 2062707 - RNA, 19 nt, Homo sapiens
  misc_RNA (1)...(19): siRNA sense strand
guucugguuaucaguguaa

SEQ ID NO: 2062708 - RNA, 19 nt, Homo sapiens
  misc_RNA (1)...(19): siRNA sense strand
agaaggaguuguggaugca

SEQ ID NO: 2062709 - RNA, 19 nt, Homo sapiens
  misc_RNA (1)...(19): siRNA sense strand
agaguguguuuaagaccaa

SEQ ID NO: 2062710 - RNA, 19 nt, Homo sapiens
  misc_RNA (1)...(19): siRNA sense strand
uaucgcccaucacauuaca

SEQ ID NO: 2062711 - RNA, 19 nt, Homo sapiens
  misc_RNA (1)...(19): siRNA sense strand
auaacuacaccauucgaaa

SEQ ID NO: 2062712 - RNA, 19 nt, Homo sapiens
  misc_RNA (1)...(19): siRNA sense strand
ugaacccuuugugucuaua

SEQ ID NO: 2062713 - RNA, 19 nt, Homo sapiens
  misc_RNA (1)...(19): siRNA sense strand
gguucugguuaucagugua

SEQ ID NO: 2062714 - RNA, 19 nt, Homo sapiens
  misc_RNA (1)...(19): siRNA sense strand
ggaaaagagagggauauau

SEQ ID NO: 2062715 - RNA, 19 nt, Homo sapiens
  misc_RNA (1)...(19): siRNA sense strand
agauuucagcuuuccuuaa

SEQ ID NO: 2062716 - RNA, 19 nt, Homo sapiens
  misc_RNA (1)...(19): siRNA sense strand
gggacgucguggcaaguuc

SEQ ID NO: 2062717 - RNA, 19 nt, Homo sapiens
  misc_RNA (1)...(19): siRNA sense strand
caacguaucucuuacauug

SEQ ID NO: 2062718 - RNA, 19 nt, Homo sapiens
  misc_RNA (1)...(19): siRNA sense strand
gcaccuacauuaaugcuaa

SEQ ID NO: 2062719 - RNA, 19 nt, Homo sapiens
  misc_RNA (1)...(19): siRNA sense strand
caaagugaauucauggaaa

SEQ ID NO: 2062720 - RNA, 19 nt, Homo sapiens
  misc_RNA (1)...(19): siRNA sense strand
gagaagaggguccaacgua

SEQ ID NO: 2062721 - RNA, 19 nt, Homo sapiens
  misc_RNA (1)...(19): siRNA sense strand
gaaagaagaaggaguugug

SEQ ID NO: 2062722 - RNA, 19 nt, Homo sapiens
  misc_RNA (1)...(19): siRNA sense strand
gucaacagcugaaagaaga

SEQ ID NO: 2062723 - RNA, 19 nt, Homo sapiens
  misc_RNA (1)...(19): siRNA sense strand
ucauugagcaccuacauua

SEQ ID NO: 2062724 - RNA, 19 nt, Homo sapiens
  misc_RNA (1)...(19): siRNA sense strand
cccaacaugugaagcauua

SEQ ID NO: 2062725 - RNA, 19 nt, Homo sapiens
  misc_RNA (1)...(19): siRNA sense strand
caaagguacugaauguugu

SEQ ID NO: 2062726 - RNA, 19 nt, Homo sapiens
  misc_RNA (1)...(19): siRNA sense strand
ccagugagcaguaugaauu

SEQ ID NO: 2062727 - RNA, 19 nt, Homo sapiens
  misc_RNA (1)...(19): siRNA sense strand
gauuucagcuuuccuuaag

SEQ ID NO: 2062728 - RNA, 19 nt, Homo sapiens
  misc_RNA (1)...(19): siRNA sense strand
gaagaagacagacuugcuu

SEQ ID NO: 2062729 - RNA, 19 nt, Homo sapiens
  misc_RNA (1)...(19): siRNA sense strand
ucacaagacuccagacagu

SEQ ID NO: 2062730 - RNA, 19 nt, Homo sapiens
  misc_RNA (1)...(19): siRNA sense strand
ccaaagaaauugauauucc

SEQ ID NO: 2062731 - RNA, 19 nt, Homo sapiens
  misc_RNA (1)...(19): siRNA sense strand
cguggcaaguucacauuua

SEQ ID NO: 2062732 - RNA, 19 nt, Homo sapiens
  misc_RNA (1)...(19): siRNA sense strand
ccaaagguacugaauguug

SEQ ID NO: 2062733 - RNA, 19 nt, Homo sapiens
  misc_RNA (1)...(19): siRNA sense strand
gcagaugguuuggcaggaa

SEQ ID NO: 2062734 - RNA, 19 nt, Homo sapiens
  misc_RNA (1)...(19): siRNA sense strand
ucaacaccguggaugauuu

SEQ ID NO: 2062735 - RNA, 19 nt, Homo sapiens
  misc_RNA (1)...(19): siRNA sense strand
gaagguagcaauggaguau

SEQ ID NO: 2062736 - RNA, 19 nt, Homo sapiens
  misc_RNA (1)...(19): siRNA sense strand
gcagucagccagccgaauu

SEQ ID NO: 2062737 - RNA, 19 nt, Homo sapiens
  misc_RNA (1)...(19): siRNA sense strand
gaaaagagagggauauaug

SEQ ID NO: 2062738 - RNA, 19 nt, Homo sapiens
  misc_RNA (1)...(19): siRNA sense strand
cucagcaucuuuguuauua

SEQ ID NO: 2062739 - RNA, 19 nt, Homo sapiens
  misc_RNA (1)...(19): siRNA sense strand
gggagaagguagcaaugga

SEQ ID NO: 2062740 - RNA, 19 nt, Homo sapiens
  misc_RNA (1)...(19): siRNA sense strand
cguguuugaugauucuuua

SEQ ID NO: 2062741 - RNA, 19 nt, Homo sapiens
  misc_RNA (1)...(19): siRNA sense strand
gaacauugaacccuuugug

SEQ ID NO: 2062742 - RNA, 19 nt, Homo sapiens
  misc_RNA (1)...(19): siRNA sense strand
gguuaucaguguaaaugaa

SEQ ID NO: 2062743 - RNA, 19 nt, Homo sapiens
  misc_RNA (1)...(19): siRNA sense strand
auaguaacguguuugauga

SEQ ID NO: 2062744 - RNA, 19 nt, Homo sapiens
  misc_RNA (1)...(19): siRNA sense strand
cauaggacuucaagagaga

SEQ ID NO: 2062745 - RNA, 19 nt, Homo sapiens
  misc_RNA (1)...(19): siRNA sense strand
agaaaugugugcuauacug

SEQ ID NO: 2062746 - RNA, 19 nt, Homo sapiens
  misc_RNA (1)...(19): siRNA sense strand
agaagaggguccaacguau

SEQ ID NO: 2062747 - RNA, 19 nt, Homo sapiens
  misc_RNA (1)...(19): siRNA sense strand
agagagggauauauggaaa

SEQ ID NO: 2062748 - RNA, 19 nt, Homo sapiens
  misc_RNA (1)...(19): siRNA sense strand
cacauuuacuccaaaguga

SEQ ID NO: 2062749 - RNA, 19 nt, Homo sapiens
  misc_RNA (1)...(19): siRNA sense strand
ugugauaacuacaccauuc

SEQ ID NO: 2062750 - RNA, 19 nt, Homo sapiens
  misc_RNA (1)...(19): siRNA sense strand
ggauguagaagaagacaga

SEQ ID NO: 2062751 - RNA, 19 nt, Homo sapiens
  misc_RNA (1)...(19): siRNA sense strand
caaagacaguccacagcau

SEQ ID NO: 2062752 - RNA, 19 nt, Homo sapiens
  misc_RNA (1)...(19): siRNA sense strand
gcugaaagaagaaggaguu

SEQ ID NO: 2062753 - RNA, 19 nt, Homo sapiens
  misc_RNA (1)...(19): siRNA sense strand
caugcuggauguagaagaa

SEQ ID NO: 2062754 - RNA, 19 nt, Homo sapiens
  misc_RNA (1)...(19): siRNA sense strand
ugagaaaugugugcuauac

SEQ ID NO: 2062755 - RNA, 19 nt, Homo sapiens
  misc_RNA (1)...(19): siRNA sense strand
cagcagaguguguuuaaga

SEQ ID NO: 2062756 - RNA, 19 nt, Homo sapiens
  misc_RNA (1)...(19): siRNA sense strand
uucgaaaccuugucuuaaa

SEQ ID NO: 2062757 - RNA, 19 nt, Homo sapiens
  misc_RNA (1)...(19): siRNA sense strand
gaaaccuugucuuaaagca

SEQ ID NO: 2062758 - RNA, 19 nt, Homo sapiens
  misc_RNA (1)...(19): siRNA sense strand
uuucucagcaucuuuguua

SEQ ID NO: 2062759 - RNA, 19 nt, Homo sapiens
  misc_RNA (1)...(19): siRNA sense strand
guaacguguuugaugauuc

SEQ ID NO: 2062760 - RNA, 19 nt, Homo sapiens
  misc_RNA (1)...(19): siRNA sense strand
uaacguguuugaugauucu

SEQ ID NO: 2062761 - RNA, 19 nt, Homo sapiens
  misc_RNA (1)...(19): siRNA sense strand
gaagaggguccaacguauc

SEQ ID NO: 2062762 - RNA, 19 nt, Homo sapiens
  misc_RNA (1)...(19): siRNA sense strand
gacaaaaucuggagcaaag

SEQ ID NO: 2062763 - RNA, 19 nt, Homo sapiens
  misc_RNA (1)...(19): siRNA sense strand
uauaguaacguguuugaug

SEQ ID NO: 2062764 - RNA, 19 nt, Homo sapiens
  misc_RNA (1)...(19): siRNA sense strand
ucucuuacauuggacauga

SEQ ID NO: 2062765 - RNA, 19 nt, Homo sapiens
  misc_RNA (1)...(19): siRNA sense strand
gagcaaagaaggauuuuau

SEQ ID NO: 2062766 - RNA, 19 nt, Homo sapiens
  misc_RNA (1)...(19): siRNA sense strand
ccaaagugaauucauggaa

SEQ ID NO: 2062767 - RNA, 19 nt, Homo sapiens
  misc_RNA (1)...(19): siRNA sense strand
gcucugugccuguaugaga

SEQ ID NO: 2062768 - RNA, 19 nt, Homo sapiens
  misc_RNA (1)...(19): siRNA sense strand
aaaguugagguucugguua

SEQ ID NO: 2062769 - RNA, 19 nt, Homo sapiens
  misc_RNA (1)...(19): siRNA sense strand
gaucccaaagaaauugaua

SEQ ID NO: 2062770 - RNA, 19 nt, Homo sapiens
  misc_RNA (1)...(19): siRNA sense strand
uaagacaagacaaagagaa

SEQ ID NO: 2062771 - RNA, 19 nt, Homo sapiens
  misc_RNA (1)...(19): siRNA sense strand
cauucgaaaccuugucuua

SEQ ID NO: 2062772 - RNA, 19 nt, Homo sapiens
  misc_RNA (1)...(19): siRNA sense strand
gugcuauacuggccggaaa

SEQ ID NO: 2062773 - RNA, 19 nt, Homo sapiens
  misc_RNA (1)...(19): siRNA sense strand
ggaagccacacccaacaug

SEQ ID NO: 2062774 - RNA, 19 nt, Homo sapiens
  misc_RNA (1)...(19): siRNA sense strand
cuacauccauuggcuguca

SEQ ID NO: 2062775 - RNA, 19 nt, Homo sapiens
  misc_RNA (1)...(19): siRNA sense strand
cagcuuuccuuaagacaag

SEQ ID NO: 2062776 - RNA, 19 nt, Homo sapiens
  misc_RNA (1)...(19): siRNA sense strand
ccucauggccugaucacaa

SEQ ID NO: 2062777 - RNA, 19 nt, Homo sapiens
  misc_RNA (1)...(19): siRNA sense strand
gauaacuacaccauucgaa

SEQ ID NO: 2062778 - RNA, 19 nt, Homo sapiens
  misc_RNA (1)...(19): siRNA sense strand
aaguugagguucugguuau

SEQ ID NO: 2062779 - RNA, 19 nt, Homo sapiens
  misc_RNA (1)...(19): siRNA sense strand
gaagccacacccaacaugu

SEQ ID NO: 2062780 - RNA, 19 nt, Homo sapiens
  misc_RNA (1)...(19): siRNA sense strand
aaugagaaaugugugcuau

SEQ ID NO: 2062781 - RNA, 19 nt, Homo sapiens
  misc_RNA (1)...(19): siRNA sense strand
ccuaucgcccaucacauua

SEQ ID NO: 2062782 - RNA, 19 nt, Homo sapiens
  misc_RNA (1)...(19): siRNA sense strand
caacaccguggaugauuuc

SEQ ID NO: 2062783 - RNA, 19 nt, Homo sapiens
  misc_RNA (1)...(19): siRNA sense strand
ggguccaacguaucucuua

SEQ ID NO: 2062784 - RNA, 19 nt, Homo sapiens
  misc_RNA (1)...(19): siRNA sense strand
guagaagaagacagacuug

SEQ ID NO: 2062785 - RNA, 19 nt, Homo sapiens
  misc_RNA (1)...(19): siRNA sense strand
gaucacaagacuccagaca

SEQ ID NO: 2062786 - RNA, 19 nt, Homo sapiens
  misc_RNA (1)...(19): siRNA sense strand
aaagagagggauauaugga

SEQ ID NO: 2062787 - RNA, 19 nt, Homo sapiens
  misc_RNA (1)...(19): siRNA sense strand
uugagcaccuacauuaaug

SEQ ID NO: 2062788 - RNA, 19 nt, Homo sapiens
  misc_RNA (1)...(19): siRNA sense strand
ucacauuuacuccaaagug

SEQ ID NO: 2062789 - RNA, 19 nt, Homo sapiens
  misc_RNA (1)...(19): siRNA sense strand
gcucaugcuggauguagaa

SEQ ID NO: 2062790 - RNA, 19 nt, Homo sapiens
  misc_RNA (1)...(19): siRNA sense strand
ucgaaaccuugucuuaaag

SEQ ID NO: 2062791 - RNA, 19 nt, Homo sapiens
  misc_RNA (1)...(19): siRNA sense strand
gcccugugauuguuaugau

SEQ ID NO: 2062792 - RNA, 19 nt, Homo sapiens
  misc_RNA (1)...(19): siRNA sense strand
acuccaaagugaauucaug

SEQ ID NO: 2062793 - RNA, 19 nt, Homo sapiens
  misc_RNA (1)...(19): siRNA sense strand
ccgaggugcuccugagauc

SEQ ID NO: 2062794 - RNA, 19 nt, Homo sapiens
  misc_RNA (1)...(19): siRNA sense strand
ugagcaguaugaauuugug

SEQ ID NO: 2062795 - RNA, 19 nt, Homo sapiens
  misc_RNA (1)...(19): siRNA sense strand
aaaccagugagcaguauga

SEQ ID NO: 2062796 - RNA, 19 nt, Homo sapiens
  misc_RNA (1)...(19): siRNA sense strand
cuacaccauucgaaaccuu

SEQ ID NO: 2062797 - RNA, 19 nt, Homo sapiens
  misc_RNA (1)...(19): siRNA sense strand
caguguaaaugaaugugau

SEQ ID NO: 2062798 - RNA, 19 nt, Homo sapiens
  misc_RNA (1)...(19): siRNA sense strand
ggacgucguggcaaguuca

SEQ ID NO: 2062799 - RNA, 19 nt, Homo sapiens
  misc_RNA (1)...(19): siRNA sense strand
caacaccacgggagaaggu

SEQ ID NO: 2062800 - RNA, 19 nt, Homo sapiens
  misc_RNA (1)...(19): siRNA sense strand
gcccauaggacuucaagag

SEQ ID NO: 2062801 - RNA, 19 nt, Homo sapiens
  misc_RNA (1)...(19): siRNA sense strand
gcaggaauagguagaacag

SEQ ID NO: 2062802 - RNA, 19 nt, Homo sapiens
  misc_RNA (1)...(19): siRNA sense strand
aagacaagacaaagagaaa

SEQ ID NO: 2062803 - RNA, 19 nt, Homo sapiens
  misc_RNA (1)...(19): siRNA sense strand
ucagccagccgaauucuca

SEQ ID NO: 2062804 - RNA, 19 nt, Homo sapiens
  misc_RNA (1)...(19): siRNA sense strand
uaacuacaccauucgaaac

SEQ ID NO: 2062805 - RNA, 19 nt, Homo sapiens
  misc_RNA (1)...(19): siRNA sense strand
cauugagcaccuacauuaa

SEQ ID NO: 2062806 - RNA, 19 nt, Homo sapiens
  misc_RNA (1)...(19): siRNA sense strand
uaccaccgcuaccucuguu

SEQ ID NO: 2062807 - RNA, 19 nt, Homo sapiens
  misc_RNA (1)...(19): siRNA sense strand
agaagaaggaguuguggau

SEQ ID NO: 2062808 - RNA, 19 nt, Homo sapiens
  misc_RNA (1)...(19): siRNA sense strand
gaucacaaaacucaaagaa

SEQ ID NO: 2062809 - RNA, 19 nt, Homo sapiens
  misc_RNA (1)...(19): siRNA sense strand
guucacauuuacuccaaag

SEQ ID NO: 2062810 - RNA, 19 nt, Homo sapiens
  misc_RNA (1)...(19): siRNA sense strand
gguccaacguaucucuuac

SEQ ID NO: 2062811 - RNA, 19 nt, Homo sapiens
  misc_RNA (1)...(19): siRNA sense strand
cagugagcaguaugaauuu

SEQ ID NO: 2062812 - RNA, 19 nt, Homo sapiens
  misc_RNA (1)...(19): siRNA sense strand
ggaguuguggaugcacuaa

SEQ ID NO: 2062813 - RNA, 19 nt, Homo sapiens
  misc_RNA (1)...(19): siRNA sense strand
ccaccuaucgcccaucaca

SEQ ID NO: 2062814 - RNA, 19 nt, Homo sapiens
  misc_RNA (1)...(19): siRNA sense strand
guggcaaguucacauuuac

SEQ ID NO: 2062815 - RNA, 19 nt, Homo sapiens
  misc_RNA (1)...(19): siRNA sense strand
acguaucucuuacauugga

SEQ ID NO: 2062816 - RNA, 19 nt, Homo sapiens
  misc_RNA (1)...(19): siRNA sense strand
gcaugaagcggacaaaauc

SEQ ID NO: 2062817 - RNA, 19 nt, Homo sapiens
  misc_RNA (1)...(19): siRNA sense strand
caacguaucucuuacauug

SEQ ID NO: 2062818 - RNA, 19 nt, Homo sapiens
  misc_RNA (1)...(19): siRNA sense strand
gcaccuacauuaaugcuaa

SEQ ID NO: 2062819 - RNA, 19 nt, Homo sapiens
  misc_RNA (1)...(19): siRNA sense strand
caaagugaauucauggaaa

SEQ ID NO: 2062820 - RNA, 19 nt, Homo sapiens
  misc_RNA (1)...(19): siRNA sense strand
gagaagaggguccaacgua

SEQ ID NO: 2062821 - RNA, 19 nt, Homo sapiens
  misc_RNA (1)...(19): siRNA sense strand
gaaagaagaaggaguugug

SEQ ID NO: 2062822 - RNA, 19 nt, Homo sapiens
  misc_RNA (1)...(19): siRNA sense strand
gucaacagcugaaagaaga

SEQ ID NO: 2062823 - RNA, 19 nt, Homo sapiens
  misc_RNA (1)...(19): siRNA sense strand
ucauugagcaccuacauua

SEQ ID NO: 2062824 - RNA, 19 nt, Homo sapiens
  misc_RNA (1)...(19): siRNA sense strand
cccaacaugugaagcauua

SEQ ID NO: 2062825 - RNA, 19 nt, Homo sapiens
  misc_RNA (1)...(19): siRNA sense strand
caaagguacugaauguugu

SEQ ID NO: 2062826 - RNA, 19 nt, Homo sapiens
  misc_RNA (1)...(19): siRNA sense strand
ccagugagcaguaugaauu

SEQ ID NO: 2062827 - RNA, 19 nt, Homo sapiens
  misc_RNA (1)...(19): siRNA sense strand
gauuucagcuuuccuuaag

SEQ ID NO: 2062828 - RNA, 19 nt, Homo sapiens
  misc_RNA (1)...(19): siRNA sense strand
gaagaagacagacuugcuu

SEQ ID NO: 2062829 - RNA, 19 nt, Homo sapiens
  misc_RNA (1)...(19): siRNA sense strand
ucacaagacuccagacagu

SEQ ID NO: 2062830 - RNA, 19 nt, Homo sapiens
  misc_RNA (1)...(19): siRNA sense strand
ccaaagaaauugauauucc

SEQ ID NO: 2062831 - RNA, 19 nt, Homo sapiens
  misc_RNA (1)...(19): siRNA sense strand
cguggcaaguucacauuua

SEQ ID NO: 2062832 - RNA, 19 nt, Homo sapiens
  misc_RNA (1)...(19): siRNA sense strand
ccaaagguacugaauguug

SEQ ID NO: 2062833 - RNA, 19 nt, Homo sapiens
  misc_RNA (1)...(19): siRNA sense strand
gcagaugguuuggcaggaa

SEQ ID NO: 2062834 - RNA, 19 nt, Homo sapiens
  misc_RNA (1)...(19): siRNA sense strand
ucaacaccguggaugauuu

SEQ ID NO: 2062835 - RNA, 19 nt, Homo sapiens
  misc_RNA (1)...(19): siRNA sense strand
gaagguagcaauggaguau

SEQ ID NO: 2062836 - RNA, 19 nt, Homo sapiens
  misc_RNA (1)...(19): siRNA sense strand
gcagucagccagccgaauu

SEQ ID NO: 2062837 - RNA, 19 nt, Homo sapiens
  misc_RNA (1)...(19): siRNA sense strand
gaaaagagagggauauaug

SEQ ID NO: 2062838 - RNA, 19 nt, Homo sapiens
  misc_RNA (1)...(19): siRNA sense strand
gggagaagguagcaaugga

SEQ ID NO: 2062839 - RNA, 19 nt, Homo sapiens
  misc_RNA (1)...(19): siRNA sense strand
gaacauugaacccuuugug

SEQ ID NO: 2062840 - RNA, 19 nt, Homo sapiens
  misc_RNA (1)...(19): siRNA sense strand
gguuaucaguguaaaugaa

SEQ ID NO: 2062841 - RNA, 19 nt, Homo sapiens
  misc_RNA (1)...(19): siRNA sense strand
cauaggacuucaagagaga

SEQ ID NO: 2062842 - RNA, 19 nt, Homo sapiens
  misc_RNA (1)...(19): siRNA sense strand
agaaaugugugcuauacug

SEQ ID NO: 2062843 - RNA, 19 nt, Homo sapiens
  misc_RNA (1)...(19): siRNA sense strand
agaagaggguccaacguau

SEQ ID NO: 2062844 - RNA, 19 nt, Homo sapiens
  misc_RNA (1)...(19): siRNA sense strand
agagagggauauauggaaa

SEQ ID NO: 2062845 - RNA, 19 nt, Homo sapiens
  misc_RNA (1)...(19): siRNA sense strand
cacauuuacuccaaaguga

SEQ ID NO: 2062846 - RNA, 19 nt, Homo sapiens
  misc_RNA (1)...(19): siRNA sense strand
ugugauaacuacaccauuc

SEQ ID NO: 2062847 - RNA, 19 nt, Homo sapiens
  misc_RNA (1)...(19): siRNA sense strand
ggauguagaagaagacaga

SEQ ID NO: 2062848 - RNA, 19 nt, Homo sapiens
  misc_RNA (1)...(19): siRNA sense strand
caaagacaguccacagcau

SEQ ID NO: 2062849 - RNA, 19 nt, Homo sapiens
  misc_RNA (1)...(19): siRNA sense strand
gcugaaagaagaaggaguu

SEQ ID NO: 2062850 - RNA, 19 nt, Homo sapiens
  misc_RNA (1)...(19): siRNA sense strand
caugcuggauguagaagaa

SEQ ID NO: 2062851 - RNA, 19 nt, Homo sapiens
  misc_RNA (1)...(19): siRNA sense strand
ugagaaaugugugcuauac

SEQ ID NO: 2062852 - RNA, 19 nt, Homo sapiens
  misc_RNA (1)...(19): siRNA sense strand
cagcagaguguguuuaaga

SEQ ID NO: 2062853 - RNA, 19 nt, Homo sapiens
  misc_RNA (1)...(19): siRNA sense strand
uucgaaaccuugucuuaaa

SEQ ID NO: 2062854 - RNA, 19 nt, Homo sapiens
  misc_RNA (1)...(19): siRNA sense strand
gaaaccuugucuuaaagca

SEQ ID NO: 2062855 - RNA, 19 nt, Homo sapiens
  misc_RNA (1)...(19): siRNA sense strand
gaagaggguccaacguauc

SEQ ID NO: 2062856 - RNA, 19 nt, Homo sapiens
  misc_RNA (1)...(19): siRNA sense strand
ucucuuacauuggacauga

SEQ ID NO: 2062857 - RNA, 19 nt, Homo sapiens
  misc_RNA (1)...(19): siRNA sense strand
ccaaagugaauucauggaa

SEQ ID NO: 2062858 - RNA, 19 nt, Homo sapiens
  misc_RNA (1)...(19): siRNA sense strand
gcucugugccuguaugaga

SEQ ID NO: 2062859 - RNA, 19 nt, Homo sapiens
  misc_RNA (1)...(19): siRNA sense strand
aaaguugagguucugguua

SEQ ID NO: 2062860 - RNA, 19 nt, Homo sapiens
  misc_RNA (1)...(19): siRNA sense strand
gaucccaaagaaauugaua

SEQ ID NO: 2062861 - RNA, 19 nt, Homo sapiens
  misc_RNA (1)...(19): siRNA sense strand
uaagacaagacaaagagaa

SEQ ID NO: 2062862 - RNA, 19 nt, Homo sapiens
  misc_RNA (1)...(19): siRNA sense strand
cauucgaaaccuugucuua

SEQ ID NO: 2062863 - RNA, 19 nt, Homo sapiens
  misc_RNA (1)...(19): siRNA sense strand
gugcuauacuggccggaaa

SEQ ID NO: 2062864 - RNA, 19 nt, Homo sapiens
  misc_RNA (1)...(19): siRNA sense strand
cagcuuuccuuaagacaag

SEQ ID NO: 2062865 - RNA, 19 nt, Homo sapiens
  misc_RNA (1)...(19): siRNA sense strand
cuacauccauuggcuguca

SEQ ID NO: 2062866 - RNA, 19 nt, Homo sapiens
  misc_RNA (1)...(19): siRNA sense strand
ccucauggccugaucacaa

SEQ ID NO: 2062867 - RNA, 19 nt, Homo sapiens
  misc_RNA (1)...(19): siRNA sense strand
ggaagccacacccaacaug

SEQ ID NO: 2062868 - RNA, 19 nt, Homo sapiens
  misc_RNA (1)...(19): siRNA sense strand
gauaacuacaccauucgaa

SEQ ID NO: 2062869 - RNA, 19 nt, Homo sapiens
  misc_RNA (1)...(19): siRNA sense strand
aaguugagguucugguuau

SEQ ID NO: 2062870 - RNA, 19 nt, Homo sapiens
  misc_RNA (1)...(19): siRNA sense strand
gaagccacacccaacaugu

SEQ ID NO: 2062871 - RNA, 19 nt, Homo sapiens
  misc_RNA (1)...(19): siRNA sense strand
aaugagaaaugugugcuau

SEQ ID NO: 2062872 - RNA, 19 nt, Homo sapiens
  misc_RNA (1)...(19): siRNA sense strand
caacaccguggaugauuuc

SEQ ID NO: 2062873 - RNA, 19 nt, Homo sapiens
  misc_RNA (1)...(19): siRNA sense strand
ccuaucgcccaucacauua

SEQ ID NO: 2062874 - RNA, 19 nt, Homo sapiens
  misc_RNA (1)...(19): siRNA sense strand
ggguccaacguaucucuua

SEQ ID NO: 2062875 - RNA, 19 nt, Homo sapiens
  misc_RNA (1)...(19): siRNA sense strand
guagaagaagacagacuug

SEQ ID NO: 2062876 - RNA, 19 nt, Homo sapiens
  misc_RNA (1)...(19): siRNA sense strand
gaucacaagacuccagaca

SEQ ID NO: 2062877 - RNA, 19 nt, Homo sapiens
  misc_RNA (1)...(19): siRNA sense strand
aaagagagggauauaugga

SEQ ID NO: 2062878 - RNA, 19 nt, Homo sapiens
  misc_RNA (1)...(19): siRNA sense strand
uugagcaccuacauuaaug

SEQ ID NO: 2062879 - RNA, 19 nt, Homo sapiens
  misc_RNA (1)...(19): siRNA sense strand
ucacauuuacuccaaagug

SEQ ID NO: 2062880 - RNA, 19 nt, Homo sapiens
  misc_RNA (1)...(19): siRNA sense strand
gcucaugcuggauguagaa

SEQ ID NO: 2062881 - RNA, 19 nt, Homo sapiens
  misc_RNA (1)...(19): siRNA sense strand
ucgaaaccuugucuuaaag

SEQ ID NO: 2062882 - RNA, 19 nt, Homo sapiens
  misc_RNA (1)...(19): siRNA sense strand
gcccugugauuguuaugau

SEQ ID NO: 2062883 - RNA, 19 nt, Homo sapiens
  misc_RNA (1)...(19): siRNA sense strand
acuccaaagugaauucaug

SEQ ID NO: 2062884 - RNA, 19 nt, Homo sapiens
  misc_RNA (1)...(19): siRNA sense strand
caacaccacgggagaaggu

SEQ ID NO: 2062885 - RNA, 19 nt, Homo sapiens
  misc_RNA (1)...(19): siRNA sense strand
ugagcaguaugaauuugug

SEQ ID NO: 2062886 - RNA, 19 nt, Homo sapiens
  misc_RNA (1)...(19): siRNA sense strand
aaaccagugagcaguauga

SEQ ID NO: 2062887 - RNA, 19 nt, Homo sapiens
  misc_RNA (1)...(19): siRNA sense strand
ccgaggugcuccugagauc

SEQ ID NO: 2062888 - RNA, 19 nt, Homo sapiens
  misc_RNA (1)...(19): siRNA sense strand
cuacaccauucgaaaccuu

SEQ ID NO: 2062889 - RNA, 19 nt, Homo sapiens
  misc_RNA (1)...(19): siRNA sense strand
caguguaaaugaaugugau

SEQ ID NO: 2062890 - RNA, 19 nt, Homo sapiens
  misc_RNA (1)...(19): siRNA sense strand
ggacgucguggcaaguuca

SEQ ID NO: 2062891 - RNA, 19 nt, Homo sapiens
  misc_RNA (1)...(19): siRNA sense strand
gcccauaggacuucaagag

SEQ ID NO: 2062892 - RNA, 19 nt, Homo sapiens
  misc_RNA (1)...(19): siRNA sense strand
gcaggaauagguagaacag

SEQ ID NO: 2062893 - RNA, 19 nt, Homo sapiens
  misc_RNA (1)...(19): siRNA sense strand
aagacaagacaaagagaaa

SEQ ID NO: 2062894 - RNA, 19 nt, Homo sapiens
  misc_RNA (1)...(19): siRNA sense strand
ucagccagccgaauucuca

SEQ ID NO: 2062895 - RNA, 19 nt, Homo sapiens
  misc_RNA (1)...(19): siRNA sense strand
uaacuacaccauucgaaac

SEQ ID NO: 2062896 - RNA, 19 nt, Homo sapiens
  misc_RNA (1)...(19): siRNA sense strand
cauugagcaccuacauuaa

SEQ ID NO: 2062897 - RNA, 19 nt, Homo sapiens
  misc_RNA (1)...(19): siRNA sense strand
guucacauuuacuccaaag

SEQ ID NO: 2062898 - RNA, 19 nt, Homo sapiens
  misc_RNA (1)...(19): siRNA sense strand
agaagaaggaguuguggau

SEQ ID NO: 2062899 - RNA, 19 nt, Homo sapiens
  misc_RNA (1)...(19): siRNA sense strand
gaucacaaaacucaaagaa

SEQ ID NO: 2062900 - RNA, 19 nt, Homo sapiens
  misc_RNA (1)...(19): siRNA sense strand
uaccaccgcuaccucuguu

SEQ ID NO: 2062901 - RNA, 19 nt, Homo sapiens
  misc_RNA (1)...(19): siRNA sense strand
gguccaacguaucucuuac

SEQ ID NO: 2062902 - RNA, 19 nt, Homo sapiens
  misc_RNA (1)...(19): siRNA sense strand
cagugagcaguaugaauuu

SEQ ID NO: 2062903 - RNA, 19 nt, Homo sapiens
  misc_RNA (1)...(19): siRNA sense strand
ggaguuguggaugcacuaa

SEQ ID NO: 2062904 - RNA, 19 nt, Homo sapiens
  misc_RNA (1)...(19): siRNA sense strand
ccaccuaucgcccaucaca

SEQ ID NO: 2062905 - RNA, 19 nt, Homo sapiens
  misc_RNA (1)...(19): siRNA sense strand
guggcaaguucacauuuac

SEQ ID NO: 2062906 - RNA, 19 nt, Homo sapiens
  misc_RNA (1)...(19): siRNA sense strand
acguaucucuuacauugga

SEQ ID NO: 2062907 - RNA, 19 nt, Homo sapiens
  misc_RNA (1)...(19): siRNA sense strand
guucugguuaucaguguaa

SEQ ID NO: 2062908 - RNA, 19 nt, Homo sapiens
  misc_RNA (1)...(19): siRNA sense strand
agaaggaguuguggaugca

SEQ ID NO: 2062909 - RNA, 19 nt, Homo sapiens
  misc_RNA (1)...(19): siRNA sense strand
agaguguguuuaagaccaa

SEQ ID NO: 2062910 - RNA, 19 nt, Homo sapiens
  misc_RNA (1)...(19): siRNA sense strand
uaucgcccaucacauuaca

SEQ ID NO: 2062911 - RNA, 19 nt, Homo sapiens
  misc_RNA (1)...(19): siRNA sense strand
auaacuacaccauucgaaa

SEQ ID NO: 2062912 - RNA, 19 nt, Homo sapiens
  misc_RNA (1)...(19): siRNA sense strand
ugaacccuuugugucuaua

SEQ ID NO: 2062913 - RNA, 19 nt, Homo sapiens
  misc_RNA (1)...(19): siRNA sense strand
gguucugguuaucagugua

SEQ ID NO: 2062914 - RNA, 19 nt, Homo sapiens
  misc_RNA (1)...(19): siRNA sense strand
ggaaaagagagggauauau

SEQ ID NO: 2062915 - RNA, 19 nt, Homo sapiens
  misc_RNA (1)...(19): siRNA sense strand
agauuucagcuuuccuuaa

SEQ ID NO: 2062916 - RNA, 19 nt, Homo sapiens
  misc_RNA (1)...(19): siRNA sense strand
gggacgucguggcaaguuc

SEQ ID NO: 2062917 - RNA, 19 nt, Homo sapiens
  misc_RNA (1)...(19): siRNA sense strand
ggcacuggcuguaugagua

SEQ ID NO: 2062918 - RNA, 19 nt, Homo sapiens
  misc_RNA (1)...(19): siRNA sense strand
caucuucgcuaaccucuuc

SEQ ID NO: 2062919 - RNA, 19 nt, Homo sapiens
  misc_RNA (1)...(19): siRNA sense strand
gcaucgagguuggcaagaa

SEQ ID NO: 2062920 - RNA, 19 nt, Homo sapiens
  misc_RNA (1)...(19): siRNA sense strand
gcaccuuccuggccgugaa

SEQ ID NO: 2062921 - RNA, 19 nt, Homo sapiens
  misc_RNA (1)...(19): siRNA sense strand
gcugggcacuggcuguaug

SEQ ID NO: 2062922 - RNA, 19 nt, Homo sapiens
  misc_RNA (1)...(19): siRNA sense strand
ucaaguugguggcgcugaa

SEQ ID NO: 2062923 - RNA, 19 nt, Homo sapiens
  misc_RNA (1)...(19): siRNA sense strand
gcacuggcuguaugaguag

SEQ ID NO: 2062924 - RNA, 19 nt, Homo sapiens
  misc_RNA (1)...(19): siRNA sense strand
caucgagguuggcaagaac

SEQ ID NO: 2062925 - RNA, 19 nt, Homo sapiens
  misc_RNA (1)...(19): siRNA sense strand
ggauuucugcaucgagguu

SEQ ID NO: 2062926 - RNA, 19 nt, Homo sapiens
  misc_RNA (1)...(19): siRNA sense strand
gaagcccgauggcgugcaa

SEQ ID NO: 2062927 - RNA, 19 nt, Homo sapiens
  misc_RNA (1)...(19): siRNA sense strand
ggacgugauccagcgcuuu

SEQ ID NO: 2062928 - RNA, 19 nt, Homo sapiens
  misc_RNA (1)...(19): siRNA sense strand
gacgugauccagcgcuuug

SEQ ID NO: 2062929 - RNA, 19 nt, Homo sapiens
  misc_RNA (1)...(19): siRNA sense strand
cuucuacccugcccucauc

SEQ ID NO: 2062930 - RNA, 19 nt, Homo sapiens
  misc_RNA (1)...(19): siRNA sense strand
gacuucagcguccacauca

SEQ ID NO: 2062931 - RNA, 19 nt, Homo sapiens
  misc_RNA (1)...(19): siRNA sense strand
ugacuucagcguccacauc

SEQ ID NO: 2062932 - RNA, 19 nt, Homo sapiens
  misc_RNA (1)...(19): siRNA sense strand
guccacaucagcaggaaug

SEQ ID NO: 2062933 - RNA, 19 nt, Homo sapiens
  misc_RNA (1)...(19): siRNA sense strand
gaacuacucuuuaccuuug

SEQ ID NO: 2062934 - RNA, 19 nt, Homo sapiens
  misc_RNA (1)...(19): siRNA sense strand
ggaaacagcuacaugauuc

SEQ ID NO: 2062935 - RNA, 19 nt, Homo sapiens
  misc_RNA (1)...(19): siRNA sense strand
caaggaaaccucuauauug

SEQ ID NO: 2062936 - RNA, 19 nt, Homo sapiens
  misc_RNA (1)...(19): siRNA sense strand
gcagagacguccggaaauu

SEQ ID NO: 2062937 - RNA, 19 nt, Homo sapiens
  misc_RNA (1)...(19): siRNA sense strand
uggcagaccugaacaauga

SEQ ID NO: 2062938 - RNA, 19 nt, Homo sapiens
  misc_RNA (1)...(19): siRNA sense strand
ggacuuaucugaguauagu

SEQ ID NO: 2062939 - RNA, 19 nt, Homo sapiens
  misc_RNA (1)...(19): siRNA sense strand
gcaccuucaucgaggauua

SEQ ID NO: 2062940 - RNA, 19 nt, Homo sapiens
  misc_RNA (1)...(19): siRNA sense strand
guaaaucaccggcuacaaa

SEQ ID NO: 2062941 - RNA, 19 nt, Homo sapiens
  misc_RNA (1)...(19): siRNA sense strand
caggauggauuucaggaua

SEQ ID NO: 2062942 - RNA, 19 nt, Homo sapiens
  misc_RNA (1)...(19): siRNA sense strand
gcaaguggcugcuguaucc

SEQ ID NO: 2062943 - RNA, 19 nt, Homo sapiens
  misc_RNA (1)...(19): siRNA sense strand
gaaaggaaacagcuacaug

SEQ ID NO: 2062944 - RNA, 19 nt, Homo sapiens
  misc_RNA (1)...(19): siRNA sense strand
ccaaggaaaccucuauauu

SEQ ID NO: 2062945 - RNA, 19 nt, Homo sapiens
  misc_RNA (1)...(19): siRNA sense strand
ggacaaccuccgugacaaa

SEQ ID NO: 2062946 - RNA, 19 nt, Homo sapiens
  misc_RNA (1)...(19): siRNA sense strand
gacccuggccaucacauua

SEQ ID NO: 2062947 - RNA, 19 nt, Homo sapiens
  misc_RNA (1)...(19): siRNA sense strand
gaacuucuacccagaccuu

SEQ ID NO: 2062948 - RNA, 19 nt, Homo sapiens
  misc_RNA (1)...(19): siRNA sense strand
ggauggauuucaggauauu

SEQ ID NO: 2062949 - RNA, 19 nt, Homo sapiens
  misc_RNA (1)...(19): siRNA sense strand
gacaaccuguggcccauga

SEQ ID NO: 2062950 - RNA, 19 nt, Homo sapiens
  misc_RNA (1)...(19): siRNA sense strand
gguaauccauggagagaag

SEQ ID NO: 2062951 - RNA, 19 nt, Homo sapiens
  misc_RNA (1)...(19): siRNA sense strand
caaccuggauacccgauuc

SEQ ID NO: 2062952 - RNA, 19 nt, Homo sapiens
  misc_RNA (1)...(19): siRNA sense strand
gggugagucuggcaugaaa

SEQ ID NO: 2062953 - RNA, 19 nt, Homo sapiens
  misc_RNA (1)...(19): siRNA sense strand
guguacaucuaucacagua

SEQ ID NO: 2062954 - RNA, 19 nt, Homo sapiens
  misc_RNA (1)...(19): siRNA sense strand
gcaaaguguacaucuauca

SEQ ID NO: 2062955 - RNA, 19 nt, Homo sapiens
  misc_RNA (1)...(19): siRNA sense strand
gggcaaaguguacaucuau

SEQ ID NO: 2062956 - RNA, 19 nt, Homo sapiens
  misc_RNA (1)...(19): siRNA sense strand
aaggaaaccucuauauugg

SEQ ID NO: 2062957 - RNA, 19 nt, Homo sapiens
  misc_RNA (1)...(19): siRNA sense strand
aaaggaaacagcuacauga

SEQ ID NO: 2062958 - RNA, 19 nt, Homo sapiens
  misc_RNA (1)...(19): siRNA sense strand
gcaauagcaacacagacua

SEQ ID NO: 2062959 - RNA, 19 nt, Homo sapiens
  misc_RNA (1)...(19): siRNA sense strand
cagcagagacguccggaaa

SEQ ID NO: 2062960 - RNA, 19 nt, Homo sapiens
  misc_RNA (1)...(19): siRNA sense strand
ggauguggaugagaacuuc

SEQ ID NO: 2062961 - RNA, 19 nt, Homo sapiens
  misc_RNA (1)...(19): siRNA sense strand
ucacucugcugguggacua

SEQ ID NO: 2062962 - RNA, 19 nt, Homo sapiens
  misc_RNA (1)...(19): siRNA sense strand
gcgcaaggagugggacuua

SEQ ID NO: 2062963 - RNA, 19 nt, Homo sapiens
  misc_RNA (1)...(19): siRNA sense strand
gcagauggauguggaugag

SEQ ID NO: 2062964 - RNA, 19 nt, Homo sapiens
  misc_RNA (1)...(19): siRNA sense strand
gagcugugcuuugcuuaca

SEQ ID NO: 2062965 - RNA, 19 nt, Homo sapiens
  misc_RNA (1)...(19): siRNA sense strand
gccuacaacuggaaaggaa

SEQ ID NO: 2062966 - RNA, 19 nt, Homo sapiens
  misc_RNA (1)...(19): siRNA sense strand
ggaccaaggaaaccucuau

SEQ ID NO: 2062967 - RNA, 19 nt, Homo sapiens
  misc_RNA (1)...(19): siRNA sense strand
acaacgagaugugcaauag

SEQ ID NO: 2062968 - RNA, 19 nt, Homo sapiens
  misc_RNA (1)...(19): siRNA sense strand
gggcagccuucgugucaga

SEQ ID NO: 2062969 - RNA, 19 nt, Homo sapiens
  misc_RNA (1)...(19): siRNA sense strand
ccaucuaugucuucaugaa

SEQ ID NO: 2062970 - RNA, 19 nt, Homo sapiens
  misc_RNA (1)...(19): siRNA sense strand
gagugggacuuaucugagu

SEQ ID NO: 2062971 - RNA, 19 nt, Homo sapiens
  misc_RNA (1)...(19): siRNA sense strand
gcaaggagugggacuuauc

SEQ ID NO: 2062972 - RNA, 19 nt, Homo sapiens
  misc_RNA (1)...(19): siRNA sense strand
ccucucaaccucacucuuu

SEQ ID NO: 2062973 - RNA, 19 nt, Homo sapiens
  misc_RNA (1)...(19): siRNA sense strand
gcaaguggagcugugcuuu

SEQ ID NO: 2062974 - RNA, 19 nt, Homo sapiens
  misc_RNA (1)...(19): siRNA sense strand
gaccaaggaaaccucuaua

SEQ ID NO: 2062975 - RNA, 19 nt, Homo sapiens
  misc_RNA (1)...(19): siRNA sense strand
uggcugggcuacccuauuc

SEQ ID NO: 2062976 - RNA, 19 nt, Homo sapiens
  misc_RNA (1)...(19): siRNA sense strand
gcagguaggcagcuucauc

SEQ ID NO: 2062977 - RNA, 19 nt, Homo sapiens
  misc_RNA (1)...(19): siRNA sense strand
ggccaccucuugugugcaa

SEQ ID NO: 2062978 - RNA, 19 nt, Homo sapiens
  misc_RNA (1)...(19): siRNA sense strand
gcacggccaccucuugugu

SEQ ID NO: 2062979 - RNA, 19 nt, Homo sapiens
  misc_RNA (1)...(19): siRNA sense strand
caaccaggauggauuucag

SEQ ID NO: 2062980 - RNA, 19 nt, Homo sapiens
  misc_RNA (1)...(19): siRNA sense strand
ggaguggcccuacgaaguc

SEQ ID NO: 2062981 - RNA, 19 nt, Homo sapiens
  misc_RNA (1)...(19): siRNA sense strand
ugucagagcagcagcagaa

SEQ ID NO: 2062982 - RNA, 19 nt, Homo sapiens
  misc_RNA (1)...(19): siRNA sense strand
agauggauguggaugagaa

SEQ ID NO: 2062983 - RNA, 19 nt, Homo sapiens
  misc_RNA (1)...(19): siRNA sense strand
gcgaggcaaugaccuagag

SEQ ID NO: 2062984 - RNA, 19 nt, Homo sapiens
  misc_RNA (1)...(19): siRNA sense strand
gugguucucuguggacauu

SEQ ID NO: 2062985 - RNA, 19 nt, Homo sapiens
  misc_RNA (1)...(19): siRNA sense strand
ugaacuacucuuuaccuuu

SEQ ID NO: 2062986 - RNA, 19 nt, Homo sapiens
  misc_RNA (1)...(19): siRNA sense strand
caaccuccgugacaaacuc

SEQ ID NO: 2062987 - RNA, 19 nt, Homo sapiens
  misc_RNA (1)...(19): siRNA sense strand
ucacugcccacaaggauga

SEQ ID NO: 2062988 - RNA, 19 nt, Homo sapiens
  misc_RNA (1)...(19): siRNA sense strand
gaaacagcuacaugauuca

SEQ ID NO: 2062989 - RNA, 19 nt, Homo sapiens
  misc_RNA (1)...(19): siRNA sense strand
ugugggagcuccguuugaa

SEQ ID NO: 2062990 - RNA, 19 nt, Homo sapiens
  misc_RNA (1)...(19): siRNA sense strand
ccacggcaccgacauaugg

SEQ ID NO: 2062991 - RNA, 19 nt, Homo sapiens
  misc_RNA (1)...(19): siRNA sense strand
ggacccagaggaccaagga

SEQ ID NO: 2062992 - RNA, 19 nt, Homo sapiens
  misc_RNA (1)...(19): siRNA sense strand
cagcauuggugacaucaac

SEQ ID NO: 2062993 - RNA, 19 nt, Homo sapiens
  misc_RNA (1)...(19): siRNA sense strand
uaaaucaccggcuacaaag

SEQ ID NO: 2062994 - RNA, 19 nt, Homo sapiens
  misc_RNA (1)...(19): siRNA sense strand
gcagugaguccgcugucuu

SEQ ID NO: 2062995 - RNA, 19 nt, Homo sapiens
  misc_RNA (1)...(19): siRNA sense strand
caaguggagcugugcuuug

SEQ ID NO: 2062996 - RNA, 19 nt, Homo sapiens
  misc_RNA (1)...(19): siRNA sense strand
gaccuuaucaacccucuca

SEQ ID NO: 2062997 - RNA, 19 nt, Homo sapiens
  misc_RNA (1)...(19): siRNA sense strand
ugccaucuaugucuucaug

SEQ ID NO: 2062998 - RNA, 19 nt, Homo sapiens
  misc_RNA (1)...(19): siRNA sense strand
gguucucuguggacauuga

SEQ ID NO: 2062999 - RNA, 19 nt, Homo sapiens
  misc_RNA (1)...(19): siRNA sense strand
cuccagaccucgcuuagca

SEQ ID NO: 2063000 - RNA, 19 nt, Homo sapiens
  misc_RNA (1)...(19): siRNA sense strand
guggagcugugcuuugcuu

SEQ ID NO: 2063001 - RNA, 19 nt, Homo sapiens
  misc_RNA (1)...(19): siRNA sense strand
cgagaggaaagaggaagua

SEQ ID NO: 2063002 - RNA, 19 nt, Homo sapiens
  misc_RNA (1)...(19): siRNA sense strand
ccuacuacuucgagaggaa

SEQ ID NO: 2063003 - RNA, 19 nt, Homo sapiens
  misc_RNA (1)...(19): siRNA sense strand
gaccucgcuuagcauggua

SEQ ID NO: 2063004 - RNA, 19 nt, Homo sapiens
  misc_RNA (1)...(19): siRNA sense strand
ggccugacaacaaguguga

SEQ ID NO: 2063005 - RNA, 19 nt, Homo sapiens
  misc_RNA (1)...(19): siRNA sense strand
caacuacaggcgaaacauc

SEQ ID NO: 2063006 - RNA, 19 nt, Homo sapiens
  misc_RNA (1)...(19): siRNA sense strand
gcuggacccugcacuuugc

SEQ ID NO: 2063007 - RNA, 19 nt, Homo sapiens
  misc_RNA (1)...(19): siRNA sense strand
ggcaaaguguacaucuauc

SEQ ID NO: 2063008 - RNA, 19 nt, Homo sapiens
  misc_RNA (1)...(19): siRNA sense strand
ggaaaggaaacagcuacau

SEQ ID NO: 2063009 - RNA, 19 nt, Homo sapiens
  misc_RNA (1)...(19): siRNA sense strand
gaccgaguccggguaaaug

SEQ ID NO: 2063010 - RNA, 19 nt, Homo sapiens
  misc_RNA (1)...(19): siRNA sense strand
gaagucagcaauggcaagu

SEQ ID NO: 2063011 - RNA, 19 nt, Homo sapiens
  misc_RNA (1)...(19): siRNA sense strand
cuccaugaacuacucuuua

SEQ ID NO: 2063012 - RNA, 19 nt, Homo sapiens
  misc_RNA (1)...(19): siRNA sense strand
ugggcaaaguguacaucua

SEQ ID NO: 2063013 - RNA, 19 nt, Homo sapiens
  misc_RNA (1)...(19): siRNA sense strand
ggccagcauuggugacauc

SEQ ID NO: 2063014 - RNA, 19 nt, Homo sapiens
  misc_RNA (1)...(19): siRNA sense strand
aacgagaugugcaauagca

SEQ ID NO: 2063015 - RNA, 19 nt, Homo sapiens
  misc_RNA (1)...(19): siRNA sense strand
ucaucaacaucguccacaa

SEQ ID NO: 2063016 - RNA, 19 nt, Homo sapiens
  misc_RNA (1)...(19): siRNA sense strand
ucacauuauugaggacaug

SEQ ID NO: 2063017 - RNA, 19 nt, Homo sapiens
  misc_RNA (1)...(19): siRNA sense strand
uggcucugccuuugguuua

SEQ ID NO: 2063018 - RNA, 19 nt, Homo sapiens
  misc_RNA (1)...(19): siRNA sense strand
gaucaccguccauggcaau

SEQ ID NO: 2063019 - RNA, 19 nt, Homo sapiens
  misc_RNA (1)...(19): siRNA sense strand
ugaaaacuguggaggaugu

SEQ ID NO: 2063020 - RNA, 19 nt, Homo sapiens
  misc_RNA (1)...(19): siRNA sense strand
cuaaugagaccaucuuuug

SEQ ID NO: 2063021 - RNA, 19 nt, Homo sapiens
  misc_RNA (1)...(19): siRNA sense strand
uccaugaacuacucuuuac

SEQ ID NO: 2063022 - RNA, 19 nt, Homo sapiens
  misc_RNA (1)...(19): siRNA sense strand
ucagugggcagauggaugu

SEQ ID NO: 2063023 - RNA, 19 nt, Homo sapiens
  misc_RNA (1)...(19): siRNA sense strand
aggaaacagcuacaugauu

SEQ ID NO: 2063024 - RNA, 19 nt, Homo sapiens
  misc_RNA (1)...(19): siRNA sense strand
ggaacagcaccuucaucga

SEQ ID NO: 2063025 - RNA, 19 nt, Homo sapiens
  misc_RNA (1)...(19): siRNA sense strand
gcaucaacgugacgaacac

SEQ ID NO: 2063026 - RNA, 19 nt, Homo sapiens
  misc_RNA (1)...(19): siRNA sense strand
cacaggcucuggagaacca

SEQ ID NO: 2063027 - RNA, 19 nt, Homo sapiens
  misc_RNA (1)...(19): siRNA sense strand
gagaugugcaauagcaaca

SEQ ID NO: 2063028 - RNA, 19 nt, Homo sapiens
  misc_RNA (1)...(19): siRNA sense strand
ucugugcgcucgccuugau

SEQ ID NO: 2063029 - RNA, 19 nt, Homo sapiens
  misc_RNA (1)...(19): siRNA sense strand
cccaguggcucugccuuug

SEQ ID NO: 2063030 - RNA, 19 nt, Homo sapiens
  misc_RNA (1)...(19): siRNA sense strand
aggauggauuucaggauau

SEQ ID NO: 2063031 - RNA, 19 nt, Homo sapiens
  misc_RNA (1)...(19): siRNA sense strand
gggccugccaagcuaauga

SEQ ID NO: 2063032 - RNA, 19 nt, Homo sapiens
  misc_RNA (1)...(19): siRNA sense strand
cgaggauuacagagacuuu

SEQ ID NO: 2063033 - RNA, 19 nt, Homo sapiens
  misc_RNA (1)...(19): siRNA sense strand
gaacuacucuuuaccuuug

SEQ ID NO: 2063034 - RNA, 19 nt, Homo sapiens
  misc_RNA (1)...(19): siRNA sense strand
ggaaacagcuacaugauuc

SEQ ID NO: 2063035 - RNA, 19 nt, Homo sapiens
  misc_RNA (1)...(19): siRNA sense strand
caaggaaaccucuauauug

SEQ ID NO: 2063036 - RNA, 19 nt, Homo sapiens
  misc_RNA (1)...(19): siRNA sense strand
gcagagacguccggaaauu

SEQ ID NO: 2063037 - RNA, 19 nt, Homo sapiens
  misc_RNA (1)...(19): siRNA sense strand
uggcagaccugaacaauga

SEQ ID NO: 2063038 - RNA, 19 nt, Homo sapiens
  misc_RNA (1)...(19): siRNA sense strand
ggacuuaucugaguauagu

SEQ ID NO: 2063039 - RNA, 19 nt, Homo sapiens
  misc_RNA (1)...(19): siRNA sense strand
gcaccuucaucgaggauua

SEQ ID NO: 2063040 - RNA, 19 nt, Homo sapiens
  misc_RNA (1)...(19): siRNA sense strand
guaaaucaccggcuacaaa

SEQ ID NO: 2063041 - RNA, 19 nt, Homo sapiens
  misc_RNA (1)...(19): siRNA sense strand
caggauggauuucaggaua

SEQ ID NO: 2063042 - RNA, 19 nt, Homo sapiens
  misc_RNA (1)...(19): siRNA sense strand
gcaaguggcugcuguaucc

SEQ ID NO: 2063043 - RNA, 19 nt, Homo sapiens
  misc_RNA (1)...(19): siRNA sense strand
gaaaggaaacagcuacaug

SEQ ID NO: 2063044 - RNA, 19 nt, Homo sapiens
  misc_RNA (1)...(19): siRNA sense strand
ccaaggaaaccucuauauu

SEQ ID NO: 2063045 - RNA, 19 nt, Homo sapiens
  misc_RNA (1)...(19): siRNA sense strand
ggacaaccuccgugacaaa

SEQ ID NO: 2063046 - RNA, 19 nt, Homo sapiens
  misc_RNA (1)...(19): siRNA sense strand
gacccuggccaucacauua

SEQ ID NO: 2063047 - RNA, 19 nt, Homo sapiens
  misc_RNA (1)...(19): siRNA sense strand
gaacuucuacccagaccuu

SEQ ID NO: 2063048 - RNA, 19 nt, Homo sapiens
  misc_RNA (1)...(19): siRNA sense strand
ggauggauuucaggauauu

SEQ ID NO: 2063049 - RNA, 19 nt, Homo sapiens
  misc_RNA (1)...(19): siRNA sense strand
gacaaccuguggcccauga

SEQ ID NO: 2063050 - RNA, 19 nt, Homo sapiens
  misc_RNA (1)...(19): siRNA sense strand
gguaauccauggagagaag

SEQ ID NO: 2063051 - RNA, 19 nt, Homo sapiens
  misc_RNA (1)...(19): siRNA sense strand
caaccuggauacccgauuc

SEQ ID NO: 2063052 - RNA, 19 nt, Homo sapiens
  misc_RNA (1)...(19): siRNA sense strand
gggugagucuggcaugaaa

SEQ ID NO: 2063053 - RNA, 19 nt, Homo sapiens
  misc_RNA (1)...(19): siRNA sense strand
guguacaucuaucacagua

SEQ ID NO: 2063054 - RNA, 19 nt, Homo sapiens
  misc_RNA (1)...(19): siRNA sense strand
gcaaaguguacaucuauca

SEQ ID NO: 2063055 - RNA, 19 nt, Homo sapiens
  misc_RNA (1)...(19): siRNA sense strand
gggcaaaguguacaucuau

SEQ ID NO: 2063056 - RNA, 19 nt, Homo sapiens
  misc_RNA (1)...(19): siRNA sense strand
aaggaaaccucuauauugg

SEQ ID NO: 2063057 - RNA, 19 nt, Homo sapiens
  misc_RNA (1)...(19): siRNA sense strand
aaaggaaacagcuacauga

SEQ ID NO: 2063058 - RNA, 19 nt, Homo sapiens
  misc_RNA (1)...(19): siRNA sense strand
gcaauagcaacacagacua

SEQ ID NO: 2063059 - RNA, 19 nt, Homo sapiens
  misc_RNA (1)...(19): siRNA sense strand
cagcagagacguccggaaa

SEQ ID NO: 2063060 - RNA, 19 nt, Homo sapiens
  misc_RNA (1)...(19): siRNA sense strand
ggauguggaugagaacuuc

SEQ ID NO: 2063061 - RNA, 19 nt, Homo sapiens
  misc_RNA (1)...(19): siRNA sense strand
ucacucugcugguggacua

SEQ ID NO: 2063062 - RNA, 19 nt, Homo sapiens
  misc_RNA (1)...(19): siRNA sense strand
gcgcaaggagugggacuua

SEQ ID NO: 2063063 - RNA, 19 nt, Homo sapiens
  misc_RNA (1)...(19): siRNA sense strand
gcagauggauguggaugag

SEQ ID NO: 2063064 - RNA, 19 nt, Homo sapiens
  misc_RNA (1)...(19): siRNA sense strand
gagcugugcuuugcuuaca

SEQ ID NO: 2063065 - RNA, 19 nt, Homo sapiens
  misc_RNA (1)...(19): siRNA sense strand
gccuacaacuggaaaggaa

SEQ ID NO: 2063066 - RNA, 19 nt, Homo sapiens
  misc_RNA (1)...(19): siRNA sense strand
ggaccaaggaaaccucuau

SEQ ID NO: 2063067 - RNA, 19 nt, Homo sapiens
  misc_RNA (1)...(19): siRNA sense strand
acaacgagaugugcaauag

SEQ ID NO: 2063068 - RNA, 19 nt, Homo sapiens
  misc_RNA (1)...(19): siRNA sense strand
gggcagccuucgugucaga

SEQ ID NO: 2063069 - RNA, 19 nt, Homo sapiens
  misc_RNA (1)...(19): siRNA sense strand
ccaucuaugucuucaugaa

SEQ ID NO: 2063070 - RNA, 19 nt, Homo sapiens
  misc_RNA (1)...(19): siRNA sense strand
gagugggacuuaucugagu

SEQ ID NO: 2063071 - RNA, 19 nt, Homo sapiens
  misc_RNA (1)...(19): siRNA sense strand
gcaaggagugggacuuauc

SEQ ID NO: 2063072 - RNA, 19 nt, Homo sapiens
  misc_RNA (1)...(19): siRNA sense strand
ccucucaaccucacucuuu

SEQ ID NO: 2063073 - RNA, 19 nt, Homo sapiens
  misc_RNA (1)...(19): siRNA sense strand
gcaaguggagcugugcuuu

SEQ ID NO: 2063074 - RNA, 19 nt, Homo sapiens
  misc_RNA (1)...(19): siRNA sense strand
gaccaaggaaaccucuaua

SEQ ID NO: 2063075 - RNA, 19 nt, Homo sapiens
  misc_RNA (1)...(19): siRNA sense strand
uggcugggcuacccuauuc

SEQ ID NO: 2063076 - RNA, 19 nt, Homo sapiens
  misc_RNA (1)...(19): siRNA sense strand
gcagguaggcagcuucauc

SEQ ID NO: 2063077 - RNA, 19 nt, Homo sapiens
  misc_RNA (1)...(19): siRNA sense strand
ggccaccucuugugugcaa

SEQ ID NO: 2063078 - RNA, 19 nt, Homo sapiens
  misc_RNA (1)...(19): siRNA sense strand
gcacggccaccucuugugu

SEQ ID NO: 2063079 - RNA, 19 nt, Homo sapiens
  misc_RNA (1)...(19): siRNA sense strand
caaccaggauggauuucag

SEQ ID NO: 2063080 - RNA, 19 nt, Homo sapiens
  misc_RNA (1)...(19): siRNA sense strand
ggaguggcccuacgaaguc

SEQ ID NO: 2063081 - RNA, 19 nt, Homo sapiens
  misc_RNA (1)...(19): siRNA sense strand
ugucagagcagcagcagaa

SEQ ID NO: 2063082 - RNA, 19 nt, Homo sapiens
  misc_RNA (1)...(19): siRNA sense strand
agauggauguggaugagaa

SEQ ID NO: 2063083 - RNA, 19 nt, Homo sapiens
  misc_RNA (1)...(19): siRNA sense strand
gcacccugcccaccaagaa

SEQ ID NO: 2063084 - RNA, 19 nt, Homo sapiens
  misc_RNA (1)...(19): siRNA sense strand
ggcagacucgggaccaaua

SEQ ID NO: 2063085 - RNA, 19 nt, Homo sapiens
  misc_RNA (1)...(19): siRNA sense strand
gcgaggcaaugaccuagag

SEQ ID NO: 2063086 - RNA, 19 nt, Homo sapiens
  misc_RNA (1)...(19): siRNA sense strand
gugguucucuguggacauu

SEQ ID NO: 2063087 - RNA, 19 nt, Homo sapiens
  misc_RNA (1)...(19): siRNA sense strand
ugaacuacucuuuaccuuu

SEQ ID NO: 2063088 - RNA, 19 nt, Homo sapiens
  misc_RNA (1)...(19): siRNA sense strand
caaccuccgugacaaacuc

SEQ ID NO: 2063089 - RNA, 19 nt, Homo sapiens
  misc_RNA (1)...(19): siRNA sense strand
ucacugcccacaaggauga

SEQ ID NO: 2063090 - RNA, 19 nt, Homo sapiens
  misc_RNA (1)...(19): siRNA sense strand
gaaacagcuacaugauuca

SEQ ID NO: 2063091 - RNA, 19 nt, Homo sapiens
  misc_RNA (1)...(19): siRNA sense strand
ugugggagcuccguuugaa

SEQ ID NO: 2063092 - RNA, 19 nt, Homo sapiens
  misc_RNA (1)...(19): siRNA sense strand
ccacggcaccgacauaugg

SEQ ID NO: 2063093 - RNA, 19 nt, Homo sapiens
  misc_RNA (1)...(19): siRNA sense strand
ggacccagaggaccaagga

SEQ ID NO: 2063094 - RNA, 19 nt, Homo sapiens
  misc_RNA (1)...(19): siRNA sense strand
cagcauuggugacaucaac

SEQ ID NO: 2063095 - RNA, 19 nt, Homo sapiens
  misc_RNA (1)...(19): siRNA sense strand
gacccgcuauuaucagauc

SEQ ID NO: 2063096 - RNA, 19 nt, Homo sapiens
  misc_RNA (1)...(19): siRNA sense strand
uaaaucaccggcuacaaag

SEQ ID NO: 2063097 - RNA, 19 nt, Homo sapiens
  misc_RNA (1)...(19): siRNA sense strand
gcagugaguccgcugucuu

SEQ ID NO: 2063098 - RNA, 19 nt, Homo sapiens
  misc_RNA (1)...(19): siRNA sense strand
caaguggagcugugcuuug

SEQ ID NO: 2063099 - RNA, 19 nt, Homo sapiens
  misc_RNA (1)...(19): siRNA sense strand
gaccuuaucaacccucuca

SEQ ID NO: 2063100 - RNA, 19 nt, Homo sapiens
  misc_RNA (1)...(19): siRNA sense strand
uaucagaucaugcccaagu

SEQ ID NO: 2063101 - RNA, 19 nt, Homo sapiens
  misc_RNA (1)...(19): siRNA sense strand
ugccaucuaugucuucaug

SEQ ID NO: 2063102 - RNA, 19 nt, Homo sapiens
  misc_RNA (1)...(19): siRNA sense strand
gguucucuguggacauuga

SEQ ID NO: 2063103 - RNA, 19 nt, Homo sapiens
  misc_RNA (1)...(19): siRNA sense strand
cuccagaccucgcuuagca

SEQ ID NO: 2063104 - RNA, 19 nt, Homo sapiens
  misc_RNA (1)...(19): siRNA sense strand
guggagcugugcuuugcuu

SEQ ID NO: 2063105 - RNA, 19 nt, Homo sapiens
  misc_RNA (1)...(19): siRNA sense strand
cgagaggaaagaggaagua

SEQ ID NO: 2063106 - RNA, 19 nt, Homo sapiens
  misc_RNA (1)...(19): siRNA sense strand
ccuacuacuucgagaggaa

SEQ ID NO: 2063107 - RNA, 19 nt, Homo sapiens
  misc_RNA (1)...(19): siRNA sense strand
gaccucgcuuagcauggua

SEQ ID NO: 2063108 - RNA, 19 nt, Homo sapiens
  misc_RNA (1)...(19): siRNA sense strand
ggccugacaacaaguguga

SEQ ID NO: 2063109 - RNA, 19 nt, Homo sapiens
  misc_RNA (1)...(19): siRNA sense strand
caacuacaggcgaaacauc

SEQ ID NO: 2063110 - RNA, 19 nt, Homo sapiens
  misc_RNA (1)...(19): siRNA sense strand
gcuggacccugcacuuugc

SEQ ID NO: 2063111 - RNA, 19 nt, Homo sapiens
  misc_RNA (1)...(19): siRNA sense strand
ggcaaaguguacaucuauc

SEQ ID NO: 2063112 - RNA, 19 nt, Homo sapiens
  misc_RNA (1)...(19): siRNA sense strand
ggaaaggaaacagcuacau

SEQ ID NO: 2063113 - RNA, 19 nt, Homo sapiens
  misc_RNA (1)...(19): siRNA sense strand
gaccgaguccggguaaaug

SEQ ID NO: 2063114 - RNA, 19 nt, Homo sapiens
  misc_RNA (1)...(19): siRNA sense strand
gaagucagcaauggcaagu

SEQ ID NO: 2063115 - RNA, 19 nt, Homo sapiens
  misc_RNA (1)...(19): siRNA sense strand
cuccaugaacuacucuuua

SEQ ID NO: 2063116 - RNA, 19 nt, Homo sapiens
  misc_RNA (1)...(19): siRNA sense strand
ugggcaaaguguacaucua

SEQ ID NO: 2063117 - RNA, 19 nt, Homo sapiens
  misc_RNA (1)...(19): siRNA sense strand
ggccagcauuggugacauc

SEQ ID NO: 2063118 - RNA, 19 nt, Homo sapiens
  misc_RNA (1)...(19): siRNA sense strand
aacgagaugugcaauagca

SEQ ID NO: 2063119 - RNA, 19 nt, Homo sapiens
  misc_RNA (1)...(19): siRNA sense strand
ucacauuauugaggacaug

SEQ ID NO: 2063120 - RNA, 19 nt, Homo sapiens
  misc_RNA (1)...(19): siRNA sense strand
ucaucaacaucguccacaa

SEQ ID NO: 2063121 - RNA, 19 nt, Homo sapiens
  misc_RNA (1)...(19): siRNA sense strand
uggcucugccuuugguuua

SEQ ID NO: 2063122 - RNA, 19 nt, Homo sapiens
  misc_RNA (1)...(19): siRNA sense strand
gaucaccguccauggcaau

SEQ ID NO: 2063123 - RNA, 19 nt, Homo sapiens
  misc_RNA (1)...(19): siRNA sense strand
ugaaaacuguggaggaugu

SEQ ID NO: 2063124 - RNA, 19 nt, Homo sapiens
  misc_RNA (1)...(19): siRNA sense strand
cuaaugagaccaucuuuug

SEQ ID NO: 2063125 - RNA, 19 nt, Homo sapiens
  misc_RNA (1)...(19): siRNA sense strand
uccaugaacuacucuuuac

SEQ ID NO: 2063126 - RNA, 19 nt, Homo sapiens
  misc_RNA (1)...(19): siRNA sense strand
ucagugggcagauggaugu

SEQ ID NO: 2063127 - RNA, 19 nt, Homo sapiens
  misc_RNA (1)...(19): siRNA sense strand
ucugugcgcucgccuugau

SEQ ID NO: 2063128 - RNA, 19 nt, Homo sapiens
  misc_RNA (1)...(19): siRNA sense strand
cggacccgcuauuaucaga

SEQ ID NO: 2063129 - RNA, 19 nt, Homo sapiens
  misc_RNA (1)...(19): siRNA sense strand
ggaacagcaccuucaucga

SEQ ID NO: 2063130 - RNA, 19 nt, Homo sapiens
  misc_RNA (1)...(19): siRNA sense strand
gagaugugcaauagcaaca

SEQ ID NO: 2063131 - RNA, 19 nt, Homo sapiens
  misc_RNA (1)...(19): siRNA sense strand
gcaucaacgugacgaacac

SEQ ID NO: 2063132 - RNA, 19 nt, Homo sapiens
  misc_RNA (1)...(19): siRNA sense strand
cacaggcucuggagaacca

SEQ ID NO: 2063133 - RNA, 19 nt, Homo sapiens
  misc_RNA (1)...(19): siRNA sense strand
cgagaaaguuuacgggaaa

SEQ ID NO: 2063134 - RNA, 19 nt, Homo sapiens
  misc_RNA (1)...(19): siRNA sense strand
gagaaaguuuacgggaaau

SEQ ID NO: 2063135 - RNA, 19 nt, Homo sapiens
  misc_RNA (1)...(19): siRNA sense strand
gcacacacacgggcgagaa

SEQ ID NO: 2063136 - RNA, 19 nt, Homo sapiens
  misc_RNA (1)...(19): siRNA sense strand
ggaaaucuucgcaccucaa

SEQ ID NO: 2063137 - RNA, 19 nt, Homo sapiens
  misc_RNA (1)...(19): siRNA sense strand
gcgaccaccugaccaagca

SEQ ID NO: 2063138 - RNA, 19 nt, Homo sapiens
  misc_RNA (1)...(19): siRNA sense strand
gaaaguuuacgggaaaucu

SEQ ID NO: 2063139 - RNA, 19 nt, Homo sapiens
  misc_RNA (1)...(19): siRNA sense strand
gauccuagcggaccucaac

SEQ ID NO: 2063140 - RNA, 19 nt, Homo sapiens
  misc_RNA (1)...(19): siRNA sense strand
gcagcgaccaccugaccaa

SEQ ID NO: 2063141 - RNA, 19 nt, Homo sapiens
  misc_RNA (1)...(19): siRNA sense strand
gaaaucuucgcaccucaag

SEQ ID NO: 2063142 - RNA, 19 nt, Homo sapiens
  misc_RNA (1)...(19): siRNA sense strand
ggacugcaacaagaaguuc

SEQ ID NO: 2063143 - RNA, 19 nt, Homo sapiens
  misc_RNA (1)...(19): siRNA sense strand
gaacuacucuuuaccuuug

SEQ ID NO: 2063144 - RNA, 19 nt, Homo sapiens
  misc_RNA (1)...(19): siRNA sense strand
ggaaacagcuacaugauuc

SEQ ID NO: 2063145 - RNA, 19 nt, Homo sapiens
  misc_RNA (1)...(19): siRNA sense strand
caaggaaaccucuauauug

SEQ ID NO: 2063146 - RNA, 19 nt, Homo sapiens
  misc_RNA (1)...(19): siRNA sense strand
gcagagacguccggaaauu

SEQ ID NO: 2063147 - RNA, 19 nt, Homo sapiens
  misc_RNA (1)...(19): siRNA sense strand
uggcagaccugaacaauga

SEQ ID NO: 2063148 - RNA, 19 nt, Homo sapiens
  misc_RNA (1)...(19): siRNA sense strand
ggacuuaucugaguauagu

SEQ ID NO: 2063149 - RNA, 19 nt, Homo sapiens
  misc_RNA (1)...(19): siRNA sense strand
gcaccuucaucgaggauua

SEQ ID NO: 2063150 - RNA, 19 nt, Homo sapiens
  misc_RNA (1)...(19): siRNA sense strand
guaaaucaccggcuacaaa

SEQ ID NO: 2063151 - RNA, 19 nt, Homo sapiens
  misc_RNA (1)...(19): siRNA sense strand
caggauggauuucaggaua

SEQ ID NO: 2063152 - RNA, 19 nt, Homo sapiens
  misc_RNA (1)...(19): siRNA sense strand
gcaaguggcugcuguaucc

SEQ ID NO: 2063153 - RNA, 19 nt, Homo sapiens
  misc_RNA (1)...(19): siRNA sense strand
gaaaggaaacagcuacaug

SEQ ID NO: 2063154 - RNA, 19 nt, Homo sapiens
  misc_RNA (1)...(19): siRNA sense strand
ccaaggaaaccucuauauu

SEQ ID NO: 2063155 - RNA, 19 nt, Homo sapiens
  misc_RNA (1)...(19): siRNA sense strand
ggacaaccuccgugacaaa

SEQ ID NO: 2063156 - RNA, 19 nt, Homo sapiens
  misc_RNA (1)...(19): siRNA sense strand
gacccuggccaucacauua

SEQ ID NO: 2063157 - RNA, 19 nt, Homo sapiens
  misc_RNA (1)...(19): siRNA sense strand
gaacuucuacccagaccuu

SEQ ID NO: 2063158 - RNA, 19 nt, Homo sapiens
  misc_RNA (1)...(19): siRNA sense strand
ggauggauuucaggauauu

SEQ ID NO: 2063159 - RNA, 19 nt, Homo sapiens
  misc_RNA (1)...(19): siRNA sense strand
gacaaccuguggcccauga

SEQ ID NO: 2063160 - RNA, 19 nt, Homo sapiens
  misc_RNA (1)...(19): siRNA sense strand
gguaauccauggagagaag

SEQ ID NO: 2063161 - RNA, 19 nt, Homo sapiens
  misc_RNA (1)...(19): siRNA sense strand
caaccuggauacccgauuc

SEQ ID NO: 2063162 - RNA, 19 nt, Homo sapiens
  misc_RNA (1)...(19): siRNA sense strand
gggugagucuggcaugaaa

SEQ ID NO: 2063163 - RNA, 19 nt, Homo sapiens
  misc_RNA (1)...(19): siRNA sense strand
guguacaucuaucacagua

SEQ ID NO: 2063164 - RNA, 19 nt, Homo sapiens
  misc_RNA (1)...(19): siRNA sense strand
gcaaaguguacaucuauca

SEQ ID NO: 2063165 - RNA, 19 nt, Homo sapiens
  misc_RNA (1)...(19): siRNA sense strand
gggcaaaguguacaucuau

SEQ ID NO: 2063166 - RNA, 19 nt, Homo sapiens
  misc_RNA (1)...(19): siRNA sense strand
aaggaaaccucuauauugg

SEQ ID NO: 2063167 - RNA, 19 nt, Homo sapiens
  misc_RNA (1)...(19): siRNA sense strand
aaaggaaacagcuacauga

SEQ ID NO: 2063168 - RNA, 19 nt, Homo sapiens
  misc_RNA (1)...(19): siRNA sense strand
gcaauagcaacacagacua

SEQ ID NO: 2063169 - RNA, 19 nt, Homo sapiens
  misc_RNA (1)...(19): siRNA sense strand
cagcagagacguccggaaa

SEQ ID NO: 2063170 - RNA, 19 nt, Homo sapiens
  misc_RNA (1)...(19): siRNA sense strand
ggauguggaugagaacuuc

SEQ ID NO: 2063171 - RNA, 19 nt, Homo sapiens
  misc_RNA (1)...(19): siRNA sense strand
ucacucugcugguggacua

SEQ ID NO: 2063172 - RNA, 19 nt, Homo sapiens
  misc_RNA (1)...(19): siRNA sense strand
gcgcaaggagugggacuua

SEQ ID NO: 2063173 - RNA, 19 nt, Homo sapiens
  misc_RNA (1)...(19): siRNA sense strand
gcagauggauguggaugag

SEQ ID NO: 2063174 - RNA, 19 nt, Homo sapiens
  misc_RNA (1)...(19): siRNA sense strand
gagcugugcuuugcuuaca

SEQ ID NO: 2063175 - RNA, 19 nt, Homo sapiens
  misc_RNA (1)...(19): siRNA sense strand
gccuacaacuggaaaggaa

SEQ ID NO: 2063176 - RNA, 19 nt, Homo sapiens
  misc_RNA (1)...(19): siRNA sense strand
ggaccaaggaaaccucuau

SEQ ID NO: 2063177 - RNA, 19 nt, Homo sapiens
  misc_RNA (1)...(19): siRNA sense strand
acaacgagaugugcaauag

SEQ ID NO: 2063178 - RNA, 19 nt, Homo sapiens
  misc_RNA (1)...(19): siRNA sense strand
gggcagccuucgugucaga

SEQ ID NO: 2063179 - RNA, 19 nt, Homo sapiens
  misc_RNA (1)...(19): siRNA sense strand
ccaucuaugucuucaugaa

SEQ ID NO: 2063180 - RNA, 19 nt, Homo sapiens
  misc_RNA (1)...(19): siRNA sense strand
gagugggacuuaucugagu

SEQ ID NO: 2063181 - RNA, 19 nt, Homo sapiens
  misc_RNA (1)...(19): siRNA sense strand
gcaaggagugggacuuauc

SEQ ID NO: 2063182 - RNA, 19 nt, Homo sapiens
  misc_RNA (1)...(19): siRNA sense strand
ccucucaaccucacucuuu

SEQ ID NO: 2063183 - RNA, 19 nt, Homo sapiens
  misc_RNA (1)...(19): siRNA sense strand
gcaaguggagcugugcuuu

SEQ ID NO: 2063184 - RNA, 19 nt, Homo sapiens
  misc_RNA (1)...(19): siRNA sense strand
gaccaaggaaaccucuaua

SEQ ID NO: 2063185 - RNA, 19 nt, Homo sapiens
  misc_RNA (1)...(19): siRNA sense strand
uggcugggcuacccuauuc

SEQ ID NO: 2063186 - RNA, 19 nt, Homo sapiens
  misc_RNA (1)...(19): siRNA sense strand
gcagguaggcagcuucauc

SEQ ID NO: 2063187 - RNA, 19 nt, Homo sapiens
  misc_RNA (1)...(19): siRNA sense strand
ggccaccucuugugugcaa

SEQ ID NO: 2063188 - RNA, 19 nt, Homo sapiens
  misc_RNA (1)...(19): siRNA sense strand
gcacggccaccucuugugu

SEQ ID NO: 2063189 - RNA, 19 nt, Homo sapiens
  misc_RNA (1)...(19): siRNA sense strand
caaccaggauggauuucag

SEQ ID NO: 2063190 - RNA, 19 nt, Homo sapiens
  misc_RNA (1)...(19): siRNA sense strand
ggaguggcccuacgaaguc

SEQ ID NO: 2063191 - RNA, 19 nt, Homo sapiens
  misc_RNA (1)...(19): siRNA sense strand
ugucagagcagcagcagaa

SEQ ID NO: 2063192 - RNA, 19 nt, Homo sapiens
  misc_RNA (1)...(19): siRNA sense strand
agauggauguggaugagaa

SEQ ID NO: 2063193 - RNA, 19 nt, Homo sapiens
  misc_RNA (1)...(19): siRNA sense strand
gcgaggcaaugaccuagag

SEQ ID NO: 2063194 - RNA, 19 nt, Homo sapiens
  misc_RNA (1)...(19): siRNA sense strand
gugguucucuguggacauu

SEQ ID NO: 2063195 - RNA, 19 nt, Homo sapiens
  misc_RNA (1)...(19): siRNA sense strand
ugaacuacucuuuaccuuu

SEQ ID NO: 2063196 - RNA, 19 nt, Homo sapiens
  misc_RNA (1)...(19): siRNA sense strand
caaccuccgugacaaacuc

SEQ ID NO: 2063197 - RNA, 19 nt, Homo sapiens
  misc_RNA (1)...(19): siRNA sense strand
ucacugcccacaaggauga

SEQ ID NO: 2063198 - RNA, 19 nt, Homo sapiens
  misc_RNA (1)...(19): siRNA sense strand
gaaacagcuacaugauuca

SEQ ID NO: 2063199 - RNA, 19 nt, Homo sapiens
  misc_RNA (1)...(19): siRNA sense strand
ugugggagcuccguuugaa

SEQ ID NO: 2063200 - RNA, 19 nt, Homo sapiens
  misc_RNA (1)...(19): siRNA sense strand
ccacggcaccgacauaugg

SEQ ID NO: 2063201 - RNA, 19 nt, Homo sapiens
  misc_RNA (1)...(19): siRNA sense strand
ggacccagaggaccaagga

SEQ ID NO: 2063202 - RNA, 19 nt, Homo sapiens
  misc_RNA (1)...(19): siRNA sense strand
cagcauuggugacaucaac

SEQ ID NO: 2063203 - RNA, 19 nt, Homo sapiens
  misc_RNA (1)...(19): siRNA sense strand
uaaaucaccggcuacaaag

SEQ ID NO: 2063204 - RNA, 19 nt, Homo sapiens
  misc_RNA (1)...(19): siRNA sense strand
gcagugaguccgcugucuu

SEQ ID NO: 2063205 - RNA, 19 nt, Homo sapiens
  misc_RNA (1)...(19): siRNA sense strand
caaguggagcugugcuuug

SEQ ID NO: 2063206 - RNA, 19 nt, Homo sapiens
  misc_RNA (1)...(19): siRNA sense strand
gaccuuaucaacccucuca

SEQ ID NO: 2063207 - RNA, 19 nt, Homo sapiens
  misc_RNA (1)...(19): siRNA sense strand
ugccaucuaugucuucaug

SEQ ID NO: 2063208 - RNA, 19 nt, Homo sapiens
  misc_RNA (1)...(19): siRNA sense strand
gguucucuguggacauuga

SEQ ID NO: 2063209 - RNA, 19 nt, Homo sapiens
  misc_RNA (1)...(19): siRNA sense strand
cuccagaccucgcuuagca

SEQ ID NO: 2063210 - RNA, 19 nt, Homo sapiens
  misc_RNA (1)...(19): siRNA sense strand
guggagcugugcuuugcuu

SEQ ID NO: 2063211 - RNA, 19 nt, Homo sapiens
  misc_RNA (1)...(19): siRNA sense strand
cgagaggaaagaggaagua

SEQ ID NO: 2063212 - RNA, 19 nt, Homo sapiens
  misc_RNA (1)...(19): siRNA sense strand
ccuacuacuucgagaggaa

SEQ ID NO: 2063213 - RNA, 19 nt, Homo sapiens
  misc_RNA (1)...(19): siRNA sense strand
gaccucgcuuagcauggua

SEQ ID NO: 2063214 - RNA, 19 nt, Homo sapiens
  misc_RNA (1)...(19): siRNA sense strand
ggccugacaacaaguguga

SEQ ID NO: 2063215 - RNA, 19 nt, Homo sapiens
  misc_RNA (1)...(19): siRNA sense strand
caacuacaggcgaaacauc

SEQ ID NO: 2063216 - RNA, 19 nt, Homo sapiens
  misc_RNA (1)...(19): siRNA sense strand
gcuggacccugcacuuugc

SEQ ID NO: 2063217 - RNA, 19 nt, Homo sapiens
  misc_RNA (1)...(19): siRNA sense strand
ggcaaaguguacaucuauc

SEQ ID NO: 2063218 - RNA, 19 nt, Homo sapiens
  misc_RNA (1)...(19): siRNA sense strand
ggaaaggaaacagcuacau

SEQ ID NO: 2063219 - RNA, 19 nt, Homo sapiens
  misc_RNA (1)...(19): siRNA sense strand
gaccgaguccggguaaaug

SEQ ID NO: 2063220 - RNA, 19 nt, Homo sapiens
  misc_RNA (1)...(19): siRNA sense strand
gaagucagcaauggcaagu

SEQ ID NO: 2063221 - RNA, 19 nt, Homo sapiens
  misc_RNA (1)...(19): siRNA sense strand
cuccaugaacuacucuuua

SEQ ID NO: 2063222 - RNA, 19 nt, Homo sapiens
  misc_RNA (1)...(19): siRNA sense strand
ugggcaaaguguacaucua

SEQ ID NO: 2063223 - RNA, 19 nt, Homo sapiens
  misc_RNA (1)...(19): siRNA sense strand
ggccagcauuggugacauc

SEQ ID NO: 2063224 - RNA, 19 nt, Homo sapiens
  misc_RNA (1)...(19): siRNA sense strand
aacgagaugugcaauagca

SEQ ID NO: 2063225 - RNA, 19 nt, Homo sapiens
  misc_RNA (1)...(19): siRNA sense strand
ucaucaacaucguccacaa

SEQ ID NO: 2063226 - RNA, 19 nt, Homo sapiens
  misc_RNA (1)...(19): siRNA sense strand
ucacauuauugaggacaug

SEQ ID NO: 2063227 - RNA, 19 nt, Homo sapiens
  misc_RNA (1)...(19): siRNA sense strand
uggcucugccuuugguuua

SEQ ID NO: 2063228 - RNA, 19 nt, Homo sapiens
  misc_RNA (1)...(19): siRNA sense strand
gaucaccguccauggcaau

SEQ ID NO: 2063229 - RNA, 19 nt, Homo sapiens
  misc_RNA (1)...(19): siRNA sense strand
ugaaaacuguggaggaugu

SEQ ID NO: 2063230 - RNA, 19 nt, Homo sapiens
  misc_RNA (1)...(19): siRNA sense strand
cuaaugagaccaucuuuug

SEQ ID NO: 2063231 - RNA, 19 nt, Homo sapiens
  misc_RNA (1)...(19): siRNA sense strand
uccaugaacuacucuuuac

SEQ ID NO: 2063232 - RNA, 19 nt, Homo sapiens
  misc_RNA (1)...(19): siRNA sense strand
ucagugggcagauggaugu

SEQ ID NO: 2063233 - RNA, 19 nt, Homo sapiens
  misc_RNA (1)...(19): siRNA sense strand
aggaaacagcuacaugauu

SEQ ID NO: 2063234 - RNA, 19 nt, Homo sapiens
  misc_RNA (1)...(19): siRNA sense strand
ggaacagcaccuucaucga

SEQ ID NO: 2063235 - RNA, 19 nt, Homo sapiens
  misc_RNA (1)...(19): siRNA sense strand
gcaucaacgugacgaacac

SEQ ID NO: 2063236 - RNA, 19 nt, Homo sapiens
  misc_RNA (1)...(19): siRNA sense strand
cacaggcucuggagaacca

SEQ ID NO: 2063237 - RNA, 19 nt, Homo sapiens
  misc_RNA (1)...(19): siRNA sense strand
gagaugugcaauagcaaca

SEQ ID NO: 2063238 - RNA, 19 nt, Homo sapiens
  misc_RNA (1)...(19): siRNA sense strand
ucugugcgcucgccuugau

SEQ ID NO: 2063239 - RNA, 19 nt, Homo sapiens
  misc_RNA (1)...(19): siRNA sense strand
cccaguggcucugccuuug

SEQ ID NO: 2063240 - RNA, 19 nt, Homo sapiens
  misc_RNA (1)...(19): siRNA sense strand
aggauggauuucaggauau

SEQ ID NO: 2063241 - RNA, 19 nt, Homo sapiens
  misc_RNA (1)...(19): siRNA sense strand
gggccugccaagcuaauga

SEQ ID NO: 2063242 - RNA, 19 nt, Homo sapiens
  misc_RNA (1)...(19): siRNA sense strand
cgaggauuacagagacuuu

SEQ ID NO: 2063243 - RNA, 19 nt, Homo sapiens
  misc_RNA (1)...(19): siRNA sense strand
gaacuacucuuuaccuuug

SEQ ID NO: 2063244 - RNA, 19 nt, Homo sapiens
  misc_RNA (1)...(19): siRNA sense strand
ggaaacagcuacaugauuc

SEQ ID NO: 2063245 - RNA, 19 nt, Homo sapiens
  misc_RNA (1)...(19): siRNA sense strand
caaggaaaccucuauauug

SEQ ID NO: 2063246 - RNA, 19 nt, Homo sapiens
  misc_RNA (1)...(19): siRNA sense strand
gcagagacguccggaaauu

SEQ ID NO: 2063247 - RNA, 19 nt, Homo sapiens
  misc_RNA (1)...(19): siRNA sense strand
uggcagaccugaacaauga

SEQ ID NO: 2063248 - RNA, 19 nt, Homo sapiens
  misc_RNA (1)...(19): siRNA sense strand
ggacuuaucugaguauagu

SEQ ID NO: 2063249 - RNA, 19 nt, Homo sapiens
  misc_RNA (1)...(19): siRNA sense strand
gcaccuucaucgaggauua

SEQ ID NO: 2063250 - RNA, 19 nt, Homo sapiens
  misc_RNA (1)...(19): siRNA sense strand
guaaaucaccggcuacaaa

SEQ ID NO: 2063251 - RNA, 19 nt, Homo sapiens
  misc_RNA (1)...(19): siRNA sense strand
caggauggauuucaggaua

SEQ ID NO: 2063252 - RNA, 19 nt, Homo sapiens
  misc_RNA (1)...(19): siRNA sense strand
gcaaguggcugcuguaucc

SEQ ID NO: 2063253 - RNA, 19 nt, Homo sapiens
  misc_RNA (1)...(19): siRNA sense strand
gaaaggaaacagcuacaug

SEQ ID NO: 2063254 - RNA, 19 nt, Homo sapiens
  misc_RNA (1)...(19): siRNA sense strand
ccaaggaaaccucuauauu

SEQ ID NO: 2063255 - RNA, 19 nt, Homo sapiens
  misc_RNA (1)...(19): siRNA sense strand
ggacaaccuccgugacaaa

SEQ ID NO: 2063256 - RNA, 19 nt, Homo sapiens
  misc_RNA (1)...(19): siRNA sense strand
gacccuggccaucacauua

SEQ ID NO: 2063257 - RNA, 19 nt, Homo sapiens
  misc_RNA (1)...(19): siRNA sense strand
gaacuucuacccagaccuu

SEQ ID NO: 2063258 - RNA, 19 nt, Homo sapiens
  misc_RNA (1)...(19): siRNA sense strand
ggauggauuucaggauauu

SEQ ID NO: 2063259 - RNA, 19 nt, Homo sapiens
  misc_RNA (1)...(19): siRNA sense strand
gacaaccuguggcccauga

SEQ ID NO: 2063260 - RNA, 19 nt, Homo sapiens
  misc_RNA (1)...(19): siRNA sense strand
gguaauccauggagagaag

SEQ ID NO: 2063261 - RNA, 19 nt, Homo sapiens
  misc_RNA (1)...(19): siRNA sense strand
caaccuggauacccgauuc

SEQ ID NO: 2063262 - RNA, 19 nt, Homo sapiens
  misc_RNA (1)...(19): siRNA sense strand
gggugagucuggcaugaaa

SEQ ID NO: 2063263 - RNA, 19 nt, Homo sapiens
  misc_RNA (1)...(19): siRNA sense strand
guguacaucuaucacagua

SEQ ID NO: 2063264 - RNA, 19 nt, Homo sapiens
  misc_RNA (1)...(19): siRNA sense strand
gcaaaguguacaucuauca

SEQ ID NO: 2063265 - RNA, 19 nt, Homo sapiens
  misc_RNA (1)...(19): siRNA sense strand
gggcaaaguguacaucuau

SEQ ID NO: 2063266 - RNA, 19 nt, Homo sapiens
  misc_RNA (1)...(19): siRNA sense strand
aaggaaaccucuauauugg

SEQ ID NO: 2063267 - RNA, 19 nt, Homo sapiens
  misc_RNA (1)...(19): siRNA sense strand
aaaggaaacagcuacauga

SEQ ID NO: 2063268 - RNA, 19 nt, Homo sapiens
  misc_RNA (1)...(19): siRNA sense strand
gcaauagcaacacagacua

SEQ ID NO: 2063269 - RNA, 19 nt, Homo sapiens
  misc_RNA (1)...(19): siRNA sense strand
cagcagagacguccggaaa

SEQ ID NO: 2063270 - RNA, 19 nt, Homo sapiens
  misc_RNA (1)...(19): siRNA sense strand
ggauguggaugagaacuuc

SEQ ID NO: 2063271 - RNA, 19 nt, Homo sapiens
  misc_RNA (1)...(19): siRNA sense strand
ucacucugcugguggacua

SEQ ID NO: 2063272 - RNA, 19 nt, Homo sapiens
  misc_RNA (1)...(19): siRNA sense strand
gcgcaaggagugggacuua

SEQ ID NO: 2063273 - RNA, 19 nt, Homo sapiens
  misc_RNA (1)...(19): siRNA sense strand
gcagauggauguggaugag

SEQ ID NO: 2063274 - RNA, 19 nt, Homo sapiens
  misc_RNA (1)...(19): siRNA sense strand
gagcugugcuuugcuuaca

SEQ ID NO: 2063275 - RNA, 19 nt, Homo sapiens
  misc_RNA (1)...(19): siRNA sense strand
gccuacaacuggaaaggaa

SEQ ID NO: 2063276 - RNA, 19 nt, Homo sapiens
  misc_RNA (1)...(19): siRNA sense strand
ggaccaaggaaaccucuau

SEQ ID NO: 2063277 - RNA, 19 nt, Homo sapiens
  misc_RNA (1)...(19): siRNA sense strand
acaacgagaugugcaauag

SEQ ID NO: 2063278 - RNA, 19 nt, Homo sapiens
  misc_RNA (1)...(19): siRNA sense strand
gggcagccuucgugucaga

SEQ ID NO: 2063279 - RNA, 19 nt, Homo sapiens
  misc_RNA (1)...(19): siRNA sense strand
ccaucuaugucuucaugaa

SEQ ID NO: 2063280 - RNA, 19 nt, Homo sapiens
  misc_RNA (1)...(19): siRNA sense strand
gagugggacuuaucugagu

SEQ ID NO: 2063281 - RNA, 19 nt, Homo sapiens
  misc_RNA (1)...(19): siRNA sense strand
gcaaggagugggacuuauc

SEQ ID NO: 2063282 - RNA, 19 nt, Homo sapiens
  misc_RNA (1)...(19): siRNA sense strand
ccucucaaccucacucuuu

SEQ ID NO: 2063283 - RNA, 19 nt, Homo sapiens
  misc_RNA (1)...(19): siRNA sense strand
gcaaguggagcugugcuuu

SEQ ID NO: 2063284 - RNA, 19 nt, Homo sapiens
  misc_RNA (1)...(19): siRNA sense strand
gaccaaggaaaccucuaua

SEQ ID NO: 2063285 - RNA, 19 nt, Homo sapiens
  misc_RNA (1)...(19): siRNA sense strand
uggcugggcuacccuauuc

SEQ ID NO: 2063286 - RNA, 19 nt, Homo sapiens
  misc_RNA (1)...(19): siRNA sense strand
gcagguaggcagcuucauc

SEQ ID NO: 2063287 - RNA, 19 nt, Homo sapiens
  misc_RNA (1)...(19): siRNA sense strand
ggccaccucuugugugcaa

SEQ ID NO: 2063288 - RNA, 19 nt, Homo sapiens
  misc_RNA (1)...(19): siRNA sense strand
gcacggccaccucuugugu

SEQ ID NO: 2063289 - RNA, 19 nt, Homo sapiens
  misc_RNA (1)...(19): siRNA sense strand
caaccaggauggauuucag

SEQ ID NO: 2063290 - RNA, 19 nt, Homo sapiens
  misc_RNA (1)...(19): siRNA sense strand
ggaguggcccuacgaaguc

SEQ ID NO: 2063291 - RNA, 19 nt, Homo sapiens
  misc_RNA (1)...(19): siRNA sense strand
ugucagagcagcagcagaa

SEQ ID NO: 2063292 - RNA, 19 nt, Homo sapiens
  misc_RNA (1)...(19): siRNA sense strand
agauggauguggaugagaa

SEQ ID NO: 2063293 - RNA, 19 nt, Homo sapiens
  misc_RNA (1)...(19): siRNA sense strand
gcacccugcccaccaagaa

SEQ ID NO: 2063294 - RNA, 19 nt, Homo sapiens
  misc_RNA (1)...(19): siRNA sense strand
ggcagacucgggaccaaua

SEQ ID NO: 2063295 - RNA, 19 nt, Homo sapiens
  misc_RNA (1)...(19): siRNA sense strand
gcgaggcaaugaccuagag

SEQ ID NO: 2063296 - RNA, 19 nt, Homo sapiens
  misc_RNA (1)...(19): siRNA sense strand
gugguucucuguggacauu

SEQ ID NO: 2063297 - RNA, 19 nt, Homo sapiens
  misc_RNA (1)...(19): siRNA sense strand
ugaacuacucuuuaccuuu

SEQ ID NO: 2063298 - RNA, 19 nt, Homo sapiens
  misc_RNA (1)...(19): siRNA sense strand
caaccuccgugacaaacuc

SEQ ID NO: 2063299 - RNA, 19 nt, Homo sapiens
  misc_RNA (1)...(19): siRNA sense strand
ucacugcccacaaggauga

SEQ ID NO: 2063300 - RNA, 19 nt, Homo sapiens
  misc_RNA (1)...(19): siRNA sense strand
gaaacagcuacaugauuca

SEQ ID NO: 2063301 - RNA, 19 nt, Homo sapiens
  misc_RNA (1)...(19): siRNA sense strand
ugugggagcuccguuugaa

SEQ ID NO: 2063302 - RNA, 19 nt, Homo sapiens
  misc_RNA (1)...(19): siRNA sense strand
ccacggcaccgacauaugg

SEQ ID NO: 2063303 - RNA, 19 nt, Homo sapiens
  misc_RNA (1)...(19): siRNA sense strand
ggacccagaggaccaagga

SEQ ID NO: 2063304 - RNA, 19 nt, Homo sapiens
  misc_RNA (1)...(19): siRNA sense strand
cagcauuggugacaucaac

SEQ ID NO: 2063305 - RNA, 19 nt, Homo sapiens
  misc_RNA (1)...(19): siRNA sense strand
gacccgcuauuaucagauc

SEQ ID NO: 2063306 - RNA, 19 nt, Homo sapiens
  misc_RNA (1)...(19): siRNA sense strand
uaaaucaccggcuacaaag

SEQ ID NO: 2063307 - RNA, 19 nt, Homo sapiens
  misc_RNA (1)...(19): siRNA sense strand
gcagugaguccgcugucuu

SEQ ID NO: 2063308 - RNA, 19 nt, Homo sapiens
  misc_RNA (1)...(19): siRNA sense strand
caaguggagcugugcuuug

SEQ ID NO: 2063309 - RNA, 19 nt, Homo sapiens
  misc_RNA (1)...(19): siRNA sense strand
gaccuuaucaacccucuca

SEQ ID NO: 2063310 - RNA, 19 nt, Homo sapiens
  misc_RNA (1)...(19): siRNA sense strand
uaucagaucaugcccaagu

SEQ ID NO: 2063311 - RNA, 19 nt, Homo sapiens
  misc_RNA (1)...(19): siRNA sense strand
ugccaucuaugucuucaug

SEQ ID NO: 2063312 - RNA, 19 nt, Homo sapiens
  misc_RNA (1)...(19): siRNA sense strand
gguucucuguggacauuga

SEQ ID NO: 2063313 - RNA, 19 nt, Homo sapiens
  misc_RNA (1)...(19): siRNA sense strand
cuccagaccucgcuuagca

SEQ ID NO: 2063314 - RNA, 19 nt, Homo sapiens
  misc_RNA (1)...(19): siRNA sense strand
guggagcugugcuuugcuu

SEQ ID NO: 2063315 - RNA, 19 nt, Homo sapiens
  misc_RNA (1)...(19): siRNA sense strand
cgagaggaaagaggaagua

SEQ ID NO: 2063316 - RNA, 19 nt, Homo sapiens
  misc_RNA (1)...(19): siRNA sense strand
ccuacuacuucgagaggaa

SEQ ID NO: 2063317 - RNA, 19 nt, Homo sapiens
  misc_RNA (1)...(19): siRNA sense strand
gaccucgcuuagcauggua

SEQ ID NO: 2063318 - RNA, 19 nt, Homo sapiens
  misc_RNA (1)...(19): siRNA sense strand
ggccugacaacaaguguga

SEQ ID NO: 2063319 - RNA, 19 nt, Homo sapiens
  misc_RNA (1)...(19): siRNA sense strand
caacuacaggcgaaacauc

SEQ ID NO: 2063320 - RNA, 19 nt, Homo sapiens
  misc_RNA (1)...(19): siRNA sense strand
gcuggacccugcacuuugc

SEQ ID NO: 2063321 - RNA, 19 nt, Homo sapiens
  misc_RNA (1)...(19): siRNA sense strand
ggcaaaguguacaucuauc

SEQ ID NO: 2063322 - RNA, 19 nt, Homo sapiens
  misc_RNA (1)...(19): siRNA sense strand
ggaaaggaaacagcuacau

SEQ ID NO: 2063323 - RNA, 19 nt, Homo sapiens
  misc_RNA (1)...(19): siRNA sense strand
gaccgaguccggguaaaug

SEQ ID NO: 2063324 - RNA, 19 nt, Homo sapiens
  misc_RNA (1)...(19): siRNA sense strand
gaagucagcaauggcaagu

SEQ ID NO: 2063325 - RNA, 19 nt, Homo sapiens
  misc_RNA (1)...(19): siRNA sense strand
cuccaugaacuacucuuua

SEQ ID NO: 2063326 - RNA, 19 nt, Homo sapiens
  misc_RNA (1)...(19): siRNA sense strand
ugggcaaaguguacaucua

SEQ ID NO: 2063327 - RNA, 19 nt, Homo sapiens
  misc_RNA (1)...(19): siRNA sense strand
ggccagcauuggugacauc

SEQ ID NO: 2063328 - RNA, 19 nt, Homo sapiens
  misc_RNA (1)...(19): siRNA sense strand
aacgagaugugcaauagca

SEQ ID NO: 2063329 - RNA, 19 nt, Homo sapiens
  misc_RNA (1)...(19): siRNA sense strand
ucacauuauugaggacaug

SEQ ID NO: 2063330 - RNA, 19 nt, Homo sapiens
  misc_RNA (1)...(19): siRNA sense strand
ucaucaacaucguccacaa

SEQ ID NO: 2063331 - RNA, 19 nt, Homo sapiens
  misc_RNA (1)...(19): siRNA sense strand
uggcucugccuuugguuua

SEQ ID NO: 2063332 - RNA, 19 nt, Homo sapiens
  misc_RNA (1)...(19): siRNA sense strand
gaucaccguccauggcaau

SEQ ID NO: 2063333 - RNA, 19 nt, Homo sapiens
  misc_RNA (1)...(19): siRNA sense strand
ugaaaacuguggaggaugu

SEQ ID NO: 2063334 - RNA, 19 nt, Homo sapiens
  misc_RNA (1)...(19): siRNA sense strand
cuaaugagaccaucuuuug

SEQ ID NO: 2063335 - RNA, 19 nt, Homo sapiens
  misc_RNA (1)...(19): siRNA sense strand
uccaugaacuacucuuuac

SEQ ID NO: 2063336 - RNA, 19 nt, Homo sapiens
  misc_RNA (1)...(19): siRNA sense strand
ucagugggcagauggaugu

SEQ ID NO: 2063337 - RNA, 19 nt, Homo sapiens
  misc_RNA (1)...(19): siRNA sense strand
ucugugcgcucgccuugau

SEQ ID NO: 2063338 - RNA, 19 nt, Homo sapiens
  misc_RNA (1)...(19): siRNA sense strand
cggacccgcuauuaucaga

SEQ ID NO: 2063339 - RNA, 19 nt, Homo sapiens
  misc_RNA (1)...(19): siRNA sense strand
ggaacagcaccuucaucga

SEQ ID NO: 2063340 - RNA, 19 nt, Homo sapiens
  misc_RNA (1)...(19): siRNA sense strand
gagaugugcaauagcaaca

SEQ ID NO: 2063341 - RNA, 19 nt, Homo sapiens
  misc_RNA (1)...(19): siRNA sense strand
gcaucaacgugacgaacac

SEQ ID NO: 2063342 - RNA, 19 nt, Homo sapiens
  misc_RNA (1)...(19): siRNA sense strand
cacaggcucuggagaacca

SEQ ID NO: 2063343 - RNA, 19 nt, Homo sapiens
  misc_RNA (1)...(19): siRNA sense strand
caacagagaggcuuauuug

SEQ ID NO: 2063344 - RNA, 19 nt, Homo sapiens
  misc_RNA (1)...(19): siRNA sense strand
gcccagaaguuccugauga

SEQ ID NO: 2063345 - RNA, 19 nt, Homo sapiens
  misc_RNA (1)...(19): siRNA sense strand
caauaucucuguaguugga

SEQ ID NO: 2063346 - RNA, 19 nt, Homo sapiens
  misc_RNA (1)...(19): siRNA sense strand
agaugaggcuucugggaua

SEQ ID NO: 2063347 - RNA, 19 nt, Homo sapiens
  misc_RNA (1)...(19): siRNA sense strand
aacaauaucucuguaguug

SEQ ID NO: 2063348 - RNA, 19 nt, Homo sapiens
  misc_RNA (1)...(19): siRNA sense strand
cagagaggcuuauuugacu

SEQ ID NO: 2063349 - RNA, 19 nt, Homo sapiens
  misc_RNA (1)...(19): siRNA sense strand
gguccaguguucugauuug

SEQ ID NO: 2063350 - RNA, 19 nt, Homo sapiens
  misc_RNA (1)...(19): siRNA sense strand
ccauucaacucggaaacua

SEQ ID NO: 2063351 - RNA, 19 nt, Homo sapiens
  misc_RNA (1)...(19): siRNA sense strand
caacaauaucucuguaguu

SEQ ID NO: 2063352 - RNA, 19 nt, Homo sapiens
  misc_RNA (1)...(19): siRNA sense strand
guaguuggaucaagugacu

SEQ ID NO: 2063353 - RNA, 19 nt, Homo sapiens
  misc_RNA (1)...(19): siRNA sense strand
gcaacccgguccaguacug

SEQ ID NO: 2063354 - RNA, 19 nt, Homo sapiens
  misc_RNA (1)...(19): siRNA sense strand
gcuggaccguuucaacaga

SEQ ID NO: 2063355 - RNA, 19 nt, Homo sapiens
  misc_RNA (1)...(19): siRNA sense strand
gagaggcuuauuugacuuu

SEQ ID NO: 2063356 - RNA, 19 nt, Homo sapiens
  misc_RNA (1)...(19): siRNA sense strand
acucggaaacuauaaguaa

SEQ ID NO: 2063357 - RNA, 19 nt, Homo sapiens
  misc_RNA (1)...(19): siRNA sense strand
ucagcaacccgguccagua

SEQ ID NO: 2063358 - RNA, 19 nt, Homo sapiens
  misc_RNA (1)...(19): siRNA sense strand
ucaacagagaggcuuauuu

SEQ ID NO: 2063359 - RNA, 19 nt, Homo sapiens
  misc_RNA (1)...(19): siRNA sense strand
acaacaauaucucuguagu

SEQ ID NO: 2063360 - RNA, 19 nt, Homo sapiens
  misc_RNA (1)...(19): siRNA sense strand
aggcuuauuugacuuuaug

SEQ ID NO: 2063361 - RNA, 19 nt, Homo sapiens
  misc_RNA (1)...(19): siRNA sense strand
gggauaggcccagaaguuc

SEQ ID NO: 2063362 - RNA, 19 nt, Homo sapiens
  misc_RNA (1)...(19): siRNA sense strand
gaggcuuauuugacuuuau

SEQ ID NO: 2063363 - RNA, 19 nt, Homo sapiens
  misc_RNA (1)...(19): siRNA sense strand
gaugaggcuucugggauag

SEQ ID NO: 2063364 - RNA, 19 nt, Homo sapiens
  misc_RNA (1)...(19): siRNA sense strand
auacagccauccaccuuca

SEQ ID NO: 2063365 - RNA, 19 nt, Homo sapiens
  misc_RNA (1)...(19): siRNA sense strand
gggcuggaccguuucaaca

SEQ ID NO: 2063366 - RNA, 19 nt, Homo sapiens
  misc_RNA (1)...(19): siRNA sense strand
uuccugggcuggaccguuu

SEQ ID NO: 2063367 - RNA, 19 nt, Homo sapiens
  misc_RNA (1)...(19): siRNA sense strand
gugguccaguguucugauu

SEQ ID NO: 2063368 - RNA, 19 nt, Homo sapiens
  misc_RNA (1)...(19): siRNA sense strand
caacucggaaacuauaagu

SEQ ID NO: 2063369 - RNA, 19 nt, Homo sapiens
  misc_RNA (1)...(19): siRNA sense strand
ccacuaucauccuccuucu

SEQ ID NO: 2063370 - RNA, 19 nt, Homo sapiens
  misc_RNA (1)...(19): siRNA sense strand
agaggcuuauuugacuuua

SEQ ID NO: 2063371 - RNA, 19 nt, Homo sapiens
  misc_RNA (1)...(19): siRNA sense strand
auucaacucggaaacuaua

SEQ ID NO: 2063372 - RNA, 19 nt, Homo sapiens
  misc_RNA (1)...(19): siRNA sense strand
agagaggcuuauuugacuu

SEQ ID NO: 2063373 - RNA, 19 nt, Homo sapiens
  misc_RNA (1)...(19): siRNA sense strand
acuuuaugcuagaagauga

SEQ ID NO: 2063374 - RNA, 19 nt, Homo sapiens
  misc_RNA (1)...(19): siRNA sense strand
acagagaggcuuauuugac

SEQ ID NO: 2063375 - RNA, 19 nt, Homo sapiens
  misc_RNA (1)...(19): siRNA sense strand
uacgugcgcucugccauuc

SEQ ID NO: 2063376 - RNA, 19 nt, Homo sapiens
  misc_RNA (1)...(19): siRNA sense strand
cuacgugcgcucugccauu

SEQ ID NO: 2063377 - RNA, 19 nt, Homo sapiens
  misc_RNA (1)...(19): siRNA sense strand
caacagagaggcuuauuug

SEQ ID NO: 2063378 - RNA, 19 nt, Homo sapiens
  misc_RNA (1)...(19): siRNA sense strand
gcccagaaguuccugauga

SEQ ID NO: 2063379 - RNA, 19 nt, Homo sapiens
  misc_RNA (1)...(19): siRNA sense strand
caauaucucuguaguugga

SEQ ID NO: 2063380 - RNA, 19 nt, Homo sapiens
  misc_RNA (1)...(19): siRNA sense strand
agaugaggcuucugggaua

SEQ ID NO: 2063381 - RNA, 19 nt, Homo sapiens
  misc_RNA (1)...(19): siRNA sense strand
aacaauaucucuguaguug

SEQ ID NO: 2063382 - RNA, 19 nt, Homo sapiens
  misc_RNA (1)...(19): siRNA sense strand
cagagaggcuuauuugacu

SEQ ID NO: 2063383 - RNA, 19 nt, Homo sapiens
  misc_RNA (1)...(19): siRNA sense strand
gguccaguguucugauuug

SEQ ID NO: 2063384 - RNA, 19 nt, Homo sapiens
  misc_RNA (1)...(19): siRNA sense strand
ccauucaacucggaaacua

SEQ ID NO: 2063385 - RNA, 19 nt, Homo sapiens
  misc_RNA (1)...(19): siRNA sense strand
caacaauaucucuguaguu

SEQ ID NO: 2063386 - RNA, 19 nt, Homo sapiens
  misc_RNA (1)...(19): siRNA sense strand
guaguuggaucaagugacu

SEQ ID NO: 2063387 - RNA, 19 nt, Homo sapiens
  misc_RNA (1)...(19): siRNA sense strand
gcaacccgguccaguacug

SEQ ID NO: 2063388 - RNA, 19 nt, Homo sapiens
  misc_RNA (1)...(19): siRNA sense strand
gcuggaccguuucaacaga

SEQ ID NO: 2063389 - RNA, 19 nt, Homo sapiens
  misc_RNA (1)...(19): siRNA sense strand
gagaggcuuauuugacuuu

SEQ ID NO: 2063390 - RNA, 19 nt, Homo sapiens
  misc_RNA (1)...(19): siRNA sense strand
acucggaaacuauaaguaa

SEQ ID NO: 2063391 - RNA, 19 nt, Homo sapiens
  misc_RNA (1)...(19): siRNA sense strand
ucagcaacccgguccagua

SEQ ID NO: 2063392 - RNA, 19 nt, Homo sapiens
  misc_RNA (1)...(19): siRNA sense strand
ucaacagagaggcuuauuu

SEQ ID NO: 2063393 - RNA, 19 nt, Homo sapiens
  misc_RNA (1)...(19): siRNA sense strand
acaacaauaucucuguagu

SEQ ID NO: 2063394 - RNA, 19 nt, Homo sapiens
  misc_RNA (1)...(19): siRNA sense strand
aggcuuauuugacuuuaug

SEQ ID NO: 2063395 - RNA, 19 nt, Homo sapiens
  misc_RNA (1)...(19): siRNA sense strand
gggauaggcccagaaguuc

SEQ ID NO: 2063396 - RNA, 19 nt, Homo sapiens
  misc_RNA (1)...(19): siRNA sense strand
gaggcuuauuugacuuuau

SEQ ID NO: 2063397 - RNA, 19 nt, Homo sapiens
  misc_RNA (1)...(19): siRNA sense strand
gaugaggcuucugggauag

SEQ ID NO: 2063398 - RNA, 19 nt, Homo sapiens
  misc_RNA (1)...(19): siRNA sense strand
auacagccauccaccuuca

SEQ ID NO: 2063399 - RNA, 19 nt, Homo sapiens
  misc_RNA (1)...(19): siRNA sense strand
gggcuggaccguuucaaca

SEQ ID NO: 2063400 - RNA, 19 nt, Homo sapiens
  misc_RNA (1)...(19): siRNA sense strand
uuccugggcuggaccguuu

SEQ ID NO: 2063401 - RNA, 19 nt, Homo sapiens
  misc_RNA (1)...(19): siRNA sense strand
gugguccaguguucugauu

SEQ ID NO: 2063402 - RNA, 19 nt, Homo sapiens
  misc_RNA (1)...(19): siRNA sense strand
caacucggaaacuauaagu

SEQ ID NO: 2063403 - RNA, 19 nt, Homo sapiens
  misc_RNA (1)...(19): siRNA sense strand
ccacuaucauccuccuucu

SEQ ID NO: 2063404 - RNA, 19 nt, Homo sapiens
  misc_RNA (1)...(19): siRNA sense strand
agaggcuuauuugacuuua

SEQ ID NO: 2063405 - RNA, 19 nt, Homo sapiens
  misc_RNA (1)...(19): siRNA sense strand
auucaacucggaaacuaua

SEQ ID NO: 2063406 - RNA, 19 nt, Homo sapiens
  misc_RNA (1)...(19): siRNA sense strand
agagaggcuuauuugacuu

SEQ ID NO: 2063407 - RNA, 19 nt, Homo sapiens
  misc_RNA (1)...(19): siRNA sense strand
acuuuaugcuagaagauga

SEQ ID NO: 2063408 - RNA, 19 nt, Homo sapiens
  misc_RNA (1)...(19): siRNA sense strand
acagagaggcuuauuugac

SEQ ID NO: 2063409 - RNA, 19 nt, Homo sapiens
  misc_RNA (1)...(19): siRNA sense strand
uacgugcgcucugccauuc

SEQ ID NO: 2063410 - RNA, 19 nt, Homo sapiens
  misc_RNA (1)...(19): siRNA sense strand
cuacgugcgcucugccauu

SEQ ID NO: 2063411 - RNA, 19 nt, Homo sapiens
  misc_RNA (1)...(19): siRNA sense strand
caacagagaggcuuauuug

SEQ ID NO: 2063412 - RNA, 19 nt, Homo sapiens
  misc_RNA (1)...(19): siRNA sense strand
gcccagaaguuccugauga

SEQ ID NO: 2063413 - RNA, 19 nt, Homo sapiens
  misc_RNA (1)...(19): siRNA sense strand
caauaucucuguaguugga

SEQ ID NO: 2063414 - RNA, 19 nt, Homo sapiens
  misc_RNA (1)...(19): siRNA sense strand
agaugaggcuucugggaua

SEQ ID NO: 2063415 - RNA, 19 nt, Homo sapiens
  misc_RNA (1)...(19): siRNA sense strand
aacaauaucucuguaguug

SEQ ID NO: 2063416 - RNA, 19 nt, Homo sapiens
  misc_RNA (1)...(19): siRNA sense strand
cagagaggcuuauuugacu

SEQ ID NO: 2063417 - RNA, 19 nt, Homo sapiens
  misc_RNA (1)...(19): siRNA sense strand
gguccaguguucugauuug

SEQ ID NO: 2063418 - RNA, 19 nt, Homo sapiens
  misc_RNA (1)...(19): siRNA sense strand
ccauucaacucggaaacua

SEQ ID NO: 2063419 - RNA, 19 nt, Homo sapiens
  misc_RNA (1)...(19): siRNA sense strand
caacaauaucucuguaguu

SEQ ID NO: 2063420 - RNA, 19 nt, Homo sapiens
  misc_RNA (1)...(19): siRNA sense strand
guaguuggaucaagugacu

SEQ ID NO: 2063421 - RNA, 19 nt, Homo sapiens
  misc_RNA (1)...(19): siRNA sense strand
gcaacccgguccaguacug

SEQ ID NO: 2063422 - RNA, 19 nt, Homo sapiens
  misc_RNA (1)...(19): siRNA sense strand
gcuggaccguuucaacaga

SEQ ID NO: 2063423 - RNA, 19 nt, Homo sapiens
  misc_RNA (1)...(19): siRNA sense strand
gagaggcuuauuugacuuu

SEQ ID NO: 2063424 - RNA, 19 nt, Homo sapiens
  misc_RNA (1)...(19): siRNA sense strand
acucggaaacuauaaguaa

SEQ ID NO: 2063425 - RNA, 19 nt, Homo sapiens
  misc_RNA (1)...(19): siRNA sense strand
ucagcaacccgguccagua

SEQ ID NO: 2063426 - RNA, 19 nt, Homo sapiens
  misc_RNA (1)...(19): siRNA sense strand
ucaacagagaggcuuauuu

SEQ ID NO: 2063427 - RNA, 19 nt, Homo sapiens
  misc_RNA (1)...(19): siRNA sense strand
acaacaauaucucuguagu

SEQ ID NO: 2063428 - RNA, 19 nt, Homo sapiens
  misc_RNA (1)...(19): siRNA sense strand
aggcuuauuugacuuuaug

SEQ ID NO: 2063429 - RNA, 19 nt, Homo sapiens
  misc_RNA (1)...(19): siRNA sense strand
gggauaggcccagaaguuc

SEQ ID NO: 2063430 - RNA, 19 nt, Homo sapiens
  misc_RNA (1)...(19): siRNA sense strand
gaggcuuauuugacuuuau

SEQ ID NO: 2063431 - RNA, 19 nt, Homo sapiens
  misc_RNA (1)...(19): siRNA sense strand
gaugaggcuucugggauag

SEQ ID NO: 2063432 - RNA, 19 nt, Homo sapiens
  misc_RNA (1)...(19): siRNA sense strand
auacagccauccaccuuca

SEQ ID NO: 2063433 - RNA, 19 nt, Homo sapiens
  misc_RNA (1)...(19): siRNA sense strand
gggcuggaccguuucaaca

SEQ ID NO: 2063434 - RNA, 19 nt, Homo sapiens
  misc_RNA (1)...(19): siRNA sense strand
uuccugggcuggaccguuu

SEQ ID NO: 2063435 - RNA, 19 nt, Homo sapiens
  misc_RNA (1)...(19): siRNA sense strand
gugguccaguguucugauu

SEQ ID NO: 2063436 - RNA, 19 nt, Homo sapiens
  misc_RNA (1)...(19): siRNA sense strand
caacucggaaacuauaagu

SEQ ID NO: 2063437 - RNA, 19 nt, Homo sapiens
  misc_RNA (1)...(19): siRNA sense strand
ccacuaucauccuccuucu

SEQ ID NO: 2063438 - RNA, 19 nt, Homo sapiens
  misc_RNA (1)...(19): siRNA sense strand
agaggcuuauuugacuuua

SEQ ID NO: 2063439 - RNA, 19 nt, Homo sapiens
  misc_RNA (1)...(19): siRNA sense strand
auucaacucggaaacuaua

SEQ ID NO: 2063440 - RNA, 19 nt, Homo sapiens
  misc_RNA (1)...(19): siRNA sense strand
agagaggcuuauuugacuu

SEQ ID NO: 2063441 - RNA, 19 nt, Homo sapiens
  misc_RNA (1)...(19): siRNA sense strand
acuuuaugcuagaagauga

SEQ ID NO: 2063442 - RNA, 19 nt, Homo sapiens
  misc_RNA (1)...(19): siRNA sense strand
acagagaggcuuauuugac

SEQ ID NO: 2063443 - RNA, 19 nt, Homo sapiens
  misc_RNA (1)...(19): siRNA sense strand
uacgugcgcucugccauuc

SEQ ID NO: 2063444 - RNA, 19 nt, Homo sapiens
  misc_RNA (1)...(19): siRNA sense strand
cuacgugcgcucugccauu

SEQ ID NO: 2063445 - RNA, 19 nt, Homo sapiens
  misc_RNA (1)...(19): siRNA sense strand
caacagagaggcuuauuug

SEQ ID NO: 2063446 - RNA, 19 nt, Homo sapiens
  misc_RNA (1)...(19): siRNA sense strand
gcccagaaguuccugauga

SEQ ID NO: 2063447 - RNA, 19 nt, Homo sapiens
  misc_RNA (1)...(19): siRNA sense strand
caauaucucuguaguugga

SEQ ID NO: 2063448 - RNA, 19 nt, Homo sapiens
  misc_RNA (1)...(19): siRNA sense strand
agaugaggcuucugggaua

SEQ ID NO: 2063449 - RNA, 19 nt, Homo sapiens
  misc_RNA (1)...(19): siRNA sense strand
aacaauaucucuguaguug

SEQ ID NO: 2063450 - RNA, 19 nt, Homo sapiens
  misc_RNA (1)...(19): siRNA sense strand
cagagaggcuuauuugacu

SEQ ID NO: 2063451 - RNA, 19 nt, Homo sapiens
  misc_RNA (1)...(19): siRNA sense strand
gguccaguguucugauuug

SEQ ID NO: 2063452 - RNA, 19 nt, Homo sapiens
  misc_RNA (1)...(19): siRNA sense strand
ccauucaacucggaaacua

SEQ ID NO: 2063453 - RNA, 19 nt, Homo sapiens
  misc_RNA (1)...(19): siRNA sense strand
caacaauaucucuguaguu

SEQ ID NO: 2063454 - RNA, 19 nt, Homo sapiens
  misc_RNA (1)...(19): siRNA sense strand
guaguuggaucaagugacu

SEQ ID NO: 2063455 - RNA, 19 nt, Homo sapiens
  misc_RNA (1)...(19): siRNA sense strand
gcaacccgguccaguacug

SEQ ID NO: 2063456 - RNA, 19 nt, Homo sapiens
  misc_RNA (1)...(19): siRNA sense strand
gcuggaccguuucaacaga

SEQ ID NO: 2063457 - RNA, 19 nt, Homo sapiens
  misc_RNA (1)...(19): siRNA sense strand
gagaggcuuauuugacuuu

SEQ ID NO: 2063458 - RNA, 19 nt, Homo sapiens
  misc_RNA (1)...(19): siRNA sense strand
acucggaaacuauaaguaa

SEQ ID NO: 2063459 - RNA, 19 nt, Homo sapiens
  misc_RNA (1)...(19): siRNA sense strand
ucagcaacccgguccagua

SEQ ID NO: 2063460 - RNA, 19 nt, Homo sapiens
  misc_RNA (1)...(19): siRNA sense strand
ucaacagagaggcuuauuu

SEQ ID NO: 2063461 - RNA, 19 nt, Homo sapiens
  misc_RNA (1)...(19): siRNA sense strand
acaacaauaucucuguagu

SEQ ID NO: 2063462 - RNA, 19 nt, Homo sapiens
  misc_RNA (1)...(19): siRNA sense strand
aggcuuauuugacuuuaug

SEQ ID NO: 2063463 - RNA, 19 nt, Homo sapiens
  misc_RNA (1)...(19): siRNA sense strand
gggauaggcccagaaguuc

SEQ ID NO: 2063464 - RNA, 19 nt, Homo sapiens
  misc_RNA (1)...(19): siRNA sense strand
gaggcuuauuugacuuuau

SEQ ID NO: 2063465 - RNA, 19 nt, Homo sapiens
  misc_RNA (1)...(19): siRNA sense strand
gaugaggcuucugggauag

SEQ ID NO: 2063466 - RNA, 19 nt, Homo sapiens
  misc_RNA (1)...(19): siRNA sense strand
auacagccauccaccuuca

SEQ ID NO: 2063467 - RNA, 19 nt, Homo sapiens
  misc_RNA (1)...(19): siRNA sense strand
gggcuggaccguuucaaca

SEQ ID NO: 2063468 - RNA, 19 nt, Homo sapiens
  misc_RNA (1)...(19): siRNA sense strand
uuccugggcuggaccguuu

SEQ ID NO: 2063469 - RNA, 19 nt, Homo sapiens
  misc_RNA (1)...(19): siRNA sense strand
gugguccaguguucugauu

SEQ ID NO: 2063470 - RNA, 19 nt, Homo sapiens
  misc_RNA (1)...(19): siRNA sense strand
caacucggaaacuauaagu

SEQ ID NO: 2063471 - RNA, 19 nt, Homo sapiens
  misc_RNA (1)...(19): siRNA sense strand
ccacuaucauccuccuucu

SEQ ID NO: 2063472 - RNA, 19 nt, Homo sapiens
  misc_RNA (1)...(19): siRNA sense strand
agaggcuuauuugacuuua

SEQ ID NO: 2063473 - RNA, 19 nt, Homo sapiens
  misc_RNA (1)...(19): siRNA sense strand
auucaacucggaaacuaua

SEQ ID NO: 2063474 - RNA, 19 nt, Homo sapiens
  misc_RNA (1)...(19): siRNA sense strand
agagaggcuuauuugacuu

SEQ ID NO: 2063475 - RNA, 19 nt, Homo sapiens
  misc_RNA (1)...(19): siRNA sense strand
acuuuaugcuagaagauga

SEQ ID NO: 2063476 - RNA, 19 nt, Homo sapiens
  misc_RNA (1)...(19): siRNA sense strand
acagagaggcuuauuugac

SEQ ID NO: 2063477 - RNA, 19 nt, Homo sapiens
  misc_RNA (1)...(19): siRNA sense strand
uacgugcgcucugccauuc

SEQ ID NO: 2063478 - RNA, 19 nt, Homo sapiens
  misc_RNA (1)...(19): siRNA sense strand
cuacgugcgcucugccauu

SEQ ID NO: 2063479 - RNA, 19 nt, Homo sapiens
  misc_RNA (1)...(19): siRNA sense strand
caacagagaggcuuauuug

SEQ ID NO: 2063480 - RNA, 19 nt, Homo sapiens
  misc_RNA (1)...(19): siRNA sense strand
gcccagaaguuccugauga

SEQ ID NO: 2063481 - RNA, 19 nt, Homo sapiens
  misc_RNA (1)...(19): siRNA sense strand
caauaucucuguaguugga

SEQ ID NO: 2063482 - RNA, 19 nt, Homo sapiens
  misc_RNA (1)...(19): siRNA sense strand
agaugaggcuucugggaua

SEQ ID NO: 2063483 - RNA, 19 nt, Homo sapiens
  misc_RNA (1)...(19): siRNA sense strand
aacaauaucucuguaguug

SEQ ID NO: 2063484 - RNA, 19 nt, Homo sapiens
  misc_RNA (1)...(19): siRNA sense strand
cagagaggcuuauuugacu

SEQ ID NO: 2063485 - RNA, 19 nt, Homo sapiens
  misc_RNA (1)...(19): siRNA sense strand
gguccaguguucugauuug

SEQ ID NO: 2063486 - RNA, 19 nt, Homo sapiens
  misc_RNA (1)...(19): siRNA sense strand
ccauucaacucggaaacua

SEQ ID NO: 2063487 - RNA, 19 nt, Homo sapiens
  misc_RNA (1)...(19): siRNA sense strand
caacaauaucucuguaguu

SEQ ID NO: 2063488 - RNA, 19 nt, Homo sapiens
  misc_RNA (1)...(19): siRNA sense strand
guaguuggaucaagugacu

SEQ ID NO: 2063489 - RNA, 19 nt, Homo sapiens
  misc_RNA (1)...(19): siRNA sense strand
gcaacccgguccaguacug

SEQ ID NO: 2063490 - RNA, 19 nt, Homo sapiens
  misc_RNA (1)...(19): siRNA sense strand
gcuggaccguuucaacaga

SEQ ID NO: 2063491 - RNA, 19 nt, Homo sapiens
  misc_RNA (1)...(19): siRNA sense strand
gagaggcuuauuugacuuu

SEQ ID NO: 2063492 - RNA, 19 nt, Homo sapiens
  misc_RNA (1)...(19): siRNA sense strand
acucggaaacuauaaguaa

SEQ ID NO: 2063493 - RNA, 19 nt, Homo sapiens
  misc_RNA (1)...(19): siRNA sense strand
ucagcaacccgguccagua

SEQ ID NO: 2063494 - RNA, 19 nt, Homo sapiens
  misc_RNA (1)...(19): siRNA sense strand
ucaacagagaggcuuauuu

SEQ ID NO: 2063495 - RNA, 19 nt, Homo sapiens
  misc_RNA (1)...(19): siRNA sense strand
acaacaauaucucuguagu

SEQ ID NO: 2063496 - RNA, 19 nt, Homo sapiens
  misc_RNA (1)...(19): siRNA sense strand
aggcuuauuugacuuuaug

SEQ ID NO: 2063497 - RNA, 19 nt, Homo sapiens
  misc_RNA (1)...(19): siRNA sense strand
gggauaggcccagaaguuc

SEQ ID NO: 2063498 - RNA, 19 nt, Homo sapiens
  misc_RNA (1)...(19): siRNA sense strand
gaggcuuauuugacuuuau

SEQ ID NO: 2063499 - RNA, 19 nt, Homo sapiens
  misc_RNA (1)...(19): siRNA sense strand
gaugaggcuucugggauag

SEQ ID NO: 2063500 - RNA, 19 nt, Homo sapiens
  misc_RNA (1)...(19): siRNA sense strand
auacagccauccaccuuca

SEQ ID NO: 2063501 - RNA, 19 nt, Homo sapiens
  misc_RNA (1)...(19): siRNA sense strand
gggcuggaccguuucaaca

SEQ ID NO: 2063502 - RNA, 19 nt, Homo sapiens
  misc_RNA (1)...(19): siRNA sense strand
uuccugggcuggaccguuu

SEQ ID NO: 2063503 - RNA, 19 nt, Homo sapiens
  misc_RNA (1)...(19): siRNA sense strand
gugguccaguguucugauu

SEQ ID NO: 2063504 - RNA, 19 nt, Homo sapiens
  misc_RNA (1)...(19): siRNA sense strand
caacucggaaacuauaagu

SEQ ID NO: 2063505 - RNA, 19 nt, Homo sapiens
  misc_RNA (1)...(19): siRNA sense strand
ccacuaucauccuccuucu

SEQ ID NO: 2063506 - RNA, 19 nt, Homo sapiens
  misc_RNA (1)...(19): siRNA sense strand
agaggcuuauuugacuuua

SEQ ID NO: 2063507 - RNA, 19 nt, Homo sapiens
  misc_RNA (1)...(19): siRNA sense strand
auucaacucggaaacuaua

SEQ ID NO: 2063508 - RNA, 19 nt, Homo sapiens
  misc_RNA (1)...(19): siRNA sense strand
agagaggcuuauuugacuu

SEQ ID NO: 2063509 - RNA, 19 nt, Homo sapiens
  misc_RNA (1)...(19): siRNA sense strand
acuuuaugcuagaagauga

SEQ ID NO: 2063510 - RNA, 19 nt, Homo sapiens
  misc_RNA (1)...(19): siRNA sense strand
acagagaggcuuauuugac

SEQ ID NO: 2063511 - RNA, 19 nt, Homo sapiens
  misc_RNA (1)...(19): siRNA sense strand
uacgugcgcucugccauuc

SEQ ID NO: 2063512 - RNA, 19 nt, Homo sapiens
  misc_RNA (1)...(19): siRNA sense strand
cuacgugcgcucugccauu

SEQ ID NO: 2063513 - RNA, 19 nt, Homo sapiens
  misc_RNA (1)...(19): siRNA sense strand
caacagagaggcuuauuug

SEQ ID NO: 2063514 - RNA, 19 nt, Homo sapiens
  misc_RNA (1)...(19): siRNA sense strand
gcccagaaguuccugauga

SEQ ID NO: 2063515 - RNA, 19 nt, Homo sapiens
  misc_RNA (1)...(19): siRNA sense strand
agaugaggcuucugggaua

SEQ ID NO: 2063516 - RNA, 19 nt, Homo sapiens
  misc_RNA (1)...(19): siRNA sense strand
cagagaggcuuauuugacu

SEQ ID NO: 2063517 - RNA, 19 nt, Homo sapiens
  misc_RNA (1)...(19): siRNA sense strand
gguccaguguucugauuug

SEQ ID NO: 2063518 - RNA, 19 nt, Homo sapiens
  misc_RNA (1)...(19): siRNA sense strand
gcuggaccguuucaacaga

SEQ ID NO: 2063519 - RNA, 19 nt, Homo sapiens
  misc_RNA (1)...(19): siRNA sense strand
gagaggcuuauuugacuuu

SEQ ID NO: 2063520 - RNA, 19 nt, Homo sapiens
  misc_RNA (1)...(19): siRNA sense strand
ucaacagagaggcuuauuu

SEQ ID NO: 2063521 - RNA, 19 nt, Homo sapiens
  misc_RNA (1)...(19): siRNA sense strand
aggcuuauuugacuuuaug

SEQ ID NO: 2063522 - RNA, 19 nt, Homo sapiens
  misc_RNA (1)...(19): siRNA sense strand
gggauaggcccagaaguuc

SEQ ID NO: 2063523 - RNA, 19 nt, Homo sapiens
  misc_RNA (1)...(19): siRNA sense strand
gaggcuuauuugacuuuau

SEQ ID NO: 2063524 - RNA, 19 nt, Homo sapiens
  misc_RNA (1)...(19): siRNA sense strand
gaugaggcuucugggauag

SEQ ID NO: 2063525 - RNA, 19 nt, Homo sapiens
  misc_RNA (1)...(19): siRNA sense strand
uuccugggcuggaccguuu

SEQ ID NO: 2063526 - RNA, 19 nt, Homo sapiens
  misc_RNA (1)...(19): siRNA sense strand
gggcuggaccguuucaaca

SEQ ID NO: 2063527 - RNA, 19 nt, Homo sapiens
  misc_RNA (1)...(19): siRNA sense strand
gugguccaguguucugauu

SEQ ID NO: 2063528 - RNA, 19 nt, Homo sapiens
  misc_RNA (1)...(19): siRNA sense strand
agaggcuuauuugacuuua

SEQ ID NO: 2063529 - RNA, 19 nt, Homo sapiens
  misc_RNA (1)...(19): siRNA sense strand
ccacuaucauccuccuucu

SEQ ID NO: 2063530 - RNA, 19 nt, Homo sapiens
  misc_RNA (1)...(19): siRNA sense strand
agagaggcuuauuugacuu

SEQ ID NO: 2063531 - RNA, 19 nt, Homo sapiens
  misc_RNA (1)...(19): siRNA sense strand
acagagaggcuuauuugac

SEQ ID NO: 2063532 - RNA, 19 nt, Homo sapiens
  misc_RNA (1)...(19): siRNA sense strand
acuuuaugcuagaagauga

SEQ ID NO: 2063533 - RNA, 19 nt, Homo sapiens
  misc_RNA (1)...(19): siRNA sense strand
caacagagaggcuuauuug

SEQ ID NO: 2063534 - RNA, 19 nt, Homo sapiens
  misc_RNA (1)...(19): siRNA sense strand
gcccagaaguuccugauga

SEQ ID NO: 2063535 - RNA, 19 nt, Homo sapiens
  misc_RNA (1)...(19): siRNA sense strand
caauaucucuguaguugga

SEQ ID NO: 2063536 - RNA, 19 nt, Homo sapiens
  misc_RNA (1)...(19): siRNA sense strand
agaugaggcuucugggaua

SEQ ID NO: 2063537 - RNA, 19 nt, Homo sapiens
  misc_RNA (1)...(19): siRNA sense strand
aacaauaucucuguaguug

SEQ ID NO: 2063538 - RNA, 19 nt, Homo sapiens
  misc_RNA (1)...(19): siRNA sense strand
cagagaggcuuauuugacu

SEQ ID NO: 2063539 - RNA, 19 nt, Homo sapiens
  misc_RNA (1)...(19): siRNA sense strand
gguccaguguucugauuug

SEQ ID NO: 2063540 - RNA, 19 nt, Homo sapiens
  misc_RNA (1)...(19): siRNA sense strand
ccauucaacucggaaacua

SEQ ID NO: 2063541 - RNA, 19 nt, Homo sapiens
  misc_RNA (1)...(19): siRNA sense strand
caacaauaucucuguaguu

SEQ ID NO: 2063542 - RNA, 19 nt, Homo sapiens
  misc_RNA (1)...(19): siRNA sense strand
guaguuggaucaagugacu

SEQ ID NO: 2063543 - RNA, 19 nt, Homo sapiens
  misc_RNA (1)...(19): siRNA sense strand
gcaacccgguccaguacug

SEQ ID NO: 2063544 - RNA, 19 nt, Homo sapiens
  misc_RNA (1)...(19): siRNA sense strand
gcuggaccguuucaacaga

SEQ ID NO: 2063545 - RNA, 19 nt, Homo sapiens
  misc_RNA (1)...(19): siRNA sense strand
gagaggcuuauuugacuuu

SEQ ID NO: 2063546 - RNA, 19 nt, Homo sapiens
  misc_RNA (1)...(19): siRNA sense strand
acucggaaacuauaaguaa

SEQ ID NO: 2063547 - RNA, 19 nt, Homo sapiens
  misc_RNA (1)...(19): siRNA sense strand
ucagcaacccgguccagua

SEQ ID NO: 2063548 - RNA, 19 nt, Homo sapiens
  misc_RNA (1)...(19): siRNA sense strand
ucaacagagaggcuuauuu

SEQ ID NO: 2063549 - RNA, 19 nt, Homo sapiens
  misc_RNA (1)...(19): siRNA sense strand
acaacaauaucucuguagu

SEQ ID NO: 2063550 - RNA, 19 nt, Homo sapiens
  misc_RNA (1)...(19): siRNA sense strand
aggcuuauuugacuuuaug

SEQ ID NO: 2063551 - RNA, 19 nt, Homo sapiens
  misc_RNA (1)...(19): siRNA sense strand
gggauaggcccagaaguuc

SEQ ID NO: 2063552 - RNA, 19 nt, Homo sapiens
  misc_RNA (1)...(19): siRNA sense strand
gaggcuuauuugacuuuau

SEQ ID NO: 2063553 - RNA, 19 nt, Homo sapiens
  misc_RNA (1)...(19): siRNA sense strand
gaugaggcuucugggauag

SEQ ID NO: 2063554 - RNA, 19 nt, Homo sapiens
  misc_RNA (1)...(19): siRNA sense strand
auacagccauccaccuuca

SEQ ID NO: 2063555 - RNA, 19 nt, Homo sapiens
  misc_RNA (1)...(19): siRNA sense strand
gggcuggaccguuucaaca

SEQ ID NO: 2063556 - RNA, 19 nt, Homo sapiens
  misc_RNA (1)...(19): siRNA sense strand
uuccugggcuggaccguuu

SEQ ID NO: 2063557 - RNA, 19 nt, Homo sapiens
  misc_RNA (1)...(19): siRNA sense strand
gugguccaguguucugauu

SEQ ID NO: 2063558 - RNA, 19 nt, Homo sapiens
  misc_RNA (1)...(19): siRNA sense strand
caacucggaaacuauaagu

SEQ ID NO: 2063559 - RNA, 19 nt, Homo sapiens
  misc_RNA (1)...(19): siRNA sense strand
ccacuaucauccuccuucu

SEQ ID NO: 2063560 - RNA, 19 nt, Homo sapiens
  misc_RNA (1)...(19): siRNA sense strand
agaggcuuauuugacuuua

SEQ ID NO: 2063561 - RNA, 19 nt, Homo sapiens
  misc_RNA (1)...(19): siRNA sense strand
auucaacucggaaacuaua

SEQ ID NO: 2063562 - RNA, 19 nt, Homo sapiens
  misc_RNA (1)...(19): siRNA sense strand
agagaggcuuauuugacuu

SEQ ID NO: 2063563 - RNA, 19 nt, Homo sapiens
  misc_RNA (1)...(19): siRNA sense strand
acuuuaugcuagaagauga

SEQ ID NO: 2063564 - RNA, 19 nt, Homo sapiens
  misc_RNA (1)...(19): siRNA sense strand
acagagaggcuuauuugac

SEQ ID NO: 2063565 - RNA, 19 nt, Homo sapiens
  misc_RNA (1)...(19): siRNA sense strand
uacgugcgcucugccauuc

SEQ ID NO: 2063566 - RNA, 19 nt, Homo sapiens
  misc_RNA (1)...(19): siRNA sense strand
cuacgugcgcucugccauu

SEQ ID NO: 2063567 - RNA, 19 nt, Homo sapiens
  misc_RNA (1)...(19): siRNA sense strand
caacagagaggcuuauuug

SEQ ID NO: 2063568 - RNA, 19 nt, Homo sapiens
  misc_RNA (1)...(19): siRNA sense strand
gcccagaaguuccugauga

SEQ ID NO: 2063569 - RNA, 19 nt, Homo sapiens
  misc_RNA (1)...(19): siRNA sense strand
caauaucucuguaguugga

SEQ ID NO: 2063570 - RNA, 19 nt, Homo sapiens
  misc_RNA (1)...(19): siRNA sense strand
agaugaggcuucugggaua

SEQ ID NO: 2063571 - RNA, 19 nt, Homo sapiens
  misc_RNA (1)...(19): siRNA sense strand
aacaauaucucuguaguug

SEQ ID NO: 2063572 - RNA, 19 nt, Homo sapiens
  misc_RNA (1)...(19): siRNA sense strand
cagagaggcuuauuugacu

SEQ ID NO: 2063573 - RNA, 19 nt, Homo sapiens
  misc_RNA (1)...(19): siRNA sense strand
gguccaguguucugauuug

SEQ ID NO: 2063574 - RNA, 19 nt, Homo sapiens
  misc_RNA (1)...(19): siRNA sense strand
ccauucaacucggaaacua

SEQ ID NO: 2063575 - RNA, 19 nt, Homo sapiens
  misc_RNA (1)...(19): siRNA sense strand
caacaauaucucuguaguu

SEQ ID NO: 2063576 - RNA, 19 nt, Homo sapiens
  misc_RNA (1)...(19): siRNA sense strand
guaguuggaucaagugacu

SEQ ID NO: 2063577 - RNA, 19 nt, Homo sapiens
  misc_RNA (1)...(19): siRNA sense strand
gcaacccgguccaguacug

SEQ ID NO: 2063578 - RNA, 19 nt, Homo sapiens
  misc_RNA (1)...(19): siRNA sense strand
gcuggaccguuucaacaga

SEQ ID NO: 2063579 - RNA, 19 nt, Homo sapiens
  misc_RNA (1)...(19): siRNA sense strand
gagaggcuuauuugacuuu

SEQ ID NO: 2063580 - RNA, 19 nt, Homo sapiens
  misc_RNA (1)...(19): siRNA sense strand
acucggaaacuauaaguaa

SEQ ID NO: 2063581 - RNA, 19 nt, Homo sapiens
  misc_RNA (1)...(19): siRNA sense strand
ucagcaacccgguccagua

SEQ ID NO: 2063582 - RNA, 19 nt, Homo sapiens
  misc_RNA (1)...(19): siRNA sense strand
ucaacagagaggcuuauuu

SEQ ID NO: 2063583 - RNA, 19 nt, Homo sapiens
  misc_RNA (1)...(19): siRNA sense strand
acaacaauaucucuguagu

SEQ ID NO: 2063584 - RNA, 19 nt, Homo sapiens
  misc_RNA (1)...(19): siRNA sense strand
aggcuuauuugacuuuaug

SEQ ID NO: 2063585 - RNA, 19 nt, Homo sapiens
  misc_RNA (1)...(19): siRNA sense strand
gggauaggcccagaaguuc

SEQ ID NO: 2063586 - RNA, 19 nt, Homo sapiens
  misc_RNA (1)...(19): siRNA sense strand
gaggcuuauuugacuuuau

SEQ ID NO: 2063587 - RNA, 19 nt, Homo sapiens
  misc_RNA (1)...(19): siRNA sense strand
gaugaggcuucugggauag

SEQ ID NO: 2063588 - RNA, 19 nt, Homo sapiens
  misc_RNA (1)...(19): siRNA sense strand
auacagccauccaccuuca

SEQ ID NO: 2063589 - RNA, 19 nt, Homo sapiens
  misc_RNA (1)...(19): siRNA sense strand
gggcuggaccguuucaaca

SEQ ID NO: 2063590 - RNA, 19 nt, Homo sapiens
  misc_RNA (1)...(19): siRNA sense strand
uuccugggcuggaccguuu

SEQ ID NO: 2063591 - RNA, 19 nt, Homo sapiens
  misc_RNA (1)...(19): siRNA sense strand
gugguccaguguucugauu

SEQ ID NO: 2063592 - RNA, 19 nt, Homo sapiens
  misc_RNA (1)...(19): siRNA sense strand
caacucggaaacuauaagu

SEQ ID NO: 2063593 - RNA, 19 nt, Homo sapiens
  misc_RNA (1)...(19): siRNA sense strand
ccacuaucauccuccuucu

SEQ ID NO: 2063594 - RNA, 19 nt, Homo sapiens
  misc_RNA (1)...(19): siRNA sense strand
agaggcuuauuugacuuua

SEQ ID NO: 2063595 - RNA, 19 nt, Homo sapiens
  misc_RNA (1)...(19): siRNA sense strand
auucaacucggaaacuaua

SEQ ID NO: 2063596 - RNA, 19 nt, Homo sapiens
  misc_RNA (1)...(19): siRNA sense strand
agagaggcuuauuugacuu

SEQ ID NO: 2063597 - RNA, 19 nt, Homo sapiens
  misc_RNA (1)...(19): siRNA sense strand
acuuuaugcuagaagauga

SEQ ID NO: 2063598 - RNA, 19 nt, Homo sapiens
  misc_RNA (1)...(19): siRNA sense strand
acagagaggcuuauuugac

SEQ ID NO: 2063599 - RNA, 19 nt, Homo sapiens
  misc_RNA (1)...(19): siRNA sense strand
uacgugcgcucugccauuc

SEQ ID NO: 2063600 - RNA, 19 nt, Homo sapiens
  misc_RNA (1)...(19): siRNA sense strand
cuacgugcgcucugccauu

SEQ ID NO: 2063601 - RNA, 19 nt, Homo sapiens
  misc_RNA (1)...(19): siRNA sense strand
caacagagaggcuuauuug

SEQ ID NO: 2063602 - RNA, 19 nt, Homo sapiens
  misc_RNA (1)...(19): siRNA sense strand
gcccagaaguuccugauga

SEQ ID NO: 2063603 - RNA, 19 nt, Homo sapiens
  misc_RNA (1)...(19): siRNA sense strand
caauaucucuguaguugga

SEQ ID NO: 2063604 - RNA, 19 nt, Homo sapiens
  misc_RNA (1)...(19): siRNA sense strand
agaugaggcuucugggaua

SEQ ID NO: 2063605 - RNA, 19 nt, Homo sapiens
  misc_RNA (1)...(19): siRNA sense strand
aacaauaucucuguaguug

SEQ ID NO: 2063606 - RNA, 19 nt, Homo sapiens
  misc_RNA (1)...(19): siRNA sense strand
cagagaggcuuauuugacu

SEQ ID NO: 2063607 - RNA, 19 nt, Homo sapiens
  misc_RNA (1)...(19): siRNA sense strand
gguccaguguucugauuug

SEQ ID NO: 2063608 - RNA, 19 nt, Homo sapiens
  misc_RNA (1)...(19): siRNA sense strand
ccauucaacucggaaacua

SEQ ID NO: 2063609 - RNA, 19 nt, Homo sapiens
  misc_RNA (1)...(19): siRNA sense strand
caacaauaucucuguaguu

SEQ ID NO: 2063610 - RNA, 19 nt, Homo sapiens
  misc_RNA (1)...(19): siRNA sense strand
guaguuggaucaagugacu

SEQ ID NO: 2063611 - RNA, 19 nt, Homo sapiens
  misc_RNA (1)...(19): siRNA sense strand
gcaacccgguccaguacug

SEQ ID NO: 2063612 - RNA, 19 nt, Homo sapiens
  misc_RNA (1)...(19): siRNA sense strand
gcuggaccguuucaacaga

SEQ ID NO: 2063613 - RNA, 19 nt, Homo sapiens
  misc_RNA (1)...(19): siRNA sense strand
gagaggcuuauuugacuuu

SEQ ID NO: 2063614 - RNA, 19 nt, Homo sapiens
  misc_RNA (1)...(19): siRNA sense strand
acucggaaacuauaaguaa

SEQ ID NO: 2063615 - RNA, 19 nt, Homo sapiens
  misc_RNA (1)...(19): siRNA sense strand
ucagcaacccgguccagua

SEQ ID NO: 2063616 - RNA, 19 nt, Homo sapiens
  misc_RNA (1)...(19): siRNA sense strand
ucaacagagaggcuuauuu

SEQ ID NO: 2063617 - RNA, 19 nt, Homo sapiens
  misc_RNA (1)...(19): siRNA sense strand
acaacaauaucucuguagu

SEQ ID NO: 2063618 - RNA, 19 nt, Homo sapiens
  misc_RNA (1)...(19): siRNA sense strand
aggcuuauuugacuuuaug

SEQ ID NO: 2063619 - RNA, 19 nt, Homo sapiens
  misc_RNA (1)...(19): siRNA sense strand
gggauaggcccagaaguuc

SEQ ID NO: 2063620 - RNA, 19 nt, Homo sapiens
  misc_RNA (1)...(19): siRNA sense strand
gaggcuuauuugacuuuau

SEQ ID NO: 2063621 - RNA, 19 nt, Homo sapiens
  misc_RNA (1)...(19): siRNA sense strand
gaugaggcuucugggauag

SEQ ID NO: 2063622 - RNA, 19 nt, Homo sapiens
  misc_RNA (1)...(19): siRNA sense strand
auacagccauccaccuuca

SEQ ID NO: 2063623 - RNA, 19 nt, Homo sapiens
  misc_RNA (1)...(19): siRNA sense strand
gggcuggaccguuucaaca

SEQ ID NO: 2063624 - RNA, 19 nt, Homo sapiens
  misc_RNA (1)...(19): siRNA sense strand
uuccugggcuggaccguuu

SEQ ID NO: 2063625 - RNA, 19 nt, Homo sapiens
  misc_RNA (1)...(19): siRNA sense strand
gugguccaguguucugauu

SEQ ID NO: 2063626 - RNA, 19 nt, Homo sapiens
  misc_RNA (1)...(19): siRNA sense strand
caacucggaaacuauaagu

SEQ ID NO: 2063627 - RNA, 19 nt, Homo sapiens
  misc_RNA (1)...(19): siRNA sense strand
ccacuaucauccuccuucu

SEQ ID NO: 2063628 - RNA, 19 nt, Homo sapiens
  misc_RNA (1)...(19): siRNA sense strand
agaggcuuauuugacuuua

SEQ ID NO: 2063629 - RNA, 19 nt, Homo sapiens
  misc_RNA (1)...(19): siRNA sense strand
auucaacucggaaacuaua

SEQ ID NO: 2063630 - RNA, 19 nt, Homo sapiens
  misc_RNA (1)...(19): siRNA sense strand
agagaggcuuauuugacuu

SEQ ID NO: 2063631 - RNA, 19 nt, Homo sapiens
  misc_RNA (1)...(19): siRNA sense strand
acuuuaugcuagaagauga

SEQ ID NO: 2063632 - RNA, 19 nt, Homo sapiens
  misc_RNA (1)...(19): siRNA sense strand
acagagaggcuuauuugac

SEQ ID NO: 2063633 - RNA, 19 nt, Homo sapiens
  misc_RNA (1)...(19): siRNA sense strand
uacgugcgcucugccauuc

SEQ ID NO: 2063634 - RNA, 19 nt, Homo sapiens
  misc_RNA (1)...(19): siRNA sense strand
cuacgugcgcucugccauu

SEQ ID NO: 2063635 - RNA, 19 nt, Homo sapiens
  misc_RNA (1)...(19): siRNA sense strand
caacagagaggcuuauuug

SEQ ID NO: 2063636 - RNA, 19 nt, Homo sapiens
  misc_RNA (1)...(19): siRNA sense strand
gcccagaaguuccugauga

SEQ ID NO: 2063637 - RNA, 19 nt, Homo sapiens
  misc_RNA (1)...(19): siRNA sense strand
caauaucucuguaguugga

SEQ ID NO: 2063638 - RNA, 19 nt, Homo sapiens
  misc_RNA (1)...(19): siRNA sense strand
agaugaggcuucugggaua

SEQ ID NO: 2063639 - RNA, 19 nt, Homo sapiens
  misc_RNA (1)...(19): siRNA sense strand
aacaauaucucuguaguug

SEQ ID NO: 2063640 - RNA, 19 nt, Homo sapiens
  misc_RNA (1)...(19): siRNA sense strand
cagagaggcuuauuugacu

SEQ ID NO: 2063641 - RNA, 19 nt, Homo sapiens
  misc_RNA (1)...(19): siRNA sense strand
gguccaguguucugauuug

SEQ ID NO: 2063642 - RNA, 19 nt, Homo sapiens
  misc_RNA (1)...(19): siRNA sense strand
ccauucaacucggaaacua

SEQ ID NO: 2063643 - RNA, 19 nt, Homo sapiens
  misc_RNA (1)...(19): siRNA sense strand
caacaauaucucuguaguu

SEQ ID NO: 2063644 - RNA, 19 nt, Homo sapiens
  misc_RNA (1)...(19): siRNA sense strand
guaguuggaucaagugacu

SEQ ID NO: 2063645 - RNA, 19 nt, Homo sapiens
  misc_RNA (1)...(19): siRNA sense strand
gcaacccgguccaguacug

SEQ ID NO: 2063646 - RNA, 19 nt, Homo sapiens
  misc_RNA (1)...(19): siRNA sense strand
gcuggaccguuucaacaga

SEQ ID NO: 2063647 - RNA, 19 nt, Homo sapiens
  misc_RNA (1)...(19): siRNA sense strand
gagaggcuuauuugacuuu

SEQ ID NO: 2063648 - RNA, 19 nt, Homo sapiens
  misc_RNA (1)...(19): siRNA sense strand
acucggaaacuauaaguaa

SEQ ID NO: 2063649 - RNA, 19 nt, Homo sapiens
  misc_RNA (1)...(19): siRNA sense strand
ucagcaacccgguccagua

SEQ ID NO: 2063650 - RNA, 19 nt, Homo sapiens
  misc_RNA (1)...(19): siRNA sense strand
ucaacagagaggcuuauuu

SEQ ID NO: 2063651 - RNA, 19 nt, Homo sapiens
  misc_RNA (1)...(19): siRNA sense strand
acaacaauaucucuguagu

SEQ ID NO: 2063652 - RNA, 19 nt, Homo sapiens
  misc_RNA (1)...(19): siRNA sense strand
aggcuuauuugacuuuaug

SEQ ID NO: 2063653 - RNA, 19 nt, Homo sapiens
  misc_RNA (1)...(19): siRNA sense strand
gggauaggcccagaaguuc

SEQ ID NO: 2063654 - RNA, 19 nt, Homo sapiens
  misc_RNA (1)...(19): siRNA sense strand
gaggcuuauuugacuuuau

SEQ ID NO: 2063655 - RNA, 19 nt, Homo sapiens
  misc_RNA (1)...(19): siRNA sense strand
gaugaggcuucugggauag

SEQ ID NO: 2063656 - RNA, 19 nt, Homo sapiens
  misc_RNA (1)...(19): siRNA sense strand
auacagccauccaccuuca

SEQ ID NO: 2063657 - RNA, 19 nt, Homo sapiens
  misc_RNA (1)...(19): siRNA sense strand
gggcuggaccguuucaaca

SEQ ID NO: 2063658 - RNA, 19 nt, Homo sapiens
  misc_RNA (1)...(19): siRNA sense strand
uuccugggcuggaccguuu

SEQ ID NO: 2063659 - RNA, 19 nt, Homo sapiens
  misc_RNA (1)...(19): siRNA sense strand
gugguccaguguucugauu

SEQ ID NO: 2063660 - RNA, 19 nt, Homo sapiens
  misc_RNA (1)...(19): siRNA sense strand
caacucggaaacuauaagu

SEQ ID NO: 2063661 - RNA, 19 nt, Homo sapiens
  misc_RNA (1)...(19): siRNA sense strand
ccacuaucauccuccuucu

SEQ ID NO: 2063662 - RNA, 19 nt, Homo sapiens
  misc_RNA (1)...(19): siRNA sense strand
agaggcuuauuugacuuua

SEQ ID NO: 2063663 - RNA, 19 nt, Homo sapiens
  misc_RNA (1)...(19): siRNA sense strand
auucaacucggaaacuaua

SEQ ID NO: 2063664 - RNA, 19 nt, Homo sapiens
  misc_RNA (1)...(19): siRNA sense strand
agagaggcuuauuugacuu

SEQ ID NO: 2063665 - RNA, 19 nt, Homo sapiens
  misc_RNA (1)...(19): siRNA sense strand
acuuuaugcuagaagauga

SEQ ID NO: 2063666 - RNA, 19 nt, Homo sapiens
  misc_RNA (1)...(19): siRNA sense strand
acagagaggcuuauuugac

SEQ ID NO: 2063667 - RNA, 19 nt, Homo sapiens
  misc_RNA (1)...(19): siRNA sense strand
uacgugcgcucugccauuc

SEQ ID NO: 2063668 - RNA, 19 nt, Homo sapiens
  misc_RNA (1)...(19): siRNA sense strand
cuacgugcgcucugccauu

SEQ ID NO: 2063669 - RNA, 19 nt, Homo sapiens
  misc_RNA (1)...(19): siRNA sense strand
caacagagaggcuuauuug

SEQ ID NO: 2063670 - RNA, 19 nt, Homo sapiens
  misc_RNA (1)...(19): siRNA sense strand
gcccagaaguuccugauga

SEQ ID NO: 2063671 - RNA, 19 nt, Homo sapiens
  misc_RNA (1)...(19): siRNA sense strand
caauaucucuguaguugga

SEQ ID NO: 2063672 - RNA, 19 nt, Homo sapiens
  misc_RNA (1)...(19): siRNA sense strand
agaugaggcuucugggaua

SEQ ID NO: 2063673 - RNA, 19 nt, Homo sapiens
  misc_RNA (1)...(19): siRNA sense strand
aacaauaucucuguaguug

SEQ ID NO: 2063674 - RNA, 19 nt, Homo sapiens
  misc_RNA (1)...(19): siRNA sense strand
cagagaggcuuauuugacu

SEQ ID NO: 2063675 - RNA, 19 nt, Homo sapiens
  misc_RNA (1)...(19): siRNA sense strand
gguccaguguucugauuug

SEQ ID NO: 2063676 - RNA, 19 nt, Homo sapiens
  misc_RNA (1)...(19): siRNA sense strand
ccauucaacucggaaacua

SEQ ID NO: 2063677 - RNA, 19 nt, Homo sapiens
  misc_RNA (1)...(19): siRNA sense strand
caacaauaucucuguaguu

SEQ ID NO: 2063678 - RNA, 19 nt, Homo sapiens
  misc_RNA (1)...(19): siRNA sense strand
guaguuggaucaagugacu

SEQ ID NO: 2063679 - RNA, 19 nt, Homo sapiens
  misc_RNA (1)...(19): siRNA sense strand
gcaacccgguccaguacug

SEQ ID NO: 2063680 - RNA, 19 nt, Homo sapiens
  misc_RNA (1)...(19): siRNA sense strand
gcuggaccguuucaacaga

SEQ ID NO: 2063681 - RNA, 19 nt, Homo sapiens
  misc_RNA (1)...(19): siRNA sense strand
gagaggcuuauuugacuuu

SEQ ID NO: 2063682 - RNA, 19 nt, Homo sapiens
  misc_RNA (1)...(19): siRNA sense strand
acucggaaacuauaaguaa

SEQ ID NO: 2063683 - RNA, 19 nt, Homo sapiens
  misc_RNA (1)...(19): siRNA sense strand
ucagcaacccgguccagua

SEQ ID NO: 2063684 - RNA, 19 nt, Homo sapiens
  misc_RNA (1)...(19): siRNA sense strand
ucaacagagaggcuuauuu

SEQ ID NO: 2063685 - RNA, 19 nt, Homo sapiens
  misc_RNA (1)...(19): siRNA sense strand
acaacaauaucucuguagu

SEQ ID NO: 2063686 - RNA, 19 nt, Homo sapiens
  misc_RNA (1)...(19): siRNA sense strand
aggcuuauuugacuuuaug

SEQ ID NO: 2063687 - RNA, 19 nt, Homo sapiens
  misc_RNA (1)...(19): siRNA sense strand
gggauaggcccagaaguuc

SEQ ID NO: 2063688 - RNA, 19 nt, Homo sapiens
  misc_RNA (1)...(19): siRNA sense strand
gaggcuuauuugacuuuau

SEQ ID NO: 2063689 - RNA, 19 nt, Homo sapiens
  misc_RNA (1)...(19): siRNA sense strand
gaugaggcuucugggauag

SEQ ID NO: 2063690 - RNA, 19 nt, Homo sapiens
  misc_RNA (1)...(19): siRNA sense strand
auacagccauccaccuuca

SEQ ID NO: 2063691 - RNA, 19 nt, Homo sapiens
  misc_RNA (1)...(19): siRNA sense strand
gggcuggaccguuucaaca

SEQ ID NO: 2063692 - RNA, 19 nt, Homo sapiens
  misc_RNA (1)...(19): siRNA sense strand
uuccugggcuggaccguuu

SEQ ID NO: 2063693 - RNA, 19 nt, Homo sapiens
  misc_RNA (1)...(19): siRNA sense strand
gugguccaguguucugauu

SEQ ID NO: 2063694 - RNA, 19 nt, Homo sapiens
  misc_RNA (1)...(19): siRNA sense strand
caacucggaaacuauaagu

SEQ ID NO: 2063695 - RNA, 19 nt, Homo sapiens
  misc_RNA (1)...(19): siRNA sense strand
ccacuaucauccuccuucu

SEQ ID NO: 2063696 - RNA, 19 nt, Homo sapiens
  misc_RNA (1)...(19): siRNA sense strand
agaggcuuauuugacuuua

SEQ ID NO: 2063697 - RNA, 19 nt, Homo sapiens
  misc_RNA (1)...(19): siRNA sense strand
auucaacucggaaacuaua

SEQ ID NO: 2063698 - RNA, 19 nt, Homo sapiens
  misc_RNA (1)...(19): siRNA sense strand
agagaggcuuauuugacuu

SEQ ID NO: 2063699 - RNA, 19 nt, Homo sapiens
  misc_RNA (1)...(19): siRNA sense strand
acuuuaugcuagaagauga

SEQ ID NO: 2063700 - RNA, 19 nt, Homo sapiens
  misc_RNA (1)...(19): siRNA sense strand
acagagaggcuuauuugac

SEQ ID NO: 2063701 - RNA, 19 nt, Homo sapiens
  misc_RNA (1)...(19): siRNA sense strand
uacgugcgcucugccauuc

SEQ ID NO: 2063702 - RNA, 19 nt, Homo sapiens
  misc_RNA (1)...(19): siRNA sense strand
cuacgugcgcucugccauu

SEQ ID NO: 2063703 - RNA, 19 nt, Homo sapiens
  misc_RNA (1)...(19): siRNA sense strand
caacagagaggcuuauuug

SEQ ID NO: 2063704 - RNA, 19 nt, Homo sapiens
  misc_RNA (1)...(19): siRNA sense strand
gcccagaaguuccugauga

SEQ ID NO: 2063705 - RNA, 19 nt, Homo sapiens
  misc_RNA (1)...(19): siRNA sense strand
agaugaggcuucugggaua

SEQ ID NO: 2063706 - RNA, 19 nt, Homo sapiens
  misc_RNA (1)...(19): siRNA sense strand
cagagaggcuuauuugacu

SEQ ID NO: 2063707 - RNA, 19 nt, Homo sapiens
  misc_RNA (1)...(19): siRNA sense strand
gguccaguguucugauuug

SEQ ID NO: 2063708 - RNA, 19 nt, Homo sapiens
  misc_RNA (1)...(19): siRNA sense strand
gcuggaccguuucaacaga

SEQ ID NO: 2063709 - RNA, 19 nt, Homo sapiens
  misc_RNA (1)...(19): siRNA sense strand
gagaggcuuauuugacuuu

SEQ ID NO: 2063710 - RNA, 19 nt, Homo sapiens
  misc_RNA (1)...(19): siRNA sense strand
ucaacagagaggcuuauuu

SEQ ID NO: 2063711 - RNA, 19 nt, Homo sapiens
  misc_RNA (1)...(19): siRNA sense strand
aggcuuauuugacuuuaug

SEQ ID NO: 2063712 - RNA, 19 nt, Homo sapiens
  misc_RNA (1)...(19): siRNA sense strand
gggauaggcccagaaguuc

SEQ ID NO: 2063713 - RNA, 19 nt, Homo sapiens
  misc_RNA (1)...(19): siRNA sense strand
gaggcuuauuugacuuuau

SEQ ID NO: 2063714 - RNA, 19 nt, Homo sapiens
  misc_RNA (1)...(19): siRNA sense strand
gaugaggcuucugggauag

SEQ ID NO: 2063715 - RNA, 19 nt, Homo sapiens
  misc_RNA (1)...(19): siRNA sense strand
uuccugggcuggaccguuu

SEQ ID NO: 2063716 - RNA, 19 nt, Homo sapiens
  misc_RNA (1)...(19): siRNA sense strand
gggcuggaccguuucaaca

SEQ ID NO: 2063717 - RNA, 19 nt, Homo sapiens
  misc_RNA (1)...(19): siRNA sense strand
gugguccaguguucugauu

SEQ ID NO: 2063718 - RNA, 19 nt, Homo sapiens
  misc_RNA (1)...(19): siRNA sense strand
agaggcuuauuugacuuua

SEQ ID NO: 2063719 - RNA, 19 nt, Homo sapiens
  misc_RNA (1)...(19): siRNA sense strand
ccacuaucauccuccuucu

SEQ ID NO: 2063720 - RNA, 19 nt, Homo sapiens
  misc_RNA (1)...(19): siRNA sense strand
agagaggcuuauuugacuu

SEQ ID NO: 2063721 - RNA, 19 nt, Homo sapiens
  misc_RNA (1)...(19): siRNA sense strand
acagagaggcuuauuugac

SEQ ID NO: 2063722 - RNA, 19 nt, Homo sapiens
  misc_RNA (1)...(19): siRNA sense strand
acuuuaugcuagaagauga

SEQ ID NO: 2063723 - RNA, 19 nt, Homo sapiens
  misc_RNA (1)...(19): siRNA sense strand
caacagagaggcuuauuug

SEQ ID NO: 2063724 - RNA, 19 nt, Homo sapiens
  misc_RNA (1)...(19): siRNA sense strand
gcccagaaguuccugauga

SEQ ID NO: 2063725 - RNA, 19 nt, Homo sapiens
  misc_RNA (1)...(19): siRNA sense strand
caauaucucuguaguugga

SEQ ID NO: 2063726 - RNA, 19 nt, Homo sapiens
  misc_RNA (1)...(19): siRNA sense strand
agaugaggcuucugggaua

SEQ ID NO: 2063727 - RNA, 19 nt, Homo sapiens
  misc_RNA (1)...(19): siRNA sense strand
aacaauaucucuguaguug

SEQ ID NO: 2063728 - RNA, 19 nt, Homo sapiens
  misc_RNA (1)...(19): siRNA sense strand
cagagaggcuuauuugacu

SEQ ID NO: 2063729 - RNA, 19 nt, Homo sapiens
  misc_RNA (1)...(19): siRNA sense strand
gguccaguguucugauuug

SEQ ID NO: 2063730 - RNA, 19 nt, Homo sapiens
  misc_RNA (1)...(19): siRNA sense strand
ccauucaacucggaaacua

SEQ ID NO: 2063731 - RNA, 19 nt, Homo sapiens
  misc_RNA (1)...(19): siRNA sense strand
caacaauaucucuguaguu

SEQ ID NO: 2063732 - RNA, 19 nt, Homo sapiens
  misc_RNA (1)...(19): siRNA sense strand
guaguuggaucaagugacu

SEQ ID NO: 2063733 - RNA, 19 nt, Homo sapiens
  misc_RNA (1)...(19): siRNA sense strand
gcaacccgguccaguacug

SEQ ID NO: 2063734 - RNA, 19 nt, Homo sapiens
  misc_RNA (1)...(19): siRNA sense strand
gcuggaccguuucaacaga

SEQ ID NO: 2063735 - RNA, 19 nt, Homo sapiens
  misc_RNA (1)...(19): siRNA sense strand
gagaggcuuauuugacuuu

SEQ ID NO: 2063736 - RNA, 19 nt, Homo sapiens
  misc_RNA (1)...(19): siRNA sense strand
acucggaaacuauaaguaa

SEQ ID NO: 2063737 - RNA, 19 nt, Homo sapiens
  misc_RNA (1)...(19): siRNA sense strand
ucagcaacccgguccagua

SEQ ID NO: 2063738 - RNA, 19 nt, Homo sapiens
  misc_RNA (1)...(19): siRNA sense strand
ucaacagagaggcuuauuu

SEQ ID NO: 2063739 - RNA, 19 nt, Homo sapiens
  misc_RNA (1)...(19): siRNA sense strand
acaacaauaucucuguagu

SEQ ID NO: 2063740 - RNA, 19 nt, Homo sapiens
  misc_RNA (1)...(19): siRNA sense strand
aggcuuauuugacuuuaug

SEQ ID NO: 2063741 - RNA, 19 nt, Homo sapiens
  misc_RNA (1)...(19): siRNA sense strand
gggauaggcccagaaguuc

SEQ ID NO: 2063742 - RNA, 19 nt, Homo sapiens
  misc_RNA (1)...(19): siRNA sense strand
gaggcuuauuugacuuuau

SEQ ID NO: 2063743 - RNA, 19 nt, Homo sapiens
  misc_RNA (1)...(19): siRNA sense strand
gaugaggcuucugggauag

SEQ ID NO: 2063744 - RNA, 19 nt, Homo sapiens
  misc_RNA (1)...(19): siRNA sense strand
auacagccauccaccuuca

SEQ ID NO: 2063745 - RNA, 19 nt, Homo sapiens
  misc_RNA (1)...(19): siRNA sense strand
gggcuggaccguuucaaca

SEQ ID NO: 2063746 - RNA, 19 nt, Homo sapiens
  misc_RNA (1)...(19): siRNA sense strand
uuccugggcuggaccguuu

SEQ ID NO: 2063747 - RNA, 19 nt, Homo sapiens
  misc_RNA (1)...(19): siRNA sense strand
gugguccaguguucugauu

SEQ ID NO: 2063748 - RNA, 19 nt, Homo sapiens
  misc_RNA (1)...(19): siRNA sense strand
caacucggaaacuauaagu

SEQ ID NO: 2063749 - RNA, 19 nt, Homo sapiens
  misc_RNA (1)...(19): siRNA sense strand
ccacuaucauccuccuucu

SEQ ID NO: 2063750 - RNA, 19 nt, Homo sapiens
  misc_RNA (1)...(19): siRNA sense strand
agaggcuuauuugacuuua

SEQ ID NO: 2063751 - RNA, 19 nt, Homo sapiens
  misc_RNA (1)...(19): siRNA sense strand
auucaacucggaaacuaua

SEQ ID NO: 2063752 - RNA, 19 nt, Homo sapiens
  misc_RNA (1)...(19): siRNA sense strand
agagaggcuuauuugacuu

SEQ ID NO: 2063753 - RNA, 19 nt, Homo sapiens
  misc_RNA (1)...(19): siRNA sense strand
acuuuaugcuagaagauga

SEQ ID NO: 2063754 - RNA, 19 nt, Homo sapiens
  misc_RNA (1)...(19): siRNA sense strand
acagagaggcuuauuugac

SEQ ID NO: 2063755 - RNA, 19 nt, Homo sapiens
  misc_RNA (1)...(19): siRNA sense strand
uacgugcgcucugccauuc

SEQ ID NO: 2063756 - RNA, 19 nt, Homo sapiens
  misc_RNA (1)...(19): siRNA sense strand
cuacgugcgcucugccauu

SEQ ID NO: 2063757 - RNA, 19 nt, Homo sapiens
  misc_RNA (1)...(19): siRNA sense strand
caacagagaggcuuauuug

SEQ ID NO: 2063758 - RNA, 19 nt, Homo sapiens
  misc_RNA (1)...(19): siRNA sense strand
gcccagaaguuccugauga

SEQ ID NO: 2063759 - RNA, 19 nt, Homo sapiens
  misc_RNA (1)...(19): siRNA sense strand
caauaucucuguaguugga

SEQ ID NO: 2063760 - RNA, 19 nt, Homo sapiens
  misc_RNA (1)...(19): siRNA sense strand
agaugaggcuucugggaua

SEQ ID NO: 2063761 - RNA, 19 nt, Homo sapiens
  misc_RNA (1)...(19): siRNA sense strand
aacaauaucucuguaguug

SEQ ID NO: 2063762 - RNA, 19 nt, Homo sapiens
  misc_RNA (1)...(19): siRNA sense strand
cagagaggcuuauuugacu

SEQ ID NO: 2063763 - RNA, 19 nt, Homo sapiens
  misc_RNA (1)...(19): siRNA sense strand
gguccaguguucugauuug

SEQ ID NO: 2063764 - RNA, 19 nt, Homo sapiens
  misc_RNA (1)...(19): siRNA sense strand
ccauucaacucggaaacua

SEQ ID NO: 2063765 - RNA, 19 nt, Homo sapiens
  misc_RNA (1)...(19): siRNA sense strand
caacaauaucucuguaguu

SEQ ID NO: 2063766 - RNA, 19 nt, Homo sapiens
  misc_RNA (1)...(19): siRNA sense strand
guaguuggaucaagugacu

SEQ ID NO: 2063767 - RNA, 19 nt, Homo sapiens
  misc_RNA (1)...(19): siRNA sense strand
gcaacccgguccaguacug

SEQ ID NO: 2063768 - RNA, 19 nt, Homo sapiens
  misc_RNA (1)...(19): siRNA sense strand
gcuggaccguuucaacaga

SEQ ID NO: 2063769 - RNA, 19 nt, Homo sapiens
  misc_RNA (1)...(19): siRNA sense strand
gagaggcuuauuugacuuu

SEQ ID NO: 2063770 - RNA, 19 nt, Homo sapiens
  misc_RNA (1)...(19): siRNA sense strand
acucggaaacuauaaguaa

SEQ ID NO: 2063771 - RNA, 19 nt, Homo sapiens
  misc_RNA (1)...(19): siRNA sense strand
ucagcaacccgguccagua

SEQ ID NO: 2063772 - RNA, 19 nt, Homo sapiens
  misc_RNA (1)...(19): siRNA sense strand
ucaacagagaggcuuauuu

SEQ ID NO: 2063773 - RNA, 19 nt, Homo sapiens
  misc_RNA (1)...(19): siRNA sense strand
acaacaauaucucuguagu

SEQ ID NO: 2063774 - RNA, 19 nt, Homo sapiens
  misc_RNA (1)...(19): siRNA sense strand
aggcuuauuugacuuuaug

SEQ ID NO: 2063775 - RNA, 19 nt, Homo sapiens
  misc_RNA (1)...(19): siRNA sense strand
gggauaggcccagaaguuc

SEQ ID NO: 2063776 - RNA, 19 nt, Homo sapiens
  misc_RNA (1)...(19): siRNA sense strand
gaggcuuauuugacuuuau

SEQ ID NO: 2063777 - RNA, 19 nt, Homo sapiens
  misc_RNA (1)...(19): siRNA sense strand
gaugaggcuucugggauag

SEQ ID NO: 2063778 - RNA, 19 nt, Homo sapiens
  misc_RNA (1)...(19): siRNA sense strand
auacagccauccaccuuca

SEQ ID NO: 2063779 - RNA, 19 nt, Homo sapiens
  misc_RNA (1)...(19): siRNA sense strand
gggcuggaccguuucaaca

SEQ ID NO: 2063780 - RNA, 19 nt, Homo sapiens
  misc_RNA (1)...(19): siRNA sense strand
uuccugggcuggaccguuu

SEQ ID NO: 2063781 - RNA, 19 nt, Homo sapiens
  misc_RNA (1)...(19): siRNA sense strand
gugguccaguguucugauu

SEQ ID NO: 2063782 - RNA, 19 nt, Homo sapiens
  misc_RNA (1)...(19): siRNA sense strand
caacucggaaacuauaagu

SEQ ID NO: 2063783 - RNA, 19 nt, Homo sapiens
  misc_RNA (1)...(19): siRNA sense strand
ccacuaucauccuccuucu

SEQ ID NO: 2063784 - RNA, 19 nt, Homo sapiens
  misc_RNA (1)...(19): siRNA sense strand
agaggcuuauuugacuuua

SEQ ID NO: 2063785 - RNA, 19 nt, Homo sapiens
  misc_RNA (1)...(19): siRNA sense strand
auucaacucggaaacuaua

SEQ ID NO: 2063786 - RNA, 19 nt, Homo sapiens
  misc_RNA (1)...(19): siRNA sense strand
agagaggcuuauuugacuu

SEQ ID NO: 2063787 - RNA, 19 nt, Homo sapiens
  misc_RNA (1)...(19): siRNA sense strand
acuuuaugcuagaagauga

SEQ ID NO: 2063788 - RNA, 19 nt, Homo sapiens
  misc_RNA (1)...(19): siRNA sense strand
acagagaggcuuauuugac

SEQ ID NO: 2063789 - RNA, 19 nt, Homo sapiens
  misc_RNA (1)...(19): siRNA sense strand
uacgugcgcucugccauuc

SEQ ID NO: 2063790 - RNA, 19 nt, Homo sapiens
  misc_RNA (1)...(19): siRNA sense strand
cuacgugcgcucugccauu

SEQ ID NO: 2063791 - RNA, 19 nt, Homo sapiens
  misc_RNA (1)...(19): siRNA sense strand
caacagagaggcuuauuug

SEQ ID NO: 2063792 - RNA, 19 nt, Homo sapiens
  misc_RNA (1)...(19): siRNA sense strand
gcccagaaguuccugauga

SEQ ID NO: 2063793 - RNA, 19 nt, Homo sapiens
  misc_RNA (1)...(19): siRNA sense strand
caauaucucuguaguugga

SEQ ID NO: 2063794 - RNA, 19 nt, Homo sapiens
  misc_RNA (1)...(19): siRNA sense strand
agaugaggcuucugggaua

SEQ ID NO: 2063795 - RNA, 19 nt, Homo sapiens
  misc_RNA (1)...(19): siRNA sense strand
aacaauaucucuguaguug

SEQ ID NO: 2063796 - RNA, 19 nt, Homo sapiens
  misc_RNA (1)...(19): siRNA sense strand
cagagaggcuuauuugacu

SEQ ID NO: 2063797 - RNA, 19 nt, Homo sapiens
  misc_RNA (1)...(19): siRNA sense strand
gguccaguguucugauuug

SEQ ID NO: 2063798 - RNA, 19 nt, Homo sapiens
  misc_RNA (1)...(19): siRNA sense strand
ccauucaacucggaaacua

SEQ ID NO: 2063799 - RNA, 19 nt, Homo sapiens
  misc_RNA (1)...(19): siRNA sense strand
caacaauaucucuguaguu

SEQ ID NO: 2063800 - RNA, 19 nt, Homo sapiens
  misc_RNA (1)...(19): siRNA sense strand
guaguuggaucaagugacu

SEQ ID NO: 2063801 - RNA, 19 nt, Homo sapiens
  misc_RNA (1)...(19): siRNA sense strand
gcaacccgguccaguacug

SEQ ID NO: 2063802 - RNA, 19 nt, Homo sapiens
  misc_RNA (1)...(19): siRNA sense strand
gcuggaccguuucaacaga

SEQ ID NO: 2063803 - RNA, 19 nt, Homo sapiens
  misc_RNA (1)...(19): siRNA sense strand
gagaggcuuauuugacuuu

SEQ ID NO: 2063804 - RNA, 19 nt, Homo sapiens
  misc_RNA (1)...(19): siRNA sense strand
acucggaaacuauaaguaa

SEQ ID NO: 2063805 - RNA, 19 nt, Homo sapiens
  misc_RNA (1)...(19): siRNA sense strand
ucagcaacccgguccagua

SEQ ID NO: 2063806 - RNA, 19 nt, Homo sapiens
  misc_RNA (1)...(19): siRNA sense strand
ucaacagagaggcuuauuu

SEQ ID NO: 2063807 - RNA, 19 nt, Homo sapiens
  misc_RNA (1)...(19): siRNA sense strand
acaacaauaucucuguagu

SEQ ID NO: 2063808 - RNA, 19 nt, Homo sapiens
  misc_RNA (1)...(19): siRNA sense strand
aggcuuauuugacuuuaug

SEQ ID NO: 2063809 - RNA, 19 nt, Homo sapiens
  misc_RNA (1)...(19): siRNA sense strand
gggauaggcccagaaguuc

SEQ ID NO: 2063810 - RNA, 19 nt, Homo sapiens
  misc_RNA (1)...(19): siRNA sense strand
gaggcuuauuugacuuuau

SEQ ID NO: 2063811 - RNA, 19 nt, Homo sapiens
  misc_RNA (1)...(19): siRNA sense strand
gaugaggcuucugggauag

SEQ ID NO: 2063812 - RNA, 19 nt, Homo sapiens
  misc_RNA (1)...(19): siRNA sense strand
auacagccauccaccuuca

SEQ ID NO: 2063813 - RNA, 19 nt, Homo sapiens
  misc_RNA (1)...(19): siRNA sense strand
gggcuggaccguuucaaca

SEQ ID NO: 2063814 - RNA, 19 nt, Homo sapiens
  misc_RNA (1)...(19): siRNA sense strand
uuccugggcuggaccguuu

SEQ ID NO: 2063815 - RNA, 19 nt, Homo sapiens
  misc_RNA (1)...(19): siRNA sense strand
gugguccaguguucugauu

SEQ ID NO: 2063816 - RNA, 19 nt, Homo sapiens
  misc_RNA (1)...(19): siRNA sense strand
caacucggaaacuauaagu

SEQ ID NO: 2063817 - RNA, 19 nt, Homo sapiens
  misc_RNA (1)...(19): siRNA sense strand
ccacuaucauccuccuucu

SEQ ID NO: 2063818 - RNA, 19 nt, Homo sapiens
  misc_RNA (1)...(19): siRNA sense strand
agaggcuuauuugacuuua

SEQ ID NO: 2063819 - RNA, 19 nt, Homo sapiens
  misc_RNA (1)...(19): siRNA sense strand
auucaacucggaaacuaua

SEQ ID NO: 2063820 - RNA, 19 nt, Homo sapiens
  misc_RNA (1)...(19): siRNA sense strand
agagaggcuuauuugacuu

SEQ ID NO: 2063821 - RNA, 19 nt, Homo sapiens
  misc_RNA (1)...(19): siRNA sense strand
acuuuaugcuagaagauga

SEQ ID NO: 2063822 - RNA, 19 nt, Homo sapiens
  misc_RNA (1)...(19): siRNA sense strand
acagagaggcuuauuugac

SEQ ID NO: 2063823 - RNA, 19 nt, Homo sapiens
  misc_RNA (1)...(19): siRNA sense strand
uacgugcgcucugccauuc

SEQ ID NO: 2063824 - RNA, 19 nt, Homo sapiens
  misc_RNA (1)...(19): siRNA sense strand
cuacgugcgcucugccauu

SEQ ID NO: 2063825 - RNA, 19 nt, Homo sapiens
  misc_RNA (1)...(19): siRNA sense strand
caacagagaggcuuauuug

SEQ ID NO: 2063826 - RNA, 19 nt, Homo sapiens
  misc_RNA (1)...(19): siRNA sense strand
gcccagaaguuccugauga

SEQ ID NO: 2063827 - RNA, 19 nt, Homo sapiens
  misc_RNA (1)...(19): siRNA sense strand
caauaucucuguaguugga

SEQ ID NO: 2063828 - RNA, 19 nt, Homo sapiens
  misc_RNA (1)...(19): siRNA sense strand
agaugaggcuucugggaua

SEQ ID NO: 2063829 - RNA, 19 nt, Homo sapiens
  misc_RNA (1)...(19): siRNA sense strand
aacaauaucucuguaguug

SEQ ID NO: 2063830 - RNA, 19 nt, Homo sapiens
  misc_RNA (1)...(19): siRNA sense strand
cagagaggcuuauuugacu

SEQ ID NO: 2063831 - RNA, 19 nt, Homo sapiens
  misc_RNA (1)...(19): siRNA sense strand
gguccaguguucugauuug

SEQ ID NO: 2063832 - RNA, 19 nt, Homo sapiens
  misc_RNA (1)...(19): siRNA sense strand
ccauucaacucggaaacua

SEQ ID NO: 2063833 - RNA, 19 nt, Homo sapiens
  misc_RNA (1)...(19): siRNA sense strand
caacaauaucucuguaguu

SEQ ID NO: 2063834 - RNA, 19 nt, Homo sapiens
  misc_RNA (1)...(19): siRNA sense strand
guaguuggaucaagugacu

SEQ ID NO: 2063835 - RNA, 19 nt, Homo sapiens
  misc_RNA (1)...(19): siRNA sense strand
gcaacccgguccaguacug

SEQ ID NO: 2063836 - RNA, 19 nt, Homo sapiens
  misc_RNA (1)...(19): siRNA sense strand
gcuggaccguuucaacaga

SEQ ID NO: 2063837 - RNA, 19 nt, Homo sapiens
  misc_RNA (1)...(19): siRNA sense strand
gagaggcuuauuugacuuu

SEQ ID NO: 2063838 - RNA, 19 nt, Homo sapiens
  misc_RNA (1)...(19): siRNA sense strand
acucggaaacuauaaguaa

SEQ ID NO: 2063839 - RNA, 19 nt, Homo sapiens
  misc_RNA (1)...(19): siRNA sense strand
ucagcaacccgguccagua

SEQ ID NO: 2063840 - RNA, 19 nt, Homo sapiens
  misc_RNA (1)...(19): siRNA sense strand
ucaacagagaggcuuauuu

SEQ ID NO: 2063841 - RNA, 19 nt, Homo sapiens
  misc_RNA (1)...(19): siRNA sense strand
acaacaauaucucuguagu

SEQ ID NO: 2063842 - RNA, 19 nt, Homo sapiens
  misc_RNA (1)...(19): siRNA sense strand
aggcuuauuugacuuuaug

SEQ ID NO: 2063843 - RNA, 19 nt, Homo sapiens
  misc_RNA (1)...(19): siRNA sense strand
gggauaggcccagaaguuc

SEQ ID NO: 2063844 - RNA, 19 nt, Homo sapiens
  misc_RNA (1)...(19): siRNA sense strand
gaggcuuauuugacuuuau

SEQ ID NO: 2063845 - RNA, 19 nt, Homo sapiens
  misc_RNA (1)...(19): siRNA sense strand
gaugaggcuucugggauag

SEQ ID NO: 2063846 - RNA, 19 nt, Homo sapiens
  misc_RNA (1)...(19): siRNA sense strand
auacagccauccaccuuca

SEQ ID NO: 2063847 - RNA, 19 nt, Homo sapiens
  misc_RNA (1)...(19): siRNA sense strand
gggcuggaccguuucaaca

SEQ ID NO: 2063848 - RNA, 19 nt, Homo sapiens
  misc_RNA (1)...(19): siRNA sense strand
uuccugggcuggaccguuu

SEQ ID NO: 2063849 - RNA, 19 nt, Homo sapiens
  misc_RNA (1)...(19): siRNA sense strand
gugguccaguguucugauu

SEQ ID NO: 2063850 - RNA, 19 nt, Homo sapiens
  misc_RNA (1)...(19): siRNA sense strand
caacucggaaacuauaagu

SEQ ID NO: 2063851 - RNA, 19 nt, Homo sapiens
  misc_RNA (1)...(19): siRNA sense strand
ccacuaucauccuccuucu

SEQ ID NO: 2063852 - RNA, 19 nt, Homo sapiens
  misc_RNA (1)...(19): siRNA sense strand
agaggcuuauuugacuuua

SEQ ID NO: 2063853 - RNA, 19 nt, Homo sapiens
  misc_RNA (1)...(19): siRNA sense strand
auucaacucggaaacuaua

SEQ ID NO: 2063854 - RNA, 19 nt, Homo sapiens
  misc_RNA (1)...(19): siRNA sense strand
agagaggcuuauuugacuu

SEQ ID NO: 2063855 - RNA, 19 nt, Homo sapiens
  misc_RNA (1)...(19): siRNA sense strand
acuuuaugcuagaagauga

SEQ ID NO: 2063856 - RNA, 19 nt, Homo sapiens
  misc_RNA (1)...(19): siRNA sense strand
acagagaggcuuauuugac

SEQ ID NO: 2063857 - RNA, 19 nt, Homo sapiens
  misc_RNA (1)...(19): siRNA sense strand
uacgugcgcucugccauuc

SEQ ID NO: 2063858 - RNA, 19 nt, Homo sapiens
  misc_RNA (1)...(19): siRNA sense strand
cuacgugcgcucugccauu

SEQ ID NO: 2063859 - RNA, 19 nt, Homo sapiens
  misc_RNA (1)...(19): siRNA sense strand
caacagagaggcuuauuug

SEQ ID NO: 2063860 - RNA, 19 nt, Homo sapiens
  misc_RNA (1)...(19): siRNA sense strand
gcccagaaguuccugauga

SEQ ID NO: 2063861 - RNA, 19 nt, Homo sapiens
  misc_RNA (1)...(19): siRNA sense strand
caauaucucuguaguugga

SEQ ID NO: 2063862 - RNA, 19 nt, Homo sapiens
  misc_RNA (1)...(19): siRNA sense strand
agaugaggcuucugggaua

SEQ ID NO: 2063863 - RNA, 19 nt, Homo sapiens
  misc_RNA (1)...(19): siRNA sense strand
aacaauaucucuguaguug

SEQ ID NO: 2063864 - RNA, 19 nt, Homo sapiens
  misc_RNA (1)...(19): siRNA sense strand
cagagaggcuuauuugacu

SEQ ID NO: 2063865 - RNA, 19 nt, Homo sapiens
  misc_RNA (1)...(19): siRNA sense strand
gguccaguguucugauuug

SEQ ID NO: 2063866 - RNA, 19 nt, Homo sapiens
  misc_RNA (1)...(19): siRNA sense strand
ccauucaacucggaaacua

SEQ ID NO: 2063867 - RNA, 19 nt, Homo sapiens
  misc_RNA (1)...(19): siRNA sense strand
caacaauaucucuguaguu

SEQ ID NO: 2063868 - RNA, 19 nt, Homo sapiens
  misc_RNA (1)...(19): siRNA sense strand
guaguuggaucaagugacu

SEQ ID NO: 2063869 - RNA, 19 nt, Homo sapiens
  misc_RNA (1)...(19): siRNA sense strand
gcaacccgguccaguacug

SEQ ID NO: 2063870 - RNA, 19 nt, Homo sapiens
  misc_RNA (1)...(19): siRNA sense strand
gcuggaccguuucaacaga

SEQ ID NO: 2063871 - RNA, 19 nt, Homo sapiens
  misc_RNA (1)...(19): siRNA sense strand
gagaggcuuauuugacuuu

SEQ ID NO: 2063872 - RNA, 19 nt, Homo sapiens
  misc_RNA (1)...(19): siRNA sense strand
acucggaaacuauaaguaa

SEQ ID NO: 2063873 - RNA, 19 nt, Homo sapiens
  misc_RNA (1)...(19): siRNA sense strand
ucagcaacccgguccagua

SEQ ID NO: 2063874 - RNA, 19 nt, Homo sapiens
  misc_RNA (1)...(19): siRNA sense strand
ucaacagagaggcuuauuu

SEQ ID NO: 2063875 - RNA, 19 nt, Homo sapiens
  misc_RNA (1)...(19): siRNA sense strand
acaacaauaucucuguagu

SEQ ID NO: 2063876 - RNA, 19 nt, Homo sapiens
  misc_RNA (1)...(19): siRNA sense strand
aggcuuauuugacuuuaug

SEQ ID NO: 2063877 - RNA, 19 nt, Homo sapiens
  misc_RNA (1)...(19): siRNA sense strand
gggauaggcccagaaguuc

SEQ ID NO: 2063878 - RNA, 19 nt, Homo sapiens
  misc_RNA (1)...(19): siRNA sense strand
gaggcuuauuugacuuuau

SEQ ID NO: 2063879 - RNA, 19 nt, Homo sapiens
  misc_RNA (1)...(19): siRNA sense strand
gaugaggcuucugggauag

SEQ ID NO: 2063880 - RNA, 19 nt, Homo sapiens
  misc_RNA (1)...(19): siRNA sense strand
auacagccauccaccuuca

SEQ ID NO: 2063881 - RNA, 19 nt, Homo sapiens
  misc_RNA (1)...(19): siRNA sense strand
gggcuggaccguuucaaca

SEQ ID NO: 2063882 - RNA, 19 nt, Homo sapiens
  misc_RNA (1)...(19): siRNA sense strand
uuccugggcuggaccguuu

SEQ ID NO: 2063883 - RNA, 19 nt, Homo sapiens
  misc_RNA (1)...(19): siRNA sense strand
gugguccaguguucugauu

SEQ ID NO: 2063884 - RNA, 19 nt, Homo sapiens
  misc_RNA (1)...(19): siRNA sense strand
caacucggaaacuauaagu

SEQ ID NO: 2063885 - RNA, 19 nt, Homo sapiens
  misc_RNA (1)...(19): siRNA sense strand
ccacuaucauccuccuucu

SEQ ID NO: 2063886 - RNA, 19 nt, Homo sapiens
  misc_RNA (1)...(19): siRNA sense strand
agaggcuuauuugacuuua

SEQ ID NO: 2063887 - RNA, 19 nt, Homo sapiens
  misc_RNA (1)...(19): siRNA sense strand
auucaacucggaaacuaua

SEQ ID NO: 2063888 - RNA, 19 nt, Homo sapiens
  misc_RNA (1)...(19): siRNA sense strand
agagaggcuuauuugacuu

SEQ ID NO: 2063889 - RNA, 19 nt, Homo sapiens
  misc_RNA (1)...(19): siRNA sense strand
acuuuaugcuagaagauga

SEQ ID NO: 2063890 - RNA, 19 nt, Homo sapiens
  misc_RNA (1)...(19): siRNA sense strand
acagagaggcuuauuugac

SEQ ID NO: 2063891 - RNA, 19 nt, Homo sapiens
  misc_RNA (1)...(19): siRNA sense strand
uacgugcgcucugccauuc

SEQ ID NO: 2063892 - RNA, 19 nt, Homo sapiens
  misc_RNA (1)...(19): siRNA sense strand
cuacgugcgcucugccauu

SEQ ID NO: 2063893 - RNA, 19 nt, Homo sapiens
  misc_RNA (1)...(19): siRNA sense strand
caacagagaggcuuauuug

SEQ ID NO: 2063894 - RNA, 19 nt, Homo sapiens
  misc_RNA (1)...(19): siRNA sense strand
gcccagaaguuccugauga

SEQ ID NO: 2063895 - RNA, 19 nt, Homo sapiens
  misc_RNA (1)...(19): siRNA sense strand
agaugaggcuucugggaua

SEQ ID NO: 2063896 - RNA, 19 nt, Homo sapiens
  misc_RNA (1)...(19): siRNA sense strand
cagagaggcuuauuugacu

SEQ ID NO: 2063897 - RNA, 19 nt, Homo sapiens
  misc_RNA (1)...(19): siRNA sense strand
gguccaguguucugauuug

SEQ ID NO: 2063898 - RNA, 19 nt, Homo sapiens
  misc_RNA (1)...(19): siRNA sense strand
gcuggaccguuucaacaga

SEQ ID NO: 2063899 - RNA, 19 nt, Homo sapiens
  misc_RNA (1)...(19): siRNA sense strand
gagaggcuuauuugacuuu

SEQ ID NO: 2063900 - RNA, 19 nt, Homo sapiens
  misc_RNA (1)...(19): siRNA sense strand
ucaacagagaggcuuauuu

SEQ ID NO: 2063901 - RNA, 19 nt, Homo sapiens
  misc_RNA (1)...(19): siRNA sense strand
aggcuuauuugacuuuaug

SEQ ID NO: 2063902 - RNA, 19 nt, Homo sapiens
  misc_RNA (1)...(19): siRNA sense strand
gggauaggcccagaaguuc

SEQ ID NO: 2063903 - RNA, 19 nt, Homo sapiens
  misc_RNA (1)...(19): siRNA sense strand
gaggcuuauuugacuuuau

SEQ ID NO: 2063904 - RNA, 19 nt, Homo sapiens
  misc_RNA (1)...(19): siRNA sense strand
gaugaggcuucugggauag

SEQ ID NO: 2063905 - RNA, 19 nt, Homo sapiens
  misc_RNA (1)...(19): siRNA sense strand
uuccugggcuggaccguuu

SEQ ID NO: 2063906 - RNA, 19 nt, Homo sapiens
  misc_RNA (1)...(19): siRNA sense strand
gggcuggaccguuucaaca

SEQ ID NO: 2063907 - RNA, 19 nt, Homo sapiens
  misc_RNA (1)...(19): siRNA sense strand
gugguccaguguucugauu

SEQ ID NO: 2063908 - RNA, 19 nt, Homo sapiens
  misc_RNA (1)...(19): siRNA sense strand
agaggcuuauuugacuuua

SEQ ID NO: 2063909 - RNA, 19 nt, Homo sapiens
  misc_RNA (1)...(19): siRNA sense strand
ccacuaucauccuccuucu

SEQ ID NO: 2063910 - RNA, 19 nt, Homo sapiens
  misc_RNA (1)...(19): siRNA sense strand
agagaggcuuauuugacuu

SEQ ID NO: 2063911 - RNA, 19 nt, Homo sapiens
  misc_RNA (1)...(19): siRNA sense strand
acagagaggcuuauuugac

SEQ ID NO: 2063912 - RNA, 19 nt, Homo sapiens
  misc_RNA (1)...(19): siRNA sense strand
acuuuaugcuagaagauga

SEQ ID NO: 2063913 - RNA, 19 nt, Homo sapiens
  misc_RNA (1)...(19): siRNA sense strand
caacagagaggcuuauuug

SEQ ID NO: 2063914 - RNA, 19 nt, Homo sapiens
  misc_RNA (1)...(19): siRNA sense strand
gcccagaaguuccugauga

SEQ ID NO: 2063915 - RNA, 19 nt, Homo sapiens
  misc_RNA (1)...(19): siRNA sense strand
caauaucucuguaguugga

SEQ ID NO: 2063916 - RNA, 19 nt, Homo sapiens
  misc_RNA (1)...(19): siRNA sense strand
agaugaggcuucugggaua

SEQ ID NO: 2063917 - RNA, 19 nt, Homo sapiens
  misc_RNA (1)...(19): siRNA sense strand
aacaauaucucuguaguug

SEQ ID NO: 2063918 - RNA, 19 nt, Homo sapiens
  misc_RNA (1)...(19): siRNA sense strand
cagagaggcuuauuugacu

SEQ ID NO: 2063919 - RNA, 19 nt, Homo sapiens
  misc_RNA (1)...(19): siRNA sense strand
gguccaguguucugauuug

SEQ ID NO: 2063920 - RNA, 19 nt, Homo sapiens
  misc_RNA (1)...(19): siRNA sense strand
ccauucaacucggaaacua

SEQ ID NO: 2063921 - RNA, 19 nt, Homo sapiens
  misc_RNA (1)...(19): siRNA sense strand
caacaauaucucuguaguu

SEQ ID NO: 2063922 - RNA, 19 nt, Homo sapiens
  misc_RNA (1)...(19): siRNA sense strand
guaguuggaucaagugacu

SEQ ID NO: 2063923 - RNA, 19 nt, Homo sapiens
  misc_RNA (1)...(19): siRNA sense strand
gcaacccgguccaguacug

SEQ ID NO: 2063924 - RNA, 19 nt, Homo sapiens
  misc_RNA (1)...(19): siRNA sense strand
gcuggaccguuucaacaga

SEQ ID NO: 2063925 - RNA, 19 nt, Homo sapiens
  misc_RNA (1)...(19): siRNA sense strand
gagaggcuuauuugacuuu

SEQ ID NO: 2063926 - RNA, 19 nt, Homo sapiens
  misc_RNA (1)...(19): siRNA sense strand
acucggaaacuauaaguaa

SEQ ID NO: 2063927 - RNA, 19 nt, Homo sapiens
  misc_RNA (1)...(19): siRNA sense strand
ucagcaacccgguccagua

SEQ ID NO: 2063928 - RNA, 19 nt, Homo sapiens
  misc_RNA (1)...(19): siRNA sense strand
ucaacagagaggcuuauuu

SEQ ID NO: 2063929 - RNA, 19 nt, Homo sapiens
  misc_RNA (1)...(19): siRNA sense strand
acaacaauaucucuguagu

SEQ ID NO: 2063930 - RNA, 19 nt, Homo sapiens
  misc_RNA (1)...(19): siRNA sense strand
aggcuuauuugacuuuaug

SEQ ID NO: 2063931 - RNA, 19 nt, Homo sapiens
  misc_RNA (1)...(19): siRNA sense strand
gggauaggcccagaaguuc

SEQ ID NO: 2063932 - RNA, 19 nt, Homo sapiens
  misc_RNA (1)...(19): siRNA sense strand
gaggcuuauuugacuuuau

SEQ ID NO: 2063933 - RNA, 19 nt, Homo sapiens
  misc_RNA (1)...(19): siRNA sense strand
gaugaggcuucugggauag

SEQ ID NO: 2063934 - RNA, 19 nt, Homo sapiens
  misc_RNA (1)...(19): siRNA sense strand
auacagccauccaccuuca

SEQ ID NO: 2063935 - RNA, 19 nt, Homo sapiens
  misc_RNA (1)...(19): siRNA sense strand
gggcuggaccguuucaaca

SEQ ID NO: 2063936 - RNA, 19 nt, Homo sapiens
  misc_RNA (1)...(19): siRNA sense strand
uuccugggcuggaccguuu

SEQ ID NO: 2063937 - RNA, 19 nt, Homo sapiens
  misc_RNA (1)...(19): siRNA sense strand
gugguccaguguucugauu

SEQ ID NO: 2063938 - RNA, 19 nt, Homo sapiens
  misc_RNA (1)...(19): siRNA sense strand
caacucggaaacuauaagu

SEQ ID NO: 2063939 - RNA, 19 nt, Homo sapiens
  misc_RNA (1)...(19): siRNA sense strand
ccacuaucauccuccuucu

SEQ ID NO: 2063940 - RNA, 19 nt, Homo sapiens
  misc_RNA (1)...(19): siRNA sense strand
agaggcuuauuugacuuua

SEQ ID NO: 2063941 - RNA, 19 nt, Homo sapiens
  misc_RNA (1)...(19): siRNA sense strand
auucaacucggaaacuaua

SEQ ID NO: 2063942 - RNA, 19 nt, Homo sapiens
  misc_RNA (1)...(19): siRNA sense strand
agagaggcuuauuugacuu

SEQ ID NO: 2063943 - RNA, 19 nt, Homo sapiens
  misc_RNA (1)...(19): siRNA sense strand
acuuuaugcuagaagauga

SEQ ID NO: 2063944 - RNA, 19 nt, Homo sapiens
  misc_RNA (1)...(19): siRNA sense strand
acagagaggcuuauuugac

SEQ ID NO: 2063945 - RNA, 19 nt, Homo sapiens
  misc_RNA (1)...(19): siRNA sense strand
uacgugcgcucugccauuc

SEQ ID NO: 2063946 - RNA, 19 nt, Homo sapiens
  misc_RNA (1)...(19): siRNA sense strand
cuacgugcgcucugccauu

SEQ ID NO: 2063947 - RNA, 19 nt, Homo sapiens
  misc_RNA (1)...(19): siRNA sense strand
caacagagaggcuuauuug

SEQ ID NO: 2063948 - RNA, 19 nt, Homo sapiens
  misc_RNA (1)...(19): siRNA sense strand
gcccagaaguuccugauga

SEQ ID NO: 2063949 - RNA, 19 nt, Homo sapiens
  misc_RNA (1)...(19): siRNA sense strand
caauaucucuguaguugga

SEQ ID NO: 2063950 - RNA, 19 nt, Homo sapiens
  misc_RNA (1)...(19): siRNA sense strand
agaugaggcuucugggaua

SEQ ID NO: 2063951 - RNA, 19 nt, Homo sapiens
  misc_RNA (1)...(19): siRNA sense strand
aacaauaucucuguaguug

SEQ ID NO: 2063952 - RNA, 19 nt, Homo sapiens
  misc_RNA (1)...(19): siRNA sense strand
cagagaggcuuauuugacu

SEQ ID NO: 2063953 - RNA, 19 nt, Homo sapiens
  misc_RNA (1)...(19): siRNA sense strand
gguccaguguucugauuug

SEQ ID NO: 2063954 - RNA, 19 nt, Homo sapiens
  misc_RNA (1)...(19): siRNA sense strand
ccauucaacucggaaacua

SEQ ID NO: 2063955 - RNA, 19 nt, Homo sapiens
  misc_RNA (1)...(19): siRNA sense strand
caacaauaucucuguaguu

SEQ ID NO: 2063956 - RNA, 19 nt, Homo sapiens
  misc_RNA (1)...(19): siRNA sense strand
guaguuggaucaagugacu

SEQ ID NO: 2063957 - RNA, 19 nt, Homo sapiens
  misc_RNA (1)...(19): siRNA sense strand
gcaacccgguccaguacug

SEQ ID NO: 2063958 - RNA, 19 nt, Homo sapiens
  misc_RNA (1)...(19): siRNA sense strand
gcuggaccguuucaacaga

SEQ ID NO: 2063959 - RNA, 19 nt, Homo sapiens
  misc_RNA (1)...(19): siRNA sense strand
gagaggcuuauuugacuuu

SEQ ID NO: 2063960 - RNA, 19 nt, Homo sapiens
  misc_RNA (1)...(19): siRNA sense strand
acucggaaacuauaaguaa

SEQ ID NO: 2063961 - RNA, 19 nt, Homo sapiens
  misc_RNA (1)...(19): siRNA sense strand
ucagcaacccgguccagua

SEQ ID NO: 2063962 - RNA, 19 nt, Homo sapiens
  misc_RNA (1)...(19): siRNA sense strand
ucaacagagaggcuuauuu

SEQ ID NO: 2063963 - RNA, 19 nt, Homo sapiens
  misc_RNA (1)...(19): siRNA sense strand
acaacaauaucucuguagu

SEQ ID NO: 2063964 - RNA, 19 nt, Homo sapiens
  misc_RNA (1)...(19): siRNA sense strand
aggcuuauuugacuuuaug

SEQ ID NO: 2063965 - RNA, 19 nt, Homo sapiens
  misc_RNA (1)...(19): siRNA sense strand
gggauaggcccagaaguuc

SEQ ID NO: 2063966 - RNA, 19 nt, Homo sapiens
  misc_RNA (1)...(19): siRNA sense strand
gaggcuuauuugacuuuau

SEQ ID NO: 2063967 - RNA, 19 nt, Homo sapiens
  misc_RNA (1)...(19): siRNA sense strand
gaugaggcuucugggauag

SEQ ID NO: 2063968 - RNA, 19 nt, Homo sapiens
  misc_RNA (1)...(19): siRNA sense strand
auacagccauccaccuuca

SEQ ID NO: 2063969 - RNA, 19 nt, Homo sapiens
  misc_RNA (1)...(19): siRNA sense strand
gggcuggaccguuucaaca

SEQ ID NO: 2063970 - RNA, 19 nt, Homo sapiens
  misc_RNA (1)...(19): siRNA sense strand
uuccugggcuggaccguuu

SEQ ID NO: 2063971 - RNA, 19 nt, Homo sapiens
  misc_RNA (1)...(19): siRNA sense strand
gugguccaguguucugauu

SEQ ID NO: 2063972 - RNA, 19 nt, Homo sapiens
  misc_RNA (1)...(19): siRNA sense strand
caacucggaaacuauaagu

SEQ ID NO: 2063973 - RNA, 19 nt, Homo sapiens
  misc_RNA (1)...(19): siRNA sense strand
ccacuaucauccuccuucu

SEQ ID NO: 2063974 - RNA, 19 nt, Homo sapiens
  misc_RNA (1)...(19): siRNA sense strand
agaggcuuauuugacuuua

SEQ ID NO: 2063975 - RNA, 19 nt, Homo sapiens
  misc_RNA (1)...(19): siRNA sense strand
auucaacucggaaacuaua

SEQ ID NO: 2063976 - RNA, 19 nt, Homo sapiens
  misc_RNA (1)...(19): siRNA sense strand
agagaggcuuauuugacuu

SEQ ID NO: 2063977 - RNA, 19 nt, Homo sapiens
  misc_RNA (1)...(19): siRNA sense strand
acuuuaugcuagaagauga

SEQ ID NO: 2063978 - RNA, 19 nt, Homo sapiens
  misc_RNA (1)...(19): siRNA sense strand
acagagaggcuuauuugac

SEQ ID NO: 2063979 - RNA, 19 nt, Homo sapiens
  misc_RNA (1)...(19): siRNA sense strand
uacgugcgcucugccauuc

SEQ ID NO: 2063980 - RNA, 19 nt, Homo sapiens
  misc_RNA (1)...(19): siRNA sense strand
cuacgugcgcucugccauu

SEQ ID NO: 2063981 - RNA, 19 nt, Homo sapiens
  misc_RNA (1)...(19): siRNA sense strand
caacagagaggcuuauuug

SEQ ID NO: 2063982 - RNA, 19 nt, Homo sapiens
  misc_RNA (1)...(19): siRNA sense strand
gcccagaaguuccugauga

SEQ ID NO: 2063983 - RNA, 19 nt, Homo sapiens
  misc_RNA (1)...(19): siRNA sense strand
caauaucucuguaguugga

SEQ ID NO: 2063984 - RNA, 19 nt, Homo sapiens
  misc_RNA (1)...(19): siRNA sense strand
agaugaggcuucugggaua

SEQ ID NO: 2063985 - RNA, 19 nt, Homo sapiens
  misc_RNA (1)...(19): siRNA sense strand
aacaauaucucuguaguug

SEQ ID NO: 2063986 - RNA, 19 nt, Homo sapiens
  misc_RNA (1)...(19): siRNA sense strand
cagagaggcuuauuugacu

SEQ ID NO: 2063987 - RNA, 19 nt, Homo sapiens
  misc_RNA (1)...(19): siRNA sense strand
gguccaguguucugauuug

SEQ ID NO: 2063988 - RNA, 19 nt, Homo sapiens
  misc_RNA (1)...(19): siRNA sense strand
ccauucaacucggaaacua

SEQ ID NO: 2063989 - RNA, 19 nt, Homo sapiens
  misc_RNA (1)...(19): siRNA sense strand
caacaauaucucuguaguu

SEQ ID NO: 2063990 - RNA, 19 nt, Homo sapiens
  misc_RNA (1)...(19): siRNA sense strand
guaguuggaucaagugacu

SEQ ID NO: 2063991 - RNA, 19 nt, Homo sapiens
  misc_RNA (1)...(19): siRNA sense strand
gcaacccgguccaguacug

SEQ ID NO: 2063992 - RNA, 19 nt, Homo sapiens
  misc_RNA (1)...(19): siRNA sense strand
gcuggaccguuucaacaga

SEQ ID NO: 2063993 - RNA, 19 nt, Homo sapiens
  misc_RNA (1)...(19): siRNA sense strand
gagaggcuuauuugacuuu

SEQ ID NO: 2063994 - RNA, 19 nt, Homo sapiens
  misc_RNA (1)...(19): siRNA sense strand
acucggaaacuauaaguaa

SEQ ID NO: 2063995 - RNA, 19 nt, Homo sapiens
  misc_RNA (1)...(19): siRNA sense strand
ucagcaacccgguccagua

SEQ ID NO: 2063996 - RNA, 19 nt, Homo sapiens
  misc_RNA (1)...(19): siRNA sense strand
ucaacagagaggcuuauuu

SEQ ID NO: 2063997 - RNA, 19 nt, Homo sapiens
  misc_RNA (1)...(19): siRNA sense strand
acaacaauaucucuguagu

SEQ ID NO: 2063998 - RNA, 19 nt, Homo sapiens
  misc_RNA (1)...(19): siRNA sense strand
aggcuuauuugacuuuaug

SEQ ID NO: 2063999 - RNA, 19 nt, Homo sapiens
  misc_RNA (1)...(19): siRNA sense strand
gggauaggcccagaaguuc

SEQ ID NO: 2064000 - RNA, 19 nt, Homo sapiens
  misc_RNA (1)...(19): siRNA sense strand
gaggcuuauuugacuuuau

SEQ ID NO: 2064001 - RNA, 19 nt, Homo sapiens
  misc_RNA (1)...(19): siRNA sense strand
gaugaggcuucugggauag

SEQ ID NO: 2064002 - RNA, 19 nt, Homo sapiens
  misc_RNA (1)...(19): siRNA sense strand
auacagccauccaccuuca

SEQ ID NO: 2064003 - RNA, 19 nt, Homo sapiens
  misc_RNA (1)...(19): siRNA sense strand
gggcuggaccguuucaaca

SEQ ID NO: 2064004 - RNA, 19 nt, Homo sapiens
  misc_RNA (1)...(19): siRNA sense strand
uuccugggcuggaccguuu

SEQ ID NO: 2064005 - RNA, 19 nt, Homo sapiens
  misc_RNA (1)...(19): siRNA sense strand
gugguccaguguucugauu

SEQ ID NO: 2064006 - RNA, 19 nt, Homo sapiens
  misc_RNA (1)...(19): siRNA sense strand
caacucggaaacuauaagu

SEQ ID NO: 2064007 - RNA, 19 nt, Homo sapiens
  misc_RNA (1)...(19): siRNA sense strand
ccacuaucauccuccuucu

SEQ ID NO: 2064008 - RNA, 19 nt, Homo sapiens
  misc_RNA (1)...(19): siRNA sense strand
agaggcuuauuugacuuua

SEQ ID NO: 2064009 - RNA, 19 nt, Homo sapiens
  misc_RNA (1)...(19): siRNA sense strand
auucaacucggaaacuaua

SEQ ID NO: 2064010 - RNA, 19 nt, Homo sapiens
  misc_RNA (1)...(19): siRNA sense strand
agagaggcuuauuugacuu

SEQ ID NO: 2064011 - RNA, 19 nt, Homo sapiens
  misc_RNA (1)...(19): siRNA sense strand
acuuuaugcuagaagauga

SEQ ID NO: 2064012 - RNA, 19 nt, Homo sapiens
  misc_RNA (1)...(19): siRNA sense strand
acagagaggcuuauuugac

SEQ ID NO: 2064013 - RNA, 19 nt, Homo sapiens
  misc_RNA (1)...(19): siRNA sense strand
uacgugcgcucugccauuc

SEQ ID NO: 2064014 - RNA, 19 nt, Homo sapiens
  misc_RNA (1)...(19): siRNA sense strand
cuacgugcgcucugccauu

SEQ ID NO: 2064015 - RNA, 19 nt, Homo sapiens
  misc_RNA (1)...(19): siRNA sense strand
caacagagaggcuuauuug

SEQ ID NO: 2064016 - RNA, 19 nt, Homo sapiens
  misc_RNA (1)...(19): siRNA sense strand
gcccagaaguuccugauga

SEQ ID NO: 2064017 - RNA, 19 nt, Homo sapiens
  misc_RNA (1)...(19): siRNA sense strand
caauaucucuguaguugga

SEQ ID NO: 2064018 - RNA, 19 nt, Homo sapiens
  misc_RNA (1)...(19): siRNA sense strand
agaugaggcuucugggaua

SEQ ID NO: 2064019 - RNA, 19 nt, Homo sapiens
  misc_RNA (1)...(19): siRNA sense strand
aacaauaucucuguaguug

SEQ ID NO: 2064020 - RNA, 19 nt, Homo sapiens
  misc_RNA (1)...(19): siRNA sense strand
cagagaggcuuauuugacu

SEQ ID NO: 2064021 - RNA, 19 nt, Homo sapiens
  misc_RNA (1)...(19): siRNA sense strand
gguccaguguucugauuug

SEQ ID NO: 2064022 - RNA, 19 nt, Homo sapiens
  misc_RNA (1)...(19): siRNA sense strand
ccauucaacucggaaacua

SEQ ID NO: 2064023 - RNA, 19 nt, Homo sapiens
  misc_RNA (1)...(19): siRNA sense strand
caacaauaucucuguaguu

SEQ ID NO: 2064024 - RNA, 19 nt, Homo sapiens
  misc_RNA (1)...(19): siRNA sense strand
guaguuggaucaagugacu

SEQ ID NO: 2064025 - RNA, 19 nt, Homo sapiens
  misc_RNA (1)...(19): siRNA sense strand
gcaacccgguccaguacug

SEQ ID NO: 2064026 - RNA, 19 nt, Homo sapiens
  misc_RNA (1)...(19): siRNA sense strand
gcuggaccguuucaacaga

SEQ ID NO: 2064027 - RNA, 19 nt, Homo sapiens
  misc_RNA (1)...(19): siRNA sense strand
gagaggcuuauuugacuuu

SEQ ID NO: 2064028 - RNA, 19 nt, Homo sapiens
  misc_RNA (1)...(19): siRNA sense strand
acucggaaacuauaaguaa

SEQ ID NO: 2064029 - RNA, 19 nt, Homo sapiens
  misc_RNA (1)...(19): siRNA sense strand
ucagcaacccgguccagua

SEQ ID NO: 2064030 - RNA, 19 nt, Homo sapiens
  misc_RNA (1)...(19): siRNA sense strand
ucaacagagaggcuuauuu

SEQ ID NO: 2064031 - RNA, 19 nt, Homo sapiens
  misc_RNA (1)...(19): siRNA sense strand
acaacaauaucucuguagu

SEQ ID NO: 2064032 - RNA, 19 nt, Homo sapiens
  misc_RNA (1)...(19): siRNA sense strand
aggcuuauuugacuuuaug

SEQ ID NO: 2064033 - RNA, 19 nt, Homo sapiens
  misc_RNA (1)...(19): siRNA sense strand
gggauaggcccagaaguuc

SEQ ID NO: 2064034 - RNA, 19 nt, Homo sapiens
  misc_RNA (1)...(19): siRNA sense strand
gaggcuuauuugacuuuau

SEQ ID NO: 2064035 - RNA, 19 nt, Homo sapiens
  misc_RNA (1)...(19): siRNA sense strand
gaugaggcuucugggauag

SEQ ID NO: 2064036 - RNA, 19 nt, Homo sapiens
  misc_RNA (1)...(19): siRNA sense strand
auacagccauccaccuuca

SEQ ID NO: 2064037 - RNA, 19 nt, Homo sapiens
  misc_RNA (1)...(19): siRNA sense strand
gggcuggaccguuucaaca

SEQ ID NO: 2064038 - RNA, 19 nt, Homo sapiens
  misc_RNA (1)...(19): siRNA sense strand
uuccugggcuggaccguuu

SEQ ID NO: 2064039 - RNA, 19 nt, Homo sapiens
  misc_RNA (1)...(19): siRNA sense strand
gugguccaguguucugauu

SEQ ID NO: 2064040 - RNA, 19 nt, Homo sapiens
  misc_RNA (1)...(19): siRNA sense strand
caacucggaaacuauaagu

SEQ ID NO: 2064041 - RNA, 19 nt, Homo sapiens
  misc_RNA (1)...(19): siRNA sense strand
ccacuaucauccuccuucu

SEQ ID NO: 2064042 - RNA, 19 nt, Homo sapiens
  misc_RNA (1)...(19): siRNA sense strand
agaggcuuauuugacuuua

SEQ ID NO: 2064043 - RNA, 19 nt, Homo sapiens
  misc_RNA (1)...(19): siRNA sense strand
auucaacucggaaacuaua

SEQ ID NO: 2064044 - RNA, 19 nt, Homo sapiens
  misc_RNA (1)...(19): siRNA sense strand
agagaggcuuauuugacuu

SEQ ID NO: 2064045 - RNA, 19 nt, Homo sapiens
  misc_RNA (1)...(19): siRNA sense strand
acuuuaugcuagaagauga

SEQ ID NO: 2064046 - RNA, 19 nt, Homo sapiens
  misc_RNA (1)...(19): siRNA sense strand
acagagaggcuuauuugac

SEQ ID NO: 2064047 - RNA, 19 nt, Homo sapiens
  misc_RNA (1)...(19): siRNA sense strand
uacgugcgcucugccauuc

SEQ ID NO: 2064048 - RNA, 19 nt, Homo sapiens
  misc_RNA (1)...(19): siRNA sense strand
cuacgugcgcucugccauu

SEQ ID NO: 2064049 - RNA, 19 nt, Homo sapiens
  misc_RNA (1)...(19): siRNA sense strand
caacagagaggcuuauuug

SEQ ID NO: 2064050 - RNA, 19 nt, Homo sapiens
  misc_RNA (1)...(19): siRNA sense strand
gcccagaaguuccugauga

SEQ ID NO: 2064051 - RNA, 19 nt, Homo sapiens
  misc_RNA (1)...(19): siRNA sense strand
caauaucucuguaguugga

SEQ ID NO: 2064052 - RNA, 19 nt, Homo sapiens
  misc_RNA (1)...(19): siRNA sense strand
agaugaggcuucugggaua

SEQ ID NO: 2064053 - RNA, 19 nt, Homo sapiens
  misc_RNA (1)...(19): siRNA sense strand
aacaauaucucuguaguug

SEQ ID NO: 2064054 - RNA, 19 nt, Homo sapiens
  misc_RNA (1)...(19): siRNA sense strand
cagagaggcuuauuugacu

SEQ ID NO: 2064055 - RNA, 19 nt, Homo sapiens
  misc_RNA (1)...(19): siRNA sense strand
gguccaguguucugauuug

SEQ ID NO: 2064056 - RNA, 19 nt, Homo sapiens
  misc_RNA (1)...(19): siRNA sense strand
ccauucaacucggaaacua

SEQ ID NO: 2064057 - RNA, 19 nt, Homo sapiens
  misc_RNA (1)...(19): siRNA sense strand
caacaauaucucuguaguu

SEQ ID NO: 2064058 - RNA, 19 nt, Homo sapiens
  misc_RNA (1)...(19): siRNA sense strand
guaguuggaucaagugacu

SEQ ID NO: 2064059 - RNA, 19 nt, Homo sapiens
  misc_RNA (1)...(19): siRNA sense strand
gcaacccgguccaguacug

SEQ ID NO: 2064060 - RNA, 19 nt, Homo sapiens
  misc_RNA (1)...(19): siRNA sense strand
gcuggaccguuucaacaga

SEQ ID NO: 2064061 - RNA, 19 nt, Homo sapiens
  misc_RNA (1)...(19): siRNA sense strand
gagaggcuuauuugacuuu

SEQ ID NO: 2064062 - RNA, 19 nt, Homo sapiens
  misc_RNA (1)...(19): siRNA sense strand
acucggaaacuauaaguaa

SEQ ID NO: 2064063 - RNA, 19 nt, Homo sapiens
  misc_RNA (1)...(19): siRNA sense strand
ucagcaacccgguccagua

SEQ ID NO: 2064064 - RNA, 19 nt, Homo sapiens
  misc_RNA (1)...(19): siRNA sense strand
ucaacagagaggcuuauuu

SEQ ID NO: 2064065 - RNA, 19 nt, Homo sapiens
  misc_RNA (1)...(19): siRNA sense strand
acaacaauaucucuguagu

SEQ ID NO: 2064066 - RNA, 19 nt, Homo sapiens
  misc_RNA (1)...(19): siRNA sense strand
aggcuuauuugacuuuaug

SEQ ID NO: 2064067 - RNA, 19 nt, Homo sapiens
  misc_RNA (1)...(19): siRNA sense strand
gggauaggcccagaaguuc

SEQ ID NO: 2064068 - RNA, 19 nt, Homo sapiens
  misc_RNA (1)...(19): siRNA sense strand
gaggcuuauuugacuuuau

SEQ ID NO: 2064069 - RNA, 19 nt, Homo sapiens
  misc_RNA (1)...(19): siRNA sense strand
gaugaggcuucugggauag

SEQ ID NO: 2064070 - RNA, 19 nt, Homo sapiens
  misc_RNA (1)...(19): siRNA sense strand
auacagccauccaccuuca

SEQ ID NO: 2064071 - RNA, 19 nt, Homo sapiens
  misc_RNA (1)...(19): siRNA sense strand
gggcuggaccguuucaaca

SEQ ID NO: 2064072 - RNA, 19 nt, Homo sapiens
  misc_RNA (1)...(19): siRNA sense strand
uuccugggcuggaccguuu

SEQ ID NO: 2064073 - RNA, 19 nt, Homo sapiens
  misc_RNA (1)...(19): siRNA sense strand
gugguccaguguucugauu

SEQ ID NO: 2064074 - RNA, 19 nt, Homo sapiens
  misc_RNA (1)...(19): siRNA sense strand
caacucggaaacuauaagu

SEQ ID NO: 2064075 - RNA, 19 nt, Homo sapiens
  misc_RNA (1)...(19): siRNA sense strand
ccacuaucauccuccuucu

SEQ ID NO: 2064076 - RNA, 19 nt, Homo sapiens
  misc_RNA (1)...(19): siRNA sense strand
agaggcuuauuugacuuua

SEQ ID NO: 2064077 - RNA, 19 nt, Homo sapiens
  misc_RNA (1)...(19): siRNA sense strand
auucaacucggaaacuaua

SEQ ID NO: 2064078 - RNA, 19 nt, Homo sapiens
  misc_RNA (1)...(19): siRNA sense strand
agagaggcuuauuugacuu

SEQ ID NO: 2064079 - RNA, 19 nt, Homo sapiens
  misc_RNA (1)...(19): siRNA sense strand
acuuuaugcuagaagauga

SEQ ID NO: 2064080 - RNA, 19 nt, Homo sapiens
  misc_RNA (1)...(19): siRNA sense strand
acagagaggcuuauuugac

SEQ ID NO: 2064081 - RNA, 19 nt, Homo sapiens
  misc_RNA (1)...(19): siRNA sense strand
uacgugcgcucugccauuc

SEQ ID NO: 2064082 - RNA, 19 nt, Homo sapiens
  misc_RNA (1)...(19): siRNA sense strand
cuacgugcgcucugccauu

SEQ ID NO: 2064083 - RNA, 19 nt, Homo sapiens
  misc_RNA (1)...(19): siRNA sense strand
caacagagaggcuuauuug

SEQ ID NO: 2064084 - RNA, 19 nt, Homo sapiens
  misc_RNA (1)...(19): siRNA sense strand
gcccagaaguuccugauga

SEQ ID NO: 2064085 - RNA, 19 nt, Homo sapiens
  misc_RNA (1)...(19): siRNA sense strand
agaugaggcuucugggaua

SEQ ID NO: 2064086 - RNA, 19 nt, Homo sapiens
  misc_RNA (1)...(19): siRNA sense strand
cagagaggcuuauuugacu

SEQ ID NO: 2064087 - RNA, 19 nt, Homo sapiens
  misc_RNA (1)...(19): siRNA sense strand
gguccaguguucugauuug

SEQ ID NO: 2064088 - RNA, 19 nt, Homo sapiens
  misc_RNA (1)...(19): siRNA sense strand
gcuggaccguuucaacaga

SEQ ID NO: 2064089 - RNA, 19 nt, Homo sapiens
  misc_RNA (1)...(19): siRNA sense strand
gagaggcuuauuugacuuu

SEQ ID NO: 2064090 - RNA, 19 nt, Homo sapiens
  misc_RNA (1)...(19): siRNA sense strand
ucaacagagaggcuuauuu

SEQ ID NO: 2064091 - RNA, 19 nt, Homo sapiens
  misc_RNA (1)...(19): siRNA sense strand
aggcuuauuugacuuuaug

SEQ ID NO: 2064092 - RNA, 19 nt, Homo sapiens
  misc_RNA (1)...(19): siRNA sense strand
gggauaggcccagaaguuc

SEQ ID NO: 2064093 - RNA, 19 nt, Homo sapiens
  misc_RNA (1)...(19): siRNA sense strand
gaggcuuauuugacuuuau

SEQ ID NO: 2064094 - RNA, 19 nt, Homo sapiens
  misc_RNA (1)...(19): siRNA sense strand
gaugaggcuucugggauag

SEQ ID NO: 2064095 - RNA, 19 nt, Homo sapiens
  misc_RNA (1)...(19): siRNA sense strand
uuccugggcuggaccguuu

SEQ ID NO: 2064096 - RNA, 19 nt, Homo sapiens
  misc_RNA (1)...(19): siRNA sense strand
gggcuggaccguuucaaca

SEQ ID NO: 2064097 - RNA, 19 nt, Homo sapiens
  misc_RNA (1)...(19): siRNA sense strand
gugguccaguguucugauu

SEQ ID NO: 2064098 - RNA, 19 nt, Homo sapiens
  misc_RNA (1)...(19): siRNA sense strand
agaggcuuauuugacuuua

SEQ ID NO: 2064099 - RNA, 19 nt, Homo sapiens
  misc_RNA (1)...(19): siRNA sense strand
ccacuaucauccuccuucu

SEQ ID NO: 2064100 - RNA, 19 nt, Homo sapiens
  misc_RNA (1)...(19): siRNA sense strand
agagaggcuuauuugacuu

SEQ ID NO: 2064101 - RNA, 19 nt, Homo sapiens
  misc_RNA (1)...(19): siRNA sense strand
acagagaggcuuauuugac

SEQ ID NO: 2064102 - RNA, 19 nt, Homo sapiens
  misc_RNA (1)...(19): siRNA sense strand
acuuuaugcuagaagauga

SEQ ID NO: 2064103 - RNA, 19 nt, Homo sapiens
  misc_RNA (1)...(19): siRNA sense strand
caacagagaggcuuauuug

SEQ ID NO: 2064104 - RNA, 19 nt, Homo sapiens
  misc_RNA (1)...(19): siRNA sense strand
gcccagaaguuccugauga

SEQ ID NO: 2064105 - RNA, 19 nt, Homo sapiens
  misc_RNA (1)...(19): siRNA sense strand
caauaucucuguaguugga

SEQ ID NO: 2064106 - RNA, 19 nt, Homo sapiens
  misc_RNA (1)...(19): siRNA sense strand
agaugaggcuucugggaua

SEQ ID NO: 2064107 - RNA, 19 nt, Homo sapiens
  misc_RNA (1)...(19): siRNA sense strand
aacaauaucucuguaguug

SEQ ID NO: 2064108 - RNA, 19 nt, Homo sapiens
  misc_RNA (1)...(19): siRNA sense strand
cagagaggcuuauuugacu

SEQ ID NO: 2064109 - RNA, 19 nt, Homo sapiens
  misc_RNA (1)...(19): siRNA sense strand
gguccaguguucugauuug

SEQ ID NO: 2064110 - RNA, 19 nt, Homo sapiens
  misc_RNA (1)...(19): siRNA sense strand
ccauucaacucggaaacua

SEQ ID NO: 2064111 - RNA, 19 nt, Homo sapiens
  misc_RNA (1)...(19): siRNA sense strand
caacaauaucucuguaguu

SEQ ID NO: 2064112 - RNA, 19 nt, Homo sapiens
  misc_RNA (1)...(19): siRNA sense strand
guaguuggaucaagugacu

SEQ ID NO: 2064113 - RNA, 19 nt, Homo sapiens
  misc_RNA (1)...(19): siRNA sense strand
gcaacccgguccaguacug

SEQ ID NO: 2064114 - RNA, 19 nt, Homo sapiens
  misc_RNA (1)...(19): siRNA sense strand
gcuggaccguuucaacaga

SEQ ID NO: 2064115 - RNA, 19 nt, Homo sapiens
  misc_RNA (1)...(19): siRNA sense strand
gagaggcuuauuugacuuu

SEQ ID NO: 2064116 - RNA, 19 nt, Homo sapiens
  misc_RNA (1)...(19): siRNA sense strand
acucggaaacuauaaguaa

SEQ ID NO: 2064117 - RNA, 19 nt, Homo sapiens
  misc_RNA (1)...(19): siRNA sense strand
ucagcaacccgguccagua

SEQ ID NO: 2064118 - RNA, 19 nt, Homo sapiens
  misc_RNA (1)...(19): siRNA sense strand
ucaacagagaggcuuauuu

SEQ ID NO: 2064119 - RNA, 19 nt, Homo sapiens
  misc_RNA (1)...(19): siRNA sense strand
acaacaauaucucuguagu

SEQ ID NO: 2064120 - RNA, 19 nt, Homo sapiens
  misc_RNA (1)...(19): siRNA sense strand
aggcuuauuugacuuuaug

SEQ ID NO: 2064121 - RNA, 19 nt, Homo sapiens
  misc_RNA (1)...(19): siRNA sense strand
gggauaggcccagaaguuc

SEQ ID NO: 2064122 - RNA, 19 nt, Homo sapiens
  misc_RNA (1)...(19): siRNA sense strand
gaggcuuauuugacuuuau

SEQ ID NO: 2064123 - RNA, 19 nt, Homo sapiens
  misc_RNA (1)...(19): siRNA sense strand
gaugaggcuucugggauag

SEQ ID NO: 2064124 - RNA, 19 nt, Homo sapiens
  misc_RNA (1)...(19): siRNA sense strand
auacagccauccaccuuca

SEQ ID NO: 2064125 - RNA, 19 nt, Homo sapiens
  misc_RNA (1)...(19): siRNA sense strand
gggcuggaccguuucaaca

SEQ ID NO: 2064126 - RNA, 19 nt, Homo sapiens
  misc_RNA (1)...(19): siRNA sense strand
uuccugggcuggaccguuu

SEQ ID NO: 2064127 - RNA, 19 nt, Homo sapiens
  misc_RNA (1)...(19): siRNA sense strand
gugguccaguguucugauu

SEQ ID NO: 2064128 - RNA, 19 nt, Homo sapiens
  misc_RNA (1)...(19): siRNA sense strand
caacucggaaacuauaagu

SEQ ID NO: 2064129 - RNA, 19 nt, Homo sapiens
  misc_RNA (1)...(19): siRNA sense strand
ccacuaucauccuccuucu

SEQ ID NO: 2064130 - RNA, 19 nt, Homo sapiens
  misc_RNA (1)...(19): siRNA sense strand
agaggcuuauuugacuuua

SEQ ID NO: 2064131 - RNA, 19 nt, Homo sapiens
  misc_RNA (1)...(19): siRNA sense strand
auucaacucggaaacuaua

SEQ ID NO: 2064132 - RNA, 19 nt, Homo sapiens
  misc_RNA (1)...(19): siRNA sense strand
agagaggcuuauuugacuu

SEQ ID NO: 2064133 - RNA, 19 nt, Homo sapiens
  misc_RNA (1)...(19): siRNA sense strand
acuuuaugcuagaagauga

SEQ ID NO: 2064134 - RNA, 19 nt, Homo sapiens
  misc_RNA (1)...(19): siRNA sense strand
acagagaggcuuauuugac

SEQ ID NO: 2064135 - RNA, 19 nt, Homo sapiens
  misc_RNA (1)...(19): siRNA sense strand
uacgugcgcucugccauuc

SEQ ID NO: 2064136 - RNA, 19 nt, Homo sapiens
  misc_RNA (1)...(19): siRNA sense strand
cuacgugcgcucugccauu

SEQ ID NO: 2064137 - RNA, 19 nt, Homo sapiens
  misc_RNA (1)...(19): siRNA sense strand
caacagagaggcuuauuug

SEQ ID NO: 2064138 - RNA, 19 nt, Homo sapiens
  misc_RNA (1)...(19): siRNA sense strand
gcccagaaguuccugauga

SEQ ID NO: 2064139 - RNA, 19 nt, Homo sapiens
  misc_RNA (1)...(19): siRNA sense strand
caauaucucuguaguugga

SEQ ID NO: 2064140 - RNA, 19 nt, Homo sapiens
  misc_RNA (1)...(19): siRNA sense strand
agaugaggcuucugggaua

SEQ ID NO: 2064141 - RNA, 19 nt, Homo sapiens
  misc_RNA (1)...(19): siRNA sense strand
aacaauaucucuguaguug

SEQ ID NO: 2064142 - RNA, 19 nt, Homo sapiens
  misc_RNA (1)...(19): siRNA sense strand
cagagaggcuuauuugacu

SEQ ID NO: 2064143 - RNA, 19 nt, Homo sapiens
  misc_RNA (1)...(19): siRNA sense strand
gguccaguguucugauuug

SEQ ID NO: 2064144 - RNA, 19 nt, Homo sapiens
  misc_RNA (1)...(19): siRNA sense strand
ccauucaacucggaaacua

SEQ ID NO: 2064145 - RNA, 19 nt, Homo sapiens
  misc_RNA (1)...(19): siRNA sense strand
caacaauaucucuguaguu

SEQ ID NO: 2064146 - RNA, 19 nt, Homo sapiens
  misc_RNA (1)...(19): siRNA sense strand
guaguuggaucaagugacu

SEQ ID NO: 2064147 - RNA, 19 nt, Homo sapiens
  misc_RNA (1)...(19): siRNA sense strand
gcaacccgguccaguacug

SEQ ID NO: 2064148 - RNA, 19 nt, Homo sapiens
  misc_RNA (1)...(19): siRNA sense strand
gcuggaccguuucaacaga

SEQ ID NO: 2064149 - RNA, 19 nt, Homo sapiens
  misc_RNA (1)...(19): siRNA sense strand
gagaggcuuauuugacuuu

SEQ ID NO: 2064150 - RNA, 19 nt, Homo sapiens
  misc_RNA (1)...(19): siRNA sense strand
acucggaaacuauaaguaa

SEQ ID NO: 2064151 - RNA, 19 nt, Homo sapiens
  misc_RNA (1)...(19): siRNA sense strand
ucagcaacccgguccagua

SEQ ID NO: 2064152 - RNA, 19 nt, Homo sapiens
  misc_RNA (1)...(19): siRNA sense strand
ucaacagagaggcuuauuu

SEQ ID NO: 2064153 - RNA, 19 nt, Homo sapiens
  misc_RNA (1)...(19): siRNA sense strand
acaacaauaucucuguagu

SEQ ID NO: 2064154 - RNA, 19 nt, Homo sapiens
  misc_RNA (1)...(19): siRNA sense strand
aggcuuauuugacuuuaug

SEQ ID NO: 2064155 - RNA, 19 nt, Homo sapiens
  misc_RNA (1)...(19): siRNA sense strand
gggauaggcccagaaguuc

SEQ ID NO: 2064156 - RNA, 19 nt, Homo sapiens
  misc_RNA (1)...(19): siRNA sense strand
gaggcuuauuugacuuuau

SEQ ID NO: 2064157 - RNA, 19 nt, Homo sapiens
  misc_RNA (1)...(19): siRNA sense strand
gaugaggcuucugggauag

SEQ ID NO: 2064158 - RNA, 19 nt, Homo sapiens
  misc_RNA (1)...(19): siRNA sense strand
auacagccauccaccuuca

SEQ ID NO: 2064159 - RNA, 19 nt, Homo sapiens
  misc_RNA (1)...(19): siRNA sense strand
gggcuggaccguuucaaca

SEQ ID NO: 2064160 - RNA, 19 nt, Homo sapiens
  misc_RNA (1)...(19): siRNA sense strand
uuccugggcuggaccguuu

SEQ ID NO: 2064161 - RNA, 19 nt, Homo sapiens
  misc_RNA (1)...(19): siRNA sense strand
gugguccaguguucugauu

SEQ ID NO: 2064162 - RNA, 19 nt, Homo sapiens
  misc_RNA (1)...(19): siRNA sense strand
caacucggaaacuauaagu

SEQ ID NO: 2064163 - RNA, 19 nt, Homo sapiens
  misc_RNA (1)...(19): siRNA sense strand
ccacuaucauccuccuucu

SEQ ID NO: 2064164 - RNA, 19 nt, Homo sapiens
  misc_RNA (1)...(19): siRNA sense strand
agaggcuuauuugacuuua

SEQ ID NO: 2064165 - RNA, 19 nt, Homo sapiens
  misc_RNA (1)...(19): siRNA sense strand
auucaacucggaaacuaua

SEQ ID NO: 2064166 - RNA, 19 nt, Homo sapiens
  misc_RNA (1)...(19): siRNA sense strand
agagaggcuuauuugacuu

SEQ ID NO: 2064167 - RNA, 19 nt, Homo sapiens
  misc_RNA (1)...(19): siRNA sense strand
acuuuaugcuagaagauga

SEQ ID NO: 2064168 - RNA, 19 nt, Homo sapiens
  misc_RNA (1)...(19): siRNA sense strand
acagagaggcuuauuugac

SEQ ID NO: 2064169 - RNA, 19 nt, Homo sapiens
  misc_RNA (1)...(19): siRNA sense strand
uacgugcgcucugccauuc

SEQ ID NO: 2064170 - RNA, 19 nt, Homo sapiens
  misc_RNA (1)...(19): siRNA sense strand
cuacgugcgcucugccauu

SEQ ID NO: 2064171 - RNA, 19 nt, Homo sapiens
  misc_RNA (1)...(19): siRNA sense strand
caacagagaggcuuauuug

SEQ ID NO: 2064172 - RNA, 19 nt, Homo sapiens
  misc_RNA (1)...(19): siRNA sense strand
gcccagaaguuccugauga

SEQ ID NO: 2064173 - RNA, 19 nt, Homo sapiens
  misc_RNA (1)...(19): siRNA sense strand
caauaucucuguaguugga

SEQ ID NO: 2064174 - RNA, 19 nt, Homo sapiens
  misc_RNA (1)...(19): siRNA sense strand
agaugaggcuucugggaua

SEQ ID NO: 2064175 - RNA, 19 nt, Homo sapiens
  misc_RNA (1)...(19): siRNA sense strand
aacaauaucucuguaguug

SEQ ID NO: 2064176 - RNA, 19 nt, Homo sapiens
  misc_RNA (1)...(19): siRNA sense strand
cagagaggcuuauuugacu

SEQ ID NO: 2064177 - RNA, 19 nt, Homo sapiens
  misc_RNA (1)...(19): siRNA sense strand
gguccaguguucugauuug

SEQ ID NO: 2064178 - RNA, 19 nt, Homo sapiens
  misc_RNA (1)...(19): siRNA sense strand
ccauucaacucggaaacua

SEQ ID NO: 2064179 - RNA, 19 nt, Homo sapiens
  misc_RNA (1)...(19): siRNA sense strand
caacaauaucucuguaguu

SEQ ID NO: 2064180 - RNA, 19 nt, Homo sapiens
  misc_RNA (1)...(19): siRNA sense strand
guaguuggaucaagugacu

SEQ ID NO: 2064181 - RNA, 19 nt, Homo sapiens
  misc_RNA (1)...(19): siRNA sense strand
gcaacccgguccaguacug

SEQ ID NO: 2064182 - RNA, 19 nt, Homo sapiens
  misc_RNA (1)...(19): siRNA sense strand
gcuggaccguuucaacaga

SEQ ID NO: 2064183 - RNA, 19 nt, Homo sapiens
  misc_RNA (1)...(19): siRNA sense strand
gagaggcuuauuugacuuu

SEQ ID NO: 2064184 - RNA, 19 nt, Homo sapiens
  misc_RNA (1)...(19): siRNA sense strand
acucggaaacuauaaguaa

SEQ ID NO: 2064185 - RNA, 19 nt, Homo sapiens
  misc_RNA (1)...(19): siRNA sense strand
ucagcaacccgguccagua

SEQ ID NO: 2064186 - RNA, 19 nt, Homo sapiens
  misc_RNA (1)...(19): siRNA sense strand
ucaacagagaggcuuauuu

SEQ ID NO: 2064187 - RNA, 19 nt, Homo sapiens
  misc_RNA (1)...(19): siRNA sense strand
acaacaauaucucuguagu

SEQ ID NO: 2064188 - RNA, 19 nt, Homo sapiens
  misc_RNA (1)...(19): siRNA sense strand
aggcuuauuugacuuuaug

SEQ ID NO: 2064189 - RNA, 19 nt, Homo sapiens
  misc_RNA (1)...(19): siRNA sense strand
gggauaggcccagaaguuc

SEQ ID NO: 2064190 - RNA, 19 nt, Homo sapiens
  misc_RNA (1)...(19): siRNA sense strand
gaggcuuauuugacuuuau

SEQ ID NO: 2064191 - RNA, 19 nt, Homo sapiens
  misc_RNA (1)...(19): siRNA sense strand
gaugaggcuucugggauag

SEQ ID NO: 2064192 - RNA, 19 nt, Homo sapiens
  misc_RNA (1)...(19): siRNA sense strand
auacagccauccaccuuca

SEQ ID NO: 2064193 - RNA, 19 nt, Homo sapiens
  misc_RNA (1)...(19): siRNA sense strand
gggcuggaccguuucaaca

SEQ ID NO: 2064194 - RNA, 19 nt, Homo sapiens
  misc_RNA (1)...(19): siRNA sense strand
uuccugggcuggaccguuu

SEQ ID NO: 2064195 - RNA, 19 nt, Homo sapiens
  misc_RNA (1)...(19): siRNA sense strand
gugguccaguguucugauu

SEQ ID NO: 2064196 - RNA, 19 nt, Homo sapiens
  misc_RNA (1)...(19): siRNA sense strand
caacucggaaacuauaagu

SEQ ID NO: 2064197 - RNA, 19 nt, Homo sapiens
  misc_RNA (1)...(19): siRNA sense strand
ccacuaucauccuccuucu

SEQ ID NO: 2064198 - RNA, 19 nt, Homo sapiens
  misc_RNA (1)...(19): siRNA sense strand
agaggcuuauuugacuuua

SEQ ID NO: 2064199 - RNA, 19 nt, Homo sapiens
  misc_RNA (1)...(19): siRNA sense strand
auucaacucggaaacuaua

SEQ ID NO: 2064200 - RNA, 19 nt, Homo sapiens
  misc_RNA (1)...(19): siRNA sense strand
agagaggcuuauuugacuu

SEQ ID NO: 2064201 - RNA, 19 nt, Homo sapiens
  misc_RNA (1)...(19): siRNA sense strand
acuuuaugcuagaagauga

SEQ ID NO: 2064202 - RNA, 19 nt, Homo sapiens
  misc_RNA (1)...(19): siRNA sense strand
acagagaggcuuauuugac

SEQ ID NO: 2064203 - RNA, 19 nt, Homo sapiens
  misc_RNA (1)...(19): siRNA sense strand
uacgugcgcucugccauuc

SEQ ID NO: 2064204 - RNA, 19 nt, Homo sapiens
  misc_RNA (1)...(19): siRNA sense strand
cuacgugcgcucugccauu

SEQ ID NO: 2064205 - RNA, 19 nt, Homo sapiens
  misc_RNA (1)...(19): siRNA sense strand
caacagagaggcuuauuug

SEQ ID NO: 2064206 - RNA, 19 nt, Homo sapiens
  misc_RNA (1)...(19): siRNA sense strand
gcccagaaguuccugauga

SEQ ID NO: 2064207 - RNA, 19 nt, Homo sapiens
  misc_RNA (1)...(19): siRNA sense strand
caauaucucuguaguugga

SEQ ID NO: 2064208 - RNA, 19 nt, Homo sapiens
  misc_RNA (1)...(19): siRNA sense strand
agaugaggcuucugggaua

SEQ ID NO: 2064209 - RNA, 19 nt, Homo sapiens
  misc_RNA (1)...(19): siRNA sense strand
aacaauaucucuguaguug

SEQ ID NO: 2064210 - RNA, 19 nt, Homo sapiens
  misc_RNA (1)...(19): siRNA sense strand
cagagaggcuuauuugacu

SEQ ID NO: 2064211 - RNA, 19 nt, Homo sapiens
  misc_RNA (1)...(19): siRNA sense strand
gguccaguguucugauuug

SEQ ID NO: 2064212 - RNA, 19 nt, Homo sapiens
  misc_RNA (1)...(19): siRNA sense strand
ccauucaacucggaaacua

SEQ ID NO: 2064213 - RNA, 19 nt, Homo sapiens
  misc_RNA (1)...(19): siRNA sense strand
caacaauaucucuguaguu

SEQ ID NO: 2064214 - RNA, 19 nt, Homo sapiens
  misc_RNA (1)...(19): siRNA sense strand
guaguuggaucaagugacu

SEQ ID NO: 2064215 - RNA, 19 nt, Homo sapiens
  misc_RNA (1)...(19): siRNA sense strand
gcaacccgguccaguacug

SEQ ID NO: 2064216 - RNA, 19 nt, Homo sapiens
  misc_RNA (1)...(19): siRNA sense strand
gcuggaccguuucaacaga

SEQ ID NO: 2064217 - RNA, 19 nt, Homo sapiens
  misc_RNA (1)...(19): siRNA sense strand
gagaggcuuauuugacuuu

SEQ ID NO: 2064218 - RNA, 19 nt, Homo sapiens
  misc_RNA (1)...(19): siRNA sense strand
acucggaaacuauaaguaa

SEQ ID NO: 2064219 - RNA, 19 nt, Homo sapiens
  misc_RNA (1)...(19): siRNA sense strand
ucagcaacccgguccagua

SEQ ID NO: 2064220 - RNA, 19 nt, Homo sapiens
  misc_RNA (1)...(19): siRNA sense strand
ucaacagagaggcuuauuu

SEQ ID NO: 2064221 - RNA, 19 nt, Homo sapiens
  misc_RNA (1)...(19): siRNA sense strand
acaacaauaucucuguagu

SEQ ID NO: 2064222 - RNA, 19 nt, Homo sapiens
  misc_RNA (1)...(19): siRNA sense strand
aggcuuauuugacuuuaug

SEQ ID NO: 2064223 - RNA, 19 nt, Homo sapiens
  misc_RNA (1)...(19): siRNA sense strand
gggauaggcccagaaguuc

SEQ ID NO: 2064224 - RNA, 19 nt, Homo sapiens
  misc_RNA (1)...(19): siRNA sense strand
gaggcuuauuugacuuuau

SEQ ID NO: 2064225 - RNA, 19 nt, Homo sapiens
  misc_RNA (1)...(19): siRNA sense strand
gaugaggcuucugggauag

SEQ ID NO: 2064226 - RNA, 19 nt, Homo sapiens
  misc_RNA (1)...(19): siRNA sense strand
auacagccauccaccuuca

SEQ ID NO: 2064227 - RNA, 19 nt, Homo sapiens
  misc_RNA (1)...(19): siRNA sense strand
gggcuggaccguuucaaca

SEQ ID NO: 2064228 - RNA, 19 nt, Homo sapiens
  misc_RNA (1)...(19): siRNA sense strand
uuccugggcuggaccguuu

SEQ ID NO: 2064229 - RNA, 19 nt, Homo sapiens
  misc_RNA (1)...(19): siRNA sense strand
gugguccaguguucugauu

SEQ ID NO: 2064230 - RNA, 19 nt, Homo sapiens
  misc_RNA (1)...(19): siRNA sense strand
caacucggaaacuauaagu

SEQ ID NO: 2064231 - RNA, 19 nt, Homo sapiens
  misc_RNA (1)...(19): siRNA sense strand
ccacuaucauccuccuucu

SEQ ID NO: 2064232 - RNA, 19 nt, Homo sapiens
  misc_RNA (1)...(19): siRNA sense strand
agaggcuuauuugacuuua

SEQ ID NO: 2064233 - RNA, 19 nt, Homo sapiens
  misc_RNA (1)...(19): siRNA sense strand
auucaacucggaaacuaua

SEQ ID NO: 2064234 - RNA, 19 nt, Homo sapiens
  misc_RNA (1)...(19): siRNA sense strand
agagaggcuuauuugacuu

SEQ ID NO: 2064235 - RNA, 19 nt, Homo sapiens
  misc_RNA (1)...(19): siRNA sense strand
acuuuaugcuagaagauga

SEQ ID NO: 2064236 - RNA, 19 nt, Homo sapiens
  misc_RNA (1)...(19): siRNA sense strand
acagagaggcuuauuugac

SEQ ID NO: 2064237 - RNA, 19 nt, Homo sapiens
  misc_RNA (1)...(19): siRNA sense strand
uacgugcgcucugccauuc

SEQ ID NO: 2064238 - RNA, 19 nt, Homo sapiens
  misc_RNA (1)...(19): siRNA sense strand
cuacgugcgcucugccauu

SEQ ID NO: 2064239 - RNA, 19 nt, Homo sapiens
  misc_RNA (1)...(19): siRNA sense strand
caacagagaggcuuauuug

SEQ ID NO: 2064240 - RNA, 19 nt, Homo sapiens
  misc_RNA (1)...(19): siRNA sense strand
gcccagaaguuccugauga

SEQ ID NO: 2064241 - RNA, 19 nt, Homo sapiens
  misc_RNA (1)...(19): siRNA sense strand
caauaucucuguaguugga

SEQ ID NO: 2064242 - RNA, 19 nt, Homo sapiens
  misc_RNA (1)...(19): siRNA sense strand
agaugaggcuucugggaua

SEQ ID NO: 2064243 - RNA, 19 nt, Homo sapiens
  misc_RNA (1)...(19): siRNA sense strand
aacaauaucucuguaguug

SEQ ID NO: 2064244 - RNA, 19 nt, Homo sapiens
  misc_RNA (1)...(19): siRNA sense strand
cagagaggcuuauuugacu

SEQ ID NO: 2064245 - RNA, 19 nt, Homo sapiens
  misc_RNA (1)...(19): siRNA sense strand
gguccaguguucugauuug

SEQ ID NO: 2064246 - RNA, 19 nt, Homo sapiens
  misc_RNA (1)...(19): siRNA sense strand
ccauucaacucggaaacua

SEQ ID NO: 2064247 - RNA, 19 nt, Homo sapiens
  misc_RNA (1)...(19): siRNA sense strand
caacaauaucucuguaguu

SEQ ID NO: 2064248 - RNA, 19 nt, Homo sapiens
  misc_RNA (1)...(19): siRNA sense strand
guaguuggaucaagugacu

SEQ ID NO: 2064249 - RNA, 19 nt, Homo sapiens
  misc_RNA (1)...(19): siRNA sense strand
gcaacccgguccaguacug

SEQ ID NO: 2064250 - RNA, 19 nt, Homo sapiens
  misc_RNA (1)...(19): siRNA sense strand
gcuggaccguuucaacaga

SEQ ID NO: 2064251 - RNA, 19 nt, Homo sapiens
  misc_RNA (1)...(19): siRNA sense strand
gagaggcuuauuugacuuu

SEQ ID NO: 2064252 - RNA, 19 nt, Homo sapiens
  misc_RNA (1)...(19): siRNA sense strand
acucggaaacuauaaguaa

SEQ ID NO: 2064253 - RNA, 19 nt, Homo sapiens
  misc_RNA (1)...(19): siRNA sense strand
ucagcaacccgguccagua

SEQ ID NO: 2064254 - RNA, 19 nt, Homo sapiens
  misc_RNA (1)...(19): siRNA sense strand
ucaacagagaggcuuauuu

SEQ ID NO: 2064255 - RNA, 19 nt, Homo sapiens
  misc_RNA (1)...(19): siRNA sense strand
acaacaauaucucuguagu

SEQ ID NO: 2064256 - RNA, 19 nt, Homo sapiens
  misc_RNA (1)...(19): siRNA sense strand
aggcuuauuugacuuuaug

SEQ ID NO: 2064257 - RNA, 19 nt, Homo sapiens
  misc_RNA (1)...(19): siRNA sense strand
gggauaggcccagaaguuc

SEQ ID NO: 2064258 - RNA, 19 nt, Homo sapiens
  misc_RNA (1)...(19): siRNA sense strand
gaggcuuauuugacuuuau

SEQ ID NO: 2064259 - RNA, 19 nt, Homo sapiens
  misc_RNA (1)...(19): siRNA sense strand
gaugaggcuucugggauag

SEQ ID NO: 2064260 - RNA, 19 nt, Homo sapiens
  misc_RNA (1)...(19): siRNA sense strand
auacagccauccaccuuca

SEQ ID NO: 2064261 - RNA, 19 nt, Homo sapiens
  misc_RNA (1)...(19): siRNA sense strand
gggcuggaccguuucaaca

SEQ ID NO: 2064262 - RNA, 19 nt, Homo sapiens
  misc_RNA (1)...(19): siRNA sense strand
uuccugggcuggaccguuu

SEQ ID NO: 2064263 - RNA, 19 nt, Homo sapiens
  misc_RNA (1)...(19): siRNA sense strand
gugguccaguguucugauu

SEQ ID NO: 2064264 - RNA, 19 nt, Homo sapiens
  misc_RNA (1)...(19): siRNA sense strand
caacucggaaacuauaagu

SEQ ID NO: 2064265 - RNA, 19 nt, Homo sapiens
  misc_RNA (1)...(19): siRNA sense strand
ccacuaucauccuccuucu

SEQ ID NO: 2064266 - RNA, 19 nt, Homo sapiens
  misc_RNA (1)...(19): siRNA sense strand
agaggcuuauuugacuuua

SEQ ID NO: 2064267 - RNA, 19 nt, Homo sapiens
  misc_RNA (1)...(19): siRNA sense strand
auucaacucggaaacuaua

SEQ ID NO: 2064268 - RNA, 19 nt, Homo sapiens
  misc_RNA (1)...(19): siRNA sense strand
agagaggcuuauuugacuu

SEQ ID NO: 2064269 - RNA, 19 nt, Homo sapiens
  misc_RNA (1)...(19): siRNA sense strand
acuuuaugcuagaagauga

SEQ ID NO: 2064270 - RNA, 19 nt, Homo sapiens
  misc_RNA (1)...(19): siRNA sense strand
acagagaggcuuauuugac

SEQ ID NO: 2064271 - RNA, 19 nt, Homo sapiens
  misc_RNA (1)...(19): siRNA sense strand
uacgugcgcucugccauuc

SEQ ID NO: 2064272 - RNA, 19 nt, Homo sapiens
  misc_RNA (1)...(19): siRNA sense strand
cuacgugcgcucugccauu

SEQ ID NO: 2064273 - RNA, 19 nt, Homo sapiens
  misc_RNA (1)...(19): siRNA sense strand
caacagagaggcuuauuug

SEQ ID NO: 2064274 - RNA, 19 nt, Homo sapiens
  misc_RNA (1)...(19): siRNA sense strand
gcccagaaguuccugauga

SEQ ID NO: 2064275 - RNA, 19 nt, Homo sapiens
  misc_RNA (1)...(19): siRNA sense strand
agaugaggcuucugggaua

SEQ ID NO: 2064276 - RNA, 19 nt, Homo sapiens
  misc_RNA (1)...(19): siRNA sense strand
cagagaggcuuauuugacu

SEQ ID NO: 2064277 - RNA, 19 nt, Homo sapiens
  misc_RNA (1)...(19): siRNA sense strand
gguccaguguucugauuug

SEQ ID NO: 2064278 - RNA, 19 nt, Homo sapiens
  misc_RNA (1)...(19): siRNA sense strand
gcuggaccguuucaacaga

SEQ ID NO: 2064279 - RNA, 19 nt, Homo sapiens
  misc_RNA (1)...(19): siRNA sense strand
gagaggcuuauuugacuuu

SEQ ID NO: 2064280 - RNA, 19 nt, Homo sapiens
  misc_RNA (1)...(19): siRNA sense strand
ucaacagagaggcuuauuu

SEQ ID NO: 2064281 - RNA, 19 nt, Homo sapiens
  misc_RNA (1)...(19): siRNA sense strand
aggcuuauuugacuuuaug

SEQ ID NO: 2064282 - RNA, 19 nt, Homo sapiens
  misc_RNA (1)...(19): siRNA sense strand
gggauaggcccagaaguuc

SEQ ID NO: 2064283 - RNA, 19 nt, Homo sapiens
  misc_RNA (1)...(19): siRNA sense strand
gaggcuuauuugacuuuau

SEQ ID NO: 2064284 - RNA, 19 nt, Homo sapiens
  misc_RNA (1)...(19): siRNA sense strand
gaugaggcuucugggauag

SEQ ID NO: 2064285 - RNA, 19 nt, Homo sapiens
  misc_RNA (1)...(19): siRNA sense strand
uuccugggcuggaccguuu

SEQ ID NO: 2064286 - RNA, 19 nt, Homo sapiens
  misc_RNA (1)...(19): siRNA sense strand
gggcuggaccguuucaaca

SEQ ID NO: 2064287 - RNA, 19 nt, Homo sapiens
  misc_RNA (1)...(19): siRNA sense strand
gugguccaguguucugauu

SEQ ID NO: 2064288 - RNA, 19 nt, Homo sapiens
  misc_RNA (1)...(19): siRNA sense strand
agaggcuuauuugacuuua

SEQ ID NO: 2064289 - RNA, 19 nt, Homo sapiens
  misc_RNA (1)...(19): siRNA sense strand
ccacuaucauccuccuucu

SEQ ID NO: 2064290 - RNA, 19 nt, Homo sapiens
  misc_RNA (1)...(19): siRNA sense strand
agagaggcuuauuugacuu

SEQ ID NO: 2064291 - RNA, 19 nt, Homo sapiens
  misc_RNA (1)...(19): siRNA sense strand
acagagaggcuuauuugac

SEQ ID NO: 2064292 - RNA, 19 nt, Homo sapiens
  misc_RNA (1)...(19): siRNA sense strand
acuuuaugcuagaagauga

SEQ ID NO: 2064293 - RNA, 19 nt, Homo sapiens
  misc_RNA (1)...(19): siRNA sense strand
caacagagaggcuuauuug

SEQ ID NO: 2064294 - RNA, 19 nt, Homo sapiens
  misc_RNA (1)...(19): siRNA sense strand
gcccagaaguuccugauga

SEQ ID NO: 2064295 - RNA, 19 nt, Homo sapiens
  misc_RNA (1)...(19): siRNA sense strand
caauaucucuguaguugga

SEQ ID NO: 2064296 - RNA, 19 nt, Homo sapiens
  misc_RNA (1)...(19): siRNA sense strand
agaugaggcuucugggaua

SEQ ID NO: 2064297 - RNA, 19 nt, Homo sapiens
  misc_RNA (1)...(19): siRNA sense strand
aacaauaucucuguaguug

SEQ ID NO: 2064298 - RNA, 19 nt, Homo sapiens
  misc_RNA (1)...(19): siRNA sense strand
cagagaggcuuauuugacu

SEQ ID NO: 2064299 - RNA, 19 nt, Homo sapiens
  misc_RNA (1)...(19): siRNA sense strand
gguccaguguucugauuug

SEQ ID NO: 2064300 - RNA, 19 nt, Homo sapiens
  misc_RNA (1)...(19): siRNA sense strand
ccauucaacucggaaacua

SEQ ID NO: 2064301 - RNA, 19 nt, Homo sapiens
  misc_RNA (1)...(19): siRNA sense strand
caacaauaucucuguaguu

SEQ ID NO: 2064302 - RNA, 19 nt, Homo sapiens
  misc_RNA (1)...(19): siRNA sense strand
guaguuggaucaagugacu

SEQ ID NO: 2064303 - RNA, 19 nt, Homo sapiens
  misc_RNA (1)...(19): siRNA sense strand
gcaacccgguccaguacug

SEQ ID NO: 2064304 - RNA, 19 nt, Homo sapiens
  misc_RNA (1)...(19): siRNA sense strand
gcuggaccguuucaacaga

SEQ ID NO: 2064305 - RNA, 19 nt, Homo sapiens
  misc_RNA (1)...(19): siRNA sense strand
gagaggcuuauuugacuuu

SEQ ID NO: 2064306 - RNA, 19 nt, Homo sapiens
  misc_RNA (1)...(19): siRNA sense strand
acucggaaacuauaaguaa

SEQ ID NO: 2064307 - RNA, 19 nt, Homo sapiens
  misc_RNA (1)...(19): siRNA sense strand
ucagcaacccgguccagua

SEQ ID NO: 2064308 - RNA, 19 nt, Homo sapiens
  misc_RNA (1)...(19): siRNA sense strand
ucaacagagaggcuuauuu

SEQ ID NO: 2064309 - RNA, 19 nt, Homo sapiens
  misc_RNA (1)...(19): siRNA sense strand
acaacaauaucucuguagu

SEQ ID NO: 2064310 - RNA, 19 nt, Homo sapiens
  misc_RNA (1)...(19): siRNA sense strand
aggcuuauuugacuuuaug

SEQ ID NO: 2064311 - RNA, 19 nt, Homo sapiens
  misc_RNA (1)...(19): siRNA sense strand
gggauaggcccagaaguuc

SEQ ID NO: 2064312 - RNA, 19 nt, Homo sapiens
  misc_RNA (1)...(19): siRNA sense strand
gaggcuuauuugacuuuau

SEQ ID NO: 2064313 - RNA, 19 nt, Homo sapiens
  misc_RNA (1)...(19): siRNA sense strand
gaugaggcuucugggauag

SEQ ID NO: 2064314 - RNA, 19 nt, Homo sapiens
  misc_RNA (1)...(19): siRNA sense strand
auacagccauccaccuuca

SEQ ID NO: 2064315 - RNA, 19 nt, Homo sapiens
  misc_RNA (1)...(19): siRNA sense strand
gggcuggaccguuucaaca

SEQ ID NO: 2064316 - RNA, 19 nt, Homo sapiens
  misc_RNA (1)...(19): siRNA sense strand
uuccugggcuggaccguuu

SEQ ID NO: 2064317 - RNA, 19 nt, Homo sapiens
  misc_RNA (1)...(19): siRNA sense strand
gugguccaguguucugauu

SEQ ID NO: 2064318 - RNA, 19 nt, Homo sapiens
  misc_RNA (1)...(19): siRNA sense strand
caacucggaaacuauaagu

SEQ ID NO: 2064319 - RNA, 19 nt, Homo sapiens
  misc_RNA (1)...(19): siRNA sense strand
ccacuaucauccuccuucu

SEQ ID NO: 2064320 - RNA, 19 nt, Homo sapiens
  misc_RNA (1)...(19): siRNA sense strand
agaggcuuauuugacuuua

SEQ ID NO: 2064321 - RNA, 19 nt, Homo sapiens
  misc_RNA (1)...(19): siRNA sense strand
auucaacucggaaacuaua

SEQ ID NO: 2064322 - RNA, 19 nt, Homo sapiens
  misc_RNA (1)...(19): siRNA sense strand
agagaggcuuauuugacuu

SEQ ID NO: 2064323 - RNA, 19 nt, Homo sapiens
  misc_RNA (1)...(19): siRNA sense strand
acuuuaugcuagaagauga

SEQ ID NO: 2064324 - RNA, 19 nt, Homo sapiens
  misc_RNA (1)...(19): siRNA sense strand
acagagaggcuuauuugac

SEQ ID NO: 2064325 - RNA, 19 nt, Homo sapiens
  misc_RNA (1)...(19): siRNA sense strand
uacgugcgcucugccauuc

SEQ ID NO: 2064326 - RNA, 19 nt, Homo sapiens
  misc_RNA (1)...(19): siRNA sense strand
cuacgugcgcucugccauu

SEQ ID NO: 2064327 - RNA, 19 nt, Homo sapiens
  misc_RNA (1)...(19): siRNA sense strand
caacagagaggcuuauuug

SEQ ID NO: 2064328 - RNA, 19 nt, Homo sapiens
  misc_RNA (1)...(19): siRNA sense strand
gcccagaaguuccugauga

SEQ ID NO: 2064329 - RNA, 19 nt, Homo sapiens
  misc_RNA (1)...(19): siRNA sense strand
caauaucucuguaguugga

SEQ ID NO: 2064330 - RNA, 19 nt, Homo sapiens
  misc_RNA (1)...(19): siRNA sense strand
agaugaggcuucugggaua

SEQ ID NO: 2064331 - RNA, 19 nt, Homo sapiens
  misc_RNA (1)...(19): siRNA sense strand
aacaauaucucuguaguug

SEQ ID NO: 2064332 - RNA, 19 nt, Homo sapiens
  misc_RNA (1)...(19): siRNA sense strand
cagagaggcuuauuugacu

SEQ ID NO: 2064333 - RNA, 19 nt, Homo sapiens
  misc_RNA (1)...(19): siRNA sense strand
gguccaguguucugauuug

SEQ ID NO: 2064334 - RNA, 19 nt, Homo sapiens
  misc_RNA (1)...(19): siRNA sense strand
ccauucaacucggaaacua

SEQ ID NO: 2064335 - RNA, 19 nt, Homo sapiens
  misc_RNA (1)...(19): siRNA sense strand
caacaauaucucuguaguu

SEQ ID NO: 2064336 - RNA, 19 nt, Homo sapiens
  misc_RNA (1)...(19): siRNA sense strand
guaguuggaucaagugacu

SEQ ID NO: 2064337 - RNA, 19 nt, Homo sapiens
  misc_RNA (1)...(19): siRNA sense strand
gcaacccgguccaguacug

SEQ ID NO: 2064338 - RNA, 19 nt, Homo sapiens
  misc_RNA (1)...(19): siRNA sense strand
gcuggaccguuucaacaga

SEQ ID NO: 2064339 - RNA, 19 nt, Homo sapiens
  misc_RNA (1)...(19): siRNA sense strand
gagaggcuuauuugacuuu

SEQ ID NO: 2064340 - RNA, 19 nt, Homo sapiens
  misc_RNA (1)...(19): siRNA sense strand
acucggaaacuauaaguaa

SEQ ID NO: 2064341 - RNA, 19 nt, Homo sapiens
  misc_RNA (1)...(19): siRNA sense strand
ucagcaacccgguccagua

SEQ ID NO: 2064342 - RNA, 19 nt, Homo sapiens
  misc_RNA (1)...(19): siRNA sense strand
ucaacagagaggcuuauuu

SEQ ID NO: 2064343 - RNA, 19 nt, Homo sapiens
  misc_RNA (1)...(19): siRNA sense strand
acaacaauaucucuguagu

SEQ ID NO: 2064344 - RNA, 19 nt, Homo sapiens
  misc_RNA (1)...(19): siRNA sense strand
aggcuuauuugacuuuaug

SEQ ID NO: 2064345 - RNA, 19 nt, Homo sapiens
  misc_RNA (1)...(19): siRNA sense strand
gggauaggcccagaaguuc

SEQ ID NO: 2064346 - RNA, 19 nt, Homo sapiens
  misc_RNA (1)...(19): siRNA sense strand
gaggcuuauuugacuuuau

SEQ ID NO: 2064347 - RNA, 19 nt, Homo sapiens
  misc_RNA (1)...(19): siRNA sense strand
gaugaggcuucugggauag

SEQ ID NO: 2064348 - RNA, 19 nt, Homo sapiens
  misc_RNA (1)...(19): siRNA sense strand
auacagccauccaccuuca

SEQ ID NO: 2064349 - RNA, 19 nt, Homo sapiens
  misc_RNA (1)...(19): siRNA sense strand
gggcuggaccguuucaaca

SEQ ID NO: 2064350 - RNA, 19 nt, Homo sapiens
  misc_RNA (1)...(19): siRNA sense strand
uuccugggcuggaccguuu

SEQ ID NO: 2064351 - RNA, 19 nt, Homo sapiens
  misc_RNA (1)...(19): siRNA sense strand
gugguccaguguucugauu

SEQ ID NO: 2064352 - RNA, 19 nt, Homo sapiens
  misc_RNA (1)...(19): siRNA sense strand
caacucggaaacuauaagu

SEQ ID NO: 2064353 - RNA, 19 nt, Homo sapiens
  misc_RNA (1)...(19): siRNA sense strand
ccacuaucauccuccuucu

SEQ ID NO: 2064354 - RNA, 19 nt, Homo sapiens
  misc_RNA (1)...(19): siRNA sense strand
agaggcuuauuugacuuua

SEQ ID NO: 2064355 - RNA, 19 nt, Homo sapiens
  misc_RNA (1)...(19): siRNA sense strand
auucaacucggaaacuaua

SEQ ID NO: 2064356 - RNA, 19 nt, Homo sapiens
  misc_RNA (1)...(19): siRNA sense strand
agagaggcuuauuugacuu

SEQ ID NO: 2064357 - RNA, 19 nt, Homo sapiens
  misc_RNA (1)...(19): siRNA sense strand
acuuuaugcuagaagauga

SEQ ID NO: 2064358 - RNA, 19 nt, Homo sapiens
  misc_RNA (1)...(19): siRNA sense strand
acagagaggcuuauuugac

SEQ ID NO: 2064359 - RNA, 19 nt, Homo sapiens
  misc_RNA (1)...(19): siRNA sense strand
uacgugcgcucugccauuc

SEQ ID NO: 2064360 - RNA, 19 nt, Homo sapiens
  misc_RNA (1)...(19): siRNA sense strand
cuacgugcgcucugccauu

SEQ ID NO: 2064361 - RNA, 19 nt, Homo sapiens
  misc_RNA (1)...(19): siRNA sense strand
caacagagaggcuuauuug

SEQ ID NO: 2064362 - RNA, 19 nt, Homo sapiens
  misc_RNA (1)...(19): siRNA sense strand
gcccagaaguuccugauga

SEQ ID NO: 2064363 - RNA, 19 nt, Homo sapiens
  misc_RNA (1)...(19): siRNA sense strand
caauaucucuguaguugga

SEQ ID NO: 2064364 - RNA, 19 nt, Homo sapiens
  misc_RNA (1)...(19): siRNA sense strand
agaugaggcuucugggaua

SEQ ID NO: 2064365 - RNA, 19 nt, Homo sapiens
  misc_RNA (1)...(19): siRNA sense strand
aacaauaucucuguaguug

SEQ ID NO: 2064366 - RNA, 19 nt, Homo sapiens
  misc_RNA (1)...(19): siRNA sense strand
cagagaggcuuauuugacu

SEQ ID NO: 2064367 - RNA, 19 nt, Homo sapiens
  misc_RNA (1)...(19): siRNA sense strand
gguccaguguucugauuug

SEQ ID NO: 2064368 - RNA, 19 nt, Homo sapiens
  misc_RNA (1)...(19): siRNA sense strand
ccauucaacucggaaacua

SEQ ID NO: 2064369 - RNA, 19 nt, Homo sapiens
  misc_RNA (1)...(19): siRNA sense strand
caacaauaucucuguaguu

SEQ ID NO: 2064370 - RNA, 19 nt, Homo sapiens
  misc_RNA (1)...(19): siRNA sense strand
guaguuggaucaagugacu

SEQ ID NO: 2064371 - RNA, 19 nt, Homo sapiens
  misc_RNA (1)...(19): siRNA sense strand
gcaacccgguccaguacug

SEQ ID NO: 2064372 - RNA, 19 nt, Homo sapiens
  misc_RNA (1)...(19): siRNA sense strand
gcuggaccguuucaacaga

SEQ ID NO: 2064373 - RNA, 19 nt, Homo sapiens
  misc_RNA (1)...(19): siRNA sense strand
gagaggcuuauuugacuuu

SEQ ID NO: 2064374 - RNA, 19 nt, Homo sapiens
  misc_RNA (1)...(19): siRNA sense strand
acucggaaacuauaaguaa

SEQ ID NO: 2064375 - RNA, 19 nt, Homo sapiens
  misc_RNA (1)...(19): siRNA sense strand
ucagcaacccgguccagua

SEQ ID NO: 2064376 - RNA, 19 nt, Homo sapiens
  misc_RNA (1)...(19): siRNA sense strand
ucaacagagaggcuuauuu

SEQ ID NO: 2064377 - RNA, 19 nt, Homo sapiens
  misc_RNA (1)...(19): siRNA sense strand
acaacaauaucucuguagu

SEQ ID NO: 2064378 - RNA, 19 nt, Homo sapiens
  misc_RNA (1)...(19): siRNA sense strand
aggcuuauuugacuuuaug

SEQ ID NO: 2064379 - RNA, 19 nt, Homo sapiens
  misc_RNA (1)...(19): siRNA sense strand
gggauaggcccagaaguuc

SEQ ID NO: 2064380 - RNA, 19 nt, Homo sapiens
  misc_RNA (1)...(19): siRNA sense strand
gaggcuuauuugacuuuau

SEQ ID NO: 2064381 - RNA, 19 nt, Homo sapiens
  misc_RNA (1)...(19): siRNA sense strand
gaugaggcuucugggauag

SEQ ID NO: 2064382 - RNA, 19 nt, Homo sapiens
  misc_RNA (1)...(19): siRNA sense strand
auacagccauccaccuuca

SEQ ID NO: 2064383 - RNA, 19 nt, Homo sapiens
  misc_RNA (1)...(19): siRNA sense strand
gggcuggaccguuucaaca

SEQ ID NO: 2064384 - RNA, 19 nt, Homo sapiens
  misc_RNA (1)...(19): siRNA sense strand
uuccugggcuggaccguuu

SEQ ID NO: 2064385 - RNA, 19 nt, Homo sapiens
  misc_RNA (1)...(19): siRNA sense strand
gugguccaguguucugauu

SEQ ID NO: 2064386 - RNA, 19 nt, Homo sapiens
  misc_RNA (1)...(19): siRNA sense strand
caacucggaaacuauaagu

SEQ ID NO: 2064387 - RNA, 19 nt, Homo sapiens
  misc_RNA (1)...(19): siRNA sense strand
ccacuaucauccuccuucu

SEQ ID NO: 2064388 - RNA, 19 nt, Homo sapiens
  misc_RNA (1)...(19): siRNA sense strand
agaggcuuauuugacuuua

SEQ ID NO: 2064389 - RNA, 19 nt, Homo sapiens
  misc_RNA (1)...(19): siRNA sense strand
auucaacucggaaacuaua

SEQ ID NO: 2064390 - RNA, 19 nt, Homo sapiens
  misc_RNA (1)...(19): siRNA sense strand
agagaggcuuauuugacuu

SEQ ID NO: 2064391 - RNA, 19 nt, Homo sapiens
  misc_RNA (1)...(19): siRNA sense strand
acuuuaugcuagaagauga

SEQ ID NO: 2064392 - RNA, 19 nt, Homo sapiens
  misc_RNA (1)...(19): siRNA sense strand
acagagaggcuuauuugac

SEQ ID NO: 2064393 - RNA, 19 nt, Homo sapiens
  misc_RNA (1)...(19): siRNA sense strand
uacgugcgcucugccauuc

SEQ ID NO: 2064394 - RNA, 19 nt, Homo sapiens
  misc_RNA (1)...(19): siRNA sense strand
cuacgugcgcucugccauu

SEQ ID NO: 2064395 - RNA, 19 nt, Homo sapiens
  misc_RNA (1)...(19): siRNA sense strand
caacagagaggcuuauuug

SEQ ID NO: 2064396 - RNA, 19 nt, Homo sapiens
  misc_RNA (1)...(19): siRNA sense strand
gcccagaaguuccugauga

SEQ ID NO: 2064397 - RNA, 19 nt, Homo sapiens
  misc_RNA (1)...(19): siRNA sense strand
caauaucucuguaguugga

SEQ ID NO: 2064398 - RNA, 19 nt, Homo sapiens
  misc_RNA (1)...(19): siRNA sense strand
agaugaggcuucugggaua

SEQ ID NO: 2064399 - RNA, 19 nt, Homo sapiens
  misc_RNA (1)...(19): siRNA sense strand
aacaauaucucuguaguug

SEQ ID NO: 2064400 - RNA, 19 nt, Homo sapiens
  misc_RNA (1)...(19): siRNA sense strand
cagagaggcuuauuugacu

SEQ ID NO: 2064401 - RNA, 19 nt, Homo sapiens
  misc_RNA (1)...(19): siRNA sense strand
gguccaguguucugauuug

SEQ ID NO: 2064402 - RNA, 19 nt, Homo sapiens
  misc_RNA (1)...(19): siRNA sense strand
ccauucaacucggaaacua

SEQ ID NO: 2064403 - RNA, 19 nt, Homo sapiens
  misc_RNA (1)...(19): siRNA sense strand
caacaauaucucuguaguu

SEQ ID NO: 2064404 - RNA, 19 nt, Homo sapiens
  misc_RNA (1)...(19): siRNA sense strand
guaguuggaucaagugacu

SEQ ID NO: 2064405 - RNA, 19 nt, Homo sapiens
  misc_RNA (1)...(19): siRNA sense strand
gcaacccgguccaguacug

SEQ ID NO: 2064406 - RNA, 19 nt, Homo sapiens
  misc_RNA (1)...(19): siRNA sense strand
gcuggaccguuucaacaga

SEQ ID NO: 2064407 - RNA, 19 nt, Homo sapiens
  misc_RNA (1)...(19): siRNA sense strand
gagaggcuuauuugacuuu

SEQ ID NO: 2064408 - RNA, 19 nt, Homo sapiens
  misc_RNA (1)...(19): siRNA sense strand
acucggaaacuauaaguaa

SEQ ID NO: 2064409 - RNA, 19 nt, Homo sapiens
  misc_RNA (1)...(19): siRNA sense strand
ucagcaacccgguccagua

SEQ ID NO: 2064410 - RNA, 19 nt, Homo sapiens
  misc_RNA (1)...(19): siRNA sense strand
ucaacagagaggcuuauuu

SEQ ID NO: 2064411 - RNA, 19 nt, Homo sapiens
  misc_RNA (1)...(19): siRNA sense strand
acaacaauaucucuguagu

SEQ ID NO: 2064412 - RNA, 19 nt, Homo sapiens
  misc_RNA (1)...(19): siRNA sense strand
aggcuuauuugacuuuaug

SEQ ID NO: 2064413 - RNA, 19 nt, Homo sapiens
  misc_RNA (1)...(19): siRNA sense strand
gggauaggcccagaaguuc

SEQ ID NO: 2064414 - RNA, 19 nt, Homo sapiens
  misc_RNA (1)...(19): siRNA sense strand
gaggcuuauuugacuuuau

SEQ ID NO: 2064415 - RNA, 19 nt, Homo sapiens
  misc_RNA (1)...(19): siRNA sense strand
gaugaggcuucugggauag

SEQ ID NO: 2064416 - RNA, 19 nt, Homo sapiens
  misc_RNA (1)...(19): siRNA sense strand
auacagccauccaccuuca

SEQ ID NO: 2064417 - RNA, 19 nt, Homo sapiens
  misc_RNA (1)...(19): siRNA sense strand
gggcuggaccguuucaaca

SEQ ID NO: 2064418 - RNA, 19 nt, Homo sapiens
  misc_RNA (1)...(19): siRNA sense strand
uuccugggcuggaccguuu

SEQ ID NO: 2064419 - RNA, 19 nt, Homo sapiens
  misc_RNA (1)...(19): siRNA sense strand
gugguccaguguucugauu

SEQ ID NO: 2064420 - RNA, 19 nt, Homo sapiens
  misc_RNA (1)...(19): siRNA sense strand
caacucggaaacuauaagu

SEQ ID NO: 2064421 - RNA, 19 nt, Homo sapiens
  misc_RNA (1)...(19): siRNA sense strand
ccacuaucauccuccuucu

SEQ ID NO: 2064422 - RNA, 19 nt, Homo sapiens
  misc_RNA (1)...(19): siRNA sense strand
agaggcuuauuugacuuua

SEQ ID NO: 2064423 - RNA, 19 nt, Homo sapiens
  misc_RNA (1)...(19): siRNA sense strand
auucaacucggaaacuaua

SEQ ID NO: 2064424 - RNA, 19 nt, Homo sapiens
  misc_RNA (1)...(19): siRNA sense strand
agagaggcuuauuugacuu

SEQ ID NO: 2064425 - RNA, 19 nt, Homo sapiens
  misc_RNA (1)...(19): siRNA sense strand
acuuuaugcuagaagauga

SEQ ID NO: 2064426 - RNA, 19 nt, Homo sapiens
  misc_RNA (1)...(19): siRNA sense strand
acagagaggcuuauuugac

SEQ ID NO: 2064427 - RNA, 19 nt, Homo sapiens
  misc_RNA (1)...(19): siRNA sense strand
uacgugcgcucugccauuc

SEQ ID NO: 2064428 - RNA, 19 nt, Homo sapiens
  misc_RNA (1)...(19): siRNA sense strand
cuacgugcgcucugccauu

SEQ ID NO: 2064429 - RNA, 19 nt, Homo sapiens
  misc_RNA (1)...(19): siRNA sense strand
caacagagaggcuuauuug

SEQ ID NO: 2064430 - RNA, 19 nt, Homo sapiens
  misc_RNA (1)...(19): siRNA sense strand
gcccagaaguuccugauga

SEQ ID NO: 2064431 - RNA, 19 nt, Homo sapiens
  misc_RNA (1)...(19): siRNA sense strand
caauaucucuguaguugga

SEQ ID NO: 2064432 - RNA, 19 nt, Homo sapiens
  misc_RNA (1)...(19): siRNA sense strand
agaugaggcuucugggaua

SEQ ID NO: 2064433 - RNA, 19 nt, Homo sapiens
  misc_RNA (1)...(19): siRNA sense strand
aacaauaucucuguaguug

SEQ ID NO: 2064434 - RNA, 19 nt, Homo sapiens
  misc_RNA (1)...(19): siRNA sense strand
cagagaggcuuauuugacu

SEQ ID NO: 2064435 - RNA, 19 nt, Homo sapiens
  misc_RNA (1)...(19): siRNA sense strand
gguccaguguucugauuug

SEQ ID NO: 2064436 - RNA, 19 nt, Homo sapiens
  misc_RNA (1)...(19): siRNA sense strand
ccauucaacucggaaacua

SEQ ID NO: 2064437 - RNA, 19 nt, Homo sapiens
  misc_RNA (1)...(19): siRNA sense strand
caacaauaucucuguaguu

SEQ ID NO: 2064438 - RNA, 19 nt, Homo sapiens
  misc_RNA (1)...(19): siRNA sense strand
guaguuggaucaagugacu

SEQ ID NO: 2064439 - RNA, 19 nt, Homo sapiens
  misc_RNA (1)...(19): siRNA sense strand
gcaacccgguccaguacug

SEQ ID NO: 2064440 - RNA, 19 nt, Homo sapiens
  misc_RNA (1)...(19): siRNA sense strand
gcuggaccguuucaacaga

SEQ ID NO: 2064441 - RNA, 19 nt, Homo sapiens
  misc_RNA (1)...(19): siRNA sense strand
gagaggcuuauuugacuuu

SEQ ID NO: 2064442 - RNA, 19 nt, Homo sapiens
  misc_RNA (1)...(19): siRNA sense strand
acucggaaacuauaaguaa

SEQ ID NO: 2064443 - RNA, 19 nt, Homo sapiens
  misc_RNA (1)...(19): siRNA sense strand
ucagcaacccgguccagua

SEQ ID NO: 2064444 - RNA, 19 nt, Homo sapiens
  misc_RNA (1)...(19): siRNA sense strand
ucaacagagaggcuuauuu

SEQ ID NO: 2064445 - RNA, 19 nt, Homo sapiens
  misc_RNA (1)...(19): siRNA sense strand
acaacaauaucucuguagu

SEQ ID NO: 2064446 - RNA, 19 nt, Homo sapiens
  misc_RNA (1)...(19): siRNA sense strand
aggcuuauuugacuuuaug

SEQ ID NO: 2064447 - RNA, 19 nt, Homo sapiens
  misc_RNA (1)...(19): siRNA sense strand
gggauaggcccagaaguuc

SEQ ID NO: 2064448 - RNA, 19 nt, Homo sapiens
  misc_RNA (1)...(19): siRNA sense strand
gaggcuuauuugacuuuau

SEQ ID NO: 2064449 - RNA, 19 nt, Homo sapiens
  misc_RNA (1)...(19): siRNA sense strand
gaugaggcuucugggauag

SEQ ID NO: 2064450 - RNA, 19 nt, Homo sapiens
  misc_RNA (1)...(19): siRNA sense strand
auacagccauccaccuuca

SEQ ID NO: 2064451 - RNA, 19 nt, Homo sapiens
  misc_RNA (1)...(19): siRNA sense strand
gggcuggaccguuucaaca

SEQ ID NO: 2064452 - RNA, 19 nt, Homo sapiens
  misc_RNA (1)...(19): siRNA sense strand
uuccugggcuggaccguuu

SEQ ID NO: 2064453 - RNA, 19 nt, Homo sapiens
  misc_RNA (1)...(19): siRNA sense strand
gugguccaguguucugauu

SEQ ID NO: 2064454 - RNA, 19 nt, Homo sapiens
  misc_RNA (1)...(19): siRNA sense strand
caacucggaaacuauaagu

SEQ ID NO: 2064455 - RNA, 19 nt, Homo sapiens
  misc_RNA (1)...(19): siRNA sense strand
ccacuaucauccuccuucu

SEQ ID NO: 2064456 - RNA, 19 nt, Homo sapiens
  misc_RNA (1)...(19): siRNA sense strand
agaggcuuauuugacuuua

SEQ ID NO: 2064457 - RNA, 19 nt, Homo sapiens
  misc_RNA (1)...(19): siRNA sense strand
auucaacucggaaacuaua

SEQ ID NO: 2064458 - RNA, 19 nt, Homo sapiens
  misc_RNA (1)...(19): siRNA sense strand
agagaggcuuauuugacuu

SEQ ID NO: 2064459 - RNA, 19 nt, Homo sapiens
  misc_RNA (1)...(19): siRNA sense strand
acuuuaugcuagaagauga

SEQ ID NO: 2064460 - RNA, 19 nt, Homo sapiens
  misc_RNA (1)...(19): siRNA sense strand
acagagaggcuuauuugac

SEQ ID NO: 2064461 - RNA, 19 nt, Homo sapiens
  misc_RNA (1)...(19): siRNA sense strand
uacgugcgcucugccauuc

SEQ ID NO: 2064462 - RNA, 19 nt, Homo sapiens
  misc_RNA (1)...(19): siRNA sense strand
cuacgugcgcucugccauu

SEQ ID NO: 2064463 - RNA, 19 nt, Homo sapiens
  misc_RNA (1)...(19): siRNA sense strand
caacagagaggcuuauuug

SEQ ID NO: 2064464 - RNA, 19 nt, Homo sapiens
  misc_RNA (1)...(19): siRNA sense strand
gcccagaaguuccugauga

SEQ ID NO: 2064465 - RNA, 19 nt, Homo sapiens
  misc_RNA (1)...(19): siRNA sense strand
agaugaggcuucugggaua

SEQ ID NO: 2064466 - RNA, 19 nt, Homo sapiens
  misc_RNA (1)...(19): siRNA sense strand
cagagaggcuuauuugacu

SEQ ID NO: 2064467 - RNA, 19 nt, Homo sapiens
  misc_RNA (1)...(19): siRNA sense strand
gguccaguguucugauuug

SEQ ID NO: 2064468 - RNA, 19 nt, Homo sapiens
  misc_RNA (1)...(19): siRNA sense strand
gcuggaccguuucaacaga

SEQ ID NO: 2064469 - RNA, 19 nt, Homo sapiens
  misc_RNA (1)...(19): siRNA sense strand
gagaggcuuauuugacuuu

SEQ ID NO: 2064470 - RNA, 19 nt, Homo sapiens
  misc_RNA (1)...(19): siRNA sense strand
ucaacagagaggcuuauuu

SEQ ID NO: 2064471 - RNA, 19 nt, Homo sapiens
  misc_RNA (1)...(19): siRNA sense strand
aggcuuauuugacuuuaug

SEQ ID NO: 2064472 - RNA, 19 nt, Homo sapiens
  misc_RNA (1)...(19): siRNA sense strand
gggauaggcccagaaguuc

SEQ ID NO: 2064473 - RNA, 19 nt, Homo sapiens
  misc_RNA (1)...(19): siRNA sense strand
gaggcuuauuugacuuuau

SEQ ID NO: 2064474 - RNA, 19 nt, Homo sapiens
  misc_RNA (1)...(19): siRNA sense strand
gaugaggcuucugggauag

SEQ ID NO: 2064475 - RNA, 19 nt, Homo sapiens
  misc_RNA (1)...(19): siRNA sense strand
uuccugggcuggaccguuu

SEQ ID NO: 2064476 - RNA, 19 nt, Homo sapiens
  misc_RNA (1)...(19): siRNA sense strand
gggcuggaccguuucaaca

SEQ ID NO: 2064477 - RNA, 19 nt, Homo sapiens
  misc_RNA (1)...(19): siRNA sense strand
gugguccaguguucugauu

SEQ ID NO: 2064478 - RNA, 19 nt, Homo sapiens
  misc_RNA (1)...(19): siRNA sense strand
agaggcuuauuugacuuua

SEQ ID NO: 2064479 - RNA, 19 nt, Homo sapiens
  misc_RNA (1)...(19): siRNA sense strand
ccacuaucauccuccuucu

SEQ ID NO: 2064480 - RNA, 19 nt, Homo sapiens
  misc_RNA (1)...(19): siRNA sense strand
agagaggcuuauuugacuu

SEQ ID NO: 2064481 - RNA, 19 nt, Homo sapiens
  misc_RNA (1)...(19): siRNA sense strand
acagagaggcuuauuugac

SEQ ID NO: 2064482 - RNA, 19 nt, Homo sapiens
  misc_RNA (1)...(19): siRNA sense strand
acuuuaugcuagaagauga

SEQ ID NO: 2064483 - RNA, 19 nt, Homo sapiens
  misc_RNA (1)...(19): siRNA sense strand
ggaaagagauacagaauuu

SEQ ID NO: 2064484 - RNA, 19 nt, Homo sapiens
  misc_RNA (1)...(19): siRNA sense strand
gaaacggacuugcuauuua

SEQ ID NO: 2064485 - RNA, 19 nt, Homo sapiens
  misc_RNA (1)...(19): siRNA sense strand
uaaauuaucuggccaguuu

SEQ ID NO: 2064486 - RNA, 19 nt, Homo sapiens
  misc_RNA (1)...(19): siRNA sense strand
guaaagaaaugcagaauuc

SEQ ID NO: 2064487 - RNA, 19 nt, Homo sapiens
  misc_RNA (1)...(19): siRNA sense strand
gaaagaaagugucccaguu

SEQ ID NO: 2064488 - RNA, 19 nt, Homo sapiens
  misc_RNA (1)...(19): siRNA sense strand
gaagacaucaucuggauua

SEQ ID NO: 2064489 - RNA, 19 nt, Homo sapiens
  misc_RNA (1)...(19): siRNA sense strand
gguaucagaugcuucauua

SEQ ID NO: 2064490 - RNA, 19 nt, Homo sapiens
  misc_RNA (1)...(19): siRNA sense strand
gaagaaugcagguuuaaua

SEQ ID NO: 2064491 - RNA, 19 nt, Homo sapiens
  misc_RNA (1)...(19): siRNA sense strand
ggaagucaguuugaauuua

SEQ ID NO: 2064492 - RNA, 19 nt, Homo sapiens
  misc_RNA (1)...(19): siRNA sense strand
gaaagucaaugccaaaugu

SEQ ID NO: 2064493 - RNA, 19 nt, Homo sapiens
  misc_RNA (1)...(19): siRNA sense strand
gaaacaagcuucugauguc

SEQ ID NO: 2064494 - RNA, 19 nt, Homo sapiens
  misc_RNA (1)...(19): siRNA sense strand
gaagaacaauauccuacua

SEQ ID NO: 2064495 - RNA, 19 nt, Homo sapiens
  misc_RNA (1)...(19): siRNA sense strand
caaagaaccuacucuguug

SEQ ID NO: 2064496 - RNA, 19 nt, Homo sapiens
  misc_RNA (1)...(19): siRNA sense strand
cagcuuaccuugaggguua

SEQ ID NO: 2064497 - RNA, 19 nt, Homo sapiens
  misc_RNA (1)...(19): siRNA sense strand
gaaccaacuuuguccuuaa

SEQ ID NO: 2064498 - RNA, 19 nt, Homo sapiens
  misc_RNA (1)...(19): siRNA sense strand
gccaaagagucauuuaaua

SEQ ID NO: 2064499 - RNA, 19 nt, Homo sapiens
  misc_RNA (1)...(19): siRNA sense strand
gaaguuugcuggccuguug

SEQ ID NO: 2064500 - RNA, 19 nt, Homo sapiens
  misc_RNA (1)...(19): siRNA sense strand
cuucauaacucucuagaua

SEQ ID NO: 2064501 - RNA, 19 nt, Homo sapiens
  misc_RNA (1)...(19): siRNA sense strand
uaaggaacgucaagagaua

SEQ ID NO: 2064502 - RNA, 19 nt, Homo sapiens
  misc_RNA (1)...(19): siRNA sense strand
gcucaaagguaacaauuau

SEQ ID NO: 2064503 - RNA, 19 nt, Homo sapiens
  misc_RNA (1)...(19): siRNA sense strand
caacaaagcagauuuagga

SEQ ID NO: 2064504 - RNA, 19 nt, Homo sapiens
  misc_RNA (1)...(19): siRNA sense strand
ggaauaaucuugcuuuagg

SEQ ID NO: 2064505 - RNA, 19 nt, Homo sapiens
  misc_RNA (1)...(19): siRNA sense strand
caaaggaaaccaucuuaua

SEQ ID NO: 2064506 - RNA, 19 nt, Homo sapiens
  misc_RNA (1)...(19): siRNA sense strand
cgaagaacuugcauugaua

SEQ ID NO: 2064507 - RNA, 19 nt, Homo sapiens
  misc_RNA (1)...(19): siRNA sense strand
auaaacagcuguauacgua

SEQ ID NO: 2064508 - RNA, 19 nt, Homo sapiens
  misc_RNA (1)...(19): siRNA sense strand
caaaugggcaggacucuua

SEQ ID NO: 2064509 - RNA, 19 nt, Homo sapiens
  misc_RNA (1)...(19): siRNA sense strand
ggacaucuccuugaauaua

SEQ ID NO: 2064510 - RNA, 19 nt, Homo sapiens
  misc_RNA (1)...(19): siRNA sense strand
cccagaaucucuuauguua

SEQ ID NO: 2064511 - RNA, 19 nt, Homo sapiens
  misc_RNA (1)...(19): siRNA sense strand
gcaaaugcauacccacaaa

SEQ ID NO: 2064512 - RNA, 19 nt, Homo sapiens
  misc_RNA (1)...(19): siRNA sense strand
gaaaucaacuagugaccuu

SEQ ID NO: 2064513 - RNA, 19 nt, Homo sapiens
  misc_RNA (1)...(19): siRNA sense strand
ggaaacuucugcagaggua

SEQ ID NO: 2064514 - RNA, 19 nt, Homo sapiens
  misc_RNA (1)...(19): siRNA sense strand
gaagguacaguugaaauua

SEQ ID NO: 2064515 - RNA, 19 nt, Homo sapiens
  misc_RNA (1)...(19): siRNA sense strand
gggcaaagacccuaaagua

SEQ ID NO: 2064516 - RNA, 19 nt, Homo sapiens
  misc_RNA (1)...(19): siRNA sense strand
guacacugcucaaaucauu

SEQ ID NO: 2064517 - RNA, 19 nt, Homo sapiens
  misc_RNA (1)...(19): siRNA sense strand
cagacaagcucaaagguaa

SEQ ID NO: 2064518 - RNA, 19 nt, Homo sapiens
  misc_RNA (1)...(19): siRNA sense strand
cuacaucucugaucaaaga

SEQ ID NO: 2064519 - RNA, 19 nt, Homo sapiens
  misc_RNA (1)...(19): siRNA sense strand
guaaauaccuuggcauuag

SEQ ID NO: 2064520 - RNA, 19 nt, Homo sapiens
  misc_RNA (1)...(19): siRNA sense strand
gcaaagaccacauuggaaa

SEQ ID NO: 2064521 - RNA, 19 nt, Homo sapiens
  misc_RNA (1)...(19): siRNA sense strand
gaucgaagauuguuuaugc

SEQ ID NO: 2064522 - RNA, 19 nt, Homo sapiens
  misc_RNA (1)...(19): siRNA sense strand
gaaacagacuugacuugug

SEQ ID NO: 2064523 - RNA, 19 nt, Homo sapiens
  misc_RNA (1)...(19): siRNA sense strand
ccaaggauguucugucaaa

SEQ ID NO: 2064524 - RNA, 19 nt, Homo sapiens
  misc_RNA (1)...(19): siRNA sense strand
gaggaaauguucuagaaau

SEQ ID NO: 2064525 - RNA, 19 nt, Homo sapiens
  misc_RNA (1)...(19): siRNA sense strand
ccuagaagaugaaguauau

SEQ ID NO: 2064526 - RNA, 19 nt, Homo sapiens
  misc_RNA (1)...(19): siRNA sense strand
ucagaugacuccauuuaaa

SEQ ID NO: 2064527 - RNA, 19 nt, Homo sapiens
  misc_RNA (1)...(19): siRNA sense strand
ucaaagagcauacccuaua

SEQ ID NO: 2064528 - RNA, 19 nt, Homo sapiens
  misc_RNA (1)...(19): siRNA sense strand
gaagaagaaccuuuagauu

SEQ ID NO: 2064529 - RNA, 19 nt, Homo sapiens
  misc_RNA (1)...(19): siRNA sense strand
gaagauuguuuaugcauca

SEQ ID NO: 2064530 - RNA, 19 nt, Homo sapiens
  misc_RNA (1)...(19): siRNA sense strand
caagaaagguacaauucaa

SEQ ID NO: 2064531 - RNA, 19 nt, Homo sapiens
  misc_RNA (1)...(19): siRNA sense strand
gaaguggaaccaaaugaua

SEQ ID NO: 2064532 - RNA, 19 nt, Homo sapiens
  misc_RNA (1)...(19): siRNA sense strand
ggaaacagacauaguuaaa

SEQ ID NO: 2064533 - RNA, 19 nt, Homo sapiens
  misc_RNA (1)...(19): siRNA sense strand
gaaaguuuauggacuggaa

SEQ ID NO: 2064534 - RNA, 19 nt, Homo sapiens
  misc_RNA (1)...(19): siRNA sense strand
gaaaguuccuuacacaaag

SEQ ID NO: 2064535 - RNA, 19 nt, Homo sapiens
  misc_RNA (1)...(19): siRNA sense strand
gcagaauucucucaauaau

SEQ ID NO: 2064536 - RNA, 19 nt, Homo sapiens
  misc_RNA (1)...(19): siRNA sense strand
ggacaauucugaggaaaug

SEQ ID NO: 2064537 - RNA, 19 nt, Homo sapiens
  misc_RNA (1)...(19): siRNA sense strand
gagggaaacacucagauua

SEQ ID NO: 2064538 - RNA, 19 nt, Homo sapiens
  misc_RNA (1)...(19): siRNA sense strand
ggagguagcuucagaacag

SEQ ID NO: 2064539 - RNA, 19 nt, Homo sapiens
  misc_RNA (1)...(19): siRNA sense strand
caacccaagugucaauuaa

SEQ ID NO: 2064540 - RNA, 19 nt, Homo sapiens
  misc_RNA (1)...(19): siRNA sense strand
caagauguaugugcuuuaa

SEQ ID NO: 2064541 - RNA, 19 nt, Homo sapiens
  misc_RNA (1)...(19): siRNA sense strand
gagaagacaucaucuggau

SEQ ID NO: 2064542 - RNA, 19 nt, Homo sapiens
  misc_RNA (1)...(19): siRNA sense strand
gagcaagccucagucaauu

SEQ ID NO: 2064543 - RNA, 19 nt, Homo sapiens
  misc_RNA (1)...(19): siRNA sense strand
gacucuaggucaagauuua

SEQ ID NO: 2064544 - RNA, 19 nt, Homo sapiens
  misc_RNA (1)...(19): siRNA sense strand
guaaagaccuugaauuagc

SEQ ID NO: 2064545 - RNA, 19 nt, Homo sapiens
  misc_RNA (1)...(19): siRNA sense strand
gggaaacacucagauuaaa

SEQ ID NO: 2064546 - RNA, 19 nt, Homo sapiens
  misc_RNA (1)...(19): siRNA sense strand
gaaagagauugaugaccaa

SEQ ID NO: 2064547 - RNA, 19 nt, Homo sapiens
  misc_RNA (1)...(19): siRNA sense strand
ccaaguagcuaaugaaagg

SEQ ID NO: 2064548 - RNA, 19 nt, Homo sapiens
  misc_RNA (1)...(19): siRNA sense strand
aggcaaauguugaaugaua

SEQ ID NO: 2064549 - RNA, 19 nt, Homo sapiens
  misc_RNA (1)...(19): siRNA sense strand
gcaaagacccuaaaguaca

SEQ ID NO: 2064550 - RNA, 19 nt, Homo sapiens
  misc_RNA (1)...(19): siRNA sense strand
gaagucaguuugaauuuac

SEQ ID NO: 2064551 - RNA, 19 nt, Homo sapiens
  misc_RNA (1)...(19): siRNA sense strand
cagaacagcuucaaauaag

SEQ ID NO: 2064552 - RNA, 19 nt, Homo sapiens
  misc_RNA (1)...(19): siRNA sense strand
ggaaauacauacuguuugc

SEQ ID NO: 2064553 - RNA, 19 nt, Homo sapiens
  misc_RNA (1)...(19): siRNA sense strand
gcucaaaucauuccuggua

SEQ ID NO: 2064554 - RNA, 19 nt, Homo sapiens
  misc_RNA (1)...(19): siRNA sense strand
gauaugauacggaaauuga

SEQ ID NO: 2064555 - RNA, 19 nt, Homo sapiens
  misc_RNA (1)...(19): siRNA sense strand
gaaagugucccaguuggua

SEQ ID NO: 2064556 - RNA, 19 nt, Homo sapiens
  misc_RNA (1)...(19): siRNA sense strand
gaaacacucagauuaaaga

SEQ ID NO: 2064557 - RNA, 19 nt, Homo sapiens
  misc_RNA (1)...(19): siRNA sense strand
caagaacucuaccaugguu

SEQ ID NO: 2064558 - RNA, 19 nt, Homo sapiens
  misc_RNA (1)...(19): siRNA sense strand
ggaaaagaaucaagaugua

SEQ ID NO: 2064559 - RNA, 19 nt, Homo sapiens
  misc_RNA (1)...(19): siRNA sense strand
caaauguccuagaagauga

SEQ ID NO: 2064560 - RNA, 19 nt, Homo sapiens
  misc_RNA (1)...(19): siRNA sense strand
ugacauacuuugcaaugaa

SEQ ID NO: 2064561 - RNA, 19 nt, Homo sapiens
  misc_RNA (1)...(19): siRNA sense strand
ccucuuagcugucuuaaag

SEQ ID NO: 2064562 - RNA, 19 nt, Homo sapiens
  misc_RNA (1)...(19): siRNA sense strand
ucacagaguugaacagugu

SEQ ID NO: 2064563 - RNA, 19 nt, Homo sapiens
  misc_RNA (1)...(19): siRNA sense strand
ugaagaauguugaagauca

SEQ ID NO: 2064564 - RNA, 19 nt, Homo sapiens
  misc_RNA (1)...(19): siRNA sense strand
cagcacaacauaugucuua

SEQ ID NO: 2064565 - RNA, 19 nt, Homo sapiens
  misc_RNA (1)...(19): siRNA sense strand
gcagaagaguacauuugaa

SEQ ID NO: 2064566 - RNA, 19 nt, Homo sapiens
  misc_RNA (1)...(19): siRNA sense strand
gaaaaugccagcacucuua

SEQ ID NO: 2064567 - RNA, 19 nt, Homo sapiens
  misc_RNA (1)...(19): siRNA sense strand
cucaggaucuugauuauaa

SEQ ID NO: 2064568 - RNA, 19 nt, Homo sapiens
  misc_RNA (1)...(19): siRNA sense strand
agacacaggugauaaacaa

SEQ ID NO: 2064569 - RNA, 19 nt, Homo sapiens
  misc_RNA (1)...(19): siRNA sense strand
gaagaacuugcauugauaa

SEQ ID NO: 2064570 - RNA, 19 nt, Homo sapiens
  misc_RNA (1)...(19): siRNA sense strand
ugaaagagcuaacauacag

SEQ ID NO: 2064571 - RNA, 19 nt, Homo sapiens
  misc_RNA (1)...(19): siRNA sense strand
cuagaagccuuauucacua

SEQ ID NO: 2064572 - RNA, 19 nt, Homo sapiens
  misc_RNA (1)...(19): siRNA sense strand
gaacaucugacuuuggaaa

SEQ ID NO: 2064573 - RNA, 19 nt, Homo sapiens
  misc_RNA (1)...(19): siRNA sense strand
ugaaaguccuguuguucua

SEQ ID NO: 2064574 - RNA, 19 nt, Homo sapiens
  misc_RNA (1)...(19): siRNA sense strand
gagaagagccuuggauuuc

SEQ ID NO: 2064575 - RNA, 19 nt, Homo sapiens
  misc_RNA (1)...(19): siRNA sense strand
gaaaccaucuuauaaucag

SEQ ID NO: 2064576 - RNA, 19 nt, Homo sapiens
  misc_RNA (1)...(19): siRNA sense strand
gccauuaaauuguccauau

SEQ ID NO: 2064577 - RNA, 19 nt, Homo sapiens
  misc_RNA (1)...(19): siRNA sense strand
gcagagguacauccaauaa

SEQ ID NO: 2064578 - RNA, 19 nt, Homo sapiens
  misc_RNA (1)...(19): siRNA sense strand
ggcuucaacuccaauaaua

SEQ ID NO: 2064579 - RNA, 19 nt, Homo sapiens
  misc_RNA (1)...(19): siRNA sense strand
gaaaugaagaagcaucuga

SEQ ID NO: 2064580 - RNA, 19 nt, Homo sapiens
  misc_RNA (1)...(19): siRNA sense strand
ccuaaggaauuugcuaaua

SEQ ID NO: 2064581 - RNA, 19 nt, Homo sapiens
  misc_RNA (1)...(19): siRNA sense strand
uaacagaaggaaagagaua

SEQ ID NO: 2064582 - RNA, 19 nt, Homo sapiens
  misc_RNA (1)...(19): siRNA sense strand
gacaucaucuggauuauac

SEQ ID NO: 2064583 - RNA, 19 nt, Homo sapiens
  misc_RNA (1)...(19): siRNA sense strand
gaaauucacuaccaugaug

SEQ ID NO: 2064584 - RNA, 19 nt, Homo sapiens
  misc_RNA (1)...(19): siRNA sense strand
gaagcagugucguugcaua

SEQ ID NO: 2064585 - RNA, 19 nt, Homo sapiens
  misc_RNA (1)...(19): siRNA sense strand
caagaggcccugcauguga

SEQ ID NO: 2064586 - RNA, 19 nt, Homo sapiens
  misc_RNA (1)...(19): siRNA sense strand
gugcaacucuuucuacauc

SEQ ID NO: 2064587 - RNA, 19 nt, Homo sapiens
  misc_RNA (1)...(19): siRNA sense strand
caacugcccugaacuacag

SEQ ID NO: 2064588 - RNA, 19 nt, Homo sapiens
  misc_RNA (1)...(19): siRNA sense strand
ccaagaaauucacuaccau

SEQ ID NO: 2064589 - RNA, 19 nt, Homo sapiens
  misc_RNA (1)...(19): siRNA sense strand
gaagcgagacuggugcaaa

SEQ ID NO: 2064590 - RNA, 19 nt, Homo sapiens
  misc_RNA (1)...(19): siRNA sense strand
ucaucaaccgcuucuguua

SEQ ID NO: 2064591 - RNA, 19 nt, Homo sapiens
  misc_RNA (1)...(19): siRNA sense strand
gaacuacagccaccuacca

SEQ ID NO: 2064592 - RNA, 19 nt, Homo sapiens
  misc_RNA (1)...(19): siRNA sense strand
gccaagaggcccugcaugu

SEQ ID NO: 2064593 - RNA, 19 nt, Homo sapiens
  misc_RNA (1)...(19): siRNA sense strand
ucugcaagcccaagaaauu

SEQ ID NO: 2064594 - RNA, 19 nt, Homo sapiens
  misc_RNA (1)...(19): siRNA sense strand
acaaggcccagcacaauga

SEQ ID NO: 2064595 - RNA, 19 nt, Homo sapiens
  misc_RNA (1)...(19): siRNA sense strand
gcaaaacccagccgcuuaa

SEQ ID NO: 2064596 - RNA, 19 nt, Homo sapiens
  misc_RNA (1)...(19): siRNA sense strand
gacaaggcccagcacaaug

SEQ ID NO: 2064597 - RNA, 19 nt, Homo sapiens
  misc_RNA (1)...(19): siRNA sense strand
cccaagaaauucacuacca

SEQ ID NO: 2064598 - RNA, 19 nt, Homo sapiens
  misc_RNA (1)...(19): siRNA sense strand
acacucaacugcccugaac

SEQ ID NO: 2064599 - RNA, 19 nt, Homo sapiens
  misc_RNA (1)...(19): siRNA sense strand
aaagaaagggucccaaggu

SEQ ID NO: 2064600 - RNA, 19 nt, Homo sapiens
  misc_RNA (1)...(19): siRNA sense strand
cgaggaaggcugcaacagu

SEQ ID NO: 2064601 - RNA, 19 nt, Homo sapiens
  misc_RNA (1)...(19): siRNA sense strand
uugcauauccaucgauuug

SEQ ID NO: 2064602 - RNA, 19 nt, Homo sapiens
  misc_RNA (1)...(19): siRNA sense strand
gugaagcagugucguugca

SEQ ID NO: 2064603 - RNA, 19 nt, Homo sapiens
  misc_RNA (1)...(19): siRNA sense strand
cuacagccaccuaccaaga

SEQ ID NO: 2064604 - RNA, 19 nt, Homo sapiens
  misc_RNA (1)...(19): siRNA sense strand
caucaucaaccgcuucugu

SEQ ID NO: 2064605 - RNA, 19 nt, Homo sapiens
  misc_RNA (1)...(19): siRNA sense strand
agacaaggcccagcacaau

SEQ ID NO: 2064606 - RNA, 19 nt, Homo sapiens
  misc_RNA (1)...(19): siRNA sense strand
aaacccagccgcuuaagca

SEQ ID NO: 2064607 - RNA, 19 nt, Homo sapiens
  misc_RNA (1)...(19): siRNA sense strand
ccaccuaccaagaagaaga

SEQ ID NO: 2064608 - RNA, 19 nt, Homo sapiens
  misc_RNA (1)...(19): siRNA sense strand
aagaaauucacuaccauga

SEQ ID NO: 2064609 - RNA, 19 nt, Homo sapiens
  misc_RNA (1)...(19): siRNA sense strand
gcagugucguugcauaucc

SEQ ID NO: 2064610 - RNA, 19 nt, Homo sapiens
  misc_RNA (1)...(19): siRNA sense strand
gagcccugcuucuccucuu

SEQ ID NO: 2064611 - RNA, 19 nt, Homo sapiens
  misc_RNA (1)...(19): siRNA sense strand
gcagaccauccacgaggaa

SEQ ID NO: 2064612 - RNA, 19 nt, Homo sapiens
  misc_RNA (1)...(19): siRNA sense strand
cagugcaacucuuucuaca

SEQ ID NO: 2064613 - RNA, 19 nt, Homo sapiens
  misc_RNA (1)...(19): siRNA sense strand
ccaagaggcccugcaugug

SEQ ID NO: 2064614 - RNA, 19 nt, Homo sapiens
  misc_RNA (1)...(19): siRNA sense strand
ccaggcacauccggaagga

SEQ ID NO: 2064615 - RNA, 19 nt, Homo sapiens
  misc_RNA (1)...(19): siRNA sense strand
gccggcugcugaagggaaa

SEQ ID NO: 2064616 - RNA, 19 nt, Homo sapiens
  misc_RNA (1)...(19): siRNA sense strand
gcaacagucgcaccaucau

SEQ ID NO: 2064617 - RNA, 19 nt, Homo sapiens
  misc_RNA (1)...(19): siRNA sense strand
acucaacugcccugaacua

SEQ ID NO: 2064618 - RNA, 19 nt, Homo sapiens
  misc_RNA (1)...(19): siRNA sense strand
cagacaaggcccagcacaa

SEQ ID NO: 2064619 - RNA, 19 nt, Homo sapiens
  misc_RNA (1)...(19): siRNA sense strand
gcacauccggaaggaggaa

SEQ ID NO: 2064620 - RNA, 19 nt, Homo sapiens
  misc_RNA (1)...(19): siRNA sense strand
cguugcauauccaucgauu

SEQ ID NO: 2064621 - RNA, 19 nt, Homo sapiens
  misc_RNA (1)...(19): siRNA sense strand
ugacggagcgcaaauaccu

SEQ ID NO: 2064622 - RNA, 19 nt, Homo sapiens
  misc_RNA (1)...(19): siRNA sense strand
caagaagaagagagucaca

SEQ ID NO: 2064623 - RNA, 19 nt, Homo sapiens
  misc_RNA (1)...(19): siRNA sense strand
caacagucgcaccaucauc

SEQ ID NO: 2064624 - RNA, 19 nt, Homo sapiens
  misc_RNA (1)...(19): siRNA sense strand
aagcgagacuggugcaaaa

SEQ ID NO: 2064625 - RNA, 19 nt, Homo sapiens
  misc_RNA (1)...(19): siRNA sense strand
cgagagagcugcaucaguu

SEQ ID NO: 2064626 - RNA, 19 nt, Homo sapiens
  misc_RNA (1)...(19): siRNA sense strand
caagggagguuacaccaaa

SEQ ID NO: 2064627 - RNA, 19 nt, Homo sapiens
  misc_RNA (1)...(19): siRNA sense strand
gaagaaacuugguaaucug

SEQ ID NO: 2064628 - RNA, 19 nt, Homo sapiens
  misc_RNA (1)...(19): siRNA sense strand
gaaacuugguaaucugaaa

SEQ ID NO: 2064629 - RNA, 19 nt, Homo sapiens
  misc_RNA (1)...(19): siRNA sense strand
gcacuucgaccauuucuga

SEQ ID NO: 2064630 - RNA, 19 nt, Homo sapiens
  misc_RNA (1)...(19): siRNA sense strand
gaaaugauugcacuauuga

SEQ ID NO: 2064631 - RNA, 19 nt, Homo sapiens
  misc_RNA (1)...(19): siRNA sense strand
gaucaucucugugcaagug

SEQ ID NO: 2064632 - RNA, 19 nt, Homo sapiens
  misc_RNA (1)...(19): siRNA sense strand
agaaaugauugcacuauug

SEQ ID NO: 2064633 - RNA, 19 nt, Homo sapiens
  misc_RNA (1)...(19): siRNA sense strand
gaagaaggccaguuguaug

SEQ ID NO: 2064634 - RNA, 19 nt, Homo sapiens
  misc_RNA (1)...(19): siRNA sense strand
ccgaggagcuuuccagaau

SEQ ID NO: 2064635 - RNA, 19 nt, Homo sapiens
  misc_RNA (1)...(19): siRNA sense strand
cagaagaccugccugaucu

SEQ ID NO: 2064636 - RNA, 19 nt, Homo sapiens
  misc_RNA (1)...(19): siRNA sense strand
cagaaaugauugcacuauu

SEQ ID NO: 2064637 - RNA, 19 nt, Homo sapiens
  misc_RNA (1)...(19): siRNA sense strand
ugaagaaacuugguaaucu

SEQ ID NO: 2064638 - RNA, 19 nt, Homo sapiens
  misc_RNA (1)...(19): siRNA sense strand
caagagcacugaagauacu

SEQ ID NO: 2064639 - RNA, 19 nt, Homo sapiens
  misc_RNA (1)...(19): siRNA sense strand
gaaagucaagcccaucuau

SEQ ID NO: 2064640 - RNA, 19 nt, Homo sapiens
  misc_RNA (1)...(19): siRNA sense strand
ggcaagagcacugaagaua

SEQ ID NO: 2064641 - RNA, 19 nt, Homo sapiens
  misc_RNA (1)...(19): siRNA sense strand
cuauggagcucucacaugu

SEQ ID NO: 2064642 - RNA, 19 nt, Homo sapiens
  misc_RNA (1)...(19): siRNA sense strand
gaacuucgaaugaacuaca

SEQ ID NO: 2064643 - RNA, 19 nt, Homo sapiens
  misc_RNA (1)...(19): siRNA sense strand
ccagauggcugucauucag

SEQ ID NO: 2064644 - RNA, 19 nt, Homo sapiens
  misc_RNA (1)...(19): siRNA sense strand
augcaaagguucucugcua

SEQ ID NO: 2064645 - RNA, 19 nt, Homo sapiens
  misc_RNA (1)...(19): siRNA sense strand
ggagagagacagcuuguac

SEQ ID NO: 2064646 - RNA, 19 nt, Homo sapiens
  misc_RNA (1)...(19): siRNA sense strand
gcagaaaugauugcacuau

SEQ ID NO: 2064647 - RNA, 19 nt, Homo sapiens
  misc_RNA (1)...(19): siRNA sense strand
gcccauugacuauuacuuu

SEQ ID NO: 2064648 - RNA, 19 nt, Homo sapiens
  misc_RNA (1)...(19): siRNA sense strand
cagcccaucuuucugaaug

SEQ ID NO: 2064649 - RNA, 19 nt, Homo sapiens
  misc_RNA (1)...(19): siRNA sense strand
caaccagcccgacuccuuu

SEQ ID NO: 2064650 - RNA, 19 nt, Homo sapiens
  misc_RNA (1)...(19): siRNA sense strand
gaggagcuuuccagaaucu

SEQ ID NO: 2064651 - RNA, 19 nt, Homo sapiens
  misc_RNA (1)...(19): siRNA sense strand
gcaaagguucucugcuaga

SEQ ID NO: 2064652 - RNA, 19 nt, Homo sapiens
  misc_RNA (1)...(19): siRNA sense strand
ggaauuccugugcaugaaa

SEQ ID NO: 2064653 - RNA, 19 nt, Homo sapiens
  misc_RNA (1)...(19): siRNA sense strand
cgaagaaggccaguuguau

SEQ ID NO: 2064654 - RNA, 19 nt, Homo sapiens
  misc_RNA (1)...(19): siRNA sense strand
gaauuccugugcaugaaag

SEQ ID NO: 2064655 - RNA, 19 nt, Homo sapiens
  misc_RNA (1)...(19): siRNA sense strand
cgucuacccugucucucua

SEQ ID NO: 2064656 - RNA, 19 nt, Homo sapiens
  misc_RNA (1)...(19): siRNA sense strand
ggacaugcguuuggagacu

SEQ ID NO: 2064657 - RNA, 19 nt, Homo sapiens
  misc_RNA (1)...(19): siRNA sense strand
ccgcugaccuuaaagacau

SEQ ID NO: 2064658 - RNA, 19 nt, Homo sapiens
  misc_RNA (1)...(19): siRNA sense strand
ggaaagucaagcccaucua

SEQ ID NO: 2064659 - RNA, 19 nt, Homo sapiens
  misc_RNA (1)...(19): siRNA sense strand
gcaagagcacugaagauac

SEQ ID NO: 2064660 - RNA, 19 nt, Homo sapiens
  misc_RNA (1)...(19): siRNA sense strand
aagagccgcugaagggaaa

SEQ ID NO: 2064661 - RNA, 19 nt, Homo sapiens
  misc_RNA (1)...(19): siRNA sense strand
aagucaagcccaucuauuu

SEQ ID NO: 2064662 - RNA, 19 nt, Homo sapiens
  misc_RNA (1)...(19): siRNA sense strand
gaaugaacuacaucaagga

SEQ ID NO: 2064663 - RNA, 19 nt, Homo sapiens
  misc_RNA (1)...(19): siRNA sense strand
gcacaagucccggauguac

SEQ ID NO: 2064664 - RNA, 19 nt, Homo sapiens
  misc_RNA (1)...(19): siRNA sense strand
cugcuccgcugaccuuaaa

SEQ ID NO: 2064665 - RNA, 19 nt, Homo sapiens
  misc_RNA (1)...(19): siRNA sense strand
ucggaaauguuaugaagca

SEQ ID NO: 2064666 - RNA, 19 nt, Homo sapiens
  misc_RNA (1)...(19): siRNA sense strand
agauggcugucauucagua

SEQ ID NO: 2064667 - RNA, 19 nt, Homo sapiens
  misc_RNA (1)...(19): siRNA sense strand
gaaacuacaggaggaagga

SEQ ID NO: 2064668 - RNA, 19 nt, Homo sapiens
  misc_RNA (1)...(19): siRNA sense strand
gccaaggaguuguguaagg

SEQ ID NO: 2064669 - RNA, 19 nt, Homo sapiens
  misc_RNA (1)...(19): siRNA sense strand
gcuaaucaagucacacaug

SEQ ID NO: 2064670 - RNA, 19 nt, Homo sapiens
  misc_RNA (1)...(19): siRNA sense strand
ccgaagaaggccaguugua

SEQ ID NO: 2064671 - RNA, 19 nt, Homo sapiens
  misc_RNA (1)...(19): siRNA sense strand
caagugcccaagauccuuu

SEQ ID NO: 2064672 - RNA, 19 nt, Homo sapiens
  misc_RNA (1)...(19): siRNA sense strand
ggaaaugauggcagagauc

SEQ ID NO: 2064673 - RNA, 19 nt, Homo sapiens
  misc_RNA (1)...(19): siRNA sense strand
ugaacuacaucaaggaacu

SEQ ID NO: 2064674 - RNA, 19 nt, Homo sapiens
  misc_RNA (1)...(19): siRNA sense strand
uugaugaacuucgaaugaa

SEQ ID NO: 2064675 - RNA, 19 nt, Homo sapiens
  misc_RNA (1)...(19): siRNA sense strand
cuccaaggacaauuacuua

SEQ ID NO: 2064676 - RNA, 19 nt, Homo sapiens
  misc_RNA (1)...(19): siRNA sense strand
gaaugucagcccaucuuuc

SEQ ID NO: 2064677 - RNA, 19 nt, Homo sapiens
  misc_RNA (1)...(19): siRNA sense strand
ccagaagaccugccugauc

SEQ ID NO: 2064678 - RNA, 19 nt, Homo sapiens
  misc_RNA (1)...(19): siRNA sense strand
ggagcucucacauguggaa

SEQ ID NO: 2064679 - RNA, 19 nt, Homo sapiens
  misc_RNA (1)...(19): siRNA sense strand
ggcgauccuucaccaaugu

SEQ ID NO: 2064680 - RNA, 19 nt, Homo sapiens
  misc_RNA (1)...(19): siRNA sense strand
ugagccagguguagugugu

SEQ ID NO: 2064681 - RNA, 19 nt, Homo sapiens
  misc_RNA (1)...(19): siRNA sense strand
cccggaagcugaagaaacu

SEQ ID NO: 2064682 - RNA, 19 nt, Homo sapiens
  misc_RNA (1)...(19): siRNA sense strand
auugauaaauuccgaagga

SEQ ID NO: 2064683 - RNA, 19 nt, Homo sapiens
  misc_RNA (1)...(19): siRNA sense strand
cggaaaugauggcagagau

SEQ ID NO: 2064684 - RNA, 19 nt, Homo sapiens
  misc_RNA (1)...(19): siRNA sense strand
gcuaccugguccuggauga

SEQ ID NO: 2064685 - RNA, 19 nt, Homo sapiens
  misc_RNA (1)...(19): siRNA sense strand
caaagguucucugcuagac

SEQ ID NO: 2064686 - RNA, 19 nt, Homo sapiens
  misc_RNA (1)...(19): siRNA sense strand
uggagaacccgcuggacua

SEQ ID NO: 2064687 - RNA, 19 nt, Homo sapiens
  misc_RNA (1)...(19): siRNA sense strand
gaagaccugccugaucugu

SEQ ID NO: 2064688 - RNA, 19 nt, Homo sapiens
  misc_RNA (1)...(19): siRNA sense strand
cagccaguguguccgaaug

SEQ ID NO: 2064689 - RNA, 19 nt, Homo sapiens
  misc_RNA (1)...(19): siRNA sense strand
ggauguacagccagugugu

SEQ ID NO: 2064690 - RNA, 19 nt, Homo sapiens
  misc_RNA (1)...(19): siRNA sense strand
ggauggggcucaugguguu

SEQ ID NO: 2064691 - RNA, 19 nt, Homo sapiens
  misc_RNA (1)...(19): siRNA sense strand
cgaggagcuuuccagaauc

SEQ ID NO: 2064692 - RNA, 19 nt, Homo sapiens
  misc_RNA (1)...(19): siRNA sense strand
aaagucaagcccaucuauu

SEQ ID NO: 2064693 - RNA, 19 nt, Homo sapiens
  misc_RNA (1)...(19): siRNA sense strand
gcaagugcccaagauccuu

SEQ ID NO: 2064694 - RNA, 19 nt, Homo sapiens
  misc_RNA (1)...(19): siRNA sense strand
gagagagacagcuuguaca

SEQ ID NO: 2064695 - RNA, 19 nt, Homo sapiens
  misc_RNA (1)...(19): siRNA sense strand
ucgcgacuacuacaacuuu

SEQ ID NO: 2064696 - RNA, 19 nt, Homo sapiens
  misc_RNA (1)...(19): siRNA sense strand
gaucguaucauugcaugca

SEQ ID NO: 2064697 - RNA, 19 nt, Homo sapiens
  misc_RNA (1)...(19): siRNA sense strand
cccauugacuauuacuuuc

SEQ ID NO: 2064698 - RNA, 19 nt, Homo sapiens
  misc_RNA (1)...(19): siRNA sense strand
gaccauguuuugcccauug

SEQ ID NO: 2064699 - RNA, 19 nt, Homo sapiens
  misc_RNA (1)...(19): siRNA sense strand
gcucaagacgcuucuacca

SEQ ID NO: 2064700 - RNA, 19 nt, Homo sapiens
  misc_RNA (1)...(19): siRNA sense strand
uggcgauccuucaccaaug

SEQ ID NO: 2064701 - RNA, 19 nt, Homo sapiens
  misc_RNA (1)...(19): siRNA sense strand
acacguggacgaccagaug

SEQ ID NO: 2064702 - RNA, 19 nt, Homo sapiens
  misc_RNA (1)...(19): siRNA sense strand
uugguaaucugaaacuaca

SEQ ID NO: 2064703 - RNA, 19 nt, Homo sapiens
  misc_RNA (1)...(19): siRNA sense strand
gagcgugcgcgaagugauc

SEQ ID NO: 2064704 - RNA, 19 nt, Homo sapiens
  misc_RNA (1)...(19): siRNA sense strand
ucucuagccucaaugaacu

SEQ ID NO: 2064705 - RNA, 19 nt, Homo sapiens
  misc_RNA (1)...(19): siRNA sense strand
ugaaugucagcccaucuuu

SEQ ID NO: 2064706 - RNA, 19 nt, Homo sapiens
  misc_RNA (1)...(19): siRNA sense strand
acacauugaaggcuaugaa

SEQ ID NO: 2064707 - RNA, 19 nt, Homo sapiens
  misc_RNA (1)...(19): siRNA sense strand
cugaagggaaacagaagua

SEQ ID NO: 2064708 - RNA, 19 nt, Homo sapiens
  misc_RNA (1)...(19): siRNA sense strand
gauagcuacuccggaccuu

SEQ ID NO: 2064709 - RNA, 19 nt, Homo sapiens
  misc_RNA (1)...(19): siRNA sense strand
cagucccacuugugucaaa

SEQ ID NO: 2064710 - RNA, 19 nt, Homo sapiens
  misc_RNA (1)...(19): siRNA sense strand
cacuugaacugccgucuac

SEQ ID NO: 2064711 - RNA, 19 nt, Homo sapiens
  misc_RNA (1)...(19): siRNA sense strand
cgacuucaccgcaccugau

SEQ ID NO: 2064712 - RNA, 19 nt, Homo sapiens
  misc_RNA (1)...(19): siRNA sense strand
gaugaggaacagcaaccuu

SEQ ID NO: 2064713 - RNA, 19 nt, Homo sapiens
  misc_RNA (1)...(19): siRNA sense strand
gaccagauggcugucauuc

SEQ ID NO: 2064714 - RNA, 19 nt, Homo sapiens
  misc_RNA (1)...(19): siRNA sense strand
ccaaggacaauuacuuagg

SEQ ID NO: 2064715 - RNA, 19 nt, Homo sapiens
  misc_RNA (1)...(19): siRNA sense strand
uuugaugaacuucgaauga

SEQ ID NO: 2064716 - RNA, 19 nt, Homo sapiens
  misc_RNA (1)...(19): siRNA sense strand
cuucgaccauuucugacaa

SEQ ID NO: 2064717 - RNA, 19 nt, Homo sapiens
  misc_RNA (1)...(19): siRNA sense strand
gcuucugggugucacuaug

SEQ ID NO: 2064718 - RNA, 19 nt, Homo sapiens
  misc_RNA (1)...(19): siRNA sense strand
gagcccggaagcugaagaa

SEQ ID NO: 2064719 - RNA, 19 nt, Homo sapiens
  misc_RNA (1)...(19): siRNA sense strand
acuccaggaugcucuacuu

SEQ ID NO: 2064720 - RNA, 19 nt, Homo sapiens
  misc_RNA (1)...(19): siRNA sense strand
aagaaacuugguaaucuga

SEQ ID NO: 2064721 - RNA, 19 nt, Homo sapiens
  misc_RNA (1)...(19): siRNA sense strand
gagagagcugcaucaguuc

SEQ ID NO: 2064722 - RNA, 19 nt, Homo sapiens
  misc_RNA (1)...(19): siRNA sense strand
gcagcagggugaggauggu

SEQ ID NO: 2064723 - RNA, 19 nt, Homo sapiens
  misc_RNA (1)...(19): siRNA sense strand
gugcuggacacgacaacaa

SEQ ID NO: 2064724 - RNA, 19 nt, Homo sapiens
  misc_RNA (1)...(19): siRNA sense strand
caacccagaagcugacagu

SEQ ID NO: 2064725 - RNA, 19 nt, Homo sapiens
  misc_RNA (1)...(19): siRNA sense strand
ggagaacaguggcuuugaa

SEQ ID NO: 2064726 - RNA, 19 nt, Homo sapiens
  misc_RNA (1)...(19): siRNA sense strand
ugaaugaacuccaccuaga

SEQ ID NO: 2064727 - RNA, 19 nt, Homo sapiens
  misc_RNA (1)...(19): siRNA sense strand
ugaagucugugcccaaaga

SEQ ID NO: 2064728 - RNA, 19 nt, Homo sapiens
  misc_RNA (1)...(19): siRNA sense strand
ccaacaacaucaccaaagu

SEQ ID NO: 2064729 - RNA, 19 nt, Homo sapiens
  misc_RNA (1)...(19): siRNA sense strand
gcaucagccucuucaacaa

SEQ ID NO: 2064730 - RNA, 19 nt, Homo sapiens
  misc_RNA (1)...(19): siRNA sense strand
ccaccuagaccacaacaaa

SEQ ID NO: 2064731 - RNA, 19 nt, Homo sapiens
  misc_RNA (1)...(19): siRNA sense strand
uaucugcacuccaacaaca

SEQ ID NO: 2064732 - RNA, 19 nt, Homo sapiens
  misc_RNA (1)...(19): siRNA sense strand
ccgcaaggaugacuucaag

SEQ ID NO: 2064733 - RNA, 19 nt, Homo sapiens
  misc_RNA (1)...(19): siRNA sense strand
ggaacccacuggagaacag

SEQ ID NO: 2064734 - RNA, 19 nt, Homo sapiens
  misc_RNA (1)...(19): siRNA sense strand
gaacaguggcuuugaaccu

SEQ ID NO: 2064735 - RNA, 19 nt, Homo sapiens
  misc_RNA (1)...(19): siRNA sense strand
gaugaacgaugaggaagcu

SEQ ID NO: 2064736 - RNA, 19 nt, Homo sapiens
  misc_RNA (1)...(19): siRNA sense strand
caacaacaucaccaaagug

SEQ ID NO: 2064737 - RNA, 19 nt, Homo sapiens
  misc_RNA (1)...(19): siRNA sense strand
aaagagaucuccccugaca

SEQ ID NO: 2064738 - RNA, 19 nt, Homo sapiens
  misc_RNA (1)...(19): siRNA sense strand
ggacuucacccuggacgau

SEQ ID NO: 2064739 - RNA, 19 nt, Homo sapiens
  misc_RNA (1)...(19): siRNA sense strand
ggcaucagccucuucaaca

SEQ ID NO: 2064740 - RNA, 19 nt, Homo sapiens
  misc_RNA (1)...(19): siRNA sense strand
ucccugagacccugaauga

SEQ ID NO: 2064741 - RNA, 19 nt, Homo sapiens
  misc_RNA (1)...(19): siRNA sense strand
caugaugaacgaugaggaa

SEQ ID NO: 2064742 - RNA, 19 nt, Homo sapiens
  misc_RNA (1)...(19): siRNA sense strand
ugcagaagcucuacaucuc

SEQ ID NO: 2064743 - RNA, 19 nt, Homo sapiens
  misc_RNA (1)...(19): siRNA sense strand
ucugaagucugugcccaaa

SEQ ID NO: 2064744 - RNA, 19 nt, Homo sapiens
  misc_RNA (1)...(19): siRNA sense strand
gcgggaacccacuggagaa

SEQ ID NO: 2064745 - RNA, 19 nt, Homo sapiens
  misc_RNA (1)...(19): siRNA sense strand
ucuccgagcuccgcaagga

SEQ ID NO: 2064746 - RNA, 19 nt, Homo sapiens
  misc_RNA (1)...(19): siRNA sense strand
ucgauggccugaagcucaa

SEQ ID NO: 2064747 - RNA, 19 nt, Homo sapiens
  misc_RNA (1)...(19): siRNA sense strand
gaaugaacuccaccuagac

SEQ ID NO: 2064748 - RNA, 19 nt, Homo sapiens
  misc_RNA (1)...(19): siRNA sense strand
gccugaagcucaacuaccu

SEQ ID NO: 2064749 - RNA, 19 nt, Homo sapiens
  misc_RNA (1)...(19): siRNA sense strand
gagaacaguggcuuugaac

SEQ ID NO: 2064750 - RNA, 19 nt, Homo sapiens
  misc_RNA (1)...(19): siRNA sense strand
ccaaagugggugucaacga

SEQ ID NO: 2064751 - RNA, 19 nt, Homo sapiens
  misc_RNA (1)...(19): siRNA sense strand
ggacccggacucugucaca

SEQ ID NO: 2064752 - RNA, 19 nt, Homo sapiens
  misc_RNA (1)...(19): siRNA sense strand
caacuaccugcgcaucuca

SEQ ID NO: 2064753 - RNA, 19 nt, Homo sapiens
  misc_RNA (1)...(19): siRNA sense strand
ugacuggcauccccaaaga

SEQ ID NO: 2064754 - RNA, 19 nt, Homo sapiens
  misc_RNA (1)...(19): siRNA sense strand
cccaaagaccucccugaga

SEQ ID NO: 2064755 - RNA, 19 nt, Homo sapiens
  misc_RNA (1)...(19): siRNA sense strand
ucaacuaccugcgcaucuc

SEQ ID NO: 2064756 - RNA, 19 nt, Homo sapiens
  misc_RNA (1)...(19): siRNA sense strand
ugcuggaccugcagaacaa

SEQ ID NO: 2064757 - RNA, 19 nt, Homo sapiens
  misc_RNA (1)...(19): siRNA sense strand
ugaacaacaagaucuccaa

SEQ ID NO: 2064758 - RNA, 19 nt, Homo sapiens
  misc_RNA (1)...(19): siRNA sense strand
ccugagacccugaaugaac

SEQ ID NO: 2064759 - RNA, 19 nt, Homo sapiens
  misc_RNA (1)...(19): siRNA sense strand
caacggcaucagccucuuc

SEQ ID NO: 2064760 - RNA, 19 nt, Homo sapiens
  misc_RNA (1)...(19): siRNA sense strand
ccagcgaguucaagaagaa

SEQ ID NO: 2064761 - RNA, 19 nt, Homo sapiens
  misc_RNA (1)...(19): siRNA sense strand
ggacaccuccuggcuauug

SEQ ID NO: 2064762 - RNA, 19 nt, Homo sapiens
  misc_RNA (1)...(19): siRNA sense strand
ccacgacccucuuugucuu

SEQ ID NO: 2064763 - RNA, 19 nt, Homo sapiens
  misc_RNA (1)...(19): siRNA sense strand
ggaggaguaugaccuggau

SEQ ID NO: 2064764 - RNA, 19 nt, Homo sapiens
  misc_RNA (1)...(19): siRNA sense strand
uacacuggcugugggauua

SEQ ID NO: 2064765 - RNA, 19 nt, Homo sapiens
  misc_RNA (1)...(19): siRNA sense strand
ggagaugaagcccaaauag

SEQ ID NO: 2064766 - RNA, 19 nt, Homo sapiens
  misc_RNA (1)...(19): siRNA sense strand
gaacucgcuuggccgcaau

SEQ ID NO: 2064767 - RNA, 19 nt, Homo sapiens
  misc_RNA (1)...(19): siRNA sense strand
guacucaucuacgacuuca

SEQ ID NO: 2064768 - RNA, 19 nt, Homo sapiens
  misc_RNA (1)...(19): siRNA sense strand
cugcucagcugccagauca

SEQ ID NO: 2064769 - RNA, 19 nt, Homo sapiens
  misc_RNA (1)...(19): siRNA sense strand
caucuuccgugcccucaug

SEQ ID NO: 2064770 - RNA, 19 nt, Homo sapiens
  misc_RNA (1)...(19): siRNA sense strand
ggugaucacacacaacuuc

SEQ ID NO: 2064771 - RNA, 19 nt, Homo sapiens
  misc_RNA (1)...(19): siRNA sense strand
uaacccugcucgguccuuu

SEQ ID NO: 2064772 - RNA, 19 nt, Homo sapiens
  misc_RNA (1)...(19): siRNA sense strand
gcuccgcggugaucacaca

SEQ ID NO: 2064773 - RNA, 19 nt, Homo sapiens
  misc_RNA (1)...(19): siRNA sense strand
gacaccuccuggcuauuga

SEQ ID NO: 2064774 - RNA, 19 nt, Homo sapiens
  misc_RNA (1)...(19): siRNA sense strand
gccagcgaguucaagaaga

SEQ ID NO: 2064775 - RNA, 19 nt, Homo sapiens
  misc_RNA (1)...(19): siRNA sense strand
ucacacacaacuucagcaa

SEQ ID NO: 2064776 - RNA, 19 nt, Homo sapiens
  misc_RNA (1)...(19): siRNA sense strand
uggagaugaagcccaaaua

SEQ ID NO: 2064777 - RNA, 19 nt, Homo sapiens
  misc_RNA (1)...(19): siRNA sense strand
uuggacaccuccuggcuau

SEQ ID NO: 2064778 - RNA, 19 nt, Homo sapiens
  misc_RNA (1)...(19): siRNA sense strand
gacccucuuugucuucauc

SEQ ID NO: 2064779 - RNA, 19 nt, Homo sapiens
  misc_RNA (1)...(19): siRNA sense strand
ccuccuggcuauugacuac

SEQ ID NO: 2064780 - RNA, 19 nt, Homo sapiens
  misc_RNA (1)...(19): siRNA sense strand
uggcuguacucaucuacga

SEQ ID NO: 2064781 - RNA, 19 nt, Homo sapiens
  misc_RNA (1)...(19): siRNA sense strand
gccauccucucaggcauca

SEQ ID NO: 2064782 - RNA, 19 nt, Homo sapiens
  misc_RNA (1)...(19): siRNA sense strand
ccgcggugaucacacacaa

SEQ ID NO: 2064783 - RNA, 19 nt, Homo sapiens
  misc_RNA (1)...(19): siRNA sense strand
gccaucggccucucuguag

SEQ ID NO: 2064784 - RNA, 19 nt, Homo sapiens
  misc_RNA (1)...(19): siRNA sense strand
gccagguggaggaguauga

SEQ ID NO: 2064785 - RNA, 19 nt, Homo sapiens
  misc_RNA (1)...(19): siRNA sense strand
ccagcgaguucaagaagaa

SEQ ID NO: 2064786 - RNA, 19 nt, Homo sapiens
  misc_RNA (1)...(19): siRNA sense strand
ggacaccuccuggcuauug

SEQ ID NO: 2064787 - RNA, 19 nt, Homo sapiens
  misc_RNA (1)...(19): siRNA sense strand
ccacgacccucuuugucuu

SEQ ID NO: 2064788 - RNA, 19 nt, Homo sapiens
  misc_RNA (1)...(19): siRNA sense strand
ggaggaguaugaccuggau

SEQ ID NO: 2064789 - RNA, 19 nt, Homo sapiens
  misc_RNA (1)...(19): siRNA sense strand
uacacuggcugugggauua

SEQ ID NO: 2064790 - RNA, 19 nt, Homo sapiens
  misc_RNA (1)...(19): siRNA sense strand
ggagaugaagcccaaauag

SEQ ID NO: 2064791 - RNA, 19 nt, Homo sapiens
  misc_RNA (1)...(19): siRNA sense strand
gaacucgcuuggccgcaau

SEQ ID NO: 2064792 - RNA, 19 nt, Homo sapiens
  misc_RNA (1)...(19): siRNA sense strand
guacucaucuacgacuuca

SEQ ID NO: 2064793 - RNA, 19 nt, Homo sapiens
  misc_RNA (1)...(19): siRNA sense strand
cugcucagcugccagauca

SEQ ID NO: 2064794 - RNA, 19 nt, Homo sapiens
  misc_RNA (1)...(19): siRNA sense strand
caucuuccgugcccucaug

SEQ ID NO: 2064795 - RNA, 19 nt, Homo sapiens
  misc_RNA (1)...(19): siRNA sense strand
ggugaucacacacaacuuc

SEQ ID NO: 2064796 - RNA, 19 nt, Homo sapiens
  misc_RNA (1)...(19): siRNA sense strand
uaacccugcucgguccuuu

SEQ ID NO: 2064797 - RNA, 19 nt, Homo sapiens
  misc_RNA (1)...(19): siRNA sense strand
gcuccgcggugaucacaca

SEQ ID NO: 2064798 - RNA, 19 nt, Homo sapiens
  misc_RNA (1)...(19): siRNA sense strand
gacaccuccuggcuauuga

SEQ ID NO: 2064799 - RNA, 19 nt, Homo sapiens
  misc_RNA (1)...(19): siRNA sense strand
gccagcgaguucaagaaga

SEQ ID NO: 2064800 - RNA, 19 nt, Homo sapiens
  misc_RNA (1)...(19): siRNA sense strand
ucacacacaacuucagcaa

SEQ ID NO: 2064801 - RNA, 19 nt, Homo sapiens
  misc_RNA (1)...(19): siRNA sense strand
uggagaugaagcccaaaua

SEQ ID NO: 2064802 - RNA, 19 nt, Homo sapiens
  misc_RNA (1)...(19): siRNA sense strand
uuggacaccuccuggcuau

SEQ ID NO: 2064803 - RNA, 19 nt, Homo sapiens
  misc_RNA (1)...(19): siRNA sense strand
gacccucuuugucuucauc

SEQ ID NO: 2064804 - RNA, 19 nt, Homo sapiens
  misc_RNA (1)...(19): siRNA sense strand
ccuccuggcuauugacuac

SEQ ID NO: 2064805 - RNA, 19 nt, Homo sapiens
  misc_RNA (1)...(19): siRNA sense strand
uggcuguacucaucuacga

SEQ ID NO: 2064806 - RNA, 19 nt, Homo sapiens
  misc_RNA (1)...(19): siRNA sense strand
gccauccucucaggcauca

SEQ ID NO: 2064807 - RNA, 19 nt, Homo sapiens
  misc_RNA (1)...(19): siRNA sense strand
ccgcggugaucacacacaa

SEQ ID NO: 2064808 - RNA, 19 nt, Homo sapiens
  misc_RNA (1)...(19): siRNA sense strand
gccaucggccucucuguag

SEQ ID NO: 2064809 - RNA, 19 nt, Homo sapiens
  misc_RNA (1)...(19): siRNA sense strand
gccagguggaggaguauga

SEQ ID NO: 2064810 - RNA, 19 nt, Homo sapiens
  misc_RNA (1)...(19): siRNA sense strand
ccagcgaguucaagaagaa

SEQ ID NO: 2064811 - RNA, 19 nt, Homo sapiens
  misc_RNA (1)...(19): siRNA sense strand
ggacaccuccuggcuauug

SEQ ID NO: 2064812 - RNA, 19 nt, Homo sapiens
  misc_RNA (1)...(19): siRNA sense strand
ccacgacccucuuugucuu

SEQ ID NO: 2064813 - RNA, 19 nt, Homo sapiens
  misc_RNA (1)...(19): siRNA sense strand
ggaggaguaugaccuggau

SEQ ID NO: 2064814 - RNA, 19 nt, Homo sapiens
  misc_RNA (1)...(19): siRNA sense strand
uacacuggcugugggauua

SEQ ID NO: 2064815 - RNA, 19 nt, Homo sapiens
  misc_RNA (1)...(19): siRNA sense strand
ggagaugaagcccaaauag

SEQ ID NO: 2064816 - RNA, 19 nt, Homo sapiens
  misc_RNA (1)...(19): siRNA sense strand
gaacucgcuuggccgcaau

SEQ ID NO: 2064817 - RNA, 19 nt, Homo sapiens
  misc_RNA (1)...(19): siRNA sense strand
guacucaucuacgacuuca

SEQ ID NO: 2064818 - RNA, 19 nt, Homo sapiens
  misc_RNA (1)...(19): siRNA sense strand
cugcucagcugccagauca

SEQ ID NO: 2064819 - RNA, 19 nt, Homo sapiens
  misc_RNA (1)...(19): siRNA sense strand
caucuuccgugcccucaug

SEQ ID NO: 2064820 - RNA, 19 nt, Homo sapiens
  misc_RNA (1)...(19): siRNA sense strand
ggugaucacacacaacuuc

SEQ ID NO: 2064821 - RNA, 19 nt, Homo sapiens
  misc_RNA (1)...(19): siRNA sense strand
uaacccugcucgguccuuu

SEQ ID NO: 2064822 - RNA, 19 nt, Homo sapiens
  misc_RNA (1)...(19): siRNA sense strand
gcuccgcggugaucacaca

SEQ ID NO: 2064823 - RNA, 19 nt, Homo sapiens
  misc_RNA (1)...(19): siRNA sense strand
gacaccuccuggcuauuga

SEQ ID NO: 2064824 - RNA, 19 nt, Homo sapiens
  misc_RNA (1)...(19): siRNA sense strand
gccagcgaguucaagaaga

SEQ ID NO: 2064825 - RNA, 19 nt, Homo sapiens
  misc_RNA (1)...(19): siRNA sense strand
ucacacacaacuucagcaa

SEQ ID NO: 2064826 - RNA, 19 nt, Homo sapiens
  misc_RNA (1)...(19): siRNA sense strand
uggagaugaagcccaaaua

SEQ ID NO: 2064827 - RNA, 19 nt, Homo sapiens
  misc_RNA (1)...(19): siRNA sense strand
uuggacaccuccuggcuau

SEQ ID NO: 2064828 - RNA, 19 nt, Homo sapiens
  misc_RNA (1)...(19): siRNA sense strand
gacccucuuugucuucauc

SEQ ID NO: 2064829 - RNA, 19 nt, Homo sapiens
  misc_RNA (1)...(19): siRNA sense strand
ccuccuggcuauugacuac

SEQ ID NO: 2064830 - RNA, 19 nt, Homo sapiens
  misc_RNA (1)...(19): siRNA sense strand
uggcuguacucaucuacga

SEQ ID NO: 2064831 - RNA, 19 nt, Homo sapiens
  misc_RNA (1)...(19): siRNA sense strand
gccauccucucaggcauca

SEQ ID NO: 2064832 - RNA, 19 nt, Homo sapiens
  misc_RNA (1)...(19): siRNA sense strand
ccgcggugaucacacacaa

SEQ ID NO: 2064833 - RNA, 19 nt, Homo sapiens
  misc_RNA (1)...(19): siRNA sense strand
gccaucggccucucuguag

SEQ ID NO: 2064834 - RNA, 19 nt, Homo sapiens
  misc_RNA (1)...(19): siRNA sense strand
gccagguggaggaguauga

SEQ ID NO: 2064835 - RNA, 19 nt, Homo sapiens
  misc_RNA (1)...(19): siRNA sense strand
ccagcgaguucaagaagaa

SEQ ID NO: 2064836 - RNA, 19 nt, Homo sapiens
  misc_RNA (1)...(19): siRNA sense strand
ggacaccuccuggcuauug

SEQ ID NO: 2064837 - RNA, 19 nt, Homo sapiens
  misc_RNA (1)...(19): siRNA sense strand
ccacgacccucuuugucuu

SEQ ID NO: 2064838 - RNA, 19 nt, Homo sapiens
  misc_RNA (1)...(19): siRNA sense strand
ggaggaguaugaccuggau

SEQ ID NO: 2064839 - RNA, 19 nt, Homo sapiens
  misc_RNA (1)...(19): siRNA sense strand
uacacuggcugugggauua

SEQ ID NO: 2064840 - RNA, 19 nt, Homo sapiens
  misc_RNA (1)...(19): siRNA sense strand
ggagaugaagcccaaauag

SEQ ID NO: 2064841 - RNA, 19 nt, Homo sapiens
  misc_RNA (1)...(19): siRNA sense strand
gaacucgcuuggccgcaau

SEQ ID NO: 2064842 - RNA, 19 nt, Homo sapiens
  misc_RNA (1)...(19): siRNA sense strand
guacucaucuacgacuuca

SEQ ID NO: 2064843 - RNA, 19 nt, Homo sapiens
  misc_RNA (1)...(19): siRNA sense strand
cugcucagcugccagauca

SEQ ID NO: 2064844 - RNA, 19 nt, Homo sapiens
  misc_RNA (1)...(19): siRNA sense strand
caucuuccgugcccucaug

SEQ ID NO: 2064845 - RNA, 19 nt, Homo sapiens
  misc_RNA (1)...(19): siRNA sense strand
ggugaucacacacaacuuc

SEQ ID NO: 2064846 - RNA, 19 nt, Homo sapiens
  misc_RNA (1)...(19): siRNA sense strand
uaacccugcucgguccuuu

SEQ ID NO: 2064847 - RNA, 19 nt, Homo sapiens
  misc_RNA (1)...(19): siRNA sense strand
gcuccgcggugaucacaca

SEQ ID NO: 2064848 - RNA, 19 nt, Homo sapiens
  misc_RNA (1)...(19): siRNA sense strand
gacaccuccuggcuauuga

SEQ ID NO: 2064849 - RNA, 19 nt, Homo sapiens
  misc_RNA (1)...(19): siRNA sense strand
gccagcgaguucaagaaga

SEQ ID NO: 2064850 - RNA, 19 nt, Homo sapiens
  misc_RNA (1)...(19): siRNA sense strand
ucacacacaacuucagcaa

SEQ ID NO: 2064851 - RNA, 19 nt, Homo sapiens
  misc_RNA (1)...(19): siRNA sense strand
uggagaugaagcccaaaua

SEQ ID NO: 2064852 - RNA, 19 nt, Homo sapiens
  misc_RNA (1)...(19): siRNA sense strand
uuggacaccuccuggcuau

SEQ ID NO: 2064853 - RNA, 19 nt, Homo sapiens
  misc_RNA (1)...(19): siRNA sense strand
gacccucuuugucuucauc

SEQ ID NO: 2064854 - RNA, 19 nt, Homo sapiens
  misc_RNA (1)...(19): siRNA sense strand
ccuccuggcuauugacuac

SEQ ID NO: 2064855 - RNA, 19 nt, Homo sapiens
  misc_RNA (1)...(19): siRNA sense strand
uggcuguacucaucuacga

SEQ ID NO: 2064856 - RNA, 19 nt, Homo sapiens
  misc_RNA (1)...(19): siRNA sense strand
gccauccucucaggcauca

SEQ ID NO: 2064857 - RNA, 19 nt, Homo sapiens
  misc_RNA (1)...(19): siRNA sense strand
ccgcggugaucacacacaa

SEQ ID NO: 2064858 - RNA, 19 nt, Homo sapiens
  misc_RNA (1)...(19): siRNA sense strand
gccaucggccucucuguag

SEQ ID NO: 2064859 - RNA, 19 nt, Homo sapiens
  misc_RNA (1)...(19): siRNA sense strand
gccagguggaggaguauga

SEQ ID NO: 2064860 - RNA, 19 nt, Homo sapiens
  misc_RNA (1)...(19): siRNA sense strand
gaaauuaaguggagaccaa

SEQ ID NO: 2064861 - RNA, 19 nt, Homo sapiens
  misc_RNA (1)...(19): siRNA sense strand
gacaugacaccaacuauua

SEQ ID NO: 2064862 - RNA, 19 nt, Homo sapiens
  misc_RNA (1)...(19): siRNA sense strand
gaaacuagcagacagagaa

SEQ ID NO: 2064863 - RNA, 19 nt, Homo sapiens
  misc_RNA (1)...(19): siRNA sense strand
ugaauuaggugacuuagau

SEQ ID NO: 2064864 - RNA, 19 nt, Homo sapiens
  misc_RNA (1)...(19): siRNA sense strand
gaagagagaaccauugaau

SEQ ID NO: 2064865 - RNA, 19 nt, Homo sapiens
  misc_RNA (1)...(19): siRNA sense strand
gcagacagauguugaagag

SEQ ID NO: 2064866 - RNA, 19 nt, Homo sapiens
  misc_RNA (1)...(19): siRNA sense strand
gcacaacggcuaaugaaga

SEQ ID NO: 2064867 - RNA, 19 nt, Homo sapiens
  misc_RNA (1)...(19): siRNA sense strand
gcacagguuucucuaguag

SEQ ID NO: 2064868 - RNA, 19 nt, Homo sapiens
  misc_RNA (1)...(19): siRNA sense strand
ggacaugacaccaacuauu

SEQ ID NO: 2064869 - RNA, 19 nt, Homo sapiens
  misc_RNA (1)...(19): siRNA sense strand
agagagaaccauugaauuu

SEQ ID NO: 2064870 - RNA, 19 nt, Homo sapiens
  misc_RNA (1)...(19): siRNA sense strand
gagcacagguuucucuagu

SEQ ID NO: 2064871 - RNA, 19 nt, Homo sapiens
  misc_RNA (1)...(19): siRNA sense strand
gagagcagccgaacaacaa

SEQ ID NO: 2064872 - RNA, 19 nt, Homo sapiens
  misc_RNA (1)...(19): siRNA sense strand
ggaagaaaauggaaaagga

SEQ ID NO: 2064873 - RNA, 19 nt, Homo sapiens
  misc_RNA (1)...(19): siRNA sense strand
gaagcacaacggcuaauga

SEQ ID NO: 2064874 - RNA, 19 nt, Homo sapiens
  misc_RNA (1)...(19): siRNA sense strand
cacaacggcuaaugaagaa

SEQ ID NO: 2064875 - RNA, 19 nt, Homo sapiens
  misc_RNA (1)...(19): siRNA sense strand
aaagagagcagccgaacaa

SEQ ID NO: 2064876 - RNA, 19 nt, Homo sapiens
  misc_RNA (1)...(19): siRNA sense strand
uagcaacaguauucucauu

SEQ ID NO: 2064877 - RNA, 19 nt, Homo sapiens
  misc_RNA (1)...(19): siRNA sense strand
acaguauucucauuccuaa

SEQ ID NO: 2064878 - RNA, 19 nt, Homo sapiens
  misc_RNA (1)...(19): siRNA sense strand
gaauuaggugacuuagaua

SEQ ID NO: 2064879 - RNA, 19 nt, Homo sapiens
  misc_RNA (1)...(19): siRNA sense strand
ggaagaagaagaagaugca

SEQ ID NO: 2064880 - RNA, 19 nt, Homo sapiens
  misc_RNA (1)...(19): siRNA sense strand
gacaccaacuauuaggaaa

SEQ ID NO: 2064881 - RNA, 19 nt, Homo sapiens
  misc_RNA (1)...(19): siRNA sense strand
uggcagaggacggaaauua

SEQ ID NO: 2064882 - RNA, 19 nt, Homo sapiens
  misc_RNA (1)...(19): siRNA sense strand
gaagaaggaacaaaacaaa

SEQ ID NO: 2064883 - RNA, 19 nt, Homo sapiens
  misc_RNA (1)...(19): siRNA sense strand
ggcagaggacggaaauuaa

SEQ ID NO: 2064884 - RNA, 19 nt, Homo sapiens
  misc_RNA (1)...(19): siRNA sense strand
gcagaaacuagcagacaga

SEQ ID NO: 2064885 - RNA, 19 nt, Homo sapiens
  misc_RNA (1)...(19): siRNA sense strand
gaacaacaaaggaagaaaa

SEQ ID NO: 2064886 - RNA, 19 nt, Homo sapiens
  misc_RNA (1)...(19): siRNA sense strand
gcagaggacggaaauuaag

SEQ ID NO: 2064887 - RNA, 19 nt, Homo sapiens
  misc_RNA (1)...(19): siRNA sense strand
guggagaccaaauaacuuu

SEQ ID NO: 2064888 - RNA, 19 nt, Homo sapiens
  misc_RNA (1)...(19): siRNA sense strand
cacaagaucugccuuuuau

SEQ ID NO: 2064889 - RNA, 19 nt, Homo sapiens
  misc_RNA (1)...(19): siRNA sense strand
uaagaagagagaaccauug

SEQ ID NO: 2064890 - RNA, 19 nt, Homo sapiens
  misc_RNA (1)...(19): siRNA sense strand
uuaaguggagaccaaauaa

SEQ ID NO: 2064891 - RNA, 19 nt, Homo sapiens
  misc_RNA (1)...(19): siRNA sense strand
gaaugggaauguggcaaca

SEQ ID NO: 2064892 - RNA, 19 nt, Homo sapiens
  misc_RNA (1)...(19): siRNA sense strand
gcaacaguauucucauucc

SEQ ID NO: 2064893 - RNA, 19 nt, Homo sapiens
  misc_RNA (1)...(19): siRNA sense strand
guaccugccuagcaacagu

SEQ ID NO: 2064894 - RNA, 19 nt, Homo sapiens
  misc_RNA (1)...(19): siRNA sense strand
gauuauucaucaguuccua

SEQ ID NO: 2064895 - RNA, 19 nt, Homo sapiens
  misc_RNA (1)...(19): siRNA sense strand
gaugcacccaccaguguaa

SEQ ID NO: 2064896 - RNA, 19 nt, Homo sapiens
  misc_RNA (1)...(19): siRNA sense strand
ggaaaacucagaaaauugu

SEQ ID NO: 2064897 - RNA, 19 nt, Homo sapiens
  misc_RNA (1)...(19): siRNA sense strand
gaaccugacuauuuuaagg

SEQ ID NO: 2064898 - RNA, 19 nt, Homo sapiens
  misc_RNA (1)...(19): siRNA sense strand
guauucucauuccuaaaga

SEQ ID NO: 2064899 - RNA, 19 nt, Homo sapiens
  misc_RNA (1)...(19): siRNA sense strand
aagaagagagaaccauuga

SEQ ID NO: 2064900 - RNA, 19 nt, Homo sapiens
  misc_RNA (1)...(19): siRNA sense strand
caucacccaguuucgguua

SEQ ID NO: 2064901 - RNA, 19 nt, Homo sapiens
  misc_RNA (1)...(19): siRNA sense strand
cuacacaagaucugccuuu

SEQ ID NO: 2064902 - RNA, 19 nt, Homo sapiens
  misc_RNA (1)...(19): siRNA sense strand
ugacaccaacuauuaggaa

SEQ ID NO: 2064903 - RNA, 19 nt, Homo sapiens
  misc_RNA (1)...(19): siRNA sense strand
gcacccaccaguguaaaga

SEQ ID NO: 2064904 - RNA, 19 nt, Homo sapiens
  misc_RNA (1)...(19): siRNA sense strand
caacuggaaccugacuauu

SEQ ID NO: 2064905 - RNA, 19 nt, Homo sapiens
  misc_RNA (1)...(19): siRNA sense strand
caaaauuggugugaaacuu

SEQ ID NO: 2064906 - RNA, 19 nt, Homo sapiens
  misc_RNA (1)...(19): siRNA sense strand
gaagaaaauggaaaaggaa

SEQ ID NO: 2064907 - RNA, 19 nt, Homo sapiens
  misc_RNA (1)...(19): siRNA sense strand
ucacccaguuucgguuauu

SEQ ID NO: 2064908 - RNA, 19 nt, Homo sapiens
  misc_RNA (1)...(19): siRNA sense strand
uaacuuugccaacuacagu

SEQ ID NO: 2064909 - RNA, 19 nt, Homo sapiens
  misc_RNA (1)...(19): siRNA sense strand
ggaagcacaacggcuaaug

SEQ ID NO: 2064910 - RNA, 19 nt, Homo sapiens
  misc_RNA (1)...(19): siRNA sense strand
cagaugggagcacagguuu

SEQ ID NO: 2064911 - RNA, 19 nt, Homo sapiens
  misc_RNA (1)...(19): siRNA sense strand
aacuggaaccugacuauuu

SEQ ID NO: 2064912 - RNA, 19 nt, Homo sapiens
  misc_RNA (1)...(19): siRNA sense strand
gaacaacuggaaccugacu

SEQ ID NO: 2064913 - RNA, 19 nt, Homo sapiens
  misc_RNA (1)...(19): siRNA sense strand
aaauaacuuugccaacuac

SEQ ID NO: 2064914 - RNA, 19 nt, Homo sapiens
  misc_RNA (1)...(19): siRNA sense strand
ccagaugggagcacagguu

SEQ ID NO: 2064915 - RNA, 19 nt, Homo sapiens
  misc_RNA (1)...(19): siRNA sense strand
gagagaaccauugaauuuu

SEQ ID NO: 2064916 - RNA, 19 nt, Homo sapiens
  misc_RNA (1)...(19): siRNA sense strand
cuaagcagacagauguuga

SEQ ID NO: 2064917 - RNA, 19 nt, Homo sapiens
  misc_RNA (1)...(19): siRNA sense strand
caaugcaugggaagaagaa

SEQ ID NO: 2064918 - RNA, 19 nt, Homo sapiens
  misc_RNA (1)...(19): siRNA sense strand
aagagagaaccauugaauu

SEQ ID NO: 2064919 - RNA, 19 nt, Homo sapiens
  misc_RNA (1)...(19): siRNA sense strand
uuaagaagagagaaccauu

SEQ ID NO: 2064920 - RNA, 19 nt, Homo sapiens
  misc_RNA (1)...(19): siRNA sense strand
uaagcagacagauguugaa

SEQ ID NO: 2064921 - RNA, 19 nt, Homo sapiens
  misc_RNA (1)...(19): siRNA sense strand
aagcacaacggcuaaugaa

SEQ ID NO: 2064922 - RNA, 19 nt, Homo sapiens
  misc_RNA (1)...(19): siRNA sense strand
agagaaccauugaauuuug

SEQ ID NO: 2064923 - RNA, 19 nt, Homo sapiens
  misc_RNA (1)...(19): siRNA sense strand
caagaucugccuuuuauuc

SEQ ID NO: 2064924 - RNA, 19 nt, Homo sapiens
  misc_RNA (1)...(19): siRNA sense strand
aaacuagcagacagagaaa

SEQ ID NO: 2064925 - RNA, 19 nt, Homo sapiens
  misc_RNA (1)...(19): siRNA sense strand
acuggaaccugacuauuuu

SEQ ID NO: 2064926 - RNA, 19 nt, Homo sapiens
  misc_RNA (1)...(19): siRNA sense strand
caacaaaggaagaaaaugg

SEQ ID NO: 2064927 - RNA, 19 nt, Homo sapiens
  misc_RNA (1)...(19): siRNA sense strand
aaagaucgaaggagggaau

SEQ ID NO: 2064928 - RNA, 19 nt, Homo sapiens
  misc_RNA (1)...(19): siRNA sense strand
cacccaguuucgguuauuu

SEQ ID NO: 2064929 - RNA, 19 nt, Homo sapiens
  misc_RNA (1)...(19): siRNA sense strand
agcacagguuucucuagua

SEQ ID NO: 2064930 - RNA, 19 nt, Homo sapiens
  misc_RNA (1)...(19): siRNA sense strand
gaugggagcacagguuucu

SEQ ID NO: 2064931 - RNA, 19 nt, Homo sapiens
  misc_RNA (1)...(19): siRNA sense strand
gaaggagggaaugggaaug

SEQ ID NO: 2064932 - RNA, 19 nt, Homo sapiens
  misc_RNA (1)...(19): siRNA sense strand
cgaaggagggaaugggaau

SEQ ID NO: 2064933 - RNA, 19 nt, Homo sapiens
  misc_RNA (1)...(19): siRNA sense strand
caacaguauucucauuccu

SEQ ID NO: 2064934 - RNA, 19 nt, Homo sapiens
  misc_RNA (1)...(19): siRNA sense strand
ccaguuucgguuauuuaaa

SEQ ID NO: 2064935 - RNA, 19 nt, Homo sapiens
  misc_RNA (1)...(19): siRNA sense strand
ccaccaguguaaagaucga

SEQ ID NO: 2064936 - RNA, 19 nt, Homo sapiens
  misc_RNA (1)...(19): siRNA sense strand
cagcagaaacuagcagaca

SEQ ID NO: 2064937 - RNA, 19 nt, Homo sapiens
  misc_RNA (1)...(19): siRNA sense strand
ccuagcaacaguauucuca

SEQ ID NO: 2064938 - RNA, 19 nt, Homo sapiens
  misc_RNA (1)...(19): siRNA sense strand
auuaaguggagaccaaaua

SEQ ID NO: 2064939 - RNA, 19 nt, Homo sapiens
  misc_RNA (1)...(19): siRNA sense strand
acacaagaucugccuuuua

SEQ ID NO: 2064940 - RNA, 19 nt, Homo sapiens
  misc_RNA (1)...(19): siRNA sense strand
gaucugccuuuuauucauc

SEQ ID NO: 2064941 - RNA, 19 nt, Homo sapiens
  misc_RNA (1)...(19): siRNA sense strand
ccaaugcaugggaagaaga

SEQ ID NO: 2064942 - RNA, 19 nt, Homo sapiens
  misc_RNA (1)...(19): siRNA sense strand
gcaggaaaauaccaaugca

SEQ ID NO: 2064943 - RNA, 19 nt, Homo sapiens
  misc_RNA (1)...(19): siRNA sense strand
acaacuggaaccugacuau

SEQ ID NO: 2064944 - RNA, 19 nt, Homo sapiens
  misc_RNA (1)...(19): siRNA sense strand
cagccgaacaacaaaggaa

SEQ ID NO: 2064945 - RNA, 19 nt, Homo sapiens
  misc_RNA (1)...(19): siRNA sense strand
auucaucaguuccuaagca

SEQ ID NO: 2064946 - RNA, 19 nt, Homo sapiens
  misc_RNA (1)...(19): siRNA sense strand
ggagcacagguuucucuag

SEQ ID NO: 2064947 - RNA, 19 nt, Homo sapiens
  misc_RNA (1)...(19): siRNA sense strand
gggagcacagguuucucua

SEQ ID NO: 2064948 - RNA, 19 nt, Homo sapiens
  misc_RNA (1)...(19): siRNA sense strand
gaaauuaaguggagaccaa

SEQ ID NO: 2064949 - RNA, 19 nt, Homo sapiens
  misc_RNA (1)...(19): siRNA sense strand
gacaugacaccaacuauua

SEQ ID NO: 2064950 - RNA, 19 nt, Homo sapiens
  misc_RNA (1)...(19): siRNA sense strand
gaaacuagcagacagagaa

SEQ ID NO: 2064951 - RNA, 19 nt, Homo sapiens
  misc_RNA (1)...(19): siRNA sense strand
ugaauuaggugacuuagau

SEQ ID NO: 2064952 - RNA, 19 nt, Homo sapiens
  misc_RNA (1)...(19): siRNA sense strand
gaagagagaaccauugaau

SEQ ID NO: 2064953 - RNA, 19 nt, Homo sapiens
  misc_RNA (1)...(19): siRNA sense strand
gcagacagauguugaagag

SEQ ID NO: 2064954 - RNA, 19 nt, Homo sapiens
  misc_RNA (1)...(19): siRNA sense strand
gcacaacggcuaaugaaga

SEQ ID NO: 2064955 - RNA, 19 nt, Homo sapiens
  misc_RNA (1)...(19): siRNA sense strand
gcacagguuucucuaguag

SEQ ID NO: 2064956 - RNA, 19 nt, Homo sapiens
  misc_RNA (1)...(19): siRNA sense strand
ggacaugacaccaacuauu

SEQ ID NO: 2064957 - RNA, 19 nt, Homo sapiens
  misc_RNA (1)...(19): siRNA sense strand
agagagaaccauugaauuu

SEQ ID NO: 2064958 - RNA, 19 nt, Homo sapiens
  misc_RNA (1)...(19): siRNA sense strand
gagcacagguuucucuagu

SEQ ID NO: 2064959 - RNA, 19 nt, Homo sapiens
  misc_RNA (1)...(19): siRNA sense strand
gagagcagccgaacaacaa

SEQ ID NO: 2064960 - RNA, 19 nt, Homo sapiens
  misc_RNA (1)...(19): siRNA sense strand
ggaagaaaauggaaaagga

SEQ ID NO: 2064961 - RNA, 19 nt, Homo sapiens
  misc_RNA (1)...(19): siRNA sense strand
gaagcacaacggcuaauga

SEQ ID NO: 2064962 - RNA, 19 nt, Homo sapiens
  misc_RNA (1)...(19): siRNA sense strand
cacaacggcuaaugaagaa

SEQ ID NO: 2064963 - RNA, 19 nt, Homo sapiens
  misc_RNA (1)...(19): siRNA sense strand
aaagagagcagccgaacaa

SEQ ID NO: 2064964 - RNA, 19 nt, Homo sapiens
  misc_RNA (1)...(19): siRNA sense strand
uagcaacaguauucucauu

SEQ ID NO: 2064965 - RNA, 19 nt, Homo sapiens
  misc_RNA (1)...(19): siRNA sense strand
acaguauucucauuccuaa

SEQ ID NO: 2064966 - RNA, 19 nt, Homo sapiens
  misc_RNA (1)...(19): siRNA sense strand
gaauuaggugacuuagaua

SEQ ID NO: 2064967 - RNA, 19 nt, Homo sapiens
  misc_RNA (1)...(19): siRNA sense strand
ggaagaagaagaagaugca

SEQ ID NO: 2064968 - RNA, 19 nt, Homo sapiens
  misc_RNA (1)...(19): siRNA sense strand
gacaccaacuauuaggaaa

SEQ ID NO: 2064969 - RNA, 19 nt, Homo sapiens
  misc_RNA (1)...(19): siRNA sense strand
uggcagaggacggaaauua

SEQ ID NO: 2064970 - RNA, 19 nt, Homo sapiens
  misc_RNA (1)...(19): siRNA sense strand
gaagaaggaacaaaacaaa

SEQ ID NO: 2064971 - RNA, 19 nt, Homo sapiens
  misc_RNA (1)...(19): siRNA sense strand
ggcagaggacggaaauuaa

SEQ ID NO: 2064972 - RNA, 19 nt, Homo sapiens
  misc_RNA (1)...(19): siRNA sense strand
gcagaaacuagcagacaga

SEQ ID NO: 2064973 - RNA, 19 nt, Homo sapiens
  misc_RNA (1)...(19): siRNA sense strand
gaacaacaaaggaagaaaa

SEQ ID NO: 2064974 - RNA, 19 nt, Homo sapiens
  misc_RNA (1)...(19): siRNA sense strand
gcagaggacggaaauuaag

SEQ ID NO: 2064975 - RNA, 19 nt, Homo sapiens
  misc_RNA (1)...(19): siRNA sense strand
guggagaccaaauaacuuu

SEQ ID NO: 2064976 - RNA, 19 nt, Homo sapiens
  misc_RNA (1)...(19): siRNA sense strand
cacaagaucugccuuuuau

SEQ ID NO: 2064977 - RNA, 19 nt, Homo sapiens
  misc_RNA (1)...(19): siRNA sense strand
uaagaagagagaaccauug

SEQ ID NO: 2064978 - RNA, 19 nt, Homo sapiens
  misc_RNA (1)...(19): siRNA sense strand
uuaaguggagaccaaauaa

SEQ ID NO: 2064979 - RNA, 19 nt, Homo sapiens
  misc_RNA (1)...(19): siRNA sense strand
gaaugggaauguggcaaca

SEQ ID NO: 2064980 - RNA, 19 nt, Homo sapiens
  misc_RNA (1)...(19): siRNA sense strand
gcaacaguauucucauucc

SEQ ID NO: 2064981 - RNA, 19 nt, Homo sapiens
  misc_RNA (1)...(19): siRNA sense strand
guaccugccuagcaacagu

SEQ ID NO: 2064982 - RNA, 19 nt, Homo sapiens
  misc_RNA (1)...(19): siRNA sense strand
gauuauucaucaguuccua

SEQ ID NO: 2064983 - RNA, 19 nt, Homo sapiens
  misc_RNA (1)...(19): siRNA sense strand
gaugcacccaccaguguaa

SEQ ID NO: 2064984 - RNA, 19 nt, Homo sapiens
  misc_RNA (1)...(19): siRNA sense strand
ggaaaacucagaaaauugu

SEQ ID NO: 2064985 - RNA, 19 nt, Homo sapiens
  misc_RNA (1)...(19): siRNA sense strand
gaaccugacuauuuuaagg

SEQ ID NO: 2064986 - RNA, 19 nt, Homo sapiens
  misc_RNA (1)...(19): siRNA sense strand
guauucucauuccuaaaga

SEQ ID NO: 2064987 - RNA, 19 nt, Homo sapiens
  misc_RNA (1)...(19): siRNA sense strand
aagaagagagaaccauuga

SEQ ID NO: 2064988 - RNA, 19 nt, Homo sapiens
  misc_RNA (1)...(19): siRNA sense strand
caucacccaguuucgguua

SEQ ID NO: 2064989 - RNA, 19 nt, Homo sapiens
  misc_RNA (1)...(19): siRNA sense strand
cuacacaagaucugccuuu

SEQ ID NO: 2064990 - RNA, 19 nt, Homo sapiens
  misc_RNA (1)...(19): siRNA sense strand
ugacaccaacuauuaggaa

SEQ ID NO: 2064991 - RNA, 19 nt, Homo sapiens
  misc_RNA (1)...(19): siRNA sense strand
gcacccaccaguguaaaga

SEQ ID NO: 2064992 - RNA, 19 nt, Homo sapiens
  misc_RNA (1)...(19): siRNA sense strand
caacuggaaccugacuauu

SEQ ID NO: 2064993 - RNA, 19 nt, Homo sapiens
  misc_RNA (1)...(19): siRNA sense strand
caaaauuggugugaaacuu

SEQ ID NO: 2064994 - RNA, 19 nt, Homo sapiens
  misc_RNA (1)...(19): siRNA sense strand
gaagaaaauggaaaaggaa

SEQ ID NO: 2064995 - RNA, 19 nt, Homo sapiens
  misc_RNA (1)...(19): siRNA sense strand
ucacccaguuucgguuauu

SEQ ID NO: 2064996 - RNA, 19 nt, Homo sapiens
  misc_RNA (1)...(19): siRNA sense strand
uaacuuugccaacuacagu

SEQ ID NO: 2064997 - RNA, 19 nt, Homo sapiens
  misc_RNA (1)...(19): siRNA sense strand
ggaagcacaacggcuaaug

SEQ ID NO: 2064998 - RNA, 19 nt, Homo sapiens
  misc_RNA (1)...(19): siRNA sense strand
cagaugggagcacagguuu

SEQ ID NO: 2064999 - RNA, 19 nt, Homo sapiens
  misc_RNA (1)...(19): siRNA sense strand
aacuggaaccugacuauuu

SEQ ID NO: 2065000 - RNA, 19 nt, Homo sapiens
  misc_RNA (1)...(19): siRNA sense strand
gaacaacuggaaccugacu

SEQ ID NO: 2065001 - RNA, 19 nt, Homo sapiens
  misc_RNA (1)...(19): siRNA sense strand
aaauaacuuugccaacuac

SEQ ID NO: 2065002 - RNA, 19 nt, Homo sapiens
  misc_RNA (1)...(19): siRNA sense strand
ccagaugggagcacagguu

SEQ ID NO: 2065003 - RNA, 19 nt, Homo sapiens
  misc_RNA (1)...(19): siRNA sense strand
gagagaaccauugaauuuu

SEQ ID NO: 2065004 - RNA, 19 nt, Homo sapiens
  misc_RNA (1)...(19): siRNA sense strand
cuaagcagacagauguuga

SEQ ID NO: 2065005 - RNA, 19 nt, Homo sapiens
  misc_RNA (1)...(19): siRNA sense strand
caaugcaugggaagaagaa

SEQ ID NO: 2065006 - RNA, 19 nt, Homo sapiens
  misc_RNA (1)...(19): siRNA sense strand
aagagagaaccauugaauu

SEQ ID NO: 2065007 - RNA, 19 nt, Homo sapiens
  misc_RNA (1)...(19): siRNA sense strand
uuaagaagagagaaccauu

SEQ ID NO: 2065008 - RNA, 19 nt, Homo sapiens
  misc_RNA (1)...(19): siRNA sense strand
uaagcagacagauguugaa

SEQ ID NO: 2065009 - RNA, 19 nt, Homo sapiens
  misc_RNA (1)...(19): siRNA sense strand
aagcacaacggcuaaugaa

SEQ ID NO: 2065010 - RNA, 19 nt, Homo sapiens
  misc_RNA (1)...(19): siRNA sense strand
agagaaccauugaauuuug

SEQ ID NO: 2065011 - RNA, 19 nt, Homo sapiens
  misc_RNA (1)...(19): siRNA sense strand
caagaucugccuuuuauuc

SEQ ID NO: 2065012 - RNA, 19 nt, Homo sapiens
  misc_RNA (1)...(19): siRNA sense strand
aaacuagcagacagagaaa

SEQ ID NO: 2065013 - RNA, 19 nt, Homo sapiens
  misc_RNA (1)...(19): siRNA sense strand
acuggaaccugacuauuuu

SEQ ID NO: 2065014 - RNA, 19 nt, Homo sapiens
  misc_RNA (1)...(19): siRNA sense strand
caacaaaggaagaaaaugg

SEQ ID NO: 2065015 - RNA, 19 nt, Homo sapiens
  misc_RNA (1)...(19): siRNA sense strand
aaagaucgaaggagggaau

SEQ ID NO: 2065016 - RNA, 19 nt, Homo sapiens
  misc_RNA (1)...(19): siRNA sense strand
cacccaguuucgguuauuu

SEQ ID NO: 2065017 - RNA, 19 nt, Homo sapiens
  misc_RNA (1)...(19): siRNA sense strand
agcacagguuucucuagua

SEQ ID NO: 2065018 - RNA, 19 nt, Homo sapiens
  misc_RNA (1)...(19): siRNA sense strand
gaugggagcacagguuucu

SEQ ID NO: 2065019 - RNA, 19 nt, Homo sapiens
  misc_RNA (1)...(19): siRNA sense strand
gaaggagggaaugggaaug

SEQ ID NO: 2065020 - RNA, 19 nt, Homo sapiens
  misc_RNA (1)...(19): siRNA sense strand
cgaaggagggaaugggaau

SEQ ID NO: 2065021 - RNA, 19 nt, Homo sapiens
  misc_RNA (1)...(19): siRNA sense strand
caacaguauucucauuccu

SEQ ID NO: 2065022 - RNA, 19 nt, Homo sapiens
  misc_RNA (1)...(19): siRNA sense strand
ccaguuucgguuauuuaaa

SEQ ID NO: 2065023 - RNA, 19 nt, Homo sapiens
  misc_RNA (1)...(19): siRNA sense strand
ccaccaguguaaagaucga

SEQ ID NO: 2065024 - RNA, 19 nt, Homo sapiens
  misc_RNA (1)...(19): siRNA sense strand
cagcagaaacuagcagaca

SEQ ID NO: 2065025 - RNA, 19 nt, Homo sapiens
  misc_RNA (1)...(19): siRNA sense strand
ccuagcaacaguauucuca

SEQ ID NO: 2065026 - RNA, 19 nt, Homo sapiens
  misc_RNA (1)...(19): siRNA sense strand
auuaaguggagaccaaaua

SEQ ID NO: 2065027 - RNA, 19 nt, Homo sapiens
  misc_RNA (1)...(19): siRNA sense strand
acacaagaucugccuuuua

SEQ ID NO: 2065028 - RNA, 19 nt, Homo sapiens
  misc_RNA (1)...(19): siRNA sense strand
gaucugccuuuuauucauc

SEQ ID NO: 2065029 - RNA, 19 nt, Homo sapiens
  misc_RNA (1)...(19): siRNA sense strand
ccaaugcaugggaagaaga

SEQ ID NO: 2065030 - RNA, 19 nt, Homo sapiens
  misc_RNA (1)...(19): siRNA sense strand
gcaggaaaauaccaaugca

SEQ ID NO: 2065031 - RNA, 19 nt, Homo sapiens
  misc_RNA (1)...(19): siRNA sense strand
acaacuggaaccugacuau

SEQ ID NO: 2065032 - RNA, 19 nt, Homo sapiens
  misc_RNA (1)...(19): siRNA sense strand
cagccgaacaacaaaggaa

SEQ ID NO: 2065033 - RNA, 19 nt, Homo sapiens
  misc_RNA (1)...(19): siRNA sense strand
auucaucaguuccuaagca

SEQ ID NO: 2065034 - RNA, 19 nt, Homo sapiens
  misc_RNA (1)...(19): siRNA sense strand
ggagcacagguuucucuag

SEQ ID NO: 2065035 - RNA, 19 nt, Homo sapiens
  misc_RNA (1)...(19): siRNA sense strand
gggagcacagguuucucua

SEQ ID NO: 2065036 - RNA, 19 nt, Homo sapiens
  misc_RNA (1)...(19): siRNA sense strand
gaaauuaaguggagaccaa

SEQ ID NO: 2065037 - RNA, 19 nt, Homo sapiens
  misc_RNA (1)...(19): siRNA sense strand
gacaugacaccaacuauua

SEQ ID NO: 2065038 - RNA, 19 nt, Homo sapiens
  misc_RNA (1)...(19): siRNA sense strand
gaaacuagcagacagagaa

SEQ ID NO: 2065039 - RNA, 19 nt, Homo sapiens
  misc_RNA (1)...(19): siRNA sense strand
ugaauuaggugacuuagau

SEQ ID NO: 2065040 - RNA, 19 nt, Homo sapiens
  misc_RNA (1)...(19): siRNA sense strand
gaagagagaaccauugaau

SEQ ID NO: 2065041 - RNA, 19 nt, Homo sapiens
  misc_RNA (1)...(19): siRNA sense strand
gcagacagauguugaagag

SEQ ID NO: 2065042 - RNA, 19 nt, Homo sapiens
  misc_RNA (1)...(19): siRNA sense strand
gcacaacggcuaaugaaga

SEQ ID NO: 2065043 - RNA, 19 nt, Homo sapiens
  misc_RNA (1)...(19): siRNA sense strand
gcacagguuucucuaguag

SEQ ID NO: 2065044 - RNA, 19 nt, Homo sapiens
  misc_RNA (1)...(19): siRNA sense strand
ggacaugacaccaacuauu

SEQ ID NO: 2065045 - RNA, 19 nt, Homo sapiens
  misc_RNA (1)...(19): siRNA sense strand
agagagaaccauugaauuu

SEQ ID NO: 2065046 - RNA, 19 nt, Homo sapiens
  misc_RNA (1)...(19): siRNA sense strand
gagcacagguuucucuagu

SEQ ID NO: 2065047 - RNA, 19 nt, Homo sapiens
  misc_RNA (1)...(19): siRNA sense strand
gagagcagccgaacaacaa

SEQ ID NO: 2065048 - RNA, 19 nt, Homo sapiens
  misc_RNA (1)...(19): siRNA sense strand
ggaagaaaauggaaaagga

SEQ ID NO: 2065049 - RNA, 19 nt, Homo sapiens
  misc_RNA (1)...(19): siRNA sense strand
gaagcacaacggcuaauga

SEQ ID NO: 2065050 - RNA, 19 nt, Homo sapiens
  misc_RNA (1)...(19): siRNA sense strand
cacaacggcuaaugaagaa

SEQ ID NO: 2065051 - RNA, 19 nt, Homo sapiens
  misc_RNA (1)...(19): siRNA sense strand
aaagagagcagccgaacaa

SEQ ID NO: 2065052 - RNA, 19 nt, Homo sapiens
  misc_RNA (1)...(19): siRNA sense strand
uagcaacaguauucucauu

SEQ ID NO: 2065053 - RNA, 19 nt, Homo sapiens
  misc_RNA (1)...(19): siRNA sense strand
acaguauucucauuccuaa

SEQ ID NO: 2065054 - RNA, 19 nt, Homo sapiens
  misc_RNA (1)...(19): siRNA sense strand
gaauuaggugacuuagaua

SEQ ID NO: 2065055 - RNA, 19 nt, Homo sapiens
  misc_RNA (1)...(19): siRNA sense strand
ggaagaagaagaagaugca

SEQ ID NO: 2065056 - RNA, 19 nt, Homo sapiens
  misc_RNA (1)...(19): siRNA sense strand
gacaccaacuauuaggaaa

SEQ ID NO: 2065057 - RNA, 19 nt, Homo sapiens
  misc_RNA (1)...(19): siRNA sense strand
uggcagaggacggaaauua

SEQ ID NO: 2065058 - RNA, 19 nt, Homo sapiens
  misc_RNA (1)...(19): siRNA sense strand
gaagaaggaacaaaacaaa

SEQ ID NO: 2065059 - RNA, 19 nt, Homo sapiens
  misc_RNA (1)...(19): siRNA sense strand
ggcagaggacggaaauuaa

SEQ ID NO: 2065060 - RNA, 19 nt, Homo sapiens
  misc_RNA (1)...(19): siRNA sense strand
gcagaaacuagcagacaga

SEQ ID NO: 2065061 - RNA, 19 nt, Homo sapiens
  misc_RNA (1)...(19): siRNA sense strand
gaacaacaaaggaagaaaa

SEQ ID NO: 2065062 - RNA, 19 nt, Homo sapiens
  misc_RNA (1)...(19): siRNA sense strand
gcagaggacggaaauuaag

SEQ ID NO: 2065063 - RNA, 19 nt, Homo sapiens
  misc_RNA (1)...(19): siRNA sense strand
guggagaccaaauaacuuu

SEQ ID NO: 2065064 - RNA, 19 nt, Homo sapiens
  misc_RNA (1)...(19): siRNA sense strand
cacaagaucugccuuuuau

SEQ ID NO: 2065065 - RNA, 19 nt, Homo sapiens
  misc_RNA (1)...(19): siRNA sense strand
uaagaagagagaaccauug

SEQ ID NO: 2065066 - RNA, 19 nt, Homo sapiens
  misc_RNA (1)...(19): siRNA sense strand
uuaaguggagaccaaauaa

SEQ ID NO: 2065067 - RNA, 19 nt, Homo sapiens
  misc_RNA (1)...(19): siRNA sense strand
gaaugggaauguggcaaca

SEQ ID NO: 2065068 - RNA, 19 nt, Homo sapiens
  misc_RNA (1)...(19): siRNA sense strand
gcaacaguauucucauucc

SEQ ID NO: 2065069 - RNA, 19 nt, Homo sapiens
  misc_RNA (1)...(19): siRNA sense strand
guaccugccuagcaacagu

SEQ ID NO: 2065070 - RNA, 19 nt, Homo sapiens
  misc_RNA (1)...(19): siRNA sense strand
gauuauucaucaguuccua

SEQ ID NO: 2065071 - RNA, 19 nt, Homo sapiens
  misc_RNA (1)...(19): siRNA sense strand
gaugcacccaccaguguaa

SEQ ID NO: 2065072 - RNA, 19 nt, Homo sapiens
  misc_RNA (1)...(19): siRNA sense strand
ggaaaacucagaaaauugu

SEQ ID NO: 2065073 - RNA, 19 nt, Homo sapiens
  misc_RNA (1)...(19): siRNA sense strand
gaaccugacuauuuuaagg

SEQ ID NO: 2065074 - RNA, 19 nt, Homo sapiens
  misc_RNA (1)...(19): siRNA sense strand
guauucucauuccuaaaga

SEQ ID NO: 2065075 - RNA, 19 nt, Homo sapiens
  misc_RNA (1)...(19): siRNA sense strand
aagaagagagaaccauuga

SEQ ID NO: 2065076 - RNA, 19 nt, Homo sapiens
  misc_RNA (1)...(19): siRNA sense strand
caucacccaguuucgguua

SEQ ID NO: 2065077 - RNA, 19 nt, Homo sapiens
  misc_RNA (1)...(19): siRNA sense strand
cuacacaagaucugccuuu

SEQ ID NO: 2065078 - RNA, 19 nt, Homo sapiens
  misc_RNA (1)...(19): siRNA sense strand
ugacaccaacuauuaggaa

SEQ ID NO: 2065079 - RNA, 19 nt, Homo sapiens
  misc_RNA (1)...(19): siRNA sense strand
gcacccaccaguguaaaga

SEQ ID NO: 2065080 - RNA, 19 nt, Homo sapiens
  misc_RNA (1)...(19): siRNA sense strand
caacuggaaccugacuauu

SEQ ID NO: 2065081 - RNA, 19 nt, Homo sapiens
  misc_RNA (1)...(19): siRNA sense strand
caaaauuggugugaaacuu

SEQ ID NO: 2065082 - RNA, 19 nt, Homo sapiens
  misc_RNA (1)...(19): siRNA sense strand
gaagaaaauggaaaaggaa

SEQ ID NO: 2065083 - RNA, 19 nt, Homo sapiens
  misc_RNA (1)...(19): siRNA sense strand
ucacccaguuucgguuauu

SEQ ID NO: 2065084 - RNA, 19 nt, Homo sapiens
  misc_RNA (1)...(19): siRNA sense strand
uaacuuugccaacuacagu

SEQ ID NO: 2065085 - RNA, 19 nt, Homo sapiens
  misc_RNA (1)...(19): siRNA sense strand
ggaagcacaacggcuaaug

SEQ ID NO: 2065086 - RNA, 19 nt, Homo sapiens
  misc_RNA (1)...(19): siRNA sense strand
cagaugggagcacagguuu

SEQ ID NO: 2065087 - RNA, 19 nt, Homo sapiens
  misc_RNA (1)...(19): siRNA sense strand
aacuggaaccugacuauuu

SEQ ID NO: 2065088 - RNA, 19 nt, Homo sapiens
  misc_RNA (1)...(19): siRNA sense strand
gaacaacuggaaccugacu

SEQ ID NO: 2065089 - RNA, 19 nt, Homo sapiens
  misc_RNA (1)...(19): siRNA sense strand
aaauaacuuugccaacuac

SEQ ID NO: 2065090 - RNA, 19 nt, Homo sapiens
  misc_RNA (1)...(19): siRNA sense strand
ccagaugggagcacagguu

SEQ ID NO: 2065091 - RNA, 19 nt, Homo sapiens
  misc_RNA (1)...(19): siRNA sense strand
gagagaaccauugaauuuu

SEQ ID NO: 2065092 - RNA, 19 nt, Homo sapiens
  misc_RNA (1)...(19): siRNA sense strand
cuaagcagacagauguuga

SEQ ID NO: 2065093 - RNA, 19 nt, Homo sapiens
  misc_RNA (1)...(19): siRNA sense strand
caaugcaugggaagaagaa

SEQ ID NO: 2065094 - RNA, 19 nt, Homo sapiens
  misc_RNA (1)...(19): siRNA sense strand
aagagagaaccauugaauu

SEQ ID NO: 2065095 - RNA, 19 nt, Homo sapiens
  misc_RNA (1)...(19): siRNA sense strand
uuaagaagagagaaccauu

SEQ ID NO: 2065096 - RNA, 19 nt, Homo sapiens
  misc_RNA (1)...(19): siRNA sense strand
uaagcagacagauguugaa

SEQ ID NO: 2065097 - RNA, 19 nt, Homo sapiens
  misc_RNA (1)...(19): siRNA sense strand
aagcacaacggcuaaugaa

SEQ ID NO: 2065098 - RNA, 19 nt, Homo sapiens
  misc_RNA (1)...(19): siRNA sense strand
agagaaccauugaauuuug

SEQ ID NO: 2065099 - RNA, 19 nt, Homo sapiens
  misc_RNA (1)...(19): siRNA sense strand
caagaucugccuuuuauuc

SEQ ID NO: 2065100 - RNA, 19 nt, Homo sapiens
  misc_RNA (1)...(19): siRNA sense strand
aaacuagcagacagagaaa

SEQ ID NO: 2065101 - RNA, 19 nt, Homo sapiens
  misc_RNA (1)...(19): siRNA sense strand
acuggaaccugacuauuuu

SEQ ID NO: 2065102 - RNA, 19 nt, Homo sapiens
  misc_RNA (1)...(19): siRNA sense strand
caacaaaggaagaaaaugg

SEQ ID NO: 2065103 - RNA, 19 nt, Homo sapiens
  misc_RNA (1)...(19): siRNA sense strand
aaagaucgaaggagggaau

SEQ ID NO: 2065104 - RNA, 19 nt, Homo sapiens
  misc_RNA (1)...(19): siRNA sense strand
cacccaguuucgguuauuu

SEQ ID NO: 2065105 - RNA, 19 nt, Homo sapiens
  misc_RNA (1)...(19): siRNA sense strand
agcacagguuucucuagua

SEQ ID NO: 2065106 - RNA, 19 nt, Homo sapiens
  misc_RNA (1)...(19): siRNA sense strand
gaugggagcacagguuucu

SEQ ID NO: 2065107 - RNA, 19 nt, Homo sapiens
  misc_RNA (1)...(19): siRNA sense strand
gaaggagggaaugggaaug

SEQ ID NO: 2065108 - RNA, 19 nt, Homo sapiens
  misc_RNA (1)...(19): siRNA sense strand
cgaaggagggaaugggaau

SEQ ID NO: 2065109 - RNA, 19 nt, Homo sapiens
  misc_RNA (1)...(19): siRNA sense strand
caacaguauucucauuccu

SEQ ID NO: 2065110 - RNA, 19 nt, Homo sapiens
  misc_RNA (1)...(19): siRNA sense strand
ccaguuucgguuauuuaaa

SEQ ID NO: 2065111 - RNA, 19 nt, Homo sapiens
  misc_RNA (1)...(19): siRNA sense strand
ccaccaguguaaagaucga

SEQ ID NO: 2065112 - RNA, 19 nt, Homo sapiens
  misc_RNA (1)...(19): siRNA sense strand
cagcagaaacuagcagaca

SEQ ID NO: 2065113 - RNA, 19 nt, Homo sapiens
  misc_RNA (1)...(19): siRNA sense strand
ccuagcaacaguauucuca

SEQ ID NO: 2065114 - RNA, 19 nt, Homo sapiens
  misc_RNA (1)...(19): siRNA sense strand
auuaaguggagaccaaaua

SEQ ID NO: 2065115 - RNA, 19 nt, Homo sapiens
  misc_RNA (1)...(19): siRNA sense strand
acacaagaucugccuuuua

SEQ ID NO: 2065116 - RNA, 19 nt, Homo sapiens
  misc_RNA (1)...(19): siRNA sense strand
gaucugccuuuuauucauc

SEQ ID NO: 2065117 - RNA, 19 nt, Homo sapiens
  misc_RNA (1)...(19): siRNA sense strand
ccaaugcaugggaagaaga

SEQ ID NO: 2065118 - RNA, 19 nt, Homo sapiens
  misc_RNA (1)...(19): siRNA sense strand
gcaggaaaauaccaaugca

SEQ ID NO: 2065119 - RNA, 19 nt, Homo sapiens
  misc_RNA (1)...(19): siRNA sense strand
acaacuggaaccugacuau

SEQ ID NO: 2065120 - RNA, 19 nt, Homo sapiens
  misc_RNA (1)...(19): siRNA sense strand
cagccgaacaacaaaggaa

SEQ ID NO: 2065121 - RNA, 19 nt, Homo sapiens
  misc_RNA (1)...(19): siRNA sense strand
auucaucaguuccuaagca

SEQ ID NO: 2065122 - RNA, 19 nt, Homo sapiens
  misc_RNA (1)...(19): siRNA sense strand
ggagcacagguuucucuag

SEQ ID NO: 2065123 - RNA, 19 nt, Homo sapiens
  misc_RNA (1)...(19): siRNA sense strand
gggagcacagguuucucua

SEQ ID NO: 2065124 - RNA, 19 nt, Homo sapiens
  misc_RNA (1)...(19): siRNA sense strand
gaaauuaaguggagaccaa

SEQ ID NO: 2065125 - RNA, 19 nt, Homo sapiens
  misc_RNA (1)...(19): siRNA sense strand
gacaugacaccaacuauua

SEQ ID NO: 2065126 - RNA, 19 nt, Homo sapiens
  misc_RNA (1)...(19): siRNA sense strand
gaaacuagcagacagagaa

SEQ ID NO: 2065127 - RNA, 19 nt, Homo sapiens
  misc_RNA (1)...(19): siRNA sense strand
ugaauuaggugacuuagau

SEQ ID NO: 2065128 - RNA, 19 nt, Homo sapiens
  misc_RNA (1)...(19): siRNA sense strand
gaagagagaaccauugaau

SEQ ID NO: 2065129 - RNA, 19 nt, Homo sapiens
  misc_RNA (1)...(19): siRNA sense strand
gcagacagauguugaagag

SEQ ID NO: 2065130 - RNA, 19 nt, Homo sapiens
  misc_RNA (1)...(19): siRNA sense strand
gcacaacggcuaaugaaga

SEQ ID NO: 2065131 - RNA, 19 nt, Homo sapiens
  misc_RNA (1)...(19): siRNA sense strand
gcacagguuucucuaguag

SEQ ID NO: 2065132 - RNA, 19 nt, Homo sapiens
  misc_RNA (1)...(19): siRNA sense strand
ggacaugacaccaacuauu

SEQ ID NO: 2065133 - RNA, 19 nt, Homo sapiens
  misc_RNA (1)...(19): siRNA sense strand
agagagaaccauugaauuu

SEQ ID NO: 2065134 - RNA, 19 nt, Homo sapiens
  misc_RNA (1)...(19): siRNA sense strand
gagcacagguuucucuagu

SEQ ID NO: 2065135 - RNA, 19 nt, Homo sapiens
  misc_RNA (1)...(19): siRNA sense strand
gagagcagccgaacaacaa

SEQ ID NO: 2065136 - RNA, 19 nt, Homo sapiens
  misc_RNA (1)...(19): siRNA sense strand
ggaagaaaauggaaaagga

SEQ ID NO: 2065137 - RNA, 19 nt, Homo sapiens
  misc_RNA (1)...(19): siRNA sense strand
gaagcacaacggcuaauga

SEQ ID NO: 2065138 - RNA, 19 nt, Homo sapiens
  misc_RNA (1)...(19): siRNA sense strand
cacaacggcuaaugaagaa

SEQ ID NO: 2065139 - RNA, 19 nt, Homo sapiens
  misc_RNA (1)...(19): siRNA sense strand
aaagagagcagccgaacaa

SEQ ID NO: 2065140 - RNA, 19 nt, Homo sapiens
  misc_RNA (1)...(19): siRNA sense strand
uagcaacaguauucucauu

SEQ ID NO: 2065141 - RNA, 19 nt, Homo sapiens
  misc_RNA (1)...(19): siRNA sense strand
acaguauucucauuccuaa

SEQ ID NO: 2065142 - RNA, 19 nt, Homo sapiens
  misc_RNA (1)...(19): siRNA sense strand
gaauuaggugacuuagaua

SEQ ID NO: 2065143 - RNA, 19 nt, Homo sapiens
  misc_RNA (1)...(19): siRNA sense strand
ggaagaagaagaagaugca

SEQ ID NO: 2065144 - RNA, 19 nt, Homo sapiens
  misc_RNA (1)...(19): siRNA sense strand
gacaccaacuauuaggaaa

SEQ ID NO: 2065145 - RNA, 19 nt, Homo sapiens
  misc_RNA (1)...(19): siRNA sense strand
uggcagaggacggaaauua

SEQ ID NO: 2065146 - RNA, 19 nt, Homo sapiens
  misc_RNA (1)...(19): siRNA sense strand
gaagaaggaacaaaacaaa

SEQ ID NO: 2065147 - RNA, 19 nt, Homo sapiens
  misc_RNA (1)...(19): siRNA sense strand
ggcagaggacggaaauuaa

SEQ ID NO: 2065148 - RNA, 19 nt, Homo sapiens
  misc_RNA (1)...(19): siRNA sense strand
gcagaaacuagcagacaga

SEQ ID NO: 2065149 - RNA, 19 nt, Homo sapiens
  misc_RNA (1)...(19): siRNA sense strand
gaacaacaaaggaagaaaa

SEQ ID NO: 2065150 - RNA, 19 nt, Homo sapiens
  misc_RNA (1)...(19): siRNA sense strand
gcagaggacggaaauuaag

SEQ ID NO: 2065151 - RNA, 19 nt, Homo sapiens
  misc_RNA (1)...(19): siRNA sense strand
guggagaccaaauaacuuu

SEQ ID NO: 2065152 - RNA, 19 nt, Homo sapiens
  misc_RNA (1)...(19): siRNA sense strand
cacaagaucugccuuuuau

SEQ ID NO: 2065153 - RNA, 19 nt, Homo sapiens
  misc_RNA (1)...(19): siRNA sense strand
uaagaagagagaaccauug

SEQ ID NO: 2065154 - RNA, 19 nt, Homo sapiens
  misc_RNA (1)...(19): siRNA sense strand
uuaaguggagaccaaauaa

SEQ ID NO: 2065155 - RNA, 19 nt, Homo sapiens
  misc_RNA (1)...(19): siRNA sense strand
gaaugggaauguggcaaca

SEQ ID NO: 2065156 - RNA, 19 nt, Homo sapiens
  misc_RNA (1)...(19): siRNA sense strand
gcaacaguauucucauucc

SEQ ID NO: 2065157 - RNA, 19 nt, Homo sapiens
  misc_RNA (1)...(19): siRNA sense strand
guaccugccuagcaacagu

SEQ ID NO: 2065158 - RNA, 19 nt, Homo sapiens
  misc_RNA (1)...(19): siRNA sense strand
gauuauucaucaguuccua

SEQ ID NO: 2065159 - RNA, 19 nt, Homo sapiens
  misc_RNA (1)...(19): siRNA sense strand
gaugcacccaccaguguaa

SEQ ID NO: 2065160 - RNA, 19 nt, Homo sapiens
  misc_RNA (1)...(19): siRNA sense strand
ggaaaacucagaaaauugu

SEQ ID NO: 2065161 - RNA, 19 nt, Homo sapiens
  misc_RNA (1)...(19): siRNA sense strand
gaaccugacuauuuuaagg

SEQ ID NO: 2065162 - RNA, 19 nt, Homo sapiens
  misc_RNA (1)...(19): siRNA sense strand
guauucucauuccuaaaga

SEQ ID NO: 2065163 - RNA, 19 nt, Homo sapiens
  misc_RNA (1)...(19): siRNA sense strand
aagaagagagaaccauuga

SEQ ID NO: 2065164 - RNA, 19 nt, Homo sapiens
  misc_RNA (1)...(19): siRNA sense strand
caucacccaguuucgguua

SEQ ID NO: 2065165 - RNA, 19 nt, Homo sapiens
  misc_RNA (1)...(19): siRNA sense strand
cuacacaagaucugccuuu

SEQ ID NO: 2065166 - RNA, 19 nt, Homo sapiens
  misc_RNA (1)...(19): siRNA sense strand
ugacaccaacuauuaggaa

SEQ ID NO: 2065167 - RNA, 19 nt, Homo sapiens
  misc_RNA (1)...(19): siRNA sense strand
gcacccaccaguguaaaga

SEQ ID NO: 2065168 - RNA, 19 nt, Homo sapiens
  misc_RNA (1)...(19): siRNA sense strand
caacuggaaccugacuauu

SEQ ID NO: 2065169 - RNA, 19 nt, Homo sapiens
  misc_RNA (1)...(19): siRNA sense strand
caaaauuggugugaaacuu

SEQ ID NO: 2065170 - RNA, 19 nt, Homo sapiens
  misc_RNA (1)...(19): siRNA sense strand
gaagaaaauggaaaaggaa

SEQ ID NO: 2065171 - RNA, 19 nt, Homo sapiens
  misc_RNA (1)...(19): siRNA sense strand
ucacccaguuucgguuauu

SEQ ID NO: 2065172 - RNA, 19 nt, Homo sapiens
  misc_RNA (1)...(19): siRNA sense strand
uaacuuugccaacuacagu

SEQ ID NO: 2065173 - RNA, 19 nt, Homo sapiens
  misc_RNA (1)...(19): siRNA sense strand
ggaagcacaacggcuaaug

SEQ ID NO: 2065174 - RNA, 19 nt, Homo sapiens
  misc_RNA (1)...(19): siRNA sense strand
cagaugggagcacagguuu

SEQ ID NO: 2065175 - RNA, 19 nt, Homo sapiens
  misc_RNA (1)...(19): siRNA sense strand
aacuggaaccugacuauuu

SEQ ID NO: 2065176 - RNA, 19 nt, Homo sapiens
  misc_RNA (1)...(19): siRNA sense strand
gaacaacuggaaccugacu

SEQ ID NO: 2065177 - RNA, 19 nt, Homo sapiens
  misc_RNA (1)...(19): siRNA sense strand
aaauaacuuugccaacuac

SEQ ID NO: 2065178 - RNA, 19 nt, Homo sapiens
  misc_RNA (1)...(19): siRNA sense strand
ccagaugggagcacagguu

SEQ ID NO: 2065179 - RNA, 19 nt, Homo sapiens
  misc_RNA (1)...(19): siRNA sense strand
gagagaaccauugaauuuu

SEQ ID NO: 2065180 - RNA, 19 nt, Homo sapiens
  misc_RNA (1)...(19): siRNA sense strand
cuaagcagacagauguuga

SEQ ID NO: 2065181 - RNA, 19 nt, Homo sapiens
  misc_RNA (1)...(19): siRNA sense strand
caaugcaugggaagaagaa

SEQ ID NO: 2065182 - RNA, 19 nt, Homo sapiens
  misc_RNA (1)...(19): siRNA sense strand
aagagagaaccauugaauu

SEQ ID NO: 2065183 - RNA, 19 nt, Homo sapiens
  misc_RNA (1)...(19): siRNA sense strand
uuaagaagagagaaccauu

SEQ ID NO: 2065184 - RNA, 19 nt, Homo sapiens
  misc_RNA (1)...(19): siRNA sense strand
uaagcagacagauguugaa

SEQ ID NO: 2065185 - RNA, 19 nt, Homo sapiens
  misc_RNA (1)...(19): siRNA sense strand
aagcacaacggcuaaugaa

SEQ ID NO: 2065186 - RNA, 19 nt, Homo sapiens
  misc_RNA (1)...(19): siRNA sense strand
agagaaccauugaauuuug

SEQ ID NO: 2065187 - RNA, 19 nt, Homo sapiens
  misc_RNA (1)...(19): siRNA sense strand
caagaucugccuuuuauuc

SEQ ID NO: 2065188 - RNA, 19 nt, Homo sapiens
  misc_RNA (1)...(19): siRNA sense strand
aaacuagcagacagagaaa

SEQ ID NO: 2065189 - RNA, 19 nt, Homo sapiens
  misc_RNA (1)...(19): siRNA sense strand
acuggaaccugacuauuuu

SEQ ID NO: 2065190 - RNA, 19 nt, Homo sapiens
  misc_RNA (1)...(19): siRNA sense strand
caacaaaggaagaaaaugg

SEQ ID NO: 2065191 - RNA, 19 nt, Homo sapiens
  misc_RNA (1)...(19): siRNA sense strand
aaagaucgaaggagggaau

SEQ ID NO: 2065192 - RNA, 19 nt, Homo sapiens
  misc_RNA (1)...(19): siRNA sense strand
cacccaguuucgguuauuu

SEQ ID NO: 2065193 - RNA, 19 nt, Homo sapiens
  misc_RNA (1)...(19): siRNA sense strand
agcacagguuucucuagua

SEQ ID NO: 2065194 - RNA, 19 nt, Homo sapiens
  misc_RNA (1)...(19): siRNA sense strand
gaugggagcacagguuucu

SEQ ID NO: 2065195 - RNA, 19 nt, Homo sapiens
  misc_RNA (1)...(19): siRNA sense strand
gaaggagggaaugggaaug

SEQ ID NO: 2065196 - RNA, 19 nt, Homo sapiens
  misc_RNA (1)...(19): siRNA sense strand
cgaaggagggaaugggaau

SEQ ID NO: 2065197 - RNA, 19 nt, Homo sapiens
  misc_RNA (1)...(19): siRNA sense strand
caacaguauucucauuccu

SEQ ID NO: 2065198 - RNA, 19 nt, Homo sapiens
  misc_RNA (1)...(19): siRNA sense strand
ccaguuucgguuauuuaaa

SEQ ID NO: 2065199 - RNA, 19 nt, Homo sapiens
  misc_RNA (1)...(19): siRNA sense strand
ccaccaguguaaagaucga

SEQ ID NO: 2065200 - RNA, 19 nt, Homo sapiens
  misc_RNA (1)...(19): siRNA sense strand
cagcagaaacuagcagaca

SEQ ID NO: 2065201 - RNA, 19 nt, Homo sapiens
  misc_RNA (1)...(19): siRNA sense strand
ccuagcaacaguauucuca

SEQ ID NO: 2065202 - RNA, 19 nt, Homo sapiens
  misc_RNA (1)...(19): siRNA sense strand
auuaaguggagaccaaaua

SEQ ID NO: 2065203 - RNA, 19 nt, Homo sapiens
  misc_RNA (1)...(19): siRNA sense strand
acacaagaucugccuuuua

SEQ ID NO: 2065204 - RNA, 19 nt, Homo sapiens
  misc_RNA (1)...(19): siRNA sense strand
gaucugccuuuuauucauc

SEQ ID NO: 2065205 - RNA, 19 nt, Homo sapiens
  misc_RNA (1)...(19): siRNA sense strand
ccaaugcaugggaagaaga

SEQ ID NO: 2065206 - RNA, 19 nt, Homo sapiens
  misc_RNA (1)...(19): siRNA sense strand
gcaggaaaauaccaaugca

SEQ ID NO: 2065207 - RNA, 19 nt, Homo sapiens
  misc_RNA (1)...(19): siRNA sense strand
acaacuggaaccugacuau

SEQ ID NO: 2065208 - RNA, 19 nt, Homo sapiens
  misc_RNA (1)...(19): siRNA sense strand
cagccgaacaacaaaggaa

SEQ ID NO: 2065209 - RNA, 19 nt, Homo sapiens
  misc_RNA (1)...(19): siRNA sense strand
auucaucaguuccuaagca

SEQ ID NO: 2065210 - RNA, 19 nt, Homo sapiens
  misc_RNA (1)...(19): siRNA sense strand
ggagcacagguuucucuag

SEQ ID NO: 2065211 - RNA, 19 nt, Homo sapiens
  misc_RNA (1)...(19): siRNA sense strand
gggagcacagguuucucua

SEQ ID NO: 2065212 - RNA, 19 nt, Homo sapiens
  misc_RNA (1)...(19): siRNA sense strand
ggaaacccauugaagaguu

SEQ ID NO: 2065213 - RNA, 19 nt, Homo sapiens
  misc_RNA (1)...(19): siRNA sense strand
gaaacccauugaagaguug

SEQ ID NO: 2065214 - RNA, 19 nt, Homo sapiens
  misc_RNA (1)...(19): siRNA sense strand
aaaccgaugugauccuuga

SEQ ID NO: 2065215 - RNA, 19 nt, Homo sapiens
  misc_RNA (1)...(19): siRNA sense strand
uccaaagggugaccaaaug

SEQ ID NO: 2065216 - RNA, 19 nt, Homo sapiens
  misc_RNA (1)...(19): siRNA sense strand
gaaaaggaaggaacucauu

SEQ ID NO: 2065217 - RNA, 19 nt, Homo sapiens
  misc_RNA (1)...(19): siRNA sense strand
ccucaucuuucgcugugua

SEQ ID NO: 2065218 - RNA, 19 nt, Homo sapiens
  misc_RNA (1)...(19): siRNA sense strand
ccaaagggugaccaaauga

SEQ ID NO: 2065219 - RNA, 19 nt, Homo sapiens
  misc_RNA (1)...(19): siRNA sense strand
gaaaaccgaugugauccuu

SEQ ID NO: 2065220 - RNA, 19 nt, Homo sapiens
  misc_RNA (1)...(19): siRNA sense strand
ggacccuacuguaccucaa

SEQ ID NO: 2065221 - RNA, 19 nt, Homo sapiens
  misc_RNA (1)...(19): siRNA sense strand
uaacaaucaaccaacaaug

SEQ ID NO: 2065222 - RNA, 19 nt, Homo sapiens
  misc_RNA (1)...(19): siRNA sense strand
ggguggagccucaucuuuc

SEQ ID NO: 2065223 - RNA, 19 nt, Homo sapiens
  misc_RNA (1)...(19): siRNA sense strand
uguguauucucuuuggaaa

SEQ ID NO: 2065224 - RNA, 19 nt, Homo sapiens
  misc_RNA (1)...(19): siRNA sense strand
gguggagccucaucuuucg

SEQ ID NO: 2065225 - RNA, 19 nt, Homo sapiens
  misc_RNA (1)...(19): siRNA sense strand
gcuuauaacaaucaaccaa

SEQ ID NO: 2065226 - RNA, 19 nt, Homo sapiens
  misc_RNA (1)...(19): siRNA sense strand
guccaaagggugaccaaau

SEQ ID NO: 2065227 - RNA, 19 nt, Homo sapiens
  misc_RNA (1)...(19): siRNA sense strand
caaucaaccaacaauggaa

SEQ ID NO: 2065228 - RNA, 19 nt, Homo sapiens
  misc_RNA (1)...(19): siRNA sense strand
acaaucaaccaacaaugga

SEQ ID NO: 2065229 - RNA, 19 nt, Homo sapiens
  misc_RNA (1)...(19): siRNA sense strand
caucuuucgcuguguauuc

SEQ ID NO: 2065230 - RNA, 19 nt, Homo sapiens
  misc_RNA (1)...(19): siRNA sense strand
ccagaaccuugggaaacug

SEQ ID NO: 2065231 - RNA, 19 nt, Homo sapiens
  misc_RNA (1)...(19): siRNA sense strand
aaucaaccaacaauggaaa

SEQ ID NO: 2065232 - RNA, 19 nt, Homo sapiens
  misc_RNA (1)...(19): siRNA sense strand
gaaacuguggacccuacug

SEQ ID NO: 2065233 - RNA, 19 nt, Homo sapiens
  misc_RNA (1)...(19): siRNA sense strand
gacccuacuguaccucaaa

SEQ ID NO: 2065234 - RNA, 19 nt, Homo sapiens
  misc_RNA (1)...(19): siRNA sense strand
gcuguguauucucuuugga

SEQ ID NO: 2065235 - RNA, 19 nt, Homo sapiens
  misc_RNA (1)...(19): siRNA sense strand
uugaagaguugcaaaaugu

SEQ ID NO: 2065236 - RNA, 19 nt, Homo sapiens
  misc_RNA (1)...(19): siRNA sense strand
ggaaacccauugaagaguu

SEQ ID NO: 2065237 - RNA, 19 nt, Homo sapiens
  misc_RNA (1)...(19): siRNA sense strand
gaaacccauugaagaguug

SEQ ID NO: 2065238 - RNA, 19 nt, Homo sapiens
  misc_RNA (1)...(19): siRNA sense strand
aaaccgaugugauccuuga

SEQ ID NO: 2065239 - RNA, 19 nt, Homo sapiens
  misc_RNA (1)...(19): siRNA sense strand
uccaaagggugaccaaaug

SEQ ID NO: 2065240 - RNA, 19 nt, Homo sapiens
  misc_RNA (1)...(19): siRNA sense strand
gaaaaggaaggaacucauu

SEQ ID NO: 2065241 - RNA, 19 nt, Homo sapiens
  misc_RNA (1)...(19): siRNA sense strand
ccucaucuuucgcugugua

SEQ ID NO: 2065242 - RNA, 19 nt, Homo sapiens
  misc_RNA (1)...(19): siRNA sense strand
ccaaagggugaccaaauga

SEQ ID NO: 2065243 - RNA, 19 nt, Homo sapiens
  misc_RNA (1)...(19): siRNA sense strand
gaaaaccgaugugauccuu

SEQ ID NO: 2065244 - RNA, 19 nt, Homo sapiens
  misc_RNA (1)...(19): siRNA sense strand
ggacccuacuguaccucaa

SEQ ID NO: 2065245 - RNA, 19 nt, Homo sapiens
  misc_RNA (1)...(19): siRNA sense strand
uaacaaucaaccaacaaug

SEQ ID NO: 2065246 - RNA, 19 nt, Homo sapiens
  misc_RNA (1)...(19): siRNA sense strand
ggguggagccucaucuuuc

SEQ ID NO: 2065247 - RNA, 19 nt, Homo sapiens
  misc_RNA (1)...(19): siRNA sense strand
uguguauucucuuuggaaa

SEQ ID NO: 2065248 - RNA, 19 nt, Homo sapiens
  misc_RNA (1)...(19): siRNA sense strand
gguggagccucaucuuucg

SEQ ID NO: 2065249 - RNA, 19 nt, Homo sapiens
  misc_RNA (1)...(19): siRNA sense strand
gcuuauaacaaucaaccaa

SEQ ID NO: 2065250 - RNA, 19 nt, Homo sapiens
  misc_RNA (1)...(19): siRNA sense strand
guccaaagggugaccaaau

SEQ ID NO: 2065251 - RNA, 19 nt, Homo sapiens
  misc_RNA (1)...(19): siRNA sense strand
caaucaaccaacaauggaa

SEQ ID NO: 2065252 - RNA, 19 nt, Homo sapiens
  misc_RNA (1)...(19): siRNA sense strand
acaaucaaccaacaaugga

SEQ ID NO: 2065253 - RNA, 19 nt, Homo sapiens
  misc_RNA (1)...(19): siRNA sense strand
caucuuucgcuguguauuc

SEQ ID NO: 2065254 - RNA, 19 nt, Homo sapiens
  misc_RNA (1)...(19): siRNA sense strand
ccagaaccuugggaaacug

SEQ ID NO: 2065255 - RNA, 19 nt, Homo sapiens
  misc_RNA (1)...(19): siRNA sense strand
aaucaaccaacaauggaaa

SEQ ID NO: 2065256 - RNA, 19 nt, Homo sapiens
  misc_RNA (1)...(19): siRNA sense strand
gaaacuguggacccuacug

SEQ ID NO: 2065257 - RNA, 19 nt, Homo sapiens
  misc_RNA (1)...(19): siRNA sense strand
gacccuacuguaccucaaa

SEQ ID NO: 2065258 - RNA, 19 nt, Homo sapiens
  misc_RNA (1)...(19): siRNA sense strand
gcuguguauucucuuugga

SEQ ID NO: 2065259 - RNA, 19 nt, Homo sapiens
  misc_RNA (1)...(19): siRNA sense strand
uugaagaguugcaaaaugu

SEQ ID NO: 2065260 - RNA, 19 nt, Homo sapiens
  misc_RNA (1)...(19): siRNA sense strand
ggaaacccauugaagaguu

SEQ ID NO: 2065261 - RNA, 19 nt, Homo sapiens
  misc_RNA (1)...(19): siRNA sense strand
gaaacccauugaagaguug

SEQ ID NO: 2065262 - RNA, 19 nt, Homo sapiens
  misc_RNA (1)...(19): siRNA sense strand
aaaccgaugugauccuuga

SEQ ID NO: 2065263 - RNA, 19 nt, Homo sapiens
  misc_RNA (1)...(19): siRNA sense strand
uccaaagggugaccaaaug

SEQ ID NO: 2065264 - RNA, 19 nt, Homo sapiens
  misc_RNA (1)...(19): siRNA sense strand
gaaaaggaaggaacucauu

SEQ ID NO: 2065265 - RNA, 19 nt, Homo sapiens
  misc_RNA (1)...(19): siRNA sense strand
ccucaucuuucgcugugua

SEQ ID NO: 2065266 - RNA, 19 nt, Homo sapiens
  misc_RNA (1)...(19): siRNA sense strand
ccaaagggugaccaaauga

SEQ ID NO: 2065267 - RNA, 19 nt, Homo sapiens
  misc_RNA (1)...(19): siRNA sense strand
gaaaaccgaugugauccuu

SEQ ID NO: 2065268 - RNA, 19 nt, Homo sapiens
  misc_RNA (1)...(19): siRNA sense strand
ggacccuacuguaccucaa

SEQ ID NO: 2065269 - RNA, 19 nt, Homo sapiens
  misc_RNA (1)...(19): siRNA sense strand
uaacaaucaaccaacaaug

SEQ ID NO: 2065270 - RNA, 19 nt, Homo sapiens
  misc_RNA (1)...(19): siRNA sense strand
ggguggagccucaucuuuc

SEQ ID NO: 2065271 - RNA, 19 nt, Homo sapiens
  misc_RNA (1)...(19): siRNA sense strand
uguguauucucuuuggaaa

SEQ ID NO: 2065272 - RNA, 19 nt, Homo sapiens
  misc_RNA (1)...(19): siRNA sense strand
gguggagccucaucuuucg

SEQ ID NO: 2065273 - RNA, 19 nt, Homo sapiens
  misc_RNA (1)...(19): siRNA sense strand
gcuuauaacaaucaaccaa

SEQ ID NO: 2065274 - RNA, 19 nt, Homo sapiens
  misc_RNA (1)...(19): siRNA sense strand
guccaaagggugaccaaau

SEQ ID NO: 2065275 - RNA, 19 nt, Homo sapiens
  misc_RNA (1)...(19): siRNA sense strand
caaucaaccaacaauggaa

SEQ ID NO: 2065276 - RNA, 19 nt, Homo sapiens
  misc_RNA (1)...(19): siRNA sense strand
acaaucaaccaacaaugga

SEQ ID NO: 2065277 - RNA, 19 nt, Homo sapiens
  misc_RNA (1)...(19): siRNA sense strand
caucuuucgcuguguauuc

SEQ ID NO: 2065278 - RNA, 19 nt, Homo sapiens
  misc_RNA (1)...(19): siRNA sense strand
ccagaaccuugggaaacug

SEQ ID NO: 2065279 - RNA, 19 nt, Homo sapiens
  misc_RNA (1)...(19): siRNA sense strand
aaucaaccaacaauggaaa

SEQ ID NO: 2065280 - RNA, 19 nt, Homo sapiens
  misc_RNA (1)...(19): siRNA sense strand
gaaacuguggacccuacug

SEQ ID NO: 2065281 - RNA, 19 nt, Homo sapiens
  misc_RNA (1)...(19): siRNA sense strand
gacccuacuguaccucaaa

SEQ ID NO: 2065282 - RNA, 19 nt, Homo sapiens
  misc_RNA (1)...(19): siRNA sense strand
gcuguguauucucuuugga

SEQ ID NO: 2065283 - RNA, 19 nt, Homo sapiens
  misc_RNA (1)...(19): siRNA sense strand
uugaagaguugcaaaaugu

SEQ ID NO: 2065284 - RNA, 19 nt, Homo sapiens
  misc_RNA (1)...(19): siRNA sense strand
ggaaacccauugaagaguu

SEQ ID NO: 2065285 - RNA, 19 nt, Homo sapiens
  misc_RNA (1)...(19): siRNA sense strand
gaaacccauugaagaguug

SEQ ID NO: 2065286 - RNA, 19 nt, Homo sapiens
  misc_RNA (1)...(19): siRNA sense strand
aaaccgaugugauccuuga

SEQ ID NO: 2065287 - RNA, 19 nt, Homo sapiens
  misc_RNA (1)...(19): siRNA sense strand
uccaaagggugaccaaaug

SEQ ID NO: 2065288 - RNA, 19 nt, Homo sapiens
  misc_RNA (1)...(19): siRNA sense strand
gaaaaggaaggaacucauu

SEQ ID NO: 2065289 - RNA, 19 nt, Homo sapiens
  misc_RNA (1)...(19): siRNA sense strand
ccucaucuuucgcugugua

SEQ ID NO: 2065290 - RNA, 19 nt, Homo sapiens
  misc_RNA (1)...(19): siRNA sense strand
ccaaagggugaccaaauga

SEQ ID NO: 2065291 - RNA, 19 nt, Homo sapiens
  misc_RNA (1)...(19): siRNA sense strand
gaaaaccgaugugauccuu

SEQ ID NO: 2065292 - RNA, 19 nt, Homo sapiens
  misc_RNA (1)...(19): siRNA sense strand
ggacccuacuguaccucaa

SEQ ID NO: 2065293 - RNA, 19 nt, Homo sapiens
  misc_RNA (1)...(19): siRNA sense strand
uaacaaucaaccaacaaug

SEQ ID NO: 2065294 - RNA, 19 nt, Homo sapiens
  misc_RNA (1)...(19): siRNA sense strand
ggguggagccucaucuuuc

SEQ ID NO: 2065295 - RNA, 19 nt, Homo sapiens
  misc_RNA (1)...(19): siRNA sense strand
uguguauucucuuuggaaa

SEQ ID NO: 2065296 - RNA, 19 nt, Homo sapiens
  misc_RNA (1)...(19): siRNA sense strand
gguggagccucaucuuucg

SEQ ID NO: 2065297 - RNA, 19 nt, Homo sapiens
  misc_RNA (1)...(19): siRNA sense strand
gcuuauaacaaucaaccaa

SEQ ID NO: 2065298 - RNA, 19 nt, Homo sapiens
  misc_RNA (1)...(19): siRNA sense strand
guccaaagggugaccaaau

SEQ ID NO: 2065299 - RNA, 19 nt, Homo sapiens
  misc_RNA (1)...(19): siRNA sense strand
caaucaaccaacaauggaa

SEQ ID NO: 2065300 - RNA, 19 nt, Homo sapiens
  misc_RNA (1)...(19): siRNA sense strand
acaaucaaccaacaaugga

SEQ ID NO: 2065301 - RNA, 19 nt, Homo sapiens
  misc_RNA (1)...(19): siRNA sense strand
caucuuucgcuguguauuc

SEQ ID NO: 2065302 - RNA, 19 nt, Homo sapiens
  misc_RNA (1)...(19): siRNA sense strand
ccagaaccuugggaaacug

SEQ ID NO: 2065303 - RNA, 19 nt, Homo sapiens
  misc_RNA (1)...(19): siRNA sense strand
aaucaaccaacaauggaaa

SEQ ID NO: 2065304 - RNA, 19 nt, Homo sapiens
  misc_RNA (1)...(19): siRNA sense strand
gaaacuguggacccuacug

SEQ ID NO: 2065305 - RNA, 19 nt, Homo sapiens
  misc_RNA (1)...(19): siRNA sense strand
gacccuacuguaccucaaa

SEQ ID NO: 2065306 - RNA, 19 nt, Homo sapiens
  misc_RNA (1)...(19): siRNA sense strand
gcuguguauucucuuugga

SEQ ID NO: 2065307 - RNA, 19 nt, Homo sapiens
  misc_RNA (1)...(19): siRNA sense strand
uugaagaguugcaaaaugu

SEQ ID NO: 2065308 - RNA, 19 nt, Homo sapiens
  misc_RNA (1)...(19): siRNA sense strand
acacacagcugucugauuu

SEQ ID NO: 2065309 - RNA, 19 nt, Homo sapiens
  misc_RNA (1)...(19): siRNA sense strand
acgaauggcuguauuaaua

SEQ ID NO: 2065310 - RNA, 19 nt, Homo sapiens
  misc_RNA (1)...(19): siRNA sense strand
guaauugacuggaugaaau

SEQ ID NO: 2065311 - RNA, 19 nt, Homo sapiens
  misc_RNA (1)...(19): siRNA sense strand
gaccagagauuaacacaca

SEQ ID NO: 2065312 - RNA, 19 nt, Homo sapiens
  misc_RNA (1)...(19): siRNA sense strand
cgaggaaacucaacagugu

SEQ ID NO: 2065313 - RNA, 19 nt, Homo sapiens
  misc_RNA (1)...(19): siRNA sense strand
acaaagagauugccauuac

SEQ ID NO: 2065314 - RNA, 19 nt, Homo sapiens
  misc_RNA (1)...(19): siRNA sense strand
gaauacgcauacuuuagaa

SEQ ID NO: 2065315 - RNA, 19 nt, Homo sapiens
  misc_RNA (1)...(19): siRNA sense strand
ggaauuaggaacaaaguau

SEQ ID NO: 2065316 - RNA, 19 nt, Homo sapiens
  misc_RNA (1)...(19): siRNA sense strand
cuugaugacucuaagaaua

SEQ ID NO: 2065317 - RNA, 19 nt, Homo sapiens
  misc_RNA (1)...(19): siRNA sense strand
caaaccaaacugacaauaa

SEQ ID NO: 2065318 - RNA, 19 nt, Homo sapiens
  misc_RNA (1)...(19): siRNA sense strand
gaauaucgcccgaauagca

SEQ ID NO: 2065319 - RNA, 19 nt, Homo sapiens
  misc_RNA (1)...(19): siRNA sense strand
gaauggcuguauuaauaga

SEQ ID NO: 2065320 - RNA, 19 nt, Homo sapiens
  misc_RNA (1)...(19): siRNA sense strand
gaaggaaacccaccugagu

SEQ ID NO: 2065321 - RNA, 19 nt, Homo sapiens
  misc_RNA (1)...(19): siRNA sense strand
ugaagccacuugugaagaa

SEQ ID NO: 2065322 - RNA, 19 nt, Homo sapiens
  misc_RNA (1)...(19): siRNA sense strand
gcuugaaacuagaggagua

SEQ ID NO: 2065323 - RNA, 19 nt, Homo sapiens
  misc_RNA (1)...(19): siRNA sense strand
agaaauagaagacacguuu

SEQ ID NO: 2065324 - RNA, 19 nt, Homo sapiens
  misc_RNA (1)...(19): siRNA sense strand
caccugaguuuguacauga

SEQ ID NO: 2065325 - RNA, 19 nt, Homo sapiens
  misc_RNA (1)...(19): siRNA sense strand
acagaugguucuugggaua

SEQ ID NO: 2065326 - RNA, 19 nt, Homo sapiens
  misc_RNA (1)...(19): siRNA sense strand
caggacagcuaaugagugu

SEQ ID NO: 2065327 - RNA, 19 nt, Homo sapiens
  misc_RNA (1)...(19): siRNA sense strand
gaguguguccucuuccuua

SEQ ID NO: 2065328 - RNA, 19 nt, Homo sapiens
  misc_RNA (1)...(19): siRNA sense strand
caacucagcaggcucaaau

SEQ ID NO: 2065329 - RNA, 19 nt, Homo sapiens
  misc_RNA (1)...(19): siRNA sense strand
aggaagaacucagagcuaa

SEQ ID NO: 2065330 - RNA, 19 nt, Homo sapiens
  misc_RNA (1)...(19): siRNA sense strand
gaaacucaacaguguaaau

SEQ ID NO: 2065331 - RNA, 19 nt, Homo sapiens
  misc_RNA (1)...(19): siRNA sense strand
gaguaaaggauguucuaaa

SEQ ID NO: 2065332 - RNA, 19 nt, Homo sapiens
  misc_RNA (1)...(19): siRNA sense strand
ugaauacgcauacuuuaga

SEQ ID NO: 2065333 - RNA, 19 nt, Homo sapiens
  misc_RNA (1)...(19): siRNA sense strand
ggauaugaguaaguucuug

SEQ ID NO: 2065334 - RNA, 19 nt, Homo sapiens
  misc_RNA (1)...(19): siRNA sense strand
uauguaagaccagagauua

SEQ ID NO: 2065335 - RNA, 19 nt, Homo sapiens
  misc_RNA (1)...(19): siRNA sense strand
guaaaggauguucuaaaga

SEQ ID NO: 2065336 - RNA, 19 nt, Homo sapiens
  misc_RNA (1)...(19): siRNA sense strand
ggacagcuaaugagugugu

SEQ ID NO: 2065337 - RNA, 19 nt, Homo sapiens
  misc_RNA (1)...(19): siRNA sense strand
acucaacaguguaaauuug

SEQ ID NO: 2065338 - RNA, 19 nt, Homo sapiens
  misc_RNA (1)...(19): siRNA sense strand
cuaagaauaucgcccgaau

SEQ ID NO: 2065339 - RNA, 19 nt, Homo sapiens
  misc_RNA (1)...(19): siRNA sense strand
ggaagucauauggaaauuu

SEQ ID NO: 2065340 - RNA, 19 nt, Homo sapiens
  misc_RNA (1)...(19): siRNA sense strand
aguaaaggauguucuaaag

SEQ ID NO: 2065341 - RNA, 19 nt, Homo sapiens
  misc_RNA (1)...(19): siRNA sense strand
ucaauauucggaagucaua

SEQ ID NO: 2065342 - RNA, 19 nt, Homo sapiens
  misc_RNA (1)...(19): siRNA sense strand
ggugugaacuccgaaucaa

SEQ ID NO: 2065343 - RNA, 19 nt, Homo sapiens
  misc_RNA (1)...(19): siRNA sense strand
ugacaguuauuaugacuac

SEQ ID NO: 2065344 - RNA, 19 nt, Homo sapiens
  misc_RNA (1)...(19): siRNA sense strand
ucagugacccgguuuacaa

SEQ ID NO: 2065345 - RNA, 19 nt, Homo sapiens
  misc_RNA (1)...(19): siRNA sense strand
gauaugaguaaguucuuga

SEQ ID NO: 2065346 - RNA, 19 nt, Homo sapiens
  misc_RNA (1)...(19): siRNA sense strand
guucuugggauaugaguaa

SEQ ID NO: 2065347 - RNA, 19 nt, Homo sapiens
  misc_RNA (1)...(19): siRNA sense strand
gcuaagcuuucagaauuca

SEQ ID NO: 2065348 - RNA, 19 nt, Homo sapiens
  misc_RNA (1)...(19): siRNA sense strand
uaaugaguguguccucuuc

SEQ ID NO: 2065349 - RNA, 19 nt, Homo sapiens
  misc_RNA (1)...(19): siRNA sense strand
ugaaggaauuaggaacaaa

SEQ ID NO: 2065350 - RNA, 19 nt, Homo sapiens
  misc_RNA (1)...(19): siRNA sense strand
ggaguaaaggauguucuaa

SEQ ID NO: 2065351 - RNA, 19 nt, Homo sapiens
  misc_RNA (1)...(19): siRNA sense strand
aagaauaucgcccgaauag

SEQ ID NO: 2065352 - RNA, 19 nt, Homo sapiens
  misc_RNA (1)...(19): siRNA sense strand
gaaacuagaggaguaaagg

SEQ ID NO: 2065353 - RNA, 19 nt, Homo sapiens
  misc_RNA (1)...(19): siRNA sense strand
uaagaauaucgcccgaaua

SEQ ID NO: 2065354 - RNA, 19 nt, Homo sapiens
  misc_RNA (1)...(19): siRNA sense strand
gaaggaauuaggaacaaag

SEQ ID NO: 2065355 - RNA, 19 nt, Homo sapiens
  misc_RNA (1)...(19): siRNA sense strand
uggaugaaauugaaggaau

SEQ ID NO: 2065356 - RNA, 19 nt, Homo sapiens
  misc_RNA (1)...(19): siRNA sense strand
gaggaaacucaacagugua

SEQ ID NO: 2065357 - RNA, 19 nt, Homo sapiens
  misc_RNA (1)...(19): siRNA sense strand
agaagcugaugcugaaaga

SEQ ID NO: 2065358 - RNA, 19 nt, Homo sapiens
  misc_RNA (1)...(19): siRNA sense strand
uagaaugaguaaggaagaa

SEQ ID NO: 2065359 - RNA, 19 nt, Homo sapiens
  misc_RNA (1)...(19): siRNA sense strand
gaucaauauucggaaguca

SEQ ID NO: 2065360 - RNA, 19 nt, Homo sapiens
  misc_RNA (1)...(19): siRNA sense strand
gugacccgguuuacaaaga

SEQ ID NO: 2065361 - RNA, 19 nt, Homo sapiens
  misc_RNA (1)...(19): siRNA sense strand
uuacaaagagauugccauu

SEQ ID NO: 2065362 - RNA, 19 nt, Homo sapiens
  misc_RNA (1)...(19): siRNA sense strand
gaacauucagugucaacuc

SEQ ID NO: 2065363 - RNA, 19 nt, Homo sapiens
  misc_RNA (1)...(19): siRNA sense strand
aaaggauccaaguucauua

SEQ ID NO: 2065364 - RNA, 19 nt, Homo sapiens
  misc_RNA (1)...(19): siRNA sense strand
aagacacguuucagcagua

SEQ ID NO: 2065365 - RNA, 19 nt, Homo sapiens
  misc_RNA (1)...(19): siRNA sense strand
guauguaagaccagagauu

SEQ ID NO: 2065366 - RNA, 19 nt, Homo sapiens
  misc_RNA (1)...(19): siRNA sense strand
gcacuccaccaccacaaau

SEQ ID NO: 2065367 - RNA, 19 nt, Homo sapiens
  misc_RNA (1)...(19): siRNA sense strand
cuagaggaguaaaggaugu

SEQ ID NO: 2065368 - RNA, 19 nt, Homo sapiens
  misc_RNA (1)...(19): siRNA sense strand
ccaaaccaaacugacaaua

SEQ ID NO: 2065369 - RNA, 19 nt, Homo sapiens
  misc_RNA (1)...(19): siRNA sense strand
ggaucaauauucggaaguc

SEQ ID NO: 2065370 - RNA, 19 nt, Homo sapiens
  misc_RNA (1)...(19): siRNA sense strand
gaugguucuugggauauga

SEQ ID NO: 2065371 - RNA, 19 nt, Homo sapiens
  misc_RNA (1)...(19): siRNA sense strand
gauuucugcaucagucuaa

SEQ ID NO: 2065372 - RNA, 19 nt, Homo sapiens
  misc_RNA (1)...(19): siRNA sense strand
caaagagauugccauuacg

SEQ ID NO: 2065373 - RNA, 19 nt, Homo sapiens
  misc_RNA (1)...(19): siRNA sense strand
acgcauacuuuagaaauag

SEQ ID NO: 2065374 - RNA, 19 nt, Homo sapiens
  misc_RNA (1)...(19): siRNA sense strand
ccaccugaguuuguacaug

SEQ ID NO: 2065375 - RNA, 19 nt, Homo sapiens
  misc_RNA (1)...(19): siRNA sense strand
gaagaacucagagcuaagc

SEQ ID NO: 2065376 - RNA, 19 nt, Homo sapiens
  misc_RNA (1)...(19): siRNA sense strand
auucggaagucauauggaa

SEQ ID NO: 2065377 - RNA, 19 nt, Homo sapiens
  misc_RNA (1)...(19): siRNA sense strand
gcucaaauacccuccuuuu

SEQ ID NO: 2065378 - RNA, 19 nt, Homo sapiens
  misc_RNA (1)...(19): siRNA sense strand
caacaguguaaauuugaug

SEQ ID NO: 2065379 - RNA, 19 nt, Homo sapiens
  misc_RNA (1)...(19): siRNA sense strand
gcugacaguuauuaugacu

SEQ ID NO: 2065380 - RNA, 19 nt, Homo sapiens
  misc_RNA (1)...(19): siRNA sense strand
aaauagaagacacguuuca

SEQ ID NO: 2065381 - RNA, 19 nt, Homo sapiens
  misc_RNA (1)...(19): siRNA sense strand
caauuuugcugacaguuau

SEQ ID NO: 2065382 - RNA, 19 nt, Homo sapiens
  misc_RNA (1)...(19): siRNA sense strand
caaacugacaauaaugcuu

SEQ ID NO: 2065383 - RNA, 19 nt, Homo sapiens
  misc_RNA (1)...(19): siRNA sense strand
uuacgaauggcuguauuaa

SEQ ID NO: 2065384 - RNA, 19 nt, Homo sapiens
  misc_RNA (1)...(19): siRNA sense strand
cgaauggcuguauuaauag

SEQ ID NO: 2065385 - RNA, 19 nt, Homo sapiens
  misc_RNA (1)...(19): siRNA sense strand
aagcugaugcugaaagaga

SEQ ID NO: 2065386 - RNA, 19 nt, Homo sapiens
  misc_RNA (1)...(19): siRNA sense strand
acaaaaggauccaaguuca

SEQ ID NO: 2065387 - RNA, 19 nt, Homo sapiens
  misc_RNA (1)...(19): siRNA sense strand
gaggauccacagaguaaag

SEQ ID NO: 2065388 - RNA, 19 nt, Homo sapiens
  misc_RNA (1)...(19): siRNA sense strand
cggaagucauauggaaauu

SEQ ID NO: 2065389 - RNA, 19 nt, Homo sapiens
  misc_RNA (1)...(19): siRNA sense strand
aacauucagugucaacuca

SEQ ID NO: 2065390 - RNA, 19 nt, Homo sapiens
  misc_RNA (1)...(19): siRNA sense strand
uugacuggaugaaauugaa

SEQ ID NO: 2065391 - RNA, 19 nt, Homo sapiens
  misc_RNA (1)...(19): siRNA sense strand
uacaaagagauugccauua

SEQ ID NO: 2065392 - RNA, 19 nt, Homo sapiens
  misc_RNA (1)...(19): siRNA sense strand
gaagccacuugugaagaag

SEQ ID NO: 2065393 - RNA, 19 nt, Homo sapiens
  misc_RNA (1)...(19): siRNA sense strand
guaagaccagagauuaaca

SEQ ID NO: 2065394 - RNA, 19 nt, Homo sapiens
  misc_RNA (1)...(19): siRNA sense strand
cuugggauaugaguaaguu

SEQ ID NO: 2065395 - RNA, 19 nt, Homo sapiens
  misc_RNA (1)...(19): siRNA sense strand
acacagcugucugauuucu

SEQ ID NO: 2065396 - RNA, 19 nt, Homo sapiens
  misc_RNA (1)...(19): siRNA sense strand
uugcugacaguuauuauga

SEQ ID NO: 2065397 - RNA, 19 nt, Homo sapiens
  misc_RNA (1)...(19): siRNA sense strand
ggaagaacucagagcuaag

SEQ ID NO: 2065398 - RNA, 19 nt, Homo sapiens
  misc_RNA (1)...(19): siRNA sense strand
aggaaacucaacaguguaa

SEQ ID NO: 2065399 - RNA, 19 nt, Homo sapiens
  misc_RNA (1)...(19): siRNA sense strand
aaggaaacccaccugaguu

SEQ ID NO: 2065400 - RNA, 19 nt, Homo sapiens
  misc_RNA (1)...(19): siRNA sense strand
uuuacaagguuccuagaag

SEQ ID NO: 2065401 - RNA, 19 nt, Homo sapiens
  misc_RNA (1)...(19): siRNA sense strand
aaagagauugccauuacga

SEQ ID NO: 2065402 - RNA, 19 nt, Homo sapiens
  misc_RNA (1)...(19): siRNA sense strand
uacugaauacgcauacuuu

SEQ ID NO: 2065403 - RNA, 19 nt, Homo sapiens
  misc_RNA (1)...(19): siRNA sense strand
aaaguaauugacuggauga

SEQ ID NO: 2065404 - RNA, 19 nt, Homo sapiens
  misc_RNA (1)...(19): siRNA sense strand
cagguagacagagcugaua

SEQ ID NO: 2065405 - RNA, 19 nt, Homo sapiens
  misc_RNA (1)...(19): siRNA sense strand
agacacguuucagcaguau

SEQ ID NO: 2065406 - RNA, 19 nt, Homo sapiens
  misc_RNA (1)...(19): siRNA sense strand
cggccucacuguggucuug

SEQ ID NO: 2065407 - RNA, 19 nt, Homo sapiens
  misc_RNA (1)...(19): siRNA sense strand
gcaugcaggacagcuaaug

SEQ ID NO: 2065408 - RNA, 19 nt, Homo sapiens
  misc_RNA (1)...(19): siRNA sense strand
gaacaaagaccaagaccaa

SEQ ID NO: 2065409 - RNA, 19 nt, Homo sapiens
  misc_RNA (1)...(19): siRNA sense strand
gagaagcaccuauugauaa

SEQ ID NO: 2065410 - RNA, 19 nt, Homo sapiens
  misc_RNA (1)...(19): siRNA sense strand
gcacagauccugaagaugu

SEQ ID NO: 2065411 - RNA, 19 nt, Homo sapiens
  misc_RNA (1)...(19): siRNA sense strand
gaaguuaaauggcacagau

SEQ ID NO: 2065412 - RNA, 19 nt, Homo sapiens
  misc_RNA (1)...(19): siRNA sense strand
ggaagaauccaacugauga

SEQ ID NO: 2065413 - RNA, 19 nt, Homo sapiens
  misc_RNA (1)...(19): siRNA sense strand
aaagaggccuucaacauga

SEQ ID NO: 2065414 - RNA, 19 nt, Homo sapiens
  misc_RNA (1)...(19): siRNA sense strand
gaauccaacugaugaguau

SEQ ID NO: 2065415 - RNA, 19 nt, Homo sapiens
  misc_RNA (1)...(19): siRNA sense strand
gaaaugccuuugcuugcuu

SEQ ID NO: 2065416 - RNA, 19 nt, Homo sapiens
  misc_RNA (1)...(19): siRNA sense strand
caaagaggccuucaacaug

SEQ ID NO: 2065417 - RNA, 19 nt, Homo sapiens
  misc_RNA (1)...(19): siRNA sense strand
agaagcaacuggcaccaua

SEQ ID NO: 2065418 - RNA, 19 nt, Homo sapiens
  misc_RNA (1)...(19): siRNA sense strand
uggaugagcuguacagaga

SEQ ID NO: 2065419 - RNA, 19 nt, Homo sapiens
  misc_RNA (1)...(19): siRNA sense strand
acaggaagauuacuugaga

SEQ ID NO: 2065420 - RNA, 19 nt, Homo sapiens
  misc_RNA (1)...(19): siRNA sense strand
guacagagaagcaccuauu

SEQ ID NO: 2065421 - RNA, 19 nt, Homo sapiens
  misc_RNA (1)...(19): siRNA sense strand
caauguguuugcuauguuu

SEQ ID NO: 2065422 - RNA, 19 nt, Homo sapiens
  misc_RNA (1)...(19): siRNA sense strand
agaagcaccuauugauaaa

SEQ ID NO: 2065423 - RNA, 19 nt, Homo sapiens
  misc_RNA (1)...(19): siRNA sense strand
ugagagagcugcugacaac

SEQ ID NO: 2065424 - RNA, 19 nt, Homo sapiens
  misc_RNA (1)...(19): siRNA sense strand
gcaccauacaggaagauua

SEQ ID NO: 2065425 - RNA, 19 nt, Homo sapiens
  misc_RNA (1)...(19): siRNA sense strand
uagaugccaugaugaauga

SEQ ID NO: 2065426 - RNA, 19 nt, Homo sapiens
  misc_RNA (1)...(19): siRNA sense strand
caaggaagauuugcaugau

SEQ ID NO: 2065427 - RNA, 19 nt, Homo sapiens
  misc_RNA (1)...(19): siRNA sense strand
guaucuagaugccaugaug

SEQ ID NO: 2065428 - RNA, 19 nt, Homo sapiens
  misc_RNA (1)...(19): siRNA sense strand
ggaaguggaugagcuguac

SEQ ID NO: 2065429 - RNA, 19 nt, Homo sapiens
  misc_RNA (1)...(19): siRNA sense strand
gaucagaacagagaugguu

SEQ ID NO: 2065430 - RNA, 19 nt, Homo sapiens
  misc_RNA (1)...(19): siRNA sense strand
gggaucgguuuacagauga

SEQ ID NO: 2065431 - RNA, 19 nt, Homo sapiens
  misc_RNA (1)...(19): siRNA sense strand
cauguuuggugagaaguua

SEQ ID NO: 2065432 - RNA, 19 nt, Homo sapiens
  misc_RNA (1)...(19): siRNA sense strand
aaggaagauuugcaugaua

SEQ ID NO: 2065433 - RNA, 19 nt, Homo sapiens
  misc_RNA (1)...(19): siRNA sense strand
caaagacaaagaugacuga

SEQ ID NO: 2065434 - RNA, 19 nt, Homo sapiens
  misc_RNA (1)...(19): siRNA sense strand
ucaaagaggccuucaacau

SEQ ID NO: 2065435 - RNA, 19 nt, Homo sapiens
  misc_RNA (1)...(19): siRNA sense strand
ccugaaacauggagccaaa

SEQ ID NO: 2065436 - RNA, 19 nt, Homo sapiens
  misc_RNA (1)...(19): siRNA sense strand
ccaauguguuugcuauguu

SEQ ID NO: 2065437 - RNA, 19 nt, Homo sapiens
  misc_RNA (1)...(19): siRNA sense strand
cauccaauguguuugcuau

SEQ ID NO: 2065438 - RNA, 19 nt, Homo sapiens
  misc_RNA (1)...(19): siRNA sense strand
agagaagcaccuauugaua

SEQ ID NO: 2065439 - RNA, 19 nt, Homo sapiens
  misc_RNA (1)...(19): siRNA sense strand
aggaagauuugcaugauau

SEQ ID NO: 2065440 - RNA, 19 nt, Homo sapiens
  misc_RNA (1)...(19): siRNA sense strand
caaagaccaagaccaagaa

SEQ ID NO: 2065441 - RNA, 19 nt, Homo sapiens
  misc_RNA (1)...(19): siRNA sense strand
caacugaugaguaucuaga

SEQ ID NO: 2065442 - RNA, 19 nt, Homo sapiens
  misc_RNA (1)...(19): siRNA sense strand
ucacacgcauccugaaaca

SEQ ID NO: 2065443 - RNA, 19 nt, Homo sapiens
  misc_RNA (1)...(19): siRNA sense strand
uggcacagauccugaagau

SEQ ID NO: 2065444 - RNA, 19 nt, Homo sapiens
  misc_RNA (1)...(19): siRNA sense strand
gagccaaagacaaagauga

SEQ ID NO: 2065445 - RNA, 19 nt, Homo sapiens
  misc_RNA (1)...(19): siRNA sense strand
ugauaugcuugcuucauug

SEQ ID NO: 2065446 - RNA, 19 nt, Homo sapiens
  misc_RNA (1)...(19): siRNA sense strand
gggaagaauccaacugaug

SEQ ID NO: 2065447 - RNA, 19 nt, Homo sapiens
  misc_RNA (1)...(19): siRNA sense strand
caucagaaaugccuuugcu

SEQ ID NO: 2065448 - RNA, 19 nt, Homo sapiens
  misc_RNA (1)...(19): siRNA sense strand
gaugagcuguacagagaag

SEQ ID NO: 2065449 - RNA, 19 nt, Homo sapiens
  misc_RNA (1)...(19): siRNA sense strand
cagagaagcaccuauugau

SEQ ID NO: 2065450 - RNA, 19 nt, Homo sapiens
  misc_RNA (1)...(19): siRNA sense strand
acaaggaagauuugcauga

SEQ ID NO: 2065451 - RNA, 19 nt, Homo sapiens
  misc_RNA (1)...(19): siRNA sense strand
gagagcugcugacaaccau

SEQ ID NO: 2065452 - RNA, 19 nt, Homo sapiens
  misc_RNA (1)...(19): siRNA sense strand
acaaagaccaagaccaaga

SEQ ID NO: 2065453 - RNA, 19 nt, Homo sapiens
  misc_RNA (1)...(19): siRNA sense strand
aaacauggagccaaagaca

SEQ ID NO: 2065454 - RNA, 19 nt, Homo sapiens
  misc_RNA (1)...(19): siRNA sense strand
acauggagccaaagacaaa

SEQ ID NO: 2065455 - RNA, 19 nt, Homo sapiens
  misc_RNA (1)...(19): siRNA sense strand
cagaugaggaaguggauga

SEQ ID NO: 2065456 - RNA, 19 nt, Homo sapiens
  misc_RNA (1)...(19): siRNA sense strand
acacgcauccugaaacaug

SEQ ID NO: 2065457 - RNA, 19 nt, Homo sapiens
  misc_RNA (1)...(19): siRNA sense strand
ccaucaauuucaccauguu

SEQ ID NO: 2065458 - RNA, 19 nt, Homo sapiens
  misc_RNA (1)...(19): siRNA sense strand
ucaauuacaucgaguucac

SEQ ID NO: 2065459 - RNA, 19 nt, Homo sapiens
  misc_RNA (1)...(19): siRNA sense strand
agucgcagauucaggaguu

SEQ ID NO: 2065460 - RNA, 19 nt, Homo sapiens
  misc_RNA (1)...(19): siRNA sense strand
acagagaagcaccuauuga

SEQ ID NO: 2065461 - RNA, 19 nt, Homo sapiens
  misc_RNA (1)...(19): siRNA sense strand
cgacaaggaagauuugcau

SEQ ID NO: 2065462 - RNA, 19 nt, Homo sapiens
  misc_RNA (1)...(19): siRNA sense strand
cuagaugccaugaugaaug

SEQ ID NO: 2065463 - RNA, 19 nt, Homo sapiens
  misc_RNA (1)...(19): siRNA sense strand
agaauccaacugaugagua

SEQ ID NO: 2065464 - RNA, 19 nt, Homo sapiens
  misc_RNA (1)...(19): siRNA sense strand
cauacaggaagauuacuug

SEQ ID NO: 2065465 - RNA, 19 nt, Homo sapiens
  misc_RNA (1)...(19): siRNA sense strand
ugaaacauggagccaaaga

SEQ ID NO: 2065466 - RNA, 19 nt, Homo sapiens
  misc_RNA (1)...(19): siRNA sense strand
guuuacagaugaggaagug

SEQ ID NO: 2065467 - RNA, 19 nt, Homo sapiens
  misc_RNA (1)...(19): siRNA sense strand
ggggaucgguuuacagaug

SEQ ID NO: 2065468 - RNA, 19 nt, Homo sapiens
  misc_RNA (1)...(19): siRNA sense strand
caucgacaaggaagauuug

SEQ ID NO: 2065469 - RNA, 19 nt, Homo sapiens
  misc_RNA (1)...(19): siRNA sense strand
gcagauucaggaguucaaa

SEQ ID NO: 2065470 - RNA, 19 nt, Homo sapiens
  misc_RNA (1)...(19): siRNA sense strand
ggaagauuugcaugauaug

SEQ ID NO: 2065471 - RNA, 19 nt, Homo sapiens
  misc_RNA (1)...(19): siRNA sense strand
aaaugccuuugcuugcuuu

SEQ ID NO: 2065472 - RNA, 19 nt, Homo sapiens
  misc_RNA (1)...(19): siRNA sense strand
gaagaauccaacugaugag

SEQ ID NO: 2065473 - RNA, 19 nt, Homo sapiens
  misc_RNA (1)...(19): siRNA sense strand
guucaaagaggccuucaac

SEQ ID NO: 2065474 - RNA, 19 nt, Homo sapiens
  misc_RNA (1)...(19): siRNA sense strand
agaaaugccuuugcuugcu

SEQ ID NO: 2065475 - RNA, 19 nt, Homo sapiens
  misc_RNA (1)...(19): siRNA sense strand
uccaauguguuugcuaugu

SEQ ID NO: 2065476 - RNA, 19 nt, Homo sapiens
  misc_RNA (1)...(19): siRNA sense strand
ucaucgacaaggaagauuu

SEQ ID NO: 2065477 - RNA, 19 nt, Homo sapiens
  misc_RNA (1)...(19): siRNA sense strand
ccauacaggaagauuacuu

SEQ ID NO: 2065478 - RNA, 19 nt, Homo sapiens
  misc_RNA (1)...(19): siRNA sense strand
gaagcaacuggcaccauac

SEQ ID NO: 2065479 - RNA, 19 nt, Homo sapiens
  misc_RNA (1)...(19): siRNA sense strand
acugaugaguaucuagaug

SEQ ID NO: 2065480 - RNA, 19 nt, Homo sapiens
  misc_RNA (1)...(19): siRNA sense strand
gaaacauggagccaaagac

SEQ ID NO: 2065481 - RNA, 19 nt, Homo sapiens
  misc_RNA (1)...(19): siRNA sense strand
ugccuuugcuugcuuugau

SEQ ID NO: 2065482 - RNA, 19 nt, Homo sapiens
  misc_RNA (1)...(19): siRNA sense strand
cacagauccugaagauguc

SEQ ID NO: 2065483 - RNA, 19 nt, Homo sapiens
  misc_RNA (1)...(19): siRNA sense strand
gcaaaagaacaaagaccaa

SEQ ID NO: 2065484 - RNA, 19 nt, Homo sapiens
  misc_RNA (1)...(19): siRNA sense strand
gcccucagcgugcaacauc

SEQ ID NO: 2065485 - RNA, 19 nt, Homo sapiens
  misc_RNA (1)...(19): siRNA sense strand
caggaaagcucaaacauuu

SEQ ID NO: 2065486 - RNA, 19 nt, Homo sapiens
  misc_RNA (1)...(19): siRNA sense strand
caacacaaguucaccauga

SEQ ID NO: 2065487 - RNA, 19 nt, Homo sapiens
  misc_RNA (1)...(19): siRNA sense strand
uaucaacccuacaaaguua

SEQ ID NO: 2065488 - RNA, 19 nt, Homo sapiens
  misc_RNA (1)...(19): siRNA sense strand
ggacugacaauacuacaua

SEQ ID NO: 2065489 - RNA, 19 nt, Homo sapiens
  misc_RNA (1)...(19): siRNA sense strand
gcaagaccauccagaguga

SEQ ID NO: 2065490 - RNA, 19 nt, Homo sapiens
  misc_RNA (1)...(19): siRNA sense strand
gcaauuacaucgugaaggu

SEQ ID NO: 2065491 - RNA, 19 nt, Homo sapiens
  misc_RNA (1)...(19): siRNA sense strand
ggaaagugauaucauuaug

SEQ ID NO: 2065492 - RNA, 19 nt, Homo sapiens
  misc_RNA (1)...(19): siRNA sense strand
ggagaagcuugcacagaaa

SEQ ID NO: 2065493 - RNA, 19 nt, Homo sapiens
  misc_RNA (1)...(19): siRNA sense strand
gagaggccauccuauuuga

SEQ ID NO: 2065494 - RNA, 19 nt, Homo sapiens
  misc_RNA (1)...(19): siRNA sense strand
gaaaguagcccagaagaca

SEQ ID NO: 2065495 - RNA, 19 nt, Homo sapiens
  misc_RNA (1)...(19): siRNA sense strand
aggaagacauugggaauua

SEQ ID NO: 2065496 - RNA, 19 nt, Homo sapiens
  misc_RNA (1)...(19): siRNA sense strand
gcaugggccucgcuuagaa

SEQ ID NO: 2065497 - RNA, 19 nt, Homo sapiens
  misc_RNA (1)...(19): siRNA sense strand
ucagugaaauggaaaguga

SEQ ID NO: 2065498 - RNA, 19 nt, Homo sapiens
  misc_RNA (1)...(19): siRNA sense strand
uuacugggcucugugaaua

SEQ ID NO: 2065499 - RNA, 19 nt, Homo sapiens
  misc_RNA (1)...(19): siRNA sense strand
gaaaaucauugucaccuuu

SEQ ID NO: 2065500 - RNA, 19 nt, Homo sapiens
  misc_RNA (1)...(19): siRNA sense strand
gcuuagaaguugcaucuga

SEQ ID NO: 2065501 - RNA, 19 nt, Homo sapiens
  misc_RNA (1)...(19): siRNA sense strand
gaggaacccugucagugaa

SEQ ID NO: 2065502 - RNA, 19 nt, Homo sapiens
  misc_RNA (1)...(19): siRNA sense strand
uaucaucacuuccguagga

SEQ ID NO: 2065503 - RNA, 19 nt, Homo sapiens
  misc_RNA (1)...(19): siRNA sense strand
uggagaagcuugcacagaa

SEQ ID NO: 2065504 - RNA, 19 nt, Homo sapiens
  misc_RNA (1)...(19): siRNA sense strand
cagaucauauggcuauuug

SEQ ID NO: 2065505 - RNA, 19 nt, Homo sapiens
  misc_RNA (1)...(19): siRNA sense strand
ggagaggccauccuauuug

SEQ ID NO: 2065506 - RNA, 19 nt, Homo sapiens
  misc_RNA (1)...(19): siRNA sense strand
gcaaguauaacuggaauau

SEQ ID NO: 2065507 - RNA, 19 nt, Homo sapiens
  misc_RNA (1)...(19): siRNA sense strand
cacaaugcccaaauacuua

SEQ ID NO: 2065508 - RNA, 19 nt, Homo sapiens
  misc_RNA (1)...(19): siRNA sense strand
gaaacagaauacaggaaag

SEQ ID NO: 2065509 - RNA, 19 nt, Homo sapiens
  misc_RNA (1)...(19): siRNA sense strand
cccaaugcaucucugcuua

SEQ ID NO: 2065510 - RNA, 19 nt, Homo sapiens
  misc_RNA (1)...(19): siRNA sense strand
gggaaguguuuacuguuga

SEQ ID NO: 2065511 - RNA, 19 nt, Homo sapiens
  misc_RNA (1)...(19): siRNA sense strand
agaagacaauggacuaugu

SEQ ID NO: 2065512 - RNA, 19 nt, Homo sapiens
  misc_RNA (1)...(19): siRNA sense strand
ucagggaaauggaacucua

SEQ ID NO: 2065513 - RNA, 19 nt, Homo sapiens
  misc_RNA (1)...(19): siRNA sense strand
ucacaguuaucaucacuuc

SEQ ID NO: 2065514 - RNA, 19 nt, Homo sapiens
  misc_RNA (1)...(19): siRNA sense strand
gaaauggaaagugauauca

SEQ ID NO: 2065515 - RNA, 19 nt, Homo sapiens
  misc_RNA (1)...(19): siRNA sense strand
ccacugcaguucccugaug

SEQ ID NO: 2065516 - RNA, 19 nt, Homo sapiens
  misc_RNA (1)...(19): siRNA sense strand
gaaguugcaucugagaaag

SEQ ID NO: 2065517 - RNA, 19 nt, Homo sapiens
  misc_RNA (1)...(19): siRNA sense strand
gggccucgcuuagaaguug

SEQ ID NO: 2065518 - RNA, 19 nt, Homo sapiens
  misc_RNA (1)...(19): siRNA sense strand
gcacucggcuagcuuacca

SEQ ID NO: 2065519 - RNA, 19 nt, Homo sapiens
  misc_RNA (1)...(19): siRNA sense strand
ggaaauggaacucuaucug

SEQ ID NO: 2065520 - RNA, 19 nt, Homo sapiens
  misc_RNA (1)...(19): siRNA sense strand
caucagacauccagaucau

SEQ ID NO: 2065521 - RNA, 19 nt, Homo sapiens
  misc_RNA (1)...(19): siRNA sense strand
ugaggaacccugucaguga

SEQ ID NO: 2065522 - RNA, 19 nt, Homo sapiens
  misc_RNA (1)...(19): siRNA sense strand
caagugaauucugauaaag

SEQ ID NO: 2065523 - RNA, 19 nt, Homo sapiens
  misc_RNA (1)...(19): siRNA sense strand
ccaugaagaugcucuggau

SEQ ID NO: 2065524 - RNA, 19 nt, Homo sapiens
  misc_RNA (1)...(19): siRNA sense strand
ggaauaccaacacaaguuc

SEQ ID NO: 2065525 - RNA, 19 nt, Homo sapiens
  misc_RNA (1)...(19): siRNA sense strand
acacaaugcccaaauacuu

SEQ ID NO: 2065526 - RNA, 19 nt, Homo sapiens
  misc_RNA (1)...(19): siRNA sense strand
gaggccauccuauuugauu

SEQ ID NO: 2065527 - RNA, 19 nt, Homo sapiens
  misc_RNA (1)...(19): siRNA sense strand
caacaccuacuccuggauu

SEQ ID NO: 2065528 - RNA, 19 nt, Homo sapiens
  misc_RNA (1)...(19): siRNA sense strand
gagaaaguagcccagaaga

SEQ ID NO: 2065529 - RNA, 19 nt, Homo sapiens
  misc_RNA (1)...(19): siRNA sense strand
agaaacagaauacaggaaa

SEQ ID NO: 2065530 - RNA, 19 nt, Homo sapiens
  misc_RNA (1)...(19): siRNA sense strand
gaucauauggcuauuugag

SEQ ID NO: 2065531 - RNA, 19 nt, Homo sapiens
  misc_RNA (1)...(19): siRNA sense strand
cuagaaggcaggccagaaa

SEQ ID NO: 2065532 - RNA, 19 nt, Homo sapiens
  misc_RNA (1)...(19): siRNA sense strand
cccacacaaugcccaaaua

SEQ ID NO: 2065533 - RNA, 19 nt, Homo sapiens
  misc_RNA (1)...(19): siRNA sense strand
uggagaggccauccuauuu

SEQ ID NO: 2065534 - RNA, 19 nt, Homo sapiens
  misc_RNA (1)...(19): siRNA sense strand
gaaagugauaucauuaugc

SEQ ID NO: 2065535 - RNA, 19 nt, Homo sapiens
  misc_RNA (1)...(19): siRNA sense strand
caaagccaguggugcagau

SEQ ID NO: 2065536 - RNA, 19 nt, Homo sapiens
  misc_RNA (1)...(19): siRNA sense strand
ggaagacauugggaauuac

SEQ ID NO: 2065537 - RNA, 19 nt, Homo sapiens
  misc_RNA (1)...(19): siRNA sense strand
ggaugacuucggaauauau

SEQ ID NO: 2065538 - RNA, 19 nt, Homo sapiens
  misc_RNA (1)...(19): siRNA sense strand
uggaugacuucggaauaua

SEQ ID NO: 2065539 - RNA, 19 nt, Homo sapiens
  misc_RNA (1)...(19): siRNA sense strand
aagaugcucuggaugacuu

SEQ ID NO: 2065540 - RNA, 19 nt, Homo sapiens
  misc_RNA (1)...(19): siRNA sense strand
ucagacauccagaucauau

SEQ ID NO: 2065541 - RNA, 19 nt, Homo sapiens
  misc_RNA (1)...(19): siRNA sense strand
uuauggaccuuauggacuu

SEQ ID NO: 2065542 - RNA, 19 nt, Homo sapiens
  misc_RNA (1)...(19): siRNA sense strand
gaagacauugggaauuaca

SEQ ID NO: 2065543 - RNA, 19 nt, Homo sapiens
  misc_RNA (1)...(19): siRNA sense strand
caaggaagacauugggaau

SEQ ID NO: 2065544 - RNA, 19 nt, Homo sapiens
  misc_RNA (1)...(19): siRNA sense strand
gaauacaggaaagcucaaa

SEQ ID NO: 2065545 - RNA, 19 nt, Homo sapiens
  misc_RNA (1)...(19): siRNA sense strand
ugucuucucuuccuaugga

SEQ ID NO: 2065546 - RNA, 19 nt, Homo sapiens
  misc_RNA (1)...(19): siRNA sense strand
gaaaggaaaaucauuguca

SEQ ID NO: 2065547 - RNA, 19 nt, Homo sapiens
  misc_RNA (1)...(19): siRNA sense strand
gaagacaauggacuaugug

SEQ ID NO: 2065548 - RNA, 19 nt, Homo sapiens
  misc_RNA (1)...(19): siRNA sense strand
caaugcaucucugcuuauc

SEQ ID NO: 2065549 - RNA, 19 nt, Homo sapiens
  misc_RNA (1)...(19): siRNA sense strand
acaggaaagcucaaacauu

SEQ ID NO: 2065550 - RNA, 19 nt, Homo sapiens
  misc_RNA (1)...(19): siRNA sense strand
ggucaacauucagggaaau

SEQ ID NO: 2065551 - RNA, 19 nt, Homo sapiens
  misc_RNA (1)...(19): siRNA sense strand
cuaccuacccguccacuau

SEQ ID NO: 2065552 - RNA, 19 nt, Homo sapiens
  misc_RNA (1)...(19): siRNA sense strand
ucggcuagcuuaccaaugg

SEQ ID NO: 2065553 - RNA, 19 nt, Homo sapiens
  misc_RNA (1)...(19): siRNA sense strand
agauacaagucacgguuga

SEQ ID NO: 2065554 - RNA, 19 nt, Homo sapiens
  misc_RNA (1)...(19): siRNA sense strand
gaaggugacagugccauca

SEQ ID NO: 2065555 - RNA, 19 nt, Homo sapiens
  misc_RNA (1)...(19): siRNA sense strand
cuggaugacuucggaauau

SEQ ID NO: 2065556 - RNA, 19 nt, Homo sapiens
  misc_RNA (1)...(19): siRNA sense strand
uagcaaguauaacuggaau

SEQ ID NO: 2065557 - RNA, 19 nt, Homo sapiens
  misc_RNA (1)...(19): siRNA sense strand
ggaaaaucauugucaccuu

SEQ ID NO: 2065558 - RNA, 19 nt, Homo sapiens
  misc_RNA (1)...(19): siRNA sense strand
agaaguugcaucugagaaa

SEQ ID NO: 2065559 - RNA, 19 nt, Homo sapiens
  misc_RNA (1)...(19): siRNA sense strand
gaauaagucugugguuccu

SEQ ID NO: 2065560 - RNA, 19 nt, Homo sapiens
  misc_RNA (1)...(19): siRNA sense strand
uugaugauccugucacaaa

SEQ ID NO: 2065561 - RNA, 19 nt, Homo sapiens
  misc_RNA (1)...(19): siRNA sense strand
gacugacaauacuacauau

SEQ ID NO: 2065562 - RNA, 19 nt, Homo sapiens
  misc_RNA (1)...(19): siRNA sense strand
uggaauaccaacacaaguu

SEQ ID NO: 2065563 - RNA, 19 nt, Homo sapiens
  misc_RNA (1)...(19): siRNA sense strand
gcaggcaagaugaaacuca

SEQ ID NO: 2065564 - RNA, 19 nt, Homo sapiens
  misc_RNA (1)...(19): siRNA sense strand
gacuaugugugcugugcuu

SEQ ID NO: 2065565 - RNA, 19 nt, Homo sapiens
  misc_RNA (1)...(19): siRNA sense strand
ggaacccugucagugaaau

SEQ ID NO: 2065566 - RNA, 19 nt, Homo sapiens
  misc_RNA (1)...(19): siRNA sense strand
gugcugugcuuacaacaac

SEQ ID NO: 2065567 - RNA, 19 nt, Homo sapiens
  misc_RNA (1)...(19): siRNA sense strand
uaggaggacugacaauacu

SEQ ID NO: 2065568 - RNA, 19 nt, Homo sapiens
  misc_RNA (1)...(19): siRNA sense strand
augcaucucugcuuaucaa

SEQ ID NO: 2065569 - RNA, 19 nt, Homo sapiens
  misc_RNA (1)...(19): siRNA sense strand
gcaggccagaaacagaaua

SEQ ID NO: 2065570 - RNA, 19 nt, Homo sapiens
  misc_RNA (1)...(19): siRNA sense strand
aaaaguaggggaaguguuu

SEQ ID NO: 2065571 - RNA, 19 nt, Homo sapiens
  misc_RNA (1)...(19): siRNA sense strand
gauaaagggcuaaaaguag

SEQ ID NO: 2065572 - RNA, 19 nt, Homo sapiens
  misc_RNA (1)...(19): siRNA sense strand
cagcuccaccuacuccuuu

SEQ ID NO: 2065573 - RNA, 19 nt, Homo sapiens
  misc_RNA (1)...(19): siRNA sense strand
caaaacaauacccuucaua

SEQ ID NO: 2065574 - RNA, 19 nt, Homo sapiens
  misc_RNA (1)...(19): siRNA sense strand
ggaaguguuuacuguugac

SEQ ID NO: 2065575 - RNA, 19 nt, Homo sapiens
  misc_RNA (1)...(19): siRNA sense strand
acagcugccuggugaggaa

SEQ ID NO: 2065576 - RNA, 19 nt, Homo sapiens
  misc_RNA (1)...(19): siRNA sense strand
ccagaucauauggcuauuu

SEQ ID NO: 2065577 - RNA, 19 nt, Homo sapiens
  misc_RNA (1)...(19): siRNA sense strand
aauaucaacccuacaaagu

SEQ ID NO: 2065578 - RNA, 19 nt, Homo sapiens
  misc_RNA (1)...(19): siRNA sense strand
ggggaaguguuuacuguug

SEQ ID NO: 2065579 - RNA, 19 nt, Homo sapiens
  misc_RNA (1)...(19): siRNA sense strand
ugaaauggaaagugauauc

SEQ ID NO: 2065580 - RNA, 19 nt, Homo sapiens
  misc_RNA (1)...(19): siRNA sense strand
ugacuucggaauauaugaa

SEQ ID NO: 2065581 - RNA, 19 nt, Homo sapiens
  misc_RNA (1)...(19): siRNA sense strand
ucaccuuuagcaaguauaa

SEQ ID NO: 2065582 - RNA, 19 nt, Homo sapiens
  misc_RNA (1)...(19): siRNA sense strand
ggauuaggaggacugacaa

SEQ ID NO: 2065583 - RNA, 19 nt, Homo sapiens
  misc_RNA (1)...(19): siRNA sense strand
aacaccuacuccuggauua

SEQ ID NO: 2065584 - RNA, 19 nt, Homo sapiens
  misc_RNA (1)...(19): siRNA sense strand
gauaucauuaugcccauca

SEQ ID NO: 2065585 - RNA, 19 nt, Homo sapiens
  misc_RNA (1)...(19): siRNA sense strand
caggaaagcucaaacauuu

SEQ ID NO: 2065586 - RNA, 19 nt, Homo sapiens
  misc_RNA (1)...(19): siRNA sense strand
caacacaaguucaccauga

SEQ ID NO: 2065587 - RNA, 19 nt, Homo sapiens
  misc_RNA (1)...(19): siRNA sense strand
uaucaacccuacaaaguua

SEQ ID NO: 2065588 - RNA, 19 nt, Homo sapiens
  misc_RNA (1)...(19): siRNA sense strand
ggacugacaauacuacaua

SEQ ID NO: 2065589 - RNA, 19 nt, Homo sapiens
  misc_RNA (1)...(19): siRNA sense strand
gcaagaccauccagaguga

SEQ ID NO: 2065590 - RNA, 19 nt, Homo sapiens
  misc_RNA (1)...(19): siRNA sense strand
gcaauuacaucgugaaggu

SEQ ID NO: 2065591 - RNA, 19 nt, Homo sapiens
  misc_RNA (1)...(19): siRNA sense strand
ggaaagugauaucauuaug

SEQ ID NO: 2065592 - RNA, 19 nt, Homo sapiens
  misc_RNA (1)...(19): siRNA sense strand
ggagaagcuugcacagaaa

SEQ ID NO: 2065593 - RNA, 19 nt, Homo sapiens
  misc_RNA (1)...(19): siRNA sense strand
gagaggccauccuauuuga

SEQ ID NO: 2065594 - RNA, 19 nt, Homo sapiens
  misc_RNA (1)...(19): siRNA sense strand
gaaaguagcccagaagaca

SEQ ID NO: 2065595 - RNA, 19 nt, Homo sapiens
  misc_RNA (1)...(19): siRNA sense strand
aggaagacauugggaauua

SEQ ID NO: 2065596 - RNA, 19 nt, Homo sapiens
  misc_RNA (1)...(19): siRNA sense strand
gcaugggccucgcuuagaa

SEQ ID NO: 2065597 - RNA, 19 nt, Homo sapiens
  misc_RNA (1)...(19): siRNA sense strand
ucagugaaauggaaaguga

SEQ ID NO: 2065598 - RNA, 19 nt, Homo sapiens
  misc_RNA (1)...(19): siRNA sense strand
uuacugggcucugugaaua

SEQ ID NO: 2065599 - RNA, 19 nt, Homo sapiens
  misc_RNA (1)...(19): siRNA sense strand
gaaaaucauugucaccuuu

SEQ ID NO: 2065600 - RNA, 19 nt, Homo sapiens
  misc_RNA (1)...(19): siRNA sense strand
gcuuagaaguugcaucuga

SEQ ID NO: 2065601 - RNA, 19 nt, Homo sapiens
  misc_RNA (1)...(19): siRNA sense strand
gaggaacccugucagugaa

SEQ ID NO: 2065602 - RNA, 19 nt, Homo sapiens
  misc_RNA (1)...(19): siRNA sense strand
uaucaucacuuccguagga

SEQ ID NO: 2065603 - RNA, 19 nt, Homo sapiens
  misc_RNA (1)...(19): siRNA sense strand
uggagaagcuugcacagaa

SEQ ID NO: 2065604 - RNA, 19 nt, Homo sapiens
  misc_RNA (1)...(19): siRNA sense strand
cagaucauauggcuauuug

SEQ ID NO: 2065605 - RNA, 19 nt, Homo sapiens
  misc_RNA (1)...(19): siRNA sense strand
ggagaggccauccuauuug

SEQ ID NO: 2065606 - RNA, 19 nt, Homo sapiens
  misc_RNA (1)...(19): siRNA sense strand
gcaaguauaacuggaauau

SEQ ID NO: 2065607 - RNA, 19 nt, Homo sapiens
  misc_RNA (1)...(19): siRNA sense strand
cacaaugcccaaauacuua

SEQ ID NO: 2065608 - RNA, 19 nt, Homo sapiens
  misc_RNA (1)...(19): siRNA sense strand
gaaacagaauacaggaaag

SEQ ID NO: 2065609 - RNA, 19 nt, Homo sapiens
  misc_RNA (1)...(19): siRNA sense strand
cccaaugcaucucugcuua

SEQ ID NO: 2065610 - RNA, 19 nt, Homo sapiens
  misc_RNA (1)...(19): siRNA sense strand
gggaaguguuuacuguuga

SEQ ID NO: 2065611 - RNA, 19 nt, Homo sapiens
  misc_RNA (1)...(19): siRNA sense strand
agaagacaauggacuaugu

SEQ ID NO: 2065612 - RNA, 19 nt, Homo sapiens
  misc_RNA (1)...(19): siRNA sense strand
ucagggaaauggaacucua

SEQ ID NO: 2065613 - RNA, 19 nt, Homo sapiens
  misc_RNA (1)...(19): siRNA sense strand
ucacaguuaucaucacuuc

SEQ ID NO: 2065614 - RNA, 19 nt, Homo sapiens
  misc_RNA (1)...(19): siRNA sense strand
gaaauggaaagugauauca

SEQ ID NO: 2065615 - RNA, 19 nt, Homo sapiens
  misc_RNA (1)...(19): siRNA sense strand
ccacugcaguucccugaug

SEQ ID NO: 2065616 - RNA, 19 nt, Homo sapiens
  misc_RNA (1)...(19): siRNA sense strand
gaaguugcaucugagaaag

SEQ ID NO: 2065617 - RNA, 19 nt, Homo sapiens
  misc_RNA (1)...(19): siRNA sense strand
gggccucgcuuagaaguug

SEQ ID NO: 2065618 - RNA, 19 nt, Homo sapiens
  misc_RNA (1)...(19): siRNA sense strand
gcacucggcuagcuuacca

SEQ ID NO: 2065619 - RNA, 19 nt, Homo sapiens
  misc_RNA (1)...(19): siRNA sense strand
ggaaauggaacucuaucug

SEQ ID NO: 2065620 - RNA, 19 nt, Homo sapiens
  misc_RNA (1)...(19): siRNA sense strand
caucagacauccagaucau

SEQ ID NO: 2065621 - RNA, 19 nt, Homo sapiens
  misc_RNA (1)...(19): siRNA sense strand
ugaggaacccugucaguga

SEQ ID NO: 2065622 - RNA, 19 nt, Homo sapiens
  misc_RNA (1)...(19): siRNA sense strand
caagugaauucugauaaag

SEQ ID NO: 2065623 - RNA, 19 nt, Homo sapiens
  misc_RNA (1)...(19): siRNA sense strand
ccaugaagaugcucuggau

SEQ ID NO: 2065624 - RNA, 19 nt, Homo sapiens
  misc_RNA (1)...(19): siRNA sense strand
ggaauaccaacacaaguuc

SEQ ID NO: 2065625 - RNA, 19 nt, Homo sapiens
  misc_RNA (1)...(19): siRNA sense strand
acacaaugcccaaauacuu

SEQ ID NO: 2065626 - RNA, 19 nt, Homo sapiens
  misc_RNA (1)...(19): siRNA sense strand
gaggccauccuauuugauu

SEQ ID NO: 2065627 - RNA, 19 nt, Homo sapiens
  misc_RNA (1)...(19): siRNA sense strand
caacaccuacuccuggauu

SEQ ID NO: 2065628 - RNA, 19 nt, Homo sapiens
  misc_RNA (1)...(19): siRNA sense strand
gagaaaguagcccagaaga

SEQ ID NO: 2065629 - RNA, 19 nt, Homo sapiens
  misc_RNA (1)...(19): siRNA sense strand
agaaacagaauacaggaaa

SEQ ID NO: 2065630 - RNA, 19 nt, Homo sapiens
  misc_RNA (1)...(19): siRNA sense strand
gaucauauggcuauuugag

SEQ ID NO: 2065631 - RNA, 19 nt, Homo sapiens
  misc_RNA (1)...(19): siRNA sense strand
cuagaaggcaggccagaaa

SEQ ID NO: 2065632 - RNA, 19 nt, Homo sapiens
  misc_RNA (1)...(19): siRNA sense strand
cccacacaaugcccaaaua

SEQ ID NO: 2065633 - RNA, 19 nt, Homo sapiens
  misc_RNA (1)...(19): siRNA sense strand
uggagaggccauccuauuu

SEQ ID NO: 2065634 - RNA, 19 nt, Homo sapiens
  misc_RNA (1)...(19): siRNA sense strand
gaaagugauaucauuaugc

SEQ ID NO: 2065635 - RNA, 19 nt, Homo sapiens
  misc_RNA (1)...(19): siRNA sense strand
caaagccaguggugcagau

SEQ ID NO: 2065636 - RNA, 19 nt, Homo sapiens
  misc_RNA (1)...(19): siRNA sense strand
ggaagacauugggaauuac

SEQ ID NO: 2065637 - RNA, 19 nt, Homo sapiens
  misc_RNA (1)...(19): siRNA sense strand
ggaugacuucggaauauau

SEQ ID NO: 2065638 - RNA, 19 nt, Homo sapiens
  misc_RNA (1)...(19): siRNA sense strand
uggaugacuucggaauaua

SEQ ID NO: 2065639 - RNA, 19 nt, Homo sapiens
  misc_RNA (1)...(19): siRNA sense strand
aagaugcucuggaugacuu

SEQ ID NO: 2065640 - RNA, 19 nt, Homo sapiens
  misc_RNA (1)...(19): siRNA sense strand
ucagacauccagaucauau

SEQ ID NO: 2065641 - RNA, 19 nt, Homo sapiens
  misc_RNA (1)...(19): siRNA sense strand
uuauggaccuuauggacuu

SEQ ID NO: 2065642 - RNA, 19 nt, Homo sapiens
  misc_RNA (1)...(19): siRNA sense strand
gaagacauugggaauuaca

SEQ ID NO: 2065643 - RNA, 19 nt, Homo sapiens
  misc_RNA (1)...(19): siRNA sense strand
caaggaagacauugggaau

SEQ ID NO: 2065644 - RNA, 19 nt, Homo sapiens
  misc_RNA (1)...(19): siRNA sense strand
gaauacaggaaagcucaaa

SEQ ID NO: 2065645 - RNA, 19 nt, Homo sapiens
  misc_RNA (1)...(19): siRNA sense strand
ugucuucucuuccuaugga

SEQ ID NO: 2065646 - RNA, 19 nt, Homo sapiens
  misc_RNA (1)...(19): siRNA sense strand
gaaaggaaaaucauuguca

SEQ ID NO: 2065647 - RNA, 19 nt, Homo sapiens
  misc_RNA (1)...(19): siRNA sense strand
gaagacaauggacuaugug

SEQ ID NO: 2065648 - RNA, 19 nt, Homo sapiens
  misc_RNA (1)...(19): siRNA sense strand
caaugcaucucugcuuauc

SEQ ID NO: 2065649 - RNA, 19 nt, Homo sapiens
  misc_RNA (1)...(19): siRNA sense strand
acaggaaagcucaaacauu

SEQ ID NO: 2065650 - RNA, 19 nt, Homo sapiens
  misc_RNA (1)...(19): siRNA sense strand
ggucaacauucagggaaau

SEQ ID NO: 2065651 - RNA, 19 nt, Homo sapiens
  misc_RNA (1)...(19): siRNA sense strand
cuaccuacccguccacuau

SEQ ID NO: 2065652 - RNA, 19 nt, Homo sapiens
  misc_RNA (1)...(19): siRNA sense strand
ucggcuagcuuaccaaugg

SEQ ID NO: 2065653 - RNA, 19 nt, Homo sapiens
  misc_RNA (1)...(19): siRNA sense strand
agauacaagucacgguuga

SEQ ID NO: 2065654 - RNA, 19 nt, Homo sapiens
  misc_RNA (1)...(19): siRNA sense strand
gaaggugacagugccauca

SEQ ID NO: 2065655 - RNA, 19 nt, Homo sapiens
  misc_RNA (1)...(19): siRNA sense strand
cuggaugacuucggaauau

SEQ ID NO: 2065656 - RNA, 19 nt, Homo sapiens
  misc_RNA (1)...(19): siRNA sense strand
uagcaaguauaacuggaau

SEQ ID NO: 2065657 - RNA, 19 nt, Homo sapiens
  misc_RNA (1)...(19): siRNA sense strand
ggaaaaucauugucaccuu

SEQ ID NO: 2065658 - RNA, 19 nt, Homo sapiens
  misc_RNA (1)...(19): siRNA sense strand
agaaguugcaucugagaaa

SEQ ID NO: 2065659 - RNA, 19 nt, Homo sapiens
  misc_RNA (1)...(19): siRNA sense strand
gaauaagucugugguuccu

SEQ ID NO: 2065660 - RNA, 19 nt, Homo sapiens
  misc_RNA (1)...(19): siRNA sense strand
uugaugauccugucacaaa

SEQ ID NO: 2065661 - RNA, 19 nt, Homo sapiens
  misc_RNA (1)...(19): siRNA sense strand
gacugacaauacuacauau

SEQ ID NO: 2065662 - RNA, 19 nt, Homo sapiens
  misc_RNA (1)...(19): siRNA sense strand
uggaauaccaacacaaguu

SEQ ID NO: 2065663 - RNA, 19 nt, Homo sapiens
  misc_RNA (1)...(19): siRNA sense strand
gcaggcaagaugaaacuca

SEQ ID NO: 2065664 - RNA, 19 nt, Homo sapiens
  misc_RNA (1)...(19): siRNA sense strand
gacuaugugugcugugcuu

SEQ ID NO: 2065665 - RNA, 19 nt, Homo sapiens
  misc_RNA (1)...(19): siRNA sense strand
ggaacccugucagugaaau

SEQ ID NO: 2065666 - RNA, 19 nt, Homo sapiens
  misc_RNA (1)...(19): siRNA sense strand
gugcugugcuuacaacaac

SEQ ID NO: 2065667 - RNA, 19 nt, Homo sapiens
  misc_RNA (1)...(19): siRNA sense strand
uaggaggacugacaauacu

SEQ ID NO: 2065668 - RNA, 19 nt, Homo sapiens
  misc_RNA (1)...(19): siRNA sense strand
augcaucucugcuuaucaa

SEQ ID NO: 2065669 - RNA, 19 nt, Homo sapiens
  misc_RNA (1)...(19): siRNA sense strand
gcaggccagaaacagaaua

SEQ ID NO: 2065670 - RNA, 19 nt, Homo sapiens
  misc_RNA (1)...(19): siRNA sense strand
aaaaguaggggaaguguuu

SEQ ID NO: 2065671 - RNA, 19 nt, Homo sapiens
  misc_RNA (1)...(19): siRNA sense strand
gauaaagggcuaaaaguag

SEQ ID NO: 2065672 - RNA, 19 nt, Homo sapiens
  misc_RNA (1)...(19): siRNA sense strand
cagcuccaccuacuccuuu

SEQ ID NO: 2065673 - RNA, 19 nt, Homo sapiens
  misc_RNA (1)...(19): siRNA sense strand
caaaacaauacccuucaua

SEQ ID NO: 2065674 - RNA, 19 nt, Homo sapiens
  misc_RNA (1)...(19): siRNA sense strand
ggaaguguuuacuguugac

SEQ ID NO: 2065675 - RNA, 19 nt, Homo sapiens
  misc_RNA (1)...(19): siRNA sense strand
acagcugccuggugaggaa

SEQ ID NO: 2065676 - RNA, 19 nt, Homo sapiens
  misc_RNA (1)...(19): siRNA sense strand
ccagaucauauggcuauuu

SEQ ID NO: 2065677 - RNA, 19 nt, Homo sapiens
  misc_RNA (1)...(19): siRNA sense strand
aauaucaacccuacaaagu

SEQ ID NO: 2065678 - RNA, 19 nt, Homo sapiens
  misc_RNA (1)...(19): siRNA sense strand
ggggaaguguuuacuguug

SEQ ID NO: 2065679 - RNA, 19 nt, Homo sapiens
  misc_RNA (1)...(19): siRNA sense strand
ugaaauggaaagugauauc

SEQ ID NO: 2065680 - RNA, 19 nt, Homo sapiens
  misc_RNA (1)...(19): siRNA sense strand
ugacuucggaauauaugaa

SEQ ID NO: 2065681 - RNA, 19 nt, Homo sapiens
  misc_RNA (1)...(19): siRNA sense strand
ucaccuuuagcaaguauaa

SEQ ID NO: 2065682 - RNA, 19 nt, Homo sapiens
  misc_RNA (1)...(19): siRNA sense strand
ggauuaggaggacugacaa

SEQ ID NO: 2065683 - RNA, 19 nt, Homo sapiens
  misc_RNA (1)...(19): siRNA sense strand
aacaccuacuccuggauua

SEQ ID NO: 2065684 - RNA, 19 nt, Homo sapiens
  misc_RNA (1)...(19): siRNA sense strand
gauaucauuaugcccauca

SEQ ID NO: 2065685 - RNA, 19 nt, Homo sapiens
  misc_RNA (1)...(19): siRNA sense strand
caggaaagcucaaacauuu

SEQ ID NO: 2065686 - RNA, 19 nt, Homo sapiens
  misc_RNA (1)...(19): siRNA sense strand
caacacaaguucaccauga

SEQ ID NO: 2065687 - RNA, 19 nt, Homo sapiens
  misc_RNA (1)...(19): siRNA sense strand
uaucaacccuacaaaguua

SEQ ID NO: 2065688 - RNA, 19 nt, Homo sapiens
  misc_RNA (1)...(19): siRNA sense strand
ggacugacaauacuacaua

SEQ ID NO: 2065689 - RNA, 19 nt, Homo sapiens
  misc_RNA (1)...(19): siRNA sense strand
gcaagaccauccagaguga

SEQ ID NO: 2065690 - RNA, 19 nt, Homo sapiens
  misc_RNA (1)...(19): siRNA sense strand
gcaauuacaucgugaaggu

SEQ ID NO: 2065691 - RNA, 19 nt, Homo sapiens
  misc_RNA (1)...(19): siRNA sense strand
ggaaagugauaucauuaug

SEQ ID NO: 2065692 - RNA, 19 nt, Homo sapiens
  misc_RNA (1)...(19): siRNA sense strand
ggagaagcuugcacagaaa

SEQ ID NO: 2065693 - RNA, 19 nt, Homo sapiens
  misc_RNA (1)...(19): siRNA sense strand
gagaggccauccuauuuga

SEQ ID NO: 2065694 - RNA, 19 nt, Homo sapiens
  misc_RNA (1)...(19): siRNA sense strand
gaaaguagcccagaagaca

SEQ ID NO: 2065695 - RNA, 19 nt, Homo sapiens
  misc_RNA (1)...(19): siRNA sense strand
aggaagacauugggaauua

SEQ ID NO: 2065696 - RNA, 19 nt, Homo sapiens
  misc_RNA (1)...(19): siRNA sense strand
gcaugggccucgcuuagaa

SEQ ID NO: 2065697 - RNA, 19 nt, Homo sapiens
  misc_RNA (1)...(19): siRNA sense strand
ucagugaaauggaaaguga

SEQ ID NO: 2065698 - RNA, 19 nt, Homo sapiens
  misc_RNA (1)...(19): siRNA sense strand
uuacugggcucugugaaua

SEQ ID NO: 2065699 - RNA, 19 nt, Homo sapiens
  misc_RNA (1)...(19): siRNA sense strand
gaaaaucauugucaccuuu

SEQ ID NO: 2065700 - RNA, 19 nt, Homo sapiens
  misc_RNA (1)...(19): siRNA sense strand
gcuuagaaguugcaucuga

SEQ ID NO: 2065701 - RNA, 19 nt, Homo sapiens
  misc_RNA (1)...(19): siRNA sense strand
gaggaacccugucagugaa

SEQ ID NO: 2065702 - RNA, 19 nt, Homo sapiens
  misc_RNA (1)...(19): siRNA sense strand
uaucaucacuuccguagga

SEQ ID NO: 2065703 - RNA, 19 nt, Homo sapiens
  misc_RNA (1)...(19): siRNA sense strand
uggagaagcuugcacagaa

SEQ ID NO: 2065704 - RNA, 19 nt, Homo sapiens
  misc_RNA (1)...(19): siRNA sense strand
cagaucauauggcuauuug

SEQ ID NO: 2065705 - RNA, 19 nt, Homo sapiens
  misc_RNA (1)...(19): siRNA sense strand
ggagaggccauccuauuug

SEQ ID NO: 2065706 - RNA, 19 nt, Homo sapiens
  misc_RNA (1)...(19): siRNA sense strand
gcaaguauaacuggaauau

SEQ ID NO: 2065707 - RNA, 19 nt, Homo sapiens
  misc_RNA (1)...(19): siRNA sense strand
cacaaugcccaaauacuua

SEQ ID NO: 2065708 - RNA, 19 nt, Homo sapiens
  misc_RNA (1)...(19): siRNA sense strand
gaaacagaauacaggaaag

SEQ ID NO: 2065709 - RNA, 19 nt, Homo sapiens
  misc_RNA (1)...(19): siRNA sense strand
cccaaugcaucucugcuua

SEQ ID NO: 2065710 - RNA, 19 nt, Homo sapiens
  misc_RNA (1)...(19): siRNA sense strand
gggaaguguuuacuguuga

SEQ ID NO: 2065711 - RNA, 19 nt, Homo sapiens
  misc_RNA (1)...(19): siRNA sense strand
agaagacaauggacuaugu

SEQ ID NO: 2065712 - RNA, 19 nt, Homo sapiens
  misc_RNA (1)...(19): siRNA sense strand
ucagggaaauggaacucua

SEQ ID NO: 2065713 - RNA, 19 nt, Homo sapiens
  misc_RNA (1)...(19): siRNA sense strand
ucacaguuaucaucacuuc

SEQ ID NO: 2065714 - RNA, 19 nt, Homo sapiens
  misc_RNA (1)...(19): siRNA sense strand
gaaauggaaagugauauca

SEQ ID NO: 2065715 - RNA, 19 nt, Homo sapiens
  misc_RNA (1)...(19): siRNA sense strand
ccacugcaguucccugaug

SEQ ID NO: 2065716 - RNA, 19 nt, Homo sapiens
  misc_RNA (1)...(19): siRNA sense strand
gaaguugcaucugagaaag

SEQ ID NO: 2065717 - RNA, 19 nt, Homo sapiens
  misc_RNA (1)...(19): siRNA sense strand
gggccucgcuuagaaguug

SEQ ID NO: 2065718 - RNA, 19 nt, Homo sapiens
  misc_RNA (1)...(19): siRNA sense strand
gcacucggcuagcuuacca

SEQ ID NO: 2065719 - RNA, 19 nt, Homo sapiens
  misc_RNA (1)...(19): siRNA sense strand
ggaaauggaacucuaucug

SEQ ID NO: 2065720 - RNA, 19 nt, Homo sapiens
  misc_RNA (1)...(19): siRNA sense strand
caucagacauccagaucau

SEQ ID NO: 2065721 - RNA, 19 nt, Homo sapiens
  misc_RNA (1)...(19): siRNA sense strand
ugaggaacccugucaguga

SEQ ID NO: 2065722 - RNA, 19 nt, Homo sapiens
  misc_RNA (1)...(19): siRNA sense strand
caagugaauucugauaaag

SEQ ID NO: 2065723 - RNA, 19 nt, Homo sapiens
  misc_RNA (1)...(19): siRNA sense strand
ccaugaagaugcucuggau

SEQ ID NO: 2065724 - RNA, 19 nt, Homo sapiens
  misc_RNA (1)...(19): siRNA sense strand
ggaauaccaacacaaguuc

SEQ ID NO: 2065725 - RNA, 19 nt, Homo sapiens
  misc_RNA (1)...(19): siRNA sense strand
acacaaugcccaaauacuu

SEQ ID NO: 2065726 - RNA, 19 nt, Homo sapiens
  misc_RNA (1)...(19): siRNA sense strand
gaggccauccuauuugauu

SEQ ID NO: 2065727 - RNA, 19 nt, Homo sapiens
  misc_RNA (1)...(19): siRNA sense strand
caacaccuacuccuggauu

SEQ ID NO: 2065728 - RNA, 19 nt, Homo sapiens
  misc_RNA (1)...(19): siRNA sense strand
gagaaaguagcccagaaga

SEQ ID NO: 2065729 - RNA, 19 nt, Homo sapiens
  misc_RNA (1)...(19): siRNA sense strand
agaaacagaauacaggaaa

SEQ ID NO: 2065730 - RNA, 19 nt, Homo sapiens
  misc_RNA (1)...(19): siRNA sense strand
gaucauauggcuauuugag

SEQ ID NO: 2065731 - RNA, 19 nt, Homo sapiens
  misc_RNA (1)...(19): siRNA sense strand
cuagaaggcaggccagaaa

SEQ ID NO: 2065732 - RNA, 19 nt, Homo sapiens
  misc_RNA (1)...(19): siRNA sense strand
cccacacaaugcccaaaua

SEQ ID NO: 2065733 - RNA, 19 nt, Homo sapiens
  misc_RNA (1)...(19): siRNA sense strand
uggagaggccauccuauuu

SEQ ID NO: 2065734 - RNA, 19 nt, Homo sapiens
  misc_RNA (1)...(19): siRNA sense strand
gaaagugauaucauuaugc

SEQ ID NO: 2065735 - RNA, 19 nt, Homo sapiens
  misc_RNA (1)...(19): siRNA sense strand
caaagccaguggugcagau

SEQ ID NO: 2065736 - RNA, 19 nt, Homo sapiens
  misc_RNA (1)...(19): siRNA sense strand
ggaagacauugggaauuac

SEQ ID NO: 2065737 - RNA, 19 nt, Homo sapiens
  misc_RNA (1)...(19): siRNA sense strand
ggaugacuucggaauauau

SEQ ID NO: 2065738 - RNA, 19 nt, Homo sapiens
  misc_RNA (1)...(19): siRNA sense strand
uggaugacuucggaauaua

SEQ ID NO: 2065739 - RNA, 19 nt, Homo sapiens
  misc_RNA (1)...(19): siRNA sense strand
aagaugcucuggaugacuu

SEQ ID NO: 2065740 - RNA, 19 nt, Homo sapiens
  misc_RNA (1)...(19): siRNA sense strand
ucagacauccagaucauau

SEQ ID NO: 2065741 - RNA, 19 nt, Homo sapiens
  misc_RNA (1)...(19): siRNA sense strand
uuauggaccuuauggacuu

SEQ ID NO: 2065742 - RNA, 19 nt, Homo sapiens
  misc_RNA (1)...(19): siRNA sense strand
gaagacauugggaauuaca

SEQ ID NO: 2065743 - RNA, 19 nt, Homo sapiens
  misc_RNA (1)...(19): siRNA sense strand
caaggaagacauugggaau

SEQ ID NO: 2065744 - RNA, 19 nt, Homo sapiens
  misc_RNA (1)...(19): siRNA sense strand
gaauacaggaaagcucaaa

SEQ ID NO: 2065745 - RNA, 19 nt, Homo sapiens
  misc_RNA (1)...(19): siRNA sense strand
ugucuucucuuccuaugga

SEQ ID NO: 2065746 - RNA, 19 nt, Homo sapiens
  misc_RNA (1)...(19): siRNA sense strand
gaaaggaaaaucauuguca

SEQ ID NO: 2065747 - RNA, 19 nt, Homo sapiens
  misc_RNA (1)...(19): siRNA sense strand
gaagacaauggacuaugug

SEQ ID NO: 2065748 - RNA, 19 nt, Homo sapiens
  misc_RNA (1)...(19): siRNA sense strand
caaugcaucucugcuuauc

SEQ ID NO: 2065749 - RNA, 19 nt, Homo sapiens
  misc_RNA (1)...(19): siRNA sense strand
acaggaaagcucaaacauu

SEQ ID NO: 2065750 - RNA, 19 nt, Homo sapiens
  misc_RNA (1)...(19): siRNA sense strand
ggucaacauucagggaaau

SEQ ID NO: 2065751 - RNA, 19 nt, Homo sapiens
  misc_RNA (1)...(19): siRNA sense strand
cuaccuacccguccacuau

SEQ ID NO: 2065752 - RNA, 19 nt, Homo sapiens
  misc_RNA (1)...(19): siRNA sense strand
ucggcuagcuuaccaaugg

SEQ ID NO: 2065753 - RNA, 19 nt, Homo sapiens
  misc_RNA (1)...(19): siRNA sense strand
agauacaagucacgguuga

SEQ ID NO: 2065754 - RNA, 19 nt, Homo sapiens
  misc_RNA (1)...(19): siRNA sense strand
gaaggugacagugccauca

SEQ ID NO: 2065755 - RNA, 19 nt, Homo sapiens
  misc_RNA (1)...(19): siRNA sense strand
cuggaugacuucggaauau

SEQ ID NO: 2065756 - RNA, 19 nt, Homo sapiens
  misc_RNA (1)...(19): siRNA sense strand
uagcaaguauaacuggaau

SEQ ID NO: 2065757 - RNA, 19 nt, Homo sapiens
  misc_RNA (1)...(19): siRNA sense strand
ggaaaaucauugucaccuu

SEQ ID NO: 2065758 - RNA, 19 nt, Homo sapiens
  misc_RNA (1)...(19): siRNA sense strand
agaaguugcaucugagaaa

SEQ ID NO: 2065759 - RNA, 19 nt, Homo sapiens
  misc_RNA (1)...(19): siRNA sense strand
gaauaagucugugguuccu

SEQ ID NO: 2065760 - RNA, 19 nt, Homo sapiens
  misc_RNA (1)...(19): siRNA sense strand
uugaugauccugucacaaa

SEQ ID NO: 2065761 - RNA, 19 nt, Homo sapiens
  misc_RNA (1)...(19): siRNA sense strand
gacugacaauacuacauau

SEQ ID NO: 2065762 - RNA, 19 nt, Homo sapiens
  misc_RNA (1)...(19): siRNA sense strand
uggaauaccaacacaaguu

SEQ ID NO: 2065763 - RNA, 19 nt, Homo sapiens
  misc_RNA (1)...(19): siRNA sense strand
gcaggcaagaugaaacuca

SEQ ID NO: 2065764 - RNA, 19 nt, Homo sapiens
  misc_RNA (1)...(19): siRNA sense strand
gacuaugugugcugugcuu

SEQ ID NO: 2065765 - RNA, 19 nt, Homo sapiens
  misc_RNA (1)...(19): siRNA sense strand
ggaacccugucagugaaau

SEQ ID NO: 2065766 - RNA, 19 nt, Homo sapiens
  misc_RNA (1)...(19): siRNA sense strand
gugcugugcuuacaacaac

SEQ ID NO: 2065767 - RNA, 19 nt, Homo sapiens
  misc_RNA (1)...(19): siRNA sense strand
uaggaggacugacaauacu

SEQ ID NO: 2065768 - RNA, 19 nt, Homo sapiens
  misc_RNA (1)...(19): siRNA sense strand
augcaucucugcuuaucaa

SEQ ID NO: 2065769 - RNA, 19 nt, Homo sapiens
  misc_RNA (1)...(19): siRNA sense strand
gcaggccagaaacagaaua

SEQ ID NO: 2065770 - RNA, 19 nt, Homo sapiens
  misc_RNA (1)...(19): siRNA sense strand
aaaaguaggggaaguguuu

SEQ ID NO: 2065771 - RNA, 19 nt, Homo sapiens
  misc_RNA (1)...(19): siRNA sense strand
gauaaagggcuaaaaguag

SEQ ID NO: 2065772 - RNA, 19 nt, Homo sapiens
  misc_RNA (1)...(19): siRNA sense strand
cagcuccaccuacuccuuu

SEQ ID NO: 2065773 - RNA, 19 nt, Homo sapiens
  misc_RNA (1)...(19): siRNA sense strand
caaaacaauacccuucaua

SEQ ID NO: 2065774 - RNA, 19 nt, Homo sapiens
  misc_RNA (1)...(19): siRNA sense strand
ggaaguguuuacuguugac

SEQ ID NO: 2065775 - RNA, 19 nt, Homo sapiens
  misc_RNA (1)...(19): siRNA sense strand
acagcugccuggugaggaa

SEQ ID NO: 2065776 - RNA, 19 nt, Homo sapiens
  misc_RNA (1)...(19): siRNA sense strand
ccagaucauauggcuauuu

SEQ ID NO: 2065777 - RNA, 19 nt, Homo sapiens
  misc_RNA (1)...(19): siRNA sense strand
aauaucaacccuacaaagu

SEQ ID NO: 2065778 - RNA, 19 nt, Homo sapiens
  misc_RNA (1)...(19): siRNA sense strand
ggggaaguguuuacuguug

SEQ ID NO: 2065779 - RNA, 19 nt, Homo sapiens
  misc_RNA (1)...(19): siRNA sense strand
ugaaauggaaagugauauc

SEQ ID NO: 2065780 - RNA, 19 nt, Homo sapiens
  misc_RNA (1)...(19): siRNA sense strand
ugacuucggaauauaugaa

SEQ ID NO: 2065781 - RNA, 19 nt, Homo sapiens
  misc_RNA (1)...(19): siRNA sense strand
ucaccuuuagcaaguauaa

SEQ ID NO: 2065782 - RNA, 19 nt, Homo sapiens
  misc_RNA (1)...(19): siRNA sense strand
ggauuaggaggacugacaa

SEQ ID NO: 2065783 - RNA, 19 nt, Homo sapiens
  misc_RNA (1)...(19): siRNA sense strand
aacaccuacuccuggauua

SEQ ID NO: 2065784 - RNA, 19 nt, Homo sapiens
  misc_RNA (1)...(19): siRNA sense strand
gauaucauuaugcccauca

SEQ ID NO: 2065785 - RNA, 19 nt, Homo sapiens
  misc_RNA (1)...(19): siRNA sense strand
gaacuuaaccagcuggaaa

SEQ ID NO: 2065786 - RNA, 19 nt, Homo sapiens
  misc_RNA (1)...(19): siRNA sense strand
gcuuuggacuccuaacuuu

SEQ ID NO: 2065787 - RNA, 19 nt, Homo sapiens
  misc_RNA (1)...(19): siRNA sense strand
gaccuagccuuaccuaaca

SEQ ID NO: 2065788 - RNA, 19 nt, Homo sapiens
  misc_RNA (1)...(19): siRNA sense strand
caacacugaccuagccuua

SEQ ID NO: 2065789 - RNA, 19 nt, Homo sapiens
  misc_RNA (1)...(19): siRNA sense strand
ggucuauucucuucucauc

SEQ ID NO: 2065790 - RNA, 19 nt, Homo sapiens
  misc_RNA (1)...(19): siRNA sense strand
uaacaaacuggaagaacuu

SEQ ID NO: 2065791 - RNA, 19 nt, Homo sapiens
  misc_RNA (1)...(19): siRNA sense strand
cuaacaaacuggaagaacu

SEQ ID NO: 2065792 - RNA, 19 nt, Homo sapiens
  misc_RNA (1)...(19): siRNA sense strand
gagcuugcuuuuggaaaua

SEQ ID NO: 2065793 - RNA, 19 nt, Homo sapiens
  misc_RNA (1)...(19): siRNA sense strand
ugagacguccuaugcugua

SEQ ID NO: 2065794 - RNA, 19 nt, Homo sapiens
  misc_RNA (1)...(19): siRNA sense strand
gauggucuauucucuucuc

SEQ ID NO: 2065795 - RNA, 19 nt, Homo sapiens
  misc_RNA (1)...(19): siRNA sense strand
uacccaaggaaaugaaaua

SEQ ID NO: 2065796 - RNA, 19 nt, Homo sapiens
  misc_RNA (1)...(19): siRNA sense strand
auauacaaaucgugaggaa

SEQ ID NO: 2065797 - RNA, 19 nt, Homo sapiens
  misc_RNA (1)...(19): siRNA sense strand
caaaucgugaggaacuauu

SEQ ID NO: 2065798 - RNA, 19 nt, Homo sapiens
  misc_RNA (1)...(19): siRNA sense strand
uggaaaagcuaaaagaaca

SEQ ID NO: 2065799 - RNA, 19 nt, Homo sapiens
  misc_RNA (1)...(19): siRNA sense strand
uaucuuacccaaggaaaug

SEQ ID NO: 2065800 - RNA, 19 nt, Homo sapiens
  misc_RNA (1)...(19): siRNA sense strand
gacguccuaugcuguagau

SEQ ID NO: 2065801 - RNA, 19 nt, Homo sapiens
  misc_RNA (1)...(19): siRNA sense strand
aacaagauccucucaagca

SEQ ID NO: 2065802 - RNA, 19 nt, Homo sapiens
  misc_RNA (1)...(19): siRNA sense strand
uacaaaucgugaggaacua

SEQ ID NO: 2065803 - RNA, 19 nt, Homo sapiens
  misc_RNA (1)...(19): siRNA sense strand
ugcuggcucuacugaauaa

SEQ ID NO: 2065804 - RNA, 19 nt, Homo sapiens
  misc_RNA (1)...(19): siRNA sense strand
ugaccuagccuuaccuaac

SEQ ID NO: 2065805 - RNA, 19 nt, Homo sapiens
  misc_RNA (1)...(19): siRNA sense strand
gaacuauugcuggcucuac

SEQ ID NO: 2065806 - RNA, 19 nt, Homo sapiens
  misc_RNA (1)...(19): siRNA sense strand
caaacuggaagaacuuaac

SEQ ID NO: 2065807 - RNA, 19 nt, Homo sapiens
  misc_RNA (1)...(19): siRNA sense strand
guccuaugcuguagauggu

SEQ ID NO: 2065808 - RNA, 19 nt, Homo sapiens
  misc_RNA (1)...(19): siRNA sense strand
cccaaggaaaugaaauauu

SEQ ID NO: 2065809 - RNA, 19 nt, Homo sapiens
  misc_RNA (1)...(19): siRNA sense strand
agccuuaccuaacaaacug

SEQ ID NO: 2065810 - RNA, 19 nt, Homo sapiens
  misc_RNA (1)...(19): siRNA sense strand
auacaaaucgugaggaacu

SEQ ID NO: 2065811 - RNA, 19 nt, Homo sapiens
  misc_RNA (1)...(19): siRNA sense strand
cauccuagcaaacgagcuu

SEQ ID NO: 2065812 - RNA, 19 nt, Homo sapiens
  misc_RNA (1)...(19): siRNA sense strand
gagacguccuaugcuguag

SEQ ID NO: 2065813 - RNA, 19 nt, Homo sapiens
  misc_RNA (1)...(19): siRNA sense strand
gcacaguucugaucacuuc

SEQ ID NO: 2065814 - RNA, 19 nt, Homo sapiens
  misc_RNA (1)...(19): siRNA sense strand
caucaucacuguucuuaga

SEQ ID NO: 2065815 - RNA, 19 nt, Homo sapiens
  misc_RNA (1)...(19): siRNA sense strand
ggacagcaguucagaaguc

SEQ ID NO: 2065816 - RNA, 19 nt, Homo sapiens
  misc_RNA (1)...(19): siRNA sense strand
ucagaagucucauuacaca

SEQ ID NO: 2065817 - RNA, 19 nt, Homo sapiens
  misc_RNA (1)...(19): siRNA sense strand
guucagaagucucauuaca

SEQ ID NO: 2065818 - RNA, 19 nt, Homo sapiens
  misc_RNA (1)...(19): siRNA sense strand
ggccaucccuccaucaaug

SEQ ID NO: 2065819 - RNA, 19 nt, Homo sapiens
  misc_RNA (1)...(19): siRNA sense strand
ugauucagcugacacagaa

SEQ ID NO: 2065820 - RNA, 19 nt, Homo sapiens
  misc_RNA (1)...(19): siRNA sense strand
cagcagacaucuccaaguc

SEQ ID NO: 2065821 - RNA, 19 nt, Homo sapiens
  misc_RNA (1)...(19): siRNA sense strand
ccaagggccugauguugug

SEQ ID NO: 2065822 - RNA, 19 nt, Homo sapiens
  misc_RNA (1)...(19): siRNA sense strand
gcccaaugcuggcuucuuc

SEQ ID NO: 2065823 - RNA, 19 nt, Homo sapiens
  misc_RNA (1)...(19): siRNA sense strand
gaagucucauuacacaauc

SEQ ID NO: 2065824 - RNA, 19 nt, Homo sapiens
  misc_RNA (1)...(19): siRNA sense strand
ccaaccacgucuccuaugu

SEQ ID NO: 2065825 - RNA, 19 nt, Homo sapiens
  misc_RNA (1)...(19): siRNA sense strand
ccaagucgguguaccuuac

SEQ ID NO: 2065826 - RNA, 19 nt, Homo sapiens
  misc_RNA (1)...(19): siRNA sense strand
ggauucuacugguguggaa

SEQ ID NO: 2065827 - RNA, 19 nt, Homo sapiens
  misc_RNA (1)...(19): siRNA sense strand
ccaacaagcacaguucuga

SEQ ID NO: 2065828 - RNA, 19 nt, Homo sapiens
  misc_RNA (1)...(19): siRNA sense strand
cgguguaccuuacuuguca

SEQ ID NO: 2065829 - RNA, 19 nt, Homo sapiens
  misc_RNA (1)...(19): siRNA sense strand
caguucagaagucucauua

SEQ ID NO: 2065830 - RNA, 19 nt, Homo sapiens
  misc_RNA (1)...(19): siRNA sense strand
gccaagggccugauguugu

SEQ ID NO: 2065831 - RNA, 19 nt, Homo sapiens
  misc_RNA (1)...(19): siRNA sense strand
cuacugguguggaaucuac

SEQ ID NO: 2065832 - RNA, 19 nt, Homo sapiens
  misc_RNA (1)...(19): siRNA sense strand
gcucugagaccaggaaauc

SEQ ID NO: 2065833 - RNA, 19 nt, Homo sapiens
  misc_RNA (1)...(19): siRNA sense strand
gcaguucagaagucucauu

SEQ ID NO: 2065834 - RNA, 19 nt, Homo sapiens
  misc_RNA (1)...(19): siRNA sense strand
gcuggcuucuucaacauca

SEQ ID NO: 2065835 - RNA, 19 nt, Homo sapiens
  misc_RNA (1)...(19): siRNA sense strand
cuacaacgcuuccgaaaac

SEQ ID NO: 2065836 - RNA, 19 nt, Homo sapiens
  misc_RNA (1)...(19): siRNA sense strand
agaagucucauuacacaau

SEQ ID NO: 2065837 - RNA, 19 nt, Homo sapiens
  misc_RNA (1)...(19): siRNA sense strand
ucuccuauguggacucuuc

SEQ ID NO: 2065838 - RNA, 19 nt, Homo sapiens
  misc_RNA (1)...(19): siRNA sense strand
aaugcuggcuucuucaaca

SEQ ID NO: 2065839 - RNA, 19 nt, Homo sapiens
  misc_RNA (1)...(19): siRNA sense strand
ccaguacucacccaagaga

SEQ ID NO: 2065840 - RNA, 19 nt, Homo sapiens
  misc_RNA (1)...(19): siRNA sense strand
caacaagcacaguucugau

SEQ ID NO: 2065841 - RNA, 19 nt, Homo sapiens
  misc_RNA (1)...(19): siRNA sense strand
ccaagagagggcccuauca

SEQ ID NO: 2065842 - RNA, 19 nt, Homo sapiens
  misc_RNA (1)...(19): siRNA sense strand
ccgaaaacaucaucacugu

SEQ ID NO: 2065843 - RNA, 19 nt, Homo sapiens
  misc_RNA (1)...(19): siRNA sense strand
ugccaguacucacccaaga

SEQ ID NO: 2065844 - RNA, 19 nt, Homo sapiens
  misc_RNA (1)...(19): siRNA sense strand
caagagagggcccuaucag

SEQ ID NO: 2065845 - RNA, 19 nt, Homo sapiens
  misc_RNA (1)...(19): siRNA sense strand
gacagcaguucagaagucu

SEQ ID NO: 2065846 - RNA, 19 nt, Homo sapiens
  misc_RNA (1)...(19): siRNA sense strand
caaccacgucuccuaugug

SEQ ID NO: 2065847 - RNA, 19 nt, Homo sapiens
  misc_RNA (1)...(19): siRNA sense strand
cagcaguucagaagucuca

SEQ ID NO: 2065848 - RNA, 19 nt, Homo sapiens
  misc_RNA (1)...(19): siRNA sense strand
ccaaugcuggcuucuucaa

SEQ ID NO: 2065849 - RNA, 19 nt, Homo sapiens
  misc_RNA (1)...(19): siRNA sense strand
ucugagaccaggaaaucaa

SEQ ID NO: 2065850 - RNA, 19 nt, Homo sapiens
  misc_RNA (1)...(19): siRNA sense strand
cacaaacacccaggacaga

SEQ ID NO: 2065851 - RNA, 19 nt, Homo sapiens
  misc_RNA (1)...(19): siRNA sense strand
agaccaagcucccugagua

SEQ ID NO: 2065852 - RNA, 19 nt, Homo sapiens
  misc_RNA (1)...(19): siRNA sense strand
gcaccacgcuguacaacug

SEQ ID NO: 2065853 - RNA, 19 nt, Homo sapiens
  misc_RNA (1)...(19): siRNA sense strand
uagaugagguguccaugaa

SEQ ID NO: 2065854 - RNA, 19 nt, Homo sapiens
  misc_RNA (1)...(19): siRNA sense strand
gaacaaagucacagagaag

SEQ ID NO: 2065855 - RNA, 19 nt, Homo sapiens
  misc_RNA (1)...(19): siRNA sense strand
ugaacaaagucacagagaa

SEQ ID NO: 2065856 - RNA, 19 nt, Homo sapiens
  misc_RNA (1)...(19): siRNA sense strand
gaugagguguccaugaaca

SEQ ID NO: 2065857 - RNA, 19 nt, Homo sapiens
  misc_RNA (1)...(19): siRNA sense strand
ucuccucacucccuucaua

SEQ ID NO: 2065858 - RNA, 19 nt, Homo sapiens
  misc_RNA (1)...(19): siRNA sense strand
ggaguuggcuucgaaagac

SEQ ID NO: 2065859 - RNA, 19 nt, Homo sapiens
  misc_RNA (1)...(19): siRNA sense strand
cuucggagcuuuccugcuu

SEQ ID NO: 2065860 - RNA, 19 nt, Homo sapiens
  misc_RNA (1)...(19): siRNA sense strand
uauuggaguuggcuucgaa

SEQ ID NO: 2065861 - RNA, 19 nt, Homo sapiens
  misc_RNA (1)...(19): siRNA sense strand
cuucucggccuuugccuua

SEQ ID NO: 2065862 - RNA, 19 nt, Homo sapiens
  misc_RNA (1)...(19): siRNA sense strand
ccucacucccuucauauug

SEQ ID NO: 2065863 - RNA, 19 nt, Homo sapiens
  misc_RNA (1)...(19): siRNA sense strand
cgcccaggcuugugucuuc

SEQ ID NO: 2065864 - RNA, 19 nt, Homo sapiens
  misc_RNA (1)...(19): siRNA sense strand
gagggucauggaaaucaaa

SEQ ID NO: 2065865 - RNA, 19 nt, Homo sapiens
  misc_RNA (1)...(19): siRNA sense strand
ucacucccuucauauugga

SEQ ID NO: 2065866 - RNA, 19 nt, Homo sapiens
  misc_RNA (1)...(19): siRNA sense strand
ccagacuucucggccuuug

SEQ ID NO: 2065867 - RNA, 19 nt, Homo sapiens
  misc_RNA (1)...(19): siRNA sense strand
ggucauggaaaucaaagag

SEQ ID NO: 2065868 - RNA, 19 nt, Homo sapiens
  misc_RNA (1)...(19): siRNA sense strand
ugagggucauggaaaucaa

SEQ ID NO: 2065869 - RNA, 19 nt, Homo sapiens
  misc_RNA (1)...(19): siRNA sense strand
cccaccaccuccaagcaaa

SEQ ID NO: 2065870 - RNA, 19 nt, Homo sapiens
  misc_RNA (1)...(19): siRNA sense strand
uuagaugagguguccauga

SEQ ID NO: 2065871 - RNA, 19 nt, Homo sapiens
  misc_RNA (1)...(19): siRNA sense strand
guccugagggucauggaaa

SEQ ID NO: 2065872 - RNA, 19 nt, Homo sapiens
  misc_RNA (1)...(19): siRNA sense strand
ccaggcuugugucuucugu

SEQ ID NO: 2065873 - RNA, 19 nt, Homo sapiens
  misc_RNA (1)...(19): siRNA sense strand
agaccaagcucccugagua

SEQ ID NO: 2065874 - RNA, 19 nt, Homo sapiens
  misc_RNA (1)...(19): siRNA sense strand
gcaccacgcuguacaacug

SEQ ID NO: 2065875 - RNA, 19 nt, Homo sapiens
  misc_RNA (1)...(19): siRNA sense strand
gguaugcacucacaacuuc

SEQ ID NO: 2065876 - RNA, 19 nt, Homo sapiens
  misc_RNA (1)...(19): siRNA sense strand
uagaugagguguccaugaa

SEQ ID NO: 2065877 - RNA, 19 nt, Homo sapiens
  misc_RNA (1)...(19): siRNA sense strand
gaacaaagucacagagaag

SEQ ID NO: 2065878 - RNA, 19 nt, Homo sapiens
  misc_RNA (1)...(19): siRNA sense strand
ugaacaaagucacagagaa

SEQ ID NO: 2065879 - RNA, 19 nt, Homo sapiens
  misc_RNA (1)...(19): siRNA sense strand
gaugagguguccaugaaca

SEQ ID NO: 2065880 - RNA, 19 nt, Homo sapiens
  misc_RNA (1)...(19): siRNA sense strand
ucuccucacucccuucaua

SEQ ID NO: 2065881 - RNA, 19 nt, Homo sapiens
  misc_RNA (1)...(19): siRNA sense strand
ggaguuggcuucgaaagac

SEQ ID NO: 2065882 - RNA, 19 nt, Homo sapiens
  misc_RNA (1)...(19): siRNA sense strand
cuucggagcuuuccugcuu

SEQ ID NO: 2065883 - RNA, 19 nt, Homo sapiens
  misc_RNA (1)...(19): siRNA sense strand
uauuggaguuggcuucgaa

SEQ ID NO: 2065884 - RNA, 19 nt, Homo sapiens
  misc_RNA (1)...(19): siRNA sense strand
cuucucggccuuugccuua

SEQ ID NO: 2065885 - RNA, 19 nt, Homo sapiens
  misc_RNA (1)...(19): siRNA sense strand
ccucacucccuucauauug

SEQ ID NO: 2065886 - RNA, 19 nt, Homo sapiens
  misc_RNA (1)...(19): siRNA sense strand
gagggucauggaaaucaaa

SEQ ID NO: 2065887 - RNA, 19 nt, Homo sapiens
  misc_RNA (1)...(19): siRNA sense strand
aaaaguggcuugugaagac

SEQ ID NO: 2065888 - RNA, 19 nt, Homo sapiens
  misc_RNA (1)...(19): siRNA sense strand
ucacucccuucauauugga

SEQ ID NO: 2065889 - RNA, 19 nt, Homo sapiens
  misc_RNA (1)...(19): siRNA sense strand
gcacucacaacuuccacau

SEQ ID NO: 2065890 - RNA, 19 nt, Homo sapiens
  misc_RNA (1)...(19): siRNA sense strand
ccagacuucucggccuuug

SEQ ID NO: 2065891 - RNA, 19 nt, Homo sapiens
  misc_RNA (1)...(19): siRNA sense strand
ggucauggaaaucaaagag

SEQ ID NO: 2065892 - RNA, 19 nt, Homo sapiens
  misc_RNA (1)...(19): siRNA sense strand
ugagggucauggaaaucaa

SEQ ID NO: 2065893 - RNA, 19 nt, Homo sapiens
  misc_RNA (1)...(19): siRNA sense strand
cccaccaccuccaagcaaa

SEQ ID NO: 2065894 - RNA, 19 nt, Homo sapiens
  misc_RNA (1)...(19): siRNA sense strand
ggguaugcacucacaacuu

SEQ ID NO: 2065895 - RNA, 19 nt, Homo sapiens
  misc_RNA (1)...(19): siRNA sense strand
guccugagggucauggaaa

SEQ ID NO: 2065896 - RNA, 19 nt, Homo sapiens
  misc_RNA (1)...(19): siRNA sense strand
uuagaugagguguccauga

SEQ ID NO: 2065897 - RNA, 19 nt, Homo sapiens
  misc_RNA (1)...(19): siRNA sense strand
gcacuacauugaccugaaa

SEQ ID NO: 2065898 - RNA, 19 nt, Homo sapiens
  misc_RNA (1)...(19): siRNA sense strand
gaagacaggccgagugaug

SEQ ID NO: 2065899 - RNA, 19 nt, Homo sapiens
  misc_RNA (1)...(19): siRNA sense strand
cugaagaacugguugacua

SEQ ID NO: 2065900 - RNA, 19 nt, Homo sapiens
  misc_RNA (1)...(19): siRNA sense strand
ugacugggucuaugaauaa

SEQ ID NO: 2065901 - RNA, 19 nt, Homo sapiens
  misc_RNA (1)...(19): siRNA sense strand
ucccugggcuggugaagua

SEQ ID NO: 2065902 - RNA, 19 nt, Homo sapiens
  misc_RNA (1)...(19): siRNA sense strand
ugaagcagcacuacauuga

SEQ ID NO: 2065903 - RNA, 19 nt, Homo sapiens
  misc_RNA (1)...(19): siRNA sense strand
gcucaugacugggucuaug

SEQ ID NO: 2065904 - RNA, 19 nt, Homo sapiens
  misc_RNA (1)...(19): siRNA sense strand
gcauucagguuggcaggaa

SEQ ID NO: 2065905 - RNA, 19 nt, Homo sapiens
  misc_RNA (1)...(19): siRNA sense strand
ucauggcagugauucagua

SEQ ID NO: 2065906 - RNA, 19 nt, Homo sapiens
  misc_RNA (1)...(19): siRNA sense strand
gcaccuucaucgccaucaa

SEQ ID NO: 2065907 - RNA, 19 nt, Homo sapiens
  misc_RNA (1)...(19): siRNA sense strand
guuuaagccugaagaacug

SEQ ID NO: 2065908 - RNA, 19 nt, Homo sapiens
  misc_RNA (1)...(19): siRNA sense strand
ggcaggaacaucauucaug

SEQ ID NO: 2065909 - RNA, 19 nt, Homo sapiens
  misc_RNA (1)...(19): siRNA sense strand
augacugggucuaugaaua

SEQ ID NO: 2065910 - RNA, 19 nt, Homo sapiens
  misc_RNA (1)...(19): siRNA sense strand
ccugaaagaccgaccauuc

SEQ ID NO: 2065911 - RNA, 19 nt, Homo sapiens
  misc_RNA (1)...(19): siRNA sense strand
gugaagacaggccgaguga

SEQ ID NO: 2065912 - RNA, 19 nt, Homo sapiens
  misc_RNA (1)...(19): siRNA sense strand
aagaacugguugacuacaa

SEQ ID NO: 2065913 - RNA, 19 nt, Homo sapiens
  misc_RNA (1)...(19): siRNA sense strand
gguuuaagccugaagaacu

SEQ ID NO: 2065914 - RNA, 19 nt, Homo sapiens
  misc_RNA (1)...(19): siRNA sense strand
gggcugaacguggugaaga

SEQ ID NO: 2065915 - RNA, 19 nt, Homo sapiens
  misc_RNA (1)...(19): siRNA sense strand
ucaagcgcuucgagcagaa

SEQ ID NO: 2065916 - RNA, 19 nt, Homo sapiens
  misc_RNA (1)...(19): siRNA sense strand
ucaaagccaggcaccauuc

SEQ ID NO: 2065917 - RNA, 19 nt, Homo sapiens
  misc_RNA (1)...(19): siRNA sense strand
cagguuggcaggaacauca

SEQ ID NO: 2065918 - RNA, 19 nt, Homo sapiens
  misc_RNA (1)...(19): siRNA sense strand
gaacugguugacuacaagu

SEQ ID NO: 2065919 - RNA, 19 nt, Homo sapiens
  misc_RNA (1)...(19): siRNA sense strand
agaacugguugacuacaag

SEQ ID NO: 2065920 - RNA, 19 nt, Homo sapiens
  misc_RNA (1)...(19): siRNA sense strand
gaagaacugguugacuaca

SEQ ID NO: 2065921 - RNA, 19 nt, Homo sapiens
  misc_RNA (1)...(19): siRNA sense strand
uggcagugauucaguaaaa

SEQ ID NO: 2065922 - RNA, 19 nt, Homo sapiens
  misc_RNA (1)...(19): siRNA sense strand
gggcuggugaaguacauga

SEQ ID NO: 2065923 - RNA, 19 nt, Homo sapiens
  misc_RNA (1)...(19): siRNA sense strand
cugaagaacaccugaagca

SEQ ID NO: 2065924 - RNA, 19 nt, Homo sapiens
  misc_RNA (1)...(19): siRNA sense strand
gaucaugucuucagauuca

SEQ ID NO: 2065925 - RNA, 19 nt, Homo sapiens
  misc_RNA (1)...(19): siRNA sense strand
agaggaagauucaguuuaa

SEQ ID NO: 2065926 - RNA, 19 nt, Homo sapiens
  misc_RNA (1)...(19): siRNA sense strand
ugaaaugggugcuggaauu

SEQ ID NO: 2065927 - RNA, 19 nt, Homo sapiens
  misc_RNA (1)...(19): siRNA sense strand
caacggagcccaaaaguua

SEQ ID NO: 2065928 - RNA, 19 nt, Homo sapiens
  misc_RNA (1)...(19): siRNA sense strand
ccaaagauguugcaaagca

SEQ ID NO: 2065929 - RNA, 19 nt, Homo sapiens
  misc_RNA (1)...(19): siRNA sense strand
ggaauuugccugcuaauca

SEQ ID NO: 2065930 - RNA, 19 nt, Homo sapiens
  misc_RNA (1)...(19): siRNA sense strand
gcaacuaacaucugugaaa

SEQ ID NO: 2065931 - RNA, 19 nt, Homo sapiens
  misc_RNA (1)...(19): siRNA sense strand
gagaggaagauucaguuua

SEQ ID NO: 2065932 - RNA, 19 nt, Homo sapiens
  misc_RNA (1)...(19): siRNA sense strand
ggccuuggcucugguauuu

SEQ ID NO: 2065933 - RNA, 19 nt, Homo sapiens
  misc_RNA (1)...(19): siRNA sense strand
gggaucaugucuucagauu

SEQ ID NO: 2065934 - RNA, 19 nt, Homo sapiens
  misc_RNA (1)...(19): siRNA sense strand
ucacaaucaucuaccagua

SEQ ID NO: 2065935 - RNA, 19 nt, Homo sapiens
  misc_RNA (1)...(19): siRNA sense strand
cagcugacccuuucuauug

SEQ ID NO: 2065936 - RNA, 19 nt, Homo sapiens
  misc_RNA (1)...(19): siRNA sense strand
gguccuggcugacuuccua

SEQ ID NO: 2065937 - RNA, 19 nt, Homo sapiens
  misc_RNA (1)...(19): siRNA sense strand
ccaugcaguuguauacaua

SEQ ID NO: 2065938 - RNA, 19 nt, Homo sapiens
  misc_RNA (1)...(19): siRNA sense strand
gcucuuuguugcuggcuua

SEQ ID NO: 2065939 - RNA, 19 nt, Homo sapiens
  misc_RNA (1)...(19): siRNA sense strand
uaacagaggcacauugaug

SEQ ID NO: 2065940 - RNA, 19 nt, Homo sapiens
  misc_RNA (1)...(19): siRNA sense strand
caagauaauugaaguuggu

SEQ ID NO: 2065941 - RNA, 19 nt, Homo sapiens
  misc_RNA (1)...(19): siRNA sense strand
gcucucagcucgcuucagu

SEQ ID NO: 2065942 - RNA, 19 nt, Homo sapiens
  misc_RNA (1)...(19): siRNA sense strand
ccaucaagcucuucuauac

SEQ ID NO: 2065943 - RNA, 19 nt, Homo sapiens
  misc_RNA (1)...(19): siRNA sense strand
ugucacgucuggccuuaua

SEQ ID NO: 2065944 - RNA, 19 nt, Homo sapiens
  misc_RNA (1)...(19): siRNA sense strand
gcaguuguauacauagugu

SEQ ID NO: 2065945 - RNA, 19 nt, Homo sapiens
  misc_RNA (1)...(19): siRNA sense strand
gcacgugcuuauccaguug

SEQ ID NO: 2065946 - RNA, 19 nt, Homo sapiens
  misc_RNA (1)...(19): siRNA sense strand
gcuggaauuugccugcuaa

SEQ ID NO: 2065947 - RNA, 19 nt, Homo sapiens
  misc_RNA (1)...(19): siRNA sense strand
gaguggaccugccaaucaa

SEQ ID NO: 2065948 - RNA, 19 nt, Homo sapiens
  misc_RNA (1)...(19): siRNA sense strand
caacaccuaucccaucaag

SEQ ID NO: 2065949 - RNA, 19 nt, Homo sapiens
  misc_RNA (1)...(19): siRNA sense strand
gccgaggaauggaauuuga

SEQ ID NO: 2065950 - RNA, 19 nt, Homo sapiens
  misc_RNA (1)...(19): siRNA sense strand
uugcaguggucaucuauuu

SEQ ID NO: 2065951 - RNA, 19 nt, Homo sapiens
  misc_RNA (1)...(19): siRNA sense strand
ggaagauucaguuuaagga

SEQ ID NO: 2065952 - RNA, 19 nt, Homo sapiens
  misc_RNA (1)...(19): siRNA sense strand
caacuaacaucugugaaac

SEQ ID NO: 2065953 - RNA, 19 nt, Homo sapiens
  misc_RNA (1)...(19): siRNA sense strand
gagugauucuagccucuaa

SEQ ID NO: 2065954 - RNA, 19 nt, Homo sapiens
  misc_RNA (1)...(19): siRNA sense strand
gauucuagccucuaacaga

SEQ ID NO: 2065955 - RNA, 19 nt, Homo sapiens
  misc_RNA (1)...(19): siRNA sense strand
aaaguuauuuggcaugauc

SEQ ID NO: 2065956 - RNA, 19 nt, Homo sapiens
  misc_RNA (1)...(19): siRNA sense strand
gccagucuaucguguaugu

SEQ ID NO: 2065957 - RNA, 19 nt, Homo sapiens
  misc_RNA (1)...(19): siRNA sense strand
gcgccaagauaauugaagu

SEQ ID NO: 2065958 - RNA, 19 nt, Homo sapiens
  misc_RNA (1)...(19): siRNA sense strand
gaaauucagaagccagaga

SEQ ID NO: 2065959 - RNA, 19 nt, Homo sapiens
  misc_RNA (1)...(19): siRNA sense strand
gaauuugccugcuaaucac

SEQ ID NO: 2065960 - RNA, 19 nt, Homo sapiens
  misc_RNA (1)...(19): siRNA sense strand
gcccugguguccaaccuuu

SEQ ID NO: 2065961 - RNA, 19 nt, Homo sapiens
  misc_RNA (1)...(19): siRNA sense strand
agaccgagcucucuucaac

SEQ ID NO: 2065962 - RNA, 19 nt, Homo sapiens
  misc_RNA (1)...(19): siRNA sense strand
ucucaucgccaccaucuuu

SEQ ID NO: 2065963 - RNA, 19 nt, Homo sapiens
  misc_RNA (1)...(19): siRNA sense strand
gcuaucacccucuuuaucu

SEQ ID NO: 2065964 - RNA, 19 nt, Homo sapiens
  misc_RNA (1)...(19): siRNA sense strand
acuuugagaucuucguuaa

SEQ ID NO: 2065965 - RNA, 19 nt, Homo sapiens
  misc_RNA (1)...(19): siRNA sense strand
uugguggccuuugcuauua

SEQ ID NO: 2065966 - RNA, 19 nt, Homo sapiens
  misc_RNA (1)...(19): siRNA sense strand
guauuucucucuucauugc

SEQ ID NO: 2065967 - RNA, 19 nt, Homo sapiens
  misc_RNA (1)...(19): siRNA sense strand
gcucugguauuucucucuu

SEQ ID NO: 2065968 - RNA, 19 nt, Homo sapiens
  misc_RNA (1)...(19): siRNA sense strand
ggaccgcuaucacccucuu

SEQ ID NO: 2065969 - RNA, 19 nt, Homo sapiens
  misc_RNA (1)...(19): siRNA sense strand
ugccaaagauguugcaaag

SEQ ID NO: 2065970 - RNA, 19 nt, Homo sapiens
  misc_RNA (1)...(19): siRNA sense strand
ucaaauuucuggaagucau

SEQ ID NO: 2065971 - RNA, 19 nt, Homo sapiens
  misc_RNA (1)...(19): siRNA sense strand
gacccuuucuauuggauga

SEQ ID NO: 2065972 - RNA, 19 nt, Homo sapiens
  misc_RNA (1)...(19): siRNA sense strand
uacaacaccuaucccauca

SEQ ID NO: 2065973 - RNA, 19 nt, Homo sapiens
  misc_RNA (1)...(19): siRNA sense strand
cgaguggaccugccaauca

SEQ ID NO: 2065974 - RNA, 19 nt, Homo sapiens
  misc_RNA (1)...(19): siRNA sense strand
uuagugugcugccagauuc

SEQ ID NO: 2065975 - RNA, 19 nt, Homo sapiens
  misc_RNA (1)...(19): siRNA sense strand
agauucagcugacccuuuc

SEQ ID NO: 2065976 - RNA, 19 nt, Homo sapiens
  misc_RNA (1)...(19): siRNA sense strand
cacccucuuuaucuucuua

SEQ ID NO: 2065977 - RNA, 19 nt, Homo sapiens
  misc_RNA (1)...(19): siRNA sense strand
gggcuccugugcauucuuc

SEQ ID NO: 2065978 - RNA, 19 nt, Homo sapiens
  misc_RNA (1)...(19): siRNA sense strand
uggcuuaauuguccuacuu

SEQ ID NO: 2065979 - RNA, 19 nt, Homo sapiens
  misc_RNA (1)...(19): siRNA sense strand
caaucaaauuucuggaagu

SEQ ID NO: 2065980 - RNA, 19 nt, Homo sapiens
  misc_RNA (1)...(19): siRNA sense strand
cuuuguugcuggcuuaauu

SEQ ID NO: 2065981 - RNA, 19 nt, Homo sapiens
  misc_RNA (1)...(19): siRNA sense strand
ucgcuucaguggcaacuug

SEQ ID NO: 2065982 - RNA, 19 nt, Homo sapiens
  misc_RNA (1)...(19): siRNA sense strand
uaugucaucucccaaaugc

SEQ ID NO: 2065983 - RNA, 19 nt, Homo sapiens
  misc_RNA (1)...(19): siRNA sense strand
gccagaaucuucccaaccu

SEQ ID NO: 2065984 - RNA, 19 nt, Homo sapiens
  misc_RNA (1)...(19): siRNA sense strand
agauucaguuuaaggagaa

SEQ ID NO: 2065985 - RNA, 19 nt, Homo sapiens
  misc_RNA (1)...(19): siRNA sense strand
ugguauuucucucuucauu

SEQ ID NO: 2065986 - RNA, 19 nt, Homo sapiens
  misc_RNA (1)...(19): siRNA sense strand
cagauucagcugacccuuu

SEQ ID NO: 2065987 - RNA, 19 nt, Homo sapiens
  misc_RNA (1)...(19): siRNA sense strand
gaucuucguuaaggagcaa

SEQ ID NO: 2065988 - RNA, 19 nt, Homo sapiens
  misc_RNA (1)...(19): siRNA sense strand
guugguggccuuugcuauu

SEQ ID NO: 2065989 - RNA, 19 nt, Homo sapiens
  misc_RNA (1)...(19): siRNA sense strand
caacacuggccgaggaaug

SEQ ID NO: 2065990 - RNA, 19 nt, Homo sapiens
  misc_RNA (1)...(19): siRNA sense strand
cgucuggccuuauaaugca

SEQ ID NO: 2065991 - RNA, 19 nt, Homo sapiens
  misc_RNA (1)...(19): siRNA sense strand
gaggaagauucaguuuaag

SEQ ID NO: 2065992 - RNA, 19 nt, Homo sapiens
  misc_RNA (1)...(19): siRNA sense strand
gccaagauaauugaaguug

SEQ ID NO: 2065993 - RNA, 19 nt, Homo sapiens
  misc_RNA (1)...(19): siRNA sense strand
gagcagcagauggugauga

SEQ ID NO: 2065994 - RNA, 19 nt, Homo sapiens
  misc_RNA (1)...(19): siRNA sense strand
cauugcaacuaacaucugu

SEQ ID NO: 2065995 - RNA, 19 nt, Homo sapiens
  misc_RNA (1)...(19): siRNA sense strand
uggaugaacuccugcaaaa

SEQ ID NO: 2065996 - RNA, 19 nt, Homo sapiens
  misc_RNA (1)...(19): siRNA sense strand
ucuaacagaggcacauuga

SEQ ID NO: 2065997 - RNA, 19 nt, Homo sapiens
  misc_RNA (1)...(19): siRNA sense strand
ugaaggagcagcagauggu

SEQ ID NO: 2065998 - RNA, 19 nt, Homo sapiens
  misc_RNA (1)...(19): siRNA sense strand
uugcaaagcagcugaagga

SEQ ID NO: 2065999 - RNA, 19 nt, Homo sapiens
  misc_RNA (1)...(19): siRNA sense strand
gaauuugaaggugcuauca

SEQ ID NO: 2066000 - RNA, 19 nt, Homo sapiens
  misc_RNA (1)...(19): siRNA sense strand
ggcaaucaaauuucuggaa

SEQ ID NO: 2066001 - RNA, 19 nt, Homo sapiens
  misc_RNA (1)...(19): siRNA sense strand
aaucaucuaccaguacuuu

SEQ ID NO: 2066002 - RNA, 19 nt, Homo sapiens
  misc_RNA (1)...(19): siRNA sense strand
gccaccaucuuugucuuug

SEQ ID NO: 2066003 - RNA, 19 nt, Homo sapiens
  misc_RNA (1)...(19): siRNA sense strand
aaucaaauuucuggaaguc

SEQ ID NO: 2066004 - RNA, 19 nt, Homo sapiens
  misc_RNA (1)...(19): siRNA sense strand
cagagaggaagauucaguu

SEQ ID NO: 2066005 - RNA, 19 nt, Homo sapiens
  misc_RNA (1)...(19): siRNA sense strand
cggccagucuaucguguau

SEQ ID NO: 2066006 - RNA, 19 nt, Homo sapiens
  misc_RNA (1)...(19): siRNA sense strand
ucaucaagcccuucugugu

SEQ ID NO: 2066007 - RNA, 19 nt, Homo sapiens
  misc_RNA (1)...(19): siRNA sense strand
ggaauuugaaggugcuauc

SEQ ID NO: 2066008 - RNA, 19 nt, Homo sapiens
  misc_RNA (1)...(19): siRNA sense strand
gcugacccuuucuauugga

SEQ ID NO: 2066009 - RNA, 19 nt, Homo sapiens
  misc_RNA (1)...(19): siRNA sense strand
ccaguacuuugagaucuuc

SEQ ID NO: 2066010 - RNA, 19 nt, Homo sapiens
  misc_RNA (1)...(19): siRNA sense strand
gcugggcuccugugcauuc

SEQ ID NO: 2066011 - RNA, 19 nt, Homo sapiens
  misc_RNA (1)...(19): siRNA sense strand
ggcaugaucauuacuaucg

SEQ ID NO: 2066012 - RNA, 19 nt, Homo sapiens
  misc_RNA (1)...(19): siRNA sense strand
ucaucuaccaguacuuuga

SEQ ID NO: 2066013 - RNA, 19 nt, Homo sapiens
  misc_RNA (1)...(19): siRNA sense strand
guccaaccuuuaugucauc

SEQ ID NO: 2066014 - RNA, 19 nt, Homo sapiens
  misc_RNA (1)...(19): siRNA sense strand
ccagagaggaagauucagu

SEQ ID NO: 2066015 - RNA, 19 nt, Homo sapiens
  misc_RNA (1)...(19): siRNA sense strand
aaucaccauucagcucuuu

SEQ ID NO: 2066016 - RNA, 19 nt, Homo sapiens
  misc_RNA (1)...(19): siRNA sense strand
gugaugaccgggauguaug

SEQ ID NO: 2066017 - RNA, 19 nt, Homo sapiens
  misc_RNA (1)...(19): siRNA sense strand
guacuuugagaucuucguu

SEQ ID NO: 2066018 - RNA, 19 nt, Homo sapiens
  misc_RNA (1)...(19): siRNA sense strand
cuaucacccucuuuaucuu

SEQ ID NO: 2066019 - RNA, 19 nt, Homo sapiens
  misc_RNA (1)...(19): siRNA sense strand
cucuuuaucuucuuagugu

SEQ ID NO: 2066020 - RNA, 19 nt, Homo sapiens
  misc_RNA (1)...(19): siRNA sense strand
gguauuucucucuucauug

SEQ ID NO: 2066021 - RNA, 19 nt, Homo sapiens
  misc_RNA (1)...(19): siRNA sense strand
uguuugggaucaugucuuc

SEQ ID NO: 2066022 - RNA, 19 nt, Homo sapiens
  misc_RNA (1)...(19): siRNA sense strand
gaagccagagaggaagauu

SEQ ID NO: 2066023 - RNA, 19 nt, Homo sapiens
  misc_RNA (1)...(19): siRNA sense strand
agagaggaagauucaguuu

SEQ ID NO: 2066024 - RNA, 19 nt, Homo sapiens
  misc_RNA (1)...(19): siRNA sense strand
gcucaaaguuggcccuguu

SEQ ID NO: 2066025 - RNA, 19 nt, Homo sapiens
  misc_RNA (1)...(19): siRNA sense strand
gcaaguacacucguucgua

SEQ ID NO: 2066026 - RNA, 19 nt, Homo sapiens
  misc_RNA (1)...(19): siRNA sense strand
gguuaugagucuucuguuc

SEQ ID NO: 2066027 - RNA, 19 nt, Homo sapiens
  misc_RNA (1)...(19): siRNA sense strand
guuccaguauugguuauga

SEQ ID NO: 2066028 - RNA, 19 nt, Homo sapiens
  misc_RNA (1)...(19): siRNA sense strand
ucaccugggcucaaaguug

SEQ ID NO: 2066029 - RNA, 19 nt, Homo sapiens
  misc_RNA (1)...(19): siRNA sense strand
guuaugagucuucuguuca

SEQ ID NO: 2066030 - RNA, 19 nt, Homo sapiens
  misc_RNA (1)...(19): siRNA sense strand
agauucaccugggcucaaa

SEQ ID NO: 2066031 - RNA, 19 nt, Homo sapiens
  misc_RNA (1)...(19): siRNA sense strand
caguauugguuaugagucu

SEQ ID NO: 2066032 - RNA, 19 nt, Homo sapiens
  misc_RNA (1)...(19): siRNA sense strand
aguuggcccuguuccagua

SEQ ID NO: 2066033 - RNA, 19 nt, Homo sapiens
  misc_RNA (1)...(19): siRNA sense strand
ccuguuccaguauugguua

SEQ ID NO: 2066034 - RNA, 19 nt, Homo sapiens
  misc_RNA (1)...(19): siRNA sense strand
ccacuguccggcagaggaa

SEQ ID NO: 2066035 - RNA, 19 nt, Homo sapiens
  misc_RNA (1)...(19): siRNA sense strand
gaacagagcuugaauugaa

SEQ ID NO: 2066036 - RNA, 19 nt, Homo sapiens
  misc_RNA (1)...(19): siRNA sense strand
gaagaagacucaaguauag

SEQ ID NO: 2066037 - RNA, 19 nt, Homo sapiens
  misc_RNA (1)...(19): siRNA sense strand
ggaguucacuuuauuauga

SEQ ID NO: 2066038 - RNA, 19 nt, Homo sapiens
  misc_RNA (1)...(19): siRNA sense strand
gaaauagcaucagcagaua

SEQ ID NO: 2066039 - RNA, 19 nt, Homo sapiens
  misc_RNA (1)...(19): siRNA sense strand
ggaagaagacucaaguaua

SEQ ID NO: 2066040 - RNA, 19 nt, Homo sapiens
  misc_RNA (1)...(19): siRNA sense strand
ccaauggcuucucuaauua

SEQ ID NO: 2066041 - RNA, 19 nt, Homo sapiens
  misc_RNA (1)...(19): siRNA sense strand
ggagggaaguggaaguuaa

SEQ ID NO: 2066042 - RNA, 19 nt, Homo sapiens
  misc_RNA (1)...(19): siRNA sense strand
gaaacuuugugguuaugua

SEQ ID NO: 2066043 - RNA, 19 nt, Homo sapiens
  misc_RNA (1)...(19): siRNA sense strand
gaaggaacgccucuuauug

SEQ ID NO: 2066044 - RNA, 19 nt, Homo sapiens
  misc_RNA (1)...(19): siRNA sense strand
ggaaauagcaucagcagau

SEQ ID NO: 2066045 - RNA, 19 nt, Homo sapiens
  misc_RNA (1)...(19): siRNA sense strand
gaagagaagaagucaaauu

SEQ ID NO: 2066046 - RNA, 19 nt, Homo sapiens
  misc_RNA (1)...(19): siRNA sense strand
gaauuucccuccuccuuug

SEQ ID NO: 2066047 - RNA, 19 nt, Homo sapiens
  misc_RNA (1)...(19): siRNA sense strand
ggaaguggaaguuaaauug

SEQ ID NO: 2066048 - RNA, 19 nt, Homo sapiens
  misc_RNA (1)...(19): siRNA sense strand
caagaaagcaguuacauag

SEQ ID NO: 2066049 - RNA, 19 nt, Homo sapiens
  misc_RNA (1)...(19): siRNA sense strand
gaaagcaguuacauagcaa

SEQ ID NO: 2066050 - RNA, 19 nt, Homo sapiens
  misc_RNA (1)...(19): siRNA sense strand
gagcuugaauugaaagaga

SEQ ID NO: 2066051 - RNA, 19 nt, Homo sapiens
  misc_RNA (1)...(19): siRNA sense strand
uaaauugacuccgcugauu

SEQ ID NO: 2066052 - RNA, 19 nt, Homo sapiens
  misc_RNA (1)...(19): siRNA sense strand
guagaaggaacgccucuua

SEQ ID NO: 2066053 - RNA, 19 nt, Homo sapiens
  misc_RNA (1)...(19): siRNA sense strand
gaaauuugccgauggugaa

SEQ ID NO: 2066054 - RNA, 19 nt, Homo sapiens
  misc_RNA (1)...(19): siRNA sense strand
gacagcaccucccagcuuu

SEQ ID NO: 2066055 - RNA, 19 nt, Homo sapiens
  misc_RNA (1)...(19): siRNA sense strand
auccaaagcuugcacauuu

SEQ ID NO: 2066056 - RNA, 19 nt, Homo sapiens
  misc_RNA (1)...(19): siRNA sense strand
gaaguggaaguuaaauuga

SEQ ID NO: 2066057 - RNA, 19 nt, Homo sapiens
  misc_RNA (1)...(19): siRNA sense strand
gugagaaccuuugaaguga

SEQ ID NO: 2066058 - RNA, 19 nt, Homo sapiens
  misc_RNA (1)...(19): siRNA sense strand
aggaguaccugguguguuu

SEQ ID NO: 2066059 - RNA, 19 nt, Homo sapiens
  misc_RNA (1)...(19): siRNA sense strand
gcaguuacauagcaacaca

SEQ ID NO: 2066060 - RNA, 19 nt, Homo sapiens
  misc_RNA (1)...(19): siRNA sense strand
gaguaccacuguaagaaga

SEQ ID NO: 2066061 - RNA, 19 nt, Homo sapiens
  misc_RNA (1)...(19): siRNA sense strand
ggaaaugcugucuaugauu

SEQ ID NO: 2066062 - RNA, 19 nt, Homo sapiens
  misc_RNA (1)...(19): siRNA sense strand
ugacuccgcugauucugaa

SEQ ID NO: 2066063 - RNA, 19 nt, Homo sapiens
  misc_RNA (1)...(19): siRNA sense strand
uuaaccacauucugccuua

SEQ ID NO: 2066064 - RNA, 19 nt, Homo sapiens
  misc_RNA (1)...(19): siRNA sense strand
gcacuugcggccacuguuu

SEQ ID NO: 2066065 - RNA, 19 nt, Homo sapiens
  misc_RNA (1)...(19): siRNA sense strand
ggaaugaggaagcguuguu

SEQ ID NO: 2066066 - RNA, 19 nt, Homo sapiens
  misc_RNA (1)...(19): siRNA sense strand
acaagaaagcaguuacaua

SEQ ID NO: 2066067 - RNA, 19 nt, Homo sapiens
  misc_RNA (1)...(19): siRNA sense strand
gguguggguucccuuuauu

SEQ ID NO: 2066068 - RNA, 19 nt, Homo sapiens
  misc_RNA (1)...(19): siRNA sense strand
uuacauagcaacacaguau

SEQ ID NO: 2066069 - RNA, 19 nt, Homo sapiens
  misc_RNA (1)...(19): siRNA sense strand
ggaaagguggcucaacuuc

SEQ ID NO: 2066070 - RNA, 19 nt, Homo sapiens
  misc_RNA (1)...(19): siRNA sense strand
uccaaagcuugcacauuua

SEQ ID NO: 2066071 - RNA, 19 nt, Homo sapiens
  misc_RNA (1)...(19): siRNA sense strand
gggcaaaggacuuggaguu

SEQ ID NO: 2066072 - RNA, 19 nt, Homo sapiens
  misc_RNA (1)...(19): siRNA sense strand
agaaagcaguuacauagca

SEQ ID NO: 2066073 - RNA, 19 nt, Homo sapiens
  misc_RNA (1)...(19): siRNA sense strand
aagaagagaagaagucaaa

SEQ ID NO: 2066074 - RNA, 19 nt, Homo sapiens
  misc_RNA (1)...(19): siRNA sense strand
ccugggaguucacuuuauu

SEQ ID NO: 2066075 - RNA, 19 nt, Homo sapiens
  misc_RNA (1)...(19): siRNA sense strand
uuggaugggugguuauuaa

SEQ ID NO: 2066076 - RNA, 19 nt, Homo sapiens
  misc_RNA (1)...(19): siRNA sense strand
guugauguguaaacagaaa

SEQ ID NO: 2066077 - RNA, 19 nt, Homo sapiens
  misc_RNA (1)...(19): siRNA sense strand
ccaaagcuugcacauuuaa

SEQ ID NO: 2066078 - RNA, 19 nt, Homo sapiens
  misc_RNA (1)...(19): siRNA sense strand
ugaagugucuuggccaaug

SEQ ID NO: 2066079 - RNA, 19 nt, Homo sapiens
  misc_RNA (1)...(19): siRNA sense strand
gagggaaguggaaguuaaa

SEQ ID NO: 2066080 - RNA, 19 nt, Homo sapiens
  misc_RNA (1)...(19): siRNA sense strand
agaaggaacgccucuuauu

SEQ ID NO: 2066081 - RNA, 19 nt, Homo sapiens
  misc_RNA (1)...(19): siRNA sense strand
gagcauauugagagaaaug

SEQ ID NO: 2066082 - RNA, 19 nt, Homo sapiens
  misc_RNA (1)...(19): siRNA sense strand
gcagugagaaccuuugaag

SEQ ID NO: 2066083 - RNA, 19 nt, Homo sapiens
  misc_RNA (1)...(19): siRNA sense strand
gaagugucuuggccaaugg

SEQ ID NO: 2066084 - RNA, 19 nt, Homo sapiens
  misc_RNA (1)...(19): siRNA sense strand
cuacaugcgcucuuugaaa

SEQ ID NO: 2066085 - RNA, 19 nt, Homo sapiens
  misc_RNA (1)...(19): siRNA sense strand
gaagacucaaguauagauu

SEQ ID NO: 2066086 - RNA, 19 nt, Homo sapiens
  misc_RNA (1)...(19): siRNA sense strand
aaggaacgccucuuauuga

SEQ ID NO: 2066087 - RNA, 19 nt, Homo sapiens
  misc_RNA (1)...(19): siRNA sense strand
uggaaagguuguagaagga

SEQ ID NO: 2066088 - RNA, 19 nt, Homo sapiens
  misc_RNA (1)...(19): siRNA sense strand
uuacuugggugaucucauc

SEQ ID NO: 2066089 - RNA, 19 nt, Homo sapiens
  misc_RNA (1)...(19): siRNA sense strand
ccucccagcuuuacacugu

SEQ ID NO: 2066090 - RNA, 19 nt, Homo sapiens
  misc_RNA (1)...(19): siRNA sense strand
cgauggauuuggauucaug

SEQ ID NO: 2066091 - RNA, 19 nt, Homo sapiens
  misc_RNA (1)...(19): siRNA sense strand
uggaugcucucuggaauga

SEQ ID NO: 2066092 - RNA, 19 nt, Homo sapiens
  misc_RNA (1)...(19): siRNA sense strand
uggaaaugcugucuaugau

SEQ ID NO: 2066093 - RNA, 19 nt, Homo sapiens
  misc_RNA (1)...(19): siRNA sense strand
guauagccuucguccaaga

SEQ ID NO: 2066094 - RNA, 19 nt, Homo sapiens
  misc_RNA (1)...(19): siRNA sense strand
aaagguggcucaacuucca

SEQ ID NO: 2066095 - RNA, 19 nt, Homo sapiens
  misc_RNA (1)...(19): siRNA sense strand
gcuuuacacugugaaguau

SEQ ID NO: 2066096 - RNA, 19 nt, Homo sapiens
  misc_RNA (1)...(19): siRNA sense strand
gaucccagucuucugaauu

SEQ ID NO: 2066097 - RNA, 19 nt, Homo sapiens
  misc_RNA (1)...(19): siRNA sense strand
caguauagccuucguccaa

SEQ ID NO: 2066098 - RNA, 19 nt, Homo sapiens
  misc_RNA (1)...(19): siRNA sense strand
aauagcaucagcagauaua

SEQ ID NO: 2066099 - RNA, 19 nt, Homo sapiens
  misc_RNA (1)...(19): siRNA sense strand
cugagcauauugagagaaa

SEQ ID NO: 2066100 - RNA, 19 nt, Homo sapiens
  misc_RNA (1)...(19): siRNA sense strand
cgacagcaccucccagcuu

SEQ ID NO: 2066101 - RNA, 19 nt, Homo sapiens
  misc_RNA (1)...(19): siRNA sense strand
gguggaugcucucuggaau

SEQ ID NO: 2066102 - RNA, 19 nt, Homo sapiens
  misc_RNA (1)...(19): siRNA sense strand
guuuccagcuucucuaugu

SEQ ID NO: 2066103 - RNA, 19 nt, Homo sapiens
  misc_RNA (1)...(19): siRNA sense strand
ugauucaaguccuguucua

SEQ ID NO: 2066104 - RNA, 19 nt, Homo sapiens
  misc_RNA (1)...(19): siRNA sense strand
gggucuaccuccugugguu

SEQ ID NO: 2066105 - RNA, 19 nt, Homo sapiens
  misc_RNA (1)...(19): siRNA sense strand
ggcaaaggacuuggaguuu

SEQ ID NO: 2066106 - RNA, 19 nt, Homo sapiens
  misc_RNA (1)...(19): siRNA sense strand
ugaauuucccuccuccuuu

SEQ ID NO: 2066107 - RNA, 19 nt, Homo sapiens
  misc_RNA (1)...(19): siRNA sense strand
guaccacuguaagaagaaa

SEQ ID NO: 2066108 - RNA, 19 nt, Homo sapiens
  misc_RNA (1)...(19): siRNA sense strand
guucugaaacuuugugguu

SEQ ID NO: 2066109 - RNA, 19 nt, Homo sapiens
  misc_RNA (1)...(19): siRNA sense strand
caucggaacaucucucuuc

SEQ ID NO: 2066110 - RNA, 19 nt, Homo sapiens
  misc_RNA (1)...(19): siRNA sense strand
ggccugggaguucacuuua

SEQ ID NO: 2066111 - RNA, 19 nt, Homo sapiens
  misc_RNA (1)...(19): siRNA sense strand
gggaaguggaaguuaaauu

SEQ ID NO: 2066112 - RNA, 19 nt, Homo sapiens
  misc_RNA (1)...(19): siRNA sense strand
ggaacagagcuugaauuga

SEQ ID NO: 2066113 - RNA, 19 nt, Homo sapiens
  misc_RNA (1)...(19): siRNA sense strand
gcuuuuggcugaaaugaaa

SEQ ID NO: 2066114 - RNA, 19 nt, Homo sapiens
  misc_RNA (1)...(19): siRNA sense strand
uuaacuuccuuuaggcaaa

SEQ ID NO: 2066115 - RNA, 19 nt, Homo sapiens
  misc_RNA (1)...(19): siRNA sense strand
cgugugcccuaccguauau

SEQ ID NO: 2066116 - RNA, 19 nt, Homo sapiens
  misc_RNA (1)...(19): siRNA sense strand
gauccaaagcuugcacauu

SEQ ID NO: 2066117 - RNA, 19 nt, Homo sapiens
  misc_RNA (1)...(19): siRNA sense strand
ucugaaacuuugugguuau

SEQ ID NO: 2066118 - RNA, 19 nt, Homo sapiens
  misc_RNA (1)...(19): siRNA sense strand
uggcuucucuaauuauugu

SEQ ID NO: 2066119 - RNA, 19 nt, Homo sapiens
  misc_RNA (1)...(19): siRNA sense strand
uggaacagagcuugaauug

SEQ ID NO: 2066120 - RNA, 19 nt, Homo sapiens
  misc_RNA (1)...(19): siRNA sense strand
gauggaagaagacucaagu

SEQ ID NO: 2066121 - RNA, 19 nt, Homo sapiens
  misc_RNA (1)...(19): siRNA sense strand
uugauuggaugggugguua

SEQ ID NO: 2066122 - RNA, 19 nt, Homo sapiens
  misc_RNA (1)...(19): siRNA sense strand
cuggaaaugcugucuauga

SEQ ID NO: 2066123 - RNA, 19 nt, Homo sapiens
  misc_RNA (1)...(19): siRNA sense strand
gaaugaggaagcguuguug

SEQ ID NO: 2066124 - RNA, 19 nt, Homo sapiens
  misc_RNA (1)...(19): siRNA sense strand
gggcguagaguuucauuac

SEQ ID NO: 2066125 - RNA, 19 nt, Homo sapiens
  misc_RNA (1)...(19): siRNA sense strand
ggaaagguuguagaaggaa

SEQ ID NO: 2066126 - RNA, 19 nt, Homo sapiens
  misc_RNA (1)...(19): siRNA sense strand
aaggaaagguggcucaacu

SEQ ID NO: 2066127 - RNA, 19 nt, Homo sapiens
  misc_RNA (1)...(19): siRNA sense strand
ggaacgccucuuauugaug

SEQ ID NO: 2066128 - RNA, 19 nt, Homo sapiens
  misc_RNA (1)...(19): siRNA sense strand
gaaguauaaagauggaaca

SEQ ID NO: 2066129 - RNA, 19 nt, Homo sapiens
  misc_RNA (1)...(19): siRNA sense strand
uguggguucccuuuauuua

SEQ ID NO: 2066130 - RNA, 19 nt, Homo sapiens
  misc_RNA (1)...(19): siRNA sense strand
cacgauggauuuggauuca

SEQ ID NO: 2066131 - RNA, 19 nt, Homo sapiens
  misc_RNA (1)...(19): siRNA sense strand
gccuuuaacuuccuuuagg

SEQ ID NO: 2066132 - RNA, 19 nt, Homo sapiens
  misc_RNA (1)...(19): siRNA sense strand
ugacgaccauggacaucau

SEQ ID NO: 2066133 - RNA, 19 nt, Homo sapiens
  misc_RNA (1)...(19): siRNA sense strand
gcgugugcccuaccguaua

SEQ ID NO: 2066134 - RNA, 19 nt, Homo sapiens
  misc_RNA (1)...(19): siRNA sense strand
uggguucccuuuauuuaca

SEQ ID NO: 2066135 - RNA, 19 nt, Homo sapiens
  misc_RNA (1)...(19): siRNA sense strand
gaacagagcuugaauugaa

SEQ ID NO: 2066136 - RNA, 19 nt, Homo sapiens
  misc_RNA (1)...(19): siRNA sense strand
gaagaagacucaaguauag

SEQ ID NO: 2066137 - RNA, 19 nt, Homo sapiens
  misc_RNA (1)...(19): siRNA sense strand
ggaguucacuuuauuauga

SEQ ID NO: 2066138 - RNA, 19 nt, Homo sapiens
  misc_RNA (1)...(19): siRNA sense strand
gaaauagcaucagcagaua

SEQ ID NO: 2066139 - RNA, 19 nt, Homo sapiens
  misc_RNA (1)...(19): siRNA sense strand
ggaagaagacucaaguaua

SEQ ID NO: 2066140 - RNA, 19 nt, Homo sapiens
  misc_RNA (1)...(19): siRNA sense strand
ccaauggcuucucuaauua

SEQ ID NO: 2066141 - RNA, 19 nt, Homo sapiens
  misc_RNA (1)...(19): siRNA sense strand
ggagggaaguggaaguuaa

SEQ ID NO: 2066142 - RNA, 19 nt, Homo sapiens
  misc_RNA (1)...(19): siRNA sense strand
gaaacuuugugguuaugua

SEQ ID NO: 2066143 - RNA, 19 nt, Homo sapiens
  misc_RNA (1)...(19): siRNA sense strand
gaaggaacgccucuuauug

SEQ ID NO: 2066144 - RNA, 19 nt, Homo sapiens
  misc_RNA (1)...(19): siRNA sense strand
ggaaauagcaucagcagau

SEQ ID NO: 2066145 - RNA, 19 nt, Homo sapiens
  misc_RNA (1)...(19): siRNA sense strand
gaagagaagaagucaaauu

SEQ ID NO: 2066146 - RNA, 19 nt, Homo sapiens
  misc_RNA (1)...(19): siRNA sense strand
gaauuucccuccuccuuug

SEQ ID NO: 2066147 - RNA, 19 nt, Homo sapiens
  misc_RNA (1)...(19): siRNA sense strand
ggaaguggaaguuaaauug

SEQ ID NO: 2066148 - RNA, 19 nt, Homo sapiens
  misc_RNA (1)...(19): siRNA sense strand
caagaaagcaguuacauag

SEQ ID NO: 2066149 - RNA, 19 nt, Homo sapiens
  misc_RNA (1)...(19): siRNA sense strand
gaaagcaguuacauagcaa

SEQ ID NO: 2066150 - RNA, 19 nt, Homo sapiens
  misc_RNA (1)...(19): siRNA sense strand
gagcuugaauugaaagaga

SEQ ID NO: 2066151 - RNA, 19 nt, Homo sapiens
  misc_RNA (1)...(19): siRNA sense strand
uaaauugacuccgcugauu

SEQ ID NO: 2066152 - RNA, 19 nt, Homo sapiens
  misc_RNA (1)...(19): siRNA sense strand
guagaaggaacgccucuua

SEQ ID NO: 2066153 - RNA, 19 nt, Homo sapiens
  misc_RNA (1)...(19): siRNA sense strand
gaaauuugccgauggugaa

SEQ ID NO: 2066154 - RNA, 19 nt, Homo sapiens
  misc_RNA (1)...(19): siRNA sense strand
gacagcaccucccagcuuu

SEQ ID NO: 2066155 - RNA, 19 nt, Homo sapiens
  misc_RNA (1)...(19): siRNA sense strand
auccaaagcuugcacauuu

SEQ ID NO: 2066156 - RNA, 19 nt, Homo sapiens
  misc_RNA (1)...(19): siRNA sense strand
gaaguggaaguuaaauuga

SEQ ID NO: 2066157 - RNA, 19 nt, Homo sapiens
  misc_RNA (1)...(19): siRNA sense strand
gugagaaccuuugaaguga

SEQ ID NO: 2066158 - RNA, 19 nt, Homo sapiens
  misc_RNA (1)...(19): siRNA sense strand
aggaguaccugguguguuu

SEQ ID NO: 2066159 - RNA, 19 nt, Homo sapiens
  misc_RNA (1)...(19): siRNA sense strand
gcaguuacauagcaacaca

SEQ ID NO: 2066160 - RNA, 19 nt, Homo sapiens
  misc_RNA (1)...(19): siRNA sense strand
gaguaccacuguaagaaga

SEQ ID NO: 2066161 - RNA, 19 nt, Homo sapiens
  misc_RNA (1)...(19): siRNA sense strand
ggaaaugcugucuaugauu

SEQ ID NO: 2066162 - RNA, 19 nt, Homo sapiens
  misc_RNA (1)...(19): siRNA sense strand
ugacuccgcugauucugaa

SEQ ID NO: 2066163 - RNA, 19 nt, Homo sapiens
  misc_RNA (1)...(19): siRNA sense strand
uuaaccacauucugccuua

SEQ ID NO: 2066164 - RNA, 19 nt, Homo sapiens
  misc_RNA (1)...(19): siRNA sense strand
gcacuugcggccacuguuu

SEQ ID NO: 2066165 - RNA, 19 nt, Homo sapiens
  misc_RNA (1)...(19): siRNA sense strand
ggaaugaggaagcguuguu

SEQ ID NO: 2066166 - RNA, 19 nt, Homo sapiens
  misc_RNA (1)...(19): siRNA sense strand
acaagaaagcaguuacaua

SEQ ID NO: 2066167 - RNA, 19 nt, Homo sapiens
  misc_RNA (1)...(19): siRNA sense strand
gguguggguucccuuuauu

SEQ ID NO: 2066168 - RNA, 19 nt, Homo sapiens
  misc_RNA (1)...(19): siRNA sense strand
uuacauagcaacacaguau

SEQ ID NO: 2066169 - RNA, 19 nt, Homo sapiens
  misc_RNA (1)...(19): siRNA sense strand
ggaaagguggcucaacuuc

SEQ ID NO: 2066170 - RNA, 19 nt, Homo sapiens
  misc_RNA (1)...(19): siRNA sense strand
uccaaagcuugcacauuua

SEQ ID NO: 2066171 - RNA, 19 nt, Homo sapiens
  misc_RNA (1)...(19): siRNA sense strand
gggcaaaggacuuggaguu

SEQ ID NO: 2066172 - RNA, 19 nt, Homo sapiens
  misc_RNA (1)...(19): siRNA sense strand
agaaagcaguuacauagca

SEQ ID NO: 2066173 - RNA, 19 nt, Homo sapiens
  misc_RNA (1)...(19): siRNA sense strand
aagaagagaagaagucaaa

SEQ ID NO: 2066174 - RNA, 19 nt, Homo sapiens
  misc_RNA (1)...(19): siRNA sense strand
ccugggaguucacuuuauu

SEQ ID NO: 2066175 - RNA, 19 nt, Homo sapiens
  misc_RNA (1)...(19): siRNA sense strand
uuggaugggugguuauuaa

SEQ ID NO: 2066176 - RNA, 19 nt, Homo sapiens
  misc_RNA (1)...(19): siRNA sense strand
guugauguguaaacagaaa

SEQ ID NO: 2066177 - RNA, 19 nt, Homo sapiens
  misc_RNA (1)...(19): siRNA sense strand
ccaaagcuugcacauuuaa

SEQ ID NO: 2066178 - RNA, 19 nt, Homo sapiens
  misc_RNA (1)...(19): siRNA sense strand
ugaagugucuuggccaaug

SEQ ID NO: 2066179 - RNA, 19 nt, Homo sapiens
  misc_RNA (1)...(19): siRNA sense strand
gagggaaguggaaguuaaa

SEQ ID NO: 2066180 - RNA, 19 nt, Homo sapiens
  misc_RNA (1)...(19): siRNA sense strand
agaaggaacgccucuuauu

SEQ ID NO: 2066181 - RNA, 19 nt, Homo sapiens
  misc_RNA (1)...(19): siRNA sense strand
gagcauauugagagaaaug

SEQ ID NO: 2066182 - RNA, 19 nt, Homo sapiens
  misc_RNA (1)...(19): siRNA sense strand
gcagugagaaccuuugaag

SEQ ID NO: 2066183 - RNA, 19 nt, Homo sapiens
  misc_RNA (1)...(19): siRNA sense strand
gaagugucuuggccaaugg

SEQ ID NO: 2066184 - RNA, 19 nt, Homo sapiens
  misc_RNA (1)...(19): siRNA sense strand
cuacaugcgcucuuugaaa

SEQ ID NO: 2066185 - RNA, 19 nt, Homo sapiens
  misc_RNA (1)...(19): siRNA sense strand
gaagacucaaguauagauu

SEQ ID NO: 2066186 - RNA, 19 nt, Homo sapiens
  misc_RNA (1)...(19): siRNA sense strand
aaggaacgccucuuauuga

SEQ ID NO: 2066187 - RNA, 19 nt, Homo sapiens
  misc_RNA (1)...(19): siRNA sense strand
uggaaagguuguagaagga

SEQ ID NO: 2066188 - RNA, 19 nt, Homo sapiens
  misc_RNA (1)...(19): siRNA sense strand
uuacuugggugaucucauc

SEQ ID NO: 2066189 - RNA, 19 nt, Homo sapiens
  misc_RNA (1)...(19): siRNA sense strand
ccucccagcuuuacacugu

SEQ ID NO: 2066190 - RNA, 19 nt, Homo sapiens
  misc_RNA (1)...(19): siRNA sense strand
cgauggauuuggauucaug

SEQ ID NO: 2066191 - RNA, 19 nt, Homo sapiens
  misc_RNA (1)...(19): siRNA sense strand
uggaugcucucuggaauga

SEQ ID NO: 2066192 - RNA, 19 nt, Homo sapiens
  misc_RNA (1)...(19): siRNA sense strand
uggaaaugcugucuaugau

SEQ ID NO: 2066193 - RNA, 19 nt, Homo sapiens
  misc_RNA (1)...(19): siRNA sense strand
guauagccuucguccaaga

SEQ ID NO: 2066194 - RNA, 19 nt, Homo sapiens
  misc_RNA (1)...(19): siRNA sense strand
aaagguggcucaacuucca

SEQ ID NO: 2066195 - RNA, 19 nt, Homo sapiens
  misc_RNA (1)...(19): siRNA sense strand
gcuuuacacugugaaguau

SEQ ID NO: 2066196 - RNA, 19 nt, Homo sapiens
  misc_RNA (1)...(19): siRNA sense strand
gaucccagucuucugaauu

SEQ ID NO: 2066197 - RNA, 19 nt, Homo sapiens
  misc_RNA (1)...(19): siRNA sense strand
caguauagccuucguccaa

SEQ ID NO: 2066198 - RNA, 19 nt, Homo sapiens
  misc_RNA (1)...(19): siRNA sense strand
aauagcaucagcagauaua

SEQ ID NO: 2066199 - RNA, 19 nt, Homo sapiens
  misc_RNA (1)...(19): siRNA sense strand
cugagcauauugagagaaa

SEQ ID NO: 2066200 - RNA, 19 nt, Homo sapiens
  misc_RNA (1)...(19): siRNA sense strand
cgacagcaccucccagcuu

SEQ ID NO: 2066201 - RNA, 19 nt, Homo sapiens
  misc_RNA (1)...(19): siRNA sense strand
gguggaugcucucuggaau

SEQ ID NO: 2066202 - RNA, 19 nt, Homo sapiens
  misc_RNA (1)...(19): siRNA sense strand
guuuccagcuucucuaugu

SEQ ID NO: 2066203 - RNA, 19 nt, Homo sapiens
  misc_RNA (1)...(19): siRNA sense strand
ugauucaaguccuguucua

SEQ ID NO: 2066204 - RNA, 19 nt, Homo sapiens
  misc_RNA (1)...(19): siRNA sense strand
gggucuaccuccugugguu

SEQ ID NO: 2066205 - RNA, 19 nt, Homo sapiens
  misc_RNA (1)...(19): siRNA sense strand
ggcaaaggacuuggaguuu

SEQ ID NO: 2066206 - RNA, 19 nt, Homo sapiens
  misc_RNA (1)...(19): siRNA sense strand
ugaauuucccuccuccuuu

SEQ ID NO: 2066207 - RNA, 19 nt, Homo sapiens
  misc_RNA (1)...(19): siRNA sense strand
guaccacuguaagaagaaa

SEQ ID NO: 2066208 - RNA, 19 nt, Homo sapiens
  misc_RNA (1)...(19): siRNA sense strand
guucugaaacuuugugguu

SEQ ID NO: 2066209 - RNA, 19 nt, Homo sapiens
  misc_RNA (1)...(19): siRNA sense strand
caucggaacaucucucuuc

SEQ ID NO: 2066210 - RNA, 19 nt, Homo sapiens
  misc_RNA (1)...(19): siRNA sense strand
ggccugggaguucacuuua

SEQ ID NO: 2066211 - RNA, 19 nt, Homo sapiens
  misc_RNA (1)...(19): siRNA sense strand
gggaaguggaaguuaaauu

SEQ ID NO: 2066212 - RNA, 19 nt, Homo sapiens
  misc_RNA (1)...(19): siRNA sense strand
ggaacagagcuugaauuga

SEQ ID NO: 2066213 - RNA, 19 nt, Homo sapiens
  misc_RNA (1)...(19): siRNA sense strand
gcuuuuggcugaaaugaaa

SEQ ID NO: 2066214 - RNA, 19 nt, Homo sapiens
  misc_RNA (1)...(19): siRNA sense strand
uuaacuuccuuuaggcaaa

SEQ ID NO: 2066215 - RNA, 19 nt, Homo sapiens
  misc_RNA (1)...(19): siRNA sense strand
cgugugcccuaccguauau

SEQ ID NO: 2066216 - RNA, 19 nt, Homo sapiens
  misc_RNA (1)...(19): siRNA sense strand
gauccaaagcuugcacauu

SEQ ID NO: 2066217 - RNA, 19 nt, Homo sapiens
  misc_RNA (1)...(19): siRNA sense strand
ucugaaacuuugugguuau

SEQ ID NO: 2066218 - RNA, 19 nt, Homo sapiens
  misc_RNA (1)...(19): siRNA sense strand
uggcuucucuaauuauugu

SEQ ID NO: 2066219 - RNA, 19 nt, Homo sapiens
  misc_RNA (1)...(19): siRNA sense strand
uggaacagagcuugaauug

SEQ ID NO: 2066220 - RNA, 19 nt, Homo sapiens
  misc_RNA (1)...(19): siRNA sense strand
gauggaagaagacucaagu

SEQ ID NO: 2066221 - RNA, 19 nt, Homo sapiens
  misc_RNA (1)...(19): siRNA sense strand
uugauuggaugggugguua

SEQ ID NO: 2066222 - RNA, 19 nt, Homo sapiens
  misc_RNA (1)...(19): siRNA sense strand
cuggaaaugcugucuauga

SEQ ID NO: 2066223 - RNA, 19 nt, Homo sapiens
  misc_RNA (1)...(19): siRNA sense strand
gaaugaggaagcguuguug

SEQ ID NO: 2066224 - RNA, 19 nt, Homo sapiens
  misc_RNA (1)...(19): siRNA sense strand
gggcguagaguuucauuac

SEQ ID NO: 2066225 - RNA, 19 nt, Homo sapiens
  misc_RNA (1)...(19): siRNA sense strand
ggaaagguuguagaaggaa

SEQ ID NO: 2066226 - RNA, 19 nt, Homo sapiens
  misc_RNA (1)...(19): siRNA sense strand
aaggaaagguggcucaacu

SEQ ID NO: 2066227 - RNA, 19 nt, Homo sapiens
  misc_RNA (1)...(19): siRNA sense strand
ggaacgccucuuauugaug

SEQ ID NO: 2066228 - RNA, 19 nt, Homo sapiens
  misc_RNA (1)...(19): siRNA sense strand
gaaguauaaagauggaaca

SEQ ID NO: 2066229 - RNA, 19 nt, Homo sapiens
  misc_RNA (1)...(19): siRNA sense strand
uguggguucccuuuauuua

SEQ ID NO: 2066230 - RNA, 19 nt, Homo sapiens
  misc_RNA (1)...(19): siRNA sense strand
cacgauggauuuggauuca

SEQ ID NO: 2066231 - RNA, 19 nt, Homo sapiens
  misc_RNA (1)...(19): siRNA sense strand
gccuuuaacuuccuuuagg

SEQ ID NO: 2066232 - RNA, 19 nt, Homo sapiens
  misc_RNA (1)...(19): siRNA sense strand
ugacgaccauggacaucau

SEQ ID NO: 2066233 - RNA, 19 nt, Homo sapiens
  misc_RNA (1)...(19): siRNA sense strand
gcgugugcccuaccguaua

SEQ ID NO: 2066234 - RNA, 19 nt, Homo sapiens
  misc_RNA (1)...(19): siRNA sense strand
uggguucccuuuauuuaca

SEQ ID NO: 2066235 - RNA, 19 nt, Homo sapiens
  misc_RNA (1)...(19): siRNA sense strand
gggaauguaucugcaauua

SEQ ID NO: 2066236 - RNA, 19 nt, Homo sapiens
  misc_RNA (1)...(19): siRNA sense strand
gaauguaucugcaauuauc

SEQ ID NO: 2066237 - RNA, 19 nt, Homo sapiens
  misc_RNA (1)...(19): siRNA sense strand
gaaacuggaucgauauuca

SEQ ID NO: 2066238 - RNA, 19 nt, Homo sapiens
  misc_RNA (1)...(19): siRNA sense strand
agggaaagcuuauguagua

SEQ ID NO: 2066239 - RNA, 19 nt, Homo sapiens
  misc_RNA (1)...(19): siRNA sense strand
gcagaacugugccaucauu

SEQ ID NO: 2066240 - RNA, 19 nt, Homo sapiens
  misc_RNA (1)...(19): siRNA sense strand
caaauucccuggucugaga

SEQ ID NO: 2066241 - RNA, 19 nt, Homo sapiens
  misc_RNA (1)...(19): siRNA sense strand
ggucaucgauucaucuaaa

SEQ ID NO: 2066242 - RNA, 19 nt, Homo sapiens
  misc_RNA (1)...(19): siRNA sense strand
gcaauuauccaaagacuau

SEQ ID NO: 2066243 - RNA, 19 nt, Homo sapiens
  misc_RNA (1)...(19): siRNA sense strand
gcaauacacuacuucaaag

SEQ ID NO: 2066244 - RNA, 19 nt, Homo sapiens
  misc_RNA (1)...(19): siRNA sense strand
gaacugugccaucauuuau

SEQ ID NO: 2066245 - RNA, 19 nt, Homo sapiens
  misc_RNA (1)...(19): siRNA sense strand
ccaagaacauauuuagaga

SEQ ID NO: 2066246 - RNA, 19 nt, Homo sapiens
  misc_RNA (1)...(19): siRNA sense strand
acacagugaugauucagua

SEQ ID NO: 2066247 - RNA, 19 nt, Homo sapiens
  misc_RNA (1)...(19): siRNA sense strand
gaugagacaacaacauuaa

SEQ ID NO: 2066248 - RNA, 19 nt, Homo sapiens
  misc_RNA (1)...(19): siRNA sense strand
gaaagcuuauguaguauac

SEQ ID NO: 2066249 - RNA, 19 nt, Homo sapiens
  misc_RNA (1)...(19): siRNA sense strand
gaccaucauucggaaauuu

SEQ ID NO: 2066250 - RNA, 19 nt, Homo sapiens
  misc_RNA (1)...(19): siRNA sense strand
ugacagagaagaacagaaa

SEQ ID NO: 2066251 - RNA, 19 nt, Homo sapiens
  misc_RNA (1)...(19): siRNA sense strand
caacaaguuuacgauauug

SEQ ID NO: 2066252 - RNA, 19 nt, Homo sapiens
  misc_RNA (1)...(19): siRNA sense strand
ugacccagguucucucuuu

SEQ ID NO: 2066253 - RNA, 19 nt, Homo sapiens
  misc_RNA (1)...(19): siRNA sense strand
caucuucgguccaugauau

SEQ ID NO: 2066254 - RNA, 19 nt, Homo sapiens
  misc_RNA (1)...(19): siRNA sense strand
ggaaagcuuauguaguaua

SEQ ID NO: 2066255 - RNA, 19 nt, Homo sapiens
  misc_RNA (1)...(19): siRNA sense strand
uugaauaugugacggauaa

SEQ ID NO: 2066256 - RNA, 19 nt, Homo sapiens
  misc_RNA (1)...(19): siRNA sense strand
gaauauauccggaccucuu

SEQ ID NO: 2066257 - RNA, 19 nt, Homo sapiens
  misc_RNA (1)...(19): siRNA sense strand
caacaaauacagcaccauu

SEQ ID NO: 2066258 - RNA, 19 nt, Homo sapiens
  misc_RNA (1)...(19): siRNA sense strand
gggaaugugucuccuaaca

SEQ ID NO: 2066259 - RNA, 19 nt, Homo sapiens
  misc_RNA (1)...(19): siRNA sense strand
gaccauccauuaaagacaa

SEQ ID NO: 2066260 - RNA, 19 nt, Homo sapiens
  misc_RNA (1)...(19): siRNA sense strand
gcagauguccuaccugaau

SEQ ID NO: 2066261 - RNA, 19 nt, Homo sapiens
  misc_RNA (1)...(19): siRNA sense strand
gacccagguucucucuuua

SEQ ID NO: 2066262 - RNA, 19 nt, Homo sapiens
  misc_RNA (1)...(19): siRNA sense strand
acaaauacagcaccauuaa

SEQ ID NO: 2066263 - RNA, 19 nt, Homo sapiens
  misc_RNA (1)...(19): siRNA sense strand
gguaagugaucccgccaaa

SEQ ID NO: 2066264 - RNA, 19 nt, Homo sapiens
  misc_RNA (1)...(19): siRNA sense strand
cagauguccuaccugaaua

SEQ ID NO: 2066265 - RNA, 19 nt, Homo sapiens
  misc_RNA (1)...(19): siRNA sense strand
ggccuuaccugacugacaa

SEQ ID NO: 2066266 - RNA, 19 nt, Homo sapiens
  misc_RNA (1)...(19): siRNA sense strand
gagacaacaacauuaauug

SEQ ID NO: 2066267 - RNA, 19 nt, Homo sapiens
  misc_RNA (1)...(19): siRNA sense strand
uguccuaccugaauacaaa

SEQ ID NO: 2066268 - RNA, 19 nt, Homo sapiens
  misc_RNA (1)...(19): siRNA sense strand
uaaacacagugaugauuca

SEQ ID NO: 2066269 - RNA, 19 nt, Homo sapiens
  misc_RNA (1)...(19): siRNA sense strand
uaacacgaauucggagaaa

SEQ ID NO: 2066270 - RNA, 19 nt, Homo sapiens
  misc_RNA (1)...(19): siRNA sense strand
gugcagaacugugccauca

SEQ ID NO: 2066271 - RNA, 19 nt, Homo sapiens
  misc_RNA (1)...(19): siRNA sense strand
ccacagcucacucugaauu

SEQ ID NO: 2066272 - RNA, 19 nt, Homo sapiens
  misc_RNA (1)...(19): siRNA sense strand
ucugugagaugacugguuu

SEQ ID NO: 2066273 - RNA, 19 nt, Homo sapiens
  misc_RNA (1)...(19): siRNA sense strand
caguagccaugaagcauuu

SEQ ID NO: 2066274 - RNA, 19 nt, Homo sapiens
  misc_RNA (1)...(19): siRNA sense strand
caagagggcguggcuauga

SEQ ID NO: 2066275 - RNA, 19 nt, Homo sapiens
  misc_RNA (1)...(19): siRNA sense strand
gguaugcgauugggaaugu

SEQ ID NO: 2066276 - RNA, 19 nt, Homo sapiens
  misc_RNA (1)...(19): siRNA sense strand
gcaugauauugcccaaauu

SEQ ID NO: 2066277 - RNA, 19 nt, Homo sapiens
  misc_RNA (1)...(19): siRNA sense strand
ucaccuccuucuucagaua

SEQ ID NO: 2066278 - RNA, 19 nt, Homo sapiens
  misc_RNA (1)...(19): siRNA sense strand
ggaccaucauucggaaauu

SEQ ID NO: 2066279 - RNA, 19 nt, Homo sapiens
  misc_RNA (1)...(19): siRNA sense strand
gcaacgauggguucuguga

SEQ ID NO: 2066280 - RNA, 19 nt, Homo sapiens
  misc_RNA (1)...(19): siRNA sense strand
uugauuggcucacuaaugu

SEQ ID NO: 2066281 - RNA, 19 nt, Homo sapiens
  misc_RNA (1)...(19): siRNA sense strand
ccacgcaucaacaaguuua

SEQ ID NO: 2066282 - RNA, 19 nt, Homo sapiens
  misc_RNA (1)...(19): siRNA sense strand
gaagaagugguaagugauc

SEQ ID NO: 2066283 - RNA, 19 nt, Homo sapiens
  misc_RNA (1)...(19): siRNA sense strand
gacagugacucaaguucug

SEQ ID NO: 2066284 - RNA, 19 nt, Homo sapiens
  misc_RNA (1)...(19): siRNA sense strand
caucaacaaguuuacgaua

SEQ ID NO: 2066285 - RNA, 19 nt, Homo sapiens
  misc_RNA (1)...(19): siRNA sense strand
gugcaucuuugcccugauu

SEQ ID NO: 2066286 - RNA, 19 nt, Homo sapiens
  misc_RNA (1)...(19): siRNA sense strand
gauggguucugugagauga

SEQ ID NO: 2066287 - RNA, 19 nt, Homo sapiens
  misc_RNA (1)...(19): siRNA sense strand
gggaaacguuacaaugaca

SEQ ID NO: 2066288 - RNA, 19 nt, Homo sapiens
  misc_RNA (1)...(19): siRNA sense strand
gcucuuaaugugcaucuuu

SEQ ID NO: 2066289 - RNA, 19 nt, Homo sapiens
  misc_RNA (1)...(19): siRNA sense strand
augaagaagugguaaguga

SEQ ID NO: 2066290 - RNA, 19 nt, Homo sapiens
  misc_RNA (1)...(19): siRNA sense strand
cagccuuccuccucaauga

SEQ ID NO: 2066291 - RNA, 19 nt, Homo sapiens
  misc_RNA (1)...(19): siRNA sense strand
caaugugacugagaaagug

SEQ ID NO: 2066292 - RNA, 19 nt, Homo sapiens
  misc_RNA (1)...(19): siRNA sense strand
gagcaucuucgguccauga

SEQ ID NO: 2066293 - RNA, 19 nt, Homo sapiens
  misc_RNA (1)...(19): siRNA sense strand
guucccagcugucccauuc

SEQ ID NO: 2066294 - RNA, 19 nt, Homo sapiens
  misc_RNA (1)...(19): siRNA sense strand
gcaaugggaccgacucuac

SEQ ID NO: 2066295 - RNA, 19 nt, Homo sapiens
  misc_RNA (1)...(19): siRNA sense strand
guucuaaugcucuuaaugu

SEQ ID NO: 2066296 - RNA, 19 nt, Homo sapiens
  misc_RNA (1)...(19): siRNA sense strand
gaauauggcgcugcuguuc

SEQ ID NO: 2066297 - RNA, 19 nt, Homo sapiens
  misc_RNA (1)...(19): siRNA sense strand
gaaugugguagacuugauu

SEQ ID NO: 2066298 - RNA, 19 nt, Homo sapiens
  misc_RNA (1)...(19): siRNA sense strand
caauuugugucauguugau

SEQ ID NO: 2066299 - RNA, 19 nt, Homo sapiens
  misc_RNA (1)...(19): siRNA sense strand
gcauggacuuacaccaaug

SEQ ID NO: 2066300 - RNA, 19 nt, Homo sapiens
  misc_RNA (1)...(19): siRNA sense strand
gggcguggcuaugauguuc

SEQ ID NO: 2066301 - RNA, 19 nt, Homo sapiens
  misc_RNA (1)...(19): siRNA sense strand
agaaaggccuuaccugacu

SEQ ID NO: 2066302 - RNA, 19 nt, Homo sapiens
  misc_RNA (1)...(19): siRNA sense strand
caaaggcugguuccugauu

SEQ ID NO: 2066303 - RNA, 19 nt, Homo sapiens
  misc_RNA (1)...(19): siRNA sense strand
agaacugugccaucauuua

SEQ ID NO: 2066304 - RNA, 19 nt, Homo sapiens
  misc_RNA (1)...(19): siRNA sense strand
ggucaccuacuaucacaaa

SEQ ID NO: 2066305 - RNA, 19 nt, Homo sapiens
  misc_RNA (1)...(19): siRNA sense strand
ggaauguaucugcaauuau

SEQ ID NO: 2066306 - RNA, 19 nt, Homo sapiens
  misc_RNA (1)...(19): siRNA sense strand
gccaugcaccugcgacuuu

SEQ ID NO: 2066307 - RNA, 19 nt, Homo sapiens
  misc_RNA (1)...(19): siRNA sense strand
ugaagcagaugacacaaaa

SEQ ID NO: 2066308 - RNA, 19 nt, Homo sapiens
  misc_RNA (1)...(19): siRNA sense strand
ucgggaaugugucuccuaa

SEQ ID NO: 2066309 - RNA, 19 nt, Homo sapiens
  misc_RNA (1)...(19): siRNA sense strand
gaacagaaaagacgagaau

SEQ ID NO: 2066310 - RNA, 19 nt, Homo sapiens
  misc_RNA (1)...(19): siRNA sense strand
caucauuuauugcaacgau

SEQ ID NO: 2066311 - RNA, 19 nt, Homo sapiens
  misc_RNA (1)...(19): siRNA sense strand
cagaucaagggaaagcuua

SEQ ID NO: 2066312 - RNA, 19 nt, Homo sapiens
  misc_RNA (1)...(19): siRNA sense strand
gagaccaagaggcaugaua

SEQ ID NO: 2066313 - RNA, 19 nt, Homo sapiens
  misc_RNA (1)...(19): siRNA sense strand
gaaugaagaagugguaagu

SEQ ID NO: 2066314 - RNA, 19 nt, Homo sapiens
  misc_RNA (1)...(19): siRNA sense strand
caccacgcaucaacaaguu

SEQ ID NO: 2066315 - RNA, 19 nt, Homo sapiens
  misc_RNA (1)...(19): siRNA sense strand
gaccaagaggcaugauauu

SEQ ID NO: 2066316 - RNA, 19 nt, Homo sapiens
  misc_RNA (1)...(19): siRNA sense strand
aaauacagcaccauuaaca

SEQ ID NO: 2066317 - RNA, 19 nt, Homo sapiens
  misc_RNA (1)...(19): siRNA sense strand
gauucaaaccucaacaaau

SEQ ID NO: 2066318 - RNA, 19 nt, Homo sapiens
  misc_RNA (1)...(19): siRNA sense strand
gaauaugugacggauaaug

SEQ ID NO: 2066319 - RNA, 19 nt, Homo sapiens
  misc_RNA (1)...(19): siRNA sense strand
caaugacagugacucaagu

SEQ ID NO: 2066320 - RNA, 19 nt, Homo sapiens
  misc_RNA (1)...(19): siRNA sense strand
gcacuacagcccuuucaag

SEQ ID NO: 2066321 - RNA, 19 nt, Homo sapiens
  misc_RNA (1)...(19): siRNA sense strand
caugauauugcccaaauug

SEQ ID NO: 2066322 - RNA, 19 nt, Homo sapiens
  misc_RNA (1)...(19): siRNA sense strand
caagggaaagcuuauguag

SEQ ID NO: 2066323 - RNA, 19 nt, Homo sapiens
  misc_RNA (1)...(19): siRNA sense strand
uuacagaaagcaguccuua

SEQ ID NO: 2066324 - RNA, 19 nt, Homo sapiens
  misc_RNA (1)...(19): siRNA sense strand
gaccgacucuacccugaca

SEQ ID NO: 2066325 - RNA, 19 nt, Homo sapiens
  misc_RNA (1)...(19): siRNA sense strand
uaucugcaauuauccaaag

SEQ ID NO: 2066326 - RNA, 19 nt, Homo sapiens
  misc_RNA (1)...(19): siRNA sense strand
uagacuugauuguggauau

SEQ ID NO: 2066327 - RNA, 19 nt, Homo sapiens
  misc_RNA (1)...(19): siRNA sense strand
aaagaucgaacacacaaug

SEQ ID NO: 2066328 - RNA, 19 nt, Homo sapiens
  misc_RNA (1)...(19): siRNA sense strand
gagagcaucuucgguccau

SEQ ID NO: 2066329 - RNA, 19 nt, Homo sapiens
  misc_RNA (1)...(19): siRNA sense strand
ggccagaugucaugcaaaa

SEQ ID NO: 2066330 - RNA, 19 nt, Homo sapiens
  misc_RNA (1)...(19): siRNA sense strand
cuucagaacaacauaugua

SEQ ID NO: 2066331 - RNA, 19 nt, Homo sapiens
  misc_RNA (1)...(19): siRNA sense strand
uucauucgcuuucaccaaa

SEQ ID NO: 2066332 - RNA, 19 nt, Homo sapiens
  misc_RNA (1)...(19): siRNA sense strand
auauggcgcugcuguucua

SEQ ID NO: 2066333 - RNA, 19 nt, Homo sapiens
  misc_RNA (1)...(19): siRNA sense strand
ugaugagacaacaacauua

SEQ ID NO: 2066334 - RNA, 19 nt, Homo sapiens
  misc_RNA (1)...(19): siRNA sense strand
aaaggcugguuccugauug

SEQ ID NO: 2066335 - RNA, 19 nt, Homo sapiens
  misc_RNA (1)...(19): siRNA sense strand
gggaauguaucugcaauua

SEQ ID NO: 2066336 - RNA, 19 nt, Homo sapiens
  misc_RNA (1)...(19): siRNA sense strand
gaauguaucugcaauuauc

SEQ ID NO: 2066337 - RNA, 19 nt, Homo sapiens
  misc_RNA (1)...(19): siRNA sense strand
gaaacuggaucgauauuca

SEQ ID NO: 2066338 - RNA, 19 nt, Homo sapiens
  misc_RNA (1)...(19): siRNA sense strand
agggaaagcuuauguagua

SEQ ID NO: 2066339 - RNA, 19 nt, Homo sapiens
  misc_RNA (1)...(19): siRNA sense strand
gcagaacugugccaucauu

SEQ ID NO: 2066340 - RNA, 19 nt, Homo sapiens
  misc_RNA (1)...(19): siRNA sense strand
caaauucccuggucugaga

SEQ ID NO: 2066341 - RNA, 19 nt, Homo sapiens
  misc_RNA (1)...(19): siRNA sense strand
ggucaucgauucaucuaaa

SEQ ID NO: 2066342 - RNA, 19 nt, Homo sapiens
  misc_RNA (1)...(19): siRNA sense strand
gcaauuauccaaagacuau

SEQ ID NO: 2066343 - RNA, 19 nt, Homo sapiens
  misc_RNA (1)...(19): siRNA sense strand
gcaauacacuacuucaaag

SEQ ID NO: 2066344 - RNA, 19 nt, Homo sapiens
  misc_RNA (1)...(19): siRNA sense strand
gaacugugccaucauuuau

SEQ ID NO: 2066345 - RNA, 19 nt, Homo sapiens
  misc_RNA (1)...(19): siRNA sense strand
ccaagaacauauuuagaga

SEQ ID NO: 2066346 - RNA, 19 nt, Homo sapiens
  misc_RNA (1)...(19): siRNA sense strand
acacagugaugauucagua

SEQ ID NO: 2066347 - RNA, 19 nt, Homo sapiens
  misc_RNA (1)...(19): siRNA sense strand
gaugagacaacaacauuaa

SEQ ID NO: 2066348 - RNA, 19 nt, Homo sapiens
  misc_RNA (1)...(19): siRNA sense strand
gaaagcuuauguaguauac

SEQ ID NO: 2066349 - RNA, 19 nt, Homo sapiens
  misc_RNA (1)...(19): siRNA sense strand
gaccaucauucggaaauuu

SEQ ID NO: 2066350 - RNA, 19 nt, Homo sapiens
  misc_RNA (1)...(19): siRNA sense strand
ugacagagaagaacagaaa

SEQ ID NO: 2066351 - RNA, 19 nt, Homo sapiens
  misc_RNA (1)...(19): siRNA sense strand
caacaaguuuacgauauug

SEQ ID NO: 2066352 - RNA, 19 nt, Homo sapiens
  misc_RNA (1)...(19): siRNA sense strand
ugacccagguucucucuuu

SEQ ID NO: 2066353 - RNA, 19 nt, Homo sapiens
  misc_RNA (1)...(19): siRNA sense strand
caucuucgguccaugauau

SEQ ID NO: 2066354 - RNA, 19 nt, Homo sapiens
  misc_RNA (1)...(19): siRNA sense strand
ggaaagcuuauguaguaua

SEQ ID NO: 2066355 - RNA, 19 nt, Homo sapiens
  misc_RNA (1)...(19): siRNA sense strand
uugaauaugugacggauaa

SEQ ID NO: 2066356 - RNA, 19 nt, Homo sapiens
  misc_RNA (1)...(19): siRNA sense strand
gaauauauccggaccucuu

SEQ ID NO: 2066357 - RNA, 19 nt, Homo sapiens
  misc_RNA (1)...(19): siRNA sense strand
caacaaauacagcaccauu

SEQ ID NO: 2066358 - RNA, 19 nt, Homo sapiens
  misc_RNA (1)...(19): siRNA sense strand
gggaaugugucuccuaaca

SEQ ID NO: 2066359 - RNA, 19 nt, Homo sapiens
  misc_RNA (1)...(19): siRNA sense strand
gaccauccauuaaagacaa

SEQ ID NO: 2066360 - RNA, 19 nt, Homo sapiens
  misc_RNA (1)...(19): siRNA sense strand
gcagauguccuaccugaau

SEQ ID NO: 2066361 - RNA, 19 nt, Homo sapiens
  misc_RNA (1)...(19): siRNA sense strand
gacccagguucucucuuua

SEQ ID NO: 2066362 - RNA, 19 nt, Homo sapiens
  misc_RNA (1)...(19): siRNA sense strand
acaaauacagcaccauuaa

SEQ ID NO: 2066363 - RNA, 19 nt, Homo sapiens
  misc_RNA (1)...(19): siRNA sense strand
gguaagugaucccgccaaa

SEQ ID NO: 2066364 - RNA, 19 nt, Homo sapiens
  misc_RNA (1)...(19): siRNA sense strand
cagauguccuaccugaaua

SEQ ID NO: 2066365 - RNA, 19 nt, Homo sapiens
  misc_RNA (1)...(19): siRNA sense strand
ggccuuaccugacugacaa

SEQ ID NO: 2066366 - RNA, 19 nt, Homo sapiens
  misc_RNA (1)...(19): siRNA sense strand
gagacaacaacauuaauug

SEQ ID NO: 2066367 - RNA, 19 nt, Homo sapiens
  misc_RNA (1)...(19): siRNA sense strand
uguccuaccugaauacaaa

SEQ ID NO: 2066368 - RNA, 19 nt, Homo sapiens
  misc_RNA (1)...(19): siRNA sense strand
uaaacacagugaugauuca

SEQ ID NO: 2066369 - RNA, 19 nt, Homo sapiens
  misc_RNA (1)...(19): siRNA sense strand
uaacacgaauucggagaaa

SEQ ID NO: 2066370 - RNA, 19 nt, Homo sapiens
  misc_RNA (1)...(19): siRNA sense strand
gugcagaacugugccauca

SEQ ID NO: 2066371 - RNA, 19 nt, Homo sapiens
  misc_RNA (1)...(19): siRNA sense strand
ccacagcucacucugaauu

SEQ ID NO: 2066372 - RNA, 19 nt, Homo sapiens
  misc_RNA (1)...(19): siRNA sense strand
ucugugagaugacugguuu

SEQ ID NO: 2066373 - RNA, 19 nt, Homo sapiens
  misc_RNA (1)...(19): siRNA sense strand
caguagccaugaagcauuu

SEQ ID NO: 2066374 - RNA, 19 nt, Homo sapiens
  misc_RNA (1)...(19): siRNA sense strand
caagagggcguggcuauga

SEQ ID NO: 2066375 - RNA, 19 nt, Homo sapiens
  misc_RNA (1)...(19): siRNA sense strand
gguaugcgauugggaaugu

SEQ ID NO: 2066376 - RNA, 19 nt, Homo sapiens
  misc_RNA (1)...(19): siRNA sense strand
gcaugauauugcccaaauu

SEQ ID NO: 2066377 - RNA, 19 nt, Homo sapiens
  misc_RNA (1)...(19): siRNA sense strand
ucaccuccuucuucagaua

SEQ ID NO: 2066378 - RNA, 19 nt, Homo sapiens
  misc_RNA (1)...(19): siRNA sense strand
ggaccaucauucggaaauu

SEQ ID NO: 2066379 - RNA, 19 nt, Homo sapiens
  misc_RNA (1)...(19): siRNA sense strand
gcaacgauggguucuguga

SEQ ID NO: 2066380 - RNA, 19 nt, Homo sapiens
  misc_RNA (1)...(19): siRNA sense strand
uugauuggcucacuaaugu

SEQ ID NO: 2066381 - RNA, 19 nt, Homo sapiens
  misc_RNA (1)...(19): siRNA sense strand
ccacgcaucaacaaguuua

SEQ ID NO: 2066382 - RNA, 19 nt, Homo sapiens
  misc_RNA (1)...(19): siRNA sense strand
gaagaagugguaagugauc

SEQ ID NO: 2066383 - RNA, 19 nt, Homo sapiens
  misc_RNA (1)...(19): siRNA sense strand
gacagugacucaaguucug

SEQ ID NO: 2066384 - RNA, 19 nt, Homo sapiens
  misc_RNA (1)...(19): siRNA sense strand
caucaacaaguuuacgaua

SEQ ID NO: 2066385 - RNA, 19 nt, Homo sapiens
  misc_RNA (1)...(19): siRNA sense strand
gugcaucuuugcccugauu

SEQ ID NO: 2066386 - RNA, 19 nt, Homo sapiens
  misc_RNA (1)...(19): siRNA sense strand
gauggguucugugagauga

SEQ ID NO: 2066387 - RNA, 19 nt, Homo sapiens
  misc_RNA (1)...(19): siRNA sense strand
gggaaacguuacaaugaca

SEQ ID NO: 2066388 - RNA, 19 nt, Homo sapiens
  misc_RNA (1)...(19): siRNA sense strand
gcucuuaaugugcaucuuu

SEQ ID NO: 2066389 - RNA, 19 nt, Homo sapiens
  misc_RNA (1)...(19): siRNA sense strand
augaagaagugguaaguga

SEQ ID NO: 2066390 - RNA, 19 nt, Homo sapiens
  misc_RNA (1)...(19): siRNA sense strand
cagccuuccuccucaauga

SEQ ID NO: 2066391 - RNA, 19 nt, Homo sapiens
  misc_RNA (1)...(19): siRNA sense strand
caaugugacugagaaagug

SEQ ID NO: 2066392 - RNA, 19 nt, Homo sapiens
  misc_RNA (1)...(19): siRNA sense strand
gagcaucuucgguccauga

SEQ ID NO: 2066393 - RNA, 19 nt, Homo sapiens
  misc_RNA (1)...(19): siRNA sense strand
guucccagcugucccauuc

SEQ ID NO: 2066394 - RNA, 19 nt, Homo sapiens
  misc_RNA (1)...(19): siRNA sense strand
gcaaugggaccgacucuac

SEQ ID NO: 2066395 - RNA, 19 nt, Homo sapiens
  misc_RNA (1)...(19): siRNA sense strand
guucuaaugcucuuaaugu

SEQ ID NO: 2066396 - RNA, 19 nt, Homo sapiens
  misc_RNA (1)...(19): siRNA sense strand
gaauauggcgcugcuguuc

SEQ ID NO: 2066397 - RNA, 19 nt, Homo sapiens
  misc_RNA (1)...(19): siRNA sense strand
gaaugugguagacuugauu

SEQ ID NO: 2066398 - RNA, 19 nt, Homo sapiens
  misc_RNA (1)...(19): siRNA sense strand
caauuugugucauguugau

SEQ ID NO: 2066399 - RNA, 19 nt, Homo sapiens
  misc_RNA (1)...(19): siRNA sense strand
gcauggacuuacaccaaug

SEQ ID NO: 2066400 - RNA, 19 nt, Homo sapiens
  misc_RNA (1)...(19): siRNA sense strand
gggcguggcuaugauguuc

SEQ ID NO: 2066401 - RNA, 19 nt, Homo sapiens
  misc_RNA (1)...(19): siRNA sense strand
agaaaggccuuaccugacu

SEQ ID NO: 2066402 - RNA, 19 nt, Homo sapiens
  misc_RNA (1)...(19): siRNA sense strand
caaaggcugguuccugauu

SEQ ID NO: 2066403 - RNA, 19 nt, Homo sapiens
  misc_RNA (1)...(19): siRNA sense strand
agaacugugccaucauuua

SEQ ID NO: 2066404 - RNA, 19 nt, Homo sapiens
  misc_RNA (1)...(19): siRNA sense strand
ggucaccuacuaucacaaa

SEQ ID NO: 2066405 - RNA, 19 nt, Homo sapiens
  misc_RNA (1)...(19): siRNA sense strand
ggaauguaucugcaauuau

SEQ ID NO: 2066406 - RNA, 19 nt, Homo sapiens
  misc_RNA (1)...(19): siRNA sense strand
gccaugcaccugcgacuuu

SEQ ID NO: 2066407 - RNA, 19 nt, Homo sapiens
  misc_RNA (1)...(19): siRNA sense strand
ugaagcagaugacacaaaa

SEQ ID NO: 2066408 - RNA, 19 nt, Homo sapiens
  misc_RNA (1)...(19): siRNA sense strand
ucgggaaugugucuccuaa

SEQ ID NO: 2066409 - RNA, 19 nt, Homo sapiens
  misc_RNA (1)...(19): siRNA sense strand
gaacagaaaagacgagaau

SEQ ID NO: 2066410 - RNA, 19 nt, Homo sapiens
  misc_RNA (1)...(19): siRNA sense strand
caucauuuauugcaacgau

SEQ ID NO: 2066411 - RNA, 19 nt, Homo sapiens
  misc_RNA (1)...(19): siRNA sense strand
cagaucaagggaaagcuua

SEQ ID NO: 2066412 - RNA, 19 nt, Homo sapiens
  misc_RNA (1)...(19): siRNA sense strand
gagaccaagaggcaugaua

SEQ ID NO: 2066413 - RNA, 19 nt, Homo sapiens
  misc_RNA (1)...(19): siRNA sense strand
gaaugaagaagugguaagu

SEQ ID NO: 2066414 - RNA, 19 nt, Homo sapiens
  misc_RNA (1)...(19): siRNA sense strand
caccacgcaucaacaaguu

SEQ ID NO: 2066415 - RNA, 19 nt, Homo sapiens
  misc_RNA (1)...(19): siRNA sense strand
gaccaagaggcaugauauu

SEQ ID NO: 2066416 - RNA, 19 nt, Homo sapiens
  misc_RNA (1)...(19): siRNA sense strand
aaauacagcaccauuaaca

SEQ ID NO: 2066417 - RNA, 19 nt, Homo sapiens
  misc_RNA (1)...(19): siRNA sense strand
gauucaaaccucaacaaau

SEQ ID NO: 2066418 - RNA, 19 nt, Homo sapiens
  misc_RNA (1)...(19): siRNA sense strand
gaauaugugacggauaaug

SEQ ID NO: 2066419 - RNA, 19 nt, Homo sapiens
  misc_RNA (1)...(19): siRNA sense strand
caaugacagugacucaagu

SEQ ID NO: 2066420 - RNA, 19 nt, Homo sapiens
  misc_RNA (1)...(19): siRNA sense strand
gcacuacagcccuuucaag

SEQ ID NO: 2066421 - RNA, 19 nt, Homo sapiens
  misc_RNA (1)...(19): siRNA sense strand
caugauauugcccaaauug

SEQ ID NO: 2066422 - RNA, 19 nt, Homo sapiens
  misc_RNA (1)...(19): siRNA sense strand
caagggaaagcuuauguag

SEQ ID NO: 2066423 - RNA, 19 nt, Homo sapiens
  misc_RNA (1)...(19): siRNA sense strand
uuacagaaagcaguccuua

SEQ ID NO: 2066424 - RNA, 19 nt, Homo sapiens
  misc_RNA (1)...(19): siRNA sense strand
gaccgacucuacccugaca

SEQ ID NO: 2066425 - RNA, 19 nt, Homo sapiens
  misc_RNA (1)...(19): siRNA sense strand
uaucugcaauuauccaaag

SEQ ID NO: 2066426 - RNA, 19 nt, Homo sapiens
  misc_RNA (1)...(19): siRNA sense strand
uagacuugauuguggauau

SEQ ID NO: 2066427 - RNA, 19 nt, Homo sapiens
  misc_RNA (1)...(19): siRNA sense strand
aaagaucgaacacacaaug

SEQ ID NO: 2066428 - RNA, 19 nt, Homo sapiens
  misc_RNA (1)...(19): siRNA sense strand
gagagcaucuucgguccau

SEQ ID NO: 2066429 - RNA, 19 nt, Homo sapiens
  misc_RNA (1)...(19): siRNA sense strand
ggccagaugucaugcaaaa

SEQ ID NO: 2066430 - RNA, 19 nt, Homo sapiens
  misc_RNA (1)...(19): siRNA sense strand
cuucagaacaacauaugua

SEQ ID NO: 2066431 - RNA, 19 nt, Homo sapiens
  misc_RNA (1)...(19): siRNA sense strand
uucauucgcuuucaccaaa

SEQ ID NO: 2066432 - RNA, 19 nt, Homo sapiens
  misc_RNA (1)...(19): siRNA sense strand
auauggcgcugcuguucua

SEQ ID NO: 2066433 - RNA, 19 nt, Homo sapiens
  misc_RNA (1)...(19): siRNA sense strand
ugaugagacaacaacauua

SEQ ID NO: 2066434 - RNA, 19 nt, Homo sapiens
  misc_RNA (1)...(19): siRNA sense strand
aaaggcugguuccugauug

SEQ ID NO: 2066435 - RNA, 19 nt, Homo sapiens
  misc_RNA (1)...(19): siRNA sense strand
gaacagagcuugaauugaa

SEQ ID NO: 2066436 - RNA, 19 nt, Homo sapiens
  misc_RNA (1)...(19): siRNA sense strand
gaagaagacucaaguauag

SEQ ID NO: 2066437 - RNA, 19 nt, Homo sapiens
  misc_RNA (1)...(19): siRNA sense strand
ggaguucacuuuauuauga

SEQ ID NO: 2066438 - RNA, 19 nt, Homo sapiens
  misc_RNA (1)...(19): siRNA sense strand
gaaauagcaucagcagaua

SEQ ID NO: 2066439 - RNA, 19 nt, Homo sapiens
  misc_RNA (1)...(19): siRNA sense strand
ggaagaagacucaaguaua

SEQ ID NO: 2066440 - RNA, 19 nt, Homo sapiens
  misc_RNA (1)...(19): siRNA sense strand
ccaauggcuucucuaauua

SEQ ID NO: 2066441 - RNA, 19 nt, Homo sapiens
  misc_RNA (1)...(19): siRNA sense strand
ggagggaaguggaaguuaa

SEQ ID NO: 2066442 - RNA, 19 nt, Homo sapiens
  misc_RNA (1)...(19): siRNA sense strand
gaaacuuugugguuaugua

SEQ ID NO: 2066443 - RNA, 19 nt, Homo sapiens
  misc_RNA (1)...(19): siRNA sense strand
gaaggaacgccucuuauug

SEQ ID NO: 2066444 - RNA, 19 nt, Homo sapiens
  misc_RNA (1)...(19): siRNA sense strand
ggaaauagcaucagcagau

SEQ ID NO: 2066445 - RNA, 19 nt, Homo sapiens
  misc_RNA (1)...(19): siRNA sense strand
gaagagaagaagucaaauu

SEQ ID NO: 2066446 - RNA, 19 nt, Homo sapiens
  misc_RNA (1)...(19): siRNA sense strand
gaauuucccuccuccuuug

SEQ ID NO: 2066447 - RNA, 19 nt, Homo sapiens
  misc_RNA (1)...(19): siRNA sense strand
ggaaguggaaguuaaauug

SEQ ID NO: 2066448 - RNA, 19 nt, Homo sapiens
  misc_RNA (1)...(19): siRNA sense strand
caagaaagcaguuacauag

SEQ ID NO: 2066449 - RNA, 19 nt, Homo sapiens
  misc_RNA (1)...(19): siRNA sense strand
gaaagcaguuacauagcaa

SEQ ID NO: 2066450 - RNA, 19 nt, Homo sapiens
  misc_RNA (1)...(19): siRNA sense strand
gagcuugaauugaaagaga

SEQ ID NO: 2066451 - RNA, 19 nt, Homo sapiens
  misc_RNA (1)...(19): siRNA sense strand
uaaauugacuccgcugauu

SEQ ID NO: 2066452 - RNA, 19 nt, Homo sapiens
  misc_RNA (1)...(19): siRNA sense strand
guagaaggaacgccucuua

SEQ ID NO: 2066453 - RNA, 19 nt, Homo sapiens
  misc_RNA (1)...(19): siRNA sense strand
gaaauuugccgauggugaa

SEQ ID NO: 2066454 - RNA, 19 nt, Homo sapiens
  misc_RNA (1)...(19): siRNA sense strand
gacagcaccucccagcuuu

SEQ ID NO: 2066455 - RNA, 19 nt, Homo sapiens
  misc_RNA (1)...(19): siRNA sense strand
auccaaagcuugcacauuu

SEQ ID NO: 2066456 - RNA, 19 nt, Homo sapiens
  misc_RNA (1)...(19): siRNA sense strand
gaaguggaaguuaaauuga

SEQ ID NO: 2066457 - RNA, 19 nt, Homo sapiens
  misc_RNA (1)...(19): siRNA sense strand
gugagaaccuuugaaguga

SEQ ID NO: 2066458 - RNA, 19 nt, Homo sapiens
  misc_RNA (1)...(19): siRNA sense strand
aggaguaccugguguguuu

SEQ ID NO: 2066459 - RNA, 19 nt, Homo sapiens
  misc_RNA (1)...(19): siRNA sense strand
gcaguuacauagcaacaca

SEQ ID NO: 2066460 - RNA, 19 nt, Homo sapiens
  misc_RNA (1)...(19): siRNA sense strand
gaguaccacuguaagaaga

SEQ ID NO: 2066461 - RNA, 19 nt, Homo sapiens
  misc_RNA (1)...(19): siRNA sense strand
ggaaaugcugucuaugauu

SEQ ID NO: 2066462 - RNA, 19 nt, Homo sapiens
  misc_RNA (1)...(19): siRNA sense strand
ugacuccgcugauucugaa

SEQ ID NO: 2066463 - RNA, 19 nt, Homo sapiens
  misc_RNA (1)...(19): siRNA sense strand
uuaaccacauucugccuua

SEQ ID NO: 2066464 - RNA, 19 nt, Homo sapiens
  misc_RNA (1)...(19): siRNA sense strand
gcacuugcggccacuguuu

SEQ ID NO: 2066465 - RNA, 19 nt, Homo sapiens
  misc_RNA (1)...(19): siRNA sense strand
ggaaugaggaagcguuguu

SEQ ID NO: 2066466 - RNA, 19 nt, Homo sapiens
  misc_RNA (1)...(19): siRNA sense strand
acaagaaagcaguuacaua

SEQ ID NO: 2066467 - RNA, 19 nt, Homo sapiens
  misc_RNA (1)...(19): siRNA sense strand
gguguggguucccuuuauu

SEQ ID NO: 2066468 - RNA, 19 nt, Homo sapiens
  misc_RNA (1)...(19): siRNA sense strand
uuacauagcaacacaguau

SEQ ID NO: 2066469 - RNA, 19 nt, Homo sapiens
  misc_RNA (1)...(19): siRNA sense strand
ggaaagguggcucaacuuc

SEQ ID NO: 2066470 - RNA, 19 nt, Homo sapiens
  misc_RNA (1)...(19): siRNA sense strand
uccaaagcuugcacauuua

SEQ ID NO: 2066471 - RNA, 19 nt, Homo sapiens
  misc_RNA (1)...(19): siRNA sense strand
gggcaaaggacuuggaguu

SEQ ID NO: 2066472 - RNA, 19 nt, Homo sapiens
  misc_RNA (1)...(19): siRNA sense strand
agaaagcaguuacauagca

SEQ ID NO: 2066473 - RNA, 19 nt, Homo sapiens
  misc_RNA (1)...(19): siRNA sense strand
aagaagagaagaagucaaa

SEQ ID NO: 2066474 - RNA, 19 nt, Homo sapiens
  misc_RNA (1)...(19): siRNA sense strand
ccugggaguucacuuuauu

SEQ ID NO: 2066475 - RNA, 19 nt, Homo sapiens
  misc_RNA (1)...(19): siRNA sense strand
uuggaugggugguuauuaa

SEQ ID NO: 2066476 - RNA, 19 nt, Homo sapiens
  misc_RNA (1)...(19): siRNA sense strand
guugauguguaaacagaaa

SEQ ID NO: 2066477 - RNA, 19 nt, Homo sapiens
  misc_RNA (1)...(19): siRNA sense strand
ccaaagcuugcacauuuaa

SEQ ID NO: 2066478 - RNA, 19 nt, Homo sapiens
  misc_RNA (1)...(19): siRNA sense strand
ugaagugucuuggccaaug

SEQ ID NO: 2066479 - RNA, 19 nt, Homo sapiens
  misc_RNA (1)...(19): siRNA sense strand
gagggaaguggaaguuaaa

SEQ ID NO: 2066480 - RNA, 19 nt, Homo sapiens
  misc_RNA (1)...(19): siRNA sense strand
agaaggaacgccucuuauu

SEQ ID NO: 2066481 - RNA, 19 nt, Homo sapiens
  misc_RNA (1)...(19): siRNA sense strand
gagcauauugagagaaaug

SEQ ID NO: 2066482 - RNA, 19 nt, Homo sapiens
  misc_RNA (1)...(19): siRNA sense strand
gcagugagaaccuuugaag

SEQ ID NO: 2066483 - RNA, 19 nt, Homo sapiens
  misc_RNA (1)...(19): siRNA sense strand
gaagugucuuggccaaugg

SEQ ID NO: 2066484 - RNA, 19 nt, Homo sapiens
  misc_RNA (1)...(19): siRNA sense strand
cuacaugcgcucuuugaaa

SEQ ID NO: 2066485 - RNA, 19 nt, Homo sapiens
  misc_RNA (1)...(19): siRNA sense strand
gaagacucaaguauagauu

SEQ ID NO: 2066486 - RNA, 19 nt, Homo sapiens
  misc_RNA (1)...(19): siRNA sense strand
aaggaacgccucuuauuga

SEQ ID NO: 2066487 - RNA, 19 nt, Homo sapiens
  misc_RNA (1)...(19): siRNA sense strand
uggaaagguuguagaagga

SEQ ID NO: 2066488 - RNA, 19 nt, Homo sapiens
  misc_RNA (1)...(19): siRNA sense strand
uuacuugggugaucucauc

SEQ ID NO: 2066489 - RNA, 19 nt, Homo sapiens
  misc_RNA (1)...(19): siRNA sense strand
ccucccagcuuuacacugu

SEQ ID NO: 2066490 - RNA, 19 nt, Homo sapiens
  misc_RNA (1)...(19): siRNA sense strand
cgauggauuuggauucaug

SEQ ID NO: 2066491 - RNA, 19 nt, Homo sapiens
  misc_RNA (1)...(19): siRNA sense strand
uggaugcucucuggaauga

SEQ ID NO: 2066492 - RNA, 19 nt, Homo sapiens
  misc_RNA (1)...(19): siRNA sense strand
uggaaaugcugucuaugau

SEQ ID NO: 2066493 - RNA, 19 nt, Homo sapiens
  misc_RNA (1)...(19): siRNA sense strand
guauagccuucguccaaga

SEQ ID NO: 2066494 - RNA, 19 nt, Homo sapiens
  misc_RNA (1)...(19): siRNA sense strand
aaagguggcucaacuucca

SEQ ID NO: 2066495 - RNA, 19 nt, Homo sapiens
  misc_RNA (1)...(19): siRNA sense strand
gcuuuacacugugaaguau

SEQ ID NO: 2066496 - RNA, 19 nt, Homo sapiens
  misc_RNA (1)...(19): siRNA sense strand
gaucccagucuucugaauu

SEQ ID NO: 2066497 - RNA, 19 nt, Homo sapiens
  misc_RNA (1)...(19): siRNA sense strand
caguauagccuucguccaa

SEQ ID NO: 2066498 - RNA, 19 nt, Homo sapiens
  misc_RNA (1)...(19): siRNA sense strand
aauagcaucagcagauaua

SEQ ID NO: 2066499 - RNA, 19 nt, Homo sapiens
  misc_RNA (1)...(19): siRNA sense strand
cugagcauauugagagaaa

SEQ ID NO: 2066500 - RNA, 19 nt, Homo sapiens
  misc_RNA (1)...(19): siRNA sense strand
cgacagcaccucccagcuu

SEQ ID NO: 2066501 - RNA, 19 nt, Homo sapiens
  misc_RNA (1)...(19): siRNA sense strand
gguggaugcucucuggaau

SEQ ID NO: 2066502 - RNA, 19 nt, Homo sapiens
  misc_RNA (1)...(19): siRNA sense strand
guuuccagcuucucuaugu

SEQ ID NO: 2066503 - RNA, 19 nt, Homo sapiens
  misc_RNA (1)...(19): siRNA sense strand
ugauucaaguccuguucua

SEQ ID NO: 2066504 - RNA, 19 nt, Homo sapiens
  misc_RNA (1)...(19): siRNA sense strand
gggucuaccuccugugguu

SEQ ID NO: 2066505 - RNA, 19 nt, Homo sapiens
  misc_RNA (1)...(19): siRNA sense strand
ggcaaaggacuuggaguuu

SEQ ID NO: 2066506 - RNA, 19 nt, Homo sapiens
  misc_RNA (1)...(19): siRNA sense strand
ugaauuucccuccuccuuu

SEQ ID NO: 2066507 - RNA, 19 nt, Homo sapiens
  misc_RNA (1)...(19): siRNA sense strand
guaccacuguaagaagaaa

SEQ ID NO: 2066508 - RNA, 19 nt, Homo sapiens
  misc_RNA (1)...(19): siRNA sense strand
guucugaaacuuugugguu

SEQ ID NO: 2066509 - RNA, 19 nt, Homo sapiens
  misc_RNA (1)...(19): siRNA sense strand
caucggaacaucucucuuc

SEQ ID NO: 2066510 - RNA, 19 nt, Homo sapiens
  misc_RNA (1)...(19): siRNA sense strand
ggccugggaguucacuuua

SEQ ID NO: 2066511 - RNA, 19 nt, Homo sapiens
  misc_RNA (1)...(19): siRNA sense strand
gggaaguggaaguuaaauu

SEQ ID NO: 2066512 - RNA, 19 nt, Homo sapiens
  misc_RNA (1)...(19): siRNA sense strand
ggaacagagcuugaauuga

SEQ ID NO: 2066513 - RNA, 19 nt, Homo sapiens
  misc_RNA (1)...(19): siRNA sense strand
gcuuuuggcugaaaugaaa

SEQ ID NO: 2066514 - RNA, 19 nt, Homo sapiens
  misc_RNA (1)...(19): siRNA sense strand
uuaacuuccuuuaggcaaa

SEQ ID NO: 2066515 - RNA, 19 nt, Homo sapiens
  misc_RNA (1)...(19): siRNA sense strand
cgugugcccuaccguauau

SEQ ID NO: 2066516 - RNA, 19 nt, Homo sapiens
  misc_RNA (1)...(19): siRNA sense strand
gauccaaagcuugcacauu

SEQ ID NO: 2066517 - RNA, 19 nt, Homo sapiens
  misc_RNA (1)...(19): siRNA sense strand
ucugaaacuuugugguuau

SEQ ID NO: 2066518 - RNA, 19 nt, Homo sapiens
  misc_RNA (1)...(19): siRNA sense strand
uggcuucucuaauuauugu

SEQ ID NO: 2066519 - RNA, 19 nt, Homo sapiens
  misc_RNA (1)...(19): siRNA sense strand
uggaacagagcuugaauug

SEQ ID NO: 2066520 - RNA, 19 nt, Homo sapiens
  misc_RNA (1)...(19): siRNA sense strand
gauggaagaagacucaagu

SEQ ID NO: 2066521 - RNA, 19 nt, Homo sapiens
  misc_RNA (1)...(19): siRNA sense strand
uugauuggaugggugguua

SEQ ID NO: 2066522 - RNA, 19 nt, Homo sapiens
  misc_RNA (1)...(19): siRNA sense strand
cuggaaaugcugucuauga

SEQ ID NO: 2066523 - RNA, 19 nt, Homo sapiens
  misc_RNA (1)...(19): siRNA sense strand
gaaugaggaagcguuguug

SEQ ID NO: 2066524 - RNA, 19 nt, Homo sapiens
  misc_RNA (1)...(19): siRNA sense strand
gggcguagaguuucauuac

SEQ ID NO: 2066525 - RNA, 19 nt, Homo sapiens
  misc_RNA (1)...(19): siRNA sense strand
ggaaagguuguagaaggaa

SEQ ID NO: 2066526 - RNA, 19 nt, Homo sapiens
  misc_RNA (1)...(19): siRNA sense strand
aaggaaagguggcucaacu

SEQ ID NO: 2066527 - RNA, 19 nt, Homo sapiens
  misc_RNA (1)...(19): siRNA sense strand
ggaacgccucuuauugaug

SEQ ID NO: 2066528 - RNA, 19 nt, Homo sapiens
  misc_RNA (1)...(19): siRNA sense strand
gaaguauaaagauggaaca

SEQ ID NO: 2066529 - RNA, 19 nt, Homo sapiens
  misc_RNA (1)...(19): siRNA sense strand
uguggguucccuuuauuua

SEQ ID NO: 2066530 - RNA, 19 nt, Homo sapiens
  misc_RNA (1)...(19): siRNA sense strand
cacgauggauuuggauuca

SEQ ID NO: 2066531 - RNA, 19 nt, Homo sapiens
  misc_RNA (1)...(19): siRNA sense strand
gccuuuaacuuccuuuagg

SEQ ID NO: 2066532 - RNA, 19 nt, Homo sapiens
  misc_RNA (1)...(19): siRNA sense strand
ugacgaccauggacaucau

SEQ ID NO: 2066533 - RNA, 19 nt, Homo sapiens
  misc_RNA (1)...(19): siRNA sense strand
gcgugugcccuaccguaua

SEQ ID NO: 2066534 - RNA, 19 nt, Homo sapiens
  misc_RNA (1)...(19): siRNA sense strand
uggguucccuuuauuuaca

SEQ ID NO: 2066535 - RNA, 19 nt, Homo sapiens
  misc_RNA (1)...(19): siRNA sense strand
gaacagagcuugaauugaa

SEQ ID NO: 2066536 - RNA, 19 nt, Homo sapiens
  misc_RNA (1)...(19): siRNA sense strand
gaagaagacucaaguauag

SEQ ID NO: 2066537 - RNA, 19 nt, Homo sapiens
  misc_RNA (1)...(19): siRNA sense strand
ggaguucacuuuauuauga

SEQ ID NO: 2066538 - RNA, 19 nt, Homo sapiens
  misc_RNA (1)...(19): siRNA sense strand
gaaauagcaucagcagaua

SEQ ID NO: 2066539 - RNA, 19 nt, Homo sapiens
  misc_RNA (1)...(19): siRNA sense strand
ggaagaagacucaaguaua

SEQ ID NO: 2066540 - RNA, 19 nt, Homo sapiens
  misc_RNA (1)...(19): siRNA sense strand
ccaauggcuucucuaauua

SEQ ID NO: 2066541 - RNA, 19 nt, Homo sapiens
  misc_RNA (1)...(19): siRNA sense strand
ggagggaaguggaaguuaa

SEQ ID NO: 2066542 - RNA, 19 nt, Homo sapiens
  misc_RNA (1)...(19): siRNA sense strand
gaaacuuugugguuaugua

SEQ ID NO: 2066543 - RNA, 19 nt, Homo sapiens
  misc_RNA (1)...(19): siRNA sense strand
gaaggaacgccucuuauug

SEQ ID NO: 2066544 - RNA, 19 nt, Homo sapiens
  misc_RNA (1)...(19): siRNA sense strand
ggaaauagcaucagcagau

SEQ ID NO: 2066545 - RNA, 19 nt, Homo sapiens
  misc_RNA (1)...(19): siRNA sense strand
gaagagaagaagucaaauu

SEQ ID NO: 2066546 - RNA, 19 nt, Homo sapiens
  misc_RNA (1)...(19): siRNA sense strand
gaauuucccuccuccuuug

SEQ ID NO: 2066547 - RNA, 19 nt, Homo sapiens
  misc_RNA (1)...(19): siRNA sense strand
ggaaguggaaguuaaauug

SEQ ID NO: 2066548 - RNA, 19 nt, Homo sapiens
  misc_RNA (1)...(19): siRNA sense strand
caagaaagcaguuacauag

SEQ ID NO: 2066549 - RNA, 19 nt, Homo sapiens
  misc_RNA (1)...(19): siRNA sense strand
gaaagcaguuacauagcaa

SEQ ID NO: 2066550 - RNA, 19 nt, Homo sapiens
  misc_RNA (1)...(19): siRNA sense strand
gagcuugaauugaaagaga

SEQ ID NO: 2066551 - RNA, 19 nt, Homo sapiens
  misc_RNA (1)...(19): siRNA sense strand
uaaauugacuccgcugauu

SEQ ID NO: 2066552 - RNA, 19 nt, Homo sapiens
  misc_RNA (1)...(19): siRNA sense strand
guagaaggaacgccucuua

SEQ ID NO: 2066553 - RNA, 19 nt, Homo sapiens
  misc_RNA (1)...(19): siRNA sense strand
gaaauuugccgauggugaa

SEQ ID NO: 2066554 - RNA, 19 nt, Homo sapiens
  misc_RNA (1)...(19): siRNA sense strand
gacagcaccucccagcuuu

SEQ ID NO: 2066555 - RNA, 19 nt, Homo sapiens
  misc_RNA (1)...(19): siRNA sense strand
auccaaagcuugcacauuu

SEQ ID NO: 2066556 - RNA, 19 nt, Homo sapiens
  misc_RNA (1)...(19): siRNA sense strand
gaaguggaaguuaaauuga

SEQ ID NO: 2066557 - RNA, 19 nt, Homo sapiens
  misc_RNA (1)...(19): siRNA sense strand
gugagaaccuuugaaguga

SEQ ID NO: 2066558 - RNA, 19 nt, Homo sapiens
  misc_RNA (1)...(19): siRNA sense strand
aggaguaccugguguguuu

SEQ ID NO: 2066559 - RNA, 19 nt, Homo sapiens
  misc_RNA (1)...(19): siRNA sense strand
gcaguuacauagcaacaca

SEQ ID NO: 2066560 - RNA, 19 nt, Homo sapiens
  misc_RNA (1)...(19): siRNA sense strand
gaguaccacuguaagaaga

SEQ ID NO: 2066561 - RNA, 19 nt, Homo sapiens
  misc_RNA (1)...(19): siRNA sense strand
ggaaaugcugucuaugauu

SEQ ID NO: 2066562 - RNA, 19 nt, Homo sapiens
  misc_RNA (1)...(19): siRNA sense strand
ugacuccgcugauucugaa

SEQ ID NO: 2066563 - RNA, 19 nt, Homo sapiens
  misc_RNA (1)...(19): siRNA sense strand
uuaaccacauucugccuua

SEQ ID NO: 2066564 - RNA, 19 nt, Homo sapiens
  misc_RNA (1)...(19): siRNA sense strand
gcacuugcggccacuguuu

SEQ ID NO: 2066565 - RNA, 19 nt, Homo sapiens
  misc_RNA (1)...(19): siRNA sense strand
ggaaugaggaagcguuguu

SEQ ID NO: 2066566 - RNA, 19 nt, Homo sapiens
  misc_RNA (1)...(19): siRNA sense strand
acaagaaagcaguuacaua

SEQ ID NO: 2066567 - RNA, 19 nt, Homo sapiens
  misc_RNA (1)...(19): siRNA sense strand
gguguggguucccuuuauu

SEQ ID NO: 2066568 - RNA, 19 nt, Homo sapiens
  misc_RNA (1)...(19): siRNA sense strand
uuacauagcaacacaguau

SEQ ID NO: 2066569 - RNA, 19 nt, Homo sapiens
  misc_RNA (1)...(19): siRNA sense strand
ggaaagguggcucaacuuc

SEQ ID NO: 2066570 - RNA, 19 nt, Homo sapiens
  misc_RNA (1)...(19): siRNA sense strand
uccaaagcuugcacauuua

SEQ ID NO: 2066571 - RNA, 19 nt, Homo sapiens
  misc_RNA (1)...(19): siRNA sense strand
gggcaaaggacuuggaguu

SEQ ID NO: 2066572 - RNA, 19 nt, Homo sapiens
  misc_RNA (1)...(19): siRNA sense strand
agaaagcaguuacauagca

SEQ ID NO: 2066573 - RNA, 19 nt, Homo sapiens
  misc_RNA (1)...(19): siRNA sense strand
aagaagagaagaagucaaa

SEQ ID NO: 2066574 - RNA, 19 nt, Homo sapiens
  misc_RNA (1)...(19): siRNA sense strand
ccugggaguucacuuuauu

SEQ ID NO: 2066575 - RNA, 19 nt, Homo sapiens
  misc_RNA (1)...(19): siRNA sense strand
uuggaugggugguuauuaa

SEQ ID NO: 2066576 - RNA, 19 nt, Homo sapiens
  misc_RNA (1)...(19): siRNA sense strand
guugauguguaaacagaaa

SEQ ID NO: 2066577 - RNA, 19 nt, Homo sapiens
  misc_RNA (1)...(19): siRNA sense strand
ccaaagcuugcacauuuaa

SEQ ID NO: 2066578 - RNA, 19 nt, Homo sapiens
  misc_RNA (1)...(19): siRNA sense strand
ugaagugucuuggccaaug

SEQ ID NO: 2066579 - RNA, 19 nt, Homo sapiens
  misc_RNA (1)...(19): siRNA sense strand
gagggaaguggaaguuaaa

SEQ ID NO: 2066580 - RNA, 19 nt, Homo sapiens
  misc_RNA (1)...(19): siRNA sense strand
agaaggaacgccucuuauu

SEQ ID NO: 2066581 - RNA, 19 nt, Homo sapiens
  misc_RNA (1)...(19): siRNA sense strand
gagcauauugagagaaaug

SEQ ID NO: 2066582 - RNA, 19 nt, Homo sapiens
  misc_RNA (1)...(19): siRNA sense strand
gcagugagaaccuuugaag

SEQ ID NO: 2066583 - RNA, 19 nt, Homo sapiens
  misc_RNA (1)...(19): siRNA sense strand
gaagugucuuggccaaugg

SEQ ID NO: 2066584 - RNA, 19 nt, Homo sapiens
  misc_RNA (1)...(19): siRNA sense strand
cuacaugcgcucuuugaaa

SEQ ID NO: 2066585 - RNA, 19 nt, Homo sapiens
  misc_RNA (1)...(19): siRNA sense strand
gaagacucaaguauagauu

SEQ ID NO: 2066586 - RNA, 19 nt, Homo sapiens
  misc_RNA (1)...(19): siRNA sense strand
aaggaacgccucuuauuga

SEQ ID NO: 2066587 - RNA, 19 nt, Homo sapiens
  misc_RNA (1)...(19): siRNA sense strand
uggaaagguuguagaagga

SEQ ID NO: 2066588 - RNA, 19 nt, Homo sapiens
  misc_RNA (1)...(19): siRNA sense strand
uuacuugggugaucucauc

SEQ ID NO: 2066589 - RNA, 19 nt, Homo sapiens
  misc_RNA (1)...(19): siRNA sense strand
ccucccagcuuuacacugu

SEQ ID NO: 2066590 - RNA, 19 nt, Homo sapiens
  misc_RNA (1)...(19): siRNA sense strand
cgauggauuuggauucaug

SEQ ID NO: 2066591 - RNA, 19 nt, Homo sapiens
  misc_RNA (1)...(19): siRNA sense strand
uggaugcucucuggaauga

SEQ ID NO: 2066592 - RNA, 19 nt, Homo sapiens
  misc_RNA (1)...(19): siRNA sense strand
uggaaaugcugucuaugau

SEQ ID NO: 2066593 - RNA, 19 nt, Homo sapiens
  misc_RNA (1)...(19): siRNA sense strand
guauagccuucguccaaga

SEQ ID NO: 2066594 - RNA, 19 nt, Homo sapiens
  misc_RNA (1)...(19): siRNA sense strand
aaagguggcucaacuucca

SEQ ID NO: 2066595 - RNA, 19 nt, Homo sapiens
  misc_RNA (1)...(19): siRNA sense strand
gcuuuacacugugaaguau

SEQ ID NO: 2066596 - RNA, 19 nt, Homo sapiens
  misc_RNA (1)...(19): siRNA sense strand
gaucccagucuucugaauu

SEQ ID NO: 2066597 - RNA, 19 nt, Homo sapiens
  misc_RNA (1)...(19): siRNA sense strand
caguauagccuucguccaa

SEQ ID NO: 2066598 - RNA, 19 nt, Homo sapiens
  misc_RNA (1)...(19): siRNA sense strand
aauagcaucagcagauaua

SEQ ID NO: 2066599 - RNA, 19 nt, Homo sapiens
  misc_RNA (1)...(19): siRNA sense strand
cugagcauauugagagaaa

SEQ ID NO: 2066600 - RNA, 19 nt, Homo sapiens
  misc_RNA (1)...(19): siRNA sense strand
cgacagcaccucccagcuu

SEQ ID NO: 2066601 - RNA, 19 nt, Homo sapiens
  misc_RNA (1)...(19): siRNA sense strand
gguggaugcucucuggaau

SEQ ID NO: 2066602 - RNA, 19 nt, Homo sapiens
  misc_RNA (1)...(19): siRNA sense strand
guuuccagcuucucuaugu

SEQ ID NO: 2066603 - RNA, 19 nt, Homo sapiens
  misc_RNA (1)...(19): siRNA sense strand
ugauucaaguccuguucua

SEQ ID NO: 2066604 - RNA, 19 nt, Homo sapiens
  misc_RNA (1)...(19): siRNA sense strand
gggucuaccuccugugguu

SEQ ID NO: 2066605 - RNA, 19 nt, Homo sapiens
  misc_RNA (1)...(19): siRNA sense strand
ggcaaaggacuuggaguuu

SEQ ID NO: 2066606 - RNA, 19 nt, Homo sapiens
  misc_RNA (1)...(19): siRNA sense strand
ugaauuucccuccuccuuu

SEQ ID NO: 2066607 - RNA, 19 nt, Homo sapiens
  misc_RNA (1)...(19): siRNA sense strand
guaccacuguaagaagaaa

SEQ ID NO: 2066608 - RNA, 19 nt, Homo sapiens
  misc_RNA (1)...(19): siRNA sense strand
guucugaaacuuugugguu

SEQ ID NO: 2066609 - RNA, 19 nt, Homo sapiens
  misc_RNA (1)...(19): siRNA sense strand
caucggaacaucucucuuc

SEQ ID NO: 2066610 - RNA, 19 nt, Homo sapiens
  misc_RNA (1)...(19): siRNA sense strand
ggccugggaguucacuuua

SEQ ID NO: 2066611 - RNA, 19 nt, Homo sapiens
  misc_RNA (1)...(19): siRNA sense strand
gggaaguggaaguuaaauu

SEQ ID NO: 2066612 - RNA, 19 nt, Homo sapiens
  misc_RNA (1)...(19): siRNA sense strand
ggaacagagcuugaauuga

SEQ ID NO: 2066613 - RNA, 19 nt, Homo sapiens
  misc_RNA (1)...(19): siRNA sense strand
gcuuuuggcugaaaugaaa

SEQ ID NO: 2066614 - RNA, 19 nt, Homo sapiens
  misc_RNA (1)...(19): siRNA sense strand
uuaacuuccuuuaggcaaa

SEQ ID NO: 2066615 - RNA, 19 nt, Homo sapiens
  misc_RNA (1)...(19): siRNA sense strand
cgugugcccuaccguauau

SEQ ID NO: 2066616 - RNA, 19 nt, Homo sapiens
  misc_RNA (1)...(19): siRNA sense strand
gauccaaagcuugcacauu

SEQ ID NO: 2066617 - RNA, 19 nt, Homo sapiens
  misc_RNA (1)...(19): siRNA sense strand
ucugaaacuuugugguuau

SEQ ID NO: 2066618 - RNA, 19 nt, Homo sapiens
  misc_RNA (1)...(19): siRNA sense strand
uggcuucucuaauuauugu

SEQ ID NO: 2066619 - RNA, 19 nt, Homo sapiens
  misc_RNA (1)...(19): siRNA sense strand
uggaacagagcuugaauug

SEQ ID NO: 2066620 - RNA, 19 nt, Homo sapiens
  misc_RNA (1)...(19): siRNA sense strand
gauggaagaagacucaagu

SEQ ID NO: 2066621 - RNA, 19 nt, Homo sapiens
  misc_RNA (1)...(19): siRNA sense strand
uugauuggaugggugguua

SEQ ID NO: 2066622 - RNA, 19 nt, Homo sapiens
  misc_RNA (1)...(19): siRNA sense strand
cuggaaaugcugucuauga

SEQ ID NO: 2066623 - RNA, 19 nt, Homo sapiens
  misc_RNA (1)...(19): siRNA sense strand
gaaugaggaagcguuguug

SEQ ID NO: 2066624 - RNA, 19 nt, Homo sapiens
  misc_RNA (1)...(19): siRNA sense strand
gggcguagaguuucauuac

SEQ ID NO: 2066625 - RNA, 19 nt, Homo sapiens
  misc_RNA (1)...(19): siRNA sense strand
ggaaagguuguagaaggaa

SEQ ID NO: 2066626 - RNA, 19 nt, Homo sapiens
  misc_RNA (1)...(19): siRNA sense strand
aaggaaagguggcucaacu

SEQ ID NO: 2066627 - RNA, 19 nt, Homo sapiens
  misc_RNA (1)...(19): siRNA sense strand
ggaacgccucuuauugaug

SEQ ID NO: 2066628 - RNA, 19 nt, Homo sapiens
  misc_RNA (1)...(19): siRNA sense strand
gaaguauaaagauggaaca

SEQ ID NO: 2066629 - RNA, 19 nt, Homo sapiens
  misc_RNA (1)...(19): siRNA sense strand
uguggguucccuuuauuua

SEQ ID NO: 2066630 - RNA, 19 nt, Homo sapiens
  misc_RNA (1)...(19): siRNA sense strand
cacgauggauuuggauuca

SEQ ID NO: 2066631 - RNA, 19 nt, Homo sapiens
  misc_RNA (1)...(19): siRNA sense strand
gccuuuaacuuccuuuagg

SEQ ID NO: 2066632 - RNA, 19 nt, Homo sapiens
  misc_RNA (1)...(19): siRNA sense strand
ugacgaccauggacaucau

SEQ ID NO: 2066633 - RNA, 19 nt, Homo sapiens
  misc_RNA (1)...(19): siRNA sense strand
gcgugugcccuaccguaua

SEQ ID NO: 2066634 - RNA, 19 nt, Homo sapiens
  misc_RNA (1)...(19): siRNA sense strand
uggguucccuuuauuuaca

SEQ ID NO: 2066635 - RNA, 19 nt, Homo sapiens
  misc_RNA (1)...(19): siRNA sense strand
gcggagagcuucuggagua

SEQ ID NO: 2066636 - RNA, 19 nt, Homo sapiens
  misc_RNA (1)...(19): siRNA sense strand
ggacacagaacgucacuga

SEQ ID NO: 2066637 - RNA, 19 nt, Homo sapiens
  misc_RNA (1)...(19): siRNA sense strand
gaacugcgccaucauuuac

SEQ ID NO: 2066638 - RNA, 19 nt, Homo sapiens
  misc_RNA (1)...(19): siRNA sense strand
ccacggagauugagaucau

SEQ ID NO: 2066639 - RNA, 19 nt, Homo sapiens
  misc_RNA (1)...(19): siRNA sense strand
ggagaacugcgccaucauu

SEQ ID NO: 2066640 - RNA, 19 nt, Homo sapiens
  misc_RNA (1)...(19): siRNA sense strand
gagaacugcgccaucauuu

SEQ ID NO: 2066641 - RNA, 19 nt, Homo sapiens
  misc_RNA (1)...(19): siRNA sense strand
ccagagacauggcucagau

SEQ ID NO: 2066642 - RNA, 19 nt, Homo sapiens
  misc_RNA (1)...(19): siRNA sense strand
ggacggggcugucaucaug

SEQ ID NO: 2066643 - RNA, 19 nt, Homo sapiens
  misc_RNA (1)...(19): siRNA sense strand
ggacaucgucaucaacuuc

SEQ ID NO: 2066644 - RNA, 19 nt, Homo sapiens
  misc_RNA (1)...(19): siRNA sense strand
ccaccuaugucaacaccaa

SEQ ID NO: 2066645 - RNA, 19 nt, Homo sapiens
  misc_RNA (1)...(19): siRNA sense strand
gcaaggaugccuccagcuu

SEQ ID NO: 2066646 - RNA, 19 nt, Homo sapiens
  misc_RNA (1)...(19): siRNA sense strand
cggaugugcugccggagua

SEQ ID NO: 2066647 - RNA, 19 nt, Homo sapiens
  misc_RNA (1)...(19): siRNA sense strand
gccaagaccaccaagguuu

SEQ ID NO: 2066648 - RNA, 19 nt, Homo sapiens
  misc_RNA (1)...(19): siRNA sense strand
ggcaaugucucgcccaaca

SEQ ID NO: 2066649 - RNA, 19 nt, Homo sapiens
  misc_RNA (1)...(19): siRNA sense strand
acacuuaccuggacaccau

SEQ ID NO: 2066650 - RNA, 19 nt, Homo sapiens
  misc_RNA (1)...(19): siRNA sense strand
cacagaacgucacugagaa

SEQ ID NO: 2066651 - RNA, 19 nt, Homo sapiens
  misc_RNA (1)...(19): siRNA sense strand
acacagaacgucacugaga

SEQ ID NO: 2066652 - RNA, 19 nt, Homo sapiens
  misc_RNA (1)...(19): siRNA sense strand
ggaaguacaaggacucauc

SEQ ID NO: 2066653 - RNA, 19 nt, Homo sapiens
  misc_RNA (1)...(19): siRNA sense strand
gaccuggccuugguuccua

SEQ ID NO: 2066654 - RNA, 19 nt, Homo sapiens
  misc_RNA (1)...(19): siRNA sense strand
caccaagguuucuuucuca

SEQ ID NO: 2066655 - RNA, 19 nt, Homo sapiens
  misc_RNA (1)...(19): siRNA sense strand
uggaggugcuggacaugua

SEQ ID NO: 2066656 - RNA, 19 nt, Homo sapiens
  misc_RNA (1)...(19): siRNA sense strand
gaacguguccgcgaucauc

SEQ ID NO: 2066657 - RNA, 19 nt, Homo sapiens
  misc_RNA (1)...(19): siRNA sense strand
ccaccaagguuucuuucuc

SEQ ID NO: 2066658 - RNA, 19 nt, Homo sapiens
  misc_RNA (1)...(19): siRNA sense strand
gcuggaccauccugcacua

SEQ ID NO: 2066659 - RNA, 19 nt, Homo sapiens
  misc_RNA (1)...(19): siRNA sense strand
ccaaugcucagauggagaa

SEQ ID NO: 2066660 - RNA, 19 nt, Homo sapiens
  misc_RNA (1)...(19): siRNA sense strand
agaacugcgccaucauuua

SEQ ID NO: 2066661 - RNA, 19 nt, Homo sapiens
  misc_RNA (1)...(19): siRNA sense strand
ccaaagcccucaggaagac

SEQ ID NO: 2066662 - RNA, 19 nt, Homo sapiens
  misc_RNA (1)...(19): siRNA sense strand
agacuuggaugacuguagu

SEQ ID NO: 2066663 - RNA, 19 nt, Homo sapiens
  misc_RNA (1)...(19): siRNA sense strand
gcacagaccccaagcuaug

SEQ ID NO: 2066664 - RNA, 19 nt, Homo sapiens
  misc_RNA (1)...(19): siRNA sense strand
gucaucauguucauucuca

SEQ ID NO: 2066665 - RNA, 19 nt, Homo sapiens
  misc_RNA (1)...(19): siRNA sense strand
ggaccauccugcacuacag

SEQ ID NO: 2066666 - RNA, 19 nt, Homo sapiens
  misc_RNA (1)...(19): siRNA sense strand
ucagccagaucccacaguu

SEQ ID NO: 2066667 - RNA, 19 nt, Homo sapiens
  misc_RNA (1)...(19): siRNA sense strand
gcaucgccguccacuacuu

SEQ ID NO: 2066668 - RNA, 19 nt, Homo sapiens
  misc_RNA (1)...(19): siRNA sense strand
ggucguggccauccuagga

SEQ ID NO: 2066669 - RNA, 19 nt, Homo sapiens
  misc_RNA (1)...(19): siRNA sense strand
cauguucauucucaacuuc

SEQ ID NO: 2066670 - RNA, 19 nt, Homo sapiens
  misc_RNA (1)...(19): siRNA sense strand
gaaguacaaggacucaucu

SEQ ID NO: 2066671 - RNA, 19 nt, Homo sapiens
  misc_RNA (1)...(19): siRNA sense strand
gcaagguggacauccucua

SEQ ID NO: 2066672 - RNA, 19 nt, Homo sapiens
  misc_RNA (1)...(19): siRNA sense strand
gggccaaagucggaaguuc

SEQ ID NO: 2066673 - RNA, 19 nt, Homo sapiens
  misc_RNA (1)...(19): siRNA sense strand
gcuauggagacuuggauga

SEQ ID NO: 2066674 - RNA, 19 nt, Homo sapiens
  misc_RNA (1)...(19): siRNA sense strand
gaagcuggaccgcuacucu

SEQ ID NO: 2066675 - RNA, 19 nt, Homo sapiens
  misc_RNA (1)...(19): siRNA sense strand
caagggcugguuccucauu

SEQ ID NO: 2066676 - RNA, 19 nt, Homo sapiens
  misc_RNA (1)...(19): siRNA sense strand
gcugucaucauguucauuc

SEQ ID NO: 2066677 - RNA, 19 nt, Homo sapiens
  misc_RNA (1)...(19): siRNA sense strand
gggccacgccagcuacauu

SEQ ID NO: 2066678 - RNA, 19 nt, Homo sapiens
  misc_RNA (1)...(19): siRNA sense strand
ucuugcagcuccuccagaa

SEQ ID NO: 2066679 - RNA, 19 nt, Homo sapiens
  misc_RNA (1)...(19): siRNA sense strand
cagcacgccugguccuaca

SEQ ID NO: 2066680 - RNA, 19 nt, Homo sapiens
  misc_RNA (1)...(19): siRNA sense strand
caaguucgagggccaaagu

SEQ ID NO: 2066681 - RNA, 19 nt, Homo sapiens
  misc_RNA (1)...(19): siRNA sense strand
gaucucaucguggacauca

SEQ ID NO: 2066682 - RNA, 19 nt, Homo sapiens
  misc_RNA (1)...(19): siRNA sense strand
caacaccaacuccgagaag

SEQ ID NO: 2066683 - RNA, 19 nt, Homo sapiens
  misc_RNA (1)...(19): siRNA sense strand
caacuuccgcaccaccuau

SEQ ID NO: 2066684 - RNA, 19 nt, Homo sapiens
  misc_RNA (1)...(19): siRNA sense strand
gcucuccacccucuacuuc

SEQ ID NO: 2066685 - RNA, 19 nt, Homo sapiens
  misc_RNA (1)...(19): siRNA sense strand
gugcucuucuugcucaugu

SEQ ID NO: 2066686 - RNA, 19 nt, Homo sapiens
  misc_RNA (1)...(19): siRNA sense strand
agguggacauccucuacua

SEQ ID NO: 2066687 - RNA, 19 nt, Homo sapiens
  misc_RNA (1)...(19): siRNA sense strand
ccaagaccaccaagguuuc

SEQ ID NO: 2066688 - RNA, 19 nt, Homo sapiens
  misc_RNA (1)...(19): siRNA sense strand
gggaacguguccgcgauca

SEQ ID NO: 2066689 - RNA, 19 nt, Homo sapiens
  misc_RNA (1)...(19): siRNA sense strand
ugauugggcuauugaagac

SEQ ID NO: 2066690 - RNA, 19 nt, Homo sapiens
  misc_RNA (1)...(19): siRNA sense strand
gagaccacaacccugauug

SEQ ID NO: 2066691 - RNA, 19 nt, Homo sapiens
  misc_RNA (1)...(19): siRNA sense strand
gcugguuccucauugacau

SEQ ID NO: 2066692 - RNA, 19 nt, Homo sapiens
  misc_RNA (1)...(19): siRNA sense strand
caucuacacggcugucuuc

SEQ ID NO: 2066693 - RNA, 19 nt, Homo sapiens
  misc_RNA (1)...(19): siRNA sense strand
gcaaguacaggaccaucag

SEQ ID NO: 2066694 - RNA, 19 nt, Homo sapiens
  misc_RNA (1)...(19): siRNA sense strand
ucauguucauucucaacuu

SEQ ID NO: 2066695 - RNA, 19 nt, Homo sapiens
  misc_RNA (1)...(19): siRNA sense strand
uagauguggugcccgugaa

SEQ ID NO: 2066696 - RNA, 19 nt, Homo sapiens
  misc_RNA (1)...(19): siRNA sense strand
ccacgucgcuccccaaaac

SEQ ID NO: 2066697 - RNA, 19 nt, Homo sapiens
  misc_RNA (1)...(19): siRNA sense strand
cugaacaccuuggcucugu

SEQ ID NO: 2066698 - RNA, 19 nt, Homo sapiens
  misc_RNA (1)...(19): siRNA sense strand
cggagagcuucuggaguaa

SEQ ID NO: 2066699 - RNA, 19 nt, Homo sapiens
  misc_RNA (1)...(19): siRNA sense strand
gaucauccagcgccuguac

SEQ ID NO: 2066700 - RNA, 19 nt, Homo sapiens
  misc_RNA (1)...(19): siRNA sense strand
caacccugauugggcuauu

SEQ ID NO: 2066701 - RNA, 19 nt, Homo sapiens
  misc_RNA (1)...(19): siRNA sense strand
gcgccaucauuuacugcaa

SEQ ID NO: 2066702 - RNA, 19 nt, Homo sapiens
  misc_RNA (1)...(19): siRNA sense strand
gggcugucaucauguucau

SEQ ID NO: 2066703 - RNA, 19 nt, Homo sapiens
  misc_RNA (1)...(19): siRNA sense strand
ggaagccccugccuccaau

SEQ ID NO: 2066704 - RNA, 19 nt, Homo sapiens
  misc_RNA (1)...(19): siRNA sense strand
cccaaagcccucaggaaga

SEQ ID NO: 2066705 - RNA, 19 nt, Homo sapiens
  misc_RNA (1)...(19): siRNA sense strand
caagguggacauccucuac

SEQ ID NO: 2066706 - RNA, 19 nt, Homo sapiens
  misc_RNA (1)...(19): siRNA sense strand
gcgcuagccgucaaguuca

SEQ ID NO: 2066707 - RNA, 19 nt, Homo sapiens
  misc_RNA (1)...(19): siRNA sense strand
ucacugugguggaucucau

SEQ ID NO: 2066708 - RNA, 19 nt, Homo sapiens
  misc_RNA (1)...(19): siRNA sense strand
cugauugggcuauugaaga

SEQ ID NO: 2066709 - RNA, 19 nt, Homo sapiens
  misc_RNA (1)...(19): siRNA sense strand
ucaggaagacccagauugc

SEQ ID NO: 2066710 - RNA, 19 nt, Homo sapiens
  misc_RNA (1)...(19): siRNA sense strand
agaccaccaagguuucuuu

SEQ ID NO: 2066711 - RNA, 19 nt, Homo sapiens
  misc_RNA (1)...(19): siRNA sense strand
acugcgaccugcacaagau

SEQ ID NO: 2066712 - RNA, 19 nt, Homo sapiens
  misc_RNA (1)...(19): siRNA sense strand
uaugucaacaccaaugaug

SEQ ID NO: 2066713 - RNA, 19 nt, Homo sapiens
  misc_RNA (1)...(19): siRNA sense strand
cagccaagaccaccaaggu

SEQ ID NO: 2066714 - RNA, 19 nt, Homo sapiens
  misc_RNA (1)...(19): siRNA sense strand
gcggagagcuucuggagua

SEQ ID NO: 2066715 - RNA, 19 nt, Homo sapiens
  misc_RNA (1)...(19): siRNA sense strand
ggacacagaacgucacuga

SEQ ID NO: 2066716 - RNA, 19 nt, Homo sapiens
  misc_RNA (1)...(19): siRNA sense strand
gaacugcgccaucauuuac

SEQ ID NO: 2066717 - RNA, 19 nt, Homo sapiens
  misc_RNA (1)...(19): siRNA sense strand
ccacggagauugagaucau

SEQ ID NO: 2066718 - RNA, 19 nt, Homo sapiens
  misc_RNA (1)...(19): siRNA sense strand
ggagaacugcgccaucauu

SEQ ID NO: 2066719 - RNA, 19 nt, Homo sapiens
  misc_RNA (1)...(19): siRNA sense strand
gagaacugcgccaucauuu

SEQ ID NO: 2066720 - RNA, 19 nt, Homo sapiens
  misc_RNA (1)...(19): siRNA sense strand
ccagagacauggcucagau

SEQ ID NO: 2066721 - RNA, 19 nt, Homo sapiens
  misc_RNA (1)...(19): siRNA sense strand
ggacggggcugucaucaug

SEQ ID NO: 2066722 - RNA, 19 nt, Homo sapiens
  misc_RNA (1)...(19): siRNA sense strand
ggacaucgucaucaacuuc

SEQ ID NO: 2066723 - RNA, 19 nt, Homo sapiens
  misc_RNA (1)...(19): siRNA sense strand
ccaccuaugucaacaccaa

SEQ ID NO: 2066724 - RNA, 19 nt, Homo sapiens
  misc_RNA (1)...(19): siRNA sense strand
gcaaggaugccuccagcuu

SEQ ID NO: 2066725 - RNA, 19 nt, Homo sapiens
  misc_RNA (1)...(19): siRNA sense strand
cggaugugcugccggagua

SEQ ID NO: 2066726 - RNA, 19 nt, Homo sapiens
  misc_RNA (1)...(19): siRNA sense strand
gccaagaccaccaagguuu

SEQ ID NO: 2066727 - RNA, 19 nt, Homo sapiens
  misc_RNA (1)...(19): siRNA sense strand
ggcaaugucucgcccaaca

SEQ ID NO: 2066728 - RNA, 19 nt, Homo sapiens
  misc_RNA (1)...(19): siRNA sense strand
acacuuaccuggacaccau

SEQ ID NO: 2066729 - RNA, 19 nt, Homo sapiens
  misc_RNA (1)...(19): siRNA sense strand
cacagaacgucacugagaa

SEQ ID NO: 2066730 - RNA, 19 nt, Homo sapiens
  misc_RNA (1)...(19): siRNA sense strand
acacagaacgucacugaga

SEQ ID NO: 2066731 - RNA, 19 nt, Homo sapiens
  misc_RNA (1)...(19): siRNA sense strand
ggaaguacaaggacucauc

SEQ ID NO: 2066732 - RNA, 19 nt, Homo sapiens
  misc_RNA (1)...(19): siRNA sense strand
gaccuggccuugguuccua

SEQ ID NO: 2066733 - RNA, 19 nt, Homo sapiens
  misc_RNA (1)...(19): siRNA sense strand
caccaagguuucuuucuca

SEQ ID NO: 2066734 - RNA, 19 nt, Homo sapiens
  misc_RNA (1)...(19): siRNA sense strand
uggaggugcuggacaugua

SEQ ID NO: 2066735 - RNA, 19 nt, Homo sapiens
  misc_RNA (1)...(19): siRNA sense strand
gaacguguccgcgaucauc

SEQ ID NO: 2066736 - RNA, 19 nt, Homo sapiens
  misc_RNA (1)...(19): siRNA sense strand
ccaccaagguuucuuucuc

SEQ ID NO: 2066737 - RNA, 19 nt, Homo sapiens
  misc_RNA (1)...(19): siRNA sense strand
gcuggaccauccugcacua

SEQ ID NO: 2066738 - RNA, 19 nt, Homo sapiens
  misc_RNA (1)...(19): siRNA sense strand
ccaaugcucagauggagaa

SEQ ID NO: 2066739 - RNA, 19 nt, Homo sapiens
  misc_RNA (1)...(19): siRNA sense strand
agaacugcgccaucauuua

SEQ ID NO: 2066740 - RNA, 19 nt, Homo sapiens
  misc_RNA (1)...(19): siRNA sense strand
ccaaagcccucaggaagac

SEQ ID NO: 2066741 - RNA, 19 nt, Homo sapiens
  misc_RNA (1)...(19): siRNA sense strand
agacuuggaugacuguagu

SEQ ID NO: 2066742 - RNA, 19 nt, Homo sapiens
  misc_RNA (1)...(19): siRNA sense strand
gcacagaccccaagcuaug

SEQ ID NO: 2066743 - RNA, 19 nt, Homo sapiens
  misc_RNA (1)...(19): siRNA sense strand
gucaucauguucauucuca

SEQ ID NO: 2066744 - RNA, 19 nt, Homo sapiens
  misc_RNA (1)...(19): siRNA sense strand
ggaccauccugcacuacag

SEQ ID NO: 2066745 - RNA, 19 nt, Homo sapiens
  misc_RNA (1)...(19): siRNA sense strand
ucagccagaucccacaguu

SEQ ID NO: 2066746 - RNA, 19 nt, Homo sapiens
  misc_RNA (1)...(19): siRNA sense strand
gcaucgccguccacuacuu

SEQ ID NO: 2066747 - RNA, 19 nt, Homo sapiens
  misc_RNA (1)...(19): siRNA sense strand
ggucguggccauccuagga

SEQ ID NO: 2066748 - RNA, 19 nt, Homo sapiens
  misc_RNA (1)...(19): siRNA sense strand
cauguucauucucaacuuc

SEQ ID NO: 2066749 - RNA, 19 nt, Homo sapiens
  misc_RNA (1)...(19): siRNA sense strand
gaaguacaaggacucaucu

SEQ ID NO: 2066750 - RNA, 19 nt, Homo sapiens
  misc_RNA (1)...(19): siRNA sense strand
gcaagguggacauccucua

SEQ ID NO: 2066751 - RNA, 19 nt, Homo sapiens
  misc_RNA (1)...(19): siRNA sense strand
gggccaaagucggaaguuc

SEQ ID NO: 2066752 - RNA, 19 nt, Homo sapiens
  misc_RNA (1)...(19): siRNA sense strand
gcuauggagacuuggauga

SEQ ID NO: 2066753 - RNA, 19 nt, Homo sapiens
  misc_RNA (1)...(19): siRNA sense strand
gaagcuggaccgcuacucu

SEQ ID NO: 2066754 - RNA, 19 nt, Homo sapiens
  misc_RNA (1)...(19): siRNA sense strand
caagggcugguuccucauu

SEQ ID NO: 2066755 - RNA, 19 nt, Homo sapiens
  misc_RNA (1)...(19): siRNA sense strand
gcugucaucauguucauuc

SEQ ID NO: 2066756 - RNA, 19 nt, Homo sapiens
  misc_RNA (1)...(19): siRNA sense strand
gggccacgccagcuacauu

SEQ ID NO: 2066757 - RNA, 19 nt, Homo sapiens
  misc_RNA (1)...(19): siRNA sense strand
ucuugcagcuccuccagaa

SEQ ID NO: 2066758 - RNA, 19 nt, Homo sapiens
  misc_RNA (1)...(19): siRNA sense strand
cagcacgccugguccuaca

SEQ ID NO: 2066759 - RNA, 19 nt, Homo sapiens
  misc_RNA (1)...(19): siRNA sense strand
caaguucgagggccaaagu

SEQ ID NO: 2066760 - RNA, 19 nt, Homo sapiens
  misc_RNA (1)...(19): siRNA sense strand
gaucucaucguggacauca

SEQ ID NO: 2066761 - RNA, 19 nt, Homo sapiens
  misc_RNA (1)...(19): siRNA sense strand
caacaccaacuccgagaag

SEQ ID NO: 2066762 - RNA, 19 nt, Homo sapiens
  misc_RNA (1)...(19): siRNA sense strand
caacuuccgcaccaccuau

SEQ ID NO: 2066763 - RNA, 19 nt, Homo sapiens
  misc_RNA (1)...(19): siRNA sense strand
gcucuccacccucuacuuc

SEQ ID NO: 2066764 - RNA, 19 nt, Homo sapiens
  misc_RNA (1)...(19): siRNA sense strand
gugcucuucuugcucaugu

SEQ ID NO: 2066765 - RNA, 19 nt, Homo sapiens
  misc_RNA (1)...(19): siRNA sense strand
agguggacauccucuacua

SEQ ID NO: 2066766 - RNA, 19 nt, Homo sapiens
  misc_RNA (1)...(19): siRNA sense strand
ccaagaccaccaagguuuc

SEQ ID NO: 2066767 - RNA, 19 nt, Homo sapiens
  misc_RNA (1)...(19): siRNA sense strand
gggaacguguccgcgauca

SEQ ID NO: 2066768 - RNA, 19 nt, Homo sapiens
  misc_RNA (1)...(19): siRNA sense strand
ugauugggcuauugaagac

SEQ ID NO: 2066769 - RNA, 19 nt, Homo sapiens
  misc_RNA (1)...(19): siRNA sense strand
gagaccacaacccugauug

SEQ ID NO: 2066770 - RNA, 19 nt, Homo sapiens
  misc_RNA (1)...(19): siRNA sense strand
gcugguuccucauugacau

SEQ ID NO: 2066771 - RNA, 19 nt, Homo sapiens
  misc_RNA (1)...(19): siRNA sense strand
caucuacacggcugucuuc

SEQ ID NO: 2066772 - RNA, 19 nt, Homo sapiens
  misc_RNA (1)...(19): siRNA sense strand
gcaaguacaggaccaucag

SEQ ID NO: 2066773 - RNA, 19 nt, Homo sapiens
  misc_RNA (1)...(19): siRNA sense strand
ucauguucauucucaacuu

SEQ ID NO: 2066774 - RNA, 19 nt, Homo sapiens
  misc_RNA (1)...(19): siRNA sense strand
uagauguggugcccgugaa

SEQ ID NO: 2066775 - RNA, 19 nt, Homo sapiens
  misc_RNA (1)...(19): siRNA sense strand
ccacgucgcuccccaaaac

SEQ ID NO: 2066776 - RNA, 19 nt, Homo sapiens
  misc_RNA (1)...(19): siRNA sense strand
cugaacaccuuggcucugu

SEQ ID NO: 2066777 - RNA, 19 nt, Homo sapiens
  misc_RNA (1)...(19): siRNA sense strand
cggagagcuucuggaguaa

SEQ ID NO: 2066778 - RNA, 19 nt, Homo sapiens
  misc_RNA (1)...(19): siRNA sense strand
gaucauccagcgccuguac

SEQ ID NO: 2066779 - RNA, 19 nt, Homo sapiens
  misc_RNA (1)...(19): siRNA sense strand
caacccugauugggcuauu

SEQ ID NO: 2066780 - RNA, 19 nt, Homo sapiens
  misc_RNA (1)...(19): siRNA sense strand
gcgccaucauuuacugcaa

SEQ ID NO: 2066781 - RNA, 19 nt, Homo sapiens
  misc_RNA (1)...(19): siRNA sense strand
gggcugucaucauguucau

SEQ ID NO: 2066782 - RNA, 19 nt, Homo sapiens
  misc_RNA (1)...(19): siRNA sense strand
ggaagccccugccuccaau

SEQ ID NO: 2066783 - RNA, 19 nt, Homo sapiens
  misc_RNA (1)...(19): siRNA sense strand
cccaaagcccucaggaaga

SEQ ID NO: 2066784 - RNA, 19 nt, Homo sapiens
  misc_RNA (1)...(19): siRNA sense strand
caagguggacauccucuac

SEQ ID NO: 2066785 - RNA, 19 nt, Homo sapiens
  misc_RNA (1)...(19): siRNA sense strand
gcgcuagccgucaaguuca

SEQ ID NO: 2066786 - RNA, 19 nt, Homo sapiens
  misc_RNA (1)...(19): siRNA sense strand
ucacugugguggaucucau

SEQ ID NO: 2066787 - RNA, 19 nt, Homo sapiens
  misc_RNA (1)...(19): siRNA sense strand
cugauugggcuauugaaga

SEQ ID NO: 2066788 - RNA, 19 nt, Homo sapiens
  misc_RNA (1)...(19): siRNA sense strand
ucaggaagacccagauugc

SEQ ID NO: 2066789 - RNA, 19 nt, Homo sapiens
  misc_RNA (1)...(19): siRNA sense strand
agaccaccaagguuucuuu

SEQ ID NO: 2066790 - RNA, 19 nt, Homo sapiens
  misc_RNA (1)...(19): siRNA sense strand
acugcgaccugcacaagau

SEQ ID NO: 2066791 - RNA, 19 nt, Homo sapiens
  misc_RNA (1)...(19): siRNA sense strand
uaugucaacaccaaugaug

SEQ ID NO: 2066792 - RNA, 19 nt, Homo sapiens
  misc_RNA (1)...(19): siRNA sense strand
cagccaagaccaccaaggu

SEQ ID NO: 2066793 - RNA, 19 nt, Homo sapiens
  misc_RNA (1)...(19): siRNA sense strand
gggaauguaucugcaauua

SEQ ID NO: 2066794 - RNA, 19 nt, Homo sapiens
  misc_RNA (1)...(19): siRNA sense strand
gaauguaucugcaauuauc

SEQ ID NO: 2066795 - RNA, 19 nt, Homo sapiens
  misc_RNA (1)...(19): siRNA sense strand
gaaacuggaucgauauuca

SEQ ID NO: 2066796 - RNA, 19 nt, Homo sapiens
  misc_RNA (1)...(19): siRNA sense strand
agggaaagcuuauguagua

SEQ ID NO: 2066797 - RNA, 19 nt, Homo sapiens
  misc_RNA (1)...(19): siRNA sense strand
gcagaacugugccaucauu

SEQ ID NO: 2066798 - RNA, 19 nt, Homo sapiens
  misc_RNA (1)...(19): siRNA sense strand
caaauucccuggucugaga

SEQ ID NO: 2066799 - RNA, 19 nt, Homo sapiens
  misc_RNA (1)...(19): siRNA sense strand
ggucaucgauucaucuaaa

SEQ ID NO: 2066800 - RNA, 19 nt, Homo sapiens
  misc_RNA (1)...(19): siRNA sense strand
gcaauuauccaaagacuau

SEQ ID NO: 2066801 - RNA, 19 nt, Homo sapiens
  misc_RNA (1)...(19): siRNA sense strand
gcaauacacuacuucaaag

SEQ ID NO: 2066802 - RNA, 19 nt, Homo sapiens
  misc_RNA (1)...(19): siRNA sense strand
gaacugugccaucauuuau

SEQ ID NO: 2066803 - RNA, 19 nt, Homo sapiens
  misc_RNA (1)...(19): siRNA sense strand
ccaagaacauauuuagaga

SEQ ID NO: 2066804 - RNA, 19 nt, Homo sapiens
  misc_RNA (1)...(19): siRNA sense strand
acacagugaugauucagua

SEQ ID NO: 2066805 - RNA, 19 nt, Homo sapiens
  misc_RNA (1)...(19): siRNA sense strand
gaugagacaacaacauuaa

SEQ ID NO: 2066806 - RNA, 19 nt, Homo sapiens
  misc_RNA (1)...(19): siRNA sense strand
gaaagcuuauguaguauac

SEQ ID NO: 2066807 - RNA, 19 nt, Homo sapiens
  misc_RNA (1)...(19): siRNA sense strand
gaccaucauucggaaauuu

SEQ ID NO: 2066808 - RNA, 19 nt, Homo sapiens
  misc_RNA (1)...(19): siRNA sense strand
ugacagagaagaacagaaa

SEQ ID NO: 2066809 - RNA, 19 nt, Homo sapiens
  misc_RNA (1)...(19): siRNA sense strand
caacaaguuuacgauauug

SEQ ID NO: 2066810 - RNA, 19 nt, Homo sapiens
  misc_RNA (1)...(19): siRNA sense strand
ugacccagguucucucuuu

SEQ ID NO: 2066811 - RNA, 19 nt, Homo sapiens
  misc_RNA (1)...(19): siRNA sense strand
caucuucgguccaugauau

SEQ ID NO: 2066812 - RNA, 19 nt, Homo sapiens
  misc_RNA (1)...(19): siRNA sense strand
ggaaagcuuauguaguaua

SEQ ID NO: 2066813 - RNA, 19 nt, Homo sapiens
  misc_RNA (1)...(19): siRNA sense strand
uugaauaugugacggauaa

SEQ ID NO: 2066814 - RNA, 19 nt, Homo sapiens
  misc_RNA (1)...(19): siRNA sense strand
gaauauauccggaccucuu

SEQ ID NO: 2066815 - RNA, 19 nt, Homo sapiens
  misc_RNA (1)...(19): siRNA sense strand
caacaaauacagcaccauu

SEQ ID NO: 2066816 - RNA, 19 nt, Homo sapiens
  misc_RNA (1)...(19): siRNA sense strand
gggaaugugucuccuaaca

SEQ ID NO: 2066817 - RNA, 19 nt, Homo sapiens
  misc_RNA (1)...(19): siRNA sense strand
gaccauccauuaaagacaa

SEQ ID NO: 2066818 - RNA, 19 nt, Homo sapiens
  misc_RNA (1)...(19): siRNA sense strand
gcagauguccuaccugaau

SEQ ID NO: 2066819 - RNA, 19 nt, Homo sapiens
  misc_RNA (1)...(19): siRNA sense strand
gacccagguucucucuuua

SEQ ID NO: 2066820 - RNA, 19 nt, Homo sapiens
  misc_RNA (1)...(19): siRNA sense strand
acaaauacagcaccauuaa

SEQ ID NO: 2066821 - RNA, 19 nt, Homo sapiens
  misc_RNA (1)...(19): siRNA sense strand
gguaagugaucccgccaaa

SEQ ID NO: 2066822 - RNA, 19 nt, Homo sapiens
  misc_RNA (1)...(19): siRNA sense strand
cagauguccuaccugaaua

SEQ ID NO: 2066823 - RNA, 19 nt, Homo sapiens
  misc_RNA (1)...(19): siRNA sense strand
ggccuuaccugacugacaa

SEQ ID NO: 2066824 - RNA, 19 nt, Homo sapiens
  misc_RNA (1)...(19): siRNA sense strand
gagacaacaacauuaauug

SEQ ID NO: 2066825 - RNA, 19 nt, Homo sapiens
  misc_RNA (1)...(19): siRNA sense strand
uguccuaccugaauacaaa

SEQ ID NO: 2066826 - RNA, 19 nt, Homo sapiens
  misc_RNA (1)...(19): siRNA sense strand
uaaacacagugaugauuca

SEQ ID NO: 2066827 - RNA, 19 nt, Homo sapiens
  misc_RNA (1)...(19): siRNA sense strand
uaacacgaauucggagaaa

SEQ ID NO: 2066828 - RNA, 19 nt, Homo sapiens
  misc_RNA (1)...(19): siRNA sense strand
gugcagaacugugccauca

SEQ ID NO: 2066829 - RNA, 19 nt, Homo sapiens
  misc_RNA (1)...(19): siRNA sense strand
ccacagcucacucugaauu

SEQ ID NO: 2066830 - RNA, 19 nt, Homo sapiens
  misc_RNA (1)...(19): siRNA sense strand
ucugugagaugacugguuu

SEQ ID NO: 2066831 - RNA, 19 nt, Homo sapiens
  misc_RNA (1)...(19): siRNA sense strand
caguagccaugaagcauuu

SEQ ID NO: 2066832 - RNA, 19 nt, Homo sapiens
  misc_RNA (1)...(19): siRNA sense strand
caagagggcguggcuauga

SEQ ID NO: 2066833 - RNA, 19 nt, Homo sapiens
  misc_RNA (1)...(19): siRNA sense strand
gguaugcgauugggaaugu

SEQ ID NO: 2066834 - RNA, 19 nt, Homo sapiens
  misc_RNA (1)...(19): siRNA sense strand
gcaugauauugcccaaauu

SEQ ID NO: 2066835 - RNA, 19 nt, Homo sapiens
  misc_RNA (1)...(19): siRNA sense strand
ucaccuccuucuucagaua

SEQ ID NO: 2066836 - RNA, 19 nt, Homo sapiens
  misc_RNA (1)...(19): siRNA sense strand
ggaccaucauucggaaauu

SEQ ID NO: 2066837 - RNA, 19 nt, Homo sapiens
  misc_RNA (1)...(19): siRNA sense strand
gcaacgauggguucuguga

SEQ ID NO: 2066838 - RNA, 19 nt, Homo sapiens
  misc_RNA (1)...(19): siRNA sense strand
uugauuggcucacuaaugu

SEQ ID NO: 2066839 - RNA, 19 nt, Homo sapiens
  misc_RNA (1)...(19): siRNA sense strand
ccacgcaucaacaaguuua

SEQ ID NO: 2066840 - RNA, 19 nt, Homo sapiens
  misc_RNA (1)...(19): siRNA sense strand
gaagaagugguaagugauc

SEQ ID NO: 2066841 - RNA, 19 nt, Homo sapiens
  misc_RNA (1)...(19): siRNA sense strand
gacagugacucaaguucug

SEQ ID NO: 2066842 - RNA, 19 nt, Homo sapiens
  misc_RNA (1)...(19): siRNA sense strand
caucaacaaguuuacgaua

SEQ ID NO: 2066843 - RNA, 19 nt, Homo sapiens
  misc_RNA (1)...(19): siRNA sense strand
gugcaucuuugcccugauu

SEQ ID NO: 2066844 - RNA, 19 nt, Homo sapiens
  misc_RNA (1)...(19): siRNA sense strand
gauggguucugugagauga

SEQ ID NO: 2066845 - RNA, 19 nt, Homo sapiens
  misc_RNA (1)...(19): siRNA sense strand
gggaaacguuacaaugaca

SEQ ID NO: 2066846 - RNA, 19 nt, Homo sapiens
  misc_RNA (1)...(19): siRNA sense strand
gcucuuaaugugcaucuuu

SEQ ID NO: 2066847 - RNA, 19 nt, Homo sapiens
  misc_RNA (1)...(19): siRNA sense strand
augaagaagugguaaguga

SEQ ID NO: 2066848 - RNA, 19 nt, Homo sapiens
  misc_RNA (1)...(19): siRNA sense strand
cagccuuccuccucaauga

SEQ ID NO: 2066849 - RNA, 19 nt, Homo sapiens
  misc_RNA (1)...(19): siRNA sense strand
caaugugacugagaaagug

SEQ ID NO: 2066850 - RNA, 19 nt, Homo sapiens
  misc_RNA (1)...(19): siRNA sense strand
gagcaucuucgguccauga

SEQ ID NO: 2066851 - RNA, 19 nt, Homo sapiens
  misc_RNA (1)...(19): siRNA sense strand
guucccagcugucccauuc

SEQ ID NO: 2066852 - RNA, 19 nt, Homo sapiens
  misc_RNA (1)...(19): siRNA sense strand
gcaaugggaccgacucuac

SEQ ID NO: 2066853 - RNA, 19 nt, Homo sapiens
  misc_RNA (1)...(19): siRNA sense strand
guucuaaugcucuuaaugu

SEQ ID NO: 2066854 - RNA, 19 nt, Homo sapiens
  misc_RNA (1)...(19): siRNA sense strand
gaauauggcgcugcuguuc

SEQ ID NO: 2066855 - RNA, 19 nt, Homo sapiens
  misc_RNA (1)...(19): siRNA sense strand
gaaugugguagacuugauu

SEQ ID NO: 2066856 - RNA, 19 nt, Homo sapiens
  misc_RNA (1)...(19): siRNA sense strand
caauuugugucauguugau

SEQ ID NO: 2066857 - RNA, 19 nt, Homo sapiens
  misc_RNA (1)...(19): siRNA sense strand
gcauggacuuacaccaaug

SEQ ID NO: 2066858 - RNA, 19 nt, Homo sapiens
  misc_RNA (1)...(19): siRNA sense strand
gggcguggcuaugauguuc

SEQ ID NO: 2066859 - RNA, 19 nt, Homo sapiens
  misc_RNA (1)...(19): siRNA sense strand
agaaaggccuuaccugacu

SEQ ID NO: 2066860 - RNA, 19 nt, Homo sapiens
  misc_RNA (1)...(19): siRNA sense strand
caaaggcugguuccugauu

SEQ ID NO: 2066861 - RNA, 19 nt, Homo sapiens
  misc_RNA (1)...(19): siRNA sense strand
agaacugugccaucauuua

SEQ ID NO: 2066862 - RNA, 19 nt, Homo sapiens
  misc_RNA (1)...(19): siRNA sense strand
ggucaccuacuaucacaaa

SEQ ID NO: 2066863 - RNA, 19 nt, Homo sapiens
  misc_RNA (1)...(19): siRNA sense strand
ggaauguaucugcaauuau

SEQ ID NO: 2066864 - RNA, 19 nt, Homo sapiens
  misc_RNA (1)...(19): siRNA sense strand
gccaugcaccugcgacuuu

SEQ ID NO: 2066865 - RNA, 19 nt, Homo sapiens
  misc_RNA (1)...(19): siRNA sense strand
ugaagcagaugacacaaaa

SEQ ID NO: 2066866 - RNA, 19 nt, Homo sapiens
  misc_RNA (1)...(19): siRNA sense strand
ucgggaaugugucuccuaa

SEQ ID NO: 2066867 - RNA, 19 nt, Homo sapiens
  misc_RNA (1)...(19): siRNA sense strand
gaacagaaaagacgagaau

SEQ ID NO: 2066868 - RNA, 19 nt, Homo sapiens
  misc_RNA (1)...(19): siRNA sense strand
caucauuuauugcaacgau

SEQ ID NO: 2066869 - RNA, 19 nt, Homo sapiens
  misc_RNA (1)...(19): siRNA sense strand
cagaucaagggaaagcuua

SEQ ID NO: 2066870 - RNA, 19 nt, Homo sapiens
  misc_RNA (1)...(19): siRNA sense strand
gagaccaagaggcaugaua

SEQ ID NO: 2066871 - RNA, 19 nt, Homo sapiens
  misc_RNA (1)...(19): siRNA sense strand
gaaugaagaagugguaagu

SEQ ID NO: 2066872 - RNA, 19 nt, Homo sapiens
  misc_RNA (1)...(19): siRNA sense strand
caccacgcaucaacaaguu

SEQ ID NO: 2066873 - RNA, 19 nt, Homo sapiens
  misc_RNA (1)...(19): siRNA sense strand
gaccaagaggcaugauauu

SEQ ID NO: 2066874 - RNA, 19 nt, Homo sapiens
  misc_RNA (1)...(19): siRNA sense strand
aaauacagcaccauuaaca

SEQ ID NO: 2066875 - RNA, 19 nt, Homo sapiens
  misc_RNA (1)...(19): siRNA sense strand
gauucaaaccucaacaaau

SEQ ID NO: 2066876 - RNA, 19 nt, Homo sapiens
  misc_RNA (1)...(19): siRNA sense strand
gaauaugugacggauaaug

SEQ ID NO: 2066877 - RNA, 19 nt, Homo sapiens
  misc_RNA (1)...(19): siRNA sense strand
caaugacagugacucaagu

SEQ ID NO: 2066878 - RNA, 19 nt, Homo sapiens
  misc_RNA (1)...(19): siRNA sense strand
gcacuacagcccuuucaag

SEQ ID NO: 2066879 - RNA, 19 nt, Homo sapiens
  misc_RNA (1)...(19): siRNA sense strand
caugauauugcccaaauug

SEQ ID NO: 2066880 - RNA, 19 nt, Homo sapiens
  misc_RNA (1)...(19): siRNA sense strand
caagggaaagcuuauguag

SEQ ID NO: 2066881 - RNA, 19 nt, Homo sapiens
  misc_RNA (1)...(19): siRNA sense strand
uuacagaaagcaguccuua

SEQ ID NO: 2066882 - RNA, 19 nt, Homo sapiens
  misc_RNA (1)...(19): siRNA sense strand
gaccgacucuacccugaca

SEQ ID NO: 2066883 - RNA, 19 nt, Homo sapiens
  misc_RNA (1)...(19): siRNA sense strand
uaucugcaauuauccaaag

SEQ ID NO: 2066884 - RNA, 19 nt, Homo sapiens
  misc_RNA (1)...(19): siRNA sense strand
uagacuugauuguggauau

SEQ ID NO: 2066885 - RNA, 19 nt, Homo sapiens
  misc_RNA (1)...(19): siRNA sense strand
aaagaucgaacacacaaug

SEQ ID NO: 2066886 - RNA, 19 nt, Homo sapiens
  misc_RNA (1)...(19): siRNA sense strand
gagagcaucuucgguccau

SEQ ID NO: 2066887 - RNA, 19 nt, Homo sapiens
  misc_RNA (1)...(19): siRNA sense strand
ggccagaugucaugcaaaa

SEQ ID NO: 2066888 - RNA, 19 nt, Homo sapiens
  misc_RNA (1)...(19): siRNA sense strand
cuucagaacaacauaugua

SEQ ID NO: 2066889 - RNA, 19 nt, Homo sapiens
  misc_RNA (1)...(19): siRNA sense strand
uucauucgcuuucaccaaa

SEQ ID NO: 2066890 - RNA, 19 nt, Homo sapiens
  misc_RNA (1)...(19): siRNA sense strand
auauggcgcugcuguucua

SEQ ID NO: 2066891 - RNA, 19 nt, Homo sapiens
  misc_RNA (1)...(19): siRNA sense strand
ugaugagacaacaacauua

SEQ ID NO: 2066892 - RNA, 19 nt, Homo sapiens
  misc_RNA (1)...(19): siRNA sense strand
aaaggcugguuccugauug

SEQ ID NO: 2066893 - RNA, 19 nt, Homo sapiens
  misc_RNA (1)...(19): siRNA sense strand
gggaauguaucugcaauua

SEQ ID NO: 2066894 - RNA, 19 nt, Homo sapiens
  misc_RNA (1)...(19): siRNA sense strand
gaauguaucugcaauuauc

SEQ ID NO: 2066895 - RNA, 19 nt, Homo sapiens
  misc_RNA (1)...(19): siRNA sense strand
gaaacuggaucgauauuca

SEQ ID NO: 2066896 - RNA, 19 nt, Homo sapiens
  misc_RNA (1)...(19): siRNA sense strand
agggaaagcuuauguagua

SEQ ID NO: 2066897 - RNA, 19 nt, Homo sapiens
  misc_RNA (1)...(19): siRNA sense strand
gcagaacugugccaucauu

SEQ ID NO: 2066898 - RNA, 19 nt, Homo sapiens
  misc_RNA (1)...(19): siRNA sense strand
caaauucccuggucugaga

SEQ ID NO: 2066899 - RNA, 19 nt, Homo sapiens
  misc_RNA (1)...(19): siRNA sense strand
ggucaucgauucaucuaaa

SEQ ID NO: 2066900 - RNA, 19 nt, Homo sapiens
  misc_RNA (1)...(19): siRNA sense strand
gcaauuauccaaagacuau

SEQ ID NO: 2066901 - RNA, 19 nt, Homo sapiens
  misc_RNA (1)...(19): siRNA sense strand
gcaauacacuacuucaaag

SEQ ID NO: 2066902 - RNA, 19 nt, Homo sapiens
  misc_RNA (1)...(19): siRNA sense strand
gaacugugccaucauuuau

SEQ ID NO: 2066903 - RNA, 19 nt, Homo sapiens
  misc_RNA (1)...(19): siRNA sense strand
ccaagaacauauuuagaga

SEQ ID NO: 2066904 - RNA, 19 nt, Homo sapiens
  misc_RNA (1)...(19): siRNA sense strand
acacagugaugauucagua

SEQ ID NO: 2066905 - RNA, 19 nt, Homo sapiens
  misc_RNA (1)...(19): siRNA sense strand
gaugagacaacaacauuaa

SEQ ID NO: 2066906 - RNA, 19 nt, Homo sapiens
  misc_RNA (1)...(19): siRNA sense strand
gaaagcuuauguaguauac

SEQ ID NO: 2066907 - RNA, 19 nt, Homo sapiens
  misc_RNA (1)...(19): siRNA sense strand
gaccaucauucggaaauuu

SEQ ID NO: 2066908 - RNA, 19 nt, Homo sapiens
  misc_RNA (1)...(19): siRNA sense strand
ugacagagaagaacagaaa

SEQ ID NO: 2066909 - RNA, 19 nt, Homo sapiens
  misc_RNA (1)...(19): siRNA sense strand
caacaaguuuacgauauug

SEQ ID NO: 2066910 - RNA, 19 nt, Homo sapiens
  misc_RNA (1)...(19): siRNA sense strand
ugacccagguucucucuuu

SEQ ID NO: 2066911 - RNA, 19 nt, Homo sapiens
  misc_RNA (1)...(19): siRNA sense strand
caucuucgguccaugauau

SEQ ID NO: 2066912 - RNA, 19 nt, Homo sapiens
  misc_RNA (1)...(19): siRNA sense strand
ggaaagcuuauguaguaua

SEQ ID NO: 2066913 - RNA, 19 nt, Homo sapiens
  misc_RNA (1)...(19): siRNA sense strand
uugaauaugugacggauaa

SEQ ID NO: 2066914 - RNA, 19 nt, Homo sapiens
  misc_RNA (1)...(19): siRNA sense strand
gaauauauccggaccucuu

SEQ ID NO: 2066915 - RNA, 19 nt, Homo sapiens
  misc_RNA (1)...(19): siRNA sense strand
caacaaauacagcaccauu

SEQ ID NO: 2066916 - RNA, 19 nt, Homo sapiens
  misc_RNA (1)...(19): siRNA sense strand
gggaaugugucuccuaaca

SEQ ID NO: 2066917 - RNA, 19 nt, Homo sapiens
  misc_RNA (1)...(19): siRNA sense strand
gaccauccauuaaagacaa

SEQ ID NO: 2066918 - RNA, 19 nt, Homo sapiens
  misc_RNA (1)...(19): siRNA sense strand
gcagauguccuaccugaau

SEQ ID NO: 2066919 - RNA, 19 nt, Homo sapiens
  misc_RNA (1)...(19): siRNA sense strand
gacccagguucucucuuua

SEQ ID NO: 2066920 - RNA, 19 nt, Homo sapiens
  misc_RNA (1)...(19): siRNA sense strand
acaaauacagcaccauuaa

SEQ ID NO: 2066921 - RNA, 19 nt, Homo sapiens
  misc_RNA (1)...(19): siRNA sense strand
gguaagugaucccgccaaa

SEQ ID NO: 2066922 - RNA, 19 nt, Homo sapiens
  misc_RNA (1)...(19): siRNA sense strand
cagauguccuaccugaaua

SEQ ID NO: 2066923 - RNA, 19 nt, Homo sapiens
  misc_RNA (1)...(19): siRNA sense strand
ggccuuaccugacugacaa

SEQ ID NO: 2066924 - RNA, 19 nt, Homo sapiens
  misc_RNA (1)...(19): siRNA sense strand
gagacaacaacauuaauug

SEQ ID NO: 2066925 - RNA, 19 nt, Homo sapiens
  misc_RNA (1)...(19): siRNA sense strand
uguccuaccugaauacaaa

SEQ ID NO: 2066926 - RNA, 19 nt, Homo sapiens
  misc_RNA (1)...(19): siRNA sense strand
uaaacacagugaugauuca

SEQ ID NO: 2066927 - RNA, 19 nt, Homo sapiens
  misc_RNA (1)...(19): siRNA sense strand
uaacacgaauucggagaaa

SEQ ID NO: 2066928 - RNA, 19 nt, Homo sapiens
  misc_RNA (1)...(19): siRNA sense strand
gugcagaacugugccauca

SEQ ID NO: 2066929 - RNA, 19 nt, Homo sapiens
  misc_RNA (1)...(19): siRNA sense strand
ccacagcucacucugaauu

SEQ ID NO: 2066930 - RNA, 19 nt, Homo sapiens
  misc_RNA (1)...(19): siRNA sense strand
ucugugagaugacugguuu

SEQ ID NO: 2066931 - RNA, 19 nt, Homo sapiens
  misc_RNA (1)...(19): siRNA sense strand
caguagccaugaagcauuu

SEQ ID NO: 2066932 - RNA, 19 nt, Homo sapiens
  misc_RNA (1)...(19): siRNA sense strand
caagagggcguggcuauga

SEQ ID NO: 2066933 - RNA, 19 nt, Homo sapiens
  misc_RNA (1)...(19): siRNA sense strand
gguaugcgauugggaaugu

SEQ ID NO: 2066934 - RNA, 19 nt, Homo sapiens
  misc_RNA (1)...(19): siRNA sense strand
gcaugauauugcccaaauu

SEQ ID NO: 2066935 - RNA, 19 nt, Homo sapiens
  misc_RNA (1)...(19): siRNA sense strand
ucaccuccuucuucagaua

SEQ ID NO: 2066936 - RNA, 19 nt, Homo sapiens
  misc_RNA (1)...(19): siRNA sense strand
ggaccaucauucggaaauu

SEQ ID NO: 2066937 - RNA, 19 nt, Homo sapiens
  misc_RNA (1)...(19): siRNA sense strand
gcaacgauggguucuguga

SEQ ID NO: 2066938 - RNA, 19 nt, Homo sapiens
  misc_RNA (1)...(19): siRNA sense strand
uugauuggcucacuaaugu

SEQ ID NO: 2066939 - RNA, 19 nt, Homo sapiens
  misc_RNA (1)...(19): siRNA sense strand
ccacgcaucaacaaguuua

SEQ ID NO: 2066940 - RNA, 19 nt, Homo sapiens
  misc_RNA (1)...(19): siRNA sense strand
gaagaagugguaagugauc

SEQ ID NO: 2066941 - RNA, 19 nt, Homo sapiens
  misc_RNA (1)...(19): siRNA sense strand
gacagugacucaaguucug

SEQ ID NO: 2066942 - RNA, 19 nt, Homo sapiens
  misc_RNA (1)...(19): siRNA sense strand
caucaacaaguuuacgaua

SEQ ID NO: 2066943 - RNA, 19 nt, Homo sapiens
  misc_RNA (1)...(19): siRNA sense strand
gugcaucuuugcccugauu

SEQ ID NO: 2066944 - RNA, 19 nt, Homo sapiens
  misc_RNA (1)...(19): siRNA sense strand
gauggguucugugagauga

SEQ ID NO: 2066945 - RNA, 19 nt, Homo sapiens
  misc_RNA (1)...(19): siRNA sense strand
gggaaacguuacaaugaca

SEQ ID NO: 2066946 - RNA, 19 nt, Homo sapiens
  misc_RNA (1)...(19): siRNA sense strand
gcucuuaaugugcaucuuu

SEQ ID NO: 2066947 - RNA, 19 nt, Homo sapiens
  misc_RNA (1)...(19): siRNA sense strand
augaagaagugguaaguga

SEQ ID NO: 2066948 - RNA, 19 nt, Homo sapiens
  misc_RNA (1)...(19): siRNA sense strand
cagccuuccuccucaauga

SEQ ID NO: 2066949 - RNA, 19 nt, Homo sapiens
  misc_RNA (1)...(19): siRNA sense strand
caaugugacugagaaagug

SEQ ID NO: 2066950 - RNA, 19 nt, Homo sapiens
  misc_RNA (1)...(19): siRNA sense strand
gagcaucuucgguccauga

SEQ ID NO: 2066951 - RNA, 19 nt, Homo sapiens
  misc_RNA (1)...(19): siRNA sense strand
guucccagcugucccauuc

SEQ ID NO: 2066952 - RNA, 19 nt, Homo sapiens
  misc_RNA (1)...(19): siRNA sense strand
gcaaugggaccgacucuac

SEQ ID NO: 2066953 - RNA, 19 nt, Homo sapiens
  misc_RNA (1)...(19): siRNA sense strand
guucuaaugcucuuaaugu

SEQ ID NO: 2066954 - RNA, 19 nt, Homo sapiens
  misc_RNA (1)...(19): siRNA sense strand
gaauauggcgcugcuguuc

SEQ ID NO: 2066955 - RNA, 19 nt, Homo sapiens
  misc_RNA (1)...(19): siRNA sense strand
gaaugugguagacuugauu

SEQ ID NO: 2066956 - RNA, 19 nt, Homo sapiens
  misc_RNA (1)...(19): siRNA sense strand
caauuugugucauguugau

SEQ ID NO: 2066957 - RNA, 19 nt, Homo sapiens
  misc_RNA (1)...(19): siRNA sense strand
gcauggacuuacaccaaug

SEQ ID NO: 2066958 - RNA, 19 nt, Homo sapiens
  misc_RNA (1)...(19): siRNA sense strand
gggcguggcuaugauguuc

SEQ ID NO: 2066959 - RNA, 19 nt, Homo sapiens
  misc_RNA (1)...(19): siRNA sense strand
agaaaggccuuaccugacu

SEQ ID NO: 2066960 - RNA, 19 nt, Homo sapiens
  misc_RNA (1)...(19): siRNA sense strand
caaaggcugguuccugauu

SEQ ID NO: 2066961 - RNA, 19 nt, Homo sapiens
  misc_RNA (1)...(19): siRNA sense strand
agaacugugccaucauuua

SEQ ID NO: 2066962 - RNA, 19 nt, Homo sapiens
  misc_RNA (1)...(19): siRNA sense strand
ggucaccuacuaucacaaa

SEQ ID NO: 2066963 - RNA, 19 nt, Homo sapiens
  misc_RNA (1)...(19): siRNA sense strand
ggaauguaucugcaauuau

SEQ ID NO: 2066964 - RNA, 19 nt, Homo sapiens
  misc_RNA (1)...(19): siRNA sense strand
gccaugcaccugcgacuuu

SEQ ID NO: 2066965 - RNA, 19 nt, Homo sapiens
  misc_RNA (1)...(19): siRNA sense strand
ugaagcagaugacacaaaa

SEQ ID NO: 2066966 - RNA, 19 nt, Homo sapiens
  misc_RNA (1)...(19): siRNA sense strand
ucgggaaugugucuccuaa

SEQ ID NO: 2066967 - RNA, 19 nt, Homo sapiens
  misc_RNA (1)...(19): siRNA sense strand
gaacagaaaagacgagaau

SEQ ID NO: 2066968 - RNA, 19 nt, Homo sapiens
  misc_RNA (1)...(19): siRNA sense strand
caucauuuauugcaacgau

SEQ ID NO: 2066969 - RNA, 19 nt, Homo sapiens
  misc_RNA (1)...(19): siRNA sense strand
cagaucaagggaaagcuua

SEQ ID NO: 2066970 - RNA, 19 nt, Homo sapiens
  misc_RNA (1)...(19): siRNA sense strand
gagaccaagaggcaugaua

SEQ ID NO: 2066971 - RNA, 19 nt, Homo sapiens
  misc_RNA (1)...(19): siRNA sense strand
gaaugaagaagugguaagu

SEQ ID NO: 2066972 - RNA, 19 nt, Homo sapiens
  misc_RNA (1)...(19): siRNA sense strand
caccacgcaucaacaaguu

SEQ ID NO: 2066973 - RNA, 19 nt, Homo sapiens
  misc_RNA (1)...(19): siRNA sense strand
gaccaagaggcaugauauu

SEQ ID NO: 2066974 - RNA, 19 nt, Homo sapiens
  misc_RNA (1)...(19): siRNA sense strand
aaauacagcaccauuaaca

SEQ ID NO: 2066975 - RNA, 19 nt, Homo sapiens
  misc_RNA (1)...(19): siRNA sense strand
gauucaaaccucaacaaau

SEQ ID NO: 2066976 - RNA, 19 nt, Homo sapiens
  misc_RNA (1)...(19): siRNA sense strand
gaauaugugacggauaaug

SEQ ID NO: 2066977 - RNA, 19 nt, Homo sapiens
  misc_RNA (1)...(19): siRNA sense strand
caaugacagugacucaagu

SEQ ID NO: 2066978 - RNA, 19 nt, Homo sapiens
  misc_RNA (1)...(19): siRNA sense strand
gcacuacagcccuuucaag

SEQ ID NO: 2066979 - RNA, 19 nt, Homo sapiens
  misc_RNA (1)...(19): siRNA sense strand
caugauauugcccaaauug

SEQ ID NO: 2066980 - RNA, 19 nt, Homo sapiens
  misc_RNA (1)...(19): siRNA sense strand
caagggaaagcuuauguag

SEQ ID NO: 2066981 - RNA, 19 nt, Homo sapiens
  misc_RNA (1)...(19): siRNA sense strand
uuacagaaagcaguccuua

SEQ ID NO: 2066982 - RNA, 19 nt, Homo sapiens
  misc_RNA (1)...(19): siRNA sense strand
gaccgacucuacccugaca

SEQ ID NO: 2066983 - RNA, 19 nt, Homo sapiens
  misc_RNA (1)...(19): siRNA sense strand
uaucugcaauuauccaaag

SEQ ID NO: 2066984 - RNA, 19 nt, Homo sapiens
  misc_RNA (1)...(19): siRNA sense strand
uagacuugauuguggauau

SEQ ID NO: 2066985 - RNA, 19 nt, Homo sapiens
  misc_RNA (1)...(19): siRNA sense strand
aaagaucgaacacacaaug

SEQ ID NO: 2066986 - RNA, 19 nt, Homo sapiens
  misc_RNA (1)...(19): siRNA sense strand
gagagcaucuucgguccau

SEQ ID NO: 2066987 - RNA, 19 nt, Homo sapiens
  misc_RNA (1)...(19): siRNA sense strand
ggccagaugucaugcaaaa

SEQ ID NO: 2066988 - RNA, 19 nt, Homo sapiens
  misc_RNA (1)...(19): siRNA sense strand
cuucagaacaacauaugua

SEQ ID NO: 2066989 - RNA, 19 nt, Homo sapiens
  misc_RNA (1)...(19): siRNA sense strand
uucauucgcuuucaccaaa

SEQ ID NO: 2066990 - RNA, 19 nt, Homo sapiens
  misc_RNA (1)...(19): siRNA sense strand
auauggcgcugcuguucua

SEQ ID NO: 2066991 - RNA, 19 nt, Homo sapiens
  misc_RNA (1)...(19): siRNA sense strand
ugaugagacaacaacauua

SEQ ID NO: 2066992 - RNA, 19 nt, Homo sapiens
  misc_RNA (1)...(19): siRNA sense strand
aaaggcugguuccugauug

SEQ ID NO: 2066993 - RNA, 19 nt, Homo sapiens
  misc_RNA (1)...(19): siRNA sense strand
cgaagaagauucagaacuu

SEQ ID NO: 2066994 - RNA, 19 nt, Homo sapiens
  misc_RNA (1)...(19): siRNA sense strand
gaagaagauucagaacuuu

SEQ ID NO: 2066995 - RNA, 19 nt, Homo sapiens
  misc_RNA (1)...(19): siRNA sense strand
cagaggagauugagaacua

SEQ ID NO: 2066996 - RNA, 19 nt, Homo sapiens
  misc_RNA (1)...(19): siRNA sense strand
gcaaagagucugccaagga

SEQ ID NO: 2066997 - RNA, 19 nt, Homo sapiens
  misc_RNA (1)...(19): siRNA sense strand
ucaaagcgcugcugcuaga

SEQ ID NO: 2066998 - RNA, 19 nt, Homo sapiens
  misc_RNA (1)...(19): siRNA sense strand
ugagaggccugaagaagaa

SEQ ID NO: 2066999 - RNA, 19 nt, Homo sapiens
  misc_RNA (1)...(19): siRNA sense strand
gaucagcaccagcaccuua

SEQ ID NO: 2067000 - RNA, 19 nt, Homo sapiens
  misc_RNA (1)...(19): siRNA sense strand
caagggagcugcggaggaa

SEQ ID NO: 2067001 - RNA, 19 nt, Homo sapiens
  misc_RNA (1)...(19): siRNA sense strand
ggagauggcuaagggcauu

SEQ ID NO: 2067002 - RNA, 19 nt, Homo sapiens
  misc_RNA (1)...(19): siRNA sense strand
agaagcagcugaaggaaga

SEQ ID NO: 2067003 - RNA, 19 nt, Homo sapiens
  misc_RNA (1)...(19): siRNA sense strand
gagcauugaugucagugaa

SEQ ID NO: 2067004 - RNA, 19 nt, Homo sapiens
  misc_RNA (1)...(19): siRNA sense strand
cuaagggcauuacguauga

SEQ ID NO: 2067005 - RNA, 19 nt, Homo sapiens
  misc_RNA (1)...(19): siRNA sense strand
ccacagacguugccuccaa

SEQ ID NO: 2067006 - RNA, 19 nt, Homo sapiens
  misc_RNA (1)...(19): siRNA sense strand
guacucaucuuugcagaga

SEQ ID NO: 2067007 - RNA, 19 nt, Homo sapiens
  misc_RNA (1)...(19): siRNA sense strand
gcuaagagugcccuuguaa

SEQ ID NO: 2067008 - RNA, 19 nt, Homo sapiens
  misc_RNA (1)...(19): siRNA sense strand
caacaaagcgugugaugag

SEQ ID NO: 2067009 - RNA, 19 nt, Homo sapiens
  misc_RNA (1)...(19): siRNA sense strand
uccagcacgucaucaauua

SEQ ID NO: 2067010 - RNA, 19 nt, Homo sapiens
  misc_RNA (1)...(19): siRNA sense strand
caaagcgugugaugaguca

SEQ ID NO: 2067011 - RNA, 19 nt, Homo sapiens
  misc_RNA (1)...(19): siRNA sense strand
cgacagacccugcucuuca

SEQ ID NO: 2067012 - RNA, 19 nt, Homo sapiens
  misc_RNA (1)...(19): siRNA sense strand
ggaacaagagaagagguua

SEQ ID NO: 2067013 - RNA, 19 nt, Homo sapiens
  misc_RNA (1)...(19): siRNA sense strand
ccacuaccuucaucaacaa

SEQ ID NO: 2067014 - RNA, 19 nt, Homo sapiens
  misc_RNA (1)...(19): siRNA sense strand
aucaagagcuucaaggaaa

SEQ ID NO: 2067015 - RNA, 19 nt, Homo sapiens
  misc_RNA (1)...(19): siRNA sense strand
uggauuugcugcagaagaa

SEQ ID NO: 2067016 - RNA, 19 nt, Homo sapiens
  misc_RNA (1)...(19): siRNA sense strand
ugacauccguaccaucuuc

SEQ ID NO: 2067017 - RNA, 19 nt, Homo sapiens
  misc_RNA (1)...(19): siRNA sense strand
ggagauugagaacuaugua

SEQ ID NO: 2067018 - RNA, 19 nt, Homo sapiens
  misc_RNA (1)...(19): siRNA sense strand
gaaggaggaggccaagaug

SEQ ID NO: 2067019 - RNA, 19 nt, Homo sapiens
  misc_RNA (1)...(19): siRNA sense strand
ggagguagaauaugugaag

SEQ ID NO: 2067020 - RNA, 19 nt, Homo sapiens
  misc_RNA (1)...(19): siRNA sense strand
gcuaagggcauuacguaug

SEQ ID NO: 2067021 - RNA, 19 nt, Homo sapiens
  misc_RNA (1)...(19): siRNA sense strand
gccacuaccuucaucaaca

SEQ ID NO: 2067022 - RNA, 19 nt, Homo sapiens
  misc_RNA (1)...(19): siRNA sense strand
gagguuacccuucucaaag

SEQ ID NO: 2067023 - RNA, 19 nt, Homo sapiens
  misc_RNA (1)...(19): siRNA sense strand
uaagagugcccuuguaaag

SEQ ID NO: 2067024 - RNA, 19 nt, Homo sapiens
  misc_RNA (1)...(19): siRNA sense strand
auucagaacuuugcuaaga

SEQ ID NO: 2067025 - RNA, 19 nt, Homo sapiens
  misc_RNA (1)...(19): siRNA sense strand
gaaggaagaagagaagauc

SEQ ID NO: 2067026 - RNA, 19 nt, Homo sapiens
  misc_RNA (1)...(19): siRNA sense strand
uaaagccugugaccaucaa

SEQ ID NO: 2067027 - RNA, 19 nt, Homo sapiens
  misc_RNA (1)...(19): siRNA sense strand
ucaagagcuucaaggaaau

SEQ ID NO: 2067028 - RNA, 19 nt, Homo sapiens
  misc_RNA (1)...(19): siRNA sense strand
gaacuauguacaccggauu

SEQ ID NO: 2067029 - RNA, 19 nt, Homo sapiens
  misc_RNA (1)...(19): siRNA sense strand
cuaaggccaucgaggcauu

SEQ ID NO: 2067030 - RNA, 19 nt, Homo sapiens
  misc_RNA (1)...(19): siRNA sense strand
gggcaaagaccaggaggaa

SEQ ID NO: 2067031 - RNA, 19 nt, Homo sapiens
  misc_RNA (1)...(19): siRNA sense strand
caacacccauucagaucca

SEQ ID NO: 2067032 - RNA, 19 nt, Homo sapiens
  misc_RNA (1)...(19): siRNA sense strand
agaagauccuggagagugu

SEQ ID NO: 2067033 - RNA, 19 nt, Homo sapiens
  misc_RNA (1)...(19): siRNA sense strand
caucaagagcuucaaggaa

SEQ ID NO: 2067034 - RNA, 19 nt, Homo sapiens
  misc_RNA (1)...(19): siRNA sense strand
ccaaggagaagcagcugaa

SEQ ID NO: 2067035 - RNA, 19 nt, Homo sapiens
  misc_RNA (1)...(19): siRNA sense strand
caccagcaccuuaaagaga

SEQ ID NO: 2067036 - RNA, 19 nt, Homo sapiens
  misc_RNA (1)...(19): siRNA sense strand
ccaagcaggucagcaacau

SEQ ID NO: 2067037 - RNA, 19 nt, Homo sapiens
  misc_RNA (1)...(19): siRNA sense strand
ucauggauuugcugcagaa

SEQ ID NO: 2067038 - RNA, 19 nt, Homo sapiens
  misc_RNA (1)...(19): siRNA sense strand
ccuaguagccacagacguu

SEQ ID NO: 2067039 - RNA, 19 nt, Homo sapiens
  misc_RNA (1)...(19): siRNA sense strand
uccaggagguagaauaugu

SEQ ID NO: 2067040 - RNA, 19 nt, Homo sapiens
  misc_RNA (1)...(19): siRNA sense strand
ucagaacuuugcuaagagu

SEQ ID NO: 2067041 - RNA, 19 nt, Homo sapiens
  misc_RNA (1)...(19): siRNA sense strand
gaacaagagaagagguuac

SEQ ID NO: 2067042 - RNA, 19 nt, Homo sapiens
  misc_RNA (1)...(19): siRNA sense strand
acacaggcaucgccacuac

SEQ ID NO: 2067043 - RNA, 19 nt, Homo sapiens
  misc_RNA (1)...(19): siRNA sense strand
ccuauggacucaucaucug

SEQ ID NO: 2067044 - RNA, 19 nt, Homo sapiens
  misc_RNA (1)...(19): siRNA sense strand
uggcuaagggcauuacgua

SEQ ID NO: 2067045 - RNA, 19 nt, Homo sapiens
  misc_RNA (1)...(19): siRNA sense strand
guucugagcaugucugaag

SEQ ID NO: 2067046 - RNA, 19 nt, Homo sapiens
  misc_RNA (1)...(19): siRNA sense strand
cccauggcauccuggagua

SEQ ID NO: 2067047 - RNA, 19 nt, Homo sapiens
  misc_RNA (1)...(19): siRNA sense strand
ccucaaagcgcugcugcua

SEQ ID NO: 2067048 - RNA, 19 nt, Homo sapiens
  misc_RNA (1)...(19): siRNA sense strand
ugaaggaggaggccaagau

SEQ ID NO: 2067049 - RNA, 19 nt, Homo sapiens
  misc_RNA (1)...(19): siRNA sense strand
gugccaccaugccgaagaa

SEQ ID NO: 2067050 - RNA, 19 nt, Homo sapiens
  misc_RNA (1)...(19): siRNA sense strand
gacagacccugcucuucag

SEQ ID NO: 2067051 - RNA, 19 nt, Homo sapiens
  misc_RNA (1)...(19): siRNA sense strand
ugacaugccagaggagauu

SEQ ID NO: 2067052 - RNA, 19 nt, Homo sapiens
  misc_RNA (1)...(19): siRNA sense strand
gcaggacagcgguagugaa

SEQ ID NO: 2067053 - RNA, 19 nt, Homo sapiens
  misc_RNA (1)...(19): siRNA sense strand
caugagcgcgugcggaaga

SEQ ID NO: 2067054 - RNA, 19 nt, Homo sapiens
  misc_RNA (1)...(19): siRNA sense strand
ggacuacgugcccuaugug

SEQ ID NO: 2067055 - RNA, 19 nt, Homo sapiens
  misc_RNA (1)...(19): siRNA sense strand
guaaagccugugaccauca

SEQ ID NO: 2067056 - RNA, 19 nt, Homo sapiens
  misc_RNA (1)...(19): siRNA sense strand
caucuucuccuacuucaag

SEQ ID NO: 2067057 - RNA, 19 nt, Homo sapiens
  misc_RNA (1)...(19): siRNA sense strand
guaccaucuucuccuacuu

SEQ ID NO: 2067058 - RNA, 19 nt, Homo sapiens
  misc_RNA (1)...(19): siRNA sense strand
gaagauggucagccuagac

SEQ ID NO: 2067059 - RNA, 19 nt, Homo sapiens
  misc_RNA (1)...(19): siRNA sense strand
acgaguaccugcugcucaa

SEQ ID NO: 2067060 - RNA, 19 nt, Homo sapiens
  misc_RNA (1)...(19): siRNA sense strand
cauccaggagguagaauau

SEQ ID NO: 2067061 - RNA, 19 nt, Homo sapiens
  misc_RNA (1)...(19): siRNA sense strand
accagcaccuuaaagagaa

SEQ ID NO: 2067062 - RNA, 19 nt, Homo sapiens
  misc_RNA (1)...(19): siRNA sense strand
ggugacauccguaccaucu

SEQ ID NO: 2067063 - RNA, 19 nt, Homo sapiens
  misc_RNA (1)...(19): siRNA sense strand
caugauaggcaucgcuuuc

SEQ ID NO: 2067064 - RNA, 19 nt, Homo sapiens
  misc_RNA (1)...(19): siRNA sense strand
cagcacgucaucaauuaug

SEQ ID NO: 2067065 - RNA, 19 nt, Homo sapiens
  misc_RNA (1)...(19): siRNA sense strand
cuaagagugcccuuguaaa

SEQ ID NO: 2067066 - RNA, 19 nt, Homo sapiens
  misc_RNA (1)...(19): siRNA sense strand
gcaccagcaccuuaaagag

SEQ ID NO: 2067067 - RNA, 19 nt, Homo sapiens
  misc_RNA (1)...(19): siRNA sense strand
caacgucagccuccuggau

SEQ ID NO: 2067068 - RNA, 19 nt, Homo sapiens
  misc_RNA (1)...(19): siRNA sense strand
ccaccaugccgaagaagau

SEQ ID NO: 2067069 - RNA, 19 nt, Homo sapiens
  misc_RNA (1)...(19): siRNA sense strand
ggagaagcagcugaaggaa

SEQ ID NO: 2067070 - RNA, 19 nt, Homo sapiens
  misc_RNA (1)...(19): siRNA sense strand
caucauguucugccuggaa

SEQ ID NO: 2067071 - RNA, 19 nt, Homo sapiens
  misc_RNA (1)...(19): siRNA sense strand
gcuagaagccaagcagaag

SEQ ID NO: 2067072 - RNA, 19 nt, Homo sapiens
  misc_RNA (1)...(19): siRNA sense strand
cagugaaggagauggcuaa

SEQ ID NO: 2067073 - RNA, 19 nt, Homo sapiens
  misc_RNA (1)...(19): siRNA sense strand
ucaacaaagcgugugauga

SEQ ID NO: 2067074 - RNA, 19 nt, Homo sapiens
  misc_RNA (1)...(19): siRNA sense strand
caucgccacuaccuucauc

SEQ ID NO: 2067075 - RNA, 19 nt, Homo sapiens
  misc_RNA (1)...(19): siRNA sense strand
cugagaggccugaagaaga

SEQ ID NO: 2067076 - RNA, 19 nt, Homo sapiens
  misc_RNA (1)...(19): siRNA sense strand
aggacuacgugcccuaugu

SEQ ID NO: 2067077 - RNA, 19 nt, Homo sapiens
  misc_RNA (1)...(19): siRNA sense strand
aggagaagcagcugaagga

SEQ ID NO: 2067078 - RNA, 19 nt, Homo sapiens
  misc_RNA (1)...(19): siRNA sense strand
agagguuacccuucucaaa

SEQ ID NO: 2067079 - RNA, 19 nt, Homo sapiens
  misc_RNA (1)...(19): siRNA sense strand
caccacccaucaagagcuu

SEQ ID NO: 2067080 - RNA, 19 nt, Homo sapiens
  misc_RNA (1)...(19): siRNA sense strand
ugaugucagugaaggagau

SEQ ID NO: 2067081 - RNA, 19 nt, Homo sapiens
  misc_RNA (1)...(19): siRNA sense strand
gggccgagcauugauguca

SEQ ID NO: 2067082 - RNA, 19 nt, Homo sapiens
  misc_RNA (1)...(19): siRNA sense strand
gcugaaggaagaagagaag

SEQ ID NO: 2067083 - RNA, 19 nt, Homo sapiens
  misc_RNA (1)...(19): siRNA sense strand
gagauggcuaagggcauua

SEQ ID NO: 2067084 - RNA, 19 nt, Homo sapiens
  misc_RNA (1)...(19): siRNA sense strand
gaagaagaaaggcauucac

SEQ ID NO: 2067085 - RNA, 19 nt, Homo sapiens
  misc_RNA (1)...(19): siRNA sense strand
ugaaggaagaagagaagau

SEQ ID NO: 2067086 - RNA, 19 nt, Homo sapiens
  misc_RNA (1)...(19): siRNA sense strand
agauucagaacuuugcuaa

SEQ ID NO: 2067087 - RNA, 19 nt, Homo sapiens
  misc_RNA (1)...(19): siRNA sense strand
gggcauguccgugaaagag

SEQ ID NO: 2067088 - RNA, 19 nt, Homo sapiens
  misc_RNA (1)...(19): siRNA sense strand
gagcgcgugcggaagaaau

SEQ ID NO: 2067089 - RNA, 19 nt, Homo sapiens
  misc_RNA (1)...(19): siRNA sense strand
ucgaggcuaugcagaccaa

SEQ ID NO: 2067090 - RNA, 19 nt, Homo sapiens
  misc_RNA (1)...(19): siRNA sense strand
ucauccaggagguagaaua

SEQ ID NO: 2067091 - RNA, 19 nt, Homo sapiens
  misc_RNA (1)...(19): siRNA sense strand
aagaagauucagaacuuug

SEQ ID NO: 2067092 - RNA, 19 nt, Homo sapiens
  misc_RNA (1)...(19): siRNA sense strand
gaagauccuggagaguguu

SEQ ID NO: 2067093 - RNA, 19 nt, Homo sapiens
  misc_RNA (1)...(19): siRNA sense strand
gcggagagcuucuggagua

SEQ ID NO: 2067094 - RNA, 19 nt, Homo sapiens
  misc_RNA (1)...(19): siRNA sense strand
ggacacagaacgucacuga

SEQ ID NO: 2067095 - RNA, 19 nt, Homo sapiens
  misc_RNA (1)...(19): siRNA sense strand
gaacugcgccaucauuuac

SEQ ID NO: 2067096 - RNA, 19 nt, Homo sapiens
  misc_RNA (1)...(19): siRNA sense strand
ccacggagauugagaucau

SEQ ID NO: 2067097 - RNA, 19 nt, Homo sapiens
  misc_RNA (1)...(19): siRNA sense strand
ggagaacugcgccaucauu

SEQ ID NO: 2067098 - RNA, 19 nt, Homo sapiens
  misc_RNA (1)...(19): siRNA sense strand
gagaacugcgccaucauuu

SEQ ID NO: 2067099 - RNA, 19 nt, Homo sapiens
  misc_RNA (1)...(19): siRNA sense strand
ccagagacauggcucagau

SEQ ID NO: 2067100 - RNA, 19 nt, Homo sapiens
  misc_RNA (1)...(19): siRNA sense strand
ggacggggcugucaucaug

SEQ ID NO: 2067101 - RNA, 19 nt, Homo sapiens
  misc_RNA (1)...(19): siRNA sense strand
ggacaucgucaucaacuuc

SEQ ID NO: 2067102 - RNA, 19 nt, Homo sapiens
  misc_RNA (1)...(19): siRNA sense strand
ccaccuaugucaacaccaa

SEQ ID NO: 2067103 - RNA, 19 nt, Homo sapiens
  misc_RNA (1)...(19): siRNA sense strand
gcaaggaugccuccagcuu

SEQ ID NO: 2067104 - RNA, 19 nt, Homo sapiens
  misc_RNA (1)...(19): siRNA sense strand
cggaugugcugccggagua

SEQ ID NO: 2067105 - RNA, 19 nt, Homo sapiens
  misc_RNA (1)...(19): siRNA sense strand
gccaagaccaccaagguuu

SEQ ID NO: 2067106 - RNA, 19 nt, Homo sapiens
  misc_RNA (1)...(19): siRNA sense strand
ggcaaugucucgcccaaca

SEQ ID NO: 2067107 - RNA, 19 nt, Homo sapiens
  misc_RNA (1)...(19): siRNA sense strand
acacuuaccuggacaccau

SEQ ID NO: 2067108 - RNA, 19 nt, Homo sapiens
  misc_RNA (1)...(19): siRNA sense strand
cacagaacgucacugagaa

SEQ ID NO: 2067109 - RNA, 19 nt, Homo sapiens
  misc_RNA (1)...(19): siRNA sense strand
acacagaacgucacugaga

SEQ ID NO: 2067110 - RNA, 19 nt, Homo sapiens
  misc_RNA (1)...(19): siRNA sense strand
ggaaguacaaggacucauc

SEQ ID NO: 2067111 - RNA, 19 nt, Homo sapiens
  misc_RNA (1)...(19): siRNA sense strand
gaccuggccuugguuccua

SEQ ID NO: 2067112 - RNA, 19 nt, Homo sapiens
  misc_RNA (1)...(19): siRNA sense strand
caccaagguuucuuucuca

SEQ ID NO: 2067113 - RNA, 19 nt, Homo sapiens
  misc_RNA (1)...(19): siRNA sense strand
uggaggugcuggacaugua

SEQ ID NO: 2067114 - RNA, 19 nt, Homo sapiens
  misc_RNA (1)...(19): siRNA sense strand
gaacguguccgcgaucauc

SEQ ID NO: 2067115 - RNA, 19 nt, Homo sapiens
  misc_RNA (1)...(19): siRNA sense strand
ccaccaagguuucuuucuc

SEQ ID NO: 2067116 - RNA, 19 nt, Homo sapiens
  misc_RNA (1)...(19): siRNA sense strand
gcuggaccauccugcacua

SEQ ID NO: 2067117 - RNA, 19 nt, Homo sapiens
  misc_RNA (1)...(19): siRNA sense strand
ccaaugcucagauggagaa

SEQ ID NO: 2067118 - RNA, 19 nt, Homo sapiens
  misc_RNA (1)...(19): siRNA sense strand
agaacugcgccaucauuua

SEQ ID NO: 2067119 - RNA, 19 nt, Homo sapiens
  misc_RNA (1)...(19): siRNA sense strand
ccaaagcccucaggaagac

SEQ ID NO: 2067120 - RNA, 19 nt, Homo sapiens
  misc_RNA (1)...(19): siRNA sense strand
agacuuggaugacuguagu

SEQ ID NO: 2067121 - RNA, 19 nt, Homo sapiens
  misc_RNA (1)...(19): siRNA sense strand
gcacagaccccaagcuaug

SEQ ID NO: 2067122 - RNA, 19 nt, Homo sapiens
  misc_RNA (1)...(19): siRNA sense strand
gucaucauguucauucuca

SEQ ID NO: 2067123 - RNA, 19 nt, Homo sapiens
  misc_RNA (1)...(19): siRNA sense strand
ggaccauccugcacuacag

SEQ ID NO: 2067124 - RNA, 19 nt, Homo sapiens
  misc_RNA (1)...(19): siRNA sense strand
ucagccagaucccacaguu

SEQ ID NO: 2067125 - RNA, 19 nt, Homo sapiens
  misc_RNA (1)...(19): siRNA sense strand
gcaucgccguccacuacuu

SEQ ID NO: 2067126 - RNA, 19 nt, Homo sapiens
  misc_RNA (1)...(19): siRNA sense strand
ggucguggccauccuagga

SEQ ID NO: 2067127 - RNA, 19 nt, Homo sapiens
  misc_RNA (1)...(19): siRNA sense strand
cauguucauucucaacuuc

SEQ ID NO: 2067128 - RNA, 19 nt, Homo sapiens
  misc_RNA (1)...(19): siRNA sense strand
gaaguacaaggacucaucu

SEQ ID NO: 2067129 - RNA, 19 nt, Homo sapiens
  misc_RNA (1)...(19): siRNA sense strand
gcaagguggacauccucua

SEQ ID NO: 2067130 - RNA, 19 nt, Homo sapiens
  misc_RNA (1)...(19): siRNA sense strand
gggccaaagucggaaguuc

SEQ ID NO: 2067131 - RNA, 19 nt, Homo sapiens
  misc_RNA (1)...(19): siRNA sense strand
gcuauggagacuuggauga

SEQ ID NO: 2067132 - RNA, 19 nt, Homo sapiens
  misc_RNA (1)...(19): siRNA sense strand
gaagcuggaccgcuacucu

SEQ ID NO: 2067133 - RNA, 19 nt, Homo sapiens
  misc_RNA (1)...(19): siRNA sense strand
caagggcugguuccucauu

SEQ ID NO: 2067134 - RNA, 19 nt, Homo sapiens
  misc_RNA (1)...(19): siRNA sense strand
gcugucaucauguucauuc

SEQ ID NO: 2067135 - RNA, 19 nt, Homo sapiens
  misc_RNA (1)...(19): siRNA sense strand
gggccacgccagcuacauu

SEQ ID NO: 2067136 - RNA, 19 nt, Homo sapiens
  misc_RNA (1)...(19): siRNA sense strand
ucuugcagcuccuccagaa

SEQ ID NO: 2067137 - RNA, 19 nt, Homo sapiens
  misc_RNA (1)...(19): siRNA sense strand
cagcacgccugguccuaca

SEQ ID NO: 2067138 - RNA, 19 nt, Homo sapiens
  misc_RNA (1)...(19): siRNA sense strand
caaguucgagggccaaagu

SEQ ID NO: 2067139 - RNA, 19 nt, Homo sapiens
  misc_RNA (1)...(19): siRNA sense strand
gaucucaucguggacauca

SEQ ID NO: 2067140 - RNA, 19 nt, Homo sapiens
  misc_RNA (1)...(19): siRNA sense strand
caacaccaacuccgagaag

SEQ ID NO: 2067141 - RNA, 19 nt, Homo sapiens
  misc_RNA (1)...(19): siRNA sense strand
caacuuccgcaccaccuau

SEQ ID NO: 2067142 - RNA, 19 nt, Homo sapiens
  misc_RNA (1)...(19): siRNA sense strand
gcucuccacccucuacuuc

SEQ ID NO: 2067143 - RNA, 19 nt, Homo sapiens
  misc_RNA (1)...(19): siRNA sense strand
gugcucuucuugcucaugu

SEQ ID NO: 2067144 - RNA, 19 nt, Homo sapiens
  misc_RNA (1)...(19): siRNA sense strand
agguggacauccucuacua

SEQ ID NO: 2067145 - RNA, 19 nt, Homo sapiens
  misc_RNA (1)...(19): siRNA sense strand
ccaagaccaccaagguuuc

SEQ ID NO: 2067146 - RNA, 19 nt, Homo sapiens
  misc_RNA (1)...(19): siRNA sense strand
gggaacguguccgcgauca

SEQ ID NO: 2067147 - RNA, 19 nt, Homo sapiens
  misc_RNA (1)...(19): siRNA sense strand
ugauugggcuauugaagac

SEQ ID NO: 2067148 - RNA, 19 nt, Homo sapiens
  misc_RNA (1)...(19): siRNA sense strand
gagaccacaacccugauug

SEQ ID NO: 2067149 - RNA, 19 nt, Homo sapiens
  misc_RNA (1)...(19): siRNA sense strand
gcugguuccucauugacau

SEQ ID NO: 2067150 - RNA, 19 nt, Homo sapiens
  misc_RNA (1)...(19): siRNA sense strand
caucuacacggcugucuuc

SEQ ID NO: 2067151 - RNA, 19 nt, Homo sapiens
  misc_RNA (1)...(19): siRNA sense strand
gcaaguacaggaccaucag

SEQ ID NO: 2067152 - RNA, 19 nt, Homo sapiens
  misc_RNA (1)...(19): siRNA sense strand
ucauguucauucucaacuu

SEQ ID NO: 2067153 - RNA, 19 nt, Homo sapiens
  misc_RNA (1)...(19): siRNA sense strand
uagauguggugcccgugaa

SEQ ID NO: 2067154 - RNA, 19 nt, Homo sapiens
  misc_RNA (1)...(19): siRNA sense strand
ccacgucgcuccccaaaac

SEQ ID NO: 2067155 - RNA, 19 nt, Homo sapiens
  misc_RNA (1)...(19): siRNA sense strand
cugaacaccuuggcucugu

SEQ ID NO: 2067156 - RNA, 19 nt, Homo sapiens
  misc_RNA (1)...(19): siRNA sense strand
cggagagcuucuggaguaa

SEQ ID NO: 2067157 - RNA, 19 nt, Homo sapiens
  misc_RNA (1)...(19): siRNA sense strand
gaucauccagcgccuguac

SEQ ID NO: 2067158 - RNA, 19 nt, Homo sapiens
  misc_RNA (1)...(19): siRNA sense strand
caacccugauugggcuauu

SEQ ID NO: 2067159 - RNA, 19 nt, Homo sapiens
  misc_RNA (1)...(19): siRNA sense strand
gcgccaucauuuacugcaa

SEQ ID NO: 2067160 - RNA, 19 nt, Homo sapiens
  misc_RNA (1)...(19): siRNA sense strand
gggcugucaucauguucau

SEQ ID NO: 2067161 - RNA, 19 nt, Homo sapiens
  misc_RNA (1)...(19): siRNA sense strand
ggaagccccugccuccaau

SEQ ID NO: 2067162 - RNA, 19 nt, Homo sapiens
  misc_RNA (1)...(19): siRNA sense strand
cccaaagcccucaggaaga

SEQ ID NO: 2067163 - RNA, 19 nt, Homo sapiens
  misc_RNA (1)...(19): siRNA sense strand
caagguggacauccucuac

SEQ ID NO: 2067164 - RNA, 19 nt, Homo sapiens
  misc_RNA (1)...(19): siRNA sense strand
gcgcuagccgucaaguuca

SEQ ID NO: 2067165 - RNA, 19 nt, Homo sapiens
  misc_RNA (1)...(19): siRNA sense strand
ucacugugguggaucucau

SEQ ID NO: 2067166 - RNA, 19 nt, Homo sapiens
  misc_RNA (1)...(19): siRNA sense strand
cugauugggcuauugaaga

SEQ ID NO: 2067167 - RNA, 19 nt, Homo sapiens
  misc_RNA (1)...(19): siRNA sense strand
ucaggaagacccagauugc

SEQ ID NO: 2067168 - RNA, 19 nt, Homo sapiens
  misc_RNA (1)...(19): siRNA sense strand
agaccaccaagguuucuuu

SEQ ID NO: 2067169 - RNA, 19 nt, Homo sapiens
  misc_RNA (1)...(19): siRNA sense strand
acugcgaccugcacaagau

SEQ ID NO: 2067170 - RNA, 19 nt, Homo sapiens
  misc_RNA (1)...(19): siRNA sense strand
uaugucaacaccaaugaug

SEQ ID NO: 2067171 - RNA, 19 nt, Homo sapiens
  misc_RNA (1)...(19): siRNA sense strand
cagccaagaccaccaaggu

SEQ ID NO: 2067172 - RNA, 19 nt, Homo sapiens
  misc_RNA (1)...(19): siRNA sense strand
gcggagagcuucuggagua

SEQ ID NO: 2067173 - RNA, 19 nt, Homo sapiens
  misc_RNA (1)...(19): siRNA sense strand
ggacacagaacgucacuga

SEQ ID NO: 2067174 - RNA, 19 nt, Homo sapiens
  misc_RNA (1)...(19): siRNA sense strand
gaacugcgccaucauuuac

SEQ ID NO: 2067175 - RNA, 19 nt, Homo sapiens
  misc_RNA (1)...(19): siRNA sense strand
ccacggagauugagaucau

SEQ ID NO: 2067176 - RNA, 19 nt, Homo sapiens
  misc_RNA (1)...(19): siRNA sense strand
ggagaacugcgccaucauu

SEQ ID NO: 2067177 - RNA, 19 nt, Homo sapiens
  misc_RNA (1)...(19): siRNA sense strand
gagaacugcgccaucauuu

SEQ ID NO: 2067178 - RNA, 19 nt, Homo sapiens
  misc_RNA (1)...(19): siRNA sense strand
ccagagacauggcucagau

SEQ ID NO: 2067179 - RNA, 19 nt, Homo sapiens
  misc_RNA (1)...(19): siRNA sense strand
ggacggggcugucaucaug

SEQ ID NO: 2067180 - RNA, 19 nt, Homo sapiens
  misc_RNA (1)...(19): siRNA sense strand
ggacaucgucaucaacuuc

SEQ ID NO: 2067181 - RNA, 19 nt, Homo sapiens
  misc_RNA (1)...(19): siRNA sense strand
ccaccuaugucaacaccaa

SEQ ID NO: 2067182 - RNA, 19 nt, Homo sapiens
  misc_RNA (1)...(19): siRNA sense strand
gcaaggaugccuccagcuu

SEQ ID NO: 2067183 - RNA, 19 nt, Homo sapiens
  misc_RNA (1)...(19): siRNA sense strand
cggaugugcugccggagua

SEQ ID NO: 2067184 - RNA, 19 nt, Homo sapiens
  misc_RNA (1)...(19): siRNA sense strand
gccaagaccaccaagguuu

SEQ ID NO: 2067185 - RNA, 19 nt, Homo sapiens
  misc_RNA (1)...(19): siRNA sense strand
ggcaaugucucgcccaaca

SEQ ID NO: 2067186 - RNA, 19 nt, Homo sapiens
  misc_RNA (1)...(19): siRNA sense strand
acacuuaccuggacaccau

SEQ ID NO: 2067187 - RNA, 19 nt, Homo sapiens
  misc_RNA (1)...(19): siRNA sense strand
cacagaacgucacugagaa

SEQ ID NO: 2067188 - RNA, 19 nt, Homo sapiens
  misc_RNA (1)...(19): siRNA sense strand
acacagaacgucacugaga

SEQ ID NO: 2067189 - RNA, 19 nt, Homo sapiens
  misc_RNA (1)...(19): siRNA sense strand
ggaaguacaaggacucauc

SEQ ID NO: 2067190 - RNA, 19 nt, Homo sapiens
  misc_RNA (1)...(19): siRNA sense strand
gaccuggccuugguuccua

SEQ ID NO: 2067191 - RNA, 19 nt, Homo sapiens
  misc_RNA (1)...(19): siRNA sense strand
caccaagguuucuuucuca

SEQ ID NO: 2067192 - RNA, 19 nt, Homo sapiens
  misc_RNA (1)...(19): siRNA sense strand
uggaggugcuggacaugua

SEQ ID NO: 2067193 - RNA, 19 nt, Homo sapiens
  misc_RNA (1)...(19): siRNA sense strand
gaacguguccgcgaucauc

SEQ ID NO: 2067194 - RNA, 19 nt, Homo sapiens
  misc_RNA (1)...(19): siRNA sense strand
ccaccaagguuucuuucuc

SEQ ID NO: 2067195 - RNA, 19 nt, Homo sapiens
  misc_RNA (1)...(19): siRNA sense strand
gcuggaccauccugcacua

SEQ ID NO: 2067196 - RNA, 19 nt, Homo sapiens
  misc_RNA (1)...(19): siRNA sense strand
ccaaugcucagauggagaa

SEQ ID NO: 2067197 - RNA, 19 nt, Homo sapiens
  misc_RNA (1)...(19): siRNA sense strand
agaacugcgccaucauuua

SEQ ID NO: 2067198 - RNA, 19 nt, Homo sapiens
  misc_RNA (1)...(19): siRNA sense strand
ccaaagcccucaggaagac

SEQ ID NO: 2067199 - RNA, 19 nt, Homo sapiens
  misc_RNA (1)...(19): siRNA sense strand
agacuuggaugacuguagu

SEQ ID NO: 2067200 - RNA, 19 nt, Homo sapiens
  misc_RNA (1)...(19): siRNA sense strand
gcacagaccccaagcuaug

SEQ ID NO: 2067201 - RNA, 19 nt, Homo sapiens
  misc_RNA (1)...(19): siRNA sense strand
gucaucauguucauucuca

SEQ ID NO: 2067202 - RNA, 19 nt, Homo sapiens
  misc_RNA (1)...(19): siRNA sense strand
ggaccauccugcacuacag

SEQ ID NO: 2067203 - RNA, 19 nt, Homo sapiens
  misc_RNA (1)...(19): siRNA sense strand
ucagccagaucccacaguu

SEQ ID NO: 2067204 - RNA, 19 nt, Homo sapiens
  misc_RNA (1)...(19): siRNA sense strand
gcaucgccguccacuacuu

SEQ ID NO: 2067205 - RNA, 19 nt, Homo sapiens
  misc_RNA (1)...(19): siRNA sense strand
ggucguggccauccuagga

SEQ ID NO: 2067206 - RNA, 19 nt, Homo sapiens
  misc_RNA (1)...(19): siRNA sense strand
cauguucauucucaacuuc

SEQ ID NO: 2067207 - RNA, 19 nt, Homo sapiens
  misc_RNA (1)...(19): siRNA sense strand
gaaguacaaggacucaucu

SEQ ID NO: 2067208 - RNA, 19 nt, Homo sapiens
  misc_RNA (1)...(19): siRNA sense strand
gcaagguggacauccucua

SEQ ID NO: 2067209 - RNA, 19 nt, Homo sapiens
  misc_RNA (1)...(19): siRNA sense strand
gggccaaagucggaaguuc

SEQ ID NO: 2067210 - RNA, 19 nt, Homo sapiens
  misc_RNA (1)...(19): siRNA sense strand
gcuauggagacuuggauga

SEQ ID NO: 2067211 - RNA, 19 nt, Homo sapiens
  misc_RNA (1)...(19): siRNA sense strand
gaagcuggaccgcuacucu

SEQ ID NO: 2067212 - RNA, 19 nt, Homo sapiens
  misc_RNA (1)...(19): siRNA sense strand
caagggcugguuccucauu

SEQ ID NO: 2067213 - RNA, 19 nt, Homo sapiens
  misc_RNA (1)...(19): siRNA sense strand
gcugucaucauguucauuc

SEQ ID NO: 2067214 - RNA, 19 nt, Homo sapiens
  misc_RNA (1)...(19): siRNA sense strand
gggccacgccagcuacauu

SEQ ID NO: 2067215 - RNA, 19 nt, Homo sapiens
  misc_RNA (1)...(19): siRNA sense strand
ucuugcagcuccuccagaa

SEQ ID NO: 2067216 - RNA, 19 nt, Homo sapiens
  misc_RNA (1)...(19): siRNA sense strand
cagcacgccugguccuaca

SEQ ID NO: 2067217 - RNA, 19 nt, Homo sapiens
  misc_RNA (1)...(19): siRNA sense strand
caaguucgagggccaaagu

SEQ ID NO: 2067218 - RNA, 19 nt, Homo sapiens
  misc_RNA (1)...(19): siRNA sense strand
gaucucaucguggacauca

SEQ ID NO: 2067219 - RNA, 19 nt, Homo sapiens
  misc_RNA (1)...(19): siRNA sense strand
caacaccaacuccgagaag

SEQ ID NO: 2067220 - RNA, 19 nt, Homo sapiens
  misc_RNA (1)...(19): siRNA sense strand
caacuuccgcaccaccuau

SEQ ID NO: 2067221 - RNA, 19 nt, Homo sapiens
  misc_RNA (1)...(19): siRNA sense strand
gcucuccacccucuacuuc

SEQ ID NO: 2067222 - RNA, 19 nt, Homo sapiens
  misc_RNA (1)...(19): siRNA sense strand
gugcucuucuugcucaugu

SEQ ID NO: 2067223 - RNA, 19 nt, Homo sapiens
  misc_RNA (1)...(19): siRNA sense strand
agguggacauccucuacua

SEQ ID NO: 2067224 - RNA, 19 nt, Homo sapiens
  misc_RNA (1)...(19): siRNA sense strand
ccaagaccaccaagguuuc

SEQ ID NO: 2067225 - RNA, 19 nt, Homo sapiens
  misc_RNA (1)...(19): siRNA sense strand
gggaacguguccgcgauca

SEQ ID NO: 2067226 - RNA, 19 nt, Homo sapiens
  misc_RNA (1)...(19): siRNA sense strand
ugauugggcuauugaagac

SEQ ID NO: 2067227 - RNA, 19 nt, Homo sapiens
  misc_RNA (1)...(19): siRNA sense strand
gagaccacaacccugauug

SEQ ID NO: 2067228 - RNA, 19 nt, Homo sapiens
  misc_RNA (1)...(19): siRNA sense strand
gcugguuccucauugacau

SEQ ID NO: 2067229 - RNA, 19 nt, Homo sapiens
  misc_RNA (1)...(19): siRNA sense strand
caucuacacggcugucuuc

SEQ ID NO: 2067230 - RNA, 19 nt, Homo sapiens
  misc_RNA (1)...(19): siRNA sense strand
gcaaguacaggaccaucag

SEQ ID NO: 2067231 - RNA, 19 nt, Homo sapiens
  misc_RNA (1)...(19): siRNA sense strand
ucauguucauucucaacuu

SEQ ID NO: 2067232 - RNA, 19 nt, Homo sapiens
  misc_RNA (1)...(19): siRNA sense strand
uagauguggugcccgugaa

SEQ ID NO: 2067233 - RNA, 19 nt, Homo sapiens
  misc_RNA (1)...(19): siRNA sense strand
ccacgucgcuccccaaaac

SEQ ID NO: 2067234 - RNA, 19 nt, Homo sapiens
  misc_RNA (1)...(19): siRNA sense strand
cugaacaccuuggcucugu

SEQ ID NO: 2067235 - RNA, 19 nt, Homo sapiens
  misc_RNA (1)...(19): siRNA sense strand
cggagagcuucuggaguaa

SEQ ID NO: 2067236 - RNA, 19 nt, Homo sapiens
  misc_RNA (1)...(19): siRNA sense strand
gaucauccagcgccuguac

SEQ ID NO: 2067237 - RNA, 19 nt, Homo sapiens
  misc_RNA (1)...(19): siRNA sense strand
caacccugauugggcuauu

SEQ ID NO: 2067238 - RNA, 19 nt, Homo sapiens
  misc_RNA (1)...(19): siRNA sense strand
gcgccaucauuuacugcaa

SEQ ID NO: 2067239 - RNA, 19 nt, Homo sapiens
  misc_RNA (1)...(19): siRNA sense strand
gggcugucaucauguucau

SEQ ID NO: 2067240 - RNA, 19 nt, Homo sapiens
  misc_RNA (1)...(19): siRNA sense strand
ggaagccccugccuccaau

SEQ ID NO: 2067241 - RNA, 19 nt, Homo sapiens
  misc_RNA (1)...(19): siRNA sense strand
cccaaagcccucaggaaga

SEQ ID NO: 2067242 - RNA, 19 nt, Homo sapiens
  misc_RNA (1)...(19): siRNA sense strand
caagguggacauccucuac

SEQ ID NO: 2067243 - RNA, 19 nt, Homo sapiens
  misc_RNA (1)...(19): siRNA sense strand
gcgcuagccgucaaguuca

SEQ ID NO: 2067244 - RNA, 19 nt, Homo sapiens
  misc_RNA (1)...(19): siRNA sense strand
ucacugugguggaucucau

SEQ ID NO: 2067245 - RNA, 19 nt, Homo sapiens
  misc_RNA (1)...(19): siRNA sense strand
cugauugggcuauugaaga

SEQ ID NO: 2067246 - RNA, 19 nt, Homo sapiens
  misc_RNA (1)...(19): siRNA sense strand
ucaggaagacccagauugc

SEQ ID NO: 2067247 - RNA, 19 nt, Homo sapiens
  misc_RNA (1)...(19): siRNA sense strand
agaccaccaagguuucuuu

SEQ ID NO: 2067248 - RNA, 19 nt, Homo sapiens
  misc_RNA (1)...(19): siRNA sense strand
acugcgaccugcacaagau

SEQ ID NO: 2067249 - RNA, 19 nt, Homo sapiens
  misc_RNA (1)...(19): siRNA sense strand
uaugucaacaccaaugaug

SEQ ID NO: 2067250 - RNA, 19 nt, Homo sapiens
  misc_RNA (1)...(19): siRNA sense strand
cagccaagaccaccaaggu

SEQ ID NO: 2067251 - RNA, 19 nt, Homo sapiens
  misc_RNA (1)...(19): siRNA sense strand
cuccaaagauucagguuua

SEQ ID NO: 2067252 - RNA, 19 nt, Homo sapiens
  misc_RNA (1)...(19): siRNA sense strand
gaguaugccugccguguga

SEQ ID NO: 2067253 - RNA, 19 nt, Homo sapiens
  misc_RNA (1)...(19): siRNA sense strand
gagaauggaaagucaaauu

SEQ ID NO: 2067254 - RNA, 19 nt, Homo sapiens
  misc_RNA (1)...(19): siRNA sense strand
ggacuggucuuucuaucuc

SEQ ID NO: 2067255 - RNA, 19 nt, Homo sapiens
  misc_RNA (1)...(19): siRNA sense strand
uaagugggaucgagacaug

SEQ ID NO: 2067256 - RNA, 19 nt, Homo sapiens
  misc_RNA (1)...(19): siRNA sense strand
ucacagcccaagauaguua

SEQ ID NO: 2067257 - RNA, 19 nt, Homo sapiens
  misc_RNA (1)...(19): siRNA sense strand
cauccgacauugaaguuga

SEQ ID NO: 2067258 - RNA, 19 nt, Homo sapiens
  misc_RNA (1)...(19): siRNA sense strand
gaauggagagagaauugaa

SEQ ID NO: 2067259 - RNA, 19 nt, Homo sapiens
  misc_RNA (1)...(19): siRNA sense strand
gcaaggacuggucuuucua

SEQ ID NO: 2067260 - RNA, 19 nt, Homo sapiens
  misc_RNA (1)...(19): siRNA sense strand
gcgcuacucucucuuucug

SEQ ID NO: 2067261 - RNA, 19 nt, Homo sapiens
  misc_RNA (1)...(19): siRNA sense strand
gaagaauggagagagaauu

SEQ ID NO: 2067262 - RNA, 19 nt, Homo sapiens
  misc_RNA (1)...(19): siRNA sense strand
ccagcguacuccaaagauu

SEQ ID NO: 2067263 - RNA, 19 nt, Homo sapiens
  misc_RNA (1)...(19): siRNA sense strand
cuuucuaucucuuguacua

SEQ ID NO: 2067264 - RNA, 19 nt, Homo sapiens
  misc_RNA (1)...(19): siRNA sense strand
gcagagaauggaaagucaa

SEQ ID NO: 2067265 - RNA, 19 nt, Homo sapiens
  misc_RNA (1)...(19): siRNA sense strand
caaggacuggucuuucuau

SEQ ID NO: 2067266 - RNA, 19 nt, Homo sapiens
  misc_RNA (1)...(19): siRNA sense strand
gugugaaccaugugacuuu

SEQ ID NO: 2067267 - RNA, 19 nt, Homo sapiens
  misc_RNA (1)...(19): siRNA sense strand
cagagaauggaaagucaaa

SEQ ID NO: 2067268 - RNA, 19 nt, Homo sapiens
  misc_RNA (1)...(19): siRNA sense strand
aagaauggagagagaauug

SEQ ID NO: 2067269 - RNA, 19 nt, Homo sapiens
  misc_RNA (1)...(19): siRNA sense strand
cagguuuacucacgucauc

SEQ ID NO: 2067270 - RNA, 19 nt, Homo sapiens
  misc_RNA (1)...(19): siRNA sense strand
acugaagaauggagagaga

SEQ ID NO: 2067271 - RNA, 19 nt, Homo sapiens
  misc_RNA (1)...(19): siRNA sense strand
ugucacagcccaagauagu

SEQ ID NO: 2067272 - RNA, 19 nt, Homo sapiens
  misc_RNA (1)...(19): siRNA sense strand
cagcguacuccaaagauuc

SEQ ID NO: 2067273 - RNA, 19 nt, Homo sapiens
  misc_RNA (1)...(19): siRNA sense strand
ugaaccaugugacuuuguc

SEQ ID NO: 2067274 - RNA, 19 nt, Homo sapiens
  misc_RNA (1)...(19): siRNA sense strand
caaagauucagguuuacuc

SEQ ID NO: 2067275 - RNA, 19 nt, Homo sapiens
  misc_RNA (1)...(19): siRNA sense strand
cagcagagaauggaaaguc

SEQ ID NO: 2067276 - RNA, 19 nt, Homo sapiens
  misc_RNA (1)...(19): siRNA sense strand
aguggagcauucagacuug

SEQ ID NO: 2067277 - RNA, 19 nt, Homo sapiens
  misc_RNA (1)...(19): siRNA sense strand
ugaagaauggagagagaau

SEQ ID NO: 2067278 - RNA, 19 nt, Homo sapiens
  misc_RNA (1)...(19): siRNA sense strand
uuucauccauccgacauug

SEQ ID NO: 2067279 - RNA, 19 nt, Homo sapiens
  misc_RNA (1)...(19): siRNA sense strand
ucagcaaggacuggucuuu

SEQ ID NO: 2067280 - RNA, 19 nt, Homo sapiens
  misc_RNA (1)...(19): siRNA sense strand
agcaaggacuggucuuucu

SEQ ID NO: 2067281 - RNA, 19 nt, Homo sapiens
  misc_RNA (1)...(19): siRNA sense strand
aaagauucagguuuacuca

SEQ ID NO: 2067282 - RNA, 19 nt, Homo sapiens
  misc_RNA (1)...(19): siRNA sense strand
ugugaaccaugugacuuug

SEQ ID NO: 2067283 - RNA, 19 nt, Homo sapiens
  misc_RNA (1)...(19): siRNA sense strand
ggucuuucuaucucuugua

SEQ ID NO: 2067284 - RNA, 19 nt, Homo sapiens
  misc_RNA (1)...(19): siRNA sense strand
cagcaaggacuggucuuuc

SEQ ID NO: 2067285 - RNA, 19 nt, Homo sapiens
  misc_RNA (1)...(19): siRNA sense strand
gaacagcccuaccucuauu

SEQ ID NO: 2067286 - RNA, 19 nt, Homo sapiens
  misc_RNA (1)...(19): siRNA sense strand
gauaagcauuucuggcaaa

SEQ ID NO: 2067287 - RNA, 19 nt, Homo sapiens
  misc_RNA (1)...(19): siRNA sense strand
cauagaagaaccagugaua

SEQ ID NO: 2067288 - RNA, 19 nt, Homo sapiens
  misc_RNA (1)...(19): siRNA sense strand
cgacuggucuuaugagaag

SEQ ID NO: 2067289 - RNA, 19 nt, Homo sapiens
  misc_RNA (1)...(19): siRNA sense strand
gguaacaguggaauuugua

SEQ ID NO: 2067290 - RNA, 19 nt, Homo sapiens
  misc_RNA (1)...(19): siRNA sense strand
gagaagcaguggccaagac

SEQ ID NO: 2067291 - RNA, 19 nt, Homo sapiens
  misc_RNA (1)...(19): siRNA sense strand
ggguaacaguggaauuugu

SEQ ID NO: 2067292 - RNA, 19 nt, Homo sapiens
  misc_RNA (1)...(19): siRNA sense strand
uacaugaggauaagcauuu

SEQ ID NO: 2067293 - RNA, 19 nt, Homo sapiens
  misc_RNA (1)...(19): siRNA sense strand
gaauuuguagggccucuug

SEQ ID NO: 2067294 - RNA, 19 nt, Homo sapiens
  misc_RNA (1)...(19): siRNA sense strand
cgaacagcccuaccucuau

SEQ ID NO: 2067295 - RNA, 19 nt, Homo sapiens
  misc_RNA (1)...(19): siRNA sense strand
uagaagaaccagugauauc

SEQ ID NO: 2067296 - RNA, 19 nt, Homo sapiens
  misc_RNA (1)...(19): siRNA sense strand
cuaccucuauugcagaaau

SEQ ID NO: 2067297 - RNA, 19 nt, Homo sapiens
  misc_RNA (1)...(19): siRNA sense strand
gaagcaguggccaagacua

SEQ ID NO: 2067298 - RNA, 19 nt, Homo sapiens
  misc_RNA (1)...(19): siRNA sense strand
agaagaaccagugauauca

SEQ ID NO: 2067299 - RNA, 19 nt, Homo sapiens
  misc_RNA (1)...(19): siRNA sense strand
aagcauuucuggcaaagag

SEQ ID NO: 2067300 - RNA, 19 nt, Homo sapiens
  misc_RNA (1)...(19): siRNA sense strand
gaagaaccagugauaucag

SEQ ID NO: 2067301 - RNA, 19 nt, Homo sapiens
  misc_RNA (1)...(19): siRNA sense strand
gaaaauaccgacuggucuu

SEQ ID NO: 2067302 - RNA, 19 nt, Homo sapiens
  misc_RNA (1)...(19): siRNA sense strand
acgaacagcccuaccucua

SEQ ID NO: 2067303 - RNA, 19 nt, Homo sapiens
  misc_RNA (1)...(19): siRNA sense strand
ccugcugccuccaguccua

SEQ ID NO: 2067304 - RNA, 19 nt, Homo sapiens
  misc_RNA (1)...(19): siRNA sense strand
aauaccgacuggucuuaug

SEQ ID NO: 2067305 - RNA, 19 nt, Homo sapiens
  misc_RNA (1)...(19): siRNA sense strand
cuacaugaggauaagcauu

SEQ ID NO: 2067306 - RNA, 19 nt, Homo sapiens
  misc_RNA (1)...(19): siRNA sense strand
cuucuuuaccuguuucuug

SEQ ID NO: 2067307 - RNA, 19 nt, Homo sapiens
  misc_RNA (1)...(19): siRNA sense strand
cauagaagaaccagugaua

SEQ ID NO: 2067308 - RNA, 19 nt, Homo sapiens
  misc_RNA (1)...(19): siRNA sense strand
uagaagaaccagugauauc

SEQ ID NO: 2067309 - RNA, 19 nt, Homo sapiens
  misc_RNA (1)...(19): siRNA sense strand
agaagaaccagugauauca

SEQ ID NO: 2067310 - RNA, 19 nt, Homo sapiens
  misc_RNA (1)...(19): siRNA sense strand
gaagaaccagugauaucag

SEQ ID NO: 2067311 - RNA, 19 nt, Homo sapiens
  misc_RNA (1)...(19): siRNA sense strand
cuucuuuaccuguuucuug

SEQ ID NO: 2067312 - RNA, 19 nt, Homo sapiens
  misc_RNA (1)...(19): siRNA sense strand
gaacagcccuaccucuauu

SEQ ID NO: 2067313 - RNA, 19 nt, Homo sapiens
  misc_RNA (1)...(19): siRNA sense strand
gauaagcauuucuggcaaa

SEQ ID NO: 2067314 - RNA, 19 nt, Homo sapiens
  misc_RNA (1)...(19): siRNA sense strand
cauagaagaaccagugaua

SEQ ID NO: 2067315 - RNA, 19 nt, Homo sapiens
  misc_RNA (1)...(19): siRNA sense strand
cgacuggucuuaugagaag

SEQ ID NO: 2067316 - RNA, 19 nt, Homo sapiens
  misc_RNA (1)...(19): siRNA sense strand
gguaacaguggaauuugua

SEQ ID NO: 2067317 - RNA, 19 nt, Homo sapiens
  misc_RNA (1)...(19): siRNA sense strand
gagaagcaguggccaagac

SEQ ID NO: 2067318 - RNA, 19 nt, Homo sapiens
  misc_RNA (1)...(19): siRNA sense strand
ggguaacaguggaauuugu

SEQ ID NO: 2067319 - RNA, 19 nt, Homo sapiens
  misc_RNA (1)...(19): siRNA sense strand
uacaugaggauaagcauuu

SEQ ID NO: 2067320 - RNA, 19 nt, Homo sapiens
  misc_RNA (1)...(19): siRNA sense strand
gaauuuguagggccucuug

SEQ ID NO: 2067321 - RNA, 19 nt, Homo sapiens
  misc_RNA (1)...(19): siRNA sense strand
cgaacagcccuaccucuau

SEQ ID NO: 2067322 - RNA, 19 nt, Homo sapiens
  misc_RNA (1)...(19): siRNA sense strand
uagaagaaccagugauauc

SEQ ID NO: 2067323 - RNA, 19 nt, Homo sapiens
  misc_RNA (1)...(19): siRNA sense strand
cuaccucuauugcagaaau

SEQ ID NO: 2067324 - RNA, 19 nt, Homo sapiens
  misc_RNA (1)...(19): siRNA sense strand
gaagcaguggccaagacua

SEQ ID NO: 2067325 - RNA, 19 nt, Homo sapiens
  misc_RNA (1)...(19): siRNA sense strand
agaagaaccagugauauca

SEQ ID NO: 2067326 - RNA, 19 nt, Homo sapiens
  misc_RNA (1)...(19): siRNA sense strand
aagcauuucuggcaaagag

SEQ ID NO: 2067327 - RNA, 19 nt, Homo sapiens
  misc_RNA (1)...(19): siRNA sense strand
gaagaaccagugauaucag

SEQ ID NO: 2067328 - RNA, 19 nt, Homo sapiens
  misc_RNA (1)...(19): siRNA sense strand
gaaaauaccgacuggucuu

SEQ ID NO: 2067329 - RNA, 19 nt, Homo sapiens
  misc_RNA (1)...(19): siRNA sense strand
acgaacagcccuaccucua

SEQ ID NO: 2067330 - RNA, 19 nt, Homo sapiens
  misc_RNA (1)...(19): siRNA sense strand
ccugcugccuccaguccua

SEQ ID NO: 2067331 - RNA, 19 nt, Homo sapiens
  misc_RNA (1)...(19): siRNA sense strand
aauaccgacuggucuuaug

SEQ ID NO: 2067332 - RNA, 19 nt, Homo sapiens
  misc_RNA (1)...(19): siRNA sense strand
cuacaugaggauaagcauu

SEQ ID NO: 2067333 - RNA, 19 nt, Homo sapiens
  misc_RNA (1)...(19): siRNA sense strand
cuucuuuaccuguuucuug

SEQ ID NO: 2067334 - RNA, 19 nt, Homo sapiens
  misc_RNA (1)...(19): siRNA sense strand
cauagaagaaccagugaua

SEQ ID NO: 2067335 - RNA, 19 nt, Homo sapiens
  misc_RNA (1)...(19): siRNA sense strand
uagaagaaccagugauauc

SEQ ID NO: 2067336 - RNA, 19 nt, Homo sapiens
  misc_RNA (1)...(19): siRNA sense strand
agaagaaccagugauauca

SEQ ID NO: 2067337 - RNA, 19 nt, Homo sapiens
  misc_RNA (1)...(19): siRNA sense strand
gaagaaccagugauaucag

SEQ ID NO: 2067338 - RNA, 19 nt, Homo sapiens
  misc_RNA (1)...(19): siRNA sense strand
cuucuuuaccuguuucuug

SEQ ID NO: 2067339 - RNA, 19 nt, Homo sapiens
  misc_RNA (1)...(19): siRNA sense strand
ccacauggaugauggauua

SEQ ID NO: 2067340 - RNA, 19 nt, Homo sapiens
  misc_RNA (1)...(19): siRNA sense strand
ugaagaagauccugaaaua

SEQ ID NO: 2067341 - RNA, 19 nt, Homo sapiens
  misc_RNA (1)...(19): siRNA sense strand
gaaauacucucucauacaa

SEQ ID NO: 2067342 - RNA, 19 nt, Homo sapiens
  misc_RNA (1)...(19): siRNA sense strand
gagaagauauggagacuaa

SEQ ID NO: 2067343 - RNA, 19 nt, Homo sapiens
  misc_RNA (1)...(19): siRNA sense strand
gaaaggugaucaacaagua

SEQ ID NO: 2067344 - RNA, 19 nt, Homo sapiens
  misc_RNA (1)...(19): siRNA sense strand
gggaggagcuguaugauuu

SEQ ID NO: 2067345 - RNA, 19 nt, Homo sapiens
  misc_RNA (1)...(19): siRNA sense strand
cagaaagugugcuaaauua

SEQ ID NO: 2067346 - RNA, 19 nt, Homo sapiens
  misc_RNA (1)...(19): siRNA sense strand
ggaaacagaugcaagaaau

SEQ ID NO: 2067347 - RNA, 19 nt, Homo sapiens
  misc_RNA (1)...(19): siRNA sense strand
caaaggaacucaaggagaa

SEQ ID NO: 2067348 - RNA, 19 nt, Homo sapiens
  misc_RNA (1)...(19): siRNA sense strand
gaagaaggauaccuacuug

SEQ ID NO: 2067349 - RNA, 19 nt, Homo sapiens
  misc_RNA (1)...(19): siRNA sense strand
gaagaggaguugcucauga

SEQ ID NO: 2067350 - RNA, 19 nt, Homo sapiens
  misc_RNA (1)...(19): siRNA sense strand
gagaagagguuugccuaua

SEQ ID NO: 2067351 - RNA, 19 nt, Homo sapiens
  misc_RNA (1)...(19): siRNA sense strand
gcugagaacuaucacaaua

SEQ ID NO: 2067352 - RNA, 19 nt, Homo sapiens
  misc_RNA (1)...(19): siRNA sense strand
ugaagaaccuuuagaagaa

SEQ ID NO: 2067353 - RNA, 19 nt, Homo sapiens
  misc_RNA (1)...(19): siRNA sense strand
caagaaagguguugggauu

SEQ ID NO: 2067354 - RNA, 19 nt, Homo sapiens
  misc_RNA (1)...(19): siRNA sense strand
gauacgagaugacaauaaa

SEQ ID NO: 2067355 - RNA, 19 nt, Homo sapiens
  misc_RNA (1)...(19): siRNA sense strand
ucaaugaucuucacacuga

SEQ ID NO: 2067356 - RNA, 19 nt, Homo sapiens
  misc_RNA (1)...(19): siRNA sense strand
gacauguucuugaaacuua

SEQ ID NO: 2067357 - RNA, 19 nt, Homo sapiens
  misc_RNA (1)...(19): siRNA sense strand
gcaaagaacaucagaguga

SEQ ID NO: 2067358 - RNA, 19 nt, Homo sapiens
  misc_RNA (1)...(19): siRNA sense strand
caagaaauacucucucaua

SEQ ID NO: 2067359 - RNA, 19 nt, Homo sapiens
  misc_RNA (1)...(19): siRNA sense strand
gaaauucuuugacauguuc

SEQ ID NO: 2067360 - RNA, 19 nt, Homo sapiens
  misc_RNA (1)...(19): siRNA sense strand
ugacaaaucuuucugaaca

SEQ ID NO: 2067361 - RNA, 19 nt, Homo sapiens
  misc_RNA (1)...(19): siRNA sense strand
caaaguacguuuccugaug

SEQ ID NO: 2067362 - RNA, 19 nt, Homo sapiens
  misc_RNA (1)...(19): siRNA sense strand
gaacaaguacgagaagaua

SEQ ID NO: 2067363 - RNA, 19 nt, Homo sapiens
  misc_RNA (1)...(19): siRNA sense strand
gaacuuggcuggacuuucg

SEQ ID NO: 2067364 - RNA, 19 nt, Homo sapiens
  misc_RNA (1)...(19): siRNA sense strand
ccaagugaauggcaucaua

SEQ ID NO: 2067365 - RNA, 19 nt, Homo sapiens
  misc_RNA (1)...(19): siRNA sense strand
gagaacagguguguggaua

SEQ ID NO: 2067366 - RNA, 19 nt, Homo sapiens
  misc_RNA (1)...(19): siRNA sense strand
caacuuagccaacuacuug

SEQ ID NO: 2067367 - RNA, 19 nt, Homo sapiens
  misc_RNA (1)...(19): siRNA sense strand
uuaaagggcuggaaaucua

SEQ ID NO: 2067368 - RNA, 19 nt, Homo sapiens
  misc_RNA (1)...(19): siRNA sense strand
gauaaggccuuucaagaca

SEQ ID NO: 2067369 - RNA, 19 nt, Homo sapiens
  misc_RNA (1)...(19): siRNA sense strand
caacaaaggcucugaacuu

SEQ ID NO: 2067370 - RNA, 19 nt, Homo sapiens
  misc_RNA (1)...(19): siRNA sense strand
gaaggaagacaaagacaaa

SEQ ID NO: 2067371 - RNA, 19 nt, Homo sapiens
  misc_RNA (1)...(19): siRNA sense strand
gaugaggccuccuggauga

SEQ ID NO: 2067372 - RNA, 19 nt, Homo sapiens
  misc_RNA (1)...(19): siRNA sense strand
gcuguuaccuccucaagaa

SEQ ID NO: 2067373 - RNA, 19 nt, Homo sapiens
  misc_RNA (1)...(19): siRNA sense strand
ggugaccucucagaaauua

SEQ ID NO: 2067374 - RNA, 19 nt, Homo sapiens
  misc_RNA (1)...(19): siRNA sense strand
gaacuaguacacuucauaa

SEQ ID NO: 2067375 - RNA, 19 nt, Homo sapiens
  misc_RNA (1)...(19): siRNA sense strand
gaagaaaucgugcauaugg

SEQ ID NO: 2067376 - RNA, 19 nt, Homo sapiens
  misc_RNA (1)...(19): siRNA sense strand
gcaccucucugauugauuc

SEQ ID NO: 2067377 - RNA, 19 nt, Homo sapiens
  misc_RNA (1)...(19): siRNA sense strand
ggaguuugauggccuauau

SEQ ID NO: 2067378 - RNA, 19 nt, Homo sapiens
  misc_RNA (1)...(19): siRNA sense strand
gcagaaagugugcuaaauu

SEQ ID NO: 2067379 - RNA, 19 nt, Homo sapiens
  misc_RNA (1)...(19): siRNA sense strand
ggacgaaggcucugaguau

SEQ ID NO: 2067380 - RNA, 19 nt, Homo sapiens
  misc_RNA (1)...(19): siRNA sense strand
uaucaccacugaacuagua

SEQ ID NO: 2067381 - RNA, 19 nt, Homo sapiens
  misc_RNA (1)...(19): siRNA sense strand
gaacacaugccaaacgauu

SEQ ID NO: 2067382 - RNA, 19 nt, Homo sapiens
  misc_RNA (1)...(19): siRNA sense strand
guaaaggaauuaucuccaa

SEQ ID NO: 2067383 - RNA, 19 nt, Homo sapiens
  misc_RNA (1)...(19): siRNA sense strand
acacagaauuucccucuuu

SEQ ID NO: 2067384 - RNA, 19 nt, Homo sapiens
  misc_RNA (1)...(19): siRNA sense strand
ggagagaaaguucgaauug

SEQ ID NO: 2067385 - RNA, 19 nt, Homo sapiens
  misc_RNA (1)...(19): siRNA sense strand
cgaaggagcuggugaaggu

SEQ ID NO: 2067386 - RNA, 19 nt, Homo sapiens
  misc_RNA (1)...(19): siRNA sense strand
caaagaauaugacccagau

SEQ ID NO: 2067387 - RNA, 19 nt, Homo sapiens
  misc_RNA (1)...(19): siRNA sense strand
gaagaaggaacacucauug

SEQ ID NO: 2067388 - RNA, 19 nt, Homo sapiens
  misc_RNA (1)...(19): siRNA sense strand
ccagagagcuccagggaau

SEQ ID NO: 2067389 - RNA, 19 nt, Homo sapiens
  misc_RNA (1)...(19): siRNA sense strand
ggaggacgaugaagaggaa

SEQ ID NO: 2067390 - RNA, 19 nt, Homo sapiens
  misc_RNA (1)...(19): siRNA sense strand
gaagaacuauaaccugcaa

SEQ ID NO: 2067391 - RNA, 19 nt, Homo sapiens
  misc_RNA (1)...(19): siRNA sense strand
gauaagcgcuagcaaaggu

SEQ ID NO: 2067392 - RNA, 19 nt, Homo sapiens
  misc_RNA (1)...(19): siRNA sense strand
ggacgggaaagaacauuua

SEQ ID NO: 2067393 - RNA, 19 nt, Homo sapiens
  misc_RNA (1)...(19): siRNA sense strand
agaagagguuugccuauaa

SEQ ID NO: 2067394 - RNA, 19 nt, Homo sapiens
  misc_RNA (1)...(19): siRNA sense strand
gaauagcaaugccgacaug

SEQ ID NO: 2067395 - RNA, 19 nt, Homo sapiens
  misc_RNA (1)...(19): siRNA sense strand
gagaucggaugacguggua

SEQ ID NO: 2067396 - RNA, 19 nt, Homo sapiens
  misc_RNA (1)...(19): siRNA sense strand
agagaaaggugaucaacaa

SEQ ID NO: 2067397 - RNA, 19 nt, Homo sapiens
  misc_RNA (1)...(19): siRNA sense strand
gaagaagagcugcaccuaa

SEQ ID NO: 2067398 - RNA, 19 nt, Homo sapiens
  misc_RNA (1)...(19): siRNA sense strand
ggaagcugaugaugaagaa

SEQ ID NO: 2067399 - RNA, 19 nt, Homo sapiens
  misc_RNA (1)...(19): siRNA sense strand
agaggaagcugaugaugaa

SEQ ID NO: 2067400 - RNA, 19 nt, Homo sapiens
  misc_RNA (1)...(19): siRNA sense strand
gcgcucaauucuccaauaa

SEQ ID NO: 2067401 - RNA, 19 nt, Homo sapiens
  misc_RNA (1)...(19): siRNA sense strand
ggcacaaacuguuaucaaa

SEQ ID NO: 2067402 - RNA, 19 nt, Homo sapiens
  misc_RNA (1)...(19): siRNA sense strand
gagcugucuucacaucuua

SEQ ID NO: 2067403 - RNA, 19 nt, Homo sapiens
  misc_RNA (1)...(19): siRNA sense strand
ucagguaucuuggaaguuu

SEQ ID NO: 2067404 - RNA, 19 nt, Homo sapiens
  misc_RNA (1)...(19): siRNA sense strand
ugaccaagccuuuguguuu

SEQ ID NO: 2067405 - RNA, 19 nt, Homo sapiens
  misc_RNA (1)...(19): siRNA sense strand
gagaacaucugcggaacaa

SEQ ID NO: 2067406 - RNA, 19 nt, Homo sapiens
  misc_RNA (1)...(19): siRNA sense strand
agaaggagaaggaaauuua

SEQ ID NO: 2067407 - RNA, 19 nt, Homo sapiens
  misc_RNA (1)...(19): siRNA sense strand
uaagaaauaugacccagau

SEQ ID NO: 2067408 - RNA, 19 nt, Homo sapiens
  misc_RNA (1)...(19): siRNA sense strand
gcauuaaggaucaaacuuu

SEQ ID NO: 2067409 - RNA, 19 nt, Homo sapiens
  misc_RNA (1)...(19): siRNA sense strand
gauuaacacugcagagaug

SEQ ID NO: 2067410 - RNA, 19 nt, Homo sapiens
  misc_RNA (1)...(19): siRNA sense strand
caucaucucucuagucugu

SEQ ID NO: 2067411 - RNA, 19 nt, Homo sapiens
  misc_RNA (1)...(19): siRNA sense strand
gauggugacugaagaagga

SEQ ID NO: 2067412 - RNA, 19 nt, Homo sapiens
  misc_RNA (1)...(19): siRNA sense strand
gcaguguccuugauuugaa

SEQ ID NO: 2067413 - RNA, 19 nt, Homo sapiens
  misc_RNA (1)...(19): siRNA sense strand
gaugcuggauucuuucaaa

SEQ ID NO: 2067414 - RNA, 19 nt, Homo sapiens
  misc_RNA (1)...(19): siRNA sense strand
agaaagagauggagaagca

SEQ ID NO: 2067415 - RNA, 19 nt, Homo sapiens
  misc_RNA (1)...(19): siRNA sense strand
ugaaggaacucaucucaca

SEQ ID NO: 2067416 - RNA, 19 nt, Homo sapiens
  misc_RNA (1)...(19): siRNA sense strand
gaacagguguguggauauc

SEQ ID NO: 2067417 - RNA, 19 nt, Homo sapiens
  misc_RNA (1)...(19): siRNA sense strand
gaaacagaugcaagaaaua

SEQ ID NO: 2067418 - RNA, 19 nt, Homo sapiens
  misc_RNA (1)...(19): siRNA sense strand
gcuuaaaugucuacaauag

SEQ ID NO: 2067419 - RNA, 19 nt, Homo sapiens
  misc_RNA (1)...(19): siRNA sense strand
aaacaaggauggaccuaug

SEQ ID NO: 2067420 - RNA, 19 nt, Homo sapiens
  misc_RNA (1)...(19): siRNA sense strand
aaagaaagagggcagcuua

SEQ ID NO: 2067421 - RNA, 19 nt, Homo sapiens
  misc_RNA (1)...(19): siRNA sense strand
uaauguggcuguguuauug

SEQ ID NO: 2067422 - RNA, 19 nt, Homo sapiens
  misc_RNA (1)...(19): siRNA sense strand
gaagacccacccacugaua

SEQ ID NO: 2067423 - RNA, 19 nt, Homo sapiens
  misc_RNA (1)...(19): siRNA sense strand
gcugagcauucacaugaua

SEQ ID NO: 2067424 - RNA, 19 nt, Homo sapiens
  misc_RNA (1)...(19): siRNA sense strand
gcacaaagggacacuauag

SEQ ID NO: 2067425 - RNA, 19 nt, Homo sapiens
  misc_RNA (1)...(19): siRNA sense strand
gcagugagaucuggaaagu

SEQ ID NO: 2067426 - RNA, 19 nt, Homo sapiens
  misc_RNA (1)...(19): siRNA sense strand
aaugucaacugaaaccuua

SEQ ID NO: 2067427 - RNA, 19 nt, Homo sapiens
  misc_RNA (1)...(19): siRNA sense strand
gaagauauggagacuaaau

SEQ ID NO: 2067428 - RNA, 19 nt, Homo sapiens
  misc_RNA (1)...(19): siRNA sense strand
agaccaaguuacugcauua

SEQ ID NO: 2067429 - RNA, 19 nt, Homo sapiens
  misc_RNA (1)...(19): siRNA sense strand
ccacugaacuaguacacuu

SEQ ID NO: 2067430 - RNA, 19 nt, Homo sapiens
  misc_RNA (1)...(19): siRNA sense strand
agaaucaucuaccaaugua

SEQ ID NO: 2067431 - RNA, 19 nt, Homo sapiens
  misc_RNA (1)...(19): siRNA sense strand
aagaagaaaucgugcauau

SEQ ID NO: 2067432 - RNA, 19 nt, Homo sapiens
  misc_RNA (1)...(19): siRNA sense strand
ggaaaugcuugccaacaca

SEQ ID NO: 2067433 - RNA, 19 nt, Homo sapiens
  misc_RNA (1)...(19): siRNA sense strand
ucagacaccuucaaagaau

SEQ ID NO: 2067434 - RNA, 19 nt, Homo sapiens
  misc_RNA (1)...(19): siRNA sense strand
ggaagggaaugugguaaau

SEQ ID NO: 2067435 - RNA, 19 nt, Homo sapiens
  misc_RNA (1)...(19): siRNA sense strand
gggcagugguggccuguuu

SEQ ID NO: 2067436 - RNA, 19 nt, Homo sapiens
  misc_RNA (1)...(19): siRNA sense strand
guguaaaucucauaacuuc

SEQ ID NO: 2067437 - RNA, 19 nt, Homo sapiens
  misc_RNA (1)...(19): siRNA sense strand
gaagagguuugccuauaag

SEQ ID NO: 2067438 - RNA, 19 nt, Homo sapiens
  misc_RNA (1)...(19): siRNA sense strand
gggagaagcuuugguucaa

SEQ ID NO: 2067439 - RNA, 19 nt, Homo sapiens
  misc_RNA (1)...(19): siRNA sense strand
gggcaaggcugaccugaag

SEQ ID NO: 2067440 - RNA, 19 nt, Homo sapiens
  misc_RNA (1)...(19): siRNA sense strand
ggaggaagucggugaagaa

SEQ ID NO: 2067441 - RNA, 19 nt, Homo sapiens
  misc_RNA (1)...(19): siRNA sense strand
agaaggaccacccggauua

SEQ ID NO: 2067442 - RNA, 19 nt, Homo sapiens
  misc_RNA (1)...(19): siRNA sense strand
ggcaagcucuggagacuuc

SEQ ID NO: 2067443 - RNA, 19 nt, Homo sapiens
  misc_RNA (1)...(19): siRNA sense strand
gaacaagccgcacgucaag

SEQ ID NO: 2067444 - RNA, 19 nt, Homo sapiens
  misc_RNA (1)...(19): siRNA sense strand
ggaacaacccgucuacaca

SEQ ID NO: 2067445 - RNA, 19 nt, Homo sapiens
  misc_RNA (1)...(19): siRNA sense strand
gcagcgacgucaucuccaa

SEQ ID NO: 2067446 - RNA, 19 nt, Homo sapiens
  misc_RNA (1)...(19): siRNA sense strand
gcaagacgcugggcaagcu

SEQ ID NO: 2067447 - RNA, 19 nt, Homo sapiens
  misc_RNA (1)...(19): siRNA sense strand
gucaacggcuccagcaaga

SEQ ID NO: 2067448 - RNA, 19 nt, Homo sapiens
  misc_RNA (1)...(19): siRNA sense strand
caacgaguuugaccaguac

SEQ ID NO: 2067449 - RNA, 19 nt, Homo sapiens
  misc_RNA (1)...(19): siRNA sense strand
gagcgaggaggacaaguuc

SEQ ID NO: 2067450 - RNA, 19 nt, Homo sapiens
  misc_RNA (1)...(19): siRNA sense strand
gaacuccagcuccuacuac

SEQ ID NO: 2067451 - RNA, 19 nt, Homo sapiens
  misc_RNA (1)...(19): siRNA sense strand
gaagcucgcggaccaguac

SEQ ID NO: 2067452 - RNA, 19 nt, Homo sapiens
  misc_RNA (1)...(19): siRNA sense strand
acagcucacucgaccuuga

SEQ ID NO: 2067453 - RNA, 19 nt, Homo sapiens
  misc_RNA (1)...(19): siRNA sense strand
ggaagcucgcggaccagua

SEQ ID NO: 2067454 - RNA, 19 nt, Homo sapiens
  misc_RNA (1)...(19): siRNA sense strand
ccuucaaccucccacacua

SEQ ID NO: 2067455 - RNA, 19 nt, Homo sapiens
  misc_RNA (1)...(19): siRNA sense strand
ccacggagcagacgcacau

SEQ ID NO: 2067456 - RNA, 19 nt, Homo sapiens
  misc_RNA (1)...(19): siRNA sense strand
ccacccggauuacaaguac

SEQ ID NO: 2067457 - RNA, 19 nt, Homo sapiens
  misc_RNA (1)...(19): siRNA sense strand
ggaccacccggauuacaag

SEQ ID NO: 2067458 - RNA, 19 nt, Homo sapiens
  misc_RNA (1)...(19): siRNA sense strand
cggaggaagucggugaaga

SEQ ID NO: 2067459 - RNA, 19 nt, Homo sapiens
  misc_RNA (1)...(19): siRNA sense strand
agaacaagccgcacgucaa

SEQ ID NO: 2067460 - RNA, 19 nt, Homo sapiens
  misc_RNA (1)...(19): siRNA sense strand
ucuggagacuucugaacga

SEQ ID NO: 2067461 - RNA, 19 nt, Homo sapiens
  misc_RNA (1)...(19): siRNA sense strand
ggaccaguacccgcacuug

SEQ ID NO: 2067462 - RNA, 19 nt, Homo sapiens
  misc_RNA (1)...(19): siRNA sense strand
cagcgaacgcacaucaaga

SEQ ID NO: 2067463 - RNA, 19 nt, Homo sapiens
  misc_RNA (1)...(19): siRNA sense strand
ucagccaggugcucaaagg

SEQ ID NO: 2067464 - RNA, 19 nt, Homo sapiens
  misc_RNA (1)...(19): siRNA sense strand
acacagcucacucgaccuu

SEQ ID NO: 2067465 - RNA, 19 nt, Homo sapiens
  misc_RNA (1)...(19): siRNA sense strand
agcccgaucugaagaagga

SEQ ID NO: 2067466 - RNA, 19 nt, Homo sapiens
  misc_RNA (1)...(19): siRNA sense strand
caacggcuccagcaagaac

SEQ ID NO: 2067467 - RNA, 19 nt, Homo sapiens
  misc_RNA (1)...(19): siRNA sense strand
gggaacaacccgucuacac

SEQ ID NO: 2067468 - RNA, 19 nt, Homo sapiens
  misc_RNA (1)...(19): siRNA sense strand
cccaacagaucgccuacag

SEQ ID NO: 2067469 - RNA, 19 nt, Homo sapiens
  misc_RNA (1)...(19): siRNA sense strand
gaaggaccacccggauuac

SEQ ID NO: 2067470 - RNA, 19 nt, Homo sapiens
  misc_RNA (1)...(19): siRNA sense strand
ggucagccaggugcucaaa

SEQ ID NO: 2067471 - RNA, 19 nt, Homo sapiens
  misc_RNA (1)...(19): siRNA sense strand
aagaaggaccacccggauu

SEQ ID NO: 2067472 - RNA, 19 nt, Homo sapiens
  misc_RNA (1)...(19): siRNA sense strand
ggagagcgaggaggacaag

SEQ ID NO: 2067473 - RNA, 19 nt, Homo sapiens
  misc_RNA (1)...(19): siRNA sense strand
ccuucgaugucaacgaguu

SEQ ID NO: 2067474 - RNA, 19 nt, Homo sapiens
  misc_RNA (1)...(19): siRNA sense strand
uguaugaccugacacaaua

SEQ ID NO: 2067475 - RNA, 19 nt, Homo sapiens
  misc_RNA (1)...(19): siRNA sense strand
uaaaggaccugguagagau

SEQ ID NO: 2067476 - RNA, 19 nt, Homo sapiens
  misc_RNA (1)...(19): siRNA sense strand
gcuggaggaucucagguuu

SEQ ID NO: 2067477 - RNA, 19 nt, Homo sapiens
  misc_RNA (1)...(19): siRNA sense strand
gauagcagggccaucauug

SEQ ID NO: 2067478 - RNA, 19 nt, Homo sapiens
  misc_RNA (1)...(19): siRNA sense strand
uaugagcacugcccagaug

SEQ ID NO: 2067479 - RNA, 19 nt, Homo sapiens
  misc_RNA (1)...(19): siRNA sense strand
gcagcuaaaggaccuggua

SEQ ID NO: 2067480 - RNA, 19 nt, Homo sapiens
  misc_RNA (1)...(19): siRNA sense strand
gggcugcugugcacugguu

SEQ ID NO: 2067481 - RNA, 19 nt, Homo sapiens
  misc_RNA (1)...(19): siRNA sense strand
gcacugcccagaugaugug

SEQ ID NO: 2067482 - RNA, 19 nt, Homo sapiens
  misc_RNA (1)...(19): siRNA sense strand
ugugggaugucacuacuga

SEQ ID NO: 2067483 - RNA, 19 nt, Homo sapiens
  misc_RNA (1)...(19): siRNA sense strand
gugcacugguugugaucua

SEQ ID NO: 2067484 - RNA, 19 nt, Homo sapiens
  misc_RNA (1)...(19): siRNA sense strand
gcugugcacugguugugau

SEQ ID NO: 2067485 - RNA, 19 nt, Homo sapiens
  misc_RNA (1)...(19): siRNA sense strand
ccaaugucccgggaguuua

SEQ ID NO: 2067486 - RNA, 19 nt, Homo sapiens
  misc_RNA (1)...(19): siRNA sense strand
cuaaugaccacagcaggua

SEQ ID NO: 2067487 - RNA, 19 nt, Homo sapiens
  misc_RNA (1)...(19): siRNA sense strand
cagauggccugugggaugu

SEQ ID NO: 2067488 - RNA, 19 nt, Homo sapiens
  misc_RNA (1)...(19): siRNA sense strand
gaauucacccaccuugagu

SEQ ID NO: 2067489 - RNA, 19 nt, Homo sapiens
  misc_RNA (1)...(19): siRNA sense strand
cuaaaggaccugguagaga

SEQ ID NO: 2067490 - RNA, 19 nt, Homo sapiens
  misc_RNA (1)...(19): siRNA sense strand
gaccacagcagguauacag

SEQ ID NO: 2067491 - RNA, 19 nt, Homo sapiens
  misc_RNA (1)...(19): siRNA sense strand
guuccacccugcccaucaa

SEQ ID NO: 2067492 - RNA, 19 nt, Homo sapiens
  misc_RNA (1)...(19): siRNA sense strand
ggccaucauuguccggaau

SEQ ID NO: 2067493 - RNA, 19 nt, Homo sapiens
  misc_RNA (1)...(19): siRNA sense strand
gcuccugcaucgccauauc

SEQ ID NO: 2067494 - RNA, 19 nt, Homo sapiens
  misc_RNA (1)...(19): siRNA sense strand
ggagaccacagccuuaagg

SEQ ID NO: 2067495 - RNA, 19 nt, Homo sapiens
  misc_RNA (1)...(19): siRNA sense strand
gagcacugcccagaugaug

SEQ ID NO: 2067496 - RNA, 19 nt, Homo sapiens
  misc_RNA (1)...(19): siRNA sense strand
cugcuuggcuuccugaaac

SEQ ID NO: 2067497 - RNA, 19 nt, Homo sapiens
  misc_RNA (1)...(19): siRNA sense strand
aaaggaccugguagagaua

SEQ ID NO: 2067498 - RNA, 19 nt, Homo sapiens
  misc_RNA (1)...(19): siRNA sense strand
cugcccagaugaugugcua

SEQ ID NO: 2067499 - RNA, 19 nt, Homo sapiens
  misc_RNA (1)...(19): siRNA sense strand
gccuuaaggucugcaguuc

SEQ ID NO: 2067500 - RNA, 19 nt, Homo sapiens
  misc_RNA (1)...(19): siRNA sense strand
ccucaguccugcuggucuu

SEQ ID NO: 2067501 - RNA, 19 nt, Homo sapiens
  misc_RNA (1)...(19): siRNA sense strand
gagccacgagagccuggua

SEQ ID NO: 2067502 - RNA, 19 nt, Homo sapiens
  misc_RNA (1)...(19): siRNA sense strand
ugaauucacccaccuugag

SEQ ID NO: 2067503 - RNA, 19 nt, Homo sapiens
  misc_RNA (1)...(19): siRNA sense strand
gcuaaaggaccugguagag

SEQ ID NO: 2067504 - RNA, 19 nt, Homo sapiens
  misc_RNA (1)...(19): siRNA sense strand
cuuaaggucugcaguucca

SEQ ID NO: 2067505 - RNA, 19 nt, Homo sapiens
  misc_RNA (1)...(19): siRNA sense strand
ugggagggccaggcaguua

SEQ ID NO: 2067506 - RNA, 19 nt, Homo sapiens
  misc_RNA (1)...(19): siRNA sense strand
cgauagcagggccaucauu

SEQ ID NO: 2067507 - RNA, 19 nt, Homo sapiens
  misc_RNA (1)...(19): siRNA sense strand
gauggccugugggauguca

SEQ ID NO: 2067508 - RNA, 19 nt, Homo sapiens
  misc_RNA (1)...(19): siRNA sense strand
gaccggcugggccuacaaa

SEQ ID NO: 2067509 - RNA, 19 nt, Homo sapiens
  misc_RNA (1)...(19): siRNA sense strand
uccgagagcagcuaaagga

SEQ ID NO: 2067510 - RNA, 19 nt, Homo sapiens
  misc_RNA (1)...(19): siRNA sense strand
cggccuaugagccuaauga

SEQ ID NO: 2067511 - RNA, 19 nt, Homo sapiens
  misc_RNA (1)...(19): siRNA sense strand
uagcagggccaucauuguc

SEQ ID NO: 2067512 - RNA, 19 nt, Homo sapiens
  misc_RNA (1)...(19): siRNA sense strand
ggcgauagcagggccauca

SEQ ID NO: 2067513 - RNA, 19 nt, Homo sapiens
  misc_RNA (1)...(19): siRNA sense strand
uguccggaauggugaaauc

SEQ ID NO: 2067514 - RNA, 19 nt, Homo sapiens
  misc_RNA (1)...(19): siRNA sense strand
guaccgggaccagaacaug

SEQ ID NO: 2067515 - RNA, 19 nt, Homo sapiens
  misc_RNA (1)...(19): siRNA sense strand
ccaagaagcugcacaaugu

SEQ ID NO: 2067516 - RNA, 19 nt, Homo sapiens
  misc_RNA (1)...(19): siRNA sense strand
ggacaaagaugaugguuuu

SEQ ID NO: 2067517 - RNA, 19 nt, Homo sapiens
  misc_RNA (1)...(19): siRNA sense strand
ggagagacuuucaaugaga

SEQ ID NO: 2067518 - RNA, 19 nt, Homo sapiens
  misc_RNA (1)...(19): siRNA sense strand
cuagugggcuguauccuua

SEQ ID NO: 2067519 - RNA, 19 nt, Homo sapiens
  misc_RNA (1)...(19): siRNA sense strand
cuaacaagcugaagaacuu

SEQ ID NO: 2067520 - RNA, 19 nt, Homo sapiens
  misc_RNA (1)...(19): siRNA sense strand
gaggaucuguacugcauga

SEQ ID NO: 2067521 - RNA, 19 nt, Homo sapiens
  misc_RNA (1)...(19): siRNA sense strand
gaugucggauccagaauca

SEQ ID NO: 2067522 - RNA, 19 nt, Homo sapiens
  misc_RNA (1)...(19): siRNA sense strand
gagccaagcuacccaaacu

SEQ ID NO: 2067523 - RNA, 19 nt, Homo sapiens
  misc_RNA (1)...(19): siRNA sense strand
uagaugaggugaccaaugg

SEQ ID NO: 2067524 - RNA, 19 nt, Homo sapiens
  misc_RNA (1)...(19): siRNA sense strand
cgaggacggugguguguau

SEQ ID NO: 2067525 - RNA, 19 nt, Homo sapiens
  misc_RNA (1)...(19): siRNA sense strand
ggagacagccucagcucuu

SEQ ID NO: 2067526 - RNA, 19 nt, Homo sapiens
  misc_RNA (1)...(19): siRNA sense strand
caaggaaggagccaagcua

SEQ ID NO: 2067527 - RNA, 19 nt, Homo sapiens
  misc_RNA (1)...(19): siRNA sense strand
ugggagagacuuucaauga

SEQ ID NO: 2067528 - RNA, 19 nt, Homo sapiens
  misc_RNA (1)...(19): siRNA sense strand
guaaugaacgggugcuaga

SEQ ID NO: 2067529 - RNA, 19 nt, Homo sapiens
  misc_RNA (1)...(19): siRNA sense strand
ggaucucucuucuaacaag

SEQ ID NO: 2067530 - RNA, 19 nt, Homo sapiens
  misc_RNA (1)...(19): siRNA sense strand
guaccacacccaaccauga

SEQ ID NO: 2067531 - RNA, 19 nt, Homo sapiens
  misc_RNA (1)...(19): siRNA sense strand
ccucagcucuuccaugcuu

SEQ ID NO: 2067532 - RNA, 19 nt, Homo sapiens
  misc_RNA (1)...(19): siRNA sense strand
gggagagacuuucaaugag

SEQ ID NO: 2067533 - RNA, 19 nt, Homo sapiens
  misc_RNA (1)...(19): siRNA sense strand
gccaagcuacccaaacuaa

SEQ ID NO: 2067534 - RNA, 19 nt, Homo sapiens
  misc_RNA (1)...(19): siRNA sense strand
gaucaagaaugggcuguac

SEQ ID NO: 2067535 - RNA, 19 nt, Homo sapiens
  misc_RNA (1)...(19): siRNA sense strand
gaucuguacugcaugaacu

SEQ ID NO: 2067536 - RNA, 19 nt, Homo sapiens
  misc_RNA (1)...(19): siRNA sense strand
gcucuuccaugcuuaguac

SEQ ID NO: 2067537 - RNA, 19 nt, Homo sapiens
  misc_RNA (1)...(19): siRNA sense strand
gagacagccucagcucuuc

SEQ ID NO: 2067538 - RNA, 19 nt, Homo sapiens
  misc_RNA (1)...(19): siRNA sense strand
uccuggaucucucuucuaa

SEQ ID NO: 2067539 - RNA, 19 nt, Homo sapiens
  misc_RNA (1)...(19): siRNA sense strand
ggaccucagucacaacaac

SEQ ID NO: 2067540 - RNA, 19 nt, Homo sapiens
  misc_RNA (1)...(19): siRNA sense strand
aaggauggcagucuucuuu

SEQ ID NO: 2067541 - RNA, 19 nt, Homo sapiens
  misc_RNA (1)...(19): siRNA sense strand
gugcugcugcucuacaaua

SEQ ID NO: 2067542 - RNA, 19 nt, Homo sapiens
  misc_RNA (1)...(19): siRNA sense strand
cccauuccuugcccaguua

SEQ ID NO: 2067543 - RNA, 19 nt, Homo sapiens
  misc_RNA (1)...(19): siRNA sense strand
aagaggaucuguacugcau

SEQ ID NO: 2067544 - RNA, 19 nt, Homo sapiens
  misc_RNA (1)...(19): siRNA sense strand
gcucuacaauaaccacauc

SEQ ID NO: 2067545 - RNA, 19 nt, Homo sapiens
  misc_RNA (1)...(19): siRNA sense strand
cugaagaacuugccauugc

SEQ ID NO: 2067546 - RNA, 19 nt, Homo sapiens
  misc_RNA (1)...(19): siRNA sense strand
cuggaucucucuucuaaca

SEQ ID NO: 2067547 - RNA, 19 nt, Homo sapiens
  misc_RNA (1)...(19): siRNA sense strand
caaacuaacgcuccuggau

SEQ ID NO: 2067548 - RNA, 19 nt, Homo sapiens
  misc_RNA (1)...(19): siRNA sense strand
gauggacuuucaagaggau

SEQ ID NO: 2067549 - RNA, 19 nt, Homo sapiens
  misc_RNA (1)...(19): siRNA sense strand
ucagugaccugcaaguacu

SEQ ID NO: 2067550 - RNA, 19 nt, Homo sapiens
  misc_RNA (1)...(19): siRNA sense strand
gcuccgugauggacuuuca

SEQ ID NO: 2067551 - RNA, 19 nt, Homo sapiens
  misc_RNA (1)...(19): siRNA sense strand
gggacaaagaugaugguuu

SEQ ID NO: 2067552 - RNA, 19 nt, Homo sapiens
  misc_RNA (1)...(19): siRNA sense strand
guucagugaccugcaagua

SEQ ID NO: 2067553 - RNA, 19 nt, Homo sapiens
  misc_RNA (1)...(19): siRNA sense strand
uggaggugcugcugcucua

SEQ ID NO: 2067554 - RNA, 19 nt, Homo sapiens
  misc_RNA (1)...(19): siRNA sense strand
ccucaacuguggcgaguac

SEQ ID NO: 2067555 - RNA, 19 nt, Homo sapiens
  misc_RNA (1)...(19): siRNA sense strand
gcuccuggaucucucuucu

SEQ ID NO: 2067556 - RNA, 19 nt, Homo sapiens
  misc_RNA (1)...(19): siRNA sense strand
cugcagaaacucuacuuga

SEQ ID NO: 2067557 - RNA, 19 nt, Homo sapiens
  misc_RNA (1)...(19): siRNA sense strand
augaacgggugcuagauga

SEQ ID NO: 2067558 - RNA, 19 nt, Homo sapiens
  misc_RNA (1)...(19): siRNA sense strand
cagugagugugucuaagga

SEQ ID NO: 2067559 - RNA, 19 nt, Homo sapiens
  misc_RNA (1)...(19): siRNA sense strand
cuacaauaaccacaucaug

SEQ ID NO: 2067560 - RNA, 19 nt, Homo sapiens
  misc_RNA (1)...(19): siRNA sense strand
cggccuggaucaagaaugg

SEQ ID NO: 2067561 - RNA, 19 nt, Homo sapiens
  misc_RNA (1)...(19): siRNA sense strand
ccacaaccaccugaacuuc

SEQ ID NO: 2067562 - RNA, 19 nt, Homo sapiens
  misc_RNA (1)...(19): siRNA sense strand
ugcagaaacucuacuugag

SEQ ID NO: 2067563 - RNA, 19 nt, Homo sapiens
  misc_RNA (1)...(19): siRNA sense strand
gcugaagaacuugccauug

SEQ ID NO: 2067564 - RNA, 19 nt, Homo sapiens
  misc_RNA (1)...(19): siRNA sense strand
ccaaccagcugcguacacu

SEQ ID NO: 2067565 - RNA, 19 nt, Homo sapiens
  misc_RNA (1)...(19): siRNA sense strand
ucagucagcucggucuucu

SEQ ID NO: 2067566 - RNA, 19 nt, Homo sapiens
  misc_RNA (1)...(19): siRNA sense strand
ugcugcugcucuacaauaa

SEQ ID NO: 2067567 - RNA, 19 nt, Homo sapiens
  misc_RNA (1)...(19): siRNA sense strand
caagaaugggcuguaccua

SEQ ID NO: 2067568 - RNA, 19 nt, Homo sapiens
  misc_RNA (1)...(19): siRNA sense strand
ggaucaagaaugggcugua

SEQ ID NO: 2067569 - RNA, 19 nt, Homo sapiens
  misc_RNA (1)...(19): siRNA sense strand
ugcguacacuggaugaguu

SEQ ID NO: 2067570 - RNA, 19 nt, Homo sapiens
  misc_RNA (1)...(19): siRNA sense strand
augaguuccuguucaguga

SEQ ID NO: 2067571 - RNA, 19 nt, Homo sapiens
  misc_RNA (1)...(19): siRNA sense strand
uggcccagcugcagaaacu

SEQ ID NO: 2067572 - RNA, 19 nt, Homo sapiens
  misc_RNA (1)...(19): siRNA sense strand
ggauggcagucuucuuuuc

SEQ ID NO: 2067573 - RNA, 19 nt, Homo sapiens
  misc_RNA (1)...(19): siRNA sense strand
gccacaaccaccugaacuu

SEQ ID NO: 2067574 - RNA, 19 nt, Homo sapiens
  misc_RNA (1)...(19): siRNA sense strand
aacuaacgcuccuggaucu

SEQ ID NO: 2067575 - RNA, 19 nt, Homo sapiens
  misc_RNA (1)...(19): siRNA sense strand
ccuguucagugaccugcaa

SEQ ID NO: 2067576 - RNA, 19 nt, Homo sapiens
  misc_RNA (1)...(19): siRNA sense strand
cacugucuguggaauugaa

SEQ ID NO: 2067577 - RNA, 19 nt, Homo sapiens
  misc_RNA (1)...(19): siRNA sense strand
ccaauggcacagugagugu

SEQ ID NO: 2067578 - RNA, 19 nt, Homo sapiens
  misc_RNA (1)...(19): siRNA sense strand
ugagcuccgugauggacuu

SEQ ID NO: 2067579 - RNA, 19 nt, Homo sapiens
  misc_RNA (1)...(19): siRNA sense strand
uccaagaagcugcacaaug

SEQ ID NO: 2067580 - RNA, 19 nt, Homo sapiens
  misc_RNA (1)...(19): siRNA sense strand
ggacugagcuggauaccaa

SEQ ID NO: 2067581 - RNA, 19 nt, Homo sapiens
  misc_RNA (1)...(19): siRNA sense strand
gcacaaggcucugauaaag

SEQ ID NO: 2067582 - RNA, 19 nt, Homo sapiens
  misc_RNA (1)...(19): siRNA sense strand
gcagcaaauuuauagguua

SEQ ID NO: 2067583 - RNA, 19 nt, Homo sapiens
  misc_RNA (1)...(19): siRNA sense strand
gcauuucuguccuggauua

SEQ ID NO: 2067584 - RNA, 19 nt, Homo sapiens
  misc_RNA (1)...(19): siRNA sense strand
caagguggcucgagcaauu

SEQ ID NO: 2067585 - RNA, 19 nt, Homo sapiens
  misc_RNA (1)...(19): siRNA sense strand
gaacuaugaccucugguua

SEQ ID NO: 2067586 - RNA, 19 nt, Homo sapiens
  misc_RNA (1)...(19): siRNA sense strand
ugaacaagcugacaaagug

SEQ ID NO: 2067587 - RNA, 19 nt, Homo sapiens
  misc_RNA (1)...(19): siRNA sense strand
ggaacgggaugaagugaug

SEQ ID NO: 2067588 - RNA, 19 nt, Homo sapiens
  misc_RNA (1)...(19): siRNA sense strand
gaaagcaucaagacucuga

SEQ ID NO: 2067589 - RNA, 19 nt, Homo sapiens
  misc_RNA (1)...(19): siRNA sense strand
gaggacagcaucaaaguga

SEQ ID NO: 2067590 - RNA, 19 nt, Homo sapiens
  misc_RNA (1)...(19): siRNA sense strand
cuacaaggcugaugacucu

SEQ ID NO: 2067591 - RNA, 19 nt, Homo sapiens
  misc_RNA (1)...(19): siRNA sense strand
cgaaagagcaacaugaaga

SEQ ID NO: 2067592 - RNA, 19 nt, Homo sapiens
  misc_RNA (1)...(19): siRNA sense strand
caaagugauucgcaacaug

SEQ ID NO: 2067593 - RNA, 19 nt, Homo sapiens
  misc_RNA (1)...(19): siRNA sense strand
gaccaugucugccaucuac

SEQ ID NO: 2067594 - RNA, 19 nt, Homo sapiens
  misc_RNA (1)...(19): siRNA sense strand
caaccuagaugccuucaac

SEQ ID NO: 2067595 - RNA, 19 nt, Homo sapiens
  misc_RNA (1)...(19): siRNA sense strand
gaaguggacugagcuggau

SEQ ID NO: 2067596 - RNA, 19 nt, Homo sapiens
  misc_RNA (1)...(19): siRNA sense strand
ggagaaugaugaugacaac

SEQ ID NO: 2067597 - RNA, 19 nt, Homo sapiens
  misc_RNA (1)...(19): siRNA sense strand
gaaccaugucuaccaguuu

SEQ ID NO: 2067598 - RNA, 19 nt, Homo sapiens
  misc_RNA (1)...(19): siRNA sense strand
gaaugaugaugacaacagu

SEQ ID NO: 2067599 - RNA, 19 nt, Homo sapiens
  misc_RNA (1)...(19): siRNA sense strand
ggaagcaggugacaguaac

SEQ ID NO: 2067600 - RNA, 19 nt, Homo sapiens
  misc_RNA (1)...(19): siRNA sense strand
uaugaccucugguuagaaa

SEQ ID NO: 2067601 - RNA, 19 nt, Homo sapiens
  misc_RNA (1)...(19): siRNA sense strand
ggccagaauuccugaugaa

SEQ ID NO: 2067602 - RNA, 19 nt, Homo sapiens
  misc_RNA (1)...(19): siRNA sense strand
ggucagagagaaagacauu

SEQ ID NO: 2067603 - RNA, 19 nt, Homo sapiens
  misc_RNA (1)...(19): siRNA sense strand
gcugaugacucucgagaag

SEQ ID NO: 2067604 - RNA, 19 nt, Homo sapiens
  misc_RNA (1)...(19): siRNA sense strand
caacugcauuccuuugauc

SEQ ID NO: 2067605 - RNA, 19 nt, Homo sapiens
  misc_RNA (1)...(19): siRNA sense strand
ggauguaaaccgccacaaa

SEQ ID NO: 2067606 - RNA, 19 nt, Homo sapiens
  misc_RNA (1)...(19): siRNA sense strand
gagcaagucccugcagaaa

SEQ ID NO: 2067607 - RNA, 19 nt, Homo sapiens
  misc_RNA (1)...(19): siRNA sense strand
gagaagaggaagaggagaa

SEQ ID NO: 2067608 - RNA, 19 nt, Homo sapiens
  misc_RNA (1)...(19): siRNA sense strand
gcaagucccugcagaaacc

SEQ ID NO: 2067609 - RNA, 19 nt, Homo sapiens
  misc_RNA (1)...(19): siRNA sense strand
acaaggcucugauaaagca

SEQ ID NO: 2067610 - RNA, 19 nt, Homo sapiens
  misc_RNA (1)...(19): siRNA sense strand
ucaagguacagaccaaaua

SEQ ID NO: 2067611 - RNA, 19 nt, Homo sapiens
  misc_RNA (1)...(19): siRNA sense strand
gauaaagcaggacaaccua

SEQ ID NO: 2067612 - RNA, 19 nt, Homo sapiens
  misc_RNA (1)...(19): siRNA sense strand
gggccagaauuccugauga

SEQ ID NO: 2067613 - RNA, 19 nt, Homo sapiens
  misc_RNA (1)...(19): siRNA sense strand
gcuccuggauggcuuggaa

SEQ ID NO: 2067614 - RNA, 19 nt, Homo sapiens
  misc_RNA (1)...(19): siRNA sense strand
caaugaugcuggugguguu

SEQ ID NO: 2067615 - RNA, 19 nt, Homo sapiens
  misc_RNA (1)...(19): siRNA sense strand
cuacaucacugccaagaac

SEQ ID NO: 2067616 - RNA, 19 nt, Homo sapiens
  misc_RNA (1)...(19): siRNA sense strand
aagaagaaguugagcaagu

SEQ ID NO: 2067617 - RNA, 19 nt, Homo sapiens
  misc_RNA (1)...(19): siRNA sense strand
gaacauggaaauagacaac

SEQ ID NO: 2067618 - RNA, 19 nt, Homo sapiens
  misc_RNA (1)...(19): siRNA sense strand
gauguaaaccgccacaaag

SEQ ID NO: 2067619 - RNA, 19 nt, Homo sapiens
  misc_RNA (1)...(19): siRNA sense strand
gcaucaagacucugaaaca

SEQ ID NO: 2067620 - RNA, 19 nt, Homo sapiens
  misc_RNA (1)...(19): siRNA sense strand
ucagagagaaagacauuga

SEQ ID NO: 2067621 - RNA, 19 nt, Homo sapiens
  misc_RNA (1)...(19): siRNA sense strand
ugacaaaguggaagcauuc

SEQ ID NO: 2067622 - RNA, 19 nt, Homo sapiens
  misc_RNA (1)...(19): siRNA sense strand
cagcauuucuguccuggau

SEQ ID NO: 2067623 - RNA, 19 nt, Homo sapiens
  misc_RNA (1)...(19): siRNA sense strand
ccacugaucgugaacaaca

SEQ ID NO: 2067624 - RNA, 19 nt, Homo sapiens
  misc_RNA (1)...(19): siRNA sense strand
ugaaccaugucuaccaguu

SEQ ID NO: 2067625 - RNA, 19 nt, Homo sapiens
  misc_RNA (1)...(19): siRNA sense strand
gcagugacacgaacacagu

SEQ ID NO: 2067626 - RNA, 19 nt, Homo sapiens
  misc_RNA (1)...(19): siRNA sense strand
cauccuagcggacgucuug

SEQ ID NO: 2067627 - RNA, 19 nt, Homo sapiens
  misc_RNA (1)...(19): siRNA sense strand
gcauuccuuugauccuaaa

SEQ ID NO: 2067628 - RNA, 19 nt, Homo sapiens
  misc_RNA (1)...(19): siRNA sense strand
gaggugggcacguucaaug

SEQ ID NO: 2067629 - RNA, 19 nt, Homo sapiens
  misc_RNA (1)...(19): siRNA sense strand
ccacagcaacccugacuuc

SEQ ID NO: 2067630 - RNA, 19 nt, Homo sapiens
  misc_RNA (1)...(19): siRNA sense strand
gaacgacgacugggcauac

SEQ ID NO: 2067631 - RNA, 19 nt, Homo sapiens
  misc_RNA (1)...(19): siRNA sense strand
gauccuaaaguucuucaau

SEQ ID NO: 2067632 - RNA, 19 nt, Homo sapiens
  misc_RNA (1)...(19): siRNA sense strand
agagaaagacauugagaug

SEQ ID NO: 2067633 - RNA, 19 nt, Homo sapiens
  misc_RNA (1)...(19): siRNA sense strand
gagagaaagacauugagau

SEQ ID NO: 2067634 - RNA, 19 nt, Homo sapiens
  misc_RNA (1)...(19): siRNA sense strand
aaagugauucgcaacauga

SEQ ID NO: 2067635 - RNA, 19 nt, Homo sapiens
  misc_RNA (1)...(19): siRNA sense strand
aagaggagaaugaugauga

SEQ ID NO: 2067636 - RNA, 19 nt, Homo sapiens
  misc_RNA (1)...(19): siRNA sense strand
caaaguggaagcauucaag

SEQ ID NO: 2067637 - RNA, 19 nt, Homo sapiens
  misc_RNA (1)...(19): siRNA sense strand
ccaacugcauuccuuugau

SEQ ID NO: 2067638 - RNA, 19 nt, Homo sapiens
  misc_RNA (1)...(19): siRNA sense strand
ugauugcccuccugaagau

SEQ ID NO: 2067639 - RNA, 19 nt, Homo sapiens
  misc_RNA (1)...(19): siRNA sense strand
ggauccaugugacagacaa

SEQ ID NO: 2067640 - RNA, 19 nt, Homo sapiens
  misc_RNA (1)...(19): siRNA sense strand
gaaagagcaacaugaagac

SEQ ID NO: 2067641 - RNA, 19 nt, Homo sapiens
  misc_RNA (1)...(19): siRNA sense strand
caucaagacucugaaacag

SEQ ID NO: 2067642 - RNA, 19 nt, Homo sapiens
  misc_RNA (1)...(19): siRNA sense strand
cagcaaauuuauagguuac

SEQ ID NO: 2067643 - RNA, 19 nt, Homo sapiens
  misc_RNA (1)...(19): siRNA sense strand
gcacaaguacacgucgauu

SEQ ID NO: 2067644 - RNA, 19 nt, Homo sapiens
  misc_RNA (1)...(19): siRNA sense strand
gcaggugacaguaaccaau

SEQ ID NO: 2067645 - RNA, 19 nt, Homo sapiens
  misc_RNA (1)...(19): siRNA sense strand
ucaaagugauucgcaacau

SEQ ID NO: 2067646 - RNA, 19 nt, Homo sapiens
  misc_RNA (1)...(19): siRNA sense strand
acuaugaccucugguuaga

SEQ ID NO: 2067647 - RNA, 19 nt, Homo sapiens
  misc_RNA (1)...(19): siRNA sense strand
ggcgaaagagcaacaugaa

SEQ ID NO: 2067648 - RNA, 19 nt, Homo sapiens
  misc_RNA (1)...(19): siRNA sense strand
gguacagaccaaauacuug

SEQ ID NO: 2067649 - RNA, 19 nt, Homo sapiens
  misc_RNA (1)...(19): siRNA sense strand
ggugaaacaagccaugaug

SEQ ID NO: 2067650 - RNA, 19 nt, Homo sapiens
  misc_RNA (1)...(19): siRNA sense strand
uccuaaaguucuucaauca

SEQ ID NO: 2067651 - RNA, 19 nt, Homo sapiens
  misc_RNA (1)...(19): siRNA sense strand
aaccaugucuaccaguuug

SEQ ID NO: 2067652 - RNA, 19 nt, Homo sapiens
  misc_RNA (1)...(19): siRNA sense strand
gagaugcccaccacagugu

SEQ ID NO: 2067653 - RNA, 19 nt, Homo sapiens
  misc_RNA (1)...(19): siRNA sense strand
agaagaaguugagcaaguc

SEQ ID NO: 2067654 - RNA, 19 nt, Homo sapiens
  misc_RNA (1)...(19): siRNA sense strand
ggaagaggagaaugaugau

SEQ ID NO: 2067655 - RNA, 19 nt, Homo sapiens
  misc_RNA (1)...(19): siRNA sense strand
aggaagaggagaaugauga

SEQ ID NO: 2067656 - RNA, 19 nt, Homo sapiens
  misc_RNA (1)...(19): siRNA sense strand
uaaagcaggacaaccuaga

SEQ ID NO: 2067657 - RNA, 19 nt, Homo sapiens
  misc_RNA (1)...(19): siRNA sense strand
gcccacugaucgugaacaa

SEQ ID NO: 2067658 - RNA, 19 nt, Homo sapiens
  misc_RNA (1)...(19): siRNA sense strand
gaggagcugcagagcauga

SEQ ID NO: 2067659 - RNA, 19 nt, Homo sapiens
  misc_RNA (1)...(19): siRNA sense strand
agaagaagaaguugagcaa

SEQ ID NO: 2067660 - RNA, 19 nt, Homo sapiens
  misc_RNA (1)...(19): siRNA sense strand
cgcagcaaauuuauagguu

SEQ ID NO: 2067661 - RNA, 19 nt, Homo sapiens
  misc_RNA (1)...(19): siRNA sense strand
ugauugagcagcagcagaa

SEQ ID NO: 2067662 - RNA, 19 nt, Homo sapiens
  misc_RNA (1)...(19): siRNA sense strand
ugguggagcuucugaacau

SEQ ID NO: 2067663 - RNA, 19 nt, Homo sapiens
  misc_RNA (1)...(19): siRNA sense strand
cgacugggcauacggcaau

SEQ ID NO: 2067664 - RNA, 19 nt, Homo sapiens
  misc_RNA (1)...(19): siRNA sense strand
ugaagcugcucaagguaca

SEQ ID NO: 2067665 - RNA, 19 nt, Homo sapiens
  misc_RNA (1)...(19): siRNA sense strand
cuaccaguuugaauacaug

SEQ ID NO: 2067666 - RNA, 19 nt, Homo sapiens
  misc_RNA (1)...(19): siRNA sense strand
ccacaguguugcagagcau

SEQ ID NO: 2067667 - RNA, 19 nt, Homo sapiens
  misc_RNA (1)...(19): siRNA sense strand
aagaggaagaggagaauga

SEQ ID NO: 2067668 - RNA, 19 nt, Homo sapiens
  misc_RNA (1)...(19): siRNA sense strand
gcagagguccaggcacaga

SEQ ID NO: 2067669 - RNA, 19 nt, Homo sapiens
  misc_RNA (1)...(19): siRNA sense strand
cgagcaauucucuauguug

SEQ ID NO: 2067670 - RNA, 19 nt, Homo sapiens
  misc_RNA (1)...(19): siRNA sense strand
cugacaaaguggaagcauu

SEQ ID NO: 2067671 - RNA, 19 nt, Homo sapiens
  misc_RNA (1)...(19): siRNA sense strand
caggugacaguaaccaauu

SEQ ID NO: 2067672 - RNA, 19 nt, Homo sapiens
  misc_RNA (1)...(19): siRNA sense strand
caaagaggucauuguuaag

SEQ ID NO: 2067673 - RNA, 19 nt, Homo sapiens
  misc_RNA (1)...(19): siRNA sense strand
gaccuggaguuugaguaug

SEQ ID NO: 2067674 - RNA, 19 nt, Homo sapiens
  misc_RNA (1)...(19): siRNA sense strand
agacugacaggcugacuug

SEQ ID NO: 2067675 - RNA, 19 nt, Homo sapiens
  misc_RNA (1)...(19): siRNA sense strand
caaagacucagagggcuau

SEQ ID NO: 2067676 - RNA, 19 nt, Homo sapiens
  misc_RNA (1)...(19): siRNA sense strand
gaagaggagaaugaugaug

SEQ ID NO: 2067677 - RNA, 19 nt, Homo sapiens
  misc_RNA (1)...(19): siRNA sense strand
uugaggagcugcagagcau

SEQ ID NO: 2067678 - RNA, 19 nt, Homo sapiens
  misc_RNA (1)...(19): siRNA sense strand
cuggauggcuuggaaguca

SEQ ID NO: 2067679 - RNA, 19 nt, Homo sapiens
  misc_RNA (1)...(19): siRNA sense strand
gggcauacggcaaugaucu

SEQ ID NO: 2067680 - RNA, 19 nt, Homo sapiens
  misc_RNA (1)...(19): siRNA sense strand
guaaagaaauccuucaaag

SEQ ID NO: 2067681 - RNA, 19 nt, Homo sapiens
  misc_RNA (1)...(19): siRNA sense strand
ggacaucacaggcuauuca

SEQ ID NO: 2067682 - RNA, 19 nt, Homo sapiens
  misc_RNA (1)...(19): siRNA sense strand
ucaauccugucuacaauga

SEQ ID NO: 2067683 - RNA, 19 nt, Homo sapiens
  misc_RNA (1)...(19): siRNA sense strand
ggcggaggcugaagaagaa

SEQ ID NO: 2067684 - RNA, 19 nt, Homo sapiens
  misc_RNA (1)...(19): siRNA sense strand
gaaaguguccuugcucugu

SEQ ID NO: 2067685 - RNA, 19 nt, Homo sapiens
  misc_RNA (1)...(19): siRNA sense strand
aaagaaauccuucaaagag

SEQ ID NO: 2067686 - RNA, 19 nt, Homo sapiens
  misc_RNA (1)...(19): siRNA sense strand
gagcagcccaccagcauug

SEQ ID NO: 2067687 - RNA, 19 nt, Homo sapiens
  misc_RNA (1)...(19): siRNA sense strand
caauaugccacaagugaaa

SEQ ID NO: 2067688 - RNA, 19 nt, Homo sapiens
  misc_RNA (1)...(19): siRNA sense strand
gguaaagaaauccuucaaa

SEQ ID NO: 2067689 - RNA, 19 nt, Homo sapiens
  misc_RNA (1)...(19): siRNA sense strand
gcaucaagccugagcucua

SEQ ID NO: 2067690 - RNA, 19 nt, Homo sapiens
  misc_RNA (1)...(19): siRNA sense strand
gggaggaugccaagucuga

SEQ ID NO: 2067691 - RNA, 19 nt, Homo sapiens
  misc_RNA (1)...(19): siRNA sense strand
uggaagcucugacccuuau

SEQ ID NO: 2067692 - RNA, 19 nt, Homo sapiens
  misc_RNA (1)...(19): siRNA sense strand
cagcugaggugcagauguc

SEQ ID NO: 2067693 - RNA, 19 nt, Homo sapiens
  misc_RNA (1)...(19): siRNA sense strand
gggcggaggcugaagaaga

SEQ ID NO: 2067694 - RNA, 19 nt, Homo sapiens
  misc_RNA (1)...(19): siRNA sense strand
ccacuucccugugcccuau

SEQ ID NO: 2067695 - RNA, 19 nt, Homo sapiens
  misc_RNA (1)...(19): siRNA sense strand
gccaucaucuuugacauuc

SEQ ID NO: 2067696 - RNA, 19 nt, Homo sapiens
  misc_RNA (1)...(19): siRNA sense strand
caagucagccugcucaucu

SEQ ID NO: 2067697 - RNA, 19 nt, Homo sapiens
  misc_RNA (1)...(19): siRNA sense strand
gagcacaucaugcgucaca

SEQ ID NO: 2067698 - RNA, 19 nt, Homo sapiens
  misc_RNA (1)...(19): siRNA sense strand
gaggcaacauggcggacaa

SEQ ID NO: 2067699 - RNA, 19 nt, Homo sapiens
  misc_RNA (1)...(19): siRNA sense strand
cuacagagccagcgucauc

SEQ ID NO: 2067700 - RNA, 19 nt, Homo sapiens
  misc_RNA (1)...(19): siRNA sense strand
ggucaaggagcacaucaug

SEQ ID NO: 2067701 - RNA, 19 nt, Homo sapiens
  misc_RNA (1)...(19): siRNA sense strand
ucucaauccugucuacaau

SEQ ID NO: 2067702 - RNA, 19 nt, Homo sapiens
  misc_RNA (1)...(19): siRNA sense strand
aagaaauccuucaaagagu

SEQ ID NO: 2067703 - RNA, 19 nt, Homo sapiens
  misc_RNA (1)...(19): siRNA sense strand
caucaagccugagcucuac

SEQ ID NO: 2067704 - RNA, 19 nt, Homo sapiens
  misc_RNA (1)...(19): siRNA sense strand
caucacaggcuauucagau

SEQ ID NO: 2067705 - RNA, 19 nt, Homo sapiens
  misc_RNA (1)...(19): siRNA sense strand
gaagaaaacaaccauaaag

SEQ ID NO: 2067706 - RNA, 19 nt, Homo sapiens
  misc_RNA (1)...(19): siRNA sense strand
gaagcucugacccuuaugu

SEQ ID NO: 2067707 - RNA, 19 nt, Homo sapiens
  misc_RNA (1)...(19): siRNA sense strand
gcaagcugcaucucagugu

SEQ ID NO: 2067708 - RNA, 19 nt, Homo sapiens
  misc_RNA (1)...(19): siRNA sense strand
ggacuugggagagaucaug

SEQ ID NO: 2067709 - RNA, 19 nt, Homo sapiens
  misc_RNA (1)...(19): siRNA sense strand
uauccaauaugccacaagu

SEQ ID NO: 2067710 - RNA, 19 nt, Homo sapiens
  misc_RNA (1)...(19): siRNA sense strand
agccugagcucuacaagca

SEQ ID NO: 2067711 - RNA, 19 nt, Homo sapiens
  misc_RNA (1)...(19): siRNA sense strand
acccuuaugucaagaucua

SEQ ID NO: 2067712 - RNA, 19 nt, Homo sapiens
  misc_RNA (1)...(19): siRNA sense strand
accaagagcugcgggaaga

SEQ ID NO: 2067713 - RNA, 19 nt, Homo sapiens
  misc_RNA (1)...(19): siRNA sense strand
gccaaggacuuuuguggaa

SEQ ID NO: 2067714 - RNA, 19 nt, Homo sapiens
  misc_RNA (1)...(19): siRNA sense strand
uccagucccucuucugcua

SEQ ID NO: 2067715 - RNA, 19 nt, Homo sapiens
  misc_RNA (1)...(19): siRNA sense strand
ccaauaugccacaagugaa

SEQ ID NO: 2067716 - RNA, 19 nt, Homo sapiens
  misc_RNA (1)...(19): siRNA sense strand
ggccaucaucuuugacauu

SEQ ID NO: 2067717 - RNA, 19 nt, Homo sapiens
  misc_RNA (1)...(19): siRNA sense strand
cuauucagaucccuaugug

SEQ ID NO: 2067718 - RNA, 19 nt, Homo sapiens
  misc_RNA (1)...(19): siRNA sense strand
ccuccugccugaccgcaaa

SEQ ID NO: 2067719 - RNA, 19 nt, Homo sapiens
  misc_RNA (1)...(19): siRNA sense strand
gaagaagaaaacaaccaua

SEQ ID NO: 2067720 - RNA, 19 nt, Homo sapiens
  misc_RNA (1)...(19): siRNA sense strand
gcuauucagaucccuaugu

SEQ ID NO: 2067721 - RNA, 19 nt, Homo sapiens
  misc_RNA (1)...(19): siRNA sense strand
uccaauaugccacaaguga

SEQ ID NO: 2067722 - RNA, 19 nt, Homo sapiens
  misc_RNA (1)...(19): siRNA sense strand
augcaugucuccaguguag

SEQ ID NO: 2067723 - RNA, 19 nt, Homo sapiens
  misc_RNA (1)...(19): siRNA sense strand
ucagugucuucgacuuuga

SEQ ID NO: 2067724 - RNA, 19 nt, Homo sapiens
  misc_RNA (1)...(19): siRNA sense strand
guggaagcucugacccuua

SEQ ID NO: 2067725 - RNA, 19 nt, Homo sapiens
  misc_RNA (1)...(19): siRNA sense strand
ggaggcugaagaagaagaa

SEQ ID NO: 2067726 - RNA, 19 nt, Homo sapiens
  misc_RNA (1)...(19): siRNA sense strand
ucagaucccuaugugaaag

SEQ ID NO: 2067727 - RNA, 19 nt, Homo sapiens
  misc_RNA (1)...(19): siRNA sense strand
cauccuggacaaccucuuu

SEQ ID NO: 2067728 - RNA, 19 nt, Homo sapiens
  misc_RNA (1)...(19): siRNA sense strand
gcgaggucauccuggacaa

SEQ ID NO: 2067729 - RNA, 19 nt, Homo sapiens
  misc_RNA (1)...(19): siRNA sense strand
gcagggaccacuggaacga

SEQ ID NO: 2067730 - RNA, 19 nt, Homo sapiens
  misc_RNA (1)...(19): siRNA sense strand
agaccgagacccugauugu

SEQ ID NO: 2067731 - RNA, 19 nt, Homo sapiens
  misc_RNA (1)...(19): siRNA sense strand
gaugggcggaggcugaaga

SEQ ID NO: 2067732 - RNA, 19 nt, Homo sapiens
  misc_RNA (1)...(19): siRNA sense strand
gaccgcaagcugcaucuca

SEQ ID NO: 2067733 - RNA, 19 nt, Homo sapiens
  misc_RNA (1)...(19): siRNA sense strand
gaaaacauggaucaaguca

SEQ ID NO: 2067734 - RNA, 19 nt, Homo sapiens
  misc_RNA (1)...(19): siRNA sense strand
ucucagugucuucgacuuu

SEQ ID NO: 2067735 - RNA, 19 nt, Homo sapiens
  misc_RNA (1)...(19): siRNA sense strand
ugguggagguaaagaaauc

SEQ ID NO: 2067736 - RNA, 19 nt, Homo sapiens
  misc_RNA (1)...(19): siRNA sense strand
gaucauguucucccuuugc

SEQ ID NO: 2067737 - RNA, 19 nt, Homo sapiens
  misc_RNA (1)...(19): siRNA sense strand
ugaggccucugaccugucu

SEQ ID NO: 2067738 - RNA, 19 nt, Homo sapiens
  misc_RNA (1)...(19): siRNA sense strand
gauugugcguauccugaag

SEQ ID NO: 2067739 - RNA, 19 nt, Homo sapiens
  misc_RNA (1)...(19): siRNA sense strand
cugcuagcuucgacaguga

SEQ ID NO: 2067740 - RNA, 19 nt, Homo sapiens
  misc_RNA (1)...(19): siRNA sense strand
gagguaaagaaauccuuca

SEQ ID NO: 2067741 - RNA, 19 nt, Homo sapiens
  misc_RNA (1)...(19): siRNA sense strand
caccuuugaugagaacuuc

SEQ ID NO: 2067742 - RNA, 19 nt, Homo sapiens
  misc_RNA (1)...(19): siRNA sense strand
agaugcaugucuccagugu

SEQ ID NO: 2067743 - RNA, 19 nt, Homo sapiens
  misc_RNA (1)...(19): siRNA sense strand
ccaccaggcacacguccuu

SEQ ID NO: 2067744 - RNA, 19 nt, Homo sapiens
  misc_RNA (1)...(19): siRNA sense strand
cagagcagcccaccagcau

SEQ ID NO: 2067745 - RNA, 19 nt, Homo sapiens
  misc_RNA (1)...(19): siRNA sense strand
caguguagacuauggcaau

SEQ ID NO: 2067746 - RNA, 19 nt, Homo sapiens
  misc_RNA (1)...(19): siRNA sense strand
cggcugcagcggcaaacua

SEQ ID NO: 2067747 - RNA, 19 nt, Homo sapiens
  misc_RNA (1)...(19): siRNA sense strand
gaggaagcauggaggauua

SEQ ID NO: 2067748 - RNA, 19 nt, Homo sapiens
  misc_RNA (1)...(19): siRNA sense strand
ggaagugaaugacaucaaa

SEQ ID NO: 2067749 - RNA, 19 nt, Homo sapiens
  misc_RNA (1)...(19): siRNA sense strand
ccaaggacaucuuucauga

SEQ ID NO: 2067750 - RNA, 19 nt, Homo sapiens
  misc_RNA (1)...(19): siRNA sense strand
ggaaagcuguauccgguuu

SEQ ID NO: 2067751 - RNA, 19 nt, Homo sapiens
  misc_RNA (1)...(19): siRNA sense strand
gcaggaaccucaucaccaa

SEQ ID NO: 2067752 - RNA, 19 nt, Homo sapiens
  misc_RNA (1)...(19): siRNA sense strand
ugaagaagauugagaagau

SEQ ID NO: 2067753 - RNA, 19 nt, Homo sapiens
  misc_RNA (1)...(19): siRNA sense strand
gagcuggagucaaaggaua

SEQ ID NO: 2067754 - RNA, 19 nt, Homo sapiens
  misc_RNA (1)...(19): siRNA sense strand
ugaccuaucugaccuuauu

SEQ ID NO: 2067755 - RNA, 19 nt, Homo sapiens
  misc_RNA (1)...(19): siRNA sense strand
ccaaguacacggagaauaa

SEQ ID NO: 2067756 - RNA, 19 nt, Homo sapiens
  misc_RNA (1)...(19): siRNA sense strand
guacagagaugccaacaac

SEQ ID NO: 2067757 - RNA, 19 nt, Homo sapiens
  misc_RNA (1)...(19): siRNA sense strand
uaucugaccuuauugauca

SEQ ID NO: 2067758 - RNA, 19 nt, Homo sapiens
  misc_RNA (1)...(19): siRNA sense strand
ccagauaaguguuccauca

SEQ ID NO: 2067759 - RNA, 19 nt, Homo sapiens
  misc_RNA (1)...(19): siRNA sense strand
cccgagagcuguccuuuaa

SEQ ID NO: 2067760 - RNA, 19 nt, Homo sapiens
  misc_RNA (1)...(19): siRNA sense strand
gaaagucagcggacagauu

SEQ ID NO: 2067761 - RNA, 19 nt, Homo sapiens
  misc_RNA (1)...(19): siRNA sense strand
gccagcagcuccaagauga

SEQ ID NO: 2067762 - RNA, 19 nt, Homo sapiens
  misc_RNA (1)...(19): siRNA sense strand
gcuccaagaugauuugaug

SEQ ID NO: 2067763 - RNA, 19 nt, Homo sapiens
  misc_RNA (1)...(19): siRNA sense strand
cgagagcuguccuuuaaga

SEQ ID NO: 2067764 - RNA, 19 nt, Homo sapiens
  misc_RNA (1)...(19): siRNA sense strand
ggucauugcucaggauauu

SEQ ID NO: 2067765 - RNA, 19 nt, Homo sapiens
  misc_RNA (1)...(19): siRNA sense strand
gaagaagauugagaagaug

SEQ ID NO: 2067766 - RNA, 19 nt, Homo sapiens
  misc_RNA (1)...(19): siRNA sense strand
agaacaggcuucaggauga

SEQ ID NO: 2067767 - RNA, 19 nt, Homo sapiens
  misc_RNA (1)...(19): siRNA sense strand
ccaaagaagggccagauaa

SEQ ID NO: 2067768 - RNA, 19 nt, Homo sapiens
  misc_RNA (1)...(19): siRNA sense strand
caacugcagucucgcuuau

SEQ ID NO: 2067769 - RNA, 19 nt, Homo sapiens
  misc_RNA (1)...(19): siRNA sense strand
gcaaacaucaacaagcaaa

SEQ ID NO: 2067770 - RNA, 19 nt, Homo sapiens
  misc_RNA (1)...(19): siRNA sense strand
gaaccucaucaccaaguua

SEQ ID NO: 2067771 - RNA, 19 nt, Homo sapiens
  misc_RNA (1)...(19): siRNA sense strand
ggugucaacucaucaacuu

SEQ ID NO: 2067772 - RNA, 19 nt, Homo sapiens
  misc_RNA (1)...(19): siRNA sense strand
agauugaggucauuucuga

SEQ ID NO: 2067773 - RNA, 19 nt, Homo sapiens
  misc_RNA (1)...(19): siRNA sense strand
gaggagaagcaaauuggua

SEQ ID NO: 2067774 - RNA, 19 nt, Homo sapiens
  misc_RNA (1)...(19): siRNA sense strand
gcggacagauugcagucua

SEQ ID NO: 2067775 - RNA, 19 nt, Homo sapiens
  misc_RNA (1)...(19): siRNA sense strand
ucauggagauguacaacaa

SEQ ID NO: 2067776 - RNA, 19 nt, Homo sapiens
  misc_RNA (1)...(19): siRNA sense strand
caucgagaaugcaguagaa

SEQ ID NO: 2067777 - RNA, 19 nt, Homo sapiens
  misc_RNA (1)...(19): siRNA sense strand
gaagcaaauugguaaaucg

SEQ ID NO: 2067778 - RNA, 19 nt, Homo sapiens
  misc_RNA (1)...(19): siRNA sense strand
ggagagcaccggaaugugu

SEQ ID NO: 2067779 - RNA, 19 nt, Homo sapiens
  misc_RNA (1)...(19): siRNA sense strand
gcaagagacagagcaguuu

SEQ ID NO: 2067780 - RNA, 19 nt, Homo sapiens
  misc_RNA (1)...(19): siRNA sense strand
ugucaagucugucaagaug

SEQ ID NO: 2067781 - RNA, 19 nt, Homo sapiens
  misc_RNA (1)...(19): siRNA sense strand
ucauguagccgauauuuau

SEQ ID NO: 2067782 - RNA, 19 nt, Homo sapiens
  misc_RNA (1)...(19): siRNA sense strand
ccuccucucucuucuguuu

SEQ ID NO: 2067783 - RNA, 19 nt, Homo sapiens
  misc_RNA (1)...(19): siRNA sense strand
gcauggaggauuacuguga

SEQ ID NO: 2067784 - RNA, 19 nt, Homo sapiens
  misc_RNA (1)...(19): siRNA sense strand
cuuccucucugcugaguua

SEQ ID NO: 2067785 - RNA, 19 nt, Homo sapiens
  misc_RNA (1)...(19): siRNA sense strand
ucaaagcccggaaugagua

SEQ ID NO: 2067786 - RNA, 19 nt, Homo sapiens
  misc_RNA (1)...(19): siRNA sense strand
ugaucaguguugugacuua

SEQ ID NO: 2067787 - RNA, 19 nt, Homo sapiens
  misc_RNA (1)...(19): siRNA sense strand
caaaggaagcguccagaau

SEQ ID NO: 2067788 - RNA, 19 nt, Homo sapiens
  misc_RNA (1)...(19): siRNA sense strand
gaucccagguggaagugaa

SEQ ID NO: 2067789 - RNA, 19 nt, Homo sapiens
  misc_RNA (1)...(19): siRNA sense strand
agacagagcaguuuuauuu

SEQ ID NO: 2067790 - RNA, 19 nt, Homo sapiens
  misc_RNA (1)...(19): siRNA sense strand
gaugaagacauaucacaug

SEQ ID NO: 2067791 - RNA, 19 nt, Homo sapiens
  misc_RNA (1)...(19): siRNA sense strand
gcaaaggaagcguccagaa

SEQ ID NO: 2067792 - RNA, 19 nt, Homo sapiens
  misc_RNA (1)...(19): siRNA sense strand
gaggagagccaaccagcaa

SEQ ID NO: 2067793 - RNA, 19 nt, Homo sapiens
  misc_RNA (1)...(19): siRNA sense strand
cuacauccaugaccuaucu

SEQ ID NO: 2067794 - RNA, 19 nt, Homo sapiens
  misc_RNA (1)...(19): siRNA sense strand
caaugcaucugucuucaag

SEQ ID NO: 2067795 - RNA, 19 nt, Homo sapiens
  misc_RNA (1)...(19): siRNA sense strand
cggaggagcucagugaaga

SEQ ID NO: 2067796 - RNA, 19 nt, Homo sapiens
  misc_RNA (1)...(19): siRNA sense strand
gaaagcuguauccgguuua

SEQ ID NO: 2067797 - RNA, 19 nt, Homo sapiens
  misc_RNA (1)...(19): siRNA sense strand
ggagcucagugaagaagau

SEQ ID NO: 2067798 - RNA, 19 nt, Homo sapiens
  misc_RNA (1)...(19): siRNA sense strand
ggaggaagcauggaggauu

SEQ ID NO: 2067799 - RNA, 19 nt, Homo sapiens
  misc_RNA (1)...(19): siRNA sense strand
aggcgcagcucaacuguga

SEQ ID NO: 2067800 - RNA, 19 nt, Homo sapiens
  misc_RNA (1)...(19): siRNA sense strand
gacacggacuacagcauga

SEQ ID NO: 2067801 - RNA, 19 nt, Homo sapiens
  misc_RNA (1)...(19): siRNA sense strand
uaaaggaggcggagaagca

SEQ ID NO: 2067802 - RNA, 19 nt, Homo sapiens
  misc_RNA (1)...(19): siRNA sense strand
uauccacucuaaagauuga

SEQ ID NO: 2067803 - RNA, 19 nt, Homo sapiens
  misc_RNA (1)...(19): siRNA sense strand
uugagaagaugaaggagaa

SEQ ID NO: 2067804 - RNA, 19 nt, Homo sapiens
  misc_RNA (1)...(19): siRNA sense strand
augcaucugucuucaagua

SEQ ID NO: 2067805 - RNA, 19 nt, Homo sapiens
  misc_RNA (1)...(19): siRNA sense strand
caaagaagggccagauaag

SEQ ID NO: 2067806 - RNA, 19 nt, Homo sapiens
  misc_RNA (1)...(19): siRNA sense strand
cacgagcgaugacgaaugu

SEQ ID NO: 2067807 - RNA, 19 nt, Homo sapiens
  misc_RNA (1)...(19): siRNA sense strand
gagacuaccucgguugaag

SEQ ID NO: 2067808 - RNA, 19 nt, Homo sapiens
  misc_RNA (1)...(19): siRNA sense strand
ggaaccucaucaccaaguu

SEQ ID NO: 2067809 - RNA, 19 nt, Homo sapiens
  misc_RNA (1)...(19): siRNA sense strand
ugaugaagguccugaacga

SEQ ID NO: 2067810 - RNA, 19 nt, Homo sapiens
  misc_RNA (1)...(19): siRNA sense strand
gaacggcagagcaguguca

SEQ ID NO: 2067811 - RNA, 19 nt, Homo sapiens
  misc_RNA (1)...(19): siRNA sense strand
agucaaaggauauuccaua

SEQ ID NO: 2067812 - RNA, 19 nt, Homo sapiens
  misc_RNA (1)...(19): siRNA sense strand
ugaaugagcugaucaaaac

SEQ ID NO: 2067813 - RNA, 19 nt, Homo sapiens
  misc_RNA (1)...(19): siRNA sense strand
gcauugaggagaaacaugu

SEQ ID NO: 2067814 - RNA, 19 nt, Homo sapiens
  misc_RNA (1)...(19): siRNA sense strand
caaauugguaaaucgguaa

SEQ ID NO: 2067815 - RNA, 19 nt, Homo sapiens
  misc_RNA (1)...(19): siRNA sense strand
ucucuucuguuucccaauu

SEQ ID NO: 2067816 - RNA, 19 nt, Homo sapiens
  misc_RNA (1)...(19): siRNA sense strand
aaagucagcggacagauug

SEQ ID NO: 2067817 - RNA, 19 nt, Homo sapiens
  misc_RNA (1)...(19): siRNA sense strand
cuuauccacucuaaagauu

SEQ ID NO: 2067818 - RNA, 19 nt, Homo sapiens
  misc_RNA (1)...(19): siRNA sense strand
caugaccuaucugaccuua

SEQ ID NO: 2067819 - RNA, 19 nt, Homo sapiens
  misc_RNA (1)...(19): siRNA sense strand
acucggugaugaagacaua

SEQ ID NO: 2067820 - RNA, 19 nt, Homo sapiens
  misc_RNA (1)...(19): siRNA sense strand
ggucauguagccgauauuu

SEQ ID NO: 2067821 - RNA, 19 nt, Homo sapiens
  misc_RNA (1)...(19): siRNA sense strand
gccaagcccacgugaauga

SEQ ID NO: 2067822 - RNA, 19 nt, Homo sapiens
  misc_RNA (1)...(19): siRNA sense strand
cauaucacauguacaaugc

SEQ ID NO: 2067823 - RNA, 19 nt, Homo sapiens
  misc_RNA (1)...(19): siRNA sense strand
gagcucuacucggugauga

SEQ ID NO: 2067824 - RNA, 19 nt, Homo sapiens
  misc_RNA (1)...(19): siRNA sense strand
gcugguguccugaagcuuu

SEQ ID NO: 2067825 - RNA, 19 nt, Homo sapiens
  misc_RNA (1)...(19): siRNA sense strand
gaagagguaaagaagacaa

SEQ ID NO: 2067826 - RNA, 19 nt, Homo sapiens
  misc_RNA (1)...(19): siRNA sense strand
caucugucuucaaguacua

SEQ ID NO: 2067827 - RNA, 19 nt, Homo sapiens
  misc_RNA (1)...(19): siRNA sense strand
gcucagugaagaagauuga

SEQ ID NO: 2067828 - RNA, 19 nt, Homo sapiens
  misc_RNA (1)...(19): siRNA sense strand
ugaacucggcccugaauga

SEQ ID NO: 2067829 - RNA, 19 nt, Homo sapiens
  misc_RNA (1)...(19): siRNA sense strand
ugaagaaucggcuggauag

SEQ ID NO: 2067830 - RNA, 19 nt, Homo sapiens
  misc_RNA (1)...(19): siRNA sense strand
gccaugggcugagcaguuc

SEQ ID NO: 2067831 - RNA, 19 nt, Homo sapiens
  misc_RNA (1)...(19): siRNA sense strand
gagagacuaccucgguuga

SEQ ID NO: 2067832 - RNA, 19 nt, Homo sapiens
  misc_RNA (1)...(19): siRNA sense strand
ggagaagcaaauugguaaa

SEQ ID NO: 2067833 - RNA, 19 nt, Homo sapiens
  misc_RNA (1)...(19): siRNA sense strand
aaaggaagcguccagaauc

SEQ ID NO: 2067834 - RNA, 19 nt, Homo sapiens
  misc_RNA (1)...(19): siRNA sense strand
cgaggccauugccaaguuu

SEQ ID NO: 2067835 - RNA, 19 nt, Homo sapiens
  misc_RNA (1)...(19): siRNA sense strand
aaacgaagagguaaagaag

SEQ ID NO: 2067836 - RNA, 19 nt, Homo sapiens
  misc_RNA (1)...(19): siRNA sense strand
guacuacauccaugaccua

SEQ ID NO: 2067837 - RNA, 19 nt, Homo sapiens
  misc_RNA (1)...(19): siRNA sense strand
gagaagcaaauugguaaau

SEQ ID NO: 2067838 - RNA, 19 nt, Homo sapiens
  misc_RNA (1)...(19): siRNA sense strand
gugaagagaacaugaugga

SEQ ID NO: 2067839 - RNA, 19 nt, Homo sapiens
  misc_RNA (1)...(19): siRNA sense strand
ggagagccaaccagcaaga

SEQ ID NO: 2067840 - RNA, 19 nt, Homo sapiens
  misc_RNA (1)...(19): siRNA sense strand
agaagcaaauugguaaauc

SEQ ID NO: 2067841 - RNA, 19 nt, Homo sapiens
  misc_RNA (1)...(19): siRNA sense strand
gacuuaggcuaccaugcaa

SEQ ID NO: 2067842 - RNA, 19 nt, Homo sapiens
  misc_RNA (1)...(19): siRNA sense strand
gaucaguguugugacuuag

SEQ ID NO: 2067843 - RNA, 19 nt, Homo sapiens
  misc_RNA (1)...(19): siRNA sense strand
ugaaugagcuacgggaacu

SEQ ID NO: 2067844 - RNA, 19 nt, Homo sapiens
  misc_RNA (1)...(19): siRNA sense strand
uugcaaacaucaacaagca

SEQ ID NO: 2067845 - RNA, 19 nt, Homo sapiens
  misc_RNA (1)...(19): siRNA sense strand
gaaggagagcaccggaaug

SEQ ID NO: 2067846 - RNA, 19 nt, Homo sapiens
  misc_RNA (1)...(19): siRNA sense strand
gagaaagucagcggacaga

SEQ ID NO: 2067847 - RNA, 19 nt, Homo sapiens
  misc_RNA (1)...(19): siRNA sense strand
gaacguaaaucaugugaaa

SEQ ID NO: 2067848 - RNA, 19 nt, Homo sapiens
  misc_RNA (1)...(19): siRNA sense strand
caaccuaacugaugacuuu

SEQ ID NO: 2067849 - RNA, 19 nt, Homo sapiens
  misc_RNA (1)...(19): siRNA sense strand
gaagugaaauccugugaug

SEQ ID NO: 2067850 - RNA, 19 nt, Homo sapiens
  misc_RNA (1)...(19): siRNA sense strand
aaacguaaaucaugucgua

SEQ ID NO: 2067851 - RNA, 19 nt, Homo sapiens
  misc_RNA (1)...(19): siRNA sense strand
cagcaaagaugaucaagug

SEQ ID NO: 2067852 - RNA, 19 nt, Homo sapiens
  misc_RNA (1)...(19): siRNA sense strand
uaaaugaaguuguggaguu

SEQ ID NO: 2067853 - RNA, 19 nt, Homo sapiens
  misc_RNA (1)...(19): siRNA sense strand
gaaauccugugaugacuuc

SEQ ID NO: 2067854 - RNA, 19 nt, Homo sapiens
  misc_RNA (1)...(19): siRNA sense strand
caaaugggagccagaguua

SEQ ID NO: 2067855 - RNA, 19 nt, Homo sapiens
  misc_RNA (1)...(19): siRNA sense strand
caugugcuauuuccacuua

SEQ ID NO: 2067856 - RNA, 19 nt, Homo sapiens
  misc_RNA (1)...(19): siRNA sense strand
gaucaaagacauccaguuc

SEQ ID NO: 2067857 - RNA, 19 nt, Homo sapiens
  misc_RNA (1)...(19): siRNA sense strand
uaaaggauaccgacucauu

SEQ ID NO: 2067858 - RNA, 19 nt, Homo sapiens
  misc_RNA (1)...(19): siRNA sense strand
gaauauugguaucugacaa

SEQ ID NO: 2067859 - RNA, 19 nt, Homo sapiens
  misc_RNA (1)...(19): siRNA sense strand
cuaccaaccuaacugauga

SEQ ID NO: 2067860 - RNA, 19 nt, Homo sapiens
  misc_RNA (1)...(19): siRNA sense strand
aaagggcccucccauguga

SEQ ID NO: 2067861 - RNA, 19 nt, Homo sapiens
  misc_RNA (1)...(19): siRNA sense strand
gaaagggcccucccaugug

SEQ ID NO: 2067862 - RNA, 19 nt, Homo sapiens
  misc_RNA (1)...(19): siRNA sense strand
cauguuggauccagaauca

SEQ ID NO: 2067863 - RNA, 19 nt, Homo sapiens
  misc_RNA (1)...(19): siRNA sense strand
ggacaagugcuaaggacaa

SEQ ID NO: 2067864 - RNA, 19 nt, Homo sapiens
  misc_RNA (1)...(19): siRNA sense strand
ggacaagugcaaacguaaa

SEQ ID NO: 2067865 - RNA, 19 nt, Homo sapiens
  misc_RNA (1)...(19): siRNA sense strand
gugcaaacguaaaucaugu

SEQ ID NO: 2067866 - RNA, 19 nt, Homo sapiens
  misc_RNA (1)...(19): siRNA sense strand
cagaggaucuacguauuug

SEQ ID NO: 2067867 - RNA, 19 nt, Homo sapiens
  misc_RNA (1)...(19): siRNA sense strand
aaaugaaguuguggaguuu

SEQ ID NO: 2067868 - RNA, 19 nt, Homo sapiens
  misc_RNA (1)...(19): siRNA sense strand
uaauggccaugugcuauuu

SEQ ID NO: 2067869 - RNA, 19 nt, Homo sapiens
  misc_RNA (1)...(19): siRNA sense strand
ggaagaccguuuucuauca

SEQ ID NO: 2067870 - RNA, 19 nt, Homo sapiens
  misc_RNA (1)...(19): siRNA sense strand
ugaaagggcccucccaugu

SEQ ID NO: 2067871 - RNA, 19 nt, Homo sapiens
  misc_RNA (1)...(19): siRNA sense strand
uggcacaugugaucaaaga

SEQ ID NO: 2067872 - RNA, 19 nt, Homo sapiens
  misc_RNA (1)...(19): siRNA sense strand
aaggacaagugcaaacgua

SEQ ID NO: 2067873 - RNA, 19 nt, Homo sapiens
  misc_RNA (1)...(19): siRNA sense strand
ugacaacagaagcuuauuu

SEQ ID NO: 2067874 - RNA, 19 nt, Homo sapiens
  misc_RNA (1)...(19): siRNA sense strand
ugggugagcccuccauaua

SEQ ID NO: 2067875 - RNA, 19 nt, Homo sapiens
  misc_RNA (1)...(19): siRNA sense strand
gcacaugugaucaaagaca

SEQ ID NO: 2067876 - RNA, 19 nt, Homo sapiens
  misc_RNA (1)...(19): siRNA sense strand
ucagaggaucuacguauuu

SEQ ID NO: 2067877 - RNA, 19 nt, Homo sapiens
  misc_RNA (1)...(19): siRNA sense strand
ccaagcugcuccaggguau

SEQ ID NO: 2067878 - RNA, 19 nt, Homo sapiens
  misc_RNA (1)...(19): siRNA sense strand
ccuaaaggauaccgacuca

SEQ ID NO: 2067879 - RNA, 19 nt, Homo sapiens
  misc_RNA (1)...(19): siRNA sense strand
caaaugcacgccuccaaau

SEQ ID NO: 2067880 - RNA, 19 nt, Homo sapiens
  misc_RNA (1)...(19): siRNA sense strand
ggagauuucacuagcauca

SEQ ID NO: 2067881 - RNA, 19 nt, Homo sapiens
  misc_RNA (1)...(19): siRNA sense strand
gacuuugaguuucccauug

SEQ ID NO: 2067882 - RNA, 19 nt, Homo sapiens
  misc_RNA (1)...(19): siRNA sense strand
ggauaccgacucauugguu

SEQ ID NO: 2067883 - RNA, 19 nt, Homo sapiens
  misc_RNA (1)...(19): siRNA sense strand
ggugagcccuccauauacu

SEQ ID NO: 2067884 - RNA, 19 nt, Homo sapiens
  misc_RNA (1)...(19): siRNA sense strand
caagugcaaacguaaauca

SEQ ID NO: 2067885 - RNA, 19 nt, Homo sapiens
  misc_RNA (1)...(19): siRNA sense strand
cguaaaucaugucguaauc

SEQ ID NO: 2067886 - RNA, 19 nt, Homo sapiens
  misc_RNA (1)...(19): siRNA sense strand
gcaguguuccaguguguga

SEQ ID NO: 2067887 - RNA, 19 nt, Homo sapiens
  misc_RNA (1)...(19): siRNA sense strand
gacaagugcaaacguaaau

SEQ ID NO: 2067888 - RNA, 19 nt, Homo sapiens
  misc_RNA (1)...(19): siRNA sense strand
acacugucauuugggauaa

SEQ ID NO: 2067889 - RNA, 19 nt, Homo sapiens
  misc_RNA (1)...(19): siRNA sense strand
ucacuagcaucagcagaga

SEQ ID NO: 2067890 - RNA, 19 nt, Homo sapiens
  misc_RNA (1)...(19): siRNA sense strand
caucgccaauggagauuuc

SEQ ID NO: 2067891 - RNA, 19 nt, Homo sapiens
  misc_RNA (1)...(19): siRNA sense strand
gagaguauuuucacuaugg

SEQ ID NO: 2067892 - RNA, 19 nt, Homo sapiens
  misc_RNA (1)...(19): siRNA sense strand
aggcaacacugucauuugg

SEQ ID NO: 2067893 - RNA, 19 nt, Homo sapiens
  misc_RNA (1)...(19): siRNA sense strand
gacaagugcuaaggacaag

SEQ ID NO: 2067894 - RNA, 19 nt, Homo sapiens
  misc_RNA (1)...(19): siRNA sense strand
ggcaggaaguguucuacag

SEQ ID NO: 2067895 - RNA, 19 nt, Homo sapiens
  misc_RNA (1)...(19): siRNA sense strand
acaaaugcacgccuccaaa

SEQ ID NO: 2067896 - RNA, 19 nt, Homo sapiens
  misc_RNA (1)...(19): siRNA sense strand
ccucagugcauuauaccua

SEQ ID NO: 2067897 - RNA, 19 nt, Homo sapiens
  misc_RNA (1)...(19): siRNA sense strand
gcagagaguauuuucacua

SEQ ID NO: 2067898 - RNA, 19 nt, Homo sapiens
  misc_RNA (1)...(19): siRNA sense strand
aaaggauaccgacucauug

SEQ ID NO: 2067899 - RNA, 19 nt, Homo sapiens
  misc_RNA (1)...(19): siRNA sense strand
uaaaucaugucguaauccu

SEQ ID NO: 2067900 - RNA, 19 nt, Homo sapiens
  misc_RNA (1)...(19): siRNA sense strand
acaaaugggagccagaguu

SEQ ID NO: 2067901 - RNA, 19 nt, Homo sapiens
  misc_RNA (1)...(19): siRNA sense strand
uagcaguguuccagugugu

SEQ ID NO: 2067902 - RNA, 19 nt, Homo sapiens
  misc_RNA (1)...(19): siRNA sense strand
ucugcuaguuacuguguuu

SEQ ID NO: 2067903 - RNA, 19 nt, Homo sapiens
  misc_RNA (1)...(19): siRNA sense strand
uguuugugaugaaggauuu

SEQ ID NO: 2067904 - RNA, 19 nt, Homo sapiens
  misc_RNA (1)...(19): siRNA sense strand
cucagugcauuauaccuaa

SEQ ID NO: 2067905 - RNA, 19 nt, Homo sapiens
  misc_RNA (1)...(19): siRNA sense strand
cagcucugcuaguuacugu

SEQ ID NO: 2067906 - RNA, 19 nt, Homo sapiens
  misc_RNA (1)...(19): siRNA sense strand
gacaacagaagcuuauuuu

SEQ ID NO: 2067907 - RNA, 19 nt, Homo sapiens
  misc_RNA (1)...(19): siRNA sense strand
gccaauggagauuucacua

SEQ ID NO: 2067908 - RNA, 19 nt, Homo sapiens
  misc_RNA (1)...(19): siRNA sense strand
cuaauggccaugugcuauu

SEQ ID NO: 2067909 - RNA, 19 nt, Homo sapiens
  misc_RNA (1)...(19): siRNA sense strand
gaggaucuacguauuugca

SEQ ID NO: 2067910 - RNA, 19 nt, Homo sapiens
  misc_RNA (1)...(19): siRNA sense strand
ggacaaggacaacuuuuca

SEQ ID NO: 2067911 - RNA, 19 nt, Homo sapiens
  misc_RNA (1)...(19): siRNA sense strand
ggaauauugguaucugaca

SEQ ID NO: 2067912 - RNA, 19 nt, Homo sapiens
  misc_RNA (1)...(19): siRNA sense strand
gagccagaguuaccaagcu

SEQ ID NO: 2067913 - RNA, 19 nt, Homo sapiens
  misc_RNA (1)...(19): siRNA sense strand
ggauccagaaucaacuauu

SEQ ID NO: 2067914 - RNA, 19 nt, Homo sapiens
  misc_RNA (1)...(19): siRNA sense strand
caagugcuaaggacaagug

SEQ ID NO: 2067915 - RNA, 19 nt, Homo sapiens
  misc_RNA (1)...(19): siRNA sense strand
cucagaggaucuacguauu

SEQ ID NO: 2067916 - RNA, 19 nt, Homo sapiens
  misc_RNA (1)...(19): siRNA sense strand
ggaaaauggaauauuggua

SEQ ID NO: 2067917 - RNA, 19 nt, Homo sapiens
  misc_RNA (1)...(19): siRNA sense strand
cagagaguauuuucacuau

SEQ ID NO: 2067918 - RNA, 19 nt, Homo sapiens
  misc_RNA (1)...(19): siRNA sense strand
gcaucagcagagaguauuu

SEQ ID NO: 2067919 - RNA, 19 nt, Homo sapiens
  misc_RNA (1)...(19): siRNA sense strand
ccaauggagauuucacuag

SEQ ID NO: 2067920 - RNA, 19 nt, Homo sapiens
  misc_RNA (1)...(19): siRNA sense strand
ugccaggccuaccaaccua

SEQ ID NO: 2067921 - RNA, 19 nt, Homo sapiens
  misc_RNA (1)...(19): siRNA sense strand
gugcuaaggacaagugcaa

SEQ ID NO: 2067922 - RNA, 19 nt, Homo sapiens
  misc_RNA (1)...(19): siRNA sense strand
gugugaacguaaaucaugu

SEQ ID NO: 2067923 - RNA, 19 nt, Homo sapiens
  misc_RNA (1)...(19): siRNA sense strand
gaagaccguuuucuaucau

SEQ ID NO: 2067924 - RNA, 19 nt, Homo sapiens
  misc_RNA (1)...(19): siRNA sense strand
aaagggacaaggacaacuu

SEQ ID NO: 2067925 - RNA, 19 nt, Homo sapiens
  misc_RNA (1)...(19): siRNA sense strand
gaaguuguggaguuuaggu

SEQ ID NO: 2067926 - RNA, 19 nt, Homo sapiens
  misc_RNA (1)...(19): siRNA sense strand
ucaggcaacacugucauuu

SEQ ID NO: 2067927 - RNA, 19 nt, Homo sapiens
  misc_RNA (1)...(19): siRNA sense strand
ugggacauaucugaacuau

SEQ ID NO: 2067928 - RNA, 19 nt, Homo sapiens
  misc_RNA (1)...(19): siRNA sense strand
acugucauuugggauaaua

SEQ ID NO: 2067929 - RNA, 19 nt, Homo sapiens
  misc_RNA (1)...(19): siRNA sense strand
caggcaacacugucauuug

SEQ ID NO: 2067930 - RNA, 19 nt, Homo sapiens
  misc_RNA (1)...(19): siRNA sense strand
gcgcuuuccuggguugcuu

SEQ ID NO: 2067931 - RNA, 19 nt, Homo sapiens
  misc_RNA (1)...(19): siRNA sense strand
aaugcaaugucccggaaug

SEQ ID NO: 2067932 - RNA, 19 nt, Homo sapiens
  misc_RNA (1)...(19): siRNA sense strand
uguggaaaauggaauauug

SEQ ID NO: 2067933 - RNA, 19 nt, Homo sapiens
  misc_RNA (1)...(19): siRNA sense strand
ugacuuugaguuucccauu

SEQ ID NO: 2067934 - RNA, 19 nt, Homo sapiens
  misc_RNA (1)...(19): siRNA sense strand
uagcaucagcagagaguau

SEQ ID NO: 2067935 - RNA, 19 nt, Homo sapiens
  misc_RNA (1)...(19): siRNA sense strand
uccagugugugaacguaaa

SEQ ID NO: 2067936 - RNA, 19 nt, Homo sapiens
  misc_RNA (1)...(19): siRNA sense strand
gaccuaccacugcaaucuu

SEQ ID NO: 2067937 - RNA, 19 nt, Homo sapiens
  misc_RNA (1)...(19): siRNA sense strand
ccccagaugugaagugaaa

SEQ ID NO: 2067938 - RNA, 19 nt, Homo sapiens
  misc_RNA (1)...(19): siRNA sense strand
ugugugaacguaaaucaug

SEQ ID NO: 2067939 - RNA, 19 nt, Homo sapiens
  misc_RNA (1)...(19): siRNA sense strand
gcucugcuaguuacugugu

SEQ ID NO: 2067940 - RNA, 19 nt, Homo sapiens
  misc_RNA (1)...(19): siRNA sense strand
gcaccagcaaagaugauca

SEQ ID NO: 2067941 - RNA, 19 nt, Homo sapiens
  misc_RNA (1)...(19): siRNA sense strand
ucagccaccuccagauguc

SEQ ID NO: 2067942 - RNA, 19 nt, Homo sapiens
  misc_RNA (1)...(19): siRNA sense strand
uuccuuaaaugaaguugug

SEQ ID NO: 2067943 - RNA, 19 nt, Homo sapiens
  misc_RNA (1)...(19): siRNA sense strand
cuccagauccugugaaugg

SEQ ID NO: 2067944 - RNA, 19 nt, Homo sapiens
  misc_RNA (1)...(19): siRNA sense strand
acugaugacuuugaguuuc

SEQ ID NO: 2067945 - RNA, 19 nt, Homo sapiens
  misc_RNA (1)...(19): siRNA sense strand
guacccaaagggacaagga

SEQ ID NO: 2067946 - RNA, 19 nt, Homo sapiens
  misc_RNA (1)...(19): siRNA sense strand
cauauacugcaccagcaaa

SEQ ID NO: 2067947 - RNA, 19 nt, Homo sapiens
  misc_RNA (1)...(19): siRNA sense strand
gaacggcaauuucaucauu

SEQ ID NO: 2067948 - RNA, 19 nt, Homo sapiens
  misc_RNA (1)...(19): siRNA sense strand
caaagaaucugucaaugug

SEQ ID NO: 2067949 - RNA, 19 nt, Homo sapiens
  misc_RNA (1)...(19): siRNA sense strand
caaauucaauggcaaagaa

SEQ ID NO: 2067950 - RNA, 19 nt, Homo sapiens
  misc_RNA (1)...(19): siRNA sense strand
ucaacacacugaugcauua

SEQ ID NO: 2067951 - RNA, 19 nt, Homo sapiens
  misc_RNA (1)...(19): siRNA sense strand
ucaaugagaucuacuccua

SEQ ID NO: 2067952 - RNA, 19 nt, Homo sapiens
  misc_RNA (1)...(19): siRNA sense strand
gaacagcucguaccaguau

SEQ ID NO: 2067953 - RNA, 19 nt, Homo sapiens
  misc_RNA (1)...(19): siRNA sense strand
gaaaguccaucucuacaag

SEQ ID NO: 2067954 - RNA, 19 nt, Homo sapiens
  misc_RNA (1)...(19): siRNA sense strand
guacauguuugauuuccua

SEQ ID NO: 2067955 - RNA, 19 nt, Homo sapiens
  misc_RNA (1)...(19): siRNA sense strand
ggacguccaucagcagaua

SEQ ID NO: 2067956 - RNA, 19 nt, Homo sapiens
  misc_RNA (1)...(19): siRNA sense strand
ccaggacgauguacucuuu

SEQ ID NO: 2067957 - RNA, 19 nt, Homo sapiens
  misc_RNA (1)...(19): siRNA sense strand
gcaaagaaucugucaaugu

SEQ ID NO: 2067958 - RNA, 19 nt, Homo sapiens
  misc_RNA (1)...(19): siRNA sense strand
ucucugaccucaucgauaa

SEQ ID NO: 2067959 - RNA, 19 nt, Homo sapiens
  misc_RNA (1)...(19): siRNA sense strand
caacaggccugggaaccua

SEQ ID NO: 2067960 - RNA, 19 nt, Homo sapiens
  misc_RNA (1)...(19): siRNA sense strand
ggacaucaccaccaagauu

SEQ ID NO: 2067961 - RNA, 19 nt, Homo sapiens
  misc_RNA (1)...(19): siRNA sense strand
ucacacaggucaaggagaa

SEQ ID NO: 2067962 - RNA, 19 nt, Homo sapiens
  misc_RNA (1)...(19): siRNA sense strand
gcaccgaguucaaguuuua

SEQ ID NO: 2067963 - RNA, 19 nt, Homo sapiens
  misc_RNA (1)...(19): siRNA sense strand
caucaucgcugagcagauu

SEQ ID NO: 2067964 - RNA, 19 nt, Homo sapiens
  misc_RNA (1)...(19): siRNA sense strand
aaacagaccuccuccuaca

SEQ ID NO: 2067965 - RNA, 19 nt, Homo sapiens
  misc_RNA (1)...(19): siRNA sense strand
gcccaggccuucaauauca

SEQ ID NO: 2067966 - RNA, 19 nt, Homo sapiens
  misc_RNA (1)...(19): siRNA sense strand
guccaauccuugcuaauuu

SEQ ID NO: 2067967 - RNA, 19 nt, Homo sapiens
  misc_RNA (1)...(19): siRNA sense strand
gaguuuggauuugucuuua

SEQ ID NO: 2067968 - RNA, 19 nt, Homo sapiens
  misc_RNA (1)...(19): siRNA sense strand
ccaaagggcagaagcagua

SEQ ID NO: 2067969 - RNA, 19 nt, Homo sapiens
  misc_RNA (1)...(19): siRNA sense strand
ccaacaagcugcucuaugc

SEQ ID NO: 2067970 - RNA, 19 nt, Homo sapiens
  misc_RNA (1)...(19): siRNA sense strand
acaccaaguuuaucuacua

SEQ ID NO: 2067971 - RNA, 19 nt, Homo sapiens
  misc_RNA (1)...(19): siRNA sense strand
guaaagccaaucacccuua

SEQ ID NO: 2067972 - RNA, 19 nt, Homo sapiens
  misc_RNA (1)...(19): siRNA sense strand
uaaagccaaucacccuuaa

SEQ ID NO: 2067973 - RNA, 19 nt, Homo sapiens
  misc_RNA (1)...(19): siRNA sense strand
gaaaagaugcugaccaauu

SEQ ID NO: 2067974 - RNA, 19 nt, Homo sapiens
  misc_RNA (1)...(19): siRNA sense strand
ccaguacgccuguguauug

SEQ ID NO: 2067975 - RNA, 19 nt, Homo sapiens
  misc_RNA (1)...(19): siRNA sense strand
gagccacucuucaugcuau

SEQ ID NO: 2067976 - RNA, 19 nt, Homo sapiens
  misc_RNA (1)...(19): siRNA sense strand
auaagaaccuggagaacaa

SEQ ID NO: 2067977 - RNA, 19 nt, Homo sapiens
  misc_RNA (1)...(19): siRNA sense strand
agacggauaucaaugaguu

SEQ ID NO: 2067978 - RNA, 19 nt, Homo sapiens
  misc_RNA (1)...(19): siRNA sense strand
gaaccugggucuggacuuc

SEQ ID NO: 2067979 - RNA, 19 nt, Homo sapiens
  misc_RNA (1)...(19): siRNA sense strand
ccagguggcucauaagaca

SEQ ID NO: 2067980 - RNA, 19 nt, Homo sapiens
  misc_RNA (1)...(19): siRNA sense strand
caacguggcuucgcucauc

SEQ ID NO: 2067981 - RNA, 19 nt, Homo sapiens
  misc_RNA (1)...(19): siRNA sense strand
ugagugagaucgugugugu

SEQ ID NO: 2067982 - RNA, 19 nt, Homo sapiens
  misc_RNA (1)...(19): siRNA sense strand
ggaagcggcucaacacacu

SEQ ID NO: 2067983 - RNA, 19 nt, Homo sapiens
  misc_RNA (1)...(19): siRNA sense strand
cagccaugcucgacuauga

SEQ ID NO: 2067984 - RNA, 19 nt, Homo sapiens
  misc_RNA (1)...(19): siRNA sense strand
gggugaacgugauuaagaa

SEQ ID NO: 2067985 - RNA, 19 nt, Homo sapiens
  misc_RNA (1)...(19): siRNA sense strand
gcaagaugguguccgagau

SEQ ID NO: 2067986 - RNA, 19 nt, Homo sapiens
  misc_RNA (1)...(19): siRNA sense strand
ccaaacagaccuccuccua

SEQ ID NO: 2067987 - RNA, 19 nt, Homo sapiens
  misc_RNA (1)...(19): siRNA sense strand
ccacugauguccucaagca

SEQ ID NO: 2067988 - RNA, 19 nt, Homo sapiens
  misc_RNA (1)...(19): siRNA sense strand
ucaacaagcugcucaucau

SEQ ID NO: 2067989 - RNA, 19 nt, Homo sapiens
  misc_RNA (1)...(19): siRNA sense strand
caacuacacugugcucauc

SEQ ID NO: 2067990 - RNA, 19 nt, Homo sapiens
  misc_RNA (1)...(19): siRNA sense strand
ggaacgcccagaugaguuu

SEQ ID NO: 2067991 - RNA, 19 nt, Homo sapiens
  misc_RNA (1)...(19): siRNA sense strand
gagugaugcuccugaucua

SEQ ID NO: 2067992 - RNA, 19 nt, Homo sapiens
  misc_RNA (1)...(19): siRNA sense strand
gccaucaacuugcagauca

SEQ ID NO: 2067993 - RNA, 19 nt, Homo sapiens
  misc_RNA (1)...(19): siRNA sense strand
gucaauguguguaaaguug

SEQ ID NO: 2067994 - RNA, 19 nt, Homo sapiens
  misc_RNA (1)...(19): siRNA sense strand
gauagcaaccugcaguuug

SEQ ID NO: 2067995 - RNA, 19 nt, Homo sapiens
  misc_RNA (1)...(19): siRNA sense strand
ggagucaugugagcaguau

SEQ ID NO: 2067996 - RNA, 19 nt, Homo sapiens
  misc_RNA (1)...(19): siRNA sense strand
gagaucuacuccuauguca

SEQ ID NO: 2067997 - RNA, 19 nt, Homo sapiens
  misc_RNA (1)...(19): siRNA sense strand
gauaagaaccuggagaaca

SEQ ID NO: 2067998 - RNA, 19 nt, Homo sapiens
  misc_RNA (1)...(19): siRNA sense strand
uccaauccuugcuaauuua

SEQ ID NO: 2067999 - RNA, 19 nt, Homo sapiens
  misc_RNA (1)...(19): siRNA sense strand
gagccagaguggagcauug

SEQ ID NO: 2068000 - RNA, 19 nt, Homo sapiens
  misc_RNA (1)...(19): siRNA sense strand
caacugcagugcccaccaa

SEQ ID NO: 2068001 - RNA, 19 nt, Homo sapiens
  misc_RNA (1)...(19): siRNA sense strand
acaagcugcucaucauuga

SEQ ID NO: 2068002 - RNA, 19 nt, Homo sapiens
  misc_RNA (1)...(19): siRNA sense strand
gaaaaugaccucacucuca

SEQ ID NO: 2068003 - RNA, 19 nt, Homo sapiens
  misc_RNA (1)...(19): siRNA sense strand
ccagaugaguuuggauuug

SEQ ID NO: 2068004 - RNA, 19 nt, Homo sapiens
  misc_RNA (1)...(19): siRNA sense strand
gaaggagggacgcgaguga

SEQ ID NO: 2068005 - RNA, 19 nt, Homo sapiens
  misc_RNA (1)...(19): siRNA sense strand
ggagacagggaagauauuu

SEQ ID NO: 2068006 - RNA, 19 nt, Homo sapiens
  misc_RNA (1)...(19): siRNA sense strand
guccagagaucccagugaa

SEQ ID NO: 2068007 - RNA, 19 nt, Homo sapiens
  misc_RNA (1)...(19): siRNA sense strand
ggcagcagaucgaguacaa

SEQ ID NO: 2068008 - RNA, 19 nt, Homo sapiens
  misc_RNA (1)...(19): siRNA sense strand
aaaagaugcugaccaauug

SEQ ID NO: 2068009 - RNA, 19 nt, Homo sapiens
  misc_RNA (1)...(19): siRNA sense strand
agagcuggguggagagaua

SEQ ID NO: 2068010 - RNA, 19 nt, Homo sapiens
  misc_RNA (1)...(19): siRNA sense strand
ccauccagguggcucauaa

SEQ ID NO: 2068011 - RNA, 19 nt, Homo sapiens
  misc_RNA (1)...(19): siRNA sense strand
acaagacccugauccugaa

SEQ ID NO: 2068012 - RNA, 19 nt, Homo sapiens
  misc_RNA (1)...(19): siRNA sense strand
cgaagucccaucagcagua

SEQ ID NO: 2068013 - RNA, 19 nt, Homo sapiens
  misc_RNA (1)...(19): siRNA sense strand
cugggaaccuaaucgauuu

SEQ ID NO: 2068014 - RNA, 19 nt, Homo sapiens
  misc_RNA (1)...(19): siRNA sense strand
cgagaacaguccagagauc

SEQ ID NO: 2068015 - RNA, 19 nt, Homo sapiens
  misc_RNA (1)...(19): siRNA sense strand
gcccuggucucccacuuug

SEQ ID NO: 2068016 - RNA, 19 nt, Homo sapiens
  misc_RNA (1)...(19): siRNA sense strand
gaucgcccaucauucugaa

SEQ ID NO: 2068017 - RNA, 19 nt, Homo sapiens
  misc_RNA (1)...(19): siRNA sense strand
uuacaacgacaccaaguuu

SEQ ID NO: 2068018 - RNA, 19 nt, Homo sapiens
  misc_RNA (1)...(19): siRNA sense strand
auagcaaccugcaguuuga

SEQ ID NO: 2068019 - RNA, 19 nt, Homo sapiens
  misc_RNA (1)...(19): siRNA sense strand
caacaagcugcucaucauu

SEQ ID NO: 2068020 - RNA, 19 nt, Homo sapiens
  misc_RNA (1)...(19): siRNA sense strand
ggguaucgccugugccuuu

SEQ ID NO: 2068021 - RNA, 19 nt, Homo sapiens
  misc_RNA (1)...(19): siRNA sense strand
ccucagccaugcucgacua

SEQ ID NO: 2068022 - RNA, 19 nt, Homo sapiens
  misc_RNA (1)...(19): siRNA sense strand
cagcauccaugacacagau

SEQ ID NO: 2068023 - RNA, 19 nt, Homo sapiens
  misc_RNA (1)...(19): siRNA sense strand
guggacgacuuguuugaga

SEQ ID NO: 2068024 - RNA, 19 nt, Homo sapiens
  misc_RNA (1)...(19): siRNA sense strand
gcgcaagucucgagaaaau

SEQ ID NO: 2068025 - RNA, 19 nt, Homo sapiens
  misc_RNA (1)...(19): siRNA sense strand
cuacuggagucuuggauca

SEQ ID NO: 2068026 - RNA, 19 nt, Homo sapiens
  misc_RNA (1)...(19): siRNA sense strand
cagaugaguuuggauuugu

SEQ ID NO: 2068027 - RNA, 19 nt, Homo sapiens
  misc_RNA (1)...(19): siRNA sense strand
ccacagaggagaucuugau

SEQ ID NO: 2068028 - RNA, 19 nt, Homo sapiens
  misc_RNA (1)...(19): siRNA sense strand
ucaucaagaucccuucaga

SEQ ID NO: 2068029 - RNA, 19 nt, Homo sapiens
  misc_RNA (1)...(19): siRNA sense strand
gcucaucauugacuacucu

SEQ ID NO: 2068030 - RNA, 19 nt, Homo sapiens
  misc_RNA (1)...(19): siRNA sense strand
aaugagaucuacuccuaug

SEQ ID NO: 2068031 - RNA, 19 nt, Homo sapiens
  misc_RNA (1)...(19): siRNA sense strand
gcuauacugugccaucaag

SEQ ID NO: 2068032 - RNA, 19 nt, Homo sapiens
  misc_RNA (1)...(19): siRNA sense strand
gcauggacaucagcaaucu

SEQ ID NO: 2068033 - RNA, 19 nt, Homo sapiens
  misc_RNA (1)...(19): siRNA sense strand
caaggagacagggaagaua

SEQ ID NO: 2068034 - RNA, 19 nt, Homo sapiens
  misc_RNA (1)...(19): siRNA sense strand
gaggacaucaccaccaaga

SEQ ID NO: 2068035 - RNA, 19 nt, Homo sapiens
  misc_RNA (1)...(19): siRNA sense strand
ucaagcagcagauggagaa

SEQ ID NO: 2068036 - RNA, 19 nt, Homo sapiens
  misc_RNA (1)...(19): siRNA sense strand
ccaucaaccgggucuauaa

SEQ ID NO: 2068037 - RNA, 19 nt, Homo sapiens
  misc_RNA (1)...(19): siRNA sense strand
gcaaccugcaguuugagua

SEQ ID NO: 2068038 - RNA, 19 nt, Homo sapiens
  misc_RNA (1)...(19): siRNA sense strand
gagcccauguggauagcaa

SEQ ID NO: 2068039 - RNA, 19 nt, Homo sapiens
  misc_RNA (1)...(19): siRNA sense strand
cgagaucgcccaccaugug

SEQ ID NO: 2068040 - RNA, 19 nt, Homo sapiens
  misc_RNA (1)...(19): siRNA sense strand
uguggcaucuggugaagaa

SEQ ID NO: 2068041 - RNA, 19 nt, Homo sapiens
  misc_RNA (1)...(19): siRNA sense strand
gacaucaccaccaagauug

SEQ ID NO: 2068042 - RNA, 19 nt, Homo sapiens
  misc_RNA (1)...(19): siRNA sense strand
ugaagguguuaaacuguga

SEQ ID NO: 2068043 - RNA, 19 nt, Homo sapiens
  misc_RNA (1)...(19): siRNA sense strand
ggauagcaaccugcaguuu

SEQ ID NO: 2068044 - RNA, 19 nt, Homo sapiens
  misc_RNA (1)...(19): siRNA sense strand
ggagcagcguggcagucua

SEQ ID NO: 2068045 - RNA, 19 nt, Homo sapiens
  misc_RNA (1)...(19): siRNA sense strand
cauguuugauuuccuagau

SEQ ID NO: 2068046 - RNA, 19 nt, Homo sapiens
  misc_RNA (1)...(19): siRNA sense strand
gcacagcauccaugacaca

SEQ ID NO: 2068047 - RNA, 19 nt, Homo sapiens
  misc_RNA (1)...(19): siRNA sense strand
caucagcucuccagaaaua

SEQ ID NO: 2068048 - RNA, 19 nt, Homo sapiens
  misc_RNA (1)...(19): siRNA sense strand
gaaucaagcaggagaauuu

SEQ ID NO: 2068049 - RNA, 19 nt, Homo sapiens
  misc_RNA (1)...(19): siRNA sense strand
gccgaaauguucaaguuua

SEQ ID NO: 2068050 - RNA, 19 nt, Homo sapiens
  misc_RNA (1)...(19): siRNA sense strand
gaagagcguuucccaaagu

SEQ ID NO: 2068051 - RNA, 19 nt, Homo sapiens
  misc_RNA (1)...(19): siRNA sense strand
gaacacuaaugaggaaauu

SEQ ID NO: 2068052 - RNA, 19 nt, Homo sapiens
  misc_RNA (1)...(19): siRNA sense strand
gaagguagagaaugaguuu

SEQ ID NO: 2068053 - RNA, 19 nt, Homo sapiens
  misc_RNA (1)...(19): siRNA sense strand
ugucagaggucaccaauga

SEQ ID NO: 2068054 - RNA, 19 nt, Homo sapiens
  misc_RNA (1)...(19): siRNA sense strand
ggaagaaagugaaauacag

SEQ ID NO: 2068055 - RNA, 19 nt, Homo sapiens
  misc_RNA (1)...(19): siRNA sense strand
gugagaagguagagaauga

SEQ ID NO: 2068056 - RNA, 19 nt, Homo sapiens
  misc_RNA (1)...(19): siRNA sense strand
cagaauggcucaaugauac

SEQ ID NO: 2068057 - RNA, 19 nt, Homo sapiens
  misc_RNA (1)...(19): siRNA sense strand
gccaucagcucuccagaaa

SEQ ID NO: 2068058 - RNA, 19 nt, Homo sapiens
  misc_RNA (1)...(19): siRNA sense strand
gaacagacccugccaccau

SEQ ID NO: 2068059 - RNA, 19 nt, Homo sapiens
  misc_RNA (1)...(19): siRNA sense strand
agaaguagcugcugcuguu

SEQ ID NO: 2068060 - RNA, 19 nt, Homo sapiens
  misc_RNA (1)...(19): siRNA sense strand
guacaaagcacgcggauag

SEQ ID NO: 2068061 - RNA, 19 nt, Homo sapiens
  misc_RNA (1)...(19): siRNA sense strand
ccaaauaucaggaagcaaa

SEQ ID NO: 2068062 - RNA, 19 nt, Homo sapiens
  misc_RNA (1)...(19): siRNA sense strand
gcaaagcccuaguucuaag

SEQ ID NO: 2068063 - RNA, 19 nt, Homo sapiens
  misc_RNA (1)...(19): siRNA sense strand
gaucucagccuguaggaaa

SEQ ID NO: 2068064 - RNA, 19 nt, Homo sapiens
  misc_RNA (1)...(19): siRNA sense strand
gcauauaacgagccucuaa

SEQ ID NO: 2068065 - RNA, 19 nt, Homo sapiens
  misc_RNA (1)...(19): siRNA sense strand
gaaagugaaauacaggaaa

SEQ ID NO: 2068066 - RNA, 19 nt, Homo sapiens
  misc_RNA (1)...(19): siRNA sense strand
cuaccgaaguuauaagaaa

SEQ ID NO: 2068067 - RNA, 19 nt, Homo sapiens
  misc_RNA (1)...(19): siRNA sense strand
gcuacuggcuccuucagaa

SEQ ID NO: 2068068 - RNA, 19 nt, Homo sapiens
  misc_RNA (1)...(19): siRNA sense strand
gaucaugggaacagcaaua

SEQ ID NO: 2068069 - RNA, 19 nt, Homo sapiens
  misc_RNA (1)...(19): siRNA sense strand
gaacagcaauaguagucau

SEQ ID NO: 2068070 - RNA, 19 nt, Homo sapiens
  misc_RNA (1)...(19): siRNA sense strand
gagagguggugaauacaga

SEQ ID NO: 2068071 - RNA, 19 nt, Homo sapiens
  misc_RNA (1)...(19): siRNA sense strand
gcagugagagccacaaaga

SEQ ID NO: 2068072 - RNA, 19 nt, Homo sapiens
  misc_RNA (1)...(19): siRNA sense strand
gauaaccaguucaggaugu

SEQ ID NO: 2068073 - RNA, 19 nt, Homo sapiens
  misc_RNA (1)...(19): siRNA sense strand
ccaacucggugguguuuga

SEQ ID NO: 2068074 - RNA, 19 nt, Homo sapiens
  misc_RNA (1)...(19): siRNA sense strand
cgaaauggacgaaagaaga

SEQ ID NO: 2068075 - RNA, 19 nt, Homo sapiens
  misc_RNA (1)...(19): siRNA sense strand
acagagagguggugaauac

SEQ ID NO: 2068076 - RNA, 19 nt, Homo sapiens
  misc_RNA (1)...(19): siRNA sense strand
aagcaaagcccuaguucua

SEQ ID NO: 2068077 - RNA, 19 nt, Homo sapiens
  misc_RNA (1)...(19): siRNA sense strand
gaagagcccagcacagaga

SEQ ID NO: 2068078 - RNA, 19 nt, Homo sapiens
  misc_RNA (1)...(19): siRNA sense strand
caaaaggagugaaagaauu

SEQ ID NO: 2068079 - RNA, 19 nt, Homo sapiens
  misc_RNA (1)...(19): siRNA sense strand
gaacuagcaccuacugugu

SEQ ID NO: 2068080 - RNA, 19 nt, Homo sapiens
  misc_RNA (1)...(19): siRNA sense strand
aaacaguacgcacuuuaua

SEQ ID NO: 2068081 - RNA, 19 nt, Homo sapiens
  misc_RNA (1)...(19): siRNA sense strand
ggaaauggcugccgaaaac

SEQ ID NO: 2068082 - RNA, 19 nt, Homo sapiens
  misc_RNA (1)...(19): siRNA sense strand
cagagcaaauuccgaaguu

SEQ ID NO: 2068083 - RNA, 19 nt, Homo sapiens
  misc_RNA (1)...(19): siRNA sense strand
gaaaccaccaugaacuuug

SEQ ID NO: 2068084 - RNA, 19 nt, Homo sapiens
  misc_RNA (1)...(19): siRNA sense strand
gcucaaugauacucuacaa

SEQ ID NO: 2068085 - RNA, 19 nt, Homo sapiens
  misc_RNA (1)...(19): siRNA sense strand
gcaagaagccagcaauaac

SEQ ID NO: 2068086 - RNA, 19 nt, Homo sapiens
  misc_RNA (1)...(19): siRNA sense strand
aaaccaccaugaacuuuga

SEQ ID NO: 2068087 - RNA, 19 nt, Homo sapiens
  misc_RNA (1)...(19): siRNA sense strand
gcaauaguagucauguaaa

SEQ ID NO: 2068088 - RNA, 19 nt, Homo sapiens
  misc_RNA (1)...(19): siRNA sense strand
ggacggcugugauuguaca

SEQ ID NO: 2068089 - RNA, 19 nt, Homo sapiens
  misc_RNA (1)...(19): siRNA sense strand
uaagaaauguggcaaaaga

SEQ ID NO: 2068090 - RNA, 19 nt, Homo sapiens
  misc_RNA (1)...(19): siRNA sense strand
ggauagcauugaccuggaa

SEQ ID NO: 2068091 - RNA, 19 nt, Homo sapiens
  misc_RNA (1)...(19): siRNA sense strand
gcaccacccuggagcagau

SEQ ID NO: 2068092 - RNA, 19 nt, Homo sapiens
  misc_RNA (1)...(19): siRNA sense strand
ccacagaauggcucaauga

SEQ ID NO: 2068093 - RNA, 19 nt, Homo sapiens
  misc_RNA (1)...(19): siRNA sense strand
gugagagccacaaagauua

SEQ ID NO: 2068094 - RNA, 19 nt, Homo sapiens
  misc_RNA (1)...(19): siRNA sense strand
ccaagggagucacuguuau

SEQ ID NO: 2068095 - RNA, 19 nt, Homo sapiens
  misc_RNA (1)...(19): siRNA sense strand
caugggaacagcaauagua

SEQ ID NO: 2068096 - RNA, 19 nt, Homo sapiens
  misc_RNA (1)...(19): siRNA sense strand
caaagcagggccagacgua

SEQ ID NO: 2068097 - RNA, 19 nt, Homo sapiens
  misc_RNA (1)...(19): siRNA sense strand
ccaccaacguguccgaaga

SEQ ID NO: 2068098 - RNA, 19 nt, Homo sapiens
  misc_RNA (1)...(19): siRNA sense strand
gcgaagagcccagcacaga

SEQ ID NO: 2068099 - RNA, 19 nt, Homo sapiens
  misc_RNA (1)...(19): siRNA sense strand
ggaucaagcugcucgaaaa

SEQ ID NO: 2068100 - RNA, 19 nt, Homo sapiens
  misc_RNA (1)...(19): siRNA sense strand
gcagaacacauuauugaag

SEQ ID NO: 2068101 - RNA, 19 nt, Homo sapiens
  misc_RNA (1)...(19): siRNA sense strand
gggagucacuguuauugca

SEQ ID NO: 2068102 - RNA, 19 nt, Homo sapiens
  misc_RNA (1)...(19): siRNA sense strand
gaccuuggcagaacacauu

SEQ ID NO: 2068103 - RNA, 19 nt, Homo sapiens
  misc_RNA (1)...(19): siRNA sense strand
gagcugagaagaccucguu

SEQ ID NO: 2068104 - RNA, 19 nt, Homo sapiens
  misc_RNA (1)...(19): siRNA sense strand
cagcaauaguagucaugua

SEQ ID NO: 2068105 - RNA, 19 nt, Homo sapiens
  misc_RNA (1)...(19): siRNA sense strand
gacacaggcugccauccuu

SEQ ID NO: 2068106 - RNA, 19 nt, Homo sapiens
  misc_RNA (1)...(19): siRNA sense strand
ggcaagaagccagcaauaa

SEQ ID NO: 2068107 - RNA, 19 nt, Homo sapiens
  misc_RNA (1)...(19): siRNA sense strand
acaggaagaaagugaaaua

SEQ ID NO: 2068108 - RNA, 19 nt, Homo sapiens
  misc_RNA (1)...(19): siRNA sense strand
caacaggaagaaagugaaa

SEQ ID NO: 2068109 - RNA, 19 nt, Homo sapiens
  misc_RNA (1)...(19): siRNA sense strand
augaggaaauugcagcuua

SEQ ID NO: 2068110 - RNA, 19 nt, Homo sapiens
  misc_RNA (1)...(19): siRNA sense strand
uugaaugucugccgaaaug

SEQ ID NO: 2068111 - RNA, 19 nt, Homo sapiens
  misc_RNA (1)...(19): siRNA sense strand
ccaaugaguguccugauga

SEQ ID NO: 2068112 - RNA, 19 nt, Homo sapiens
  misc_RNA (1)...(19): siRNA sense strand
cgaaguuacuaugaacaaa

SEQ ID NO: 2068113 - RNA, 19 nt, Homo sapiens
  misc_RNA (1)...(19): siRNA sense strand
gaaauggacgaaagaagag

SEQ ID NO: 2068114 - RNA, 19 nt, Homo sapiens
  misc_RNA (1)...(19): siRNA sense strand
gauccgaagugcauauaac

SEQ ID NO: 2068115 - RNA, 19 nt, Homo sapiens
  misc_RNA (1)...(19): siRNA sense strand
gaccagagaggaccacaug

SEQ ID NO: 2068116 - RNA, 19 nt, Homo sapiens
  misc_RNA (1)...(19): siRNA sense strand
uauaaacaguacgcacuuu

SEQ ID NO: 2068117 - RNA, 19 nt, Homo sapiens
  misc_RNA (1)...(19): siRNA sense strand
gaaguagcugcugcuguua

SEQ ID NO: 2068118 - RNA, 19 nt, Homo sapiens
  misc_RNA (1)...(19): siRNA sense strand
uggcagaacacauuauuga

SEQ ID NO: 2068119 - RNA, 19 nt, Homo sapiens
  misc_RNA (1)...(19): siRNA sense strand
uccagagacugcagcauuu

SEQ ID NO: 2068120 - RNA, 19 nt, Homo sapiens
  misc_RNA (1)...(19): siRNA sense strand
gagcguuucccaaagugua

SEQ ID NO: 2068121 - RNA, 19 nt, Homo sapiens
  misc_RNA (1)...(19): siRNA sense strand
caagggagucacuguuauu

SEQ ID NO: 2068122 - RNA, 19 nt, Homo sapiens
  misc_RNA (1)...(19): siRNA sense strand
ucaaauggcguacaaagca

SEQ ID NO: 2068123 - RNA, 19 nt, Homo sapiens
  misc_RNA (1)...(19): siRNA sense strand
ccgacuguuuccuuaauaa

SEQ ID NO: 2068124 - RNA, 19 nt, Homo sapiens
  misc_RNA (1)...(19): siRNA sense strand
ugaggaaauugcagcuuau

SEQ ID NO: 2068125 - RNA, 19 nt, Homo sapiens
  misc_RNA (1)...(19): siRNA sense strand
gaaugucugccgaaauguu

SEQ ID NO: 2068126 - RNA, 19 nt, Homo sapiens
  misc_RNA (1)...(19): siRNA sense strand
ccagagaggaccacaugaa

SEQ ID NO: 2068127 - RNA, 19 nt, Homo sapiens
  misc_RNA (1)...(19): siRNA sense strand
acagaauggcucaaugaua

SEQ ID NO: 2068128 - RNA, 19 nt, Homo sapiens
  misc_RNA (1)...(19): siRNA sense strand
cagagaggaccacaugaaa

SEQ ID NO: 2068129 - RNA, 19 nt, Homo sapiens
  misc_RNA (1)...(19): siRNA sense strand
caaaaguacuaccgaaguu

SEQ ID NO: 2068130 - RNA, 19 nt, Homo sapiens
  misc_RNA (1)...(19): siRNA sense strand
gcaaauuccgaaguuacua

SEQ ID NO: 2068131 - RNA, 19 nt, Homo sapiens
  misc_RNA (1)...(19): siRNA sense strand
aaagugaaauacaggaaag

SEQ ID NO: 2068132 - RNA, 19 nt, Homo sapiens
  misc_RNA (1)...(19): siRNA sense strand
agagcaaauuccgaaguua

SEQ ID NO: 2068133 - RNA, 19 nt, Homo sapiens
  misc_RNA (1)...(19): siRNA sense strand
acaguacgcacuuuauaaa

SEQ ID NO: 2068134 - RNA, 19 nt, Homo sapiens
  misc_RNA (1)...(19): siRNA sense strand
gcgggaacagcaagaagua

SEQ ID NO: 2068135 - RNA, 19 nt, Homo sapiens
  misc_RNA (1)...(19): siRNA sense strand
uaacagagagguggugaau

SEQ ID NO: 2068136 - RNA, 19 nt, Homo sapiens
  misc_RNA (1)...(19): siRNA sense strand
caacaccgugccaccuaua

SEQ ID NO: 2068137 - RNA, 19 nt, Homo sapiens
  misc_RNA (1)...(19): siRNA sense strand
ggagugaagguccucauca

SEQ ID NO: 2068138 - RNA, 19 nt, Homo sapiens
  misc_RNA (1)...(19): siRNA sense strand
ccacgguguucaugucaga

SEQ ID NO: 2068139 - RNA, 19 nt, Homo sapiens
  misc_RNA (1)...(19): siRNA sense strand
ucaaugauacucuacaaca

SEQ ID NO: 2068140 - RNA, 19 nt, Homo sapiens
  misc_RNA (1)...(19): siRNA sense strand
ggaagcaaagcccuaguuc

SEQ ID NO: 2068141 - RNA, 19 nt, Homo sapiens
  misc_RNA (1)...(19): siRNA sense strand
gagaggaccacaugaaacu

SEQ ID NO: 2068142 - RNA, 19 nt, Homo sapiens
  misc_RNA (1)...(19): siRNA sense strand
aggcaccgcuggaacacua

SEQ ID NO: 2068143 - RNA, 19 nt, Homo sapiens
  misc_RNA (1)...(19): siRNA sense strand
ugagaaacacgaagaaugg

SEQ ID NO: 2068144 - RNA, 19 nt, Homo sapiens
  misc_RNA (1)...(19): siRNA sense strand
ccagugagaagguagagaa

SEQ ID NO: 2068145 - RNA, 19 nt, Homo sapiens
  misc_RNA (1)...(19): siRNA sense strand
gcccauggaugacauacag

SEQ ID NO: 2068146 - RNA, 19 nt, Homo sapiens
  misc_RNA (1)...(19): siRNA sense strand
cagcgugcaucacaagugu

SEQ ID NO: 2068147 - RNA, 19 nt, Homo sapiens
  misc_RNA (1)...(19): siRNA sense strand
ggacagcuccgagucauuu

SEQ ID NO: 2068148 - RNA, 19 nt, Homo sapiens
  misc_RNA (1)...(19): siRNA sense strand
gaaaccagcaggagaagga

SEQ ID NO: 2068149 - RNA, 19 nt, Homo sapiens
  misc_RNA (1)...(19): siRNA sense strand
uggagaagcuggaggaguu

SEQ ID NO: 2068150 - RNA, 19 nt, Homo sapiens
  misc_RNA (1)...(19): siRNA sense strand
caucagaggcguaucagaa

SEQ ID NO: 2068151 - RNA, 19 nt, Homo sapiens
  misc_RNA (1)...(19): siRNA sense strand
gagacgcccuuucauucuu

SEQ ID NO: 2068152 - RNA, 19 nt, Homo sapiens
  misc_RNA (1)...(19): siRNA sense strand
cgaguucgccucauccuuu

SEQ ID NO: 2068153 - RNA, 19 nt, Homo sapiens
  misc_RNA (1)...(19): siRNA sense strand
ucaacggcgugaaguauga

SEQ ID NO: 2068154 - RNA, 19 nt, Homo sapiens
  misc_RNA (1)...(19): siRNA sense strand
gcacacggccaccaacuuc

SEQ ID NO: 2068155 - RNA, 19 nt, Homo sapiens
  misc_RNA (1)...(19): siRNA sense strand
aguaagaagucauggauuc

SEQ ID NO: 2068156 - RNA, 19 nt, Homo sapiens
  misc_RNA (1)...(19): siRNA sense strand
caacggcugcauucucuuu

SEQ ID NO: 2068157 - RNA, 19 nt, Homo sapiens
  misc_RNA (1)...(19): siRNA sense strand
gucagcagguggccaauau

SEQ ID NO: 2068158 - RNA, 19 nt, Homo sapiens
  misc_RNA (1)...(19): siRNA sense strand
gcacacaucagaggcguau

SEQ ID NO: 2068159 - RNA, 19 nt, Homo sapiens
  misc_RNA (1)...(19): siRNA sense strand
gaguucgccucauccuuug

SEQ ID NO: 2068160 - RNA, 19 nt, Homo sapiens
  misc_RNA (1)...(19): siRNA sense strand
gcucugcgauuacuaucag

SEQ ID NO: 2068161 - RNA, 19 nt, Homo sapiens
  misc_RNA (1)...(19): siRNA sense strand
ggagacgcccuuucauucu

SEQ ID NO: 2068162 - RNA, 19 nt, Homo sapiens
  misc_RNA (1)...(19): siRNA sense strand
gaacucccugugcauguug

SEQ ID NO: 2068163 - RNA, 19 nt, Homo sapiens
  misc_RNA (1)...(19): siRNA sense strand
cugcauaaccuacgggauu

SEQ ID NO: 2068164 - RNA, 19 nt, Homo sapiens
  misc_RNA (1)...(19): siRNA sense strand
ggauguugcucuucuacac

SEQ ID NO: 2068165 - RNA, 19 nt, Homo sapiens
  misc_RNA (1)...(19): siRNA sense strand
gcucaacggcgugaaguau

SEQ ID NO: 2068166 - RNA, 19 nt, Homo sapiens
  misc_RNA (1)...(19): siRNA sense strand
ggaggaggcuuuggauacg

SEQ ID NO: 2068167 - RNA, 19 nt, Homo sapiens
  misc_RNA (1)...(19): siRNA sense strand
gagaagcgggcagccauga

SEQ ID NO: 2068168 - RNA, 19 nt, Homo sapiens
  misc_RNA (1)...(19): siRNA sense strand
uagacagcguccucauuga

SEQ ID NO: 2068169 - RNA, 19 nt, Homo sapiens
  misc_RNA (1)...(19): siRNA sense strand
cagaggcguaucagaagua

SEQ ID NO: 2068170 - RNA, 19 nt, Homo sapiens
  misc_RNA (1)...(19): siRNA sense strand
ugaacucccugugcauguu

SEQ ID NO: 2068171 - RNA, 19 nt, Homo sapiens
  misc_RNA (1)...(19): siRNA sense strand
gaagcgggcagccaugaag

SEQ ID NO: 2068172 - RNA, 19 nt, Homo sapiens
  misc_RNA (1)...(19): siRNA sense strand
ugcauaaccuacgggauuu

SEQ ID NO: 2068173 - RNA, 19 nt, Homo sapiens
  misc_RNA (1)...(19): siRNA sense strand
acucagcuauccuggagaa

SEQ ID NO: 2068174 - RNA, 19 nt, Homo sapiens
  misc_RNA (1)...(19): siRNA sense strand
ugaagagaccucagaccuu

SEQ ID NO: 2068175 - RNA, 19 nt, Homo sapiens
  misc_RNA (1)...(19): siRNA sense strand
cauagacagcguccucauu

SEQ ID NO: 2068176 - RNA, 19 nt, Homo sapiens
  misc_RNA (1)...(19): siRNA sense strand
guuaaacucuuggcugaac

SEQ ID NO: 2068177 - RNA, 19 nt, Homo sapiens
  misc_RNA (1)...(19): siRNA sense strand
ucuccgaacacaaauauug

SEQ ID NO: 2068178 - RNA, 19 nt, Homo sapiens
  misc_RNA (1)...(19): siRNA sense strand
auagacagcguccucauug

SEQ ID NO: 2068179 - RNA, 19 nt, Homo sapiens
  misc_RNA (1)...(19): siRNA sense strand
ccucccuguuugucauuua

SEQ ID NO: 2068180 - RNA, 19 nt, Homo sapiens
  misc_RNA (1)...(19): siRNA sense strand
ccuguacuccucccuguuu

SEQ ID NO: 2068181 - RNA, 19 nt, Homo sapiens
  misc_RNA (1)...(19): siRNA sense strand
cgucaucucuccgaacaca

SEQ ID NO: 2068182 - RNA, 19 nt, Homo sapiens
  misc_RNA (1)...(19): siRNA sense strand
gguccugucgcucugcaua

SEQ ID NO: 2068183 - RNA, 19 nt, Homo sapiens
  misc_RNA (1)...(19): siRNA sense strand
agacgcccuuucauucuug

SEQ ID NO: 2068184 - RNA, 19 nt, Homo sapiens
  misc_RNA (1)...(19): siRNA sense strand
ggaccgaggccugaacauc

SEQ ID NO: 2068185 - RNA, 19 nt, Homo sapiens
  misc_RNA (1)...(19): siRNA sense strand
cagccacgccuacaugaug

SEQ ID NO: 2068186 - RNA, 19 nt, Homo sapiens
  misc_RNA (1)...(19): siRNA sense strand
cuucagugcugccuucuac

SEQ ID NO: 2068187 - RNA, 19 nt, Homo sapiens
  misc_RNA (1)...(19): siRNA sense strand
guacuuccuggcucagauu

SEQ ID NO: 2068188 - RNA, 19 nt, Homo sapiens
  misc_RNA (1)...(19): siRNA sense strand
gaguaagaagucauggauu

SEQ ID NO: 2068189 - RNA, 19 nt, Homo sapiens
  misc_RNA (1)...(19): siRNA sense strand
ucuacagccuggugugguu

SEQ ID NO: 2068190 - RNA, 19 nt, Homo sapiens
  misc_RNA (1)...(19): siRNA sense strand
ucagaggcguaucagaagu

SEQ ID NO: 2068191 - RNA, 19 nt, Homo sapiens
  misc_RNA (1)...(19): siRNA sense strand
ugacgggcaucagcgaguu

SEQ ID NO: 2068192 - RNA, 19 nt, Homo sapiens
  misc_RNA (1)...(19): siRNA sense strand
ccgagucauuuaccucuuc

SEQ ID NO: 2068193 - RNA, 19 nt, Homo sapiens
  misc_RNA (1)...(19): siRNA sense strand
acacaucagaggcguauca

SEQ ID NO: 2068194 - RNA, 19 nt, Homo sapiens
  misc_RNA (1)...(19): siRNA sense strand
gcgguguggugcugaugga

SEQ ID NO: 2068195 - RNA, 19 nt, Homo sapiens
  misc_RNA (1)...(19): siRNA sense strand
cgcuugagcugguggacuu

SEQ ID NO: 2068196 - RNA, 19 nt, Homo sapiens
  misc_RNA (1)...(19): siRNA sense strand
gacagcuccgagucauuua

SEQ ID NO: 2068197 - RNA, 19 nt, Homo sapiens
  misc_RNA (1)...(19): siRNA sense strand
caaguacggcagcuucauc

SEQ ID NO: 2068198 - RNA, 19 nt, Homo sapiens
  misc_RNA (1)...(19): siRNA sense strand
ggccaacaacuucaaacga

SEQ ID NO: 2068199 - RNA, 19 nt, Homo sapiens
  misc_RNA (1)...(19): siRNA sense strand
ccaggaccguggacuucug

SEQ ID NO: 2068200 - RNA, 19 nt, Homo sapiens
  misc_RNA (1)...(19): siRNA sense strand
cugcugagcugccaguacu

SEQ ID NO: 2068201 - RNA, 19 nt, Homo sapiens
  misc_RNA (1)...(19): siRNA sense strand
cgagucauuuaccucuuca

SEQ ID NO: 2068202 - RNA, 19 nt, Homo sapiens
  misc_RNA (1)...(19): siRNA sense strand
gucgucaucucuccgaaca

SEQ ID NO: 2068203 - RNA, 19 nt, Homo sapiens
  misc_RNA (1)...(19): siRNA sense strand
ugggcgaggugguguuuca

SEQ ID NO: 2068204 - RNA, 19 nt, Homo sapiens
  misc_RNA (1)...(19): siRNA sense strand
gcucuucuacacagacuuc

SEQ ID NO: 2068205 - RNA, 19 nt, Homo sapiens
  misc_RNA (1)...(19): siRNA sense strand
aggagacgcccuuucauuc

SEQ ID NO: 2068206 - RNA, 19 nt, Homo sapiens
  misc_RNA (1)...(19): siRNA sense strand
gcaugggcguggacaucuc

SEQ ID NO: 2068207 - RNA, 19 nt, Homo sapiens
  misc_RNA (1)...(19): siRNA sense strand
ucaucucuccgaacacaaa

SEQ ID NO: 2068208 - RNA, 19 nt, Homo sapiens
  misc_RNA (1)...(19): siRNA sense strand
gcuccuuggacaccucuaa

SEQ ID NO: 2068209 - RNA, 19 nt, Homo sapiens
  misc_RNA (1)...(19): siRNA sense strand
gccucucgcucuugcugaa

SEQ ID NO: 2068210 - RNA, 19 nt, Homo sapiens
  misc_RNA (1)...(19): siRNA sense strand
guguggugcugauggacuu

SEQ ID NO: 2068211 - RNA, 19 nt, Homo sapiens
  misc_RNA (1)...(19): siRNA sense strand
agaguaagaagucauggau

SEQ ID NO: 2068212 - RNA, 19 nt, Homo sapiens
  misc_RNA (1)...(19): siRNA sense strand
cggaggaggcuuuggauac

SEQ ID NO: 2068213 - RNA, 19 nt, Homo sapiens
  misc_RNA (1)...(19): siRNA sense strand
aggcguaucagaaguacaa

SEQ ID NO: 2068214 - RNA, 19 nt, Homo sapiens
  misc_RNA (1)...(19): siRNA sense strand
ccaacggggugauguacuu

SEQ ID NO: 2068215 - RNA, 19 nt, Homo sapiens
  misc_RNA (1)...(19): siRNA sense strand
gauguugcucuucuacaca

SEQ ID NO: 2068216 - RNA, 19 nt, Homo sapiens
  misc_RNA (1)...(19): siRNA sense strand
ggacgucccuggagaagaa

SEQ ID NO: 2068217 - RNA, 19 nt, Homo sapiens
  misc_RNA (1)...(19): siRNA sense strand
gcaggacguucaacaauga

SEQ ID NO: 2068218 - RNA, 19 nt, Homo sapiens
  misc_RNA (1)...(19): siRNA sense strand
gcagugagauccuguuugg

SEQ ID NO: 2068219 - RNA, 19 nt, Homo sapiens
  misc_RNA (1)...(19): siRNA sense strand
gcggcaagaucuacuauga

SEQ ID NO: 2068220 - RNA, 19 nt, Homo sapiens
  misc_RNA (1)...(19): siRNA sense strand
ggaagcagauauucaugga

SEQ ID NO: 2068221 - RNA, 19 nt, Homo sapiens
  misc_RNA (1)...(19): siRNA sense strand
gcagagcggcuauaagauu

SEQ ID NO: 2068222 - RNA, 19 nt, Homo sapiens
  misc_RNA (1)...(19): siRNA sense strand
guacaucucuaaagugaag

SEQ ID NO: 2068223 - RNA, 19 nt, Homo sapiens
  misc_RNA (1)...(19): siRNA sense strand
gaacaacgggcuaaguuuc

SEQ ID NO: 2068224 - RNA, 19 nt, Homo sapiens
  misc_RNA (1)...(19): siRNA sense strand
aagcagauauucauggaaa

SEQ ID NO: 2068225 - RNA, 19 nt, Homo sapiens
  misc_RNA (1)...(19): siRNA sense strand
gcgcuuaagucccaguuug

SEQ ID NO: 2068226 - RNA, 19 nt, Homo sapiens
  misc_RNA (1)...(19): siRNA sense strand
ggaacaacgggcuaaguuu

SEQ ID NO: 2068227 - RNA, 19 nt, Homo sapiens
  misc_RNA (1)...(19): siRNA sense strand
guguacaucucuaaaguga

SEQ ID NO: 2068228 - RNA, 19 nt, Homo sapiens
  misc_RNA (1)...(19): siRNA sense strand
gagggcaucuccugcauca

SEQ ID NO: 2068229 - RNA, 19 nt, Homo sapiens
  misc_RNA (1)...(19): siRNA sense strand
ccagcucgcucaugaccua

SEQ ID NO: 2068230 - RNA, 19 nt, Homo sapiens
  misc_RNA (1)...(19): siRNA sense strand
gggcuaaguuucagagcuu

SEQ ID NO: 2068231 - RNA, 19 nt, Homo sapiens
  misc_RNA (1)...(19): siRNA sense strand
cuacgcagcuaacgucuuc

SEQ ID NO: 2068232 - RNA, 19 nt, Homo sapiens
  misc_RNA (1)...(19): siRNA sense strand
ggacaaccacgucauugga

SEQ ID NO: 2068233 - RNA, 19 nt, Homo sapiens
  misc_RNA (1)...(19): siRNA sense strand
gcuucgggcuucuggagua

SEQ ID NO: 2068234 - RNA, 19 nt, Homo sapiens
  misc_RNA (1)...(19): siRNA sense strand
gaagugcgcaggacguuca

SEQ ID NO: 2068235 - RNA, 19 nt, Homo sapiens
  misc_RNA (1)...(19): siRNA sense strand
caagcagucuaccagcaaa

SEQ ID NO: 2068236 - RNA, 19 nt, Homo sapiens
  misc_RNA (1)...(19): siRNA sense strand
gcugaccgcuuguaugucu

SEQ ID NO: 2068237 - RNA, 19 nt, Homo sapiens
  misc_RNA (1)...(19): siRNA sense strand
uacccuaccuggaugauga

SEQ ID NO: 2068238 - RNA, 19 nt, Homo sapiens
  misc_RNA (1)...(19): siRNA sense strand
cuacaacgccuuugagauc

SEQ ID NO: 2068239 - RNA, 19 nt, Homo sapiens
  misc_RNA (1)...(19): siRNA sense strand
gcauugguguggacgaugu

SEQ ID NO: 2068240 - RNA, 19 nt, Homo sapiens
  misc_RNA (1)...(19): siRNA sense strand
gcaaaguccagguucucua

SEQ ID NO: 2068241 - RNA, 19 nt, Homo sapiens
  misc_RNA (1)...(19): siRNA sense strand
gcaagauuguggcacucaa

SEQ ID NO: 2068242 - RNA, 19 nt, Homo sapiens
  misc_RNA (1)...(19): siRNA sense strand
cagagcggcuauaagauuc

SEQ ID NO: 2068243 - RNA, 19 nt, Homo sapiens
  misc_RNA (1)...(19): siRNA sense strand
gauauucauggaaaucgua

SEQ ID NO: 2068244 - RNA, 19 nt, Homo sapiens
  misc_RNA (1)...(19): siRNA sense strand
cagccuucauguuccuuua

SEQ ID NO: 2068245 - RNA, 19 nt, Homo sapiens
  misc_RNA (1)...(19): siRNA sense strand
gggccucucugcagacaau

SEQ ID NO: 2068246 - RNA, 19 nt, Homo sapiens
  misc_RNA (1)...(19): siRNA sense strand
gaagaagcaacgggugaaa

SEQ ID NO: 2068247 - RNA, 19 nt, Homo sapiens
  misc_RNA (1)...(19): siRNA sense strand
caaaguccagguucucuau

SEQ ID NO: 2068248 - RNA, 19 nt, Homo sapiens
  misc_RNA (1)...(19): siRNA sense strand
ggaaauugggcaccugugu

SEQ ID NO: 2068249 - RNA, 19 nt, Homo sapiens
  misc_RNA (1)...(19): siRNA sense strand
gacgaugucuuuguguuca

SEQ ID NO: 2068250 - RNA, 19 nt, Homo sapiens
  misc_RNA (1)...(19): siRNA sense strand
ugacgaccuuggccuguga

SEQ ID NO: 2068251 - RNA, 19 nt, Homo sapiens
  misc_RNA (1)...(19): siRNA sense strand
cugcagagcggcuauaaga

SEQ ID NO: 2068252 - RNA, 19 nt, Homo sapiens
  misc_RNA (1)...(19): siRNA sense strand
cagcagcuuugaccucuuc

SEQ ID NO: 2068253 - RNA, 19 nt, Homo sapiens
  misc_RNA (1)...(19): siRNA sense strand
acauugacaucuccuacaa

SEQ ID NO: 2068254 - RNA, 19 nt, Homo sapiens
  misc_RNA (1)...(19): siRNA sense strand
ccacgacuuuggccuguuc

SEQ ID NO: 2068255 - RNA, 19 nt, Homo sapiens
  misc_RNA (1)...(19): siRNA sense strand
gagcaccccugcccaacua

SEQ ID NO: 2068256 - RNA, 19 nt, Homo sapiens
  misc_RNA (1)...(19): siRNA sense strand
ggaagaagcaacgggugaa

SEQ ID NO: 2068257 - RNA, 19 nt, Homo sapiens
  misc_RNA (1)...(19): siRNA sense strand
uaccaaaggcuucuucuuc

SEQ ID NO: 2068258 - RNA, 19 nt, Homo sapiens
  misc_RNA (1)...(19): siRNA sense strand
ggacgaugucuuuguguuc

SEQ ID NO: 2068259 - RNA, 19 nt, Homo sapiens
  misc_RNA (1)...(19): siRNA sense strand
gcucaguguuccuguccuu

SEQ ID NO: 2068260 - RNA, 19 nt, Homo sapiens
  misc_RNA (1)...(19): siRNA sense strand
gugcugggcuggugcucuu

SEQ ID NO: 2068261 - RNA, 19 nt, Homo sapiens
  misc_RNA (1)...(19): siRNA sense strand
gcgcaggacguucaacaau

SEQ ID NO: 2068262 - RNA, 19 nt, Homo sapiens
  misc_RNA (1)...(19): siRNA sense strand
gcacucggcagguggacaa

SEQ ID NO: 2068263 - RNA, 19 nt, Homo sapiens
  misc_RNA (1)...(19): siRNA sense strand
gcgcaucgagcucaucuuc

SEQ ID NO: 2068264 - RNA, 19 nt, Homo sapiens
  misc_RNA (1)...(19): siRNA sense strand
uacaggcucucccucaaug

SEQ ID NO: 2068265 - RNA, 19 nt, Homo sapiens
  misc_RNA (1)...(19): siRNA sense strand
gcaucgagcucaucuuccu

SEQ ID NO: 2068266 - RNA, 19 nt, Homo sapiens
  misc_RNA (1)...(19): siRNA sense strand
acccugaguucuacuggua

SEQ ID NO: 2068267 - RNA, 19 nt, Homo sapiens
  misc_RNA (1)...(19): siRNA sense strand
gcacuggaagcagauauuc

SEQ ID NO: 2068268 - RNA, 19 nt, Homo sapiens
  misc_RNA (1)...(19): siRNA sense strand
uuuguggucuucggcauua

SEQ ID NO: 2068269 - RNA, 19 nt, Homo sapiens
  misc_RNA (1)...(19): siRNA sense strand
guacuugggcauccugaau

SEQ ID NO: 2068270 - RNA, 19 nt, Homo sapiens
  misc_RNA (1)...(19): siRNA sense strand
gggcugggccuucaccaau

SEQ ID NO: 2068271 - RNA, 19 nt, Homo sapiens
  misc_RNA (1)...(19): siRNA sense strand
cuucgugccuagugagaaa

SEQ ID NO: 2068272 - RNA, 19 nt, Homo sapiens
  misc_RNA (1)...(19): siRNA sense strand
gcaccguguacaucucuaa

SEQ ID NO: 2068273 - RNA, 19 nt, Homo sapiens
  misc_RNA (1)...(19): siRNA sense strand
cgcaggacguucaacaaug

SEQ ID NO: 2068274 - RNA, 19 nt, Homo sapiens
  misc_RNA (1)...(19): siRNA sense strand
acccaccgcuggacauuga

SEQ ID NO: 2068275 - RNA, 19 nt, Homo sapiens
  misc_RNA (1)...(19): siRNA sense strand
gcagauauucauggaaauc

SEQ ID NO: 2068276 - RNA, 19 nt, Homo sapiens
  misc_RNA (1)...(19): siRNA sense strand
cgaggaagagccaguguca

SEQ ID NO: 2068277 - RNA, 19 nt, Homo sapiens
  misc_RNA (1)...(19): siRNA sense strand
gcuacagcaucuccuccuu

SEQ ID NO: 2068278 - RNA, 19 nt, Homo sapiens
  misc_RNA (1)...(19): siRNA sense strand
aggccacccugcaggauuu

SEQ ID NO: 2068279 - RNA, 19 nt, Homo sapiens
  misc_RNA (1)...(19): siRNA sense strand
cagaauugcagccggaaga

SEQ ID NO: 2068280 - RNA, 19 nt, Homo sapiens
  misc_RNA (1)...(19): siRNA sense strand
ggagacccggguaguguug

SEQ ID NO: 2068281 - RNA, 19 nt, Homo sapiens
  misc_RNA (1)...(19): siRNA sense strand
gcgcagugagauccuguuu

SEQ ID NO: 2068282 - RNA, 19 nt, Homo sapiens
  misc_RNA (1)...(19): siRNA sense strand
gaagcagauauucauggaa

SEQ ID NO: 2068283 - RNA, 19 nt, Homo sapiens
  misc_RNA (1)...(19): siRNA sense strand
ccaaaggcuucuucuucgu

SEQ ID NO: 2068284 - RNA, 19 nt, Homo sapiens
  misc_RNA (1)...(19): siRNA sense strand
gcaggaggaggaagaagca

SEQ ID NO: 2068285 - RNA, 19 nt, Homo sapiens
  misc_RNA (1)...(19): siRNA sense strand
caagagccgcugggugauu

SEQ ID NO: 2068286 - RNA, 19 nt, Homo sapiens
  misc_RNA (1)...(19): siRNA sense strand
gacuuuggccuguucaugu

SEQ ID NO: 2068287 - RNA, 19 nt, Homo sapiens
  misc_RNA (1)...(19): siRNA sense strand
cagaccuguuugacuauga

SEQ ID NO: 2068288 - RNA, 19 nt, Homo sapiens
  misc_RNA (1)...(19): siRNA sense strand
agaccuguuugacuaugaa

SEQ ID NO: 2068289 - RNA, 19 nt, Homo sapiens
  misc_RNA (1)...(19): siRNA sense strand
gcuccuccguggauuacug

SEQ ID NO: 2068290 - RNA, 19 nt, Homo sapiens
  misc_RNA (1)...(19): siRNA sense strand
aagagccgcugggugauug

SEQ ID NO: 2068291 - RNA, 19 nt, Homo sapiens
  misc_RNA (1)...(19): siRNA sense strand
ggaagaccucccugcacuu

SEQ ID NO: 2068292 - RNA, 19 nt, Homo sapiens
  misc_RNA (1)...(19): siRNA sense strand
gaccagcugccaccagaau

SEQ ID NO: 2068293 - RNA, 19 nt, Homo sapiens
  misc_RNA (1)...(19): siRNA sense strand
ggucuuugguauccaguac

SEQ ID NO: 2068294 - RNA, 19 nt, Homo sapiens
  misc_RNA (1)...(19): siRNA sense strand
cccacgaggugcucaagga

SEQ ID NO: 2068295 - RNA, 19 nt, Homo sapiens
  misc_RNA (1)...(19): siRNA sense strand
agcaacgggugaaaccuuu

SEQ ID NO: 2068296 - RNA, 19 nt, Homo sapiens
  misc_RNA (1)...(19): siRNA sense strand
ccguguacaucucuaaagu

SEQ ID NO: 2068297 - RNA, 19 nt, Homo sapiens
  misc_RNA (1)...(19): siRNA sense strand
cuacucuuccggccugaua

SEQ ID NO: 2068298 - RNA, 19 nt, Homo sapiens
  misc_RNA (1)...(19): siRNA sense strand
gcccuuaccgggacacuuc

SEQ ID NO: 2068299 - RNA, 19 nt, Homo sapiens
  misc_RNA (1)...(19): siRNA sense strand
ccagcugccaccagaauug

SEQ ID NO: 2068300 - RNA, 19 nt, Homo sapiens
  misc_RNA (1)...(19): siRNA sense strand
ccugucagccuucauguuc

SEQ ID NO: 2068301 - RNA, 19 nt, Homo sapiens
  misc_RNA (1)...(19): siRNA sense strand
gggcauugguguggacgau

SEQ ID NO: 2068302 - RNA, 19 nt, Homo sapiens
  misc_RNA (1)...(19): siRNA sense strand
ccaagcagucuaccagcaa

SEQ ID NO: 2068303 - RNA, 19 nt, Homo sapiens
  misc_RNA (1)...(19): siRNA sense strand
caugagaucgagcgcaaga

SEQ ID NO: 2068304 - RNA, 19 nt, Homo sapiens
  misc_RNA (1)...(19): siRNA sense strand
gcucgcucaugaccuacuu

SEQ ID NO: 2068305 - RNA, 19 nt, Homo sapiens
  misc_RNA (1)...(19): siRNA sense strand
gccaaguucggcaagauug

SEQ ID NO: 2068306 - RNA, 19 nt, Homo sapiens
  misc_RNA (1)...(19): siRNA sense strand
ggaucuccauggcuuucga

SEQ ID NO: 2068307 - RNA, 19 nt, Homo sapiens
  misc_RNA (1)...(19): siRNA sense strand
gauccacaccguccaaacu

SEQ ID NO: 2068308 - RNA, 19 nt, Homo sapiens
  misc_RNA (1)...(19): siRNA sense strand
uggacgaugucuuuguguu

SEQ ID NO: 2068309 - RNA, 19 nt, Homo sapiens
  misc_RNA (1)...(19): siRNA sense strand
ccagcaaaguccagguucu

SEQ ID NO: 2068310 - RNA, 19 nt, Homo sapiens
  misc_RNA (1)...(19): siRNA sense strand
gaggccacccugcaggauu

SEQ ID NO: 2068311 - RNA, 19 nt, Homo sapiens
  misc_RNA (1)...(19): siRNA sense strand
cgacgcggagcgcaacauu

SEQ ID NO: 2068312 - RNA, 19 nt, Homo sapiens
  misc_RNA (1)...(19): siRNA sense strand
ccacggucaucgccacagu

SEQ ID NO: 2068313 - RNA, 19 nt, Homo sapiens
  misc_RNA (1)...(19): siRNA sense strand
ucuacaggcucucccucaa

SEQ ID NO: 2068314 - RNA, 19 nt, Homo sapiens
  misc_RNA (1)...(19): siRNA sense strand
uguggacgaugucuuugug

SEQ ID NO: 2068315 - RNA, 19 nt, Homo sapiens
  misc_RNA (1)...(19): siRNA sense strand
gcauugcugcccuggucua

SEQ ID NO: 2068316 - RNA, 19 nt, Homo sapiens
  misc_RNA (1)...(19): siRNA sense strand
gcaagaagguccuguguug

SEQ ID NO: 2068317 - RNA, 19 nt, Homo sapiens
  misc_RNA (1)...(19): siRNA sense strand
ggagaaaccuggcuuuaca

SEQ ID NO: 2068318 - RNA, 19 nt, Homo sapiens
  misc_RNA (1)...(19): siRNA sense strand
gcacaaagcaagcuaaugu

SEQ ID NO: 2068319 - RNA, 19 nt, Homo sapiens
  misc_RNA (1)...(19): siRNA sense strand
gauggucacugauggaauu

SEQ ID NO: 2068320 - RNA, 19 nt, Homo sapiens
  misc_RNA (1)...(19): siRNA sense strand
gaacacaccaguccaggaa

SEQ ID NO: 2068321 - RNA, 19 nt, Homo sapiens
  misc_RNA (1)...(19): siRNA sense strand
gaaugucgcucaucuugca

SEQ ID NO: 2068322 - RNA, 19 nt, Homo sapiens
  misc_RNA (1)...(19): siRNA sense strand
ggacacgacuggccaacug

SEQ ID NO: 2068323 - RNA, 19 nt, Homo sapiens
  misc_RNA (1)...(19): siRNA sense strand
gcaacuggcuguguucuuc

SEQ ID NO: 2068324 - RNA, 19 nt, Homo sapiens
  misc_RNA (1)...(19): siRNA sense strand
gaggacagcuuuccaucug

SEQ ID NO: 2068325 - RNA, 19 nt, Homo sapiens
  misc_RNA (1)...(19): siRNA sense strand
gagaaugucgcucaucuug

SEQ ID NO: 2068326 - RNA, 19 nt, Homo sapiens
  misc_RNA (1)...(19): siRNA sense strand
gaacagugggugcggauga

SEQ ID NO: 2068327 - RNA, 19 nt, Homo sapiens
  misc_RNA (1)...(19): siRNA sense strand
gagcagggcccucucuaga

SEQ ID NO: 2068328 - RNA, 19 nt, Homo sapiens
  misc_RNA (1)...(19): siRNA sense strand
gggccuggaugggcaguua

SEQ ID NO: 2068329 - RNA, 19 nt, Homo sapiens
  misc_RNA (1)...(19): siRNA sense strand
cacacaagauggucacuga

SEQ ID NO: 2068330 - RNA, 19 nt, Homo sapiens
  misc_RNA (1)...(19): siRNA sense strand
ggacacggaccaaggauuc

SEQ ID NO: 2068331 - RNA, 19 nt, Homo sapiens
  misc_RNA (1)...(19): siRNA sense strand
gggcccaucugauuaaaca

SEQ ID NO: 2068332 - RNA, 19 nt, Homo sapiens
  misc_RNA (1)...(19): siRNA sense strand
ccauggagcuaaggucuga

SEQ ID NO: 2068333 - RNA, 19 nt, Homo sapiens
  misc_RNA (1)...(19): siRNA sense strand
aaacagaccaggccacuca

SEQ ID NO: 2068334 - RNA, 19 nt, Homo sapiens
  misc_RNA (1)...(19): siRNA sense strand
aagcuaaugucaccugaga

SEQ ID NO: 2068335 - RNA, 19 nt, Homo sapiens
  misc_RNA (1)...(19): siRNA sense strand
gaacaaggcacaaaacauc

SEQ ID NO: 2068336 - RNA, 19 nt, Homo sapiens
  misc_RNA (1)...(19): siRNA sense strand
ugaagcagcuccgggaauc

SEQ ID NO: 2068337 - RNA, 19 nt, Homo sapiens
  misc_RNA (1)...(19): siRNA sense strand
gcugcuggcuucuguacau

SEQ ID NO: 2068338 - RNA, 19 nt, Homo sapiens
  misc_RNA (1)...(19): siRNA sense strand
gcagugcgucgaagaacaa

SEQ ID NO: 2068339 - RNA, 19 nt, Homo sapiens
  misc_RNA (1)...(19): siRNA sense strand
cggcuucugucacauccua

SEQ ID NO: 2068340 - RNA, 19 nt, Homo sapiens
  misc_RNA (1)...(19): siRNA sense strand
ggaggcacuuggugaagag

SEQ ID NO: 2068341 - RNA, 19 nt, Homo sapiens
  misc_RNA (1)...(19): siRNA sense strand
caagauggcagggcacaga

SEQ ID NO: 2068342 - RNA, 19 nt, Homo sapiens
  misc_RNA (1)...(19): siRNA sense strand
ggcaucggccugaguggua

SEQ ID NO: 2068343 - RNA, 19 nt, Homo sapiens
  misc_RNA (1)...(19): siRNA sense strand
ggaauucggagcccagaag

SEQ ID NO: 2068344 - RNA, 19 nt, Homo sapiens
  misc_RNA (1)...(19): siRNA sense strand
gagcaagaagguccugugu

SEQ ID NO: 2068345 - RNA, 19 nt, Homo sapiens
  misc_RNA (1)...(19): siRNA sense strand
guggagaaaccuggcuuua

SEQ ID NO: 2068346 - RNA, 19 nt, Homo sapiens
  misc_RNA (1)...(19): siRNA sense strand
aaacugcggcuuucuugga

SEQ ID NO: 2068347 - RNA, 19 nt, Homo sapiens
  misc_RNA (1)...(19): siRNA sense strand
cagagcaaccugagcauca

SEQ ID NO: 2068348 - RNA, 19 nt, Homo sapiens
  misc_RNA (1)...(19): siRNA sense strand
aagagaaugucgcucaucu

SEQ ID NO: 2068349 - RNA, 19 nt, Homo sapiens
  misc_RNA (1)...(19): siRNA sense strand
ggagaggacagcuuuccau

SEQ ID NO: 2068350 - RNA, 19 nt, Homo sapiens
  misc_RNA (1)...(19): siRNA sense strand
agggaaggcccgagaguuu

SEQ ID NO: 2068351 - RNA, 19 nt, Homo sapiens
  misc_RNA (1)...(19): siRNA sense strand
cagcuguuguccagauguu

SEQ ID NO: 2068352 - RNA, 19 nt, Homo sapiens
  misc_RNA (1)...(19): siRNA sense strand
gaccugauggccaagagaa

SEQ ID NO: 2068353 - RNA, 19 nt, Homo sapiens
  misc_RNA (1)...(19): siRNA sense strand
caagaagguccuguguuga

SEQ ID NO: 2068354 - RNA, 19 nt, Homo sapiens
  misc_RNA (1)...(19): siRNA sense strand
uggcagcuguugcgaaagu

SEQ ID NO: 2068355 - RNA, 19 nt, Homo sapiens
  misc_RNA (1)...(19): siRNA sense strand
ccaagagaaugucgcucau

SEQ ID NO: 2068356 - RNA, 19 nt, Homo sapiens
  misc_RNA (1)...(19): siRNA sense strand
gaauucggagcccagaaga

SEQ ID NO: 2068357 - RNA, 19 nt, Homo sapiens
  misc_RNA (1)...(19): siRNA sense strand
gggaaggcccgagaguuug

SEQ ID NO: 2068358 - RNA, 19 nt, Homo sapiens
  misc_RNA (1)...(19): siRNA sense strand
acagggaaacugcggcuuu

SEQ ID NO: 2068359 - RNA, 19 nt, Homo sapiens
  misc_RNA (1)...(19): siRNA sense strand
acaaagcaagcuaauguca

SEQ ID NO: 2068360 - RNA, 19 nt, Homo sapiens
  misc_RNA (1)...(19): siRNA sense strand
caagauggucacugaugga

SEQ ID NO: 2068361 - RNA, 19 nt, Homo sapiens
  misc_RNA (1)...(19): siRNA sense strand
agaagguccuguguugaga

SEQ ID NO: 2068362 - RNA, 19 nt, Homo sapiens
  misc_RNA (1)...(19): siRNA sense strand
gccaacuggucaauucaag

SEQ ID NO: 2068363 - RNA, 19 nt, Homo sapiens
  misc_RNA (1)...(19): siRNA sense strand
acacaccaguccaggaagu

SEQ ID NO: 2068364 - RNA, 19 nt, Homo sapiens
  misc_RNA (1)...(19): siRNA sense strand
ggcagcaguucgugcaaag

SEQ ID NO: 2068365 - RNA, 19 nt, Homo sapiens
  misc_RNA (1)...(19): siRNA sense strand
cacaagauggucacugaug

SEQ ID NO: 2068366 - RNA, 19 nt, Homo sapiens
  misc_RNA (1)...(19): siRNA sense strand
uggcagcuguuguccagau

SEQ ID NO: 2068367 - RNA, 19 nt, Homo sapiens
  misc_RNA (1)...(19): siRNA sense strand
gcgcugcugcuguggaaga

SEQ ID NO: 2068368 - RNA, 19 nt, Homo sapiens
  misc_RNA (1)...(19): siRNA sense strand
agaagaaacgggccagaca

SEQ ID NO: 2068369 - RNA, 19 nt, Homo sapiens
  misc_RNA (1)...(19): siRNA sense strand
uggaggcacuuggugaaga

SEQ ID NO: 2068370 - RNA, 19 nt, Homo sapiens
  misc_RNA (1)...(19): siRNA sense strand
agagcaaccugagcaucaa

SEQ ID NO: 2068371 - RNA, 19 nt, Homo sapiens
  misc_RNA (1)...(19): siRNA sense strand
cuggccaacuggucaauuc

SEQ ID NO: 2068372 - RNA, 19 nt, Homo sapiens
  misc_RNA (1)...(19): siRNA sense strand
ccagugggccaaagaaacu

SEQ ID NO: 2068373 - RNA, 19 nt, Homo sapiens
  misc_RNA (1)...(19): siRNA sense strand
ggaaucagauggggcaaag

SEQ ID NO: 2068374 - RNA, 19 nt, Homo sapiens
  misc_RNA (1)...(19): siRNA sense strand
uggcagcaguucgugcaaa

SEQ ID NO: 2068375 - RNA, 19 nt, Homo sapiens
  misc_RNA (1)...(19): siRNA sense strand
gagucucacccaagcagaa

SEQ ID NO: 2068376 - RNA, 19 nt, Homo sapiens
  misc_RNA (1)...(19): siRNA sense strand
gggcacaaagcaagcuaau

SEQ ID NO: 2068377 - RNA, 19 nt, Homo sapiens
  misc_RNA (1)...(19): siRNA sense strand
caacuggucaauucaagcu

SEQ ID NO: 2068378 - RNA, 19 nt, Homo sapiens
  misc_RNA (1)...(19): siRNA sense strand
gcagaggguggaggagguu

SEQ ID NO: 2068379 - RNA, 19 nt, Homo sapiens
  misc_RNA (1)...(19): siRNA sense strand
ccaggaggcagcucuaggu

SEQ ID NO: 2068380 - RNA, 19 nt, Homo sapiens
  misc_RNA (1)...(19): siRNA sense strand
agacagcagacacgagaga

SEQ ID NO: 2068381 - RNA, 19 nt, Homo sapiens
  misc_RNA (1)...(19): siRNA sense strand
ucacauccuaggcagagaa

SEQ ID NO: 2068382 - RNA, 19 nt, Homo sapiens
  misc_RNA (1)...(19): siRNA sense strand
aggaggagaggacagcuuu

SEQ ID NO: 2068383 - RNA, 19 nt, Homo sapiens
  misc_RNA (1)...(19): siRNA sense strand
ggccugagugguagacaug

SEQ ID NO: 2068384 - RNA, 19 nt, Homo sapiens
  misc_RNA (1)...(19): siRNA sense strand
cgagcagugcgucgaagaa

SEQ ID NO: 2068385 - RNA, 19 nt, Homo sapiens
  misc_RNA (1)...(19): siRNA sense strand
gaggaggagaggacagcuu

SEQ ID NO: 2068386 - RNA, 19 nt, Homo sapiens
  misc_RNA (1)...(19): siRNA sense strand
gugaugcugccacaggauu

SEQ ID NO: 2068387 - RNA, 19 nt, Homo sapiens
  misc_RNA (1)...(19): siRNA sense strand
ggaccugauggccaagaga

SEQ ID NO: 2068388 - RNA, 19 nt, Homo sapiens
  misc_RNA (1)...(19): siRNA sense strand
caagggaaggcccgagagu

SEQ ID NO: 2068389 - RNA, 19 nt, Homo sapiens
  misc_RNA (1)...(19): siRNA sense strand
caaguuugcuggaacauua

SEQ ID NO: 2068390 - RNA, 19 nt, Homo sapiens
  misc_RNA (1)...(19): siRNA sense strand
gaaauaaacuacgcaaaga

SEQ ID NO: 2068391 - RNA, 19 nt, Homo sapiens
  misc_RNA (1)...(19): siRNA sense strand
ggaauuggguuguccuuaa

SEQ ID NO: 2068392 - RNA, 19 nt, Homo sapiens
  misc_RNA (1)...(19): siRNA sense strand
gagaucaacugcaacauga

SEQ ID NO: 2068393 - RNA, 19 nt, Homo sapiens
  misc_RNA (1)...(19): siRNA sense strand
aacaagagcugcagaaauu

SEQ ID NO: 2068394 - RNA, 19 nt, Homo sapiens
  misc_RNA (1)...(19): siRNA sense strand
gaacaccaauucgauacua

SEQ ID NO: 2068395 - RNA, 19 nt, Homo sapiens
  misc_RNA (1)...(19): siRNA sense strand
ggguaucacuggagaauuu

SEQ ID NO: 2068396 - RNA, 19 nt, Homo sapiens
  misc_RNA (1)...(19): siRNA sense strand
cauauuggcugauuaacaa

SEQ ID NO: 2068397 - RNA, 19 nt, Homo sapiens
  misc_RNA (1)...(19): siRNA sense strand
gaucacagcucagagauuc

SEQ ID NO: 2068398 - RNA, 19 nt, Homo sapiens
  misc_RNA (1)...(19): siRNA sense strand
gggcugaucuauaacauug

SEQ ID NO: 2068399 - RNA, 19 nt, Homo sapiens
  misc_RNA (1)...(19): siRNA sense strand
ugaaugauuuccaggauaa

SEQ ID NO: 2068400 - RNA, 19 nt, Homo sapiens
  misc_RNA (1)...(19): siRNA sense strand
gaaugacuaugaucagcua

SEQ ID NO: 2068401 - RNA, 19 nt, Homo sapiens
  misc_RNA (1)...(19): siRNA sense strand
gaucagcuauuguguguca

SEQ ID NO: 2068402 - RNA, 19 nt, Homo sapiens
  misc_RNA (1)...(19): siRNA sense strand
ccaaaccucugcacgauga

SEQ ID NO: 2068403 - RNA, 19 nt, Homo sapiens
  misc_RNA (1)...(19): siRNA sense strand
uaaaucaucucacaagcuu

SEQ ID NO: 2068404 - RNA, 19 nt, Homo sapiens
  misc_RNA (1)...(19): siRNA sense strand
uauaggaucucauuuagug

SEQ ID NO: 2068405 - RNA, 19 nt, Homo sapiens
  misc_RNA (1)...(19): siRNA sense strand
gaacuggucuuugcaaguc

SEQ ID NO: 2068406 - RNA, 19 nt, Homo sapiens
  misc_RNA (1)...(19): siRNA sense strand
cgaggucgauacauugaua

SEQ ID NO: 2068407 - RNA, 19 nt, Homo sapiens
  misc_RNA (1)...(19): siRNA sense strand
gaacaagagcugcagaaau

SEQ ID NO: 2068408 - RNA, 19 nt, Homo sapiens
  misc_RNA (1)...(19): siRNA sense strand
gaacccaccuugccaccuu

SEQ ID NO: 2068409 - RNA, 19 nt, Homo sapiens
  misc_RNA (1)...(19): siRNA sense strand
uuacauugcugcuacauau

SEQ ID NO: 2068410 - RNA, 19 nt, Homo sapiens
  misc_RNA (1)...(19): siRNA sense strand
caaauacgaugaccucuac

SEQ ID NO: 2068411 - RNA, 19 nt, Homo sapiens
  misc_RNA (1)...(19): siRNA sense strand
ucaaugauauccucaaaca

SEQ ID NO: 2068412 - RNA, 19 nt, Homo sapiens
  misc_RNA (1)...(19): siRNA sense strand
ggguuguccuuaauuaaua

SEQ ID NO: 2068413 - RNA, 19 nt, Homo sapiens
  misc_RNA (1)...(19): siRNA sense strand
ggaagugcuugugagguua

SEQ ID NO: 2068414 - RNA, 19 nt, Homo sapiens
  misc_RNA (1)...(19): siRNA sense strand
caacauacaggacgaauuc

SEQ ID NO: 2068415 - RNA, 19 nt, Homo sapiens
  misc_RNA (1)...(19): siRNA sense strand
ugauggagcugaaguuguu

SEQ ID NO: 2068416 - RNA, 19 nt, Homo sapiens
  misc_RNA (1)...(19): siRNA sense strand
gaaucaaugugcacuauac

SEQ ID NO: 2068417 - RNA, 19 nt, Homo sapiens
  misc_RNA (1)...(19): siRNA sense strand
gaauuggguuguccuuaau

SEQ ID NO: 2068418 - RNA, 19 nt, Homo sapiens
  misc_RNA (1)...(19): siRNA sense strand
ccaaggaguucaucaucaa

SEQ ID NO: 2068419 - RNA, 19 nt, Homo sapiens
  misc_RNA (1)...(19): siRNA sense strand
ccaauucgauacuacuuug

SEQ ID NO: 2068420 - RNA, 19 nt, Homo sapiens
  misc_RNA (1)...(19): siRNA sense strand
caaacucacagacaacaua

SEQ ID NO: 2068421 - RNA, 19 nt, Homo sapiens
  misc_RNA (1)...(19): siRNA sense strand
uaaagaauccagauacaga

SEQ ID NO: 2068422 - RNA, 19 nt, Homo sapiens
  misc_RNA (1)...(19): siRNA sense strand
cccguuaccuguuagauaa

SEQ ID NO: 2068423 - RNA, 19 nt, Homo sapiens
  misc_RNA (1)...(19): siRNA sense strand
cuccaaagcuguuuacuuc

SEQ ID NO: 2068424 - RNA, 19 nt, Homo sapiens
  misc_RNA (1)...(19): siRNA sense strand
gcuggaacauuaucagaug

SEQ ID NO: 2068425 - RNA, 19 nt, Homo sapiens
  misc_RNA (1)...(19): siRNA sense strand
uuaauaaagucccagaaga

SEQ ID NO: 2068426 - RNA, 19 nt, Homo sapiens
  misc_RNA (1)...(19): siRNA sense strand
caggaaugcuggcccauga

SEQ ID NO: 2068427 - RNA, 19 nt, Homo sapiens
  misc_RNA (1)...(19): siRNA sense strand
ucagauggcuuagggaaga

SEQ ID NO: 2068428 - RNA, 19 nt, Homo sapiens
  misc_RNA (1)...(19): siRNA sense strand
ugaagacgcugugauuaau

SEQ ID NO: 2068429 - RNA, 19 nt, Homo sapiens
  misc_RNA (1)...(19): siRNA sense strand
ccuuaaagaucuucauuuc

SEQ ID NO: 2068430 - RNA, 19 nt, Homo sapiens
  misc_RNA (1)...(19): siRNA sense strand
ucaguuaccuccuccuuuc

SEQ ID NO: 2068431 - RNA, 19 nt, Homo sapiens
  misc_RNA (1)...(19): siRNA sense strand
gcugauacaucccagaaca

SEQ ID NO: 2068432 - RNA, 19 nt, Homo sapiens
  misc_RNA (1)...(19): siRNA sense strand
ugauggacguucccaauug

SEQ ID NO: 2068433 - RNA, 19 nt, Homo sapiens
  misc_RNA (1)...(19): siRNA sense strand
uaauaaagucccagaagaa

SEQ ID NO: 2068434 - RNA, 19 nt, Homo sapiens
  misc_RNA (1)...(19): siRNA sense strand
caagagcugcagaaauuaa

SEQ ID NO: 2068435 - RNA, 19 nt, Homo sapiens
  misc_RNA (1)...(19): siRNA sense strand
aaggaggacuuucugguuu

SEQ ID NO: 2068436 - RNA, 19 nt, Homo sapiens
  misc_RNA (1)...(19): siRNA sense strand
uagccugaguccucucuua

SEQ ID NO: 2068437 - RNA, 19 nt, Homo sapiens
  misc_RNA (1)...(19): siRNA sense strand
ggccucaucagaaauguua

SEQ ID NO: 2068438 - RNA, 19 nt, Homo sapiens
  misc_RNA (1)...(19): siRNA sense strand
gagguuagaagguggaauu

SEQ ID NO: 2068439 - RNA, 19 nt, Homo sapiens
  misc_RNA (1)...(19): siRNA sense strand
cagccaaucccgaagguua

SEQ ID NO: 2068440 - RNA, 19 nt, Homo sapiens
  misc_RNA (1)...(19): siRNA sense strand
ugacuaugaucagcuauug

SEQ ID NO: 2068441 - RNA, 19 nt, Homo sapiens
  misc_RNA (1)...(19): siRNA sense strand
gcagugaaguuccccagua

SEQ ID NO: 2068442 - RNA, 19 nt, Homo sapiens
  misc_RNA (1)...(19): siRNA sense strand
ggaaucaaugugcacuaua

SEQ ID NO: 2068443 - RNA, 19 nt, Homo sapiens
  misc_RNA (1)...(19): siRNA sense strand
ccucugagaucaacugcaa

SEQ ID NO: 2068444 - RNA, 19 nt, Homo sapiens
  misc_RNA (1)...(19): siRNA sense strand
gcuccauauuggcugauua

SEQ ID NO: 2068445 - RNA, 19 nt, Homo sapiens
  misc_RNA (1)...(19): siRNA sense strand
cguauaggaucucauuuag

SEQ ID NO: 2068446 - RNA, 19 nt, Homo sapiens
  misc_RNA (1)...(19): siRNA sense strand
gauggacguucccaauugu

SEQ ID NO: 2068447 - RNA, 19 nt, Homo sapiens
  misc_RNA (1)...(19): siRNA sense strand
gaaccucaccauccggauu

SEQ ID NO: 2068448 - RNA, 19 nt, Homo sapiens
  misc_RNA (1)...(19): siRNA sense strand
uggagaacauugacagcua

SEQ ID NO: 2068449 - RNA, 19 nt, Homo sapiens
  misc_RNA (1)...(19): siRNA sense strand
gcacagaggguucggaaac

SEQ ID NO: 2068450 - RNA, 19 nt, Homo sapiens
  misc_RNA (1)...(19): siRNA sense strand
gagauucacagugcaaauu

SEQ ID NO: 2068451 - RNA, 19 nt, Homo sapiens
  misc_RNA (1)...(19): siRNA sense strand
cgaggggucugccaucuua

SEQ ID NO: 2068452 - RNA, 19 nt, Homo sapiens
  misc_RNA (1)...(19): siRNA sense strand
aaagacagcugagcaaggu

SEQ ID NO: 2068453 - RNA, 19 nt, Homo sapiens
  misc_RNA (1)...(19): siRNA sense strand
uggaagugcuugugagguu

SEQ ID NO: 2068454 - RNA, 19 nt, Homo sapiens
  misc_RNA (1)...(19): siRNA sense strand
cugcagaaauuaaagaauc

SEQ ID NO: 2068455 - RNA, 19 nt, Homo sapiens
  misc_RNA (1)...(19): siRNA sense strand
uaaggucccgguugucuuu

SEQ ID NO: 2068456 - RNA, 19 nt, Homo sapiens
  misc_RNA (1)...(19): siRNA sense strand
uuucauaucuggccuugga

SEQ ID NO: 2068457 - RNA, 19 nt, Homo sapiens
  misc_RNA (1)...(19): siRNA sense strand
gaugaaaaccuccaugaaa

SEQ ID NO: 2068458 - RNA, 19 nt, Homo sapiens
  misc_RNA (1)...(19): siRNA sense strand
gauucacagugcaaauuga

SEQ ID NO: 2068459 - RNA, 19 nt, Homo sapiens
  misc_RNA (1)...(19): siRNA sense strand
ccaccugaacaacaauuua

SEQ ID NO: 2068460 - RNA, 19 nt, Homo sapiens
  misc_RNA (1)...(19): siRNA sense strand
gaauuggaagugcuuguga

SEQ ID NO: 2068461 - RNA, 19 nt, Homo sapiens
  misc_RNA (1)...(19): siRNA sense strand
ccacugccuugucuccaaa

SEQ ID NO: 2068462 - RNA, 19 nt, Homo sapiens
  misc_RNA (1)...(19): siRNA sense strand
ugucagcgguuucauaucu

SEQ ID NO: 2068463 - RNA, 19 nt, Homo sapiens
  misc_RNA (1)...(19): siRNA sense strand
ugaccaguguuauaacuuc

SEQ ID NO: 2068464 - RNA, 19 nt, Homo sapiens
  misc_RNA (1)...(19): siRNA sense strand
gaugaucacagcucagaga

SEQ ID NO: 2068465 - RNA, 19 nt, Homo sapiens
  misc_RNA (1)...(19): siRNA sense strand
ucucagcuguggaggauga

SEQ ID NO: 2068466 - RNA, 19 nt, Homo sapiens
  misc_RNA (1)...(19): siRNA sense strand
gauugugugucgagcagaa

SEQ ID NO: 2068467 - RNA, 19 nt, Homo sapiens
  misc_RNA (1)...(19): siRNA sense strand
ugaccaacaucuacaagca

SEQ ID NO: 2068468 - RNA, 19 nt, Homo sapiens
  misc_RNA (1)...(19): siRNA sense strand
gaaaagcagccguucauau

SEQ ID NO: 2068469 - RNA, 19 nt, Homo sapiens
  misc_RNA (1)...(19): siRNA sense strand
ccugaguccucucuuauuc

SEQ ID NO: 2068470 - RNA, 19 nt, Homo sapiens
  misc_RNA (1)...(19): siRNA sense strand
cuucauuucugcuccauau

SEQ ID NO: 2068471 - RNA, 19 nt, Homo sapiens
  misc_RNA (1)...(19): siRNA sense strand
aacauuaucagauggcuua

SEQ ID NO: 2068472 - RNA, 19 nt, Homo sapiens
  misc_RNA (1)...(19): siRNA sense strand
cauaugaaguggaugaacu

SEQ ID NO: 2068473 - RNA, 19 nt, Homo sapiens
  misc_RNA (1)...(19): siRNA sense strand
ggacguucccaauuguauu

SEQ ID NO: 2068474 - RNA, 19 nt, Homo sapiens
  misc_RNA (1)...(19): siRNA sense strand
guagugguguccgagcuuu

SEQ ID NO: 2068475 - RNA, 19 nt, Homo sapiens
  misc_RNA (1)...(19): siRNA sense strand
ucaaauacgaugaccucua

SEQ ID NO: 2068476 - RNA, 19 nt, Homo sapiens
  misc_RNA (1)...(19): siRNA sense strand
aaacaggguugccacugau

SEQ ID NO: 2068477 - RNA, 19 nt, Homo sapiens
  misc_RNA (1)...(19): siRNA sense strand
gcacuccagauaacagauu

SEQ ID NO: 2068478 - RNA, 19 nt, Homo sapiens
  misc_RNA (1)...(19): siRNA sense strand
gaucaacugcaacaugaau

SEQ ID NO: 2068479 - RNA, 19 nt, Homo sapiens
  misc_RNA (1)...(19): siRNA sense strand
uauuuggucuggaggcuuu

SEQ ID NO: 2068480 - RNA, 19 nt, Homo sapiens
  misc_RNA (1)...(19): siRNA sense strand
gacguucccaauuguauuu

SEQ ID NO: 2068481 - RNA, 19 nt, Homo sapiens
  misc_RNA (1)...(19): siRNA sense strand
agaaauaaacuacgcaaag

SEQ ID NO: 2068482 - RNA, 19 nt, Homo sapiens
  misc_RNA (1)...(19): siRNA sense strand
ggugucagcgguuucauau

SEQ ID NO: 2068483 - RNA, 19 nt, Homo sapiens
  misc_RNA (1)...(19): siRNA sense strand
uggcuacgaucaagcagaa

SEQ ID NO: 2068484 - RNA, 19 nt, Homo sapiens
  misc_RNA (1)...(19): siRNA sense strand
aaacugaccuguggguuac

SEQ ID NO: 2068485 - RNA, 19 nt, Homo sapiens
  misc_RNA (1)...(19): siRNA sense strand
gacguggaguuuccgagaa

SEQ ID NO: 2068486 - RNA, 19 nt, Homo sapiens
  misc_RNA (1)...(19): siRNA sense strand
gcaggguccucugagauca

SEQ ID NO: 2068487 - RNA, 19 nt, Homo sapiens
  misc_RNA (1)...(19): siRNA sense strand
ggagcuacguauaggaucu

SEQ ID NO: 2068488 - RNA, 19 nt, Homo sapiens
  misc_RNA (1)...(19): siRNA sense strand
gugcucaucuccuccaaag

SEQ ID NO: 2068489 - RNA, 19 nt, Homo sapiens
  misc_RNA (1)...(19): siRNA sense strand
gggcugagcugaugaagaa

SEQ ID NO: 2068490 - RNA, 19 nt, Homo sapiens
  misc_RNA (1)...(19): siRNA sense strand
gaacaggacucuggaugaa

SEQ ID NO: 2068491 - RNA, 19 nt, Homo sapiens
  misc_RNA (1)...(19): siRNA sense strand
uuaaagguccucacaauaa

SEQ ID NO: 2068492 - RNA, 19 nt, Homo sapiens
  misc_RNA (1)...(19): siRNA sense strand
acaggacucuggaugaaua

SEQ ID NO: 2068493 - RNA, 19 nt, Homo sapiens
  misc_RNA (1)...(19): siRNA sense strand
ggaugucucucgcuacguu

SEQ ID NO: 2068494 - RNA, 19 nt, Homo sapiens
  misc_RNA (1)...(19): siRNA sense strand
gaggagagauuuacuacac

SEQ ID NO: 2068495 - RNA, 19 nt, Homo sapiens
  misc_RNA (1)...(19): siRNA sense strand
cagaagaaggagauuguua

SEQ ID NO: 2068496 - RNA, 19 nt, Homo sapiens
  misc_RNA (1)...(19): siRNA sense strand
gcagaggagagauuuacua

SEQ ID NO: 2068497 - RNA, 19 nt, Homo sapiens
  misc_RNA (1)...(19): siRNA sense strand
guagaacuuuggcucaaga

SEQ ID NO: 2068498 - RNA, 19 nt, Homo sapiens
  misc_RNA (1)...(19): siRNA sense strand
guuaaagguccucacaaua

SEQ ID NO: 2068499 - RNA, 19 nt, Homo sapiens
  misc_RNA (1)...(19): siRNA sense strand
gaguaucagucaacuaaag

SEQ ID NO: 2068500 - RNA, 19 nt, Homo sapiens
  misc_RNA (1)...(19): siRNA sense strand
ugauaaagaugccuugucu

SEQ ID NO: 2068501 - RNA, 19 nt, Homo sapiens
  misc_RNA (1)...(19): siRNA sense strand
uaugaacucuguuucuuuc

SEQ ID NO: 2068502 - RNA, 19 nt, Homo sapiens
  misc_RNA (1)...(19): siRNA sense strand
gaacuuuggcucaagaaca

SEQ ID NO: 2068503 - RNA, 19 nt, Homo sapiens
  misc_RNA (1)...(19): siRNA sense strand
gcccuugacuguguuugua

SEQ ID NO: 2068504 - RNA, 19 nt, Homo sapiens
  misc_RNA (1)...(19): siRNA sense strand
ggagauuguuacccaguuc

SEQ ID NO: 2068505 - RNA, 19 nt, Homo sapiens
  misc_RNA (1)...(19): siRNA sense strand
ccgaguaucagucaacuaa

SEQ ID NO: 2068506 - RNA, 19 nt, Homo sapiens
  misc_RNA (1)...(19): siRNA sense strand
uugaguaccuggauuuaga

SEQ ID NO: 2068507 - RNA, 19 nt, Homo sapiens
  misc_RNA (1)...(19): siRNA sense strand
cugaagaccucguuaaagg

SEQ ID NO: 2068508 - RNA, 19 nt, Homo sapiens
  misc_RNA (1)...(19): siRNA sense strand
cguuaaagguccucacaau

SEQ ID NO: 2068509 - RNA, 19 nt, Homo sapiens
  misc_RNA (1)...(19): siRNA sense strand
cggcagcccuugacugugu

SEQ ID NO: 2068510 - RNA, 19 nt, Homo sapiens
  misc_RNA (1)...(19): siRNA sense strand
auaacuaacugugugcuuu

SEQ ID NO: 2068511 - RNA, 19 nt, Homo sapiens
  misc_RNA (1)...(19): siRNA sense strand
cccaggagauggaaacuuc

SEQ ID NO: 2068512 - RNA, 19 nt, Homo sapiens
  misc_RNA (1)...(19): siRNA sense strand
gagcugaugaagaaaguga

SEQ ID NO: 2068513 - RNA, 19 nt, Homo sapiens
  misc_RNA (1)...(19): siRNA sense strand
uaaagguccucacaauaac

SEQ ID NO: 2068514 - RNA, 19 nt, Homo sapiens
  misc_RNA (1)...(19): siRNA sense strand
caugggugcuuccucaaug

SEQ ID NO: 2068515 - RNA, 19 nt, Homo sapiens
  misc_RNA (1)...(19): siRNA sense strand
ugacacaguuuaccccaua

SEQ ID NO: 2068516 - RNA, 19 nt, Homo sapiens
  misc_RNA (1)...(19): siRNA sense strand
gcugagccacacaaucaua

SEQ ID NO: 2068517 - RNA, 19 nt, Homo sapiens
  misc_RNA (1)...(19): siRNA sense strand
ugaggccucugauaaagau

SEQ ID NO: 2068518 - RNA, 19 nt, Homo sapiens
  misc_RNA (1)...(19): siRNA sense strand
ggaugucugugagaacuuc

SEQ ID NO: 2068519 - RNA, 19 nt, Homo sapiens
  misc_RNA (1)...(19): siRNA sense strand
ccacacaaucauacucaaa

SEQ ID NO: 2068520 - RNA, 19 nt, Homo sapiens
  misc_RNA (1)...(19): siRNA sense strand
ucuugugccucuccaaauu

SEQ ID NO: 2068521 - RNA, 19 nt, Homo sapiens
  misc_RNA (1)...(19): siRNA sense strand
gguuuggucugaagcuaug

SEQ ID NO: 2068522 - RNA, 19 nt, Homo sapiens
  misc_RNA (1)...(19): siRNA sense strand
guaccuggauuuagaugac

SEQ ID NO: 2068523 - RNA, 19 nt, Homo sapiens
  misc_RNA (1)...(19): siRNA sense strand
gaaugcccuuccgcaauau

SEQ ID NO: 2068524 - RNA, 19 nt, Homo sapiens
  misc_RNA (1)...(19): siRNA sense strand
aaucagacuugaagcaucu

SEQ ID NO: 2068525 - RNA, 19 nt, Homo sapiens
  misc_RNA (1)...(19): siRNA sense strand
caagcagaggagagauuua

SEQ ID NO: 2068526 - RNA, 19 nt, Homo sapiens
  misc_RNA (1)...(19): siRNA sense strand
gagcagaagaaggagauug

SEQ ID NO: 2068527 - RNA, 19 nt, Homo sapiens
  misc_RNA (1)...(19): siRNA sense strand
ccacucaguuccucaagcu

SEQ ID NO: 2068528 - RNA, 19 nt, Homo sapiens
  misc_RNA (1)...(19): siRNA sense strand
ucaagcagaggagagauuu

SEQ ID NO: 2068529 - RNA, 19 nt, Homo sapiens
  misc_RNA (1)...(19): siRNA sense strand
ggaaucagacuugaagcau

SEQ ID NO: 2068530 - RNA, 19 nt, Homo sapiens
  misc_RNA (1)...(19): siRNA sense strand
gcagaagaaggagauuguu

SEQ ID NO: 2068531 - RNA, 19 nt, Homo sapiens
  misc_RNA (1)...(19): siRNA sense strand
gggcuugaugcacugcuua

SEQ ID NO: 2068532 - RNA, 19 nt, Homo sapiens
  misc_RNA (1)...(19): siRNA sense strand
agaacaggacucuggauga

SEQ ID NO: 2068533 - RNA, 19 nt, Homo sapiens
  misc_RNA (1)...(19): siRNA sense strand
gugaggcccugaagcugau

SEQ ID NO: 2068534 - RNA, 19 nt, Homo sapiens
  misc_RNA (1)...(19): siRNA sense strand
acuuaugccuggagcugua

SEQ ID NO: 2068535 - RNA, 19 nt, Homo sapiens
  misc_RNA (1)...(19): siRNA sense strand
cugcugagccacacaauca

SEQ ID NO: 2068536 - RNA, 19 nt, Homo sapiens
  misc_RNA (1)...(19): siRNA sense strand
uggugaaccuagacuguau

SEQ ID NO: 2068537 - RNA, 19 nt, Homo sapiens
  misc_RNA (1)...(19): siRNA sense strand
gacuguguuuguagaacuu

SEQ ID NO: 2068538 - RNA, 19 nt, Homo sapiens
  misc_RNA (1)...(19): siRNA sense strand
aauuagggcugagcugaug

SEQ ID NO: 2068539 - RNA, 19 nt, Homo sapiens
  misc_RNA (1)...(19): siRNA sense strand
ggaucuuguucuguacuga

SEQ ID NO: 2068540 - RNA, 19 nt, Homo sapiens
  misc_RNA (1)...(19): siRNA sense strand
uuacccaguucaccacuca

SEQ ID NO: 2068541 - RNA, 19 nt, Homo sapiens
  misc_RNA (1)...(19): siRNA sense strand
guggaaaucccaucugcau

SEQ ID NO: 2068542 - RNA, 19 nt, Homo sapiens
  misc_RNA (1)...(19): siRNA sense strand
ccaguucaccacucaguuc

SEQ ID NO: 2068543 - RNA, 19 nt, Homo sapiens
  misc_RNA (1)...(19): siRNA sense strand
gcauggccacccuggagaa

SEQ ID NO: 2068544 - RNA, 19 nt, Homo sapiens
  misc_RNA (1)...(19): siRNA sense strand
ugacuguguuuguagaacu

SEQ ID NO: 2068545 - RNA, 19 nt, Homo sapiens
  misc_RNA (1)...(19): siRNA sense strand
caggaugucugugagaacu

SEQ ID NO: 2068546 - RNA, 19 nt, Homo sapiens
  misc_RNA (1)...(19): siRNA sense strand
ugaaaauggugaaccuaga

SEQ ID NO: 2068547 - RNA, 19 nt, Homo sapiens
  misc_RNA (1)...(19): siRNA sense strand
ucugaggccucugauaaag

SEQ ID NO: 2068548 - RNA, 19 nt, Homo sapiens
  misc_RNA (1)...(19): siRNA sense strand
uucaagugcuggauuuaca

SEQ ID NO: 2068549 - RNA, 19 nt, Homo sapiens
  misc_RNA (1)...(19): siRNA sense strand
gccacacaaucauacucaa

SEQ ID NO: 2068550 - RNA, 19 nt, Homo sapiens
  misc_RNA (1)...(19): siRNA sense strand
agaagaaggagauuguuac

SEQ ID NO: 2068551 - RNA, 19 nt, Homo sapiens
  misc_RNA (1)...(19): siRNA sense strand
gauacugcccauccugaca

SEQ ID NO: 2068552 - RNA, 19 nt, Homo sapiens
  misc_RNA (1)...(19): siRNA sense strand
cagaggagagauuuacuac

SEQ ID NO: 2068553 - RNA, 19 nt, Homo sapiens
  misc_RNA (1)...(19): siRNA sense strand
ggcgacaggucauuuuaug

SEQ ID NO: 2068554 - RNA, 19 nt, Homo sapiens
  misc_RNA (1)...(19): siRNA sense strand
caacaccuucagcuucugu

SEQ ID NO: 2068555 - RNA, 19 nt, Homo sapiens
  misc_RNA (1)...(19): siRNA sense strand
gaagaaggagauuguuacc

SEQ ID NO: 2068556 - RNA, 19 nt, Homo sapiens
  misc_RNA (1)...(19): siRNA sense strand
cuuccaagcugugcucgau

SEQ ID NO: 2068557 - RNA, 19 nt, Homo sapiens
  misc_RNA (1)...(19): siRNA sense strand
gaacaggacucuggaugaa

SEQ ID NO: 2068558 - RNA, 19 nt, Homo sapiens
  misc_RNA (1)...(19): siRNA sense strand
gaacagagugagggacuua

SEQ ID NO: 2068559 - RNA, 19 nt, Homo sapiens
  misc_RNA (1)...(19): siRNA sense strand
acaggacucuggaugaaua

SEQ ID NO: 2068560 - RNA, 19 nt, Homo sapiens
  misc_RNA (1)...(19): siRNA sense strand
gaggaaagauuuacuacac

SEQ ID NO: 2068561 - RNA, 19 nt, Homo sapiens
  misc_RNA (1)...(19): siRNA sense strand
ggaugucucucgcuacguu

SEQ ID NO: 2068562 - RNA, 19 nt, Homo sapiens
  misc_RNA (1)...(19): siRNA sense strand
gggcugagcugaugaacag

SEQ ID NO: 2068563 - RNA, 19 nt, Homo sapiens
  misc_RNA (1)...(19): siRNA sense strand
gcagaggaaagauuuacua

SEQ ID NO: 2068564 - RNA, 19 nt, Homo sapiens
  misc_RNA (1)...(19): siRNA sense strand
cagaagaaggagauuguua

SEQ ID NO: 2068565 - RNA, 19 nt, Homo sapiens
  misc_RNA (1)...(19): siRNA sense strand
gaagaccucguuaaaguuc

SEQ ID NO: 2068566 - RNA, 19 nt, Homo sapiens
  misc_RNA (1)...(19): siRNA sense strand
guagaacuuuggcucaaga

SEQ ID NO: 2068567 - RNA, 19 nt, Homo sapiens
  misc_RNA (1)...(19): siRNA sense strand
cugaagaccucguuaaagu

SEQ ID NO: 2068568 - RNA, 19 nt, Homo sapiens
  misc_RNA (1)...(19): siRNA sense strand
gaguaucagucaacuaaag

SEQ ID NO: 2068569 - RNA, 19 nt, Homo sapiens
  misc_RNA (1)...(19): siRNA sense strand
uggaggagcugcccacaga

SEQ ID NO: 2068570 - RNA, 19 nt, Homo sapiens
  misc_RNA (1)...(19): siRNA sense strand
ugauaaagaugccuugucu

SEQ ID NO: 2068571 - RNA, 19 nt, Homo sapiens
  misc_RNA (1)...(19): siRNA sense strand
uaugaacucuguuucuuuc

SEQ ID NO: 2068572 - RNA, 19 nt, Homo sapiens
  misc_RNA (1)...(19): siRNA sense strand
gaacuuuggcucaagaaca

SEQ ID NO: 2068573 - RNA, 19 nt, Homo sapiens
  misc_RNA (1)...(19): siRNA sense strand
ucaagcagaggaaagauuu

SEQ ID NO: 2068574 - RNA, 19 nt, Homo sapiens
  misc_RNA (1)...(19): siRNA sense strand
ggagauuguuacccaguuc

SEQ ID NO: 2068575 - RNA, 19 nt, Homo sapiens
  misc_RNA (1)...(19): siRNA sense strand
gcccuugacuguguucgua

SEQ ID NO: 2068576 - RNA, 19 nt, Homo sapiens
  misc_RNA (1)...(19): siRNA sense strand
ccgaguaucagucaacuaa

SEQ ID NO: 2068577 - RNA, 19 nt, Homo sapiens
  misc_RNA (1)...(19): siRNA sense strand
guuaaaguuccucacaaua

SEQ ID NO: 2068578 - RNA, 19 nt, Homo sapiens
  misc_RNA (1)...(19): siRNA sense strand
gcuaagggaccaagcuuug

SEQ ID NO: 2068579 - RNA, 19 nt, Homo sapiens
  misc_RNA (1)...(19): siRNA sense strand
uaaaguuccucacaauaac

SEQ ID NO: 2068580 - RNA, 19 nt, Homo sapiens
  misc_RNA (1)...(19): siRNA sense strand
uugaguaccuggauuuaga

SEQ ID NO: 2068581 - RNA, 19 nt, Homo sapiens
  misc_RNA (1)...(19): siRNA sense strand
cggcagcccuugacugugu

SEQ ID NO: 2068582 - RNA, 19 nt, Homo sapiens
  misc_RNA (1)...(19): siRNA sense strand
auaacuaacugugugcuuu

SEQ ID NO: 2068583 - RNA, 19 nt, Homo sapiens
  misc_RNA (1)...(19): siRNA sense strand
caugggugcuuccucaaug

SEQ ID NO: 2068584 - RNA, 19 nt, Homo sapiens
  misc_RNA (1)...(19): siRNA sense strand
cccaggagguggaaacuuc

SEQ ID NO: 2068585 - RNA, 19 nt, Homo sapiens
  misc_RNA (1)...(19): siRNA sense strand
gagcugaugaacagaguga

SEQ ID NO: 2068586 - RNA, 19 nt, Homo sapiens
  misc_RNA (1)...(19): siRNA sense strand
gcugagccacacaaucaua

SEQ ID NO: 2068587 - RNA, 19 nt, Homo sapiens
  misc_RNA (1)...(19): siRNA sense strand
ugacacaguuuaccccaua

SEQ ID NO: 2068588 - RNA, 19 nt, Homo sapiens
  misc_RNA (1)...(19): siRNA sense strand
ugaggccucugauaaagau

SEQ ID NO: 2068589 - RNA, 19 nt, Homo sapiens
  misc_RNA (1)...(19): siRNA sense strand
gagcugcccacagaacuuu

SEQ ID NO: 2068590 - RNA, 19 nt, Homo sapiens
  misc_RNA (1)...(19): siRNA sense strand
cguuaaaguuccucacaau

SEQ ID NO: 2068591 - RNA, 19 nt, Homo sapiens
  misc_RNA (1)...(19): siRNA sense strand
ggaugucugugagaacuuc

SEQ ID NO: 2068592 - RNA, 19 nt, Homo sapiens
  misc_RNA (1)...(19): siRNA sense strand
ccacacaaucauacucaaa

SEQ ID NO: 2068593 - RNA, 19 nt, Homo sapiens
  misc_RNA (1)...(19): siRNA sense strand
ucuugugccucuccaaauu

SEQ ID NO: 2068594 - RNA, 19 nt, Homo sapiens
  misc_RNA (1)...(19): siRNA sense strand
gguuuggucugaagcuaug

SEQ ID NO: 2068595 - RNA, 19 nt, Homo sapiens
  misc_RNA (1)...(19): siRNA sense strand
caagcagaggaaagauuua

SEQ ID NO: 2068596 - RNA, 19 nt, Homo sapiens
  misc_RNA (1)...(19): siRNA sense strand
guaccuggauuuagaugac

SEQ ID NO: 2068597 - RNA, 19 nt, Homo sapiens
  misc_RNA (1)...(19): siRNA sense strand
gaaugcccuuccgcaauau

SEQ ID NO: 2068598 - RNA, 19 nt, Homo sapiens
  misc_RNA (1)...(19): siRNA sense strand
aaucagacuugaagcaucu

SEQ ID NO: 2068599 - RNA, 19 nt, Homo sapiens
  misc_RNA (1)...(19): siRNA sense strand
gagcagaagaaggagauug

SEQ ID NO: 2068600 - RNA, 19 nt, Homo sapiens
  misc_RNA (1)...(19): siRNA sense strand
ccacucaguuccucaagcu

SEQ ID NO: 2068601 - RNA, 19 nt, Homo sapiens
  misc_RNA (1)...(19): siRNA sense strand
ugaagaccucguuaaaguu

SEQ ID NO: 2068602 - RNA, 19 nt, Homo sapiens
  misc_RNA (1)...(19): siRNA sense strand
ggaaucagacuugaagcau

SEQ ID NO: 2068603 - RNA, 19 nt, Homo sapiens
  misc_RNA (1)...(19): siRNA sense strand
gacggcagcccuugacugu

SEQ ID NO: 2068604 - RNA, 19 nt, Homo sapiens
  misc_RNA (1)...(19): siRNA sense strand
ggcaacaggucauuuuaug

SEQ ID NO: 2068605 - RNA, 19 nt, Homo sapiens
  misc_RNA (1)...(19): siRNA sense strand
gcagaagaaggagauuguu

SEQ ID NO: 2068606 - RNA, 19 nt, Homo sapiens
  misc_RNA (1)...(19): siRNA sense strand
agaacaggacucuggauga

SEQ ID NO: 2068607 - RNA, 19 nt, Homo sapiens
  misc_RNA (1)...(19): siRNA sense strand
uggugaaccuagacuguau

SEQ ID NO: 2068608 - RNA, 19 nt, Homo sapiens
  misc_RNA (1)...(19): siRNA sense strand
cugcugagccacacaauca

SEQ ID NO: 2068609 - RNA, 19 nt, Homo sapiens
  misc_RNA (1)...(19): siRNA sense strand
gugaggcccugaagcugau

SEQ ID NO: 2068610 - RNA, 19 nt, Homo sapiens
  misc_RNA (1)...(19): siRNA sense strand
gggcuggaugcacugcuua

SEQ ID NO: 2068611 - RNA, 19 nt, Homo sapiens
  misc_RNA (1)...(19): siRNA sense strand
aauuagggcugagcugaug

SEQ ID NO: 2068612 - RNA, 19 nt, Homo sapiens
  misc_RNA (1)...(19): siRNA sense strand
ggagcugcccacagaacuu

SEQ ID NO: 2068613 - RNA, 19 nt, Homo sapiens
  misc_RNA (1)...(19): siRNA sense strand
ggaucuuguucuguacuga

SEQ ID NO: 2068614 - RNA, 19 nt, Homo sapiens
  misc_RNA (1)...(19): siRNA sense strand
uuacccaguucaccacuca

SEQ ID NO: 2068615 - RNA, 19 nt, Homo sapiens
  misc_RNA (1)...(19): siRNA sense strand
guggaaaucccaucugcau

SEQ ID NO: 2068616 - RNA, 19 nt, Homo sapiens
  misc_RNA (1)...(19): siRNA sense strand
ccaguucaccacucaguuc

SEQ ID NO: 2068617 - RNA, 19 nt, Homo sapiens
  misc_RNA (1)...(19): siRNA sense strand
gcauggccacccuggagaa

SEQ ID NO: 2068618 - RNA, 19 nt, Homo sapiens
  misc_RNA (1)...(19): siRNA sense strand
ugaaaauggugaaccuaga

SEQ ID NO: 2068619 - RNA, 19 nt, Homo sapiens
  misc_RNA (1)...(19): siRNA sense strand
ugacuacugcccugacugu

SEQ ID NO: 2068620 - RNA, 19 nt, Homo sapiens
  misc_RNA (1)...(19): siRNA sense strand
ucugaggccucugauaaag

SEQ ID NO: 2068621 - RNA, 19 nt, Homo sapiens
  misc_RNA (1)...(19): siRNA sense strand
caggaugucugugagaacu

SEQ ID NO: 2068622 - RNA, 19 nt, Homo sapiens
  misc_RNA (1)...(19): siRNA sense strand
agaagaaggagauuguuac

SEQ ID NO: 2068623 - RNA, 19 nt, Homo sapiens
  misc_RNA (1)...(19): siRNA sense strand
gccacacaaucauacucaa

SEQ ID NO: 2068624 - RNA, 19 nt, Homo sapiens
  misc_RNA (1)...(19): siRNA sense strand
uucaagugcuggauuuaca

SEQ ID NO: 2068625 - RNA, 19 nt, Homo sapiens
  misc_RNA (1)...(19): siRNA sense strand
ucguuaaaguuccucacaa

SEQ ID NO: 2068626 - RNA, 19 nt, Homo sapiens
  misc_RNA (1)...(19): siRNA sense strand
gucaagcagaggaaagauu

SEQ ID NO: 2068627 - RNA, 19 nt, Homo sapiens
  misc_RNA (1)...(19): siRNA sense strand
caacaccuucagcuucugu

SEQ ID NO: 2068628 - RNA, 19 nt, Homo sapiens
  misc_RNA (1)...(19): siRNA sense strand
gaagaaggagauuguuacc

SEQ ID NO: 2068629 - RNA, 19 nt, Homo sapiens
  misc_RNA (1)...(19): siRNA sense strand
cacaugaggaaucuucaga

SEQ ID NO: 2068630 - RNA, 19 nt, Homo sapiens
  misc_RNA (1)...(19): siRNA sense strand
ggaugcacugcuuaaccua

SEQ ID NO: 2068631 - RNA, 19 nt, Homo sapiens
  misc_RNA (1)...(19): siRNA sense strand
cuuccaagcugugcucgau

SEQ ID NO: 2068632 - RNA, 19 nt, Homo sapiens
  misc_RNA (1)...(19): siRNA sense strand
ggccacaugaggaaucuuc

SEQ ID NO: 2068633 - RNA, 19 nt, Homo sapiens
  misc_RNA (1)...(19): siRNA sense strand
guaguaaggugcagaauua

SEQ ID NO: 2068634 - RNA, 19 nt, Homo sapiens
  misc_RNA (1)...(19): siRNA sense strand
gaaaugagaccuccaugaa

SEQ ID NO: 2068635 - RNA, 19 nt, Homo sapiens
  misc_RNA (1)...(19): siRNA sense strand
gaaaggauauacccagaca

SEQ ID NO: 2068636 - RNA, 19 nt, Homo sapiens
  misc_RNA (1)...(19): siRNA sense strand
aaagugcucucucaauaaa

SEQ ID NO: 2068637 - RNA, 19 nt, Homo sapiens
  misc_RNA (1)...(19): siRNA sense strand
cuacaagggucaugucaau

SEQ ID NO: 2068638 - RNA, 19 nt, Homo sapiens
  misc_RNA (1)...(19): siRNA sense strand
aaaguacacuggaugaaug

SEQ ID NO: 2068639 - RNA, 19 nt, Homo sapiens
  misc_RNA (1)...(19): siRNA sense strand
ucagaaaucuauuggaaag

SEQ ID NO: 2068640 - RNA, 19 nt, Homo sapiens
  misc_RNA (1)...(19): siRNA sense strand
ggaaaugagaccuccauga

SEQ ID NO: 2068641 - RNA, 19 nt, Homo sapiens
  misc_RNA (1)...(19): siRNA sense strand
gagcugcgucugauucaua

SEQ ID NO: 2068642 - RNA, 19 nt, Homo sapiens
  misc_RNA (1)...(19): siRNA sense strand
gaaaguacacuggaugaau

SEQ ID NO: 2068643 - RNA, 19 nt, Homo sapiens
  misc_RNA (1)...(19): siRNA sense strand
guuaugagcgugaguugua

SEQ ID NO: 2068644 - RNA, 19 nt, Homo sapiens
  misc_RNA (1)...(19): siRNA sense strand
gaugagcaaucuucgugaa

SEQ ID NO: 2068645 - RNA, 19 nt, Homo sapiens
  misc_RNA (1)...(19): siRNA sense strand
gugcaccuguguuguagua

SEQ ID NO: 2068646 - RNA, 19 nt, Homo sapiens
  misc_RNA (1)...(19): siRNA sense strand
aaugagaccuccaugaaug

SEQ ID NO: 2068647 - RNA, 19 nt, Homo sapiens
  misc_RNA (1)...(19): siRNA sense strand
uaaaggagcugcgucugau

SEQ ID NO: 2068648 - RNA, 19 nt, Homo sapiens
  misc_RNA (1)...(19): siRNA sense strand
gcucaccaccuucaacuuu

SEQ ID NO: 2068649 - RNA, 19 nt, Homo sapiens
  misc_RNA (1)...(19): siRNA sense strand
ggagaaaguugcugcuacu

SEQ ID NO: 2068650 - RNA, 19 nt, Homo sapiens
  misc_RNA (1)...(19): siRNA sense strand
uggagugucugucucagua

SEQ ID NO: 2068651 - RNA, 19 nt, Homo sapiens
  misc_RNA (1)...(19): siRNA sense strand
ccucugggaucccugauga

SEQ ID NO: 2068652 - RNA, 19 nt, Homo sapiens
  misc_RNA (1)...(19): siRNA sense strand
ucauagaccucugccuaaa

SEQ ID NO: 2068653 - RNA, 19 nt, Homo sapiens
  misc_RNA (1)...(19): siRNA sense strand
gagcugaugcguacacuca

SEQ ID NO: 2068654 - RNA, 19 nt, Homo sapiens
  misc_RNA (1)...(19): siRNA sense strand
ggucuucccucugauguuc

SEQ ID NO: 2068655 - RNA, 19 nt, Homo sapiens
  misc_RNA (1)...(19): siRNA sense strand
gaaaucuauuggaaaggau

SEQ ID NO: 2068656 - RNA, 19 nt, Homo sapiens
  misc_RNA (1)...(19): siRNA sense strand
agaaaucuauuggaaagga

SEQ ID NO: 2068657 - RNA, 19 nt, Homo sapiens
  misc_RNA (1)...(19): siRNA sense strand
gaucaguaauaucaaagag

SEQ ID NO: 2068658 - RNA, 19 nt, Homo sapiens
  misc_RNA (1)...(19): siRNA sense strand
gaagucaggcagcccaaga

SEQ ID NO: 2068659 - RNA, 19 nt, Homo sapiens
  misc_RNA (1)...(19): siRNA sense strand
caaguuaggccuggaguug

SEQ ID NO: 2068660 - RNA, 19 nt, Homo sapiens
  misc_RNA (1)...(19): siRNA sense strand
ggagagcaccagcccuuga

SEQ ID NO: 2068661 - RNA, 19 nt, Homo sapiens
  misc_RNA (1)...(19): siRNA sense strand
uaacugaucgggacaugga

SEQ ID NO: 2068662 - RNA, 19 nt, Homo sapiens
  misc_RNA (1)...(19): siRNA sense strand
ggaguuggaagucuggaaa

SEQ ID NO: 2068663 - RNA, 19 nt, Homo sapiens
  misc_RNA (1)...(19): siRNA sense strand
gcaccuguguuguaguaag

SEQ ID NO: 2068664 - RNA, 19 nt, Homo sapiens
  misc_RNA (1)...(19): siRNA sense strand
ccagaggccaugaguaaga

SEQ ID NO: 2068665 - RNA, 19 nt, Homo sapiens
  misc_RNA (1)...(19): siRNA sense strand
caaucuucgugaacucuuu

SEQ ID NO: 2068666 - RNA, 19 nt, Homo sapiens
  misc_RNA (1)...(19): siRNA sense strand
acaagggucaugucaauug

SEQ ID NO: 2068667 - RNA, 19 nt, Homo sapiens
  misc_RNA (1)...(19): siRNA sense strand
cccaggagguggaaacuuc

SEQ ID NO: 2068668 - RNA, 19 nt, Homo sapiens
  misc_RNA (1)...(19): siRNA sense strand
gccuuuauauucagugaug

SEQ ID NO: 2068669 - RNA, 19 nt, Homo sapiens
  misc_RNA (1)...(19): siRNA sense strand
ggauguugaugagaauuuc

SEQ ID NO: 2068670 - RNA, 19 nt, Homo sapiens
  misc_RNA (1)...(19): siRNA sense strand
aaaggaaaguacacuggau

SEQ ID NO: 2068671 - RNA, 19 nt, Homo sapiens
  misc_RNA (1)...(19): siRNA sense strand
ccaugaaugcucugaaaga

SEQ ID NO: 2068672 - RNA, 19 nt, Homo sapiens
  misc_RNA (1)...(19): siRNA sense strand
guucccagcucaccaccuu

SEQ ID NO: 2068673 - RNA, 19 nt, Homo sapiens
  misc_RNA (1)...(19): siRNA sense strand
cuaaaggagcugcgucuga

SEQ ID NO: 2068674 - RNA, 19 nt, Homo sapiens
  misc_RNA (1)...(19): siRNA sense strand
cuagugcaccuguguugua

SEQ ID NO: 2068675 - RNA, 19 nt, Homo sapiens
  misc_RNA (1)...(19): siRNA sense strand
ggaaaguacacuggaugaa

SEQ ID NO: 2068676 - RNA, 19 nt, Homo sapiens
  misc_RNA (1)...(19): siRNA sense strand
gggauguugaugagaauuu

SEQ ID NO: 2068677 - RNA, 19 nt, Homo sapiens
  misc_RNA (1)...(19): siRNA sense strand
ggugcagaauuacucaaug

SEQ ID NO: 2068678 - RNA, 19 nt, Homo sapiens
  misc_RNA (1)...(19): siRNA sense strand
gagagcaccagcccuugaa

SEQ ID NO: 2068679 - RNA, 19 nt, Homo sapiens
  misc_RNA (1)...(19): siRNA sense strand
cagacaguauccaggaguu

SEQ ID NO: 2068680 - RNA, 19 nt, Homo sapiens
  misc_RNA (1)...(19): siRNA sense strand
aguuaggccuggaguugua

SEQ ID NO: 2068681 - RNA, 19 nt, Homo sapiens
  misc_RNA (1)...(19): siRNA sense strand
cuccaugaaugcucugaaa

SEQ ID NO: 2068682 - RNA, 19 nt, Homo sapiens
  misc_RNA (1)...(19): siRNA sense strand
gugcagaauuacucaaugc

SEQ ID NO: 2068683 - RNA, 19 nt, Homo sapiens
  misc_RNA (1)...(19): siRNA sense strand
caagggucaugucaauugg

SEQ ID NO: 2068684 - RNA, 19 nt, Homo sapiens
  misc_RNA (1)...(19): siRNA sense strand
ccaagccucagucagcuaa

SEQ ID NO: 2068685 - RNA, 19 nt, Homo sapiens
  misc_RNA (1)...(19): siRNA sense strand
gagcaaucuucgugaacuc

SEQ ID NO: 2068686 - RNA, 19 nt, Homo sapiens
  misc_RNA (1)...(19): siRNA sense strand
cgggaaaguuugccccuua

SEQ ID NO: 2068687 - RNA, 19 nt, Homo sapiens
  misc_RNA (1)...(19): siRNA sense strand
ugauucauauccuaaugug

SEQ ID NO: 2068688 - RNA, 19 nt, Homo sapiens
  misc_RNA (1)...(19): siRNA sense strand
cuacagaagaggccuagug

SEQ ID NO: 2068689 - RNA, 19 nt, Homo sapiens
  misc_RNA (1)...(19): siRNA sense strand
gggccuuuauauucaguga

SEQ ID NO: 2068690 - RNA, 19 nt, Homo sapiens
  misc_RNA (1)...(19): siRNA sense strand
gaccucugccuaaaggaaa

SEQ ID NO: 2068691 - RNA, 19 nt, Homo sapiens
  misc_RNA (1)...(19): siRNA sense strand
ucaccaccuucaacuuuca

SEQ ID NO: 2068692 - RNA, 19 nt, Homo sapiens
  misc_RNA (1)...(19): siRNA sense strand
uauauucagugaugcuuac

SEQ ID NO: 2068693 - RNA, 19 nt, Homo sapiens
  misc_RNA (1)...(19): siRNA sense strand
auggaggccuucagcauga

SEQ ID NO: 2068694 - RNA, 19 nt, Homo sapiens
  misc_RNA (1)...(19): siRNA sense strand
ggccgugcauuccugacuu

SEQ ID NO: 2068695 - RNA, 19 nt, Homo sapiens
  misc_RNA (1)...(19): siRNA sense strand
gaaugccugagcuaccuuu

SEQ ID NO: 2068696 - RNA, 19 nt, Homo sapiens
  misc_RNA (1)...(19): siRNA sense strand
gcgggauguugaugagaau

SEQ ID NO: 2068697 - RNA, 19 nt, Homo sapiens
  misc_RNA (1)...(19): siRNA sense strand
gcaaguuaggccuggaguu

SEQ ID NO: 2068698 - RNA, 19 nt, Homo sapiens
  misc_RNA (1)...(19): siRNA sense strand
auucagugaugcuuaccua

SEQ ID NO: 2068699 - RNA, 19 nt, Homo sapiens
  misc_RNA (1)...(19): siRNA sense strand
gccgugcauuccugacuug

SEQ ID NO: 2068700 - RNA, 19 nt, Homo sapiens
  misc_RNA (1)...(19): siRNA sense strand
aaaugagaccuccaugaau

SEQ ID NO: 2068701 - RNA, 19 nt, Homo sapiens
  misc_RNA (1)...(19): siRNA sense strand
uguaguaaggugcagaauu

SEQ ID NO: 2068702 - RNA, 19 nt, Homo sapiens
  misc_RNA (1)...(19): siRNA sense strand
ucaggcagcccaagaggau

SEQ ID NO: 2068703 - RNA, 19 nt, Homo sapiens
  misc_RNA (1)...(19): siRNA sense strand
caugaaugcucugaaagac

SEQ ID NO: 2068704 - RNA, 19 nt, Homo sapiens
  misc_RNA (1)...(19): siRNA sense strand
cagugaugcuuaccuaacu

SEQ ID NO: 2068705 - RNA, 19 nt, Homo sapiens
  misc_RNA (1)...(19): siRNA sense strand
cugcucagguaccucaaga

SEQ ID NO: 2068706 - RNA, 19 nt, Homo sapiens
  misc_RNA (1)...(19): siRNA sense strand
ugcgggauguugaugagaa

SEQ ID NO: 2068707 - RNA, 19 nt, Homo sapiens
  misc_RNA (1)...(19): siRNA sense strand
ucugauucauauccuaaug

SEQ ID NO: 2068708 - RNA, 19 nt, Homo sapiens
  misc_RNA (1)...(19): siRNA sense strand
cgucugauucauauccuaa

SEQ ID NO: 2068709 - RNA, 19 nt, Homo sapiens
  misc_RNA (1)...(19): siRNA sense strand
gaauuucuggaccauaugg

SEQ ID NO: 2068710 - RNA, 19 nt, Homo sapiens
  misc_RNA (1)...(19): siRNA sense strand
ugaguaagaggcagacagu

SEQ ID NO: 2068711 - RNA, 19 nt, Homo sapiens
  misc_RNA (1)...(19): siRNA sense strand
gcgucugauucauauccua

SEQ ID NO: 2068712 - RNA, 19 nt, Homo sapiens
  misc_RNA (1)...(19): siRNA sense strand
ccccagaugcuuuauauaa

SEQ ID NO: 2068713 - RNA, 19 nt, Homo sapiens
  misc_RNA (1)...(19): siRNA sense strand
auagaccucugccuaaagg

SEQ ID NO: 2068714 - RNA, 19 nt, Homo sapiens
  misc_RNA (1)...(19): siRNA sense strand
cacuucaucuggagaccuu

SEQ ID NO: 2068715 - RNA, 19 nt, Homo sapiens
  misc_RNA (1)...(19): siRNA sense strand
ugggaucccugaugaagac

SEQ ID NO: 2068716 - RNA, 19 nt, Homo sapiens
  misc_RNA (1)...(19): siRNA sense strand
gcucagguaccucaagaac

SEQ ID NO: 2068717 - RNA, 19 nt, Homo sapiens
  misc_RNA (1)...(19): siRNA sense strand
gcaaucuucgugaacucuu

SEQ ID NO: 2068718 - RNA, 19 nt, Homo sapiens
  misc_RNA (1)...(19): siRNA sense strand
ugagcaaucuucgugaacu

SEQ ID NO: 2068719 - RNA, 19 nt, Homo sapiens
  misc_RNA (1)...(19): siRNA sense strand
aaaagugcucucucaauaa

SEQ ID NO: 2068720 - RNA, 19 nt, Homo sapiens
  misc_RNA (1)...(19): siRNA sense strand
aaccaguucuugaccaucu

SEQ ID NO: 2068721 - RNA, 19 nt, Homo sapiens
  misc_RNA (1)...(19): siRNA sense strand
ccaaugaguuugucaauua

SEQ ID NO: 2068722 - RNA, 19 nt, Homo sapiens
  misc_RNA (1)...(19): siRNA sense strand
gaacgaauaucuggaguua

SEQ ID NO: 2068723 - RNA, 19 nt, Homo sapiens
  misc_RNA (1)...(19): siRNA sense strand
gcaauagccucccggaaua

SEQ ID NO: 2068724 - RNA, 19 nt, Homo sapiens
  misc_RNA (1)...(19): siRNA sense strand
cagaaaccaucgauuauua

SEQ ID NO: 2068725 - RNA, 19 nt, Homo sapiens
  misc_RNA (1)...(19): siRNA sense strand
caaggagacuuauuucuga

SEQ ID NO: 2068726 - RNA, 19 nt, Homo sapiens
  misc_RNA (1)...(19): siRNA sense strand
gaacaggaccuucacagaa

SEQ ID NO: 2068727 - RNA, 19 nt, Homo sapiens
  misc_RNA (1)...(19): siRNA sense strand
gcaacuccguagaggauua

SEQ ID NO: 2068728 - RNA, 19 nt, Homo sapiens
  misc_RNA (1)...(19): siRNA sense strand
uaacaucucucguccuuuc

SEQ ID NO: 2068729 - RNA, 19 nt, Homo sapiens
  misc_RNA (1)...(19): siRNA sense strand
gagcugaucucucuaaagg

SEQ ID NO: 2068730 - RNA, 19 nt, Homo sapiens
  misc_RNA (1)...(19): siRNA sense strand
gacgugagcuccuuuaaca

SEQ ID NO: 2068731 - RNA, 19 nt, Homo sapiens
  misc_RNA (1)...(19): siRNA sense strand
acgaauaucuggaguuaaa

SEQ ID NO: 2068732 - RNA, 19 nt, Homo sapiens
  misc_RNA (1)...(19): siRNA sense strand
gugcagaaaccaucgauua

SEQ ID NO: 2068733 - RNA, 19 nt, Homo sapiens
  misc_RNA (1)...(19): siRNA sense strand
ggaaaucugugacaaugca

SEQ ID NO: 2068734 - RNA, 19 nt, Homo sapiens
  misc_RNA (1)...(19): siRNA sense strand
gacaugcgcuccauuaagu

SEQ ID NO: 2068735 - RNA, 19 nt, Homo sapiens
  misc_RNA (1)...(19): siRNA sense strand
gaucugggccucaacguaa

SEQ ID NO: 2068736 - RNA, 19 nt, Homo sapiens
  misc_RNA (1)...(19): siRNA sense strand
gaacuucugcgagaugaua

SEQ ID NO: 2068737 - RNA, 19 nt, Homo sapiens
  misc_RNA (1)...(19): siRNA sense strand
ggauaaaguuguggagcua

SEQ ID NO: 2068738 - RNA, 19 nt, Homo sapiens
  misc_RNA (1)...(19): siRNA sense strand
ugaagucacucauccaaau

SEQ ID NO: 2068739 - RNA, 19 nt, Homo sapiens
  misc_RNA (1)...(19): siRNA sense strand
gcagaaaccaucgauuauu

SEQ ID NO: 2068740 - RNA, 19 nt, Homo sapiens
  misc_RNA (1)...(19): siRNA sense strand
gauuguaccugugacauug

SEQ ID NO: 2068741 - RNA, 19 nt, Homo sapiens
  misc_RNA (1)...(19): siRNA sense strand
ggagacuuauuucugacua

SEQ ID NO: 2068742 - RNA, 19 nt, Homo sapiens
  misc_RNA (1)...(19): siRNA sense strand
gcugaucucucuaaaggau

SEQ ID NO: 2068743 - RNA, 19 nt, Homo sapiens
  misc_RNA (1)...(19): siRNA sense strand
ggaauaaccgcaucucgau

SEQ ID NO: 2068744 - RNA, 19 nt, Homo sapiens
  misc_RNA (1)...(19): siRNA sense strand
gcccuugucuguguuaauu

SEQ ID NO: 2068745 - RNA, 19 nt, Homo sapiens
  misc_RNA (1)...(19): siRNA sense strand
aacaggaccuucacagaaa

SEQ ID NO: 2068746 - RNA, 19 nt, Homo sapiens
  misc_RNA (1)...(19): siRNA sense strand
uggacgaggugaucuguaa

SEQ ID NO: 2068747 - RNA, 19 nt, Homo sapiens
  misc_RNA (1)...(19): siRNA sense strand
ggcuaaaccugaggaguaa

SEQ ID NO: 2068748 - RNA, 19 nt, Homo sapiens
  misc_RNA (1)...(19): siRNA sense strand
gcaucuagguagcaauguu

SEQ ID NO: 2068749 - RNA, 19 nt, Homo sapiens
  misc_RNA (1)...(19): siRNA sense strand
gaaaccaucgauuauuaug

SEQ ID NO: 2068750 - RNA, 19 nt, Homo sapiens
  misc_RNA (1)...(19): siRNA sense strand
cuauucagauguaguaguu

SEQ ID NO: 2068751 - RNA, 19 nt, Homo sapiens
  misc_RNA (1)...(19): siRNA sense strand
gcugugcccugacuauuca

SEQ ID NO: 2068752 - RNA, 19 nt, Homo sapiens
  misc_RNA (1)...(19): siRNA sense strand
gcugcagacucuagcguuu

SEQ ID NO: 2068753 - RNA, 19 nt, Homo sapiens
  misc_RNA (1)...(19): siRNA sense strand
gcccuacaaucccaagaaa

SEQ ID NO: 2068754 - RNA, 19 nt, Homo sapiens
  misc_RNA (1)...(19): siRNA sense strand
ccaacaaucuuuuccguuu

SEQ ID NO: 2068755 - RNA, 19 nt, Homo sapiens
  misc_RNA (1)...(19): siRNA sense strand
ggaaccggcugaaacuucu

SEQ ID NO: 2068756 - RNA, 19 nt, Homo sapiens
  misc_RNA (1)...(19): siRNA sense strand
ggaacaggaccuucacaga

SEQ ID NO: 2068757 - RNA, 19 nt, Homo sapiens
  misc_RNA (1)...(19): siRNA sense strand
gagauucagucuggaacuu

SEQ ID NO: 2068758 - RNA, 19 nt, Homo sapiens
  misc_RNA (1)...(19): siRNA sense strand
ugaauucuguggccacuuc

SEQ ID NO: 2068759 - RNA, 19 nt, Homo sapiens
  misc_RNA (1)...(19): siRNA sense strand
ggacagcaucuccuauuca

SEQ ID NO: 2068760 - RNA, 19 nt, Homo sapiens
  misc_RNA (1)...(19): siRNA sense strand
caucuagguagcaauguua

SEQ ID NO: 2068761 - RNA, 19 nt, Homo sapiens
  misc_RNA (1)...(19): siRNA sense strand
gaacccaaccggaacgaau

SEQ ID NO: 2068762 - RNA, 19 nt, Homo sapiens
  misc_RNA (1)...(19): siRNA sense strand
caaagugggcguccuagug

SEQ ID NO: 2068763 - RNA, 19 nt, Homo sapiens
  misc_RNA (1)...(19): siRNA sense strand
uguaacaucucucguccuu

SEQ ID NO: 2068764 - RNA, 19 nt, Homo sapiens
  misc_RNA (1)...(19): siRNA sense strand
ggcaauagccucccggaau

SEQ ID NO: 2068765 - RNA, 19 nt, Homo sapiens
  misc_RNA (1)...(19): siRNA sense strand
ggaaaacccuuggaauugu

SEQ ID NO: 2068766 - RNA, 19 nt, Homo sapiens
  misc_RNA (1)...(19): siRNA sense strand
ccaaggagacuuauuucug

SEQ ID NO: 2068767 - RNA, 19 nt, Homo sapiens
  misc_RNA (1)...(19): siRNA sense strand
gaaaacccuuggaauuguu

SEQ ID NO: 2068768 - RNA, 19 nt, Homo sapiens
  misc_RNA (1)...(19): siRNA sense strand
cccgagugcugucuuugua

SEQ ID NO: 2068769 - RNA, 19 nt, Homo sapiens
  misc_RNA (1)...(19): siRNA sense strand
gaggaaaacccuuggaauu

SEQ ID NO: 2068770 - RNA, 19 nt, Homo sapiens
  misc_RNA (1)...(19): siRNA sense strand
cgagugcugucuuuguaga

SEQ ID NO: 2068771 - RNA, 19 nt, Homo sapiens
  misc_RNA (1)...(19): siRNA sense strand
gcucaaagugggcguccua

SEQ ID NO: 2068772 - RNA, 19 nt, Homo sapiens
  misc_RNA (1)...(19): siRNA sense strand
ggauuguaccugugacauu

SEQ ID NO: 2068773 - RNA, 19 nt, Homo sapiens
  misc_RNA (1)...(19): siRNA sense strand
aaaucgaccugcaugacaa

SEQ ID NO: 2068774 - RNA, 19 nt, Homo sapiens
  misc_RNA (1)...(19): siRNA sense strand
gcaggugcuuauccucaau

SEQ ID NO: 2068775 - RNA, 19 nt, Homo sapiens
  misc_RNA (1)...(19): siRNA sense strand
gugcuuauccucaaugaca

SEQ ID NO: 2068776 - RNA, 19 nt, Homo sapiens
  misc_RNA (1)...(19): siRNA sense strand
uugggaaacugcauuuguu

SEQ ID NO: 2068777 - RNA, 19 nt, Homo sapiens
  misc_RNA (1)...(19): siRNA sense strand
caaaucgaccugcaugaca

SEQ ID NO: 2068778 - RNA, 19 nt, Homo sapiens
  misc_RNA (1)...(19): siRNA sense strand
aggcuaaaccugaggagua

SEQ ID NO: 2068779 - RNA, 19 nt, Homo sapiens
  misc_RNA (1)...(19): siRNA sense strand
gacagcaucuccuauucag

SEQ ID NO: 2068780 - RNA, 19 nt, Homo sapiens
  misc_RNA (1)...(19): siRNA sense strand
acaggucgauuacaacuac

SEQ ID NO: 2068781 - RNA, 19 nt, Homo sapiens
  misc_RNA (1)...(19): siRNA sense strand
ggaacgaauaucuggaguu

SEQ ID NO: 2068782 - RNA, 19 nt, Homo sapiens
  misc_RNA (1)...(19): siRNA sense strand
gggcaacuccguagaggau

SEQ ID NO: 2068783 - RNA, 19 nt, Homo sapiens
  misc_RNA (1)...(19): siRNA sense strand
gcccggaguuauucuaugg

SEQ ID NO: 2068784 - RNA, 19 nt, Homo sapiens
  misc_RNA (1)...(19): siRNA sense strand
cuugugagcugaucucucu

SEQ ID NO: 2068785 - RNA, 19 nt, Homo sapiens
  misc_RNA (1)...(19): siRNA sense strand
cuacaucagcgucauugaa

SEQ ID NO: 2068786 - RNA, 19 nt, Homo sapiens
  misc_RNA (1)...(19): siRNA sense strand
caacaaucuuuuccguuuu

SEQ ID NO: 2068787 - RNA, 19 nt, Homo sapiens
  misc_RNA (1)...(19): siRNA sense strand
caaugaguuugucaauuac

SEQ ID NO: 2068788 - RNA, 19 nt, Homo sapiens
  misc_RNA (1)...(19): siRNA sense strand
gaagucacucauccaaauc

SEQ ID NO: 2068789 - RNA, 19 nt, Homo sapiens
  misc_RNA (1)...(19): siRNA sense strand
gcuggaugcugcagacucu

SEQ ID NO: 2068790 - RNA, 19 nt, Homo sapiens
  misc_RNA (1)...(19): siRNA sense strand
caggaacuuugcccaagga

SEQ ID NO: 2068791 - RNA, 19 nt, Homo sapiens
  misc_RNA (1)...(19): siRNA sense strand
ugaucucucuaaaggauug

SEQ ID NO: 2068792 - RNA, 19 nt, Homo sapiens
  misc_RNA (1)...(19): siRNA sense strand
gggaaccggcugaaacuuc

SEQ ID NO: 2068793 - RNA, 19 nt, Homo sapiens
  misc_RNA (1)...(19): siRNA sense strand
caacuacaucagcgucauu

SEQ ID NO: 2068794 - RNA, 19 nt, Homo sapiens
  misc_RNA (1)...(19): siRNA sense strand
cccaaugaguuugucaauu

SEQ ID NO: 2068795 - RNA, 19 nt, Homo sapiens
  misc_RNA (1)...(19): siRNA sense strand
gggaaccggugcucuacag

SEQ ID NO: 2068796 - RNA, 19 nt, Homo sapiens
  misc_RNA (1)...(19): siRNA sense strand
gcgggaaagccaccacuug

SEQ ID NO: 2068797 - RNA, 19 nt, Homo sapiens
  misc_RNA (1)...(19): siRNA sense strand
cgggccacguguaugaaua

SEQ ID NO: 2068798 - RNA, 19 nt, Homo sapiens
  misc_RNA (1)...(19): siRNA sense strand
guaaccacuucaccuccuu

SEQ ID NO: 2068799 - RNA, 19 nt, Homo sapiens
  misc_RNA (1)...(19): siRNA sense strand
uauccaagcaggaacuuug

SEQ ID NO: 2068800 - RNA, 19 nt, Homo sapiens
  misc_RNA (1)...(19): siRNA sense strand
gcuuggagaaccuggagua

SEQ ID NO: 2068801 - RNA, 19 nt, Homo sapiens
  misc_RNA (1)...(19): siRNA sense strand
gcgagaugauaccuuccuu

SEQ ID NO: 2068802 - RNA, 19 nt, Homo sapiens
  misc_RNA (1)...(19): siRNA sense strand
cguagaggauuacaaagac

SEQ ID NO: 2068803 - RNA, 19 nt, Homo sapiens
  misc_RNA (1)...(19): siRNA sense strand
gagcugcugugcccugacu

SEQ ID NO: 2068804 - RNA, 19 nt, Homo sapiens
  misc_RNA (1)...(19): siRNA sense strand
gugagcugaucucucuaaa

SEQ ID NO: 2068805 - RNA, 19 nt, Homo sapiens
  misc_RNA (1)...(19): siRNA sense strand
aagcaaaacuaaacguuga

SEQ ID NO: 2068806 - RNA, 19 nt, Homo sapiens
  misc_RNA (1)...(19): siRNA sense strand
cggcgucagugaauucugu

SEQ ID NO: 2068807 - RNA, 19 nt, Homo sapiens
  misc_RNA (1)...(19): siRNA sense strand
gaaccuggaguaccuacag

SEQ ID NO: 2068808 - RNA, 19 nt, Homo sapiens
  misc_RNA (1)...(19): siRNA sense strand
caaucuaccaccucuuguu

SEQ ID NO: 2068809 - RNA, 19 nt, Homo sapiens
  misc_RNA (1)...(19): siRNA sense strand
cgacaugcgcuccauuaag

SEQ ID NO: 2068810 - RNA, 19 nt, Homo sapiens
  misc_RNA (1)...(19): siRNA sense strand
uaaacugccaggagcgaaa

SEQ ID NO: 2068811 - RNA, 19 nt, Homo sapiens
  misc_RNA (1)...(19): siRNA sense strand
gcagcccucuaaggacuug

SEQ ID NO: 2068812 - RNA, 19 nt, Homo sapiens
  misc_RNA (1)...(19): siRNA sense strand
uauccucaaugacaaucuu

SEQ ID NO: 2068813 - RNA, 19 nt, Homo sapiens
  misc_RNA (1)...(19): siRNA sense strand
cgugagcuccuuuaacaug

SEQ ID NO: 2068814 - RNA, 19 nt, Homo sapiens
  misc_RNA (1)...(19): siRNA sense strand
gcgguccgguugaauagca

SEQ ID NO: 2068815 - RNA, 19 nt, Homo sapiens
  misc_RNA (1)...(19): siRNA sense strand
ggggaaaucugugacaaug

SEQ ID NO: 2068816 - RNA, 19 nt, Homo sapiens
  misc_RNA (1)...(19): siRNA sense strand
gcugaagucacucauccaa

SEQ ID NO: 2068817 - RNA, 19 nt, Homo sapiens
  misc_RNA (1)...(19): siRNA sense strand
ccaaaccuccagcugcuau

SEQ ID NO: 2068818 - RNA, 19 nt, Homo sapiens
  misc_RNA (1)...(19): siRNA sense strand
gacucuagcguuugcugua

SEQ ID NO: 2068819 - RNA, 19 nt, Homo sapiens
  misc_RNA (1)...(19): siRNA sense strand
ugaaacuucugcccuacgu

SEQ ID NO: 2068820 - RNA, 19 nt, Homo sapiens
  misc_RNA (1)...(19): siRNA sense strand
ccguagaggauuacaaaga

SEQ ID NO: 2068821 - RNA, 19 nt, Homo sapiens
  misc_RNA (1)...(19): siRNA sense strand
gauaagagcuguacauuua

SEQ ID NO: 2068822 - RNA, 19 nt, Homo sapiens
  misc_RNA (1)...(19): siRNA sense strand
gaacagcgauggcuuaaua

SEQ ID NO: 2068823 - RNA, 19 nt, Homo sapiens
  misc_RNA (1)...(19): siRNA sense strand
gaacugagcuguaacuuga

SEQ ID NO: 2068824 - RNA, 19 nt, Homo sapiens
  misc_RNA (1)...(19): siRNA sense strand
gaaauggaaucgaacaaua

SEQ ID NO: 2068825 - RNA, 19 nt, Homo sapiens
  misc_RNA (1)...(19): siRNA sense strand
gaacagaacugcaugugaa

SEQ ID NO: 2068826 - RNA, 19 nt, Homo sapiens
  misc_RNA (1)...(19): siRNA sense strand
gaaagaaacccuuaucuaa

SEQ ID NO: 2068827 - RNA, 19 nt, Homo sapiens
  misc_RNA (1)...(19): siRNA sense strand
gaagaaagauacucaaguu

SEQ ID NO: 2068828 - RNA, 19 nt, Homo sapiens
  misc_RNA (1)...(19): siRNA sense strand
gaaagaagacgaugaagua

SEQ ID NO: 2068829 - RNA, 19 nt, Homo sapiens
  misc_RNA (1)...(19): siRNA sense strand
gcagacacauuaagaauaa

SEQ ID NO: 2068830 - RNA, 19 nt, Homo sapiens
  misc_RNA (1)...(19): siRNA sense strand
gaaaguggaucuaguaaug

SEQ ID NO: 2068831 - RNA, 19 nt, Homo sapiens
  misc_RNA (1)...(19): siRNA sense strand
gcaagaaacuucaucgaaa

SEQ ID NO: 2068832 - RNA, 19 nt, Homo sapiens
  misc_RNA (1)...(19): siRNA sense strand
gaaauuagaugcuauggau

SEQ ID NO: 2068833 - RNA, 19 nt, Homo sapiens
  misc_RNA (1)...(19): siRNA sense strand
ggccagaucugauuuauuu

SEQ ID NO: 2068834 - RNA, 19 nt, Homo sapiens
  misc_RNA (1)...(19): siRNA sense strand
gcaaggaaaucuuuacaaa

SEQ ID NO: 2068835 - RNA, 19 nt, Homo sapiens
  misc_RNA (1)...(19): siRNA sense strand
gaaauacuauggucaggua

SEQ ID NO: 2068836 - RNA, 19 nt, Homo sapiens
  misc_RNA (1)...(19): siRNA sense strand
gaaacacacuuuagagaaa

SEQ ID NO: 2068837 - RNA, 19 nt, Homo sapiens
  misc_RNA (1)...(19): siRNA sense strand
gcaaagaagccaucaauuu

SEQ ID NO: 2068838 - RNA, 19 nt, Homo sapiens
  misc_RNA (1)...(19): siRNA sense strand
gaaaagaagucgucaauuu

SEQ ID NO: 2068839 - RNA, 19 nt, Homo sapiens
  misc_RNA (1)...(19): siRNA sense strand
ggaauggaauccuagaaua

SEQ ID NO: 2068840 - RNA, 19 nt, Homo sapiens
  misc_RNA (1)...(19): siRNA sense strand
gaagccaacucuuauuuaa

SEQ ID NO: 2068841 - RNA, 19 nt, Homo sapiens
  misc_RNA (1)...(19): siRNA sense strand
gaaccaggauucuguauau

SEQ ID NO: 2068842 - RNA, 19 nt, Homo sapiens
  misc_RNA (1)...(19): siRNA sense strand
guacagaccugaaagcaaa

SEQ ID NO: 2068843 - RNA, 19 nt, Homo sapiens
  misc_RNA (1)...(19): siRNA sense strand
ggaaggaucuugacuuuca

SEQ ID NO: 2068844 - RNA, 19 nt, Homo sapiens
  misc_RNA (1)...(19): siRNA sense strand
ggaagaaacuugaauccaa

SEQ ID NO: 2068845 - RNA, 19 nt, Homo sapiens
  misc_RNA (1)...(19): siRNA sense strand
gaacuugaauuccucauug

SEQ ID NO: 2068846 - RNA, 19 nt, Homo sapiens
  misc_RNA (1)...(19): siRNA sense strand
gagaauuggucaguuauua

SEQ ID NO: 2068847 - RNA, 19 nt, Homo sapiens
  misc_RNA (1)...(19): siRNA sense strand
gaugauaguuuaagcagua

SEQ ID NO: 2068848 - RNA, 19 nt, Homo sapiens
  misc_RNA (1)...(19): siRNA sense strand
gaagauaugccacaacuaa

SEQ ID NO: 2068849 - RNA, 19 nt, Homo sapiens
  misc_RNA (1)...(19): siRNA sense strand
gaaaugcaguggaacauga

SEQ ID NO: 2068850 - RNA, 19 nt, Homo sapiens
  misc_RNA (1)...(19): siRNA sense strand
ggaaauccaucuugaauca

SEQ ID NO: 2068851 - RNA, 19 nt, Homo sapiens
  misc_RNA (1)...(19): siRNA sense strand
gaaggcagaucuuggaauu

SEQ ID NO: 2068852 - RNA, 19 nt, Homo sapiens
  misc_RNA (1)...(19): siRNA sense strand
gaacuacucuuugcacauu

SEQ ID NO: 2068853 - RNA, 19 nt, Homo sapiens
  misc_RNA (1)...(19): siRNA sense strand
gcagaggaaucucaaauga

SEQ ID NO: 2068854 - RNA, 19 nt, Homo sapiens
  misc_RNA (1)...(19): siRNA sense strand
gcacagauauaacuuugaa

SEQ ID NO: 2068855 - RNA, 19 nt, Homo sapiens
  misc_RNA (1)...(19): siRNA sense strand
guacaggucuuugauuuaa

SEQ ID NO: 2068856 - RNA, 19 nt, Homo sapiens
  misc_RNA (1)...(19): siRNA sense strand
gagagacacuuuaacaauu

SEQ ID NO: 2068857 - RNA, 19 nt, Homo sapiens
  misc_RNA (1)...(19): siRNA sense strand
ggaauucaguuggacauua

SEQ ID NO: 2068858 - RNA, 19 nt, Homo sapiens
  misc_RNA (1)...(19): siRNA sense strand
gcaagaagguaaagguaaa

SEQ ID NO: 2068859 - RNA, 19 nt, Homo sapiens
  misc_RNA (1)...(19): siRNA sense strand
ucacaaagcuacagaguau

SEQ ID NO: 2068860 - RNA, 19 nt, Homo sapiens
  misc_RNA (1)...(19): siRNA sense strand
gaaccuaacucaaaacaua

SEQ ID NO: 2068861 - RNA, 19 nt, Homo sapiens
  misc_RNA (1)...(19): siRNA sense strand
gauauagcuuugcaucuua

SEQ ID NO: 2068862 - RNA, 19 nt, Homo sapiens
  misc_RNA (1)...(19): siRNA sense strand
gaggaaaucugcuucauuc

SEQ ID NO: 2068863 - RNA, 19 nt, Homo sapiens
  misc_RNA (1)...(19): siRNA sense strand
gguauuagcucacauaaag

SEQ ID NO: 2068864 - RNA, 19 nt, Homo sapiens
  misc_RNA (1)...(19): siRNA sense strand
gaaagcaucacaugaagua

SEQ ID NO: 2068865 - RNA, 19 nt, Homo sapiens
  misc_RNA (1)...(19): siRNA sense strand
gcaaacacauaucuuagaa

SEQ ID NO: 2068866 - RNA, 19 nt, Homo sapiens
  misc_RNA (1)...(19): siRNA sense strand
gcaaagcaacuacgaauuu

SEQ ID NO: 2068867 - RNA, 19 nt, Homo sapiens
  misc_RNA (1)...(19): siRNA sense strand
gaaguuccaucaauuguug

SEQ ID NO: 2068868 - RNA, 19 nt, Homo sapiens
  misc_RNA (1)...(19): siRNA sense strand
gcuugaagauccaaaguua

SEQ ID NO: 2068869 - RNA, 19 nt, Homo sapiens
  misc_RNA (1)...(19): siRNA sense strand
caaagacacuccaggaauu

SEQ ID NO: 2068870 - RNA, 19 nt, Homo sapiens
  misc_RNA (1)...(19): siRNA sense strand
gaggaaagauucaggaaga

SEQ ID NO: 2068871 - RNA, 19 nt, Homo sapiens
  misc_RNA (1)...(19): siRNA sense strand
gaaacaaaguccucauaug

SEQ ID NO: 2068872 - RNA, 19 nt, Homo sapiens
  misc_RNA (1)...(19): siRNA sense strand
gaaaagaacugagcuguaa

SEQ ID NO: 2068873 - RNA, 19 nt, Homo sapiens
  misc_RNA (1)...(19): siRNA sense strand
gaaggaaaguaaaccauug

SEQ ID NO: 2068874 - RNA, 19 nt, Homo sapiens
  misc_RNA (1)...(19): siRNA sense strand
ccagagaauuggucaguua

SEQ ID NO: 2068875 - RNA, 19 nt, Homo sapiens
  misc_RNA (1)...(19): siRNA sense strand
ccaaauggguccuuuagaa

SEQ ID NO: 2068876 - RNA, 19 nt, Homo sapiens
  misc_RNA (1)...(19): siRNA sense strand
gaaucugucuuccuaaauu

SEQ ID NO: 2068877 - RNA, 19 nt, Homo sapiens
  misc_RNA (1)...(19): siRNA sense strand
gaacaugaaggucaagaua

SEQ ID NO: 2068878 - RNA, 19 nt, Homo sapiens
  misc_RNA (1)...(19): siRNA sense strand
gaccaaaucuacuucauug

SEQ ID NO: 2068879 - RNA, 19 nt, Homo sapiens
  misc_RNA (1)...(19): siRNA sense strand
gaauucaguuggacauuaa

SEQ ID NO: 2068880 - RNA, 19 nt, Homo sapiens
  misc_RNA (1)...(19): siRNA sense strand
gaauaacacugagaagaaa

SEQ ID NO: 2068881 - RNA, 19 nt, Homo sapiens
  misc_RNA (1)...(19): siRNA sense strand
aaacagauguggacaagaa

SEQ ID NO: 2068882 - RNA, 19 nt, Homo sapiens
  misc_RNA (1)...(19): siRNA sense strand
gaauagauauggaagacaa

SEQ ID NO: 2068883 - RNA, 19 nt, Homo sapiens
  misc_RNA (1)...(19): siRNA sense strand
gcaagucucuuauuuccaa

SEQ ID NO: 2068884 - RNA, 19 nt, Homo sapiens
  misc_RNA (1)...(19): siRNA sense strand
guaccugaaugucuaaaua

SEQ ID NO: 2068885 - RNA, 19 nt, Homo sapiens
  misc_RNA (1)...(19): siRNA sense strand
gaaaggaacaggagaaaga

SEQ ID NO: 2068886 - RNA, 19 nt, Homo sapiens
  misc_RNA (1)...(19): siRNA sense strand
gcaaagggaauugguauua

SEQ ID NO: 2068887 - RNA, 19 nt, Homo sapiens
  misc_RNA (1)...(19): siRNA sense strand
guaagucccucuagugaaa

SEQ ID NO: 2068888 - RNA, 19 nt, Homo sapiens
  misc_RNA (1)...(19): siRNA sense strand
gaaagaagagaguguauga

SEQ ID NO: 2068889 - RNA, 19 nt, Homo sapiens
  misc_RNA (1)...(19): siRNA sense strand
gagaugcuauugccucaua

SEQ ID NO: 2068890 - RNA, 19 nt, Homo sapiens
  misc_RNA (1)...(19): siRNA sense strand
ggaaagcauaccaauauua

SEQ ID NO: 2068891 - RNA, 19 nt, Homo sapiens
  misc_RNA (1)...(19): siRNA sense strand
caccauaucuuaaguuuga

SEQ ID NO: 2068892 - RNA, 19 nt, Homo sapiens
  misc_RNA (1)...(19): siRNA sense strand
ggaaauaguuguacuucug

SEQ ID NO: 2068893 - RNA, 19 nt, Homo sapiens
  misc_RNA (1)...(19): siRNA sense strand
gcaaagcaaucagcaguuu

SEQ ID NO: 2068894 - RNA, 19 nt, Homo sapiens
  misc_RNA (1)...(19): siRNA sense strand
gaaaggaagaggaacauaa

SEQ ID NO: 2068895 - RNA, 19 nt, Homo sapiens
  misc_RNA (1)...(19): siRNA sense strand
caagagaaauuaccagaug

SEQ ID NO: 2068896 - RNA, 19 nt, Homo sapiens
  misc_RNA (1)...(19): siRNA sense strand
caacuucuauucugaaaga

SEQ ID NO: 2068897 - RNA, 19 nt, Homo sapiens
  misc_RNA (1)...(19): siRNA sense strand
gagaagauuucauggacua

SEQ ID NO: 2068898 - RNA, 19 nt, Homo sapiens
  misc_RNA (1)...(19): siRNA sense strand
gaaagaaggcucagcagaa

SEQ ID NO: 2068899 - RNA, 19 nt, Homo sapiens
  misc_RNA (1)...(19): siRNA sense strand
ggaacaagauauuagagaa

SEQ ID NO: 2068900 - RNA, 19 nt, Homo sapiens
  misc_RNA (1)...(19): siRNA sense strand
caagaggaaucccaaauug

SEQ ID NO: 2068901 - RNA, 19 nt, Homo sapiens
  misc_RNA (1)...(19): siRNA sense strand
gagcagaacuacuuaucaa

SEQ ID NO: 2068902 - RNA, 19 nt, Homo sapiens
  misc_RNA (1)...(19): siRNA sense strand
caaaggaacugcaggugaa

SEQ ID NO: 2068903 - RNA, 19 nt, Homo sapiens
  misc_RNA (1)...(19): siRNA sense strand
gaagaaacuugaauccaau

SEQ ID NO: 2068904 - RNA, 19 nt, Homo sapiens
  misc_RNA (1)...(19): siRNA sense strand
ucacugaugccuuauauua

SEQ ID NO: 2068905 - RNA, 19 nt, Homo sapiens
  misc_RNA (1)...(19): siRNA sense strand
gaaucaaggucuuuaugaa

SEQ ID NO: 2068906 - RNA, 19 nt, Homo sapiens
  misc_RNA (1)...(19): siRNA sense strand
caaaauaagucaccagaua

SEQ ID NO: 2068907 - RNA, 19 nt, Homo sapiens
  misc_RNA (1)...(19): siRNA sense strand
gaacauuuacuucccauuu

SEQ ID NO: 2068908 - RNA, 19 nt, Homo sapiens
  misc_RNA (1)...(19): siRNA sense strand
gcaaggauuucaccaaugu

SEQ ID NO: 2068909 - RNA, 19 nt, Homo sapiens
  misc_RNA (1)...(19): siRNA sense strand
gaggaaagcauaccaauau

SEQ ID NO: 2068910 - RNA, 19 nt, Homo sapiens
  misc_RNA (1)...(19): siRNA sense strand
ggaagaagauagaaacaca

SEQ ID NO: 2068911 - RNA, 19 nt, Homo sapiens
  misc_RNA (1)...(19): siRNA sense strand
gaauuugucucacauagug

SEQ ID NO: 2068912 - RNA, 19 nt, Homo sapiens
  misc_RNA (1)...(19): siRNA sense strand
ggagucugaugaacacuua

SEQ ID NO: 2068913 - RNA, 19 nt, Homo sapiens
  misc_RNA (1)...(19): siRNA sense strand
gaaauacaacugaaucuga

SEQ ID NO: 2068914 - RNA, 19 nt, Homo sapiens
  misc_RNA (1)...(19): siRNA sense strand
gaauugagcaccaaauauu

SEQ ID NO: 2068915 - RNA, 19 nt, Homo sapiens
  misc_RNA (1)...(19): siRNA sense strand
gaaaggcagauuaacaaua

SEQ ID NO: 2068916 - RNA, 19 nt, Homo sapiens
  misc_RNA (1)...(19): siRNA sense strand
gcaaagaaaucgccugucu

SEQ ID NO: 2068917 - RNA, 19 nt, Homo sapiens
  misc_RNA (1)...(19): siRNA sense strand
gcaggaagaugaaaguaau

SEQ ID NO: 2068918 - RNA, 19 nt, Homo sapiens
  misc_RNA (1)...(19): siRNA sense strand
cagaagacauaucccaaua

SEQ ID NO: 2068919 - RNA, 19 nt, Homo sapiens
  misc_RNA (1)...(19): siRNA sense strand
gaucuugacuuucacaaau

SEQ ID NO: 2068920 - RNA, 19 nt, Homo sapiens
  misc_RNA (1)...(19): siRNA sense strand
agaagagaguguaugauua

SEQ ID NO: 2068921 - RNA, 19 nt, Homo sapiens
  misc_RNA (1)...(19): siRNA sense strand
gaagagagaggaacuguuu

SEQ ID NO: 2068922 - RNA, 19 nt, Homo sapiens
  misc_RNA (1)...(19): siRNA sense strand
gagauacacuuaacauaug

SEQ ID NO: 2068923 - RNA, 19 nt, Homo sapiens
  misc_RNA (1)...(19): siRNA sense strand
ccagaacacagaacuauua

SEQ ID NO: 2068924 - RNA, 19 nt, Homo sapiens
  misc_RNA (1)...(19): siRNA sense strand
ggagauacacuuaacauau

SEQ ID NO: 2068925 - RNA, 19 nt, Homo sapiens
  misc_RNA (1)...(19): siRNA sense strand
agaaggaacugaagagaga

SEQ ID NO: 2068926 - RNA, 19 nt, Homo sapiens
  misc_RNA (1)...(19): siRNA sense strand
uaacauaugcagucguaua

SEQ ID NO: 2068927 - RNA, 19 nt, Homo sapiens
  misc_RNA (1)...(19): siRNA sense strand
acacagaacuauuaagcuu

SEQ ID NO: 2068928 - RNA, 19 nt, Homo sapiens
  misc_RNA (1)...(19): siRNA sense strand
gaacacagaacuauuaagc

SEQ ID NO: 2068929 - RNA, 19 nt, Homo sapiens
  misc_RNA (1)...(19): siRNA sense strand
ggacagaaggaacugaaga

SEQ ID NO: 2068930 - RNA, 19 nt, Homo sapiens
  misc_RNA (1)...(19): siRNA sense strand
gcaagggagauacacuuaa

SEQ ID NO: 2068931 - RNA, 19 nt, Homo sapiens
  misc_RNA (1)...(19): siRNA sense strand
cuuaacauaugcagucgua

SEQ ID NO: 2068932 - RNA, 19 nt, Homo sapiens
  misc_RNA (1)...(19): siRNA sense strand
caagggagauacacuuaac

SEQ ID NO: 2068933 - RNA, 19 nt, Homo sapiens
  misc_RNA (1)...(19): siRNA sense strand
cauaugcagucguauaaca

SEQ ID NO: 2068934 - RNA, 19 nt, Homo sapiens
  misc_RNA (1)...(19): siRNA sense strand
caacuacgcaagggagaua

SEQ ID NO: 2068935 - RNA, 19 nt, Homo sapiens
  misc_RNA (1)...(19): siRNA sense strand
cagaagaaauaaggaagga

SEQ ID NO: 2068936 - RNA, 19 nt, Homo sapiens
  misc_RNA (1)...(19): siRNA sense strand
gggagauacacuuaacaua

SEQ ID NO: 2068937 - RNA, 19 nt, Homo sapiens
  misc_RNA (1)...(19): siRNA sense strand
guauaacaccuacuaacau

SEQ ID NO: 2068938 - RNA, 19 nt, Homo sapiens
  misc_RNA (1)...(19): siRNA sense strand
cagaacacagaacuauuaa

SEQ ID NO: 2068939 - RNA, 19 nt, Homo sapiens
  misc_RNA (1)...(19): siRNA sense strand
cacagaacuauuaagcuua

SEQ ID NO: 2068940 - RNA, 19 nt, Homo sapiens
  misc_RNA (1)...(19): siRNA sense strand
cguauaacaccuacuaaca

SEQ ID NO: 2068941 - RNA, 19 nt, Homo sapiens
  misc_RNA (1)...(19): siRNA sense strand
cgcaagggagauacacuua

SEQ ID NO: 2068942 - RNA, 19 nt, Homo sapiens
  misc_RNA (1)...(19): siRNA sense strand
aacauaugcagucguauaa

SEQ ID NO: 2068943 - RNA, 19 nt, Homo sapiens
  misc_RNA (1)...(19): siRNA sense strand
gaacuguuuuggagcauca

SEQ ID NO: 2068944 - RNA, 19 nt, Homo sapiens
  misc_RNA (1)...(19): siRNA sense strand
ggaacugaagagagaggaa

SEQ ID NO: 2068945 - RNA, 19 nt, Homo sapiens
  misc_RNA (1)...(19): siRNA sense strand
ccucagaagaaauaaggaa

SEQ ID NO: 2068946 - RNA, 19 nt, Homo sapiens
  misc_RNA (1)...(19): siRNA sense strand
gaaaaggacagaaggaacu

SEQ ID NO: 2068947 - RNA, 19 nt, Homo sapiens
  misc_RNA (1)...(19): siRNA sense strand
agucguauaacaccuacua

SEQ ID NO: 2068948 - RNA, 19 nt, Homo sapiens
  misc_RNA (1)...(19): siRNA sense strand
gcacucccacaccauucaa

SEQ ID NO: 2068949 - RNA, 19 nt, Homo sapiens
  misc_RNA (1)...(19): siRNA sense strand
gacagaaggaacugaagag

SEQ ID NO: 2068950 - RNA, 19 nt, Homo sapiens
  misc_RNA (1)...(19): siRNA sense strand
uuccaccucagaagaaaua

SEQ ID NO: 2068951 - RNA, 19 nt, Homo sapiens
  misc_RNA (1)...(19): siRNA sense strand
gaaaggaacuucuacauuu

SEQ ID NO: 2068952 - RNA, 19 nt, Homo sapiens
  misc_RNA (1)...(19): siRNA sense strand
acaaggagcuuccaauuua

SEQ ID NO: 2068953 - RNA, 19 nt, Homo sapiens
  misc_RNA (1)...(19): siRNA sense strand
ggaaauaucccauuagauu

SEQ ID NO: 2068954 - RNA, 19 nt, Homo sapiens
  misc_RNA (1)...(19): siRNA sense strand
ggaaaucacuaauggauau

SEQ ID NO: 2068955 - RNA, 19 nt, Homo sapiens
  misc_RNA (1)...(19): siRNA sense strand
acaaguggcuggaauguua

SEQ ID NO: 2068956 - RNA, 19 nt, Homo sapiens
  misc_RNA (1)...(19): siRNA sense strand
gaaauugccugggaagaaa

SEQ ID NO: 2068957 - RNA, 19 nt, Homo sapiens
  misc_RNA (1)...(19): siRNA sense strand
gaaauuggcuguuuugaaa

SEQ ID NO: 2068958 - RNA, 19 nt, Homo sapiens
  misc_RNA (1)...(19): siRNA sense strand
gcaaacaaaucauaagaca

SEQ ID NO: 2068959 - RNA, 19 nt, Homo sapiens
  misc_RNA (1)...(19): siRNA sense strand
gcaacaggcugccgucuga

SEQ ID NO: 2068960 - RNA, 19 nt, Homo sapiens
  misc_RNA (1)...(19): siRNA sense strand
gaacauaaguagccgagau

SEQ ID NO: 2068961 - RNA, 19 nt, Homo sapiens
  misc_RNA (1)...(19): siRNA sense strand
gaggaaaugucaaugagaa

SEQ ID NO: 2068962 - RNA, 19 nt, Homo sapiens
  misc_RNA (1)...(19): siRNA sense strand
uaacagaugucaaacacuu

SEQ ID NO: 2068963 - RNA, 19 nt, Homo sapiens
  misc_RNA (1)...(19): siRNA sense strand
gaggugacuucuaucaaua

SEQ ID NO: 2068964 - RNA, 19 nt, Homo sapiens
  misc_RNA (1)...(19): siRNA sense strand
gagccagaauuuauacaua

SEQ ID NO: 2068965 - RNA, 19 nt, Homo sapiens
  misc_RNA (1)...(19): siRNA sense strand
gaaacgagcccugaaugua

SEQ ID NO: 2068966 - RNA, 19 nt, Homo sapiens
  misc_RNA (1)...(19): siRNA sense strand
ugaagaagauggauacuca

SEQ ID NO: 2068967 - RNA, 19 nt, Homo sapiens
  misc_RNA (1)...(19): siRNA sense strand
gcacagggacuucgacauu

SEQ ID NO: 2068968 - RNA, 19 nt, Homo sapiens
  misc_RNA (1)...(19): siRNA sense strand
caagacaguuuguuggaaa

SEQ ID NO: 2068969 - RNA, 19 nt, Homo sapiens
  misc_RNA (1)...(19): siRNA sense strand
ccuaguacgucagaaauua

SEQ ID NO: 2068970 - RNA, 19 nt, Homo sapiens
  misc_RNA (1)...(19): siRNA sense strand
ggagaaggcgucagauauu

SEQ ID NO: 2068971 - RNA, 19 nt, Homo sapiens
  misc_RNA (1)...(19): siRNA sense strand
gcaaauaaccauggaauuc

SEQ ID NO: 2068972 - RNA, 19 nt, Homo sapiens
  misc_RNA (1)...(19): siRNA sense strand
gguaauguaugauguuguu

SEQ ID NO: 2068973 - RNA, 19 nt, Homo sapiens
  misc_RNA (1)...(19): siRNA sense strand
gagaaggcgucagauauug

SEQ ID NO: 2068974 - RNA, 19 nt, Homo sapiens
  misc_RNA (1)...(19): siRNA sense strand
gaagauuccuccucgaaag

SEQ ID NO: 2068975 - RNA, 19 nt, Homo sapiens
  misc_RNA (1)...(19): siRNA sense strand
aaugacagcuucuucaauu

SEQ ID NO: 2068976 - RNA, 19 nt, Homo sapiens
  misc_RNA (1)...(19): siRNA sense strand
gaugagcgguuccaccaaa

SEQ ID NO: 2068977 - RNA, 19 nt, Homo sapiens
  misc_RNA (1)...(19): siRNA sense strand
gaagagcccuaugaagaga

SEQ ID NO: 2068978 - RNA, 19 nt, Homo sapiens
  misc_RNA (1)...(19): siRNA sense strand
cgacauaccauacagauug

SEQ ID NO: 2068979 - RNA, 19 nt, Homo sapiens
  misc_RNA (1)...(19): siRNA sense strand
agaccacacuuaaugauuu

SEQ ID NO: 2068980 - RNA, 19 nt, Homo sapiens
  misc_RNA (1)...(19): siRNA sense strand
agacaaaucuggugaaacu

SEQ ID NO: 2068981 - RNA, 19 nt, Homo sapiens
  misc_RNA (1)...(19): siRNA sense strand
cuagagaaauccagacuug

SEQ ID NO: 2068982 - RNA, 19 nt, Homo sapiens
  misc_RNA (1)...(19): siRNA sense strand
gcuggaauguuacaaguau

SEQ ID NO: 2068983 - RNA, 19 nt, Homo sapiens
  misc_RNA (1)...(19): siRNA sense strand
gauauuguccugcuucuug

SEQ ID NO: 2068984 - RNA, 19 nt, Homo sapiens
  misc_RNA (1)...(19): siRNA sense strand
gagaagaugcaccacuaua

SEQ ID NO: 2068985 - RNA, 19 nt, Homo sapiens
  misc_RNA (1)...(19): siRNA sense strand
caggaaggguaauguauga

SEQ ID NO: 2068986 - RNA, 19 nt, Homo sapiens
  misc_RNA (1)...(19): siRNA sense strand
gaaggguaauguaugaugu

SEQ ID NO: 2068987 - RNA, 19 nt, Homo sapiens
  misc_RNA (1)...(19): siRNA sense strand
cauaguagaugaucaguac

SEQ ID NO: 2068988 - RNA, 19 nt, Homo sapiens
  misc_RNA (1)...(19): siRNA sense strand
gaugguugcuuucagcuau

SEQ ID NO: 2068989 - RNA, 19 nt, Homo sapiens
  misc_RNA (1)...(19): siRNA sense strand
gcaagacaguuuguuggaa

SEQ ID NO: 2068990 - RNA, 19 nt, Homo sapiens
  misc_RNA (1)...(19): siRNA sense strand
gcaaaucaaagccuacuau

SEQ ID NO: 2068991 - RNA, 19 nt, Homo sapiens
  misc_RNA (1)...(19): siRNA sense strand
caaacaggaucccucguau

SEQ ID NO: 2068992 - RNA, 19 nt, Homo sapiens
  misc_RNA (1)...(19): siRNA sense strand
ccaguugcuucaucaagua

SEQ ID NO: 2068993 - RNA, 19 nt, Homo sapiens
  misc_RNA (1)...(19): siRNA sense strand
aacaagaggugacuucuau

SEQ ID NO: 2068994 - RNA, 19 nt, Homo sapiens
  misc_RNA (1)...(19): siRNA sense strand
gagaaauccagacuuguuu

SEQ ID NO: 2068995 - RNA, 19 nt, Homo sapiens
  misc_RNA (1)...(19): siRNA sense strand
gaggagaaggcgucagaua

SEQ ID NO: 2068996 - RNA, 19 nt, Homo sapiens
  misc_RNA (1)...(19): siRNA sense strand
ccauacagauugcugaguu

SEQ ID NO: 2068997 - RNA, 19 nt, Homo sapiens
  misc_RNA (1)...(19): siRNA sense strand
cccauuagauuaugcugua

SEQ ID NO: 2068998 - RNA, 19 nt, Homo sapiens
  misc_RNA (1)...(19): siRNA sense strand
gcaccacuauaucaaugaa

SEQ ID NO: 2068999 - RNA, 19 nt, Homo sapiens
  misc_RNA (1)...(19): siRNA sense strand
ccaaauauggccagacaaa

SEQ ID NO: 2069000 - RNA, 19 nt, Homo sapiens
  misc_RNA (1)...(19): siRNA sense strand
ccaccacaaugacaaagaa

SEQ ID NO: 2069001 - RNA, 19 nt, Homo sapiens
  misc_RNA (1)...(19): siRNA sense strand
gaugaagaaagucaaauga

SEQ ID NO: 2069002 - RNA, 19 nt, Homo sapiens
  misc_RNA (1)...(19): siRNA sense strand
ggaacaaucagaucuauac

SEQ ID NO: 2069003 - RNA, 19 nt, Homo sapiens
  misc_RNA (1)...(19): siRNA sense strand
aagaagagcccuaugaaga

SEQ ID NO: 2069004 - RNA, 19 nt, Homo sapiens
  misc_RNA (1)...(19): siRNA sense strand
caaugaguauguuaacaga

SEQ ID NO: 2069005 - RNA, 19 nt, Homo sapiens
  misc_RNA (1)...(19): siRNA sense strand
gcucuauccuguugaccua

SEQ ID NO: 2069006 - RNA, 19 nt, Homo sapiens
  misc_RNA (1)...(19): siRNA sense strand
guucaaagaugcaacaaaa

SEQ ID NO: 2069007 - RNA, 19 nt, Homo sapiens
  misc_RNA (1)...(19): siRNA sense strand
gaacgcucccuaccauaaa

SEQ ID NO: 2069008 - RNA, 19 nt, Homo sapiens
  misc_RNA (1)...(19): siRNA sense strand
caacucaggaaaucacuaa

SEQ ID NO: 2069009 - RNA, 19 nt, Homo sapiens
  misc_RNA (1)...(19): siRNA sense strand
gcaaguggaauguguacaa

SEQ ID NO: 2069010 - RNA, 19 nt, Homo sapiens
  misc_RNA (1)...(19): siRNA sense strand
gaagaugcaccacuauauc

SEQ ID NO: 2069011 - RNA, 19 nt, Homo sapiens
  misc_RNA (1)...(19): siRNA sense strand
uuacaaguaucaacagaug

SEQ ID NO: 2069012 - RNA, 19 nt, Homo sapiens
  misc_RNA (1)...(19): siRNA sense strand
uuaaugauuuguccaguug

SEQ ID NO: 2069013 - RNA, 19 nt, Homo sapiens
  misc_RNA (1)...(19): siRNA sense strand
caaggagcuuccaauuuau

SEQ ID NO: 2069014 - RNA, 19 nt, Homo sapiens
  misc_RNA (1)...(19): siRNA sense strand
gcgauaacccugauauugu

SEQ ID NO: 2069015 - RNA, 19 nt, Homo sapiens
  misc_RNA (1)...(19): siRNA sense strand
ccacucagguaauccauca

SEQ ID NO: 2069016 - RNA, 19 nt, Homo sapiens
  misc_RNA (1)...(19): siRNA sense strand
gaccagugcuugcuagagu

SEQ ID NO: 2069017 - RNA, 19 nt, Homo sapiens
  misc_RNA (1)...(19): siRNA sense strand
gacagcuucuucaauuauu

SEQ ID NO: 2069018 - RNA, 19 nt, Homo sapiens
  misc_RNA (1)...(19): siRNA sense strand
gaacuccgccuucguuucu

SEQ ID NO: 2069019 - RNA, 19 nt, Homo sapiens
  misc_RNA (1)...(19): siRNA sense strand
uggguuaucugcugaagaa

SEQ ID NO: 2069020 - RNA, 19 nt, Homo sapiens
  misc_RNA (1)...(19): siRNA sense strand
ggugaaacuucuccugaug

SEQ ID NO: 2069021 - RNA, 19 nt, Homo sapiens
  misc_RNA (1)...(19): siRNA sense strand
uguauuagcuggagccaau

SEQ ID NO: 2069022 - RNA, 19 nt, Homo sapiens
  misc_RNA (1)...(19): siRNA sense strand
gagaggaaacaacagcuaa

SEQ ID NO: 2069023 - RNA, 19 nt, Homo sapiens
  misc_RNA (1)...(19): siRNA sense strand
cgaagaauccgaaaguuca

SEQ ID NO: 2069024 - RNA, 19 nt, Homo sapiens
  misc_RNA (1)...(19): siRNA sense strand
ucaaaugguuuaccugaag

SEQ ID NO: 2069025 - RNA, 19 nt, Homo sapiens
  misc_RNA (1)...(19): siRNA sense strand
caagacagaaaugcaaaua

SEQ ID NO: 2069026 - RNA, 19 nt, Homo sapiens
  misc_RNA (1)...(19): siRNA sense strand
ggagugugcuucggaaauc

SEQ ID NO: 2069027 - RNA, 19 nt, Homo sapiens
  misc_RNA (1)...(19): siRNA sense strand
gcaagaggaaggaagcaaa

SEQ ID NO: 2069028 - RNA, 19 nt, Homo sapiens
  misc_RNA (1)...(19): siRNA sense strand
uuacgugucugcucagcua

SEQ ID NO: 2069029 - RNA, 19 nt, Homo sapiens
  misc_RNA (1)...(19): siRNA sense strand
acucaaagcugccagauac

SEQ ID NO: 2069030 - RNA, 19 nt, Homo sapiens
  misc_RNA (1)...(19): siRNA sense strand
caucacaacucaggaaauc

SEQ ID NO: 2069031 - RNA, 19 nt, Homo sapiens
  misc_RNA (1)...(19): siRNA sense strand
guggagaccucaacauagu

SEQ ID NO: 2069032 - RNA, 19 nt, Homo sapiens
  misc_RNA (1)...(19): siRNA sense strand
caaaugguuuaccugaaga

SEQ ID NO: 2069033 - RNA, 19 nt, Homo sapiens
  misc_RNA (1)...(19): siRNA sense strand
agacagaaaugcaaauaac

SEQ ID NO: 2069034 - RNA, 19 nt, Homo sapiens
  misc_RNA (1)...(19): siRNA sense strand
cugcucagcuacaauauau

SEQ ID NO: 2069035 - RNA, 19 nt, Homo sapiens
  misc_RNA (1)...(19): siRNA sense strand
aaaggaacuucuacauuuc

SEQ ID NO: 2069036 - RNA, 19 nt, Homo sapiens
  misc_RNA (1)...(19): siRNA sense strand
gaccacacuuaaugauuug

SEQ ID NO: 2069037 - RNA, 19 nt, Homo sapiens
  misc_RNA (1)...(19): siRNA sense strand
uaccuuagcucaagaagag

SEQ ID NO: 2069038 - RNA, 19 nt, Homo sapiens
  misc_RNA (1)...(19): siRNA sense strand
ggaugugaauggaaauauc

SEQ ID NO: 2069039 - RNA, 19 nt, Homo sapiens
  misc_RNA (1)...(19): siRNA sense strand
acgaggagaugaaguguug

SEQ ID NO: 2069040 - RNA, 19 nt, Homo sapiens
  misc_RNA (1)...(19): siRNA sense strand
caacaagaggugacuucua

SEQ ID NO: 2069041 - RNA, 19 nt, Homo sapiens
  misc_RNA (1)...(19): siRNA sense strand
gaacuucuacauuucuuca

SEQ ID NO: 2069042 - RNA, 19 nt, Homo sapiens
  misc_RNA (1)...(19): siRNA sense strand
gaagccaucuggauuucuc

SEQ ID NO: 2069043 - RNA, 19 nt, Homo sapiens
  misc_RNA (1)...(19): siRNA sense strand
gaagccagcaaacaaauca

SEQ ID NO: 2069044 - RNA, 19 nt, Homo sapiens
  misc_RNA (1)...(19): siRNA sense strand
ucaaacacuucuuaucauc

SEQ ID NO: 2069045 - RNA, 19 nt, Homo sapiens
  misc_RNA (1)...(19): siRNA sense strand
caaauaaccauggaauuca

SEQ ID NO: 2069046 - RNA, 19 nt, Homo sapiens
  misc_RNA (1)...(19): siRNA sense strand
gccgagcgaugucgacuug

SEQ ID NO: 2069047 - RNA, 19 nt, Homo sapiens
  misc_RNA (1)...(19): siRNA sense strand
gguacagccuucaccauca

SEQ ID NO: 2069048 - RNA, 19 nt, Homo sapiens
  misc_RNA (1)...(19): siRNA sense strand
cagucaagaugaacagaaa

SEQ ID NO: 2069049 - RNA, 19 nt, Homo sapiens
  misc_RNA (1)...(19): siRNA sense strand
gcaguucugugagaggaaa

SEQ ID NO: 2069050 - RNA, 19 nt, Homo sapiens
  misc_RNA (1)...(19): siRNA sense strand
gccaagaccacacuuaaug

SEQ ID NO: 2069051 - RNA, 19 nt, Homo sapiens
  misc_RNA (1)...(19): siRNA sense strand
guauaaagcugugaagaaa

SEQ ID NO: 2069052 - RNA, 19 nt, Homo sapiens
  misc_RNA (1)...(19): siRNA sense strand
gaacagggcuagucuccau

SEQ ID NO: 2069053 - RNA, 19 nt, Homo sapiens
  misc_RNA (1)...(19): siRNA sense strand
gggaguagcuuuagauaca

SEQ ID NO: 2069054 - RNA, 19 nt, Homo sapiens
  misc_RNA (1)...(19): siRNA sense strand
gcaaagcaguauaauaugg

SEQ ID NO: 2069055 - RNA, 19 nt, Homo sapiens
  misc_RNA (1)...(19): siRNA sense strand
ggaaaccugcaauauaaua

SEQ ID NO: 2069056 - RNA, 19 nt, Homo sapiens
  misc_RNA (1)...(19): siRNA sense strand
uuggaaaccugcaauauaa

SEQ ID NO: 2069057 - RNA, 19 nt, Homo sapiens
  misc_RNA (1)...(19): siRNA sense strand
ggucaugagauucgaauua

SEQ ID NO: 2069058 - RNA, 19 nt, Homo sapiens
  misc_RNA (1)...(19): siRNA sense strand
gaccaucugugcaaagaaa

SEQ ID NO: 2069059 - RNA, 19 nt, Homo sapiens
  misc_RNA (1)...(19): siRNA sense strand
caaaugcaaagcaguauaa

SEQ ID NO: 2069060 - RNA, 19 nt, Homo sapiens
  misc_RNA (1)...(19): siRNA sense strand
ccacagauuuacccgaauu

SEQ ID NO: 2069061 - RNA, 19 nt, Homo sapiens
  misc_RNA (1)...(19): siRNA sense strand
ggucuacgcucauccuuuc

SEQ ID NO: 2069062 - RNA, 19 nt, Homo sapiens
  misc_RNA (1)...(19): siRNA sense strand
aaacaaaugcaaagcagua

SEQ ID NO: 2069063 - RNA, 19 nt, Homo sapiens
  misc_RNA (1)...(19): siRNA sense strand
gcauuugccucagguuaaa

SEQ ID NO: 2069064 - RNA, 19 nt, Homo sapiens
  misc_RNA (1)...(19): siRNA sense strand
uggaagagcuccucauuac

SEQ ID NO: 2069065 - RNA, 19 nt, Homo sapiens
  misc_RNA (1)...(19): siRNA sense strand
ccagagaagccuaugauga

SEQ ID NO: 2069066 - RNA, 19 nt, Homo sapiens
  misc_RNA (1)...(19): siRNA sense strand
gcaaagaaaccaccaucau

SEQ ID NO: 2069067 - RNA, 19 nt, Homo sapiens
  misc_RNA (1)...(19): siRNA sense strand
gccugaauauuaaguugua

SEQ ID NO: 2069068 - RNA, 19 nt, Homo sapiens
  misc_RNA (1)...(19): siRNA sense strand
caaagaaaccaccaucauc

SEQ ID NO: 2069069 - RNA, 19 nt, Homo sapiens
  misc_RNA (1)...(19): siRNA sense strand
cugaggccauggauuguua

SEQ ID NO: 2069070 - RNA, 19 nt, Homo sapiens
  misc_RNA (1)...(19): siRNA sense strand
ucccuagccugaauauuaa

SEQ ID NO: 2069071 - RNA, 19 nt, Homo sapiens
  misc_RNA (1)...(19): siRNA sense strand
acaagcagguggucacaga

SEQ ID NO: 2069072 - RNA, 19 nt, Homo sapiens
  misc_RNA (1)...(19): siRNA sense strand
gauuuaaggaguuguuuga

SEQ ID NO: 2069073 - RNA, 19 nt, Homo sapiens
  misc_RNA (1)...(19): siRNA sense strand
gaguagcuuuagauacaaa

SEQ ID NO: 2069074 - RNA, 19 nt, Homo sapiens
  misc_RNA (1)...(19): siRNA sense strand
ugucaagggucaacguuug

SEQ ID NO: 2069075 - RNA, 19 nt, Homo sapiens
  misc_RNA (1)...(19): siRNA sense strand
ccaggucuucuaauaauuu

SEQ ID NO: 2069076 - RNA, 19 nt, Homo sapiens
  misc_RNA (1)...(19): siRNA sense strand
caucggcccuuguucuaug

SEQ ID NO: 2069077 - RNA, 19 nt, Homo sapiens
  misc_RNA (1)...(19): siRNA sense strand
uucccuagccugaauauua

SEQ ID NO: 2069078 - RNA, 19 nt, Homo sapiens
  misc_RNA (1)...(19): siRNA sense strand
ggaguagcuuuagauacaa

SEQ ID NO: 2069079 - RNA, 19 nt, Homo sapiens
  misc_RNA (1)...(19): siRNA sense strand
uuacugaggccauggauug

SEQ ID NO: 2069080 - RNA, 19 nt, Homo sapiens
  misc_RNA (1)...(19): siRNA sense strand
gaagagcuccucauuaccu

SEQ ID NO: 2069081 - RNA, 19 nt, Homo sapiens
  misc_RNA (1)...(19): siRNA sense strand
aaacgugauugaaauugga

SEQ ID NO: 2069082 - RNA, 19 nt, Homo sapiens
  misc_RNA (1)...(19): siRNA sense strand
ggucaacguuugcaguagu

SEQ ID NO: 2069083 - RNA, 19 nt, Homo sapiens
  misc_RNA (1)...(19): siRNA sense strand
cuuggaaaccugcaauaua

SEQ ID NO: 2069084 - RNA, 19 nt, Homo sapiens
  misc_RNA (1)...(19): siRNA sense strand
cgugacggccacagauuua

SEQ ID NO: 2069085 - RNA, 19 nt, Homo sapiens
  misc_RNA (1)...(19): siRNA sense strand
uguauaaagcugugaagaa

SEQ ID NO: 2069086 - RNA, 19 nt, Homo sapiens
  misc_RNA (1)...(19): siRNA sense strand
caacucugauaacaacuac

SEQ ID NO: 2069087 - RNA, 19 nt, Homo sapiens
  misc_RNA (1)...(19): siRNA sense strand
ggauuguuauggugcuguu

SEQ ID NO: 2069088 - RNA, 19 nt, Homo sapiens
  misc_RNA (1)...(19): siRNA sense strand
gagaucauggcaagauguu

SEQ ID NO: 2069089 - RNA, 19 nt, Homo sapiens
  misc_RNA (1)...(19): siRNA sense strand
agauuuacccgaauuacuu

SEQ ID NO: 2069090 - RNA, 19 nt, Homo sapiens
  misc_RNA (1)...(19): siRNA sense strand
uagccugaauauuaaguug

SEQ ID NO: 2069091 - RNA, 19 nt, Homo sapiens
  misc_RNA (1)...(19): siRNA sense strand
cagagaucauggcaagaug

SEQ ID NO: 2069092 - RNA, 19 nt, Homo sapiens
  misc_RNA (1)...(19): siRNA sense strand
gagcuccucauuaccuuug

SEQ ID NO: 2069093 - RNA, 19 nt, Homo sapiens
  misc_RNA (1)...(19): siRNA sense strand
ccaacucugauaacaacua

SEQ ID NO: 2069094 - RNA, 19 nt, Homo sapiens
  misc_RNA (1)...(19): siRNA sense strand
gaucauggcaagauguuuu

SEQ ID NO: 2069095 - RNA, 19 nt, Homo sapiens
  misc_RNA (1)...(19): siRNA sense strand
uguuugaccuggaggaaau

SEQ ID NO: 2069096 - RNA, 19 nt, Homo sapiens
  misc_RNA (1)...(19): siRNA sense strand
cagagaagccuaugaugac

SEQ ID NO: 2069097 - RNA, 19 nt, Homo sapiens
  misc_RNA (1)...(19): siRNA sense strand
gcaagauguuuuauuccaa

SEQ ID NO: 2069098 - RNA, 19 nt, Homo sapiens
  misc_RNA (1)...(19): siRNA sense strand
acaaaugcaaagcaguaua

SEQ ID NO: 2069099 - RNA, 19 nt, Homo sapiens
  misc_RNA (1)...(19): siRNA sense strand
gucaugagauucgaauuac

SEQ ID NO: 2069100 - RNA, 19 nt, Homo sapiens
  misc_RNA (1)...(19): siRNA sense strand
gccaucggcccuuguucua

SEQ ID NO: 2069101 - RNA, 19 nt, Homo sapiens
  misc_RNA (1)...(19): siRNA sense strand
gaaauucagguuggagaag

SEQ ID NO: 2069102 - RNA, 19 nt, Homo sapiens
  misc_RNA (1)...(19): siRNA sense strand
aagcauuugccucagguua

SEQ ID NO: 2069103 - RNA, 19 nt, Homo sapiens
  misc_RNA (1)...(19): siRNA sense strand
gaaauuggagcuggaacag

SEQ ID NO: 2069104 - RNA, 19 nt, Homo sapiens
  misc_RNA (1)...(19): siRNA sense strand
cuacgcucauccuuucuug

SEQ ID NO: 2069105 - RNA, 19 nt, Homo sapiens
  misc_RNA (1)...(19): siRNA sense strand
gauuuacccgaauuacuug

SEQ ID NO: 2069106 - RNA, 19 nt, Homo sapiens
  misc_RNA (1)...(19): siRNA sense strand
gagaagccuaugaugacaa

SEQ ID NO: 2069107 - RNA, 19 nt, Homo sapiens
  misc_RNA (1)...(19): siRNA sense strand
caaagcaguauaauauggu

SEQ ID NO: 2069108 - RNA, 19 nt, Homo sapiens
  misc_RNA (1)...(19): siRNA sense strand
uuggaagagcuccucauua

SEQ ID NO: 2069109 - RNA, 19 nt, Homo sapiens
  misc_RNA (1)...(19): siRNA sense strand
caugagauucgaauuacug

SEQ ID NO: 2069110 - RNA, 19 nt, Homo sapiens
  misc_RNA (1)...(19): siRNA sense strand
gaauuacugaggccaugga

SEQ ID NO: 2069111 - RNA, 19 nt, Homo sapiens
  misc_RNA (1)...(19): siRNA sense strand
guuauggugcuguuguuug

SEQ ID NO: 2069112 - RNA, 19 nt, Homo sapiens
  misc_RNA (1)...(19): siRNA sense strand
agaagccuaugaugacaag

SEQ ID NO: 2069113 - RNA, 19 nt, Homo sapiens
  misc_RNA (1)...(19): siRNA sense strand
agauagauuuaaggaguug

SEQ ID NO: 2069114 - RNA, 19 nt, Homo sapiens
  misc_RNA (1)...(19): siRNA sense strand
ucuccauuguggcaaguuu

SEQ ID NO: 2069115 - RNA, 19 nt, Homo sapiens
  misc_RNA (1)...(19): siRNA sense strand
caguuucccuagccugaau

SEQ ID NO: 2069116 - RNA, 19 nt, Homo sapiens
  misc_RNA (1)...(19): siRNA sense strand
cccaggucuucuaauaauu

SEQ ID NO: 2069117 - RNA, 19 nt, Homo sapiens
  misc_RNA (1)...(19): siRNA sense strand
agagaagccuaugaugaca

SEQ ID NO: 2069118 - RNA, 19 nt, Homo sapiens
  misc_RNA (1)...(19): siRNA sense strand
uuacccgaauuacuuggaa

SEQ ID NO: 2069119 - RNA, 19 nt, Homo sapiens
  misc_RNA (1)...(19): siRNA sense strand
caccagagaagccuaugau

SEQ ID NO: 2069120 - RNA, 19 nt, Homo sapiens
  misc_RNA (1)...(19): siRNA sense strand
cacagauuuacccgaauua

SEQ ID NO: 2069121 - RNA, 19 nt, Homo sapiens
  misc_RNA (1)...(19): siRNA sense strand
cgaaacaccaaaaugaaaa

SEQ ID NO: 2069122 - RNA, 19 nt, Homo sapiens
  misc_RNA (1)...(19): siRNA sense strand
gguuggagaaggaaaauaa

SEQ ID NO: 2069123 - RNA, 19 nt, Homo sapiens
  misc_RNA (1)...(19): siRNA sense strand
acagagaucauggcaagau

SEQ ID NO: 2069124 - RNA, 19 nt, Homo sapiens
  misc_RNA (1)...(19): siRNA sense strand
gucaacguuugcaguagug

SEQ ID NO: 2069125 - RNA, 19 nt, Homo sapiens
  misc_RNA (1)...(19): siRNA sense strand
gcagguggucacagagauc

SEQ ID NO: 2069126 - RNA, 19 nt, Homo sapiens
  misc_RNA (1)...(19): siRNA sense strand
ugaaauuggagcuggaaca

SEQ ID NO: 2069127 - RNA, 19 nt, Homo sapiens
  misc_RNA (1)...(19): siRNA sense strand
uuauggugcuguuguuugg

SEQ ID NO: 2069128 - RNA, 19 nt, Homo sapiens
  misc_RNA (1)...(19): siRNA sense strand
caaagaagcucaagaaaga

SEQ ID NO: 2069129 - RNA, 19 nt, Homo sapiens
  misc_RNA (1)...(19): siRNA sense strand
ccagacaaauggaaugaua

SEQ ID NO: 2069130 - RNA, 19 nt, Homo sapiens
  misc_RNA (1)...(19): siRNA sense strand
acaaauagaugccauagau

SEQ ID NO: 2069131 - RNA, 19 nt, Homo sapiens
  misc_RNA (1)...(19): siRNA sense strand
ccagcaagauguacucuaa

SEQ ID NO: 2069132 - RNA, 19 nt, Homo sapiens
  misc_RNA (1)...(19): siRNA sense strand
gaaaugugcuacaguuuac

SEQ ID NO: 2069133 - RNA, 19 nt, Homo sapiens
  misc_RNA (1)...(19): siRNA sense strand
gaaaccaauuccuucugua

SEQ ID NO: 2069134 - RNA, 19 nt, Homo sapiens
  misc_RNA (1)...(19): siRNA sense strand
caaaucugcucuauucuca

SEQ ID NO: 2069135 - RNA, 19 nt, Homo sapiens
  misc_RNA (1)...(19): siRNA sense strand
ccagaaaagugcaaaguua

SEQ ID NO: 2069136 - RNA, 19 nt, Homo sapiens
  misc_RNA (1)...(19): siRNA sense strand
caagauguacucuaaugua

SEQ ID NO: 2069137 - RNA, 19 nt, Homo sapiens
  misc_RNA (1)...(19): siRNA sense strand
ggaagccuguucucucuau

SEQ ID NO: 2069138 - RNA, 19 nt, Homo sapiens
  misc_RNA (1)...(19): siRNA sense strand
gaaaauacccugcaauuca

SEQ ID NO: 2069139 - RNA, 19 nt, Homo sapiens
  misc_RNA (1)...(19): siRNA sense strand
guucauagcccuuacaaau

SEQ ID NO: 2069140 - RNA, 19 nt, Homo sapiens
  misc_RNA (1)...(19): siRNA sense strand
uaccauccauccagaauuu

SEQ ID NO: 2069141 - RNA, 19 nt, Homo sapiens
  misc_RNA (1)...(19): siRNA sense strand
ccagagcagucuagaaaug

SEQ ID NO: 2069142 - RNA, 19 nt, Homo sapiens
  misc_RNA (1)...(19): siRNA sense strand
gugaugaacuacaaauaga

SEQ ID NO: 2069143 - RNA, 19 nt, Homo sapiens
  misc_RNA (1)...(19): siRNA sense strand
cuagaaaugugcuacaguu

SEQ ID NO: 2069144 - RNA, 19 nt, Homo sapiens
  misc_RNA (1)...(19): siRNA sense strand
gauguacucuaauguauac

SEQ ID NO: 2069145 - RNA, 19 nt, Homo sapiens
  misc_RNA (1)...(19): siRNA sense strand
ugaaucaaauuucccaaga

SEQ ID NO: 2069146 - RNA, 19 nt, Homo sapiens
  misc_RNA (1)...(19): siRNA sense strand
uggaugcgauggauauuaa

SEQ ID NO: 2069147 - RNA, 19 nt, Homo sapiens
  misc_RNA (1)...(19): siRNA sense strand
gaacuucuagcuucaccua

SEQ ID NO: 2069148 - RNA, 19 nt, Homo sapiens
  misc_RNA (1)...(19): siRNA sense strand
caaauggaaugauaaacca

SEQ ID NO: 2069149 - RNA, 19 nt, Homo sapiens
  misc_RNA (1)...(19): siRNA sense strand
agaaaugugcuacaguuua

SEQ ID NO: 2069150 - RNA, 19 nt, Homo sapiens
  misc_RNA (1)...(19): siRNA sense strand
gaaagacagcucccacguu

SEQ ID NO: 2069151 - RNA, 19 nt, Homo sapiens
  misc_RNA (1)...(19): siRNA sense strand
uuacuuaaauguccacguu

SEQ ID NO: 2069152 - RNA, 19 nt, Homo sapiens
  misc_RNA (1)...(19): siRNA sense strand
caaagcagccucagauauc

SEQ ID NO: 2069153 - RNA, 19 nt, Homo sapiens
  misc_RNA (1)...(19): siRNA sense strand
ccagaucuuuggaagcuuu

SEQ ID NO: 2069154 - RNA, 19 nt, Homo sapiens
  misc_RNA (1)...(19): siRNA sense strand
ugucaaagccggcauaaug

SEQ ID NO: 2069155 - RNA, 19 nt, Homo sapiens
  misc_RNA (1)...(19): siRNA sense strand
ccuguucucucuaucgaua

SEQ ID NO: 2069156 - RNA, 19 nt, Homo sapiens
  misc_RNA (1)...(19): siRNA sense strand
aagaggagauugcaaaaua

SEQ ID NO: 2069157 - RNA, 19 nt, Homo sapiens
  misc_RNA (1)...(19): siRNA sense strand
aaaccugucuucccugaga

SEQ ID NO: 2069158 - RNA, 19 nt, Homo sapiens
  misc_RNA (1)...(19): siRNA sense strand
aaauagaugccauagauga

SEQ ID NO: 2069159 - RNA, 19 nt, Homo sapiens
  misc_RNA (1)...(19): siRNA sense strand
guccagagcagucuagaaa

SEQ ID NO: 2069160 - RNA, 19 nt, Homo sapiens
  misc_RNA (1)...(19): siRNA sense strand
ccaaagcagccucagauau

SEQ ID NO: 2069161 - RNA, 19 nt, Homo sapiens
  misc_RNA (1)...(19): siRNA sense strand
gaaucaaauuucccaagag

SEQ ID NO: 2069162 - RNA, 19 nt, Homo sapiens
  misc_RNA (1)...(19): siRNA sense strand
uuuggaaucucuccuuaaa

SEQ ID NO: 2069163 - RNA, 19 nt, Homo sapiens
  misc_RNA (1)...(19): siRNA sense strand
ggaaaccaacuccaucugu

SEQ ID NO: 2069164 - RNA, 19 nt, Homo sapiens
  misc_RNA (1)...(19): siRNA sense strand
caagaaagacaaccaagag

SEQ ID NO: 2069165 - RNA, 19 nt, Homo sapiens
  misc_RNA (1)...(19): siRNA sense strand
ccucaaagaagcucaagaa

SEQ ID NO: 2069166 - RNA, 19 nt, Homo sapiens
  misc_RNA (1)...(19): siRNA sense strand
gcaauucagcagaaccaaa

SEQ ID NO: 2069167 - RNA, 19 nt, Homo sapiens
  misc_RNA (1)...(19): siRNA sense strand
gaaaucuucaucagucuca

SEQ ID NO: 2069168 - RNA, 19 nt, Homo sapiens
  misc_RNA (1)...(19): siRNA sense strand
gcuaauggaagcucuugaa

SEQ ID NO: 2069169 - RNA, 19 nt, Homo sapiens
  misc_RNA (1)...(19): siRNA sense strand
ucaaagaagcucaagaaag

SEQ ID NO: 2069170 - RNA, 19 nt, Homo sapiens
  misc_RNA (1)...(19): siRNA sense strand
cccagaagcagucucauuu

SEQ ID NO: 2069171 - RNA, 19 nt, Homo sapiens
  misc_RNA (1)...(19): siRNA sense strand
ggaggagcagcaaauuuga

SEQ ID NO: 2069172 - RNA, 19 nt, Homo sapiens
  misc_RNA (1)...(19): siRNA sense strand
ucaaauuucccaagagguu

SEQ ID NO: 2069173 - RNA, 19 nt, Homo sapiens
  misc_RNA (1)...(19): siRNA sense strand
ucauagcccuuacaaaugc

SEQ ID NO: 2069174 - RNA, 19 nt, Homo sapiens
  misc_RNA (1)...(19): siRNA sense strand
ggugaugaacuacaaauag

SEQ ID NO: 2069175 - RNA, 19 nt, Homo sapiens
  misc_RNA (1)...(19): siRNA sense strand
ggaacuucguaaaccauca

SEQ ID NO: 2069176 - RNA, 19 nt, Homo sapiens
  misc_RNA (1)...(19): siRNA sense strand
gaugaacuacaaauagaug

SEQ ID NO: 2069177 - RNA, 19 nt, Homo sapiens
  misc_RNA (1)...(19): siRNA sense strand
ugagcuuggugaugaacua

SEQ ID NO: 2069178 - RNA, 19 nt, Homo sapiens
  misc_RNA (1)...(19): siRNA sense strand
gaaaacuucuccugcuuca

SEQ ID NO: 2069179 - RNA, 19 nt, Homo sapiens
  misc_RNA (1)...(19): siRNA sense strand
gaacaaagaaacagauccu

SEQ ID NO: 2069180 - RNA, 19 nt, Homo sapiens
  misc_RNA (1)...(19): siRNA sense strand
gcaagauguacucuaaugu

SEQ ID NO: 2069181 - RNA, 19 nt, Homo sapiens
  misc_RNA (1)...(19): siRNA sense strand
gcaaagagaacaaaaugga

SEQ ID NO: 2069182 - RNA, 19 nt, Homo sapiens
  misc_RNA (1)...(19): siRNA sense strand
cagcacguuuggaguguga

SEQ ID NO: 2069183 - RNA, 19 nt, Homo sapiens
  misc_RNA (1)...(19): siRNA sense strand
cacaucacauccaaacaug

SEQ ID NO: 2069184 - RNA, 19 nt, Homo sapiens
  misc_RNA (1)...(19): siRNA sense strand
uggaggagcagcaaauuug

SEQ ID NO: 2069185 - RNA, 19 nt, Homo sapiens
  misc_RNA (1)...(19): siRNA sense strand
guaguagugaguacauaaa

SEQ ID NO: 2069186 - RNA, 19 nt, Homo sapiens
  misc_RNA (1)...(19): siRNA sense strand
ucaccaggcucuuggaaac

SEQ ID NO: 2069187 - RNA, 19 nt, Homo sapiens
  misc_RNA (1)...(19): siRNA sense strand
ucaagaaagacaaccaaga

SEQ ID NO: 2069188 - RNA, 19 nt, Homo sapiens
  misc_RNA (1)...(19): siRNA sense strand
gucaaagccggcauaauga

SEQ ID NO: 2069189 - RNA, 19 nt, Homo sapiens
  misc_RNA (1)...(19): siRNA sense strand
cccaagagguuuuaagaaa

SEQ ID NO: 2069190 - RNA, 19 nt, Homo sapiens
  misc_RNA (1)...(19): siRNA sense strand
acgcugagcuuaguaguag

SEQ ID NO: 2069191 - RNA, 19 nt, Homo sapiens
  misc_RNA (1)...(19): siRNA sense strand
ugccauaaaugcuucuuca

SEQ ID NO: 2069192 - RNA, 19 nt, Homo sapiens
  misc_RNA (1)...(19): siRNA sense strand
uuaaauguccacguuguaa

SEQ ID NO: 2069193 - RNA, 19 nt, Homo sapiens
  misc_RNA (1)...(19): siRNA sense strand
gauauuaagggccaggaau

SEQ ID NO: 2069194 - RNA, 19 nt, Homo sapiens
  misc_RNA (1)...(19): siRNA sense strand
gaccuuggaagccagcuaa

SEQ ID NO: 2069195 - RNA, 19 nt, Homo sapiens
  misc_RNA (1)...(19): siRNA sense strand
cuacagacaccucuuccuu

SEQ ID NO: 2069196 - RNA, 19 nt, Homo sapiens
  misc_RNA (1)...(19): siRNA sense strand
gaaacacagaaacuugguu

SEQ ID NO: 2069197 - RNA, 19 nt, Homo sapiens
  misc_RNA (1)...(19): siRNA sense strand
cacagaaacuugguucagu

SEQ ID NO: 2069198 - RNA, 19 nt, Homo sapiens
  misc_RNA (1)...(19): siRNA sense strand
gagcuuaguaguagugagu

SEQ ID NO: 2069199 - RNA, 19 nt, Homo sapiens
  misc_RNA (1)...(19): siRNA sense strand
gaagcuuucuccugaucag

SEQ ID NO: 2069200 - RNA, 19 nt, Homo sapiens
  misc_RNA (1)...(19): siRNA sense strand
gaaaccuggcucuguuguu

SEQ ID NO: 2069201 - RNA, 19 nt, Homo sapiens
  misc_RNA (1)...(19): siRNA sense strand
agcaagauguacucuaaug

SEQ ID NO: 2069202 - RNA, 19 nt, Homo sapiens
  misc_RNA (1)...(19): siRNA sense strand
cauaaugaagaggcaaaua

SEQ ID NO: 2069203 - RNA, 19 nt, Homo sapiens
  misc_RNA (1)...(19): siRNA sense strand
aaauguccacguuguaauu

SEQ ID NO: 2069204 - RNA, 19 nt, Homo sapiens
  misc_RNA (1)...(19): siRNA sense strand
gcuuggugaugaacuacaa

SEQ ID NO: 2069205 - RNA, 19 nt, Homo sapiens
  misc_RNA (1)...(19): siRNA sense strand
ccugaucucuggaagucuu

SEQ ID NO: 2069206 - RNA, 19 nt, Homo sapiens
  misc_RNA (1)...(19): siRNA sense strand
aaaccaauuccuucuguau

SEQ ID NO: 2069207 - RNA, 19 nt, Homo sapiens
  misc_RNA (1)...(19): siRNA sense strand
acagacaccucuuccuucu

SEQ ID NO: 2069208 - RNA, 19 nt, Homo sapiens
  misc_RNA (1)...(19): siRNA sense strand
ucacaucacauccaaacau

SEQ ID NO: 2069209 - RNA, 19 nt, Homo sapiens
  misc_RNA (1)...(19): siRNA sense strand
ccaggaacuucguaaacca

SEQ ID NO: 2069210 - RNA, 19 nt, Homo sapiens
  misc_RNA (1)...(19): siRNA sense strand
uagaugccauagaugauca

SEQ ID NO: 2069211 - RNA, 19 nt, Homo sapiens
  misc_RNA (1)...(19): siRNA sense strand
caaauagaugccauagaug

SEQ ID NO: 2069212 - RNA, 19 nt, Homo sapiens
  misc_RNA (1)...(19): siRNA sense strand
ucagaggcacagacuauga

SEQ ID NO: 2069213 - RNA, 19 nt, Homo sapiens
  misc_RNA (1)...(19): siRNA sense strand
uaccugcccuuucaaugga

SEQ ID NO: 2069214 - RNA, 19 nt, Homo sapiens
  misc_RNA (1)...(19): siRNA sense strand
cagacaaauggaaugauaa

SEQ ID NO: 2069215 - RNA, 19 nt, Homo sapiens
  misc_RNA (1)...(19): siRNA sense strand
ucaaagccggcauaaugaa

SEQ ID NO: 2069216 - RNA, 19 nt, Homo sapiens
  misc_RNA (1)...(19): siRNA sense strand
caaauuucccaagagguuu

SEQ ID NO: 2069217 - RNA, 19 nt, Homo sapiens
  misc_RNA (1)...(19): siRNA sense strand
uuacaaaugcacaaucugu

SEQ ID NO: 2069218 - RNA, 19 nt, Homo sapiens
  misc_RNA (1)...(19): siRNA sense strand
cuguugagcuuggugauga

SEQ ID NO: 2069219 - RNA, 19 nt, Homo sapiens
  misc_RNA (1)...(19): siRNA sense strand
ccccaaaucugcucuauuc

SEQ ID NO: 2069220 - RNA, 19 nt, Homo sapiens
  misc_RNA (1)...(19): siRNA sense strand
ucacuugauuucccugagu

SEQ ID NO: 2069221 - RNA, 19 nt, Homo sapiens
  misc_RNA (1)...(19): siRNA sense strand
gaaaagcccuccucuuccu

SEQ ID NO: 2069222 - RNA, 19 nt, Homo sapiens
  misc_RNA (1)...(19): siRNA sense strand
uguauacuaucacaucaca

SEQ ID NO: 2069223 - RNA, 19 nt, Homo sapiens
  misc_RNA (1)...(19): siRNA sense strand
caccagaucuuuggaagcu

SEQ ID NO: 2069224 - RNA, 19 nt, Homo sapiens
  misc_RNA (1)...(19): siRNA sense strand
cguaaaccaucagcacguu

SEQ ID NO: 2069225 - RNA, 19 nt, Homo sapiens
  misc_RNA (1)...(19): siRNA sense strand
aaucagucccuguuuguga

SEQ ID NO: 2069226 - RNA, 19 nt, Homo sapiens
  misc_RNA (1)...(19): siRNA sense strand
gcacagacuaugaaaaugu

SEQ ID NO: 2069227 - RNA, 19 nt, Homo sapiens
  misc_RNA (1)...(19): siRNA sense strand
gacgcugagcuuaguagua

SEQ ID NO: 2069228 - RNA, 19 nt, Homo sapiens
  misc_RNA (1)...(19): siRNA sense strand
gaaguuccauuaagccaua

SEQ ID NO: 2069229 - RNA, 19 nt, Homo sapiens
  misc_RNA (1)...(19): siRNA sense strand
gaacaugcgagaucaguuu

SEQ ID NO: 2069230 - RNA, 19 nt, Homo sapiens
  misc_RNA (1)...(19): siRNA sense strand
gaucuaggaaucaauguua

SEQ ID NO: 2069231 - RNA, 19 nt, Homo sapiens
  misc_RNA (1)...(19): siRNA sense strand
gauuguagcucugaagaaa

SEQ ID NO: 2069232 - RNA, 19 nt, Homo sapiens
  misc_RNA (1)...(19): siRNA sense strand
gggaaacgaugacuaacuu

SEQ ID NO: 2069233 - RNA, 19 nt, Homo sapiens
  misc_RNA (1)...(19): siRNA sense strand
ggcaauagauucugguuuc

SEQ ID NO: 2069234 - RNA, 19 nt, Homo sapiens
  misc_RNA (1)...(19): siRNA sense strand
uaacuuacaucccaagauc

SEQ ID NO: 2069235 - RNA, 19 nt, Homo sapiens
  misc_RNA (1)...(19): siRNA sense strand
gaaucaauguuaccaucuu

SEQ ID NO: 2069236 - RNA, 19 nt, Homo sapiens
  misc_RNA (1)...(19): siRNA sense strand
gaguacacauggcuuagaa

SEQ ID NO: 2069237 - RNA, 19 nt, Homo sapiens
  misc_RNA (1)...(19): siRNA sense strand
gaagaaagcaaauggugau

SEQ ID NO: 2069238 - RNA, 19 nt, Homo sapiens
  misc_RNA (1)...(19): siRNA sense strand
gaaaagaauugagagguuu

SEQ ID NO: 2069239 - RNA, 19 nt, Homo sapiens
  misc_RNA (1)...(19): siRNA sense strand
acacauggcuuagaaguuc

SEQ ID NO: 2069240 - RNA, 19 nt, Homo sapiens
  misc_RNA (1)...(19): siRNA sense strand
gaaagggaaacgaugacua

SEQ ID NO: 2069241 - RNA, 19 nt, Homo sapiens
  misc_RNA (1)...(19): siRNA sense strand
ggaaauggaaggcgcaaug

SEQ ID NO: 2069242 - RNA, 19 nt, Homo sapiens
  misc_RNA (1)...(19): siRNA sense strand
ugacagaggaauauauuga

SEQ ID NO: 2069243 - RNA, 19 nt, Homo sapiens
  misc_RNA (1)...(19): siRNA sense strand
aaagggaaacgaugacuaa

SEQ ID NO: 2069244 - RNA, 19 nt, Homo sapiens
  misc_RNA (1)...(19): siRNA sense strand
ggaaacgaugacuaacuua

SEQ ID NO: 2069245 - RNA, 19 nt, Homo sapiens
  misc_RNA (1)...(19): siRNA sense strand
caaauggugaugccacuuu

SEQ ID NO: 2069246 - RNA, 19 nt, Homo sapiens
  misc_RNA (1)...(19): siRNA sense strand
uggcuuagaaguuccauua

SEQ ID NO: 2069247 - RNA, 19 nt, Homo sapiens
  misc_RNA (1)...(19): siRNA sense strand
gcaauagauucugguuuca

SEQ ID NO: 2069248 - RNA, 19 nt, Homo sapiens
  misc_RNA (1)...(19): siRNA sense strand
ugguagagcuugugcaguu

SEQ ID NO: 2069249 - RNA, 19 nt, Homo sapiens
  misc_RNA (1)...(19): siRNA sense strand
gcgcggaguucaggaaaug

SEQ ID NO: 2069250 - RNA, 19 nt, Homo sapiens
  misc_RNA (1)...(19): siRNA sense strand
gaaaacugauggugacaga

SEQ ID NO: 2069251 - RNA, 19 nt, Homo sapiens
  misc_RNA (1)...(19): siRNA sense strand
ugaugccacuuugaaauuu

SEQ ID NO: 2069252 - RNA, 19 nt, Homo sapiens
  misc_RNA (1)...(19): siRNA sense strand
cuaaagaaagugaugaaga

SEQ ID NO: 2069253 - RNA, 19 nt, Homo sapiens
  misc_RNA (1)...(19): siRNA sense strand
ggugacagaggaauauauu

SEQ ID NO: 2069254 - RNA, 19 nt, Homo sapiens
  misc_RNA (1)...(19): siRNA sense strand
uguuaaauguggcaaauca

SEQ ID NO: 2069255 - RNA, 19 nt, Homo sapiens
  misc_RNA (1)...(19): siRNA sense strand
agaggaauauauugacuuc

SEQ ID NO: 2069256 - RNA, 19 nt, Homo sapiens
  misc_RNA (1)...(19): siRNA sense strand
gguagagcuugugcaguuu

SEQ ID NO: 2069257 - RNA, 19 nt, Homo sapiens
  misc_RNA (1)...(19): siRNA sense strand
gcauaacggugggaaagag

SEQ ID NO: 2069258 - RNA, 19 nt, Homo sapiens
  misc_RNA (1)...(19): siRNA sense strand
gcuacugguuacacacaaa

SEQ ID NO: 2069259 - RNA, 19 nt, Homo sapiens
  misc_RNA (1)...(19): siRNA sense strand
gaaauggaaggcgcaaugu

SEQ ID NO: 2069260 - RNA, 19 nt, Homo sapiens
  misc_RNA (1)...(19): siRNA sense strand
cccaguguauuacuaaaga

SEQ ID NO: 2069261 - RNA, 19 nt, Homo sapiens
  misc_RNA (1)...(19): siRNA sense strand
aauggaaggcgcaauguuu

SEQ ID NO: 2069262 - RNA, 19 nt, Homo sapiens
  misc_RNA (1)...(19): siRNA sense strand
gugaugccacuuugaaauu

SEQ ID NO: 2069263 - RNA, 19 nt, Homo sapiens
  misc_RNA (1)...(19): siRNA sense strand
gagcuugugcaguuucuga

SEQ ID NO: 2069264 - RNA, 19 nt, Homo sapiens
  misc_RNA (1)...(19): siRNA sense strand
ugaugaugaugaugaucua

SEQ ID NO: 2069265 - RNA, 19 nt, Homo sapiens
  misc_RNA (1)...(19): siRNA sense strand
gaaacgaugacuaacuuac

SEQ ID NO: 2069266 - RNA, 19 nt, Homo sapiens
  misc_RNA (1)...(19): siRNA sense strand
ggugaugccacuuugaaau

SEQ ID NO: 2069267 - RNA, 19 nt, Homo sapiens
  misc_RNA (1)...(19): siRNA sense strand
ugaugaugaugaucuagga

SEQ ID NO: 2069268 - RNA, 19 nt, Homo sapiens
  misc_RNA (1)...(19): siRNA sense strand
caggaacucuggcauaacg

SEQ ID NO: 2069269 - RNA, 19 nt, Homo sapiens
  misc_RNA (1)...(19): siRNA sense strand
caugugcagugucgacaau

SEQ ID NO: 2069270 - RNA, 19 nt, Homo sapiens
  misc_RNA (1)...(19): siRNA sense strand
gauggugacagaggaauau

SEQ ID NO: 2069271 - RNA, 19 nt, Homo sapiens
  misc_RNA (1)...(19): siRNA sense strand
guacacauggcuuagaagu

SEQ ID NO: 2069272 - RNA, 19 nt, Homo sapiens
  misc_RNA (1)...(19): siRNA sense strand
uucaggaacucuggcauaa

SEQ ID NO: 2069273 - RNA, 19 nt, Homo sapiens
  misc_RNA (1)...(19): siRNA sense strand
aaauggugaugccacuuug

SEQ ID NO: 2069274 - RNA, 19 nt, Homo sapiens
  misc_RNA (1)...(19): siRNA sense strand
gggcaguguugacgaggau

SEQ ID NO: 2069275 - RNA, 19 nt, Homo sapiens
  misc_RNA (1)...(19): siRNA sense strand
ccaguguauuacuaaagaa

SEQ ID NO: 2069276 - RNA, 19 nt, Homo sapiens
  misc_RNA (1)...(19): siRNA sense strand
ggaguacacauggcuuaga

SEQ ID NO: 2069277 - RNA, 19 nt, Homo sapiens
  misc_RNA (1)...(19): siRNA sense strand
gaauugagagguuuuacaa

SEQ ID NO: 2069278 - RNA, 19 nt, Homo sapiens
  misc_RNA (1)...(19): siRNA sense strand
ugacgaggaugugguagag

SEQ ID NO: 2069279 - RNA, 19 nt, Homo sapiens
  misc_RNA (1)...(19): siRNA sense strand
gaggaaaacaagaaaagaa

SEQ ID NO: 2069280 - RNA, 19 nt, Homo sapiens
  misc_RNA (1)...(19): siRNA sense strand
agaaaagaauugagagguu

SEQ ID NO: 2069281 - RNA, 19 nt, Homo sapiens
  misc_RNA (1)...(19): siRNA sense strand
ccuacagcaugcuuuggaa

SEQ ID NO: 2069282 - RNA, 19 nt, Homo sapiens
  misc_RNA (1)...(19): siRNA sense strand
ggaaucaauguuaccaucu

SEQ ID NO: 2069283 - RNA, 19 nt, Homo sapiens
  misc_RNA (1)...(19): siRNA sense strand
aaacgaugacuaacuuaca

SEQ ID NO: 2069284 - RNA, 19 nt, Homo sapiens
  misc_RNA (1)...(19): siRNA sense strand
ccuguuaaauguggcaaau

SEQ ID NO: 2069285 - RNA, 19 nt, Homo sapiens
  misc_RNA (1)...(19): siRNA sense strand
aaucaauguuaccaucuuc

SEQ ID NO: 2069286 - RNA, 19 nt, Homo sapiens
  misc_RNA (1)...(19): siRNA sense strand
ugaugaugaucuaggaauc

SEQ ID NO: 2069287 - RNA, 19 nt, Homo sapiens
  misc_RNA (1)...(19): siRNA sense strand
gcagcgcggaguucaggaa

SEQ ID NO: 2069288 - RNA, 19 nt, Homo sapiens
  misc_RNA (1)...(19): siRNA sense strand
cauuaagccauaagggaaa

SEQ ID NO: 2069289 - RNA, 19 nt, Homo sapiens
  misc_RNA (1)...(19): siRNA sense strand
ugugcagugucgacaauug

SEQ ID NO: 2069290 - RNA, 19 nt, Homo sapiens
  misc_RNA (1)...(19): siRNA sense strand
aaccauuuguucuucaugu

SEQ ID NO: 2069291 - RNA, 19 nt, Homo sapiens
  misc_RNA (1)...(19): siRNA sense strand
gaugugauuguagcucuga

SEQ ID NO: 2069292 - RNA, 19 nt, Homo sapiens
  misc_RNA (1)...(19): siRNA sense strand
ccggaguacacauggcuua

SEQ ID NO: 2069293 - RNA, 19 nt, Homo sapiens
  misc_RNA (1)...(19): siRNA sense strand
ugcauuccauggcaauaga

SEQ ID NO: 2069294 - RNA, 19 nt, Homo sapiens
  misc_RNA (1)...(19): siRNA sense strand
gcuggcuacugguuacaca

SEQ ID NO: 2069295 - RNA, 19 nt, Homo sapiens
  misc_RNA (1)...(19): siRNA sense strand
acagaggaauauauugacu

SEQ ID NO: 2069296 - RNA, 19 nt, Homo sapiens
  misc_RNA (1)...(19): siRNA sense strand
gaucgcagcgcggaguuca

SEQ ID NO: 2069297 - RNA, 19 nt, Homo sapiens
  misc_RNA (1)...(19): siRNA sense strand
uuucaggaacucuggcaua

SEQ ID NO: 2069298 - RNA, 19 nt, Homo sapiens
  misc_RNA (1)...(19): siRNA sense strand
aacgaugacuaacuuacau

SEQ ID NO: 2069299 - RNA, 19 nt, Homo sapiens
  misc_RNA (1)...(19): siRNA sense strand
gaugaugaugaucuaggaa

SEQ ID NO: 2069300 - RNA, 19 nt, Homo sapiens
  misc_RNA (1)...(19): siRNA sense strand
gugcccaguguauuacuaa

SEQ ID NO: 2069301 - RNA, 19 nt, Homo sapiens
  misc_RNA (1)...(19): siRNA sense strand
aaagaugaugugauuguag

SEQ ID NO: 2069302 - RNA, 19 nt, Homo sapiens
  misc_RNA (1)...(19): siRNA sense strand
cuacagcaugcuuuggaaa

SEQ ID NO: 2069303 - RNA, 19 nt, Homo sapiens
  misc_RNA (1)...(19): siRNA sense strand
uugacuuccuguuaaaugu

SEQ ID NO: 2069304 - RNA, 19 nt, Homo sapiens
  misc_RNA (1)...(19): siRNA sense strand
cagaggaauauauugacuu

SEQ ID NO: 2069305 - RNA, 19 nt, Homo sapiens
  misc_RNA (1)...(19): siRNA sense strand
gcaaauggugaugccacuu

SEQ ID NO: 2069306 - RNA, 19 nt, Homo sapiens
  misc_RNA (1)...(19): siRNA sense strand
gcucugaagaaagcaaaug

SEQ ID NO: 2069307 - RNA, 19 nt, Homo sapiens
  misc_RNA (1)...(19): siRNA sense strand
cgugcccaguguauuacua

SEQ ID NO: 2069308 - RNA, 19 nt, Homo sapiens
  misc_RNA (1)...(19): siRNA sense strand
aucccaagaucaaagagaa

SEQ ID NO: 2069309 - RNA, 19 nt, Homo sapiens
  misc_RNA (1)...(19): siRNA sense strand
ggauauagcucucaaaguu

SEQ ID NO: 2069310 - RNA, 19 nt, Homo sapiens
  misc_RNA (1)...(19): siRNA sense strand
guaaucaccugacacauuu

SEQ ID NO: 2069311 - RNA, 19 nt, Homo sapiens
  misc_RNA (1)...(19): siRNA sense strand
gaaguuaguugcuuugaga

SEQ ID NO: 2069312 - RNA, 19 nt, Homo sapiens
  misc_RNA (1)...(19): siRNA sense strand
gauggagacuacauaaaua

SEQ ID NO: 2069313 - RNA, 19 nt, Homo sapiens
  misc_RNA (1)...(19): siRNA sense strand
caagacagguuuaucacua

SEQ ID NO: 2069314 - RNA, 19 nt, Homo sapiens
  misc_RNA (1)...(19): siRNA sense strand
cuaauaagcucuucuguuc

SEQ ID NO: 2069315 - RNA, 19 nt, Homo sapiens
  misc_RNA (1)...(19): siRNA sense strand
gcacuaggauacagauauu

SEQ ID NO: 2069316 - RNA, 19 nt, Homo sapiens
  misc_RNA (1)...(19): siRNA sense strand
cuagaaagauucaagaaga

SEQ ID NO: 2069317 - RNA, 19 nt, Homo sapiens
  misc_RNA (1)...(19): siRNA sense strand
ggaaccgucuguauagaaa

SEQ ID NO: 2069318 - RNA, 19 nt, Homo sapiens
  misc_RNA (1)...(19): siRNA sense strand
caucagugguuacagcuua

SEQ ID NO: 2069319 - RNA, 19 nt, Homo sapiens
  misc_RNA (1)...(19): siRNA sense strand
gauacaaauucaacggaua

SEQ ID NO: 2069320 - RNA, 19 nt, Homo sapiens
  misc_RNA (1)...(19): siRNA sense strand
gcaaacugccauuuagaua

SEQ ID NO: 2069321 - RNA, 19 nt, Homo sapiens
  misc_RNA (1)...(19): siRNA sense strand
gaauauggauggagacuac

SEQ ID NO: 2069322 - RNA, 19 nt, Homo sapiens
  misc_RNA (1)...(19): siRNA sense strand
uaacucaacucuuacugaa

SEQ ID NO: 2069323 - RNA, 19 nt, Homo sapiens
  misc_RNA (1)...(19): siRNA sense strand
gagcugacauacucaaaug

SEQ ID NO: 2069324 - RNA, 19 nt, Homo sapiens
  misc_RNA (1)...(19): siRNA sense strand
cauaggagaacacaucuua

SEQ ID NO: 2069325 - RNA, 19 nt, Homo sapiens
  misc_RNA (1)...(19): siRNA sense strand
ggagaacacaucuuacaaa

SEQ ID NO: 2069326 - RNA, 19 nt, Homo sapiens
  misc_RNA (1)...(19): siRNA sense strand
gcucuucuguucaaucauu

SEQ ID NO: 2069327 - RNA, 19 nt, Homo sapiens
  misc_RNA (1)...(19): siRNA sense strand
gaacacaucuuacaaaacu

SEQ ID NO: 2069328 - RNA, 19 nt, Homo sapiens
  misc_RNA (1)...(19): siRNA sense strand
gagaaaagcugcauaugau

SEQ ID NO: 2069329 - RNA, 19 nt, Homo sapiens
  misc_RNA (1)...(19): siRNA sense strand
gcaguugcauuuguauauu

SEQ ID NO: 2069330 - RNA, 19 nt, Homo sapiens
  misc_RNA (1)...(19): siRNA sense strand
gguuacagcuuaccucuuc

SEQ ID NO: 2069331 - RNA, 19 nt, Homo sapiens
  misc_RNA (1)...(19): siRNA sense strand
ggaccagcaugccuaauca

SEQ ID NO: 2069332 - RNA, 19 nt, Homo sapiens
  misc_RNA (1)...(19): siRNA sense strand
cuguauagcugcaaauauu

SEQ ID NO: 2069333 - RNA, 19 nt, Homo sapiens
  misc_RNA (1)...(19): siRNA sense strand
uggaauuacucaccugaua

SEQ ID NO: 2069334 - RNA, 19 nt, Homo sapiens
  misc_RNA (1)...(19): siRNA sense strand
ggauggagacuacauaaau

SEQ ID NO: 2069335 - RNA, 19 nt, Homo sapiens
  misc_RNA (1)...(19): siRNA sense strand
caaacugccauuuagauaa

SEQ ID NO: 2069336 - RNA, 19 nt, Homo sapiens
  misc_RNA (1)...(19): siRNA sense strand
ggacacccuuucuaacuca

SEQ ID NO: 2069337 - RNA, 19 nt, Homo sapiens
  misc_RNA (1)...(19): siRNA sense strand
caagcuacuuuaaggauau

SEQ ID NO: 2069338 - RNA, 19 nt, Homo sapiens
  misc_RNA (1)...(19): siRNA sense strand
acucaacucuuacugaauu

SEQ ID NO: 2069339 - RNA, 19 nt, Homo sapiens
  misc_RNA (1)...(19): siRNA sense strand
ucugacaacuucuuauuga

SEQ ID NO: 2069340 - RNA, 19 nt, Homo sapiens
  misc_RNA (1)...(19): siRNA sense strand
gaugugcauugaaggcaua

SEQ ID NO: 2069341 - RNA, 19 nt, Homo sapiens
  misc_RNA (1)...(19): siRNA sense strand
gcugugagcugacauacuc

SEQ ID NO: 2069342 - RNA, 19 nt, Homo sapiens
  misc_RNA (1)...(19): siRNA sense strand
agagucauaucuucaguaa

SEQ ID NO: 2069343 - RNA, 19 nt, Homo sapiens
  misc_RNA (1)...(19): siRNA sense strand
gaacaagcuacuuuaagga

SEQ ID NO: 2069344 - RNA, 19 nt, Homo sapiens
  misc_RNA (1)...(19): siRNA sense strand
cagcuuaccucuucacagu

SEQ ID NO: 2069345 - RNA, 19 nt, Homo sapiens
  misc_RNA (1)...(19): siRNA sense strand
auacaucucuaucucauug

SEQ ID NO: 2069346 - RNA, 19 nt, Homo sapiens
  misc_RNA (1)...(19): siRNA sense strand
gcucaaacccacccacauu

SEQ ID NO: 2069347 - RNA, 19 nt, Homo sapiens
  misc_RNA (1)...(19): siRNA sense strand
gagaacacaucuuacaaaa

SEQ ID NO: 2069348 - RNA, 19 nt, Homo sapiens
  misc_RNA (1)...(19): siRNA sense strand
caaacccacccacauuaua

SEQ ID NO: 2069349 - RNA, 19 nt, Homo sapiens
  misc_RNA (1)...(19): siRNA sense strand
gauauagcucucaaaguuu

SEQ ID NO: 2069350 - RNA, 19 nt, Homo sapiens
  misc_RNA (1)...(19): siRNA sense strand
ugaacaagcuacuuuaagg

SEQ ID NO: 2069351 - RNA, 19 nt, Homo sapiens
  misc_RNA (1)...(19): siRNA sense strand
gaauugaagccugcuauug

SEQ ID NO: 2069352 - RNA, 19 nt, Homo sapiens
  misc_RNA (1)...(19): siRNA sense strand
gcauacaucucuaucucau

SEQ ID NO: 2069353 - RNA, 19 nt, Homo sapiens
  misc_RNA (1)...(19): siRNA sense strand
aauaagcucuucuguucaa

SEQ ID NO: 2069354 - RNA, 19 nt, Homo sapiens
  misc_RNA (1)...(19): siRNA sense strand
caacggauauagcucucaa

SEQ ID NO: 2069355 - RNA, 19 nt, Homo sapiens
  misc_RNA (1)...(19): siRNA sense strand
caaguuaucugugaaucau

SEQ ID NO: 2069356 - RNA, 19 nt, Homo sapiens
  misc_RNA (1)...(19): siRNA sense strand
caucuucauuacuagguua

SEQ ID NO: 2069357 - RNA, 19 nt, Homo sapiens
  misc_RNA (1)...(19): siRNA sense strand
ugaaauacgcaauggaauu

SEQ ID NO: 2069358 - RNA, 19 nt, Homo sapiens
  misc_RNA (1)...(19): siRNA sense strand
gcauggaugugcauugaag

SEQ ID NO: 2069359 - RNA, 19 nt, Homo sapiens
  misc_RNA (1)...(19): siRNA sense strand
cuuucuaacucaacucuua

SEQ ID NO: 2069360 - RNA, 19 nt, Homo sapiens
  misc_RNA (1)...(19): siRNA sense strand
acaagcuacuuuaaggaua

SEQ ID NO: 2069361 - RNA, 19 nt, Homo sapiens
  misc_RNA (1)...(19): siRNA sense strand
gaaaggucacagauaggua

SEQ ID NO: 2069362 - RNA, 19 nt, Homo sapiens
  misc_RNA (1)...(19): siRNA sense strand
ccacuuuguugaauuguuc

SEQ ID NO: 2069363 - RNA, 19 nt, Homo sapiens
  misc_RNA (1)...(19): siRNA sense strand
gauggaaccgucuguauag

SEQ ID NO: 2069364 - RNA, 19 nt, Homo sapiens
  misc_RNA (1)...(19): siRNA sense strand
uaauugcacuaacacagaa

SEQ ID NO: 2069365 - RNA, 19 nt, Homo sapiens
  misc_RNA (1)...(19): siRNA sense strand
acacagaaggaaguuauua

SEQ ID NO: 2069366 - RNA, 19 nt, Homo sapiens
  misc_RNA (1)...(19): siRNA sense strand
guugggaucaauacaaaua

SEQ ID NO: 2069367 - RNA, 19 nt, Homo sapiens
  misc_RNA (1)...(19): siRNA sense strand
caucgaaaggucacagaua

SEQ ID NO: 2069368 - RNA, 19 nt, Homo sapiens
  misc_RNA (1)...(19): siRNA sense strand
cagaaggaaguuauuauug

SEQ ID NO: 2069369 - RNA, 19 nt, Homo sapiens
  misc_RNA (1)...(19): siRNA sense strand
aaggaucacucaacuagga

SEQ ID NO: 2069370 - RNA, 19 nt, Homo sapiens
  misc_RNA (1)...(19): siRNA sense strand
ugauuugucuugccauaug

SEQ ID NO: 2069371 - RNA, 19 nt, Homo sapiens
  misc_RNA (1)...(19): siRNA sense strand
ugccuaaucauucuuguua

SEQ ID NO: 2069372 - RNA, 19 nt, Homo sapiens
  misc_RNA (1)...(19): siRNA sense strand
caaagcaccaggacaacaa

SEQ ID NO: 2069373 - RNA, 19 nt, Homo sapiens
  misc_RNA (1)...(19): siRNA sense strand
ggaauugaagccugcuauu

SEQ ID NO: 2069374 - RNA, 19 nt, Homo sapiens
  misc_RNA (1)...(19): siRNA sense strand
ugauggaaccgucuguaua

SEQ ID NO: 2069375 - RNA, 19 nt, Homo sapiens
  misc_RNA (1)...(19): siRNA sense strand
acagguuuaucacuaauga

SEQ ID NO: 2069376 - RNA, 19 nt, Homo sapiens
  misc_RNA (1)...(19): siRNA sense strand
aagacagguuuaucacuaa

SEQ ID NO: 2069377 - RNA, 19 nt, Homo sapiens
  misc_RNA (1)...(19): siRNA sense strand
guaccuggcuucagaucca

SEQ ID NO: 2069378 - RNA, 19 nt, Homo sapiens
  misc_RNA (1)...(19): siRNA sense strand
cagcaugccuaaucauucu

SEQ ID NO: 2069379 - RNA, 19 nt, Homo sapiens
  misc_RNA (1)...(19): siRNA sense strand
ggacaaguuaucugugaau

SEQ ID NO: 2069380 - RNA, 19 nt, Homo sapiens
  misc_RNA (1)...(19): siRNA sense strand
gauauuauggcacaaccaa

SEQ ID NO: 2069381 - RNA, 19 nt, Homo sapiens
  misc_RNA (1)...(19): siRNA sense strand
aaucuuugcuguagccuau

SEQ ID NO: 2069382 - RNA, 19 nt, Homo sapiens
  misc_RNA (1)...(19): siRNA sense strand
guaauuucagucucaauga

SEQ ID NO: 2069383 - RNA, 19 nt, Homo sapiens
  misc_RNA (1)...(19): siRNA sense strand
gaguauugguccuuugcuu

SEQ ID NO: 2069384 - RNA, 19 nt, Homo sapiens
  misc_RNA (1)...(19): siRNA sense strand
guguguaccuggcuucaga

SEQ ID NO: 2069385 - RNA, 19 nt, Homo sapiens
  misc_RNA (1)...(19): siRNA sense strand
gcuuaccucuucacaguca

SEQ ID NO: 2069386 - RNA, 19 nt, Homo sapiens
  misc_RNA (1)...(19): siRNA sense strand
uguaaucaccugacacauu

SEQ ID NO: 2069387 - RNA, 19 nt, Homo sapiens
  misc_RNA (1)...(19): siRNA sense strand
aggaaauggugucacaauu

SEQ ID NO: 2069388 - RNA, 19 nt, Homo sapiens
  misc_RNA (1)...(19): siRNA sense strand
aacauaaggucuugugcaa

SEQ ID NO: 2069389 - RNA, 19 nt, Homo sapiens
  misc_RNA (1)...(19): siRNA sense strand
ggagucaucauauacaaag

SEQ ID NO: 2069390 - RNA, 19 nt, Homo sapiens
  misc_RNA (1)...(19): siRNA sense strand
gaucacucaacuaggaaua

SEQ ID NO: 2069391 - RNA, 19 nt, Homo sapiens
  misc_RNA (1)...(19): siRNA sense strand
uuacaaggaucacucaacu

SEQ ID NO: 2069392 - RNA, 19 nt, Homo sapiens
  misc_RNA (1)...(19): siRNA sense strand
ggaggaaagagucauaucu

SEQ ID NO: 2069393 - RNA, 19 nt, Homo sapiens
  misc_RNA (1)...(19): siRNA sense strand
caucugacaacuucuuauu

SEQ ID NO: 2069394 - RNA, 19 nt, Homo sapiens
  misc_RNA (1)...(19): siRNA sense strand
uaagaguauugguccuuug

SEQ ID NO: 2069395 - RNA, 19 nt, Homo sapiens
  misc_RNA (1)...(19): siRNA sense strand
ugggacaaguuaucuguga

SEQ ID NO: 2069396 - RNA, 19 nt, Homo sapiens
  misc_RNA (1)...(19): siRNA sense strand
cuacaagaagucuauagaa

SEQ ID NO: 2069397 - RNA, 19 nt, Homo sapiens
  misc_RNA (1)...(19): siRNA sense strand
ggcuucagauccagcagua

SEQ ID NO: 2069398 - RNA, 19 nt, Homo sapiens
  misc_RNA (1)...(19): siRNA sense strand
gaagccugcuauugcaaca

SEQ ID NO: 2069399 - RNA, 19 nt, Homo sapiens
  misc_RNA (1)...(19): siRNA sense strand
gugcacgcaucagugguua

SEQ ID NO: 2069400 - RNA, 19 nt, Homo sapiens
  misc_RNA (1)...(19): siRNA sense strand
gaagaggaggaaagaguca

SEQ ID NO: 2069401 - RNA, 19 nt, Homo sapiens
  misc_RNA (1)...(19): siRNA sense strand
gugaagaugauaaugaaug

SEQ ID NO: 2069402 - RNA, 19 nt, Homo sapiens
  misc_RNA (1)...(19): siRNA sense strand
gcuacaagaagucuauaga

SEQ ID NO: 2069403 - RNA, 19 nt, Homo sapiens
  misc_RNA (1)...(19): siRNA sense strand
ucacucaacuaggaauaau

SEQ ID NO: 2069404 - RNA, 19 nt, Homo sapiens
  misc_RNA (1)...(19): siRNA sense strand
gacaacuucuuauugaaac

SEQ ID NO: 2069405 - RNA, 19 nt, Homo sapiens
  misc_RNA (1)...(19): siRNA sense strand
gggacaaguuaucugugaa

SEQ ID NO: 2069406 - RNA, 19 nt, Homo sapiens
  misc_RNA (1)...(19): siRNA sense strand
caagaacaacacuaucuca

SEQ ID NO: 2069407 - RNA, 19 nt, Homo sapiens
  misc_RNA (1)...(19): siRNA sense strand
caaaguauguuggcuuagc

SEQ ID NO: 2069408 - RNA, 19 nt, Homo sapiens
  misc_RNA (1)...(19): siRNA sense strand
uuguuaaucucuuggcuuu

SEQ ID NO: 2069409 - RNA, 19 nt, Homo sapiens
  misc_RNA (1)...(19): siRNA sense strand
gacaagaaaugauguguug

SEQ ID NO: 2069410 - RNA, 19 nt, Homo sapiens
  misc_RNA (1)...(19): siRNA sense strand
ugacaggacuucaguuaaa

SEQ ID NO: 2069411 - RNA, 19 nt, Homo sapiens
  misc_RNA (1)...(19): siRNA sense strand
ugauggaugucgucaauua

SEQ ID NO: 2069412 - RNA, 19 nt, Homo sapiens
  misc_RNA (1)...(19): siRNA sense strand
gaaaaucccugcuauugau

SEQ ID NO: 2069413 - RNA, 19 nt, Homo sapiens
  misc_RNA (1)...(19): siRNA sense strand
gggaguugcugaaguaaag

SEQ ID NO: 2069414 - RNA, 19 nt, Homo sapiens
  misc_RNA (1)...(19): siRNA sense strand
gaacaggaaauugauggaa

SEQ ID NO: 2069415 - RNA, 19 nt, Homo sapiens
  misc_RNA (1)...(19): siRNA sense strand
gacaaagcauuuaaagaac

SEQ ID NO: 2069416 - RNA, 19 nt, Homo sapiens
  misc_RNA (1)...(19): siRNA sense strand
guugacaggacuucaguua

SEQ ID NO: 2069417 - RNA, 19 nt, Homo sapiens
  misc_RNA (1)...(19): siRNA sense strand
uaaaaccucugcagacaaa

SEQ ID NO: 2069418 - RNA, 19 nt, Homo sapiens
  misc_RNA (1)...(19): siRNA sense strand
aaauggcucugucggugua

SEQ ID NO: 2069419 - RNA, 19 nt, Homo sapiens
  misc_RNA (1)...(19): siRNA sense strand
uggaugucgucaauuauuu

SEQ ID NO: 2069420 - RNA, 19 nt, Homo sapiens
  misc_RNA (1)...(19): siRNA sense strand
gcagacaaagcauuuaaag

SEQ ID NO: 2069421 - RNA, 19 nt, Homo sapiens
  misc_RNA (1)...(19): siRNA sense strand
cgugauggaugucgucaau

SEQ ID NO: 2069422 - RNA, 19 nt, Homo sapiens
  misc_RNA (1)...(19): siRNA sense strand
aacaggaaauugauggaaa

SEQ ID NO: 2069423 - RNA, 19 nt, Homo sapiens
  misc_RNA (1)...(19): siRNA sense strand
ggaaaaucccugcuauuga

SEQ ID NO: 2069424 - RNA, 19 nt, Homo sapiens
  misc_RNA (1)...(19): siRNA sense strand
ggacuucaguuaaaauugg

SEQ ID NO: 2069425 - RNA, 19 nt, Homo sapiens
  misc_RNA (1)...(19): siRNA sense strand
gcggggaguugcugaagua

SEQ ID NO: 2069426 - RNA, 19 nt, Homo sapiens
  misc_RNA (1)...(19): siRNA sense strand
gcuaucuguugacauggaa

SEQ ID NO: 2069427 - RNA, 19 nt, Homo sapiens
  misc_RNA (1)...(19): siRNA sense strand
ggaaauugauggaaaaucc

SEQ ID NO: 2069428 - RNA, 19 nt, Homo sapiens
  misc_RNA (1)...(19): siRNA sense strand
cagacaaagcauuuaaaga

SEQ ID NO: 2069429 - RNA, 19 nt, Homo sapiens
  misc_RNA (1)...(19): siRNA sense strand
gauggaaaaucccugcuau

SEQ ID NO: 2069430 - RNA, 19 nt, Homo sapiens
  misc_RNA (1)...(19): siRNA sense strand
ugacaagaaaugauguguu

SEQ ID NO: 2069431 - RNA, 19 nt, Homo sapiens
  misc_RNA (1)...(19): siRNA sense strand
gauggaugucgucaauuau

SEQ ID NO: 2069432 - RNA, 19 nt, Homo sapiens
  misc_RNA (1)...(19): siRNA sense strand
ggaugucgucaauuauuuc

SEQ ID NO: 2069433 - RNA, 19 nt, Homo sapiens
  misc_RNA (1)...(19): siRNA sense strand
ggaacaggaaauugaugga

SEQ ID NO: 2069434 - RNA, 19 nt, Homo sapiens
  misc_RNA (1)...(19): siRNA sense strand
caagaaaugauguguugac

SEQ ID NO: 2069435 - RNA, 19 nt, Homo sapiens
  misc_RNA (1)...(19): siRNA sense strand
gacaggacuucaguuaaaa

SEQ ID NO: 2069436 - RNA, 19 nt, Homo sapiens
  misc_RNA (1)...(19): siRNA sense strand
ggccugcucugaaaaucua

SEQ ID NO: 2069437 - RNA, 19 nt, Homo sapiens
  misc_RNA (1)...(19): siRNA sense strand
cugcagacaaagcauuuaa

SEQ ID NO: 2069438 - RNA, 19 nt, Homo sapiens
  misc_RNA (1)...(19): siRNA sense strand
aagaaaugauguguugaca

SEQ ID NO: 2069439 - RNA, 19 nt, Homo sapiens
  misc_RNA (1)...(19): siRNA sense strand
ugcuauugaugacaagaaa

SEQ ID NO: 2069440 - RNA, 19 nt, Homo sapiens
  misc_RNA (1)...(19): siRNA sense strand
cugcagccuucccaugcua

SEQ ID NO: 2069441 - RNA, 19 nt, Homo sapiens
  misc_RNA (1)...(19): siRNA sense strand
cuauugaugacaagaaaug

SEQ ID NO: 2069442 - RNA, 19 nt, Homo sapiens
  misc_RNA (1)...(19): siRNA sense strand
gcauuuaaagaacaacucu

SEQ ID NO: 2069443 - RNA, 19 nt, Homo sapiens
  misc_RNA (1)...(19): siRNA sense strand
acaggaaauugauggaaaa

SEQ ID NO: 2069444 - RNA, 19 nt, Homo sapiens
  misc_RNA (1)...(19): siRNA sense strand
gaugacaagaaaugaugug

SEQ ID NO: 2069445 - RNA, 19 nt, Homo sapiens
  misc_RNA (1)...(19): siRNA sense strand
ggauuugaggagcaagcua

SEQ ID NO: 2069446 - RNA, 19 nt, Homo sapiens
  misc_RNA (1)...(19): siRNA sense strand
caaagaaucucacaaacua

SEQ ID NO: 2069447 - RNA, 19 nt, Homo sapiens
  misc_RNA (1)...(19): siRNA sense strand
ccacacagcuuguucguuu

SEQ ID NO: 2069448 - RNA, 19 nt, Homo sapiens
  misc_RNA (1)...(19): siRNA sense strand
ucagauaccuggguuauuu

SEQ ID NO: 2069449 - RNA, 19 nt, Homo sapiens
  misc_RNA (1)...(19): siRNA sense strand
gaaaggauauucugguaca

SEQ ID NO: 2069450 - RNA, 19 nt, Homo sapiens
  misc_RNA (1)...(19): siRNA sense strand
gggaagaccugaaguuuua

SEQ ID NO: 2069451 - RNA, 19 nt, Homo sapiens
  misc_RNA (1)...(19): siRNA sense strand
caacggugaugacauguuu

SEQ ID NO: 2069452 - RNA, 19 nt, Homo sapiens
  misc_RNA (1)...(19): siRNA sense strand
gcucuaagguuacggaaga

SEQ ID NO: 2069453 - RNA, 19 nt, Homo sapiens
  misc_RNA (1)...(19): siRNA sense strand
caaagaagaguaucagaaa

SEQ ID NO: 2069454 - RNA, 19 nt, Homo sapiens
  misc_RNA (1)...(19): siRNA sense strand
gaacauauuuggaucuacu

SEQ ID NO: 2069455 - RNA, 19 nt, Homo sapiens
  misc_RNA (1)...(19): siRNA sense strand
ggaaugcaguagcaaagaa

SEQ ID NO: 2069456 - RNA, 19 nt, Homo sapiens
  misc_RNA (1)...(19): siRNA sense strand
gagagaggaucagguguuu

SEQ ID NO: 2069457 - RNA, 19 nt, Homo sapiens
  misc_RNA (1)...(19): siRNA sense strand
uaugaucucugcagcauuu

SEQ ID NO: 2069458 - RNA, 19 nt, Homo sapiens
  misc_RNA (1)...(19): siRNA sense strand
gaacucaucauucuucaga

SEQ ID NO: 2069459 - RNA, 19 nt, Homo sapiens
  misc_RNA (1)...(19): siRNA sense strand
gcaaagaagaguaucagaa

SEQ ID NO: 2069460 - RNA, 19 nt, Homo sapiens
  misc_RNA (1)...(19): siRNA sense strand
ucagucgucuguauuuaua

SEQ ID NO: 2069461 - RNA, 19 nt, Homo sapiens
  misc_RNA (1)...(19): siRNA sense strand
gaaagaagaaugucuaagg

SEQ ID NO: 2069462 - RNA, 19 nt, Homo sapiens
  misc_RNA (1)...(19): siRNA sense strand
ggaccauguuuccuucuaa

SEQ ID NO: 2069463 - RNA, 19 nt, Homo sapiens
  misc_RNA (1)...(19): siRNA sense strand
ugaagaauguaaagacuug

SEQ ID NO: 2069464 - RNA, 19 nt, Homo sapiens
  misc_RNA (1)...(19): siRNA sense strand
aaacggauuugcaggaauu

SEQ ID NO: 2069465 - RNA, 19 nt, Homo sapiens
  misc_RNA (1)...(19): siRNA sense strand
caagaaagggaccauguuu

SEQ ID NO: 2069466 - RNA, 19 nt, Homo sapiens
  misc_RNA (1)...(19): siRNA sense strand
gaccauaccaugacaaguu

SEQ ID NO: 2069467 - RNA, 19 nt, Homo sapiens
  misc_RNA (1)...(19): siRNA sense strand
ugacauguuugcaaccuuu

SEQ ID NO: 2069468 - RNA, 19 nt, Homo sapiens
  misc_RNA (1)...(19): siRNA sense strand
gaugaaagaagaaugucua

SEQ ID NO: 2069469 - RNA, 19 nt, Homo sapiens
  misc_RNA (1)...(19): siRNA sense strand
aaucauuggcuccauauua

SEQ ID NO: 2069470 - RNA, 19 nt, Homo sapiens
  misc_RNA (1)...(19): siRNA sense strand
gguauguccuggugauuau

SEQ ID NO: 2069471 - RNA, 19 nt, Homo sapiens
  misc_RNA (1)...(19): siRNA sense strand
gcauauaaugugcugauuu

SEQ ID NO: 2069472 - RNA, 19 nt, Homo sapiens
  misc_RNA (1)...(19): siRNA sense strand
ggaaaucaaagcaaagaau

SEQ ID NO: 2069473 - RNA, 19 nt, Homo sapiens
  misc_RNA (1)...(19): siRNA sense strand
gaaggaaugcaguagcaaa

SEQ ID NO: 2069474 - RNA, 19 nt, Homo sapiens
  misc_RNA (1)...(19): siRNA sense strand
uaagcagcauuacaagaaa

SEQ ID NO: 2069475 - RNA, 19 nt, Homo sapiens
  misc_RNA (1)...(19): siRNA sense strand
cuugauaccuauuagcuaa

SEQ ID NO: 2069476 - RNA, 19 nt, Homo sapiens
  misc_RNA (1)...(19): siRNA sense strand
ccucuacgcucuugguuug

SEQ ID NO: 2069477 - RNA, 19 nt, Homo sapiens
  misc_RNA (1)...(19): siRNA sense strand
gaaaucaaagcaaagaauc

SEQ ID NO: 2069478 - RNA, 19 nt, Homo sapiens
  misc_RNA (1)...(19): siRNA sense strand
gcaaagaaucucacaaacu

SEQ ID NO: 2069479 - RNA, 19 nt, Homo sapiens
  misc_RNA (1)...(19): siRNA sense strand
cuaaugagacacugaauau

SEQ ID NO: 2069480 - RNA, 19 nt, Homo sapiens
  misc_RNA (1)...(19): siRNA sense strand
gaaacggauuugcaggaau

SEQ ID NO: 2069481 - RNA, 19 nt, Homo sapiens
  misc_RNA (1)...(19): siRNA sense strand
guucagucgucuguauuua

SEQ ID NO: 2069482 - RNA, 19 nt, Homo sapiens
  misc_RNA (1)...(19): siRNA sense strand
gcuggugguugcuuucaaa

SEQ ID NO: 2069483 - RNA, 19 nt, Homo sapiens
  misc_RNA (1)...(19): siRNA sense strand
ggagagaggaucagguguu

SEQ ID NO: 2069484 - RNA, 19 nt, Homo sapiens
  misc_RNA (1)...(19): siRNA sense strand
ggguuggagucaucagaua

SEQ ID NO: 2069485 - RNA, 19 nt, Homo sapiens
  misc_RNA (1)...(19): siRNA sense strand
guacagaugaagaugacua

SEQ ID NO: 2069486 - RNA, 19 nt, Homo sapiens
  misc_RNA (1)...(19): siRNA sense strand
gcaauggcacaucgugauu

SEQ ID NO: 2069487 - RNA, 19 nt, Homo sapiens
  misc_RNA (1)...(19): siRNA sense strand
gcuguucagucgucuguau

SEQ ID NO: 2069488 - RNA, 19 nt, Homo sapiens
  misc_RNA (1)...(19): siRNA sense strand
aagcaaagaaucucacaaa

SEQ ID NO: 2069489 - RNA, 19 nt, Homo sapiens
  misc_RNA (1)...(19): siRNA sense strand
uugaaaggauauucuggua

SEQ ID NO: 2069490 - RNA, 19 nt, Homo sapiens
  misc_RNA (1)...(19): siRNA sense strand
gggaccauguuuccuucua

SEQ ID NO: 2069491 - RNA, 19 nt, Homo sapiens
  misc_RNA (1)...(19): siRNA sense strand
ugaaacggauuugcaggaa

SEQ ID NO: 2069492 - RNA, 19 nt, Homo sapiens
  misc_RNA (1)...(19): siRNA sense strand
aucauuggcuccauauuaa

SEQ ID NO: 2069493 - RNA, 19 nt, Homo sapiens
  misc_RNA (1)...(19): siRNA sense strand
aaugagacacugaauauug

SEQ ID NO: 2069494 - RNA, 19 nt, Homo sapiens
  misc_RNA (1)...(19): siRNA sense strand
ucaaagaagauaacacugu

SEQ ID NO: 2069495 - RNA, 19 nt, Homo sapiens
  misc_RNA (1)...(19): siRNA sense strand
cagaauacgauuaucuuug

SEQ ID NO: 2069496 - RNA, 19 nt, Homo sapiens
  misc_RNA (1)...(19): siRNA sense strand
ggaauuuuaucggcucuua

SEQ ID NO: 2069497 - RNA, 19 nt, Homo sapiens
  misc_RNA (1)...(19): siRNA sense strand
gaccauguuuccuucuaau

SEQ ID NO: 2069498 - RNA, 19 nt, Homo sapiens
  misc_RNA (1)...(19): siRNA sense strand
gcauuugucauugugauuu

SEQ ID NO: 2069499 - RNA, 19 nt, Homo sapiens
  misc_RNA (1)...(19): siRNA sense strand
uuacggaagagauuucuaa

SEQ ID NO: 2069500 - RNA, 19 nt, Homo sapiens
  misc_RNA (1)...(19): siRNA sense strand
gcacaucgugauucugaga

SEQ ID NO: 2069501 - RNA, 19 nt, Homo sapiens
  misc_RNA (1)...(19): siRNA sense strand
uaaucaguaucaucagcua

SEQ ID NO: 2069502 - RNA, 19 nt, Homo sapiens
  misc_RNA (1)...(19): siRNA sense strand
gugcugguaugauuuaucu

SEQ ID NO: 2069503 - RNA, 19 nt, Homo sapiens
  misc_RNA (1)...(19): siRNA sense strand
ugacagugaugccaaaauu

SEQ ID NO: 2069504 - RNA, 19 nt, Homo sapiens
  misc_RNA (1)...(19): siRNA sense strand
gaucagguguuuucagguu

SEQ ID NO: 2069505 - RNA, 19 nt, Homo sapiens
  misc_RNA (1)...(19): siRNA sense strand
ucaagaggaugccuaugag

SEQ ID NO: 2069506 - RNA, 19 nt, Homo sapiens
  misc_RNA (1)...(19): siRNA sense strand
gcccaaauccagcagaaga

SEQ ID NO: 2069507 - RNA, 19 nt, Homo sapiens
  misc_RNA (1)...(19): siRNA sense strand
gccaaaaguucuucgguuu

SEQ ID NO: 2069508 - RNA, 19 nt, Homo sapiens
  misc_RNA (1)...(19): siRNA sense strand
ucagcgaccuaaugacaau

SEQ ID NO: 2069509 - RNA, 19 nt, Homo sapiens
  misc_RNA (1)...(19): siRNA sense strand
augagacacugaauauuga

SEQ ID NO: 2069510 - RNA, 19 nt, Homo sapiens
  misc_RNA (1)...(19): siRNA sense strand
uaagggaagaccugaaguu

SEQ ID NO: 2069511 - RNA, 19 nt, Homo sapiens
  misc_RNA (1)...(19): siRNA sense strand
aaagaagaguaucagaaag

SEQ ID NO: 2069512 - RNA, 19 nt, Homo sapiens
  misc_RNA (1)...(19): siRNA sense strand
gacccuugguuauggagaa

SEQ ID NO: 2069513 - RNA, 19 nt, Homo sapiens
  misc_RNA (1)...(19): siRNA sense strand
aagaagaguaucagaaaga

SEQ ID NO: 2069514 - RNA, 19 nt, Homo sapiens
  misc_RNA (1)...(19): siRNA sense strand
gcaguagcaaagaagagua

SEQ ID NO: 2069515 - RNA, 19 nt, Homo sapiens
  misc_RNA (1)...(19): siRNA sense strand
cagguuaaccgucagaaau

SEQ ID NO: 2069516 - RNA, 19 nt, Homo sapiens
  misc_RNA (1)...(19): siRNA sense strand
gugaguuaccagacuguua

SEQ ID NO: 2069517 - RNA, 19 nt, Homo sapiens
  misc_RNA (1)...(19): siRNA sense strand
ccauguuuccuucuaauga

SEQ ID NO: 2069518 - RNA, 19 nt, Homo sapiens
  misc_RNA (1)...(19): siRNA sense strand
uggguuauuuccaggcaua

SEQ ID NO: 2069519 - RNA, 19 nt, Homo sapiens
  misc_RNA (1)...(19): siRNA sense strand
gcucuuacagguugaaauc

SEQ ID NO: 2069520 - RNA, 19 nt, Homo sapiens
  misc_RNA (1)...(19): siRNA sense strand
uucaggaccucuccaagaa

SEQ ID NO: 2069521 - RNA, 19 nt, Homo sapiens
  misc_RNA (1)...(19): siRNA sense strand
ucuaaugagacacugaaua

SEQ ID NO: 2069522 - RNA, 19 nt, Homo sapiens
  misc_RNA (1)...(19): siRNA sense strand
ccugguguuugaugcauuu

SEQ ID NO: 2069523 - RNA, 19 nt, Homo sapiens
  misc_RNA (1)...(19): siRNA sense strand
acuguuaugucuuucagaa

SEQ ID NO: 2069524 - RNA, 19 nt, Homo sapiens
  misc_RNA (1)...(19): siRNA sense strand
uuaaaggcauugaccuaca

SEQ ID NO: 2069525 - RNA, 19 nt, Homo sapiens
  misc_RNA (1)...(19): siRNA sense strand
ugagcucgauuguguucaa

SEQ ID NO: 2069526 - RNA, 19 nt, Homo sapiens
  misc_RNA (1)...(19): siRNA sense strand
acaagcggccuguguguga

SEQ ID NO: 2069527 - RNA, 19 nt, Homo sapiens
  misc_RNA (1)...(19): siRNA sense strand
ugaguuaccagacuguuau

SEQ ID NO: 2069528 - RNA, 19 nt, Homo sapiens
  misc_RNA (1)...(19): siRNA sense strand
aagaaugucuaagggaaga

SEQ ID NO: 2069529 - RNA, 19 nt, Homo sapiens
  misc_RNA (1)...(19): siRNA sense strand
gcugguauguccuggugau

SEQ ID NO: 2069530 - RNA, 19 nt, Homo sapiens
  misc_RNA (1)...(19): siRNA sense strand
uguucuugcucuaagguua

SEQ ID NO: 2069531 - RNA, 19 nt, Homo sapiens
  misc_RNA (1)...(19): siRNA sense strand
gaauguaaagacuugaaca

SEQ ID NO: 2069532 - RNA, 19 nt, Homo sapiens
  misc_RNA (1)...(19): siRNA sense strand
gaccuacagacaauucauu

SEQ ID NO: 2069533 - RNA, 19 nt, Homo sapiens
  misc_RNA (1)...(19): siRNA sense strand
acguugagcucgauugugu

SEQ ID NO: 2069534 - RNA, 19 nt, Homo sapiens
  misc_RNA (1)...(19): siRNA sense strand
accauaccaugacaaguuu

SEQ ID NO: 2069535 - RNA, 19 nt, Homo sapiens
  misc_RNA (1)...(19): siRNA sense strand
aguauguccugguguuuga

SEQ ID NO: 2069536 - RNA, 19 nt, Homo sapiens
  misc_RNA (1)...(19): siRNA sense strand
uaaaggcauugaccuacag

SEQ ID NO: 2069537 - RNA, 19 nt, Homo sapiens
  misc_RNA (1)...(19): siRNA sense strand
ggacuggaagaacucauca

SEQ ID NO: 2069538 - RNA, 19 nt, Homo sapiens
  misc_RNA (1)...(19): siRNA sense strand
ggugaugacauguuugcaa

SEQ ID NO: 2069539 - RNA, 19 nt, Homo sapiens
  misc_RNA (1)...(19): siRNA sense strand
uaagguuacggaagagauu

SEQ ID NO: 2069540 - RNA, 19 nt, Homo sapiens
  misc_RNA (1)...(19): siRNA sense strand
ugagaugaaagaagaaugu

SEQ ID NO: 2069541 - RNA, 19 nt, Homo sapiens
  misc_RNA (1)...(19): siRNA sense strand
auauuuggaucuacucaga

SEQ ID NO: 2069542 - RNA, 19 nt, Homo sapiens
  misc_RNA (1)...(19): siRNA sense strand
cuuauucuguguacaagau

SEQ ID NO: 2069543 - RNA, 19 nt, Homo sapiens
  misc_RNA (1)...(19): siRNA sense strand
gaaaaucugaacacaguug

SEQ ID NO: 2069544 - RNA, 19 nt, Homo sapiens
  misc_RNA (1)...(19): siRNA sense strand
uaucagcgaccuaaugaca

SEQ ID NO: 2069545 - RNA, 19 nt, Homo sapiens
  misc_RNA (1)...(19): siRNA sense strand
guacaagcggccugugugu

SEQ ID NO: 2069546 - RNA, 19 nt, Homo sapiens
  misc_RNA (1)...(19): siRNA sense strand
gaauuacgcugacagauuu

SEQ ID NO: 2069547 - RNA, 19 nt, Homo sapiens
  misc_RNA (1)...(19): siRNA sense strand
gaaagugacucuuauggaa

SEQ ID NO: 2069548 - RNA, 19 nt, Homo sapiens
  misc_RNA (1)...(19): siRNA sense strand
ggagaaauaugguacaauc

SEQ ID NO: 2069549 - RNA, 19 nt, Homo sapiens
  misc_RNA (1)...(19): siRNA sense strand
gacaaagacucaucaguug

SEQ ID NO: 2069550 - RNA, 19 nt, Homo sapiens
  misc_RNA (1)...(19): siRNA sense strand
ucaagaagcugcagaagug

SEQ ID NO: 2069551 - RNA, 19 nt, Homo sapiens
  misc_RNA (1)...(19): siRNA sense strand
uugaagagcugaaggauaa

SEQ ID NO: 2069552 - RNA, 19 nt, Homo sapiens
  misc_RNA (1)...(19): siRNA sense strand
gaacagcuuugcucacaug

SEQ ID NO: 2069553 - RNA, 19 nt, Homo sapiens
  misc_RNA (1)...(19): siRNA sense strand
caccugaacuuacaacuaa

SEQ ID NO: 2069554 - RNA, 19 nt, Homo sapiens
  misc_RNA (1)...(19): siRNA sense strand
gagaggcugucagguauua

SEQ ID NO: 2069555 - RNA, 19 nt, Homo sapiens
  misc_RNA (1)...(19): siRNA sense strand
ggaucacacuuucaacaua

SEQ ID NO: 2069556 - RNA, 19 nt, Homo sapiens
  misc_RNA (1)...(19): siRNA sense strand
ucaaauaguuguagcaaga

SEQ ID NO: 2069557 - RNA, 19 nt, Homo sapiens
  misc_RNA (1)...(19): siRNA sense strand
gcuacaaacucuucauuau

SEQ ID NO: 2069558 - RNA, 19 nt, Homo sapiens
  misc_RNA (1)...(19): siRNA sense strand
guacauaucugggcucaug

SEQ ID NO: 2069559 - RNA, 19 nt, Homo sapiens
  misc_RNA (1)...(19): siRNA sense strand
gaacuuacaacuaaagcua

SEQ ID NO: 2069560 - RNA, 19 nt, Homo sapiens
  misc_RNA (1)...(19): siRNA sense strand
gcugucagguauuaucuua

SEQ ID NO: 2069561 - RNA, 19 nt, Homo sapiens
  misc_RNA (1)...(19): siRNA sense strand
gcacaacauuugaaacuag

SEQ ID NO: 2069562 - RNA, 19 nt, Homo sapiens
  misc_RNA (1)...(19): siRNA sense strand
cagcagagcuaccagaaga

SEQ ID NO: 2069563 - RNA, 19 nt, Homo sapiens
  misc_RNA (1)...(19): siRNA sense strand
gcugacagauuuauuugaa

SEQ ID NO: 2069564 - RNA, 19 nt, Homo sapiens
  misc_RNA (1)...(19): siRNA sense strand
ggaaccaucuucuccaaau

SEQ ID NO: 2069565 - RNA, 19 nt, Homo sapiens
  misc_RNA (1)...(19): siRNA sense strand
gaaacgcaauuggcuauau

SEQ ID NO: 2069566 - RNA, 19 nt, Homo sapiens
  misc_RNA (1)...(19): siRNA sense strand
caaauggaaugaauccuau

SEQ ID NO: 2069567 - RNA, 19 nt, Homo sapiens
  misc_RNA (1)...(19): siRNA sense strand
cuagaggucuuauuuaugu

SEQ ID NO: 2069568 - RNA, 19 nt, Homo sapiens
  misc_RNA (1)...(19): siRNA sense strand
gauccuggcugcuacaaau

SEQ ID NO: 2069569 - RNA, 19 nt, Homo sapiens
  misc_RNA (1)...(19): siRNA sense strand
gguauuaucuuacuauggu

SEQ ID NO: 2069570 - RNA, 19 nt, Homo sapiens
  misc_RNA (1)...(19): siRNA sense strand
gaagcucccugcugucaau

SEQ ID NO: 2069571 - RNA, 19 nt, Homo sapiens
  misc_RNA (1)...(19): siRNA sense strand
caaaucaucuaaagaguac

SEQ ID NO: 2069572 - RNA, 19 nt, Homo sapiens
  misc_RNA (1)...(19): siRNA sense strand
gcagugaccugaugaaagc

SEQ ID NO: 2069573 - RNA, 19 nt, Homo sapiens
  misc_RNA (1)...(19): siRNA sense strand
gcucaugaguguacauuuc

SEQ ID NO: 2069574 - RNA, 19 nt, Homo sapiens
  misc_RNA (1)...(19): siRNA sense strand
ugacaaagacucaucaguu

SEQ ID NO: 2069575 - RNA, 19 nt, Homo sapiens
  misc_RNA (1)...(19): siRNA sense strand
gaucacacuuucaacauag

SEQ ID NO: 2069576 - RNA, 19 nt, Homo sapiens
  misc_RNA (1)...(19): siRNA sense strand
aaagagaggcugucaggua

SEQ ID NO: 2069577 - RNA, 19 nt, Homo sapiens
  misc_RNA (1)...(19): siRNA sense strand
gcugaaggauaauauugaa

SEQ ID NO: 2069578 - RNA, 19 nt, Homo sapiens
  misc_RNA (1)...(19): siRNA sense strand
caaaggagaccgccaggaa

SEQ ID NO: 2069579 - RNA, 19 nt, Homo sapiens
  misc_RNA (1)...(19): siRNA sense strand
cagauaauacuccuucuuu

SEQ ID NO: 2069580 - RNA, 19 nt, Homo sapiens
  misc_RNA (1)...(19): siRNA sense strand
cagcaucacuguuucaaag

SEQ ID NO: 2069581 - RNA, 19 nt, Homo sapiens
  misc_RNA (1)...(19): siRNA sense strand
uaagaaaugccaagauaga

SEQ ID NO: 2069582 - RNA, 19 nt, Homo sapiens
  misc_RNA (1)...(19): siRNA sense strand
caaccuaaguguucacagu

SEQ ID NO: 2069583 - RNA, 19 nt, Homo sapiens
  misc_RNA (1)...(19): siRNA sense strand
uagcaaacauggaucugaa

SEQ ID NO: 2069584 - RNA, 19 nt, Homo sapiens
  misc_RNA (1)...(19): siRNA sense strand
gcuaagaggaauguuauaa

SEQ ID NO: 2069585 - RNA, 19 nt, Homo sapiens
  misc_RNA (1)...(19): siRNA sense strand
gccuaugggucuucaauga

SEQ ID NO: 2069586 - RNA, 19 nt, Homo sapiens
  misc_RNA (1)...(19): siRNA sense strand
agacauggaucacacuuuc

SEQ ID NO: 2069587 - RNA, 19 nt, Homo sapiens
  misc_RNA (1)...(19): siRNA sense strand
uaucugggcucaugagugu

SEQ ID NO: 2069588 - RNA, 19 nt, Homo sapiens
  misc_RNA (1)...(19): siRNA sense strand
gauaauacuccuucuuugu

SEQ ID NO: 2069589 - RNA, 19 nt, Homo sapiens
  misc_RNA (1)...(19): siRNA sense strand
gccgaaagcuaagcguuaa

SEQ ID NO: 2069590 - RNA, 19 nt, Homo sapiens
  misc_RNA (1)...(19): siRNA sense strand
cagaauuugugcagcagua

SEQ ID NO: 2069591 - RNA, 19 nt, Homo sapiens
  misc_RNA (1)...(19): siRNA sense strand
gcaucacuguuucaaagaa

SEQ ID NO: 2069592 - RNA, 19 nt, Homo sapiens
  misc_RNA (1)...(19): siRNA sense strand
gaagagcugaaggauaaua

SEQ ID NO: 2069593 - RNA, 19 nt, Homo sapiens
  misc_RNA (1)...(19): siRNA sense strand
gaagggaagagaacuugaa

SEQ ID NO: 2069594 - RNA, 19 nt, Homo sapiens
  misc_RNA (1)...(19): siRNA sense strand
gaacaugcaggugauauuc

SEQ ID NO: 2069595 - RNA, 19 nt, Homo sapiens
  misc_RNA (1)...(19): siRNA sense strand
ucagguagauucaguaaac

SEQ ID NO: 2069596 - RNA, 19 nt, Homo sapiens
  misc_RNA (1)...(19): siRNA sense strand
gaugaugaccuugguauau

SEQ ID NO: 2069597 - RNA, 19 nt, Homo sapiens
  misc_RNA (1)...(19): siRNA sense strand
guucuucccaccuuauuua

SEQ ID NO: 2069598 - RNA, 19 nt, Homo sapiens
  misc_RNA (1)...(19): siRNA sense strand
gagcugaaggauaauauug

SEQ ID NO: 2069599 - RNA, 19 nt, Homo sapiens
  misc_RNA (1)...(19): siRNA sense strand
ggaaugaauccuauacauc

SEQ ID NO: 2069600 - RNA, 19 nt, Homo sapiens
  misc_RNA (1)...(19): siRNA sense strand
cuacuuccuuuauugauug

SEQ ID NO: 2069601 - RNA, 19 nt, Homo sapiens
  misc_RNA (1)...(19): siRNA sense strand
ggaauguuauaagccgaua

SEQ ID NO: 2069602 - RNA, 19 nt, Homo sapiens
  misc_RNA (1)...(19): siRNA sense strand
caagacacaagaagguaua

SEQ ID NO: 2069603 - RNA, 19 nt, Homo sapiens
  misc_RNA (1)...(19): siRNA sense strand
ucaaauggaaugaauccua

SEQ ID NO: 2069604 - RNA, 19 nt, Homo sapiens
  misc_RNA (1)...(19): siRNA sense strand
uuacuaugguucccuacua

SEQ ID NO: 2069605 - RNA, 19 nt, Homo sapiens
  misc_RNA (1)...(19): siRNA sense strand
gacuagauauaaaccaaga

SEQ ID NO: 2069606 - RNA, 19 nt, Homo sapiens
  misc_RNA (1)...(19): siRNA sense strand
gaaccaucuucuccaaauc

SEQ ID NO: 2069607 - RNA, 19 nt, Homo sapiens
  misc_RNA (1)...(19): siRNA sense strand
aagagaggcugucagguau

SEQ ID NO: 2069608 - RNA, 19 nt, Homo sapiens
  misc_RNA (1)...(19): siRNA sense strand
gaaauagacauugaugcuu

SEQ ID NO: 2069609 - RNA, 19 nt, Homo sapiens
  misc_RNA (1)...(19): siRNA sense strand
aagcagagcggcauacuga

SEQ ID NO: 2069610 - RNA, 19 nt, Homo sapiens
  misc_RNA (1)...(19): siRNA sense strand
uaagaggaauguuauaagc

SEQ ID NO: 2069611 - RNA, 19 nt, Homo sapiens
  misc_RNA (1)...(19): siRNA sense strand
gauacgcaguggcaaagga

SEQ ID NO: 2069612 - RNA, 19 nt, Homo sapiens
  misc_RNA (1)...(19): siRNA sense strand
agacucaccugaacuuaca

SEQ ID NO: 2069613 - RNA, 19 nt, Homo sapiens
  misc_RNA (1)...(19): siRNA sense strand
ccuacuacuuccuuuauug

SEQ ID NO: 2069614 - RNA, 19 nt, Homo sapiens
  misc_RNA (1)...(19): siRNA sense strand
gaaaugccaagauagaagu

SEQ ID NO: 2069615 - RNA, 19 nt, Homo sapiens
  misc_RNA (1)...(19): siRNA sense strand
uaugugaaagugacucuua

SEQ ID NO: 2069616 - RNA, 19 nt, Homo sapiens
  misc_RNA (1)...(19): siRNA sense strand
cuauggugcugaggauuua

SEQ ID NO: 2069617 - RNA, 19 nt, Homo sapiens
  misc_RNA (1)...(19): siRNA sense strand
agaauuacgcugacagauu

SEQ ID NO: 2069618 - RNA, 19 nt, Homo sapiens
  misc_RNA (1)...(19): siRNA sense strand
guuaagggaacauugaauu

SEQ ID NO: 2069619 - RNA, 19 nt, Homo sapiens
  misc_RNA (1)...(19): siRNA sense strand
agaaguggauguacaaagg

SEQ ID NO: 2069620 - RNA, 19 nt, Homo sapiens
  misc_RNA (1)...(19): siRNA sense strand
caacuaaagcuagcaaaca

SEQ ID NO: 2069621 - RNA, 19 nt, Homo sapiens
  misc_RNA (1)...(19): siRNA sense strand
gcagagcuaccagaagaaa

SEQ ID NO: 2069622 - RNA, 19 nt, Homo sapiens
  misc_RNA (1)...(19): siRNA sense strand
uacaaacucuucauuaucg

SEQ ID NO: 2069623 - RNA, 19 nt, Homo sapiens
  misc_RNA (1)...(19): siRNA sense strand
ugaugcagaugaugaagga

SEQ ID NO: 2069624 - RNA, 19 nt, Homo sapiens
  misc_RNA (1)...(19): siRNA sense strand
gauggagacucaccugaac

SEQ ID NO: 2069625 - RNA, 19 nt, Homo sapiens
  misc_RNA (1)...(19): siRNA sense strand
gcugcuaagaggaauguua

SEQ ID NO: 2069626 - RNA, 19 nt, Homo sapiens
  misc_RNA (1)...(19): siRNA sense strand
gacacaagaagguauaaug

SEQ ID NO: 2069627 - RNA, 19 nt, Homo sapiens
  misc_RNA (1)...(19): siRNA sense strand
gcucccugcugucaauuug

SEQ ID NO: 2069628 - RNA, 19 nt, Homo sapiens
  misc_RNA (1)...(19): siRNA sense strand
ggaugaugaccuugguaua

SEQ ID NO: 2069629 - RNA, 19 nt, Homo sapiens
  misc_RNA (1)...(19): siRNA sense strand
ucaccugugucucuaccua

SEQ ID NO: 2069630 - RNA, 19 nt, Homo sapiens
  misc_RNA (1)...(19): siRNA sense strand
caucagcuaucacagucuu

SEQ ID NO: 2069631 - RNA, 19 nt, Homo sapiens
  misc_RNA (1)...(19): siRNA sense strand
ccuccagaccaaagaauua

SEQ ID NO: 2069632 - RNA, 19 nt, Homo sapiens
  misc_RNA (1)...(19): siRNA sense strand
gggaagagaacuugaagag

SEQ ID NO: 2069633 - RNA, 19 nt, Homo sapiens
  misc_RNA (1)...(19): siRNA sense strand
gauauaaaccaagaaccaa

SEQ ID NO: 2069634 - RNA, 19 nt, Homo sapiens
  misc_RNA (1)...(19): siRNA sense strand
aagaacagcuuugcucaca

SEQ ID NO: 2069635 - RNA, 19 nt, Homo sapiens
  misc_RNA (1)...(19): siRNA sense strand
gaguguacauuucuauggu

SEQ ID NO: 2069636 - RNA, 19 nt, Homo sapiens
  misc_RNA (1)...(19): siRNA sense strand
guagcaagaaugaaauaga

SEQ ID NO: 2069637 - RNA, 19 nt, Homo sapiens
  misc_RNA (1)...(19): siRNA sense strand
ggaaaaugaugcagaugau

SEQ ID NO: 2069638 - RNA, 19 nt, Homo sapiens
  misc_RNA (1)...(19): siRNA sense strand
caauucagguagauucagu

SEQ ID NO: 2069639 - RNA, 19 nt, Homo sapiens
  misc_RNA (1)...(19): siRNA sense strand
agauaauacuccuucuuug

SEQ ID NO: 2069640 - RNA, 19 nt, Homo sapiens
  misc_RNA (1)...(19): siRNA sense strand
ggacacaagacacaagaag

SEQ ID NO: 2069641 - RNA, 19 nt, Homo sapiens
  misc_RNA (1)...(19): siRNA sense strand
gugcagcaguacaagcaaa

SEQ ID NO: 2069642 - RNA, 19 nt, Homo sapiens
  misc_RNA (1)...(19): siRNA sense strand
cgacucugcuguucugaag

SEQ ID NO: 2069643 - RNA, 19 nt, Homo sapiens
  misc_RNA (1)...(19): siRNA sense strand
cgaguuuguugucauggaa

SEQ ID NO: 2069644 - RNA, 19 nt, Homo sapiens
  misc_RNA (1)...(19): siRNA sense strand
cuucauggacuagauauaa

SEQ ID NO: 2069645 - RNA, 19 nt, Homo sapiens
  misc_RNA (1)...(19): siRNA sense strand
gaauucucuucauggacua

SEQ ID NO: 2069646 - RNA, 19 nt, Homo sapiens
  misc_RNA (1)...(19): siRNA sense strand
gaagucaaauuauguacca

SEQ ID NO: 2069647 - RNA, 19 nt, Homo sapiens
  misc_RNA (1)...(19): siRNA sense strand
gaaggacccucugagcuau

SEQ ID NO: 2069648 - RNA, 19 nt, Homo sapiens
  misc_RNA (1)...(19): siRNA sense strand
gcaauaaaauggucuaaca

SEQ ID NO: 2069649 - RNA, 19 nt, Homo sapiens
  misc_RNA (1)...(19): siRNA sense strand
aagaugagcauacuucuaa

SEQ ID NO: 2069650 - RNA, 19 nt, Homo sapiens
  misc_RNA (1)...(19): siRNA sense strand
caaaguagagccaggagaa

SEQ ID NO: 2069651 - RNA, 19 nt, Homo sapiens
  misc_RNA (1)...(19): siRNA sense strand
acaauccgcucaacaaaca

SEQ ID NO: 2069652 - RNA, 19 nt, Homo sapiens
  misc_RNA (1)...(19): siRNA sense strand
gagcuugacauggcaauaa

SEQ ID NO: 2069653 - RNA, 19 nt, Homo sapiens
  misc_RNA (1)...(19): siRNA sense strand
ggacaauggugaugaugcu

SEQ ID NO: 2069654 - RNA, 19 nt, Homo sapiens
  misc_RNA (1)...(19): siRNA sense strand
ggaccugacgagcuguuua

SEQ ID NO: 2069655 - RNA, 19 nt, Homo sapiens
  misc_RNA (1)...(19): siRNA sense strand
agaaggacccucugagcua

SEQ ID NO: 2069656 - RNA, 19 nt, Homo sapiens
  misc_RNA (1)...(19): siRNA sense strand
caggagaaccagcaaagaa

SEQ ID NO: 2069657 - RNA, 19 nt, Homo sapiens
  misc_RNA (1)...(19): siRNA sense strand
ggagaaccagcaaagaaga

SEQ ID NO: 2069658 - RNA, 19 nt, Homo sapiens
  misc_RNA (1)...(19): siRNA sense strand
ggacgaggaggauaacauc

SEQ ID NO: 2069659 - RNA, 19 nt, Homo sapiens
  misc_RNA (1)...(19): siRNA sense strand
gggaggagacguuggaauc

SEQ ID NO: 2069660 - RNA, 19 nt, Homo sapiens
  misc_RNA (1)...(19): siRNA sense strand
gagaaccagcaaagaagaa

SEQ ID NO: 2069661 - RNA, 19 nt, Homo sapiens
  misc_RNA (1)...(19): siRNA sense strand
ugaugaugcuccacagaau

SEQ ID NO: 2069662 - RNA, 19 nt, Homo sapiens
  misc_RNA (1)...(19): siRNA sense strand
gaggagacgagucgcagaa

SEQ ID NO: 2069663 - RNA, 19 nt, Homo sapiens
  misc_RNA (1)...(19): siRNA sense strand
cuacaauccgcucaacaaa

SEQ ID NO: 2069664 - RNA, 19 nt, Homo sapiens
  misc_RNA (1)...(19): siRNA sense strand
ggaggagacguuggaauca

SEQ ID NO: 2069665 - RNA, 19 nt, Homo sapiens
  misc_RNA (1)...(19): siRNA sense strand
gugaugaugcuccacagaa

SEQ ID NO: 2069666 - RNA, 19 nt, Homo sapiens
  misc_RNA (1)...(19): siRNA sense strand
aaagaugagcauacuucua

SEQ ID NO: 2069667 - RNA, 19 nt, Homo sapiens
  misc_RNA (1)...(19): siRNA sense strand
ggagaggcacgucgucaag

SEQ ID NO: 2069668 - RNA, 19 nt, Homo sapiens
  misc_RNA (1)...(19): siRNA sense strand
gaugaugcuccacagaaug

SEQ ID NO: 2069669 - RNA, 19 nt, Homo sapiens
  misc_RNA (1)...(19): siRNA sense strand
ugaggacaauggugaugau

SEQ ID NO: 2069670 - RNA, 19 nt, Homo sapiens
  misc_RNA (1)...(19): siRNA sense strand
guaggaacaaggcggagaa

SEQ ID NO: 2069671 - RNA, 19 nt, Homo sapiens
  misc_RNA (1)...(19): siRNA sense strand
ccacagaaugcuaagaaag

SEQ ID NO: 2069672 - RNA, 19 nt, Homo sapiens
  misc_RNA (1)...(19): siRNA sense strand
cuacaccacugagaagaag

SEQ ID NO: 2069673 - RNA, 19 nt, Homo sapiens
  misc_RNA (1)...(19): siRNA sense strand
gaggagacguuggaaucag

SEQ ID NO: 2069674 - RNA, 19 nt, Homo sapiens
  misc_RNA (1)...(19): siRNA sense strand
ucuacaauccgcucaacaa

SEQ ID NO: 2069675 - RNA, 19 nt, Homo sapiens
  misc_RNA (1)...(19): siRNA sense strand
aggagacguuggaaucaga

SEQ ID NO: 2069676 - RNA, 19 nt, Homo sapiens
  misc_RNA (1)...(19): siRNA sense strand
gaccugacgagcuguuuag

SEQ ID NO: 2069677 - RNA, 19 nt, Homo sapiens
  misc_RNA (1)...(19): siRNA sense strand
agaccuacaccacugagaa

SEQ ID NO: 2069678 - RNA, 19 nt, Homo sapiens
  misc_RNA (1)...(19): siRNA sense strand
uccacagaaugcuaagaaa

SEQ ID NO: 2069679 - RNA, 19 nt, Homo sapiens
  misc_RNA (1)...(19): siRNA sense strand
agaugagcauacuucuaaa

SEQ ID NO: 2069680 - RNA, 19 nt, Homo sapiens
  misc_RNA (1)...(19): siRNA sense strand
gggagaggcacgucgucaa

SEQ ID NO: 2069681 - RNA, 19 nt, Homo sapiens
  misc_RNA (1)...(19): siRNA sense strand
aggacccucugagcuauuu

SEQ ID NO: 2069682 - RNA, 19 nt, Homo sapiens
  misc_RNA (1)...(19): siRNA sense strand
uaccaccuccugagaccua

SEQ ID NO: 2069683 - RNA, 19 nt, Homo sapiens
  misc_RNA (1)...(19): siRNA sense strand
gaccuacaccacugagaag

SEQ ID NO: 2069684 - RNA, 19 nt, Homo sapiens
  misc_RNA (1)...(19): siRNA sense strand
gaagucaaauuauguacca

SEQ ID NO: 2069685 - RNA, 19 nt, Homo sapiens
  misc_RNA (1)...(19): siRNA sense strand
gaaggacccucugagcuau

SEQ ID NO: 2069686 - RNA, 19 nt, Homo sapiens
  misc_RNA (1)...(19): siRNA sense strand
gcaauaaaauggucuaaca

SEQ ID NO: 2069687 - RNA, 19 nt, Homo sapiens
  misc_RNA (1)...(19): siRNA sense strand
aagaugagcauacuucuaa

SEQ ID NO: 2069688 - RNA, 19 nt, Homo sapiens
  misc_RNA (1)...(19): siRNA sense strand
caaaguagagccaggagaa

SEQ ID NO: 2069689 - RNA, 19 nt, Homo sapiens
  misc_RNA (1)...(19): siRNA sense strand
acaauccgcucaacaaaca

SEQ ID NO: 2069690 - RNA, 19 nt, Homo sapiens
  misc_RNA (1)...(19): siRNA sense strand
gagcuugacauggcaauaa

SEQ ID NO: 2069691 - RNA, 19 nt, Homo sapiens
  misc_RNA (1)...(19): siRNA sense strand
ggacaauggugaugaugcu

SEQ ID NO: 2069692 - RNA, 19 nt, Homo sapiens
  misc_RNA (1)...(19): siRNA sense strand
ggaccugacgagcuguuua

SEQ ID NO: 2069693 - RNA, 19 nt, Homo sapiens
  misc_RNA (1)...(19): siRNA sense strand
agaaggacccucugagcua

SEQ ID NO: 2069694 - RNA, 19 nt, Homo sapiens
  misc_RNA (1)...(19): siRNA sense strand
caggagaaccagcaaagaa

SEQ ID NO: 2069695 - RNA, 19 nt, Homo sapiens
  misc_RNA (1)...(19): siRNA sense strand
ggagaaccagcaaagaaga

SEQ ID NO: 2069696 - RNA, 19 nt, Homo sapiens
  misc_RNA (1)...(19): siRNA sense strand
ggacgaggaggauaacauc

SEQ ID NO: 2069697 - RNA, 19 nt, Homo sapiens
  misc_RNA (1)...(19): siRNA sense strand
gggaggagacguuggaauc

SEQ ID NO: 2069698 - RNA, 19 nt, Homo sapiens
  misc_RNA (1)...(19): siRNA sense strand
gagaaccagcaaagaagaa

SEQ ID NO: 2069699 - RNA, 19 nt, Homo sapiens
  misc_RNA (1)...(19): siRNA sense strand
ugaugaugcuccacagaau

SEQ ID NO: 2069700 - RNA, 19 nt, Homo sapiens
  misc_RNA (1)...(19): siRNA sense strand
gaggagacgagucgcagaa

SEQ ID NO: 2069701 - RNA, 19 nt, Homo sapiens
  misc_RNA (1)...(19): siRNA sense strand
cuacaauccgcucaacaaa

SEQ ID NO: 2069702 - RNA, 19 nt, Homo sapiens
  misc_RNA (1)...(19): siRNA sense strand
ggaggagacguuggaauca

SEQ ID NO: 2069703 - RNA, 19 nt, Homo sapiens
  misc_RNA (1)...(19): siRNA sense strand
gugaugaugcuccacagaa

SEQ ID NO: 2069704 - RNA, 19 nt, Homo sapiens
  misc_RNA (1)...(19): siRNA sense strand
aaagaugagcauacuucua

SEQ ID NO: 2069705 - RNA, 19 nt, Homo sapiens
  misc_RNA (1)...(19): siRNA sense strand
ggagaggcacgucgucaag

SEQ ID NO: 2069706 - RNA, 19 nt, Homo sapiens
  misc_RNA (1)...(19): siRNA sense strand
gaugaugcuccacagaaug

SEQ ID NO: 2069707 - RNA, 19 nt, Homo sapiens
  misc_RNA (1)...(19): siRNA sense strand
ugaggacaauggugaugau

SEQ ID NO: 2069708 - RNA, 19 nt, Homo sapiens
  misc_RNA (1)...(19): siRNA sense strand
guaggaacaaggcggagaa

SEQ ID NO: 2069709 - RNA, 19 nt, Homo sapiens
  misc_RNA (1)...(19): siRNA sense strand
ccacagaaugcuaagaaag

SEQ ID NO: 2069710 - RNA, 19 nt, Homo sapiens
  misc_RNA (1)...(19): siRNA sense strand
cuacaccacugagaagaag

SEQ ID NO: 2069711 - RNA, 19 nt, Homo sapiens
  misc_RNA (1)...(19): siRNA sense strand
gaggagacguuggaaucag

SEQ ID NO: 2069712 - RNA, 19 nt, Homo sapiens
  misc_RNA (1)...(19): siRNA sense strand
ucuacaauccgcucaacaa

SEQ ID NO: 2069713 - RNA, 19 nt, Homo sapiens
  misc_RNA (1)...(19): siRNA sense strand
aggagacguuggaaucaga

SEQ ID NO: 2069714 - RNA, 19 nt, Homo sapiens
  misc_RNA (1)...(19): siRNA sense strand
gaccugacgagcuguuuag

SEQ ID NO: 2069715 - RNA, 19 nt, Homo sapiens
  misc_RNA (1)...(19): siRNA sense strand
agaccuacaccacugagaa

SEQ ID NO: 2069716 - RNA, 19 nt, Homo sapiens
  misc_RNA (1)...(19): siRNA sense strand
uccacagaaugcuaagaaa

SEQ ID NO: 2069717 - RNA, 19 nt, Homo sapiens
  misc_RNA (1)...(19): siRNA sense strand
agaugagcauacuucuaaa

SEQ ID NO: 2069718 - RNA, 19 nt, Homo sapiens
  misc_RNA (1)...(19): siRNA sense strand
gggagaggcacgucgucaa

SEQ ID NO: 2069719 - RNA, 19 nt, Homo sapiens
  misc_RNA (1)...(19): siRNA sense strand
aggacccucugagcuauuu

SEQ ID NO: 2069720 - RNA, 19 nt, Homo sapiens
  misc_RNA (1)...(19): siRNA sense strand
uaccaccuccugagaccua

SEQ ID NO: 2069721 - RNA, 19 nt, Homo sapiens
  misc_RNA (1)...(19): siRNA sense strand
gaccuacaccacugagaag

SEQ ID NO: 2069722 - RNA, 19 nt, Homo sapiens
  misc_RNA (1)...(19): siRNA sense strand
gcaagaagcagcugaaaua

SEQ ID NO: 2069723 - RNA, 19 nt, Homo sapiens
  misc_RNA (1)...(19): siRNA sense strand
gcacagcaaucuuaaguuu

SEQ ID NO: 2069724 - RNA, 19 nt, Homo sapiens
  misc_RNA (1)...(19): siRNA sense strand
gagagugcuuuacaaauua

SEQ ID NO: 2069725 - RNA, 19 nt, Homo sapiens
  misc_RNA (1)...(19): siRNA sense strand
agaagcagcugaaauagua

SEQ ID NO: 2069726 - RNA, 19 nt, Homo sapiens
  misc_RNA (1)...(19): siRNA sense strand
auaaagagcuugagaagaa

SEQ ID NO: 2069727 - RNA, 19 nt, Homo sapiens
  misc_RNA (1)...(19): siRNA sense strand
ggagaaggcuguaaaugau

SEQ ID NO: 2069728 - RNA, 19 nt, Homo sapiens
  misc_RNA (1)...(19): siRNA sense strand
aaacugagcuuagaaagaa

SEQ ID NO: 2069729 - RNA, 19 nt, Homo sapiens
  misc_RNA (1)...(19): siRNA sense strand
aaagguugcugaagaaaua

SEQ ID NO: 2069730 - RNA, 19 nt, Homo sapiens
  misc_RNA (1)...(19): siRNA sense strand
guaaagagcuuagaaacca

SEQ ID NO: 2069731 - RNA, 19 nt, Homo sapiens
  misc_RNA (1)...(19): siRNA sense strand
gaauaagaaugaggcuaua

SEQ ID NO: 2069732 - RNA, 19 nt, Homo sapiens
  misc_RNA (1)...(19): siRNA sense strand
gauaugcuuugcuacauuu

SEQ ID NO: 2069733 - RNA, 19 nt, Homo sapiens
  misc_RNA (1)...(19): siRNA sense strand
gaaugaggcuauagugaug

SEQ ID NO: 2069734 - RNA, 19 nt, Homo sapiens
  misc_RNA (1)...(19): siRNA sense strand
aagcuuacuucccaaauua

SEQ ID NO: 2069735 - RNA, 19 nt, Homo sapiens
  misc_RNA (1)...(19): siRNA sense strand
agagaaaucugcagaguau

SEQ ID NO: 2069736 - RNA, 19 nt, Homo sapiens
  misc_RNA (1)...(19): siRNA sense strand
gaaguuguaucuguugaaa

SEQ ID NO: 2069737 - RNA, 19 nt, Homo sapiens
  misc_RNA (1)...(19): siRNA sense strand
agagagugcuuuacaaauu

SEQ ID NO: 2069738 - RNA, 19 nt, Homo sapiens
  misc_RNA (1)...(19): siRNA sense strand
cuacagauccaaauucaua

SEQ ID NO: 2069739 - RNA, 19 nt, Homo sapiens
  misc_RNA (1)...(19): siRNA sense strand
gaagccaaguugucugaaa

SEQ ID NO: 2069740 - RNA, 19 nt, Homo sapiens
  misc_RNA (1)...(19): siRNA sense strand
aacaaaggcuugaccauuu

SEQ ID NO: 2069741 - RNA, 19 nt, Homo sapiens
  misc_RNA (1)...(19): siRNA sense strand
aagcuuagauucccaugua

SEQ ID NO: 2069742 - RNA, 19 nt, Homo sapiens
  misc_RNA (1)...(19): siRNA sense strand
uauuagaucuggaaacuga

SEQ ID NO: 2069743 - RNA, 19 nt, Homo sapiens
  misc_RNA (1)...(19): siRNA sense strand
ggaaaucacaaucuucuga

SEQ ID NO: 2069744 - RNA, 19 nt, Homo sapiens
  misc_RNA (1)...(19): siRNA sense strand
guugguaacucauucugua

SEQ ID NO: 2069745 - RNA, 19 nt, Homo sapiens
  misc_RNA (1)...(19): siRNA sense strand
gaacagugauccagagacu

SEQ ID NO: 2069746 - RNA, 19 nt, Homo sapiens
  misc_RNA (1)...(19): siRNA sense strand
gagcuuagaaaccaagaua

SEQ ID NO: 2069747 - RNA, 19 nt, Homo sapiens
  misc_RNA (1)...(19): siRNA sense strand
gaauuggaagcaacacuua

SEQ ID NO: 2069748 - RNA, 19 nt, Homo sapiens
  misc_RNA (1)...(19): siRNA sense strand
gaggaaaacugucuuauuc

SEQ ID NO: 2069749 - RNA, 19 nt, Homo sapiens
  misc_RNA (1)...(19): siRNA sense strand
agacuacacuugcugcuuu

SEQ ID NO: 2069750 - RNA, 19 nt, Homo sapiens
  misc_RNA (1)...(19): siRNA sense strand
acaaacaggagacaauuua

SEQ ID NO: 2069751 - RNA, 19 nt, Homo sapiens
  misc_RNA (1)...(19): siRNA sense strand
gaaacugagcuuagaaaga

SEQ ID NO: 2069752 - RNA, 19 nt, Homo sapiens
  misc_RNA (1)...(19): siRNA sense strand
ggaugaaguuguaucuguu

SEQ ID NO: 2069753 - RNA, 19 nt, Homo sapiens
  misc_RNA (1)...(19): siRNA sense strand
aaagagagacuacaaacaa

SEQ ID NO: 2069754 - RNA, 19 nt, Homo sapiens
  misc_RNA (1)...(19): siRNA sense strand
gaacuuucuuguuuguuuc

SEQ ID NO: 2069755 - RNA, 19 nt, Homo sapiens
  misc_RNA (1)...(19): siRNA sense strand
ggaagcaacacuuaaggaa

SEQ ID NO: 2069756 - RNA, 19 nt, Homo sapiens
  misc_RNA (1)...(19): siRNA sense strand
agaagaagcuggcaaacca

SEQ ID NO: 2069757 - RNA, 19 nt, Homo sapiens
  misc_RNA (1)...(19): siRNA sense strand
gaaucuuucugcauugaau

SEQ ID NO: 2069758 - RNA, 19 nt, Homo sapiens
  misc_RNA (1)...(19): siRNA sense strand
gaagauuuaccacggugua

SEQ ID NO: 2069759 - RNA, 19 nt, Homo sapiens
  misc_RNA (1)...(19): siRNA sense strand
gaaagagagacuacaaaca

SEQ ID NO: 2069760 - RNA, 19 nt, Homo sapiens
  misc_RNA (1)...(19): siRNA sense strand
gaacgacuacagauccaaa

SEQ ID NO: 2069761 - RNA, 19 nt, Homo sapiens
  misc_RNA (1)...(19): siRNA sense strand
gacaaagcuuucucuggaa

SEQ ID NO: 2069762 - RNA, 19 nt, Homo sapiens
  misc_RNA (1)...(19): siRNA sense strand
gaccaggaacacaccauua

SEQ ID NO: 2069763 - RNA, 19 nt, Homo sapiens
  misc_RNA (1)...(19): siRNA sense strand
cgagaacgauaaguugaaa

SEQ ID NO: 2069764 - RNA, 19 nt, Homo sapiens
  misc_RNA (1)...(19): siRNA sense strand
gacuacagauccaaauuca

SEQ ID NO: 2069765 - RNA, 19 nt, Homo sapiens
  misc_RNA (1)...(19): siRNA sense strand
guacaugaacgacuacaga

SEQ ID NO: 2069766 - RNA, 19 nt, Homo sapiens
  misc_RNA (1)...(19): siRNA sense strand
gaacagauggacgcagaaa

SEQ ID NO: 2069767 - RNA, 19 nt, Homo sapiens
  misc_RNA (1)...(19): siRNA sense strand
aaagcuuacuucccaaauu

SEQ ID NO: 2069768 - RNA, 19 nt, Homo sapiens
  misc_RNA (1)...(19): siRNA sense strand
aaaccaagauagccaagug

SEQ ID NO: 2069769 - RNA, 19 nt, Homo sapiens
  misc_RNA (1)...(19): siRNA sense strand
gacaaaagguugcugaaga

SEQ ID NO: 2069770 - RNA, 19 nt, Homo sapiens
  misc_RNA (1)...(19): siRNA sense strand
caauuuauccagcauguug

SEQ ID NO: 2069771 - RNA, 19 nt, Homo sapiens
  misc_RNA (1)...(19): siRNA sense strand
aaacaaaggcuugaccauu

SEQ ID NO: 2069772 - RNA, 19 nt, Homo sapiens
  misc_RNA (1)...(19): siRNA sense strand
aagagagacuacaaacaaa

SEQ ID NO: 2069773 - RNA, 19 nt, Homo sapiens
  misc_RNA (1)...(19): siRNA sense strand
gaagcuggcaaaccaagaa

SEQ ID NO: 2069774 - RNA, 19 nt, Homo sapiens
  misc_RNA (1)...(19): siRNA sense strand
gacaauuuauccagcaugu

SEQ ID NO: 2069775 - RNA, 19 nt, Homo sapiens
  misc_RNA (1)...(19): siRNA sense strand
uaaggaagcggaguuggua

SEQ ID NO: 2069776 - RNA, 19 nt, Homo sapiens
  misc_RNA (1)...(19): siRNA sense strand
uggcauggguugauggaaa

SEQ ID NO: 2069777 - RNA, 19 nt, Homo sapiens
  misc_RNA (1)...(19): siRNA sense strand
gaagugugcagaccaggaa

SEQ ID NO: 2069778 - RNA, 19 nt, Homo sapiens
  misc_RNA (1)...(19): siRNA sense strand
gaauuacugagucaaagaa

SEQ ID NO: 2069779 - RNA, 19 nt, Homo sapiens
  misc_RNA (1)...(19): siRNA sense strand
cgaauuggaaguacagauu

SEQ ID NO: 2069780 - RNA, 19 nt, Homo sapiens
  misc_RNA (1)...(19): siRNA sense strand
gaagcaggacauucuaaau

SEQ ID NO: 2069781 - RNA, 19 nt, Homo sapiens
  misc_RNA (1)...(19): siRNA sense strand
caaacaaacaggagacaau

SEQ ID NO: 2069782 - RNA, 19 nt, Homo sapiens
  misc_RNA (1)...(19): siRNA sense strand
agaauuagacaccuucaaa

SEQ ID NO: 2069783 - RNA, 19 nt, Homo sapiens
  misc_RNA (1)...(19): siRNA sense strand
gcgaaucuuucugcauuga

SEQ ID NO: 2069784 - RNA, 19 nt, Homo sapiens
  misc_RNA (1)...(19): siRNA sense strand
caacuuguuugcaaaauga

SEQ ID NO: 2069785 - RNA, 19 nt, Homo sapiens
  misc_RNA (1)...(19): siRNA sense strand
gaagaugagaggccagaug

SEQ ID NO: 2069786 - RNA, 19 nt, Homo sapiens
  misc_RNA (1)...(19): siRNA sense strand
ugauggaagucauucagaa

SEQ ID NO: 2069787 - RNA, 19 nt, Homo sapiens
  misc_RNA (1)...(19): siRNA sense strand
uuugaaggaugaaguugua

SEQ ID NO: 2069788 - RNA, 19 nt, Homo sapiens
  misc_RNA (1)...(19): siRNA sense strand
ggaaguacagauugaaaca

SEQ ID NO: 2069789 - RNA, 19 nt, Homo sapiens
  misc_RNA (1)...(19): siRNA sense strand
gaacucuuuugccaucuua

SEQ ID NO: 2069790 - RNA, 19 nt, Homo sapiens
  misc_RNA (1)...(19): siRNA sense strand
ugaaaagacugaauuggaa

SEQ ID NO: 2069791 - RNA, 19 nt, Homo sapiens
  misc_RNA (1)...(19): siRNA sense strand
ggaggcccauauccaagaa

SEQ ID NO: 2069792 - RNA, 19 nt, Homo sapiens
  misc_RNA (1)...(19): siRNA sense strand
gaauuggaaguacagauug

SEQ ID NO: 2069793 - RNA, 19 nt, Homo sapiens
  misc_RNA (1)...(19): siRNA sense strand
ugaauaagaaugaggcuau

SEQ ID NO: 2069794 - RNA, 19 nt, Homo sapiens
  misc_RNA (1)...(19): siRNA sense strand
gaagcagugggaagaauau

SEQ ID NO: 2069795 - RNA, 19 nt, Homo sapiens
  misc_RNA (1)...(19): siRNA sense strand
gcccauauccaagaacuuu

SEQ ID NO: 2069796 - RNA, 19 nt, Homo sapiens
  misc_RNA (1)...(19): siRNA sense strand
uagagagagugcuuuacaa

SEQ ID NO: 2069797 - RNA, 19 nt, Homo sapiens
  misc_RNA (1)...(19): siRNA sense strand
gagaaaaugucaucuagag

SEQ ID NO: 2069798 - RNA, 19 nt, Homo sapiens
  misc_RNA (1)...(19): siRNA sense strand
gaggccagauggagucuca

SEQ ID NO: 2069799 - RNA, 19 nt, Homo sapiens
  misc_RNA (1)...(19): siRNA sense strand
ugauaugcuuugcuacauu

SEQ ID NO: 2069800 - RNA, 19 nt, Homo sapiens
  misc_RNA (1)...(19): siRNA sense strand
guagaauuacugagucaaa

SEQ ID NO: 2069801 - RNA, 19 nt, Homo sapiens
  misc_RNA (1)...(19): siRNA sense strand
gggaagccgagaacgauaa

SEQ ID NO: 2069802 - RNA, 19 nt, Homo sapiens
  misc_RNA (1)...(19): siRNA sense strand
gagagagugcuuuacaaau

SEQ ID NO: 2069803 - RNA, 19 nt, Homo sapiens
  misc_RNA (1)...(19): siRNA sense strand
gagcuucagggccagauuu

SEQ ID NO: 2069804 - RNA, 19 nt, Homo sapiens
  misc_RNA (1)...(19): siRNA sense strand
guacaaaaguugcaagaag

SEQ ID NO: 2069805 - RNA, 19 nt, Homo sapiens
  misc_RNA (1)...(19): siRNA sense strand
gaaaaguucacucaauuga

SEQ ID NO: 2069806 - RNA, 19 nt, Homo sapiens
  misc_RNA (1)...(19): siRNA sense strand
gaaccugcaaucaagaaug

SEQ ID NO: 2069807 - RNA, 19 nt, Homo sapiens
  misc_RNA (1)...(19): siRNA sense strand
aaacaaacaggagacaauu

SEQ ID NO: 2069808 - RNA, 19 nt, Homo sapiens
  misc_RNA (1)...(19): siRNA sense strand
aaagagaaaucugcagagu

SEQ ID NO: 2069809 - RNA, 19 nt, Homo sapiens
  misc_RNA (1)...(19): siRNA sense strand
gaaaacccuuauugaaaug

SEQ ID NO: 2069810 - RNA, 19 nt, Homo sapiens
  misc_RNA (1)...(19): siRNA sense strand
gaaaaugaacucucagaau

SEQ ID NO: 2069811 - RNA, 19 nt, Homo sapiens
  misc_RNA (1)...(19): siRNA sense strand
augaaacucugaaucuuga

SEQ ID NO: 2069812 - RNA, 19 nt, Homo sapiens
  misc_RNA (1)...(19): siRNA sense strand
aaccugcaaucaagaauga

SEQ ID NO: 2069813 - RNA, 19 nt, Homo sapiens
  misc_RNA (1)...(19): siRNA sense strand
gaacgauaaguugaaagaa

SEQ ID NO: 2069814 - RNA, 19 nt, Homo sapiens
  misc_RNA (1)...(19): siRNA sense strand
ugaagcagugggaagaaua

SEQ ID NO: 2069815 - RNA, 19 nt, Homo sapiens
  misc_RNA (1)...(19): siRNA sense strand
cagaaaacccuuauugaaa

SEQ ID NO: 2069816 - RNA, 19 nt, Homo sapiens
  misc_RNA (1)...(19): siRNA sense strand
ggacaccauugaaaagauu

SEQ ID NO: 2069817 - RNA, 19 nt, Homo sapiens
  misc_RNA (1)...(19): siRNA sense strand
uaaagagcuuagaaaccaa

SEQ ID NO: 2069818 - RNA, 19 nt, Homo sapiens
  misc_RNA (1)...(19): siRNA sense strand
uggaagaucugaagaaaau

SEQ ID NO: 2069819 - RNA, 19 nt, Homo sapiens
  misc_RNA (1)...(19): siRNA sense strand
gaaggaugaaguuguaucu

SEQ ID NO: 2069820 - RNA, 19 nt, Homo sapiens
  misc_RNA (1)...(19): siRNA sense strand
gaucuggaaacugagcuua

SEQ ID NO: 2069821 - RNA, 19 nt, Homo sapiens
  misc_RNA (1)...(19): siRNA sense strand
gaaaauaaagagcuugaga

SEQ ID NO: 2069822 - RNA, 19 nt, Homo sapiens
  misc_RNA (1)...(19): siRNA sense strand
ggaguuagaggaagaauua

SEQ ID NO: 2069823 - RNA, 19 nt, Homo sapiens
  misc_RNA (1)...(19): siRNA sense strand
ucaaggaacuauagcaaua

SEQ ID NO: 2069824 - RNA, 19 nt, Homo sapiens
  misc_RNA (1)...(19): siRNA sense strand
gaauuggacucucacauug

SEQ ID NO: 2069825 - RNA, 19 nt, Homo sapiens
  misc_RNA (1)...(19): siRNA sense strand
gcaaauguguuuacagcaa

SEQ ID NO: 2069826 - RNA, 19 nt, Homo sapiens
  misc_RNA (1)...(19): siRNA sense strand
ggagagagcacaucaguau

SEQ ID NO: 2069827 - RNA, 19 nt, Homo sapiens
  misc_RNA (1)...(19): siRNA sense strand
cagcaugcccauauuauua

SEQ ID NO: 2069828 - RNA, 19 nt, Homo sapiens
  misc_RNA (1)...(19): siRNA sense strand
ucacagaaauuccggcaaa

SEQ ID NO: 2069829 - RNA, 19 nt, Homo sapiens
  misc_RNA (1)...(19): siRNA sense strand
ugaacuagcuauaacaaga

SEQ ID NO: 2069830 - RNA, 19 nt, Homo sapiens
  misc_RNA (1)...(19): siRNA sense strand
aaacagaaaugaacaaagg

SEQ ID NO: 2069831 - RNA, 19 nt, Homo sapiens
  misc_RNA (1)...(19): siRNA sense strand
gagauacaguaauggauga

SEQ ID NO: 2069832 - RNA, 19 nt, Homo sapiens
  misc_RNA (1)...(19): siRNA sense strand
gguagguaauaaugacuua

SEQ ID NO: 2069833 - RNA, 19 nt, Homo sapiens
  misc_RNA (1)...(19): siRNA sense strand
gaacaggaugaucuaaauu

SEQ ID NO: 2069834 - RNA, 19 nt, Homo sapiens
  misc_RNA (1)...(19): siRNA sense strand
caaauguguuuacagcaaa

SEQ ID NO: 2069835 - RNA, 19 nt, Homo sapiens
  misc_RNA (1)...(19): siRNA sense strand
ggaaaucaaggaacuauag

SEQ ID NO: 2069836 - RNA, 19 nt, Homo sapiens
  misc_RNA (1)...(19): siRNA sense strand
ugaacaggaugaucuaaau

SEQ ID NO: 2069837 - RNA, 19 nt, Homo sapiens
  misc_RNA (1)...(19): siRNA sense strand
gaagaguguuccugaugau

SEQ ID NO: 2069838 - RNA, 19 nt, Homo sapiens
  misc_RNA (1)...(19): siRNA sense strand
agaagaguguuccugauga

SEQ ID NO: 2069839 - RNA, 19 nt, Homo sapiens
  misc_RNA (1)...(19): siRNA sense strand
uaugacaacuccaguagga

SEQ ID NO: 2069840 - RNA, 19 nt, Homo sapiens
  misc_RNA (1)...(19): siRNA sense strand
gaaaugaacaaagggaaau

SEQ ID NO: 2069841 - RNA, 19 nt, Homo sapiens
  misc_RNA (1)...(19): siRNA sense strand
ggagaaggcauguucaaag

SEQ ID NO: 2069842 - RNA, 19 nt, Homo sapiens
  misc_RNA (1)...(19): siRNA sense strand
gagaagaguguuccugaug

SEQ ID NO: 2069843 - RNA, 19 nt, Homo sapiens
  misc_RNA (1)...(19): siRNA sense strand
gagaaggcauguucaaagc

SEQ ID NO: 2069844 - RNA, 19 nt, Homo sapiens
  misc_RNA (1)...(19): siRNA sense strand
ugaauuggacucucacauu

SEQ ID NO: 2069845 - RNA, 19 nt, Homo sapiens
  misc_RNA (1)...(19): siRNA sense strand
ugccaugguugaauauuaa

SEQ ID NO: 2069846 - RNA, 19 nt, Homo sapiens
  misc_RNA (1)...(19): siRNA sense strand
gauagcaccugagaagagu

SEQ ID NO: 2069847 - RNA, 19 nt, Homo sapiens
  misc_RNA (1)...(19): siRNA sense strand
gaacuagcuauaacaagau

SEQ ID NO: 2069848 - RNA, 19 nt, Homo sapiens
  misc_RNA (1)...(19): siRNA sense strand
uaaagaacuuacuggagau

SEQ ID NO: 2069849 - RNA, 19 nt, Homo sapiens
  misc_RNA (1)...(19): siRNA sense strand
uuugaugacuggaaagaaa

SEQ ID NO: 2069850 - RNA, 19 nt, Homo sapiens
  misc_RNA (1)...(19): siRNA sense strand
gaggaagaauuagaaaguc

SEQ ID NO: 2069851 - RNA, 19 nt, Homo sapiens
  misc_RNA (1)...(19): siRNA sense strand
ggauugaauuguaaagaac

SEQ ID NO: 2069852 - RNA, 19 nt, Homo sapiens
  misc_RNA (1)...(19): siRNA sense strand
uugccaugguugaauauua

SEQ ID NO: 2069853 - RNA, 19 nt, Homo sapiens
  misc_RNA (1)...(19): siRNA sense strand
ggagugcuuauucuaauga

SEQ ID NO: 2069854 - RNA, 19 nt, Homo sapiens
  misc_RNA (1)...(19): siRNA sense strand
ucacauuggcacugagaua

SEQ ID NO: 2069855 - RNA, 19 nt, Homo sapiens
  misc_RNA (1)...(19): siRNA sense strand
uuuccaaccucaugauauu

SEQ ID NO: 2069856 - RNA, 19 nt, Homo sapiens
  misc_RNA (1)...(19): siRNA sense strand
gggagugcuuauucuaaug

SEQ ID NO: 2069857 - RNA, 19 nt, Homo sapiens
  misc_RNA (1)...(19): siRNA sense strand
ugacaacuccaguaggaaa

SEQ ID NO: 2069858 - RNA, 19 nt, Homo sapiens
  misc_RNA (1)...(19): siRNA sense strand
guacaaacagaaaugaaca

SEQ ID NO: 2069859 - RNA, 19 nt, Homo sapiens
  misc_RNA (1)...(19): siRNA sense strand
ucaacuauauacaguccaa

SEQ ID NO: 2069860 - RNA, 19 nt, Homo sapiens
  misc_RNA (1)...(19): siRNA sense strand
ugagauagcaccugagaag

SEQ ID NO: 2069861 - RNA, 19 nt, Homo sapiens
  misc_RNA (1)...(19): siRNA sense strand
gauucagcaugcccauauu

SEQ ID NO: 2069862 - RNA, 19 nt, Homo sapiens
  misc_RNA (1)...(19): siRNA sense strand
caagauuguuaauggaagu

SEQ ID NO: 2069863 - RNA, 19 nt, Homo sapiens
  misc_RNA (1)...(19): siRNA sense strand
uaaaggagagagcacauca

SEQ ID NO: 2069864 - RNA, 19 nt, Homo sapiens
  misc_RNA (1)...(19): siRNA sense strand
aaagggaaaucaaggaacu

SEQ ID NO: 2069865 - RNA, 19 nt, Homo sapiens
  misc_RNA (1)...(19): siRNA sense strand
guuagaggaagaauuagaa

SEQ ID NO: 2069866 - RNA, 19 nt, Homo sapiens
  misc_RNA (1)...(19): siRNA sense strand
ucaguauucugcaaaugug

SEQ ID NO: 2069867 - RNA, 19 nt, Homo sapiens
  misc_RNA (1)...(19): siRNA sense strand
gggaaaucaaggaacuaua

SEQ ID NO: 2069868 - RNA, 19 nt, Homo sapiens
  misc_RNA (1)...(19): siRNA sense strand
gaguguuccugaugauaca

SEQ ID NO: 2069869 - RNA, 19 nt, Homo sapiens
  misc_RNA (1)...(19): siRNA sense strand
ugagaagaguguuccugau

SEQ ID NO: 2069870 - RNA, 19 nt, Homo sapiens
  misc_RNA (1)...(19): siRNA sense strand
ggccuuugaugaucuucuu

SEQ ID NO: 2069871 - RNA, 19 nt, Homo sapiens
  misc_RNA (1)...(19): siRNA sense strand
ccaaggccuuugaugaucu

SEQ ID NO: 2069872 - RNA, 19 nt, Homo sapiens
  misc_RNA (1)...(19): siRNA sense strand
agagagcacaucaguauuc

SEQ ID NO: 2069873 - RNA, 19 nt, Homo sapiens
  misc_RNA (1)...(19): siRNA sense strand
gagagagcacaucaguauu

SEQ ID NO: 2069874 - RNA, 19 nt, Homo sapiens
  misc_RNA (1)...(19): siRNA sense strand
gcagucagcguuuugauga

SEQ ID NO: 2069875 - RNA, 19 nt, Homo sapiens
  misc_RNA (1)...(19): siRNA sense strand
ugggagugcuuauucuaau

SEQ ID NO: 2069876 - RNA, 19 nt, Homo sapiens
  misc_RNA (1)...(19): siRNA sense strand
ucaaaugauugccuguuuu

SEQ ID NO: 2069877 - RNA, 19 nt, Homo sapiens
  misc_RNA (1)...(19): siRNA sense strand
aggaagaauuagaaaguca

SEQ ID NO: 2069878 - RNA, 19 nt, Homo sapiens
  misc_RNA (1)...(19): siRNA sense strand
caaggccuuugaugaucuu

SEQ ID NO: 2069879 - RNA, 19 nt, Homo sapiens
  misc_RNA (1)...(19): siRNA sense strand
agaaaugaacaaagggaaa

SEQ ID NO: 2069880 - RNA, 19 nt, Homo sapiens
  misc_RNA (1)...(19): siRNA sense strand
ugccuuuccuucugauaaa

SEQ ID NO: 2069881 - RNA, 19 nt, Homo sapiens
  misc_RNA (1)...(19): siRNA sense strand
gaaagucauaaacuguuag

SEQ ID NO: 2069882 - RNA, 19 nt, Homo sapiens
  misc_RNA (1)...(19): siRNA sense strand
ucagcaugcccauauuauu

SEQ ID NO: 2069883 - RNA, 19 nt, Homo sapiens
  misc_RNA (1)...(19): siRNA sense strand
guuuacauggcaccaauaa

SEQ ID NO: 2069884 - RNA, 19 nt, Homo sapiens
  misc_RNA (1)...(19): siRNA sense strand
agaggaagaauuagaaagu

SEQ ID NO: 2069885 - RNA, 19 nt, Homo sapiens
  misc_RNA (1)...(19): siRNA sense strand
ucaugauauucaagaggua

SEQ ID NO: 2069886 - RNA, 19 nt, Homo sapiens
  misc_RNA (1)...(19): siRNA sense strand
uuacauggcaccaauaaaa

SEQ ID NO: 2069887 - RNA, 19 nt, Homo sapiens
  misc_RNA (1)...(19): siRNA sense strand
guccaaggccuuugaugau

SEQ ID NO: 2069888 - RNA, 19 nt, Homo sapiens
  misc_RNA (1)...(19): siRNA sense strand
gagauagcaccugagaaga

SEQ ID NO: 2069889 - RNA, 19 nt, Homo sapiens
  misc_RNA (1)...(19): siRNA sense strand
gagauucagcaugcccaua

SEQ ID NO: 2069890 - RNA, 19 nt, Homo sapiens
  misc_RNA (1)...(19): siRNA sense strand
guaauggaugaucuauuug

SEQ ID NO: 2069891 - RNA, 19 nt, Homo sapiens
  misc_RNA (1)...(19): siRNA sense strand
aaaaccagaugaaguugaa

SEQ ID NO: 2069892 - RNA, 19 nt, Homo sapiens
  misc_RNA (1)...(19): siRNA sense strand
agaacuuacuggagauaca

SEQ ID NO: 2069893 - RNA, 19 nt, Homo sapiens
  misc_RNA (1)...(19): siRNA sense strand
ggaagaauuagaaagucau

SEQ ID NO: 2069894 - RNA, 19 nt, Homo sapiens
  misc_RNA (1)...(19): siRNA sense strand
acaaagggaaaucaaggaa

SEQ ID NO: 2069895 - RNA, 19 nt, Homo sapiens
  misc_RNA (1)...(19): siRNA sense strand
ugaaaaccauccagacaau

SEQ ID NO: 2069896 - RNA, 19 nt, Homo sapiens
  misc_RNA (1)...(19): siRNA sense strand
cagaaauuccagauacuca

SEQ ID NO: 2069897 - RNA, 19 nt, Homo sapiens
  misc_RNA (1)...(19): siRNA sense strand
uagaagggguagguaauaa

SEQ ID NO: 2069898 - RNA, 19 nt, Homo sapiens
  misc_RNA (1)...(19): siRNA sense strand
ccuuugaugaucuucuuua

SEQ ID NO: 2069899 - RNA, 19 nt, Homo sapiens
  misc_RNA (1)...(19): siRNA sense strand
gguaacagaaaaugguuua

SEQ ID NO: 2069900 - RNA, 19 nt, Homo sapiens
  misc_RNA (1)...(19): siRNA sense strand
gauaaaggagagagcacau

SEQ ID NO: 2069901 - RNA, 19 nt, Homo sapiens
  misc_RNA (1)...(19): siRNA sense strand
gugcuuauucuaaugacaa

SEQ ID NO: 2069902 - RNA, 19 nt, Homo sapiens
  misc_RNA (1)...(19): siRNA sense strand
caugggagugcuuauucua

SEQ ID NO: 2069903 - RNA, 19 nt, Homo sapiens
  misc_RNA (1)...(19): siRNA sense strand
cuggcaagcugacauaugc

SEQ ID NO: 2069904 - RNA, 19 nt, Homo sapiens
  misc_RNA (1)...(19): siRNA sense strand
aaagaacuuacuggagaua

SEQ ID NO: 2069905 - RNA, 19 nt, Homo sapiens
  misc_RNA (1)...(19): siRNA sense strand
uugaugaucuucuuuacac

SEQ ID NO: 2069906 - RNA, 19 nt, Homo sapiens
  misc_RNA (1)...(19): siRNA sense strand
gcuuuccaaccucaugaua

SEQ ID NO: 2069907 - RNA, 19 nt, Homo sapiens
  misc_RNA (1)...(19): siRNA sense strand
caaacagaaaugaacaaag

SEQ ID NO: 2069908 - RNA, 19 nt, Homo sapiens
  misc_RNA (1)...(19): siRNA sense strand
auacaguaauggaugaucu

SEQ ID NO: 2069909 - RNA, 19 nt, Homo sapiens
  misc_RNA (1)...(19): siRNA sense strand
gaacuuacuggagauacag

SEQ ID NO: 2069910 - RNA, 19 nt, Homo sapiens
  misc_RNA (1)...(19): siRNA sense strand
caguuugccuuuccuucug

SEQ ID NO: 2069911 - RNA, 19 nt, Homo sapiens
  misc_RNA (1)...(19): siRNA sense strand
ugguuuagguuccuugaag

SEQ ID NO: 2069912 - RNA, 19 nt, Homo sapiens
  misc_RNA (1)...(19): siRNA sense strand
aaucaaggaacuauagcaa

SEQ ID NO: 2069913 - RNA, 19 nt, Homo sapiens
  misc_RNA (1)...(19): siRNA sense strand
gaaaucaaggaacuauagc

SEQ ID NO: 2069914 - RNA, 19 nt, Homo sapiens
  misc_RNA (1)...(19): siRNA sense strand
aaucggagaaggcauguuc

SEQ ID NO: 2069915 - RNA, 19 nt, Homo sapiens
  misc_RNA (1)...(19): siRNA sense strand
gaaaucggagaaggcaugu

SEQ ID NO: 2069916 - RNA, 19 nt, Homo sapiens
  misc_RNA (1)...(19): siRNA sense strand
guauucugcaaauguguuu

SEQ ID NO: 2069917 - RNA, 19 nt, Homo sapiens
  misc_RNA (1)...(19): siRNA sense strand
aaagucauuggauugguuu

SEQ ID NO: 2069918 - RNA, 19 nt, Homo sapiens
  misc_RNA (1)...(19): siRNA sense strand
agauucagcaugcccauau

SEQ ID NO: 2069919 - RNA, 19 nt, Homo sapiens
  misc_RNA (1)...(19): siRNA sense strand
aguccaaggccuuugauga

SEQ ID NO: 2069920 - RNA, 19 nt, Homo sapiens
  misc_RNA (1)...(19): siRNA sense strand
ccggcaaaauuuagaagua

SEQ ID NO: 2069921 - RNA, 19 nt, Homo sapiens
  misc_RNA (1)...(19): siRNA sense strand
ccaaccucaugauauucaa

SEQ ID NO: 2069922 - RNA, 19 nt, Homo sapiens
  misc_RNA (1)...(19): siRNA sense strand
ggaguuaucucucuacuaa

SEQ ID NO: 2069923 - RNA, 19 nt, Homo sapiens
  misc_RNA (1)...(19): siRNA sense strand
gaacuaacaucuccacuug

SEQ ID NO: 2069924 - RNA, 19 nt, Homo sapiens
  misc_RNA (1)...(19): siRNA sense strand
gaacaagacacuaauguaa

SEQ ID NO: 2069925 - RNA, 19 nt, Homo sapiens
  misc_RNA (1)...(19): siRNA sense strand
gaaaauagcugcucucuuc

SEQ ID NO: 2069926 - RNA, 19 nt, Homo sapiens
  misc_RNA (1)...(19): siRNA sense strand
gaagcaagaugauguaaag

SEQ ID NO: 2069927 - RNA, 19 nt, Homo sapiens
  misc_RNA (1)...(19): siRNA sense strand
ucacaaaccucucauuaau

SEQ ID NO: 2069928 - RNA, 19 nt, Homo sapiens
  misc_RNA (1)...(19): siRNA sense strand
gaaagucaguggcaaagga

SEQ ID NO: 2069929 - RNA, 19 nt, Homo sapiens
  misc_RNA (1)...(19): siRNA sense strand
gaagauguuucacugugua

SEQ ID NO: 2069930 - RNA, 19 nt, Homo sapiens
  misc_RNA (1)...(19): siRNA sense strand
gacaacuucuccaagauua

SEQ ID NO: 2069931 - RNA, 19 nt, Homo sapiens
  misc_RNA (1)...(19): siRNA sense strand
ugaaagaucugaagcugaa

SEQ ID NO: 2069932 - RNA, 19 nt, Homo sapiens
  misc_RNA (1)...(19): siRNA sense strand
ugaaauaagugaugcagaa

SEQ ID NO: 2069933 - RNA, 19 nt, Homo sapiens
  misc_RNA (1)...(19): siRNA sense strand
guagacaacuucuccaaga

SEQ ID NO: 2069934 - RNA, 19 nt, Homo sapiens
  misc_RNA (1)...(19): siRNA sense strand
gcccagaucugaagacuau

SEQ ID NO: 2069935 - RNA, 19 nt, Homo sapiens
  misc_RNA (1)...(19): siRNA sense strand
gaaacaagcaccuaagaga

SEQ ID NO: 2069936 - RNA, 19 nt, Homo sapiens
  misc_RNA (1)...(19): siRNA sense strand
gcaagaugauguaaaggaa

SEQ ID NO: 2069937 - RNA, 19 nt, Homo sapiens
  misc_RNA (1)...(19): siRNA sense strand
ggacagaagaauuuacuaa

SEQ ID NO: 2069938 - RNA, 19 nt, Homo sapiens
  misc_RNA (1)...(19): siRNA sense strand
gaacaggauucaaacuuag

SEQ ID NO: 2069939 - RNA, 19 nt, Homo sapiens
  misc_RNA (1)...(19): siRNA sense strand
ugagauggauguaauagaa

SEQ ID NO: 2069940 - RNA, 19 nt, Homo sapiens
  misc_RNA (1)...(19): siRNA sense strand
ggacaaaugguaccuuaaa

SEQ ID NO: 2069941 - RNA, 19 nt, Homo sapiens
  misc_RNA (1)...(19): siRNA sense strand
ggacugacaauuccuagua

SEQ ID NO: 2069942 - RNA, 19 nt, Homo sapiens
  misc_RNA (1)...(19): siRNA sense strand
gaacagauggagugaacua

SEQ ID NO: 2069943 - RNA, 19 nt, Homo sapiens
  misc_RNA (1)...(19): siRNA sense strand
ggaagaaguagcagugaua

SEQ ID NO: 2069944 - RNA, 19 nt, Homo sapiens
  misc_RNA (1)...(19): siRNA sense strand
caacuggacagaagaauuu

SEQ ID NO: 2069945 - RNA, 19 nt, Homo sapiens
  misc_RNA (1)...(19): siRNA sense strand
gcaaauucuuggauaguga

SEQ ID NO: 2069946 - RNA, 19 nt, Homo sapiens
  misc_RNA (1)...(19): siRNA sense strand
caauacaacuacagagaaa

SEQ ID NO: 2069947 - RNA, 19 nt, Homo sapiens
  misc_RNA (1)...(19): siRNA sense strand
gcacaaacccgcauguaug

SEQ ID NO: 2069948 - RNA, 19 nt, Homo sapiens
  misc_RNA (1)...(19): siRNA sense strand
ucauuaaucuugcaucuga

SEQ ID NO: 2069949 - RNA, 19 nt, Homo sapiens
  misc_RNA (1)...(19): siRNA sense strand
ccaguuugcucaggaaaua

SEQ ID NO: 2069950 - RNA, 19 nt, Homo sapiens
  misc_RNA (1)...(19): siRNA sense strand
caaauuccguuccugaaga

SEQ ID NO: 2069951 - RNA, 19 nt, Homo sapiens
  misc_RNA (1)...(19): siRNA sense strand
gaaagaguguuggaguuau

SEQ ID NO: 2069952 - RNA, 19 nt, Homo sapiens
  misc_RNA (1)...(19): siRNA sense strand
ucaggaagguccagugaaa

SEQ ID NO: 2069953 - RNA, 19 nt, Homo sapiens
  misc_RNA (1)...(19): siRNA sense strand
gaaaauaucaccacugaaa

SEQ ID NO: 2069954 - RNA, 19 nt, Homo sapiens
  misc_RNA (1)...(19): siRNA sense strand
uuucaaagcuggauaaauc

SEQ ID NO: 2069955 - RNA, 19 nt, Homo sapiens
  misc_RNA (1)...(19): siRNA sense strand
ugacaaaggugaugaucga

SEQ ID NO: 2069956 - RNA, 19 nt, Homo sapiens
  misc_RNA (1)...(19): siRNA sense strand
gcacagaugaucaacagaa

SEQ ID NO: 2069957 - RNA, 19 nt, Homo sapiens
  misc_RNA (1)...(19): siRNA sense strand
gaaauuuggucucgaucug

SEQ ID NO: 2069958 - RNA, 19 nt, Homo sapiens
  misc_RNA (1)...(19): siRNA sense strand
caaaggugaugaucgaaga

SEQ ID NO: 2069959 - RNA, 19 nt, Homo sapiens
  misc_RNA (1)...(19): siRNA sense strand
cgaccuguuucaagaguua

SEQ ID NO: 2069960 - RNA, 19 nt, Homo sapiens
  misc_RNA (1)...(19): siRNA sense strand
gaaaguggaaucagaaaca

SEQ ID NO: 2069961 - RNA, 19 nt, Homo sapiens
  misc_RNA (1)...(19): siRNA sense strand
gugaagagcugggaucaga

SEQ ID NO: 2069962 - RNA, 19 nt, Homo sapiens
  misc_RNA (1)...(19): siRNA sense strand
gggaucagaugaaggagaa

SEQ ID NO: 2069963 - RNA, 19 nt, Homo sapiens
  misc_RNA (1)...(19): siRNA sense strand
guacaaaggaaauggguuu

SEQ ID NO: 2069964 - RNA, 19 nt, Homo sapiens
  misc_RNA (1)...(19): siRNA sense strand
gaaaaugaaugucgugaau

SEQ ID NO: 2069965 - RNA, 19 nt, Homo sapiens
  misc_RNA (1)...(19): siRNA sense strand
gaaaauggaucaacagaag

SEQ ID NO: 2069966 - RNA, 19 nt, Homo sapiens
  misc_RNA (1)...(19): siRNA sense strand
aauagcugcucucuucuua

SEQ ID NO: 2069967 - RNA, 19 nt, Homo sapiens
  misc_RNA (1)...(19): siRNA sense strand
cacaguaucuaaucaauca

SEQ ID NO: 2069968 - RNA, 19 nt, Homo sapiens
  misc_RNA (1)...(19): siRNA sense strand
gaagcaauguggaaaauga

SEQ ID NO: 2069969 - RNA, 19 nt, Homo sapiens
  misc_RNA (1)...(19): siRNA sense strand
ugaaagcacugucuuggau

SEQ ID NO: 2069970 - RNA, 19 nt, Homo sapiens
  misc_RNA (1)...(19): siRNA sense strand
caguacuccugaagaauua

SEQ ID NO: 2069971 - RNA, 19 nt, Homo sapiens
  misc_RNA (1)...(19): siRNA sense strand
gagagaguccugaaucuga

SEQ ID NO: 2069972 - RNA, 19 nt, Homo sapiens
  misc_RNA (1)...(19): siRNA sense strand
cuaguaaguugucagauga

SEQ ID NO: 2069973 - RNA, 19 nt, Homo sapiens
  misc_RNA (1)...(19): siRNA sense strand
gacaauuccuaguaaguug

SEQ ID NO: 2069974 - RNA, 19 nt, Homo sapiens
  misc_RNA (1)...(19): siRNA sense strand
gaacagaagccucacaaac

SEQ ID NO: 2069975 - RNA, 19 nt, Homo sapiens
  misc_RNA (1)...(19): siRNA sense strand
ggaaauaacaagaaagagu

SEQ ID NO: 2069976 - RNA, 19 nt, Homo sapiens
  misc_RNA (1)...(19): siRNA sense strand
gagcacagaugaucaacag

SEQ ID NO: 2069977 - RNA, 19 nt, Homo sapiens
  misc_RNA (1)...(19): siRNA sense strand
gaaagaaaauggaucaaca

SEQ ID NO: 2069978 - RNA, 19 nt, Homo sapiens
  misc_RNA (1)...(19): siRNA sense strand
caaagaacagcucuacaaa

SEQ ID NO: 2069979 - RNA, 19 nt, Homo sapiens
  misc_RNA (1)...(19): siRNA sense strand
ccaaagaacagcucuacaa

SEQ ID NO: 2069980 - RNA, 19 nt, Homo sapiens
  misc_RNA (1)...(19): siRNA sense strand
caaaugguaccuuaaauuc

SEQ ID NO: 2069981 - RNA, 19 nt, Homo sapiens
  misc_RNA (1)...(19): siRNA sense strand
gauuuagacucaacaagug

SEQ ID NO: 2069982 - RNA, 19 nt, Homo sapiens
  misc_RNA (1)...(19): siRNA sense strand
ggagugauaauguaaauuc

SEQ ID NO: 2069983 - RNA, 19 nt, Homo sapiens
  misc_RNA (1)...(19): siRNA sense strand
ggaagauguuucacugugu

SEQ ID NO: 2069984 - RNA, 19 nt, Homo sapiens
  misc_RNA (1)...(19): siRNA sense strand
uaaaggcaauaguguaugu

SEQ ID NO: 2069985 - RNA, 19 nt, Homo sapiens
  misc_RNA (1)...(19): siRNA sense strand
guacugguguucugcauca

SEQ ID NO: 2069986 - RNA, 19 nt, Homo sapiens
  misc_RNA (1)...(19): siRNA sense strand
ugaaacaucuacuguccaa

SEQ ID NO: 2069987 - RNA, 19 nt, Homo sapiens
  misc_RNA (1)...(19): siRNA sense strand
gcagaaaguggaaucagaa

SEQ ID NO: 2069988 - RNA, 19 nt, Homo sapiens
  misc_RNA (1)...(19): siRNA sense strand
aaagagagccauucuacaa

SEQ ID NO: 2069989 - RNA, 19 nt, Homo sapiens
  misc_RNA (1)...(19): siRNA sense strand
gaacagcucuacaaaaucu

SEQ ID NO: 2069990 - RNA, 19 nt, Homo sapiens
  misc_RNA (1)...(19): siRNA sense strand
ccaagauuauucagaguga

SEQ ID NO: 2069991 - RNA, 19 nt, Homo sapiens
  misc_RNA (1)...(19): siRNA sense strand
gacaaaugguaccuuaaau

SEQ ID NO: 2069992 - RNA, 19 nt, Homo sapiens
  misc_RNA (1)...(19): siRNA sense strand
gaagauuguucgccucaag

SEQ ID NO: 2069993 - RNA, 19 nt, Homo sapiens
  misc_RNA (1)...(19): siRNA sense strand
acacacugcugaacucuga

SEQ ID NO: 2069994 - RNA, 19 nt, Homo sapiens
  misc_RNA (1)...(19): siRNA sense strand
ucacuuggaucuucaucaa

SEQ ID NO: 2069995 - RNA, 19 nt, Homo sapiens
  misc_RNA (1)...(19): siRNA sense strand
ccaagguacucacaggaaa

SEQ ID NO: 2069996 - RNA, 19 nt, Homo sapiens
  misc_RNA (1)...(19): siRNA sense strand
gcaucaccauggcuaguuu

SEQ ID NO: 2069997 - RNA, 19 nt, Homo sapiens
  misc_RNA (1)...(19): siRNA sense strand
caggagacauagaugauug

SEQ ID NO: 2069998 - RNA, 19 nt, Homo sapiens
  misc_RNA (1)...(19): siRNA sense strand
gaacuggaaucaaaacaga

SEQ ID NO: 2069999 - RNA, 19 nt, Homo sapiens
  misc_RNA (1)...(19): siRNA sense strand
cagcagaggacaaagagua

SEQ ID NO: 2070000 - RNA, 19 nt, Homo sapiens
  misc_RNA (1)...(19): siRNA sense strand
gcccaaaacuguaacaaaa

SEQ ID NO: 2070001 - RNA, 19 nt, Homo sapiens
  misc_RNA (1)...(19): siRNA sense strand
gagagccauucuacaacua

SEQ ID NO: 2070002 - RNA, 19 nt, Homo sapiens
  misc_RNA (1)...(19): siRNA sense strand
cagaagcacuccagucauc

SEQ ID NO: 2070003 - RNA, 19 nt, Homo sapiens
  misc_RNA (1)...(19): siRNA sense strand
acaaaccucucauuaaucu

SEQ ID NO: 2070004 - RNA, 19 nt, Homo sapiens
  misc_RNA (1)...(19): siRNA sense strand
ggacauaaacuauccuuuu

SEQ ID NO: 2070005 - RNA, 19 nt, Homo sapiens
  misc_RNA (1)...(19): siRNA sense strand
gcaggacccuccagcagau

SEQ ID NO: 2070006 - RNA, 19 nt, Homo sapiens
  misc_RNA (1)...(19): siRNA sense strand
gaaaaggagugagaaauca

SEQ ID NO: 2070007 - RNA, 19 nt, Homo sapiens
  misc_RNA (1)...(19): siRNA sense strand
gaacuggaaacucagcauu

SEQ ID NO: 2070008 - RNA, 19 nt, Homo sapiens
  misc_RNA (1)...(19): siRNA sense strand
agaaagaccaugucacuug

SEQ ID NO: 2070009 - RNA, 19 nt, Homo sapiens
  misc_RNA (1)...(19): siRNA sense strand
gcagcaaauucuuggauag

SEQ ID NO: 2070010 - RNA, 19 nt, Homo sapiens
  misc_RNA (1)...(19): siRNA sense strand
ugaaacagaagaugaaaga

SEQ ID NO: 2070011 - RNA, 19 nt, Homo sapiens
  misc_RNA (1)...(19): siRNA sense strand
cgaugcagcuaacauaugu

SEQ ID NO: 2070012 - RNA, 19 nt, Homo sapiens
  misc_RNA (1)...(19): siRNA sense strand
gaaguuggcguuagaaugc

SEQ ID NO: 2070013 - RNA, 19 nt, Homo sapiens
  misc_RNA (1)...(19): siRNA sense strand
ccucacaaaccucucauua

SEQ ID NO: 2070014 - RNA, 19 nt, Homo sapiens
  misc_RNA (1)...(19): siRNA sense strand
gaaaagccuucuggacaua

SEQ ID NO: 2070015 - RNA, 19 nt, Homo sapiens
  misc_RNA (1)...(19): siRNA sense strand
gugauaagcuguggaucuu

SEQ ID NO: 2070016 - RNA, 19 nt, Homo sapiens
  misc_RNA (1)...(19): siRNA sense strand
uaacaucuccacuugauuc

SEQ ID NO: 2070017 - RNA, 19 nt, Homo sapiens
  misc_RNA (1)...(19): siRNA sense strand
caagauuggacacuacuaa

SEQ ID NO: 2070018 - RNA, 19 nt, Homo sapiens
  misc_RNA (1)...(19): siRNA sense strand
gacugacaauuccuaguaa

SEQ ID NO: 2070019 - RNA, 19 nt, Homo sapiens
  misc_RNA (1)...(19): siRNA sense strand
caaggacaguguuucugaa

SEQ ID NO: 2070020 - RNA, 19 nt, Homo sapiens
  misc_RNA (1)...(19): siRNA sense strand
gguacucacaggaaacuua

SEQ ID NO: 2070021 - RNA, 19 nt, Homo sapiens
  misc_RNA (1)...(19): siRNA sense strand
uagcugcucucuucuuaug

SEQ ID NO: 2070022 - RNA, 19 nt, Homo sapiens
  misc_RNA (1)...(19): siRNA sense strand
gaagaaaucugaagaggua

SEQ ID NO: 2070023 - RNA, 19 nt, Homo sapiens
  misc_RNA (1)...(19): siRNA sense strand
gaacuugucuugcauuuga

SEQ ID NO: 2070024 - RNA, 19 nt, Homo sapiens
  misc_RNA (1)...(19): siRNA sense strand
caaagaagcuuaucauaug

SEQ ID NO: 2070025 - RNA, 19 nt, Homo sapiens
  misc_RNA (1)...(19): siRNA sense strand
gaagaguuauccaguguua

SEQ ID NO: 2070026 - RNA, 19 nt, Homo sapiens
  misc_RNA (1)...(19): siRNA sense strand
gaacaaagacgaaauacuu

SEQ ID NO: 2070027 - RNA, 19 nt, Homo sapiens
  misc_RNA (1)...(19): siRNA sense strand
guacuaagcugauacaaau

SEQ ID NO: 2070028 - RNA, 19 nt, Homo sapiens
  misc_RNA (1)...(19): siRNA sense strand
ccaagaaaguagcaaauua

SEQ ID NO: 2070029 - RNA, 19 nt, Homo sapiens
  misc_RNA (1)...(19): siRNA sense strand
ggagauaagucaacugaaa

SEQ ID NO: 2070030 - RNA, 19 nt, Homo sapiens
  misc_RNA (1)...(19): siRNA sense strand
gcaacuagauucagcauug

SEQ ID NO: 2070031 - RNA, 19 nt, Homo sapiens
  misc_RNA (1)...(19): siRNA sense strand
gaagaaacaaucaagguua

SEQ ID NO: 2070032 - RNA, 19 nt, Homo sapiens
  misc_RNA (1)...(19): siRNA sense strand
gaguaaagcuuuccaacaa

SEQ ID NO: 2070033 - RNA, 19 nt, Homo sapiens
  misc_RNA (1)...(19): siRNA sense strand
gcaaaucaguuaucucaga

SEQ ID NO: 2070034 - RNA, 19 nt, Homo sapiens
  misc_RNA (1)...(19): siRNA sense strand
gcagaacucucauacagaa

SEQ ID NO: 2070035 - RNA, 19 nt, Homo sapiens
  misc_RNA (1)...(19): siRNA sense strand
guaaagcuuuccaacaaua

SEQ ID NO: 2070036 - RNA, 19 nt, Homo sapiens
  misc_RNA (1)...(19): siRNA sense strand
gaaauugucagcagaagua

SEQ ID NO: 2070037 - RNA, 19 nt, Homo sapiens
  misc_RNA (1)...(19): siRNA sense strand
ggaaugaagcacuauauaa

SEQ ID NO: 2070038 - RNA, 19 nt, Homo sapiens
  misc_RNA (1)...(19): siRNA sense strand
ccaaguaucugaagaaaca

SEQ ID NO: 2070039 - RNA, 19 nt, Homo sapiens
  misc_RNA (1)...(19): siRNA sense strand
uaagacaacuccaggaauu

SEQ ID NO: 2070040 - RNA, 19 nt, Homo sapiens
  misc_RNA (1)...(19): siRNA sense strand
caacaaaggaugaaagaaa

SEQ ID NO: 2070041 - RNA, 19 nt, Homo sapiens
  misc_RNA (1)...(19): siRNA sense strand
gaagaaagccauaagaauc

SEQ ID NO: 2070042 - RNA, 19 nt, Homo sapiens
  misc_RNA (1)...(19): siRNA sense strand
gaacaaaccaaacaaggaa

SEQ ID NO: 2070043 - RNA, 19 nt, Homo sapiens
  misc_RNA (1)...(19): siRNA sense strand
gaacagccuucaacauuag

SEQ ID NO: 2070044 - RNA, 19 nt, Homo sapiens
  misc_RNA (1)...(19): siRNA sense strand
gauagacucuugacggaaa

SEQ ID NO: 2070045 - RNA, 19 nt, Homo sapiens
  misc_RNA (1)...(19): siRNA sense strand
caagaaagguguggucuau

SEQ ID NO: 2070046 - RNA, 19 nt, Homo sapiens
  misc_RNA (1)...(19): siRNA sense strand
gaauggaguuugcagaguu

SEQ ID NO: 2070047 - RNA, 19 nt, Homo sapiens
  misc_RNA (1)...(19): siRNA sense strand
agaacagccuucaacauua

SEQ ID NO: 2070048 - RNA, 19 nt, Homo sapiens
  misc_RNA (1)...(19): siRNA sense strand
gcacagagagaaauagaaa

SEQ ID NO: 2070049 - RNA, 19 nt, Homo sapiens
  misc_RNA (1)...(19): siRNA sense strand
acagaaggcucaauuauca

SEQ ID NO: 2070050 - RNA, 19 nt, Homo sapiens
  misc_RNA (1)...(19): siRNA sense strand
caaacaacaucaucuugaa

SEQ ID NO: 2070051 - RNA, 19 nt, Homo sapiens
  misc_RNA (1)...(19): siRNA sense strand
gaaagaugcucauggaaac

SEQ ID NO: 2070052 - RNA, 19 nt, Homo sapiens
  misc_RNA (1)...(19): siRNA sense strand
ugaagcaacucucuaaaga

SEQ ID NO: 2070053 - RNA, 19 nt, Homo sapiens
  misc_RNA (1)...(19): siRNA sense strand
gaaaggcucucuagugaac

SEQ ID NO: 2070054 - RNA, 19 nt, Homo sapiens
  misc_RNA (1)...(19): siRNA sense strand
ugaaucagcugcacaugaa

SEQ ID NO: 2070055 - RNA, 19 nt, Homo sapiens
  misc_RNA (1)...(19): siRNA sense strand
cgaaauacuuagagacaaa

SEQ ID NO: 2070056 - RNA, 19 nt, Homo sapiens
  misc_RNA (1)...(19): siRNA sense strand
ggagaaaucagaauuggaa

SEQ ID NO: 2070057 - RNA, 19 nt, Homo sapiens
  misc_RNA (1)...(19): siRNA sense strand
gcacagaggagaaauggaa

SEQ ID NO: 2070058 - RNA, 19 nt, Homo sapiens
  misc_RNA (1)...(19): siRNA sense strand
cagcucagguuacacauuu

SEQ ID NO: 2070059 - RNA, 19 nt, Homo sapiens
  misc_RNA (1)...(19): siRNA sense strand
gcaccucucucaauuagau

SEQ ID NO: 2070060 - RNA, 19 nt, Homo sapiens
  misc_RNA (1)...(19): siRNA sense strand
gaaauggaaucuaguucau

SEQ ID NO: 2070061 - RNA, 19 nt, Homo sapiens
  misc_RNA (1)...(19): siRNA sense strand
ugaaagaaauggagagugu

SEQ ID NO: 2070062 - RNA, 19 nt, Homo sapiens
  misc_RNA (1)...(19): siRNA sense strand
gaagcuagagagugaguua

SEQ ID NO: 2070063 - RNA, 19 nt, Homo sapiens
  misc_RNA (1)...(19): siRNA sense strand
uaacauggcucacagaacu

SEQ ID NO: 2070064 - RNA, 19 nt, Homo sapiens
  misc_RNA (1)...(19): siRNA sense strand
gaagauuucugcugacucu

SEQ ID NO: 2070065 - RNA, 19 nt, Homo sapiens
  misc_RNA (1)...(19): siRNA sense strand
gcaaacaacaucaucuuga

SEQ ID NO: 2070066 - RNA, 19 nt, Homo sapiens
  misc_RNA (1)...(19): siRNA sense strand
gggaaguacuugagacuga

SEQ ID NO: 2070067 - RNA, 19 nt, Homo sapiens
  misc_RNA (1)...(19): siRNA sense strand
ccagugaucuuacuuucaa

SEQ ID NO: 2070068 - RNA, 19 nt, Homo sapiens
  misc_RNA (1)...(19): siRNA sense strand
gagagaaauugggaacuaa

SEQ ID NO: 2070069 - RNA, 19 nt, Homo sapiens
  misc_RNA (1)...(19): siRNA sense strand
gaacuuagagaaugcaaga

SEQ ID NO: 2070070 - RNA, 19 nt, Homo sapiens
  misc_RNA (1)...(19): siRNA sense strand
gguuucagcucaagauaaa

SEQ ID NO: 2070071 - RNA, 19 nt, Homo sapiens
  misc_RNA (1)...(19): siRNA sense strand
gaaguagaaucucucaaag

SEQ ID NO: 2070072 - RNA, 19 nt, Homo sapiens
  misc_RNA (1)...(19): siRNA sense strand
gaaagaacacaacaaagga

SEQ ID NO: 2070073 - RNA, 19 nt, Homo sapiens
  misc_RNA (1)...(19): siRNA sense strand
uaaagacaaugaagaggaa

SEQ ID NO: 2070074 - RNA, 19 nt, Homo sapiens
  misc_RNA (1)...(19): siRNA sense strand
gaagagguauauuguuuac

SEQ ID NO: 2070075 - RNA, 19 nt, Homo sapiens
  misc_RNA (1)...(19): siRNA sense strand
gaaagugaaaugacaaaga

SEQ ID NO: 2070076 - RNA, 19 nt, Homo sapiens
  misc_RNA (1)...(19): siRNA sense strand
uagaagaacuacguacuaa

SEQ ID NO: 2070077 - RNA, 19 nt, Homo sapiens
  misc_RNA (1)...(19): siRNA sense strand
gcuagguggucaucaagua

SEQ ID NO: 2070078 - RNA, 19 nt, Homo sapiens
  misc_RNA (1)...(19): siRNA sense strand
gaacugaagauaacagaau

SEQ ID NO: 2070079 - RNA, 19 nt, Homo sapiens
  misc_RNA (1)...(19): siRNA sense strand
gaacucucauacagaauug

SEQ ID NO: 2070080 - RNA, 19 nt, Homo sapiens
  misc_RNA (1)...(19): siRNA sense strand
ugaaagagcaagaacagua

SEQ ID NO: 2070081 - RNA, 19 nt, Homo sapiens
  misc_RNA (1)...(19): siRNA sense strand
cagcagcauugauuaaauu

SEQ ID NO: 2070082 - RNA, 19 nt, Homo sapiens
  misc_RNA (1)...(19): siRNA sense strand
caaugcaccucucucaauu

SEQ ID NO: 2070083 - RNA, 19 nt, Homo sapiens
  misc_RNA (1)...(19): siRNA sense strand
cugaagagguauauuguuu

SEQ ID NO: 2070084 - RNA, 19 nt, Homo sapiens
  misc_RNA (1)...(19): siRNA sense strand
agaaagguguggucuauau

SEQ ID NO: 2070085 - RNA, 19 nt, Homo sapiens
  misc_RNA (1)...(19): siRNA sense strand
gccaagagauaagauguuu

SEQ ID NO: 2070086 - RNA, 19 nt, Homo sapiens
  misc_RNA (1)...(19): siRNA sense strand
gcacuuaaagagagaaauu

SEQ ID NO: 2070087 - RNA, 19 nt, Homo sapiens
  misc_RNA (1)...(19): siRNA sense strand
aagaggagcugcuagagaa

SEQ ID NO: 2070088 - RNA, 19 nt, Homo sapiens
  misc_RNA (1)...(19): siRNA sense strand
ccauuuagcugaagaacug

SEQ ID NO: 2070089 - RNA, 19 nt, Homo sapiens
  misc_RNA (1)...(19): siRNA sense strand
cuagugaacuggaggauau

SEQ ID NO: 2070090 - RNA, 19 nt, Homo sapiens
  misc_RNA (1)...(19): siRNA sense strand
gaaccaaguaucugaagaa

SEQ ID NO: 2070091 - RNA, 19 nt, Homo sapiens
  misc_RNA (1)...(19): siRNA sense strand
gaaagguguggucuauaua

SEQ ID NO: 2070092 - RNA, 19 nt, Homo sapiens
  misc_RNA (1)...(19): siRNA sense strand
gaaauuaugccugauguuc

SEQ ID NO: 2070093 - RNA, 19 nt, Homo sapiens
  misc_RNA (1)...(19): siRNA sense strand
aguagaaucucucaaagaa

SEQ ID NO: 2070094 - RNA, 19 nt, Homo sapiens
  misc_RNA (1)...(19): siRNA sense strand
ucucacagcugaacuuaga

SEQ ID NO: 2070095 - RNA, 19 nt, Homo sapiens
  misc_RNA (1)...(19): siRNA sense strand
gaaaacaaaugcuguaaag

SEQ ID NO: 2070096 - RNA, 19 nt, Homo sapiens
  misc_RNA (1)...(19): siRNA sense strand
gaaugagcgacuagauuua

SEQ ID NO: 2070097 - RNA, 19 nt, Homo sapiens
  misc_RNA (1)...(19): siRNA sense strand
acaaaggaaugaagcacua

SEQ ID NO: 2070098 - RNA, 19 nt, Homo sapiens
  misc_RNA (1)...(19): siRNA sense strand
uuacgucgcucuauuagug

SEQ ID NO: 2070099 - RNA, 19 nt, Homo sapiens
  misc_RNA (1)...(19): siRNA sense strand
uagaaagucugaaugacaa

SEQ ID NO: 2070100 - RNA, 19 nt, Homo sapiens
  misc_RNA (1)...(19): siRNA sense strand
agauugagauggaucagua

SEQ ID NO: 2070101 - RNA, 19 nt, Homo sapiens
  misc_RNA (1)...(19): siRNA sense strand
caagagacaauuagaaaug

SEQ ID NO: 2070102 - RNA, 19 nt, Homo sapiens
  misc_RNA (1)...(19): siRNA sense strand
acagaaagagcuaaagaua

SEQ ID NO: 2070103 - RNA, 19 nt, Homo sapiens
  misc_RNA (1)...(19): siRNA sense strand
gaaugaaaaccgagaauua

SEQ ID NO: 2070104 - RNA, 19 nt, Homo sapiens
  misc_RNA (1)...(19): siRNA sense strand
gaagucauggcacaacuaa

SEQ ID NO: 2070105 - RNA, 19 nt, Homo sapiens
  misc_RNA (1)...(19): siRNA sense strand
gagaggcaaagacuuguua

SEQ ID NO: 2070106 - RNA, 19 nt, Homo sapiens
  misc_RNA (1)...(19): siRNA sense strand
uagaacagccuucaacauu

SEQ ID NO: 2070107 - RNA, 19 nt, Homo sapiens
  misc_RNA (1)...(19): siRNA sense strand
gacaugaacugaagauaac

SEQ ID NO: 2070108 - RNA, 19 nt, Homo sapiens
  misc_RNA (1)...(19): siRNA sense strand
caaaugcuguaaaggaguu

SEQ ID NO: 2070109 - RNA, 19 nt, Homo sapiens
  misc_RNA (1)...(19): siRNA sense strand
aaacaaaugcuguaaagga

SEQ ID NO: 2070110 - RNA, 19 nt, Homo sapiens
  misc_RNA (1)...(19): siRNA sense strand
caacaagagacaauuagaa

SEQ ID NO: 2070111 - RNA, 19 nt, Homo sapiens
  misc_RNA (1)...(19): siRNA sense strand
ggaccaacaauuuaaagaa

SEQ ID NO: 2070112 - RNA, 19 nt, Homo sapiens
  misc_RNA (1)...(19): siRNA sense strand
gcagaaaucaagaaauugu

SEQ ID NO: 2070113 - RNA, 19 nt, Homo sapiens
  misc_RNA (1)...(19): siRNA sense strand
agagaaagaugcucaugga

SEQ ID NO: 2070114 - RNA, 19 nt, Homo sapiens
  misc_RNA (1)...(19): siRNA sense strand
acaaggaggccauagauuu

SEQ ID NO: 2070115 - RNA, 19 nt, Homo sapiens
  misc_RNA (1)...(19): siRNA sense strand
ggaauugagagauguacua

SEQ ID NO: 2070116 - RNA, 19 nt, Homo sapiens
  misc_RNA (1)...(19): siRNA sense strand
gcaaugcaccucucucaau

SEQ ID NO: 2070117 - RNA, 19 nt, Homo sapiens
  misc_RNA (1)...(19): siRNA sense strand
ggaaauuuguaaggaagaa

SEQ ID NO: 2070118 - RNA, 19 nt, Homo sapiens
  misc_RNA (1)...(19): siRNA sense strand
gggaagaguuauccagugu

SEQ ID NO: 2070119 - RNA, 19 nt, Homo sapiens
  misc_RNA (1)...(19): siRNA sense strand
cagaaagagcuaaagauaa

SEQ ID NO: 2070120 - RNA, 19 nt, Homo sapiens
  misc_RNA (1)...(19): siRNA sense strand
gaaaccauuuagcugaaga

SEQ ID NO: 2070121 - RNA, 19 nt, Homo sapiens
  misc_RNA (1)...(19): siRNA sense strand
caugcaaaguggaagauuu

SEQ ID NO: 2070122 - RNA, 19 nt, Homo sapiens
  misc_RNA (1)...(19): siRNA sense strand
gaaaugauguggagauaaa

SEQ ID NO: 2070123 - RNA, 19 nt, Homo sapiens
  misc_RNA (1)...(19): siRNA sense strand
ucagagagauggcacuuua

SEQ ID NO: 2070124 - RNA, 19 nt, Homo sapiens
  misc_RNA (1)...(19): siRNA sense strand
gaaguggaauuucuccuaa

SEQ ID NO: 2070125 - RNA, 19 nt, Homo sapiens
  misc_RNA (1)...(19): siRNA sense strand
cagaauaccuucccucauu

SEQ ID NO: 2070126 - RNA, 19 nt, Homo sapiens
  misc_RNA (1)...(19): siRNA sense strand
caaagaaauuccaagguuu

SEQ ID NO: 2070127 - RNA, 19 nt, Homo sapiens
  misc_RNA (1)...(19): siRNA sense strand
ccaaagaaauuccaagguu

SEQ ID NO: 2070128 - RNA, 19 nt, Homo sapiens
  misc_RNA (1)...(19): siRNA sense strand
gagaggagaguaaguauaa

SEQ ID NO: 2070129 - RNA, 19 nt, Homo sapiens
  misc_RNA (1)...(19): siRNA sense strand
gcaagagguaugcaaauua

SEQ ID NO: 2070130 - RNA, 19 nt, Homo sapiens
  misc_RNA (1)...(19): siRNA sense strand
caacuggacuuuacacgaa

SEQ ID NO: 2070131 - RNA, 19 nt, Homo sapiens
  misc_RNA (1)...(19): siRNA sense strand
gaacaggaaaucaaggaua

SEQ ID NO: 2070132 - RNA, 19 nt, Homo sapiens
  misc_RNA (1)...(19): siRNA sense strand
gaagauagcauuccuuuac

SEQ ID NO: 2070133 - RNA, 19 nt, Homo sapiens
  misc_RNA (1)...(19): siRNA sense strand
gccagaaccuauuuaguaa

SEQ ID NO: 2070134 - RNA, 19 nt, Homo sapiens
  misc_RNA (1)...(19): siRNA sense strand
cgaaagacauuagcagaaa

SEQ ID NO: 2070135 - RNA, 19 nt, Homo sapiens
  misc_RNA (1)...(19): siRNA sense strand
gaaagcaaacaacuucuaa

SEQ ID NO: 2070136 - RNA, 19 nt, Homo sapiens
  misc_RNA (1)...(19): siRNA sense strand
ucaagaacaugccaaagaa

SEQ ID NO: 2070137 - RNA, 19 nt, Homo sapiens
  misc_RNA (1)...(19): siRNA sense strand
ggacagucucuucgaauua

SEQ ID NO: 2070138 - RNA, 19 nt, Homo sapiens
  misc_RNA (1)...(19): siRNA sense strand
gaaggcaaaugaaauuauc

SEQ ID NO: 2070139 - RNA, 19 nt, Homo sapiens
  misc_RNA (1)...(19): siRNA sense strand
gagaguaaguauaagaaug

SEQ ID NO: 2070140 - RNA, 19 nt, Homo sapiens
  misc_RNA (1)...(19): siRNA sense strand
gauaaggaccagcuuguuu

SEQ ID NO: 2070141 - RNA, 19 nt, Homo sapiens
  misc_RNA (1)...(19): siRNA sense strand
gacagucucuucgaauuaa

SEQ ID NO: 2070142 - RNA, 19 nt, Homo sapiens
  misc_RNA (1)...(19): siRNA sense strand
aaacaagcauucucaggaa

SEQ ID NO: 2070143 - RNA, 19 nt, Homo sapiens
  misc_RNA (1)...(19): siRNA sense strand
ggaaaauggugaaaaugua

SEQ ID NO: 2070144 - RNA, 19 nt, Homo sapiens
  misc_RNA (1)...(19): siRNA sense strand
gaaauccuccaucaacaaa

SEQ ID NO: 2070145 - RNA, 19 nt, Homo sapiens
  misc_RNA (1)...(19): siRNA sense strand
agaaaggacuuaguuauuc

SEQ ID NO: 2070146 - RNA, 19 nt, Homo sapiens
  misc_RNA (1)...(19): siRNA sense strand
caagaacaauuagaagcua

SEQ ID NO: 2070147 - RNA, 19 nt, Homo sapiens
  misc_RNA (1)...(19): siRNA sense strand
uuacacaccucucacuaaa

SEQ ID NO: 2070148 - RNA, 19 nt, Homo sapiens
  misc_RNA (1)...(19): siRNA sense strand
ggauaacucaccugcauuu

SEQ ID NO: 2070149 - RNA, 19 nt, Homo sapiens
  misc_RNA (1)...(19): siRNA sense strand
gagaaagcaagauguauug

SEQ ID NO: 2070150 - RNA, 19 nt, Homo sapiens
  misc_RNA (1)...(19): siRNA sense strand
uaaaugugguagagacaaa

SEQ ID NO: 2070151 - RNA, 19 nt, Homo sapiens
  misc_RNA (1)...(19): siRNA sense strand
caagagguaugcaaauuac

SEQ ID NO: 2070152 - RNA, 19 nt, Homo sapiens
  misc_RNA (1)...(19): siRNA sense strand
gcaguuaccaaacaguuaa

SEQ ID NO: 2070153 - RNA, 19 nt, Homo sapiens
  misc_RNA (1)...(19): siRNA sense strand
cagaaaggacuuaguuauu

SEQ ID NO: 2070154 - RNA, 19 nt, Homo sapiens
  misc_RNA (1)...(19): siRNA sense strand
gaaugugguugaugguaga

SEQ ID NO: 2070155 - RNA, 19 nt, Homo sapiens
  misc_RNA (1)...(19): siRNA sense strand
gaacaugccaaagaaauuc

SEQ ID NO: 2070156 - RNA, 19 nt, Homo sapiens
  misc_RNA (1)...(19): siRNA sense strand
gaaaggacuuaguuauucg

SEQ ID NO: 2070157 - RNA, 19 nt, Homo sapiens
  misc_RNA (1)...(19): siRNA sense strand
ccaaauaccugaagaaaag

SEQ ID NO: 2070158 - RNA, 19 nt, Homo sapiens
  misc_RNA (1)...(19): siRNA sense strand
gaagagagaauucuacacu

SEQ ID NO: 2070159 - RNA, 19 nt, Homo sapiens
  misc_RNA (1)...(19): siRNA sense strand
uuagauaaguuacggaaug

SEQ ID NO: 2070160 - RNA, 19 nt, Homo sapiens
  misc_RNA (1)...(19): siRNA sense strand
ggagaggagaguaaguaua

SEQ ID NO: 2070161 - RNA, 19 nt, Homo sapiens
  misc_RNA (1)...(19): siRNA sense strand
ggacucagccagaaccuau

SEQ ID NO: 2070162 - RNA, 19 nt, Homo sapiens
  misc_RNA (1)...(19): siRNA sense strand
aacaggaaaucaaggauaa

SEQ ID NO: 2070163 - RNA, 19 nt, Homo sapiens
  misc_RNA (1)...(19): siRNA sense strand
gaggagaggagaguaagua

SEQ ID NO: 2070164 - RNA, 19 nt, Homo sapiens
  misc_RNA (1)...(19): siRNA sense strand
ucacgugguuaaauaaaga

SEQ ID NO: 2070165 - RNA, 19 nt, Homo sapiens
  misc_RNA (1)...(19): siRNA sense strand
cuucuuagcuuucccacaa

SEQ ID NO: 2070166 - RNA, 19 nt, Homo sapiens
  misc_RNA (1)...(19): siRNA sense strand
uaccuucccucauucgaua

SEQ ID NO: 2070167 - RNA, 19 nt, Homo sapiens
  misc_RNA (1)...(19): siRNA sense strand
gcaggcuguuugaaaugua

SEQ ID NO: 2070168 - RNA, 19 nt, Homo sapiens
  misc_RNA (1)...(19): siRNA sense strand
ggaauuacaagauguugga

SEQ ID NO: 2070169 - RNA, 19 nt, Homo sapiens
  misc_RNA (1)...(19): siRNA sense strand
gaauuucuccuaaccugaa

SEQ ID NO: 2070170 - RNA, 19 nt, Homo sapiens
  misc_RNA (1)...(19): siRNA sense strand
ucacagaaaggacuuaguu

SEQ ID NO: 2070171 - RNA, 19 nt, Homo sapiens
  misc_RNA (1)...(19): siRNA sense strand
caauuagaagcuacaguua

SEQ ID NO: 2070172 - RNA, 19 nt, Homo sapiens
  misc_RNA (1)...(19): siRNA sense strand
caaaaggaauuacaagaug

SEQ ID NO: 2070173 - RNA, 19 nt, Homo sapiens
  misc_RNA (1)...(19): siRNA sense strand
aggcacagguucaauauca

SEQ ID NO: 2070174 - RNA, 19 nt, Homo sapiens
  misc_RNA (1)...(19): siRNA sense strand
uagaagcggcuaauaaaga

SEQ ID NO: 2070175 - RNA, 19 nt, Homo sapiens
  misc_RNA (1)...(19): siRNA sense strand
ggaaaugauguggagauaa

SEQ ID NO: 2070176 - RNA, 19 nt, Homo sapiens
  misc_RNA (1)...(19): siRNA sense strand
ugagaaagcaagauguauu

SEQ ID NO: 2070177 - RNA, 19 nt, Homo sapiens
  misc_RNA (1)...(19): siRNA sense strand
cuaagcaacuggacuuuac

SEQ ID NO: 2070178 - RNA, 19 nt, Homo sapiens
  misc_RNA (1)...(19): siRNA sense strand
cuauuucccugggcaguua

SEQ ID NO: 2070179 - RNA, 19 nt, Homo sapiens
  misc_RNA (1)...(19): siRNA sense strand
uuacauacaucuuccaaac

SEQ ID NO: 2070180 - RNA, 19 nt, Homo sapiens
  misc_RNA (1)...(19): siRNA sense strand
agccagaaccuauuuagua

SEQ ID NO: 2070181 - RNA, 19 nt, Homo sapiens
  misc_RNA (1)...(19): siRNA sense strand
gaauccaaauaccugaaga

SEQ ID NO: 2070182 - RNA, 19 nt, Homo sapiens
  misc_RNA (1)...(19): siRNA sense strand
gcacguuaaucagcuacaa

SEQ ID NO: 2070183 - RNA, 19 nt, Homo sapiens
  misc_RNA (1)...(19): siRNA sense strand
cuaauccaguucacagaaa

SEQ ID NO: 2070184 - RNA, 19 nt, Homo sapiens
  misc_RNA (1)...(19): siRNA sense strand
uagauaaguuacggaauga

SEQ ID NO: 2070185 - RNA, 19 nt, Homo sapiens
  misc_RNA (1)...(19): siRNA sense strand
agagagaauucuacacuag

SEQ ID NO: 2070186 - RNA, 19 nt, Homo sapiens
  misc_RNA (1)...(19): siRNA sense strand
aaaaucagcuagugagaaa

SEQ ID NO: 2070187 - RNA, 19 nt, Homo sapiens
  misc_RNA (1)...(19): siRNA sense strand
gaaagacauuagcagaaaa

SEQ ID NO: 2070188 - RNA, 19 nt, Homo sapiens
  misc_RNA (1)...(19): siRNA sense strand
gagcauuacauacaucuuc

SEQ ID NO: 2070189 - RNA, 19 nt, Homo sapiens
  misc_RNA (1)...(19): siRNA sense strand
acuaggagauguucaguca

SEQ ID NO: 2070190 - RNA, 19 nt, Homo sapiens
  misc_RNA (1)...(19): siRNA sense strand
caagauguauugggaccuu

SEQ ID NO: 2070191 - RNA, 19 nt, Homo sapiens
  misc_RNA (1)...(19): siRNA sense strand
aaagaggcauuugauacaa

SEQ ID NO: 2070192 - RNA, 19 nt, Homo sapiens
  misc_RNA (1)...(19): siRNA sense strand
aagagagaauucuacacua

SEQ ID NO: 2070193 - RNA, 19 nt, Homo sapiens
  misc_RNA (1)...(19): siRNA sense strand
gaggagaguaaguauaaga

SEQ ID NO: 2070194 - RNA, 19 nt, Homo sapiens
  misc_RNA (1)...(19): siRNA sense strand
uggaaaugauguggagaua

SEQ ID NO: 2070195 - RNA, 19 nt, Homo sapiens
  misc_RNA (1)...(19): siRNA sense strand
guauugggaccuucuacua

SEQ ID NO: 2070196 - RNA, 19 nt, Homo sapiens
  misc_RNA (1)...(19): siRNA sense strand
gcaggcacagguucaauau

SEQ ID NO: 2070197 - RNA, 19 nt, Homo sapiens
  misc_RNA (1)...(19): siRNA sense strand
cagcagccuugacaaacaa

SEQ ID NO: 2070198 - RNA, 19 nt, Homo sapiens
  misc_RNA (1)...(19): siRNA sense strand
ucagcaauguacucaagaa

SEQ ID NO: 2070199 - RNA, 19 nt, Homo sapiens
  misc_RNA (1)...(19): siRNA sense strand
gaaaagggaagauagcauu

SEQ ID NO: 2070200 - RNA, 19 nt, Homo sapiens
  misc_RNA (1)...(19): siRNA sense strand
uagaaauccuccaucaaca

SEQ ID NO: 2070201 - RNA, 19 nt, Homo sapiens
  misc_RNA (1)...(19): siRNA sense strand
ugacaaacaagcauucuca

SEQ ID NO: 2070202 - RNA, 19 nt, Homo sapiens
  misc_RNA (1)...(19): siRNA sense strand
cagcagcuauuuuggauaa

SEQ ID NO: 2070203 - RNA, 19 nt, Homo sapiens
  misc_RNA (1)...(19): siRNA sense strand
gauaaguuacggaaugaau

SEQ ID NO: 2070204 - RNA, 19 nt, Homo sapiens
  misc_RNA (1)...(19): siRNA sense strand
acaauuagaagcuacaguu

SEQ ID NO: 2070205 - RNA, 19 nt, Homo sapiens
  misc_RNA (1)...(19): siRNA sense strand
gauacaauccaggaacaaa

SEQ ID NO: 2070206 - RNA, 19 nt, Homo sapiens
  misc_RNA (1)...(19): siRNA sense strand
uggguaaguugaaauugaa

SEQ ID NO: 2070207 - RNA, 19 nt, Homo sapiens
  misc_RNA (1)...(19): siRNA sense strand
caagaacaugccaaagaaa

SEQ ID NO: 2070208 - RNA, 19 nt, Homo sapiens
  misc_RNA (1)...(19): siRNA sense strand
gguaugcaaauuacaagaa

SEQ ID NO: 2070209 - RNA, 19 nt, Homo sapiens
  misc_RNA (1)...(19): siRNA sense strand
gagcaagagguaugcaaau

SEQ ID NO: 2070210 - RNA, 19 nt, Homo sapiens
  misc_RNA (1)...(19): siRNA sense strand
uggacagucucuucgaauu

SEQ ID NO: 2070211 - RNA, 19 nt, Homo sapiens
  misc_RNA (1)...(19): siRNA sense strand
agacuccacuauuagagaa

SEQ ID NO: 2070212 - RNA, 19 nt, Homo sapiens
  misc_RNA (1)...(19): siRNA sense strand
gaaugggcgucacauacag

SEQ ID NO: 2070213 - RNA, 19 nt, Homo sapiens
  misc_RNA (1)...(19): siRNA sense strand
guuaaucagcuacaaacaa

SEQ ID NO: 2070214 - RNA, 19 nt, Homo sapiens
  misc_RNA (1)...(19): siRNA sense strand
ggcaguuaccaaacaguua

SEQ ID NO: 2070215 - RNA, 19 nt, Homo sapiens
  misc_RNA (1)...(19): siRNA sense strand
agaagaaaauggugagaaa

SEQ ID NO: 2070216 - RNA, 19 nt, Homo sapiens
  misc_RNA (1)...(19): siRNA sense strand
gcacauuccagcagcaaca

SEQ ID NO: 2070217 - RNA, 19 nt, Homo sapiens
  misc_RNA (1)...(19): siRNA sense strand
cacagaaaggacuuaguua

SEQ ID NO: 2070218 - RNA, 19 nt, Homo sapiens
  misc_RNA (1)...(19): siRNA sense strand
acagaaaggacuuaguuau

SEQ ID NO: 2070219 - RNA, 19 nt, Homo sapiens
  misc_RNA (1)...(19): siRNA sense strand
ugaagaaagcaaacaacuu

SEQ ID NO: 2070220 - RNA, 19 nt, Homo sapiens
  misc_RNA (1)...(19): siRNA sense strand
uugcucaacugauaaggaa

SEQ ID NO: 2070221 - RNA, 19 nt, Homo sapiens
  misc_RNA (1)...(19): siRNA sense strand
acaaucagaaguggaauuu

SEQ ID NO: 2070222 - RNA, 19 nt, Homo sapiens
  misc_RNA (1)...(19): siRNA sense strand
gaaaugauguggagauaaa

SEQ ID NO: 2070223 - RNA, 19 nt, Homo sapiens
  misc_RNA (1)...(19): siRNA sense strand
ucagagagauggcacuuua

SEQ ID NO: 2070224 - RNA, 19 nt, Homo sapiens
  misc_RNA (1)...(19): siRNA sense strand
gaaguggaauuucuccuaa

SEQ ID NO: 2070225 - RNA, 19 nt, Homo sapiens
  misc_RNA (1)...(19): siRNA sense strand
cagaauaccuucccucauu

SEQ ID NO: 2070226 - RNA, 19 nt, Homo sapiens
  misc_RNA (1)...(19): siRNA sense strand
caaagaaauuccaagguuu

SEQ ID NO: 2070227 - RNA, 19 nt, Homo sapiens
  misc_RNA (1)...(19): siRNA sense strand
ccaaagaaauuccaagguu

SEQ ID NO: 2070228 - RNA, 19 nt, Homo sapiens
  misc_RNA (1)...(19): siRNA sense strand
gagaggagaguaaguauaa

SEQ ID NO: 2070229 - RNA, 19 nt, Homo sapiens
  misc_RNA (1)...(19): siRNA sense strand
gcaagagguaugcaaauua

SEQ ID NO: 2070230 - RNA, 19 nt, Homo sapiens
  misc_RNA (1)...(19): siRNA sense strand
caacuggacuuuacacgaa

SEQ ID NO: 2070231 - RNA, 19 nt, Homo sapiens
  misc_RNA (1)...(19): siRNA sense strand
gaacaggaaaucaaggaua

SEQ ID NO: 2070232 - RNA, 19 nt, Homo sapiens
  misc_RNA (1)...(19): siRNA sense strand
gaagauagcauuccuuuac

SEQ ID NO: 2070233 - RNA, 19 nt, Homo sapiens
  misc_RNA (1)...(19): siRNA sense strand
gccagaaccuauuuaguaa

SEQ ID NO: 2070234 - RNA, 19 nt, Homo sapiens
  misc_RNA (1)...(19): siRNA sense strand
cgaaagacauuagcagaaa

SEQ ID NO: 2070235 - RNA, 19 nt, Homo sapiens
  misc_RNA (1)...(19): siRNA sense strand
gaaagcaaacaacuucuaa

SEQ ID NO: 2070236 - RNA, 19 nt, Homo sapiens
  misc_RNA (1)...(19): siRNA sense strand
ucaagaacaugccaaagaa

SEQ ID NO: 2070237 - RNA, 19 nt, Homo sapiens
  misc_RNA (1)...(19): siRNA sense strand
ggacagucucuucgaauua

SEQ ID NO: 2070238 - RNA, 19 nt, Homo sapiens
  misc_RNA (1)...(19): siRNA sense strand
gaaggcaaaugaaauuauc

SEQ ID NO: 2070239 - RNA, 19 nt, Homo sapiens
  misc_RNA (1)...(19): siRNA sense strand
gagaguaaguauaagaaug

SEQ ID NO: 2070240 - RNA, 19 nt, Homo sapiens
  misc_RNA (1)...(19): siRNA sense strand
gauaaggaccagcuuguuu

SEQ ID NO: 2070241 - RNA, 19 nt, Homo sapiens
  misc_RNA (1)...(19): siRNA sense strand
gacagucucuucgaauuaa

SEQ ID NO: 2070242 - RNA, 19 nt, Homo sapiens
  misc_RNA (1)...(19): siRNA sense strand
aaacaagcauucucaggaa

SEQ ID NO: 2070243 - RNA, 19 nt, Homo sapiens
  misc_RNA (1)...(19): siRNA sense strand
ggaaaauggugaaaaugua

SEQ ID NO: 2070244 - RNA, 19 nt, Homo sapiens
  misc_RNA (1)...(19): siRNA sense strand
gaaauccuccaucaacaaa

SEQ ID NO: 2070245 - RNA, 19 nt, Homo sapiens
  misc_RNA (1)...(19): siRNA sense strand
agaaaggacuuaguuauuc

SEQ ID NO: 2070246 - RNA, 19 nt, Homo sapiens
  misc_RNA (1)...(19): siRNA sense strand
caagaacaauuagaagcua

SEQ ID NO: 2070247 - RNA, 19 nt, Homo sapiens
  misc_RNA (1)...(19): siRNA sense strand
uuacacaccucucacuaaa

SEQ ID NO: 2070248 - RNA, 19 nt, Homo sapiens
  misc_RNA (1)...(19): siRNA sense strand
ggauaacucaccugcauuu

SEQ ID NO: 2070249 - RNA, 19 nt, Homo sapiens
  misc_RNA (1)...(19): siRNA sense strand
gagaaagcaagauguauug

SEQ ID NO: 2070250 - RNA, 19 nt, Homo sapiens
  misc_RNA (1)...(19): siRNA sense strand
uaaaugugguagagacaaa

SEQ ID NO: 2070251 - RNA, 19 nt, Homo sapiens
  misc_RNA (1)...(19): siRNA sense strand
caagagguaugcaaauuac

SEQ ID NO: 2070252 - RNA, 19 nt, Homo sapiens
  misc_RNA (1)...(19): siRNA sense strand
gcaguuaccaaacaguuaa

SEQ ID NO: 2070253 - RNA, 19 nt, Homo sapiens
  misc_RNA (1)...(19): siRNA sense strand
cagaaaggacuuaguuauu

SEQ ID NO: 2070254 - RNA, 19 nt, Homo sapiens
  misc_RNA (1)...(19): siRNA sense strand
gaaugugguugaugguaga

SEQ ID NO: 2070255 - RNA, 19 nt, Homo sapiens
  misc_RNA (1)...(19): siRNA sense strand
gaacaugccaaagaaauuc

SEQ ID NO: 2070256 - RNA, 19 nt, Homo sapiens
  misc_RNA (1)...(19): siRNA sense strand
gaaaggacuuaguuauucg

SEQ ID NO: 2070257 - RNA, 19 nt, Homo sapiens
  misc_RNA (1)...(19): siRNA sense strand
ccaaauaccugaagaaaag

SEQ ID NO: 2070258 - RNA, 19 nt, Homo sapiens
  misc_RNA (1)...(19): siRNA sense strand
gaagagagaauucuacacu

SEQ ID NO: 2070259 - RNA, 19 nt, Homo sapiens
  misc_RNA (1)...(19): siRNA sense strand
uuagauaaguuacggaaug

SEQ ID NO: 2070260 - RNA, 19 nt, Homo sapiens
  misc_RNA (1)...(19): siRNA sense strand
ggagaggagaguaaguaua

SEQ ID NO: 2070261 - RNA, 19 nt, Homo sapiens
  misc_RNA (1)...(19): siRNA sense strand
ggacucagccagaaccuau

SEQ ID NO: 2070262 - RNA, 19 nt, Homo sapiens
  misc_RNA (1)...(19): siRNA sense strand
aacaggaaaucaaggauaa

SEQ ID NO: 2070263 - RNA, 19 nt, Homo sapiens
  misc_RNA (1)...(19): siRNA sense strand
gaggagaggagaguaagua

SEQ ID NO: 2070264 - RNA, 19 nt, Homo sapiens
  misc_RNA (1)...(19): siRNA sense strand
ucacgugguuaaauaaaga

SEQ ID NO: 2070265 - RNA, 19 nt, Homo sapiens
  misc_RNA (1)...(19): siRNA sense strand
cuucuuagcuuucccacaa

SEQ ID NO: 2070266 - RNA, 19 nt, Homo sapiens
  misc_RNA (1)...(19): siRNA sense strand
uaccuucccucauucgaua

SEQ ID NO: 2070267 - RNA, 19 nt, Homo sapiens
  misc_RNA (1)...(19): siRNA sense strand
gcaggcuguuugaaaugua

SEQ ID NO: 2070268 - RNA, 19 nt, Homo sapiens
  misc_RNA (1)...(19): siRNA sense strand
ggaauuacaagauguugga

SEQ ID NO: 2070269 - RNA, 19 nt, Homo sapiens
  misc_RNA (1)...(19): siRNA sense strand
gaauuucuccuaaccugaa

SEQ ID NO: 2070270 - RNA, 19 nt, Homo sapiens
  misc_RNA (1)...(19): siRNA sense strand
ucacagaaaggacuuaguu

SEQ ID NO: 2070271 - RNA, 19 nt, Homo sapiens
  misc_RNA (1)...(19): siRNA sense strand
caauuagaagcuacaguua

SEQ ID NO: 2070272 - RNA, 19 nt, Homo sapiens
  misc_RNA (1)...(19): siRNA sense strand
caaaaggaauuacaagaug

SEQ ID NO: 2070273 - RNA, 19 nt, Homo sapiens
  misc_RNA (1)...(19): siRNA sense strand
aggcacagguucaauauca

SEQ ID NO: 2070274 - RNA, 19 nt, Homo sapiens
  misc_RNA (1)...(19): siRNA sense strand
uagaagcggcuaauaaaga

SEQ ID NO: 2070275 - RNA, 19 nt, Homo sapiens
  misc_RNA (1)...(19): siRNA sense strand
ggaaaugauguggagauaa

SEQ ID NO: 2070276 - RNA, 19 nt, Homo sapiens
  misc_RNA (1)...(19): siRNA sense strand
ugagaaagcaagauguauu

SEQ ID NO: 2070277 - RNA, 19 nt, Homo sapiens
  misc_RNA (1)...(19): siRNA sense strand
cuaagcaacuggacuuuac

SEQ ID NO: 2070278 - RNA, 19 nt, Homo sapiens
  misc_RNA (1)...(19): siRNA sense strand
cuauuucccugggcaguua

SEQ ID NO: 2070279 - RNA, 19 nt, Homo sapiens
  misc_RNA (1)...(19): siRNA sense strand
uuacauacaucuuccaaac

SEQ ID NO: 2070280 - RNA, 19 nt, Homo sapiens
  misc_RNA (1)...(19): siRNA sense strand
agccagaaccuauuuagua

SEQ ID NO: 2070281 - RNA, 19 nt, Homo sapiens
  misc_RNA (1)...(19): siRNA sense strand
gaauccaaauaccugaaga

SEQ ID NO: 2070282 - RNA, 19 nt, Homo sapiens
  misc_RNA (1)...(19): siRNA sense strand
gcacguuaaucagcuacaa

SEQ ID NO: 2070283 - RNA, 19 nt, Homo sapiens
  misc_RNA (1)...(19): siRNA sense strand
cuaauccaguucacagaaa

SEQ ID NO: 2070284 - RNA, 19 nt, Homo sapiens
  misc_RNA (1)...(19): siRNA sense strand
uagauaaguuacggaauga

SEQ ID NO: 2070285 - RNA, 19 nt, Homo sapiens
  misc_RNA (1)...(19): siRNA sense strand
agagagaauucuacacuag

SEQ ID NO: 2070286 - RNA, 19 nt, Homo sapiens
  misc_RNA (1)...(19): siRNA sense strand
aaaaucagcuagugagaaa

SEQ ID NO: 2070287 - RNA, 19 nt, Homo sapiens
  misc_RNA (1)...(19): siRNA sense strand
gaaagacauuagcagaaaa

SEQ ID NO: 2070288 - RNA, 19 nt, Homo sapiens
  misc_RNA (1)...(19): siRNA sense strand
gagcauuacauacaucuuc

SEQ ID NO: 2070289 - RNA, 19 nt, Homo sapiens
  misc_RNA (1)...(19): siRNA sense strand
acuaggagauguucaguca

SEQ ID NO: 2070290 - RNA, 19 nt, Homo sapiens
  misc_RNA (1)...(19): siRNA sense strand
caagauguauugggaccuu

SEQ ID NO: 2070291 - RNA, 19 nt, Homo sapiens
  misc_RNA (1)...(19): siRNA sense strand
aaagaggcauuugauacaa

SEQ ID NO: 2070292 - RNA, 19 nt, Homo sapiens
  misc_RNA (1)...(19): siRNA sense strand
aagagagaauucuacacua

SEQ ID NO: 2070293 - RNA, 19 nt, Homo sapiens
  misc_RNA (1)...(19): siRNA sense strand
gaggagaguaaguauaaga

SEQ ID NO: 2070294 - RNA, 19 nt, Homo sapiens
  misc_RNA (1)...(19): siRNA sense strand
uggaaaugauguggagaua

SEQ ID NO: 2070295 - RNA, 19 nt, Homo sapiens
  misc_RNA (1)...(19): siRNA sense strand
guauugggaccuucuacua

SEQ ID NO: 2070296 - RNA, 19 nt, Homo sapiens
  misc_RNA (1)...(19): siRNA sense strand
gcaggcacagguucaauau

SEQ ID NO: 2070297 - RNA, 19 nt, Homo sapiens
  misc_RNA (1)...(19): siRNA sense strand
cagcagccuugacaaacaa

SEQ ID NO: 2070298 - RNA, 19 nt, Homo sapiens
  misc_RNA (1)...(19): siRNA sense strand
ucagcaauguacucaagaa

SEQ ID NO: 2070299 - RNA, 19 nt, Homo sapiens
  misc_RNA (1)...(19): siRNA sense strand
gaaaagggaagauagcauu

SEQ ID NO: 2070300 - RNA, 19 nt, Homo sapiens
  misc_RNA (1)...(19): siRNA sense strand
uagaaauccuccaucaaca

SEQ ID NO: 2070301 - RNA, 19 nt, Homo sapiens
  misc_RNA (1)...(19): siRNA sense strand
ugacaaacaagcauucuca

SEQ ID NO: 2070302 - RNA, 19 nt, Homo sapiens
  misc_RNA (1)...(19): siRNA sense strand
cagcagcuauuuuggauaa

SEQ ID NO: 2070303 - RNA, 19 nt, Homo sapiens
  misc_RNA (1)...(19): siRNA sense strand
gauaaguuacggaaugaau

SEQ ID NO: 2070304 - RNA, 19 nt, Homo sapiens
  misc_RNA (1)...(19): siRNA sense strand
acaauuagaagcuacaguu

SEQ ID NO: 2070305 - RNA, 19 nt, Homo sapiens
  misc_RNA (1)...(19): siRNA sense strand
gauacaauccaggaacaaa

SEQ ID NO: 2070306 - RNA, 19 nt, Homo sapiens
  misc_RNA (1)...(19): siRNA sense strand
uggguaaguugaaauugaa

SEQ ID NO: 2070307 - RNA, 19 nt, Homo sapiens
  misc_RNA (1)...(19): siRNA sense strand
caagaacaugccaaagaaa

SEQ ID NO: 2070308 - RNA, 19 nt, Homo sapiens
  misc_RNA (1)...(19): siRNA sense strand
gguaugcaaauuacaagaa

SEQ ID NO: 2070309 - RNA, 19 nt, Homo sapiens
  misc_RNA (1)...(19): siRNA sense strand
gagcaagagguaugcaaau

SEQ ID NO: 2070310 - RNA, 19 nt, Homo sapiens
  misc_RNA (1)...(19): siRNA sense strand
uggacagucucuucgaauu

SEQ ID NO: 2070311 - RNA, 19 nt, Homo sapiens
  misc_RNA (1)...(19): siRNA sense strand
agacuccacuauuagagaa

SEQ ID NO: 2070312 - RNA, 19 nt, Homo sapiens
  misc_RNA (1)...(19): siRNA sense strand
gaaugggcgucacauacag

SEQ ID NO: 2070313 - RNA, 19 nt, Homo sapiens
  misc_RNA (1)...(19): siRNA sense strand
guuaaucagcuacaaacaa

SEQ ID NO: 2070314 - RNA, 19 nt, Homo sapiens
  misc_RNA (1)...(19): siRNA sense strand
ggcaguuaccaaacaguua

SEQ ID NO: 2070315 - RNA, 19 nt, Homo sapiens
  misc_RNA (1)...(19): siRNA sense strand
agaagaaaauggugagaaa

SEQ ID NO: 2070316 - RNA, 19 nt, Homo sapiens
  misc_RNA (1)...(19): siRNA sense strand
gcacauuccagcagcaaca

SEQ ID NO: 2070317 - RNA, 19 nt, Homo sapiens
  misc_RNA (1)...(19): siRNA sense strand
cacagaaaggacuuaguua

SEQ ID NO: 2070318 - RNA, 19 nt, Homo sapiens
  misc_RNA (1)...(19): siRNA sense strand
acagaaaggacuuaguuau

SEQ ID NO: 2070319 - RNA, 19 nt, Homo sapiens
  misc_RNA (1)...(19): siRNA sense strand
ugaagaaagcaaacaacuu

SEQ ID NO: 2070320 - RNA, 19 nt, Homo sapiens
  misc_RNA (1)...(19): siRNA sense strand
uugcucaacugauaaggaa

SEQ ID NO: 2070321 - RNA, 19 nt, Homo sapiens
  misc_RNA (1)...(19): siRNA sense strand
acaaucagaaguggaauuu

SEQ ID NO: 2070322 - RNA, 19 nt, Homo sapiens
  misc_RNA (1)...(19): siRNA sense strand
gaaagacacuuaugaccaa

SEQ ID NO: 2070323 - RNA, 19 nt, Homo sapiens
  misc_RNA (1)...(19): siRNA sense strand
ucagagagauuuccaauau

SEQ ID NO: 2070324 - RNA, 19 nt, Homo sapiens
  misc_RNA (1)...(19): siRNA sense strand
caaaacagaugcuaaguua

SEQ ID NO: 2070325 - RNA, 19 nt, Homo sapiens
  misc_RNA (1)...(19): siRNA sense strand
gagccaagguguauuauuc

SEQ ID NO: 2070326 - RNA, 19 nt, Homo sapiens
  misc_RNA (1)...(19): siRNA sense strand
ugaaagggcugaaggcaaa

SEQ ID NO: 2070327 - RNA, 19 nt, Homo sapiens
  misc_RNA (1)...(19): siRNA sense strand
caaaucaauugcagacuuu

SEQ ID NO: 2070328 - RNA, 19 nt, Homo sapiens
  misc_RNA (1)...(19): siRNA sense strand
gaacuaaccauguugucua

SEQ ID NO: 2070329 - RNA, 19 nt, Homo sapiens
  misc_RNA (1)...(19): siRNA sense strand
ggacauacaaccuuccuuu

SEQ ID NO: 2070330 - RNA, 19 nt, Homo sapiens
  misc_RNA (1)...(19): siRNA sense strand
ccuaauggcugaugaaauc

SEQ ID NO: 2070331 - RNA, 19 nt, Homo sapiens
  misc_RNA (1)...(19): siRNA sense strand
gaacaugucccagucuauu

SEQ ID NO: 2070332 - RNA, 19 nt, Homo sapiens
  misc_RNA (1)...(19): siRNA sense strand
gaucgaaagacacuuauga

SEQ ID NO: 2070333 - RNA, 19 nt, Homo sapiens
  misc_RNA (1)...(19): siRNA sense strand
gaugaucgaaagacacuua

SEQ ID NO: 2070334 - RNA, 19 nt, Homo sapiens
  misc_RNA (1)...(19): siRNA sense strand
agacagaggaugacacaua

SEQ ID NO: 2070335 - RNA, 19 nt, Homo sapiens
  misc_RNA (1)...(19): siRNA sense strand
caagguguauuauuccuau

SEQ ID NO: 2070336 - RNA, 19 nt, Homo sapiens
  misc_RNA (1)...(19): siRNA sense strand
uacaauggcucacucuauu

SEQ ID NO: 2070337 - RNA, 19 nt, Homo sapiens
  misc_RNA (1)...(19): siRNA sense strand
ggaggaaauuggugccuau

SEQ ID NO: 2070338 - RNA, 19 nt, Homo sapiens
  misc_RNA (1)...(19): siRNA sense strand
ucugguacauggacaguua

SEQ ID NO: 2070339 - RNA, 19 nt, Homo sapiens
  misc_RNA (1)...(19): siRNA sense strand
gauugaagaugaucgaaag

SEQ ID NO: 2070340 - RNA, 19 nt, Homo sapiens
  misc_RNA (1)...(19): siRNA sense strand
gugcugagcuuggaaacaa

SEQ ID NO: 2070341 - RNA, 19 nt, Homo sapiens
  misc_RNA (1)...(19): siRNA sense strand
gacagaggaugacacauag

SEQ ID NO: 2070342 - RNA, 19 nt, Homo sapiens
  misc_RNA (1)...(19): siRNA sense strand
agagagauuuccaauaugu

SEQ ID NO: 2070343 - RNA, 19 nt, Homo sapiens
  misc_RNA (1)...(19): siRNA sense strand
cauacaaccuuccuuucaa

SEQ ID NO: 2070344 - RNA, 19 nt, Homo sapiens
  misc_RNA (1)...(19): siRNA sense strand
gcuaacauguggcaaacug

SEQ ID NO: 2070345 - RNA, 19 nt, Homo sapiens
  misc_RNA (1)...(19): siRNA sense strand
gaaacaagacuucgugacu

SEQ ID NO: 2070346 - RNA, 19 nt, Homo sapiens
  misc_RNA (1)...(19): siRNA sense strand
aaauacagcuuugauaugg

SEQ ID NO: 2070347 - RNA, 19 nt, Homo sapiens
  misc_RNA (1)...(19): siRNA sense strand
ggcaggaacuaaccauguu

SEQ ID NO: 2070348 - RNA, 19 nt, Homo sapiens
  misc_RNA (1)...(19): siRNA sense strand
acaaaucaauugcagacuu

SEQ ID NO: 2070349 - RNA, 19 nt, Homo sapiens
  misc_RNA (1)...(19): siRNA sense strand
uggacgagcuccugccuuu

SEQ ID NO: 2070350 - RNA, 19 nt, Homo sapiens
  misc_RNA (1)...(19): siRNA sense strand
ggaaauuggugccuaugac

SEQ ID NO: 2070351 - RNA, 19 nt, Homo sapiens
  misc_RNA (1)...(19): siRNA sense strand
cagaacaugucccagucua

SEQ ID NO: 2070352 - RNA, 19 nt, Homo sapiens
  misc_RNA (1)...(19): siRNA sense strand
caacgaagccuggaguaug

SEQ ID NO: 2070353 - RNA, 19 nt, Homo sapiens
  misc_RNA (1)...(19): siRNA sense strand
gacagacccuuuagcaucu

SEQ ID NO: 2070354 - RNA, 19 nt, Homo sapiens
  misc_RNA (1)...(19): siRNA sense strand
ccacauaugaguacacaga

SEQ ID NO: 2070355 - RNA, 19 nt, Homo sapiens
  misc_RNA (1)...(19): siRNA sense strand
ccagucuauugaagucuua

SEQ ID NO: 2070356 - RNA, 19 nt, Homo sapiens
  misc_RNA (1)...(19): siRNA sense strand
gaggaaauaaggaaucugu

SEQ ID NO: 2070357 - RNA, 19 nt, Homo sapiens
  misc_RNA (1)...(19): siRNA sense strand
ucagccaacuuaaccaaga

SEQ ID NO: 2070358 - RNA, 19 nt, Homo sapiens
  misc_RNA (1)...(19): siRNA sense strand
ggaaauaaggaaucugucu

SEQ ID NO: 2070359 - RNA, 19 nt, Homo sapiens
  misc_RNA (1)...(19): siRNA sense strand
guaugcaacuaaccagaau

SEQ ID NO: 2070360 - RNA, 19 nt, Homo sapiens
  misc_RNA (1)...(19): siRNA sense strand
ugacuacaaugcaagagau

SEQ ID NO: 2070361 - RNA, 19 nt, Homo sapiens
  misc_RNA (1)...(19): siRNA sense strand
ugaagaugaucgaaagaca

SEQ ID NO: 2070362 - RNA, 19 nt, Homo sapiens
  misc_RNA (1)...(19): siRNA sense strand
ccagaaugcaggcaauauu

SEQ ID NO: 2070363 - RNA, 19 nt, Homo sapiens
  misc_RNA (1)...(19): siRNA sense strand
gacgagcuccugccuuuga

SEQ ID NO: 2070364 - RNA, 19 nt, Homo sapiens
  misc_RNA (1)...(19): siRNA sense strand
aauggaaacccaaaugaaa

SEQ ID NO: 2070365 - RNA, 19 nt, Homo sapiens
  misc_RNA (1)...(19): siRNA sense strand
uauccaugcuugacuacaa

SEQ ID NO: 2070366 - RNA, 19 nt, Homo sapiens
  misc_RNA (1)...(19): siRNA sense strand
acauauccaugcuugacua

SEQ ID NO: 2070367 - RNA, 19 nt, Homo sapiens
  misc_RNA (1)...(19): siRNA sense strand
cagaaugcaggcaauauug

SEQ ID NO: 2070368 - RNA, 19 nt, Homo sapiens
  misc_RNA (1)...(19): siRNA sense strand
gaugacagacccuuuagca

SEQ ID NO: 2070369 - RNA, 19 nt, Homo sapiens
  misc_RNA (1)...(19): siRNA sense strand
cagagagauuuccaauaug

SEQ ID NO: 2070370 - RNA, 19 nt, Homo sapiens
  misc_RNA (1)...(19): siRNA sense strand
uaacuggagccaaggugua

SEQ ID NO: 2070371 - RNA, 19 nt, Homo sapiens
  misc_RNA (1)...(19): siRNA sense strand
caucaucaaauacagcuuu

SEQ ID NO: 2070372 - RNA, 19 nt, Homo sapiens
  misc_RNA (1)...(19): siRNA sense strand
gcaggggaaucuuucauga

SEQ ID NO: 2070373 - RNA, 19 nt, Homo sapiens
  misc_RNA (1)...(19): siRNA sense strand
gggaaucuuucaugaucug

SEQ ID NO: 2070374 - RNA, 19 nt, Homo sapiens
  misc_RNA (1)...(19): siRNA sense strand
gaaaaucacaggcccaguu

SEQ ID NO: 2070375 - RNA, 19 nt, Homo sapiens
  misc_RNA (1)...(19): siRNA sense strand
gucaccaacucccacuuaa

SEQ ID NO: 2070376 - RNA, 19 nt, Homo sapiens
  misc_RNA (1)...(19): siRNA sense strand
uaaccagaaugcaggcaau

SEQ ID NO: 2070377 - RNA, 19 nt, Homo sapiens
  misc_RNA (1)...(19): siRNA sense strand
gagagugcuugcccaacga

SEQ ID NO: 2070378 - RNA, 19 nt, Homo sapiens
  misc_RNA (1)...(19): siRNA sense strand
cuaaguuaaucacccaguu

SEQ ID NO: 2070379 - RNA, 19 nt, Homo sapiens
  misc_RNA (1)...(19): siRNA sense strand
acacagacauucccuucca

SEQ ID NO: 2070380 - RNA, 19 nt, Homo sapiens
  misc_RNA (1)...(19): siRNA sense strand
gauuagauccuuccaagac

SEQ ID NO: 2070381 - RNA, 19 nt, Homo sapiens
  misc_RNA (1)...(19): siRNA sense strand
aaagagugcugagcuugga

SEQ ID NO: 2070382 - RNA, 19 nt, Homo sapiens
  misc_RNA (1)...(19): siRNA sense strand
caagacagaggaugacaca

SEQ ID NO: 2070383 - RNA, 19 nt, Homo sapiens
  misc_RNA (1)...(19): siRNA sense strand
ucaaggaggaaauaaggaa

SEQ ID NO: 2070384 - RNA, 19 nt, Homo sapiens
  misc_RNA (1)...(19): siRNA sense strand
caggugcuguucaauguca

SEQ ID NO: 2070385 - RNA, 19 nt, Homo sapiens
  misc_RNA (1)...(19): siRNA sense strand
cuacaauggcucacucuau

SEQ ID NO: 2070386 - RNA, 19 nt, Homo sapiens
  misc_RNA (1)...(19): siRNA sense strand
gaaauuggugccuaugacu

SEQ ID NO: 2070387 - RNA, 19 nt, Homo sapiens
  misc_RNA (1)...(19): siRNA sense strand
gacauucccuuccauaacc

SEQ ID NO: 2070388 - RNA, 19 nt, Homo sapiens
  misc_RNA (1)...(19): siRNA sense strand
caggcaacuucgccaacua

SEQ ID NO: 2070389 - RNA, 19 nt, Homo sapiens
  misc_RNA (1)...(19): siRNA sense strand
gggcaggaacuaaccaugu

SEQ ID NO: 2070390 - RNA, 19 nt, Homo sapiens
  misc_RNA (1)...(19): siRNA sense strand
ggaacccgauuuggugcuu

SEQ ID NO: 2070391 - RNA, 19 nt, Homo sapiens
  misc_RNA (1)...(19): siRNA sense strand
gcaggcaacuucgccaacu

SEQ ID NO: 2070392 - RNA, 19 nt, Homo sapiens
  misc_RNA (1)...(19): siRNA sense strand
ccugaugggcggugcauuu

SEQ ID NO: 2070393 - RNA, 19 nt, Homo sapiens
  misc_RNA (1)...(19): siRNA sense strand
cauaaccaauacuuucaca

SEQ ID NO: 2070394 - RNA, 19 nt, Homo sapiens
  misc_RNA (1)...(19): siRNA sense strand
guacauggacaguuauacu

SEQ ID NO: 2070395 - RNA, 19 nt, Homo sapiens
  misc_RNA (1)...(19): siRNA sense strand
ccaauacuuucacauaucc

SEQ ID NO: 2070396 - RNA, 19 nt, Homo sapiens
  misc_RNA (1)...(19): siRNA sense strand
ggagccaagguguauuauu

SEQ ID NO: 2070397 - RNA, 19 nt, Homo sapiens
  misc_RNA (1)...(19): siRNA sense strand
ugucaccaacucccacuua

SEQ ID NO: 2070398 - RNA, 19 nt, Homo sapiens
  misc_RNA (1)...(19): siRNA sense strand
guucgugaauacaaaucaa

SEQ ID NO: 2070399 - RNA, 19 nt, Homo sapiens
  misc_RNA (1)...(19): siRNA sense strand
aaauggaaacccaaaugaa

SEQ ID NO: 2070400 - RNA, 19 nt, Homo sapiens
  misc_RNA (1)...(19): siRNA sense strand
cagacauucccuuccauaa

SEQ ID NO: 2070401 - RNA, 19 nt, Homo sapiens
  misc_RNA (1)...(19): siRNA sense strand
ucucugacaucgaccuaau

SEQ ID NO: 2070402 - RNA, 19 nt, Homo sapiens
  misc_RNA (1)...(19): siRNA sense strand
gcaggaacuaaccauguug

SEQ ID NO: 2070403 - RNA, 19 nt, Homo sapiens
  misc_RNA (1)...(19): siRNA sense strand
aaagcuaacauguggcaaa

SEQ ID NO: 2070404 - RNA, 19 nt, Homo sapiens
  misc_RNA (1)...(19): siRNA sense strand
ccaguucaaggaggaaaua

SEQ ID NO: 2070405 - RNA, 19 nt, Homo sapiens
  misc_RNA (1)...(19): siRNA sense strand
gaacucagagagauuucca

SEQ ID NO: 2070406 - RNA, 19 nt, Homo sapiens
  misc_RNA (1)...(19): siRNA sense strand
gucuuuguuugccggauua

SEQ ID NO: 2070407 - RNA, 19 nt, Homo sapiens
  misc_RNA (1)...(19): siRNA sense strand
acacuuaugaccaagcauu

SEQ ID NO: 2070408 - RNA, 19 nt, Homo sapiens
  misc_RNA (1)...(19): siRNA sense strand
acauggacaguuauacuaa

SEQ ID NO: 2070409 - RNA, 19 nt, Homo sapiens
  misc_RNA (1)...(19): siRNA sense strand
uacauggacaguuauacua

SEQ ID NO: 2070410 - RNA, 19 nt, Homo sapiens
  misc_RNA (1)...(19): siRNA sense strand
gcagauugaagaugaucga

SEQ ID NO: 2070411 - RNA, 19 nt, Homo sapiens
  misc_RNA (1)...(19): siRNA sense strand
gaaugcaggcaauauuguc

SEQ ID NO: 2070412 - RNA, 19 nt, Homo sapiens
  misc_RNA (1)...(19): siRNA sense strand
gcugugggcuguguaugca

SEQ ID NO: 2070413 - RNA, 19 nt, Homo sapiens
  misc_RNA (1)...(19): siRNA sense strand
gaccuaauggcugaugaaa

SEQ ID NO: 2070414 - RNA, 19 nt, Homo sapiens
  misc_RNA (1)...(19): siRNA sense strand
acaauggcucacucuauuu

SEQ ID NO: 2070415 - RNA, 19 nt, Homo sapiens
  misc_RNA (1)...(19): siRNA sense strand
ggaacuaaccauguugucu

SEQ ID NO: 2070416 - RNA, 19 nt, Homo sapiens
  misc_RNA (1)...(19): siRNA sense strand
ucaagugggcaggaacuaa

SEQ ID NO: 2070417 - RNA, 19 nt, Homo sapiens
  misc_RNA (1)...(19): siRNA sense strand
acagacauucccuuccaua

SEQ ID NO: 2070418 - RNA, 19 nt, Homo sapiens
  misc_RNA (1)...(19): siRNA sense strand
gagagauuuccaauauguu

SEQ ID NO: 2070419 - RNA, 19 nt, Homo sapiens
  misc_RNA (1)...(19): siRNA sense strand
aaaccuccacauaugagua

SEQ ID NO: 2070420 - RNA, 19 nt, Homo sapiens
  misc_RNA (1)...(19): siRNA sense strand
cuggagccaagguguauua

SEQ ID NO: 2070421 - RNA, 19 nt, Homo sapiens
  misc_RNA (1)...(19): siRNA sense strand
ucagaguaauaucaucauc

SEQ ID NO: 2070422 - RNA, 19 nt, Homo sapiens
  misc_RNA (1)...(19): siRNA sense strand
ggagacuguugcuauauaa

SEQ ID NO: 2070423 - RNA, 19 nt, Homo sapiens
  misc_RNA (1)...(19): siRNA sense strand
gcgccgaacuguccgauuu

SEQ ID NO: 2070424 - RNA, 19 nt, Homo sapiens
  misc_RNA (1)...(19): siRNA sense strand
gaucagcauuccucgagua

SEQ ID NO: 2070425 - RNA, 19 nt, Homo sapiens
  misc_RNA (1)...(19): siRNA sense strand
uguaaaugcuggacaagua

SEQ ID NO: 2070426 - RNA, 19 nt, Homo sapiens
  misc_RNA (1)...(19): siRNA sense strand
uggaauaucuauagcagua

SEQ ID NO: 2070427 - RNA, 19 nt, Homo sapiens
  misc_RNA (1)...(19): siRNA sense strand
caacagaguagcagaauau

SEQ ID NO: 2070428 - RNA, 19 nt, Homo sapiens
  misc_RNA (1)...(19): siRNA sense strand
gaaacacucuauaucgaau

SEQ ID NO: 2070429 - RNA, 19 nt, Homo sapiens
  misc_RNA (1)...(19): siRNA sense strand
ggacaauauucgagauuau

SEQ ID NO: 2070430 - RNA, 19 nt, Homo sapiens
  misc_RNA (1)...(19): siRNA sense strand
gggacaauauucgagauua

SEQ ID NO: 2070431 - RNA, 19 nt, Homo sapiens
  misc_RNA (1)...(19): siRNA sense strand
gcacagaugccaaugauca

SEQ ID NO: 2070432 - RNA, 19 nt, Homo sapiens
  misc_RNA (1)...(19): siRNA sense strand
uggagaaacugcugucuuu

SEQ ID NO: 2070433 - RNA, 19 nt, Homo sapiens
  misc_RNA (1)...(19): siRNA sense strand
gagcauauacacauggaua

SEQ ID NO: 2070434 - RNA, 19 nt, Homo sapiens
  misc_RNA (1)...(19): siRNA sense strand
cuauguaucugaccaugua

SEQ ID NO: 2070435 - RNA, 19 nt, Homo sapiens
  misc_RNA (1)...(19): siRNA sense strand
caacccagaucucaucaug

SEQ ID NO: 2070436 - RNA, 19 nt, Homo sapiens
  misc_RNA (1)...(19): siRNA sense strand
cagcauuccucgaguagaa

SEQ ID NO: 2070437 - RNA, 19 nt, Homo sapiens
  misc_RNA (1)...(19): siRNA sense strand
uaaagaagcaaaucgcaaa

SEQ ID NO: 2070438 - RNA, 19 nt, Homo sapiens
  misc_RNA (1)...(19): siRNA sense strand
cgaaaucauuggucagaug

SEQ ID NO: 2070439 - RNA, 19 nt, Homo sapiens
  misc_RNA (1)...(19): siRNA sense strand
cgacagcgccuaccgcaaa

SEQ ID NO: 2070440 - RNA, 19 nt, Homo sapiens
  misc_RNA (1)...(19): siRNA sense strand
aaucauuggucagauguua

SEQ ID NO: 2070441 - RNA, 19 nt, Homo sapiens
  misc_RNA (1)...(19): siRNA sense strand
caaagaagcagcucucagu

SEQ ID NO: 2070442 - RNA, 19 nt, Homo sapiens
  misc_RNA (1)...(19): siRNA sense strand
gcaagugaaugcguuaaag

SEQ ID NO: 2070443 - RNA, 19 nt, Homo sapiens
  misc_RNA (1)...(19): siRNA sense strand
gaagcaagugaaugcguua

SEQ ID NO: 2070444 - RNA, 19 nt, Homo sapiens
  misc_RNA (1)...(19): siRNA sense strand
cagaauaucgaaaucauug

SEQ ID NO: 2070445 - RNA, 19 nt, Homo sapiens
  misc_RNA (1)...(19): siRNA sense strand
uggagacuguugcuauaua

SEQ ID NO: 2070446 - RNA, 19 nt, Homo sapiens
  misc_RNA (1)...(19): siRNA sense strand
ggacaaguagucacaggaa

SEQ ID NO: 2070447 - RNA, 19 nt, Homo sapiens
  misc_RNA (1)...(19): siRNA sense strand
ucaacagaguagcagaaua

SEQ ID NO: 2070448 - RNA, 19 nt, Homo sapiens
  misc_RNA (1)...(19): siRNA sense strand
gacaaguagucacaggaaa

SEQ ID NO: 2070449 - RNA, 19 nt, Homo sapiens
  misc_RNA (1)...(19): siRNA sense strand
uaagaagugugauguucau

SEQ ID NO: 2070450 - RNA, 19 nt, Homo sapiens
  misc_RNA (1)...(19): siRNA sense strand
caacuagccacaagggauu

SEQ ID NO: 2070451 - RNA, 19 nt, Homo sapiens
  misc_RNA (1)...(19): siRNA sense strand
gaagugugauguucaugac

SEQ ID NO: 2070452 - RNA, 19 nt, Homo sapiens
  misc_RNA (1)...(19): siRNA sense strand
gaacgugcagggcuucuuc

SEQ ID NO: 2070453 - RNA, 19 nt, Homo sapiens
  misc_RNA (1)...(19): siRNA sense strand
gaaugaagcaagugaaugc

SEQ ID NO: 2070454 - RNA, 19 nt, Homo sapiens
  misc_RNA (1)...(19): siRNA sense strand
gaaaucauuggucagaugu

SEQ ID NO: 2070455 - RNA, 19 nt, Homo sapiens
  misc_RNA (1)...(19): siRNA sense strand
gcagaauaucgaaaucauu

SEQ ID NO: 2070456 - RNA, 19 nt, Homo sapiens
  misc_RNA (1)...(19): siRNA sense strand
guucuaugcuugggcuuaa

SEQ ID NO: 2070457 - RNA, 19 nt, Homo sapiens
  misc_RNA (1)...(19): siRNA sense strand
guacaucaccaacacaauc

SEQ ID NO: 2070458 - RNA, 19 nt, Homo sapiens
  misc_RNA (1)...(19): siRNA sense strand
cgaacuguccgauuucuug

SEQ ID NO: 2070459 - RNA, 19 nt, Homo sapiens
  misc_RNA (1)...(19): siRNA sense strand
agaagcaaaucgcaaaaua

SEQ ID NO: 2070460 - RNA, 19 nt, Homo sapiens
  misc_RNA (1)...(19): siRNA sense strand
caagugaaugcguuaaaga

SEQ ID NO: 2070461 - RNA, 19 nt, Homo sapiens
  misc_RNA (1)...(19): siRNA sense strand
gaagcaaaucgcaaaauaa

SEQ ID NO: 2070462 - RNA, 19 nt, Homo sapiens
  misc_RNA (1)...(19): siRNA sense strand
acuggagacuguugcuaua

SEQ ID NO: 2070463 - RNA, 19 nt, Homo sapiens
  misc_RNA (1)...(19): siRNA sense strand
gaugucagcaguauacaca

SEQ ID NO: 2070464 - RNA, 19 nt, Homo sapiens
  misc_RNA (1)...(19): siRNA sense strand
gcagcaugcucuauuucca

SEQ ID NO: 2070465 - RNA, 19 nt, Homo sapiens
  misc_RNA (1)...(19): siRNA sense strand
ugaaacacucuauaucgaa

SEQ ID NO: 2070466 - RNA, 19 nt, Homo sapiens
  misc_RNA (1)...(19): siRNA sense strand
cugaaacacucuauaucga

SEQ ID NO: 2070467 - RNA, 19 nt, Homo sapiens
  misc_RNA (1)...(19): siRNA sense strand
ucauuggucagauguuaua

SEQ ID NO: 2070468 - RNA, 19 nt, Homo sapiens
  misc_RNA (1)...(19): siRNA sense strand
auacagcacuuggauguca

SEQ ID NO: 2070469 - RNA, 19 nt, Homo sapiens
  misc_RNA (1)...(19): siRNA sense strand
uccgauuucuuggaauuua

SEQ ID NO: 2070470 - RNA, 19 nt, Homo sapiens
  misc_RNA (1)...(19): siRNA sense strand
gugcugaaacacucuauau

SEQ ID NO: 2070471 - RNA, 19 nt, Homo sapiens
  misc_RNA (1)...(19): siRNA sense strand
uagauccuauuaagaagug

SEQ ID NO: 2070472 - RNA, 19 nt, Homo sapiens
  misc_RNA (1)...(19): siRNA sense strand
gcaaaucgcaaaauaaaca

SEQ ID NO: 2070473 - RNA, 19 nt, Homo sapiens
  misc_RNA (1)...(19): siRNA sense strand
cagaguagcagaauaucga

SEQ ID NO: 2070474 - RNA, 19 nt, Homo sapiens
  misc_RNA (1)...(19): siRNA sense strand
uaucugaccauguacauca

SEQ ID NO: 2070475 - RNA, 19 nt, Homo sapiens
  misc_RNA (1)...(19): siRNA sense strand
gauuaugacauccaccuau

SEQ ID NO: 2070476 - RNA, 19 nt, Homo sapiens
  misc_RNA (1)...(19): siRNA sense strand
ugaaugcguuaaagaagca

SEQ ID NO: 2070477 - RNA, 19 nt, Homo sapiens
  misc_RNA (1)...(19): siRNA sense strand
caaagggagacaagcagaa

SEQ ID NO: 2070478 - RNA, 19 nt, Homo sapiens
  misc_RNA (1)...(19): siRNA sense strand
guagcagaauaucgaaauc

SEQ ID NO: 2070479 - RNA, 19 nt, Homo sapiens
  misc_RNA (1)...(19): siRNA sense strand
uguguaagcccaauuauac

SEQ ID NO: 2070480 - RNA, 19 nt, Homo sapiens
  misc_RNA (1)...(19): siRNA sense strand
guuguucuagauccuauua

SEQ ID NO: 2070481 - RNA, 19 nt, Homo sapiens
  misc_RNA (1)...(19): siRNA sense strand
aagcagcucucagugucua

SEQ ID NO: 2070482 - RNA, 19 nt, Homo sapiens
  misc_RNA (1)...(19): siRNA sense strand
gcugaaacacucuauaucg

SEQ ID NO: 2070483 - RNA, 19 nt, Homo sapiens
  misc_RNA (1)...(19): siRNA sense strand
gacaauauucgagauuaug

SEQ ID NO: 2070484 - RNA, 19 nt, Homo sapiens
  misc_RNA (1)...(19): siRNA sense strand
ugugcguggugaauaauuu

SEQ ID NO: 2070485 - RNA, 19 nt, Homo sapiens
  misc_RNA (1)...(19): siRNA sense strand
uguccgauuucuuggaauu

SEQ ID NO: 2070486 - RNA, 19 nt, Homo sapiens
  misc_RNA (1)...(19): siRNA sense strand
ggacacagugaaugaagca

SEQ ID NO: 2070487 - RNA, 19 nt, Homo sapiens
  misc_RNA (1)...(19): siRNA sense strand
ucagcaguauacacaauuc

SEQ ID NO: 2070488 - RNA, 19 nt, Homo sapiens
  misc_RNA (1)...(19): siRNA sense strand
gaugcuggcguacuacuuc

SEQ ID NO: 2070489 - RNA, 19 nt, Homo sapiens
  misc_RNA (1)...(19): siRNA sense strand
gcaguauacacaauucauc

SEQ ID NO: 2070490 - RNA, 19 nt, Homo sapiens
  misc_RNA (1)...(19): siRNA sense strand
guaaaugcuggacaaguag

SEQ ID NO: 2070491 - RNA, 19 nt, Homo sapiens
  misc_RNA (1)...(19): siRNA sense strand
uauucgagauuaugacauc

SEQ ID NO: 2070492 - RNA, 19 nt, Homo sapiens
  misc_RNA (1)...(19): siRNA sense strand
aaacagggacaauauucga

SEQ ID NO: 2070493 - RNA, 19 nt, Homo sapiens
  misc_RNA (1)...(19): siRNA sense strand
gcauauacacauggauaau

SEQ ID NO: 2070494 - RNA, 19 nt, Homo sapiens
  misc_RNA (1)...(19): siRNA sense strand
aaaugagcauauacacaug

SEQ ID NO: 2070495 - RNA, 19 nt, Homo sapiens
  misc_RNA (1)...(19): siRNA sense strand
uauagcaggcuuucugguu

SEQ ID NO: 2070496 - RNA, 19 nt, Homo sapiens
  misc_RNA (1)...(19): siRNA sense strand
gaauaucgaaaucauuggu

SEQ ID NO: 2070497 - RNA, 19 nt, Homo sapiens
  misc_RNA (1)...(19): siRNA sense strand
gcuugggcuuaauguguuu

SEQ ID NO: 2070498 - RNA, 19 nt, Homo sapiens
  misc_RNA (1)...(19): siRNA sense strand
cggugaugcuggcguacua

SEQ ID NO: 2070499 - RNA, 19 nt, Homo sapiens
  misc_RNA (1)...(19): siRNA sense strand
caugcucuauuuccagaug

SEQ ID NO: 2070500 - RNA, 19 nt, Homo sapiens
  misc_RNA (1)...(19): siRNA sense strand
gaauugcauuuucucaguu

SEQ ID NO: 2070501 - RNA, 19 nt, Homo sapiens
  misc_RNA (1)...(19): siRNA sense strand
ugucagcaguauacacaau

SEQ ID NO: 2070502 - RNA, 19 nt, Homo sapiens
  misc_RNA (1)...(19): siRNA sense strand
gagacuguugcuauauaaa

SEQ ID NO: 2070503 - RNA, 19 nt, Homo sapiens
  misc_RNA (1)...(19): siRNA sense strand
guucacugguuucaaguac

SEQ ID NO: 2070504 - RNA, 19 nt, Homo sapiens
  misc_RNA (1)...(19): siRNA sense strand
guucuagauccuauuaaga

SEQ ID NO: 2070505 - RNA, 19 nt, Homo sapiens
  misc_RNA (1)...(19): siRNA sense strand
gagaaacugcugucuuuug

SEQ ID NO: 2070506 - RNA, 19 nt, Homo sapiens
  misc_RNA (1)...(19): siRNA sense strand
agaagugugauguucauga

SEQ ID NO: 2070507 - RNA, 19 nt, Homo sapiens
  misc_RNA (1)...(19): siRNA sense strand
cacagugaaugaagcaagu

SEQ ID NO: 2070508 - RNA, 19 nt, Homo sapiens
  misc_RNA (1)...(19): siRNA sense strand
gaaaaggacacagugaaug

SEQ ID NO: 2070509 - RNA, 19 nt, Homo sapiens
  misc_RNA (1)...(19): siRNA sense strand
gaaaaugagcauauacaca

SEQ ID NO: 2070510 - RNA, 19 nt, Homo sapiens
  misc_RNA (1)...(19): siRNA sense strand
ggagacaagcagaaaauga

SEQ ID NO: 2070511 - RNA, 19 nt, Homo sapiens
  misc_RNA (1)...(19): siRNA sense strand
aaagggagacaagcagaaa

SEQ ID NO: 2070512 - RNA, 19 nt, Homo sapiens
  misc_RNA (1)...(19): siRNA sense strand
caucaccaacacaaucaaa

SEQ ID NO: 2070513 - RNA, 19 nt, Homo sapiens
  misc_RNA (1)...(19): siRNA sense strand
ggaaaaggacacagugaau

SEQ ID NO: 2070514 - RNA, 19 nt, Homo sapiens
  misc_RNA (1)...(19): siRNA sense strand
ccgauuucuuggaauuuau

SEQ ID NO: 2070515 - RNA, 19 nt, Homo sapiens
  misc_RNA (1)...(19): siRNA sense strand
caaguagucacaggaaauc

SEQ ID NO: 2070516 - RNA, 19 nt, Homo sapiens
  misc_RNA (1)...(19): siRNA sense strand
auuaagaagugugauguuc

SEQ ID NO: 2070517 - RNA, 19 nt, Homo sapiens
  misc_RNA (1)...(19): siRNA sense strand
auaaacagggacaauauuc

SEQ ID NO: 2070518 - RNA, 19 nt, Homo sapiens
  misc_RNA (1)...(19): siRNA sense strand
gugauaauaguuggagaaa

SEQ ID NO: 2070519 - RNA, 19 nt, Homo sapiens
  misc_RNA (1)...(19): siRNA sense strand
acaaguagucacaggaaau

SEQ ID NO: 2070520 - RNA, 19 nt, Homo sapiens
  misc_RNA (1)...(19): siRNA sense strand
acauuuggacuguuugcua

SEQ ID NO: 2070521 - RNA, 19 nt, Homo sapiens
  misc_RNA (1)...(19): siRNA sense strand
aacacucuauaucgaauug

SEQ ID NO: 2070522 - RNA, 19 nt, Homo sapiens
  misc_RNA (1)...(19): siRNA sense strand
gaaccaaacuguagaauuu

SEQ ID NO: 2070523 - RNA, 19 nt, Homo sapiens
  misc_RNA (1)...(19): siRNA sense strand
gaaagaaggucguaugaaa

SEQ ID NO: 2070524 - RNA, 19 nt, Homo sapiens
  misc_RNA (1)...(19): siRNA sense strand
ggaauuaucuagugaagaa

SEQ ID NO: 2070525 - RNA, 19 nt, Homo sapiens
  misc_RNA (1)...(19): siRNA sense strand
gcuguuaccuucagaugua

SEQ ID NO: 2070526 - RNA, 19 nt, Homo sapiens
  misc_RNA (1)...(19): siRNA sense strand
aaaggaagcuaauggauau

SEQ ID NO: 2070527 - RNA, 19 nt, Homo sapiens
  misc_RNA (1)...(19): siRNA sense strand
gaagaaauggaaacacuuu

SEQ ID NO: 2070528 - RNA, 19 nt, Homo sapiens
  misc_RNA (1)...(19): siRNA sense strand
gacagagaaugaacaaauu

SEQ ID NO: 2070529 - RNA, 19 nt, Homo sapiens
  misc_RNA (1)...(19): siRNA sense strand
gaaaugccuucagaaugua

SEQ ID NO: 2070530 - RNA, 19 nt, Homo sapiens
  misc_RNA (1)...(19): siRNA sense strand
cagaggagauuaaagaaga

SEQ ID NO: 2070531 - RNA, 19 nt, Homo sapiens
  misc_RNA (1)...(19): siRNA sense strand
agacgaggaugaggaauua

SEQ ID NO: 2070532 - RNA, 19 nt, Homo sapiens
  misc_RNA (1)...(19): siRNA sense strand
uggaagauauguugacuuu

SEQ ID NO: 2070533 - RNA, 19 nt, Homo sapiens
  misc_RNA (1)...(19): siRNA sense strand
cgacaaaugaauacacuua

SEQ ID NO: 2070534 - RNA, 19 nt, Homo sapiens
  misc_RNA (1)...(19): siRNA sense strand
uaaaggaagcuaauggaua

SEQ ID NO: 2070535 - RNA, 19 nt, Homo sapiens
  misc_RNA (1)...(19): siRNA sense strand
gaugaggaauuaucuagug

SEQ ID NO: 2070536 - RNA, 19 nt, Homo sapiens
  misc_RNA (1)...(19): siRNA sense strand
gaagauauguugacuuuuc

SEQ ID NO: 2070537 - RNA, 19 nt, Homo sapiens
  misc_RNA (1)...(19): siRNA sense strand
ugucgaagaugauaaagaa

SEQ ID NO: 2070538 - RNA, 19 nt, Homo sapiens
  misc_RNA (1)...(19): siRNA sense strand
gagaagaaauggaaacacu

SEQ ID NO: 2070539 - RNA, 19 nt, Homo sapiens
  misc_RNA (1)...(19): siRNA sense strand
agaagacucugaugaaaug

SEQ ID NO: 2070540 - RNA, 19 nt, Homo sapiens
  misc_RNA (1)...(19): siRNA sense strand
uaaagaagacucugaugaa

SEQ ID NO: 2070541 - RNA, 19 nt, Homo sapiens
  misc_RNA (1)...(19): siRNA sense strand
aaagaagacucugaugaaa

SEQ ID NO: 2070542 - RNA, 19 nt, Homo sapiens
  misc_RNA (1)...(19): siRNA sense strand
ucacagaggagauuaaaga

SEQ ID NO: 2070543 - RNA, 19 nt, Homo sapiens
  misc_RNA (1)...(19): siRNA sense strand
gcacaauccuagcaaacau

SEQ ID NO: 2070544 - RNA, 19 nt, Homo sapiens
  misc_RNA (1)...(19): siRNA sense strand
gauauacguuugaugaaag

SEQ ID NO: 2070545 - RNA, 19 nt, Homo sapiens
  misc_RNA (1)...(19): siRNA sense strand
ccauauaucuaccgacaug

SEQ ID NO: 2070546 - RNA, 19 nt, Homo sapiens
  misc_RNA (1)...(19): siRNA sense strand
gcuaauggauaugugcuuu

SEQ ID NO: 2070547 - RNA, 19 nt, Homo sapiens
  misc_RNA (1)...(19): siRNA sense strand
gaaguugaugcauccaaua

SEQ ID NO: 2070548 - RNA, 19 nt, Homo sapiens
  misc_RNA (1)...(19): siRNA sense strand
cgacagagaaugaacaaau

SEQ ID NO: 2070549 - RNA, 19 nt, Homo sapiens
  misc_RNA (1)...(19): siRNA sense strand
ugaaagcacugaugaugag

SEQ ID NO: 2070550 - RNA, 19 nt, Homo sapiens
  misc_RNA (1)...(19): siRNA sense strand
ggacaucacagaggagauu

SEQ ID NO: 2070551 - RNA, 19 nt, Homo sapiens
  misc_RNA (1)...(19): siRNA sense strand
uaauggaacuagcaaaucu

SEQ ID NO: 2070552 - RNA, 19 nt, Homo sapiens
  misc_RNA (1)...(19): siRNA sense strand
ugacaagacuccaucaacu

SEQ ID NO: 2070553 - RNA, 19 nt, Homo sapiens
  misc_RNA (1)...(19): siRNA sense strand
ugauuuaccugcuacugaa

SEQ ID NO: 2070554 - RNA, 19 nt, Homo sapiens
  misc_RNA (1)...(19): siRNA sense strand
gaugaggaccgacagagaa

SEQ ID NO: 2070555 - RNA, 19 nt, Homo sapiens
  misc_RNA (1)...(19): siRNA sense strand
guugaugcauccaauauag

SEQ ID NO: 2070556 - RNA, 19 nt, Homo sapiens
  misc_RNA (1)...(19): siRNA sense strand
cagcugcauuuaagaaaga

SEQ ID NO: 2070557 - RNA, 19 nt, Homo sapiens
  misc_RNA (1)...(19): siRNA sense strand
gaugaaagaaggucguaug

SEQ ID NO: 2070558 - RNA, 19 nt, Homo sapiens
  misc_RNA (1)...(19): siRNA sense strand
gaauaugaaagcacugaug

SEQ ID NO: 2070559 - RNA, 19 nt, Homo sapiens
  misc_RNA (1)...(19): siRNA sense strand
gaaacacagcggaucaugu

SEQ ID NO: 2070560 - RNA, 19 nt, Homo sapiens
  misc_RNA (1)...(19): siRNA sense strand
gugcggguccugucagaua

SEQ ID NO: 2070561 - RNA, 19 nt, Homo sapiens
  misc_RNA (1)...(19): siRNA sense strand
ggaagcuaauggauaugug

SEQ ID NO: 2070562 - RNA, 19 nt, Homo sapiens
  misc_RNA (1)...(19): siRNA sense strand
uuaaagaagacucugauga

SEQ ID NO: 2070563 - RNA, 19 nt, Homo sapiens
  misc_RNA (1)...(19): siRNA sense strand
ucacacagcaguuuacauc

SEQ ID NO: 2070564 - RNA, 19 nt, Homo sapiens
  misc_RNA (1)...(19): siRNA sense strand
gaaagaggacuugcugaag

SEQ ID NO: 2070565 - RNA, 19 nt, Homo sapiens
  misc_RNA (1)...(19): siRNA sense strand
gugaagaaucagaauauga

SEQ ID NO: 2070566 - RNA, 19 nt, Homo sapiens
  misc_RNA (1)...(19): siRNA sense strand
gaggaauuaucuagugaag

SEQ ID NO: 2070567 - RNA, 19 nt, Homo sapiens
  misc_RNA (1)...(19): siRNA sense strand
gaggaccgacagagaauga

SEQ ID NO: 2070568 - RNA, 19 nt, Homo sapiens
  misc_RNA (1)...(19): siRNA sense strand
aggacaagcuuucauugga

SEQ ID NO: 2070569 - RNA, 19 nt, Homo sapiens
  misc_RNA (1)...(19): siRNA sense strand
cacagcggaucauguuuga

SEQ ID NO: 2070570 - RNA, 19 nt, Homo sapiens
  misc_RNA (1)...(19): siRNA sense strand
uagcuaaacauguucaaga

SEQ ID NO: 2070571 - RNA, 19 nt, Homo sapiens
  misc_RNA (1)...(19): siRNA sense strand
ugaaguugaugcauccaau

SEQ ID NO: 2070572 - RNA, 19 nt, Homo sapiens
  misc_RNA (1)...(19): siRNA sense strand
gcuaaacauguucaagaaa

SEQ ID NO: 2070573 - RNA, 19 nt, Homo sapiens
  misc_RNA (1)...(19): siRNA sense strand
gacugaaacauacagcuuu

SEQ ID NO: 2070574 - RNA, 19 nt, Homo sapiens
  misc_RNA (1)...(19): siRNA sense strand
agaaagaggacuugcugaa

SEQ ID NO: 2070575 - RNA, 19 nt, Homo sapiens
  misc_RNA (1)...(19): siRNA sense strand
caauaaagcagcgccaugu

SEQ ID NO: 2070576 - RNA, 19 nt, Homo sapiens
  misc_RNA (1)...(19): siRNA sense strand
caaauuaauggaacuagca

SEQ ID NO: 2070577 - RNA, 19 nt, Homo sapiens
  misc_RNA (1)...(19): siRNA sense strand
ugaugacccugucgaagau

SEQ ID NO: 2070578 - RNA, 19 nt, Homo sapiens
  misc_RNA (1)...(19): siRNA sense strand
ugaagacuauaugccauug

SEQ ID NO: 2070579 - RNA, 19 nt, Homo sapiens
  misc_RNA (1)...(19): siRNA sense strand
caagcgugccuaaguucua

SEQ ID NO: 2070580 - RNA, 19 nt, Homo sapiens
  misc_RNA (1)...(19): siRNA sense strand
aagcagcuauaaaggcauu

SEQ ID NO: 2070581 - RNA, 19 nt, Homo sapiens
  misc_RNA (1)...(19): siRNA sense strand
gcuauaaaggcauugacaa

SEQ ID NO: 2070582 - RNA, 19 nt, Homo sapiens
  misc_RNA (1)...(19): siRNA sense strand
aaaccuaauuuggacauca

SEQ ID NO: 2070583 - RNA, 19 nt, Homo sapiens
  misc_RNA (1)...(19): siRNA sense strand
ugaccaaccacaaccugua

SEQ ID NO: 2070584 - RNA, 19 nt, Homo sapiens
  misc_RNA (1)...(19): siRNA sense strand
aagacuccaucaacugaaa

SEQ ID NO: 2070585 - RNA, 19 nt, Homo sapiens
  misc_RNA (1)...(19): siRNA sense strand
acaagacuccaucaacuga

SEQ ID NO: 2070586 - RNA, 19 nt, Homo sapiens
  misc_RNA (1)...(19): siRNA sense strand
uauaaaggcauugacaaga

SEQ ID NO: 2070587 - RNA, 19 nt, Homo sapiens
  misc_RNA (1)...(19): siRNA sense strand
ugaaccaaacuguagaauu

SEQ ID NO: 2070588 - RNA, 19 nt, Homo sapiens
  misc_RNA (1)...(19): siRNA sense strand
cuagugaagaaucagaaua

SEQ ID NO: 2070589 - RNA, 19 nt, Homo sapiens
  misc_RNA (1)...(19): siRNA sense strand
gugccuaaguucuauguac

SEQ ID NO: 2070590 - RNA, 19 nt, Homo sapiens
  misc_RNA (1)...(19): siRNA sense strand
uaaaggcauugacaagacu

SEQ ID NO: 2070591 - RNA, 19 nt, Homo sapiens
  misc_RNA (1)...(19): siRNA sense strand
gacaagacuccaucaacug

SEQ ID NO: 2070592 - RNA, 19 nt, Homo sapiens
  misc_RNA (1)...(19): siRNA sense strand
cauguuugauauacguuug

SEQ ID NO: 2070593 - RNA, 19 nt, Homo sapiens
  misc_RNA (1)...(19): siRNA sense strand
gauuaaagaagacucugau

SEQ ID NO: 2070594 - RNA, 19 nt, Homo sapiens
  misc_RNA (1)...(19): siRNA sense strand
caucacagaggagauuaaa

SEQ ID NO: 2070595 - RNA, 19 nt, Homo sapiens
  misc_RNA (1)...(19): siRNA sense strand
gcuuacugcugaggagaaa

SEQ ID NO: 2070596 - RNA, 19 nt, Homo sapiens
  misc_RNA (1)...(19): siRNA sense strand
aauccuagcaaacauugua

SEQ ID NO: 2070597 - RNA, 19 nt, Homo sapiens
  misc_RNA (1)...(19): siRNA sense strand
uguacaguaugaagacuau

SEQ ID NO: 2070598 - RNA, 19 nt, Homo sapiens
  misc_RNA (1)...(19): siRNA sense strand
gagcagccgcuugcgauau

SEQ ID NO: 2070599 - RNA, 19 nt, Homo sapiens
  misc_RNA (1)...(19): siRNA sense strand
cgacugaaacauacagcuu

SEQ ID NO: 2070600 - RNA, 19 nt, Homo sapiens
  misc_RNA (1)...(19): siRNA sense strand
uaugaaagcacugaugaug

SEQ ID NO: 2070601 - RNA, 19 nt, Homo sapiens
  misc_RNA (1)...(19): siRNA sense strand
aauaugaaagcacugauga

SEQ ID NO: 2070602 - RNA, 19 nt, Homo sapiens
  misc_RNA (1)...(19): siRNA sense strand
gaggaugaggaauuaucua

SEQ ID NO: 2070603 - RNA, 19 nt, Homo sapiens
  misc_RNA (1)...(19): siRNA sense strand
cagacgaggaugaggaauu

SEQ ID NO: 2070604 - RNA, 19 nt, Homo sapiens
  misc_RNA (1)...(19): siRNA sense strand
ggaacuagcaaaucuucag

SEQ ID NO: 2070605 - RNA, 19 nt, Homo sapiens
  misc_RNA (1)...(19): siRNA sense strand
ugaaagaaggucguaugaa

SEQ ID NO: 2070606 - RNA, 19 nt, Homo sapiens
  misc_RNA (1)...(19): siRNA sense strand
acacagcggaucauguuug

SEQ ID NO: 2070607 - RNA, 19 nt, Homo sapiens
  misc_RNA (1)...(19): siRNA sense strand
acacagcaguuuacaucca

SEQ ID NO: 2070608 - RNA, 19 nt, Homo sapiens
  misc_RNA (1)...(19): siRNA sense strand
aaaauggaauugcaccaaa

SEQ ID NO: 2070609 - RNA, 19 nt, Homo sapiens
  misc_RNA (1)...(19): siRNA sense strand
agcuaaacauguucaagaa

SEQ ID NO: 2070610 - RNA, 19 nt, Homo sapiens
  misc_RNA (1)...(19): siRNA sense strand
ccagcugcauuuaagaaag

SEQ ID NO: 2070611 - RNA, 19 nt, Homo sapiens
  misc_RNA (1)...(19): siRNA sense strand
ccaaaagaccuaaaacaau

SEQ ID NO: 2070612 - RNA, 19 nt, Homo sapiens
  misc_RNA (1)...(19): siRNA sense strand
gcaccaaaccauggcacaa

SEQ ID NO: 2070613 - RNA, 19 nt, Homo sapiens
  misc_RNA (1)...(19): siRNA sense strand
uauguugaauacaccuuug

SEQ ID NO: 2070614 - RNA, 19 nt, Homo sapiens
  misc_RNA (1)...(19): siRNA sense strand
uuaaagcacacuuggacaa

SEQ ID NO: 2070615 - RNA, 19 nt, Homo sapiens
  misc_RNA (1)...(19): siRNA sense strand
ucagaaacacagcggauca

SEQ ID NO: 2070616 - RNA, 19 nt, Homo sapiens
  misc_RNA (1)...(19): siRNA sense strand
auaaagcagcgccauguga

SEQ ID NO: 2070617 - RNA, 19 nt, Homo sapiens
  misc_RNA (1)...(19): siRNA sense strand
auaaaggcauugacaagac

SEQ ID NO: 2070618 - RNA, 19 nt, Homo sapiens
  misc_RNA (1)...(19): siRNA sense strand
gaaucagaauaugaaagca

SEQ ID NO: 2070619 - RNA, 19 nt, Homo sapiens
  misc_RNA (1)...(19): siRNA sense strand
aaagaaggucguaugaaag

SEQ ID NO: 2070620 - RNA, 19 nt, Homo sapiens
  misc_RNA (1)...(19): siRNA sense strand
aagaagacucugaugaaau

SEQ ID NO: 2070621 - RNA, 19 nt, Homo sapiens
  misc_RNA (1)...(19): siRNA sense strand
aaggauauguugaauacac

SEQ ID NO: 2070622 - RNA, 19 nt, Homo sapiens
  misc_RNA (1)...(19): siRNA sense strand
gagaagaucagcaagauga

SEQ ID NO: 2070623 - RNA, 19 nt, Homo sapiens
  misc_RNA (1)...(19): siRNA sense strand
gccugaagcuugccaauga

SEQ ID NO: 2070624 - RNA, 19 nt, Homo sapiens
  misc_RNA (1)...(19): siRNA sense strand
ugaagaugcuggacaguga

SEQ ID NO: 2070625 - RNA, 19 nt, Homo sapiens
  misc_RNA (1)...(19): siRNA sense strand
ggaggacgcuggacaaggu

SEQ ID NO: 2070626 - RNA, 19 nt, Homo sapiens
  misc_RNA (1)...(19): siRNA sense strand
gaaaggagagcaccgugaa

SEQ ID NO: 2070627 - RNA, 19 nt, Homo sapiens
  misc_RNA (1)...(19): siRNA sense strand
gagcuucggucugcuguga

SEQ ID NO: 2070628 - RNA, 19 nt, Homo sapiens
  misc_RNA (1)...(19): siRNA sense strand
ggacagcugugggcaagga

SEQ ID NO: 2070629 - RNA, 19 nt, Homo sapiens
  misc_RNA (1)...(19): siRNA sense strand
ugaacgcucugacgucuga

SEQ ID NO: 2070630 - RNA, 19 nt, Homo sapiens
  misc_RNA (1)...(19): siRNA sense strand
gcagagagcgagcgcauca

SEQ ID NO: 2070631 - RNA, 19 nt, Homo sapiens
  misc_RNA (1)...(19): siRNA sense strand
gcaagaugaaggccaauga

SEQ ID NO: 2070632 - RNA, 19 nt, Homo sapiens
  misc_RNA (1)...(19): siRNA sense strand
cagcgggacuccugucuuc

SEQ ID NO: 2070633 - RNA, 19 nt, Homo sapiens
  misc_RNA (1)...(19): siRNA sense strand
gaugaaggccaaugagaca

SEQ ID NO: 2070634 - RNA, 19 nt, Homo sapiens
  misc_RNA (1)...(19): siRNA sense strand
gaagcugcaggaacaagaa

SEQ ID NO: 2070635 - RNA, 19 nt, Homo sapiens
  misc_RNA (1)...(19): siRNA sense strand
gagcuccggcgucagauga

SEQ ID NO: 2070636 - RNA, 19 nt, Homo sapiens
  misc_RNA (1)...(19): siRNA sense strand
gagagaacgggacgaacuu

SEQ ID NO: 2070637 - RNA, 19 nt, Homo sapiens
  misc_RNA (1)...(19): siRNA sense strand
ggaagcugcaggaacaaga

SEQ ID NO: 2070638 - RNA, 19 nt, Homo sapiens
  misc_RNA (1)...(19): siRNA sense strand
gaagcuggcacuccuagag

SEQ ID NO: 2070639 - RNA, 19 nt, Homo sapiens
  misc_RNA (1)...(19): siRNA sense strand
gaaggccaaugagacaaag

SEQ ID NO: 2070640 - RNA, 19 nt, Homo sapiens
  misc_RNA (1)...(19): siRNA sense strand
caacagccccagcaccuua

SEQ ID NO: 2070641 - RNA, 19 nt, Homo sapiens
  misc_RNA (1)...(19): siRNA sense strand
ccagaccagugcccugaau

SEQ ID NO: 2070642 - RNA, 19 nt, Homo sapiens
  misc_RNA (1)...(19): siRNA sense strand
gcagaagcuggcacuccua

SEQ ID NO: 2070643 - RNA, 19 nt, Homo sapiens
  misc_RNA (1)...(19): siRNA sense strand
ggagaagaucagcaagaug

SEQ ID NO: 2070644 - RNA, 19 nt, Homo sapiens
  misc_RNA (1)...(19): siRNA sense strand
ugaaggccaaugagacaaa

SEQ ID NO: 2070645 - RNA, 19 nt, Homo sapiens
  misc_RNA (1)...(19): siRNA sense strand
uggauucccugcagagaca

SEQ ID NO: 2070646 - RNA, 19 nt, Homo sapiens
  misc_RNA (1)...(19): siRNA sense strand
cagcaggagcuucgaagga

SEQ ID NO: 2070647 - RNA, 19 nt, Homo sapiens
  misc_RNA (1)...(19): siRNA sense strand
caggagaagaucagcaaga

SEQ ID NO: 2070648 - RNA, 19 nt, Homo sapiens
  misc_RNA (1)...(19): siRNA sense strand
gaagaucagcaagaugaag

SEQ ID NO: 2070649 - RNA, 19 nt, Homo sapiens
  misc_RNA (1)...(19): siRNA sense strand
aggagaagaucagcaagau

SEQ ID NO: 2070650 - RNA, 19 nt, Homo sapiens
  misc_RNA (1)...(19): siRNA sense strand
ccagagagaacgggacgaa

SEQ ID NO: 2070651 - RNA, 19 nt, Homo sapiens
  misc_RNA (1)...(19): siRNA sense strand
gagcgggagaagcuucgua

SEQ ID NO: 2070652 - RNA, 19 nt, Homo sapiens
  misc_RNA (1)...(19): siRNA sense strand
gccaggagaagaucagcaa

SEQ ID NO: 2070653 - RNA, 19 nt, Homo sapiens
  misc_RNA (1)...(19): siRNA sense strand
agcggaagcugcaggaaca

SEQ ID NO: 2070654 - RNA, 19 nt, Homo sapiens
  misc_RNA (1)...(19): siRNA sense strand
uccgagagccgcacuguca

SEQ ID NO: 2070655 - RNA, 19 nt, Homo sapiens
  misc_RNA (1)...(19): siRNA sense strand
gcagcgggacuccugucuu

SEQ ID NO: 2070656 - RNA, 19 nt, Homo sapiens
  misc_RNA (1)...(19): siRNA sense strand
aagaugaaggccaaugaga

SEQ ID NO: 2070657 - RNA, 19 nt, Homo sapiens
  misc_RNA (1)...(19): siRNA sense strand
caagaugaaggccaaugag

SEQ ID NO: 2070658 - RNA, 19 nt, Homo sapiens
  misc_RNA (1)...(19): siRNA sense strand
gcggagugcccagagagaa

SEQ ID NO: 2070659 - RNA, 19 nt, Homo sapiens
  misc_RNA (1)...(19): siRNA sense strand
gacuguggcuuguuacuua

SEQ ID NO: 2070660 - RNA, 19 nt, Homo sapiens
  misc_RNA (1)...(19): siRNA sense strand
gaaugaaccugugccuuug

SEQ ID NO: 2070661 - RNA, 19 nt, Homo sapiens
  misc_RNA (1)...(19): siRNA sense strand
gcacagccaucgccgucua

SEQ ID NO: 2070662 - RNA, 19 nt, Homo sapiens
  misc_RNA (1)...(19): siRNA sense strand
gcuggacuguggcuuguua

SEQ ID NO: 2070663 - RNA, 19 nt, Homo sapiens
  misc_RNA (1)...(19): siRNA sense strand
ccaauaucauccaucauuu

SEQ ID NO: 2070664 - RNA, 19 nt, Homo sapiens
  misc_RNA (1)...(19): siRNA sense strand
uaucauccaucauuucuuc

SEQ ID NO: 2070665 - RNA, 19 nt, Homo sapiens
  misc_RNA (1)...(19): siRNA sense strand
agaaugaaccugugccuuu

SEQ ID NO: 2070666 - RNA, 19 nt, Homo sapiens
  misc_RNA (1)...(19): siRNA sense strand
ccucguaucuuauggacuu

SEQ ID NO: 2070667 - RNA, 19 nt, Homo sapiens
  misc_RNA (1)...(19): siRNA sense strand
auagauauguggcgauuug

SEQ ID NO: 2070668 - RNA, 19 nt, Homo sapiens
  misc_RNA (1)...(19): siRNA sense strand
ugacgucuccuucaaugua

SEQ ID NO: 2070669 - RNA, 19 nt, Homo sapiens
  misc_RNA (1)...(19): siRNA sense strand
cagaguaacuuggccuuug

SEQ ID NO: 2070670 - RNA, 19 nt, Homo sapiens
  misc_RNA (1)...(19): siRNA sense strand
gcucugacgucuccuucaa

SEQ ID NO: 2070671 - RNA, 19 nt, Homo sapiens
  misc_RNA (1)...(19): siRNA sense strand
gauggcguaugauagauau

SEQ ID NO: 2070672 - RNA, 19 nt, Homo sapiens
  misc_RNA (1)...(19): siRNA sense strand
ucuguauccucguaucuua

SEQ ID NO: 2070673 - RNA, 19 nt, Homo sapiens
  misc_RNA (1)...(19): siRNA sense strand
ucacccagcucuucuucuu

SEQ ID NO: 2070674 - RNA, 19 nt, Homo sapiens
  misc_RNA (1)...(19): siRNA sense strand
ugucaaccaucauguauuc

SEQ ID NO: 2070675 - RNA, 19 nt, Homo sapiens
  misc_RNA (1)...(19): siRNA sense strand
uagcacagcuguccuucug

SEQ ID NO: 2070676 - RNA, 19 nt, Homo sapiens
  misc_RNA (1)...(19): siRNA sense strand
gacgucuccuucaauguaa

SEQ ID NO: 2070677 - RNA, 19 nt, Homo sapiens
  misc_RNA (1)...(19): siRNA sense strand
ugaaagcacaggccacaaa

SEQ ID NO: 2070678 - RNA, 19 nt, Homo sapiens
  misc_RNA (1)...(19): siRNA sense strand
caaccaucauguauucaau

SEQ ID NO: 2070679 - RNA, 19 nt, Homo sapiens
  misc_RNA (1)...(19): siRNA sense strand
gucagaggcuccaccaaau

SEQ ID NO: 2070680 - RNA, 19 nt, Homo sapiens
  misc_RNA (1)...(19): siRNA sense strand
ggaggucuauuggcucuca

SEQ ID NO: 2070681 - RNA, 19 nt, Homo sapiens
  misc_RNA (1)...(19): siRNA sense strand
ccugcauacuguccuaaua

SEQ ID NO: 2070682 - RNA, 19 nt, Homo sapiens
  misc_RNA (1)...(19): siRNA sense strand
cagcucuucuucuucguuu

SEQ ID NO: 2070683 - RNA, 19 nt, Homo sapiens
  misc_RNA (1)...(19): siRNA sense strand
ucaaugacuuacuacacaa

SEQ ID NO: 2070684 - RNA, 19 nt, Homo sapiens
  misc_RNA (1)...(19): siRNA sense strand
gcaauggucaacccaagga

SEQ ID NO: 2070685 - RNA, 19 nt, Homo sapiens
  misc_RNA (1)...(19): siRNA sense strand
gaauauggacagccuccuu

SEQ ID NO: 2070686 - RNA, 19 nt, Homo sapiens
  misc_RNA (1)...(19): siRNA sense strand
ugauagauauguggcgauu

SEQ ID NO: 2070687 - RNA, 19 nt, Homo sapiens
  misc_RNA (1)...(19): siRNA sense strand
cuaaggaacagggauauga

SEQ ID NO: 2070688 - RNA, 19 nt, Homo sapiens
  misc_RNA (1)...(19): siRNA sense strand
caaaugguagugaauaucu

SEQ ID NO: 2070689 - RNA, 19 nt, Homo sapiens
  misc_RNA (1)...(19): siRNA sense strand
ccuccaauaucauccauca

SEQ ID NO: 2070690 - RNA, 19 nt, Homo sapiens
  misc_RNA (1)...(19): siRNA sense strand
guugacaucugcuuuacgu

SEQ ID NO: 2070691 - RNA, 19 nt, Homo sapiens
  misc_RNA (1)...(19): siRNA sense strand
cagaggcuccaccaaauga

SEQ ID NO: 2070692 - RNA, 19 nt, Homo sapiens
  misc_RNA (1)...(19): siRNA sense strand
cccaaaugguagugaauau

SEQ ID NO: 2070693 - RNA, 19 nt, Homo sapiens
  misc_RNA (1)...(19): siRNA sense strand
uaaggaacagggauaugaa

SEQ ID NO: 2070694 - RNA, 19 nt, Homo sapiens
  misc_RNA (1)...(19): siRNA sense strand
ccaaggaacagaguaacuu

SEQ ID NO: 2070695 - RNA, 19 nt, Homo sapiens
  misc_RNA (1)...(19): siRNA sense strand
cacaaacacugggcucuca

SEQ ID NO: 2070696 - RNA, 19 nt, Homo sapiens
  misc_RNA (1)...(19): siRNA sense strand
uccaauaucauccaucauu

SEQ ID NO: 2070697 - RNA, 19 nt, Homo sapiens
  misc_RNA (1)...(19): siRNA sense strand
uaacuuggccuuuguugac

SEQ ID NO: 2070698 - RNA, 19 nt, Homo sapiens
  misc_RNA (1)...(19): siRNA sense strand
acacugggcucucaaugac

SEQ ID NO: 2070699 - RNA, 19 nt, Homo sapiens
  misc_RNA (1)...(19): siRNA sense strand
agaguaacuuggccuuugu

SEQ ID NO: 2070700 - RNA, 19 nt, Homo sapiens
  misc_RNA (1)...(19): siRNA sense strand
ccuuucaucuauacccuaa

SEQ ID NO: 2070701 - RNA, 19 nt, Homo sapiens
  misc_RNA (1)...(19): siRNA sense strand
ugucaguggugguguuguu

SEQ ID NO: 2070702 - RNA, 19 nt, Homo sapiens
  misc_RNA (1)...(19): siRNA sense strand
ugugugugauggcguauga

SEQ ID NO: 2070703 - RNA, 19 nt, Homo sapiens
  misc_RNA (1)...(19): siRNA sense strand
caauaucauccaucauuuc

SEQ ID NO: 2070704 - RNA, 19 nt, Homo sapiens
  misc_RNA (1)...(19): siRNA sense strand
cucaaugacuuacuacaca

SEQ ID NO: 2070705 - RNA, 19 nt, Homo sapiens
  misc_RNA (1)...(19): siRNA sense strand
ggacuguggcuuguuacuu

SEQ ID NO: 2070706 - RNA, 19 nt, Homo sapiens
  misc_RNA (1)...(19): siRNA sense strand
ugacuggcaccaagacuau

SEQ ID NO: 2070707 - RNA, 19 nt, Homo sapiens
  misc_RNA (1)...(19): siRNA sense strand
gcaagcagagagcuguuuc

SEQ ID NO: 2070708 - RNA, 19 nt, Homo sapiens
  misc_RNA (1)...(19): siRNA sense strand
guaacuuggccuuuguuga

SEQ ID NO: 2070709 - RNA, 19 nt, Homo sapiens
  misc_RNA (1)...(19): siRNA sense strand
ggaacagggauaugaagag

SEQ ID NO: 2070710 - RNA, 19 nt, Homo sapiens
  misc_RNA (1)...(19): siRNA sense strand
cuccgaugcugaauccuuu

SEQ ID NO: 2070711 - RNA, 19 nt, Homo sapiens
  misc_RNA (1)...(19): siRNA sense strand
gaaagcacaggccacaaac

SEQ ID NO: 2070712 - RNA, 19 nt, Homo sapiens
  misc_RNA (1)...(19): siRNA sense strand
gcaguaggaggucuauugg

SEQ ID NO: 2070713 - RNA, 19 nt, Homo sapiens
  misc_RNA (1)...(19): siRNA sense strand
ucugacgucuccuucaaug

SEQ ID NO: 2070714 - RNA, 19 nt, Homo sapiens
  misc_RNA (1)...(19): siRNA sense strand
agucagaggcuccaccaaa

SEQ ID NO: 2070715 - RNA, 19 nt, Homo sapiens
  misc_RNA (1)...(19): siRNA sense strand
gguagugaauaucuugacu

SEQ ID NO: 2070716 - RNA, 19 nt, Homo sapiens
  misc_RNA (1)...(19): siRNA sense strand
ggcucucaaugacuuacua

SEQ ID NO: 2070717 - RNA, 19 nt, Homo sapiens
  misc_RNA (1)...(19): siRNA sense strand
caacccaaggaacagagua

SEQ ID NO: 2070718 - RNA, 19 nt, Homo sapiens
  misc_RNA (1)...(19): siRNA sense strand
ugugauggcguaugauaga

SEQ ID NO: 2070719 - RNA, 19 nt, Homo sapiens
  misc_RNA (1)...(19): siRNA sense strand
cauccaucauuucuucugu

SEQ ID NO: 2070720 - RNA, 19 nt, Homo sapiens
  misc_RNA (1)...(19): siRNA sense strand
ugugugauggcguaugaua

SEQ ID NO: 2070721 - RNA, 19 nt, Homo sapiens
  misc_RNA (1)...(19): siRNA sense strand
ucucaagugcacagucuuu

SEQ ID NO: 2070722 - RNA, 19 nt, Homo sapiens
  misc_RNA (1)...(19): siRNA sense strand
uccaucauuucuucuguga

SEQ ID NO: 2070723 - RNA, 19 nt, Homo sapiens
  misc_RNA (1)...(19): siRNA sense strand
uaauagcacagcuguccuu

SEQ ID NO: 2070724 - RNA, 19 nt, Homo sapiens
  misc_RNA (1)...(19): siRNA sense strand
ugauggcguaugauagaua

SEQ ID NO: 2070725 - RNA, 19 nt, Homo sapiens
  misc_RNA (1)...(19): siRNA sense strand
uuucuucugugaucucaau

SEQ ID NO: 2070726 - RNA, 19 nt, Homo sapiens
  misc_RNA (1)...(19): siRNA sense strand
ugcaguaggaggucuauug

SEQ ID NO: 2070727 - RNA, 19 nt, Homo sapiens
  misc_RNA (1)...(19): siRNA sense strand
ccacuguucugaagaucac

SEQ ID NO: 2070728 - RNA, 19 nt, Homo sapiens
  misc_RNA (1)...(19): siRNA sense strand
ucagaggcuccaccaaaug

SEQ ID NO: 2070729 - RNA, 19 nt, Homo sapiens
  misc_RNA (1)...(19): siRNA sense strand
gcuccgaugcugaauccuu

SEQ ID NO: 2070730 - RNA, 19 nt, Homo sapiens
  misc_RNA (1)...(19): siRNA sense strand
ucaaccaucauguauucaa

SEQ ID NO: 2070731 - RNA, 19 nt, Homo sapiens
  misc_RNA (1)...(19): siRNA sense strand
guucugaagaucaccucua

SEQ ID NO: 2070732 - RNA, 19 nt, Homo sapiens
  misc_RNA (1)...(19): siRNA sense strand
caaacacugggcucucaau

SEQ ID NO: 2070733 - RNA, 19 nt, Homo sapiens
  misc_RNA (1)...(19): siRNA sense strand
cuuauggacuuaucuucuc

SEQ ID NO: 2070734 - RNA, 19 nt, Homo sapiens
  misc_RNA (1)...(19): siRNA sense strand
gaggcuccaccaaaugaug

SEQ ID NO: 2070735 - RNA, 19 nt, Homo sapiens
  misc_RNA (1)...(19): siRNA sense strand
ucaagugcacagucuuuca

SEQ ID NO: 2070736 - RNA, 19 nt, Homo sapiens
  misc_RNA (1)...(19): siRNA sense strand
agaggggacuucagaaaau

SEQ ID NO: 2070737 - RNA, 19 nt, Homo sapiens
  misc_RNA (1)...(19): siRNA sense strand
cagccaucgccgucuauuu

SEQ ID NO: 2070738 - RNA, 19 nt, Homo sapiens
  misc_RNA (1)...(19): siRNA sense strand
caguggugguguuguuuua

SEQ ID NO: 2070739 - RNA, 19 nt, Homo sapiens
  misc_RNA (1)...(19): siRNA sense strand
uuuguugacaucugcuuua

SEQ ID NO: 2070740 - RNA, 19 nt, Homo sapiens
  misc_RNA (1)...(19): siRNA sense strand
ccuugucuguauccucgua

SEQ ID NO: 2070741 - RNA, 19 nt, Homo sapiens
  misc_RNA (1)...(19): siRNA sense strand
gugccuuuguguccagcua

SEQ ID NO: 2070742 - RNA, 19 nt, Homo sapiens
  misc_RNA (1)...(19): siRNA sense strand
acugggcucucaaugacuu

SEQ ID NO: 2070743 - RNA, 19 nt, Homo sapiens
  misc_RNA (1)...(19): siRNA sense strand
ccaaaugguagugaauauc

SEQ ID NO: 2070744 - RNA, 19 nt, Homo sapiens
  misc_RNA (1)...(19): siRNA sense strand
agccaucgccgucuauuuc

SEQ ID NO: 2070745 - RNA, 19 nt, Homo sapiens
  misc_RNA (1)...(19): siRNA sense strand
ugaagaucaccucuacuca

SEQ ID NO: 2070746 - RNA, 19 nt, Homo sapiens
  misc_RNA (1)...(19): siRNA sense strand
ucuccacuguucugaagau

SEQ ID NO: 2070747 - RNA, 19 nt, Homo sapiens
  misc_RNA (1)...(19): siRNA sense strand
ucacgccccuugucuguau

SEQ ID NO: 2070748 - RNA, 19 nt, Homo sapiens
  misc_RNA (1)...(19): siRNA sense strand
cuaagaugcugguuaauua

SEQ ID NO: 2070749 - RNA, 19 nt, Homo sapiens
  misc_RNA (1)...(19): siRNA sense strand
gagauacccuguccucaug

SEQ ID NO: 2070750 - RNA, 19 nt, Homo sapiens
  misc_RNA (1)...(19): siRNA sense strand
gcaauucccgggagauuaa

SEQ ID NO: 2070751 - RNA, 19 nt, Homo sapiens
  misc_RNA (1)...(19): siRNA sense strand
gugcacagcucaacacuuc

SEQ ID NO: 2070752 - RNA, 19 nt, Homo sapiens
  misc_RNA (1)...(19): siRNA sense strand
uuaauuaccugcuggauca

SEQ ID NO: 2070753 - RNA, 19 nt, Homo sapiens
  misc_RNA (1)...(19): siRNA sense strand
caacacuuccucuaccuua

SEQ ID NO: 2070754 - RNA, 19 nt, Homo sapiens
  misc_RNA (1)...(19): siRNA sense strand
caucaucucuaucaucuuc

SEQ ID NO: 2070755 - RNA, 19 nt, Homo sapiens
  misc_RNA (1)...(19): siRNA sense strand
gcugauuccuuucucugua

SEQ ID NO: 2070756 - RNA, 19 nt, Homo sapiens
  misc_RNA (1)...(19): siRNA sense strand
ugugggagcugaauucuuc

SEQ ID NO: 2070757 - RNA, 19 nt, Homo sapiens
  misc_RNA (1)...(19): siRNA sense strand
caaaguccucucuguguuu

SEQ ID NO: 2070758 - RNA, 19 nt, Homo sapiens
  misc_RNA (1)...(19): siRNA sense strand
gggcugccauguacaccua

SEQ ID NO: 2070759 - RNA, 19 nt, Homo sapiens
  misc_RNA (1)...(19): siRNA sense strand
ugccuaagaugcugguuaa

SEQ ID NO: 2070760 - RNA, 19 nt, Homo sapiens
  misc_RNA (1)...(19): siRNA sense strand
uuggauggcuuccuccuaa

SEQ ID NO: 2070761 - RNA, 19 nt, Homo sapiens
  misc_RNA (1)...(19): siRNA sense strand
gacaaaguccucucugugu

SEQ ID NO: 2070762 - RNA, 19 nt, Homo sapiens
  misc_RNA (1)...(19): siRNA sense strand
caccagcaguccugaaguu

SEQ ID NO: 2070763 - RNA, 19 nt, Homo sapiens
  misc_RNA (1)...(19): siRNA sense strand
acaaaguccucucuguguu

SEQ ID NO: 2070764 - RNA, 19 nt, Homo sapiens
  misc_RNA (1)...(19): siRNA sense strand
guucaaggguccucaaagg

SEQ ID NO: 2070765 - RNA, 19 nt, Homo sapiens
  misc_RNA (1)...(19): siRNA sense strand
gccaucaucucuaucaucu

SEQ ID NO: 2070766 - RNA, 19 nt, Homo sapiens
  misc_RNA (1)...(19): siRNA sense strand
ugacugugguguccuuguu

SEQ ID NO: 2070767 - RNA, 19 nt, Homo sapiens
  misc_RNA (1)...(19): siRNA sense strand
ccacuauugugccuaagau

SEQ ID NO: 2070768 - RNA, 19 nt, Homo sapiens
  misc_RNA (1)...(19): siRNA sense strand
ggagauuaaccacuucuuc

SEQ ID NO: 2070769 - RNA, 19 nt, Homo sapiens
  misc_RNA (1)...(19): siRNA sense strand
ccucagccaccuuuccuua

SEQ ID NO: 2070770 - RNA, 19 nt, Homo sapiens
  misc_RNA (1)...(19): siRNA sense strand
cuacagacuucacuuucau

SEQ ID NO: 2070771 - RNA, 19 nt, Homo sapiens
  misc_RNA (1)...(19): siRNA sense strand
cagccaccuuuccuuaauu

SEQ ID NO: 2070772 - RNA, 19 nt, Homo sapiens
  misc_RNA (1)...(19): siRNA sense strand
aaacagauuugcgccuuca

SEQ ID NO: 2070773 - RNA, 19 nt, Homo sapiens
  misc_RNA (1)...(19): siRNA sense strand
ccuaagaugcugguuaauu

SEQ ID NO: 2070774 - RNA, 19 nt, Homo sapiens
  misc_RNA (1)...(19): siRNA sense strand
ucagccaccuuuccuuaau

SEQ ID NO: 2070775 - RNA, 19 nt, Homo sapiens
  misc_RNA (1)...(19): siRNA sense strand
gagauuaaccacuucuucu

SEQ ID NO: 2070776 - RNA, 19 nt, Homo sapiens
  misc_RNA (1)...(19): siRNA sense strand
guacaacacauccucuaca

SEQ ID NO: 2070777 - RNA, 19 nt, Homo sapiens
  misc_RNA (1)...(19): siRNA sense strand
ugaugcugcugauuccuuu

SEQ ID NO: 2070778 - RNA, 19 nt, Homo sapiens
  misc_RNA (1)...(19): siRNA sense strand
ucuacagacuucacuuuca

SEQ ID NO: 2070779 - RNA, 19 nt, Homo sapiens
  misc_RNA (1)...(19): siRNA sense strand
ggugucaggaggugucuuu

SEQ ID NO: 2070780 - RNA, 19 nt, Homo sapiens
  misc_RNA (1)...(19): siRNA sense strand
gauuaaccacuucuucugu

SEQ ID NO: 2070781 - RNA, 19 nt, Homo sapiens
  misc_RNA (1)...(19): siRNA sense strand
ugacuacaguucagugcau

SEQ ID NO: 2070782 - RNA, 19 nt, Homo sapiens
  misc_RNA (1)...(19): siRNA sense strand
gaguacaacacauccucua

SEQ ID NO: 2070783 - RNA, 19 nt, Homo sapiens
  misc_RNA (1)...(19): siRNA sense strand
caagccagcccaggacaaa

SEQ ID NO: 2070784 - RNA, 19 nt, Homo sapiens
  misc_RNA (1)...(19): siRNA sense strand
gcaggaagaaggcauuugc

SEQ ID NO: 2070785 - RNA, 19 nt, Homo sapiens
  misc_RNA (1)...(19): siRNA sense strand
caccuuuccuuaauugaca

SEQ ID NO: 2070786 - RNA, 19 nt, Homo sapiens
  misc_RNA (1)...(19): siRNA sense strand
ccuacaugcugccacauuc

SEQ ID NO: 2070787 - RNA, 19 nt, Homo sapiens
  misc_RNA (1)...(19): siRNA sense strand
uuaaccacuucuucuguga

SEQ ID NO: 2070788 - RNA, 19 nt, Homo sapiens
  misc_RNA (1)...(19): siRNA sense strand
acagauuugcgccuucaua

SEQ ID NO: 2070789 - RNA, 19 nt, Homo sapiens
  misc_RNA (1)...(19): siRNA sense strand
cgggucuguuggaugauua

SEQ ID NO: 2070790 - RNA, 19 nt, Homo sapiens
  misc_RNA (1)...(19): siRNA sense strand
gugccuaagaugcugguua

SEQ ID NO: 2070791 - RNA, 19 nt, Homo sapiens
  misc_RNA (1)...(19): siRNA sense strand
gagcuuucccuucugcaau

SEQ ID NO: 2070792 - RNA, 19 nt, Homo sapiens
  misc_RNA (1)...(19): siRNA sense strand
acgagacagugauguaugu

SEQ ID NO: 2070793 - RNA, 19 nt, Homo sapiens
  misc_RNA (1)...(19): siRNA sense strand
ccaaugggguuaugaucuu

SEQ ID NO: 2070794 - RNA, 19 nt, Homo sapiens
  misc_RNA (1)...(19): siRNA sense strand
cccgggagauuaaccacuu

SEQ ID NO: 2070795 - RNA, 19 nt, Homo sapiens
  misc_RNA (1)...(19): siRNA sense strand
gucaggaggugucuuuuga

SEQ ID NO: 2070796 - RNA, 19 nt, Homo sapiens
  misc_RNA (1)...(19): siRNA sense strand
cacauccucuacagacuuc

SEQ ID NO: 2070797 - RNA, 19 nt, Homo sapiens
  misc_RNA (1)...(19): siRNA sense strand
cuacagccuuagaaacaag

SEQ ID NO: 2070798 - RNA, 19 nt, Homo sapiens
  misc_RNA (1)...(19): siRNA sense strand
ugauguaugugugcugugu

SEQ ID NO: 2070799 - RNA, 19 nt, Homo sapiens
  misc_RNA (1)...(19): siRNA sense strand
cagcucaacacuuccucua

SEQ ID NO: 2070800 - RNA, 19 nt, Homo sapiens
  misc_RNA (1)...(19): siRNA sense strand
accaugagcuuucccuucu

SEQ ID NO: 2070801 - RNA, 19 nt, Homo sapiens
  misc_RNA (1)...(19): siRNA sense strand
ccucuacagacuucacuuu

SEQ ID NO: 2070802 - RNA, 19 nt, Homo sapiens
  misc_RNA (1)...(19): siRNA sense strand
gcuauguggccauuugcaa

SEQ ID NO: 2070803 - RNA, 19 nt, Homo sapiens
  misc_RNA (1)...(19): siRNA sense strand
uuuccacuauugugccuaa

SEQ ID NO: 2070804 - RNA, 19 nt, Homo sapiens
  misc_RNA (1)...(19): siRNA sense strand
ucuacgagacagugaugua

SEQ ID NO: 2070805 - RNA, 19 nt, Homo sapiens
  misc_RNA (1)...(19): siRNA sense strand
uuugcaacccucugagaua

SEQ ID NO: 2070806 - RNA, 19 nt, Homo sapiens
  misc_RNA (1)...(19): siRNA sense strand
uacaacacauccucuacag

SEQ ID NO: 2070807 - RNA, 19 nt, Homo sapiens
  misc_RNA (1)...(19): siRNA sense strand
auguaugugugcuguguuu

SEQ ID NO: 2070808 - RNA, 19 nt, Homo sapiens
  misc_RNA (1)...(19): siRNA sense strand
gagacagugauguaugugu

SEQ ID NO: 2070809 - RNA, 19 nt, Homo sapiens
  misc_RNA (1)...(19): siRNA sense strand
guauauuuccacuauugug

SEQ ID NO: 2070810 - RNA, 19 nt, Homo sapiens
  misc_RNA (1)...(19): siRNA sense strand
gccacauucuuaccacaag

SEQ ID NO: 2070811 - RNA, 19 nt, Homo sapiens
  misc_RNA (1)...(19): siRNA sense strand
gcccgaauccugacuacag

SEQ ID NO: 2070812 - RNA, 19 nt, Homo sapiens
  misc_RNA (1)...(19): siRNA sense strand
uguaguccuugcuuccuau

SEQ ID NO: 2070813 - RNA, 19 nt, Homo sapiens
  misc_RNA (1)...(19): siRNA sense strand
gugcagacacagcccucua

SEQ ID NO: 2070814 - RNA, 19 nt, Homo sapiens
  misc_RNA (1)...(19): siRNA sense strand
ucaucucuaucaucuucuu

SEQ ID NO: 2070815 - RNA, 19 nt, Homo sapiens
  misc_RNA (1)...(19): siRNA sense strand
ugaccgcuauguggccauu

SEQ ID NO: 2070816 - RNA, 19 nt, Homo sapiens
  misc_RNA (1)...(19): siRNA sense strand
cauggccuaugaccgcuau

SEQ ID NO: 2070817 - RNA, 19 nt, Homo sapiens
  misc_RNA (1)...(19): siRNA sense strand
gauacccuguccucaugag

SEQ ID NO: 2070818 - RNA, 19 nt, Homo sapiens
  misc_RNA (1)...(19): siRNA sense strand
ccgcacugauggccaaugg

SEQ ID NO: 2070819 - RNA, 19 nt, Homo sapiens
  misc_RNA (1)...(19): siRNA sense strand
acaugcugccacauucuua

SEQ ID NO: 2070820 - RNA, 19 nt, Homo sapiens
  misc_RNA (1)...(19): siRNA sense strand
agccaccuuuccuuaauug

SEQ ID NO: 2070821 - RNA, 19 nt, Homo sapiens
  misc_RNA (1)...(19): siRNA sense strand
gggcaggaagaaggcauuu

SEQ ID NO: 2070822 - RNA, 19 nt, Homo sapiens
  misc_RNA (1)...(19): siRNA sense strand
cuguaguccuugcuuccua

SEQ ID NO: 2070823 - RNA, 19 nt, Homo sapiens
  misc_RNA (1)...(19): siRNA sense strand
cuacgagacagugauguau

SEQ ID NO: 2070824 - RNA, 19 nt, Homo sapiens
  misc_RNA (1)...(19): siRNA sense strand
gauuugcgccuucauacac

SEQ ID NO: 2070825 - RNA, 19 nt, Homo sapiens
  misc_RNA (1)...(19): siRNA sense strand
uuccuuaauugacaugaug

SEQ ID NO: 2070826 - RNA, 19 nt, Homo sapiens
  misc_RNA (1)...(19): siRNA sense strand
ggagcugacugcaauauuu

SEQ ID NO: 2070827 - RNA, 19 nt, Homo sapiens
  misc_RNA (1)...(19): siRNA sense strand
gcuaauaggugcauacaga

SEQ ID NO: 2070828 - RNA, 19 nt, Homo sapiens
  misc_RNA (1)...(19): siRNA sense strand
ggaugaaguuggaagauuu

SEQ ID NO: 2070829 - RNA, 19 nt, Homo sapiens
  misc_RNA (1)...(19): siRNA sense strand
cagagacuauccuuaaaua

SEQ ID NO: 2070830 - RNA, 19 nt, Homo sapiens
  misc_RNA (1)...(19): siRNA sense strand
caaaagugcugcagaguua

SEQ ID NO: 2070831 - RNA, 19 nt, Homo sapiens
  misc_RNA (1)...(19): siRNA sense strand
gaagaaccauuuagagaca

SEQ ID NO: 2070832 - RNA, 19 nt, Homo sapiens
  misc_RNA (1)...(19): siRNA sense strand
gaagaaauaccacuggauu

SEQ ID NO: 2070833 - RNA, 19 nt, Homo sapiens
  misc_RNA (1)...(19): siRNA sense strand
ccaauaaacucuucauaag

SEQ ID NO: 2070834 - RNA, 19 nt, Homo sapiens
  misc_RNA (1)...(19): siRNA sense strand
gcagaggaaucaagacaga

SEQ ID NO: 2070835 - RNA, 19 nt, Homo sapiens
  misc_RNA (1)...(19): siRNA sense strand
gaagagacaauaaaggauu

SEQ ID NO: 2070836 - RNA, 19 nt, Homo sapiens
  misc_RNA (1)...(19): siRNA sense strand
guuaagggaugcugugaaa

SEQ ID NO: 2070837 - RNA, 19 nt, Homo sapiens
  misc_RNA (1)...(19): siRNA sense strand
cagaugcaauuccaaguaa

SEQ ID NO: 2070838 - RNA, 19 nt, Homo sapiens
  misc_RNA (1)...(19): siRNA sense strand
gagaagauccuggacauga

SEQ ID NO: 2070839 - RNA, 19 nt, Homo sapiens
  misc_RNA (1)...(19): siRNA sense strand
aagagaagaucccaaagaa

SEQ ID NO: 2070840 - RNA, 19 nt, Homo sapiens
  misc_RNA (1)...(19): siRNA sense strand
ggaaggauauucagagacu

SEQ ID NO: 2070841 - RNA, 19 nt, Homo sapiens
  misc_RNA (1)...(19): siRNA sense strand
gaaaagagccaaaaggauu

SEQ ID NO: 2070842 - RNA, 19 nt, Homo sapiens
  misc_RNA (1)...(19): siRNA sense strand
uuacaaaguucgcuggaaa

SEQ ID NO: 2070843 - RNA, 19 nt, Homo sapiens
  misc_RNA (1)...(19): siRNA sense strand
cgacagcacugaggaguug

SEQ ID NO: 2070844 - RNA, 19 nt, Homo sapiens
  misc_RNA (1)...(19): siRNA sense strand
gcauggaccugcaguugga

SEQ ID NO: 2070845 - RNA, 19 nt, Homo sapiens
  misc_RNA (1)...(19): siRNA sense strand
gaagaaaacugugccuaaa

SEQ ID NO: 2070846 - RNA, 19 nt, Homo sapiens
  misc_RNA (1)...(19): siRNA sense strand
gaaaacaaacagucacuua

SEQ ID NO: 2070847 - RNA, 19 nt, Homo sapiens
  misc_RNA (1)...(19): siRNA sense strand
uaucuuccaugcaaacuuu

SEQ ID NO: 2070848 - RNA, 19 nt, Homo sapiens
  misc_RNA (1)...(19): siRNA sense strand
gcgaagcagucuaacaaug

SEQ ID NO: 2070849 - RNA, 19 nt, Homo sapiens
  misc_RNA (1)...(19): siRNA sense strand
aauauaaccuggaccaaga

SEQ ID NO: 2070850 - RNA, 19 nt, Homo sapiens
  misc_RNA (1)...(19): siRNA sense strand
gcaaagcaauggugagacu

SEQ ID NO: 2070851 - RNA, 19 nt, Homo sapiens
  misc_RNA (1)...(19): siRNA sense strand
gguggaaucugaaucaagu

SEQ ID NO: 2070852 - RNA, 19 nt, Homo sapiens
  misc_RNA (1)...(19): siRNA sense strand
ggaagaaaauugcagagaa

SEQ ID NO: 2070853 - RNA, 19 nt, Homo sapiens
  misc_RNA (1)...(19): siRNA sense strand
gaagcagucuaacaaugug

SEQ ID NO: 2070854 - RNA, 19 nt, Homo sapiens
  misc_RNA (1)...(19): siRNA sense strand
uaacaacaguggcuauucu

SEQ ID NO: 2070855 - RNA, 19 nt, Homo sapiens
  misc_RNA (1)...(19): siRNA sense strand
acaggaagcuagagaacaa

SEQ ID NO: 2070856 - RNA, 19 nt, Homo sapiens
  misc_RNA (1)...(19): siRNA sense strand
ggacggagaggauguguuc

SEQ ID NO: 2070857 - RNA, 19 nt, Homo sapiens
  misc_RNA (1)...(19): siRNA sense strand
caagagaagaucccaaaga

SEQ ID NO: 2070858 - RNA, 19 nt, Homo sapiens
  misc_RNA (1)...(19): siRNA sense strand
gcaugauucugacaaggaa

SEQ ID NO: 2070859 - RNA, 19 nt, Homo sapiens
  misc_RNA (1)...(19): siRNA sense strand
gagaagaucccaaagaaaa

SEQ ID NO: 2070860 - RNA, 19 nt, Homo sapiens
  misc_RNA (1)...(19): siRNA sense strand
ggaggacuguaaagaagug

SEQ ID NO: 2070861 - RNA, 19 nt, Homo sapiens
  misc_RNA (1)...(19): siRNA sense strand
caaacagucacuuaaagaa

SEQ ID NO: 2070862 - RNA, 19 nt, Homo sapiens
  misc_RNA (1)...(19): siRNA sense strand
gagaaaggcugaggacacu

SEQ ID NO: 2070863 - RNA, 19 nt, Homo sapiens
  misc_RNA (1)...(19): siRNA sense strand
gagaaacaccagagacgaa

SEQ ID NO: 2070864 - RNA, 19 nt, Homo sapiens
  misc_RNA (1)...(19): siRNA sense strand
ccaagcagaugagaauuca

SEQ ID NO: 2070865 - RNA, 19 nt, Homo sapiens
  misc_RNA (1)...(19): siRNA sense strand
agagacacuuucaagagua

SEQ ID NO: 2070866 - RNA, 19 nt, Homo sapiens
  misc_RNA (1)...(19): siRNA sense strand
cagaagagacaauaaagga

SEQ ID NO: 2070867 - RNA, 19 nt, Homo sapiens
  misc_RNA (1)...(19): siRNA sense strand
cccaauaaacucuucauaa

SEQ ID NO: 2070868 - RNA, 19 nt, Homo sapiens
  misc_RNA (1)...(19): siRNA sense strand
caggaaggauauucagaga

SEQ ID NO: 2070869 - RNA, 19 nt, Homo sapiens
  misc_RNA (1)...(19): siRNA sense strand
gagacgaaacggauacuug

SEQ ID NO: 2070870 - RNA, 19 nt, Homo sapiens
  misc_RNA (1)...(19): siRNA sense strand
ccaaagcagucaggaagga

SEQ ID NO: 2070871 - RNA, 19 nt, Homo sapiens
  misc_RNA (1)...(19): siRNA sense strand
gaaucaagacagaagcaaa

SEQ ID NO: 2070872 - RNA, 19 nt, Homo sapiens
  misc_RNA (1)...(19): siRNA sense strand
gagaggagcggaggccuuu

SEQ ID NO: 2070873 - RNA, 19 nt, Homo sapiens
  misc_RNA (1)...(19): siRNA sense strand
gaaucugaaucaaguguac

SEQ ID NO: 2070874 - RNA, 19 nt, Homo sapiens
  misc_RNA (1)...(19): siRNA sense strand
aagguuaaguugcuaauag

SEQ ID NO: 2070875 - RNA, 19 nt, Homo sapiens
  misc_RNA (1)...(19): siRNA sense strand
ccacagaacauaccagaag

SEQ ID NO: 2070876 - RNA, 19 nt, Homo sapiens
  misc_RNA (1)...(19): siRNA sense strand
ugucaaagcaccagaauag

SEQ ID NO: 2070877 - RNA, 19 nt, Homo sapiens
  misc_RNA (1)...(19): siRNA sense strand
gaaggauauucagagacua

SEQ ID NO: 2070878 - RNA, 19 nt, Homo sapiens
  misc_RNA (1)...(19): siRNA sense strand
uagagacacuuucaagagu

SEQ ID NO: 2070879 - RNA, 19 nt, Homo sapiens
  misc_RNA (1)...(19): siRNA sense strand
gaaugacacuggugaugcu

SEQ ID NO: 2070880 - RNA, 19 nt, Homo sapiens
  misc_RNA (1)...(19): siRNA sense strand
gcaauuccaaguaaugugu

SEQ ID NO: 2070881 - RNA, 19 nt, Homo sapiens
  misc_RNA (1)...(19): siRNA sense strand
agaagauccuggacaugaa

SEQ ID NO: 2070882 - RNA, 19 nt, Homo sapiens
  misc_RNA (1)...(19): siRNA sense strand
guaaauguccagcaaagca

SEQ ID NO: 2070883 - RNA, 19 nt, Homo sapiens
  misc_RNA (1)...(19): siRNA sense strand
uggaauggaugaaguugga

SEQ ID NO: 2070884 - RNA, 19 nt, Homo sapiens
  misc_RNA (1)...(19): siRNA sense strand
gaaaggcugaggacacuag

SEQ ID NO: 2070885 - RNA, 19 nt, Homo sapiens
  misc_RNA (1)...(19): siRNA sense strand
gagacuauccuuaaauaac

SEQ ID NO: 2070886 - RNA, 19 nt, Homo sapiens
  misc_RNA (1)...(19): siRNA sense strand
uagcagaagagacaauaaa

SEQ ID NO: 2070887 - RNA, 19 nt, Homo sapiens
  misc_RNA (1)...(19): siRNA sense strand
aaccauagacgaucacaaa

SEQ ID NO: 2070888 - RNA, 19 nt, Homo sapiens
  misc_RNA (1)...(19): siRNA sense strand
gagaagcugaugccuguau

SEQ ID NO: 2070889 - RNA, 19 nt, Homo sapiens
  misc_RNA (1)...(19): siRNA sense strand
ccaaagaagaacuaaagga

SEQ ID NO: 2070890 - RNA, 19 nt, Homo sapiens
  misc_RNA (1)...(19): siRNA sense strand
cgaagcagucuaacaaugu

SEQ ID NO: 2070891 - RNA, 19 nt, Homo sapiens
  misc_RNA (1)...(19): siRNA sense strand
gaacaggaagcuagagaac

SEQ ID NO: 2070892 - RNA, 19 nt, Homo sapiens
  misc_RNA (1)...(19): siRNA sense strand
gaagagaaacaaaacacua

SEQ ID NO: 2070893 - RNA, 19 nt, Homo sapiens
  misc_RNA (1)...(19): siRNA sense strand
cgacagcagagaagagaaa

SEQ ID NO: 2070894 - RNA, 19 nt, Homo sapiens
  misc_RNA (1)...(19): siRNA sense strand
gagagcuccuuggaaaguu

SEQ ID NO: 2070895 - RNA, 19 nt, Homo sapiens
  misc_RNA (1)...(19): siRNA sense strand
gagacacuuucaagaguag

SEQ ID NO: 2070896 - RNA, 19 nt, Homo sapiens
  misc_RNA (1)...(19): siRNA sense strand
ucaaagcaccagaauagug

SEQ ID NO: 2070897 - RNA, 19 nt, Homo sapiens
  misc_RNA (1)...(19): siRNA sense strand
aagaggaaauucagacauc

SEQ ID NO: 2070898 - RNA, 19 nt, Homo sapiens
  misc_RNA (1)...(19): siRNA sense strand
gaugaaggccuguaaaaga

SEQ ID NO: 2070899 - RNA, 19 nt, Homo sapiens
  misc_RNA (1)...(19): siRNA sense strand
aaacggauacuugggcaua

SEQ ID NO: 2070900 - RNA, 19 nt, Homo sapiens
  misc_RNA (1)...(19): siRNA sense strand
ggaggauaccgaugucaga

SEQ ID NO: 2070901 - RNA, 19 nt, Homo sapiens
  misc_RNA (1)...(19): siRNA sense strand
aagcuguaguucugaauga

SEQ ID NO: 2070902 - RNA, 19 nt, Homo sapiens
  misc_RNA (1)...(19): siRNA sense strand
auacauugcugcagaaggu

SEQ ID NO: 2070903 - RNA, 19 nt, Homo sapiens
  misc_RNA (1)...(19): siRNA sense strand
gagaacaggaagcuagaga

SEQ ID NO: 2070904 - RNA, 19 nt, Homo sapiens
  misc_RNA (1)...(19): siRNA sense strand
gaagaucccaaagaaaaua

SEQ ID NO: 2070905 - RNA, 19 nt, Homo sapiens
  misc_RNA (1)...(19): siRNA sense strand
gcuguaguucugaaugaua

SEQ ID NO: 2070906 - RNA, 19 nt, Homo sapiens
  misc_RNA (1)...(19): siRNA sense strand
gcucuggcauccugcuguu

SEQ ID NO: 2070907 - RNA, 19 nt, Homo sapiens
  misc_RNA (1)...(19): siRNA sense strand
gcaccuugaugggaaagau

SEQ ID NO: 2070908 - RNA, 19 nt, Homo sapiens
  misc_RNA (1)...(19): siRNA sense strand
ggaaucugaaucaagugua

SEQ ID NO: 2070909 - RNA, 19 nt, Homo sapiens
  misc_RNA (1)...(19): siRNA sense strand
aaucccagguggaaucuga

SEQ ID NO: 2070910 - RNA, 19 nt, Homo sapiens
  misc_RNA (1)...(19): siRNA sense strand
uggaugaaguuggaagauu

SEQ ID NO: 2070911 - RNA, 19 nt, Homo sapiens
  misc_RNA (1)...(19): siRNA sense strand
cuguaguucugaaugauaa

SEQ ID NO: 2070912 - RNA, 19 nt, Homo sapiens
  misc_RNA (1)...(19): siRNA sense strand
gaagaaaauugcagagaac

SEQ ID NO: 2070913 - RNA, 19 nt, Homo sapiens
  misc_RNA (1)...(19): siRNA sense strand
gaaaauugcagagaacaaa

SEQ ID NO: 2070914 - RNA, 19 nt, Homo sapiens
  misc_RNA (1)...(19): siRNA sense strand
auucagagacuauccuuaa

SEQ ID NO: 2070915 - RNA, 19 nt, Homo sapiens
  misc_RNA (1)...(19): siRNA sense strand
acagaugcaauuccaagua

SEQ ID NO: 2070916 - RNA, 19 nt, Homo sapiens
  misc_RNA (1)...(19): siRNA sense strand
acaaacagucacuuaaaga

SEQ ID NO: 2070917 - RNA, 19 nt, Homo sapiens
  misc_RNA (1)...(19): siRNA sense strand
gagagaacaggaagcuaga

SEQ ID NO: 2070918 - RNA, 19 nt, Homo sapiens
  misc_RNA (1)...(19): siRNA sense strand
ggaagaaauaccacuggau

SEQ ID NO: 2070919 - RNA, 19 nt, Homo sapiens
  misc_RNA (1)...(19): siRNA sense strand
gaugcaauuccaaguaaug

SEQ ID NO: 2070920 - RNA, 19 nt, Homo sapiens
  misc_RNA (1)...(19): siRNA sense strand
ggaguagugggcgaagaua

SEQ ID NO: 2070921 - RNA, 19 nt, Homo sapiens
  misc_RNA (1)...(19): siRNA sense strand
aaauuucagcuuccuguuu

SEQ ID NO: 2070922 - RNA, 19 nt, Homo sapiens
  misc_RNA (1)...(19): siRNA sense strand
gcauccugcuguuuaucuu

SEQ ID NO: 2070923 - RNA, 19 nt, Homo sapiens
  misc_RNA (1)...(19): siRNA sense strand
gcagaagagacaauaaagg

SEQ ID NO: 2070924 - RNA, 19 nt, Homo sapiens
  misc_RNA (1)...(19): siRNA sense strand
gcagaugagaauucagaug

SEQ ID NO: 2070925 - RNA, 19 nt, Homo sapiens
  misc_RNA (1)...(19): siRNA sense strand
aacaaacagucacuuaaag

SEQ ID NO: 2070926 - RNA, 19 nt, Homo sapiens
  misc_RNA (1)...(19): siRNA sense strand
caaagacccuugacaauga

SEQ ID NO: 2070927 - RNA, 19 nt, Homo sapiens
  misc_RNA (1)...(19): siRNA sense strand
gaaacuaagcccaucauua

SEQ ID NO: 2070928 - RNA, 19 nt, Homo sapiens
  misc_RNA (1)...(19): siRNA sense strand
gcaaagagcaggauucuga

SEQ ID NO: 2070929 - RNA, 19 nt, Homo sapiens
  misc_RNA (1)...(19): siRNA sense strand
gcaaagaggucaccacauc

SEQ ID NO: 2070930 - RNA, 19 nt, Homo sapiens
  misc_RNA (1)...(19): siRNA sense strand
gaagaggccuugaggaaga

SEQ ID NO: 2070931 - RNA, 19 nt, Homo sapiens
  misc_RNA (1)...(19): siRNA sense strand
caacagaaaugcagcaaga

SEQ ID NO: 2070932 - RNA, 19 nt, Homo sapiens
  misc_RNA (1)...(19): siRNA sense strand
aaagaaagaugcucagaaa

SEQ ID NO: 2070933 - RNA, 19 nt, Homo sapiens
  misc_RNA (1)...(19): siRNA sense strand
cgaaggaaaucccaaguaa

SEQ ID NO: 2070934 - RNA, 19 nt, Homo sapiens
  misc_RNA (1)...(19): siRNA sense strand
ggaggaaugugaugaguga

SEQ ID NO: 2070935 - RNA, 19 nt, Homo sapiens
  misc_RNA (1)...(19): siRNA sense strand
ggacauccuuucagucaaa

SEQ ID NO: 2070936 - RNA, 19 nt, Homo sapiens
  misc_RNA (1)...(19): siRNA sense strand
aaagaaagcuuccaguuca

SEQ ID NO: 2070937 - RNA, 19 nt, Homo sapiens
  misc_RNA (1)...(19): siRNA sense strand
gaaagaugcucagaaagau

SEQ ID NO: 2070938 - RNA, 19 nt, Homo sapiens
  misc_RNA (1)...(19): siRNA sense strand
gaccaagucugucgaguug

SEQ ID NO: 2070939 - RNA, 19 nt, Homo sapiens
  misc_RNA (1)...(19): siRNA sense strand
gaauugauguccacucaug

SEQ ID NO: 2070940 - RNA, 19 nt, Homo sapiens
  misc_RNA (1)...(19): siRNA sense strand
aaacuaagcccaucauuau

SEQ ID NO: 2070941 - RNA, 19 nt, Homo sapiens
  misc_RNA (1)...(19): siRNA sense strand
ccacaaaguccaagaauug

SEQ ID NO: 2070942 - RNA, 19 nt, Homo sapiens
  misc_RNA (1)...(19): siRNA sense strand
gaacgaagaccucaaagca

SEQ ID NO: 2070943 - RNA, 19 nt, Homo sapiens
  misc_RNA (1)...(19): siRNA sense strand
gcaaagacccuugacaaug

SEQ ID NO: 2070944 - RNA, 19 nt, Homo sapiens
  misc_RNA (1)...(19): siRNA sense strand
uaaacuggaagcacaauua

SEQ ID NO: 2070945 - RNA, 19 nt, Homo sapiens
  misc_RNA (1)...(19): siRNA sense strand
gcaaauacacgagcaagaa

SEQ ID NO: 2070946 - RNA, 19 nt, Homo sapiens
  misc_RNA (1)...(19): siRNA sense strand
gaaaugcagcaagaaauaa

SEQ ID NO: 2070947 - RNA, 19 nt, Homo sapiens
  misc_RNA (1)...(19): siRNA sense strand
ggucagccaugcuccuuaa

SEQ ID NO: 2070948 - RNA, 19 nt, Homo sapiens
  misc_RNA (1)...(19): siRNA sense strand
uaaaagggaugcugaaauu

SEQ ID NO: 2070949 - RNA, 19 nt, Homo sapiens
  misc_RNA (1)...(19): siRNA sense strand
gaaugaaagugcccuugug

SEQ ID NO: 2070950 - RNA, 19 nt, Homo sapiens
  misc_RNA (1)...(19): siRNA sense strand
aaagugcccuugugaaaga

SEQ ID NO: 2070951 - RNA, 19 nt, Homo sapiens
  misc_RNA (1)...(19): siRNA sense strand
gaaagcaccucagcaagag

SEQ ID NO: 2070952 - RNA, 19 nt, Homo sapiens
  misc_RNA (1)...(19): siRNA sense strand
gaacauuauccuagaagaa

SEQ ID NO: 2070953 - RNA, 19 nt, Homo sapiens
  misc_RNA (1)...(19): siRNA sense strand
gagaugaaauuggaaauac

SEQ ID NO: 2070954 - RNA, 19 nt, Homo sapiens
  misc_RNA (1)...(19): siRNA sense strand
gaaaauaaccacacaguug

SEQ ID NO: 2070955 - RNA, 19 nt, Homo sapiens
  misc_RNA (1)...(19): siRNA sense strand
gaggaggcauucuuuggaa

SEQ ID NO: 2070956 - RNA, 19 nt, Homo sapiens
  misc_RNA (1)...(19): siRNA sense strand
gaacugaggaggcauucuu

SEQ ID NO: 2070957 - RNA, 19 nt, Homo sapiens
  misc_RNA (1)...(19): siRNA sense strand
ggagaugaaauuggaaaua

SEQ ID NO: 2070958 - RNA, 19 nt, Homo sapiens
  misc_RNA (1)...(19): siRNA sense strand
gaaaugaagaaucagcaaa

SEQ ID NO: 2070959 - RNA, 19 nt, Homo sapiens
  misc_RNA (1)...(19): siRNA sense strand
gggaauaaggacaguguua

SEQ ID NO: 2070960 - RNA, 19 nt, Homo sapiens
  misc_RNA (1)...(19): siRNA sense strand
acagggcucugcuuccuua

SEQ ID NO: 2070961 - RNA, 19 nt, Homo sapiens
  misc_RNA (1)...(19): siRNA sense strand
ggaaauacaaauucaagug

SEQ ID NO: 2070962 - RNA, 19 nt, Homo sapiens
  misc_RNA (1)...(19): siRNA sense strand
ggagaacuaucagguugaa

SEQ ID NO: 2070963 - RNA, 19 nt, Homo sapiens
  misc_RNA (1)...(19): siRNA sense strand
ccaaagugccugacaagaa

SEQ ID NO: 2070964 - RNA, 19 nt, Homo sapiens
  misc_RNA (1)...(19): siRNA sense strand
agagggaacucaaugaaga

SEQ ID NO: 2070965 - RNA, 19 nt, Homo sapiens
  misc_RNA (1)...(19): siRNA sense strand
gaaggaaaucccaaguaaa

SEQ ID NO: 2070966 - RNA, 19 nt, Homo sapiens
  misc_RNA (1)...(19): siRNA sense strand
gcagaacgaagaccucaaa

SEQ ID NO: 2070967 - RNA, 19 nt, Homo sapiens
  misc_RNA (1)...(19): siRNA sense strand
uaaggaauuucaccaacuu

SEQ ID NO: 2070968 - RNA, 19 nt, Homo sapiens
  misc_RNA (1)...(19): siRNA sense strand
caaagugccugacaagaac

SEQ ID NO: 2070969 - RNA, 19 nt, Homo sapiens
  misc_RNA (1)...(19): siRNA sense strand
gaaugccaaucaaaucaug

SEQ ID NO: 2070970 - RNA, 19 nt, Homo sapiens
  misc_RNA (1)...(19): siRNA sense strand
gcucagaaagaucaagaua

SEQ ID NO: 2070971 - RNA, 19 nt, Homo sapiens
  misc_RNA (1)...(19): siRNA sense strand
ggucuucaguuccggauug

SEQ ID NO: 2070972 - RNA, 19 nt, Homo sapiens
  misc_RNA (1)...(19): siRNA sense strand
caagcuggaucugaaauau

SEQ ID NO: 2070973 - RNA, 19 nt, Homo sapiens
  misc_RNA (1)...(19): siRNA sense strand
augaagagcugcuuuggaa

SEQ ID NO: 2070974 - RNA, 19 nt, Homo sapiens
  misc_RNA (1)...(19): siRNA sense strand
ugaaagugcccuugugaaa

SEQ ID NO: 2070975 - RNA, 19 nt, Homo sapiens
  misc_RNA (1)...(19): siRNA sense strand
agaaaugcagcaagaaaua

SEQ ID NO: 2070976 - RNA, 19 nt, Homo sapiens
  misc_RNA (1)...(19): siRNA sense strand
ccuaagaaaucauguuaca

SEQ ID NO: 2070977 - RNA, 19 nt, Homo sapiens
  misc_RNA (1)...(19): siRNA sense strand
ggugagaaguugggugaaa

SEQ ID NO: 2070978 - RNA, 19 nt, Homo sapiens
  misc_RNA (1)...(19): siRNA sense strand
uaaaccaucuaccucagaa

SEQ ID NO: 2070979 - RNA, 19 nt, Homo sapiens
  misc_RNA (1)...(19): siRNA sense strand
augcuaaccuccaggaaua

SEQ ID NO: 2070980 - RNA, 19 nt, Homo sapiens
  misc_RNA (1)...(19): siRNA sense strand
agaaagaugcucagaaaga

SEQ ID NO: 2070981 - RNA, 19 nt, Homo sapiens
  misc_RNA (1)...(19): siRNA sense strand
gaaugcagauaagauugaa

SEQ ID NO: 2070982 - RNA, 19 nt, Homo sapiens
  misc_RNA (1)...(19): siRNA sense strand
uaaggacaguguuaugguu

SEQ ID NO: 2070983 - RNA, 19 nt, Homo sapiens
  misc_RNA (1)...(19): siRNA sense strand
gauggugucuggaaucaag

SEQ ID NO: 2070984 - RNA, 19 nt, Homo sapiens
  misc_RNA (1)...(19): siRNA sense strand
uaaagaaagcuuccaguuc

SEQ ID NO: 2070985 - RNA, 19 nt, Homo sapiens
  misc_RNA (1)...(19): siRNA sense strand
ccaccagucucuacaguuc

SEQ ID NO: 2070986 - RNA, 19 nt, Homo sapiens
  misc_RNA (1)...(19): siRNA sense strand
ggcccaagaucaucaccua

SEQ ID NO: 2070987 - RNA, 19 nt, Homo sapiens
  misc_RNA (1)...(19): siRNA sense strand
ugaagcagguauuagaaau

SEQ ID NO: 2070988 - RNA, 19 nt, Homo sapiens
  misc_RNA (1)...(19): siRNA sense strand
ccacacaguugccaucaca

SEQ ID NO: 2070989 - RNA, 19 nt, Homo sapiens
  misc_RNA (1)...(19): siRNA sense strand
caaagaaagaugcucagaa

SEQ ID NO: 2070990 - RNA, 19 nt, Homo sapiens
  misc_RNA (1)...(19): siRNA sense strand
ggaaagagugugcgucauc

SEQ ID NO: 2070991 - RNA, 19 nt, Homo sapiens
  misc_RNA (1)...(19): siRNA sense strand
gacccgaccaguccgauua

SEQ ID NO: 2070992 - RNA, 19 nt, Homo sapiens
  misc_RNA (1)...(19): siRNA sense strand
ggaauauguugagaaggaa

SEQ ID NO: 2070993 - RNA, 19 nt, Homo sapiens
  misc_RNA (1)...(19): siRNA sense strand
gcacuuggaagaagacaug

SEQ ID NO: 2070994 - RNA, 19 nt, Homo sapiens
  misc_RNA (1)...(19): siRNA sense strand
cccaguggcuccuaagaaa

SEQ ID NO: 2070995 - RNA, 19 nt, Homo sapiens
  misc_RNA (1)...(19): siRNA sense strand
caaucgaacuugcaaacau

SEQ ID NO: 2070996 - RNA, 19 nt, Homo sapiens
  misc_RNA (1)...(19): siRNA sense strand
caaccucuaugagaaauuc

SEQ ID NO: 2070997 - RNA, 19 nt, Homo sapiens
  misc_RNA (1)...(19): siRNA sense strand
caaauacacgagcaagaaa

SEQ ID NO: 2070998 - RNA, 19 nt, Homo sapiens
  misc_RNA (1)...(19): siRNA sense strand
ccaggaauauguugagaag

SEQ ID NO: 2070999 - RNA, 19 nt, Homo sapiens
  misc_RNA (1)...(19): siRNA sense strand
caugugaccugggagauga

SEQ ID NO: 2071000 - RNA, 19 nt, Homo sapiens
  misc_RNA (1)...(19): siRNA sense strand
aggaauauguugagaagga

SEQ ID NO: 2071001 - RNA, 19 nt, Homo sapiens
  misc_RNA (1)...(19): siRNA sense strand
aagcagguauuagaaauga

SEQ ID NO: 2071002 - RNA, 19 nt, Homo sapiens
  misc_RNA (1)...(19): siRNA sense strand
guuccgauccuucagauuu

SEQ ID NO: 2071003 - RNA, 19 nt, Homo sapiens
  misc_RNA (1)...(19): siRNA sense strand
ugaaagcaccucagcaaga

SEQ ID NO: 2071004 - RNA, 19 nt, Homo sapiens
  misc_RNA (1)...(19): siRNA sense strand
gagauacgaaugccaauca

SEQ ID NO: 2071005 - RNA, 19 nt, Homo sapiens
  misc_RNA (1)...(19): siRNA sense strand
ggaccaagucugucgaguu

SEQ ID NO: 2071006 - RNA, 19 nt, Homo sapiens
  misc_RNA (1)...(19): siRNA sense strand
uggaaaagcuggcagaaaa

SEQ ID NO: 2071007 - RNA, 19 nt, Homo sapiens
  misc_RNA (1)...(19): siRNA sense strand
gcagcaagaaauaauaaug

SEQ ID NO: 2071008 - RNA, 19 nt, Homo sapiens
  misc_RNA (1)...(19): siRNA sense strand
accaaaggguugacaauga

SEQ ID NO: 2071009 - RNA, 19 nt, Homo sapiens
  misc_RNA (1)...(19): siRNA sense strand
caccacaucuguugcugaa

SEQ ID NO: 2071010 - RNA, 19 nt, Homo sapiens
  misc_RNA (1)...(19): siRNA sense strand
caaaguggccgcucagaag

SEQ ID NO: 2071011 - RNA, 19 nt, Homo sapiens
  misc_RNA (1)...(19): siRNA sense strand
guggagagaggcacagaua

SEQ ID NO: 2071012 - RNA, 19 nt, Homo sapiens
  misc_RNA (1)...(19): siRNA sense strand
ucagaaagaucaagauacg

SEQ ID NO: 2071013 - RNA, 19 nt, Homo sapiens
  misc_RNA (1)...(19): siRNA sense strand
gaggagaggacagaaacua

SEQ ID NO: 2071014 - RNA, 19 nt, Homo sapiens
  misc_RNA (1)...(19): siRNA sense strand
ggaaaucccaaguaaacug

SEQ ID NO: 2071015 - RNA, 19 nt, Homo sapiens
  misc_RNA (1)...(19): siRNA sense strand
gcucugaauuugacuuugg

SEQ ID NO: 2071016 - RNA, 19 nt, Homo sapiens
  misc_RNA (1)...(19): siRNA sense strand
gauguccacucaugagcuu

SEQ ID NO: 2071017 - RNA, 19 nt, Homo sapiens
  misc_RNA (1)...(19): siRNA sense strand
ccaugaugcugcucuccua

SEQ ID NO: 2071018 - RNA, 19 nt, Homo sapiens
  misc_RNA (1)...(19): siRNA sense strand
gaaagugcccuugugaaag

SEQ ID NO: 2071019 - RNA, 19 nt, Homo sapiens
  misc_RNA (1)...(19): siRNA sense strand
ccaaaggguugacaaugag

SEQ ID NO: 2071020 - RNA, 19 nt, Homo sapiens
  misc_RNA (1)...(19): siRNA sense strand
gccaucugcugaacaguga

SEQ ID NO: 2071021 - RNA, 19 nt, Homo sapiens
  misc_RNA (1)...(19): siRNA sense strand
gaaggaaacccaggagaag

SEQ ID NO: 2071022 - RNA, 19 nt, Homo sapiens
  misc_RNA (1)...(19): siRNA sense strand
aauccaaucucccgaaauc

SEQ ID NO: 2071023 - RNA, 19 nt, Homo sapiens
  misc_RNA (1)...(19): siRNA sense strand
guucaauccuucuguugga

SEQ ID NO: 2071024 - RNA, 19 nt, Homo sapiens
  misc_RNA (1)...(19): siRNA sense strand
gaagagaagagaggaguca

SEQ ID NO: 2071025 - RNA, 19 nt, Homo sapiens
  misc_RNA (1)...(19): siRNA sense strand
gcccacaucucccguuuac

SEQ ID NO: 2071026 - RNA, 19 nt, Homo sapiens
  misc_RNA (1)...(19): siRNA sense strand
ggaaagacauuugccauuu

SEQ ID NO: 2071027 - RNA, 19 nt, Homo sapiens
  misc_RNA (1)...(19): siRNA sense strand
gaaauccgacuuuacaaua

SEQ ID NO: 2071028 - RNA, 19 nt, Homo sapiens
  misc_RNA (1)...(19): siRNA sense strand
gaaagccagugaagaagaa

SEQ ID NO: 2071029 - RNA, 19 nt, Homo sapiens
  misc_RNA (1)...(19): siRNA sense strand
gaaauuucauggugacaga

SEQ ID NO: 2071030 - RNA, 19 nt, Homo sapiens
  misc_RNA (1)...(19): siRNA sense strand
gaccauacuuccguuguua

SEQ ID NO: 2071031 - RNA, 19 nt, Homo sapiens
  misc_RNA (1)...(19): siRNA sense strand
uaaacaagcuuaccaagag

SEQ ID NO: 2071032 - RNA, 19 nt, Homo sapiens
  misc_RNA (1)...(19): siRNA sense strand
guagaaagccagugaagaa

SEQ ID NO: 2071033 - RNA, 19 nt, Homo sapiens
  misc_RNA (1)...(19): siRNA sense strand
ccaaugacguggacuucua

SEQ ID NO: 2071034 - RNA, 19 nt, Homo sapiens
  misc_RNA (1)...(19): siRNA sense strand
gaagagacaagaauacaga

SEQ ID NO: 2071035 - RNA, 19 nt, Homo sapiens
  misc_RNA (1)...(19): siRNA sense strand
ccaagagacuaaagaguga

SEQ ID NO: 2071036 - RNA, 19 nt, Homo sapiens
  misc_RNA (1)...(19): siRNA sense strand
aggcaagucucauugaaua

SEQ ID NO: 2071037 - RNA, 19 nt, Homo sapiens
  misc_RNA (1)...(19): siRNA sense strand
gcaaugaugcucccgauga

SEQ ID NO: 2071038 - RNA, 19 nt, Homo sapiens
  misc_RNA (1)...(19): siRNA sense strand
aaagagagcagagcaguua

SEQ ID NO: 2071039 - RNA, 19 nt, Homo sapiens
  misc_RNA (1)...(19): siRNA sense strand
gaugaagaagcuacaauaa

SEQ ID NO: 2071040 - RNA, 19 nt, Homo sapiens
  misc_RNA (1)...(19): siRNA sense strand
ggacaaaacagcaugguua

SEQ ID NO: 2071041 - RNA, 19 nt, Homo sapiens
  misc_RNA (1)...(19): siRNA sense strand
ggagaaaagugguauauca

SEQ ID NO: 2071042 - RNA, 19 nt, Homo sapiens
  misc_RNA (1)...(19): siRNA sense strand
gaaagacauuugccauuuu

SEQ ID NO: 2071043 - RNA, 19 nt, Homo sapiens
  misc_RNA (1)...(19): siRNA sense strand
ggaccauacuuccguuguu

SEQ ID NO: 2071044 - RNA, 19 nt, Homo sapiens
  misc_RNA (1)...(19): siRNA sense strand
ugaagaagagacaagaaua

SEQ ID NO: 2071045 - RNA, 19 nt, Homo sapiens
  misc_RNA (1)...(19): siRNA sense strand
gaagaagcuacaauaauuc

SEQ ID NO: 2071046 - RNA, 19 nt, Homo sapiens
  misc_RNA (1)...(19): siRNA sense strand
uggaaacccucagaagaua

SEQ ID NO: 2071047 - RNA, 19 nt, Homo sapiens
  misc_RNA (1)...(19): siRNA sense strand
gauuugggaauuccuaaua

SEQ ID NO: 2071048 - RNA, 19 nt, Homo sapiens
  misc_RNA (1)...(19): siRNA sense strand
ggaaaagcauuacaugaug

SEQ ID NO: 2071049 - RNA, 19 nt, Homo sapiens
  misc_RNA (1)...(19): siRNA sense strand
gaaaagcauuacaugauga

SEQ ID NO: 2071050 - RNA, 19 nt, Homo sapiens
  misc_RNA (1)...(19): siRNA sense strand
gaagaagagacaagaauac

SEQ ID NO: 2071051 - RNA, 19 nt, Homo sapiens
  misc_RNA (1)...(19): siRNA sense strand
uguggaugaugauacauua

SEQ ID NO: 2071052 - RNA, 19 nt, Homo sapiens
  misc_RNA (1)...(19): siRNA sense strand
caagucucauugaauacua

SEQ ID NO: 2071053 - RNA, 19 nt, Homo sapiens
  misc_RNA (1)...(19): siRNA sense strand
ucagcuggcuaaacaagaa

SEQ ID NO: 2071054 - RNA, 19 nt, Homo sapiens
  misc_RNA (1)...(19): siRNA sense strand
gcacuugcuuagcuguuau

SEQ ID NO: 2071055 - RNA, 19 nt, Homo sapiens
  misc_RNA (1)...(19): siRNA sense strand
ggaauuccuaauacagaua

SEQ ID NO: 2071056 - RNA, 19 nt, Homo sapiens
  misc_RNA (1)...(19): siRNA sense strand
caagcagucucaggauuug

SEQ ID NO: 2071057 - RNA, 19 nt, Homo sapiens
  misc_RNA (1)...(19): siRNA sense strand
gaagauaugaccccucuaa

SEQ ID NO: 2071058 - RNA, 19 nt, Homo sapiens
  misc_RNA (1)...(19): siRNA sense strand
ccaggcaagucucauugaa

SEQ ID NO: 2071059 - RNA, 19 nt, Homo sapiens
  misc_RNA (1)...(19): siRNA sense strand
ugaugaagaagcuacaaua

SEQ ID NO: 2071060 - RNA, 19 nt, Homo sapiens
  misc_RNA (1)...(19): siRNA sense strand
aaacaagcuuaccaagaga

SEQ ID NO: 2071061 - RNA, 19 nt, Homo sapiens
  misc_RNA (1)...(19): siRNA sense strand
ucaagcagucucaggauuu

SEQ ID NO: 2071062 - RNA, 19 nt, Homo sapiens
  misc_RNA (1)...(19): siRNA sense strand
gggaauuccuaauacagau

SEQ ID NO: 2071063 - RNA, 19 nt, Homo sapiens
  misc_RNA (1)...(19): siRNA sense strand
cuaccacauuccauucuuu

SEQ ID NO: 2071064 - RNA, 19 nt, Homo sapiens
  misc_RNA (1)...(19): siRNA sense strand
gaaacccucagaagauaug

SEQ ID NO: 2071065 - RNA, 19 nt, Homo sapiens
  misc_RNA (1)...(19): siRNA sense strand
cagcaugguuagucauugu

SEQ ID NO: 2071066 - RNA, 19 nt, Homo sapiens
  misc_RNA (1)...(19): siRNA sense strand
caaugaugcucccgaugau

SEQ ID NO: 2071067 - RNA, 19 nt, Homo sapiens
  misc_RNA (1)...(19): siRNA sense strand
aaagugguauaucaaggaa

SEQ ID NO: 2071068 - RNA, 19 nt, Homo sapiens
  misc_RNA (1)...(19): siRNA sense strand
aacaugagauugcccucua

SEQ ID NO: 2071069 - RNA, 19 nt, Homo sapiens
  misc_RNA (1)...(19): siRNA sense strand
acacagcccucucuuccau

SEQ ID NO: 2071070 - RNA, 19 nt, Homo sapiens
  misc_RNA (1)...(19): siRNA sense strand
gauaugguccugggaaugu

SEQ ID NO: 2071071 - RNA, 19 nt, Homo sapiens
  misc_RNA (1)...(19): siRNA sense strand
gcacugguggcuacagcua

SEQ ID NO: 2071072 - RNA, 19 nt, Homo sapiens
  misc_RNA (1)...(19): siRNA sense strand
gacauagacuuaaaaggaa

SEQ ID NO: 2071073 - RNA, 19 nt, Homo sapiens
  misc_RNA (1)...(19): siRNA sense strand
agcauuacaugaugaagaa

SEQ ID NO: 2071074 - RNA, 19 nt, Homo sapiens
  misc_RNA (1)...(19): siRNA sense strand
caaagaaagaggucaagca

SEQ ID NO: 2071075 - RNA, 19 nt, Homo sapiens
  misc_RNA (1)...(19): siRNA sense strand
gucaagcagucucaggauu

SEQ ID NO: 2071076 - RNA, 19 nt, Homo sapiens
  misc_RNA (1)...(19): siRNA sense strand
gcagaaauucaucuuggau

SEQ ID NO: 2071077 - RNA, 19 nt, Homo sapiens
  misc_RNA (1)...(19): siRNA sense strand
ggcugggccuuaaguauuc

SEQ ID NO: 2071078 - RNA, 19 nt, Homo sapiens
  misc_RNA (1)...(19): siRNA sense strand
aagagugaauccuugaaau

SEQ ID NO: 2071079 - RNA, 19 nt, Homo sapiens
  misc_RNA (1)...(19): siRNA sense strand
gcuaccacauuccauucuu

SEQ ID NO: 2071080 - RNA, 19 nt, Homo sapiens
  misc_RNA (1)...(19): siRNA sense strand
ggaaacccucagaagauau

SEQ ID NO: 2071081 - RNA, 19 nt, Homo sapiens
  misc_RNA (1)...(19): siRNA sense strand
ugacauagacuuaaaagga

SEQ ID NO: 2071082 - RNA, 19 nt, Homo sapiens
  misc_RNA (1)...(19): siRNA sense strand
uugcuuagcuguuaugacu

SEQ ID NO: 2071083 - RNA, 19 nt, Homo sapiens
  misc_RNA (1)...(19): siRNA sense strand
aagcuuaccaagagacuaa

SEQ ID NO: 2071084 - RNA, 19 nt, Homo sapiens
  misc_RNA (1)...(19): siRNA sense strand
gauagaggucauuguggaa

SEQ ID NO: 2071085 - RNA, 19 nt, Homo sapiens
  misc_RNA (1)...(19): siRNA sense strand
gagccaggcaagucucauu

SEQ ID NO: 2071086 - RNA, 19 nt, Homo sapiens
  misc_RNA (1)...(19): siRNA sense strand
gugaagaagaaggauauuu

SEQ ID NO: 2071087 - RNA, 19 nt, Homo sapiens
  misc_RNA (1)...(19): siRNA sense strand
ugacguggacuucuacugu

SEQ ID NO: 2071088 - RNA, 19 nt, Homo sapiens
  misc_RNA (1)...(19): siRNA sense strand
aaauccgacuuuacaauag

SEQ ID NO: 2071089 - RNA, 19 nt, Homo sapiens
  misc_RNA (1)...(19): siRNA sense strand
aaagagugaauccuugaaa

SEQ ID NO: 2071090 - RNA, 19 nt, Homo sapiens
  misc_RNA (1)...(19): siRNA sense strand
caaagagagcagagcaguu

SEQ ID NO: 2071091 - RNA, 19 nt, Homo sapiens
  misc_RNA (1)...(19): siRNA sense strand
cagaaauucaucuuggauu

SEQ ID NO: 2071092 - RNA, 19 nt, Homo sapiens
  misc_RNA (1)...(19): siRNA sense strand
gaggaggaauggucuucag

SEQ ID NO: 2071093 - RNA, 19 nt, Homo sapiens
  misc_RNA (1)...(19): siRNA sense strand
cauuguggaugaugauaca

SEQ ID NO: 2071094 - RNA, 19 nt, Homo sapiens
  misc_RNA (1)...(19): siRNA sense strand
ccagugaagaagaaggaua

SEQ ID NO: 2071095 - RNA, 19 nt, Homo sapiens
  misc_RNA (1)...(19): siRNA sense strand
ugaaauccgacuuuacaau

SEQ ID NO: 2071096 - RNA, 19 nt, Homo sapiens
  misc_RNA (1)...(19): siRNA sense strand
gcuacaauaauucaccauu

SEQ ID NO: 2071097 - RNA, 19 nt, Homo sapiens
  misc_RNA (1)...(19): siRNA sense strand
gauaugaccccucuaagga

SEQ ID NO: 2071098 - RNA, 19 nt, Homo sapiens
  misc_RNA (1)...(19): siRNA sense strand
gugaagaagagacaagaau

SEQ ID NO: 2071099 - RNA, 19 nt, Homo sapiens
  misc_RNA (1)...(19): siRNA sense strand
cuaaagagugaauccuuga

SEQ ID NO: 2071100 - RNA, 19 nt, Homo sapiens
  misc_RNA (1)...(19): siRNA sense strand
ccaguguccuccuccuuca

SEQ ID NO: 2071101 - RNA, 19 nt, Homo sapiens
  misc_RNA (1)...(19): siRNA sense strand
aauccgacuuuacaauaga

SEQ ID NO: 2071102 - RNA, 19 nt, Homo sapiens
  misc_RNA (1)...(19): siRNA sense strand
cugaagauacaaagaaaga

SEQ ID NO: 2071103 - RNA, 19 nt, Homo sapiens
  misc_RNA (1)...(19): siRNA sense strand
agacuucucgccaguaaau

SEQ ID NO: 2071104 - RNA, 19 nt, Homo sapiens
  misc_RNA (1)...(19): siRNA sense strand
gacuaaagagugaauccuu

SEQ ID NO: 2071105 - RNA, 19 nt, Homo sapiens
  misc_RNA (1)...(19): siRNA sense strand
uucaucagcuggcuaaaca

SEQ ID NO: 2071106 - RNA, 19 nt, Homo sapiens
  misc_RNA (1)...(19): siRNA sense strand
acagauagaggucauugug

SEQ ID NO: 2071107 - RNA, 19 nt, Homo sapiens
  misc_RNA (1)...(19): siRNA sense strand
uaauacagauagaggucau

SEQ ID NO: 2071108 - RNA, 19 nt, Homo sapiens
  misc_RNA (1)...(19): siRNA sense strand
ugagauugcccucuacauc

SEQ ID NO: 2071109 - RNA, 19 nt, Homo sapiens
  misc_RNA (1)...(19): siRNA sense strand
cauccagagucaaaguaau

SEQ ID NO: 2071110 - RNA, 19 nt, Homo sapiens
  misc_RNA (1)...(19): siRNA sense strand
gagaagccgucaggagacu

SEQ ID NO: 2071111 - RNA, 19 nt, Homo sapiens
  misc_RNA (1)...(19): siRNA sense strand
guccugggaaugugcuuua

SEQ ID NO: 2071112 - RNA, 19 nt, Homo sapiens
  misc_RNA (1)...(19): siRNA sense strand
gaauuccuaauacagauag

SEQ ID NO: 2071113 - RNA, 19 nt, Homo sapiens
  misc_RNA (1)...(19): siRNA sense strand
cugggaaugugcuuuagug

SEQ ID NO: 2071114 - RNA, 19 nt, Homo sapiens
  misc_RNA (1)...(19): siRNA sense strand
gggaaaagcauuacaugau

SEQ ID NO: 2071115 - RNA, 19 nt, Homo sapiens
  misc_RNA (1)...(19): siRNA sense strand
ucuccaggcuccagcacuu

SEQ ID NO: 2071116 - RNA, 19 nt, Homo sapiens
  misc_RNA (1)...(19): siRNA sense strand
uggaaagacauuugccauu

SEQ ID NO: 2071117 - RNA, 19 nt, Homo sapiens
  misc_RNA (1)...(19): siRNA sense strand
cauggugacagaauaccua

SEQ ID NO: 2071118 - RNA, 19 nt, Homo sapiens
  misc_RNA (1)...(19): siRNA sense strand
cagugaagaagaaggauau

SEQ ID NO: 2071119 - RNA, 19 nt, Homo sapiens
  misc_RNA (1)...(19): siRNA sense strand
agaaagccagugaagaaga

SEQ ID NO: 2071120 - RNA, 19 nt, Homo sapiens
  misc_RNA (1)...(19): siRNA sense strand
uaaagagugaauccuugaa

SEQ ID NO: 2071121 - RNA, 19 nt, Homo sapiens
  misc_RNA (1)...(19): siRNA sense strand
gaaaauuccauuccuacug

SEQ ID NO: 2071122 - RNA, 19 nt, Homo sapiens
  misc_RNA (1)...(19): siRNA sense strand
gccaguaaaugucgaugcu

SEQ ID NO: 2071123 - RNA, 19 nt, Homo sapiens
  misc_RNA (1)...(19): siRNA sense strand
gaauggucuucagcagaga

SEQ ID NO: 2071124 - RNA, 19 nt, Homo sapiens
  misc_RNA (1)...(19): siRNA sense strand
aaagacauuugccauuuug

SEQ ID NO: 2071125 - RNA, 19 nt, Homo sapiens
  misc_RNA (1)...(19): siRNA sense strand
aaaauuccauuccuacugu

SEQ ID NO: 2071126 - RNA, 19 nt, Homo sapiens
  misc_RNA (1)...(19): siRNA sense strand
ggaaagacauuugccauuu

SEQ ID NO: 2071127 - RNA, 19 nt, Homo sapiens
  misc_RNA (1)...(19): siRNA sense strand
gaaauccgacuuuacaaua

SEQ ID NO: 2071128 - RNA, 19 nt, Homo sapiens
  misc_RNA (1)...(19): siRNA sense strand
gaaagccagugaagaagaa

SEQ ID NO: 2071129 - RNA, 19 nt, Homo sapiens
  misc_RNA (1)...(19): siRNA sense strand
gaaauuucauggugacaga

SEQ ID NO: 2071130 - RNA, 19 nt, Homo sapiens
  misc_RNA (1)...(19): siRNA sense strand
gaccauacuuccguuguua

SEQ ID NO: 2071131 - RNA, 19 nt, Homo sapiens
  misc_RNA (1)...(19): siRNA sense strand
uaaacaagcuuaccaagag

SEQ ID NO: 2071132 - RNA, 19 nt, Homo sapiens
  misc_RNA (1)...(19): siRNA sense strand
guagaaagccagugaagaa

SEQ ID NO: 2071133 - RNA, 19 nt, Homo sapiens
  misc_RNA (1)...(19): siRNA sense strand
ccaaugacguggacuucua

SEQ ID NO: 2071134 - RNA, 19 nt, Homo sapiens
  misc_RNA (1)...(19): siRNA sense strand
gaagagacaagaauacaga

SEQ ID NO: 2071135 - RNA, 19 nt, Homo sapiens
  misc_RNA (1)...(19): siRNA sense strand
ccaagagacuaaagaguga

SEQ ID NO: 2071136 - RNA, 19 nt, Homo sapiens
  misc_RNA (1)...(19): siRNA sense strand
aggcaagucucauugaaua

SEQ ID NO: 2071137 - RNA, 19 nt, Homo sapiens
  misc_RNA (1)...(19): siRNA sense strand
gcaaugaugcucccgauga

SEQ ID NO: 2071138 - RNA, 19 nt, Homo sapiens
  misc_RNA (1)...(19): siRNA sense strand
aaagagagcagagcaguua

SEQ ID NO: 2071139 - RNA, 19 nt, Homo sapiens
  misc_RNA (1)...(19): siRNA sense strand
gaugaagaagcuacaauaa

SEQ ID NO: 2071140 - RNA, 19 nt, Homo sapiens
  misc_RNA (1)...(19): siRNA sense strand
ggacaaaacagcaugguua

SEQ ID NO: 2071141 - RNA, 19 nt, Homo sapiens
  misc_RNA (1)...(19): siRNA sense strand
ggagaaaagugguauauca

SEQ ID NO: 2071142 - RNA, 19 nt, Homo sapiens
  misc_RNA (1)...(19): siRNA sense strand
gaagcuggcauccguauau

SEQ ID NO: 2071143 - RNA, 19 nt, Homo sapiens
  misc_RNA (1)...(19): siRNA sense strand
gaaagacauuugccauuuu

SEQ ID NO: 2071144 - RNA, 19 nt, Homo sapiens
  misc_RNA (1)...(19): siRNA sense strand
guucugcucuggccuacua

SEQ ID NO: 2071145 - RNA, 19 nt, Homo sapiens
  misc_RNA (1)...(19): siRNA sense strand
ggaccauacuuccguuguu

SEQ ID NO: 2071146 - RNA, 19 nt, Homo sapiens
  misc_RNA (1)...(19): siRNA sense strand
ugaagaagagacaagaaua

SEQ ID NO: 2071147 - RNA, 19 nt, Homo sapiens
  misc_RNA (1)...(19): siRNA sense strand
gaagaagcuacaauaauuc

SEQ ID NO: 2071148 - RNA, 19 nt, Homo sapiens
  misc_RNA (1)...(19): siRNA sense strand
uggaaacccucagaagaua

SEQ ID NO: 2071149 - RNA, 19 nt, Homo sapiens
  misc_RNA (1)...(19): siRNA sense strand
gauuugggaauuccuaaua

SEQ ID NO: 2071150 - RNA, 19 nt, Homo sapiens
  misc_RNA (1)...(19): siRNA sense strand
ggaaaagcauuacaugaug

SEQ ID NO: 2071151 - RNA, 19 nt, Homo sapiens
  misc_RNA (1)...(19): siRNA sense strand
gaaaagcauuacaugauga

SEQ ID NO: 2071152 - RNA, 19 nt, Homo sapiens
  misc_RNA (1)...(19): siRNA sense strand
gaagaagagacaagaauac

SEQ ID NO: 2071153 - RNA, 19 nt, Homo sapiens
  misc_RNA (1)...(19): siRNA sense strand
uguggaugaugauacauua

SEQ ID NO: 2071154 - RNA, 19 nt, Homo sapiens
  misc_RNA (1)...(19): siRNA sense strand
caagucucauugaauacua

SEQ ID NO: 2071155 - RNA, 19 nt, Homo sapiens
  misc_RNA (1)...(19): siRNA sense strand
ucagcuggcuaaacaagaa

SEQ ID NO: 2071156 - RNA, 19 nt, Homo sapiens
  misc_RNA (1)...(19): siRNA sense strand
gcacuugcuuagcuguuau

SEQ ID NO: 2071157 - RNA, 19 nt, Homo sapiens
  misc_RNA (1)...(19): siRNA sense strand
ggaauuccuaauacagaua

SEQ ID NO: 2071158 - RNA, 19 nt, Homo sapiens
  misc_RNA (1)...(19): siRNA sense strand
caagcagucucaggauuug

SEQ ID NO: 2071159 - RNA, 19 nt, Homo sapiens
  misc_RNA (1)...(19): siRNA sense strand
ggaaaagagucuccaguuc

SEQ ID NO: 2071160 - RNA, 19 nt, Homo sapiens
  misc_RNA (1)...(19): siRNA sense strand
gaagauaugaccccucuaa

SEQ ID NO: 2071161 - RNA, 19 nt, Homo sapiens
  misc_RNA (1)...(19): siRNA sense strand
gcucuggccuacuaacugu

SEQ ID NO: 2071162 - RNA, 19 nt, Homo sapiens
  misc_RNA (1)...(19): siRNA sense strand
ccaggcaagucucauugaa

SEQ ID NO: 2071163 - RNA, 19 nt, Homo sapiens
  misc_RNA (1)...(19): siRNA sense strand
ugaugaagaagcuacaaua

SEQ ID NO: 2071164 - RNA, 19 nt, Homo sapiens
  misc_RNA (1)...(19): siRNA sense strand
aaacaagcuuaccaagaga

SEQ ID NO: 2071165 - RNA, 19 nt, Homo sapiens
  misc_RNA (1)...(19): siRNA sense strand
ucaagcagucucaggauuu

SEQ ID NO: 2071166 - RNA, 19 nt, Homo sapiens
  misc_RNA (1)...(19): siRNA sense strand
gggaauuccuaauacagau

SEQ ID NO: 2071167 - RNA, 19 nt, Homo sapiens
  misc_RNA (1)...(19): siRNA sense strand
cuaccacauuccauucuuu

SEQ ID NO: 2071168 - RNA, 19 nt, Homo sapiens
  misc_RNA (1)...(19): siRNA sense strand
gaaacccucagaagauaug

SEQ ID NO: 2071169 - RNA, 19 nt, Homo sapiens
  misc_RNA (1)...(19): siRNA sense strand
aaagugguauaucaaggaa

SEQ ID NO: 2071170 - RNA, 19 nt, Homo sapiens
  misc_RNA (1)...(19): siRNA sense strand
caaugaugcucccgaugau

SEQ ID NO: 2071171 - RNA, 19 nt, Homo sapiens
  misc_RNA (1)...(19): siRNA sense strand
cagcaugguuagucauugu

SEQ ID NO: 2071172 - RNA, 19 nt, Homo sapiens
  misc_RNA (1)...(19): siRNA sense strand
aacaugagauugcccucua

SEQ ID NO: 2071173 - RNA, 19 nt, Homo sapiens
  misc_RNA (1)...(19): siRNA sense strand
acacagcccucucuuccau

SEQ ID NO: 2071174 - RNA, 19 nt, Homo sapiens
  misc_RNA (1)...(19): siRNA sense strand
gauaugguccugggaaugu

SEQ ID NO: 2071175 - RNA, 19 nt, Homo sapiens
  misc_RNA (1)...(19): siRNA sense strand
gcacugguggcuacagcua

SEQ ID NO: 2071176 - RNA, 19 nt, Homo sapiens
  misc_RNA (1)...(19): siRNA sense strand
gacauagacuuaaaaggaa

SEQ ID NO: 2071177 - RNA, 19 nt, Homo sapiens
  misc_RNA (1)...(19): siRNA sense strand
agcauuacaugaugaagaa

SEQ ID NO: 2071178 - RNA, 19 nt, Homo sapiens
  misc_RNA (1)...(19): siRNA sense strand
caaagaaagaggucaagca

SEQ ID NO: 2071179 - RNA, 19 nt, Homo sapiens
  misc_RNA (1)...(19): siRNA sense strand
gucaagcagucucaggauu

SEQ ID NO: 2071180 - RNA, 19 nt, Homo sapiens
  misc_RNA (1)...(19): siRNA sense strand
gcagaaauucaucuuggau

SEQ ID NO: 2071181 - RNA, 19 nt, Homo sapiens
  misc_RNA (1)...(19): siRNA sense strand
ggcugggccuuaaguauuc

SEQ ID NO: 2071182 - RNA, 19 nt, Homo sapiens
  misc_RNA (1)...(19): siRNA sense strand
aagagugaauccuugaaau

SEQ ID NO: 2071183 - RNA, 19 nt, Homo sapiens
  misc_RNA (1)...(19): siRNA sense strand
ccacugagagaacaacaug

SEQ ID NO: 2071184 - RNA, 19 nt, Homo sapiens
  misc_RNA (1)...(19): siRNA sense strand
gcuaccacauuccauucuu

SEQ ID NO: 2071185 - RNA, 19 nt, Homo sapiens
  misc_RNA (1)...(19): siRNA sense strand
ggaaacccucagaagauau

SEQ ID NO: 2071186 - RNA, 19 nt, Homo sapiens
  misc_RNA (1)...(19): siRNA sense strand
ugacauagacuuaaaagga

SEQ ID NO: 2071187 - RNA, 19 nt, Homo sapiens
  misc_RNA (1)...(19): siRNA sense strand
uugcuuagcuguuaugacu

SEQ ID NO: 2071188 - RNA, 19 nt, Homo sapiens
  misc_RNA (1)...(19): siRNA sense strand
aagcuuaccaagagacuaa

SEQ ID NO: 2071189 - RNA, 19 nt, Homo sapiens
  misc_RNA (1)...(19): siRNA sense strand
gauagaggucauuguggaa

SEQ ID NO: 2071190 - RNA, 19 nt, Homo sapiens
  misc_RNA (1)...(19): siRNA sense strand
gagccaggcaagucucauu

SEQ ID NO: 2071191 - RNA, 19 nt, Homo sapiens
  misc_RNA (1)...(19): siRNA sense strand
gugaagaagaaggauauuu

SEQ ID NO: 2071192 - RNA, 19 nt, Homo sapiens
  misc_RNA (1)...(19): siRNA sense strand
ugacguggacuucuacugu

SEQ ID NO: 2071193 - RNA, 19 nt, Homo sapiens
  misc_RNA (1)...(19): siRNA sense strand
aaauccgacuuuacaauag

SEQ ID NO: 2071194 - RNA, 19 nt, Homo sapiens
  misc_RNA (1)...(19): siRNA sense strand
aaagagugaauccuugaaa

SEQ ID NO: 2071195 - RNA, 19 nt, Homo sapiens
  misc_RNA (1)...(19): siRNA sense strand
caaagagagcagagcaguu

SEQ ID NO: 2071196 - RNA, 19 nt, Homo sapiens
  misc_RNA (1)...(19): siRNA sense strand
cagaaauucaucuuggauu

SEQ ID NO: 2071197 - RNA, 19 nt, Homo sapiens
  misc_RNA (1)...(19): siRNA sense strand
gaggaggaauggucuucag

SEQ ID NO: 2071198 - RNA, 19 nt, Homo sapiens
  misc_RNA (1)...(19): siRNA sense strand
cauuguggaugaugauaca

SEQ ID NO: 2071199 - RNA, 19 nt, Homo sapiens
  misc_RNA (1)...(19): siRNA sense strand
ccagugaagaagaaggaua

SEQ ID NO: 2071200 - RNA, 19 nt, Homo sapiens
  misc_RNA (1)...(19): siRNA sense strand
ugaaauccgacuuuacaau

SEQ ID NO: 2071201 - RNA, 19 nt, Homo sapiens
  misc_RNA (1)...(19): siRNA sense strand
gcuacaauaauucaccauu

SEQ ID NO: 2071202 - RNA, 19 nt, Homo sapiens
  misc_RNA (1)...(19): siRNA sense strand
gauaugaccccucuaagga

SEQ ID NO: 2071203 - RNA, 19 nt, Homo sapiens
  misc_RNA (1)...(19): siRNA sense strand
gugaagaagagacaagaau

SEQ ID NO: 2071204 - RNA, 19 nt, Homo sapiens
  misc_RNA (1)...(19): siRNA sense strand
cuaaagagugaauccuuga

SEQ ID NO: 2071205 - RNA, 19 nt, Homo sapiens
  misc_RNA (1)...(19): siRNA sense strand
aauccgacuuuacaauaga

SEQ ID NO: 2071206 - RNA, 19 nt, Homo sapiens
  misc_RNA (1)...(19): siRNA sense strand
ccaguguccuccuccuuca

SEQ ID NO: 2071207 - RNA, 19 nt, Homo sapiens
  misc_RNA (1)...(19): siRNA sense strand
cugaagauacaaagaaaga

SEQ ID NO: 2071208 - RNA, 19 nt, Homo sapiens
  misc_RNA (1)...(19): siRNA sense strand
gaaaagagucuccaguucu

SEQ ID NO: 2071209 - RNA, 19 nt, Homo sapiens
  misc_RNA (1)...(19): siRNA sense strand
agacuucucgccaguaaau

SEQ ID NO: 2071210 - RNA, 19 nt, Homo sapiens
  misc_RNA (1)...(19): siRNA sense strand
gacuaaagagugaauccuu

SEQ ID NO: 2071211 - RNA, 19 nt, Homo sapiens
  misc_RNA (1)...(19): siRNA sense strand
uucaucagcuggcuaaaca

SEQ ID NO: 2071212 - RNA, 19 nt, Homo sapiens
  misc_RNA (1)...(19): siRNA sense strand
acagauagaggucauugug

SEQ ID NO: 2071213 - RNA, 19 nt, Homo sapiens
  misc_RNA (1)...(19): siRNA sense strand
uaauacagauagaggucau

SEQ ID NO: 2071214 - RNA, 19 nt, Homo sapiens
  misc_RNA (1)...(19): siRNA sense strand
cauccagagucaaaguaau

SEQ ID NO: 2071215 - RNA, 19 nt, Homo sapiens
  misc_RNA (1)...(19): siRNA sense strand
ugagauugcccucuacauc

SEQ ID NO: 2071216 - RNA, 19 nt, Homo sapiens
  misc_RNA (1)...(19): siRNA sense strand
gagaagccgucaggagacu

SEQ ID NO: 2071217 - RNA, 19 nt, Homo sapiens
  misc_RNA (1)...(19): siRNA sense strand
guccugggaaugugcuuua

SEQ ID NO: 2071218 - RNA, 19 nt, Homo sapiens
  misc_RNA (1)...(19): siRNA sense strand
gaauuccuaauacagauag

SEQ ID NO: 2071219 - RNA, 19 nt, Homo sapiens
  misc_RNA (1)...(19): siRNA sense strand
cugggaaugugcuuuagug

SEQ ID NO: 2071220 - RNA, 19 nt, Homo sapiens
  misc_RNA (1)...(19): siRNA sense strand
uaaagagugaauccuugaa

SEQ ID NO: 2071221 - RNA, 19 nt, Homo sapiens
  misc_RNA (1)...(19): siRNA sense strand
ucuccaggcuccagcacuu

SEQ ID NO: 2071222 - RNA, 19 nt, Homo sapiens
  misc_RNA (1)...(19): siRNA sense strand
uggaaagacauuugccauu

SEQ ID NO: 2071223 - RNA, 19 nt, Homo sapiens
  misc_RNA (1)...(19): siRNA sense strand
cauggugacagaauaccua

SEQ ID NO: 2071224 - RNA, 19 nt, Homo sapiens
  misc_RNA (1)...(19): siRNA sense strand
cagugaagaagaaggauau

SEQ ID NO: 2071225 - RNA, 19 nt, Homo sapiens
  misc_RNA (1)...(19): siRNA sense strand
agaaagccagugaagaaga

SEQ ID NO: 2071226 - RNA, 19 nt, Homo sapiens
  misc_RNA (1)...(19): siRNA sense strand
ggacauggcuuauuacaga

SEQ ID NO: 2071227 - RNA, 19 nt, Homo sapiens
  misc_RNA (1)...(19): siRNA sense strand
guacagaucuucagugaga

SEQ ID NO: 2071228 - RNA, 19 nt, Homo sapiens
  misc_RNA (1)...(19): siRNA sense strand
gaacaucaaugacacuuug

SEQ ID NO: 2071229 - RNA, 19 nt, Homo sapiens
  misc_RNA (1)...(19): siRNA sense strand
gaaagaagguggcaaaguc

SEQ ID NO: 2071230 - RNA, 19 nt, Homo sapiens
  misc_RNA (1)...(19): siRNA sense strand
gcaacuggcuggaaacaaa

SEQ ID NO: 2071231 - RNA, 19 nt, Homo sapiens
  misc_RNA (1)...(19): siRNA sense strand
ggacacagaugaccgagaa

SEQ ID NO: 2071232 - RNA, 19 nt, Homo sapiens
  misc_RNA (1)...(19): siRNA sense strand
ccucauagaucguuacuuu

SEQ ID NO: 2071233 - RNA, 19 nt, Homo sapiens
  misc_RNA (1)...(19): siRNA sense strand
gcauggaucuccuuugaaa

SEQ ID NO: 2071234 - RNA, 19 nt, Homo sapiens
  misc_RNA (1)...(19): siRNA sense strand
ccacacagcugaugaugaa

SEQ ID NO: 2071235 - RNA, 19 nt, Homo sapiens
  misc_RNA (1)...(19): siRNA sense strand
ggagggcucuguuguauau

SEQ ID NO: 2071236 - RNA, 19 nt, Homo sapiens
  misc_RNA (1)...(19): siRNA sense strand
gaacaaacauccagcacau

SEQ ID NO: 2071237 - RNA, 19 nt, Homo sapiens
  misc_RNA (1)...(19): siRNA sense strand
agagacagcuuacacauuu

SEQ ID NO: 2071238 - RNA, 19 nt, Homo sapiens
  misc_RNA (1)...(19): siRNA sense strand
gcagagcaguuuacucaaa

SEQ ID NO: 2071239 - RNA, 19 nt, Homo sapiens
  misc_RNA (1)...(19): siRNA sense strand
gaacuacguuacacaguga

SEQ ID NO: 2071240 - RNA, 19 nt, Homo sapiens
  misc_RNA (1)...(19): siRNA sense strand
cgacuuccguguugucuua

SEQ ID NO: 2071241 - RNA, 19 nt, Homo sapiens
  misc_RNA (1)...(19): siRNA sense strand
gcacugaccuguccaaguc

SEQ ID NO: 2071242 - RNA, 19 nt, Homo sapiens
  misc_RNA (1)...(19): siRNA sense strand
gaaccuagaggccuguuua

SEQ ID NO: 2071243 - RNA, 19 nt, Homo sapiens
  misc_RNA (1)...(19): siRNA sense strand
ggagugaaccaaccuauaa

SEQ ID NO: 2071244 - RNA, 19 nt, Homo sapiens
  misc_RNA (1)...(19): siRNA sense strand
aauauuaccuggucaauga

SEQ ID NO: 2071245 - RNA, 19 nt, Homo sapiens
  misc_RNA (1)...(19): siRNA sense strand
cuagagagcuuuccaacuu

SEQ ID NO: 2071246 - RNA, 19 nt, Homo sapiens
  misc_RNA (1)...(19): siRNA sense strand
gaaaccaaauuuaguguca

SEQ ID NO: 2071247 - RNA, 19 nt, Homo sapiens
  misc_RNA (1)...(19): siRNA sense strand
caacauggauaucuucuca

SEQ ID NO: 2071248 - RNA, 19 nt, Homo sapiens
  misc_RNA (1)...(19): siRNA sense strand
ggacagauccugcauguag

SEQ ID NO: 2071249 - RNA, 19 nt, Homo sapiens
  misc_RNA (1)...(19): siRNA sense strand
gaaaagcccugcauucuug

SEQ ID NO: 2071250 - RNA, 19 nt, Homo sapiens
  misc_RNA (1)...(19): siRNA sense strand
gauguugacuuuccucuug

SEQ ID NO: 2071251 - RNA, 19 nt, Homo sapiens
  misc_RNA (1)...(19): siRNA sense strand
aaauguaccugcucucuaa

SEQ ID NO: 2071252 - RNA, 19 nt, Homo sapiens
  misc_RNA (1)...(19): siRNA sense strand
cagagaaccugucaccuuu

SEQ ID NO: 2071253 - RNA, 19 nt, Homo sapiens
  misc_RNA (1)...(19): siRNA sense strand
gggcauggaucuccuuuga

SEQ ID NO: 2071254 - RNA, 19 nt, Homo sapiens
  misc_RNA (1)...(19): siRNA sense strand
gcaugagucugguaauuga

SEQ ID NO: 2071255 - RNA, 19 nt, Homo sapiens
  misc_RNA (1)...(19): siRNA sense strand
ugaaaucacugccaauguu

SEQ ID NO: 2071256 - RNA, 19 nt, Homo sapiens
  misc_RNA (1)...(19): siRNA sense strand
caaagucacucuuacaaca

SEQ ID NO: 2071257 - RNA, 19 nt, Homo sapiens
  misc_RNA (1)...(19): siRNA sense strand
caacagauuuagauucaga

SEQ ID NO: 2071258 - RNA, 19 nt, Homo sapiens
  misc_RNA (1)...(19): siRNA sense strand
gcauauaagugcugaagau

SEQ ID NO: 2071259 - RNA, 19 nt, Homo sapiens
  misc_RNA (1)...(19): siRNA sense strand
ggugaacaguugauaguaa

SEQ ID NO: 2071260 - RNA, 19 nt, Homo sapiens
  misc_RNA (1)...(19): siRNA sense strand
gaaaucacugccaauguua

SEQ ID NO: 2071261 - RNA, 19 nt, Homo sapiens
  misc_RNA (1)...(19): siRNA sense strand
ugaggaaacugaugacuug

SEQ ID NO: 2071262 - RNA, 19 nt, Homo sapiens
  misc_RNA (1)...(19): siRNA sense strand
gcacgugguugaaaucgaa

SEQ ID NO: 2071263 - RNA, 19 nt, Homo sapiens
  misc_RNA (1)...(19): siRNA sense strand
ggagacacuucaaagguuu

SEQ ID NO: 2071264 - RNA, 19 nt, Homo sapiens
  misc_RNA (1)...(19): siRNA sense strand
auagagaguuccagcauua

SEQ ID NO: 2071265 - RNA, 19 nt, Homo sapiens
  misc_RNA (1)...(19): siRNA sense strand
gugcauagaugacaaagau

SEQ ID NO: 2071266 - RNA, 19 nt, Homo sapiens
  misc_RNA (1)...(19): siRNA sense strand
caaauuguaucccuguuga

SEQ ID NO: 2071267 - RNA, 19 nt, Homo sapiens
  misc_RNA (1)...(19): siRNA sense strand
gacagaaacuuaauucagu

SEQ ID NO: 2071268 - RNA, 19 nt, Homo sapiens
  misc_RNA (1)...(19): siRNA sense strand
ugacauugaugacaugaaa

SEQ ID NO: 2071269 - RNA, 19 nt, Homo sapiens
  misc_RNA (1)...(19): siRNA sense strand
agacauauccuuaccagua

SEQ ID NO: 2071270 - RNA, 19 nt, Homo sapiens
  misc_RNA (1)...(19): siRNA sense strand
gcagauaguuacaaugauc

SEQ ID NO: 2071271 - RNA, 19 nt, Homo sapiens
  misc_RNA (1)...(19): siRNA sense strand
ggaaacugaugacuugaug

SEQ ID NO: 2071272 - RNA, 19 nt, Homo sapiens
  misc_RNA (1)...(19): siRNA sense strand
gaaagacaaugccaaucga

SEQ ID NO: 2071273 - RNA, 19 nt, Homo sapiens
  misc_RNA (1)...(19): siRNA sense strand
cgagaaugguauauacaua

SEQ ID NO: 2071274 - RNA, 19 nt, Homo sapiens
  misc_RNA (1)...(19): siRNA sense strand
cgacucuccuucacucuua

SEQ ID NO: 2071275 - RNA, 19 nt, Homo sapiens
  misc_RNA (1)...(19): siRNA sense strand
gcagagccguucucagcua

SEQ ID NO: 2071276 - RNA, 19 nt, Homo sapiens
  misc_RNA (1)...(19): siRNA sense strand
gaaagccauuguguacaua

SEQ ID NO: 2071277 - RNA, 19 nt, Homo sapiens
  misc_RNA (1)...(19): siRNA sense strand
caaauacuccguugaagaa

SEQ ID NO: 2071278 - RNA, 19 nt, Homo sapiens
  misc_RNA (1)...(19): siRNA sense strand
gaagacaguuuugugauua

SEQ ID NO: 2071279 - RNA, 19 nt, Homo sapiens
  misc_RNA (1)...(19): siRNA sense strand
ggaaggauuugacaucauc

SEQ ID NO: 2071280 - RNA, 19 nt, Homo sapiens
  misc_RNA (1)...(19): siRNA sense strand
ggagaagggucaccacauc

SEQ ID NO: 2071281 - RNA, 19 nt, Homo sapiens
  misc_RNA (1)...(19): siRNA sense strand
gaaucugggugacuccuuu

SEQ ID NO: 2071282 - RNA, 19 nt, Homo sapiens
  misc_RNA (1)...(19): siRNA sense strand
caagugagaacaucaauga

SEQ ID NO: 2071283 - RNA, 19 nt, Homo sapiens
  misc_RNA (1)...(19): siRNA sense strand
gaaugacuaucaauaaugg

SEQ ID NO: 2071284 - RNA, 19 nt, Homo sapiens
  misc_RNA (1)...(19): siRNA sense strand
gaaaagacgguccucauua

SEQ ID NO: 2071285 - RNA, 19 nt, Homo sapiens
  misc_RNA (1)...(19): siRNA sense strand
gagaaacugugucggauag

SEQ ID NO: 2071286 - RNA, 19 nt, Homo sapiens
  misc_RNA (1)...(19): siRNA sense strand
gagaaccugucaccuuuga

SEQ ID NO: 2071287 - RNA, 19 nt, Homo sapiens
  misc_RNA (1)...(19): siRNA sense strand
ucaguuccauggcuuauuu

SEQ ID NO: 2071288 - RNA, 19 nt, Homo sapiens
  misc_RNA (1)...(19): siRNA sense strand
ugaugugacugauggaaua

SEQ ID NO: 2071289 - RNA, 19 nt, Homo sapiens
  misc_RNA (1)...(19): siRNA sense strand
guacagcaguggagcuuug

SEQ ID NO: 2071290 - RNA, 19 nt, Homo sapiens
  misc_RNA (1)...(19): siRNA sense strand
gggcaucagccguaauuua

SEQ ID NO: 2071291 - RNA, 19 nt, Homo sapiens
  misc_RNA (1)...(19): siRNA sense strand
gagcagggauugccauaag

SEQ ID NO: 2071292 - RNA, 19 nt, Homo sapiens
  misc_RNA (1)...(19): siRNA sense strand
gaugauggacuuugaagaa

SEQ ID NO: 2071293 - RNA, 19 nt, Homo sapiens
  misc_RNA (1)...(19): siRNA sense strand
cgaaagugaugggcagaua

SEQ ID NO: 2071294 - RNA, 19 nt, Homo sapiens
  misc_RNA (1)...(19): siRNA sense strand
gcuaaugccacaagugaua

SEQ ID NO: 2071295 - RNA, 19 nt, Homo sapiens
  misc_RNA (1)...(19): siRNA sense strand
ggcaacagauuuagauuca

SEQ ID NO: 2071296 - RNA, 19 nt, Homo sapiens
  misc_RNA (1)...(19): siRNA sense strand
gguaguggaucuagaagga

SEQ ID NO: 2071297 - RNA, 19 nt, Homo sapiens
  misc_RNA (1)...(19): siRNA sense strand
ccagaaugacuaucaauaa

SEQ ID NO: 2071298 - RNA, 19 nt, Homo sapiens
  misc_RNA (1)...(19): siRNA sense strand
gaugagacgcccagaauga

SEQ ID NO: 2071299 - RNA, 19 nt, Homo sapiens
  misc_RNA (1)...(19): siRNA sense strand
uaacaucagugcauauaag

SEQ ID NO: 2071300 - RNA, 19 nt, Homo sapiens
  misc_RNA (1)...(19): siRNA sense strand
ugaaugauguagacacuga

SEQ ID NO: 2071301 - RNA, 19 nt, Homo sapiens
  misc_RNA (1)...(19): siRNA sense strand
acagaccaguucacauuua

SEQ ID NO: 2071302 - RNA, 19 nt, Homo sapiens
  misc_RNA (1)...(19): siRNA sense strand
ccacagagccaucacaaug

SEQ ID NO: 2071303 - RNA, 19 nt, Homo sapiens
  misc_RNA (1)...(19): siRNA sense strand
gcagaaggugauauaauuu

SEQ ID NO: 2071304 - RNA, 19 nt, Homo sapiens
  misc_RNA (1)...(19): siRNA sense strand
ucaaagguuuccauuguga

SEQ ID NO: 2071305 - RNA, 19 nt, Homo sapiens
  misc_RNA (1)...(19): siRNA sense strand
cugacaagcuccugaaauu

SEQ ID NO: 2071306 - RNA, 19 nt, Homo sapiens
  misc_RNA (1)...(19): siRNA sense strand
ugucuucccugaugugaua

SEQ ID NO: 2071307 - RNA, 19 nt, Homo sapiens
  misc_RNA (1)...(19): siRNA sense strand
acacugaccuggacacaga

SEQ ID NO: 2071308 - RNA, 19 nt, Homo sapiens
  misc_RNA (1)...(19): siRNA sense strand
ugacauggauucagaugau

SEQ ID NO: 2071309 - RNA, 19 nt, Homo sapiens
  misc_RNA (1)...(19): siRNA sense strand
cauacgaucuauacaguga

SEQ ID NO: 2071310 - RNA, 19 nt, Homo sapiens
  misc_RNA (1)...(19): siRNA sense strand
ggaugacccugaagccauu

SEQ ID NO: 2071311 - RNA, 19 nt, Homo sapiens
  misc_RNA (1)...(19): siRNA sense strand
ugcagaaggugauauaauu

SEQ ID NO: 2071312 - RNA, 19 nt, Homo sapiens
  misc_RNA (1)...(19): siRNA sense strand
gggcagauaguuacaauga

SEQ ID NO: 2071313 - RNA, 19 nt, Homo sapiens
  misc_RNA (1)...(19): siRNA sense strand
caaugaggacuccaaauuu

SEQ ID NO: 2071314 - RNA, 19 nt, Homo sapiens
  misc_RNA (1)...(19): siRNA sense strand
guauuaaagugcauagaug

SEQ ID NO: 2071315 - RNA, 19 nt, Homo sapiens
  misc_RNA (1)...(19): siRNA sense strand
gcaccaggcucugagaaau

SEQ ID NO: 2071316 - RNA, 19 nt, Homo sapiens
  misc_RNA (1)...(19): siRNA sense strand
ucagggaccuauacuguga

SEQ ID NO: 2071317 - RNA, 19 nt, Homo sapiens
  misc_RNA (1)...(19): siRNA sense strand
ggagaaaccaaauuuagug

SEQ ID NO: 2071318 - RNA, 19 nt, Homo sapiens
  misc_RNA (1)...(19): siRNA sense strand
cauaauugaugacucuuug

SEQ ID NO: 2071319 - RNA, 19 nt, Homo sapiens
  misc_RNA (1)...(19): siRNA sense strand
gaaacaaguuaacguacca

SEQ ID NO: 2071320 - RNA, 19 nt, Homo sapiens
  misc_RNA (1)...(19): siRNA sense strand
uaaacuauguccagagugu

SEQ ID NO: 2071321 - RNA, 19 nt, Homo sapiens
  misc_RNA (1)...(19): siRNA sense strand
acacugauguugcccauau

SEQ ID NO: 2071322 - RNA, 19 nt, Homo sapiens
  misc_RNA (1)...(19): siRNA sense strand
gccuggaucugauggauuu

SEQ ID NO: 2071323 - RNA, 19 nt, Homo sapiens
  misc_RNA (1)...(19): siRNA sense strand
ggaguucguuagcuacuau

SEQ ID NO: 2071324 - RNA, 19 nt, Homo sapiens
  misc_RNA (1)...(19): siRNA sense strand
acacaaaccuuaucaagcu

SEQ ID NO: 2071325 - RNA, 19 nt, Homo sapiens
  misc_RNA (1)...(19): siRNA sense strand
gagagucggugguuauaag

SEQ ID NO: 2071326 - RNA, 19 nt, Homo sapiens
  misc_RNA (1)...(19): siRNA sense strand
caacaaaugucacguguau

SEQ ID NO: 2071327 - RNA, 19 nt, Homo sapiens
  misc_RNA (1)...(19): siRNA sense strand
gaagaaagaucccuaaacu

SEQ ID NO: 2071328 - RNA, 19 nt, Homo sapiens
  misc_RNA (1)...(19): siRNA sense strand
gaacuuugccgauaccuua

SEQ ID NO: 2071329 - RNA, 19 nt, Homo sapiens
  misc_RNA (1)...(19): siRNA sense strand
caaagaaacuccgauauau

SEQ ID NO: 2071330 - RNA, 19 nt, Homo sapiens
  misc_RNA (1)...(19): siRNA sense strand
ugacaaagcuccaacaaau

SEQ ID NO: 2071331 - RNA, 19 nt, Homo sapiens
  misc_RNA (1)...(19): siRNA sense strand
ggagauggcuacaacauug

SEQ ID NO: 2071332 - RNA, 19 nt, Homo sapiens
  misc_RNA (1)...(19): siRNA sense strand
gaaagugccugauguucuu

SEQ ID NO: 2071333 - RNA, 19 nt, Homo sapiens
  misc_RNA (1)...(19): siRNA sense strand
gaaauguguuugacuuuga

SEQ ID NO: 2071334 - RNA, 19 nt, Homo sapiens
  misc_RNA (1)...(19): siRNA sense strand
gcuaagaacuuugccgaua

SEQ ID NO: 2071335 - RNA, 19 nt, Homo sapiens
  misc_RNA (1)...(19): siRNA sense strand
ccacaaacaucugguuaua

SEQ ID NO: 2071336 - RNA, 19 nt, Homo sapiens
  misc_RNA (1)...(19): siRNA sense strand
auaaagaggugaccauuaa

SEQ ID NO: 2071337 - RNA, 19 nt, Homo sapiens
  misc_RNA (1)...(19): siRNA sense strand
gcaaaucugucacgauaug

SEQ ID NO: 2071338 - RNA, 19 nt, Homo sapiens
  misc_RNA (1)...(19): siRNA sense strand
gcaguaaaguugggucaua

SEQ ID NO: 2071339 - RNA, 19 nt, Homo sapiens
  misc_RNA (1)...(19): siRNA sense strand
ggagaacacuuauuauugg

SEQ ID NO: 2071340 - RNA, 19 nt, Homo sapiens
  misc_RNA (1)...(19): siRNA sense strand
agaagaagcugaaacuuau

SEQ ID NO: 2071341 - RNA, 19 nt, Homo sapiens
  misc_RNA (1)...(19): siRNA sense strand
gaacaaagaagaagcugaa

SEQ ID NO: 2071342 - RNA, 19 nt, Homo sapiens
  misc_RNA (1)...(19): siRNA sense strand
agaaagacaugaagaaaga

SEQ ID NO: 2071343 - RNA, 19 nt, Homo sapiens
  misc_RNA (1)...(19): siRNA sense strand
gaaggucucuccaguguag

SEQ ID NO: 2071344 - RNA, 19 nt, Homo sapiens
  misc_RNA (1)...(19): siRNA sense strand
ucaaggaaauugucaaaga

SEQ ID NO: 2071345 - RNA, 19 nt, Homo sapiens
  misc_RNA (1)...(19): siRNA sense strand
gagcaaagccuaccagugu

SEQ ID NO: 2071346 - RNA, 19 nt, Homo sapiens
  misc_RNA (1)...(19): siRNA sense strand
gaacaugccaucaaggaaa

SEQ ID NO: 2071347 - RNA, 19 nt, Homo sapiens
  misc_RNA (1)...(19): siRNA sense strand
ucaagcuacuggagaauua

SEQ ID NO: 2071348 - RNA, 19 nt, Homo sapiens
  misc_RNA (1)...(19): siRNA sense strand
gaagacgcauuguugcaaa

SEQ ID NO: 2071349 - RNA, 19 nt, Homo sapiens
  misc_RNA (1)...(19): siRNA sense strand
gaauacauccugcuaaguu

SEQ ID NO: 2071350 - RNA, 19 nt, Homo sapiens
  misc_RNA (1)...(19): siRNA sense strand
caaggaaauugucaaagaa

SEQ ID NO: 2071351 - RNA, 19 nt, Homo sapiens
  misc_RNA (1)...(19): siRNA sense strand
ucaaagaaacuccgauaua

SEQ ID NO: 2071352 - RNA, 19 nt, Homo sapiens
  misc_RNA (1)...(19): siRNA sense strand
cgacacaggugauacaguu

SEQ ID NO: 2071353 - RNA, 19 nt, Homo sapiens
  misc_RNA (1)...(19): siRNA sense strand
gaaugugccucauggagaa

SEQ ID NO: 2071354 - RNA, 19 nt, Homo sapiens
  misc_RNA (1)...(19): siRNA sense strand
gaagauggcuguggaaggu

SEQ ID NO: 2071355 - RNA, 19 nt, Homo sapiens
  misc_RNA (1)...(19): siRNA sense strand
gaaucucucucgccguaua

SEQ ID NO: 2071356 - RNA, 19 nt, Homo sapiens
  misc_RNA (1)...(19): siRNA sense strand
ugagggagauauugauuaa

SEQ ID NO: 2071357 - RNA, 19 nt, Homo sapiens
  misc_RNA (1)...(19): siRNA sense strand
gagcuaagccucuaugaug

SEQ ID NO: 2071358 - RNA, 19 nt, Homo sapiens
  misc_RNA (1)...(19): siRNA sense strand
gauaaagaggugaccauua

SEQ ID NO: 2071359 - RNA, 19 nt, Homo sapiens
  misc_RNA (1)...(19): siRNA sense strand
agccagaacugaaggauua

SEQ ID NO: 2071360 - RNA, 19 nt, Homo sapiens
  misc_RNA (1)...(19): siRNA sense strand
ccagugaaguuuauucuug

SEQ ID NO: 2071361 - RNA, 19 nt, Homo sapiens
  misc_RNA (1)...(19): siRNA sense strand
ggaccaggcuauuaaguca

SEQ ID NO: 2071362 - RNA, 19 nt, Homo sapiens
  misc_RNA (1)...(19): siRNA sense strand
aaacagugaucgcuaagaa

SEQ ID NO: 2071363 - RNA, 19 nt, Homo sapiens
  misc_RNA (1)...(19): siRNA sense strand
caagagacccucaaguaaa

SEQ ID NO: 2071364 - RNA, 19 nt, Homo sapiens
  misc_RNA (1)...(19): siRNA sense strand
ugacagaaauaugcagaua

SEQ ID NO: 2071365 - RNA, 19 nt, Homo sapiens
  misc_RNA (1)...(19): siRNA sense strand
caacagaauucucucagau

SEQ ID NO: 2071366 - RNA, 19 nt, Homo sapiens
  misc_RNA (1)...(19): siRNA sense strand
guccagcacuuauaaauau

SEQ ID NO: 2071367 - RNA, 19 nt, Homo sapiens
  misc_RNA (1)...(19): siRNA sense strand
gaaggcagaacucucauuu

SEQ ID NO: 2071368 - RNA, 19 nt, Homo sapiens
  misc_RNA (1)...(19): siRNA sense strand
ccgagaaguuuacaucuaa

SEQ ID NO: 2071369 - RNA, 19 nt, Homo sapiens
  misc_RNA (1)...(19): siRNA sense strand
gagcagcagaguaauguua

SEQ ID NO: 2071370 - RNA, 19 nt, Homo sapiens
  misc_RNA (1)...(19): siRNA sense strand
gauggacgcuuccugaugu

SEQ ID NO: 2071371 - RNA, 19 nt, Homo sapiens
  misc_RNA (1)...(19): siRNA sense strand
gcaaaauacucucuaugua

SEQ ID NO: 2071372 - RNA, 19 nt, Homo sapiens
  misc_RNA (1)...(19): siRNA sense strand
uaagauggauaaugcagaa

SEQ ID NO: 2071373 - RNA, 19 nt, Homo sapiens
  misc_RNA (1)...(19): siRNA sense strand
agaagaagcugaugaguac

SEQ ID NO: 2071374 - RNA, 19 nt, Homo sapiens
  misc_RNA (1)...(19): siRNA sense strand
cagcauaccucauaaaauu

SEQ ID NO: 2071375 - RNA, 19 nt, Homo sapiens
  misc_RNA (1)...(19): siRNA sense strand
aagaagaagcugaaacuua

SEQ ID NO: 2071376 - RNA, 19 nt, Homo sapiens
  misc_RNA (1)...(19): siRNA sense strand
ggacagaacaugccaucaa

SEQ ID NO: 2071377 - RNA, 19 nt, Homo sapiens
  misc_RNA (1)...(19): siRNA sense strand
gaaagacaauggcuaagac

SEQ ID NO: 2071378 - RNA, 19 nt, Homo sapiens
  misc_RNA (1)...(19): siRNA sense strand
uaaaggagauccaaaugag

SEQ ID NO: 2071379 - RNA, 19 nt, Homo sapiens
  misc_RNA (1)...(19): siRNA sense strand
gaacuacauuucagacucu

SEQ ID NO: 2071380 - RNA, 19 nt, Homo sapiens
  misc_RNA (1)...(19): siRNA sense strand
gaggagaaguuccaguaug

SEQ ID NO: 2071381 - RNA, 19 nt, Homo sapiens
  misc_RNA (1)...(19): siRNA sense strand
ggacaccacugaaacugau

SEQ ID NO: 2071382 - RNA, 19 nt, Homo sapiens
  misc_RNA (1)...(19): siRNA sense strand
aguggaaacucaucauaua

SEQ ID NO: 2071383 - RNA, 19 nt, Homo sapiens
  misc_RNA (1)...(19): siRNA sense strand
gcuacaggcugaaaugaug

SEQ ID NO: 2071384 - RNA, 19 nt, Homo sapiens
  misc_RNA (1)...(19): siRNA sense strand
acagagagaugcagcuuga

SEQ ID NO: 2071385 - RNA, 19 nt, Homo sapiens
  misc_RNA (1)...(19): siRNA sense strand
uggaagauaugcugaaaga

SEQ ID NO: 2071386 - RNA, 19 nt, Homo sapiens
  misc_RNA (1)...(19): siRNA sense strand
ggacaagaugacagaaaua

SEQ ID NO: 2071387 - RNA, 19 nt, Homo sapiens
  misc_RNA (1)...(19): siRNA sense strand
gaaacagaguucagcauac

SEQ ID NO: 2071388 - RNA, 19 nt, Homo sapiens
  misc_RNA (1)...(19): siRNA sense strand
gauggaagauaugcugaaa

SEQ ID NO: 2071389 - RNA, 19 nt, Homo sapiens
  misc_RNA (1)...(19): siRNA sense strand
cacaagagacccucaagua

SEQ ID NO: 2071390 - RNA, 19 nt, Homo sapiens
  misc_RNA (1)...(19): siRNA sense strand
agacaguggugaagaugua

SEQ ID NO: 2071391 - RNA, 19 nt, Homo sapiens
  misc_RNA (1)...(19): siRNA sense strand
gcagauaacaaucaacaga

SEQ ID NO: 2071392 - RNA, 19 nt, Homo sapiens
  misc_RNA (1)...(19): siRNA sense strand
ucucaaaggucaagugguu

SEQ ID NO: 2071393 - RNA, 19 nt, Homo sapiens
  misc_RNA (1)...(19): siRNA sense strand
acacagggauaccacagua

SEQ ID NO: 2071394 - RNA, 19 nt, Homo sapiens
  misc_RNA (1)...(19): siRNA sense strand
guucuaggcugcugagaga

SEQ ID NO: 2071395 - RNA, 19 nt, Homo sapiens
  misc_RNA (1)...(19): siRNA sense strand
augcaaaucugucacgaua

SEQ ID NO: 2071396 - RNA, 19 nt, Homo sapiens
  misc_RNA (1)...(19): siRNA sense strand
ccaaaugagugaauacgau

SEQ ID NO: 2071397 - RNA, 19 nt, Homo sapiens
  misc_RNA (1)...(19): siRNA sense strand
gauggaagacgcauuguug

SEQ ID NO: 2071398 - RNA, 19 nt, Homo sapiens
  misc_RNA (1)...(19): siRNA sense strand
gcuauuaagucaaccuugu

SEQ ID NO: 2071399 - RNA, 19 nt, Homo sapiens
  misc_RNA (1)...(19): siRNA sense strand
gaaacaugauuggacaaga

SEQ ID NO: 2071400 - RNA, 19 nt, Homo sapiens
  misc_RNA (1)...(19): siRNA sense strand
gcugggaaguccucucaaa

SEQ ID NO: 2071401 - RNA, 19 nt, Homo sapiens
  misc_RNA (1)...(19): siRNA sense strand
gaagacucaccuuugguua

SEQ ID NO: 2071402 - RNA, 19 nt, Homo sapiens
  misc_RNA (1)...(19): siRNA sense strand
gauacacccuuccaaaugg

SEQ ID NO: 2071403 - RNA, 19 nt, Homo sapiens
  misc_RNA (1)...(19): siRNA sense strand
auacagacuuugagccaua

SEQ ID NO: 2071404 - RNA, 19 nt, Homo sapiens
  misc_RNA (1)...(19): siRNA sense strand
aaagaaagacaauggcuaa

SEQ ID NO: 2071405 - RNA, 19 nt, Homo sapiens
  misc_RNA (1)...(19): siRNA sense strand
gaucaacuaucaucugaac

SEQ ID NO: 2071406 - RNA, 19 nt, Homo sapiens
  misc_RNA (1)...(19): siRNA sense strand
gaagaagcugaaacuuaua

SEQ ID NO: 2071407 - RNA, 19 nt, Homo sapiens
  misc_RNA (1)...(19): siRNA sense strand
ggugauacaguuaauauug

SEQ ID NO: 2071408 - RNA, 19 nt, Homo sapiens
  misc_RNA (1)...(19): siRNA sense strand
gguuaaagcaguaaaguug

SEQ ID NO: 2071409 - RNA, 19 nt, Homo sapiens
  misc_RNA (1)...(19): siRNA sense strand
caagauuguugacagauuc

SEQ ID NO: 2071410 - RNA, 19 nt, Homo sapiens
  misc_RNA (1)...(19): siRNA sense strand
ccagaauucuuaaccaugu

SEQ ID NO: 2071411 - RNA, 19 nt, Homo sapiens
  misc_RNA (1)...(19): siRNA sense strand
gaacugaaggauuacaaau

SEQ ID NO: 2071412 - RNA, 19 nt, Homo sapiens
  misc_RNA (1)...(19): siRNA sense strand
ggauaucccucagauuuua

SEQ ID NO: 2071413 - RNA, 19 nt, Homo sapiens
  misc_RNA (1)...(19): siRNA sense strand
gacaauggcuaagacauca

SEQ ID NO: 2071414 - RNA, 19 nt, Homo sapiens
  misc_RNA (1)...(19): siRNA sense strand
uaaagacggacuuauugua

SEQ ID NO: 2071415 - RNA, 19 nt, Homo sapiens
  misc_RNA (1)...(19): siRNA sense strand
gaagauaugcugaaagacu

SEQ ID NO: 2071416 - RNA, 19 nt, Homo sapiens
  misc_RNA (1)...(19): siRNA sense strand
gaaguaacaucuggaacuc

SEQ ID NO: 2071417 - RNA, 19 nt, Homo sapiens
  misc_RNA (1)...(19): siRNA sense strand
ccaaggauaucccucagau

SEQ ID NO: 2071418 - RNA, 19 nt, Homo sapiens
  misc_RNA (1)...(19): siRNA sense strand
caacagagacaguggugaa

SEQ ID NO: 2071419 - RNA, 19 nt, Homo sapiens
  misc_RNA (1)...(19): siRNA sense strand
caggagaagucccucuaaa

SEQ ID NO: 2071420 - RNA, 19 nt, Homo sapiens
  misc_RNA (1)...(19): siRNA sense strand
acagaauucucucagauga

SEQ ID NO: 2071421 - RNA, 19 nt, Homo sapiens
  misc_RNA (1)...(19): siRNA sense strand
guaauguuauccuguuguu

SEQ ID NO: 2071422 - RNA, 19 nt, Homo sapiens
  misc_RNA (1)...(19): siRNA sense strand
cauaaaggguccagcacuu

SEQ ID NO: 2071423 - RNA, 19 nt, Homo sapiens
  misc_RNA (1)...(19): siRNA sense strand
cgaaauguguuugacuuug

SEQ ID NO: 2071424 - RNA, 19 nt, Homo sapiens
  misc_RNA (1)...(19): siRNA sense strand
gcagauggaagacgcauug

SEQ ID NO: 2071425 - RNA, 19 nt, Homo sapiens
  misc_RNA (1)...(19): siRNA sense strand
ggcuaaagguaaagaaaga

SEQ ID NO: 2071426 - RNA, 19 nt, Homo sapiens
  misc_RNA (1)...(19): siRNA sense strand
ggaagacauuacaaacuua

SEQ ID NO: 2071427 - RNA, 19 nt, Homo sapiens
  misc_RNA (1)...(19): siRNA sense strand
ucaacaagauucugccaua

SEQ ID NO: 2071428 - RNA, 19 nt, Homo sapiens
  misc_RNA (1)...(19): siRNA sense strand
gaaagaagaacuuaugcaa

SEQ ID NO: 2071429 - RNA, 19 nt, Homo sapiens
  misc_RNA (1)...(19): siRNA sense strand
aagaagaacuuaugcaaga

SEQ ID NO: 2071430 - RNA, 19 nt, Homo sapiens
  misc_RNA (1)...(19): siRNA sense strand
gagaauaccaaacuucauu

SEQ ID NO: 2071431 - RNA, 19 nt, Homo sapiens
  misc_RNA (1)...(19): siRNA sense strand
ccuggaaacucaaaucaaa

SEQ ID NO: 2071432 - RNA, 19 nt, Homo sapiens
  misc_RNA (1)...(19): siRNA sense strand
uaacacaaguacaggaaga

SEQ ID NO: 2071433 - RNA, 19 nt, Homo sapiens
  misc_RNA (1)...(19): siRNA sense strand
auaccaaacuucauuguga

SEQ ID NO: 2071434 - RNA, 19 nt, Homo sapiens
  misc_RNA (1)...(19): siRNA sense strand
gaaccgaauaacacaagua

SEQ ID NO: 2071435 - RNA, 19 nt, Homo sapiens
  misc_RNA (1)...(19): siRNA sense strand
ugacugaacuccaugaaaa

SEQ ID NO: 2071436 - RNA, 19 nt, Homo sapiens
  misc_RNA (1)...(19): siRNA sense strand
gugauagccuggaaacuca

SEQ ID NO: 2071437 - RNA, 19 nt, Homo sapiens
  misc_RNA (1)...(19): siRNA sense strand
gaacuuaugcaagaucuuc

SEQ ID NO: 2071438 - RNA, 19 nt, Homo sapiens
  misc_RNA (1)...(19): siRNA sense strand
ccaagaagauuuugaggaa

SEQ ID NO: 2071439 - RNA, 19 nt, Homo sapiens
  misc_RNA (1)...(19): siRNA sense strand
agaaacagcccaagaagau

SEQ ID NO: 2071440 - RNA, 19 nt, Homo sapiens
  misc_RNA (1)...(19): siRNA sense strand
aggaagacauuacaaacuu

SEQ ID NO: 2071441 - RNA, 19 nt, Homo sapiens
  misc_RNA (1)...(19): siRNA sense strand
aaacagcccaagaagauuu

SEQ ID NO: 2071442 - RNA, 19 nt, Homo sapiens
  misc_RNA (1)...(19): siRNA sense strand
ggaaguagagagcaaaugg

SEQ ID NO: 2071443 - RNA, 19 nt, Homo sapiens
  misc_RNA (1)...(19): siRNA sense strand
cauagaaacagcccaagaa

SEQ ID NO: 2071444 - RNA, 19 nt, Homo sapiens
  misc_RNA (1)...(19): siRNA sense strand
caacaagauucugccauag

SEQ ID NO: 2071445 - RNA, 19 nt, Homo sapiens
  misc_RNA (1)...(19): siRNA sense strand
ucaaauccuuacauucaga

SEQ ID NO: 2071446 - RNA, 19 nt, Homo sapiens
  misc_RNA (1)...(19): siRNA sense strand
gaaacagcccaagaagauu

SEQ ID NO: 2071447 - RNA, 19 nt, Homo sapiens
  misc_RNA (1)...(19): siRNA sense strand
cauagagaauaccaaacuu

SEQ ID NO: 2071448 - RNA, 19 nt, Homo sapiens
  misc_RNA (1)...(19): siRNA sense strand
gaagaacuuaugcaagauc

SEQ ID NO: 2071449 - RNA, 19 nt, Homo sapiens
  misc_RNA (1)...(19): siRNA sense strand
gacaaugaaagaagaacuu

SEQ ID NO: 2071450 - RNA, 19 nt, Homo sapiens
  misc_RNA (1)...(19): siRNA sense strand
ugcagaaacuaaagaaaca

SEQ ID NO: 2071451 - RNA, 19 nt, Homo sapiens
  misc_RNA (1)...(19): siRNA sense strand
ggagggaaccgaauaacac

SEQ ID NO: 2071452 - RNA, 19 nt, Homo sapiens
  misc_RNA (1)...(19): siRNA sense strand
acaaguacaggaagacauu

SEQ ID NO: 2071453 - RNA, 19 nt, Homo sapiens
  misc_RNA (1)...(19): siRNA sense strand
guacaggaagacauuacaa

SEQ ID NO: 2071454 - RNA, 19 nt, Homo sapiens
  misc_RNA (1)...(19): siRNA sense strand
gaauaccaaacuucauugu

SEQ ID NO: 2071455 - RNA, 19 nt, Homo sapiens
  misc_RNA (1)...(19): siRNA sense strand
ccaggagggaaccgaauaa

SEQ ID NO: 2071456 - RNA, 19 nt, Homo sapiens
  misc_RNA (1)...(19): siRNA sense strand
acaagauucugccauagag

SEQ ID NO: 2071457 - RNA, 19 nt, Homo sapiens
  misc_RNA (1)...(19): siRNA sense strand
caaguacaggaagacauua

SEQ ID NO: 2071458 - RNA, 19 nt, Homo sapiens
  misc_RNA (1)...(19): siRNA sense strand
cuaaagaaacagaaagaca

SEQ ID NO: 2071459 - RNA, 19 nt, Homo sapiens
  misc_RNA (1)...(19): siRNA sense strand
ggaaccgaauaacacaagu

SEQ ID NO: 2071460 - RNA, 19 nt, Homo sapiens
  misc_RNA (1)...(19): siRNA sense strand
uagaaacagcccaagaaga

SEQ ID NO: 2071461 - RNA, 19 nt, Homo sapiens
  misc_RNA (1)...(19): siRNA sense strand
guagagagcaaauggucau

SEQ ID NO: 2071462 - RNA, 19 nt, Homo sapiens
  misc_RNA (1)...(19): siRNA sense strand
uagagaauaccaaacuuca

SEQ ID NO: 2071463 - RNA, 19 nt, Homo sapiens
  misc_RNA (1)...(19): siRNA sense strand
uaccaaacuucauugugau

SEQ ID NO: 2071464 - RNA, 19 nt, Homo sapiens
  misc_RNA (1)...(19): siRNA sense strand
ccauagagaauaccaaacu

SEQ ID NO: 2071465 - RNA, 19 nt, Homo sapiens
  misc_RNA (1)...(19): siRNA sense strand
gaaguagagagcaaauggu

SEQ ID NO: 2071466 - RNA, 19 nt, Homo sapiens
  misc_RNA (1)...(19): siRNA sense strand
gagggaaccgaauaacaca

SEQ ID NO: 2071467 - RNA, 19 nt, Homo sapiens
  misc_RNA (1)...(19): siRNA sense strand
uugaggaacacaugauaaa

SEQ ID NO: 2071468 - RNA, 19 nt, Homo sapiens
  misc_RNA (1)...(19): siRNA sense strand
caaauccuuacauucagaa

SEQ ID NO: 2071469 - RNA, 19 nt, Homo sapiens
  misc_RNA (1)...(19): siRNA sense strand
uacaggaagacauuacaaa

SEQ ID NO: 2071470 - RNA, 19 nt, Homo sapiens
  misc_RNA (1)...(19): siRNA sense strand
cagaaacuaaagaaacaga

SEQ ID NO: 2071471 - RNA, 19 nt, Homo sapiens
  misc_RNA (1)...(19): siRNA sense strand
gaggaacacaugauaaaau

SEQ ID NO: 2071472 - RNA, 19 nt, Homo sapiens
  misc_RNA (1)...(19): siRNA sense strand
ccgaauaacacaaguacag

SEQ ID NO: 2071473 - RNA, 19 nt, Homo sapiens
  misc_RNA (1)...(19): siRNA sense strand
agaagaacuuaugcaagau

SEQ ID NO: 2071474 - RNA, 19 nt, Homo sapiens
  misc_RNA (1)...(19): siRNA sense strand
caaacuucauugugauagc

SEQ ID NO: 2071475 - RNA, 19 nt, Homo sapiens
  misc_RNA (1)...(19): siRNA sense strand
gauagccuggaaacucaaa

SEQ ID NO: 2071476 - RNA, 19 nt, Homo sapiens
  misc_RNA (1)...(19): siRNA sense strand
ugaaagaagaacuuaugca

SEQ ID NO: 2071477 - RNA, 19 nt, Homo sapiens
  misc_RNA (1)...(19): siRNA sense strand
aauaacacaaguacaggaa

SEQ ID NO: 2071478 - RNA, 19 nt, Homo sapiens
  misc_RNA (1)...(19): siRNA sense strand
ucauugugauagccuggaa

SEQ ID NO: 2071479 - RNA, 19 nt, Homo sapiens
  misc_RNA (1)...(19): siRNA sense strand
gacauuacaaacuuaaagg

SEQ ID NO: 2071480 - RNA, 19 nt, Homo sapiens
  misc_RNA (1)...(19): siRNA sense strand
caggaagacauuacaaacu

SEQ ID NO: 2071481 - RNA, 19 nt, Homo sapiens
  misc_RNA (1)...(19): siRNA sense strand
gggaaccgaauaacacaag

SEQ ID NO: 2071482 - RNA, 19 nt, Homo sapiens
  misc_RNA (1)...(19): siRNA sense strand
agaauaccaaacuucauug

SEQ ID NO: 2071483 - RNA, 19 nt, Homo sapiens
  misc_RNA (1)...(19): siRNA sense strand
caagauucugccauagaga

SEQ ID NO: 2071484 - RNA, 19 nt, Homo sapiens
  misc_RNA (1)...(19): siRNA sense strand
uggaaacucaaaucaaauc

SEQ ID NO: 2071485 - RNA, 19 nt, Homo sapiens
  misc_RNA (1)...(19): siRNA sense strand
ggaagacauuacaaacuua

SEQ ID NO: 2071486 - RNA, 19 nt, Homo sapiens
  misc_RNA (1)...(19): siRNA sense strand
gaaagaagaacuuaugcaa

SEQ ID NO: 2071487 - RNA, 19 nt, Homo sapiens
  misc_RNA (1)...(19): siRNA sense strand
aagaagaacuuaugcaaga

SEQ ID NO: 2071488 - RNA, 19 nt, Homo sapiens
  misc_RNA (1)...(19): siRNA sense strand
uaacacaaguacaggaaga

SEQ ID NO: 2071489 - RNA, 19 nt, Homo sapiens
  misc_RNA (1)...(19): siRNA sense strand
gaaccgaauaacacaagua

SEQ ID NO: 2071490 - RNA, 19 nt, Homo sapiens
  misc_RNA (1)...(19): siRNA sense strand
ugacugaacuccaugaaaa

SEQ ID NO: 2071491 - RNA, 19 nt, Homo sapiens
  misc_RNA (1)...(19): siRNA sense strand
gaacuuaugcaagaucuuc

SEQ ID NO: 2071492 - RNA, 19 nt, Homo sapiens
  misc_RNA (1)...(19): siRNA sense strand
aggaagacauuacaaacuu

SEQ ID NO: 2071493 - RNA, 19 nt, Homo sapiens
  misc_RNA (1)...(19): siRNA sense strand
ggaaguagagagcaaaugg

SEQ ID NO: 2071494 - RNA, 19 nt, Homo sapiens
  misc_RNA (1)...(19): siRNA sense strand
gaagaacuuaugcaagauc

SEQ ID NO: 2071495 - RNA, 19 nt, Homo sapiens
  misc_RNA (1)...(19): siRNA sense strand
gacaaugaaagaagaacuu

SEQ ID NO: 2071496 - RNA, 19 nt, Homo sapiens
  misc_RNA (1)...(19): siRNA sense strand
ggagggaaccgaauaacac

SEQ ID NO: 2071497 - RNA, 19 nt, Homo sapiens
  misc_RNA (1)...(19): siRNA sense strand
acaaguacaggaagacauu

SEQ ID NO: 2071498 - RNA, 19 nt, Homo sapiens
  misc_RNA (1)...(19): siRNA sense strand
guacaggaagacauuacaa

SEQ ID NO: 2071499 - RNA, 19 nt, Homo sapiens
  misc_RNA (1)...(19): siRNA sense strand
ccaggagggaaccgaauaa

SEQ ID NO: 2071500 - RNA, 19 nt, Homo sapiens
  misc_RNA (1)...(19): siRNA sense strand
caaguacaggaagacauua

SEQ ID NO: 2071501 - RNA, 19 nt, Homo sapiens
  misc_RNA (1)...(19): siRNA sense strand
ggaaccgaauaacacaagu

SEQ ID NO: 2071502 - RNA, 19 nt, Homo sapiens
  misc_RNA (1)...(19): siRNA sense strand
guagagagcaaauggucau

SEQ ID NO: 2071503 - RNA, 19 nt, Homo sapiens
  misc_RNA (1)...(19): siRNA sense strand
gagggaaccgaauaacaca

SEQ ID NO: 2071504 - RNA, 19 nt, Homo sapiens
  misc_RNA (1)...(19): siRNA sense strand
gaaguagagagcaaauggu

SEQ ID NO: 2071505 - RNA, 19 nt, Homo sapiens
  misc_RNA (1)...(19): siRNA sense strand
uacaggaagacauuacaaa

SEQ ID NO: 2071506 - RNA, 19 nt, Homo sapiens
  misc_RNA (1)...(19): siRNA sense strand
agaagaacuuaugcaagau

SEQ ID NO: 2071507 - RNA, 19 nt, Homo sapiens
  misc_RNA (1)...(19): siRNA sense strand
ccgaauaacacaaguacag

SEQ ID NO: 2071508 - RNA, 19 nt, Homo sapiens
  misc_RNA (1)...(19): siRNA sense strand
ugaaagaagaacuuaugca

SEQ ID NO: 2071509 - RNA, 19 nt, Homo sapiens
  misc_RNA (1)...(19): siRNA sense strand
aauaacacaaguacaggaa

SEQ ID NO: 2071510 - RNA, 19 nt, Homo sapiens
  misc_RNA (1)...(19): siRNA sense strand
gggaaccgaauaacacaag

SEQ ID NO: 2071511 - RNA, 19 nt, Homo sapiens
  misc_RNA (1)...(19): siRNA sense strand
gacauuacaaacuuaaagg

SEQ ID NO: 2071512 - RNA, 19 nt, Homo sapiens
  misc_RNA (1)...(19): siRNA sense strand
caggaagacauuacaaacu

SEQ ID NO: 2071513 - RNA, 19 nt, Homo sapiens
  misc_RNA (1)...(19): siRNA sense strand
gaaauuagauaccgaggaa

SEQ ID NO: 2071514 - RNA, 19 nt, Homo sapiens
  misc_RNA (1)...(19): siRNA sense strand
gcaacuucaugaacauuua

SEQ ID NO: 2071515 - RNA, 19 nt, Homo sapiens
  misc_RNA (1)...(19): siRNA sense strand
agaugaaacucuaccgaua

SEQ ID NO: 2071516 - RNA, 19 nt, Homo sapiens
  misc_RNA (1)...(19): siRNA sense strand
agucauaucuucaaccauu

SEQ ID NO: 2071517 - RNA, 19 nt, Homo sapiens
  misc_RNA (1)...(19): siRNA sense strand
gaugaaacucuaccgauaa

SEQ ID NO: 2071518 - RNA, 19 nt, Homo sapiens
  misc_RNA (1)...(19): siRNA sense strand
gaaacucuaccgauaaaug

SEQ ID NO: 2071519 - RNA, 19 nt, Homo sapiens
  misc_RNA (1)...(19): siRNA sense strand
uuacagacauggaagaaug

SEQ ID NO: 2071520 - RNA, 19 nt, Homo sapiens
  misc_RNA (1)...(19): siRNA sense strand
gaggauaggcagagaagaa

SEQ ID NO: 2071521 - RNA, 19 nt, Homo sapiens
  misc_RNA (1)...(19): siRNA sense strand
ccaauugauuuaaccaaga

SEQ ID NO: 2071522 - RNA, 19 nt, Homo sapiens
  misc_RNA (1)...(19): siRNA sense strand
agacacggcuccagauuca

SEQ ID NO: 2071523 - RNA, 19 nt, Homo sapiens
  misc_RNA (1)...(19): siRNA sense strand
ggaauucugucuggaguca

SEQ ID NO: 2071524 - RNA, 19 nt, Homo sapiens
  misc_RNA (1)...(19): siRNA sense strand
ucuaugacaucaccaagaa

SEQ ID NO: 2071525 - RNA, 19 nt, Homo sapiens
  misc_RNA (1)...(19): siRNA sense strand
ggagucauaucuucaacca

SEQ ID NO: 2071526 - RNA, 19 nt, Homo sapiens
  misc_RNA (1)...(19): siRNA sense strand
ccaucaagauaggcacuua

SEQ ID NO: 2071527 - RNA, 19 nt, Homo sapiens
  misc_RNA (1)...(19): siRNA sense strand
gcgcaaagcaacaccauuc

SEQ ID NO: 2071528 - RNA, 19 nt, Homo sapiens
  misc_RNA (1)...(19): siRNA sense strand
gcacuuaccagagcuugaa

SEQ ID NO: 2071529 - RNA, 19 nt, Homo sapiens
  misc_RNA (1)...(19): siRNA sense strand
ggaaugauaggcaacuuca

SEQ ID NO: 2071530 - RNA, 19 nt, Homo sapiens
  misc_RNA (1)...(19): siRNA sense strand
aacccuggauugcuuguua

SEQ ID NO: 2071531 - RNA, 19 nt, Homo sapiens
  misc_RNA (1)...(19): siRNA sense strand
cauacgagcaguugaagaa

SEQ ID NO: 2071532 - RNA, 19 nt, Homo sapiens
  misc_RNA (1)...(19): siRNA sense strand
cccagaagaugaaacucua

SEQ ID NO: 2071533 - RNA, 19 nt, Homo sapiens
  misc_RNA (1)...(19): siRNA sense strand
gacgaaugaugcaaaauuu

SEQ ID NO: 2071534 - RNA, 19 nt, Homo sapiens
  misc_RNA (1)...(19): siRNA sense strand
gcgguacauuuccaauuga

SEQ ID NO: 2071535 - RNA, 19 nt, Homo sapiens
  misc_RNA (1)...(19): siRNA sense strand
gcaaagcaacaccauucaa

SEQ ID NO: 2071536 - RNA, 19 nt, Homo sapiens
  misc_RNA (1)...(19): siRNA sense strand
agacuugguccuuggaaua

SEQ ID NO: 2071537 - RNA, 19 nt, Homo sapiens
  misc_RNA (1)...(19): siRNA sense strand
acgagcaguugaagaaauu

SEQ ID NO: 2071538 - RNA, 19 nt, Homo sapiens
  misc_RNA (1)...(19): siRNA sense strand
guguggagcugccggucua

SEQ ID NO: 2071539 - RNA, 19 nt, Homo sapiens
  misc_RNA (1)...(19): siRNA sense strand
ugacauacgagcaguugaa

SEQ ID NO: 2071540 - RNA, 19 nt, Homo sapiens
  misc_RNA (1)...(19): siRNA sense strand
gugaggacacguaugauga

SEQ ID NO: 2071541 - RNA, 19 nt, Homo sapiens
  misc_RNA (1)...(19): siRNA sense strand
caaagcaacaccauucaag

SEQ ID NO: 2071542 - RNA, 19 nt, Homo sapiens
  misc_RNA (1)...(19): siRNA sense strand
caagacacggcuccagauu

SEQ ID NO: 2071543 - RNA, 19 nt, Homo sapiens
  misc_RNA (1)...(19): siRNA sense strand
gagggcugcuauuguuguu

SEQ ID NO: 2071544 - RNA, 19 nt, Homo sapiens
  misc_RNA (1)...(19): siRNA sense strand
ggacaagaggacuguggaa

SEQ ID NO: 2071545 - RNA, 19 nt, Homo sapiens
  misc_RNA (1)...(19): siRNA sense strand
aauucugucuggagucaua

SEQ ID NO: 2071546 - RNA, 19 nt, Homo sapiens
  misc_RNA (1)...(19): siRNA sense strand
cuggauugcuuguuacaga

SEQ ID NO: 2071547 - RNA, 19 nt, Homo sapiens
  misc_RNA (1)...(19): siRNA sense strand
guugugaggacacguauga

SEQ ID NO: 2071548 - RNA, 19 nt, Homo sapiens
  misc_RNA (1)...(19): siRNA sense strand
ugcgguacauuuccaauug

SEQ ID NO: 2071549 - RNA, 19 nt, Homo sapiens
  misc_RNA (1)...(19): siRNA sense strand
augaaacucuaccgauaaa

SEQ ID NO: 2071550 - RNA, 19 nt, Homo sapiens
  misc_RNA (1)...(19): siRNA sense strand
gagacuugguccuuggaau

SEQ ID NO: 2071551 - RNA, 19 nt, Homo sapiens
  misc_RNA (1)...(19): siRNA sense strand
gcuucgagauggcagaugu

SEQ ID NO: 2071552 - RNA, 19 nt, Homo sapiens
  misc_RNA (1)...(19): siRNA sense strand
gcuaauccaacugauguuu

SEQ ID NO: 2071553 - RNA, 19 nt, Homo sapiens
  misc_RNA (1)...(19): siRNA sense strand
uaucuucaaccauugcuaa

SEQ ID NO: 2071554 - RNA, 19 nt, Homo sapiens
  misc_RNA (1)...(19): siRNA sense strand
caaacccuguugauguugu

SEQ ID NO: 2071555 - RNA, 19 nt, Homo sapiens
  misc_RNA (1)...(19): siRNA sense strand
caugaacauuuaccagcaa

SEQ ID NO: 2071556 - RNA, 19 nt, Homo sapiens
  misc_RNA (1)...(19): siRNA sense strand
aaugugauauguggaauuc

SEQ ID NO: 2071557 - RNA, 19 nt, Homo sapiens
  misc_RNA (1)...(19): siRNA sense strand
gaggacacguaugaugaau

SEQ ID NO: 2071558 - RNA, 19 nt, Homo sapiens
  misc_RNA (1)...(19): siRNA sense strand
gauguugugaggacacgua

SEQ ID NO: 2071559 - RNA, 19 nt, Homo sapiens
  misc_RNA (1)...(19): siRNA sense strand
gaggaaugauaggcaacuu

SEQ ID NO: 2071560 - RNA, 19 nt, Homo sapiens
  misc_RNA (1)...(19): siRNA sense strand
gaacauuuaccagcaagag

SEQ ID NO: 2071561 - RNA, 19 nt, Homo sapiens
  misc_RNA (1)...(19): siRNA sense strand
gaagcaucuuauucucuca

SEQ ID NO: 2071562 - RNA, 19 nt, Homo sapiens
  misc_RNA (1)...(19): siRNA sense strand
ugucuggagucauaucuuc

SEQ ID NO: 2071563 - RNA, 19 nt, Homo sapiens
  misc_RNA (1)...(19): siRNA sense strand
aaacucuaccgauaaaugu

SEQ ID NO: 2071564 - RNA, 19 nt, Homo sapiens
  misc_RNA (1)...(19): siRNA sense strand
auaggcaacuucaugaaca

SEQ ID NO: 2071565 - RNA, 19 nt, Homo sapiens
  misc_RNA (1)...(19): siRNA sense strand
ugugauauguggaauucug

SEQ ID NO: 2071566 - RNA, 19 nt, Homo sapiens
  misc_RNA (1)...(19): siRNA sense strand
gagaagaagggcugaaagc

SEQ ID NO: 2071567 - RNA, 19 nt, Homo sapiens
  misc_RNA (1)...(19): siRNA sense strand
acuggaagccguuugugua

SEQ ID NO: 2071568 - RNA, 19 nt, Homo sapiens
  misc_RNA (1)...(19): siRNA sense strand
gcacgcauuagugaggaua

SEQ ID NO: 2071569 - RNA, 19 nt, Homo sapiens
  misc_RNA (1)...(19): siRNA sense strand
uacgagcaguugaagaaau

SEQ ID NO: 2071570 - RNA, 19 nt, Homo sapiens
  misc_RNA (1)...(19): siRNA sense strand
ggcaacuucaugaacauuu

SEQ ID NO: 2071571 - RNA, 19 nt, Homo sapiens
  misc_RNA (1)...(19): siRNA sense strand
cagagaagaagggcugaaa

SEQ ID NO: 2071572 - RNA, 19 nt, Homo sapiens
  misc_RNA (1)...(19): siRNA sense strand
gcugagugcgguacauuuc

SEQ ID NO: 2071573 - RNA, 19 nt, Homo sapiens
  misc_RNA (1)...(19): siRNA sense strand
caauugauuuaaccaagac

SEQ ID NO: 2071574 - RNA, 19 nt, Homo sapiens
  misc_RNA (1)...(19): siRNA sense strand
gauaggcaacuucaugaac

SEQ ID NO: 2071575 - RNA, 19 nt, Homo sapiens
  misc_RNA (1)...(19): siRNA sense strand
ugaggacacguaugaugaa

SEQ ID NO: 2071576 - RNA, 19 nt, Homo sapiens
  misc_RNA (1)...(19): siRNA sense strand
aagcaacaccauucaagga

SEQ ID NO: 2071577 - RNA, 19 nt, Homo sapiens
  misc_RNA (1)...(19): siRNA sense strand
auggaagaaugaaggguuu

SEQ ID NO: 2071578 - RNA, 19 nt, Homo sapiens
  misc_RNA (1)...(19): siRNA sense strand
ucauugaacgcccagaaga

SEQ ID NO: 2071579 - RNA, 19 nt, Homo sapiens
  misc_RNA (1)...(19): siRNA sense strand
ccagacgaaugaugcaaaa

SEQ ID NO: 2071580 - RNA, 19 nt, Homo sapiens
  misc_RNA (1)...(19): siRNA sense strand
gaacgcccagaagaugaaa

SEQ ID NO: 2071581 - RNA, 19 nt, Homo sapiens
  misc_RNA (1)...(19): siRNA sense strand
ggaugcaagcgcaaagcaa

SEQ ID NO: 2071582 - RNA, 19 nt, Homo sapiens
  misc_RNA (1)...(19): siRNA sense strand
uaauccaacugauguuuug

SEQ ID NO: 2071583 - RNA, 19 nt, Homo sapiens
  misc_RNA (1)...(19): siRNA sense strand
gccagacgaaugaugcaaa

SEQ ID NO: 2071584 - RNA, 19 nt, Homo sapiens
  misc_RNA (1)...(19): siRNA sense strand
gucauaucuucaaccauug

SEQ ID NO: 2071585 - RNA, 19 nt, Homo sapiens
  misc_RNA (1)...(19): siRNA sense strand
ccaagacacggcuccagau

SEQ ID NO: 2071586 - RNA, 19 nt, Homo sapiens
  misc_RNA (1)...(19): siRNA sense strand
cagagagugcuucgagaug

SEQ ID NO: 2071587 - RNA, 19 nt, Homo sapiens
  misc_RNA (1)...(19): siRNA sense strand
accgauaaaugugauaugu

SEQ ID NO: 2071588 - RNA, 19 nt, Homo sapiens
  misc_RNA (1)...(19): siRNA sense strand
gacuugguccuuggaauau

SEQ ID NO: 2071589 - RNA, 19 nt, Homo sapiens
  misc_RNA (1)...(19): siRNA sense strand
ugaacgcccagaagaugaa

SEQ ID NO: 2071590 - RNA, 19 nt, Homo sapiens
  misc_RNA (1)...(19): siRNA sense strand
gcaguugaagaaauuggau

SEQ ID NO: 2071591 - RNA, 19 nt, Homo sapiens
  misc_RNA (1)...(19): siRNA sense strand
gugcgguacauuuccaauu

SEQ ID NO: 2071592 - RNA, 19 nt, Homo sapiens
  misc_RNA (1)...(19): siRNA sense strand
ucagagagugcuucgagau

SEQ ID NO: 2071593 - RNA, 19 nt, Homo sapiens
  misc_RNA (1)...(19): siRNA sense strand
gcccagaagaugaaacucu

SEQ ID NO: 2071594 - RNA, 19 nt, Homo sapiens
  misc_RNA (1)...(19): siRNA sense strand
gguccuuggaauaucauuu

SEQ ID NO: 2071595 - RNA, 19 nt, Homo sapiens
  misc_RNA (1)...(19): siRNA sense strand
uagauaccgaggaauguug

SEQ ID NO: 2071596 - RNA, 19 nt, Homo sapiens
  misc_RNA (1)...(19): siRNA sense strand
ccauugcuaauccaacuga

SEQ ID NO: 2071597 - RNA, 19 nt, Homo sapiens
  misc_RNA (1)...(19): siRNA sense strand
aauuagauaccgaggaaug

SEQ ID NO: 2071598 - RNA, 19 nt, Homo sapiens
  misc_RNA (1)...(19): siRNA sense strand
uauacccacuuccucucaa

SEQ ID NO: 2071599 - RNA, 19 nt, Homo sapiens
  misc_RNA (1)...(19): siRNA sense strand
guauacccacuuccucuca

SEQ ID NO: 2071600 - RNA, 19 nt, Homo sapiens
  misc_RNA (1)...(19): siRNA sense strand
gcagagaagaagggcugaa

SEQ ID NO: 2071601 - RNA, 19 nt, Homo sapiens
  misc_RNA (1)...(19): siRNA sense strand
gagcugccggucuaugaca

SEQ ID NO: 2071602 - RNA, 19 nt, Homo sapiens
  misc_RNA (1)...(19): siRNA sense strand
gcaaagugaucuaacauua

SEQ ID NO: 2071603 - RNA, 19 nt, Homo sapiens
  misc_RNA (1)...(19): siRNA sense strand
gggcaaaguucacauauuu

SEQ ID NO: 2071604 - RNA, 19 nt, Homo sapiens
  misc_RNA (1)...(19): siRNA sense strand
gaucuaacauuacagagua

SEQ ID NO: 2071605 - RNA, 19 nt, Homo sapiens
  misc_RNA (1)...(19): siRNA sense strand
gcagauaggucaguugaaa

SEQ ID NO: 2071606 - RNA, 19 nt, Homo sapiens
  misc_RNA (1)...(19): siRNA sense strand
gaagaaagagaccaguuua

SEQ ID NO: 2071607 - RNA, 19 nt, Homo sapiens
  misc_RNA (1)...(19): siRNA sense strand
ggacauggauauagcaaug

SEQ ID NO: 2071608 - RNA, 19 nt, Homo sapiens
  misc_RNA (1)...(19): siRNA sense strand
ggauuaagcacagauauua

SEQ ID NO: 2071609 - RNA, 19 nt, Homo sapiens
  misc_RNA (1)...(19): siRNA sense strand
caaaugagauuagagagaa

SEQ ID NO: 2071610 - RNA, 19 nt, Homo sapiens
  misc_RNA (1)...(19): siRNA sense strand
gaagagcuguuacggauag

SEQ ID NO: 2071611 - RNA, 19 nt, Homo sapiens
  misc_RNA (1)...(19): siRNA sense strand
agaaagagcugguggaaca

SEQ ID NO: 2071612 - RNA, 19 nt, Homo sapiens
  misc_RNA (1)...(19): siRNA sense strand
gagagaagcaguagauuug

SEQ ID NO: 2071613 - RNA, 19 nt, Homo sapiens
  misc_RNA (1)...(19): siRNA sense strand
gaaggucagucuacacgaa

SEQ ID NO: 2071614 - RNA, 19 nt, Homo sapiens
  misc_RNA (1)...(19): siRNA sense strand
auacaagcaugccagauua

SEQ ID NO: 2071615 - RNA, 19 nt, Homo sapiens
  misc_RNA (1)...(19): siRNA sense strand
gaaagacuguugacacucu

SEQ ID NO: 2071616 - RNA, 19 nt, Homo sapiens
  misc_RNA (1)...(19): siRNA sense strand
gaagaaauguggaaaacuu

SEQ ID NO: 2071617 - RNA, 19 nt, Homo sapiens
  misc_RNA (1)...(19): siRNA sense strand
gcaaacugagggcauaaua

SEQ ID NO: 2071618 - RNA, 19 nt, Homo sapiens
  misc_RNA (1)...(19): siRNA sense strand
caacaaagugcucgugauu

SEQ ID NO: 2071619 - RNA, 19 nt, Homo sapiens
  misc_RNA (1)...(19): siRNA sense strand
gcauugagaugagauugaa

SEQ ID NO: 2071620 - RNA, 19 nt, Homo sapiens
  misc_RNA (1)...(19): siRNA sense strand
gaagauggcaagaaggauu

SEQ ID NO: 2071621 - RNA, 19 nt, Homo sapiens
  misc_RNA (1)...(19): siRNA sense strand
gcacaaagggcaaaguuca

SEQ ID NO: 2071622 - RNA, 19 nt, Homo sapiens
  misc_RNA (1)...(19): siRNA sense strand
ugaagcagcugcaaguguu

SEQ ID NO: 2071623 - RNA, 19 nt, Homo sapiens
  misc_RNA (1)...(19): siRNA sense strand
agcagaagccuuagaauua

SEQ ID NO: 2071624 - RNA, 19 nt, Homo sapiens
  misc_RNA (1)...(19): siRNA sense strand
gaagugauaauggagauaa

SEQ ID NO: 2071625 - RNA, 19 nt, Homo sapiens
  misc_RNA (1)...(19): siRNA sense strand
gggaucagcagaagccuua

SEQ ID NO: 2071626 - RNA, 19 nt, Homo sapiens
  misc_RNA (1)...(19): siRNA sense strand
gcagaagccuuagaauuac

SEQ ID NO: 2071627 - RNA, 19 nt, Homo sapiens
  misc_RNA (1)...(19): siRNA sense strand
aaacagcacagcuccauuu

SEQ ID NO: 2071628 - RNA, 19 nt, Homo sapiens
  misc_RNA (1)...(19): siRNA sense strand
aagaacagaucaucaagga

SEQ ID NO: 2071629 - RNA, 19 nt, Homo sapiens
  misc_RNA (1)...(19): siRNA sense strand
cuuauaggcuucugucuug

SEQ ID NO: 2071630 - RNA, 19 nt, Homo sapiens
  misc_RNA (1)...(19): siRNA sense strand
aaauacagcuggagacauc

SEQ ID NO: 2071631 - RNA, 19 nt, Homo sapiens
  misc_RNA (1)...(19): siRNA sense strand
ugacuuaccugaacuugag

SEQ ID NO: 2071632 - RNA, 19 nt, Homo sapiens
  misc_RNA (1)...(19): siRNA sense strand
ugucaaacaucauggaaga

SEQ ID NO: 2071633 - RNA, 19 nt, Homo sapiens
  misc_RNA (1)...(19): siRNA sense strand
gaagaagaacagaucauca

SEQ ID NO: 2071634 - RNA, 19 nt, Homo sapiens
  misc_RNA (1)...(19): siRNA sense strand
caacucaggagaagaaaga

SEQ ID NO: 2071635 - RNA, 19 nt, Homo sapiens
  misc_RNA (1)...(19): siRNA sense strand
gcaacaaagugcucgugau

SEQ ID NO: 2071636 - RNA, 19 nt, Homo sapiens
  misc_RNA (1)...(19): siRNA sense strand
cagcagaagccuuagaauu

SEQ ID NO: 2071637 - RNA, 19 nt, Homo sapiens
  misc_RNA (1)...(19): siRNA sense strand
gaugugcacuggcaaacug

SEQ ID NO: 2071638 - RNA, 19 nt, Homo sapiens
  misc_RNA (1)...(19): siRNA sense strand
gaauaacccucugcagucu

SEQ ID NO: 2071639 - RNA, 19 nt, Homo sapiens
  misc_RNA (1)...(19): siRNA sense strand
caaacugagggcauaauaa

SEQ ID NO: 2071640 - RNA, 19 nt, Homo sapiens
  misc_RNA (1)...(19): siRNA sense strand
gcagaugagagaagagaaa

SEQ ID NO: 2071641 - RNA, 19 nt, Homo sapiens
  misc_RNA (1)...(19): siRNA sense strand
ccaaagaucaggacaugga

SEQ ID NO: 2071642 - RNA, 19 nt, Homo sapiens
  misc_RNA (1)...(19): siRNA sense strand
ugugugaggugcaaaguga

SEQ ID NO: 2071643 - RNA, 19 nt, Homo sapiens
  misc_RNA (1)...(19): siRNA sense strand
gagccaguauucuccaaau

SEQ ID NO: 2071644 - RNA, 19 nt, Homo sapiens
  misc_RNA (1)...(19): siRNA sense strand
cacaagaacuaguagaucu

SEQ ID NO: 2071645 - RNA, 19 nt, Homo sapiens
  misc_RNA (1)...(19): siRNA sense strand
ugagagaagcaguagauuu

SEQ ID NO: 2071646 - RNA, 19 nt, Homo sapiens
  misc_RNA (1)...(19): siRNA sense strand
caaacaucauggaagaaga

SEQ ID NO: 2071647 - RNA, 19 nt, Homo sapiens
  misc_RNA (1)...(19): siRNA sense strand
gaagcagcugcaaguguua

SEQ ID NO: 2071648 - RNA, 19 nt, Homo sapiens
  misc_RNA (1)...(19): siRNA sense strand
agacaucuccgguguguga

SEQ ID NO: 2071649 - RNA, 19 nt, Homo sapiens
  misc_RNA (1)...(19): siRNA sense strand
ucagagaaauuuggaaucu

SEQ ID NO: 2071650 - RNA, 19 nt, Homo sapiens
  misc_RNA (1)...(19): siRNA sense strand
ucuaagaccucagagaaau

SEQ ID NO: 2071651 - RNA, 19 nt, Homo sapiens
  misc_RNA (1)...(19): siRNA sense strand
cauacaagcaugccagauu

SEQ ID NO: 2071652 - RNA, 19 nt, Homo sapiens
  misc_RNA (1)...(19): siRNA sense strand
gccaggaaauugaaggaau

SEQ ID NO: 2071653 - RNA, 19 nt, Homo sapiens
  misc_RNA (1)...(19): siRNA sense strand
ggugcaaagugaucuaaca

SEQ ID NO: 2071654 - RNA, 19 nt, Homo sapiens
  misc_RNA (1)...(19): siRNA sense strand
ggcaaaguucacauauuua

SEQ ID NO: 2071655 - RNA, 19 nt, Homo sapiens
  misc_RNA (1)...(19): siRNA sense strand
aaacagacugguugaaguu

SEQ ID NO: 2071656 - RNA, 19 nt, Homo sapiens
  misc_RNA (1)...(19): siRNA sense strand
cagagaaauuuggaaucua

SEQ ID NO: 2071657 - RNA, 19 nt, Homo sapiens
  misc_RNA (1)...(19): siRNA sense strand
gcugcaagaucccaaugga

SEQ ID NO: 2071658 - RNA, 19 nt, Homo sapiens
  misc_RNA (1)...(19): siRNA sense strand
gagaagaaagagaccaguu

SEQ ID NO: 2071659 - RNA, 19 nt, Homo sapiens
  misc_RNA (1)...(19): siRNA sense strand
ggaagaagaacagaucauc

SEQ ID NO: 2071660 - RNA, 19 nt, Homo sapiens
  misc_RNA (1)...(19): siRNA sense strand
uaagaccucagagaaauuu

SEQ ID NO: 2071661 - RNA, 19 nt, Homo sapiens
  misc_RNA (1)...(19): siRNA sense strand
gcacugaauggucaaauac

SEQ ID NO: 2071662 - RNA, 19 nt, Homo sapiens
  misc_RNA (1)...(19): siRNA sense strand
gaucaggacauggauauag

SEQ ID NO: 2071663 - RNA, 19 nt, Homo sapiens
  misc_RNA (1)...(19): siRNA sense strand
agaagaaagagaccaguuu

SEQ ID NO: 2071664 - RNA, 19 nt, Homo sapiens
  misc_RNA (1)...(19): siRNA sense strand
gcucgugauuccaauuugu

SEQ ID NO: 2071665 - RNA, 19 nt, Homo sapiens
  misc_RNA (1)...(19): siRNA sense strand
ucuauagacccgcaguuua

SEQ ID NO: 2071666 - RNA, 19 nt, Homo sapiens
  misc_RNA (1)...(19): siRNA sense strand
ccaaaugagauuagagaga

SEQ ID NO: 2071667 - RNA, 19 nt, Homo sapiens
  misc_RNA (1)...(19): siRNA sense strand
caccgagccuucugacgaa

SEQ ID NO: 2071668 - RNA, 19 nt, Homo sapiens
  misc_RNA (1)...(19): siRNA sense strand
gcuucugucuuguccauau

SEQ ID NO: 2071669 - RNA, 19 nt, Homo sapiens
  misc_RNA (1)...(19): siRNA sense strand
gccaguauucuccaaauga

SEQ ID NO: 2071670 - RNA, 19 nt, Homo sapiens
  misc_RNA (1)...(19): siRNA sense strand
ucaaugugccaaugucaaa

SEQ ID NO: 2071671 - RNA, 19 nt, Homo sapiens
  misc_RNA (1)...(19): siRNA sense strand
aaacuuagcauggccaaau

SEQ ID NO: 2071672 - RNA, 19 nt, Homo sapiens
  misc_RNA (1)...(19): siRNA sense strand
gucagaagaaauuaccuua

SEQ ID NO: 2071673 - RNA, 19 nt, Homo sapiens
  misc_RNA (1)...(19): siRNA sense strand
gccaaaugcagaagaaaug

SEQ ID NO: 2071674 - RNA, 19 nt, Homo sapiens
  misc_RNA (1)...(19): siRNA sense strand
aagcauccaugucccauca

SEQ ID NO: 2071675 - RNA, 19 nt, Homo sapiens
  misc_RNA (1)...(19): siRNA sense strand
ugcacugaauggucaaaua

SEQ ID NO: 2071676 - RNA, 19 nt, Homo sapiens
  misc_RNA (1)...(19): siRNA sense strand
gccuuagaauuacaagauu

SEQ ID NO: 2071677 - RNA, 19 nt, Homo sapiens
  misc_RNA (1)...(19): siRNA sense strand
gauauuacagagagaagug

SEQ ID NO: 2071678 - RNA, 19 nt, Homo sapiens
  misc_RNA (1)...(19): siRNA sense strand
gcugagagaagcaguagau

SEQ ID NO: 2071679 - RNA, 19 nt, Homo sapiens
  misc_RNA (1)...(19): siRNA sense strand
ccauggagaggccacauuu

SEQ ID NO: 2071680 - RNA, 19 nt, Homo sapiens
  misc_RNA (1)...(19): siRNA sense strand
agacagcugacucccuuua

SEQ ID NO: 2071681 - RNA, 19 nt, Homo sapiens
  misc_RNA (1)...(19): siRNA sense strand
ggaguuggaagugauaaug

SEQ ID NO: 2071682 - RNA, 19 nt, Homo sapiens
  misc_RNA (1)...(19): siRNA sense strand
gugcuggucuauaucacuu

SEQ ID NO: 2071683 - RNA, 19 nt, Homo sapiens
  misc_RNA (1)...(19): siRNA sense strand
aaauggagcagaugagaga

SEQ ID NO: 2071684 - RNA, 19 nt, Homo sapiens
  misc_RNA (1)...(19): siRNA sense strand
aaacaucauggaagaagaa

SEQ ID NO: 2071685 - RNA, 19 nt, Homo sapiens
  misc_RNA (1)...(19): siRNA sense strand
cagcagauaggucaguuga

SEQ ID NO: 2071686 - RNA, 19 nt, Homo sapiens
  misc_RNA (1)...(19): siRNA sense strand
gagcagaugagagaagaga

SEQ ID NO: 2071687 - RNA, 19 nt, Homo sapiens
  misc_RNA (1)...(19): siRNA sense strand
aaacugagggcauaauaag

SEQ ID NO: 2071688 - RNA, 19 nt, Homo sapiens
  misc_RNA (1)...(19): siRNA sense strand
ggaauugugccauuuugua

SEQ ID NO: 2071689 - RNA, 19 nt, Homo sapiens
  misc_RNA (1)...(19): siRNA sense strand
aaagggcaaaguucacaua

SEQ ID NO: 2071690 - RNA, 19 nt, Homo sapiens
  misc_RNA (1)...(19): siRNA sense strand
uuacaagauucugcacuga

SEQ ID NO: 2071691 - RNA, 19 nt, Homo sapiens
  misc_RNA (1)...(19): siRNA sense strand
gaugcugacuuaccugaac

SEQ ID NO: 2071692 - RNA, 19 nt, Homo sapiens
  misc_RNA (1)...(19): siRNA sense strand
gaagcgaaccccaaccuuu

SEQ ID NO: 2071693 - RNA, 19 nt, Homo sapiens
  misc_RNA (1)...(19): siRNA sense strand
cguggaagauggcaagaag

SEQ ID NO: 2071694 - RNA, 19 nt, Homo sapiens
  misc_RNA (1)...(19): siRNA sense strand
gauugaaggucagucuaca

SEQ ID NO: 2071695 - RNA, 19 nt, Homo sapiens
  misc_RNA (1)...(19): siRNA sense strand
caaccggagccuucccuuu

SEQ ID NO: 2071696 - RNA, 19 nt, Homo sapiens
  misc_RNA (1)...(19): siRNA sense strand
aagaagaacagaucaucaa

SEQ ID NO: 2071697 - RNA, 19 nt, Homo sapiens
  misc_RNA (1)...(19): siRNA sense strand
caagcaugccagauuaaga

SEQ ID NO: 2071698 - RNA, 19 nt, Homo sapiens
  misc_RNA (1)...(19): siRNA sense strand
uaaucuguaucacaacugu

SEQ ID NO: 2071699 - RNA, 19 nt, Homo sapiens
  misc_RNA (1)...(19): siRNA sense strand
guaacgggagccaguauuc

SEQ ID NO: 2071700 - RNA, 19 nt, Homo sapiens
  misc_RNA (1)...(19): siRNA sense strand
ucgaaagacuguugacacu

SEQ ID NO: 2071701 - RNA, 19 nt, Homo sapiens
  misc_RNA (1)...(19): siRNA sense strand
guccauauucucuuuauag

SEQ ID NO: 2071702 - RNA, 19 nt, Homo sapiens
  misc_RNA (1)...(19): siRNA sense strand
gcaaagugaucuaacauua

SEQ ID NO: 2071703 - RNA, 19 nt, Homo sapiens
  misc_RNA (1)...(19): siRNA sense strand
gggcaaaguucacauauuu

SEQ ID NO: 2071704 - RNA, 19 nt, Homo sapiens
  misc_RNA (1)...(19): siRNA sense strand
gaucuaacauuacagagua

SEQ ID NO: 2071705 - RNA, 19 nt, Homo sapiens
  misc_RNA (1)...(19): siRNA sense strand
gcagauaggucaguugaaa

SEQ ID NO: 2071706 - RNA, 19 nt, Homo sapiens
  misc_RNA (1)...(19): siRNA sense strand
gaagaaagagaccaguuua

SEQ ID NO: 2071707 - RNA, 19 nt, Homo sapiens
  misc_RNA (1)...(19): siRNA sense strand
ggacauggauauagcaaug

SEQ ID NO: 2071708 - RNA, 19 nt, Homo sapiens
  misc_RNA (1)...(19): siRNA sense strand
ggauuaagcacagauauua

SEQ ID NO: 2071709 - RNA, 19 nt, Homo sapiens
  misc_RNA (1)...(19): siRNA sense strand
caaaugagauuagagagaa

SEQ ID NO: 2071710 - RNA, 19 nt, Homo sapiens
  misc_RNA (1)...(19): siRNA sense strand
gaagagcuguuacggauag

SEQ ID NO: 2071711 - RNA, 19 nt, Homo sapiens
  misc_RNA (1)...(19): siRNA sense strand
agaaagagcugguggaaca

SEQ ID NO: 2071712 - RNA, 19 nt, Homo sapiens
  misc_RNA (1)...(19): siRNA sense strand
gagagaagcaguagauuug

SEQ ID NO: 2071713 - RNA, 19 nt, Homo sapiens
  misc_RNA (1)...(19): siRNA sense strand
gaaggucagucuacacgaa

SEQ ID NO: 2071714 - RNA, 19 nt, Homo sapiens
  misc_RNA (1)...(19): siRNA sense strand
auacaagcaugccagauua

SEQ ID NO: 2071715 - RNA, 19 nt, Homo sapiens
  misc_RNA (1)...(19): siRNA sense strand
gaaagacuguugacacucu

SEQ ID NO: 2071716 - RNA, 19 nt, Homo sapiens
  misc_RNA (1)...(19): siRNA sense strand
gaagaaauguggaaaacuu

SEQ ID NO: 2071717 - RNA, 19 nt, Homo sapiens
  misc_RNA (1)...(19): siRNA sense strand
gcaaacugagggcauaaua

SEQ ID NO: 2071718 - RNA, 19 nt, Homo sapiens
  misc_RNA (1)...(19): siRNA sense strand
caacaaagugcucgugauu

SEQ ID NO: 2071719 - RNA, 19 nt, Homo sapiens
  misc_RNA (1)...(19): siRNA sense strand
gcauugagaugagauugaa

SEQ ID NO: 2071720 - RNA, 19 nt, Homo sapiens
  misc_RNA (1)...(19): siRNA sense strand
gaagauggcaagaaggauu

SEQ ID NO: 2071721 - RNA, 19 nt, Homo sapiens
  misc_RNA (1)...(19): siRNA sense strand
gcacaaagggcaaaguuca

SEQ ID NO: 2071722 - RNA, 19 nt, Homo sapiens
  misc_RNA (1)...(19): siRNA sense strand
ugaagcagcugcaaguguu

SEQ ID NO: 2071723 - RNA, 19 nt, Homo sapiens
  misc_RNA (1)...(19): siRNA sense strand
agcagaagccuuagaauua

SEQ ID NO: 2071724 - RNA, 19 nt, Homo sapiens
  misc_RNA (1)...(19): siRNA sense strand
gaagugauaauggagauaa

SEQ ID NO: 2071725 - RNA, 19 nt, Homo sapiens
  misc_RNA (1)...(19): siRNA sense strand
gggaucagcagaagccuua

SEQ ID NO: 2071726 - RNA, 19 nt, Homo sapiens
  misc_RNA (1)...(19): siRNA sense strand
gcagaagccuuagaauuac

SEQ ID NO: 2071727 - RNA, 19 nt, Homo sapiens
  misc_RNA (1)...(19): siRNA sense strand
aaacagcacagcuccauuu

SEQ ID NO: 2071728 - RNA, 19 nt, Homo sapiens
  misc_RNA (1)...(19): siRNA sense strand
aagaacagaucaucaagga

SEQ ID NO: 2071729 - RNA, 19 nt, Homo sapiens
  misc_RNA (1)...(19): siRNA sense strand
cuuauaggcuucugucuug

SEQ ID NO: 2071730 - RNA, 19 nt, Homo sapiens
  misc_RNA (1)...(19): siRNA sense strand
aaauacagcuggagacauc

SEQ ID NO: 2071731 - RNA, 19 nt, Homo sapiens
  misc_RNA (1)...(19): siRNA sense strand
ugacuuaccugaacuugag

SEQ ID NO: 2071732 - RNA, 19 nt, Homo sapiens
  misc_RNA (1)...(19): siRNA sense strand
ugucaaacaucauggaaga

SEQ ID NO: 2071733 - RNA, 19 nt, Homo sapiens
  misc_RNA (1)...(19): siRNA sense strand
gaagaagaacagaucauca

SEQ ID NO: 2071734 - RNA, 19 nt, Homo sapiens
  misc_RNA (1)...(19): siRNA sense strand
caacucaggagaagaaaga

SEQ ID NO: 2071735 - RNA, 19 nt, Homo sapiens
  misc_RNA (1)...(19): siRNA sense strand
gcaacaaagugcucgugau

SEQ ID NO: 2071736 - RNA, 19 nt, Homo sapiens
  misc_RNA (1)...(19): siRNA sense strand
cagcagaagccuuagaauu

SEQ ID NO: 2071737 - RNA, 19 nt, Homo sapiens
  misc_RNA (1)...(19): siRNA sense strand
gaugugcacuggcaaacug

SEQ ID NO: 2071738 - RNA, 19 nt, Homo sapiens
  misc_RNA (1)...(19): siRNA sense strand
gaauaacccucugcagucu

SEQ ID NO: 2071739 - RNA, 19 nt, Homo sapiens
  misc_RNA (1)...(19): siRNA sense strand
caaacugagggcauaauaa

SEQ ID NO: 2071740 - RNA, 19 nt, Homo sapiens
  misc_RNA (1)...(19): siRNA sense strand
gcagaugagagaagagaaa

SEQ ID NO: 2071741 - RNA, 19 nt, Homo sapiens
  misc_RNA (1)...(19): siRNA sense strand
ccaaagaucaggacaugga

SEQ ID NO: 2071742 - RNA, 19 nt, Homo sapiens
  misc_RNA (1)...(19): siRNA sense strand
ugugugaggugcaaaguga

SEQ ID NO: 2071743 - RNA, 19 nt, Homo sapiens
  misc_RNA (1)...(19): siRNA sense strand
gagccaguauucuccaaau

SEQ ID NO: 2071744 - RNA, 19 nt, Homo sapiens
  misc_RNA (1)...(19): siRNA sense strand
cacaagaacuaguagaucu

SEQ ID NO: 2071745 - RNA, 19 nt, Homo sapiens
  misc_RNA (1)...(19): siRNA sense strand
ugagagaagcaguagauuu

SEQ ID NO: 2071746 - RNA, 19 nt, Homo sapiens
  misc_RNA (1)...(19): siRNA sense strand
caaacaucauggaagaaga

SEQ ID NO: 2071747 - RNA, 19 nt, Homo sapiens
  misc_RNA (1)...(19): siRNA sense strand
gaagcagcugcaaguguua

SEQ ID NO: 2071748 - RNA, 19 nt, Homo sapiens
  misc_RNA (1)...(19): siRNA sense strand
agacaucuccgguguguga

SEQ ID NO: 2071749 - RNA, 19 nt, Homo sapiens
  misc_RNA (1)...(19): siRNA sense strand
ucagagaaauuuggaaucu

SEQ ID NO: 2071750 - RNA, 19 nt, Homo sapiens
  misc_RNA (1)...(19): siRNA sense strand
ucuaagaccucagagaaau

SEQ ID NO: 2071751 - RNA, 19 nt, Homo sapiens
  misc_RNA (1)...(19): siRNA sense strand
cauacaagcaugccagauu

SEQ ID NO: 2071752 - RNA, 19 nt, Homo sapiens
  misc_RNA (1)...(19): siRNA sense strand
ggugcaaagugaucuaaca

SEQ ID NO: 2071753 - RNA, 19 nt, Homo sapiens
  misc_RNA (1)...(19): siRNA sense strand
gccaggaaauugaaggaau

SEQ ID NO: 2071754 - RNA, 19 nt, Homo sapiens
  misc_RNA (1)...(19): siRNA sense strand
ggcaaaguucacauauuua

SEQ ID NO: 2071755 - RNA, 19 nt, Homo sapiens
  misc_RNA (1)...(19): siRNA sense strand
cagagaaauuuggaaucua

SEQ ID NO: 2071756 - RNA, 19 nt, Homo sapiens
  misc_RNA (1)...(19): siRNA sense strand
gcugcaagaucccaaugga

SEQ ID NO: 2071757 - RNA, 19 nt, Homo sapiens
  misc_RNA (1)...(19): siRNA sense strand
gagaagaaagagaccaguu

SEQ ID NO: 2071758 - RNA, 19 nt, Homo sapiens
  misc_RNA (1)...(19): siRNA sense strand
aaacagacugguugaaguu

SEQ ID NO: 2071759 - RNA, 19 nt, Homo sapiens
  misc_RNA (1)...(19): siRNA sense strand
ggaagaagaacagaucauc

SEQ ID NO: 2071760 - RNA, 19 nt, Homo sapiens
  misc_RNA (1)...(19): siRNA sense strand
uaagaccucagagaaauuu

SEQ ID NO: 2071761 - RNA, 19 nt, Homo sapiens
  misc_RNA (1)...(19): siRNA sense strand
gcacugaauggucaaauac

SEQ ID NO: 2071762 - RNA, 19 nt, Homo sapiens
  misc_RNA (1)...(19): siRNA sense strand
gaucaggacauggauauag

SEQ ID NO: 2071763 - RNA, 19 nt, Homo sapiens
  misc_RNA (1)...(19): siRNA sense strand
agaagaaagagaccaguuu

SEQ ID NO: 2071764 - RNA, 19 nt, Homo sapiens
  misc_RNA (1)...(19): siRNA sense strand
gcucgugauuccaauuugu

SEQ ID NO: 2071765 - RNA, 19 nt, Homo sapiens
  misc_RNA (1)...(19): siRNA sense strand
ucuauagacccgcaguuua

SEQ ID NO: 2071766 - RNA, 19 nt, Homo sapiens
  misc_RNA (1)...(19): siRNA sense strand
ccaaaugagauuagagaga

SEQ ID NO: 2071767 - RNA, 19 nt, Homo sapiens
  misc_RNA (1)...(19): siRNA sense strand
caccgagccuucugacgaa

SEQ ID NO: 2071768 - RNA, 19 nt, Homo sapiens
  misc_RNA (1)...(19): siRNA sense strand
gcuucugucuuguccauau

SEQ ID NO: 2071769 - RNA, 19 nt, Homo sapiens
  misc_RNA (1)...(19): siRNA sense strand
gccaguauucuccaaauga

SEQ ID NO: 2071770 - RNA, 19 nt, Homo sapiens
  misc_RNA (1)...(19): siRNA sense strand
ucaaugugccaaugucaaa

SEQ ID NO: 2071771 - RNA, 19 nt, Homo sapiens
  misc_RNA (1)...(19): siRNA sense strand
aaacuuagcauggccaaau

SEQ ID NO: 2071772 - RNA, 19 nt, Homo sapiens
  misc_RNA (1)...(19): siRNA sense strand
gucagaagaaauuaccuua

SEQ ID NO: 2071773 - RNA, 19 nt, Homo sapiens
  misc_RNA (1)...(19): siRNA sense strand
gccaaaugcagaagaaaug

SEQ ID NO: 2071774 - RNA, 19 nt, Homo sapiens
  misc_RNA (1)...(19): siRNA sense strand
aagcauccaugucccauca

SEQ ID NO: 2071775 - RNA, 19 nt, Homo sapiens
  misc_RNA (1)...(19): siRNA sense strand
ugcacugaauggucaaaua

SEQ ID NO: 2071776 - RNA, 19 nt, Homo sapiens
  misc_RNA (1)...(19): siRNA sense strand
gccuuagaauuacaagauu

SEQ ID NO: 2071777 - RNA, 19 nt, Homo sapiens
  misc_RNA (1)...(19): siRNA sense strand
gauauuacagagagaagug

SEQ ID NO: 2071778 - RNA, 19 nt, Homo sapiens
  misc_RNA (1)...(19): siRNA sense strand
gcugagagaagcaguagau

SEQ ID NO: 2071779 - RNA, 19 nt, Homo sapiens
  misc_RNA (1)...(19): siRNA sense strand
ccauggagaggccacauuu

SEQ ID NO: 2071780 - RNA, 19 nt, Homo sapiens
  misc_RNA (1)...(19): siRNA sense strand
agacagcugacucccuuua

SEQ ID NO: 2071781 - RNA, 19 nt, Homo sapiens
  misc_RNA (1)...(19): siRNA sense strand
ggaguuggaagugauaaug

SEQ ID NO: 2071782 - RNA, 19 nt, Homo sapiens
  misc_RNA (1)...(19): siRNA sense strand
gugcuggucuauaucacuu

SEQ ID NO: 2071783 - RNA, 19 nt, Homo sapiens
  misc_RNA (1)...(19): siRNA sense strand
aaauggagcagaugagaga

SEQ ID NO: 2071784 - RNA, 19 nt, Homo sapiens
  misc_RNA (1)...(19): siRNA sense strand
aaacaucauggaagaagaa

SEQ ID NO: 2071785 - RNA, 19 nt, Homo sapiens
  misc_RNA (1)...(19): siRNA sense strand
cagcagauaggucaguuga

SEQ ID NO: 2071786 - RNA, 19 nt, Homo sapiens
  misc_RNA (1)...(19): siRNA sense strand
gagcagaugagagaagaga

SEQ ID NO: 2071787 - RNA, 19 nt, Homo sapiens
  misc_RNA (1)...(19): siRNA sense strand
aaacugagggcauaauaag

SEQ ID NO: 2071788 - RNA, 19 nt, Homo sapiens
  misc_RNA (1)...(19): siRNA sense strand
aaagggcaaaguucacaua

SEQ ID NO: 2071789 - RNA, 19 nt, Homo sapiens
  misc_RNA (1)...(19): siRNA sense strand
ggaauugugccauuuugua

SEQ ID NO: 2071790 - RNA, 19 nt, Homo sapiens
  misc_RNA (1)...(19): siRNA sense strand
gaugcugacuuaccugaac

SEQ ID NO: 2071791 - RNA, 19 nt, Homo sapiens
  misc_RNA (1)...(19): siRNA sense strand
uuacaagauucugcacuga

SEQ ID NO: 2071792 - RNA, 19 nt, Homo sapiens
  misc_RNA (1)...(19): siRNA sense strand
gaagcgaaccccaaccuuu

SEQ ID NO: 2071793 - RNA, 19 nt, Homo sapiens
  misc_RNA (1)...(19): siRNA sense strand
cguggaagauggcaagaag

SEQ ID NO: 2071794 - RNA, 19 nt, Homo sapiens
  misc_RNA (1)...(19): siRNA sense strand
gauugaaggucagucuaca

SEQ ID NO: 2071795 - RNA, 19 nt, Homo sapiens
  misc_RNA (1)...(19): siRNA sense strand
caaccggagccuucccuuu

SEQ ID NO: 2071796 - RNA, 19 nt, Homo sapiens
  misc_RNA (1)...(19): siRNA sense strand
aagaagaacagaucaucaa

SEQ ID NO: 2071797 - RNA, 19 nt, Homo sapiens
  misc_RNA (1)...(19): siRNA sense strand
caagcaugccagauuaaga

SEQ ID NO: 2071798 - RNA, 19 nt, Homo sapiens
  misc_RNA (1)...(19): siRNA sense strand
guaacgggagccaguauuc

SEQ ID NO: 2071799 - RNA, 19 nt, Homo sapiens
  misc_RNA (1)...(19): siRNA sense strand
uaaucuguaucacaacugu

SEQ ID NO: 2071800 - RNA, 19 nt, Homo sapiens
  misc_RNA (1)...(19): siRNA sense strand
ucgaaagacuguugacacu

SEQ ID NO: 2071801 - RNA, 19 nt, Homo sapiens
  misc_RNA (1)...(19): siRNA sense strand
guccauauucucuuuauag

SEQ ID NO: 2071802 - RNA, 19 nt, Homo sapiens
  misc_RNA (1)...(19): siRNA sense strand
gaaauuugcugucuacuua

SEQ ID NO: 2071803 - RNA, 19 nt, Homo sapiens
  misc_RNA (1)...(19): siRNA sense strand
gaacuaaacugcaaaauga

SEQ ID NO: 2071804 - RNA, 19 nt, Homo sapiens
  misc_RNA (1)...(19): siRNA sense strand
ccucguggcugcaauauua

SEQ ID NO: 2071805 - RNA, 19 nt, Homo sapiens
  misc_RNA (1)...(19): siRNA sense strand
gaucauagcuacuacuuca

SEQ ID NO: 2071806 - RNA, 19 nt, Homo sapiens
  misc_RNA (1)...(19): siRNA sense strand
gggaacagaucaaaguaaa

SEQ ID NO: 2071807 - RNA, 19 nt, Homo sapiens
  misc_RNA (1)...(19): siRNA sense strand
gaugagagcugggacuuug

SEQ ID NO: 2071808 - RNA, 19 nt, Homo sapiens
  misc_RNA (1)...(19): siRNA sense strand
gaacagaucaaaguaaaug

SEQ ID NO: 2071809 - RNA, 19 nt, Homo sapiens
  misc_RNA (1)...(19): siRNA sense strand
caucagacaucaugcuaaa

SEQ ID NO: 2071810 - RNA, 19 nt, Homo sapiens
  misc_RNA (1)...(19): siRNA sense strand
guaaauggaaggcuuauga

SEQ ID NO: 2071811 - RNA, 19 nt, Homo sapiens
  misc_RNA (1)...(19): siRNA sense strand
gcucugaucugugcuuuga

SEQ ID NO: 2071812 - RNA, 19 nt, Homo sapiens
  misc_RNA (1)...(19): siRNA sense strand
gacaguuacucccugauaa

SEQ ID NO: 2071813 - RNA, 19 nt, Homo sapiens
  misc_RNA (1)...(19): siRNA sense strand
ggacaguuacucccugaua

SEQ ID NO: 2071814 - RNA, 19 nt, Homo sapiens
  misc_RNA (1)...(19): siRNA sense strand
ucagacaucaugcuaaaua

SEQ ID NO: 2071815 - RNA, 19 nt, Homo sapiens
  misc_RNA (1)...(19): siRNA sense strand
uguauuggcucucagguuu

SEQ ID NO: 2071816 - RNA, 19 nt, Homo sapiens
  misc_RNA (1)...(19): siRNA sense strand
gaucucagcuggacauacu

SEQ ID NO: 2071817 - RNA, 19 nt, Homo sapiens
  misc_RNA (1)...(19): siRNA sense strand
agggaaagaugaccaguuu

SEQ ID NO: 2071818 - RNA, 19 nt, Homo sapiens
  misc_RNA (1)...(19): siRNA sense strand
acaaaucugugucagcauu

SEQ ID NO: 2071819 - RNA, 19 nt, Homo sapiens
  misc_RNA (1)...(19): siRNA sense strand
ugaagcagauuuccagcaa

SEQ ID NO: 2071820 - RNA, 19 nt, Homo sapiens
  misc_RNA (1)...(19): siRNA sense strand
gcacagagcaaaauuuuau

SEQ ID NO: 2071821 - RNA, 19 nt, Homo sapiens
  misc_RNA (1)...(19): siRNA sense strand
agaauguacucuuauguca

SEQ ID NO: 2071822 - RNA, 19 nt, Homo sapiens
  misc_RNA (1)...(19): siRNA sense strand
cuucauagcugccuguaca

SEQ ID NO: 2071823 - RNA, 19 nt, Homo sapiens
  misc_RNA (1)...(19): siRNA sense strand
cuacuucauugcaaccuuu

SEQ ID NO: 2071824 - RNA, 19 nt, Homo sapiens
  misc_RNA (1)...(19): siRNA sense strand
cuacccaccuugugaaauc

SEQ ID NO: 2071825 - RNA, 19 nt, Homo sapiens
  misc_RNA (1)...(19): siRNA sense strand
cagcuggacauacuaauug

SEQ ID NO: 2071826 - RNA, 19 nt, Homo sapiens
  misc_RNA (1)...(19): siRNA sense strand
ucauggagcucugaucugu

SEQ ID NO: 2071827 - RNA, 19 nt, Homo sapiens
  misc_RNA (1)...(19): siRNA sense strand
ggacauacuaauugaucaa

SEQ ID NO: 2071828 - RNA, 19 nt, Homo sapiens
  misc_RNA (1)...(19): siRNA sense strand
aaaguaaauggaaggcuua

SEQ ID NO: 2071829 - RNA, 19 nt, Homo sapiens
  misc_RNA (1)...(19): siRNA sense strand
ucugaucugugcuuugaaa

SEQ ID NO: 2071830 - RNA, 19 nt, Homo sapiens
  misc_RNA (1)...(19): siRNA sense strand
gaccacaucagacaucaug

SEQ ID NO: 2071831 - RNA, 19 nt, Homo sapiens
  misc_RNA (1)...(19): siRNA sense strand
cacugaagauccuuggaaa

SEQ ID NO: 2071832 - RNA, 19 nt, Homo sapiens
  misc_RNA (1)...(19): siRNA sense strand
acaugacaguguugaacua

SEQ ID NO: 2071833 - RNA, 19 nt, Homo sapiens
  misc_RNA (1)...(19): siRNA sense strand
gagcucugaucugugcuuu

SEQ ID NO: 2071834 - RNA, 19 nt, Homo sapiens
  misc_RNA (1)...(19): siRNA sense strand
uauuaaaggugaagaugag

SEQ ID NO: 2071835 - RNA, 19 nt, Homo sapiens
  misc_RNA (1)...(19): siRNA sense strand
ugacaguguugaacuaaac

SEQ ID NO: 2071836 - RNA, 19 nt, Homo sapiens
  misc_RNA (1)...(19): siRNA sense strand
acuaauugaucaagggaaa

SEQ ID NO: 2071837 - RNA, 19 nt, Homo sapiens
  misc_RNA (1)...(19): siRNA sense strand
gaugcuacccaccuuguga

SEQ ID NO: 2071838 - RNA, 19 nt, Homo sapiens
  misc_RNA (1)...(19): siRNA sense strand
ccacugaagauccuuggaa

SEQ ID NO: 2071839 - RNA, 19 nt, Homo sapiens
  misc_RNA (1)...(19): siRNA sense strand
cauagcuacuacuucauug

SEQ ID NO: 2071840 - RNA, 19 nt, Homo sapiens
  misc_RNA (1)...(19): siRNA sense strand
uauuggcucucagguuuaa

SEQ ID NO: 2071841 - RNA, 19 nt, Homo sapiens
  misc_RNA (1)...(19): siRNA sense strand
aagcagauuuccagcaaca

SEQ ID NO: 2071842 - RNA, 19 nt, Homo sapiens
  misc_RNA (1)...(19): siRNA sense strand
aauguacucuuaugucaca

SEQ ID NO: 2071843 - RNA, 19 nt, Homo sapiens
  misc_RNA (1)...(19): siRNA sense strand
uugcaacccuguacucugu

SEQ ID NO: 2071844 - RNA, 19 nt, Homo sapiens
  misc_RNA (1)...(19): siRNA sense strand
uugcaaccuuuauuacuga

SEQ ID NO: 2071845 - RNA, 19 nt, Homo sapiens
  misc_RNA (1)...(19): siRNA sense strand
guguugaacuaaacugcaa

SEQ ID NO: 2071846 - RNA, 19 nt, Homo sapiens
  misc_RNA (1)...(19): siRNA sense strand
ucauagcuacuacuucauu

SEQ ID NO: 2071847 - RNA, 19 nt, Homo sapiens
  misc_RNA (1)...(19): siRNA sense strand
auagcugccuguacagaaa

SEQ ID NO: 2071848 - RNA, 19 nt, Homo sapiens
  misc_RNA (1)...(19): siRNA sense strand
ucuuuuagauggacaguua

SEQ ID NO: 2071849 - RNA, 19 nt, Homo sapiens
  misc_RNA (1)...(19): siRNA sense strand
gaaaaccaacuacagaaug

SEQ ID NO: 2071850 - RNA, 19 nt, Homo sapiens
  misc_RNA (1)...(19): siRNA sense strand
caugcuaaauaccugaaug

SEQ ID NO: 2071851 - RNA, 19 nt, Homo sapiens
  misc_RNA (1)...(19): siRNA sense strand
ugaaauuugcugucuacuu

SEQ ID NO: 2071852 - RNA, 19 nt, Homo sapiens
  misc_RNA (1)...(19): siRNA sense strand
guauuggcucucagguuua

SEQ ID NO: 2071853 - RNA, 19 nt, Homo sapiens
  misc_RNA (1)...(19): siRNA sense strand
ggaacagaucaaaguaaau

SEQ ID NO: 2071854 - RNA, 19 nt, Homo sapiens
  misc_RNA (1)...(19): siRNA sense strand
cccaaaggaugucuauuuu

SEQ ID NO: 2071855 - RNA, 19 nt, Homo sapiens
  misc_RNA (1)...(19): siRNA sense strand
aaugaaauuugcugucuac

SEQ ID NO: 2071856 - RNA, 19 nt, Homo sapiens
  misc_RNA (1)...(19): siRNA sense strand
gcagauuuccagcaacaag

SEQ ID NO: 2071857 - RNA, 19 nt, Homo sapiens
  misc_RNA (1)...(19): siRNA sense strand
caaaggcagaaacaggaaa

SEQ ID NO: 2071858 - RNA, 19 nt, Homo sapiens
  misc_RNA (1)...(19): siRNA sense strand
gcuaaauaccugaaugcau

SEQ ID NO: 2071859 - RNA, 19 nt, Homo sapiens
  misc_RNA (1)...(19): siRNA sense strand
cagaucaaaguaaauggaa

SEQ ID NO: 2071860 - RNA, 19 nt, Homo sapiens
  misc_RNA (1)...(19): siRNA sense strand
ucagcuggacauacuaauu

SEQ ID NO: 2071861 - RNA, 19 nt, Homo sapiens
  misc_RNA (1)...(19): siRNA sense strand
ccaaaggcagaaacaggaa

SEQ ID NO: 2071862 - RNA, 19 nt, Homo sapiens
  misc_RNA (1)...(19): siRNA sense strand
uaaauaccugaaugcauga

SEQ ID NO: 2071863 - RNA, 19 nt, Homo sapiens
  misc_RNA (1)...(19): siRNA sense strand
uaaauggaaggcuuaugau

SEQ ID NO: 2071864 - RNA, 19 nt, Homo sapiens
  misc_RNA (1)...(19): siRNA sense strand
gcugucuacuuaccaccaa

SEQ ID NO: 2071865 - RNA, 19 nt, Homo sapiens
  misc_RNA (1)...(19): siRNA sense strand
ggucauggagcucugaucu

SEQ ID NO: 2071866 - RNA, 19 nt, Homo sapiens
  misc_RNA (1)...(19): siRNA sense strand
gaagauccuuggaaaacca

SEQ ID NO: 2071867 - RNA, 19 nt, Homo sapiens
  misc_RNA (1)...(19): siRNA sense strand
cagaauguacucuuauguc

SEQ ID NO: 2071868 - RNA, 19 nt, Homo sapiens
  misc_RNA (1)...(19): siRNA sense strand
aaaagaaaauccccguugu

SEQ ID NO: 2071869 - RNA, 19 nt, Homo sapiens
  misc_RNA (1)...(19): siRNA sense strand
caacucauaaaugccaauu

SEQ ID NO: 2071870 - RNA, 19 nt, Homo sapiens
  misc_RNA (1)...(19): siRNA sense strand
gagcuuccccaacucauaa

SEQ ID NO: 2071871 - RNA, 19 nt, Homo sapiens
  misc_RNA (1)...(19): siRNA sense strand
cauagcugccuguacagaa

SEQ ID NO: 2071872 - RNA, 19 nt, Homo sapiens
  misc_RNA (1)...(19): siRNA sense strand
cagacaucaugcuaaauac

SEQ ID NO: 2071873 - RNA, 19 nt, Homo sapiens
  misc_RNA (1)...(19): siRNA sense strand
caugacaguguugaacuaa

SEQ ID NO: 2071874 - RNA, 19 nt, Homo sapiens
  misc_RNA (1)...(19): siRNA sense strand
ggugcuggauuuuauguug

SEQ ID NO: 2071875 - RNA, 19 nt, Homo sapiens
  misc_RNA (1)...(19): siRNA sense strand
uaauugaucaagggaaaga

SEQ ID NO: 2071876 - RNA, 19 nt, Homo sapiens
  misc_RNA (1)...(19): siRNA sense strand
aaaaccaacuacagaaugu

SEQ ID NO: 2071877 - RNA, 19 nt, Homo sapiens
  misc_RNA (1)...(19): siRNA sense strand
caaaaucugguuaucauca

SEQ ID NO: 2071878 - RNA, 19 nt, Homo sapiens
  misc_RNA (1)...(19): siRNA sense strand
cacaucagacaucaugcua

SEQ ID NO: 2071879 - RNA, 19 nt, Homo sapiens
  misc_RNA (1)...(19): siRNA sense strand
gaugaccaguuucuuuuag

SEQ ID NO: 2071880 - RNA, 19 nt, Homo sapiens
  misc_RNA (1)...(19): siRNA sense strand
ugggaacagaucaaaguaa

SEQ ID NO: 2071881 - RNA, 19 nt, Homo sapiens
  misc_RNA (1)...(19): siRNA sense strand
ggaaaaccaacuacagaau

SEQ ID NO: 2071882 - RNA, 19 nt, Homo sapiens
  misc_RNA (1)...(19): siRNA sense strand
aaauggaaggcuuaugaug

SEQ ID NO: 2071883 - RNA, 19 nt, Homo sapiens
  misc_RNA (1)...(19): siRNA sense strand
cagaggagcuuccccaacu

SEQ ID NO: 2071884 - RNA, 19 nt, Homo sapiens
  misc_RNA (1)...(19): siRNA sense strand
gaaauuugcugucuacuua

SEQ ID NO: 2071885 - RNA, 19 nt, Homo sapiens
  misc_RNA (1)...(19): siRNA sense strand
gaacuaaacugcaaaauga

SEQ ID NO: 2071886 - RNA, 19 nt, Homo sapiens
  misc_RNA (1)...(19): siRNA sense strand
ccucguggcugcaauauua

SEQ ID NO: 2071887 - RNA, 19 nt, Homo sapiens
  misc_RNA (1)...(19): siRNA sense strand
gaucauagcuacuacuuca

SEQ ID NO: 2071888 - RNA, 19 nt, Homo sapiens
  misc_RNA (1)...(19): siRNA sense strand
gggaacagaucaaaguaaa

SEQ ID NO: 2071889 - RNA, 19 nt, Homo sapiens
  misc_RNA (1)...(19): siRNA sense strand
gaugagagcugggacuuug

SEQ ID NO: 2071890 - RNA, 19 nt, Homo sapiens
  misc_RNA (1)...(19): siRNA sense strand
gaacagaucaaaguaaaug

SEQ ID NO: 2071891 - RNA, 19 nt, Homo sapiens
  misc_RNA (1)...(19): siRNA sense strand
caucagacaucaugcuaaa

SEQ ID NO: 2071892 - RNA, 19 nt, Homo sapiens
  misc_RNA (1)...(19): siRNA sense strand
guaaauggaaggcuuauga

SEQ ID NO: 2071893 - RNA, 19 nt, Homo sapiens
  misc_RNA (1)...(19): siRNA sense strand
gcucugaucugugcuuuga

SEQ ID NO: 2071894 - RNA, 19 nt, Homo sapiens
  misc_RNA (1)...(19): siRNA sense strand
gacaguuacucccugauaa

SEQ ID NO: 2071895 - RNA, 19 nt, Homo sapiens
  misc_RNA (1)...(19): siRNA sense strand
ggacaguuacucccugaua

SEQ ID NO: 2071896 - RNA, 19 nt, Homo sapiens
  misc_RNA (1)...(19): siRNA sense strand
ucagacaucaugcuaaaua

SEQ ID NO: 2071897 - RNA, 19 nt, Homo sapiens
  misc_RNA (1)...(19): siRNA sense strand
uguauuggcucucagguuu

SEQ ID NO: 2071898 - RNA, 19 nt, Homo sapiens
  misc_RNA (1)...(19): siRNA sense strand
gaucucagcuggacauacu

SEQ ID NO: 2071899 - RNA, 19 nt, Homo sapiens
  misc_RNA (1)...(19): siRNA sense strand
agggaaagaugaccaguuu

SEQ ID NO: 2071900 - RNA, 19 nt, Homo sapiens
  misc_RNA (1)...(19): siRNA sense strand
acaaaucugugucagcauu

SEQ ID NO: 2071901 - RNA, 19 nt, Homo sapiens
  misc_RNA (1)...(19): siRNA sense strand
ugaagcagauuuccagcaa

SEQ ID NO: 2071902 - RNA, 19 nt, Homo sapiens
  misc_RNA (1)...(19): siRNA sense strand
gcacagagcaaaauuuuau

SEQ ID NO: 2071903 - RNA, 19 nt, Homo sapiens
  misc_RNA (1)...(19): siRNA sense strand
agaauguacucuuauguca

SEQ ID NO: 2071904 - RNA, 19 nt, Homo sapiens
  misc_RNA (1)...(19): siRNA sense strand
cuucauagcugccuguaca

SEQ ID NO: 2071905 - RNA, 19 nt, Homo sapiens
  misc_RNA (1)...(19): siRNA sense strand
cuacuucauugcaaccuuu

SEQ ID NO: 2071906 - RNA, 19 nt, Homo sapiens
  misc_RNA (1)...(19): siRNA sense strand
cuacccaccuugugaaauc

SEQ ID NO: 2071907 - RNA, 19 nt, Homo sapiens
  misc_RNA (1)...(19): siRNA sense strand
cagcuggacauacuaauug

SEQ ID NO: 2071908 - RNA, 19 nt, Homo sapiens
  misc_RNA (1)...(19): siRNA sense strand
ucauggagcucugaucugu

SEQ ID NO: 2071909 - RNA, 19 nt, Homo sapiens
  misc_RNA (1)...(19): siRNA sense strand
ggacauacuaauugaucaa

SEQ ID NO: 2071910 - RNA, 19 nt, Homo sapiens
  misc_RNA (1)...(19): siRNA sense strand
aaaguaaauggaaggcuua

SEQ ID NO: 2071911 - RNA, 19 nt, Homo sapiens
  misc_RNA (1)...(19): siRNA sense strand
ucugaucugugcuuugaaa

SEQ ID NO: 2071912 - RNA, 19 nt, Homo sapiens
  misc_RNA (1)...(19): siRNA sense strand
gaccacaucagacaucaug

SEQ ID NO: 2071913 - RNA, 19 nt, Homo sapiens
  misc_RNA (1)...(19): siRNA sense strand
cacugaagauccuuggaaa

SEQ ID NO: 2071914 - RNA, 19 nt, Homo sapiens
  misc_RNA (1)...(19): siRNA sense strand
acaugacaguguugaacua

SEQ ID NO: 2071915 - RNA, 19 nt, Homo sapiens
  misc_RNA (1)...(19): siRNA sense strand
gagcucugaucugugcuuu

SEQ ID NO: 2071916 - RNA, 19 nt, Homo sapiens
  misc_RNA (1)...(19): siRNA sense strand
uauuaaaggugaagaugag

SEQ ID NO: 2071917 - RNA, 19 nt, Homo sapiens
  misc_RNA (1)...(19): siRNA sense strand
ugacaguguugaacuaaac

SEQ ID NO: 2071918 - RNA, 19 nt, Homo sapiens
  misc_RNA (1)...(19): siRNA sense strand
acuaauugaucaagggaaa

SEQ ID NO: 2071919 - RNA, 19 nt, Homo sapiens
  misc_RNA (1)...(19): siRNA sense strand
gaugcuacccaccuuguga

SEQ ID NO: 2071920 - RNA, 19 nt, Homo sapiens
  misc_RNA (1)...(19): siRNA sense strand
ccacugaagauccuuggaa

SEQ ID NO: 2071921 - RNA, 19 nt, Homo sapiens
  misc_RNA (1)...(19): siRNA sense strand
cauagcuacuacuucauug

SEQ ID NO: 2071922 - RNA, 19 nt, Homo sapiens
  misc_RNA (1)...(19): siRNA sense strand
uauuggcucucagguuuaa

SEQ ID NO: 2071923 - RNA, 19 nt, Homo sapiens
  misc_RNA (1)...(19): siRNA sense strand
aagcagauuuccagcaaca

SEQ ID NO: 2071924 - RNA, 19 nt, Homo sapiens
  misc_RNA (1)...(19): siRNA sense strand
aauguacucuuaugucaca

SEQ ID NO: 2071925 - RNA, 19 nt, Homo sapiens
  misc_RNA (1)...(19): siRNA sense strand
uugcaacccuguacucugu

SEQ ID NO: 2071926 - RNA, 19 nt, Homo sapiens
  misc_RNA (1)...(19): siRNA sense strand
uugcaaccuuuauuacuga

SEQ ID NO: 2071927 - RNA, 19 nt, Homo sapiens
  misc_RNA (1)...(19): siRNA sense strand
guguugaacuaaacugcaa

SEQ ID NO: 2071928 - RNA, 19 nt, Homo sapiens
  misc_RNA (1)...(19): siRNA sense strand
ucauagcuacuacuucauu

SEQ ID NO: 2071929 - RNA, 19 nt, Homo sapiens
  misc_RNA (1)...(19): siRNA sense strand
auagcugccuguacagaaa

SEQ ID NO: 2071930 - RNA, 19 nt, Homo sapiens
  misc_RNA (1)...(19): siRNA sense strand
ucuuuuagauggacaguua

SEQ ID NO: 2071931 - RNA, 19 nt, Homo sapiens
  misc_RNA (1)...(19): siRNA sense strand
gaaaaccaacuacagaaug

SEQ ID NO: 2071932 - RNA, 19 nt, Homo sapiens
  misc_RNA (1)...(19): siRNA sense strand
caugcuaaauaccugaaug

SEQ ID NO: 2071933 - RNA, 19 nt, Homo sapiens
  misc_RNA (1)...(19): siRNA sense strand
ugaaauuugcugucuacuu

SEQ ID NO: 2071934 - RNA, 19 nt, Homo sapiens
  misc_RNA (1)...(19): siRNA sense strand
guauuggcucucagguuua

SEQ ID NO: 2071935 - RNA, 19 nt, Homo sapiens
  misc_RNA (1)...(19): siRNA sense strand
ggaacagaucaaaguaaau

SEQ ID NO: 2071936 - RNA, 19 nt, Homo sapiens
  misc_RNA (1)...(19): siRNA sense strand
cccaaaggaugucuauuuu

SEQ ID NO: 2071937 - RNA, 19 nt, Homo sapiens
  misc_RNA (1)...(19): siRNA sense strand
aaugaaauuugcugucuac

SEQ ID NO: 2071938 - RNA, 19 nt, Homo sapiens
  misc_RNA (1)...(19): siRNA sense strand
gcagauuuccagcaacaag

SEQ ID NO: 2071939 - RNA, 19 nt, Homo sapiens
  misc_RNA (1)...(19): siRNA sense strand
caaaggcagaaacaggaaa

SEQ ID NO: 2071940 - RNA, 19 nt, Homo sapiens
  misc_RNA (1)...(19): siRNA sense strand
gcuaaauaccugaaugcau

SEQ ID NO: 2071941 - RNA, 19 nt, Homo sapiens
  misc_RNA (1)...(19): siRNA sense strand
cagaucaaaguaaauggaa

SEQ ID NO: 2071942 - RNA, 19 nt, Homo sapiens
  misc_RNA (1)...(19): siRNA sense strand
ucagcuggacauacuaauu

SEQ ID NO: 2071943 - RNA, 19 nt, Homo sapiens
  misc_RNA (1)...(19): siRNA sense strand
ccaaaggcagaaacaggaa

SEQ ID NO: 2071944 - RNA, 19 nt, Homo sapiens
  misc_RNA (1)...(19): siRNA sense strand
uaaauaccugaaugcauga

SEQ ID NO: 2071945 - RNA, 19 nt, Homo sapiens
  misc_RNA (1)...(19): siRNA sense strand
uaaauggaaggcuuaugau

SEQ ID NO: 2071946 - RNA, 19 nt, Homo sapiens
  misc_RNA (1)...(19): siRNA sense strand
gcugucuacuuaccaccaa

SEQ ID NO: 2071947 - RNA, 19 nt, Homo sapiens
  misc_RNA (1)...(19): siRNA sense strand
ggucauggagcucugaucu

SEQ ID NO: 2071948 - RNA, 19 nt, Homo sapiens
  misc_RNA (1)...(19): siRNA sense strand
gaagauccuuggaaaacca

SEQ ID NO: 2071949 - RNA, 19 nt, Homo sapiens
  misc_RNA (1)...(19): siRNA sense strand
cagaauguacucuuauguc

SEQ ID NO: 2071950 - RNA, 19 nt, Homo sapiens
  misc_RNA (1)...(19): siRNA sense strand
aaaagaaaauccccguugu

SEQ ID NO: 2071951 - RNA, 19 nt, Homo sapiens
  misc_RNA (1)...(19): siRNA sense strand
caacucauaaaugccaauu

SEQ ID NO: 2071952 - RNA, 19 nt, Homo sapiens
  misc_RNA (1)...(19): siRNA sense strand
gagcuuccccaacucauaa

SEQ ID NO: 2071953 - RNA, 19 nt, Homo sapiens
  misc_RNA (1)...(19): siRNA sense strand
cauagcugccuguacagaa

SEQ ID NO: 2071954 - RNA, 19 nt, Homo sapiens
  misc_RNA (1)...(19): siRNA sense strand
cagacaucaugcuaaauac

SEQ ID NO: 2071955 - RNA, 19 nt, Homo sapiens
  misc_RNA (1)...(19): siRNA sense strand
caugacaguguugaacuaa

SEQ ID NO: 2071956 - RNA, 19 nt, Homo sapiens
  misc_RNA (1)...(19): siRNA sense strand
ggugcuggauuuuauguug

SEQ ID NO: 2071957 - RNA, 19 nt, Homo sapiens
  misc_RNA (1)...(19): siRNA sense strand
uaauugaucaagggaaaga

SEQ ID NO: 2071958 - RNA, 19 nt, Homo sapiens
  misc_RNA (1)...(19): siRNA sense strand
aaaaccaacuacagaaugu

SEQ ID NO: 2071959 - RNA, 19 nt, Homo sapiens
  misc_RNA (1)...(19): siRNA sense strand
caaaaucugguuaucauca

SEQ ID NO: 2071960 - RNA, 19 nt, Homo sapiens
  misc_RNA (1)...(19): siRNA sense strand
cacaucagacaucaugcua

SEQ ID NO: 2071961 - RNA, 19 nt, Homo sapiens
  misc_RNA (1)...(19): siRNA sense strand
gaugaccaguuucuuuuag

SEQ ID NO: 2071962 - RNA, 19 nt, Homo sapiens
  misc_RNA (1)...(19): siRNA sense strand
ugggaacagaucaaaguaa

SEQ ID NO: 2071963 - RNA, 19 nt, Homo sapiens
  misc_RNA (1)...(19): siRNA sense strand
ggaaaaccaacuacagaau

SEQ ID NO: 2071964 - RNA, 19 nt, Homo sapiens
  misc_RNA (1)...(19): siRNA sense strand
aaauggaaggcuuaugaug

SEQ ID NO: 2071965 - RNA, 19 nt, Homo sapiens
  misc_RNA (1)...(19): siRNA sense strand
cagaggagcuuccccaacu

SEQ ID NO: 2071966 - RNA, 19 nt, Homo sapiens
  misc_RNA (1)...(19): siRNA sense strand
gaggaaagauuguacuauu

SEQ ID NO: 2071967 - RNA, 19 nt, Homo sapiens
  misc_RNA (1)...(19): siRNA sense strand
ccuaagcacuuccauaaua

SEQ ID NO: 2071968 - RNA, 19 nt, Homo sapiens
  misc_RNA (1)...(19): siRNA sense strand
ggagaacggcgaacagaua

SEQ ID NO: 2071969 - RNA, 19 nt, Homo sapiens
  misc_RNA (1)...(19): siRNA sense strand
gguaauaauugauguguuc

SEQ ID NO: 2071970 - RNA, 19 nt, Homo sapiens
  misc_RNA (1)...(19): siRNA sense strand
gaaacagacaggguaauaa

SEQ ID NO: 2071971 - RNA, 19 nt, Homo sapiens
  misc_RNA (1)...(19): siRNA sense strand
gcacuuccuuaaacaguug

SEQ ID NO: 2071972 - RNA, 19 nt, Homo sapiens
  misc_RNA (1)...(19): siRNA sense strand
gauugccagugaaauauuu

SEQ ID NO: 2071973 - RNA, 19 nt, Homo sapiens
  misc_RNA (1)...(19): siRNA sense strand
ugaaagagcuuaugauccu

SEQ ID NO: 2071974 - RNA, 19 nt, Homo sapiens
  misc_RNA (1)...(19): siRNA sense strand
uaaggaagucguacaguuu

SEQ ID NO: 2071975 - RNA, 19 nt, Homo sapiens
  misc_RNA (1)...(19): siRNA sense strand
gaacaggcgauggauauga

SEQ ID NO: 2071976 - RNA, 19 nt, Homo sapiens
  misc_RNA (1)...(19): siRNA sense strand
ggaagaaccggaacuaugg

SEQ ID NO: 2071977 - RNA, 19 nt, Homo sapiens
  misc_RNA (1)...(19): siRNA sense strand
cauaauagggucaguagaa

SEQ ID NO: 2071978 - RNA, 19 nt, Homo sapiens
  misc_RNA (1)...(19): siRNA sense strand
aaacaguugucggguauuu

SEQ ID NO: 2071979 - RNA, 19 nt, Homo sapiens
  misc_RNA (1)...(19): siRNA sense strand
ggaauccaauuaaggaagu

SEQ ID NO: 2071980 - RNA, 19 nt, Homo sapiens
  misc_RNA (1)...(19): siRNA sense strand
gaaagagcuuaugauccua

SEQ ID NO: 2071981 - RNA, 19 nt, Homo sapiens
  misc_RNA (1)...(19): siRNA sense strand
aaaccaauggcacuaaaua

SEQ ID NO: 2071982 - RNA, 19 nt, Homo sapiens
  misc_RNA (1)...(19): siRNA sense strand
gagaacggcgaacagauaa

SEQ ID NO: 2071983 - RNA, 19 nt, Homo sapiens
  misc_RNA (1)...(19): siRNA sense strand
uuaaggaagucguacaguu

SEQ ID NO: 2071984 - RNA, 19 nt, Homo sapiens
  misc_RNA (1)...(19): siRNA sense strand
uacaaucuaugcagugaaa

SEQ ID NO: 2071985 - RNA, 19 nt, Homo sapiens
  misc_RNA (1)...(19): siRNA sense strand
gcagugaaagagcuuauga

SEQ ID NO: 2071986 - RNA, 19 nt, Homo sapiens
  misc_RNA (1)...(19): siRNA sense strand
uaucgagucuacaaucuau

SEQ ID NO: 2071987 - RNA, 19 nt, Homo sapiens
  misc_RNA (1)...(19): siRNA sense strand
ugaaacagacaggguaaua

SEQ ID NO: 2071988 - RNA, 19 nt, Homo sapiens
  misc_RNA (1)...(19): siRNA sense strand
uaaaggaggcaaaggaaga

SEQ ID NO: 2071989 - RNA, 19 nt, Homo sapiens
  misc_RNA (1)...(19): siRNA sense strand
guggauggcucaagauucu

SEQ ID NO: 2071990 - RNA, 19 nt, Homo sapiens
  misc_RNA (1)...(19): siRNA sense strand
guccaccucuguaugauga

SEQ ID NO: 2071991 - RNA, 19 nt, Homo sapiens
  misc_RNA (1)...(19): siRNA sense strand
uuaaacaguugucggguau

SEQ ID NO: 2071992 - RNA, 19 nt, Homo sapiens
  misc_RNA (1)...(19): siRNA sense strand
ccaauggcacuaaauauca

SEQ ID NO: 2071993 - RNA, 19 nt, Homo sapiens
  misc_RNA (1)...(19): siRNA sense strand
cagacaggguaauaauuga

SEQ ID NO: 2071994 - RNA, 19 nt, Homo sapiens
  misc_RNA (1)...(19): siRNA sense strand
ggaaucucccuccaagaaa

SEQ ID NO: 2071995 - RNA, 19 nt, Homo sapiens
  misc_RNA (1)...(19): siRNA sense strand
cagaauagauauguuggau

SEQ ID NO: 2071996 - RNA, 19 nt, Homo sapiens
  misc_RNA (1)...(19): siRNA sense strand
gauccuaagcacuuccaua

SEQ ID NO: 2071997 - RNA, 19 nt, Homo sapiens
  misc_RNA (1)...(19): siRNA sense strand
aaacagacaggguaauaau

SEQ ID NO: 2071998 - RNA, 19 nt, Homo sapiens
  misc_RNA (1)...(19): siRNA sense strand
cuaagcacuuccauaauag

SEQ ID NO: 2071999 - RNA, 19 nt, Homo sapiens
  misc_RNA (1)...(19): siRNA sense strand
caagcuuccucuucggauu

SEQ ID NO: 2072000 - RNA, 19 nt, Homo sapiens
  misc_RNA (1)...(19): siRNA sense strand
ggcgauggauaugaucuaa

SEQ ID NO: 2072001 - RNA, 19 nt, Homo sapiens
  misc_RNA (1)...(19): siRNA sense strand
acagacaggguaauaauug

SEQ ID NO: 2072002 - RNA, 19 nt, Homo sapiens
  misc_RNA (1)...(19): siRNA sense strand
agaaacauccaaaccacua

SEQ ID NO: 2072003 - RNA, 19 nt, Homo sapiens
  misc_RNA (1)...(19): siRNA sense strand
ccugauugccagugaaaua

SEQ ID NO: 2072004 - RNA, 19 nt, Homo sapiens
  misc_RNA (1)...(19): siRNA sense strand
ccaaaccacuaucgagucu

SEQ ID NO: 2072005 - RNA, 19 nt, Homo sapiens
  misc_RNA (1)...(19): siRNA sense strand
gaaucucccuccaagaaaa

SEQ ID NO: 2072006 - RNA, 19 nt, Homo sapiens
  misc_RNA (1)...(19): siRNA sense strand
uaacugcagaggaaagauu

SEQ ID NO: 2072007 - RNA, 19 nt, Homo sapiens
  misc_RNA (1)...(19): siRNA sense strand
uacgggagaugguagcauu

SEQ ID NO: 2072008 - RNA, 19 nt, Homo sapiens
  misc_RNA (1)...(19): siRNA sense strand
cgauggauaugaucuaaaa

SEQ ID NO: 2072009 - RNA, 19 nt, Homo sapiens
  misc_RNA (1)...(19): siRNA sense strand
gaaacauccaaaccacuau

SEQ ID NO: 2072010 - RNA, 19 nt, Homo sapiens
  misc_RNA (1)...(19): siRNA sense strand
cacuaaauaucagggagua

SEQ ID NO: 2072011 - RNA, 19 nt, Homo sapiens
  misc_RNA (1)...(19): siRNA sense strand
guuugugccugccugauug

SEQ ID NO: 2072012 - RNA, 19 nt, Homo sapiens
  misc_RNA (1)...(19): siRNA sense strand
uggaguggauggcucaaga

SEQ ID NO: 2072013 - RNA, 19 nt, Homo sapiens
  misc_RNA (1)...(19): siRNA sense strand
caacuguccaccucuguau

SEQ ID NO: 2072014 - RNA, 19 nt, Homo sapiens
  misc_RNA (1)...(19): siRNA sense strand
ucaaccagaauaugcagua

SEQ ID NO: 2072015 - RNA, 19 nt, Homo sapiens
  misc_RNA (1)...(19): siRNA sense strand
ggaggccagucuuucuauc

SEQ ID NO: 2072016 - RNA, 19 nt, Homo sapiens
  misc_RNA (1)...(19): siRNA sense strand
ucuguaugaugaugugaaa

SEQ ID NO: 2072017 - RNA, 19 nt, Homo sapiens
  misc_RNA (1)...(19): siRNA sense strand
cagaggaaagauuguacua

SEQ ID NO: 2072018 - RNA, 19 nt, Homo sapiens
  misc_RNA (1)...(19): siRNA sense strand
ggaagucguacaguuucua

SEQ ID NO: 2072019 - RNA, 19 nt, Homo sapiens
  misc_RNA (1)...(19): siRNA sense strand
ucaguagaaucaugaucga

SEQ ID NO: 2072020 - RNA, 19 nt, Homo sapiens
  misc_RNA (1)...(19): siRNA sense strand
guugucggguauuucauga

SEQ ID NO: 2072021 - RNA, 19 nt, Homo sapiens
  misc_RNA (1)...(19): siRNA sense strand
aaaccacuaucgagucuac

SEQ ID NO: 2072022 - RNA, 19 nt, Homo sapiens
  misc_RNA (1)...(19): siRNA sense strand
uaaauaucagggaguagaa

SEQ ID NO: 2072023 - RNA, 19 nt, Homo sapiens
  misc_RNA (1)...(19): siRNA sense strand
uaaaaccaauggcacuaaa

SEQ ID NO: 2072024 - RNA, 19 nt, Homo sapiens
  misc_RNA (1)...(19): siRNA sense strand
ggauggcucaagauucuga

SEQ ID NO: 2072025 - RNA, 19 nt, Homo sapiens
  misc_RNA (1)...(19): siRNA sense strand
gaaaacaucguagugauuc

SEQ ID NO: 2072026 - RNA, 19 nt, Homo sapiens
  misc_RNA (1)...(19): siRNA sense strand
ggguaauaauugauguguu

SEQ ID NO: 2072027 - RNA, 19 nt, Homo sapiens
  misc_RNA (1)...(19): siRNA sense strand
guccaaauaguaaugaaga

SEQ ID NO: 2072028 - RNA, 19 nt, Homo sapiens
  misc_RNA (1)...(19): siRNA sense strand
aaaggaagaaccggaacua

SEQ ID NO: 2072029 - RNA, 19 nt, Homo sapiens
  misc_RNA (1)...(19): siRNA sense strand
auaauagggucaguagaau

SEQ ID NO: 2072030 - RNA, 19 nt, Homo sapiens
  misc_RNA (1)...(19): siRNA sense strand
gaugugaaagugcaagcuu

SEQ ID NO: 2072031 - RNA, 19 nt, Homo sapiens
  misc_RNA (1)...(19): siRNA sense strand
gaagucguacaguuucuag

SEQ ID NO: 2072032 - RNA, 19 nt, Homo sapiens
  misc_RNA (1)...(19): siRNA sense strand
ucuacaaucuaugcaguga

SEQ ID NO: 2072033 - RNA, 19 nt, Homo sapiens
  misc_RNA (1)...(19): siRNA sense strand
uggaacaggcgauggauau

SEQ ID NO: 2072034 - RNA, 19 nt, Homo sapiens
  misc_RNA (1)...(19): siRNA sense strand
cuaaauaucagggaguaga

SEQ ID NO: 2072035 - RNA, 19 nt, Homo sapiens
  misc_RNA (1)...(19): siRNA sense strand
gaacagauaaaaccaaugg

SEQ ID NO: 2072036 - RNA, 19 nt, Homo sapiens
  misc_RNA (1)...(19): siRNA sense strand
gaacggcgaacagauaaaa

SEQ ID NO: 2072037 - RNA, 19 nt, Homo sapiens
  misc_RNA (1)...(19): siRNA sense strand
gaguggauggcucaagauu

SEQ ID NO: 2072038 - RNA, 19 nt, Homo sapiens
  misc_RNA (1)...(19): siRNA sense strand
aaagagcuuaugauccuaa

SEQ ID NO: 2072039 - RNA, 19 nt, Homo sapiens
  misc_RNA (1)...(19): siRNA sense strand
guaugaugaugugaaagug

SEQ ID NO: 2072040 - RNA, 19 nt, Homo sapiens
  misc_RNA (1)...(19): siRNA sense strand
uugcacaagugaaacauag

SEQ ID NO: 2072041 - RNA, 19 nt, Homo sapiens
  misc_RNA (1)...(19): siRNA sense strand
caaucuaugcagugaaaga

SEQ ID NO: 2072042 - RNA, 19 nt, Homo sapiens
  misc_RNA (1)...(19): siRNA sense strand
caaccagaauaugcaguag

SEQ ID NO: 2072043 - RNA, 19 nt, Homo sapiens
  misc_RNA (1)...(19): siRNA sense strand
caauggcacuaaauaucag

SEQ ID NO: 2072044 - RNA, 19 nt, Homo sapiens
  misc_RNA (1)...(19): siRNA sense strand
gacaggguaauaauugaug

SEQ ID NO: 2072045 - RNA, 19 nt, Homo sapiens
  misc_RNA (1)...(19): siRNA sense strand
ugaaacauagcuacaacug

SEQ ID NO: 2072046 - RNA, 19 nt, Homo sapiens
  misc_RNA (1)...(19): siRNA sense strand
aggaagaaccggaacuaug

SEQ ID NO: 2072047 - RNA, 19 nt, Homo sapiens
  misc_RNA (1)...(19): siRNA sense strand
caagugaaacauagcuaca

SEQ ID NO: 2072048 - RNA, 19 nt, Homo sapiens
  misc_RNA (1)...(19): siRNA sense strand
ucucagaauagauauguug

SEQ ID NO: 2072049 - RNA, 19 nt, Homo sapiens
  misc_RNA (1)...(19): siRNA sense strand
aauagggucaguagaauca

SEQ ID NO: 2072050 - RNA, 19 nt, Homo sapiens
  misc_RNA (1)...(19): siRNA sense strand
gguuugugccugccugauu

SEQ ID NO: 2072051 - RNA, 19 nt, Homo sapiens
  misc_RNA (1)...(19): siRNA sense strand
acaagaaacauccaaacca

SEQ ID NO: 2072052 - RNA, 19 nt, Homo sapiens
  misc_RNA (1)...(19): siRNA sense strand
gguagcauucuccaaggaa

SEQ ID NO: 2072053 - RNA, 19 nt, Homo sapiens
  misc_RNA (1)...(19): siRNA sense strand
gaucuaaaaguccaaauag

SEQ ID NO: 2072054 - RNA, 19 nt, Homo sapiens
  misc_RNA (1)...(19): siRNA sense strand
ggaacaggcgauggauaug

SEQ ID NO: 2072055 - RNA, 19 nt, Homo sapiens
  misc_RNA (1)...(19): siRNA sense strand
gcgaacagauaaaaccaau

SEQ ID NO: 2072056 - RNA, 19 nt, Homo sapiens
  misc_RNA (1)...(19): siRNA sense strand
gggaggccagucuuucuau

SEQ ID NO: 2072057 - RNA, 19 nt, Homo sapiens
  misc_RNA (1)...(19): siRNA sense strand
auccuaagcacuuccauaa

SEQ ID NO: 2072058 - RNA, 19 nt, Homo sapiens
  misc_RNA (1)...(19): siRNA sense strand
uguaaaggaggcaaaggaa

SEQ ID NO: 2072059 - RNA, 19 nt, Homo sapiens
  misc_RNA (1)...(19): siRNA sense strand
ccuaaauacuaucacaacu

SEQ ID NO: 2072060 - RNA, 19 nt, Homo sapiens
  misc_RNA (1)...(19): siRNA sense strand
ucaacuguccaccucugua

SEQ ID NO: 2072061 - RNA, 19 nt, Homo sapiens
  misc_RNA (1)...(19): siRNA sense strand
ggguauuucaugacacuga

SEQ ID NO: 2072062 - RNA, 19 nt, Homo sapiens
  misc_RNA (1)...(19): siRNA sense strand
gcacaagugaaacauagcu

SEQ ID NO: 2072063 - RNA, 19 nt, Homo sapiens
  misc_RNA (1)...(19): siRNA sense strand
gaagaaccggaacuauggu

SEQ ID NO: 2072064 - RNA, 19 nt, Homo sapiens
  misc_RNA (1)...(19): siRNA sense strand
uagggucaguagaaucaug

SEQ ID NO: 2072065 - RNA, 19 nt, Homo sapiens
  misc_RNA (1)...(19): siRNA sense strand
aacaggcgauggauaugau

SEQ ID NO: 2072066 - RNA, 19 nt, Homo sapiens
  misc_RNA (1)...(19): siRNA sense strand
gaacaucaccuaagagauu

SEQ ID NO: 2072067 - RNA, 19 nt, Homo sapiens
  misc_RNA (1)...(19): siRNA sense strand
gguggaagcuacaaugauu

SEQ ID NO: 2072068 - RNA, 19 nt, Homo sapiens
  misc_RNA (1)...(19): siRNA sense strand
ugaagaacaucaccuaaga

SEQ ID NO: 2072069 - RNA, 19 nt, Homo sapiens
  misc_RNA (1)...(19): siRNA sense strand
gaccaugacuccguggaua

SEQ ID NO: 2072070 - RNA, 19 nt, Homo sapiens
  misc_RNA (1)...(19): siRNA sense strand
uaaagaagacacugaagaa

SEQ ID NO: 2072071 - RNA, 19 nt, Homo sapiens
  misc_RNA (1)...(19): siRNA sense strand
ggauggcuauaauggauuu

SEQ ID NO: 2072072 - RNA, 19 nt, Homo sapiens
  misc_RNA (1)...(19): siRNA sense strand
ggagguggaugcagcuaug

SEQ ID NO: 2072073 - RNA, 19 nt, Homo sapiens
  misc_RNA (1)...(19): siRNA sense strand
gauauuuguugguggcauu

SEQ ID NO: 2072074 - RNA, 19 nt, Homo sapiens
  misc_RNA (1)...(19): siRNA sense strand
ggguugagcuuugaaacaa

SEQ ID NO: 2072075 - RNA, 19 nt, Homo sapiens
  misc_RNA (1)...(19): siRNA sense strand
agaagacacugaagaacau

SEQ ID NO: 2072076 - RNA, 19 nt, Homo sapiens
  misc_RNA (1)...(19): siRNA sense strand
guaaugauggaagcaauuu

SEQ ID NO: 2072077 - RNA, 19 nt, Homo sapiens
  misc_RNA (1)...(19): siRNA sense strand
guaaugagagauccaaaca

SEQ ID NO: 2072078 - RNA, 19 nt, Homo sapiens
  misc_RNA (1)...(19): siRNA sense strand
aacaucaccuaagagauua

SEQ ID NO: 2072079 - RNA, 19 nt, Homo sapiens
  misc_RNA (1)...(19): siRNA sense strand
gcuauaauggauuugguaa

SEQ ID NO: 2072080 - RNA, 19 nt, Homo sapiens
  misc_RNA (1)...(19): siRNA sense strand
gcauuaaagaagacacuga

SEQ ID NO: 2072081 - RNA, 19 nt, Homo sapiens
  misc_RNA (1)...(19): siRNA sense strand
ccgaggcaguggcaagaaa

SEQ ID NO: 2072082 - RNA, 19 nt, Homo sapiens
  misc_RNA (1)...(19): siRNA sense strand
ugagagauccaaacaccaa

SEQ ID NO: 2072083 - RNA, 19 nt, Homo sapiens
  misc_RNA (1)...(19): siRNA sense strand
uuaaagaagacacugaaga

SEQ ID NO: 2072084 - RNA, 19 nt, Homo sapiens
  misc_RNA (1)...(19): siRNA sense strand
gguaaugauggaagcaauu

SEQ ID NO: 2072085 - RNA, 19 nt, Homo sapiens
  misc_RNA (1)...(19): siRNA sense strand
gaagaacaucaccuaagag

SEQ ID NO: 2072086 - RNA, 19 nt, Homo sapiens
  misc_RNA (1)...(19): siRNA sense strand
cggugggaaugacaacuuu

SEQ ID NO: 2072087 - RNA, 19 nt, Homo sapiens
  misc_RNA (1)...(19): siRNA sense strand
gguggaggccaauacuuug

SEQ ID NO: 2072088 - RNA, 19 nt, Homo sapiens
  misc_RNA (1)...(19): siRNA sense strand
uuacaacaaucagucuuca

SEQ ID NO: 2072089 - RNA, 19 nt, Homo sapiens
  misc_RNA (1)...(19): siRNA sense strand
aagaacaucaccuaagaga

SEQ ID NO: 2072090 - RNA, 19 nt, Homo sapiens
  misc_RNA (1)...(19): siRNA sense strand
cauuaaagaagacacugaa

SEQ ID NO: 2072091 - RNA, 19 nt, Homo sapiens
  misc_RNA (1)...(19): siRNA sense strand
aagaagacacugaagaaca

SEQ ID NO: 2072092 - RNA, 19 nt, Homo sapiens
  misc_RNA (1)...(19): siRNA sense strand
gcuuugaaacaacugauga

SEQ ID NO: 2072093 - RNA, 19 nt, Homo sapiens
  misc_RNA (1)...(19): siRNA sense strand
ggaggguugagcuuugaaa

SEQ ID NO: 2072094 - RNA, 19 nt, Homo sapiens
  misc_RNA (1)...(19): siRNA sense strand
cuaagucagcgucuccaaa

SEQ ID NO: 2072095 - RNA, 19 nt, Homo sapiens
  misc_RNA (1)...(19): siRNA sense strand
gaggagccauuuugagcaa

SEQ ID NO: 2072096 - RNA, 19 nt, Homo sapiens
  misc_RNA (1)...(19): siRNA sense strand
cuauggcaguggcagaaga

SEQ ID NO: 2072097 - RNA, 19 nt, Homo sapiens
  misc_RNA (1)...(19): siRNA sense strand
gaaccaaagagagcugucu

SEQ ID NO: 2072098 - RNA, 19 nt, Homo sapiens
  misc_RNA (1)...(19): siRNA sense strand
acacaagguggauggaaga

SEQ ID NO: 2072099 - RNA, 19 nt, Homo sapiens
  misc_RNA (1)...(19): siRNA sense strand
ggucguggaggaaacuuca

SEQ ID NO: 2072100 - RNA, 19 nt, Homo sapiens
  misc_RNA (1)...(19): siRNA sense strand
guggaagcuacaaugauuu

SEQ ID NO: 2072101 - RNA, 19 nt, Homo sapiens
  misc_RNA (1)...(19): siRNA sense strand
ggcuauaauggauuuggua

SEQ ID NO: 2072102 - RNA, 19 nt, Homo sapiens
  misc_RNA (1)...(19): siRNA sense strand
ggggauggcuauaauggau

SEQ ID NO: 2072103 - RNA, 19 nt, Homo sapiens
  misc_RNA (1)...(19): siRNA sense strand
ggugguggaagcuacaaug

SEQ ID NO: 2072104 - RNA, 19 nt, Homo sapiens
  misc_RNA (1)...(19): siRNA sense strand
uaagucagcgucuccaaaa

SEQ ID NO: 2072105 - RNA, 19 nt, Homo sapiens
  misc_RNA (1)...(19): siRNA sense strand
gcuuugccuuuguaaccuu

SEQ ID NO: 2072106 - RNA, 19 nt, Homo sapiens
  misc_RNA (1)...(19): siRNA sense strand
gaccgaggcaguggcaaga

SEQ ID NO: 2072107 - RNA, 19 nt, Homo sapiens
  misc_RNA (1)...(19): siRNA sense strand
gugguggaagcuacaauga

SEQ ID NO: 2072108 - RNA, 19 nt, Homo sapiens
  misc_RNA (1)...(19): siRNA sense strand
uggcaguggcagaagauuu

SEQ ID NO: 2072109 - RNA, 19 nt, Homo sapiens
  misc_RNA (1)...(19): siRNA sense strand
ccacagagcccaagaauuu

SEQ ID NO: 2072110 - RNA, 19 nt, Homo sapiens
  misc_RNA (1)...(19): siRNA sense strand
ucaaaggccucuucaugua

SEQ ID NO: 2072111 - RNA, 19 nt, Homo sapiens
  misc_RNA (1)...(19): siRNA sense strand
gcacagaaacucucaaaug

SEQ ID NO: 2072112 - RNA, 19 nt, Homo sapiens
  misc_RNA (1)...(19): siRNA sense strand
ccaauucuguccaguuaua

SEQ ID NO: 2072113 - RNA, 19 nt, Homo sapiens
  misc_RNA (1)...(19): siRNA sense strand
gaaguuggaucaauugaag

SEQ ID NO: 2072114 - RNA, 19 nt, Homo sapiens
  misc_RNA (1)...(19): siRNA sense strand
ucacaaacaucuacaaauc

SEQ ID NO: 2072115 - RNA, 19 nt, Homo sapiens
  misc_RNA (1)...(19): siRNA sense strand
uugaagagcuguugcuaua

SEQ ID NO: 2072116 - RNA, 19 nt, Homo sapiens
  misc_RNA (1)...(19): siRNA sense strand
gaagagcacuaccgcauag

SEQ ID NO: 2072117 - RNA, 19 nt, Homo sapiens
  misc_RNA (1)...(19): siRNA sense strand
gaagagcuguugcuauaca

SEQ ID NO: 2072118 - RNA, 19 nt, Homo sapiens
  misc_RNA (1)...(19): siRNA sense strand
gauacuaugucccugcuuu

SEQ ID NO: 2072119 - RNA, 19 nt, Homo sapiens
  misc_RNA (1)...(19): siRNA sense strand
gcagagaagucagcuguau

SEQ ID NO: 2072120 - RNA, 19 nt, Homo sapiens
  misc_RNA (1)...(19): siRNA sense strand
gaagaaaucacaaacaucu

SEQ ID NO: 2072121 - RNA, 19 nt, Homo sapiens
  misc_RNA (1)...(19): siRNA sense strand
ggaacgggcaccucaauuu

SEQ ID NO: 2072122 - RNA, 19 nt, Homo sapiens
  misc_RNA (1)...(19): siRNA sense strand
ccaaaucuauccugaaauc

SEQ ID NO: 2072123 - RNA, 19 nt, Homo sapiens
  misc_RNA (1)...(19): siRNA sense strand
gaagaaaccagccaaaucu

SEQ ID NO: 2072124 - RNA, 19 nt, Homo sapiens
  misc_RNA (1)...(19): siRNA sense strand
gaaaaguucuacccagaua

SEQ ID NO: 2072125 - RNA, 19 nt, Homo sapiens
  misc_RNA (1)...(19): siRNA sense strand
agaagaaguuggaucaauu

SEQ ID NO: 2072126 - RNA, 19 nt, Homo sapiens
  misc_RNA (1)...(19): siRNA sense strand
gcagugaaucucccuauaa

SEQ ID NO: 2072127 - RNA, 19 nt, Homo sapiens
  misc_RNA (1)...(19): siRNA sense strand
caacuauucuccuaacuca

SEQ ID NO: 2072128 - RNA, 19 nt, Homo sapiens
  misc_RNA (1)...(19): siRNA sense strand
caagcaagcugucugauac

SEQ ID NO: 2072129 - RNA, 19 nt, Homo sapiens
  misc_RNA (1)...(19): siRNA sense strand
cgucgacgauugaauuuaa

SEQ ID NO: 2072130 - RNA, 19 nt, Homo sapiens
  misc_RNA (1)...(19): siRNA sense strand
gauggacucuucacaggaa

SEQ ID NO: 2072131 - RNA, 19 nt, Homo sapiens
  misc_RNA (1)...(19): siRNA sense strand
cagaaacucucaaaugcuu

SEQ ID NO: 2072132 - RNA, 19 nt, Homo sapiens
  misc_RNA (1)...(19): siRNA sense strand
ggaaugaaccugggucuga

SEQ ID NO: 2072133 - RNA, 19 nt, Homo sapiens
  misc_RNA (1)...(19): siRNA sense strand
gauaguugcugaauuucga

SEQ ID NO: 2072134 - RNA, 19 nt, Homo sapiens
  misc_RNA (1)...(19): siRNA sense strand
uaaacuaccuuccaacucu

SEQ ID NO: 2072135 - RNA, 19 nt, Homo sapiens
  misc_RNA (1)...(19): siRNA sense strand
gaagaaguuggaucaauug

SEQ ID NO: 2072136 - RNA, 19 nt, Homo sapiens
  misc_RNA (1)...(19): siRNA sense strand
guacuaucgucuaucauug

SEQ ID NO: 2072137 - RNA, 19 nt, Homo sapiens
  misc_RNA (1)...(19): siRNA sense strand
aagcugcucucaagucuaa

SEQ ID NO: 2072138 - RNA, 19 nt, Homo sapiens
  misc_RNA (1)...(19): siRNA sense strand
ucucagauguggaagauga

SEQ ID NO: 2072139 - RNA, 19 nt, Homo sapiens
  misc_RNA (1)...(19): siRNA sense strand
cguaagcccucagaugaua

SEQ ID NO: 2072140 - RNA, 19 nt, Homo sapiens
  misc_RNA (1)...(19): siRNA sense strand
ccacaguacuaucgucuau

SEQ ID NO: 2072141 - RNA, 19 nt, Homo sapiens
  misc_RNA (1)...(19): siRNA sense strand
gaucucaggcccuaauuga

SEQ ID NO: 2072142 - RNA, 19 nt, Homo sapiens
  misc_RNA (1)...(19): siRNA sense strand
ggucaguccugcaucaaga

SEQ ID NO: 2072143 - RNA, 19 nt, Homo sapiens
  misc_RNA (1)...(19): siRNA sense strand
ggaagaauuugugaaugga

SEQ ID NO: 2072144 - RNA, 19 nt, Homo sapiens
  misc_RNA (1)...(19): siRNA sense strand
gaaacucucaaaugcuuaa

SEQ ID NO: 2072145 - RNA, 19 nt, Homo sapiens
  misc_RNA (1)...(19): siRNA sense strand
caaagccugugaauacuuc

SEQ ID NO: 2072146 - RNA, 19 nt, Homo sapiens
  misc_RNA (1)...(19): siRNA sense strand
gacaauggcccuucaagug

SEQ ID NO: 2072147 - RNA, 19 nt, Homo sapiens
  misc_RNA (1)...(19): siRNA sense strand
gaagggaaauagaggacau

SEQ ID NO: 2072148 - RNA, 19 nt, Homo sapiens
  misc_RNA (1)...(19): siRNA sense strand
gaaguuaccaucugccaau

SEQ ID NO: 2072149 - RNA, 19 nt, Homo sapiens
  misc_RNA (1)...(19): siRNA sense strand
aagaucaguuccauccuua

SEQ ID NO: 2072150 - RNA, 19 nt, Homo sapiens
  misc_RNA (1)...(19): siRNA sense strand
uaaagaagaaguuggauca

SEQ ID NO: 2072151 - RNA, 19 nt, Homo sapiens
  misc_RNA (1)...(19): siRNA sense strand
gaacgggcaccucaauuuc

SEQ ID NO: 2072152 - RNA, 19 nt, Homo sapiens
  misc_RNA (1)...(19): siRNA sense strand
caaauauccucuccaaggu

SEQ ID NO: 2072153 - RNA, 19 nt, Homo sapiens
  misc_RNA (1)...(19): siRNA sense strand
cuaugucccugcuuucuaa

SEQ ID NO: 2072154 - RNA, 19 nt, Homo sapiens
  misc_RNA (1)...(19): siRNA sense strand
ggacacccuuccagagaga

SEQ ID NO: 2072155 - RNA, 19 nt, Homo sapiens
  misc_RNA (1)...(19): siRNA sense strand
ugaugaaccuagagaagaa

SEQ ID NO: 2072156 - RNA, 19 nt, Homo sapiens
  misc_RNA (1)...(19): siRNA sense strand
cgaauaagcaguggaagaa

SEQ ID NO: 2072157 - RNA, 19 nt, Homo sapiens
  misc_RNA (1)...(19): siRNA sense strand
aaacggacccucauuaaca

SEQ ID NO: 2072158 - RNA, 19 nt, Homo sapiens
  misc_RNA (1)...(19): siRNA sense strand
gggaagauagaaauguaua

SEQ ID NO: 2072159 - RNA, 19 nt, Homo sapiens
  misc_RNA (1)...(19): siRNA sense strand
gaacugugaccgucucuca

SEQ ID NO: 2072160 - RNA, 19 nt, Homo sapiens
  misc_RNA (1)...(19): siRNA sense strand
ccaagaagaugaggauuac

SEQ ID NO: 2072161 - RNA, 19 nt, Homo sapiens
  misc_RNA (1)...(19): siRNA sense strand
ggcagugaaucucccuaua

SEQ ID NO: 2072162 - RNA, 19 nt, Homo sapiens
  misc_RNA (1)...(19): siRNA sense strand
ugcaaggccugucaucuuu

SEQ ID NO: 2072163 - RNA, 19 nt, Homo sapiens
  misc_RNA (1)...(19): siRNA sense strand
gcucucaagucuaagauag

SEQ ID NO: 2072164 - RNA, 19 nt, Homo sapiens
  misc_RNA (1)...(19): siRNA sense strand
gcaaggccugucaucuuua

SEQ ID NO: 2072165 - RNA, 19 nt, Homo sapiens
  misc_RNA (1)...(19): siRNA sense strand
ccggagugguauaaucuua

SEQ ID NO: 2072166 - RNA, 19 nt, Homo sapiens
  misc_RNA (1)...(19): siRNA sense strand
ccacgucgacgauugaauu

SEQ ID NO: 2072167 - RNA, 19 nt, Homo sapiens
  misc_RNA (1)...(19): siRNA sense strand
ugaacaaacaaccgaauaa

SEQ ID NO: 2072168 - RNA, 19 nt, Homo sapiens
  misc_RNA (1)...(19): siRNA sense strand
ccacucaucuacccucugu

SEQ ID NO: 2072169 - RNA, 19 nt, Homo sapiens
  misc_RNA (1)...(19): siRNA sense strand
gcacaucagguagcucuuu

SEQ ID NO: 2072170 - RNA, 19 nt, Homo sapiens
  misc_RNA (1)...(19): siRNA sense strand
gaugaggauuaccgagauu

SEQ ID NO: 2072171 - RNA, 19 nt, Homo sapiens
  misc_RNA (1)...(19): siRNA sense strand
agccaaagcuggagucaga

SEQ ID NO: 2072172 - RNA, 19 nt, Homo sapiens
  misc_RNA (1)...(19): siRNA sense strand
gcgcucagaagaucagaua

SEQ ID NO: 2072173 - RNA, 19 nt, Homo sapiens
  misc_RNA (1)...(19): siRNA sense strand
gaacaaacaaccgaauaag

SEQ ID NO: 2072174 - RNA, 19 nt, Homo sapiens
  misc_RNA (1)...(19): siRNA sense strand
guccuggccuccaccauuu

SEQ ID NO: 2072175 - RNA, 19 nt, Homo sapiens
  misc_RNA (1)...(19): siRNA sense strand
ucaagcaagcugucugaua

SEQ ID NO: 2072176 - RNA, 19 nt, Homo sapiens
  misc_RNA (1)...(19): siRNA sense strand
gcaccucaaucgacaacau

SEQ ID NO: 2072177 - RNA, 19 nt, Homo sapiens
  misc_RNA (1)...(19): siRNA sense strand
ucacaacccucuggcaaau

SEQ ID NO: 2072178 - RNA, 19 nt, Homo sapiens
  misc_RNA (1)...(19): siRNA sense strand
aaagaucaguuccauccuu

SEQ ID NO: 2072179 - RNA, 19 nt, Homo sapiens
  misc_RNA (1)...(19): siRNA sense strand
cacagaaacucucaaaugc

SEQ ID NO: 2072180 - RNA, 19 nt, Homo sapiens
  misc_RNA (1)...(19): siRNA sense strand
gcacaauacaaagaaguaa

SEQ ID NO: 2072181 - RNA, 19 nt, Homo sapiens
  misc_RNA (1)...(19): siRNA sense strand
agccaauucuguccaguua

SEQ ID NO: 2072182 - RNA, 19 nt, Homo sapiens
  misc_RNA (1)...(19): siRNA sense strand
gaaaccagccaaaucuauc

SEQ ID NO: 2072183 - RNA, 19 nt, Homo sapiens
  misc_RNA (1)...(19): siRNA sense strand
ggacacccacccaggauga

SEQ ID NO: 2072184 - RNA, 19 nt, Homo sapiens
  misc_RNA (1)...(19): siRNA sense strand
caccaaccauggagaguga

SEQ ID NO: 2072185 - RNA, 19 nt, Homo sapiens
  misc_RNA (1)...(19): siRNA sense strand
cuaagauaguugcugaauu

SEQ ID NO: 2072186 - RNA, 19 nt, Homo sapiens
  misc_RNA (1)...(19): siRNA sense strand
ccuauaagcagccuucuga

SEQ ID NO: 2072187 - RNA, 19 nt, Homo sapiens
  misc_RNA (1)...(19): siRNA sense strand
caucuuuacuucagagugu

SEQ ID NO: 2072188 - RNA, 19 nt, Homo sapiens
  misc_RNA (1)...(19): siRNA sense strand
uggaagaaaucacaaacau

SEQ ID NO: 2072189 - RNA, 19 nt, Homo sapiens
  misc_RNA (1)...(19): siRNA sense strand
ccucagaugauaagcauuu

SEQ ID NO: 2072190 - RNA, 19 nt, Homo sapiens
  misc_RNA (1)...(19): siRNA sense strand
caucucaguuugccacaga

SEQ ID NO: 2072191 - RNA, 19 nt, Homo sapiens
  misc_RNA (1)...(19): siRNA sense strand
agccaaaucuauccugaaa

SEQ ID NO: 2072192 - RNA, 19 nt, Homo sapiens
  misc_RNA (1)...(19): siRNA sense strand
ucuccuaacucaucaacuu

SEQ ID NO: 2072193 - RNA, 19 nt, Homo sapiens
  misc_RNA (1)...(19): siRNA sense strand
caacuccaccucuuccaaa

SEQ ID NO: 2072194 - RNA, 19 nt, Homo sapiens
  misc_RNA (1)...(19): siRNA sense strand
gaagcacaauacaaagaag

SEQ ID NO: 2072195 - RNA, 19 nt, Homo sapiens
  misc_RNA (1)...(19): siRNA sense strand
agaagcagcugaaagaaaa

SEQ ID NO: 2072196 - RNA, 19 nt, Homo sapiens
  misc_RNA (1)...(19): siRNA sense strand
gagcacuaccgcauagaaa

SEQ ID NO: 2072197 - RNA, 19 nt, Homo sapiens
  misc_RNA (1)...(19): siRNA sense strand
uggcaaauauccucuccaa

SEQ ID NO: 2072198 - RNA, 19 nt, Homo sapiens
  misc_RNA (1)...(19): siRNA sense strand
acaacccucuggcaaauau

SEQ ID NO: 2072199 - RNA, 19 nt, Homo sapiens
  misc_RNA (1)...(19): siRNA sense strand
acaguacuaucgucuauca

SEQ ID NO: 2072200 - RNA, 19 nt, Homo sapiens
  misc_RNA (1)...(19): siRNA sense strand
gcucagaagaucagauaga

SEQ ID NO: 2072201 - RNA, 19 nt, Homo sapiens
  misc_RNA (1)...(19): siRNA sense strand
aauaagcaguggaagaaau

SEQ ID NO: 2072202 - RNA, 19 nt, Homo sapiens
  misc_RNA (1)...(19): siRNA sense strand
cagcugcucuagugaagga

SEQ ID NO: 2072203 - RNA, 19 nt, Homo sapiens
  misc_RNA (1)...(19): siRNA sense strand
aaacagcaccauacaagga

SEQ ID NO: 2072204 - RNA, 19 nt, Homo sapiens
  misc_RNA (1)...(19): siRNA sense strand
gagaagaaaccagccaaau

SEQ ID NO: 2072205 - RNA, 19 nt, Homo sapiens
  misc_RNA (1)...(19): siRNA sense strand
gacagcaacuccaccucuu

SEQ ID NO: 2072206 - RNA, 19 nt, Homo sapiens
  misc_RNA (1)...(19): siRNA sense strand
ggaacucucagauguggaa

SEQ ID NO: 2072207 - RNA, 19 nt, Homo sapiens
  misc_RNA (1)...(19): siRNA sense strand
gcuaaccgaguaaacaauu

SEQ ID NO: 2072208 - RNA, 19 nt, Homo sapiens
  misc_RNA (1)...(19): siRNA sense strand
cuaugaagcacaauacaaa

SEQ ID NO: 2072209 - RNA, 19 nt, Homo sapiens
  misc_RNA (1)...(19): siRNA sense strand
gaaguagaguggcucauaa

SEQ ID NO: 2072210 - RNA, 19 nt, Homo sapiens
  misc_RNA (1)...(19): siRNA sense strand
gcucauaagugguuucuuc

SEQ ID NO: 2072211 - RNA, 19 nt, Homo sapiens
  misc_RNA (1)...(19): siRNA sense strand
cauaagugguuucuucaga

SEQ ID NO: 2072212 - RNA, 19 nt, Homo sapiens
  misc_RNA (1)...(19): siRNA sense strand
cagacaacauccuagaauu

SEQ ID NO: 2072213 - RNA, 19 nt, Homo sapiens
  misc_RNA (1)...(19): siRNA sense strand
ccaacaagauucacaugca

SEQ ID NO: 2072214 - RNA, 19 nt, Homo sapiens
  misc_RNA (1)...(19): siRNA sense strand
agacaacauccuagaauuu

SEQ ID NO: 2072215 - RNA, 19 nt, Homo sapiens
  misc_RNA (1)...(19): siRNA sense strand
acaugcagcuaauuaaaga

SEQ ID NO: 2072216 - RNA, 19 nt, Homo sapiens
  misc_RNA (1)...(19): siRNA sense strand
gacaacauccuagaauuug

SEQ ID NO: 2072217 - RNA, 19 nt, Homo sapiens
  misc_RNA (1)...(19): siRNA sense strand
uaagugguuucuucagaga

SEQ ID NO: 2072218 - RNA, 19 nt, Homo sapiens
  misc_RNA (1)...(19): siRNA sense strand
gaaaagaccagacaacauc

SEQ ID NO: 2072219 - RNA, 19 nt, Homo sapiens
  misc_RNA (1)...(19): siRNA sense strand
ccuaaggacccacaaagaa

SEQ ID NO: 2072220 - RNA, 19 nt, Homo sapiens
  misc_RNA (1)...(19): siRNA sense strand
ucacaugcagcuaauuaaa

SEQ ID NO: 2072221 - RNA, 19 nt, Homo sapiens
  misc_RNA (1)...(19): siRNA sense strand
agaauuugcugcagacuac

SEQ ID NO: 2072222 - RNA, 19 nt, Homo sapiens
  misc_RNA (1)...(19): siRNA sense strand
gauccaagacuucccaaca

SEQ ID NO: 2072223 - RNA, 19 nt, Homo sapiens
  misc_RNA (1)...(19): siRNA sense strand
agaaguagaguggcucaua

SEQ ID NO: 2072224 - RNA, 19 nt, Homo sapiens
  misc_RNA (1)...(19): siRNA sense strand
gcagcuaauuaaagacaag

SEQ ID NO: 2072225 - RNA, 19 nt, Homo sapiens
  misc_RNA (1)...(19): siRNA sense strand
guagaguggcucauaagug

SEQ ID NO: 2072226 - RNA, 19 nt, Homo sapiens
  misc_RNA (1)...(19): siRNA sense strand
ccagacaacauccuagaau

SEQ ID NO: 2072227 - RNA, 19 nt, Homo sapiens
  misc_RNA (1)...(19): siRNA sense strand
agacucggauugcuaacga

SEQ ID NO: 2072228 - RNA, 19 nt, Homo sapiens
  misc_RNA (1)...(19): siRNA sense strand
gaccagacaacauccuaga

SEQ ID NO: 2072229 - RNA, 19 nt, Homo sapiens
  misc_RNA (1)...(19): siRNA sense strand
caagacuucccaacaagau

SEQ ID NO: 2072230 - RNA, 19 nt, Homo sapiens
  misc_RNA (1)...(19): siRNA sense strand
auucacaugcagcuaauua

SEQ ID NO: 2072231 - RNA, 19 nt, Homo sapiens
  misc_RNA (1)...(19): siRNA sense strand
guaccuaaggacccacaaa

SEQ ID NO: 2072232 - RNA, 19 nt, Homo sapiens
  misc_RNA (1)...(19): siRNA sense strand
aagauucacaugcagcuaa

SEQ ID NO: 2072233 - RNA, 19 nt, Homo sapiens
  misc_RNA (1)...(19): siRNA sense strand
cuacuucacggauccaaga

SEQ ID NO: 2072234 - RNA, 19 nt, Homo sapiens
  misc_RNA (1)...(19): siRNA sense strand
ccaagacuucccaacaaga

SEQ ID NO: 2072235 - RNA, 19 nt, Homo sapiens
  misc_RNA (1)...(19): siRNA sense strand
cuaaggacccacaaagaag

SEQ ID NO: 2072236 - RNA, 19 nt, Homo sapiens
  misc_RNA (1)...(19): siRNA sense strand
cuucacggauccaagacuu

SEQ ID NO: 2072237 - RNA, 19 nt, Homo sapiens
  misc_RNA (1)...(19): siRNA sense strand
gaguggcucauaagugguu

SEQ ID NO: 2072238 - RNA, 19 nt, Homo sapiens
  misc_RNA (1)...(19): siRNA sense strand
auccaagacuucccaacaa

SEQ ID NO: 2072239 - RNA, 19 nt, Homo sapiens
  misc_RNA (1)...(19): siRNA sense strand
uagaauuugcugcagacua

SEQ ID NO: 2072240 - RNA, 19 nt, Homo sapiens
  misc_RNA (1)...(19): siRNA sense strand
uaaggacccacaaagaagu

SEQ ID NO: 2072241 - RNA, 19 nt, Homo sapiens
  misc_RNA (1)...(19): siRNA sense strand
uccaagacuucccaacaag

SEQ ID NO: 2072242 - RNA, 19 nt, Homo sapiens
  misc_RNA (1)...(19): siRNA sense strand
agauucacaugcagcuaau

SEQ ID NO: 2072243 - RNA, 19 nt, Homo sapiens
  misc_RNA (1)...(19): siRNA sense strand
gcagagagcuccagacaau

SEQ ID NO: 2072244 - RNA, 19 nt, Homo sapiens
  misc_RNA (1)...(19): siRNA sense strand
gcagagagcuccagacaau

SEQ ID NO: 2072245 - RNA, 19 nt, Homo sapiens
  misc_RNA (1)...(19): siRNA sense strand
gcagagagcuccagacaau

SEQ ID NO: 2072246 - RNA, 19 nt, Homo sapiens
  misc_RNA (1)...(19): siRNA sense strand
gaucaagucagucuaauua

SEQ ID NO: 2072247 - RNA, 19 nt, Homo sapiens
  misc_RNA (1)...(19): siRNA sense strand
gaaagacacucaugagcaa

SEQ ID NO: 2072248 - RNA, 19 nt, Homo sapiens
  misc_RNA (1)...(19): siRNA sense strand
gaaagaagacaaugaagaa

SEQ ID NO: 2072249 - RNA, 19 nt, Homo sapiens
  misc_RNA (1)...(19): siRNA sense strand
gcagacagcuccagacaau

SEQ ID NO: 2072250 - RNA, 19 nt, Homo sapiens
  misc_RNA (1)...(19): siRNA sense strand
gcagacagcuccagacaau

SEQ ID NO: 2072251 - RNA, 19 nt, Homo sapiens
  misc_RNA (1)...(19): siRNA sense strand
gcagacagcuccagacaau

SEQ ID NO: 2072252 - RNA, 19 nt, Homo sapiens
  misc_RNA (1)...(19): siRNA sense strand
gcagacagcuccagacaau

SEQ ID NO: 2072253 - RNA, 19 nt, Homo sapiens
  misc_RNA (1)...(19): siRNA sense strand
gcagacagcuccagacaau

SEQ ID NO: 2072254 - RNA, 19 nt, Homo sapiens
  misc_RNA (1)...(19): siRNA sense strand
gcagacagcuccagacaau

SEQ ID NO: 2072255 - RNA, 19 nt, Homo sapiens
  misc_RNA (1)...(19): siRNA sense strand
caacaugggucuagacaga

SEQ ID NO: 2072256 - RNA, 19 nt, Homo sapiens
  misc_RNA (1)...(19): siRNA sense strand
caaguuggcucaagcauau

SEQ ID NO: 2072257 - RNA, 19 nt, Homo sapiens
  misc_RNA (1)...(19): siRNA sense strand
gaacauggucacuuuagua

SEQ ID NO: 2072258 - RNA, 19 nt, Homo sapiens
  misc_RNA (1)...(19): siRNA sense strand
ggaaaggucucgacguuca

SEQ ID NO: 2072259 - RNA, 19 nt, Homo sapiens
  misc_RNA (1)...(19): siRNA sense strand
ggaaagcucuggacguuca

SEQ ID NO: 2072260 - RNA, 19 nt, Homo sapiens
  misc_RNA (1)...(19): siRNA sense strand
ggaaaggucuggacguuca

SEQ ID NO: 2072261 - RNA, 19 nt, Homo sapiens
  misc_RNA (1)...(19): siRNA sense strand
ggaaagcucuggacguuca

SEQ ID NO: 2072262 - RNA, 19 nt, Homo sapiens
  misc_RNA (1)...(19): siRNA sense strand
ggaaacgucuggacauuca

SEQ ID NO: 2072263 - RNA, 19 nt, Homo sapiens
  misc_RNA (1)...(19): siRNA sense strand
guaaagaucauccaaggua

SEQ ID NO: 2072264 - RNA, 19 nt, Homo sapiens
  misc_RNA (1)...(19): siRNA sense strand
uaaggaacauggucacuuu

SEQ ID NO: 2072265 - RNA, 19 nt, Homo sapiens
  misc_RNA (1)...(19): siRNA sense strand
ggaaacgucuggacauuca

SEQ ID NO: 2072266 - RNA, 19 nt, Homo sapiens
  misc_RNA (1)...(19): siRNA sense strand
gaaaacaucuuugccauaa

SEQ ID NO: 2072267 - RNA, 19 nt, Homo sapiens
  misc_RNA (1)...(19): siRNA sense strand
gggugaaucucaacaagua

SEQ ID NO: 2072268 - RNA, 19 nt, Homo sapiens
  misc_RNA (1)...(19): siRNA sense strand
ggacagcucuagacacuca

SEQ ID NO: 2072269 - RNA, 19 nt, Homo sapiens
  misc_RNA (1)...(19): siRNA sense strand
gaagaaggaguauaugauu

SEQ ID NO: 2072270 - RNA, 19 nt, Homo sapiens
  misc_RNA (1)...(19): siRNA sense strand
caaaguggaucucaacaug

SEQ ID NO: 2072271 - RNA, 19 nt, Homo sapiens
  misc_RNA (1)...(19): siRNA sense strand
ugagagacauggaacuaua

SEQ ID NO: 2072272 - RNA, 19 nt, Homo sapiens
  misc_RNA (1)...(19): siRNA sense strand
ccacuaucaucauggauua

SEQ ID NO: 2072273 - RNA, 19 nt, Homo sapiens
  misc_RNA (1)...(19): siRNA sense strand
caccagggauccaguguua

SEQ ID NO: 2072274 - RNA, 19 nt, Homo sapiens
  misc_RNA (1)...(19): siRNA sense strand
ugaaagacuugaagagaaa

SEQ ID NO: 2072275 - RNA, 19 nt, Homo sapiens
  misc_RNA (1)...(19): siRNA sense strand
ggagauaccacuagacauu

SEQ ID NO: 2072276 - RNA, 19 nt, Homo sapiens
  misc_RNA (1)...(19): siRNA sense strand
gaagauagagccagucaug

SEQ ID NO: 2072277 - RNA, 19 nt, Homo sapiens
  misc_RNA (1)...(19): siRNA sense strand
gcagaccgcuccagacaau

SEQ ID NO: 2072278 - RNA, 19 nt, Homo sapiens
  misc_RNA (1)...(19): siRNA sense strand
cgagacagcuccaggcauu

SEQ ID NO: 2072279 - RNA, 19 nt, Homo sapiens
  misc_RNA (1)...(19): siRNA sense strand
caagagcaaucgguagaua

SEQ ID NO: 2072280 - RNA, 19 nt, Homo sapiens
  misc_RNA (1)...(19): siRNA sense strand
gcaaaggcauggaucaagu

SEQ ID NO: 2072281 - RNA, 19 nt, Homo sapiens
  misc_RNA (1)...(19): siRNA sense strand
gaagacaaggaucccauua

SEQ ID NO: 2072282 - RNA, 19 nt, Homo sapiens
  misc_RNA (1)...(19): siRNA sense strand
agacaaagaucuagucaca

SEQ ID NO: 2072283 - RNA, 19 nt, Homo sapiens
  misc_RNA (1)...(19): siRNA sense strand
gugaaagacuugaagagaa

SEQ ID NO: 2072284 - RNA, 19 nt, Homo sapiens
  misc_RNA (1)...(19): siRNA sense strand
ucauggacauucuauagua

SEQ ID NO: 2072285 - RNA, 19 nt, Homo sapiens
  misc_RNA (1)...(19): siRNA sense strand
agacgaagaucuagccaaa

SEQ ID NO: 2072286 - RNA, 19 nt, Homo sapiens
  misc_RNA (1)...(19): siRNA sense strand
gcagacagcuccagacacu

SEQ ID NO: 2072287 - RNA, 19 nt, Homo sapiens
  misc_RNA (1)...(19): siRNA sense strand
gcagacagcuccagacacu

SEQ ID NO: 2072288 - RNA, 19 nt, Homo sapiens
  misc_RNA (1)...(19): siRNA sense strand
gcagacagcuccagacacu

SEQ ID NO: 2072289 - RNA, 19 nt, Homo sapiens
  misc_RNA (1)...(19): siRNA sense strand
gcagacagcuccagacacu

SEQ ID NO: 2072290 - RNA, 19 nt, Homo sapiens
  misc_RNA (1)...(19): siRNA sense strand
gcagacagcuccagacacu

SEQ ID NO: 2072291 - RNA, 19 nt, Homo sapiens
  misc_RNA (1)...(19): siRNA sense strand
gcagacagcuccagacacu

SEQ ID NO: 2072292 - RNA, 19 nt, Homo sapiens
  misc_RNA (1)...(19): siRNA sense strand
gcagacagcuccacagacu

SEQ ID NO: 2072293 - RNA, 19 nt, Homo sapiens
  misc_RNA (1)...(19): siRNA sense strand
gcagacagcuccagacacu

SEQ ID NO: 2072294 - RNA, 19 nt, Homo sapiens
  misc_RNA (1)...(19): siRNA sense strand
gcagacagcuccagacacu

SEQ ID NO: 2072295 - RNA, 19 nt, Homo sapiens
  misc_RNA (1)...(19): siRNA sense strand
gcagacagcuccagacacu

SEQ ID NO: 2072296 - RNA, 19 nt, Homo sapiens
  misc_RNA (1)...(19): siRNA sense strand
gcagacagcuccagacacu

SEQ ID NO: 2072297 - RNA, 19 nt, Homo sapiens
  misc_RNA (1)...(19): siRNA sense strand
gaagacacaguuuaaauca

SEQ ID NO: 2072298 - RNA, 19 nt, Homo sapiens
  misc_RNA (1)...(19): siRNA sense strand
gaacaggaagacacaguuu

SEQ ID NO: 2072299 - RNA, 19 nt, Homo sapiens
  misc_RNA (1)...(19): siRNA sense strand
caagcuggaucucaacaaa

SEQ ID NO: 2072300 - RNA, 19 nt, Homo sapiens
  misc_RNA (1)...(19): siRNA sense strand
gagaggagauaccacuaga

SEQ ID NO: 2072301 - RNA, 19 nt, Homo sapiens
  misc_RNA (1)...(19): siRNA sense strand
gcacggaaguguuaguuac

SEQ ID NO: 2072302 - RNA, 19 nt, Homo sapiens
  misc_RNA (1)...(19): siRNA sense strand
aaccagggauccaguguua

SEQ ID NO: 2072303 - RNA, 19 nt, Homo sapiens
  misc_RNA (1)...(19): siRNA sense strand
cgacaucucuagacacuca

SEQ ID NO: 2072304 - RNA, 19 nt, Homo sapiens
  misc_RNA (1)...(19): siRNA sense strand
cgacaucucuagacacuca

SEQ ID NO: 2072305 - RNA, 19 nt, Homo sapiens
  misc_RNA (1)...(19): siRNA sense strand
aaccagggauccaguguua

SEQ ID NO: 2072306 - RNA, 19 nt, Homo sapiens
  misc_RNA (1)...(19): siRNA sense strand
cgacaucucuagacacuca

SEQ ID NO: 2072307 - RNA, 19 nt, Homo sapiens
  misc_RNA (1)...(19): siRNA sense strand
aaccagggauccaguguua

SEQ ID NO: 2072308 - RNA, 19 nt, Homo sapiens
  misc_RNA (1)...(19): siRNA sense strand
gcaugaaucuaguucugaa

SEQ ID NO: 2072309 - RNA, 19 nt, Homo sapiens
  misc_RNA (1)...(19): siRNA sense strand
ggagauaccacuagacaug

SEQ ID NO: 2072310 - RNA, 19 nt, Homo sapiens
  misc_RNA (1)...(19): siRNA sense strand
ggagauaccacuagacaug

SEQ ID NO: 2072311 - RNA, 19 nt, Homo sapiens
  misc_RNA (1)...(19): siRNA sense strand
ggagauaccacuagacaug

SEQ ID NO: 2072312 - RNA, 19 nt, Homo sapiens
  misc_RNA (1)...(19): siRNA sense strand
ggagauaccacuagacaug

SEQ ID NO: 2072313 - RNA, 19 nt, Homo sapiens
  misc_RNA (1)...(19): siRNA sense strand
gcagauaccacuagacaug

SEQ ID NO: 2072314 - RNA, 19 nt, Homo sapiens
  misc_RNA (1)...(19): siRNA sense strand
ggagauaccacuagacaug

SEQ ID NO: 2072315 - RNA, 19 nt, Homo sapiens
  misc_RNA (1)...(19): siRNA sense strand
ggagauaccacuagacaug

SEQ ID NO: 2072316 - RNA, 19 nt, Homo sapiens
  misc_RNA (1)...(19): siRNA sense strand
ggagauaccacuagacaug

SEQ ID NO: 2072317 - RNA, 19 nt, Homo sapiens
  misc_RNA (1)...(19): siRNA sense strand
gaagaucuagccaaaguga

SEQ ID NO: 2072318 - RNA, 19 nt, Homo sapiens
  misc_RNA (1)...(19): siRNA sense strand
cgccagggauccaguguua

SEQ ID NO: 2072319 - RNA, 19 nt, Homo sapiens
  misc_RNA (1)...(19): siRNA sense strand
gcaagcagaacaacacgua

SEQ ID NO: 2072320 - RNA, 19 nt, Homo sapiens
  misc_RNA (1)...(19): siRNA sense strand
gcaagcagaacaacacgua

SEQ ID NO: 2072321 - RNA, 19 nt, Homo sapiens
  misc_RNA (1)...(19): siRNA sense strand
cgccagggauccaguguua

SEQ ID NO: 2072322 - RNA, 19 nt, Homo sapiens
  misc_RNA (1)...(19): siRNA sense strand
cgccagggauccaguguua

SEQ ID NO: 2072323 - RNA, 19 nt, Homo sapiens
  misc_RNA (1)...(19): siRNA sense strand
gcaagcagaacaacacgua

SEQ ID NO: 2072324 - RNA, 19 nt, Homo sapiens
  misc_RNA (1)...(19): siRNA sense strand
gcagacagcuccagaaaau

SEQ ID NO: 2072325 - RNA, 19 nt, Homo sapiens
  misc_RNA (1)...(19): siRNA sense strand
gaacaggucaagacaugaa

SEQ ID NO: 2072326 - RNA, 19 nt, Homo sapiens
  misc_RNA (1)...(19): siRNA sense strand
gaaaauacaggaagaauga

SEQ ID NO: 2072327 - RNA, 19 nt, Homo sapiens
  misc_RNA (1)...(19): siRNA sense strand
gaaguuagaguucaauaca

SEQ ID NO: 2072328 - RNA, 19 nt, Homo sapiens
  misc_RNA (1)...(19): siRNA sense strand
gacaauaaauaccacuaga

SEQ ID NO: 2072329 - RNA, 19 nt, Homo sapiens
  misc_RNA (1)...(19): siRNA sense strand
gcaggaaggucuggacguu

SEQ ID NO: 2072330 - RNA, 19 nt, Homo sapiens
  misc_RNA (1)...(19): siRNA sense strand
gcaagcagacaaacucgua

SEQ ID NO: 2072331 - RNA, 19 nt, Homo sapiens
  misc_RNA (1)...(19): siRNA sense strand
gcaggaaggucuggacguu

SEQ ID NO: 2072332 - RNA, 19 nt, Homo sapiens
  misc_RNA (1)...(19): siRNA sense strand
agacaaggaucccauuaug

SEQ ID NO: 2072333 - RNA, 19 nt, Homo sapiens
  misc_RNA (1)...(19): siRNA sense strand
gcaagcagacaaacucgua

SEQ ID NO: 2072334 - RNA, 19 nt, Homo sapiens
  misc_RNA (1)...(19): siRNA sense strand
gcuauggaccugcagaaua

SEQ ID NO: 2072335 - RNA, 19 nt, Homo sapiens
  misc_RNA (1)...(19): siRNA sense strand
caugacagacacagaauua

SEQ ID NO: 2072336 - RNA, 19 nt, Homo sapiens
  misc_RNA (1)...(19): siRNA sense strand
ggacaauccucuggcuuug

SEQ ID NO: 2072337 - RNA, 19 nt, Homo sapiens
  misc_RNA (1)...(19): siRNA sense strand
cgacagcucuagacacuca

SEQ ID NO: 2072338 - RNA, 19 nt, Homo sapiens
  misc_RNA (1)...(19): siRNA sense strand
acacauagccagucaaaug

SEQ ID NO: 2072339 - RNA, 19 nt, Homo sapiens
  misc_RNA (1)...(19): siRNA sense strand
ggacaauccucuggcuuug

SEQ ID NO: 2072340 - RNA, 19 nt, Homo sapiens
  misc_RNA (1)...(19): siRNA sense strand
ggaaagaagaaacaauaga

SEQ ID NO: 2072341 - RNA, 19 nt, Homo sapiens
  misc_RNA (1)...(19): siRNA sense strand
cgaaacaacugggauuuag

SEQ ID NO: 2072342 - RNA, 19 nt, Homo sapiens
  misc_RNA (1)...(19): siRNA sense strand
uaauaaggacccagguuua

SEQ ID NO: 2072343 - RNA, 19 nt, Homo sapiens
  misc_RNA (1)...(19): siRNA sense strand
ggaaauugcugcaguuauu

SEQ ID NO: 2072344 - RNA, 19 nt, Homo sapiens
  misc_RNA (1)...(19): siRNA sense strand
ccaaccagcuuguagauuu

SEQ ID NO: 2072345 - RNA, 19 nt, Homo sapiens
  misc_RNA (1)...(19): siRNA sense strand
caaggaaauugcugcaguu

SEQ ID NO: 2072346 - RNA, 19 nt, Homo sapiens
  misc_RNA (1)...(19): siRNA sense strand
gaaaugacgauuccacagu

SEQ ID NO: 2072347 - RNA, 19 nt, Homo sapiens
  misc_RNA (1)...(19): siRNA sense strand
gcugugagcucagacacuu

SEQ ID NO: 2072348 - RNA, 19 nt, Homo sapiens
  misc_RNA (1)...(19): siRNA sense strand
gaccaagugcuuugaaaug

SEQ ID NO: 2072349 - RNA, 19 nt, Homo sapiens
  misc_RNA (1)...(19): siRNA sense strand
aaaugacgauuccacaguu

SEQ ID NO: 2072350 - RNA, 19 nt, Homo sapiens
  misc_RNA (1)...(19): siRNA sense strand
gaaauugcugcaguuauug

SEQ ID NO: 2072351 - RNA, 19 nt, Homo sapiens
  misc_RNA (1)...(19): siRNA sense strand
acagacaguucaaggaaau

SEQ ID NO: 2072352 - RNA, 19 nt, Homo sapiens
  misc_RNA (1)...(19): siRNA sense strand
cuacagacaguucaaggaa

SEQ ID NO: 2072353 - RNA, 19 nt, Homo sapiens
  misc_RNA (1)...(19): siRNA sense strand
gaugcuaaguccgauguca

SEQ ID NO: 2072354 - RNA, 19 nt, Homo sapiens
  misc_RNA (1)...(19): siRNA sense strand
accaagugcuuugaaauga

SEQ ID NO: 2072355 - RNA, 19 nt, Homo sapiens
  misc_RNA (1)...(19): siRNA sense strand
aagaccaagugcuuugaaa

SEQ ID NO: 2072356 - RNA, 19 nt, Homo sapiens
  misc_RNA (1)...(19): siRNA sense strand
uacagacaguucaaggaaa

SEQ ID NO: 2072357 - RNA, 19 nt, Homo sapiens
  misc_RNA (1)...(19): siRNA sense strand
caaccagcuuguagauuuu

SEQ ID NO: 2072358 - RNA, 19 nt, Homo sapiens
  misc_RNA (1)...(19): siRNA sense strand
aaugacgauuccacaguuu

SEQ ID NO: 2072359 - RNA, 19 nt, Homo sapiens
  misc_RNA (1)...(19): siRNA sense strand
cuucuaauuucuacagaca

SEQ ID NO: 2072360 - RNA, 19 nt, Homo sapiens
  misc_RNA (1)...(19): siRNA sense strand
ucuaauuucuacagacagu

SEQ ID NO: 2072361 - RNA, 19 nt, Homo sapiens
  misc_RNA (1)...(19): siRNA sense strand
guauggcugugagcucaga

SEQ ID NO: 2072362 - RNA, 19 nt, Homo sapiens
  misc_RNA (1)...(19): siRNA sense strand
gcaaccuccagucuccuuu

SEQ ID NO: 2072363 - RNA, 19 nt, Homo sapiens
  misc_RNA (1)...(19): siRNA sense strand
ccaagugcuuugaaaugac

SEQ ID NO: 2072364 - RNA, 19 nt, Homo sapiens
  misc_RNA (1)...(19): siRNA sense strand
ucaccaaccagcuuguaga

SEQ ID NO: 2072365 - RNA, 19 nt, Homo sapiens
  misc_RNA (1)...(19): siRNA sense strand
ccuuucugcuucuaauuuc

SEQ ID NO: 2072366 - RNA, 19 nt, Homo sapiens
  misc_RNA (1)...(19): siRNA sense strand
aaggaaauugcugcaguua

SEQ ID NO: 2072367 - RNA, 19 nt, Homo sapiens
  misc_RNA (1)...(19): siRNA sense strand
aaguaaagaccaagugcuu

SEQ ID NO: 2072368 - RNA, 19 nt, Homo sapiens
  misc_RNA (1)...(19): siRNA sense strand
gcuuugaaaugacgauucc

SEQ ID NO: 2072369 - RNA, 19 nt, Homo sapiens
  misc_RNA (1)...(19): siRNA sense strand
ugacgauuccacaguuuca

SEQ ID NO: 2072370 - RNA, 19 nt, Homo sapiens
  misc_RNA (1)...(19): siRNA sense strand
aaauugcugcaguuauuga

SEQ ID NO: 2072371 - RNA, 19 nt, Homo sapiens
  misc_RNA (1)...(19): siRNA sense strand
gcacaucgcauuccuguuu

SEQ ID NO: 2072372 - RNA, 19 nt, Homo sapiens
  misc_RNA (1)...(19): siRNA sense strand
gauguugaaugaugcuuua

SEQ ID NO: 2072373 - RNA, 19 nt, Homo sapiens
  misc_RNA (1)...(19): siRNA sense strand
cagcagaguucuaaacaaa

SEQ ID NO: 2072374 - RNA, 19 nt, Homo sapiens
  misc_RNA (1)...(19): siRNA sense strand
caaauguccuugagauuga

SEQ ID NO: 2072375 - RNA, 19 nt, Homo sapiens
  misc_RNA (1)...(19): siRNA sense strand
ccagauauauuucagaguu

SEQ ID NO: 2072376 - RNA, 19 nt, Homo sapiens
  misc_RNA (1)...(19): siRNA sense strand
uaagaaugcuguuucaaug

SEQ ID NO: 2072377 - RNA, 19 nt, Homo sapiens
  misc_RNA (1)...(19): siRNA sense strand
caaaugugcucacgauguu

SEQ ID NO: 2072378 - RNA, 19 nt, Homo sapiens
  misc_RNA (1)...(19): siRNA sense strand
gaacagaguggacuuacaa

SEQ ID NO: 2072379 - RNA, 19 nt, Homo sapiens
  misc_RNA (1)...(19): siRNA sense strand
uggcagagcuugcaaaugu

SEQ ID NO: 2072380 - RNA, 19 nt, Homo sapiens
  misc_RNA (1)...(19): siRNA sense strand
uaagaagggacaaguaaua

SEQ ID NO: 2072381 - RNA, 19 nt, Homo sapiens
  misc_RNA (1)...(19): siRNA sense strand
acaaggagcucgugucaau

SEQ ID NO: 2072382 - RNA, 19 nt, Homo sapiens
  misc_RNA (1)...(19): siRNA sense strand
caacugacacugauacaaa

SEQ ID NO: 2072383 - RNA, 19 nt, Homo sapiens
  misc_RNA (1)...(19): siRNA sense strand
guaagaagccugagucugu

SEQ ID NO: 2072384 - RNA, 19 nt, Homo sapiens
  misc_RNA (1)...(19): siRNA sense strand
gcaaauguccuugagauug

SEQ ID NO: 2072385 - RNA, 19 nt, Homo sapiens
  misc_RNA (1)...(19): siRNA sense strand
uacgaucgauugcuaauaa

SEQ ID NO: 2072386 - RNA, 19 nt, Homo sapiens
  misc_RNA (1)...(19): siRNA sense strand
ucagagcacuggugaaaga

SEQ ID NO: 2072387 - RNA, 19 nt, Homo sapiens
  misc_RNA (1)...(19): siRNA sense strand
gaagggacaaguaauaaau

SEQ ID NO: 2072388 - RNA, 19 nt, Homo sapiens
  misc_RNA (1)...(19): siRNA sense strand
gagaagcacagagauauuu

SEQ ID NO: 2072389 - RNA, 19 nt, Homo sapiens
  misc_RNA (1)...(19): siRNA sense strand
agaaugcuguuucaaugua

SEQ ID NO: 2072390 - RNA, 19 nt, Homo sapiens
  misc_RNA (1)...(19): siRNA sense strand
gaaaagagagccuucaaaa

SEQ ID NO: 2072391 - RNA, 19 nt, Homo sapiens
  misc_RNA (1)...(19): siRNA sense strand
gaaugaugcuuuaacacau

SEQ ID NO: 2072392 - RNA, 19 nt, Homo sapiens
  misc_RNA (1)...(19): siRNA sense strand
gagcugugcuuuggaauuc

SEQ ID NO: 2072393 - RNA, 19 nt, Homo sapiens
  misc_RNA (1)...(19): siRNA sense strand
gaguuacgaucgauugcua

SEQ ID NO: 2072394 - RNA, 19 nt, Homo sapiens
  misc_RNA (1)...(19): siRNA sense strand
ugacauggguguuccacuu

SEQ ID NO: 2072395 - RNA, 19 nt, Homo sapiens
  misc_RNA (1)...(19): siRNA sense strand
cauaagaagggacaaguaa

SEQ ID NO: 2072396 - RNA, 19 nt, Homo sapiens
  misc_RNA (1)...(19): siRNA sense strand
gagcacuggugaaagagaa

SEQ ID NO: 2072397 - RNA, 19 nt, Homo sapiens
  misc_RNA (1)...(19): siRNA sense strand
uaggaggccuguacaagaa

SEQ ID NO: 2072398 - RNA, 19 nt, Homo sapiens
  misc_RNA (1)...(19): siRNA sense strand
gaaaguaggaggccuguac

SEQ ID NO: 2072399 - RNA, 19 nt, Homo sapiens
  misc_RNA (1)...(19): siRNA sense strand
gcagcagaguucuaaacaa

SEQ ID NO: 2072400 - RNA, 19 nt, Homo sapiens
  misc_RNA (1)...(19): siRNA sense strand
caacuucauucaucaugga

SEQ ID NO: 2072401 - RNA, 19 nt, Homo sapiens
  misc_RNA (1)...(19): siRNA sense strand
aaagagaagcacagagaua

SEQ ID NO: 2072402 - RNA, 19 nt, Homo sapiens
  misc_RNA (1)...(19): siRNA sense strand
ucauaucacuggacaagga

SEQ ID NO: 2072403 - RNA, 19 nt, Homo sapiens
  misc_RNA (1)...(19): siRNA sense strand
ucaccuuccucacuuauug

SEQ ID NO: 2072404 - RNA, 19 nt, Homo sapiens
  misc_RNA (1)...(19): siRNA sense strand
uaacuuuguucacucauuc

SEQ ID NO: 2072405 - RNA, 19 nt, Homo sapiens
  misc_RNA (1)...(19): siRNA sense strand
ucauaaagcauugcagaua

SEQ ID NO: 2072406 - RNA, 19 nt, Homo sapiens
  misc_RNA (1)...(19): siRNA sense strand
acacauggccuuugcagaa

SEQ ID NO: 2072407 - RNA, 19 nt, Homo sapiens
  misc_RNA (1)...(19): siRNA sense strand
gauuaaagaguaccuuaga

SEQ ID NO: 2072408 - RNA, 19 nt, Homo sapiens
  misc_RNA (1)...(19): siRNA sense strand
ggaacagaguggacuuaca

SEQ ID NO: 2072409 - RNA, 19 nt, Homo sapiens
  misc_RNA (1)...(19): siRNA sense strand
gaucucuuaugcugugaaa

SEQ ID NO: 2072410 - RNA, 19 nt, Homo sapiens
  misc_RNA (1)...(19): siRNA sense strand
ugaaagagaagcacagaga

SEQ ID NO: 2072411 - RNA, 19 nt, Homo sapiens
  misc_RNA (1)...(19): siRNA sense strand
gaaugcuguuucaauguau

SEQ ID NO: 2072412 - RNA, 19 nt, Homo sapiens
  misc_RNA (1)...(19): siRNA sense strand
agucagcucugucugguuu

SEQ ID NO: 2072413 - RNA, 19 nt, Homo sapiens
  misc_RNA (1)...(19): siRNA sense strand
guaggaggccuguacaaga

SEQ ID NO: 2072414 - RNA, 19 nt, Homo sapiens
  misc_RNA (1)...(19): siRNA sense strand
uagaugagcacacaaaugu

SEQ ID NO: 2072415 - RNA, 19 nt, Homo sapiens
  misc_RNA (1)...(19): siRNA sense strand
cauaaagcauugcagauac

SEQ ID NO: 2072416 - RNA, 19 nt, Homo sapiens
  misc_RNA (1)...(19): siRNA sense strand
cuuacugccuucuuaauga

SEQ ID NO: 2072417 - RNA, 19 nt, Homo sapiens
  misc_RNA (1)...(19): siRNA sense strand
ggauaugucaccauguuga

SEQ ID NO: 2072418 - RNA, 19 nt, Homo sapiens
  misc_RNA (1)...(19): siRNA sense strand
gguuaagaaugcuguuuca

SEQ ID NO: 2072419 - RNA, 19 nt, Homo sapiens
  misc_RNA (1)...(19): siRNA sense strand
cuguuugacuccacucuua

SEQ ID NO: 2072420 - RNA, 19 nt, Homo sapiens
  misc_RNA (1)...(19): siRNA sense strand
cagauuaaagaguaccuua

SEQ ID NO: 2072421 - RNA, 19 nt, Homo sapiens
  misc_RNA (1)...(19): siRNA sense strand
guugaaugaugcuuuaaca

SEQ ID NO: 2072422 - RNA, 19 nt, Homo sapiens
  misc_RNA (1)...(19): siRNA sense strand
ccucaaaugugcucacgau

SEQ ID NO: 2072423 - RNA, 19 nt, Homo sapiens
  misc_RNA (1)...(19): siRNA sense strand
gaccagcuaucccagaagu

SEQ ID NO: 2072424 - RNA, 19 nt, Homo sapiens
  misc_RNA (1)...(19): siRNA sense strand
acacgaagcacaucgcauu

SEQ ID NO: 2072425 - RNA, 19 nt, Homo sapiens
  misc_RNA (1)...(19): siRNA sense strand
cauuggauauucacacaga

SEQ ID NO: 2072426 - RNA, 19 nt, Homo sapiens
  misc_RNA (1)...(19): siRNA sense strand
ccucuuacauuccaguaga

SEQ ID NO: 2072427 - RNA, 19 nt, Homo sapiens
  misc_RNA (1)...(19): siRNA sense strand
cgaauuaaaccggaaaguu

SEQ ID NO: 2072428 - RNA, 19 nt, Homo sapiens
  misc_RNA (1)...(19): siRNA sense strand
ggaguacagagucauuuga

SEQ ID NO: 2072429 - RNA, 19 nt, Homo sapiens
  misc_RNA (1)...(19): siRNA sense strand
ugaaacagaacuacaagga

SEQ ID NO: 2072430 - RNA, 19 nt, Homo sapiens
  misc_RNA (1)...(19): siRNA sense strand
gaaagagaagcacagagau

SEQ ID NO: 2072431 - RNA, 19 nt, Homo sapiens
  misc_RNA (1)...(19): siRNA sense strand
uaccuuagauccauagaag

SEQ ID NO: 2072432 - RNA, 19 nt, Homo sapiens
  misc_RNA (1)...(19): siRNA sense strand
agaguggacuuacaacauc

SEQ ID NO: 2072433 - RNA, 19 nt, Homo sapiens
  misc_RNA (1)...(19): siRNA sense strand
cuuccucacuuauugcuaa

SEQ ID NO: 2072434 - RNA, 19 nt, Homo sapiens
  misc_RNA (1)...(19): siRNA sense strand
guaaaugggaguacagagu

SEQ ID NO: 2072435 - RNA, 19 nt, Homo sapiens
  misc_RNA (1)...(19): siRNA sense strand
ugaaugaugcuuuaacaca

SEQ ID NO: 2072436 - RNA, 19 nt, Homo sapiens
  misc_RNA (1)...(19): siRNA sense strand
gaaaacugccagauauauu

SEQ ID NO: 2072437 - RNA, 19 nt, Homo sapiens
  misc_RNA (1)...(19): siRNA sense strand
guagaugagcacacaaaug

SEQ ID NO: 2072438 - RNA, 19 nt, Homo sapiens
  misc_RNA (1)...(19): siRNA sense strand
cacauggccuuugcagaaa

SEQ ID NO: 2072439 - RNA, 19 nt, Homo sapiens
  misc_RNA (1)...(19): siRNA sense strand
ccauaagaagggacaagua

SEQ ID NO: 2072440 - RNA, 19 nt, Homo sapiens
  misc_RNA (1)...(19): siRNA sense strand
gcuaaucuccauuugcaau

SEQ ID NO: 2072441 - RNA, 19 nt, Homo sapiens
  misc_RNA (1)...(19): siRNA sense strand
gaguacagagucauuugaa

SEQ ID NO: 2072442 - RNA, 19 nt, Homo sapiens
  misc_RNA (1)...(19): siRNA sense strand
ucaaaugugcucacgaugu

SEQ ID NO: 2072443 - RNA, 19 nt, Homo sapiens
  misc_RNA (1)...(19): siRNA sense strand
uuuaacacauucugcaguu

SEQ ID NO: 2072444 - RNA, 19 nt, Homo sapiens
  misc_RNA (1)...(19): siRNA sense strand
caugucccauuuccauuug

SEQ ID NO: 2072445 - RNA, 19 nt, Homo sapiens
  misc_RNA (1)...(19): siRNA sense strand
ccaugucccauuuccauuu

SEQ ID NO: 2072446 - RNA, 19 nt, Homo sapiens
  misc_RNA (1)...(19): siRNA sense strand
agccagaccaacccaauua

SEQ ID NO: 2072447 - RNA, 19 nt, Homo sapiens
  misc_RNA (1)...(19): siRNA sense strand
gauaugucaccauguugaa

SEQ ID NO: 2072448 - RNA, 19 nt, Homo sapiens
  misc_RNA (1)...(19): siRNA sense strand
aagaagggacaaguaauaa

SEQ ID NO: 2072449 - RNA, 19 nt, Homo sapiens
  misc_RNA (1)...(19): siRNA sense strand
acacacugcuuguuuccau

SEQ ID NO: 2072450 - RNA, 19 nt, Homo sapiens
  misc_RNA (1)...(19): siRNA sense strand
cacucuuacugccuucuua

SEQ ID NO: 2072451 - RNA, 19 nt, Homo sapiens
  misc_RNA (1)...(19): siRNA sense strand
uugcaaauguccuugagau

SEQ ID NO: 2072452 - RNA, 19 nt, Homo sapiens
  misc_RNA (1)...(19): siRNA sense strand
cggaguggauggucaccuu

SEQ ID NO: 2072453 - RNA, 19 nt, Homo sapiens
  misc_RNA (1)...(19): siRNA sense strand
cauugcagauacuaaggaa

SEQ ID NO: 2072454 - RNA, 19 nt, Homo sapiens
  misc_RNA (1)...(19): siRNA sense strand
aaugaaauccggccuguca

SEQ ID NO: 2072455 - RNA, 19 nt, Homo sapiens
  misc_RNA (1)...(19): siRNA sense strand
gcaacugacacugauacaa

SEQ ID NO: 2072456 - RNA, 19 nt, Homo sapiens
  misc_RNA (1)...(19): siRNA sense strand
cuucaacauuggauauuca

SEQ ID NO: 2072457 - RNA, 19 nt, Homo sapiens
  misc_RNA (1)...(19): siRNA sense strand
gcuucaacauuggauauuc

SEQ ID NO: 2072458 - RNA, 19 nt, Homo sapiens
  misc_RNA (1)...(19): siRNA sense strand
ccacaacagaagcagauug

SEQ ID NO: 2072459 - RNA, 19 nt, Homo sapiens
  misc_RNA (1)...(19): siRNA sense strand
agaguaccuuagauccaua

SEQ ID NO: 2072460 - RNA, 19 nt, Homo sapiens
  misc_RNA (1)...(19): siRNA sense strand
ugaugaaacagaacuacaa

SEQ ID NO: 2072461 - RNA, 19 nt, Homo sapiens
  misc_RNA (1)...(19): siRNA sense strand
ggaccaccaucccuuuuau

SEQ ID NO: 2072462 - RNA, 19 nt, Homo sapiens
  misc_RNA (1)...(19): siRNA sense strand
ucagcucugucugguuuaa

SEQ ID NO: 2072463 - RNA, 19 nt, Homo sapiens
  misc_RNA (1)...(19): siRNA sense strand
cauaacaaagaucuaguug

SEQ ID NO: 2072464 - RNA, 19 nt, Homo sapiens
  misc_RNA (1)...(19): siRNA sense strand
gcgcuuacucugagaaaca

SEQ ID NO: 2072465 - RNA, 19 nt, Homo sapiens
  misc_RNA (1)...(19): siRNA sense strand
acacugauacaaauaguca

SEQ ID NO: 2072466 - RNA, 19 nt, Homo sapiens
  misc_RNA (1)...(19): siRNA sense strand
cuaaucuccauuugcaaua

SEQ ID NO: 2072467 - RNA, 19 nt, Homo sapiens
  misc_RNA (1)...(19): siRNA sense strand
uugcuaaucuccauuugca

SEQ ID NO: 2072468 - RNA, 19 nt, Homo sapiens
  misc_RNA (1)...(19): siRNA sense strand
gggaguacagagucauuug

SEQ ID NO: 2072469 - RNA, 19 nt, Homo sapiens
  misc_RNA (1)...(19): siRNA sense strand
aggagaaacuguccauguc

SEQ ID NO: 2072470 - RNA, 19 nt, Homo sapiens
  misc_RNA (1)...(19): siRNA sense strand
cagcauauuggaccagcua

SEQ ID NO: 2072471 - RNA, 19 nt, Homo sapiens
  misc_RNA (1)...(19): siRNA sense strand
gcagaaacaucucaaagaa

SEQ ID NO: 2072472 - RNA, 19 nt, Homo sapiens
  misc_RNA (1)...(19): siRNA sense strand
aaacaugucugaaaguaug

SEQ ID NO: 2072473 - RNA, 19 nt, Homo sapiens
  misc_RNA (1)...(19): siRNA sense strand
ucaaauggauccuuauugu

SEQ ID NO: 2072474 - RNA, 19 nt, Homo sapiens
  misc_RNA (1)...(19): siRNA sense strand
ggaagaguguccaccaaga

SEQ ID NO: 2072475 - RNA, 19 nt, Homo sapiens
  misc_RNA (1)...(19): siRNA sense strand
cuaccucucuuccuacaua

SEQ ID NO: 2072476 - RNA, 19 nt, Homo sapiens
  misc_RNA (1)...(19): siRNA sense strand
guacuuggccugcuccuuu

SEQ ID NO: 2072477 - RNA, 19 nt, Homo sapiens
  misc_RNA (1)...(19): siRNA sense strand
caccagcacuugaaacuga

SEQ ID NO: 2072478 - RNA, 19 nt, Homo sapiens
  misc_RNA (1)...(19): siRNA sense strand
agaaacaugucugaaagua

SEQ ID NO: 2072479 - RNA, 19 nt, Homo sapiens
  misc_RNA (1)...(19): siRNA sense strand
ggcuaaagcugcugcaaug

SEQ ID NO: 2072480 - RNA, 19 nt, Homo sapiens
  misc_RNA (1)...(19): siRNA sense strand
gaacaagguauuucuucuu

SEQ ID NO: 2072481 - RNA, 19 nt, Homo sapiens
  misc_RNA (1)...(19): siRNA sense strand
gcuaccaggugcuucuuaa

SEQ ID NO: 2072482 - RNA, 19 nt, Homo sapiens
  misc_RNA (1)...(19): siRNA sense strand
caagagaugacuucaguga

SEQ ID NO: 2072483 - RNA, 19 nt, Homo sapiens
  misc_RNA (1)...(19): siRNA sense strand
gcucauagaacaagguauu

SEQ ID NO: 2072484 - RNA, 19 nt, Homo sapiens
  misc_RNA (1)...(19): siRNA sense strand
agagaugacuucagugaug

SEQ ID NO: 2072485 - RNA, 19 nt, Homo sapiens
  misc_RNA (1)...(19): siRNA sense strand
gaggauaacucagaaucau

SEQ ID NO: 2072486 - RNA, 19 nt, Homo sapiens
  misc_RNA (1)...(19): siRNA sense strand
ugaagaggauaacucagaa

SEQ ID NO: 2072487 - RNA, 19 nt, Homo sapiens
  misc_RNA (1)...(19): siRNA sense strand
ggauuuggccuuuccuuga

SEQ ID NO: 2072488 - RNA, 19 nt, Homo sapiens
  misc_RNA (1)...(19): siRNA sense strand
guaccuacaacuucagaua

SEQ ID NO: 2072489 - RNA, 19 nt, Homo sapiens
  misc_RNA (1)...(19): siRNA sense strand
gaggaagaguguccaccaa

SEQ ID NO: 2072490 - RNA, 19 nt, Homo sapiens
  misc_RNA (1)...(19): siRNA sense strand
ucaaagaauucaggaggaa

SEQ ID NO: 2072491 - RNA, 19 nt, Homo sapiens
  misc_RNA (1)...(19): siRNA sense strand
guggauauuucuuguacuu

SEQ ID NO: 2072492 - RNA, 19 nt, Homo sapiens
  misc_RNA (1)...(19): siRNA sense strand
gaaacaugucugaaaguau

SEQ ID NO: 2072493 - RNA, 19 nt, Homo sapiens
  misc_RNA (1)...(19): siRNA sense strand
guugcuaccucucuuccua

SEQ ID NO: 2072494 - RNA, 19 nt, Homo sapiens
  misc_RNA (1)...(19): siRNA sense strand
gauuuggccuuuccuugau

SEQ ID NO: 2072495 - RNA, 19 nt, Homo sapiens
  misc_RNA (1)...(19): siRNA sense strand
ggugcuaucugcggauuug

SEQ ID NO: 2072496 - RNA, 19 nt, Homo sapiens
  misc_RNA (1)...(19): siRNA sense strand
gagcugagcacggagaaga

SEQ ID NO: 2072497 - RNA, 19 nt, Homo sapiens
  misc_RNA (1)...(19): siRNA sense strand
aaauggauccuuauuguca

SEQ ID NO: 2072498 - RNA, 19 nt, Homo sapiens
  misc_RNA (1)...(19): siRNA sense strand
gauccuuauugucagguuu

SEQ ID NO: 2072499 - RNA, 19 nt, Homo sapiens
  misc_RNA (1)...(19): siRNA sense strand
ccaggugcuucuuaaugaa

SEQ ID NO: 2072500 - RNA, 19 nt, Homo sapiens
  misc_RNA (1)...(19): siRNA sense strand
gcuggaagguauggugcua

SEQ ID NO: 2072501 - RNA, 19 nt, Homo sapiens
  misc_RNA (1)...(19): siRNA sense strand
ggacaguauuggcuuuggu

SEQ ID NO: 2072502 - RNA, 19 nt, Homo sapiens
  misc_RNA (1)...(19): siRNA sense strand
ggccuuuccuugaucaaau

SEQ ID NO: 2072503 - RNA, 19 nt, Homo sapiens
  misc_RNA (1)...(19): siRNA sense strand
gagcagccaccuacuucaa

SEQ ID NO: 2072504 - RNA, 19 nt, Homo sapiens
  misc_RNA (1)...(19): siRNA sense strand
accaggugcuucuuaauga

SEQ ID NO: 2072505 - RNA, 19 nt, Homo sapiens
  misc_RNA (1)...(19): siRNA sense strand
gaagguauggugcuaucug

SEQ ID NO: 2072506 - RNA, 19 nt, Homo sapiens
  misc_RNA (1)...(19): siRNA sense strand
uaaugaagaggauaacuca

SEQ ID NO: 2072507 - RNA, 19 nt, Homo sapiens
  misc_RNA (1)...(19): siRNA sense strand
cacaggaagugaagagcuu

SEQ ID NO: 2072508 - RNA, 19 nt, Homo sapiens
  misc_RNA (1)...(19): siRNA sense strand
ccuccaccauauaguagua

SEQ ID NO: 2072509 - RNA, 19 nt, Homo sapiens
  misc_RNA (1)...(19): siRNA sense strand
ccaccauauaguaguauua

SEQ ID NO: 2072510 - RNA, 19 nt, Homo sapiens
  misc_RNA (1)...(19): siRNA sense strand
gcagcagaaacaucucaaa

SEQ ID NO: 2072511 - RNA, 19 nt, Homo sapiens
  misc_RNA (1)...(19): siRNA sense strand
accaagagaugacuucagu

SEQ ID NO: 2072512 - RNA, 19 nt, Homo sapiens
  misc_RNA (1)...(19): siRNA sense strand
gaagaguguccaccaagag

SEQ ID NO: 2072513 - RNA, 19 nt, Homo sapiens
  misc_RNA (1)...(19): siRNA sense strand
gcagccaccuacuucaaac

SEQ ID NO: 2072514 - RNA, 19 nt, Homo sapiens
  misc_RNA (1)...(19): siRNA sense strand
gaagaggauaacucagaau

SEQ ID NO: 2072515 - RNA, 19 nt, Homo sapiens
  misc_RNA (1)...(19): siRNA sense strand
gaaacaucucaaagaauuc

SEQ ID NO: 2072516 - RNA, 19 nt, Homo sapiens
  misc_RNA (1)...(19): siRNA sense strand
guauuggcuuugguggaua

SEQ ID NO: 2072517 - RNA, 19 nt, Homo sapiens
  misc_RNA (1)...(19): siRNA sense strand
agaaguuuacggugaguuu

SEQ ID NO: 2072518 - RNA, 19 nt, Homo sapiens
  misc_RNA (1)...(19): siRNA sense strand
cagaaacaucucaaagaau

SEQ ID NO: 2072519 - RNA, 19 nt, Homo sapiens
  misc_RNA (1)...(19): siRNA sense strand
uggcuuugguggauauuuc

SEQ ID NO: 2072520 - RNA, 19 nt, Homo sapiens
  misc_RNA (1)...(19): siRNA sense strand
ggcagcugcucauagaaca

SEQ ID NO: 2072521 - RNA, 19 nt, Homo sapiens
  misc_RNA (1)...(19): siRNA sense strand
cuucagaggauuuguuaau

SEQ ID NO: 2072522 - RNA, 19 nt, Homo sapiens
  misc_RNA (1)...(19): siRNA sense strand
cagaaucaucggcuauaga

SEQ ID NO: 2072523 - RNA, 19 nt, Homo sapiens
  misc_RNA (1)...(19): siRNA sense strand
ucagaaucaucggcuauag

SEQ ID NO: 2072524 - RNA, 19 nt, Homo sapiens
  misc_RNA (1)...(19): siRNA sense strand
aaagaauucaggaggaaga

SEQ ID NO: 2072525 - RNA, 19 nt, Homo sapiens
  misc_RNA (1)...(19): siRNA sense strand
cagcagaaacaucucaaag

SEQ ID NO: 2072526 - RNA, 19 nt, Homo sapiens
  misc_RNA (1)...(19): siRNA sense strand
aauggacaguauuggcuuu

SEQ ID NO: 2072527 - RNA, 19 nt, Homo sapiens
  misc_RNA (1)...(19): siRNA sense strand
caaauggauccuuauuguc

SEQ ID NO: 2072528 - RNA, 19 nt, Homo sapiens
  misc_RNA (1)...(19): siRNA sense strand
uaccaggugcuucuuaaug

SEQ ID NO: 2072529 - RNA, 19 nt, Homo sapiens
  misc_RNA (1)...(19): siRNA sense strand
gauauuucaauggacagua

SEQ ID NO: 2072530 - RNA, 19 nt, Homo sapiens
  misc_RNA (1)...(19): siRNA sense strand
uagagcagccaccuacuuc

SEQ ID NO: 2072531 - RNA, 19 nt, Homo sapiens
  misc_RNA (1)...(19): siRNA sense strand
uguuuauccuucuguauca

SEQ ID NO: 2072532 - RNA, 19 nt, Homo sapiens
  misc_RNA (1)...(19): siRNA sense strand
uggaagguauggugcuauc

SEQ ID NO: 2072533 - RNA, 19 nt, Homo sapiens
  misc_RNA (1)...(19): siRNA sense strand
gccuuuccuugaucaaaug

SEQ ID NO: 2072534 - RNA, 19 nt, Homo sapiens
  misc_RNA (1)...(19): siRNA sense strand
gcuauagagcagccaccua

SEQ ID NO: 2072535 - RNA, 19 nt, Homo sapiens
  misc_RNA (1)...(19): siRNA sense strand
ucaacuggcuuggauuuug

SEQ ID NO: 2072536 - RNA, 19 nt, Homo sapiens
  misc_RNA (1)...(19): siRNA sense strand
aguauuggcuuugguggau

SEQ ID NO: 2072537 - RNA, 19 nt, Homo sapiens
  misc_RNA (1)...(19): siRNA sense strand
uacuggauauuucaaugga

SEQ ID NO: 2072538 - RNA, 19 nt, Homo sapiens
  misc_RNA (1)...(19): siRNA sense strand
ggauccuuauugucagguu

SEQ ID NO: 2072539 - RNA, 19 nt, Homo sapiens
  misc_RNA (1)...(19): siRNA sense strand
caacuggcuuggauuuugu

SEQ ID NO: 2072540 - RNA, 19 nt, Homo sapiens
  misc_RNA (1)...(19): siRNA sense strand
cuacaacuucagauacaga

SEQ ID NO: 2072541 - RNA, 19 nt, Homo sapiens
  misc_RNA (1)...(19): siRNA sense strand
aaacccagcaccgcagauu

SEQ ID NO: 2072542 - RNA, 19 nt, Homo sapiens
  misc_RNA (1)...(19): siRNA sense strand
agcagaaacaucucaaaga

SEQ ID NO: 2072543 - RNA, 19 nt, Homo sapiens
  misc_RNA (1)...(19): siRNA sense strand
uauuggcuuugguggauau

SEQ ID NO: 2072544 - RNA, 19 nt, Homo sapiens
  misc_RNA (1)...(19): siRNA sense strand
uggcuuggauuuuguuuau

SEQ ID NO: 2072545 - RNA, 19 nt, Homo sapiens
  misc_RNA (1)...(19): siRNA sense strand
gaguguccaccaagagaug

SEQ ID NO: 2072546 - RNA, 19 nt, Homo sapiens
  misc_RNA (1)...(19): siRNA sense strand
uuucaacuggcuuggauuu

SEQ ID NO: 2072547 - RNA, 19 nt, Homo sapiens
  misc_RNA (1)...(19): siRNA sense strand
agaaucaucggcuauagag

SEQ ID NO: 2072548 - RNA, 19 nt, Homo sapiens
  misc_RNA (1)...(19): siRNA sense strand
augaagaggauaacucaga

SEQ ID NO: 2072549 - RNA, 19 nt, Homo sapiens
  misc_RNA (1)...(19): siRNA sense strand
gaacaacacuuucaagaac

SEQ ID NO: 2072550 - RNA, 19 nt, Homo sapiens
  misc_RNA (1)...(19): siRNA sense strand
gcacaacaauuacuucaug

SEQ ID NO: 2072551 - RNA, 19 nt, Homo sapiens
  misc_RNA (1)...(19): siRNA sense strand
gaacuugaauugugucugu

SEQ ID NO: 2072552 - RNA, 19 nt, Homo sapiens
  misc_RNA (1)...(19): siRNA sense strand
guaaagaccucaaugaaac

SEQ ID NO: 2072553 - RNA, 19 nt, Homo sapiens
  misc_RNA (1)...(19): siRNA sense strand
ucacaagucugcagcguuu

SEQ ID NO: 2072554 - RNA, 19 nt, Homo sapiens
  misc_RNA (1)...(19): siRNA sense strand
ggaacaaacccuuagcuaa

SEQ ID NO: 2072555 - RNA, 19 nt, Homo sapiens
  misc_RNA (1)...(19): siRNA sense strand
gauggucgcuguuacuuug

SEQ ID NO: 2072556 - RNA, 19 nt, Homo sapiens
  misc_RNA (1)...(19): siRNA sense strand
gcaaagagaagaucuguuc

SEQ ID NO: 2072557 - RNA, 19 nt, Homo sapiens
  misc_RNA (1)...(19): siRNA sense strand
gaagaucuguuccugcaau

SEQ ID NO: 2072558 - RNA, 19 nt, Homo sapiens
  misc_RNA (1)...(19): siRNA sense strand
gagcaaaucccugguauug

SEQ ID NO: 2072559 - RNA, 19 nt, Homo sapiens
  misc_RNA (1)...(19): siRNA sense strand
gagauuaauucccuacaga

SEQ ID NO: 2072560 - RNA, 19 nt, Homo sapiens
  misc_RNA (1)...(19): siRNA sense strand
gaacaaacccuuagcuaac

SEQ ID NO: 2072561 - RNA, 19 nt, Homo sapiens
  misc_RNA (1)...(19): siRNA sense strand
ggaaaacccugcuuuguau

SEQ ID NO: 2072562 - RNA, 19 nt, Homo sapiens
  misc_RNA (1)...(19): siRNA sense strand
gguaaagaccucaaugaaa

SEQ ID NO: 2072563 - RNA, 19 nt, Homo sapiens
  misc_RNA (1)...(19): siRNA sense strand
aacaauggcuugcaugaaa

SEQ ID NO: 2072564 - RNA, 19 nt, Homo sapiens
  misc_RNA (1)...(19): siRNA sense strand
caagcagcauauuaacaua

SEQ ID NO: 2072565 - RNA, 19 nt, Homo sapiens
  misc_RNA (1)...(19): siRNA sense strand
gggaugaauugcucgcuuu

SEQ ID NO: 2072566 - RNA, 19 nt, Homo sapiens
  misc_RNA (1)...(19): siRNA sense strand
ugaaaacgcugcccuauga

SEQ ID NO: 2072567 - RNA, 19 nt, Homo sapiens
  misc_RNA (1)...(19): siRNA sense strand
ucaccaagcagcauauuaa

SEQ ID NO: 2072568 - RNA, 19 nt, Homo sapiens
  misc_RNA (1)...(19): siRNA sense strand
gaucugcucucccugaaag

SEQ ID NO: 2072569 - RNA, 19 nt, Homo sapiens
  misc_RNA (1)...(19): siRNA sense strand
gagaacaacacuuucaaga

SEQ ID NO: 2072570 - RNA, 19 nt, Homo sapiens
  misc_RNA (1)...(19): siRNA sense strand
ccaccagacugcaggguaa

SEQ ID NO: 2072571 - RNA, 19 nt, Homo sapiens
  misc_RNA (1)...(19): siRNA sense strand
caacuccuuucaagacaaa

SEQ ID NO: 2072572 - RNA, 19 nt, Homo sapiens
  misc_RNA (1)...(19): siRNA sense strand
acccuuagcuaacaguuua

SEQ ID NO: 2072573 - RNA, 19 nt, Homo sapiens
  misc_RNA (1)...(19): siRNA sense strand
gaggaggucuuggagcaaa

SEQ ID NO: 2072574 - RNA, 19 nt, Homo sapiens
  misc_RNA (1)...(19): siRNA sense strand
acaauaacaucgcuacugu

SEQ ID NO: 2072575 - RNA, 19 nt, Homo sapiens
  misc_RNA (1)...(19): siRNA sense strand
aaacggagguacaaagauc

SEQ ID NO: 2072576 - RNA, 19 nt, Homo sapiens
  misc_RNA (1)...(19): siRNA sense strand
agauagaccuccacggaaa

SEQ ID NO: 2072577 - RNA, 19 nt, Homo sapiens
  misc_RNA (1)...(19): siRNA sense strand
guuuaaagaugaacugcaa

SEQ ID NO: 2072578 - RNA, 19 nt, Homo sapiens
  misc_RNA (1)...(19): siRNA sense strand
ggacauuggagcacuaaau

SEQ ID NO: 2072579 - RNA, 19 nt, Homo sapiens
  misc_RNA (1)...(19): siRNA sense strand
aagaugaacugcaacaaca

SEQ ID NO: 2072580 - RNA, 19 nt, Homo sapiens
  misc_RNA (1)...(19): siRNA sense strand
gcuggacgaucuggaauau

SEQ ID NO: 2072581 - RNA, 19 nt, Homo sapiens
  misc_RNA (1)...(19): siRNA sense strand
ggaugaauugcucgcuuua

SEQ ID NO: 2072582 - RNA, 19 nt, Homo sapiens
  misc_RNA (1)...(19): siRNA sense strand
guagagaacaacacuuuca

SEQ ID NO: 2072583 - RNA, 19 nt, Homo sapiens
  misc_RNA (1)...(19): siRNA sense strand
gcagugcagcaaacucuuu

SEQ ID NO: 2072584 - RNA, 19 nt, Homo sapiens
  misc_RNA (1)...(19): siRNA sense strand
gaauaucuccaggcugauu

SEQ ID NO: 2072585 - RNA, 19 nt, Homo sapiens
  misc_RNA (1)...(19): siRNA sense strand
ggguaaagaccucaaugaa

SEQ ID NO: 2072586 - RNA, 19 nt, Homo sapiens
  misc_RNA (1)...(19): siRNA sense strand
augaauugcucgcuuuaaa

SEQ ID NO: 2072587 - RNA, 19 nt, Homo sapiens
  misc_RNA (1)...(19): siRNA sense strand
ucagguggcuauacaugga

SEQ ID NO: 2072588 - RNA, 19 nt, Homo sapiens
  misc_RNA (1)...(19): siRNA sense strand
caaaugggcaagaggauca

SEQ ID NO: 2072589 - RNA, 19 nt, Homo sapiens
  misc_RNA (1)...(19): siRNA sense strand
cuaagaagacuuucaccaa

SEQ ID NO: 2072590 - RNA, 19 nt, Homo sapiens
  misc_RNA (1)...(19): siRNA sense strand
gaucugggcaacaauaaca

SEQ ID NO: 2072591 - RNA, 19 nt, Homo sapiens
  misc_RNA (1)...(19): siRNA sense strand
aaacucagccugcacaaca

SEQ ID NO: 2072592 - RNA, 19 nt, Homo sapiens
  misc_RNA (1)...(19): siRNA sense strand
ccaagcagcauauuaacau

SEQ ID NO: 2072593 - RNA, 19 nt, Homo sapiens
  misc_RNA (1)...(19): siRNA sense strand
gcacuccaacuccuaccua

SEQ ID NO: 2072594 - RNA, 19 nt, Homo sapiens
  misc_RNA (1)...(19): siRNA sense strand
ccaguuaaccuccaucauc

SEQ ID NO: 2072595 - RNA, 19 nt, Homo sapiens
  misc_RNA (1)...(19): siRNA sense strand
ccaaacggagguacaaaga

SEQ ID NO: 2072596 - RNA, 19 nt, Homo sapiens
  misc_RNA (1)...(19): siRNA sense strand
ggacugcaccugugaucug

SEQ ID NO: 2072597 - RNA, 19 nt, Homo sapiens
  misc_RNA (1)...(19): siRNA sense strand
gcacaucaacaacaacaag

SEQ ID NO: 2072598 - RNA, 19 nt, Homo sapiens
  misc_RNA (1)...(19): siRNA sense strand
ugaaaaggcugcacaucaa

SEQ ID NO: 2072599 - RNA, 19 nt, Homo sapiens
  misc_RNA (1)...(19): siRNA sense strand
gaucugcccucagcuguac

SEQ ID NO: 2072600 - RNA, 19 nt, Homo sapiens
  misc_RNA (1)...(19): siRNA sense strand
ggacgcacuccaacuccua

SEQ ID NO: 2072601 - RNA, 19 nt, Homo sapiens
  misc_RNA (1)...(19): siRNA sense strand
gcacuaaaugaacuugaau

SEQ ID NO: 2072602 - RNA, 19 nt, Homo sapiens
  misc_RNA (1)...(19): siRNA sense strand
uaaccuccaucauccagau

SEQ ID NO: 2072603 - RNA, 19 nt, Homo sapiens
  misc_RNA (1)...(19): siRNA sense strand
caacaauuacuucauguac

SEQ ID NO: 2072604 - RNA, 19 nt, Homo sapiens
  misc_RNA (1)...(19): siRNA sense strand
agaacaacacuuucaagaa

SEQ ID NO: 2072605 - RNA, 19 nt, Homo sapiens
  misc_RNA (1)...(19): siRNA sense strand
caagacaaaugggcaagag

SEQ ID NO: 2072606 - RNA, 19 nt, Homo sapiens
  misc_RNA (1)...(19): siRNA sense strand
uggacgaucuggaauaucu

SEQ ID NO: 2072607 - RNA, 19 nt, Homo sapiens
  misc_RNA (1)...(19): siRNA sense strand
gaaccucauucuguuggau

SEQ ID NO: 2072608 - RNA, 19 nt, Homo sapiens
  misc_RNA (1)...(19): siRNA sense strand
cugaaagaauggcuggaaa

SEQ ID NO: 2072609 - RNA, 19 nt, Homo sapiens
  misc_RNA (1)...(19): siRNA sense strand
uaggaucucgcccacguua

SEQ ID NO: 2072610 - RNA, 19 nt, Homo sapiens
  misc_RNA (1)...(19): siRNA sense strand
gcaggauggucgcuguuac

SEQ ID NO: 2072611 - RNA, 19 nt, Homo sapiens
  misc_RNA (1)...(19): siRNA sense strand
auacauggauagcaauuac

SEQ ID NO: 2072612 - RNA, 19 nt, Homo sapiens
  misc_RNA (1)...(19): siRNA sense strand
ggucggguuuaaagaugaa

SEQ ID NO: 2072613 - RNA, 19 nt, Homo sapiens
  misc_RNA (1)...(19): siRNA sense strand
ggagaacgcagugcagcaa

SEQ ID NO: 2072614 - RNA, 19 nt, Homo sapiens
  misc_RNA (1)...(19): siRNA sense strand
ccaacguguuccaguaugu

SEQ ID NO: 2072615 - RNA, 19 nt, Homo sapiens
  misc_RNA (1)...(19): siRNA sense strand
ccaggcugauuuuaauuua

SEQ ID NO: 2072616 - RNA, 19 nt, Homo sapiens
  misc_RNA (1)...(19): siRNA sense strand
acaauggcuugcaugaaau

SEQ ID NO: 2072617 - RNA, 19 nt, Homo sapiens
  misc_RNA (1)...(19): siRNA sense strand
gugagacgccggugaacuu

SEQ ID NO: 2072618 - RNA, 19 nt, Homo sapiens
  misc_RNA (1)...(19): siRNA sense strand
ucaaugccaugcccaaacu

SEQ ID NO: 2072619 - RNA, 19 nt, Homo sapiens
  misc_RNA (1)...(19): siRNA sense strand
caauaacaucgcuacugua

SEQ ID NO: 2072620 - RNA, 19 nt, Homo sapiens
  misc_RNA (1)...(19): siRNA sense strand
ggauggucgcuguuacuuu

SEQ ID NO: 2072621 - RNA, 19 nt, Homo sapiens
  misc_RNA (1)...(19): siRNA sense strand
uuaauucccuacagacagu

SEQ ID NO: 2072622 - RNA, 19 nt, Homo sapiens
  misc_RNA (1)...(19): siRNA sense strand
ucaaugaaaccaccgaaca

SEQ ID NO: 2072623 - RNA, 19 nt, Homo sapiens
  misc_RNA (1)...(19): siRNA sense strand
cugccaacguguuccagua

SEQ ID NO: 2072624 - RNA, 19 nt, Homo sapiens
  misc_RNA (1)...(19): siRNA sense strand
ggaaaacaauggcuugcau

SEQ ID NO: 2072625 - RNA, 19 nt, Homo sapiens
  misc_RNA (1)...(19): siRNA sense strand
gaugaauugcucgcuuuaa

SEQ ID NO: 2072626 - RNA, 19 nt, Homo sapiens
  misc_RNA (1)...(19): siRNA sense strand
uggcuugcaugaaaucguu

SEQ ID NO: 2072627 - RNA, 19 nt, Homo sapiens
  misc_RNA (1)...(19): siRNA sense strand
ucagccugcacaacaauua

SEQ ID NO: 2072628 - RNA, 19 nt, Homo sapiens
  misc_RNA (1)...(19): siRNA sense strand
ccaacuccuuucaagacaa

SEQ ID NO: 2072629 - RNA, 19 nt, Homo sapiens
  misc_RNA (1)...(19): siRNA sense strand
ggagcaaaucccugguauu

SEQ ID NO: 2072630 - RNA, 19 nt, Homo sapiens
  misc_RNA (1)...(19): siRNA sense strand
acggguagcuccaggaaca

SEQ ID NO: 2072631 - RNA, 19 nt, Homo sapiens
  misc_RNA (1)...(19): siRNA sense strand
ccuacgagauaacaagauc

SEQ ID NO: 2072632 - RNA, 19 nt, Homo sapiens
  misc_RNA (1)...(19): siRNA sense strand
gggucggguuuaaagauga

SEQ ID NO: 2072633 - RNA, 19 nt, Homo sapiens
  misc_RNA (1)...(19): siRNA sense strand
gcuguuacuuugugaugag

SEQ ID NO: 2072634 - RNA, 19 nt, Homo sapiens
  misc_RNA (1)...(19): siRNA sense strand
ggacugcugcugguguuug

SEQ ID NO: 2072635 - RNA, 19 nt, Homo sapiens
  misc_RNA (1)...(19): siRNA sense strand
aacaaacccuuagcuaaca

SEQ ID NO: 2072636 - RNA, 19 nt, Homo sapiens
  misc_RNA (1)...(19): siRNA sense strand
gccaacuccuuucaagaca

SEQ ID NO: 2072637 - RNA, 19 nt, Homo sapiens
  misc_RNA (1)...(19): siRNA sense strand
gcauggcaauucccucacu

SEQ ID NO: 2072638 - RNA, 19 nt, Homo sapiens
  misc_RNA (1)...(19): siRNA sense strand
agacgccggugaacuucuu

SEQ ID NO: 2072639 - RNA, 19 nt, Homo sapiens
  misc_RNA (1)...(19): siRNA sense strand
cacaacaauuacuucaugu

SEQ ID NO: 2072640 - RNA, 19 nt, Homo sapiens
  misc_RNA (1)...(19): siRNA sense strand
gagcuuuuccuacgagaua

SEQ ID NO: 2072641 - RNA, 19 nt, Homo sapiens
  misc_RNA (1)...(19): siRNA sense strand
gugaucugcucucccugaa

SEQ ID NO: 2072642 - RNA, 19 nt, Homo sapiens
  misc_RNA (1)...(19): siRNA sense strand
gccaacguguuccaguaug

SEQ ID NO: 2072643 - RNA, 19 nt, Homo sapiens
  misc_RNA (1)...(19): siRNA sense strand
ucacucgacuuuucccuaa

SEQ ID NO: 2072644 - RNA, 19 nt, Homo sapiens
  misc_RNA (1)...(19): siRNA sense strand
uugcggagauccugcuaga

SEQ ID NO: 2072645 - RNA, 19 nt, Homo sapiens
  misc_RNA (1)...(19): siRNA sense strand
cgagauuaauucccuacag

SEQ ID NO: 2072646 - RNA, 19 nt, Homo sapiens
  misc_RNA (1)...(19): siRNA sense strand
caauugugccuuucaagca

SEQ ID NO: 2072647 - RNA, 19 nt, Homo sapiens
  misc_RNA (1)...(19): siRNA sense strand
gagaacgcagugcagcaaa

SEQ ID NO: 2072648 - RNA, 19 nt, Homo sapiens
  misc_RNA (1)...(19): siRNA sense strand
auaacaagauccacagcau

SEQ ID NO: 2072649 - RNA, 19 nt, Homo sapiens
  misc_RNA (1)...(19): siRNA sense strand
ggacuuggaucaaccauuu

SEQ ID NO: 2072650 - RNA, 19 nt, Homo sapiens
  misc_RNA (1)...(19): siRNA sense strand
gagaaugaguguaauugua

SEQ ID NO: 2072651 - RNA, 19 nt, Homo sapiens
  misc_RNA (1)...(19): siRNA sense strand
gauaaacacugugcugaaa

SEQ ID NO: 2072652 - RNA, 19 nt, Homo sapiens
  misc_RNA (1)...(19): siRNA sense strand
uaaacacugugcugaaaua

SEQ ID NO: 2072653 - RNA, 19 nt, Homo sapiens
  misc_RNA (1)...(19): siRNA sense strand
ggacuacgguuuaauuauc

SEQ ID NO: 2072654 - RNA, 19 nt, Homo sapiens
  misc_RNA (1)...(19): siRNA sense strand
gaagcgaucugccguggaa

SEQ ID NO: 2072655 - RNA, 19 nt, Homo sapiens
  misc_RNA (1)...(19): siRNA sense strand
gcagaaggcucagauuguu

SEQ ID NO: 2072656 - RNA, 19 nt, Homo sapiens
  misc_RNA (1)...(19): siRNA sense strand
aaaccaagauggcauuaaa

SEQ ID NO: 2072657 - RNA, 19 nt, Homo sapiens
  misc_RNA (1)...(19): siRNA sense strand
gcacugguguucuucuuug

SEQ ID NO: 2072658 - RNA, 19 nt, Homo sapiens
  misc_RNA (1)...(19): siRNA sense strand
gaacagcgacuaugcaauc

SEQ ID NO: 2072659 - RNA, 19 nt, Homo sapiens
  misc_RNA (1)...(19): siRNA sense strand
ucucugagcucgugcagua

SEQ ID NO: 2072660 - RNA, 19 nt, Homo sapiens
  misc_RNA (1)...(19): siRNA sense strand
cagcagauaugcaggacua

SEQ ID NO: 2072661 - RNA, 19 nt, Homo sapiens
  misc_RNA (1)...(19): siRNA sense strand
gggaugagccgugguauaa

SEQ ID NO: 2072662 - RNA, 19 nt, Homo sapiens
  misc_RNA (1)...(19): siRNA sense strand
ggucgaagguguccagaga

SEQ ID NO: 2072663 - RNA, 19 nt, Homo sapiens
  misc_RNA (1)...(19): siRNA sense strand
gcaaagcccugauaaacac

SEQ ID NO: 2072664 - RNA, 19 nt, Homo sapiens
  misc_RNA (1)...(19): siRNA sense strand
cgacggagcugcacugucu

SEQ ID NO: 2072665 - RNA, 19 nt, Homo sapiens
  misc_RNA (1)...(19): siRNA sense strand
gugcaguacuucuucuaua

SEQ ID NO: 2072666 - RNA, 19 nt, Homo sapiens
  misc_RNA (1)...(19): siRNA sense strand
gcaucaacguuuacaguga

SEQ ID NO: 2072667 - RNA, 19 nt, Homo sapiens
  misc_RNA (1)...(19): siRNA sense strand
gaacuuuguguguugcuua

SEQ ID NO: 2072668 - RNA, 19 nt, Homo sapiens
  misc_RNA (1)...(19): siRNA sense strand
ccaagauggcauuaaauua

SEQ ID NO: 2072669 - RNA, 19 nt, Homo sapiens
  misc_RNA (1)...(19): siRNA sense strand
ccacagagauacccagaca

SEQ ID NO: 2072670 - RNA, 19 nt, Homo sapiens
  misc_RNA (1)...(19): siRNA sense strand
gcaaauagagaaagaucuu

SEQ ID NO: 2072671 - RNA, 19 nt, Homo sapiens
  misc_RNA (1)...(19): siRNA sense strand
agaagaauaugaaggcauu

SEQ ID NO: 2072672 - RNA, 19 nt, Homo sapiens
  misc_RNA (1)...(19): siRNA sense strand
gagcagauucuucgauauu

SEQ ID NO: 2072673 - RNA, 19 nt, Homo sapiens
  misc_RNA (1)...(19): siRNA sense strand
gaacaauucagaagaguag

SEQ ID NO: 2072674 - RNA, 19 nt, Homo sapiens
  misc_RNA (1)...(19): siRNA sense strand
ugaagaagaugcugcuugu

SEQ ID NO: 2072675 - RNA, 19 nt, Homo sapiens
  misc_RNA (1)...(19): siRNA sense strand
ucccaaaguuuaagcauuu

SEQ ID NO: 2072676 - RNA, 19 nt, Homo sapiens
  misc_RNA (1)...(19): siRNA sense strand
caaaguggcccuucaagau

SEQ ID NO: 2072677 - RNA, 19 nt, Homo sapiens
  misc_RNA (1)...(19): siRNA sense strand
gaauaugaaggcauuugua

SEQ ID NO: 2072678 - RNA, 19 nt, Homo sapiens
  misc_RNA (1)...(19): siRNA sense strand
ccacucuucuuugucauua

SEQ ID NO: 2072679 - RNA, 19 nt, Homo sapiens
  misc_RNA (1)...(19): siRNA sense strand
gaugagccgugguauaauc

SEQ ID NO: 2072680 - RNA, 19 nt, Homo sapiens
  misc_RNA (1)...(19): siRNA sense strand
gaacgucugcuucaucuuc

SEQ ID NO: 2072681 - RNA, 19 nt, Homo sapiens
  misc_RNA (1)...(19): siRNA sense strand
gcagaagccuaugagcaaa

SEQ ID NO: 2072682 - RNA, 19 nt, Homo sapiens
  misc_RNA (1)...(19): siRNA sense strand
gcaguuccaucccaaguca

SEQ ID NO: 2072683 - RNA, 19 nt, Homo sapiens
  misc_RNA (1)...(19): siRNA sense strand
gcaggacuacgguuuaauu

SEQ ID NO: 2072684 - RNA, 19 nt, Homo sapiens
  misc_RNA (1)...(19): siRNA sense strand
caggagaaauuuaucuguu

SEQ ID NO: 2072685 - RNA, 19 nt, Homo sapiens
  misc_RNA (1)...(19): siRNA sense strand
cgucggaccucaaugaaga

SEQ ID NO: 2072686 - RNA, 19 nt, Homo sapiens
  misc_RNA (1)...(19): siRNA sense strand
gaagguguccagagacuug

SEQ ID NO: 2072687 - RNA, 19 nt, Homo sapiens
  misc_RNA (1)...(19): siRNA sense strand
gaguacaucuucacagaca

SEQ ID NO: 2072688 - RNA, 19 nt, Homo sapiens
  misc_RNA (1)...(19): siRNA sense strand
gugcuuauuucguguuuga

SEQ ID NO: 2072689 - RNA, 19 nt, Homo sapiens
  misc_RNA (1)...(19): siRNA sense strand
aggcucagauuguuaaauu

SEQ ID NO: 2072690 - RNA, 19 nt, Homo sapiens
  misc_RNA (1)...(19): siRNA sense strand
caacagagagaguccagaa

SEQ ID NO: 2072691 - RNA, 19 nt, Homo sapiens
  misc_RNA (1)...(19): siRNA sense strand
caaaugaugucagcaugau

SEQ ID NO: 2072692 - RNA, 19 nt, Homo sapiens
  misc_RNA (1)...(19): siRNA sense strand
guguaucucugcauucuga

SEQ ID NO: 2072693 - RNA, 19 nt, Homo sapiens
  misc_RNA (1)...(19): siRNA sense strand
gcaaaugaugucagcauga

SEQ ID NO: 2072694 - RNA, 19 nt, Homo sapiens
  misc_RNA (1)...(19): siRNA sense strand
agaaggagaaugaguguaa

SEQ ID NO: 2072695 - RNA, 19 nt, Homo sapiens
  misc_RNA (1)...(19): siRNA sense strand
gaacacgucggaccucaau

SEQ ID NO: 2072696 - RNA, 19 nt, Homo sapiens
  misc_RNA (1)...(19): siRNA sense strand
ccaaaggcuuccacacaga

SEQ ID NO: 2072697 - RNA, 19 nt, Homo sapiens
  misc_RNA (1)...(19): siRNA sense strand
cacuaaagcuugcauugga

SEQ ID NO: 2072698 - RNA, 19 nt, Homo sapiens
  misc_RNA (1)...(19): siRNA sense strand
gagccagaguggagcguaa

SEQ ID NO: 2072699 - RNA, 19 nt, Homo sapiens
  misc_RNA (1)...(19): siRNA sense strand
cagaagaguagccaacuuu

SEQ ID NO: 2072700 - RNA, 19 nt, Homo sapiens
  misc_RNA (1)...(19): siRNA sense strand
gagcugcacugucucugau

SEQ ID NO: 2072701 - RNA, 19 nt, Homo sapiens
  misc_RNA (1)...(19): siRNA sense strand
ggaacuuuauacccaagaa

SEQ ID NO: 2072702 - RNA, 19 nt, Homo sapiens
  misc_RNA (1)...(19): siRNA sense strand
gaaggagaaugaguguaau

SEQ ID NO: 2072703 - RNA, 19 nt, Homo sapiens
  misc_RNA (1)...(19): siRNA sense strand
agaaguuccucggcucuua

SEQ ID NO: 2072704 - RNA, 19 nt, Homo sapiens
  misc_RNA (1)...(19): siRNA sense strand
ggacuuccacucuucuuug

SEQ ID NO: 2072705 - RNA, 19 nt, Homo sapiens
  misc_RNA (1)...(19): siRNA sense strand
gaagaacacugagaaaauc

SEQ ID NO: 2072706 - RNA, 19 nt, Homo sapiens
  misc_RNA (1)...(19): siRNA sense strand
ggaccgcgacucagaauuc

SEQ ID NO: 2072707 - RNA, 19 nt, Homo sapiens
  misc_RNA (1)...(19): siRNA sense strand
ugcaguacuucuucuauaa

SEQ ID NO: 2072708 - RNA, 19 nt, Homo sapiens
  misc_RNA (1)...(19): siRNA sense strand
gauccaagaagaauaugaa

SEQ ID NO: 2072709 - RNA, 19 nt, Homo sapiens
  misc_RNA (1)...(19): siRNA sense strand
gaaauccuguguguacauc

SEQ ID NO: 2072710 - RNA, 19 nt, Homo sapiens
  misc_RNA (1)...(19): siRNA sense strand
gcaaaggagcagauucuuc

SEQ ID NO: 2072711 - RNA, 19 nt, Homo sapiens
  misc_RNA (1)...(19): siRNA sense strand
ggagcagcauguuggcauu

SEQ ID NO: 2072712 - RNA, 19 nt, Homo sapiens
  misc_RNA (1)...(19): siRNA sense strand
ccgcguaucugacccucua

SEQ ID NO: 2072713 - RNA, 19 nt, Homo sapiens
  misc_RNA (1)...(19): siRNA sense strand
ggagcagauucuucgauau

SEQ ID NO: 2072714 - RNA, 19 nt, Homo sapiens
  misc_RNA (1)...(19): siRNA sense strand
caaacaggguuaugaagac

SEQ ID NO: 2072715 - RNA, 19 nt, Homo sapiens
  misc_RNA (1)...(19): siRNA sense strand
uaugcaaucccaaaguuua

SEQ ID NO: 2072716 - RNA, 19 nt, Homo sapiens
  misc_RNA (1)...(19): siRNA sense strand
gcugcacugucucugauaa

SEQ ID NO: 2072717 - RNA, 19 nt, Homo sapiens
  misc_RNA (1)...(19): siRNA sense strand
uagaggagcuacacugaag

SEQ ID NO: 2072718 - RNA, 19 nt, Homo sapiens
  misc_RNA (1)...(19): siRNA sense strand
gagcuacacugaagaacac

SEQ ID NO: 2072719 - RNA, 19 nt, Homo sapiens
  misc_RNA (1)...(19): siRNA sense strand
gcacugucucugauaauga

SEQ ID NO: 2072720 - RNA, 19 nt, Homo sapiens
  misc_RNA (1)...(19): siRNA sense strand
agaagccuaugagcaaaua

SEQ ID NO: 2072721 - RNA, 19 nt, Homo sapiens
  misc_RNA (1)...(19): siRNA sense strand
aaaguuagcagaagccuau

SEQ ID NO: 2072722 - RNA, 19 nt, Homo sapiens
  misc_RNA (1)...(19): siRNA sense strand
aggagcagauucuucgaua

SEQ ID NO: 2072723 - RNA, 19 nt, Homo sapiens
  misc_RNA (1)...(19): siRNA sense strand
caucgaaagguuugaauug

SEQ ID NO: 2072724 - RNA, 19 nt, Homo sapiens
  misc_RNA (1)...(19): siRNA sense strand
ggacaauuacauggagaua

SEQ ID NO: 2072725 - RNA, 19 nt, Homo sapiens
  misc_RNA (1)...(19): siRNA sense strand
gggcagauauuuggaaacu

SEQ ID NO: 2072726 - RNA, 19 nt, Homo sapiens
  misc_RNA (1)...(19): siRNA sense strand
gaaagaucuuacucugcuu

SEQ ID NO: 2072727 - RNA, 19 nt, Homo sapiens
  misc_RNA (1)...(19): siRNA sense strand
gaagaguagccaacuuuua

SEQ ID NO: 2072728 - RNA, 19 nt, Homo sapiens
  misc_RNA (1)...(19): siRNA sense strand
ucaaacaggguuaugaaga

SEQ ID NO: 2072729 - RNA, 19 nt, Homo sapiens
  misc_RNA (1)...(19): siRNA sense strand
acagggacgucgccaagaa

SEQ ID NO: 2072730 - RNA, 19 nt, Homo sapiens
  misc_RNA (1)...(19): siRNA sense strand
agaagaugcugcuuguuca

SEQ ID NO: 2072731 - RNA, 19 nt, Homo sapiens
  misc_RNA (1)...(19): siRNA sense strand
gauaaugaagccucgagaa

SEQ ID NO: 2072732 - RNA, 19 nt, Homo sapiens
  misc_RNA (1)...(19): siRNA sense strand
gccaaggugugcaggagaa

SEQ ID NO: 2072733 - RNA, 19 nt, Homo sapiens
  misc_RNA (1)...(19): siRNA sense strand
ucaugguccucuuuaacua

SEQ ID NO: 2072734 - RNA, 19 nt, Homo sapiens
  misc_RNA (1)...(19): siRNA sense strand
gaaaccaagauggcauuaa

SEQ ID NO: 2072735 - RNA, 19 nt, Homo sapiens
  misc_RNA (1)...(19): siRNA sense strand
ccaguguccuguucauuuc

SEQ ID NO: 2072736 - RNA, 19 nt, Homo sapiens
  misc_RNA (1)...(19): siRNA sense strand
aagacuggcuucgacauaa

SEQ ID NO: 2072737 - RNA, 19 nt, Homo sapiens
  misc_RNA (1)...(19): siRNA sense strand
ggaaaccaagauggcauua

SEQ ID NO: 2072738 - RNA, 19 nt, Homo sapiens
  misc_RNA (1)...(19): siRNA sense strand
ggcucagauuguuaaauua

SEQ ID NO: 2072739 - RNA, 19 nt, Homo sapiens
  misc_RNA (1)...(19): siRNA sense strand
uggaguacaucuucacaga

SEQ ID NO: 2072740 - RNA, 19 nt, Homo sapiens
  misc_RNA (1)...(19): siRNA sense strand
ucauauuucuggugcaguu

SEQ ID NO: 2072741 - RNA, 19 nt, Homo sapiens
  misc_RNA (1)...(19): siRNA sense strand
gcaguugauuauugauaca

SEQ ID NO: 2072742 - RNA, 19 nt, Homo sapiens
  misc_RNA (1)...(19): siRNA sense strand
caggacuacgguuuaauua

SEQ ID NO: 2072743 - RNA, 19 nt, Homo sapiens
  misc_RNA (1)...(19): siRNA sense strand
uaaggcugaaggacaauua

SEQ ID NO: 2072744 - RNA, 19 nt, Homo sapiens
  misc_RNA (1)...(19): siRNA sense strand
guccagagacuuggcuuua

SEQ ID NO: 2072745 - RNA, 19 nt, Homo sapiens
  misc_RNA (1)...(19): siRNA sense strand
agagagacccgacccugua

SEQ ID NO: 2072746 - RNA, 19 nt, Homo sapiens
  misc_RNA (1)...(19): siRNA sense strand
cagaaggcucagauuguua

SEQ ID NO: 2072747 - RNA, 19 nt, Homo sapiens
  misc_RNA (1)...(19): siRNA sense strand
gcuccgaacuuuguguguu

SEQ ID NO: 2072748 - RNA, 19 nt, Homo sapiens
  misc_RNA (1)...(19): siRNA sense strand
ggagaaugaguguaauugu

SEQ ID NO: 2072749 - RNA, 19 nt, Homo sapiens
  misc_RNA (1)...(19): siRNA sense strand
ggauggaaauuucuccuuu

SEQ ID NO: 2072750 - RNA, 19 nt, Homo sapiens
  misc_RNA (1)...(19): siRNA sense strand
gggcacaugugaaaucugu

SEQ ID NO: 2072751 - RNA, 19 nt, Homo sapiens
  misc_RNA (1)...(19): siRNA sense strand
gggaaacucaggaacuuug

SEQ ID NO: 2072752 - RNA, 19 nt, Homo sapiens
  misc_RNA (1)...(19): siRNA sense strand
gaagaacucaagccucucu

SEQ ID NO: 2072753 - RNA, 19 nt, Homo sapiens
  misc_RNA (1)...(19): siRNA sense strand
gauggaaauuucuccuuuu

SEQ ID NO: 2072754 - RNA, 19 nt, Homo sapiens
  misc_RNA (1)...(19): siRNA sense strand
gaacuuuccagaagaacuc

SEQ ID NO: 2072755 - RNA, 19 nt, Homo sapiens
  misc_RNA (1)...(19): siRNA sense strand
gcccaaugcccaggagaua

SEQ ID NO: 2072756 - RNA, 19 nt, Homo sapiens
  misc_RNA (1)...(19): siRNA sense strand
ucaagccucucugcaagga

SEQ ID NO: 2072757 - RNA, 19 nt, Homo sapiens
  misc_RNA (1)...(19): siRNA sense strand
cagugaagaagcucaaaga

SEQ ID NO: 2072758 - RNA, 19 nt, Homo sapiens
  misc_RNA (1)...(19): siRNA sense strand
cgugcaggauggaaauuuc

SEQ ID NO: 2072759 - RNA, 19 nt, Homo sapiens
  misc_RNA (1)...(19): siRNA sense strand
caacccgaacuuuccagaa

SEQ ID NO: 2072760 - RNA, 19 nt, Homo sapiens
  misc_RNA (1)...(19): siRNA sense strand
uucagaggcuggaggaaau

SEQ ID NO: 2072761 - RNA, 19 nt, Homo sapiens
  misc_RNA (1)...(19): siRNA sense strand
cccgaacuuuccagaagaa

SEQ ID NO: 2072762 - RNA, 19 nt, Homo sapiens
  misc_RNA (1)...(19): siRNA sense strand
aacccgaacuuuccagaag

SEQ ID NO: 2072763 - RNA, 19 nt, Homo sapiens
  misc_RNA (1)...(19): siRNA sense strand
uugggaaacucaggaacuu

SEQ ID NO: 2072764 - RNA, 19 nt, Homo sapiens
  misc_RNA (1)...(19): siRNA sense strand
gcccaggagauacuucaga

SEQ ID NO: 2072765 - RNA, 19 nt, Homo sapiens
  misc_RNA (1)...(19): siRNA sense strand
gaaacucaggaacuuugca

SEQ ID NO: 2072766 - RNA, 19 nt, Homo sapiens
  misc_RNA (1)...(19): siRNA sense strand
ggauggaaauuucuccuuu

SEQ ID NO: 2072767 - RNA, 19 nt, Homo sapiens
  misc_RNA (1)...(19): siRNA sense strand
gggcacaugugaaaucugu

SEQ ID NO: 2072768 - RNA, 19 nt, Homo sapiens
  misc_RNA (1)...(19): siRNA sense strand
gaagaacucaagccucucu

SEQ ID NO: 2072769 - RNA, 19 nt, Homo sapiens
  misc_RNA (1)...(19): siRNA sense strand
gauggaaauuucuccuuuu

SEQ ID NO: 2072770 - RNA, 19 nt, Homo sapiens
  misc_RNA (1)...(19): siRNA sense strand
gaacuuuccagaagaacuc

SEQ ID NO: 2072771 - RNA, 19 nt, Homo sapiens
  misc_RNA (1)...(19): siRNA sense strand
gcccaaugcccaggagaua

SEQ ID NO: 2072772 - RNA, 19 nt, Homo sapiens
  misc_RNA (1)...(19): siRNA sense strand
ucaagccucucugcaagga

SEQ ID NO: 2072773 - RNA, 19 nt, Homo sapiens
  misc_RNA (1)...(19): siRNA sense strand
cagugaagaagcucaaaga

SEQ ID NO: 2072774 - RNA, 19 nt, Homo sapiens
  misc_RNA (1)...(19): siRNA sense strand
cgugcaggauggaaauuuc

SEQ ID NO: 2072775 - RNA, 19 nt, Homo sapiens
  misc_RNA (1)...(19): siRNA sense strand
caacccgaacuuuccagaa

SEQ ID NO: 2072776 - RNA, 19 nt, Homo sapiens
  misc_RNA (1)...(19): siRNA sense strand
uucagaggcuggaggaaau

SEQ ID NO: 2072777 - RNA, 19 nt, Homo sapiens
  misc_RNA (1)...(19): siRNA sense strand
cccgaacuuuccagaagaa

SEQ ID NO: 2072778 - RNA, 19 nt, Homo sapiens
  misc_RNA (1)...(19): siRNA sense strand
aacccgaacuuuccagaag

SEQ ID NO: 2072779 - RNA, 19 nt, Homo sapiens
  misc_RNA (1)...(19): siRNA sense strand
gcccaggagauacuucaga

SEQ ID NO: 2072780 - RNA, 19 nt, Homo sapiens
  misc_RNA (1)...(19): siRNA sense strand
ccagagguaucacuacuuu

SEQ ID NO: 2072781 - RNA, 19 nt, Homo sapiens
  misc_RNA (1)...(19): siRNA sense strand
gaacauugccaacaucaug

SEQ ID NO: 2072782 - RNA, 19 nt, Homo sapiens
  misc_RNA (1)...(19): siRNA sense strand
gaaggaaggccucuuagau

SEQ ID NO: 2072783 - RNA, 19 nt, Homo sapiens
  misc_RNA (1)...(19): siRNA sense strand
gaauggacuucuagacaug

SEQ ID NO: 2072784 - RNA, 19 nt, Homo sapiens
  misc_RNA (1)...(19): siRNA sense strand
guucaaugcuagcaccuuu

SEQ ID NO: 2072785 - RNA, 19 nt, Homo sapiens
  misc_RNA (1)...(19): siRNA sense strand
gagauugagucuaccuuuc

SEQ ID NO: 2072786 - RNA, 19 nt, Homo sapiens
  misc_RNA (1)...(19): siRNA sense strand
gcaguggauuaaucugaaa

SEQ ID NO: 2072787 - RNA, 19 nt, Homo sapiens
  misc_RNA (1)...(19): siRNA sense strand
gagucuaccuuucacaugu

SEQ ID NO: 2072788 - RNA, 19 nt, Homo sapiens
  misc_RNA (1)...(19): siRNA sense strand
uaucgaggcuucaucuuca

SEQ ID NO: 2072789 - RNA, 19 nt, Homo sapiens
  misc_RNA (1)...(19): siRNA sense strand
gaaggccucuuagauccaa

SEQ ID NO: 2072790 - RNA, 19 nt, Homo sapiens
  misc_RNA (1)...(19): siRNA sense strand
ccaaacgucaagucaauuu

SEQ ID NO: 2072791 - RNA, 19 nt, Homo sapiens
  misc_RNA (1)...(19): siRNA sense strand
ggagauugagucuaccuuu

SEQ ID NO: 2072792 - RNA, 19 nt, Homo sapiens
  misc_RNA (1)...(19): siRNA sense strand
caagaacauugccaacauc

SEQ ID NO: 2072793 - RNA, 19 nt, Homo sapiens
  misc_RNA (1)...(19): siRNA sense strand
gagcucaccgggauuauuc

SEQ ID NO: 2072794 - RNA, 19 nt, Homo sapiens
  misc_RNA (1)...(19): siRNA sense strand
ccauggagauugagucuac

SEQ ID NO: 2072795 - RNA, 19 nt, Homo sapiens
  misc_RNA (1)...(19): siRNA sense strand
gaggugagucgguguguug

SEQ ID NO: 2072796 - RNA, 19 nt, Homo sapiens
  misc_RNA (1)...(19): siRNA sense strand
ugaagacacucgccuaucg

SEQ ID NO: 2072797 - RNA, 19 nt, Homo sapiens
  misc_RNA (1)...(19): siRNA sense strand
gcuagcaccuuuacagacu

SEQ ID NO: 2072798 - RNA, 19 nt, Homo sapiens
  misc_RNA (1)...(19): siRNA sense strand
ggagagggucgaugaaugg

SEQ ID NO: 2072799 - RNA, 19 nt, Homo sapiens
  misc_RNA (1)...(19): siRNA sense strand
gcgcauccauggcggcaau

SEQ ID NO: 2072800 - RNA, 19 nt, Homo sapiens
  misc_RNA (1)...(19): siRNA sense strand
ggcgaaggaaggccucuua

SEQ ID NO: 2072801 - RNA, 19 nt, Homo sapiens
  misc_RNA (1)...(19): siRNA sense strand
gcgacaagccacagauuca

SEQ ID NO: 2072802 - RNA, 19 nt, Homo sapiens
  misc_RNA (1)...(19): siRNA sense strand
uggagagggucgaugaaug

SEQ ID NO: 2072803 - RNA, 19 nt, Homo sapiens
  misc_RNA (1)...(19): siRNA sense strand
gccggaccauggagauuga

SEQ ID NO: 2072804 - RNA, 19 nt, Homo sapiens
  misc_RNA (1)...(19): siRNA sense strand
ggaggugagucgguguguu

SEQ ID NO: 2072805 - RNA, 19 nt, Homo sapiens
  misc_RNA (1)...(19): siRNA sense strand
cgaaggaaggccucuuaga

SEQ ID NO: 2072806 - RNA, 19 nt, Homo sapiens
  misc_RNA (1)...(19): siRNA sense strand
gauccaaacgucaagucaa

SEQ ID NO: 2072807 - RNA, 19 nt, Homo sapiens
  misc_RNA (1)...(19): siRNA sense strand
gaagacacucgccuaucga

SEQ ID NO: 2072808 - RNA, 19 nt, Homo sapiens
  misc_RNA (1)...(19): siRNA sense strand
cuuggcaucuucgaaguaa

SEQ ID NO: 2072809 - RNA, 19 nt, Homo sapiens
  misc_RNA (1)...(19): siRNA sense strand
acagagcucaccgggauua

SEQ ID NO: 2072810 - RNA, 19 nt, Homo sapiens
  misc_RNA (1)...(19): siRNA sense strand
agucuaccuuucacaugua

SEQ ID NO: 2072811 - RNA, 19 nt, Homo sapiens
  misc_RNA (1)...(19): siRNA sense strand
augaauggauggcgaagga

SEQ ID NO: 2072812 - RNA, 19 nt, Homo sapiens
  misc_RNA (1)...(19): siRNA sense strand
guaguccauccacagcuua

SEQ ID NO: 2072813 - RNA, 19 nt, Homo sapiens
  misc_RNA (1)...(19): siRNA sense strand
uuuagaugcuucuggaugu

SEQ ID NO: 2072814 - RNA, 19 nt, Homo sapiens
  misc_RNA (1)...(19): siRNA sense strand
cucaggaaaucaucgaguu

SEQ ID NO: 2072815 - RNA, 19 nt, Homo sapiens
  misc_RNA (1)...(19): siRNA sense strand
ggacuucuagacaugaaca

SEQ ID NO: 2072816 - RNA, 19 nt, Homo sapiens
  misc_RNA (1)...(19): siRNA sense strand
cgaaguaaggagaguuuua

SEQ ID NO: 2072817 - RNA, 19 nt, Homo sapiens
  misc_RNA (1)...(19): siRNA sense strand
gcauugacgacugcaagaa

SEQ ID NO: 2072818 - RNA, 19 nt, Homo sapiens
  misc_RNA (1)...(19): siRNA sense strand
guaaggagaguuuuagaug

SEQ ID NO: 2072819 - RNA, 19 nt, Homo sapiens
  misc_RNA (1)...(19): siRNA sense strand
aaggaaggccucuuagauc

SEQ ID NO: 2072820 - RNA, 19 nt, Homo sapiens
  misc_RNA (1)...(19): siRNA sense strand
ggccucagccugcaacaca

SEQ ID NO: 2072821 - RNA, 19 nt, Homo sapiens
  misc_RNA (1)...(19): siRNA sense strand
uguggagacugggacuuaa

SEQ ID NO: 2072822 - RNA, 19 nt, Homo sapiens
  misc_RNA (1)...(19): siRNA sense strand
caugaagacacucgccuau

SEQ ID NO: 2072823 - RNA, 19 nt, Homo sapiens
  misc_RNA (1)...(19): siRNA sense strand
gcuucuggauguucaaugc

SEQ ID NO: 2072824 - RNA, 19 nt, Homo sapiens
  misc_RNA (1)...(19): siRNA sense strand
ccucagccugcaacacaua

SEQ ID NO: 2072825 - RNA, 19 nt, Homo sapiens
  misc_RNA (1)...(19): siRNA sense strand
gcugcuggcccaagaaugg

SEQ ID NO: 2072826 - RNA, 19 nt, Homo sapiens
  misc_RNA (1)...(19): siRNA sense strand
agcaguggauuaaucugaa

SEQ ID NO: 2072827 - RNA, 19 nt, Homo sapiens
  misc_RNA (1)...(19): siRNA sense strand
aagcaguggauuaaucuga

SEQ ID NO: 2072828 - RNA, 19 nt, Homo sapiens
  misc_RNA (1)...(19): siRNA sense strand
auccaaacgucaagucaau

SEQ ID NO: 2072829 - RNA, 19 nt, Homo sapiens
  misc_RNA (1)...(19): siRNA sense strand
uguaguccauccacagcuu

SEQ ID NO: 2072830 - RNA, 19 nt, Homo sapiens
  misc_RNA (1)...(19): siRNA sense strand
ccugugguguuccggaguu

SEQ ID NO: 2072831 - RNA, 19 nt, Homo sapiens
  misc_RNA (1)...(19): siRNA sense strand
gacaagccacagauucauc

SEQ ID NO: 2072832 - RNA, 19 nt, Homo sapiens
  misc_RNA (1)...(19): siRNA sense strand
uucaagcaguggauuaauc

SEQ ID NO: 2072833 - RNA, 19 nt, Homo sapiens
  misc_RNA (1)...(19): siRNA sense strand
cagcuuaccccauucugua

SEQ ID NO: 2072834 - RNA, 19 nt, Homo sapiens
  misc_RNA (1)...(19): siRNA sense strand
ucaagcaguggauuaaucu

SEQ ID NO: 2072835 - RNA, 19 nt, Homo sapiens
  misc_RNA (1)...(19): siRNA sense strand
guggagacugggacuuaaa

SEQ ID NO: 2072836 - RNA, 19 nt, Homo sapiens
  misc_RNA (1)...(19): siRNA sense strand
uuagaugcuucuggauguu

SEQ ID NO: 2072837 - RNA, 19 nt, Homo sapiens
  misc_RNA (1)...(19): siRNA sense strand
cuuuccagcucucacagaa

SEQ ID NO: 2072838 - RNA, 19 nt, Homo sapiens
  misc_RNA (1)...(19): siRNA sense strand
agauugagucuaccuuuca

SEQ ID NO: 2072839 - RNA, 19 nt, Homo sapiens
  misc_RNA (1)...(19): siRNA sense strand
ggccggaccauggagauug

SEQ ID NO: 2072840 - RNA, 19 nt, Homo sapiens
  misc_RNA (1)...(19): siRNA sense strand
gaaguaaggagaguuuuag

SEQ ID NO: 2072841 - RNA, 19 nt, Homo sapiens
  misc_RNA (1)...(19): siRNA sense strand
gaacaaacaugacagacaa

SEQ ID NO: 2072842 - RNA, 19 nt, Homo sapiens
  misc_RNA (1)...(19): siRNA sense strand
gaaagcaacucaacucaau

SEQ ID NO: 2072843 - RNA, 19 nt, Homo sapiens
  misc_RNA (1)...(19): siRNA sense strand
gaugagaacuguuggcauu

SEQ ID NO: 2072844 - RNA, 19 nt, Homo sapiens
  misc_RNA (1)...(19): siRNA sense strand
gaacaauucuggaagcaau

SEQ ID NO: 2072845 - RNA, 19 nt, Homo sapiens
  misc_RNA (1)...(19): siRNA sense strand
caacucaacucaauguuug

SEQ ID NO: 2072846 - RNA, 19 nt, Homo sapiens
  misc_RNA (1)...(19): siRNA sense strand
caagaugcauucaagauug

SEQ ID NO: 2072847 - RNA, 19 nt, Homo sapiens
  misc_RNA (1)...(19): siRNA sense strand
gcaaggaugcugacacuaa

SEQ ID NO: 2072848 - RNA, 19 nt, Homo sapiens
  misc_RNA (1)...(19): siRNA sense strand
caagucggcuuucaucuga

SEQ ID NO: 2072849 - RNA, 19 nt, Homo sapiens
  misc_RNA (1)...(19): siRNA sense strand
gaaacuggcagaugagauu

SEQ ID NO: 2072850 - RNA, 19 nt, Homo sapiens
  misc_RNA (1)...(19): siRNA sense strand
gaauuacauuggcaggaua

SEQ ID NO: 2072851 - RNA, 19 nt, Homo sapiens
  misc_RNA (1)...(19): siRNA sense strand
gcaggcagcucugggauga

SEQ ID NO: 2072852 - RNA, 19 nt, Homo sapiens
  misc_RNA (1)...(19): siRNA sense strand
gacaugagcugcccaacau

SEQ ID NO: 2072853 - RNA, 19 nt, Homo sapiens
  misc_RNA (1)...(19): siRNA sense strand
cacagaaacuggcagauga

SEQ ID NO: 2072854 - RNA, 19 nt, Homo sapiens
  misc_RNA (1)...(19): siRNA sense strand
gaaagcucauguccacuga

SEQ ID NO: 2072855 - RNA, 19 nt, Homo sapiens
  misc_RNA (1)...(19): siRNA sense strand
gacaagguaugccguaaug

SEQ ID NO: 2072856 - RNA, 19 nt, Homo sapiens
  misc_RNA (1)...(19): siRNA sense strand
agaccuguccuauaaauua

SEQ ID NO: 2072857 - RNA, 19 nt, Homo sapiens
  misc_RNA (1)...(19): siRNA sense strand
gaacaaggacauauucuac

SEQ ID NO: 2072858 - RNA, 19 nt, Homo sapiens
  misc_RNA (1)...(19): siRNA sense strand
uuacgacgcugcacaguga

SEQ ID NO: 2072859 - RNA, 19 nt, Homo sapiens
  misc_RNA (1)...(19): siRNA sense strand
caucagcccucgccacuau

SEQ ID NO: 2072860 - RNA, 19 nt, Homo sapiens
  misc_RNA (1)...(19): siRNA sense strand
ucaaacagaucuacaaagg

SEQ ID NO: 2072861 - RNA, 19 nt, Homo sapiens
  misc_RNA (1)...(19): siRNA sense strand
gaaccagcagugacuuaua

SEQ ID NO: 2072862 - RNA, 19 nt, Homo sapiens
  misc_RNA (1)...(19): siRNA sense strand
gcaacucaacucaauguuu

SEQ ID NO: 2072863 - RNA, 19 nt, Homo sapiens
  misc_RNA (1)...(19): siRNA sense strand
ggaacaaggacauauucua

SEQ ID NO: 2072864 - RNA, 19 nt, Homo sapiens
  misc_RNA (1)...(19): siRNA sense strand
gaaccacaaccaucacaaa

SEQ ID NO: 2072865 - RNA, 19 nt, Homo sapiens
  misc_RNA (1)...(19): siRNA sense strand
caagucaaauugcgucuuc

SEQ ID NO: 2072866 - RNA, 19 nt, Homo sapiens
  misc_RNA (1)...(19): siRNA sense strand
gcgggaaagugaaagacua

SEQ ID NO: 2072867 - RNA, 19 nt, Homo sapiens
  misc_RNA (1)...(19): siRNA sense strand
aaccagcagugacuuauaa

SEQ ID NO: 2072868 - RNA, 19 nt, Homo sapiens
  misc_RNA (1)...(19): siRNA sense strand
caaggaugcugacacuaau

SEQ ID NO: 2072869 - RNA, 19 nt, Homo sapiens
  misc_RNA (1)...(19): siRNA sense strand
gcucaacguugcccuggaa

SEQ ID NO: 2072870 - RNA, 19 nt, Homo sapiens
  misc_RNA (1)...(19): siRNA sense strand
auccagaccuguccuauaa

SEQ ID NO: 2072871 - RNA, 19 nt, Homo sapiens
  misc_RNA (1)...(19): siRNA sense strand
ggagaugucagauaugaau

SEQ ID NO: 2072872 - RNA, 19 nt, Homo sapiens
  misc_RNA (1)...(19): siRNA sense strand
ucacagcccagacuccuua

SEQ ID NO: 2072873 - RNA, 19 nt, Homo sapiens
  misc_RNA (1)...(19): siRNA sense strand
ccacagugcuuucagacau

SEQ ID NO: 2072874 - RNA, 19 nt, Homo sapiens
  misc_RNA (1)...(19): siRNA sense strand
ggaaugagcgggagaucug

SEQ ID NO: 2072875 - RNA, 19 nt, Homo sapiens
  misc_RNA (1)...(19): siRNA sense strand
ucacaguggccauuauuaa

SEQ ID NO: 2072876 - RNA, 19 nt, Homo sapiens
  misc_RNA (1)...(19): siRNA sense strand
caaauugcgucuuccuauc

SEQ ID NO: 2072877 - RNA, 19 nt, Homo sapiens
  misc_RNA (1)...(19): siRNA sense strand
uaucaacacuacacacuca

SEQ ID NO: 2072878 - RNA, 19 nt, Homo sapiens
  misc_RNA (1)...(19): siRNA sense strand
gcucuacagugugcuauga

SEQ ID NO: 2072879 - RNA, 19 nt, Homo sapiens
  misc_RNA (1)...(19): siRNA sense strand
gauccagaccuguccuaua

SEQ ID NO: 2072880 - RNA, 19 nt, Homo sapiens
  misc_RNA (1)...(19): siRNA sense strand
gauggaaacuauggacaug

SEQ ID NO: 2072881 - RNA, 19 nt, Homo sapiens
  misc_RNA (1)...(19): siRNA sense strand
gaaaucaaccaagugaaug

SEQ ID NO: 2072882 - RNA, 19 nt, Homo sapiens
  misc_RNA (1)...(19): siRNA sense strand
gcacagaaacuggcagaug

SEQ ID NO: 2072883 - RNA, 19 nt, Homo sapiens
  misc_RNA (1)...(19): siRNA sense strand
cgagaaaugcugcggauga

SEQ ID NO: 2072884 - RNA, 19 nt, Homo sapiens
  misc_RNA (1)...(19): siRNA sense strand
cuacaagcaucagaagaaa

SEQ ID NO: 2072885 - RNA, 19 nt, Homo sapiens
  misc_RNA (1)...(19): siRNA sense strand
gaagucauccaccgagaga

SEQ ID NO: 2072886 - RNA, 19 nt, Homo sapiens
  misc_RNA (1)...(19): siRNA sense strand
ccagaccuguccuauaaau

SEQ ID NO: 2072887 - RNA, 19 nt, Homo sapiens
  misc_RNA (1)...(19): siRNA sense strand
uaaaccagaccaagucaaa

SEQ ID NO: 2072888 - RNA, 19 nt, Homo sapiens
  misc_RNA (1)...(19): siRNA sense strand
caacaucaccaaugcacuu

SEQ ID NO: 2072889 - RNA, 19 nt, Homo sapiens
  misc_RNA (1)...(19): siRNA sense strand
ggaaagcaacucaacucaa

SEQ ID NO: 2072890 - RNA, 19 nt, Homo sapiens
  misc_RNA (1)...(19): siRNA sense strand
gcaaggaacaaacaugaca

SEQ ID NO: 2072891 - RNA, 19 nt, Homo sapiens
  misc_RNA (1)...(19): siRNA sense strand
ggaacaaacaugacagaca

SEQ ID NO: 2072892 - RNA, 19 nt, Homo sapiens
  misc_RNA (1)...(19): siRNA sense strand
gcauuuggaugaagaacag

SEQ ID NO: 2072893 - RNA, 19 nt, Homo sapiens
  misc_RNA (1)...(19): siRNA sense strand
ccaagaugcauucaagauu

SEQ ID NO: 2072894 - RNA, 19 nt, Homo sapiens
  misc_RNA (1)...(19): siRNA sense strand
ugucagauaugaaugaaag

SEQ ID NO: 2072895 - RNA, 19 nt, Homo sapiens
  misc_RNA (1)...(19): siRNA sense strand
cagcagugauguuuauaca

SEQ ID NO: 2072896 - RNA, 19 nt, Homo sapiens
  misc_RNA (1)...(19): siRNA sense strand
aagaacaggugaaagaaca

SEQ ID NO: 2072897 - RNA, 19 nt, Homo sapiens
  misc_RNA (1)...(19): siRNA sense strand
gaaagaccuaauucagauu

SEQ ID NO: 2072898 - RNA, 19 nt, Homo sapiens
  misc_RNA (1)...(19): siRNA sense strand
gaugucagauaugaaugaa

SEQ ID NO: 2072899 - RNA, 19 nt, Homo sapiens
  misc_RNA (1)...(19): siRNA sense strand
gaaugaugauggcuaucug

SEQ ID NO: 2072900 - RNA, 19 nt, Homo sapiens
  misc_RNA (1)...(19): siRNA sense strand
ucagaaaucaaccaaguga

SEQ ID NO: 2072901 - RNA, 19 nt, Homo sapiens
  misc_RNA (1)...(19): siRNA sense strand
gaucuacaaaggcaagaaa

SEQ ID NO: 2072902 - RNA, 19 nt, Homo sapiens
  misc_RNA (1)...(19): siRNA sense strand
gcugacugcugccaaagga

SEQ ID NO: 2072903 - RNA, 19 nt, Homo sapiens
  misc_RNA (1)...(19): siRNA sense strand
ggacaugagcugcccaaca

SEQ ID NO: 2072904 - RNA, 19 nt, Homo sapiens
  misc_RNA (1)...(19): siRNA sense strand
cagcaaggaacaaacauga

SEQ ID NO: 2072905 - RNA, 19 nt, Homo sapiens
  misc_RNA (1)...(19): siRNA sense strand
gaaagaacaagugaagcuu

SEQ ID NO: 2072906 - RNA, 19 nt, Homo sapiens
  misc_RNA (1)...(19): siRNA sense strand
gaauagggaccagcuacaa

SEQ ID NO: 2072907 - RNA, 19 nt, Homo sapiens
  misc_RNA (1)...(19): siRNA sense strand
gaaagugaaagacuacucu

SEQ ID NO: 2072908 - RNA, 19 nt, Homo sapiens
  misc_RNA (1)...(19): siRNA sense strand
gggccagcauugacgauga

SEQ ID NO: 2072909 - RNA, 19 nt, Homo sapiens
  misc_RNA (1)...(19): siRNA sense strand
gagauucuauccuccaacu

SEQ ID NO: 2072910 - RNA, 19 nt, Homo sapiens
  misc_RNA (1)...(19): siRNA sense strand
ugagaacuguuggcauuug

SEQ ID NO: 2072911 - RNA, 19 nt, Homo sapiens
  misc_RNA (1)...(19): siRNA sense strand
ucauugaguuucuaagcaa

SEQ ID NO: 2072912 - RNA, 19 nt, Homo sapiens
  misc_RNA (1)...(19): siRNA sense strand
ccuaccagauugccauuga

SEQ ID NO: 2072913 - RNA, 19 nt, Homo sapiens
  misc_RNA (1)...(19): siRNA sense strand
gagaguguucccaugcaua

SEQ ID NO: 2072914 - RNA, 19 nt, Homo sapiens
  misc_RNA (1)...(19): siRNA sense strand
gcaagucggcuuucaucug

SEQ ID NO: 2072915 - RNA, 19 nt, Homo sapiens
  misc_RNA (1)...(19): siRNA sense strand
gagaaaugcugcggaugag

SEQ ID NO: 2072916 - RNA, 19 nt, Homo sapiens
  misc_RNA (1)...(19): siRNA sense strand
ccuucaagcuggccucauu

SEQ ID NO: 2072917 - RNA, 19 nt, Homo sapiens
  misc_RNA (1)...(19): siRNA sense strand
gagagaguguucccaugca

SEQ ID NO: 2072918 - RNA, 19 nt, Homo sapiens
  misc_RNA (1)...(19): siRNA sense strand
gaaagaacuguugcagaga

SEQ ID NO: 2072919 - RNA, 19 nt, Homo sapiens
  misc_RNA (1)...(19): siRNA sense strand
caucugaguggcacaguaa

SEQ ID NO: 2072920 - RNA, 19 nt, Homo sapiens
  misc_RNA (1)...(19): siRNA sense strand
acaaggacauauucuacug

SEQ ID NO: 2072921 - RNA, 19 nt, Homo sapiens
  misc_RNA (1)...(19): siRNA sense strand
gagaguucauugaguuucu

SEQ ID NO: 2072922 - RNA, 19 nt, Homo sapiens
  misc_RNA (1)...(19): siRNA sense strand
gaccuguccuauaaauuag

SEQ ID NO: 2072923 - RNA, 19 nt, Homo sapiens
  misc_RNA (1)...(19): siRNA sense strand
ccuggaggauggaaacuau

SEQ ID NO: 2072924 - RNA, 19 nt, Homo sapiens
  misc_RNA (1)...(19): siRNA sense strand
cuacugugcccauguggua

SEQ ID NO: 2072925 - RNA, 19 nt, Homo sapiens
  misc_RNA (1)...(19): siRNA sense strand
ucaaauugcgucuuccuau

SEQ ID NO: 2072926 - RNA, 19 nt, Homo sapiens
  misc_RNA (1)...(19): siRNA sense strand
ugaauuacauuggcaggau

SEQ ID NO: 2072927 - RNA, 19 nt, Homo sapiens
  misc_RNA (1)...(19): siRNA sense strand
gacgaacaguauucacuag

SEQ ID NO: 2072928 - RNA, 19 nt, Homo sapiens
  misc_RNA (1)...(19): siRNA sense strand
ggaugaagaacaggugaaa

SEQ ID NO: 2072929 - RNA, 19 nt, Homo sapiens
  misc_RNA (1)...(19): siRNA sense strand
guucaucgacaaccucaaa

SEQ ID NO: 2072930 - RNA, 19 nt, Homo sapiens
  misc_RNA (1)...(19): siRNA sense strand
ggacaagguaugccguaau

SEQ ID NO: 2072931 - RNA, 19 nt, Homo sapiens
  misc_RNA (1)...(19): siRNA sense strand
cuggagaugucagauauga

SEQ ID NO: 2072932 - RNA, 19 nt, Homo sapiens
  misc_RNA (1)...(19): siRNA sense strand
acucagaaaucaaccaagu

SEQ ID NO: 2072933 - RNA, 19 nt, Homo sapiens
  misc_RNA (1)...(19): siRNA sense strand
caccaucaaugccuauauc

SEQ ID NO: 2072934 - RNA, 19 nt, Homo sapiens
  misc_RNA (1)...(19): siRNA sense strand
ggcccaagaugcauucaag

SEQ ID NO: 2072935 - RNA, 19 nt, Homo sapiens
  misc_RNA (1)...(19): siRNA sense strand
caauacagaagcacauuca

SEQ ID NO: 2072936 - RNA, 19 nt, Homo sapiens
  misc_RNA (1)...(19): siRNA sense strand
gaacuguugcagagaggaa

SEQ ID NO: 2072937 - RNA, 19 nt, Homo sapiens
  misc_RNA (1)...(19): siRNA sense strand
acaagcaucagaagaaaga

SEQ ID NO: 2072938 - RNA, 19 nt, Homo sapiens
  misc_RNA (1)...(19): siRNA sense strand
gcagccggauuccuuacug

SEQ ID NO: 2072939 - RNA, 19 nt, Homo sapiens
  misc_RNA (1)...(19): siRNA sense strand
cgaacaguauucacuagag

SEQ ID NO: 2072940 - RNA, 19 nt, Homo sapiens
  misc_RNA (1)...(19): siRNA sense strand
agaccaagacgaacaguau

SEQ ID NO: 2072941 - RNA, 19 nt, Homo sapiens
  misc_RNA (1)...(19): siRNA sense strand
gaaaugugguccggaauaa

SEQ ID NO: 2072942 - RNA, 19 nt, Homo sapiens
  misc_RNA (1)...(19): siRNA sense strand
ccagagcucuucuuucuaa

SEQ ID NO: 2072943 - RNA, 19 nt, Homo sapiens
  misc_RNA (1)...(19): siRNA sense strand
ggaaaugugguccggaaua

SEQ ID NO: 2072944 - RNA, 19 nt, Homo sapiens
  misc_RNA (1)...(19): siRNA sense strand
ggaauaagcaguggcugua

SEQ ID NO: 2072945 - RNA, 19 nt, Homo sapiens
  misc_RNA (1)...(19): siRNA sense strand
agucagagauuaugcagaa

SEQ ID NO: 2072946 - RNA, 19 nt, Homo sapiens
  misc_RNA (1)...(19): siRNA sense strand
gaagguaggacuagguuca

SEQ ID NO: 2072947 - RNA, 19 nt, Homo sapiens
  misc_RNA (1)...(19): siRNA sense strand
caacgcuacugauggaaau

SEQ ID NO: 2072948 - RNA, 19 nt, Homo sapiens
  misc_RNA (1)...(19): siRNA sense strand
gugcaucuguuucuucugu

SEQ ID NO: 2072949 - RNA, 19 nt, Homo sapiens
  misc_RNA (1)...(19): siRNA sense strand
gcagaaggaauugaaguug

SEQ ID NO: 2072950 - RNA, 19 nt, Homo sapiens
  misc_RNA (1)...(19): siRNA sense strand
ggacuagguucagacuugu

SEQ ID NO: 2072951 - RNA, 19 nt, Homo sapiens
  misc_RNA (1)...(19): siRNA sense strand
ucucaacgcuacugaugga

SEQ ID NO: 2072952 - RNA, 19 nt, Homo sapiens
  misc_RNA (1)...(19): siRNA sense strand
aauugaaguugcugcagua

SEQ ID NO: 2072953 - RNA, 19 nt, Homo sapiens
  misc_RNA (1)...(19): siRNA sense strand
cuccagagcucuucuuucu

SEQ ID NO: 2072954 - RNA, 19 nt, Homo sapiens
  misc_RNA (1)...(19): siRNA sense strand
ugaaguugcugcaguacca

SEQ ID NO: 2072955 - RNA, 19 nt, Homo sapiens
  misc_RNA (1)...(19): siRNA sense strand
ugggaggagucagagauua

SEQ ID NO: 2072956 - RNA, 19 nt, Homo sapiens
  misc_RNA (1)...(19): siRNA sense strand
aggacuagguucagacuug

SEQ ID NO: 2072957 - RNA, 19 nt, Homo sapiens
  misc_RNA (1)...(19): siRNA sense strand
cagagauuaugcagaagga

SEQ ID NO: 2072958 - RNA, 19 nt, Homo sapiens
  misc_RNA (1)...(19): siRNA sense strand
ggaccuuuccuuucucugu

SEQ ID NO: 2072959 - RNA, 19 nt, Homo sapiens
  misc_RNA (1)...(19): siRNA sense strand
gagauuaugcagaaggaau

SEQ ID NO: 2072960 - RNA, 19 nt, Homo sapiens
  misc_RNA (1)...(19): siRNA sense strand
gggaggagucagagauuau

SEQ ID NO: 2072961 - RNA, 19 nt, Homo sapiens
  misc_RNA (1)...(19): siRNA sense strand
gaauaagcaguggcuguau

SEQ ID NO: 2072962 - RNA, 19 nt, Homo sapiens
  misc_RNA (1)...(19): siRNA sense strand
gcaucuguuucuucuguag

SEQ ID NO: 2072963 - RNA, 19 nt, Homo sapiens
  misc_RNA (1)...(19): siRNA sense strand
accaggagcugcugcugaa

SEQ ID NO: 2072964 - RNA, 19 nt, Homo sapiens
  misc_RNA (1)...(19): siRNA sense strand
ggucuccaccgcagaauag

SEQ ID NO: 2072965 - RNA, 19 nt, Homo sapiens
  misc_RNA (1)...(19): siRNA sense strand
ggaggagucagagauuaug

SEQ ID NO: 2072966 - RNA, 19 nt, Homo sapiens
  misc_RNA (1)...(19): siRNA sense strand
gguuugagcagcuggaugu

SEQ ID NO: 2072967 - RNA, 19 nt, Homo sapiens
  misc_RNA (1)...(19): siRNA sense strand
aauaagcaguggcuguauc

SEQ ID NO: 2072968 - RNA, 19 nt, Homo sapiens
  misc_RNA (1)...(19): siRNA sense strand
gguuggcaguuggaaggua

SEQ ID NO: 2072969 - RNA, 19 nt, Homo sapiens
  misc_RNA (1)...(19): siRNA sense strand
auacgagccucagcugguu

SEQ ID NO: 2072970 - RNA, 19 nt, Homo sapiens
  misc_RNA (1)...(19): siRNA sense strand
uagcaguggcuguaucuuc

SEQ ID NO: 2072971 - RNA, 19 nt, Homo sapiens
  misc_RNA (1)...(19): siRNA sense strand
ugucuucauuccucucuuc

SEQ ID NO: 2072972 - RNA, 19 nt, Homo sapiens
  misc_RNA (1)...(19): siRNA sense strand
caguggcuguaucuucuug

SEQ ID NO: 2072973 - RNA, 19 nt, Homo sapiens
  misc_RNA (1)...(19): siRNA sense strand
ucaacgcuacugauggaaa

SEQ ID NO: 2072974 - RNA, 19 nt, Homo sapiens
  misc_RNA (1)...(19): siRNA sense strand
agaaggaauugaaguugcu

SEQ ID NO: 2072975 - RNA, 19 nt, Homo sapiens
  misc_RNA (1)...(19): siRNA sense strand
acuugucucugcauauuuc

SEQ ID NO: 2072976 - RNA, 19 nt, Homo sapiens
  misc_RNA (1)...(19): siRNA sense strand
caguggcuguauccucuug

SEQ ID NO: 2072977 - RNA, 19 nt, Homo sapiens
  misc_RNA (1)...(19): siRNA sense strand
gcagcuggaugugcuucuc

SEQ ID NO: 2072978 - RNA, 19 nt, Homo sapiens
  misc_RNA (1)...(19): siRNA sense strand
aggcucagguuggcaguug

SEQ ID NO: 2072979 - RNA, 19 nt, Homo sapiens
  misc_RNA (1)...(19): siRNA sense strand
agauuaugcagaaggaauu

SEQ ID NO: 2072980 - RNA, 19 nt, Homo sapiens
  misc_RNA (1)...(19): siRNA sense strand
ucgcagagcugaagcagaa

SEQ ID NO: 2072981 - RNA, 19 nt, Homo sapiens
  misc_RNA (1)...(19): siRNA sense strand
ggauagaggugccagaucu

SEQ ID NO: 2072982 - RNA, 19 nt, Homo sapiens
  misc_RNA (1)...(19): siRNA sense strand
cagcacgccugccauguuu

SEQ ID NO: 2072983 - RNA, 19 nt, Homo sapiens
  misc_RNA (1)...(19): siRNA sense strand
ucccagagcugcagauaga

SEQ ID NO: 2072984 - RNA, 19 nt, Homo sapiens
  misc_RNA (1)...(19): siRNA sense strand
cauaucaggugugugcaua

SEQ ID NO: 2072985 - RNA, 19 nt, Homo sapiens
  misc_RNA (1)...(19): siRNA sense strand
uacaagagcugaccguauc

SEQ ID NO: 2072986 - RNA, 19 nt, Homo sapiens
  misc_RNA (1)...(19): siRNA sense strand
ccagacagcagcccaugua

SEQ ID NO: 2072987 - RNA, 19 nt, Homo sapiens
  misc_RNA (1)...(19): siRNA sense strand
uagaaaucauugcugacua

SEQ ID NO: 2072988 - RNA, 19 nt, Homo sapiens
  misc_RNA (1)...(19): siRNA sense strand
ccucaugacuguguaccua

SEQ ID NO: 2072989 - RNA, 19 nt, Homo sapiens
  misc_RNA (1)...(19): siRNA sense strand
cagaaaaccucaugacugu

SEQ ID NO: 2072990 - RNA, 19 nt, Homo sapiens
  misc_RNA (1)...(19): siRNA sense strand
gaaagucgcagagcugaag

SEQ ID NO: 2072991 - RNA, 19 nt, Homo sapiens
  misc_RNA (1)...(19): siRNA sense strand
gcacgccugccauguuuga

SEQ ID NO: 2072992 - RNA, 19 nt, Homo sapiens
  misc_RNA (1)...(19): siRNA sense strand
caggagcgcuacucagaag

SEQ ID NO: 2072993 - RNA, 19 nt, Homo sapiens
  misc_RNA (1)...(19): siRNA sense strand
agaaaucauugcugacuac

SEQ ID NO: 2072994 - RNA, 19 nt, Homo sapiens
  misc_RNA (1)...(19): siRNA sense strand
cagguggcaugguacaaug

SEQ ID NO: 2072995 - RNA, 19 nt, Homo sapiens
  misc_RNA (1)...(19): siRNA sense strand
ccagagcugcagauagaaa

SEQ ID NO: 2072996 - RNA, 19 nt, Homo sapiens
  misc_RNA (1)...(19): siRNA sense strand
ccucagagaagccuaguuc

SEQ ID NO: 2072997 - RNA, 19 nt, Homo sapiens
  misc_RNA (1)...(19): siRNA sense strand
gagcugccaccuccgaaug

SEQ ID NO: 2072998 - RNA, 19 nt, Homo sapiens
  misc_RNA (1)...(19): siRNA sense strand
gcagauagaaaucauugcu

SEQ ID NO: 2072999 - RNA, 19 nt, Homo sapiens
  misc_RNA (1)...(19): siRNA sense strand
uaccaucugggccguguua

SEQ ID NO: 2073000 - RNA, 19 nt, Homo sapiens
  misc_RNA (1)...(19): siRNA sense strand
gcagagcugaagcagaaga

SEQ ID NO: 2073001 - RNA, 19 nt, Homo sapiens
  misc_RNA (1)...(19): siRNA sense strand
cuacaagagcugaccguau

SEQ ID NO: 2073002 - RNA, 19 nt, Homo sapiens
  misc_RNA (1)...(19): siRNA sense strand
gaaaaccucaugacugugu

SEQ ID NO: 2073003 - RNA, 19 nt, Homo sapiens
  misc_RNA (1)...(19): siRNA sense strand
ccaagaagccugggaaucc

SEQ ID NO: 2073004 - RNA, 19 nt, Homo sapiens
  misc_RNA (1)...(19): siRNA sense strand
gaucgaggacacgcuaugu

SEQ ID NO: 2073005 - RNA, 19 nt, Homo sapiens
  misc_RNA (1)...(19): siRNA sense strand
uaucaggugugugcauaca

SEQ ID NO: 2073006 - RNA, 19 nt, Homo sapiens
  misc_RNA (1)...(19): siRNA sense strand
gacagcagcccauguagcu

SEQ ID NO: 2073007 - RNA, 19 nt, Homo sapiens
  misc_RNA (1)...(19): siRNA sense strand
gagcugcagauagaaauca

SEQ ID NO: 2073008 - RNA, 19 nt, Homo sapiens
  misc_RNA (1)...(19): siRNA sense strand
cagcgcauaucaggugugu

SEQ ID NO: 2073009 - RNA, 19 nt, Homo sapiens
  misc_RNA (1)...(19): siRNA sense strand
uuaccgggaugcugugaca

SEQ ID NO: 2073010 - RNA, 19 nt, Homo sapiens
  misc_RNA (1)...(19): siRNA sense strand
ucagcacgccugccauguu

SEQ ID NO: 2073011 - RNA, 19 nt, Homo sapiens
  misc_RNA (1)...(19): siRNA sense strand
aauuuccacuggcgugauu

SEQ ID NO: 2073012 - RNA, 19 nt, Homo sapiens
  misc_RNA (1)...(19): siRNA sense strand
ccuuccagguggcauggua

SEQ ID NO: 2073013 - RNA, 19 nt, Homo sapiens
  misc_RNA (1)...(19): siRNA sense strand
ccaggagcgcuacucagaa

SEQ ID NO: 2073014 - RNA, 19 nt, Homo sapiens
  misc_RNA (1)...(19): siRNA sense strand
ccguaucgcccuacucgaa

SEQ ID NO: 2073015 - RNA, 19 nt, Homo sapiens
  misc_RNA (1)...(19): siRNA sense strand
cccaggagcgcuacucaga

SEQ ID NO: 2073016 - RNA, 19 nt, Homo sapiens
  misc_RNA (1)...(19): siRNA sense strand
cugcagauagaaaucauug

SEQ ID NO: 2073017 - RNA, 19 nt, Homo sapiens
  misc_RNA (1)...(19): siRNA sense strand
gaccuacccuggccuuccu

SEQ ID NO: 2073018 - RNA, 19 nt, Homo sapiens
  misc_RNA (1)...(19): siRNA sense strand
gcagaaguuugaccuguuu

SEQ ID NO: 2073019 - RNA, 19 nt, Homo sapiens
  misc_RNA (1)...(19): siRNA sense strand
gcaaaugauucugagcuaa

SEQ ID NO: 2073020 - RNA, 19 nt, Homo sapiens
  misc_RNA (1)...(19): siRNA sense strand
gcacugaacaucgaguuua

SEQ ID NO: 2073021 - RNA, 19 nt, Homo sapiens
  misc_RNA (1)...(19): siRNA sense strand
ggacgccgcuggauaucuu

SEQ ID NO: 2073022 - RNA, 19 nt, Homo sapiens
  misc_RNA (1)...(19): siRNA sense strand
ggaagacccucugcucuca

SEQ ID NO: 2073023 - RNA, 19 nt, Homo sapiens
  misc_RNA (1)...(19): siRNA sense strand
gcucucagccgccucauuu

SEQ ID NO: 2073024 - RNA, 19 nt, Homo sapiens
  misc_RNA (1)...(19): siRNA sense strand
gcagaggcgucagcaaaug

SEQ ID NO: 2073025 - RNA, 19 nt, Homo sapiens
  misc_RNA (1)...(19): siRNA sense strand
ggucccaggucguggcaua

SEQ ID NO: 2073026 - RNA, 19 nt, Homo sapiens
  misc_RNA (1)...(19): siRNA sense strand
gaaagcagcacugaacauc

SEQ ID NO: 2073027 - RNA, 19 nt, Homo sapiens
  misc_RNA (1)...(19): siRNA sense strand
cagcagaggcgucagcaaa

SEQ ID NO: 2073028 - RNA, 19 nt, Homo sapiens
  misc_RNA (1)...(19): siRNA sense strand
gccgagagguuacacaagu

SEQ ID NO: 2073029 - RNA, 19 nt, Homo sapiens
  misc_RNA (1)...(19): siRNA sense strand
ccaaguugcagaaguuuga

SEQ ID NO: 2073030 - RNA, 19 nt, Homo sapiens
  misc_RNA (1)...(19): siRNA sense strand
gcucagggcaggacuggaa

SEQ ID NO: 2073031 - RNA, 19 nt, Homo sapiens
  misc_RNA (1)...(19): siRNA sense strand
aguuugaccuguuuccuaa

SEQ ID NO: 2073032 - RNA, 19 nt, Homo sapiens
  misc_RNA (1)...(19): siRNA sense strand
acacaagucuacgcagaga

SEQ ID NO: 2073033 - RNA, 19 nt, Homo sapiens
  misc_RNA (1)...(19): siRNA sense strand
aagcagcacugaacaucga

SEQ ID NO: 2073034 - RNA, 19 nt, Homo sapiens
  misc_RNA (1)...(19): siRNA sense strand
ggaaagcagcacugaacau

SEQ ID NO: 2073035 - RNA, 19 nt, Homo sapiens
  misc_RNA (1)...(19): siRNA sense strand
cccagaagccgagagguua

SEQ ID NO: 2073036 - RNA, 19 nt, Homo sapiens
  misc_RNA (1)...(19): siRNA sense strand
gcccaacuguagaaaauuu

SEQ ID NO: 2073037 - RNA, 19 nt, Homo sapiens
  misc_RNA (1)...(19): siRNA sense strand
caaaugauucugagcuaag

SEQ ID NO: 2073038 - RNA, 19 nt, Homo sapiens
  misc_RNA (1)...(19): siRNA sense strand
aaaugauucugagcuaaga

SEQ ID NO: 2073039 - RNA, 19 nt, Homo sapiens
  misc_RNA (1)...(19): siRNA sense strand
gcccaacgccagucacuuc

SEQ ID NO: 2073040 - RNA, 19 nt, Homo sapiens
  misc_RNA (1)...(19): siRNA sense strand
aggccaaguugcagaaguu

SEQ ID NO: 2073041 - RNA, 19 nt, Homo sapiens
  misc_RNA (1)...(19): siRNA sense strand
agcaaaugauucugagcua

SEQ ID NO: 2073042 - RNA, 19 nt, Homo sapiens
  misc_RNA (1)...(19): siRNA sense strand
gaggccaaguugcagaagu

SEQ ID NO: 2073043 - RNA, 19 nt, Homo sapiens
  misc_RNA (1)...(19): siRNA sense strand
ggagcgaguaaccagcuuu

SEQ ID NO: 2073044 - RNA, 19 nt, Homo sapiens
  misc_RNA (1)...(19): siRNA sense strand
cccauggacuacgccuuua

SEQ ID NO: 2073045 - RNA, 19 nt, Homo sapiens
  misc_RNA (1)...(19): siRNA sense strand
cagaggcgucagcaaauga

SEQ ID NO: 2073046 - RNA, 19 nt, Homo sapiens
  misc_RNA (1)...(19): siRNA sense strand
ugcagaaguuugaccuguu

SEQ ID NO: 2073047 - RNA, 19 nt, Homo sapiens
  misc_RNA (1)...(19): siRNA sense strand
gggcccaacuguagaaaau

SEQ ID NO: 2073048 - RNA, 19 nt, Homo sapiens
  misc_RNA (1)...(19): siRNA sense strand
gcgcuccggagaagcagua

SEQ ID NO: 2073049 - RNA, 19 nt, Homo sapiens
  misc_RNA (1)...(19): siRNA sense strand
guccguuuauggccaguug

SEQ ID NO: 2073050 - RNA, 19 nt, Homo sapiens
  misc_RNA (1)...(19): siRNA sense strand
guacgggccuauggucaac

SEQ ID NO: 2073051 - RNA, 19 nt, Homo sapiens
  misc_RNA (1)...(19): siRNA sense strand
gggaaagcagcacugaaca

SEQ ID NO: 2073052 - RNA, 19 nt, Homo sapiens
  misc_RNA (1)...(19): siRNA sense strand
uuugaccuguuuccuaaga

SEQ ID NO: 2073053 - RNA, 19 nt, Homo sapiens
  misc_RNA (1)...(19): siRNA sense strand
agaguacgcguguggaugu

SEQ ID NO: 2073054 - RNA, 19 nt, Homo sapiens
  misc_RNA (1)...(19): siRNA sense strand
guuuacagggcacagcuaa

SEQ ID NO: 2073055 - RNA, 19 nt, Homo sapiens
  misc_RNA (1)...(19): siRNA sense strand
gggagcgaguaaccagcuu

SEQ ID NO: 2073056 - RNA, 19 nt, Homo sapiens
  misc_RNA (1)...(19): siRNA sense strand
uagcucgggccuccaaaga

SEQ ID NO: 2073057 - RNA, 19 nt, Homo sapiens
  misc_RNA (1)...(19): siRNA sense strand
cacugaacaucgaguuuac

SEQ ID NO: 2073058 - RNA, 19 nt, Homo sapiens
  misc_RNA (1)...(19): siRNA sense strand
gagagguuacacaagucua

SEQ ID NO: 2073059 - RNA, 19 nt, Homo sapiens
  misc_RNA (1)...(19): siRNA sense strand
gaugguaacuucauucuaa

SEQ ID NO: 2073060 - RNA, 19 nt, Homo sapiens
  misc_RNA (1)...(19): siRNA sense strand
ggaaaucucuacccacaga

SEQ ID NO: 2073061 - RNA, 19 nt, Homo sapiens
  misc_RNA (1)...(19): siRNA sense strand
gagcaucucugccaaugaa

SEQ ID NO: 2073062 - RNA, 19 nt, Homo sapiens
  misc_RNA (1)...(19): siRNA sense strand
gaagaggccaucaaacuuu

SEQ ID NO: 2073063 - RNA, 19 nt, Homo sapiens
  misc_RNA (1)...(19): siRNA sense strand
ggaaauggaauaugaaugu

SEQ ID NO: 2073064 - RNA, 19 nt, Homo sapiens
  misc_RNA (1)...(19): siRNA sense strand
ggacgacgaaguggaauua

SEQ ID NO: 2073065 - RNA, 19 nt, Homo sapiens
  misc_RNA (1)...(19): siRNA sense strand
cgacgaaguggaauuauuu

SEQ ID NO: 2073066 - RNA, 19 nt, Homo sapiens
  misc_RNA (1)...(19): siRNA sense strand
gaaacucacggaugggaua

SEQ ID NO: 2073067 - RNA, 19 nt, Homo sapiens
  misc_RNA (1)...(19): siRNA sense strand
ccaccuacauuuacaugaa

SEQ ID NO: 2073068 - RNA, 19 nt, Homo sapiens
  misc_RNA (1)...(19): siRNA sense strand
gagcuggcccugcugcuua

SEQ ID NO: 2073069 - RNA, 19 nt, Homo sapiens
  misc_RNA (1)...(19): siRNA sense strand
caucaaaggcggcaucaaa

SEQ ID NO: 2073070 - RNA, 19 nt, Homo sapiens
  misc_RNA (1)...(19): siRNA sense strand
gcagauccauggucucauc

SEQ ID NO: 2073071 - RNA, 19 nt, Homo sapiens
  misc_RNA (1)...(19): siRNA sense strand
gagcugauguggugcuuca

SEQ ID NO: 2073072 - RNA, 19 nt, Homo sapiens
  misc_RNA (1)...(19): siRNA sense strand
gauuaaauaugaccacuac

SEQ ID NO: 2073073 - RNA, 19 nt, Homo sapiens
  misc_RNA (1)...(19): siRNA sense strand
gaugggauacuugagauua

SEQ ID NO: 2073074 - RNA, 19 nt, Homo sapiens
  misc_RNA (1)...(19): siRNA sense strand
ggauugaagucauuaaagg

SEQ ID NO: 2073075 - RNA, 19 nt, Homo sapiens
  misc_RNA (1)...(19): siRNA sense strand
aaaggaaucagauguguuu

SEQ ID NO: 2073076 - RNA, 19 nt, Homo sapiens
  misc_RNA (1)...(19): siRNA sense strand
ggaaucagauguguuuuaa

SEQ ID NO: 2073077 - RNA, 19 nt, Homo sapiens
  misc_RNA (1)...(19): siRNA sense strand
gaaaggcccaggugacuuc

SEQ ID NO: 2073078 - RNA, 19 nt, Homo sapiens
  misc_RNA (1)...(19): siRNA sense strand
gaagagaaggaaaugaugu

SEQ ID NO: 2073079 - RNA, 19 nt, Homo sapiens
  misc_RNA (1)...(19): siRNA sense strand
cugaagagaugcuggagaa

SEQ ID NO: 2073080 - RNA, 19 nt, Homo sapiens
  misc_RNA (1)...(19): siRNA sense strand
gcucaagauugcugggaaa

SEQ ID NO: 2073081 - RNA, 19 nt, Homo sapiens
  misc_RNA (1)...(19): siRNA sense strand
aaacgaagaggccaucaaa

SEQ ID NO: 2073082 - RNA, 19 nt, Homo sapiens
  misc_RNA (1)...(19): siRNA sense strand
ucucaucaguguccuugua

SEQ ID NO: 2073083 - RNA, 19 nt, Homo sapiens
  misc_RNA (1)...(19): siRNA sense strand
agaaggaaaugauguacau

SEQ ID NO: 2073084 - RNA, 19 nt, Homo sapiens
  misc_RNA (1)...(19): siRNA sense strand
uaaauaugaccacuacuug

SEQ ID NO: 2073085 - RNA, 19 nt, Homo sapiens
  misc_RNA (1)...(19): siRNA sense strand
caaaggcggcaucaaaguu

SEQ ID NO: 2073086 - RNA, 19 nt, Homo sapiens
  misc_RNA (1)...(19): siRNA sense strand
gaaaggccugugucugaaa

SEQ ID NO: 2073087 - RNA, 19 nt, Homo sapiens
  misc_RNA (1)...(19): siRNA sense strand
gaacgaguacucaguggau

SEQ ID NO: 2073088 - RNA, 19 nt, Homo sapiens
  misc_RNA (1)...(19): siRNA sense strand
gaaauggaauaugaauguc

SEQ ID NO: 2073089 - RNA, 19 nt, Homo sapiens
  misc_RNA (1)...(19): siRNA sense strand
gaaccacccgcacuuugaa

SEQ ID NO: 2073090 - RNA, 19 nt, Homo sapiens
  misc_RNA (1)...(19): siRNA sense strand
gaaccaaggaaagcaugua

SEQ ID NO: 2073091 - RNA, 19 nt, Homo sapiens
  misc_RNA (1)...(19): siRNA sense strand
guaacuucauucuaaagga

SEQ ID NO: 2073092 - RNA, 19 nt, Homo sapiens
  misc_RNA (1)...(19): siRNA sense strand
ugaaaggccugugucugaa

SEQ ID NO: 2073093 - RNA, 19 nt, Homo sapiens
  misc_RNA (1)...(19): siRNA sense strand
uuauuuagcccauugcuuu

SEQ ID NO: 2073094 - RNA, 19 nt, Homo sapiens
  misc_RNA (1)...(19): siRNA sense strand
gugaggccaccuacauuua

SEQ ID NO: 2073095 - RNA, 19 nt, Homo sapiens
  misc_RNA (1)...(19): siRNA sense strand
cgaagaggccaucaaacuu

SEQ ID NO: 2073096 - RNA, 19 nt, Homo sapiens
  misc_RNA (1)...(19): siRNA sense strand
gaagagaugcuggagaaag

SEQ ID NO: 2073097 - RNA, 19 nt, Homo sapiens
  misc_RNA (1)...(19): siRNA sense strand
cacuaaggcugaagagaug

SEQ ID NO: 2073098 - RNA, 19 nt, Homo sapiens
  misc_RNA (1)...(19): siRNA sense strand
gagaaccacccgcacuuug

SEQ ID NO: 2073099 - RNA, 19 nt, Homo sapiens
  misc_RNA (1)...(19): siRNA sense strand
gaggauugaagucauuaaa

SEQ ID NO: 2073100 - RNA, 19 nt, Homo sapiens
  misc_RNA (1)...(19): siRNA sense strand
gccagugccugcucugaau

SEQ ID NO: 2073101 - RNA, 19 nt, Homo sapiens
  misc_RNA (1)...(19): siRNA sense strand
gaaacgaagaggccaucaa

SEQ ID NO: 2073102 - RNA, 19 nt, Homo sapiens
  misc_RNA (1)...(19): siRNA sense strand
ggagcaagacagaaacgaa

SEQ ID NO: 2073103 - RNA, 19 nt, Homo sapiens
  misc_RNA (1)...(19): siRNA sense strand
gaacauggugagcuucauc

SEQ ID NO: 2073104 - RNA, 19 nt, Homo sapiens
  misc_RNA (1)...(19): siRNA sense strand
ucucaaugaugguaacuuc

SEQ ID NO: 2073105 - RNA, 19 nt, Homo sapiens
  misc_RNA (1)...(19): siRNA sense strand
ggaaagcauguaccacuca

SEQ ID NO: 2073106 - RNA, 19 nt, Homo sapiens
  misc_RNA (1)...(19): siRNA sense strand
ucacuaaggcugaagagau

SEQ ID NO: 2073107 - RNA, 19 nt, Homo sapiens
  misc_RNA (1)...(19): siRNA sense strand
ucaaguugcuucagcuucu

SEQ ID NO: 2073108 - RNA, 19 nt, Homo sapiens
  misc_RNA (1)...(19): siRNA sense strand
gacgagugcuuggugaaau

SEQ ID NO: 2073109 - RNA, 19 nt, Homo sapiens
  misc_RNA (1)...(19): siRNA sense strand
gaugaaggaggcacagaug

SEQ ID NO: 2073110 - RNA, 19 nt, Homo sapiens
  misc_RNA (1)...(19): siRNA sense strand
gagaugcaggccaugauga

SEQ ID NO: 2073111 - RNA, 19 nt, Homo sapiens
  misc_RNA (1)...(19): siRNA sense strand
ggagucaaggacacacuuu

SEQ ID NO: 2073112 - RNA, 19 nt, Homo sapiens
  misc_RNA (1)...(19): siRNA sense strand
gagcagcccugaccuuccu

SEQ ID NO: 2073113 - RNA, 19 nt, Homo sapiens
  misc_RNA (1)...(19): siRNA sense strand
gauccauggucucaucagu

SEQ ID NO: 2073114 - RNA, 19 nt, Homo sapiens
  misc_RNA (1)...(19): siRNA sense strand
ggccugccaugcuagagaa

SEQ ID NO: 2073115 - RNA, 19 nt, Homo sapiens
  misc_RNA (1)...(19): siRNA sense strand
gauuaucacuaaggcugaa

SEQ ID NO: 2073116 - RNA, 19 nt, Homo sapiens
  misc_RNA (1)...(19): siRNA sense strand
ggccugaagcucaagauug

SEQ ID NO: 2073117 - RNA, 19 nt, Homo sapiens
  misc_RNA (1)...(19): siRNA sense strand
ggagaugcaggccaugaug

SEQ ID NO: 2073118 - RNA, 19 nt, Homo sapiens
  misc_RNA (1)...(19): siRNA sense strand
aguggaagauguccuacuu

SEQ ID NO: 2073119 - RNA, 19 nt, Homo sapiens
  misc_RNA (1)...(19): siRNA sense strand
uugaaaggccugugucuga

SEQ ID NO: 2073120 - RNA, 19 nt, Homo sapiens
  misc_RNA (1)...(19): siRNA sense strand
gaaacagcuaccagaccua

SEQ ID NO: 2073121 - RNA, 19 nt, Homo sapiens
  misc_RNA (1)...(19): siRNA sense strand
gagaacagcagcagaucca

SEQ ID NO: 2073122 - RNA, 19 nt, Homo sapiens
  misc_RNA (1)...(19): siRNA sense strand
uagaagagaaggaaaugau

SEQ ID NO: 2073123 - RNA, 19 nt, Homo sapiens
  misc_RNA (1)...(19): siRNA sense strand
gucauuauuuagcccauug

SEQ ID NO: 2073124 - RNA, 19 nt, Homo sapiens
  misc_RNA (1)...(19): siRNA sense strand
gccagaagggccacaaaga

SEQ ID NO: 2073125 - RNA, 19 nt, Homo sapiens
  misc_RNA (1)...(19): siRNA sense strand
acgacgaaguggaauuauu

SEQ ID NO: 2073126 - RNA, 19 nt, Homo sapiens
  misc_RNA (1)...(19): siRNA sense strand
gcagggaggauugaaguca

SEQ ID NO: 2073127 - RNA, 19 nt, Homo sapiens
  misc_RNA (1)...(19): siRNA sense strand
gaggccaccuacauuuaca

SEQ ID NO: 2073128 - RNA, 19 nt, Homo sapiens
  misc_RNA (1)...(19): siRNA sense strand
gggaagcagccgaaacuca

SEQ ID NO: 2073129 - RNA, 19 nt, Homo sapiens
  misc_RNA (1)...(19): siRNA sense strand
gaguagaagagaaggaaau

SEQ ID NO: 2073130 - RNA, 19 nt, Homo sapiens
  misc_RNA (1)...(19): siRNA sense strand
gacuaggaguagaagagaa

SEQ ID NO: 2073131 - RNA, 19 nt, Homo sapiens
  misc_RNA (1)...(19): siRNA sense strand
gccugaagcucaagauugc

SEQ ID NO: 2073132 - RNA, 19 nt, Homo sapiens
  misc_RNA (1)...(19): siRNA sense strand
gagaacauggugagcuuca

SEQ ID NO: 2073133 - RNA, 19 nt, Homo sapiens
  misc_RNA (1)...(19): siRNA sense strand
ggacacacuuucgaaucca

SEQ ID NO: 2073134 - RNA, 19 nt, Homo sapiens
  misc_RNA (1)...(19): siRNA sense strand
ucaaggacacacuuucgaa

SEQ ID NO: 2073135 - RNA, 19 nt, Homo sapiens
  misc_RNA (1)...(19): siRNA sense strand
ggagugaagcuugguguag

SEQ ID NO: 2073136 - RNA, 19 nt, Homo sapiens
  misc_RNA (1)...(19): siRNA sense strand
cuucuuaccuucauuucuc

SEQ ID NO: 2073137 - RNA, 19 nt, Homo sapiens
  misc_RNA (1)...(19): siRNA sense strand
aaauaugaccacuacuuga

SEQ ID NO: 2073138 - RNA, 19 nt, Homo sapiens
  misc_RNA (1)...(19): siRNA sense strand
ucacggaugggauacuuga

SEQ ID NO: 2073139 - RNA, 19 nt, Homo sapiens
  misc_RNA (1)...(19): siRNA sense strand
aagagaaggaaaugaugua

SEQ ID NO: 2073140 - RNA, 19 nt, Homo sapiens
  misc_RNA (1)...(19): siRNA sense strand
ucaccaaccaguucucaga

SEQ ID NO: 2073141 - RNA, 19 nt, Homo sapiens
  misc_RNA (1)...(19): siRNA sense strand
guucaguccucacaauacu

SEQ ID NO: 2073142 - RNA, 19 nt, Homo sapiens
  misc_RNA (1)...(19): siRNA sense strand
caaggacacacuuucgaau

SEQ ID NO: 2073143 - RNA, 19 nt, Homo sapiens
  misc_RNA (1)...(19): siRNA sense strand
aaaggccugugucugaaau

SEQ ID NO: 2073144 - RNA, 19 nt, Homo sapiens
  misc_RNA (1)...(19): siRNA sense strand
gagaaggaaaugauguaca

SEQ ID NO: 2073145 - RNA, 19 nt, Homo sapiens
  misc_RNA (1)...(19): siRNA sense strand
gagacuaggaguagaagag

SEQ ID NO: 2073146 - RNA, 19 nt, Homo sapiens
  misc_RNA (1)...(19): siRNA sense strand
ggaggauugaagucauuaa

SEQ ID NO: 2073147 - RNA, 19 nt, Homo sapiens
  misc_RNA (1)...(19): siRNA sense strand
gcuaccagaccuacaagga

SEQ ID NO: 2073148 - RNA, 19 nt, Homo sapiens
  misc_RNA (1)...(19): siRNA sense strand
acgagugcuuggugaaauu

SEQ ID NO: 2073149 - RNA, 19 nt, Homo sapiens
  misc_RNA (1)...(19): siRNA sense strand
gagaaaggcccaggugacu

SEQ ID NO: 2073150 - RNA, 19 nt, Homo sapiens
  misc_RNA (1)...(19): siRNA sense strand
aagagaugcuggagaaagg

SEQ ID NO: 2073151 - RNA, 19 nt, Homo sapiens
  misc_RNA (1)...(19): siRNA sense strand
gcccagagccuugcaugau

SEQ ID NO: 2073152 - RNA, 19 nt, Homo sapiens
  misc_RNA (1)...(19): siRNA sense strand
cgugaggccaccuacauuu

SEQ ID NO: 2073153 - RNA, 19 nt, Homo sapiens
  misc_RNA (1)...(19): siRNA sense strand
gaccuugggcccucaauac

SEQ ID NO: 2073154 - RNA, 19 nt, Homo sapiens
  misc_RNA (1)...(19): siRNA sense strand
guacugggaacgucaacau

SEQ ID NO: 2073155 - RNA, 19 nt, Homo sapiens
  misc_RNA (1)...(19): siRNA sense strand
ggaguagaagagaaggaaa

SEQ ID NO: 2073156 - RNA, 19 nt, Homo sapiens
  misc_RNA (1)...(19): siRNA sense strand
gaagcaguuccaccacaug

SEQ ID NO: 2073157 - RNA, 19 nt, Homo sapiens
  misc_RNA (1)...(19): siRNA sense strand
ucauuaaaggcaacauuga

SEQ ID NO: 2073158 - RNA, 19 nt, Homo sapiens
  misc_RNA (1)...(19): siRNA sense strand
gggaggauugaagucauua

SEQ ID NO: 2073159 - RNA, 19 nt, Homo sapiens
  misc_RNA (1)...(19): siRNA sense strand
gaucaacucuucaaacuaa

SEQ ID NO: 2073160 - RNA, 19 nt, Homo sapiens
  misc_RNA (1)...(19): siRNA sense strand
cacaaacucuccagaauuu

SEQ ID NO: 2073161 - RNA, 19 nt, Homo sapiens
  misc_RNA (1)...(19): siRNA sense strand
gagcaaaggcaucaaguuu

SEQ ID NO: 2073162 - RNA, 19 nt, Homo sapiens
  misc_RNA (1)...(19): siRNA sense strand
gaacucaacagcacagaaa

SEQ ID NO: 2073163 - RNA, 19 nt, Homo sapiens
  misc_RNA (1)...(19): siRNA sense strand
gaacacaaacucuccagaa

SEQ ID NO: 2073164 - RNA, 19 nt, Homo sapiens
  misc_RNA (1)...(19): siRNA sense strand
aaacagcuguggugaagaa

SEQ ID NO: 2073165 - RNA, 19 nt, Homo sapiens
  misc_RNA (1)...(19): siRNA sense strand
ucagaagccuuuguacaua

SEQ ID NO: 2073166 - RNA, 19 nt, Homo sapiens
  misc_RNA (1)...(19): siRNA sense strand
caaaguggcugcccucagu

SEQ ID NO: 2073167 - RNA, 19 nt, Homo sapiens
  misc_RNA (1)...(19): siRNA sense strand
cagaagccuuuguacauaa

SEQ ID NO: 2073168 - RNA, 19 nt, Homo sapiens
  misc_RNA (1)...(19): siRNA sense strand
ccgaugaccuggaugcuuu

SEQ ID NO: 2073169 - RNA, 19 nt, Homo sapiens
  misc_RNA (1)...(19): siRNA sense strand
ggaugaggcugaagaugau

SEQ ID NO: 2073170 - RNA, 19 nt, Homo sapiens
  misc_RNA (1)...(19): siRNA sense strand
caagcgggcuggagagcua

SEQ ID NO: 2073171 - RNA, 19 nt, Homo sapiens
  misc_RNA (1)...(19): siRNA sense strand
gcaaggcucggaugcauga

SEQ ID NO: 2073172 - RNA, 19 nt, Homo sapiens
  misc_RNA (1)...(19): siRNA sense strand
gagaaugagugugagauca

SEQ ID NO: 2073173 - RNA, 19 nt, Homo sapiens
  misc_RNA (1)...(19): siRNA sense strand
gcacaaaccacaggcaaga

SEQ ID NO: 2073174 - RNA, 19 nt, Homo sapiens
  misc_RNA (1)...(19): siRNA sense strand
gaaguuggcggcagacugu

SEQ ID NO: 2073175 - RNA, 19 nt, Homo sapiens
  misc_RNA (1)...(19): siRNA sense strand
gagaugacuuucccagcuu

SEQ ID NO: 2073176 - RNA, 19 nt, Homo sapiens
  misc_RNA (1)...(19): siRNA sense strand
gcagacagccguccugaca

SEQ ID NO: 2073177 - RNA, 19 nt, Homo sapiens
  misc_RNA (1)...(19): siRNA sense strand
cacggaaacugcaguauca

SEQ ID NO: 2073178 - RNA, 19 nt, Homo sapiens
  misc_RNA (1)...(19): siRNA sense strand
gcaagaaacagcuggagau

SEQ ID NO: 2073179 - RNA, 19 nt, Homo sapiens
  misc_RNA (1)...(19): siRNA sense strand
gaaagaucaaugaggauga

SEQ ID NO: 2073180 - RNA, 19 nt, Homo sapiens
  misc_RNA (1)...(19): siRNA sense strand
agcagaggcugaacaagua

SEQ ID NO: 2073181 - RNA, 19 nt, Homo sapiens
  misc_RNA (1)...(19): siRNA sense strand
gaaugagugugagaucaga

SEQ ID NO: 2073182 - RNA, 19 nt, Homo sapiens
  misc_RNA (1)...(19): siRNA sense strand
ccagcccguuucagacuua

SEQ ID NO: 2073183 - RNA, 19 nt, Homo sapiens
  misc_RNA (1)...(19): siRNA sense strand
uggagcggcuggagaauga

SEQ ID NO: 2073184 - RNA, 19 nt, Homo sapiens
  misc_RNA (1)...(19): siRNA sense strand
agaauuugaucaacucuuc

SEQ ID NO: 2073185 - RNA, 19 nt, Homo sapiens
  misc_RNA (1)...(19): siRNA sense strand
aggaagggcuggaggaaga

SEQ ID NO: 2073186 - RNA, 19 nt, Homo sapiens
  misc_RNA (1)...(19): siRNA sense strand
gcugagaccacccgauuug

SEQ ID NO: 2073187 - RNA, 19 nt, Homo sapiens
  misc_RNA (1)...(19): siRNA sense strand
gcacagcacaccugaaacu

SEQ ID NO: 2073188 - RNA, 19 nt, Homo sapiens
  misc_RNA (1)...(19): siRNA sense strand
ggaggagaacggccuagaa

SEQ ID NO: 2073189 - RNA, 19 nt, Homo sapiens
  misc_RNA (1)...(19): siRNA sense strand
acacaaacucuccagaauu

SEQ ID NO: 2073190 - RNA, 19 nt, Homo sapiens
  misc_RNA (1)...(19): siRNA sense strand
gcacggaaacugcaguauc

SEQ ID NO: 2073191 - RNA, 19 nt, Homo sapiens
  misc_RNA (1)...(19): siRNA sense strand
aggaacggauucacaacua

SEQ ID NO: 2073192 - RNA, 19 nt, Homo sapiens
  misc_RNA (1)...(19): siRNA sense strand
gggcauggaugaggcugaa

SEQ ID NO: 2073193 - RNA, 19 nt, Homo sapiens
  misc_RNA (1)...(19): siRNA sense strand
gccaagcaauaucaagaug

SEQ ID NO: 2073194 - RNA, 19 nt, Homo sapiens
  misc_RNA (1)...(19): siRNA sense strand
cgagagcucaugaggauug

SEQ ID NO: 2073195 - RNA, 19 nt, Homo sapiens
  misc_RNA (1)...(19): siRNA sense strand
agucaacuuugcugaauug

SEQ ID NO: 2073196 - RNA, 19 nt, Homo sapiens
  misc_RNA (1)...(19): siRNA sense strand
ggaacggauucacaacuac

SEQ ID NO: 2073197 - RNA, 19 nt, Homo sapiens
  misc_RNA (1)...(19): siRNA sense strand
cccgagagcucaugaggau

SEQ ID NO: 2073198 - RNA, 19 nt, Homo sapiens
  misc_RNA (1)...(19): siRNA sense strand
gaggagaggcagaaagauc

SEQ ID NO: 2073199 - RNA, 19 nt, Homo sapiens
  misc_RNA (1)...(19): siRNA sense strand
caacagcacagaaaugcau

SEQ ID NO: 2073200 - RNA, 19 nt, Homo sapiens
  misc_RNA (1)...(19): siRNA sense strand
gagaccacccgauuugaga

SEQ ID NO: 2073201 - RNA, 19 nt, Homo sapiens
  misc_RNA (1)...(19): siRNA sense strand
gcgcaaggcucggaugcau

SEQ ID NO: 2073202 - RNA, 19 nt, Homo sapiens
  misc_RNA (1)...(19): siRNA sense strand
ugaggagggugacuucauc

SEQ ID NO: 2073203 - RNA, 19 nt, Homo sapiens
  misc_RNA (1)...(19): siRNA sense strand
ugaagacauuccagacugu

SEQ ID NO: 2073204 - RNA, 19 nt, Homo sapiens
  misc_RNA (1)...(19): siRNA sense strand
gaggagaacggccuagaag

SEQ ID NO: 2073205 - RNA, 19 nt, Homo sapiens
  misc_RNA (1)...(19): siRNA sense strand
uggaugaggcugaagauga

SEQ ID NO: 2073206 - RNA, 19 nt, Homo sapiens
  misc_RNA (1)...(19): siRNA sense strand
ggagaacggccuagaagac

SEQ ID NO: 2073207 - RNA, 19 nt, Homo sapiens
  misc_RNA (1)...(19): siRNA sense strand
caaaacagcuguggugaag

SEQ ID NO: 2073208 - RNA, 19 nt, Homo sapiens
  misc_RNA (1)...(19): siRNA sense strand
agaaacagcuggagauccu

SEQ ID NO: 2073209 - RNA, 19 nt, Homo sapiens
  misc_RNA (1)...(19): siRNA sense strand
acagagagaguacaaagug

SEQ ID NO: 2073210 - RNA, 19 nt, Homo sapiens
  misc_RNA (1)...(19): siRNA sense strand
gugaggagaggcagaaaga

SEQ ID NO: 2073211 - RNA, 19 nt, Homo sapiens
  misc_RNA (1)...(19): siRNA sense strand
gagcaggacggaaagucaa

SEQ ID NO: 2073212 - RNA, 19 nt, Homo sapiens
  misc_RNA (1)...(19): siRNA sense strand
cgacagagagaguacaaag

SEQ ID NO: 2073213 - RNA, 19 nt, Homo sapiens
  misc_RNA (1)...(19): siRNA sense strand
aacacaaacucuccagaau

SEQ ID NO: 2073214 - RNA, 19 nt, Homo sapiens
  misc_RNA (1)...(19): siRNA sense strand
cccagggccucaaguucua

SEQ ID NO: 2073215 - RNA, 19 nt, Homo sapiens
  misc_RNA (1)...(19): siRNA sense strand
ccuggauggugaugaggua

SEQ ID NO: 2073216 - RNA, 19 nt, Homo sapiens
  misc_RNA (1)...(19): siRNA sense strand
uggcacagcacaccugaaa

SEQ ID NO: 2073217 - RNA, 19 nt, Homo sapiens
  misc_RNA (1)...(19): siRNA sense strand
gagaacggccuagaagaca

SEQ ID NO: 2073218 - RNA, 19 nt, Homo sapiens
  misc_RNA (1)...(19): siRNA sense strand
ggagaaugagugugagauc

SEQ ID NO: 2073219 - RNA, 19 nt, Homo sapiens
  misc_RNA (1)...(19): siRNA sense strand
ggaggaagggcuggaggaa

SEQ ID NO: 2073220 - RNA, 19 nt, Homo sapiens
  misc_RNA (1)...(19): siRNA sense strand
aacuaaacaucaaccgaaa

SEQ ID NO: 2073221 - RNA, 19 nt, Homo sapiens
  misc_RNA (1)...(19): siRNA sense strand
gcauggaugaggcugaaga

SEQ ID NO: 2073222 - RNA, 19 nt, Homo sapiens
  misc_RNA (1)...(19): siRNA sense strand
auuggcagcugcagagaaa

SEQ ID NO: 2073223 - RNA, 19 nt, Homo sapiens
  misc_RNA (1)...(19): siRNA sense strand
gaggcagaaagaucaauga

SEQ ID NO: 2073224 - RNA, 19 nt, Homo sapiens
  misc_RNA (1)...(19): siRNA sense strand
acuuugaguugaagacauu

SEQ ID NO: 2073225 - RNA, 19 nt, Homo sapiens
  misc_RNA (1)...(19): siRNA sense strand
caaggaggcaggcgaagca

SEQ ID NO: 2073226 - RNA, 19 nt, Homo sapiens
  misc_RNA (1)...(19): siRNA sense strand
gugcagauggucacugaga

SEQ ID NO: 2073227 - RNA, 19 nt, Homo sapiens
  misc_RNA (1)...(19): siRNA sense strand
gagcgagugcagccaguga

SEQ ID NO: 2073228 - RNA, 19 nt, Homo sapiens
  misc_RNA (1)...(19): siRNA sense strand
cacagcacccucagucauu

SEQ ID NO: 2073229 - RNA, 19 nt, Homo sapiens
  misc_RNA (1)...(19): siRNA sense strand
acaccgagcaggacggaaa

SEQ ID NO: 2073230 - RNA, 19 nt, Homo sapiens
  misc_RNA (1)...(19): siRNA sense strand
gccaggaugugcagauggu

SEQ ID NO: 2073231 - RNA, 19 nt, Homo sapiens
  misc_RNA (1)...(19): siRNA sense strand
ggagcugcaggaggucuua

SEQ ID NO: 2073232 - RNA, 19 nt, Homo sapiens
  misc_RNA (1)...(19): siRNA sense strand
gcucaggaccgcaagaaac

SEQ ID NO: 2073233 - RNA, 19 nt, Homo sapiens
  misc_RNA (1)...(19): siRNA sense strand
ggaguccacuauggguguu

SEQ ID NO: 2073234 - RNA, 19 nt, Homo sapiens
  misc_RNA (1)...(19): siRNA sense strand
ggaugaggagggugacuuc

SEQ ID NO: 2073235 - RNA, 19 nt, Homo sapiens
  misc_RNA (1)...(19): siRNA sense strand
ugugagaucagagaaauug

SEQ ID NO: 2073236 - RNA, 19 nt, Homo sapiens
  misc_RNA (1)...(19): siRNA sense strand
cagccucccuggcauuucu

SEQ ID NO: 2073237 - RNA, 19 nt, Homo sapiens
  misc_RNA (1)...(19): siRNA sense strand
ggagaggcagaaagaucaa

SEQ ID NO: 2073238 - RNA, 19 nt, Homo sapiens
  misc_RNA (1)...(19): siRNA sense strand
agucgcagcuagccucugu

SEQ ID NO: 2073239 - RNA, 19 nt, Homo sapiens
  misc_RNA (1)...(19): siRNA sense strand
agaugacuuucccagcuuu

SEQ ID NO: 2073240 - RNA, 19 nt, Homo sapiens
  misc_RNA (1)...(19): siRNA sense strand
aguuugagaucuuccacaa

SEQ ID NO: 2073241 - RNA, 19 nt, Homo sapiens
  misc_RNA (1)...(19): siRNA sense strand
ccacccaccacuuugaguu

SEQ ID NO: 2073242 - RNA, 19 nt, Homo sapiens
  misc_RNA (1)...(19): siRNA sense strand
caagaaacagcuggagauc

SEQ ID NO: 2073243 - RNA, 19 nt, Homo sapiens
  misc_RNA (1)...(19): siRNA sense strand
gaaggcggaggagguguau

SEQ ID NO: 2073244 - RNA, 19 nt, Homo sapiens
  misc_RNA (1)...(19): siRNA sense strand
ccacagcacccucagucau

SEQ ID NO: 2073245 - RNA, 19 nt, Homo sapiens
  misc_RNA (1)...(19): siRNA sense strand
aaagaucaaugaggaugag

SEQ ID NO: 2073246 - RNA, 19 nt, Homo sapiens
  misc_RNA (1)...(19): siRNA sense strand
uggcugagaccacccgauu

SEQ ID NO: 2073247 - RNA, 19 nt, Homo sapiens
  misc_RNA (1)...(19): siRNA sense strand
gagugugagaucagagaaa

SEQ ID NO: 2073248 - RNA, 19 nt, Homo sapiens
  misc_RNA (1)...(19): siRNA sense strand
caugaggauugggaagaga

SEQ ID NO: 2073249 - RNA, 19 nt, Homo sapiens
  misc_RNA (1)...(19): siRNA sense strand
agugugagaucagagaaau

SEQ ID NO: 2073250 - RNA, 19 nt, Homo sapiens
  misc_RNA (1)...(19): siRNA sense strand
gaauuugaucaacucuuca

SEQ ID NO: 2073251 - RNA, 19 nt, Homo sapiens
  misc_RNA (1)...(19): siRNA sense strand
gcaaaacagcuguggugaa

SEQ ID NO: 2073252 - RNA, 19 nt, Homo sapiens
  misc_RNA (1)...(19): siRNA sense strand
uggcccacaucgagaaguu

SEQ ID NO: 2073253 - RNA, 19 nt, Homo sapiens
  misc_RNA (1)...(19): siRNA sense strand
cuacagagucacagacagu

SEQ ID NO: 2073254 - RNA, 19 nt, Homo sapiens
  misc_RNA (1)...(19): siRNA sense strand
gaggaacggauucacaacu

SEQ ID NO: 2073255 - RNA, 19 nt, Homo sapiens
  misc_RNA (1)...(19): siRNA sense strand
agagggugauccagagcaa

SEQ ID NO: 2073256 - RNA, 19 nt, Homo sapiens
  misc_RNA (1)...(19): siRNA sense strand
ggaggaggaggaggaggaa

SEQ ID NO: 2073257 - RNA, 19 nt, Homo sapiens
  misc_RNA (1)...(19): siRNA sense strand
caacucuucaaacuaaaca

SEQ ID NO: 2073258 - RNA, 19 nt, Homo sapiens
  misc_RNA (1)...(19): siRNA sense strand
gcagauggucacugagaac

SEQ ID NO: 2073259 - RNA, 19 nt, Homo sapiens
  misc_RNA (1)...(19): siRNA sense strand
caacagacauguacagaua

SEQ ID NO: 2073260 - RNA, 19 nt, Homo sapiens
  misc_RNA (1)...(19): siRNA sense strand
ucacagagauguauuauug

SEQ ID NO: 2073261 - RNA, 19 nt, Homo sapiens
  misc_RNA (1)...(19): siRNA sense strand
gaggaaaugucaaagguua

SEQ ID NO: 2073262 - RNA, 19 nt, Homo sapiens
  misc_RNA (1)...(19): siRNA sense strand
caagaaugcuagcuacuua

SEQ ID NO: 2073263 - RNA, 19 nt, Homo sapiens
  misc_RNA (1)...(19): siRNA sense strand
gguuagagcugcuuaaauu

SEQ ID NO: 2073264 - RNA, 19 nt, Homo sapiens
  misc_RNA (1)...(19): siRNA sense strand
gaucacaucuuucgacuug

SEQ ID NO: 2073265 - RNA, 19 nt, Homo sapiens
  misc_RNA (1)...(19): siRNA sense strand
uaagagacauccagguuua

SEQ ID NO: 2073266 - RNA, 19 nt, Homo sapiens
  misc_RNA (1)...(19): siRNA sense strand
caaagcaguucaaguuaua

SEQ ID NO: 2073267 - RNA, 19 nt, Homo sapiens
  misc_RNA (1)...(19): siRNA sense strand
ggauuuggauuucgugaua

SEQ ID NO: 2073268 - RNA, 19 nt, Homo sapiens
  misc_RNA (1)...(19): siRNA sense strand
gaagaaagacagugaagaa

SEQ ID NO: 2073269 - RNA, 19 nt, Homo sapiens
  misc_RNA (1)...(19): siRNA sense strand
caacaaaccuuucuauacu

SEQ ID NO: 2073270 - RNA, 19 nt, Homo sapiens
  misc_RNA (1)...(19): siRNA sense strand
gcaaagcaguucaaguuau

SEQ ID NO: 2073271 - RNA, 19 nt, Homo sapiens
  misc_RNA (1)...(19): siRNA sense strand
gaacagcucuccaaauagg

SEQ ID NO: 2073272 - RNA, 19 nt, Homo sapiens
  misc_RNA (1)...(19): siRNA sense strand
gaggaaacgugucggagua

SEQ ID NO: 2073273 - RNA, 19 nt, Homo sapiens
  misc_RNA (1)...(19): siRNA sense strand
gaagaacgcuuagaaagag

SEQ ID NO: 2073274 - RNA, 19 nt, Homo sapiens
  misc_RNA (1)...(19): siRNA sense strand
gcaaaucuccuuuagcauu

SEQ ID NO: 2073275 - RNA, 19 nt, Homo sapiens
  misc_RNA (1)...(19): siRNA sense strand
cgagagaccucagauguuu

SEQ ID NO: 2073276 - RNA, 19 nt, Homo sapiens
  misc_RNA (1)...(19): siRNA sense strand
gagauggacuacuuagaaa

SEQ ID NO: 2073277 - RNA, 19 nt, Homo sapiens
  misc_RNA (1)...(19): siRNA sense strand
gaaagaacacagaaucauu

SEQ ID NO: 2073278 - RNA, 19 nt, Homo sapiens
  misc_RNA (1)...(19): siRNA sense strand
ggaaugcuuucuucuuuga

SEQ ID NO: 2073279 - RNA, 19 nt, Homo sapiens
  misc_RNA (1)...(19): siRNA sense strand
gaaccaaagaagaauguua

SEQ ID NO: 2073280 - RNA, 19 nt, Homo sapiens
  misc_RNA (1)...(19): siRNA sense strand
gaacauggaauaacagaug

SEQ ID NO: 2073281 - RNA, 19 nt, Homo sapiens
  misc_RNA (1)...(19): siRNA sense strand
gaaagacagugaagaagag

SEQ ID NO: 2073282 - RNA, 19 nt, Homo sapiens
  misc_RNA (1)...(19): siRNA sense strand
ccaaauaggaauaguagua

SEQ ID NO: 2073283 - RNA, 19 nt, Homo sapiens
  misc_RNA (1)...(19): siRNA sense strand
gaagagaaguuugugaagu

SEQ ID NO: 2073284 - RNA, 19 nt, Homo sapiens
  misc_RNA (1)...(19): siRNA sense strand
gaaacgauauggcaugucu

SEQ ID NO: 2073285 - RNA, 19 nt, Homo sapiens
  misc_RNA (1)...(19): siRNA sense strand
gauauggcaugucucacua

SEQ ID NO: 2073286 - RNA, 19 nt, Homo sapiens
  misc_RNA (1)...(19): siRNA sense strand
ccacgauacucgagacuuu

SEQ ID NO: 2073287 - RNA, 19 nt, Homo sapiens
  misc_RNA (1)...(19): siRNA sense strand
gaacuggcucccaaugaua

SEQ ID NO: 2073288 - RNA, 19 nt, Homo sapiens
  misc_RNA (1)...(19): siRNA sense strand
gcaagguugugcuuauuug

SEQ ID NO: 2073289 - RNA, 19 nt, Homo sapiens
  misc_RNA (1)...(19): siRNA sense strand
ccagucaagucgaacaaua

SEQ ID NO: 2073290 - RNA, 19 nt, Homo sapiens
  misc_RNA (1)...(19): siRNA sense strand
gcuaaguugugcuauauug

SEQ ID NO: 2073291 - RNA, 19 nt, Homo sapiens
  misc_RNA (1)...(19): siRNA sense strand
ucaccaaagucaccuaauu

SEQ ID NO: 2073292 - RNA, 19 nt, Homo sapiens
  misc_RNA (1)...(19): siRNA sense strand
gagcucagccaauguaauu

SEQ ID NO: 2073293 - RNA, 19 nt, Homo sapiens
  misc_RNA (1)...(19): siRNA sense strand
gcagugaaauagagccaaa

SEQ ID NO: 2073294 - RNA, 19 nt, Homo sapiens
  misc_RNA (1)...(19): siRNA sense strand
ggaagagucuaaaaccuua

SEQ ID NO: 2073295 - RNA, 19 nt, Homo sapiens
  misc_RNA (1)...(19): siRNA sense strand
ggacaggacucuucaucuc

SEQ ID NO: 2073296 - RNA, 19 nt, Homo sapiens
  misc_RNA (1)...(19): siRNA sense strand
ugucauauguguacggaua

SEQ ID NO: 2073297 - RNA, 19 nt, Homo sapiens
  misc_RNA (1)...(19): siRNA sense strand
caaaucuccuuuagcauug

SEQ ID NO: 2073298 - RNA, 19 nt, Homo sapiens
  misc_RNA (1)...(19): siRNA sense strand
ggagaaacgacauaagaaa

SEQ ID NO: 2073299 - RNA, 19 nt, Homo sapiens
  misc_RNA (1)...(19): siRNA sense strand
gaaacagacaaccaaagua

SEQ ID NO: 2073300 - RNA, 19 nt, Homo sapiens
  misc_RNA (1)...(19): siRNA sense strand
agaaggcgauaucaguuua

SEQ ID NO: 2073301 - RNA, 19 nt, Homo sapiens
  misc_RNA (1)...(19): siRNA sense strand
aaacagacaaccaaaguaa

SEQ ID NO: 2073302 - RNA, 19 nt, Homo sapiens
  misc_RNA (1)...(19): siRNA sense strand
gcugaguacuucuuugauu

SEQ ID NO: 2073303 - RNA, 19 nt, Homo sapiens
  misc_RNA (1)...(19): siRNA sense strand
ggaaaugucaaagguuaua

SEQ ID NO: 2073304 - RNA, 19 nt, Homo sapiens
  misc_RNA (1)...(19): siRNA sense strand
gaaggaagggaaugaagaa

SEQ ID NO: 2073305 - RNA, 19 nt, Homo sapiens
  misc_RNA (1)...(19): siRNA sense strand
gcagaagaacgcuuagaaa

SEQ ID NO: 2073306 - RNA, 19 nt, Homo sapiens
  misc_RNA (1)...(19): siRNA sense strand
cuucugaccuuaaugauga

SEQ ID NO: 2073307 - RNA, 19 nt, Homo sapiens
  misc_RNA (1)...(19): siRNA sense strand
ggucaaauuuagaaacaga

SEQ ID NO: 2073308 - RNA, 19 nt, Homo sapiens
  misc_RNA (1)...(19): siRNA sense strand
gaaauggacuguacaucac

SEQ ID NO: 2073309 - RNA, 19 nt, Homo sapiens
  misc_RNA (1)...(19): siRNA sense strand
ggacaaagugaauauugaa

SEQ ID NO: 2073310 - RNA, 19 nt, Homo sapiens
  misc_RNA (1)...(19): siRNA sense strand
caaauucccugguaaacag

SEQ ID NO: 2073311 - RNA, 19 nt, Homo sapiens
  misc_RNA (1)...(19): siRNA sense strand
gaaagauucccgagauguu

SEQ ID NO: 2073312 - RNA, 19 nt, Homo sapiens
  misc_RNA (1)...(19): siRNA sense strand
ggaagggaaugaagaagag

SEQ ID NO: 2073313 - RNA, 19 nt, Homo sapiens
  misc_RNA (1)...(19): siRNA sense strand
gcagagaagcugaguacuu

SEQ ID NO: 2073314 - RNA, 19 nt, Homo sapiens
  misc_RNA (1)...(19): siRNA sense strand
cagagaaagccaccuguua

SEQ ID NO: 2073315 - RNA, 19 nt, Homo sapiens
  misc_RNA (1)...(19): siRNA sense strand
caacauaacacaagaaugc

SEQ ID NO: 2073316 - RNA, 19 nt, Homo sapiens
  misc_RNA (1)...(19): siRNA sense strand
gcgaauagccauugaagau

SEQ ID NO: 2073317 - RNA, 19 nt, Homo sapiens
  misc_RNA (1)...(19): siRNA sense strand
gggcuaaguugugcuauau

SEQ ID NO: 2073318 - RNA, 19 nt, Homo sapiens
  misc_RNA (1)...(19): siRNA sense strand
uuaccagaauguucacuua

SEQ ID NO: 2073319 - RNA, 19 nt, Homo sapiens
  misc_RNA (1)...(19): siRNA sense strand
ugaaagacaugagacagaa

SEQ ID NO: 2073320 - RNA, 19 nt, Homo sapiens
  misc_RNA (1)...(19): siRNA sense strand
uaacacgucucacgaugga

SEQ ID NO: 2073321 - RNA, 19 nt, Homo sapiens
  misc_RNA (1)...(19): siRNA sense strand
gagaaagauucccgagaug

SEQ ID NO: 2073322 - RNA, 19 nt, Homo sapiens
  misc_RNA (1)...(19): siRNA sense strand
auagugaucuggauauuug

SEQ ID NO: 2073323 - RNA, 19 nt, Homo sapiens
  misc_RNA (1)...(19): siRNA sense strand
gaagaaagcaaagcaguuc

SEQ ID NO: 2073324 - RNA, 19 nt, Homo sapiens
  misc_RNA (1)...(19): siRNA sense strand
ugauagugcuucaggaauu

SEQ ID NO: 2073325 - RNA, 19 nt, Homo sapiens
  misc_RNA (1)...(19): siRNA sense strand
ccaaagugccuauaguaaa

SEQ ID NO: 2073326 - RNA, 19 nt, Homo sapiens
  misc_RNA (1)...(19): siRNA sense strand
guuaucagaugaagucaga

SEQ ID NO: 2073327 - RNA, 19 nt, Homo sapiens
  misc_RNA (1)...(19): siRNA sense strand
uggcaugucucacuacuga

SEQ ID NO: 2073328 - RNA, 19 nt, Homo sapiens
  misc_RNA (1)...(19): siRNA sense strand
caaagguuauaacgacauu

SEQ ID NO: 2073329 - RNA, 19 nt, Homo sapiens
  misc_RNA (1)...(19): siRNA sense strand
caaagugccuauaguaaaa

SEQ ID NO: 2073330 - RNA, 19 nt, Homo sapiens
  misc_RNA (1)...(19): siRNA sense strand
acagagaguucacaucaga

SEQ ID NO: 2073331 - RNA, 19 nt, Homo sapiens
  misc_RNA (1)...(19): siRNA sense strand
cuucagagauggacuacuu

SEQ ID NO: 2073332 - RNA, 19 nt, Homo sapiens
  misc_RNA (1)...(19): siRNA sense strand
ggacugacuccuccaauuc

SEQ ID NO: 2073333 - RNA, 19 nt, Homo sapiens
  misc_RNA (1)...(19): siRNA sense strand
ggaaugaagaagagaaaga

SEQ ID NO: 2073334 - RNA, 19 nt, Homo sapiens
  misc_RNA (1)...(19): siRNA sense strand
ggacugcuucguuucuaua

SEQ ID NO: 2073335 - RNA, 19 nt, Homo sapiens
  misc_RNA (1)...(19): siRNA sense strand
aaacagagaguucacauca

SEQ ID NO: 2073336 - RNA, 19 nt, Homo sapiens
  misc_RNA (1)...(19): siRNA sense strand
ggaacagacugcaggucaa

SEQ ID NO: 2073337 - RNA, 19 nt, Homo sapiens
  misc_RNA (1)...(19): siRNA sense strand
gacuagauuugcucugaaa

SEQ ID NO: 2073338 - RNA, 19 nt, Homo sapiens
  misc_RNA (1)...(19): siRNA sense strand
aagcaaagcaguucaaguu

SEQ ID NO: 2073339 - RNA, 19 nt, Homo sapiens
  misc_RNA (1)...(19): siRNA sense strand
agagaaagauucccgagau

SEQ ID NO: 2073340 - RNA, 19 nt, Homo sapiens
  misc_RNA (1)...(19): siRNA sense strand
uaaagaagaaagacaguga

SEQ ID NO: 2073341 - RNA, 19 nt, Homo sapiens
  misc_RNA (1)...(19): siRNA sense strand
guaauugcauugauuuguc

SEQ ID NO: 2073342 - RNA, 19 nt, Homo sapiens
  misc_RNA (1)...(19): siRNA sense strand
guacggauacaagauauuu

SEQ ID NO: 2073343 - RNA, 19 nt, Homo sapiens
  misc_RNA (1)...(19): siRNA sense strand
uggcaaaucuccuuuagca

SEQ ID NO: 2073344 - RNA, 19 nt, Homo sapiens
  misc_RNA (1)...(19): siRNA sense strand
caaaauagaaccugucuuu

SEQ ID NO: 2073345 - RNA, 19 nt, Homo sapiens
  misc_RNA (1)...(19): siRNA sense strand
gauagugcuucaggaauug

SEQ ID NO: 2073346 - RNA, 19 nt, Homo sapiens
  misc_RNA (1)...(19): siRNA sense strand
ggugaucaguccauaagga

SEQ ID NO: 2073347 - RNA, 19 nt, Homo sapiens
  misc_RNA (1)...(19): siRNA sense strand
cuaugaaaguguuugcuaa

SEQ ID NO: 2073348 - RNA, 19 nt, Homo sapiens
  misc_RNA (1)...(19): siRNA sense strand
cugcaaagcuacagaagau

SEQ ID NO: 2073349 - RNA, 19 nt, Homo sapiens
  misc_RNA (1)...(19): siRNA sense strand
gaacagacugcaggucaaa

SEQ ID NO: 2073350 - RNA, 19 nt, Homo sapiens
  misc_RNA (1)...(19): siRNA sense strand
gaagauccauuuucaguca

SEQ ID NO: 2073351 - RNA, 19 nt, Homo sapiens
  misc_RNA (1)...(19): siRNA sense strand
ucacaucuuucgacuugaa

SEQ ID NO: 2073352 - RNA, 19 nt, Homo sapiens
  misc_RNA (1)...(19): siRNA sense strand
gcaguucaaguuauaggua

SEQ ID NO: 2073353 - RNA, 19 nt, Homo sapiens
  misc_RNA (1)...(19): siRNA sense strand
acagaacucuucccaguca

SEQ ID NO: 2073354 - RNA, 19 nt, Homo sapiens
  misc_RNA (1)...(19): siRNA sense strand
caacagggagcaaauuuua

SEQ ID NO: 2073355 - RNA, 19 nt, Homo sapiens
  misc_RNA (1)...(19): siRNA sense strand
ccacccaggaauuauauua

SEQ ID NO: 2073356 - RNA, 19 nt, Homo sapiens
  misc_RNA (1)...(19): siRNA sense strand
gcauugauuugucuaaguc

SEQ ID NO: 2073357 - RNA, 19 nt, Homo sapiens
  misc_RNA (1)...(19): siRNA sense strand
gagagcaaccuguucaaug

SEQ ID NO: 2073358 - RNA, 19 nt, Homo sapiens
  misc_RNA (1)...(19): siRNA sense strand
cgaacaauauggcaaccaa

SEQ ID NO: 2073359 - RNA, 19 nt, Homo sapiens
  misc_RNA (1)...(19): siRNA sense strand
agacauagcucuucgcuua

SEQ ID NO: 2073360 - RNA, 19 nt, Homo sapiens
  misc_RNA (1)...(19): siRNA sense strand
gaaagcacgugacagauaa

SEQ ID NO: 2073361 - RNA, 19 nt, Homo sapiens
  misc_RNA (1)...(19): siRNA sense strand
gcaaagaucucugcuguug

SEQ ID NO: 2073362 - RNA, 19 nt, Homo sapiens
  misc_RNA (1)...(19): siRNA sense strand
caauauagcugaaguacaa

SEQ ID NO: 2073363 - RNA, 19 nt, Homo sapiens
  misc_RNA (1)...(19): siRNA sense strand
ggaauucucugcuggauga

SEQ ID NO: 2073364 - RNA, 19 nt, Homo sapiens
  misc_RNA (1)...(19): siRNA sense strand
guacugagcucuucauugu

SEQ ID NO: 2073365 - RNA, 19 nt, Homo sapiens
  misc_RNA (1)...(19): siRNA sense strand
gaacaagcuuggacauuga

SEQ ID NO: 2073366 - RNA, 19 nt, Homo sapiens
  misc_RNA (1)...(19): siRNA sense strand
gaaaccacccuaugaauuu

SEQ ID NO: 2073367 - RNA, 19 nt, Homo sapiens
  misc_RNA (1)...(19): siRNA sense strand
caacaugucugcagcaaga

SEQ ID NO: 2073368 - RNA, 19 nt, Homo sapiens
  misc_RNA (1)...(19): siRNA sense strand
cagaagcacugaagcguua

SEQ ID NO: 2073369 - RNA, 19 nt, Homo sapiens
  misc_RNA (1)...(19): siRNA sense strand
gaagcucuauuucaucuuu

SEQ ID NO: 2073370 - RNA, 19 nt, Homo sapiens
  misc_RNA (1)...(19): siRNA sense strand
uuagagagcuuggauauuu

SEQ ID NO: 2073371 - RNA, 19 nt, Homo sapiens
  misc_RNA (1)...(19): siRNA sense strand
gcaagcgccuguguauuua

SEQ ID NO: 2073372 - RNA, 19 nt, Homo sapiens
  misc_RNA (1)...(19): siRNA sense strand
gaaggaggauugcagcauu

SEQ ID NO: 2073373 - RNA, 19 nt, Homo sapiens
  misc_RNA (1)...(19): siRNA sense strand
ucaaagccauggaacauuu

SEQ ID NO: 2073374 - RNA, 19 nt, Homo sapiens
  misc_RNA (1)...(19): siRNA sense strand
gcauacagguccuuuaauc

SEQ ID NO: 2073375 - RNA, 19 nt, Homo sapiens
  misc_RNA (1)...(19): siRNA sense strand
ggagaaagcacgugacaga

SEQ ID NO: 2073376 - RNA, 19 nt, Homo sapiens
  misc_RNA (1)...(19): siRNA sense strand
caucaaagaucaugaacau

SEQ ID NO: 2073377 - RNA, 19 nt, Homo sapiens
  misc_RNA (1)...(19): siRNA sense strand
ggaauuauugcccauuuaa

SEQ ID NO: 2073378 - RNA, 19 nt, Homo sapiens
  misc_RNA (1)...(19): siRNA sense strand
cagacaagauggaacauug

SEQ ID NO: 2073379 - RNA, 19 nt, Homo sapiens
  misc_RNA (1)...(19): siRNA sense strand
ugaacaagcuuggacauug

SEQ ID NO: 2073380 - RNA, 19 nt, Homo sapiens
  misc_RNA (1)...(19): siRNA sense strand
cagaagaauugccuccuuu

SEQ ID NO: 2073381 - RNA, 19 nt, Homo sapiens
  misc_RNA (1)...(19): siRNA sense strand
ucaaacaucugaaucaucu

SEQ ID NO: 2073382 - RNA, 19 nt, Homo sapiens
  misc_RNA (1)...(19): siRNA sense strand
acaaauggauccagcagaa

SEQ ID NO: 2073383 - RNA, 19 nt, Homo sapiens
  misc_RNA (1)...(19): siRNA sense strand
gaacaauauagcugaagua

SEQ ID NO: 2073384 - RNA, 19 nt, Homo sapiens
  misc_RNA (1)...(19): siRNA sense strand
caucacgaauguucucuuu

SEQ ID NO: 2073385 - RNA, 19 nt, Homo sapiens
  misc_RNA (1)...(19): siRNA sense strand
gaggauugcagcauuuaua

SEQ ID NO: 2073386 - RNA, 19 nt, Homo sapiens
  misc_RNA (1)...(19): siRNA sense strand
cuugauaucugcuugaauu

SEQ ID NO: 2073387 - RNA, 19 nt, Homo sapiens
  misc_RNA (1)...(19): siRNA sense strand
gcaaccagaugcgcuuaaa

SEQ ID NO: 2073388 - RNA, 19 nt, Homo sapiens
  misc_RNA (1)...(19): siRNA sense strand
gauggcaguugcuaucauu

SEQ ID NO: 2073389 - RNA, 19 nt, Homo sapiens
  misc_RNA (1)...(19): siRNA sense strand
ucacgaauguucucuuuua

SEQ ID NO: 2073390 - RNA, 19 nt, Homo sapiens
  misc_RNA (1)...(19): siRNA sense strand
ucagugggcuuggcaguaa

SEQ ID NO: 2073391 - RNA, 19 nt, Homo sapiens
  misc_RNA (1)...(19): siRNA sense strand
uuacuuggcuguuucacaa

SEQ ID NO: 2073392 - RNA, 19 nt, Homo sapiens
  misc_RNA (1)...(19): siRNA sense strand
ccacaucaguagucuccua

SEQ ID NO: 2073393 - RNA, 19 nt, Homo sapiens
  misc_RNA (1)...(19): siRNA sense strand
caggcaacuucuucaaaua

SEQ ID NO: 2073394 - RNA, 19 nt, Homo sapiens
  misc_RNA (1)...(19): siRNA sense strand
aaugacaacuacccagaua

SEQ ID NO: 2073395 - RNA, 19 nt, Homo sapiens
  misc_RNA (1)...(19): siRNA sense strand
gcaugcaauuuguagguuu

SEQ ID NO: 2073396 - RNA, 19 nt, Homo sapiens
  misc_RNA (1)...(19): siRNA sense strand
gcucuucgcuuacuagaac

SEQ ID NO: 2073397 - RNA, 19 nt, Homo sapiens
  misc_RNA (1)...(19): siRNA sense strand
gcuuggacauugagucgua

SEQ ID NO: 2073398 - RNA, 19 nt, Homo sapiens
  misc_RNA (1)...(19): siRNA sense strand
agacaucacugcucuacug

SEQ ID NO: 2073399 - RNA, 19 nt, Homo sapiens
  misc_RNA (1)...(19): siRNA sense strand
gauaucugcuugaauuucu

SEQ ID NO: 2073400 - RNA, 19 nt, Homo sapiens
  misc_RNA (1)...(19): siRNA sense strand
agaaagcacgugacagaua

SEQ ID NO: 2073401 - RNA, 19 nt, Homo sapiens
  misc_RNA (1)...(19): siRNA sense strand
uggcugaugugacccauuu

SEQ ID NO: 2073402 - RNA, 19 nt, Homo sapiens
  misc_RNA (1)...(19): siRNA sense strand
uagcugaaguacaagaauu

SEQ ID NO: 2073403 - RNA, 19 nt, Homo sapiens
  misc_RNA (1)...(19): siRNA sense strand
ggacacuacauugaaauuu

SEQ ID NO: 2073404 - RNA, 19 nt, Homo sapiens
  misc_RNA (1)...(19): siRNA sense strand
ucaggcaacuucuucaaau

SEQ ID NO: 2073405 - RNA, 19 nt, Homo sapiens
  misc_RNA (1)...(19): siRNA sense strand
gggaagcucuauuucaucu

SEQ ID NO: 2073406 - RNA, 19 nt, Homo sapiens
  misc_RNA (1)...(19): siRNA sense strand
caacaucaaagaucaugaa

SEQ ID NO: 2073407 - RNA, 19 nt, Homo sapiens
  misc_RNA (1)...(19): siRNA sense strand
gaucucugcuguugcuuuc

SEQ ID NO: 2073408 - RNA, 19 nt, Homo sapiens
  misc_RNA (1)...(19): siRNA sense strand
gauuagagagcuuggauau

SEQ ID NO: 2073409 - RNA, 19 nt, Homo sapiens
  misc_RNA (1)...(19): siRNA sense strand
gaccggauccuucaagaug

SEQ ID NO: 2073410 - RNA, 19 nt, Homo sapiens
  misc_RNA (1)...(19): siRNA sense strand
agugugagaugguagcaua

SEQ ID NO: 2073411 - RNA, 19 nt, Homo sapiens
  misc_RNA (1)...(19): siRNA sense strand
uggaauuauugcccauuua

SEQ ID NO: 2073412 - RNA, 19 nt, Homo sapiens
  misc_RNA (1)...(19): siRNA sense strand
gguuagaacucuucaugag

SEQ ID NO: 2073413 - RNA, 19 nt, Homo sapiens
  misc_RNA (1)...(19): siRNA sense strand
agaacaaacugcacagcuu

SEQ ID NO: 2073414 - RNA, 19 nt, Homo sapiens
  misc_RNA (1)...(19): siRNA sense strand
gaacucaaacaucugaauc

SEQ ID NO: 2073415 - RNA, 19 nt, Homo sapiens
  misc_RNA (1)...(19): siRNA sense strand
ucaaagaucaugaacauac

SEQ ID NO: 2073416 - RNA, 19 nt, Homo sapiens
  misc_RNA (1)...(19): siRNA sense strand
guucagcuaugggcaguuu

SEQ ID NO: 2073417 - RNA, 19 nt, Homo sapiens
  misc_RNA (1)...(19): siRNA sense strand
uagcauacagguccuuuaa

SEQ ID NO: 2073418 - RNA, 19 nt, Homo sapiens
  misc_RNA (1)...(19): siRNA sense strand
gaagaauugccuccuuuca

SEQ ID NO: 2073419 - RNA, 19 nt, Homo sapiens
  misc_RNA (1)...(19): siRNA sense strand
ugcaagcgccuguguauuu

SEQ ID NO: 2073420 - RNA, 19 nt, Homo sapiens
  misc_RNA (1)...(19): siRNA sense strand
gagaaaccacccuaugaau

SEQ ID NO: 2073421 - RNA, 19 nt, Homo sapiens
  misc_RNA (1)...(19): siRNA sense strand
cauccuaccuaaccuuguu

SEQ ID NO: 2073422 - RNA, 19 nt, Homo sapiens
  misc_RNA (1)...(19): siRNA sense strand
ccuucaagauguuccauuu

SEQ ID NO: 2073423 - RNA, 19 nt, Homo sapiens
  misc_RNA (1)...(19): siRNA sense strand
gauuugcauucagcuauuu

SEQ ID NO: 2073424 - RNA, 19 nt, Homo sapiens
  misc_RNA (1)...(19): siRNA sense strand
cugccaagcuuucuacaga

SEQ ID NO: 2073425 - RNA, 19 nt, Homo sapiens
  misc_RNA (1)...(19): siRNA sense strand
cagccaagcuugucaugca

SEQ ID NO: 2073426 - RNA, 19 nt, Homo sapiens
  misc_RNA (1)...(19): siRNA sense strand
uggcugaaguugccucauu

SEQ ID NO: 2073427 - RNA, 19 nt, Homo sapiens
  misc_RNA (1)...(19): siRNA sense strand
uagguuugcuggcuacuga

SEQ ID NO: 2073428 - RNA, 19 nt, Homo sapiens
  misc_RNA (1)...(19): siRNA sense strand
cugcacagcuugguacuga

SEQ ID NO: 2073429 - RNA, 19 nt, Homo sapiens
  misc_RNA (1)...(19): siRNA sense strand
caacugagucauccauuca

SEQ ID NO: 2073430 - RNA, 19 nt, Homo sapiens
  misc_RNA (1)...(19): siRNA sense strand
ccaacugagucauccauuc

SEQ ID NO: 2073431 - RNA, 19 nt, Homo sapiens
  misc_RNA (1)...(19): siRNA sense strand
ugaggguucuagagucuuu

SEQ ID NO: 2073432 - RNA, 19 nt, Homo sapiens
  misc_RNA (1)...(19): siRNA sense strand
gcaacuucuucaaauagug

SEQ ID NO: 2073433 - RNA, 19 nt, Homo sapiens
  misc_RNA (1)...(19): siRNA sense strand
gaugagaaaccacccuaug

SEQ ID NO: 2073434 - RNA, 19 nt, Homo sapiens
  misc_RNA (1)...(19): siRNA sense strand
caccagcaguuacagaaga

SEQ ID NO: 2073435 - RNA, 19 nt, Homo sapiens
  misc_RNA (1)...(19): siRNA sense strand
agaaaccacccuaugaauu

SEQ ID NO: 2073436 - RNA, 19 nt, Homo sapiens
  misc_RNA (1)...(19): siRNA sense strand
ugagaaaccacccuaugaa

SEQ ID NO: 2073437 - RNA, 19 nt, Homo sapiens
  misc_RNA (1)...(19): siRNA sense strand
gaaugcugauaucacgauu

SEQ ID NO: 2073438 - RNA, 19 nt, Homo sapiens
  misc_RNA (1)...(19): siRNA sense strand
gauugcagcauuuauacaa

SEQ ID NO: 2073439 - RNA, 19 nt, Homo sapiens
  misc_RNA (1)...(19): siRNA sense strand
gauugaagaaggaggauug

SEQ ID NO: 2073440 - RNA, 19 nt, Homo sapiens
  misc_RNA (1)...(19): siRNA sense strand
uuuggaaccucacagauga

SEQ ID NO: 2073441 - RNA, 19 nt, Homo sapiens
  misc_RNA (1)...(19): siRNA sense strand
gcagaaaaccaaucaaaau

SEQ ID NO: 2073442 - RNA, 19 nt, Homo sapiens
  misc_RNA (1)...(19): siRNA sense strand
cauggucuauugaaugaug

SEQ ID NO: 2073443 - RNA, 19 nt, Homo sapiens
  misc_RNA (1)...(19): siRNA sense strand
uaccuaaccuuguuucucu

SEQ ID NO: 2073444 - RNA, 19 nt, Homo sapiens
  misc_RNA (1)...(19): siRNA sense strand
gcagugaccggauccuuca

SEQ ID NO: 2073445 - RNA, 19 nt, Homo sapiens
  misc_RNA (1)...(19): siRNA sense strand
caacuucuucaaauaguga

SEQ ID NO: 2073446 - RNA, 19 nt, Homo sapiens
  misc_RNA (1)...(19): siRNA sense strand
gagcuuggauauuucuaac

SEQ ID NO: 2073447 - RNA, 19 nt, Homo sapiens
  misc_RNA (1)...(19): siRNA sense strand
gggcuuggcaguaacaaau

SEQ ID NO: 2073448 - RNA, 19 nt, Homo sapiens
  misc_RNA (1)...(19): siRNA sense strand
caaagaucaugaacauacu

SEQ ID NO: 2073449 - RNA, 19 nt, Homo sapiens
  misc_RNA (1)...(19): siRNA sense strand
uagagucuuucccaacuga

SEQ ID NO: 2073450 - RNA, 19 nt, Homo sapiens
  misc_RNA (1)...(19): siRNA sense strand
ugauggaacuguggguauu

SEQ ID NO: 2073451 - RNA, 19 nt, Homo sapiens
  misc_RNA (1)...(19): siRNA sense strand
cagcauuuauacaacauca

SEQ ID NO: 2073452 - RNA, 19 nt, Homo sapiens
  misc_RNA (1)...(19): siRNA sense strand
aaggaggauugcagcauuu

SEQ ID NO: 2073453 - RNA, 19 nt, Homo sapiens
  misc_RNA (1)...(19): siRNA sense strand
cuuugcagcuggaauuauu

SEQ ID NO: 2073454 - RNA, 19 nt, Homo sapiens
  misc_RNA (1)...(19): siRNA sense strand
caguugcuaucauuucuau

SEQ ID NO: 2073455 - RNA, 19 nt, Homo sapiens
  misc_RNA (1)...(19): siRNA sense strand
aaaccacccuaugaauuug

SEQ ID NO: 2073456 - RNA, 19 nt, Homo sapiens
  misc_RNA (1)...(19): siRNA sense strand
cccuauuccuuacuugaua

SEQ ID NO: 2073457 - RNA, 19 nt, Homo sapiens
  misc_RNA (1)...(19): siRNA sense strand
aaagaucucugcuguugcu

SEQ ID NO: 2073458 - RNA, 19 nt, Homo sapiens
  misc_RNA (1)...(19): siRNA sense strand
ugauuugcauucagcuauu

SEQ ID NO: 2073459 - RNA, 19 nt, Homo sapiens
  misc_RNA (1)...(19): siRNA sense strand
ucacagcccugcuuugcua

SEQ ID NO: 2073460 - RNA, 19 nt, Homo sapiens
  misc_RNA (1)...(19): siRNA sense strand
ggacgacgacacugaggaa

SEQ ID NO: 2073461 - RNA, 19 nt, Homo sapiens
  misc_RNA (1)...(19): siRNA sense strand
uggacaggcucacuaagga

SEQ ID NO: 2073462 - RNA, 19 nt, Homo sapiens
  misc_RNA (1)...(19): siRNA sense strand
cagcccugcuuugcuauuu

SEQ ID NO: 2073463 - RNA, 19 nt, Homo sapiens
  misc_RNA (1)...(19): siRNA sense strand
ggaagaggacgacgacacu

SEQ ID NO: 2073464 - RNA, 19 nt, Homo sapiens
  misc_RNA (1)...(19): siRNA sense strand
ccauggacaggcucacuaa

SEQ ID NO: 2073465 - RNA, 19 nt, Homo sapiens
  misc_RNA (1)...(19): siRNA sense strand
cugcucacccuguguguuu

SEQ ID NO: 2073466 - RNA, 19 nt, Homo sapiens
  misc_RNA (1)...(19): siRNA sense strand
ugaccucuaucaccgagau

SEQ ID NO: 2073467 - RNA, 19 nt, Homo sapiens
  misc_RNA (1)...(19): siRNA sense strand
gcagcuacggcccacagaa

SEQ ID NO: 2073468 - RNA, 19 nt, Homo sapiens
  misc_RNA (1)...(19): siRNA sense strand
gccauggacaggcucacua

SEQ ID NO: 2073469 - RNA, 19 nt, Homo sapiens
  misc_RNA (1)...(19): siRNA sense strand
aagaggacgacgacacuga

SEQ ID NO: 2073470 - RNA, 19 nt, Homo sapiens
  misc_RNA (1)...(19): siRNA sense strand
gaacaaauccuuacaguga

SEQ ID NO: 2073471 - RNA, 19 nt, Homo sapiens
  misc_RNA (1)...(19): siRNA sense strand
gaagugaccuugaugaugu

SEQ ID NO: 2073472 - RNA, 19 nt, Homo sapiens
  misc_RNA (1)...(19): siRNA sense strand
gaaaaugccugcucgaaua

SEQ ID NO: 2073473 - RNA, 19 nt, Homo sapiens
  misc_RNA (1)...(19): siRNA sense strand
gaauagagauguauacagu

SEQ ID NO: 2073474 - RNA, 19 nt, Homo sapiens
  misc_RNA (1)...(19): siRNA sense strand
gaucagcuguacacucuua

SEQ ID NO: 2073475 - RNA, 19 nt, Homo sapiens
  misc_RNA (1)...(19): siRNA sense strand
ggacgagaauugauaaaga

SEQ ID NO: 2073476 - RNA, 19 nt, Homo sapiens
  misc_RNA (1)...(19): siRNA sense strand
ggaccuguauuaaaucuuu

SEQ ID NO: 2073477 - RNA, 19 nt, Homo sapiens
  misc_RNA (1)...(19): siRNA sense strand
gggaguagccagccaauua

SEQ ID NO: 2073478 - RNA, 19 nt, Homo sapiens
  misc_RNA (1)...(19): siRNA sense strand
caacuggcaucuuucuaua

SEQ ID NO: 2073479 - RNA, 19 nt, Homo sapiens
  misc_RNA (1)...(19): siRNA sense strand
gaauguugcuccuggcaua

SEQ ID NO: 2073480 - RNA, 19 nt, Homo sapiens
  misc_RNA (1)...(19): siRNA sense strand
caacaggacuuucauccaa

SEQ ID NO: 2073481 - RNA, 19 nt, Homo sapiens
  misc_RNA (1)...(19): siRNA sense strand
ccaacuacuucaugaaaua

SEQ ID NO: 2073482 - RNA, 19 nt, Homo sapiens
  misc_RNA (1)...(19): siRNA sense strand
gagauuacuuggcuggaua

SEQ ID NO: 2073483 - RNA, 19 nt, Homo sapiens
  misc_RNA (1)...(19): siRNA sense strand
aaagcaagcugcaguacua

SEQ ID NO: 2073484 - RNA, 19 nt, Homo sapiens
  misc_RNA (1)...(19): siRNA sense strand
ggaugcauaugaauucuuu

SEQ ID NO: 2073485 - RNA, 19 nt, Homo sapiens
  misc_RNA (1)...(19): siRNA sense strand
gaccggcugucuauucuua

SEQ ID NO: 2073486 - RNA, 19 nt, Homo sapiens
  misc_RNA (1)...(19): siRNA sense strand
guucuaagcuccaaacuca

SEQ ID NO: 2073487 - RNA, 19 nt, Homo sapiens
  misc_RNA (1)...(19): siRNA sense strand
agggaaaccuuaccuguua

SEQ ID NO: 2073488 - RNA, 19 nt, Homo sapiens
  misc_RNA (1)...(19): siRNA sense strand
ggaaaugcuugguucauca

SEQ ID NO: 2073489 - RNA, 19 nt, Homo sapiens
  misc_RNA (1)...(19): siRNA sense strand
ccacagcuuuguugaauga

SEQ ID NO: 2073490 - RNA, 19 nt, Homo sapiens
  misc_RNA (1)...(19): siRNA sense strand
ccucaugaguuaaagaaua

SEQ ID NO: 2073491 - RNA, 19 nt, Homo sapiens
  misc_RNA (1)...(19): siRNA sense strand
gaagaucuguaaagacugu

SEQ ID NO: 2073492 - RNA, 19 nt, Homo sapiens
  misc_RNA (1)...(19): siRNA sense strand
gagaacagcaggaugcaua

SEQ ID NO: 2073493 - RNA, 19 nt, Homo sapiens
  misc_RNA (1)...(19): siRNA sense strand
gauguuggcugauaguuca

SEQ ID NO: 2073494 - RNA, 19 nt, Homo sapiens
  misc_RNA (1)...(19): siRNA sense strand
gaaaauggauuacuagcuu

SEQ ID NO: 2073495 - RNA, 19 nt, Homo sapiens
  misc_RNA (1)...(19): siRNA sense strand
ccacuacuauuccuucauu

SEQ ID NO: 2073496 - RNA, 19 nt, Homo sapiens
  misc_RNA (1)...(19): siRNA sense strand
ccaaaucaguuucuucuag

SEQ ID NO: 2073497 - RNA, 19 nt, Homo sapiens
  misc_RNA (1)...(19): siRNA sense strand
gaaacagacucagcaguuc

SEQ ID NO: 2073498 - RNA, 19 nt, Homo sapiens
  misc_RNA (1)...(19): siRNA sense strand
guagaagccuuguuguuca

SEQ ID NO: 2073499 - RNA, 19 nt, Homo sapiens
  misc_RNA (1)...(19): siRNA sense strand
caacuugauucuuuaggaa

SEQ ID NO: 2073500 - RNA, 19 nt, Homo sapiens
  misc_RNA (1)...(19): siRNA sense strand
aaacaaacccauacacuga

SEQ ID NO: 2073501 - RNA, 19 nt, Homo sapiens
  misc_RNA (1)...(19): siRNA sense strand
gaaaagagaauaacaguga

SEQ ID NO: 2073502 - RNA, 19 nt, Homo sapiens
  misc_RNA (1)...(19): siRNA sense strand
ucacaguaaugaaaccaua

SEQ ID NO: 2073503 - RNA, 19 nt, Homo sapiens
  misc_RNA (1)...(19): siRNA sense strand
gauuugagaugccaguuau

SEQ ID NO: 2073504 - RNA, 19 nt, Homo sapiens
  misc_RNA (1)...(19): siRNA sense strand
aaacuuaucuacggacaaa

SEQ ID NO: 2073505 - RNA, 19 nt, Homo sapiens
  misc_RNA (1)...(19): siRNA sense strand
gcuuacagcuugcuauuca

SEQ ID NO: 2073506 - RNA, 19 nt, Homo sapiens
  misc_RNA (1)...(19): siRNA sense strand
gaaaaggaccuguauuaaa

SEQ ID NO: 2073507 - RNA, 19 nt, Homo sapiens
  misc_RNA (1)...(19): siRNA sense strand
cuacgaugcuugaagauga

SEQ ID NO: 2073508 - RNA, 19 nt, Homo sapiens
  misc_RNA (1)...(19): siRNA sense strand
uuacuuggcuggauaacuu

SEQ ID NO: 2073509 - RNA, 19 nt, Homo sapiens
  misc_RNA (1)...(19): siRNA sense strand
gcagagcgcuaugugauca

SEQ ID NO: 2073510 - RNA, 19 nt, Homo sapiens
  misc_RNA (1)...(19): siRNA sense strand
gaaggacgagaauugauaa

SEQ ID NO: 2073511 - RNA, 19 nt, Homo sapiens
  misc_RNA (1)...(19): siRNA sense strand
gaucagaacuccccaguau

SEQ ID NO: 2073512 - RNA, 19 nt, Homo sapiens
  misc_RNA (1)...(19): siRNA sense strand
ugacacaguuauagaagaa

SEQ ID NO: 2073513 - RNA, 19 nt, Homo sapiens
  misc_RNA (1)...(19): siRNA sense strand
ugucagaguuuggaaauuu

SEQ ID NO: 2073514 - RNA, 19 nt, Homo sapiens
  misc_RNA (1)...(19): siRNA sense strand
uaacguauuugacaugcuu

SEQ ID NO: 2073515 - RNA, 19 nt, Homo sapiens
  misc_RNA (1)...(19): siRNA sense strand
agaagaagaugucagaaca

SEQ ID NO: 2073516 - RNA, 19 nt, Homo sapiens
  misc_RNA (1)...(19): siRNA sense strand
cuaccagugugucaaauuu

SEQ ID NO: 2073517 - RNA, 19 nt, Homo sapiens
  misc_RNA (1)...(19): siRNA sense strand
guaaucauguggacaguag

SEQ ID NO: 2073518 - RNA, 19 nt, Homo sapiens
  misc_RNA (1)...(19): siRNA sense strand
ucauugagaugguagugua

SEQ ID NO: 2073519 - RNA, 19 nt, Homo sapiens
  misc_RNA (1)...(19): siRNA sense strand
gcagaagccaaaucaguuu

SEQ ID NO: 2073520 - RNA, 19 nt, Homo sapiens
  misc_RNA (1)...(19): siRNA sense strand
gccaaauccuucugugaaa

SEQ ID NO: 2073521 - RNA, 19 nt, Homo sapiens
  misc_RNA (1)...(19): siRNA sense strand
ugauggcucucguauguaa

SEQ ID NO: 2073522 - RNA, 19 nt, Homo sapiens
  misc_RNA (1)...(19): siRNA sense strand
gagaucuacuaaacuugua

SEQ ID NO: 2073523 - RNA, 19 nt, Homo sapiens
  misc_RNA (1)...(19): siRNA sense strand
gaaaugguggugcaacuug

SEQ ID NO: 2073524 - RNA, 19 nt, Homo sapiens
  misc_RNA (1)...(19): siRNA sense strand
gcugauaguucaccuucaa

SEQ ID NO: 2073525 - RNA, 19 nt, Homo sapiens
  misc_RNA (1)...(19): siRNA sense strand
gcaacuggcaucuuucuau

SEQ ID NO: 2073526 - RNA, 19 nt, Homo sapiens
  misc_RNA (1)...(19): siRNA sense strand
ggaguagccagccaauuaa

SEQ ID NO: 2073527 - RNA, 19 nt, Homo sapiens
  misc_RNA (1)...(19): siRNA sense strand
cagauguccuuauguggua

SEQ ID NO: 2073528 - RNA, 19 nt, Homo sapiens
  misc_RNA (1)...(19): siRNA sense strand
aaacaaugcccacguuauu

SEQ ID NO: 2073529 - RNA, 19 nt, Homo sapiens
  misc_RNA (1)...(19): siRNA sense strand
gacaaacaaugcccacguu

SEQ ID NO: 2073530 - RNA, 19 nt, Homo sapiens
  misc_RNA (1)...(19): siRNA sense strand
ucucguauguaacguauuu

SEQ ID NO: 2073531 - RNA, 19 nt, Homo sapiens
  misc_RNA (1)...(19): siRNA sense strand
ggagguagaagccuuguug

SEQ ID NO: 2073532 - RNA, 19 nt, Homo sapiens
  misc_RNA (1)...(19): siRNA sense strand
uuacuagucucauugauca

SEQ ID NO: 2073533 - RNA, 19 nt, Homo sapiens
  misc_RNA (1)...(19): siRNA sense strand
gacgagaauugauaaagau

SEQ ID NO: 2073534 - RNA, 19 nt, Homo sapiens
  misc_RNA (1)...(19): siRNA sense strand
uuucauggcucucaaucua

SEQ ID NO: 2073535 - RNA, 19 nt, Homo sapiens
  misc_RNA (1)...(19): siRNA sense strand
ggaugaauaccucaagaaa

SEQ ID NO: 2073536 - RNA, 19 nt, Homo sapiens
  misc_RNA (1)...(19): siRNA sense strand
cagcuacgaugcuugaaga

SEQ ID NO: 2073537 - RNA, 19 nt, Homo sapiens
  misc_RNA (1)...(19): siRNA sense strand
cuaaugagauuuggguuug

SEQ ID NO: 2073538 - RNA, 19 nt, Homo sapiens
  misc_RNA (1)...(19): siRNA sense strand
caagugcagucucucuuug

SEQ ID NO: 2073539 - RNA, 19 nt, Homo sapiens
  misc_RNA (1)...(19): siRNA sense strand
ggugcaacuuguuauauga

SEQ ID NO: 2073540 - RNA, 19 nt, Homo sapiens
  misc_RNA (1)...(19): siRNA sense strand
gggaaucuguguucgacaa

SEQ ID NO: 2073541 - RNA, 19 nt, Homo sapiens
  misc_RNA (1)...(19): siRNA sense strand
gaacggagacaggcaucua

SEQ ID NO: 2073542 - RNA, 19 nt, Homo sapiens
  misc_RNA (1)...(19): siRNA sense strand
guacugcuguuucuguaau

SEQ ID NO: 2073543 - RNA, 19 nt, Homo sapiens
  misc_RNA (1)...(19): siRNA sense strand
aagcaacgaccacccauua

SEQ ID NO: 2073544 - RNA, 19 nt, Homo sapiens
  misc_RNA (1)...(19): siRNA sense strand
gcucuccuguggauaauau

SEQ ID NO: 2073545 - RNA, 19 nt, Homo sapiens
  misc_RNA (1)...(19): siRNA sense strand
gagaagaaaggacuguuug

SEQ ID NO: 2073546 - RNA, 19 nt, Homo sapiens
  misc_RNA (1)...(19): siRNA sense strand
uugaucagauggaugaaua

SEQ ID NO: 2073547 - RNA, 19 nt, Homo sapiens
  misc_RNA (1)...(19): siRNA sense strand
caauggaaguaagugauuu

SEQ ID NO: 2073548 - RNA, 19 nt, Homo sapiens
  misc_RNA (1)...(19): siRNA sense strand
ugaaggacgagaauugaua

SEQ ID NO: 2073549 - RNA, 19 nt, Homo sapiens
  misc_RNA (1)...(19): siRNA sense strand
agaagaaacucaggguuga

SEQ ID NO: 2073550 - RNA, 19 nt, Homo sapiens
  misc_RNA (1)...(19): siRNA sense strand
uauagaggcucacaguaau

SEQ ID NO: 2073551 - RNA, 19 nt, Homo sapiens
  misc_RNA (1)...(19): siRNA sense strand
gaaaauagccaagcaguug

SEQ ID NO: 2073552 - RNA, 19 nt, Homo sapiens
  misc_RNA (1)...(19): siRNA sense strand
gaaauggagcaguuaagga

SEQ ID NO: 2073553 - RNA, 19 nt, Homo sapiens
  misc_RNA (1)...(19): siRNA sense strand
caacugggcuuuucugaug

SEQ ID NO: 2073554 - RNA, 19 nt, Homo sapiens
  misc_RNA (1)...(19): siRNA sense strand
cgaaacagacucagcaguu

SEQ ID NO: 2073555 - RNA, 19 nt, Homo sapiens
  misc_RNA (1)...(19): siRNA sense strand
augaagaccucaccaaaga

SEQ ID NO: 2073556 - RNA, 19 nt, Homo sapiens
  misc_RNA (1)...(19): siRNA sense strand
aaugaaacaucaacuggaa

SEQ ID NO: 2073557 - RNA, 19 nt, Homo sapiens
  misc_RNA (1)...(19): siRNA sense strand
ucaaauuucuugucacucu

SEQ ID NO: 2073558 - RNA, 19 nt, Homo sapiens
  misc_RNA (1)...(19): siRNA sense strand
uggaaugccuauaugcuuu

SEQ ID NO: 2073559 - RNA, 19 nt, Homo sapiens
  misc_RNA (1)...(19): siRNA sense strand
gacgcuccauuaaauauga

SEQ ID NO: 2073560 - RNA, 19 nt, Homo sapiens
  misc_RNA (1)...(19): siRNA sense strand
gaagaccucaccaaagaug

SEQ ID NO: 2073561 - RNA, 19 nt, Homo sapiens
  misc_RNA (1)...(19): siRNA sense strand
gcacaagcacgagaauuug

SEQ ID NO: 2073562 - RNA, 19 nt, Homo sapiens
  misc_RNA (1)...(19): siRNA sense strand
gagaaccucaaguuuauga

SEQ ID NO: 2073563 - RNA, 19 nt, Homo sapiens
  misc_RNA (1)...(19): siRNA sense strand
gaagaaaggacuguuugug

SEQ ID NO: 2073564 - RNA, 19 nt, Homo sapiens
  misc_RNA (1)...(19): siRNA sense strand
gcaggaagcugaggaucuc

SEQ ID NO: 2073565 - RNA, 19 nt, Homo sapiens
  misc_RNA (1)...(19): siRNA sense strand
uuacacaguuucaggaaug

SEQ ID NO: 2073566 - RNA, 19 nt, Homo sapiens
  misc_RNA (1)...(19): siRNA sense strand
cuauagaggcucacaguaa

SEQ ID NO: 2073567 - RNA, 19 nt, Homo sapiens
  misc_RNA (1)...(19): siRNA sense strand
gcaggaugcauaugaauuc

SEQ ID NO: 2073568 - RNA, 19 nt, Homo sapiens
  misc_RNA (1)...(19): siRNA sense strand
uuaccaaggaguuugauua

SEQ ID NO: 2073569 - RNA, 19 nt, Homo sapiens
  misc_RNA (1)...(19): siRNA sense strand
uuuccgagcuucuagaauu

SEQ ID NO: 2073570 - RNA, 19 nt, Homo sapiens
  misc_RNA (1)...(19): siRNA sense strand
gaacaacuacccaaagaua

SEQ ID NO: 2073571 - RNA, 19 nt, Homo sapiens
  misc_RNA (1)...(19): siRNA sense strand
uaaagaaacuccagaccua

SEQ ID NO: 2073572 - RNA, 19 nt, Homo sapiens
  misc_RNA (1)...(19): siRNA sense strand
gcaguggccuguuccaaua

SEQ ID NO: 2073573 - RNA, 19 nt, Homo sapiens
  misc_RNA (1)...(19): siRNA sense strand
guaugaagaugucuacaaa

SEQ ID NO: 2073574 - RNA, 19 nt, Homo sapiens
  misc_RNA (1)...(19): siRNA sense strand
gaacuacucuagcucacuu

SEQ ID NO: 2073575 - RNA, 19 nt, Homo sapiens
  misc_RNA (1)...(19): siRNA sense strand
ggagauauaugaugauguc

SEQ ID NO: 2073576 - RNA, 19 nt, Homo sapiens
  misc_RNA (1)...(19): siRNA sense strand
caagguagaugccugugaa

SEQ ID NO: 2073577 - RNA, 19 nt, Homo sapiens
  misc_RNA (1)...(19): siRNA sense strand
cuagugauaugucguaauu

SEQ ID NO: 2073578 - RNA, 19 nt, Homo sapiens
  misc_RNA (1)...(19): siRNA sense strand
aaacggugcugaagaauca

SEQ ID NO: 2073579 - RNA, 19 nt, Homo sapiens
  misc_RNA (1)...(19): siRNA sense strand
gauaugugcucauugaaca

SEQ ID NO: 2073580 - RNA, 19 nt, Homo sapiens
  misc_RNA (1)...(19): siRNA sense strand
ggaaagagguaccgaagcu

SEQ ID NO: 2073581 - RNA, 19 nt, Homo sapiens
  misc_RNA (1)...(19): siRNA sense strand
auagagaacuguaugaaga

SEQ ID NO: 2073582 - RNA, 19 nt, Homo sapiens
  misc_RNA (1)...(19): siRNA sense strand
gccaauaaguccuggagaa

SEQ ID NO: 2073583 - RNA, 19 nt, Homo sapiens
  misc_RNA (1)...(19): siRNA sense strand
aaacaaccaugugaauuga

SEQ ID NO: 2073584 - RNA, 19 nt, Homo sapiens
  misc_RNA (1)...(19): siRNA sense strand
gaauuggaagucauugaua

SEQ ID NO: 2073585 - RNA, 19 nt, Homo sapiens
  misc_RNA (1)...(19): siRNA sense strand
caucaaaguuggucaccuu

SEQ ID NO: 2073586 - RNA, 19 nt, Homo sapiens
  misc_RNA (1)...(19): siRNA sense strand
gaagaugucuacaaaacaa

SEQ ID NO: 2073587 - RNA, 19 nt, Homo sapiens
  misc_RNA (1)...(19): siRNA sense strand
ggagaagaauuggaaguca

SEQ ID NO: 2073588 - RNA, 19 nt, Homo sapiens
  misc_RNA (1)...(19): siRNA sense strand
ccaaguuucugacaccaaa

SEQ ID NO: 2073589 - RNA, 19 nt, Homo sapiens
  misc_RNA (1)...(19): siRNA sense strand
cggaggagauauaugauga

SEQ ID NO: 2073590 - RNA, 19 nt, Homo sapiens
  misc_RNA (1)...(19): siRNA sense strand
ggagucaacuaaagaaacu

SEQ ID NO: 2073591 - RNA, 19 nt, Homo sapiens
  misc_RNA (1)...(19): siRNA sense strand
caugugaauugaaaccuaa

SEQ ID NO: 2073592 - RNA, 19 nt, Homo sapiens
  misc_RNA (1)...(19): siRNA sense strand
aagaacaacuacccaaaga

SEQ ID NO: 2073593 - RNA, 19 nt, Homo sapiens
  misc_RNA (1)...(19): siRNA sense strand
gauguagaccugagugaaa

SEQ ID NO: 2073594 - RNA, 19 nt, Homo sapiens
  misc_RNA (1)...(19): siRNA sense strand
gaggagauauaugaugaug

SEQ ID NO: 2073595 - RNA, 19 nt, Homo sapiens
  misc_RNA (1)...(19): siRNA sense strand
aauaaguccuggagaagaa

SEQ ID NO: 2073596 - RNA, 19 nt, Homo sapiens
  misc_RNA (1)...(19): siRNA sense strand
caaagaacaacuacccaaa

SEQ ID NO: 2073597 - RNA, 19 nt, Homo sapiens
  misc_RNA (1)...(19): siRNA sense strand
cauguuggcuggaaagcaa

SEQ ID NO: 2073598 - RNA, 19 nt, Homo sapiens
  misc_RNA (1)...(19): siRNA sense strand
cgaacaaaaucuagugaua

SEQ ID NO: 2073599 - RNA, 19 nt, Homo sapiens
  misc_RNA (1)...(19): siRNA sense strand
gagaagaauuggaagucau

SEQ ID NO: 2073600 - RNA, 19 nt, Homo sapiens
  misc_RNA (1)...(19): siRNA sense strand
ggaacauguuggcuggaaa

SEQ ID NO: 2073601 - RNA, 19 nt, Homo sapiens
  misc_RNA (1)...(19): siRNA sense strand
ucaaaagacugcagcaauu

SEQ ID NO: 2073602 - RNA, 19 nt, Homo sapiens
  misc_RNA (1)...(19): siRNA sense strand
ggaaccauauucaaaccau

SEQ ID NO: 2073603 - RNA, 19 nt, Homo sapiens
  misc_RNA (1)...(19): siRNA sense strand
acaaccaugugaauugaaa

SEQ ID NO: 2073604 - RNA, 19 nt, Homo sapiens
  misc_RNA (1)...(19): siRNA sense strand
ccaugugaauugaaaccua

SEQ ID NO: 2073605 - RNA, 19 nt, Homo sapiens
  misc_RNA (1)...(19): siRNA sense strand
caaagagauuauugucauc

SEQ ID NO: 2073606 - RNA, 19 nt, Homo sapiens
  misc_RNA (1)...(19): siRNA sense strand
ccaaagauagauuuagaug

SEQ ID NO: 2073607 - RNA, 19 nt, Homo sapiens
  misc_RNA (1)...(19): siRNA sense strand
cauugaacaucuagauuuc

SEQ ID NO: 2073608 - RNA, 19 nt, Homo sapiens
  misc_RNA (1)...(19): siRNA sense strand
uaccgaagcugaacuacuc

SEQ ID NO: 2073609 - RNA, 19 nt, Homo sapiens
  misc_RNA (1)...(19): siRNA sense strand
gaacauguuggcuggaaag

SEQ ID NO: 2073610 - RNA, 19 nt, Homo sapiens
  misc_RNA (1)...(19): siRNA sense strand
acccaaagauagauuuaga

SEQ ID NO: 2073611 - RNA, 19 nt, Homo sapiens
  misc_RNA (1)...(19): siRNA sense strand
gaaaauagagaacuguaug

SEQ ID NO: 2073612 - RNA, 19 nt, Homo sapiens
  misc_RNA (1)...(19): siRNA sense strand
uauaugaugaugucgagua

SEQ ID NO: 2073613 - RNA, 19 nt, Homo sapiens
  misc_RNA (1)...(19): siRNA sense strand
gaaagcaagaggccaugau

SEQ ID NO: 2073614 - RNA, 19 nt, Homo sapiens
  misc_RNA (1)...(19): siRNA sense strand
gaaaaggaaccauauucaa

SEQ ID NO: 2073615 - RNA, 19 nt, Homo sapiens
  misc_RNA (1)...(19): siRNA sense strand
gaaaagaagcacucaaaag

SEQ ID NO: 2073616 - RNA, 19 nt, Homo sapiens
  misc_RNA (1)...(19): siRNA sense strand
caagaggccaugauugaca

SEQ ID NO: 2073617 - RNA, 19 nt, Homo sapiens
  misc_RNA (1)...(19): siRNA sense strand
aaaagaagcacucaaaaga

SEQ ID NO: 2073618 - RNA, 19 nt, Homo sapiens
  misc_RNA (1)...(19): siRNA sense strand
auggauaugugcucauuga

SEQ ID NO: 2073619 - RNA, 19 nt, Homo sapiens
  misc_RNA (1)...(19): siRNA sense strand
caauaaguccuggagaaga

SEQ ID NO: 2073620 - RNA, 19 nt, Homo sapiens
  misc_RNA (1)...(19): siRNA sense strand
gacaucauccagacaaauc

SEQ ID NO: 2073621 - RNA, 19 nt, Homo sapiens
  misc_RNA (1)...(19): siRNA sense strand
cuaaaggcaaauauggaua

SEQ ID NO: 2073622 - RNA, 19 nt, Homo sapiens
  misc_RNA (1)...(19): siRNA sense strand
ggaaaagaagcacucaaaa

SEQ ID NO: 2073623 - RNA, 19 nt, Homo sapiens
  misc_RNA (1)...(19): siRNA sense strand
aaagcaagaggccaugauu

SEQ ID NO: 2073624 - RNA, 19 nt, Homo sapiens
  misc_RNA (1)...(19): siRNA sense strand
ggaaagcaagaggccauga

SEQ ID NO: 2073625 - RNA, 19 nt, Homo sapiens
  misc_RNA (1)...(19): siRNA sense strand
ucaguacgacaaagagauu

SEQ ID NO: 2073626 - RNA, 19 nt, Homo sapiens
  misc_RNA (1)...(19): siRNA sense strand
ccauuuugcugccugauuu

SEQ ID NO: 2073627 - RNA, 19 nt, Homo sapiens
  misc_RNA (1)...(19): siRNA sense strand
gcucauugaacaucuagau

SEQ ID NO: 2073628 - RNA, 19 nt, Homo sapiens
  misc_RNA (1)...(19): siRNA sense strand
agaagaauuggaagucauu

SEQ ID NO: 2073629 - RNA, 19 nt, Homo sapiens
  misc_RNA (1)...(19): siRNA sense strand
guacgacaaagagauuauu

SEQ ID NO: 2073630 - RNA, 19 nt, Homo sapiens
  misc_RNA (1)...(19): siRNA sense strand
acaacuacccaaagauaga

SEQ ID NO: 2073631 - RNA, 19 nt, Homo sapiens
  misc_RNA (1)...(19): siRNA sense strand
agugauaugucguaauucu

SEQ ID NO: 2073632 - RNA, 19 nt, Homo sapiens
  misc_RNA (1)...(19): siRNA sense strand
aaauucagaugaccaacgu

SEQ ID NO: 2073633 - RNA, 19 nt, Homo sapiens
  misc_RNA (1)...(19): siRNA sense strand
gaacagaaugaaaagagaa

SEQ ID NO: 2073634 - RNA, 19 nt, Homo sapiens
  misc_RNA (1)...(19): siRNA sense strand
cuacccaaagauagauuua

SEQ ID NO: 2073635 - RNA, 19 nt, Homo sapiens
  misc_RNA (1)...(19): siRNA sense strand
agcaagaggccaugauuga

SEQ ID NO: 2073636 - RNA, 19 nt, Homo sapiens
  misc_RNA (1)...(19): siRNA sense strand
gaagaauuggaagucauug

SEQ ID NO: 2073637 - RNA, 19 nt, Homo sapiens
  misc_RNA (1)...(19): siRNA sense strand
gauuucaagcaucaaaguu

SEQ ID NO: 2073638 - RNA, 19 nt, Homo sapiens
  misc_RNA (1)...(19): siRNA sense strand
aaagaacaacuacccaaag

SEQ ID NO: 2073639 - RNA, 19 nt, Homo sapiens
  misc_RNA (1)...(19): siRNA sense strand
ggauaugugcucauugaac

SEQ ID NO: 2073640 - RNA, 19 nt, Homo sapiens
  misc_RNA (1)...(19): siRNA sense strand
aaaggaaccauauucaaac

SEQ ID NO: 2073641 - RNA, 19 nt, Homo sapiens
  misc_RNA (1)...(19): siRNA sense strand
ugccugauuuagaacuuaa

SEQ ID NO: 2073642 - RNA, 19 nt, Homo sapiens
  misc_RNA (1)...(19): siRNA sense strand
uaaagaaaaccaagucgaa

SEQ ID NO: 2073643 - RNA, 19 nt, Homo sapiens
  misc_RNA (1)...(19): siRNA sense strand
aaaaccaagucgaaagaaa

SEQ ID NO: 2073644 - RNA, 19 nt, Homo sapiens
  misc_RNA (1)...(19): siRNA sense strand
gaagcaaaacuuagaaaag

SEQ ID NO: 2073645 - RNA, 19 nt, Homo sapiens
  misc_RNA (1)...(19): siRNA sense strand
aaaacaaccaugugaauug

SEQ ID NO: 2073646 - RNA, 19 nt, Homo sapiens
  misc_RNA (1)...(19): siRNA sense strand
acaucuagauuucaagcau

SEQ ID NO: 2073647 - RNA, 19 nt, Homo sapiens
  misc_RNA (1)...(19): siRNA sense strand
acagguagaaggaacaugu

SEQ ID NO: 2073648 - RNA, 19 nt, Homo sapiens
  misc_RNA (1)...(19): siRNA sense strand
caacguccacacagguaga

SEQ ID NO: 2073649 - RNA, 19 nt, Homo sapiens
  misc_RNA (1)...(19): siRNA sense strand
uuaagucucaggaaguuau

SEQ ID NO: 2073650 - RNA, 19 nt, Homo sapiens
  misc_RNA (1)...(19): siRNA sense strand
uuugcugccugauuuagaa

SEQ ID NO: 2073651 - RNA, 19 nt, Homo sapiens
  misc_RNA (1)...(19): siRNA sense strand
agagaacuguaugaagaug

SEQ ID NO: 2073652 - RNA, 19 nt, Homo sapiens
  misc_RNA (1)...(19): siRNA sense strand
aaucuagugauaugucgua

SEQ ID NO: 2073653 - RNA, 19 nt, Homo sapiens
  misc_RNA (1)...(19): siRNA sense strand
caacuacccaaagauagau

SEQ ID NO: 2073654 - RNA, 19 nt, Homo sapiens
  misc_RNA (1)...(19): siRNA sense strand
agaacuguaugaagauguc

SEQ ID NO: 2073655 - RNA, 19 nt, Homo sapiens
  misc_RNA (1)...(19): siRNA sense strand
guacuccaggaaagaggua

SEQ ID NO: 2073656 - RNA, 19 nt, Homo sapiens
  misc_RNA (1)...(19): siRNA sense strand
aauuggaagucauugauac

SEQ ID NO: 2073657 - RNA, 19 nt, Homo sapiens
  misc_RNA (1)...(19): siRNA sense strand
ccaagaagcaaaacuuaga

SEQ ID NO: 2073658 - RNA, 19 nt, Homo sapiens
  misc_RNA (1)...(19): siRNA sense strand
cugccugauuuagaacuua

SEQ ID NO: 2073659 - RNA, 19 nt, Homo sapiens
  misc_RNA (1)...(19): siRNA sense strand
gcugccugauuuagaacuu

SEQ ID NO: 2073660 - RNA, 19 nt, Homo sapiens
  misc_RNA (1)...(19): siRNA sense strand
aaauguggaagcccaaguu

SEQ ID NO: 2073661 - RNA, 19 nt, Homo sapiens
  misc_RNA (1)...(19): siRNA sense strand
gugauaugucguaauucua

SEQ ID NO: 2073662 - RNA, 19 nt, Homo sapiens
  misc_RNA (1)...(19): siRNA sense strand
ccaauaaguccuggagaag

SEQ ID NO: 2073663 - RNA, 19 nt, Homo sapiens
  misc_RNA (1)...(19): siRNA sense strand
gagaacuguaugaagaugu

SEQ ID NO: 2073664 - RNA, 19 nt, Homo sapiens
  misc_RNA (1)...(19): siRNA sense strand
cuagauuucaagcaucaaa

SEQ ID NO: 2073665 - RNA, 19 nt, Homo sapiens
  misc_RNA (1)...(19): siRNA sense strand
agaauuggaagucauugau

SEQ ID NO: 2073666 - RNA, 19 nt, Homo sapiens
  misc_RNA (1)...(19): siRNA sense strand
uguggaagcccaaguuucu

SEQ ID NO: 2073667 - RNA, 19 nt, Homo sapiens
  misc_RNA (1)...(19): siRNA sense strand
aagcaagaggccaugauug

SEQ ID NO: 2073668 - RNA, 19 nt, Homo sapiens
  misc_RNA (1)...(19): siRNA sense strand
ggaggagauauaugaugau

SEQ ID NO: 2073669 - RNA, 19 nt, Homo sapiens
  misc_RNA (1)...(19): siRNA sense strand
gcacucccaaggccacugu

SEQ ID NO: 2073670 - RNA, 19 nt, Homo sapiens
  misc_RNA (1)...(19): siRNA sense strand
gcagugaucucuuguuaga

SEQ ID NO: 2073671 - RNA, 19 nt, Homo sapiens
  misc_RNA (1)...(19): siRNA sense strand
gaagaacuguggagauguu

SEQ ID NO: 2073672 - RNA, 19 nt, Homo sapiens
  misc_RNA (1)...(19): siRNA sense strand
gccauaaucuucaaguuaa

SEQ ID NO: 2073673 - RNA, 19 nt, Homo sapiens
  misc_RNA (1)...(19): siRNA sense strand
uagcagugaucucuuguua

SEQ ID NO: 2073674 - RNA, 19 nt, Homo sapiens
  misc_RNA (1)...(19): siRNA sense strand
ggaaagccaugaggaagaa

SEQ ID NO: 2073675 - RNA, 19 nt, Homo sapiens
  misc_RNA (1)...(19): siRNA sense strand
caaaugcggucuggauaaa

SEQ ID NO: 2073676 - RNA, 19 nt, Homo sapiens
  misc_RNA (1)...(19): siRNA sense strand
aacaagggcuggcuaaauu

SEQ ID NO: 2073677 - RNA, 19 nt, Homo sapiens
  misc_RNA (1)...(19): siRNA sense strand
gaacaagggcuggcuaaau

SEQ ID NO: 2073678 - RNA, 19 nt, Homo sapiens
  misc_RNA (1)...(19): siRNA sense strand
caaggagaauucauuacuu

SEQ ID NO: 2073679 - RNA, 19 nt, Homo sapiens
  misc_RNA (1)...(19): siRNA sense strand
guggagauguuaauuguau

SEQ ID NO: 2073680 - RNA, 19 nt, Homo sapiens
  misc_RNA (1)...(19): siRNA sense strand
gaacagagaauggccuuau

SEQ ID NO: 2073681 - RNA, 19 nt, Homo sapiens
  misc_RNA (1)...(19): siRNA sense strand
ggccauaaucuucaaguua

SEQ ID NO: 2073682 - RNA, 19 nt, Homo sapiens
  misc_RNA (1)...(19): siRNA sense strand
gaaaauacagcaucaguuu

SEQ ID NO: 2073683 - RNA, 19 nt, Homo sapiens
  misc_RNA (1)...(19): siRNA sense strand
cagaugagguggacgaguu

SEQ ID NO: 2073684 - RNA, 19 nt, Homo sapiens
  misc_RNA (1)...(19): siRNA sense strand
cgaguugucuucucaaaca

SEQ ID NO: 2073685 - RNA, 19 nt, Homo sapiens
  misc_RNA (1)...(19): siRNA sense strand
auacauaccucgaauugau

SEQ ID NO: 2073686 - RNA, 19 nt, Homo sapiens
  misc_RNA (1)...(19): siRNA sense strand
gguuagaauucaaguaguu

SEQ ID NO: 2073687 - RNA, 19 nt, Homo sapiens
  misc_RNA (1)...(19): siRNA sense strand
gaagaauucuagcagugau

SEQ ID NO: 2073688 - RNA, 19 nt, Homo sapiens
  misc_RNA (1)...(19): siRNA sense strand
gaacaggaaauagaaauag

SEQ ID NO: 2073689 - RNA, 19 nt, Homo sapiens
  misc_RNA (1)...(19): siRNA sense strand
caacuugaaugcuguaaaa

SEQ ID NO: 2073690 - RNA, 19 nt, Homo sapiens
  misc_RNA (1)...(19): siRNA sense strand
gaagauaaagggacaaagg

SEQ ID NO: 2073691 - RNA, 19 nt, Homo sapiens
  misc_RNA (1)...(19): siRNA sense strand
uaaaguggacgauagaaga

SEQ ID NO: 2073692 - RNA, 19 nt, Homo sapiens
  misc_RNA (1)...(19): siRNA sense strand
aaagcaagaugaaacacuu

SEQ ID NO: 2073693 - RNA, 19 nt, Homo sapiens
  misc_RNA (1)...(19): siRNA sense strand
ugaaaccaaucaaggagaa

SEQ ID NO: 2073694 - RNA, 19 nt, Homo sapiens
  misc_RNA (1)...(19): siRNA sense strand
acagagcaauggugacaaa

SEQ ID NO: 2073695 - RNA, 19 nt, Homo sapiens
  misc_RNA (1)...(19): siRNA sense strand
acaagcaauuccugaguuu

SEQ ID NO: 2073696 - RNA, 19 nt, Homo sapiens
  misc_RNA (1)...(19): siRNA sense strand
aaagaaacaccaaaucaga

SEQ ID NO: 2073697 - RNA, 19 nt, Homo sapiens
  misc_RNA (1)...(19): siRNA sense strand
ucaguaaaguggacgauag

SEQ ID NO: 2073698 - RNA, 19 nt, Homo sapiens
  misc_RNA (1)...(19): siRNA sense strand
gauaaagaaacaccaaauc

SEQ ID NO: 2073699 - RNA, 19 nt, Homo sapiens
  misc_RNA (1)...(19): siRNA sense strand
gaacuguggagauguuaau

SEQ ID NO: 2073700 - RNA, 19 nt, Homo sapiens
  misc_RNA (1)...(19): siRNA sense strand
ccagaacgcuauuugaaaa

SEQ ID NO: 2073701 - RNA, 19 nt, Homo sapiens
  misc_RNA (1)...(19): siRNA sense strand
gcaugaaaccaaucaagga

SEQ ID NO: 2073702 - RNA, 19 nt, Homo sapiens
  misc_RNA (1)...(19): siRNA sense strand
gacgaguugucuucucaaa

SEQ ID NO: 2073703 - RNA, 19 nt, Homo sapiens
  misc_RNA (1)...(19): siRNA sense strand
ucaaaugcggucuggauaa

SEQ ID NO: 2073704 - RNA, 19 nt, Homo sapiens
  misc_RNA (1)...(19): siRNA sense strand
uccagagccuugugaaauu

SEQ ID NO: 2073705 - RNA, 19 nt, Homo sapiens
  misc_RNA (1)...(19): siRNA sense strand
ggauaaagaaacaccaaau

SEQ ID NO: 2073706 - RNA, 19 nt, Homo sapiens
  misc_RNA (1)...(19): siRNA sense strand
ggacugagaaacagagcaa

SEQ ID NO: 2073707 - RNA, 19 nt, Homo sapiens
  misc_RNA (1)...(19): siRNA sense strand
ggagauguuaauuguauug

SEQ ID NO: 2073708 - RNA, 19 nt, Homo sapiens
  misc_RNA (1)...(19): siRNA sense strand
gauaacaccaucagugaag

SEQ ID NO: 2073709 - RNA, 19 nt, Homo sapiens
  misc_RNA (1)...(19): siRNA sense strand
gcacuuauucauuucuaug

SEQ ID NO: 2073710 - RNA, 19 nt, Homo sapiens
  misc_RNA (1)...(19): siRNA sense strand
guuaucugaugaugaagaa

SEQ ID NO: 2073711 - RNA, 19 nt, Homo sapiens
  misc_RNA (1)...(19): siRNA sense strand
gaagauggaccaaaauuuc

SEQ ID NO: 2073712 - RNA, 19 nt, Homo sapiens
  misc_RNA (1)...(19): siRNA sense strand
cagcacuuauucauuucua

SEQ ID NO: 2073713 - RNA, 19 nt, Homo sapiens
  misc_RNA (1)...(19): siRNA sense strand
gauaggagcaaucaauuuu

SEQ ID NO: 2073714 - RNA, 19 nt, Homo sapiens
  misc_RNA (1)...(19): siRNA sense strand
uguauuggacggauucaua

SEQ ID NO: 2073715 - RNA, 19 nt, Homo sapiens
  misc_RNA (1)...(19): siRNA sense strand
aaauuacacuguggacuga

SEQ ID NO: 2073716 - RNA, 19 nt, Homo sapiens
  misc_RNA (1)...(19): siRNA sense strand
gaagcucucuuuucuaagu

SEQ ID NO: 2073717 - RNA, 19 nt, Homo sapiens
  misc_RNA (1)...(19): siRNA sense strand
gugcugaucccaacuugaa

SEQ ID NO: 2073718 - RNA, 19 nt, Homo sapiens
  misc_RNA (1)...(19): siRNA sense strand
cagaagaccggccauaauc

SEQ ID NO: 2073719 - RNA, 19 nt, Homo sapiens
  misc_RNA (1)...(19): siRNA sense strand
gaccaaaauuucaaagcua

SEQ ID NO: 2073720 - RNA, 19 nt, Homo sapiens
  misc_RNA (1)...(19): siRNA sense strand
gaauucaaguaguuauagg

SEQ ID NO: 2073721 - RNA, 19 nt, Homo sapiens
  misc_RNA (1)...(19): siRNA sense strand
aaggagaauucauuacuuc

SEQ ID NO: 2073722 - RNA, 19 nt, Homo sapiens
  misc_RNA (1)...(19): siRNA sense strand
caugaagagucugcagaaa

SEQ ID NO: 2073723 - RNA, 19 nt, Homo sapiens
  misc_RNA (1)...(19): siRNA sense strand
uuggacggauucauacaua

SEQ ID NO: 2073724 - RNA, 19 nt, Homo sapiens
  misc_RNA (1)...(19): siRNA sense strand
cugaagaacuguggagaug

SEQ ID NO: 2073725 - RNA, 19 nt, Homo sapiens
  misc_RNA (1)...(19): siRNA sense strand
caaucaaggagaauucauu

SEQ ID NO: 2073726 - RNA, 19 nt, Homo sapiens
  misc_RNA (1)...(19): siRNA sense strand
cuacaaaaccagccaguua

SEQ ID NO: 2073727 - RNA, 19 nt, Homo sapiens
  misc_RNA (1)...(19): siRNA sense strand
caccagaacgcuauuugaa

SEQ ID NO: 2073728 - RNA, 19 nt, Homo sapiens
  misc_RNA (1)...(19): siRNA sense strand
uggacaccaucauguuuaa

SEQ ID NO: 2073729 - RNA, 19 nt, Homo sapiens
  misc_RNA (1)...(19): siRNA sense strand
caccagaacaggaaauaga

SEQ ID NO: 2073730 - RNA, 19 nt, Homo sapiens
  misc_RNA (1)...(19): siRNA sense strand
gaaaaguuaucugaugaug

SEQ ID NO: 2073731 - RNA, 19 nt, Homo sapiens
  misc_RNA (1)...(19): siRNA sense strand
ggauaacaccaucagugaa

SEQ ID NO: 2073732 - RNA, 19 nt, Homo sapiens
  misc_RNA (1)...(19): siRNA sense strand
ggucaaaugcggucuggau

SEQ ID NO: 2073733 - RNA, 19 nt, Homo sapiens
  misc_RNA (1)...(19): siRNA sense strand
ucauacauaccucgaauug

SEQ ID NO: 2073734 - RNA, 19 nt, Homo sapiens
  misc_RNA (1)...(19): siRNA sense strand
ccagagccuugugaaauuc

SEQ ID NO: 2073735 - RNA, 19 nt, Homo sapiens
  misc_RNA (1)...(19): siRNA sense strand
caagugaagaguuaugcaa

SEQ ID NO: 2073736 - RNA, 19 nt, Homo sapiens
  misc_RNA (1)...(19): siRNA sense strand
ugggagauaugcaaaccaa

SEQ ID NO: 2073737 - RNA, 19 nt, Homo sapiens
  misc_RNA (1)...(19): siRNA sense strand
gaaggggaauaauaguuga

SEQ ID NO: 2073738 - RNA, 19 nt, Homo sapiens
  misc_RNA (1)...(19): siRNA sense strand
gaaacaccaaaucagaaga

SEQ ID NO: 2073739 - RNA, 19 nt, Homo sapiens
  misc_RNA (1)...(19): siRNA sense strand
aacaagcaauuccugaguu

SEQ ID NO: 2073740 - RNA, 19 nt, Homo sapiens
  misc_RNA (1)...(19): siRNA sense strand
ggccgaagauggaccaaaa

SEQ ID NO: 2073741 - RNA, 19 nt, Homo sapiens
  misc_RNA (1)...(19): siRNA sense strand
gaagaggcggauguggaua

SEQ ID NO: 2073742 - RNA, 19 nt, Homo sapiens
  misc_RNA (1)...(19): siRNA sense strand
ucagaagaccggccauaau

SEQ ID NO: 2073743 - RNA, 19 nt, Homo sapiens
  misc_RNA (1)...(19): siRNA sense strand
aaugcggucuggauaaaga

SEQ ID NO: 2073744 - RNA, 19 nt, Homo sapiens
  misc_RNA (1)...(19): siRNA sense strand
caagggcuggcuaaauuug

SEQ ID NO: 2073745 - RNA, 19 nt, Homo sapiens
  misc_RNA (1)...(19): siRNA sense strand
ggagauaugcaaaccaaaa

SEQ ID NO: 2073746 - RNA, 19 nt, Homo sapiens
  misc_RNA (1)...(19): siRNA sense strand
ccaggaagcucucuuuucu

SEQ ID NO: 2073747 - RNA, 19 nt, Homo sapiens
  misc_RNA (1)...(19): siRNA sense strand
uaaagaaacaccaaaucag

SEQ ID NO: 2073748 - RNA, 19 nt, Homo sapiens
  misc_RNA (1)...(19): siRNA sense strand
ggcuaaauuuggccgaaga

SEQ ID NO: 2073749 - RNA, 19 nt, Homo sapiens
  misc_RNA (1)...(19): siRNA sense strand
gguacacucuccuacaaaa

SEQ ID NO: 2073750 - RNA, 19 nt, Homo sapiens
  misc_RNA (1)...(19): siRNA sense strand
aacagagaauggccuuauu

SEQ ID NO: 2073751 - RNA, 19 nt, Homo sapiens
  misc_RNA (1)...(19): siRNA sense strand
aggaagcucucuuuucuaa

SEQ ID NO: 2073752 - RNA, 19 nt, Homo sapiens
  misc_RNA (1)...(19): siRNA sense strand
gaccggccauaaucuucaa

SEQ ID NO: 2073753 - RNA, 19 nt, Homo sapiens
  misc_RNA (1)...(19): siRNA sense strand
guuaugcaagacaguauuu

SEQ ID NO: 2073754 - RNA, 19 nt, Homo sapiens
  misc_RNA (1)...(19): siRNA sense strand
uggauaacaccaucaguga

SEQ ID NO: 2073755 - RNA, 19 nt, Homo sapiens
  misc_RNA (1)...(19): siRNA sense strand
guuguuggaagaagaauau

SEQ ID NO: 2073756 - RNA, 19 nt, Homo sapiens
  misc_RNA (1)...(19): siRNA sense strand
uaucuugauucaucuugga

SEQ ID NO: 2073757 - RNA, 19 nt, Homo sapiens
  misc_RNA (1)...(19): siRNA sense strand
aagaaacaccaaaucagaa

SEQ ID NO: 2073758 - RNA, 19 nt, Homo sapiens
  misc_RNA (1)...(19): siRNA sense strand
agugaagaguuaugcaaga

SEQ ID NO: 2073759 - RNA, 19 nt, Homo sapiens
  misc_RNA (1)...(19): siRNA sense strand
ccagaacaggaaauagaaa

SEQ ID NO: 2073760 - RNA, 19 nt, Homo sapiens
  misc_RNA (1)...(19): siRNA sense strand
gagcuuaagccaccagaac

SEQ ID NO: 2073761 - RNA, 19 nt, Homo sapiens
  misc_RNA (1)...(19): siRNA sense strand
ggaaggggaauaauaguug

SEQ ID NO: 2073762 - RNA, 19 nt, Homo sapiens
  misc_RNA (1)...(19): siRNA sense strand
aaacagagcaauggugaca

SEQ ID NO: 2073763 - RNA, 19 nt, Homo sapiens
  misc_RNA (1)...(19): siRNA sense strand
gucaaaugcggucuggaua

SEQ ID NO: 2073764 - RNA, 19 nt, Homo sapiens
  misc_RNA (1)...(19): siRNA sense strand
aaauuuggccgaagaugga

SEQ ID NO: 2073765 - RNA, 19 nt, Homo sapiens
  misc_RNA (1)...(19): siRNA sense strand
aaauguuguuggaagaaga

SEQ ID NO: 2073766 - RNA, 19 nt, Homo sapiens
  misc_RNA (1)...(19): siRNA sense strand
ggggcugucuucaaaauga

SEQ ID NO: 2073767 - RNA, 19 nt, Homo sapiens
  misc_RNA (1)...(19): siRNA sense strand
cuguggagauguuaauugu

SEQ ID NO: 2073768 - RNA, 19 nt, Homo sapiens
  misc_RNA (1)...(19): siRNA sense strand
guccuggccugaagaacug

SEQ ID NO: 2073769 - RNA, 19 nt, Homo sapiens
  misc_RNA (1)...(19): siRNA sense strand
cagaacaggaaauagaaau

SEQ ID NO: 2073770 - RNA, 19 nt, Homo sapiens
  misc_RNA (1)...(19): siRNA sense strand
gaagaugacucgagaagaa

SEQ ID NO: 2073771 - RNA, 19 nt, Homo sapiens
  misc_RNA (1)...(19): siRNA sense strand
caacauauuugcaguagaa

SEQ ID NO: 2073772 - RNA, 19 nt, Homo sapiens
  misc_RNA (1)...(19): siRNA sense strand
gcucagagguccaugguuu

SEQ ID NO: 2073773 - RNA, 19 nt, Homo sapiens
  misc_RNA (1)...(19): siRNA sense strand
caacagaggacucaacaua

SEQ ID NO: 2073774 - RNA, 19 nt, Homo sapiens
  misc_RNA (1)...(19): siRNA sense strand
cuacuuaacugucuucaaa

SEQ ID NO: 2073775 - RNA, 19 nt, Homo sapiens
  misc_RNA (1)...(19): siRNA sense strand
ggaaugaacuaacaagaca

SEQ ID NO: 2073776 - RNA, 19 nt, Homo sapiens
  misc_RNA (1)...(19): siRNA sense strand
caauaaagcucuggaguug

SEQ ID NO: 2073777 - RNA, 19 nt, Homo sapiens
  misc_RNA (1)...(19): siRNA sense strand
gagaacaaguggugagaaa

SEQ ID NO: 2073778 - RNA, 19 nt, Homo sapiens
  misc_RNA (1)...(19): siRNA sense strand
caacggugaugccaaagua

SEQ ID NO: 2073779 - RNA, 19 nt, Homo sapiens
  misc_RNA (1)...(19): siRNA sense strand
gaacuaggaccuggaauuu

SEQ ID NO: 2073780 - RNA, 19 nt, Homo sapiens
  misc_RNA (1)...(19): siRNA sense strand
gaagauggugaaaucauua

SEQ ID NO: 2073781 - RNA, 19 nt, Homo sapiens
  misc_RNA (1)...(19): siRNA sense strand
gacaaggauuuauggauuu

SEQ ID NO: 2073782 - RNA, 19 nt, Homo sapiens
  misc_RNA (1)...(19): siRNA sense strand
guaaaucuguucuuagcaa

SEQ ID NO: 2073783 - RNA, 19 nt, Homo sapiens
  misc_RNA (1)...(19): siRNA sense strand
gaacaaguggugagaaaug

SEQ ID NO: 2073784 - RNA, 19 nt, Homo sapiens
  misc_RNA (1)...(19): siRNA sense strand
agacaaggauuuauggauu

SEQ ID NO: 2073785 - RNA, 19 nt, Homo sapiens
  misc_RNA (1)...(19): siRNA sense strand
agaagaagauggugaaauc

SEQ ID NO: 2073786 - RNA, 19 nt, Homo sapiens
  misc_RNA (1)...(19): siRNA sense strand
acagaggacucaacauauu

SEQ ID NO: 2073787 - RNA, 19 nt, Homo sapiens
  misc_RNA (1)...(19): siRNA sense strand
guuaauggagccaaauuua

SEQ ID NO: 2073788 - RNA, 19 nt, Homo sapiens
  misc_RNA (1)...(19): siRNA sense strand
ugagaaaugugaugaagau

SEQ ID NO: 2073789 - RNA, 19 nt, Homo sapiens
  misc_RNA (1)...(19): siRNA sense strand
caaaggaauuuaagucuac

SEQ ID NO: 2073790 - RNA, 19 nt, Homo sapiens
  misc_RNA (1)...(19): siRNA sense strand
caacuuguauauagagaug

SEQ ID NO: 2073791 - RNA, 19 nt, Homo sapiens
  misc_RNA (1)...(19): siRNA sense strand
ggcaacacaugcaaucaaa

SEQ ID NO: 2073792 - RNA, 19 nt, Homo sapiens
  misc_RNA (1)...(19): siRNA sense strand
aauuaaagcuguccauaug

SEQ ID NO: 2073793 - RNA, 19 nt, Homo sapiens
  misc_RNA (1)...(19): siRNA sense strand
gcaacuuucuccagucaga

SEQ ID NO: 2073794 - RNA, 19 nt, Homo sapiens
  misc_RNA (1)...(19): siRNA sense strand
aaagagaggugagaagaug

SEQ ID NO: 2073795 - RNA, 19 nt, Homo sapiens
  misc_RNA (1)...(19): siRNA sense strand
gaugagaaagugauuauuc

SEQ ID NO: 2073796 - RNA, 19 nt, Homo sapiens
  misc_RNA (1)...(19): siRNA sense strand
caaaguuaauggagccaaa

SEQ ID NO: 2073797 - RNA, 19 nt, Homo sapiens
  misc_RNA (1)...(19): siRNA sense strand
aaacugauccagaaacauu

SEQ ID NO: 2073798 - RNA, 19 nt, Homo sapiens
  misc_RNA (1)...(19): siRNA sense strand
aaacaagucagaugagaaa

SEQ ID NO: 2073799 - RNA, 19 nt, Homo sapiens
  misc_RNA (1)...(19): siRNA sense strand
aaagaggaaugaacuaaca

SEQ ID NO: 2073800 - RNA, 19 nt, Homo sapiens
  misc_RNA (1)...(19): siRNA sense strand
uuacuuagcucuucagcau

SEQ ID NO: 2073801 - RNA, 19 nt, Homo sapiens
  misc_RNA (1)...(19): siRNA sense strand
uagcaacggugaugccaaa

SEQ ID NO: 2073802 - RNA, 19 nt, Homo sapiens
  misc_RNA (1)...(19): siRNA sense strand
gaacuaacaagacaaggau

SEQ ID NO: 2073803 - RNA, 19 nt, Homo sapiens
  misc_RNA (1)...(19): siRNA sense strand
gauggaaauggucuucuua

SEQ ID NO: 2073804 - RNA, 19 nt, Homo sapiens
  misc_RNA (1)...(19): siRNA sense strand
ggaagaaauccaucccaaa

SEQ ID NO: 2073805 - RNA, 19 nt, Homo sapiens
  misc_RNA (1)...(19): siRNA sense strand
gaaaugugaugaagaugcu

SEQ ID NO: 2073806 - RNA, 19 nt, Homo sapiens
  misc_RNA (1)...(19): siRNA sense strand
caacuuuacuuagcucuuc

SEQ ID NO: 2073807 - RNA, 19 nt, Homo sapiens
  misc_RNA (1)...(19): siRNA sense strand
ggagauccuugugaccuuu

SEQ ID NO: 2073808 - RNA, 19 nt, Homo sapiens
  misc_RNA (1)...(19): siRNA sense strand
agaagauggugaaaucauu

SEQ ID NO: 2073809 - RNA, 19 nt, Homo sapiens
  misc_RNA (1)...(19): siRNA sense strand
gaagaaauccaucccaaaa

SEQ ID NO: 2073810 - RNA, 19 nt, Homo sapiens
  misc_RNA (1)...(19): siRNA sense strand
caagucagaugagaaagug

SEQ ID NO: 2073811 - RNA, 19 nt, Homo sapiens
  misc_RNA (1)...(19): siRNA sense strand
gaccuggaauuuacugguu

SEQ ID NO: 2073812 - RNA, 19 nt, Homo sapiens
  misc_RNA (1)...(19): siRNA sense strand
uguaaaugcugauggcaaa

SEQ ID NO: 2073813 - RNA, 19 nt, Homo sapiens
  misc_RNA (1)...(19): siRNA sense strand
ucucaagacuacacuagaa

SEQ ID NO: 2073814 - RNA, 19 nt, Homo sapiens
  misc_RNA (1)...(19): siRNA sense strand
gaaauuuccacuaacugaa

SEQ ID NO: 2073815 - RNA, 19 nt, Homo sapiens
  misc_RNA (1)...(19): siRNA sense strand
ggaagcuaaugaucgagaa

SEQ ID NO: 2073816 - RNA, 19 nt, Homo sapiens
  misc_RNA (1)...(19): siRNA sense strand
ccaaaaccaucaccuaaaa

SEQ ID NO: 2073817 - RNA, 19 nt, Homo sapiens
  misc_RNA (1)...(19): siRNA sense strand
aacuagagguugacaguaa

SEQ ID NO: 2073818 - RNA, 19 nt, Homo sapiens
  misc_RNA (1)...(19): siRNA sense strand
uggauggacuggugaacua

SEQ ID NO: 2073819 - RNA, 19 nt, Homo sapiens
  misc_RNA (1)...(19): siRNA sense strand
ggacccaaaucuacaaugc

SEQ ID NO: 2073820 - RNA, 19 nt, Homo sapiens
  misc_RNA (1)...(19): siRNA sense strand
caaagaaauuuccacuaac

SEQ ID NO: 2073821 - RNA, 19 nt, Homo sapiens
  misc_RNA (1)...(19): siRNA sense strand
gaaaacaagucagaugaga

SEQ ID NO: 2073822 - RNA, 19 nt, Homo sapiens
  misc_RNA (1)...(19): siRNA sense strand
ggguaacucuacacucuau

SEQ ID NO: 2073823 - RNA, 19 nt, Homo sapiens
  misc_RNA (1)...(19): siRNA sense strand
gcaaaucuacagcuugugu

SEQ ID NO: 2073824 - RNA, 19 nt, Homo sapiens
  misc_RNA (1)...(19): siRNA sense strand
gaagaaguaaaugccauaa

SEQ ID NO: 2073825 - RNA, 19 nt, Homo sapiens
  misc_RNA (1)...(19): siRNA sense strand
gagguugacaguaaauuga

SEQ ID NO: 2073826 - RNA, 19 nt, Homo sapiens
  misc_RNA (1)...(19): siRNA sense strand
gcauguccauuugucauug

SEQ ID NO: 2073827 - RNA, 19 nt, Homo sapiens
  misc_RNA (1)...(19): siRNA sense strand
acagaggcauguccauuug

SEQ ID NO: 2073828 - RNA, 19 nt, Homo sapiens
  misc_RNA (1)...(19): siRNA sense strand
gaugaagcccaacuuguau

SEQ ID NO: 2073829 - RNA, 19 nt, Homo sapiens
  misc_RNA (1)...(19): siRNA sense strand
agaugaagcccaacuugua

SEQ ID NO: 2073830 - RNA, 19 nt, Homo sapiens
  misc_RNA (1)...(19): siRNA sense strand
aguaauggauggcuaugaa

SEQ ID NO: 2073831 - RNA, 19 nt, Homo sapiens
  misc_RNA (1)...(19): siRNA sense strand
ggauggcuaugaaaauaua

SEQ ID NO: 2073832 - RNA, 19 nt, Homo sapiens
  misc_RNA (1)...(19): siRNA sense strand
caggaguucuuuacuguca

SEQ ID NO: 2073833 - RNA, 19 nt, Homo sapiens
  misc_RNA (1)...(19): siRNA sense strand
aaagguugcuucuucuuag

SEQ ID NO: 2073834 - RNA, 19 nt, Homo sapiens
  misc_RNA (1)...(19): siRNA sense strand
gaugauggcuguauuuuac

SEQ ID NO: 2073835 - RNA, 19 nt, Homo sapiens
  misc_RNA (1)...(19): siRNA sense strand
ugagaaggccauuuguaaa

SEQ ID NO: 2073836 - RNA, 19 nt, Homo sapiens
  misc_RNA (1)...(19): siRNA sense strand
gaacuacgaaauagagaag

SEQ ID NO: 2073837 - RNA, 19 nt, Homo sapiens
  misc_RNA (1)...(19): siRNA sense strand
auaaaggacuggcaacaca

SEQ ID NO: 2073838 - RNA, 19 nt, Homo sapiens
  misc_RNA (1)...(19): siRNA sense strand
ggugaaaucauuagucauc

SEQ ID NO: 2073839 - RNA, 19 nt, Homo sapiens
  misc_RNA (1)...(19): siRNA sense strand
guccaugguuuaucuaaca

SEQ ID NO: 2073840 - RNA, 19 nt, Homo sapiens
  misc_RNA (1)...(19): siRNA sense strand
ggaggcauguaguggacaa

SEQ ID NO: 2073841 - RNA, 19 nt, Homo sapiens
  misc_RNA (1)...(19): siRNA sense strand
ugaaucuaauggaagcuaa

SEQ ID NO: 2073842 - RNA, 19 nt, Homo sapiens
  misc_RNA (1)...(19): siRNA sense strand
guauuggacuccucaaacu

SEQ ID NO: 2073843 - RNA, 19 nt, Homo sapiens
  misc_RNA (1)...(19): siRNA sense strand
cagaggacucaacauauuu

SEQ ID NO: 2073844 - RNA, 19 nt, Homo sapiens
  misc_RNA (1)...(19): siRNA sense strand
gcauguaguggacaacuug

SEQ ID NO: 2073845 - RNA, 19 nt, Homo sapiens
  misc_RNA (1)...(19): siRNA sense strand
ucuaugggcuacaauaaag

SEQ ID NO: 2073846 - RNA, 19 nt, Homo sapiens
  misc_RNA (1)...(19): siRNA sense strand
cuaacaagacaaggauuua

SEQ ID NO: 2073847 - RNA, 19 nt, Homo sapiens
  misc_RNA (1)...(19): siRNA sense strand
aagcccaacuuguauauag

SEQ ID NO: 2073848 - RNA, 19 nt, Homo sapiens
  misc_RNA (1)...(19): siRNA sense strand
ggugagaaaugugaugaag

SEQ ID NO: 2073849 - RNA, 19 nt, Homo sapiens
  misc_RNA (1)...(19): siRNA sense strand
agucagaaaucaacaccuu

SEQ ID NO: 2073850 - RNA, 19 nt, Homo sapiens
  misc_RNA (1)...(19): siRNA sense strand
aaacugccaaacugaauuu

SEQ ID NO: 2073851 - RNA, 19 nt, Homo sapiens
  misc_RNA (1)...(19): siRNA sense strand
caaaguaauggauggcuau

SEQ ID NO: 2073852 - RNA, 19 nt, Homo sapiens
  misc_RNA (1)...(19): siRNA sense strand
acaaagaggaaugaacuaa

SEQ ID NO: 2073853 - RNA, 19 nt, Homo sapiens
  misc_RNA (1)...(19): siRNA sense strand
gaagaugcuugggcugucu

SEQ ID NO: 2073854 - RNA, 19 nt, Homo sapiens
  misc_RNA (1)...(19): siRNA sense strand
gaaaucauuagucaucagu

SEQ ID NO: 2073855 - RNA, 19 nt, Homo sapiens
  misc_RNA (1)...(19): siRNA sense strand
gagaagaugacucgagaag

SEQ ID NO: 2073856 - RNA, 19 nt, Homo sapiens
  misc_RNA (1)...(19): siRNA sense strand
uaacaaagagaggugagaa

SEQ ID NO: 2073857 - RNA, 19 nt, Homo sapiens
  misc_RNA (1)...(19): siRNA sense strand
gagaguccucgaacaaaga

SEQ ID NO: 2073858 - RNA, 19 nt, Homo sapiens
  misc_RNA (1)...(19): siRNA sense strand
uugagaaggccauuuguaa

SEQ ID NO: 2073859 - RNA, 19 nt, Homo sapiens
  misc_RNA (1)...(19): siRNA sense strand
ucagagaguccucgaacaa

SEQ ID NO: 2073860 - RNA, 19 nt, Homo sapiens
  misc_RNA (1)...(19): siRNA sense strand
guccauuugucauugauau

SEQ ID NO: 2073861 - RNA, 19 nt, Homo sapiens
  misc_RNA (1)...(19): siRNA sense strand
acaauaaagcucuggaguu

SEQ ID NO: 2073862 - RNA, 19 nt, Homo sapiens
  misc_RNA (1)...(19): siRNA sense strand
gaagcccaacuuguauaua

SEQ ID NO: 2073863 - RNA, 19 nt, Homo sapiens
  misc_RNA (1)...(19): siRNA sense strand
gaagaagauggugaaauca

SEQ ID NO: 2073864 - RNA, 19 nt, Homo sapiens
  misc_RNA (1)...(19): siRNA sense strand
caaacugccaaacugaauu

SEQ ID NO: 2073865 - RNA, 19 nt, Homo sapiens
  misc_RNA (1)...(19): siRNA sense strand
caucagcaaugagcuaagu

SEQ ID NO: 2073866 - RNA, 19 nt, Homo sapiens
  misc_RNA (1)...(19): siRNA sense strand
caaguggugagaaauguga

SEQ ID NO: 2073867 - RNA, 19 nt, Homo sapiens
  misc_RNA (1)...(19): siRNA sense strand
ugaacuaggaccuggaauu

SEQ ID NO: 2073868 - RNA, 19 nt, Homo sapiens
  misc_RNA (1)...(19): siRNA sense strand
cauuaaaccugagucaagu

SEQ ID NO: 2073869 - RNA, 19 nt, Homo sapiens
  misc_RNA (1)...(19): siRNA sense strand
uggcaaauuugacuacauc

SEQ ID NO: 2073870 - RNA, 19 nt, Homo sapiens
  misc_RNA (1)...(19): siRNA sense strand
gcacagagaugcugacaua

SEQ ID NO: 2073871 - RNA, 19 nt, Homo sapiens
  misc_RNA (1)...(19): siRNA sense strand
gaaaugagaucaaggagaa

SEQ ID NO: 2073872 - RNA, 19 nt, Homo sapiens
  misc_RNA (1)...(19): siRNA sense strand
ggaauuagauuuagcaaga

SEQ ID NO: 2073873 - RNA, 19 nt, Homo sapiens
  misc_RNA (1)...(19): siRNA sense strand
ggaaggugcuggacagaua

SEQ ID NO: 2073874 - RNA, 19 nt, Homo sapiens
  misc_RNA (1)...(19): siRNA sense strand
gaaaggaacccaagagauu

SEQ ID NO: 2073875 - RNA, 19 nt, Homo sapiens
  misc_RNA (1)...(19): siRNA sense strand
caaaugcacucaaggauga

SEQ ID NO: 2073876 - RNA, 19 nt, Homo sapiens
  misc_RNA (1)...(19): siRNA sense strand
gggaagagauggugacuga

SEQ ID NO: 2073877 - RNA, 19 nt, Homo sapiens
  misc_RNA (1)...(19): siRNA sense strand
gcagaagaguuuacagaaa

SEQ ID NO: 2073878 - RNA, 19 nt, Homo sapiens
  misc_RNA (1)...(19): siRNA sense strand
cagagaugcugacauagua

SEQ ID NO: 2073879 - RNA, 19 nt, Homo sapiens
  misc_RNA (1)...(19): siRNA sense strand
caaaugaaaugggaucuga

SEQ ID NO: 2073880 - RNA, 19 nt, Homo sapiens
  misc_RNA (1)...(19): siRNA sense strand
cgaggaagcuggagguuga

SEQ ID NO: 2073881 - RNA, 19 nt, Homo sapiens
  misc_RNA (1)...(19): siRNA sense strand
gacagugguucccauauuu

SEQ ID NO: 2073882 - RNA, 19 nt, Homo sapiens
  misc_RNA (1)...(19): siRNA sense strand
aaacagggcucaaagaagu

SEQ ID NO: 2073883 - RNA, 19 nt, Homo sapiens
  misc_RNA (1)...(19): siRNA sense strand
uaacagcucugaggaaaga

SEQ ID NO: 2073884 - RNA, 19 nt, Homo sapiens
  misc_RNA (1)...(19): siRNA sense strand
ggacacagcaucaaagaga

SEQ ID NO: 2073885 - RNA, 19 nt, Homo sapiens
  misc_RNA (1)...(19): siRNA sense strand
gaaaugacaaguaaaggaa

SEQ ID NO: 2073886 - RNA, 19 nt, Homo sapiens
  misc_RNA (1)...(19): siRNA sense strand
ggaaacagagacagaagua

SEQ ID NO: 2073887 - RNA, 19 nt, Homo sapiens
  misc_RNA (1)...(19): siRNA sense strand
gacgaaagcuuugagaaug

SEQ ID NO: 2073888 - RNA, 19 nt, Homo sapiens
  misc_RNA (1)...(19): siRNA sense strand
uaacagaacccuuggcauu

SEQ ID NO: 2073889 - RNA, 19 nt, Homo sapiens
  misc_RNA (1)...(19): siRNA sense strand
ugaggaagaucccauaaug

SEQ ID NO: 2073890 - RNA, 19 nt, Homo sapiens
  misc_RNA (1)...(19): siRNA sense strand
gcaccaacaggaugaguua

SEQ ID NO: 2073891 - RNA, 19 nt, Homo sapiens
  misc_RNA (1)...(19): siRNA sense strand
ggaaagagagagaguaugu

SEQ ID NO: 2073892 - RNA, 19 nt, Homo sapiens
  misc_RNA (1)...(19): siRNA sense strand
ugaaguagaugaggagaaa

SEQ ID NO: 2073893 - RNA, 19 nt, Homo sapiens
  misc_RNA (1)...(19): siRNA sense strand
ucacagugcuugagacaga

SEQ ID NO: 2073894 - RNA, 19 nt, Homo sapiens
  misc_RNA (1)...(19): siRNA sense strand
gagaugacagugacauaua

SEQ ID NO: 2073895 - RNA, 19 nt, Homo sapiens
  misc_RNA (1)...(19): siRNA sense strand
gaaaagagguuaugagaac

SEQ ID NO: 2073896 - RNA, 19 nt, Homo sapiens
  misc_RNA (1)...(19): siRNA sense strand
cagcagcaaucaacucaaa

SEQ ID NO: 2073897 - RNA, 19 nt, Homo sapiens
  misc_RNA (1)...(19): siRNA sense strand
cauaacagcucugaggaaa

SEQ ID NO: 2073898 - RNA, 19 nt, Homo sapiens
  misc_RNA (1)...(19): siRNA sense strand
gaagucacccuuauucuag

SEQ ID NO: 2073899 - RNA, 19 nt, Homo sapiens
  misc_RNA (1)...(19): siRNA sense strand
gaaaggagaggaacugaag

SEQ ID NO: 2073900 - RNA, 19 nt, Homo sapiens
  misc_RNA (1)...(19): siRNA sense strand
ccaacaggaugaguuagua

SEQ ID NO: 2073901 - RNA, 19 nt, Homo sapiens
  misc_RNA (1)...(19): siRNA sense strand
gaaagaagcaauggaggaa

SEQ ID NO: 2073902 - RNA, 19 nt, Homo sapiens
  misc_RNA (1)...(19): siRNA sense strand
gcaagaaggcagugaugaa

SEQ ID NO: 2073903 - RNA, 19 nt, Homo sapiens
  misc_RNA (1)...(19): siRNA sense strand
gccaauagacgaaagcuuu

SEQ ID NO: 2073904 - RNA, 19 nt, Homo sapiens
  misc_RNA (1)...(19): siRNA sense strand
uggaggaaaugacaaguaa

SEQ ID NO: 2073905 - RNA, 19 nt, Homo sapiens
  misc_RNA (1)...(19): siRNA sense strand
ggaacaggguuuagagaag

SEQ ID NO: 2073906 - RNA, 19 nt, Homo sapiens
  misc_RNA (1)...(19): siRNA sense strand
ggaugcaggugaacagguu

SEQ ID NO: 2073907 - RNA, 19 nt, Homo sapiens
  misc_RNA (1)...(19): siRNA sense strand
gagagaagcaacagcauau

SEQ ID NO: 2073908 - RNA, 19 nt, Homo sapiens
  misc_RNA (1)...(19): siRNA sense strand
ggagacagccgaggagaaa

SEQ ID NO: 2073909 - RNA, 19 nt, Homo sapiens
  misc_RNA (1)...(19): siRNA sense strand
gcacaaagacagagaagag

SEQ ID NO: 2073910 - RNA, 19 nt, Homo sapiens
  misc_RNA (1)...(19): siRNA sense strand
cagcagagcagccagaauu

SEQ ID NO: 2073911 - RNA, 19 nt, Homo sapiens
  misc_RNA (1)...(19): siRNA sense strand
cguauacacuggagaagaa

SEQ ID NO: 2073912 - RNA, 19 nt, Homo sapiens
  misc_RNA (1)...(19): siRNA sense strand
ggaaaugacaaguaaagga

SEQ ID NO: 2073913 - RNA, 19 nt, Homo sapiens
  misc_RNA (1)...(19): siRNA sense strand
agagagagaguaugugaua

SEQ ID NO: 2073914 - RNA, 19 nt, Homo sapiens
  misc_RNA (1)...(19): siRNA sense strand
ggacauggaaggagaagga

SEQ ID NO: 2073915 - RNA, 19 nt, Homo sapiens
  misc_RNA (1)...(19): siRNA sense strand
gaagaugauaggaaagaaa

SEQ ID NO: 2073916 - RNA, 19 nt, Homo sapiens
  misc_RNA (1)...(19): siRNA sense strand
gaaauugaagaccaagaaa

SEQ ID NO: 2073917 - RNA, 19 nt, Homo sapiens
  misc_RNA (1)...(19): siRNA sense strand
gaauaccgcagucaccuuu

SEQ ID NO: 2073918 - RNA, 19 nt, Homo sapiens
  misc_RNA (1)...(19): siRNA sense strand
gaaaggauucauugccauu

SEQ ID NO: 2073919 - RNA, 19 nt, Homo sapiens
  misc_RNA (1)...(19): siRNA sense strand
ggaugaagaugcuuuuaaa

SEQ ID NO: 2073920 - RNA, 19 nt, Homo sapiens
  misc_RNA (1)...(19): siRNA sense strand
ggaagaugauaggaaagaa

SEQ ID NO: 2073921 - RNA, 19 nt, Homo sapiens
  misc_RNA (1)...(19): siRNA sense strand
uagggaagaugauaggaaa

SEQ ID NO: 2073922 - RNA, 19 nt, Homo sapiens
  misc_RNA (1)...(19): siRNA sense strand
gagaggaaccagccaaaga

SEQ ID NO: 2073923 - RNA, 19 nt, Homo sapiens
  misc_RNA (1)...(19): siRNA sense strand
ggaagcauccauagaccua

SEQ ID NO: 2073924 - RNA, 19 nt, Homo sapiens
  misc_RNA (1)...(19): siRNA sense strand
caaggaaucccagcaauug

SEQ ID NO: 2073925 - RNA, 19 nt, Homo sapiens
  misc_RNA (1)...(19): siRNA sense strand
uaacugcuguggaggaaau

SEQ ID NO: 2073926 - RNA, 19 nt, Homo sapiens
  misc_RNA (1)...(19): siRNA sense strand
agacagugguucccauauu

SEQ ID NO: 2073927 - RNA, 19 nt, Homo sapiens
  misc_RNA (1)...(19): siRNA sense strand
gugacaaugugaaagauga

SEQ ID NO: 2073928 - RNA, 19 nt, Homo sapiens
  misc_RNA (1)...(19): siRNA sense strand
cauaucaacuuccaaacau

SEQ ID NO: 2073929 - RNA, 19 nt, Homo sapiens
  misc_RNA (1)...(19): siRNA sense strand
aggcagugcuugcaaauga

SEQ ID NO: 2073930 - RNA, 19 nt, Homo sapiens
  misc_RNA (1)...(19): siRNA sense strand
agaguaagcuuugggaaga

SEQ ID NO: 2073931 - RNA, 19 nt, Homo sapiens
  misc_RNA (1)...(19): siRNA sense strand
gaaagucucaccuuccaau

SEQ ID NO: 2073932 - RNA, 19 nt, Homo sapiens
  misc_RNA (1)...(19): siRNA sense strand
agaauuggcagaagaguuu

SEQ ID NO: 2073933 - RNA, 19 nt, Homo sapiens
  misc_RNA (1)...(19): siRNA sense strand
ggaaggagaaggaaacaca

SEQ ID NO: 2073934 - RNA, 19 nt, Homo sapiens
  misc_RNA (1)...(19): siRNA sense strand
gaagggcaccgccaagaug

SEQ ID NO: 2073935 - RNA, 19 nt, Homo sapiens
  misc_RNA (1)...(19): siRNA sense strand
gaauagggcccugaaggaa

SEQ ID NO: 2073936 - RNA, 19 nt, Homo sapiens
  misc_RNA (1)...(19): siRNA sense strand
gaagaaggcugaggggaaa

SEQ ID NO: 2073937 - RNA, 19 nt, Homo sapiens
  misc_RNA (1)...(19): siRNA sense strand
cagcagcccugaacuugga

SEQ ID NO: 2073938 - RNA, 19 nt, Homo sapiens
  misc_RNA (1)...(19): siRNA sense strand
gcuguuuacugaauaugaa

SEQ ID NO: 2073939 - RNA, 19 nt, Homo sapiens
  misc_RNA (1)...(19): siRNA sense strand
ugaaugggaugcaggugaa

SEQ ID NO: 2073940 - RNA, 19 nt, Homo sapiens
  misc_RNA (1)...(19): siRNA sense strand
ggagaaggaaacacacaaa

SEQ ID NO: 2073941 - RNA, 19 nt, Homo sapiens
  misc_RNA (1)...(19): siRNA sense strand
gcuaauagggaagaugaua

SEQ ID NO: 2073942 - RNA, 19 nt, Homo sapiens
  misc_RNA (1)...(19): siRNA sense strand
agaaggcagugaugaaguu

SEQ ID NO: 2073943 - RNA, 19 nt, Homo sapiens
  misc_RNA (1)...(19): siRNA sense strand
ccaagccgaugccaauaga

SEQ ID NO: 2073944 - RNA, 19 nt, Homo sapiens
  misc_RNA (1)...(19): siRNA sense strand
aaagagcacugagaaagga

SEQ ID NO: 2073945 - RNA, 19 nt, Homo sapiens
  misc_RNA (1)...(19): siRNA sense strand
gagaaaggaacccaagaga

SEQ ID NO: 2073946 - RNA, 19 nt, Homo sapiens
  misc_RNA (1)...(19): siRNA sense strand
caaauaaagccuccuccuu

SEQ ID NO: 2073947 - RNA, 19 nt, Homo sapiens
  misc_RNA (1)...(19): siRNA sense strand
gauucaagaaggauucaua

SEQ ID NO: 2073948 - RNA, 19 nt, Homo sapiens
  misc_RNA (1)...(19): siRNA sense strand
ccaacaacgugcaggucua

SEQ ID NO: 2073949 - RNA, 19 nt, Homo sapiens
  misc_RNA (1)...(19): siRNA sense strand
ggaagaaaccuggcaccaa

SEQ ID NO: 2073950 - RNA, 19 nt, Homo sapiens
  misc_RNA (1)...(19): siRNA sense strand
ggaaccagccaaagagaga

SEQ ID NO: 2073951 - RNA, 19 nt, Homo sapiens
  misc_RNA (1)...(19): siRNA sense strand
cagaagaguuuacagaaaa

SEQ ID NO: 2073952 - RNA, 19 nt, Homo sapiens
  misc_RNA (1)...(19): siRNA sense strand
ggacagauaauaacagaac

SEQ ID NO: 2073953 - RNA, 19 nt, Homo sapiens
  misc_RNA (1)...(19): siRNA sense strand
ggauaaacaaggcgaguug

SEQ ID NO: 2073954 - RNA, 19 nt, Homo sapiens
  misc_RNA (1)...(19): siRNA sense strand
cauaggcaauucacagaga

SEQ ID NO: 2073955 - RNA, 19 nt, Homo sapiens
  misc_RNA (1)...(19): siRNA sense strand
gccgaaaucuaggaaagaa

SEQ ID NO: 2073956 - RNA, 19 nt, Homo sapiens
  misc_RNA (1)...(19): siRNA sense strand
gaucaucuccuugcuacaa

SEQ ID NO: 2073957 - RNA, 19 nt, Homo sapiens
  misc_RNA (1)...(19): siRNA sense strand
gaggaaagagagagaguau

SEQ ID NO: 2073958 - RNA, 19 nt, Homo sapiens
  misc_RNA (1)...(19): siRNA sense strand
gagcugaggaagagacaaa

SEQ ID NO: 2073959 - RNA, 19 nt, Homo sapiens
  misc_RNA (1)...(19): siRNA sense strand
gaagaggaagcauccauag

SEQ ID NO: 2073960 - RNA, 19 nt, Homo sapiens
  misc_RNA (1)...(19): siRNA sense strand
cggagaaagugaagaggaa

SEQ ID NO: 2073961 - RNA, 19 nt, Homo sapiens
  misc_RNA (1)...(19): siRNA sense strand
ugaaguagcagcccugaga

SEQ ID NO: 2073962 - RNA, 19 nt, Homo sapiens
  misc_RNA (1)...(19): siRNA sense strand
gaaggugcuggacagauaa

SEQ ID NO: 2073963 - RNA, 19 nt, Homo sapiens
  misc_RNA (1)...(19): siRNA sense strand
gcacugcucaggugaagga

SEQ ID NO: 2073964 - RNA, 19 nt, Homo sapiens
  misc_RNA (1)...(19): siRNA sense strand
acaaaggauucaagaagga

SEQ ID NO: 2073965 - RNA, 19 nt, Homo sapiens
  misc_RNA (1)...(19): siRNA sense strand
gcagucaccuuuggaugau

SEQ ID NO: 2073966 - RNA, 19 nt, Homo sapiens
  misc_RNA (1)...(19): siRNA sense strand
gauggugacugaggcagaa

SEQ ID NO: 2073967 - RNA, 19 nt, Homo sapiens
  misc_RNA (1)...(19): siRNA sense strand
cgagagaagcaacagcaua

SEQ ID NO: 2073968 - RNA, 19 nt, Homo sapiens
  misc_RNA (1)...(19): siRNA sense strand
gcagaggagaugacaguga

SEQ ID NO: 2073969 - RNA, 19 nt, Homo sapiens
  misc_RNA (1)...(19): siRNA sense strand
ggagcuagcagccaaagau

SEQ ID NO: 2073970 - RNA, 19 nt, Homo sapiens
  misc_RNA (1)...(19): siRNA sense strand
gcugauaguuugcaucuuc

SEQ ID NO: 2073971 - RNA, 19 nt, Homo sapiens
  misc_RNA (1)...(19): siRNA sense strand
gggcuuaucucagaguuca

SEQ ID NO: 2073972 - RNA, 19 nt, Homo sapiens
  misc_RNA (1)...(19): siRNA sense strand
cgaaagcuguggccaugug

SEQ ID NO: 2073973 - RNA, 19 nt, Homo sapiens
  misc_RNA (1)...(19): siRNA sense strand
ucaagaagacccuguagga

SEQ ID NO: 2073974 - RNA, 19 nt, Homo sapiens
  misc_RNA (1)...(19): siRNA sense strand
gacccgggauccugaauuc

SEQ ID NO: 2073975 - RNA, 19 nt, Homo sapiens
  misc_RNA (1)...(19): siRNA sense strand
gagcagcagucaagaagac

SEQ ID NO: 2073976 - RNA, 19 nt, Homo sapiens
  misc_RNA (1)...(19): siRNA sense strand
gguggugacuguuucaaag

SEQ ID NO: 2073977 - RNA, 19 nt, Homo sapiens
  misc_RNA (1)...(19): siRNA sense strand
gaagaaguguccccagaug

SEQ ID NO: 2073978 - RNA, 19 nt, Homo sapiens
  misc_RNA (1)...(19): siRNA sense strand
ggaccagucuguggcaauc

SEQ ID NO: 2073979 - RNA, 19 nt, Homo sapiens
  misc_RNA (1)...(19): siRNA sense strand
ccaagguggugacuguuuc

SEQ ID NO: 2073980 - RNA, 19 nt, Homo sapiens
  misc_RNA (1)...(19): siRNA sense strand
agaagacccuguaggaucu

SEQ ID NO: 2073981 - RNA, 19 nt, Homo sapiens
  misc_RNA (1)...(19): siRNA sense strand
ugauggugcugauaguuug

SEQ ID NO: 2073982 - RNA, 19 nt, Homo sapiens
  misc_RNA (1)...(19): siRNA sense strand
gaucgaagcgccugauggu

SEQ ID NO: 2073983 - RNA, 19 nt, Homo sapiens
  misc_RNA (1)...(19): siRNA sense strand
cacgcucucuuccucuaua

SEQ ID NO: 2073984 - RNA, 19 nt, Homo sapiens
  misc_RNA (1)...(19): siRNA sense strand
ggauguuccuccacgaagu

SEQ ID NO: 2073985 - RNA, 19 nt, Homo sapiens
  misc_RNA (1)...(19): siRNA sense strand
agaguucacuaucacuaga

SEQ ID NO: 2073986 - RNA, 19 nt, Homo sapiens
  misc_RNA (1)...(19): siRNA sense strand
gccaagguggugacuguuu

SEQ ID NO: 2073987 - RNA, 19 nt, Homo sapiens
  misc_RNA (1)...(19): siRNA sense strand
cuacauccuuggcucagau

SEQ ID NO: 2073988 - RNA, 19 nt, Homo sapiens
  misc_RNA (1)...(19): siRNA sense strand
gugccagucucgcgggauu

SEQ ID NO: 2073989 - RNA, 19 nt, Homo sapiens
  misc_RNA (1)...(19): siRNA sense strand
ugcaaggugugcuguguga

SEQ ID NO: 2073990 - RNA, 19 nt, Homo sapiens
  misc_RNA (1)...(19): siRNA sense strand
ccaggaacacgcucucuuc

SEQ ID NO: 2073991 - RNA, 19 nt, Homo sapiens
  misc_RNA (1)...(19): siRNA sense strand
ggccaaugguagccacaga

SEQ ID NO: 2073992 - RNA, 19 nt, Homo sapiens
  misc_RNA (1)...(19): siRNA sense strand
caagaagacccuguaggau

SEQ ID NO: 2073993 - RNA, 19 nt, Homo sapiens
  misc_RNA (1)...(19): siRNA sense strand
gaguuuccaugacauucug

SEQ ID NO: 2073994 - RNA, 19 nt, Homo sapiens
  misc_RNA (1)...(19): siRNA sense strand
ugggaaauguagucacugu

SEQ ID NO: 2073995 - RNA, 19 nt, Homo sapiens
  misc_RNA (1)...(19): siRNA sense strand
cacuagaguuuccaugaca

SEQ ID NO: 2073996 - RNA, 19 nt, Homo sapiens
  misc_RNA (1)...(19): siRNA sense strand
gauguuccuccacgaaguu

SEQ ID NO: 2073997 - RNA, 19 nt, Homo sapiens
  misc_RNA (1)...(19): siRNA sense strand
caccggaggauggccauua

SEQ ID NO: 2073998 - RNA, 19 nt, Homo sapiens
  misc_RNA (1)...(19): siRNA sense strand
ggugcaaggugugcugugu

SEQ ID NO: 2073999 - RNA, 19 nt, Homo sapiens
  misc_RNA (1)...(19): siRNA sense strand
ucagaguucacuaucacua

SEQ ID NO: 2074000 - RNA, 19 nt, Homo sapiens
  misc_RNA (1)...(19): siRNA sense strand
ugggacgggugagaguuua

SEQ ID NO: 2074001 - RNA, 19 nt, Homo sapiens
  misc_RNA (1)...(19): siRNA sense strand
gggagcagcagucaagaag

SEQ ID NO: 2074002 - RNA, 19 nt, Homo sapiens
  misc_RNA (1)...(19): siRNA sense strand
gagcuuagccucguauucc

SEQ ID NO: 2074003 - RNA, 19 nt, Homo sapiens
  misc_RNA (1)...(19): siRNA sense strand
guugggaaauguagucacu

SEQ ID NO: 2074004 - RNA, 19 nt, Homo sapiens
  misc_RNA (1)...(19): siRNA sense strand
ucacuagaguuuccaugac

SEQ ID NO: 2074005 - RNA, 19 nt, Homo sapiens
  misc_RNA (1)...(19): siRNA sense strand
gcagagcuuagccucguau

SEQ ID NO: 2074006 - RNA, 19 nt, Homo sapiens
  misc_RNA (1)...(19): siRNA sense strand
cugccaagguggugacugu

SEQ ID NO: 2074007 - RNA, 19 nt, Homo sapiens
  misc_RNA (1)...(19): siRNA sense strand
ccaggguacgcgacaauug

SEQ ID NO: 2074008 - RNA, 19 nt, Homo sapiens
  misc_RNA (1)...(19): siRNA sense strand
caacugcccuuugguucac

SEQ ID NO: 2074009 - RNA, 19 nt, Homo sapiens
  misc_RNA (1)...(19): siRNA sense strand
ggacacagcagagcuuagc

SEQ ID NO: 2074010 - RNA, 19 nt, Homo sapiens
  misc_RNA (1)...(19): siRNA sense strand
gaccagauagugccagucu

SEQ ID NO: 2074011 - RNA, 19 nt, Homo sapiens
  misc_RNA (1)...(19): siRNA sense strand
ggaauacugcgcggugcaa

SEQ ID NO: 2074012 - RNA, 19 nt, Homo sapiens
  misc_RNA (1)...(19): siRNA sense strand
ccugcuggccuuacuggua

SEQ ID NO: 2074013 - RNA, 19 nt, Homo sapiens
  misc_RNA (1)...(19): siRNA sense strand
aagaaaaucugugcuacuu

SEQ ID NO: 2074014 - RNA, 19 nt, Homo sapiens
  misc_RNA (1)...(19): siRNA sense strand
ggagcagcagucaagaaga

SEQ ID NO: 2074015 - RNA, 19 nt, Homo sapiens
  misc_RNA (1)...(19): siRNA sense strand
uccuugggcuuaucucaga

SEQ ID NO: 2074016 - RNA, 19 nt, Homo sapiens
  misc_RNA (1)...(19): siRNA sense strand
gcaucuuccuugggcuuau

SEQ ID NO: 2074017 - RNA, 19 nt, Homo sapiens
  misc_RNA (1)...(19): siRNA sense strand
cugauggugcugauaguuu

SEQ ID NO: 2074018 - RNA, 19 nt, Homo sapiens
  misc_RNA (1)...(19): siRNA sense strand
gaagacccuguaggaucua

SEQ ID NO: 2074019 - RNA, 19 nt, Homo sapiens
  misc_RNA (1)...(19): siRNA sense strand
aacacgcucucuuccucua

SEQ ID NO: 2074020 - RNA, 19 nt, Homo sapiens
  misc_RNA (1)...(19): siRNA sense strand
ucucagaguucacuaucac

SEQ ID NO: 2074021 - RNA, 19 nt, Homo sapiens
  misc_RNA (1)...(19): siRNA sense strand
cugcuccuguccagaagaa

SEQ ID NO: 2074022 - RNA, 19 nt, Homo sapiens
  misc_RNA (1)...(19): siRNA sense strand
ugagacagcuccacacaua

SEQ ID NO: 2074023 - RNA, 19 nt, Homo sapiens
  misc_RNA (1)...(19): siRNA sense strand
gaacagaagcugacaagca

SEQ ID NO: 2074024 - RNA, 19 nt, Homo sapiens
  misc_RNA (1)...(19): siRNA sense strand
caacaucaaugcuguccuu

SEQ ID NO: 2074025 - RNA, 19 nt, Homo sapiens
  misc_RNA (1)...(19): siRNA sense strand
guacaugucuguccugucu

SEQ ID NO: 2074026 - RNA, 19 nt, Homo sapiens
  misc_RNA (1)...(19): siRNA sense strand
ucaccaagaucucgacuga

SEQ ID NO: 2074027 - RNA, 19 nt, Homo sapiens
  misc_RNA (1)...(19): siRNA sense strand
gaucucgacugacaucuuc

SEQ ID NO: 2074028 - RNA, 19 nt, Homo sapiens
  misc_RNA (1)...(19): siRNA sense strand
ccugaugucugccaaagaa

SEQ ID NO: 2074029 - RNA, 19 nt, Homo sapiens
  misc_RNA (1)...(19): siRNA sense strand
gagccacucuggagacaug

SEQ ID NO: 2074030 - RNA, 19 nt, Homo sapiens
  misc_RNA (1)...(19): siRNA sense strand
ucacagagcccggagcuuu

SEQ ID NO: 2074031 - RNA, 19 nt, Homo sapiens
  misc_RNA (1)...(19): siRNA sense strand
gcaagucgagggaccauug

SEQ ID NO: 2074032 - RNA, 19 nt, Homo sapiens
  misc_RNA (1)...(19): siRNA sense strand
caacagagcaggagcugau

SEQ ID NO: 2074033 - RNA, 19 nt, Homo sapiens
  misc_RNA (1)...(19): siRNA sense strand
agagaaggcugcgcuagaa

SEQ ID NO: 2074034 - RNA, 19 nt, Homo sapiens
  misc_RNA (1)...(19): siRNA sense strand
ucacucaccuccaucuuca

SEQ ID NO: 2074035 - RNA, 19 nt, Homo sapiens
  misc_RNA (1)...(19): siRNA sense strand
gugggcagcucuucgacua

SEQ ID NO: 2074036 - RNA, 19 nt, Homo sapiens
  misc_RNA (1)...(19): siRNA sense strand
gcagaguguuugugguguu

SEQ ID NO: 2074037 - RNA, 19 nt, Homo sapiens
  misc_RNA (1)...(19): siRNA sense strand
ccaauuggagcaucucuga

SEQ ID NO: 2074038 - RNA, 19 nt, Homo sapiens
  misc_RNA (1)...(19): siRNA sense strand
ggucaucuacuuugucuuc

SEQ ID NO: 2074039 - RNA, 19 nt, Homo sapiens
  misc_RNA (1)...(19): siRNA sense strand
ucacugccaucgucauugu

SEQ ID NO: 2074040 - RNA, 19 nt, Homo sapiens
  misc_RNA (1)...(19): siRNA sense strand
caacauugccuacccuaag

SEQ ID NO: 2074041 - RNA, 19 nt, Homo sapiens
  misc_RNA (1)...(19): siRNA sense strand
gcacccuguucaccauuga

SEQ ID NO: 2074042 - RNA, 19 nt, Homo sapiens
  misc_RNA (1)...(19): siRNA sense strand
uccaggcugucaccaguua

SEQ ID NO: 2074043 - RNA, 19 nt, Homo sapiens
  misc_RNA (1)...(19): siRNA sense strand
ucucugauguccagcaaug

SEQ ID NO: 2074044 - RNA, 19 nt, Homo sapiens
  misc_RNA (1)...(19): siRNA sense strand
caucaaugcuguccuuuug

SEQ ID NO: 2074045 - RNA, 19 nt, Homo sapiens
  misc_RNA (1)...(19): siRNA sense strand
gcagcacccuguucaccau

SEQ ID NO: 2074046 - RNA, 19 nt, Homo sapiens
  misc_RNA (1)...(19): siRNA sense strand
ggccaucccuaaugucaca

SEQ ID NO: 2074047 - RNA, 19 nt, Homo sapiens
  misc_RNA (1)...(19): siRNA sense strand
ucacaaugccgcaguaucu

SEQ ID NO: 2074048 - RNA, 19 nt, Homo sapiens
  misc_RNA (1)...(19): siRNA sense strand
ggcaggccaucccuaaugu

SEQ ID NO: 2074049 - RNA, 19 nt, Homo sapiens
  misc_RNA (1)...(19): siRNA sense strand
gccaagagucugucucaug

SEQ ID NO: 2074050 - RNA, 19 nt, Homo sapiens
  misc_RNA (1)...(19): siRNA sense strand
aacagaagcugacaagcau

SEQ ID NO: 2074051 - RNA, 19 nt, Homo sapiens
  misc_RNA (1)...(19): siRNA sense strand
ggacuuccacuaccuguac

SEQ ID NO: 2074052 - RNA, 19 nt, Homo sapiens
  misc_RNA (1)...(19): siRNA sense strand
gguggugacugccgucuac

SEQ ID NO: 2074053 - RNA, 19 nt, Homo sapiens
  misc_RNA (1)...(19): siRNA sense strand
gggcagcucuucgacuaca

SEQ ID NO: 2074054 - RNA, 19 nt, Homo sapiens
  misc_RNA (1)...(19): siRNA sense strand
accaagaucucgacugaca

SEQ ID NO: 2074055 - RNA, 19 nt, Homo sapiens
  misc_RNA (1)...(19): siRNA sense strand
cgagagcacaccggagaua

SEQ ID NO: 2074056 - RNA, 19 nt, Homo sapiens
  misc_RNA (1)...(19): siRNA sense strand
gcugaugauugccgugauc

SEQ ID NO: 2074057 - RNA, 19 nt, Homo sapiens
  misc_RNA (1)...(19): siRNA sense strand
cagagaaggcugcgcuaga

SEQ ID NO: 2074058 - RNA, 19 nt, Homo sapiens
  misc_RNA (1)...(19): siRNA sense strand
gaccauuggcggcuauuuc

SEQ ID NO: 2074059 - RNA, 19 nt, Homo sapiens
  misc_RNA (1)...(19): siRNA sense strand
cagaagcugacaagcauug

SEQ ID NO: 2074060 - RNA, 19 nt, Homo sapiens
  misc_RNA (1)...(19): siRNA sense strand
aggcugcgcuagaacagaa

SEQ ID NO: 2074061 - RNA, 19 nt, Homo sapiens
  misc_RNA (1)...(19): siRNA sense strand
gcucacugccaucgucauu

SEQ ID NO: 2074062 - RNA, 19 nt, Homo sapiens
  misc_RNA (1)...(19): siRNA sense strand
gcagacggugaucauggua

SEQ ID NO: 2074063 - RNA, 19 nt, Homo sapiens
  misc_RNA (1)...(19): siRNA sense strand
gguggugggcagaguguuu

SEQ ID NO: 2074064 - RNA, 19 nt, Homo sapiens
  misc_RNA (1)...(19): siRNA sense strand
caagaucucgacugacauc

SEQ ID NO: 2074065 - RNA, 19 nt, Homo sapiens
  misc_RNA (1)...(19): siRNA sense strand
gagcccugguccucauguu

SEQ ID NO: 2074066 - RNA, 19 nt, Homo sapiens
  misc_RNA (1)...(19): siRNA sense strand
cauugcagguggccucaug

SEQ ID NO: 2074067 - RNA, 19 nt, Homo sapiens
  misc_RNA (1)...(19): siRNA sense strand
ccucauguuucugggcuuu

SEQ ID NO: 2074068 - RNA, 19 nt, Homo sapiens
  misc_RNA (1)...(19): siRNA sense strand
ugacugccgucuacaccau

SEQ ID NO: 2074069 - RNA, 19 nt, Homo sapiens
  misc_RNA (1)...(19): siRNA sense strand
gcgugguggucaucuacuu

SEQ ID NO: 2074070 - RNA, 19 nt, Homo sapiens
  misc_RNA (1)...(19): siRNA sense strand
gagagcacaccggagauau

SEQ ID NO: 2074071 - RNA, 19 nt, Homo sapiens
  misc_RNA (1)...(19): siRNA sense strand
ucagcgugguggucaucua

SEQ ID NO: 2074072 - RNA, 19 nt, Homo sapiens
  misc_RNA (1)...(19): siRNA sense strand
acaggcaggccaucccuaa

SEQ ID NO: 2074073 - RNA, 19 nt, Homo sapiens
  misc_RNA (1)...(19): siRNA sense strand
guggucaucuacuuugucu

SEQ ID NO: 2074074 - RNA, 19 nt, Homo sapiens
  misc_RNA (1)...(19): siRNA sense strand
cuacuuugucuucgucauu

SEQ ID NO: 2074075 - RNA, 19 nt, Homo sapiens
  misc_RNA (1)...(19): siRNA sense strand
gagguggagcggcagagaa

SEQ ID NO: 2074076 - RNA, 19 nt, Homo sapiens
  misc_RNA (1)...(19): siRNA sense strand
ggaccauuggcggcuauuu

SEQ ID NO: 2074077 - RNA, 19 nt, Homo sapiens
  misc_RNA (1)...(19): siRNA sense strand
gaguggggcuucugcguau

SEQ ID NO: 2074078 - RNA, 19 nt, Homo sapiens
  misc_RNA (1)...(19): siRNA sense strand
uaucugaagaagcgauuug

SEQ ID NO: 2074079 - RNA, 19 nt, Homo sapiens
  misc_RNA (1)...(19): siRNA sense strand
gauccuggaguucucauac

SEQ ID NO: 2074080 - RNA, 19 nt, Homo sapiens
  misc_RNA (1)...(19): siRNA sense strand
cagaguguuugugguguuc

SEQ ID NO: 2074081 - RNA, 19 nt, Homo sapiens
  misc_RNA (1)...(19): siRNA sense strand
aacauugccuacccuaagu

SEQ ID NO: 2074082 - RNA, 19 nt, Homo sapiens
  misc_RNA (1)...(19): siRNA sense strand
ccaacauugccuacccuaa

SEQ ID NO: 2074083 - RNA, 19 nt, Homo sapiens
  misc_RNA (1)...(19): siRNA sense strand
acaaugccgcaguaucuga

SEQ ID NO: 2074084 - RNA, 19 nt, Homo sapiens
  misc_RNA (1)...(19): siRNA sense strand
gagcugguggccaauugga

SEQ ID NO: 2074085 - RNA, 19 nt, Homo sapiens
  misc_RNA (1)...(19): siRNA sense strand
caacagugggcagcucuuc

SEQ ID NO: 2074086 - RNA, 19 nt, Homo sapiens
  misc_RNA (1)...(19): siRNA sense strand
ucaccuccaucuucaacag

SEQ ID NO: 2074087 - RNA, 19 nt, Homo sapiens
  misc_RNA (1)...(19): siRNA sense strand
gcccugguccucauguuuc

SEQ ID NO: 2074088 - RNA, 19 nt, Homo sapiens
  misc_RNA (1)...(19): siRNA sense strand
caaugccgcaguaucugaa

SEQ ID NO: 2074089 - RNA, 19 nt, Homo sapiens
  misc_RNA (1)...(19): siRNA sense strand
uacuuugucuucgucauug

SEQ ID NO: 2074090 - RNA, 19 nt, Homo sapiens
  misc_RNA (1)...(19): siRNA sense strand
uagaacagaagcugacaag

SEQ ID NO: 2074091 - RNA, 19 nt, Homo sapiens
  misc_RNA (1)...(19): siRNA sense strand
uagguggcuucgaguggaa

SEQ ID NO: 2074092 - RNA, 19 nt, Homo sapiens
  misc_RNA (1)...(19): siRNA sense strand
guaugauccuggaguucuc

SEQ ID NO: 2074093 - RNA, 19 nt, Homo sapiens
  misc_RNA (1)...(19): siRNA sense strand
gaagugcuguuuacucauu

SEQ ID NO: 2074094 - RNA, 19 nt, Homo sapiens
  misc_RNA (1)...(19): siRNA sense strand
ggaggaugcuguacacauu

SEQ ID NO: 2074095 - RNA, 19 nt, Homo sapiens
  misc_RNA (1)...(19): siRNA sense strand
ugacauggaugaaauugaa

SEQ ID NO: 2074096 - RNA, 19 nt, Homo sapiens
  misc_RNA (1)...(19): siRNA sense strand
ccaagcagcagaacaaaua

SEQ ID NO: 2074097 - RNA, 19 nt, Homo sapiens
  misc_RNA (1)...(19): siRNA sense strand
gagaugaacauucuagaaa

SEQ ID NO: 2074098 - RNA, 19 nt, Homo sapiens
  misc_RNA (1)...(19): siRNA sense strand
gagaugaacauucuagaaa

SEQ ID NO: 2074099 - RNA, 19 nt, Homo sapiens
  misc_RNA (1)...(19): siRNA sense strand
ucagaagccucaaagagaa

SEQ ID NO: 2074100 - RNA, 19 nt, Homo sapiens
  misc_RNA (1)...(19): siRNA sense strand
cagaagugcuguuuacuca

SEQ ID NO: 2074101 - RNA, 19 nt, Homo sapiens
  misc_RNA (1)...(19): siRNA sense strand
gccaucacuuguucaaaua

SEQ ID NO: 2074102 - RNA, 19 nt, Homo sapiens
  misc_RNA (1)...(19): siRNA sense strand
gccaucacuuguucaaaua

SEQ ID NO: 2074103 - RNA, 19 nt, Homo sapiens
  misc_RNA (1)...(19): siRNA sense strand
ucaggaugcucuaaacauu

SEQ ID NO: 2074104 - RNA, 19 nt, Homo sapiens
  misc_RNA (1)...(19): siRNA sense strand
ggauagauguuauucaacu

SEQ ID NO: 2074105 - RNA, 19 nt, Homo sapiens
  misc_RNA (1)...(19): siRNA sense strand
ugaaagugaugaugaggaa

SEQ ID NO: 2074106 - RNA, 19 nt, Homo sapiens
  misc_RNA (1)...(19): siRNA sense strand
gaugaacauucuagaaauc

SEQ ID NO: 2074107 - RNA, 19 nt, Homo sapiens
  misc_RNA (1)...(19): siRNA sense strand
gaggagcucaggcaauaua

SEQ ID NO: 2074108 - RNA, 19 nt, Homo sapiens
  misc_RNA (1)...(19): siRNA sense strand
gaugaacauucuagaaauc

SEQ ID NO: 2074109 - RNA, 19 nt, Homo sapiens
  misc_RNA (1)...(19): siRNA sense strand
gaggagcucaggcaauaua

SEQ ID NO: 2074110 - RNA, 19 nt, Homo sapiens
  misc_RNA (1)...(19): siRNA sense strand
gacagaagaaauacaagua

SEQ ID NO: 2074111 - RNA, 19 nt, Homo sapiens
  misc_RNA (1)...(19): siRNA sense strand
ggacaucggugggaucaag

SEQ ID NO: 2074112 - RNA, 19 nt, Homo sapiens
  misc_RNA (1)...(19): siRNA sense strand
ggaaugagcgacaguucaa

SEQ ID NO: 2074113 - RNA, 19 nt, Homo sapiens
  misc_RNA (1)...(19): siRNA sense strand
gcagaaggcugaagaaaag

SEQ ID NO: 2074114 - RNA, 19 nt, Homo sapiens
  misc_RNA (1)...(19): siRNA sense strand
ggaaugagcgacaguucaa

SEQ ID NO: 2074115 - RNA, 19 nt, Homo sapiens
  misc_RNA (1)...(19): siRNA sense strand
ugacgaagaugaggaugaa

SEQ ID NO: 2074116 - RNA, 19 nt, Homo sapiens
  misc_RNA (1)...(19): siRNA sense strand
acaaacagcaguucagaaa

SEQ ID NO: 2074117 - RNA, 19 nt, Homo sapiens
  misc_RNA (1)...(19): siRNA sense strand
ugaggaggaugagaaagua

SEQ ID NO: 2074118 - RNA, 19 nt, Homo sapiens
  misc_RNA (1)...(19): siRNA sense strand
gcacagcaccuuguccaaa

SEQ ID NO: 2074119 - RNA, 19 nt, Homo sapiens
  misc_RNA (1)...(19): siRNA sense strand
gcacagcaccuuguccaaa

SEQ ID NO: 2074120 - RNA, 19 nt, Homo sapiens
  misc_RNA (1)...(19): siRNA sense strand
ugauaacgaugacgaugaa

SEQ ID NO: 2074121 - RNA, 19 nt, Homo sapiens
  misc_RNA (1)...(19): siRNA sense strand
gaagaaacagcaguucaga

SEQ ID NO: 2074122 - RNA, 19 nt, Homo sapiens
  misc_RNA (1)...(19): siRNA sense strand
gaggaugcuguacacauua

SEQ ID NO: 2074123 - RNA, 19 nt, Homo sapiens
  misc_RNA (1)...(19): siRNA sense strand
ggaggaaugugccaucacu

SEQ ID NO: 2074124 - RNA, 19 nt, Homo sapiens
  misc_RNA (1)...(19): siRNA sense strand
caaauagccauggcccuua

SEQ ID NO: 2074125 - RNA, 19 nt, Homo sapiens
  misc_RNA (1)...(19): siRNA sense strand
aacgagagcugacccaguu

SEQ ID NO: 2074126 - RNA, 19 nt, Homo sapiens
  misc_RNA (1)...(19): siRNA sense strand
ggcaggaccuccaagaaca

SEQ ID NO: 2074127 - RNA, 19 nt, Homo sapiens
  misc_RNA (1)...(19): siRNA sense strand
aacgagagcugacccaguu

SEQ ID NO: 2074128 - RNA, 19 nt, Homo sapiens
  misc_RNA (1)...(19): siRNA sense strand
uaacucaaguggccugcuu

SEQ ID NO: 2074129 - RNA, 19 nt, Homo sapiens
  misc_RNA (1)...(19): siRNA sense strand
ggcaggaccuccaagaaca

SEQ ID NO: 2074130 - RNA, 19 nt, Homo sapiens
  misc_RNA (1)...(19): siRNA sense strand
agaaaguacuggaaucauc

SEQ ID NO: 2074131 - RNA, 19 nt, Homo sapiens
  misc_RNA (1)...(19): siRNA sense strand
cgaugacgaugaagauguu

SEQ ID NO: 2074132 - RNA, 19 nt, Homo sapiens
  misc_RNA (1)...(19): siRNA sense strand
cuggauagauguuauucaa

SEQ ID NO: 2074133 - RNA, 19 nt, Homo sapiens
  misc_RNA (1)...(19): siRNA sense strand
uggcuuggcuguugacaug

SEQ ID NO: 2074134 - RNA, 19 nt, Homo sapiens
  misc_RNA (1)...(19): siRNA sense strand
gaaaguacuggaaucaucu

SEQ ID NO: 2074135 - RNA, 19 nt, Homo sapiens
  misc_RNA (1)...(19): siRNA sense strand
gaaugugccaucacuuguu

SEQ ID NO: 2074136 - RNA, 19 nt, Homo sapiens
  misc_RNA (1)...(19): siRNA sense strand
ggaaucugcaggagucuga

SEQ ID NO: 2074137 - RNA, 19 nt, Homo sapiens
  misc_RNA (1)...(19): siRNA sense strand
aaagucgacucaacucuca

SEQ ID NO: 2074138 - RNA, 19 nt, Homo sapiens
  misc_RNA (1)...(19): siRNA sense strand
ccaaccgacagaagaaaua

SEQ ID NO: 2074139 - RNA, 19 nt, Homo sapiens
  misc_RNA (1)...(19): siRNA sense strand
ggaccaagaagaggaagaa

SEQ ID NO: 2074140 - RNA, 19 nt, Homo sapiens
  misc_RNA (1)...(19): siRNA sense strand
gagaagaaacagcaguuca

SEQ ID NO: 2074141 - RNA, 19 nt, Homo sapiens
  misc_RNA (1)...(19): siRNA sense strand
ggaagacaaagucaacuca

SEQ ID NO: 2074142 - RNA, 19 nt, Homo sapiens
  misc_RNA (1)...(19): siRNA sense strand
aauauaaaguccugguuca

SEQ ID NO: 2074143 - RNA, 19 nt, Homo sapiens
  misc_RNA (1)...(19): siRNA sense strand
ccaaccagccacauagaaa

SEQ ID NO: 2074144 - RNA, 19 nt, Homo sapiens
  misc_RNA (1)...(19): siRNA sense strand
ugagguggcugagaaagug

SEQ ID NO: 2074145 - RNA, 19 nt, Homo sapiens
  misc_RNA (1)...(19): siRNA sense strand
aauauaaaguccugguuca

SEQ ID NO: 2074146 - RNA, 19 nt, Homo sapiens
  misc_RNA (1)...(19): siRNA sense strand
gcagagaugaacauucuag

SEQ ID NO: 2074147 - RNA, 19 nt, Homo sapiens
  misc_RNA (1)...(19): siRNA sense strand
ggccagcccuacagaagug

SEQ ID NO: 2074148 - RNA, 19 nt, Homo sapiens
  misc_RNA (1)...(19): siRNA sense strand
gcagagaugaacauucuag

SEQ ID NO: 2074149 - RNA, 19 nt, Homo sapiens
  misc_RNA (1)...(19): siRNA sense strand
ugccaucacuuguucaaau

SEQ ID NO: 2074150 - RNA, 19 nt, Homo sapiens
  misc_RNA (1)...(19): siRNA sense strand
ggaagacaaagucgacuca

SEQ ID NO: 2074151 - RNA, 19 nt, Homo sapiens
  misc_RNA (1)...(19): siRNA sense strand
ugccaucacuuguucaaau

SEQ ID NO: 2074152 - RNA, 19 nt, Homo sapiens
  misc_RNA (1)...(19): siRNA sense strand
gaaaucaacgagaaauugc

SEQ ID NO: 2074153 - RNA, 19 nt, Homo sapiens
  misc_RNA (1)...(19): siRNA sense strand
cagcagaacaaauacaaau

SEQ ID NO: 2074154 - RNA, 19 nt, Homo sapiens
  misc_RNA (1)...(19): siRNA sense strand
aggcagagaugaacauucu

SEQ ID NO: 2074155 - RNA, 19 nt, Homo sapiens
  misc_RNA (1)...(19): siRNA sense strand
aggcagagaugaacauucu

SEQ ID NO: 2074156 - RNA, 19 nt, Homo sapiens
  misc_RNA (1)...(19): siRNA sense strand
acucaucucugguuguaga

SEQ ID NO: 2074157 - RNA, 19 nt, Homo sapiens
  misc_RNA (1)...(19): siRNA sense strand
gaaguuccuuuuaugcauu

SEQ ID NO: 2074158 - RNA, 19 nt, Homo sapiens
  misc_RNA (1)...(19): siRNA sense strand
gaagguuauucgacucucu

SEQ ID NO: 2074159 - RNA, 19 nt, Homo sapiens
  misc_RNA (1)...(19): siRNA sense strand
agaauccucucaugaugga

SEQ ID NO: 2074160 - RNA, 19 nt, Homo sapiens
  misc_RNA (1)...(19): siRNA sense strand
gagcucaggcaauauaaag

SEQ ID NO: 2074161 - RNA, 19 nt, Homo sapiens
  misc_RNA (1)...(19): siRNA sense strand
gcgagaaggcagagaugaa

SEQ ID NO: 2074162 - RNA, 19 nt, Homo sapiens
  misc_RNA (1)...(19): siRNA sense strand
aaauagccauggcccuuau

SEQ ID NO: 2074163 - RNA, 19 nt, Homo sapiens
  misc_RNA (1)...(19): siRNA sense strand
gagcucaggcaauauaaag

SEQ ID NO: 2074164 - RNA, 19 nt, Homo sapiens
  misc_RNA (1)...(19): siRNA sense strand
gcgagaaggcagagaugaa

SEQ ID NO: 2074165 - RNA, 19 nt, Homo sapiens
  misc_RNA (1)...(19): siRNA sense strand
ccacaaacgucagcauggu

SEQ ID NO: 2074166 - RNA, 19 nt, Homo sapiens
  misc_RNA (1)...(19): siRNA sense strand
ggaaugugccaucacuugu

SEQ ID NO: 2074167 - RNA, 19 nt, Homo sapiens
  misc_RNA (1)...(19): siRNA sense strand
gaugagaaaguacuggaau

SEQ ID NO: 2074168 - RNA, 19 nt, Homo sapiens
  misc_RNA (1)...(19): siRNA sense strand
agaaaucaacgagaaauug

SEQ ID NO: 2074169 - RNA, 19 nt, Homo sapiens
  misc_RNA (1)...(19): siRNA sense strand
agaugaggaugaagauguu

SEQ ID NO: 2074170 - RNA, 19 nt, Homo sapiens
  misc_RNA (1)...(19): siRNA sense strand
uaccuuggcuuggcucuug

SEQ ID NO: 2074171 - RNA, 19 nt, Homo sapiens
  misc_RNA (1)...(19): siRNA sense strand
cuggauagauguuauucga

SEQ ID NO: 2074172 - RNA, 19 nt, Homo sapiens
  misc_RNA (1)...(19): siRNA sense strand
ucggugggaucaagugaaa

SEQ ID NO: 2074173 - RNA, 19 nt, Homo sapiens
  misc_RNA (1)...(19): siRNA sense strand
cugagaaagugcagaaauc

SEQ ID NO: 2074174 - RNA, 19 nt, Homo sapiens
  misc_RNA (1)...(19): siRNA sense strand
gugcaaagaccucauaaaa

SEQ ID NO: 2074175 - RNA, 19 nt, Homo sapiens
  misc_RNA (1)...(19): siRNA sense strand
acaaguaugaagaguguaa

SEQ ID NO: 2074176 - RNA, 19 nt, Homo sapiens
  misc_RNA (1)...(19): siRNA sense strand
cauguuggcuuuucucuug

SEQ ID NO: 2074177 - RNA, 19 nt, Homo sapiens
  misc_RNA (1)...(19): siRNA sense strand
gaaggcagagaugaacauu

SEQ ID NO: 2074178 - RNA, 19 nt, Homo sapiens
  misc_RNA (1)...(19): siRNA sense strand
gccagugucucccaggaau

SEQ ID NO: 2074179 - RNA, 19 nt, Homo sapiens
  misc_RNA (1)...(19): siRNA sense strand
gaaggcagagaugaacauu

SEQ ID NO: 2074180 - RNA, 19 nt, Homo sapiens
  misc_RNA (1)...(19): siRNA sense strand
gcaauauaaaguccugguu

SEQ ID NO: 2074181 - RNA, 19 nt, Homo sapiens
  misc_RNA (1)...(19): siRNA sense strand
accaagaaguggaagaaga

SEQ ID NO: 2074182 - RNA, 19 nt, Homo sapiens
  misc_RNA (1)...(19): siRNA sense strand
guaccaagaaguggaagaa

SEQ ID NO: 2074183 - RNA, 19 nt, Homo sapiens
  misc_RNA (1)...(19): siRNA sense strand
guccugggaugaagguuau

SEQ ID NO: 2074184 - RNA, 19 nt, Homo sapiens
  misc_RNA (1)...(19): siRNA sense strand
uaacgaugacgaugaagau

SEQ ID NO: 2074185 - RNA, 19 nt, Homo sapiens
  misc_RNA (1)...(19): siRNA sense strand
gcaauauaaaguccugguu

SEQ ID NO: 2074186 - RNA, 19 nt, Homo sapiens
  misc_RNA (1)...(19): siRNA sense strand
gcagcagaacaaauacaaa

SEQ ID NO: 2074187 - RNA, 19 nt, Homo sapiens
  misc_RNA (1)...(19): siRNA sense strand
gaugucaggaugcucuaaa

SEQ ID NO: 2074188 - RNA, 19 nt, Homo sapiens
  misc_RNA (1)...(19): siRNA sense strand
aaacagcaguucagaaacc

SEQ ID NO: 2074189 - RNA, 19 nt, Homo sapiens
  misc_RNA (1)...(19): siRNA sense strand
gaguguaaagaccucauaa

SEQ ID NO: 2074190 - RNA, 19 nt, Homo sapiens
  misc_RNA (1)...(19): siRNA sense strand
uuauucgacucucucaauu

SEQ ID NO: 2074191 - RNA, 19 nt, Homo sapiens
  misc_RNA (1)...(19): siRNA sense strand
agaaacagcaguucagaag

SEQ ID NO: 2074192 - RNA, 19 nt, Homo sapiens
  misc_RNA (1)...(19): siRNA sense strand
aaaugaaagugaugaugag

SEQ ID NO: 2074193 - RNA, 19 nt, Homo sapiens
  misc_RNA (1)...(19): siRNA sense strand
ggaagugccugaagucuua

SEQ ID NO: 2074194 - RNA, 19 nt, Homo sapiens
  misc_RNA (1)...(19): siRNA sense strand
caacugcucuugacaauug

SEQ ID NO: 2074195 - RNA, 19 nt, Homo sapiens
  misc_RNA (1)...(19): siRNA sense strand
gaagugcuguuuacucauu

SEQ ID NO: 2074196 - RNA, 19 nt, Homo sapiens
  misc_RNA (1)...(19): siRNA sense strand
ggaggaugcuguacacauu

SEQ ID NO: 2074197 - RNA, 19 nt, Homo sapiens
  misc_RNA (1)...(19): siRNA sense strand
ugacauggaugaaauugaa

SEQ ID NO: 2074198 - RNA, 19 nt, Homo sapiens
  misc_RNA (1)...(19): siRNA sense strand
ccaagcagcagaacaaaua

SEQ ID NO: 2074199 - RNA, 19 nt, Homo sapiens
  misc_RNA (1)...(19): siRNA sense strand
gagaugaacauucuagaaa

SEQ ID NO: 2074200 - RNA, 19 nt, Homo sapiens
  misc_RNA (1)...(19): siRNA sense strand
gagaugaacauucuagaaa

SEQ ID NO: 2074201 - RNA, 19 nt, Homo sapiens
  misc_RNA (1)...(19): siRNA sense strand
ucagaagccucaaagagaa

SEQ ID NO: 2074202 - RNA, 19 nt, Homo sapiens
  misc_RNA (1)...(19): siRNA sense strand
cagaagugcuguuuacuca

SEQ ID NO: 2074203 - RNA, 19 nt, Homo sapiens
  misc_RNA (1)...(19): siRNA sense strand
gccaucacuuguucaaaua

SEQ ID NO: 2074204 - RNA, 19 nt, Homo sapiens
  misc_RNA (1)...(19): siRNA sense strand
gccaucacuuguucaaaua

SEQ ID NO: 2074205 - RNA, 19 nt, Homo sapiens
  misc_RNA (1)...(19): siRNA sense strand
ucaggaugcucuaaacauu

SEQ ID NO: 2074206 - RNA, 19 nt, Homo sapiens
  misc_RNA (1)...(19): siRNA sense strand
ggauagauguuauucaacu

SEQ ID NO: 2074207 - RNA, 19 nt, Homo sapiens
  misc_RNA (1)...(19): siRNA sense strand
ugaaagugaugaugaggaa

SEQ ID NO: 2074208 - RNA, 19 nt, Homo sapiens
  misc_RNA (1)...(19): siRNA sense strand
gaugaacauucuagaaauc

SEQ ID NO: 2074209 - RNA, 19 nt, Homo sapiens
  misc_RNA (1)...(19): siRNA sense strand
gaggagcucaggcaauaua

SEQ ID NO: 2074210 - RNA, 19 nt, Homo sapiens
  misc_RNA (1)...(19): siRNA sense strand
gaugaacauucuagaaauc

SEQ ID NO: 2074211 - RNA, 19 nt, Homo sapiens
  misc_RNA (1)...(19): siRNA sense strand
gaggagcucaggcaauaua

SEQ ID NO: 2074212 - RNA, 19 nt, Homo sapiens
  misc_RNA (1)...(19): siRNA sense strand
gacagaagaaauacaagua

SEQ ID NO: 2074213 - RNA, 19 nt, Homo sapiens
  misc_RNA (1)...(19): siRNA sense strand
ggacaucggugggaucaag

SEQ ID NO: 2074214 - RNA, 19 nt, Homo sapiens
  misc_RNA (1)...(19): siRNA sense strand
ggaaugagcgacaguucaa

SEQ ID NO: 2074215 - RNA, 19 nt, Homo sapiens
  misc_RNA (1)...(19): siRNA sense strand
gcagaaggcugaagaaaag

SEQ ID NO: 2074216 - RNA, 19 nt, Homo sapiens
  misc_RNA (1)...(19): siRNA sense strand
ggaaugagcgacaguucaa

SEQ ID NO: 2074217 - RNA, 19 nt, Homo sapiens
  misc_RNA (1)...(19): siRNA sense strand
ugacgaagaugaggaugaa

SEQ ID NO: 2074218 - RNA, 19 nt, Homo sapiens
  misc_RNA (1)...(19): siRNA sense strand
acaaacagcaguucagaaa

SEQ ID NO: 2074219 - RNA, 19 nt, Homo sapiens
  misc_RNA (1)...(19): siRNA sense strand
ugaggaggaugagaaagua

SEQ ID NO: 2074220 - RNA, 19 nt, Homo sapiens
  misc_RNA (1)...(19): siRNA sense strand
gcacagcaccuuguccaaa

SEQ ID NO: 2074221 - RNA, 19 nt, Homo sapiens
  misc_RNA (1)...(19): siRNA sense strand
gcacagcaccuuguccaaa

SEQ ID NO: 2074222 - RNA, 19 nt, Homo sapiens
  misc_RNA (1)...(19): siRNA sense strand
ugauaacgaugacgaugaa

SEQ ID NO: 2074223 - RNA, 19 nt, Homo sapiens
  misc_RNA (1)...(19): siRNA sense strand
gaagaaacagcaguucaga

SEQ ID NO: 2074224 - RNA, 19 nt, Homo sapiens
  misc_RNA (1)...(19): siRNA sense strand
gaggaugcuguacacauua

SEQ ID NO: 2074225 - RNA, 19 nt, Homo sapiens
  misc_RNA (1)...(19): siRNA sense strand
ggaggaaugugccaucacu

SEQ ID NO: 2074226 - RNA, 19 nt, Homo sapiens
  misc_RNA (1)...(19): siRNA sense strand
caaauagccauggcccuua

SEQ ID NO: 2074227 - RNA, 19 nt, Homo sapiens
  misc_RNA (1)...(19): siRNA sense strand
aacgagagcugacccaguu

SEQ ID NO: 2074228 - RNA, 19 nt, Homo sapiens
  misc_RNA (1)...(19): siRNA sense strand
ggcaggaccuccaagaaca

SEQ ID NO: 2074229 - RNA, 19 nt, Homo sapiens
  misc_RNA (1)...(19): siRNA sense strand
aacgagagcugacccaguu

SEQ ID NO: 2074230 - RNA, 19 nt, Homo sapiens
  misc_RNA (1)...(19): siRNA sense strand
uaacucaaguggccugcuu

SEQ ID NO: 2074231 - RNA, 19 nt, Homo sapiens
  misc_RNA (1)...(19): siRNA sense strand
ggcaggaccuccaagaaca

SEQ ID NO: 2074232 - RNA, 19 nt, Homo sapiens
  misc_RNA (1)...(19): siRNA sense strand
agaaaguacuggaaucauc

SEQ ID NO: 2074233 - RNA, 19 nt, Homo sapiens
  misc_RNA (1)...(19): siRNA sense strand
cgaugacgaugaagauguu

SEQ ID NO: 2074234 - RNA, 19 nt, Homo sapiens
  misc_RNA (1)...(19): siRNA sense strand
cuggauagauguuauucaa

SEQ ID NO: 2074235 - RNA, 19 nt, Homo sapiens
  misc_RNA (1)...(19): siRNA sense strand
uggcuuggcuguugacaug

SEQ ID NO: 2074236 - RNA, 19 nt, Homo sapiens
  misc_RNA (1)...(19): siRNA sense strand
gaaaguacuggaaucaucu

SEQ ID NO: 2074237 - RNA, 19 nt, Homo sapiens
  misc_RNA (1)...(19): siRNA sense strand
gaaugugccaucacuuguu

SEQ ID NO: 2074238 - RNA, 19 nt, Homo sapiens
  misc_RNA (1)...(19): siRNA sense strand
ggaaucugcaggagucuga

SEQ ID NO: 2074239 - RNA, 19 nt, Homo sapiens
  misc_RNA (1)...(19): siRNA sense strand
aaagucgacucaacucuca

SEQ ID NO: 2074240 - RNA, 19 nt, Homo sapiens
  misc_RNA (1)...(19): siRNA sense strand
ccaaccgacagaagaaaua

SEQ ID NO: 2074241 - RNA, 19 nt, Homo sapiens
  misc_RNA (1)...(19): siRNA sense strand
ggaccaagaagaggaagaa

SEQ ID NO: 2074242 - RNA, 19 nt, Homo sapiens
  misc_RNA (1)...(19): siRNA sense strand
gagaagaaacagcaguuca

SEQ ID NO: 2074243 - RNA, 19 nt, Homo sapiens
  misc_RNA (1)...(19): siRNA sense strand
ggaagacaaagucaacuca

SEQ ID NO: 2074244 - RNA, 19 nt, Homo sapiens
  misc_RNA (1)...(19): siRNA sense strand
aauauaaaguccugguuca

SEQ ID NO: 2074245 - RNA, 19 nt, Homo sapiens
  misc_RNA (1)...(19): siRNA sense strand
gaaguguguuuuacucauu

SEQ ID NO: 2074246 - RNA, 19 nt, Homo sapiens
  misc_RNA (1)...(19): siRNA sense strand
ccaaccagccacauagaaa

SEQ ID NO: 2074247 - RNA, 19 nt, Homo sapiens
  misc_RNA (1)...(19): siRNA sense strand
ugagguggcugagaaagug

SEQ ID NO: 2074248 - RNA, 19 nt, Homo sapiens
  misc_RNA (1)...(19): siRNA sense strand
aauauaaaguccugguuca

SEQ ID NO: 2074249 - RNA, 19 nt, Homo sapiens
  misc_RNA (1)...(19): siRNA sense strand
gcagagaugaacauucuag

SEQ ID NO: 2074250 - RNA, 19 nt, Homo sapiens
  misc_RNA (1)...(19): siRNA sense strand
ggccagcccuacagaagug

SEQ ID NO: 2074251 - RNA, 19 nt, Homo sapiens
  misc_RNA (1)...(19): siRNA sense strand
gcagagaugaacauucuag

SEQ ID NO: 2074252 - RNA, 19 nt, Homo sapiens
  misc_RNA (1)...(19): siRNA sense strand
gaaaucaacgagaaauugc

SEQ ID NO: 2074253 - RNA, 19 nt, Homo sapiens
  misc_RNA (1)...(19): siRNA sense strand
aggcagagaugaacauucu

SEQ ID NO: 2074254 - RNA, 19 nt, Homo sapiens
  misc_RNA (1)...(19): siRNA sense strand
ggaagacaaagucgacuca

SEQ ID NO: 2074255 - RNA, 19 nt, Homo sapiens
  misc_RNA (1)...(19): siRNA sense strand
ugccaucacuuguucaaau

SEQ ID NO: 2074256 - RNA, 19 nt, Homo sapiens
  misc_RNA (1)...(19): siRNA sense strand
cagcagaacaaauacaaau

SEQ ID NO: 2074257 - RNA, 19 nt, Homo sapiens
  misc_RNA (1)...(19): siRNA sense strand
aggcagagaugaacauucu

SEQ ID NO: 2074258 - RNA, 19 nt, Homo sapiens
  misc_RNA (1)...(19): siRNA sense strand
ugccaucacuuguucaaau

SEQ ID NO: 2074259 - RNA, 19 nt, Homo sapiens
  misc_RNA (1)...(19): siRNA sense strand
acucaucucugguuguaga

SEQ ID NO: 2074260 - RNA, 19 nt, Homo sapiens
  misc_RNA (1)...(19): siRNA sense strand
gaaguuccuuuuaugcauu

SEQ ID NO: 2074261 - RNA, 19 nt, Homo sapiens
  misc_RNA (1)...(19): siRNA sense strand
gaagguuauucgacucucu

SEQ ID NO: 2074262 - RNA, 19 nt, Homo sapiens
  misc_RNA (1)...(19): siRNA sense strand
agaauccucucaugaugga

SEQ ID NO: 2074263 - RNA, 19 nt, Homo sapiens
  misc_RNA (1)...(19): siRNA sense strand
gagcucaggcaauauaaag

SEQ ID NO: 2074264 - RNA, 19 nt, Homo sapiens
  misc_RNA (1)...(19): siRNA sense strand
aaauagccauggcccuuau

SEQ ID NO: 2074265 - RNA, 19 nt, Homo sapiens
  misc_RNA (1)...(19): siRNA sense strand
gagcucaggcaauauaaag

SEQ ID NO: 2074266 - RNA, 19 nt, Homo sapiens
  misc_RNA (1)...(19): siRNA sense strand
gcgagaaggcagagaugaa

SEQ ID NO: 2074267 - RNA, 19 nt, Homo sapiens
  misc_RNA (1)...(19): siRNA sense strand
gcgagaaggcagagaugaa

SEQ ID NO: 2074268 - RNA, 19 nt, Homo sapiens
  misc_RNA (1)...(19): siRNA sense strand
ccacaaacgucagcauggu

SEQ ID NO: 2074269 - RNA, 19 nt, Homo sapiens
  misc_RNA (1)...(19): siRNA sense strand
ggaaugugccaucacuugu

SEQ ID NO: 2074270 - RNA, 19 nt, Homo sapiens
  misc_RNA (1)...(19): siRNA sense strand
gaugagaaaguacuggaau

SEQ ID NO: 2074271 - RNA, 19 nt, Homo sapiens
  misc_RNA (1)...(19): siRNA sense strand
agaaaucaacgagaaauug

SEQ ID NO: 2074272 - RNA, 19 nt, Homo sapiens
  misc_RNA (1)...(19): siRNA sense strand
agaugaggaugaagauguu

SEQ ID NO: 2074273 - RNA, 19 nt, Homo sapiens
  misc_RNA (1)...(19): siRNA sense strand
uaccuuggcuuggcucuug

SEQ ID NO: 2074274 - RNA, 19 nt, Homo sapiens
  misc_RNA (1)...(19): siRNA sense strand
cuggauagauguuauucga

SEQ ID NO: 2074275 - RNA, 19 nt, Homo sapiens
  misc_RNA (1)...(19): siRNA sense strand
ucggugggaucaagugaaa

SEQ ID NO: 2074276 - RNA, 19 nt, Homo sapiens
  misc_RNA (1)...(19): siRNA sense strand
cugagaaagugcagaaauc

SEQ ID NO: 2074277 - RNA, 19 nt, Homo sapiens
  misc_RNA (1)...(19): siRNA sense strand
gugcaaagaccucauaaaa

SEQ ID NO: 2074278 - RNA, 19 nt, Homo sapiens
  misc_RNA (1)...(19): siRNA sense strand
acaaguaugaagaguguaa

SEQ ID NO: 2074279 - RNA, 19 nt, Homo sapiens
  misc_RNA (1)...(19): siRNA sense strand
cauguuggcuuuucucuug

SEQ ID NO: 2074280 - RNA, 19 nt, Homo sapiens
  misc_RNA (1)...(19): siRNA sense strand
gccagugucucccaggaau

SEQ ID NO: 2074281 - RNA, 19 nt, Homo sapiens
  misc_RNA (1)...(19): siRNA sense strand
gaaggcagagaugaacauu

SEQ ID NO: 2074282 - RNA, 19 nt, Homo sapiens
  misc_RNA (1)...(19): siRNA sense strand
gaaggcagagaugaacauu

SEQ ID NO: 2074283 - RNA, 19 nt, Homo sapiens
  misc_RNA (1)...(19): siRNA sense strand
gcaauauaaaguccugguu

SEQ ID NO: 2074284 - RNA, 19 nt, Homo sapiens
  misc_RNA (1)...(19): siRNA sense strand
accaagaaguggaagaaga

SEQ ID NO: 2074285 - RNA, 19 nt, Homo sapiens
  misc_RNA (1)...(19): siRNA sense strand
guaccaagaaguggaagaa

SEQ ID NO: 2074286 - RNA, 19 nt, Homo sapiens
  misc_RNA (1)...(19): siRNA sense strand
guccugggaugaagguuau

SEQ ID NO: 2074287 - RNA, 19 nt, Homo sapiens
  misc_RNA (1)...(19): siRNA sense strand
uaacgaugacgaugaagau

SEQ ID NO: 2074288 - RNA, 19 nt, Homo sapiens
  misc_RNA (1)...(19): siRNA sense strand
gcaauauaaaguccugguu

SEQ ID NO: 2074289 - RNA, 19 nt, Homo sapiens
  misc_RNA (1)...(19): siRNA sense strand
gcagcagaacaaauacaaa

SEQ ID NO: 2074290 - RNA, 19 nt, Homo sapiens
  misc_RNA (1)...(19): siRNA sense strand
gaugucaggaugcucuaaa

SEQ ID NO: 2074291 - RNA, 19 nt, Homo sapiens
  misc_RNA (1)...(19): siRNA sense strand
gaguguaaagaccucauaa

SEQ ID NO: 2074292 - RNA, 19 nt, Homo sapiens
  misc_RNA (1)...(19): siRNA sense strand
uuauucgacucucucaauu

SEQ ID NO: 2074293 - RNA, 19 nt, Homo sapiens
  misc_RNA (1)...(19): siRNA sense strand
ggaagaggauggcucauuu

SEQ ID NO: 2074294 - RNA, 19 nt, Homo sapiens
  misc_RNA (1)...(19): siRNA sense strand
ucaaauauguggccuuuaa

SEQ ID NO: 2074295 - RNA, 19 nt, Homo sapiens
  misc_RNA (1)...(19): siRNA sense strand
gaaacaggaugaagaagga

SEQ ID NO: 2074296 - RNA, 19 nt, Homo sapiens
  misc_RNA (1)...(19): siRNA sense strand
gaacggcagucuggaaauu

SEQ ID NO: 2074297 - RNA, 19 nt, Homo sapiens
  misc_RNA (1)...(19): siRNA sense strand
gcacggcccuguccaauag

SEQ ID NO: 2074298 - RNA, 19 nt, Homo sapiens
  misc_RNA (1)...(19): siRNA sense strand
gcaccgagcuagaccaaga

SEQ ID NO: 2074299 - RNA, 19 nt, Homo sapiens
  misc_RNA (1)...(19): siRNA sense strand
gcaacuaccauguuuauga

SEQ ID NO: 2074300 - RNA, 19 nt, Homo sapiens
  misc_RNA (1)...(19): siRNA sense strand
gauacacucucaaauaugu

SEQ ID NO: 2074301 - RNA, 19 nt, Homo sapiens
  misc_RNA (1)...(19): siRNA sense strand
caaaugggaucaugauugg

SEQ ID NO: 2074302 - RNA, 19 nt, Homo sapiens
  misc_RNA (1)...(19): siRNA sense strand
gugauaacauccugauuga

SEQ ID NO: 2074303 - RNA, 19 nt, Homo sapiens
  misc_RNA (1)...(19): siRNA sense strand
gaaagaacaccaagcuuca

SEQ ID NO: 2074304 - RNA, 19 nt, Homo sapiens
  misc_RNA (1)...(19): siRNA sense strand
gaacaccaagcuucaugua

SEQ ID NO: 2074305 - RNA, 19 nt, Homo sapiens
  misc_RNA (1)...(19): siRNA sense strand
acacugcgaugguuuaaga

SEQ ID NO: 2074306 - RNA, 19 nt, Homo sapiens
  misc_RNA (1)...(19): siRNA sense strand
gaggauggcucauuugacu

SEQ ID NO: 2074307 - RNA, 19 nt, Homo sapiens
  misc_RNA (1)...(19): siRNA sense strand
cagaguccgucaucgguua

SEQ ID NO: 2074308 - RNA, 19 nt, Homo sapiens
  misc_RNA (1)...(19): siRNA sense strand
gaaagcagauaguggaaaa

SEQ ID NO: 2074309 - RNA, 19 nt, Homo sapiens
  misc_RNA (1)...(19): siRNA sense strand
uaacggagaccuauacuuc

SEQ ID NO: 2074310 - RNA, 19 nt, Homo sapiens
  misc_RNA (1)...(19): siRNA sense strand
uggauacacucucaaauau

SEQ ID NO: 2074311 - RNA, 19 nt, Homo sapiens
  misc_RNA (1)...(19): siRNA sense strand
gguggcaacuaccauguuu

SEQ ID NO: 2074312 - RNA, 19 nt, Homo sapiens
  misc_RNA (1)...(19): siRNA sense strand
ggaaacagagggcaacgaa

SEQ ID NO: 2074313 - RNA, 19 nt, Homo sapiens
  misc_RNA (1)...(19): siRNA sense strand
gaucaggccacuccaacua

SEQ ID NO: 2074314 - RNA, 19 nt, Homo sapiens
  misc_RNA (1)...(19): siRNA sense strand
caagagggcgcuccuuuga

SEQ ID NO: 2074315 - RNA, 19 nt, Homo sapiens
  misc_RNA (1)...(19): siRNA sense strand
gauaacauccugauugagu

SEQ ID NO: 2074316 - RNA, 19 nt, Homo sapiens
  misc_RNA (1)...(19): siRNA sense strand
gaaagaacaacauggagau

SEQ ID NO: 2074317 - RNA, 19 nt, Homo sapiens
  misc_RNA (1)...(19): siRNA sense strand
gggcaaagcugaaaaccaa

SEQ ID NO: 2074318 - RNA, 19 nt, Homo sapiens
  misc_RNA (1)...(19): siRNA sense strand
ccaaaugggaucaugauug

SEQ ID NO: 2074319 - RNA, 19 nt, Homo sapiens
  misc_RNA (1)...(19): siRNA sense strand
caaaguaggaaagcagaua

SEQ ID NO: 2074320 - RNA, 19 nt, Homo sapiens
  misc_RNA (1)...(19): siRNA sense strand
caacuaccauguuuaugag

SEQ ID NO: 2074321 - RNA, 19 nt, Homo sapiens
  misc_RNA (1)...(19): siRNA sense strand
ggcaugaccauuccaagua

SEQ ID NO: 2074322 - RNA, 19 nt, Homo sapiens
  misc_RNA (1)...(19): siRNA sense strand
ccgaggaguugcagaaaga

SEQ ID NO: 2074323 - RNA, 19 nt, Homo sapiens
  misc_RNA (1)...(19): siRNA sense strand
acaccaagcuucauguauc

SEQ ID NO: 2074324 - RNA, 19 nt, Homo sapiens
  misc_RNA (1)...(19): siRNA sense strand
cgaaacagcagauucuuca

SEQ ID NO: 2074325 - RNA, 19 nt, Homo sapiens
  misc_RNA (1)...(19): siRNA sense strand
gagaacggcagucuggaaa

SEQ ID NO: 2074326 - RNA, 19 nt, Homo sapiens
  misc_RNA (1)...(19): siRNA sense strand
gaagaggauggcucauuug

SEQ ID NO: 2074327 - RNA, 19 nt, Homo sapiens
  misc_RNA (1)...(19): siRNA sense strand
ucucaaauauguggccuuu

SEQ ID NO: 2074328 - RNA, 19 nt, Homo sapiens
  misc_RNA (1)...(19): siRNA sense strand
gcccaucacccaagacaaa

SEQ ID NO: 2074329 - RNA, 19 nt, Homo sapiens
  misc_RNA (1)...(19): siRNA sense strand
uaucuacucucuggccuaa

SEQ ID NO: 2074330 - RNA, 19 nt, Homo sapiens
  misc_RNA (1)...(19): siRNA sense strand
gcgagggucaguucaauga

SEQ ID NO: 2074331 - RNA, 19 nt, Homo sapiens
  misc_RNA (1)...(19): siRNA sense strand
gaucaugauuggauacacu

SEQ ID NO: 2074332 - RNA, 19 nt, Homo sapiens
  misc_RNA (1)...(19): siRNA sense strand
ucauucgagugauucuuua

SEQ ID NO: 2074333 - RNA, 19 nt, Homo sapiens
  misc_RNA (1)...(19): siRNA sense strand
gauaaggccaaguuugaga

SEQ ID NO: 2074334 - RNA, 19 nt, Homo sapiens
  misc_RNA (1)...(19): siRNA sense strand
ucaagcagcaggagaguga

SEQ ID NO: 2074335 - RNA, 19 nt, Homo sapiens
  misc_RNA (1)...(19): siRNA sense strand
ccagaaagaacaacaugga

SEQ ID NO: 2074336 - RNA, 19 nt, Homo sapiens
  misc_RNA (1)...(19): siRNA sense strand
gcagaaagaacaccaagcu

SEQ ID NO: 2074337 - RNA, 19 nt, Homo sapiens
  misc_RNA (1)...(19): siRNA sense strand
ucaaugcuaucuacucucu

SEQ ID NO: 2074338 - RNA, 19 nt, Homo sapiens
  misc_RNA (1)...(19): siRNA sense strand
gaaacagagggcaacgaaa

SEQ ID NO: 2074339 - RNA, 19 nt, Homo sapiens
  misc_RNA (1)...(19): siRNA sense strand
uuggauacacucucaaaua

SEQ ID NO: 2074340 - RNA, 19 nt, Homo sapiens
  misc_RNA (1)...(19): siRNA sense strand
gcaugaccauuccaaguac

SEQ ID NO: 2074341 - RNA, 19 nt, Homo sapiens
  misc_RNA (1)...(19): siRNA sense strand
cagacuacgucguccaguu

SEQ ID NO: 2074342 - RNA, 19 nt, Homo sapiens
  misc_RNA (1)...(19): siRNA sense strand
caucgaaauuccuauggau

SEQ ID NO: 2074343 - RNA, 19 nt, Homo sapiens
  misc_RNA (1)...(19): siRNA sense strand
gacaucgcaugguacaaga

SEQ ID NO: 2074344 - RNA, 19 nt, Homo sapiens
  misc_RNA (1)...(19): siRNA sense strand
ggauggcucauuugacuau

SEQ ID NO: 2074345 - RNA, 19 nt, Homo sapiens
  misc_RNA (1)...(19): siRNA sense strand
gaaaacuucucucccaauc

SEQ ID NO: 2074346 - RNA, 19 nt, Homo sapiens
  misc_RNA (1)...(19): siRNA sense strand
gacgaacccaagaaccuua

SEQ ID NO: 2074347 - RNA, 19 nt, Homo sapiens
  misc_RNA (1)...(19): siRNA sense strand
cgugauaacauccugauug

SEQ ID NO: 2074348 - RNA, 19 nt, Homo sapiens
  misc_RNA (1)...(19): siRNA sense strand
aaacagagggcaacgaaag

SEQ ID NO: 2074349 - RNA, 19 nt, Homo sapiens
  misc_RNA (1)...(19): siRNA sense strand
ucauuugacuauagugaug

SEQ ID NO: 2074350 - RNA, 19 nt, Homo sapiens
  misc_RNA (1)...(19): siRNA sense strand
aaacuucucucccaaucag

SEQ ID NO: 2074351 - RNA, 19 nt, Homo sapiens
  misc_RNA (1)...(19): siRNA sense strand
ggaaagcagauaguggaaa

SEQ ID NO: 2074352 - RNA, 19 nt, Homo sapiens
  misc_RNA (1)...(19): siRNA sense strand
gaacccaagaaccuuauuc

SEQ ID NO: 2074353 - RNA, 19 nt, Homo sapiens
  misc_RNA (1)...(19): siRNA sense strand
uaacgggaccaaaguagga

SEQ ID NO: 2074354 - RNA, 19 nt, Homo sapiens
  misc_RNA (1)...(19): siRNA sense strand
ggacgaacccaagaaccuu

SEQ ID NO: 2074355 - RNA, 19 nt, Homo sapiens
  misc_RNA (1)...(19): siRNA sense strand
caucgucuguuucaucaag

SEQ ID NO: 2074356 - RNA, 19 nt, Homo sapiens
  misc_RNA (1)...(19): siRNA sense strand
ggaccaaaguaggaaagca

SEQ ID NO: 2074357 - RNA, 19 nt, Homo sapiens
  misc_RNA (1)...(19): siRNA sense strand
cagucuacgugcccuauga

SEQ ID NO: 2074358 - RNA, 19 nt, Homo sapiens
  misc_RNA (1)...(19): siRNA sense strand
gcaaggaagcaaccuggau

SEQ ID NO: 2074359 - RNA, 19 nt, Homo sapiens
  misc_RNA (1)...(19): siRNA sense strand
gcagaccgacuacaguugu

SEQ ID NO: 2074360 - RNA, 19 nt, Homo sapiens
  misc_RNA (1)...(19): siRNA sense strand
gugucacgcuaccgcuuua

SEQ ID NO: 2074361 - RNA, 19 nt, Homo sapiens
  misc_RNA (1)...(19): siRNA sense strand
ggauacacucucaaauaug

SEQ ID NO: 2074362 - RNA, 19 nt, Homo sapiens
  misc_RNA (1)...(19): siRNA sense strand
uuacuccggagaagauuua

SEQ ID NO: 2074363 - RNA, 19 nt, Homo sapiens
  misc_RNA (1)...(19): siRNA sense strand
aauaaggcccugcguauca

SEQ ID NO: 2074364 - RNA, 19 nt, Homo sapiens
  misc_RNA (1)...(19): siRNA sense strand
ggacccuggugauugacuu

SEQ ID NO: 2074365 - RNA, 19 nt, Homo sapiens
  misc_RNA (1)...(19): siRNA sense strand
uuaauaaggcccugcguau

SEQ ID NO: 2074366 - RNA, 19 nt, Homo sapiens
  misc_RNA (1)...(19): siRNA sense strand
ccaagagggcgcuccuuug

SEQ ID NO: 2074367 - RNA, 19 nt, Homo sapiens
  misc_RNA (1)...(19): siRNA sense strand
gauuggauacacucucaaa

SEQ ID NO: 2074368 - RNA, 19 nt, Homo sapiens
  misc_RNA (1)...(19): siRNA sense strand
agacuacgucguccaguuu

SEQ ID NO: 2074369 - RNA, 19 nt, Homo sapiens
  misc_RNA (1)...(19): siRNA sense strand
cugauaaggccaaguuuga

SEQ ID NO: 2074370 - RNA, 19 nt, Homo sapiens
  misc_RNA (1)...(19): siRNA sense strand
caucugauaaggccaaguu

SEQ ID NO: 2074371 - RNA, 19 nt, Homo sapiens
  misc_RNA (1)...(19): siRNA sense strand
ggccaacgccuuugucagu

SEQ ID NO: 2074372 - RNA, 19 nt, Homo sapiens
  misc_RNA (1)...(19): siRNA sense strand
gcuggacugcccuuucuuu

SEQ ID NO: 2074373 - RNA, 19 nt, Homo sapiens
  misc_RNA (1)...(19): siRNA sense strand
ccagcucauucgagugauu

SEQ ID NO: 2074374 - RNA, 19 nt, Homo sapiens
  misc_RNA (1)...(19): siRNA sense strand
gcucauuugacuauaguga

SEQ ID NO: 2074375 - RNA, 19 nt, Homo sapiens
  misc_RNA (1)...(19): siRNA sense strand
gcucaucgucuguuucauc

SEQ ID NO: 2074376 - RNA, 19 nt, Homo sapiens
  misc_RNA (1)...(19): siRNA sense strand
gaccagaaagaacaacaug

SEQ ID NO: 2074377 - RNA, 19 nt, Homo sapiens
  misc_RNA (1)...(19): siRNA sense strand
acggcagucuggaaauuaa

SEQ ID NO: 2074378 - RNA, 19 nt, Homo sapiens
  misc_RNA (1)...(19): siRNA sense strand
ggagacaaucaaccuggaa

SEQ ID NO: 2074379 - RNA, 19 nt, Homo sapiens
  misc_RNA (1)...(19): siRNA sense strand
ccacuccaacuaaccguuu

SEQ ID NO: 2074380 - RNA, 19 nt, Homo sapiens
  misc_RNA (1)...(19): siRNA sense strand
uuaagaugauccgcaaaga

SEQ ID NO: 2074381 - RNA, 19 nt, Homo sapiens
  misc_RNA (1)...(19): siRNA sense strand
ggcacggcccuguccaaua

SEQ ID NO: 2074382 - RNA, 19 nt, Homo sapiens
  misc_RNA (1)...(19): siRNA sense strand
cgucaccugucaaugcuau

SEQ ID NO: 2074383 - RNA, 19 nt, Homo sapiens
  misc_RNA (1)...(19): siRNA sense strand
gaggccacgucaccuguca

SEQ ID NO: 2074384 - RNA, 19 nt, Homo sapiens
  misc_RNA (1)...(19): siRNA sense strand
gauggcucauuugacuaua

SEQ ID NO: 2074385 - RNA, 19 nt, Homo sapiens
  misc_RNA (1)...(19): siRNA sense strand
caaguucacggugcaaaga

SEQ ID NO: 2074386 - RNA, 19 nt, Homo sapiens
  misc_RNA (1)...(19): siRNA sense strand
ucacguggacgcccaugaa

SEQ ID NO: 2074387 - RNA, 19 nt, Homo sapiens
  misc_RNA (1)...(19): siRNA sense strand
ucaccgugcuagcugauca

SEQ ID NO: 2074388 - RNA, 19 nt, Homo sapiens
  misc_RNA (1)...(19): siRNA sense strand
ggacacgaaacagcagauu

SEQ ID NO: 2074389 - RNA, 19 nt, Homo sapiens
  misc_RNA (1)...(19): siRNA sense strand
ugaagaagaccaguuccaa

SEQ ID NO: 2074390 - RNA, 19 nt, Homo sapiens
  misc_RNA (1)...(19): siRNA sense strand
ccacgucaccugucaaugc

SEQ ID NO: 2074391 - RNA, 19 nt, Homo sapiens
  misc_RNA (1)...(19): siRNA sense strand
cagcagauucuucaacauc

SEQ ID NO: 2074392 - RNA, 19 nt, Homo sapiens
  misc_RNA (1)...(19): siRNA sense strand
aaccugcgcuacauuguca

SEQ ID NO: 2074393 - RNA, 19 nt, Homo sapiens
  misc_RNA (1)...(19): siRNA sense strand
ggaaugaucuggcuuugga

SEQ ID NO: 2074394 - RNA, 19 nt, Homo sapiens
  misc_RNA (1)...(19): siRNA sense strand
caagaucacugacuuagga

SEQ ID NO: 2074395 - RNA, 19 nt, Homo sapiens
  misc_RNA (1)...(19): siRNA sense strand
ggacucggcucaauaguuc

SEQ ID NO: 2074396 - RNA, 19 nt, Homo sapiens
  misc_RNA (1)...(19): siRNA sense strand
cuacuaacauggaguuuaa

SEQ ID NO: 2074397 - RNA, 19 nt, Homo sapiens
  misc_RNA (1)...(19): siRNA sense strand
ccacaaagaugaacucucu

SEQ ID NO: 2074398 - RNA, 19 nt, Homo sapiens
  misc_RNA (1)...(19): siRNA sense strand
ggagacacguuugcagaua

SEQ ID NO: 2074399 - RNA, 19 nt, Homo sapiens
  misc_RNA (1)...(19): siRNA sense strand
gaucuuaaaugcugccuau

SEQ ID NO: 2074400 - RNA, 19 nt, Homo sapiens
  misc_RNA (1)...(19): siRNA sense strand
gagaaugaguuguaugaau

SEQ ID NO: 2074401 - RNA, 19 nt, Homo sapiens
  misc_RNA (1)...(19): siRNA sense strand
gagaagcacuggaaugauc

SEQ ID NO: 2074402 - RNA, 19 nt, Homo sapiens
  misc_RNA (1)...(19): siRNA sense strand
gcaaagaccaucucuggaa

SEQ ID NO: 2074403 - RNA, 19 nt, Homo sapiens
  misc_RNA (1)...(19): siRNA sense strand
aaacugggcucggagauaa

SEQ ID NO: 2074404 - RNA, 19 nt, Homo sapiens
  misc_RNA (1)...(19): siRNA sense strand
ggaaguggacguuguggua

SEQ ID NO: 2074405 - RNA, 19 nt, Homo sapiens
  misc_RNA (1)...(19): siRNA sense strand
ugaaggauaugauuguuga

SEQ ID NO: 2074406 - RNA, 19 nt, Homo sapiens
  misc_RNA (1)...(19): siRNA sense strand
gaaaugaaggauaugauug

SEQ ID NO: 2074407 - RNA, 19 nt, Homo sapiens
  misc_RNA (1)...(19): siRNA sense strand
gaugcaccaugcucucuua

SEQ ID NO: 2074408 - RNA, 19 nt, Homo sapiens
  misc_RNA (1)...(19): siRNA sense strand
ggaaaugaaggauaugauu

SEQ ID NO: 2074409 - RNA, 19 nt, Homo sapiens
  misc_RNA (1)...(19): siRNA sense strand
caaauuggcuaagagcauu

SEQ ID NO: 2074410 - RNA, 19 nt, Homo sapiens
  misc_RNA (1)...(19): siRNA sense strand
gcagauagcacuagaugug

SEQ ID NO: 2074411 - RNA, 19 nt, Homo sapiens
  misc_RNA (1)...(19): siRNA sense strand
ucaaacagaucuuaaaugc

SEQ ID NO: 2074412 - RNA, 19 nt, Homo sapiens
  misc_RNA (1)...(19): siRNA sense strand
gcuggaagcuggccacuca

SEQ ID NO: 2074413 - RNA, 19 nt, Homo sapiens
  misc_RNA (1)...(19): siRNA sense strand
ccaaacgucuggaauauac

SEQ ID NO: 2074414 - RNA, 19 nt, Homo sapiens
  misc_RNA (1)...(19): siRNA sense strand
gaggagugcuggcaguuga

SEQ ID NO: 2074415 - RNA, 19 nt, Homo sapiens
  misc_RNA (1)...(19): siRNA sense strand
gaaagcaggaggaaaugaa

SEQ ID NO: 2074416 - RNA, 19 nt, Homo sapiens
  misc_RNA (1)...(19): siRNA sense strand
ggugguggcuccagcauug

SEQ ID NO: 2074417 - RNA, 19 nt, Homo sapiens
  misc_RNA (1)...(19): siRNA sense strand
gcagaucacucccaaacgu

SEQ ID NO: 2074418 - RNA, 19 nt, Homo sapiens
  misc_RNA (1)...(19): siRNA sense strand
ccaccaagcugggcaguga

SEQ ID NO: 2074419 - RNA, 19 nt, Homo sapiens
  misc_RNA (1)...(19): siRNA sense strand
caacugagcugcauuuccu

SEQ ID NO: 2074420 - RNA, 19 nt, Homo sapiens
  misc_RNA (1)...(19): siRNA sense strand
ccacugccuugacaucuuu

SEQ ID NO: 2074421 - RNA, 19 nt, Homo sapiens
  misc_RNA (1)...(19): siRNA sense strand
gaaacugggcucggagaua

SEQ ID NO: 2074422 - RNA, 19 nt, Homo sapiens
  misc_RNA (1)...(19): siRNA sense strand
gcagaaccgugccaagauc

SEQ ID NO: 2074423 - RNA, 19 nt, Homo sapiens
  misc_RNA (1)...(19): siRNA sense strand
gccuugacaucuuuauuaa

SEQ ID NO: 2074424 - RNA, 19 nt, Homo sapiens
  misc_RNA (1)...(19): siRNA sense strand
gagcaaaucaaacagauca

SEQ ID NO: 2074425 - RNA, 19 nt, Homo sapiens
  misc_RNA (1)...(19): siRNA sense strand
ccuaugcacuccacaaaga

SEQ ID NO: 2074426 - RNA, 19 nt, Homo sapiens
  misc_RNA (1)...(19): siRNA sense strand
agaaugaguuguaugaauc

SEQ ID NO: 2074427 - RNA, 19 nt, Homo sapiens
  misc_RNA (1)...(19): siRNA sense strand
ucacagggaaguacgauaa

SEQ ID NO: 2074428 - RNA, 19 nt, Homo sapiens
  misc_RNA (1)...(19): siRNA sense strand
aggaggaacuucuggauga

SEQ ID NO: 2074429 - RNA, 19 nt, Homo sapiens
  misc_RNA (1)...(19): siRNA sense strand
agaaguaccuccagcagau

SEQ ID NO: 2074430 - RNA, 19 nt, Homo sapiens
  misc_RNA (1)...(19): siRNA sense strand
gcuuuggaauuucacuaua

SEQ ID NO: 2074431 - RNA, 19 nt, Homo sapiens
  misc_RNA (1)...(19): siRNA sense strand
ccucagcgccuccaaauug

SEQ ID NO: 2074432 - RNA, 19 nt, Homo sapiens
  misc_RNA (1)...(19): siRNA sense strand
ggaugaugcuacuaacaug

SEQ ID NO: 2074433 - RNA, 19 nt, Homo sapiens
  misc_RNA (1)...(19): siRNA sense strand
caggaaauccgaaaguauu

SEQ ID NO: 2074434 - RNA, 19 nt, Homo sapiens
  misc_RNA (1)...(19): siRNA sense strand
caagcucccugaggcauuu

SEQ ID NO: 2074435 - RNA, 19 nt, Homo sapiens
  misc_RNA (1)...(19): siRNA sense strand
agcaagagcuucaggaaau

SEQ ID NO: 2074436 - RNA, 19 nt, Homo sapiens
  misc_RNA (1)...(19): siRNA sense strand
gcauuuccuucccaccuaa

SEQ ID NO: 2074437 - RNA, 19 nt, Homo sapiens
  misc_RNA (1)...(19): siRNA sense strand
ugaucuggcuuuggaauuu

SEQ ID NO: 2074438 - RNA, 19 nt, Homo sapiens
  misc_RNA (1)...(19): siRNA sense strand
cucaucaucucccgacuua

SEQ ID NO: 2074439 - RNA, 19 nt, Homo sapiens
  misc_RNA (1)...(19): siRNA sense strand
gcagugaggagagcuguaa

SEQ ID NO: 2074440 - RNA, 19 nt, Homo sapiens
  misc_RNA (1)...(19): siRNA sense strand
ggaauucuuuucugguaua

SEQ ID NO: 2074441 - RNA, 19 nt, Homo sapiens
  misc_RNA (1)...(19): siRNA sense strand
guucacaucaccaguaauu

SEQ ID NO: 2074442 - RNA, 19 nt, Homo sapiens
  misc_RNA (1)...(19): siRNA sense strand
gagcaagagcuucaggaaa

SEQ ID NO: 2074443 - RNA, 19 nt, Homo sapiens
  misc_RNA (1)...(19): siRNA sense strand
ggauaugauuguugagaca

SEQ ID NO: 2074444 - RNA, 19 nt, Homo sapiens
  misc_RNA (1)...(19): siRNA sense strand
ugagaggugugcuagcaaa

SEQ ID NO: 2074445 - RNA, 19 nt, Homo sapiens
  misc_RNA (1)...(19): siRNA sense strand
ucacaucaccaguaauuau

SEQ ID NO: 2074446 - RNA, 19 nt, Homo sapiens
  misc_RNA (1)...(19): siRNA sense strand
gcaccaugcucucuuacag

SEQ ID NO: 2074447 - RNA, 19 nt, Homo sapiens
  misc_RNA (1)...(19): siRNA sense strand
aaaaugugcugcuggauaa

SEQ ID NO: 2074448 - RNA, 19 nt, Homo sapiens
  misc_RNA (1)...(19): siRNA sense strand
gugacuuggugaaugauuu

SEQ ID NO: 2074449 - RNA, 19 nt, Homo sapiens
  misc_RNA (1)...(19): siRNA sense strand
cagaacgucuuccuguguu

SEQ ID NO: 2074450 - RNA, 19 nt, Homo sapiens
  misc_RNA (1)...(19): siRNA sense strand
ggacugccucccuugcaua

SEQ ID NO: 2074451 - RNA, 19 nt, Homo sapiens
  misc_RNA (1)...(19): siRNA sense strand
gagacacguuugcagauag

SEQ ID NO: 2074452 - RNA, 19 nt, Homo sapiens
  misc_RNA (1)...(19): siRNA sense strand
gggccaguaugguguggua

SEQ ID NO: 2074453 - RNA, 19 nt, Homo sapiens
  misc_RNA (1)...(19): siRNA sense strand
caccaguaauuaucucaaa

SEQ ID NO: 2074454 - RNA, 19 nt, Homo sapiens
  misc_RNA (1)...(19): siRNA sense strand
gagaauggagagcgaaaga

SEQ ID NO: 2074455 - RNA, 19 nt, Homo sapiens
  misc_RNA (1)...(19): siRNA sense strand
ggaugcugcucauguuuua

SEQ ID NO: 2074456 - RNA, 19 nt, Homo sapiens
  misc_RNA (1)...(19): siRNA sense strand
acagaggacuagaugauuc

SEQ ID NO: 2074457 - RNA, 19 nt, Homo sapiens
  misc_RNA (1)...(19): siRNA sense strand
gcaagagcuucaggaaauc

SEQ ID NO: 2074458 - RNA, 19 nt, Homo sapiens
  misc_RNA (1)...(19): siRNA sense strand
aaugauuucuugccuguga

SEQ ID NO: 2074459 - RNA, 19 nt, Homo sapiens
  misc_RNA (1)...(19): siRNA sense strand
ccaaacagaggacuagaug

SEQ ID NO: 2074460 - RNA, 19 nt, Homo sapiens
  misc_RNA (1)...(19): siRNA sense strand
gggagcaaaucaaacagau

SEQ ID NO: 2074461 - RNA, 19 nt, Homo sapiens
  misc_RNA (1)...(19): siRNA sense strand
gaauggagagcgaaagauc

SEQ ID NO: 2074462 - RNA, 19 nt, Homo sapiens
  misc_RNA (1)...(19): siRNA sense strand
gcuacuaacauggaguuua

SEQ ID NO: 2074463 - RNA, 19 nt, Homo sapiens
  misc_RNA (1)...(19): siRNA sense strand
aaacagaggacuagaugau

SEQ ID NO: 2074464 - RNA, 19 nt, Homo sapiens
  misc_RNA (1)...(19): siRNA sense strand
gcuaugggagcaaaucaaa

SEQ ID NO: 2074465 - RNA, 19 nt, Homo sapiens
  misc_RNA (1)...(19): siRNA sense strand
caguucacaucaccaguaa

SEQ ID NO: 2074466 - RNA, 19 nt, Homo sapiens
  misc_RNA (1)...(19): siRNA sense strand
guauuucuccuuuccugua

SEQ ID NO: 2074467 - RNA, 19 nt, Homo sapiens
  misc_RNA (1)...(19): siRNA sense strand
gugccaagaucacugacuu

SEQ ID NO: 2074468 - RNA, 19 nt, Homo sapiens
  misc_RNA (1)...(19): siRNA sense strand
caucaucucccgacuuaau

SEQ ID NO: 2074469 - RNA, 19 nt, Homo sapiens
  misc_RNA (1)...(19): siRNA sense strand
aggaggaaaugaaggauau

SEQ ID NO: 2074470 - RNA, 19 nt, Homo sapiens
  misc_RNA (1)...(19): siRNA sense strand
uaauugaccugggcuaucu

SEQ ID NO: 2074471 - RNA, 19 nt, Homo sapiens
  misc_RNA (1)...(19): siRNA sense strand
ggucgucaguuacaaggau

SEQ ID NO: 2074472 - RNA, 19 nt, Homo sapiens
  misc_RNA (1)...(19): siRNA sense strand
ugccuugacaucuuuauua

SEQ ID NO: 2074473 - RNA, 19 nt, Homo sapiens
  misc_RNA (1)...(19): siRNA sense strand
uaaccaggcauuugacaug

SEQ ID NO: 2074474 - RNA, 19 nt, Homo sapiens
  misc_RNA (1)...(19): siRNA sense strand
gaugagaagcacuggaaug

SEQ ID NO: 2074475 - RNA, 19 nt, Homo sapiens
  misc_RNA (1)...(19): siRNA sense strand
aaaggagaaugaguuguau

SEQ ID NO: 2074476 - RNA, 19 nt, Homo sapiens
  misc_RNA (1)...(19): siRNA sense strand
guacgauaauuccguggau

SEQ ID NO: 2074477 - RNA, 19 nt, Homo sapiens
  misc_RNA (1)...(19): siRNA sense strand
uaaaugcugccuaucaugu

SEQ ID NO: 2074478 - RNA, 19 nt, Homo sapiens
  misc_RNA (1)...(19): siRNA sense strand
gaauauugccaaccgaaag

SEQ ID NO: 2074479 - RNA, 19 nt, Homo sapiens
  misc_RNA (1)...(19): siRNA sense strand
gaucuggcuuuggaauuuc

SEQ ID NO: 2074480 - RNA, 19 nt, Homo sapiens
  misc_RNA (1)...(19): siRNA sense strand
gaucacugacuuaggauuc

SEQ ID NO: 2074481 - RNA, 19 nt, Homo sapiens
  misc_RNA (1)...(19): siRNA sense strand
gaaugaguuguaugaauca

SEQ ID NO: 2074482 - RNA, 19 nt, Homo sapiens
  misc_RNA (1)...(19): siRNA sense strand
acagggaaguacgauaauu

SEQ ID NO: 2074483 - RNA, 19 nt, Homo sapiens
  misc_RNA (1)...(19): siRNA sense strand
gcaccagagagaucaaaug

SEQ ID NO: 2074484 - RNA, 19 nt, Homo sapiens
  misc_RNA (1)...(19): siRNA sense strand
uaacauggaguuuaaagac

SEQ ID NO: 2074485 - RNA, 19 nt, Homo sapiens
  misc_RNA (1)...(19): siRNA sense strand
ggaggaacuucuggaugau

SEQ ID NO: 2074486 - RNA, 19 nt, Homo sapiens
  misc_RNA (1)...(19): siRNA sense strand
gaggaaaugaaggauauga

SEQ ID NO: 2074487 - RNA, 19 nt, Homo sapiens
  misc_RNA (1)...(19): siRNA sense strand
gaggaugcugcucauguuu

SEQ ID NO: 2074488 - RNA, 19 nt, Homo sapiens
  misc_RNA (1)...(19): siRNA sense strand
gcuguugaaucugcuguug

SEQ ID NO: 2074489 - RNA, 19 nt, Homo sapiens
  misc_RNA (1)...(19): siRNA sense strand
ugaggucucugccgaagca

SEQ ID NO: 2074490 - RNA, 19 nt, Homo sapiens
  misc_RNA (1)...(19): siRNA sense strand
cagaugagaagcacuggaa

SEQ ID NO: 2074491 - RNA, 19 nt, Homo sapiens
  misc_RNA (1)...(19): siRNA sense strand
cacucagggucgucaguua

SEQ ID NO: 2074492 - RNA, 19 nt, Homo sapiens
  misc_RNA (1)...(19): siRNA sense strand
ucaguucacaucaccagua

SEQ ID NO: 2074493 - RNA, 19 nt, Homo sapiens
  misc_RNA (1)...(19): siRNA sense strand
gcgaagagcuuaauaucau

SEQ ID NO: 2074494 - RNA, 19 nt, Homo sapiens
  misc_RNA (1)...(19): siRNA sense strand
gcaaagcuguagauaccua

SEQ ID NO: 2074495 - RNA, 19 nt, Homo sapiens
  misc_RNA (1)...(19): siRNA sense strand
auaagucgcuguuugguua

SEQ ID NO: 2074496 - RNA, 19 nt, Homo sapiens
  misc_RNA (1)...(19): siRNA sense strand
gaaaauaagucgcuguuug

SEQ ID NO: 2074497 - RNA, 19 nt, Homo sapiens
  misc_RNA (1)...(19): siRNA sense strand
ggaaauaucauacucucaa

SEQ ID NO: 2074498 - RNA, 19 nt, Homo sapiens
  misc_RNA (1)...(19): siRNA sense strand
gcaccaagcaccagaauca

SEQ ID NO: 2074499 - RNA, 19 nt, Homo sapiens
  misc_RNA (1)...(19): siRNA sense strand
ggaagaaggugggcugcaa

SEQ ID NO: 2074500 - RNA, 19 nt, Homo sapiens
  misc_RNA (1)...(19): siRNA sense strand
gcaaggaaauaucauacuc

SEQ ID NO: 2074501 - RNA, 19 nt, Homo sapiens
  misc_RNA (1)...(19): siRNA sense strand
ccuauugcuuggauuauaa

SEQ ID NO: 2074502 - RNA, 19 nt, Homo sapiens
  misc_RNA (1)...(19): siRNA sense strand
gcaccagaaucacauaugg

SEQ ID NO: 2074503 - RNA, 19 nt, Homo sapiens
  misc_RNA (1)...(19): siRNA sense strand
gaaccaacuugagaagcuu

SEQ ID NO: 2074504 - RNA, 19 nt, Homo sapiens
  misc_RNA (1)...(19): siRNA sense strand
cgaagagcuuaauaucauu

SEQ ID NO: 2074505 - RNA, 19 nt, Homo sapiens
  misc_RNA (1)...(19): siRNA sense strand
ccagaaaguuguaugaaaa

SEQ ID NO: 2074506 - RNA, 19 nt, Homo sapiens
  misc_RNA (1)...(19): siRNA sense strand
gaaauaucauacucucaac

SEQ ID NO: 2074507 - RNA, 19 nt, Homo sapiens
  misc_RNA (1)...(19): siRNA sense strand
gaugacagcgaagagcuua

SEQ ID NO: 2074508 - RNA, 19 nt, Homo sapiens
  misc_RNA (1)...(19): siRNA sense strand
accagaaaguuguaugaaa

SEQ ID NO: 2074509 - RNA, 19 nt, Homo sapiens
  misc_RNA (1)...(19): siRNA sense strand
uaucauacucucaacagaa

SEQ ID NO: 2074510 - RNA, 19 nt, Homo sapiens
  misc_RNA (1)...(19): siRNA sense strand
ccaaagagagagacuacug

SEQ ID NO: 2074511 - RNA, 19 nt, Homo sapiens
  misc_RNA (1)...(19): siRNA sense strand
gggacuaucaccaaagaga

SEQ ID NO: 2074512 - RNA, 19 nt, Homo sapiens
  misc_RNA (1)...(19): siRNA sense strand
ccaccagaaaguuguauga

SEQ ID NO: 2074513 - RNA, 19 nt, Homo sapiens
  misc_RNA (1)...(19): siRNA sense strand
guaaauugcagaaccaacu

SEQ ID NO: 2074514 - RNA, 19 nt, Homo sapiens
  misc_RNA (1)...(19): siRNA sense strand
gcagaaccaacuugagaag

SEQ ID NO: 2074515 - RNA, 19 nt, Homo sapiens
  misc_RNA (1)...(19): siRNA sense strand
cauaugggacuaucaccaa

SEQ ID NO: 2074516 - RNA, 19 nt, Homo sapiens
  misc_RNA (1)...(19): siRNA sense strand
aaacgcaaagcuguagaua

SEQ ID NO: 2074517 - RNA, 19 nt, Homo sapiens
  misc_RNA (1)...(19): siRNA sense strand
cagcgaagagcuuaauauc

SEQ ID NO: 2074518 - RNA, 19 nt, Homo sapiens
  misc_RNA (1)...(19): siRNA sense strand
gcgcggaagaccagacuau

SEQ ID NO: 2074519 - RNA, 19 nt, Homo sapiens
  misc_RNA (1)...(19): siRNA sense strand
aucauacucucaacagaaa

SEQ ID NO: 2074520 - RNA, 19 nt, Homo sapiens
  misc_RNA (1)...(19): siRNA sense strand
ucauugugguguuugucua

SEQ ID NO: 2074521 - RNA, 19 nt, Homo sapiens
  misc_RNA (1)...(19): siRNA sense strand
gagcgcaggacagugauga

SEQ ID NO: 2074522 - RNA, 19 nt, Homo sapiens
  misc_RNA (1)...(19): siRNA sense strand
acgcaaagcuguagauacc

SEQ ID NO: 2074523 - RNA, 19 nt, Homo sapiens
  misc_RNA (1)...(19): siRNA sense strand
gacagcgaagagcuuaaua

SEQ ID NO: 2074524 - RNA, 19 nt, Homo sapiens
  misc_RNA (1)...(19): siRNA sense strand
gugcaccaccugugaugaa

SEQ ID NO: 2074525 - RNA, 19 nt, Homo sapiens
  misc_RNA (1)...(19): siRNA sense strand
agaaucacauaugggacua

SEQ ID NO: 2074526 - RNA, 19 nt, Homo sapiens
  misc_RNA (1)...(19): siRNA sense strand
caagcaccagaaucacaua

SEQ ID NO: 2074527 - RNA, 19 nt, Homo sapiens
  misc_RNA (1)...(19): siRNA sense strand
auaccuauugcuuggauua

SEQ ID NO: 2074528 - RNA, 19 nt, Homo sapiens
  misc_RNA (1)...(19): siRNA sense strand
caccaccugugaugaaugg

SEQ ID NO: 2074529 - RNA, 19 nt, Homo sapiens
  misc_RNA (1)...(19): siRNA sense strand
agaaccaacuugagaagcu

SEQ ID NO: 2074530 - RNA, 19 nt, Homo sapiens
  misc_RNA (1)...(19): siRNA sense strand
uaaauugcagaaccaacuu

SEQ ID NO: 2074531 - RNA, 19 nt, Homo sapiens
  misc_RNA (1)...(19): siRNA sense strand
ucugagugacuguaaauug

SEQ ID NO: 2074532 - RNA, 19 nt, Homo sapiens
  misc_RNA (1)...(19): siRNA sense strand
auacuaccuuccaccagaa

SEQ ID NO: 2074533 - RNA, 19 nt, Homo sapiens
  misc_RNA (1)...(19): siRNA sense strand
uuucaucauugugguguuu

SEQ ID NO: 2074534 - RNA, 19 nt, Homo sapiens
  misc_RNA (1)...(19): siRNA sense strand
ucaccuggcccaauacuac

SEQ ID NO: 2074535 - RNA, 19 nt, Homo sapiens
  misc_RNA (1)...(19): siRNA sense strand
gacuaucaccaaagagaga

SEQ ID NO: 2074536 - RNA, 19 nt, Homo sapiens
  misc_RNA (1)...(19): siRNA sense strand
ccugaggcuuccaccacua

SEQ ID NO: 2074537 - RNA, 19 nt, Homo sapiens
  misc_RNA (1)...(19): siRNA sense strand
aaaguuaguacaguuguug

SEQ ID NO: 2074538 - RNA, 19 nt, Homo sapiens
  misc_RNA (1)...(19): siRNA sense strand
caaggaaauaucauacucu

SEQ ID NO: 2074539 - RNA, 19 nt, Homo sapiens
  misc_RNA (1)...(19): siRNA sense strand
gauaccuauugcuuggauu

SEQ ID NO: 2074540 - RNA, 19 nt, Homo sapiens
  misc_RNA (1)...(19): siRNA sense strand
gagcaccaagcaccagaau

SEQ ID NO: 2074541 - RNA, 19 nt, Homo sapiens
  misc_RNA (1)...(19): siRNA sense strand
cugagugacuguaaauugc

SEQ ID NO: 2074542 - RNA, 19 nt, Homo sapiens
  misc_RNA (1)...(19): siRNA sense strand
accuauugcuuggauuaua

SEQ ID NO: 2074543 - RNA, 19 nt, Homo sapiens
  misc_RNA (1)...(19): siRNA sense strand
uugcagaaccaacuugaga

SEQ ID NO: 2074544 - RNA, 19 nt, Homo sapiens
  misc_RNA (1)...(19): siRNA sense strand
ggauggagcgcaggacagu

SEQ ID NO: 2074545 - RNA, 19 nt, Homo sapiens
  misc_RNA (1)...(19): siRNA sense strand
cgagagcuggagagaagaa

SEQ ID NO: 2074546 - RNA, 19 nt, Homo sapiens
  misc_RNA (1)...(19): siRNA sense strand
cggaagaccagacuaucga

SEQ ID NO: 2074547 - RNA, 19 nt, Homo sapiens
  misc_RNA (1)...(19): siRNA sense strand
gcaccaccugugaugaaug

SEQ ID NO: 2074548 - RNA, 19 nt, Homo sapiens
  misc_RNA (1)...(19): siRNA sense strand
auaugggacuaucaccaaa

SEQ ID NO: 2074549 - RNA, 19 nt, Homo sapiens
  misc_RNA (1)...(19): siRNA sense strand
ccaagcaccagaaucacau

SEQ ID NO: 2074550 - RNA, 19 nt, Homo sapiens
  misc_RNA (1)...(19): siRNA sense strand
acagcgaagagcuuaauau

SEQ ID NO: 2074551 - RNA, 19 nt, Homo sapiens
  misc_RNA (1)...(19): siRNA sense strand
ugacagcgaagagcuuaau

SEQ ID NO: 2074552 - RNA, 19 nt, Homo sapiens
  misc_RNA (1)...(19): siRNA sense strand
uaaacgcaaagcuguagau

SEQ ID NO: 2074553 - RNA, 19 nt, Homo sapiens
  misc_RNA (1)...(19): siRNA sense strand
aucgagagcuggagagaag

SEQ ID NO: 2074554 - RNA, 19 nt, Homo sapiens
  misc_RNA (1)...(19): siRNA sense strand
gagacuacugcgcggaaga

SEQ ID NO: 2074555 - RNA, 19 nt, Homo sapiens
  misc_RNA (1)...(19): siRNA sense strand
gagcuggagagaagaaggu

SEQ ID NO: 2074556 - RNA, 19 nt, Homo sapiens
  misc_RNA (1)...(19): siRNA sense strand
gcacugagaccauugaaga

SEQ ID NO: 2074557 - RNA, 19 nt, Homo sapiens
  misc_RNA (1)...(19): siRNA sense strand
gcagcaaacugacggagaa

SEQ ID NO: 2074558 - RNA, 19 nt, Homo sapiens
  misc_RNA (1)...(19): siRNA sense strand
acagugaccugaagcagua

SEQ ID NO: 2074559 - RNA, 19 nt, Homo sapiens
  misc_RNA (1)...(19): siRNA sense strand
gaagaauccuuggcugaau

SEQ ID NO: 2074560 - RNA, 19 nt, Homo sapiens
  misc_RNA (1)...(19): siRNA sense strand
ccacaaagacuuacuccaa

SEQ ID NO: 2074561 - RNA, 19 nt, Homo sapiens
  misc_RNA (1)...(19): siRNA sense strand
ccaagucagugcccacaaa

SEQ ID NO: 2074562 - RNA, 19 nt, Homo sapiens
  misc_RNA (1)...(19): siRNA sense strand
uugggaaacuggaaacaua

SEQ ID NO: 2074563 - RNA, 19 nt, Homo sapiens
  misc_RNA (1)...(19): siRNA sense strand
cacaaagacuuacuccaau

SEQ ID NO: 2074564 - RNA, 19 nt, Homo sapiens
  misc_RNA (1)...(19): siRNA sense strand
gaagcuggccgacuuugga

SEQ ID NO: 2074565 - RNA, 19 nt, Homo sapiens
  misc_RNA (1)...(19): siRNA sense strand
gaacaagaugaagaacuuu

SEQ ID NO: 2074566 - RNA, 19 nt, Homo sapiens
  misc_RNA (1)...(19): siRNA sense strand
uugaguaccuggacaguga

SEQ ID NO: 2074567 - RNA, 19 nt, Homo sapiens
  misc_RNA (1)...(19): siRNA sense strand
acaaagacuuacuccaaug

SEQ ID NO: 2074568 - RNA, 19 nt, Homo sapiens
  misc_RNA (1)...(19): siRNA sense strand
caaagacuuacuccaauga

SEQ ID NO: 2074569 - RNA, 19 nt, Homo sapiens
  misc_RNA (1)...(19): siRNA sense strand
uacagaagcuacagaugga

SEQ ID NO: 2074570 - RNA, 19 nt, Homo sapiens
  misc_RNA (1)...(19): siRNA sense strand
gaagcacgccaauauugug

SEQ ID NO: 2074571 - RNA, 19 nt, Homo sapiens
  misc_RNA (1)...(19): siRNA sense strand
aagaauccuuggcugaauu

SEQ ID NO: 2074572 - RNA, 19 nt, Homo sapiens
  misc_RNA (1)...(19): siRNA sense strand
ggagcugcaccucaucuuu

SEQ ID NO: 2074573 - RNA, 19 nt, Homo sapiens
  misc_RNA (1)...(19): siRNA sense strand
gagcugcaccucaucuuuc

SEQ ID NO: 2074574 - RNA, 19 nt, Homo sapiens
  misc_RNA (1)...(19): siRNA sense strand
ggaaacauacgugaaacug

SEQ ID NO: 2074575 - RNA, 19 nt, Homo sapiens
  misc_RNA (1)...(19): siRNA sense strand
gacauuggcuuugggaaac

SEQ ID NO: 2074576 - RNA, 19 nt, Homo sapiens
  misc_RNA (1)...(19): siRNA sense strand
aaagggcgcagcaaacuga

SEQ ID NO: 2074577 - RNA, 19 nt, Homo sapiens
  misc_RNA (1)...(19): siRNA sense strand
cccagaaccugcucaucaa

SEQ ID NO: 2074578 - RNA, 19 nt, Homo sapiens
  misc_RNA (1)...(19): siRNA sense strand
gcaccuaugccacagucuu

SEQ ID NO: 2074579 - RNA, 19 nt, Homo sapiens
  misc_RNA (1)...(19): siRNA sense strand
gugggaaccucaugagcau

SEQ ID NO: 2074580 - RNA, 19 nt, Homo sapiens
  misc_RNA (1)...(19): siRNA sense strand
ugaagaauccuuggcugaa

SEQ ID NO: 2074581 - RNA, 19 nt, Homo sapiens
  misc_RNA (1)...(19): siRNA sense strand
gaaccuuguggcccugaaa

SEQ ID NO: 2074582 - RNA, 19 nt, Homo sapiens
  misc_RNA (1)...(19): siRNA sense strand
agacauuggcuuugggaaa

SEQ ID NO: 2074583 - RNA, 19 nt, Homo sapiens
  misc_RNA (1)...(19): siRNA sense strand
agauccagcuccagaagga

SEQ ID NO: 2074584 - RNA, 19 nt, Homo sapiens
  misc_RNA (1)...(19): siRNA sense strand
gaacuuuaagcgccguuuc

SEQ ID NO: 2074585 - RNA, 19 nt, Homo sapiens
  misc_RNA (1)...(19): siRNA sense strand
cugaagcacgccaauauug

SEQ ID NO: 2074586 - RNA, 19 nt, Homo sapiens
  misc_RNA (1)...(19): siRNA sense strand
gcaccagcuugaagacacu

SEQ ID NO: 2074587 - RNA, 19 nt, Homo sapiens
  misc_RNA (1)...(19): siRNA sense strand
gacacugccuccaucuucu

SEQ ID NO: 2074588 - RNA, 19 nt, Homo sapiens
  misc_RNA (1)...(19): siRNA sense strand
gaaccugaagcacgccaau

SEQ ID NO: 2074589 - RNA, 19 nt, Homo sapiens
  misc_RNA (1)...(19): siRNA sense strand
ugaagcacgccaauauugu

SEQ ID NO: 2074590 - RNA, 19 nt, Homo sapiens
  misc_RNA (1)...(19): siRNA sense strand
ucucugaguuccgcaccua

SEQ ID NO: 2074591 - RNA, 19 nt, Homo sapiens
  misc_RNA (1)...(19): siRNA sense strand
gaagacacugccuccaucu

SEQ ID NO: 2074592 - RNA, 19 nt, Homo sapiens
  misc_RNA (1)...(19): siRNA sense strand
ggaauuccuacagaagcua

SEQ ID NO: 2074593 - RNA, 19 nt, Homo sapiens
  misc_RNA (1)...(19): siRNA sense strand
agacacugccuccaucuuc

SEQ ID NO: 2074594 - RNA, 19 nt, Homo sapiens
  misc_RNA (1)...(19): siRNA sense strand
ugaccgccuucucugaguu

SEQ ID NO: 2074595 - RNA, 19 nt, Homo sapiens
  misc_RNA (1)...(19): siRNA sense strand
gagcaugcacaacgucaag

SEQ ID NO: 2074596 - RNA, 19 nt, Homo sapiens
  misc_RNA (1)...(19): siRNA sense strand
ucacggagcaauucaacca

SEQ ID NO: 2074597 - RNA, 19 nt, Homo sapiens
  misc_RNA (1)...(19): siRNA sense strand
caagaugaagaacuuuaag

SEQ ID NO: 2074598 - RNA, 19 nt, Homo sapiens
  misc_RNA (1)...(19): siRNA sense strand
agaaccugcucaucaacga

SEQ ID NO: 2074599 - RNA, 19 nt, Homo sapiens
  misc_RNA (1)...(19): siRNA sense strand
augcacaacgucaagauuu

SEQ ID NO: 2074600 - RNA, 19 nt, Homo sapiens
  misc_RNA (1)...(19): siRNA sense strand
aggugucucugcugaagaa

SEQ ID NO: 2074601 - RNA, 19 nt, Homo sapiens
  misc_RNA (1)...(19): siRNA sense strand
cuucaaagggcgcagcaaa

SEQ ID NO: 2074602 - RNA, 19 nt, Homo sapiens
  misc_RNA (1)...(19): siRNA sense strand
ccugaagcacgccaauauu

SEQ ID NO: 2074603 - RNA, 19 nt, Homo sapiens
  misc_RNA (1)...(19): siRNA sense strand
gcugaagcuggccgacuuu

SEQ ID NO: 2074604 - RNA, 19 nt, Homo sapiens
  misc_RNA (1)...(19): siRNA sense strand
acuggaaacauacgugaaa

SEQ ID NO: 2074605 - RNA, 19 nt, Homo sapiens
  misc_RNA (1)...(19): siRNA sense strand
cugagaccauugaagaauc

SEQ ID NO: 2074606 - RNA, 19 nt, Homo sapiens
  misc_RNA (1)...(19): siRNA sense strand
gaccucauccacacagauc

SEQ ID NO: 2074607 - RNA, 19 nt, Homo sapiens
  misc_RNA (1)...(19): siRNA sense strand
caaagggcgcagcaaacug

SEQ ID NO: 2074608 - RNA, 19 nt, Homo sapiens
  misc_RNA (1)...(19): siRNA sense strand
gcaugcacaacgucaagau

SEQ ID NO: 2074609 - RNA, 19 nt, Homo sapiens
  misc_RNA (1)...(19): siRNA sense strand
gcugggauccacagaguac

SEQ ID NO: 2074610 - RNA, 19 nt, Homo sapiens
  misc_RNA (1)...(19): siRNA sense strand
ucaaagggcgcagcaaacu

SEQ ID NO: 2074611 - RNA, 19 nt, Homo sapiens
  misc_RNA (1)...(19): siRNA sense strand
gaauccaagagucgcaugu

SEQ ID NO: 2074612 - RNA, 19 nt, Homo sapiens
  misc_RNA (1)...(19): siRNA sense strand
cugcugggauccacagagu

SEQ ID NO: 2074613 - RNA, 19 nt, Homo sapiens
  misc_RNA (1)...(19): siRNA sense strand
gcacugagaccauugaaga

SEQ ID NO: 2074614 - RNA, 19 nt, Homo sapiens
  misc_RNA (1)...(19): siRNA sense strand
gcagcaaacugacggagaa

SEQ ID NO: 2074615 - RNA, 19 nt, Homo sapiens
  misc_RNA (1)...(19): siRNA sense strand
acagugaccugaagcagua

SEQ ID NO: 2074616 - RNA, 19 nt, Homo sapiens
  misc_RNA (1)...(19): siRNA sense strand
ugaacaagaugaagaacuu

SEQ ID NO: 2074617 - RNA, 19 nt, Homo sapiens
  misc_RNA (1)...(19): siRNA sense strand
gaagaauccuuggcugaau

SEQ ID NO: 2074618 - RNA, 19 nt, Homo sapiens
  misc_RNA (1)...(19): siRNA sense strand
ccacaaagacuuacuccaa

SEQ ID NO: 2074619 - RNA, 19 nt, Homo sapiens
  misc_RNA (1)...(19): siRNA sense strand
ccaagucagugcccacaaa

SEQ ID NO: 2074620 - RNA, 19 nt, Homo sapiens
  misc_RNA (1)...(19): siRNA sense strand
uugggaaacuggaaacaua

SEQ ID NO: 2074621 - RNA, 19 nt, Homo sapiens
  misc_RNA (1)...(19): siRNA sense strand
cacaaagacuuacuccaau

SEQ ID NO: 2074622 - RNA, 19 nt, Homo sapiens
  misc_RNA (1)...(19): siRNA sense strand
gaagcuggccgacuuugga

SEQ ID NO: 2074623 - RNA, 19 nt, Homo sapiens
  misc_RNA (1)...(19): siRNA sense strand
uugaguaccuggacaguga

SEQ ID NO: 2074624 - RNA, 19 nt, Homo sapiens
  misc_RNA (1)...(19): siRNA sense strand
gaacaagaugaagaacuuu

SEQ ID NO: 2074625 - RNA, 19 nt, Homo sapiens
  misc_RNA (1)...(19): siRNA sense strand
acaaagacuuacuccaaug

SEQ ID NO: 2074626 - RNA, 19 nt, Homo sapiens
  misc_RNA (1)...(19): siRNA sense strand
caaagacuuacuccaauga

SEQ ID NO: 2074627 - RNA, 19 nt, Homo sapiens
  misc_RNA (1)...(19): siRNA sense strand
uacagaagcuacagaugga

SEQ ID NO: 2074628 - RNA, 19 nt, Homo sapiens
  misc_RNA (1)...(19): siRNA sense strand
gaagcacgccaauauugug

SEQ ID NO: 2074629 - RNA, 19 nt, Homo sapiens
  misc_RNA (1)...(19): siRNA sense strand
aagaauccuuggcugaauu

SEQ ID NO: 2074630 - RNA, 19 nt, Homo sapiens
  misc_RNA (1)...(19): siRNA sense strand
ggagcugcaccucaucuuu

SEQ ID NO: 2074631 - RNA, 19 nt, Homo sapiens
  misc_RNA (1)...(19): siRNA sense strand
gagcugcaccucaucuuuc

SEQ ID NO: 2074632 - RNA, 19 nt, Homo sapiens
  misc_RNA (1)...(19): siRNA sense strand
ggaaacauacgugaaacug

SEQ ID NO: 2074633 - RNA, 19 nt, Homo sapiens
  misc_RNA (1)...(19): siRNA sense strand
gacauuggcuuugggaaac

SEQ ID NO: 2074634 - RNA, 19 nt, Homo sapiens
  misc_RNA (1)...(19): siRNA sense strand
aaagggcgcagcaaacuga

SEQ ID NO: 2074635 - RNA, 19 nt, Homo sapiens
  misc_RNA (1)...(19): siRNA sense strand
cccagaaccugcucaucaa

SEQ ID NO: 2074636 - RNA, 19 nt, Homo sapiens
  misc_RNA (1)...(19): siRNA sense strand
gcaccuaugccacagucuu

SEQ ID NO: 2074637 - RNA, 19 nt, Homo sapiens
  misc_RNA (1)...(19): siRNA sense strand
gugggaaccucaugagcau

SEQ ID NO: 2074638 - RNA, 19 nt, Homo sapiens
  misc_RNA (1)...(19): siRNA sense strand
gaaccuuguggcccugaaa

SEQ ID NO: 2074639 - RNA, 19 nt, Homo sapiens
  misc_RNA (1)...(19): siRNA sense strand
ugaagaauccuuggcugaa

SEQ ID NO: 2074640 - RNA, 19 nt, Homo sapiens
  misc_RNA (1)...(19): siRNA sense strand
agacauuggcuuugggaaa

SEQ ID NO: 2074641 - RNA, 19 nt, Homo sapiens
  misc_RNA (1)...(19): siRNA sense strand
agauccagcuccagaagga

SEQ ID NO: 2074642 - RNA, 19 nt, Homo sapiens
  misc_RNA (1)...(19): siRNA sense strand
gaacuuuaagcgccguuuc

SEQ ID NO: 2074643 - RNA, 19 nt, Homo sapiens
  misc_RNA (1)...(19): siRNA sense strand
cugaagcacgccaauauug

SEQ ID NO: 2074644 - RNA, 19 nt, Homo sapiens
  misc_RNA (1)...(19): siRNA sense strand
gcaccagcuugaagacacu

SEQ ID NO: 2074645 - RNA, 19 nt, Homo sapiens
  misc_RNA (1)...(19): siRNA sense strand
gacacugccuccaucuucu

SEQ ID NO: 2074646 - RNA, 19 nt, Homo sapiens
  misc_RNA (1)...(19): siRNA sense strand
gaaccugaagcacgccaau

SEQ ID NO: 2074647 - RNA, 19 nt, Homo sapiens
  misc_RNA (1)...(19): siRNA sense strand
ugaagcacgccaauauugu

SEQ ID NO: 2074648 - RNA, 19 nt, Homo sapiens
  misc_RNA (1)...(19): siRNA sense strand
ucucugaguuccgcaccua

SEQ ID NO: 2074649 - RNA, 19 nt, Homo sapiens
  misc_RNA (1)...(19): siRNA sense strand
gaagacacugccuccaucu

SEQ ID NO: 2074650 - RNA, 19 nt, Homo sapiens
  misc_RNA (1)...(19): siRNA sense strand
ggaauuccuacagaagcua

SEQ ID NO: 2074651 - RNA, 19 nt, Homo sapiens
  misc_RNA (1)...(19): siRNA sense strand
agacacugccuccaucuuc

SEQ ID NO: 2074652 - RNA, 19 nt, Homo sapiens
  misc_RNA (1)...(19): siRNA sense strand
ugaccgccuucucugaguu

SEQ ID NO: 2074653 - RNA, 19 nt, Homo sapiens
  misc_RNA (1)...(19): siRNA sense strand
gagcaugcacaacgucaag

SEQ ID NO: 2074654 - RNA, 19 nt, Homo sapiens
  misc_RNA (1)...(19): siRNA sense strand
ucacggagcaauucaacca

SEQ ID NO: 2074655 - RNA, 19 nt, Homo sapiens
  misc_RNA (1)...(19): siRNA sense strand
caagaugaagaacuuuaag

SEQ ID NO: 2074656 - RNA, 19 nt, Homo sapiens
  misc_RNA (1)...(19): siRNA sense strand
agaaccugcucaucaacga

SEQ ID NO: 2074657 - RNA, 19 nt, Homo sapiens
  misc_RNA (1)...(19): siRNA sense strand
augcacaacgucaagauuu

SEQ ID NO: 2074658 - RNA, 19 nt, Homo sapiens
  misc_RNA (1)...(19): siRNA sense strand
aggugucucugcugaagaa

SEQ ID NO: 2074659 - RNA, 19 nt, Homo sapiens
  misc_RNA (1)...(19): siRNA sense strand
cuucaaagggcgcagcaaa

SEQ ID NO: 2074660 - RNA, 19 nt, Homo sapiens
  misc_RNA (1)...(19): siRNA sense strand
ccugaagcacgccaauauu

SEQ ID NO: 2074661 - RNA, 19 nt, Homo sapiens
  misc_RNA (1)...(19): siRNA sense strand
gcugaagcuggccgacuuu

SEQ ID NO: 2074662 - RNA, 19 nt, Homo sapiens
  misc_RNA (1)...(19): siRNA sense strand
acuggaaacauacgugaaa

SEQ ID NO: 2074663 - RNA, 19 nt, Homo sapiens
  misc_RNA (1)...(19): siRNA sense strand
gaccucauccacacagauc

SEQ ID NO: 2074664 - RNA, 19 nt, Homo sapiens
  misc_RNA (1)...(19): siRNA sense strand
cugagaccauugaagaauc

SEQ ID NO: 2074665 - RNA, 19 nt, Homo sapiens
  misc_RNA (1)...(19): siRNA sense strand
caaagggcgcagcaaacug

SEQ ID NO: 2074666 - RNA, 19 nt, Homo sapiens
  misc_RNA (1)...(19): siRNA sense strand
gcaugcacaacgucaagau

SEQ ID NO: 2074667 - RNA, 19 nt, Homo sapiens
  misc_RNA (1)...(19): siRNA sense strand
gcugggauccacagaguac

SEQ ID NO: 2074668 - RNA, 19 nt, Homo sapiens
  misc_RNA (1)...(19): siRNA sense strand
ucaaagggcgcagcaaacu

SEQ ID NO: 2074669 - RNA, 19 nt, Homo sapiens
  misc_RNA (1)...(19): siRNA sense strand
gaauccaagagucgcaugu

SEQ ID NO: 2074670 - RNA, 19 nt, Homo sapiens
  misc_RNA (1)...(19): siRNA sense strand
cugcugggauccacagagu

SEQ ID NO: 2074671 - RNA, 19 nt, Homo sapiens
  misc_RNA (1)...(19): siRNA sense strand
ggacauaggccagccagua

SEQ ID NO: 2074672 - RNA, 19 nt, Homo sapiens
  misc_RNA (1)...(19): siRNA sense strand
gcagucaguucguuaccuu

SEQ ID NO: 2074673 - RNA, 19 nt, Homo sapiens
  misc_RNA (1)...(19): siRNA sense strand
gaucagcagucaguucguu

SEQ ID NO: 2074674 - RNA, 19 nt, Homo sapiens
  misc_RNA (1)...(19): siRNA sense strand
gcaacaacgccaugcgauu

SEQ ID NO: 2074675 - RNA, 19 nt, Homo sapiens
  misc_RNA (1)...(19): siRNA sense strand
caacaacgccaugcgauuc

SEQ ID NO: 2074676 - RNA, 19 nt, Homo sapiens
  misc_RNA (1)...(19): siRNA sense strand
gaaucgcgcucggcuucuu

SEQ ID NO: 2074677 - RNA, 19 nt, Homo sapiens
  misc_RNA (1)...(19): siRNA sense strand
ucaguucguuaccuugguu

SEQ ID NO: 2074678 - RNA, 19 nt, Homo sapiens
  misc_RNA (1)...(19): siRNA sense strand
ccacucuuggguuacauua

SEQ ID NO: 2074679 - RNA, 19 nt, Homo sapiens
  misc_RNA (1)...(19): siRNA sense strand
agacgaugcuugcaacaac

SEQ ID NO: 2074680 - RNA, 19 nt, Homo sapiens
  misc_RNA (1)...(19): siRNA sense strand
acucuuggguuacauuagu

SEQ ID NO: 2074681 - RNA, 19 nt, Homo sapiens
  misc_RNA (1)...(19): siRNA sense strand
ggacgacccaggacauagg

SEQ ID NO: 2074682 - RNA, 19 nt, Homo sapiens
  misc_RNA (1)...(19): siRNA sense strand
gacauaggccagccaguac

SEQ ID NO: 2074683 - RNA, 19 nt, Homo sapiens
  misc_RNA (1)...(19): siRNA sense strand
guucuucauucccacaucu

SEQ ID NO: 2074684 - RNA, 19 nt, Homo sapiens
  misc_RNA (1)...(19): siRNA sense strand
uggguuacauuaguuauac

SEQ ID NO: 2074685 - RNA, 19 nt, Homo sapiens
  misc_RNA (1)...(19): siRNA sense strand
ccaguguguuggagaaucg

SEQ ID NO: 2074686 - RNA, 19 nt, Homo sapiens
  misc_RNA (1)...(19): siRNA sense strand
ccuccaaccugacuacuaa

SEQ ID NO: 2074687 - RNA, 19 nt, Homo sapiens
  misc_RNA (1)...(19): siRNA sense strand
ggaacuaucgcuucuucua

SEQ ID NO: 2074688 - RNA, 19 nt, Homo sapiens
  misc_RNA (1)...(19): siRNA sense strand
caaccugacuacuaaugaa

SEQ ID NO: 2074689 - RNA, 19 nt, Homo sapiens
  misc_RNA (1)...(19): siRNA sense strand
ucucaggguuucacacgua

SEQ ID NO: 2074690 - RNA, 19 nt, Homo sapiens
  misc_RNA (1)...(19): siRNA sense strand
gcaacuuccucuccacucu

SEQ ID NO: 2074691 - RNA, 19 nt, Homo sapiens
  misc_RNA (1)...(19): siRNA sense strand
acacaggcaguucuacaua

SEQ ID NO: 2074692 - RNA, 19 nt, Homo sapiens
  misc_RNA (1)...(19): siRNA sense strand
cgacaacuguguggaacga

SEQ ID NO: 2074693 - RNA, 19 nt, Homo sapiens
  misc_RNA (1)...(19): siRNA sense strand
gaacuaucgcuucuucuac

SEQ ID NO: 2074694 - RNA, 19 nt, Homo sapiens
  misc_RNA (1)...(19): siRNA sense strand
caacuguguggaacgauuu

SEQ ID NO: 2074695 - RNA, 19 nt, Homo sapiens
  misc_RNA (1)...(19): siRNA sense strand
agaaacagaucgacaacac

SEQ ID NO: 2074696 - RNA, 19 nt, Homo sapiens
  misc_RNA (1)...(19): siRNA sense strand
caacacaggcaguucuaca

SEQ ID NO: 2074697 - RNA, 19 nt, Homo sapiens
  misc_RNA (1)...(19): siRNA sense strand
gaaacagaucgacaacaca

SEQ ID NO: 2074698 - RNA, 19 nt, Homo sapiens
  misc_RNA (1)...(19): siRNA sense strand
acaacuguguggaacgauu

SEQ ID NO: 2074699 - RNA, 19 nt, Homo sapiens
  misc_RNA (1)...(19): siRNA sense strand
uggugaagcugaaguacug

SEQ ID NO: 2074700 - RNA, 19 nt, Homo sapiens
  misc_RNA (1)...(19): siRNA sense strand
gacaacacaggcaguucua

SEQ ID NO: 2074701 - RNA, 19 nt, Homo sapiens
  misc_RNA (1)...(19): siRNA sense strand
agacggaacuaucgcuucu

SEQ ID NO: 2074702 - RNA, 19 nt, Homo sapiens
  misc_RNA (1)...(19): siRNA sense strand
aaaguauuaucaccaacug

SEQ ID NO: 2074703 - RNA, 19 nt, Homo sapiens
  misc_RNA (1)...(19): siRNA sense strand
ggcagauggugaagcugaa

SEQ ID NO: 2074704 - RNA, 19 nt, Homo sapiens
  misc_RNA (1)...(19): siRNA sense strand
ccaaccugacuacuaauga

SEQ ID NO: 2074705 - RNA, 19 nt, Homo sapiens
  misc_RNA (1)...(19): siRNA sense strand
caagcgugcuggaguuggu

SEQ ID NO: 2074706 - RNA, 19 nt, Homo sapiens
  misc_RNA (1)...(19): siRNA sense strand
ggaacgauuugaccaucac

SEQ ID NO: 2074707 - RNA, 19 nt, Homo sapiens
  misc_RNA (1)...(19): siRNA sense strand
cuaccucccagccuaauug

SEQ ID NO: 2074708 - RNA, 19 nt, Homo sapiens
  misc_RNA (1)...(19): siRNA sense strand
guguugcccucacccauca

SEQ ID NO: 2074709 - RNA, 19 nt, Homo sapiens
  misc_RNA (1)...(19): siRNA sense strand
ggagaaacagaucgacaac

SEQ ID NO: 2074710 - RNA, 19 nt, Homo sapiens
  misc_RNA (1)...(19): siRNA sense strand
cacaggcaguucuacauac

SEQ ID NO: 2074711 - RNA, 19 nt, Homo sapiens
  misc_RNA (1)...(19): siRNA sense strand
cgacaacacaggcaguucu

SEQ ID NO: 2074712 - RNA, 19 nt, Homo sapiens
  misc_RNA (1)...(19): siRNA sense strand
acggaacuaucgcuucuuc

SEQ ID NO: 2074713 - RNA, 19 nt, Homo sapiens
  misc_RNA (1)...(19): siRNA sense strand
ccaccggccucuucuucgu

SEQ ID NO: 2074714 - RNA, 19 nt, Homo sapiens
  misc_RNA (1)...(19): siRNA sense strand
cccgggaggugcugaucaa

SEQ ID NO: 2074715 - RNA, 19 nt, Homo sapiens
  misc_RNA (1)...(19): siRNA sense strand
gcggugaggccucugucaa

SEQ ID NO: 2074716 - RNA, 19 nt, Homo sapiens
  misc_RNA (1)...(19): siRNA sense strand
cuaaugaagacaucaaagg

SEQ ID NO: 2074717 - RNA, 19 nt, Homo sapiens
  misc_RNA (1)...(19): siRNA sense strand
ccugacggccuucaucuuc

SEQ ID NO: 2074718 - RNA, 19 nt, Homo sapiens
  misc_RNA (1)...(19): siRNA sense strand
gagaaacagaucgacaaca

SEQ ID NO: 2074719 - RNA, 19 nt, Homo sapiens
  misc_RNA (1)...(19): siRNA sense strand
uggaacgauuugaccauca

SEQ ID NO: 2074720 - RNA, 19 nt, Homo sapiens
  misc_RNA (1)...(19): siRNA sense strand
ucaacgggcagauggugaa

SEQ ID NO: 2074721 - RNA, 19 nt, Homo sapiens
  misc_RNA (1)...(19): siRNA sense strand
uggagaaacagaucgacaa

SEQ ID NO: 2074722 - RNA, 19 nt, Homo sapiens
  misc_RNA (1)...(19): siRNA sense strand
cuacagccauaaaaguauu

SEQ ID NO: 2074723 - RNA, 19 nt, Homo sapiens
  misc_RNA (1)...(19): siRNA sense strand
uggaguuggugaucugcuu

SEQ ID NO: 2074724 - RNA, 19 nt, Homo sapiens
  misc_RNA (1)...(19): siRNA sense strand
ucgcugccauccucuucuu

SEQ ID NO: 2074725 - RNA, 19 nt, Homo sapiens
  misc_RNA (1)...(19): siRNA sense strand
ggaccugccuggccauuaa

SEQ ID NO: 2074726 - RNA, 19 nt, Homo sapiens
  misc_RNA (1)...(19): siRNA sense strand
ggacugggcucaucugcaa

SEQ ID NO: 2074727 - RNA, 19 nt, Homo sapiens
  misc_RNA (1)...(19): siRNA sense strand
gcuacgagcuggacacaga

SEQ ID NO: 2074728 - RNA, 19 nt, Homo sapiens
  misc_RNA (1)...(19): siRNA sense strand
gaacacacgcucacagaga

SEQ ID NO: 2074729 - RNA, 19 nt, Homo sapiens
  misc_RNA (1)...(19): siRNA sense strand
gugaagauguggacgaaug

SEQ ID NO: 2074730 - RNA, 19 nt, Homo sapiens
  misc_RNA (1)...(19): siRNA sense strand
ggccaugacugcagcuuga

SEQ ID NO: 2074731 - RNA, 19 nt, Homo sapiens
  misc_RNA (1)...(19): siRNA sense strand
ggcaagcacugucgcaaga

SEQ ID NO: 2074732 - RNA, 19 nt, Homo sapiens
  misc_RNA (1)...(19): siRNA sense strand
ggccagauguggacgaaug

SEQ ID NO: 2074733 - RNA, 19 nt, Homo sapiens
  misc_RNA (1)...(19): siRNA sense strand
gcccauggcugccucaaca

SEQ ID NO: 2074734 - RNA, 19 nt, Homo sapiens
  misc_RNA (1)...(19): siRNA sense strand
caagcacugucgcaagaaa

SEQ ID NO: 2074735 - RNA, 19 nt, Homo sapiens
  misc_RNA (1)...(19): siRNA sense strand
ggucccagcugccagacaa

SEQ ID NO: 2074736 - RNA, 19 nt, Homo sapiens
  misc_RNA (1)...(19): siRNA sense strand
caacugcacccacgugugu

SEQ ID NO: 2074737 - RNA, 19 nt, Homo sapiens
  misc_RNA (1)...(19): siRNA sense strand
ccacgugggcuaucagcua

SEQ ID NO: 2074738 - RNA, 19 nt, Homo sapiens
  misc_RNA (1)...(19): siRNA sense strand
ccagagagccugugauacu

SEQ ID NO: 2074739 - RNA, 19 nt, Homo sapiens
  misc_RNA (1)...(19): siRNA sense strand
caggagaucugcccagcau

SEQ ID NO: 2074740 - RNA, 19 nt, Homo sapiens
  misc_RNA (1)...(19): siRNA sense strand
ggaagacugugaggcagau

SEQ ID NO: 2074741 - RNA, 19 nt, Homo sapiens
  misc_RNA (1)...(19): siRNA sense strand
ggcaaggccugugaagaug

SEQ ID NO: 2074742 - RNA, 19 nt, Homo sapiens
  misc_RNA (1)...(19): siRNA sense strand
cggcagugcuaccggauug

SEQ ID NO: 2074743 - RNA, 19 nt, Homo sapiens
  misc_RNA (1)...(19): siRNA sense strand
gcugugaggauguggauga

SEQ ID NO: 2074744 - RNA, 19 nt, Homo sapiens
  misc_RNA (1)...(19): siRNA sense strand
cggcaaggccugugaagau

SEQ ID NO: 2074745 - RNA, 19 nt, Homo sapiens
  misc_RNA (1)...(19): siRNA sense strand
gcgaacacacgcucacaga

SEQ ID NO: 2074746 - RNA, 19 nt, Homo sapiens
  misc_RNA (1)...(19): siRNA sense strand
ugaggaagaggcagaguug

SEQ ID NO: 2074747 - RNA, 19 nt, Homo sapiens
  misc_RNA (1)...(19): siRNA sense strand
caaggccugugaagaugug

SEQ ID NO: 2074748 - RNA, 19 nt, Homo sapiens
  misc_RNA (1)...(19): siRNA sense strand
ugccagagagccugugaua

SEQ ID NO: 2074749 - RNA, 19 nt, Homo sapiens
  misc_RNA (1)...(19): siRNA sense strand
ggugugagccagguucauu

SEQ ID NO: 2074750 - RNA, 19 nt, Homo sapiens
  misc_RNA (1)...(19): siRNA sense strand
gcuuccggcuccacacuga

SEQ ID NO: 2074751 - RNA, 19 nt, Homo sapiens
  misc_RNA (1)...(19): siRNA sense strand
ugagccagguucauuugga

SEQ ID NO: 2074752 - RNA, 19 nt, Homo sapiens
  misc_RNA (1)...(19): siRNA sense strand
aacacacgcucacagagaa

SEQ ID NO: 2074753 - RNA, 19 nt, Homo sapiens
  misc_RNA (1)...(19): siRNA sense strand
gaggccagauguggacgaa

SEQ ID NO: 2074754 - RNA, 19 nt, Homo sapiens
  misc_RNA (1)...(19): siRNA sense strand
gugcuggugucaacaugga

SEQ ID NO: 2074755 - RNA, 19 nt, Homo sapiens
  misc_RNA (1)...(19): siRNA sense strand
cagagagccugugauacug

SEQ ID NO: 2074756 - RNA, 19 nt, Homo sapiens
  misc_RNA (1)...(19): siRNA sense strand
gcuaccggauugagaugga

SEQ ID NO: 2074757 - RNA, 19 nt, Homo sapiens
  misc_RNA (1)...(19): siRNA sense strand
gaaguuugucugccuggau

SEQ ID NO: 2074758 - RNA, 19 nt, Homo sapiens
  misc_RNA (1)...(19): siRNA sense strand
ucaccggucucugccuuug

SEQ ID NO: 2074759 - RNA, 19 nt, Homo sapiens
  misc_RNA (1)...(19): siRNA sense strand
ccggacaccuuugggaaga

SEQ ID NO: 2074760 - RNA, 19 nt, Homo sapiens
  misc_RNA (1)...(19): siRNA sense strand
cugccuggaugacuccuuu

SEQ ID NO: 2074761 - RNA, 19 nt, Homo sapiens
  misc_RNA (1)...(19): siRNA sense strand
ggacggcaaggccugugaa

SEQ ID NO: 2074762 - RNA, 19 nt, Homo sapiens
  misc_RNA (1)...(19): siRNA sense strand
gguaugggccaggcuguga

SEQ ID NO: 2074763 - RNA, 19 nt, Homo sapiens
  misc_RNA (1)...(19): siRNA sense strand
agugugagcugggcuacuu

SEQ ID NO: 2074764 - RNA, 19 nt, Homo sapiens
  misc_RNA (1)...(19): siRNA sense strand
gcaaggccugugaagaugu

SEQ ID NO: 2074765 - RNA, 19 nt, Homo sapiens
  misc_RNA (1)...(19): siRNA sense strand
gagcuggacacagaucaga

SEQ ID NO: 2074766 - RNA, 19 nt, Homo sapiens
  misc_RNA (1)...(19): siRNA sense strand
ucagaggaccugcaucgau

SEQ ID NO: 2074767 - RNA, 19 nt, Homo sapiens
  misc_RNA (1)...(19): siRNA sense strand
gcugucaggcagaguguga

SEQ ID NO: 2074768 - RNA, 19 nt, Homo sapiens
  misc_RNA (1)...(19): siRNA sense strand
gaggacggcaggcauugug

SEQ ID NO: 2074769 - RNA, 19 nt, Homo sapiens
  misc_RNA (1)...(19): siRNA sense strand
gggccuggauggcugugau

SEQ ID NO: 2074770 - RNA, 19 nt, Homo sapiens
  misc_RNA (1)...(19): siRNA sense strand
aaggugcucuugugccaau

SEQ ID NO: 2074771 - RNA, 19 nt, Homo sapiens
  misc_RNA (1)...(19): siRNA sense strand
ggacaccuuugggaagaac

SEQ ID NO: 2074772 - RNA, 19 nt, Homo sapiens
  misc_RNA (1)...(19): siRNA sense strand
caucugcaaugagacuugu

SEQ ID NO: 2074773 - RNA, 19 nt, Homo sapiens
  misc_RNA (1)...(19): siRNA sense strand
gcaagcacugucgcaagaa

SEQ ID NO: 2074774 - RNA, 19 nt, Homo sapiens
  misc_RNA (1)...(19): siRNA sense strand
acaacaacagcacguguga

SEQ ID NO: 2074775 - RNA, 19 nt, Homo sapiens
  misc_RNA (1)...(19): siRNA sense strand
cacggccacuucugugaga

SEQ ID NO: 2074776 - RNA, 19 nt, Homo sapiens
  misc_RNA (1)...(19): siRNA sense strand
gcagcuugaccugugauga

SEQ ID NO: 2074777 - RNA, 19 nt, Homo sapiens
  misc_RNA (1)...(19): siRNA sense strand
ccaccuguaaccuggauug

SEQ ID NO: 2074778 - RNA, 19 nt, Homo sapiens
  misc_RNA (1)...(19): siRNA sense strand
gaagauguggacgaaugug

SEQ ID NO: 2074779 - RNA, 19 nt, Homo sapiens
  misc_RNA (1)...(19): siRNA sense strand
caggaggacggcaggcauu

SEQ ID NO: 2074780 - RNA, 19 nt, Homo sapiens
  misc_RNA (1)...(19): siRNA sense strand
agauggaaaucgugaacag

SEQ ID NO: 2074781 - RNA, 19 nt, Homo sapiens
  misc_RNA (1)...(19): siRNA sense strand
uccugcagcugucagaaug

SEQ ID NO: 2074782 - RNA, 19 nt, Homo sapiens
  misc_RNA (1)...(19): siRNA sense strand
gugugagccagguucauuu

SEQ ID NO: 2074783 - RNA, 19 nt, Homo sapiens
  misc_RNA (1)...(19): siRNA sense strand
ccaagaaguucaaauguga

SEQ ID NO: 2074784 - RNA, 19 nt, Homo sapiens
  misc_RNA (1)...(19): siRNA sense strand
uacagaagcuugucccuaa

SEQ ID NO: 2074785 - RNA, 19 nt, Homo sapiens
  misc_RNA (1)...(19): siRNA sense strand
guucaaaugugacaaagga

SEQ ID NO: 2074786 - RNA, 19 nt, Homo sapiens
  misc_RNA (1)...(19): siRNA sense strand
caaaggacaucuugugaag

SEQ ID NO: 2074787 - RNA, 19 nt, Homo sapiens
  misc_RNA (1)...(19): siRNA sense strand
ggacaacagcgucuuucua

SEQ ID NO: 2074788 - RNA, 19 nt, Homo sapiens
  misc_RNA (1)...(19): siRNA sense strand
cgacgacgaugaugcagaa

SEQ ID NO: 2074789 - RNA, 19 nt, Homo sapiens
  misc_RNA (1)...(19): siRNA sense strand
ccaaagaugaugaugauga

SEQ ID NO: 2074790 - RNA, 19 nt, Homo sapiens
  misc_RNA (1)...(19): siRNA sense strand
gaaguucaaaugugacaaa

SEQ ID NO: 2074791 - RNA, 19 nt, Homo sapiens
  misc_RNA (1)...(19): siRNA sense strand
cgacgaugaugcagaaaug

SEQ ID NO: 2074792 - RNA, 19 nt, Homo sapiens
  misc_RNA (1)...(19): siRNA sense strand
caacagcgucuuucuagau

SEQ ID NO: 2074793 - RNA, 19 nt, Homo sapiens
  misc_RNA (1)...(19): siRNA sense strand
gacaacagcgucuuucuag

SEQ ID NO: 2074794 - RNA, 19 nt, Homo sapiens
  misc_RNA (1)...(19): siRNA sense strand
gaagucagaauuacagaag

SEQ ID NO: 2074795 - RNA, 19 nt, Homo sapiens
  misc_RNA (1)...(19): siRNA sense strand
cgacagcaaucagccaaug

SEQ ID NO: 2074796 - RNA, 19 nt, Homo sapiens
  misc_RNA (1)...(19): siRNA sense strand
gagccaaagaugaugauga

SEQ ID NO: 2074797 - RNA, 19 nt, Homo sapiens
  misc_RNA (1)...(19): siRNA sense strand
agacagaggaugugcagaa

SEQ ID NO: 2074798 - RNA, 19 nt, Homo sapiens
  misc_RNA (1)...(19): siRNA sense strand
caaagaugaugaugaugac

SEQ ID NO: 2074799 - RNA, 19 nt, Homo sapiens
  misc_RNA (1)...(19): siRNA sense strand
gaaugacagcgcuucuuug

SEQ ID NO: 2074800 - RNA, 19 nt, Homo sapiens
  misc_RNA (1)...(19): siRNA sense strand
ucaaugagcagacgagagu

SEQ ID NO: 2074801 - RNA, 19 nt, Homo sapiens
  misc_RNA (1)...(19): siRNA sense strand
aaggacaucuugugaaguc

SEQ ID NO: 2074802 - RNA, 19 nt, Homo sapiens
  misc_RNA (1)...(19): siRNA sense strand
gcagacgagaguucagaaa

SEQ ID NO: 2074803 - RNA, 19 nt, Homo sapiens
  misc_RNA (1)...(19): siRNA sense strand
gcugcagaguugugaguga

SEQ ID NO: 2074804 - RNA, 19 nt, Homo sapiens
  misc_RNA (1)...(19): siRNA sense strand
gaaaaugaguuugcugaag

SEQ ID NO: 2074805 - RNA, 19 nt, Homo sapiens
  misc_RNA (1)...(19): siRNA sense strand
gugagccgguucuuuggaa

SEQ ID NO: 2074806 - RNA, 19 nt, Homo sapiens
  misc_RNA (1)...(19): siRNA sense strand
uccaagaaguucaaaugug

SEQ ID NO: 2074807 - RNA, 19 nt, Homo sapiens
  misc_RNA (1)...(19): siRNA sense strand
gauggacaacagcgucuuu

SEQ ID NO: 2074808 - RNA, 19 nt, Homo sapiens
  misc_RNA (1)...(19): siRNA sense strand
agccaaagaugaugaugau

SEQ ID NO: 2074809 - RNA, 19 nt, Homo sapiens
  misc_RNA (1)...(19): siRNA sense strand
gacucucgcuuagcaaaga

SEQ ID NO: 2074810 - RNA, 19 nt, Homo sapiens
  misc_RNA (1)...(19): siRNA sense strand
ccaccugcgucuucaucuu

SEQ ID NO: 2074811 - RNA, 19 nt, Homo sapiens
  misc_RNA (1)...(19): siRNA sense strand
gagcagacgagaguucaga

SEQ ID NO: 2074812 - RNA, 19 nt, Homo sapiens
  misc_RNA (1)...(19): siRNA sense strand
ccacugugcagaagcagaa

SEQ ID NO: 2074813 - RNA, 19 nt, Homo sapiens
  misc_RNA (1)...(19): siRNA sense strand
gacaucuugugaagucaga

SEQ ID NO: 2074814 - RNA, 19 nt, Homo sapiens
  misc_RNA (1)...(19): siRNA sense strand
gacagaggaugugcagaag

SEQ ID NO: 2074815 - RNA, 19 nt, Homo sapiens
  misc_RNA (1)...(19): siRNA sense strand
agaagcuugucccuaagaa

SEQ ID NO: 2074816 - RNA, 19 nt, Homo sapiens
  misc_RNA (1)...(19): siRNA sense strand
acaacagcgucuuucuaga

SEQ ID NO: 2074817 - RNA, 19 nt, Homo sapiens
  misc_RNA (1)...(19): siRNA sense strand
gaagcuugucccuaagaau

SEQ ID NO: 2074818 - RNA, 19 nt, Homo sapiens
  misc_RNA (1)...(19): siRNA sense strand
gcuccacugugcagaagca

SEQ ID NO: 2074819 - RNA, 19 nt, Homo sapiens
  misc_RNA (1)...(19): siRNA sense strand
gcagcuccacugugcagaa

SEQ ID NO: 2074820 - RNA, 19 nt, Homo sapiens
  misc_RNA (1)...(19): siRNA sense strand
aagcuugucccuaagaaug

SEQ ID NO: 2074821 - RNA, 19 nt, Homo sapiens
  misc_RNA (1)...(19): siRNA sense strand
cguccaagaaguucaaaug

SEQ ID NO: 2074822 - RNA, 19 nt, Homo sapiens
  misc_RNA (1)...(19): siRNA sense strand
cucgguggcugcagaguug

SEQ ID NO: 2074823 - RNA, 19 nt, Homo sapiens
  misc_RNA (1)...(19): siRNA sense strand
aacagcgucuuucuagaug

SEQ ID NO: 2074824 - RNA, 19 nt, Homo sapiens
  misc_RNA (1)...(19): siRNA sense strand
guuggccucugcccaggaa

SEQ ID NO: 2074825 - RNA, 19 nt, Homo sapiens
  misc_RNA (1)...(19): siRNA sense strand
ucuugugaagucagaauua

SEQ ID NO: 2074826 - RNA, 19 nt, Homo sapiens
  misc_RNA (1)...(19): siRNA sense strand
uggaaacguugagcucaug

SEQ ID NO: 2074827 - RNA, 19 nt, Homo sapiens
  misc_RNA (1)...(19): siRNA sense strand
ugagaccccuugugaaaau

SEQ ID NO: 2074828 - RNA, 19 nt, Homo sapiens
  misc_RNA (1)...(19): siRNA sense strand
cagaagcuugucccuaaga

SEQ ID NO: 2074829 - RNA, 19 nt, Homo sapiens
  misc_RNA (1)...(19): siRNA sense strand
gagcagaagaauccaacag

SEQ ID NO: 2074830 - RNA, 19 nt, Homo sapiens
  misc_RNA (1)...(19): siRNA sense strand
uuucagagccaaagaugau

SEQ ID NO: 2074831 - RNA, 19 nt, Homo sapiens
  misc_RNA (1)...(19): siRNA sense strand
gcauuucagagccaaagau

SEQ ID NO: 2074832 - RNA, 19 nt, Homo sapiens
  misc_RNA (1)...(19): siRNA sense strand
caucuuguccuucaaugag

SEQ ID NO: 2074833 - RNA, 19 nt, Homo sapiens
  misc_RNA (1)...(19): siRNA sense strand
guccaagaaguucaaaugu

SEQ ID NO: 2074834 - RNA, 19 nt, Homo sapiens
  misc_RNA (1)...(19): siRNA sense strand
acgaugaugcagaaaugua

SEQ ID NO: 2074835 - RNA, 19 nt, Homo sapiens
  misc_RNA (1)...(19): siRNA sense strand
ucagagccaaagaugauga

SEQ ID NO: 2074836 - RNA, 19 nt, Homo sapiens
  misc_RNA (1)...(19): siRNA sense strand
ugagccgguucuuuggaaa

SEQ ID NO: 2074837 - RNA, 19 nt, Homo sapiens
  misc_RNA (1)...(19): siRNA sense strand
cccgugagccgguucuuug

SEQ ID NO: 2074838 - RNA, 19 nt, Homo sapiens
  misc_RNA (1)...(19): siRNA sense strand
cuugaaagcacgaaguugu

SEQ ID NO: 2074839 - RNA, 19 nt, Homo sapiens
  misc_RNA (1)...(19): siRNA sense strand
acgcgaacguccaagaagu

SEQ ID NO: 2074840 - RNA, 19 nt, Homo sapiens
  misc_RNA (1)...(19): siRNA sense strand
cagaauuacagaagcuugu

SEQ ID NO: 2074841 - RNA, 19 nt, Homo sapiens
  misc_RNA (1)...(19): siRNA sense strand
ugacgacgacgaugaugca

SEQ ID NO: 2074842 - RNA, 19 nt, Homo sapiens
  misc_RNA (1)...(19): siRNA sense strand
ugaagucagaauuacagaa

SEQ ID NO: 2074843 - RNA, 19 nt, Homo sapiens
  misc_RNA (1)...(19): siRNA sense strand
caccugcgucuucaucuug

SEQ ID NO: 2074844 - RNA, 19 nt, Homo sapiens
  misc_RNA (1)...(19): siRNA sense strand
ccgguucuuuggaaacguu

SEQ ID NO: 2074845 - RNA, 19 nt, Homo sapiens
  misc_RNA (1)...(19): siRNA sense strand
gucuucaucuuguccuuca

SEQ ID NO: 2074846 - RNA, 19 nt, Homo sapiens
  misc_RNA (1)...(19): siRNA sense strand
ugaaagcacgaaguuguuc

SEQ ID NO: 2074847 - RNA, 19 nt, Homo sapiens
  misc_RNA (1)...(19): siRNA sense strand
gaagagauguauaacaaug

SEQ ID NO: 2074848 - RNA, 19 nt, Homo sapiens
  misc_RNA (1)...(19): siRNA sense strand
ggaaauuguucagcgauua

SEQ ID NO: 2074849 - RNA, 19 nt, Homo sapiens
  misc_RNA (1)...(19): siRNA sense strand
ggacacagccacaggguua

SEQ ID NO: 2074850 - RNA, 19 nt, Homo sapiens
  misc_RNA (1)...(19): siRNA sense strand
ugaaagaucuggcggagaa

SEQ ID NO: 2074851 - RNA, 19 nt, Homo sapiens
  misc_RNA (1)...(19): siRNA sense strand
aaacaucucucuuccgaaa

SEQ ID NO: 2074852 - RNA, 19 nt, Homo sapiens
  misc_RNA (1)...(19): siRNA sense strand
agaaagagcucugcagaaa

SEQ ID NO: 2074853 - RNA, 19 nt, Homo sapiens
  misc_RNA (1)...(19): siRNA sense strand
gagcaagggugucugaaug

SEQ ID NO: 2074854 - RNA, 19 nt, Homo sapiens
  misc_RNA (1)...(19): siRNA sense strand
ccaauaagcuuucucacau

SEQ ID NO: 2074855 - RNA, 19 nt, Homo sapiens
  misc_RNA (1)...(19): siRNA sense strand
gauggaaguugcaaagauu

SEQ ID NO: 2074856 - RNA, 19 nt, Homo sapiens
  misc_RNA (1)...(19): siRNA sense strand
gaaggaugcccacuuguuu

SEQ ID NO: 2074857 - RNA, 19 nt, Homo sapiens
  misc_RNA (1)...(19): siRNA sense strand
ucaaucagcuggaauuaau

SEQ ID NO: 2074858 - RNA, 19 nt, Homo sapiens
  misc_RNA (1)...(19): siRNA sense strand
aaagagcucugcagaaaga

SEQ ID NO: 2074859 - RNA, 19 nt, Homo sapiens
  misc_RNA (1)...(19): siRNA sense strand
cagcuuggcuuccauguga

SEQ ID NO: 2074860 - RNA, 19 nt, Homo sapiens
  misc_RNA (1)...(19): siRNA sense strand
ccaaggagcuaacaugcaa

SEQ ID NO: 2074861 - RNA, 19 nt, Homo sapiens
  misc_RNA (1)...(19): siRNA sense strand
gacaacagcuacugaggaa

SEQ ID NO: 2074862 - RNA, 19 nt, Homo sapiens
  misc_RNA (1)...(19): siRNA sense strand
gcacagaggaagagaugua

SEQ ID NO: 2074863 - RNA, 19 nt, Homo sapiens
  misc_RNA (1)...(19): siRNA sense strand
gaaagaaggaucccaguuc

SEQ ID NO: 2074864 - RNA, 19 nt, Homo sapiens
  misc_RNA (1)...(19): siRNA sense strand
gcaacacgcucuccagcaa

SEQ ID NO: 2074865 - RNA, 19 nt, Homo sapiens
  misc_RNA (1)...(19): siRNA sense strand
gaaagucaaucagcuggaa

SEQ ID NO: 2074866 - RNA, 19 nt, Homo sapiens
  misc_RNA (1)...(19): siRNA sense strand
gcuauacccucuacugcua

SEQ ID NO: 2074867 - RNA, 19 nt, Homo sapiens
  misc_RNA (1)...(19): siRNA sense strand
gaacaagggcugagcuuuc

SEQ ID NO: 2074868 - RNA, 19 nt, Homo sapiens
  misc_RNA (1)...(19): siRNA sense strand
gaacgaggcaggaguacuu

SEQ ID NO: 2074869 - RNA, 19 nt, Homo sapiens
  misc_RNA (1)...(19): siRNA sense strand
gaaaauguguguuauagug

SEQ ID NO: 2074870 - RNA, 19 nt, Homo sapiens
  misc_RNA (1)...(19): siRNA sense strand
gagcugcccuuauguguag

SEQ ID NO: 2074871 - RNA, 19 nt, Homo sapiens
  misc_RNA (1)...(19): siRNA sense strand
caacugugcugaagacauc

SEQ ID NO: 2074872 - RNA, 19 nt, Homo sapiens
  misc_RNA (1)...(19): siRNA sense strand
ggaaagagcaccaaaacua

SEQ ID NO: 2074873 - RNA, 19 nt, Homo sapiens
  misc_RNA (1)...(19): siRNA sense strand
gaagacaucagggaaauug

SEQ ID NO: 2074874 - RNA, 19 nt, Homo sapiens
  misc_RNA (1)...(19): siRNA sense strand
gaccucaacuccaaagaga

SEQ ID NO: 2074875 - RNA, 19 nt, Homo sapiens
  misc_RNA (1)...(19): siRNA sense strand
gcagucagaugauuauuuu

SEQ ID NO: 2074876 - RNA, 19 nt, Homo sapiens
  misc_RNA (1)...(19): siRNA sense strand
cgacugaaaggauuuagua

SEQ ID NO: 2074877 - RNA, 19 nt, Homo sapiens
  misc_RNA (1)...(19): siRNA sense strand
aggaagagauguauaacaa

SEQ ID NO: 2074878 - RNA, 19 nt, Homo sapiens
  misc_RNA (1)...(19): siRNA sense strand
gagagcaucugcagcaaca

SEQ ID NO: 2074879 - RNA, 19 nt, Homo sapiens
  misc_RNA (1)...(19): siRNA sense strand
cauaauccauguaccgaaa

SEQ ID NO: 2074880 - RNA, 19 nt, Homo sapiens
  misc_RNA (1)...(19): siRNA sense strand
ggagagagaagguggaaga

SEQ ID NO: 2074881 - RNA, 19 nt, Homo sapiens
  misc_RNA (1)...(19): siRNA sense strand
caauaagcuuucucacauu

SEQ ID NO: 2074882 - RNA, 19 nt, Homo sapiens
  misc_RNA (1)...(19): siRNA sense strand
guggagaucugcaaaguag

SEQ ID NO: 2074883 - RNA, 19 nt, Homo sapiens
  misc_RNA (1)...(19): siRNA sense strand
ggacagugcccuccugaug

SEQ ID NO: 2074884 - RNA, 19 nt, Homo sapiens
  misc_RNA (1)...(19): siRNA sense strand
cccaagagcugcccuuaug

SEQ ID NO: 2074885 - RNA, 19 nt, Homo sapiens
  misc_RNA (1)...(19): siRNA sense strand
gcucagaggguaccgagua

SEQ ID NO: 2074886 - RNA, 19 nt, Homo sapiens
  misc_RNA (1)...(19): siRNA sense strand
caaguuauauucugugcau

SEQ ID NO: 2074887 - RNA, 19 nt, Homo sapiens
  misc_RNA (1)...(19): siRNA sense strand
ggaaggaugcccacuuguu

SEQ ID NO: 2074888 - RNA, 19 nt, Homo sapiens
  misc_RNA (1)...(19): siRNA sense strand
gugaagcgcuacaucauag

SEQ ID NO: 2074889 - RNA, 19 nt, Homo sapiens
  misc_RNA (1)...(19): siRNA sense strand
gaaaugaguucugguucuc

SEQ ID NO: 2074890 - RNA, 19 nt, Homo sapiens
  misc_RNA (1)...(19): siRNA sense strand
cgacgagccagccaaguua

SEQ ID NO: 2074891 - RNA, 19 nt, Homo sapiens
  misc_RNA (1)...(19): siRNA sense strand
guacuucugugacugugaa

SEQ ID NO: 2074892 - RNA, 19 nt, Homo sapiens
  misc_RNA (1)...(19): siRNA sense strand
caaagugcauaauccaugu

SEQ ID NO: 2074893 - RNA, 19 nt, Homo sapiens
  misc_RNA (1)...(19): siRNA sense strand
ggaauugucagcgauguuu

SEQ ID NO: 2074894 - RNA, 19 nt, Homo sapiens
  misc_RNA (1)...(19): siRNA sense strand
ucgcagauguggaaccuuu

SEQ ID NO: 2074895 - RNA, 19 nt, Homo sapiens
  misc_RNA (1)...(19): siRNA sense strand
gcacauaggaaaugacauc

SEQ ID NO: 2074896 - RNA, 19 nt, Homo sapiens
  misc_RNA (1)...(19): siRNA sense strand
gcgacaggcuuccaacuca

SEQ ID NO: 2074897 - RNA, 19 nt, Homo sapiens
  misc_RNA (1)...(19): siRNA sense strand
gaaccuggaugccgaugag

SEQ ID NO: 2074898 - RNA, 19 nt, Homo sapiens
  misc_RNA (1)...(19): siRNA sense strand
gaaugucccgggauguaua

SEQ ID NO: 2074899 - RNA, 19 nt, Homo sapiens
  misc_RNA (1)...(19): siRNA sense strand
caaaagaugugccaccauu

SEQ ID NO: 2074900 - RNA, 19 nt, Homo sapiens
  misc_RNA (1)...(19): siRNA sense strand
aaagaaggaucccaguuca

SEQ ID NO: 2074901 - RNA, 19 nt, Homo sapiens
  misc_RNA (1)...(19): siRNA sense strand
cagaggaagagauguauaa

SEQ ID NO: 2074902 - RNA, 19 nt, Homo sapiens
  misc_RNA (1)...(19): siRNA sense strand
ugacucagaugaagaacug

SEQ ID NO: 2074903 - RNA, 19 nt, Homo sapiens
  misc_RNA (1)...(19): siRNA sense strand
ugacauugaugccgaagau

SEQ ID NO: 2074904 - RNA, 19 nt, Homo sapiens
  misc_RNA (1)...(19): siRNA sense strand
guggacaucuggauuagug

SEQ ID NO: 2074905 - RNA, 19 nt, Homo sapiens
  misc_RNA (1)...(19): siRNA sense strand
gcaaggcacugugggaaag

SEQ ID NO: 2074906 - RNA, 19 nt, Homo sapiens
  misc_RNA (1)...(19): siRNA sense strand
gggaaauuguucagcgauu

SEQ ID NO: 2074907 - RNA, 19 nt, Homo sapiens
  misc_RNA (1)...(19): siRNA sense strand
ggcacgcacucucucuaua

SEQ ID NO: 2074908 - RNA, 19 nt, Homo sapiens
  misc_RNA (1)...(19): siRNA sense strand
gcagugaacaaauauguca

SEQ ID NO: 2074909 - RNA, 19 nt, Homo sapiens
  misc_RNA (1)...(19): siRNA sense strand
gggcugaccuacaucaaag

SEQ ID NO: 2074910 - RNA, 19 nt, Homo sapiens
  misc_RNA (1)...(19): siRNA sense strand
gggacccacuacuucuuua

SEQ ID NO: 2074911 - RNA, 19 nt, Homo sapiens
  misc_RNA (1)...(19): siRNA sense strand
cagcaugucuuugucauag

SEQ ID NO: 2074912 - RNA, 19 nt, Homo sapiens
  misc_RNA (1)...(19): siRNA sense strand
caacaacagacaacagcua

SEQ ID NO: 2074913 - RNA, 19 nt, Homo sapiens
  misc_RNA (1)...(19): siRNA sense strand
ggaucccuaugguggaaua

SEQ ID NO: 2074914 - RNA, 19 nt, Homo sapiens
  misc_RNA (1)...(19): siRNA sense strand
ccaaaguccuggguuccua

SEQ ID NO: 2074915 - RNA, 19 nt, Homo sapiens
  misc_RNA (1)...(19): siRNA sense strand
aaacggagguugaaaucag

SEQ ID NO: 2074916 - RNA, 19 nt, Homo sapiens
  misc_RNA (1)...(19): siRNA sense strand
caacucauccucuuucagu

SEQ ID NO: 2074917 - RNA, 19 nt, Homo sapiens
  misc_RNA (1)...(19): siRNA sense strand
gcacagggaguauggaagu

SEQ ID NO: 2074918 - RNA, 19 nt, Homo sapiens
  misc_RNA (1)...(19): siRNA sense strand
aauaagcuuucucacauug

SEQ ID NO: 2074919 - RNA, 19 nt, Homo sapiens
  misc_RNA (1)...(19): siRNA sense strand
ggauaccucugugaaguuc

SEQ ID NO: 2074920 - RNA, 19 nt, Homo sapiens
  misc_RNA (1)...(19): siRNA sense strand
caaagacuacgaacucaug

SEQ ID NO: 2074921 - RNA, 19 nt, Homo sapiens
  misc_RNA (1)...(19): siRNA sense strand
gagcacagaggaagagaug

SEQ ID NO: 2074922 - RNA, 19 nt, Homo sapiens
  misc_RNA (1)...(19): siRNA sense strand
gaaaucagagucgguggaa

SEQ ID NO: 2074923 - RNA, 19 nt, Homo sapiens
  misc_RNA (1)...(19): siRNA sense strand
guagacaacugugcugaag

SEQ ID NO: 2074924 - RNA, 19 nt, Homo sapiens
  misc_RNA (1)...(19): siRNA sense strand
gaugucauguccacagcaa

SEQ ID NO: 2074925 - RNA, 19 nt, Homo sapiens
  misc_RNA (1)...(19): siRNA sense strand
gcucaggcccuuuggaaug

SEQ ID NO: 2074926 - RNA, 19 nt, Homo sapiens
  misc_RNA (1)...(19): siRNA sense strand
caaauucuucuaugggaaa

SEQ ID NO: 2074927 - RNA, 19 nt, Homo sapiens
  misc_RNA (1)...(19): siRNA sense strand
gggaaccugucuccaagga

SEQ ID NO: 2074928 - RNA, 19 nt, Homo sapiens
  misc_RNA (1)...(19): siRNA sense strand
caacauguucugucuaaag

SEQ ID NO: 2074929 - RNA, 19 nt, Homo sapiens
  misc_RNA (1)...(19): siRNA sense strand
caacucagcaucagacagu

SEQ ID NO: 2074930 - RNA, 19 nt, Homo sapiens
  misc_RNA (1)...(19): siRNA sense strand
ccagucugcugacauugaa

SEQ ID NO: 2074931 - RNA, 19 nt, Homo sapiens
  misc_RNA (1)...(19): siRNA sense strand
aaggaaggaugcccacuug

SEQ ID NO: 2074932 - RNA, 19 nt, Homo sapiens
  misc_RNA (1)...(19): siRNA sense strand
caaaguaaucaaugcagaa

SEQ ID NO: 2074933 - RNA, 19 nt, Homo sapiens
  misc_RNA (1)...(19): siRNA sense strand
aggacuaccucucaaagaa

SEQ ID NO: 2074934 - RNA, 19 nt, Homo sapiens
  misc_RNA (1)...(19): siRNA sense strand
cagagucgguggaaacauc

SEQ ID NO: 2074935 - RNA, 19 nt, Homo sapiens
  misc_RNA (1)...(19): siRNA sense strand
cucaacauguucugucuaa

SEQ ID NO: 2074936 - RNA, 19 nt, Homo sapiens
  misc_RNA (1)...(19): siRNA sense strand
gaaagauggaaguugcaaa

SEQ ID NO: 2074937 - RNA, 19 nt, Homo sapiens
  misc_RNA (1)...(19): siRNA sense strand
aaaugcagcccauaaauca

SEQ ID NO: 2074938 - RNA, 19 nt, Homo sapiens
  misc_RNA (1)...(19): siRNA sense strand
ggaaaaggcacauaggaaa

SEQ ID NO: 2074939 - RNA, 19 nt, Homo sapiens
  misc_RNA (1)...(19): siRNA sense strand
ucucagaccaguuaugaaa

SEQ ID NO: 2074940 - RNA, 19 nt, Homo sapiens
  misc_RNA (1)...(19): siRNA sense strand
gaaagugaagcgcuacauc

SEQ ID NO: 2074941 - RNA, 19 nt, Homo sapiens
  misc_RNA (1)...(19): siRNA sense strand
cgaugagggugaugggaaa

SEQ ID NO: 2074942 - RNA, 19 nt, Homo sapiens
  misc_RNA (1)...(19): siRNA sense strand
gagugaaggucagcaagau

SEQ ID NO: 2074943 - RNA, 19 nt, Homo sapiens
  misc_RNA (1)...(19): siRNA sense strand
ucccuaugguggaauauaa

SEQ ID NO: 2074944 - RNA, 19 nt, Homo sapiens
  misc_RNA (1)...(19): siRNA sense strand
gaaagcuucgaacuguuaa

SEQ ID NO: 2074945 - RNA, 19 nt, Homo sapiens
  misc_RNA (1)...(19): siRNA sense strand
uugaaggucuugacucaga

SEQ ID NO: 2074946 - RNA, 19 nt, Homo sapiens
  misc_RNA (1)...(19): siRNA sense strand
agacaaggccguucuccaa

SEQ ID NO: 2074947 - RNA, 19 nt, Homo sapiens
  misc_RNA (1)...(19): siRNA sense strand
gaaaugagcuaugaacuaa

SEQ ID NO: 2074948 - RNA, 19 nt, Homo sapiens
  misc_RNA (1)...(19): siRNA sense strand
caagaagaauugcagaaua

SEQ ID NO: 2074949 - RNA, 19 nt, Homo sapiens
  misc_RNA (1)...(19): siRNA sense strand
caaagaggaugucagcaua

SEQ ID NO: 2074950 - RNA, 19 nt, Homo sapiens
  misc_RNA (1)...(19): siRNA sense strand
caaaugaaauguugcuuga

SEQ ID NO: 2074951 - RNA, 19 nt, Homo sapiens
  misc_RNA (1)...(19): siRNA sense strand
gcagauaccuuccagagau

SEQ ID NO: 2074952 - RNA, 19 nt, Homo sapiens
  misc_RNA (1)...(19): siRNA sense strand
ccacacagcugccaugguu

SEQ ID NO: 2074953 - RNA, 19 nt, Homo sapiens
  misc_RNA (1)...(19): siRNA sense strand
caaacaaugugugcaauuu

SEQ ID NO: 2074954 - RNA, 19 nt, Homo sapiens
  misc_RNA (1)...(19): siRNA sense strand
aagaagaucucauaaagga

SEQ ID NO: 2074955 - RNA, 19 nt, Homo sapiens
  misc_RNA (1)...(19): siRNA sense strand
agagcgagaucaugacuua

SEQ ID NO: 2074956 - RNA, 19 nt, Homo sapiens
  misc_RNA (1)...(19): siRNA sense strand
gagaaagcauggaggaaga

SEQ ID NO: 2074957 - RNA, 19 nt, Homo sapiens
  misc_RNA (1)...(19): siRNA sense strand
aaagcaagaugguacaauu

SEQ ID NO: 2074958 - RNA, 19 nt, Homo sapiens
  misc_RNA (1)...(19): siRNA sense strand
ccaggaacauacagauuaa

SEQ ID NO: 2074959 - RNA, 19 nt, Homo sapiens
  misc_RNA (1)...(19): siRNA sense strand
gagaaaugcugcaccaaag

SEQ ID NO: 2074960 - RNA, 19 nt, Homo sapiens
  misc_RNA (1)...(19): siRNA sense strand
gcccaugacugaagaguug

SEQ ID NO: 2074961 - RNA, 19 nt, Homo sapiens
  misc_RNA (1)...(19): siRNA sense strand
caaugaagcuacuaugcaa

SEQ ID NO: 2074962 - RNA, 19 nt, Homo sapiens
  misc_RNA (1)...(19): siRNA sense strand
guauguaucggaagaauaa

SEQ ID NO: 2074963 - RNA, 19 nt, Homo sapiens
  misc_RNA (1)...(19): siRNA sense strand
ggaaggggcucagguguua

SEQ ID NO: 2074964 - RNA, 19 nt, Homo sapiens
  misc_RNA (1)...(19): siRNA sense strand
gugcaagccuuaauggaaa

SEQ ID NO: 2074965 - RNA, 19 nt, Homo sapiens
  misc_RNA (1)...(19): siRNA sense strand
gaacaagagaguaucauuc

SEQ ID NO: 2074966 - RNA, 19 nt, Homo sapiens
  misc_RNA (1)...(19): siRNA sense strand
ugaagcaaaugaaauguug

SEQ ID NO: 2074967 - RNA, 19 nt, Homo sapiens
  misc_RNA (1)...(19): siRNA sense strand
gcucaggagucgucucaaa

SEQ ID NO: 2074968 - RNA, 19 nt, Homo sapiens
  misc_RNA (1)...(19): siRNA sense strand
ggagaaggaucgccucaag

SEQ ID NO: 2074969 - RNA, 19 nt, Homo sapiens
  misc_RNA (1)...(19): siRNA sense strand
gaacggagucggcucaaug

SEQ ID NO: 2074970 - RNA, 19 nt, Homo sapiens
  misc_RNA (1)...(19): siRNA sense strand
ugagagaagugcaaaggaa

SEQ ID NO: 2074971 - RNA, 19 nt, Homo sapiens
  misc_RNA (1)...(19): siRNA sense strand
ggaaacauaaccaggaauu

SEQ ID NO: 2074972 - RNA, 19 nt, Homo sapiens
  misc_RNA (1)...(19): siRNA sense strand
acaagacaccugugaguua

SEQ ID NO: 2074973 - RNA, 19 nt, Homo sapiens
  misc_RNA (1)...(19): siRNA sense strand
uagaaggacuaguagauga

SEQ ID NO: 2074974 - RNA, 19 nt, Homo sapiens
  misc_RNA (1)...(19): siRNA sense strand
gaaguuggugcaagccuua

SEQ ID NO: 2074975 - RNA, 19 nt, Homo sapiens
  misc_RNA (1)...(19): siRNA sense strand
gcaguugcuucaggaauuu

SEQ ID NO: 2074976 - RNA, 19 nt, Homo sapiens
  misc_RNA (1)...(19): siRNA sense strand
uugaagcgcuuucuauuga

SEQ ID NO: 2074977 - RNA, 19 nt, Homo sapiens
  misc_RNA (1)...(19): siRNA sense strand
acacugcucugcaaacuug

SEQ ID NO: 2074978 - RNA, 19 nt, Homo sapiens
  misc_RNA (1)...(19): siRNA sense strand
gggaugaucucugugaaga

SEQ ID NO: 2074979 - RNA, 19 nt, Homo sapiens
  misc_RNA (1)...(19): siRNA sense strand
caagugugcuuucaugcuu

SEQ ID NO: 2074980 - RNA, 19 nt, Homo sapiens
  misc_RNA (1)...(19): siRNA sense strand
ggagcgggcuauagaugaa

SEQ ID NO: 2074981 - RNA, 19 nt, Homo sapiens
  misc_RNA (1)...(19): siRNA sense strand
caagacaccugugaguuau

SEQ ID NO: 2074982 - RNA, 19 nt, Homo sapiens
  misc_RNA (1)...(19): siRNA sense strand
aaacagaggccaccaacaa

SEQ ID NO: 2074983 - RNA, 19 nt, Homo sapiens
  misc_RNA (1)...(19): siRNA sense strand
uuacagacgucucuucaug

SEQ ID NO: 2074984 - RNA, 19 nt, Homo sapiens
  misc_RNA (1)...(19): siRNA sense strand
gcagggaacgugagacuga

SEQ ID NO: 2074985 - RNA, 19 nt, Homo sapiens
  misc_RNA (1)...(19): siRNA sense strand
gcagccaacuugaaauaca

SEQ ID NO: 2074986 - RNA, 19 nt, Homo sapiens
  misc_RNA (1)...(19): siRNA sense strand
gaguaucauucagcaguua

SEQ ID NO: 2074987 - RNA, 19 nt, Homo sapiens
  misc_RNA (1)...(19): siRNA sense strand
guggaacaguuaucuacua

SEQ ID NO: 2074988 - RNA, 19 nt, Homo sapiens
  misc_RNA (1)...(19): siRNA sense strand
gcucuuagcaugauuaaag

SEQ ID NO: 2074989 - RNA, 19 nt, Homo sapiens
  misc_RNA (1)...(19): siRNA sense strand
ggaggaggcugcacaccau

SEQ ID NO: 2074990 - RNA, 19 nt, Homo sapiens
  misc_RNA (1)...(19): siRNA sense strand
gaacaaagaaguggaggau

SEQ ID NO: 2074991 - RNA, 19 nt, Homo sapiens
  misc_RNA (1)...(19): siRNA sense strand
gaagaaauggaaaccaaau

SEQ ID NO: 2074992 - RNA, 19 nt, Homo sapiens
  misc_RNA (1)...(19): siRNA sense strand
ugaaaugagcuaugaacua

SEQ ID NO: 2074993 - RNA, 19 nt, Homo sapiens
  misc_RNA (1)...(19): siRNA sense strand
cagcauggguguaaucaca

SEQ ID NO: 2074994 - RNA, 19 nt, Homo sapiens
  misc_RNA (1)...(19): siRNA sense strand
ggaacaagagaguaucauu

SEQ ID NO: 2074995 - RNA, 19 nt, Homo sapiens
  misc_RNA (1)...(19): siRNA sense strand
gaacaguuaucuacuaccu

SEQ ID NO: 2074996 - RNA, 19 nt, Homo sapiens
  misc_RNA (1)...(19): siRNA sense strand
ucacaugagaccacuauaa

SEQ ID NO: 2074997 - RNA, 19 nt, Homo sapiens
  misc_RNA (1)...(19): siRNA sense strand
uggcaaagcuucgagaaau

SEQ ID NO: 2074998 - RNA, 19 nt, Homo sapiens
  misc_RNA (1)...(19): siRNA sense strand
gaagauacaagcacugagu

SEQ ID NO: 2074999 - RNA, 19 nt, Homo sapiens
  misc_RNA (1)...(19): siRNA sense strand
gguugauccugaagacaua

SEQ ID NO: 2075000 - RNA, 19 nt, Homo sapiens
  misc_RNA (1)...(19): siRNA sense strand
gauggaacuuucugcucua

SEQ ID NO: 2075001 - RNA, 19 nt, Homo sapiens
  misc_RNA (1)...(19): siRNA sense strand
agacgucucuucaugauag

SEQ ID NO: 2075002 - RNA, 19 nt, Homo sapiens
  misc_RNA (1)...(19): siRNA sense strand
aagaagaaauggaaaccaa

SEQ ID NO: 2075003 - RNA, 19 nt, Homo sapiens
  misc_RNA (1)...(19): siRNA sense strand
gaagaauugcagaauaaga

SEQ ID NO: 2075004 - RNA, 19 nt, Homo sapiens
  misc_RNA (1)...(19): siRNA sense strand
aaugaaauguugcuugaga

SEQ ID NO: 2075005 - RNA, 19 nt, Homo sapiens
  misc_RNA (1)...(19): siRNA sense strand
acaaagaaguggaggaucu

SEQ ID NO: 2075006 - RNA, 19 nt, Homo sapiens
  misc_RNA (1)...(19): siRNA sense strand
cgaaagguggccagaagua

SEQ ID NO: 2075007 - RNA, 19 nt, Homo sapiens
  misc_RNA (1)...(19): siRNA sense strand
gaacaugaaauggagauuc

SEQ ID NO: 2075008 - RNA, 19 nt, Homo sapiens
  misc_RNA (1)...(19): siRNA sense strand
gcugaaagaagaaauggaa

SEQ ID NO: 2075009 - RNA, 19 nt, Homo sapiens
  misc_RNA (1)...(19): siRNA sense strand
gaaguggaacaguuaucua

SEQ ID NO: 2075010 - RNA, 19 nt, Homo sapiens
  misc_RNA (1)...(19): siRNA sense strand
gauguccucuccuccaaug

SEQ ID NO: 2075011 - RNA, 19 nt, Homo sapiens
  misc_RNA (1)...(19): siRNA sense strand
gcagcuacaagaagaauug

SEQ ID NO: 2075012 - RNA, 19 nt, Homo sapiens
  misc_RNA (1)...(19): siRNA sense strand
gauugaagcgcuuucuauu

SEQ ID NO: 2075013 - RNA, 19 nt, Homo sapiens
  misc_RNA (1)...(19): siRNA sense strand
ggauugaagcgcuuucuau

SEQ ID NO: 2075014 - RNA, 19 nt, Homo sapiens
  misc_RNA (1)...(19): siRNA sense strand
gcagucggcuagaagaagu

SEQ ID NO: 2075015 - RNA, 19 nt, Homo sapiens
  misc_RNA (1)...(19): siRNA sense strand
caugauggcugugcaggaa

SEQ ID NO: 2075016 - RNA, 19 nt, Homo sapiens
  misc_RNA (1)...(19): siRNA sense strand
aacaagugcuggaacauga

SEQ ID NO: 2075017 - RNA, 19 nt, Homo sapiens
  misc_RNA (1)...(19): siRNA sense strand
ugcaggaccuucuaaguga

SEQ ID NO: 2075018 - RNA, 19 nt, Homo sapiens
  misc_RNA (1)...(19): siRNA sense strand
ugagagagcgagaucauga

SEQ ID NO: 2075019 - RNA, 19 nt, Homo sapiens
  misc_RNA (1)...(19): siRNA sense strand
gcugugggaugaucucugu

SEQ ID NO: 2075020 - RNA, 19 nt, Homo sapiens
  misc_RNA (1)...(19): siRNA sense strand
ggaacauacagauuaaaga

SEQ ID NO: 2075021 - RNA, 19 nt, Homo sapiens
  misc_RNA (1)...(19): siRNA sense strand
cgagaaaugcugcaccaaa

SEQ ID NO: 2075022 - RNA, 19 nt, Homo sapiens
  misc_RNA (1)...(19): siRNA sense strand
ggcaaagcuucgagaaaug

SEQ ID NO: 2075023 - RNA, 19 nt, Homo sapiens
  misc_RNA (1)...(19): siRNA sense strand
ugaagccauuuguaaggua

SEQ ID NO: 2075024 - RNA, 19 nt, Homo sapiens
  misc_RNA (1)...(19): siRNA sense strand
ggugcaagccuuaauggaa

SEQ ID NO: 2075025 - RNA, 19 nt, Homo sapiens
  misc_RNA (1)...(19): siRNA sense strand
caugacagauggaguuagu

SEQ ID NO: 2075026 - RNA, 19 nt, Homo sapiens
  misc_RNA (1)...(19): siRNA sense strand
gaauuagcucuuagcauga

SEQ ID NO: 2075027 - RNA, 19 nt, Homo sapiens
  misc_RNA (1)...(19): siRNA sense strand
gaaagguggccagaaguau

SEQ ID NO: 2075028 - RNA, 19 nt, Homo sapiens
  misc_RNA (1)...(19): siRNA sense strand
gaaguuccaugcccaucca

SEQ ID NO: 2075029 - RNA, 19 nt, Homo sapiens
  misc_RNA (1)...(19): siRNA sense strand
caagcucaaucuccagguu

SEQ ID NO: 2075030 - RNA, 19 nt, Homo sapiens
  misc_RNA (1)...(19): siRNA sense strand
cgagauaacucagacaaaa

SEQ ID NO: 2075031 - RNA, 19 nt, Homo sapiens
  misc_RNA (1)...(19): siRNA sense strand
gaauaagagccaacagcuu

SEQ ID NO: 2075032 - RNA, 19 nt, Homo sapiens
  misc_RNA (1)...(19): siRNA sense strand
cugaagaguugcugaaaca

SEQ ID NO: 2075033 - RNA, 19 nt, Homo sapiens
  misc_RNA (1)...(19): siRNA sense strand
aaaaguugcuucaguagaa

SEQ ID NO: 2075034 - RNA, 19 nt, Homo sapiens
  misc_RNA (1)...(19): siRNA sense strand
cagcugccaugguucagaa

SEQ ID NO: 2075035 - RNA, 19 nt, Homo sapiens
  misc_RNA (1)...(19): siRNA sense strand
gccaguauguaucggaaga

SEQ ID NO: 2075036 - RNA, 19 nt, Homo sapiens
  misc_RNA (1)...(19): siRNA sense strand
guaaucacaagcuggaauu

SEQ ID NO: 2075037 - RNA, 19 nt, Homo sapiens
  misc_RNA (1)...(19): siRNA sense strand
agaaagaugaggagacuga

SEQ ID NO: 2075038 - RNA, 19 nt, Homo sapiens
  misc_RNA (1)...(19): siRNA sense strand
gaccagcauuugcacugaa

SEQ ID NO: 2075039 - RNA, 19 nt, Homo sapiens
  misc_RNA (1)...(19): siRNA sense strand
ggaaaccgacccaggagau

SEQ ID NO: 2075040 - RNA, 19 nt, Homo sapiens
  misc_RNA (1)...(19): siRNA sense strand
agaaggaucgccucaaguu

SEQ ID NO: 2075041 - RNA, 19 nt, Homo sapiens
  misc_RNA (1)...(19): siRNA sense strand
ggaacuuucugcucuacag

SEQ ID NO: 2075042 - RNA, 19 nt, Homo sapiens
  misc_RNA (1)...(19): siRNA sense strand
aaagaaagagaaagucaga

SEQ ID NO: 2075043 - RNA, 19 nt, Homo sapiens
  misc_RNA (1)...(19): siRNA sense strand
ccaacaagcugaaguuacc

SEQ ID NO: 2075044 - RNA, 19 nt, Homo sapiens
  misc_RNA (1)...(19): siRNA sense strand
caacacugcucugcaaacu

SEQ ID NO: 2075045 - RNA, 19 nt, Homo sapiens
  misc_RNA (1)...(19): siRNA sense strand
gaaacauaaccaggaauug

SEQ ID NO: 2075046 - RNA, 19 nt, Homo sapiens
  misc_RNA (1)...(19): siRNA sense strand
caagaugguacaauucaga

SEQ ID NO: 2075047 - RNA, 19 nt, Homo sapiens
  misc_RNA (1)...(19): siRNA sense strand
gaacaaggcacgcauggua

SEQ ID NO: 2075048 - RNA, 19 nt, Homo sapiens
  misc_RNA (1)...(19): siRNA sense strand
gcgcuugacugccgaauuc

SEQ ID NO: 2075049 - RNA, 19 nt, Homo sapiens
  misc_RNA (1)...(19): siRNA sense strand
gcacgucgccuucggaaau

SEQ ID NO: 2075050 - RNA, 19 nt, Homo sapiens
  misc_RNA (1)...(19): siRNA sense strand
guacggaggucaucaucau

SEQ ID NO: 2075051 - RNA, 19 nt, Homo sapiens
  misc_RNA (1)...(19): siRNA sense strand
ggagaagcgggacguauuu

SEQ ID NO: 2075052 - RNA, 19 nt, Homo sapiens
  misc_RNA (1)...(19): siRNA sense strand
gaagcgggacguauuugaa

SEQ ID NO: 2075053 - RNA, 19 nt, Homo sapiens
  misc_RNA (1)...(19): siRNA sense strand
guauuugaauucccucuuc

SEQ ID NO: 2075054 - RNA, 19 nt, Homo sapiens
  misc_RNA (1)...(19): siRNA sense strand
ccaagaagacccggcagua

SEQ ID NO: 2075055 - RNA, 19 nt, Homo sapiens
  misc_RNA (1)...(19): siRNA sense strand
ugaauucccucuuccuaag

SEQ ID NO: 2075056 - RNA, 19 nt, Homo sapiens
  misc_RNA (1)...(19): siRNA sense strand
gggcugaggcagaaacuga

SEQ ID NO: 2075057 - RNA, 19 nt, Homo sapiens
  misc_RNA (1)...(19): siRNA sense strand
caagaagacccggcaguau

SEQ ID NO: 2075058 - RNA, 19 nt, Homo sapiens
  misc_RNA (1)...(19): siRNA sense strand
gggaggcgccuacgugaau

SEQ ID NO: 2075059 - RNA, 19 nt, Homo sapiens
  misc_RNA (1)...(19): siRNA sense strand
gcgagacccuugccacacu

SEQ ID NO: 2075060 - RNA, 19 nt, Homo sapiens
  misc_RNA (1)...(19): siRNA sense strand
ggacaccuuugcccugacu

SEQ ID NO: 2075061 - RNA, 19 nt, Homo sapiens
  misc_RNA (1)...(19): siRNA sense strand
gccacuccaugcagacuga

SEQ ID NO: 2075062 - RNA, 19 nt, Homo sapiens
  misc_RNA (1)...(19): siRNA sense strand
ggacaccccuggacaccuu

SEQ ID NO: 2075063 - RNA, 19 nt, Homo sapiens
  misc_RNA (1)...(19): siRNA sense strand
aaacacagcaccagaagcu

SEQ ID NO: 2075064 - RNA, 19 nt, Homo sapiens
  misc_RNA (1)...(19): siRNA sense strand
ggaggcgccuacgugaaug

SEQ ID NO: 2075065 - RNA, 19 nt, Homo sapiens
  misc_RNA (1)...(19): siRNA sense strand
gaggagggcgugggauguu

SEQ ID NO: 2075066 - RNA, 19 nt, Homo sapiens
  misc_RNA (1)...(19): siRNA sense strand
gagaagcgggacguauuug

SEQ ID NO: 2075067 - RNA, 19 nt, Homo sapiens
  misc_RNA (1)...(19): siRNA sense strand
aggagggcgugggauguua

SEQ ID NO: 2075068 - RNA, 19 nt, Homo sapiens
  misc_RNA (1)...(19): siRNA sense strand
gaggagaagcgggacguau

SEQ ID NO: 2075069 - RNA, 19 nt, Homo sapiens
  misc_RNA (1)...(19): siRNA sense strand
ccgaaacacagcaccagaa

SEQ ID NO: 2075070 - RNA, 19 nt, Homo sapiens
  misc_RNA (1)...(19): siRNA sense strand
ggcaguaucuccgcuaagc

SEQ ID NO: 2075071 - RNA, 19 nt, Homo sapiens
  misc_RNA (1)...(19): siRNA sense strand
aagaagacccggcaguauc

SEQ ID NO: 2075072 - RNA, 19 nt, Homo sapiens
  misc_RNA (1)...(19): siRNA sense strand
ggagggcgugggauguuau

SEQ ID NO: 2075073 - RNA, 19 nt, Homo sapiens
  misc_RNA (1)...(19): siRNA sense strand
gggcggagaaagugacuag

SEQ ID NO: 2075074 - RNA, 19 nt, Homo sapiens
  misc_RNA (1)...(19): siRNA sense strand
aggagaagcgggacguauu

SEQ ID NO: 2075075 - RNA, 19 nt, Homo sapiens
  misc_RNA (1)...(19): siRNA sense strand
cgaaacacagcaccagaag

SEQ ID NO: 2075076 - RNA, 19 nt, Homo sapiens
  misc_RNA (1)...(19): siRNA sense strand
gcgggacguauuugaauuc

SEQ ID NO: 2075077 - RNA, 19 nt, Homo sapiens
  misc_RNA (1)...(19): siRNA sense strand
uugaauucccucuuccuaa

SEQ ID NO: 2075078 - RNA, 19 nt, Homo sapiens
  misc_RNA (1)...(19): siRNA sense strand
agaagcgggacguauuuga

SEQ ID NO: 2075079 - RNA, 19 nt, Homo sapiens
  misc_RNA (1)...(19): siRNA sense strand
ggaggaagcuuuaaaguug

SEQ ID NO: 2075080 - RNA, 19 nt, Homo sapiens
  misc_RNA (1)...(19): siRNA sense strand
gaagagauauuccgagaaa

SEQ ID NO: 2075081 - RNA, 19 nt, Homo sapiens
  misc_RNA (1)...(19): siRNA sense strand
gaacaugacucccagauag

SEQ ID NO: 2075082 - RNA, 19 nt, Homo sapiens
  misc_RNA (1)...(19): siRNA sense strand
caagaaauguguagaagaa

SEQ ID NO: 2075083 - RNA, 19 nt, Homo sapiens
  misc_RNA (1)...(19): siRNA sense strand
gagggcagcucgaucuuua

SEQ ID NO: 2075084 - RNA, 19 nt, Homo sapiens
  misc_RNA (1)...(19): siRNA sense strand
gaagguagcugggaaauac

SEQ ID NO: 2075085 - RNA, 19 nt, Homo sapiens
  misc_RNA (1)...(19): siRNA sense strand
uacaugggcugguugauua

SEQ ID NO: 2075086 - RNA, 19 nt, Homo sapiens
  misc_RNA (1)...(19): siRNA sense strand
gagaauaucuaugucagaa

SEQ ID NO: 2075087 - RNA, 19 nt, Homo sapiens
  misc_RNA (1)...(19): siRNA sense strand
gcgauuagaucuucagaga

SEQ ID NO: 2075088 - RNA, 19 nt, Homo sapiens
  misc_RNA (1)...(19): siRNA sense strand
gcacacagccacagcagua

SEQ ID NO: 2075089 - RNA, 19 nt, Homo sapiens
  misc_RNA (1)...(19): siRNA sense strand
gaccagaccacuaucaaua

SEQ ID NO: 2075090 - RNA, 19 nt, Homo sapiens
  misc_RNA (1)...(19): siRNA sense strand
caauugaaccaucagauua

SEQ ID NO: 2075091 - RNA, 19 nt, Homo sapiens
  misc_RNA (1)...(19): siRNA sense strand
gaauaucuaugucagaagu

SEQ ID NO: 2075092 - RNA, 19 nt, Homo sapiens
  misc_RNA (1)...(19): siRNA sense strand
gcaacucucuuccaaucuu

SEQ ID NO: 2075093 - RNA, 19 nt, Homo sapiens
  misc_RNA (1)...(19): siRNA sense strand
gaacagcuacgacuagaau

SEQ ID NO: 2075094 - RNA, 19 nt, Homo sapiens
  misc_RNA (1)...(19): siRNA sense strand
agacggauguuuauuauca

SEQ ID NO: 2075095 - RNA, 19 nt, Homo sapiens
  misc_RNA (1)...(19): siRNA sense strand
cauaugcaguccauuauug

SEQ ID NO: 2075096 - RNA, 19 nt, Homo sapiens
  misc_RNA (1)...(19): siRNA sense strand
gaccuuacauugacauuca

SEQ ID NO: 2075097 - RNA, 19 nt, Homo sapiens
  misc_RNA (1)...(19): siRNA sense strand
gaagaugguucugcuuugu

SEQ ID NO: 2075098 - RNA, 19 nt, Homo sapiens
  misc_RNA (1)...(19): siRNA sense strand
gcaauugaaccaucagauu

SEQ ID NO: 2075099 - RNA, 19 nt, Homo sapiens
  misc_RNA (1)...(19): siRNA sense strand
gagaauaucagccuccuau

SEQ ID NO: 2075100 - RNA, 19 nt, Homo sapiens
  misc_RNA (1)...(19): siRNA sense strand
ucaccaaccuugccuccua

SEQ ID NO: 2075101 - RNA, 19 nt, Homo sapiens
  misc_RNA (1)...(19): siRNA sense strand
gcaaacugaauacaaguaa

SEQ ID NO: 2075102 - RNA, 19 nt, Homo sapiens
  misc_RNA (1)...(19): siRNA sense strand
ugaugaauguggagaguaa

SEQ ID NO: 2075103 - RNA, 19 nt, Homo sapiens
  misc_RNA (1)...(19): siRNA sense strand
gcuagaaucuguuccuaag

SEQ ID NO: 2075104 - RNA, 19 nt, Homo sapiens
  misc_RNA (1)...(19): siRNA sense strand
ccaaauggaucagccuuga

SEQ ID NO: 2075105 - RNA, 19 nt, Homo sapiens
  misc_RNA (1)...(19): siRNA sense strand
gaauacaaguaaacaagca

SEQ ID NO: 2075106 - RNA, 19 nt, Homo sapiens
  misc_RNA (1)...(19): siRNA sense strand
ggaaauacaaaggaaauga

SEQ ID NO: 2075107 - RNA, 19 nt, Homo sapiens
  misc_RNA (1)...(19): siRNA sense strand
guaccagaauccagagaaa

SEQ ID NO: 2075108 - RNA, 19 nt, Homo sapiens
  misc_RNA (1)...(19): siRNA sense strand
ugcaagaugugccugaaua

SEQ ID NO: 2075109 - RNA, 19 nt, Homo sapiens
  misc_RNA (1)...(19): siRNA sense strand
gagaacagcuacgacuaga

SEQ ID NO: 2075110 - RNA, 19 nt, Homo sapiens
  misc_RNA (1)...(19): siRNA sense strand
ggaaaugauuauagccaau

SEQ ID NO: 2075111 - RNA, 19 nt, Homo sapiens
  misc_RNA (1)...(19): siRNA sense strand
caaaggaaaugauuauagc

SEQ ID NO: 2075112 - RNA, 19 nt, Homo sapiens
  misc_RNA (1)...(19): siRNA sense strand
accaacagaucgagaguua

SEQ ID NO: 2075113 - RNA, 19 nt, Homo sapiens
  misc_RNA (1)...(19): siRNA sense strand
agagaaagauaccaacaga

SEQ ID NO: 2075114 - RNA, 19 nt, Homo sapiens
  misc_RNA (1)...(19): siRNA sense strand
cagcaacucucuuccaauc

SEQ ID NO: 2075115 - RNA, 19 nt, Homo sapiens
  misc_RNA (1)...(19): siRNA sense strand
ucccagagaucaggaguua

SEQ ID NO: 2075116 - RNA, 19 nt, Homo sapiens
  misc_RNA (1)...(19): siRNA sense strand
gaauaucagccuccuauca

SEQ ID NO: 2075117 - RNA, 19 nt, Homo sapiens
  misc_RNA (1)...(19): siRNA sense strand
ccaagaacguguuguaaac

SEQ ID NO: 2075118 - RNA, 19 nt, Homo sapiens
  misc_RNA (1)...(19): siRNA sense strand
ucagagaaccuccuuauag

SEQ ID NO: 2075119 - RNA, 19 nt, Homo sapiens
  misc_RNA (1)...(19): siRNA sense strand
ggaaauaauggcccagcua

SEQ ID NO: 2075120 - RNA, 19 nt, Homo sapiens
  misc_RNA (1)...(19): siRNA sense strand
caaauggaauuguaucaac

SEQ ID NO: 2075121 - RNA, 19 nt, Homo sapiens
  misc_RNA (1)...(19): siRNA sense strand
ggaaagaaagguuaucucu

SEQ ID NO: 2075122 - RNA, 19 nt, Homo sapiens
  misc_RNA (1)...(19): siRNA sense strand
ugaugcagcugaaagaaga

SEQ ID NO: 2075123 - RNA, 19 nt, Homo sapiens
  misc_RNA (1)...(19): siRNA sense strand
agaaagcccuauacccauu

SEQ ID NO: 2075124 - RNA, 19 nt, Homo sapiens
  misc_RNA (1)...(19): siRNA sense strand
gcaagaugugccugaauaa

SEQ ID NO: 2075125 - RNA, 19 nt, Homo sapiens
  misc_RNA (1)...(19): siRNA sense strand
gcagcagccuauuacuuug

SEQ ID NO: 2075126 - RNA, 19 nt, Homo sapiens
  misc_RNA (1)...(19): siRNA sense strand
gaccagcgauuagaucuuc

SEQ ID NO: 2075127 - RNA, 19 nt, Homo sapiens
  misc_RNA (1)...(19): siRNA sense strand
guuguaaacucucaguaug

SEQ ID NO: 2075128 - RNA, 19 nt, Homo sapiens
  misc_RNA (1)...(19): siRNA sense strand
gcugaaagaagaauuuaga

SEQ ID NO: 2075129 - RNA, 19 nt, Homo sapiens
  misc_RNA (1)...(19): siRNA sense strand
aaagcaaacugaauacaag

SEQ ID NO: 2075130 - RNA, 19 nt, Homo sapiens
  misc_RNA (1)...(19): siRNA sense strand
ggaugaagacuugaaggua

SEQ ID NO: 2075131 - RNA, 19 nt, Homo sapiens
  misc_RNA (1)...(19): siRNA sense strand
acagacggauguuuauuau

SEQ ID NO: 2075132 - RNA, 19 nt, Homo sapiens
  misc_RNA (1)...(19): siRNA sense strand
cagcuauccuuccagauga

SEQ ID NO: 2075133 - RNA, 19 nt, Homo sapiens
  misc_RNA (1)...(19): siRNA sense strand
gaagaagaaggcaggauuc

SEQ ID NO: 2075134 - RNA, 19 nt, Homo sapiens
  misc_RNA (1)...(19): siRNA sense strand
gcugaggaccuuacauuga

SEQ ID NO: 2075135 - RNA, 19 nt, Homo sapiens
  misc_RNA (1)...(19): siRNA sense strand
gaaguggccagucauggaa

SEQ ID NO: 2075136 - RNA, 19 nt, Homo sapiens
  misc_RNA (1)...(19): siRNA sense strand
ccacagcaguacccaccua

SEQ ID NO: 2075137 - RNA, 19 nt, Homo sapiens
  misc_RNA (1)...(19): siRNA sense strand
gcagcuauccuuccagaug

SEQ ID NO: 2075138 - RNA, 19 nt, Homo sapiens
  misc_RNA (1)...(19): siRNA sense strand
caacucucuuccaaucuuu

SEQ ID NO: 2075139 - RNA, 19 nt, Homo sapiens
  misc_RNA (1)...(19): siRNA sense strand
gcaccagaauccucagcaa

SEQ ID NO: 2075140 - RNA, 19 nt, Homo sapiens
  misc_RNA (1)...(19): siRNA sense strand
cacaaagcauuaugaggaa

SEQ ID NO: 2075141 - RNA, 19 nt, Homo sapiens
  misc_RNA (1)...(19): siRNA sense strand
gaacacgggaacugaguau

SEQ ID NO: 2075142 - RNA, 19 nt, Homo sapiens
  misc_RNA (1)...(19): siRNA sense strand
caagugagcaguugagcuu

SEQ ID NO: 2075143 - RNA, 19 nt, Homo sapiens
  misc_RNA (1)...(19): siRNA sense strand
ucaguuauauccagcacaa

SEQ ID NO: 2075144 - RNA, 19 nt, Homo sapiens
  misc_RNA (1)...(19): siRNA sense strand
gaauuuagaaccuaugaag

SEQ ID NO: 2075145 - RNA, 19 nt, Homo sapiens
  misc_RNA (1)...(19): siRNA sense strand
uauagagccuccuguuuca

SEQ ID NO: 2075146 - RNA, 19 nt, Homo sapiens
  misc_RNA (1)...(19): siRNA sense strand
guagaagaauuagcauugu

SEQ ID NO: 2075147 - RNA, 19 nt, Homo sapiens
  misc_RNA (1)...(19): siRNA sense strand
gcagcugaaagaagaauuu

SEQ ID NO: 2075148 - RNA, 19 nt, Homo sapiens
  misc_RNA (1)...(19): siRNA sense strand
gcagaaaccagugaugaug

SEQ ID NO: 2075149 - RNA, 19 nt, Homo sapiens
  misc_RNA (1)...(19): siRNA sense strand
guacaugggcugguugauu

SEQ ID NO: 2075150 - RNA, 19 nt, Homo sapiens
  misc_RNA (1)...(19): siRNA sense strand
ucucauaugcaguccauua

SEQ ID NO: 2075151 - RNA, 19 nt, Homo sapiens
  misc_RNA (1)...(19): siRNA sense strand
gagcagcagccuauuacuu

SEQ ID NO: 2075152 - RNA, 19 nt, Homo sapiens
  misc_RNA (1)...(19): siRNA sense strand
ggacaaccagaaccacaaa

SEQ ID NO: 2075153 - RNA, 19 nt, Homo sapiens
  misc_RNA (1)...(19): siRNA sense strand
ggagagaauaucuauguca

SEQ ID NO: 2075154 - RNA, 19 nt, Homo sapiens
  misc_RNA (1)...(19): siRNA sense strand
gcugggaaauacaaaggaa

SEQ ID NO: 2075155 - RNA, 19 nt, Homo sapiens
  misc_RNA (1)...(19): siRNA sense strand
gaacuacaucgccgacgaa

SEQ ID NO: 2075156 - RNA, 19 nt, Homo sapiens
  misc_RNA (1)...(19): siRNA sense strand
uguacaagcuccacaaugg

SEQ ID NO: 2075157 - RNA, 19 nt, Homo sapiens
  misc_RNA (1)...(19): siRNA sense strand
aauaaugacucccagagau

SEQ ID NO: 2075158 - RNA, 19 nt, Homo sapiens
  misc_RNA (1)...(19): siRNA sense strand
gaagagaacacgggaacug

SEQ ID NO: 2075159 - RNA, 19 nt, Homo sapiens
  misc_RNA (1)...(19): siRNA sense strand
gagagaacagcuacgacua

SEQ ID NO: 2075160 - RNA, 19 nt, Homo sapiens
  misc_RNA (1)...(19): siRNA sense strand
ucagggagcuccuacaaaa

SEQ ID NO: 2075161 - RNA, 19 nt, Homo sapiens
  misc_RNA (1)...(19): siRNA sense strand
cagcaggguauguauuaua

SEQ ID NO: 2075162 - RNA, 19 nt, Homo sapiens
  misc_RNA (1)...(19): siRNA sense strand
cauacugucugcaagaugu

SEQ ID NO: 2075163 - RNA, 19 nt, Homo sapiens
  misc_RNA (1)...(19): siRNA sense strand
gaagacacaaagcauuaug

SEQ ID NO: 2075164 - RNA, 19 nt, Homo sapiens
  misc_RNA (1)...(19): siRNA sense strand
caauuugcacucagacuuu

SEQ ID NO: 2075165 - RNA, 19 nt, Homo sapiens
  misc_RNA (1)...(19): siRNA sense strand
aaacuugaaccgacuaaga

SEQ ID NO: 2075166 - RNA, 19 nt, Homo sapiens
  misc_RNA (1)...(19): siRNA sense strand
ccuauuacuuuguguagug

SEQ ID NO: 2075167 - RNA, 19 nt, Homo sapiens
  misc_RNA (1)...(19): siRNA sense strand
ugucagaaguggccaguca

SEQ ID NO: 2075168 - RNA, 19 nt, Homo sapiens
  misc_RNA (1)...(19): siRNA sense strand
ggacagaccccagcuauga

SEQ ID NO: 2075169 - RNA, 19 nt, Homo sapiens
  misc_RNA (1)...(19): siRNA sense strand
auacaugugucgagauaug

SEQ ID NO: 2075170 - RNA, 19 nt, Homo sapiens
  misc_RNA (1)...(19): siRNA sense strand
gggaacagcuggaaaaugg

SEQ ID NO: 2075171 - RNA, 19 nt, Homo sapiens
  misc_RNA (1)...(19): siRNA sense strand
gagccacgguuuccucaag

SEQ ID NO: 2075172 - RNA, 19 nt, Homo sapiens
  misc_RNA (1)...(19): siRNA sense strand
uuacacaagagaagagaua

SEQ ID NO: 2075173 - RNA, 19 nt, Homo sapiens
  misc_RNA (1)...(19): siRNA sense strand
uccaaugccuguuaccaaa

SEQ ID NO: 2075174 - RNA, 19 nt, Homo sapiens
  misc_RNA (1)...(19): siRNA sense strand
cagagaaccuccuuauagc

SEQ ID NO: 2075175 - RNA, 19 nt, Homo sapiens
  misc_RNA (1)...(19): siRNA sense strand
ucagggugcugguccaaug

SEQ ID NO: 2075176 - RNA, 19 nt, Homo sapiens
  misc_RNA (1)...(19): siRNA sense strand
ccaacagugucucgguuug

SEQ ID NO: 2075177 - RNA, 19 nt, Homo sapiens
  misc_RNA (1)...(19): siRNA sense strand
guguggaaaugaugaaugu

SEQ ID NO: 2075178 - RNA, 19 nt, Homo sapiens
  misc_RNA (1)...(19): siRNA sense strand
gcagggaguguggaaauga

SEQ ID NO: 2075179 - RNA, 19 nt, Homo sapiens
  misc_RNA (1)...(19): siRNA sense strand
caacugagguggacuacua

SEQ ID NO: 2075180 - RNA, 19 nt, Homo sapiens
  misc_RNA (1)...(19): siRNA sense strand
caagaaagcugacaccaau

SEQ ID NO: 2075181 - RNA, 19 nt, Homo sapiens
  misc_RNA (1)...(19): siRNA sense strand
gcuaugagauucuugguuu

SEQ ID NO: 2075182 - RNA, 19 nt, Homo sapiens
  misc_RNA (1)...(19): siRNA sense strand
ggacggagguggcuggauu

SEQ ID NO: 2075183 - RNA, 19 nt, Homo sapiens
  misc_RNA (1)...(19): siRNA sense strand
ugaagaagcuggaggaaga

SEQ ID NO: 2075184 - RNA, 19 nt, Homo sapiens
  misc_RNA (1)...(19): siRNA sense strand
cagcaaaccuggugacuga

SEQ ID NO: 2075185 - RNA, 19 nt, Homo sapiens
  misc_RNA (1)...(19): siRNA sense strand
gaacagaacaucaucuuca

SEQ ID NO: 2075186 - RNA, 19 nt, Homo sapiens
  misc_RNA (1)...(19): siRNA sense strand
cacaauggauggaaguuua

SEQ ID NO: 2075187 - RNA, 19 nt, Homo sapiens
  misc_RNA (1)...(19): siRNA sense strand
gcagucagguucagcagaa

SEQ ID NO: 2075188 - RNA, 19 nt, Homo sapiens
  misc_RNA (1)...(19): siRNA sense strand
ggagguggcuggauugucu

SEQ ID NO: 2075189 - RNA, 19 nt, Homo sapiens
  misc_RNA (1)...(19): siRNA sense strand
caugguggcuggugguaua

SEQ ID NO: 2075190 - RNA, 19 nt, Homo sapiens
  misc_RNA (1)...(19): siRNA sense strand
ccaaugcccucacagaaau

SEQ ID NO: 2075191 - RNA, 19 nt, Homo sapiens
  misc_RNA (1)...(19): siRNA sense strand
gcaagaaggcugacaccaa

SEQ ID NO: 2075192 - RNA, 19 nt, Homo sapiens
  misc_RNA (1)...(19): siRNA sense strand
gcaagaaggcugacaccaa

SEQ ID NO: 2075193 - RNA, 19 nt, Homo sapiens
  misc_RNA (1)...(19): siRNA sense strand
gcaagaaggcugacaccaa

SEQ ID NO: 2075194 - RNA, 19 nt, Homo sapiens
  misc_RNA (1)...(19): siRNA sense strand
gcaagaaggcugacaccaa

SEQ ID NO: 2075195 - RNA, 19 nt, Homo sapiens
  misc_RNA (1)...(19): siRNA sense strand
gaggaaggcugcgaacguu

SEQ ID NO: 2075196 - RNA, 19 nt, Homo sapiens
  misc_RNA (1)...(19): siRNA sense strand
gcacagcuaugagauucuu

SEQ ID NO: 2075197 - RNA, 19 nt, Homo sapiens
  misc_RNA (1)...(19): siRNA sense strand
gcagucugguggcauauug

SEQ ID NO: 2075198 - RNA, 19 nt, Homo sapiens
  misc_RNA (1)...(19): siRNA sense strand
gcaagaaggccgacaccaa

SEQ ID NO: 2075199 - RNA, 19 nt, Homo sapiens
  misc_RNA (1)...(19): siRNA sense strand
gaacugggagccuuggaaa

SEQ ID NO: 2075200 - RNA, 19 nt, Homo sapiens
  misc_RNA (1)...(19): siRNA sense strand
gcaagccgauccuccugaa

SEQ ID NO: 2075201 - RNA, 19 nt, Homo sapiens
  misc_RNA (1)...(19): siRNA sense strand
gaagagaugguggagauga

SEQ ID NO: 2075202 - RNA, 19 nt, Homo sapiens
  misc_RNA (1)...(19): siRNA sense strand
gaacucgacccucccagaa

SEQ ID NO: 2075203 - RNA, 19 nt, Homo sapiens
  misc_RNA (1)...(19): siRNA sense strand
gaaauugacagcccagcaa

SEQ ID NO: 2075204 - RNA, 19 nt, Homo sapiens
  misc_RNA (1)...(19): siRNA sense strand
gcaagaaagcugacaccaa

SEQ ID NO: 2075205 - RNA, 19 nt, Homo sapiens
  misc_RNA (1)...(19): siRNA sense strand
ccaaggagcagcacagcua

SEQ ID NO: 2075206 - RNA, 19 nt, Homo sapiens
  misc_RNA (1)...(19): siRNA sense strand
ggagguagcugaggucacu

SEQ ID NO: 2075207 - RNA, 19 nt, Homo sapiens
  misc_RNA (1)...(19): siRNA sense strand
gagaguggauuuacagacu

SEQ ID NO: 2075208 - RNA, 19 nt, Homo sapiens
  misc_RNA (1)...(19): siRNA sense strand
ggaaccaaguacauaguca

SEQ ID NO: 2075209 - RNA, 19 nt, Homo sapiens
  misc_RNA (1)...(19): siRNA sense strand
gaaucugccuaugcuauau

SEQ ID NO: 2075210 - RNA, 19 nt, Homo sapiens
  misc_RNA (1)...(19): siRNA sense strand
cagagaauauggccacugu

SEQ ID NO: 2075211 - RNA, 19 nt, Homo sapiens
  misc_RNA (1)...(19): siRNA sense strand
gcagcuggauuucuucaag

SEQ ID NO: 2075212 - RNA, 19 nt, Homo sapiens
  misc_RNA (1)...(19): siRNA sense strand
gcaaggagcgguauaagcu

SEQ ID NO: 2075213 - RNA, 19 nt, Homo sapiens
  misc_RNA (1)...(19): siRNA sense strand
gagcagcacagcuaugaga

SEQ ID NO: 2075214 - RNA, 19 nt, Homo sapiens
  misc_RNA (1)...(19): siRNA sense strand
gaaauugacaguccaacca

SEQ ID NO: 2075215 - RNA, 19 nt, Homo sapiens
  misc_RNA (1)...(19): siRNA sense strand
cagcacagcuaugagauuc

SEQ ID NO: 2075216 - RNA, 19 nt, Homo sapiens
  misc_RNA (1)...(19): siRNA sense strand
acagguauguggugcacua

SEQ ID NO: 2075217 - RNA, 19 nt, Homo sapiens
  misc_RNA (1)...(19): siRNA sense strand
gggaugcucuuacuuacca

SEQ ID NO: 2075218 - RNA, 19 nt, Homo sapiens
  misc_RNA (1)...(19): siRNA sense strand
gagaauaccgccaccaucu

SEQ ID NO: 2075219 - RNA, 19 nt, Homo sapiens
  misc_RNA (1)...(19): siRNA sense strand
gggccaccauugacaggua

SEQ ID NO: 2075220 - RNA, 19 nt, Homo sapiens
  misc_RNA (1)...(19): siRNA sense strand
gcucuuacuuaccacaaug

SEQ ID NO: 2075221 - RNA, 19 nt, Homo sapiens
  misc_RNA (1)...(19): siRNA sense strand
gccugcagcugcucaagaa

SEQ ID NO: 2075222 - RNA, 19 nt, Homo sapiens
  misc_RNA (1)...(19): siRNA sense strand
gguguacugugacauggaa

SEQ ID NO: 2075223 - RNA, 19 nt, Homo sapiens
  misc_RNA (1)...(19): siRNA sense strand
ccagccagguggaucacua

SEQ ID NO: 2075224 - RNA, 19 nt, Homo sapiens
  misc_RNA (1)...(19): siRNA sense strand
ugacagagacaaugauauc

SEQ ID NO: 2075225 - RNA, 19 nt, Homo sapiens
  misc_RNA (1)...(19): siRNA sense strand
acacugggcagcuggauuu

SEQ ID NO: 2075226 - RNA, 19 nt, Homo sapiens
  misc_RNA (1)...(19): siRNA sense strand
gaccaggcauggaguacau

SEQ ID NO: 2075227 - RNA, 19 nt, Homo sapiens
  misc_RNA (1)...(19): siRNA sense strand
ugacugaccgggugacuga

SEQ ID NO: 2075228 - RNA, 19 nt, Homo sapiens
  misc_RNA (1)...(19): siRNA sense strand
gggagucacugaucuaagc

SEQ ID NO: 2075229 - RNA, 19 nt, Homo sapiens
  misc_RNA (1)...(19): siRNA sense strand
ggaaaggacaugaauucuc

SEQ ID NO: 2075230 - RNA, 19 nt, Homo sapiens
  misc_RNA (1)...(19): siRNA sense strand
ugaaucugccuaugcuaua

SEQ ID NO: 2075231 - RNA, 19 nt, Homo sapiens
  misc_RNA (1)...(19): siRNA sense strand
caaugaaucugccuaugcu

SEQ ID NO: 2075232 - RNA, 19 nt, Homo sapiens
  misc_RNA (1)...(19): siRNA sense strand
acggcuacauucugacuua

SEQ ID NO: 2075233 - RNA, 19 nt, Homo sapiens
  misc_RNA (1)...(19): siRNA sense strand
ggaaauggcagugcacaag

SEQ ID NO: 2075234 - RNA, 19 nt, Homo sapiens
  misc_RNA (1)...(19): siRNA sense strand
gcgcuacacuucugcugau

SEQ ID NO: 2075235 - RNA, 19 nt, Homo sapiens
  misc_RNA (1)...(19): siRNA sense strand
ggccacggcuucugugaca

SEQ ID NO: 2075236 - RNA, 19 nt, Homo sapiens
  misc_RNA (1)...(19): siRNA sense strand
ugacagaugagacugagaa

SEQ ID NO: 2075237 - RNA, 19 nt, Homo sapiens
  misc_RNA (1)...(19): siRNA sense strand
aggaagagaugguggagau

SEQ ID NO: 2075238 - RNA, 19 nt, Homo sapiens
  misc_RNA (1)...(19): siRNA sense strand
cggagaauauggccacugu

SEQ ID NO: 2075239 - RNA, 19 nt, Homo sapiens
  misc_RNA (1)...(19): siRNA sense strand
gagccgauaugacaucacu

SEQ ID NO: 2075240 - RNA, 19 nt, Homo sapiens
  misc_RNA (1)...(19): siRNA sense strand
ggagaugaaggaacagugu

SEQ ID NO: 2075241 - RNA, 19 nt, Homo sapiens
  misc_RNA (1)...(19): siRNA sense strand
guauaagaacugccacuug

SEQ ID NO: 2075242 - RNA, 19 nt, Homo sapiens
  misc_RNA (1)...(19): siRNA sense strand
gcagguguacugugacaug

SEQ ID NO: 2075243 - RNA, 19 nt, Homo sapiens
  misc_RNA (1)...(19): siRNA sense strand
gagaugaaggaacagugua

SEQ ID NO: 2075244 - RNA, 19 nt, Homo sapiens
  misc_RNA (1)...(19): siRNA sense strand
ucaagaacacggaggauuc

SEQ ID NO: 2075245 - RNA, 19 nt, Homo sapiens
  misc_RNA (1)...(19): siRNA sense strand
cagcaacugugcccugaca

SEQ ID NO: 2075246 - RNA, 19 nt, Homo sapiens
  misc_RNA (1)...(19): siRNA sense strand
gagaauauggccacugucu

SEQ ID NO: 2075247 - RNA, 19 nt, Homo sapiens
  misc_RNA (1)...(19): siRNA sense strand
gagaauauggccacugucu

SEQ ID NO: 2075248 - RNA, 19 nt, Homo sapiens
  misc_RNA (1)...(19): siRNA sense strand
gaagcuggaggaagagaug

SEQ ID NO: 2075249 - RNA, 19 nt, Homo sapiens
  misc_RNA (1)...(19): siRNA sense strand
guacaggccaccauugaca

SEQ ID NO: 2075250 - RNA, 19 nt, Homo sapiens
  misc_RNA (1)...(19): siRNA sense strand
ugcguaacgucaagaauga

SEQ ID NO: 2075251 - RNA, 19 nt, Homo sapiens
  misc_RNA (1)...(19): siRNA sense strand
gcagcacagcuaugagauu

SEQ ID NO: 2075252 - RNA, 19 nt, Homo sapiens
  misc_RNA (1)...(19): siRNA sense strand
gaauggcaggacagaaauu

SEQ ID NO: 2075253 - RNA, 19 nt, Homo sapiens
  misc_RNA (1)...(19): siRNA sense strand
gggaaaaccccucaacuga

SEQ ID NO: 2075254 - RNA, 19 nt, Homo sapiens
  misc_RNA (1)...(19): siRNA sense strand
caacccuaauggcagauau

SEQ ID NO: 2075255 - RNA, 19 nt, Homo sapiens
  misc_RNA (1)...(19): siRNA sense strand
ccaccacccucuccacagu

SEQ ID NO: 2075256 - RNA, 19 nt, Homo sapiens
  misc_RNA (1)...(19): siRNA sense strand
guucccagauggcacaguu

SEQ ID NO: 2075257 - RNA, 19 nt, Homo sapiens
  misc_RNA (1)...(19): siRNA sense strand
gagcagcacaguccugaca

SEQ ID NO: 2075258 - RNA, 19 nt, Homo sapiens
  misc_RNA (1)...(19): siRNA sense strand
ugacugaccgggugacaga

SEQ ID NO: 2075259 - RNA, 19 nt, Homo sapiens
  misc_RNA (1)...(19): siRNA sense strand
acagaaggacugcgaguug

SEQ ID NO: 2075260 - RNA, 19 nt, Homo sapiens
  misc_RNA (1)...(19): siRNA sense strand
gaccggguauggaguacau

SEQ ID NO: 2075261 - RNA, 19 nt, Homo sapiens
  misc_RNA (1)...(19): siRNA sense strand
cccaagagccgauaugaca

SEQ ID NO: 2075262 - RNA, 19 nt, Homo sapiens
  misc_RNA (1)...(19): siRNA sense strand
gguggcuggugguauaaga

SEQ ID NO: 2075263 - RNA, 19 nt, Homo sapiens
  misc_RNA (1)...(19): siRNA sense strand
ucagauccacggcuacauu

SEQ ID NO: 2075264 - RNA, 19 nt, Homo sapiens
  misc_RNA (1)...(19): siRNA sense strand
ugacaccaaugcccucaca

SEQ ID NO: 2075265 - RNA, 19 nt, Homo sapiens
  misc_RNA (1)...(19): siRNA sense strand
uaacgucaagaaugaaguu

SEQ ID NO: 2075266 - RNA, 19 nt, Homo sapiens
  misc_RNA (1)...(19): siRNA sense strand
ccacaauggauggaaguuu

SEQ ID NO: 2075267 - RNA, 19 nt, Homo sapiens
  misc_RNA (1)...(19): siRNA sense strand
gcugacaguugggaaauac

SEQ ID NO: 2075268 - RNA, 19 nt, Homo sapiens
  misc_RNA (1)...(19): siRNA sense strand
ggaacagaacaucaucuuc

SEQ ID NO: 2075269 - RNA, 19 nt, Homo sapiens
  misc_RNA (1)...(19): siRNA sense strand
ccaagagaccagagagguu

SEQ ID NO: 2075270 - RNA, 19 nt, Homo sapiens
  misc_RNA (1)...(19): siRNA sense strand
gggacugaguauaagauca

SEQ ID NO: 2075271 - RNA, 19 nt, Homo sapiens
  misc_RNA (1)...(19): siRNA sense strand
agacugagaacucccuuga

SEQ ID NO: 2075272 - RNA, 19 nt, Homo sapiens
  misc_RNA (1)...(19): siRNA sense strand
cacaacauccgccuucaga

SEQ ID NO: 2075273 - RNA, 19 nt, Homo sapiens
  misc_RNA (1)...(19): siRNA sense strand
uacccugucucccuuguug

SEQ ID NO: 2075274 - RNA, 19 nt, Homo sapiens
  misc_RNA (1)...(19): siRNA sense strand
aaauggcagugcacaagga

SEQ ID NO: 2075275 - RNA, 19 nt, Homo sapiens
  misc_RNA (1)...(19): siRNA sense strand
ucgagugacugaagacaca

SEQ ID NO: 2075276 - RNA, 19 nt, Homo sapiens
  misc_RNA (1)...(19): siRNA sense strand
cugaauggcaggacagaaa

SEQ ID NO: 2075277 - RNA, 19 nt, Homo sapiens
  misc_RNA (1)...(19): siRNA sense strand
gcacuccagcgcgguauga

SEQ ID NO: 2075278 - RNA, 19 nt, Homo sapiens
  misc_RNA (1)...(19): siRNA sense strand
ccacuuggccaacccuaau

SEQ ID NO: 2075279 - RNA, 19 nt, Homo sapiens
  misc_RNA (1)...(19): siRNA sense strand
caacuuugcucgugguuua

SEQ ID NO: 2075280 - RNA, 19 nt, Homo sapiens
  misc_RNA (1)...(19): siRNA sense strand
gagaggagcugaugacuuc

SEQ ID NO: 2075281 - RNA, 19 nt, Homo sapiens
  misc_RNA (1)...(19): siRNA sense strand
ugucaaggcucaagaaaua

SEQ ID NO: 2075282 - RNA, 19 nt, Homo sapiens
  misc_RNA (1)...(19): siRNA sense strand
gaaagcggaucaacaacaa

SEQ ID NO: 2075283 - RNA, 19 nt, Homo sapiens
  misc_RNA (1)...(19): siRNA sense strand
ccaaggagcuggagugcaa

SEQ ID NO: 2075284 - RNA, 19 nt, Homo sapiens
  misc_RNA (1)...(19): siRNA sense strand
gagaauggcacuuugcuuu

SEQ ID NO: 2075285 - RNA, 19 nt, Homo sapiens
  misc_RNA (1)...(19): siRNA sense strand
gggugcagauuguagauua

SEQ ID NO: 2075286 - RNA, 19 nt, Homo sapiens
  misc_RNA (1)...(19): siRNA sense strand
gccauggccuuacacaaua

SEQ ID NO: 2075287 - RNA, 19 nt, Homo sapiens
  misc_RNA (1)...(19): siRNA sense strand
ccaaugagauucacuacau

SEQ ID NO: 2075288 - RNA, 19 nt, Homo sapiens
  misc_RNA (1)...(19): siRNA sense strand
gggaaugccucugcuauga

SEQ ID NO: 2075289 - RNA, 19 nt, Homo sapiens
  misc_RNA (1)...(19): siRNA sense strand
acacggagcugcccuacuu

SEQ ID NO: 2075290 - RNA, 19 nt, Homo sapiens
  misc_RNA (1)...(19): siRNA sense strand
caggaaagcuggucucauc

SEQ ID NO: 2075291 - RNA, 19 nt, Homo sapiens
  misc_RNA (1)...(19): siRNA sense strand
gaucuacaaucucuucaau

SEQ ID NO: 2075292 - RNA, 19 nt, Homo sapiens
  misc_RNA (1)...(19): siRNA sense strand
gaucaaacccuacggacuu

SEQ ID NO: 2075293 - RNA, 19 nt, Homo sapiens
  misc_RNA (1)...(19): siRNA sense strand
gggagauguucuuugguua

SEQ ID NO: 2075294 - RNA, 19 nt, Homo sapiens
  misc_RNA (1)...(19): siRNA sense strand
gaauucaccuggcgaugug

SEQ ID NO: 2075295 - RNA, 19 nt, Homo sapiens
  misc_RNA (1)...(19): siRNA sense strand
gagauucacuacauuccuu

SEQ ID NO: 2075296 - RNA, 19 nt, Homo sapiens
  misc_RNA (1)...(19): siRNA sense strand
ugaguuaggucccaggaaa

SEQ ID NO: 2075297 - RNA, 19 nt, Homo sapiens
  misc_RNA (1)...(19): siRNA sense strand
caccaucucucugaucaua

SEQ ID NO: 2075298 - RNA, 19 nt, Homo sapiens
  misc_RNA (1)...(19): siRNA sense strand
ugaaggauccaguacauaa

SEQ ID NO: 2075299 - RNA, 19 nt, Homo sapiens
  misc_RNA (1)...(19): siRNA sense strand
aaaggaacauucaggcaaa

SEQ ID NO: 2075300 - RNA, 19 nt, Homo sapiens
  misc_RNA (1)...(19): siRNA sense strand
cagaauacaucaccagcuu

SEQ ID NO: 2075301 - RNA, 19 nt, Homo sapiens
  misc_RNA (1)...(19): siRNA sense strand
gaaagcuggucucauccuu

SEQ ID NO: 2075302 - RNA, 19 nt, Homo sapiens
  misc_RNA (1)...(19): siRNA sense strand
ggacaggugcugaaaggaa

SEQ ID NO: 2075303 - RNA, 19 nt, Homo sapiens
  misc_RNA (1)...(19): siRNA sense strand
ugacugggauggugaacuu

SEQ ID NO: 2075304 - RNA, 19 nt, Homo sapiens
  misc_RNA (1)...(19): siRNA sense strand
gccaagcugucacugauga

SEQ ID NO: 2075305 - RNA, 19 nt, Homo sapiens
  misc_RNA (1)...(19): siRNA sense strand
guaagaauuuccgcuguau

SEQ ID NO: 2075306 - RNA, 19 nt, Homo sapiens
  misc_RNA (1)...(19): siRNA sense strand
gcugaacccugcccaagug

SEQ ID NO: 2075307 - RNA, 19 nt, Homo sapiens
  misc_RNA (1)...(19): siRNA sense strand
caucaucucuggagcaaag

SEQ ID NO: 2075308 - RNA, 19 nt, Homo sapiens
  misc_RNA (1)...(19): siRNA sense strand
acacagaggauaucccuuu

SEQ ID NO: 2075309 - RNA, 19 nt, Homo sapiens
  misc_RNA (1)...(19): siRNA sense strand
agaaauagcagacaagauc

SEQ ID NO: 2075310 - RNA, 19 nt, Homo sapiens
  misc_RNA (1)...(19): siRNA sense strand
gaucauacgaugccuggaa

SEQ ID NO: 2075311 - RNA, 19 nt, Homo sapiens
  misc_RNA (1)...(19): siRNA sense strand
aaacagugcugagcuuugu

SEQ ID NO: 2075312 - RNA, 19 nt, Homo sapiens
  misc_RNA (1)...(19): siRNA sense strand
gaaugccucugcuaugaag

SEQ ID NO: 2075313 - RNA, 19 nt, Homo sapiens
  misc_RNA (1)...(19): siRNA sense strand
gcagcccucugauaaaaua

SEQ ID NO: 2075314 - RNA, 19 nt, Homo sapiens
  misc_RNA (1)...(19): siRNA sense strand
gaaacagugcugagcuuug

SEQ ID NO: 2075315 - RNA, 19 nt, Homo sapiens
  misc_RNA (1)...(19): siRNA sense strand
ugucacugaugaacaagua

SEQ ID NO: 2075316 - RNA, 19 nt, Homo sapiens
  misc_RNA (1)...(19): siRNA sense strand
aagaauuuccgcuguauuu

SEQ ID NO: 2075317 - RNA, 19 nt, Homo sapiens
  misc_RNA (1)...(19): siRNA sense strand
gagcagcccucugauaaaa

SEQ ID NO: 2075318 - RNA, 19 nt, Homo sapiens
  misc_RNA (1)...(19): siRNA sense strand
cauaagcaccuuugcauuc

SEQ ID NO: 2075319 - RNA, 19 nt, Homo sapiens
  misc_RNA (1)...(19): siRNA sense strand
agagaaagcggaucaacaa

SEQ ID NO: 2075320 - RNA, 19 nt, Homo sapiens
  misc_RNA (1)...(19): siRNA sense strand
ccuggaaccugacaccauu

SEQ ID NO: 2075321 - RNA, 19 nt, Homo sapiens
  misc_RNA (1)...(19): siRNA sense strand
ucacauucaucaccaagau

SEQ ID NO: 2075322 - RNA, 19 nt, Homo sapiens
  misc_RNA (1)...(19): siRNA sense strand
gcgaugugaggaugaguua

SEQ ID NO: 2075323 - RNA, 19 nt, Homo sapiens
  misc_RNA (1)...(19): siRNA sense strand
caagcgacgugaucgugaa

SEQ ID NO: 2075324 - RNA, 19 nt, Homo sapiens
  misc_RNA (1)...(19): siRNA sense strand
gagaacgaccugagcauca

SEQ ID NO: 2075325 - RNA, 19 nt, Homo sapiens
  misc_RNA (1)...(19): siRNA sense strand
cagaaacagugcugagcuu

SEQ ID NO: 2075326 - RNA, 19 nt, Homo sapiens
  misc_RNA (1)...(19): siRNA sense strand
caugaaggauccaguacau

SEQ ID NO: 2075327 - RNA, 19 nt, Homo sapiens
  misc_RNA (1)...(19): siRNA sense strand
gaaguccugugaauaagac

SEQ ID NO: 2075328 - RNA, 19 nt, Homo sapiens
  misc_RNA (1)...(19): siRNA sense strand
gaucaacaacaaagcaaga

SEQ ID NO: 2075329 - RNA, 19 nt, Homo sapiens
  misc_RNA (1)...(19): siRNA sense strand
gcaagacggacaugacugu

SEQ ID NO: 2075330 - RNA, 19 nt, Homo sapiens
  misc_RNA (1)...(19): siRNA sense strand
gagcagacccugaguaucc

SEQ ID NO: 2075331 - RNA, 19 nt, Homo sapiens
  misc_RNA (1)...(19): siRNA sense strand
gaaccugacaccauuuaca

SEQ ID NO: 2075332 - RNA, 19 nt, Homo sapiens
  misc_RNA (1)...(19): siRNA sense strand
gaauuuccgcuguauuuca

SEQ ID NO: 2075333 - RNA, 19 nt, Homo sapiens
  misc_RNA (1)...(19): siRNA sense strand
caacaugagucggcagaag

SEQ ID NO: 2075334 - RNA, 19 nt, Homo sapiens
  misc_RNA (1)...(19): siRNA sense strand
ucuacaaucucuucaaugg

SEQ ID NO: 2075335 - RNA, 19 nt, Homo sapiens
  misc_RNA (1)...(19): siRNA sense strand
gaauacaucaccagcuugu

SEQ ID NO: 2075336 - RNA, 19 nt, Homo sapiens
  misc_RNA (1)...(19): siRNA sense strand
gaacuggccaucaauccau

SEQ ID NO: 2075337 - RNA, 19 nt, Homo sapiens
  misc_RNA (1)...(19): siRNA sense strand
ccaagugguucucuucucu

SEQ ID NO: 2075338 - RNA, 19 nt, Homo sapiens
  misc_RNA (1)...(19): siRNA sense strand
ugacaccauuuacauguuc

SEQ ID NO: 2075339 - RNA, 19 nt, Homo sapiens
  misc_RNA (1)...(19): siRNA sense strand
aguaagaauuuccgcugua

SEQ ID NO: 2075340 - RNA, 19 nt, Homo sapiens
  misc_RNA (1)...(19): siRNA sense strand
cagccgaacuggccaucaa

SEQ ID NO: 2075341 - RNA, 19 nt, Homo sapiens
  misc_RNA (1)...(19): siRNA sense strand
cagcaagagcuuugugauu

SEQ ID NO: 2075342 - RNA, 19 nt, Homo sapiens
  misc_RNA (1)...(19): siRNA sense strand
ggaaugccucugcuaugaa

SEQ ID NO: 2075343 - RNA, 19 nt, Homo sapiens
  misc_RNA (1)...(19): siRNA sense strand
ggaauucaccuggcgaugu

SEQ ID NO: 2075344 - RNA, 19 nt, Homo sapiens
  misc_RNA (1)...(19): siRNA sense strand
acaagcagcucaccaccau

SEQ ID NO: 2075345 - RNA, 19 nt, Homo sapiens
  misc_RNA (1)...(19): siRNA sense strand
caucucaggugccggacaa

SEQ ID NO: 2075346 - RNA, 19 nt, Homo sapiens
  misc_RNA (1)...(19): siRNA sense strand
gagauguucuuugguuaca

SEQ ID NO: 2075347 - RNA, 19 nt, Homo sapiens
  misc_RNA (1)...(19): siRNA sense strand
agcaagagcuuugugauuc

SEQ ID NO: 2075348 - RNA, 19 nt, Homo sapiens
  misc_RNA (1)...(19): siRNA sense strand
gcuggagaauggcacuuug

SEQ ID NO: 2075349 - RNA, 19 nt, Homo sapiens
  misc_RNA (1)...(19): siRNA sense strand
gacaucaucucuggagcaa

SEQ ID NO: 2075350 - RNA, 19 nt, Homo sapiens
  misc_RNA (1)...(19): siRNA sense strand
gaugugacuccacugcuuu

SEQ ID NO: 2075351 - RNA, 19 nt, Homo sapiens
  misc_RNA (1)...(19): siRNA sense strand
ucuaugaacuagugaccaa

SEQ ID NO: 2075352 - RNA, 19 nt, Homo sapiens
  misc_RNA (1)...(19): siRNA sense strand
gccuggagguucucuuaga

SEQ ID NO: 2075353 - RNA, 19 nt, Homo sapiens
  misc_RNA (1)...(19): siRNA sense strand
gagcccagcagcacucuug

SEQ ID NO: 2075354 - RNA, 19 nt, Homo sapiens
  misc_RNA (1)...(19): siRNA sense strand
guaugaagacaucaguaaa

SEQ ID NO: 2075355 - RNA, 19 nt, Homo sapiens
  misc_RNA (1)...(19): siRNA sense strand
ucacugaugaacaaguaua

SEQ ID NO: 2075356 - RNA, 19 nt, Homo sapiens
  misc_RNA (1)...(19): siRNA sense strand
cgacuucccgggagaaaug

SEQ ID NO: 2075357 - RNA, 19 nt, Homo sapiens
  misc_RNA (1)...(19): siRNA sense strand
caagaaauagcagacaaga

SEQ ID NO: 2075358 - RNA, 19 nt, Homo sapiens
  misc_RNA (1)...(19): siRNA sense strand
cuacaugaaggauccagua

SEQ ID NO: 2075359 - RNA, 19 nt, Homo sapiens
  misc_RNA (1)...(19): siRNA sense strand
cccgaaguccugugaauaa

SEQ ID NO: 2075360 - RNA, 19 nt, Homo sapiens
  misc_RNA (1)...(19): siRNA sense strand
gcuaugaaggcuacaugaa

SEQ ID NO: 2075361 - RNA, 19 nt, Homo sapiens
  misc_RNA (1)...(19): siRNA sense strand
cagaggauaucccuuuggu

SEQ ID NO: 2075362 - RNA, 19 nt, Homo sapiens
  misc_RNA (1)...(19): siRNA sense strand
cggcgcagcucacucaagu

SEQ ID NO: 2075363 - RNA, 19 nt, Homo sapiens
  misc_RNA (1)...(19): siRNA sense strand
gcagacaagaucuacaauc

SEQ ID NO: 2075364 - RNA, 19 nt, Homo sapiens
  misc_RNA (1)...(19): siRNA sense strand
cgaugugacuccacugcuu

SEQ ID NO: 2075365 - RNA, 19 nt, Homo sapiens
  misc_RNA (1)...(19): siRNA sense strand
cagccuggagguucucuua

SEQ ID NO: 2075366 - RNA, 19 nt, Homo sapiens
  misc_RNA (1)...(19): siRNA sense strand
ugaggcagccaaugagauu

SEQ ID NO: 2075367 - RNA, 19 nt, Homo sapiens
  misc_RNA (1)...(19): siRNA sense strand
gaggagcagacccugagua

SEQ ID NO: 2075368 - RNA, 19 nt, Homo sapiens
  misc_RNA (1)...(19): siRNA sense strand
acuauaaccagcacuauga

SEQ ID NO: 2075369 - RNA, 19 nt, Homo sapiens
  misc_RNA (1)...(19): siRNA sense strand
gcuggaguaugaagacauc

SEQ ID NO: 2075370 - RNA, 19 nt, Homo sapiens
  misc_RNA (1)...(19): siRNA sense strand
gaagguccggucugugaug

SEQ ID NO: 2075371 - RNA, 19 nt, Homo sapiens
  misc_RNA (1)...(19): siRNA sense strand
gcgaggcuuugaccugguu

SEQ ID NO: 2075372 - RNA, 19 nt, Homo sapiens
  misc_RNA (1)...(19): siRNA sense strand
guacauaagcaccuuugca

SEQ ID NO: 2075373 - RNA, 19 nt, Homo sapiens
  misc_RNA (1)...(19): siRNA sense strand
aagcuggucucauccuuuc

SEQ ID NO: 2075374 - RNA, 19 nt, Homo sapiens
  misc_RNA (1)...(19): siRNA sense strand
caaaguggagacagaaaca

SEQ ID NO: 2075375 - RNA, 19 nt, Homo sapiens
  misc_RNA (1)...(19): siRNA sense strand
agacggacaugacugugau

SEQ ID NO: 2075376 - RNA, 19 nt, Homo sapiens
  misc_RNA (1)...(19): siRNA sense strand
gaaauagcagacaagaucu

SEQ ID NO: 2075377 - RNA, 19 nt, Homo sapiens
  misc_RNA (1)...(19): siRNA sense strand
gaugucaaggcucaagaaa

SEQ ID NO: 2075378 - RNA, 19 nt, Homo sapiens
  misc_RNA (1)...(19): siRNA sense strand
ggaagugacuguggggaaa

SEQ ID NO: 2075379 - RNA, 19 nt, Homo sapiens
  misc_RNA (1)...(19): siRNA sense strand
ggauagagacugcuucuga

SEQ ID NO: 2075380 - RNA, 19 nt, Homo sapiens
  misc_RNA (1)...(19): siRNA sense strand
gccaacagcuuccuugugu

SEQ ID NO: 2075381 - RNA, 19 nt, Homo sapiens
  misc_RNA (1)...(19): siRNA sense strand
ccacagaaauggagcagau

SEQ ID NO: 2075382 - RNA, 19 nt, Homo sapiens
  misc_RNA (1)...(19): siRNA sense strand
ggagagaaaccgccuguug

SEQ ID NO: 2075383 - RNA, 19 nt, Homo sapiens
  misc_RNA (1)...(19): siRNA sense strand
gaaauugucucuccuuccu

SEQ ID NO: 2075384 - RNA, 19 nt, Homo sapiens
  misc_RNA (1)...(19): siRNA sense strand
gguaugcccucuccucuuc

SEQ ID NO: 2075385 - RNA, 19 nt, Homo sapiens
  misc_RNA (1)...(19): siRNA sense strand
ggacacuuccugaccauga

SEQ ID NO: 2075386 - RNA, 19 nt, Homo sapiens
  misc_RNA (1)...(19): siRNA sense strand
gggcauugguggagaggaa

SEQ ID NO: 2075387 - RNA, 19 nt, Homo sapiens
  misc_RNA (1)...(19): siRNA sense strand
cgucaccgcugcucuccua

SEQ ID NO: 2075388 - RNA, 19 nt, Homo sapiens
  misc_RNA (1)...(19): siRNA sense strand
ucagacagauuuccggaau

SEQ ID NO: 2075389 - RNA, 19 nt, Homo sapiens
  misc_RNA (1)...(19): siRNA sense strand
ggacgugaguacugcaaca

SEQ ID NO: 2075390 - RNA, 19 nt, Homo sapiens
  misc_RNA (1)...(19): siRNA sense strand
gaagaugacaguggccaaa

SEQ ID NO: 2075391 - RNA, 19 nt, Homo sapiens
  misc_RNA (1)...(19): siRNA sense strand
gcagagacagccuccagaa

SEQ ID NO: 2075392 - RNA, 19 nt, Homo sapiens
  misc_RNA (1)...(19): siRNA sense strand
cagccgagauggccacaga

SEQ ID NO: 2075393 - RNA, 19 nt, Homo sapiens
  misc_RNA (1)...(19): siRNA sense strand
ggacagcacagacaacucu

SEQ ID NO: 2075394 - RNA, 19 nt, Homo sapiens
  misc_RNA (1)...(19): siRNA sense strand
ggaucuagcagccauaauc

SEQ ID NO: 2075395 - RNA, 19 nt, Homo sapiens
  misc_RNA (1)...(19): siRNA sense strand
cagcagauguugccaccau

SEQ ID NO: 2075396 - RNA, 19 nt, Homo sapiens
  misc_RNA (1)...(19): siRNA sense strand
ucaccagccucacccuuug

SEQ ID NO: 2075397 - RNA, 19 nt, Homo sapiens
  misc_RNA (1)...(19): siRNA sense strand
caggagaugcucaacguuu

SEQ ID NO: 2075398 - RNA, 19 nt, Homo sapiens
  misc_RNA (1)...(19): siRNA sense strand
gacaucgugcccaccauua

SEQ ID NO: 2075399 - RNA, 19 nt, Homo sapiens
  misc_RNA (1)...(19): siRNA sense strand
ccacgagucccuggaaauu

SEQ ID NO: 2075400 - RNA, 19 nt, Homo sapiens
  misc_RNA (1)...(19): siRNA sense strand
agagacugcuucugagguu

SEQ ID NO: 2075401 - RNA, 19 nt, Homo sapiens
  misc_RNA (1)...(19): siRNA sense strand
ggacacacgccugaaggaa

SEQ ID NO: 2075402 - RNA, 19 nt, Homo sapiens
  misc_RNA (1)...(19): siRNA sense strand
cagauggcguggugacaga

SEQ ID NO: 2075403 - RNA, 19 nt, Homo sapiens
  misc_RNA (1)...(19): siRNA sense strand
uuuccaggcucacuuagaa

SEQ ID NO: 2075404 - RNA, 19 nt, Homo sapiens
  misc_RNA (1)...(19): siRNA sense strand
gcuacaguguggagcaguu

SEQ ID NO: 2075405 - RNA, 19 nt, Homo sapiens
  misc_RNA (1)...(19): siRNA sense strand
gccuagggcugaugaugug

SEQ ID NO: 2075406 - RNA, 19 nt, Homo sapiens
  misc_RNA (1)...(19): siRNA sense strand
gugagucccugcucugcuu

SEQ ID NO: 2075407 - RNA, 19 nt, Homo sapiens
  misc_RNA (1)...(19): siRNA sense strand
aaaauaggcuuggaaauag

SEQ ID NO: 2075408 - RNA, 19 nt, Homo sapiens
  misc_RNA (1)...(19): siRNA sense strand
gaaaaggagcagcagcaua

SEQ ID NO: 2075409 - RNA, 19 nt, Homo sapiens
  misc_RNA (1)...(19): siRNA sense strand
ggugauggauggcauuuug

SEQ ID NO: 2075410 - RNA, 19 nt, Homo sapiens
  misc_RNA (1)...(19): siRNA sense strand
aaauuuccaggcucacuua

SEQ ID NO: 2075411 - RNA, 19 nt, Homo sapiens
  misc_RNA (1)...(19): siRNA sense strand
gcacgugcgcuuugaggau

SEQ ID NO: 2075412 - RNA, 19 nt, Homo sapiens
  misc_RNA (1)...(19): siRNA sense strand
caggcucacuuagaauuga

SEQ ID NO: 2075413 - RNA, 19 nt, Homo sapiens
  misc_RNA (1)...(19): siRNA sense strand
aauccaaggugagggcuuu

SEQ ID NO: 2075414 - RNA, 19 nt, Homo sapiens
  misc_RNA (1)...(19): siRNA sense strand
cagcaucaaugaggagcaa

SEQ ID NO: 2075415 - RNA, 19 nt, Homo sapiens
  misc_RNA (1)...(19): siRNA sense strand
caaggaggccugggcauca

SEQ ID NO: 2075416 - RNA, 19 nt, Homo sapiens
  misc_RNA (1)...(19): siRNA sense strand
gucaggaucuggaggacau

SEQ ID NO: 2075417 - RNA, 19 nt, Homo sapiens
  misc_RNA (1)...(19): siRNA sense strand
ggagaacagcagagaugga

SEQ ID NO: 2075418 - RNA, 19 nt, Homo sapiens
  misc_RNA (1)...(19): siRNA sense strand
gagccgggacuccaucaga

SEQ ID NO: 2075419 - RNA, 19 nt, Homo sapiens
  misc_RNA (1)...(19): siRNA sense strand
ugaaggagaagaugacagu

SEQ ID NO: 2075420 - RNA, 19 nt, Homo sapiens
  misc_RNA (1)...(19): siRNA sense strand
ugagggcuuugaaggagaa

SEQ ID NO: 2075421 - RNA, 19 nt, Homo sapiens
  misc_RNA (1)...(19): siRNA sense strand
acgagucccuggaaauugu

SEQ ID NO: 2075422 - RNA, 19 nt, Homo sapiens
  misc_RNA (1)...(19): siRNA sense strand
gaaccgguccagccucuac

SEQ ID NO: 2075423 - RNA, 19 nt, Homo sapiens
  misc_RNA (1)...(19): siRNA sense strand
caaauuuccaggcucacuu

SEQ ID NO: 2075424 - RNA, 19 nt, Homo sapiens
  misc_RNA (1)...(19): siRNA sense strand
cgaccucgccgacuacauc

SEQ ID NO: 2075425 - RNA, 19 nt, Homo sapiens
  misc_RNA (1)...(19): siRNA sense strand
uuuauugcuucccgucuuu

SEQ ID NO: 2075426 - RNA, 19 nt, Homo sapiens
  misc_RNA (1)...(19): siRNA sense strand
acacacgccugaaggaacu

SEQ ID NO: 2075427 - RNA, 19 nt, Homo sapiens
  misc_RNA (1)...(19): siRNA sense strand
gaaacacacaucggagaca

SEQ ID NO: 2075428 - RNA, 19 nt, Homo sapiens
  misc_RNA (1)...(19): siRNA sense strand
cugaucggguggagagaaa

SEQ ID NO: 2075429 - RNA, 19 nt, Homo sapiens
  misc_RNA (1)...(19): siRNA sense strand
guaaggccaaugcuucugu

SEQ ID NO: 2075430 - RNA, 19 nt, Homo sapiens
  misc_RNA (1)...(19): siRNA sense strand
accaacaacugcaacaaca

SEQ ID NO: 2075431 - RNA, 19 nt, Homo sapiens
  misc_RNA (1)...(19): siRNA sense strand
ggagagcgggaaccaacga

SEQ ID NO: 2075432 - RNA, 19 nt, Homo sapiens
  misc_RNA (1)...(19): siRNA sense strand
gccugaaggaacucuauuu

SEQ ID NO: 2075433 - RNA, 19 nt, Homo sapiens
  misc_RNA (1)...(19): siRNA sense strand
ggccugggcaucagacaga

SEQ ID NO: 2075434 - RNA, 19 nt, Homo sapiens
  misc_RNA (1)...(19): siRNA sense strand
ccaccucgccagugucuca

SEQ ID NO: 2075435 - RNA, 19 nt, Homo sapiens
  misc_RNA (1)...(19): siRNA sense strand
ugacaucgugcccaccauu

SEQ ID NO: 2075436 - RNA, 19 nt, Homo sapiens
  misc_RNA (1)...(19): siRNA sense strand
aggagaugcucaacguuuc

SEQ ID NO: 2075437 - RNA, 19 nt, Homo sapiens
  misc_RNA (1)...(19): siRNA sense strand
uuucuuggcucagcagaug

SEQ ID NO: 2075438 - RNA, 19 nt, Homo sapiens
  misc_RNA (1)...(19): siRNA sense strand
ggugauuuguaaggaucua

SEQ ID NO: 2075439 - RNA, 19 nt, Homo sapiens
  misc_RNA (1)...(19): siRNA sense strand
caccgcugcucuccuagga

SEQ ID NO: 2075440 - RNA, 19 nt, Homo sapiens
  misc_RNA (1)...(19): siRNA sense strand
caagacagggaguggaaca

SEQ ID NO: 2075441 - RNA, 19 nt, Homo sapiens
  misc_RNA (1)...(19): siRNA sense strand
gaggacagggucaggaucu

SEQ ID NO: 2075442 - RNA, 19 nt, Homo sapiens
  misc_RNA (1)...(19): siRNA sense strand
gagguucaucugugucuuc

SEQ ID NO: 2075443 - RNA, 19 nt, Homo sapiens
  misc_RNA (1)...(19): siRNA sense strand
cagccucacccuuuggauu

SEQ ID NO: 2075444 - RNA, 19 nt, Homo sapiens
  misc_RNA (1)...(19): siRNA sense strand
ggccacagggcuuccaaga

SEQ ID NO: 2075445 - RNA, 19 nt, Homo sapiens
  misc_RNA (1)...(19): siRNA sense strand
gcccagcucuuugcaacag

SEQ ID NO: 2075446 - RNA, 19 nt, Homo sapiens
  misc_RNA (1)...(19): siRNA sense strand
gcaggagaugcucaacguu

SEQ ID NO: 2075447 - RNA, 19 nt, Homo sapiens
  misc_RNA (1)...(19): siRNA sense strand
gucaccagccucacccuuu

SEQ ID NO: 2075448 - RNA, 19 nt, Homo sapiens
  misc_RNA (1)...(19): siRNA sense strand
ggaauggauccgggaaaca

SEQ ID NO: 2075449 - RNA, 19 nt, Homo sapiens
  misc_RNA (1)...(19): siRNA sense strand
ccaaggugagggcuuugaa

SEQ ID NO: 2075450 - RNA, 19 nt, Homo sapiens
  misc_RNA (1)...(19): siRNA sense strand
ggacauuccacaggcuugu

SEQ ID NO: 2075451 - RNA, 19 nt, Homo sapiens
  misc_RNA (1)...(19): siRNA sense strand
agaugacaguggccaaaca

SEQ ID NO: 2075452 - RNA, 19 nt, Homo sapiens
  misc_RNA (1)...(19): siRNA sense strand
guaacaaaaucauccacau

SEQ ID NO: 2075453 - RNA, 19 nt, Homo sapiens
  misc_RNA (1)...(19): siRNA sense strand
gaauggauccgggaaacac

SEQ ID NO: 2075454 - RNA, 19 nt, Homo sapiens
  misc_RNA (1)...(19): siRNA sense strand
gaucuagcagccauaaucg

SEQ ID NO: 2075455 - RNA, 19 nt, Homo sapiens
  misc_RNA (1)...(19): siRNA sense strand
aaauaggcuuggaaauagg

SEQ ID NO: 2075456 - RNA, 19 nt, Homo sapiens
  misc_RNA (1)...(19): siRNA sense strand
gguggaaaaugaggugaaa

SEQ ID NO: 2075457 - RNA, 19 nt, Homo sapiens
  misc_RNA (1)...(19): siRNA sense strand
ccaggcucacuuagaauug

SEQ ID NO: 2075458 - RNA, 19 nt, Homo sapiens
  misc_RNA (1)...(19): siRNA sense strand
aaaaggagcagcagcauag

SEQ ID NO: 2075459 - RNA, 19 nt, Homo sapiens
  misc_RNA (1)...(19): siRNA sense strand
ggagaugcucaacguuucu

SEQ ID NO: 2075460 - RNA, 19 nt, Homo sapiens
  misc_RNA (1)...(19): siRNA sense strand
ugcaggagaugcucaacgu

SEQ ID NO: 2075461 - RNA, 19 nt, Homo sapiens
  misc_RNA (1)...(19): siRNA sense strand
gcugugguggcuccucgua

SEQ ID NO: 2075462 - RNA, 19 nt, Homo sapiens
  misc_RNA (1)...(19): siRNA sense strand
gccggaagcugguguauua

SEQ ID NO: 2075463 - RNA, 19 nt, Homo sapiens
  misc_RNA (1)...(19): siRNA sense strand
ucucaaagauggccacuau

SEQ ID NO: 2075464 - RNA, 19 nt, Homo sapiens
  misc_RNA (1)...(19): siRNA sense strand
gcugguguauuaucucaaa

SEQ ID NO: 2075465 - RNA, 19 nt, Homo sapiens
  misc_RNA (1)...(19): siRNA sense strand
ggaagcugguguauuaucu

SEQ ID NO: 2075466 - RNA, 19 nt, Homo sapiens
  misc_RNA (1)...(19): siRNA sense strand
ccacagggcugggcaugau

SEQ ID NO: 2075467 - RNA, 19 nt, Homo sapiens
  misc_RNA (1)...(19): siRNA sense strand
ggcccaaguuugaggaguu

SEQ ID NO: 2075468 - RNA, 19 nt, Homo sapiens
  misc_RNA (1)...(19): siRNA sense strand
ucaaagauggccacuaugg

SEQ ID NO: 2075469 - RNA, 19 nt, Homo sapiens
  misc_RNA (1)...(19): siRNA sense strand
cauggccgcugucaacauc

SEQ ID NO: 2075470 - RNA, 19 nt, Homo sapiens
  misc_RNA (1)...(19): siRNA sense strand
ggaguuggcgagagugauc

SEQ ID NO: 2075471 - RNA, 19 nt, Homo sapiens
  misc_RNA (1)...(19): siRNA sense strand
gcccaaguuugaggaguug

SEQ ID NO: 2075472 - RNA, 19 nt, Homo sapiens
  misc_RNA (1)...(19): siRNA sense strand
gcuucuauguggagucugu

SEQ ID NO: 2075473 - RNA, 19 nt, Homo sapiens
  misc_RNA (1)...(19): siRNA sense strand
gcacuggcucugcuagcuu

SEQ ID NO: 2075474 - RNA, 19 nt, Homo sapiens
  misc_RNA (1)...(19): siRNA sense strand
gccggugcauguuggaaau

SEQ ID NO: 2075475 - RNA, 19 nt, Homo sapiens
  misc_RNA (1)...(19): siRNA sense strand
aagcugguguauuaucuca

SEQ ID NO: 2075476 - RNA, 19 nt, Homo sapiens
  misc_RNA (1)...(19): siRNA sense strand
ugagcugccuggacauugg

SEQ ID NO: 2075477 - RNA, 19 nt, Homo sapiens
  misc_RNA (1)...(19): siRNA sense strand
ugaggagcguggugucaag

SEQ ID NO: 2075478 - RNA, 19 nt, Homo sapiens
  misc_RNA (1)...(19): siRNA sense strand
gaggaguuggcgagaguga

SEQ ID NO: 2075479 - RNA, 19 nt, Homo sapiens
  misc_RNA (1)...(19): siRNA sense strand
ugacugccggugcauguug

SEQ ID NO: 2075480 - RNA, 19 nt, Homo sapiens
  misc_RNA (1)...(19): siRNA sense strand
gggcugggcaugauaugag

SEQ ID NO: 2075481 - RNA, 19 nt, Homo sapiens
  misc_RNA (1)...(19): siRNA sense strand
gcugacugccggugcaugu

SEQ ID NO: 2075482 - RNA, 19 nt, Homo sapiens
  misc_RNA (1)...(19): siRNA sense strand
ucaacaucauugccaagag

SEQ ID NO: 2075483 - RNA, 19 nt, Homo sapiens
  misc_RNA (1)...(19): siRNA sense strand
ccccagagcuucacacaag

SEQ ID NO: 2075484 - RNA, 19 nt, Homo sapiens
  misc_RNA (1)...(19): siRNA sense strand
ugacaaacaucuaagugua

SEQ ID NO: 2075485 - RNA, 19 nt, Homo sapiens
  misc_RNA (1)...(19): siRNA sense strand
ccaccuaccugucgaaguu

SEQ ID NO: 2075486 - RNA, 19 nt, Homo sapiens
  misc_RNA (1)...(19): siRNA sense strand
gagaaugacaaacaucuaa

SEQ ID NO: 2075487 - RNA, 19 nt, Homo sapiens
  misc_RNA (1)...(19): siRNA sense strand
uggaagagcugcacacuca

SEQ ID NO: 2075488 - RNA, 19 nt, Homo sapiens
  misc_RNA (1)...(19): siRNA sense strand
ccaaagaagucaccuaagg

SEQ ID NO: 2075489 - RNA, 19 nt, Homo sapiens
  misc_RNA (1)...(19): siRNA sense strand
caagagaaacagaaacuga

SEQ ID NO: 2075490 - RNA, 19 nt, Homo sapiens
  misc_RNA (1)...(19): siRNA sense strand
ccucuucccucacgucuuu

SEQ ID NO: 2075491 - RNA, 19 nt, Homo sapiens
  misc_RNA (1)...(19): siRNA sense strand
agagggagcuggcggagaa

SEQ ID NO: 2075492 - RNA, 19 nt, Homo sapiens
  misc_RNA (1)...(19): siRNA sense strand
gagcuuggccugaggaaug

SEQ ID NO: 2075493 - RNA, 19 nt, Homo sapiens
  misc_RNA (1)...(19): siRNA sense strand
guuccacccucuccucuaa

SEQ ID NO: 2075494 - RNA, 19 nt, Homo sapiens
  misc_RNA (1)...(19): siRNA sense strand
ucccaaaucuggaaaguca

SEQ ID NO: 2075495 - RNA, 19 nt, Homo sapiens
  misc_RNA (1)...(19): siRNA sense strand
cuaccgggaugacaccuuu

SEQ ID NO: 2075496 - RNA, 19 nt, Homo sapiens
  misc_RNA (1)...(19): siRNA sense strand
gggcucagacucacagaaa

SEQ ID NO: 2075497 - RNA, 19 nt, Homo sapiens
  misc_RNA (1)...(19): siRNA sense strand
uggccaagcucccucagaa

SEQ ID NO: 2075498 - RNA, 19 nt, Homo sapiens
  misc_RNA (1)...(19): siRNA sense strand
gcagaacuccggagcaucu

SEQ ID NO: 2075499 - RNA, 19 nt, Homo sapiens
  misc_RNA (1)...(19): siRNA sense strand
ccaggacaacgucuucuuu

SEQ ID NO: 2075500 - RNA, 19 nt, Homo sapiens
  misc_RNA (1)...(19): siRNA sense strand
caagcucccucagaaggaa

SEQ ID NO: 2075501 - RNA, 19 nt, Homo sapiens
  misc_RNA (1)...(19): siRNA sense strand
gagaugauccagcgcaaag

SEQ ID NO: 2075502 - RNA, 19 nt, Homo sapiens
  misc_RNA (1)...(19): siRNA sense strand
gcucagacucacagaaaga

SEQ ID NO: 2075503 - RNA, 19 nt, Homo sapiens
  misc_RNA (1)...(19): siRNA sense strand
gaaguugauuccacaugcu

SEQ ID NO: 2075504 - RNA, 19 nt, Homo sapiens
  misc_RNA (1)...(19): siRNA sense strand
gaaugacaaacaucuaagu

SEQ ID NO: 2075505 - RNA, 19 nt, Homo sapiens
  misc_RNA (1)...(19): siRNA sense strand
gccagggucugcaguggau

SEQ ID NO: 2075506 - RNA, 19 nt, Homo sapiens
  misc_RNA (1)...(19): siRNA sense strand
gcaccaggacaacgucuuc

SEQ ID NO: 2075507 - RNA, 19 nt, Homo sapiens
  misc_RNA (1)...(19): siRNA sense strand
gacaaacaucuaaguguag

SEQ ID NO: 2075508 - RNA, 19 nt, Homo sapiens
  misc_RNA (1)...(19): siRNA sense strand
ggagugugucccugcguaa

SEQ ID NO: 2075509 - RNA, 19 nt, Homo sapiens
  misc_RNA (1)...(19): siRNA sense strand
ccaguuucaucuucuccaa

SEQ ID NO: 2075510 - RNA, 19 nt, Homo sapiens
  misc_RNA (1)...(19): siRNA sense strand
ggaacucacaccacaagag

SEQ ID NO: 2075511 - RNA, 19 nt, Homo sapiens
  misc_RNA (1)...(19): siRNA sense strand
ucaauccuccgacaccauu

SEQ ID NO: 2075512 - RNA, 19 nt, Homo sapiens
  misc_RNA (1)...(19): siRNA sense strand
agaaacagaaacugaacaa

SEQ ID NO: 2075513 - RNA, 19 nt, Homo sapiens
  misc_RNA (1)...(19): siRNA sense strand
ucagacacacucagcauuc

SEQ ID NO: 2075514 - RNA, 19 nt, Homo sapiens
  misc_RNA (1)...(19): siRNA sense strand
ccuacaacaccaagagaaa

SEQ ID NO: 2075515 - RNA, 19 nt, Homo sapiens
  misc_RNA (1)...(19): siRNA sense strand
caacggccaguuucaucuu

SEQ ID NO: 2075516 - RNA, 19 nt, Homo sapiens
  misc_RNA (1)...(19): siRNA sense strand
gcucuacggcuagcaauag

SEQ ID NO: 2075517 - RNA, 19 nt, Homo sapiens
  misc_RNA (1)...(19): siRNA sense strand
ccacauugaccgugucuac

SEQ ID NO: 2075518 - RNA, 19 nt, Homo sapiens
  misc_RNA (1)...(19): siRNA sense strand
ugagaaugacaaacaucua

SEQ ID NO: 2075519 - RNA, 19 nt, Homo sapiens
  misc_RNA (1)...(19): siRNA sense strand
cauggagacacccagagua

SEQ ID NO: 2075520 - RNA, 19 nt, Homo sapiens
  misc_RNA (1)...(19): siRNA sense strand
gagaaacagaaacugaaca

SEQ ID NO: 2075521 - RNA, 19 nt, Homo sapiens
  misc_RNA (1)...(19): siRNA sense strand
aagagaaacagaaacugaa

SEQ ID NO: 2075522 - RNA, 19 nt, Homo sapiens
  misc_RNA (1)...(19): siRNA sense strand
caacaccaagagaaacaga

SEQ ID NO: 2075523 - RNA, 19 nt, Homo sapiens
  misc_RNA (1)...(19): siRNA sense strand
acaccaagagaaacagaaa

SEQ ID NO: 2075524 - RNA, 19 nt, Homo sapiens
  misc_RNA (1)...(19): siRNA sense strand
cugccaaggcugagaauga

SEQ ID NO: 2075525 - RNA, 19 nt, Homo sapiens
  misc_RNA (1)...(19): siRNA sense strand
ggagacacccagaguaucc

SEQ ID NO: 2075526 - RNA, 19 nt, Homo sapiens
  misc_RNA (1)...(19): siRNA sense strand
ggagaugauccagcgcaaa

SEQ ID NO: 2075527 - RNA, 19 nt, Homo sapiens
  misc_RNA (1)...(19): siRNA sense strand
uaagaagccagaggugguu

SEQ ID NO: 2075528 - RNA, 19 nt, Homo sapiens
  misc_RNA (1)...(19): siRNA sense strand
cgggaugacaccuuuguug

SEQ ID NO: 2075529 - RNA, 19 nt, Homo sapiens
  misc_RNA (1)...(19): siRNA sense strand
gaaccggugggcuguagca

SEQ ID NO: 2075530 - RNA, 19 nt, Homo sapiens
  misc_RNA (1)...(19): siRNA sense strand
uggaugagcaccaggacaa

SEQ ID NO: 2075531 - RNA, 19 nt, Homo sapiens
  misc_RNA (1)...(19): siRNA sense strand
cuccucagcuacugcuuug

SEQ ID NO: 2075532 - RNA, 19 nt, Homo sapiens
  misc_RNA (1)...(19): siRNA sense strand
gaaacagaaacugaacaag

SEQ ID NO: 2075533 - RNA, 19 nt, Homo sapiens
  misc_RNA (1)...(19): siRNA sense strand
uggcagaacuccggagcau

SEQ ID NO: 2075534 - RNA, 19 nt, Homo sapiens
  misc_RNA (1)...(19): siRNA sense strand
agugaaggccucucaagug

SEQ ID NO: 2075535 - RNA, 19 nt, Homo sapiens
  misc_RNA (1)...(19): siRNA sense strand
ucccucacgucuuuauguu

SEQ ID NO: 2075536 - RNA, 19 nt, Homo sapiens
  misc_RNA (1)...(19): siRNA sense strand
ggacccacucccuccauca

SEQ ID NO: 2075537 - RNA, 19 nt, Homo sapiens
  misc_RNA (1)...(19): siRNA sense strand
cgcagcaugugcagaagga

SEQ ID NO: 2075538 - RNA, 19 nt, Homo sapiens
  misc_RNA (1)...(19): siRNA sense strand
caggacaacgucuucuuuc

SEQ ID NO: 2075539 - RNA, 19 nt, Homo sapiens
  misc_RNA (1)...(19): siRNA sense strand
aagacaacaucuccuucug

SEQ ID NO: 2075540 - RNA, 19 nt, Homo sapiens
  misc_RNA (1)...(19): siRNA sense strand
gcuucguccuccucagcua

SEQ ID NO: 2075541 - RNA, 19 nt, Homo sapiens
  misc_RNA (1)...(19): siRNA sense strand
cuggguaccuggcuugucu

SEQ ID NO: 2075542 - RNA, 19 nt, Homo sapiens
  misc_RNA (1)...(19): siRNA sense strand
ccaaggcugagaaugacaa

SEQ ID NO: 2075543 - RNA, 19 nt, Homo sapiens
  misc_RNA (1)...(19): siRNA sense strand
ccaagcucccucagaagga

SEQ ID NO: 2075544 - RNA, 19 nt, Homo sapiens
  misc_RNA (1)...(19): siRNA sense strand
uuacugcuccucccaccaa

SEQ ID NO: 2075545 - RNA, 19 nt, Homo sapiens
  misc_RNA (1)...(19): siRNA sense strand
gcucugccaaggcugagaa

SEQ ID NO: 2075546 - RNA, 19 nt, Homo sapiens
  misc_RNA (1)...(19): siRNA sense strand
gaaggaaacacccugauau

SEQ ID NO: 2075547 - RNA, 19 nt, Homo sapiens
  misc_RNA (1)...(19): siRNA sense strand
aagcaaacuucaacaauga

SEQ ID NO: 2075548 - RNA, 19 nt, Homo sapiens
  misc_RNA (1)...(19): siRNA sense strand
aaagcaaacuucaacaaug

SEQ ID NO: 2075549 - RNA, 19 nt, Homo sapiens
  misc_RNA (1)...(19): siRNA sense strand
ugauaucaguggauuauga

SEQ ID NO: 2075550 - RNA, 19 nt, Homo sapiens
  misc_RNA (1)...(19): siRNA sense strand
caaagcaaacuucaacaau

SEQ ID NO: 2075551 - RNA, 19 nt, Homo sapiens
  misc_RNA (1)...(19): siRNA sense strand
uuacucagacuuccaaauu

SEQ ID NO: 2075552 - RNA, 19 nt, Homo sapiens
  misc_RNA (1)...(19): siRNA sense strand
gcaggaauggcuugaaaca

SEQ ID NO: 2075553 - RNA, 19 nt, Homo sapiens
  misc_RNA (1)...(19): siRNA sense strand
agaaggaaacacccugaua

SEQ ID NO: 2075554 - RNA, 19 nt, Homo sapiens
  misc_RNA (1)...(19): siRNA sense strand
uaaaucacacaucgacaaa

SEQ ID NO: 2075555 - RNA, 19 nt, Homo sapiens
  misc_RNA (1)...(19): siRNA sense strand
gauaucaguggauuaugaa

SEQ ID NO: 2075556 - RNA, 19 nt, Homo sapiens
  misc_RNA (1)...(19): siRNA sense strand
cgacaaagcaaacuucaac

SEQ ID NO: 2075557 - RNA, 19 nt, Homo sapiens
  misc_RNA (1)...(19): siRNA sense strand
cuaaaucacacaucgacaa

SEQ ID NO: 2075558 - RNA, 19 nt, Homo sapiens
  misc_RNA (1)...(19): siRNA sense strand
acucagacuuccaaauugu

SEQ ID NO: 2075559 - RNA, 19 nt, Homo sapiens
  misc_RNA (1)...(19): siRNA sense strand
ggauuacucagacuuccaa

SEQ ID NO: 2075560 - RNA, 19 nt, Homo sapiens
  misc_RNA (1)...(19): siRNA sense strand
augcaggaauggcuugaaa

SEQ ID NO: 2075561 - RNA, 19 nt, Homo sapiens
  misc_RNA (1)...(19): siRNA sense strand
ucagacuuccaaauuguaa

SEQ ID NO: 2075562 - RNA, 19 nt, Homo sapiens
  misc_RNA (1)...(19): siRNA sense strand
acaaagcaaacuucaacaa

SEQ ID NO: 2075563 - RNA, 19 nt, Homo sapiens
  misc_RNA (1)...(19): siRNA sense strand
uacucagacuuccaaauug

SEQ ID NO: 2075564 - RNA, 19 nt, Homo sapiens
  misc_RNA (1)...(19): siRNA sense strand
ucuccaaggugcgucauau

SEQ ID NO: 2075565 - RNA, 19 nt, Homo sapiens
  misc_RNA (1)...(19): siRNA sense strand
ucacacaucgacaaagcaa

SEQ ID NO: 2075566 - RNA, 19 nt, Homo sapiens
  misc_RNA (1)...(19): siRNA sense strand
aaucacacaucgacaaagc

SEQ ID NO: 2075567 - RNA, 19 nt, Homo sapiens
  misc_RNA (1)...(19): siRNA sense strand
ugaaguuggauuacucaga

SEQ ID NO: 2075568 - RNA, 19 nt, Homo sapiens
  misc_RNA (1)...(19): siRNA sense strand
ucaucuugaaguuggauua

SEQ ID NO: 2075569 - RNA, 19 nt, Homo sapiens
  misc_RNA (1)...(19): siRNA sense strand
caucgacaaagcaaacuuc

SEQ ID NO: 2075570 - RNA, 19 nt, Homo sapiens
  misc_RNA (1)...(19): siRNA sense strand
cacagugcaaggacaauug

SEQ ID NO: 2075571 - RNA, 19 nt, Homo sapiens
  misc_RNA (1)...(19): siRNA sense strand
ggaccuggccuacgagaag

SEQ ID NO: 2075572 - RNA, 19 nt, Homo sapiens
  misc_RNA (1)...(19): siRNA sense strand
gccuugcgcuaccguguga

SEQ ID NO: 2075573 - RNA, 19 nt, Homo sapiens
  misc_RNA (1)...(19): siRNA sense strand
gcagggcuggauccacuuu

SEQ ID NO: 2075574 - RNA, 19 nt, Homo sapiens
  misc_RNA (1)...(19): siRNA sense strand
ccacgugcagauccaauug

SEQ ID NO: 2075575 - RNA, 19 nt, Homo sapiens
  misc_RNA (1)...(19): siRNA sense strand
ggaagaagauaccucagaa

SEQ ID NO: 2075576 - RNA, 19 nt, Homo sapiens
  misc_RNA (1)...(19): siRNA sense strand
ggaggaagaugaagcagaa

SEQ ID NO: 2075577 - RNA, 19 nt, Homo sapiens
  misc_RNA (1)...(19): siRNA sense strand
ucauguaccuuauggauuu

SEQ ID NO: 2075578 - RNA, 19 nt, Homo sapiens
  misc_RNA (1)...(19): siRNA sense strand
gaagaagcgucuagaacga

SEQ ID NO: 2075579 - RNA, 19 nt, Homo sapiens
  misc_RNA (1)...(19): siRNA sense strand
gaucaagacugcagugaca

SEQ ID NO: 2075580 - RNA, 19 nt, Homo sapiens
  misc_RNA (1)...(19): siRNA sense strand
gaucagaauccuauuaaga

SEQ ID NO: 2075581 - RNA, 19 nt, Homo sapiens
  misc_RNA (1)...(19): siRNA sense strand
gcaauaugaugagcaaguu

SEQ ID NO: 2075582 - RNA, 19 nt, Homo sapiens
  misc_RNA (1)...(19): siRNA sense strand
gaagggagugucuaagaaa

SEQ ID NO: 2075583 - RNA, 19 nt, Homo sapiens
  misc_RNA (1)...(19): siRNA sense strand
ucagaaaggucggaagaaa

SEQ ID NO: 2075584 - RNA, 19 nt, Homo sapiens
  misc_RNA (1)...(19): siRNA sense strand
gucaugagcucacaacuuc

SEQ ID NO: 2075585 - RNA, 19 nt, Homo sapiens
  misc_RNA (1)...(19): siRNA sense strand
gagaaugacccacuucguu

SEQ ID NO: 2075586 - RNA, 19 nt, Homo sapiens
  misc_RNA (1)...(19): siRNA sense strand
ugaagggagugucuaagaa

SEQ ID NO: 2075587 - RNA, 19 nt, Homo sapiens
  misc_RNA (1)...(19): siRNA sense strand
aagcugaaguaucaaauug

SEQ ID NO: 2075588 - RNA, 19 nt, Homo sapiens
  misc_RNA (1)...(19): siRNA sense strand
gaagaagauaccucagaaa

SEQ ID NO: 2075589 - RNA, 19 nt, Homo sapiens
  misc_RNA (1)...(19): siRNA sense strand
gggagugucuaagaaauau

SEQ ID NO: 2075590 - RNA, 19 nt, Homo sapiens
  misc_RNA (1)...(19): siRNA sense strand
ugaaaucacugacacaaaa

SEQ ID NO: 2075591 - RNA, 19 nt, Homo sapiens
  misc_RNA (1)...(19): siRNA sense strand
caacacaggauuaacuaug

SEQ ID NO: 2075592 - RNA, 19 nt, Homo sapiens
  misc_RNA (1)...(19): siRNA sense strand
ugacaucagugcuuugaca

SEQ ID NO: 2075593 - RNA, 19 nt, Homo sapiens
  misc_RNA (1)...(19): siRNA sense strand
ggauuugacccaccucauu

SEQ ID NO: 2075594 - RNA, 19 nt, Homo sapiens
  misc_RNA (1)...(19): siRNA sense strand
ggagaagaagcgucuagaa

SEQ ID NO: 2075595 - RNA, 19 nt, Homo sapiens
  misc_RNA (1)...(19): siRNA sense strand
ucagggacaugaugcaguu

SEQ ID NO: 2075596 - RNA, 19 nt, Homo sapiens
  misc_RNA (1)...(19): siRNA sense strand
ucagugacaucagugcuuu

SEQ ID NO: 2075597 - RNA, 19 nt, Homo sapiens
  misc_RNA (1)...(19): siRNA sense strand
gaggaccaacacaggauua

SEQ ID NO: 2075598 - RNA, 19 nt, Homo sapiens
  misc_RNA (1)...(19): siRNA sense strand
agaaugacccacuucguuu

SEQ ID NO: 2075599 - RNA, 19 nt, Homo sapiens
  misc_RNA (1)...(19): siRNA sense strand
aacacaggauuaacuauga

SEQ ID NO: 2075600 - RNA, 19 nt, Homo sapiens
  misc_RNA (1)...(19): siRNA sense strand
ccagcaauaugaugagcaa

SEQ ID NO: 2075601 - RNA, 19 nt, Homo sapiens
  misc_RNA (1)...(19): siRNA sense strand
uuaaggagcaguacucaga

SEQ ID NO: 2075602 - RNA, 19 nt, Homo sapiens
  misc_RNA (1)...(19): siRNA sense strand
gagaagaagcgucuagaac

SEQ ID NO: 2075603 - RNA, 19 nt, Homo sapiens
  misc_RNA (1)...(19): siRNA sense strand
uuaagaagcggaagaagau

SEQ ID NO: 2075604 - RNA, 19 nt, Homo sapiens
  misc_RNA (1)...(19): siRNA sense strand
ucacaacuucauucccuua

SEQ ID NO: 2075605 - RNA, 19 nt, Homo sapiens
  misc_RNA (1)...(19): siRNA sense strand
ggcuguaacugcacaagug

SEQ ID NO: 2075606 - RNA, 19 nt, Homo sapiens
  misc_RNA (1)...(19): siRNA sense strand
caaauugacaagcugauca

SEQ ID NO: 2075607 - RNA, 19 nt, Homo sapiens
  misc_RNA (1)...(19): siRNA sense strand
gaagaugaagcagaagaug

SEQ ID NO: 2075608 - RNA, 19 nt, Homo sapiens
  misc_RNA (1)...(19): siRNA sense strand
gagcaagugauggcuguaa

SEQ ID NO: 2075609 - RNA, 19 nt, Homo sapiens
  misc_RNA (1)...(19): siRNA sense strand
uccaguacauuaugaugaa

SEQ ID NO: 2075610 - RNA, 19 nt, Homo sapiens
  misc_RNA (1)...(19): siRNA sense strand
aagcugagcgggagaagaa

SEQ ID NO: 2075611 - RNA, 19 nt, Homo sapiens
  misc_RNA (1)...(19): siRNA sense strand
ggaagaugaagcagaagau

SEQ ID NO: 2075612 - RNA, 19 nt, Homo sapiens
  misc_RNA (1)...(19): siRNA sense strand
gugaagggagugucuaaga

SEQ ID NO: 2075613 - RNA, 19 nt, Homo sapiens
  misc_RNA (1)...(19): siRNA sense strand
gccaagagacgggcauuga

SEQ ID NO: 2075614 - RNA, 19 nt, Homo sapiens
  misc_RNA (1)...(19): siRNA sense strand
ucagaauccuauuaagaag

SEQ ID NO: 2075615 - RNA, 19 nt, Homo sapiens
  misc_RNA (1)...(19): siRNA sense strand
gcucauguaccuuauggau

SEQ ID NO: 2075616 - RNA, 19 nt, Homo sapiens
  misc_RNA (1)...(19): siRNA sense strand
uaacugcacaagugaaauc

SEQ ID NO: 2075617 - RNA, 19 nt, Homo sapiens
  misc_RNA (1)...(19): siRNA sense strand
ggaugaggaggaagaugaa

SEQ ID NO: 2075618 - RNA, 19 nt, Homo sapiens
  misc_RNA (1)...(19): siRNA sense strand
gauuugacccaccucauuc

SEQ ID NO: 2075619 - RNA, 19 nt, Homo sapiens
  misc_RNA (1)...(19): siRNA sense strand
accaaaagcugaaguauca

SEQ ID NO: 2075620 - RNA, 19 nt, Homo sapiens
  misc_RNA (1)...(19): siRNA sense strand
caacuucauucccuuacac

SEQ ID NO: 2075621 - RNA, 19 nt, Homo sapiens
  misc_RNA (1)...(19): siRNA sense strand
caaaugucaugagcucaca

SEQ ID NO: 2075622 - RNA, 19 nt, Homo sapiens
  misc_RNA (1)...(19): siRNA sense strand
gcuugguuccaguacauua

SEQ ID NO: 2075623 - RNA, 19 nt, Homo sapiens
  misc_RNA (1)...(19): siRNA sense strand
gaccaacacaggauuaacu

SEQ ID NO: 2075624 - RNA, 19 nt, Homo sapiens
  misc_RNA (1)...(19): siRNA sense strand
ggaggaccaacacaggauu

SEQ ID NO: 2075625 - RNA, 19 nt, Homo sapiens
  misc_RNA (1)...(19): siRNA sense strand
ccaguacauuaugaugaaa

SEQ ID NO: 2075626 - RNA, 19 nt, Homo sapiens
  misc_RNA (1)...(19): siRNA sense strand
ccaccucauucuggacaaa

SEQ ID NO: 2075627 - RNA, 19 nt, Homo sapiens
  misc_RNA (1)...(19): siRNA sense strand
gaacuuaaggagcaguacu

SEQ ID NO: 2075628 - RNA, 19 nt, Homo sapiens
  misc_RNA (1)...(19): siRNA sense strand
cggaagaagauaccucaga

SEQ ID NO: 2075629 - RNA, 19 nt, Homo sapiens
  misc_RNA (1)...(19): siRNA sense strand
uaagaagcggaagaagaua

SEQ ID NO: 2075630 - RNA, 19 nt, Homo sapiens
  misc_RNA (1)...(19): siRNA sense strand
agagcaugauggugcguuu

SEQ ID NO: 2075631 - RNA, 19 nt, Homo sapiens
  misc_RNA (1)...(19): siRNA sense strand
cugcugcucauguaccuua

SEQ ID NO: 2075632 - RNA, 19 nt, Homo sapiens
  misc_RNA (1)...(19): siRNA sense strand
aagaagauaccucagaaag

SEQ ID NO: 2075633 - RNA, 19 nt, Homo sapiens
  misc_RNA (1)...(19): siRNA sense strand
aagaugaagcagaagauga

SEQ ID NO: 2075634 - RNA, 19 nt, Homo sapiens
  misc_RNA (1)...(19): siRNA sense strand
guggagauucgcacgguuu

SEQ ID NO: 2075635 - RNA, 19 nt, Homo sapiens
  misc_RNA (1)...(19): siRNA sense strand
caaguugagcucugaggau

SEQ ID NO: 2075636 - RNA, 19 nt, Homo sapiens
  misc_RNA (1)...(19): siRNA sense strand
ccucagaaaggucggaaga

SEQ ID NO: 2075637 - RNA, 19 nt, Homo sapiens
  misc_RNA (1)...(19): siRNA sense strand
gcuguaacugcacaaguga

SEQ ID NO: 2075638 - RNA, 19 nt, Homo sapiens
  misc_RNA (1)...(19): siRNA sense strand
gagugucuaagaaauaugu

SEQ ID NO: 2075639 - RNA, 19 nt, Homo sapiens
  misc_RNA (1)...(19): siRNA sense strand
aagggagugucuaagaaau

SEQ ID NO: 2075640 - RNA, 19 nt, Homo sapiens
  misc_RNA (1)...(19): siRNA sense strand
aauaugaugagcaaguuga

SEQ ID NO: 2075641 - RNA, 19 nt, Homo sapiens
  misc_RNA (1)...(19): siRNA sense strand
ccagaggaaauccgugaug

SEQ ID NO: 2075642 - RNA, 19 nt, Homo sapiens
  misc_RNA (1)...(19): siRNA sense strand
ugaccagucugaggcuuca

SEQ ID NO: 2075643 - RNA, 19 nt, Homo sapiens
  misc_RNA (1)...(19): siRNA sense strand
aggaugaggaggaagauga

SEQ ID NO: 2075644 - RNA, 19 nt, Homo sapiens
  misc_RNA (1)...(19): siRNA sense strand
ucaguaagcgagagaaagg

SEQ ID NO: 2075645 - RNA, 19 nt, Homo sapiens
  misc_RNA (1)...(19): siRNA sense strand
cagaugcuccagaggaaau

SEQ ID NO: 2075646 - RNA, 19 nt, Homo sapiens
  misc_RNA (1)...(19): siRNA sense strand
gccagaguuugaaccaagu

SEQ ID NO: 2075647 - RNA, 19 nt, Homo sapiens
  misc_RNA (1)...(19): siRNA sense strand
aguucaagcuggugccuau

SEQ ID NO: 2075648 - RNA, 19 nt, Homo sapiens
  misc_RNA (1)...(19): siRNA sense strand
ucagggaagaaaucuguga

SEQ ID NO: 2075649 - RNA, 19 nt, Homo sapiens
  misc_RNA (1)...(19): siRNA sense strand
gaaugacccacuucguuuu

SEQ ID NO: 2075650 - RNA, 19 nt, Homo sapiens
  misc_RNA (1)...(19): siRNA sense strand
gaaaggacggcgaaaacga

SEQ ID NO: 2075651 - RNA, 19 nt, Homo sapiens
  misc_RNA (1)...(19): siRNA sense strand
cucagaugcuccagaggaa

SEQ ID NO: 2075652 - RNA, 19 nt, Homo sapiens
  misc_RNA (1)...(19): siRNA sense strand
aaggagcaguacucagaug

SEQ ID NO: 2075653 - RNA, 19 nt, Homo sapiens
  misc_RNA (1)...(19): siRNA sense strand
gaagcugagcgggagaaga

SEQ ID NO: 2075654 - RNA, 19 nt, Homo sapiens
  misc_RNA (1)...(19): siRNA sense strand
agggagugucuaagaaaua

SEQ ID NO: 2075655 - RNA, 19 nt, Homo sapiens
  misc_RNA (1)...(19): siRNA sense strand
gcuggugccuauccuacag

SEQ ID NO: 2075656 - RNA, 19 nt, Homo sapiens
  misc_RNA (1)...(19): siRNA sense strand
uguaacugcacaagugaaa

SEQ ID NO: 2075657 - RNA, 19 nt, Homo sapiens
  misc_RNA (1)...(19): siRNA sense strand
ugucaugagcucacaacuu

SEQ ID NO: 2075658 - RNA, 19 nt, Homo sapiens
  misc_RNA (1)...(19): siRNA sense strand
gcaagugauggcuguaacu

SEQ ID NO: 2075659 - RNA, 19 nt, Homo sapiens
  misc_RNA (1)...(19): siRNA sense strand
ugucauucgugaacuuaag

SEQ ID NO: 2075660 - RNA, 19 nt, Homo sapiens
  misc_RNA (1)...(19): siRNA sense strand
agcagaagaugaccagucu

SEQ ID NO: 2075661 - RNA, 19 nt, Homo sapiens
  misc_RNA (1)...(19): siRNA sense strand
caauaugaugagcaaguug

SEQ ID NO: 2075662 - RNA, 19 nt, Homo sapiens
  misc_RNA (1)...(19): siRNA sense strand
acacaggauuaacuaugag

SEQ ID NO: 2075663 - RNA, 19 nt, Homo sapiens
  misc_RNA (1)...(19): siRNA sense strand
gggagaagaagcgucuaga

SEQ ID NO: 2075664 - RNA, 19 nt, Homo sapiens
  misc_RNA (1)...(19): siRNA sense strand
caaaagcugaaguaucaaa

SEQ ID NO: 2075665 - RNA, 19 nt, Homo sapiens
  misc_RNA (1)...(19): siRNA sense strand
auuaagaagcggaagaaga

SEQ ID NO: 2075666 - RNA, 19 nt, Homo sapiens
  misc_RNA (1)...(19): siRNA sense strand
uucauucccuuacacacuu

SEQ ID NO: 2075667 - RNA, 19 nt, Homo sapiens
  misc_RNA (1)...(19): siRNA sense strand
caagcuggugccuauccua

SEQ ID NO: 2075668 - RNA, 19 nt, Homo sapiens
  misc_RNA (1)...(19): siRNA sense strand
caacuuagcuccuuucaau

SEQ ID NO: 2075669 - RNA, 19 nt, Homo sapiens
  misc_RNA (1)...(19): siRNA sense strand
gggaaacucuucuccaaua

SEQ ID NO: 2075670 - RNA, 19 nt, Homo sapiens
  misc_RNA (1)...(19): siRNA sense strand
gcaaagagccugaagagaa

SEQ ID NO: 2075671 - RNA, 19 nt, Homo sapiens
  misc_RNA (1)...(19): siRNA sense strand
caaguucaaccucuuauua

SEQ ID NO: 2075672 - RNA, 19 nt, Homo sapiens
  misc_RNA (1)...(19): siRNA sense strand
ucaagaaccucaaagcauu

SEQ ID NO: 2075673 - RNA, 19 nt, Homo sapiens
  misc_RNA (1)...(19): siRNA sense strand
caaagaggaagcaagauua

SEQ ID NO: 2075674 - RNA, 19 nt, Homo sapiens
  misc_RNA (1)...(19): siRNA sense strand
gaagcaagauuaccucaca

SEQ ID NO: 2075675 - RNA, 19 nt, Homo sapiens
  misc_RNA (1)...(19): siRNA sense strand
gagcccagcugaagaguga

SEQ ID NO: 2075676 - RNA, 19 nt, Homo sapiens
  misc_RNA (1)...(19): siRNA sense strand
gaagaaggcugccauugac

SEQ ID NO: 2075677 - RNA, 19 nt, Homo sapiens
  misc_RNA (1)...(19): siRNA sense strand
caacagcucuauggcauga

SEQ ID NO: 2075678 - RNA, 19 nt, Homo sapiens
  misc_RNA (1)...(19): siRNA sense strand
gaaccaagacugauuccaa

SEQ ID NO: 2075679 - RNA, 19 nt, Homo sapiens
  misc_RNA (1)...(19): siRNA sense strand
caaagagccugaagagaag

SEQ ID NO: 2075680 - RNA, 19 nt, Homo sapiens
  misc_RNA (1)...(19): siRNA sense strand
ugacaccaguggcuucaua

SEQ ID NO: 2075681 - RNA, 19 nt, Homo sapiens
  misc_RNA (1)...(19): siRNA sense strand
gggacaaggucuccaguga

SEQ ID NO: 2075682 - RNA, 19 nt, Homo sapiens
  misc_RNA (1)...(19): siRNA sense strand
caagacugauuccaagauu

SEQ ID NO: 2075683 - RNA, 19 nt, Homo sapiens
  misc_RNA (1)...(19): siRNA sense strand
ggaaacucuucuccaauau

SEQ ID NO: 2075684 - RNA, 19 nt, Homo sapiens
  misc_RNA (1)...(19): siRNA sense strand
caugaaagccugcuaugaa

SEQ ID NO: 2075685 - RNA, 19 nt, Homo sapiens
  misc_RNA (1)...(19): siRNA sense strand
ccacagacaagcccuuuaa

SEQ ID NO: 2075686 - RNA, 19 nt, Homo sapiens
  misc_RNA (1)...(19): siRNA sense strand
ccucuacacuucuagcuuu

SEQ ID NO: 2075687 - RNA, 19 nt, Homo sapiens
  misc_RNA (1)...(19): siRNA sense strand
ccaauaugcuuauccucaa

SEQ ID NO: 2075688 - RNA, 19 nt, Homo sapiens
  misc_RNA (1)...(19): siRNA sense strand
cuacacuucuagcuuuaua

SEQ ID NO: 2075689 - RNA, 19 nt, Homo sapiens
  misc_RNA (1)...(19): siRNA sense strand
ugaagaaggcugccauuga

SEQ ID NO: 2075690 - RNA, 19 nt, Homo sapiens
  misc_RNA (1)...(19): siRNA sense strand
gguggaagaagaagaagua

SEQ ID NO: 2075691 - RNA, 19 nt, Homo sapiens
  misc_RNA (1)...(19): siRNA sense strand
ccaaagcccuucuagaaaa

SEQ ID NO: 2075692 - RNA, 19 nt, Homo sapiens
  misc_RNA (1)...(19): siRNA sense strand
ggaagaagaagaaguagag

SEQ ID NO: 2075693 - RNA, 19 nt, Homo sapiens
  misc_RNA (1)...(19): siRNA sense strand
cccaagcccugcagucuuu

SEQ ID NO: 2075694 - RNA, 19 nt, Homo sapiens
  misc_RNA (1)...(19): siRNA sense strand
ccaaagaggaagcaagauu

SEQ ID NO: 2075695 - RNA, 19 nt, Homo sapiens
  misc_RNA (1)...(19): siRNA sense strand
ccaaugaugcccucaagaa

SEQ ID NO: 2075696 - RNA, 19 nt, Homo sapiens
  misc_RNA (1)...(19): siRNA sense strand
aggaagagguggaagaaga

SEQ ID NO: 2075697 - RNA, 19 nt, Homo sapiens
  misc_RNA (1)...(19): siRNA sense strand
caggagaucugagugauuc

SEQ ID NO: 2075698 - RNA, 19 nt, Homo sapiens
  misc_RNA (1)...(19): siRNA sense strand
ggaagagggcccagaggaa

SEQ ID NO: 2075699 - RNA, 19 nt, Homo sapiens
  misc_RNA (1)...(19): siRNA sense strand
ggagaggaaaggccaguuu

SEQ ID NO: 2075700 - RNA, 19 nt, Homo sapiens
  misc_RNA (1)...(19): siRNA sense strand
agagaaggcuacuccauca

SEQ ID NO: 2075701 - RNA, 19 nt, Homo sapiens
  misc_RNA (1)...(19): siRNA sense strand
ggaagagguggaagaagaa

SEQ ID NO: 2075702 - RNA, 19 nt, Homo sapiens
  misc_RNA (1)...(19): siRNA sense strand
gccaaagcccuucuagaaa

SEQ ID NO: 2075703 - RNA, 19 nt, Homo sapiens
  misc_RNA (1)...(19): siRNA sense strand
ggaggaagaggcagagaga

SEQ ID NO: 2075704 - RNA, 19 nt, Homo sapiens
  misc_RNA (1)...(19): siRNA sense strand
ugcccaagcugaagacgua

SEQ ID NO: 2075705 - RNA, 19 nt, Homo sapiens
  misc_RNA (1)...(19): siRNA sense strand
gugggaaacucuucuccaa

SEQ ID NO: 2075706 - RNA, 19 nt, Homo sapiens
  misc_RNA (1)...(19): siRNA sense strand
caaguaugauuucuauguc

SEQ ID NO: 2075707 - RNA, 19 nt, Homo sapiens
  misc_RNA (1)...(19): siRNA sense strand
cagacaagcccuuuaagug

SEQ ID NO: 2075708 - RNA, 19 nt, Homo sapiens
  misc_RNA (1)...(19): siRNA sense strand
ccaagaagagcccaaggaa

SEQ ID NO: 2075709 - RNA, 19 nt, Homo sapiens
  misc_RNA (1)...(19): siRNA sense strand
ucaagaagugcuaugauga

SEQ ID NO: 2075710 - RNA, 19 nt, Homo sapiens
  misc_RNA (1)...(19): siRNA sense strand
gaaacucuucuccaauaug

SEQ ID NO: 2075711 - RNA, 19 nt, Homo sapiens
  misc_RNA (1)...(19): siRNA sense strand
caccauggcugaggaggaa

SEQ ID NO: 2075712 - RNA, 19 nt, Homo sapiens
  misc_RNA (1)...(19): siRNA sense strand
gcagccaccucaccaaugc

SEQ ID NO: 2075713 - RNA, 19 nt, Homo sapiens
  misc_RNA (1)...(19): siRNA sense strand
gaagagaaggcuacuccau

SEQ ID NO: 2075714 - RNA, 19 nt, Homo sapiens
  misc_RNA (1)...(19): siRNA sense strand
ggaggaagagguggaagaa

SEQ ID NO: 2075715 - RNA, 19 nt, Homo sapiens
  misc_RNA (1)...(19): siRNA sense strand
gccacuuucuccuguguuu

SEQ ID NO: 2075716 - RNA, 19 nt, Homo sapiens
  misc_RNA (1)...(19): siRNA sense strand
ccugaugggucucuggauu

SEQ ID NO: 2075717 - RNA, 19 nt, Homo sapiens
  misc_RNA (1)...(19): siRNA sense strand
guugguacaugcaggauuc

SEQ ID NO: 2075718 - RNA, 19 nt, Homo sapiens
  misc_RNA (1)...(19): siRNA sense strand
caucuugccugagcagcua

SEQ ID NO: 2075719 - RNA, 19 nt, Homo sapiens
  misc_RNA (1)...(19): siRNA sense strand
ggaaccaccuaaagcuucu

SEQ ID NO: 2075720 - RNA, 19 nt, Homo sapiens
  misc_RNA (1)...(19): siRNA sense strand
gcugcucaguuucgaaaga

SEQ ID NO: 2075721 - RNA, 19 nt, Homo sapiens
  misc_RNA (1)...(19): siRNA sense strand
agccaaagcccuucuagaa

SEQ ID NO: 2075722 - RNA, 19 nt, Homo sapiens
  misc_RNA (1)...(19): siRNA sense strand
gaucaugaaagccugcuau

SEQ ID NO: 2075723 - RNA, 19 nt, Homo sapiens
  misc_RNA (1)...(19): siRNA sense strand
gcaggagaucugagugauu

SEQ ID NO: 2075724 - RNA, 19 nt, Homo sapiens
  misc_RNA (1)...(19): siRNA sense strand
ccguuaugcugcucaguuu

SEQ ID NO: 2075725 - RNA, 19 nt, Homo sapiens
  misc_RNA (1)...(19): siRNA sense strand
gcuuugagcuggugaucca

SEQ ID NO: 2075726 - RNA, 19 nt, Homo sapiens
  misc_RNA (1)...(19): siRNA sense strand
ggaggaacagggccuugaa

SEQ ID NO: 2075727 - RNA, 19 nt, Homo sapiens
  misc_RNA (1)...(19): siRNA sense strand
gcccugcagucuuucuuug

SEQ ID NO: 2075728 - RNA, 19 nt, Homo sapiens
  misc_RNA (1)...(19): siRNA sense strand
gacacuggcccauagaaga

SEQ ID NO: 2075729 - RNA, 19 nt, Homo sapiens
  misc_RNA (1)...(19): siRNA sense strand
uugaagcccugagccguua

SEQ ID NO: 2075730 - RNA, 19 nt, Homo sapiens
  misc_RNA (1)...(19): siRNA sense strand
auugugaugucaaguauga

SEQ ID NO: 2075731 - RNA, 19 nt, Homo sapiens
  misc_RNA (1)...(19): siRNA sense strand
gagauccuucugcuucuuu

SEQ ID NO: 2075732 - RNA, 19 nt, Homo sapiens
  misc_RNA (1)...(19): siRNA sense strand
agacugauuccaagauuga

SEQ ID NO: 2075733 - RNA, 19 nt, Homo sapiens
  misc_RNA (1)...(19): siRNA sense strand
gacuaccucuacacuucua

SEQ ID NO: 2075734 - RNA, 19 nt, Homo sapiens
  misc_RNA (1)...(19): siRNA sense strand
caguugaggucccagacaa

SEQ ID NO: 2075735 - RNA, 19 nt, Homo sapiens
  misc_RNA (1)...(19): siRNA sense strand
cucaagaagugcuaugaug

SEQ ID NO: 2075736 - RNA, 19 nt, Homo sapiens
  misc_RNA (1)...(19): siRNA sense strand
ccgaaucacugcuuaagcu

SEQ ID NO: 2075737 - RNA, 19 nt, Homo sapiens
  misc_RNA (1)...(19): siRNA sense strand
gagaagaagggcccugaca

SEQ ID NO: 2075738 - RNA, 19 nt, Homo sapiens
  misc_RNA (1)...(19): siRNA sense strand
gugcccgaaucacugcuua

SEQ ID NO: 2075739 - RNA, 19 nt, Homo sapiens
  misc_RNA (1)...(19): siRNA sense strand
gaaugcucgugccaaggaa

SEQ ID NO: 2075740 - RNA, 19 nt, Homo sapiens
  misc_RNA (1)...(19): siRNA sense strand
gcccaaguucaaccucuua

SEQ ID NO: 2075741 - RNA, 19 nt, Homo sapiens
  misc_RNA (1)...(19): siRNA sense strand
aaacucuucuccaauaugc

SEQ ID NO: 2075742 - RNA, 19 nt, Homo sapiens
  misc_RNA (1)...(19): siRNA sense strand
acgacuaccucuacacuuc

SEQ ID NO: 2075743 - RNA, 19 nt, Homo sapiens
  misc_RNA (1)...(19): siRNA sense strand
agugcaagauggcauuuga

SEQ ID NO: 2075744 - RNA, 19 nt, Homo sapiens
  misc_RNA (1)...(19): siRNA sense strand
caagaaccucaaagcauug

SEQ ID NO: 2075745 - RNA, 19 nt, Homo sapiens
  misc_RNA (1)...(19): siRNA sense strand
gcugucugcacccacauua

SEQ ID NO: 2075746 - RNA, 19 nt, Homo sapiens
  misc_RNA (1)...(19): siRNA sense strand
ccacagcaggcaccacuga

SEQ ID NO: 2075747 - RNA, 19 nt, Homo sapiens
  misc_RNA (1)...(19): siRNA sense strand
cuauugugaugucaaguau

SEQ ID NO: 2075748 - RNA, 19 nt, Homo sapiens
  misc_RNA (1)...(19): siRNA sense strand
ccuuggaccugcaccgauu

SEQ ID NO: 2075749 - RNA, 19 nt, Homo sapiens
  misc_RNA (1)...(19): siRNA sense strand
ggaaaagaaggccaaacua

SEQ ID NO: 2075750 - RNA, 19 nt, Homo sapiens
  misc_RNA (1)...(19): siRNA sense strand
gaggaaccaccuaaagcuu

SEQ ID NO: 2075751 - RNA, 19 nt, Homo sapiens
  misc_RNA (1)...(19): siRNA sense strand
gcccauagaagaggaagaa

SEQ ID NO: 2075752 - RNA, 19 nt, Homo sapiens
  misc_RNA (1)...(19): siRNA sense strand
ccagacaaacccucaggaa

SEQ ID NO: 2075753 - RNA, 19 nt, Homo sapiens
  misc_RNA (1)...(19): siRNA sense strand
gaugaagaaggcugccauu

SEQ ID NO: 2075754 - RNA, 19 nt, Homo sapiens
  misc_RNA (1)...(19): siRNA sense strand
aaacuacgacuaccucuac

SEQ ID NO: 2075755 - RNA, 19 nt, Homo sapiens
  misc_RNA (1)...(19): siRNA sense strand
gcccagaggaaccaccuaa

SEQ ID NO: 2075756 - RNA, 19 nt, Homo sapiens
  misc_RNA (1)...(19): siRNA sense strand
caacccaacacgcaagaug

SEQ ID NO: 2075757 - RNA, 19 nt, Homo sapiens
  misc_RNA (1)...(19): siRNA sense strand
ccaaggaaggcgagacaga

SEQ ID NO: 2075758 - RNA, 19 nt, Homo sapiens
  misc_RNA (1)...(19): siRNA sense strand
uaagcccucuggacaaugg

SEQ ID NO: 2075759 - RNA, 19 nt, Homo sapiens
  misc_RNA (1)...(19): siRNA sense strand
auaagugcacuguguguaa

SEQ ID NO: 2075760 - RNA, 19 nt, Homo sapiens
  misc_RNA (1)...(19): siRNA sense strand
ccuauugugaugucaagua

SEQ ID NO: 2075761 - RNA, 19 nt, Homo sapiens
  misc_RNA (1)...(19): siRNA sense strand
gaaaagaaggccaaacuac

SEQ ID NO: 2075762 - RNA, 19 nt, Homo sapiens
  misc_RNA (1)...(19): siRNA sense strand
ccagaacgcagccaagaag

SEQ ID NO: 2075763 - RNA, 19 nt, Homo sapiens
  misc_RNA (1)...(19): siRNA sense strand
uaagugcacuguguguaag

SEQ ID NO: 2075764 - RNA, 19 nt, Homo sapiens
  misc_RNA (1)...(19): siRNA sense strand
caauaugcuuauccucaag

SEQ ID NO: 2075765 - RNA, 19 nt, Homo sapiens
  misc_RNA (1)...(19): siRNA sense strand
gaaagccugcuaugaagcu

SEQ ID NO: 2075766 - RNA, 19 nt, Homo sapiens
  misc_RNA (1)...(19): siRNA sense strand
ggacacuggcccauagaag

SEQ ID NO: 2075767 - RNA, 19 nt, Homo sapiens
  misc_RNA (1)...(19): siRNA sense strand
ggaagcuggugagguugau

SEQ ID NO: 2075768 - RNA, 19 nt, Homo sapiens
  misc_RNA (1)...(19): siRNA sense strand
gcaagagccgcuggacgua

SEQ ID NO: 2075769 - RNA, 19 nt, Homo sapiens
  misc_RNA (1)...(19): siRNA sense strand
gcgaggagggcaaguacaa

SEQ ID NO: 2075770 - RNA, 19 nt, Homo sapiens
  misc_RNA (1)...(19): siRNA sense strand
gggcaagguuaaggagaag

SEQ ID NO: 2075771 - RNA, 19 nt, Homo sapiens
  misc_RNA (1)...(19): siRNA sense strand
gcuacggcacugagaccua

SEQ ID NO: 2075772 - RNA, 19 nt, Homo sapiens
  misc_RNA (1)...(19): siRNA sense strand
ggggcaagguuaaggagaa

SEQ ID NO: 2075773 - RNA, 19 nt, Homo sapiens
  misc_RNA (1)...(19): siRNA sense strand
gcaagguuaaggagaaggu

SEQ ID NO: 2075774 - RNA, 19 nt, Homo sapiens
  misc_RNA (1)...(19): siRNA sense strand
agagugugcccuaccauca

SEQ ID NO: 2075775 - RNA, 19 nt, Homo sapiens
  misc_RNA (1)...(19): siRNA sense strand
gcaagagccgcuggacgua

SEQ ID NO: 2075776 - RNA, 19 nt, Homo sapiens
  misc_RNA (1)...(19): siRNA sense strand
gcgaggagggcaaguacaa

SEQ ID NO: 2075777 - RNA, 19 nt, Homo sapiens
  misc_RNA (1)...(19): siRNA sense strand
gggcaagguuaaggagaag

SEQ ID NO: 2075778 - RNA, 19 nt, Homo sapiens
  misc_RNA (1)...(19): siRNA sense strand
gcuacggcacugagaccua

SEQ ID NO: 2075779 - RNA, 19 nt, Homo sapiens
  misc_RNA (1)...(19): siRNA sense strand
ggggcaagguuaaggagaa

SEQ ID NO: 2075780 - RNA, 19 nt, Homo sapiens
  misc_RNA (1)...(19): siRNA sense strand
gcaagguuaaggagaaggu

SEQ ID NO: 2075781 - RNA, 19 nt, Homo sapiens
  misc_RNA (1)...(19): siRNA sense strand
agagugugcccuaccauca

SEQ ID NO: 2075782 - RNA, 19 nt, Homo sapiens
  misc_RNA (1)...(19): siRNA sense strand
gcaggagaauggauaagua

SEQ ID NO: 2075783 - RNA, 19 nt, Homo sapiens
  misc_RNA (1)...(19): siRNA sense strand
caaacaaacucuguacauu

SEQ ID NO: 2075784 - RNA, 19 nt, Homo sapiens
  misc_RNA (1)...(19): siRNA sense strand
gauaaguaguugugguaua

SEQ ID NO: 2075785 - RNA, 19 nt, Homo sapiens
  misc_RNA (1)...(19): siRNA sense strand
gaaacaaccuaaauaucca

SEQ ID NO: 2075786 - RNA, 19 nt, Homo sapiens
  misc_RNA (1)...(19): siRNA sense strand
gagaauggauaaguaguug

SEQ ID NO: 2075787 - RNA, 19 nt, Homo sapiens
  misc_RNA (1)...(19): siRNA sense strand
ccacaguuauaaugaauga

SEQ ID NO: 2075788 - RNA, 19 nt, Homo sapiens
  misc_RNA (1)...(19): siRNA sense strand
ggaaacaaccuaaauaucc

SEQ ID NO: 2075789 - RNA, 19 nt, Homo sapiens
  misc_RNA (1)...(19): siRNA sense strand
caaccuaaauauccaacug

SEQ ID NO: 2075790 - RNA, 19 nt, Homo sapiens
  misc_RNA (1)...(19): siRNA sense strand
ggagaauggauaaguaguu

SEQ ID NO: 2075791 - RNA, 19 nt, Homo sapiens
  misc_RNA (1)...(19): siRNA sense strand
gaauggauaaguaguugug

SEQ ID NO: 2075792 - RNA, 19 nt, Homo sapiens
  misc_RNA (1)...(19): siRNA sense strand
cagcacugauaauaaugaa

SEQ ID NO: 2075793 - RNA, 19 nt, Homo sapiens
  misc_RNA (1)...(19): siRNA sense strand
ccaaacaaacucuguacau

SEQ ID NO: 2075794 - RNA, 19 nt, Homo sapiens
  misc_RNA (1)...(19): siRNA sense strand
uggauaaguaguuguggua

SEQ ID NO: 2075795 - RNA, 19 nt, Homo sapiens
  misc_RNA (1)...(19): siRNA sense strand
ugccacaguuauaaugaau

SEQ ID NO: 2075796 - RNA, 19 nt, Homo sapiens
  misc_RNA (1)...(19): siRNA sense strand
ggauaaguaguugugguau

SEQ ID NO: 2075797 - RNA, 19 nt, Homo sapiens
  misc_RNA (1)...(19): siRNA sense strand
uggaaacaaccuaaauauc

SEQ ID NO: 2075798 - RNA, 19 nt, Homo sapiens
  misc_RNA (1)...(19): siRNA sense strand
caggagaauggauaaguag

SEQ ID NO: 2075799 - RNA, 19 nt, Homo sapiens
  misc_RNA (1)...(19): siRNA sense strand
gauccuagccauaacauaa

SEQ ID NO: 2075800 - RNA, 19 nt, Homo sapiens
  misc_RNA (1)...(19): siRNA sense strand
gaugucagaugccugguaa

SEQ ID NO: 2075801 - RNA, 19 nt, Homo sapiens
  misc_RNA (1)...(19): siRNA sense strand
gguguucaguugcugcuua

SEQ ID NO: 2075802 - RNA, 19 nt, Homo sapiens
  misc_RNA (1)...(19): siRNA sense strand
gcaguguuguuuauacuuc

SEQ ID NO: 2075803 - RNA, 19 nt, Homo sapiens
  misc_RNA (1)...(19): siRNA sense strand
gcacaccugcuaccuagaa

SEQ ID NO: 2075804 - RNA, 19 nt, Homo sapiens
  misc_RNA (1)...(19): siRNA sense strand
caagugaacagaugucaga

SEQ ID NO: 2075805 - RNA, 19 nt, Homo sapiens
  misc_RNA (1)...(19): siRNA sense strand
gauuggauccuagccauaa

SEQ ID NO: 2075806 - RNA, 19 nt, Homo sapiens
  misc_RNA (1)...(19): siRNA sense strand
gguaauuacauccaaaguu

SEQ ID NO: 2075807 - RNA, 19 nt, Homo sapiens
  misc_RNA (1)...(19): siRNA sense strand
agaaggugguguucaguug

SEQ ID NO: 2075808 - RNA, 19 nt, Homo sapiens
  misc_RNA (1)...(19): siRNA sense strand
gagaugcaguggauaacag

SEQ ID NO: 2075809 - RNA, 19 nt, Homo sapiens
  misc_RNA (1)...(19): siRNA sense strand
gagaaggugguguucaguu

SEQ ID NO: 2075810 - RNA, 19 nt, Homo sapiens
  misc_RNA (1)...(19): siRNA sense strand
uaaggguaauuacauccaa

SEQ ID NO: 2075811 - RNA, 19 nt, Homo sapiens
  misc_RNA (1)...(19): siRNA sense strand
uaaauuugaggacuaccua

SEQ ID NO: 2075812 - RNA, 19 nt, Homo sapiens
  misc_RNA (1)...(19): siRNA sense strand
cagagaaggugguguucag

SEQ ID NO: 2075813 - RNA, 19 nt, Homo sapiens
  misc_RNA (1)...(19): siRNA sense strand
gaguaucgcauuugagaag

SEQ ID NO: 2075814 - RNA, 19 nt, Homo sapiens
  misc_RNA (1)...(19): siRNA sense strand
aaucgcaagugaacagaug

SEQ ID NO: 2075815 - RNA, 19 nt, Homo sapiens
  misc_RNA (1)...(19): siRNA sense strand
cuaccuaaaugcagaaucg

SEQ ID NO: 2075816 - RNA, 19 nt, Homo sapiens
  misc_RNA (1)...(19): siRNA sense strand
gcaguggauaacaguaauu

SEQ ID NO: 2075817 - RNA, 19 nt, Homo sapiens
  misc_RNA (1)...(19): siRNA sense strand
ugcaacaccucaacagcaa

SEQ ID NO: 2075818 - RNA, 19 nt, Homo sapiens
  misc_RNA (1)...(19): siRNA sense strand
ggugcaguguuguuuauac

SEQ ID NO: 2075819 - RNA, 19 nt, Homo sapiens
  misc_RNA (1)...(19): siRNA sense strand
uguggaguaucgcauuuga

SEQ ID NO: 2075820 - RNA, 19 nt, Homo sapiens
  misc_RNA (1)...(19): siRNA sense strand
uuugaggacuaccuaaaug

SEQ ID NO: 2075821 - RNA, 19 nt, Homo sapiens
  misc_RNA (1)...(19): siRNA sense strand
caucugagccuggguacug

SEQ ID NO: 2075822 - RNA, 19 nt, Homo sapiens
  misc_RNA (1)...(19): siRNA sense strand
uggaguaucgcauuugaga

SEQ ID NO: 2075823 - RNA, 19 nt, Homo sapiens
  misc_RNA (1)...(19): siRNA sense strand
aaucagagaaggugguguu

SEQ ID NO: 2075824 - RNA, 19 nt, Homo sapiens
  misc_RNA (1)...(19): siRNA sense strand
cagggugcaguguuguuua

SEQ ID NO: 2075825 - RNA, 19 nt, Homo sapiens
  misc_RNA (1)...(19): siRNA sense strand
ggacuaccuaaaugcagaa

SEQ ID NO: 2075826 - RNA, 19 nt, Homo sapiens
  misc_RNA (1)...(19): siRNA sense strand
ggagaugcaguggauaaca

SEQ ID NO: 2075827 - RNA, 19 nt, Homo sapiens
  misc_RNA (1)...(19): siRNA sense strand
ucaguugcugcuuacaaua

SEQ ID NO: 2075828 - RNA, 19 nt, Homo sapiens
  misc_RNA (1)...(19): siRNA sense strand
aaggguaauuacauccaaa

SEQ ID NO: 2075829 - RNA, 19 nt, Homo sapiens
  misc_RNA (1)...(19): siRNA sense strand
aaugcagaaucgcaaguga

SEQ ID NO: 2075830 - RNA, 19 nt, Homo sapiens
  misc_RNA (1)...(19): siRNA sense strand
ggaguaucgcauuugagaa

SEQ ID NO: 2075831 - RNA, 19 nt, Homo sapiens
  misc_RNA (1)...(19): siRNA sense strand
gcauuugagaagaggauug

SEQ ID NO: 2075832 - RNA, 19 nt, Homo sapiens
  misc_RNA (1)...(19): siRNA sense strand
gugcaguguuguuuauacu

SEQ ID NO: 2075833 - RNA, 19 nt, Homo sapiens
  misc_RNA (1)...(19): siRNA sense strand
acuguggaguaucgcauuu

SEQ ID NO: 2075834 - RNA, 19 nt, Homo sapiens
  misc_RNA (1)...(19): siRNA sense strand
guucaguugcugcuuacaa

SEQ ID NO: 2075835 - RNA, 19 nt, Homo sapiens
  misc_RNA (1)...(19): siRNA sense strand
cuaccuagaacuugguuuc

SEQ ID NO: 2075836 - RNA, 19 nt, Homo sapiens
  misc_RNA (1)...(19): siRNA sense strand
ggauccuagccauaacaua

SEQ ID NO: 2075837 - RNA, 19 nt, Homo sapiens
  misc_RNA (1)...(19): siRNA sense strand
agggugcaguguuguuuau

SEQ ID NO: 2075838 - RNA, 19 nt, Homo sapiens
  misc_RNA (1)...(19): siRNA sense strand
cugcuuacaauaguugaua

SEQ ID NO: 2075839 - RNA, 19 nt, Homo sapiens
  misc_RNA (1)...(19): siRNA sense strand
gagcugcaacaccucaaca

SEQ ID NO: 2075840 - RNA, 19 nt, Homo sapiens
  misc_RNA (1)...(19): siRNA sense strand
auacuucauugcuccuuca

SEQ ID NO: 2075841 - RNA, 19 nt, Homo sapiens
  misc_RNA (1)...(19): siRNA sense strand
uucaguugcugcuuacaau

SEQ ID NO: 2075842 - RNA, 19 nt, Homo sapiens
  misc_RNA (1)...(19): siRNA sense strand
gaugcaguggauaacagua

SEQ ID NO: 2075843 - RNA, 19 nt, Homo sapiens
  misc_RNA (1)...(19): siRNA sense strand
gaaccuacccuuucucuua

SEQ ID NO: 2075844 - RNA, 19 nt, Homo sapiens
  misc_RNA (1)...(19): siRNA sense strand
gaaaugcuguuaguuguua

SEQ ID NO: 2075845 - RNA, 19 nt, Homo sapiens
  misc_RNA (1)...(19): siRNA sense strand
cagaagcgcuguauugaua

SEQ ID NO: 2075846 - RNA, 19 nt, Homo sapiens
  misc_RNA (1)...(19): siRNA sense strand
ggagacagaugagagauua

SEQ ID NO: 2075847 - RNA, 19 nt, Homo sapiens
  misc_RNA (1)...(19): siRNA sense strand
ggaggaaguucuggaauua

SEQ ID NO: 2075848 - RNA, 19 nt, Homo sapiens
  misc_RNA (1)...(19): siRNA sense strand
gaaugugucuguaggauaa

SEQ ID NO: 2075849 - RNA, 19 nt, Homo sapiens
  misc_RNA (1)...(19): siRNA sense strand
gaucuuagcugugcuuaaa

SEQ ID NO: 2075850 - RNA, 19 nt, Homo sapiens
  misc_RNA (1)...(19): siRNA sense strand
gcagaggucuacauaauug

SEQ ID NO: 2075851 - RNA, 19 nt, Homo sapiens
  misc_RNA (1)...(19): siRNA sense strand
gaacagcuccugcuuggua

SEQ ID NO: 2075852 - RNA, 19 nt, Homo sapiens
  misc_RNA (1)...(19): siRNA sense strand
ggacuuggguauagaauug

SEQ ID NO: 2075853 - RNA, 19 nt, Homo sapiens
  misc_RNA (1)...(19): siRNA sense strand
uaacucagcuuucuucaau

SEQ ID NO: 2075854 - RNA, 19 nt, Homo sapiens
  misc_RNA (1)...(19): siRNA sense strand
gaaggaagcaucucaauuc

SEQ ID NO: 2075855 - RNA, 19 nt, Homo sapiens
  misc_RNA (1)...(19): siRNA sense strand
gaggaugucuacacugaua

SEQ ID NO: 2075856 - RNA, 19 nt, Homo sapiens
  misc_RNA (1)...(19): siRNA sense strand
ucacagggauguuuauaaa

SEQ ID NO: 2075857 - RNA, 19 nt, Homo sapiens
  misc_RNA (1)...(19): siRNA sense strand
gcggaagucuugaauauga

SEQ ID NO: 2075858 - RNA, 19 nt, Homo sapiens
  misc_RNA (1)...(19): siRNA sense strand
gaaggaaaccucugugcua

SEQ ID NO: 2075859 - RNA, 19 nt, Homo sapiens
  misc_RNA (1)...(19): siRNA sense strand
ggaauuguguguaugcauu

SEQ ID NO: 2075860 - RNA, 19 nt, Homo sapiens
  misc_RNA (1)...(19): siRNA sense strand
gcacuuauccuccaugcua

SEQ ID NO: 2075861 - RNA, 19 nt, Homo sapiens
  misc_RNA (1)...(19): siRNA sense strand
gaccauagauuuauugaag

SEQ ID NO: 2075862 - RNA, 19 nt, Homo sapiens
  misc_RNA (1)...(19): siRNA sense strand
gggcagaggucuacauaau

SEQ ID NO: 2075863 - RNA, 19 nt, Homo sapiens
  misc_RNA (1)...(19): siRNA sense strand
gauaaaagauccuguggua

SEQ ID NO: 2075864 - RNA, 19 nt, Homo sapiens
  misc_RNA (1)...(19): siRNA sense strand
gcaagcacuucuagaugua

SEQ ID NO: 2075865 - RNA, 19 nt, Homo sapiens
  misc_RNA (1)...(19): siRNA sense strand
cuaaagaucuagaaacaga

SEQ ID NO: 2075866 - RNA, 19 nt, Homo sapiens
  misc_RNA (1)...(19): siRNA sense strand
gauagcaaguggaguugua

SEQ ID NO: 2075867 - RNA, 19 nt, Homo sapiens
  misc_RNA (1)...(19): siRNA sense strand
guacggaccuggacagugu

SEQ ID NO: 2075868 - RNA, 19 nt, Homo sapiens
  misc_RNA (1)...(19): siRNA sense strand
uaaagcuacucuugagaua

SEQ ID NO: 2075869 - RNA, 19 nt, Homo sapiens
  misc_RNA (1)...(19): siRNA sense strand
gaauuugccucccaacuuc

SEQ ID NO: 2075870 - RNA, 19 nt, Homo sapiens
  misc_RNA (1)...(19): siRNA sense strand
gagagauuaugccaugaua

SEQ ID NO: 2075871 - RNA, 19 nt, Homo sapiens
  misc_RNA (1)...(19): siRNA sense strand
gcauuacccuccuaccuaa

SEQ ID NO: 2075872 - RNA, 19 nt, Homo sapiens
  misc_RNA (1)...(19): siRNA sense strand
gauacuaaguccuuuccua

SEQ ID NO: 2075873 - RNA, 19 nt, Homo sapiens
  misc_RNA (1)...(19): siRNA sense strand
gaaacucaaaggcuucuua

SEQ ID NO: 2075874 - RNA, 19 nt, Homo sapiens
  misc_RNA (1)...(19): siRNA sense strand
ggaaaaggcaagauuauua

SEQ ID NO: 2075875 - RNA, 19 nt, Homo sapiens
  misc_RNA (1)...(19): siRNA sense strand
caacuuccauaaugagaaa

SEQ ID NO: 2075876 - RNA, 19 nt, Homo sapiens
  misc_RNA (1)...(19): siRNA sense strand
cgaagugccuuaacaacaa

SEQ ID NO: 2075877 - RNA, 19 nt, Homo sapiens
  misc_RNA (1)...(19): siRNA sense strand
gaagugguaaggcagauua

SEQ ID NO: 2075878 - RNA, 19 nt, Homo sapiens
  misc_RNA (1)...(19): siRNA sense strand
ggacagcacuucuccugau

SEQ ID NO: 2075879 - RNA, 19 nt, Homo sapiens
  misc_RNA (1)...(19): siRNA sense strand
ggaauaaguucuucucaac

SEQ ID NO: 2075880 - RNA, 19 nt, Homo sapiens
  misc_RNA (1)...(19): siRNA sense strand
ucaaaggcuucuuauauug

SEQ ID NO: 2075881 - RNA, 19 nt, Homo sapiens
  misc_RNA (1)...(19): siRNA sense strand
gacauuagguccugcaguu

SEQ ID NO: 2075882 - RNA, 19 nt, Homo sapiens
  misc_RNA (1)...(19): siRNA sense strand
gcaucuugcugacuuaauu

SEQ ID NO: 2075883 - RNA, 19 nt, Homo sapiens
  misc_RNA (1)...(19): siRNA sense strand
gcauaaaggucuuagaaac

SEQ ID NO: 2075884 - RNA, 19 nt, Homo sapiens
  misc_RNA (1)...(19): siRNA sense strand
gcuccuacauuccaucuuu

SEQ ID NO: 2075885 - RNA, 19 nt, Homo sapiens
  misc_RNA (1)...(19): siRNA sense strand
gaucaggacuuggguauag

SEQ ID NO: 2075886 - RNA, 19 nt, Homo sapiens
  misc_RNA (1)...(19): siRNA sense strand
guucaucaguugcuuguuu

SEQ ID NO: 2075887 - RNA, 19 nt, Homo sapiens
  misc_RNA (1)...(19): siRNA sense strand
ggauuucuguuucaaaguu

SEQ ID NO: 2075888 - RNA, 19 nt, Homo sapiens
  misc_RNA (1)...(19): siRNA sense strand
guccagagcuacaagguaa

SEQ ID NO: 2075889 - RNA, 19 nt, Homo sapiens
  misc_RNA (1)...(19): siRNA sense strand
gaaugaagccaucuuuaug

SEQ ID NO: 2075890 - RNA, 19 nt, Homo sapiens
  misc_RNA (1)...(19): siRNA sense strand
uuagacagcucccagaauu

SEQ ID NO: 2075891 - RNA, 19 nt, Homo sapiens
  misc_RNA (1)...(19): siRNA sense strand
caaguggaguuguaaguga

SEQ ID NO: 2075892 - RNA, 19 nt, Homo sapiens
  misc_RNA (1)...(19): siRNA sense strand
ggagauaugcugaaaggaa

SEQ ID NO: 2075893 - RNA, 19 nt, Homo sapiens
  misc_RNA (1)...(19): siRNA sense strand
guggugaucuucuuacuga

SEQ ID NO: 2075894 - RNA, 19 nt, Homo sapiens
  misc_RNA (1)...(19): siRNA sense strand
guauggaaguccuuugaaa

SEQ ID NO: 2075895 - RNA, 19 nt, Homo sapiens
  misc_RNA (1)...(19): siRNA sense strand
caacuugucuagccugguu

SEQ ID NO: 2075896 - RNA, 19 nt, Homo sapiens
  misc_RNA (1)...(19): siRNA sense strand
gaaaagauuugccuuaaca

SEQ ID NO: 2075897 - RNA, 19 nt, Homo sapiens
  misc_RNA (1)...(19): siRNA sense strand
ggaaguaacucagcgucuu

SEQ ID NO: 2075898 - RNA, 19 nt, Homo sapiens
  misc_RNA (1)...(19): siRNA sense strand
ggcauuacauucucuauca

SEQ ID NO: 2075899 - RNA, 19 nt, Homo sapiens
  misc_RNA (1)...(19): siRNA sense strand
uagauuagcccaaguggua

SEQ ID NO: 2075900 - RNA, 19 nt, Homo sapiens
  misc_RNA (1)...(19): siRNA sense strand
ccgaagaguucaucaguug

SEQ ID NO: 2075901 - RNA, 19 nt, Homo sapiens
  misc_RNA (1)...(19): siRNA sense strand
gaagcgcuguauugauaaa

SEQ ID NO: 2075902 - RNA, 19 nt, Homo sapiens
  misc_RNA (1)...(19): siRNA sense strand
guauagaauugcugaaugu

SEQ ID NO: 2075903 - RNA, 19 nt, Homo sapiens
  misc_RNA (1)...(19): siRNA sense strand
uaucagaaauggaucaugu

SEQ ID NO: 2075904 - RNA, 19 nt, Homo sapiens
  misc_RNA (1)...(19): siRNA sense strand
ucaaagcauucgcagagua

SEQ ID NO: 2075905 - RNA, 19 nt, Homo sapiens
  misc_RNA (1)...(19): siRNA sense strand
gaaggagcaucuaaucucu

SEQ ID NO: 2075906 - RNA, 19 nt, Homo sapiens
  misc_RNA (1)...(19): siRNA sense strand
guacuucaauuucuaccuu

SEQ ID NO: 2075907 - RNA, 19 nt, Homo sapiens
  misc_RNA (1)...(19): siRNA sense strand
gcccuuaccuccagcacua

SEQ ID NO: 2075908 - RNA, 19 nt, Homo sapiens
  misc_RNA (1)...(19): siRNA sense strand
gagacugaccauagauuua

SEQ ID NO: 2075909 - RNA, 19 nt, Homo sapiens
  misc_RNA (1)...(19): siRNA sense strand
ggaaaucucauacacaauc

SEQ ID NO: 2075910 - RNA, 19 nt, Homo sapiens
  misc_RNA (1)...(19): siRNA sense strand
aaacucaagcauccaauua

SEQ ID NO: 2075911 - RNA, 19 nt, Homo sapiens
  misc_RNA (1)...(19): siRNA sense strand
uagaaacacugguuacugu

SEQ ID NO: 2075912 - RNA, 19 nt, Homo sapiens
  misc_RNA (1)...(19): siRNA sense strand
gaaaagagccguacugcuu

SEQ ID NO: 2075913 - RNA, 19 nt, Homo sapiens
  misc_RNA (1)...(19): siRNA sense strand
gcuacagcauuguggcuua

SEQ ID NO: 2075914 - RNA, 19 nt, Homo sapiens
  misc_RNA (1)...(19): siRNA sense strand
uaacuuugccuucagaauu

SEQ ID NO: 2075915 - RNA, 19 nt, Homo sapiens
  misc_RNA (1)...(19): siRNA sense strand
gguaacaguacuucaauuu

SEQ ID NO: 2075916 - RNA, 19 nt, Homo sapiens
  misc_RNA (1)...(19): siRNA sense strand
gaaaagagccgaggagauu

SEQ ID NO: 2075917 - RNA, 19 nt, Homo sapiens
  misc_RNA (1)...(19): siRNA sense strand
gcgcuguauugauaaauuu

SEQ ID NO: 2075918 - RNA, 19 nt, Homo sapiens
  misc_RNA (1)...(19): siRNA sense strand
gaagccacagauacuauua

SEQ ID NO: 2075919 - RNA, 19 nt, Homo sapiens
  misc_RNA (1)...(19): siRNA sense strand
ccagcacuaucaguuauua

SEQ ID NO: 2075920 - RNA, 19 nt, Homo sapiens
  misc_RNA (1)...(19): siRNA sense strand
caaagugucuccuugaacu

SEQ ID NO: 2075921 - RNA, 19 nt, Homo sapiens
  misc_RNA (1)...(19): siRNA sense strand
caaauuggaccucaguauu

SEQ ID NO: 2075922 - RNA, 19 nt, Homo sapiens
  misc_RNA (1)...(19): siRNA sense strand
aagcuacucuugagauaaa

SEQ ID NO: 2075923 - RNA, 19 nt, Homo sapiens
  misc_RNA (1)...(19): siRNA sense strand
ucaauucucccuacuauau

SEQ ID NO: 2075924 - RNA, 19 nt, Homo sapiens
  misc_RNA (1)...(19): siRNA sense strand
gguauagaauugcugaaug

SEQ ID NO: 2075925 - RNA, 19 nt, Homo sapiens
  misc_RNA (1)...(19): siRNA sense strand
gaagacuaccaccuguuua

SEQ ID NO: 2075926 - RNA, 19 nt, Homo sapiens
  misc_RNA (1)...(19): siRNA sense strand
caccuaaauucuuguauug

SEQ ID NO: 2075927 - RNA, 19 nt, Homo sapiens
  misc_RNA (1)...(19): siRNA sense strand
cucaaaggcuucuuauauu

SEQ ID NO: 2075928 - RNA, 19 nt, Homo sapiens
  misc_RNA (1)...(19): siRNA sense strand
gccaaagcaugucagguuu

SEQ ID NO: 2075929 - RNA, 19 nt, Homo sapiens
  misc_RNA (1)...(19): siRNA sense strand
ccaguuaucuucgacaguu

SEQ ID NO: 2075930 - RNA, 19 nt, Homo sapiens
  misc_RNA (1)...(19): siRNA sense strand
cagaguaucuuuggaggaa

SEQ ID NO: 2075931 - RNA, 19 nt, Homo sapiens
  misc_RNA (1)...(19): siRNA sense strand
uaucugugcugcucaagaa

SEQ ID NO: 2075932 - RNA, 19 nt, Homo sapiens
  misc_RNA (1)...(19): siRNA sense strand
acaagagacugaccauaga

SEQ ID NO: 2075933 - RNA, 19 nt, Homo sapiens
  misc_RNA (1)...(19): siRNA sense strand
uagcauuucuguucgacua

SEQ ID NO: 2075934 - RNA, 19 nt, Homo sapiens
  misc_RNA (1)...(19): siRNA sense strand
gcagaggauuugcuguguu

SEQ ID NO: 2075935 - RNA, 19 nt, Homo sapiens
  misc_RNA (1)...(19): siRNA sense strand
acccauacauuuacucuuu

SEQ ID NO: 2075936 - RNA, 19 nt, Homo sapiens
  misc_RNA (1)...(19): siRNA sense strand
gcagugugcucuccugaag

SEQ ID NO: 2075937 - RNA, 19 nt, Homo sapiens
  misc_RNA (1)...(19): siRNA sense strand
gguuucagcugcauugguu

SEQ ID NO: 2075938 - RNA, 19 nt, Homo sapiens
  misc_RNA (1)...(19): siRNA sense strand
ggaaguagauugguuucag

SEQ ID NO: 2075939 - RNA, 19 nt, Homo sapiens
  misc_RNA (1)...(19): siRNA sense strand
gcaagaagaagaaggagau

SEQ ID NO: 2075940 - RNA, 19 nt, Homo sapiens
  misc_RNA (1)...(19): siRNA sense strand
gcuggaugguugcugauuu

SEQ ID NO: 2075941 - RNA, 19 nt, Homo sapiens
  misc_RNA (1)...(19): siRNA sense strand
gcuaucacaguguuuauuu

SEQ ID NO: 2075942 - RNA, 19 nt, Homo sapiens
  misc_RNA (1)...(19): siRNA sense strand
gcaaauuggaccucaguau

SEQ ID NO: 2075943 - RNA, 19 nt, Homo sapiens
  misc_RNA (1)...(19): siRNA sense strand
ggaagaugauggagaauuu

SEQ ID NO: 2075944 - RNA, 19 nt, Homo sapiens
  misc_RNA (1)...(19): siRNA sense strand
gaacauauucucuagauga

SEQ ID NO: 2075945 - RNA, 19 nt, Homo sapiens
  misc_RNA (1)...(19): siRNA sense strand
gaacucauucgucaacuua

SEQ ID NO: 2075946 - RNA, 19 nt, Homo sapiens
  misc_RNA (1)...(19): siRNA sense strand
gcugaugacuuguuucaaa

SEQ ID NO: 2075947 - RNA, 19 nt, Homo sapiens
  misc_RNA (1)...(19): siRNA sense strand
gaagauuaccuuagagaaa

SEQ ID NO: 2075948 - RNA, 19 nt, Homo sapiens
  misc_RNA (1)...(19): siRNA sense strand
gaagaugacacaacacauu

SEQ ID NO: 2075949 - RNA, 19 nt, Homo sapiens
  misc_RNA (1)...(19): siRNA sense strand
cauaugaucuucagguuau

SEQ ID NO: 2075950 - RNA, 19 nt, Homo sapiens
  misc_RNA (1)...(19): siRNA sense strand
gaacagaaccaaaagauga

SEQ ID NO: 2075951 - RNA, 19 nt, Homo sapiens
  misc_RNA (1)...(19): siRNA sense strand
gaaguagaacucauaccua

SEQ ID NO: 2075952 - RNA, 19 nt, Homo sapiens
  misc_RNA (1)...(19): siRNA sense strand
ggaauaaagcaauuucaga

SEQ ID NO: 2075953 - RNA, 19 nt, Homo sapiens
  misc_RNA (1)...(19): siRNA sense strand
uaagaggacuuugugaaga

SEQ ID NO: 2075954 - RNA, 19 nt, Homo sapiens
  misc_RNA (1)...(19): siRNA sense strand
gaacacugcagucacacua

SEQ ID NO: 2075955 - RNA, 19 nt, Homo sapiens
  misc_RNA (1)...(19): siRNA sense strand
gaauggcuaucagaaagaa

SEQ ID NO: 2075956 - RNA, 19 nt, Homo sapiens
  misc_RNA (1)...(19): siRNA sense strand
caucaggaauaaagcaauu

SEQ ID NO: 2075957 - RNA, 19 nt, Homo sapiens
  misc_RNA (1)...(19): siRNA sense strand
cagcuucccuuaaggagaa

SEQ ID NO: 2075958 - RNA, 19 nt, Homo sapiens
  misc_RNA (1)...(19): siRNA sense strand
aaagggaagucaaggagaa

SEQ ID NO: 2075959 - RNA, 19 nt, Homo sapiens
  misc_RNA (1)...(19): siRNA sense strand
uaaagcaauuucagagaug

SEQ ID NO: 2075960 - RNA, 19 nt, Homo sapiens
  misc_RNA (1)...(19): siRNA sense strand
ugaaacaacuugaggacau

SEQ ID NO: 2075961 - RNA, 19 nt, Homo sapiens
  misc_RNA (1)...(19): siRNA sense strand
ggaucaaacucaugcuugu

SEQ ID NO: 2075962 - RNA, 19 nt, Homo sapiens
  misc_RNA (1)...(19): siRNA sense strand
gagaagagcaggucauuuu

SEQ ID NO: 2075963 - RNA, 19 nt, Homo sapiens
  misc_RNA (1)...(19): siRNA sense strand
gaugauggagaauuuguuu

SEQ ID NO: 2075964 - RNA, 19 nt, Homo sapiens
  misc_RNA (1)...(19): siRNA sense strand
ucaaccagcugaaauagca

SEQ ID NO: 2075965 - RNA, 19 nt, Homo sapiens
  misc_RNA (1)...(19): siRNA sense strand
ggaacucauucgucaacuu

SEQ ID NO: 2075966 - RNA, 19 nt, Homo sapiens
  misc_RNA (1)...(19): siRNA sense strand
gaaauacggaagcuccaaa

SEQ ID NO: 2075967 - RNA, 19 nt, Homo sapiens
  misc_RNA (1)...(19): siRNA sense strand
gaacucauaccuacuuugg

SEQ ID NO: 2075968 - RNA, 19 nt, Homo sapiens
  misc_RNA (1)...(19): siRNA sense strand
caagcugccuaaauauaga

SEQ ID NO: 2075969 - RNA, 19 nt, Homo sapiens
  misc_RNA (1)...(19): siRNA sense strand
ccauugauuugacaacuga

SEQ ID NO: 2075970 - RNA, 19 nt, Homo sapiens
  misc_RNA (1)...(19): siRNA sense strand
gaaacaacuugaggacauc

SEQ ID NO: 2075971 - RNA, 19 nt, Homo sapiens
  misc_RNA (1)...(19): siRNA sense strand
gaugugaaaccauuagaga

SEQ ID NO: 2075972 - RNA, 19 nt, Homo sapiens
  misc_RNA (1)...(19): siRNA sense strand
acucauaccuacuuuggaa

SEQ ID NO: 2075973 - RNA, 19 nt, Homo sapiens
  misc_RNA (1)...(19): siRNA sense strand
aaaggaaguagaacucaua

SEQ ID NO: 2075974 - RNA, 19 nt, Homo sapiens
  misc_RNA (1)...(19): siRNA sense strand
aacagaagauuaccuuaga

SEQ ID NO: 2075975 - RNA, 19 nt, Homo sapiens
  misc_RNA (1)...(19): siRNA sense strand
uuacggcaauucaagauau

SEQ ID NO: 2075976 - RNA, 19 nt, Homo sapiens
  misc_RNA (1)...(19): siRNA sense strand
uuuguuaccuggaaauuga

SEQ ID NO: 2075977 - RNA, 19 nt, Homo sapiens
  misc_RNA (1)...(19): siRNA sense strand
gcugguugacuacauauuu

SEQ ID NO: 2075978 - RNA, 19 nt, Homo sapiens
  misc_RNA (1)...(19): siRNA sense strand
gaauaaagcauuuguuacc

SEQ ID NO: 2075979 - RNA, 19 nt, Homo sapiens
  misc_RNA (1)...(19): siRNA sense strand
gaauuaagacagagaagag

SEQ ID NO: 2075980 - RNA, 19 nt, Homo sapiens
  misc_RNA (1)...(19): siRNA sense strand
ccuggaaauugaauguuaa

SEQ ID NO: 2075981 - RNA, 19 nt, Homo sapiens
  misc_RNA (1)...(19): siRNA sense strand
ccaggccuguguccuauga

SEQ ID NO: 2075982 - RNA, 19 nt, Homo sapiens
  misc_RNA (1)...(19): siRNA sense strand
uuguaaagcuggauaguuc

SEQ ID NO: 2075983 - RNA, 19 nt, Homo sapiens
  misc_RNA (1)...(19): siRNA sense strand
uaaucuaucugccauaugc

SEQ ID NO: 2075984 - RNA, 19 nt, Homo sapiens
  misc_RNA (1)...(19): siRNA sense strand
agaaaccuuuggaagauga

SEQ ID NO: 2075985 - RNA, 19 nt, Homo sapiens
  misc_RNA (1)...(19): siRNA sense strand
aagcuugguuggcaaacua

SEQ ID NO: 2075986 - RNA, 19 nt, Homo sapiens
  misc_RNA (1)...(19): siRNA sense strand
ggagacguuuauacccauu

SEQ ID NO: 2075987 - RNA, 19 nt, Homo sapiens
  misc_RNA (1)...(19): siRNA sense strand
uaugaacacugcagucaca

SEQ ID NO: 2075988 - RNA, 19 nt, Homo sapiens
  misc_RNA (1)...(19): siRNA sense strand
ggaauggcuaucagaaaga

SEQ ID NO: 2075989 - RNA, 19 nt, Homo sapiens
  misc_RNA (1)...(19): siRNA sense strand
ucgaacauauucucuagau

SEQ ID NO: 2075990 - RNA, 19 nt, Homo sapiens
  misc_RNA (1)...(19): siRNA sense strand
gaagaugugaaaccauuag

SEQ ID NO: 2075991 - RNA, 19 nt, Homo sapiens
  misc_RNA (1)...(19): siRNA sense strand
gaggacaucaggaauaaag

SEQ ID NO: 2075992 - RNA, 19 nt, Homo sapiens
  misc_RNA (1)...(19): siRNA sense strand
gacucaaccagcugaaaua

SEQ ID NO: 2075993 - RNA, 19 nt, Homo sapiens
  misc_RNA (1)...(19): siRNA sense strand
uugaggacaucaggaauaa

SEQ ID NO: 2075994 - RNA, 19 nt, Homo sapiens
  misc_RNA (1)...(19): siRNA sense strand
uggaauggcuaucagaaag

SEQ ID NO: 2075995 - RNA, 19 nt, Homo sapiens
  misc_RNA (1)...(19): siRNA sense strand
uaaaggaaguagaacucau

SEQ ID NO: 2075996 - RNA, 19 nt, Homo sapiens
  misc_RNA (1)...(19): siRNA sense strand
ccauaugaucuucagguua

SEQ ID NO: 2075997 - RNA, 19 nt, Homo sapiens
  misc_RNA (1)...(19): siRNA sense strand
ccagagccagcuucccuua

SEQ ID NO: 2075998 - RNA, 19 nt, Homo sapiens
  misc_RNA (1)...(19): siRNA sense strand
uaaugguucugcuggaaug

SEQ ID NO: 2075999 - RNA, 19 nt, Homo sapiens
  misc_RNA (1)...(19): siRNA sense strand
augaagaugugaaaccauu

SEQ ID NO: 2076000 - RNA, 19 nt, Homo sapiens
  misc_RNA (1)...(19): siRNA sense strand
ccauaugccuuguaaagcu

SEQ ID NO: 2076001 - RNA, 19 nt, Homo sapiens
  misc_RNA (1)...(19): siRNA sense strand
uauaagaggacuuugugaa

SEQ ID NO: 2076002 - RNA, 19 nt, Homo sapiens
  misc_RNA (1)...(19): siRNA sense strand
gaagaugauggagaauuug

SEQ ID NO: 2076003 - RNA, 19 nt, Homo sapiens
  misc_RNA (1)...(19): siRNA sense strand
gcaauucagaagauuacuu

SEQ ID NO: 2076004 - RNA, 19 nt, Homo sapiens
  misc_RNA (1)...(19): siRNA sense strand
gaugaugaugugauaagaa

SEQ ID NO: 2076005 - RNA, 19 nt, Homo sapiens
  misc_RNA (1)...(19): siRNA sense strand
gagaaagggaagucaagga

SEQ ID NO: 2076006 - RNA, 19 nt, Homo sapiens
  misc_RNA (1)...(19): siRNA sense strand
gaaaacagaagauuaccuu

SEQ ID NO: 2076007 - RNA, 19 nt, Homo sapiens
  misc_RNA (1)...(19): siRNA sense strand
accuggaaauugaauguua

SEQ ID NO: 2076008 - RNA, 19 nt, Homo sapiens
  misc_RNA (1)...(19): siRNA sense strand
aaacagaagauuaccuuag

SEQ ID NO: 2076009 - RNA, 19 nt, Homo sapiens
  misc_RNA (1)...(19): siRNA sense strand
ugaaauagcagaaaaggaa

SEQ ID NO: 2076010 - RNA, 19 nt, Homo sapiens
  misc_RNA (1)...(19): siRNA sense strand
ggaaguagaacucauaccu

SEQ ID NO: 2076011 - RNA, 19 nt, Homo sapiens
  misc_RNA (1)...(19): siRNA sense strand
guuuauacccauugauuug

SEQ ID NO: 2076012 - RNA, 19 nt, Homo sapiens
  misc_RNA (1)...(19): siRNA sense strand
aagauuaccuuagagaaag

SEQ ID NO: 2076013 - RNA, 19 nt, Homo sapiens
  misc_RNA (1)...(19): siRNA sense strand
gcagcacaguuugaaauac

SEQ ID NO: 2076014 - RNA, 19 nt, Homo sapiens
  misc_RNA (1)...(19): siRNA sense strand
aaugcugguugacuacaua

SEQ ID NO: 2076015 - RNA, 19 nt, Homo sapiens
  misc_RNA (1)...(19): siRNA sense strand
uuuggaagaugauggagaa

SEQ ID NO: 2076016 - RNA, 19 nt, Homo sapiens
  misc_RNA (1)...(19): siRNA sense strand
uacggaagcuccaaaauug

SEQ ID NO: 2076017 - RNA, 19 nt, Homo sapiens
  misc_RNA (1)...(19): siRNA sense strand
ucaagcugccuaaauauag

SEQ ID NO: 2076018 - RNA, 19 nt, Homo sapiens
  misc_RNA (1)...(19): siRNA sense strand
gaugacacaacacauuuca

SEQ ID NO: 2076019 - RNA, 19 nt, Homo sapiens
  misc_RNA (1)...(19): siRNA sense strand
aaagcaauuucagagauga

SEQ ID NO: 2076020 - RNA, 19 nt, Homo sapiens
  misc_RNA (1)...(19): siRNA sense strand
ggacaucaggaauaaagca

SEQ ID NO: 2076021 - RNA, 19 nt, Homo sapiens
  misc_RNA (1)...(19): siRNA sense strand
ucugauuuccgaaugaaua

SEQ ID NO: 2076022 - RNA, 19 nt, Homo sapiens
  misc_RNA (1)...(19): siRNA sense strand
uagaacucauaccuacuuu

SEQ ID NO: 2076023 - RNA, 19 nt, Homo sapiens
  misc_RNA (1)...(19): siRNA sense strand
cagaaagaagacauuacua

SEQ ID NO: 2076024 - RNA, 19 nt, Homo sapiens
  misc_RNA (1)...(19): siRNA sense strand
ugacacaacacauuucaag

SEQ ID NO: 2076025 - RNA, 19 nt, Homo sapiens
  misc_RNA (1)...(19): siRNA sense strand
aagaugacacaacacauuu

SEQ ID NO: 2076026 - RNA, 19 nt, Homo sapiens
  misc_RNA (1)...(19): siRNA sense strand
aagaggacuuugugaagau

SEQ ID NO: 2076027 - RNA, 19 nt, Homo sapiens
  misc_RNA (1)...(19): siRNA sense strand
aagcauuuguuaccuggaa

SEQ ID NO: 2076028 - RNA, 19 nt, Homo sapiens
  misc_RNA (1)...(19): siRNA sense strand
aucaagagauggacaagga

SEQ ID NO: 2076029 - RNA, 19 nt, Homo sapiens
  misc_RNA (1)...(19): siRNA sense strand
cagaagauuaccuuagaga

SEQ ID NO: 2076030 - RNA, 19 nt, Homo sapiens
  misc_RNA (1)...(19): siRNA sense strand
agacguuuauacccauuga

SEQ ID NO: 2076031 - RNA, 19 nt, Homo sapiens
  misc_RNA (1)...(19): siRNA sense strand
ucucgaacauauucucuag

SEQ ID NO: 2076032 - RNA, 19 nt, Homo sapiens
  misc_RNA (1)...(19): siRNA sense strand
acucaugcuuguccaaaug

SEQ ID NO: 2076033 - RNA, 19 nt, Homo sapiens
  misc_RNA (1)...(19): siRNA sense strand
ugaaaccauuagagacuca

SEQ ID NO: 2076034 - RNA, 19 nt, Homo sapiens
  misc_RNA (1)...(19): siRNA sense strand
uauauaagaggacuuugug

SEQ ID NO: 2076035 - RNA, 19 nt, Homo sapiens
  misc_RNA (1)...(19): siRNA sense strand
ugaagaugugaaaccauua

SEQ ID NO: 2076036 - RNA, 19 nt, Homo sapiens
  misc_RNA (1)...(19): siRNA sense strand
aggccuguguccuaugaua

SEQ ID NO: 2076037 - RNA, 19 nt, Homo sapiens
  misc_RNA (1)...(19): siRNA sense strand
cuacauauuucaggaacuc

SEQ ID NO: 2076038 - RNA, 19 nt, Homo sapiens
  misc_RNA (1)...(19): siRNA sense strand
gagcaguuacagcaagcua

SEQ ID NO: 2076039 - RNA, 19 nt, Homo sapiens
  misc_RNA (1)...(19): siRNA sense strand
guaaaggaaguagaacuca

SEQ ID NO: 2076040 - RNA, 19 nt, Homo sapiens
  misc_RNA (1)...(19): siRNA sense strand
cgaacauauucucuagaug

SEQ ID NO: 2076041 - RNA, 19 nt, Homo sapiens
  misc_RNA (1)...(19): siRNA sense strand
ucacacuacuuuuggaauu

SEQ ID NO: 2076042 - RNA, 19 nt, Homo sapiens
  misc_RNA (1)...(19): siRNA sense strand
agucaaaacucucugaaga

SEQ ID NO: 2076043 - RNA, 19 nt, Homo sapiens
  misc_RNA (1)...(19): siRNA sense strand
gaacugagcaagucaaaua

SEQ ID NO: 2076044 - RNA, 19 nt, Homo sapiens
  misc_RNA (1)...(19): siRNA sense strand
guucauaucuaucaccaua

SEQ ID NO: 2076045 - RNA, 19 nt, Homo sapiens
  misc_RNA (1)...(19): siRNA sense strand
gagcugcugugaugguuua

SEQ ID NO: 2076046 - RNA, 19 nt, Homo sapiens
  misc_RNA (1)...(19): siRNA sense strand
gaagacaacuacaagaaca

SEQ ID NO: 2076047 - RNA, 19 nt, Homo sapiens
  misc_RNA (1)...(19): siRNA sense strand
ggagagagagcgcagaaua

SEQ ID NO: 2076048 - RNA, 19 nt, Homo sapiens
  misc_RNA (1)...(19): siRNA sense strand
gagaaagaauggaaagaga

SEQ ID NO: 2076049 - RNA, 19 nt, Homo sapiens
  misc_RNA (1)...(19): siRNA sense strand
ggcaagagcugcugugaug

SEQ ID NO: 2076050 - RNA, 19 nt, Homo sapiens
  misc_RNA (1)...(19): siRNA sense strand
gaaaagggaucaacaauag

SEQ ID NO: 2076051 - RNA, 19 nt, Homo sapiens
  misc_RNA (1)...(19): siRNA sense strand
gaacaaauacaaugaaugg

SEQ ID NO: 2076052 - RNA, 19 nt, Homo sapiens
  misc_RNA (1)...(19): siRNA sense strand
cagcagaguucauaucuau

SEQ ID NO: 2076053 - RNA, 19 nt, Homo sapiens
  misc_RNA (1)...(19): siRNA sense strand
gcaaagaggaugccaaugu

SEQ ID NO: 2076054 - RNA, 19 nt, Homo sapiens
  misc_RNA (1)...(19): siRNA sense strand
ggaaagaacaaauacaaug

SEQ ID NO: 2076055 - RNA, 19 nt, Homo sapiens
  misc_RNA (1)...(19): siRNA sense strand
cggaaggacuugacuauga

SEQ ID NO: 2076056 - RNA, 19 nt, Homo sapiens
  misc_RNA (1)...(19): siRNA sense strand
gagaaagguuggagagaga

SEQ ID NO: 2076057 - RNA, 19 nt, Homo sapiens
  misc_RNA (1)...(19): siRNA sense strand
gaacuccgccucaucuaaa

SEQ ID NO: 2076058 - RNA, 19 nt, Homo sapiens
  misc_RNA (1)...(19): siRNA sense strand
gaucaacaauagaaacaga

SEQ ID NO: 2076059 - RNA, 19 nt, Homo sapiens
  misc_RNA (1)...(19): siRNA sense strand
gaaagaauggaaagagaaa

SEQ ID NO: 2076060 - RNA, 19 nt, Homo sapiens
  misc_RNA (1)...(19): siRNA sense strand
gaagacaaucgcccuuuaa

SEQ ID NO: 2076061 - RNA, 19 nt, Homo sapiens
  misc_RNA (1)...(19): siRNA sense strand
ggaaacagggccaacauug

SEQ ID NO: 2076062 - RNA, 19 nt, Homo sapiens
  misc_RNA (1)...(19): siRNA sense strand
ggcagcaagucaccuguua

SEQ ID NO: 2076063 - RNA, 19 nt, Homo sapiens
  misc_RNA (1)...(19): siRNA sense strand
agaagacaaucgcccuuua

SEQ ID NO: 2076064 - RNA, 19 nt, Homo sapiens
  misc_RNA (1)...(19): siRNA sense strand
gaaguacaaucaagcuaca

SEQ ID NO: 2076065 - RNA, 19 nt, Homo sapiens
  misc_RNA (1)...(19): siRNA sense strand
aagaacagcuggagagaga

SEQ ID NO: 2076066 - RNA, 19 nt, Homo sapiens
  misc_RNA (1)...(19): siRNA sense strand
ggagagagagagacaagaa

SEQ ID NO: 2076067 - RNA, 19 nt, Homo sapiens
  misc_RNA (1)...(19): siRNA sense strand
gcaagucaaauacugcaua

SEQ ID NO: 2076068 - RNA, 19 nt, Homo sapiens
  misc_RNA (1)...(19): siRNA sense strand
cuaaaggguugaaguacaa

SEQ ID NO: 2076069 - RNA, 19 nt, Homo sapiens
  misc_RNA (1)...(19): siRNA sense strand
caaagaggaugccaauguc

SEQ ID NO: 2076070 - RNA, 19 nt, Homo sapiens
  misc_RNA (1)...(19): siRNA sense strand
gguguauggucucaacuuu

SEQ ID NO: 2076071 - RNA, 19 nt, Homo sapiens
  misc_RNA (1)...(19): siRNA sense strand
gagagaggcuggagagacu

SEQ ID NO: 2076072 - RNA, 19 nt, Homo sapiens
  misc_RNA (1)...(19): siRNA sense strand
gaacgggagaggcaagaaa

SEQ ID NO: 2076073 - RNA, 19 nt, Homo sapiens
  misc_RNA (1)...(19): siRNA sense strand
gacaagagcaguuagaaag

SEQ ID NO: 2076074 - RNA, 19 nt, Homo sapiens
  misc_RNA (1)...(19): siRNA sense strand
ggagaagaauugcugaaaa

SEQ ID NO: 2076075 - RNA, 19 nt, Homo sapiens
  misc_RNA (1)...(19): siRNA sense strand
ggaaugcuauuggugugaa

SEQ ID NO: 2076076 - RNA, 19 nt, Homo sapiens
  misc_RNA (1)...(19): siRNA sense strand
gcagaguucauaucuauca

SEQ ID NO: 2076077 - RNA, 19 nt, Homo sapiens
  misc_RNA (1)...(19): siRNA sense strand
ucuaaggccucuucaacaa

SEQ ID NO: 2076078 - RNA, 19 nt, Homo sapiens
  misc_RNA (1)...(19): siRNA sense strand
gacaaucgcccuuuaacug

SEQ ID NO: 2076079 - RNA, 19 nt, Homo sapiens
  misc_RNA (1)...(19): siRNA sense strand
ccuuagaaguguuaaauuc

SEQ ID NO: 2076080 - RNA, 19 nt, Homo sapiens
  misc_RNA (1)...(19): siRNA sense strand
gugauaaacugugccauuc

SEQ ID NO: 2076081 - RNA, 19 nt, Homo sapiens
  misc_RNA (1)...(19): siRNA sense strand
ggauaccucuuucccaagu

SEQ ID NO: 2076082 - RNA, 19 nt, Homo sapiens
  misc_RNA (1)...(19): siRNA sense strand
gagagagagcgcagaauau

SEQ ID NO: 2076083 - RNA, 19 nt, Homo sapiens
  misc_RNA (1)...(19): siRNA sense strand
ggauucagcagaguucaua

SEQ ID NO: 2076084 - RNA, 19 nt, Homo sapiens
  misc_RNA (1)...(19): siRNA sense strand
caaagaagacaacuacaag

SEQ ID NO: 2076085 - RNA, 19 nt, Homo sapiens
  misc_RNA (1)...(19): siRNA sense strand
gcaagaaagacaagaacga

SEQ ID NO: 2076086 - RNA, 19 nt, Homo sapiens
  misc_RNA (1)...(19): siRNA sense strand
gcugguggcucaacuggau

SEQ ID NO: 2076087 - RNA, 19 nt, Homo sapiens
  misc_RNA (1)...(19): siRNA sense strand
caagucaaauacugcauag

SEQ ID NO: 2076088 - RNA, 19 nt, Homo sapiens
  misc_RNA (1)...(19): siRNA sense strand
gggagcgacuggaacaaga

SEQ ID NO: 2076089 - RNA, 19 nt, Homo sapiens
  misc_RNA (1)...(19): siRNA sense strand
ucaaagaagacaacuacaa

SEQ ID NO: 2076090 - RNA, 19 nt, Homo sapiens
  misc_RNA (1)...(19): siRNA sense strand
ggaaggacuugacuaugac

SEQ ID NO: 2076091 - RNA, 19 nt, Homo sapiens
  misc_RNA (1)...(19): siRNA sense strand
gaaauggaccccuuccuuu

SEQ ID NO: 2076092 - RNA, 19 nt, Homo sapiens
  misc_RNA (1)...(19): siRNA sense strand
gaacagcuggagagagaga

SEQ ID NO: 2076093 - RNA, 19 nt, Homo sapiens
  misc_RNA (1)...(19): siRNA sense strand
gaagauucagagccuguaa

SEQ ID NO: 2076094 - RNA, 19 nt, Homo sapiens
  misc_RNA (1)...(19): siRNA sense strand
gaaaggcuggagcgagaaa

SEQ ID NO: 2076095 - RNA, 19 nt, Homo sapiens
  misc_RNA (1)...(19): siRNA sense strand
gaaagacaagaacgagaga

SEQ ID NO: 2076096 - RNA, 19 nt, Homo sapiens
  misc_RNA (1)...(19): siRNA sense strand
ggagagagagagguuagaa

SEQ ID NO: 2076097 - RNA, 19 nt, Homo sapiens
  misc_RNA (1)...(19): siRNA sense strand
gccaaugucuucgcaagug

SEQ ID NO: 2076098 - RNA, 19 nt, Homo sapiens
  misc_RNA (1)...(19): siRNA sense strand
gaagagcucauugaugcaa

SEQ ID NO: 2076099 - RNA, 19 nt, Homo sapiens
  misc_RNA (1)...(19): siRNA sense strand
ccuguuaucuccagaccaa

SEQ ID NO: 2076100 - RNA, 19 nt, Homo sapiens
  misc_RNA (1)...(19): siRNA sense strand
cgacaagagcaguuagaaa

SEQ ID NO: 2076101 - RNA, 19 nt, Homo sapiens
  misc_RNA (1)...(19): siRNA sense strand
ggagagggagcgacuggaa

SEQ ID NO: 2076102 - RNA, 19 nt, Homo sapiens
  misc_RNA (1)...(19): siRNA sense strand
ggguagugguuuaauggaa

SEQ ID NO: 2076103 - RNA, 19 nt, Homo sapiens
  misc_RNA (1)...(19): siRNA sense strand
gccaggaggagaagaauug

SEQ ID NO: 2076104 - RNA, 19 nt, Homo sapiens
  misc_RNA (1)...(19): siRNA sense strand
ccuaaaggguugaaguaca

SEQ ID NO: 2076105 - RNA, 19 nt, Homo sapiens
  misc_RNA (1)...(19): siRNA sense strand
uaaggccucuucaacaagu

SEQ ID NO: 2076106 - RNA, 19 nt, Homo sapiens
  misc_RNA (1)...(19): siRNA sense strand
cagagccuguaacuucuaa

SEQ ID NO: 2076107 - RNA, 19 nt, Homo sapiens
  misc_RNA (1)...(19): siRNA sense strand
gagagagagagguuagaaa

SEQ ID NO: 2076108 - RNA, 19 nt, Homo sapiens
  misc_RNA (1)...(19): siRNA sense strand
gaaauucaaagaagacaac

SEQ ID NO: 2076109 - RNA, 19 nt, Homo sapiens
  misc_RNA (1)...(19): siRNA sense strand
uaaacugugccauuccuaa

SEQ ID NO: 2076110 - RNA, 19 nt, Homo sapiens
  misc_RNA (1)...(19): siRNA sense strand
gcaagucaccuguuaucuc

SEQ ID NO: 2076111 - RNA, 19 nt, Homo sapiens
  misc_RNA (1)...(19): siRNA sense strand
aaagggaucaacaauagaa

SEQ ID NO: 2076112 - RNA, 19 nt, Homo sapiens
  misc_RNA (1)...(19): siRNA sense strand
gagaagaauugcugaaaag

SEQ ID NO: 2076113 - RNA, 19 nt, Homo sapiens
  misc_RNA (1)...(19): siRNA sense strand
gggagacucuucugcuucu

SEQ ID NO: 2076114 - RNA, 19 nt, Homo sapiens
  misc_RNA (1)...(19): siRNA sense strand
gagcgcagaauaucaagug

SEQ ID NO: 2076115 - RNA, 19 nt, Homo sapiens
  misc_RNA (1)...(19): siRNA sense strand
ggagcgacaagagcaguua

SEQ ID NO: 2076116 - RNA, 19 nt, Homo sapiens
  misc_RNA (1)...(19): siRNA sense strand
ggaagauucaggaccauca

SEQ ID NO: 2076117 - RNA, 19 nt, Homo sapiens
  misc_RNA (1)...(19): siRNA sense strand
cugcugugaugguuuauga

SEQ ID NO: 2076118 - RNA, 19 nt, Homo sapiens
  misc_RNA (1)...(19): siRNA sense strand
gauacaggccguggaaaug

SEQ ID NO: 2076119 - RNA, 19 nt, Homo sapiens
  misc_RNA (1)...(19): siRNA sense strand
gaauggaaagagaaagguu

SEQ ID NO: 2076120 - RNA, 19 nt, Homo sapiens
  misc_RNA (1)...(19): siRNA sense strand
ucagcagaguucauaucua

SEQ ID NO: 2076121 - RNA, 19 nt, Homo sapiens
  misc_RNA (1)...(19): siRNA sense strand
guagugguuuaauggaaga

SEQ ID NO: 2076122 - RNA, 19 nt, Homo sapiens
  misc_RNA (1)...(19): siRNA sense strand
uggcauccaugucagaaga

SEQ ID NO: 2076123 - RNA, 19 nt, Homo sapiens
  misc_RNA (1)...(19): siRNA sense strand
gaaagggaacagcuggaau

SEQ ID NO: 2076124 - RNA, 19 nt, Homo sapiens
  misc_RNA (1)...(19): siRNA sense strand
gaaacagggccaacauugc

SEQ ID NO: 2076125 - RNA, 19 nt, Homo sapiens
  misc_RNA (1)...(19): siRNA sense strand
ucauaucuaucaccauaca

SEQ ID NO: 2076126 - RNA, 19 nt, Homo sapiens
  misc_RNA (1)...(19): siRNA sense strand
ccaaguggagggaaugcua

SEQ ID NO: 2076127 - RNA, 19 nt, Homo sapiens
  misc_RNA (1)...(19): siRNA sense strand
gauaaacugugccauuccu

SEQ ID NO: 2076128 - RNA, 19 nt, Homo sapiens
  misc_RNA (1)...(19): siRNA sense strand
aagaagacaacuacaagaa

SEQ ID NO: 2076129 - RNA, 19 nt, Homo sapiens
  misc_RNA (1)...(19): siRNA sense strand
agacaaaacucacaacuac

SEQ ID NO: 2076130 - RNA, 19 nt, Homo sapiens
  misc_RNA (1)...(19): siRNA sense strand
gaguaucugucaggcaaga

SEQ ID NO: 2076131 - RNA, 19 nt, Homo sapiens
  misc_RNA (1)...(19): siRNA sense strand
aaagaagagcucauugaug

SEQ ID NO: 2076132 - RNA, 19 nt, Homo sapiens
  misc_RNA (1)...(19): siRNA sense strand
caccugaaccaacaagaaa

SEQ ID NO: 2076133 - RNA, 19 nt, Homo sapiens
  misc_RNA (1)...(19): siRNA sense strand
aguguuaaauucacaggaa

SEQ ID NO: 2076134 - RNA, 19 nt, Homo sapiens
  misc_RNA (1)...(19): siRNA sense strand
ggcaggaacugagcaaguc

SEQ ID NO: 2076135 - RNA, 19 nt, Homo sapiens
  misc_RNA (1)...(19): siRNA sense strand
gacggaaggacuugacuau

SEQ ID NO: 2076136 - RNA, 19 nt, Homo sapiens
  misc_RNA (1)...(19): siRNA sense strand
gggaaagaacaaauacaau

SEQ ID NO: 2076137 - RNA, 19 nt, Homo sapiens
  misc_RNA (1)...(19): siRNA sense strand
gagagagcgcagaauauca

SEQ ID NO: 2076138 - RNA, 19 nt, Homo sapiens
  misc_RNA (1)...(19): siRNA sense strand
ggagaggcaagaaagacaa

SEQ ID NO: 2076139 - RNA, 19 nt, Homo sapiens
  misc_RNA (1)...(19): siRNA sense strand
gaucgggagaggcaagaaa

SEQ ID NO: 2076140 - RNA, 19 nt, Homo sapiens
  misc_RNA (1)...(19): siRNA sense strand
gagcgagaaagaauggaaa

SEQ ID NO: 2076141 - RNA, 19 nt, Homo sapiens
  misc_RNA (1)...(19): siRNA sense strand
aaacugugccauuccuaaa

SEQ ID NO: 2076142 - RNA, 19 nt, Homo sapiens
  misc_RNA (1)...(19): siRNA sense strand
auucagagccuguaacuuc

SEQ ID NO: 2076143 - RNA, 19 nt, Homo sapiens
  misc_RNA (1)...(19): siRNA sense strand
ggaggugucuggcuuccuu

SEQ ID NO: 2076144 - RNA, 19 nt, Homo sapiens
  misc_RNA (1)...(19): siRNA sense strand
agaagcaccucgcgcuaua

SEQ ID NO: 2076145 - RNA, 19 nt, Homo sapiens
  misc_RNA (1)...(19): siRNA sense strand
ggccuacagucuccaagua

SEQ ID NO: 2076146 - RNA, 19 nt, Homo sapiens
  misc_RNA (1)...(19): siRNA sense strand
caccaaaggcugcuacauu

SEQ ID NO: 2076147 - RNA, 19 nt, Homo sapiens
  misc_RNA (1)...(19): siRNA sense strand
accaaaggcugcuacauug

SEQ ID NO: 2076148 - RNA, 19 nt, Homo sapiens
  misc_RNA (1)...(19): siRNA sense strand
uagggcugcugaccaauga

SEQ ID NO: 2076149 - RNA, 19 nt, Homo sapiens
  misc_RNA (1)...(19): siRNA sense strand
caaccuggccuucaugaac

SEQ ID NO: 2076150 - RNA, 19 nt, Homo sapiens
  misc_RNA (1)...(19): siRNA sense strand
gcccugcuguggucagaga

SEQ ID NO: 2076151 - RNA, 19 nt, Homo sapiens
  misc_RNA (1)...(19): siRNA sense strand
caaggguccucugcacauc

SEQ ID NO: 2076152 - RNA, 19 nt, Homo sapiens
  misc_RNA (1)...(19): siRNA sense strand
uguacgggcuccaggaaca

SEQ ID NO: 2076153 - RNA, 19 nt, Homo sapiens
  misc_RNA (1)...(19): siRNA sense strand
cagaagcaccucgcgcuau

SEQ ID NO: 2076154 - RNA, 19 nt, Homo sapiens
  misc_RNA (1)...(19): siRNA sense strand
ucaaggguccucugcacau

SEQ ID NO: 2076155 - RNA, 19 nt, Homo sapiens
  misc_RNA (1)...(19): siRNA sense strand
uaagggagcucucagauga

SEQ ID NO: 2076156 - RNA, 19 nt, Homo sapiens
  misc_RNA (1)...(19): siRNA sense strand
gcacaaagaccuucgcauu

SEQ ID NO: 2076157 - RNA, 19 nt, Homo sapiens
  misc_RNA (1)...(19): siRNA sense strand
gagcgaagccuccgacauu

SEQ ID NO: 2076158 - RNA, 19 nt, Homo sapiens
  misc_RNA (1)...(19): siRNA sense strand
caauaucccuggacauuuc

SEQ ID NO: 2076159 - RNA, 19 nt, Homo sapiens
  misc_RNA (1)...(19): siRNA sense strand
ucucagaccuguacgauau

SEQ ID NO: 2076160 - RNA, 19 nt, Homo sapiens
  misc_RNA (1)...(19): siRNA sense strand
ggaagcccguggaauccua

SEQ ID NO: 2076161 - RNA, 19 nt, Homo sapiens
  misc_RNA (1)...(19): siRNA sense strand
ucaaguaccucccauucga

SEQ ID NO: 2076162 - RNA, 19 nt, Homo sapiens
  misc_RNA (1)...(19): siRNA sense strand
cagacaaguucaaggacua

SEQ ID NO: 2076163 - RNA, 19 nt, Homo sapiens
  misc_RNA (1)...(19): siRNA sense strand
cggaaggucuggagaagga

SEQ ID NO: 2076164 - RNA, 19 nt, Homo sapiens
  misc_RNA (1)...(19): siRNA sense strand
gcacagccauggcguucuc

SEQ ID NO: 2076165 - RNA, 19 nt, Homo sapiens
  misc_RNA (1)...(19): siRNA sense strand
ggaggaggcccacuucauc

SEQ ID NO: 2076166 - RNA, 19 nt, Homo sapiens
  misc_RNA (1)...(19): siRNA sense strand
gaucaucaccgaauacaac

SEQ ID NO: 2076167 - RNA, 19 nt, Homo sapiens
  misc_RNA (1)...(19): siRNA sense strand
gccacucccuggaacauga

SEQ ID NO: 2076168 - RNA, 19 nt, Homo sapiens
  misc_RNA (1)...(19): siRNA sense strand
agaaggugcugcccucaga

SEQ ID NO: 2076169 - RNA, 19 nt, Homo sapiens
  misc_RNA (1)...(19): siRNA sense strand
aauccgaggugaaggacua

SEQ ID NO: 2076170 - RNA, 19 nt, Homo sapiens
  misc_RNA (1)...(19): siRNA sense strand
aggaggagcuggccgaguu

SEQ ID NO: 2076171 - RNA, 19 nt, Homo sapiens
  misc_RNA (1)...(19): siRNA sense strand
guaccucccauucgaguuu

SEQ ID NO: 2076172 - RNA, 19 nt, Homo sapiens
  misc_RNA (1)...(19): siRNA sense strand
ggcgagcucuucccaagug

SEQ ID NO: 2076173 - RNA, 19 nt, Homo sapiens
  misc_RNA (1)...(19): siRNA sense strand
gacauaaagcccucuaaca

SEQ ID NO: 2076174 - RNA, 19 nt, Homo sapiens
  misc_RNA (1)...(19): siRNA sense strand
gcgaagacgccaaagacuu

SEQ ID NO: 2076175 - RNA, 19 nt, Homo sapiens
  misc_RNA (1)...(19): siRNA sense strand
cauaaagcccucuaacauc

SEQ ID NO: 2076176 - RNA, 19 nt, Homo sapiens
  misc_RNA (1)...(19): siRNA sense strand
acaccaagcagcucaaguu

SEQ ID NO: 2076177 - RNA, 19 nt, Homo sapiens
  misc_RNA (1)...(19): siRNA sense strand
cacaauaucccuggacauu

SEQ ID NO: 2076178 - RNA, 19 nt, Homo sapiens
  misc_RNA (1)...(19): siRNA sense strand
uggcagcguucccugauga

SEQ ID NO: 2076179 - RNA, 19 nt, Homo sapiens
  misc_RNA (1)...(19): siRNA sense strand
ccaagcagcucaaguuccu

SEQ ID NO: 2076180 - RNA, 19 nt, Homo sapiens
  misc_RNA (1)...(19): siRNA sense strand
uuuaugaucuucaggaaag

SEQ ID NO: 2076181 - RNA, 19 nt, Homo sapiens
  misc_RNA (1)...(19): siRNA sense strand
ccaugggugucaucuccua

SEQ ID NO: 2076182 - RNA, 19 nt, Homo sapiens
  misc_RNA (1)...(19): siRNA sense strand
acauaaagcccucuaacau

SEQ ID NO: 2076183 - RNA, 19 nt, Homo sapiens
  misc_RNA (1)...(19): siRNA sense strand
ggacauaaagcccucuaac

SEQ ID NO: 2076184 - RNA, 19 nt, Homo sapiens
  misc_RNA (1)...(19): siRNA sense strand
cagcagccguguccucauc

SEQ ID NO: 2076185 - RNA, 19 nt, Homo sapiens
  misc_RNA (1)...(19): siRNA sense strand
ccacagccacucccuggaa

SEQ ID NO: 2076186 - RNA, 19 nt, Homo sapiens
  misc_RNA (1)...(19): siRNA sense strand
gaggaggcccacuucauca

SEQ ID NO: 2076187 - RNA, 19 nt, Homo sapiens
  misc_RNA (1)...(19): siRNA sense strand
caaguucaaggacuaccua

SEQ ID NO: 2076188 - RNA, 19 nt, Homo sapiens
  misc_RNA (1)...(19): siRNA sense strand
cacaaagaccuucgcauuc

SEQ ID NO: 2076189 - RNA, 19 nt, Homo sapiens
  misc_RNA (1)...(19): siRNA sense strand
ggagaucacagaggaguca

SEQ ID NO: 2076190 - RNA, 19 nt, Homo sapiens
  misc_RNA (1)...(19): siRNA sense strand
gcacagcgacugccuucag

SEQ ID NO: 2076191 - RNA, 19 nt, Homo sapiens
  misc_RNA (1)...(19): siRNA sense strand
gcagauccgggaccuguca

SEQ ID NO: 2076192 - RNA, 19 nt, Homo sapiens
  misc_RNA (1)...(19): siRNA sense strand
gcgaagccuccgacauuug

SEQ ID NO: 2076193 - RNA, 19 nt, Homo sapiens
  misc_RNA (1)...(19): siRNA sense strand
caaagaccuucgcauucca

SEQ ID NO: 2076194 - RNA, 19 nt, Homo sapiens
  misc_RNA (1)...(19): siRNA sense strand
gggaagacauuaaaaucug

SEQ ID NO: 2076195 - RNA, 19 nt, Homo sapiens
  misc_RNA (1)...(19): siRNA sense strand
aaucugcgacuuuggcuuu

SEQ ID NO: 2076196 - RNA, 19 nt, Homo sapiens
  misc_RNA (1)...(19): siRNA sense strand
gaggcccacuucaucaaca

SEQ ID NO: 2076197 - RNA, 19 nt, Homo sapiens
  misc_RNA (1)...(19): siRNA sense strand
cugaggaccugggugugua

SEQ ID NO: 2076198 - RNA, 19 nt, Homo sapiens
  misc_RNA (1)...(19): siRNA sense strand
gcgcgcugcuguacaagag

SEQ ID NO: 2076199 - RNA, 19 nt, Homo sapiens
  misc_RNA (1)...(19): siRNA sense strand
ugugacagccuucaucaug

SEQ ID NO: 2076200 - RNA, 19 nt, Homo sapiens
  misc_RNA (1)...(19): siRNA sense strand
gaccuucgcauuccagaca

SEQ ID NO: 2076201 - RNA, 19 nt, Homo sapiens
  misc_RNA (1)...(19): siRNA sense strand
acaaagaccuucgcauucc

SEQ ID NO: 2076202 - RNA, 19 nt, Homo sapiens
  misc_RNA (1)...(19): siRNA sense strand
ccaggaggcugaggaucug

SEQ ID NO: 2076203 - RNA, 19 nt, Homo sapiens
  misc_RNA (1)...(19): siRNA sense strand
uaucaaguaccucccauuc

SEQ ID NO: 2076204 - RNA, 19 nt, Homo sapiens
  misc_RNA (1)...(19): siRNA sense strand
gaagaagccaggccuugcu

SEQ ID NO: 2076205 - RNA, 19 nt, Homo sapiens
  misc_RNA (1)...(19): siRNA sense strand
guucaaggacuaccuagag

SEQ ID NO: 2076206 - RNA, 19 nt, Homo sapiens
  misc_RNA (1)...(19): siRNA sense strand
cauucgaguuuaugaucuu

SEQ ID NO: 2076207 - RNA, 19 nt, Homo sapiens
  misc_RNA (1)...(19): siRNA sense strand
ccucagacaaguucaagga

SEQ ID NO: 2076208 - RNA, 19 nt, Homo sapiens
  misc_RNA (1)...(19): siRNA sense strand
acaauaucccuggacauuu

SEQ ID NO: 2076209 - RNA, 19 nt, Homo sapiens
  misc_RNA (1)...(19): siRNA sense strand
cccaguaccugcacaacca

SEQ ID NO: 2076210 - RNA, 19 nt, Homo sapiens
  misc_RNA (1)...(19): siRNA sense strand
gcaaugcgcuggggacagu

SEQ ID NO: 2076211 - RNA, 19 nt, Homo sapiens
  misc_RNA (1)...(19): siRNA sense strand
acaacgagcucgccccauu

SEQ ID NO: 2076212 - RNA, 19 nt, Homo sapiens
  misc_RNA (1)...(19): siRNA sense strand
cgccaaagacuucaucaag

SEQ ID NO: 2076213 - RNA, 19 nt, Homo sapiens
  misc_RNA (1)...(19): siRNA sense strand
ggcuggcuauggcaccuuu

SEQ ID NO: 2076214 - RNA, 19 nt, Homo sapiens
  misc_RNA (1)...(19): siRNA sense strand
acaaguccauccuggugau

SEQ ID NO: 2076215 - RNA, 19 nt, Homo sapiens
  misc_RNA (1)...(19): siRNA sense strand
aggccgaggucaaggucua

SEQ ID NO: 2076216 - RNA, 19 nt, Homo sapiens
  misc_RNA (1)...(19): siRNA sense strand
gacuaccuguggcagaugu

SEQ ID NO: 2076217 - RNA, 19 nt, Homo sapiens
  misc_RNA (1)...(19): siRNA sense strand
gcaggaaugggucccuaca

SEQ ID NO: 2076218 - RNA, 19 nt, Homo sapiens
  misc_RNA (1)...(19): siRNA sense strand
gggugcugcuggucuggaa

SEQ ID NO: 2076219 - RNA, 19 nt, Homo sapiens
  misc_RNA (1)...(19): siRNA sense strand
uaccucccauucgaguuua

SEQ ID NO: 2076220 - RNA, 19 nt, Homo sapiens
  misc_RNA (1)...(19): siRNA sense strand
ccuccaggaucuugcaaag

SEQ ID NO: 2076221 - RNA, 19 nt, Homo sapiens
  misc_RNA (1)...(19): siRNA sense strand
ccgagaucauccagcagaa

SEQ ID NO: 2076222 - RNA, 19 nt, Homo sapiens
  misc_RNA (1)...(19): siRNA sense strand
ggugugacagccuucauca

SEQ ID NO: 2076223 - RNA, 19 nt, Homo sapiens
  misc_RNA (1)...(19): siRNA sense strand
cagaauccgaggugaagga

SEQ ID NO: 2076224 - RNA, 19 nt, Homo sapiens
  misc_RNA (1)...(19): siRNA sense strand
cugccacccucaagaacuu

SEQ ID NO: 2076225 - RNA, 19 nt, Homo sapiens
  misc_RNA (1)...(19): siRNA sense strand
caaccucucagaccuguac

SEQ ID NO: 2076226 - RNA, 19 nt, Homo sapiens
  misc_RNA (1)...(19): siRNA sense strand
gcgagcucuucccaaguga

SEQ ID NO: 2076227 - RNA, 19 nt, Homo sapiens
  misc_RNA (1)...(19): siRNA sense strand
ucagaccuguacgauauca

SEQ ID NO: 2076228 - RNA, 19 nt, Homo sapiens
  misc_RNA (1)...(19): siRNA sense strand
cugcagugcccguggcuaa

SEQ ID NO: 2076229 - RNA, 19 nt, Homo sapiens
  misc_RNA (1)...(19): siRNA sense strand
uucaaggacuaccuagaga

SEQ ID NO: 2076230 - RNA, 19 nt, Homo sapiens
  misc_RNA (1)...(19): siRNA sense strand
gugcugcccucagacaagu

SEQ ID NO: 2076231 - RNA, 19 nt, Homo sapiens
  misc_RNA (1)...(19): siRNA sense strand
gcacggcaugugucagcaa

SEQ ID NO: 2076232 - RNA, 19 nt, Homo sapiens
  misc_RNA (1)...(19): siRNA sense strand
cagcgaagacgccaaagac

SEQ ID NO: 2076233 - RNA, 19 nt, Homo sapiens
  misc_RNA (1)...(19): siRNA sense strand
cuaagggagcucucagaug

SEQ ID NO: 2076234 - RNA, 19 nt, Homo sapiens
  misc_RNA (1)...(19): siRNA sense strand
agcgaagccuccgacauuu

SEQ ID NO: 2076235 - RNA, 19 nt, Homo sapiens
  misc_RNA (1)...(19): siRNA sense strand
gcagugcccguggcuaaca

SEQ ID NO: 2076236 - RNA, 19 nt, Homo sapiens
  misc_RNA (1)...(19): siRNA sense strand
ccucagcgaagacgccaaa

SEQ ID NO: 2076237 - RNA, 19 nt, Homo sapiens
  misc_RNA (1)...(19): siRNA sense strand
ugacagccuucaucaugcu

SEQ ID NO: 2076238 - RNA, 19 nt, Homo sapiens
  misc_RNA (1)...(19): siRNA sense strand
acacuggccuccgacaucu

SEQ ID NO: 2076239 - RNA, 19 nt, Homo sapiens
  misc_RNA (1)...(19): siRNA sense strand
ccauucgaguuuaugaucu

SEQ ID NO: 2076240 - RNA, 19 nt, Homo sapiens
  misc_RNA (1)...(19): siRNA sense strand
cagaggagucagaggaugu

SEQ ID NO: 2076241 - RNA, 19 nt, Homo sapiens
  misc_RNA (1)...(19): siRNA sense strand
ucuggaagcccguggaauc

SEQ ID NO: 2076242 - RNA, 19 nt, Homo sapiens
  misc_RNA (1)...(19): siRNA sense strand
agccaggccuugcuuccuu

SEQ ID NO: 2076243 - RNA, 19 nt, Homo sapiens
  misc_RNA (1)...(19): siRNA sense strand
gccggaaggucuggagaag

SEQ ID NO: 2076244 - RNA, 19 nt, Homo sapiens
  misc_RNA (1)...(19): siRNA sense strand
ccucaagaacuuccagcuu

SEQ ID NO: 2076245 - RNA, 19 nt, Homo sapiens
  misc_RNA (1)...(19): siRNA sense strand
agaaggcacugaccgacua

SEQ ID NO: 2076246 - RNA, 19 nt, Homo sapiens
  misc_RNA (1)...(19): siRNA sense strand
gcacugaccgacuacaaga

SEQ ID NO: 2076247 - RNA, 19 nt, Homo sapiens
  misc_RNA (1)...(19): siRNA sense strand
ggaagggacacgugaugga

SEQ ID NO: 2076248 - RNA, 19 nt, Homo sapiens
  misc_RNA (1)...(19): siRNA sense strand
gaacaaggggucuguggaa

SEQ ID NO: 2076249 - RNA, 19 nt, Homo sapiens
  misc_RNA (1)...(19): siRNA sense strand
ugcccgaagucaaggcuua

SEQ ID NO: 2076250 - RNA, 19 nt, Homo sapiens
  misc_RNA (1)...(19): siRNA sense strand
cuguggaaaucaugagaaa

SEQ ID NO: 2076251 - RNA, 19 nt, Homo sapiens
  misc_RNA (1)...(19): siRNA sense strand
gaccauugcccgaagucaa

SEQ ID NO: 2076252 - RNA, 19 nt, Homo sapiens
  misc_RNA (1)...(19): siRNA sense strand
uggaggaggaggagcauuu

SEQ ID NO: 2076253 - RNA, 19 nt, Homo sapiens
  misc_RNA (1)...(19): siRNA sense strand
gugauggaccguaggaaga

SEQ ID NO: 2076254 - RNA, 19 nt, Homo sapiens
  misc_RNA (1)...(19): siRNA sense strand
ggaggaggaggagcauuuc

SEQ ID NO: 2076255 - RNA, 19 nt, Homo sapiens
  misc_RNA (1)...(19): siRNA sense strand
gagcaagucuaagggauuu

SEQ ID NO: 2076256 - RNA, 19 nt, Homo sapiens
  misc_RNA (1)...(19): siRNA sense strand
ucacgaagcuuagaguuug

SEQ ID NO: 2076257 - RNA, 19 nt, Homo sapiens
  misc_RNA (1)...(19): siRNA sense strand
gagaagagcgagacagaga

SEQ ID NO: 2076258 - RNA, 19 nt, Homo sapiens
  misc_RNA (1)...(19): siRNA sense strand
ccagaccaguguccuugua

SEQ ID NO: 2076259 - RNA, 19 nt, Homo sapiens
  misc_RNA (1)...(19): siRNA sense strand
gaagagcgagacagagaug

SEQ ID NO: 2076260 - RNA, 19 nt, Homo sapiens
  misc_RNA (1)...(19): siRNA sense strand
gggaaugccucagccaaca

SEQ ID NO: 2076261 - RNA, 19 nt, Homo sapiens
  misc_RNA (1)...(19): siRNA sense strand
ggagcaagucuaagggauu

SEQ ID NO: 2076262 - RNA, 19 nt, Homo sapiens
  misc_RNA (1)...(19): siRNA sense strand
ggacugggccaagcucaga

SEQ ID NO: 2076263 - RNA, 19 nt, Homo sapiens
  misc_RNA (1)...(19): siRNA sense strand
gggagaagagcgagacaga

SEQ ID NO: 2076264 - RNA, 19 nt, Homo sapiens
  misc_RNA (1)...(19): siRNA sense strand
aaggaaagcagcucucuca

SEQ ID NO: 2076265 - RNA, 19 nt, Homo sapiens
  misc_RNA (1)...(19): siRNA sense strand
gcuuagaguuuggccuuuc

SEQ ID NO: 2076266 - RNA, 19 nt, Homo sapiens
  misc_RNA (1)...(19): siRNA sense strand
uaggaggcuucuucacgaa

SEQ ID NO: 2076267 - RNA, 19 nt, Homo sapiens
  misc_RNA (1)...(19): siRNA sense strand
gcugugggcaggagaggaa

SEQ ID NO: 2076268 - RNA, 19 nt, Homo sapiens
  misc_RNA (1)...(19): siRNA sense strand
gggcaggagaggaaggaaa

SEQ ID NO: 2076269 - RNA, 19 nt, Homo sapiens
  misc_RNA (1)...(19): siRNA sense strand
gcaagucuaagggauuuua

SEQ ID NO: 2076270 - RNA, 19 nt, Homo sapiens
  misc_RNA (1)...(19): siRNA sense strand
gaguuuggccuuucauagg

SEQ ID NO: 2076271 - RNA, 19 nt, Homo sapiens
  misc_RNA (1)...(19): siRNA sense strand
ggaaggaaagcagcucucu

SEQ ID NO: 2076272 - RNA, 19 nt, Homo sapiens
  misc_RNA (1)...(19): siRNA sense strand
uagaguuuggccuuucaua

SEQ ID NO: 2076273 - RNA, 19 nt, Homo sapiens
  misc_RNA (1)...(19): siRNA sense strand
gggcagucuccgcuagaaa

SEQ ID NO: 2076274 - RNA, 19 nt, Homo sapiens
  misc_RNA (1)...(19): siRNA sense strand
gaagugaggucaaauuugu

SEQ ID NO: 2076275 - RNA, 19 nt, Homo sapiens
  misc_RNA (1)...(19): siRNA sense strand
uuaaagagcuugagaaagu

SEQ ID NO: 2076276 - RNA, 19 nt, Homo sapiens
  misc_RNA (1)...(19): siRNA sense strand
ggccagaacuacgacauua

SEQ ID NO: 2076277 - RNA, 19 nt, Homo sapiens
  misc_RNA (1)...(19): siRNA sense strand
ggaaguaggugaaccaaaa

SEQ ID NO: 2076278 - RNA, 19 nt, Homo sapiens
  misc_RNA (1)...(19): siRNA sense strand
ggucaaauuugucaagaug

SEQ ID NO: 2076279 - RNA, 19 nt, Homo sapiens
  misc_RNA (1)...(19): siRNA sense strand
gaggaaucguauauguuua

SEQ ID NO: 2076280 - RNA, 19 nt, Homo sapiens
  misc_RNA (1)...(19): siRNA sense strand
aaagaggaaucguauaugu

SEQ ID NO: 2076281 - RNA, 19 nt, Homo sapiens
  misc_RNA (1)...(19): siRNA sense strand
ggaacaaggauucauggaa

SEQ ID NO: 2076282 - RNA, 19 nt, Homo sapiens
  misc_RNA (1)...(19): siRNA sense strand
ggaagugaggucaaauuug

SEQ ID NO: 2076283 - RNA, 19 nt, Homo sapiens
  misc_RNA (1)...(19): siRNA sense strand
caagccggcuguagaugaa

SEQ ID NO: 2076284 - RNA, 19 nt, Homo sapiens
  misc_RNA (1)...(19): siRNA sense strand
agaggaaucguauauguuu

SEQ ID NO: 2076285 - RNA, 19 nt, Homo sapiens
  misc_RNA (1)...(19): siRNA sense strand
acaaagaggaaucguauau

SEQ ID NO: 2076286 - RNA, 19 nt, Homo sapiens
  misc_RNA (1)...(19): siRNA sense strand
gagacacuuuggccugaaa

SEQ ID NO: 2076287 - RNA, 19 nt, Homo sapiens
  misc_RNA (1)...(19): siRNA sense strand
uaaagagcuugagaaaguu

SEQ ID NO: 2076288 - RNA, 19 nt, Homo sapiens
  misc_RNA (1)...(19): siRNA sense strand
gaggucaaauuugucaaga

SEQ ID NO: 2076289 - RNA, 19 nt, Homo sapiens
  misc_RNA (1)...(19): siRNA sense strand
ugagaaaguucggcaggaa

SEQ ID NO: 2076290 - RNA, 19 nt, Homo sapiens
  misc_RNA (1)...(19): siRNA sense strand
ccacguccaucgaagagau

SEQ ID NO: 2076291 - RNA, 19 nt, Homo sapiens
  misc_RNA (1)...(19): siRNA sense strand
gagaaaguucggcaggaaa

SEQ ID NO: 2076292 - RNA, 19 nt, Homo sapiens
  misc_RNA (1)...(19): siRNA sense strand
gaggagaggaacaaggauu

SEQ ID NO: 2076293 - RNA, 19 nt, Homo sapiens
  misc_RNA (1)...(19): siRNA sense strand
aagauacccuucgcuuaaa

SEQ ID NO: 2076294 - RNA, 19 nt, Homo sapiens
  misc_RNA (1)...(19): siRNA sense strand
ucaaauuugucaagauguc

SEQ ID NO: 2076295 - RNA, 19 nt, Homo sapiens
  misc_RNA (1)...(19): siRNA sense strand
gcccggacgucgagaagau

SEQ ID NO: 2076296 - RNA, 19 nt, Homo sapiens
  misc_RNA (1)...(19): siRNA sense strand
guuuaaagagcuugagaaa

SEQ ID NO: 2076297 - RNA, 19 nt, Homo sapiens
  misc_RNA (1)...(19): siRNA sense strand
ccaagccggcuguagauga

SEQ ID NO: 2076298 - RNA, 19 nt, Homo sapiens
  misc_RNA (1)...(19): siRNA sense strand
ucauggaagugaggucaaa

SEQ ID NO: 2076299 - RNA, 19 nt, Homo sapiens
  misc_RNA (1)...(19): siRNA sense strand
gaccaucaaagagcucaua

SEQ ID NO: 2076300 - RNA, 19 nt, Homo sapiens
  misc_RNA (1)...(19): siRNA sense strand
caaagaggaaucguauaug

SEQ ID NO: 2076301 - RNA, 19 nt, Homo sapiens
  misc_RNA (1)...(19): siRNA sense strand
uggaagugaggucaaauuu

SEQ ID NO: 2076302 - RNA, 19 nt, Homo sapiens
  misc_RNA (1)...(19): siRNA sense strand
guuaggagcccagggagaa

SEQ ID NO: 2076303 - RNA, 19 nt, Homo sapiens
  misc_RNA (1)...(19): siRNA sense strand
ugaaauacaaagaggaauc

SEQ ID NO: 2076304 - RNA, 19 nt, Homo sapiens
  misc_RNA (1)...(19): siRNA sense strand
ccagaacuacgacauuaca

SEQ ID NO: 2076305 - RNA, 19 nt, Homo sapiens
  misc_RNA (1)...(19): siRNA sense strand
gucaagauguccacaaucc

SEQ ID NO: 2076306 - RNA, 19 nt, Homo sapiens
  misc_RNA (1)...(19): siRNA sense strand
cacaaucccgagacacuuu

SEQ ID NO: 2076307 - RNA, 19 nt, Homo sapiens
  misc_RNA (1)...(19): siRNA sense strand
ccaggcgggucuuccacuu

SEQ ID NO: 2076308 - RNA, 19 nt, Homo sapiens
  misc_RNA (1)...(19): siRNA sense strand
gaaauacaaagaggaaucg

SEQ ID NO: 2076309 - RNA, 19 nt, Homo sapiens
  misc_RNA (1)...(19): siRNA sense strand
ggaagggagcgcgaacaga

SEQ ID NO: 2076310 - RNA, 19 nt, Homo sapiens
  misc_RNA (1)...(19): siRNA sense strand
ggagcguccuuggccagaa

SEQ ID NO: 2076311 - RNA, 19 nt, Homo sapiens
  misc_RNA (1)...(19): siRNA sense strand
gacacuuuggccugaaaua

SEQ ID NO: 2076312 - RNA, 19 nt, Homo sapiens
  misc_RNA (1)...(19): siRNA sense strand
ccugaaauacaaagaggaa

SEQ ID NO: 2076313 - RNA, 19 nt, Homo sapiens
  misc_RNA (1)...(19): siRNA sense strand
ggagaggaacaaggauuca

SEQ ID NO: 2076314 - RNA, 19 nt, Homo sapiens
  misc_RNA (1)...(19): siRNA sense strand
gagcguccuuggccagaac

SEQ ID NO: 2076315 - RNA, 19 nt, Homo sapiens
  misc_RNA (1)...(19): siRNA sense strand
gaggauccgcagcaacuuc

SEQ ID NO: 2076316 - RNA, 19 nt, Homo sapiens
  misc_RNA (1)...(19): siRNA sense strand
aauacaaagaggaaucgua

SEQ ID NO: 2076317 - RNA, 19 nt, Homo sapiens
  misc_RNA (1)...(19): siRNA sense strand
cgagacacuuuggccugaa

SEQ ID NO: 2076318 - RNA, 19 nt, Homo sapiens
  misc_RNA (1)...(19): siRNA sense strand
acuuuggccugaaauacaa

SEQ ID NO: 2076319 - RNA, 19 nt, Homo sapiens
  misc_RNA (1)...(19): siRNA sense strand
ccuccaagccggcuguaga

SEQ ID NO: 2076320 - RNA, 19 nt, Homo sapiens
  misc_RNA (1)...(19): siRNA sense strand
caaggauucauggaaguga

SEQ ID NO: 2076321 - RNA, 19 nt, Homo sapiens
  misc_RNA (1)...(19): siRNA sense strand
aagaggaaucguauauguu

SEQ ID NO: 2076322 - RNA, 19 nt, Homo sapiens
  misc_RNA (1)...(19): siRNA sense strand
ccgaccagaccaucaaaga

SEQ ID NO: 2076323 - RNA, 19 nt, Homo sapiens
  misc_RNA (1)...(19): siRNA sense strand
uuaaaggcccugcgauguc

SEQ ID NO: 2076324 - RNA, 19 nt, Homo sapiens
  misc_RNA (1)...(19): siRNA sense strand
agaggaacaaggauucaug

SEQ ID NO: 2076325 - RNA, 19 nt, Homo sapiens
  misc_RNA (1)...(19): siRNA sense strand
agaacuacgacauuacaau

SEQ ID NO: 2076326 - RNA, 19 nt, Homo sapiens
  misc_RNA (1)...(19): siRNA sense strand
ccacaaucccgagacacuu

SEQ ID NO: 2076327 - RNA, 19 nt, Homo sapiens
  misc_RNA (1)...(19): siRNA sense strand
uaaacaagcugcacugaua

SEQ ID NO: 2076328 - RNA, 19 nt, Homo sapiens
  misc_RNA (1)...(19): siRNA sense strand
gaccaugugugcucuauua

SEQ ID NO: 2076329 - RNA, 19 nt, Homo sapiens
  misc_RNA (1)...(19): siRNA sense strand
ugaaagcacugcauauuaa

SEQ ID NO: 2076330 - RNA, 19 nt, Homo sapiens
  misc_RNA (1)...(19): siRNA sense strand
ugaagaagcugucaauuuc

SEQ ID NO: 2076331 - RNA, 19 nt, Homo sapiens
  misc_RNA (1)...(19): siRNA sense strand
cuaaauaccuuccuuaauc

SEQ ID NO: 2076332 - RNA, 19 nt, Homo sapiens
  misc_RNA (1)...(19): siRNA sense strand
ggaaucagcuggaauagag

SEQ ID NO: 2076333 - RNA, 19 nt, Homo sapiens
  misc_RNA (1)...(19): siRNA sense strand
gcagaauucuuaacaaauc

SEQ ID NO: 2076334 - RNA, 19 nt, Homo sapiens
  misc_RNA (1)...(19): siRNA sense strand
gaaucgagcuauuacaaau

SEQ ID NO: 2076335 - RNA, 19 nt, Homo sapiens
  misc_RNA (1)...(19): siRNA sense strand
gaauugugcugcuucuuga

SEQ ID NO: 2076336 - RNA, 19 nt, Homo sapiens
  misc_RNA (1)...(19): siRNA sense strand
cagcagaauucuuaacaaa

SEQ ID NO: 2076337 - RNA, 19 nt, Homo sapiens
  misc_RNA (1)...(19): siRNA sense strand
gagcugagaugaccaugug

SEQ ID NO: 2076338 - RNA, 19 nt, Homo sapiens
  misc_RNA (1)...(19): siRNA sense strand
caaacagaaugcaaugaaa

SEQ ID NO: 2076339 - RNA, 19 nt, Homo sapiens
  misc_RNA (1)...(19): siRNA sense strand
gcagcaagcccuuauuuau

SEQ ID NO: 2076340 - RNA, 19 nt, Homo sapiens
  misc_RNA (1)...(19): siRNA sense strand
caaggaagcuguggaagug

SEQ ID NO: 2076341 - RNA, 19 nt, Homo sapiens
  misc_RNA (1)...(19): siRNA sense strand
gggaaauucuuacauggaa

SEQ ID NO: 2076342 - RNA, 19 nt, Homo sapiens
  misc_RNA (1)...(19): siRNA sense strand
gcuagcaauuacagauuua

SEQ ID NO: 2076343 - RNA, 19 nt, Homo sapiens
  misc_RNA (1)...(19): siRNA sense strand
gaagagcuguggucugucu

SEQ ID NO: 2076344 - RNA, 19 nt, Homo sapiens
  misc_RNA (1)...(19): siRNA sense strand
gauaagggaacuucaaaug

SEQ ID NO: 2076345 - RNA, 19 nt, Homo sapiens
  misc_RNA (1)...(19): siRNA sense strand
gaucaguacuacagcagaa

SEQ ID NO: 2076346 - RNA, 19 nt, Homo sapiens
  misc_RNA (1)...(19): siRNA sense strand
agaacuaccuagccuauga

SEQ ID NO: 2076347 - RNA, 19 nt, Homo sapiens
  misc_RNA (1)...(19): siRNA sense strand
gaagcugucaauuucuuua

SEQ ID NO: 2076348 - RNA, 19 nt, Homo sapiens
  misc_RNA (1)...(19): siRNA sense strand
ggaauugugcugcuucuug

SEQ ID NO: 2076349 - RNA, 19 nt, Homo sapiens
  misc_RNA (1)...(19): siRNA sense strand
caagaugcaauuacucuaa

SEQ ID NO: 2076350 - RNA, 19 nt, Homo sapiens
  misc_RNA (1)...(19): siRNA sense strand
cagcaagcccuuauuuauu

SEQ ID NO: 2076351 - RNA, 19 nt, Homo sapiens
  misc_RNA (1)...(19): siRNA sense strand
ggaggaaggcaauuuacaa

SEQ ID NO: 2076352 - RNA, 19 nt, Homo sapiens
  misc_RNA (1)...(19): siRNA sense strand
ugaggaagaccuuaauaaa

SEQ ID NO: 2076353 - RNA, 19 nt, Homo sapiens
  misc_RNA (1)...(19): siRNA sense strand
gagcacauuucuacuacug

SEQ ID NO: 2076354 - RNA, 19 nt, Homo sapiens
  misc_RNA (1)...(19): siRNA sense strand
agaaugcaaugaaagacua

SEQ ID NO: 2076355 - RNA, 19 nt, Homo sapiens
  misc_RNA (1)...(19): siRNA sense strand
gaggaaggcaauuuacaaa

SEQ ID NO: 2076356 - RNA, 19 nt, Homo sapiens
  misc_RNA (1)...(19): siRNA sense strand
gaggaagaccuuaauaaag

SEQ ID NO: 2076357 - RNA, 19 nt, Homo sapiens
  misc_RNA (1)...(19): siRNA sense strand
cuaaugaugcucuaguaua

SEQ ID NO: 2076358 - RNA, 19 nt, Homo sapiens
  misc_RNA (1)...(19): siRNA sense strand
gcacugauaagccggacua

SEQ ID NO: 2076359 - RNA, 19 nt, Homo sapiens
  misc_RNA (1)...(19): siRNA sense strand
agacuaugccucaguuaua

SEQ ID NO: 2076360 - RNA, 19 nt, Homo sapiens
  misc_RNA (1)...(19): siRNA sense strand
gacggaaucagcuggaaua

SEQ ID NO: 2076361 - RNA, 19 nt, Homo sapiens
  misc_RNA (1)...(19): siRNA sense strand
gacuaugccucaguuauau

SEQ ID NO: 2076362 - RNA, 19 nt, Homo sapiens
  misc_RNA (1)...(19): siRNA sense strand
ccaaguacucgcuggcuua

SEQ ID NO: 2076363 - RNA, 19 nt, Homo sapiens
  misc_RNA (1)...(19): siRNA sense strand
gcuuugcacuagaggauuu

SEQ ID NO: 2076364 - RNA, 19 nt, Homo sapiens
  misc_RNA (1)...(19): siRNA sense strand
ugaagacuaugccucaguu

SEQ ID NO: 2076365 - RNA, 19 nt, Homo sapiens
  misc_RNA (1)...(19): siRNA sense strand
cugaaagcacugcauauua

SEQ ID NO: 2076366 - RNA, 19 nt, Homo sapiens
  misc_RNA (1)...(19): siRNA sense strand
caaaugaaggccaagagaa

SEQ ID NO: 2076367 - RNA, 19 nt, Homo sapiens
  misc_RNA (1)...(19): siRNA sense strand
uagcagaaauggacaaagg

SEQ ID NO: 2076368 - RNA, 19 nt, Homo sapiens
  misc_RNA (1)...(19): siRNA sense strand
gccuaaugaugcucuagua

SEQ ID NO: 2076369 - RNA, 19 nt, Homo sapiens
  misc_RNA (1)...(19): siRNA sense strand
uggaaccacuuuaccauug

SEQ ID NO: 2076370 - RNA, 19 nt, Homo sapiens
  misc_RNA (1)...(19): siRNA sense strand
gaaagacuaccaagaugca

SEQ ID NO: 2076371 - RNA, 19 nt, Homo sapiens
  misc_RNA (1)...(19): siRNA sense strand
gaagacuaugccucaguua

SEQ ID NO: 2076372 - RNA, 19 nt, Homo sapiens
  misc_RNA (1)...(19): siRNA sense strand
gaaagcacugcauauuaau

SEQ ID NO: 2076373 - RNA, 19 nt, Homo sapiens
  misc_RNA (1)...(19): siRNA sense strand
cuaccuagccuaugaagga

SEQ ID NO: 2076374 - RNA, 19 nt, Homo sapiens
  misc_RNA (1)...(19): siRNA sense strand
caagauaagggaacuucaa

SEQ ID NO: 2076375 - RNA, 19 nt, Homo sapiens
  misc_RNA (1)...(19): siRNA sense strand
gagcaaaaguucgugguaa

SEQ ID NO: 2076376 - RNA, 19 nt, Homo sapiens
  misc_RNA (1)...(19): siRNA sense strand
agcaagcccuuauuuauuc

SEQ ID NO: 2076377 - RNA, 19 nt, Homo sapiens
  misc_RNA (1)...(19): siRNA sense strand
gcaagcccuuauuuauuca

SEQ ID NO: 2076378 - RNA, 19 nt, Homo sapiens
  misc_RNA (1)...(19): siRNA sense strand
gcaaugcaggauauuaaug

SEQ ID NO: 2076379 - RNA, 19 nt, Homo sapiens
  misc_RNA (1)...(19): siRNA sense strand
cauggaggaaggcaauuua

SEQ ID NO: 2076380 - RNA, 19 nt, Homo sapiens
  misc_RNA (1)...(19): siRNA sense strand
gaacuaccuagccuaugaa

SEQ ID NO: 2076381 - RNA, 19 nt, Homo sapiens
  misc_RNA (1)...(19): siRNA sense strand
gcauauuaauccagcauac

SEQ ID NO: 2076382 - RNA, 19 nt, Homo sapiens
  misc_RNA (1)...(19): siRNA sense strand
uaaauaccuuccuuaaucg

SEQ ID NO: 2076383 - RNA, 19 nt, Homo sapiens
  misc_RNA (1)...(19): siRNA sense strand
cuuauaagcuagcaauuac

SEQ ID NO: 2076384 - RNA, 19 nt, Homo sapiens
  misc_RNA (1)...(19): siRNA sense strand
ccauuucucauucugauaa

SEQ ID NO: 2076385 - RNA, 19 nt, Homo sapiens
  misc_RNA (1)...(19): siRNA sense strand
ucucaugaaucgagcuauu

SEQ ID NO: 2076386 - RNA, 19 nt, Homo sapiens
  misc_RNA (1)...(19): siRNA sense strand
uacuacagcagaauucuua

SEQ ID NO: 2076387 - RNA, 19 nt, Homo sapiens
  misc_RNA (1)...(19): siRNA sense strand
ccauagauacugauccaaa

SEQ ID NO: 2076388 - RNA, 19 nt, Homo sapiens
  misc_RNA (1)...(19): siRNA sense strand
gcugucaauuucuuuacuu

SEQ ID NO: 2076389 - RNA, 19 nt, Homo sapiens
  misc_RNA (1)...(19): siRNA sense strand
ccagaugccacagcaauuu

SEQ ID NO: 2076390 - RNA, 19 nt, Homo sapiens
  misc_RNA (1)...(19): siRNA sense strand
cuguauaacuugggucuuu

SEQ ID NO: 2076391 - RNA, 19 nt, Homo sapiens
  misc_RNA (1)...(19): siRNA sense strand
gaagcuauggcugacuaua

SEQ ID NO: 2076392 - RNA, 19 nt, Homo sapiens
  misc_RNA (1)...(19): siRNA sense strand
aggaagaccuuaauaaagc

SEQ ID NO: 2076393 - RNA, 19 nt, Homo sapiens
  misc_RNA (1)...(19): siRNA sense strand
gaauauguucucaugaauc

SEQ ID NO: 2076394 - RNA, 19 nt, Homo sapiens
  misc_RNA (1)...(19): siRNA sense strand
ugcaggaaauaucuacuuu

SEQ ID NO: 2076395 - RNA, 19 nt, Homo sapiens
  misc_RNA (1)...(19): siRNA sense strand
aggaagagcuguggucugu

SEQ ID NO: 2076396 - RNA, 19 nt, Homo sapiens
  misc_RNA (1)...(19): siRNA sense strand
auacugauccaaagaacua

SEQ ID NO: 2076397 - RNA, 19 nt, Homo sapiens
  misc_RNA (1)...(19): siRNA sense strand
aaacaagcugcacugauaa

SEQ ID NO: 2076398 - RNA, 19 nt, Homo sapiens
  misc_RNA (1)...(19): siRNA sense strand
gaucuugcaaaguuuacua

SEQ ID NO: 2076399 - RNA, 19 nt, Homo sapiens
  misc_RNA (1)...(19): siRNA sense strand
gcugaggaagaccuuaaua

SEQ ID NO: 2076400 - RNA, 19 nt, Homo sapiens
  misc_RNA (1)...(19): siRNA sense strand
cauagauacugauccaaag

SEQ ID NO: 2076401 - RNA, 19 nt, Homo sapiens
  misc_RNA (1)...(19): siRNA sense strand
acaaacagaaugcaaugaa

SEQ ID NO: 2076402 - RNA, 19 nt, Homo sapiens
  misc_RNA (1)...(19): siRNA sense strand
ccacuuuaccauugccaua

SEQ ID NO: 2076403 - RNA, 19 nt, Homo sapiens
  misc_RNA (1)...(19): siRNA sense strand
cuaccaagaugcaauuacu

SEQ ID NO: 2076404 - RNA, 19 nt, Homo sapiens
  misc_RNA (1)...(19): siRNA sense strand
gaaauggacaaaggucuca

SEQ ID NO: 2076405 - RNA, 19 nt, Homo sapiens
  misc_RNA (1)...(19): siRNA sense strand
ccacaaacagaaugcaaug

SEQ ID NO: 2076406 - RNA, 19 nt, Homo sapiens
  misc_RNA (1)...(19): siRNA sense strand
caguauggcuuugcacuag

SEQ ID NO: 2076407 - RNA, 19 nt, Homo sapiens
  misc_RNA (1)...(19): siRNA sense strand
gaagccuaaugaugcucua

SEQ ID NO: 2076408 - RNA, 19 nt, Homo sapiens
  misc_RNA (1)...(19): siRNA sense strand
cuucagauggguaauaauu

SEQ ID NO: 2076409 - RNA, 19 nt, Homo sapiens
  misc_RNA (1)...(19): siRNA sense strand
ccauugccauagauacuga

SEQ ID NO: 2076410 - RNA, 19 nt, Homo sapiens
  misc_RNA (1)...(19): siRNA sense strand
gcauuauguuacaccaaga

SEQ ID NO: 2076411 - RNA, 19 nt, Homo sapiens
  misc_RNA (1)...(19): siRNA sense strand
ugaacuagcugaggaagac

SEQ ID NO: 2076412 - RNA, 19 nt, Homo sapiens
  misc_RNA (1)...(19): siRNA sense strand
aaugaaagacuaccaagau

SEQ ID NO: 2076413 - RNA, 19 nt, Homo sapiens
  misc_RNA (1)...(19): siRNA sense strand
gccaugaagaucaguacua

SEQ ID NO: 2076414 - RNA, 19 nt, Homo sapiens
  misc_RNA (1)...(19): siRNA sense strand
gaccagaugccacagcaau

SEQ ID NO: 2076415 - RNA, 19 nt, Homo sapiens
  misc_RNA (1)...(19): siRNA sense strand
aagcuauggcugacuauaa

SEQ ID NO: 2076416 - RNA, 19 nt, Homo sapiens
  misc_RNA (1)...(19): siRNA sense strand
aggaagcuauggcugacua

SEQ ID NO: 2076417 - RNA, 19 nt, Homo sapiens
  misc_RNA (1)...(19): siRNA sense strand
ucagugaguugaguccuau

SEQ ID NO: 2076418 - RNA, 19 nt, Homo sapiens
  misc_RNA (1)...(19): siRNA sense strand
ggcauuaacagauuaugga

SEQ ID NO: 2076419 - RNA, 19 nt, Homo sapiens
  misc_RNA (1)...(19): siRNA sense strand
ugaaucgagcuauuacaaa

SEQ ID NO: 2076420 - RNA, 19 nt, Homo sapiens
  misc_RNA (1)...(19): siRNA sense strand
ccaugaagaucaguacuac

SEQ ID NO: 2076421 - RNA, 19 nt, Homo sapiens
  misc_RNA (1)...(19): siRNA sense strand
ccaccaagcaagcacagaa

SEQ ID NO: 2076422 - RNA, 19 nt, Homo sapiens
  misc_RNA (1)...(19): siRNA sense strand
gcauuaacagauuauggaa

SEQ ID NO: 2076423 - RNA, 19 nt, Homo sapiens
  misc_RNA (1)...(19): siRNA sense strand
gucuucagauggguaauaa

SEQ ID NO: 2076424 - RNA, 19 nt, Homo sapiens
  misc_RNA (1)...(19): siRNA sense strand
cugaggaagaccuuaauaa

SEQ ID NO: 2076425 - RNA, 19 nt, Homo sapiens
  misc_RNA (1)...(19): siRNA sense strand
caaugaaagacuaccaaga

SEQ ID NO: 2076426 - RNA, 19 nt, Homo sapiens
  misc_RNA (1)...(19): siRNA sense strand
gauauuaaugcugccauga

SEQ ID NO: 2076427 - RNA, 19 nt, Homo sapiens
  misc_RNA (1)...(19): siRNA sense strand
gaagaaauccugaguaaua

SEQ ID NO: 2076428 - RNA, 19 nt, Homo sapiens
  misc_RNA (1)...(19): siRNA sense strand
gcacaaagcucucucuucu

SEQ ID NO: 2076429 - RNA, 19 nt, Homo sapiens
  misc_RNA (1)...(19): siRNA sense strand
gguaacagcacucuuauua

SEQ ID NO: 2076430 - RNA, 19 nt, Homo sapiens
  misc_RNA (1)...(19): siRNA sense strand
ggaaagcccugucacgaaa

SEQ ID NO: 2076431 - RNA, 19 nt, Homo sapiens
  misc_RNA (1)...(19): siRNA sense strand
caacaucacugucaucucu

SEQ ID NO: 2076432 - RNA, 19 nt, Homo sapiens
  misc_RNA (1)...(19): siRNA sense strand
agacauaaguguucuacaa

SEQ ID NO: 2076433 - RNA, 19 nt, Homo sapiens
  misc_RNA (1)...(19): siRNA sense strand
gaacuggagcgauuuguga

SEQ ID NO: 2076434 - RNA, 19 nt, Homo sapiens
  misc_RNA (1)...(19): siRNA sense strand
gaaauccugaguaauagua

SEQ ID NO: 2076435 - RNA, 19 nt, Homo sapiens
  misc_RNA (1)...(19): siRNA sense strand
gaucuuauauccaggcaau

SEQ ID NO: 2076436 - RNA, 19 nt, Homo sapiens
  misc_RNA (1)...(19): siRNA sense strand
caagagugaagauauguua

SEQ ID NO: 2076437 - RNA, 19 nt, Homo sapiens
  misc_RNA (1)...(19): siRNA sense strand
uaacagcacucuuauuacu

SEQ ID NO: 2076438 - RNA, 19 nt, Homo sapiens
  misc_RNA (1)...(19): siRNA sense strand
uugaagaaauccugaguaa

SEQ ID NO: 2076439 - RNA, 19 nt, Homo sapiens
  misc_RNA (1)...(19): siRNA sense strand
acaaguuccucacucauuu

SEQ ID NO: 2076440 - RNA, 19 nt, Homo sapiens
  misc_RNA (1)...(19): siRNA sense strand
ucacaauguuucuguaaug

SEQ ID NO: 2076441 - RNA, 19 nt, Homo sapiens
  misc_RNA (1)...(19): siRNA sense strand
acagagagaugcaaagcuu

SEQ ID NO: 2076442 - RNA, 19 nt, Homo sapiens
  misc_RNA (1)...(19): siRNA sense strand
gcaacuguuugaagaaauc

SEQ ID NO: 2076443 - RNA, 19 nt, Homo sapiens
  misc_RNA (1)...(19): siRNA sense strand
gcacaagucucuggacaac

SEQ ID NO: 2076444 - RNA, 19 nt, Homo sapiens
  misc_RNA (1)...(19): siRNA sense strand
gaaacccaguauaccacua

SEQ ID NO: 2076445 - RNA, 19 nt, Homo sapiens
  misc_RNA (1)...(19): siRNA sense strand
cagcaacuguuugaagaaa

SEQ ID NO: 2076446 - RNA, 19 nt, Homo sapiens
  misc_RNA (1)...(19): siRNA sense strand
cuauaucacuuguguuuca

SEQ ID NO: 2076447 - RNA, 19 nt, Homo sapiens
  misc_RNA (1)...(19): siRNA sense strand
cagcugagauggcaagagu

SEQ ID NO: 2076448 - RNA, 19 nt, Homo sapiens
  misc_RNA (1)...(19): siRNA sense strand
gaagaaagcauugauuuug

SEQ ID NO: 2076449 - RNA, 19 nt, Homo sapiens
  misc_RNA (1)...(19): siRNA sense strand
gguggacccugauggcaaa

SEQ ID NO: 2076450 - RNA, 19 nt, Homo sapiens
  misc_RNA (1)...(19): siRNA sense strand
ccauggagcaccucaguuu

SEQ ID NO: 2076451 - RNA, 19 nt, Homo sapiens
  misc_RNA (1)...(19): siRNA sense strand
ggacaucgaaucacucagu

SEQ ID NO: 2076452 - RNA, 19 nt, Homo sapiens
  misc_RNA (1)...(19): siRNA sense strand
gcacucacuugccuuggau

SEQ ID NO: 2076453 - RNA, 19 nt, Homo sapiens
  misc_RNA (1)...(19): siRNA sense strand
gcauggaggugcacaaagc

SEQ ID NO: 2076454 - RNA, 19 nt, Homo sapiens
  misc_RNA (1)...(19): siRNA sense strand
uggacaacaugccaaauga

SEQ ID NO: 2076455 - RNA, 19 nt, Homo sapiens
  misc_RNA (1)...(19): siRNA sense strand
ccgaagaaagcauugauuu

SEQ ID NO: 2076456 - RNA, 19 nt, Homo sapiens
  misc_RNA (1)...(19): siRNA sense strand
gacaaguuccucacucauu

SEQ ID NO: 2076457 - RNA, 19 nt, Homo sapiens
  misc_RNA (1)...(19): siRNA sense strand
ccugguaacagcacucuua

SEQ ID NO: 2076458 - RNA, 19 nt, Homo sapiens
  misc_RNA (1)...(19): siRNA sense strand
gaaaugaagauccguuggu

SEQ ID NO: 2076459 - RNA, 19 nt, Homo sapiens
  misc_RNA (1)...(19): siRNA sense strand
acaagucucuggacaacau

SEQ ID NO: 2076460 - RNA, 19 nt, Homo sapiens
  misc_RNA (1)...(19): siRNA sense strand
ggcuauuguugaucuuaua

SEQ ID NO: 2076461 - RNA, 19 nt, Homo sapiens
  misc_RNA (1)...(19): siRNA sense strand
caacagcaaggaaguuugu

SEQ ID NO: 2076462 - RNA, 19 nt, Homo sapiens
  misc_RNA (1)...(19): siRNA sense strand
aaaugaagauccguugguu

SEQ ID NO: 2076463 - RNA, 19 nt, Homo sapiens
  misc_RNA (1)...(19): siRNA sense strand
ugucaucucucucuaaugc

SEQ ID NO: 2076464 - RNA, 19 nt, Homo sapiens
  misc_RNA (1)...(19): siRNA sense strand
gauccagugcauaaccuua

SEQ ID NO: 2076465 - RNA, 19 nt, Homo sapiens
  misc_RNA (1)...(19): siRNA sense strand
gaagauccguugguuuuau

SEQ ID NO: 2076466 - RNA, 19 nt, Homo sapiens
  misc_RNA (1)...(19): siRNA sense strand
gggcuauuguugaucuuau

SEQ ID NO: 2076467 - RNA, 19 nt, Homo sapiens
  misc_RNA (1)...(19): siRNA sense strand
gagugaagauauguuaaag

SEQ ID NO: 2076468 - RNA, 19 nt, Homo sapiens
  misc_RNA (1)...(19): siRNA sense strand
gacaacaugccaaaugaug

SEQ ID NO: 2076469 - RNA, 19 nt, Homo sapiens
  misc_RNA (1)...(19): siRNA sense strand
uaacugauagcaaccaugu

SEQ ID NO: 2076470 - RNA, 19 nt, Homo sapiens
  misc_RNA (1)...(19): siRNA sense strand
caggcaauaugacaaguuc

SEQ ID NO: 2076471 - RNA, 19 nt, Homo sapiens
  misc_RNA (1)...(19): siRNA sense strand
gagcugaucgugcacaucu

SEQ ID NO: 2076472 - RNA, 19 nt, Homo sapiens
  misc_RNA (1)...(19): siRNA sense strand
aagaaauccugaguaauag

SEQ ID NO: 2076473 - RNA, 19 nt, Homo sapiens
  misc_RNA (1)...(19): siRNA sense strand
gagagcugcguguugaauu

SEQ ID NO: 2076474 - RNA, 19 nt, Homo sapiens
  misc_RNA (1)...(19): siRNA sense strand
gggucuauauaauggcuuu

SEQ ID NO: 2076475 - RNA, 19 nt, Homo sapiens
  misc_RNA (1)...(19): siRNA sense strand
gguuuaugcuggaaauagu

SEQ ID NO: 2076476 - RNA, 19 nt, Homo sapiens
  misc_RNA (1)...(19): siRNA sense strand
aaacaaauucagcaacugu

SEQ ID NO: 2076477 - RNA, 19 nt, Homo sapiens
  misc_RNA (1)...(19): siRNA sense strand
gaucugaaagugcuugaag

SEQ ID NO: 2076478 - RNA, 19 nt, Homo sapiens
  misc_RNA (1)...(19): siRNA sense strand
cacuagagaggauucauuu

SEQ ID NO: 2076479 - RNA, 19 nt, Homo sapiens
  misc_RNA (1)...(19): siRNA sense strand
ccacuagagaggauucauu

SEQ ID NO: 2076480 - RNA, 19 nt, Homo sapiens
  misc_RNA (1)...(19): siRNA sense strand
guucacaauguuucuguaa

SEQ ID NO: 2076481 - RNA, 19 nt, Homo sapiens
  misc_RNA (1)...(19): siRNA sense strand
ucacugucaucucucucua

SEQ ID NO: 2076482 - RNA, 19 nt, Homo sapiens
  misc_RNA (1)...(19): siRNA sense strand
uaaacaaauucagcaacug

SEQ ID NO: 2076483 - RNA, 19 nt, Homo sapiens
  misc_RNA (1)...(19): siRNA sense strand
ggaacaacaggaaccuuca

SEQ ID NO: 2076484 - RNA, 19 nt, Homo sapiens
  misc_RNA (1)...(19): siRNA sense strand
gacugucucuucugguuca

SEQ ID NO: 2076485 - RNA, 19 nt, Homo sapiens
  misc_RNA (1)...(19): siRNA sense strand
cauggagcaccucaguuua

SEQ ID NO: 2076486 - RNA, 19 nt, Homo sapiens
  misc_RNA (1)...(19): siRNA sense strand
gguucacaauguuucugua

SEQ ID NO: 2076487 - RNA, 19 nt, Homo sapiens
  misc_RNA (1)...(19): siRNA sense strand
gcuuucgggucuauauaau

SEQ ID NO: 2076488 - RNA, 19 nt, Homo sapiens
  misc_RNA (1)...(19): siRNA sense strand
ggacaacaugccaaaugau

SEQ ID NO: 2076489 - RNA, 19 nt, Homo sapiens
  misc_RNA (1)...(19): siRNA sense strand
acaaauucagcaacuguuu

SEQ ID NO: 2076490 - RNA, 19 nt, Homo sapiens
  misc_RNA (1)...(19): siRNA sense strand
uagagaggauucauuuuga

SEQ ID NO: 2076491 - RNA, 19 nt, Homo sapiens
  misc_RNA (1)...(19): siRNA sense strand
guauaccacuagagaggau

SEQ ID NO: 2076492 - RNA, 19 nt, Homo sapiens
  misc_RNA (1)...(19): siRNA sense strand
acuuggagcuggugcuuug

SEQ ID NO: 2076493 - RNA, 19 nt, Homo sapiens
  misc_RNA (1)...(19): siRNA sense strand
guaauaguaggcaacugaa

SEQ ID NO: 2076494 - RNA, 19 nt, Homo sapiens
  misc_RNA (1)...(19): siRNA sense strand
gugcacaucuucucuuuuc

SEQ ID NO: 2076495 - RNA, 19 nt, Homo sapiens
  misc_RNA (1)...(19): siRNA sense strand
uagcaaccaugugccuuug

SEQ ID NO: 2076496 - RNA, 19 nt, Homo sapiens
  misc_RNA (1)...(19): siRNA sense strand
ugcgagagcugcguguuga

SEQ ID NO: 2076497 - RNA, 19 nt, Homo sapiens
  misc_RNA (1)...(19): siRNA sense strand
aaauucagcaacuguuuga

SEQ ID NO: 2076498 - RNA, 19 nt, Homo sapiens
  misc_RNA (1)...(19): siRNA sense strand
caacaugccaaaugaugag

SEQ ID NO: 2076499 - RNA, 19 nt, Homo sapiens
  misc_RNA (1)...(19): siRNA sense strand
agagcugcguguugaauuc

SEQ ID NO: 2076500 - RNA, 19 nt, Homo sapiens
  misc_RNA (1)...(19): siRNA sense strand
gugagugccucuucuaucc

SEQ ID NO: 2076501 - RNA, 19 nt, Homo sapiens
  misc_RNA (1)...(19): siRNA sense strand
uggcuguccuguggguuua

SEQ ID NO: 2076502 - RNA, 19 nt, Homo sapiens
  misc_RNA (1)...(19): siRNA sense strand
auagcuauaucacuugugu

SEQ ID NO: 2076503 - RNA, 19 nt, Homo sapiens
  misc_RNA (1)...(19): siRNA sense strand
aaagcccugucacgaaaga

SEQ ID NO: 2076504 - RNA, 19 nt, Homo sapiens
  misc_RNA (1)...(19): siRNA sense strand
aguaauaguaggcaacuga

SEQ ID NO: 2076505 - RNA, 19 nt, Homo sapiens
  misc_RNA (1)...(19): siRNA sense strand
gagaggauucauuuugaua

SEQ ID NO: 2076506 - RNA, 19 nt, Homo sapiens
  misc_RNA (1)...(19): siRNA sense strand
ucgugcacaucuucucuuu

SEQ ID NO: 2076507 - RNA, 19 nt, Homo sapiens
  misc_RNA (1)...(19): siRNA sense strand
gcaccagcuuucgggucua

SEQ ID NO: 2076508 - RNA, 19 nt, Homo sapiens
  misc_RNA (1)...(19): siRNA sense strand
uggaaagcccugucacgaa

SEQ ID NO: 2076509 - RNA, 19 nt, Homo sapiens
  misc_RNA (1)...(19): siRNA sense strand
ucuuauuacugcaguugaa

SEQ ID NO: 2076510 - RNA, 19 nt, Homo sapiens
  misc_RNA (1)...(19): siRNA sense strand
aauaguaggcaacugaaau

SEQ ID NO: 2076511 - RNA, 19 nt, Homo sapiens
  misc_RNA (1)...(19): siRNA sense strand
cgaagaaagcauugauuuu

SEQ ID NO: 2076512 - RNA, 19 nt, Homo sapiens
  misc_RNA (1)...(19): siRNA sense strand
gugauugacacaucugguu

SEQ ID NO: 2076513 - RNA, 19 nt, Homo sapiens
  misc_RNA (1)...(19): siRNA sense strand
caaauacauaccucagcaa

SEQ ID NO: 2076514 - RNA, 19 nt, Homo sapiens
  misc_RNA (1)...(19): siRNA sense strand
guuccucacucauuuuauu

SEQ ID NO: 2076515 - RNA, 19 nt, Homo sapiens
  misc_RNA (1)...(19): siRNA sense strand
ggauucauuuugauagcua

SEQ ID NO: 2076516 - RNA, 19 nt, Homo sapiens
  misc_RNA (1)...(19): siRNA sense strand
ccaugugccuuugcaacga

SEQ ID NO: 2076517 - RNA, 19 nt, Homo sapiens
  misc_RNA (1)...(19): siRNA sense strand
gaacaacaggaaccuucag

SEQ ID NO: 2076518 - RNA, 19 nt, Homo sapiens
  misc_RNA (1)...(19): siRNA sense strand
cagcuuucgggucuauaua

SEQ ID NO: 2076519 - RNA, 19 nt, Homo sapiens
  misc_RNA (1)...(19): siRNA sense strand
acaacaugccaaaugauga

SEQ ID NO: 2076520 - RNA, 19 nt, Homo sapiens
  misc_RNA (1)...(19): siRNA sense strand
acgacugucucuucugguu

SEQ ID NO: 2076521 - RNA, 19 nt, Homo sapiens
  misc_RNA (1)...(19): siRNA sense strand
cagcaaggaaguuugucaa

SEQ ID NO: 2076522 - RNA, 19 nt, Homo sapiens
  misc_RNA (1)...(19): siRNA sense strand
ucauggacaucgaaucacu

SEQ ID NO: 2076523 - RNA, 19 nt, Homo sapiens
  misc_RNA (1)...(19): siRNA sense strand
gauguagauccagugcaua

SEQ ID NO: 2076524 - RNA, 19 nt, Homo sapiens
  misc_RNA (1)...(19): siRNA sense strand
uuccagaucuuagugacaa

SEQ ID NO: 2076525 - RNA, 19 nt, Homo sapiens
  misc_RNA (1)...(19): siRNA sense strand
ugauugacacaucugguuu

SEQ ID NO: 2076526 - RNA, 19 nt, Homo sapiens
  misc_RNA (1)...(19): siRNA sense strand
ugaagucaccgaagaaagc

SEQ ID NO: 2076527 - RNA, 19 nt, Homo sapiens
  misc_RNA (1)...(19): siRNA sense strand
ggaaugagcaugauaauuu

SEQ ID NO: 2076528 - RNA, 19 nt, Homo sapiens
  misc_RNA (1)...(19): siRNA sense strand
uaaccaagaucgaucauuu

SEQ ID NO: 2076529 - RNA, 19 nt, Homo sapiens
  misc_RNA (1)...(19): siRNA sense strand
gaaggugccacauuauuua

SEQ ID NO: 2076530 - RNA, 19 nt, Homo sapiens
  misc_RNA (1)...(19): siRNA sense strand
gaucagcagcgcacaauua

SEQ ID NO: 2076531 - RNA, 19 nt, Homo sapiens
  misc_RNA (1)...(19): siRNA sense strand
uaucaaagcuggccgcaaa

SEQ ID NO: 2076532 - RNA, 19 nt, Homo sapiens
  misc_RNA (1)...(19): siRNA sense strand
guuggaaggugccacauua

SEQ ID NO: 2076533 - RNA, 19 nt, Homo sapiens
  misc_RNA (1)...(19): siRNA sense strand
gacauuggaugcacuauga

SEQ ID NO: 2076534 - RNA, 19 nt, Homo sapiens
  misc_RNA (1)...(19): siRNA sense strand
gagaucaaagcaucaauua

SEQ ID NO: 2076535 - RNA, 19 nt, Homo sapiens
  misc_RNA (1)...(19): siRNA sense strand
guacaccacucuauguuga

SEQ ID NO: 2076536 - RNA, 19 nt, Homo sapiens
  misc_RNA (1)...(19): siRNA sense strand
cagcagcgcacaauuaaua

SEQ ID NO: 2076537 - RNA, 19 nt, Homo sapiens
  misc_RNA (1)...(19): siRNA sense strand
ggaaggugccacauuauuu

SEQ ID NO: 2076538 - RNA, 19 nt, Homo sapiens
  misc_RNA (1)...(19): siRNA sense strand
gcaugggugugguggcuua

SEQ ID NO: 2076539 - RNA, 19 nt, Homo sapiens
  misc_RNA (1)...(19): siRNA sense strand
acaaagaggaacaucauua

SEQ ID NO: 2076540 - RNA, 19 nt, Homo sapiens
  misc_RNA (1)...(19): siRNA sense strand
uggcguauguacccuauua

SEQ ID NO: 2076541 - RNA, 19 nt, Homo sapiens
  misc_RNA (1)...(19): siRNA sense strand
caagaucgaucauuuugua

SEQ ID NO: 2076542 - RNA, 19 nt, Homo sapiens
  misc_RNA (1)...(19): siRNA sense strand
ggaacucucucuucauuuu

SEQ ID NO: 2076543 - RNA, 19 nt, Homo sapiens
  misc_RNA (1)...(19): siRNA sense strand
gcaaagcaguauccuguac

SEQ ID NO: 2076544 - RNA, 19 nt, Homo sapiens
  misc_RNA (1)...(19): siRNA sense strand
cugaagaucuggcguaugu

SEQ ID NO: 2076545 - RNA, 19 nt, Homo sapiens
  misc_RNA (1)...(19): siRNA sense strand
gagaguuuguagacuguuu

SEQ ID NO: 2076546 - RNA, 19 nt, Homo sapiens
  misc_RNA (1)...(19): siRNA sense strand
gauggauucuugauguuau

SEQ ID NO: 2076547 - RNA, 19 nt, Homo sapiens
  misc_RNA (1)...(19): siRNA sense strand
guauguacccuauuacuug

SEQ ID NO: 2076548 - RNA, 19 nt, Homo sapiens
  misc_RNA (1)...(19): siRNA sense strand
guuauucuguuccaagauu

SEQ ID NO: 2076549 - RNA, 19 nt, Homo sapiens
  misc_RNA (1)...(19): siRNA sense strand
caaagaggaacaucauuau

SEQ ID NO: 2076550 - RNA, 19 nt, Homo sapiens
  misc_RNA (1)...(19): siRNA sense strand
ccacauggaaacuugauaa

SEQ ID NO: 2076551 - RNA, 19 nt, Homo sapiens
  misc_RNA (1)...(19): siRNA sense strand
auacaaaucugaaguccau

SEQ ID NO: 2076552 - RNA, 19 nt, Homo sapiens
  misc_RNA (1)...(19): siRNA sense strand
ugucugaucacaaguauuu

SEQ ID NO: 2076553 - RNA, 19 nt, Homo sapiens
  misc_RNA (1)...(19): siRNA sense strand
gcacuaugaugggcucaga

SEQ ID NO: 2076554 - RNA, 19 nt, Homo sapiens
  misc_RNA (1)...(19): siRNA sense strand
cuagggaacucucucuuca

SEQ ID NO: 2076555 - RNA, 19 nt, Homo sapiens
  misc_RNA (1)...(19): siRNA sense strand
gugaagcuacuuuggauuu

SEQ ID NO: 2076556 - RNA, 19 nt, Homo sapiens
  misc_RNA (1)...(19): siRNA sense strand
uaauggacaccuacaguuu

SEQ ID NO: 2076557 - RNA, 19 nt, Homo sapiens
  misc_RNA (1)...(19): siRNA sense strand
gaguuauucuguuccaaga

SEQ ID NO: 2076558 - RNA, 19 nt, Homo sapiens
  misc_RNA (1)...(19): siRNA sense strand
gcagcgcacaauuaauaua

SEQ ID NO: 2076559 - RNA, 19 nt, Homo sapiens
  misc_RNA (1)...(19): siRNA sense strand
uaacaaagaggaacaucau

SEQ ID NO: 2076560 - RNA, 19 nt, Homo sapiens
  misc_RNA (1)...(19): siRNA sense strand
cauggaaacuugauaagac

SEQ ID NO: 2076561 - RNA, 19 nt, Homo sapiens
  misc_RNA (1)...(19): siRNA sense strand
auagauggauucuugaugu

SEQ ID NO: 2076562 - RNA, 19 nt, Homo sapiens
  misc_RNA (1)...(19): siRNA sense strand
gaagagaucaaagcaucaa

SEQ ID NO: 2076563 - RNA, 19 nt, Homo sapiens
  misc_RNA (1)...(19): siRNA sense strand
ugauaagacuggcugugaa

SEQ ID NO: 2076564 - RNA, 19 nt, Homo sapiens
  misc_RNA (1)...(19): siRNA sense strand
cagcgcacaauuaauauaa

SEQ ID NO: 2076565 - RNA, 19 nt, Homo sapiens
  misc_RNA (1)...(19): siRNA sense strand
agggaacucucucuucauu

SEQ ID NO: 2076566 - RNA, 19 nt, Homo sapiens
  misc_RNA (1)...(19): siRNA sense strand
caagagaguuacuguucca

SEQ ID NO: 2076567 - RNA, 19 nt, Homo sapiens
  misc_RNA (1)...(19): siRNA sense strand
guccauaaagcuucauuaa

SEQ ID NO: 2076568 - RNA, 19 nt, Homo sapiens
  misc_RNA (1)...(19): siRNA sense strand
aaacagcaauacaaaucug

SEQ ID NO: 2076569 - RNA, 19 nt, Homo sapiens
  misc_RNA (1)...(19): siRNA sense strand
gaugggcucagaaauguga

SEQ ID NO: 2076570 - RNA, 19 nt, Homo sapiens
  misc_RNA (1)...(19): siRNA sense strand
gcaauacaaaucugaaguc

SEQ ID NO: 2076571 - RNA, 19 nt, Homo sapiens
  misc_RNA (1)...(19): siRNA sense strand
gaagaucuggcguauguac

SEQ ID NO: 2076572 - RNA, 19 nt, Homo sapiens
  misc_RNA (1)...(19): siRNA sense strand
ugugguggcuuaagagaau

SEQ ID NO: 2076573 - RNA, 19 nt, Homo sapiens
  misc_RNA (1)...(19): siRNA sense strand
uaagacuggcugugaauga

SEQ ID NO: 2076574 - RNA, 19 nt, Homo sapiens
  misc_RNA (1)...(19): siRNA sense strand
gauaagacuggcugugaau

SEQ ID NO: 2076575 - RNA, 19 nt, Homo sapiens
  misc_RNA (1)...(19): siRNA sense strand
gaagcuacuuuggauuugg

SEQ ID NO: 2076576 - RNA, 19 nt, Homo sapiens
  misc_RNA (1)...(19): siRNA sense strand
caucauugguuuauauucg

SEQ ID NO: 2076577 - RNA, 19 nt, Homo sapiens
  misc_RNA (1)...(19): siRNA sense strand
ggacauuggaugcacuaug

SEQ ID NO: 2076578 - RNA, 19 nt, Homo sapiens
  misc_RNA (1)...(19): siRNA sense strand
agaggaacaucauuauucu

SEQ ID NO: 2076579 - RNA, 19 nt, Homo sapiens
  misc_RNA (1)...(19): siRNA sense strand
aagaggaacaucauuauuc

SEQ ID NO: 2076580 - RNA, 19 nt, Homo sapiens
  misc_RNA (1)...(19): siRNA sense strand
ccagauugguggacauugg

SEQ ID NO: 2076581 - RNA, 19 nt, Homo sapiens
  misc_RNA (1)...(19): siRNA sense strand
aaucucaugucuaccauuc

SEQ ID NO: 2076582 - RNA, 19 nt, Homo sapiens
  misc_RNA (1)...(19): siRNA sense strand
ggugccacauuauuuaaca

SEQ ID NO: 2076583 - RNA, 19 nt, Homo sapiens
  misc_RNA (1)...(19): siRNA sense strand
agauugaacugugugaaga

SEQ ID NO: 2076584 - RNA, 19 nt, Homo sapiens
  misc_RNA (1)...(19): siRNA sense strand
ucucaugucuaccauucaa

SEQ ID NO: 2076585 - RNA, 19 nt, Homo sapiens
  misc_RNA (1)...(19): siRNA sense strand
uagauggauucuugauguu

SEQ ID NO: 2076586 - RNA, 19 nt, Homo sapiens
  misc_RNA (1)...(19): siRNA sense strand
uaugaugggcucagaaaug

SEQ ID NO: 2076587 - RNA, 19 nt, Homo sapiens
  misc_RNA (1)...(19): siRNA sense strand
caaaucugaaguccauaaa

SEQ ID NO: 2076588 - RNA, 19 nt, Homo sapiens
  misc_RNA (1)...(19): siRNA sense strand
accacucuauguugaaaua

SEQ ID NO: 2076589 - RNA, 19 nt, Homo sapiens
  misc_RNA (1)...(19): siRNA sense strand
caacugugaagcuacuuug

SEQ ID NO: 2076590 - RNA, 19 nt, Homo sapiens
  misc_RNA (1)...(19): siRNA sense strand
gaagacacuguuugaagag

SEQ ID NO: 2076591 - RNA, 19 nt, Homo sapiens
  misc_RNA (1)...(19): siRNA sense strand
gggaaugagcaugauaauu

SEQ ID NO: 2076592 - RNA, 19 nt, Homo sapiens
  misc_RNA (1)...(19): siRNA sense strand
acaaaucugaaguccauaa

SEQ ID NO: 2076593 - RNA, 19 nt, Homo sapiens
  misc_RNA (1)...(19): siRNA sense strand
ugaagcuacuuuggauuug

SEQ ID NO: 2076594 - RNA, 19 nt, Homo sapiens
  misc_RNA (1)...(19): siRNA sense strand
uagagaguuuguagacugu

SEQ ID NO: 2076595 - RNA, 19 nt, Homo sapiens
  misc_RNA (1)...(19): siRNA sense strand
acaccacucuauguugaaa

SEQ ID NO: 2076596 - RNA, 19 nt, Homo sapiens
  misc_RNA (1)...(19): siRNA sense strand
gacuggcugugaaugaguu

SEQ ID NO: 2076597 - RNA, 19 nt, Homo sapiens
  misc_RNA (1)...(19): siRNA sense strand
aaucugaaguccauaaagc

SEQ ID NO: 2076598 - RNA, 19 nt, Homo sapiens
  misc_RNA (1)...(19): siRNA sense strand
gaaaaucucaugucuacca

SEQ ID NO: 2076599 - RNA, 19 nt, Homo sapiens
  misc_RNA (1)...(19): siRNA sense strand
ccuauuacuuggauuuguc

SEQ ID NO: 2076600 - RNA, 19 nt, Homo sapiens
  misc_RNA (1)...(19): siRNA sense strand
agagaucaaagcaucaauu

SEQ ID NO: 2076601 - RNA, 19 nt, Homo sapiens
  misc_RNA (1)...(19): siRNA sense strand
uauaaauccuccccaagaa

SEQ ID NO: 2076602 - RNA, 19 nt, Homo sapiens
  misc_RNA (1)...(19): siRNA sense strand
ucauuauucugcagcuuuc

SEQ ID NO: 2076603 - RNA, 19 nt, Homo sapiens
  misc_RNA (1)...(19): siRNA sense strand
ggauuugggacaagaugga

SEQ ID NO: 2076604 - RNA, 19 nt, Homo sapiens
  misc_RNA (1)...(19): siRNA sense strand
uauauucgagcaacagaga

SEQ ID NO: 2076605 - RNA, 19 nt, Homo sapiens
  misc_RNA (1)...(19): siRNA sense strand
uggaaggugccacauuauu

SEQ ID NO: 2076606 - RNA, 19 nt, Homo sapiens
  misc_RNA (1)...(19): siRNA sense strand
gacacuguuugaagagauc

SEQ ID NO: 2076607 - RNA, 19 nt, Homo sapiens
  misc_RNA (1)...(19): siRNA sense strand
gggaacucucucuucauuu

SEQ ID NO: 2076608 - RNA, 19 nt, Homo sapiens
  misc_RNA (1)...(19): siRNA sense strand
caacauuggaaaucugaag

SEQ ID NO: 2076609 - RNA, 19 nt, Homo sapiens
  misc_RNA (1)...(19): siRNA sense strand
uuaauggacaccuacaguu

SEQ ID NO: 2076610 - RNA, 19 nt, Homo sapiens
  misc_RNA (1)...(19): siRNA sense strand
uuacaacugugaagcuacu

SEQ ID NO: 2076611 - RNA, 19 nt, Homo sapiens
  misc_RNA (1)...(19): siRNA sense strand
ucgagcaacagagaaauaa

SEQ ID NO: 2076612 - RNA, 19 nt, Homo sapiens
  misc_RNA (1)...(19): siRNA sense strand
augaugggcucagaaaugu

SEQ ID NO: 2076613 - RNA, 19 nt, Homo sapiens
  misc_RNA (1)...(19): siRNA sense strand
cuaccauucaagagaguua

SEQ ID NO: 2076614 - RNA, 19 nt, Homo sapiens
  misc_RNA (1)...(19): siRNA sense strand
agauggauucuugauguua

SEQ ID NO: 2076615 - RNA, 19 nt, Homo sapiens
  misc_RNA (1)...(19): siRNA sense strand
ugaacugugugaagagcau

SEQ ID NO: 2076616 - RNA, 19 nt, Homo sapiens
  misc_RNA (1)...(19): siRNA sense strand
agacacuguuugaagagau

SEQ ID NO: 2076617 - RNA, 19 nt, Homo sapiens
  misc_RNA (1)...(19): siRNA sense strand
uuacuuggauuugucugau

SEQ ID NO: 2076618 - RNA, 19 nt, Homo sapiens
  misc_RNA (1)...(19): siRNA sense strand
caaagcaguauccuguaca

SEQ ID NO: 2076619 - RNA, 19 nt, Homo sapiens
  misc_RNA (1)...(19): siRNA sense strand
ccucuugucaucauugguu

SEQ ID NO: 2076620 - RNA, 19 nt, Homo sapiens
  misc_RNA (1)...(19): siRNA sense strand
ugggugugguggcuuaaga

SEQ ID NO: 2076621 - RNA, 19 nt, Homo sapiens
  misc_RNA (1)...(19): siRNA sense strand
gguagagaguuuguagacu

SEQ ID NO: 2076622 - RNA, 19 nt, Homo sapiens
  misc_RNA (1)...(19): siRNA sense strand
cguauguacccuauuacuu

SEQ ID NO: 2076623 - RNA, 19 nt, Homo sapiens
  misc_RNA (1)...(19): siRNA sense strand
cugugaagcuacuuuggau

SEQ ID NO: 2076624 - RNA, 19 nt, Homo sapiens
  misc_RNA (1)...(19): siRNA sense strand
gugccacauuauuuaacaa

SEQ ID NO: 2076625 - RNA, 19 nt, Homo sapiens
  misc_RNA (1)...(19): siRNA sense strand
uaacuauaaccaagaucga

SEQ ID NO: 2076626 - RNA, 19 nt, Homo sapiens
  misc_RNA (1)...(19): siRNA sense strand
cauagauggauucuugaug

SEQ ID NO: 2076627 - RNA, 19 nt, Homo sapiens
  misc_RNA (1)...(19): siRNA sense strand
gaagucagguuccuuauua

SEQ ID NO: 2076628 - RNA, 19 nt, Homo sapiens
  misc_RNA (1)...(19): siRNA sense strand
gaaagagccugaugauauu

SEQ ID NO: 2076629 - RNA, 19 nt, Homo sapiens
  misc_RNA (1)...(19): siRNA sense strand
gcacaaggcuggugaauca

SEQ ID NO: 2076630 - RNA, 19 nt, Homo sapiens
  misc_RNA (1)...(19): siRNA sense strand
ccaaagaagucucaagaua

SEQ ID NO: 2076631 - RNA, 19 nt, Homo sapiens
  misc_RNA (1)...(19): siRNA sense strand
caccaaacaucaauucuua

SEQ ID NO: 2076632 - RNA, 19 nt, Homo sapiens
  misc_RNA (1)...(19): siRNA sense strand
ugaaagagcuguaacugaa

SEQ ID NO: 2076633 - RNA, 19 nt, Homo sapiens
  misc_RNA (1)...(19): siRNA sense strand
gcauacaucuccucuuauu

SEQ ID NO: 2076634 - RNA, 19 nt, Homo sapiens
  misc_RNA (1)...(19): siRNA sense strand
ucaaauuccuggccucuua

SEQ ID NO: 2076635 - RNA, 19 nt, Homo sapiens
  misc_RNA (1)...(19): siRNA sense strand
gagcauggaucaagagcua

SEQ ID NO: 2076636 - RNA, 19 nt, Homo sapiens
  misc_RNA (1)...(19): siRNA sense strand
aagcauacaucuccucuua

SEQ ID NO: 2076637 - RNA, 19 nt, Homo sapiens
  misc_RNA (1)...(19): siRNA sense strand
gaagaggccuuuagcuuag

SEQ ID NO: 2076638 - RNA, 19 nt, Homo sapiens
  misc_RNA (1)...(19): siRNA sense strand
gggauagcaugcacauuua

SEQ ID NO: 2076639 - RNA, 19 nt, Homo sapiens
  misc_RNA (1)...(19): siRNA sense strand
caaagaagucucaagauaa

SEQ ID NO: 2076640 - RNA, 19 nt, Homo sapiens
  misc_RNA (1)...(19): siRNA sense strand
ugagagcuaugguuaauaa

SEQ ID NO: 2076641 - RNA, 19 nt, Homo sapiens
  misc_RNA (1)...(19): siRNA sense strand
ggagcugcauucacgauua

SEQ ID NO: 2076642 - RNA, 19 nt, Homo sapiens
  misc_RNA (1)...(19): siRNA sense strand
gcauguagacaauuacuua

SEQ ID NO: 2076643 - RNA, 19 nt, Homo sapiens
  misc_RNA (1)...(19): siRNA sense strand
uggaacaucucaaacauaa

SEQ ID NO: 2076644 - RNA, 19 nt, Homo sapiens
  misc_RNA (1)...(19): siRNA sense strand
gaacagccacagcuaaauu

SEQ ID NO: 2076645 - RNA, 19 nt, Homo sapiens
  misc_RNA (1)...(19): siRNA sense strand
ggaagacgaucucauacug

SEQ ID NO: 2076646 - RNA, 19 nt, Homo sapiens
  misc_RNA (1)...(19): siRNA sense strand
guuagaaacuuacagcaaa

SEQ ID NO: 2076647 - RNA, 19 nt, Homo sapiens
  misc_RNA (1)...(19): siRNA sense strand
uauagcagcuucugucaaa

SEQ ID NO: 2076648 - RNA, 19 nt, Homo sapiens
  misc_RNA (1)...(19): siRNA sense strand
gccagucaaugaugauuua

SEQ ID NO: 2076649 - RNA, 19 nt, Homo sapiens
  misc_RNA (1)...(19): siRNA sense strand
ugaagaggccuuuagcuua

SEQ ID NO: 2076650 - RNA, 19 nt, Homo sapiens
  misc_RNA (1)...(19): siRNA sense strand
agaaagagccugaugauau

SEQ ID NO: 2076651 - RNA, 19 nt, Homo sapiens
  misc_RNA (1)...(19): siRNA sense strand
gcagauccuucauauaugu

SEQ ID NO: 2076652 - RNA, 19 nt, Homo sapiens
  misc_RNA (1)...(19): siRNA sense strand
ggagcuauuucacaguaua

SEQ ID NO: 2076653 - RNA, 19 nt, Homo sapiens
  misc_RNA (1)...(19): siRNA sense strand
ggaaauaugacaaauagug

SEQ ID NO: 2076654 - RNA, 19 nt, Homo sapiens
  misc_RNA (1)...(19): siRNA sense strand
gagcuaugguuaauaaugu

SEQ ID NO: 2076655 - RNA, 19 nt, Homo sapiens
  misc_RNA (1)...(19): siRNA sense strand
gaacuacgaccauucucua

SEQ ID NO: 2076656 - RNA, 19 nt, Homo sapiens
  misc_RNA (1)...(19): siRNA sense strand
ggacucuguuagaaacuua

SEQ ID NO: 2076657 - RNA, 19 nt, Homo sapiens
  misc_RNA (1)...(19): siRNA sense strand
caacaaggacuggaaagua

SEQ ID NO: 2076658 - RNA, 19 nt, Homo sapiens
  misc_RNA (1)...(19): siRNA sense strand
gaaaaucagucccucguaa

SEQ ID NO: 2076659 - RNA, 19 nt, Homo sapiens
  misc_RNA (1)...(19): siRNA sense strand
aagagaagauguugacaaa

SEQ ID NO: 2076660 - RNA, 19 nt, Homo sapiens
  misc_RNA (1)...(19): siRNA sense strand
gaaccaccaucagggauuu

SEQ ID NO: 2076661 - RNA, 19 nt, Homo sapiens
  misc_RNA (1)...(19): siRNA sense strand
ggaagagaauaaugucaga

SEQ ID NO: 2076662 - RNA, 19 nt, Homo sapiens
  misc_RNA (1)...(19): siRNA sense strand
ggauaaagauuuggaucaa

SEQ ID NO: 2076663 - RNA, 19 nt, Homo sapiens
  misc_RNA (1)...(19): siRNA sense strand
ugagaacgcuuauacaaca

SEQ ID NO: 2076664 - RNA, 19 nt, Homo sapiens
  misc_RNA (1)...(19): siRNA sense strand
gagaggagguggugaacau

SEQ ID NO: 2076665 - RNA, 19 nt, Homo sapiens
  misc_RNA (1)...(19): siRNA sense strand
aaaggaagacgaucucaua

SEQ ID NO: 2076666 - RNA, 19 nt, Homo sapiens
  misc_RNA (1)...(19): siRNA sense strand
gcauugagagcuaugguua

SEQ ID NO: 2076667 - RNA, 19 nt, Homo sapiens
  misc_RNA (1)...(19): siRNA sense strand
gacaaagcauugagagcua

SEQ ID NO: 2076668 - RNA, 19 nt, Homo sapiens
  misc_RNA (1)...(19): siRNA sense strand
gagaagauguugacaaagc

SEQ ID NO: 2076669 - RNA, 19 nt, Homo sapiens
  misc_RNA (1)...(19): siRNA sense strand
uggcaucucuuaggaaaua

SEQ ID NO: 2076670 - RNA, 19 nt, Homo sapiens
  misc_RNA (1)...(19): siRNA sense strand
ggaaacauugugaagauuu

SEQ ID NO: 2076671 - RNA, 19 nt, Homo sapiens
  misc_RNA (1)...(19): siRNA sense strand
gcaguuguuucucuuauca

SEQ ID NO: 2076672 - RNA, 19 nt, Homo sapiens
  misc_RNA (1)...(19): siRNA sense strand
gcagggauuuguggaauau

SEQ ID NO: 2076673 - RNA, 19 nt, Homo sapiens
  misc_RNA (1)...(19): siRNA sense strand
cagauugucuuccuuuaug

SEQ ID NO: 2076674 - RNA, 19 nt, Homo sapiens
  misc_RNA (1)...(19): siRNA sense strand
gaaugccagucaaugauga

SEQ ID NO: 2076675 - RNA, 19 nt, Homo sapiens
  misc_RNA (1)...(19): siRNA sense strand
uaauggagauggagugaug

SEQ ID NO: 2076676 - RNA, 19 nt, Homo sapiens
  misc_RNA (1)...(19): siRNA sense strand
caucaucuguuucuagaga

SEQ ID NO: 2076677 - RNA, 19 nt, Homo sapiens
  misc_RNA (1)...(19): siRNA sense strand
ucucuuaggucccuucgua

SEQ ID NO: 2076678 - RNA, 19 nt, Homo sapiens
  misc_RNA (1)...(19): siRNA sense strand
caguguggguucugacuua

SEQ ID NO: 2076679 - RNA, 19 nt, Homo sapiens
  misc_RNA (1)...(19): siRNA sense strand
ggaaggagguagugaugag

SEQ ID NO: 2076680 - RNA, 19 nt, Homo sapiens
  misc_RNA (1)...(19): siRNA sense strand
caaaguugcaugaaacaaa

SEQ ID NO: 2076681 - RNA, 19 nt, Homo sapiens
  misc_RNA (1)...(19): siRNA sense strand
gaucaaacaagaauacaug

SEQ ID NO: 2076682 - RNA, 19 nt, Homo sapiens
  misc_RNA (1)...(19): siRNA sense strand
ccaaggauauagagcaguu

SEQ ID NO: 2076683 - RNA, 19 nt, Homo sapiens
  misc_RNA (1)...(19): siRNA sense strand
cagaaaguguugguuguuu

SEQ ID NO: 2076684 - RNA, 19 nt, Homo sapiens
  misc_RNA (1)...(19): siRNA sense strand
ccacagagcagaaaguguu

SEQ ID NO: 2076685 - RNA, 19 nt, Homo sapiens
  misc_RNA (1)...(19): siRNA sense strand
gaagaucaguccagcaaaa

SEQ ID NO: 2076686 - RNA, 19 nt, Homo sapiens
  misc_RNA (1)...(19): siRNA sense strand
caacuuggauuuucacaaa

SEQ ID NO: 2076687 - RNA, 19 nt, Homo sapiens
  misc_RNA (1)...(19): siRNA sense strand
gucagcauguagacaauua

SEQ ID NO: 2076688 - RNA, 19 nt, Homo sapiens
  misc_RNA (1)...(19): siRNA sense strand
gccuuuagcuuagcacuuu

SEQ ID NO: 2076689 - RNA, 19 nt, Homo sapiens
  misc_RNA (1)...(19): siRNA sense strand
gacaauuacuuacuucuac

SEQ ID NO: 2076690 - RNA, 19 nt, Homo sapiens
  misc_RNA (1)...(19): siRNA sense strand
ggguagaaaucauggagaa

SEQ ID NO: 2076691 - RNA, 19 nt, Homo sapiens
  misc_RNA (1)...(19): siRNA sense strand
gagagcagguacagcaguu

SEQ ID NO: 2076692 - RNA, 19 nt, Homo sapiens
  misc_RNA (1)...(19): siRNA sense strand
gagcugcauucacgauuau

SEQ ID NO: 2076693 - RNA, 19 nt, Homo sapiens
  misc_RNA (1)...(19): siRNA sense strand
ggaaagaugcgcugcagau

SEQ ID NO: 2076694 - RNA, 19 nt, Homo sapiens
  misc_RNA (1)...(19): siRNA sense strand
ucaaagugcuggcggacaa

SEQ ID NO: 2076695 - RNA, 19 nt, Homo sapiens
  misc_RNA (1)...(19): siRNA sense strand
ucaagcagcuggucugagu

SEQ ID NO: 2076696 - RNA, 19 nt, Homo sapiens
  misc_RNA (1)...(19): siRNA sense strand
gcuguggucuguuuaagug

SEQ ID NO: 2076697 - RNA, 19 nt, Homo sapiens
  misc_RNA (1)...(19): siRNA sense strand
caucaauucuuacagugaa

SEQ ID NO: 2076698 - RNA, 19 nt, Homo sapiens
  misc_RNA (1)...(19): siRNA sense strand
gaaaugugcacaacuugga

SEQ ID NO: 2076699 - RNA, 19 nt, Homo sapiens
  misc_RNA (1)...(19): siRNA sense strand
gcacauuuauggaucuuac

SEQ ID NO: 2076700 - RNA, 19 nt, Homo sapiens
  misc_RNA (1)...(19): siRNA sense strand
gcaagauaauggagaugga

SEQ ID NO: 2076701 - RNA, 19 nt, Homo sapiens
  misc_RNA (1)...(19): siRNA sense strand
cauaagcauuccagaguga

SEQ ID NO: 2076702 - RNA, 19 nt, Homo sapiens
  misc_RNA (1)...(19): siRNA sense strand
ucagguuccuuauuauuug

SEQ ID NO: 2076703 - RNA, 19 nt, Homo sapiens
  misc_RNA (1)...(19): siRNA sense strand
cacagcaaauuuccaguuu

SEQ ID NO: 2076704 - RNA, 19 nt, Homo sapiens
  misc_RNA (1)...(19): siRNA sense strand
guaagacacagcaaacauu

SEQ ID NO: 2076705 - RNA, 19 nt, Homo sapiens
  misc_RNA (1)...(19): siRNA sense strand
gagcagggauuuguggaau

SEQ ID NO: 2076706 - RNA, 19 nt, Homo sapiens
  misc_RNA (1)...(19): siRNA sense strand
gaaagugcugaguaccuua

SEQ ID NO: 2076707 - RNA, 19 nt, Homo sapiens
  misc_RNA (1)...(19): siRNA sense strand
uagagaugcuuucaauuca

SEQ ID NO: 2076708 - RNA, 19 nt, Homo sapiens
  misc_RNA (1)...(19): siRNA sense strand
aaaaguaugucccaucuaa

SEQ ID NO: 2076709 - RNA, 19 nt, Homo sapiens
  misc_RNA (1)...(19): siRNA sense strand
gaacuaguccaaagcauac

SEQ ID NO: 2076710 - RNA, 19 nt, Homo sapiens
  misc_RNA (1)...(19): siRNA sense strand
ggaauaugcaguacugaug

SEQ ID NO: 2076711 - RNA, 19 nt, Homo sapiens
  misc_RNA (1)...(19): siRNA sense strand
ggagauggagugaugaaug

SEQ ID NO: 2076712 - RNA, 19 nt, Homo sapiens
  misc_RNA (1)...(19): siRNA sense strand
gaaauagcacugacagaag

SEQ ID NO: 2076713 - RNA, 19 nt, Homo sapiens
  misc_RNA (1)...(19): siRNA sense strand
agugauaucuucuguggaa

SEQ ID NO: 2076714 - RNA, 19 nt, Homo sapiens
  misc_RNA (1)...(19): siRNA sense strand
gaguguacuuccucaaaug

SEQ ID NO: 2076715 - RNA, 19 nt, Homo sapiens
  misc_RNA (1)...(19): siRNA sense strand
caucccaucugcaaaauua

SEQ ID NO: 2076716 - RNA, 19 nt, Homo sapiens
  misc_RNA (1)...(19): siRNA sense strand
uaauaucccuagcccgaaa

SEQ ID NO: 2076717 - RNA, 19 nt, Homo sapiens
  misc_RNA (1)...(19): siRNA sense strand
gcacagaugggucagaauc

SEQ ID NO: 2076718 - RNA, 19 nt, Homo sapiens
  misc_RNA (1)...(19): siRNA sense strand
cggaaaagcuugcugauau

SEQ ID NO: 2076719 - RNA, 19 nt, Homo sapiens
  misc_RNA (1)...(19): siRNA sense strand
ccucguaauuccuuagaaa

SEQ ID NO: 2076720 - RNA, 19 nt, Homo sapiens
  misc_RNA (1)...(19): siRNA sense strand
ggaaauacaagaucaucau

SEQ ID NO: 2076721 - RNA, 19 nt, Homo sapiens
  misc_RNA (1)...(19): siRNA sense strand
gugcugcuguggucuguuu

SEQ ID NO: 2076722 - RNA, 19 nt, Homo sapiens
  misc_RNA (1)...(19): siRNA sense strand
aaauuuacguucuggaguu

SEQ ID NO: 2076723 - RNA, 19 nt, Homo sapiens
  misc_RNA (1)...(19): siRNA sense strand
gaacacaaaguugcaugaa

SEQ ID NO: 2076724 - RNA, 19 nt, Homo sapiens
  misc_RNA (1)...(19): siRNA sense strand
caaugaagcucgacuugac

SEQ ID NO: 2076725 - RNA, 19 nt, Homo sapiens
  misc_RNA (1)...(19): siRNA sense strand
uaagacacagcaaacauuu

SEQ ID NO: 2076726 - RNA, 19 nt, Homo sapiens
  misc_RNA (1)...(19): siRNA sense strand
ugagcaaccuggaaucaug

SEQ ID NO: 2076727 - RNA, 19 nt, Homo sapiens
  misc_RNA (1)...(19): siRNA sense strand
gauagaaucugaugaagaa

SEQ ID NO: 2076728 - RNA, 19 nt, Homo sapiens
  misc_RNA (1)...(19): siRNA sense strand
guacugcacuugagaauuu

SEQ ID NO: 2076729 - RNA, 19 nt, Homo sapiens
  misc_RNA (1)...(19): siRNA sense strand
caaaccauguucacaauua

SEQ ID NO: 2076730 - RNA, 19 nt, Homo sapiens
  misc_RNA (1)...(19): siRNA sense strand
ggacagugaugaaauuaaa

SEQ ID NO: 2076731 - RNA, 19 nt, Homo sapiens
  misc_RNA (1)...(19): siRNA sense strand
gaaagaauaugugugauug

SEQ ID NO: 2076732 - RNA, 19 nt, Homo sapiens
  misc_RNA (1)...(19): siRNA sense strand
ugaacaagauuccucauua

SEQ ID NO: 2076733 - RNA, 19 nt, Homo sapiens
  misc_RNA (1)...(19): siRNA sense strand
gaaauauggugcaguaaga

SEQ ID NO: 2076734 - RNA, 19 nt, Homo sapiens
  misc_RNA (1)...(19): siRNA sense strand
caacaguggugaauaguaa

SEQ ID NO: 2076735 - RNA, 19 nt, Homo sapiens
  misc_RNA (1)...(19): siRNA sense strand
ggaacagacuuuauagauu

SEQ ID NO: 2076736 - RNA, 19 nt, Homo sapiens
  misc_RNA (1)...(19): siRNA sense strand
ugaagaagaugcagaauau

SEQ ID NO: 2076737 - RNA, 19 nt, Homo sapiens
  misc_RNA (1)...(19): siRNA sense strand
agacaucgcugaauuuaaa

SEQ ID NO: 2076738 - RNA, 19 nt, Homo sapiens
  misc_RNA (1)...(19): siRNA sense strand
uagaacagaugaccaauuu

SEQ ID NO: 2076739 - RNA, 19 nt, Homo sapiens
  misc_RNA (1)...(19): siRNA sense strand
caagaaaucuccauguaug

SEQ ID NO: 2076740 - RNA, 19 nt, Homo sapiens
  misc_RNA (1)...(19): siRNA sense strand
gaaaggaggucucaaucug

SEQ ID NO: 2076741 - RNA, 19 nt, Homo sapiens
  misc_RNA (1)...(19): siRNA sense strand
ggagauaagugaugcaaau

SEQ ID NO: 2076742 - RNA, 19 nt, Homo sapiens
  misc_RNA (1)...(19): siRNA sense strand
caaaccagcucaagaauca

SEQ ID NO: 2076743 - RNA, 19 nt, Homo sapiens
  misc_RNA (1)...(19): siRNA sense strand
gaagaagagcuuuauauug

SEQ ID NO: 2076744 - RNA, 19 nt, Homo sapiens
  misc_RNA (1)...(19): siRNA sense strand
uaaagaaccguguguguua

SEQ ID NO: 2076745 - RNA, 19 nt, Homo sapiens
  misc_RNA (1)...(19): siRNA sense strand
guagaaguuuguccucuua

SEQ ID NO: 2076746 - RNA, 19 nt, Homo sapiens
  misc_RNA (1)...(19): siRNA sense strand
aaacagacaucgcugaauu

SEQ ID NO: 2076747 - RNA, 19 nt, Homo sapiens
  misc_RNA (1)...(19): siRNA sense strand
gaacauacaucagauagca

SEQ ID NO: 2076748 - RNA, 19 nt, Homo sapiens
  misc_RNA (1)...(19): siRNA sense strand
cuaauaaucuugccaguga

SEQ ID NO: 2076749 - RNA, 19 nt, Homo sapiens
  misc_RNA (1)...(19): siRNA sense strand
ugaagaaugugcugaaauu

SEQ ID NO: 2076750 - RNA, 19 nt, Homo sapiens
  misc_RNA (1)...(19): siRNA sense strand
aaaggaaccuguauucuug

SEQ ID NO: 2076751 - RNA, 19 nt, Homo sapiens
  misc_RNA (1)...(19): siRNA sense strand
gcaauacgcuggugugucu

SEQ ID NO: 2076752 - RNA, 19 nt, Homo sapiens
  misc_RNA (1)...(19): siRNA sense strand
ggaacugucuuuaguggaa

SEQ ID NO: 2076753 - RNA, 19 nt, Homo sapiens
  misc_RNA (1)...(19): siRNA sense strand
gaugaaaguuugcuguuau

SEQ ID NO: 2076754 - RNA, 19 nt, Homo sapiens
  misc_RNA (1)...(19): siRNA sense strand
gagugucaguuuacaaaua

SEQ ID NO: 2076755 - RNA, 19 nt, Homo sapiens
  misc_RNA (1)...(19): siRNA sense strand
gcauguagcuaggaaguuu

SEQ ID NO: 2076756 - RNA, 19 nt, Homo sapiens
  misc_RNA (1)...(19): siRNA sense strand
caauguaucugcauaaauc

SEQ ID NO: 2076757 - RNA, 19 nt, Homo sapiens
  misc_RNA (1)...(19): siRNA sense strand
ccaaagaaguccacgaaug

SEQ ID NO: 2076758 - RNA, 19 nt, Homo sapiens
  misc_RNA (1)...(19): siRNA sense strand
cagaauauguuucaucaga

SEQ ID NO: 2076759 - RNA, 19 nt, Homo sapiens
  misc_RNA (1)...(19): siRNA sense strand
gaagaccuaccaaaugaua

SEQ ID NO: 2076760 - RNA, 19 nt, Homo sapiens
  misc_RNA (1)...(19): siRNA sense strand
gaacaagauuccucauuac

SEQ ID NO: 2076761 - RNA, 19 nt, Homo sapiens
  misc_RNA (1)...(19): siRNA sense strand
aagaagaccuaccaaauga

SEQ ID NO: 2076762 - RNA, 19 nt, Homo sapiens
  misc_RNA (1)...(19): siRNA sense strand
uaaccaagauagacugaaa

SEQ ID NO: 2076763 - RNA, 19 nt, Homo sapiens
  misc_RNA (1)...(19): siRNA sense strand
ggauuuacccuaccaauug

SEQ ID NO: 2076764 - RNA, 19 nt, Homo sapiens
  misc_RNA (1)...(19): siRNA sense strand
gcuaacagcucacuucaag

SEQ ID NO: 2076765 - RNA, 19 nt, Homo sapiens
  misc_RNA (1)...(19): siRNA sense strand
gaagaaguuuguguugauu

SEQ ID NO: 2076766 - RNA, 19 nt, Homo sapiens
  misc_RNA (1)...(19): siRNA sense strand
uguugaagauggacaauua

SEQ ID NO: 2076767 - RNA, 19 nt, Homo sapiens
  misc_RNA (1)...(19): siRNA sense strand
cuacaaagauucaaagaag

SEQ ID NO: 2076768 - RNA, 19 nt, Homo sapiens
  misc_RNA (1)...(19): siRNA sense strand
gaaaggaaauacuuaagac

SEQ ID NO: 2076769 - RNA, 19 nt, Homo sapiens
  misc_RNA (1)...(19): siRNA sense strand
guacaccacucucuaaauc

SEQ ID NO: 2076770 - RNA, 19 nt, Homo sapiens
  misc_RNA (1)...(19): siRNA sense strand
gaacagaugaccaauuuua

SEQ ID NO: 2076771 - RNA, 19 nt, Homo sapiens
  misc_RNA (1)...(19): siRNA sense strand
caaaguagccuaaagaaag

SEQ ID NO: 2076772 - RNA, 19 nt, Homo sapiens
  misc_RNA (1)...(19): siRNA sense strand
cagcaucagccaauuauua

SEQ ID NO: 2076773 - RNA, 19 nt, Homo sapiens
  misc_RNA (1)...(19): siRNA sense strand
gaacuuggccgaaaugaag

SEQ ID NO: 2076774 - RNA, 19 nt, Homo sapiens
  misc_RNA (1)...(19): siRNA sense strand
ucagagagguguacaggaa

SEQ ID NO: 2076775 - RNA, 19 nt, Homo sapiens
  misc_RNA (1)...(19): siRNA sense strand
ggagaacaauguaaaugau

SEQ ID NO: 2076776 - RNA, 19 nt, Homo sapiens
  misc_RNA (1)...(19): siRNA sense strand
ccaaucaagugaagaagaa

SEQ ID NO: 2076777 - RNA, 19 nt, Homo sapiens
  misc_RNA (1)...(19): siRNA sense strand
gcagauuccugaacaagau

SEQ ID NO: 2076778 - RNA, 19 nt, Homo sapiens
  misc_RNA (1)...(19): siRNA sense strand
gcugccacauguacuauua

SEQ ID NO: 2076779 - RNA, 19 nt, Homo sapiens
  misc_RNA (1)...(19): siRNA sense strand
aagcgcagauuuccuauaa

SEQ ID NO: 2076780 - RNA, 19 nt, Homo sapiens
  misc_RNA (1)...(19): siRNA sense strand
ccacauguacuauuaauga

SEQ ID NO: 2076781 - RNA, 19 nt, Homo sapiens
  misc_RNA (1)...(19): siRNA sense strand
gaagaaucaugaggauauu

SEQ ID NO: 2076782 - RNA, 19 nt, Homo sapiens
  misc_RNA (1)...(19): siRNA sense strand
gacauauucucaugaaaga

SEQ ID NO: 2076783 - RNA, 19 nt, Homo sapiens
  misc_RNA (1)...(19): siRNA sense strand
ucaaggauguuuaggagaa

SEQ ID NO: 2076784 - RNA, 19 nt, Homo sapiens
  misc_RNA (1)...(19): siRNA sense strand
guccaaugaugaacaauaa

SEQ ID NO: 2076785 - RNA, 19 nt, Homo sapiens
  misc_RNA (1)...(19): siRNA sense strand
gaucagaauuaucaucuag

SEQ ID NO: 2076786 - RNA, 19 nt, Homo sapiens
  misc_RNA (1)...(19): siRNA sense strand
gagauaguguucaagaaau

SEQ ID NO: 2076787 - RNA, 19 nt, Homo sapiens
  misc_RNA (1)...(19): siRNA sense strand
gaucuucucuucauuucga

SEQ ID NO: 2076788 - RNA, 19 nt, Homo sapiens
  misc_RNA (1)...(19): siRNA sense strand
gaagaagaaguuuguguug

SEQ ID NO: 2076789 - RNA, 19 nt, Homo sapiens
  misc_RNA (1)...(19): siRNA sense strand
caaaagagguacuagcuaa

SEQ ID NO: 2076790 - RNA, 19 nt, Homo sapiens
  misc_RNA (1)...(19): siRNA sense strand
ugaaauugcugccacaugu

SEQ ID NO: 2076791 - RNA, 19 nt, Homo sapiens
  misc_RNA (1)...(19): siRNA sense strand
caagaagaccuaccaaaug

SEQ ID NO: 2076792 - RNA, 19 nt, Homo sapiens
  misc_RNA (1)...(19): siRNA sense strand
aaacaaaccagcucaagaa

SEQ ID NO: 2076793 - RNA, 19 nt, Homo sapiens
  misc_RNA (1)...(19): siRNA sense strand
ucaagaaauugcagaaaug

SEQ ID NO: 2076794 - RNA, 19 nt, Homo sapiens
  misc_RNA (1)...(19): siRNA sense strand
caagagaucaguuuaggaa

SEQ ID NO: 2076795 - RNA, 19 nt, Homo sapiens
  misc_RNA (1)...(19): siRNA sense strand
ggauuuggcagauuacuuu

SEQ ID NO: 2076796 - RNA, 19 nt, Homo sapiens
  misc_RNA (1)...(19): siRNA sense strand
cacaggauuuggcagauua

SEQ ID NO: 2076797 - RNA, 19 nt, Homo sapiens
  misc_RNA (1)...(19): siRNA sense strand
ugaacaagaugaaaccuau

SEQ ID NO: 2076798 - RNA, 19 nt, Homo sapiens
  misc_RNA (1)...(19): siRNA sense strand
gaagaugcagaauauguuu

SEQ ID NO: 2076799 - RNA, 19 nt, Homo sapiens
  misc_RNA (1)...(19): siRNA sense strand
gagauaacauugccucaag

SEQ ID NO: 2076800 - RNA, 19 nt, Homo sapiens
  misc_RNA (1)...(19): siRNA sense strand
gaugagacccgaguuauga

SEQ ID NO: 2076801 - RNA, 19 nt, Homo sapiens
  misc_RNA (1)...(19): siRNA sense strand
aaauaugugucaccaguuu

SEQ ID NO: 2076802 - RNA, 19 nt, Homo sapiens
  misc_RNA (1)...(19): siRNA sense strand
gaaaguuugcuguuauuug

SEQ ID NO: 2076803 - RNA, 19 nt, Homo sapiens
  misc_RNA (1)...(19): siRNA sense strand
ugaagauucuccagauauu

SEQ ID NO: 2076804 - RNA, 19 nt, Homo sapiens
  misc_RNA (1)...(19): siRNA sense strand
aaugagagcuauuuacaug

SEQ ID NO: 2076805 - RNA, 19 nt, Homo sapiens
  misc_RNA (1)...(19): siRNA sense strand
gcaguugugucuagagaau

SEQ ID NO: 2076806 - RNA, 19 nt, Homo sapiens
  misc_RNA (1)...(19): siRNA sense strand
gcagagcauuuacgaagug

SEQ ID NO: 2076807 - RNA, 19 nt, Homo sapiens
  misc_RNA (1)...(19): siRNA sense strand
cgaagaagagcuuuauauu

SEQ ID NO: 2076808 - RNA, 19 nt, Homo sapiens
  misc_RNA (1)...(19): siRNA sense strand
aggagcaacuggagauuua

SEQ ID NO: 2076809 - RNA, 19 nt, Homo sapiens
  misc_RNA (1)...(19): siRNA sense strand
gagggagaguuugcuauuu

SEQ ID NO: 2076810 - RNA, 19 nt, Homo sapiens
  misc_RNA (1)...(19): siRNA sense strand
uaacagcucacuucaagaa

SEQ ID NO: 2076811 - RNA, 19 nt, Homo sapiens
  misc_RNA (1)...(19): siRNA sense strand
gaaauuaaggagauaagug

SEQ ID NO: 2076812 - RNA, 19 nt, Homo sapiens
  misc_RNA (1)...(19): siRNA sense strand
ugacugugauguacauaaa

SEQ ID NO: 2076813 - RNA, 19 nt, Homo sapiens
  misc_RNA (1)...(19): siRNA sense strand
gagcauuuacgaagugaua

SEQ ID NO: 2076814 - RNA, 19 nt, Homo sapiens
  misc_RNA (1)...(19): siRNA sense strand
gcuaugaauuggaaguuga

SEQ ID NO: 2076815 - RNA, 19 nt, Homo sapiens
  misc_RNA (1)...(19): siRNA sense strand
gcaaaguagccuaaagaaa

SEQ ID NO: 2076816 - RNA, 19 nt, Homo sapiens
  misc_RNA (1)...(19): siRNA sense strand
aaggaaauauggugcagua

SEQ ID NO: 2076817 - RNA, 19 nt, Homo sapiens
  misc_RNA (1)...(19): siRNA sense strand
acaaguaacucaucagaag

SEQ ID NO: 2076818 - RNA, 19 nt, Homo sapiens
  misc_RNA (1)...(19): siRNA sense strand
aaggaaagcugggauggua

SEQ ID NO: 2076819 - RNA, 19 nt, Homo sapiens
  misc_RNA (1)...(19): siRNA sense strand
gcaaaggccaaucaaguga

SEQ ID NO: 2076820 - RNA, 19 nt, Homo sapiens
  misc_RNA (1)...(19): siRNA sense strand
caaacacauugaacucauu

SEQ ID NO: 2076821 - RNA, 19 nt, Homo sapiens
  misc_RNA (1)...(19): siRNA sense strand
gaagauaugcagaauccaa

SEQ ID NO: 2076822 - RNA, 19 nt, Homo sapiens
  misc_RNA (1)...(19): siRNA sense strand
gaauuuaguuggagagaac

SEQ ID NO: 2076823 - RNA, 19 nt, Homo sapiens
  misc_RNA (1)...(19): siRNA sense strand
ucucagacuuggaauauga

SEQ ID NO: 2076824 - RNA, 19 nt, Homo sapiens
  misc_RNA (1)...(19): siRNA sense strand
gaugaagaaugugcugaaa

SEQ ID NO: 2076825 - RNA, 19 nt, Homo sapiens
  misc_RNA (1)...(19): siRNA sense strand
aaaguagccuaaagaaaga

SEQ ID NO: 2076826 - RNA, 19 nt, Homo sapiens
  misc_RNA (1)...(19): siRNA sense strand
agauagagcuucguucuga

SEQ ID NO: 2076827 - RNA, 19 nt, Homo sapiens
  misc_RNA (1)...(19): siRNA sense strand
caacacagcugcucuauua

SEQ ID NO: 2076828 - RNA, 19 nt, Homo sapiens
  misc_RNA (1)...(19): siRNA sense strand
gcacagcccugaagauuac

SEQ ID NO: 2076829 - RNA, 19 nt, Homo sapiens
  misc_RNA (1)...(19): siRNA sense strand
ggaaagaaauacacuggau

SEQ ID NO: 2076830 - RNA, 19 nt, Homo sapiens
  misc_RNA (1)...(19): siRNA sense strand
ggucuuggcuccagugugu

SEQ ID NO: 2076831 - RNA, 19 nt, Homo sapiens
  misc_RNA (1)...(19): siRNA sense strand
uugcaguucuucauuguua

SEQ ID NO: 2076832 - RNA, 19 nt, Homo sapiens
  misc_RNA (1)...(19): siRNA sense strand
cagcugcucuauuaaaugu

SEQ ID NO: 2076833 - RNA, 19 nt, Homo sapiens
  misc_RNA (1)...(19): siRNA sense strand
cuugaaaucuggauggaaa

SEQ ID NO: 2076834 - RNA, 19 nt, Homo sapiens
  misc_RNA (1)...(19): siRNA sense strand
ggaagacagugggcagaga

SEQ ID NO: 2076835 - RNA, 19 nt, Homo sapiens
  misc_RNA (1)...(19): siRNA sense strand
uuaggguucucgaauagua

SEQ ID NO: 2076836 - RNA, 19 nt, Homo sapiens
  misc_RNA (1)...(19): siRNA sense strand
gcaggaauucccaaacuug

SEQ ID NO: 2076837 - RNA, 19 nt, Homo sapiens
  misc_RNA (1)...(19): siRNA sense strand
ucacucagauacucaggaa

SEQ ID NO: 2076838 - RNA, 19 nt, Homo sapiens
  misc_RNA (1)...(19): siRNA sense strand
gcucacacuucaugucuuc

SEQ ID NO: 2076839 - RNA, 19 nt, Homo sapiens
  misc_RNA (1)...(19): siRNA sense strand
uaaaugugugcacuucuua

SEQ ID NO: 2076840 - RNA, 19 nt, Homo sapiens
  misc_RNA (1)...(19): siRNA sense strand
gcacuucuuauucugagua

SEQ ID NO: 2076841 - RNA, 19 nt, Homo sapiens
  misc_RNA (1)...(19): siRNA sense strand
gaagacagugggcagagaa

SEQ ID NO: 2076842 - RNA, 19 nt, Homo sapiens
  misc_RNA (1)...(19): siRNA sense strand
ggaaagccaggaacagguu

SEQ ID NO: 2076843 - RNA, 19 nt, Homo sapiens
  misc_RNA (1)...(19): siRNA sense strand
caucaccccucauuuuaua

SEQ ID NO: 2076844 - RNA, 19 nt, Homo sapiens
  misc_RNA (1)...(19): siRNA sense strand
uuaaaugugugcacuucuu

SEQ ID NO: 2076845 - RNA, 19 nt, Homo sapiens
  misc_RNA (1)...(19): siRNA sense strand
ggcacagcccugaagauua

SEQ ID NO: 2076846 - RNA, 19 nt, Homo sapiens
  misc_RNA (1)...(19): siRNA sense strand
gguuugcaguucuucauug

SEQ ID NO: 2076847 - RNA, 19 nt, Homo sapiens
  misc_RNA (1)...(19): siRNA sense strand
ugccaacgcugcucagaga

SEQ ID NO: 2076848 - RNA, 19 nt, Homo sapiens
  misc_RNA (1)...(19): siRNA sense strand
acacagcugcucuauuaaa

SEQ ID NO: 2076849 - RNA, 19 nt, Homo sapiens
  misc_RNA (1)...(19): siRNA sense strand
gaagauuacggaagacagu

SEQ ID NO: 2076850 - RNA, 19 nt, Homo sapiens
  misc_RNA (1)...(19): siRNA sense strand
gagcaucaccccucauuuu

SEQ ID NO: 2076851 - RNA, 19 nt, Homo sapiens
  misc_RNA (1)...(19): siRNA sense strand
gucuuaggguucucgaaua

SEQ ID NO: 2076852 - RNA, 19 nt, Homo sapiens
  misc_RNA (1)...(19): siRNA sense strand
cacagcugcucuauuaaau

SEQ ID NO: 2076853 - RNA, 19 nt, Homo sapiens
  misc_RNA (1)...(19): siRNA sense strand
ggaaggcucagcagucaca

SEQ ID NO: 2076854 - RNA, 19 nt, Homo sapiens
  misc_RNA (1)...(19): siRNA sense strand
cacuggaucccauuguuua

SEQ ID NO: 2076855 - RNA, 19 nt, Homo sapiens
  misc_RNA (1)...(19): siRNA sense strand
gcaguucuucauuguuauu

SEQ ID NO: 2076856 - RNA, 19 nt, Homo sapiens
  misc_RNA (1)...(19): siRNA sense strand
gcugcucuauuaaaugugu

SEQ ID NO: 2076857 - RNA, 19 nt, Homo sapiens
  misc_RNA (1)...(19): siRNA sense strand
cagagaauguggaaaauca

SEQ ID NO: 2076858 - RNA, 19 nt, Homo sapiens
  misc_RNA (1)...(19): siRNA sense strand
uagcaggaauucccaaacu

SEQ ID NO: 2076859 - RNA, 19 nt, Homo sapiens
  misc_RNA (1)...(19): siRNA sense strand
guugaggaccgaucuauag

SEQ ID NO: 2076860 - RNA, 19 nt, Homo sapiens
  misc_RNA (1)...(19): siRNA sense strand
gaccaacacagcugcucua

SEQ ID NO: 2076861 - RNA, 19 nt, Homo sapiens
  misc_RNA (1)...(19): siRNA sense strand
ggucuuaggguucucgaau

SEQ ID NO: 2076862 - RNA, 19 nt, Homo sapiens
  misc_RNA (1)...(19): siRNA sense strand
gguacuuccuugguccuuu

SEQ ID NO: 2076863 - RNA, 19 nt, Homo sapiens
  misc_RNA (1)...(19): siRNA sense strand
uauuaaaugugugcacuuc

SEQ ID NO: 2076864 - RNA, 19 nt, Homo sapiens
  misc_RNA (1)...(19): siRNA sense strand
cuucaugucuucagagcau

SEQ ID NO: 2076865 - RNA, 19 nt, Homo sapiens
  misc_RNA (1)...(19): siRNA sense strand
cgucuaguguggacccuau

SEQ ID NO: 2076866 - RNA, 19 nt, Homo sapiens
  misc_RNA (1)...(19): siRNA sense strand
gacagugggcagagaaugu

SEQ ID NO: 2076867 - RNA, 19 nt, Homo sapiens
  misc_RNA (1)...(19): siRNA sense strand
cgaauaguaagauggaugu

SEQ ID NO: 2076868 - RNA, 19 nt, Homo sapiens
  misc_RNA (1)...(19): siRNA sense strand
gcccaccaguguccucuca

SEQ ID NO: 2076869 - RNA, 19 nt, Homo sapiens
  misc_RNA (1)...(19): siRNA sense strand
acacuggaucccauuguuu

SEQ ID NO: 2076870 - RNA, 19 nt, Homo sapiens
  misc_RNA (1)...(19): siRNA sense strand
uacacuggaucccauuguu

SEQ ID NO: 2076871 - RNA, 19 nt, Homo sapiens
  misc_RNA (1)...(19): siRNA sense strand
guacuuccuugguccuuuu

SEQ ID NO: 2076872 - RNA, 19 nt, Homo sapiens
  misc_RNA (1)...(19): siRNA sense strand
ggaauucccaaacuugaac

SEQ ID NO: 2076873 - RNA, 19 nt, Homo sapiens
  misc_RNA (1)...(19): siRNA sense strand
cccugaagauuacggaaga

SEQ ID NO: 2076874 - RNA, 19 nt, Homo sapiens
  misc_RNA (1)...(19): siRNA sense strand
caggaauucccaaacuuga

SEQ ID NO: 2076875 - RNA, 19 nt, Homo sapiens
  misc_RNA (1)...(19): siRNA sense strand
gggcagagaauguggaaaa

SEQ ID NO: 2076876 - RNA, 19 nt, Homo sapiens
  misc_RNA (1)...(19): siRNA sense strand
ucauuguuauugucucaga

SEQ ID NO: 2076877 - RNA, 19 nt, Homo sapiens
  misc_RNA (1)...(19): siRNA sense strand
guucucgaauaguaagaug

SEQ ID NO: 2076878 - RNA, 19 nt, Homo sapiens
  misc_RNA (1)...(19): siRNA sense strand
acaggugggugcgguguug

SEQ ID NO: 2076879 - RNA, 19 nt, Homo sapiens
  misc_RNA (1)...(19): siRNA sense strand
guucuucauuguuauuguc

SEQ ID NO: 2076880 - RNA, 19 nt, Homo sapiens
  misc_RNA (1)...(19): siRNA sense strand
ccaaggaaagccaggaaca

SEQ ID NO: 2076881 - RNA, 19 nt, Homo sapiens
  misc_RNA (1)...(19): siRNA sense strand
gaucaaggugccugcaucu

SEQ ID NO: 2076882 - RNA, 19 nt, Homo sapiens
  misc_RNA (1)...(19): siRNA sense strand
ugugugcacuucuuauucu

SEQ ID NO: 2076883 - RNA, 19 nt, Homo sapiens
  misc_RNA (1)...(19): siRNA sense strand
ucuuaggguucucgaauag

SEQ ID NO: 2076884 - RNA, 19 nt, Homo sapiens
  misc_RNA (1)...(19): siRNA sense strand
ugucagagccaaacgucaa

SEQ ID NO: 2076885 - RNA, 19 nt, Homo sapiens
  misc_RNA (1)...(19): siRNA sense strand
ggacccuauuccugguuug

SEQ ID NO: 2076886 - RNA, 19 nt, Homo sapiens
  misc_RNA (1)...(19): siRNA sense strand
guuugcaguucuucauugu

SEQ ID NO: 2076887 - RNA, 19 nt, Homo sapiens
  misc_RNA (1)...(19): siRNA sense strand
ccaacacagcugcucuauu

SEQ ID NO: 2076888 - RNA, 19 nt, Homo sapiens
  misc_RNA (1)...(19): siRNA sense strand
gugacucgcaccagacuga

SEQ ID NO: 2076889 - RNA, 19 nt, Homo sapiens
  misc_RNA (1)...(19): siRNA sense strand
agucacagcccaccagugu

SEQ ID NO: 2076890 - RNA, 19 nt, Homo sapiens
  misc_RNA (1)...(19): siRNA sense strand
cggcuuccaucacucagau

SEQ ID NO: 2076891 - RNA, 19 nt, Homo sapiens
  misc_RNA (1)...(19): siRNA sense strand
gccugcaucuggcgucuag

SEQ ID NO: 2076892 - RNA, 19 nt, Homo sapiens
  misc_RNA (1)...(19): siRNA sense strand
gaaaucuggauggaaaugg

SEQ ID NO: 2076893 - RNA, 19 nt, Homo sapiens
  misc_RNA (1)...(19): siRNA sense strand
gguugcugcucacacuuca

SEQ ID NO: 2076894 - RNA, 19 nt, Homo sapiens
  misc_RNA (1)...(19): siRNA sense strand
cuucauuguuauugucuca

SEQ ID NO: 2076895 - RNA, 19 nt, Homo sapiens
  misc_RNA (1)...(19): siRNA sense strand
cuucuuauucugaguaugu

SEQ ID NO: 2076896 - RNA, 19 nt, Homo sapiens
  misc_RNA (1)...(19): siRNA sense strand
agagguugcugcucacacu

SEQ ID NO: 2076897 - RNA, 19 nt, Homo sapiens
  misc_RNA (1)...(19): siRNA sense strand
acagggaggaggaguggaa

SEQ ID NO: 2076898 - RNA, 19 nt, Homo sapiens
  misc_RNA (1)...(19): siRNA sense strand
acucagauacucaggaauc

SEQ ID NO: 2076899 - RNA, 19 nt, Homo sapiens
  misc_RNA (1)...(19): siRNA sense strand
ggacgaagcuguggaauua

SEQ ID NO: 2076900 - RNA, 19 nt, Homo sapiens
  misc_RNA (1)...(19): siRNA sense strand
gcaccaaccucuccaaaua

SEQ ID NO: 2076901 - RNA, 19 nt, Homo sapiens
  misc_RNA (1)...(19): siRNA sense strand
ggaguaagccauaauauua

SEQ ID NO: 2076902 - RNA, 19 nt, Homo sapiens
  misc_RNA (1)...(19): siRNA sense strand
gaacugaaaucgcagaaga

SEQ ID NO: 2076903 - RNA, 19 nt, Homo sapiens
  misc_RNA (1)...(19): siRNA sense strand
gaaucagccuuacuguuua

SEQ ID NO: 2076904 - RNA, 19 nt, Homo sapiens
  misc_RNA (1)...(19): siRNA sense strand
gcaaacaccuggcuaucaa

SEQ ID NO: 2076905 - RNA, 19 nt, Homo sapiens
  misc_RNA (1)...(19): siRNA sense strand
gaaagcauguagugaagaa

SEQ ID NO: 2076906 - RNA, 19 nt, Homo sapiens
  misc_RNA (1)...(19): siRNA sense strand
gcacaagcaugcauuugaa

SEQ ID NO: 2076907 - RNA, 19 nt, Homo sapiens
  misc_RNA (1)...(19): siRNA sense strand
gagaacagcauaauauuug

SEQ ID NO: 2076908 - RNA, 19 nt, Homo sapiens
  misc_RNA (1)...(19): siRNA sense strand
caacaagucacuagaaauu

SEQ ID NO: 2076909 - RNA, 19 nt, Homo sapiens
  misc_RNA (1)...(19): siRNA sense strand
gaugagaacagcauaauau

SEQ ID NO: 2076910 - RNA, 19 nt, Homo sapiens
  misc_RNA (1)...(19): siRNA sense strand
ggaauugcuugaaagacua

SEQ ID NO: 2076911 - RNA, 19 nt, Homo sapiens
  misc_RNA (1)...(19): siRNA sense strand
gcaugcauuugaauuagua

SEQ ID NO: 2076912 - RNA, 19 nt, Homo sapiens
  misc_RNA (1)...(19): siRNA sense strand
caacuuaggaucuuaaaug

SEQ ID NO: 2076913 - RNA, 19 nt, Homo sapiens
  misc_RNA (1)...(19): siRNA sense strand
gaauuaguauccaaagaug

SEQ ID NO: 2076914 - RNA, 19 nt, Homo sapiens
  misc_RNA (1)...(19): siRNA sense strand
ggacaguguuguaaugaau

SEQ ID NO: 2076915 - RNA, 19 nt, Homo sapiens
  misc_RNA (1)...(19): siRNA sense strand
gauagucagugcaguaaau

SEQ ID NO: 2076916 - RNA, 19 nt, Homo sapiens
  misc_RNA (1)...(19): siRNA sense strand
gccauaauauuaccuuuga

SEQ ID NO: 2076917 - RNA, 19 nt, Homo sapiens
  misc_RNA (1)...(19): siRNA sense strand
gaggaacuguagugaaauu

SEQ ID NO: 2076918 - RNA, 19 nt, Homo sapiens
  misc_RNA (1)...(19): siRNA sense strand
cuacgggaauuaaauauga

SEQ ID NO: 2076919 - RNA, 19 nt, Homo sapiens
  misc_RNA (1)...(19): siRNA sense strand
ccacugagauuaccaaguc

SEQ ID NO: 2076920 - RNA, 19 nt, Homo sapiens
  misc_RNA (1)...(19): siRNA sense strand
agacucggcuuccagguua

SEQ ID NO: 2076921 - RNA, 19 nt, Homo sapiens
  misc_RNA (1)...(19): siRNA sense strand
aaacaugaacggcauauuu

SEQ ID NO: 2076922 - RNA, 19 nt, Homo sapiens
  misc_RNA (1)...(19): siRNA sense strand
caaaguggacuaccaugua

SEQ ID NO: 2076923 - RNA, 19 nt, Homo sapiens
  misc_RNA (1)...(19): siRNA sense strand
aaacugagcuggaaucaac

SEQ ID NO: 2076924 - RNA, 19 nt, Homo sapiens
  misc_RNA (1)...(19): siRNA sense strand
gcaaacagccaccucgauu

SEQ ID NO: 2076925 - RNA, 19 nt, Homo sapiens
  misc_RNA (1)...(19): siRNA sense strand
ccaauugaauggcauauca

SEQ ID NO: 2076926 - RNA, 19 nt, Homo sapiens
  misc_RNA (1)...(19): siRNA sense strand
gaccaaagaagauaaagaa

SEQ ID NO: 2076927 - RNA, 19 nt, Homo sapiens
  misc_RNA (1)...(19): siRNA sense strand
gaagaaagacaguaucuac

SEQ ID NO: 2076928 - RNA, 19 nt, Homo sapiens
  misc_RNA (1)...(19): siRNA sense strand
gaagaagggaauaaugauu

SEQ ID NO: 2076929 - RNA, 19 nt, Homo sapiens
  misc_RNA (1)...(19): siRNA sense strand
agacuagaauccuucauuu

SEQ ID NO: 2076930 - RNA, 19 nt, Homo sapiens
  misc_RNA (1)...(19): siRNA sense strand
caagcaugcauuugaauua

SEQ ID NO: 2076931 - RNA, 19 nt, Homo sapiens
  misc_RNA (1)...(19): siRNA sense strand
gcaagcauuugauccuuau

SEQ ID NO: 2076932 - RNA, 19 nt, Homo sapiens
  misc_RNA (1)...(19): siRNA sense strand
gaagacagagaauguuuga

SEQ ID NO: 2076933 - RNA, 19 nt, Homo sapiens
  misc_RNA (1)...(19): siRNA sense strand
gcacuacuuugaguuacua

SEQ ID NO: 2076934 - RNA, 19 nt, Homo sapiens
  misc_RNA (1)...(19): siRNA sense strand
ggacauguuugaucaggau

SEQ ID NO: 2076935 - RNA, 19 nt, Homo sapiens
  misc_RNA (1)...(19): siRNA sense strand
ccagaacacuuuauaaacu

SEQ ID NO: 2076936 - RNA, 19 nt, Homo sapiens
  misc_RNA (1)...(19): siRNA sense strand
agaaucagccuuacuguuu

SEQ ID NO: 2076937 - RNA, 19 nt, Homo sapiens
  misc_RNA (1)...(19): siRNA sense strand
ggagauagucagugcagua

SEQ ID NO: 2076938 - RNA, 19 nt, Homo sapiens
  misc_RNA (1)...(19): siRNA sense strand
uaccauguaucccuauaua

SEQ ID NO: 2076939 - RNA, 19 nt, Homo sapiens
  misc_RNA (1)...(19): siRNA sense strand
ggaggaaaguagcugaaau

SEQ ID NO: 2076940 - RNA, 19 nt, Homo sapiens
  misc_RNA (1)...(19): siRNA sense strand
gaaagagacuuggaauugc

SEQ ID NO: 2076941 - RNA, 19 nt, Homo sapiens
  misc_RNA (1)...(19): siRNA sense strand
ugaaagagacuuggaauug

SEQ ID NO: 2076942 - RNA, 19 nt, Homo sapiens
  misc_RNA (1)...(19): siRNA sense strand
ugaaaucgcagaagaaaga

SEQ ID NO: 2076943 - RNA, 19 nt, Homo sapiens
  misc_RNA (1)...(19): siRNA sense strand
uauccggcauuaugaaaua

SEQ ID NO: 2076944 - RNA, 19 nt, Homo sapiens
  misc_RNA (1)...(19): siRNA sense strand
gaggaaaguagcugaaauu

SEQ ID NO: 2076945 - RNA, 19 nt, Homo sapiens
  misc_RNA (1)...(19): siRNA sense strand
uuaaagaggcaguucguua

SEQ ID NO: 2076946 - RNA, 19 nt, Homo sapiens
  misc_RNA (1)...(19): siRNA sense strand
acaagucacuagaaauuga

SEQ ID NO: 2076947 - RNA, 19 nt, Homo sapiens
  misc_RNA (1)...(19): siRNA sense strand
uugcugagcuuacugauug

SEQ ID NO: 2076948 - RNA, 19 nt, Homo sapiens
  misc_RNA (1)...(19): siRNA sense strand
gagggaccauugacaagaa

SEQ ID NO: 2076949 - RNA, 19 nt, Homo sapiens
  misc_RNA (1)...(19): siRNA sense strand
uaccacauaucguucauuu

SEQ ID NO: 2076950 - RNA, 19 nt, Homo sapiens
  misc_RNA (1)...(19): siRNA sense strand
gaagacacaguugaaauga

SEQ ID NO: 2076951 - RNA, 19 nt, Homo sapiens
  misc_RNA (1)...(19): siRNA sense strand
gagcuggaaucaacagugu

SEQ ID NO: 2076952 - RNA, 19 nt, Homo sapiens
  misc_RNA (1)...(19): siRNA sense strand
gauaugaggagauucuuug

SEQ ID NO: 2076953 - RNA, 19 nt, Homo sapiens
  misc_RNA (1)...(19): siRNA sense strand
aagcaguccucaucccuua

SEQ ID NO: 2076954 - RNA, 19 nt, Homo sapiens
  misc_RNA (1)...(19): siRNA sense strand
gacaguaucuacgggaauu

SEQ ID NO: 2076955 - RNA, 19 nt, Homo sapiens
  misc_RNA (1)...(19): siRNA sense strand
gaaauucagcaguaucaga

SEQ ID NO: 2076956 - RNA, 19 nt, Homo sapiens
  misc_RNA (1)...(19): siRNA sense strand
ugaaacauuugaucucaug

SEQ ID NO: 2076957 - RNA, 19 nt, Homo sapiens
  misc_RNA (1)...(19): siRNA sense strand
gcauaauauuugcugcuaa

SEQ ID NO: 2076958 - RNA, 19 nt, Homo sapiens
  misc_RNA (1)...(19): siRNA sense strand
gauauuggacaguguugua

SEQ ID NO: 2076959 - RNA, 19 nt, Homo sapiens
  misc_RNA (1)...(19): siRNA sense strand
ugaaaugacugaugaaagc

SEQ ID NO: 2076960 - RNA, 19 nt, Homo sapiens
  misc_RNA (1)...(19): siRNA sense strand
gaauugacugugaaacuuu

SEQ ID NO: 2076961 - RNA, 19 nt, Homo sapiens
  misc_RNA (1)...(19): siRNA sense strand
auacaugaauugacuguga

SEQ ID NO: 2076962 - RNA, 19 nt, Homo sapiens
  misc_RNA (1)...(19): siRNA sense strand
gaccuuuccucacccaauu

SEQ ID NO: 2076963 - RNA, 19 nt, Homo sapiens
  misc_RNA (1)...(19): siRNA sense strand
ggaauuaagucaagaucac

SEQ ID NO: 2076964 - RNA, 19 nt, Homo sapiens
  misc_RNA (1)...(19): siRNA sense strand
ggaacuguagugaaauuaa

SEQ ID NO: 2076965 - RNA, 19 nt, Homo sapiens
  misc_RNA (1)...(19): siRNA sense strand
aggaggaacuguagugaaa

SEQ ID NO: 2076966 - RNA, 19 nt, Homo sapiens
  misc_RNA (1)...(19): siRNA sense strand
gcccuuauuucucuucauu

SEQ ID NO: 2076967 - RNA, 19 nt, Homo sapiens
  misc_RNA (1)...(19): siRNA sense strand
cagaagagcaagcauuuga

SEQ ID NO: 2076968 - RNA, 19 nt, Homo sapiens
  misc_RNA (1)...(19): siRNA sense strand
gagucucucuauuauauug

SEQ ID NO: 2076969 - RNA, 19 nt, Homo sapiens
  misc_RNA (1)...(19): siRNA sense strand
ugacauagguuugguuucu

SEQ ID NO: 2076970 - RNA, 19 nt, Homo sapiens
  misc_RNA (1)...(19): siRNA sense strand
guacuuuucuuaccacaua

SEQ ID NO: 2076971 - RNA, 19 nt, Homo sapiens
  misc_RNA (1)...(19): siRNA sense strand
ccauguaucccuauauauu

SEQ ID NO: 2076972 - RNA, 19 nt, Homo sapiens
  misc_RNA (1)...(19): siRNA sense strand
gaucaugaugcuucaaauu

SEQ ID NO: 2076973 - RNA, 19 nt, Homo sapiens
  misc_RNA (1)...(19): siRNA sense strand
ggaauauguccaaccagua

SEQ ID NO: 2076974 - RNA, 19 nt, Homo sapiens
  misc_RNA (1)...(19): siRNA sense strand
caaggaauauguccaacca

SEQ ID NO: 2076975 - RNA, 19 nt, Homo sapiens
  misc_RNA (1)...(19): siRNA sense strand
ugaauugacugugaaacuu

SEQ ID NO: 2076976 - RNA, 19 nt, Homo sapiens
  misc_RNA (1)...(19): siRNA sense strand
guuuaaaccuucugauauc

SEQ ID NO: 2076977 - RNA, 19 nt, Homo sapiens
  misc_RNA (1)...(19): siRNA sense strand
agaaagcuguuuaaaccuu

SEQ ID NO: 2076978 - RNA, 19 nt, Homo sapiens
  misc_RNA (1)...(19): siRNA sense strand
gaugcuaugugcucaguuc

SEQ ID NO: 2076979 - RNA, 19 nt, Homo sapiens
  misc_RNA (1)...(19): siRNA sense strand
ccaccucgauuuccuagga

SEQ ID NO: 2076980 - RNA, 19 nt, Homo sapiens
  misc_RNA (1)...(19): siRNA sense strand
gaaauugaaccucgaaacu

SEQ ID NO: 2076981 - RNA, 19 nt, Homo sapiens
  misc_RNA (1)...(19): siRNA sense strand
ucaaccgucugaacuugua

SEQ ID NO: 2076982 - RNA, 19 nt, Homo sapiens
  misc_RNA (1)...(19): siRNA sense strand
agucugaucuuuacaggaa

SEQ ID NO: 2076983 - RNA, 19 nt, Homo sapiens
  misc_RNA (1)...(19): siRNA sense strand
gugcagaccuuaaaagauu

SEQ ID NO: 2076984 - RNA, 19 nt, Homo sapiens
  misc_RNA (1)...(19): siRNA sense strand
uacucuagaucgaauguua

SEQ ID NO: 2076985 - RNA, 19 nt, Homo sapiens
  misc_RNA (1)...(19): siRNA sense strand
aaaguggacuaccauguau

SEQ ID NO: 2076986 - RNA, 19 nt, Homo sapiens
  misc_RNA (1)...(19): siRNA sense strand
gaacaagaagacagagaau

SEQ ID NO: 2076987 - RNA, 19 nt, Homo sapiens
  misc_RNA (1)...(19): siRNA sense strand
gagauccucuuccugauac

SEQ ID NO: 2076988 - RNA, 19 nt, Homo sapiens
  misc_RNA (1)...(19): siRNA sense strand
gaaagagaaccauguaaaa

SEQ ID NO: 2076989 - RNA, 19 nt, Homo sapiens
  misc_RNA (1)...(19): siRNA sense strand
cuuaaaaucuccuggaaua

SEQ ID NO: 2076990 - RNA, 19 nt, Homo sapiens
  misc_RNA (1)...(19): siRNA sense strand
gagcaagcauuugauccuu

SEQ ID NO: 2076991 - RNA, 19 nt, Homo sapiens
  misc_RNA (1)...(19): siRNA sense strand
agaaagagaaccauguaaa

SEQ ID NO: 2076992 - RNA, 19 nt, Homo sapiens
  misc_RNA (1)...(19): siRNA sense strand
gagaaauucagcaguauca

SEQ ID NO: 2076993 - RNA, 19 nt, Homo sapiens
  misc_RNA (1)...(19): siRNA sense strand
cuggagaaauucagcagua

SEQ ID NO: 2076994 - RNA, 19 nt, Homo sapiens
  misc_RNA (1)...(19): siRNA sense strand
gaaaguccaccuccaccaa

SEQ ID NO: 2076995 - RNA, 19 nt, Homo sapiens
  misc_RNA (1)...(19): siRNA sense strand
ggcauuggguugaacauca

SEQ ID NO: 2076996 - RNA, 19 nt, Homo sapiens
  misc_RNA (1)...(19): siRNA sense strand
ggagaacaguccgaaaugg

SEQ ID NO: 2076997 - RNA, 19 nt, Homo sapiens
  misc_RNA (1)...(19): siRNA sense strand
gaagcaaacaccuggcuau

SEQ ID NO: 2076998 - RNA, 19 nt, Homo sapiens
  misc_RNA (1)...(19): siRNA sense strand
uaaagaggcaguucguuau

SEQ ID NO: 2076999 - RNA, 19 nt, Homo sapiens
  misc_RNA (1)...(19): siRNA sense strand
gaacaucuguauuucuuga

SEQ ID NO: 2077000 - RNA, 19 nt, Homo sapiens
  misc_RNA (1)...(19): siRNA sense strand
ggaacaacaugaagauaaa

SEQ ID NO: 2077001 - RNA, 19 nt, Homo sapiens
  misc_RNA (1)...(19): siRNA sense strand
ggaagaugcucugggcuua

SEQ ID NO: 2077002 - RNA, 19 nt, Homo sapiens
  misc_RNA (1)...(19): siRNA sense strand
gaaauuagaagcaggacua

SEQ ID NO: 2077003 - RNA, 19 nt, Homo sapiens
  misc_RNA (1)...(19): siRNA sense strand
gcacagagcagucauggaa

SEQ ID NO: 2077004 - RNA, 19 nt, Homo sapiens
  misc_RNA (1)...(19): siRNA sense strand
gaagaacacuaauggaaca

SEQ ID NO: 2077005 - RNA, 19 nt, Homo sapiens
  misc_RNA (1)...(19): siRNA sense strand
caacagugauggcuucuga

SEQ ID NO: 2077006 - RNA, 19 nt, Homo sapiens
  misc_RNA (1)...(19): siRNA sense strand
gaagauaaaucggcaguca

SEQ ID NO: 2077007 - RNA, 19 nt, Homo sapiens
  misc_RNA (1)...(19): siRNA sense strand
gcauucagguggccaagua

SEQ ID NO: 2077008 - RNA, 19 nt, Homo sapiens
  misc_RNA (1)...(19): siRNA sense strand
gauugaaacucugagaaua

SEQ ID NO: 2077009 - RNA, 19 nt, Homo sapiens
  misc_RNA (1)...(19): siRNA sense strand
ccaagaagcagaagaauau

SEQ ID NO: 2077010 - RNA, 19 nt, Homo sapiens
  misc_RNA (1)...(19): siRNA sense strand
aaacagaugugcaggagaa

SEQ ID NO: 2077011 - RNA, 19 nt, Homo sapiens
  misc_RNA (1)...(19): siRNA sense strand
gaccucaucuuguauucua

SEQ ID NO: 2077012 - RNA, 19 nt, Homo sapiens
  misc_RNA (1)...(19): siRNA sense strand
ggaaauacaagaagaugaa

SEQ ID NO: 2077013 - RNA, 19 nt, Homo sapiens
  misc_RNA (1)...(19): siRNA sense strand
gaaacuaccuaaaaggaua

SEQ ID NO: 2077014 - RNA, 19 nt, Homo sapiens
  misc_RNA (1)...(19): siRNA sense strand
gcagaagaauauuuaagug

SEQ ID NO: 2077015 - RNA, 19 nt, Homo sapiens
  misc_RNA (1)...(19): siRNA sense strand
gcgagaacccaguaucuua

SEQ ID NO: 2077016 - RNA, 19 nt, Homo sapiens
  misc_RNA (1)...(19): siRNA sense strand
gaauaaagcauuggaauag

SEQ ID NO: 2077017 - RNA, 19 nt, Homo sapiens
  misc_RNA (1)...(19): siRNA sense strand
ggaagcugguucuuucaaa

SEQ ID NO: 2077018 - RNA, 19 nt, Homo sapiens
  misc_RNA (1)...(19): siRNA sense strand
gaacuuacaguggaacuaa

SEQ ID NO: 2077019 - RNA, 19 nt, Homo sapiens
  misc_RNA (1)...(19): siRNA sense strand
uagaagaacugcagaaugg

SEQ ID NO: 2077020 - RNA, 19 nt, Homo sapiens
  misc_RNA (1)...(19): siRNA sense strand
acaagaagaugaagacaau

SEQ ID NO: 2077021 - RNA, 19 nt, Homo sapiens
  misc_RNA (1)...(19): siRNA sense strand
gcaggagaaugauaaggaa

SEQ ID NO: 2077022 - RNA, 19 nt, Homo sapiens
  misc_RNA (1)...(19): siRNA sense strand
agaauaaacugugcagauu

SEQ ID NO: 2077023 - RNA, 19 nt, Homo sapiens
  misc_RNA (1)...(19): siRNA sense strand
gcaggacuauggaauuuca

SEQ ID NO: 2077024 - RNA, 19 nt, Homo sapiens
  misc_RNA (1)...(19): siRNA sense strand
caaauaugcugcaagucuu

SEQ ID NO: 2077025 - RNA, 19 nt, Homo sapiens
  misc_RNA (1)...(19): siRNA sense strand
uguaagagccauuggaaua

SEQ ID NO: 2077026 - RNA, 19 nt, Homo sapiens
  misc_RNA (1)...(19): siRNA sense strand
gaacauuccucaagaugcu

SEQ ID NO: 2077027 - RNA, 19 nt, Homo sapiens
  misc_RNA (1)...(19): siRNA sense strand
ugacugaaguugcugaaga

SEQ ID NO: 2077028 - RNA, 19 nt, Homo sapiens
  misc_RNA (1)...(19): siRNA sense strand
gaacagccauugacuacac

SEQ ID NO: 2077029 - RNA, 19 nt, Homo sapiens
  misc_RNA (1)...(19): siRNA sense strand
uauuguggcugaagaaauu

SEQ ID NO: 2077030 - RNA, 19 nt, Homo sapiens
  misc_RNA (1)...(19): siRNA sense strand
gcucugaggauguggaaua

SEQ ID NO: 2077031 - RNA, 19 nt, Homo sapiens
  misc_RNA (1)...(19): siRNA sense strand
gcacaagacauaguucaaa

SEQ ID NO: 2077032 - RNA, 19 nt, Homo sapiens
  misc_RNA (1)...(19): siRNA sense strand
caagguuaauugugucaaa

SEQ ID NO: 2077033 - RNA, 19 nt, Homo sapiens
  misc_RNA (1)...(19): siRNA sense strand
uuaugaagcugauagaaga

SEQ ID NO: 2077034 - RNA, 19 nt, Homo sapiens
  misc_RNA (1)...(19): siRNA sense strand
gaagauccucaacaaguuu

SEQ ID NO: 2077035 - RNA, 19 nt, Homo sapiens
  misc_RNA (1)...(19): siRNA sense strand
ugaagauccucaacaaguu

SEQ ID NO: 2077036 - RNA, 19 nt, Homo sapiens
  misc_RNA (1)...(19): siRNA sense strand
caauguagaagaacacuaa

SEQ ID NO: 2077037 - RNA, 19 nt, Homo sapiens
  misc_RNA (1)...(19): siRNA sense strand
ccaacaggcuacuuaugaa

SEQ ID NO: 2077038 - RNA, 19 nt, Homo sapiens
  misc_RNA (1)...(19): siRNA sense strand
gaaaggcgagaacccagua

SEQ ID NO: 2077039 - RNA, 19 nt, Homo sapiens
  misc_RNA (1)...(19): siRNA sense strand
ggucugauguauguacuaa

SEQ ID NO: 2077040 - RNA, 19 nt, Homo sapiens
  misc_RNA (1)...(19): siRNA sense strand
ggaacuaacagaagaaaca

SEQ ID NO: 2077041 - RNA, 19 nt, Homo sapiens
  misc_RNA (1)...(19): siRNA sense strand
ccaagaacaucuguauuuc

SEQ ID NO: 2077042 - RNA, 19 nt, Homo sapiens
  misc_RNA (1)...(19): siRNA sense strand
gaagugaacauuccucaag

SEQ ID NO: 2077043 - RNA, 19 nt, Homo sapiens
  misc_RNA (1)...(19): siRNA sense strand
gaaagcaccucuguugacu

SEQ ID NO: 2077044 - RNA, 19 nt, Homo sapiens
  misc_RNA (1)...(19): siRNA sense strand
gaacugaaugaggcuguua

SEQ ID NO: 2077045 - RNA, 19 nt, Homo sapiens
  misc_RNA (1)...(19): siRNA sense strand
gaauaaacugugcagauug

SEQ ID NO: 2077046 - RNA, 19 nt, Homo sapiens
  misc_RNA (1)...(19): siRNA sense strand
cuacuaugcuucuuacuag

SEQ ID NO: 2077047 - RNA, 19 nt, Homo sapiens
  misc_RNA (1)...(19): siRNA sense strand
ugaagacaaugacauggaa

SEQ ID NO: 2077048 - RNA, 19 nt, Homo sapiens
  misc_RNA (1)...(19): siRNA sense strand
gccaacaggcuacuuauga

SEQ ID NO: 2077049 - RNA, 19 nt, Homo sapiens
  misc_RNA (1)...(19): siRNA sense strand
ccgaagaucuccuaaaauu

SEQ ID NO: 2077050 - RNA, 19 nt, Homo sapiens
  misc_RNA (1)...(19): siRNA sense strand
gcacauugaggaaauacaa

SEQ ID NO: 2077051 - RNA, 19 nt, Homo sapiens
  misc_RNA (1)...(19): siRNA sense strand
cccaagaacaucuguauuu

SEQ ID NO: 2077052 - RNA, 19 nt, Homo sapiens
  misc_RNA (1)...(19): siRNA sense strand
ggaaaucacuguggaaaau

SEQ ID NO: 2077053 - RNA, 19 nt, Homo sapiens
  misc_RNA (1)...(19): siRNA sense strand
gagagcaucccacuagcua

SEQ ID NO: 2077054 - RNA, 19 nt, Homo sapiens
  misc_RNA (1)...(19): siRNA sense strand
gaaccgaagaucuccuaaa

SEQ ID NO: 2077055 - RNA, 19 nt, Homo sapiens
  misc_RNA (1)...(19): siRNA sense strand
gaauuucaguugccaaggu

SEQ ID NO: 2077056 - RNA, 19 nt, Homo sapiens
  misc_RNA (1)...(19): siRNA sense strand
ccacagaaauugcccuuuu

SEQ ID NO: 2077057 - RNA, 19 nt, Homo sapiens
  misc_RNA (1)...(19): siRNA sense strand
ggaauagaaguaauugguu

SEQ ID NO: 2077058 - RNA, 19 nt, Homo sapiens
  misc_RNA (1)...(19): siRNA sense strand
uaugauagaugccgcaaca

SEQ ID NO: 2077059 - RNA, 19 nt, Homo sapiens
  misc_RNA (1)...(19): siRNA sense strand
gauggcuucugacagcaua

SEQ ID NO: 2077060 - RNA, 19 nt, Homo sapiens
  misc_RNA (1)...(19): siRNA sense strand
gggacuacauaccaauuug

SEQ ID NO: 2077061 - RNA, 19 nt, Homo sapiens
  misc_RNA (1)...(19): siRNA sense strand
gaauggaaaccuccucuuc

SEQ ID NO: 2077062 - RNA, 19 nt, Homo sapiens
  misc_RNA (1)...(19): siRNA sense strand
gcagaaauacuuggauuca

SEQ ID NO: 2077063 - RNA, 19 nt, Homo sapiens
  misc_RNA (1)...(19): siRNA sense strand
gauccaagaagcagaagaa

SEQ ID NO: 2077064 - RNA, 19 nt, Homo sapiens
  misc_RNA (1)...(19): siRNA sense strand
caacugcagcugauaaugu

SEQ ID NO: 2077065 - RNA, 19 nt, Homo sapiens
  misc_RNA (1)...(19): siRNA sense strand
gagaauaaagcauuggaau

SEQ ID NO: 2077066 - RNA, 19 nt, Homo sapiens
  misc_RNA (1)...(19): siRNA sense strand
ugaagaagauguuuugcua

SEQ ID NO: 2077067 - RNA, 19 nt, Homo sapiens
  misc_RNA (1)...(19): siRNA sense strand
gaauauaacaucgauccaa

SEQ ID NO: 2077068 - RNA, 19 nt, Homo sapiens
  misc_RNA (1)...(19): siRNA sense strand
agauauagauguucaggau

SEQ ID NO: 2077069 - RNA, 19 nt, Homo sapiens
  misc_RNA (1)...(19): siRNA sense strand
gacaaaauccgcucagaua

SEQ ID NO: 2077070 - RNA, 19 nt, Homo sapiens
  misc_RNA (1)...(19): siRNA sense strand
uagaagaacacuaauggaa

SEQ ID NO: 2077071 - RNA, 19 nt, Homo sapiens
  misc_RNA (1)...(19): siRNA sense strand
ggagaaugauaaggaacaa

SEQ ID NO: 2077072 - RNA, 19 nt, Homo sapiens
  misc_RNA (1)...(19): siRNA sense strand
aagcagaaauacuuggauu

SEQ ID NO: 2077073 - RNA, 19 nt, Homo sapiens
  misc_RNA (1)...(19): siRNA sense strand
aagcaccucuguugacuga

SEQ ID NO: 2077074 - RNA, 19 nt, Homo sapiens
  misc_RNA (1)...(19): siRNA sense strand
ggacuugacccagcaaugu

SEQ ID NO: 2077075 - RNA, 19 nt, Homo sapiens
  misc_RNA (1)...(19): siRNA sense strand
uagacgugauaaagaguua

SEQ ID NO: 2077076 - RNA, 19 nt, Homo sapiens
  misc_RNA (1)...(19): siRNA sense strand
gcucugggcuuaaguuuug

SEQ ID NO: 2077077 - RNA, 19 nt, Homo sapiens
  misc_RNA (1)...(19): siRNA sense strand
agaccaggcuauaauugaa

SEQ ID NO: 2077078 - RNA, 19 nt, Homo sapiens
  misc_RNA (1)...(19): siRNA sense strand
aauaacagaugcacuacug

SEQ ID NO: 2077079 - RNA, 19 nt, Homo sapiens
  misc_RNA (1)...(19): siRNA sense strand
cacaagacauaguucaaau

SEQ ID NO: 2077080 - RNA, 19 nt, Homo sapiens
  misc_RNA (1)...(19): siRNA sense strand
aaacagaacacagcaguga

SEQ ID NO: 2077081 - RNA, 19 nt, Homo sapiens
  misc_RNA (1)...(19): siRNA sense strand
auauagauguucaggauga

SEQ ID NO: 2077082 - RNA, 19 nt, Homo sapiens
  misc_RNA (1)...(19): siRNA sense strand
gaaauugcccuuuuggaaa

SEQ ID NO: 2077083 - RNA, 19 nt, Homo sapiens
  misc_RNA (1)...(19): siRNA sense strand
gaaaagaaccgauugaaac

SEQ ID NO: 2077084 - RNA, 19 nt, Homo sapiens
  misc_RNA (1)...(19): siRNA sense strand
cuguaaauccucaguauaa

SEQ ID NO: 2077085 - RNA, 19 nt, Homo sapiens
  misc_RNA (1)...(19): siRNA sense strand
gcaccucuguugacugaag

SEQ ID NO: 2077086 - RNA, 19 nt, Homo sapiens
  misc_RNA (1)...(19): siRNA sense strand
gguuaauugugucaaagaa

SEQ ID NO: 2077087 - RNA, 19 nt, Homo sapiens
  misc_RNA (1)...(19): siRNA sense strand
gaagcugguucuuucaaac

SEQ ID NO: 2077088 - RNA, 19 nt, Homo sapiens
  misc_RNA (1)...(19): siRNA sense strand
gaaaaggauuugaugaaag

SEQ ID NO: 2077089 - RNA, 19 nt, Homo sapiens
  misc_RNA (1)...(19): siRNA sense strand
guuacugaauuuccuauca

SEQ ID NO: 2077090 - RNA, 19 nt, Homo sapiens
  misc_RNA (1)...(19): siRNA sense strand
gaaucuugagggcauauuu

SEQ ID NO: 2077091 - RNA, 19 nt, Homo sapiens
  misc_RNA (1)...(19): siRNA sense strand
cagaugcacuacuggaaau

SEQ ID NO: 2077092 - RNA, 19 nt, Homo sapiens
  misc_RNA (1)...(19): siRNA sense strand
ccaaauaugcugcaagucu

SEQ ID NO: 2077093 - RNA, 19 nt, Homo sapiens
  misc_RNA (1)...(19): siRNA sense strand
ucagagauaggaagagaaa

SEQ ID NO: 2077094 - RNA, 19 nt, Homo sapiens
  misc_RNA (1)...(19): siRNA sense strand
ccaaguguaugaaagaaac

SEQ ID NO: 2077095 - RNA, 19 nt, Homo sapiens
  misc_RNA (1)...(19): siRNA sense strand
uucaaugucuuuagaguug

SEQ ID NO: 2077096 - RNA, 19 nt, Homo sapiens
  misc_RNA (1)...(19): siRNA sense strand
ccaugcugguuaaaucuaa

SEQ ID NO: 2077097 - RNA, 19 nt, Homo sapiens
  misc_RNA (1)...(19): siRNA sense strand
gcaauauugacacugguaa

SEQ ID NO: 2077098 - RNA, 19 nt, Homo sapiens
  misc_RNA (1)...(19): siRNA sense strand
agauuggucugauguaugu

SEQ ID NO: 2077099 - RNA, 19 nt, Homo sapiens
  misc_RNA (1)...(19): siRNA sense strand
gaaggaaguuuaccaaauu

SEQ ID NO: 2077100 - RNA, 19 nt, Homo sapiens
  misc_RNA (1)...(19): siRNA sense strand
gaacaaucaucauagcuua

SEQ ID NO: 2077101 - RNA, 19 nt, Homo sapiens
  misc_RNA (1)...(19): siRNA sense strand
gaacuugacuugcgcaaug

SEQ ID NO: 2077102 - RNA, 19 nt, Homo sapiens
  misc_RNA (1)...(19): siRNA sense strand
ggagaaaguagggaaauua

SEQ ID NO: 2077103 - RNA, 19 nt, Homo sapiens
  misc_RNA (1)...(19): siRNA sense strand
gauagccuguuuauucuuu

SEQ ID NO: 2077104 - RNA, 19 nt, Homo sapiens
  misc_RNA (1)...(19): siRNA sense strand
ggagaagaguauauaguau

SEQ ID NO: 2077105 - RNA, 19 nt, Homo sapiens
  misc_RNA (1)...(19): siRNA sense strand
gagguuauauguaaaguca

SEQ ID NO: 2077106 - RNA, 19 nt, Homo sapiens
  misc_RNA (1)...(19): siRNA sense strand
gaauaguacuccauugugu

SEQ ID NO: 2077107 - RNA, 19 nt, Homo sapiens
  misc_RNA (1)...(19): siRNA sense strand
gaaguggacuguguuuguu

SEQ ID NO: 2077108 - RNA, 19 nt, Homo sapiens
  misc_RNA (1)...(19): siRNA sense strand
ccacugaacuugacagaca

SEQ ID NO: 2077109 - RNA, 19 nt, Homo sapiens
  misc_RNA (1)...(19): siRNA sense strand
uggcggagguuauauguaa

SEQ ID NO: 2077110 - RNA, 19 nt, Homo sapiens
  misc_RNA (1)...(19): siRNA sense strand
agauaaggcucauguagaa

SEQ ID NO: 2077111 - RNA, 19 nt, Homo sapiens
  misc_RNA (1)...(19): siRNA sense strand
gauaugauagugaugauga

SEQ ID NO: 2077112 - RNA, 19 nt, Homo sapiens
  misc_RNA (1)...(19): siRNA sense strand
ggaaugguccucuuucugu

SEQ ID NO: 2077113 - RNA, 19 nt, Homo sapiens
  misc_RNA (1)...(19): siRNA sense strand
aaugauagccuguuuauuc

SEQ ID NO: 2077114 - RNA, 19 nt, Homo sapiens
  misc_RNA (1)...(19): siRNA sense strand
agaaggaaguuuaccaaau

SEQ ID NO: 2077115 - RNA, 19 nt, Homo sapiens
  misc_RNA (1)...(19): siRNA sense strand
ugacagauacugcuccuuu

SEQ ID NO: 2077116 - RNA, 19 nt, Homo sapiens
  misc_RNA (1)...(19): siRNA sense strand
gcuaaugucuaccucgaau

SEQ ID NO: 2077117 - RNA, 19 nt, Homo sapiens
  misc_RNA (1)...(19): siRNA sense strand
gggagaaaguagggaaauu

SEQ ID NO: 2077118 - RNA, 19 nt, Homo sapiens
  misc_RNA (1)...(19): siRNA sense strand
agacauaaguggagaagag

SEQ ID NO: 2077119 - RNA, 19 nt, Homo sapiens
  misc_RNA (1)...(19): siRNA sense strand
ggagcgagcgccucaaaug

SEQ ID NO: 2077120 - RNA, 19 nt, Homo sapiens
  misc_RNA (1)...(19): siRNA sense strand
gagauuaaaccagaauuug

SEQ ID NO: 2077121 - RNA, 19 nt, Homo sapiens
  misc_RNA (1)...(19): siRNA sense strand
gaaaagagaaagcaaaaug

SEQ ID NO: 2077122 - RNA, 19 nt, Homo sapiens
  misc_RNA (1)...(19): siRNA sense strand
gguuauauguaaagucaga

SEQ ID NO: 2077123 - RNA, 19 nt, Homo sapiens
  misc_RNA (1)...(19): siRNA sense strand
uuccagagcuuguuauaau

SEQ ID NO: 2077124 - RNA, 19 nt, Homo sapiens
  misc_RNA (1)...(19): siRNA sense strand
ucauggagaugucccagaa

SEQ ID NO: 2077125 - RNA, 19 nt, Homo sapiens
  misc_RNA (1)...(19): siRNA sense strand
gaauggaccuaugacagau

SEQ ID NO: 2077126 - RNA, 19 nt, Homo sapiens
  misc_RNA (1)...(19): siRNA sense strand
gacagauacugcuccuuug

SEQ ID NO: 2077127 - RNA, 19 nt, Homo sapiens
  misc_RNA (1)...(19): siRNA sense strand
uacaggaucucauucuuuc

SEQ ID NO: 2077128 - RNA, 19 nt, Homo sapiens
  misc_RNA (1)...(19): siRNA sense strand
gagaaggaaguuuaccaaa

SEQ ID NO: 2077129 - RNA, 19 nt, Homo sapiens
  misc_RNA (1)...(19): siRNA sense strand
aauccaagacgauaugaua

SEQ ID NO: 2077130 - RNA, 19 nt, Homo sapiens
  misc_RNA (1)...(19): siRNA sense strand
uggagaagaguauauagua

SEQ ID NO: 2077131 - RNA, 19 nt, Homo sapiens
  misc_RNA (1)...(19): siRNA sense strand
cgagagugacagacgauua

SEQ ID NO: 2077132 - RNA, 19 nt, Homo sapiens
  misc_RNA (1)...(19): siRNA sense strand
ccagagcuuguuauaauuu

SEQ ID NO: 2077133 - RNA, 19 nt, Homo sapiens
  misc_RNA (1)...(19): siRNA sense strand
caaaugcucggguuucuca

SEQ ID NO: 2077134 - RNA, 19 nt, Homo sapiens
  misc_RNA (1)...(19): siRNA sense strand
ccuuugcucuuuacuugua

SEQ ID NO: 2077135 - RNA, 19 nt, Homo sapiens
  misc_RNA (1)...(19): siRNA sense strand
gcaaaggcguagcacuucu

SEQ ID NO: 2077136 - RNA, 19 nt, Homo sapiens
  misc_RNA (1)...(19): siRNA sense strand
gaacuugacagacacaaaa

SEQ ID NO: 2077137 - RNA, 19 nt, Homo sapiens
  misc_RNA (1)...(19): siRNA sense strand
ugaauggaccuaugacaga

SEQ ID NO: 2077138 - RNA, 19 nt, Homo sapiens
  misc_RNA (1)...(19): siRNA sense strand
caugauaaauagucacagu

SEQ ID NO: 2077139 - RNA, 19 nt, Homo sapiens
  misc_RNA (1)...(19): siRNA sense strand
gaggcacucucuaaccaau

SEQ ID NO: 2077140 - RNA, 19 nt, Homo sapiens
  misc_RNA (1)...(19): siRNA sense strand
uuaccaaauucgcaaaguu

SEQ ID NO: 2077141 - RNA, 19 nt, Homo sapiens
  misc_RNA (1)...(19): siRNA sense strand
ccaagacgauaugauagug

SEQ ID NO: 2077142 - RNA, 19 nt, Homo sapiens
  misc_RNA (1)...(19): siRNA sense strand
cgugggcucuguagucauu

SEQ ID NO: 2077143 - RNA, 19 nt, Homo sapiens
  misc_RNA (1)...(19): siRNA sense strand
cagauaaggcucauguaga

SEQ ID NO: 2077144 - RNA, 19 nt, Homo sapiens
  misc_RNA (1)...(19): siRNA sense strand
gcgaggcacucucuaacca

SEQ ID NO: 2077145 - RNA, 19 nt, Homo sapiens
  misc_RNA (1)...(19): siRNA sense strand
cuacugcauuugggcuuua

SEQ ID NO: 2077146 - RNA, 19 nt, Homo sapiens
  misc_RNA (1)...(19): siRNA sense strand
ggcaccugcuggcaugaua

SEQ ID NO: 2077147 - RNA, 19 nt, Homo sapiens
  misc_RNA (1)...(19): siRNA sense strand
uguguuuguucgagcauua

SEQ ID NO: 2077148 - RNA, 19 nt, Homo sapiens
  misc_RNA (1)...(19): siRNA sense strand
uaccaaauucgcaaaguuu

SEQ ID NO: 2077149 - RNA, 19 nt, Homo sapiens
  misc_RNA (1)...(19): siRNA sense strand
caggauacauuagaaaguc

SEQ ID NO: 2077150 - RNA, 19 nt, Homo sapiens
  misc_RNA (1)...(19): siRNA sense strand
gcugaauaguacuccauug

SEQ ID NO: 2077151 - RNA, 19 nt, Homo sapiens
  misc_RNA (1)...(19): siRNA sense strand
gaucucauucuuucuuaug

SEQ ID NO: 2077152 - RNA, 19 nt, Homo sapiens
  misc_RNA (1)...(19): siRNA sense strand
ugccaucucuuuagugugu

SEQ ID NO: 2077153 - RNA, 19 nt, Homo sapiens
  misc_RNA (1)...(19): siRNA sense strand
uuacaggaucucauucuuu

SEQ ID NO: 2077154 - RNA, 19 nt, Homo sapiens
  misc_RNA (1)...(19): siRNA sense strand
ccaucucuuuaguguguua

SEQ ID NO: 2077155 - RNA, 19 nt, Homo sapiens
  misc_RNA (1)...(19): siRNA sense strand
cagagcuuguuauaauuug

SEQ ID NO: 2077156 - RNA, 19 nt, Homo sapiens
  misc_RNA (1)...(19): siRNA sense strand
ggaucucauucuuucuuau

SEQ ID NO: 2077157 - RNA, 19 nt, Homo sapiens
  misc_RNA (1)...(19): siRNA sense strand
ugaaguggacuguguuugu

SEQ ID NO: 2077158 - RNA, 19 nt, Homo sapiens
  misc_RNA (1)...(19): siRNA sense strand
ccugcuggcaugauaaaua

SEQ ID NO: 2077159 - RNA, 19 nt, Homo sapiens
  misc_RNA (1)...(19): siRNA sense strand
gagaaaguagggaaauuac

SEQ ID NO: 2077160 - RNA, 19 nt, Homo sapiens
  misc_RNA (1)...(19): siRNA sense strand
cauggucggugguacuguu

SEQ ID NO: 2077161 - RNA, 19 nt, Homo sapiens
  misc_RNA (1)...(19): siRNA sense strand
ucuuauggcugaauaguac

SEQ ID NO: 2077162 - RNA, 19 nt, Homo sapiens
  misc_RNA (1)...(19): siRNA sense strand
aggaucucauucuuucuua

SEQ ID NO: 2077163 - RNA, 19 nt, Homo sapiens
  misc_RNA (1)...(19): siRNA sense strand
ccaccugaauggaccuaug

SEQ ID NO: 2077164 - RNA, 19 nt, Homo sapiens
  misc_RNA (1)...(19): siRNA sense strand
gagucggccuccugggaaa

SEQ ID NO: 2077165 - RNA, 19 nt, Homo sapiens
  misc_RNA (1)...(19): siRNA sense strand
gcaccugcuggcaugauaa

SEQ ID NO: 2077166 - RNA, 19 nt, Homo sapiens
  misc_RNA (1)...(19): siRNA sense strand
ccgcucaccugcacuucuu

SEQ ID NO: 2077167 - RNA, 19 nt, Homo sapiens
  misc_RNA (1)...(19): siRNA sense strand
cuccuuugcucuuuacuug

SEQ ID NO: 2077168 - RNA, 19 nt, Homo sapiens
  misc_RNA (1)...(19): siRNA sense strand
uucaagagaaggaaguuua

SEQ ID NO: 2077169 - RNA, 19 nt, Homo sapiens
  misc_RNA (1)...(19): siRNA sense strand
ccacuucgccaaccugcaa

SEQ ID NO: 2077170 - RNA, 19 nt, Homo sapiens
  misc_RNA (1)...(19): siRNA sense strand
gucaucagcuaaugucuac

SEQ ID NO: 2077171 - RNA, 19 nt, Homo sapiens
  misc_RNA (1)...(19): siRNA sense strand
gcaguagcagggccaauca

SEQ ID NO: 2077172 - RNA, 19 nt, Homo sapiens
  misc_RNA (1)...(19): siRNA sense strand
gaugugccacugaacuuga

SEQ ID NO: 2077173 - RNA, 19 nt, Homo sapiens
  misc_RNA (1)...(19): siRNA sense strand
gcucaggaccacccucuuc

SEQ ID NO: 2077174 - RNA, 19 nt, Homo sapiens
  misc_RNA (1)...(19): siRNA sense strand
ugaacaaucaucauagcuu

SEQ ID NO: 2077175 - RNA, 19 nt, Homo sapiens
  misc_RNA (1)...(19): siRNA sense strand
gagagugacagacgauuac

SEQ ID NO: 2077176 - RNA, 19 nt, Homo sapiens
  misc_RNA (1)...(19): siRNA sense strand
gaugaugaccugccaagac

SEQ ID NO: 2077177 - RNA, 19 nt, Homo sapiens
  misc_RNA (1)...(19): siRNA sense strand
gacgauaugauagugauga

SEQ ID NO: 2077178 - RNA, 19 nt, Homo sapiens
  misc_RNA (1)...(19): siRNA sense strand
gacaauccaagacgauaug

SEQ ID NO: 2077179 - RNA, 19 nt, Homo sapiens
  misc_RNA (1)...(19): siRNA sense strand
cugcuggcaugauaaauag

SEQ ID NO: 2077180 - RNA, 19 nt, Homo sapiens
  misc_RNA (1)...(19): siRNA sense strand
uccagagcuuguuauaauu

SEQ ID NO: 2077181 - RNA, 19 nt, Homo sapiens
  misc_RNA (1)...(19): siRNA sense strand
ugacagacgauuacagagu

SEQ ID NO: 2077182 - RNA, 19 nt, Homo sapiens
  misc_RNA (1)...(19): siRNA sense strand
cauaaguggagaagaguau

SEQ ID NO: 2077183 - RNA, 19 nt, Homo sapiens
  misc_RNA (1)...(19): siRNA sense strand
ucagauaaggcucauguag

SEQ ID NO: 2077184 - RNA, 19 nt, Homo sapiens
  misc_RNA (1)...(19): siRNA sense strand
uaaugucuaccucgaauca

SEQ ID NO: 2077185 - RNA, 19 nt, Homo sapiens
  misc_RNA (1)...(19): siRNA sense strand
acugggaaguucaagagaa

SEQ ID NO: 2077186 - RNA, 19 nt, Homo sapiens
  misc_RNA (1)...(19): siRNA sense strand
caagacgauaugauaguga

SEQ ID NO: 2077187 - RNA, 19 nt, Homo sapiens
  misc_RNA (1)...(19): siRNA sense strand
cgacaauccaagacgauau

SEQ ID NO: 2077188 - RNA, 19 nt, Homo sapiens
  misc_RNA (1)...(19): siRNA sense strand
gcugggauaaucuuucaga

SEQ ID NO: 2077189 - RNA, 19 nt, Homo sapiens
  misc_RNA (1)...(19): siRNA sense strand
uggcugggauaaucuuuca

SEQ ID NO: 2077190 - RNA, 19 nt, Homo sapiens
  misc_RNA (1)...(19): siRNA sense strand
gaagacauaaguggagaag

SEQ ID NO: 2077191 - RNA, 19 nt, Homo sapiens
  misc_RNA (1)...(19): siRNA sense strand
ugaauaguacuccauugug

SEQ ID NO: 2077192 - RNA, 19 nt, Homo sapiens
  misc_RNA (1)...(19): siRNA sense strand
aaggaaguuuaccaaauuc

SEQ ID NO: 2077193 - RNA, 19 nt, Homo sapiens
  misc_RNA (1)...(19): siRNA sense strand
uaaguggagaagaguauau

SEQ ID NO: 2077194 - RNA, 19 nt, Homo sapiens
  misc_RNA (1)...(19): siRNA sense strand
aguacuccauuguguggua

SEQ ID NO: 2077195 - RNA, 19 nt, Homo sapiens
  misc_RNA (1)...(19): siRNA sense strand
ggcggagguuauauguaaa

SEQ ID NO: 2077196 - RNA, 19 nt, Homo sapiens
  misc_RNA (1)...(19): siRNA sense strand
uguggcggcugcuccugua

SEQ ID NO: 2077197 - RNA, 19 nt, Homo sapiens
  misc_RNA (1)...(19): siRNA sense strand
ggcacucucuaaccaaugg

SEQ ID NO: 2077198 - RNA, 19 nt, Homo sapiens
  misc_RNA (1)...(19): siRNA sense strand
guacuccauugugugguau

SEQ ID NO: 2077199 - RNA, 19 nt, Homo sapiens
  misc_RNA (1)...(19): siRNA sense strand
gaaccaggcugauaaaaua

SEQ ID NO: 2077200 - RNA, 19 nt, Homo sapiens
  misc_RNA (1)...(19): siRNA sense strand
gguaaagucucaauaguau

SEQ ID NO: 2077201 - RNA, 19 nt, Homo sapiens
  misc_RNA (1)...(19): siRNA sense strand
gcaagaacaucucaauugu

SEQ ID NO: 2077202 - RNA, 19 nt, Homo sapiens
  misc_RNA (1)...(19): siRNA sense strand
gaagaagaguugccugaug

SEQ ID NO: 2077203 - RNA, 19 nt, Homo sapiens
  misc_RNA (1)...(19): siRNA sense strand
guacgagguuuaagggaua

SEQ ID NO: 2077204 - RNA, 19 nt, Homo sapiens
  misc_RNA (1)...(19): siRNA sense strand
uaaagaaccuaccucaguu

SEQ ID NO: 2077205 - RNA, 19 nt, Homo sapiens
  misc_RNA (1)...(19): siRNA sense strand
ggaguuggaucacaggauu

SEQ ID NO: 2077206 - RNA, 19 nt, Homo sapiens
  misc_RNA (1)...(19): siRNA sense strand
gagagaagcugcaagaaaa

SEQ ID NO: 2077207 - RNA, 19 nt, Homo sapiens
  misc_RNA (1)...(19): siRNA sense strand
uccaguggcuuauagauua

SEQ ID NO: 2077208 - RNA, 19 nt, Homo sapiens
  misc_RNA (1)...(19): siRNA sense strand
acacagacccuuccacaua

SEQ ID NO: 2077209 - RNA, 19 nt, Homo sapiens
  misc_RNA (1)...(19): siRNA sense strand
gagaugaacuaguuaaagg

SEQ ID NO: 2077210 - RNA, 19 nt, Homo sapiens
  misc_RNA (1)...(19): siRNA sense strand
cagauccacugguacaaua

SEQ ID NO: 2077211 - RNA, 19 nt, Homo sapiens
  misc_RNA (1)...(19): siRNA sense strand
gaaagggacuuggaggaau

SEQ ID NO: 2077212 - RNA, 19 nt, Homo sapiens
  misc_RNA (1)...(19): siRNA sense strand
cuucaaauccuuuaccuua

SEQ ID NO: 2077213 - RNA, 19 nt, Homo sapiens
  misc_RNA (1)...(19): siRNA sense strand
gaauguuguucucaagauu

SEQ ID NO: 2077214 - RNA, 19 nt, Homo sapiens
  misc_RNA (1)...(19): siRNA sense strand
gaagaggaagaaaguaauu

SEQ ID NO: 2077215 - RNA, 19 nt, Homo sapiens
  misc_RNA (1)...(19): siRNA sense strand
ggaggaauguuguucucaa

SEQ ID NO: 2077216 - RNA, 19 nt, Homo sapiens
  misc_RNA (1)...(19): siRNA sense strand
cuacagauccaguggcuua

SEQ ID NO: 2077217 - RNA, 19 nt, Homo sapiens
  misc_RNA (1)...(19): siRNA sense strand
gacaagccaucacagacua

SEQ ID NO: 2077218 - RNA, 19 nt, Homo sapiens
  misc_RNA (1)...(19): siRNA sense strand
gcaacaacaucuaaaauug

SEQ ID NO: 2077219 - RNA, 19 nt, Homo sapiens
  misc_RNA (1)...(19): siRNA sense strand
ugacaaaguacgagguuua

SEQ ID NO: 2077220 - RNA, 19 nt, Homo sapiens
  misc_RNA (1)...(19): siRNA sense strand
aagaagaguugccugauga

SEQ ID NO: 2077221 - RNA, 19 nt, Homo sapiens
  misc_RNA (1)...(19): siRNA sense strand
gaagacaagccaucacaga

SEQ ID NO: 2077222 - RNA, 19 nt, Homo sapiens
  misc_RNA (1)...(19): siRNA sense strand
ggaauguuguucucaagau

SEQ ID NO: 2077223 - RNA, 19 nt, Homo sapiens
  misc_RNA (1)...(19): siRNA sense strand
aggcaaagcaagcauauua

SEQ ID NO: 2077224 - RNA, 19 nt, Homo sapiens
  misc_RNA (1)...(19): siRNA sense strand
uuaaaggccuucagcaaga

SEQ ID NO: 2077225 - RNA, 19 nt, Homo sapiens
  misc_RNA (1)...(19): siRNA sense strand
gcagugcaauggacauaau

SEQ ID NO: 2077226 - RNA, 19 nt, Homo sapiens
  misc_RNA (1)...(19): siRNA sense strand
ggaagucaagaccauauuu

SEQ ID NO: 2077227 - RNA, 19 nt, Homo sapiens
  misc_RNA (1)...(19): siRNA sense strand
gcaagaacaguuacccaaa

SEQ ID NO: 2077228 - RNA, 19 nt, Homo sapiens
  misc_RNA (1)...(19): siRNA sense strand
caaauccuuuaccuuauga

SEQ ID NO: 2077229 - RNA, 19 nt, Homo sapiens
  misc_RNA (1)...(19): siRNA sense strand
gaugagcuaugaagaacga

SEQ ID NO: 2077230 - RNA, 19 nt, Homo sapiens
  misc_RNA (1)...(19): siRNA sense strand
cauaaugacuggcuggaau

SEQ ID NO: 2077231 - RNA, 19 nt, Homo sapiens
  misc_RNA (1)...(19): siRNA sense strand
agaagaagccacauuagaa

SEQ ID NO: 2077232 - RNA, 19 nt, Homo sapiens
  misc_RNA (1)...(19): siRNA sense strand
ggguaaagucucaauagua

SEQ ID NO: 2077233 - RNA, 19 nt, Homo sapiens
  misc_RNA (1)...(19): siRNA sense strand
agcaagagcugaaucgauu

SEQ ID NO: 2077234 - RNA, 19 nt, Homo sapiens
  misc_RNA (1)...(19): siRNA sense strand
ucaaauccuuuaccuuaug

SEQ ID NO: 2077235 - RNA, 19 nt, Homo sapiens
  misc_RNA (1)...(19): siRNA sense strand
aagaugcuguucauaguuu

SEQ ID NO: 2077236 - RNA, 19 nt, Homo sapiens
  misc_RNA (1)...(19): siRNA sense strand
gaaggcauuucaaccauac

SEQ ID NO: 2077237 - RNA, 19 nt, Homo sapiens
  misc_RNA (1)...(19): siRNA sense strand
gagguacgcugguucuaca

SEQ ID NO: 2077238 - RNA, 19 nt, Homo sapiens
  misc_RNA (1)...(19): siRNA sense strand
gaagaagccacauuagaag

SEQ ID NO: 2077239 - RNA, 19 nt, Homo sapiens
  misc_RNA (1)...(19): siRNA sense strand
gaauccagacuuugaagaa

SEQ ID NO: 2077240 - RNA, 19 nt, Homo sapiens
  misc_RNA (1)...(19): siRNA sense strand
ugggauguguaauuacuua

SEQ ID NO: 2077241 - RNA, 19 nt, Homo sapiens
  misc_RNA (1)...(19): siRNA sense strand
gaugagagaagcugcaaga

SEQ ID NO: 2077242 - RNA, 19 nt, Homo sapiens
  misc_RNA (1)...(19): siRNA sense strand
ggaaagggacuuggaggaa

SEQ ID NO: 2077243 - RNA, 19 nt, Homo sapiens
  misc_RNA (1)...(19): siRNA sense strand
gagcaagaacaucucaauu

SEQ ID NO: 2077244 - RNA, 19 nt, Homo sapiens
  misc_RNA (1)...(19): siRNA sense strand
gaaccuaccucaguuucag

SEQ ID NO: 2077245 - RNA, 19 nt, Homo sapiens
  misc_RNA (1)...(19): siRNA sense strand
gaaacacuacagcaacauu

SEQ ID NO: 2077246 - RNA, 19 nt, Homo sapiens
  misc_RNA (1)...(19): siRNA sense strand
gacacaaacaccugccuua

SEQ ID NO: 2077247 - RNA, 19 nt, Homo sapiens
  misc_RNA (1)...(19): siRNA sense strand
uguagaagaagccacauua

SEQ ID NO: 2077248 - RNA, 19 nt, Homo sapiens
  misc_RNA (1)...(19): siRNA sense strand
caguguggaugaaguauau

SEQ ID NO: 2077249 - RNA, 19 nt, Homo sapiens
  misc_RNA (1)...(19): siRNA sense strand
gcacuuggcagccucuaga

SEQ ID NO: 2077250 - RNA, 19 nt, Homo sapiens
  misc_RNA (1)...(19): siRNA sense strand
acagucaucugaaacauca

SEQ ID NO: 2077251 - RNA, 19 nt, Homo sapiens
  misc_RNA (1)...(19): siRNA sense strand
acaaacaccugccuuaaaa

SEQ ID NO: 2077252 - RNA, 19 nt, Homo sapiens
  misc_RNA (1)...(19): siRNA sense strand
aagaacggcuucacggauu

SEQ ID NO: 2077253 - RNA, 19 nt, Homo sapiens
  misc_RNA (1)...(19): siRNA sense strand
gaccaaggaagaauuauca

SEQ ID NO: 2077254 - RNA, 19 nt, Homo sapiens
  misc_RNA (1)...(19): siRNA sense strand
gaaaauggaccaaggaaga

SEQ ID NO: 2077255 - RNA, 19 nt, Homo sapiens
  misc_RNA (1)...(19): siRNA sense strand
gaaaagaugcuguucauag

SEQ ID NO: 2077256 - RNA, 19 nt, Homo sapiens
  misc_RNA (1)...(19): siRNA sense strand
uagaagaggaagaaaguaa

SEQ ID NO: 2077257 - RNA, 19 nt, Homo sapiens
  misc_RNA (1)...(19): siRNA sense strand
gcuccucgcugcgcuacua

SEQ ID NO: 2077258 - RNA, 19 nt, Homo sapiens
  misc_RNA (1)...(19): siRNA sense strand
ugagagaagcugcaagaaa

SEQ ID NO: 2077259 - RNA, 19 nt, Homo sapiens
  misc_RNA (1)...(19): siRNA sense strand
caucacagacuacccauau

SEQ ID NO: 2077260 - RNA, 19 nt, Homo sapiens
  misc_RNA (1)...(19): siRNA sense strand
gacuacccauauuguauuu

SEQ ID NO: 2077261 - RNA, 19 nt, Homo sapiens
  misc_RNA (1)...(19): siRNA sense strand
gagcugaaucgauuguauu

SEQ ID NO: 2077262 - RNA, 19 nt, Homo sapiens
  misc_RNA (1)...(19): siRNA sense strand
gcacgaugaugaugcaaaa

SEQ ID NO: 2077263 - RNA, 19 nt, Homo sapiens
  misc_RNA (1)...(19): siRNA sense strand
cuaaagaaccuaccucagu

SEQ ID NO: 2077264 - RNA, 19 nt, Homo sapiens
  misc_RNA (1)...(19): siRNA sense strand
ggaauccaguucggcugua

SEQ ID NO: 2077265 - RNA, 19 nt, Homo sapiens
  misc_RNA (1)...(19): siRNA sense strand
caagaacaguuacccaaaa

SEQ ID NO: 2077266 - RNA, 19 nt, Homo sapiens
  misc_RNA (1)...(19): siRNA sense strand
cuacaacacagucaucuga

SEQ ID NO: 2077267 - RNA, 19 nt, Homo sapiens
  misc_RNA (1)...(19): siRNA sense strand
auacagcuaugaugagaga

SEQ ID NO: 2077268 - RNA, 19 nt, Homo sapiens
  misc_RNA (1)...(19): siRNA sense strand
aaauacagcuaugaugaga

SEQ ID NO: 2077269 - RNA, 19 nt, Homo sapiens
  misc_RNA (1)...(19): siRNA sense strand
ucacagacuacccauauug

SEQ ID NO: 2077270 - RNA, 19 nt, Homo sapiens
  misc_RNA (1)...(19): siRNA sense strand
acaacacagucaucugaaa

SEQ ID NO: 2077271 - RNA, 19 nt, Homo sapiens
  misc_RNA (1)...(19): siRNA sense strand
ggaaauacuggaagucaag

SEQ ID NO: 2077272 - RNA, 19 nt, Homo sapiens
  misc_RNA (1)...(19): siRNA sense strand
gaguggcggucaaaacuua

SEQ ID NO: 2077273 - RNA, 19 nt, Homo sapiens
  misc_RNA (1)...(19): siRNA sense strand
ucuaaagcaucaaguagug

SEQ ID NO: 2077274 - RNA, 19 nt, Homo sapiens
  misc_RNA (1)...(19): siRNA sense strand
cacaaacaccugccuuaaa

SEQ ID NO: 2077275 - RNA, 19 nt, Homo sapiens
  misc_RNA (1)...(19): siRNA sense strand
ggauugaaagcaucaucua

SEQ ID NO: 2077276 - RNA, 19 nt, Homo sapiens
  misc_RNA (1)...(19): siRNA sense strand
cuaguccacuuuauagaga

SEQ ID NO: 2077277 - RNA, 19 nt, Homo sapiens
  misc_RNA (1)...(19): siRNA sense strand
uaagggauaugcugaacag

SEQ ID NO: 2077278 - RNA, 19 nt, Homo sapiens
  misc_RNA (1)...(19): siRNA sense strand
gacaaaguacgagguuuaa

SEQ ID NO: 2077279 - RNA, 19 nt, Homo sapiens
  misc_RNA (1)...(19): siRNA sense strand
uagaagaagccacauuaga

SEQ ID NO: 2077280 - RNA, 19 nt, Homo sapiens
  misc_RNA (1)...(19): siRNA sense strand
aaagggacuuggaggaaug

SEQ ID NO: 2077281 - RNA, 19 nt, Homo sapiens
  misc_RNA (1)...(19): siRNA sense strand
ccaaggaagaauuaucaaa

SEQ ID NO: 2077282 - RNA, 19 nt, Homo sapiens
  misc_RNA (1)...(19): siRNA sense strand
uagagguuauguagaagaa

SEQ ID NO: 2077283 - RNA, 19 nt, Homo sapiens
  misc_RNA (1)...(19): siRNA sense strand
auaaugcccucguggaguu

SEQ ID NO: 2077284 - RNA, 19 nt, Homo sapiens
  misc_RNA (1)...(19): siRNA sense strand
gacgagaacuaugacuuca

SEQ ID NO: 2077285 - RNA, 19 nt, Homo sapiens
  misc_RNA (1)...(19): siRNA sense strand
ggacuuggaggaauguugu

SEQ ID NO: 2077286 - RNA, 19 nt, Homo sapiens
  misc_RNA (1)...(19): siRNA sense strand
cguggacagugguuuauug

SEQ ID NO: 2077287 - RNA, 19 nt, Homo sapiens
  misc_RNA (1)...(19): siRNA sense strand
uaacaaauauaggcaaagc

SEQ ID NO: 2077288 - RNA, 19 nt, Homo sapiens
  misc_RNA (1)...(19): siRNA sense strand
gaacauaugaagccaagcu

SEQ ID NO: 2077289 - RNA, 19 nt, Homo sapiens
  misc_RNA (1)...(19): siRNA sense strand
guacaauacuucaaauccu

SEQ ID NO: 2077290 - RNA, 19 nt, Homo sapiens
  misc_RNA (1)...(19): siRNA sense strand
caaguugagucgaaaccau

SEQ ID NO: 2077291 - RNA, 19 nt, Homo sapiens
  misc_RNA (1)...(19): siRNA sense strand
guauaaacaugagcacgau

SEQ ID NO: 2077292 - RNA, 19 nt, Homo sapiens
  misc_RNA (1)...(19): siRNA sense strand
gaggaauguuguucucaag

SEQ ID NO: 2077293 - RNA, 19 nt, Homo sapiens
  misc_RNA (1)...(19): siRNA sense strand
aaacacuacagcaacauuu

SEQ ID NO: 2077294 - RNA, 19 nt, Homo sapiens
  misc_RNA (1)...(19): siRNA sense strand
aaacgacggcugaaggaaa

SEQ ID NO: 2077295 - RNA, 19 nt, Homo sapiens
  misc_RNA (1)...(19): siRNA sense strand
gaagccacauuagaagaca

SEQ ID NO: 2077296 - RNA, 19 nt, Homo sapiens
  misc_RNA (1)...(19): siRNA sense strand
gaacgauggaugagcuaug

SEQ ID NO: 2077297 - RNA, 19 nt, Homo sapiens
  misc_RNA (1)...(19): siRNA sense strand
cacagacccuuccacauag

SEQ ID NO: 2077298 - RNA, 19 nt, Homo sapiens
  misc_RNA (1)...(19): siRNA sense strand
caauggaagaugagaagaa

SEQ ID NO: 2077299 - RNA, 19 nt, Homo sapiens
  misc_RNA (1)...(19): siRNA sense strand
gaacccuacuccauuuaua

SEQ ID NO: 2077300 - RNA, 19 nt, Homo sapiens
  misc_RNA (1)...(19): siRNA sense strand
auaagaggcuguucagaua

SEQ ID NO: 2077301 - RNA, 19 nt, Homo sapiens
  misc_RNA (1)...(19): siRNA sense strand
uaacaaauaaguccgcuuu

SEQ ID NO: 2077302 - RNA, 19 nt, Homo sapiens
  misc_RNA (1)...(19): siRNA sense strand
gauaagaggcuguucagau

SEQ ID NO: 2077303 - RNA, 19 nt, Homo sapiens
  misc_RNA (1)...(19): siRNA sense strand
gagguuauauagccauguu

SEQ ID NO: 2077304 - RNA, 19 nt, Homo sapiens
  misc_RNA (1)...(19): siRNA sense strand
gcacugcgacuuaaacugu

SEQ ID NO: 2077305 - RNA, 19 nt, Homo sapiens
  misc_RNA (1)...(19): siRNA sense strand
caaguuggauaugcacaaa

SEQ ID NO: 2077306 - RNA, 19 nt, Homo sapiens
  misc_RNA (1)...(19): siRNA sense strand
ccagagcgacugcaacaaa

SEQ ID NO: 2077307 - RNA, 19 nt, Homo sapiens
  misc_RNA (1)...(19): siRNA sense strand
gggagacugugaugagguu

SEQ ID NO: 2077308 - RNA, 19 nt, Homo sapiens
  misc_RNA (1)...(19): siRNA sense strand
caaaugcccgauaucauga

SEQ ID NO: 2077309 - RNA, 19 nt, Homo sapiens
  misc_RNA (1)...(19): siRNA sense strand
gcuguucagauacuauuua

SEQ ID NO: 2077310 - RNA, 19 nt, Homo sapiens
  misc_RNA (1)...(19): siRNA sense strand
aaauaaguccgcuuugaaa

SEQ ID NO: 2077311 - RNA, 19 nt, Homo sapiens
  misc_RNA (1)...(19): siRNA sense strand
guugaugcacugcgacuua

SEQ ID NO: 2077312 - RNA, 19 nt, Homo sapiens
  misc_RNA (1)...(19): siRNA sense strand
acaaaugcccgauaucaug

SEQ ID NO: 2077313 - RNA, 19 nt, Homo sapiens
  misc_RNA (1)...(19): siRNA sense strand
ugagacugaucaccaaaga

SEQ ID NO: 2077314 - RNA, 19 nt, Homo sapiens
  misc_RNA (1)...(19): siRNA sense strand
ggacgaggaggacgacgaa

SEQ ID NO: 2077315 - RNA, 19 nt, Homo sapiens
  misc_RNA (1)...(19): siRNA sense strand
ggaaaccgaaauaacaaau

SEQ ID NO: 2077316 - RNA, 19 nt, Homo sapiens
  misc_RNA (1)...(19): siRNA sense strand
gagcuacaaaugcccgaua

SEQ ID NO: 2077317 - RNA, 19 nt, Homo sapiens
  misc_RNA (1)...(19): siRNA sense strand
gaccgccgacugcagcuua

SEQ ID NO: 2077318 - RNA, 19 nt, Homo sapiens
  misc_RNA (1)...(19): siRNA sense strand
guguguaggugccaucguu

SEQ ID NO: 2077319 - RNA, 19 nt, Homo sapiens
  misc_RNA (1)...(19): siRNA sense strand
ucaugagacugaucaccaa

SEQ ID NO: 2077320 - RNA, 19 nt, Homo sapiens
  misc_RNA (1)...(19): siRNA sense strand
cuacaaaugcccgauauca

SEQ ID NO: 2077321 - RNA, 19 nt, Homo sapiens
  misc_RNA (1)...(19): siRNA sense strand
ccuacuccauuuauaccua

SEQ ID NO: 2077322 - RNA, 19 nt, Homo sapiens
  misc_RNA (1)...(19): siRNA sense strand
gcaaguuggauaugcacaa

SEQ ID NO: 2077323 - RNA, 19 nt, Homo sapiens
  misc_RNA (1)...(19): siRNA sense strand
ugccaucguuugcaaguug

SEQ ID NO: 2077324 - RNA, 19 nt, Homo sapiens
  misc_RNA (1)...(19): siRNA sense strand
uggcauugguacuaacuug

SEQ ID NO: 2077325 - RNA, 19 nt, Homo sapiens
  misc_RNA (1)...(19): siRNA sense strand
uccgaacccuacuccauuu

SEQ ID NO: 2077326 - RNA, 19 nt, Homo sapiens
  misc_RNA (1)...(19): siRNA sense strand
ccaaauacaggagaaaugg

SEQ ID NO: 2077327 - RNA, 19 nt, Homo sapiens
  misc_RNA (1)...(19): siRNA sense strand
ggacgacgaagagcacgaa

SEQ ID NO: 2077328 - RNA, 19 nt, Homo sapiens
  misc_RNA (1)...(19): siRNA sense strand
cuauauaugccaugguuga

SEQ ID NO: 2077329 - RNA, 19 nt, Homo sapiens
  misc_RNA (1)...(19): siRNA sense strand
cucacucccucucuaguaa

SEQ ID NO: 2077330 - RNA, 19 nt, Homo sapiens
  misc_RNA (1)...(19): siRNA sense strand
agcagcagcucaacggauu

SEQ ID NO: 2077331 - RNA, 19 nt, Homo sapiens
  misc_RNA (1)...(19): siRNA sense strand
cuacuccauuuauaccuau

SEQ ID NO: 2077332 - RNA, 19 nt, Homo sapiens
  misc_RNA (1)...(19): siRNA sense strand
gauaugaauccgagcuaca

SEQ ID NO: 2077333 - RNA, 19 nt, Homo sapiens
  misc_RNA (1)...(19): siRNA sense strand
guccgaacccuacuccauu

SEQ ID NO: 2077334 - RNA, 19 nt, Homo sapiens
  misc_RNA (1)...(19): siRNA sense strand
ugaauccgagcuacaaaug

SEQ ID NO: 2077335 - RNA, 19 nt, Homo sapiens
  misc_RNA (1)...(19): siRNA sense strand
cgagauaagaggcuguuca

SEQ ID NO: 2077336 - RNA, 19 nt, Homo sapiens
  misc_RNA (1)...(19): siRNA sense strand
gauuccaaauacaggagaa

SEQ ID NO: 2077337 - RNA, 19 nt, Homo sapiens
  misc_RNA (1)...(19): siRNA sense strand
ccucacucccucucuagua

SEQ ID NO: 2077338 - RNA, 19 nt, Homo sapiens
  misc_RNA (1)...(19): siRNA sense strand
cccgauaucaugagacuga

SEQ ID NO: 2077339 - RNA, 19 nt, Homo sapiens
  misc_RNA (1)...(19): siRNA sense strand
gagauaagaggcuguucag

SEQ ID NO: 2077340 - RNA, 19 nt, Homo sapiens
  misc_RNA (1)...(19): siRNA sense strand
aguccgcuuugaaacuuua

SEQ ID NO: 2077341 - RNA, 19 nt, Homo sapiens
  misc_RNA (1)...(19): siRNA sense strand
agacugugaugagguuguu

SEQ ID NO: 2077342 - RNA, 19 nt, Homo sapiens
  misc_RNA (1)...(19): siRNA sense strand
gugaugagguuguuuugga

SEQ ID NO: 2077343 - RNA, 19 nt, Homo sapiens
  misc_RNA (1)...(19): siRNA sense strand
uugaugcacugcgacuuaa

SEQ ID NO: 2077344 - RNA, 19 nt, Homo sapiens
  misc_RNA (1)...(19): siRNA sense strand
uaggugccaucguuugcaa

SEQ ID NO: 2077345 - RNA, 19 nt, Homo sapiens
  misc_RNA (1)...(19): siRNA sense strand
cagagcgacugcaacaaaa

SEQ ID NO: 2077346 - RNA, 19 nt, Homo sapiens
  misc_RNA (1)...(19): siRNA sense strand
ccgccucccucaagagcaa

SEQ ID NO: 2077347 - RNA, 19 nt, Homo sapiens
  misc_RNA (1)...(19): siRNA sense strand
gcaggaggaggaggaggaa

SEQ ID NO: 2077348 - RNA, 19 nt, Homo sapiens
  misc_RNA (1)...(19): siRNA sense strand
cauugguacuaacuugguu

SEQ ID NO: 2077349 - RNA, 19 nt, Homo sapiens
  misc_RNA (1)...(19): siRNA sense strand
guuccgcagagguuauaua

SEQ ID NO: 2077350 - RNA, 19 nt, Homo sapiens
  misc_RNA (1)...(19): siRNA sense strand
ccgaacccuacuccauuua

SEQ ID NO: 2077351 - RNA, 19 nt, Homo sapiens
  misc_RNA (1)...(19): siRNA sense strand
gguuauauagccauguuag

SEQ ID NO: 2077352 - RNA, 19 nt, Homo sapiens
  misc_RNA (1)...(19): siRNA sense strand
cgaacccuacuccauuuau

SEQ ID NO: 2077353 - RNA, 19 nt, Homo sapiens
  misc_RNA (1)...(19): siRNA sense strand
agcuauauaugccaugguu

SEQ ID NO: 2077354 - RNA, 19 nt, Homo sapiens
  misc_RNA (1)...(19): siRNA sense strand
uuuggaaaccgaaauaaca

SEQ ID NO: 2077355 - RNA, 19 nt, Homo sapiens
  misc_RNA (1)...(19): siRNA sense strand
ugagggagacugugaugag

SEQ ID NO: 2077356 - RNA, 19 nt, Homo sapiens
  misc_RNA (1)...(19): siRNA sense strand
gauguuccgcagagguuau

SEQ ID NO: 2077357 - RNA, 19 nt, Homo sapiens
  misc_RNA (1)...(19): siRNA sense strand
gcauugguacuaacuuggu

SEQ ID NO: 2077358 - RNA, 19 nt, Homo sapiens
  misc_RNA (1)...(19): siRNA sense strand
ggaaagaaauagucaguaa

SEQ ID NO: 2077359 - RNA, 19 nt, Homo sapiens
  misc_RNA (1)...(19): siRNA sense strand
gagagagacugaauuguuu

SEQ ID NO: 2077360 - RNA, 19 nt, Homo sapiens
  misc_RNA (1)...(19): siRNA sense strand
gaaaguagacuaaucaugu

SEQ ID NO: 2077361 - RNA, 19 nt, Homo sapiens
  misc_RNA (1)...(19): siRNA sense strand
caacuacaccuaugaauuu

SEQ ID NO: 2077362 - RNA, 19 nt, Homo sapiens
  misc_RNA (1)...(19): siRNA sense strand
ccacagaucucuaaauaca

SEQ ID NO: 2077363 - RNA, 19 nt, Homo sapiens
  misc_RNA (1)...(19): siRNA sense strand
ggaaucaccucagcaguaa

SEQ ID NO: 2077364 - RNA, 19 nt, Homo sapiens
  misc_RNA (1)...(19): siRNA sense strand
gacaauauguaccgaaauu

SEQ ID NO: 2077365 - RNA, 19 nt, Homo sapiens
  misc_RNA (1)...(19): siRNA sense strand
guccacagaucucuaaaua

SEQ ID NO: 2077366 - RNA, 19 nt, Homo sapiens
  misc_RNA (1)...(19): siRNA sense strand
ggacaucccugacacagau

SEQ ID NO: 2077367 - RNA, 19 nt, Homo sapiens
  misc_RNA (1)...(19): siRNA sense strand
auaaauggcuguuguacaa

SEQ ID NO: 2077368 - RNA, 19 nt, Homo sapiens
  misc_RNA (1)...(19): siRNA sense strand
gaccagaaauccagagaau

SEQ ID NO: 2077369 - RNA, 19 nt, Homo sapiens
  misc_RNA (1)...(19): siRNA sense strand
gcacuguauuugccaauga

SEQ ID NO: 2077370 - RNA, 19 nt, Homo sapiens
  misc_RNA (1)...(19): siRNA sense strand
ggacauauugcacaccuaa

SEQ ID NO: 2077371 - RNA, 19 nt, Homo sapiens
  misc_RNA (1)...(19): siRNA sense strand
gauguaacuucaggguuua

SEQ ID NO: 2077372 - RNA, 19 nt, Homo sapiens
  misc_RNA (1)...(19): siRNA sense strand
gagaucaucagcugucuuu

SEQ ID NO: 2077373 - RNA, 19 nt, Homo sapiens
  misc_RNA (1)...(19): siRNA sense strand
ggaaagccauagcauaacu

SEQ ID NO: 2077374 - RNA, 19 nt, Homo sapiens
  misc_RNA (1)...(19): siRNA sense strand
gcuauagaguuucuuagug

SEQ ID NO: 2077375 - RNA, 19 nt, Homo sapiens
  misc_RNA (1)...(19): siRNA sense strand
gagcagaacaugaugacaa

SEQ ID NO: 2077376 - RNA, 19 nt, Homo sapiens
  misc_RNA (1)...(19): siRNA sense strand
agauguaacuucaggguuu

SEQ ID NO: 2077377 - RNA, 19 nt, Homo sapiens
  misc_RNA (1)...(19): siRNA sense strand
cauguuggaucccuauaaa

SEQ ID NO: 2077378 - RNA, 19 nt, Homo sapiens
  misc_RNA (1)...(19): siRNA sense strand
gaaaacaacuacaccuaug

SEQ ID NO: 2077379 - RNA, 19 nt, Homo sapiens
  misc_RNA (1)...(19): siRNA sense strand
cauaagacgugugauugaa

SEQ ID NO: 2077380 - RNA, 19 nt, Homo sapiens
  misc_RNA (1)...(19): siRNA sense strand
ccagaaauccagagaauca

SEQ ID NO: 2077381 - RNA, 19 nt, Homo sapiens
  misc_RNA (1)...(19): siRNA sense strand
ccaaggaccagucaaagaa

SEQ ID NO: 2077382 - RNA, 19 nt, Homo sapiens
  misc_RNA (1)...(19): siRNA sense strand
gaaagcagaacucaguguu

SEQ ID NO: 2077383 - RNA, 19 nt, Homo sapiens
  misc_RNA (1)...(19): siRNA sense strand
gcauaagacgugugauuga

SEQ ID NO: 2077384 - RNA, 19 nt, Homo sapiens
  misc_RNA (1)...(19): siRNA sense strand
gaaauccagagaaucauga

SEQ ID NO: 2077385 - RNA, 19 nt, Homo sapiens
  misc_RNA (1)...(19): siRNA sense strand
gaacuaacauaugaacacu

SEQ ID NO: 2077386 - RNA, 19 nt, Homo sapiens
  misc_RNA (1)...(19): siRNA sense strand
uaagacgugugauugaaga

SEQ ID NO: 2077387 - RNA, 19 nt, Homo sapiens
  misc_RNA (1)...(19): siRNA sense strand
ggagcuguguuaggcauuu

SEQ ID NO: 2077388 - RNA, 19 nt, Homo sapiens
  misc_RNA (1)...(19): siRNA sense strand
ggaagcaccugguauuuuc

SEQ ID NO: 2077389 - RNA, 19 nt, Homo sapiens
  misc_RNA (1)...(19): siRNA sense strand
gauguccuauuugauguuu

SEQ ID NO: 2077390 - RNA, 19 nt, Homo sapiens
  misc_RNA (1)...(19): siRNA sense strand
gaucaucagcugucuuuca

SEQ ID NO: 2077391 - RNA, 19 nt, Homo sapiens
  misc_RNA (1)...(19): siRNA sense strand
ccauuuggauucucaggaa

SEQ ID NO: 2077392 - RNA, 19 nt, Homo sapiens
  misc_RNA (1)...(19): siRNA sense strand
uugaagauccggaagauaa

SEQ ID NO: 2077393 - RNA, 19 nt, Homo sapiens
  misc_RNA (1)...(19): siRNA sense strand
uagcaggauuggacauauu

SEQ ID NO: 2077394 - RNA, 19 nt, Homo sapiens
  misc_RNA (1)...(19): siRNA sense strand
caguucaccugguaagaaa

SEQ ID NO: 2077395 - RNA, 19 nt, Homo sapiens
  misc_RNA (1)...(19): siRNA sense strand
gaaacagaaacacaugaga

SEQ ID NO: 2077396 - RNA, 19 nt, Homo sapiens
  misc_RNA (1)...(19): siRNA sense strand
agagagagacugaauuguu

SEQ ID NO: 2077397 - RNA, 19 nt, Homo sapiens
  misc_RNA (1)...(19): siRNA sense strand
ugagagagagacugaauug

SEQ ID NO: 2077398 - RNA, 19 nt, Homo sapiens
  misc_RNA (1)...(19): siRNA sense strand
gaacaugaugacaaagguu

SEQ ID NO: 2077399 - RNA, 19 nt, Homo sapiens
  misc_RNA (1)...(19): siRNA sense strand
gauugaagauccggaagau

SEQ ID NO: 2077400 - RNA, 19 nt, Homo sapiens
  misc_RNA (1)...(19): siRNA sense strand
acaagaaccagaccagaaa

SEQ ID NO: 2077401 - RNA, 19 nt, Homo sapiens
  misc_RNA (1)...(19): siRNA sense strand
ugacaaagguucgagaaaa

SEQ ID NO: 2077402 - RNA, 19 nt, Homo sapiens
  misc_RNA (1)...(19): siRNA sense strand
cuggaaagccauagcauaa

SEQ ID NO: 2077403 - RNA, 19 nt, Homo sapiens
  misc_RNA (1)...(19): siRNA sense strand
ucucauaaauggcuguugu

SEQ ID NO: 2077404 - RNA, 19 nt, Homo sapiens
  misc_RNA (1)...(19): siRNA sense strand
gaagauaaagaaaguagac

SEQ ID NO: 2077405 - RNA, 19 nt, Homo sapiens
  misc_RNA (1)...(19): siRNA sense strand
ccucuguccucuacaagaa

SEQ ID NO: 2077406 - RNA, 19 nt, Homo sapiens
  misc_RNA (1)...(19): siRNA sense strand
caauauguaccgaaauuuc

SEQ ID NO: 2077407 - RNA, 19 nt, Homo sapiens
  misc_RNA (1)...(19): siRNA sense strand
gugcaucacguuucagauu

SEQ ID NO: 2077408 - RNA, 19 nt, Homo sapiens
  misc_RNA (1)...(19): siRNA sense strand
gggauguccuauuugaugu

SEQ ID NO: 2077409 - RNA, 19 nt, Homo sapiens
  misc_RNA (1)...(19): siRNA sense strand
caacuuggaugggaaagac

SEQ ID NO: 2077410 - RNA, 19 nt, Homo sapiens
  misc_RNA (1)...(19): siRNA sense strand
cagaaacacaugagagaga

SEQ ID NO: 2077411 - RNA, 19 nt, Homo sapiens
  misc_RNA (1)...(19): siRNA sense strand
uaagaaauguggccccaaa

SEQ ID NO: 2077412 - RNA, 19 nt, Homo sapiens
  misc_RNA (1)...(19): siRNA sense strand
cuacaccuaugaauuugau

SEQ ID NO: 2077413 - RNA, 19 nt, Homo sapiens
  misc_RNA (1)...(19): siRNA sense strand
ggagagcagaacaugauga

SEQ ID NO: 2077414 - RNA, 19 nt, Homo sapiens
  misc_RNA (1)...(19): siRNA sense strand
caacauuccagugcuuaaa

SEQ ID NO: 2077415 - RNA, 19 nt, Homo sapiens
  misc_RNA (1)...(19): siRNA sense strand
ugacaaaacuugauagaac

SEQ ID NO: 2077416 - RNA, 19 nt, Homo sapiens
  misc_RNA (1)...(19): siRNA sense strand
uagaguuucuuagugcuuu

SEQ ID NO: 2077417 - RNA, 19 nt, Homo sapiens
  misc_RNA (1)...(19): siRNA sense strand
caccucagcaguaaauaaa

SEQ ID NO: 2077418 - RNA, 19 nt, Homo sapiens
  misc_RNA (1)...(19): siRNA sense strand
caucagcugucuuucaaac

SEQ ID NO: 2077419 - RNA, 19 nt, Homo sapiens
  misc_RNA (1)...(19): siRNA sense strand
aaacaacuacaccuaugaa

SEQ ID NO: 2077420 - RNA, 19 nt, Homo sapiens
  misc_RNA (1)...(19): siRNA sense strand
caguucaguucaccuggua

SEQ ID NO: 2077421 - RNA, 19 nt, Homo sapiens
  misc_RNA (1)...(19): siRNA sense strand
acaacuacaccuaugaauu

SEQ ID NO: 2077422 - RNA, 19 nt, Homo sapiens
  misc_RNA (1)...(19): siRNA sense strand
gaggaaagaaauagucagu

SEQ ID NO: 2077423 - RNA, 19 nt, Homo sapiens
  misc_RNA (1)...(19): siRNA sense strand
gaugacaaagguucgagaa

SEQ ID NO: 2077424 - RNA, 19 nt, Homo sapiens
  misc_RNA (1)...(19): siRNA sense strand
agcagaacaugaugacaaa

SEQ ID NO: 2077425 - RNA, 19 nt, Homo sapiens
  misc_RNA (1)...(19): siRNA sense strand
guagacuaaucauguugga

SEQ ID NO: 2077426 - RNA, 19 nt, Homo sapiens
  misc_RNA (1)...(19): siRNA sense strand
aaauugaugcgaucccuaa

SEQ ID NO: 2077427 - RNA, 19 nt, Homo sapiens
  misc_RNA (1)...(19): siRNA sense strand
ucagcugucuuucaaacau

SEQ ID NO: 2077428 - RNA, 19 nt, Homo sapiens
  misc_RNA (1)...(19): siRNA sense strand
cagcugucuuucaaacauu

SEQ ID NO: 2077429 - RNA, 19 nt, Homo sapiens
  misc_RNA (1)...(19): siRNA sense strand
ggcauaagacgugugauug

SEQ ID NO: 2077430 - RNA, 19 nt, Homo sapiens
  misc_RNA (1)...(19): siRNA sense strand
ucaccucagcaguaaauaa

SEQ ID NO: 2077431 - RNA, 19 nt, Homo sapiens
  misc_RNA (1)...(19): siRNA sense strand
aggaaucaccucagcagua

SEQ ID NO: 2077432 - RNA, 19 nt, Homo sapiens
  misc_RNA (1)...(19): siRNA sense strand
ggaacuaacauaugaacac

SEQ ID NO: 2077433 - RNA, 19 nt, Homo sapiens
  misc_RNA (1)...(19): siRNA sense strand
uaaugucaguccacagauc

SEQ ID NO: 2077434 - RNA, 19 nt, Homo sapiens
  misc_RNA (1)...(19): siRNA sense strand
agcaaaagcuauagaguuu

SEQ ID NO: 2077435 - RNA, 19 nt, Homo sapiens
  misc_RNA (1)...(19): siRNA sense strand
uuaauuggccagguuauga

SEQ ID NO: 2077436 - RNA, 19 nt, Homo sapiens
  misc_RNA (1)...(19): siRNA sense strand
uccugaaggucaagaugua

SEQ ID NO: 2077437 - RNA, 19 nt, Homo sapiens
  misc_RNA (1)...(19): siRNA sense strand
gcagcgcccaggcauaaga

SEQ ID NO: 2077438 - RNA, 19 nt, Homo sapiens
  misc_RNA (1)...(19): siRNA sense strand
caaccaugccagaaacaga

SEQ ID NO: 2077439 - RNA, 19 nt, Homo sapiens
  misc_RNA (1)...(19): siRNA sense strand
ggaagauaaagaaaguaga

SEQ ID NO: 2077440 - RNA, 19 nt, Homo sapiens
  misc_RNA (1)...(19): siRNA sense strand
ugaagauccggaagauaaa

SEQ ID NO: 2077441 - RNA, 19 nt, Homo sapiens
  misc_RNA (1)...(19): siRNA sense strand
ugacacagaugcuuuugga

SEQ ID NO: 2077442 - RNA, 19 nt, Homo sapiens
  misc_RNA (1)...(19): siRNA sense strand
uacaagaaccagaccagaa

SEQ ID NO: 2077443 - RNA, 19 nt, Homo sapiens
  misc_RNA (1)...(19): siRNA sense strand
ucaaagaagaguuaaugca

SEQ ID NO: 2077444 - RNA, 19 nt, Homo sapiens
  misc_RNA (1)...(19): siRNA sense strand
uggauucucaggaagauuu

SEQ ID NO: 2077445 - RNA, 19 nt, Homo sapiens
  misc_RNA (1)...(19): siRNA sense strand
gaggccauuuggauucuca

SEQ ID NO: 2077446 - RNA, 19 nt, Homo sapiens
  misc_RNA (1)...(19): siRNA sense strand
aaagcagaacucaguguuu

SEQ ID NO: 2077447 - RNA, 19 nt, Homo sapiens
  misc_RNA (1)...(19): siRNA sense strand
ccagaaacagaaacacaug

SEQ ID NO: 2077448 - RNA, 19 nt, Homo sapiens
  misc_RNA (1)...(19): siRNA sense strand
ugaguuccuucccauagug

SEQ ID NO: 2077449 - RNA, 19 nt, Homo sapiens
  misc_RNA (1)...(19): siRNA sense strand
ggaauccucgucugucuac

SEQ ID NO: 2077450 - RNA, 19 nt, Homo sapiens
  misc_RNA (1)...(19): siRNA sense strand
acauuuaauuggccagguu

SEQ ID NO: 2077451 - RNA, 19 nt, Homo sapiens
  misc_RNA (1)...(19): siRNA sense strand
gacaaaacuugauagaaca

SEQ ID NO: 2077452 - RNA, 19 nt, Homo sapiens
  misc_RNA (1)...(19): siRNA sense strand
ggaggcaugcaguucaguu

SEQ ID NO: 2077453 - RNA, 19 nt, Homo sapiens
  misc_RNA (1)...(19): siRNA sense strand
acagaacacagccguauca

SEQ ID NO: 2077454 - RNA, 19 nt, Homo sapiens
  misc_RNA (1)...(19): siRNA sense strand
gagaaaacaacuacaccua

SEQ ID NO: 2077455 - RNA, 19 nt, Homo sapiens
  misc_RNA (1)...(19): siRNA sense strand
caccuaaaccuucgagauc

SEQ ID NO: 2077456 - RNA, 19 nt, Homo sapiens
  misc_RNA (1)...(19): siRNA sense strand
ucaguccacagaucucuaa

SEQ ID NO: 2077457 - RNA, 19 nt, Homo sapiens
  misc_RNA (1)...(19): siRNA sense strand
uaacccugcugaggauguu

SEQ ID NO: 2077458 - RNA, 19 nt, Homo sapiens
  misc_RNA (1)...(19): siRNA sense strand
ucaaggagcuggaguacga

SEQ ID NO: 2077459 - RNA, 19 nt, Homo sapiens
  misc_RNA (1)...(19): siRNA sense strand
caacaucaccuacaacuac

SEQ ID NO: 2077460 - RNA, 19 nt, Homo sapiens
  misc_RNA (1)...(19): siRNA sense strand
caacaacaccggcuucauc

SEQ ID NO: 2077461 - RNA, 19 nt, Homo sapiens
  misc_RNA (1)...(19): siRNA sense strand
gccacaagcuccucaucuu

SEQ ID NO: 2077462 - RNA, 19 nt, Homo sapiens
  misc_RNA (1)...(19): siRNA sense strand
ccaacagccucuucaacga

SEQ ID NO: 2077463 - RNA, 19 nt, Homo sapiens
  misc_RNA (1)...(19): siRNA sense strand
caacaccggcuucaucaau

SEQ ID NO: 2077464 - RNA, 19 nt, Homo sapiens
  misc_RNA (1)...(19): siRNA sense strand
gagcuggaguacgacuaua

SEQ ID NO: 2077465 - RNA, 19 nt, Homo sapiens
  misc_RNA (1)...(19): siRNA sense strand
acuacgagcugaccaacuu

SEQ ID NO: 2077466 - RNA, 19 nt, Homo sapiens
  misc_RNA (1)...(19): siRNA sense strand
caguguaccucuacuacga

SEQ ID NO: 2077467 - RNA, 19 nt, Homo sapiens
  misc_RNA (1)...(19): siRNA sense strand
gcaucaaggagcuggagua

SEQ ID NO: 2077468 - RNA, 19 nt, Homo sapiens
  misc_RNA (1)...(19): siRNA sense strand
ggagcuggaguacgacuau

SEQ ID NO: 2077469 - RNA, 19 nt, Homo sapiens
  misc_RNA (1)...(19): siRNA sense strand
gcgucaacaucaccuacaa

SEQ ID NO: 2077470 - RNA, 19 nt, Homo sapiens
  misc_RNA (1)...(19): siRNA sense strand
cgacuaccacgucaaguuc

SEQ ID NO: 2077471 - RNA, 19 nt, Homo sapiens
  misc_RNA (1)...(19): siRNA sense strand
ccacaagcuccucaucuuc

SEQ ID NO: 2077472 - RNA, 19 nt, Homo sapiens
  misc_RNA (1)...(19): siRNA sense strand
cgacaacaccgccuucacu

SEQ ID NO: 2077473 - RNA, 19 nt, Homo sapiens
  misc_RNA (1)...(19): siRNA sense strand
cgacgacgacgaggaguga

SEQ ID NO: 2077474 - RNA, 19 nt, Homo sapiens
  misc_RNA (1)...(19): siRNA sense strand
acaccggcuucaucaauca

SEQ ID NO: 2077475 - RNA, 19 nt, Homo sapiens
  misc_RNA (1)...(19): siRNA sense strand
ccacguuccgcaaacugua

SEQ ID NO: 2077476 - RNA, 19 nt, Homo sapiens
  misc_RNA (1)...(19): siRNA sense strand
cacaagcuccucaucuuca

SEQ ID NO: 2077477 - RNA, 19 nt, Homo sapiens
  misc_RNA (1)...(19): siRNA sense strand
guggauggguggcaagaac

SEQ ID NO: 2077478 - RNA, 19 nt, Homo sapiens
  misc_RNA (1)...(19): siRNA sense strand
ccgacuaccacgucaaguu

SEQ ID NO: 2077479 - RNA, 19 nt, Homo sapiens
  misc_RNA (1)...(19): siRNA sense strand
ucaacaucaccuacaacua

SEQ ID NO: 2077480 - RNA, 19 nt, Homo sapiens
  misc_RNA (1)...(19): siRNA sense strand
cuucaucaaucaggacuuc

SEQ ID NO: 2077481 - RNA, 19 nt, Homo sapiens
  misc_RNA (1)...(19): siRNA sense strand
ccucaccggcuuugucaug

SEQ ID NO: 2077482 - RNA, 19 nt, Homo sapiens
  misc_RNA (1)...(19): siRNA sense strand
gcagaaaccucuacaagaa

SEQ ID NO: 2077483 - RNA, 19 nt, Homo sapiens
  misc_RNA (1)...(19): siRNA sense strand
gggcaucgaucuauuguua

SEQ ID NO: 2077484 - RNA, 19 nt, Homo sapiens
  misc_RNA (1)...(19): siRNA sense strand
ccaagaagcucaauggaaa

SEQ ID NO: 2077485 - RNA, 19 nt, Homo sapiens
  misc_RNA (1)...(19): siRNA sense strand
gagaagacaacuaugauua

SEQ ID NO: 2077486 - RNA, 19 nt, Homo sapiens
  misc_RNA (1)...(19): siRNA sense strand
gaagaugaauccagcaguu

SEQ ID NO: 2077487 - RNA, 19 nt, Homo sapiens
  misc_RNA (1)...(19): siRNA sense strand
ccacaacaauggacgcuua

SEQ ID NO: 2077488 - RNA, 19 nt, Homo sapiens
  misc_RNA (1)...(19): siRNA sense strand
guauauggcuugucuguga

SEQ ID NO: 2077489 - RNA, 19 nt, Homo sapiens
  misc_RNA (1)...(19): siRNA sense strand
ggaagccugucuaaacaua

SEQ ID NO: 2077490 - RNA, 19 nt, Homo sapiens
  misc_RNA (1)...(19): siRNA sense strand
gaaagggcaucgaucuauu

SEQ ID NO: 2077491 - RNA, 19 nt, Homo sapiens
  misc_RNA (1)...(19): siRNA sense strand
gaucugcucuucuggugua

SEQ ID NO: 2077492 - RNA, 19 nt, Homo sapiens
  misc_RNA (1)...(19): siRNA sense strand
ggaguggccugucgcauga

SEQ ID NO: 2077493 - RNA, 19 nt, Homo sapiens
  misc_RNA (1)...(19): siRNA sense strand
gagaauuccuccucagaga

SEQ ID NO: 2077494 - RNA, 19 nt, Homo sapiens
  misc_RNA (1)...(19): siRNA sense strand
ucaugaagaugcaguauau

SEQ ID NO: 2077495 - RNA, 19 nt, Homo sapiens
  misc_RNA (1)...(19): siRNA sense strand
ggucugaaauggccuguga

SEQ ID NO: 2077496 - RNA, 19 nt, Homo sapiens
  misc_RNA (1)...(19): siRNA sense strand
ggaaaccugucccuccaaa

SEQ ID NO: 2077497 - RNA, 19 nt, Homo sapiens
  misc_RNA (1)...(19): siRNA sense strand
gagcaccauuccaacauuu

SEQ ID NO: 2077498 - RNA, 19 nt, Homo sapiens
  misc_RNA (1)...(19): siRNA sense strand
ggacacuccuacacaaaga

SEQ ID NO: 2077499 - RNA, 19 nt, Homo sapiens
  misc_RNA (1)...(19): siRNA sense strand
ggacguguuugcucaugaa

SEQ ID NO: 2077500 - RNA, 19 nt, Homo sapiens
  misc_RNA (1)...(19): siRNA sense strand
caaguuauccuccaugaug

SEQ ID NO: 2077501 - RNA, 19 nt, Homo sapiens
  misc_RNA (1)...(19): siRNA sense strand
gaagauacagauucagaga

SEQ ID NO: 2077502 - RNA, 19 nt, Homo sapiens
  misc_RNA (1)...(19): siRNA sense strand
ggagaagacaacuaugauu

SEQ ID NO: 2077503 - RNA, 19 nt, Homo sapiens
  misc_RNA (1)...(19): siRNA sense strand
gcaucuggcuccacucuca

SEQ ID NO: 2077504 - RNA, 19 nt, Homo sapiens
  misc_RNA (1)...(19): siRNA sense strand
gcaaugaugagcaaguuau

SEQ ID NO: 2077505 - RNA, 19 nt, Homo sapiens
  misc_RNA (1)...(19): siRNA sense strand
ccaaugaguccgauucuga

SEQ ID NO: 2077506 - RNA, 19 nt, Homo sapiens
  misc_RNA (1)...(19): siRNA sense strand
uagaaucaguugagcgaaa

SEQ ID NO: 2077507 - RNA, 19 nt, Homo sapiens
  misc_RNA (1)...(19): siRNA sense strand
ugaaagcagugagacauug

SEQ ID NO: 2077508 - RNA, 19 nt, Homo sapiens
  misc_RNA (1)...(19): siRNA sense strand
uaaggaagccugucuaaac

SEQ ID NO: 2077509 - RNA, 19 nt, Homo sapiens
  misc_RNA (1)...(19): siRNA sense strand
ccucagagaagaaauuaaa

SEQ ID NO: 2077510 - RNA, 19 nt, Homo sapiens
  misc_RNA (1)...(19): siRNA sense strand
gaagacaacccgagaagac

SEQ ID NO: 2077511 - RNA, 19 nt, Homo sapiens
  misc_RNA (1)...(19): siRNA sense strand
gauucccgcugccucuaua

SEQ ID NO: 2077512 - RNA, 19 nt, Homo sapiens
  misc_RNA (1)...(19): siRNA sense strand
caggagaucgugaccagua

SEQ ID NO: 2077513 - RNA, 19 nt, Homo sapiens
  misc_RNA (1)...(19): siRNA sense strand
gggcaucaccaacuucuga

SEQ ID NO: 2077514 - RNA, 19 nt, Homo sapiens
  misc_RNA (1)...(19): siRNA sense strand
gaaugucugugagguggaa

SEQ ID NO: 2077515 - RNA, 19 nt, Homo sapiens
  misc_RNA (1)...(19): siRNA sense strand
gaucuauuguuaaccaagu

SEQ ID NO: 2077516 - RNA, 19 nt, Homo sapiens
  misc_RNA (1)...(19): siRNA sense strand
uggcuccgcuacucuuaua

SEQ ID NO: 2077517 - RNA, 19 nt, Homo sapiens
  misc_RNA (1)...(19): siRNA sense strand
gaagagacuccuagaacuc

SEQ ID NO: 2077518 - RNA, 19 nt, Homo sapiens
  misc_RNA (1)...(19): siRNA sense strand
gagaauuccugcagaucca

SEQ ID NO: 2077519 - RNA, 19 nt, Homo sapiens
  misc_RNA (1)...(19): siRNA sense strand
gauaguagcagggcuguuc

SEQ ID NO: 2077520 - RNA, 19 nt, Homo sapiens
  misc_RNA (1)...(19): siRNA sense strand
gaaccagccacaaagacaa

SEQ ID NO: 2077521 - RNA, 19 nt, Homo sapiens
  misc_RNA (1)...(19): siRNA sense strand
acacuuacauuggagaaga

SEQ ID NO: 2077522 - RNA, 19 nt, Homo sapiens
  misc_RNA (1)...(19): siRNA sense strand
caucagccuuucauagugu

SEQ ID NO: 2077523 - RNA, 19 nt, Homo sapiens
  misc_RNA (1)...(19): siRNA sense strand
cagcgggucuggcaacugu

SEQ ID NO: 2077524 - RNA, 19 nt, Homo sapiens
  misc_RNA (1)...(19): siRNA sense strand
ggcaauagcggcucuguag

SEQ ID NO: 2077525 - RNA, 19 nt, Homo sapiens
  misc_RNA (1)...(19): siRNA sense strand
aaggaagccugucuaaaca

SEQ ID NO: 2077526 - RNA, 19 nt, Homo sapiens
  misc_RNA (1)...(19): siRNA sense strand
ccauugaauucuccaacaa

SEQ ID NO: 2077527 - RNA, 19 nt, Homo sapiens
  misc_RNA (1)...(19): siRNA sense strand
ggagaucgugaccaguaua

SEQ ID NO: 2077528 - RNA, 19 nt, Homo sapiens
  misc_RNA (1)...(19): siRNA sense strand
ucaagcccaccaacacuua

SEQ ID NO: 2077529 - RNA, 19 nt, Homo sapiens
  misc_RNA (1)...(19): siRNA sense strand
ggagagcaccauuccaaca

SEQ ID NO: 2077530 - RNA, 19 nt, Homo sapiens
  misc_RNA (1)...(19): siRNA sense strand
uaaccaaguccgauuuaau

SEQ ID NO: 2077531 - RNA, 19 nt, Homo sapiens
  misc_RNA (1)...(19): siRNA sense strand
guuaaccaaguccgauuua

SEQ ID NO: 2077532 - RNA, 19 nt, Homo sapiens
  misc_RNA (1)...(19): siRNA sense strand
gcaucgaucuauuguuaac

SEQ ID NO: 2077533 - RNA, 19 nt, Homo sapiens
  misc_RNA (1)...(19): siRNA sense strand
gaagcagguggcauuggua

SEQ ID NO: 2077534 - RNA, 19 nt, Homo sapiens
  misc_RNA (1)...(19): siRNA sense strand
gaaaggagagcaccauucc

SEQ ID NO: 2077535 - RNA, 19 nt, Homo sapiens
  misc_RNA (1)...(19): siRNA sense strand
ugaaagggcaucgaucuau

SEQ ID NO: 2077536 - RNA, 19 nt, Homo sapiens
  misc_RNA (1)...(19): siRNA sense strand
ggaaccagccacaaagaca

SEQ ID NO: 2077537 - RNA, 19 nt, Homo sapiens
  misc_RNA (1)...(19): siRNA sense strand
gcaggaaccagccacaaag

SEQ ID NO: 2077538 - RNA, 19 nt, Homo sapiens
  misc_RNA (1)...(19): siRNA sense strand
cagggacacuccuacacaa

SEQ ID NO: 2077539 - RNA, 19 nt, Homo sapiens
  misc_RNA (1)...(19): siRNA sense strand
guaaggaagccugucuaaa

SEQ ID NO: 2077540 - RNA, 19 nt, Homo sapiens
  misc_RNA (1)...(19): siRNA sense strand
ccaucagccuuucauagug

SEQ ID NO: 2077541 - RNA, 19 nt, Homo sapiens
  misc_RNA (1)...(19): siRNA sense strand
gaauuggaagauacagauu

SEQ ID NO: 2077542 - RNA, 19 nt, Homo sapiens
  misc_RNA (1)...(19): siRNA sense strand
gacccagucugaugacagu

SEQ ID NO: 2077543 - RNA, 19 nt, Homo sapiens
  misc_RNA (1)...(19): siRNA sense strand
uaaagaagagacuccuaga

SEQ ID NO: 2077544 - RNA, 19 nt, Homo sapiens
  misc_RNA (1)...(19): siRNA sense strand
gcacuuccacgcuagagau

SEQ ID NO: 2077545 - RNA, 19 nt, Homo sapiens
  misc_RNA (1)...(19): siRNA sense strand
gaagacaacuaugauuacc

SEQ ID NO: 2077546 - RNA, 19 nt, Homo sapiens
  misc_RNA (1)...(19): siRNA sense strand
gaacuagacacagaucucu

SEQ ID NO: 2077547 - RNA, 19 nt, Homo sapiens
  misc_RNA (1)...(19): siRNA sense strand
ccacuucggcugugucaau

SEQ ID NO: 2077548 - RNA, 19 nt, Homo sapiens
  misc_RNA (1)...(19): siRNA sense strand
uacaugaucugcucuucug

SEQ ID NO: 2077549 - RNA, 19 nt, Homo sapiens
  misc_RNA (1)...(19): siRNA sense strand
ggaugauggccuucuuuga

SEQ ID NO: 2077550 - RNA, 19 nt, Homo sapiens
  misc_RNA (1)...(19): siRNA sense strand
gccauugaauucuccaaca

SEQ ID NO: 2077551 - RNA, 19 nt, Homo sapiens
  misc_RNA (1)...(19): siRNA sense strand
agaagagacuccuagaacu

SEQ ID NO: 2077552 - RNA, 19 nt, Homo sapiens
  misc_RNA (1)...(19): siRNA sense strand
ucuuauaucuccuacucaa

SEQ ID NO: 2077553 - RNA, 19 nt, Homo sapiens
  misc_RNA (1)...(19): siRNA sense strand
gaugauggccuucuuugac

SEQ ID NO: 2077554 - RNA, 19 nt, Homo sapiens
  misc_RNA (1)...(19): siRNA sense strand
cguguuugcucaugaagau

SEQ ID NO: 2077555 - RNA, 19 nt, Homo sapiens
  misc_RNA (1)...(19): siRNA sense strand
ugacauagaaucaguugag

SEQ ID NO: 2077556 - RNA, 19 nt, Homo sapiens
  misc_RNA (1)...(19): siRNA sense strand
caaagugccaugaguguac

SEQ ID NO: 2077557 - RNA, 19 nt, Homo sapiens
  misc_RNA (1)...(19): siRNA sense strand
ccacagccaauucaaagga

SEQ ID NO: 2077558 - RNA, 19 nt, Homo sapiens
  misc_RNA (1)...(19): siRNA sense strand
ggucaacggagccuucaug

SEQ ID NO: 2077559 - RNA, 19 nt, Homo sapiens
  misc_RNA (1)...(19): siRNA sense strand
aaagaagagacuccuagaa

SEQ ID NO: 2077560 - RNA, 19 nt, Homo sapiens
  misc_RNA (1)...(19): siRNA sense strand
ucugugagguggaacuaga

SEQ ID NO: 2077561 - RNA, 19 nt, Homo sapiens
  misc_RNA (1)...(19): siRNA sense strand
uauccuccaugauguugaa

SEQ ID NO: 2077562 - RNA, 19 nt, Homo sapiens
  misc_RNA (1)...(19): siRNA sense strand
gcaauagcggcucuguaga

SEQ ID NO: 2077563 - RNA, 19 nt, Homo sapiens
  misc_RNA (1)...(19): siRNA sense strand
ugagaguacuauccuccaa

SEQ ID NO: 2077564 - RNA, 19 nt, Homo sapiens
  misc_RNA (1)...(19): siRNA sense strand
cugaugacuucaaccugua

SEQ ID NO: 2077565 - RNA, 19 nt, Homo sapiens
  misc_RNA (1)...(19): siRNA sense strand
gagaucgugaccaguauau

SEQ ID NO: 2077566 - RNA, 19 nt, Homo sapiens
  misc_RNA (1)...(19): siRNA sense strand
aaacuauccaucagccuuu

SEQ ID NO: 2077567 - RNA, 19 nt, Homo sapiens
  misc_RNA (1)...(19): siRNA sense strand
gaaaccaagaagcucaaug

SEQ ID NO: 2077568 - RNA, 19 nt, Homo sapiens
  misc_RNA (1)...(19): siRNA sense strand
agagcaccauuccaacauu

SEQ ID NO: 2077569 - RNA, 19 nt, Homo sapiens
  misc_RNA (1)...(19): siRNA sense strand
ccaaagugccaugagugua

SEQ ID NO: 2077570 - RNA, 19 nt, Homo sapiens
  misc_RNA (1)...(19): siRNA sense strand
gaauuccuccucagagaag

SEQ ID NO: 2077571 - RNA, 19 nt, Homo sapiens
  misc_RNA (1)...(19): siRNA sense strand
ccaggacccagucugauga

SEQ ID NO: 2077572 - RNA, 19 nt, Homo sapiens
  misc_RNA (1)...(19): siRNA sense strand
caaccagucgguccaggaa

SEQ ID NO: 2077573 - RNA, 19 nt, Homo sapiens
  misc_RNA (1)...(19): siRNA sense strand
gagagcaccauuccaacau

SEQ ID NO: 2077574 - RNA, 19 nt, Homo sapiens
  misc_RNA (1)...(19): siRNA sense strand
guggagaauuccugcagau

SEQ ID NO: 2077575 - RNA, 19 nt, Homo sapiens
  misc_RNA (1)...(19): siRNA sense strand
gaaagcagugagacauugg

SEQ ID NO: 2077576 - RNA, 19 nt, Homo sapiens
  misc_RNA (1)...(19): siRNA sense strand
aaaccaagaagcucaaugg

SEQ ID NO: 2077577 - RNA, 19 nt, Homo sapiens
  misc_RNA (1)...(19): siRNA sense strand
guagagcacccuuuugaaa

SEQ ID NO: 2077578 - RNA, 19 nt, Homo sapiens
  misc_RNA (1)...(19): siRNA sense strand
agaagcagguggcauuggu

SEQ ID NO: 2077579 - RNA, 19 nt, Homo sapiens
  misc_RNA (1)...(19): siRNA sense strand
ggcaaugaugagcaaguua

SEQ ID NO: 2077580 - RNA, 19 nt, Homo sapiens
  misc_RNA (1)...(19): siRNA sense strand
ucuauacccaugaagagua

SEQ ID NO: 2077581 - RNA, 19 nt, Homo sapiens
  misc_RNA (1)...(19): siRNA sense strand
gauuguugcgggucugaaa

SEQ ID NO: 2077582 - RNA, 19 nt, Homo sapiens
  misc_RNA (1)...(19): siRNA sense strand
gaacacagcuggugacuuc

SEQ ID NO: 2077583 - RNA, 19 nt, Homo sapiens
  misc_RNA (1)...(19): siRNA sense strand
ggaagaagaugaacugcaa

SEQ ID NO: 2077584 - RNA, 19 nt, Homo sapiens
  misc_RNA (1)...(19): siRNA sense strand
gacaggaacucccucgaaa

SEQ ID NO: 2077585 - RNA, 19 nt, Homo sapiens
  misc_RNA (1)...(19): siRNA sense strand
guucucaccuuucuggaua

SEQ ID NO: 2077586 - RNA, 19 nt, Homo sapiens
  misc_RNA (1)...(19): siRNA sense strand
ucaaccagcuggagaguga

SEQ ID NO: 2077587 - RNA, 19 nt, Homo sapiens
  misc_RNA (1)...(19): siRNA sense strand
ugucauagcuggaggaauc

SEQ ID NO: 2077588 - RNA, 19 nt, Homo sapiens
  misc_RNA (1)...(19): siRNA sense strand
ucaucagucuggauaauuu

SEQ ID NO: 2077589 - RNA, 19 nt, Homo sapiens
  misc_RNA (1)...(19): siRNA sense strand
guaaugcccucaccuacau

SEQ ID NO: 2077590 - RNA, 19 nt, Homo sapiens
  misc_RNA (1)...(19): siRNA sense strand
gagcagaggaagaagauga

SEQ ID NO: 2077591 - RNA, 19 nt, Homo sapiens
  misc_RNA (1)...(19): siRNA sense strand
aggcauggcuguucaguga

SEQ ID NO: 2077592 - RNA, 19 nt, Homo sapiens
  misc_RNA (1)...(19): siRNA sense strand
ucaagugccugcgcaauga

SEQ ID NO: 2077593 - RNA, 19 nt, Homo sapiens
  misc_RNA (1)...(19): siRNA sense strand
ggauagagcagaggaagaa

SEQ ID NO: 2077594 - RNA, 19 nt, Homo sapiens
  misc_RNA (1)...(19): siRNA sense strand
cauaaggacgccugucaua

SEQ ID NO: 2077595 - RNA, 19 nt, Homo sapiens
  misc_RNA (1)...(19): siRNA sense strand
aagcagaaauggaggagaa

SEQ ID NO: 2077596 - RNA, 19 nt, Homo sapiens
  misc_RNA (1)...(19): siRNA sense strand
gaaaguaugaugcccagau

SEQ ID NO: 2077597 - RNA, 19 nt, Homo sapiens
  misc_RNA (1)...(19): siRNA sense strand
gcaaguccuuccgcuggua

SEQ ID NO: 2077598 - RNA, 19 nt, Homo sapiens
  misc_RNA (1)...(19): siRNA sense strand
gaucuuucauccagcauuc

SEQ ID NO: 2077599 - RNA, 19 nt, Homo sapiens
  misc_RNA (1)...(19): siRNA sense strand
aaguguggauggaugaaua

SEQ ID NO: 2077600 - RNA, 19 nt, Homo sapiens
  misc_RNA (1)...(19): siRNA sense strand
gagaaggcaagcagaaaug

SEQ ID NO: 2077601 - RNA, 19 nt, Homo sapiens
  misc_RNA (1)...(19): siRNA sense strand
gcugccaccuccaccuuaa

SEQ ID NO: 2077602 - RNA, 19 nt, Homo sapiens
  misc_RNA (1)...(19): siRNA sense strand
caucaucaccuuccacaau

SEQ ID NO: 2077603 - RNA, 19 nt, Homo sapiens
  misc_RNA (1)...(19): siRNA sense strand
guggauggaugaauacaag

SEQ ID NO: 2077604 - RNA, 19 nt, Homo sapiens
  misc_RNA (1)...(19): siRNA sense strand
aaaguaugaugcccagaug

SEQ ID NO: 2077605 - RNA, 19 nt, Homo sapiens
  misc_RNA (1)...(19): siRNA sense strand
gcugguaccuggagaacgu

SEQ ID NO: 2077606 - RNA, 19 nt, Homo sapiens
  misc_RNA (1)...(19): siRNA sense strand
ggccaugucuucaggaaac

SEQ ID NO: 2077607 - RNA, 19 nt, Homo sapiens
  misc_RNA (1)...(19): siRNA sense strand
gaucgacaaguccugguuu

SEQ ID NO: 2077608 - RNA, 19 nt, Homo sapiens
  misc_RNA (1)...(19): siRNA sense strand
cauuacagcugcccaucug

SEQ ID NO: 2077609 - RNA, 19 nt, Homo sapiens
  misc_RNA (1)...(19): siRNA sense strand
gacuggagccugcauuuca

SEQ ID NO: 2077610 - RNA, 19 nt, Homo sapiens
  misc_RNA (1)...(19): siRNA sense strand
gaacuccugccaacuugau

SEQ ID NO: 2077611 - RNA, 19 nt, Homo sapiens
  misc_RNA (1)...(19): siRNA sense strand
gggcacuuucuacuacuua

SEQ ID NO: 2077612 - RNA, 19 nt, Homo sapiens
  misc_RNA (1)...(19): siRNA sense strand
ccgaacuccugccaacuug

SEQ ID NO: 2077613 - RNA, 19 nt, Homo sapiens
  misc_RNA (1)...(19): siRNA sense strand
gaaggcaagcagaaaugga

SEQ ID NO: 2077614 - RNA, 19 nt, Homo sapiens
  misc_RNA (1)...(19): siRNA sense strand
gaaucuucgugaucgacaa

SEQ ID NO: 2077615 - RNA, 19 nt, Homo sapiens
  misc_RNA (1)...(19): siRNA sense strand
ugacaggaacucccucgaa

SEQ ID NO: 2077616 - RNA, 19 nt, Homo sapiens
  misc_RNA (1)...(19): siRNA sense strand
cagcuaccguucucaccuu

SEQ ID NO: 2077617 - RNA, 19 nt, Homo sapiens
  misc_RNA (1)...(19): siRNA sense strand
gguaaugcccucaccuaca

SEQ ID NO: 2077618 - RNA, 19 nt, Homo sapiens
  misc_RNA (1)...(19): siRNA sense strand
gaugugcaacccuagagaa

SEQ ID NO: 2077619 - RNA, 19 nt, Homo sapiens
  misc_RNA (1)...(19): siRNA sense strand
ucaccuacaucaggaauac

SEQ ID NO: 2077620 - RNA, 19 nt, Homo sapiens
  misc_RNA (1)...(19): siRNA sense strand
gcccaggcauggcuguuca

SEQ ID NO: 2077621 - RNA, 19 nt, Homo sapiens
  misc_RNA (1)...(19): siRNA sense strand
ccaacuugauccaggagau

SEQ ID NO: 2077622 - RNA, 19 nt, Homo sapiens
  misc_RNA (1)...(19): siRNA sense strand
gcuguugccacacacauga

SEQ ID NO: 2077623 - RNA, 19 nt, Homo sapiens
  misc_RNA (1)...(19): siRNA sense strand
gcagaugugcaacccuaga

SEQ ID NO: 2077624 - RNA, 19 nt, Homo sapiens
  misc_RNA (1)...(19): siRNA sense strand
cguggugagucccaucauu

SEQ ID NO: 2077625 - RNA, 19 nt, Homo sapiens
  misc_RNA (1)...(19): siRNA sense strand
ggggugaacugcuuagaau

SEQ ID NO: 2077626 - RNA, 19 nt, Homo sapiens
  misc_RNA (1)...(19): siRNA sense strand
gcccaucuguguccuacuc

SEQ ID NO: 2077627 - RNA, 19 nt, Homo sapiens
  misc_RNA (1)...(19): siRNA sense strand
ggugaacugcuuagaaucu

SEQ ID NO: 2077628 - RNA, 19 nt, Homo sapiens
  misc_RNA (1)...(19): siRNA sense strand
gcaccaucccgcucauugu

SEQ ID NO: 2077629 - RNA, 19 nt, Homo sapiens
  misc_RNA (1)...(19): siRNA sense strand
uggaugaauacaagcaaua

SEQ ID NO: 2077630 - RNA, 19 nt, Homo sapiens
  misc_RNA (1)...(19): siRNA sense strand
guggugagucccaucauug

SEQ ID NO: 2077631 - RNA, 19 nt, Homo sapiens
  misc_RNA (1)...(19): siRNA sense strand
cuagagaaggcaagcagaa

SEQ ID NO: 2077632 - RNA, 19 nt, Homo sapiens
  misc_RNA (1)...(19): siRNA sense strand
caguguggcuacgcggaua

SEQ ID NO: 2077633 - RNA, 19 nt, Homo sapiens
  misc_RNA (1)...(19): siRNA sense strand
acaagcaauacuacuauga

SEQ ID NO: 2077634 - RNA, 19 nt, Homo sapiens
  misc_RNA (1)...(19): siRNA sense strand
uacaagcaauacuacuaug

SEQ ID NO: 2077635 - RNA, 19 nt, Homo sapiens
  misc_RNA (1)...(19): siRNA sense strand
ggagaucauuuuaguggau

SEQ ID NO: 2077636 - RNA, 19 nt, Homo sapiens
  misc_RNA (1)...(19): siRNA sense strand
ccugggcacuuucuacuac

SEQ ID NO: 2077637 - RNA, 19 nt, Homo sapiens
  misc_RNA (1)...(19): siRNA sense strand
gaggaaucuucgugaucga

SEQ ID NO: 2077638 - RNA, 19 nt, Homo sapiens
  misc_RNA (1)...(19): siRNA sense strand
gccucugccuggagacaaa

SEQ ID NO: 2077639 - RNA, 19 nt, Homo sapiens
  misc_RNA (1)...(19): siRNA sense strand
gcacuuucuacuacuuaug

SEQ ID NO: 2077640 - RNA, 19 nt, Homo sapiens
  misc_RNA (1)...(19): siRNA sense strand
ugucaucagucuggauaau

SEQ ID NO: 2077641 - RNA, 19 nt, Homo sapiens
  misc_RNA (1)...(19): siRNA sense strand
cauccagcauucagucagu

SEQ ID NO: 2077642 - RNA, 19 nt, Homo sapiens
  misc_RNA (1)...(19): siRNA sense strand
caagcaauacuacuaugag

SEQ ID NO: 2077643 - RNA, 19 nt, Homo sapiens
  misc_RNA (1)...(19): siRNA sense strand
ggaaacggcaccccuacaa

SEQ ID NO: 2077644 - RNA, 19 nt, Homo sapiens
  misc_RNA (1)...(19): siRNA sense strand
uagagaaggcaagcagaaa

SEQ ID NO: 2077645 - RNA, 19 nt, Homo sapiens
  misc_RNA (1)...(19): siRNA sense strand
ugaacugcuuagaaucuca

SEQ ID NO: 2077646 - RNA, 19 nt, Homo sapiens
  misc_RNA (1)...(19): siRNA sense strand
acagacagcacgccuucaa

SEQ ID NO: 2077647 - RNA, 19 nt, Homo sapiens
  misc_RNA (1)...(19): siRNA sense strand
gaaguguggauggaugaau

SEQ ID NO: 2077648 - RNA, 19 nt, Homo sapiens
  misc_RNA (1)...(19): siRNA sense strand
aucgacaaguccugguuua

SEQ ID NO: 2077649 - RNA, 19 nt, Homo sapiens
  misc_RNA (1)...(19): siRNA sense strand
agagaaggcaagcagaaau

SEQ ID NO: 2077650 - RNA, 19 nt, Homo sapiens
  misc_RNA (1)...(19): siRNA sense strand
ggcacuuucuacuacuuau

SEQ ID NO: 2077651 - RNA, 19 nt, Homo sapiens
  misc_RNA (1)...(19): siRNA sense strand
cgacaaguccugguuuaac

SEQ ID NO: 2077652 - RNA, 19 nt, Homo sapiens
  misc_RNA (1)...(19): siRNA sense strand
gucaagugccugcgcaaug

SEQ ID NO: 2077653 - RNA, 19 nt, Homo sapiens
  misc_RNA (1)...(19): siRNA sense strand
gaauacaagcaauacuacu

SEQ ID NO: 2077654 - RNA, 19 nt, Homo sapiens
  misc_RNA (1)...(19): siRNA sense strand
cagaaguguggauggauga

SEQ ID NO: 2077655 - RNA, 19 nt, Homo sapiens
  misc_RNA (1)...(19): siRNA sense strand
uaaggacgccugucauagc

SEQ ID NO: 2077656 - RNA, 19 nt, Homo sapiens
  misc_RNA (1)...(19): siRNA sense strand
caggaacucccucgaaagg

SEQ ID NO: 2077657 - RNA, 19 nt, Homo sapiens
  misc_RNA (1)...(19): siRNA sense strand
ccuggauccugggcacuuu

SEQ ID NO: 2077658 - RNA, 19 nt, Homo sapiens
  misc_RNA (1)...(19): siRNA sense strand
agaggaagaagaugaacug

SEQ ID NO: 2077659 - RNA, 19 nt, Homo sapiens
  misc_RNA (1)...(19): siRNA sense strand
ggaugaauacaagcaauac

SEQ ID NO: 2077660 - RNA, 19 nt, Homo sapiens
  misc_RNA (1)...(19): siRNA sense strand
gauggaugaauacaagcaa

SEQ ID NO: 2077661 - RNA, 19 nt, Homo sapiens
  misc_RNA (1)...(19): siRNA sense strand
cugcagaaguguggaugga

SEQ ID NO: 2077662 - RNA, 19 nt, Homo sapiens
  misc_RNA (1)...(19): siRNA sense strand
cuaccguucucaccuuucu

SEQ ID NO: 2077663 - RNA, 19 nt, Homo sapiens
  misc_RNA (1)...(19): siRNA sense strand
ugaauacaagcaauacuac

SEQ ID NO: 2077664 - RNA, 19 nt, Homo sapiens
  misc_RNA (1)...(19): siRNA sense strand
acuggagccugcauuucaa

SEQ ID NO: 2077665 - RNA, 19 nt, Homo sapiens
  misc_RNA (1)...(19): siRNA sense strand
ggagccugcauuucaagug

SEQ ID NO: 2077666 - RNA, 19 nt, Homo sapiens
  misc_RNA (1)...(19): siRNA sense strand
uagagcagaggaagaagau

SEQ ID NO: 2077667 - RNA, 19 nt, Homo sapiens
  misc_RNA (1)...(19): siRNA sense strand
ggauggaugaauacaagca

SEQ ID NO: 2077668 - RNA, 19 nt, Homo sapiens
  misc_RNA (1)...(19): siRNA sense strand
gaaauuccgugaagccaua

SEQ ID NO: 2077669 - RNA, 19 nt, Homo sapiens
  misc_RNA (1)...(19): siRNA sense strand
caaggaauauugccucaaa

SEQ ID NO: 2077670 - RNA, 19 nt, Homo sapiens
  misc_RNA (1)...(19): siRNA sense strand
aggcugagcugguaaacua

SEQ ID NO: 2077671 - RNA, 19 nt, Homo sapiens
  misc_RNA (1)...(19): siRNA sense strand
gacaagaaauuccgugaag

SEQ ID NO: 2077672 - RNA, 19 nt, Homo sapiens
  misc_RNA (1)...(19): siRNA sense strand
gcaaggacccaacaaccaa

SEQ ID NO: 2077673 - RNA, 19 nt, Homo sapiens
  misc_RNA (1)...(19): siRNA sense strand
gcuacaaggacaagaaauu

SEQ ID NO: 2077674 - RNA, 19 nt, Homo sapiens
  misc_RNA (1)...(19): siRNA sense strand
ugacaaagcacucuacuac

SEQ ID NO: 2077675 - RNA, 19 nt, Homo sapiens
  misc_RNA (1)...(19): siRNA sense strand
gaauauugccucaaagucu

SEQ ID NO: 2077676 - RNA, 19 nt, Homo sapiens
  misc_RNA (1)...(19): siRNA sense strand
gugaagccauaggcaaaua

SEQ ID NO: 2077677 - RNA, 19 nt, Homo sapiens
  misc_RNA (1)...(19): siRNA sense strand
ggucugguguggccuucua

SEQ ID NO: 2077678 - RNA, 19 nt, Homo sapiens
  misc_RNA (1)...(19): siRNA sense strand
gaacgagucaaggaauauu

SEQ ID NO: 2077679 - RNA, 19 nt, Homo sapiens
  misc_RNA (1)...(19): siRNA sense strand
ggacaagaaauuccgugaa

SEQ ID NO: 2077680 - RNA, 19 nt, Homo sapiens
  misc_RNA (1)...(19): siRNA sense strand
gggcguugcuggagcugaa

SEQ ID NO: 2077681 - RNA, 19 nt, Homo sapiens
  misc_RNA (1)...(19): siRNA sense strand
caacagacaccaacgugau

SEQ ID NO: 2077682 - RNA, 19 nt, Homo sapiens
  misc_RNA (1)...(19): siRNA sense strand
ccaacgugauucgguauau

SEQ ID NO: 2077683 - RNA, 19 nt, Homo sapiens
  misc_RNA (1)...(19): siRNA sense strand
gcacucuacuaccugaaag

SEQ ID NO: 2077684 - RNA, 19 nt, Homo sapiens
  misc_RNA (1)...(19): siRNA sense strand
aauauugccucaaagucuu

SEQ ID NO: 2077685 - RNA, 19 nt, Homo sapiens
  misc_RNA (1)...(19): siRNA sense strand
acaaagcacucuacuaccu

SEQ ID NO: 2077686 - RNA, 19 nt, Homo sapiens
  misc_RNA (1)...(19): siRNA sense strand
ggaauauugccucaaaguc

SEQ ID NO: 2077687 - RNA, 19 nt, Homo sapiens
  misc_RNA (1)...(19): siRNA sense strand
caacgugauucgguauauc

SEQ ID NO: 2077688 - RNA, 19 nt, Homo sapiens
  misc_RNA (1)...(19): siRNA sense strand
augaacgagucaaggaaua

SEQ ID NO: 2077689 - RNA, 19 nt, Homo sapiens
  misc_RNA (1)...(19): siRNA sense strand
gguggaagccaucgagauc

SEQ ID NO: 2077690 - RNA, 19 nt, Homo sapiens
  misc_RNA (1)...(19): siRNA sense strand
gcugguaaacuaugaacga

SEQ ID NO: 2077691 - RNA, 19 nt, Homo sapiens
  misc_RNA (1)...(19): siRNA sense strand
gaagcaaggacccaacaac

SEQ ID NO: 2077692 - RNA, 19 nt, Homo sapiens
  misc_RNA (1)...(19): siRNA sense strand
ggacccaacaaccaacaga

SEQ ID NO: 2077693 - RNA, 19 nt, Homo sapiens
  misc_RNA (1)...(19): siRNA sense strand
cuacaaggacaagaaauuc

SEQ ID NO: 2077694 - RNA, 19 nt, Homo sapiens
  misc_RNA (1)...(19): siRNA sense strand
gacgagcgcacgaguucaa

SEQ ID NO: 2077695 - RNA, 19 nt, Homo sapiens
  misc_RNA (1)...(19): siRNA sense strand
cgagaucgacuguuacaac

SEQ ID NO: 2077696 - RNA, 19 nt, Homo sapiens
  misc_RNA (1)...(19): siRNA sense strand
gugcuacaaggacaagaaa

SEQ ID NO: 2077697 - RNA, 19 nt, Homo sapiens
  misc_RNA (1)...(19): siRNA sense strand
ccaaugacaggcaccaucu

SEQ ID NO: 2077698 - RNA, 19 nt, Homo sapiens
  misc_RNA (1)...(19): siRNA sense strand
cugagcugguaaacuauga

SEQ ID NO: 2077699 - RNA, 19 nt, Homo sapiens
  misc_RNA (1)...(19): siRNA sense strand
ugaacgagucaaggaauau

SEQ ID NO: 2077700 - RNA, 19 nt, Homo sapiens
  misc_RNA (1)...(19): siRNA sense strand
ugagaaagcuaaugguuua

SEQ ID NO: 2077701 - RNA, 19 nt, Homo sapiens
  misc_RNA (1)...(19): siRNA sense strand
gcaacaagauucugaagau

SEQ ID NO: 2077702 - RNA, 19 nt, Homo sapiens
  misc_RNA (1)...(19): siRNA sense strand
ggacggccguguucgagua

SEQ ID NO: 2077703 - RNA, 19 nt, Homo sapiens
  misc_RNA (1)...(19): siRNA sense strand
gaauugggcugugcagauu

SEQ ID NO: 2077704 - RNA, 19 nt, Homo sapiens
  misc_RNA (1)...(19): siRNA sense strand
caacaucauugcccuaaga

SEQ ID NO: 2077705 - RNA, 19 nt, Homo sapiens
  misc_RNA (1)...(19): siRNA sense strand
gagcggaacugaacacaca

SEQ ID NO: 2077706 - RNA, 19 nt, Homo sapiens
  misc_RNA (1)...(19): siRNA sense strand
gcgaugaaauugucgugua

SEQ ID NO: 2077707 - RNA, 19 nt, Homo sapiens
  misc_RNA (1)...(19): siRNA sense strand
caaacgagauccuaaccaa

SEQ ID NO: 2077708 - RNA, 19 nt, Homo sapiens
  misc_RNA (1)...(19): siRNA sense strand
gaaauugucguguaugaga

SEQ ID NO: 2077709 - RNA, 19 nt, Homo sapiens
  misc_RNA (1)...(19): siRNA sense strand
gggaugaacuacuuacaug

SEQ ID NO: 2077710 - RNA, 19 nt, Homo sapiens
  misc_RNA (1)...(19): siRNA sense strand
gaccaucuuucacgaauau

SEQ ID NO: 2077711 - RNA, 19 nt, Homo sapiens
  misc_RNA (1)...(19): siRNA sense strand
gaaggucuaucgugcuuuc

SEQ ID NO: 2077712 - RNA, 19 nt, Homo sapiens
  misc_RNA (1)...(19): siRNA sense strand
gcacagagacgcccagcaa

SEQ ID NO: 2077713 - RNA, 19 nt, Homo sapiens
  misc_RNA (1)...(19): siRNA sense strand
ccagagggaugaacuacuu

SEQ ID NO: 2077714 - RNA, 19 nt, Homo sapiens
  misc_RNA (1)...(19): siRNA sense strand
gggaugagguugcugugaa

SEQ ID NO: 2077715 - RNA, 19 nt, Homo sapiens
  misc_RNA (1)...(19): siRNA sense strand
agaggagucugguuucuuu

SEQ ID NO: 2077716 - RNA, 19 nt, Homo sapiens
  misc_RNA (1)...(19): siRNA sense strand
gaaagcuaaugguuuaagu

SEQ ID NO: 2077717 - RNA, 19 nt, Homo sapiens
  misc_RNA (1)...(19): siRNA sense strand
ggaugagguugcugugaaa

SEQ ID NO: 2077718 - RNA, 19 nt, Homo sapiens
  misc_RNA (1)...(19): siRNA sense strand
gcagugauguguggagcua

SEQ ID NO: 2077719 - RNA, 19 nt, Homo sapiens
  misc_RNA (1)...(19): siRNA sense strand
gagagucgccuacagcauu

SEQ ID NO: 2077720 - RNA, 19 nt, Homo sapiens
  misc_RNA (1)...(19): siRNA sense strand
gagcucaccuuggaagaga

SEQ ID NO: 2077721 - RNA, 19 nt, Homo sapiens
  misc_RNA (1)...(19): siRNA sense strand
gugaagggcccaaggagua

SEQ ID NO: 2077722 - RNA, 19 nt, Homo sapiens
  misc_RNA (1)...(19): siRNA sense strand
gaacgggagcucaacauca

SEQ ID NO: 2077723 - RNA, 19 nt, Homo sapiens
  misc_RNA (1)...(19): siRNA sense strand
caucagaaucuccacauuu

SEQ ID NO: 2077724 - RNA, 19 nt, Homo sapiens
  misc_RNA (1)...(19): siRNA sense strand
ggacaucagccagaccaua

SEQ ID NO: 2077725 - RNA, 19 nt, Homo sapiens
  misc_RNA (1)...(19): siRNA sense strand
gauccuaaccaaucucuga

SEQ ID NO: 2077726 - RNA, 19 nt, Homo sapiens
  misc_RNA (1)...(19): siRNA sense strand
caaacucgcccuuccuauu

SEQ ID NO: 2077727 - RNA, 19 nt, Homo sapiens
  misc_RNA (1)...(19): siRNA sense strand
gaccuuaaguccagcaaca

SEQ ID NO: 2077728 - RNA, 19 nt, Homo sapiens
  misc_RNA (1)...(19): siRNA sense strand
caacucagggccaaagaaa

SEQ ID NO: 2077729 - RNA, 19 nt, Homo sapiens
  misc_RNA (1)...(19): siRNA sense strand
ggagucugguuucuuugaa

SEQ ID NO: 2077730 - RNA, 19 nt, Homo sapiens
  misc_RNA (1)...(19): siRNA sense strand
gggaaggucuaucgugcuu

SEQ ID NO: 2077731 - RNA, 19 nt, Homo sapiens
  misc_RNA (1)...(19): siRNA sense strand
ccacaggccuaggguuuga

SEQ ID NO: 2077732 - RNA, 19 nt, Homo sapiens
  misc_RNA (1)...(19): siRNA sense strand
gagcuugccucgggagaug

SEQ ID NO: 2077733 - RNA, 19 nt, Homo sapiens
  misc_RNA (1)...(19): siRNA sense strand
cagacauccuggugaauug

SEQ ID NO: 2077734 - RNA, 19 nt, Homo sapiens
  misc_RNA (1)...(19): siRNA sense strand
caaccuggacuccugcuuu

SEQ ID NO: 2077735 - RNA, 19 nt, Homo sapiens
  misc_RNA (1)...(19): siRNA sense strand
cgaugaaauugucguguau

SEQ ID NO: 2077736 - RNA, 19 nt, Homo sapiens
  misc_RNA (1)...(19): siRNA sense strand
ggagcucagucgucccaaa

SEQ ID NO: 2077737 - RNA, 19 nt, Homo sapiens
  misc_RNA (1)...(19): siRNA sense strand
ggagauguuugaccaacuc

SEQ ID NO: 2077738 - RNA, 19 nt, Homo sapiens
  misc_RNA (1)...(19): siRNA sense strand
caacaagauucugaagauc

SEQ ID NO: 2077739 - RNA, 19 nt, Homo sapiens
  misc_RNA (1)...(19): siRNA sense strand
ugaacuacuuacaugauga

SEQ ID NO: 2077740 - RNA, 19 nt, Homo sapiens
  misc_RNA (1)...(19): siRNA sense strand
gcaccgaaccaccaagaug

SEQ ID NO: 2077741 - RNA, 19 nt, Homo sapiens
  misc_RNA (1)...(19): siRNA sense strand
gugagaaagcuaaugguuu

SEQ ID NO: 2077742 - RNA, 19 nt, Homo sapiens
  misc_RNA (1)...(19): siRNA sense strand
cgaccaucuuucacgaaua

SEQ ID NO: 2077743 - RNA, 19 nt, Homo sapiens
  misc_RNA (1)...(19): siRNA sense strand
caacuggaaacacgagauu

SEQ ID NO: 2077744 - RNA, 19 nt, Homo sapiens
  misc_RNA (1)...(19): siRNA sense strand
ggaggaccuuugaauagag

SEQ ID NO: 2077745 - RNA, 19 nt, Homo sapiens
  misc_RNA (1)...(19): siRNA sense strand
gcucagucgucccaaagga

SEQ ID NO: 2077746 - RNA, 19 nt, Homo sapiens
  misc_RNA (1)...(19): siRNA sense strand
ccauagaggagucugguuu

SEQ ID NO: 2077747 - RNA, 19 nt, Homo sapiens
  misc_RNA (1)...(19): siRNA sense strand
ccauucaguuguuagaaau

SEQ ID NO: 2077748 - RNA, 19 nt, Homo sapiens
  misc_RNA (1)...(19): siRNA sense strand
gcuggacccuuggugguuu

SEQ ID NO: 2077749 - RNA, 19 nt, Homo sapiens
  misc_RNA (1)...(19): siRNA sense strand
cagccucccuucugauuuc

SEQ ID NO: 2077750 - RNA, 19 nt, Homo sapiens
  misc_RNA (1)...(19): siRNA sense strand
gaccugagcaacaagauuc

SEQ ID NO: 2077751 - RNA, 19 nt, Homo sapiens
  misc_RNA (1)...(19): siRNA sense strand
uggaggaccuuugaauaga

SEQ ID NO: 2077752 - RNA, 19 nt, Homo sapiens
  misc_RNA (1)...(19): siRNA sense strand
ccugguagauggauauaag

SEQ ID NO: 2077753 - RNA, 19 nt, Homo sapiens
  misc_RNA (1)...(19): siRNA sense strand
gcaagggcaaguucaggaa

SEQ ID NO: 2077754 - RNA, 19 nt, Homo sapiens
  misc_RNA (1)...(19): siRNA sense strand
cccauucaguuguuagaaa

SEQ ID NO: 2077755 - RNA, 19 nt, Homo sapiens
  misc_RNA (1)...(19): siRNA sense strand
ggaugaacuacuuacauga

SEQ ID NO: 2077756 - RNA, 19 nt, Homo sapiens
  misc_RNA (1)...(19): siRNA sense strand
ucaccagccuuauggagau

SEQ ID NO: 2077757 - RNA, 19 nt, Homo sapiens
  misc_RNA (1)...(19): siRNA sense strand
ggagauugacauccuggaa

SEQ ID NO: 2077758 - RNA, 19 nt, Homo sapiens
  misc_RNA (1)...(19): siRNA sense strand
ucgaggcauugauggcuua

SEQ ID NO: 2077759 - RNA, 19 nt, Homo sapiens
  misc_RNA (1)...(19): siRNA sense strand
gaugaacuacuuacaugau

SEQ ID NO: 2077760 - RNA, 19 nt, Homo sapiens
  misc_RNA (1)...(19): siRNA sense strand
uagagaauguucgccaaga

SEQ ID NO: 2077761 - RNA, 19 nt, Homo sapiens
  misc_RNA (1)...(19): siRNA sense strand
cagggacgcuuggucagaa

SEQ ID NO: 2077762 - RNA, 19 nt, Homo sapiens
  misc_RNA (1)...(19): siRNA sense strand
gaaacgcaagggcaaguuc

SEQ ID NO: 2077763 - RNA, 19 nt, Homo sapiens
  misc_RNA (1)...(19): siRNA sense strand
aaacucgcccuuccuauuc

SEQ ID NO: 2077764 - RNA, 19 nt, Homo sapiens
  misc_RNA (1)...(19): siRNA sense strand
gaugaaggauccccucaga

SEQ ID NO: 2077765 - RNA, 19 nt, Homo sapiens
  misc_RNA (1)...(19): siRNA sense strand
ccuggucaauguccgagua

SEQ ID NO: 2077766 - RNA, 19 nt, Homo sapiens
  misc_RNA (1)...(19): siRNA sense strand
uugcggagcucaccuugga

SEQ ID NO: 2077767 - RNA, 19 nt, Homo sapiens
  misc_RNA (1)...(19): siRNA sense strand
cguggaggaccuuugaaua

SEQ ID NO: 2077768 - RNA, 19 nt, Homo sapiens
  misc_RNA (1)...(19): siRNA sense strand
cagcaggaguucuggucuu

SEQ ID NO: 2077769 - RNA, 19 nt, Homo sapiens
  misc_RNA (1)...(19): siRNA sense strand
ccaucagaaucuccacauu

SEQ ID NO: 2077770 - RNA, 19 nt, Homo sapiens
  misc_RNA (1)...(19): siRNA sense strand
caucauuccucgccuucga

SEQ ID NO: 2077771 - RNA, 19 nt, Homo sapiens
  misc_RNA (1)...(19): siRNA sense strand
gcuuagcagucgcuuaugg

SEQ ID NO: 2077772 - RNA, 19 nt, Homo sapiens
  misc_RNA (1)...(19): siRNA sense strand
gcagggacguaugcuugga

SEQ ID NO: 2077773 - RNA, 19 nt, Homo sapiens
  misc_RNA (1)...(19): siRNA sense strand
acauauugauccuccagaa

SEQ ID NO: 2077774 - RNA, 19 nt, Homo sapiens
  misc_RNA (1)...(19): siRNA sense strand
guggaggaccuuugaauag

SEQ ID NO: 2077775 - RNA, 19 nt, Homo sapiens
  misc_RNA (1)...(19): siRNA sense strand
gcucguggaggaccuuuga

SEQ ID NO: 2077776 - RNA, 19 nt, Homo sapiens
  misc_RNA (1)...(19): siRNA sense strand
gccagaccauagagaaugu

SEQ ID NO: 2077777 - RNA, 19 nt, Homo sapiens
  misc_RNA (1)...(19): siRNA sense strand
gcagaagaaccaggaggaa

SEQ ID NO: 2077778 - RNA, 19 nt, Homo sapiens
  misc_RNA (1)...(19): siRNA sense strand
gacaucagccagaccauag

SEQ ID NO: 2077779 - RNA, 19 nt, Homo sapiens
  misc_RNA (1)...(19): siRNA sense strand
gaggaccuuugaauagagu

SEQ ID NO: 2077780 - RNA, 19 nt, Homo sapiens
  misc_RNA (1)...(19): siRNA sense strand
agcaggaguucuggucuua

SEQ ID NO: 2077781 - RNA, 19 nt, Homo sapiens
  misc_RNA (1)...(19): siRNA sense strand
uugccaaacucauggaaga

SEQ ID NO: 2077782 - RNA, 19 nt, Homo sapiens
  misc_RNA (1)...(19): siRNA sense strand
caccgaaccaccaagauga

SEQ ID NO: 2077783 - RNA, 19 nt, Homo sapiens
  misc_RNA (1)...(19): siRNA sense strand
ccgaguagagcgcuucaaa

SEQ ID NO: 2077784 - RNA, 19 nt, Homo sapiens
  misc_RNA (1)...(19): siRNA sense strand
ugaagaggaugaggacagu

SEQ ID NO: 2077785 - RNA, 19 nt, Homo sapiens
  misc_RNA (1)...(19): siRNA sense strand
gaacaaacucgcccuuccu

SEQ ID NO: 2077786 - RNA, 19 nt, Homo sapiens
  misc_RNA (1)...(19): siRNA sense strand
augaaauugucguguauga

SEQ ID NO: 2077787 - RNA, 19 nt, Homo sapiens
  misc_RNA (1)...(19): siRNA sense strand
ggcaauuguucccaucauc

SEQ ID NO: 2077788 - RNA, 19 nt, Homo sapiens
  misc_RNA (1)...(19): siRNA sense strand
gacccuuggugguuugugu

SEQ ID NO: 2077789 - RNA, 19 nt, Homo sapiens
  misc_RNA (1)...(19): siRNA sense strand
gaguagagcgcuucaaacg

SEQ ID NO: 2077790 - RNA, 19 nt, Homo sapiens
  misc_RNA (1)...(19): siRNA sense strand
gaacuacuuacaugaugag

SEQ ID NO: 2077791 - RNA, 19 nt, Homo sapiens
  misc_RNA (1)...(19): siRNA sense strand
aaccuggacuccugcuuug

SEQ ID NO: 2077792 - RNA, 19 nt, Homo sapiens
  misc_RNA (1)...(19): siRNA sense strand
gagcaggaauguugaaaac

SEQ ID NO: 2077793 - RNA, 19 nt, Homo sapiens
  misc_RNA (1)...(19): siRNA sense strand
ccaggguucaccagccuua

SEQ ID NO: 2077794 - RNA, 19 nt, Homo sapiens
  misc_RNA (1)...(19): siRNA sense strand
cuacgugcccagaaccuuu

SEQ ID NO: 2077795 - RNA, 19 nt, Homo sapiens
  misc_RNA (1)...(19): siRNA sense strand
ggagaccugagcaacaaga

SEQ ID NO: 2077796 - RNA, 19 nt, Homo sapiens
  misc_RNA (1)...(19): siRNA sense strand
gagaaagcuaaugguuuaa

SEQ ID NO: 2077797 - RNA, 19 nt, Homo sapiens
  misc_RNA (1)...(19): siRNA sense strand
gugcagagcggaacugaac

SEQ ID NO: 2077798 - RNA, 19 nt, Homo sapiens
  misc_RNA (1)...(19): siRNA sense strand
caucgacauugaagaggau

SEQ ID NO: 2077799 - RNA, 19 nt, Homo sapiens
  misc_RNA (1)...(19): siRNA sense strand
aucagaaucuccacauuuc

SEQ ID NO: 2077800 - RNA, 19 nt, Homo sapiens
  misc_RNA (1)...(19): siRNA sense strand
gaaagaagcugaaagagaa

SEQ ID NO: 2077801 - RNA, 19 nt, Homo sapiens
  misc_RNA (1)...(19): siRNA sense strand
gaaaggagcucagaucgua

SEQ ID NO: 2077802 - RNA, 19 nt, Homo sapiens
  misc_RNA (1)...(19): siRNA sense strand
gaagagaaauggccaaaga

SEQ ID NO: 2077803 - RNA, 19 nt, Homo sapiens
  misc_RNA (1)...(19): siRNA sense strand
caaagaagcuaaacgacua

SEQ ID NO: 2077804 - RNA, 19 nt, Homo sapiens
  misc_RNA (1)...(19): siRNA sense strand
cgagaaagcuucagacaug

SEQ ID NO: 2077805 - RNA, 19 nt, Homo sapiens
  misc_RNA (1)...(19): siRNA sense strand
gaagaaagaagaagagaaa

SEQ ID NO: 2077806 - RNA, 19 nt, Homo sapiens
  misc_RNA (1)...(19): siRNA sense strand
gcacucagauuauuacaug

SEQ ID NO: 2077807 - RNA, 19 nt, Homo sapiens
  misc_RNA (1)...(19): siRNA sense strand
ugaagaagaugcauacgaa

SEQ ID NO: 2077808 - RNA, 19 nt, Homo sapiens
  misc_RNA (1)...(19): siRNA sense strand
cagaaacugucacuaauga

SEQ ID NO: 2077809 - RNA, 19 nt, Homo sapiens
  misc_RNA (1)...(19): siRNA sense strand
caagagcgccuuaagaauu

SEQ ID NO: 2077810 - RNA, 19 nt, Homo sapiens
  misc_RNA (1)...(19): siRNA sense strand
gacaggaaauugagaaaga

SEQ ID NO: 2077811 - RNA, 19 nt, Homo sapiens
  misc_RNA (1)...(19): siRNA sense strand
gagaagaacccauggaaga

SEQ ID NO: 2077812 - RNA, 19 nt, Homo sapiens
  misc_RNA (1)...(19): siRNA sense strand
ggaagcagaugaacgagau

SEQ ID NO: 2077813 - RNA, 19 nt, Homo sapiens
  misc_RNA (1)...(19): siRNA sense strand
gcaaaagccuugucugaaa

SEQ ID NO: 2077814 - RNA, 19 nt, Homo sapiens
  misc_RNA (1)...(19): siRNA sense strand
gagaugaccccaaauauua

SEQ ID NO: 2077815 - RNA, 19 nt, Homo sapiens
  misc_RNA (1)...(19): siRNA sense strand
agaagaagaugaagaagau

SEQ ID NO: 2077816 - RNA, 19 nt, Homo sapiens
  misc_RNA (1)...(19): siRNA sense strand
gcauuuccuuccuucuuua

SEQ ID NO: 2077817 - RNA, 19 nt, Homo sapiens
  misc_RNA (1)...(19): siRNA sense strand
gaagaagccuuggaugaag

SEQ ID NO: 2077818 - RNA, 19 nt, Homo sapiens
  misc_RNA (1)...(19): siRNA sense strand
ggaaagagaacgugaacga

SEQ ID NO: 2077819 - RNA, 19 nt, Homo sapiens
  misc_RNA (1)...(19): siRNA sense strand
ugaaagagaagaagaaaga

SEQ ID NO: 2077820 - RNA, 19 nt, Homo sapiens
  misc_RNA (1)...(19): siRNA sense strand
gaaaucagagaacgaaaga

SEQ ID NO: 2077821 - RNA, 19 nt, Homo sapiens
  misc_RNA (1)...(19): siRNA sense strand
auaagaaacuggaagaaga

SEQ ID NO: 2077822 - RNA, 19 nt, Homo sapiens
  misc_RNA (1)...(19): siRNA sense strand
ggaaauggaagcagaugaa

SEQ ID NO: 2077823 - RNA, 19 nt, Homo sapiens
  misc_RNA (1)...(19): siRNA sense strand
cagaaaagguugcgugaua

SEQ ID NO: 2077824 - RNA, 19 nt, Homo sapiens
  misc_RNA (1)...(19): siRNA sense strand
gaaacuggaagaagagaaa

SEQ ID NO: 2077825 - RNA, 19 nt, Homo sapiens
  misc_RNA (1)...(19): siRNA sense strand
gaaagaacggagagaaaga

SEQ ID NO: 2077826 - RNA, 19 nt, Homo sapiens
  misc_RNA (1)...(19): siRNA sense strand
ggaaagagagagagagaga

SEQ ID NO: 2077827 - RNA, 19 nt, Homo sapiens
  misc_RNA (1)...(19): siRNA sense strand
gagcucagaucguaauaag

SEQ ID NO: 2077828 - RNA, 19 nt, Homo sapiens
  misc_RNA (1)...(19): siRNA sense strand
gaacggagagaaagagaga

SEQ ID NO: 2077829 - RNA, 19 nt, Homo sapiens
  misc_RNA (1)...(19): siRNA sense strand
gagaaagaacggagagaaa

SEQ ID NO: 2077830 - RNA, 19 nt, Homo sapiens
  misc_RNA (1)...(19): siRNA sense strand
gagucucccugugguauua

SEQ ID NO: 2077831 - RNA, 19 nt, Homo sapiens
  misc_RNA (1)...(19): siRNA sense strand
gcaggcagccacaaauaaa

SEQ ID NO: 2077832 - RNA, 19 nt, Homo sapiens
  misc_RNA (1)...(19): siRNA sense strand
agacaacucuuagcuaaau

SEQ ID NO: 2077833 - RNA, 19 nt, Homo sapiens
  misc_RNA (1)...(19): siRNA sense strand
gaaagaagaagagaaaugg

SEQ ID NO: 2077834 - RNA, 19 nt, Homo sapiens
  misc_RNA (1)...(19): siRNA sense strand
gaagaugcauacgaacgaa

SEQ ID NO: 2077835 - RNA, 19 nt, Homo sapiens
  misc_RNA (1)...(19): siRNA sense strand
gcucagaucguaauaagga

SEQ ID NO: 2077836 - RNA, 19 nt, Homo sapiens
  misc_RNA (1)...(19): siRNA sense strand
gagaagaagaugaagaaga

SEQ ID NO: 2077837 - RNA, 19 nt, Homo sapiens
  misc_RNA (1)...(19): siRNA sense strand
uuacaugaccugcaaauug

SEQ ID NO: 2077838 - RNA, 19 nt, Homo sapiens
  misc_RNA (1)...(19): siRNA sense strand
ggaagaagagaaaggcaaa

SEQ ID NO: 2077839 - RNA, 19 nt, Homo sapiens
  misc_RNA (1)...(19): siRNA sense strand
ggccagaaacugucacuaa

SEQ ID NO: 2077840 - RNA, 19 nt, Homo sapiens
  misc_RNA (1)...(19): siRNA sense strand
gccagaaacugucacuaau

SEQ ID NO: 2077841 - RNA, 19 nt, Homo sapiens
  misc_RNA (1)...(19): siRNA sense strand
uaaaguugaugcaaagaca

SEQ ID NO: 2077842 - RNA, 19 nt, Homo sapiens
  misc_RNA (1)...(19): siRNA sense strand
gcaagagccagaaucagaa

SEQ ID NO: 2077843 - RNA, 19 nt, Homo sapiens
  misc_RNA (1)...(19): siRNA sense strand
cuauagaaauggaagaaga

SEQ ID NO: 2077844 - RNA, 19 nt, Homo sapiens
  misc_RNA (1)...(19): siRNA sense strand
ucacuaaggaggauauaaa

SEQ ID NO: 2077845 - RNA, 19 nt, Homo sapiens
  misc_RNA (1)...(19): siRNA sense strand
gaaagcuucuaaugggaau

SEQ ID NO: 2077846 - RNA, 19 nt, Homo sapiens
  misc_RNA (1)...(19): siRNA sense strand
ugagaaagaagcugaaaga

SEQ ID NO: 2077847 - RNA, 19 nt, Homo sapiens
  misc_RNA (1)...(19): siRNA sense strand
caaaggcacagcuggauga

SEQ ID NO: 2077848 - RNA, 19 nt, Homo sapiens
  misc_RNA (1)...(19): siRNA sense strand
ggaccgagaagaagaugaa

SEQ ID NO: 2077849 - RNA, 19 nt, Homo sapiens
  misc_RNA (1)...(19): siRNA sense strand
gaauggaaagcaaagaaga

SEQ ID NO: 2077850 - RNA, 19 nt, Homo sapiens
  misc_RNA (1)...(19): siRNA sense strand
gcgcaggcagccacaaaua

SEQ ID NO: 2077851 - RNA, 19 nt, Homo sapiens
  misc_RNA (1)...(19): siRNA sense strand
aggaggagcuugaggaaau

SEQ ID NO: 2077852 - RNA, 19 nt, Homo sapiens
  misc_RNA (1)...(19): siRNA sense strand
gaaggaggagcuugaggaa

SEQ ID NO: 2077853 - RNA, 19 nt, Homo sapiens
  misc_RNA (1)...(19): siRNA sense strand
aggcacagcuggaugaaug

SEQ ID NO: 2077854 - RNA, 19 nt, Homo sapiens
  misc_RNA (1)...(19): siRNA sense strand
caucagcucugcuccaucu

SEQ ID NO: 2077855 - RNA, 19 nt, Homo sapiens
  misc_RNA (1)...(19): siRNA sense strand
gagagaaggaggagcuuga

SEQ ID NO: 2077856 - RNA, 19 nt, Homo sapiens
  misc_RNA (1)...(19): siRNA sense strand
aagagcgccuuaagaauug

SEQ ID NO: 2077857 - RNA, 19 nt, Homo sapiens
  misc_RNA (1)...(19): siRNA sense strand
aagcagagaucgugaaagg

SEQ ID NO: 2077858 - RNA, 19 nt, Homo sapiens
  misc_RNA (1)...(19): siRNA sense strand
cgagagaucagcaaauuca

SEQ ID NO: 2077859 - RNA, 19 nt, Homo sapiens
  misc_RNA (1)...(19): siRNA sense strand
ugaagaagccuuggaugaa

SEQ ID NO: 2077860 - RNA, 19 nt, Homo sapiens
  misc_RNA (1)...(19): siRNA sense strand
agaaagaagcugaaagaga

SEQ ID NO: 2077861 - RNA, 19 nt, Homo sapiens
  misc_RNA (1)...(19): siRNA sense strand
gaaagacaggaaauugaga

SEQ ID NO: 2077862 - RNA, 19 nt, Homo sapiens
  misc_RNA (1)...(19): siRNA sense strand
aaagaaagacaggaaauug

SEQ ID NO: 2077863 - RNA, 19 nt, Homo sapiens
  misc_RNA (1)...(19): siRNA sense strand
uaaaggggcuauugaaguu

SEQ ID NO: 2077864 - RNA, 19 nt, Homo sapiens
  misc_RNA (1)...(19): siRNA sense strand
cuuauccacucaucacuaa

SEQ ID NO: 2077865 - RNA, 19 nt, Homo sapiens
  misc_RNA (1)...(19): siRNA sense strand
aaucagagaacgaaagaaa

SEQ ID NO: 2077866 - RNA, 19 nt, Homo sapiens
  misc_RNA (1)...(19): siRNA sense strand
agaaauggaagaagacaaa

SEQ ID NO: 2077867 - RNA, 19 nt, Homo sapiens
  misc_RNA (1)...(19): siRNA sense strand
gaaacaaagaggagagauc

SEQ ID NO: 2077868 - RNA, 19 nt, Homo sapiens
  misc_RNA (1)...(19): siRNA sense strand
gaagaagaaagaagaagag

SEQ ID NO: 2077869 - RNA, 19 nt, Homo sapiens
  misc_RNA (1)...(19): siRNA sense strand
aagagaacgugaacgagaa

SEQ ID NO: 2077870 - RNA, 19 nt, Homo sapiens
  misc_RNA (1)...(19): siRNA sense strand
gaacgaagaaaacuugaaa

SEQ ID NO: 2077871 - RNA, 19 nt, Homo sapiens
  misc_RNA (1)...(19): siRNA sense strand
cagaagaggaggaagaaga

SEQ ID NO: 2077872 - RNA, 19 nt, Homo sapiens
  misc_RNA (1)...(19): siRNA sense strand
gaaagaaaacccgggaaua

SEQ ID NO: 2077873 - RNA, 19 nt, Homo sapiens
  misc_RNA (1)...(19): siRNA sense strand
ggaagaagaagaaggaaaa

SEQ ID NO: 2077874 - RNA, 19 nt, Homo sapiens
  misc_RNA (1)...(19): siRNA sense strand
gaaauggccaaagaagcua

SEQ ID NO: 2077875 - RNA, 19 nt, Homo sapiens
  misc_RNA (1)...(19): siRNA sense strand
guacaaggagccagaaucu

SEQ ID NO: 2077876 - RNA, 19 nt, Homo sapiens
  misc_RNA (1)...(19): siRNA sense strand
gaagaggagccagagcaaa

SEQ ID NO: 2077877 - RNA, 19 nt, Homo sapiens
  misc_RNA (1)...(19): siRNA sense strand
gaaagagaagaagaaagaa

SEQ ID NO: 2077878 - RNA, 19 nt, Homo sapiens
  misc_RNA (1)...(19): siRNA sense strand
ggaaaucagagaacgaaag

SEQ ID NO: 2077879 - RNA, 19 nt, Homo sapiens
  misc_RNA (1)...(19): siRNA sense strand
gaaagaaaacuccgagaga

SEQ ID NO: 2077880 - RNA, 19 nt, Homo sapiens
  misc_RNA (1)...(19): siRNA sense strand
ggaacgggagcgagaaaga

SEQ ID NO: 2077881 - RNA, 19 nt, Homo sapiens
  misc_RNA (1)...(19): siRNA sense strand
cgcagucgaucaagagaaa

SEQ ID NO: 2077882 - RNA, 19 nt, Homo sapiens
  misc_RNA (1)...(19): siRNA sense strand
uacaugaccugcaaauugg

SEQ ID NO: 2077883 - RNA, 19 nt, Homo sapiens
  misc_RNA (1)...(19): siRNA sense strand
ucagagacacacauaagaa

SEQ ID NO: 2077884 - RNA, 19 nt, Homo sapiens
  misc_RNA (1)...(19): siRNA sense strand
cagacaugcuuauaagaca

SEQ ID NO: 2077885 - RNA, 19 nt, Homo sapiens
  misc_RNA (1)...(19): siRNA sense strand
cagagacacacauaagaaa

SEQ ID NO: 2077886 - RNA, 19 nt, Homo sapiens
  misc_RNA (1)...(19): siRNA sense strand
aaacaaagaggagagauca

SEQ ID NO: 2077887 - RNA, 19 nt, Homo sapiens
  misc_RNA (1)...(19): siRNA sense strand
agaagacuaugaugaugau

SEQ ID NO: 2077888 - RNA, 19 nt, Homo sapiens
  misc_RNA (1)...(19): siRNA sense strand
ggaagaggagccagagcaa

SEQ ID NO: 2077889 - RNA, 19 nt, Homo sapiens
  misc_RNA (1)...(19): siRNA sense strand
cuucagacaugcuuauaag

SEQ ID NO: 2077890 - RNA, 19 nt, Homo sapiens
  misc_RNA (1)...(19): siRNA sense strand
ggaacgagagcgggaaaga

SEQ ID NO: 2077891 - RNA, 19 nt, Homo sapiens
  misc_RNA (1)...(19): siRNA sense strand
aagaaagacaggaaauuga

SEQ ID NO: 2077892 - RNA, 19 nt, Homo sapiens
  misc_RNA (1)...(19): siRNA sense strand
ccaggaagaagaagaagga

SEQ ID NO: 2077893 - RNA, 19 nt, Homo sapiens
  misc_RNA (1)...(19): siRNA sense strand
ccagaaacugucacuaaug

SEQ ID NO: 2077894 - RNA, 19 nt, Homo sapiens
  misc_RNA (1)...(19): siRNA sense strand
augcagagcuccagaggau

SEQ ID NO: 2077895 - RNA, 19 nt, Homo sapiens
  misc_RNA (1)...(19): siRNA sense strand
gcagaugaacgagauagga

SEQ ID NO: 2077896 - RNA, 19 nt, Homo sapiens
  misc_RNA (1)...(19): siRNA sense strand
gaauugggaaaucagagaa

SEQ ID NO: 2077897 - RNA, 19 nt, Homo sapiens
  misc_RNA (1)...(19): siRNA sense strand
ccgagaagaagaugaagaa

SEQ ID NO: 2077898 - RNA, 19 nt, Homo sapiens
  misc_RNA (1)...(19): siRNA sense strand
gaagaggaggaagaagaaa

SEQ ID NO: 2077899 - RNA, 19 nt, Homo sapiens
  misc_RNA (1)...(19): siRNA sense strand
gagcaaaagccuugucuga

SEQ ID NO: 2077900 - RNA, 19 nt, Homo sapiens
  misc_RNA (1)...(19): siRNA sense strand
ugaauucuaugcucagaua

SEQ ID NO: 2077901 - RNA, 19 nt, Homo sapiens
  misc_RNA (1)...(19): siRNA sense strand
ggugaaagguccuaguauu

SEQ ID NO: 2077902 - RNA, 19 nt, Homo sapiens
  misc_RNA (1)...(19): siRNA sense strand
gcuacaagcucaugggaaa

SEQ ID NO: 2077903 - RNA, 19 nt, Homo sapiens
  misc_RNA (1)...(19): siRNA sense strand
ccgaagaucugaaugaugu

SEQ ID NO: 2077904 - RNA, 19 nt, Homo sapiens
  misc_RNA (1)...(19): siRNA sense strand
gaagaagccguggacuuua

SEQ ID NO: 2077905 - RNA, 19 nt, Homo sapiens
  misc_RNA (1)...(19): siRNA sense strand
caggugcccuucuuguuua

SEQ ID NO: 2077906 - RNA, 19 nt, Homo sapiens
  misc_RNA (1)...(19): siRNA sense strand
guauugcgcuucuuggauu

SEQ ID NO: 2077907 - RNA, 19 nt, Homo sapiens
  misc_RNA (1)...(19): siRNA sense strand
gcaggugcccuucuuguuu

SEQ ID NO: 2077908 - RNA, 19 nt, Homo sapiens
  misc_RNA (1)...(19): siRNA sense strand
ggcagcaaauucaaacuuu

SEQ ID NO: 2077909 - RNA, 19 nt, Homo sapiens
  misc_RNA (1)...(19): siRNA sense strand
ggaacacaaucaccaaagu

SEQ ID NO: 2077910 - RNA, 19 nt, Homo sapiens
  misc_RNA (1)...(19): siRNA sense strand
ugaagaagccguggacuuu

SEQ ID NO: 2077911 - RNA, 19 nt, Homo sapiens
  misc_RNA (1)...(19): siRNA sense strand
guauugacccaccuuauuu

SEQ ID NO: 2077912 - RNA, 19 nt, Homo sapiens
  misc_RNA (1)...(19): siRNA sense strand
gccaaaggcucacucaaag

SEQ ID NO: 2077913 - RNA, 19 nt, Homo sapiens
  misc_RNA (1)...(19): siRNA sense strand
gaaacuggucacuguauug

SEQ ID NO: 2077914 - RNA, 19 nt, Homo sapiens
  misc_RNA (1)...(19): siRNA sense strand
cucaauggcuucuuucuug

SEQ ID NO: 2077915 - RNA, 19 nt, Homo sapiens
  misc_RNA (1)...(19): siRNA sense strand
ccaaagucuuguuccauug

SEQ ID NO: 2077916 - RNA, 19 nt, Homo sapiens
  misc_RNA (1)...(19): siRNA sense strand
gcagcaaauucaaacuuuc

SEQ ID NO: 2077917 - RNA, 19 nt, Homo sapiens
  misc_RNA (1)...(19): siRNA sense strand
gaaagaaagaccccagaua

SEQ ID NO: 2077918 - RNA, 19 nt, Homo sapiens
  misc_RNA (1)...(19): siRNA sense strand
caaacuuucuuccauaaac

SEQ ID NO: 2077919 - RNA, 19 nt, Homo sapiens
  misc_RNA (1)...(19): siRNA sense strand
ccacuguacuuaucaaugc

SEQ ID NO: 2077920 - RNA, 19 nt, Homo sapiens
  misc_RNA (1)...(19): siRNA sense strand
gugaaagguccuaguauug

SEQ ID NO: 2077921 - RNA, 19 nt, Homo sapiens
  misc_RNA (1)...(19): siRNA sense strand
aagaagccguggacuuuau

SEQ ID NO: 2077922 - RNA, 19 nt, Homo sapiens
  misc_RNA (1)...(19): siRNA sense strand
cauaaacaucucaauggua

SEQ ID NO: 2077923 - RNA, 19 nt, Homo sapiens
  misc_RNA (1)...(19): siRNA sense strand
uuccuaaacuugucgauga

SEQ ID NO: 2077924 - RNA, 19 nt, Homo sapiens
  misc_RNA (1)...(19): siRNA sense strand
gaacacaaucaccaaaguc

SEQ ID NO: 2077925 - RNA, 19 nt, Homo sapiens
  misc_RNA (1)...(19): siRNA sense strand
agucaggauuucucacuuu

SEQ ID NO: 2077926 - RNA, 19 nt, Homo sapiens
  misc_RNA (1)...(19): siRNA sense strand
agaaacuggucacuguauu

SEQ ID NO: 2077927 - RNA, 19 nt, Homo sapiens
  misc_RNA (1)...(19): siRNA sense strand
gcuggaagagugaauucua

SEQ ID NO: 2077928 - RNA, 19 nt, Homo sapiens
  misc_RNA (1)...(19): siRNA sense strand
gcuaaaauccacaguauug

SEQ ID NO: 2077929 - RNA, 19 nt, Homo sapiens
  misc_RNA (1)...(19): siRNA sense strand
caacacaguagcuccucua

SEQ ID NO: 2077930 - RNA, 19 nt, Homo sapiens
  misc_RNA (1)...(19): siRNA sense strand
aaagaaagaccccagauaa

SEQ ID NO: 2077931 - RNA, 19 nt, Homo sapiens
  misc_RNA (1)...(19): siRNA sense strand
accaaagucuuguuccauu

SEQ ID NO: 2077932 - RNA, 19 nt, Homo sapiens
  misc_RNA (1)...(19): siRNA sense strand
ugaccugugucucucaaug

SEQ ID NO: 2077933 - RNA, 19 nt, Homo sapiens
  misc_RNA (1)...(19): siRNA sense strand
acaguccucucccuucuau

SEQ ID NO: 2077934 - RNA, 19 nt, Homo sapiens
  misc_RNA (1)...(19): siRNA sense strand
ggaggaacacaaucaccaa

SEQ ID NO: 2077935 - RNA, 19 nt, Homo sapiens
  misc_RNA (1)...(19): siRNA sense strand
gcaaauucaaacuuucuuc

SEQ ID NO: 2077936 - RNA, 19 nt, Homo sapiens
  misc_RNA (1)...(19): siRNA sense strand
gaggaacacaaucaccaaa

SEQ ID NO: 2077937 - RNA, 19 nt, Homo sapiens
  misc_RNA (1)...(19): siRNA sense strand
gugcccuucuuguuuauug

SEQ ID NO: 2077938 - RNA, 19 nt, Homo sapiens
  misc_RNA (1)...(19): siRNA sense strand
gaugaucaaagcuggaaga

SEQ ID NO: 2077939 - RNA, 19 nt, Homo sapiens
  misc_RNA (1)...(19): siRNA sense strand
uagcuccucuacauuacaa

SEQ ID NO: 2077940 - RNA, 19 nt, Homo sapiens
  misc_RNA (1)...(19): siRNA sense strand
gaaaggcuacaagcucaug

SEQ ID NO: 2077941 - RNA, 19 nt, Homo sapiens
  misc_RNA (1)...(19): siRNA sense strand
cuggaagagugaauucuau

SEQ ID NO: 2077942 - RNA, 19 nt, Homo sapiens
  misc_RNA (1)...(19): siRNA sense strand
ccucucccuucuaucauaa

SEQ ID NO: 2077943 - RNA, 19 nt, Homo sapiens
  misc_RNA (1)...(19): siRNA sense strand
cacaaucaccaaagucuug

SEQ ID NO: 2077944 - RNA, 19 nt, Homo sapiens
  misc_RNA (1)...(19): siRNA sense strand
acaaggauaugauuauucc

SEQ ID NO: 2077945 - RNA, 19 nt, Homo sapiens
  misc_RNA (1)...(19): siRNA sense strand
ccucuacauuacaaggaua

SEQ ID NO: 2077946 - RNA, 19 nt, Homo sapiens
  misc_RNA (1)...(19): siRNA sense strand
gauuauuccuaaacuuguc

SEQ ID NO: 2077947 - RNA, 19 nt, Homo sapiens
  misc_RNA (1)...(19): siRNA sense strand
uggcuuauuucagauuuga

SEQ ID NO: 2077948 - RNA, 19 nt, Homo sapiens
  misc_RNA (1)...(19): siRNA sense strand
uguauugacccaccuuauu

SEQ ID NO: 2077949 - RNA, 19 nt, Homo sapiens
  misc_RNA (1)...(19): siRNA sense strand
ugacaguccucucccuucu

SEQ ID NO: 2077950 - RNA, 19 nt, Homo sapiens
  misc_RNA (1)...(19): siRNA sense strand
ugcuugcccuggcuuauuu

SEQ ID NO: 2077951 - RNA, 19 nt, Homo sapiens
  misc_RNA (1)...(19): siRNA sense strand
ucacucaaaggcacaggua

SEQ ID NO: 2077952 - RNA, 19 nt, Homo sapiens
  misc_RNA (1)...(19): siRNA sense strand
aaacuggucacuguauuga

SEQ ID NO: 2077953 - RNA, 19 nt, Homo sapiens
  misc_RNA (1)...(19): siRNA sense strand
cagaaacuggucacuguau

SEQ ID NO: 2077954 - RNA, 19 nt, Homo sapiens
  misc_RNA (1)...(19): siRNA sense strand
ugcccuggcuuauuucaga

SEQ ID NO: 2077955 - RNA, 19 nt, Homo sapiens
  misc_RNA (1)...(19): siRNA sense strand
gugaggcaauauucuaugg

SEQ ID NO: 2077956 - RNA, 19 nt, Homo sapiens
  misc_RNA (1)...(19): siRNA sense strand
uggcauggaugaucaaagc

SEQ ID NO: 2077957 - RNA, 19 nt, Homo sapiens
  misc_RNA (1)...(19): siRNA sense strand
ucaccaaagucuuguucca

SEQ ID NO: 2077958 - RNA, 19 nt, Homo sapiens
  misc_RNA (1)...(19): siRNA sense strand
caucuggaguacuuugaag

SEQ ID NO: 2077959 - RNA, 19 nt, Homo sapiens
  misc_RNA (1)...(19): siRNA sense strand
aaggugaaagguccuagua

SEQ ID NO: 2077960 - RNA, 19 nt, Homo sapiens
  misc_RNA (1)...(19): siRNA sense strand
gaagagugaauucuaugcu

SEQ ID NO: 2077961 - RNA, 19 nt, Homo sapiens
  misc_RNA (1)...(19): siRNA sense strand
uaaacuugucgaugaucua

SEQ ID NO: 2077962 - RNA, 19 nt, Homo sapiens
  misc_RNA (1)...(19): siRNA sense strand
ggugaccugugucucucaa

SEQ ID NO: 2077963 - RNA, 19 nt, Homo sapiens
  misc_RNA (1)...(19): siRNA sense strand
ccuggcuuauuucagauuu

SEQ ID NO: 2077964 - RNA, 19 nt, Homo sapiens
  misc_RNA (1)...(19): siRNA sense strand
gaugaucuaggaaaaguaa

SEQ ID NO: 2077965 - RNA, 19 nt, Homo sapiens
  misc_RNA (1)...(19): siRNA sense strand
caggauuucucacuuuuau

SEQ ID NO: 2077966 - RNA, 19 nt, Homo sapiens
  misc_RNA (1)...(19): siRNA sense strand
ggaagagugaauucuaugc

SEQ ID NO: 2077967 - RNA, 19 nt, Homo sapiens
  misc_RNA (1)...(19): siRNA sense strand
aagcuaaaauccacaguau

SEQ ID NO: 2077968 - RNA, 19 nt, Homo sapiens
  misc_RNA (1)...(19): siRNA sense strand
cuaaacuugucgaugaucu

SEQ ID NO: 2077969 - RNA, 19 nt, Homo sapiens
  misc_RNA (1)...(19): siRNA sense strand
acuuaucaaugccugugua

SEQ ID NO: 2077970 - RNA, 19 nt, Homo sapiens
  misc_RNA (1)...(19): siRNA sense strand
caauggcuucuuucuugaa

SEQ ID NO: 2077971 - RNA, 19 nt, Homo sapiens
  misc_RNA (1)...(19): siRNA sense strand
uccucucccuucuaucaua

SEQ ID NO: 2077972 - RNA, 19 nt, Homo sapiens
  misc_RNA (1)...(19): siRNA sense strand
gacaguccucucccuucua

SEQ ID NO: 2077973 - RNA, 19 nt, Homo sapiens
  misc_RNA (1)...(19): siRNA sense strand
gggugaggcaauauucuau

SEQ ID NO: 2077974 - RNA, 19 nt, Homo sapiens
  misc_RNA (1)...(19): siRNA sense strand
gcgcaggugcccuucuugu

SEQ ID NO: 2077975 - RNA, 19 nt, Homo sapiens
  misc_RNA (1)...(19): siRNA sense strand
gaagaucugaaugauguac

SEQ ID NO: 2077976 - RNA, 19 nt, Homo sapiens
  misc_RNA (1)...(19): siRNA sense strand
cuacauuacaaggauauga

SEQ ID NO: 2077977 - RNA, 19 nt, Homo sapiens
  misc_RNA (1)...(19): siRNA sense strand
cagccacuguacuuaucaa

SEQ ID NO: 2077978 - RNA, 19 nt, Homo sapiens
  misc_RNA (1)...(19): siRNA sense strand
cagcaaauucaaacuuucu

SEQ ID NO: 2077979 - RNA, 19 nt, Homo sapiens
  misc_RNA (1)...(19): siRNA sense strand
gugcuugcccuggcuuauu

SEQ ID NO: 2077980 - RNA, 19 nt, Homo sapiens
  misc_RNA (1)...(19): siRNA sense strand
ugaaagguccuaguauugc

SEQ ID NO: 2077981 - RNA, 19 nt, Homo sapiens
  misc_RNA (1)...(19): siRNA sense strand
ggugaggcaauauucuaug

SEQ ID NO: 2077982 - RNA, 19 nt, Homo sapiens
  misc_RNA (1)...(19): siRNA sense strand
caaagucuuguuccauugg

SEQ ID NO: 2077983 - RNA, 19 nt, Homo sapiens
  misc_RNA (1)...(19): siRNA sense strand
uauggacacuuggagcaau

SEQ ID NO: 2077984 - RNA, 19 nt, Homo sapiens
  misc_RNA (1)...(19): siRNA sense strand
uauugcgcuucuuggauuu

SEQ ID NO: 2077985 - RNA, 19 nt, Homo sapiens
  misc_RNA (1)...(19): siRNA sense strand
gucucucaauggcuucuuu

SEQ ID NO: 2077986 - RNA, 19 nt, Homo sapiens
  misc_RNA (1)...(19): siRNA sense strand
caagcucaugggaaagaaa

SEQ ID NO: 2077987 - RNA, 19 nt, Homo sapiens
  misc_RNA (1)...(19): siRNA sense strand
ucacuuuuauggacacuug

SEQ ID NO: 2077988 - RNA, 19 nt, Homo sapiens
  misc_RNA (1)...(19): siRNA sense strand
acuugucgaugaucuagga

SEQ ID NO: 2077989 - RNA, 19 nt, Homo sapiens
  misc_RNA (1)...(19): siRNA sense strand
aaacggagcugccggaaga

SEQ ID NO: 2077990 - RNA, 19 nt, Homo sapiens
  misc_RNA (1)...(19): siRNA sense strand
cgacacaggacaaucuuua

SEQ ID NO: 2077991 - RNA, 19 nt, Homo sapiens
  misc_RNA (1)...(19): siRNA sense strand
ggacaaucuuuaccuccua

SEQ ID NO: 2077992 - RNA, 19 nt, Homo sapiens
  misc_RNA (1)...(19): siRNA sense strand
ggagaaggcauucaacgaa

SEQ ID NO: 2077993 - RNA, 19 nt, Homo sapiens
  misc_RNA (1)...(19): siRNA sense strand
ggaggaagcgggagaagug

SEQ ID NO: 2077994 - RNA, 19 nt, Homo sapiens
  misc_RNA (1)...(19): siRNA sense strand
guccaaaucugcuuuaaac

SEQ ID NO: 2077995 - RNA, 19 nt, Homo sapiens
  misc_RNA (1)...(19): siRNA sense strand
gcagugucauggcggagua

SEQ ID NO: 2077996 - RNA, 19 nt, Homo sapiens
  misc_RNA (1)...(19): siRNA sense strand
gggagaugcuggccaugaa

SEQ ID NO: 2077997 - RNA, 19 nt, Homo sapiens
  misc_RNA (1)...(19): siRNA sense strand
cagcucggauucugaagau

SEQ ID NO: 2077998 - RNA, 19 nt, Homo sapiens
  misc_RNA (1)...(19): siRNA sense strand
ccacuacccagacgucuau

SEQ ID NO: 2077999 - RNA, 19 nt, Homo sapiens
  misc_RNA (1)...(19): siRNA sense strand
ggagaugcuggccaugaaa

SEQ ID NO: 2078000 - RNA, 19 nt, Homo sapiens
  misc_RNA (1)...(19): siRNA sense strand
ccaaaucugcuuuaaacca

SEQ ID NO: 2078001 - RNA, 19 nt, Homo sapiens
  misc_RNA (1)...(19): siRNA sense strand
gcgcugagcaagcccaaau

SEQ ID NO: 2078002 - RNA, 19 nt, Homo sapiens
  misc_RNA (1)...(19): siRNA sense strand
ugcccaagcucgacaagau

SEQ ID NO: 2078003 - RNA, 19 nt, Homo sapiens
  misc_RNA (1)...(19): siRNA sense strand
ggaggaggccauggaugaa

SEQ ID NO: 2078004 - RNA, 19 nt, Homo sapiens
  misc_RNA (1)...(19): siRNA sense strand
gcucggauucugaagaugu

SEQ ID NO: 2078005 - RNA, 19 nt, Homo sapiens
  misc_RNA (1)...(19): siRNA sense strand
gagacaguggccaagagua

SEQ ID NO: 2078006 - RNA, 19 nt, Homo sapiens
  misc_RNA (1)...(19): siRNA sense strand
gcuuuaaaccagaccaaga

SEQ ID NO: 2078007 - RNA, 19 nt, Homo sapiens
  misc_RNA (1)...(19): siRNA sense strand
ggauacaggucugguucca

SEQ ID NO: 2078008 - RNA, 19 nt, Homo sapiens
  misc_RNA (1)...(19): siRNA sense strand
aggaggaacugagggagaa

SEQ ID NO: 2078009 - RNA, 19 nt, Homo sapiens
  misc_RNA (1)...(19): siRNA sense strand
caccgcagcuggaggacau

SEQ ID NO: 2078010 - RNA, 19 nt, Homo sapiens
  misc_RNA (1)...(19): siRNA sense strand
aggaggaggccauggauga

SEQ ID NO: 2078011 - RNA, 19 nt, Homo sapiens
  misc_RNA (1)...(19): siRNA sense strand
ggaggaggaggccauggau

SEQ ID NO: 2078012 - RNA, 19 nt, Homo sapiens
  misc_RNA (1)...(19): siRNA sense strand
gcacuggguucggcaucca

SEQ ID NO: 2078013 - RNA, 19 nt, Homo sapiens
  misc_RNA (1)...(19): siRNA sense strand
ccgaguccauccucaaguc

SEQ ID NO: 2078014 - RNA, 19 nt, Homo sapiens
  misc_RNA (1)...(19): siRNA sense strand
ggccagcucggauucugaa

SEQ ID NO: 2078015 - RNA, 19 nt, Homo sapiens
  misc_RNA (1)...(19): siRNA sense strand
aggaggccauggaugaaga

SEQ ID NO: 2078016 - RNA, 19 nt, Homo sapiens
  misc_RNA (1)...(19): siRNA sense strand
cuuuaaaccagaccaagaa

SEQ ID NO: 2078017 - RNA, 19 nt, Homo sapiens
  misc_RNA (1)...(19): siRNA sense strand
uaaaccagaccaagaaacg

SEQ ID NO: 2078018 - RNA, 19 nt, Homo sapiens
  misc_RNA (1)...(19): siRNA sense strand
cggaagaagcggcgacaca

SEQ ID NO: 2078019 - RNA, 19 nt, Homo sapiens
  misc_RNA (1)...(19): siRNA sense strand
aaacggagcugccggaaga

SEQ ID NO: 2078020 - RNA, 19 nt, Homo sapiens
  misc_RNA (1)...(19): siRNA sense strand
cgacacaggacaaucuuua

SEQ ID NO: 2078021 - RNA, 19 nt, Homo sapiens
  misc_RNA (1)...(19): siRNA sense strand
ggacaaucuuuaccuccua

SEQ ID NO: 2078022 - RNA, 19 nt, Homo sapiens
  misc_RNA (1)...(19): siRNA sense strand
ggagaaggcauucaacgaa

SEQ ID NO: 2078023 - RNA, 19 nt, Homo sapiens
  misc_RNA (1)...(19): siRNA sense strand
ggaggaagcgggagaagug

SEQ ID NO: 2078024 - RNA, 19 nt, Homo sapiens
  misc_RNA (1)...(19): siRNA sense strand
guccaaaucugcuuuaaac

SEQ ID NO: 2078025 - RNA, 19 nt, Homo sapiens
  misc_RNA (1)...(19): siRNA sense strand
gcagugucauggcggagua

SEQ ID NO: 2078026 - RNA, 19 nt, Homo sapiens
  misc_RNA (1)...(19): siRNA sense strand
gggagaugcuggccaugaa

SEQ ID NO: 2078027 - RNA, 19 nt, Homo sapiens
  misc_RNA (1)...(19): siRNA sense strand
cagcucggauucugaagau

SEQ ID NO: 2078028 - RNA, 19 nt, Homo sapiens
  misc_RNA (1)...(19): siRNA sense strand
ccacuacccagacgucuau

SEQ ID NO: 2078029 - RNA, 19 nt, Homo sapiens
  misc_RNA (1)...(19): siRNA sense strand
ggagaugcuggccaugaaa

SEQ ID NO: 2078030 - RNA, 19 nt, Homo sapiens
  misc_RNA (1)...(19): siRNA sense strand
ccaaaucugcuuuaaacca

SEQ ID NO: 2078031 - RNA, 19 nt, Homo sapiens
  misc_RNA (1)...(19): siRNA sense strand
gcgcugagcaagcccaaau

SEQ ID NO: 2078032 - RNA, 19 nt, Homo sapiens
  misc_RNA (1)...(19): siRNA sense strand
ugcccaagcucgacaagau

SEQ ID NO: 2078033 - RNA, 19 nt, Homo sapiens
  misc_RNA (1)...(19): siRNA sense strand
ggaggaggccauggaugaa

SEQ ID NO: 2078034 - RNA, 19 nt, Homo sapiens
  misc_RNA (1)...(19): siRNA sense strand
gcucggauucugaagaugu

SEQ ID NO: 2078035 - RNA, 19 nt, Homo sapiens
  misc_RNA (1)...(19): siRNA sense strand
gagacaguggccaagagua

SEQ ID NO: 2078036 - RNA, 19 nt, Homo sapiens
  misc_RNA (1)...(19): siRNA sense strand
gcuuuaaaccagaccaaga

SEQ ID NO: 2078037 - RNA, 19 nt, Homo sapiens
  misc_RNA (1)...(19): siRNA sense strand
ggauacaggucugguucca

SEQ ID NO: 2078038 - RNA, 19 nt, Homo sapiens
  misc_RNA (1)...(19): siRNA sense strand
aggaggaacugagggagaa

SEQ ID NO: 2078039 - RNA, 19 nt, Homo sapiens
  misc_RNA (1)...(19): siRNA sense strand
caccgcagcuggaggacau

SEQ ID NO: 2078040 - RNA, 19 nt, Homo sapiens
  misc_RNA (1)...(19): siRNA sense strand
aggaggaggccauggauga

SEQ ID NO: 2078041 - RNA, 19 nt, Homo sapiens
  misc_RNA (1)...(19): siRNA sense strand
gcacuggguucggcaucca

SEQ ID NO: 2078042 - RNA, 19 nt, Homo sapiens
  misc_RNA (1)...(19): siRNA sense strand
ggaggaggaggccauggau

SEQ ID NO: 2078043 - RNA, 19 nt, Homo sapiens
  misc_RNA (1)...(19): siRNA sense strand
ccgaguccauccucaaguc

SEQ ID NO: 2078044 - RNA, 19 nt, Homo sapiens
  misc_RNA (1)...(19): siRNA sense strand
ggccagcucggauucugaa

SEQ ID NO: 2078045 - RNA, 19 nt, Homo sapiens
  misc_RNA (1)...(19): siRNA sense strand
aggaggccauggaugaaga

SEQ ID NO: 2078046 - RNA, 19 nt, Homo sapiens
  misc_RNA (1)...(19): siRNA sense strand
cuuuaaaccagaccaagaa

SEQ ID NO: 2078047 - RNA, 19 nt, Homo sapiens
  misc_RNA (1)...(19): siRNA sense strand
uaaaccagaccaagaaacg

SEQ ID NO: 2078048 - RNA, 19 nt, Homo sapiens
  misc_RNA (1)...(19): siRNA sense strand
cggaagaagcggcgacaca

SEQ ID NO: 2078049 - RNA, 19 nt, Homo sapiens
  misc_RNA (1)...(19): siRNA sense strand
gaacugauccgaagcucau

SEQ ID NO: 2078050 - RNA, 19 nt, Homo sapiens
  misc_RNA (1)...(19): siRNA sense strand
gggcaagaguggugguuga

SEQ ID NO: 2078051 - RNA, 19 nt, Homo sapiens
  misc_RNA (1)...(19): siRNA sense strand
gaagcucauuucaaguguu

SEQ ID NO: 2078052 - RNA, 19 nt, Homo sapiens
  misc_RNA (1)...(19): siRNA sense strand
ggucaucuuucucuaucaa

SEQ ID NO: 2078053 - RNA, 19 nt, Homo sapiens
  misc_RNA (1)...(19): siRNA sense strand
uagcuuggccuucgugaaa

SEQ ID NO: 2078054 - RNA, 19 nt, Homo sapiens
  misc_RNA (1)...(19): siRNA sense strand
ggacuucagccaagaacug

SEQ ID NO: 2078055 - RNA, 19 nt, Homo sapiens
  misc_RNA (1)...(19): siRNA sense strand
cggauuccaauacaaauuu

SEQ ID NO: 2078056 - RNA, 19 nt, Homo sapiens
  misc_RNA (1)...(19): siRNA sense strand
gauccgaagcucauuucaa

SEQ ID NO: 2078057 - RNA, 19 nt, Homo sapiens
  misc_RNA (1)...(19): siRNA sense strand
aagcucauuucaaguguug

SEQ ID NO: 2078058 - RNA, 19 nt, Homo sapiens
  misc_RNA (1)...(19): siRNA sense strand
gcuccggauuccaauacaa

SEQ ID NO: 2078059 - RNA, 19 nt, Homo sapiens
  misc_RNA (1)...(19): siRNA sense strand
cgaagcucauuucaagugu

SEQ ID NO: 2078060 - RNA, 19 nt, Homo sapiens
  misc_RNA (1)...(19): siRNA sense strand
caccgaagggucagaauuc

SEQ ID NO: 2078061 - RNA, 19 nt, Homo sapiens
  misc_RNA (1)...(19): siRNA sense strand
cgacgacaggguauuugaa

SEQ ID NO: 2078062 - RNA, 19 nt, Homo sapiens
  misc_RNA (1)...(19): siRNA sense strand
ccgaagcucauuucaagug

SEQ ID NO: 2078063 - RNA, 19 nt, Homo sapiens
  misc_RNA (1)...(19): siRNA sense strand
ucaccgaagggucagaauu

SEQ ID NO: 2078064 - RNA, 19 nt, Homo sapiens
  misc_RNA (1)...(19): siRNA sense strand
auccgaagcucauuucaag

SEQ ID NO: 2078065 - RNA, 19 nt, Homo sapiens
  misc_RNA (1)...(19): siRNA sense strand
gcuccugugggucaucuuu

SEQ ID NO: 2078066 - RNA, 19 nt, Homo sapiens
  misc_RNA (1)...(19): siRNA sense strand
gaugcuccggauuccaaua

SEQ ID NO: 2078067 - RNA, 19 nt, Homo sapiens
  misc_RNA (1)...(19): siRNA sense strand
ugggucaucuuucucuauc

SEQ ID NO: 2078068 - RNA, 19 nt, Homo sapiens
  misc_RNA (1)...(19): siRNA sense strand
gaacugauccgaagcucau

SEQ ID NO: 2078069 - RNA, 19 nt, Homo sapiens
  misc_RNA (1)...(19): siRNA sense strand
gggcaagaguggugguuga

SEQ ID NO: 2078070 - RNA, 19 nt, Homo sapiens
  misc_RNA (1)...(19): siRNA sense strand
gaagcucauuucaaguguu

SEQ ID NO: 2078071 - RNA, 19 nt, Homo sapiens
  misc_RNA (1)...(19): siRNA sense strand
ggucaucuuucucuaucaa

SEQ ID NO: 2078072 - RNA, 19 nt, Homo sapiens
  misc_RNA (1)...(19): siRNA sense strand
uagcuuggccuucgugaaa

SEQ ID NO: 2078073 - RNA, 19 nt, Homo sapiens
  misc_RNA (1)...(19): siRNA sense strand
ggacuucagccaagaacug

SEQ ID NO: 2078074 - RNA, 19 nt, Homo sapiens
  misc_RNA (1)...(19): siRNA sense strand
cggauuccaauacaaauuu

SEQ ID NO: 2078075 - RNA, 19 nt, Homo sapiens
  misc_RNA (1)...(19): siRNA sense strand
gauccgaagcucauuucaa

SEQ ID NO: 2078076 - RNA, 19 nt, Homo sapiens
  misc_RNA (1)...(19): siRNA sense strand
aagcucauuucaaguguug

SEQ ID NO: 2078077 - RNA, 19 nt, Homo sapiens
  misc_RNA (1)...(19): siRNA sense strand
gcuccggauuccaauacaa

SEQ ID NO: 2078078 - RNA, 19 nt, Homo sapiens
  misc_RNA (1)...(19): siRNA sense strand
cgaagcucauuucaagugu

SEQ ID NO: 2078079 - RNA, 19 nt, Homo sapiens
  misc_RNA (1)...(19): siRNA sense strand
caccgaagggucagaauuc

SEQ ID NO: 2078080 - RNA, 19 nt, Homo sapiens
  misc_RNA (1)...(19): siRNA sense strand
cgacgacaggguauuugaa

SEQ ID NO: 2078081 - RNA, 19 nt, Homo sapiens
  misc_RNA (1)...(19): siRNA sense strand
ccgaagcucauuucaagug

SEQ ID NO: 2078082 - RNA, 19 nt, Homo sapiens
  misc_RNA (1)...(19): siRNA sense strand
ucaccgaagggucagaauu

SEQ ID NO: 2078083 - RNA, 19 nt, Homo sapiens
  misc_RNA (1)...(19): siRNA sense strand
auccgaagcucauuucaag

SEQ ID NO: 2078084 - RNA, 19 nt, Homo sapiens
  misc_RNA (1)...(19): siRNA sense strand
gcuccugugggucaucuuu

SEQ ID NO: 2078085 - RNA, 19 nt, Homo sapiens
  misc_RNA (1)...(19): siRNA sense strand
gaugcuccggauuccaaua

SEQ ID NO: 2078086 - RNA, 19 nt, Homo sapiens
  misc_RNA (1)...(19): siRNA sense strand
ugggucaucuuucucuauc

SEQ ID NO: 2078087 - RNA, 19 nt, Homo sapiens
  misc_RNA (1)...(19): siRNA sense strand
cgagauauauccacuaaua

SEQ ID NO: 2078088 - RNA, 19 nt, Homo sapiens
  misc_RNA (1)...(19): siRNA sense strand
gaaaguggguuugagauaa

SEQ ID NO: 2078089 - RNA, 19 nt, Homo sapiens
  misc_RNA (1)...(19): siRNA sense strand
caagaagacuuucgggaua

SEQ ID NO: 2078090 - RNA, 19 nt, Homo sapiens
  misc_RNA (1)...(19): siRNA sense strand
gcaaucagcugguccauca

SEQ ID NO: 2078091 - RNA, 19 nt, Homo sapiens
  misc_RNA (1)...(19): siRNA sense strand
gaacaagaaucacaguuuc

SEQ ID NO: 2078092 - RNA, 19 nt, Homo sapiens
  misc_RNA (1)...(19): siRNA sense strand
ucacagagcucgcaaguuc

SEQ ID NO: 2078093 - RNA, 19 nt, Homo sapiens
  misc_RNA (1)...(19): siRNA sense strand
uaaauaagauggcugauca

SEQ ID NO: 2078094 - RNA, 19 nt, Homo sapiens
  misc_RNA (1)...(19): siRNA sense strand
agaagaagaugccagguua

SEQ ID NO: 2078095 - RNA, 19 nt, Homo sapiens
  misc_RNA (1)...(19): siRNA sense strand
caaagaauguggacgauau

SEQ ID NO: 2078096 - RNA, 19 nt, Homo sapiens
  misc_RNA (1)...(19): siRNA sense strand
gaagaagccugaaucaaag

SEQ ID NO: 2078097 - RNA, 19 nt, Homo sapiens
  misc_RNA (1)...(19): siRNA sense strand
gaacgugacuaucaagaug

SEQ ID NO: 2078098 - RNA, 19 nt, Homo sapiens
  misc_RNA (1)...(19): siRNA sense strand
gagcagaccugagagaauu

SEQ ID NO: 2078099 - RNA, 19 nt, Homo sapiens
  misc_RNA (1)...(19): siRNA sense strand
gcaagaugcugcuauugaa

SEQ ID NO: 2078100 - RNA, 19 nt, Homo sapiens
  misc_RNA (1)...(19): siRNA sense strand
gggagaagaucacagauga

SEQ ID NO: 2078101 - RNA, 19 nt, Homo sapiens
  misc_RNA (1)...(19): siRNA sense strand
ggagauacauggcgggaaa

SEQ ID NO: 2078102 - RNA, 19 nt, Homo sapiens
  misc_RNA (1)...(19): siRNA sense strand
ggaagaaagcuuaaagaaa

SEQ ID NO: 2078103 - RNA, 19 nt, Homo sapiens
  misc_RNA (1)...(19): siRNA sense strand
aaagaaagaugcagaggaa

SEQ ID NO: 2078104 - RNA, 19 nt, Homo sapiens
  misc_RNA (1)...(19): siRNA sense strand
gggcagaccuggaagagaa

SEQ ID NO: 2078105 - RNA, 19 nt, Homo sapiens
  misc_RNA (1)...(19): siRNA sense strand
ggauaaaggucuaguaaac

SEQ ID NO: 2078106 - RNA, 19 nt, Homo sapiens
  misc_RNA (1)...(19): siRNA sense strand
gcaugaagaguuuccauua

SEQ ID NO: 2078107 - RNA, 19 nt, Homo sapiens
  misc_RNA (1)...(19): siRNA sense strand
ggagaaagucaauucauuu

SEQ ID NO: 2078108 - RNA, 19 nt, Homo sapiens
  misc_RNA (1)...(19): siRNA sense strand
guagcaacaucaucauuaa

SEQ ID NO: 2078109 - RNA, 19 nt, Homo sapiens
  misc_RNA (1)...(19): siRNA sense strand
gaugauagauggagagaag

SEQ ID NO: 2078110 - RNA, 19 nt, Homo sapiens
  misc_RNA (1)...(19): siRNA sense strand
ccagaucccucuacgauga

SEQ ID NO: 2078111 - RNA, 19 nt, Homo sapiens
  misc_RNA (1)...(19): siRNA sense strand
gaucgagauuuccgugaua

SEQ ID NO: 2078112 - RNA, 19 nt, Homo sapiens
  misc_RNA (1)...(19): siRNA sense strand
gauagaaguuuggauaaug

SEQ ID NO: 2078113 - RNA, 19 nt, Homo sapiens
  misc_RNA (1)...(19): siRNA sense strand
acagauaccuuauggagaa

SEQ ID NO: 2078114 - RNA, 19 nt, Homo sapiens
  misc_RNA (1)...(19): siRNA sense strand
gaagaaggaugcagauagg

SEQ ID NO: 2078115 - RNA, 19 nt, Homo sapiens
  misc_RNA (1)...(19): siRNA sense strand
gaaggaccauccauguuug

SEQ ID NO: 2078116 - RNA, 19 nt, Homo sapiens
  misc_RNA (1)...(19): siRNA sense strand
cagaacaagugaauucaaa

SEQ ID NO: 2078117 - RNA, 19 nt, Homo sapiens
  misc_RNA (1)...(19): siRNA sense strand
ggauacaaaugaugaacaa

SEQ ID NO: 2078118 - RNA, 19 nt, Homo sapiens
  misc_RNA (1)...(19): siRNA sense strand
caagaccuauggauaugua

SEQ ID NO: 2078119 - RNA, 19 nt, Homo sapiens
  misc_RNA (1)...(19): siRNA sense strand
gaacagcaguagcaacauc

SEQ ID NO: 2078120 - RNA, 19 nt, Homo sapiens
  misc_RNA (1)...(19): siRNA sense strand
gaucggauuucaagaccua

SEQ ID NO: 2078121 - RNA, 19 nt, Homo sapiens
  misc_RNA (1)...(19): siRNA sense strand
gaaagacacauguugcaaa

SEQ ID NO: 2078122 - RNA, 19 nt, Homo sapiens
  misc_RNA (1)...(19): siRNA sense strand
aagaucagcuucaggagua

SEQ ID NO: 2078123 - RNA, 19 nt, Homo sapiens
  misc_RNA (1)...(19): siRNA sense strand
caagagaaauauucaugga

SEQ ID NO: 2078124 - RNA, 19 nt, Homo sapiens
  misc_RNA (1)...(19): siRNA sense strand
agaagaagccugaaucaaa

SEQ ID NO: 2078125 - RNA, 19 nt, Homo sapiens
  misc_RNA (1)...(19): siRNA sense strand
guaaccagcagaagaauuu

SEQ ID NO: 2078126 - RNA, 19 nt, Homo sapiens
  misc_RNA (1)...(19): siRNA sense strand
gcagaagcacacucaguua

SEQ ID NO: 2078127 - RNA, 19 nt, Homo sapiens
  misc_RNA (1)...(19): siRNA sense strand
aaagagaucgugagccuua

SEQ ID NO: 2078128 - RNA, 19 nt, Homo sapiens
  misc_RNA (1)...(19): siRNA sense strand
cgacaaagcccaagcuguu

SEQ ID NO: 2078129 - RNA, 19 nt, Homo sapiens
  misc_RNA (1)...(19): siRNA sense strand
gaugauggguagaagagaa

SEQ ID NO: 2078130 - RNA, 19 nt, Homo sapiens
  misc_RNA (1)...(19): siRNA sense strand
gaagaucacagaugaaagu

SEQ ID NO: 2078131 - RNA, 19 nt, Homo sapiens
  misc_RNA (1)...(19): siRNA sense strand
gagauaaggagguagaauu

SEQ ID NO: 2078132 - RNA, 19 nt, Homo sapiens
  misc_RNA (1)...(19): siRNA sense strand
ugauagagcucagucauau

SEQ ID NO: 2078133 - RNA, 19 nt, Homo sapiens
  misc_RNA (1)...(19): siRNA sense strand
gaaagccacucagagcuau

SEQ ID NO: 2078134 - RNA, 19 nt, Homo sapiens
  misc_RNA (1)...(19): siRNA sense strand
ggacacaucugaggcaaag

SEQ ID NO: 2078135 - RNA, 19 nt, Homo sapiens
  misc_RNA (1)...(19): siRNA sense strand
ccaccagguucaauuguaa

SEQ ID NO: 2078136 - RNA, 19 nt, Homo sapiens
  misc_RNA (1)...(19): siRNA sense strand
uuugaaagcugcacaagaa

SEQ ID NO: 2078137 - RNA, 19 nt, Homo sapiens
  misc_RNA (1)...(19): siRNA sense strand
gcgagggcaugaagaguuu

SEQ ID NO: 2078138 - RNA, 19 nt, Homo sapiens
  misc_RNA (1)...(19): siRNA sense strand
ggcaacagcucaucuuaca

SEQ ID NO: 2078139 - RNA, 19 nt, Homo sapiens
  misc_RNA (1)...(19): siRNA sense strand
ccagcagaauggaggauua

SEQ ID NO: 2078140 - RNA, 19 nt, Homo sapiens
  misc_RNA (1)...(19): siRNA sense strand
aggcaaagcuagacaaguu

SEQ ID NO: 2078141 - RNA, 19 nt, Homo sapiens
  misc_RNA (1)...(19): siRNA sense strand
gucagaaacugcagcaauu

SEQ ID NO: 2078142 - RNA, 19 nt, Homo sapiens
  misc_RNA (1)...(19): siRNA sense strand
ugauagagguccauucaga

SEQ ID NO: 2078143 - RNA, 19 nt, Homo sapiens
  misc_RNA (1)...(19): siRNA sense strand
ggagaccacuggaugaaca

SEQ ID NO: 2078144 - RNA, 19 nt, Homo sapiens
  misc_RNA (1)...(19): siRNA sense strand
gagaagaucacagaugaaa

SEQ ID NO: 2078145 - RNA, 19 nt, Homo sapiens
  misc_RNA (1)...(19): siRNA sense strand
ucacaucauuccucagaaa

SEQ ID NO: 2078146 - RNA, 19 nt, Homo sapiens
  misc_RNA (1)...(19): siRNA sense strand
gcaagucugcucugccaua

SEQ ID NO: 2078147 - RNA, 19 nt, Homo sapiens
  misc_RNA (1)...(19): siRNA sense strand
ggaagaagagggucagaug

SEQ ID NO: 2078148 - RNA, 19 nt, Homo sapiens
  misc_RNA (1)...(19): siRNA sense strand
ccaagggauuugagguaua

SEQ ID NO: 2078149 - RNA, 19 nt, Homo sapiens
  misc_RNA (1)...(19): siRNA sense strand
gccgagauauauccacuaa

SEQ ID NO: 2078150 - RNA, 19 nt, Homo sapiens
  misc_RNA (1)...(19): siRNA sense strand
ggauauguaugauagaagu

SEQ ID NO: 2078151 - RNA, 19 nt, Homo sapiens
  misc_RNA (1)...(19): siRNA sense strand
gaagauagucgagagaaga

SEQ ID NO: 2078152 - RNA, 19 nt, Homo sapiens
  misc_RNA (1)...(19): siRNA sense strand
ggaccagaauguucaaagu

SEQ ID NO: 2078153 - RNA, 19 nt, Homo sapiens
  misc_RNA (1)...(19): siRNA sense strand
ccaagaggcccaagauuug

SEQ ID NO: 2078154 - RNA, 19 nt, Homo sapiens
  misc_RNA (1)...(19): siRNA sense strand
gaacaugaagaaccaguau

SEQ ID NO: 2078155 - RNA, 19 nt, Homo sapiens
  misc_RNA (1)...(19): siRNA sense strand
gaccauuccucauccagaa

SEQ ID NO: 2078156 - RNA, 19 nt, Homo sapiens
  misc_RNA (1)...(19): siRNA sense strand
gaauuuaagucagaaacug

SEQ ID NO: 2078157 - RNA, 19 nt, Homo sapiens
  misc_RNA (1)...(19): siRNA sense strand
gagagauacuggagagaau

SEQ ID NO: 2078158 - RNA, 19 nt, Homo sapiens
  misc_RNA (1)...(19): siRNA sense strand
caacagcucaucuuacaga

SEQ ID NO: 2078159 - RNA, 19 nt, Homo sapiens
  misc_RNA (1)...(19): siRNA sense strand
gagcgagaguuucagcuau

SEQ ID NO: 2078160 - RNA, 19 nt, Homo sapiens
  misc_RNA (1)...(19): siRNA sense strand
aaaguggguuugagauaaa

SEQ ID NO: 2078161 - RNA, 19 nt, Homo sapiens
  misc_RNA (1)...(19): siRNA sense strand
gagaaauauucauggaaga

SEQ ID NO: 2078162 - RNA, 19 nt, Homo sapiens
  misc_RNA (1)...(19): siRNA sense strand
caagggauuugagguauau

SEQ ID NO: 2078163 - RNA, 19 nt, Homo sapiens
  misc_RNA (1)...(19): siRNA sense strand
ugaaggaccauccauguuu

SEQ ID NO: 2078164 - RNA, 19 nt, Homo sapiens
  misc_RNA (1)...(19): siRNA sense strand
ggagaaagaauaacucuac

SEQ ID NO: 2078165 - RNA, 19 nt, Homo sapiens
  misc_RNA (1)...(19): siRNA sense strand
gccacaaacuucagcugua

SEQ ID NO: 2078166 - RNA, 19 nt, Homo sapiens
  misc_RNA (1)...(19): siRNA sense strand
ggacugggaagaucagauu

SEQ ID NO: 2078167 - RNA, 19 nt, Homo sapiens
  misc_RNA (1)...(19): siRNA sense strand
ucgaagauuugaggauuua

SEQ ID NO: 2078168 - RNA, 19 nt, Homo sapiens
  misc_RNA (1)...(19): siRNA sense strand
gaacaacuccauuccuauc

SEQ ID NO: 2078169 - RNA, 19 nt, Homo sapiens
  misc_RNA (1)...(19): siRNA sense strand
caugaugcgucuagauauu

SEQ ID NO: 2078170 - RNA, 19 nt, Homo sapiens
  misc_RNA (1)...(19): siRNA sense strand
gaccagaauguucaaagua

SEQ ID NO: 2078171 - RNA, 19 nt, Homo sapiens
  misc_RNA (1)...(19): siRNA sense strand
gcaaauaucgaagaacaga

SEQ ID NO: 2078172 - RNA, 19 nt, Homo sapiens
  misc_RNA (1)...(19): siRNA sense strand
gcagauaaccagacuugug

SEQ ID NO: 2078173 - RNA, 19 nt, Homo sapiens
  misc_RNA (1)...(19): siRNA sense strand
ggacuacaauagggaaaug

SEQ ID NO: 2078174 - RNA, 19 nt, Homo sapiens
  misc_RNA (1)...(19): siRNA sense strand
gcaagagccuuuggagagu

SEQ ID NO: 2078175 - RNA, 19 nt, Homo sapiens
  misc_RNA (1)...(19): siRNA sense strand
guauuagaaucuugcugua

SEQ ID NO: 2078176 - RNA, 19 nt, Homo sapiens
  misc_RNA (1)...(19): siRNA sense strand
gaaggaugcagauaggaaa

SEQ ID NO: 2078177 - RNA, 19 nt, Homo sapiens
  misc_RNA (1)...(19): siRNA sense strand
gaggagaacgaaggacuua

SEQ ID NO: 2078178 - RNA, 19 nt, Homo sapiens
  misc_RNA (1)...(19): siRNA sense strand
ggaaagagaacgguuguca

SEQ ID NO: 2078179 - RNA, 19 nt, Homo sapiens
  misc_RNA (1)...(19): siRNA sense strand
guaguaaccagcagaagaa

SEQ ID NO: 2078180 - RNA, 19 nt, Homo sapiens
  misc_RNA (1)...(19): siRNA sense strand
ucagaugccuccaccucua

SEQ ID NO: 2078181 - RNA, 19 nt, Homo sapiens
  misc_RNA (1)...(19): siRNA sense strand
gaagguaauggaauaugaa

SEQ ID NO: 2078182 - RNA, 19 nt, Homo sapiens
  misc_RNA (1)...(19): siRNA sense strand
agaagguaauggaauauga

SEQ ID NO: 2078183 - RNA, 19 nt, Homo sapiens
  misc_RNA (1)...(19): siRNA sense strand
ucagucauaucgagacaaa

SEQ ID NO: 2078184 - RNA, 19 nt, Homo sapiens
  misc_RNA (1)...(19): siRNA sense strand
gaagaugaacagaggagaa

SEQ ID NO: 2078185 - RNA, 19 nt, Homo sapiens
  misc_RNA (1)...(19): siRNA sense strand
agguagagauggaagauuu

SEQ ID NO: 2078186 - RNA, 19 nt, Homo sapiens
  misc_RNA (1)...(19): siRNA sense strand
gcucucuucuuguguuauu

SEQ ID NO: 2078187 - RNA, 19 nt, Homo sapiens
  misc_RNA (1)...(19): siRNA sense strand
caucauggcugcucacuua

SEQ ID NO: 2078188 - RNA, 19 nt, Homo sapiens
  misc_RNA (1)...(19): siRNA sense strand
gaaccggaguugaaucuga

SEQ ID NO: 2078189 - RNA, 19 nt, Homo sapiens
  misc_RNA (1)...(19): siRNA sense strand
gaaagaaccaggccauaga

SEQ ID NO: 2078190 - RNA, 19 nt, Homo sapiens
  misc_RNA (1)...(19): siRNA sense strand
gaacucaucauuaagcauu

SEQ ID NO: 2078191 - RNA, 19 nt, Homo sapiens
  misc_RNA (1)...(19): siRNA sense strand
guuauaauguguacucuga

SEQ ID NO: 2078192 - RNA, 19 nt, Homo sapiens
  misc_RNA (1)...(19): siRNA sense strand
aaaggaacauugacaguga

SEQ ID NO: 2078193 - RNA, 19 nt, Homo sapiens
  misc_RNA (1)...(19): siRNA sense strand
ggacacuaaugaucaccua

SEQ ID NO: 2078194 - RNA, 19 nt, Homo sapiens
  misc_RNA (1)...(19): siRNA sense strand
ggccauagacuuccaguuu

SEQ ID NO: 2078195 - RNA, 19 nt, Homo sapiens
  misc_RNA (1)...(19): siRNA sense strand
gagggaagguccuauuaca

SEQ ID NO: 2078196 - RNA, 19 nt, Homo sapiens
  misc_RNA (1)...(19): siRNA sense strand
acccagaacucaucauuaa

SEQ ID NO: 2078197 - RNA, 19 nt, Homo sapiens
  misc_RNA (1)...(19): siRNA sense strand
gcagugaccgcaguuauaa

SEQ ID NO: 2078198 - RNA, 19 nt, Homo sapiens
  misc_RNA (1)...(19): siRNA sense strand
caacuauacuggaucuguu

SEQ ID NO: 2078199 - RNA, 19 nt, Homo sapiens
  misc_RNA (1)...(19): siRNA sense strand
uaacauguacuacuccuuu

SEQ ID NO: 2078200 - RNA, 19 nt, Homo sapiens
  misc_RNA (1)...(19): siRNA sense strand
gaacaugacaguggaugaa

SEQ ID NO: 2078201 - RNA, 19 nt, Homo sapiens
  misc_RNA (1)...(19): siRNA sense strand
gaguaugcguggaugauga

SEQ ID NO: 2078202 - RNA, 19 nt, Homo sapiens
  misc_RNA (1)...(19): siRNA sense strand
gaaggacgaggaucugauu

SEQ ID NO: 2078203 - RNA, 19 nt, Homo sapiens
  misc_RNA (1)...(19): siRNA sense strand
gcgccuggcucugcugaua

SEQ ID NO: 2078204 - RNA, 19 nt, Homo sapiens
  misc_RNA (1)...(19): siRNA sense strand
gaaccaggccauagacuuc

SEQ ID NO: 2078205 - RNA, 19 nt, Homo sapiens
  misc_RNA (1)...(19): siRNA sense strand
gaucagagccagagagagu

SEQ ID NO: 2078206 - RNA, 19 nt, Homo sapiens
  misc_RNA (1)...(19): siRNA sense strand
ugaacacuaucgacaugua

SEQ ID NO: 2078207 - RNA, 19 nt, Homo sapiens
  misc_RNA (1)...(19): siRNA sense strand
gcuauaacauguacuacuc

SEQ ID NO: 2078208 - RNA, 19 nt, Homo sapiens
  misc_RNA (1)...(19): siRNA sense strand
ccaccaucgucaaaucaua

SEQ ID NO: 2078209 - RNA, 19 nt, Homo sapiens
  misc_RNA (1)...(19): siRNA sense strand
ccaccucccuccuguaugu

SEQ ID NO: 2078210 - RNA, 19 nt, Homo sapiens
  misc_RNA (1)...(19): siRNA sense strand
gccauagacuuccaguuug

SEQ ID NO: 2078211 - RNA, 19 nt, Homo sapiens
  misc_RNA (1)...(19): siRNA sense strand
ugaccucgcugaucuaugg

SEQ ID NO: 2078212 - RNA, 19 nt, Homo sapiens
  misc_RNA (1)...(19): siRNA sense strand
gcacugagaggguucuguu

SEQ ID NO: 2078213 - RNA, 19 nt, Homo sapiens
  misc_RNA (1)...(19): siRNA sense strand
acgaggaucugauuaacaa

SEQ ID NO: 2078214 - RNA, 19 nt, Homo sapiens
  misc_RNA (1)...(19): siRNA sense strand
gaucacggcagcuuuacuu

SEQ ID NO: 2078215 - RNA, 19 nt, Homo sapiens
  misc_RNA (1)...(19): siRNA sense strand
ggacauugaagacccagaa

SEQ ID NO: 2078216 - RNA, 19 nt, Homo sapiens
  misc_RNA (1)...(19): siRNA sense strand
gcacuugacggaucgcuau

SEQ ID NO: 2078217 - RNA, 19 nt, Homo sapiens
  misc_RNA (1)...(19): siRNA sense strand
uuacaaguauguccagugu

SEQ ID NO: 2078218 - RNA, 19 nt, Homo sapiens
  misc_RNA (1)...(19): siRNA sense strand
gacccagaacucaucauua

SEQ ID NO: 2078219 - RNA, 19 nt, Homo sapiens
  misc_RNA (1)...(19): siRNA sense strand
ggcagugaccgcaguuaua

SEQ ID NO: 2078220 - RNA, 19 nt, Homo sapiens
  misc_RNA (1)...(19): siRNA sense strand
ggacgaggaucugauuaac

SEQ ID NO: 2078221 - RNA, 19 nt, Homo sapiens
  misc_RNA (1)...(19): siRNA sense strand
ucaccuaugugcccaagga

SEQ ID NO: 2078222 - RNA, 19 nt, Homo sapiens
  misc_RNA (1)...(19): siRNA sense strand
gcaagaaccggaguugaau

SEQ ID NO: 2078223 - RNA, 19 nt, Homo sapiens
  misc_RNA (1)...(19): siRNA sense strand
ggagauccagacaguguuu

SEQ ID NO: 2078224 - RNA, 19 nt, Homo sapiens
  misc_RNA (1)...(19): siRNA sense strand
gaggagauccagacagugu

SEQ ID NO: 2078225 - RNA, 19 nt, Homo sapiens
  misc_RNA (1)...(19): siRNA sense strand
ccagagagagucaacauca

SEQ ID NO: 2078226 - RNA, 19 nt, Homo sapiens
  misc_RNA (1)...(19): siRNA sense strand
gcuagaagguauugaagcu

SEQ ID NO: 2078227 - RNA, 19 nt, Homo sapiens
  misc_RNA (1)...(19): siRNA sense strand
uauaauguguacucugaug

SEQ ID NO: 2078228 - RNA, 19 nt, Homo sapiens
  misc_RNA (1)...(19): siRNA sense strand
cugcagaacccaauuguga

SEQ ID NO: 2078229 - RNA, 19 nt, Homo sapiens
  misc_RNA (1)...(19): siRNA sense strand
gaagaagagaguggucuga

SEQ ID NO: 2078230 - RNA, 19 nt, Homo sapiens
  misc_RNA (1)...(19): siRNA sense strand
gacuggacaucccaagcua

SEQ ID NO: 2078231 - RNA, 19 nt, Homo sapiens
  misc_RNA (1)...(19): siRNA sense strand
ggaaagcugcgugggacua

SEQ ID NO: 2078232 - RNA, 19 nt, Homo sapiens
  misc_RNA (1)...(19): siRNA sense strand
caagcuagaagguauugaa

SEQ ID NO: 2078233 - RNA, 19 nt, Homo sapiens
  misc_RNA (1)...(19): siRNA sense strand
ugacaagaguccacuucug

SEQ ID NO: 2078234 - RNA, 19 nt, Homo sapiens
  misc_RNA (1)...(19): siRNA sense strand
gagcagagcgagaagacau

SEQ ID NO: 2078235 - RNA, 19 nt, Homo sapiens
  misc_RNA (1)...(19): siRNA sense strand
gagucaacaucagaaagaa

SEQ ID NO: 2078236 - RNA, 19 nt, Homo sapiens
  misc_RNA (1)...(19): siRNA sense strand
gaccgcaguuauaaugugu

SEQ ID NO: 2078237 - RNA, 19 nt, Homo sapiens
  misc_RNA (1)...(19): siRNA sense strand
ccacucagaaggaccguuu

SEQ ID NO: 2078238 - RNA, 19 nt, Homo sapiens
  misc_RNA (1)...(19): siRNA sense strand
gaccagaucaagucagaau

SEQ ID NO: 2078239 - RNA, 19 nt, Homo sapiens
  misc_RNA (1)...(19): siRNA sense strand
gcagcuaacggacgaguuc

SEQ ID NO: 2078240 - RNA, 19 nt, Homo sapiens
  misc_RNA (1)...(19): siRNA sense strand
ggaagguuacagaacauga

SEQ ID NO: 2078241 - RNA, 19 nt, Homo sapiens
  misc_RNA (1)...(19): siRNA sense strand
gcucggaccaccauuguca

SEQ ID NO: 2078242 - RNA, 19 nt, Homo sapiens
  misc_RNA (1)...(19): siRNA sense strand
ggaagagggagaagaagag

SEQ ID NO: 2078243 - RNA, 19 nt, Homo sapiens
  misc_RNA (1)...(19): siRNA sense strand
ggcuggaccugaucuuugu

SEQ ID NO: 2078244 - RNA, 19 nt, Homo sapiens
  misc_RNA (1)...(19): siRNA sense strand
ggacaucccaagcuagaag

SEQ ID NO: 2078245 - RNA, 19 nt, Homo sapiens
  misc_RNA (1)...(19): siRNA sense strand
ggaaccugaucgacuugga

SEQ ID NO: 2078246 - RNA, 19 nt, Homo sapiens
  misc_RNA (1)...(19): siRNA sense strand
caagaguccacuucugcua

SEQ ID NO: 2078247 - RNA, 19 nt, Homo sapiens
  misc_RNA (1)...(19): siRNA sense strand
acaaggacacuaaugauca

SEQ ID NO: 2078248 - RNA, 19 nt, Homo sapiens
  misc_RNA (1)...(19): siRNA sense strand
ucaacagcauaacaaugaa

SEQ ID NO: 2078249 - RNA, 19 nt, Homo sapiens
  misc_RNA (1)...(19): siRNA sense strand
gaagagggagaagaagaga

SEQ ID NO: 2078250 - RNA, 19 nt, Homo sapiens
  misc_RNA (1)...(19): siRNA sense strand
gagagagucaacaucagaa

SEQ ID NO: 2078251 - RNA, 19 nt, Homo sapiens
  misc_RNA (1)...(19): siRNA sense strand
cacaagugcuacaucuuuc

SEQ ID NO: 2078252 - RNA, 19 nt, Homo sapiens
  misc_RNA (1)...(19): siRNA sense strand
caucaacuauacuggaucu

SEQ ID NO: 2078253 - RNA, 19 nt, Homo sapiens
  misc_RNA (1)...(19): siRNA sense strand
gcaguuauaauguguacuc

SEQ ID NO: 2078254 - RNA, 19 nt, Homo sapiens
  misc_RNA (1)...(19): siRNA sense strand
ccauagacuuccaguuugg

SEQ ID NO: 2078255 - RNA, 19 nt, Homo sapiens
  misc_RNA (1)...(19): siRNA sense strand
agaggacacuuggccauug

SEQ ID NO: 2078256 - RNA, 19 nt, Homo sapiens
  misc_RNA (1)...(19): siRNA sense strand
agacaguguuugacaugga

SEQ ID NO: 2078257 - RNA, 19 nt, Homo sapiens
  misc_RNA (1)...(19): siRNA sense strand
cuacagcacccgccucuuc

SEQ ID NO: 2078258 - RNA, 19 nt, Homo sapiens
  misc_RNA (1)...(19): siRNA sense strand
aaucaacaccuuccucuuc

SEQ ID NO: 2078259 - RNA, 19 nt, Homo sapiens
  misc_RNA (1)...(19): siRNA sense strand
ucaagcggcuggaccugau

SEQ ID NO: 2078260 - RNA, 19 nt, Homo sapiens
  misc_RNA (1)...(19): siRNA sense strand
uggaugcagagcaguauua

SEQ ID NO: 2078261 - RNA, 19 nt, Homo sapiens
  misc_RNA (1)...(19): siRNA sense strand
gaaagcugcgugggacuau

SEQ ID NO: 2078262 - RNA, 19 nt, Homo sapiens
  misc_RNA (1)...(19): siRNA sense strand
ugaccgcaguuauaaugug

SEQ ID NO: 2078263 - RNA, 19 nt, Homo sapiens
  misc_RNA (1)...(19): siRNA sense strand
acggaucgcuauaacaugu

SEQ ID NO: 2078264 - RNA, 19 nt, Homo sapiens
  misc_RNA (1)...(19): siRNA sense strand
ugacggaucgcuauaacau

SEQ ID NO: 2078265 - RNA, 19 nt, Homo sapiens
  misc_RNA (1)...(19): siRNA sense strand
gacaagggauucuguuccu

SEQ ID NO: 2078266 - RNA, 19 nt, Homo sapiens
  misc_RNA (1)...(19): siRNA sense strand
gagaggacacuuggccauu

SEQ ID NO: 2078267 - RNA, 19 nt, Homo sapiens
  misc_RNA (1)...(19): siRNA sense strand
caacaccuuccucuucuuc

SEQ ID NO: 2078268 - RNA, 19 nt, Homo sapiens
  misc_RNA (1)...(19): siRNA sense strand
gauacugccucugauuguc

SEQ ID NO: 2078269 - RNA, 19 nt, Homo sapiens
  misc_RNA (1)...(19): siRNA sense strand
gagacaagggauucuguuc

SEQ ID NO: 2078270 - RNA, 19 nt, Homo sapiens
  misc_RNA (1)...(19): siRNA sense strand
cuacaucuuucugguguuc

SEQ ID NO: 2078271 - RNA, 19 nt, Homo sapiens
  misc_RNA (1)...(19): siRNA sense strand
uucaacagcauaacaauga

SEQ ID NO: 2078272 - RNA, 19 nt, Homo sapiens
  misc_RNA (1)...(19): siRNA sense strand
ucaugguccucauucauca

SEQ ID NO: 2078273 - RNA, 19 nt, Homo sapiens
  misc_RNA (1)...(19): siRNA sense strand
cagaaagaaccaggccaua

SEQ ID NO: 2078274 - RNA, 19 nt, Homo sapiens
  misc_RNA (1)...(19): siRNA sense strand
gcacccgccucuucuucuc

SEQ ID NO: 2078275 - RNA, 19 nt, Homo sapiens
  misc_RNA (1)...(19): siRNA sense strand
gcgccuucuuugucaacua

SEQ ID NO: 2078276 - RNA, 19 nt, Homo sapiens
  misc_RNA (1)...(19): siRNA sense strand
ggagggaagguccuauuac

SEQ ID NO: 2078277 - RNA, 19 nt, Homo sapiens
  misc_RNA (1)...(19): siRNA sense strand
cacuaaugaucaccuaugu

SEQ ID NO: 2078278 - RNA, 19 nt, Homo sapiens
  misc_RNA (1)...(19): siRNA sense strand
ucacaaggacacuaaugau

SEQ ID NO: 2078279 - RNA, 19 nt, Homo sapiens
  misc_RNA (1)...(19): siRNA sense strand
ggaugaaugcuuccagucu

SEQ ID NO: 2078280 - RNA, 19 nt, Homo sapiens
  misc_RNA (1)...(19): siRNA sense strand
uggaccagaucaagucaga

SEQ ID NO: 2078281 - RNA, 19 nt, Homo sapiens
  misc_RNA (1)...(19): siRNA sense strand
ugcaagaaccggaguugaa

SEQ ID NO: 2078282 - RNA, 19 nt, Homo sapiens
  misc_RNA (1)...(19): siRNA sense strand
aggaggagauccagacagu

SEQ ID NO: 2078283 - RNA, 19 nt, Homo sapiens
  misc_RNA (1)...(19): siRNA sense strand
cauggugauugccuuuguu

SEQ ID NO: 2078284 - RNA, 19 nt, Homo sapiens
  misc_RNA (1)...(19): siRNA sense strand
ccauggugauugccuuugu

SEQ ID NO: 2078285 - RNA, 19 nt, Homo sapiens
  misc_RNA (1)...(19): siRNA sense strand
caucuuugcgccacucuug

SEQ ID NO: 2078286 - RNA, 19 nt, Homo sapiens
  misc_RNA (1)...(19): siRNA sense strand
agagucaacaucagaaaga

SEQ ID NO: 2078287 - RNA, 19 nt, Homo sapiens
  misc_RNA (1)...(19): siRNA sense strand
ucaaugagauggcuaagua

SEQ ID NO: 2078288 - RNA, 19 nt, Homo sapiens
  misc_RNA (1)...(19): siRNA sense strand
caacaagacucucuacuuc

SEQ ID NO: 2078289 - RNA, 19 nt, Homo sapiens
  misc_RNA (1)...(19): siRNA sense strand
gacauuggcuuuggaguuu

SEQ ID NO: 2078290 - RNA, 19 nt, Homo sapiens
  misc_RNA (1)...(19): siRNA sense strand
gcaucuaccugcucaaguu

SEQ ID NO: 2078291 - RNA, 19 nt, Homo sapiens
  misc_RNA (1)...(19): siRNA sense strand
gcaacaagacucucuacuu

SEQ ID NO: 2078292 - RNA, 19 nt, Homo sapiens
  misc_RNA (1)...(19): siRNA sense strand
gaacauacaggagcuauag

SEQ ID NO: 2078293 - RNA, 19 nt, Homo sapiens
  misc_RNA (1)...(19): siRNA sense strand
ggaagaggaggaagagauu

SEQ ID NO: 2078294 - RNA, 19 nt, Homo sapiens
  misc_RNA (1)...(19): siRNA sense strand
guaacuagcacugacauaa

SEQ ID NO: 2078295 - RNA, 19 nt, Homo sapiens
  misc_RNA (1)...(19): siRNA sense strand
gauccagucugaacauaca

SEQ ID NO: 2078296 - RNA, 19 nt, Homo sapiens
  misc_RNA (1)...(19): siRNA sense strand
aaagcaagcugggcaaaga

SEQ ID NO: 2078297 - RNA, 19 nt, Homo sapiens
  misc_RNA (1)...(19): siRNA sense strand
ggaggaagagauugaagaa

SEQ ID NO: 2078298 - RNA, 19 nt, Homo sapiens
  misc_RNA (1)...(19): siRNA sense strand
gaagaucugcggaaagcaa

SEQ ID NO: 2078299 - RNA, 19 nt, Homo sapiens
  misc_RNA (1)...(19): siRNA sense strand
uacaggagcuauagauguu

SEQ ID NO: 2078300 - RNA, 19 nt, Homo sapiens
  misc_RNA (1)...(19): siRNA sense strand
guaaggaugccacggaaga

SEQ ID NO: 2078301 - RNA, 19 nt, Homo sapiens
  misc_RNA (1)...(19): siRNA sense strand
ccaugcaucuggaccuuug

SEQ ID NO: 2078302 - RNA, 19 nt, Homo sapiens
  misc_RNA (1)...(19): siRNA sense strand
ugagauggcuaaguaucaa

SEQ ID NO: 2078303 - RNA, 19 nt, Homo sapiens
  misc_RNA (1)...(19): siRNA sense strand
gauguucuuucagcugauu

SEQ ID NO: 2078304 - RNA, 19 nt, Homo sapiens
  misc_RNA (1)...(19): siRNA sense strand
ucuuucagcugauuuggaa

SEQ ID NO: 2078305 - RNA, 19 nt, Homo sapiens
  misc_RNA (1)...(19): siRNA sense strand
gggaggucaugccugugua

SEQ ID NO: 2078306 - RNA, 19 nt, Homo sapiens
  misc_RNA (1)...(19): siRNA sense strand
uugccaaggugaaggaauu

SEQ ID NO: 2078307 - RNA, 19 nt, Homo sapiens
  misc_RNA (1)...(19): siRNA sense strand
ugacauuggcuuuggaguu

SEQ ID NO: 2078308 - RNA, 19 nt, Homo sapiens
  misc_RNA (1)...(19): siRNA sense strand
gaccgaugacuaugacauu

SEQ ID NO: 2078309 - RNA, 19 nt, Homo sapiens
  misc_RNA (1)...(19): siRNA sense strand
cgaugaggaugaagaagag

SEQ ID NO: 2078310 - RNA, 19 nt, Homo sapiens
  misc_RNA (1)...(19): siRNA sense strand
gcucaggccuuggugaaac

SEQ ID NO: 2078311 - RNA, 19 nt, Homo sapiens
  misc_RNA (1)...(19): siRNA sense strand
acaagacucucuacuucca

SEQ ID NO: 2078312 - RNA, 19 nt, Homo sapiens
  misc_RNA (1)...(19): siRNA sense strand
gaagaggaggaagagauug

SEQ ID NO: 2078313 - RNA, 19 nt, Homo sapiens
  misc_RNA (1)...(19): siRNA sense strand
ccagugacgaugaggauga

SEQ ID NO: 2078314 - RNA, 19 nt, Homo sapiens
  misc_RNA (1)...(19): siRNA sense strand
aggcccagguccucaauga

SEQ ID NO: 2078315 - RNA, 19 nt, Homo sapiens
  misc_RNA (1)...(19): siRNA sense strand
cacggaagaucugcggaaa

SEQ ID NO: 2078316 - RNA, 19 nt, Homo sapiens
  misc_RNA (1)...(19): siRNA sense strand
agcuauagauguucuuuca

SEQ ID NO: 2078317 - RNA, 19 nt, Homo sapiens
  misc_RNA (1)...(19): siRNA sense strand
ggagcuauagauguucuuu

SEQ ID NO: 2078318 - RNA, 19 nt, Homo sapiens
  misc_RNA (1)...(19): siRNA sense strand
cggaagaucugcggaaagc

SEQ ID NO: 2078319 - RNA, 19 nt, Homo sapiens
  misc_RNA (1)...(19): siRNA sense strand
ugacuaugacauuggcuuu

SEQ ID NO: 2078320 - RNA, 19 nt, Homo sapiens
  misc_RNA (1)...(19): siRNA sense strand
gcaagcugggcaaagagaa

SEQ ID NO: 2078321 - RNA, 19 nt, Homo sapiens
  misc_RNA (1)...(19): siRNA sense strand
ugacgaugaggaugaagaa

SEQ ID NO: 2078322 - RNA, 19 nt, Homo sapiens
  misc_RNA (1)...(19): siRNA sense strand
cauuggcuuuggaguuuau

SEQ ID NO: 2078323 - RNA, 19 nt, Homo sapiens
  misc_RNA (1)...(19): siRNA sense strand
ugaacauacaggagcuaua

SEQ ID NO: 2078324 - RNA, 19 nt, Homo sapiens
  misc_RNA (1)...(19): siRNA sense strand
uaacuagcacugacauaac

SEQ ID NO: 2078325 - RNA, 19 nt, Homo sapiens
  misc_RNA (1)...(19): siRNA sense strand
acauuggcuuuggaguuua

SEQ ID NO: 2078326 - RNA, 19 nt, Homo sapiens
  misc_RNA (1)...(19): siRNA sense strand
auacaggagcuauagaugu

SEQ ID NO: 2078327 - RNA, 19 nt, Homo sapiens
  misc_RNA (1)...(19): siRNA sense strand
aagaggaggaagagauuga

SEQ ID NO: 2078328 - RNA, 19 nt, Homo sapiens
  misc_RNA (1)...(19): siRNA sense strand
gggaguuugcgaccgauga

SEQ ID NO: 2078329 - RNA, 19 nt, Homo sapiens
  misc_RNA (1)...(19): siRNA sense strand
gugauuccagugacgauga

SEQ ID NO: 2078330 - RNA, 19 nt, Homo sapiens
  misc_RNA (1)...(19): siRNA sense strand
cagugacgaugaggaugaa

SEQ ID NO: 2078331 - RNA, 19 nt, Homo sapiens
  misc_RNA (1)...(19): siRNA sense strand
ucguuaugauccagucuga

SEQ ID NO: 2078332 - RNA, 19 nt, Homo sapiens
  misc_RNA (1)...(19): siRNA sense strand
gcuuuggaguuuauuuuga

SEQ ID NO: 2078333 - RNA, 19 nt, Homo sapiens
  misc_RNA (1)...(19): siRNA sense strand
cauacaggagcuauagaug

SEQ ID NO: 2078334 - RNA, 19 nt, Homo sapiens
  misc_RNA (1)...(19): siRNA sense strand
guuaugauccagucugaac

SEQ ID NO: 2078335 - RNA, 19 nt, Homo sapiens
  misc_RNA (1)...(19): siRNA sense strand
ggaugaagaagaggaagag

SEQ ID NO: 2078336 - RNA, 19 nt, Homo sapiens
  misc_RNA (1)...(19): siRNA sense strand
acgaugaggaugaagaaga

SEQ ID NO: 2078337 - RNA, 19 nt, Homo sapiens
  misc_RNA (1)...(19): siRNA sense strand
gagcuauagauguucuuuc

SEQ ID NO: 2078338 - RNA, 19 nt, Homo sapiens
  misc_RNA (1)...(19): siRNA sense strand
caggagcuauagauguucu

SEQ ID NO: 2078339 - RNA, 19 nt, Homo sapiens
  misc_RNA (1)...(19): siRNA sense strand
gaagaagaaaggaagaaua

SEQ ID NO: 2078340 - RNA, 19 nt, Homo sapiens
  misc_RNA (1)...(19): siRNA sense strand
gaagaaaggaagaauaaug

SEQ ID NO: 2078341 - RNA, 19 nt, Homo sapiens
  misc_RNA (1)...(19): siRNA sense strand
ggagagagcaggaagaaga

SEQ ID NO: 2078342 - RNA, 19 nt, Homo sapiens
  misc_RNA (1)...(19): siRNA sense strand
ccaguuaaguucucuccaa

SEQ ID NO: 2078343 - RNA, 19 nt, Homo sapiens
  misc_RNA (1)...(19): siRNA sense strand
ugagggagcuuuccuuguc

SEQ ID NO: 2078344 - RNA, 19 nt, Homo sapiens
  misc_RNA (1)...(19): siRNA sense strand
ggaagacccaguuaaguuc

SEQ ID NO: 2078345 - RNA, 19 nt, Homo sapiens
  misc_RNA (1)...(19): siRNA sense strand
gacaugaugcugacuuuga

SEQ ID NO: 2078346 - RNA, 19 nt, Homo sapiens
  misc_RNA (1)...(19): siRNA sense strand
ggauaauggucuccagcuu

SEQ ID NO: 2078347 - RNA, 19 nt, Homo sapiens
  misc_RNA (1)...(19): siRNA sense strand
gaaaggaagaauaaugucu

SEQ ID NO: 2078348 - RNA, 19 nt, Homo sapiens
  misc_RNA (1)...(19): siRNA sense strand
caguuaaguucucuccaaa

SEQ ID NO: 2078349 - RNA, 19 nt, Homo sapiens
  misc_RNA (1)...(19): siRNA sense strand
gaugcugacuuugaagaug

SEQ ID NO: 2078350 - RNA, 19 nt, Homo sapiens
  misc_RNA (1)...(19): siRNA sense strand
ugugacaccugguauggaa

SEQ ID NO: 2078351 - RNA, 19 nt, Homo sapiens
  misc_RNA (1)...(19): siRNA sense strand
gagagagcaggaagaagaa

SEQ ID NO: 2078352 - RNA, 19 nt, Homo sapiens
  misc_RNA (1)...(19): siRNA sense strand
ggaagaagaaaggaagaau

SEQ ID NO: 2078353 - RNA, 19 nt, Homo sapiens
  misc_RNA (1)...(19): siRNA sense strand
uggaagacccaguuaaguu

SEQ ID NO: 2078354 - RNA, 19 nt, Homo sapiens
  misc_RNA (1)...(19): siRNA sense strand
gguauggaagacccaguua

SEQ ID NO: 2078355 - RNA, 19 nt, Homo sapiens
  misc_RNA (1)...(19): siRNA sense strand
acaugaugcugacuuugaa

SEQ ID NO: 2078356 - RNA, 19 nt, Homo sapiens
  misc_RNA (1)...(19): siRNA sense strand
gaucacagucugcccaaca

SEQ ID NO: 2078357 - RNA, 19 nt, Homo sapiens
  misc_RNA (1)...(19): siRNA sense strand
guauggaagacccaguuaa

SEQ ID NO: 2078358 - RNA, 19 nt, Homo sapiens
  misc_RNA (1)...(19): siRNA sense strand
ggacaugaugcugacuuug

SEQ ID NO: 2078359 - RNA, 19 nt, Homo sapiens
  misc_RNA (1)...(19): siRNA sense strand
caaauucagccaaccaacu

SEQ ID NO: 2078360 - RNA, 19 nt, Homo sapiens
  misc_RNA (1)...(19): siRNA sense strand
aggacaugaugcugacuuu

SEQ ID NO: 2078361 - RNA, 19 nt, Homo sapiens
  misc_RNA (1)...(19): siRNA sense strand
ugcccaacaccaugauuua

SEQ ID NO: 2078362 - RNA, 19 nt, Homo sapiens
  misc_RNA (1)...(19): siRNA sense strand
caucuacagccucaaggaa

SEQ ID NO: 2078363 - RNA, 19 nt, Homo sapiens
  misc_RNA (1)...(19): siRNA sense strand
caagaugagaucacagucu

SEQ ID NO: 2078364 - RNA, 19 nt, Homo sapiens
  misc_RNA (1)...(19): siRNA sense strand
gaagacccaguuaaguucu

SEQ ID NO: 2078365 - RNA, 19 nt, Homo sapiens
  misc_RNA (1)...(19): siRNA sense strand
cgucaauguuccugcaaag

SEQ ID NO: 2078366 - RNA, 19 nt, Homo sapiens
  misc_RNA (1)...(19): siRNA sense strand
uauggaagacccaguuaag

SEQ ID NO: 2078367 - RNA, 19 nt, Homo sapiens
  misc_RNA (1)...(19): siRNA sense strand
ccacaucuacagccucaag

SEQ ID NO: 2078368 - RNA, 19 nt, Homo sapiens
  misc_RNA (1)...(19): siRNA sense strand
gagagcaggaagaagaaag

SEQ ID NO: 2078369 - RNA, 19 nt, Homo sapiens
  misc_RNA (1)...(19): siRNA sense strand
aaacaaauucagccaacca

SEQ ID NO: 2078370 - RNA, 19 nt, Homo sapiens
  misc_RNA (1)...(19): siRNA sense strand
ccucaaggaaacaaauuca

SEQ ID NO: 2078371 - RNA, 19 nt, Homo sapiens
  misc_RNA (1)...(19): siRNA sense strand
ugacaccugguauggaaga

SEQ ID NO: 2078372 - RNA, 19 nt, Homo sapiens
  misc_RNA (1)...(19): siRNA sense strand
aaauucagccaaccaacug

SEQ ID NO: 2078373 - RNA, 19 nt, Homo sapiens
  misc_RNA (1)...(19): siRNA sense strand
gagggagagagcaggaaga

SEQ ID NO: 2078374 - RNA, 19 nt, Homo sapiens
  misc_RNA (1)...(19): siRNA sense strand
gcaaauaacuugacguuua

SEQ ID NO: 2078375 - RNA, 19 nt, Homo sapiens
  misc_RNA (1)...(19): siRNA sense strand
caugacagcuuuauagaua

SEQ ID NO: 2078376 - RNA, 19 nt, Homo sapiens
  misc_RNA (1)...(19): siRNA sense strand
gaaggaauuuggccaguaa

SEQ ID NO: 2078377 - RNA, 19 nt, Homo sapiens
  misc_RNA (1)...(19): siRNA sense strand
gacaaggaaugcugaaaua

SEQ ID NO: 2078378 - RNA, 19 nt, Homo sapiens
  misc_RNA (1)...(19): siRNA sense strand
gcaaagacauuccaagcuu

SEQ ID NO: 2078379 - RNA, 19 nt, Homo sapiens
  misc_RNA (1)...(19): siRNA sense strand
gcaaaggagcuaccaguua

SEQ ID NO: 2078380 - RNA, 19 nt, Homo sapiens
  misc_RNA (1)...(19): siRNA sense strand
gauggaagcuucuuaaugg

SEQ ID NO: 2078381 - RNA, 19 nt, Homo sapiens
  misc_RNA (1)...(19): siRNA sense strand
guggaaagaucacauauug

SEQ ID NO: 2078382 - RNA, 19 nt, Homo sapiens
  misc_RNA (1)...(19): siRNA sense strand
uagaggaucuugugucuuu

SEQ ID NO: 2078383 - RNA, 19 nt, Homo sapiens
  misc_RNA (1)...(19): siRNA sense strand
cagagaaacuccagacaaa

SEQ ID NO: 2078384 - RNA, 19 nt, Homo sapiens
  misc_RNA (1)...(19): siRNA sense strand
cacaaagaauggugaaaua

SEQ ID NO: 2078385 - RNA, 19 nt, Homo sapiens
  misc_RNA (1)...(19): siRNA sense strand
gaaaacaucuuauggauca

SEQ ID NO: 2078386 - RNA, 19 nt, Homo sapiens
  misc_RNA (1)...(19): siRNA sense strand
gaugacagcauguugguua

SEQ ID NO: 2078387 - RNA, 19 nt, Homo sapiens
  misc_RNA (1)...(19): siRNA sense strand
gaaaucaguuacaccauca

SEQ ID NO: 2078388 - RNA, 19 nt, Homo sapiens
  misc_RNA (1)...(19): siRNA sense strand
ggcagagacuguaggaaua

SEQ ID NO: 2078389 - RNA, 19 nt, Homo sapiens
  misc_RNA (1)...(19): siRNA sense strand
gauauuagaggaaagcuuu

SEQ ID NO: 2078390 - RNA, 19 nt, Homo sapiens
  misc_RNA (1)...(19): siRNA sense strand
gaaaggaaaggccgucaaa

SEQ ID NO: 2078391 - RNA, 19 nt, Homo sapiens
  misc_RNA (1)...(19): siRNA sense strand
aaagaacccucaauugaug

SEQ ID NO: 2078392 - RNA, 19 nt, Homo sapiens
  misc_RNA (1)...(19): siRNA sense strand
caaaggagcuaccaguuac

SEQ ID NO: 2078393 - RNA, 19 nt, Homo sapiens
  misc_RNA (1)...(19): siRNA sense strand
ggacuagacccagaacaua

SEQ ID NO: 2078394 - RNA, 19 nt, Homo sapiens
  misc_RNA (1)...(19): siRNA sense strand
gaaagcugaugucaacugu

SEQ ID NO: 2078395 - RNA, 19 nt, Homo sapiens
  misc_RNA (1)...(19): siRNA sense strand
ucagucagcuucagugcua

SEQ ID NO: 2078396 - RNA, 19 nt, Homo sapiens
  misc_RNA (1)...(19): siRNA sense strand
ugagaaagcugaugucaac

SEQ ID NO: 2078397 - RNA, 19 nt, Homo sapiens
  misc_RNA (1)...(19): siRNA sense strand
caacaaauauucgcccaau

SEQ ID NO: 2078398 - RNA, 19 nt, Homo sapiens
  misc_RNA (1)...(19): siRNA sense strand
ucaggaaucagucuuguua

SEQ ID NO: 2078399 - RNA, 19 nt, Homo sapiens
  misc_RNA (1)...(19): siRNA sense strand
gcaguagguucuagugaga

SEQ ID NO: 2078400 - RNA, 19 nt, Homo sapiens
  misc_RNA (1)...(19): siRNA sense strand
gcaggaaggugccaaaauu

SEQ ID NO: 2078401 - RNA, 19 nt, Homo sapiens
  misc_RNA (1)...(19): siRNA sense strand
caauaacacuucugguuca

SEQ ID NO: 2078402 - RNA, 19 nt, Homo sapiens
  misc_RNA (1)...(19): siRNA sense strand
caaauaacuugacguuuac

SEQ ID NO: 2078403 - RNA, 19 nt, Homo sapiens
  misc_RNA (1)...(19): siRNA sense strand
ggagcuaccaguuacauaa

SEQ ID NO: 2078404 - RNA, 19 nt, Homo sapiens
  misc_RNA (1)...(19): siRNA sense strand
gaugugcaauccaugauau

SEQ ID NO: 2078405 - RNA, 19 nt, Homo sapiens
  misc_RNA (1)...(19): siRNA sense strand
ggauaaaaguggcccaaua

SEQ ID NO: 2078406 - RNA, 19 nt, Homo sapiens
  misc_RNA (1)...(19): siRNA sense strand
aaucaagccucauuuacaa

SEQ ID NO: 2078407 - RNA, 19 nt, Homo sapiens
  misc_RNA (1)...(19): siRNA sense strand
caacacuggugcuaaggaa

SEQ ID NO: 2078408 - RNA, 19 nt, Homo sapiens
  misc_RNA (1)...(19): siRNA sense strand
ggugaugacugcagcuuau

SEQ ID NO: 2078409 - RNA, 19 nt, Homo sapiens
  misc_RNA (1)...(19): siRNA sense strand
gacuuuaucuauccuaaga

SEQ ID NO: 2078410 - RNA, 19 nt, Homo sapiens
  misc_RNA (1)...(19): siRNA sense strand
caucagagccuuaucaaca

SEQ ID NO: 2078411 - RNA, 19 nt, Homo sapiens
  misc_RNA (1)...(19): siRNA sense strand
acagauaugucuuuaaugg

SEQ ID NO: 2078412 - RNA, 19 nt, Homo sapiens
  misc_RNA (1)...(19): siRNA sense strand
ggacaaggaaugcugaaau

SEQ ID NO: 2078413 - RNA, 19 nt, Homo sapiens
  misc_RNA (1)...(19): siRNA sense strand
gaaucaagccucauuuaca

SEQ ID NO: 2078414 - RNA, 19 nt, Homo sapiens
  misc_RNA (1)...(19): siRNA sense strand
gcacaaagaauggugaaau

SEQ ID NO: 2078415 - RNA, 19 nt, Homo sapiens
  misc_RNA (1)...(19): siRNA sense strand
gcagaauuccgaccagauu

SEQ ID NO: 2078416 - RNA, 19 nt, Homo sapiens
  misc_RNA (1)...(19): siRNA sense strand
guccagacaugcugagaaa

SEQ ID NO: 2078417 - RNA, 19 nt, Homo sapiens
  misc_RNA (1)...(19): siRNA sense strand
aaucgaaguuggagagaaa

SEQ ID NO: 2078418 - RNA, 19 nt, Homo sapiens
  misc_RNA (1)...(19): siRNA sense strand
gggagaaugaaaucaguua

SEQ ID NO: 2078419 - RNA, 19 nt, Homo sapiens
  misc_RNA (1)...(19): siRNA sense strand
ggacuucucugcagauagc

SEQ ID NO: 2078420 - RNA, 19 nt, Homo sapiens
  misc_RNA (1)...(19): siRNA sense strand
gauggaaggcuaucgagaa

SEQ ID NO: 2078421 - RNA, 19 nt, Homo sapiens
  misc_RNA (1)...(19): siRNA sense strand
cagcuuauuugucuggaaa

SEQ ID NO: 2078422 - RNA, 19 nt, Homo sapiens
  misc_RNA (1)...(19): siRNA sense strand
gcagagacuguaggaauaa

SEQ ID NO: 2078423 - RNA, 19 nt, Homo sapiens
  misc_RNA (1)...(19): siRNA sense strand
uagaggaccuuguguugga

SEQ ID NO: 2078424 - RNA, 19 nt, Homo sapiens
  misc_RNA (1)...(19): siRNA sense strand
gccaguaauuggagaaguu

SEQ ID NO: 2078425 - RNA, 19 nt, Homo sapiens
  misc_RNA (1)...(19): siRNA sense strand
uaaacggcaugucuaugaa

SEQ ID NO: 2078426 - RNA, 19 nt, Homo sapiens
  misc_RNA (1)...(19): siRNA sense strand
caaacaauguaggcaagaa

SEQ ID NO: 2078427 - RNA, 19 nt, Homo sapiens
  misc_RNA (1)...(19): siRNA sense strand
gcccaucugugcuacugua

SEQ ID NO: 2078428 - RNA, 19 nt, Homo sapiens
  misc_RNA (1)...(19): siRNA sense strand
gaagagagacaggagaugu

SEQ ID NO: 2078429 - RNA, 19 nt, Homo sapiens
  misc_RNA (1)...(19): siRNA sense strand
ggaauucugcacaauguug

SEQ ID NO: 2078430 - RNA, 19 nt, Homo sapiens
  misc_RNA (1)...(19): siRNA sense strand
gagaaacuccagacaaaca

SEQ ID NO: 2078431 - RNA, 19 nt, Homo sapiens
  misc_RNA (1)...(19): siRNA sense strand
gaaaggcagggaguaguaa

SEQ ID NO: 2078432 - RNA, 19 nt, Homo sapiens
  misc_RNA (1)...(19): siRNA sense strand
ggucaacacuggugcuaag

SEQ ID NO: 2078433 - RNA, 19 nt, Homo sapiens
  misc_RNA (1)...(19): siRNA sense strand
ggugggagguguugcuguu

SEQ ID NO: 2078434 - RNA, 19 nt, Homo sapiens
  misc_RNA (1)...(19): siRNA sense strand
caaggaaugcugaaauaau

SEQ ID NO: 2078435 - RNA, 19 nt, Homo sapiens
  misc_RNA (1)...(19): siRNA sense strand
ugggaaauaucuugcugua

SEQ ID NO: 2078436 - RNA, 19 nt, Homo sapiens
  misc_RNA (1)...(19): siRNA sense strand
caacgauggaagcuucuua

SEQ ID NO: 2078437 - RNA, 19 nt, Homo sapiens
  misc_RNA (1)...(19): siRNA sense strand
ggagaugugcaauccauga

SEQ ID NO: 2078438 - RNA, 19 nt, Homo sapiens
  misc_RNA (1)...(19): siRNA sense strand
gaacaagcagacuuuaucu

SEQ ID NO: 2078439 - RNA, 19 nt, Homo sapiens
  misc_RNA (1)...(19): siRNA sense strand
gcaaugaacaagcagacuu

SEQ ID NO: 2078440 - RNA, 19 nt, Homo sapiens
  misc_RNA (1)...(19): siRNA sense strand
uuaaugguguggacaaaug

SEQ ID NO: 2078441 - RNA, 19 nt, Homo sapiens
  misc_RNA (1)...(19): siRNA sense strand
uuggaaaguuuaagaggua

SEQ ID NO: 2078442 - RNA, 19 nt, Homo sapiens
  misc_RNA (1)...(19): siRNA sense strand
ugaaggaauuuggccagua

SEQ ID NO: 2078443 - RNA, 19 nt, Homo sapiens
  misc_RNA (1)...(19): siRNA sense strand
caaauguucgcuggacuua

SEQ ID NO: 2078444 - RNA, 19 nt, Homo sapiens
  misc_RNA (1)...(19): siRNA sense strand
acagugagacuuugggaua

SEQ ID NO: 2078445 - RNA, 19 nt, Homo sapiens
  misc_RNA (1)...(19): siRNA sense strand
gaugggacagugagacuuu

SEQ ID NO: 2078446 - RNA, 19 nt, Homo sapiens
  misc_RNA (1)...(19): siRNA sense strand
aaggaaugcugaaauaauc

SEQ ID NO: 2078447 - RNA, 19 nt, Homo sapiens
  misc_RNA (1)...(19): siRNA sense strand
caagcagacuuuaucuauc

SEQ ID NO: 2078448 - RNA, 19 nt, Homo sapiens
  misc_RNA (1)...(19): siRNA sense strand
agggaaauuuggaaaguuu

SEQ ID NO: 2078449 - RNA, 19 nt, Homo sapiens
  misc_RNA (1)...(19): siRNA sense strand
gauaaaaguggcccaauaa

SEQ ID NO: 2078450 - RNA, 19 nt, Homo sapiens
  misc_RNA (1)...(19): siRNA sense strand
gaaauacuagaaguggaua

SEQ ID NO: 2078451 - RNA, 19 nt, Homo sapiens
  misc_RNA (1)...(19): siRNA sense strand
caugguggcuauuggaaug

SEQ ID NO: 2078452 - RNA, 19 nt, Homo sapiens
  misc_RNA (1)...(19): siRNA sense strand
ggucacaaucaacguauuu

SEQ ID NO: 2078453 - RNA, 19 nt, Homo sapiens
  misc_RNA (1)...(19): siRNA sense strand
gacccagaacauacuauua

SEQ ID NO: 2078454 - RNA, 19 nt, Homo sapiens
  misc_RNA (1)...(19): siRNA sense strand
aauguucgcuggacuuaug

SEQ ID NO: 2078455 - RNA, 19 nt, Homo sapiens
  misc_RNA (1)...(19): siRNA sense strand
caacugugccuguguaucu

SEQ ID NO: 2078456 - RNA, 19 nt, Homo sapiens
  misc_RNA (1)...(19): siRNA sense strand
gcuauaaacggcaugucua

SEQ ID NO: 2078457 - RNA, 19 nt, Homo sapiens
  misc_RNA (1)...(19): siRNA sense strand
caaugaacaagcagacuuu

SEQ ID NO: 2078458 - RNA, 19 nt, Homo sapiens
  misc_RNA (1)...(19): siRNA sense strand
guaggaauaauguucacua

SEQ ID NO: 2078459 - RNA, 19 nt, Homo sapiens
  misc_RNA (1)...(19): siRNA sense strand
ugaaaggcagggaguagua

SEQ ID NO: 2078460 - RNA, 19 nt, Homo sapiens
  misc_RNA (1)...(19): siRNA sense strand
ugaagaauccgacauugau

SEQ ID NO: 2078461 - RNA, 19 nt, Homo sapiens
  misc_RNA (1)...(19): siRNA sense strand
ggugaucgacauguuguua

SEQ ID NO: 2078462 - RNA, 19 nt, Homo sapiens
  misc_RNA (1)...(19): siRNA sense strand
agaaucagcuacugcaaag

SEQ ID NO: 2078463 - RNA, 19 nt, Homo sapiens
  misc_RNA (1)...(19): siRNA sense strand
gcagagcuggucacaauca

SEQ ID NO: 2078464 - RNA, 19 nt, Homo sapiens
  misc_RNA (1)...(19): siRNA sense strand
cuacagcuccuucuauuca

SEQ ID NO: 2078465 - RNA, 19 nt, Homo sapiens
  misc_RNA (1)...(19): siRNA sense strand
gggaugcaaugaacaagca

SEQ ID NO: 2078466 - RNA, 19 nt, Homo sapiens
  misc_RNA (1)...(19): siRNA sense strand
gaucaugccgcuauugaca

SEQ ID NO: 2078467 - RNA, 19 nt, Homo sapiens
  misc_RNA (1)...(19): siRNA sense strand
uuugggauauugcugauaa

SEQ ID NO: 2078468 - RNA, 19 nt, Homo sapiens
  misc_RNA (1)...(19): siRNA sense strand
acaagcagacuuuaucuau

SEQ ID NO: 2078469 - RNA, 19 nt, Homo sapiens
  misc_RNA (1)...(19): siRNA sense strand
aaagggaaauuuggaaagu

SEQ ID NO: 2078470 - RNA, 19 nt, Homo sapiens
  misc_RNA (1)...(19): siRNA sense strand
gacugcagcuuauuugucu

SEQ ID NO: 2078471 - RNA, 19 nt, Homo sapiens
  misc_RNA (1)...(19): siRNA sense strand
gcuauugacagaauuacuu

SEQ ID NO: 2078472 - RNA, 19 nt, Homo sapiens
  misc_RNA (1)...(19): siRNA sense strand
ggaaucaagccucauuuac

SEQ ID NO: 2078473 - RNA, 19 nt, Homo sapiens
  misc_RNA (1)...(19): siRNA sense strand
uggcaugguuaaguuauuu

SEQ ID NO: 2078474 - RNA, 19 nt, Homo sapiens
  misc_RNA (1)...(19): siRNA sense strand
gcaaauaacuugacguuua

SEQ ID NO: 2078475 - RNA, 19 nt, Homo sapiens
  misc_RNA (1)...(19): siRNA sense strand
gacaaggaaugcugaaaua

SEQ ID NO: 2078476 - RNA, 19 nt, Homo sapiens
  misc_RNA (1)...(19): siRNA sense strand
gcaaagacauuccaagcuu

SEQ ID NO: 2078477 - RNA, 19 nt, Homo sapiens
  misc_RNA (1)...(19): siRNA sense strand
guggaaagaucacauauug

SEQ ID NO: 2078478 - RNA, 19 nt, Homo sapiens
  misc_RNA (1)...(19): siRNA sense strand
gaaaacaucuuauggauca

SEQ ID NO: 2078479 - RNA, 19 nt, Homo sapiens
  misc_RNA (1)...(19): siRNA sense strand
gaaaggaaaggccgucaaa

SEQ ID NO: 2078480 - RNA, 19 nt, Homo sapiens
  misc_RNA (1)...(19): siRNA sense strand
ggacuagacccagaacaua

SEQ ID NO: 2078481 - RNA, 19 nt, Homo sapiens
  misc_RNA (1)...(19): siRNA sense strand
gaaagcugaugucaacugu

SEQ ID NO: 2078482 - RNA, 19 nt, Homo sapiens
  misc_RNA (1)...(19): siRNA sense strand
ucagucagcuucagugcua

SEQ ID NO: 2078483 - RNA, 19 nt, Homo sapiens
  misc_RNA (1)...(19): siRNA sense strand
ugagaaagcugaugucaac

SEQ ID NO: 2078484 - RNA, 19 nt, Homo sapiens
  misc_RNA (1)...(19): siRNA sense strand
gcaggaaggugccaaaauu

SEQ ID NO: 2078485 - RNA, 19 nt, Homo sapiens
  misc_RNA (1)...(19): siRNA sense strand
ucaggaaucagucuuguua

SEQ ID NO: 2078486 - RNA, 19 nt, Homo sapiens
  misc_RNA (1)...(19): siRNA sense strand
gcaguagguucuagugaga

SEQ ID NO: 2078487 - RNA, 19 nt, Homo sapiens
  misc_RNA (1)...(19): siRNA sense strand
caaauaacuugacguuuac

SEQ ID NO: 2078488 - RNA, 19 nt, Homo sapiens
  misc_RNA (1)...(19): siRNA sense strand
gaugugcaauccaugauau

SEQ ID NO: 2078489 - RNA, 19 nt, Homo sapiens
  misc_RNA (1)...(19): siRNA sense strand
gacuuuaucuauccuaaga

SEQ ID NO: 2078490 - RNA, 19 nt, Homo sapiens
  misc_RNA (1)...(19): siRNA sense strand
ggugaugacugcagcuuau

SEQ ID NO: 2078491 - RNA, 19 nt, Homo sapiens
  misc_RNA (1)...(19): siRNA sense strand
ggacaaggaaugcugaaau

SEQ ID NO: 2078492 - RNA, 19 nt, Homo sapiens
  misc_RNA (1)...(19): siRNA sense strand
gcagaauuccgaccagauu

SEQ ID NO: 2078493 - RNA, 19 nt, Homo sapiens
  misc_RNA (1)...(19): siRNA sense strand
guccagacaugcugagaaa

SEQ ID NO: 2078494 - RNA, 19 nt, Homo sapiens
  misc_RNA (1)...(19): siRNA sense strand
aaucgaaguuggagagaaa

SEQ ID NO: 2078495 - RNA, 19 nt, Homo sapiens
  misc_RNA (1)...(19): siRNA sense strand
ggacuucucugcagauagc

SEQ ID NO: 2078496 - RNA, 19 nt, Homo sapiens
  misc_RNA (1)...(19): siRNA sense strand
cagcuuauuugucuggaaa

SEQ ID NO: 2078497 - RNA, 19 nt, Homo sapiens
  misc_RNA (1)...(19): siRNA sense strand
uaaacggcaugucuaugaa

SEQ ID NO: 2078498 - RNA, 19 nt, Homo sapiens
  misc_RNA (1)...(19): siRNA sense strand
gaagagagacaggagaugu

SEQ ID NO: 2078499 - RNA, 19 nt, Homo sapiens
  misc_RNA (1)...(19): siRNA sense strand
caaggaaugcugaaauaau

SEQ ID NO: 2078500 - RNA, 19 nt, Homo sapiens
  misc_RNA (1)...(19): siRNA sense strand
gcaaugaacaagcagacuu

SEQ ID NO: 2078501 - RNA, 19 nt, Homo sapiens
  misc_RNA (1)...(19): siRNA sense strand
gaacaagcagacuuuaucu

SEQ ID NO: 2078502 - RNA, 19 nt, Homo sapiens
  misc_RNA (1)...(19): siRNA sense strand
ggagaugugcaauccauga

SEQ ID NO: 2078503 - RNA, 19 nt, Homo sapiens
  misc_RNA (1)...(19): siRNA sense strand
aaggaaugcugaaauaauc

SEQ ID NO: 2078504 - RNA, 19 nt, Homo sapiens
  misc_RNA (1)...(19): siRNA sense strand
caagcagacuuuaucuauc

SEQ ID NO: 2078505 - RNA, 19 nt, Homo sapiens
  misc_RNA (1)...(19): siRNA sense strand
acagugagacuuugggaua

SEQ ID NO: 2078506 - RNA, 19 nt, Homo sapiens
  misc_RNA (1)...(19): siRNA sense strand
gaugggacagugagacuuu

SEQ ID NO: 2078507 - RNA, 19 nt, Homo sapiens
  misc_RNA (1)...(19): siRNA sense strand
gacccagaacauacuauua

SEQ ID NO: 2078508 - RNA, 19 nt, Homo sapiens
  misc_RNA (1)...(19): siRNA sense strand
caugguggcuauuggaaug

SEQ ID NO: 2078509 - RNA, 19 nt, Homo sapiens
  misc_RNA (1)...(19): siRNA sense strand
ggucacaaucaacguauuu

SEQ ID NO: 2078510 - RNA, 19 nt, Homo sapiens
  misc_RNA (1)...(19): siRNA sense strand
caaugaacaagcagacuuu

SEQ ID NO: 2078511 - RNA, 19 nt, Homo sapiens
  misc_RNA (1)...(19): siRNA sense strand
caacugugccuguguaucu

SEQ ID NO: 2078512 - RNA, 19 nt, Homo sapiens
  misc_RNA (1)...(19): siRNA sense strand
gcuauaaacggcaugucua

SEQ ID NO: 2078513 - RNA, 19 nt, Homo sapiens
  misc_RNA (1)...(19): siRNA sense strand
gcagagcuggucacaauca

SEQ ID NO: 2078514 - RNA, 19 nt, Homo sapiens
  misc_RNA (1)...(19): siRNA sense strand
ggugaucgacauguuguua

SEQ ID NO: 2078515 - RNA, 19 nt, Homo sapiens
  misc_RNA (1)...(19): siRNA sense strand
agaaucagcuacugcaaag

SEQ ID NO: 2078516 - RNA, 19 nt, Homo sapiens
  misc_RNA (1)...(19): siRNA sense strand
cuacagcuccuucuauuca

SEQ ID NO: 2078517 - RNA, 19 nt, Homo sapiens
  misc_RNA (1)...(19): siRNA sense strand
acaagcagacuuuaucuau

SEQ ID NO: 2078518 - RNA, 19 nt, Homo sapiens
  misc_RNA (1)...(19): siRNA sense strand
gaucaugccgcuauugaca

SEQ ID NO: 2078519 - RNA, 19 nt, Homo sapiens
  misc_RNA (1)...(19): siRNA sense strand
gggaugcaaugaacaagca

SEQ ID NO: 2078520 - RNA, 19 nt, Homo sapiens
  misc_RNA (1)...(19): siRNA sense strand
uuugggauauugcugauaa

SEQ ID NO: 2078521 - RNA, 19 nt, Homo sapiens
  misc_RNA (1)...(19): siRNA sense strand
gcuauugacagaauuacuu

SEQ ID NO: 2078522 - RNA, 19 nt, Homo sapiens
  misc_RNA (1)...(19): siRNA sense strand
gacugcagcuuauuugucu

SEQ ID NO: 2078523 - RNA, 19 nt, Homo sapiens
  misc_RNA (1)...(19): siRNA sense strand
agauucagauacccaguuu

SEQ ID NO: 2078524 - RNA, 19 nt, Homo sapiens
  misc_RNA (1)...(19): siRNA sense strand
uggcaugguuaaguuauuu

SEQ ID NO: 2078525 - RNA, 19 nt, Homo sapiens
  misc_RNA (1)...(19): siRNA sense strand
ugucaacugugccugugua

SEQ ID NO: 2078526 - RNA, 19 nt, Homo sapiens
  misc_RNA (1)...(19): siRNA sense strand
gagaugagguuuugggaau

SEQ ID NO: 2078527 - RNA, 19 nt, Homo sapiens
  misc_RNA (1)...(19): siRNA sense strand
ucuaguggcugcuauaaac

SEQ ID NO: 2078528 - RNA, 19 nt, Homo sapiens
  misc_RNA (1)...(19): siRNA sense strand
ggacaugguggcuauugga

SEQ ID NO: 2078529 - RNA, 19 nt, Homo sapiens
  misc_RNA (1)...(19): siRNA sense strand
ugaaauaaucgaaguugga

SEQ ID NO: 2078530 - RNA, 19 nt, Homo sapiens
  misc_RNA (1)...(19): siRNA sense strand
uacauggacuaguauucua

SEQ ID NO: 2078531 - RNA, 19 nt, Homo sapiens
  misc_RNA (1)...(19): siRNA sense strand
auaaacggcaugucuauga

SEQ ID NO: 2078532 - RNA, 19 nt, Homo sapiens
  misc_RNA (1)...(19): siRNA sense strand
cuaagaugcuaccauucaa

SEQ ID NO: 2078533 - RNA, 19 nt, Homo sapiens
  misc_RNA (1)...(19): siRNA sense strand
cagacuuuaucuauccuaa

SEQ ID NO: 2078534 - RNA, 19 nt, Homo sapiens
  misc_RNA (1)...(19): siRNA sense strand
caugauaucagauuuaguc

SEQ ID NO: 2078535 - RNA, 19 nt, Homo sapiens
  misc_RNA (1)...(19): siRNA sense strand
ggaaaggccgucaaaagaa

SEQ ID NO: 2078536 - RNA, 19 nt, Homo sapiens
  misc_RNA (1)...(19): siRNA sense strand
gaugacugcagcuuauuug

SEQ ID NO: 2078537 - RNA, 19 nt, Homo sapiens
  misc_RNA (1)...(19): siRNA sense strand
ugggcuacauggacuagua

SEQ ID NO: 2078538 - RNA, 19 nt, Homo sapiens
  misc_RNA (1)...(19): siRNA sense strand
gcagaagaugggacaguga

SEQ ID NO: 2078539 - RNA, 19 nt, Homo sapiens
  misc_RNA (1)...(19): siRNA sense strand
gaaaggccgucaaaagaag

SEQ ID NO: 2078540 - RNA, 19 nt, Homo sapiens
  misc_RNA (1)...(19): siRNA sense strand
cagaaucagcuacugcaaa

SEQ ID NO: 2078541 - RNA, 19 nt, Homo sapiens
  misc_RNA (1)...(19): siRNA sense strand
caggagaugugcaauccau

SEQ ID NO: 2078542 - RNA, 19 nt, Homo sapiens
  misc_RNA (1)...(19): siRNA sense strand
ugaacaagcagacuuuauc

SEQ ID NO: 2078543 - RNA, 19 nt, Homo sapiens
  misc_RNA (1)...(19): siRNA sense strand
gugcaaauaacuugacguu

SEQ ID NO: 2078544 - RNA, 19 nt, Homo sapiens
  misc_RNA (1)...(19): siRNA sense strand
ccuaagaugcuaccauuca

SEQ ID NO: 2078545 - RNA, 19 nt, Homo sapiens
  misc_RNA (1)...(19): siRNA sense strand
ggccuguguuugccaugua

SEQ ID NO: 2078546 - RNA, 19 nt, Homo sapiens
  misc_RNA (1)...(19): siRNA sense strand
aaagaaggaggagcgguua

SEQ ID NO: 2078547 - RNA, 19 nt, Homo sapiens
  misc_RNA (1)...(19): siRNA sense strand
uaagaugcuaccauucaaa

SEQ ID NO: 2078548 - RNA, 19 nt, Homo sapiens
  misc_RNA (1)...(19): siRNA sense strand
gcagcuuauuugucuggaa

SEQ ID NO: 2078549 - RNA, 19 nt, Homo sapiens
  misc_RNA (1)...(19): siRNA sense strand
ugcaauccaugauaucaga

SEQ ID NO: 2078550 - RNA, 19 nt, Homo sapiens
  misc_RNA (1)...(19): siRNA sense strand
aaagugaauuugggacaug

SEQ ID NO: 2078551 - RNA, 19 nt, Homo sapiens
  misc_RNA (1)...(19): siRNA sense strand
ggacuagcaacacauccuu

SEQ ID NO: 2078552 - RNA, 19 nt, Homo sapiens
  misc_RNA (1)...(19): siRNA sense strand
ggaaaggaaaggccgucaa

SEQ ID NO: 2078553 - RNA, 19 nt, Homo sapiens
  misc_RNA (1)...(19): siRNA sense strand
gugagacuuugggauauug

SEQ ID NO: 2078554 - RNA, 19 nt, Homo sapiens
  misc_RNA (1)...(19): siRNA sense strand
gcugaaauaaucgaaguug

SEQ ID NO: 2078555 - RNA, 19 nt, Homo sapiens
  misc_RNA (1)...(19): siRNA sense strand
gacaggagaugugcaaucc

SEQ ID NO: 2078556 - RNA, 19 nt, Homo sapiens
  misc_RNA (1)...(19): siRNA sense strand
caaagggaguauguucagu

SEQ ID NO: 2078557 - RNA, 19 nt, Homo sapiens
  misc_RNA (1)...(19): siRNA sense strand
ugacuucccauguccagaa

SEQ ID NO: 2078558 - RNA, 19 nt, Homo sapiens
  misc_RNA (1)...(19): siRNA sense strand
uuacuagugaguucucuaa

SEQ ID NO: 2078559 - RNA, 19 nt, Homo sapiens
  misc_RNA (1)...(19): siRNA sense strand
ucagauacccaguuugucu

SEQ ID NO: 2078560 - RNA, 19 nt, Homo sapiens
  misc_RNA (1)...(19): siRNA sense strand
ucaugccgcuauugacaga

SEQ ID NO: 2078561 - RNA, 19 nt, Homo sapiens
  misc_RNA (1)...(19): siRNA sense strand
uaaucgaaguuggagagaa

SEQ ID NO: 2078562 - RNA, 19 nt, Homo sapiens
  misc_RNA (1)...(19): siRNA sense strand
acaaggaaugcugaaauaa

SEQ ID NO: 2078563 - RNA, 19 nt, Homo sapiens
  misc_RNA (1)...(19): siRNA sense strand
aacuugacguuuacaggua

SEQ ID NO: 2078564 - RNA, 19 nt, Homo sapiens
  misc_RNA (1)...(19): siRNA sense strand
caggacaagccacagauug

SEQ ID NO: 2078565 - RNA, 19 nt, Homo sapiens
  misc_RNA (1)...(19): siRNA sense strand
gagaugacuuuggcauggu

SEQ ID NO: 2078566 - RNA, 19 nt, Homo sapiens
  misc_RNA (1)...(19): siRNA sense strand
cagugagacuuugggauau

SEQ ID NO: 2078567 - RNA, 19 nt, Homo sapiens
  misc_RNA (1)...(19): siRNA sense strand
uaaaacaugugaaguucug

SEQ ID NO: 2078568 - RNA, 19 nt, Homo sapiens
  misc_RNA (1)...(19): siRNA sense strand
gacuucccauguccagaaa

SEQ ID NO: 2078569 - RNA, 19 nt, Homo sapiens
  misc_RNA (1)...(19): siRNA sense strand
aggaaucagucuuguuaca

SEQ ID NO: 2078570 - RNA, 19 nt, Homo sapiens
  misc_RNA (1)...(19): siRNA sense strand
ggacaugcugcucguacug

SEQ ID NO: 2078571 - RNA, 19 nt, Homo sapiens
  misc_RNA (1)...(19): siRNA sense strand
ggaggagcgguuaaacugu

SEQ ID NO: 2078572 - RNA, 19 nt, Homo sapiens
  misc_RNA (1)...(19): siRNA sense strand
gcaugguuaaguuauuuga

SEQ ID NO: 2078573 - RNA, 19 nt, Homo sapiens
  misc_RNA (1)...(19): siRNA sense strand
aagcagacuuuaucuaucc

SEQ ID NO: 2078574 - RNA, 19 nt, Homo sapiens
  misc_RNA (1)...(19): siRNA sense strand
gaaaggcgcuucuugcauu

SEQ ID NO: 2078575 - RNA, 19 nt, Homo sapiens
  misc_RNA (1)...(19): siRNA sense strand
ggaagaagcccuguuguua

SEQ ID NO: 2078576 - RNA, 19 nt, Homo sapiens
  misc_RNA (1)...(19): siRNA sense strand
uaaagaagcucugaacauu

SEQ ID NO: 2078577 - RNA, 19 nt, Homo sapiens
  misc_RNA (1)...(19): siRNA sense strand
ggaaggugauuauaaagaa

SEQ ID NO: 2078578 - RNA, 19 nt, Homo sapiens
  misc_RNA (1)...(19): siRNA sense strand
aagaagcucugaacauuua

SEQ ID NO: 2078579 - RNA, 19 nt, Homo sapiens
  misc_RNA (1)...(19): siRNA sense strand
ggaagaggcugaaaaguuu

SEQ ID NO: 2078580 - RNA, 19 nt, Homo sapiens
  misc_RNA (1)...(19): siRNA sense strand
gagggaaccuuaagucaga

SEQ ID NO: 2078581 - RNA, 19 nt, Homo sapiens
  misc_RNA (1)...(19): siRNA sense strand
gaaacaagaacgacucaaa

SEQ ID NO: 2078582 - RNA, 19 nt, Homo sapiens
  misc_RNA (1)...(19): siRNA sense strand
gacgacagcuuaauacaau

SEQ ID NO: 2078583 - RNA, 19 nt, Homo sapiens
  misc_RNA (1)...(19): siRNA sense strand
gaagaggccuuagccauca

SEQ ID NO: 2078584 - RNA, 19 nt, Homo sapiens
  misc_RNA (1)...(19): siRNA sense strand
ggacaucgcacuccuguau

SEQ ID NO: 2078585 - RNA, 19 nt, Homo sapiens
  misc_RNA (1)...(19): siRNA sense strand
gagcccauguccucuauuu

SEQ ID NO: 2078586 - RNA, 19 nt, Homo sapiens
  misc_RNA (1)...(19): siRNA sense strand
gaagaagcccuguuguuau

SEQ ID NO: 2078587 - RNA, 19 nt, Homo sapiens
  misc_RNA (1)...(19): siRNA sense strand
gggagcagccucuuagaua

SEQ ID NO: 2078588 - RNA, 19 nt, Homo sapiens
  misc_RNA (1)...(19): siRNA sense strand
cuacaagaauccaaucuga

SEQ ID NO: 2078589 - RNA, 19 nt, Homo sapiens
  misc_RNA (1)...(19): siRNA sense strand
caaguugaauuauguggaa

SEQ ID NO: 2078590 - RNA, 19 nt, Homo sapiens
  misc_RNA (1)...(19): siRNA sense strand
gaagcauacuuucaugguu

SEQ ID NO: 2078591 - RNA, 19 nt, Homo sapiens
  misc_RNA (1)...(19): siRNA sense strand
gaagaagaggccaguauga

SEQ ID NO: 2078592 - RNA, 19 nt, Homo sapiens
  misc_RNA (1)...(19): siRNA sense strand
ggacgauccucuccgcaaa

SEQ ID NO: 2078593 - RNA, 19 nt, Homo sapiens
  misc_RNA (1)...(19): siRNA sense strand
gaaagagccaugaaguuug

SEQ ID NO: 2078594 - RNA, 19 nt, Homo sapiens
  misc_RNA (1)...(19): siRNA sense strand
gugcaucuguggucuauga

SEQ ID NO: 2078595 - RNA, 19 nt, Homo sapiens
  misc_RNA (1)...(19): siRNA sense strand
gaaguuugccuuugaggaa

SEQ ID NO: 2078596 - RNA, 19 nt, Homo sapiens
  misc_RNA (1)...(19): siRNA sense strand
agucgaagcuggagcagua

SEQ ID NO: 2078597 - RNA, 19 nt, Homo sapiens
  misc_RNA (1)...(19): siRNA sense strand
aagaagcccuguuguuauu

SEQ ID NO: 2078598 - RNA, 19 nt, Homo sapiens
  misc_RNA (1)...(19): siRNA sense strand
ccaugcagcugaagucuau

SEQ ID NO: 2078599 - RNA, 19 nt, Homo sapiens
  misc_RNA (1)...(19): siRNA sense strand
uggagaagcugccuauuuc

SEQ ID NO: 2078600 - RNA, 19 nt, Homo sapiens
  misc_RNA (1)...(19): siRNA sense strand
gcaaaggagcaaacacaaa

SEQ ID NO: 2078601 - RNA, 19 nt, Homo sapiens
  misc_RNA (1)...(19): siRNA sense strand
ccaugaaguuugccuuuga

SEQ ID NO: 2078602 - RNA, 19 nt, Homo sapiens
  misc_RNA (1)...(19): siRNA sense strand
aagcauacuuucaugguuu

SEQ ID NO: 2078603 - RNA, 19 nt, Homo sapiens
  misc_RNA (1)...(19): siRNA sense strand
ggagcagccucuuagauag

SEQ ID NO: 2078604 - RNA, 19 nt, Homo sapiens
  misc_RNA (1)...(19): siRNA sense strand
uguggaaggugauuauaaa

SEQ ID NO: 2078605 - RNA, 19 nt, Homo sapiens
  misc_RNA (1)...(19): siRNA sense strand
ggaugacgcuggcacagau

SEQ ID NO: 2078606 - RNA, 19 nt, Homo sapiens
  misc_RNA (1)...(19): siRNA sense strand
gacagacgacagcuuaaua

SEQ ID NO: 2078607 - RNA, 19 nt, Homo sapiens
  misc_RNA (1)...(19): siRNA sense strand
agaaagagccaugaaguuu

SEQ ID NO: 2078608 - RNA, 19 nt, Homo sapiens
  misc_RNA (1)...(19): siRNA sense strand
caucaccuguuaugagaaa

SEQ ID NO: 2078609 - RNA, 19 nt, Homo sapiens
  misc_RNA (1)...(19): siRNA sense strand
caagaggagucggaagauu

SEQ ID NO: 2078610 - RNA, 19 nt, Homo sapiens
  misc_RNA (1)...(19): siRNA sense strand
gcaacucuccagaagcaua

SEQ ID NO: 2078611 - RNA, 19 nt, Homo sapiens
  misc_RNA (1)...(19): siRNA sense strand
ggaagaagaggccaguaug

SEQ ID NO: 2078612 - RNA, 19 nt, Homo sapiens
  misc_RNA (1)...(19): siRNA sense strand
ccucuuagauagaaccauu

SEQ ID NO: 2078613 - RNA, 19 nt, Homo sapiens
  misc_RNA (1)...(19): siRNA sense strand
gauagaaaggguaauacuu

SEQ ID NO: 2078614 - RNA, 19 nt, Homo sapiens
  misc_RNA (1)...(19): siRNA sense strand
gccaaccucuucccaaugu

SEQ ID NO: 2078615 - RNA, 19 nt, Homo sapiens
  misc_RNA (1)...(19): siRNA sense strand
gaagaggccaguaugagau

SEQ ID NO: 2078616 - RNA, 19 nt, Homo sapiens
  misc_RNA (1)...(19): siRNA sense strand
gaaggugauuauaaagaag

SEQ ID NO: 2078617 - RNA, 19 nt, Homo sapiens
  misc_RNA (1)...(19): siRNA sense strand
caagagauagaaaggguaa

SEQ ID NO: 2078618 - RNA, 19 nt, Homo sapiens
  misc_RNA (1)...(19): siRNA sense strand
cagagcaguugaaacaaga

SEQ ID NO: 2078619 - RNA, 19 nt, Homo sapiens
  misc_RNA (1)...(19): siRNA sense strand
ugucagcacagaagcauua

SEQ ID NO: 2078620 - RNA, 19 nt, Homo sapiens
  misc_RNA (1)...(19): siRNA sense strand
gcuacagucuggcggagaa

SEQ ID NO: 2078621 - RNA, 19 nt, Homo sapiens
  misc_RNA (1)...(19): siRNA sense strand
ccagaagcauacuuucaug

SEQ ID NO: 2078622 - RNA, 19 nt, Homo sapiens
  misc_RNA (1)...(19): siRNA sense strand
cacagaagcauuaccauga

SEQ ID NO: 2078623 - RNA, 19 nt, Homo sapiens
  misc_RNA (1)...(19): siRNA sense strand
gacaagaggagucggaaga

SEQ ID NO: 2078624 - RNA, 19 nt, Homo sapiens
  misc_RNA (1)...(19): siRNA sense strand
aguaugagaugcugucaga

SEQ ID NO: 2078625 - RNA, 19 nt, Homo sapiens
  misc_RNA (1)...(19): siRNA sense strand
uguuauugcugauuaguga

SEQ ID NO: 2078626 - RNA, 19 nt, Homo sapiens
  misc_RNA (1)...(19): siRNA sense strand
gaucauggccaaguugaau

SEQ ID NO: 2078627 - RNA, 19 nt, Homo sapiens
  misc_RNA (1)...(19): siRNA sense strand
aggcacugcugacuuguaa

SEQ ID NO: 2078628 - RNA, 19 nt, Homo sapiens
  misc_RNA (1)...(19): siRNA sense strand
agaggagucggaagauuua

SEQ ID NO: 2078629 - RNA, 19 nt, Homo sapiens
  misc_RNA (1)...(19): siRNA sense strand
aaagaagcucugaacauuu

SEQ ID NO: 2078630 - RNA, 19 nt, Homo sapiens
  misc_RNA (1)...(19): siRNA sense strand
gagagcccgugucuacuca

SEQ ID NO: 2078631 - RNA, 19 nt, Homo sapiens
  misc_RNA (1)...(19): siRNA sense strand
gagugcaucuguggucuau

SEQ ID NO: 2078632 - RNA, 19 nt, Homo sapiens
  misc_RNA (1)...(19): siRNA sense strand
ccgugaaggugcugaaaga

SEQ ID NO: 2078633 - RNA, 19 nt, Homo sapiens
  misc_RNA (1)...(19): siRNA sense strand
agagauagaaaggguaaua

SEQ ID NO: 2078634 - RNA, 19 nt, Homo sapiens
  misc_RNA (1)...(19): siRNA sense strand
gaaccuuaagucagaauuc

SEQ ID NO: 2078635 - RNA, 19 nt, Homo sapiens
  misc_RNA (1)...(19): siRNA sense strand
caaggccaaaggcuacuua

SEQ ID NO: 2078636 - RNA, 19 nt, Homo sapiens
  misc_RNA (1)...(19): siRNA sense strand
ucagagcaguugaaacaag

SEQ ID NO: 2078637 - RNA, 19 nt, Homo sapiens
  misc_RNA (1)...(19): siRNA sense strand
ucucagagcaguugaaaca

SEQ ID NO: 2078638 - RNA, 19 nt, Homo sapiens
  misc_RNA (1)...(19): siRNA sense strand
agucagaauuccuacaaga

SEQ ID NO: 2078639 - RNA, 19 nt, Homo sapiens
  misc_RNA (1)...(19): siRNA sense strand
gagcagccucuuagauaga

SEQ ID NO: 2078640 - RNA, 19 nt, Homo sapiens
  misc_RNA (1)...(19): siRNA sense strand
gcccauguccucuauuuca

SEQ ID NO: 2078641 - RNA, 19 nt, Homo sapiens
  misc_RNA (1)...(19): siRNA sense strand
aagaggagucggaagauuu

SEQ ID NO: 2078642 - RNA, 19 nt, Homo sapiens
  misc_RNA (1)...(19): siRNA sense strand
uggccaaguugaauuaugu

SEQ ID NO: 2078643 - RNA, 19 nt, Homo sapiens
  misc_RNA (1)...(19): siRNA sense strand
gugaauacccagaaaauuu

SEQ ID NO: 2078644 - RNA, 19 nt, Homo sapiens
  misc_RNA (1)...(19): siRNA sense strand
aaaggcgcuucuugcauuu

SEQ ID NO: 2078645 - RNA, 19 nt, Homo sapiens
  misc_RNA (1)...(19): siRNA sense strand
ugacugagguccgcaagca

SEQ ID NO: 2078646 - RNA, 19 nt, Homo sapiens
  misc_RNA (1)...(19): siRNA sense strand
uagaaagagccaugaaguu

SEQ ID NO: 2078647 - RNA, 19 nt, Homo sapiens
  misc_RNA (1)...(19): siRNA sense strand
uaagucagaauuccuacaa

SEQ ID NO: 2078648 - RNA, 19 nt, Homo sapiens
  misc_RNA (1)...(19): siRNA sense strand
acauggcccugagugaaua

SEQ ID NO: 2078649 - RNA, 19 nt, Homo sapiens
  misc_RNA (1)...(19): siRNA sense strand
cgacauggcccugagugaa

SEQ ID NO: 2078650 - RNA, 19 nt, Homo sapiens
  misc_RNA (1)...(19): siRNA sense strand
gccaugaaguuugccuuug

SEQ ID NO: 2078651 - RNA, 19 nt, Homo sapiens
  misc_RNA (1)...(19): siRNA sense strand
caucuguggucuaugacuu

SEQ ID NO: 2078652 - RNA, 19 nt, Homo sapiens
  misc_RNA (1)...(19): siRNA sense strand
caaaggagcaaacacaaaa

SEQ ID NO: 2078653 - RNA, 19 nt, Homo sapiens
  misc_RNA (1)...(19): siRNA sense strand
ucauggccaaguugaauua

SEQ ID NO: 2078654 - RNA, 19 nt, Homo sapiens
  misc_RNA (1)...(19): siRNA sense strand
ucccugagcucgucaagca

SEQ ID NO: 2078655 - RNA, 19 nt, Homo sapiens
  misc_RNA (1)...(19): siRNA sense strand
acgaggcacugcugacuug

SEQ ID NO: 2078656 - RNA, 19 nt, Homo sapiens
  misc_RNA (1)...(19): siRNA sense strand
aaagagccaugaaguuugc

SEQ ID NO: 2078657 - RNA, 19 nt, Homo sapiens
  misc_RNA (1)...(19): siRNA sense strand
gcagaagccuacgcuacca

SEQ ID NO: 2078658 - RNA, 19 nt, Homo sapiens
  misc_RNA (1)...(19): siRNA sense strand
agaaacaggacuucagaga

SEQ ID NO: 2078659 - RNA, 19 nt, Homo sapiens
  misc_RNA (1)...(19): siRNA sense strand
gccgugcccuucaccauca

SEQ ID NO: 2078660 - RNA, 19 nt, Homo sapiens
  misc_RNA (1)...(19): siRNA sense strand
caauuacuuugccagacuu

SEQ ID NO: 2078661 - RNA, 19 nt, Homo sapiens
  misc_RNA (1)...(19): siRNA sense strand
gacauggcccugagugaau

SEQ ID NO: 2078662 - RNA, 19 nt, Homo sapiens
  misc_RNA (1)...(19): siRNA sense strand
gcaggccacugacgcuucu

SEQ ID NO: 2078663 - RNA, 19 nt, Homo sapiens
  misc_RNA (1)...(19): siRNA sense strand
agaagaggccaguaugaga

SEQ ID NO: 2078664 - RNA, 19 nt, Homo sapiens
  misc_RNA (1)...(19): siRNA sense strand
gauagaaccauugcugaca

SEQ ID NO: 2078665 - RNA, 19 nt, Homo sapiens
  misc_RNA (1)...(19): siRNA sense strand
acaagaauccaaucugauc

SEQ ID NO: 2078666 - RNA, 19 nt, Homo sapiens
  misc_RNA (1)...(19): siRNA sense strand
ccaugacgcucugaacauc

SEQ ID NO: 2078667 - RNA, 19 nt, Homo sapiens
  misc_RNA (1)...(19): siRNA sense strand
ccaaaacugucguugaugu

SEQ ID NO: 2078668 - RNA, 19 nt, Homo sapiens
  misc_RNA (1)...(19): siRNA sense strand
gaagcccuguuguuauugc

SEQ ID NO: 2078669 - RNA, 19 nt, Homo sapiens
  misc_RNA (1)...(19): siRNA sense strand
gagcuucucagagcaguug

SEQ ID NO: 2078670 - RNA, 19 nt, Homo sapiens
  misc_RNA (1)...(19): siRNA sense strand
cggaagaagcccuguuguu

SEQ ID NO: 2078671 - RNA, 19 nt, Homo sapiens
  misc_RNA (1)...(19): siRNA sense strand
aggcaacucuccagaagca

SEQ ID NO: 2078672 - RNA, 19 nt, Homo sapiens
  misc_RNA (1)...(19): siRNA sense strand
acaggcaacucuccagaag

SEQ ID NO: 2078673 - RNA, 19 nt, Homo sapiens
  misc_RNA (1)...(19): siRNA sense strand
uaccugaacacaagaguga

SEQ ID NO: 2078674 - RNA, 19 nt, Homo sapiens
  misc_RNA (1)...(19): siRNA sense strand
gaacgaaucugcccaccuu

SEQ ID NO: 2078675 - RNA, 19 nt, Homo sapiens
  misc_RNA (1)...(19): siRNA sense strand
gagccuaaaucgccaguua

SEQ ID NO: 2078676 - RNA, 19 nt, Homo sapiens
  misc_RNA (1)...(19): siRNA sense strand
ggcaggagcuggaggauaa

SEQ ID NO: 2078677 - RNA, 19 nt, Homo sapiens
  misc_RNA (1)...(19): siRNA sense strand
ggaagucguuuguguuuga

SEQ ID NO: 2078678 - RNA, 19 nt, Homo sapiens
  misc_RNA (1)...(19): siRNA sense strand
ggaaagaggaguucauuga

SEQ ID NO: 2078679 - RNA, 19 nt, Homo sapiens
  misc_RNA (1)...(19): siRNA sense strand
caaaucaacgcaucaauaa

SEQ ID NO: 2078680 - RNA, 19 nt, Homo sapiens
  misc_RNA (1)...(19): siRNA sense strand
caaauuaaaugccuuacga

SEQ ID NO: 2078681 - RNA, 19 nt, Homo sapiens
  misc_RNA (1)...(19): siRNA sense strand
ugaaggagcuggagaagga

SEQ ID NO: 2078682 - RNA, 19 nt, Homo sapiens
  misc_RNA (1)...(19): siRNA sense strand
gggaugaccugcugaguga

SEQ ID NO: 2078683 - RNA, 19 nt, Homo sapiens
  misc_RNA (1)...(19): siRNA sense strand
gcaagaagauugaaaaguu

SEQ ID NO: 2078684 - RNA, 19 nt, Homo sapiens
  misc_RNA (1)...(19): siRNA sense strand
gcaccaagcuggcacagau

SEQ ID NO: 2078685 - RNA, 19 nt, Homo sapiens
  misc_RNA (1)...(19): siRNA sense strand
ugagaaacauuaagaccua

SEQ ID NO: 2078686 - RNA, 19 nt, Homo sapiens
  misc_RNA (1)...(19): siRNA sense strand
ggaagucucuggacaccuu

SEQ ID NO: 2078687 - RNA, 19 nt, Homo sapiens
  misc_RNA (1)...(19): siRNA sense strand
gugaggagcugaucagaga

SEQ ID NO: 2078688 - RNA, 19 nt, Homo sapiens
  misc_RNA (1)...(19): siRNA sense strand
gaagagaaagcgagccuaa

SEQ ID NO: 2078689 - RNA, 19 nt, Homo sapiens
  misc_RNA (1)...(19): siRNA sense strand
ugaaagacguggagaagga

SEQ ID NO: 2078690 - RNA, 19 nt, Homo sapiens
  misc_RNA (1)...(19): siRNA sense strand
caaauuaugcugcaaauag

SEQ ID NO: 2078691 - RNA, 19 nt, Homo sapiens
  misc_RNA (1)...(19): siRNA sense strand
agcaacagcucaccucuua

SEQ ID NO: 2078692 - RNA, 19 nt, Homo sapiens
  misc_RNA (1)...(19): siRNA sense strand
ggaagagcauggaggaaau

SEQ ID NO: 2078693 - RNA, 19 nt, Homo sapiens
  misc_RNA (1)...(19): siRNA sense strand
guaaugaauuugcccaaug

SEQ ID NO: 2078694 - RNA, 19 nt, Homo sapiens
  misc_RNA (1)...(19): siRNA sense strand
auaagaagcugcuggagaa

SEQ ID NO: 2078695 - RNA, 19 nt, Homo sapiens
  misc_RNA (1)...(19): siRNA sense strand
aaacaacacuagccaugaa

SEQ ID NO: 2078696 - RNA, 19 nt, Homo sapiens
  misc_RNA (1)...(19): siRNA sense strand
gcacagaagcagagcauga

SEQ ID NO: 2078697 - RNA, 19 nt, Homo sapiens
  misc_RNA (1)...(19): siRNA sense strand
gcucaccucuuaaccuaaa

SEQ ID NO: 2078698 - RNA, 19 nt, Homo sapiens
  misc_RNA (1)...(19): siRNA sense strand
gcaguacauagacaaauua

SEQ ID NO: 2078699 - RNA, 19 nt, Homo sapiens
  misc_RNA (1)...(19): siRNA sense strand
ggagacagccaccgagaaa

SEQ ID NO: 2078700 - RNA, 19 nt, Homo sapiens
  misc_RNA (1)...(19): siRNA sense strand
gaagaagaaccacuggauu

SEQ ID NO: 2078701 - RNA, 19 nt, Homo sapiens
  misc_RNA (1)...(19): siRNA sense strand
ggacacagauaagaaacga

SEQ ID NO: 2078702 - RNA, 19 nt, Homo sapiens
  misc_RNA (1)...(19): siRNA sense strand
cagcucaccucuuaaccua

SEQ ID NO: 2078703 - RNA, 19 nt, Homo sapiens
  misc_RNA (1)...(19): siRNA sense strand
gaacguggaucugcucaag

SEQ ID NO: 2078704 - RNA, 19 nt, Homo sapiens
  misc_RNA (1)...(19): siRNA sense strand
aaacccagcuggagagaga

SEQ ID NO: 2078705 - RNA, 19 nt, Homo sapiens
  misc_RNA (1)...(19): siRNA sense strand
caagaugcccaccaacuuu

SEQ ID NO: 2078706 - RNA, 19 nt, Homo sapiens
  misc_RNA (1)...(19): siRNA sense strand
acaaaucaacgcaucaaua

SEQ ID NO: 2078707 - RNA, 19 nt, Homo sapiens
  misc_RNA (1)...(19): siRNA sense strand
gagcugagagaagauaaua

SEQ ID NO: 2078708 - RNA, 19 nt, Homo sapiens
  misc_RNA (1)...(19): siRNA sense strand
ucaauaagcacgucaacaa

SEQ ID NO: 2078709 - RNA, 19 nt, Homo sapiens
  misc_RNA (1)...(19): siRNA sense strand
uggagugggugaaguuuaa

SEQ ID NO: 2078710 - RNA, 19 nt, Homo sapiens
  misc_RNA (1)...(19): siRNA sense strand
caauacaaguucuaugauc

SEQ ID NO: 2078711 - RNA, 19 nt, Homo sapiens
  misc_RNA (1)...(19): siRNA sense strand
ucaaggcgcugggcaagaa

SEQ ID NO: 2078712 - RNA, 19 nt, Homo sapiens
  misc_RNA (1)...(19): siRNA sense strand
gaugugaaccuucgcauuc

SEQ ID NO: 2078713 - RNA, 19 nt, Homo sapiens
  misc_RNA (1)...(19): siRNA sense strand
caaggacacugacaacucu

SEQ ID NO: 2078714 - RNA, 19 nt, Homo sapiens
  misc_RNA (1)...(19): siRNA sense strand
caacaaugaugugaaccuu

SEQ ID NO: 2078715 - RNA, 19 nt, Homo sapiens
  misc_RNA (1)...(19): siRNA sense strand
aagcacagauggaagagaa

SEQ ID NO: 2078716 - RNA, 19 nt, Homo sapiens
  misc_RNA (1)...(19): siRNA sense strand
acaaggagcaguaccauga

SEQ ID NO: 2078717 - RNA, 19 nt, Homo sapiens
  misc_RNA (1)...(19): siRNA sense strand
auaagcacgucaacaauga

SEQ ID NO: 2078718 - RNA, 19 nt, Homo sapiens
  misc_RNA (1)...(19): siRNA sense strand
cgagggagcgucucaaaga

SEQ ID NO: 2078719 - RNA, 19 nt, Homo sapiens
  misc_RNA (1)...(19): siRNA sense strand
aaacaugguccuugagauu

SEQ ID NO: 2078720 - RNA, 19 nt, Homo sapiens
  misc_RNA (1)...(19): siRNA sense strand
caaccaagagaacguguuu

SEQ ID NO: 2078721 - RNA, 19 nt, Homo sapiens
  misc_RNA (1)...(19): siRNA sense strand
uaaugaauuugcccaaugu

SEQ ID NO: 2078722 - RNA, 19 nt, Homo sapiens
  misc_RNA (1)...(19): siRNA sense strand
gaugcagucuuggacgaua

SEQ ID NO: 2078723 - RNA, 19 nt, Homo sapiens
  misc_RNA (1)...(19): siRNA sense strand
ugaccaagcuggacaacca

SEQ ID NO: 2078724 - RNA, 19 nt, Homo sapiens
  misc_RNA (1)...(19): siRNA sense strand
caaaggcuauaacucagau

SEQ ID NO: 2078725 - RNA, 19 nt, Homo sapiens
  misc_RNA (1)...(19): siRNA sense strand
gggcugugcuguccagugu

SEQ ID NO: 2078726 - RNA, 19 nt, Homo sapiens
  misc_RNA (1)...(19): siRNA sense strand
aaucauggaucaauacaag

SEQ ID NO: 2078727 - RNA, 19 nt, Homo sapiens
  misc_RNA (1)...(19): siRNA sense strand
gcacagcugccuaaagaca

SEQ ID NO: 2078728 - RNA, 19 nt, Homo sapiens
  misc_RNA (1)...(19): siRNA sense strand
aggacaaccugacuaugua

SEQ ID NO: 2078729 - RNA, 19 nt, Homo sapiens
  misc_RNA (1)...(19): siRNA sense strand
gaaacauuaagaccuacua

SEQ ID NO: 2078730 - RNA, 19 nt, Homo sapiens
  misc_RNA (1)...(19): siRNA sense strand
gccagcagcucagcaguga

SEQ ID NO: 2078731 - RNA, 19 nt, Homo sapiens
  misc_RNA (1)...(19): siRNA sense strand
gagagcagcagccacaaga

SEQ ID NO: 2078732 - RNA, 19 nt, Homo sapiens
  misc_RNA (1)...(19): siRNA sense strand
uugaggagcugcuggaaga

SEQ ID NO: 2078733 - RNA, 19 nt, Homo sapiens
  misc_RNA (1)...(19): siRNA sense strand
gaggaaagaggaguucauu

SEQ ID NO: 2078734 - RNA, 19 nt, Homo sapiens
  misc_RNA (1)...(19): siRNA sense strand
gggaagagcauggaggaaa

SEQ ID NO: 2078735 - RNA, 19 nt, Homo sapiens
  misc_RNA (1)...(19): siRNA sense strand
gagcagaagcaguacauag

SEQ ID NO: 2078736 - RNA, 19 nt, Homo sapiens
  misc_RNA (1)...(19): siRNA sense strand
gggcagcacuugcagaacu

SEQ ID NO: 2078737 - RNA, 19 nt, Homo sapiens
  misc_RNA (1)...(19): siRNA sense strand
cgauagcacugccaaacug

SEQ ID NO: 2078738 - RNA, 19 nt, Homo sapiens
  misc_RNA (1)...(19): siRNA sense strand
ggucgcaggucagcaguga

SEQ ID NO: 2078739 - RNA, 19 nt, Homo sapiens
  misc_RNA (1)...(19): siRNA sense strand
aggagcagcugcagaguga

SEQ ID NO: 2078740 - RNA, 19 nt, Homo sapiens
  misc_RNA (1)...(19): siRNA sense strand
gcugugcuguccaguguga

SEQ ID NO: 2078741 - RNA, 19 nt, Homo sapiens
  misc_RNA (1)...(19): siRNA sense strand
gcagcugauuguaaugaau

SEQ ID NO: 2078742 - RNA, 19 nt, Homo sapiens
  misc_RNA (1)...(19): siRNA sense strand
guacguaaagccaaacuuc

SEQ ID NO: 2078743 - RNA, 19 nt, Homo sapiens
  misc_RNA (1)...(19): siRNA sense strand
agaaacacauccagcaaca

SEQ ID NO: 2078744 - RNA, 19 nt, Homo sapiens
  misc_RNA (1)...(19): siRNA sense strand
caccaaaggcuauaacuca

SEQ ID NO: 2078745 - RNA, 19 nt, Homo sapiens
  misc_RNA (1)...(19): siRNA sense strand
aggaaaagcuggaagaaaa

SEQ ID NO: 2078746 - RNA, 19 nt, Homo sapiens
  misc_RNA (1)...(19): siRNA sense strand
uuaaaugccuuacgaagac

SEQ ID NO: 2078747 - RNA, 19 nt, Homo sapiens
  misc_RNA (1)...(19): siRNA sense strand
gaaccaaauuaugcugcaa

SEQ ID NO: 2078748 - RNA, 19 nt, Homo sapiens
  misc_RNA (1)...(19): siRNA sense strand
uguuugagcugaacgaaug

SEQ ID NO: 2078749 - RNA, 19 nt, Homo sapiens
  misc_RNA (1)...(19): siRNA sense strand
caggaagucguuuguguuu

SEQ ID NO: 2078750 - RNA, 19 nt, Homo sapiens
  misc_RNA (1)...(19): siRNA sense strand
aggaggagcugaggaagaa

SEQ ID NO: 2078751 - RNA, 19 nt, Homo sapiens
  misc_RNA (1)...(19): siRNA sense strand
ucaaacucaucaaaccaaa

SEQ ID NO: 2078752 - RNA, 19 nt, Homo sapiens
  misc_RNA (1)...(19): siRNA sense strand
gaagcaguacauagacaaa

SEQ ID NO: 2078753 - RNA, 19 nt, Homo sapiens
  misc_RNA (1)...(19): siRNA sense strand
gagcuggagcggaauaaug

SEQ ID NO: 2078754 - RNA, 19 nt, Homo sapiens
  misc_RNA (1)...(19): siRNA sense strand
gcaaggacacugacaacuc

SEQ ID NO: 2078755 - RNA, 19 nt, Homo sapiens
  misc_RNA (1)...(19): siRNA sense strand
gcauggaggaaaucaagaa

SEQ ID NO: 2078756 - RNA, 19 nt, Homo sapiens
  misc_RNA (1)...(19): siRNA sense strand
ggcaguacguaaagccaaa

SEQ ID NO: 2078757 - RNA, 19 nt, Homo sapiens
  misc_RNA (1)...(19): siRNA sense strand
uuagagagcaguagaaaca

SEQ ID NO: 2078758 - RNA, 19 nt, Homo sapiens
  misc_RNA (1)...(19): siRNA sense strand
agccaaagccuuagucaaa

SEQ ID NO: 2078759 - RNA, 19 nt, Homo sapiens
  misc_RNA (1)...(19): siRNA sense strand
ccaaggagacggagaacga

SEQ ID NO: 2078760 - RNA, 19 nt, Homo sapiens
  misc_RNA (1)...(19): siRNA sense strand
gcucuuagaagcacagaug

SEQ ID NO: 2078761 - RNA, 19 nt, Homo sapiens
  misc_RNA (1)...(19): siRNA sense strand
gaacgugucccugcagcuu

SEQ ID NO: 2078762 - RNA, 19 nt, Homo sapiens
  misc_RNA (1)...(19): siRNA sense strand
caaccugacuauguacaug

SEQ ID NO: 2078763 - RNA, 19 nt, Homo sapiens
  misc_RNA (1)...(19): siRNA sense strand
ggagaggcacggugacaug

SEQ ID NO: 2078764 - RNA, 19 nt, Homo sapiens
  misc_RNA (1)...(19): siRNA sense strand
gaaaggcccuggggaucua

SEQ ID NO: 2078765 - RNA, 19 nt, Homo sapiens
  misc_RNA (1)...(19): siRNA sense strand
aagaagaaccacuggauug

SEQ ID NO: 2078766 - RNA, 19 nt, Homo sapiens
  misc_RNA (1)...(19): siRNA sense strand
ggaagacagccgccaguca

SEQ ID NO: 2078767 - RNA, 19 nt, Homo sapiens
  misc_RNA (1)...(19): siRNA sense strand
gagcauggaggaaaucaag

SEQ ID NO: 2078768 - RNA, 19 nt, Homo sapiens
  misc_RNA (1)...(19): siRNA sense strand
ccaagaugcccaccaacuu

SEQ ID NO: 2078769 - RNA, 19 nt, Homo sapiens
  misc_RNA (1)...(19): siRNA sense strand
ccaccgaucuggccaugag

SEQ ID NO: 2078770 - RNA, 19 nt, Homo sapiens
  misc_RNA (1)...(19): siRNA sense strand
agagaaagcgagccuaaau

SEQ ID NO: 2078771 - RNA, 19 nt, Homo sapiens
  misc_RNA (1)...(19): siRNA sense strand
caacacuagccaugaaaga

SEQ ID NO: 2078772 - RNA, 19 nt, Homo sapiens
  misc_RNA (1)...(19): siRNA sense strand
ucgaggcccuggagcauga

SEQ ID NO: 2078773 - RNA, 19 nt, Homo sapiens
  misc_RNA (1)...(19): siRNA sense strand
aaacucaucaaaccaaaga

SEQ ID NO: 2078774 - RNA, 19 nt, Homo sapiens
  misc_RNA (1)...(19): siRNA sense strand
uacaagagcugaucccaaa

SEQ ID NO: 2078775 - RNA, 19 nt, Homo sapiens
  misc_RNA (1)...(19): siRNA sense strand
ggagugggauuguaucugu

SEQ ID NO: 2078776 - RNA, 19 nt, Homo sapiens
  misc_RNA (1)...(19): siRNA sense strand
gcacagagcauggagaaug

SEQ ID NO: 2078777 - RNA, 19 nt, Homo sapiens
  misc_RNA (1)...(19): siRNA sense strand
ccuauaugcuuggcaguua

SEQ ID NO: 2078778 - RNA, 19 nt, Homo sapiens
  misc_RNA (1)...(19): siRNA sense strand
caaagccacccgauuauuc

SEQ ID NO: 2078779 - RNA, 19 nt, Homo sapiens
  misc_RNA (1)...(19): siRNA sense strand
guaccuuacuuacagaugu

SEQ ID NO: 2078780 - RNA, 19 nt, Homo sapiens
  misc_RNA (1)...(19): siRNA sense strand
ugccaaagccacccgauua

SEQ ID NO: 2078781 - RNA, 19 nt, Homo sapiens
  misc_RNA (1)...(19): siRNA sense strand
cacagagcauggagaauga

SEQ ID NO: 2078782 - RNA, 19 nt, Homo sapiens
  misc_RNA (1)...(19): siRNA sense strand
ggauuggagugggauugua

SEQ ID NO: 2078783 - RNA, 19 nt, Homo sapiens
  misc_RNA (1)...(19): siRNA sense strand
gagcauggagaaugaugaa

SEQ ID NO: 2078784 - RNA, 19 nt, Homo sapiens
  misc_RNA (1)...(19): siRNA sense strand
cauggagaaugaugaacuu

SEQ ID NO: 2078785 - RNA, 19 nt, Homo sapiens
  misc_RNA (1)...(19): siRNA sense strand
gcuacuguaucaucccuau

SEQ ID NO: 2078786 - RNA, 19 nt, Homo sapiens
  misc_RNA (1)...(19): siRNA sense strand
uacaacugauugacacgua

SEQ ID NO: 2078787 - RNA, 19 nt, Homo sapiens
  misc_RNA (1)...(19): siRNA sense strand
gaaaucagugagacuuaca

SEQ ID NO: 2078788 - RNA, 19 nt, Homo sapiens
  misc_RNA (1)...(19): siRNA sense strand
ggaaccacauggacacacu

SEQ ID NO: 2078789 - RNA, 19 nt, Homo sapiens
  misc_RNA (1)...(19): siRNA sense strand
gcaaucgccaccaggcauu

SEQ ID NO: 2078790 - RNA, 19 nt, Homo sapiens
  misc_RNA (1)...(19): siRNA sense strand
acaacugauugacacguaa

SEQ ID NO: 2078791 - RNA, 19 nt, Homo sapiens
  misc_RNA (1)...(19): siRNA sense strand
ugucaaggcuucuaaucag

SEQ ID NO: 2078792 - RNA, 19 nt, Homo sapiens
  misc_RNA (1)...(19): siRNA sense strand
ccaaagccacccgauuauu

SEQ ID NO: 2078793 - RNA, 19 nt, Homo sapiens
  misc_RNA (1)...(19): siRNA sense strand
cgugggaacaggaagauuu

SEQ ID NO: 2078794 - RNA, 19 nt, Homo sapiens
  misc_RNA (1)...(19): siRNA sense strand
cagcagacuacaacugauu

SEQ ID NO: 2078795 - RNA, 19 nt, Homo sapiens
  misc_RNA (1)...(19): siRNA sense strand
gucaaggcuucuaaucaga

SEQ ID NO: 2078796 - RNA, 19 nt, Homo sapiens
  misc_RNA (1)...(19): siRNA sense strand
ccacauggacacacuccuu

SEQ ID NO: 2078797 - RNA, 19 nt, Homo sapiens
  misc_RNA (1)...(19): siRNA sense strand
gaucagcagacuacaacug

SEQ ID NO: 2078798 - RNA, 19 nt, Homo sapiens
  misc_RNA (1)...(19): siRNA sense strand
gccaaagccacccgauuau

SEQ ID NO: 2078799 - RNA, 19 nt, Homo sapiens
  misc_RNA (1)...(19): siRNA sense strand
gauuggagugggauuguau

SEQ ID NO: 2078800 - RNA, 19 nt, Homo sapiens
  misc_RNA (1)...(19): siRNA sense strand
gcagacuacaacugauuga

SEQ ID NO: 2078801 - RNA, 19 nt, Homo sapiens
  misc_RNA (1)...(19): siRNA sense strand
gcuuggcaguuauuugcaa

SEQ ID NO: 2078802 - RNA, 19 nt, Homo sapiens
  misc_RNA (1)...(19): siRNA sense strand
ugaaaucagugagacuuac

SEQ ID NO: 2078803 - RNA, 19 nt, Homo sapiens
  misc_RNA (1)...(19): siRNA sense strand
ggacacacuccuugaaagc

SEQ ID NO: 2078804 - RNA, 19 nt, Homo sapiens
  misc_RNA (1)...(19): siRNA sense strand
caaggcuucuaaucagauc

SEQ ID NO: 2078805 - RNA, 19 nt, Homo sapiens
  misc_RNA (1)...(19): siRNA sense strand
cagcggaugggauggauug

SEQ ID NO: 2078806 - RNA, 19 nt, Homo sapiens
  misc_RNA (1)...(19): siRNA sense strand
ucugguaccuuacuuacag

SEQ ID NO: 2078807 - RNA, 19 nt, Homo sapiens
  misc_RNA (1)...(19): siRNA sense strand
gagugggauuguaucuguu

SEQ ID NO: 2078808 - RNA, 19 nt, Homo sapiens
  misc_RNA (1)...(19): siRNA sense strand
gcauggagaaugaugaacu

SEQ ID NO: 2078809 - RNA, 19 nt, Homo sapiens
  misc_RNA (1)...(19): siRNA sense strand
cuauaugcuuggcaguuau

SEQ ID NO: 2078810 - RNA, 19 nt, Homo sapiens
  misc_RNA (1)...(19): siRNA sense strand
uaccuuacuuacagauguu

SEQ ID NO: 2078811 - RNA, 19 nt, Homo sapiens
  misc_RNA (1)...(19): siRNA sense strand
ucagugagacuuacaacag

SEQ ID NO: 2078812 - RNA, 19 nt, Homo sapiens
  misc_RNA (1)...(19): siRNA sense strand
aaucagaucagcagacuac

SEQ ID NO: 2078813 - RNA, 19 nt, Homo sapiens
  misc_RNA (1)...(19): siRNA sense strand
aaagccacccgauuauuca

SEQ ID NO: 2078814 - RNA, 19 nt, Homo sapiens
  misc_RNA (1)...(19): siRNA sense strand
ccaccaggcauuugucaag

SEQ ID NO: 2078815 - RNA, 19 nt, Homo sapiens
  misc_RNA (1)...(19): siRNA sense strand
cagcagcauuuuacuaugu

SEQ ID NO: 2078816 - RNA, 19 nt, Homo sapiens
  misc_RNA (1)...(19): siRNA sense strand
cuaaucagaucagcagacu

SEQ ID NO: 2078817 - RNA, 19 nt, Homo sapiens
  misc_RNA (1)...(19): siRNA sense strand
gagcugaucccaaaacagu

SEQ ID NO: 2078818 - RNA, 19 nt, Homo sapiens
  misc_RNA (1)...(19): siRNA sense strand
ucagaucagcagacuacaa

SEQ ID NO: 2078819 - RNA, 19 nt, Homo sapiens
  misc_RNA (1)...(19): siRNA sense strand
uugaaaucagugagacuua

SEQ ID NO: 2078820 - RNA, 19 nt, Homo sapiens
  misc_RNA (1)...(19): siRNA sense strand
agacuacaacugauugaca

SEQ ID NO: 2078821 - RNA, 19 nt, Homo sapiens
  misc_RNA (1)...(19): siRNA sense strand
uacuguaucaucccuauau

SEQ ID NO: 2078822 - RNA, 19 nt, Homo sapiens
  misc_RNA (1)...(19): siRNA sense strand
uggacacacuccuugaaag

SEQ ID NO: 2078823 - RNA, 19 nt, Homo sapiens
  misc_RNA (1)...(19): siRNA sense strand
agugggauuguaucuguua

SEQ ID NO: 2078824 - RNA, 19 nt, Homo sapiens
  misc_RNA (1)...(19): siRNA sense strand
cagaucagcagacuacaac

SEQ ID NO: 2078825 - RNA, 19 nt, Homo sapiens
  misc_RNA (1)...(19): siRNA sense strand
cauggacacacuccuugaa

SEQ ID NO: 2078826 - RNA, 19 nt, Homo sapiens
  misc_RNA (1)...(19): siRNA sense strand
ugaaggugcucugggauuu

SEQ ID NO: 2078827 - RNA, 19 nt, Homo sapiens
  misc_RNA (1)...(19): siRNA sense strand
gcucugggauuuuguguuu

SEQ ID NO: 2078828 - RNA, 19 nt, Homo sapiens
  misc_RNA (1)...(19): siRNA sense strand
ggcaaaagauggucuguga

SEQ ID NO: 2078829 - RNA, 19 nt, Homo sapiens
  misc_RNA (1)...(19): siRNA sense strand
guucugggccuacgccuuu

SEQ ID NO: 2078830 - RNA, 19 nt, Homo sapiens
  misc_RNA (1)...(19): siRNA sense strand
ucaacuggaucaccuucaa

SEQ ID NO: 2078831 - RNA, 19 nt, Homo sapiens
  misc_RNA (1)...(19): siRNA sense strand
gcauggaggugcucaacac

SEQ ID NO: 2078832 - RNA, 19 nt, Homo sapiens
  misc_RNA (1)...(19): siRNA sense strand
gagaccuacuccuacuaug

SEQ ID NO: 2078833 - RNA, 19 nt, Homo sapiens
  misc_RNA (1)...(19): siRNA sense strand
gccacgagaccuacuccua

SEQ ID NO: 2078834 - RNA, 19 nt, Homo sapiens
  misc_RNA (1)...(19): siRNA sense strand
ucaagggccacgagaccua

SEQ ID NO: 2078835 - RNA, 19 nt, Homo sapiens
  misc_RNA (1)...(19): siRNA sense strand
cgagaccuacuccuacuau

SEQ ID NO: 2078836 - RNA, 19 nt, Homo sapiens
  misc_RNA (1)...(19): siRNA sense strand
gugaaggugcucugggauu

SEQ ID NO: 2078837 - RNA, 19 nt, Homo sapiens
  misc_RNA (1)...(19): siRNA sense strand
ggccaucuuugcccuuugg

SEQ ID NO: 2078838 - RNA, 19 nt, Homo sapiens
  misc_RNA (1)...(19): siRNA sense strand
gcacuacauguuccucaag

SEQ ID NO: 2078839 - RNA, 19 nt, Homo sapiens
  misc_RNA (1)...(19): siRNA sense strand
caacuggaucaccuucaau

SEQ ID NO: 2078840 - RNA, 19 nt, Homo sapiens
  misc_RNA (1)...(19): siRNA sense strand
cuggagggcugguucuucu

SEQ ID NO: 2078841 - RNA, 19 nt, Homo sapiens
  misc_RNA (1)...(19): siRNA sense strand
gcucaagcccguggucuac

SEQ ID NO: 2078842 - RNA, 19 nt, Homo sapiens
  misc_RNA (1)...(19): siRNA sense strand
ccaccuacuuccuuuccua

SEQ ID NO: 2078843 - RNA, 19 nt, Homo sapiens
  misc_RNA (1)...(19): siRNA sense strand
acaccuuguucauggauuu

SEQ ID NO: 2078844 - RNA, 19 nt, Homo sapiens
  misc_RNA (1)...(19): siRNA sense strand
cagcucggcccuggucuua

SEQ ID NO: 2078845 - RNA, 19 nt, Homo sapiens
  misc_RNA (1)...(19): siRNA sense strand
ccauggacgugaucaaguc

SEQ ID NO: 2078846 - RNA, 19 nt, Homo sapiens
  misc_RNA (1)...(19): siRNA sense strand
ccugguaucuuccgugucu

SEQ ID NO: 2078847 - RNA, 19 nt, Homo sapiens
  misc_RNA (1)...(19): siRNA sense strand
cgccuucccugucaacaug

SEQ ID NO: 2078848 - RNA, 19 nt, Homo sapiens
  misc_RNA (1)...(19): siRNA sense strand
ggauccagacggagccaaa

SEQ ID NO: 2078849 - RNA, 19 nt, Homo sapiens
  misc_RNA (1)...(19): siRNA sense strand
agacacaggcgcagaagca

SEQ ID NO: 2078850 - RNA, 19 nt, Homo sapiens
  misc_RNA (1)...(19): siRNA sense strand
cggugucccugguaucuuc

SEQ ID NO: 2078851 - RNA, 19 nt, Homo sapiens
  misc_RNA (1)...(19): siRNA sense strand
ucaaggggcugguacucaa

SEQ ID NO: 2078852 - RNA, 19 nt, Homo sapiens
  misc_RNA (1)...(19): siRNA sense strand
gccacuccuuugccaccua

SEQ ID NO: 2078853 - RNA, 19 nt, Homo sapiens
  misc_RNA (1)...(19): siRNA sense strand
ggaagacggucaugcuaca

SEQ ID NO: 2078854 - RNA, 19 nt, Homo sapiens
  misc_RNA (1)...(19): siRNA sense strand
ccgcacaccugccucauug

SEQ ID NO: 2078855 - RNA, 19 nt, Homo sapiens
  misc_RNA (1)...(19): siRNA sense strand
gguaccagcugggauguug

SEQ ID NO: 2078856 - RNA, 19 nt, Homo sapiens
  misc_RNA (1)...(19): siRNA sense strand
acaccugccucauuggaaa

SEQ ID NO: 2078857 - RNA, 19 nt, Homo sapiens
  misc_RNA (1)...(19): siRNA sense strand
gcacaccugccucauugga

SEQ ID NO: 2078858 - RNA, 19 nt, Homo sapiens
  misc_RNA (1)...(19): siRNA sense strand
aggaagaccucggacuuug

SEQ ID NO: 2078859 - RNA, 19 nt, Homo sapiens
  misc_RNA (1)...(19): siRNA sense strand
gaagaccucggacuuugca

SEQ ID NO: 2078860 - RNA, 19 nt, Homo sapiens
  misc_RNA (1)...(19): siRNA sense strand
caggaagaccucggacuuu

SEQ ID NO: 2078861 - RNA, 19 nt, Homo sapiens
  misc_RNA (1)...(19): siRNA sense strand
ggaggcguuucaggcauga

SEQ ID NO: 2078862 - RNA, 19 nt, Homo sapiens
  misc_RNA (1)...(19): siRNA sense strand
ggaagaggaaagugugaag

SEQ ID NO: 2078863 - RNA, 19 nt, Homo sapiens
  misc_RNA (1)...(19): siRNA sense strand
gugaagcaagggacaggua

SEQ ID NO: 2078864 - RNA, 19 nt, Homo sapiens
  misc_RNA (1)...(19): siRNA sense strand
caggaagacggucaugcua

SEQ ID NO: 2078865 - RNA, 19 nt, Homo sapiens
  misc_RNA (1)...(19): siRNA sense strand
aaaggaagaauugcuugaa

SEQ ID NO: 2078866 - RNA, 19 nt, Homo sapiens
  misc_RNA (1)...(19): siRNA sense strand
agaggaaagugugaagcaa

SEQ ID NO: 2078867 - RNA, 19 nt, Homo sapiens
  misc_RNA (1)...(19): siRNA sense strand
acaggaagaccucggacuu

SEQ ID NO: 2078868 - RNA, 19 nt, Homo sapiens
  misc_RNA (1)...(19): siRNA sense strand
gacuuugcauccagcagau

SEQ ID NO: 2078869 - RNA, 19 nt, Homo sapiens
  misc_RNA (1)...(19): siRNA sense strand
aaggaagaauugcuugaac

SEQ ID NO: 2078870 - RNA, 19 nt, Homo sapiens
  misc_RNA (1)...(19): siRNA sense strand
ggaagaccucggacuuugc

SEQ ID NO: 2078871 - RNA, 19 nt, Homo sapiens
  misc_RNA (1)...(19): siRNA sense strand
cagcagaugguuguucuag

SEQ ID NO: 2078872 - RNA, 19 nt, Homo sapiens
  misc_RNA (1)...(19): siRNA sense strand
gugaagagcagaguauuua

SEQ ID NO: 2078873 - RNA, 19 nt, Homo sapiens
  misc_RNA (1)...(19): siRNA sense strand
gaagagcagaguauuuauu

SEQ ID NO: 2078874 - RNA, 19 nt, Homo sapiens
  misc_RNA (1)...(19): siRNA sense strand
gaaagugaagagcagagua

SEQ ID NO: 2078875 - RNA, 19 nt, Homo sapiens
  misc_RNA (1)...(19): siRNA sense strand
ggcgagaccuacaaagaug

SEQ ID NO: 2078876 - RNA, 19 nt, Homo sapiens
  misc_RNA (1)...(19): siRNA sense strand
ccgcagagcucucaaugcu

SEQ ID NO: 2078877 - RNA, 19 nt, Homo sapiens
  misc_RNA (1)...(19): siRNA sense strand
augcauggcucccagaaga

SEQ ID NO: 2078878 - RNA, 19 nt, Homo sapiens
  misc_RNA (1)...(19): siRNA sense strand
gggcgagaccuacaaagau

SEQ ID NO: 2078879 - RNA, 19 nt, Homo sapiens
  misc_RNA (1)...(19): siRNA sense strand
gcuucacccuccagucuga

SEQ ID NO: 2078880 - RNA, 19 nt, Homo sapiens
  misc_RNA (1)...(19): siRNA sense strand
caucaggcgggaccacaua

SEQ ID NO: 2078881 - RNA, 19 nt, Homo sapiens
  misc_RNA (1)...(19): siRNA sense strand
ggaaccagcaucucuugca

SEQ ID NO: 2078882 - RNA, 19 nt, Homo sapiens
  misc_RNA (1)...(19): siRNA sense strand
aaagugaagagcagaguau

SEQ ID NO: 2078883 - RNA, 19 nt, Homo sapiens
  misc_RNA (1)...(19): siRNA sense strand
ccuccagucugaaagugaa

SEQ ID NO: 2078884 - RNA, 19 nt, Homo sapiens
  misc_RNA (1)...(19): siRNA sense strand
gcggaaccagcaucucuug

SEQ ID NO: 2078885 - RNA, 19 nt, Homo sapiens
  misc_RNA (1)...(19): siRNA sense strand
gcauuucaggcaucguuga

SEQ ID NO: 2078886 - RNA, 19 nt, Homo sapiens
  misc_RNA (1)...(19): siRNA sense strand
guuccgaggccacaugguu

SEQ ID NO: 2078887 - RNA, 19 nt, Homo sapiens
  misc_RNA (1)...(19): siRNA sense strand
gcccgacuguccagcuuca

SEQ ID NO: 2078888 - RNA, 19 nt, Homo sapiens
  misc_RNA (1)...(19): siRNA sense strand
gcauggcucccagaagaug

SEQ ID NO: 2078889 - RNA, 19 nt, Homo sapiens
  misc_RNA (1)...(19): siRNA sense strand
gcgagaccuacaaagauga

SEQ ID NO: 2078890 - RNA, 19 nt, Homo sapiens
  misc_RNA (1)...(19): siRNA sense strand
gaccacauacuggccauuc

SEQ ID NO: 2078891 - RNA, 19 nt, Homo sapiens
  misc_RNA (1)...(19): siRNA sense strand
ugaagagcagaguauuuau

SEQ ID NO: 2078892 - RNA, 19 nt, Homo sapiens
  misc_RNA (1)...(19): siRNA sense strand
gcaccuggagacucuuauc

SEQ ID NO: 2078893 - RNA, 19 nt, Homo sapiens
  misc_RNA (1)...(19): siRNA sense strand
ccacauacuggccauucug

SEQ ID NO: 2078894 - RNA, 19 nt, Homo sapiens
  misc_RNA (1)...(19): siRNA sense strand
agugaagagcagaguauuu

SEQ ID NO: 2078895 - RNA, 19 nt, Homo sapiens
  misc_RNA (1)...(19): siRNA sense strand
gcaugcauggcucccagaa

SEQ ID NO: 2078896 - RNA, 19 nt, Homo sapiens
  misc_RNA (1)...(19): siRNA sense strand
cagcggaaccagcaucucu

SEQ ID NO: 2078897 - RNA, 19 nt, Homo sapiens
  misc_RNA (1)...(19): siRNA sense strand
cagcuucacccuccagucu

SEQ ID NO: 2078898 - RNA, 19 nt, Homo sapiens
  misc_RNA (1)...(19): siRNA sense strand
gcacucagcucccgcagua

SEQ ID NO: 2078899 - RNA, 19 nt, Homo sapiens
  misc_RNA (1)...(19): siRNA sense strand
gaauugaccuucuuaggaa

SEQ ID NO: 2078900 - RNA, 19 nt, Homo sapiens
  misc_RNA (1)...(19): siRNA sense strand
guaaagaguuugcagacua

SEQ ID NO: 2078901 - RNA, 19 nt, Homo sapiens
  misc_RNA (1)...(19): siRNA sense strand
caacuacagucucucuuua

SEQ ID NO: 2078902 - RNA, 19 nt, Homo sapiens
  misc_RNA (1)...(19): siRNA sense strand
ucacaagccugguucauaa

SEQ ID NO: 2078903 - RNA, 19 nt, Homo sapiens
  misc_RNA (1)...(19): siRNA sense strand
gauguugcguuguccauua

SEQ ID NO: 2078904 - RNA, 19 nt, Homo sapiens
  misc_RNA (1)...(19): siRNA sense strand
caaaggagcucagaaguag

SEQ ID NO: 2078905 - RNA, 19 nt, Homo sapiens
  misc_RNA (1)...(19): siRNA sense strand
gcucagaaguagaguauau

SEQ ID NO: 2078906 - RNA, 19 nt, Homo sapiens
  misc_RNA (1)...(19): siRNA sense strand
ggugauaacuaaggauaua

SEQ ID NO: 2078907 - RNA, 19 nt, Homo sapiens
  misc_RNA (1)...(19): siRNA sense strand
gaugaauccugcauauauu

SEQ ID NO: 2078908 - RNA, 19 nt, Homo sapiens
  misc_RNA (1)...(19): siRNA sense strand
gagauucccugucaauuuc

SEQ ID NO: 2078909 - RNA, 19 nt, Homo sapiens
  misc_RNA (1)...(19): siRNA sense strand
ucacacauaucaucauuga

SEQ ID NO: 2078910 - RNA, 19 nt, Homo sapiens
  misc_RNA (1)...(19): siRNA sense strand
ggagauucccugucaauuu

SEQ ID NO: 2078911 - RNA, 19 nt, Homo sapiens
  misc_RNA (1)...(19): siRNA sense strand
gaacuuuggucugugauga

SEQ ID NO: 2078912 - RNA, 19 nt, Homo sapiens
  misc_RNA (1)...(19): siRNA sense strand
caagaugaauccugcauau

SEQ ID NO: 2078913 - RNA, 19 nt, Homo sapiens
  misc_RNA (1)...(19): siRNA sense strand
gcucaaguccuuuauguuu

SEQ ID NO: 2078914 - RNA, 19 nt, Homo sapiens
  misc_RNA (1)...(19): siRNA sense strand
gcaacuugguaaacucaua

SEQ ID NO: 2078915 - RNA, 19 nt, Homo sapiens
  misc_RNA (1)...(19): siRNA sense strand
ggaccaagaguauauauau

SEQ ID NO: 2078916 - RNA, 19 nt, Homo sapiens
  misc_RNA (1)...(19): siRNA sense strand
agagguggcugaauuauau

SEQ ID NO: 2078917 - RNA, 19 nt, Homo sapiens
  misc_RNA (1)...(19): siRNA sense strand
gaaagacgacgagaaauau

SEQ ID NO: 2078918 - RNA, 19 nt, Homo sapiens
  misc_RNA (1)...(19): siRNA sense strand
caauaagucucauguagau

SEQ ID NO: 2078919 - RNA, 19 nt, Homo sapiens
  misc_RNA (1)...(19): siRNA sense strand
gaagcacgaucuugaaagu

SEQ ID NO: 2078920 - RNA, 19 nt, Homo sapiens
  misc_RNA (1)...(19): siRNA sense strand
caagucaaauccauuguau

SEQ ID NO: 2078921 - RNA, 19 nt, Homo sapiens
  misc_RNA (1)...(19): siRNA sense strand
ugaaagacgacgagaaaua

SEQ ID NO: 2078922 - RNA, 19 nt, Homo sapiens
  misc_RNA (1)...(19): siRNA sense strand
gagcucaaguccuuuaugu

SEQ ID NO: 2078923 - RNA, 19 nt, Homo sapiens
  misc_RNA (1)...(19): siRNA sense strand
uuagagagguggcugaauu

SEQ ID NO: 2078924 - RNA, 19 nt, Homo sapiens
  misc_RNA (1)...(19): siRNA sense strand
ucacagaggugguugaagu

SEQ ID NO: 2078925 - RNA, 19 nt, Homo sapiens
  misc_RNA (1)...(19): siRNA sense strand
aaacaacgcuacuuuagag

SEQ ID NO: 2078926 - RNA, 19 nt, Homo sapiens
  misc_RNA (1)...(19): siRNA sense strand
gaaauucugcugagguauu

SEQ ID NO: 2078927 - RNA, 19 nt, Homo sapiens
  misc_RNA (1)...(19): siRNA sense strand
gaggacaccaggcuaauuu

SEQ ID NO: 2078928 - RNA, 19 nt, Homo sapiens
  misc_RNA (1)...(19): siRNA sense strand
caucaacucugucauuauc

SEQ ID NO: 2078929 - RNA, 19 nt, Homo sapiens
  misc_RNA (1)...(19): siRNA sense strand
gcaccauccuucuacuaaa

SEQ ID NO: 2078930 - RNA, 19 nt, Homo sapiens
  misc_RNA (1)...(19): siRNA sense strand
caucagcuguaaagaguuu

SEQ ID NO: 2078931 - RNA, 19 nt, Homo sapiens
  misc_RNA (1)...(19): siRNA sense strand
ccaaaggagcucagaagua

SEQ ID NO: 2078932 - RNA, 19 nt, Homo sapiens
  misc_RNA (1)...(19): siRNA sense strand
uuaacaagcuagucuguga

SEQ ID NO: 2078933 - RNA, 19 nt, Homo sapiens
  misc_RNA (1)...(19): siRNA sense strand
acauggagcuugcguuuga

SEQ ID NO: 2078934 - RNA, 19 nt, Homo sapiens
  misc_RNA (1)...(19): siRNA sense strand
gcaauaagucucauguaga

SEQ ID NO: 2078935 - RNA, 19 nt, Homo sapiens
  misc_RNA (1)...(19): siRNA sense strand
ccagaugucaaauauguua

SEQ ID NO: 2078936 - RNA, 19 nt, Homo sapiens
  misc_RNA (1)...(19): siRNA sense strand
acaccaggcuaauuuauau

SEQ ID NO: 2078937 - RNA, 19 nt, Homo sapiens
  misc_RNA (1)...(19): siRNA sense strand
ggcaauaagucucauguag

SEQ ID NO: 2078938 - RNA, 19 nt, Homo sapiens
  misc_RNA (1)...(19): siRNA sense strand
gaaacacauuccucccuau

SEQ ID NO: 2078939 - RNA, 19 nt, Homo sapiens
  misc_RNA (1)...(19): siRNA sense strand
ucagcaaagucucuuguuu

SEQ ID NO: 2078940 - RNA, 19 nt, Homo sapiens
  misc_RNA (1)...(19): siRNA sense strand
gaaaacaacucagagauuc

SEQ ID NO: 2078941 - RNA, 19 nt, Homo sapiens
  misc_RNA (1)...(19): siRNA sense strand
ccaagaguuugauggaauu

SEQ ID NO: 2078942 - RNA, 19 nt, Homo sapiens
  misc_RNA (1)...(19): siRNA sense strand
gagcaucaacucugucauu

SEQ ID NO: 2078943 - RNA, 19 nt, Homo sapiens
  misc_RNA (1)...(19): siRNA sense strand
gagagguggcugaauuaua

SEQ ID NO: 2078944 - RNA, 19 nt, Homo sapiens
  misc_RNA (1)...(19): siRNA sense strand
gcaaagccaugaaguucuc

SEQ ID NO: 2078945 - RNA, 19 nt, Homo sapiens
  misc_RNA (1)...(19): siRNA sense strand
gcaagucuccuuuaacaca

SEQ ID NO: 2078946 - RNA, 19 nt, Homo sapiens
  misc_RNA (1)...(19): siRNA sense strand
guauuuggaugucuagaug

SEQ ID NO: 2078947 - RNA, 19 nt, Homo sapiens
  misc_RNA (1)...(19): siRNA sense strand
gaacaaagugaauuucucu

SEQ ID NO: 2078948 - RNA, 19 nt, Homo sapiens
  misc_RNA (1)...(19): siRNA sense strand
cggcagcucuuucuuugaa

SEQ ID NO: 2078949 - RNA, 19 nt, Homo sapiens
  misc_RNA (1)...(19): siRNA sense strand
guaaaucagcaacuuggua

SEQ ID NO: 2078950 - RNA, 19 nt, Homo sapiens
  misc_RNA (1)...(19): siRNA sense strand
gaacuucacgggccuuuua

SEQ ID NO: 2078951 - RNA, 19 nt, Homo sapiens
  misc_RNA (1)...(19): siRNA sense strand
caugaaagacgacgagaaa

SEQ ID NO: 2078952 - RNA, 19 nt, Homo sapiens
  misc_RNA (1)...(19): siRNA sense strand
gacgguagauccuaugcaa

SEQ ID NO: 2078953 - RNA, 19 nt, Homo sapiens
  misc_RNA (1)...(19): siRNA sense strand
ggaacaaagugaauuucuc

SEQ ID NO: 2078954 - RNA, 19 nt, Homo sapiens
  misc_RNA (1)...(19): siRNA sense strand
ggauauaggaacaaaguga

SEQ ID NO: 2078955 - RNA, 19 nt, Homo sapiens
  misc_RNA (1)...(19): siRNA sense strand
uaaaucagcaacuugguaa

SEQ ID NO: 2078956 - RNA, 19 nt, Homo sapiens
  misc_RNA (1)...(19): siRNA sense strand
caauuaagaugucucaacu

SEQ ID NO: 2078957 - RNA, 19 nt, Homo sapiens
  misc_RNA (1)...(19): siRNA sense strand
guacuauacuggaguccuu

SEQ ID NO: 2078958 - RNA, 19 nt, Homo sapiens
  misc_RNA (1)...(19): siRNA sense strand
gugauagaguuaaggauug

SEQ ID NO: 2078959 - RNA, 19 nt, Homo sapiens
  misc_RNA (1)...(19): siRNA sense strand
gccaagaguuugauggaau

SEQ ID NO: 2078960 - RNA, 19 nt, Homo sapiens
  misc_RNA (1)...(19): siRNA sense strand
gaagcaguguguugguguu

SEQ ID NO: 2078961 - RNA, 19 nt, Homo sapiens
  misc_RNA (1)...(19): siRNA sense strand
ggauauauaugaaguugcu

SEQ ID NO: 2078962 - RNA, 19 nt, Homo sapiens
  misc_RNA (1)...(19): siRNA sense strand
gagguugugucuuugauag

SEQ ID NO: 2078963 - RNA, 19 nt, Homo sapiens
  misc_RNA (1)...(19): siRNA sense strand
gagguauucuuuguagauu

SEQ ID NO: 2078964 - RNA, 19 nt, Homo sapiens
  misc_RNA (1)...(19): siRNA sense strand
gcugagguauucuuuguag

SEQ ID NO: 2078965 - RNA, 19 nt, Homo sapiens
  misc_RNA (1)...(19): siRNA sense strand
ucagauguuugaugacuug

SEQ ID NO: 2078966 - RNA, 19 nt, Homo sapiens
  misc_RNA (1)...(19): siRNA sense strand
cgcaaacucuuaagaacaa

SEQ ID NO: 2078967 - RNA, 19 nt, Homo sapiens
  misc_RNA (1)...(19): siRNA sense strand
ggaauucacacauaucauc

SEQ ID NO: 2078968 - RNA, 19 nt, Homo sapiens
  misc_RNA (1)...(19): siRNA sense strand
caacuggaguccugcuuca

SEQ ID NO: 2078969 - RNA, 19 nt, Homo sapiens
  misc_RNA (1)...(19): siRNA sense strand
gacaccaggcuaauuuaua

SEQ ID NO: 2078970 - RNA, 19 nt, Homo sapiens
  misc_RNA (1)...(19): siRNA sense strand
uagcaagagugacuguauu

SEQ ID NO: 2078971 - RNA, 19 nt, Homo sapiens
  misc_RNA (1)...(19): siRNA sense strand
cagaauggcaaguacuaua

SEQ ID NO: 2078972 - RNA, 19 nt, Homo sapiens
  misc_RNA (1)...(19): siRNA sense strand
uggaaauucugcugaggua

SEQ ID NO: 2078973 - RNA, 19 nt, Homo sapiens
  misc_RNA (1)...(19): siRNA sense strand
cagggacaacuuauaaaua

SEQ ID NO: 2078974 - RNA, 19 nt, Homo sapiens
  misc_RNA (1)...(19): siRNA sense strand
ggugauagaguuaaggauu

SEQ ID NO: 2078975 - RNA, 19 nt, Homo sapiens
  misc_RNA (1)...(19): siRNA sense strand
cuacgaugcugcugagaga

SEQ ID NO: 2078976 - RNA, 19 nt, Homo sapiens
  misc_RNA (1)...(19): siRNA sense strand
acagaucuccuucuaacua

SEQ ID NO: 2078977 - RNA, 19 nt, Homo sapiens
  misc_RNA (1)...(19): siRNA sense strand
ccagguggaucaguaaaga

SEQ ID NO: 2078978 - RNA, 19 nt, Homo sapiens
  misc_RNA (1)...(19): siRNA sense strand
cgacauggagcuugcguuu

SEQ ID NO: 2078979 - RNA, 19 nt, Homo sapiens
  misc_RNA (1)...(19): siRNA sense strand
cagcuucccuuuccaucaa

SEQ ID NO: 2078980 - RNA, 19 nt, Homo sapiens
  misc_RNA (1)...(19): siRNA sense strand
ugaccagaauauccaaauu

SEQ ID NO: 2078981 - RNA, 19 nt, Homo sapiens
  misc_RNA (1)...(19): siRNA sense strand
cuacuuugcuguuccuguu

SEQ ID NO: 2078982 - RNA, 19 nt, Homo sapiens
  misc_RNA (1)...(19): siRNA sense strand
ugauggagauucccuguca

SEQ ID NO: 2078983 - RNA, 19 nt, Homo sapiens
  misc_RNA (1)...(19): siRNA sense strand
uuacagaucuccuucuaac

SEQ ID NO: 2078984 - RNA, 19 nt, Homo sapiens
  misc_RNA (1)...(19): siRNA sense strand
agacuagaaucucacaguu

SEQ ID NO: 2078985 - RNA, 19 nt, Homo sapiens
  misc_RNA (1)...(19): siRNA sense strand
gugaauuucucuggcagua

SEQ ID NO: 2078986 - RNA, 19 nt, Homo sapiens
  misc_RNA (1)...(19): siRNA sense strand
uauccugauuugccuauaa

SEQ ID NO: 2078987 - RNA, 19 nt, Homo sapiens
  misc_RNA (1)...(19): siRNA sense strand
aggaaccggugauaacuaa

SEQ ID NO: 2078988 - RNA, 19 nt, Homo sapiens
  misc_RNA (1)...(19): siRNA sense strand
cgaacgaacagaagaaaug

SEQ ID NO: 2078989 - RNA, 19 nt, Homo sapiens
  misc_RNA (1)...(19): siRNA sense strand
ccuauggauuucuuuacua

SEQ ID NO: 2078990 - RNA, 19 nt, Homo sapiens
  misc_RNA (1)...(19): siRNA sense strand
gcaggugcuuucuauccaa

SEQ ID NO: 2078991 - RNA, 19 nt, Homo sapiens
  misc_RNA (1)...(19): siRNA sense strand
gagcucagaaguagaguau

SEQ ID NO: 2078992 - RNA, 19 nt, Homo sapiens
  misc_RNA (1)...(19): siRNA sense strand
ugaauugaccuucuuagga

SEQ ID NO: 2078993 - RNA, 19 nt, Homo sapiens
  misc_RNA (1)...(19): siRNA sense strand
gacuagaacuuuggucugu

SEQ ID NO: 2078994 - RNA, 19 nt, Homo sapiens
  misc_RNA (1)...(19): siRNA sense strand
aaguguggcuuuagaagaa

SEQ ID NO: 2078995 - RNA, 19 nt, Homo sapiens
  misc_RNA (1)...(19): siRNA sense strand
gguaguccgcaaacucuua

SEQ ID NO: 2078996 - RNA, 19 nt, Homo sapiens
  misc_RNA (1)...(19): siRNA sense strand
gcugaaaucaaccaacuga

SEQ ID NO: 2078997 - RNA, 19 nt, Homo sapiens
  misc_RNA (1)...(19): siRNA sense strand
cauaagagacguccucauc

SEQ ID NO: 2078998 - RNA, 19 nt, Homo sapiens
  misc_RNA (1)...(19): siRNA sense strand
gcaggaagaaggccaagua

SEQ ID NO: 2078999 - RNA, 19 nt, Homo sapiens
  misc_RNA (1)...(19): siRNA sense strand
cgacgcagcucccacaugu

SEQ ID NO: 2079000 - RNA, 19 nt, Homo sapiens
  misc_RNA (1)...(19): siRNA sense strand
gcagccuccuucuucauaa

SEQ ID NO: 2079001 - RNA, 19 nt, Homo sapiens
  misc_RNA (1)...(19): siRNA sense strand
ggaaaaggcugcagugagu

SEQ ID NO: 2079002 - RNA, 19 nt, Homo sapiens
  misc_RNA (1)...(19): siRNA sense strand
gcagcgagcaguccuguga

SEQ ID NO: 2079003 - RNA, 19 nt, Homo sapiens
  misc_RNA (1)...(19): siRNA sense strand
agaagcaggugauccucua

SEQ ID NO: 2079004 - RNA, 19 nt, Homo sapiens
  misc_RNA (1)...(19): siRNA sense strand
caagauguuugccuucgau

SEQ ID NO: 2079005 - RNA, 19 nt, Homo sapiens
  misc_RNA (1)...(19): siRNA sense strand
ugaaggagccguucgagau

SEQ ID NO: 2079006 - RNA, 19 nt, Homo sapiens
  misc_RNA (1)...(19): siRNA sense strand
gcaaggcgcacgucaugau

SEQ ID NO: 2079007 - RNA, 19 nt, Homo sapiens
  misc_RNA (1)...(19): siRNA sense strand
gaaggagccguucgagauc

SEQ ID NO: 2079008 - RNA, 19 nt, Homo sapiens
  misc_RNA (1)...(19): siRNA sense strand
ggucuggcgugcgucagua

SEQ ID NO: 2079009 - RNA, 19 nt, Homo sapiens
  misc_RNA (1)...(19): siRNA sense strand
ggagcucaccgacaacgaa

SEQ ID NO: 2079010 - RNA, 19 nt, Homo sapiens
  misc_RNA (1)...(19): siRNA sense strand
ucgggaaggugaagguuau

SEQ ID NO: 2079011 - RNA, 19 nt, Homo sapiens
  misc_RNA (1)...(19): siRNA sense strand
ccaagcaugugccguaucg

SEQ ID NO: 2079012 - RNA, 19 nt, Homo sapiens
  misc_RNA (1)...(19): siRNA sense strand
caacggagccaagcaugug

SEQ ID NO: 2079013 - RNA, 19 nt, Homo sapiens
  misc_RNA (1)...(19): siRNA sense strand
gcgcagcuccagaaccaaa

SEQ ID NO: 2079014 - RNA, 19 nt, Homo sapiens
  misc_RNA (1)...(19): siRNA sense strand
ggaagaagcaggugauccu

SEQ ID NO: 2079015 - RNA, 19 nt, Homo sapiens
  misc_RNA (1)...(19): siRNA sense strand
gcaguucccaagauguuug

SEQ ID NO: 2079016 - RNA, 19 nt, Homo sapiens
  misc_RNA (1)...(19): siRNA sense strand
agucacggcuccuccauca

SEQ ID NO: 2079017 - RNA, 19 nt, Homo sapiens
  misc_RNA (1)...(19): siRNA sense strand
gagggcauguggagugucu

SEQ ID NO: 2079018 - RNA, 19 nt, Homo sapiens
  misc_RNA (1)...(19): siRNA sense strand
gcaggagguggacgucuga

SEQ ID NO: 2079019 - RNA, 19 nt, Homo sapiens
  misc_RNA (1)...(19): siRNA sense strand
gcuagccugugcccagaga

SEQ ID NO: 2079020 - RNA, 19 nt, Homo sapiens
  misc_RNA (1)...(19): siRNA sense strand
gcagacacgguccgagaau

SEQ ID NO: 2079021 - RNA, 19 nt, Homo sapiens
  misc_RNA (1)...(19): siRNA sense strand
ggcaagucguacaccauga

SEQ ID NO: 2079022 - RNA, 19 nt, Homo sapiens
  misc_RNA (1)...(19): siRNA sense strand
gaagcagcacaccgucuug

SEQ ID NO: 2079023 - RNA, 19 nt, Homo sapiens
  misc_RNA (1)...(19): siRNA sense strand
cguucgagaucaaggugua

SEQ ID NO: 2079024 - RNA, 19 nt, Homo sapiens
  misc_RNA (1)...(19): siRNA sense strand
gcugcagccuccuucuuca

SEQ ID NO: 2079025 - RNA, 19 nt, Homo sapiens
  misc_RNA (1)...(19): siRNA sense strand
gcagcucccacauguuguu

SEQ ID NO: 2079026 - RNA, 19 nt, Homo sapiens
  misc_RNA (1)...(19): siRNA sense strand
gcaagucguacaccaugau

SEQ ID NO: 2079027 - RNA, 19 nt, Homo sapiens
  misc_RNA (1)...(19): siRNA sense strand
ccaagauguuugccuucga

SEQ ID NO: 2079028 - RNA, 19 nt, Homo sapiens
  misc_RNA (1)...(19): siRNA sense strand
uaagggcuaugcagaagcu

SEQ ID NO: 2079029 - RNA, 19 nt, Homo sapiens
  misc_RNA (1)...(19): siRNA sense strand
guaccgucaugggcacaaa

SEQ ID NO: 2079030 - RNA, 19 nt, Homo sapiens
  misc_RNA (1)...(19): siRNA sense strand
ucagacagcggccaugaca

SEQ ID NO: 2079031 - RNA, 19 nt, Homo sapiens
  misc_RNA (1)...(19): siRNA sense strand
uggcuagcuucgacaguga

SEQ ID NO: 2079032 - RNA, 19 nt, Homo sapiens
  misc_RNA (1)...(19): siRNA sense strand
agaucaagguguacgagau

SEQ ID NO: 2079033 - RNA, 19 nt, Homo sapiens
  misc_RNA (1)...(19): siRNA sense strand
acgcagcucccacauguug

SEQ ID NO: 2079034 - RNA, 19 nt, Homo sapiens
  misc_RNA (1)...(19): siRNA sense strand
gagcugcuggucccggaaa

SEQ ID NO: 2079035 - RNA, 19 nt, Homo sapiens
  misc_RNA (1)...(19): siRNA sense strand
cagacacgguccgagaaug

SEQ ID NO: 2079036 - RNA, 19 nt, Homo sapiens
  misc_RNA (1)...(19): siRNA sense strand
ugccuucgaugccgucuuc

SEQ ID NO: 2079037 - RNA, 19 nt, Homo sapiens
  misc_RNA (1)...(19): siRNA sense strand
caucaucagcagcaucaau

SEQ ID NO: 2079038 - RNA, 19 nt, Homo sapiens
  misc_RNA (1)...(19): siRNA sense strand
gguggacccucggaagaag

SEQ ID NO: 2079039 - RNA, 19 nt, Homo sapiens
  misc_RNA (1)...(19): siRNA sense strand
gcaggugauccucuacgau

SEQ ID NO: 2079040 - RNA, 19 nt, Homo sapiens
  misc_RNA (1)...(19): siRNA sense strand
accgggagcucaccgacaa

SEQ ID NO: 2079041 - RNA, 19 nt, Homo sapiens
  misc_RNA (1)...(19): siRNA sense strand
ccgagacgcagaccacuuc

SEQ ID NO: 2079042 - RNA, 19 nt, Homo sapiens
  misc_RNA (1)...(19): siRNA sense strand
ucaugauggucaccugcuu

SEQ ID NO: 2079043 - RNA, 19 nt, Homo sapiens
  misc_RNA (1)...(19): siRNA sense strand
caaggcgcacgucaugaug

SEQ ID NO: 2079044 - RNA, 19 nt, Homo sapiens
  misc_RNA (1)...(19): siRNA sense strand
gcccugauggcuugucgaa

SEQ ID NO: 2079045 - RNA, 19 nt, Homo sapiens
  misc_RNA (1)...(19): siRNA sense strand
ugcagccuccuucuucaua

SEQ ID NO: 2079046 - RNA, 19 nt, Homo sapiens
  misc_RNA (1)...(19): siRNA sense strand
gaagacaucuaacaaggaa

SEQ ID NO: 2079047 - RNA, 19 nt, Homo sapiens
  misc_RNA (1)...(19): siRNA sense strand
caagagagcuucacuaagg

SEQ ID NO: 2079048 - RNA, 19 nt, Homo sapiens
  misc_RNA (1)...(19): siRNA sense strand
guacggcgcucagccauaa

SEQ ID NO: 2079049 - RNA, 19 nt, Homo sapiens
  misc_RNA (1)...(19): siRNA sense strand
agaaacagcuggaaguuau

SEQ ID NO: 2079050 - RNA, 19 nt, Homo sapiens
  misc_RNA (1)...(19): siRNA sense strand
gcgaacaggcguuaaauga

SEQ ID NO: 2079051 - RNA, 19 nt, Homo sapiens
  misc_RNA (1)...(19): siRNA sense strand
caccggagcuggacaguga

SEQ ID NO: 2079052 - RNA, 19 nt, Homo sapiens
  misc_RNA (1)...(19): siRNA sense strand
ggaggagccugacccuuau

SEQ ID NO: 2079053 - RNA, 19 nt, Homo sapiens
  misc_RNA (1)...(19): siRNA sense strand
gagaggaggugaucuucga

SEQ ID NO: 2079054 - RNA, 19 nt, Homo sapiens
  misc_RNA (1)...(19): siRNA sense strand
gaucuucgauaaccugaug

SEQ ID NO: 2079055 - RNA, 19 nt, Homo sapiens
  misc_RNA (1)...(19): siRNA sense strand
cccaggagcuacuacauaa

SEQ ID NO: 2079056 - RNA, 19 nt, Homo sapiens
  misc_RNA (1)...(19): siRNA sense strand
gcugaacucucgggacuuu

SEQ ID NO: 2079057 - RNA, 19 nt, Homo sapiens
  misc_RNA (1)...(19): siRNA sense strand
ggcaagagagcuucacuaa

SEQ ID NO: 2079058 - RNA, 19 nt, Homo sapiens
  misc_RNA (1)...(19): siRNA sense strand
caggaaggcugccaacaca

SEQ ID NO: 2079059 - RNA, 19 nt, Homo sapiens
  misc_RNA (1)...(19): siRNA sense strand
cagagcaccuugccgagaa

SEQ ID NO: 2079060 - RNA, 19 nt, Homo sapiens
  misc_RNA (1)...(19): siRNA sense strand
gaggauggccugggacgua

SEQ ID NO: 2079061 - RNA, 19 nt, Homo sapiens
  misc_RNA (1)...(19): siRNA sense strand
cggcagagauugcggagau

SEQ ID NO: 2079062 - RNA, 19 nt, Homo sapiens
  misc_RNA (1)...(19): siRNA sense strand
ucgauaaccugaugcugaa

SEQ ID NO: 2079063 - RNA, 19 nt, Homo sapiens
  misc_RNA (1)...(19): siRNA sense strand
aggaggagccugacccuua

SEQ ID NO: 2079064 - RNA, 19 nt, Homo sapiens
  misc_RNA (1)...(19): siRNA sense strand
cagaaacagcuggaaguua

SEQ ID NO: 2079065 - RNA, 19 nt, Homo sapiens
  misc_RNA (1)...(19): siRNA sense strand
agaaguacgucacgcugaa

SEQ ID NO: 2079066 - RNA, 19 nt, Homo sapiens
  misc_RNA (1)...(19): siRNA sense strand
gcuagguucucgccggaaa

SEQ ID NO: 2079067 - RNA, 19 nt, Homo sapiens
  misc_RNA (1)...(19): siRNA sense strand
gaagaucaaggaccauauc

SEQ ID NO: 2079068 - RNA, 19 nt, Homo sapiens
  misc_RNA (1)...(19): siRNA sense strand
cuacccagcucagauguga

SEQ ID NO: 2079069 - RNA, 19 nt, Homo sapiens
  misc_RNA (1)...(19): siRNA sense strand
gcagaaacagcuggaaguu

SEQ ID NO: 2079070 - RNA, 19 nt, Homo sapiens
  misc_RNA (1)...(19): siRNA sense strand
ggacguuugugaaugacau

SEQ ID NO: 2079071 - RNA, 19 nt, Homo sapiens
  misc_RNA (1)...(19): siRNA sense strand
cggcuacgauuccaacaug

SEQ ID NO: 2079072 - RNA, 19 nt, Homo sapiens
  misc_RNA (1)...(19): siRNA sense strand
gccgagagguuccugaucu

SEQ ID NO: 2079073 - RNA, 19 nt, Homo sapiens
  misc_RNA (1)...(19): siRNA sense strand
gaggaggugaucuucgaua

SEQ ID NO: 2079074 - RNA, 19 nt, Homo sapiens
  misc_RNA (1)...(19): siRNA sense strand
gcccgacuccucucuaauu

SEQ ID NO: 2079075 - RNA, 19 nt, Homo sapiens
  misc_RNA (1)...(19): siRNA sense strand
gagaauggucauccagcua

SEQ ID NO: 2079076 - RNA, 19 nt, Homo sapiens
  misc_RNA (1)...(19): siRNA sense strand
gcaagaugaagaucaagga

SEQ ID NO: 2079077 - RNA, 19 nt, Homo sapiens
  misc_RNA (1)...(19): siRNA sense strand
cgacuccucucuaauucug

SEQ ID NO: 2079078 - RNA, 19 nt, Homo sapiens
  misc_RNA (1)...(19): siRNA sense strand
gagauggugucggcugaga

SEQ ID NO: 2079079 - RNA, 19 nt, Homo sapiens
  misc_RNA (1)...(19): siRNA sense strand
gaauggggacgcuguguua

SEQ ID NO: 2079080 - RNA, 19 nt, Homo sapiens
  misc_RNA (1)...(19): siRNA sense strand
aggaggcacucaagcauga

SEQ ID NO: 2079081 - RNA, 19 nt, Homo sapiens
  misc_RNA (1)...(19): siRNA sense strand
cacacgagaugcccacgaa

SEQ ID NO: 2079082 - RNA, 19 nt, Homo sapiens
  misc_RNA (1)...(19): siRNA sense strand
gagccugacccuuaugguu

SEQ ID NO: 2079083 - RNA, 19 nt, Homo sapiens
  misc_RNA (1)...(19): siRNA sense strand
ucccucagcugcccaguga

SEQ ID NO: 2079084 - RNA, 19 nt, Homo sapiens
  misc_RNA (1)...(19): siRNA sense strand
ccgacuggcuggugcagaa

SEQ ID NO: 2079085 - RNA, 19 nt, Homo sapiens
  misc_RNA (1)...(19): siRNA sense strand
ucaaggaccauaucaccaa

SEQ ID NO: 2079086 - RNA, 19 nt, Homo sapiens
  misc_RNA (1)...(19): siRNA sense strand
aggaggugaucuucgauaa

SEQ ID NO: 2079087 - RNA, 19 nt, Homo sapiens
  misc_RNA (1)...(19): siRNA sense strand
gcuacgauuccaacaugua

SEQ ID NO: 2079088 - RNA, 19 nt, Homo sapiens
  misc_RNA (1)...(19): siRNA sense strand
ccgagagguuccugaucua

SEQ ID NO: 2079089 - RNA, 19 nt, Homo sapiens
  misc_RNA (1)...(19): siRNA sense strand
cccaggagauccacgaugu

SEQ ID NO: 2079090 - RNA, 19 nt, Homo sapiens
  misc_RNA (1)...(19): siRNA sense strand
cugcagcccuggcaagaug

SEQ ID NO: 2079091 - RNA, 19 nt, Homo sapiens
  misc_RNA (1)...(19): siRNA sense strand
gggacgcuguguuaucuag

SEQ ID NO: 2079092 - RNA, 19 nt, Homo sapiens
  misc_RNA (1)...(19): siRNA sense strand
ucaaugggacguuugugaa

SEQ ID NO: 2079093 - RNA, 19 nt, Homo sapiens
  misc_RNA (1)...(19): siRNA sense strand
gcaagagagcuucacuaag

SEQ ID NO: 2079094 - RNA, 19 nt, Homo sapiens
  misc_RNA (1)...(19): siRNA sense strand
ggacuuugaccagaacaug

SEQ ID NO: 2079095 - RNA, 19 nt, Homo sapiens
  misc_RNA (1)...(19): siRNA sense strand
gcagagauugcggagauug

SEQ ID NO: 2079096 - RNA, 19 nt, Homo sapiens
  misc_RNA (1)...(19): siRNA sense strand
gaccugggcagccucaaug

SEQ ID NO: 2079097 - RNA, 19 nt, Homo sapiens
  misc_RNA (1)...(19): siRNA sense strand
gaggugaucuucgauaacc

SEQ ID NO: 2079098 - RNA, 19 nt, Homo sapiens
  misc_RNA (1)...(19): siRNA sense strand
gaaccgagaggaggugauc

SEQ ID NO: 2079099 - RNA, 19 nt, Homo sapiens
  misc_RNA (1)...(19): siRNA sense strand
cagaugugauggccuccaa

SEQ ID NO: 2079100 - RNA, 19 nt, Homo sapiens
  misc_RNA (1)...(19): siRNA sense strand
ggagugugagcucaugcua

SEQ ID NO: 2079101 - RNA, 19 nt, Homo sapiens
  misc_RNA (1)...(19): siRNA sense strand
gacgcuguguuaucuagga

SEQ ID NO: 2079102 - RNA, 19 nt, Homo sapiens
  misc_RNA (1)...(19): siRNA sense strand
gaccauaucaccaaguuuu

SEQ ID NO: 2079103 - RNA, 19 nt, Homo sapiens
  misc_RNA (1)...(19): siRNA sense strand
ccagcgaacaggcguuaaa

SEQ ID NO: 2079104 - RNA, 19 nt, Homo sapiens
  misc_RNA (1)...(19): siRNA sense strand
cgcugaagcucaacgaugu

SEQ ID NO: 2079105 - RNA, 19 nt, Homo sapiens
  misc_RNA (1)...(19): siRNA sense strand
caagcagcaugccgucauc

SEQ ID NO: 2079106 - RNA, 19 nt, Homo sapiens
  misc_RNA (1)...(19): siRNA sense strand
ggacacggacgacgaugag

SEQ ID NO: 2079107 - RNA, 19 nt, Homo sapiens
  misc_RNA (1)...(19): siRNA sense strand
ggaggaggcacucaagcau

SEQ ID NO: 2079108 - RNA, 19 nt, Homo sapiens
  misc_RNA (1)...(19): siRNA sense strand
ugaggcgggugcagaaaca

SEQ ID NO: 2079109 - RNA, 19 nt, Homo sapiens
  misc_RNA (1)...(19): siRNA sense strand
ccagccagcaccaagauga

SEQ ID NO: 2079110 - RNA, 19 nt, Homo sapiens
  misc_RNA (1)...(19): siRNA sense strand
agugugagcucaugcuaca

SEQ ID NO: 2079111 - RNA, 19 nt, Homo sapiens
  misc_RNA (1)...(19): siRNA sense strand
gaggugcccauccugaaga

SEQ ID NO: 2079112 - RNA, 19 nt, Homo sapiens
  misc_RNA (1)...(19): siRNA sense strand
gaggcagcaucacccacuu

SEQ ID NO: 2079113 - RNA, 19 nt, Homo sapiens
  misc_RNA (1)...(19): siRNA sense strand
gcaccuugccgagaagaug

SEQ ID NO: 2079114 - RNA, 19 nt, Homo sapiens
  misc_RNA (1)...(19): siRNA sense strand
ugaacucucgggacuuuga

SEQ ID NO: 2079115 - RNA, 19 nt, Homo sapiens
  misc_RNA (1)...(19): siRNA sense strand
caaugggacguuugugaau

SEQ ID NO: 2079116 - RNA, 19 nt, Homo sapiens
  misc_RNA (1)...(19): siRNA sense strand
ucccgccucuuucuucauu

SEQ ID NO: 2079117 - RNA, 19 nt, Homo sapiens
  misc_RNA (1)...(19): siRNA sense strand
gaaacagcuggaaguuauc

SEQ ID NO: 2079118 - RNA, 19 nt, Homo sapiens
  misc_RNA (1)...(19): siRNA sense strand
agacaucuaacaaggaaau

SEQ ID NO: 2079119 - RNA, 19 nt, Homo sapiens
  misc_RNA (1)...(19): siRNA sense strand
ugaagacaucuaacaagga

SEQ ID NO: 2079120 - RNA, 19 nt, Homo sapiens
  misc_RNA (1)...(19): siRNA sense strand
ugugaagggucauuuacca

SEQ ID NO: 2079121 - RNA, 19 nt, Homo sapiens
  misc_RNA (1)...(19): siRNA sense strand
ggaccugggcagccucaau

SEQ ID NO: 2079122 - RNA, 19 nt, Homo sapiens
  misc_RNA (1)...(19): siRNA sense strand
aagagagcuucacuaagga

SEQ ID NO: 2079123 - RNA, 19 nt, Homo sapiens
  misc_RNA (1)...(19): siRNA sense strand
ggaccauaucaccaaguuu

SEQ ID NO: 2079124 - RNA, 19 nt, Homo sapiens
  misc_RNA (1)...(19): siRNA sense strand
gcccagcgaacaggcguua

SEQ ID NO: 2079125 - RNA, 19 nt, Homo sapiens
  misc_RNA (1)...(19): siRNA sense strand
ccagcaggccuuugucauc

SEQ ID NO: 2079126 - RNA, 19 nt, Homo sapiens
  misc_RNA (1)...(19): siRNA sense strand
cagccucaaugggacguuu

SEQ ID NO: 2079127 - RNA, 19 nt, Homo sapiens
  misc_RNA (1)...(19): siRNA sense strand
gacuuugaccagaacauga

SEQ ID NO: 2079128 - RNA, 19 nt, Homo sapiens
  misc_RNA (1)...(19): siRNA sense strand
gccugacccuuaugguuuc

SEQ ID NO: 2079129 - RNA, 19 nt, Homo sapiens
  misc_RNA (1)...(19): siRNA sense strand
gcucagccagcucccagaa

SEQ ID NO: 2079130 - RNA, 19 nt, Homo sapiens
  misc_RNA (1)...(19): siRNA sense strand
gguacggcgcucagccaua

SEQ ID NO: 2079131 - RNA, 19 nt, Homo sapiens
  misc_RNA (1)...(19): siRNA sense strand
ggacuucauggcccagugu

SEQ ID NO: 2079132 - RNA, 19 nt, Homo sapiens
  misc_RNA (1)...(19): siRNA sense strand
agcaugccgucaucaacua

SEQ ID NO: 2079133 - RNA, 19 nt, Homo sapiens
  misc_RNA (1)...(19): siRNA sense strand
acaaggaaaucagcuccau

SEQ ID NO: 2079134 - RNA, 19 nt, Homo sapiens
  misc_RNA (1)...(19): siRNA sense strand
gcaucccggaccagaagua

SEQ ID NO: 2079135 - RNA, 19 nt, Homo sapiens
  misc_RNA (1)...(19): siRNA sense strand
cuacgauuccaacauguau

SEQ ID NO: 2079136 - RNA, 19 nt, Homo sapiens
  misc_RNA (1)...(19): siRNA sense strand
ccgagaagaugaagauccu

SEQ ID NO: 2079137 - RNA, 19 nt, Homo sapiens
  misc_RNA (1)...(19): siRNA sense strand
agccugacccuuaugguuu

SEQ ID NO: 2079138 - RNA, 19 nt, Homo sapiens
  misc_RNA (1)...(19): siRNA sense strand
aggcccgacuccucucuaa

SEQ ID NO: 2079139 - RNA, 19 nt, Homo sapiens
  misc_RNA (1)...(19): siRNA sense strand
cgggauggcgucuauguca

SEQ ID NO: 2079140 - RNA, 19 nt, Homo sapiens
  misc_RNA (1)...(19): siRNA sense strand
caacucccgccucuuucuu

SEQ ID NO: 2079141 - RNA, 19 nt, Homo sapiens
  misc_RNA (1)...(19): siRNA sense strand
aaugggacguuugugaaug

SEQ ID NO: 2079142 - RNA, 19 nt, Homo sapiens
  misc_RNA (1)...(19): siRNA sense strand
aggaccauaucaccaaguu

SEQ ID NO: 2079143 - RNA, 19 nt, Homo sapiens
  misc_RNA (1)...(19): siRNA sense strand
cuggcaagaugaagaucaa

SEQ ID NO: 2079144 - RNA, 19 nt, Homo sapiens
  misc_RNA (1)...(19): siRNA sense strand
gauccucuuucagaacaca

SEQ ID NO: 2079145 - RNA, 19 nt, Homo sapiens
  misc_RNA (1)...(19): siRNA sense strand
augggacguuugugaauga

SEQ ID NO: 2079146 - RNA, 19 nt, Homo sapiens
  misc_RNA (1)...(19): siRNA sense strand
caacagaggugacgcugaa

SEQ ID NO: 2079147 - RNA, 19 nt, Homo sapiens
  misc_RNA (1)...(19): siRNA sense strand
gaaaacaggucaaugcuaa

SEQ ID NO: 2079148 - RNA, 19 nt, Homo sapiens
  misc_RNA (1)...(19): siRNA sense strand
guacaaccguguucuuuga

SEQ ID NO: 2079149 - RNA, 19 nt, Homo sapiens
  misc_RNA (1)...(19): siRNA sense strand
gaaaucgaaggaaauguua

SEQ ID NO: 2079150 - RNA, 19 nt, Homo sapiens
  misc_RNA (1)...(19): siRNA sense strand
gagccaagcuggacagugu

SEQ ID NO: 2079151 - RNA, 19 nt, Homo sapiens
  misc_RNA (1)...(19): siRNA sense strand
gagccaagcuggacagugu

SEQ ID NO: 2079152 - RNA, 19 nt, Homo sapiens
  misc_RNA (1)...(19): siRNA sense strand
ggacaugacugccaaagac

SEQ ID NO: 2079153 - RNA, 19 nt, Homo sapiens
  misc_RNA (1)...(19): siRNA sense strand
ggacaugacugccaaagac

SEQ ID NO: 2079154 - RNA, 19 nt, Homo sapiens
  misc_RNA (1)...(19): siRNA sense strand
gaagaugaccacucuguga

SEQ ID NO: 2079155 - RNA, 19 nt, Homo sapiens
  misc_RNA (1)...(19): siRNA sense strand
ugaaggagauggagaggaa

SEQ ID NO: 2079156 - RNA, 19 nt, Homo sapiens
  misc_RNA (1)...(19): siRNA sense strand
guacaagguucaguucaaa

SEQ ID NO: 2079157 - RNA, 19 nt, Homo sapiens
  misc_RNA (1)...(19): siRNA sense strand
gcauucagcucccuucugu

SEQ ID NO: 2079158 - RNA, 19 nt, Homo sapiens
  misc_RNA (1)...(19): siRNA sense strand
gaaggaggcacacagauug

SEQ ID NO: 2079159 - RNA, 19 nt, Homo sapiens
  misc_RNA (1)...(19): siRNA sense strand
gagccaagcuggacaguac

SEQ ID NO: 2079160 - RNA, 19 nt, Homo sapiens
  misc_RNA (1)...(19): siRNA sense strand
ggaugugucugcacccaaa

SEQ ID NO: 2079161 - RNA, 19 nt, Homo sapiens
  misc_RNA (1)...(19): siRNA sense strand
gcagaugccuaguuugaag

SEQ ID NO: 2079162 - RNA, 19 nt, Homo sapiens
  misc_RNA (1)...(19): siRNA sense strand
gaaauuagggugcgaguac

SEQ ID NO: 2079163 - RNA, 19 nt, Homo sapiens
  misc_RNA (1)...(19): siRNA sense strand
gacugaggcugccgacuuu

SEQ ID NO: 2079164 - RNA, 19 nt, Homo sapiens
  misc_RNA (1)...(19): siRNA sense strand
gaagacagugacucaauga

SEQ ID NO: 2079165 - RNA, 19 nt, Homo sapiens
  misc_RNA (1)...(19): siRNA sense strand
ggacgugacugccaaagac

SEQ ID NO: 2079166 - RNA, 19 nt, Homo sapiens
  misc_RNA (1)...(19): siRNA sense strand
ggacgugacugccaaagac

SEQ ID NO: 2079167 - RNA, 19 nt, Homo sapiens
  misc_RNA (1)...(19): siRNA sense strand
ggacgugacugccaaagac

SEQ ID NO: 2079168 - RNA, 19 nt, Homo sapiens
  misc_RNA (1)...(19): siRNA sense strand
ggacgugacugccaaagac

SEQ ID NO: 2079169 - RNA, 19 nt, Homo sapiens
  misc_RNA (1)...(19): siRNA sense strand
ggacgugacugccaaagac

SEQ ID NO: 2079170 - RNA, 19 nt, Homo sapiens
  misc_RNA (1)...(19): siRNA sense strand
gacagugacucaaugacaa

SEQ ID NO: 2079171 - RNA, 19 nt, Homo sapiens
  misc_RNA (1)...(19): siRNA sense strand
ggacacggauguugcugau

SEQ ID NO: 2079172 - RNA, 19 nt, Homo sapiens
  misc_RNA (1)...(19): siRNA sense strand
cagaugcccuguuugaaga

SEQ ID NO: 2079173 - RNA, 19 nt, Homo sapiens
  misc_RNA (1)...(19): siRNA sense strand
acaaggaccugacuaccaa

SEQ ID NO: 2079174 - RNA, 19 nt, Homo sapiens
  misc_RNA (1)...(19): siRNA sense strand
gcgccaagcuggaccugaa

SEQ ID NO: 2079175 - RNA, 19 nt, Homo sapiens
  misc_RNA (1)...(19): siRNA sense strand
ggacagggcccuucaucga

SEQ ID NO: 2079176 - RNA, 19 nt, Homo sapiens
  misc_RNA (1)...(19): siRNA sense strand
gggaucagcugcucaguac

SEQ ID NO: 2079177 - RNA, 19 nt, Homo sapiens
  misc_RNA (1)...(19): siRNA sense strand
gcaaguccauugaggucuu

SEQ ID NO: 2079178 - RNA, 19 nt, Homo sapiens
  misc_RNA (1)...(19): siRNA sense strand
cgagggagccggcuucaaa

SEQ ID NO: 2079179 - RNA, 19 nt, Homo sapiens
  misc_RNA (1)...(19): siRNA sense strand
gcugaugggugcagagaga

SEQ ID NO: 2079180 - RNA, 19 nt, Homo sapiens
  misc_RNA (1)...(19): siRNA sense strand
caaagaagacagugacuca

SEQ ID NO: 2079181 - RNA, 19 nt, Homo sapiens
  misc_RNA (1)...(19): siRNA sense strand
ccucaagggcccugaaaua

SEQ ID NO: 2079182 - RNA, 19 nt, Homo sapiens
  misc_RNA (1)...(19): siRNA sense strand
ccucaagggcccugaaaua

SEQ ID NO: 2079183 - RNA, 19 nt, Homo sapiens
  misc_RNA (1)...(19): siRNA sense strand
gcacagaggaaggauuaaa

SEQ ID NO: 2079184 - RNA, 19 nt, Homo sapiens
  misc_RNA (1)...(19): siRNA sense strand
ggaaucuguuguucaugaa

SEQ ID NO: 2079185 - RNA, 19 nt, Homo sapiens
  misc_RNA (1)...(19): siRNA sense strand
ccacugaccuccgcauuca

SEQ ID NO: 2079186 - RNA, 19 nt, Homo sapiens
  misc_RNA (1)...(19): siRNA sense strand
ggacuugacuaccaaagac

SEQ ID NO: 2079187 - RNA, 19 nt, Homo sapiens
  misc_RNA (1)...(19): siRNA sense strand
gguccaggcuguccaagug

SEQ ID NO: 2079188 - RNA, 19 nt, Homo sapiens
  misc_RNA (1)...(19): siRNA sense strand
gagaugcccaguuuaaaga

SEQ ID NO: 2079189 - RNA, 19 nt, Homo sapiens
  misc_RNA (1)...(19): siRNA sense strand
gaacaggaucgagaaguga

SEQ ID NO: 2079190 - RNA, 19 nt, Homo sapiens
  misc_RNA (1)...(19): siRNA sense strand
uggaaucuguuguucauga

SEQ ID NO: 2079191 - RNA, 19 nt, Homo sapiens
  misc_RNA (1)...(19): siRNA sense strand
aaacugagcacgucugguu

SEQ ID NO: 2079192 - RNA, 19 nt, Homo sapiens
  misc_RNA (1)...(19): siRNA sense strand
ugagggagccggcuucaaa

SEQ ID NO: 2079193 - RNA, 19 nt, Homo sapiens
  misc_RNA (1)...(19): siRNA sense strand
agacacagaaggacagaua

SEQ ID NO: 2079194 - RNA, 19 nt, Homo sapiens
  misc_RNA (1)...(19): siRNA sense strand
ccucugaaaucgaaggaaa

SEQ ID NO: 2079195 - RNA, 19 nt, Homo sapiens
  misc_RNA (1)...(19): siRNA sense strand
cagauuggcccaccagaaa

SEQ ID NO: 2079196 - RNA, 19 nt, Homo sapiens
  misc_RNA (1)...(19): siRNA sense strand
caaagacagcaaauucaaa

SEQ ID NO: 2079197 - RNA, 19 nt, Homo sapiens
  misc_RNA (1)...(19): siRNA sense strand
gaagugacagucccugaug

SEQ ID NO: 2079198 - RNA, 19 nt, Homo sapiens
  misc_RNA (1)...(19): siRNA sense strand
ccacugaccugagcauaca

SEQ ID NO: 2079199 - RNA, 19 nt, Homo sapiens
  misc_RNA (1)...(19): siRNA sense strand
ggaggugacugccaaagac

SEQ ID NO: 2079200 - RNA, 19 nt, Homo sapiens
  misc_RNA (1)...(19): siRNA sense strand
gugcagaggcccaguuuga

SEQ ID NO: 2079201 - RNA, 19 nt, Homo sapiens
  misc_RNA (1)...(19): siRNA sense strand
gaucagcugcucaguacaa

SEQ ID NO: 2079202 - RNA, 19 nt, Homo sapiens
  misc_RNA (1)...(19): siRNA sense strand
gcagaugcccuguuugaag

SEQ ID NO: 2079203 - RNA, 19 nt, Homo sapiens
  misc_RNA (1)...(19): siRNA sense strand
acaaggaugugacuaccaa

SEQ ID NO: 2079204 - RNA, 19 nt, Homo sapiens
  misc_RNA (1)...(19): siRNA sense strand
auaugaagaugcucucaaa

SEQ ID NO: 2079205 - RNA, 19 nt, Homo sapiens
  misc_RNA (1)...(19): siRNA sense strand
ggauguagcugggaaagac

SEQ ID NO: 2079206 - RNA, 19 nt, Homo sapiens
  misc_RNA (1)...(19): siRNA sense strand
cagguggacuugaaacuuc

SEQ ID NO: 2079207 - RNA, 19 nt, Homo sapiens
  misc_RNA (1)...(19): siRNA sense strand
gugcagaaacggaagauga

SEQ ID NO: 2079208 - RNA, 19 nt, Homo sapiens
  misc_RNA (1)...(19): siRNA sense strand
ggagaugcccaguuuaaag

SEQ ID NO: 2079209 - RNA, 19 nt, Homo sapiens
  misc_RNA (1)...(19): siRNA sense strand
cgaaggaggcacacagauu

SEQ ID NO: 2079210 - RNA, 19 nt, Homo sapiens
  misc_RNA (1)...(19): siRNA sense strand
gugcagaugccuaguuuga

SEQ ID NO: 2079211 - RNA, 19 nt, Homo sapiens
  misc_RNA (1)...(19): siRNA sense strand
gaaacugcauuuuaaagug

SEQ ID NO: 2079212 - RNA, 19 nt, Homo sapiens
  misc_RNA (1)...(19): siRNA sense strand
ccacucaccucagcauuca

SEQ ID NO: 2079213 - RNA, 19 nt, Homo sapiens
  misc_RNA (1)...(19): siRNA sense strand
gauaugcccaguuucaaga

SEQ ID NO: 2079214 - RNA, 19 nt, Homo sapiens
  misc_RNA (1)...(19): siRNA sense strand
ggagagggcagaacaggau

SEQ ID NO: 2079215 - RNA, 19 nt, Homo sapiens
  misc_RNA (1)...(19): siRNA sense strand
ggacuugaaacuuccagaa

SEQ ID NO: 2079216 - RNA, 19 nt, Homo sapiens
  misc_RNA (1)...(19): siRNA sense strand
caagggcccugaaauagac

SEQ ID NO: 2079217 - RNA, 19 nt, Homo sapiens
  misc_RNA (1)...(19): siRNA sense strand
aaguggagaugcccaguuu

SEQ ID NO: 2079218 - RNA, 19 nt, Homo sapiens
  misc_RNA (1)...(19): siRNA sense strand
ucaagaugcugucguuugg

SEQ ID NO: 2079219 - RNA, 19 nt, Homo sapiens
  misc_RNA (1)...(19): siRNA sense strand
caagggcccugaaauagac

SEQ ID NO: 2079220 - RNA, 19 nt, Homo sapiens
  misc_RNA (1)...(19): siRNA sense strand
aaguggagaugcccaguuu

SEQ ID NO: 2079221 - RNA, 19 nt, Homo sapiens
  misc_RNA (1)...(19): siRNA sense strand
caacuaauacacgaugaaa

SEQ ID NO: 2079222 - RNA, 19 nt, Homo sapiens
  misc_RNA (1)...(19): siRNA sense strand
agcaacagcugauagaaga

SEQ ID NO: 2079223 - RNA, 19 nt, Homo sapiens
  misc_RNA (1)...(19): siRNA sense strand
gaagugaugccugcucaga

SEQ ID NO: 2079224 - RNA, 19 nt, Homo sapiens
  misc_RNA (1)...(19): siRNA sense strand
ugaaaucgaaggaaauguu

SEQ ID NO: 2079225 - RNA, 19 nt, Homo sapiens
  misc_RNA (1)...(19): siRNA sense strand
ugaauggucgucaaagaaa

SEQ ID NO: 2079226 - RNA, 19 nt, Homo sapiens
  misc_RNA (1)...(19): siRNA sense strand
ccaaagacagcaaauucaa

SEQ ID NO: 2079227 - RNA, 19 nt, Homo sapiens
  misc_RNA (1)...(19): siRNA sense strand
guggagaugcccaguuuaa

SEQ ID NO: 2079228 - RNA, 19 nt, Homo sapiens
  misc_RNA (1)...(19): siRNA sense strand
gaagguggaagccgacaug

SEQ ID NO: 2079229 - RNA, 19 nt, Homo sapiens
  misc_RNA (1)...(19): siRNA sense strand
ccaaagauagcaaguucaa

SEQ ID NO: 2079230 - RNA, 19 nt, Homo sapiens
  misc_RNA (1)...(19): siRNA sense strand
agaagacagugacucaaug

SEQ ID NO: 2079231 - RNA, 19 nt, Homo sapiens
  misc_RNA (1)...(19): siRNA sense strand
gauaagaaugcccaaguuc

SEQ ID NO: 2079232 - RNA, 19 nt, Homo sapiens
  misc_RNA (1)...(19): siRNA sense strand
cuucaccugucuacgaaua

SEQ ID NO: 2079233 - RNA, 19 nt, Homo sapiens
  misc_RNA (1)...(19): siRNA sense strand
gagaugcccaguuucaaga

SEQ ID NO: 2079234 - RNA, 19 nt, Homo sapiens
  misc_RNA (1)...(19): siRNA sense strand
ccagauagacguuaauguc

SEQ ID NO: 2079235 - RNA, 19 nt, Homo sapiens
  misc_RNA (1)...(19): siRNA sense strand
gugcagaugcccuguuuga

SEQ ID NO: 2079236 - RNA, 19 nt, Homo sapiens
  misc_RNA (1)...(19): siRNA sense strand
gagaugcccaguuugaaga

SEQ ID NO: 2079237 - RNA, 19 nt, Homo sapiens
  misc_RNA (1)...(19): siRNA sense strand
gagaugcccaguuucaaga

SEQ ID NO: 2079238 - RNA, 19 nt, Homo sapiens
  misc_RNA (1)...(19): siRNA sense strand
caagaugcccaaaguagau

SEQ ID NO: 2079239 - RNA, 19 nt, Homo sapiens
  misc_RNA (1)...(19): siRNA sense strand
caagaugcccaaaguagau

SEQ ID NO: 2079240 - RNA, 19 nt, Homo sapiens
  misc_RNA (1)...(19): siRNA sense strand
ggugugacagccaaagaua

SEQ ID NO: 2079241 - RNA, 19 nt, Homo sapiens
  misc_RNA (1)...(19): siRNA sense strand
caagaugcccaaaguagau

SEQ ID NO: 2079242 - RNA, 19 nt, Homo sapiens
  misc_RNA (1)...(19): siRNA sense strand
gagaugcccaguuugaaga

SEQ ID NO: 2079243 - RNA, 19 nt, Homo sapiens
  misc_RNA (1)...(19): siRNA sense strand
gugcagaugcccaguuuga

SEQ ID NO: 2079244 - RNA, 19 nt, Homo sapiens
  misc_RNA (1)...(19): siRNA sense strand
gagaugcccaguuucaaga

SEQ ID NO: 2079245 - RNA, 19 nt, Homo sapiens
  misc_RNA (1)...(19): siRNA sense strand
gagaugcccaguuucaaga

SEQ ID NO: 2079246 - RNA, 19 nt, Homo sapiens
  misc_RNA (1)...(19): siRNA sense strand
gcagaaagcgcuacaagaa

SEQ ID NO: 2079247 - RNA, 19 nt, Homo sapiens
  misc_RNA (1)...(19): siRNA sense strand
cagcggagaucgauuguaa

SEQ ID NO: 2079248 - RNA, 19 nt, Homo sapiens
  misc_RNA (1)...(19): siRNA sense strand
ucaaggagcuggagaagga

SEQ ID NO: 2079249 - RNA, 19 nt, Homo sapiens
  misc_RNA (1)...(19): siRNA sense strand
gcaacaagcuucagaucau

SEQ ID NO: 2079250 - RNA, 19 nt, Homo sapiens
  misc_RNA (1)...(19): siRNA sense strand
gaagagcccugacgaagag

SEQ ID NO: 2079251 - RNA, 19 nt, Homo sapiens
  misc_RNA (1)...(19): siRNA sense strand
ggugaucgcugucaagaug

SEQ ID NO: 2079252 - RNA, 19 nt, Homo sapiens
  misc_RNA (1)...(19): siRNA sense strand
gcaguauccucacuucuug

SEQ ID NO: 2079253 - RNA, 19 nt, Homo sapiens
  misc_RNA (1)...(19): siRNA sense strand
ggaccugccugucaccaaa

SEQ ID NO: 2079254 - RNA, 19 nt, Homo sapiens
  misc_RNA (1)...(19): siRNA sense strand
acaaggacguggagucuaa

SEQ ID NO: 2079255 - RNA, 19 nt, Homo sapiens
  misc_RNA (1)...(19): siRNA sense strand
ggagaucgauuguaagaac

SEQ ID NO: 2079256 - RNA, 19 nt, Homo sapiens
  misc_RNA (1)...(19): siRNA sense strand
gagcagcugucccacaaga

SEQ ID NO: 2079257 - RNA, 19 nt, Homo sapiens
  misc_RNA (1)...(19): siRNA sense strand
ccaggaagacuguguauga

SEQ ID NO: 2079258 - RNA, 19 nt, Homo sapiens
  misc_RNA (1)...(19): siRNA sense strand
ccaaggagaagaacaagaa

SEQ ID NO: 2079259 - RNA, 19 nt, Homo sapiens
  misc_RNA (1)...(19): siRNA sense strand
agaaagcgcuacaagaaca

SEQ ID NO: 2079260 - RNA, 19 nt, Homo sapiens
  misc_RNA (1)...(19): siRNA sense strand
caacaagcuucagaucaug

SEQ ID NO: 2079261 - RNA, 19 nt, Homo sapiens
  misc_RNA (1)...(19): siRNA sense strand
gcagcgacgucaaguucuu

SEQ ID NO: 2079262 - RNA, 19 nt, Homo sapiens
  misc_RNA (1)...(19): siRNA sense strand
gaaccauccugggcuacaa

SEQ ID NO: 2079263 - RNA, 19 nt, Homo sapiens
  misc_RNA (1)...(19): siRNA sense strand
guaagaacgacguccauga

SEQ ID NO: 2079264 - RNA, 19 nt, Homo sapiens
  misc_RNA (1)...(19): siRNA sense strand
gaagagggacgccgagaag

SEQ ID NO: 2079265 - RNA, 19 nt, Homo sapiens
  misc_RNA (1)...(19): siRNA sense strand
gacgaagaguccucccaaa

SEQ ID NO: 2079266 - RNA, 19 nt, Homo sapiens
  misc_RNA (1)...(19): siRNA sense strand
ggaccuggaccuccuguau

SEQ ID NO: 2079267 - RNA, 19 nt, Homo sapiens
  misc_RNA (1)...(19): siRNA sense strand
gaagagggaaggcaacaag

SEQ ID NO: 2079268 - RNA, 19 nt, Homo sapiens
  misc_RNA (1)...(19): siRNA sense strand
ucuaagagccagugcauug

SEQ ID NO: 2079269 - RNA, 19 nt, Homo sapiens
  misc_RNA (1)...(19): siRNA sense strand
gcagaagagcccugacgaa

SEQ ID NO: 2079270 - RNA, 19 nt, Homo sapiens
  misc_RNA (1)...(19): siRNA sense strand
ccaaguccacggauaacua

SEQ ID NO: 2079271 - RNA, 19 nt, Homo sapiens
  misc_RNA (1)...(19): siRNA sense strand
ccaacagccuggacaacga

SEQ ID NO: 2079272 - RNA, 19 nt, Homo sapiens
  misc_RNA (1)...(19): siRNA sense strand
gaaaacaucauccuuguca

SEQ ID NO: 2079273 - RNA, 19 nt, Homo sapiens
  misc_RNA (1)...(19): siRNA sense strand
gcggagaucgauuguaaga

SEQ ID NO: 2079274 - RNA, 19 nt, Homo sapiens
  misc_RNA (1)...(19): siRNA sense strand
ggaagagggacgccgagaa

SEQ ID NO: 2079275 - RNA, 19 nt, Homo sapiens
  misc_RNA (1)...(19): siRNA sense strand
gaagaguccucccaaaagu

SEQ ID NO: 2079276 - RNA, 19 nt, Homo sapiens
  misc_RNA (1)...(19): siRNA sense strand
cagaggccaugcugaccua

SEQ ID NO: 2079277 - RNA, 19 nt, Homo sapiens
  misc_RNA (1)...(19): siRNA sense strand
gaagcugcggccauacuuu

SEQ ID NO: 2079278 - RNA, 19 nt, Homo sapiens
  misc_RNA (1)...(19): siRNA sense strand
ccaagaaagcgaaggacaa

SEQ ID NO: 2079279 - RNA, 19 nt, Homo sapiens
  misc_RNA (1)...(19): siRNA sense strand
guggacaaguggagacaga

SEQ ID NO: 2079280 - RNA, 19 nt, Homo sapiens
  misc_RNA (1)...(19): siRNA sense strand
augcagggcuccaaacgaa

SEQ ID NO: 2079281 - RNA, 19 nt, Homo sapiens
  misc_RNA (1)...(19): siRNA sense strand
cugcggagguucaaagugu

SEQ ID NO: 2079282 - RNA, 19 nt, Homo sapiens
  misc_RNA (1)...(19): siRNA sense strand
uggcugaggugaugcaaca

SEQ ID NO: 2079283 - RNA, 19 nt, Homo sapiens
  misc_RNA (1)...(19): siRNA sense strand
ggacacgccagacauugug

SEQ ID NO: 2079284 - RNA, 19 nt, Homo sapiens
  misc_RNA (1)...(19): siRNA sense strand
uggagcagcugucccacaa

SEQ ID NO: 2079285 - RNA, 19 nt, Homo sapiens
  misc_RNA (1)...(19): siRNA sense strand
ggccggagcacauccuuga

SEQ ID NO: 2079286 - RNA, 19 nt, Homo sapiens
  misc_RNA (1)...(19): siRNA sense strand
ggacaaggacguggagucu

SEQ ID NO: 2079287 - RNA, 19 nt, Homo sapiens
  misc_RNA (1)...(19): siRNA sense strand
ugucacgcaucacgcagua

SEQ ID NO: 2079288 - RNA, 19 nt, Homo sapiens
  misc_RNA (1)...(19): siRNA sense strand
guacaggacacgccagaca

SEQ ID NO: 2079289 - RNA, 19 nt, Homo sapiens
  misc_RNA (1)...(19): siRNA sense strand
auacagagauacugcaacu

SEQ ID NO: 2079290 - RNA, 19 nt, Homo sapiens
  misc_RNA (1)...(19): siRNA sense strand
caagaugcagggcuccaaa

SEQ ID NO: 2079291 - RNA, 19 nt, Homo sapiens
  misc_RNA (1)...(19): siRNA sense strand
gugcagcgacgucaaguuc

SEQ ID NO: 2079292 - RNA, 19 nt, Homo sapiens
  misc_RNA (1)...(19): siRNA sense strand
gagggaaggcaacaagcuu

SEQ ID NO: 2079293 - RNA, 19 nt, Homo sapiens
  misc_RNA (1)...(19): siRNA sense strand
agaaagcgaaggacaagga

SEQ ID NO: 2079294 - RNA, 19 nt, Homo sapiens
  misc_RNA (1)...(19): siRNA sense strand
caagaaagcgaaggacaag

SEQ ID NO: 2079295 - RNA, 19 nt, Homo sapiens
  misc_RNA (1)...(19): siRNA sense strand
ucaccaaggagaagaacaa

SEQ ID NO: 2079296 - RNA, 19 nt, Homo sapiens
  misc_RNA (1)...(19): siRNA sense strand
agaagagcccugacgaaga

SEQ ID NO: 2079297 - RNA, 19 nt, Homo sapiens
  misc_RNA (1)...(19): siRNA sense strand
caccaucgucucacggaua

SEQ ID NO: 2079298 - RNA, 19 nt, Homo sapiens
  misc_RNA (1)...(19): siRNA sense strand
gaccuucuccuugcaguau

SEQ ID NO: 2079299 - RNA, 19 nt, Homo sapiens
  misc_RNA (1)...(19): siRNA sense strand
ggacuaccgcuacaacaac

SEQ ID NO: 2079300 - RNA, 19 nt, Homo sapiens
  misc_RNA (1)...(19): siRNA sense strand
gcagggcuccaaacgaauc

SEQ ID NO: 2079301 - RNA, 19 nt, Homo sapiens
  misc_RNA (1)...(19): siRNA sense strand
ggcaacaagcuucagauca

SEQ ID NO: 2079302 - RNA, 19 nt, Homo sapiens
  misc_RNA (1)...(19): siRNA sense strand
gaagaacaagaaggugaug

SEQ ID NO: 2079303 - RNA, 19 nt, Homo sapiens
  misc_RNA (1)...(19): siRNA sense strand
aacagaacuucaagcagaa

SEQ ID NO: 2079304 - RNA, 19 nt, Homo sapiens
  misc_RNA (1)...(19): siRNA sense strand
cgaagaagcagcggagauc

SEQ ID NO: 2079305 - RNA, 19 nt, Homo sapiens
  misc_RNA (1)...(19): siRNA sense strand
ggacgaggacgacuuugac

SEQ ID NO: 2079306 - RNA, 19 nt, Homo sapiens
  misc_RNA (1)...(19): siRNA sense strand
gaccuggaccuccuguaug

SEQ ID NO: 2079307 - RNA, 19 nt, Homo sapiens
  misc_RNA (1)...(19): siRNA sense strand
ggauacagagauacugcaa

SEQ ID NO: 2079308 - RNA, 19 nt, Homo sapiens
  misc_RNA (1)...(19): siRNA sense strand
gaugaccagcuucccgaaa

SEQ ID NO: 2079309 - RNA, 19 nt, Homo sapiens
  misc_RNA (1)...(19): siRNA sense strand
ggaggaucaccaagacaga

SEQ ID NO: 2079310 - RNA, 19 nt, Homo sapiens
  misc_RNA (1)...(19): siRNA sense strand
gcaacacccgucugaaggu

SEQ ID NO: 2079311 - RNA, 19 nt, Homo sapiens
  misc_RNA (1)...(19): siRNA sense strand
aagaaggaccugccuguca

SEQ ID NO: 2079312 - RNA, 19 nt, Homo sapiens
  misc_RNA (1)...(19): siRNA sense strand
accuggaccuccuguauga

SEQ ID NO: 2079313 - RNA, 19 nt, Homo sapiens
  misc_RNA (1)...(19): siRNA sense strand
agacggagauugggagcau

SEQ ID NO: 2079314 - RNA, 19 nt, Homo sapiens
  misc_RNA (1)...(19): siRNA sense strand
gcgggaggaucaccaagac

SEQ ID NO: 2079315 - RNA, 19 nt, Homo sapiens
  misc_RNA (1)...(19): siRNA sense strand
uggcgggagcgcagcauua

SEQ ID NO: 2079316 - RNA, 19 nt, Homo sapiens
  misc_RNA (1)...(19): siRNA sense strand
agagggacgccgagaagaa

SEQ ID NO: 2079317 - RNA, 19 nt, Homo sapiens
  misc_RNA (1)...(19): siRNA sense strand
ugugaagguuggaauugug

SEQ ID NO: 2079318 - RNA, 19 nt, Homo sapiens
  misc_RNA (1)...(19): siRNA sense strand
aagcagcggagaucgauug

SEQ ID NO: 2079319 - RNA, 19 nt, Homo sapiens
  misc_RNA (1)...(19): siRNA sense strand
gcagccugacucugaagaa

SEQ ID NO: 2079320 - RNA, 19 nt, Homo sapiens
  misc_RNA (1)...(19): siRNA sense strand
ccucgcacgugaagcacuu

SEQ ID NO: 2079321 - RNA, 19 nt, Homo sapiens
  misc_RNA (1)...(19): siRNA sense strand
ggagugcagcgacgucaag

SEQ ID NO: 2079322 - RNA, 19 nt, Homo sapiens
  misc_RNA (1)...(19): siRNA sense strand
ccaggcaacagaacuucaa

SEQ ID NO: 2079323 - RNA, 19 nt, Homo sapiens
  misc_RNA (1)...(19): siRNA sense strand
gaauccugcggucccauga

SEQ ID NO: 2079324 - RNA, 19 nt, Homo sapiens
  misc_RNA (1)...(19): siRNA sense strand
gcucgcagacggagauugg

SEQ ID NO: 2079325 - RNA, 19 nt, Homo sapiens
  misc_RNA (1)...(19): siRNA sense strand
ggcaacagaacuucaagca

SEQ ID NO: 2079326 - RNA, 19 nt, Homo sapiens
  misc_RNA (1)...(19): siRNA sense strand
aaggccaaguccacggaua

SEQ ID NO: 2079327 - RNA, 19 nt, Homo sapiens
  misc_RNA (1)...(19): siRNA sense strand
ccaggcagcagcagaacau

SEQ ID NO: 2079328 - RNA, 19 nt, Homo sapiens
  misc_RNA (1)...(19): siRNA sense strand
ggcaucagccggcucaucu

SEQ ID NO: 2079329 - RNA, 19 nt, Homo sapiens
  misc_RNA (1)...(19): siRNA sense strand
gacaaggacguggagucua

SEQ ID NO: 2079330 - RNA, 19 nt, Homo sapiens
  misc_RNA (1)...(19): siRNA sense strand
cuacagauccccaggaaga

SEQ ID NO: 2079331 - RNA, 19 nt, Homo sapiens
  misc_RNA (1)...(19): siRNA sense strand
uaagaacgacguccaugac

SEQ ID NO: 2079332 - RNA, 19 nt, Homo sapiens
  misc_RNA (1)...(19): siRNA sense strand
gcucaaccacauccucauc

SEQ ID NO: 2079333 - RNA, 19 nt, Homo sapiens
  misc_RNA (1)...(19): siRNA sense strand
acaggacacgccagacauu

SEQ ID NO: 2079334 - RNA, 19 nt, Homo sapiens
  misc_RNA (1)...(19): siRNA sense strand
gacuaccgcuacaacaacu

SEQ ID NO: 2079335 - RNA, 19 nt, Homo sapiens
  misc_RNA (1)...(19): siRNA sense strand
gaagcagcggagaucgauu

SEQ ID NO: 2079336 - RNA, 19 nt, Homo sapiens
  misc_RNA (1)...(19): siRNA sense strand
cuaagagccagugcauuga

SEQ ID NO: 2079337 - RNA, 19 nt, Homo sapiens
  misc_RNA (1)...(19): siRNA sense strand
gagggacgccgagaagaag

SEQ ID NO: 2079338 - RNA, 19 nt, Homo sapiens
  misc_RNA (1)...(19): siRNA sense strand
gaugcagggcuccaaacga

SEQ ID NO: 2079339 - RNA, 19 nt, Homo sapiens
  misc_RNA (1)...(19): siRNA sense strand
caaguccacggauaacuac

SEQ ID NO: 2079340 - RNA, 19 nt, Homo sapiens
  misc_RNA (1)...(19): siRNA sense strand
cagccugacucugaagaag

SEQ ID NO: 2079341 - RNA, 19 nt, Homo sapiens
  misc_RNA (1)...(19): siRNA sense strand
aggccaugcugaccuacaa

SEQ ID NO: 2079342 - RNA, 19 nt, Homo sapiens
  misc_RNA (1)...(19): siRNA sense strand
aaacaucauccuugucaac

SEQ ID NO: 2079343 - RNA, 19 nt, Homo sapiens
  misc_RNA (1)...(19): siRNA sense strand
aagcugcggccauacuuug

SEQ ID NO: 2079344 - RNA, 19 nt, Homo sapiens
  misc_RNA (1)...(19): siRNA sense strand
cgaagcugcggccauacuu

SEQ ID NO: 2079345 - RNA, 19 nt, Homo sapiens
  misc_RNA (1)...(19): siRNA sense strand
ugaccaggcaacagaacuu

SEQ ID NO: 2079346 - RNA, 19 nt, Homo sapiens
  misc_RNA (1)...(19): siRNA sense strand
gaagagcgcuguucaagga

SEQ ID NO: 2079347 - RNA, 19 nt, Homo sapiens
  misc_RNA (1)...(19): siRNA sense strand
cugcugagccuguucuaua

SEQ ID NO: 2079348 - RNA, 19 nt, Homo sapiens
  misc_RNA (1)...(19): siRNA sense strand
gcaggaagugggcgaguga

SEQ ID NO: 2079349 - RNA, 19 nt, Homo sapiens
  misc_RNA (1)...(19): siRNA sense strand
gugaagcacuacacgaauc

SEQ ID NO: 2079350 - RNA, 19 nt, Homo sapiens
  misc_RNA (1)...(19): siRNA sense strand
gcagaugccgccucccuau

SEQ ID NO: 2079351 - RNA, 19 nt, Homo sapiens
  misc_RNA (1)...(19): siRNA sense strand
ucccaagguucauaacaaa

SEQ ID NO: 2079352 - RNA, 19 nt, Homo sapiens
  misc_RNA (1)...(19): siRNA sense strand
cgagugacccugucuguag

SEQ ID NO: 2079353 - RNA, 19 nt, Homo sapiens
  misc_RNA (1)...(19): siRNA sense strand
ccgcuggccuucacacaga

SEQ ID NO: 2079354 - RNA, 19 nt, Homo sapiens
  misc_RNA (1)...(19): siRNA sense strand
gaccacaggccagacauga

SEQ ID NO: 2079355 - RNA, 19 nt, Homo sapiens
  misc_RNA (1)...(19): siRNA sense strand
agugugaccuggagcgaaa

SEQ ID NO: 2079356 - RNA, 19 nt, Homo sapiens
  misc_RNA (1)...(19): siRNA sense strand
gggaagagcgcuguucaag

SEQ ID NO: 2079357 - RNA, 19 nt, Homo sapiens
  misc_RNA (1)...(19): siRNA sense strand
gggcaucccaagguucaua

SEQ ID NO: 2079358 - RNA, 19 nt, Homo sapiens
  misc_RNA (1)...(19): siRNA sense strand
gcuacagcguguccagugu

SEQ ID NO: 2079359 - RNA, 19 nt, Homo sapiens
  misc_RNA (1)...(19): siRNA sense strand
ccucgaggaccugcucuua

SEQ ID NO: 2079360 - RNA, 19 nt, Homo sapiens
  misc_RNA (1)...(19): siRNA sense strand
cuccagagcuucccugaac

SEQ ID NO: 2079361 - RNA, 19 nt, Homo sapiens
  misc_RNA (1)...(19): siRNA sense strand
gcgagugacccugucugua

SEQ ID NO: 2079362 - RNA, 19 nt, Homo sapiens
  misc_RNA (1)...(19): siRNA sense strand
ucgaggaccugcucuuagg

SEQ ID NO: 2079363 - RNA, 19 nt, Homo sapiens
  misc_RNA (1)...(19): siRNA sense strand
caugccacgugaagcacua

SEQ ID NO: 2079364 - RNA, 19 nt, Homo sapiens
  misc_RNA (1)...(19): siRNA sense strand
ugacaugccacgugaagca

SEQ ID NO: 2079365 - RNA, 19 nt, Homo sapiens
  misc_RNA (1)...(19): siRNA sense strand
aaccucacgugcacacuga

SEQ ID NO: 2079366 - RNA, 19 nt, Homo sapiens
  misc_RNA (1)...(19): siRNA sense strand
gaugccgccucccuaugug

SEQ ID NO: 2079367 - RNA, 19 nt, Homo sapiens
  misc_RNA (1)...(19): siRNA sense strand
ucacacagaagaccaucga

SEQ ID NO: 2079368 - RNA, 19 nt, Homo sapiens
  misc_RNA (1)...(19): siRNA sense strand
ccuauguggugcuggacuu

SEQ ID NO: 2079369 - RNA, 19 nt, Homo sapiens
  misc_RNA (1)...(19): siRNA sense strand
ucaccuuccucacccucuu

SEQ ID NO: 2079370 - RNA, 19 nt, Homo sapiens
  misc_RNA (1)...(19): siRNA sense strand
ugaaagagcuggugaagga

SEQ ID NO: 2079371 - RNA, 19 nt, Homo sapiens
  misc_RNA (1)...(19): siRNA sense strand
ccaaaggacugguaagaaa

SEQ ID NO: 2079372 - RNA, 19 nt, Homo sapiens
  misc_RNA (1)...(19): siRNA sense strand
gaacuggacucaccacauc

SEQ ID NO: 2079373 - RNA, 19 nt, Homo sapiens
  misc_RNA (1)...(19): siRNA sense strand
ggaaaggagccaagaguuu

SEQ ID NO: 2079374 - RNA, 19 nt, Homo sapiens
  misc_RNA (1)...(19): siRNA sense strand
gaaauggauuccuauuauc

SEQ ID NO: 2079375 - RNA, 19 nt, Homo sapiens
  misc_RNA (1)...(19): siRNA sense strand
gccaagaguuugauaucua

SEQ ID NO: 2079376 - RNA, 19 nt, Homo sapiens
  misc_RNA (1)...(19): siRNA sense strand
gaaacuccaucuccagguu

SEQ ID NO: 2079377 - RNA, 19 nt, Homo sapiens
  misc_RNA (1)...(19): siRNA sense strand
gaaaggagccaagaguuug

SEQ ID NO: 2079378 - RNA, 19 nt, Homo sapiens
  misc_RNA (1)...(19): siRNA sense strand
gaaccaccaugccaccauu

SEQ ID NO: 2079379 - RNA, 19 nt, Homo sapiens
  misc_RNA (1)...(19): siRNA sense strand
ucaagaggcucauccuaga

SEQ ID NO: 2079380 - RNA, 19 nt, Homo sapiens
  misc_RNA (1)...(19): siRNA sense strand
gugcagcucucccacguaa

SEQ ID NO: 2079381 - RNA, 19 nt, Homo sapiens
  misc_RNA (1)...(19): siRNA sense strand
ggacccaccucccaucuca

SEQ ID NO: 2079382 - RNA, 19 nt, Homo sapiens
  misc_RNA (1)...(19): siRNA sense strand
uagacaagauuaagagcua

SEQ ID NO: 2079383 - RNA, 19 nt, Homo sapiens
  misc_RNA (1)...(19): siRNA sense strand
ggagacgccuucagacaca

SEQ ID NO: 2079384 - RNA, 19 nt, Homo sapiens
  misc_RNA (1)...(19): siRNA sense strand
aaacacugcuuaucaccaa

SEQ ID NO: 2079385 - RNA, 19 nt, Homo sapiens
  misc_RNA (1)...(19): siRNA sense strand
ccacagcguuucuucuuca

SEQ ID NO: 2079386 - RNA, 19 nt, Homo sapiens
  misc_RNA (1)...(19): siRNA sense strand
gaacagccagcuccucaga

SEQ ID NO: 2079387 - RNA, 19 nt, Homo sapiens
  misc_RNA (1)...(19): siRNA sense strand
ccaagacaguggaggagaa

SEQ ID NO: 2079388 - RNA, 19 nt, Homo sapiens
  misc_RNA (1)...(19): siRNA sense strand
ggagugagcaagagguauu

SEQ ID NO: 2079389 - RNA, 19 nt, Homo sapiens
  misc_RNA (1)...(19): siRNA sense strand
ucaggcaacucaacgagaa

SEQ ID NO: 2079390 - RNA, 19 nt, Homo sapiens
  misc_RNA (1)...(19): siRNA sense strand
ucagagagcgacuuucaaa

SEQ ID NO: 2079391 - RNA, 19 nt, Homo sapiens
  misc_RNA (1)...(19): siRNA sense strand
gcccagagcggcugaagaa

SEQ ID NO: 2079392 - RNA, 19 nt, Homo sapiens
  misc_RNA (1)...(19): siRNA sense strand
ugaagaagaggauggcuuu

SEQ ID NO: 2079393 - RNA, 19 nt, Homo sapiens
  misc_RNA (1)...(19): siRNA sense strand
ccgcccaucuucagaaauu

SEQ ID NO: 2079394 - RNA, 19 nt, Homo sapiens
  misc_RNA (1)...(19): siRNA sense strand
agaaagcacuuaacaccau

SEQ ID NO: 2079395 - RNA, 19 nt, Homo sapiens
  misc_RNA (1)...(19): siRNA sense strand
gaaagucggagccaaccaa

SEQ ID NO: 2079396 - RNA, 19 nt, Homo sapiens
  misc_RNA (1)...(19): siRNA sense strand
cacagaaucuccagaaguc

SEQ ID NO: 2079397 - RNA, 19 nt, Homo sapiens
  misc_RNA (1)...(19): siRNA sense strand
ggaccaggccagcgucauu

SEQ ID NO: 2079398 - RNA, 19 nt, Homo sapiens
  misc_RNA (1)...(19): siRNA sense strand
ggaagccggugcugucucu

SEQ ID NO: 2079399 - RNA, 19 nt, Homo sapiens
  misc_RNA (1)...(19): siRNA sense strand
gagaccggcuguugcuaga

SEQ ID NO: 2079400 - RNA, 19 nt, Homo sapiens
  misc_RNA (1)...(19): siRNA sense strand
gagagcgacuuucaaacuc

SEQ ID NO: 2079401 - RNA, 19 nt, Homo sapiens
  misc_RNA (1)...(19): siRNA sense strand
gaccuggacagcugcaaua

SEQ ID NO: 2079402 - RNA, 19 nt, Homo sapiens
  misc_RNA (1)...(19): siRNA sense strand
gggagggaauggagucuuc

SEQ ID NO: 2079403 - RNA, 19 nt, Homo sapiens
  misc_RNA (1)...(19): siRNA sense strand
gcagcucucccacguaaug

SEQ ID NO: 2079404 - RNA, 19 nt, Homo sapiens
  misc_RNA (1)...(19): siRNA sense strand
gcucuggcccugacauuug

SEQ ID NO: 2079405 - RNA, 19 nt, Homo sapiens
  misc_RNA (1)...(19): siRNA sense strand
gcagcugguugaacgugaa

SEQ ID NO: 2079406 - RNA, 19 nt, Homo sapiens
  misc_RNA (1)...(19): siRNA sense strand
ugaccuguguggccuggua

SEQ ID NO: 2079407 - RNA, 19 nt, Homo sapiens
  misc_RNA (1)...(19): siRNA sense strand
cuggacagcugcaauagug

SEQ ID NO: 2079408 - RNA, 19 nt, Homo sapiens
  misc_RNA (1)...(19): siRNA sense strand
ccaagaguuugauaucuac

SEQ ID NO: 2079409 - RNA, 19 nt, Homo sapiens
  misc_RNA (1)...(19): siRNA sense strand
ucacagggaccgaguuaug

SEQ ID NO: 2079410 - RNA, 19 nt, Homo sapiens
  misc_RNA (1)...(19): siRNA sense strand
gcaagcagcaguacagcau

SEQ ID NO: 2079411 - RNA, 19 nt, Homo sapiens
  misc_RNA (1)...(19): siRNA sense strand
guacaucaacgacaugaag

SEQ ID NO: 2079412 - RNA, 19 nt, Homo sapiens
  misc_RNA (1)...(19): siRNA sense strand
cagaaguccuggagacaca

SEQ ID NO: 2079413 - RNA, 19 nt, Homo sapiens
  misc_RNA (1)...(19): siRNA sense strand
ggacucaccacaucaagag

SEQ ID NO: 2079414 - RNA, 19 nt, Homo sapiens
  misc_RNA (1)...(19): siRNA sense strand
ggucugcauuuaccacugu

SEQ ID NO: 2079415 - RNA, 19 nt, Homo sapiens
  misc_RNA (1)...(19): siRNA sense strand
acagccagcuccucagaga

SEQ ID NO: 2079416 - RNA, 19 nt, Homo sapiens
  misc_RNA (1)...(19): siRNA sense strand
cagcaaguccaguggcuuu

SEQ ID NO: 2079417 - RNA, 19 nt, Homo sapiens
  misc_RNA (1)...(19): siRNA sense strand
gcagcaggccaaguucuuu

SEQ ID NO: 2079418 - RNA, 19 nt, Homo sapiens
  misc_RNA (1)...(19): siRNA sense strand
gcagcaucguggaggacua

SEQ ID NO: 2079419 - RNA, 19 nt, Homo sapiens
  misc_RNA (1)...(19): siRNA sense strand
gagcaacaagccagugaug

SEQ ID NO: 2079420 - RNA, 19 nt, Homo sapiens
  misc_RNA (1)...(19): siRNA sense strand
gcagcgaggaggaagaaga

SEQ ID NO: 2079421 - RNA, 19 nt, Homo sapiens
  misc_RNA (1)...(19): siRNA sense strand
gagccaagaguuugauauc

SEQ ID NO: 2079422 - RNA, 19 nt, Homo sapiens
  misc_RNA (1)...(19): siRNA sense strand
ggaccaagccaggcaguca

SEQ ID NO: 2079423 - RNA, 19 nt, Homo sapiens
  misc_RNA (1)...(19): siRNA sense strand
gagcagcgaggaggaagaa

SEQ ID NO: 2079424 - RNA, 19 nt, Homo sapiens
  misc_RNA (1)...(19): siRNA sense strand
caggugacaugguggacuu

SEQ ID NO: 2079425 - RNA, 19 nt, Homo sapiens
  misc_RNA (1)...(19): siRNA sense strand
gaggagacgccuucagaca

SEQ ID NO: 2079426 - RNA, 19 nt, Homo sapiens
  misc_RNA (1)...(19): siRNA sense strand
acaagcagcaggccaaguu

SEQ ID NO: 2079427 - RNA, 19 nt, Homo sapiens
  misc_RNA (1)...(19): siRNA sense strand
ggagacagagcgcauguac

SEQ ID NO: 2079428 - RNA, 19 nt, Homo sapiens
  misc_RNA (1)...(19): siRNA sense strand
gcgagcgcgucaagaacaa

SEQ ID NO: 2079429 - RNA, 19 nt, Homo sapiens
  misc_RNA (1)...(19): siRNA sense strand
gaccggcuguugcuagaca

SEQ ID NO: 2079430 - RNA, 19 nt, Homo sapiens
  misc_RNA (1)...(19): siRNA sense strand
gggagaucguggagacaga

SEQ ID NO: 2079431 - RNA, 19 nt, Homo sapiens
  misc_RNA (1)...(19): siRNA sense strand
cgucacagggaccgaguua

SEQ ID NO: 2079432 - RNA, 19 nt, Homo sapiens
  misc_RNA (1)...(19): siRNA sense strand
ugagagcacugaggaccuu

SEQ ID NO: 2079433 - RNA, 19 nt, Homo sapiens
  misc_RNA (1)...(19): siRNA sense strand
agacacagaaucuccagaa

SEQ ID NO: 2079434 - RNA, 19 nt, Homo sapiens
  misc_RNA (1)...(19): siRNA sense strand
agaagaggauggcuuugag

SEQ ID NO: 2079435 - RNA, 19 nt, Homo sapiens
  misc_RNA (1)...(19): siRNA sense strand
ugagcgagcgcgucaagaa

SEQ ID NO: 2079436 - RNA, 19 nt, Homo sapiens
  misc_RNA (1)...(19): siRNA sense strand
gaagaucugggagggaaug

SEQ ID NO: 2079437 - RNA, 19 nt, Homo sapiens
  misc_RNA (1)...(19): siRNA sense strand
cgaggaggaagaagaaaug

SEQ ID NO: 2079438 - RNA, 19 nt, Homo sapiens
  misc_RNA (1)...(19): siRNA sense strand
gcagcuaccgcucgaaucu

SEQ ID NO: 2079439 - RNA, 19 nt, Homo sapiens
  misc_RNA (1)...(19): siRNA sense strand
agacagagcgcauguacgu

SEQ ID NO: 2079440 - RNA, 19 nt, Homo sapiens
  misc_RNA (1)...(19): siRNA sense strand
gugcaucgcgugcgcaaug

SEQ ID NO: 2079441 - RNA, 19 nt, Homo sapiens
  misc_RNA (1)...(19): siRNA sense strand
ucaacgagaaagcacuuaa

SEQ ID NO: 2079442 - RNA, 19 nt, Homo sapiens
  misc_RNA (1)...(19): siRNA sense strand
ccggugcugucucuauuug

SEQ ID NO: 2079443 - RNA, 19 nt, Homo sapiens
  misc_RNA (1)...(19): siRNA sense strand
ccaggaaauugccaagcau

SEQ ID NO: 2079444 - RNA, 19 nt, Homo sapiens
  misc_RNA (1)...(19): siRNA sense strand
cagcgaggaggaagaagaa

SEQ ID NO: 2079445 - RNA, 19 nt, Homo sapiens
  misc_RNA (1)...(19): siRNA sense strand
cuuaagggccguagaaagu

SEQ ID NO: 2079446 - RNA, 19 nt, Homo sapiens
  misc_RNA (1)...(19): siRNA sense strand
aggaagccaucuuggaaau

SEQ ID NO: 2079447 - RNA, 19 nt, Homo sapiens
  misc_RNA (1)...(19): siRNA sense strand
ggagccaagaguuugauau

SEQ ID NO: 2079448 - RNA, 19 nt, Homo sapiens
  misc_RNA (1)...(19): siRNA sense strand
gacacagaaucuccagaag

SEQ ID NO: 2079449 - RNA, 19 nt, Homo sapiens
  misc_RNA (1)...(19): siRNA sense strand
caucaagaggcucauccua

SEQ ID NO: 2079450 - RNA, 19 nt, Homo sapiens
  misc_RNA (1)...(19): siRNA sense strand
ggaacuggacucaccacau

SEQ ID NO: 2079451 - RNA, 19 nt, Homo sapiens
  misc_RNA (1)...(19): siRNA sense strand
gcuccucccugaugcugau

SEQ ID NO: 2079452 - RNA, 19 nt, Homo sapiens
  misc_RNA (1)...(19): siRNA sense strand
gacaaaacacugcuuauca

SEQ ID NO: 2079453 - RNA, 19 nt, Homo sapiens
  misc_RNA (1)...(19): siRNA sense strand
uuugauaucuacacucagu

SEQ ID NO: 2079454 - RNA, 19 nt, Homo sapiens
  misc_RNA (1)...(19): siRNA sense strand
gacaagauuaagagcuauu

SEQ ID NO: 2079455 - RNA, 19 nt, Homo sapiens
  misc_RNA (1)...(19): siRNA sense strand
gcgaggaggaagaagaaau

SEQ ID NO: 2079456 - RNA, 19 nt, Homo sapiens
  misc_RNA (1)...(19): siRNA sense strand
ccgaggagacgccuucaga

SEQ ID NO: 2079457 - RNA, 19 nt, Homo sapiens
  misc_RNA (1)...(19): siRNA sense strand
gagcuucgaguccauuucu

SEQ ID NO: 2079458 - RNA, 19 nt, Homo sapiens
  misc_RNA (1)...(19): siRNA sense strand
caagacaguggaggagaaa

SEQ ID NO: 2079459 - RNA, 19 nt, Homo sapiens
  misc_RNA (1)...(19): siRNA sense strand
uguguggccugguacauca

SEQ ID NO: 2079460 - RNA, 19 nt, Homo sapiens
  misc_RNA (1)...(19): siRNA sense strand
gauaucuacacucaguauu

SEQ ID NO: 2079461 - RNA, 19 nt, Homo sapiens
  misc_RNA (1)...(19): siRNA sense strand
ccggugagccugaccucua

SEQ ID NO: 2079462 - RNA, 19 nt, Homo sapiens
  misc_RNA (1)...(19): siRNA sense strand
caccacagcguuucuucuu

SEQ ID NO: 2079463 - RNA, 19 nt, Homo sapiens
  misc_RNA (1)...(19): siRNA sense strand
gaagaagaggauggcuuug

SEQ ID NO: 2079464 - RNA, 19 nt, Homo sapiens
  misc_RNA (1)...(19): siRNA sense strand
aagaagaggauggcuuuga

SEQ ID NO: 2079465 - RNA, 19 nt, Homo sapiens
  misc_RNA (1)...(19): siRNA sense strand
ggccagcugcuuuguggaa

SEQ ID NO: 2079466 - RNA, 19 nt, Homo sapiens
  misc_RNA (1)...(19): siRNA sense strand
acacagaaucuccagaagu

SEQ ID NO: 2079467 - RNA, 19 nt, Homo sapiens
  misc_RNA (1)...(19): siRNA sense strand
cagacucccucagcuguca

SEQ ID NO: 2079468 - RNA, 19 nt, Homo sapiens
  misc_RNA (1)...(19): siRNA sense strand
gcacaggaggacagcaagu

SEQ ID NO: 2079469 - RNA, 19 nt, Homo sapiens
  misc_RNA (1)...(19): siRNA sense strand
gaccaggccagcgucauug

SEQ ID NO: 2079470 - RNA, 19 nt, Homo sapiens
  misc_RNA (1)...(19): siRNA sense strand
ccucauauaugcagaagaa

SEQ ID NO: 2079471 - RNA, 19 nt, Homo sapiens
  misc_RNA (1)...(19): siRNA sense strand
ucagcaaacucaagacaaa

SEQ ID NO: 2079472 - RNA, 19 nt, Homo sapiens
  misc_RNA (1)...(19): siRNA sense strand
ggacuugaguguugcuguu

SEQ ID NO: 2079473 - RNA, 19 nt, Homo sapiens
  misc_RNA (1)...(19): siRNA sense strand
caacaagggaaaugacuuu

SEQ ID NO: 2079474 - RNA, 19 nt, Homo sapiens
  misc_RNA (1)...(19): siRNA sense strand
gaguguugcuguuuauuca

SEQ ID NO: 2079475 - RNA, 19 nt, Homo sapiens
  misc_RNA (1)...(19): siRNA sense strand
caagggaaaugacuuugag

SEQ ID NO: 2079476 - RNA, 19 nt, Homo sapiens
  misc_RNA (1)...(19): siRNA sense strand
gggaaaugacuuugagauu

SEQ ID NO: 2079477 - RNA, 19 nt, Homo sapiens
  misc_RNA (1)...(19): siRNA sense strand
gcaccagcuucacuagaga

SEQ ID NO: 2079478 - RNA, 19 nt, Homo sapiens
  misc_RNA (1)...(19): siRNA sense strand
caaacuccaucuugcuuuc

SEQ ID NO: 2079479 - RNA, 19 nt, Homo sapiens
  misc_RNA (1)...(19): siRNA sense strand
ugcauuaccucccagauga

SEQ ID NO: 2079480 - RNA, 19 nt, Homo sapiens
  misc_RNA (1)...(19): siRNA sense strand
cacuagagauucugaggaa

SEQ ID NO: 2079481 - RNA, 19 nt, Homo sapiens
  misc_RNA (1)...(19): siRNA sense strand
gcaagcaauuucagauggu

SEQ ID NO: 2079482 - RNA, 19 nt, Homo sapiens
  misc_RNA (1)...(19): siRNA sense strand
gcuaagacaucugcaagag

SEQ ID NO: 2079483 - RNA, 19 nt, Homo sapiens
  misc_RNA (1)...(19): siRNA sense strand
gauuucugcugaucauuuc

SEQ ID NO: 2079484 - RNA, 19 nt, Homo sapiens
  misc_RNA (1)...(19): siRNA sense strand
gaucauuucagcaaacuca

SEQ ID NO: 2079485 - RNA, 19 nt, Homo sapiens
  misc_RNA (1)...(19): siRNA sense strand
ccaaagaaggcccgagaga

SEQ ID NO: 2079486 - RNA, 19 nt, Homo sapiens
  misc_RNA (1)...(19): siRNA sense strand
gagcacauccaggcaaaga

SEQ ID NO: 2079487 - RNA, 19 nt, Homo sapiens
  misc_RNA (1)...(19): siRNA sense strand
caaacuuuaugcaggacuu

SEQ ID NO: 2079488 - RNA, 19 nt, Homo sapiens
  misc_RNA (1)...(19): siRNA sense strand
ccgaaugguuuggugauga

SEQ ID NO: 2079489 - RNA, 19 nt, Homo sapiens
  misc_RNA (1)...(19): siRNA sense strand
acauuugucugcuggaaga

SEQ ID NO: 2079490 - RNA, 19 nt, Homo sapiens
  misc_RNA (1)...(19): siRNA sense strand
augcaggacuugaguguug

SEQ ID NO: 2079491 - RNA, 19 nt, Homo sapiens
  misc_RNA (1)...(19): siRNA sense strand
caaacucaagacaaacuuu

SEQ ID NO: 2079492 - RNA, 19 nt, Homo sapiens
  misc_RNA (1)...(19): siRNA sense strand
ucaauaugcacuacaacaa

SEQ ID NO: 2079493 - RNA, 19 nt, Homo sapiens
  misc_RNA (1)...(19): siRNA sense strand
cagcugaccauugcaauug

SEQ ID NO: 2079494 - RNA, 19 nt, Homo sapiens
  misc_RNA (1)...(19): siRNA sense strand
cagcuucacuagagauucu

SEQ ID NO: 2079495 - RNA, 19 nt, Homo sapiens
  misc_RNA (1)...(19): siRNA sense strand
uagagauucugaggaaaga

SEQ ID NO: 2079496 - RNA, 19 nt, Homo sapiens
  misc_RNA (1)...(19): siRNA sense strand
ugagauuucugcugaucau

SEQ ID NO: 2079497 - RNA, 19 nt, Homo sapiens
  misc_RNA (1)...(19): siRNA sense strand
ccagaucugcucccaccua

SEQ ID NO: 2079498 - RNA, 19 nt, Homo sapiens
  misc_RNA (1)...(19): siRNA sense strand
ucacauuugucugcuggaa

SEQ ID NO: 2079499 - RNA, 19 nt, Homo sapiens
  misc_RNA (1)...(19): siRNA sense strand
ccaccuagcagaagcuugu

SEQ ID NO: 2079500 - RNA, 19 nt, Homo sapiens
  misc_RNA (1)...(19): siRNA sense strand
ccaaacuccaucuugcuuu

SEQ ID NO: 2079501 - RNA, 19 nt, Homo sapiens
  misc_RNA (1)...(19): siRNA sense strand
ggauagagacuccccguuu

SEQ ID NO: 2079502 - RNA, 19 nt, Homo sapiens
  misc_RNA (1)...(19): siRNA sense strand
aaguucaaccgcugcauua

SEQ ID NO: 2079503 - RNA, 19 nt, Homo sapiens
  misc_RNA (1)...(19): siRNA sense strand
gcaaacucaagacaaacuu

SEQ ID NO: 2079504 - RNA, 19 nt, Homo sapiens
  misc_RNA (1)...(19): siRNA sense strand
ccucccagaugaucaagug

SEQ ID NO: 2079505 - RNA, 19 nt, Homo sapiens
  misc_RNA (1)...(19): siRNA sense strand
gagagaacaacuucaucug

SEQ ID NO: 2079506 - RNA, 19 nt, Homo sapiens
  misc_RNA (1)...(19): siRNA sense strand
ucagcuggauaaugcaaau

SEQ ID NO: 2079507 - RNA, 19 nt, Homo sapiens
  misc_RNA (1)...(19): siRNA sense strand
gauagagacuccccguuuc

SEQ ID NO: 2079508 - RNA, 19 nt, Homo sapiens
  misc_RNA (1)...(19): siRNA sense strand
gaagaggaagcagaaccuu

SEQ ID NO: 2079509 - RNA, 19 nt, Homo sapiens
  misc_RNA (1)...(19): siRNA sense strand
ggauccaaacuccaucuug

SEQ ID NO: 2079510 - RNA, 19 nt, Homo sapiens
  misc_RNA (1)...(19): siRNA sense strand
caauaugcacuacaacaag

SEQ ID NO: 2079511 - RNA, 19 nt, Homo sapiens
  misc_RNA (1)...(19): siRNA sense strand
gagcaccagcuucacuaga

SEQ ID NO: 2079512 - RNA, 19 nt, Homo sapiens
  misc_RNA (1)...(19): siRNA sense strand
gaagcaacagcuaagacau

SEQ ID NO: 2079513 - RNA, 19 nt, Homo sapiens
  misc_RNA (1)...(19): siRNA sense strand
acuugaguguugcuguuua

SEQ ID NO: 2079514 - RNA, 19 nt, Homo sapiens
  misc_RNA (1)...(19): siRNA sense strand
cgaaugguuuggugaugag

SEQ ID NO: 2079515 - RNA, 19 nt, Homo sapiens
  misc_RNA (1)...(19): siRNA sense strand
agucugagaagcccaguuu

SEQ ID NO: 2079516 - RNA, 19 nt, Homo sapiens
  misc_RNA (1)...(19): siRNA sense strand
gcuguuuauucacauuugu

SEQ ID NO: 2079517 - RNA, 19 nt, Homo sapiens
  misc_RNA (1)...(19): siRNA sense strand
gcuggugguucuccgcaau

SEQ ID NO: 2079518 - RNA, 19 nt, Homo sapiens
  misc_RNA (1)...(19): siRNA sense strand
agaggaagaggaagcagaa

SEQ ID NO: 2079519 - RNA, 19 nt, Homo sapiens
  misc_RNA (1)...(19): siRNA sense strand
gcuggauaaugcaaauagu

SEQ ID NO: 2079520 - RNA, 19 nt, Homo sapiens
  misc_RNA (1)...(19): siRNA sense strand
agauuucugcugaucauuu

SEQ ID NO: 2079521 - RNA, 19 nt, Homo sapiens
  misc_RNA (1)...(19): siRNA sense strand
acaagggaaaugacuuuga

SEQ ID NO: 2079522 - RNA, 19 nt, Homo sapiens
  misc_RNA (1)...(19): siRNA sense strand
gcuguggacucgguauuac

SEQ ID NO: 2079523 - RNA, 19 nt, Homo sapiens
  misc_RNA (1)...(19): siRNA sense strand
ggcuguggacucgguauua

SEQ ID NO: 2079524 - RNA, 19 nt, Homo sapiens
  misc_RNA (1)...(19): siRNA sense strand
gagcugaccagggcagugu

SEQ ID NO: 2079525 - RNA, 19 nt, Homo sapiens
  misc_RNA (1)...(19): siRNA sense strand
ugaagcaacagcuaagaca

SEQ ID NO: 2079526 - RNA, 19 nt, Homo sapiens
  misc_RNA (1)...(19): siRNA sense strand
guacggaaggcgagagaag

SEQ ID NO: 2079527 - RNA, 19 nt, Homo sapiens
  misc_RNA (1)...(19): siRNA sense strand
gcacuacaacaagggaaau

SEQ ID NO: 2079528 - RNA, 19 nt, Homo sapiens
  misc_RNA (1)...(19): siRNA sense strand
cagauggugucacaaaucc

SEQ ID NO: 2079529 - RNA, 19 nt, Homo sapiens
  misc_RNA (1)...(19): siRNA sense strand
aaaguucaaccgcugcauu

SEQ ID NO: 2079530 - RNA, 19 nt, Homo sapiens
  misc_RNA (1)...(19): siRNA sense strand
ugagagaacaacuucaucu

SEQ ID NO: 2079531 - RNA, 19 nt, Homo sapiens
  misc_RNA (1)...(19): siRNA sense strand
ccagcugaccauugcaauu

SEQ ID NO: 2079532 - RNA, 19 nt, Homo sapiens
  misc_RNA (1)...(19): siRNA sense strand
cccagaugaucaagugguu

SEQ ID NO: 2079533 - RNA, 19 nt, Homo sapiens
  misc_RNA (1)...(19): siRNA sense strand
ugagaagcccaguuuccuu

SEQ ID NO: 2079534 - RNA, 19 nt, Homo sapiens
  misc_RNA (1)...(19): siRNA sense strand
caaccucauauaugcagaa

SEQ ID NO: 2079535 - RNA, 19 nt, Homo sapiens
  misc_RNA (1)...(19): siRNA sense strand
ucagauggugucacaaauc

SEQ ID NO: 2079536 - RNA, 19 nt, Homo sapiens
  misc_RNA (1)...(19): siRNA sense strand
uuucagauggugucacaaa

SEQ ID NO: 2079537 - RNA, 19 nt, Homo sapiens
  misc_RNA (1)...(19): siRNA sense strand
cagaugaucaagugguuca

SEQ ID NO: 2079538 - RNA, 19 nt, Homo sapiens
  misc_RNA (1)...(19): siRNA sense strand
ggaagaggaagcagaaccu

SEQ ID NO: 2079539 - RNA, 19 nt, Homo sapiens
  misc_RNA (1)...(19): siRNA sense strand
cuugaguguugcuguuuau

SEQ ID NO: 2079540 - RNA, 19 nt, Homo sapiens
  misc_RNA (1)...(19): siRNA sense strand
ucuccgcaauucagaacuu

SEQ ID NO: 2079541 - RNA, 19 nt, Homo sapiens
  misc_RNA (1)...(19): siRNA sense strand
ccaaaaugcuggugguucu

SEQ ID NO: 2079542 - RNA, 19 nt, Homo sapiens
  misc_RNA (1)...(19): siRNA sense strand
agcccacgcugcccaaaga

SEQ ID NO: 2079543 - RNA, 19 nt, Homo sapiens
  misc_RNA (1)...(19): siRNA sense strand
gcaagagcacauccuacag

SEQ ID NO: 2079544 - RNA, 19 nt, Homo sapiens
  misc_RNA (1)...(19): siRNA sense strand
guguugcuguuuauucaca

SEQ ID NO: 2079545 - RNA, 19 nt, Homo sapiens
  misc_RNA (1)...(19): siRNA sense strand
ugaguguugcuguuuauuc

SEQ ID NO: 2079546 - RNA, 19 nt, Homo sapiens
  misc_RNA (1)...(19): siRNA sense strand
cuacagaccccgaaugguu

SEQ ID NO: 2079547 - RNA, 19 nt, Homo sapiens
  misc_RNA (1)...(19): siRNA sense strand
aauuucagauggugucaca

SEQ ID NO: 2079548 - RNA, 19 nt, Homo sapiens
  misc_RNA (1)...(19): siRNA sense strand
ugucacaaaucccaaaaug

SEQ ID NO: 2079549 - RNA, 19 nt, Homo sapiens
  misc_RNA (1)...(19): siRNA sense strand
cuagagauucugaggaaag

SEQ ID NO: 2079550 - RNA, 19 nt, Homo sapiens
  misc_RNA (1)...(19): siRNA sense strand
guugcuguuuauucacauu

SEQ ID NO: 2079551 - RNA, 19 nt, Homo sapiens
  misc_RNA (1)...(19): siRNA sense strand
uucaagcucucaauaugca

SEQ ID NO: 2079552 - RNA, 19 nt, Homo sapiens
  misc_RNA (1)...(19): siRNA sense strand
acaagaaccucaacucaaa

SEQ ID NO: 2079553 - RNA, 19 nt, Homo sapiens
  misc_RNA (1)...(19): siRNA sense strand
ucaaagaaccagccucaaa

SEQ ID NO: 2079554 - RNA, 19 nt, Homo sapiens
  misc_RNA (1)...(19): siRNA sense strand
gccaacaccucucucaaug

SEQ ID NO: 2079555 - RNA, 19 nt, Homo sapiens
  misc_RNA (1)...(19): siRNA sense strand
caacaagaaccucaacuca

SEQ ID NO: 2079556 - RNA, 19 nt, Homo sapiens
  misc_RNA (1)...(19): siRNA sense strand
gcaucgacguggaccguaa

SEQ ID NO: 2079557 - RNA, 19 nt, Homo sapiens
  misc_RNA (1)...(19): siRNA sense strand
gaucagaagccgucucauc

SEQ ID NO: 2079558 - RNA, 19 nt, Homo sapiens
  misc_RNA (1)...(19): siRNA sense strand
caacaccucucucaaugac

SEQ ID NO: 2079559 - RNA, 19 nt, Homo sapiens
  misc_RNA (1)...(19): siRNA sense strand
guaugcagcccaccucuau

SEQ ID NO: 2079560 - RNA, 19 nt, Homo sapiens
  misc_RNA (1)...(19): siRNA sense strand
ugaugucccuccaagagaa

SEQ ID NO: 2079561 - RNA, 19 nt, Homo sapiens
  misc_RNA (1)...(19): siRNA sense strand
gcaaggugcugcgcaucga

SEQ ID NO: 2079562 - RNA, 19 nt, Homo sapiens
  misc_RNA (1)...(19): siRNA sense strand
caggaaugcucgccguaug

SEQ ID NO: 2079563 - RNA, 19 nt, Homo sapiens
  misc_RNA (1)...(19): siRNA sense strand
ggcaccaccuggcaaaugu

SEQ ID NO: 2079564 - RNA, 19 nt, Homo sapiens
  misc_RNA (1)...(19): siRNA sense strand
caaagaaccagccucaaac

SEQ ID NO: 2079565 - RNA, 19 nt, Homo sapiens
  misc_RNA (1)...(19): siRNA sense strand
acaccucucucaaugacuu

SEQ ID NO: 2079566 - RNA, 19 nt, Homo sapiens
  misc_RNA (1)...(19): siRNA sense strand
cugaacggccucuacauuu

SEQ ID NO: 2079567 - RNA, 19 nt, Homo sapiens
  misc_RNA (1)...(19): siRNA sense strand
accaaggccuggaagauga

SEQ ID NO: 2079568 - RNA, 19 nt, Homo sapiens
  misc_RNA (1)...(19): siRNA sense strand
gcuguuccgucaccuguca

SEQ ID NO: 2079569 - RNA, 19 nt, Homo sapiens
  misc_RNA (1)...(19): siRNA sense strand
ucccaggccucaucaacaa

SEQ ID NO: 2079570 - RNA, 19 nt, Homo sapiens
  misc_RNA (1)...(19): siRNA sense strand
aaaccugggccacguggua

SEQ ID NO: 2079571 - RNA, 19 nt, Homo sapiens
  misc_RNA (1)...(19): siRNA sense strand
gacgacuccuggaacauca

SEQ ID NO: 2079572 - RNA, 19 nt, Homo sapiens
  misc_RNA (1)...(19): siRNA sense strand
ugaacggccucuacauuuu

SEQ ID NO: 2079573 - RNA, 19 nt, Homo sapiens
  misc_RNA (1)...(19): siRNA sense strand
gcucuacgucuacuacuca

SEQ ID NO: 2079574 - RNA, 19 nt, Homo sapiens
  misc_RNA (1)...(19): siRNA sense strand
caaccaaggccuggaagau

SEQ ID NO: 2079575 - RNA, 19 nt, Homo sapiens
  misc_RNA (1)...(19): siRNA sense strand
gccuggacauguggcauaa

SEQ ID NO: 2079576 - RNA, 19 nt, Homo sapiens
  misc_RNA (1)...(19): siRNA sense strand
ccaacaccucucucaauga

SEQ ID NO: 2079577 - RNA, 19 nt, Homo sapiens
  misc_RNA (1)...(19): siRNA sense strand
gaugacggguaccucuaca

SEQ ID NO: 2079578 - RNA, 19 nt, Homo sapiens
  misc_RNA (1)...(19): siRNA sense strand
ggacuacugcuucccuuac

SEQ ID NO: 2079579 - RNA, 19 nt, Homo sapiens
  misc_RNA (1)...(19): siRNA sense strand
ccugaacggccucuacauu

SEQ ID NO: 2079580 - RNA, 19 nt, Homo sapiens
  misc_RNA (1)...(19): siRNA sense strand
acggguaccucuacaucuu

SEQ ID NO: 2079581 - RNA, 19 nt, Homo sapiens
  misc_RNA (1)...(19): siRNA sense strand
ccauucugcuggacgaugu

SEQ ID NO: 2079582 - RNA, 19 nt, Homo sapiens
  misc_RNA (1)...(19): siRNA sense strand
uccgucaccugucaacuga

SEQ ID NO: 2079583 - RNA, 19 nt, Homo sapiens
  misc_RNA (1)...(19): siRNA sense strand
gauaauccuggaggucaaa

SEQ ID NO: 2079584 - RNA, 19 nt, Homo sapiens
  misc_RNA (1)...(19): siRNA sense strand
guucagagucuccgaggau

SEQ ID NO: 2079585 - RNA, 19 nt, Homo sapiens
  misc_RNA (1)...(19): siRNA sense strand
gggaugacggguaccucua

SEQ ID NO: 2079586 - RNA, 19 nt, Homo sapiens
  misc_RNA (1)...(19): siRNA sense strand
ucacaaccaaggccuggaa

SEQ ID NO: 2079587 - RNA, 19 nt, Homo sapiens
  misc_RNA (1)...(19): siRNA sense strand
ucccuuaccugcuggucaa

SEQ ID NO: 2079588 - RNA, 19 nt, Homo sapiens
  misc_RNA (1)...(19): siRNA sense strand
ccaccuggcaaaugucaga

SEQ ID NO: 2079589 - RNA, 19 nt, Homo sapiens
  misc_RNA (1)...(19): siRNA sense strand
gggcaccaccuggcaaaug

SEQ ID NO: 2079590 - RNA, 19 nt, Homo sapiens
  misc_RNA (1)...(19): siRNA sense strand
ggguaccucuacaucuuca

SEQ ID NO: 2079591 - RNA, 19 nt, Homo sapiens
  misc_RNA (1)...(19): siRNA sense strand
aacaagaaccucaacucaa

SEQ ID NO: 2079592 - RNA, 19 nt, Homo sapiens
  misc_RNA (1)...(19): siRNA sense strand
ggaaaugcccaaaacaagu

SEQ ID NO: 2079593 - RNA, 19 nt, Homo sapiens
  misc_RNA (1)...(19): siRNA sense strand
gcucaggugaagaucagaa

SEQ ID NO: 2079594 - RNA, 19 nt, Homo sapiens
  misc_RNA (1)...(19): siRNA sense strand
caacuacuacccguacauc

SEQ ID NO: 2079595 - RNA, 19 nt, Homo sapiens
  misc_RNA (1)...(19): siRNA sense strand
cuggacauguggcauaagu

SEQ ID NO: 2079596 - RNA, 19 nt, Homo sapiens
  misc_RNA (1)...(19): siRNA sense strand
cuacuacccguacaucauc

SEQ ID NO: 2079597 - RNA, 19 nt, Homo sapiens
  misc_RNA (1)...(19): siRNA sense strand
cgccaacaccucucucaau

SEQ ID NO: 2079598 - RNA, 19 nt, Homo sapiens
  misc_RNA (1)...(19): siRNA sense strand
cgacgacuccuggaacauc

SEQ ID NO: 2079599 - RNA, 19 nt, Homo sapiens
  misc_RNA (1)...(19): siRNA sense strand
ugacggguaccucuacauc

SEQ ID NO: 2079600 - RNA, 19 nt, Homo sapiens
  misc_RNA (1)...(19): siRNA sense strand
ggaaugcucgccguaugca

SEQ ID NO: 2079601 - RNA, 19 nt, Homo sapiens
  misc_RNA (1)...(19): siRNA sense strand
gcagauacuuccuggauga

SEQ ID NO: 2079602 - RNA, 19 nt, Homo sapiens
  misc_RNA (1)...(19): siRNA sense strand
gaacaaaccagcccgcaaa

SEQ ID NO: 2079603 - RNA, 19 nt, Homo sapiens
  misc_RNA (1)...(19): siRNA sense strand
ggaagagccucacacauca

SEQ ID NO: 2079604 - RNA, 19 nt, Homo sapiens
  misc_RNA (1)...(19): siRNA sense strand
acaaggaccugaaggagaa

SEQ ID NO: 2079605 - RNA, 19 nt, Homo sapiens
  misc_RNA (1)...(19): siRNA sense strand
gcaacuacuuccgaucuaa

SEQ ID NO: 2079606 - RNA, 19 nt, Homo sapiens
  misc_RNA (1)...(19): siRNA sense strand
gcuacacgcugaugaacaa

SEQ ID NO: 2079607 - RNA, 19 nt, Homo sapiens
  misc_RNA (1)...(19): siRNA sense strand
cagcagagguggagaucaa

SEQ ID NO: 2079608 - RNA, 19 nt, Homo sapiens
  misc_RNA (1)...(19): siRNA sense strand
gcaagcugcuggagaagau

SEQ ID NO: 2079609 - RNA, 19 nt, Homo sapiens
  misc_RNA (1)...(19): siRNA sense strand
cuacaaggcugaggucaug

SEQ ID NO: 2079610 - RNA, 19 nt, Homo sapiens
  misc_RNA (1)...(19): siRNA sense strand
ccaagaacaucaggaacaa

SEQ ID NO: 2079611 - RNA, 19 nt, Homo sapiens
  misc_RNA (1)...(19): siRNA sense strand
uggagaagaucgauuacuu

SEQ ID NO: 2079612 - RNA, 19 nt, Homo sapiens
  misc_RNA (1)...(19): siRNA sense strand
gcugaaagccgacuauaag

SEQ ID NO: 2079613 - RNA, 19 nt, Homo sapiens
  misc_RNA (1)...(19): siRNA sense strand
ggagaagaucgauuacuug

SEQ ID NO: 2079614 - RNA, 19 nt, Homo sapiens
  misc_RNA (1)...(19): siRNA sense strand
gggacugggugcugcuuaa

SEQ ID NO: 2079615 - RNA, 19 nt, Homo sapiens
  misc_RNA (1)...(19): siRNA sense strand
agaacuaccucccgcaaga

SEQ ID NO: 2079616 - RNA, 19 nt, Homo sapiens
  misc_RNA (1)...(19): siRNA sense strand
caacugggccacagaacaa

SEQ ID NO: 2079617 - RNA, 19 nt, Homo sapiens
  misc_RNA (1)...(19): siRNA sense strand
cgagaugucugccguggau

SEQ ID NO: 2079618 - RNA, 19 nt, Homo sapiens
  misc_RNA (1)...(19): siRNA sense strand
gagcaacagugaaaacauu

SEQ ID NO: 2079619 - RNA, 19 nt, Homo sapiens
  misc_RNA (1)...(19): siRNA sense strand
uggagaagaugcagaggaa

SEQ ID NO: 2079620 - RNA, 19 nt, Homo sapiens
  misc_RNA (1)...(19): siRNA sense strand
gugcagagaacacuaaguu

SEQ ID NO: 2079621 - RNA, 19 nt, Homo sapiens
  misc_RNA (1)...(19): siRNA sense strand
gagcagauacuuccuggau

SEQ ID NO: 2079622 - RNA, 19 nt, Homo sapiens
  misc_RNA (1)...(19): siRNA sense strand
gacaacaacuacgaugaga

SEQ ID NO: 2079623 - RNA, 19 nt, Homo sapiens
  misc_RNA (1)...(19): siRNA sense strand
ugaaggagcacccagagaa

SEQ ID NO: 2079624 - RNA, 19 nt, Homo sapiens
  misc_RNA (1)...(19): siRNA sense strand
cgaggcggcugaugacuuc

SEQ ID NO: 2079625 - RNA, 19 nt, Homo sapiens
  misc_RNA (1)...(19): siRNA sense strand
caacaacuacgaugagaca

SEQ ID NO: 2079626 - RNA, 19 nt, Homo sapiens
  misc_RNA (1)...(19): siRNA sense strand
gagagcaggccaagaacaa

SEQ ID NO: 2079627 - RNA, 19 nt, Homo sapiens
  misc_RNA (1)...(19): siRNA sense strand
guggagagcaggccaagaa

SEQ ID NO: 2079628 - RNA, 19 nt, Homo sapiens
  misc_RNA (1)...(19): siRNA sense strand
ucaccaaggccaagcguaa

SEQ ID NO: 2079629 - RNA, 19 nt, Homo sapiens
  misc_RNA (1)...(19): siRNA sense strand
ggacaacaacuacgaugag

SEQ ID NO: 2079630 - RNA, 19 nt, Homo sapiens
  misc_RNA (1)...(19): siRNA sense strand
ucaaggaggccaccaagau

SEQ ID NO: 2079631 - RNA, 19 nt, Homo sapiens
  misc_RNA (1)...(19): siRNA sense strand
acagcaaccuggagaagau

SEQ ID NO: 2079632 - RNA, 19 nt, Homo sapiens
  misc_RNA (1)...(19): siRNA sense strand
ccucggaaguggccuuaga

SEQ ID NO: 2079633 - RNA, 19 nt, Homo sapiens
  misc_RNA (1)...(19): siRNA sense strand
ucaccgagcagaucuacaa

SEQ ID NO: 2079634 - RNA, 19 nt, Homo sapiens
  misc_RNA (1)...(19): siRNA sense strand
ccaagcaguucaccuucga

SEQ ID NO: 2079635 - RNA, 19 nt, Homo sapiens
  misc_RNA (1)...(19): siRNA sense strand
gggcugacaccaagcagaa

SEQ ID NO: 2079636 - RNA, 19 nt, Homo sapiens
  misc_RNA (1)...(19): siRNA sense strand
cagcagugacuucagcuuu

SEQ ID NO: 2079637 - RNA, 19 nt, Homo sapiens
  misc_RNA (1)...(19): siRNA sense strand
ccacaucccgucaucacaa

SEQ ID NO: 2079638 - RNA, 19 nt, Homo sapiens
  misc_RNA (1)...(19): siRNA sense strand
gcucaaggccauccugaca

SEQ ID NO: 2079639 - RNA, 19 nt, Homo sapiens
  misc_RNA (1)...(19): siRNA sense strand
gaucccacaucccgucauc

SEQ ID NO: 2079640 - RNA, 19 nt, Homo sapiens
  misc_RNA (1)...(19): siRNA sense strand
ccgagcagaucuacaacga

SEQ ID NO: 2079641 - RNA, 19 nt, Homo sapiens
  misc_RNA (1)...(19): siRNA sense strand
ucaaggccauccugacaca

SEQ ID NO: 2079642 - RNA, 19 nt, Homo sapiens
  misc_RNA (1)...(19): siRNA sense strand
gaucugcaguccgaguuuc

SEQ ID NO: 2079643 - RNA, 19 nt, Homo sapiens
  misc_RNA (1)...(19): siRNA sense strand
gcacagacgccaggaagag

SEQ ID NO: 2079644 - RNA, 19 nt, Homo sapiens
  misc_RNA (1)...(19): siRNA sense strand
gaaggagcacccagagaag

SEQ ID NO: 2079645 - RNA, 19 nt, Homo sapiens
  misc_RNA (1)...(19): siRNA sense strand
cauccucgcucgaagaaac

SEQ ID NO: 2079646 - RNA, 19 nt, Homo sapiens
  misc_RNA (1)...(19): siRNA sense strand
gccaagaacaucaggaaca

SEQ ID NO: 2079647 - RNA, 19 nt, Homo sapiens
  misc_RNA (1)...(19): siRNA sense strand
gcccaggccugagguagau

SEQ ID NO: 2079648 - RNA, 19 nt, Homo sapiens
  misc_RNA (1)...(19): siRNA sense strand
ucacugagggcuacaaugg

SEQ ID NO: 2079649 - RNA, 19 nt, Homo sapiens
  misc_RNA (1)...(19): siRNA sense strand
agaagggcguguacgugaa

SEQ ID NO: 2079650 - RNA, 19 nt, Homo sapiens
  misc_RNA (1)...(19): siRNA sense strand
aggaagagccucacacauc

SEQ ID NO: 2079651 - RNA, 19 nt, Homo sapiens
  misc_RNA (1)...(19): siRNA sense strand
cagguuuccuccagguuug

SEQ ID NO: 2079652 - RNA, 19 nt, Homo sapiens
  misc_RNA (1)...(19): siRNA sense strand
caaggaggccaccaagauc

SEQ ID NO: 2079653 - RNA, 19 nt, Homo sapiens
  misc_RNA (1)...(19): siRNA sense strand
accuggagaucuacaauga

SEQ ID NO: 2079654 - RNA, 19 nt, Homo sapiens
  misc_RNA (1)...(19): siRNA sense strand
cacaucccgucaucacaaa

SEQ ID NO: 2079655 - RNA, 19 nt, Homo sapiens
  misc_RNA (1)...(19): siRNA sense strand
gggccaagaacaucaggaa

SEQ ID NO: 2079656 - RNA, 19 nt, Homo sapiens
  misc_RNA (1)...(19): siRNA sense strand
ccaagaacaaggaccugaa

SEQ ID NO: 2079657 - RNA, 19 nt, Homo sapiens
  misc_RNA (1)...(19): siRNA sense strand
acacgcugaugaacaagga

SEQ ID NO: 2079658 - RNA, 19 nt, Homo sapiens
  misc_RNA (1)...(19): siRNA sense strand
cuggagaucuacaaugaag

SEQ ID NO: 2079659 - RNA, 19 nt, Homo sapiens
  misc_RNA (1)...(19): siRNA sense strand
uugcggagcugcccaaggu

SEQ ID NO: 2079660 - RNA, 19 nt, Homo sapiens
  misc_RNA (1)...(19): siRNA sense strand
acaacgagaucgccuaucc

SEQ ID NO: 2079661 - RNA, 19 nt, Homo sapiens
  misc_RNA (1)...(19): siRNA sense strand
cagcuuuuguuuucucaua

SEQ ID NO: 2079662 - RNA, 19 nt, Homo sapiens
  misc_RNA (1)...(19): siRNA sense strand
ggagagcaggccaagaaca

SEQ ID NO: 2079663 - RNA, 19 nt, Homo sapiens
  misc_RNA (1)...(19): siRNA sense strand
cugaguacccgccugcuuu

SEQ ID NO: 2079664 - RNA, 19 nt, Homo sapiens
  misc_RNA (1)...(19): siRNA sense strand
gcgaguaccaggaggagau

SEQ ID NO: 2079665 - RNA, 19 nt, Homo sapiens
  misc_RNA (1)...(19): siRNA sense strand
aaccugugauccagcauga

SEQ ID NO: 2079666 - RNA, 19 nt, Homo sapiens
  misc_RNA (1)...(19): siRNA sense strand
ccgaggcggugaagguugu

SEQ ID NO: 2079667 - RNA, 19 nt, Homo sapiens
  misc_RNA (1)...(19): siRNA sense strand
gacaauggcgagccgaaca

SEQ ID NO: 2079668 - RNA, 19 nt, Homo sapiens
  misc_RNA (1)...(19): siRNA sense strand
gaagggcguguacgugaag

SEQ ID NO: 2079669 - RNA, 19 nt, Homo sapiens
  misc_RNA (1)...(19): siRNA sense strand
gacuucagcuuuuguuuuc

SEQ ID NO: 2079670 - RNA, 19 nt, Homo sapiens
  misc_RNA (1)...(19): siRNA sense strand
ucagguuuccuccagguuu

SEQ ID NO: 2079671 - RNA, 19 nt, Homo sapiens
  misc_RNA (1)...(19): siRNA sense strand
ggugaaacccaaggucuuc

SEQ ID NO: 2079672 - RNA, 19 nt, Homo sapiens
  misc_RNA (1)...(19): siRNA sense strand
aggagaaccugcggaagga

SEQ ID NO: 2079673 - RNA, 19 nt, Homo sapiens
  misc_RNA (1)...(19): siRNA sense strand
gggugcugcuuaacgucua

SEQ ID NO: 2079674 - RNA, 19 nt, Homo sapiens
  misc_RNA (1)...(19): siRNA sense strand
caagaacaaggaccugaag

SEQ ID NO: 2079675 - RNA, 19 nt, Homo sapiens
  misc_RNA (1)...(19): siRNA sense strand
aguuucagcuggagaagau

SEQ ID NO: 2079676 - RNA, 19 nt, Homo sapiens
  misc_RNA (1)...(19): siRNA sense strand
caaggccaagcguaagaaa

SEQ ID NO: 2079677 - RNA, 19 nt, Homo sapiens
  misc_RNA (1)...(19): siRNA sense strand
ccaggaagagccucacaca

SEQ ID NO: 2079678 - RNA, 19 nt, Homo sapiens
  misc_RNA (1)...(19): siRNA sense strand
gcagugacuucagcuuuug

SEQ ID NO: 2079679 - RNA, 19 nt, Homo sapiens
  misc_RNA (1)...(19): siRNA sense strand
ucucggcacugggcaaugu

SEQ ID NO: 2079680 - RNA, 19 nt, Homo sapiens
  misc_RNA (1)...(19): siRNA sense strand
gcaccaggcagcagugacu

SEQ ID NO: 2079681 - RNA, 19 nt, Homo sapiens
  misc_RNA (1)...(19): siRNA sense strand
agaacaaggaccugaagga

SEQ ID NO: 2079682 - RNA, 19 nt, Homo sapiens
  misc_RNA (1)...(19): siRNA sense strand
gcaggugggaguccucuac

SEQ ID NO: 2079683 - RNA, 19 nt, Homo sapiens
  misc_RNA (1)...(19): siRNA sense strand
aggaggagaucaagaagcu

SEQ ID NO: 2079684 - RNA, 19 nt, Homo sapiens
  misc_RNA (1)...(19): siRNA sense strand
gcacugggcaaugucaucu

SEQ ID NO: 2079685 - RNA, 19 nt, Homo sapiens
  misc_RNA (1)...(19): siRNA sense strand
agucggagcaacagugaaa

SEQ ID NO: 2079686 - RNA, 19 nt, Homo sapiens
  misc_RNA (1)...(19): siRNA sense strand
cagcaacuacuuccgaucu

SEQ ID NO: 2079687 - RNA, 19 nt, Homo sapiens
  misc_RNA (1)...(19): siRNA sense strand
gccagauccucagcacaga

SEQ ID NO: 2079688 - RNA, 19 nt, Homo sapiens
  misc_RNA (1)...(19): siRNA sense strand
cagagguggagaucaaaga

SEQ ID NO: 2079689 - RNA, 19 nt, Homo sapiens
  misc_RNA (1)...(19): siRNA sense strand
caacuacuuccgaucuaag

SEQ ID NO: 2079690 - RNA, 19 nt, Homo sapiens
  misc_RNA (1)...(19): siRNA sense strand
cuacaacgagaucgccuau

SEQ ID NO: 2079691 - RNA, 19 nt, Homo sapiens
  misc_RNA (1)...(19): siRNA sense strand
gccaugcgcaacucauaug

SEQ ID NO: 2079692 - RNA, 19 nt, Homo sapiens
  misc_RNA (1)...(19): siRNA sense strand
gcagagguggagaucaaag

SEQ ID NO: 2079693 - RNA, 19 nt, Homo sapiens
  misc_RNA (1)...(19): siRNA sense strand
gaagaugcagaggaagcuu

SEQ ID NO: 2079694 - RNA, 19 nt, Homo sapiens
  misc_RNA (1)...(19): siRNA sense strand
gaacuaccucccgcaagag

SEQ ID NO: 2079695 - RNA, 19 nt, Homo sapiens
  misc_RNA (1)...(19): siRNA sense strand
gaacccuccaaaucugaga

SEQ ID NO: 2079696 - RNA, 19 nt, Homo sapiens
  misc_RNA (1)...(19): siRNA sense strand
ccagugacgaugucuccaa

SEQ ID NO: 2079697 - RNA, 19 nt, Homo sapiens
  misc_RNA (1)...(19): siRNA sense strand
guaugagacaguggugaaa

SEQ ID NO: 2079698 - RNA, 19 nt, Homo sapiens
  misc_RNA (1)...(19): siRNA sense strand
ggugggaguccucuacaag

SEQ ID NO: 2079699 - RNA, 19 nt, Homo sapiens
  misc_RNA (1)...(19): siRNA sense strand
aagauaacggcuucuggaa

SEQ ID NO: 2079700 - RNA, 19 nt, Homo sapiens
  misc_RNA (1)...(19): siRNA sense strand
ggaagaacacguuggcuuu

SEQ ID NO: 2079701 - RNA, 19 nt, Homo sapiens
  misc_RNA (1)...(19): siRNA sense strand
ugacguggaugaaauugaa

SEQ ID NO: 2079702 - RNA, 19 nt, Homo sapiens
  misc_RNA (1)...(19): siRNA sense strand
ggaacugccugacuuaugc

SEQ ID NO: 2079703 - RNA, 19 nt, Homo sapiens
  misc_RNA (1)...(19): siRNA sense strand
caacuuacuuucaacuaca

SEQ ID NO: 2079704 - RNA, 19 nt, Homo sapiens
  misc_RNA (1)...(19): siRNA sense strand
uggcuuggcucuugacuug

SEQ ID NO: 2079705 - RNA, 19 nt, Homo sapiens
  misc_RNA (1)...(19): siRNA sense strand
gauagauguuauucgacua

SEQ ID NO: 2079706 - RNA, 19 nt, Homo sapiens
  misc_RNA (1)...(19): siRNA sense strand
ucaacuacaugccucauuc

SEQ ID NO: 2079707 - RNA, 19 nt, Homo sapiens
  misc_RNA (1)...(19): siRNA sense strand
gguagcaggugcacuucuu

SEQ ID NO: 2079708 - RNA, 19 nt, Homo sapiens
  misc_RNA (1)...(19): siRNA sense strand
gcucuugacuuggacagaa

SEQ ID NO: 2079709 - RNA, 19 nt, Homo sapiens
  misc_RNA (1)...(19): siRNA sense strand
ggacucacuggauagauuu

SEQ ID NO: 2079710 - RNA, 19 nt, Homo sapiens
  misc_RNA (1)...(19): siRNA sense strand
uugcaggacucacuggaua

SEQ ID NO: 2079711 - RNA, 19 nt, Homo sapiens
  misc_RNA (1)...(19): siRNA sense strand
uugcaggacucacuggaua

SEQ ID NO: 2079712 - RNA, 19 nt, Homo sapiens
  misc_RNA (1)...(19): siRNA sense strand
uugcaggacucacuggaua

SEQ ID NO: 2079713 - RNA, 19 nt, Homo sapiens
  misc_RNA (1)...(19): siRNA sense strand
ucaacgaggugcugaugga

SEQ ID NO: 2079714 - RNA, 19 nt, Homo sapiens
  misc_RNA (1)...(19): siRNA sense strand
gaaguugcuuuuacucauu

SEQ ID NO: 2079715 - RNA, 19 nt, Homo sapiens
  misc_RNA (1)...(19): siRNA sense strand
gggagcugcuggaugagaa

SEQ ID NO: 2079716 - RNA, 19 nt, Homo sapiens
  misc_RNA (1)...(19): siRNA sense strand
ggaccaagaagaggaagaa

SEQ ID NO: 2079717 - RNA, 19 nt, Homo sapiens
  misc_RNA (1)...(19): siRNA sense strand
gaugguauucgacuccuuu

SEQ ID NO: 2079718 - RNA, 19 nt, Homo sapiens
  misc_RNA (1)...(19): siRNA sense strand
gaagugccuuuuacucauu

SEQ ID NO: 2079719 - RNA, 19 nt, Homo sapiens
  misc_RNA (1)...(19): siRNA sense strand
ggagucauauucccacacu

SEQ ID NO: 2079720 - RNA, 19 nt, Homo sapiens
  misc_RNA (1)...(19): siRNA sense strand
caccuuggcuuggcucuug

SEQ ID NO: 2079721 - RNA, 19 nt, Homo sapiens
  misc_RNA (1)...(19): siRNA sense strand
ccagaugggagucauauuc

SEQ ID NO: 2079722 - RNA, 19 nt, Homo sapiens
  misc_RNA (1)...(19): siRNA sense strand
gauguuauucgacuacuuc

SEQ ID NO: 2079723 - RNA, 19 nt, Homo sapiens
  misc_RNA (1)...(19): siRNA sense strand
cuggauagauguuauucga

SEQ ID NO: 2079724 - RNA, 19 nt, Homo sapiens
  misc_RNA (1)...(19): siRNA sense strand
ugacguggacaauagguuu

SEQ ID NO: 2079725 - RNA, 19 nt, Homo sapiens
  misc_RNA (1)...(19): siRNA sense strand
gcuuggcucuugacuugga

SEQ ID NO: 2079726 - RNA, 19 nt, Homo sapiens
  misc_RNA (1)...(19): siRNA sense strand
ucaacuuacuuucaacuac

SEQ ID NO: 2079727 - RNA, 19 nt, Homo sapiens
  misc_RNA (1)...(19): siRNA sense strand
gagagcugcuggagguagu

SEQ ID NO: 2079728 - RNA, 19 nt, Homo sapiens
  misc_RNA (1)...(19): siRNA sense strand
auucgacuccuuucaguua

SEQ ID NO: 2079729 - RNA, 19 nt, Homo sapiens
  misc_RNA (1)...(19): siRNA sense strand
guauucgacuccuuucagu

SEQ ID NO: 2079730 - RNA, 19 nt, Homo sapiens
  misc_RNA (1)...(19): siRNA sense strand
cuggauagaugguauucga

SEQ ID NO: 2079731 - RNA, 19 nt, Homo sapiens
  misc_RNA (1)...(19): siRNA sense strand
aggacucacuggauagauu

SEQ ID NO: 2079732 - RNA, 19 nt, Homo sapiens
  misc_RNA (1)...(19): siRNA sense strand
agucauauucccacacuaa

SEQ ID NO: 2079733 - RNA, 19 nt, Homo sapiens
  misc_RNA (1)...(19): siRNA sense strand
ugagaaagagccugaaguc

SEQ ID NO: 2079734 - RNA, 19 nt, Homo sapiens
  misc_RNA (1)...(19): siRNA sense strand
uaguagagccugaggacuu

SEQ ID NO: 2079735 - RNA, 19 nt, Homo sapiens
  misc_RNA (1)...(19): siRNA sense strand
cuacuucaacuuacuuuca

SEQ ID NO: 2079736 - RNA, 19 nt, Homo sapiens
  misc_RNA (1)...(19): siRNA sense strand
cagaacugccugauucaug

SEQ ID NO: 2079737 - RNA, 19 nt, Homo sapiens
  misc_RNA (1)...(19): siRNA sense strand
auccagaacugccugauuc

SEQ ID NO: 2079738 - RNA, 19 nt, Homo sapiens
  misc_RNA (1)...(19): siRNA sense strand
ggacucacuggauagaugu

SEQ ID NO: 2079739 - RNA, 19 nt, Homo sapiens
  misc_RNA (1)...(19): siRNA sense strand
ccaagaagaggaagaagac

SEQ ID NO: 2079740 - RNA, 19 nt, Homo sapiens
  misc_RNA (1)...(19): siRNA sense strand
ggaaguugcuuuuacucau

SEQ ID NO: 2079741 - RNA, 19 nt, Homo sapiens
  misc_RNA (1)...(19): siRNA sense strand
aguagugcuucuucucgua

SEQ ID NO: 2079742 - RNA, 19 nt, Homo sapiens
  misc_RNA (1)...(19): siRNA sense strand
gcaggacucacuggauaga

SEQ ID NO: 2079743 - RNA, 19 nt, Homo sapiens
  misc_RNA (1)...(19): siRNA sense strand
ggaccgggaaguagugcuu

SEQ ID NO: 2079744 - RNA, 19 nt, Homo sapiens
  misc_RNA (1)...(19): siRNA sense strand
gcaggacucacuggauaga

SEQ ID NO: 2079745 - RNA, 19 nt, Homo sapiens
  misc_RNA (1)...(19): siRNA sense strand
ggaagcagaagagccugaa

SEQ ID NO: 2079746 - RNA, 19 nt, Homo sapiens
  misc_RNA (1)...(19): siRNA sense strand
gcaggacucacuggauaga

SEQ ID NO: 2079747 - RNA, 19 nt, Homo sapiens
  misc_RNA (1)...(19): siRNA sense strand
gaagaacacguuggcuuuu

SEQ ID NO: 2079748 - RNA, 19 nt, Homo sapiens
  misc_RNA (1)...(19): siRNA sense strand
auucgacuacuucaacuua

SEQ ID NO: 2079749 - RNA, 19 nt, Homo sapiens
  misc_RNA (1)...(19): siRNA sense strand
gcccuugacguggacaaua

SEQ ID NO: 2079750 - RNA, 19 nt, Homo sapiens
  misc_RNA (1)...(19): siRNA sense strand
aguagagccugaggacuug

SEQ ID NO: 2079751 - RNA, 19 nt, Homo sapiens
  misc_RNA (1)...(19): siRNA sense strand
ucacuggauagauguuauu

SEQ ID NO: 2079752 - RNA, 19 nt, Homo sapiens
  misc_RNA (1)...(19): siRNA sense strand
aggacucacuggauagaug

SEQ ID NO: 2079753 - RNA, 19 nt, Homo sapiens
  misc_RNA (1)...(19): siRNA sense strand
aggacucacuggauagaug

SEQ ID NO: 2079754 - RNA, 19 nt, Homo sapiens
  misc_RNA (1)...(19): siRNA sense strand
ccuggaacugccugacuua

SEQ ID NO: 2079755 - RNA, 19 nt, Homo sapiens
  misc_RNA (1)...(19): siRNA sense strand
cacguuggcuuuucucuug

SEQ ID NO: 2079756 - RNA, 19 nt, Homo sapiens
  misc_RNA (1)...(19): siRNA sense strand
ugccagcccuacagaagug

SEQ ID NO: 2079757 - RNA, 19 nt, Homo sapiens
  misc_RNA (1)...(19): siRNA sense strand
gaugagaaagagccugaag

SEQ ID NO: 2079758 - RNA, 19 nt, Homo sapiens
  misc_RNA (1)...(19): siRNA sense strand
gagaaagagccugaagucu

SEQ ID NO: 2079759 - RNA, 19 nt, Homo sapiens
  misc_RNA (1)...(19): siRNA sense strand
ggaugaaauugaaaaguac

SEQ ID NO: 2079760 - RNA, 19 nt, Homo sapiens
  misc_RNA (1)...(19): siRNA sense strand
cgacuacuucaacuuacuu

SEQ ID NO: 2079761 - RNA, 19 nt, Homo sapiens
  misc_RNA (1)...(19): siRNA sense strand
gcagaagagccugaagucu

SEQ ID NO: 2079762 - RNA, 19 nt, Homo sapiens
  misc_RNA (1)...(19): siRNA sense strand
gcucaacgaggugcugaug

SEQ ID NO: 2079763 - RNA, 19 nt, Homo sapiens
  misc_RNA (1)...(19): siRNA sense strand
ggagcugcuggaugagaaa

SEQ ID NO: 2079764 - RNA, 19 nt, Homo sapiens
  misc_RNA (1)...(19): siRNA sense strand
guuauucgacuacuucaac

SEQ ID NO: 2079765 - RNA, 19 nt, Homo sapiens
  misc_RNA (1)...(19): siRNA sense strand
gcugauggaagcagaagag

SEQ ID NO: 2079766 - RNA, 19 nt, Homo sapiens
  misc_RNA (1)...(19): siRNA sense strand
caacgaggugcugauggaa

SEQ ID NO: 2079767 - RNA, 19 nt, Homo sapiens
  misc_RNA (1)...(19): siRNA sense strand
agaagaggaagaagaccaa

SEQ ID NO: 2079768 - RNA, 19 nt, Homo sapiens
  misc_RNA (1)...(19): siRNA sense strand
gccgguagcaggugcacuu

SEQ ID NO: 2079769 - RNA, 19 nt, Homo sapiens
  misc_RNA (1)...(19): siRNA sense strand
gcaccucgaggcguacguu

SEQ ID NO: 2079770 - RNA, 19 nt, Homo sapiens
  misc_RNA (1)...(19): siRNA sense strand
cccuugacguggacaauag

SEQ ID NO: 2079771 - RNA, 19 nt, Homo sapiens
  misc_RNA (1)...(19): siRNA sense strand
aagaagaacugcaccuaua

SEQ ID NO: 2079772 - RNA, 19 nt, Homo sapiens
  misc_RNA (1)...(19): siRNA sense strand
ggaaauggccagugaugaa

SEQ ID NO: 2079773 - RNA, 19 nt, Homo sapiens
  misc_RNA (1)...(19): siRNA sense strand
caucagaaaucgaagauca

SEQ ID NO: 2079774 - RNA, 19 nt, Homo sapiens
  misc_RNA (1)...(19): siRNA sense strand
gcaaaugcaagaagaagaa

SEQ ID NO: 2079775 - RNA, 19 nt, Homo sapiens
  misc_RNA (1)...(19): siRNA sense strand
ggauuggaguugcuguuaa

SEQ ID NO: 2079776 - RNA, 19 nt, Homo sapiens
  misc_RNA (1)...(19): siRNA sense strand
ggacaaguguguggagaug

SEQ ID NO: 2079777 - RNA, 19 nt, Homo sapiens
  misc_RNA (1)...(19): siRNA sense strand
cagaggaaauggccaguga

SEQ ID NO: 2079778 - RNA, 19 nt, Homo sapiens
  misc_RNA (1)...(19): siRNA sense strand
gaagaagaacugcaccuau

SEQ ID NO: 2079779 - RNA, 19 nt, Homo sapiens
  misc_RNA (1)...(19): siRNA sense strand
gaccaucgguggaaagauc

SEQ ID NO: 2079780 - RNA, 19 nt, Homo sapiens
  misc_RNA (1)...(19): siRNA sense strand
gauuggaguugcuguuaau

SEQ ID NO: 2079781 - RNA, 19 nt, Homo sapiens
  misc_RNA (1)...(19): siRNA sense strand
ugaaggcggacgaugauua

SEQ ID NO: 2079782 - RNA, 19 nt, Homo sapiens
  misc_RNA (1)...(19): siRNA sense strand
ggccaaaguccuuaucaaa

SEQ ID NO: 2079783 - RNA, 19 nt, Homo sapiens
  misc_RNA (1)...(19): siRNA sense strand
aagaggagcugcugaggau

SEQ ID NO: 2079784 - RNA, 19 nt, Homo sapiens
  misc_RNA (1)...(19): siRNA sense strand
ggcaaucgcuggaaguucu

SEQ ID NO: 2079785 - RNA, 19 nt, Homo sapiens
  misc_RNA (1)...(19): siRNA sense strand
ucaaacagcagcaaaucaa

SEQ ID NO: 2079786 - RNA, 19 nt, Homo sapiens
  misc_RNA (1)...(19): siRNA sense strand
cugcacagcugccagaugu

SEQ ID NO: 2079787 - RNA, 19 nt, Homo sapiens
  misc_RNA (1)...(19): siRNA sense strand
caugacuaccuuugucuua

SEQ ID NO: 2079788 - RNA, 19 nt, Homo sapiens
  misc_RNA (1)...(19): siRNA sense strand
caagaugacggcagaggaa

SEQ ID NO: 2079789 - RNA, 19 nt, Homo sapiens
  misc_RNA (1)...(19): siRNA sense strand
ucagaaaucgaagaucaua

SEQ ID NO: 2079790 - RNA, 19 nt, Homo sapiens
  misc_RNA (1)...(19): siRNA sense strand
ugacuaccuuugucuuaug

SEQ ID NO: 2079791 - RNA, 19 nt, Homo sapiens
  misc_RNA (1)...(19): siRNA sense strand
agaagaacugcaccuauaa

SEQ ID NO: 2079792 - RNA, 19 nt, Homo sapiens
  misc_RNA (1)...(19): siRNA sense strand
cuacagacaaccaggauug

SEQ ID NO: 2079793 - RNA, 19 nt, Homo sapiens
  misc_RNA (1)...(19): siRNA sense strand
gagaaaaggcaaagaagaa

SEQ ID NO: 2079794 - RNA, 19 nt, Homo sapiens
  misc_RNA (1)...(19): siRNA sense strand
gaggaaauggccagugaug

SEQ ID NO: 2079795 - RNA, 19 nt, Homo sapiens
  misc_RNA (1)...(19): siRNA sense strand
gaucaaacagcagcaaauc

SEQ ID NO: 2079796 - RNA, 19 nt, Homo sapiens
  misc_RNA (1)...(19): siRNA sense strand
caaacagcagcaaaucaaa

SEQ ID NO: 2079797 - RNA, 19 nt, Homo sapiens
  misc_RNA (1)...(19): siRNA sense strand
caccaccacugaccucuuc

SEQ ID NO: 2079798 - RNA, 19 nt, Homo sapiens
  misc_RNA (1)...(19): siRNA sense strand
agaagaugguggccaggaa

SEQ ID NO: 2079799 - RNA, 19 nt, Homo sapiens
  misc_RNA (1)...(19): siRNA sense strand
gaaggcggacgaugauuac

SEQ ID NO: 2079800 - RNA, 19 nt, Homo sapiens
  misc_RNA (1)...(19): siRNA sense strand
gcagcaaaugcaagaagaa

SEQ ID NO: 2079801 - RNA, 19 nt, Homo sapiens
  misc_RNA (1)...(19): siRNA sense strand
acuauggagucaacuguga

SEQ ID NO: 2079802 - RNA, 19 nt, Homo sapiens
  misc_RNA (1)...(19): siRNA sense strand
caagagcacggacaugaag

SEQ ID NO: 2079803 - RNA, 19 nt, Homo sapiens
  misc_RNA (1)...(19): siRNA sense strand
gcccaugacuaccuuuguc

SEQ ID NO: 2079804 - RNA, 19 nt, Homo sapiens
  misc_RNA (1)...(19): siRNA sense strand
gcugaugagcccaugacua

SEQ ID NO: 2079805 - RNA, 19 nt, Homo sapiens
  misc_RNA (1)...(19): siRNA sense strand
gaagaacugcaccuauaac

SEQ ID NO: 2079806 - RNA, 19 nt, Homo sapiens
  misc_RNA (1)...(19): siRNA sense strand
gcauaagcaaccucaagga

SEQ ID NO: 2079807 - RNA, 19 nt, Homo sapiens
  misc_RNA (1)...(19): siRNA sense strand
agaaaucgaagaucauauc

SEQ ID NO: 2079808 - RNA, 19 nt, Homo sapiens
  misc_RNA (1)...(19): siRNA sense strand
gcaggccuuucuccaccaa

SEQ ID NO: 2079809 - RNA, 19 nt, Homo sapiens
  misc_RNA (1)...(19): siRNA sense strand
gaugacggcagaggaaaug

SEQ ID NO: 2079810 - RNA, 19 nt, Homo sapiens
  misc_RNA (1)...(19): siRNA sense strand
gggcuugaguguucagacu

SEQ ID NO: 2079811 - RNA, 19 nt, Homo sapiens
  misc_RNA (1)...(19): siRNA sense strand
gaaauggccagugaugaac

SEQ ID NO: 2079812 - RNA, 19 nt, Homo sapiens
  misc_RNA (1)...(19): siRNA sense strand
ggcggacgaugauuacaag

SEQ ID NO: 2079813 - RNA, 19 nt, Homo sapiens
  misc_RNA (1)...(19): siRNA sense strand
ucaagagcacggacaugaa

SEQ ID NO: 2079814 - RNA, 19 nt, Homo sapiens
  misc_RNA (1)...(19): siRNA sense strand
uggccaaaguccuuaucaa

SEQ ID NO: 2079815 - RNA, 19 nt, Homo sapiens
  misc_RNA (1)...(19): siRNA sense strand
agaagaagaacugcaccua

SEQ ID NO: 2079816 - RNA, 19 nt, Homo sapiens
  misc_RNA (1)...(19): siRNA sense strand
caucuccgcagggcuuaua

SEQ ID NO: 2079817 - RNA, 19 nt, Homo sapiens
  misc_RNA (1)...(19): siRNA sense strand
gccaaaguccuuaucaaaa

SEQ ID NO: 2079818 - RNA, 19 nt, Homo sapiens
  misc_RNA (1)...(19): siRNA sense strand
cugaugagcccaugacuac

SEQ ID NO: 2079819 - RNA, 19 nt, Homo sapiens
  misc_RNA (1)...(19): siRNA sense strand
cugagggaguugaggaaug

SEQ ID NO: 2079820 - RNA, 19 nt, Homo sapiens
  misc_RNA (1)...(19): siRNA sense strand
ugucuuaugcaaugaaugu

SEQ ID NO: 2079821 - RNA, 19 nt, Homo sapiens
  misc_RNA (1)...(19): siRNA sense strand
ugagggaguugaggaaugc

SEQ ID NO: 2079822 - RNA, 19 nt, Homo sapiens
  misc_RNA (1)...(19): siRNA sense strand
agagcacggacaugaagua

SEQ ID NO: 2079823 - RNA, 19 nt, Homo sapiens
  misc_RNA (1)...(19): siRNA sense strand
cuaccuuugucuuaugcaa

SEQ ID NO: 2079824 - RNA, 19 nt, Homo sapiens
  misc_RNA (1)...(19): siRNA sense strand
guuugccucuuccaugugu

SEQ ID NO: 2079825 - RNA, 19 nt, Homo sapiens
  misc_RNA (1)...(19): siRNA sense strand
gcaccaccacugaccucuu

SEQ ID NO: 2079826 - RNA, 19 nt, Homo sapiens
  misc_RNA (1)...(19): siRNA sense strand
aggauuggaguugcuguua

SEQ ID NO: 2079827 - RNA, 19 nt, Homo sapiens
  misc_RNA (1)...(19): siRNA sense strand
gagcccaugacuaccuuug

SEQ ID NO: 2079828 - RNA, 19 nt, Homo sapiens
  misc_RNA (1)...(19): siRNA sense strand
aaaaggagaggaaagagaa

SEQ ID NO: 2079829 - RNA, 19 nt, Homo sapiens
  misc_RNA (1)...(19): siRNA sense strand
ugacagaccuggacacaaa

SEQ ID NO: 2079830 - RNA, 19 nt, Homo sapiens
  misc_RNA (1)...(19): siRNA sense strand
gagaugaagcgcauguuua

SEQ ID NO: 2079831 - RNA, 19 nt, Homo sapiens
  misc_RNA (1)...(19): siRNA sense strand
gcaaccggcugcuggagaa

SEQ ID NO: 2079832 - RNA, 19 nt, Homo sapiens
  misc_RNA (1)...(19): siRNA sense strand
cagaagacguguccaagau

SEQ ID NO: 2079833 - RNA, 19 nt, Homo sapiens
  misc_RNA (1)...(19): siRNA sense strand
uaagguggcuuccgaugau

SEQ ID NO: 2079834 - RNA, 19 nt, Homo sapiens
  misc_RNA (1)...(19): siRNA sense strand
gaagacguguccaagaucu

SEQ ID NO: 2079835 - RNA, 19 nt, Homo sapiens
  misc_RNA (1)...(19): siRNA sense strand
acacaaagauccaagaaaa

SEQ ID NO: 2079836 - RNA, 19 nt, Homo sapiens
  misc_RNA (1)...(19): siRNA sense strand
ggagaugaaugagaagauc

SEQ ID NO: 2079837 - RNA, 19 nt, Homo sapiens
  misc_RNA (1)...(19): siRNA sense strand
ggacacaaagauccaagaa

SEQ ID NO: 2079838 - RNA, 19 nt, Homo sapiens
  misc_RNA (1)...(19): siRNA sense strand
gggagaccuuugacuuuga

SEQ ID NO: 2079839 - RNA, 19 nt, Homo sapiens
  misc_RNA (1)...(19): siRNA sense strand
gacaaggaguaccaggaaa

SEQ ID NO: 2079840 - RNA, 19 nt, Homo sapiens
  misc_RNA (1)...(19): siRNA sense strand
gaggucggcuccaugaaca

SEQ ID NO: 2079841 - RNA, 19 nt, Homo sapiens
  misc_RNA (1)...(19): siRNA sense strand
aggaggagaugaaugagaa

SEQ ID NO: 2079842 - RNA, 19 nt, Homo sapiens
  misc_RNA (1)...(19): siRNA sense strand
gaugaggucggcuccauga

SEQ ID NO: 2079843 - RNA, 19 nt, Homo sapiens
  misc_RNA (1)...(19): siRNA sense strand
ggaguaccaggaaacgaua

SEQ ID NO: 2079844 - RNA, 19 nt, Homo sapiens
  misc_RNA (1)...(19): siRNA sense strand
gcgggagaccuuugacuuu

SEQ ID NO: 2079845 - RNA, 19 nt, Homo sapiens
  misc_RNA (1)...(19): siRNA sense strand
agaugaagcgcauguuuaa

SEQ ID NO: 2079846 - RNA, 19 nt, Homo sapiens
  misc_RNA (1)...(19): siRNA sense strand
gggaggauuucaccaacug

SEQ ID NO: 2079847 - RNA, 19 nt, Homo sapiens
  misc_RNA (1)...(19): siRNA sense strand
guaagguggcuuccgauga

SEQ ID NO: 2079848 - RNA, 19 nt, Homo sapiens
  misc_RNA (1)...(19): siRNA sense strand
caacauccaccucuugaag

SEQ ID NO: 2079849 - RNA, 19 nt, Homo sapiens
  misc_RNA (1)...(19): siRNA sense strand
gaccgaauccuucuucaag

SEQ ID NO: 2079850 - RNA, 19 nt, Homo sapiens
  misc_RNA (1)...(19): siRNA sense strand
cgggagaccuuugacuuug

SEQ ID NO: 2079851 - RNA, 19 nt, Homo sapiens
  misc_RNA (1)...(19): siRNA sense strand
ugagaugaagcgcauguuu

SEQ ID NO: 2079852 - RNA, 19 nt, Homo sapiens
  misc_RNA (1)...(19): siRNA sense strand
gcagggcgagcaagaggaa

SEQ ID NO: 2079853 - RNA, 19 nt, Homo sapiens
  misc_RNA (1)...(19): siRNA sense strand
gacacaaagauccaagaaa

SEQ ID NO: 2079854 - RNA, 19 nt, Homo sapiens
  misc_RNA (1)...(19): siRNA sense strand
gcuccaacauccaccucuu

SEQ ID NO: 2079855 - RNA, 19 nt, Homo sapiens
  misc_RNA (1)...(19): siRNA sense strand
ccgagcuggugguguuuaa

SEQ ID NO: 2079856 - RNA, 19 nt, Homo sapiens
  misc_RNA (1)...(19): siRNA sense strand
ucagaagacguguccaaga

SEQ ID NO: 2079857 - RNA, 19 nt, Homo sapiens
  misc_RNA (1)...(19): siRNA sense strand
agacaaggaguaccaggaa

SEQ ID NO: 2079858 - RNA, 19 nt, Homo sapiens
  misc_RNA (1)...(19): siRNA sense strand
ugacgugggaagagaauga

SEQ ID NO: 2079859 - RNA, 19 nt, Homo sapiens
  misc_RNA (1)...(19): siRNA sense strand
gggaccaucuggagcuaca

SEQ ID NO: 2079860 - RNA, 19 nt, Homo sapiens
  misc_RNA (1)...(19): siRNA sense strand
gagaccgaauccuucuuca

SEQ ID NO: 2079861 - RNA, 19 nt, Homo sapiens
  misc_RNA (1)...(19): siRNA sense strand
cggccaagcugugcgaugu

SEQ ID NO: 2079862 - RNA, 19 nt, Homo sapiens
  misc_RNA (1)...(19): siRNA sense strand
auggagaugugcagcauga

SEQ ID NO: 2079863 - RNA, 19 nt, Homo sapiens
  misc_RNA (1)...(19): siRNA sense strand
accgacaccugcacgagua

SEQ ID NO: 2079864 - RNA, 19 nt, Homo sapiens
  misc_RNA (1)...(19): siRNA sense strand
gugcagaucgacaccauca

SEQ ID NO: 2079865 - RNA, 19 nt, Homo sapiens
  misc_RNA (1)...(19): siRNA sense strand
gaugagaugaagcgcaugu

SEQ ID NO: 2079866 - RNA, 19 nt, Homo sapiens
  misc_RNA (1)...(19): siRNA sense strand
aggccgagcuggugguguu

SEQ ID NO: 2079867 - RNA, 19 nt, Homo sapiens
  misc_RNA (1)...(19): siRNA sense strand
ggagaugugcagcaugaag

SEQ ID NO: 2079868 - RNA, 19 nt, Homo sapiens
  misc_RNA (1)...(19): siRNA sense strand
gcgagcgcgacgaguauaa

SEQ ID NO: 2079869 - RNA, 19 nt, Homo sapiens
  misc_RNA (1)...(19): siRNA sense strand
ggagaccuuugacuuugac

SEQ ID NO: 2079870 - RNA, 19 nt, Homo sapiens
  misc_RNA (1)...(19): siRNA sense strand
cagcagcgacucaggaagu

SEQ ID NO: 2079871 - RNA, 19 nt, Homo sapiens
  misc_RNA (1)...(19): siRNA sense strand
ggauuucaccaacugcaau

SEQ ID NO: 2079872 - RNA, 19 nt, Homo sapiens
  misc_RNA (1)...(19): siRNA sense strand
gaagguggacauggacauc

SEQ ID NO: 2079873 - RNA, 19 nt, Homo sapiens
  misc_RNA (1)...(19): siRNA sense strand
aaacuugggcaacuugauc

SEQ ID NO: 2079874 - RNA, 19 nt, Homo sapiens
  misc_RNA (1)...(19): siRNA sense strand
ugaagcgcauguuuaacca

SEQ ID NO: 2079875 - RNA, 19 nt, Homo sapiens
  misc_RNA (1)...(19): siRNA sense strand
uccaggaggagaugaauga

SEQ ID NO: 2079876 - RNA, 19 nt, Homo sapiens
  misc_RNA (1)...(19): siRNA sense strand
agacgagagacaaggagua

SEQ ID NO: 2079877 - RNA, 19 nt, Homo sapiens
  misc_RNA (1)...(19): siRNA sense strand
acaacgugcuggccaaggu

SEQ ID NO: 2079878 - RNA, 19 nt, Homo sapiens
  misc_RNA (1)...(19): siRNA sense strand
gcacgaguacauggagaug

SEQ ID NO: 2079879 - RNA, 19 nt, Homo sapiens
  misc_RNA (1)...(19): siRNA sense strand
ggaaacgauaggucagauc

SEQ ID NO: 2079880 - RNA, 19 nt, Homo sapiens
  misc_RNA (1)...(19): siRNA sense strand
cacagcagcggaacucaga

SEQ ID NO: 2079881 - RNA, 19 nt, Homo sapiens
  misc_RNA (1)...(19): siRNA sense strand
gaaguacagaugagaucca

SEQ ID NO: 2079882 - RNA, 19 nt, Homo sapiens
  misc_RNA (1)...(19): siRNA sense strand
ugacuuugacgacgacugu

SEQ ID NO: 2079883 - RNA, 19 nt, Homo sapiens
  misc_RNA (1)...(19): siRNA sense strand
gagcucgccaagcgcauga

SEQ ID NO: 2079884 - RNA, 19 nt, Homo sapiens
  misc_RNA (1)...(19): siRNA sense strand
gaggagaugaaugagaaga

SEQ ID NO: 2079885 - RNA, 19 nt, Homo sapiens
  misc_RNA (1)...(19): siRNA sense strand
ugggcaacuugauccauga

SEQ ID NO: 2079886 - RNA, 19 nt, Homo sapiens
  misc_RNA (1)...(19): siRNA sense strand
ucaagacgagagacaagga

SEQ ID NO: 2079887 - RNA, 19 nt, Homo sapiens
  misc_RNA (1)...(19): siRNA sense strand
gcgugcagaucgacaccau

SEQ ID NO: 2079888 - RNA, 19 nt, Homo sapiens
  misc_RNA (1)...(19): siRNA sense strand
gagcuggugguguuuaagg

SEQ ID NO: 2079889 - RNA, 19 nt, Homo sapiens
  misc_RNA (1)...(19): siRNA sense strand
cgaccugggcuccaacauc

SEQ ID NO: 2079890 - RNA, 19 nt, Homo sapiens
  misc_RNA (1)...(19): siRNA sense strand
gccuggacgugcagaugga

SEQ ID NO: 2079891 - RNA, 19 nt, Homo sapiens
  misc_RNA (1)...(19): siRNA sense strand
cgagagacaaggaguacca

SEQ ID NO: 2079892 - RNA, 19 nt, Homo sapiens
  misc_RNA (1)...(19): siRNA sense strand
ugagaccgaauccuucuuc

SEQ ID NO: 2079893 - RNA, 19 nt, Homo sapiens
  misc_RNA (1)...(19): siRNA sense strand
ggaaaacuugggcaacuug

SEQ ID NO: 2079894 - RNA, 19 nt, Homo sapiens
  misc_RNA (1)...(19): siRNA sense strand
caaggucgcuggagcaauu

SEQ ID NO: 2079895 - RNA, 19 nt, Homo sapiens
  misc_RNA (1)...(19): siRNA sense strand
ggauuuacguaaccaacua

SEQ ID NO: 2079896 - RNA, 19 nt, Homo sapiens
  misc_RNA (1)...(19): siRNA sense strand
gcaacacccugguagaguu

SEQ ID NO: 2079897 - RNA, 19 nt, Homo sapiens
  misc_RNA (1)...(19): siRNA sense strand
gcacaggccacgugguaua

SEQ ID NO: 2079898 - RNA, 19 nt, Homo sapiens
  misc_RNA (1)...(19): siRNA sense strand
gaagcucuccacaaucaua

SEQ ID NO: 2079899 - RNA, 19 nt, Homo sapiens
  misc_RNA (1)...(19): siRNA sense strand
gaacacauaugggcggaau

SEQ ID NO: 2079900 - RNA, 19 nt, Homo sapiens
  misc_RNA (1)...(19): siRNA sense strand
gggcaucaccuacuauaaa

SEQ ID NO: 2079901 - RNA, 19 nt, Homo sapiens
  misc_RNA (1)...(19): siRNA sense strand
ggacgagaauggccuaugg

SEQ ID NO: 2079902 - RNA, 19 nt, Homo sapiens
  misc_RNA (1)...(19): siRNA sense strand
ggaguggauuugcugauug

SEQ ID NO: 2079903 - RNA, 19 nt, Homo sapiens
  misc_RNA (1)...(19): siRNA sense strand
gaaaauugcucugaaaaca

SEQ ID NO: 2079904 - RNA, 19 nt, Homo sapiens
  misc_RNA (1)...(19): siRNA sense strand
gaaauucgaaccgagauga

SEQ ID NO: 2079905 - RNA, 19 nt, Homo sapiens
  misc_RNA (1)...(19): siRNA sense strand
caacaucuccuacgcuuuc

SEQ ID NO: 2079906 - RNA, 19 nt, Homo sapiens
  misc_RNA (1)...(19): siRNA sense strand
gacacucucuccacaauca

SEQ ID NO: 2079907 - RNA, 19 nt, Homo sapiens
  misc_RNA (1)...(19): siRNA sense strand
gaguggauuugcugauuga

SEQ ID NO: 2079908 - RNA, 19 nt, Homo sapiens
  misc_RNA (1)...(19): siRNA sense strand
gcagaucaacuccaucgaa

SEQ ID NO: 2079909 - RNA, 19 nt, Homo sapiens
  misc_RNA (1)...(19): siRNA sense strand
gaugagcggauuuacguaa

SEQ ID NO: 2079910 - RNA, 19 nt, Homo sapiens
  misc_RNA (1)...(19): siRNA sense strand
gaccaacacuccaaacaac

SEQ ID NO: 2079911 - RNA, 19 nt, Homo sapiens
  misc_RNA (1)...(19): siRNA sense strand
gaucaacuccaucgaacuu

SEQ ID NO: 2079912 - RNA, 19 nt, Homo sapiens
  misc_RNA (1)...(19): siRNA sense strand
ucaaagaggacauggaaga

SEQ ID NO: 2079913 - RNA, 19 nt, Homo sapiens
  misc_RNA (1)...(19): siRNA sense strand
ggaccaacacuccaaacaa

SEQ ID NO: 2079914 - RNA, 19 nt, Homo sapiens
  misc_RNA (1)...(19): siRNA sense strand
gugcaagugugccugugua

SEQ ID NO: 2079915 - RNA, 19 nt, Homo sapiens
  misc_RNA (1)...(19): siRNA sense strand
gaaccuggagaacuucaaa

SEQ ID NO: 2079916 - RNA, 19 nt, Homo sapiens
  misc_RNA (1)...(19): siRNA sense strand
gauggaagcuaugcacaca

SEQ ID NO: 2079917 - RNA, 19 nt, Homo sapiens
  misc_RNA (1)...(19): siRNA sense strand
gaauaagcgaggcaaagaa

SEQ ID NO: 2079918 - RNA, 19 nt, Homo sapiens
  misc_RNA (1)...(19): siRNA sense strand
ggacauggaagaaauucga

SEQ ID NO: 2079919 - RNA, 19 nt, Homo sapiens
  misc_RNA (1)...(19): siRNA sense strand
uugaagcucuccacaauca

SEQ ID NO: 2079920 - RNA, 19 nt, Homo sapiens
  misc_RNA (1)...(19): siRNA sense strand
ggaaugccaacaucuccua

SEQ ID NO: 2079921 - RNA, 19 nt, Homo sapiens
  misc_RNA (1)...(19): siRNA sense strand
ccaaggaugagcggauuua

SEQ ID NO: 2079922 - RNA, 19 nt, Homo sapiens
  misc_RNA (1)...(19): siRNA sense strand
gcagccuucuccucaggua

SEQ ID NO: 2079923 - RNA, 19 nt, Homo sapiens
  misc_RNA (1)...(19): siRNA sense strand
caaagaaaauugcucugaa

SEQ ID NO: 2079924 - RNA, 19 nt, Homo sapiens
  misc_RNA (1)...(19): siRNA sense strand
ccacaaucauagacauguu

SEQ ID NO: 2079925 - RNA, 19 nt, Homo sapiens
  misc_RNA (1)...(19): siRNA sense strand
uggauuugcugauugaaga

SEQ ID NO: 2079926 - RNA, 19 nt, Homo sapiens
  misc_RNA (1)...(19): siRNA sense strand
gcaacaucaucaaguacga

SEQ ID NO: 2079927 - RNA, 19 nt, Homo sapiens
  misc_RNA (1)...(19): siRNA sense strand
aagaggacauggaagaaau

SEQ ID NO: 2079928 - RNA, 19 nt, Homo sapiens
  misc_RNA (1)...(19): siRNA sense strand
cgacccagauagacuacaa

SEQ ID NO: 2079929 - RNA, 19 nt, Homo sapiens
  misc_RNA (1)...(19): siRNA sense strand
gcugcuaguucucuacuuc

SEQ ID NO: 2079930 - RNA, 19 nt, Homo sapiens
  misc_RNA (1)...(19): siRNA sense strand
caaggaaaaugaacaaauc

SEQ ID NO: 2079931 - RNA, 19 nt, Homo sapiens
  misc_RNA (1)...(19): siRNA sense strand
cuacuucgcucugauugug

SEQ ID NO: 2079932 - RNA, 19 nt, Homo sapiens
  misc_RNA (1)...(19): siRNA sense strand
gcagacagccaggacuuga

SEQ ID NO: 2079933 - RNA, 19 nt, Homo sapiens
  misc_RNA (1)...(19): siRNA sense strand
cgaccacccagaacacaua

SEQ ID NO: 2079934 - RNA, 19 nt, Homo sapiens
  misc_RNA (1)...(19): siRNA sense strand
aagccaaggucucugaaga

SEQ ID NO: 2079935 - RNA, 19 nt, Homo sapiens
  misc_RNA (1)...(19): siRNA sense strand
ggcaucaccuacuauaaag

SEQ ID NO: 2079936 - RNA, 19 nt, Homo sapiens
  misc_RNA (1)...(19): siRNA sense strand
ccaggucacuuaccauguc

SEQ ID NO: 2079937 - RNA, 19 nt, Homo sapiens
  misc_RNA (1)...(19): siRNA sense strand
uugaagagcagcaagauga

SEQ ID NO: 2079938 - RNA, 19 nt, Homo sapiens
  misc_RNA (1)...(19): siRNA sense strand
ugucaucuuugccuacuga

SEQ ID NO: 2079939 - RNA, 19 nt, Homo sapiens
  misc_RNA (1)...(19): siRNA sense strand
ccaggcugcuguucgagaa

SEQ ID NO: 2079940 - RNA, 19 nt, Homo sapiens
  misc_RNA (1)...(19): siRNA sense strand
cuggagaacuucaaacaag

SEQ ID NO: 2079941 - RNA, 19 nt, Homo sapiens
  misc_RNA (1)...(19): siRNA sense strand
aaucaaagaggacauggaa

SEQ ID NO: 2079942 - RNA, 19 nt, Homo sapiens
  misc_RNA (1)...(19): siRNA sense strand
ucacuuaccaugucaucuu

SEQ ID NO: 2079943 - RNA, 19 nt, Homo sapiens
  misc_RNA (1)...(19): siRNA sense strand
ggccaaggaugagcggauu

SEQ ID NO: 2079944 - RNA, 19 nt, Homo sapiens
  misc_RNA (1)...(19): siRNA sense strand
ccacacagccacccagcaa

SEQ ID NO: 2079945 - RNA, 19 nt, Homo sapiens
  misc_RNA (1)...(19): siRNA sense strand
agacacaacggccugauga

SEQ ID NO: 2079946 - RNA, 19 nt, Homo sapiens
  misc_RNA (1)...(19): siRNA sense strand
caaagaggacauggaagaa

SEQ ID NO: 2079947 - RNA, 19 nt, Homo sapiens
  misc_RNA (1)...(19): siRNA sense strand
cuagauagcaugccagaca

SEQ ID NO: 2079948 - RNA, 19 nt, Homo sapiens
  misc_RNA (1)...(19): siRNA sense strand
ugaauaagcgaggcaaaga

SEQ ID NO: 2079949 - RNA, 19 nt, Homo sapiens
  misc_RNA (1)...(19): siRNA sense strand
ccaaggaccgccugcucua

SEQ ID NO: 2079950 - RNA, 19 nt, Homo sapiens
  misc_RNA (1)...(19): siRNA sense strand
cauccggaaugucauagga

SEQ ID NO: 2079951 - RNA, 19 nt, Homo sapiens
  misc_RNA (1)...(19): siRNA sense strand
cacuuaccaugucaucuuu

SEQ ID NO: 2079952 - RNA, 19 nt, Homo sapiens
  misc_RNA (1)...(19): siRNA sense strand
agacuucuauaccguggaa

SEQ ID NO: 2079953 - RNA, 19 nt, Homo sapiens
  misc_RNA (1)...(19): siRNA sense strand
cccgcaacaucaucaagua

SEQ ID NO: 2079954 - RNA, 19 nt, Homo sapiens
  misc_RNA (1)...(19): siRNA sense strand
acuugaagcucuccacaau

SEQ ID NO: 2079955 - RNA, 19 nt, Homo sapiens
  misc_RNA (1)...(19): siRNA sense strand
aauaagcgaggcaaagaaa

SEQ ID NO: 2079956 - RNA, 19 nt, Homo sapiens
  misc_RNA (1)...(19): siRNA sense strand
ggacaaccaggagaacguu

SEQ ID NO: 2079957 - RNA, 19 nt, Homo sapiens
  misc_RNA (1)...(19): siRNA sense strand
uguaugccguggauagcua

SEQ ID NO: 2079958 - RNA, 19 nt, Homo sapiens
  misc_RNA (1)...(19): siRNA sense strand
gcaacugcuucgucaucug

SEQ ID NO: 2079959 - RNA, 19 nt, Homo sapiens
  misc_RNA (1)...(19): siRNA sense strand
ccuacaagcucccguacag

SEQ ID NO: 2079960 - RNA, 19 nt, Homo sapiens
  misc_RNA (1)...(19): siRNA sense strand
uggaguggauuugcugauu

SEQ ID NO: 2079961 - RNA, 19 nt, Homo sapiens
  misc_RNA (1)...(19): siRNA sense strand
gccaaggucucugaagaag

SEQ ID NO: 2079962 - RNA, 19 nt, Homo sapiens
  misc_RNA (1)...(19): siRNA sense strand
caagugugccuguguagca

SEQ ID NO: 2079963 - RNA, 19 nt, Homo sapiens
  misc_RNA (1)...(19): siRNA sense strand
caauggcgccuucuacuac

SEQ ID NO: 2079964 - RNA, 19 nt, Homo sapiens
  misc_RNA (1)...(19): siRNA sense strand
acaauggcgccuucuacua

SEQ ID NO: 2079965 - RNA, 19 nt, Homo sapiens
  misc_RNA (1)...(19): siRNA sense strand
gugcaaguguguggugaga

SEQ ID NO: 2079966 - RNA, 19 nt, Homo sapiens
  misc_RNA (1)...(19): siRNA sense strand
acacauaugggcggaauga

SEQ ID NO: 2079967 - RNA, 19 nt, Homo sapiens
  misc_RNA (1)...(19): siRNA sense strand
aaagaggacauggaagaaa

SEQ ID NO: 2079968 - RNA, 19 nt, Homo sapiens
  misc_RNA (1)...(19): siRNA sense strand
caacugcuucgucaucugu

SEQ ID NO: 2079969 - RNA, 19 nt, Homo sapiens
  misc_RNA (1)...(19): siRNA sense strand
gaaaacauccuagauagca

SEQ ID NO: 2079970 - RNA, 19 nt, Homo sapiens
  misc_RNA (1)...(19): siRNA sense strand
uuucagcggugacaaugga

SEQ ID NO: 2079971 - RNA, 19 nt, Homo sapiens
  misc_RNA (1)...(19): siRNA sense strand
ggaggaggaagugucuaaa

SEQ ID NO: 2079972 - RNA, 19 nt, Homo sapiens
  misc_RNA (1)...(19): siRNA sense strand
uccggaaccuggagaacuu

SEQ ID NO: 2079973 - RNA, 19 nt, Homo sapiens
  misc_RNA (1)...(19): siRNA sense strand
ccaccacagucagaacaga

SEQ ID NO: 2079974 - RNA, 19 nt, Homo sapiens
  misc_RNA (1)...(19): siRNA sense strand
aggcauugauggaagcuau

SEQ ID NO: 2079975 - RNA, 19 nt, Homo sapiens
  misc_RNA (1)...(19): siRNA sense strand
uggaagcuaugcacacagu

SEQ ID NO: 2079976 - RNA, 19 nt, Homo sapiens
  misc_RNA (1)...(19): siRNA sense strand
gaaggugcaaggacacucu

SEQ ID NO: 2079977 - RNA, 19 nt, Homo sapiens
  misc_RNA (1)...(19): siRNA sense strand
aaucauagacauguuggaa

SEQ ID NO: 2079978 - RNA, 19 nt, Homo sapiens
  misc_RNA (1)...(19): siRNA sense strand
ggaugagcggauuuacgua

SEQ ID NO: 2079979 - RNA, 19 nt, Homo sapiens
  misc_RNA (1)...(19): siRNA sense strand
ccaaacaaccucggugucu

SEQ ID NO: 2079980 - RNA, 19 nt, Homo sapiens
  misc_RNA (1)...(19): siRNA sense strand
ugccugagguggugaaguc

SEQ ID NO: 2079981 - RNA, 19 nt, Homo sapiens
  misc_RNA (1)...(19): siRNA sense strand
uacauucagucaccaccaa

SEQ ID NO: 2079982 - RNA, 19 nt, Homo sapiens
  misc_RNA (1)...(19): siRNA sense strand
ggagaacuucaaacaaggu

SEQ ID NO: 2079983 - RNA, 19 nt, Homo sapiens
  misc_RNA (1)...(19): siRNA sense strand
ccagggaggcauugaugga

SEQ ID NO: 2079984 - RNA, 19 nt, Homo sapiens
  misc_RNA (1)...(19): siRNA sense strand
gagacacaacggccugaug

SEQ ID NO: 2079985 - RNA, 19 nt, Homo sapiens
  misc_RNA (1)...(19): siRNA sense strand
gaagagcagcaagaugagu

SEQ ID NO: 2079986 - RNA, 19 nt, Homo sapiens
  misc_RNA (1)...(19): siRNA sense strand
gaugaauaagcgaggcaaa

SEQ ID NO: 2079987 - RNA, 19 nt, Homo sapiens
  misc_RNA (1)...(19): siRNA sense strand
uggaggaggaagugucuaa

SEQ ID NO: 2079988 - RNA, 19 nt, Homo sapiens
  misc_RNA (1)...(19): siRNA sense strand
uagauagcaugccagacau

SEQ ID NO: 2079989 - RNA, 19 nt, Homo sapiens
  misc_RNA (1)...(19): siRNA sense strand
ccagcggaaugccaacauc

SEQ ID NO: 2079990 - RNA, 19 nt, Homo sapiens
  misc_RNA (1)...(19): siRNA sense strand
caucaaguacgaccugaag

SEQ ID NO: 2079991 - RNA, 19 nt, Homo sapiens
  misc_RNA (1)...(19): siRNA sense strand
caggccacgugguauacaa

SEQ ID NO: 2079992 - RNA, 19 nt, Homo sapiens
  misc_RNA (1)...(19): siRNA sense strand
guucucuacuucgcucuga

SEQ ID NO: 2079993 - RNA, 19 nt, Homo sapiens
  misc_RNA (1)...(19): siRNA sense strand
cacagaaggagaccacaug

SEQ ID NO: 2079994 - RNA, 19 nt, Homo sapiens
  misc_RNA (1)...(19): siRNA sense strand
gcagagagaugcacaaguu

SEQ ID NO: 2079995 - RNA, 19 nt, Homo sapiens
  misc_RNA (1)...(19): siRNA sense strand
gaccaagucuccaugcuua

SEQ ID NO: 2079996 - RNA, 19 nt, Homo sapiens
  misc_RNA (1)...(19): siRNA sense strand
gggagaagaugucugagua

SEQ ID NO: 2079997 - RNA, 19 nt, Homo sapiens
  misc_RNA (1)...(19): siRNA sense strand
gcaaauggcaacucuguaa

SEQ ID NO: 2079998 - RNA, 19 nt, Homo sapiens
  misc_RNA (1)...(19): siRNA sense strand
caaagugacuggucuggaa

SEQ ID NO: 2079999 - RNA, 19 nt, Homo sapiens
  misc_RNA (1)...(19): siRNA sense strand
gauggaagaucaagagaau

SEQ ID NO: 2080000 - RNA, 19 nt, Homo sapiens
  misc_RNA (1)...(19): siRNA sense strand
uuaauaggcuccaggauga

SEQ ID NO: 2080001 - RNA, 19 nt, Homo sapiens
  misc_RNA (1)...(19): siRNA sense strand
gacaccagccucuauaaua

SEQ ID NO: 2080002 - RNA, 19 nt, Homo sapiens
  misc_RNA (1)...(19): siRNA sense strand
gaugaggucuggcccaaug

SEQ ID NO: 2080003 - RNA, 19 nt, Homo sapiens
  misc_RNA (1)...(19): siRNA sense strand
agaagaaggucaaggaaga

SEQ ID NO: 2080004 - RNA, 19 nt, Homo sapiens
  misc_RNA (1)...(19): siRNA sense strand
caauuuggauuucacaaga

SEQ ID NO: 2080005 - RNA, 19 nt, Homo sapiens
  misc_RNA (1)...(19): siRNA sense strand
gcaaguggcagcagaguug

SEQ ID NO: 2080006 - RNA, 19 nt, Homo sapiens
  misc_RNA (1)...(19): siRNA sense strand
gcagaaacagaaagcauuu

SEQ ID NO: 2080007 - RNA, 19 nt, Homo sapiens
  misc_RNA (1)...(19): siRNA sense strand
auagggagcuuccgauauu

SEQ ID NO: 2080008 - RNA, 19 nt, Homo sapiens
  misc_RNA (1)...(19): siRNA sense strand
ggagacaccauuuccauug

SEQ ID NO: 2080009 - RNA, 19 nt, Homo sapiens
  misc_RNA (1)...(19): siRNA sense strand
ggaggaagaggaagaaaug

SEQ ID NO: 2080010 - RNA, 19 nt, Homo sapiens
  misc_RNA (1)...(19): siRNA sense strand
ggucucagaugcagaaaca

SEQ ID NO: 2080011 - RNA, 19 nt, Homo sapiens
  misc_RNA (1)...(19): siRNA sense strand
gagauggauagcaguauua

SEQ ID NO: 2080012 - RNA, 19 nt, Homo sapiens
  misc_RNA (1)...(19): siRNA sense strand
aaacgcagcucccucuuca

SEQ ID NO: 2080013 - RNA, 19 nt, Homo sapiens
  misc_RNA (1)...(19): siRNA sense strand
gaucaagagaauccaauuu

SEQ ID NO: 2080014 - RNA, 19 nt, Homo sapiens
  misc_RNA (1)...(19): siRNA sense strand
gaagggagguuugcaucug

SEQ ID NO: 2080015 - RNA, 19 nt, Homo sapiens
  misc_RNA (1)...(19): siRNA sense strand
gaaccacagcgcccaaauu

SEQ ID NO: 2080016 - RNA, 19 nt, Homo sapiens
  misc_RNA (1)...(19): siRNA sense strand
gaagggaggaggagaagga

SEQ ID NO: 2080017 - RNA, 19 nt, Homo sapiens
  misc_RNA (1)...(19): siRNA sense strand
gcucugacaugcagucugu

SEQ ID NO: 2080018 - RNA, 19 nt, Homo sapiens
  misc_RNA (1)...(19): siRNA sense strand
ucacugcccuggaaagaug

SEQ ID NO: 2080019 - RNA, 19 nt, Homo sapiens
  misc_RNA (1)...(19): siRNA sense strand
acaaagagguuggcagguu

SEQ ID NO: 2080020 - RNA, 19 nt, Homo sapiens
  misc_RNA (1)...(19): siRNA sense strand
gaaguucacccagagcuuu

SEQ ID NO: 2080021 - RNA, 19 nt, Homo sapiens
  misc_RNA (1)...(19): siRNA sense strand
gaagaagaaggucaaggaa

SEQ ID NO: 2080022 - RNA, 19 nt, Homo sapiens
  misc_RNA (1)...(19): siRNA sense strand
agaaggagaugcagaugga

SEQ ID NO: 2080023 - RNA, 19 nt, Homo sapiens
  misc_RNA (1)...(19): siRNA sense strand
augaggcgcugcugacuua

SEQ ID NO: 2080024 - RNA, 19 nt, Homo sapiens
  misc_RNA (1)...(19): siRNA sense strand
gaugacaccagccucuaua

SEQ ID NO: 2080025 - RNA, 19 nt, Homo sapiens
  misc_RNA (1)...(19): siRNA sense strand
ggaccaagcugcagaaaag

SEQ ID NO: 2080026 - RNA, 19 nt, Homo sapiens
  misc_RNA (1)...(19): siRNA sense strand
aggaagaaauggacgauga

SEQ ID NO: 2080027 - RNA, 19 nt, Homo sapiens
  misc_RNA (1)...(19): siRNA sense strand
agacuucucugaauuugga

SEQ ID NO: 2080028 - RNA, 19 nt, Homo sapiens
  misc_RNA (1)...(19): siRNA sense strand
cgucugaguuccuggauga

SEQ ID NO: 2080029 - RNA, 19 nt, Homo sapiens
  misc_RNA (1)...(19): siRNA sense strand
ggaagagucauccaaguca

SEQ ID NO: 2080030 - RNA, 19 nt, Homo sapiens
  misc_RNA (1)...(19): siRNA sense strand
caaggaagaugaggaugau

SEQ ID NO: 2080031 - RNA, 19 nt, Homo sapiens
  misc_RNA (1)...(19): siRNA sense strand
gaggagagccagucuaugg

SEQ ID NO: 2080032 - RNA, 19 nt, Homo sapiens
  misc_RNA (1)...(19): siRNA sense strand
agaagaaggugggcaguga

SEQ ID NO: 2080033 - RNA, 19 nt, Homo sapiens
  misc_RNA (1)...(19): siRNA sense strand
caagcucacugcccuggaa

SEQ ID NO: 2080034 - RNA, 19 nt, Homo sapiens
  misc_RNA (1)...(19): siRNA sense strand
gaagagggagagaaagaga

SEQ ID NO: 2080035 - RNA, 19 nt, Homo sapiens
  misc_RNA (1)...(19): siRNA sense strand
gcggaaaguugcagaagca

SEQ ID NO: 2080036 - RNA, 19 nt, Homo sapiens
  misc_RNA (1)...(19): siRNA sense strand
ggagagagaagaggacuau

SEQ ID NO: 2080037 - RNA, 19 nt, Homo sapiens
  misc_RNA (1)...(19): siRNA sense strand
gagaaagagaggacagaaa

SEQ ID NO: 2080038 - RNA, 19 nt, Homo sapiens
  misc_RNA (1)...(19): siRNA sense strand
ugaagaagagggagagaaa

SEQ ID NO: 2080039 - RNA, 19 nt, Homo sapiens
  misc_RNA (1)...(19): siRNA sense strand
cagcagaguuggcaaagag

SEQ ID NO: 2080040 - RNA, 19 nt, Homo sapiens
  misc_RNA (1)...(19): siRNA sense strand
ggacugggaagauguggaa

SEQ ID NO: 2080041 - RNA, 19 nt, Homo sapiens
  misc_RNA (1)...(19): siRNA sense strand
ggaugacgccugagccaaa

SEQ ID NO: 2080042 - RNA, 19 nt, Homo sapiens
  misc_RNA (1)...(19): siRNA sense strand
gcacugacagggaggaaga

SEQ ID NO: 2080043 - RNA, 19 nt, Homo sapiens
  misc_RNA (1)...(19): siRNA sense strand
ggauagcaguauuaauaag

SEQ ID NO: 2080044 - RNA, 19 nt, Homo sapiens
  misc_RNA (1)...(19): siRNA sense strand
cuggaaagauggaagauca

SEQ ID NO: 2080045 - RNA, 19 nt, Homo sapiens
  misc_RNA (1)...(19): siRNA sense strand
ggaagaaauggacgaugaa

SEQ ID NO: 2080046 - RNA, 19 nt, Homo sapiens
  misc_RNA (1)...(19): siRNA sense strand
gcccagagcccuacuucuu

SEQ ID NO: 2080047 - RNA, 19 nt, Homo sapiens
  misc_RNA (1)...(19): siRNA sense strand
agagauggauagcaguauu

SEQ ID NO: 2080048 - RNA, 19 nt, Homo sapiens
  misc_RNA (1)...(19): siRNA sense strand
gagucuaaauccuccaguu

SEQ ID NO: 2080049 - RNA, 19 nt, Homo sapiens
  misc_RNA (1)...(19): siRNA sense strand
gaaagauggaagaucaaga

SEQ ID NO: 2080050 - RNA, 19 nt, Homo sapiens
  misc_RNA (1)...(19): siRNA sense strand
gcacuucacgguucucauc

SEQ ID NO: 2080051 - RNA, 19 nt, Homo sapiens
  misc_RNA (1)...(19): siRNA sense strand
guguagagguggaugacuu

SEQ ID NO: 2080052 - RNA, 19 nt, Homo sapiens
  misc_RNA (1)...(19): siRNA sense strand
ggaaggagaaggagaugca

SEQ ID NO: 2080053 - RNA, 19 nt, Homo sapiens
  misc_RNA (1)...(19): siRNA sense strand
ccauuuccauugccaguau

SEQ ID NO: 2080054 - RNA, 19 nt, Homo sapiens
  misc_RNA (1)...(19): siRNA sense strand
cagcagagacaaagagguu

SEQ ID NO: 2080055 - RNA, 19 nt, Homo sapiens
  misc_RNA (1)...(19): siRNA sense strand
ggacauuucccagcauuuc

SEQ ID NO: 2080056 - RNA, 19 nt, Homo sapiens
  misc_RNA (1)...(19): siRNA sense strand
acaccagccucuauaauac

SEQ ID NO: 2080057 - RNA, 19 nt, Homo sapiens
  misc_RNA (1)...(19): siRNA sense strand
gaagaagggagguuugcau

SEQ ID NO: 2080058 - RNA, 19 nt, Homo sapiens
  misc_RNA (1)...(19): siRNA sense strand
uaugaggucugaagaagag

SEQ ID NO: 2080059 - RNA, 19 nt, Homo sapiens
  misc_RNA (1)...(19): siRNA sense strand
gcagcagaguuggcaaaga

SEQ ID NO: 2080060 - RNA, 19 nt, Homo sapiens
  misc_RNA (1)...(19): siRNA sense strand
cugaugaucuuccacaaca

SEQ ID NO: 2080061 - RNA, 19 nt, Homo sapiens
  misc_RNA (1)...(19): siRNA sense strand
gagaagaguguggcuguga

SEQ ID NO: 2080062 - RNA, 19 nt, Homo sapiens
  misc_RNA (1)...(19): siRNA sense strand
gaagaucaagagaauccaa

SEQ ID NO: 2080063 - RNA, 19 nt, Homo sapiens
  misc_RNA (1)...(19): siRNA sense strand
ucaaggaagaugaggauga

SEQ ID NO: 2080064 - RNA, 19 nt, Homo sapiens
  misc_RNA (1)...(19): siRNA sense strand
agauggagcuuagggagaa

SEQ ID NO: 2080065 - RNA, 19 nt, Homo sapiens
  misc_RNA (1)...(19): siRNA sense strand
ccgcaguaauucccagaaa

SEQ ID NO: 2080066 - RNA, 19 nt, Homo sapiens
  misc_RNA (1)...(19): siRNA sense strand
aaagagauggauagcagua

SEQ ID NO: 2080067 - RNA, 19 nt, Homo sapiens
  misc_RNA (1)...(19): siRNA sense strand
ucagggagaagauggauga

SEQ ID NO: 2080068 - RNA, 19 nt, Homo sapiens
  misc_RNA (1)...(19): siRNA sense strand
gagcuuagggagaagaugu

SEQ ID NO: 2080069 - RNA, 19 nt, Homo sapiens
  misc_RNA (1)...(19): siRNA sense strand
caauguggaccuaaaggaa

SEQ ID NO: 2080070 - RNA, 19 nt, Homo sapiens
  misc_RNA (1)...(19): siRNA sense strand
gcaagacccagcucugaca

SEQ ID NO: 2080071 - RNA, 19 nt, Homo sapiens
  misc_RNA (1)...(19): siRNA sense strand
ggacacgacgucaguacug

SEQ ID NO: 2080072 - RNA, 19 nt, Homo sapiens
  misc_RNA (1)...(19): siRNA sense strand
uauccuucauguccuuuaa

SEQ ID NO: 2080073 - RNA, 19 nt, Homo sapiens
  misc_RNA (1)...(19): siRNA sense strand
ccucuuugcugacaaugug

SEQ ID NO: 2080074 - RNA, 19 nt, Homo sapiens
  misc_RNA (1)...(19): siRNA sense strand
agaagaagaaggucaagga

SEQ ID NO: 2080075 - RNA, 19 nt, Homo sapiens
  misc_RNA (1)...(19): siRNA sense strand
aguauucgauggucucaga

SEQ ID NO: 2080076 - RNA, 19 nt, Homo sapiens
  misc_RNA (1)...(19): siRNA sense strand
gauggucucagaugcagaa

SEQ ID NO: 2080077 - RNA, 19 nt, Homo sapiens
  misc_RNA (1)...(19): siRNA sense strand
ugacagggaggaagaggaa

SEQ ID NO: 2080078 - RNA, 19 nt, Homo sapiens
  misc_RNA (1)...(19): siRNA sense strand
agucuaaauccuccaguua

SEQ ID NO: 2080079 - RNA, 19 nt, Homo sapiens
  misc_RNA (1)...(19): siRNA sense strand
uggaaaagcuggccucaga

SEQ ID NO: 2080080 - RNA, 19 nt, Homo sapiens
  misc_RNA (1)...(19): siRNA sense strand
gagaugcagauggagcuua

SEQ ID NO: 2080081 - RNA, 19 nt, Homo sapiens
  misc_RNA (1)...(19): siRNA sense strand
ggccuuggcuaagaagaga

SEQ ID NO: 2080082 - RNA, 19 nt, Homo sapiens
  misc_RNA (1)...(19): siRNA sense strand
ggagguaccacgccaagag

SEQ ID NO: 2080083 - RNA, 19 nt, Homo sapiens
  misc_RNA (1)...(19): siRNA sense strand
agaggcugcuggagauuga

SEQ ID NO: 2080084 - RNA, 19 nt, Homo sapiens
  misc_RNA (1)...(19): siRNA sense strand
gguggucgccuaccugaug

SEQ ID NO: 2080085 - RNA, 19 nt, Homo sapiens
  misc_RNA (1)...(19): siRNA sense strand
agaagaguguggcugugaa

SEQ ID NO: 2080086 - RNA, 19 nt, Homo sapiens
  misc_RNA (1)...(19): siRNA sense strand
gaguguggcugugaacaag

SEQ ID NO: 2080087 - RNA, 19 nt, Homo sapiens
  misc_RNA (1)...(19): siRNA sense strand
gauauucuucccgcaguaa

SEQ ID NO: 2080088 - RNA, 19 nt, Homo sapiens
  misc_RNA (1)...(19): siRNA sense strand
cgauauucuucccgcagua

SEQ ID NO: 2080089 - RNA, 19 nt, Homo sapiens
  misc_RNA (1)...(19): siRNA sense strand
ccauagggagcuuccgaua

SEQ ID NO: 2080090 - RNA, 19 nt, Homo sapiens
  misc_RNA (1)...(19): siRNA sense strand
gaugaucuuccacaacaug

SEQ ID NO: 2080091 - RNA, 19 nt, Homo sapiens
  misc_RNA (1)...(19): siRNA sense strand
gaagaaggucaaggaagau

SEQ ID NO: 2080092 - RNA, 19 nt, Homo sapiens
  misc_RNA (1)...(19): siRNA sense strand
aauggcaacucuguaagaa

SEQ ID NO: 2080093 - RNA, 19 nt, Homo sapiens
  misc_RNA (1)...(19): siRNA sense strand
ucuaaauccuccaguuaca

SEQ ID NO: 2080094 - RNA, 19 nt, Homo sapiens
  misc_RNA (1)...(19): siRNA sense strand
gcagugaaguuguuaaaua

SEQ ID NO: 2080095 - RNA, 19 nt, Homo sapiens
  misc_RNA (1)...(19): siRNA sense strand
ggagaaagguuacuucaaa

SEQ ID NO: 2080096 - RNA, 19 nt, Homo sapiens
  misc_RNA (1)...(19): siRNA sense strand
gaagugcccuguuaaguuu

SEQ ID NO: 2080097 - RNA, 19 nt, Homo sapiens
  misc_RNA (1)...(19): siRNA sense strand
gaaagaagcacaguaauga

SEQ ID NO: 2080098 - RNA, 19 nt, Homo sapiens
  misc_RNA (1)...(19): siRNA sense strand
ugaauuaacuggaagacua

SEQ ID NO: 2080099 - RNA, 19 nt, Homo sapiens
  misc_RNA (1)...(19): siRNA sense strand
uaacgacacuggaaauuug

SEQ ID NO: 2080100 - RNA, 19 nt, Homo sapiens
  misc_RNA (1)...(19): siRNA sense strand
caagugaccuauacucauu

SEQ ID NO: 2080101 - RNA, 19 nt, Homo sapiens
  misc_RNA (1)...(19): siRNA sense strand
ggaagacuaucaaauaauc

SEQ ID NO: 2080102 - RNA, 19 nt, Homo sapiens
  misc_RNA (1)...(19): siRNA sense strand
gaaagaacauuugagaauc

SEQ ID NO: 2080103 - RNA, 19 nt, Homo sapiens
  misc_RNA (1)...(19): siRNA sense strand
gcacaguaaugaaacagaa

SEQ ID NO: 2080104 - RNA, 19 nt, Homo sapiens
  misc_RNA (1)...(19): siRNA sense strand
ggaagugcccuguuaaguu

SEQ ID NO: 2080105 - RNA, 19 nt, Homo sapiens
  misc_RNA (1)...(19): siRNA sense strand
ccaagcauguuaagagauu

SEQ ID NO: 2080106 - RNA, 19 nt, Homo sapiens
  misc_RNA (1)...(19): siRNA sense strand
aaucggaagugcccuguua

SEQ ID NO: 2080107 - RNA, 19 nt, Homo sapiens
  misc_RNA (1)...(19): siRNA sense strand
ucaacaaagucuaaccuaa

SEQ ID NO: 2080108 - RNA, 19 nt, Homo sapiens
  misc_RNA (1)...(19): siRNA sense strand
gcacaagaauuuauuucca

SEQ ID NO: 2080109 - RNA, 19 nt, Homo sapiens
  misc_RNA (1)...(19): siRNA sense strand
gagaaagguuacuucaaau

SEQ ID NO: 2080110 - RNA, 19 nt, Homo sapiens
  misc_RNA (1)...(19): siRNA sense strand
gaaaguuggaaaugugaua

SEQ ID NO: 2080111 - RNA, 19 nt, Homo sapiens
  misc_RNA (1)...(19): siRNA sense strand
caagugcccuuauuguaau

SEQ ID NO: 2080112 - RNA, 19 nt, Homo sapiens
  misc_RNA (1)...(19): siRNA sense strand
caaauaaucaucagugcaa

SEQ ID NO: 2080113 - RNA, 19 nt, Homo sapiens
  misc_RNA (1)...(19): siRNA sense strand
gaaacgucauauagaaugu

SEQ ID NO: 2080114 - RNA, 19 nt, Homo sapiens
  misc_RNA (1)...(19): siRNA sense strand
cagaagaaacacuaaauga

SEQ ID NO: 2080115 - RNA, 19 nt, Homo sapiens
  misc_RNA (1)...(19): siRNA sense strand
ggaggaacauaugauucua

SEQ ID NO: 2080116 - RNA, 19 nt, Homo sapiens
  misc_RNA (1)...(19): siRNA sense strand
caucuaggcuaucauaaag

SEQ ID NO: 2080117 - RNA, 19 nt, Homo sapiens
  misc_RNA (1)...(19): siRNA sense strand
ugaguacucugacauugaa

SEQ ID NO: 2080118 - RNA, 19 nt, Homo sapiens
  misc_RNA (1)...(19): siRNA sense strand
cuggaagacuaucaaauaa

SEQ ID NO: 2080119 - RNA, 19 nt, Homo sapiens
  misc_RNA (1)...(19): siRNA sense strand
gaugaguacucugacauug

SEQ ID NO: 2080120 - RNA, 19 nt, Homo sapiens
  misc_RNA (1)...(19): siRNA sense strand
aagaagaggagaaagguua

SEQ ID NO: 2080121 - RNA, 19 nt, Homo sapiens
  misc_RNA (1)...(19): siRNA sense strand
gaagcacaguaaugaaaca

SEQ ID NO: 2080122 - RNA, 19 nt, Homo sapiens
  misc_RNA (1)...(19): siRNA sense strand
cauauagaauguacucaug

SEQ ID NO: 2080123 - RNA, 19 nt, Homo sapiens
  misc_RNA (1)...(19): siRNA sense strand
ggaaauuugaaacgucaua

SEQ ID NO: 2080124 - RNA, 19 nt, Homo sapiens
  misc_RNA (1)...(19): siRNA sense strand
uuaagaagacuaagaguga

SEQ ID NO: 2080125 - RNA, 19 nt, Homo sapiens
  misc_RNA (1)...(19): siRNA sense strand
ggugaugggucagacaauu

SEQ ID NO: 2080126 - RNA, 19 nt, Homo sapiens
  misc_RNA (1)...(19): siRNA sense strand
acagaaagaagcacaguaa

SEQ ID NO: 2080127 - RNA, 19 nt, Homo sapiens
  misc_RNA (1)...(19): siRNA sense strand
caccagcgcuauucaacaa

SEQ ID NO: 2080128 - RNA, 19 nt, Homo sapiens
  misc_RNA (1)...(19): siRNA sense strand
ggucagacaauuugaauca

SEQ ID NO: 2080129 - RNA, 19 nt, Homo sapiens
  misc_RNA (1)...(19): siRNA sense strand
agagaaagcuuuuaaguuc

SEQ ID NO: 2080130 - RNA, 19 nt, Homo sapiens
  misc_RNA (1)...(19): siRNA sense strand
ccucaccuuuguaguauuu

SEQ ID NO: 2080131 - RNA, 19 nt, Homo sapiens
  misc_RNA (1)...(19): siRNA sense strand
uauauguggucgccaguuu

SEQ ID NO: 2080132 - RNA, 19 nt, Homo sapiens
  misc_RNA (1)...(19): siRNA sense strand
aggaggagaugucagauga

SEQ ID NO: 2080133 - RNA, 19 nt, Homo sapiens
  misc_RNA (1)...(19): siRNA sense strand
cauuauagaugcagugaag

SEQ ID NO: 2080134 - RNA, 19 nt, Homo sapiens
  misc_RNA (1)...(19): siRNA sense strand
guauagacuucacuuacga

SEQ ID NO: 2080135 - RNA, 19 nt, Homo sapiens
  misc_RNA (1)...(19): siRNA sense strand
gaaagguuacuucaaaucu

SEQ ID NO: 2080136 - RNA, 19 nt, Homo sapiens
  misc_RNA (1)...(19): siRNA sense strand
cagugcaaauucuguagua

SEQ ID NO: 2080137 - RNA, 19 nt, Homo sapiens
  misc_RNA (1)...(19): siRNA sense strand
aaacauuuauccgucauga

SEQ ID NO: 2080138 - RNA, 19 nt, Homo sapiens
  misc_RNA (1)...(19): siRNA sense strand
acuggaagacuaucaaaua

SEQ ID NO: 2080139 - RNA, 19 nt, Homo sapiens
  misc_RNA (1)...(19): siRNA sense strand
uagagaaucauuuggcuaa

SEQ ID NO: 2080140 - RNA, 19 nt, Homo sapiens
  misc_RNA (1)...(19): siRNA sense strand
ggcagaagcaaccaucuuu

SEQ ID NO: 2080141 - RNA, 19 nt, Homo sapiens
  misc_RNA (1)...(19): siRNA sense strand
gauucuacauucucaagau

SEQ ID NO: 2080142 - RNA, 19 nt, Homo sapiens
  misc_RNA (1)...(19): siRNA sense strand
gagugaaaguuggaaaugu

SEQ ID NO: 2080143 - RNA, 19 nt, Homo sapiens
  misc_RNA (1)...(19): siRNA sense strand
agacuaagagugaaaguug

SEQ ID NO: 2080144 - RNA, 19 nt, Homo sapiens
  misc_RNA (1)...(19): siRNA sense strand
uaacuccaguggucauuca

SEQ ID NO: 2080145 - RNA, 19 nt, Homo sapiens
  misc_RNA (1)...(19): siRNA sense strand
ucacguaacacauucaguu

SEQ ID NO: 2080146 - RNA, 19 nt, Homo sapiens
  misc_RNA (1)...(19): siRNA sense strand
gaauuaacuggaagacuau

SEQ ID NO: 2080147 - RNA, 19 nt, Homo sapiens
  misc_RNA (1)...(19): siRNA sense strand
gauaugagugcgaugaaug

SEQ ID NO: 2080148 - RNA, 19 nt, Homo sapiens
  misc_RNA (1)...(19): siRNA sense strand
agacuucacuuacgaguac

SEQ ID NO: 2080149 - RNA, 19 nt, Homo sapiens
  misc_RNA (1)...(19): siRNA sense strand
uaagaagacuaagagugaa

SEQ ID NO: 2080150 - RNA, 19 nt, Homo sapiens
  misc_RNA (1)...(19): siRNA sense strand
gcuauucaacaaagucuaa

SEQ ID NO: 2080151 - RNA, 19 nt, Homo sapiens
  misc_RNA (1)...(19): siRNA sense strand
gaggagaugucagaugagu

SEQ ID NO: 2080152 - RNA, 19 nt, Homo sapiens
  misc_RNA (1)...(19): siRNA sense strand
ugaagaagaugagcuagag

SEQ ID NO: 2080153 - RNA, 19 nt, Homo sapiens
  misc_RNA (1)...(19): siRNA sense strand
caaauucuguaguagacau

SEQ ID NO: 2080154 - RNA, 19 nt, Homo sapiens
  misc_RNA (1)...(19): siRNA sense strand
gcauuugcuugaauuucuu

SEQ ID NO: 2080155 - RNA, 19 nt, Homo sapiens
  misc_RNA (1)...(19): siRNA sense strand
caacaaagucuaaccuaac

SEQ ID NO: 2080156 - RNA, 19 nt, Homo sapiens
  misc_RNA (1)...(19): siRNA sense strand
gaacaggaaaguggugaug

SEQ ID NO: 2080157 - RNA, 19 nt, Homo sapiens
  misc_RNA (1)...(19): siRNA sense strand
gaagaagaggagaaagguu

SEQ ID NO: 2080158 - RNA, 19 nt, Homo sapiens
  misc_RNA (1)...(19): siRNA sense strand
uagaugcagugaaguuguu

SEQ ID NO: 2080159 - RNA, 19 nt, Homo sapiens
  misc_RNA (1)...(19): siRNA sense strand
gaaaauggacuugcuuuau

SEQ ID NO: 2080160 - RNA, 19 nt, Homo sapiens
  misc_RNA (1)...(19): siRNA sense strand
agaaagaagcacaguaaug

SEQ ID NO: 2080161 - RNA, 19 nt, Homo sapiens
  misc_RNA (1)...(19): siRNA sense strand
ggagaugucagaugaguac

SEQ ID NO: 2080162 - RNA, 19 nt, Homo sapiens
  misc_RNA (1)...(19): siRNA sense strand
cagcgaugaugaacaggaa

SEQ ID NO: 2080163 - RNA, 19 nt, Homo sapiens
  misc_RNA (1)...(19): siRNA sense strand
ccauaggucccuuuuauua

SEQ ID NO: 2080164 - RNA, 19 nt, Homo sapiens
  misc_RNA (1)...(19): siRNA sense strand
ugaggacccuggaagugaa

SEQ ID NO: 2080165 - RNA, 19 nt, Homo sapiens
  misc_RNA (1)...(19): siRNA sense strand
aagguuacuucaaaucuug

SEQ ID NO: 2080166 - RNA, 19 nt, Homo sapiens
  misc_RNA (1)...(19): siRNA sense strand
gaucagagaaagcuuuuaa

SEQ ID NO: 2080167 - RNA, 19 nt, Homo sapiens
  misc_RNA (1)...(19): siRNA sense strand
gugaauauaaugcugaaga

SEQ ID NO: 2080168 - RNA, 19 nt, Homo sapiens
  misc_RNA (1)...(19): siRNA sense strand
gggcaaaguuuucgucaug

SEQ ID NO: 2080169 - RNA, 19 nt, Homo sapiens
  misc_RNA (1)...(19): siRNA sense strand
ccagaagaaacacuaaaug

SEQ ID NO: 2080170 - RNA, 19 nt, Homo sapiens
  misc_RNA (1)...(19): siRNA sense strand
cgucauggaaguucguaua

SEQ ID NO: 2080171 - RNA, 19 nt, Homo sapiens
  misc_RNA (1)...(19): siRNA sense strand
ccaucuaggcuaucauaaa

SEQ ID NO: 2080172 - RNA, 19 nt, Homo sapiens
  misc_RNA (1)...(19): siRNA sense strand
aagaagcacaguaaugaaa

SEQ ID NO: 2080173 - RNA, 19 nt, Homo sapiens
  misc_RNA (1)...(19): siRNA sense strand
aaagucaucaccagaagaa

SEQ ID NO: 2080174 - RNA, 19 nt, Homo sapiens
  misc_RNA (1)...(19): siRNA sense strand
ugaaacgucauauagaaug

SEQ ID NO: 2080175 - RNA, 19 nt, Homo sapiens
  misc_RNA (1)...(19): siRNA sense strand
gaccacacuuggaggaaca

SEQ ID NO: 2080176 - RNA, 19 nt, Homo sapiens
  misc_RNA (1)...(19): siRNA sense strand
caaagucuaaccuaacugu

SEQ ID NO: 2080177 - RNA, 19 nt, Homo sapiens
  misc_RNA (1)...(19): siRNA sense strand
gaugucagaugaguacucu

SEQ ID NO: 2080178 - RNA, 19 nt, Homo sapiens
  misc_RNA (1)...(19): siRNA sense strand
gaggagaaagguuacuuca

SEQ ID NO: 2080179 - RNA, 19 nt, Homo sapiens
  misc_RNA (1)...(19): siRNA sense strand
ccagaucagagaaagcuuu

SEQ ID NO: 2080180 - RNA, 19 nt, Homo sapiens
  misc_RNA (1)...(19): siRNA sense strand
gucaugaucaccuuacaaa

SEQ ID NO: 2080181 - RNA, 19 nt, Homo sapiens
  misc_RNA (1)...(19): siRNA sense strand
ugagaagcccuuugagugu

SEQ ID NO: 2080182 - RNA, 19 nt, Homo sapiens
  misc_RNA (1)...(19): siRNA sense strand
gcaguguccuaaaugugau

SEQ ID NO: 2080183 - RNA, 19 nt, Homo sapiens
  misc_RNA (1)...(19): siRNA sense strand
gagaaucauuuggcuaaaa

SEQ ID NO: 2080184 - RNA, 19 nt, Homo sapiens
  misc_RNA (1)...(19): siRNA sense strand
gaaaagucaucaccagaag

SEQ ID NO: 2080185 - RNA, 19 nt, Homo sapiens
  misc_RNA (1)...(19): siRNA sense strand
uuuagaggcugcaaaauuu

SEQ ID NO: 2080186 - RNA, 19 nt, Homo sapiens
  misc_RNA (1)...(19): siRNA sense strand
gcuugaauuucuuuacaca

SEQ ID NO: 2080187 - RNA, 19 nt, Homo sapiens
  misc_RNA (1)...(19): siRNA sense strand
guacgagaaagaacuacuu

SEQ ID NO: 2080188 - RNA, 19 nt, Homo sapiens
  misc_RNA (1)...(19): siRNA sense strand
aaauggacuugcuuuaucu

SEQ ID NO: 2080189 - RNA, 19 nt, Homo sapiens
  misc_RNA (1)...(19): siRNA sense strand
ggaaaagucagauagaaau

SEQ ID NO: 2080190 - RNA, 19 nt, Homo sapiens
  misc_RNA (1)...(19): siRNA sense strand
aaucaucagugcaaauucu

SEQ ID NO: 2080191 - RNA, 19 nt, Homo sapiens
  misc_RNA (1)...(19): siRNA sense strand
uaacuggaagacuaucaaa

SEQ ID NO: 2080192 - RNA, 19 nt, Homo sapiens
  misc_RNA (1)...(19): siRNA sense strand
ucuaggcuaucauaaagau

SEQ ID NO: 2080193 - RNA, 19 nt, Homo sapiens
  misc_RNA (1)...(19): siRNA sense strand
uuaaguguaccuauuguga

SEQ ID NO: 2080194 - RNA, 19 nt, Homo sapiens
  misc_RNA (1)...(19): siRNA sense strand
gcagugaaguuguuaaaua

SEQ ID NO: 2080195 - RNA, 19 nt, Homo sapiens
  misc_RNA (1)...(19): siRNA sense strand
gaauguaucugcugaagua

SEQ ID NO: 2080196 - RNA, 19 nt, Homo sapiens
  misc_RNA (1)...(19): siRNA sense strand
ggagaaagguuacuucaaa

SEQ ID NO: 2080197 - RNA, 19 nt, Homo sapiens
  misc_RNA (1)...(19): siRNA sense strand
gaagugcccuguuaaguuu

SEQ ID NO: 2080198 - RNA, 19 nt, Homo sapiens
  misc_RNA (1)...(19): siRNA sense strand
ggaaagacaagcugaaaua

SEQ ID NO: 2080199 - RNA, 19 nt, Homo sapiens
  misc_RNA (1)...(19): siRNA sense strand
gaaagaagcacaguaauga

SEQ ID NO: 2080200 - RNA, 19 nt, Homo sapiens
  misc_RNA (1)...(19): siRNA sense strand
ugaauuaacuggaagacua

SEQ ID NO: 2080201 - RNA, 19 nt, Homo sapiens
  misc_RNA (1)...(19): siRNA sense strand
uaacgacacuggaaauuug

SEQ ID NO: 2080202 - RNA, 19 nt, Homo sapiens
  misc_RNA (1)...(19): siRNA sense strand
caagugaccuauacucauu

SEQ ID NO: 2080203 - RNA, 19 nt, Homo sapiens
  misc_RNA (1)...(19): siRNA sense strand
ggaagacuaucaaauaauc

SEQ ID NO: 2080204 - RNA, 19 nt, Homo sapiens
  misc_RNA (1)...(19): siRNA sense strand
gaaagaacauuugagaauc

SEQ ID NO: 2080205 - RNA, 19 nt, Homo sapiens
  misc_RNA (1)...(19): siRNA sense strand
ugaaguauguguuccagua

SEQ ID NO: 2080206 - RNA, 19 nt, Homo sapiens
  misc_RNA (1)...(19): siRNA sense strand
gcacaguaaugaaacagaa

SEQ ID NO: 2080207 - RNA, 19 nt, Homo sapiens
  misc_RNA (1)...(19): siRNA sense strand
gaacaaaugcuagauccua

SEQ ID NO: 2080208 - RNA, 19 nt, Homo sapiens
  misc_RNA (1)...(19): siRNA sense strand
ccauacaagugucaaauuu

SEQ ID NO: 2080209 - RNA, 19 nt, Homo sapiens
  misc_RNA (1)...(19): siRNA sense strand
gaacauuacugggccuuga

SEQ ID NO: 2080210 - RNA, 19 nt, Homo sapiens
  misc_RNA (1)...(19): siRNA sense strand
ggaagugcccuguuaaguu

SEQ ID NO: 2080211 - RNA, 19 nt, Homo sapiens
  misc_RNA (1)...(19): siRNA sense strand
ccaagacgauguuacagaa

SEQ ID NO: 2080212 - RNA, 19 nt, Homo sapiens
  misc_RNA (1)...(19): siRNA sense strand
ccaagcauguuaagagauu

SEQ ID NO: 2080213 - RNA, 19 nt, Homo sapiens
  misc_RNA (1)...(19): siRNA sense strand
gaaauaaaaucuccugaug

SEQ ID NO: 2080214 - RNA, 19 nt, Homo sapiens
  misc_RNA (1)...(19): siRNA sense strand
aaucggaagugcccuguua

SEQ ID NO: 2080215 - RNA, 19 nt, Homo sapiens
  misc_RNA (1)...(19): siRNA sense strand
ucaacaaagucuaaccuaa

SEQ ID NO: 2080216 - RNA, 19 nt, Homo sapiens
  misc_RNA (1)...(19): siRNA sense strand
gaacaaucuuaucuuggaa

SEQ ID NO: 2080217 - RNA, 19 nt, Homo sapiens
  misc_RNA (1)...(19): siRNA sense strand
gcacaagaauuuauuucca

SEQ ID NO: 2080218 - RNA, 19 nt, Homo sapiens
  misc_RNA (1)...(19): siRNA sense strand
gagaaagguuacuucaaau

SEQ ID NO: 2080219 - RNA, 19 nt, Homo sapiens
  misc_RNA (1)...(19): siRNA sense strand
gaaaguuggaaaugugaua

SEQ ID NO: 2080220 - RNA, 19 nt, Homo sapiens
  misc_RNA (1)...(19): siRNA sense strand
caagugcccuuauuguaau

SEQ ID NO: 2080221 - RNA, 19 nt, Homo sapiens
  misc_RNA (1)...(19): siRNA sense strand
caaaucaagucuggaaaug

SEQ ID NO: 2080222 - RNA, 19 nt, Homo sapiens
  misc_RNA (1)...(19): siRNA sense strand
caaauaaucaucagugcaa

SEQ ID NO: 2080223 - RNA, 19 nt, Homo sapiens
  misc_RNA (1)...(19): siRNA sense strand
aaauauaguucacccaguu

SEQ ID NO: 2080224 - RNA, 19 nt, Homo sapiens
  misc_RNA (1)...(19): siRNA sense strand
ggauuuagcuuuucuggaa

SEQ ID NO: 2080225 - RNA, 19 nt, Homo sapiens
  misc_RNA (1)...(19): siRNA sense strand
gaaacgucauauagaaugu

SEQ ID NO: 2080226 - RNA, 19 nt, Homo sapiens
  misc_RNA (1)...(19): siRNA sense strand
agagaacaaucuuaucuug

SEQ ID NO: 2080227 - RNA, 19 nt, Homo sapiens
  misc_RNA (1)...(19): siRNA sense strand
cagaagaaacacuaaauga

SEQ ID NO: 2080228 - RNA, 19 nt, Homo sapiens
  misc_RNA (1)...(19): siRNA sense strand
ggaggaacauaugauucua

SEQ ID NO: 2080229 - RNA, 19 nt, Homo sapiens
  misc_RNA (1)...(19): siRNA sense strand
ugaguacucugacauugaa

SEQ ID NO: 2080230 - RNA, 19 nt, Homo sapiens
  misc_RNA (1)...(19): siRNA sense strand
caucuaggcuaucauaaag

SEQ ID NO: 2080231 - RNA, 19 nt, Homo sapiens
  misc_RNA (1)...(19): siRNA sense strand
cuggaagacuaucaaauaa

SEQ ID NO: 2080232 - RNA, 19 nt, Homo sapiens
  misc_RNA (1)...(19): siRNA sense strand
agaacaaucuuaucuugga

SEQ ID NO: 2080233 - RNA, 19 nt, Homo sapiens
  misc_RNA (1)...(19): siRNA sense strand
gagcagcggauuuagcuuu

SEQ ID NO: 2080234 - RNA, 19 nt, Homo sapiens
  misc_RNA (1)...(19): siRNA sense strand
caaaacaccugguuauuca

SEQ ID NO: 2080235 - RNA, 19 nt, Homo sapiens
  misc_RNA (1)...(19): siRNA sense strand
aagaagaggagaaagguua

SEQ ID NO: 2080236 - RNA, 19 nt, Homo sapiens
  misc_RNA (1)...(19): siRNA sense strand
gggaucaucucacuguuca

SEQ ID NO: 2080237 - RNA, 19 nt, Homo sapiens
  misc_RNA (1)...(19): siRNA sense strand
gaugaguacucugacauug

SEQ ID NO: 2080238 - RNA, 19 nt, Homo sapiens
  misc_RNA (1)...(19): siRNA sense strand
gaagcacaguaaugaaaca

SEQ ID NO: 2080239 - RNA, 19 nt, Homo sapiens
  misc_RNA (1)...(19): siRNA sense strand
ggagagaaaguguggcaaa

SEQ ID NO: 2080240 - RNA, 19 nt, Homo sapiens
  misc_RNA (1)...(19): siRNA sense strand
cauauagaauguacucaug

SEQ ID NO: 2080241 - RNA, 19 nt, Homo sapiens
  misc_RNA (1)...(19): siRNA sense strand
ggaaauuugaaacgucaua

SEQ ID NO: 2080242 - RNA, 19 nt, Homo sapiens
  misc_RNA (1)...(19): siRNA sense strand
uuaagaagacuaagaguga

SEQ ID NO: 2080243 - RNA, 19 nt, Homo sapiens
  misc_RNA (1)...(19): siRNA sense strand
ggugaugggucagacaauu

SEQ ID NO: 2080244 - RNA, 19 nt, Homo sapiens
  misc_RNA (1)...(19): siRNA sense strand
gcaaaucaagucuggaaau

SEQ ID NO: 2080245 - RNA, 19 nt, Homo sapiens
  misc_RNA (1)...(19): siRNA sense strand
acagaaagaagcacaguaa

SEQ ID NO: 2080246 - RNA, 19 nt, Homo sapiens
  misc_RNA (1)...(19): siRNA sense strand
caccagcgcuauucaacaa

SEQ ID NO: 2080247 - RNA, 19 nt, Homo sapiens
  misc_RNA (1)...(19): siRNA sense strand
ggucagacaauuugaauca

SEQ ID NO: 2080248 - RNA, 19 nt, Homo sapiens
  misc_RNA (1)...(19): siRNA sense strand
agagaaagcuuuuaaguuc

SEQ ID NO: 2080249 - RNA, 19 nt, Homo sapiens
  misc_RNA (1)...(19): siRNA sense strand
gaaguauguguuccaguaa

SEQ ID NO: 2080250 - RNA, 19 nt, Homo sapiens
  misc_RNA (1)...(19): siRNA sense strand
ccucaccuuuguaguauuu

SEQ ID NO: 2080251 - RNA, 19 nt, Homo sapiens
  misc_RNA (1)...(19): siRNA sense strand
uauauguggucgccaguuu

SEQ ID NO: 2080252 - RNA, 19 nt, Homo sapiens
  misc_RNA (1)...(19): siRNA sense strand
aggaggagaugucagauga

SEQ ID NO: 2080253 - RNA, 19 nt, Homo sapiens
  misc_RNA (1)...(19): siRNA sense strand
cauuauagaugcagugaag

SEQ ID NO: 2080254 - RNA, 19 nt, Homo sapiens
  misc_RNA (1)...(19): siRNA sense strand
gaaagguuacuucaaaucu

SEQ ID NO: 2080255 - RNA, 19 nt, Homo sapiens
  misc_RNA (1)...(19): siRNA sense strand
guauagacuucacuuacga

SEQ ID NO: 2080256 - RNA, 19 nt, Homo sapiens
  misc_RNA (1)...(19): siRNA sense strand
cagugcaaauucuguagua

SEQ ID NO: 2080257 - RNA, 19 nt, Homo sapiens
  misc_RNA (1)...(19): siRNA sense strand
aaacauuuauccgucauga

SEQ ID NO: 2080258 - RNA, 19 nt, Homo sapiens
  misc_RNA (1)...(19): siRNA sense strand
gaucaucucacuguucauu

SEQ ID NO: 2080259 - RNA, 19 nt, Homo sapiens
  misc_RNA (1)...(19): siRNA sense strand
acuggaagacuaucaaaua

SEQ ID NO: 2080260 - RNA, 19 nt, Homo sapiens
  misc_RNA (1)...(19): siRNA sense strand
uagagaaucauuuggcuaa

SEQ ID NO: 2080261 - RNA, 19 nt, Homo sapiens
  misc_RNA (1)...(19): siRNA sense strand
ggcagaagcaaccaucuuu

SEQ ID NO: 2080262 - RNA, 19 nt, Homo sapiens
  misc_RNA (1)...(19): siRNA sense strand
gauucuacauucucaagau

SEQ ID NO: 2080263 - RNA, 19 nt, Homo sapiens
  misc_RNA (1)...(19): siRNA sense strand
gagugaaaguuggaaaugu

SEQ ID NO: 2080264 - RNA, 19 nt, Homo sapiens
  misc_RNA (1)...(19): siRNA sense strand
agacuaagagugaaaguug

SEQ ID NO: 2080265 - RNA, 19 nt, Homo sapiens
  misc_RNA (1)...(19): siRNA sense strand
uaacuccaguggucauuca

SEQ ID NO: 2080266 - RNA, 19 nt, Homo sapiens
  misc_RNA (1)...(19): siRNA sense strand
ucacguaacacauucaguu

SEQ ID NO: 2080267 - RNA, 19 nt, Homo sapiens
  misc_RNA (1)...(19): siRNA sense strand
gaauuaacuggaagacuau

SEQ ID NO: 2080268 - RNA, 19 nt, Homo sapiens
  misc_RNA (1)...(19): siRNA sense strand
ugucagcacuguaaugcaa

SEQ ID NO: 2080269 - RNA, 19 nt, Homo sapiens
  misc_RNA (1)...(19): siRNA sense strand
gauaugagugcgaugaaug

SEQ ID NO: 2080270 - RNA, 19 nt, Homo sapiens
  misc_RNA (1)...(19): siRNA sense strand
agacuucacuuacgaguac

SEQ ID NO: 2080271 - RNA, 19 nt, Homo sapiens
  misc_RNA (1)...(19): siRNA sense strand
uaagaagacuaagagugaa

SEQ ID NO: 2080272 - RNA, 19 nt, Homo sapiens
  misc_RNA (1)...(19): siRNA sense strand
gcuauucaacaaagucuaa

SEQ ID NO: 2080273 - RNA, 19 nt, Homo sapiens
  misc_RNA (1)...(19): siRNA sense strand
gaggagaugucagaugagu

SEQ ID NO: 2080274 - RNA, 19 nt, Homo sapiens
  misc_RNA (1)...(19): siRNA sense strand
ugaagaagaugagcuagag

SEQ ID NO: 2080275 - RNA, 19 nt, Homo sapiens
  misc_RNA (1)...(19): siRNA sense strand
caaauucuguaguagacau

SEQ ID NO: 2080276 - RNA, 19 nt, Homo sapiens
  misc_RNA (1)...(19): siRNA sense strand
aagcugaaauaccacauug

SEQ ID NO: 2080277 - RNA, 19 nt, Homo sapiens
  misc_RNA (1)...(19): siRNA sense strand
gcucaucagugugaagaau

SEQ ID NO: 2080278 - RNA, 19 nt, Homo sapiens
  misc_RNA (1)...(19): siRNA sense strand
gcauuugcuugaauuucuu

SEQ ID NO: 2080279 - RNA, 19 nt, Homo sapiens
  misc_RNA (1)...(19): siRNA sense strand
gaagaagaggagaaagguu

SEQ ID NO: 2080280 - RNA, 19 nt, Homo sapiens
  misc_RNA (1)...(19): siRNA sense strand
ggaccagcccaaaguuuau

SEQ ID NO: 2080281 - RNA, 19 nt, Homo sapiens
  misc_RNA (1)...(19): siRNA sense strand
caacaaagucuaaccuaac

SEQ ID NO: 2080282 - RNA, 19 nt, Homo sapiens
  misc_RNA (1)...(19): siRNA sense strand
gaacaggaaaguggugaug

SEQ ID NO: 2080283 - RNA, 19 nt, Homo sapiens
  misc_RNA (1)...(19): siRNA sense strand
uagaugcagugaaguuguu

SEQ ID NO: 2080284 - RNA, 19 nt, Homo sapiens
  misc_RNA (1)...(19): siRNA sense strand
aagacaagcugaaauacca

SEQ ID NO: 2080285 - RNA, 19 nt, Homo sapiens
  misc_RNA (1)...(19): siRNA sense strand
gaaaauggacuugcuuuau

SEQ ID NO: 2080286 - RNA, 19 nt, Homo sapiens
  misc_RNA (1)...(19): siRNA sense strand
agaaagaagcacaguaaug

SEQ ID NO: 2080287 - RNA, 19 nt, Homo sapiens
  misc_RNA (1)...(19): siRNA sense strand
ggagaugucagaugaguac

SEQ ID NO: 2080288 - RNA, 19 nt, Homo sapiens
  misc_RNA (1)...(19): siRNA sense strand
cagcgaugaugaacaggaa

SEQ ID NO: 2080289 - RNA, 19 nt, Homo sapiens
  misc_RNA (1)...(19): siRNA sense strand
ccauaggucccuuuuauua

SEQ ID NO: 2080290 - RNA, 19 nt, Homo sapiens
  misc_RNA (1)...(19): siRNA sense strand
ugaggacccuggaagugaa

SEQ ID NO: 2080291 - RNA, 19 nt, Homo sapiens
  misc_RNA (1)...(19): siRNA sense strand
aaucaagucuggaaaugca

SEQ ID NO: 2080292 - RNA, 19 nt, Homo sapiens
  misc_RNA (1)...(19): siRNA sense strand
gacaaaaucuuucaaacag

SEQ ID NO: 2080293 - RNA, 19 nt, Homo sapiens
  misc_RNA (1)...(19): siRNA sense strand
aagguuacuucaaaucuug

SEQ ID NO: 2080294 - RNA, 19 nt, Homo sapiens
  misc_RNA (1)...(19): siRNA sense strand
gaccaaagcucuacaaaga

SEQ ID NO: 2080295 - RNA, 19 nt, Homo sapiens
  misc_RNA (1)...(19): siRNA sense strand
ccacagaucugcccuauga

SEQ ID NO: 2080296 - RNA, 19 nt, Homo sapiens
  misc_RNA (1)...(19): siRNA sense strand
gaaagaacaucacacaguu

SEQ ID NO: 2080297 - RNA, 19 nt, Homo sapiens
  misc_RNA (1)...(19): siRNA sense strand
ggaaacaacugaaacuaau

SEQ ID NO: 2080298 - RNA, 19 nt, Homo sapiens
  misc_RNA (1)...(19): siRNA sense strand
gaacaacagucauguaucu

SEQ ID NO: 2080299 - RNA, 19 nt, Homo sapiens
  misc_RNA (1)...(19): siRNA sense strand
ggaaggagcuacauuuaca

SEQ ID NO: 2080300 - RNA, 19 nt, Homo sapiens
  misc_RNA (1)...(19): siRNA sense strand
ucacagagaucauauugaa

SEQ ID NO: 2080301 - RNA, 19 nt, Homo sapiens
  misc_RNA (1)...(19): siRNA sense strand
gcaagucacuggcagauau

SEQ ID NO: 2080302 - RNA, 19 nt, Homo sapiens
  misc_RNA (1)...(19): siRNA sense strand
gcuaauggcuucuuucuuc

SEQ ID NO: 2080303 - RNA, 19 nt, Homo sapiens
  misc_RNA (1)...(19): siRNA sense strand
guacagagauccacuccaa

SEQ ID NO: 2080304 - RNA, 19 nt, Homo sapiens
  misc_RNA (1)...(19): siRNA sense strand
ggaaucacucguucuauua

SEQ ID NO: 2080305 - RNA, 19 nt, Homo sapiens
  misc_RNA (1)...(19): siRNA sense strand
gcacgcagagaauuuauua

SEQ ID NO: 2080306 - RNA, 19 nt, Homo sapiens
  misc_RNA (1)...(19): siRNA sense strand
gaaauggucaguauagaaa

SEQ ID NO: 2080307 - RNA, 19 nt, Homo sapiens
  misc_RNA (1)...(19): siRNA sense strand
ggacauggcccaaagagaa

SEQ ID NO: 2080308 - RNA, 19 nt, Homo sapiens
  misc_RNA (1)...(19): siRNA sense strand
acaaggagcugaaccugua

SEQ ID NO: 2080309 - RNA, 19 nt, Homo sapiens
  misc_RNA (1)...(19): siRNA sense strand
gaagaaagaagaugagaga

SEQ ID NO: 2080310 - RNA, 19 nt, Homo sapiens
  misc_RNA (1)...(19): siRNA sense strand
ggaagaacgucagaagaaa

SEQ ID NO: 2080311 - RNA, 19 nt, Homo sapiens
  misc_RNA (1)...(19): siRNA sense strand
caugauggcuuauacugua

SEQ ID NO: 2080312 - RNA, 19 nt, Homo sapiens
  misc_RNA (1)...(19): siRNA sense strand
gaagauauggauacaguaa

SEQ ID NO: 2080313 - RNA, 19 nt, Homo sapiens
  misc_RNA (1)...(19): siRNA sense strand
guugagagauuauacugua

SEQ ID NO: 2080314 - RNA, 19 nt, Homo sapiens
  misc_RNA (1)...(19): siRNA sense strand
gaaaucagaugccaacaac

SEQ ID NO: 2080315 - RNA, 19 nt, Homo sapiens
  misc_RNA (1)...(19): siRNA sense strand
gagaaugcaucaacaacuu

SEQ ID NO: 2080316 - RNA, 19 nt, Homo sapiens
  misc_RNA (1)...(19): siRNA sense strand
gaaaguaugcuguggauuc

SEQ ID NO: 2080317 - RNA, 19 nt, Homo sapiens
  misc_RNA (1)...(19): siRNA sense strand
ggagaauccucaagccaaa

SEQ ID NO: 2080318 - RNA, 19 nt, Homo sapiens
  misc_RNA (1)...(19): siRNA sense strand
aagcagaaauggagcauaa

SEQ ID NO: 2080319 - RNA, 19 nt, Homo sapiens
  misc_RNA (1)...(19): siRNA sense strand
ccacaacccucuccacaga

SEQ ID NO: 2080320 - RNA, 19 nt, Homo sapiens
  misc_RNA (1)...(19): siRNA sense strand
uagcugcccuuauucauuu

SEQ ID NO: 2080321 - RNA, 19 nt, Homo sapiens
  misc_RNA (1)...(19): siRNA sense strand
caacagucauguaucuaaa

SEQ ID NO: 2080322 - RNA, 19 nt, Homo sapiens
  misc_RNA (1)...(19): siRNA sense strand
gaaccaguguugccauuuc

SEQ ID NO: 2080323 - RNA, 19 nt, Homo sapiens
  misc_RNA (1)...(19): siRNA sense strand
agaaacagauucgagauuu

SEQ ID NO: 2080324 - RNA, 19 nt, Homo sapiens
  misc_RNA (1)...(19): siRNA sense strand
gaauauaccaaauccauug

SEQ ID NO: 2080325 - RNA, 19 nt, Homo sapiens
  misc_RNA (1)...(19): siRNA sense strand
ggauagccuuccucgguua

SEQ ID NO: 2080326 - RNA, 19 nt, Homo sapiens
  misc_RNA (1)...(19): siRNA sense strand
agaaagacguucauuguuc

SEQ ID NO: 2080327 - RNA, 19 nt, Homo sapiens
  misc_RNA (1)...(19): siRNA sense strand
caaaccaccuguuguuaau

SEQ ID NO: 2080328 - RNA, 19 nt, Homo sapiens
  misc_RNA (1)...(19): siRNA sense strand
gaagauauuccugaaacua

SEQ ID NO: 2080329 - RNA, 19 nt, Homo sapiens
  misc_RNA (1)...(19): siRNA sense strand
acagugaccucaaaucuug

SEQ ID NO: 2080330 - RNA, 19 nt, Homo sapiens
  misc_RNA (1)...(19): siRNA sense strand
gcugauagccuguauaauc

SEQ ID NO: 2080331 - RNA, 19 nt, Homo sapiens
  misc_RNA (1)...(19): siRNA sense strand
gaauucacguuccuucaga

SEQ ID NO: 2080332 - RNA, 19 nt, Homo sapiens
  misc_RNA (1)...(19): siRNA sense strand
gaaacgggcagcuuuguug

SEQ ID NO: 2080333 - RNA, 19 nt, Homo sapiens
  misc_RNA (1)...(19): siRNA sense strand
gaucugcccuaugauauug

SEQ ID NO: 2080334 - RNA, 19 nt, Homo sapiens
  misc_RNA (1)...(19): siRNA sense strand
gaauacuucuugacgaguu

SEQ ID NO: 2080335 - RNA, 19 nt, Homo sapiens
  misc_RNA (1)...(19): siRNA sense strand
gucauguacuggauaaaua

SEQ ID NO: 2080336 - RNA, 19 nt, Homo sapiens
  misc_RNA (1)...(19): siRNA sense strand
gggcacaaauuccagaaga

SEQ ID NO: 2080337 - RNA, 19 nt, Homo sapiens
  misc_RNA (1)...(19): siRNA sense strand
gccaacaacuucuuaaucu

SEQ ID NO: 2080338 - RNA, 19 nt, Homo sapiens
  misc_RNA (1)...(19): siRNA sense strand
gaggauauuuguuugaaag

SEQ ID NO: 2080339 - RNA, 19 nt, Homo sapiens
  misc_RNA (1)...(19): siRNA sense strand
guucagaucuuuauacacu

SEQ ID NO: 2080340 - RNA, 19 nt, Homo sapiens
  misc_RNA (1)...(19): siRNA sense strand
uaacgagaguguacauuca

SEQ ID NO: 2080341 - RNA, 19 nt, Homo sapiens
  misc_RNA (1)...(19): siRNA sense strand
caaaugaggaccaauugaa

SEQ ID NO: 2080342 - RNA, 19 nt, Homo sapiens
  misc_RNA (1)...(19): siRNA sense strand
aaagaggcgugcuauagaa

SEQ ID NO: 2080343 - RNA, 19 nt, Homo sapiens
  misc_RNA (1)...(19): siRNA sense strand
gaacuuaauauuccucaug

SEQ ID NO: 2080344 - RNA, 19 nt, Homo sapiens
  misc_RNA (1)...(19): siRNA sense strand
gcacaaauuccagaagaaa

SEQ ID NO: 2080345 - RNA, 19 nt, Homo sapiens
  misc_RNA (1)...(19): siRNA sense strand
caacaacuucuuaaucuug

SEQ ID NO: 2080346 - RNA, 19 nt, Homo sapiens
  misc_RNA (1)...(19): siRNA sense strand
gaaguuucccucucagauu

SEQ ID NO: 2080347 - RNA, 19 nt, Homo sapiens
  misc_RNA (1)...(19): siRNA sense strand
ggacauaauccagaagaaa

SEQ ID NO: 2080348 - RNA, 19 nt, Homo sapiens
  misc_RNA (1)...(19): siRNA sense strand
caagucaaguuccuauuca

SEQ ID NO: 2080349 - RNA, 19 nt, Homo sapiens
  misc_RNA (1)...(19): siRNA sense strand
gcuaaagucuccaacuaca

SEQ ID NO: 2080350 - RNA, 19 nt, Homo sapiens
  misc_RNA (1)...(19): siRNA sense strand
caagaaacccauacagaug

SEQ ID NO: 2080351 - RNA, 19 nt, Homo sapiens
  misc_RNA (1)...(19): siRNA sense strand
gaacagcguggacauaauc

SEQ ID NO: 2080352 - RNA, 19 nt, Homo sapiens
  misc_RNA (1)...(19): siRNA sense strand
uuaaaggaauccaaaccua

SEQ ID NO: 2080353 - RNA, 19 nt, Homo sapiens
  misc_RNA (1)...(19): siRNA sense strand
ccaaauggagcuuuacaaa

SEQ ID NO: 2080354 - RNA, 19 nt, Homo sapiens
  misc_RNA (1)...(19): siRNA sense strand
ugcauuagcugcccuuauu

SEQ ID NO: 2080355 - RNA, 19 nt, Homo sapiens
  misc_RNA (1)...(19): siRNA sense strand
gagaaagacguucauuguu

SEQ ID NO: 2080356 - RNA, 19 nt, Homo sapiens
  misc_RNA (1)...(19): siRNA sense strand
ccaauaagcacauaauaca

SEQ ID NO: 2080357 - RNA, 19 nt, Homo sapiens
  misc_RNA (1)...(19): siRNA sense strand
gaagauaguguacagagau

SEQ ID NO: 2080358 - RNA, 19 nt, Homo sapiens
  misc_RNA (1)...(19): siRNA sense strand
uaaagaagauaguguacag

SEQ ID NO: 2080359 - RNA, 19 nt, Homo sapiens
  misc_RNA (1)...(19): siRNA sense strand
ugaaagacauaauggaaca

SEQ ID NO: 2080360 - RNA, 19 nt, Homo sapiens
  misc_RNA (1)...(19): siRNA sense strand
aaagauaugccuucaauuc

SEQ ID NO: 2080361 - RNA, 19 nt, Homo sapiens
  misc_RNA (1)...(19): siRNA sense strand
uggagaaagugauaaagaa

SEQ ID NO: 2080362 - RNA, 19 nt, Homo sapiens
  misc_RNA (1)...(19): siRNA sense strand
ggagcuacauuuacacagu

SEQ ID NO: 2080363 - RNA, 19 nt, Homo sapiens
  misc_RNA (1)...(19): siRNA sense strand
uaaaugaaggucagaagaa

SEQ ID NO: 2080364 - RNA, 19 nt, Homo sapiens
  misc_RNA (1)...(19): siRNA sense strand
ggaacagcguggacauaau

SEQ ID NO: 2080365 - RNA, 19 nt, Homo sapiens
  misc_RNA (1)...(19): siRNA sense strand
uaaaggaauccaaaccuaa

SEQ ID NO: 2080366 - RNA, 19 nt, Homo sapiens
  misc_RNA (1)...(19): siRNA sense strand
ggucuucaucuaugucuua

SEQ ID NO: 2080367 - RNA, 19 nt, Homo sapiens
  misc_RNA (1)...(19): siRNA sense strand
aaacucagcuccggaaaca

SEQ ID NO: 2080368 - RNA, 19 nt, Homo sapiens
  misc_RNA (1)...(19): siRNA sense strand
gauugaaguuucccucuca

SEQ ID NO: 2080369 - RNA, 19 nt, Homo sapiens
  misc_RNA (1)...(19): siRNA sense strand
cagaagaugagaaaguaua

SEQ ID NO: 2080370 - RNA, 19 nt, Homo sapiens
  misc_RNA (1)...(19): siRNA sense strand
uaauauuccucaugugguu

SEQ ID NO: 2080371 - RNA, 19 nt, Homo sapiens
  misc_RNA (1)...(19): siRNA sense strand
agaaggcucugaacuuaau

SEQ ID NO: 2080372 - RNA, 19 nt, Homo sapiens
  misc_RNA (1)...(19): siRNA sense strand
aacgagaucuccacaagaa

SEQ ID NO: 2080373 - RNA, 19 nt, Homo sapiens
  misc_RNA (1)...(19): siRNA sense strand
aaaugaaggucagaagaaa

SEQ ID NO: 2080374 - RNA, 19 nt, Homo sapiens
  misc_RNA (1)...(19): siRNA sense strand
gcagaaauggagcauaaga

SEQ ID NO: 2080375 - RNA, 19 nt, Homo sapiens
  misc_RNA (1)...(19): siRNA sense strand
caucagccauugcaccauu

SEQ ID NO: 2080376 - RNA, 19 nt, Homo sapiens
  misc_RNA (1)...(19): siRNA sense strand
uggcuaaagucuccaacua

SEQ ID NO: 2080377 - RNA, 19 nt, Homo sapiens
  misc_RNA (1)...(19): siRNA sense strand
gaaauggugcaucuuagga

SEQ ID NO: 2080378 - RNA, 19 nt, Homo sapiens
  misc_RNA (1)...(19): siRNA sense strand
gcucugaacuuaauauucc

SEQ ID NO: 2080379 - RNA, 19 nt, Homo sapiens
  misc_RNA (1)...(19): siRNA sense strand
gagauuauacuguaagcuu

SEQ ID NO: 2080380 - RNA, 19 nt, Homo sapiens
  misc_RNA (1)...(19): siRNA sense strand
gccaauaaauggagaagag

SEQ ID NO: 2080381 - RNA, 19 nt, Homo sapiens
  misc_RNA (1)...(19): siRNA sense strand
caucaucauuugccuucua

SEQ ID NO: 2080382 - RNA, 19 nt, Homo sapiens
  misc_RNA (1)...(19): siRNA sense strand
gaaaugucuuagauaguag

SEQ ID NO: 2080383 - RNA, 19 nt, Homo sapiens
  misc_RNA (1)...(19): siRNA sense strand
cagaagauauuccugaaac

SEQ ID NO: 2080384 - RNA, 19 nt, Homo sapiens
  misc_RNA (1)...(19): siRNA sense strand
gagaauuuauuaggcaaga

SEQ ID NO: 2080385 - RNA, 19 nt, Homo sapiens
  misc_RNA (1)...(19): siRNA sense strand
gaugggauaucuccucuac

SEQ ID NO: 2080386 - RNA, 19 nt, Homo sapiens
  misc_RNA (1)...(19): siRNA sense strand
gaacgagaucuccacaaga

SEQ ID NO: 2080387 - RNA, 19 nt, Homo sapiens
  misc_RNA (1)...(19): siRNA sense strand
caaaaucuauucacagaga

SEQ ID NO: 2080388 - RNA, 19 nt, Homo sapiens
  misc_RNA (1)...(19): siRNA sense strand
gaugaugaccagaaaguau

SEQ ID NO: 2080389 - RNA, 19 nt, Homo sapiens
  misc_RNA (1)...(19): siRNA sense strand
ucaaaccaccuguuguuaa

SEQ ID NO: 2080390 - RNA, 19 nt, Homo sapiens
  misc_RNA (1)...(19): siRNA sense strand
gcugucauguacuggauaa

SEQ ID NO: 2080391 - RNA, 19 nt, Homo sapiens
  misc_RNA (1)...(19): siRNA sense strand
guagaaauggucaguauag

SEQ ID NO: 2080392 - RNA, 19 nt, Homo sapiens
  misc_RNA (1)...(19): siRNA sense strand
acagaugagugcacauuug

SEQ ID NO: 2080393 - RNA, 19 nt, Homo sapiens
  misc_RNA (1)...(19): siRNA sense strand
cccagaaacugaagaaauc

SEQ ID NO: 2080394 - RNA, 19 nt, Homo sapiens
  misc_RNA (1)...(19): siRNA sense strand
gaccugaccuugcuuauca

SEQ ID NO: 2080395 - RNA, 19 nt, Homo sapiens
  misc_RNA (1)...(19): siRNA sense strand
gcugugauccucuuuguug

SEQ ID NO: 2080396 - RNA, 19 nt, Homo sapiens
  misc_RNA (1)...(19): siRNA sense strand
cagcugugauccucuuugu

SEQ ID NO: 2080397 - RNA, 19 nt, Homo sapiens
  misc_RNA (1)...(19): siRNA sense strand
gccaggagauuccaaugac

SEQ ID NO: 2080398 - RNA, 19 nt, Homo sapiens
  misc_RNA (1)...(19): siRNA sense strand
ggccaggagauuccaauga

SEQ ID NO: 2080399 - RNA, 19 nt, Homo sapiens
  misc_RNA (1)...(19): siRNA sense strand
cagcuccuccucccuauau

SEQ ID NO: 2080400 - RNA, 19 nt, Homo sapiens
  misc_RNA (1)...(19): siRNA sense strand
ccaggagauuccaaugaca

SEQ ID NO: 2080401 - RNA, 19 nt, Homo sapiens
  misc_RNA (1)...(19): siRNA sense strand
ggcaucgccucagcuguga

SEQ ID NO: 2080402 - RNA, 19 nt, Homo sapiens
  misc_RNA (1)...(19): siRNA sense strand
gcgaggacugccuguggua

SEQ ID NO: 2080403 - RNA, 19 nt, Homo sapiens
  misc_RNA (1)...(19): siRNA sense strand
gcagcuccuccucccuaua

SEQ ID NO: 2080404 - RNA, 19 nt, Homo sapiens
  misc_RNA (1)...(19): siRNA sense strand
ucaccgcaaucgcucuguu

SEQ ID NO: 2080405 - RNA, 19 nt, Homo sapiens
  misc_RNA (1)...(19): siRNA sense strand
ccucagcugugauccucuu

SEQ ID NO: 2080406 - RNA, 19 nt, Homo sapiens
  misc_RNA (1)...(19): siRNA sense strand
ggaccugaccuugcuuauc

SEQ ID NO: 2080407 - RNA, 19 nt, Homo sapiens
  misc_RNA (1)...(19): siRNA sense strand
ucaccgagaggcagcagaa

SEQ ID NO: 2080408 - RNA, 19 nt, Homo sapiens
  misc_RNA (1)...(19): siRNA sense strand
ccucuuuguugcugugguu

SEQ ID NO: 2080409 - RNA, 19 nt, Homo sapiens
  misc_RNA (1)...(19): siRNA sense strand
cuccagagcccauuugaag

SEQ ID NO: 2080410 - RNA, 19 nt, Homo sapiens
  misc_RNA (1)...(19): siRNA sense strand
caucugcugcuuccucugu

SEQ ID NO: 2080411 - RNA, 19 nt, Homo sapiens
  misc_RNA (1)...(19): siRNA sense strand
gagaagagcuccugugauu

SEQ ID NO: 2080412 - RNA, 19 nt, Homo sapiens
  misc_RNA (1)...(19): siRNA sense strand
gcacaggugucagaaauug

SEQ ID NO: 2080413 - RNA, 19 nt, Homo sapiens
  misc_RNA (1)...(19): siRNA sense strand
cacuagaccugaauuauaa

SEQ ID NO: 2080414 - RNA, 19 nt, Homo sapiens
  misc_RNA (1)...(19): siRNA sense strand
gaagaucggcauuccagua

SEQ ID NO: 2080415 - RNA, 19 nt, Homo sapiens
  misc_RNA (1)...(19): siRNA sense strand
ggaacugucucacaaucaa

SEQ ID NO: 2080416 - RNA, 19 nt, Homo sapiens
  misc_RNA (1)...(19): siRNA sense strand
acacuagaccugaauuaua

SEQ ID NO: 2080417 - RNA, 19 nt, Homo sapiens
  misc_RNA (1)...(19): siRNA sense strand
gaaaucggccuccaacaca

SEQ ID NO: 2080418 - RNA, 19 nt, Homo sapiens
  misc_RNA (1)...(19): siRNA sense strand
gaagagcuccugugauucu

SEQ ID NO: 2080419 - RNA, 19 nt, Homo sapiens
  misc_RNA (1)...(19): siRNA sense strand
ggaaccaucucucacacau

SEQ ID NO: 2080420 - RNA, 19 nt, Homo sapiens
  misc_RNA (1)...(19): siRNA sense strand
auaacaagcugcaggaguu

SEQ ID NO: 2080421 - RNA, 19 nt, Homo sapiens
  misc_RNA (1)...(19): siRNA sense strand
acaucaaacuguacuguga

SEQ ID NO: 2080422 - RNA, 19 nt, Homo sapiens
  misc_RNA (1)...(19): siRNA sense strand
aagcagagaaccacuauga

SEQ ID NO: 2080423 - RNA, 19 nt, Homo sapiens
  misc_RNA (1)...(19): siRNA sense strand
gaugaacuccuucuguuuc

SEQ ID NO: 2080424 - RNA, 19 nt, Homo sapiens
  misc_RNA (1)...(19): siRNA sense strand
gggcagccauuguguagag

SEQ ID NO: 2080425 - RNA, 19 nt, Homo sapiens
  misc_RNA (1)...(19): siRNA sense strand
acaaugcacucacggagau

SEQ ID NO: 2080426 - RNA, 19 nt, Homo sapiens
  misc_RNA (1)...(19): siRNA sense strand
ggaguuuccagaucucaaa

SEQ ID NO: 2080427 - RNA, 19 nt, Homo sapiens
  misc_RNA (1)...(19): siRNA sense strand
caucaaggccaucccagaa

SEQ ID NO: 2080428 - RNA, 19 nt, Homo sapiens
  misc_RNA (1)...(19): siRNA sense strand
cgacuacgcguuccagaau

SEQ ID NO: 2080429 - RNA, 19 nt, Homo sapiens
  misc_RNA (1)...(19): siRNA sense strand
gaacaaccucacagagcuu

SEQ ID NO: 2080430 - RNA, 19 nt, Homo sapiens
  misc_RNA (1)...(19): siRNA sense strand
ggagggcagccauugugua

SEQ ID NO: 2080431 - RNA, 19 nt, Homo sapiens
  misc_RNA (1)...(19): siRNA sense strand
gaugaugaacuccuucugu

SEQ ID NO: 2080432 - RNA, 19 nt, Homo sapiens
  misc_RNA (1)...(19): siRNA sense strand
ugucagaaauuggaggaaa

SEQ ID NO: 2080433 - RNA, 19 nt, Homo sapiens
  misc_RNA (1)...(19): siRNA sense strand
gaacugucucacaaucaaa

SEQ ID NO: 2080434 - RNA, 19 nt, Homo sapiens
  misc_RNA (1)...(19): siRNA sense strand
gugggaggcugaagaccuu

SEQ ID NO: 2080435 - RNA, 19 nt, Homo sapiens
  misc_RNA (1)...(19): siRNA sense strand
cugcacaggugucagaaau

SEQ ID NO: 2080436 - RNA, 19 nt, Homo sapiens
  misc_RNA (1)...(19): siRNA sense strand
cagacgggcuccucuacug

SEQ ID NO: 2080437 - RNA, 19 nt, Homo sapiens
  misc_RNA (1)...(19): siRNA sense strand
ggagauggaggacucaaag

SEQ ID NO: 2080438 - RNA, 19 nt, Homo sapiens
  misc_RNA (1)...(19): siRNA sense strand
ccaaggacaguuucccaaa

SEQ ID NO: 2080439 - RNA, 19 nt, Homo sapiens
  misc_RNA (1)...(19): siRNA sense strand
acaaucagcugggaggaau

SEQ ID NO: 2080440 - RNA, 19 nt, Homo sapiens
  misc_RNA (1)...(19): siRNA sense strand
ggaaaucggccuccaacac

SEQ ID NO: 2080441 - RNA, 19 nt, Homo sapiens
  misc_RNA (1)...(19): siRNA sense strand
agacacuagaccugaauua

SEQ ID NO: 2080442 - RNA, 19 nt, Homo sapiens
  misc_RNA (1)...(19): siRNA sense strand
caaggacaguuucccaaaa

SEQ ID NO: 2080443 - RNA, 19 nt, Homo sapiens
  misc_RNA (1)...(19): siRNA sense strand
gcaugaacaaccucacaga

SEQ ID NO: 2080444 - RNA, 19 nt, Homo sapiens
  misc_RNA (1)...(19): siRNA sense strand
gacacuagaccugaauuau

SEQ ID NO: 2080445 - RNA, 19 nt, Homo sapiens
  misc_RNA (1)...(19): siRNA sense strand
gagggcagccauuguguag

SEQ ID NO: 2080446 - RNA, 19 nt, Homo sapiens
  misc_RNA (1)...(19): siRNA sense strand
gacaagcagagaaccacua

SEQ ID NO: 2080447 - RNA, 19 nt, Homo sapiens
  misc_RNA (1)...(19): siRNA sense strand
uaccagugcugucccuaug

SEQ ID NO: 2080448 - RNA, 19 nt, Homo sapiens
  misc_RNA (1)...(19): siRNA sense strand
gucagaaauuggaggaaau

SEQ ID NO: 2080449 - RNA, 19 nt, Homo sapiens
  misc_RNA (1)...(19): siRNA sense strand
gauaacccaauccaguuug

SEQ ID NO: 2080450 - RNA, 19 nt, Homo sapiens
  misc_RNA (1)...(19): siRNA sense strand
augaugaacuccuucuguu

SEQ ID NO: 2080451 - RNA, 19 nt, Homo sapiens
  misc_RNA (1)...(19): siRNA sense strand
cugcaagcccuggaucuua

SEQ ID NO: 2080452 - RNA, 19 nt, Homo sapiens
  misc_RNA (1)...(19): siRNA sense strand
ccuaaacuccacacacuau

SEQ ID NO: 2080453 - RNA, 19 nt, Homo sapiens
  misc_RNA (1)...(19): siRNA sense strand
gcuacagacgauacacuuu

SEQ ID NO: 2080454 - RNA, 19 nt, Homo sapiens
  misc_RNA (1)...(19): siRNA sense strand
ggccggugccuacaucaaa

SEQ ID NO: 2080455 - RNA, 19 nt, Homo sapiens
  misc_RNA (1)...(19): siRNA sense strand
aaccgcaucugggaaauug

SEQ ID NO: 2080456 - RNA, 19 nt, Homo sapiens
  misc_RNA (1)...(19): siRNA sense strand
gccuuguggugcugcauuu

SEQ ID NO: 2080457 - RNA, 19 nt, Homo sapiens
  misc_RNA (1)...(19): siRNA sense strand
ugaugaacuccuucuguuu

SEQ ID NO: 2080458 - RNA, 19 nt, Homo sapiens
  misc_RNA (1)...(19): siRNA sense strand
ugaugcaucugaagcucaa

SEQ ID NO: 2080459 - RNA, 19 nt, Homo sapiens
  misc_RNA (1)...(19): siRNA sense strand
agaccugaauuauaacaag

SEQ ID NO: 2080460 - RNA, 19 nt, Homo sapiens
  misc_RNA (1)...(19): siRNA sense strand
ugauaacccaauccaguuu

SEQ ID NO: 2080461 - RNA, 19 nt, Homo sapiens
  misc_RNA (1)...(19): siRNA sense strand
acaaccagcugaccacacu

SEQ ID NO: 2080462 - RNA, 19 nt, Homo sapiens
  misc_RNA (1)...(19): siRNA sense strand
ggagacacuagaccugaau

SEQ ID NO: 2080463 - RNA, 19 nt, Homo sapiens
  misc_RNA (1)...(19): siRNA sense strand
uacagacgauacacuuuua

SEQ ID NO: 2080464 - RNA, 19 nt, Homo sapiens
  misc_RNA (1)...(19): siRNA sense strand
uccaguaccugccuaaacu

SEQ ID NO: 2080465 - RNA, 19 nt, Homo sapiens
  misc_RNA (1)...(19): siRNA sense strand
ugauguggaucucauucug

SEQ ID NO: 2080466 - RNA, 19 nt, Homo sapiens
  misc_RNA (1)...(19): siRNA sense strand
gaccuucaccuugaugaug

SEQ ID NO: 2080467 - RNA, 19 nt, Homo sapiens
  misc_RNA (1)...(19): siRNA sense strand
gaugugugccagcuucuuc

SEQ ID NO: 2080468 - RNA, 19 nt, Homo sapiens
  misc_RNA (1)...(19): siRNA sense strand
ccaggaggacggcaucaug

SEQ ID NO: 2080469 - RNA, 19 nt, Homo sapiens
  misc_RNA (1)...(19): siRNA sense strand
cacacacuaucucugaaug

SEQ ID NO: 2080470 - RNA, 19 nt, Homo sapiens
  misc_RNA (1)...(19): siRNA sense strand
aaaucggccuccaacacaa

SEQ ID NO: 2080471 - RNA, 19 nt, Homo sapiens
  misc_RNA (1)...(19): siRNA sense strand
ggucaaguuugugguaggu

SEQ ID NO: 2080472 - RNA, 19 nt, Homo sapiens
  misc_RNA (1)...(19): siRNA sense strand
ccaugacccuggcccucaa

SEQ ID NO: 2080473 - RNA, 19 nt, Homo sapiens
  misc_RNA (1)...(19): siRNA sense strand
gcuucagccuggccucuuc

SEQ ID NO: 2080474 - RNA, 19 nt, Homo sapiens
  misc_RNA (1)...(19): siRNA sense strand
cugguagccuucucugaug

SEQ ID NO: 2080475 - RNA, 19 nt, Homo sapiens
  misc_RNA (1)...(19): siRNA sense strand
ugcaagcccuggaucuuag

SEQ ID NO: 2080476 - RNA, 19 nt, Homo sapiens
  misc_RNA (1)...(19): siRNA sense strand
uggagacacuagaccugaa

SEQ ID NO: 2080477 - RNA, 19 nt, Homo sapiens
  misc_RNA (1)...(19): siRNA sense strand
ccgaggccgucaagucugu

SEQ ID NO: 2080478 - RNA, 19 nt, Homo sapiens
  misc_RNA (1)...(19): siRNA sense strand
ucgaugcccugaccuuugg

SEQ ID NO: 2080479 - RNA, 19 nt, Homo sapiens
  misc_RNA (1)...(19): siRNA sense strand
uaccuggaccucagcauga

SEQ ID NO: 2080480 - RNA, 19 nt, Homo sapiens
  misc_RNA (1)...(19): siRNA sense strand
ccacacacuaucucugaau

SEQ ID NO: 2080481 - RNA, 19 nt, Homo sapiens
  misc_RNA (1)...(19): siRNA sense strand
ucaaggccaucccagaaaa

SEQ ID NO: 2080482 - RNA, 19 nt, Homo sapiens
  misc_RNA (1)...(19): siRNA sense strand
cacaaccgcaucugggaaa

SEQ ID NO: 2080483 - RNA, 19 nt, Homo sapiens
  misc_RNA (1)...(19): siRNA sense strand
ugugaguaccucuuugaaa

SEQ ID NO: 2080484 - RNA, 19 nt, Homo sapiens
  misc_RNA (1)...(19): siRNA sense strand
caaccgcaucugggaaauu

SEQ ID NO: 2080485 - RNA, 19 nt, Homo sapiens
  misc_RNA (1)...(19): siRNA sense strand
gaaucucaccagccuugug

SEQ ID NO: 2080486 - RNA, 19 nt, Homo sapiens
  misc_RNA (1)...(19): siRNA sense strand
gcccugugaguaccucuuu

SEQ ID NO: 2080487 - RNA, 19 nt, Homo sapiens
  misc_RNA (1)...(19): siRNA sense strand
ugccuaaacuccacacacu

SEQ ID NO: 2080488 - RNA, 19 nt, Homo sapiens
  misc_RNA (1)...(19): siRNA sense strand
gaucggcauuccaguaccu

SEQ ID NO: 2080489 - RNA, 19 nt, Homo sapiens
  misc_RNA (1)...(19): siRNA sense strand
acacaucccaggacaagca

SEQ ID NO: 2080490 - RNA, 19 nt, Homo sapiens
  misc_RNA (1)...(19): siRNA sense strand
gagacacuagaccugaauu

SEQ ID NO: 2080491 - RNA, 19 nt, Homo sapiens
  misc_RNA (1)...(19): siRNA sense strand
ucacacaucccaggacaag

SEQ ID NO: 2080492 - RNA, 19 nt, Homo sapiens
  misc_RNA (1)...(19): siRNA sense strand
gaaccaucucucacacauc

SEQ ID NO: 2080493 - RNA, 19 nt, Homo sapiens
  misc_RNA (1)...(19): siRNA sense strand
gacuacgcguuccagaauc

SEQ ID NO: 2080494 - RNA, 19 nt, Homo sapiens
  misc_RNA (1)...(19): siRNA sense strand
uggcuuggccuuugcuuca

SEQ ID NO: 2080495 - RNA, 19 nt, Homo sapiens
  misc_RNA (1)...(19): siRNA sense strand
ccugguagccuucucugau

SEQ ID NO: 2080496 - RNA, 19 nt, Homo sapiens
  misc_RNA (1)...(19): siRNA sense strand
uggccucagugggagaaua

SEQ ID NO: 2080497 - RNA, 19 nt, Homo sapiens
  misc_RNA (1)...(19): siRNA sense strand
cauuuccuguggccuucua

SEQ ID NO: 2080498 - RNA, 19 nt, Homo sapiens
  misc_RNA (1)...(19): siRNA sense strand
acaagcagagaaccacuau

SEQ ID NO: 2080499 - RNA, 19 nt, Homo sapiens
  misc_RNA (1)...(19): siRNA sense strand
ggaacgccauccgguccau

SEQ ID NO: 2080500 - RNA, 19 nt, Homo sapiens
  misc_RNA (1)...(19): siRNA sense strand
gcacaaucuggagacacua

SEQ ID NO: 2080501 - RNA, 19 nt, Homo sapiens
  misc_RNA (1)...(19): siRNA sense strand
ucagggcccucaacaaccu

SEQ ID NO: 2080502 - RNA, 19 nt, Homo sapiens
  misc_RNA (1)...(19): siRNA sense strand
ucucugauguggaucucau

SEQ ID NO: 2080503 - RNA, 19 nt, Homo sapiens
  misc_RNA (1)...(19): siRNA sense strand
gaugaugaggagucuucaa

SEQ ID NO: 2080504 - RNA, 19 nt, Homo sapiens
  misc_RNA (1)...(19): siRNA sense strand
cuggaacugucucacaauc

SEQ ID NO: 2080505 - RNA, 19 nt, Homo sapiens
  misc_RNA (1)...(19): siRNA sense strand
ugaagaggcugaauuauga

SEQ ID NO: 2080506 - RNA, 19 nt, Homo sapiens
  misc_RNA (1)...(19): siRNA sense strand
ggaaggagcuggagaagag

SEQ ID NO: 2080507 - RNA, 19 nt, Homo sapiens
  misc_RNA (1)...(19): siRNA sense strand
gaagagaaccgagaggaua

SEQ ID NO: 2080508 - RNA, 19 nt, Homo sapiens
  misc_RNA (1)...(19): siRNA sense strand
gaaccagucuucaguaugg

SEQ ID NO: 2080509 - RNA, 19 nt, Homo sapiens
  misc_RNA (1)...(19): siRNA sense strand
agaaugagcuggccaacaa

SEQ ID NO: 2080510 - RNA, 19 nt, Homo sapiens
  misc_RNA (1)...(19): siRNA sense strand
ccaggaauuugccaccuua

SEQ ID NO: 2080511 - RNA, 19 nt, Homo sapiens
  misc_RNA (1)...(19): siRNA sense strand
gaggauaaagccaccauaa

SEQ ID NO: 2080512 - RNA, 19 nt, Homo sapiens
  misc_RNA (1)...(19): siRNA sense strand
gaacuucgaccacaacaca

SEQ ID NO: 2080513 - RNA, 19 nt, Homo sapiens
  misc_RNA (1)...(19): siRNA sense strand
gauggaaacucuggaaaca

SEQ ID NO: 2080514 - RNA, 19 nt, Homo sapiens
  misc_RNA (1)...(19): siRNA sense strand
gaucaaggauguguuaguc

SEQ ID NO: 2080515 - RNA, 19 nt, Homo sapiens
  misc_RNA (1)...(19): siRNA sense strand
ggaaagagaguucaauaac

SEQ ID NO: 2080516 - RNA, 19 nt, Homo sapiens
  misc_RNA (1)...(19): siRNA sense strand
gaaagagaguucaauaacc

SEQ ID NO: 2080517 - RNA, 19 nt, Homo sapiens
  misc_RNA (1)...(19): siRNA sense strand
caagaguggugccaucaug

SEQ ID NO: 2080518 - RNA, 19 nt, Homo sapiens
  misc_RNA (1)...(19): siRNA sense strand
uaacaacaaccgugacuga

SEQ ID NO: 2080519 - RNA, 19 nt, Homo sapiens
  misc_RNA (1)...(19): siRNA sense strand
gaggagagccagcaugaga

SEQ ID NO: 2080520 - RNA, 19 nt, Homo sapiens
  misc_RNA (1)...(19): siRNA sense strand
ggaaacaucuacuaaaaca

SEQ ID NO: 2080521 - RNA, 19 nt, Homo sapiens
  misc_RNA (1)...(19): siRNA sense strand
gcuaacagacuccgaauuc

SEQ ID NO: 2080522 - RNA, 19 nt, Homo sapiens
  misc_RNA (1)...(19): siRNA sense strand
gaagaugcccgcaggaaag

SEQ ID NO: 2080523 - RNA, 19 nt, Homo sapiens
  misc_RNA (1)...(19): siRNA sense strand
gaagcucacucccacuauc

SEQ ID NO: 2080524 - RNA, 19 nt, Homo sapiens
  misc_RNA (1)...(19): siRNA sense strand
gagaggagagccagcauga

SEQ ID NO: 2080525 - RNA, 19 nt, Homo sapiens
  misc_RNA (1)...(19): siRNA sense strand
caacaaccgugacugaacu

SEQ ID NO: 2080526 - RNA, 19 nt, Homo sapiens
  misc_RNA (1)...(19): siRNA sense strand
acaaggcccuggaugagaa

SEQ ID NO: 2080527 - RNA, 19 nt, Homo sapiens
  misc_RNA (1)...(19): siRNA sense strand
ugagaucaaggauguguua

SEQ ID NO: 2080528 - RNA, 19 nt, Homo sapiens
  misc_RNA (1)...(19): siRNA sense strand
uaagaaagcauaggaggaa

SEQ ID NO: 2080529 - RNA, 19 nt, Homo sapiens
  misc_RNA (1)...(19): siRNA sense strand
augacaagcuggagaauga

SEQ ID NO: 2080530 - RNA, 19 nt, Homo sapiens
  misc_RNA (1)...(19): siRNA sense strand
ggauaaagccaccauaaaa

SEQ ID NO: 2080531 - RNA, 19 nt, Homo sapiens
  misc_RNA (1)...(19): siRNA sense strand
gaacggucacugcggauga

SEQ ID NO: 2080532 - RNA, 19 nt, Homo sapiens
  misc_RNA (1)...(19): siRNA sense strand
ggaggaagagauaucagaa

SEQ ID NO: 2080533 - RNA, 19 nt, Homo sapiens
  misc_RNA (1)...(19): siRNA sense strand
gccaagugauggaaagaga

SEQ ID NO: 2080534 - RNA, 19 nt, Homo sapiens
  misc_RNA (1)...(19): siRNA sense strand
gaagaaacaccagcugcuu

SEQ ID NO: 2080535 - RNA, 19 nt, Homo sapiens
  misc_RNA (1)...(19): siRNA sense strand
ggucacccaugaagagaug

SEQ ID NO: 2080536 - RNA, 19 nt, Homo sapiens
  misc_RNA (1)...(19): siRNA sense strand
gcugaaggcccucaaguca

SEQ ID NO: 2080537 - RNA, 19 nt, Homo sapiens
  misc_RNA (1)...(19): siRNA sense strand
ggcaucaagucguccauug

SEQ ID NO: 2080538 - RNA, 19 nt, Homo sapiens
  misc_RNA (1)...(19): siRNA sense strand
gagauugagacgcguguaa

SEQ ID NO: 2080539 - RNA, 19 nt, Homo sapiens
  misc_RNA (1)...(19): siRNA sense strand
gaacggcauggcaacauug

SEQ ID NO: 2080540 - RNA, 19 nt, Homo sapiens
  misc_RNA (1)...(19): siRNA sense strand
cgaaacgccuguggaagga

SEQ ID NO: 2080541 - RNA, 19 nt, Homo sapiens
  misc_RNA (1)...(19): siRNA sense strand
uggaaacucuggaaacauc

SEQ ID NO: 2080542 - RNA, 19 nt, Homo sapiens
  misc_RNA (1)...(19): siRNA sense strand
ucaugacccugcccaguga

SEQ ID NO: 2080543 - RNA, 19 nt, Homo sapiens
  misc_RNA (1)...(19): siRNA sense strand
aaagagaguucaauaaccu

SEQ ID NO: 2080544 - RNA, 19 nt, Homo sapiens
  misc_RNA (1)...(19): siRNA sense strand
ggcaucaugugucugaaga

SEQ ID NO: 2080545 - RNA, 19 nt, Homo sapiens
  misc_RNA (1)...(19): siRNA sense strand
uggagaagcagaacuuuga

SEQ ID NO: 2080546 - RNA, 19 nt, Homo sapiens
  misc_RNA (1)...(19): siRNA sense strand
ugaaugaggaccacaacaa

SEQ ID NO: 2080547 - RNA, 19 nt, Homo sapiens
  misc_RNA (1)...(19): siRNA sense strand
ggacauggaagagcggauu

SEQ ID NO: 2080548 - RNA, 19 nt, Homo sapiens
  misc_RNA (1)...(19): siRNA sense strand
ccgccugucugaagagauu

SEQ ID NO: 2080549 - RNA, 19 nt, Homo sapiens
  misc_RNA (1)...(19): siRNA sense strand
ucgagcagcugauggugaa

SEQ ID NO: 2080550 - RNA, 19 nt, Homo sapiens
  misc_RNA (1)...(19): siRNA sense strand
ucaggaugauucaggaaga

SEQ ID NO: 2080551 - RNA, 19 nt, Homo sapiens
  misc_RNA (1)...(19): siRNA sense strand
gaaugaggaccacaacaag

SEQ ID NO: 2080552 - RNA, 19 nt, Homo sapiens
  misc_RNA (1)...(19): siRNA sense strand
gaaacucuggaaacaucua

SEQ ID NO: 2080553 - RNA, 19 nt, Homo sapiens
  misc_RNA (1)...(19): siRNA sense strand
ccacccaccuccaggacuu

SEQ ID NO: 2080554 - RNA, 19 nt, Homo sapiens
  misc_RNA (1)...(19): siRNA sense strand
gacccugcccagugacuua

SEQ ID NO: 2080555 - RNA, 19 nt, Homo sapiens
  misc_RNA (1)...(19): siRNA sense strand
gcccucaagucacuguuug

SEQ ID NO: 2080556 - RNA, 19 nt, Homo sapiens
  misc_RNA (1)...(19): siRNA sense strand
uggaaagagaguucaauaa

SEQ ID NO: 2080557 - RNA, 19 nt, Homo sapiens
  misc_RNA (1)...(19): siRNA sense strand
gagaucggcaucagcaaug

SEQ ID NO: 2080558 - RNA, 19 nt, Homo sapiens
  misc_RNA (1)...(19): siRNA sense strand
acacguugauccaggaguu

SEQ ID NO: 2080559 - RNA, 19 nt, Homo sapiens
  misc_RNA (1)...(19): siRNA sense strand
agggacagcuggaggagaa

SEQ ID NO: 2080560 - RNA, 19 nt, Homo sapiens
  misc_RNA (1)...(19): siRNA sense strand
gccgggaccucaucaaguc

SEQ ID NO: 2080561 - RNA, 19 nt, Homo sapiens
  misc_RNA (1)...(19): siRNA sense strand
uccaugaccucaaugacaa

SEQ ID NO: 2080562 - RNA, 19 nt, Homo sapiens
  misc_RNA (1)...(19): siRNA sense strand
gucugaagaggcugaauua

SEQ ID NO: 2080563 - RNA, 19 nt, Homo sapiens
  misc_RNA (1)...(19): siRNA sense strand
ugaagaugguggacagcuu

SEQ ID NO: 2080564 - RNA, 19 nt, Homo sapiens
  misc_RNA (1)...(19): siRNA sense strand
cuacuguggucuccugguu

SEQ ID NO: 2080565 - RNA, 19 nt, Homo sapiens
  misc_RNA (1)...(19): siRNA sense strand
ggaagagaaccgagaggau

SEQ ID NO: 2080566 - RNA, 19 nt, Homo sapiens
  misc_RNA (1)...(19): siRNA sense strand
agaaguugcuggagucucu

SEQ ID NO: 2080567 - RNA, 19 nt, Homo sapiens
  misc_RNA (1)...(19): siRNA sense strand
agaacggcauggcaacauu

SEQ ID NO: 2080568 - RNA, 19 nt, Homo sapiens
  misc_RNA (1)...(19): siRNA sense strand
ugaaggcccucaagucacu

SEQ ID NO: 2080569 - RNA, 19 nt, Homo sapiens
  misc_RNA (1)...(19): siRNA sense strand
agaguucaauaaccuguug

SEQ ID NO: 2080570 - RNA, 19 nt, Homo sapiens
  misc_RNA (1)...(19): siRNA sense strand
uucaggagauggugucauu

SEQ ID NO: 2080571 - RNA, 19 nt, Homo sapiens
  misc_RNA (1)...(19): siRNA sense strand
ggagaucggcaucagcaau

SEQ ID NO: 2080572 - RNA, 19 nt, Homo sapiens
  misc_RNA (1)...(19): siRNA sense strand
cugaagagauugagaagcu

SEQ ID NO: 2080573 - RNA, 19 nt, Homo sapiens
  misc_RNA (1)...(19): siRNA sense strand
gacauggaagagcggauua

SEQ ID NO: 2080574 - RNA, 19 nt, Homo sapiens
  misc_RNA (1)...(19): siRNA sense strand
ggauggagcggcagaagag

SEQ ID NO: 2080575 - RNA, 19 nt, Homo sapiens
  misc_RNA (1)...(19): siRNA sense strand
cugaagaggcugaauuaug

SEQ ID NO: 2080576 - RNA, 19 nt, Homo sapiens
  misc_RNA (1)...(19): siRNA sense strand
gagauggaaacucuggaaa

SEQ ID NO: 2080577 - RNA, 19 nt, Homo sapiens
  misc_RNA (1)...(19): siRNA sense strand
cacaggccauguucugcua

SEQ ID NO: 2080578 - RNA, 19 nt, Homo sapiens
  misc_RNA (1)...(19): siRNA sense strand
gagcgacuggucacccuaa

SEQ ID NO: 2080579 - RNA, 19 nt, Homo sapiens
  misc_RNA (1)...(19): siRNA sense strand
uggaccaccucaccaagaa

SEQ ID NO: 2080580 - RNA, 19 nt, Homo sapiens
  misc_RNA (1)...(19): siRNA sense strand
caggagauggugucauuga

SEQ ID NO: 2080581 - RNA, 19 nt, Homo sapiens
  misc_RNA (1)...(19): siRNA sense strand
ugaagaugcccgcaggaaa

SEQ ID NO: 2080582 - RNA, 19 nt, Homo sapiens
  misc_RNA (1)...(19): siRNA sense strand
gggaggaagagauaucaga

SEQ ID NO: 2080583 - RNA, 19 nt, Homo sapiens
  misc_RNA (1)...(19): siRNA sense strand
gcccugccuuugacaguga

SEQ ID NO: 2080584 - RNA, 19 nt, Homo sapiens
  misc_RNA (1)...(19): siRNA sense strand
gaagagcggauuacuacac

SEQ ID NO: 2080585 - RNA, 19 nt, Homo sapiens
  misc_RNA (1)...(19): siRNA sense strand
ccagaaggaggacauggaa

SEQ ID NO: 2080586 - RNA, 19 nt, Homo sapiens
  misc_RNA (1)...(19): siRNA sense strand
cgacuggucacccuaacaa

SEQ ID NO: 2080587 - RNA, 19 nt, Homo sapiens
  misc_RNA (1)...(19): siRNA sense strand
agaaggaggacauggaaga

SEQ ID NO: 2080588 - RNA, 19 nt, Homo sapiens
  misc_RNA (1)...(19): siRNA sense strand
ucgaaccagucuucaguau

SEQ ID NO: 2080589 - RNA, 19 nt, Homo sapiens
  misc_RNA (1)...(19): siRNA sense strand
agaaacaccagcugcuuga

SEQ ID NO: 2080590 - RNA, 19 nt, Homo sapiens
  misc_RNA (1)...(19): siRNA sense strand
ucaaugacaagcuggagaa

SEQ ID NO: 2080591 - RNA, 19 nt, Homo sapiens
  misc_RNA (1)...(19): siRNA sense strand
gcggaugacuguggugaag

SEQ ID NO: 2080592 - RNA, 19 nt, Homo sapiens
  misc_RNA (1)...(19): siRNA sense strand
agcaugagaucaaggaugu

SEQ ID NO: 2080593 - RNA, 19 nt, Homo sapiens
  misc_RNA (1)...(19): siRNA sense strand
aacaccagcugcuugaaga

SEQ ID NO: 2080594 - RNA, 19 nt, Homo sapiens
  misc_RNA (1)...(19): siRNA sense strand
ggacgcugcggcuagagaa

SEQ ID NO: 2080595 - RNA, 19 nt, Homo sapiens
  misc_RNA (1)...(19): siRNA sense strand
aagagaaccgagaggauaa

SEQ ID NO: 2080596 - RNA, 19 nt, Homo sapiens
  misc_RNA (1)...(19): siRNA sense strand
uggaagcccuaaaccugaa

SEQ ID NO: 2080597 - RNA, 19 nt, Homo sapiens
  misc_RNA (1)...(19): siRNA sense strand
uugagaagcugcgccaaga

SEQ ID NO: 2080598 - RNA, 19 nt, Homo sapiens
  misc_RNA (1)...(19): siRNA sense strand
gcucccagcggcagauuga

SEQ ID NO: 2080599 - RNA, 19 nt, Homo sapiens
  misc_RNA (1)...(19): siRNA sense strand
gaggagaagaacacguuga

SEQ ID NO: 2080600 - RNA, 19 nt, Homo sapiens
  misc_RNA (1)...(19): siRNA sense strand
uggcugcccuggaggagaa

SEQ ID NO: 2080601 - RNA, 19 nt, Homo sapiens
  misc_RNA (1)...(19): siRNA sense strand
gaagaacggcauggcaaca

SEQ ID NO: 2080602 - RNA, 19 nt, Homo sapiens
  misc_RNA (1)...(19): siRNA sense strand
ggacccaggcagagaagga

SEQ ID NO: 2080603 - RNA, 19 nt, Homo sapiens
  misc_RNA (1)...(19): siRNA sense strand
gcaugagaguggugugcau

SEQ ID NO: 2080604 - RNA, 19 nt, Homo sapiens
  misc_RNA (1)...(19): siRNA sense strand
gcucagacccuggccuaug

SEQ ID NO: 2080605 - RNA, 19 nt, Homo sapiens
  misc_RNA (1)...(19): siRNA sense strand
cagcagagcuccuacaaug

SEQ ID NO: 2080606 - RNA, 19 nt, Homo sapiens
  misc_RNA (1)...(19): siRNA sense strand
gagaaagccagcuguguaa

SEQ ID NO: 2080607 - RNA, 19 nt, Homo sapiens
  misc_RNA (1)...(19): siRNA sense strand
gcacuuuacucuguucuuc

SEQ ID NO: 2080608 - RNA, 19 nt, Homo sapiens
  misc_RNA (1)...(19): siRNA sense strand
cgagaaagccagcugugua

SEQ ID NO: 2080609 - RNA, 19 nt, Homo sapiens
  misc_RNA (1)...(19): siRNA sense strand
gcacaugauuagcccuuca

SEQ ID NO: 2080610 - RNA, 19 nt, Homo sapiens
  misc_RNA (1)...(19): siRNA sense strand
gauuagcccuucacccaau

SEQ ID NO: 2080611 - RNA, 19 nt, Homo sapiens
  misc_RNA (1)...(19): siRNA sense strand
ccacuucccaguuucagua

SEQ ID NO: 2080612 - RNA, 19 nt, Homo sapiens
  misc_RNA (1)...(19): siRNA sense strand
aaugugggcugccgagaaa

SEQ ID NO: 2080613 - RNA, 19 nt, Homo sapiens
  misc_RNA (1)...(19): siRNA sense strand
gaaagccagcuguguaauc

SEQ ID NO: 2080614 - RNA, 19 nt, Homo sapiens
  misc_RNA (1)...(19): siRNA sense strand
aucuaaaccucucugauua

SEQ ID NO: 2080615 - RNA, 19 nt, Homo sapiens
  misc_RNA (1)...(19): siRNA sense strand
gcaaccaacacuugugaug

SEQ ID NO: 2080616 - RNA, 19 nt, Homo sapiens
  misc_RNA (1)...(19): siRNA sense strand
agccagcuguguaaucuaa

SEQ ID NO: 2080617 - RNA, 19 nt, Homo sapiens
  misc_RNA (1)...(19): siRNA sense strand
cuaaaccucucugauuauc

SEQ ID NO: 2080618 - RNA, 19 nt, Homo sapiens
  misc_RNA (1)...(19): siRNA sense strand
caacaggcaaccaacacuu

SEQ ID NO: 2080619 - RNA, 19 nt, Homo sapiens
  misc_RNA (1)...(19): siRNA sense strand
aaagccagcuguguaaucu

SEQ ID NO: 2080620 - RNA, 19 nt, Homo sapiens
  misc_RNA (1)...(19): siRNA sense strand
gcacacucaccuucgaaga

SEQ ID NO: 2080621 - RNA, 19 nt, Homo sapiens
  misc_RNA (1)...(19): siRNA sense strand
aaaccucucugauuaucca

SEQ ID NO: 2080622 - RNA, 19 nt, Homo sapiens
  misc_RNA (1)...(19): siRNA sense strand
ccuguucuccuccaacuuu

SEQ ID NO: 2080623 - RNA, 19 nt, Homo sapiens
  misc_RNA (1)...(19): siRNA sense strand
caaugugggcugccgagaa

SEQ ID NO: 2080624 - RNA, 19 nt, Homo sapiens
  misc_RNA (1)...(19): siRNA sense strand
gaaaccuucaugccucaga

SEQ ID NO: 2080625 - RNA, 19 nt, Homo sapiens
  misc_RNA (1)...(19): siRNA sense strand
ucaccaccaugcagaagca

SEQ ID NO: 2080626 - RNA, 19 nt, Homo sapiens
  misc_RNA (1)...(19): siRNA sense strand
ccucaucaccacacauguu

SEQ ID NO: 2080627 - RNA, 19 nt, Homo sapiens
  misc_RNA (1)...(19): siRNA sense strand
gcagcagagcuccuacaau

SEQ ID NO: 2080628 - RNA, 19 nt, Homo sapiens
  misc_RNA (1)...(19): siRNA sense strand
uaccaacuccucccucguu

SEQ ID NO: 2080629 - RNA, 19 nt, Homo sapiens
  misc_RNA (1)...(19): siRNA sense strand
acaaugccuucucccuuca

SEQ ID NO: 2080630 - RNA, 19 nt, Homo sapiens
  misc_RNA (1)...(19): siRNA sense strand
ggaggcagcacaggcacuu

SEQ ID NO: 2080631 - RNA, 19 nt, Homo sapiens
  misc_RNA (1)...(19): siRNA sense strand
gauacaauuuccccacuuc

SEQ ID NO: 2080632 - RNA, 19 nt, Homo sapiens
  misc_RNA (1)...(19): siRNA sense strand
guaaucuaaaccucucuga

SEQ ID NO: 2080633 - RNA, 19 nt, Homo sapiens
  misc_RNA (1)...(19): siRNA sense strand
gagugacaguggcuacaac

SEQ ID NO: 2080634 - RNA, 19 nt, Homo sapiens
  misc_RNA (1)...(19): siRNA sense strand
cuucccaguuucaguaugu

SEQ ID NO: 2080635 - RNA, 19 nt, Homo sapiens
  misc_RNA (1)...(19): siRNA sense strand
ucuaaaccucucugauuau

SEQ ID NO: 2080636 - RNA, 19 nt, Homo sapiens
  misc_RNA (1)...(19): siRNA sense strand
acacucaccuucgaagacu

SEQ ID NO: 2080637 - RNA, 19 nt, Homo sapiens
  misc_RNA (1)...(19): siRNA sense strand
ccagcuguguaaucuaaac

SEQ ID NO: 2080638 - RNA, 19 nt, Homo sapiens
  misc_RNA (1)...(19): siRNA sense strand
ggauggagcacagcaugca

SEQ ID NO: 2080639 - RNA, 19 nt, Homo sapiens
  misc_RNA (1)...(19): siRNA sense strand
gcaaggaugucuucuccaa

SEQ ID NO: 2080640 - RNA, 19 nt, Homo sapiens
  misc_RNA (1)...(19): siRNA sense strand
gaacuggaccugaccugua

SEQ ID NO: 2080641 - RNA, 19 nt, Homo sapiens
  misc_RNA (1)...(19): siRNA sense strand
gaagacagaggcaauuauu

SEQ ID NO: 2080642 - RNA, 19 nt, Homo sapiens
  misc_RNA (1)...(19): siRNA sense strand
gaccugaccuguaacauca

SEQ ID NO: 2080643 - RNA, 19 nt, Homo sapiens
  misc_RNA (1)...(19): siRNA sense strand
gagcagcugugcccaagaa

SEQ ID NO: 2080644 - RNA, 19 nt, Homo sapiens
  misc_RNA (1)...(19): siRNA sense strand
aggaugagcugaaaucuga

SEQ ID NO: 2080645 - RNA, 19 nt, Homo sapiens
  misc_RNA (1)...(19): siRNA sense strand
ccaaaggacuacagaggaa

SEQ ID NO: 2080646 - RNA, 19 nt, Homo sapiens
  misc_RNA (1)...(19): siRNA sense strand
gaaacgaaguacaucaucu

SEQ ID NO: 2080647 - RNA, 19 nt, Homo sapiens
  misc_RNA (1)...(19): siRNA sense strand
cagaugacauggccuuuga

SEQ ID NO: 2080648 - RNA, 19 nt, Homo sapiens
  misc_RNA (1)...(19): siRNA sense strand
gugcacagcucgccucaug

SEQ ID NO: 2080649 - RNA, 19 nt, Homo sapiens
  misc_RNA (1)...(19): siRNA sense strand
gaacaacagcugggugaaa

SEQ ID NO: 2080650 - RNA, 19 nt, Homo sapiens
  misc_RNA (1)...(19): siRNA sense strand
gaugcacgcuccuaccauu

SEQ ID NO: 2080651 - RNA, 19 nt, Homo sapiens
  misc_RNA (1)...(19): siRNA sense strand
auacagacacguucaauuu

SEQ ID NO: 2080652 - RNA, 19 nt, Homo sapiens
  misc_RNA (1)...(19): siRNA sense strand
caacagaccgagccgauga

SEQ ID NO: 2080653 - RNA, 19 nt, Homo sapiens
  misc_RNA (1)...(19): siRNA sense strand
ccaagccuguuaacauauu

SEQ ID NO: 2080654 - RNA, 19 nt, Homo sapiens
  misc_RNA (1)...(19): siRNA sense strand
gaagauggaugugcugaac

SEQ ID NO: 2080655 - RNA, 19 nt, Homo sapiens
  misc_RNA (1)...(19): siRNA sense strand
ccucagguccuauauuuaa

SEQ ID NO: 2080656 - RNA, 19 nt, Homo sapiens
  misc_RNA (1)...(19): siRNA sense strand
cgaaguacaucaucucucu

SEQ ID NO: 2080657 - RNA, 19 nt, Homo sapiens
  misc_RNA (1)...(19): siRNA sense strand
gcacagcucgccucauguu

SEQ ID NO: 2080658 - RNA, 19 nt, Homo sapiens
  misc_RNA (1)...(19): siRNA sense strand
uggugaagcuggagaauug

SEQ ID NO: 2080659 - RNA, 19 nt, Homo sapiens
  misc_RNA (1)...(19): siRNA sense strand
cuccaagccuguuaacaua

SEQ ID NO: 2080660 - RNA, 19 nt, Homo sapiens
  misc_RNA (1)...(19): siRNA sense strand
gacuggagcuucucaucuu

SEQ ID NO: 2080661 - RNA, 19 nt, Homo sapiens
  misc_RNA (1)...(19): siRNA sense strand
gguccuauauuuaaugcuu

SEQ ID NO: 2080662 - RNA, 19 nt, Homo sapiens
  misc_RNA (1)...(19): siRNA sense strand
gguuugcggugcacucuuu

SEQ ID NO: 2080663 - RNA, 19 nt, Homo sapiens
  misc_RNA (1)...(19): siRNA sense strand
gaaugugucuguggcugaa

SEQ ID NO: 2080664 - RNA, 19 nt, Homo sapiens
  misc_RNA (1)...(19): siRNA sense strand
agacacaccaucaguaauu

SEQ ID NO: 2080665 - RNA, 19 nt, Homo sapiens
  misc_RNA (1)...(19): siRNA sense strand
caaggccacuacaaauguu

SEQ ID NO: 2080666 - RNA, 19 nt, Homo sapiens
  misc_RNA (1)...(19): siRNA sense strand
gagauagacuuccaaaccu

SEQ ID NO: 2080667 - RNA, 19 nt, Homo sapiens
  misc_RNA (1)...(19): siRNA sense strand
cagaggcaauuauuacugu

SEQ ID NO: 2080668 - RNA, 19 nt, Homo sapiens
  misc_RNA (1)...(19): siRNA sense strand
ggcccaggauggagacuuu

SEQ ID NO: 2080669 - RNA, 19 nt, Homo sapiens
  misc_RNA (1)...(19): siRNA sense strand
gaggugacgugguccuuca

SEQ ID NO: 2080670 - RNA, 19 nt, Homo sapiens
  misc_RNA (1)...(19): siRNA sense strand
gaggacacagugcagguua

SEQ ID NO: 2080671 - RNA, 19 nt, Homo sapiens
  misc_RNA (1)...(19): siRNA sense strand
ggaagacagaggcaauuau

SEQ ID NO: 2080672 - RNA, 19 nt, Homo sapiens
  misc_RNA (1)...(19): siRNA sense strand
cauuugagaugacuugcaa

SEQ ID NO: 2080673 - RNA, 19 nt, Homo sapiens
  misc_RNA (1)...(19): siRNA sense strand
ucagacacaccaucaguaa

SEQ ID NO: 2080674 - RNA, 19 nt, Homo sapiens
  misc_RNA (1)...(19): siRNA sense strand
gaccaaggccacuacaaau

SEQ ID NO: 2080675 - RNA, 19 nt, Homo sapiens
  misc_RNA (1)...(19): siRNA sense strand
gaaggagguucaggagaca

SEQ ID NO: 2080676 - RNA, 19 nt, Homo sapiens
  misc_RNA (1)...(19): siRNA sense strand
ccacugguguuguaagaag

SEQ ID NO: 2080677 - RNA, 19 nt, Homo sapiens
  misc_RNA (1)...(19): siRNA sense strand
gaguuccgcuaucgaaugu

SEQ ID NO: 2080678 - RNA, 19 nt, Homo sapiens
  misc_RNA (1)...(19): siRNA sense strand
gaauuggacagaugcauca

SEQ ID NO: 2080679 - RNA, 19 nt, Homo sapiens
  misc_RNA (1)...(19): siRNA sense strand
gcugaaaucugagcuucug

SEQ ID NO: 2080680 - RNA, 19 nt, Homo sapiens
  misc_RNA (1)...(19): siRNA sense strand
gaaacuaugaggacacagu

SEQ ID NO: 2080681 - RNA, 19 nt, Homo sapiens
  misc_RNA (1)...(19): siRNA sense strand
ugagugugcuggaauucuu

SEQ ID NO: 2080682 - RNA, 19 nt, Homo sapiens
  misc_RNA (1)...(19): siRNA sense strand
gaggaugaguuccgcuauc

SEQ ID NO: 2080683 - RNA, 19 nt, Homo sapiens
  misc_RNA (1)...(19): siRNA sense strand
cagggcaacuggcaggaaa

SEQ ID NO: 2080684 - RNA, 19 nt, Homo sapiens
  misc_RNA (1)...(19): siRNA sense strand
ggacacagugcagguuaaa

SEQ ID NO: 2080685 - RNA, 19 nt, Homo sapiens
  misc_RNA (1)...(19): siRNA sense strand
ggaccugaccuguaacauc

SEQ ID NO: 2080686 - RNA, 19 nt, Homo sapiens
  misc_RNA (1)...(19): siRNA sense strand
aggcagagauccacuccaa

SEQ ID NO: 2080687 - RNA, 19 nt, Homo sapiens
  misc_RNA (1)...(19): siRNA sense strand
caaccagucucuccaaucc

SEQ ID NO: 2080688 - RNA, 19 nt, Homo sapiens
  misc_RNA (1)...(19): siRNA sense strand
cugaagcgcugggauuuau

SEQ ID NO: 2080689 - RNA, 19 nt, Homo sapiens
  misc_RNA (1)...(19): siRNA sense strand
caggauggagacuuuauuu

SEQ ID NO: 2080690 - RNA, 19 nt, Homo sapiens
  misc_RNA (1)...(19): siRNA sense strand
ggugugaccuggcuagaac

SEQ ID NO: 2080691 - RNA, 19 nt, Homo sapiens
  misc_RNA (1)...(19): siRNA sense strand
caacaggagcuggcacaaa

SEQ ID NO: 2080692 - RNA, 19 nt, Homo sapiens
  misc_RNA (1)...(19): siRNA sense strand
caagccuguuaacauauuu

SEQ ID NO: 2080693 - RNA, 19 nt, Homo sapiens
  misc_RNA (1)...(19): siRNA sense strand
gaugaguuccgcuaucgaa

SEQ ID NO: 2080694 - RNA, 19 nt, Homo sapiens
  misc_RNA (1)...(19): siRNA sense strand
ccaaugaaacgaaguacau

SEQ ID NO: 2080695 - RNA, 19 nt, Homo sapiens
  misc_RNA (1)...(19): siRNA sense strand
agaaaacucuggcuacuau

SEQ ID NO: 2080696 - RNA, 19 nt, Homo sapiens
  misc_RNA (1)...(19): siRNA sense strand
agaccaaggccacuacaaa

SEQ ID NO: 2080697 - RNA, 19 nt, Homo sapiens
  misc_RNA (1)...(19): siRNA sense strand
gcagaaggaggcagagauc

SEQ ID NO: 2080698 - RNA, 19 nt, Homo sapiens
  misc_RNA (1)...(19): siRNA sense strand
cugaucaaauuguucugua

SEQ ID NO: 2080699 - RNA, 19 nt, Homo sapiens
  misc_RNA (1)...(19): siRNA sense strand
aacaggagcuggcacaaag

SEQ ID NO: 2080700 - RNA, 19 nt, Homo sapiens
  misc_RNA (1)...(19): siRNA sense strand
aacuggaccugaccuguaa

SEQ ID NO: 2080701 - RNA, 19 nt, Homo sapiens
  misc_RNA (1)...(19): siRNA sense strand
ccaaggccacuacaaaugu

SEQ ID NO: 2080702 - RNA, 19 nt, Homo sapiens
  misc_RNA (1)...(19): siRNA sense strand
gggaaacuaugaggacaca

SEQ ID NO: 2080703 - RNA, 19 nt, Homo sapiens
  misc_RNA (1)...(19): siRNA sense strand
gaucaaauuguucuguauc

SEQ ID NO: 2080704 - RNA, 19 nt, Homo sapiens
  misc_RNA (1)...(19): siRNA sense strand
gcgugagugugcuggaauu

SEQ ID NO: 2080705 - RNA, 19 nt, Homo sapiens
  misc_RNA (1)...(19): siRNA sense strand
gcuccugucuucccuggau

SEQ ID NO: 2080706 - RNA, 19 nt, Homo sapiens
  misc_RNA (1)...(19): siRNA sense strand
caaauuguucuguaucauc

SEQ ID NO: 2080707 - RNA, 19 nt, Homo sapiens
  misc_RNA (1)...(19): siRNA sense strand
ggacuggacgcuaaaauau

SEQ ID NO: 2080708 - RNA, 19 nt, Homo sapiens
  misc_RNA (1)...(19): siRNA sense strand
ccaaacagcggaacaacag

SEQ ID NO: 2080709 - RNA, 19 nt, Homo sapiens
  misc_RNA (1)...(19): siRNA sense strand
ggaccaaacagcggaacaa

SEQ ID NO: 2080710 - RNA, 19 nt, Homo sapiens
  misc_RNA (1)...(19): siRNA sense strand
gcacgcuccuaccauuuac

SEQ ID NO: 2080711 - RNA, 19 nt, Homo sapiens
  misc_RNA (1)...(19): siRNA sense strand
gacacaccaucaguaauuc

SEQ ID NO: 2080712 - RNA, 19 nt, Homo sapiens
  misc_RNA (1)...(19): siRNA sense strand
agacagaggcaauuauuac

SEQ ID NO: 2080713 - RNA, 19 nt, Homo sapiens
  misc_RNA (1)...(19): siRNA sense strand
gaggaagacagaggcaauu

SEQ ID NO: 2080714 - RNA, 19 nt, Homo sapiens
  misc_RNA (1)...(19): siRNA sense strand
cagcugugcccaagaaugu

SEQ ID NO: 2080715 - RNA, 19 nt, Homo sapiens
  misc_RNA (1)...(19): siRNA sense strand
aagacagaggcaauuauua

SEQ ID NO: 2080716 - RNA, 19 nt, Homo sapiens
  misc_RNA (1)...(19): siRNA sense strand
gguucgggauguuagcaaa

SEQ ID NO: 2080717 - RNA, 19 nt, Homo sapiens
  misc_RNA (1)...(19): siRNA sense strand
aauguccgauucacgguuu

SEQ ID NO: 2080718 - RNA, 19 nt, Homo sapiens
  misc_RNA (1)...(19): siRNA sense strand
ucaugucgauggagaugga

SEQ ID NO: 2080719 - RNA, 19 nt, Homo sapiens
  misc_RNA (1)...(19): siRNA sense strand
gaccaggacuuuggcaacu

SEQ ID NO: 2080720 - RNA, 19 nt, Homo sapiens
  misc_RNA (1)...(19): siRNA sense strand
gaugacauggccuuugaug

SEQ ID NO: 2080721 - RNA, 19 nt, Homo sapiens
  misc_RNA (1)...(19): siRNA sense strand
ggcaggaaauccaagaaaa

SEQ ID NO: 2080722 - RNA, 19 nt, Homo sapiens
  misc_RNA (1)...(19): siRNA sense strand
gggcuccuguccugucuca

SEQ ID NO: 2080723 - RNA, 19 nt, Homo sapiens
  misc_RNA (1)...(19): siRNA sense strand
ggauggcguuguuuuagaa

SEQ ID NO: 2080724 - RNA, 19 nt, Homo sapiens
  misc_RNA (1)...(19): siRNA sense strand
gaaaagcaaggaugucuuc

SEQ ID NO: 2080725 - RNA, 19 nt, Homo sapiens
  misc_RNA (1)...(19): siRNA sense strand
ggcaauuauuacuguguug

SEQ ID NO: 2080726 - RNA, 19 nt, Homo sapiens
  misc_RNA (1)...(19): siRNA sense strand
auuagaagauuccgugcuu

SEQ ID NO: 2080727 - RNA, 19 nt, Homo sapiens
  misc_RNA (1)...(19): siRNA sense strand
gcauucagacacaccauca

SEQ ID NO: 2080728 - RNA, 19 nt, Homo sapiens
  misc_RNA (1)...(19): siRNA sense strand
gcaaccagucucuccaauc

SEQ ID NO: 2080729 - RNA, 19 nt, Homo sapiens
  misc_RNA (1)...(19): siRNA sense strand
caacuggcaggaaauccaa

SEQ ID NO: 2080730 - RNA, 19 nt, Homo sapiens
  misc_RNA (1)...(19): siRNA sense strand
uuauaacugugaagaugga

SEQ ID NO: 2080731 - RNA, 19 nt, Homo sapiens
  misc_RNA (1)...(19): siRNA sense strand
gcgcgugagugugcuggaa

SEQ ID NO: 2080732 - RNA, 19 nt, Homo sapiens
  misc_RNA (1)...(19): siRNA sense strand
cgagggagcagcacuggau

SEQ ID NO: 2080733 - RNA, 19 nt, Homo sapiens
  misc_RNA (1)...(19): siRNA sense strand
cauacagacacguucaauu

SEQ ID NO: 2080734 - RNA, 19 nt, Homo sapiens
  misc_RNA (1)...(19): siRNA sense strand
gaaaaggccguggaaguug

SEQ ID NO: 2080735 - RNA, 19 nt, Homo sapiens
  misc_RNA (1)...(19): siRNA sense strand
gggcagccuuuggcgagaa

SEQ ID NO: 2080736 - RNA, 19 nt, Homo sapiens
  misc_RNA (1)...(19): siRNA sense strand
ccuuugauguguccugguu

SEQ ID NO: 2080737 - RNA, 19 nt, Homo sapiens
  misc_RNA (1)...(19): siRNA sense strand
accagucucuccaauccua

SEQ ID NO: 2080738 - RNA, 19 nt, Homo sapiens
  misc_RNA (1)...(19): siRNA sense strand
acacagugcagguuaaagu

SEQ ID NO: 2080739 - RNA, 19 nt, Homo sapiens
  misc_RNA (1)...(19): siRNA sense strand
ggagagccgugucaacuuc

SEQ ID NO: 2080740 - RNA, 19 nt, Homo sapiens
  misc_RNA (1)...(19): siRNA sense strand
ggaagacggcccuguucua

SEQ ID NO: 2080741 - RNA, 19 nt, Homo sapiens
  misc_RNA (1)...(19): siRNA sense strand
acaaguggcucagugaauu

SEQ ID NO: 2080742 - RNA, 19 nt, Homo sapiens
  misc_RNA (1)...(19): siRNA sense strand
gcaaggaggccaugugcuu

SEQ ID NO: 2080743 - RNA, 19 nt, Homo sapiens
  misc_RNA (1)...(19): siRNA sense strand
gggaacccuuugagauuaa

SEQ ID NO: 2080744 - RNA, 19 nt, Homo sapiens
  misc_RNA (1)...(19): siRNA sense strand
gaagaaacgcuccaaucca

SEQ ID NO: 2080745 - RNA, 19 nt, Homo sapiens
  misc_RNA (1)...(19): siRNA sense strand
gccaugugcuucaaugcaa

SEQ ID NO: 2080746 - RNA, 19 nt, Homo sapiens
  misc_RNA (1)...(19): siRNA sense strand
gaccaaacaguaucugaug

SEQ ID NO: 2080747 - RNA, 19 nt, Homo sapiens
  misc_RNA (1)...(19): siRNA sense strand
augcaaagcugaagauucu

SEQ ID NO: 2080748 - RNA, 19 nt, Homo sapiens
  misc_RNA (1)...(19): siRNA sense strand
ggggaacccuuugagauua

SEQ ID NO: 2080749 - RNA, 19 nt, Homo sapiens
  misc_RNA (1)...(19): siRNA sense strand
acgaguggcugaugaagga

SEQ ID NO: 2080750 - RNA, 19 nt, Homo sapiens
  misc_RNA (1)...(19): siRNA sense strand
ucagugaauuugacuugga

SEQ ID NO: 2080751 - RNA, 19 nt, Homo sapiens
  misc_RNA (1)...(19): siRNA sense strand
gaagacggcccuguucuac

SEQ ID NO: 2080752 - RNA, 19 nt, Homo sapiens
  misc_RNA (1)...(19): siRNA sense strand
gcaaggcccaucucaugau

SEQ ID NO: 2080753 - RNA, 19 nt, Homo sapiens
  misc_RNA (1)...(19): siRNA sense strand
gcucagugaauuugacuug

SEQ ID NO: 2080754 - RNA, 19 nt, Homo sapiens
  misc_RNA (1)...(19): siRNA sense strand
caaguggcucagugaauuu

SEQ ID NO: 2080755 - RNA, 19 nt, Homo sapiens
  misc_RNA (1)...(19): siRNA sense strand
gaggccaugugcuucaaug

SEQ ID NO: 2080756 - RNA, 19 nt, Homo sapiens
  misc_RNA (1)...(19): siRNA sense strand
ggaacccuuugagauuaaa

SEQ ID NO: 2080757 - RNA, 19 nt, Homo sapiens
  misc_RNA (1)...(19): siRNA sense strand
gaugcuggaucccaacaag

SEQ ID NO: 2080758 - RNA, 19 nt, Homo sapiens
  misc_RNA (1)...(19): siRNA sense strand
caacaaguggcucagugaa

SEQ ID NO: 2080759 - RNA, 19 nt, Homo sapiens
  misc_RNA (1)...(19): siRNA sense strand
gaaguacgaguggcugaug

SEQ ID NO: 2080760 - RNA, 19 nt, Homo sapiens
  misc_RNA (1)...(19): siRNA sense strand
ggaggcgaccaaacaguau

SEQ ID NO: 2080761 - RNA, 19 nt, Homo sapiens
  misc_RNA (1)...(19): siRNA sense strand
ccaacaaguggcucaguga

SEQ ID NO: 2080762 - RNA, 19 nt, Homo sapiens
  misc_RNA (1)...(19): siRNA sense strand
agacggcccuguucuacca

SEQ ID NO: 2080763 - RNA, 19 nt, Homo sapiens
  misc_RNA (1)...(19): siRNA sense strand
ccaugugcuucaaugcaaa

SEQ ID NO: 2080764 - RNA, 19 nt, Homo sapiens
  misc_RNA (1)...(19): siRNA sense strand
cugcaaggcccaucucaug

SEQ ID NO: 2080765 - RNA, 19 nt, Homo sapiens
  misc_RNA (1)...(19): siRNA sense strand
gaucaccugcuucgacauc

SEQ ID NO: 2080766 - RNA, 19 nt, Homo sapiens
  misc_RNA (1)...(19): siRNA sense strand
uggaggcgaccaaacagua

SEQ ID NO: 2080767 - RNA, 19 nt, Homo sapiens
  misc_RNA (1)...(19): siRNA sense strand
cgaagaaacgcuccaaucc

SEQ ID NO: 2080768 - RNA, 19 nt, Homo sapiens
  misc_RNA (1)...(19): siRNA sense strand
ccgaagaaacgcuccaauc

SEQ ID NO: 2080769 - RNA, 19 nt, Homo sapiens
  misc_RNA (1)...(19): siRNA sense strand
cgaccaaacaguaucugau

SEQ ID NO: 2080770 - RNA, 19 nt, Homo sapiens
  misc_RNA (1)...(19): siRNA sense strand
ucaaugcaaagcugaagau

SEQ ID NO: 2080771 - RNA, 19 nt, Homo sapiens
  misc_RNA (1)...(19): siRNA sense strand
gcgaccaaacaguaucuga

SEQ ID NO: 2080772 - RNA, 19 nt, Homo sapiens
  misc_RNA (1)...(19): siRNA sense strand
aaguacgaguggcugauga

SEQ ID NO: 2080773 - RNA, 19 nt, Homo sapiens
  misc_RNA (1)...(19): siRNA sense strand
gaaauugugugagacauua

SEQ ID NO: 2080774 - RNA, 19 nt, Homo sapiens
  misc_RNA (1)...(19): siRNA sense strand
gaacaaacuucuucuacaa

SEQ ID NO: 2080775 - RNA, 19 nt, Homo sapiens
  misc_RNA (1)...(19): siRNA sense strand
gaaagaaaccuaucucuga

SEQ ID NO: 2080776 - RNA, 19 nt, Homo sapiens
  misc_RNA (1)...(19): siRNA sense strand
gaacgggccuccagaagaa

SEQ ID NO: 2080777 - RNA, 19 nt, Homo sapiens
  misc_RNA (1)...(19): siRNA sense strand
gaagagccauccauagauu

SEQ ID NO: 2080778 - RNA, 19 nt, Homo sapiens
  misc_RNA (1)...(19): siRNA sense strand
gaaggaaguuguugacaug

SEQ ID NO: 2080779 - RNA, 19 nt, Homo sapiens
  misc_RNA (1)...(19): siRNA sense strand
agacaugacucuggaauua

SEQ ID NO: 2080780 - RNA, 19 nt, Homo sapiens
  misc_RNA (1)...(19): siRNA sense strand
gaagagguguguagacaga

SEQ ID NO: 2080781 - RNA, 19 nt, Homo sapiens
  misc_RNA (1)...(19): siRNA sense strand
ucucgaagcucucagguua

SEQ ID NO: 2080782 - RNA, 19 nt, Homo sapiens
  misc_RNA (1)...(19): siRNA sense strand
gcagauggcuuuggauuag

SEQ ID NO: 2080783 - RNA, 19 nt, Homo sapiens
  misc_RNA (1)...(19): siRNA sense strand
cguauuaucuccgaaauuu

SEQ ID NO: 2080784 - RNA, 19 nt, Homo sapiens
  misc_RNA (1)...(19): siRNA sense strand
gcagaagccuuuugucaua

SEQ ID NO: 2080785 - RNA, 19 nt, Homo sapiens
  misc_RNA (1)...(19): siRNA sense strand
ccaaaugcuuucuucagua

SEQ ID NO: 2080786 - RNA, 19 nt, Homo sapiens
  misc_RNA (1)...(19): siRNA sense strand
gaaagccugugaaguugaa

SEQ ID NO: 2080787 - RNA, 19 nt, Homo sapiens
  misc_RNA (1)...(19): siRNA sense strand
gauuagacauucuuccaaa

SEQ ID NO: 2080788 - RNA, 19 nt, Homo sapiens
  misc_RNA (1)...(19): siRNA sense strand
gacaauagcagaagccuuu

SEQ ID NO: 2080789 - RNA, 19 nt, Homo sapiens
  misc_RNA (1)...(19): siRNA sense strand
gacgaaggcuaaacaaguu

SEQ ID NO: 2080790 - RNA, 19 nt, Homo sapiens
  misc_RNA (1)...(19): siRNA sense strand
cuacagaaauugugugaga

SEQ ID NO: 2080791 - RNA, 19 nt, Homo sapiens
  misc_RNA (1)...(19): siRNA sense strand
ugacagagacucauaaaug

SEQ ID NO: 2080792 - RNA, 19 nt, Homo sapiens
  misc_RNA (1)...(19): siRNA sense strand
gaagaaagagaacaaacuu

SEQ ID NO: 2080793 - RNA, 19 nt, Homo sapiens
  misc_RNA (1)...(19): siRNA sense strand
caaaauagcugaacuagag

SEQ ID NO: 2080794 - RNA, 19 nt, Homo sapiens
  misc_RNA (1)...(19): siRNA sense strand
guucagagauuucuuugau

SEQ ID NO: 2080795 - RNA, 19 nt, Homo sapiens
  misc_RNA (1)...(19): siRNA sense strand
caaaugcuuucuucaguau

SEQ ID NO: 2080796 - RNA, 19 nt, Homo sapiens
  misc_RNA (1)...(19): siRNA sense strand
cgaaaucgauacagacuuc

SEQ ID NO: 2080797 - RNA, 19 nt, Homo sapiens
  misc_RNA (1)...(19): siRNA sense strand
ucagagauuucuuugauug

SEQ ID NO: 2080798 - RNA, 19 nt, Homo sapiens
  misc_RNA (1)...(19): siRNA sense strand
ccucacagaugaaguuuga

SEQ ID NO: 2080799 - RNA, 19 nt, Homo sapiens
  misc_RNA (1)...(19): siRNA sense strand
gagcgcaggugaugcuuug

SEQ ID NO: 2080800 - RNA, 19 nt, Homo sapiens
  misc_RNA (1)...(19): siRNA sense strand
gaaaguggaccucagacaa

SEQ ID NO: 2080801 - RNA, 19 nt, Homo sapiens
  misc_RNA (1)...(19): siRNA sense strand
guugugaacuuggauaauu

SEQ ID NO: 2080802 - RNA, 19 nt, Homo sapiens
  misc_RNA (1)...(19): siRNA sense strand
gcgaagauguacuggauuc

SEQ ID NO: 2080803 - RNA, 19 nt, Homo sapiens
  misc_RNA (1)...(19): siRNA sense strand
aaacuggaauuacuacaga

SEQ ID NO: 2080804 - RNA, 19 nt, Homo sapiens
  misc_RNA (1)...(19): siRNA sense strand
gaaugcagcuucguuugau

SEQ ID NO: 2080805 - RNA, 19 nt, Homo sapiens
  misc_RNA (1)...(19): siRNA sense strand
acaagcaguuggaauacua

SEQ ID NO: 2080806 - RNA, 19 nt, Homo sapiens
  misc_RNA (1)...(19): siRNA sense strand
ggcgaacgcuguuggagaa

SEQ ID NO: 2080807 - RNA, 19 nt, Homo sapiens
  misc_RNA (1)...(19): siRNA sense strand
cgagauagaggaaacguuu

SEQ ID NO: 2080808 - RNA, 19 nt, Homo sapiens
  misc_RNA (1)...(19): siRNA sense strand
gcucucagguuagaagaaa

SEQ ID NO: 2080809 - RNA, 19 nt, Homo sapiens
  misc_RNA (1)...(19): siRNA sense strand
gcucgaggaugcugaaaca

SEQ ID NO: 2080810 - RNA, 19 nt, Homo sapiens
  misc_RNA (1)...(19): siRNA sense strand
cagaugaaguuugaagauu

SEQ ID NO: 2080811 - RNA, 19 nt, Homo sapiens
  misc_RNA (1)...(19): siRNA sense strand
gaaucucaaucugcuguuu

SEQ ID NO: 2080812 - RNA, 19 nt, Homo sapiens
  misc_RNA (1)...(19): siRNA sense strand
ggaacagacuauugaggau

SEQ ID NO: 2080813 - RNA, 19 nt, Homo sapiens
  misc_RNA (1)...(19): siRNA sense strand
gacagagacucauaaaugc

SEQ ID NO: 2080814 - RNA, 19 nt, Homo sapiens
  misc_RNA (1)...(19): siRNA sense strand
cuacaugaauggaggaaau

SEQ ID NO: 2080815 - RNA, 19 nt, Homo sapiens
  misc_RNA (1)...(19): siRNA sense strand
ggaccaggauucaacuaca

SEQ ID NO: 2080816 - RNA, 19 nt, Homo sapiens
  misc_RNA (1)...(19): siRNA sense strand
gaggcgaaaucgauacaga

SEQ ID NO: 2080817 - RNA, 19 nt, Homo sapiens
  misc_RNA (1)...(19): siRNA sense strand
aaagaaaccuaucucugau

SEQ ID NO: 2080818 - RNA, 19 nt, Homo sapiens
  misc_RNA (1)...(19): siRNA sense strand
caaugaagccucuuuacug

SEQ ID NO: 2080819 - RNA, 19 nt, Homo sapiens
  misc_RNA (1)...(19): siRNA sense strand
gcucugacuuuaaagacuu

SEQ ID NO: 2080820 - RNA, 19 nt, Homo sapiens
  misc_RNA (1)...(19): siRNA sense strand
cggcauauuucuucaugaa

SEQ ID NO: 2080821 - RNA, 19 nt, Homo sapiens
  misc_RNA (1)...(19): siRNA sense strand
gcaguuggaauacuaaugu

SEQ ID NO: 2080822 - RNA, 19 nt, Homo sapiens
  misc_RNA (1)...(19): siRNA sense strand
ggaaguuguugacaugaag

SEQ ID NO: 2080823 - RNA, 19 nt, Homo sapiens
  misc_RNA (1)...(19): siRNA sense strand
gaaguacggcaucauagga

SEQ ID NO: 2080824 - RNA, 19 nt, Homo sapiens
  misc_RNA (1)...(19): siRNA sense strand
guaggaagcagcccauaga

SEQ ID NO: 2080825 - RNA, 19 nt, Homo sapiens
  misc_RNA (1)...(19): siRNA sense strand
acaugacucuggaauuaaa

SEQ ID NO: 2080826 - RNA, 19 nt, Homo sapiens
  misc_RNA (1)...(19): siRNA sense strand
agaagaagcagagaaguuu

SEQ ID NO: 2080827 - RNA, 19 nt, Homo sapiens
  misc_RNA (1)...(19): siRNA sense strand
ucucaaagacgaaggcuaa

SEQ ID NO: 2080828 - RNA, 19 nt, Homo sapiens
  misc_RNA (1)...(19): siRNA sense strand
uccaguacuucacuuauuu

SEQ ID NO: 2080829 - RNA, 19 nt, Homo sapiens
  misc_RNA (1)...(19): siRNA sense strand
gcucagaugcuguccagaa

SEQ ID NO: 2080830 - RNA, 19 nt, Homo sapiens
  misc_RNA (1)...(19): siRNA sense strand
cagcuucguuugaucaaga

SEQ ID NO: 2080831 - RNA, 19 nt, Homo sapiens
  misc_RNA (1)...(19): siRNA sense strand
gggaguagcacuuuaccaa

SEQ ID NO: 2080832 - RNA, 19 nt, Homo sapiens
  misc_RNA (1)...(19): siRNA sense strand
gaccaaugaagccucuuua

SEQ ID NO: 2080833 - RNA, 19 nt, Homo sapiens
  misc_RNA (1)...(19): siRNA sense strand
guagacagaagaaaggaaa

SEQ ID NO: 2080834 - RNA, 19 nt, Homo sapiens
  misc_RNA (1)...(19): siRNA sense strand
gagcauaugcagccuuuca

SEQ ID NO: 2080835 - RNA, 19 nt, Homo sapiens
  misc_RNA (1)...(19): siRNA sense strand
uauaccaggucuccucaaa

SEQ ID NO: 2080836 - RNA, 19 nt, Homo sapiens
  misc_RNA (1)...(19): siRNA sense strand
uuucaggccucacagauga

SEQ ID NO: 2080837 - RNA, 19 nt, Homo sapiens
  misc_RNA (1)...(19): siRNA sense strand
gcaaagauaagcaugaaaa

SEQ ID NO: 2080838 - RNA, 19 nt, Homo sapiens
  misc_RNA (1)...(19): siRNA sense strand
cuugaaagccugugaaguu

SEQ ID NO: 2080839 - RNA, 19 nt, Homo sapiens
  misc_RNA (1)...(19): siRNA sense strand
gagauuucuuugauugugu

SEQ ID NO: 2080840 - RNA, 19 nt, Homo sapiens
  misc_RNA (1)...(19): siRNA sense strand
ggaagaaagagaacaaacu

SEQ ID NO: 2080841 - RNA, 19 nt, Homo sapiens
  misc_RNA (1)...(19): siRNA sense strand
caaagacgaaggcuaaaca

SEQ ID NO: 2080842 - RNA, 19 nt, Homo sapiens
  misc_RNA (1)...(19): siRNA sense strand
cuccacggcuuucccauuu

SEQ ID NO: 2080843 - RNA, 19 nt, Homo sapiens
  misc_RNA (1)...(19): siRNA sense strand
aagcaaagauaagcaugaa

SEQ ID NO: 2080844 - RNA, 19 nt, Homo sapiens
  misc_RNA (1)...(19): siRNA sense strand
ggcagauggcuuuggauua

SEQ ID NO: 2080845 - RNA, 19 nt, Homo sapiens
  misc_RNA (1)...(19): siRNA sense strand
aaaguggaccucagacaaa

SEQ ID NO: 2080846 - RNA, 19 nt, Homo sapiens
  misc_RNA (1)...(19): siRNA sense strand
cagaagaagcagagaaguu

SEQ ID NO: 2080847 - RNA, 19 nt, Homo sapiens
  misc_RNA (1)...(19): siRNA sense strand
ccgcgaagauguacuggau

SEQ ID NO: 2080848 - RNA, 19 nt, Homo sapiens
  misc_RNA (1)...(19): siRNA sense strand
cagaugcuguccagaagga

SEQ ID NO: 2080849 - RNA, 19 nt, Homo sapiens
  misc_RNA (1)...(19): siRNA sense strand
aagagcauaugcagccuuu

SEQ ID NO: 2080850 - RNA, 19 nt, Homo sapiens
  misc_RNA (1)...(19): siRNA sense strand
agaaggaaguuguugacau

SEQ ID NO: 2080851 - RNA, 19 nt, Homo sapiens
  misc_RNA (1)...(19): siRNA sense strand
ucacugacagagacucaua

SEQ ID NO: 2080852 - RNA, 19 nt, Homo sapiens
  misc_RNA (1)...(19): siRNA sense strand
uuaugcagguucuagguuu

SEQ ID NO: 2080853 - RNA, 19 nt, Homo sapiens
  misc_RNA (1)...(19): siRNA sense strand
gaccaggauucaacuacau

SEQ ID NO: 2080854 - RNA, 19 nt, Homo sapiens
  misc_RNA (1)...(19): siRNA sense strand
ggucuucuccuuccuuuua

SEQ ID NO: 2080855 - RNA, 19 nt, Homo sapiens
  misc_RNA (1)...(19): siRNA sense strand
gcaagaagaagagcaaguc

SEQ ID NO: 2080856 - RNA, 19 nt, Homo sapiens
  misc_RNA (1)...(19): siRNA sense strand
gaccacggcauauuucuuc

SEQ ID NO: 2080857 - RNA, 19 nt, Homo sapiens
  misc_RNA (1)...(19): siRNA sense strand
ggagaccacggcauauuuc

SEQ ID NO: 2080858 - RNA, 19 nt, Homo sapiens
  misc_RNA (1)...(19): siRNA sense strand
ggaaaacauggaacaauuu

SEQ ID NO: 2080859 - RNA, 19 nt, Homo sapiens
  misc_RNA (1)...(19): siRNA sense strand
caaaagaucacaagcaguu

SEQ ID NO: 2080860 - RNA, 19 nt, Homo sapiens
  misc_RNA (1)...(19): siRNA sense strand
ccuccucccuugccaggua

SEQ ID NO: 2080861 - RNA, 19 nt, Homo sapiens
  misc_RNA (1)...(19): siRNA sense strand
ggaaccguguaaucagaau

SEQ ID NO: 2080862 - RNA, 19 nt, Homo sapiens
  misc_RNA (1)...(19): siRNA sense strand
ccgaagagguguguagaca

SEQ ID NO: 2080863 - RNA, 19 nt, Homo sapiens
  misc_RNA (1)...(19): siRNA sense strand
caagagcagugacaauagc

SEQ ID NO: 2080864 - RNA, 19 nt, Homo sapiens
  misc_RNA (1)...(19): siRNA sense strand
auccauagauugucaugaa

SEQ ID NO: 2080865 - RNA, 19 nt, Homo sapiens
  misc_RNA (1)...(19): siRNA sense strand
ccacuccucccacaaguug

SEQ ID NO: 2080866 - RNA, 19 nt, Homo sapiens
  misc_RNA (1)...(19): siRNA sense strand
guacggcaucauaggauuu

SEQ ID NO: 2080867 - RNA, 19 nt, Homo sapiens
  misc_RNA (1)...(19): siRNA sense strand
gacaugacucuggaauuaa

SEQ ID NO: 2080868 - RNA, 19 nt, Homo sapiens
  misc_RNA (1)...(19): siRNA sense strand
guucuagguuugguucuug

SEQ ID NO: 2080869 - RNA, 19 nt, Homo sapiens
  misc_RNA (1)...(19): siRNA sense strand
ccaagucucuggacaaacc

SEQ ID NO: 2080870 - RNA, 19 nt, Homo sapiens
  misc_RNA (1)...(19): siRNA sense strand
gcaugacagugccuacucu

SEQ ID NO: 2080871 - RNA, 19 nt, Homo sapiens
  misc_RNA (1)...(19): siRNA sense strand
gaagaggagcgcaggugau

SEQ ID NO: 2080872 - RNA, 19 nt, Homo sapiens
  misc_RNA (1)...(19): siRNA sense strand
cccaaaugcuuucuucagu

SEQ ID NO: 2080873 - RNA, 19 nt, Homo sapiens
  misc_RNA (1)...(19): siRNA sense strand
guacaggagccauuuaaua

SEQ ID NO: 2080874 - RNA, 19 nt, Homo sapiens
  misc_RNA (1)...(19): siRNA sense strand
gcagaaaucgucacaugua

SEQ ID NO: 2080875 - RNA, 19 nt, Homo sapiens
  misc_RNA (1)...(19): siRNA sense strand
ccaaacaucuccacacugu

SEQ ID NO: 2080876 - RNA, 19 nt, Homo sapiens
  misc_RNA (1)...(19): siRNA sense strand
gaaaucgucacauguaaga

SEQ ID NO: 2080877 - RNA, 19 nt, Homo sapiens
  misc_RNA (1)...(19): siRNA sense strand
gugcagagcuuggacuuga

SEQ ID NO: 2080878 - RNA, 19 nt, Homo sapiens
  misc_RNA (1)...(19): siRNA sense strand
cagaaaucgucacauguaa

SEQ ID NO: 2080879 - RNA, 19 nt, Homo sapiens
  misc_RNA (1)...(19): siRNA sense strand
agaagaagauuccaugaag

SEQ ID NO: 2080880 - RNA, 19 nt, Homo sapiens
  misc_RNA (1)...(19): siRNA sense strand
gagaagaagauuccaugaa

SEQ ID NO: 2080881 - RNA, 19 nt, Homo sapiens
  misc_RNA (1)...(19): siRNA sense strand
aagcagaaaucgucacaug

SEQ ID NO: 2080882 - RNA, 19 nt, Homo sapiens
  misc_RNA (1)...(19): siRNA sense strand
guaagaagcuccccgaugu

SEQ ID NO: 2080883 - RNA, 19 nt, Homo sapiens
  misc_RNA (1)...(19): siRNA sense strand
guauucguuuggcaguuua

SEQ ID NO: 2080884 - RNA, 19 nt, Homo sapiens
  misc_RNA (1)...(19): siRNA sense strand
ccaugaagcucacauucca

SEQ ID NO: 2080885 - RNA, 19 nt, Homo sapiens
  misc_RNA (1)...(19): siRNA sense strand
uaaguaauuugcccaaggu

SEQ ID NO: 2080886 - RNA, 19 nt, Homo sapiens
  misc_RNA (1)...(19): siRNA sense strand
aagcucacauuccaacauu

SEQ ID NO: 2080887 - RNA, 19 nt, Homo sapiens
  misc_RNA (1)...(19): siRNA sense strand
aaccagaaauggagaagug

SEQ ID NO: 2080888 - RNA, 19 nt, Homo sapiens
  misc_RNA (1)...(19): siRNA sense strand
ggagaaguguucccuuucc

SEQ ID NO: 2080889 - RNA, 19 nt, Homo sapiens
  misc_RNA (1)...(19): siRNA sense strand
uaacucaggcccaaacauc

SEQ ID NO: 2080890 - RNA, 19 nt, Homo sapiens
  misc_RNA (1)...(19): siRNA sense strand
gcccaaacaucuccacacu

SEQ ID NO: 2080891 - RNA, 19 nt, Homo sapiens
  misc_RNA (1)...(19): siRNA sense strand
ggacuugaacccagagaag

SEQ ID NO: 2080892 - RNA, 19 nt, Homo sapiens
  misc_RNA (1)...(19): siRNA sense strand
caggagccauuuaauagag

SEQ ID NO: 2080893 - RNA, 19 nt, Homo sapiens
  misc_RNA (1)...(19): siRNA sense strand
uacaggagccauuuaauag

SEQ ID NO: 2080894 - RNA, 19 nt, Homo sapiens
  misc_RNA (1)...(19): siRNA sense strand
uccagacaaucauaugaaa

SEQ ID NO: 2080895 - RNA, 19 nt, Homo sapiens
  misc_RNA (1)...(19): siRNA sense strand
gaacccagagaagaagauu

SEQ ID NO: 2080896 - RNA, 19 nt, Homo sapiens
  misc_RNA (1)...(19): siRNA sense strand
cgaagucggccucgaguca

SEQ ID NO: 2080897 - RNA, 19 nt, Homo sapiens
  misc_RNA (1)...(19): siRNA sense strand
gaagcucacauuccaacau

SEQ ID NO: 2080898 - RNA, 19 nt, Homo sapiens
  misc_RNA (1)...(19): siRNA sense strand
gagaaguguucccuuucca

SEQ ID NO: 2080899 - RNA, 19 nt, Homo sapiens
  misc_RNA (1)...(19): siRNA sense strand
acaccgagagauuaaguaa

SEQ ID NO: 2080900 - RNA, 19 nt, Homo sapiens
  misc_RNA (1)...(19): siRNA sense strand
auggagaaguguucccuuu

SEQ ID NO: 2080901 - RNA, 19 nt, Homo sapiens
  misc_RNA (1)...(19): siRNA sense strand
aguauucguuuggcaguuu

SEQ ID NO: 2080902 - RNA, 19 nt, Homo sapiens
  misc_RNA (1)...(19): siRNA sense strand
agccaaaacugaaagaaaa

SEQ ID NO: 2080903 - RNA, 19 nt, Homo sapiens
  misc_RNA (1)...(19): siRNA sense strand
ggugaaauaguuaauacag

SEQ ID NO: 2080904 - RNA, 19 nt, Homo sapiens
  misc_RNA (1)...(19): siRNA sense strand
gagagagccacccgaaguc

SEQ ID NO: 2080905 - RNA, 19 nt, Homo sapiens
  misc_RNA (1)...(19): siRNA sense strand
agagagagccacccgaagu

SEQ ID NO: 2080906 - RNA, 19 nt, Homo sapiens
  misc_RNA (1)...(19): siRNA sense strand
ccacuuccaagcagaaauc

SEQ ID NO: 2080907 - RNA, 19 nt, Homo sapiens
  misc_RNA (1)...(19): siRNA sense strand
aaaguguguuugugguugu

SEQ ID NO: 2080908 - RNA, 19 nt, Homo sapiens
  misc_RNA (1)...(19): siRNA sense strand
cagaaauggagaaguguuc

SEQ ID NO: 2080909 - RNA, 19 nt, Homo sapiens
  misc_RNA (1)...(19): siRNA sense strand
ccagaaauggagaaguguu

SEQ ID NO: 2080910 - RNA, 19 nt, Homo sapiens
  misc_RNA (1)...(19): siRNA sense strand
acaggagccauuuaauaga

SEQ ID NO: 2080911 - RNA, 19 nt, Homo sapiens
  misc_RNA (1)...(19): siRNA sense strand
acaggaaggagcagagaga

SEQ ID NO: 2080912 - RNA, 19 nt, Homo sapiens
  misc_RNA (1)...(19): siRNA sense strand
agagcaaacaguauucguu

SEQ ID NO: 2080913 - RNA, 19 nt, Homo sapiens
  misc_RNA (1)...(19): siRNA sense strand
guuuggcaguuuauuugug

SEQ ID NO: 2080914 - RNA, 19 nt, Homo sapiens
  misc_RNA (1)...(19): siRNA sense strand
gacaccgagagauuaagua

SEQ ID NO: 2080915 - RNA, 19 nt, Homo sapiens
  misc_RNA (1)...(19): siRNA sense strand
ccuugacaccgagagauua

SEQ ID NO: 2080916 - RNA, 19 nt, Homo sapiens
  misc_RNA (1)...(19): siRNA sense strand
gacuugaacccagagaaga

SEQ ID NO: 2080917 - RNA, 19 nt, Homo sapiens
  misc_RNA (1)...(19): siRNA sense strand
cagacggggugaaauaguu

SEQ ID NO: 2080918 - RNA, 19 nt, Homo sapiens
  misc_RNA (1)...(19): siRNA sense strand
aguguucccuuuccagaca

SEQ ID NO: 2080919 - RNA, 19 nt, Homo sapiens
  misc_RNA (1)...(19): siRNA sense strand
agagaagaagauuccauga

SEQ ID NO: 2080920 - RNA, 19 nt, Homo sapiens
  misc_RNA (1)...(19): siRNA sense strand
caacaagcacggcagcaaa

SEQ ID NO: 2080921 - RNA, 19 nt, Homo sapiens
  misc_RNA (1)...(19): siRNA sense strand
cauccaggcucaccaguac

SEQ ID NO: 2080922 - RNA, 19 nt, Homo sapiens
  misc_RNA (1)...(19): siRNA sense strand
acacaggcuucgccaacaa

SEQ ID NO: 2080923 - RNA, 19 nt, Homo sapiens
  misc_RNA (1)...(19): siRNA sense strand
gcaaugggaacauccucaa

SEQ ID NO: 2080924 - RNA, 19 nt, Homo sapiens
  misc_RNA (1)...(19): siRNA sense strand
cuccgaagcucuugucaca

SEQ ID NO: 2080925 - RNA, 19 nt, Homo sapiens
  misc_RNA (1)...(19): siRNA sense strand
ucaauucgguggccaucca

SEQ ID NO: 2080926 - RNA, 19 nt, Homo sapiens
  misc_RNA (1)...(19): siRNA sense strand
caaggucagccuccagaug

SEQ ID NO: 2080927 - RNA, 19 nt, Homo sapiens
  misc_RNA (1)...(19): siRNA sense strand
aaugggaacauccucaauu

SEQ ID NO: 2080928 - RNA, 19 nt, Homo sapiens
  misc_RNA (1)...(19): siRNA sense strand
cgccaccgcucuccaacau

SEQ ID NO: 2080929 - RNA, 19 nt, Homo sapiens
  misc_RNA (1)...(19): siRNA sense strand
ggccaccaguccaagcaau

SEQ ID NO: 2080930 - RNA, 19 nt, Homo sapiens
  misc_RNA (1)...(19): siRNA sense strand
augggaacauccucaauuc

SEQ ID NO: 2080931 - RNA, 19 nt, Homo sapiens
  misc_RNA (1)...(19): siRNA sense strand
ccauccaggcucaccagua

SEQ ID NO: 2080932 - RNA, 19 nt, Homo sapiens
  misc_RNA (1)...(19): siRNA sense strand
ccaacaagcacggcagcaa

SEQ ID NO: 2080933 - RNA, 19 nt, Homo sapiens
  misc_RNA (1)...(19): siRNA sense strand
cgaggacagaggagcauga

SEQ ID NO: 2080934 - RNA, 19 nt, Homo sapiens
  misc_RNA (1)...(19): siRNA sense strand
ggacuccgaagcucuuguc

SEQ ID NO: 2080935 - RNA, 19 nt, Homo sapiens
  misc_RNA (1)...(19): siRNA sense strand
ccaggacuccgaagcucuu

SEQ ID NO: 2080936 - RNA, 19 nt, Homo sapiens
  misc_RNA (1)...(19): siRNA sense strand
ugacacagccacuuuggaa

SEQ ID NO: 2080937 - RNA, 19 nt, Homo sapiens
  misc_RNA (1)...(19): siRNA sense strand
gacaugacacagccacuuu

SEQ ID NO: 2080938 - RNA, 19 nt, Homo sapiens
  misc_RNA (1)...(19): siRNA sense strand
gcaaagcucaguggacuca

SEQ ID NO: 2080939 - RNA, 19 nt, Homo sapiens
  misc_RNA (1)...(19): siRNA sense strand
gacauugaaccaacugauu

SEQ ID NO: 2080940 - RNA, 19 nt, Homo sapiens
  misc_RNA (1)...(19): siRNA sense strand
aaagcucaguggacucaaa

SEQ ID NO: 2080941 - RNA, 19 nt, Homo sapiens
  misc_RNA (1)...(19): siRNA sense strand
acauugaaccaacugauuu

SEQ ID NO: 2080942 - RNA, 19 nt, Homo sapiens
  misc_RNA (1)...(19): siRNA sense strand
ggcagucgcucgcaaagcu

SEQ ID NO: 2080943 - RNA, 19 nt, Homo sapiens
  misc_RNA (1)...(19): siRNA sense strand
cauugaaccaacugauuug

SEQ ID NO: 2080944 - RNA, 19 nt, Homo sapiens
  misc_RNA (1)...(19): siRNA sense strand
ucaaugagauggagaugua

SEQ ID NO: 2080945 - RNA, 19 nt, Homo sapiens
  misc_RNA (1)...(19): siRNA sense strand
gcgcugaacccacuuauuu

SEQ ID NO: 2080946 - RNA, 19 nt, Homo sapiens
  misc_RNA (1)...(19): siRNA sense strand
ggaaauagccaaugugagu

SEQ ID NO: 2080947 - RNA, 19 nt, Homo sapiens
  misc_RNA (1)...(19): siRNA sense strand
gcaacuggcuuguguggau

SEQ ID NO: 2080948 - RNA, 19 nt, Homo sapiens
  misc_RNA (1)...(19): siRNA sense strand
gcaagcuggcgcaaauuua

SEQ ID NO: 2080949 - RNA, 19 nt, Homo sapiens
  misc_RNA (1)...(19): siRNA sense strand
acacgacccucacuagaaa

SEQ ID NO: 2080950 - RNA, 19 nt, Homo sapiens
  misc_RNA (1)...(19): siRNA sense strand
gaaacuguccucuucauag

SEQ ID NO: 2080951 - RNA, 19 nt, Homo sapiens
  misc_RNA (1)...(19): siRNA sense strand
guucauagcucuguucuac

SEQ ID NO: 2080952 - RNA, 19 nt, Homo sapiens
  misc_RNA (1)...(19): siRNA sense strand
ccauuacacugucauuaug

SEQ ID NO: 2080953 - RNA, 19 nt, Homo sapiens
  misc_RNA (1)...(19): siRNA sense strand
ggagcaucaucuucaugua

SEQ ID NO: 2080954 - RNA, 19 nt, Homo sapiens
  misc_RNA (1)...(19): siRNA sense strand
gaagaucaggucagcagaa

SEQ ID NO: 2080955 - RNA, 19 nt, Homo sapiens
  misc_RNA (1)...(19): siRNA sense strand
caacuggcuuguguggaua

SEQ ID NO: 2080956 - RNA, 19 nt, Homo sapiens
  misc_RNA (1)...(19): siRNA sense strand
ccacacaccuauguacuuc

SEQ ID NO: 2080957 - RNA, 19 nt, Homo sapiens
  misc_RNA (1)...(19): siRNA sense strand
ucccacagcuccuggcuaa

SEQ ID NO: 2080958 - RNA, 19 nt, Homo sapiens
  misc_RNA (1)...(19): siRNA sense strand
ccuauguacuucuuucuug

SEQ ID NO: 2080959 - RNA, 19 nt, Homo sapiens
  misc_RNA (1)...(19): siRNA sense strand
gagcaucaucuucauguau

SEQ ID NO: 2080960 - RNA, 19 nt, Homo sapiens
  misc_RNA (1)...(19): siRNA sense strand
acuagaaacuguccucuuc

SEQ ID NO: 2080961 - RNA, 19 nt, Homo sapiens
  misc_RNA (1)...(19): siRNA sense strand
ucauaguugucuugaguuu

SEQ ID NO: 2080962 - RNA, 19 nt, Homo sapiens
  misc_RNA (1)...(19): siRNA sense strand
caggcaagcuggcgcaaau

SEQ ID NO: 2080963 - RNA, 19 nt, Homo sapiens
  misc_RNA (1)...(19): siRNA sense strand
gagggugugugguccaguu

SEQ ID NO: 2080964 - RNA, 19 nt, Homo sapiens
  misc_RNA (1)...(19): siRNA sense strand
aaacuguccucuucauagu

SEQ ID NO: 2080965 - RNA, 19 nt, Homo sapiens
  misc_RNA (1)...(19): siRNA sense strand
gcaaguucauagcucuguu

SEQ ID NO: 2080966 - RNA, 19 nt, Homo sapiens
  misc_RNA (1)...(19): siRNA sense strand
gagcagggcaaguucauag

SEQ ID NO: 2080967 - RNA, 19 nt, Homo sapiens
  misc_RNA (1)...(19): siRNA sense strand
gaaauagccaaugugaguu

SEQ ID NO: 2080968 - RNA, 19 nt, Homo sapiens
  misc_RNA (1)...(19): siRNA sense strand
ggugugugguccaguucua

SEQ ID NO: 2080969 - RNA, 19 nt, Homo sapiens
  misc_RNA (1)...(19): siRNA sense strand
gcagaagggcggagaaagg

SEQ ID NO: 2080970 - RNA, 19 nt, Homo sapiens
  misc_RNA (1)...(19): siRNA sense strand
cuucauaguugucuugagu

SEQ ID NO: 2080971 - RNA, 19 nt, Homo sapiens
  misc_RNA (1)...(19): siRNA sense strand
ggccagcuuugucuuuguu

SEQ ID NO: 2080972 - RNA, 19 nt, Homo sapiens
  misc_RNA (1)...(19): siRNA sense strand
ggcaagcuggcgcaaauuu

SEQ ID NO: 2080973 - RNA, 19 nt, Homo sapiens
  misc_RNA (1)...(19): siRNA sense strand
guaucgaucuugggcaaug

SEQ ID NO: 2080974 - RNA, 19 nt, Homo sapiens
  misc_RNA (1)...(19): siRNA sense strand
gacccucacuagaaacugu

SEQ ID NO: 2080975 - RNA, 19 nt, Homo sapiens
  misc_RNA (1)...(19): siRNA sense strand
ccaagagcaccucccauga

SEQ ID NO: 2080976 - RNA, 19 nt, Homo sapiens
  misc_RNA (1)...(19): siRNA sense strand
acaauugcaucgaccacuu

SEQ ID NO: 2080977 - RNA, 19 nt, Homo sapiens
  misc_RNA (1)...(19): siRNA sense strand
acacaccuauguacuucuu

SEQ ID NO: 2080978 - RNA, 19 nt, Homo sapiens
  misc_RNA (1)...(19): siRNA sense strand
ggagaaaggcauucaacac

SEQ ID NO: 2080979 - RNA, 19 nt, Homo sapiens
  misc_RNA (1)...(19): siRNA sense strand
gcacaugguauuagagaac

SEQ ID NO: 2080980 - RNA, 19 nt, Homo sapiens
  misc_RNA (1)...(19): siRNA sense strand
agauguaccuggccagcuu

SEQ ID NO: 2080981 - RNA, 19 nt, Homo sapiens
  misc_RNA (1)...(19): siRNA sense strand
uagaaacuguccucuucau

SEQ ID NO: 2080982 - RNA, 19 nt, Homo sapiens
  misc_RNA (1)...(19): siRNA sense strand
caagcuggcgcaaauuuag

SEQ ID NO: 2080983 - RNA, 19 nt, Homo sapiens
  misc_RNA (1)...(19): siRNA sense strand
ggcucauccuggucucuua

SEQ ID NO: 2080984 - RNA, 19 nt, Homo sapiens
  misc_RNA (1)...(19): siRNA sense strand
ccacacgacccucacuaga

SEQ ID NO: 2080985 - RNA, 19 nt, Homo sapiens
  misc_RNA (1)...(19): siRNA sense strand
uugcaucgaccacuucuuu

SEQ ID NO: 2080986 - RNA, 19 nt, Homo sapiens
  misc_RNA (1)...(19): siRNA sense strand
gcaggccacuccauuacac

SEQ ID NO: 2080987 - RNA, 19 nt, Homo sapiens
  misc_RNA (1)...(19): siRNA sense strand
agaaacuguccucuucaua

SEQ ID NO: 2080988 - RNA, 19 nt, Homo sapiens
  misc_RNA (1)...(19): siRNA sense strand
caagagcaccucccaugag

SEQ ID NO: 2080989 - RNA, 19 nt, Homo sapiens
  misc_RNA (1)...(19): siRNA sense strand
gggagcaucaucuucaugu

SEQ ID NO: 2080990 - RNA, 19 nt, Homo sapiens
  misc_RNA (1)...(19): siRNA sense strand
cacacgacccucacuagaa

SEQ ID NO: 2080991 - RNA, 19 nt, Homo sapiens
  misc_RNA (1)...(19): siRNA sense strand
guggauaccagccucaaug

SEQ ID NO: 2080992 - RNA, 19 nt, Homo sapiens
  misc_RNA (1)...(19): siRNA sense strand
cauuaugcauccacagcuu

SEQ ID NO: 2080993 - RNA, 19 nt, Homo sapiens
  misc_RNA (1)...(19): siRNA sense strand
uggccaccauguccuauga

SEQ ID NO: 2080994 - RNA, 19 nt, Homo sapiens
  misc_RNA (1)...(19): siRNA sense strand
acaccuauguacuucuuuc

SEQ ID NO: 2080995 - RNA, 19 nt, Homo sapiens
  misc_RNA (1)...(19): siRNA sense strand
uuaugcaacuggcuugugu

SEQ ID NO: 2080996 - RNA, 19 nt, Homo sapiens
  misc_RNA (1)...(19): siRNA sense strand
ucauagcucuguucuacac

SEQ ID NO: 2080997 - RNA, 19 nt, Homo sapiens
  misc_RNA (1)...(19): siRNA sense strand
gcuccacgcucaccaugcu

SEQ ID NO: 2080998 - RNA, 19 nt, Homo sapiens
  misc_RNA (1)...(19): siRNA sense strand
gcugaacccacuuauuuac

SEQ ID NO: 2080999 - RNA, 19 nt, Homo sapiens
  misc_RNA (1)...(19): siRNA sense strand
cgcugaacccacuuauuua

SEQ ID NO: 2081000 - RNA, 19 nt, Homo sapiens
  misc_RNA (1)...(19): siRNA sense strand
acuguccucuucauaguug

SEQ ID NO: 2081001 - RNA, 19 nt, Homo sapiens
  misc_RNA (1)...(19): siRNA sense strand
gagcuucaccacgagcauu

SEQ ID NO: 2081002 - RNA, 19 nt, Homo sapiens
  misc_RNA (1)...(19): siRNA sense strand
ggaacacggaggugaagag

SEQ ID NO: 2081003 - RNA, 19 nt, Homo sapiens
  misc_RNA (1)...(19): siRNA sense strand
ccacuccauuacacuguca

SEQ ID NO: 2081004 - RNA, 19 nt, Homo sapiens
  misc_RNA (1)...(19): siRNA sense strand
ucugcaggccacuccauua

SEQ ID NO: 2081005 - RNA, 19 nt, Homo sapiens
  misc_RNA (1)...(19): siRNA sense strand
cagcagaagggcggagaaa

SEQ ID NO: 2081006 - RNA, 19 nt, Homo sapiens
  misc_RNA (1)...(19): siRNA sense strand
ggcacaugguauuagagaa

SEQ ID NO: 2081007 - RNA, 19 nt, Homo sapiens
  misc_RNA (1)...(19): siRNA sense strand
uccauuacacugucauuau

SEQ ID NO: 2081008 - RNA, 19 nt, Homo sapiens
  misc_RNA (1)...(19): siRNA sense strand
ugaggaacacggaggugaa

SEQ ID NO: 2081009 - RNA, 19 nt, Homo sapiens
  misc_RNA (1)...(19): siRNA sense strand
ggucucccauacagaugug

SEQ ID NO: 2081010 - RNA, 19 nt, Homo sapiens
  misc_RNA (1)...(19): siRNA sense strand
gauggaaauagccaaugug

SEQ ID NO: 2081011 - RNA, 19 nt, Homo sapiens
  misc_RNA (1)...(19): siRNA sense strand
gcaggcaagcuggcgcaaa

SEQ ID NO: 2081012 - RNA, 19 nt, Homo sapiens
  misc_RNA (1)...(19): siRNA sense strand
ugaacccacuuauuuacac

SEQ ID NO: 2081013 - RNA, 19 nt, Homo sapiens
  misc_RNA (1)...(19): siRNA sense strand
caaguucauagcucuguuc

SEQ ID NO: 2081014 - RNA, 19 nt, Homo sapiens
  misc_RNA (1)...(19): siRNA sense strand
gcaucaucuucauguaucu

SEQ ID NO: 2081015 - RNA, 19 nt, Homo sapiens
  misc_RNA (1)...(19): siRNA sense strand
gugguccaguucuauaucu

SEQ ID NO: 2081016 - RNA, 19 nt, Homo sapiens
  misc_RNA (1)...(19): siRNA sense strand
gcuguggugucucuguuuu

SEQ ID NO: 2081017 - RNA, 19 nt, Homo sapiens
  misc_RNA (1)...(19): siRNA sense strand
guaccuggccagcuuuguc

SEQ ID NO: 2081018 - RNA, 19 nt, Homo sapiens
  misc_RNA (1)...(19): siRNA sense strand
gauguaccuggccagcuuu

SEQ ID NO: 2081019 - RNA, 19 nt, Homo sapiens
  misc_RNA (1)...(19): siRNA sense strand
aguucuauaucucccauug

SEQ ID NO: 2081020 - RNA, 19 nt, Homo sapiens
  misc_RNA (1)...(19): siRNA sense strand
cggcacaugguauuagaga

SEQ ID NO: 2081021 - RNA, 19 nt, Homo sapiens
  misc_RNA (1)...(19): siRNA sense strand
gugcaccuccacacaccua

SEQ ID NO: 2081022 - RNA, 19 nt, Homo sapiens
  misc_RNA (1)...(19): siRNA sense strand
ucaaugagauggagaugua

SEQ ID NO: 2081023 - RNA, 19 nt, Homo sapiens
  misc_RNA (1)...(19): siRNA sense strand
gcgcugaacccacuuauuu

SEQ ID NO: 2081024 - RNA, 19 nt, Homo sapiens
  misc_RNA (1)...(19): siRNA sense strand
ggaaauagccaaugugagu

SEQ ID NO: 2081025 - RNA, 19 nt, Homo sapiens
  misc_RNA (1)...(19): siRNA sense strand
gcaacuggcuuguguggau

SEQ ID NO: 2081026 - RNA, 19 nt, Homo sapiens
  misc_RNA (1)...(19): siRNA sense strand
gcaagcuggcgcaaauuua

SEQ ID NO: 2081027 - RNA, 19 nt, Homo sapiens
  misc_RNA (1)...(19): siRNA sense strand
acacgacccucacuagaaa

SEQ ID NO: 2081028 - RNA, 19 nt, Homo sapiens
  misc_RNA (1)...(19): siRNA sense strand
gaaacuguccucuucauag

SEQ ID NO: 2081029 - RNA, 19 nt, Homo sapiens
  misc_RNA (1)...(19): siRNA sense strand
guucauagcucuguucuac

SEQ ID NO: 2081030 - RNA, 19 nt, Homo sapiens
  misc_RNA (1)...(19): siRNA sense strand
ccauuacacugucauuaug

SEQ ID NO: 2081031 - RNA, 19 nt, Homo sapiens
  misc_RNA (1)...(19): siRNA sense strand
ggagcaucaucuucaugua

SEQ ID NO: 2081032 - RNA, 19 nt, Homo sapiens
  misc_RNA (1)...(19): siRNA sense strand
gaagaucaggucagcagaa

SEQ ID NO: 2081033 - RNA, 19 nt, Homo sapiens
  misc_RNA (1)...(19): siRNA sense strand
caacuggcuuguguggaua

SEQ ID NO: 2081034 - RNA, 19 nt, Homo sapiens
  misc_RNA (1)...(19): siRNA sense strand
ccacacaccuauguacuuc

SEQ ID NO: 2081035 - RNA, 19 nt, Homo sapiens
  misc_RNA (1)...(19): siRNA sense strand
ucccacagcuccuggcuaa

SEQ ID NO: 2081036 - RNA, 19 nt, Homo sapiens
  misc_RNA (1)...(19): siRNA sense strand
ccuauguacuucuuucuug

SEQ ID NO: 2081037 - RNA, 19 nt, Homo sapiens
  misc_RNA (1)...(19): siRNA sense strand
gagcaucaucuucauguau

SEQ ID NO: 2081038 - RNA, 19 nt, Homo sapiens
  misc_RNA (1)...(19): siRNA sense strand
acuagaaacuguccucuuc

SEQ ID NO: 2081039 - RNA, 19 nt, Homo sapiens
  misc_RNA (1)...(19): siRNA sense strand
ucauaguugucuugaguuu

SEQ ID NO: 2081040 - RNA, 19 nt, Homo sapiens
  misc_RNA (1)...(19): siRNA sense strand
caggcaagcuggcgcaaau

SEQ ID NO: 2081041 - RNA, 19 nt, Homo sapiens
  misc_RNA (1)...(19): siRNA sense strand
gagggugugugguccaguu

SEQ ID NO: 2081042 - RNA, 19 nt, Homo sapiens
  misc_RNA (1)...(19): siRNA sense strand
aaacuguccucuucauagu

SEQ ID NO: 2081043 - RNA, 19 nt, Homo sapiens
  misc_RNA (1)...(19): siRNA sense strand
gcaaguucauagcucuguu

SEQ ID NO: 2081044 - RNA, 19 nt, Homo sapiens
  misc_RNA (1)...(19): siRNA sense strand
gagcagggcaaguucauag

SEQ ID NO: 2081045 - RNA, 19 nt, Homo sapiens
  misc_RNA (1)...(19): siRNA sense strand
gaaauagccaaugugaguu

SEQ ID NO: 2081046 - RNA, 19 nt, Homo sapiens
  misc_RNA (1)...(19): siRNA sense strand
ggugugugguccaguucua

SEQ ID NO: 2081047 - RNA, 19 nt, Homo sapiens
  misc_RNA (1)...(19): siRNA sense strand
gcagaagggcggagaaagg

SEQ ID NO: 2081048 - RNA, 19 nt, Homo sapiens
  misc_RNA (1)...(19): siRNA sense strand
cuucauaguugucuugagu

SEQ ID NO: 2081049 - RNA, 19 nt, Homo sapiens
  misc_RNA (1)...(19): siRNA sense strand
ggccagcuuugucuuuguu

SEQ ID NO: 2081050 - RNA, 19 nt, Homo sapiens
  misc_RNA (1)...(19): siRNA sense strand
ggcaagcuggcgcaaauuu

SEQ ID NO: 2081051 - RNA, 19 nt, Homo sapiens
  misc_RNA (1)...(19): siRNA sense strand
guaucgaucuugggcaaug

SEQ ID NO: 2081052 - RNA, 19 nt, Homo sapiens
  misc_RNA (1)...(19): siRNA sense strand
gacccucacuagaaacugu

SEQ ID NO: 2081053 - RNA, 19 nt, Homo sapiens
  misc_RNA (1)...(19): siRNA sense strand
ccaagagcaccucccauga

SEQ ID NO: 2081054 - RNA, 19 nt, Homo sapiens
  misc_RNA (1)...(19): siRNA sense strand
acaauugcaucgaccacuu

SEQ ID NO: 2081055 - RNA, 19 nt, Homo sapiens
  misc_RNA (1)...(19): siRNA sense strand
acacaccuauguacuucuu

SEQ ID NO: 2081056 - RNA, 19 nt, Homo sapiens
  misc_RNA (1)...(19): siRNA sense strand
ggagaaaggcauucaacac

SEQ ID NO: 2081057 - RNA, 19 nt, Homo sapiens
  misc_RNA (1)...(19): siRNA sense strand
gcacaugguauuagagaac

SEQ ID NO: 2081058 - RNA, 19 nt, Homo sapiens
  misc_RNA (1)...(19): siRNA sense strand
agauguaccuggccagcuu

SEQ ID NO: 2081059 - RNA, 19 nt, Homo sapiens
  misc_RNA (1)...(19): siRNA sense strand
uagaaacuguccucuucau

SEQ ID NO: 2081060 - RNA, 19 nt, Homo sapiens
  misc_RNA (1)...(19): siRNA sense strand
caagcuggcgcaaauuuag

SEQ ID NO: 2081061 - RNA, 19 nt, Homo sapiens
  misc_RNA (1)...(19): siRNA sense strand
ggcucauccuggucucuua

SEQ ID NO: 2081062 - RNA, 19 nt, Homo sapiens
  misc_RNA (1)...(19): siRNA sense strand
ccacacgacccucacuaga

SEQ ID NO: 2081063 - RNA, 19 nt, Homo sapiens
  misc_RNA (1)...(19): siRNA sense strand
uugcaucgaccacuucuuu

SEQ ID NO: 2081064 - RNA, 19 nt, Homo sapiens
  misc_RNA (1)...(19): siRNA sense strand
gcaggccacuccauuacac

SEQ ID NO: 2081065 - RNA, 19 nt, Homo sapiens
  misc_RNA (1)...(19): siRNA sense strand
agaaacuguccucuucaua

SEQ ID NO: 2081066 - RNA, 19 nt, Homo sapiens
  misc_RNA (1)...(19): siRNA sense strand
caagagcaccucccaugag

SEQ ID NO: 2081067 - RNA, 19 nt, Homo sapiens
  misc_RNA (1)...(19): siRNA sense strand
gggagcaucaucuucaugu

SEQ ID NO: 2081068 - RNA, 19 nt, Homo sapiens
  misc_RNA (1)...(19): siRNA sense strand
cacacgacccucacuagaa

SEQ ID NO: 2081069 - RNA, 19 nt, Homo sapiens
  misc_RNA (1)...(19): siRNA sense strand
guggauaccagccucaaug

SEQ ID NO: 2081070 - RNA, 19 nt, Homo sapiens
  misc_RNA (1)...(19): siRNA sense strand
cauuaugcauccacagcuu

SEQ ID NO: 2081071 - RNA, 19 nt, Homo sapiens
  misc_RNA (1)...(19): siRNA sense strand
uggccaccauguccuauga

SEQ ID NO: 2081072 - RNA, 19 nt, Homo sapiens
  misc_RNA (1)...(19): siRNA sense strand
acaccuauguacuucuuuc

SEQ ID NO: 2081073 - RNA, 19 nt, Homo sapiens
  misc_RNA (1)...(19): siRNA sense strand
uuaugcaacuggcuugugu

SEQ ID NO: 2081074 - RNA, 19 nt, Homo sapiens
  misc_RNA (1)...(19): siRNA sense strand
ucauagcucuguucuacac

SEQ ID NO: 2081075 - RNA, 19 nt, Homo sapiens
  misc_RNA (1)...(19): siRNA sense strand
gcuccacgcucaccaugcu

SEQ ID NO: 2081076 - RNA, 19 nt, Homo sapiens
  misc_RNA (1)...(19): siRNA sense strand
gcugaacccacuuauuuac

SEQ ID NO: 2081077 - RNA, 19 nt, Homo sapiens
  misc_RNA (1)...(19): siRNA sense strand
cgcugaacccacuuauuua

SEQ ID NO: 2081078 - RNA, 19 nt, Homo sapiens
  misc_RNA (1)...(19): siRNA sense strand
acuguccucuucauaguug

SEQ ID NO: 2081079 - RNA, 19 nt, Homo sapiens
  misc_RNA (1)...(19): siRNA sense strand
gagcuucaccacgagcauu

SEQ ID NO: 2081080 - RNA, 19 nt, Homo sapiens
  misc_RNA (1)...(19): siRNA sense strand
ggaacacggaggugaagag

SEQ ID NO: 2081081 - RNA, 19 nt, Homo sapiens
  misc_RNA (1)...(19): siRNA sense strand
ccacuccauuacacuguca

SEQ ID NO: 2081082 - RNA, 19 nt, Homo sapiens
  misc_RNA (1)...(19): siRNA sense strand
ucugcaggccacuccauua

SEQ ID NO: 2081083 - RNA, 19 nt, Homo sapiens
  misc_RNA (1)...(19): siRNA sense strand
cagcagaagggcggagaaa

SEQ ID NO: 2081084 - RNA, 19 nt, Homo sapiens
  misc_RNA (1)...(19): siRNA sense strand
ggcacaugguauuagagaa

SEQ ID NO: 2081085 - RNA, 19 nt, Homo sapiens
  misc_RNA (1)...(19): siRNA sense strand
uccauuacacugucauuau

SEQ ID NO: 2081086 - RNA, 19 nt, Homo sapiens
  misc_RNA (1)...(19): siRNA sense strand
ugaggaacacggaggugaa

SEQ ID NO: 2081087 - RNA, 19 nt, Homo sapiens
  misc_RNA (1)...(19): siRNA sense strand
ggucucccauacagaugug

SEQ ID NO: 2081088 - RNA, 19 nt, Homo sapiens
  misc_RNA (1)...(19): siRNA sense strand
gauggaaauagccaaugug

SEQ ID NO: 2081089 - RNA, 19 nt, Homo sapiens
  misc_RNA (1)...(19): siRNA sense strand
gcaggcaagcuggcgcaaa

SEQ ID NO: 2081090 - RNA, 19 nt, Homo sapiens
  misc_RNA (1)...(19): siRNA sense strand
ugaacccacuuauuuacac

SEQ ID NO: 2081091 - RNA, 19 nt, Homo sapiens
  misc_RNA (1)...(19): siRNA sense strand
caaguucauagcucuguuc

SEQ ID NO: 2081092 - RNA, 19 nt, Homo sapiens
  misc_RNA (1)...(19): siRNA sense strand
gcaucaucuucauguaucu

SEQ ID NO: 2081093 - RNA, 19 nt, Homo sapiens
  misc_RNA (1)...(19): siRNA sense strand
gugguccaguucuauaucu

SEQ ID NO: 2081094 - RNA, 19 nt, Homo sapiens
  misc_RNA (1)...(19): siRNA sense strand
gcuguggugucucuguuuu

SEQ ID NO: 2081095 - RNA, 19 nt, Homo sapiens
  misc_RNA (1)...(19): siRNA sense strand
guaccuggccagcuuuguc

SEQ ID NO: 2081096 - RNA, 19 nt, Homo sapiens
  misc_RNA (1)...(19): siRNA sense strand
gauguaccuggccagcuuu

SEQ ID NO: 2081097 - RNA, 19 nt, Homo sapiens
  misc_RNA (1)...(19): siRNA sense strand
aguucuauaucucccauug

SEQ ID NO: 2081098 - RNA, 19 nt, Homo sapiens
  misc_RNA (1)...(19): siRNA sense strand
cggcacaugguauuagaga

SEQ ID NO: 2081099 - RNA, 19 nt, Homo sapiens
  misc_RNA (1)...(19): siRNA sense strand
gugcaccuccacacaccua

SEQ ID NO: 2081100 - RNA, 19 nt, Homo sapiens
  misc_RNA (1)...(19): siRNA sense strand
ccaaaggccuugaugaaau

SEQ ID NO: 2081101 - RNA, 19 nt, Homo sapiens
  misc_RNA (1)...(19): siRNA sense strand
caacaaagaugcggaggau

SEQ ID NO: 2081102 - RNA, 19 nt, Homo sapiens
  misc_RNA (1)...(19): siRNA sense strand
caaaggccuugaugaaauc

SEQ ID NO: 2081103 - RNA, 19 nt, Homo sapiens
  misc_RNA (1)...(19): siRNA sense strand
gaaagcgagugcacauucu

SEQ ID NO: 2081104 - RNA, 19 nt, Homo sapiens
  misc_RNA (1)...(19): siRNA sense strand
ggagaacgcauccaaacug

SEQ ID NO: 2081105 - RNA, 19 nt, Homo sapiens
  misc_RNA (1)...(19): siRNA sense strand
acaaagaugcggaggauga

SEQ ID NO: 2081106 - RNA, 19 nt, Homo sapiens
  misc_RNA (1)...(19): siRNA sense strand
gcccaaaggccuugaugaa

SEQ ID NO: 2081107 - RNA, 19 nt, Homo sapiens
  misc_RNA (1)...(19): siRNA sense strand
ugacuucgcccaccucuuc

SEQ ID NO: 2081108 - RNA, 19 nt, Homo sapiens
  misc_RNA (1)...(19): siRNA sense strand
cauccaaacugcccaaagg

SEQ ID NO: 2081109 - RNA, 19 nt, Homo sapiens
  misc_RNA (1)...(19): siRNA sense strand
gaccucagcuacaacaacu

SEQ ID NO: 2081110 - RNA, 19 nt, Homo sapiens
  misc_RNA (1)...(19): siRNA sense strand
ugaaagcgagugcacauuc

SEQ ID NO: 2081111 - RNA, 19 nt, Homo sapiens
  misc_RNA (1)...(19): siRNA sense strand
gggaggcuggugaagcuua

SEQ ID NO: 2081112 - RNA, 19 nt, Homo sapiens
  misc_RNA (1)...(19): siRNA sense strand
gaccucugcaucaucauuu

SEQ ID NO: 2081113 - RNA, 19 nt, Homo sapiens
  misc_RNA (1)...(19): siRNA sense strand
caucaucuccagcuucuuc

SEQ ID NO: 2081114 - RNA, 19 nt, Homo sapiens
  misc_RNA (1)...(19): siRNA sense strand
gaggacuucuucaucuucu

SEQ ID NO: 2081115 - RNA, 19 nt, Homo sapiens
  misc_RNA (1)...(19): siRNA sense strand
ggaggcuggugaagcuuag

SEQ ID NO: 2081116 - RNA, 19 nt, Homo sapiens
  misc_RNA (1)...(19): siRNA sense strand
gccaucaucuccagcuucu

SEQ ID NO: 2081117 - RNA, 19 nt, Homo sapiens
  misc_RNA (1)...(19): siRNA sense strand
ccgaggacuucuucaucuu

SEQ ID NO: 2081118 - RNA, 19 nt, Homo sapiens
  misc_RNA (1)...(19): siRNA sense strand
caaagaugcggaggaugaa

SEQ ID NO: 2081119 - RNA, 19 nt, Homo sapiens
  misc_RNA (1)...(19): siRNA sense strand
cccaaaggccuugaugaaa

SEQ ID NO: 2081120 - RNA, 19 nt, Homo sapiens
  misc_RNA (1)...(19): siRNA sense strand
gcugugcgacugugacuuc

SEQ ID NO: 2081121 - RNA, 19 nt, Homo sapiens
  misc_RNA (1)...(19): siRNA sense strand
ccaggagaacgcauccaaa

SEQ ID NO: 2081122 - RNA, 19 nt, Homo sapiens
  misc_RNA (1)...(19): siRNA sense strand
gguguggccguguccauug

SEQ ID NO: 2081123 - RNA, 19 nt, Homo sapiens
  misc_RNA (1)...(19): siRNA sense strand
ggacuucuucaucuucuac

SEQ ID NO: 2081124 - RNA, 19 nt, Homo sapiens
  misc_RNA (1)...(19): siRNA sense strand
cgaggacaaggaugacuga

SEQ ID NO: 2081125 - RNA, 19 nt, Homo sapiens
  misc_RNA (1)...(19): siRNA sense strand
ggaugaagacgaggacaag

SEQ ID NO: 2081126 - RNA, 19 nt, Homo sapiens
  misc_RNA (1)...(19): siRNA sense strand
ccucagcuacaacaacuug

SEQ ID NO: 2081127 - RNA, 19 nt, Homo sapiens
  misc_RNA (1)...(19): siRNA sense strand
cccgaggacuucuucaucu

SEQ ID NO: 2081128 - RNA, 19 nt, Homo sapiens
  misc_RNA (1)...(19): siRNA sense strand
ugcuggagcucaacgacaa

SEQ ID NO: 2081129 - RNA, 19 nt, Homo sapiens
  misc_RNA (1)...(19): siRNA sense strand
aagacgaggacaaggauga

SEQ ID NO: 2081130 - RNA, 19 nt, Homo sapiens
  misc_RNA (1)...(19): siRNA sense strand
ugaagacgaggacaaggau

SEQ ID NO: 2081131 - RNA, 19 nt, Homo sapiens
  misc_RNA (1)...(19): siRNA sense strand
caggagaacgcauccaaac

SEQ ID NO: 2081132 - RNA, 19 nt, Homo sapiens
  misc_RNA (1)...(19): siRNA sense strand
cgaggacuucuucaucuuc

SEQ ID NO: 2081133 - RNA, 19 nt, Homo sapiens
  misc_RNA (1)...(19): siRNA sense strand
ggacaaggaugaaauaauu

SEQ ID NO: 2081134 - RNA, 19 nt, Homo sapiens
  misc_RNA (1)...(19): siRNA sense strand
gaacaaagcgugaucucua

SEQ ID NO: 2081135 - RNA, 19 nt, Homo sapiens
  misc_RNA (1)...(19): siRNA sense strand
gaagaaggcuuuggcgaaa

SEQ ID NO: 2081136 - RNA, 19 nt, Homo sapiens
  misc_RNA (1)...(19): siRNA sense strand
aagaagagaucauggaaua

SEQ ID NO: 2081137 - RNA, 19 nt, Homo sapiens
  misc_RNA (1)...(19): siRNA sense strand
uagcaaaccugcagaauga

SEQ ID NO: 2081138 - RNA, 19 nt, Homo sapiens
  misc_RNA (1)...(19): siRNA sense strand
ucacaucccugaagaauga

SEQ ID NO: 2081139 - RNA, 19 nt, Homo sapiens
  misc_RNA (1)...(19): siRNA sense strand
gaaaucacaucccugaaga

SEQ ID NO: 2081140 - RNA, 19 nt, Homo sapiens
  misc_RNA (1)...(19): siRNA sense strand
gaagagaucauggaauaua

SEQ ID NO: 2081141 - RNA, 19 nt, Homo sapiens
  misc_RNA (1)...(19): siRNA sense strand
gaaggaagcauuagaggaa

SEQ ID NO: 2081142 - RNA, 19 nt, Homo sapiens
  misc_RNA (1)...(19): siRNA sense strand
gcagaaagaggaauuagaa

SEQ ID NO: 2081143 - RNA, 19 nt, Homo sapiens
  misc_RNA (1)...(19): siRNA sense strand
gaacagagagagcgucauu

SEQ ID NO: 2081144 - RNA, 19 nt, Homo sapiens
  misc_RNA (1)...(19): siRNA sense strand
guacauuacucaagagaga

SEQ ID NO: 2081145 - RNA, 19 nt, Homo sapiens
  misc_RNA (1)...(19): siRNA sense strand
uggcaaagcuggaggauga

SEQ ID NO: 2081146 - RNA, 19 nt, Homo sapiens
  misc_RNA (1)...(19): siRNA sense strand
gagcggaacucagaaauca

SEQ ID NO: 2081147 - RNA, 19 nt, Homo sapiens
  misc_RNA (1)...(19): siRNA sense strand
ggauguggcugaggcuuua

SEQ ID NO: 2081148 - RNA, 19 nt, Homo sapiens
  misc_RNA (1)...(19): siRNA sense strand
uaaaggcccuccaggauga

SEQ ID NO: 2081149 - RNA, 19 nt, Homo sapiens
  misc_RNA (1)...(19): siRNA sense strand
ucugauagaugacuuauug

SEQ ID NO: 2081150 - RNA, 19 nt, Homo sapiens
  misc_RNA (1)...(19): siRNA sense strand
ggagcaaaguguccauuga

SEQ ID NO: 2081151 - RNA, 19 nt, Homo sapiens
  misc_RNA (1)...(19): siRNA sense strand
ggagacauccugagauuug

SEQ ID NO: 2081152 - RNA, 19 nt, Homo sapiens
  misc_RNA (1)...(19): siRNA sense strand
gagccucgccuugaaauua

SEQ ID NO: 2081153 - RNA, 19 nt, Homo sapiens
  misc_RNA (1)...(19): siRNA sense strand
agaaagagauccagagcuu

SEQ ID NO: 2081154 - RNA, 19 nt, Homo sapiens
  misc_RNA (1)...(19): siRNA sense strand
gaccaacaguuaauagaga

SEQ ID NO: 2081155 - RNA, 19 nt, Homo sapiens
  misc_RNA (1)...(19): siRNA sense strand
gaucagugcccuacagaaa

SEQ ID NO: 2081156 - RNA, 19 nt, Homo sapiens
  misc_RNA (1)...(19): siRNA sense strand
ccaaagacauggcguacga

SEQ ID NO: 2081157 - RNA, 19 nt, Homo sapiens
  misc_RNA (1)...(19): siRNA sense strand
uaaagaaccucagaaugga

SEQ ID NO: 2081158 - RNA, 19 nt, Homo sapiens
  misc_RNA (1)...(19): siRNA sense strand
gauaagaucacccaacuca

SEQ ID NO: 2081159 - RNA, 19 nt, Homo sapiens
  misc_RNA (1)...(19): siRNA sense strand
cugcagggcugaccuauga

SEQ ID NO: 2081160 - RNA, 19 nt, Homo sapiens
  misc_RNA (1)...(19): siRNA sense strand
ggaggaugauaucuacaaa

SEQ ID NO: 2081161 - RNA, 19 nt, Homo sapiens
  misc_RNA (1)...(19): siRNA sense strand
ccaacucucucaagaauag

SEQ ID NO: 2081162 - RNA, 19 nt, Homo sapiens
  misc_RNA (1)...(19): siRNA sense strand
gaagagaaacuccagaaag

SEQ ID NO: 2081163 - RNA, 19 nt, Homo sapiens
  misc_RNA (1)...(19): siRNA sense strand
caacauugcguacgagaaa

SEQ ID NO: 2081164 - RNA, 19 nt, Homo sapiens
  misc_RNA (1)...(19): siRNA sense strand
agacaacgcuaucacauca

SEQ ID NO: 2081165 - RNA, 19 nt, Homo sapiens
  misc_RNA (1)...(19): siRNA sense strand
agaaggagaucucgcagaa

SEQ ID NO: 2081166 - RNA, 19 nt, Homo sapiens
  misc_RNA (1)...(19): siRNA sense strand
gcaggacaaggaugaaaua

SEQ ID NO: 2081167 - RNA, 19 nt, Homo sapiens
  misc_RNA (1)...(19): siRNA sense strand
ggaaaacaauguccagaaa

SEQ ID NO: 2081168 - RNA, 19 nt, Homo sapiens
  misc_RNA (1)...(19): siRNA sense strand
caaaggaggccauggagaa

SEQ ID NO: 2081169 - RNA, 19 nt, Homo sapiens
  misc_RNA (1)...(19): siRNA sense strand
gccaugaccugaagaagga

SEQ ID NO: 2081170 - RNA, 19 nt, Homo sapiens
  misc_RNA (1)...(19): siRNA sense strand
caaauacaaagacgucaua

SEQ ID NO: 2081171 - RNA, 19 nt, Homo sapiens
  misc_RNA (1)...(19): siRNA sense strand
gaaugagggcgagaacuua

SEQ ID NO: 2081172 - RNA, 19 nt, Homo sapiens
  misc_RNA (1)...(19): siRNA sense strand
gaaaagcuguaccuggaua

SEQ ID NO: 2081173 - RNA, 19 nt, Homo sapiens
  misc_RNA (1)...(19): siRNA sense strand
gaugaaggccuaucuaaag

SEQ ID NO: 2081174 - RNA, 19 nt, Homo sapiens
  misc_RNA (1)...(19): siRNA sense strand
ugauauaucuucuggaaca

SEQ ID NO: 2081175 - RNA, 19 nt, Homo sapiens
  misc_RNA (1)...(19): siRNA sense strand
caaccaccaugcacucauu

SEQ ID NO: 2081176 - RNA, 19 nt, Homo sapiens
  misc_RNA (1)...(19): siRNA sense strand
gcagagagccucgccuuga

SEQ ID NO: 2081177 - RNA, 19 nt, Homo sapiens
  misc_RNA (1)...(19): siRNA sense strand
gcucaucccuggagacauc

SEQ ID NO: 2081178 - RNA, 19 nt, Homo sapiens
  misc_RNA (1)...(19): siRNA sense strand
gaaagucacucagcaccau

SEQ ID NO: 2081179 - RNA, 19 nt, Homo sapiens
  misc_RNA (1)...(19): siRNA sense strand
aaagcaagguugaagagaa

SEQ ID NO: 2081180 - RNA, 19 nt, Homo sapiens
  misc_RNA (1)...(19): siRNA sense strand
gggcagagcugaggaagag

SEQ ID NO: 2081181 - RNA, 19 nt, Homo sapiens
  misc_RNA (1)...(19): siRNA sense strand
gaggaagaguuguacugaa

SEQ ID NO: 2081182 - RNA, 19 nt, Homo sapiens
  misc_RNA (1)...(19): siRNA sense strand
aaaggcaacugaaagucua

SEQ ID NO: 2081183 - RNA, 19 nt, Homo sapiens
  misc_RNA (1)...(19): siRNA sense strand
gagaagauggcccagauga

SEQ ID NO: 2081184 - RNA, 19 nt, Homo sapiens
  misc_RNA (1)...(19): siRNA sense strand
ucagccgucucucagauua

SEQ ID NO: 2081185 - RNA, 19 nt, Homo sapiens
  misc_RNA (1)...(19): siRNA sense strand
ggaugaaggccuaucuaaa

SEQ ID NO: 2081186 - RNA, 19 nt, Homo sapiens
  misc_RNA (1)...(19): siRNA sense strand
ggaagucucaugaacauca

SEQ ID NO: 2081187 - RNA, 19 nt, Homo sapiens
  misc_RNA (1)...(19): siRNA sense strand
aagagaaacuccagaaagu

SEQ ID NO: 2081188 - RNA, 19 nt, Homo sapiens
  misc_RNA (1)...(19): siRNA sense strand
gaauauaaggagcaaauca

SEQ ID NO: 2081189 - RNA, 19 nt, Homo sapiens
  misc_RNA (1)...(19): siRNA sense strand
ggaagagaaugcaagaacu

SEQ ID NO: 2081190 - RNA, 19 nt, Homo sapiens
  misc_RNA (1)...(19): siRNA sense strand
gaacuggaaacuaccaaga

SEQ ID NO: 2081191 - RNA, 19 nt, Homo sapiens
  misc_RNA (1)...(19): siRNA sense strand
guucaacaguucucaggaa

SEQ ID NO: 2081192 - RNA, 19 nt, Homo sapiens
  misc_RNA (1)...(19): siRNA sense strand
gagaaacuccagaaaguca

SEQ ID NO: 2081193 - RNA, 19 nt, Homo sapiens
  misc_RNA (1)...(19): siRNA sense strand
auaaagaccaccagaauga

SEQ ID NO: 2081194 - RNA, 19 nt, Homo sapiens
  misc_RNA (1)...(19): siRNA sense strand
gagcugaggaagaguugua

SEQ ID NO: 2081195 - RNA, 19 nt, Homo sapiens
  misc_RNA (1)...(19): siRNA sense strand
caaagaggccgaagagaag

SEQ ID NO: 2081196 - RNA, 19 nt, Homo sapiens
  misc_RNA (1)...(19): siRNA sense strand
acaaagaggccgaagagaa

SEQ ID NO: 2081197 - RNA, 19 nt, Homo sapiens
  misc_RNA (1)...(19): siRNA sense strand
cagaucaaguucaacaguu

SEQ ID NO: 2081198 - RNA, 19 nt, Homo sapiens
  misc_RNA (1)...(19): siRNA sense strand
agaaagaaaugaagaagcu

SEQ ID NO: 2081199 - RNA, 19 nt, Homo sapiens
  misc_RNA (1)...(19): siRNA sense strand
aggaugauaucuacaaaga

SEQ ID NO: 2081200 - RNA, 19 nt, Homo sapiens
  misc_RNA (1)...(19): siRNA sense strand
uuaaagaaccucagaaugg

SEQ ID NO: 2081201 - RNA, 19 nt, Homo sapiens
  misc_RNA (1)...(19): siRNA sense strand
ggccuuaucugaacuucga

SEQ ID NO: 2081202 - RNA, 19 nt, Homo sapiens
  misc_RNA (1)...(19): siRNA sense strand
cagagagccucgccuugaa

SEQ ID NO: 2081203 - RNA, 19 nt, Homo sapiens
  misc_RNA (1)...(19): siRNA sense strand
ucugauauaucuucuggaa

SEQ ID NO: 2081204 - RNA, 19 nt, Homo sapiens
  misc_RNA (1)...(19): siRNA sense strand
acagagagagcgucauuaa

SEQ ID NO: 2081205 - RNA, 19 nt, Homo sapiens
  misc_RNA (1)...(19): siRNA sense strand
gaugcucggugcuaaagga

SEQ ID NO: 2081206 - RNA, 19 nt, Homo sapiens
  misc_RNA (1)...(19): siRNA sense strand
ggaaagaggagcuguugag

SEQ ID NO: 2081207 - RNA, 19 nt, Homo sapiens
  misc_RNA (1)...(19): siRNA sense strand
gcucggugcuaaaggaaga

SEQ ID NO: 2081208 - RNA, 19 nt, Homo sapiens
  misc_RNA (1)...(19): siRNA sense strand
agaaggcccugcugaagga

SEQ ID NO: 2081209 - RNA, 19 nt, Homo sapiens
  misc_RNA (1)...(19): siRNA sense strand
caaaguguccauugagaug

SEQ ID NO: 2081210 - RNA, 19 nt, Homo sapiens
  misc_RNA (1)...(19): siRNA sense strand
gaagagaaugcaagaacug

SEQ ID NO: 2081211 - RNA, 19 nt, Homo sapiens
  misc_RNA (1)...(19): siRNA sense strand
accaugcacucauugaaua

SEQ ID NO: 2081212 - RNA, 19 nt, Homo sapiens
  misc_RNA (1)...(19): siRNA sense strand
gcgagaacuuaaagagaga

SEQ ID NO: 2081213 - RNA, 19 nt, Homo sapiens
  misc_RNA (1)...(19): siRNA sense strand
gaggagcuguugagaggau

SEQ ID NO: 2081214 - RNA, 19 nt, Homo sapiens
  misc_RNA (1)...(19): siRNA sense strand
gaaagaggagcuguugaga

SEQ ID NO: 2081215 - RNA, 19 nt, Homo sapiens
  misc_RNA (1)...(19): siRNA sense strand
gaagucucaugaacaucaa

SEQ ID NO: 2081216 - RNA, 19 nt, Homo sapiens
  misc_RNA (1)...(19): siRNA sense strand
gcucagccauggagaaguc

SEQ ID NO: 2081217 - RNA, 19 nt, Homo sapiens
  misc_RNA (1)...(19): siRNA sense strand
cuugagcccugcagacuuu

SEQ ID NO: 2081218 - RNA, 19 nt, Homo sapiens
  misc_RNA (1)...(19): siRNA sense strand
aaagagauccagagcuuga

SEQ ID NO: 2081219 - RNA, 19 nt, Homo sapiens
  misc_RNA (1)...(19): siRNA sense strand
gaccugguguuugauaaga

SEQ ID NO: 2081220 - RNA, 19 nt, Homo sapiens
  misc_RNA (1)...(19): siRNA sense strand
gauccuagcgccucagaau

SEQ ID NO: 2081221 - RNA, 19 nt, Homo sapiens
  misc_RNA (1)...(19): siRNA sense strand
agauggaacuggagcagaa

SEQ ID NO: 2081222 - RNA, 19 nt, Homo sapiens
  misc_RNA (1)...(19): siRNA sense strand
gaagaagagaucauggaau

SEQ ID NO: 2081223 - RNA, 19 nt, Homo sapiens
  misc_RNA (1)...(19): siRNA sense strand
cgucaccgaccaacaguua

SEQ ID NO: 2081224 - RNA, 19 nt, Homo sapiens
  misc_RNA (1)...(19): siRNA sense strand
cagagugaaggaagcauua

SEQ ID NO: 2081225 - RNA, 19 nt, Homo sapiens
  misc_RNA (1)...(19): siRNA sense strand
acacagagaaggaacagaa

SEQ ID NO: 2081226 - RNA, 19 nt, Homo sapiens
  misc_RNA (1)...(19): siRNA sense strand
gguaaaggcccuccaggau

SEQ ID NO: 2081227 - RNA, 19 nt, Homo sapiens
  misc_RNA (1)...(19): siRNA sense strand
ggucagccgucucucagau

SEQ ID NO: 2081228 - RNA, 19 nt, Homo sapiens
  misc_RNA (1)...(19): siRNA sense strand
gcaaagcuggaggaugaua

SEQ ID NO: 2081229 - RNA, 19 nt, Homo sapiens
  misc_RNA (1)...(19): siRNA sense strand
gagcagugccaaagacaug

SEQ ID NO: 2081230 - RNA, 19 nt, Homo sapiens
  misc_RNA (1)...(19): siRNA sense strand
aaacaaaggcaacugaaag

SEQ ID NO: 2081231 - RNA, 19 nt, Homo sapiens
  misc_RNA (1)...(19): siRNA sense strand
gggaagcccaggagaaaga

SEQ ID NO: 2081232 - RNA, 19 nt, Homo sapiens
  misc_RNA (1)...(19): siRNA sense strand
ggugcuaaaggaagaguua

SEQ ID NO: 2081233 - RNA, 19 nt, Homo sapiens
  misc_RNA (1)...(19): siRNA sense strand
ucaaagcgcuggccaagga

SEQ ID NO: 2081234 - RNA, 19 nt, Homo sapiens
  misc_RNA (1)...(19): siRNA sense strand
gggaccugcuuaaugaaua

SEQ ID NO: 2081235 - RNA, 19 nt, Homo sapiens
  misc_RNA (1)...(19): siRNA sense strand
ggaccugcuuaaugaauau

SEQ ID NO: 2081236 - RNA, 19 nt, Homo sapiens
  misc_RNA (1)...(19): siRNA sense strand
gagcgaggaugcggucaaa

SEQ ID NO: 2081237 - RNA, 19 nt, Homo sapiens
  misc_RNA (1)...(19): siRNA sense strand
ggagcuagccagagccaaa

SEQ ID NO: 2081238 - RNA, 19 nt, Homo sapiens
  misc_RNA (1)...(19): siRNA sense strand
gugguaccuuugucuguuu

SEQ ID NO: 2081239 - RNA, 19 nt, Homo sapiens
  misc_RNA (1)...(19): siRNA sense strand
gcucccagcuggaccucaa

SEQ ID NO: 2081240 - RNA, 19 nt, Homo sapiens
  misc_RNA (1)...(19): siRNA sense strand
caaguucuguuuguacaca

SEQ ID NO: 2081241 - RNA, 19 nt, Homo sapiens
  misc_RNA (1)...(19): siRNA sense strand
gaucggaagcgcuuaaagg

SEQ ID NO: 2081242 - RNA, 19 nt, Homo sapiens
  misc_RNA (1)...(19): siRNA sense strand
guaccuuugucuguuuauu

SEQ ID NO: 2081243 - RNA, 19 nt, Homo sapiens
  misc_RNA (1)...(19): siRNA sense strand
gcagaugaaggagauguug

SEQ ID NO: 2081244 - RNA, 19 nt, Homo sapiens
  misc_RNA (1)...(19): siRNA sense strand
gcaaaugcacaaguucugu

SEQ ID NO: 2081245 - RNA, 19 nt, Homo sapiens
  misc_RNA (1)...(19): siRNA sense strand
caaaugcacaaguucuguu

SEQ ID NO: 2081246 - RNA, 19 nt, Homo sapiens
  misc_RNA (1)...(19): siRNA sense strand
gagacuucauccgcaacua

SEQ ID NO: 2081247 - RNA, 19 nt, Homo sapiens
  misc_RNA (1)...(19): siRNA sense strand
aaggggaccugcuuaauga

SEQ ID NO: 2081248 - RNA, 19 nt, Homo sapiens
  misc_RNA (1)...(19): siRNA sense strand
caucugcccgugugaaugu

SEQ ID NO: 2081249 - RNA, 19 nt, Homo sapiens
  misc_RNA (1)...(19): siRNA sense strand
uaaagggcgagaagacaga

SEQ ID NO: 2081250 - RNA, 19 nt, Homo sapiens
  misc_RNA (1)...(19): siRNA sense strand
caccuucuccggcagauga

SEQ ID NO: 2081251 - RNA, 19 nt, Homo sapiens
  misc_RNA (1)...(19): siRNA sense strand
cuuccacggucuccuaaga

SEQ ID NO: 2081252 - RNA, 19 nt, Homo sapiens
  misc_RNA (1)...(19): siRNA sense strand
gcugaucggaagcgcuuaa

SEQ ID NO: 2081253 - RNA, 19 nt, Homo sapiens
  misc_RNA (1)...(19): siRNA sense strand
aaaugcacaaguucuguuu

SEQ ID NO: 2081254 - RNA, 19 nt, Homo sapiens
  misc_RNA (1)...(19): siRNA sense strand
ugugguaccuuugucuguu

SEQ ID NO: 2081255 - RNA, 19 nt, Homo sapiens
  misc_RNA (1)...(19): siRNA sense strand
cuaagacagucaggugcaa

SEQ ID NO: 2081256 - RNA, 19 nt, Homo sapiens
  misc_RNA (1)...(19): siRNA sense strand
ugguaccuuugucuguuua

SEQ ID NO: 2081257 - RNA, 19 nt, Homo sapiens
  misc_RNA (1)...(19): siRNA sense strand
ccagaaggagcaggagcua

SEQ ID NO: 2081258 - RNA, 19 nt, Homo sapiens
  misc_RNA (1)...(19): siRNA sense strand
caaggggaccugcuuaaug

SEQ ID NO: 2081259 - RNA, 19 nt, Homo sapiens
  misc_RNA (1)...(19): siRNA sense strand
agacuucauccgcaacuau

SEQ ID NO: 2081260 - RNA, 19 nt, Homo sapiens
  misc_RNA (1)...(19): siRNA sense strand
uggugagugugguaccuuu

SEQ ID NO: 2081261 - RNA, 19 nt, Homo sapiens
  misc_RNA (1)...(19): siRNA sense strand
gcgcuuaaagggcgagaag

SEQ ID NO: 2081262 - RNA, 19 nt, Homo sapiens
  misc_RNA (1)...(19): siRNA sense strand
ggaaagaagucauucaaga

SEQ ID NO: 2081263 - RNA, 19 nt, Homo sapiens
  misc_RNA (1)...(19): siRNA sense strand
gaagacaaguucauucaaa

SEQ ID NO: 2081264 - RNA, 19 nt, Homo sapiens
  misc_RNA (1)...(19): siRNA sense strand
gagaauggcuagaauacuu

SEQ ID NO: 2081265 - RNA, 19 nt, Homo sapiens
  misc_RNA (1)...(19): siRNA sense strand
uaacugaacucacagaugu

SEQ ID NO: 2081266 - RNA, 19 nt, Homo sapiens
  misc_RNA (1)...(19): siRNA sense strand
ggaauggcauccugacaaa

SEQ ID NO: 2081267 - RNA, 19 nt, Homo sapiens
  misc_RNA (1)...(19): siRNA sense strand
gaaagaagucauucaagaa

SEQ ID NO: 2081268 - RNA, 19 nt, Homo sapiens
  misc_RNA (1)...(19): siRNA sense strand
ggagguaacugaacucaca

SEQ ID NO: 2081269 - RNA, 19 nt, Homo sapiens
  misc_RNA (1)...(19): siRNA sense strand
gaauaagccucauguccuu

SEQ ID NO: 2081270 - RNA, 19 nt, Homo sapiens
  misc_RNA (1)...(19): siRNA sense strand
caggaagggugguguauaa

SEQ ID NO: 2081271 - RNA, 19 nt, Homo sapiens
  misc_RNA (1)...(19): siRNA sense strand
gcaaaucauugacgacuuc

SEQ ID NO: 2081272 - RNA, 19 nt, Homo sapiens
  misc_RNA (1)...(19): siRNA sense strand
gcagugauguugacucuuc

SEQ ID NO: 2081273 - RNA, 19 nt, Homo sapiens
  misc_RNA (1)...(19): siRNA sense strand
ccagauagcuucaagaaac

SEQ ID NO: 2081274 - RNA, 19 nt, Homo sapiens
  misc_RNA (1)...(19): siRNA sense strand
gugagaaaguugagcauuu

SEQ ID NO: 2081275 - RNA, 19 nt, Homo sapiens
  misc_RNA (1)...(19): siRNA sense strand
ggagugagagugacaaauu

SEQ ID NO: 2081276 - RNA, 19 nt, Homo sapiens
  misc_RNA (1)...(19): siRNA sense strand
gaucuucucugcccucuuc

SEQ ID NO: 2081277 - RNA, 19 nt, Homo sapiens
  misc_RNA (1)...(19): siRNA sense strand
gaaaggaagagaaauggaa

SEQ ID NO: 2081278 - RNA, 19 nt, Homo sapiens
  misc_RNA (1)...(19): siRNA sense strand
gagccaagcuucaccaaag

SEQ ID NO: 2081279 - RNA, 19 nt, Homo sapiens
  misc_RNA (1)...(19): siRNA sense strand
gagugagagugacaaauuu

SEQ ID NO: 2081280 - RNA, 19 nt, Homo sapiens
  misc_RNA (1)...(19): siRNA sense strand
gaguaucgcuuccgccauu

SEQ ID NO: 2081281 - RNA, 19 nt, Homo sapiens
  misc_RNA (1)...(19): siRNA sense strand
ggaguuugccgacaccuua

SEQ ID NO: 2081282 - RNA, 19 nt, Homo sapiens
  misc_RNA (1)...(19): siRNA sense strand
gguacaacaucaauaucua

SEQ ID NO: 2081283 - RNA, 19 nt, Homo sapiens
  misc_RNA (1)...(19): siRNA sense strand
caaagauccuggagcagaa

SEQ ID NO: 2081284 - RNA, 19 nt, Homo sapiens
  misc_RNA (1)...(19): siRNA sense strand
ugacaaauuuauccucuug

SEQ ID NO: 2081285 - RNA, 19 nt, Homo sapiens
  misc_RNA (1)...(19): siRNA sense strand
ggaaaucagcggugucuau

SEQ ID NO: 2081286 - RNA, 19 nt, Homo sapiens
  misc_RNA (1)...(19): siRNA sense strand
caugaacucugcccuguga

SEQ ID NO: 2081287 - RNA, 19 nt, Homo sapiens
  misc_RNA (1)...(19): siRNA sense strand
gccagaaguuguuccauga

SEQ ID NO: 2081288 - RNA, 19 nt, Homo sapiens
  misc_RNA (1)...(19): siRNA sense strand
ugaauggccacaagaaaua

SEQ ID NO: 2081289 - RNA, 19 nt, Homo sapiens
  misc_RNA (1)...(19): siRNA sense strand
gaaaucagcggugucuauu

SEQ ID NO: 2081290 - RNA, 19 nt, Homo sapiens
  misc_RNA (1)...(19): siRNA sense strand
caagaaacccuaccucauc

SEQ ID NO: 2081291 - RNA, 19 nt, Homo sapiens
  misc_RNA (1)...(19): siRNA sense strand
gagcgugacuacacugguu

SEQ ID NO: 2081292 - RNA, 19 nt, Homo sapiens
  misc_RNA (1)...(19): siRNA sense strand
gcacacagcacgcccucua

SEQ ID NO: 2081293 - RNA, 19 nt, Homo sapiens
  misc_RNA (1)...(19): siRNA sense strand
guggagaaaguuacaaaua

SEQ ID NO: 2081294 - RNA, 19 nt, Homo sapiens
  misc_RNA (1)...(19): siRNA sense strand
ugaagaagcaaaucauuga

SEQ ID NO: 2081295 - RNA, 19 nt, Homo sapiens
  misc_RNA (1)...(19): siRNA sense strand
ugcuuuagcugcauucaua

SEQ ID NO: 2081296 - RNA, 19 nt, Homo sapiens
  misc_RNA (1)...(19): siRNA sense strand
cacaacaacuggagggaaa

SEQ ID NO: 2081297 - RNA, 19 nt, Homo sapiens
  misc_RNA (1)...(19): siRNA sense strand
gaaguacugugugguuuua

SEQ ID NO: 2081298 - RNA, 19 nt, Homo sapiens
  misc_RNA (1)...(19): siRNA sense strand
uucaagaacuggaagaauu

SEQ ID NO: 2081299 - RNA, 19 nt, Homo sapiens
  misc_RNA (1)...(19): siRNA sense strand
gggugaaucucgagggaaa

SEQ ID NO: 2081300 - RNA, 19 nt, Homo sapiens
  misc_RNA (1)...(19): siRNA sense strand
gaaauacuucugccucuuc

SEQ ID NO: 2081301 - RNA, 19 nt, Homo sapiens
  misc_RNA (1)...(19): siRNA sense strand
ggcaaacacucaagacaca

SEQ ID NO: 2081302 - RNA, 19 nt, Homo sapiens
  misc_RNA (1)...(19): siRNA sense strand
gaaauggaagugagaaagu

SEQ ID NO: 2081303 - RNA, 19 nt, Homo sapiens
  misc_RNA (1)...(19): siRNA sense strand
guucugauccugcaaauuc

SEQ ID NO: 2081304 - RNA, 19 nt, Homo sapiens
  misc_RNA (1)...(19): siRNA sense strand
cuuacgagauucuuucaaa

SEQ ID NO: 2081305 - RNA, 19 nt, Homo sapiens
  misc_RNA (1)...(19): siRNA sense strand
gaaaacagcagcaagauuc

SEQ ID NO: 2081306 - RNA, 19 nt, Homo sapiens
  misc_RNA (1)...(19): siRNA sense strand
caaguugacugccuuugca

SEQ ID NO: 2081307 - RNA, 19 nt, Homo sapiens
  misc_RNA (1)...(19): siRNA sense strand
uaacauacaccaguaacuu

SEQ ID NO: 2081308 - RNA, 19 nt, Homo sapiens
  misc_RNA (1)...(19): siRNA sense strand
uuggaggucuacacauuua

SEQ ID NO: 2081309 - RNA, 19 nt, Homo sapiens
  misc_RNA (1)...(19): siRNA sense strand
gagucuagauaaacacaga

SEQ ID NO: 2081310 - RNA, 19 nt, Homo sapiens
  misc_RNA (1)...(19): siRNA sense strand
caucauggccugaacuaga

SEQ ID NO: 2081311 - RNA, 19 nt, Homo sapiens
  misc_RNA (1)...(19): siRNA sense strand
gcaggaagggugguguaua

SEQ ID NO: 2081312 - RNA, 19 nt, Homo sapiens
  misc_RNA (1)...(19): siRNA sense strand
gagucaagcccuccagaaa

SEQ ID NO: 2081313 - RNA, 19 nt, Homo sapiens
  misc_RNA (1)...(19): siRNA sense strand
gcagaagacaaguucauuc

SEQ ID NO: 2081314 - RNA, 19 nt, Homo sapiens
  misc_RNA (1)...(19): siRNA sense strand
gcaaucggcagcaggaguu

SEQ ID NO: 2081315 - RNA, 19 nt, Homo sapiens
  misc_RNA (1)...(19): siRNA sense strand
acgagauucuuucaaauga

SEQ ID NO: 2081316 - RNA, 19 nt, Homo sapiens
  misc_RNA (1)...(19): siRNA sense strand
caaguucauucaaaucagu

SEQ ID NO: 2081317 - RNA, 19 nt, Homo sapiens
  misc_RNA (1)...(19): siRNA sense strand
cgaagaggaggaagccaua

SEQ ID NO: 2081318 - RNA, 19 nt, Homo sapiens
  misc_RNA (1)...(19): siRNA sense strand
caagacacagugagauuug

SEQ ID NO: 2081319 - RNA, 19 nt, Homo sapiens
  misc_RNA (1)...(19): siRNA sense strand
ggaagaauuggguguagga

SEQ ID NO: 2081320 - RNA, 19 nt, Homo sapiens
  misc_RNA (1)...(19): siRNA sense strand
cuacagaaauuugcuuugg

SEQ ID NO: 2081321 - RNA, 19 nt, Homo sapiens
  misc_RNA (1)...(19): siRNA sense strand
gggagcagcugccuacacu

SEQ ID NO: 2081322 - RNA, 19 nt, Homo sapiens
  misc_RNA (1)...(19): siRNA sense strand
gggaauggcauccugacaa

SEQ ID NO: 2081323 - RNA, 19 nt, Homo sapiens
  misc_RNA (1)...(19): siRNA sense strand
gagcagcugccuacacuuc

SEQ ID NO: 2081324 - RNA, 19 nt, Homo sapiens
  misc_RNA (1)...(19): siRNA sense strand
gugcaugucuacagcaauc

SEQ ID NO: 2081325 - RNA, 19 nt, Homo sapiens
  misc_RNA (1)...(19): siRNA sense strand
aaauggaagugagaaaguu

SEQ ID NO: 2081326 - RNA, 19 nt, Homo sapiens
  misc_RNA (1)...(19): siRNA sense strand
aagaaacccuaccucauca

SEQ ID NO: 2081327 - RNA, 19 nt, Homo sapiens
  misc_RNA (1)...(19): siRNA sense strand
gacaaguucauucaaauca

SEQ ID NO: 2081328 - RNA, 19 nt, Homo sapiens
  misc_RNA (1)...(19): siRNA sense strand
gaaccagggcuaccagaag

SEQ ID NO: 2081329 - RNA, 19 nt, Homo sapiens
  misc_RNA (1)...(19): siRNA sense strand
ugacugccuuugcauacaa

SEQ ID NO: 2081330 - RNA, 19 nt, Homo sapiens
  misc_RNA (1)...(19): siRNA sense strand
caagaucaccuccgauugg

SEQ ID NO: 2081331 - RNA, 19 nt, Homo sapiens
  misc_RNA (1)...(19): siRNA sense strand
ucaagaacuggaagaauug

SEQ ID NO: 2081332 - RNA, 19 nt, Homo sapiens
  misc_RNA (1)...(19): siRNA sense strand
agaauuugcucaagaugca

SEQ ID NO: 2081333 - RNA, 19 nt, Homo sapiens
  misc_RNA (1)...(19): siRNA sense strand
gaggaaguacugugugguu

SEQ ID NO: 2081334 - RNA, 19 nt, Homo sapiens
  misc_RNA (1)...(19): siRNA sense strand
uaaacaggccugccgaugu

SEQ ID NO: 2081335 - RNA, 19 nt, Homo sapiens
  misc_RNA (1)...(19): siRNA sense strand
uggcaguucuugauaguuc

SEQ ID NO: 2081336 - RNA, 19 nt, Homo sapiens
  misc_RNA (1)...(19): siRNA sense strand
acaaggcgguacaacauca

SEQ ID NO: 2081337 - RNA, 19 nt, Homo sapiens
  misc_RNA (1)...(19): siRNA sense strand
ccacuguuauacaaguuga

SEQ ID NO: 2081338 - RNA, 19 nt, Homo sapiens
  misc_RNA (1)...(19): siRNA sense strand
gagaaauggaagugagaaa

SEQ ID NO: 2081339 - RNA, 19 nt, Homo sapiens
  misc_RNA (1)...(19): siRNA sense strand
cagaagacaaguucauuca

SEQ ID NO: 2081340 - RNA, 19 nt, Homo sapiens
  misc_RNA (1)...(19): siRNA sense strand
acagagaauggcuagaaua

SEQ ID NO: 2081341 - RNA, 19 nt, Homo sapiens
  misc_RNA (1)...(19): siRNA sense strand
cagcucuucuguccucuga

SEQ ID NO: 2081342 - RNA, 19 nt, Homo sapiens
  misc_RNA (1)...(19): siRNA sense strand
ggauugggagugagaguga

SEQ ID NO: 2081343 - RNA, 19 nt, Homo sapiens
  misc_RNA (1)...(19): siRNA sense strand
ugagauuugugcaugucua

SEQ ID NO: 2081344 - RNA, 19 nt, Homo sapiens
  misc_RNA (1)...(19): siRNA sense strand
ggacggaagagaugacaag

SEQ ID NO: 2081345 - RNA, 19 nt, Homo sapiens
  misc_RNA (1)...(19): siRNA sense strand
caaugcaguuguccgugaa

SEQ ID NO: 2081346 - RNA, 19 nt, Homo sapiens
  misc_RNA (1)...(19): siRNA sense strand
ggaagagaaauggaaguga

SEQ ID NO: 2081347 - RNA, 19 nt, Homo sapiens
  misc_RNA (1)...(19): siRNA sense strand
gugaaaaucugcgacaauu

SEQ ID NO: 2081348 - RNA, 19 nt, Homo sapiens
  misc_RNA (1)...(19): siRNA sense strand
ggaaaggaagagaaaugga

SEQ ID NO: 2081349 - RNA, 19 nt, Homo sapiens
  misc_RNA (1)...(19): siRNA sense strand
agaauggcuagaauacuua

SEQ ID NO: 2081350 - RNA, 19 nt, Homo sapiens
  misc_RNA (1)...(19): siRNA sense strand
ugacaaggcgguacaacau

SEQ ID NO: 2081351 - RNA, 19 nt, Homo sapiens
  misc_RNA (1)...(19): siRNA sense strand
gagagggacggaagagaug

SEQ ID NO: 2081352 - RNA, 19 nt, Homo sapiens
  misc_RNA (1)...(19): siRNA sense strand
gagccuguguggaaagaag

SEQ ID NO: 2081353 - RNA, 19 nt, Homo sapiens
  misc_RNA (1)...(19): siRNA sense strand
guuauguacuggcucugaa

SEQ ID NO: 2081354 - RNA, 19 nt, Homo sapiens
  misc_RNA (1)...(19): siRNA sense strand
acacagagaauggcuagaa

SEQ ID NO: 2081355 - RNA, 19 nt, Homo sapiens
  misc_RNA (1)...(19): siRNA sense strand
aaucagcggugucuauuuu

SEQ ID NO: 2081356 - RNA, 19 nt, Homo sapiens
  misc_RNA (1)...(19): siRNA sense strand
ccucauguccuucuguuug

SEQ ID NO: 2081357 - RNA, 19 nt, Homo sapiens
  misc_RNA (1)...(19): siRNA sense strand
caaguugagcaaacccuuu

SEQ ID NO: 2081358 - RNA, 19 nt, Homo sapiens
  misc_RNA (1)...(19): siRNA sense strand
ccaauaugauaagcauuuc

SEQ ID NO: 2081359 - RNA, 19 nt, Homo sapiens
  misc_RNA (1)...(19): siRNA sense strand
cuuuggaggucuacacauu

SEQ ID NO: 2081360 - RNA, 19 nt, Homo sapiens
  misc_RNA (1)...(19): siRNA sense strand
caacuggagggaaaugaug

SEQ ID NO: 2081361 - RNA, 19 nt, Homo sapiens
  misc_RNA (1)...(19): siRNA sense strand
ucaagacacagugagauuu

SEQ ID NO: 2081362 - RNA, 19 nt, Homo sapiens
  misc_RNA (1)...(19): siRNA sense strand
acaaugaacuugacuaugu

SEQ ID NO: 2081363 - RNA, 19 nt, Homo sapiens
  misc_RNA (1)...(19): siRNA sense strand
gaucaaaggcugucgagaa

SEQ ID NO: 2081364 - RNA, 19 nt, Homo sapiens
  misc_RNA (1)...(19): siRNA sense strand
gcacggagcucgaggucau

SEQ ID NO: 2081365 - RNA, 19 nt, Homo sapiens
  misc_RNA (1)...(19): siRNA sense strand
ugaagaaguugcagagcua

SEQ ID NO: 2081366 - RNA, 19 nt, Homo sapiens
  misc_RNA (1)...(19): siRNA sense strand
gagcugcacuucugaacug

SEQ ID NO: 2081367 - RNA, 19 nt, Homo sapiens
  misc_RNA (1)...(19): siRNA sense strand
gaagucagccaugaucaaa

SEQ ID NO: 2081368 - RNA, 19 nt, Homo sapiens
  misc_RNA (1)...(19): siRNA sense strand
ggagagaggccaucaagca

SEQ ID NO: 2081369 - RNA, 19 nt, Homo sapiens
  misc_RNA (1)...(19): siRNA sense strand
gagaguccaagcacuguua

SEQ ID NO: 2081370 - RNA, 19 nt, Homo sapiens
  misc_RNA (1)...(19): siRNA sense strand
gagcagcuguucaaaauga

SEQ ID NO: 2081371 - RNA, 19 nt, Homo sapiens
  misc_RNA (1)...(19): siRNA sense strand
caggaagccuccaacaaga

SEQ ID NO: 2081372 - RNA, 19 nt, Homo sapiens
  misc_RNA (1)...(19): siRNA sense strand
gggcuagaguucauucguu

SEQ ID NO: 2081373 - RNA, 19 nt, Homo sapiens
  misc_RNA (1)...(19): siRNA sense strand
ccaaauuuguggcccaaga

SEQ ID NO: 2081374 - RNA, 19 nt, Homo sapiens
  misc_RNA (1)...(19): siRNA sense strand
ggcuagaguucauucguuu

SEQ ID NO: 2081375 - RNA, 19 nt, Homo sapiens
  misc_RNA (1)...(19): siRNA sense strand
cuagugaggauuaugauuu

SEQ ID NO: 2081376 - RNA, 19 nt, Homo sapiens
  misc_RNA (1)...(19): siRNA sense strand
gcaacgggauccucuacca

SEQ ID NO: 2081377 - RNA, 19 nt, Homo sapiens
  misc_RNA (1)...(19): siRNA sense strand
gagaggccaucaagcagau

SEQ ID NO: 2081378 - RNA, 19 nt, Homo sapiens
  misc_RNA (1)...(19): siRNA sense strand
cuucugaacuggaccgauu

SEQ ID NO: 2081379 - RNA, 19 nt, Homo sapiens
  misc_RNA (1)...(19): siRNA sense strand
gagaagaaucccaaagcuu

SEQ ID NO: 2081380 - RNA, 19 nt, Homo sapiens
  misc_RNA (1)...(19): siRNA sense strand
gaagaaaauuggcaagaag

SEQ ID NO: 2081381 - RNA, 19 nt, Homo sapiens
  misc_RNA (1)...(19): siRNA sense strand
caaugaacuugacuaugug

SEQ ID NO: 2081382 - RNA, 19 nt, Homo sapiens
  misc_RNA (1)...(19): siRNA sense strand
ggccguuucuuacaaugaa

SEQ ID NO: 2081383 - RNA, 19 nt, Homo sapiens
  misc_RNA (1)...(19): siRNA sense strand
aagaaggcaugcugcacua

SEQ ID NO: 2081384 - RNA, 19 nt, Homo sapiens
  misc_RNA (1)...(19): siRNA sense strand
ccaggaagccuccaacaag

SEQ ID NO: 2081385 - RNA, 19 nt, Homo sapiens
  misc_RNA (1)...(19): siRNA sense strand
gaagaaucccaaagcuugu

SEQ ID NO: 2081386 - RNA, 19 nt, Homo sapiens
  misc_RNA (1)...(19): siRNA sense strand
uaccugagcugcacuucug

SEQ ID NO: 2081387 - RNA, 19 nt, Homo sapiens
  misc_RNA (1)...(19): siRNA sense strand
agccauaccugguggaaga

SEQ ID NO: 2081388 - RNA, 19 nt, Homo sapiens
  misc_RNA (1)...(19): siRNA sense strand
uccaagcacuguuacauca

SEQ ID NO: 2081389 - RNA, 19 nt, Homo sapiens
  misc_RNA (1)...(19): siRNA sense strand
gaguagcgcugaggauucu

SEQ ID NO: 2081390 - RNA, 19 nt, Homo sapiens
  misc_RNA (1)...(19): siRNA sense strand
ugaggcugcuggccaagaa

SEQ ID NO: 2081391 - RNA, 19 nt, Homo sapiens
  misc_RNA (1)...(19): siRNA sense strand
gaagagcagcuguucaaaa

SEQ ID NO: 2081392 - RNA, 19 nt, Homo sapiens
  misc_RNA (1)...(19): siRNA sense strand
gucugucccucaacucuuu

SEQ ID NO: 2081393 - RNA, 19 nt, Homo sapiens
  misc_RNA (1)...(19): siRNA sense strand
ggcgcuggcugaguucuuu

SEQ ID NO: 2081394 - RNA, 19 nt, Homo sapiens
  misc_RNA (1)...(19): siRNA sense strand
caucuagugaggauuauga

SEQ ID NO: 2081395 - RNA, 19 nt, Homo sapiens
  misc_RNA (1)...(19): siRNA sense strand
ucaucagggucaccaagaa

SEQ ID NO: 2081396 - RNA, 19 nt, Homo sapiens
  misc_RNA (1)...(19): siRNA sense strand
gcugaucccugagaugaag

SEQ ID NO: 2081397 - RNA, 19 nt, Homo sapiens
  misc_RNA (1)...(19): siRNA sense strand
cauaaguacuacgucaaga

SEQ ID NO: 2081398 - RNA, 19 nt, Homo sapiens
  misc_RNA (1)...(19): siRNA sense strand
gcauaaguacuacgucaag

SEQ ID NO: 2081399 - RNA, 19 nt, Homo sapiens
  misc_RNA (1)...(19): siRNA sense strand
caaauuuguggcccaagaa

SEQ ID NO: 2081400 - RNA, 19 nt, Homo sapiens
  misc_RNA (1)...(19): siRNA sense strand
caaaggcugucgagaaccu

SEQ ID NO: 2081401 - RNA, 19 nt, Homo sapiens
  misc_RNA (1)...(19): siRNA sense strand
uaaguacuacgucaagaau

SEQ ID NO: 2081402 - RNA, 19 nt, Homo sapiens
  misc_RNA (1)...(19): siRNA sense strand
agaaguugcagagcuauuu

SEQ ID NO: 2081403 - RNA, 19 nt, Homo sapiens
  misc_RNA (1)...(19): siRNA sense strand
gaaggcaugcugcacuaca

SEQ ID NO: 2081404 - RNA, 19 nt, Homo sapiens
  misc_RNA (1)...(19): siRNA sense strand
ggaaaggggccacagagaa

SEQ ID NO: 2081405 - RNA, 19 nt, Homo sapiens
  misc_RNA (1)...(19): siRNA sense strand
gcucacagacugcuauguc

SEQ ID NO: 2081406 - RNA, 19 nt, Homo sapiens
  misc_RNA (1)...(19): siRNA sense strand
guucagaguagacaacaau

SEQ ID NO: 2081407 - RNA, 19 nt, Homo sapiens
  misc_RNA (1)...(19): siRNA sense strand
gauggagaccucacagaca

SEQ ID NO: 2081408 - RNA, 19 nt, Homo sapiens
  misc_RNA (1)...(19): siRNA sense strand
gcagagaagaaucccaaag

SEQ ID NO: 2081409 - RNA, 19 nt, Homo sapiens
  misc_RNA (1)...(19): siRNA sense strand
cuacaugcccgacuacuac

SEQ ID NO: 2081410 - RNA, 19 nt, Homo sapiens
  misc_RNA (1)...(19): siRNA sense strand
caagaagaaauucgaggau

SEQ ID NO: 2081411 - RNA, 19 nt, Homo sapiens
  misc_RNA (1)...(19): siRNA sense strand
gaugaccgccucuuuacgu

SEQ ID NO: 2081412 - RNA, 19 nt, Homo sapiens
  misc_RNA (1)...(19): siRNA sense strand
gggacucgccagacacuau

SEQ ID NO: 2081413 - RNA, 19 nt, Homo sapiens
  misc_RNA (1)...(19): siRNA sense strand
acggaugaccgccucuuua

SEQ ID NO: 2081414 - RNA, 19 nt, Homo sapiens
  misc_RNA (1)...(19): siRNA sense strand
aagagcagcuguucaaaau

SEQ ID NO: 2081415 - RNA, 19 nt, Homo sapiens
  misc_RNA (1)...(19): siRNA sense strand
ugaaggacaccuccaugga

SEQ ID NO: 2081416 - RNA, 19 nt, Homo sapiens
  misc_RNA (1)...(19): siRNA sense strand
ggacucgccagacacuaug

SEQ ID NO: 2081417 - RNA, 19 nt, Homo sapiens
  misc_RNA (1)...(19): siRNA sense strand
caccugcuccugcucauga

SEQ ID NO: 2081418 - RNA, 19 nt, Homo sapiens
  misc_RNA (1)...(19): siRNA sense strand
ccaacaagaagaaauucga

SEQ ID NO: 2081419 - RNA, 19 nt, Homo sapiens
  misc_RNA (1)...(19): siRNA sense strand
ggaagccuccaacaagaag

SEQ ID NO: 2081420 - RNA, 19 nt, Homo sapiens
  misc_RNA (1)...(19): siRNA sense strand
gcaaggaacacuggaagac

SEQ ID NO: 2081421 - RNA, 19 nt, Homo sapiens
  misc_RNA (1)...(19): siRNA sense strand
gaugagcaccgggcacaug

SEQ ID NO: 2081422 - RNA, 19 nt, Homo sapiens
  misc_RNA (1)...(19): siRNA sense strand
gcucaugauccacguguuc

SEQ ID NO: 2081423 - RNA, 19 nt, Homo sapiens
  misc_RNA (1)...(19): siRNA sense strand
aaccugggccugcugcaua

SEQ ID NO: 2081424 - RNA, 19 nt, Homo sapiens
  misc_RNA (1)...(19): siRNA sense strand
ccacacggcgauccaggaa

SEQ ID NO: 2081425 - RNA, 19 nt, Homo sapiens
  misc_RNA (1)...(19): siRNA sense strand
cgauugcugucugcacuga

SEQ ID NO: 2081426 - RNA, 19 nt, Homo sapiens
  misc_RNA (1)...(19): siRNA sense strand
gaagaaguugcagagcuau

SEQ ID NO: 2081427 - RNA, 19 nt, Homo sapiens
  misc_RNA (1)...(19): siRNA sense strand
aaacgaagagcagcuguuc

SEQ ID NO: 2081428 - RNA, 19 nt, Homo sapiens
  misc_RNA (1)...(19): siRNA sense strand
ggaagauggagaccucaca

SEQ ID NO: 2081429 - RNA, 19 nt, Homo sapiens
  misc_RNA (1)...(19): siRNA sense strand
agagcuaccugcgguuguu

SEQ ID NO: 2081430 - RNA, 19 nt, Homo sapiens
  misc_RNA (1)...(19): siRNA sense strand
ccuccaacaagaagaaauu

SEQ ID NO: 2081431 - RNA, 19 nt, Homo sapiens
  misc_RNA (1)...(19): siRNA sense strand
uuacgugccaugaggauug

SEQ ID NO: 2081432 - RNA, 19 nt, Homo sapiens
  misc_RNA (1)...(19): siRNA sense strand
ugacggaugccaccaugga

SEQ ID NO: 2081433 - RNA, 19 nt, Homo sapiens
  misc_RNA (1)...(19): siRNA sense strand
gcuauucaacagcagagaa

SEQ ID NO: 2081434 - RNA, 19 nt, Homo sapiens
  misc_RNA (1)...(19): siRNA sense strand
acgaagagcagcuguucaa

SEQ ID NO: 2081435 - RNA, 19 nt, Homo sapiens
  misc_RNA (1)...(19): siRNA sense strand
cucaguaccugcuggacuu

SEQ ID NO: 2081436 - RNA, 19 nt, Homo sapiens
  misc_RNA (1)...(19): siRNA sense strand
gaaaauuggcaagaagaaa

SEQ ID NO: 2081437 - RNA, 19 nt, Homo sapiens
  misc_RNA (1)...(19): siRNA sense strand
gaaccaugacaagguccua

SEQ ID NO: 2081438 - RNA, 19 nt, Homo sapiens
  misc_RNA (1)...(19): siRNA sense strand
agagaagaaucccaaagcu

SEQ ID NO: 2081439 - RNA, 19 nt, Homo sapiens
  misc_RNA (1)...(19): siRNA sense strand
uguacgugcugcucacaga

SEQ ID NO: 2081440 - RNA, 19 nt, Homo sapiens
  misc_RNA (1)...(19): siRNA sense strand
ccacagagaagccauaccu

SEQ ID NO: 2081441 - RNA, 19 nt, Homo sapiens
  misc_RNA (1)...(19): siRNA sense strand
acaucucgcugucggugaa

SEQ ID NO: 2081442 - RNA, 19 nt, Homo sapiens
  misc_RNA (1)...(19): siRNA sense strand
cccaagaaucgaaguguga

SEQ ID NO: 2081443 - RNA, 19 nt, Homo sapiens
  misc_RNA (1)...(19): siRNA sense strand
ugaagucagccaugaucaa

SEQ ID NO: 2081444 - RNA, 19 nt, Homo sapiens
  misc_RNA (1)...(19): siRNA sense strand
gaagccauaccugguggaa

SEQ ID NO: 2081445 - RNA, 19 nt, Homo sapiens
  misc_RNA (1)...(19): siRNA sense strand
ugggccugcugcauaagua

SEQ ID NO: 2081446 - RNA, 19 nt, Homo sapiens
  misc_RNA (1)...(19): siRNA sense strand
cgagggcaccaucaccaaa

SEQ ID NO: 2081447 - RNA, 19 nt, Homo sapiens
  misc_RNA (1)...(19): siRNA sense strand
ccucggaguucagaguaga

SEQ ID NO: 2081448 - RNA, 19 nt, Homo sapiens
  misc_RNA (1)...(19): siRNA sense strand
caacagcagagaagaaucc

SEQ ID NO: 2081449 - RNA, 19 nt, Homo sapiens
  misc_RNA (1)...(19): siRNA sense strand
gaccggauccuggagaaca

SEQ ID NO: 2081450 - RNA, 19 nt, Homo sapiens
  misc_RNA (1)...(19): siRNA sense strand
agaagaaaauuggcaagaa

SEQ ID NO: 2081451 - RNA, 19 nt, Homo sapiens
  misc_RNA (1)...(19): siRNA sense strand
ccuacaugcccgacuacua

SEQ ID NO: 2081452 - RNA, 19 nt, Homo sapiens
  misc_RNA (1)...(19): siRNA sense strand
guacugcgucuuggaguuc

SEQ ID NO: 2081453 - RNA, 19 nt, Homo sapiens
  misc_RNA (1)...(19): siRNA sense strand
gccaggcuguguccaaagg

SEQ ID NO: 2081454 - RNA, 19 nt, Homo sapiens
  misc_RNA (1)...(19): siRNA sense strand
ucaacgagaacuccuugga

SEQ ID NO: 2081455 - RNA, 19 nt, Homo sapiens
  misc_RNA (1)...(19): siRNA sense strand
acgggauccucuaccagua

SEQ ID NO: 2081456 - RNA, 19 nt, Homo sapiens
  misc_RNA (1)...(19): siRNA sense strand
gcaccaaccgcaggaagca

SEQ ID NO: 2081457 - RNA, 19 nt, Homo sapiens
  misc_RNA (1)...(19): siRNA sense strand
gaggccguuucuuacaaug

SEQ ID NO: 2081458 - RNA, 19 nt, Homo sapiens
  misc_RNA (1)...(19): siRNA sense strand
agaggccguuucuuacaau

SEQ ID NO: 2081459 - RNA, 19 nt, Homo sapiens
  misc_RNA (1)...(19): siRNA sense strand
ggcuguaccuggcccucaa

SEQ ID NO: 2081460 - RNA, 19 nt, Homo sapiens
  misc_RNA (1)...(19): siRNA sense strand
gaaaggggccacagagaag

SEQ ID NO: 2081461 - RNA, 19 nt, Homo sapiens
  misc_RNA (1)...(19): siRNA sense strand
acugaacucuggguggaaa

SEQ ID NO: 2081462 - RNA, 19 nt, Homo sapiens
  misc_RNA (1)...(19): siRNA sense strand
gcauucacgucaaauauaa

SEQ ID NO: 2081463 - RNA, 19 nt, Homo sapiens
  misc_RNA (1)...(19): siRNA sense strand
ucagaagcgucuaugauuc

SEQ ID NO: 2081464 - RNA, 19 nt, Homo sapiens
  misc_RNA (1)...(19): siRNA sense strand
uaauaugccugcuguucau

SEQ ID NO: 2081465 - RNA, 19 nt, Homo sapiens
  misc_RNA (1)...(19): siRNA sense strand
gcugcuagcacauauguau

SEQ ID NO: 2081466 - RNA, 19 nt, Homo sapiens
  misc_RNA (1)...(19): siRNA sense strand
guagcauucacgucaaaua

SEQ ID NO: 2081467 - RNA, 19 nt, Homo sapiens
  misc_RNA (1)...(19): siRNA sense strand
cgucuaugauuccuucaga

SEQ ID NO: 2081468 - RNA, 19 nt, Homo sapiens
  misc_RNA (1)...(19): siRNA sense strand
ucuaugauuccuucagaua

SEQ ID NO: 2081469 - RNA, 19 nt, Homo sapiens
  misc_RNA (1)...(19): siRNA sense strand
guccuggaguucagauuug

SEQ ID NO: 2081470 - RNA, 19 nt, Homo sapiens
  misc_RNA (1)...(19): siRNA sense strand
uugaauaccuguggccauu

SEQ ID NO: 2081471 - RNA, 19 nt, Homo sapiens
  misc_RNA (1)...(19): siRNA sense strand
gaacgccgacugcaguaag

SEQ ID NO: 2081472 - RNA, 19 nt, Homo sapiens
  misc_RNA (1)...(19): siRNA sense strand
uagcauucacgucaaauau

SEQ ID NO: 2081473 - RNA, 19 nt, Homo sapiens
  misc_RNA (1)...(19): siRNA sense strand
guguagcauucacgucaaa

SEQ ID NO: 2081474 - RNA, 19 nt, Homo sapiens
  misc_RNA (1)...(19): siRNA sense strand
gcauuuacggcaguacauu

SEQ ID NO: 2081475 - RNA, 19 nt, Homo sapiens
  misc_RNA (1)...(19): siRNA sense strand
uguauggguucaguacgua

SEQ ID NO: 2081476 - RNA, 19 nt, Homo sapiens
  misc_RNA (1)...(19): siRNA sense strand
uauaauaugccugcuguuc

SEQ ID NO: 2081477 - RNA, 19 nt, Homo sapiens
  misc_RNA (1)...(19): siRNA sense strand
gagggcauuuacggcagua

SEQ ID NO: 2081478 - RNA, 19 nt, Homo sapiens
  misc_RNA (1)...(19): siRNA sense strand
cauuuacggcaguacauuu

SEQ ID NO: 2081479 - RNA, 19 nt, Homo sapiens
  misc_RNA (1)...(19): siRNA sense strand
gaucaccgagggcauuuac

SEQ ID NO: 2081480 - RNA, 19 nt, Homo sapiens
  misc_RNA (1)...(19): siRNA sense strand
ggaacgccgacugcaguaa

SEQ ID NO: 2081481 - RNA, 19 nt, Homo sapiens
  misc_RNA (1)...(19): siRNA sense strand
agcauucacgucaaauaua

SEQ ID NO: 2081482 - RNA, 19 nt, Homo sapiens
  misc_RNA (1)...(19): siRNA sense strand
gugggcacuuguccuccua

SEQ ID NO: 2081483 - RNA, 19 nt, Homo sapiens
  misc_RNA (1)...(19): siRNA sense strand
ggaucaccgagggcauuua

SEQ ID NO: 2081484 - RNA, 19 nt, Homo sapiens
  misc_RNA (1)...(19): siRNA sense strand
cuaaagcggaaccggauca

SEQ ID NO: 2081485 - RNA, 19 nt, Homo sapiens
  misc_RNA (1)...(19): siRNA sense strand
gcauucacgucaaauauaa

SEQ ID NO: 2081486 - RNA, 19 nt, Homo sapiens
  misc_RNA (1)...(19): siRNA sense strand
ucagaagcgucuaugauuc

SEQ ID NO: 2081487 - RNA, 19 nt, Homo sapiens
  misc_RNA (1)...(19): siRNA sense strand
uaauaugccugcuguucau

SEQ ID NO: 2081488 - RNA, 19 nt, Homo sapiens
  misc_RNA (1)...(19): siRNA sense strand
gcugcuagcacauauguau

SEQ ID NO: 2081489 - RNA, 19 nt, Homo sapiens
  misc_RNA (1)...(19): siRNA sense strand
guagcauucacgucaaaua

SEQ ID NO: 2081490 - RNA, 19 nt, Homo sapiens
  misc_RNA (1)...(19): siRNA sense strand
cgucuaugauuccuucaga

SEQ ID NO: 2081491 - RNA, 19 nt, Homo sapiens
  misc_RNA (1)...(19): siRNA sense strand
ucuaugauuccuucagaua

SEQ ID NO: 2081492 - RNA, 19 nt, Homo sapiens
  misc_RNA (1)...(19): siRNA sense strand
guccuggaguucagauuug

SEQ ID NO: 2081493 - RNA, 19 nt, Homo sapiens
  misc_RNA (1)...(19): siRNA sense strand
uugaauaccuguggccauu

SEQ ID NO: 2081494 - RNA, 19 nt, Homo sapiens
  misc_RNA (1)...(19): siRNA sense strand
gaacgccgacugcaguaag

SEQ ID NO: 2081495 - RNA, 19 nt, Homo sapiens
  misc_RNA (1)...(19): siRNA sense strand
uagcauucacgucaaauau

SEQ ID NO: 2081496 - RNA, 19 nt, Homo sapiens
  misc_RNA (1)...(19): siRNA sense strand
guguagcauucacgucaaa

SEQ ID NO: 2081497 - RNA, 19 nt, Homo sapiens
  misc_RNA (1)...(19): siRNA sense strand
gcauuuacggcaguacauu

SEQ ID NO: 2081498 - RNA, 19 nt, Homo sapiens
  misc_RNA (1)...(19): siRNA sense strand
uguauggguucaguacgua

SEQ ID NO: 2081499 - RNA, 19 nt, Homo sapiens
  misc_RNA (1)...(19): siRNA sense strand
uauaauaugccugcuguuc

SEQ ID NO: 2081500 - RNA, 19 nt, Homo sapiens
  misc_RNA (1)...(19): siRNA sense strand
gagggcauuuacggcagua

SEQ ID NO: 2081501 - RNA, 19 nt, Homo sapiens
  misc_RNA (1)...(19): siRNA sense strand
cauuuacggcaguacauuu

SEQ ID NO: 2081502 - RNA, 19 nt, Homo sapiens
  misc_RNA (1)...(19): siRNA sense strand
gaucaccgagggcauuuac

SEQ ID NO: 2081503 - RNA, 19 nt, Homo sapiens
  misc_RNA (1)...(19): siRNA sense strand
ggaacgccgacugcaguaa

SEQ ID NO: 2081504 - RNA, 19 nt, Homo sapiens
  misc_RNA (1)...(19): siRNA sense strand
agcauucacgucaaauaua

SEQ ID NO: 2081505 - RNA, 19 nt, Homo sapiens
  misc_RNA (1)...(19): siRNA sense strand
gugggcacuuguccuccua

SEQ ID NO: 2081506 - RNA, 19 nt, Homo sapiens
  misc_RNA (1)...(19): siRNA sense strand
ggaucaccgagggcauuua

SEQ ID NO: 2081507 - RNA, 19 nt, Homo sapiens
  misc_RNA (1)...(19): siRNA sense strand
cuaaagcggaaccggauca

SEQ ID NO: 2081508 - RNA, 19 nt, Homo sapiens
  misc_RNA (1)...(19): siRNA sense strand
ccaacgaccucauguacau

SEQ ID NO: 2081509 - RNA, 19 nt, Homo sapiens
  misc_RNA (1)...(19): siRNA sense strand
gaacagcaggucccagaga

SEQ ID NO: 2081510 - RNA, 19 nt, Homo sapiens
  misc_RNA (1)...(19): siRNA sense strand
gaggagaagcuguuugaug

SEQ ID NO: 2081511 - RNA, 19 nt, Homo sapiens
  misc_RNA (1)...(19): siRNA sense strand
gggcagagacagaggagaa

SEQ ID NO: 2081512 - RNA, 19 nt, Homo sapiens
  misc_RNA (1)...(19): siRNA sense strand
cagaggagaagcuguuuga

SEQ ID NO: 2081513 - RNA, 19 nt, Homo sapiens
  misc_RNA (1)...(19): siRNA sense strand
caagagagagcagcuggaa

SEQ ID NO: 2081514 - RNA, 19 nt, Homo sapiens
  misc_RNA (1)...(19): siRNA sense strand
agagagagcagcuggaaca

SEQ ID NO: 2081515 - RNA, 19 nt, Homo sapiens
  misc_RNA (1)...(19): siRNA sense strand
aacagcaggucccagagaa

SEQ ID NO: 2081516 - RNA, 19 nt, Homo sapiens
  misc_RNA (1)...(19): siRNA sense strand
uuccagaacugcccaccuu

SEQ ID NO: 2081517 - RNA, 19 nt, Homo sapiens
  misc_RNA (1)...(19): siRNA sense strand
caacgaccucauguacauu

SEQ ID NO: 2081518 - RNA, 19 nt, Homo sapiens
  misc_RNA (1)...(19): siRNA sense strand
ggacagagcgccugaagau

SEQ ID NO: 2081519 - RNA, 19 nt, Homo sapiens
  misc_RNA (1)...(19): siRNA sense strand
cgacaucgccugcaccuuu

SEQ ID NO: 2081520 - RNA, 19 nt, Homo sapiens
  misc_RNA (1)...(19): siRNA sense strand
gcaccagguucuccucaaa

SEQ ID NO: 2081521 - RNA, 19 nt, Homo sapiens
  misc_RNA (1)...(19): siRNA sense strand
gcuacgaccucuuugauac

SEQ ID NO: 2081522 - RNA, 19 nt, Homo sapiens
  misc_RNA (1)...(19): siRNA sense strand
uggaggagaucaacaacaa

SEQ ID NO: 2081523 - RNA, 19 nt, Homo sapiens
  misc_RNA (1)...(19): siRNA sense strand
gcggaaacguggacaugga

SEQ ID NO: 2081524 - RNA, 19 nt, Homo sapiens
  misc_RNA (1)...(19): siRNA sense strand
cgucagagcucgccauggu

SEQ ID NO: 2081525 - RNA, 19 nt, Homo sapiens
  misc_RNA (1)...(19): siRNA sense strand
gaaacguggacauggagua

SEQ ID NO: 2081526 - RNA, 19 nt, Homo sapiens
  misc_RNA (1)...(19): siRNA sense strand
uaaaucaccaccagacguu

SEQ ID NO: 2081527 - RNA, 19 nt, Homo sapiens
  misc_RNA (1)...(19): siRNA sense strand
gaaaucaggggaaacauga

SEQ ID NO: 2081528 - RNA, 19 nt, Homo sapiens
  misc_RNA (1)...(19): siRNA sense strand
ucaccugggucuccuuugu

SEQ ID NO: 2081529 - RNA, 19 nt, Homo sapiens
  misc_RNA (1)...(19): siRNA sense strand
gcaucacgcugcagaacgu

SEQ ID NO: 2081530 - RNA, 19 nt, Homo sapiens
  misc_RNA (1)...(19): siRNA sense strand
gaggagaucaacaacaagu

SEQ ID NO: 2081531 - RNA, 19 nt, Homo sapiens
  misc_RNA (1)...(19): siRNA sense strand
gcaacuacacgcaguacca

SEQ ID NO: 2081532 - RNA, 19 nt, Homo sapiens
  misc_RNA (1)...(19): siRNA sense strand
gccuugugcuggcugcuuu

SEQ ID NO: 2081533 - RNA, 19 nt, Homo sapiens
  misc_RNA (1)...(19): siRNA sense strand
aggccuggcugaccucuga

SEQ ID NO: 2081534 - RNA, 19 nt, Homo sapiens
  misc_RNA (1)...(19): siRNA sense strand
cccacgcccucuucaacua

SEQ ID NO: 2081535 - RNA, 19 nt, Homo sapiens
  misc_RNA (1)...(19): siRNA sense strand
ggcuacgaccucuuugaua

SEQ ID NO: 2081536 - RNA, 19 nt, Homo sapiens
  misc_RNA (1)...(19): siRNA sense strand
caggucagcuacggugcua

SEQ ID NO: 2081537 - RNA, 19 nt, Homo sapiens
  misc_RNA (1)...(19): siRNA sense strand
ggcaaguucuucagcuucu

SEQ ID NO: 2081538 - RNA, 19 nt, Homo sapiens
  misc_RNA (1)...(19): siRNA sense strand
gcaaguucuucagcuucuu

SEQ ID NO: 2081539 - RNA, 19 nt, Homo sapiens
  misc_RNA (1)...(19): siRNA sense strand
gggcuacgaccucuuugau

SEQ ID NO: 2081540 - RNA, 19 nt, Homo sapiens
  misc_RNA (1)...(19): siRNA sense strand
ucugggcacuggccaugaa

SEQ ID NO: 2081541 - RNA, 19 nt, Homo sapiens
  misc_RNA (1)...(19): siRNA sense strand
gaagcccagccucauguuc

SEQ ID NO: 2081542 - RNA, 19 nt, Homo sapiens
  misc_RNA (1)...(19): siRNA sense strand
ugucuacgcagcuguguau

SEQ ID NO: 2081543 - RNA, 19 nt, Homo sapiens
  misc_RNA (1)...(19): siRNA sense strand
gacaucgccugcaccuuuu

SEQ ID NO: 2081544 - RNA, 19 nt, Homo sapiens
  misc_RNA (1)...(19): siRNA sense strand
cauggucaccggcaaguuc

SEQ ID NO: 2081545 - RNA, 19 nt, Homo sapiens
  misc_RNA (1)...(19): siRNA sense strand
cuacgcagcuguguauagc

SEQ ID NO: 2081546 - RNA, 19 nt, Homo sapiens
  misc_RNA (1)...(19): siRNA sense strand
gcaaaacccagacgacauc

SEQ ID NO: 2081547 - RNA, 19 nt, Homo sapiens
  misc_RNA (1)...(19): siRNA sense strand
ggaaaucaggggaaacaug

SEQ ID NO: 2081548 - RNA, 19 nt, Homo sapiens
  misc_RNA (1)...(19): siRNA sense strand
caaguucuucagcuucuuc

SEQ ID NO: 2081549 - RNA, 19 nt, Homo sapiens
  misc_RNA (1)...(19): siRNA sense strand
caucaccugggucuccuuu

SEQ ID NO: 2081550 - RNA, 19 nt, Homo sapiens
  misc_RNA (1)...(19): siRNA sense strand
gaucuucguggagucagaa

SEQ ID NO: 2081551 - RNA, 19 nt, Homo sapiens
  misc_RNA (1)...(19): siRNA sense strand
ccggcaaguucuucagcuu

SEQ ID NO: 2081552 - RNA, 19 nt, Homo sapiens
  misc_RNA (1)...(19): siRNA sense strand
uguacaaccugaccuucca

SEQ ID NO: 2081553 - RNA, 19 nt, Homo sapiens
  misc_RNA (1)...(19): siRNA sense strand
aaauggccguggaggagau

SEQ ID NO: 2081554 - RNA, 19 nt, Homo sapiens
  misc_RNA (1)...(19): siRNA sense strand
gagcaacucuggucgugua

SEQ ID NO: 2081555 - RNA, 19 nt, Homo sapiens
  misc_RNA (1)...(19): siRNA sense strand
ggaagaaacugugcuggaa

SEQ ID NO: 2081556 - RNA, 19 nt, Homo sapiens
  misc_RNA (1)...(19): siRNA sense strand
ccagagagauucuuugaug

SEQ ID NO: 2081557 - RNA, 19 nt, Homo sapiens
  misc_RNA (1)...(19): siRNA sense strand
aaacagugguaucgacuua

SEQ ID NO: 2081558 - RNA, 19 nt, Homo sapiens
  misc_RNA (1)...(19): siRNA sense strand
ggaugaagcuccuuguguu

SEQ ID NO: 2081559 - RNA, 19 nt, Homo sapiens
  misc_RNA (1)...(19): siRNA sense strand
gcaaugcugcuuucaauga

SEQ ID NO: 2081560 - RNA, 19 nt, Homo sapiens
  misc_RNA (1)...(19): siRNA sense strand
gcaagcccaugcagaugua

SEQ ID NO: 2081561 - RNA, 19 nt, Homo sapiens
  misc_RNA (1)...(19): siRNA sense strand
gcacuaaguccuccucuug

SEQ ID NO: 2081562 - RNA, 19 nt, Homo sapiens
  misc_RNA (1)...(19): siRNA sense strand
caugaaggcuguccaggaa

SEQ ID NO: 2081563 - RNA, 19 nt, Homo sapiens
  misc_RNA (1)...(19): siRNA sense strand
gaggagacuagacauaaua

SEQ ID NO: 2081564 - RNA, 19 nt, Homo sapiens
  misc_RNA (1)...(19): siRNA sense strand
gagagauucuuugaugaaa

SEQ ID NO: 2081565 - RNA, 19 nt, Homo sapiens
  misc_RNA (1)...(19): siRNA sense strand
ccaaugcucuauucaagga

SEQ ID NO: 2081566 - RNA, 19 nt, Homo sapiens
  misc_RNA (1)...(19): siRNA sense strand
gcuaaucagucuauguaug

SEQ ID NO: 2081567 - RNA, 19 nt, Homo sapiens
  misc_RNA (1)...(19): siRNA sense strand
ucaaagcgauguccuccaa

SEQ ID NO: 2081568 - RNA, 19 nt, Homo sapiens
  misc_RNA (1)...(19): siRNA sense strand
gaugaagcuccuuguguua

SEQ ID NO: 2081569 - RNA, 19 nt, Homo sapiens
  misc_RNA (1)...(19): siRNA sense strand
ggacaauggaucaagauga

SEQ ID NO: 2081570 - RNA, 19 nt, Homo sapiens
  misc_RNA (1)...(19): siRNA sense strand
gaaacccgcuuccaguagu

SEQ ID NO: 2081571 - RNA, 19 nt, Homo sapiens
  misc_RNA (1)...(19): siRNA sense strand
agaaacagaaugugaagua

SEQ ID NO: 2081572 - RNA, 19 nt, Homo sapiens
  misc_RNA (1)...(19): siRNA sense strand
cagaagagguuuuggagua

SEQ ID NO: 2081573 - RNA, 19 nt, Homo sapiens
  misc_RNA (1)...(19): siRNA sense strand
ugucggagcugccagaaga

SEQ ID NO: 2081574 - RNA, 19 nt, Homo sapiens
  misc_RNA (1)...(19): siRNA sense strand
gacaauggaucaagaugag

SEQ ID NO: 2081575 - RNA, 19 nt, Homo sapiens
  misc_RNA (1)...(19): siRNA sense strand
gacaagaaacagaauguga

SEQ ID NO: 2081576 - RNA, 19 nt, Homo sapiens
  misc_RNA (1)...(19): siRNA sense strand
gagauuaggauccauagau

SEQ ID NO: 2081577 - RNA, 19 nt, Homo sapiens
  misc_RNA (1)...(19): siRNA sense strand
uaauagcaguucugugguu

SEQ ID NO: 2081578 - RNA, 19 nt, Homo sapiens
  misc_RNA (1)...(19): siRNA sense strand
ccacuccuccugugugaua

SEQ ID NO: 2081579 - RNA, 19 nt, Homo sapiens
  misc_RNA (1)...(19): siRNA sense strand
aacagaaugugaaguacua

SEQ ID NO: 2081580 - RNA, 19 nt, Homo sapiens
  misc_RNA (1)...(19): siRNA sense strand
gcccaucaguguuaucaug

SEQ ID NO: 2081581 - RNA, 19 nt, Homo sapiens
  misc_RNA (1)...(19): siRNA sense strand
gaaacagaaugugaaguac

SEQ ID NO: 2081582 - RNA, 19 nt, Homo sapiens
  misc_RNA (1)...(19): siRNA sense strand
ccacagucccuaaauguug

SEQ ID NO: 2081583 - RNA, 19 nt, Homo sapiens
  misc_RNA (1)...(19): siRNA sense strand
cagagagauucuuugauga

SEQ ID NO: 2081584 - RNA, 19 nt, Homo sapiens
  misc_RNA (1)...(19): siRNA sense strand
caacucuggucguguacaa

SEQ ID NO: 2081585 - RNA, 19 nt, Homo sapiens
  misc_RNA (1)...(19): siRNA sense strand
ugaaggauacgaccugaaa

SEQ ID NO: 2081586 - RNA, 19 nt, Homo sapiens
  misc_RNA (1)...(19): siRNA sense strand
gaguauauccuguccuuuc

SEQ ID NO: 2081587 - RNA, 19 nt, Homo sapiens
  misc_RNA (1)...(19): siRNA sense strand
gaugaugcaacuaucuuaa

SEQ ID NO: 2081588 - RNA, 19 nt, Homo sapiens
  misc_RNA (1)...(19): siRNA sense strand
ugucuuugguggcucuuua

SEQ ID NO: 2081589 - RNA, 19 nt, Homo sapiens
  misc_RNA (1)...(19): siRNA sense strand
ggugaacucaucauauuug

SEQ ID NO: 2081590 - RNA, 19 nt, Homo sapiens
  misc_RNA (1)...(19): siRNA sense strand
gguaucgacuuaucaaagg

SEQ ID NO: 2081591 - RNA, 19 nt, Homo sapiens
  misc_RNA (1)...(19): siRNA sense strand
gauccgaccuuuggcuuca

SEQ ID NO: 2081592 - RNA, 19 nt, Homo sapiens
  misc_RNA (1)...(19): siRNA sense strand
ucaaagguguagcccauca

SEQ ID NO: 2081593 - RNA, 19 nt, Homo sapiens
  misc_RNA (1)...(19): siRNA sense strand
gaggacucauggacaagaa

SEQ ID NO: 2081594 - RNA, 19 nt, Homo sapiens
  misc_RNA (1)...(19): siRNA sense strand
ccaaggagauggacauucc

SEQ ID NO: 2081595 - RNA, 19 nt, Homo sapiens
  misc_RNA (1)...(19): siRNA sense strand
ggccauaucuccaaguacu

SEQ ID NO: 2081596 - RNA, 19 nt, Homo sapiens
  misc_RNA (1)...(19): siRNA sense strand
ugaaauacacacuuacuca

SEQ ID NO: 2081597 - RNA, 19 nt, Homo sapiens
  misc_RNA (1)...(19): siRNA sense strand
guacaggccauaucuccaa

SEQ ID NO: 2081598 - RNA, 19 nt, Homo sapiens
  misc_RNA (1)...(19): siRNA sense strand
uguacgugcuggacauuaa

SEQ ID NO: 2081599 - RNA, 19 nt, Homo sapiens
  misc_RNA (1)...(19): siRNA sense strand
caggccauaucuccaagua

SEQ ID NO: 2081600 - RNA, 19 nt, Homo sapiens
  misc_RNA (1)...(19): siRNA sense strand
uuaaagacaccaaggagaa

SEQ ID NO: 2081601 - RNA, 19 nt, Homo sapiens
  misc_RNA (1)...(19): siRNA sense strand
ggggugaacucaucauauu

SEQ ID NO: 2081602 - RNA, 19 nt, Homo sapiens
  misc_RNA (1)...(19): siRNA sense strand
cagugaagaugacaguuuc

SEQ ID NO: 2081603 - RNA, 19 nt, Homo sapiens
  misc_RNA (1)...(19): siRNA sense strand
ugaggagacuagacauaau

SEQ ID NO: 2081604 - RNA, 19 nt, Homo sapiens
  misc_RNA (1)...(19): siRNA sense strand
gaagagguuuuggaguaua

SEQ ID NO: 2081605 - RNA, 19 nt, Homo sapiens
  misc_RNA (1)...(19): siRNA sense strand
gcugaggagacuagacaua

SEQ ID NO: 2081606 - RNA, 19 nt, Homo sapiens
  misc_RNA (1)...(19): siRNA sense strand
ugguggaacugcauuguga

SEQ ID NO: 2081607 - RNA, 19 nt, Homo sapiens
  misc_RNA (1)...(19): siRNA sense strand
cugcaaugcugcuuucaau

SEQ ID NO: 2081608 - RNA, 19 nt, Homo sapiens
  misc_RNA (1)...(19): siRNA sense strand
gcccuugucugcaaacagu

SEQ ID NO: 2081609 - RNA, 19 nt, Homo sapiens
  misc_RNA (1)...(19): siRNA sense strand
guaagaagcauggaugaag

SEQ ID NO: 2081610 - RNA, 19 nt, Homo sapiens
  misc_RNA (1)...(19): siRNA sense strand
gacuugaccuaaacagcaa

SEQ ID NO: 2081611 - RNA, 19 nt, Homo sapiens
  misc_RNA (1)...(19): siRNA sense strand
aaugaccucuggagacuug

SEQ ID NO: 2081612 - RNA, 19 nt, Homo sapiens
  misc_RNA (1)...(19): siRNA sense strand
ugaugcaacuaucuuaauc

SEQ ID NO: 2081613 - RNA, 19 nt, Homo sapiens
  misc_RNA (1)...(19): siRNA sense strand
guguagcccaucaguguua

SEQ ID NO: 2081614 - RNA, 19 nt, Homo sapiens
  misc_RNA (1)...(19): siRNA sense strand
acaagaaacagaaugugaa

SEQ ID NO: 2081615 - RNA, 19 nt, Homo sapiens
  misc_RNA (1)...(19): siRNA sense strand
ccugaaaccagccugcaua

SEQ ID NO: 2081616 - RNA, 19 nt, Homo sapiens
  misc_RNA (1)...(19): siRNA sense strand
gagacacccuccugaacag

SEQ ID NO: 2081617 - RNA, 19 nt, Homo sapiens
  misc_RNA (1)...(19): siRNA sense strand
aaacccgcuuccaguagua

SEQ ID NO: 2081618 - RNA, 19 nt, Homo sapiens
  misc_RNA (1)...(19): siRNA sense strand
gcaaaugagcaaugauguc

SEQ ID NO: 2081619 - RNA, 19 nt, Homo sapiens
  misc_RNA (1)...(19): siRNA sense strand
ggccacuccuccuguguga

SEQ ID NO: 2081620 - RNA, 19 nt, Homo sapiens
  misc_RNA (1)...(19): siRNA sense strand
caucaguguuaucaugguu

SEQ ID NO: 2081621 - RNA, 19 nt, Homo sapiens
  misc_RNA (1)...(19): siRNA sense strand
guggguggcucuucuuugg

SEQ ID NO: 2081622 - RNA, 19 nt, Homo sapiens
  misc_RNA (1)...(19): siRNA sense strand
cuaaucagucuauguaugu

SEQ ID NO: 2081623 - RNA, 19 nt, Homo sapiens
  misc_RNA (1)...(19): siRNA sense strand
cacagugcaugcuauuaug

SEQ ID NO: 2081624 - RNA, 19 nt, Homo sapiens
  misc_RNA (1)...(19): siRNA sense strand
ucaaugaccucuggagacu

SEQ ID NO: 2081625 - RNA, 19 nt, Homo sapiens
  misc_RNA (1)...(19): siRNA sense strand
gagacuagacauaauaggu

SEQ ID NO: 2081626 - RNA, 19 nt, Homo sapiens
  misc_RNA (1)...(19): siRNA sense strand
gcucuccuauccucaaugg

SEQ ID NO: 2081627 - RNA, 19 nt, Homo sapiens
  misc_RNA (1)...(19): siRNA sense strand
ccugugugauagaugauaa

SEQ ID NO: 2081628 - RNA, 19 nt, Homo sapiens
  misc_RNA (1)...(19): siRNA sense strand
uggaguauauccuguccuu

SEQ ID NO: 2081629 - RNA, 19 nt, Homo sapiens
  misc_RNA (1)...(19): siRNA sense strand
gaccuaaacagcaaagagu

SEQ ID NO: 2081630 - RNA, 19 nt, Homo sapiens
  misc_RNA (1)...(19): siRNA sense strand
ucuggagacuugaccuaaa

SEQ ID NO: 2081631 - RNA, 19 nt, Homo sapiens
  misc_RNA (1)...(19): siRNA sense strand
ccuccugugugauagauga

SEQ ID NO: 2081632 - RNA, 19 nt, Homo sapiens
  misc_RNA (1)...(19): siRNA sense strand
cgggucaaauggaaaguau

SEQ ID NO: 2081633 - RNA, 19 nt, Homo sapiens
  misc_RNA (1)...(19): siRNA sense strand
gucccuaaauguuggcaaa

SEQ ID NO: 2081634 - RNA, 19 nt, Homo sapiens
  misc_RNA (1)...(19): siRNA sense strand
acagugaagaugacaguuu

SEQ ID NO: 2081635 - RNA, 19 nt, Homo sapiens
  misc_RNA (1)...(19): siRNA sense strand
caaaugagcaaugaugucu

SEQ ID NO: 2081636 - RNA, 19 nt, Homo sapiens
  misc_RNA (1)...(19): siRNA sense strand
aagaguggauccgaccuuu

SEQ ID NO: 2081637 - RNA, 19 nt, Homo sapiens
  misc_RNA (1)...(19): siRNA sense strand
agagagauucuuugaugaa

SEQ ID NO: 2081638 - RNA, 19 nt, Homo sapiens
  misc_RNA (1)...(19): siRNA sense strand
ggagauggacauuccuuac

SEQ ID NO: 2081639 - RNA, 19 nt, Homo sapiens
  misc_RNA (1)...(19): siRNA sense strand
uggauggcauggacaauag

SEQ ID NO: 2081640 - RNA, 19 nt, Homo sapiens
  misc_RNA (1)...(19): siRNA sense strand
gacagugugugguggucuu

SEQ ID NO: 2081641 - RNA, 19 nt, Homo sapiens
  misc_RNA (1)...(19): siRNA sense strand
cgagguggccaaucucaga

SEQ ID NO: 2081642 - RNA, 19 nt, Homo sapiens
  misc_RNA (1)...(19): siRNA sense strand
ggacuugcuagugcuguuu

SEQ ID NO: 2081643 - RNA, 19 nt, Homo sapiens
  misc_RNA (1)...(19): siRNA sense strand
caagaaacagaaugugaag

SEQ ID NO: 2081644 - RNA, 19 nt, Homo sapiens
  misc_RNA (1)...(19): siRNA sense strand
ggacaagaaacagaaugug

SEQ ID NO: 2081645 - RNA, 19 nt, Homo sapiens
  misc_RNA (1)...(19): siRNA sense strand
guacgugcuggacauuaaa

SEQ ID NO: 2081646 - RNA, 19 nt, Homo sapiens
  misc_RNA (1)...(19): siRNA sense strand
aaagcgauguccuccaaag

SEQ ID NO: 2081647 - RNA, 19 nt, Homo sapiens
  misc_RNA (1)...(19): siRNA sense strand
acacuuacucacccucuaa

SEQ ID NO: 2081648 - RNA, 19 nt, Homo sapiens
  misc_RNA (1)...(19): siRNA sense strand
gggugaacucaucauauuu

SEQ ID NO: 2081649 - RNA, 19 nt, Homo sapiens
  misc_RNA (1)...(19): siRNA sense strand
ggcagccacucaagguaga

SEQ ID NO: 2081650 - RNA, 19 nt, Homo sapiens
  misc_RNA (1)...(19): siRNA sense strand
gaugaaauacacacuuacu

SEQ ID NO: 2081651 - RNA, 19 nt, Homo sapiens
  misc_RNA (1)...(19): siRNA sense strand
ccuccacagucccuaaaug

SEQ ID NO: 2081652 - RNA, 19 nt, Homo sapiens
  misc_RNA (1)...(19): siRNA sense strand
acagugguaucgacuuauc

SEQ ID NO: 2081653 - RNA, 19 nt, Homo sapiens
  misc_RNA (1)...(19): siRNA sense strand
ggaggacucauggacaaga

SEQ ID NO: 2081654 - RNA, 19 nt, Homo sapiens
  misc_RNA (1)...(19): siRNA sense strand
ggacugaccucucuuuaug

SEQ ID NO: 2081655 - RNA, 19 nt, Homo sapiens
  misc_RNA (1)...(19): siRNA sense strand
ccaaagagcuccugagaag

SEQ ID NO: 2081656 - RNA, 19 nt, Homo sapiens
  misc_RNA (1)...(19): siRNA sense strand
gaccaaggcugaucuuugu

SEQ ID NO: 2081657 - RNA, 19 nt, Homo sapiens
  misc_RNA (1)...(19): siRNA sense strand
ggccacagcuggaggaaga

SEQ ID NO: 2081658 - RNA, 19 nt, Homo sapiens
  misc_RNA (1)...(19): siRNA sense strand
gaggaggagucuuucaaug

SEQ ID NO: 2081659 - RNA, 19 nt, Homo sapiens
  misc_RNA (1)...(19): siRNA sense strand
gggacaaggugcuccacua

SEQ ID NO: 2081660 - RNA, 19 nt, Homo sapiens
  misc_RNA (1)...(19): siRNA sense strand
gaucugaaccgccuuguca

SEQ ID NO: 2081661 - RNA, 19 nt, Homo sapiens
  misc_RNA (1)...(19): siRNA sense strand
acaaggugcuccacuagaa

SEQ ID NO: 2081662 - RNA, 19 nt, Homo sapiens
  misc_RNA (1)...(19): siRNA sense strand
ggacaugcgugggcgcuau

SEQ ID NO: 2081663 - RNA, 19 nt, Homo sapiens
  misc_RNA (1)...(19): siRNA sense strand
uaaguggacugaccucucu

SEQ ID NO: 2081664 - RNA, 19 nt, Homo sapiens
  misc_RNA (1)...(19): siRNA sense strand
uacaaaaggugaccaauga

SEQ ID NO: 2081665 - RNA, 19 nt, Homo sapiens
  misc_RNA (1)...(19): siRNA sense strand
ggagaaggaucaggucaac

SEQ ID NO: 2081666 - RNA, 19 nt, Homo sapiens
  misc_RNA (1)...(19): siRNA sense strand
ggacaaggugcuccacuag

SEQ ID NO: 2081667 - RNA, 19 nt, Homo sapiens
  misc_RNA (1)...(19): siRNA sense strand
aggcccagcuuuacaagaa

SEQ ID NO: 2081668 - RNA, 19 nt, Homo sapiens
  misc_RNA (1)...(19): siRNA sense strand
caggacaaguuggaucuga

SEQ ID NO: 2081669 - RNA, 19 nt, Homo sapiens
  misc_RNA (1)...(19): siRNA sense strand
ugaccaaggcugaucuuug

SEQ ID NO: 2081670 - RNA, 19 nt, Homo sapiens
  misc_RNA (1)...(19): siRNA sense strand
ccaaccaggcucugaguga

SEQ ID NO: 2081671 - RNA, 19 nt, Homo sapiens
  misc_RNA (1)...(19): siRNA sense strand
gcgaggaggagucuuucaa

SEQ ID NO: 2081672 - RNA, 19 nt, Homo sapiens
  misc_RNA (1)...(19): siRNA sense strand
ccugauccacuccaccuua

SEQ ID NO: 2081673 - RNA, 19 nt, Homo sapiens
  misc_RNA (1)...(19): siRNA sense strand
gaagcagaauccggagaag

SEQ ID NO: 2081674 - RNA, 19 nt, Homo sapiens
  misc_RNA (1)...(19): siRNA sense strand
gcccagcuuuacaagaaga

SEQ ID NO: 2081675 - RNA, 19 nt, Homo sapiens
  misc_RNA (1)...(19): siRNA sense strand
agcagcagaugcaaaguga

SEQ ID NO: 2081676 - RNA, 19 nt, Homo sapiens
  misc_RNA (1)...(19): siRNA sense strand
gaaagccaugcuccgagaa

SEQ ID NO: 2081677 - RNA, 19 nt, Homo sapiens
  misc_RNA (1)...(19): siRNA sense strand
gacaaggugcuccacuaga

SEQ ID NO: 2081678 - RNA, 19 nt, Homo sapiens
  misc_RNA (1)...(19): siRNA sense strand
ucagcaagaagcacaauca

SEQ ID NO: 2081679 - RNA, 19 nt, Homo sapiens
  misc_RNA (1)...(19): siRNA sense strand
aggagcagcuagcgcagaa

SEQ ID NO: 2081680 - RNA, 19 nt, Homo sapiens
  misc_RNA (1)...(19): siRNA sense strand
gccaaagagcuccugagaa

SEQ ID NO: 2081681 - RNA, 19 nt, Homo sapiens
  misc_RNA (1)...(19): siRNA sense strand
gcaaagugaccuggacaag

SEQ ID NO: 2081682 - RNA, 19 nt, Homo sapiens
  misc_RNA (1)...(19): siRNA sense strand
ccaaggcagcccuggagaa

SEQ ID NO: 2081683 - RNA, 19 nt, Homo sapiens
  misc_RNA (1)...(19): siRNA sense strand
cgagcucccuccugauuuu

SEQ ID NO: 2081684 - RNA, 19 nt, Homo sapiens
  misc_RNA (1)...(19): siRNA sense strand
gaacgagcucccuccugau

SEQ ID NO: 2081685 - RNA, 19 nt, Homo sapiens
  misc_RNA (1)...(19): siRNA sense strand
aggcagcccuggagaagca

SEQ ID NO: 2081686 - RNA, 19 nt, Homo sapiens
  misc_RNA (1)...(19): siRNA sense strand
guggacugaccucucuuua

SEQ ID NO: 2081687 - RNA, 19 nt, Homo sapiens
  misc_RNA (1)...(19): siRNA sense strand
ccaaggcugaucuuuguca

SEQ ID NO: 2081688 - RNA, 19 nt, Homo sapiens
  misc_RNA (1)...(19): siRNA sense strand
cgaggaggagucuuucaau

SEQ ID NO: 2081689 - RNA, 19 nt, Homo sapiens
  misc_RNA (1)...(19): siRNA sense strand
ggacaaguuggaucugaac

SEQ ID NO: 2081690 - RNA, 19 nt, Homo sapiens
  misc_RNA (1)...(19): siRNA sense strand
gcaccgcggaugacuccuu

SEQ ID NO: 2081691 - RNA, 19 nt, Homo sapiens
  misc_RNA (1)...(19): siRNA sense strand
gaagcuugaggcccuggaa

SEQ ID NO: 2081692 - RNA, 19 nt, Homo sapiens
  misc_RNA (1)...(19): siRNA sense strand
gaccucagugccagaguga

SEQ ID NO: 2081693 - RNA, 19 nt, Homo sapiens
  misc_RNA (1)...(19): siRNA sense strand
agaagcagaauccggagaa

SEQ ID NO: 2081694 - RNA, 19 nt, Homo sapiens
  misc_RNA (1)...(19): siRNA sense strand
ccacuccaccuuacacaag

SEQ ID NO: 2081695 - RNA, 19 nt, Homo sapiens
  misc_RNA (1)...(19): siRNA sense strand
ucaacacggaccucacuga

SEQ ID NO: 2081696 - RNA, 19 nt, Homo sapiens
  misc_RNA (1)...(19): siRNA sense strand
caaggcagcccuggagaag

SEQ ID NO: 2081697 - RNA, 19 nt, Homo sapiens
  misc_RNA (1)...(19): siRNA sense strand
ugagaagggagaagagcaa

SEQ ID NO: 2081698 - RNA, 19 nt, Homo sapiens
  misc_RNA (1)...(19): siRNA sense strand
cagcagcagaugcaaagug

SEQ ID NO: 2081699 - RNA, 19 nt, Homo sapiens
  misc_RNA (1)...(19): siRNA sense strand
cgccaaagagcuccugaga

SEQ ID NO: 2081700 - RNA, 19 nt, Homo sapiens
  misc_RNA (1)...(19): siRNA sense strand
ggaggacgcagugcaggau

SEQ ID NO: 2081701 - RNA, 19 nt, Homo sapiens
  misc_RNA (1)...(19): siRNA sense strand
aggacaaguuggaucugaa

SEQ ID NO: 2081702 - RNA, 19 nt, Homo sapiens
  misc_RNA (1)...(19): siRNA sense strand
ggcgcgaggaggagucuuu

SEQ ID NO: 2081703 - RNA, 19 nt, Homo sapiens
  misc_RNA (1)...(19): siRNA sense strand
ggcaggcccagcuuuacaa

SEQ ID NO: 2081704 - RNA, 19 nt, Homo sapiens
  misc_RNA (1)...(19): siRNA sense strand
gaagacaauuuccaguuua

SEQ ID NO: 2081705 - RNA, 19 nt, Homo sapiens
  misc_RNA (1)...(19): siRNA sense strand
gaaauuaccucagaagaau

SEQ ID NO: 2081706 - RNA, 19 nt, Homo sapiens
  misc_RNA (1)...(19): siRNA sense strand
gcaauugucugguccuuca

SEQ ID NO: 2081707 - RNA, 19 nt, Homo sapiens
  misc_RNA (1)...(19): siRNA sense strand
guaggaaaccagacuaaua

SEQ ID NO: 2081708 - RNA, 19 nt, Homo sapiens
  misc_RNA (1)...(19): siRNA sense strand
ggaagaaauuaccucagaa

SEQ ID NO: 2081709 - RNA, 19 nt, Homo sapiens
  misc_RNA (1)...(19): siRNA sense strand
ggaggguuccuacuuguua

SEQ ID NO: 2081710 - RNA, 19 nt, Homo sapiens
  misc_RNA (1)...(19): siRNA sense strand
ccaccgaaaucacuggaua

SEQ ID NO: 2081711 - RNA, 19 nt, Homo sapiens
  misc_RNA (1)...(19): siRNA sense strand
gaagaauaccuuguacuuu

SEQ ID NO: 2081712 - RNA, 19 nt, Homo sapiens
  misc_RNA (1)...(19): siRNA sense strand
ggaagaauaccuuguacuu

SEQ ID NO: 2081713 - RNA, 19 nt, Homo sapiens
  misc_RNA (1)...(19): siRNA sense strand
agaagacaauuuccaguuu

SEQ ID NO: 2081714 - RNA, 19 nt, Homo sapiens
  misc_RNA (1)...(19): siRNA sense strand
cuuauggacugaaaguuua

SEQ ID NO: 2081715 - RNA, 19 nt, Homo sapiens
  misc_RNA (1)...(19): siRNA sense strand
guaccagaauugcccuuaa

SEQ ID NO: 2081716 - RNA, 19 nt, Homo sapiens
  misc_RNA (1)...(19): siRNA sense strand
auucuucacuccugauuua

SEQ ID NO: 2081717 - RNA, 19 nt, Homo sapiens
  misc_RNA (1)...(19): siRNA sense strand
ggacuauguugaagauaca

SEQ ID NO: 2081718 - RNA, 19 nt, Homo sapiens
  misc_RNA (1)...(19): siRNA sense strand
uggaagaaauuaccucaga

SEQ ID NO: 2081719 - RNA, 19 nt, Homo sapiens
  misc_RNA (1)...(19): siRNA sense strand
uggauggccuucugcauuu

SEQ ID NO: 2081720 - RNA, 19 nt, Homo sapiens
  misc_RNA (1)...(19): siRNA sense strand
cacucaagauuuccaauuu

SEQ ID NO: 2081721 - RNA, 19 nt, Homo sapiens
  misc_RNA (1)...(19): siRNA sense strand
gcacucaagauuuccaauu

SEQ ID NO: 2081722 - RNA, 19 nt, Homo sapiens
  misc_RNA (1)...(19): siRNA sense strand
uagaguaucaagcuuguua

SEQ ID NO: 2081723 - RNA, 19 nt, Homo sapiens
  misc_RNA (1)...(19): siRNA sense strand
gacaagaccacguucuaaa

SEQ ID NO: 2081724 - RNA, 19 nt, Homo sapiens
  misc_RNA (1)...(19): siRNA sense strand
ccugaagagucauguguuu

SEQ ID NO: 2081725 - RNA, 19 nt, Homo sapiens
  misc_RNA (1)...(19): siRNA sense strand
gaaaguuuauugcauucca

SEQ ID NO: 2081726 - RNA, 19 nt, Homo sapiens
  misc_RNA (1)...(19): siRNA sense strand
gagacaagaccacguucua

SEQ ID NO: 2081727 - RNA, 19 nt, Homo sapiens
  misc_RNA (1)...(19): siRNA sense strand
aaaggacgauugccauaug

SEQ ID NO: 2081728 - RNA, 19 nt, Homo sapiens
  misc_RNA (1)...(19): siRNA sense strand
cuucacuccugauuuauaa

SEQ ID NO: 2081729 - RNA, 19 nt, Homo sapiens
  misc_RNA (1)...(19): siRNA sense strand
gaacuucaggacuauguug

SEQ ID NO: 2081730 - RNA, 19 nt, Homo sapiens
  misc_RNA (1)...(19): siRNA sense strand
uguuguggguucuaacuua

SEQ ID NO: 2081731 - RNA, 19 nt, Homo sapiens
  misc_RNA (1)...(19): siRNA sense strand
gcuuauggacugaaaguuu

SEQ ID NO: 2081732 - RNA, 19 nt, Homo sapiens
  misc_RNA (1)...(19): siRNA sense strand
cagaauugcccuuaaugaa

SEQ ID NO: 2081733 - RNA, 19 nt, Homo sapiens
  misc_RNA (1)...(19): siRNA sense strand
uaacauccuccaacacauu

SEQ ID NO: 2081734 - RNA, 19 nt, Homo sapiens
  misc_RNA (1)...(19): siRNA sense strand
gaagaaauuaccucagaag

SEQ ID NO: 2081735 - RNA, 19 nt, Homo sapiens
  misc_RNA (1)...(19): siRNA sense strand
uauaaggccucugauggaa

SEQ ID NO: 2081736 - RNA, 19 nt, Homo sapiens
  misc_RNA (1)...(19): siRNA sense strand
guuguggguucuaacuuaa

SEQ ID NO: 2081737 - RNA, 19 nt, Homo sapiens
  misc_RNA (1)...(19): siRNA sense strand
agaaauuaccucagaagaa

SEQ ID NO: 2081738 - RNA, 19 nt, Homo sapiens
  misc_RNA (1)...(19): siRNA sense strand
gaagagucauguguuuuaa

SEQ ID NO: 2081739 - RNA, 19 nt, Homo sapiens
  misc_RNA (1)...(19): siRNA sense strand
cauggaagaauaccuugua

SEQ ID NO: 2081740 - RNA, 19 nt, Homo sapiens
  misc_RNA (1)...(19): siRNA sense strand
uaauagugauggaaagaca

SEQ ID NO: 2081741 - RNA, 19 nt, Homo sapiens
  misc_RNA (1)...(19): siRNA sense strand
ggacugaaaguuuauugca

SEQ ID NO: 2081742 - RNA, 19 nt, Homo sapiens
  misc_RNA (1)...(19): siRNA sense strand
gaacuuugucgcuuaugga

SEQ ID NO: 2081743 - RNA, 19 nt, Homo sapiens
  misc_RNA (1)...(19): siRNA sense strand
gaagauacaucggaauacc

SEQ ID NO: 2081744 - RNA, 19 nt, Homo sapiens
  misc_RNA (1)...(19): siRNA sense strand
uuucagcacucaagauuuc

SEQ ID NO: 2081745 - RNA, 19 nt, Homo sapiens
  misc_RNA (1)...(19): siRNA sense strand
ucaggacuauguugaagau

SEQ ID NO: 2081746 - RNA, 19 nt, Homo sapiens
  misc_RNA (1)...(19): siRNA sense strand
uaggacagcauacaauuug

SEQ ID NO: 2081747 - RNA, 19 nt, Homo sapiens
  misc_RNA (1)...(19): siRNA sense strand
uaaguuauuuagccugcaa

SEQ ID NO: 2081748 - RNA, 19 nt, Homo sapiens
  misc_RNA (1)...(19): siRNA sense strand
ccagaauugcccuuaauga

SEQ ID NO: 2081749 - RNA, 19 nt, Homo sapiens
  misc_RNA (1)...(19): siRNA sense strand
gaguugaagcucugacuga

SEQ ID NO: 2081750 - RNA, 19 nt, Homo sapiens
  misc_RNA (1)...(19): siRNA sense strand
cagaagacaauuuccaguu

SEQ ID NO: 2081751 - RNA, 19 nt, Homo sapiens
  misc_RNA (1)...(19): siRNA sense strand
cagaccagcuaguccaaau

SEQ ID NO: 2081752 - RNA, 19 nt, Homo sapiens
  misc_RNA (1)...(19): siRNA sense strand
gacaauuuccaguuuaugu

SEQ ID NO: 2081753 - RNA, 19 nt, Homo sapiens
  misc_RNA (1)...(19): siRNA sense strand
gaucccagccuguuauuac

SEQ ID NO: 2081754 - RNA, 19 nt, Homo sapiens
  misc_RNA (1)...(19): siRNA sense strand
gaggguuccuacuuguuau

SEQ ID NO: 2081755 - RNA, 19 nt, Homo sapiens
  misc_RNA (1)...(19): siRNA sense strand
agaauugcccuuaaugaau

SEQ ID NO: 2081756 - RNA, 19 nt, Homo sapiens
  misc_RNA (1)...(19): siRNA sense strand
uaccagaauugcccuuaau

SEQ ID NO: 2081757 - RNA, 19 nt, Homo sapiens
  misc_RNA (1)...(19): siRNA sense strand
ccagaaaaguaccagaauu

SEQ ID NO: 2081758 - RNA, 19 nt, Homo sapiens
  misc_RNA (1)...(19): siRNA sense strand
guuccuacuuguuaucuca

SEQ ID NO: 2081759 - RNA, 19 nt, Homo sapiens
  misc_RNA (1)...(19): siRNA sense strand
ucgaugcauuuacuucaaa

SEQ ID NO: 2081760 - RNA, 19 nt, Homo sapiens
  misc_RNA (1)...(19): siRNA sense strand
caguuuauguacuaccaaa

SEQ ID NO: 2081761 - RNA, 19 nt, Homo sapiens
  misc_RNA (1)...(19): siRNA sense strand
gaccagcuaguccaaauuc

SEQ ID NO: 2081762 - RNA, 19 nt, Homo sapiens
  misc_RNA (1)...(19): siRNA sense strand
aaugcaggaugagcucuua

SEQ ID NO: 2081763 - RNA, 19 nt, Homo sapiens
  misc_RNA (1)...(19): siRNA sense strand
ggaaaccagacuaauacug

SEQ ID NO: 2081764 - RNA, 19 nt, Homo sapiens
  misc_RNA (1)...(19): siRNA sense strand
agacuaauacugcuuguag

SEQ ID NO: 2081765 - RNA, 19 nt, Homo sapiens
  misc_RNA (1)...(19): siRNA sense strand
aaaccuaucaaacgaguau

SEQ ID NO: 2081766 - RNA, 19 nt, Homo sapiens
  misc_RNA (1)...(19): siRNA sense strand
gauaccacaacacaacaaa

SEQ ID NO: 2081767 - RNA, 19 nt, Homo sapiens
  misc_RNA (1)...(19): siRNA sense strand
gcuuucagcacucaagauu

SEQ ID NO: 2081768 - RNA, 19 nt, Homo sapiens
  misc_RNA (1)...(19): siRNA sense strand
agacaagaccacguucuaa

SEQ ID NO: 2081769 - RNA, 19 nt, Homo sapiens
  misc_RNA (1)...(19): siRNA sense strand
gagcaauugucugguccuu

SEQ ID NO: 2081770 - RNA, 19 nt, Homo sapiens
  misc_RNA (1)...(19): siRNA sense strand
uugaagauacaucggaaua

SEQ ID NO: 2081771 - RNA, 19 nt, Homo sapiens
  misc_RNA (1)...(19): siRNA sense strand
gacugaaaguuuauugcau

SEQ ID NO: 2081772 - RNA, 19 nt, Homo sapiens
  misc_RNA (1)...(19): siRNA sense strand
aaaguagaguaucaagcuu

SEQ ID NO: 2081773 - RNA, 19 nt, Homo sapiens
  misc_RNA (1)...(19): siRNA sense strand
ggaagaaaaucagaagaca

SEQ ID NO: 2081774 - RNA, 19 nt, Homo sapiens
  misc_RNA (1)...(19): siRNA sense strand
ugaagagucauguguuuua

SEQ ID NO: 2081775 - RNA, 19 nt, Homo sapiens
  misc_RNA (1)...(19): siRNA sense strand
caucauggaagaauaccuu

SEQ ID NO: 2081776 - RNA, 19 nt, Homo sapiens
  misc_RNA (1)...(19): siRNA sense strand
cagcuguuguggguucuaa

SEQ ID NO: 2081777 - RNA, 19 nt, Homo sapiens
  misc_RNA (1)...(19): siRNA sense strand
cuaaagaaacuaaguagcu

SEQ ID NO: 2081778 - RNA, 19 nt, Homo sapiens
  misc_RNA (1)...(19): siRNA sense strand
uaggaaaccagacuaauac

SEQ ID NO: 2081779 - RNA, 19 nt, Homo sapiens
  misc_RNA (1)...(19): siRNA sense strand
ugcaagaccuguuguuacu

SEQ ID NO: 2081780 - RNA, 19 nt, Homo sapiens
  misc_RNA (1)...(19): siRNA sense strand
cuaggacagcauacaauuu

SEQ ID NO: 2081781 - RNA, 19 nt, Homo sapiens
  misc_RNA (1)...(19): siRNA sense strand
uugaagcucugacugaaag

SEQ ID NO: 2081782 - RNA, 19 nt, Homo sapiens
  misc_RNA (1)...(19): siRNA sense strand
uauuuaacauccuccaaca

SEQ ID NO: 2081783 - RNA, 19 nt, Homo sapiens
  misc_RNA (1)...(19): siRNA sense strand
aaggacgauugccauauga

SEQ ID NO: 2081784 - RNA, 19 nt, Homo sapiens
  misc_RNA (1)...(19): siRNA sense strand
cagcuaguccaaauucuuc

SEQ ID NO: 2081785 - RNA, 19 nt, Homo sapiens
  misc_RNA (1)...(19): siRNA sense strand
ccuaucaaacgaguauaua

SEQ ID NO: 2081786 - RNA, 19 nt, Homo sapiens
  misc_RNA (1)...(19): siRNA sense strand
uaaggccucugauggaaaa

SEQ ID NO: 2081787 - RNA, 19 nt, Homo sapiens
  misc_RNA (1)...(19): siRNA sense strand
gcauuccaacagcucauuu

SEQ ID NO: 2081788 - RNA, 19 nt, Homo sapiens
  misc_RNA (1)...(19): siRNA sense strand
ccugcaagaccuguuguua

SEQ ID NO: 2081789 - RNA, 19 nt, Homo sapiens
  misc_RNA (1)...(19): siRNA sense strand
caaaaggacgauugccaua

SEQ ID NO: 2081790 - RNA, 19 nt, Homo sapiens
  misc_RNA (1)...(19): siRNA sense strand
gcaggaugagcucuuaaag

SEQ ID NO: 2081791 - RNA, 19 nt, Homo sapiens
  misc_RNA (1)...(19): siRNA sense strand
gauggaaagacagcuguug

SEQ ID NO: 2081792 - RNA, 19 nt, Homo sapiens
  misc_RNA (1)...(19): siRNA sense strand
uuaaagccaauuuccagaa

SEQ ID NO: 2081793 - RNA, 19 nt, Homo sapiens
  misc_RNA (1)...(19): siRNA sense strand
ccuucagacuccucuaguu

SEQ ID NO: 2081794 - RNA, 19 nt, Homo sapiens
  misc_RNA (1)...(19): siRNA sense strand
ggauaccacaacacaacaa

SEQ ID NO: 2081795 - RNA, 19 nt, Homo sapiens
  misc_RNA (1)...(19): siRNA sense strand
ugauuuauaaggccucuga

SEQ ID NO: 2081796 - RNA, 19 nt, Homo sapiens
  misc_RNA (1)...(19): siRNA sense strand
ugaacuuugucgcuuaugg

SEQ ID NO: 2081797 - RNA, 19 nt, Homo sapiens
  misc_RNA (1)...(19): siRNA sense strand
agauacaucggaauaccua

SEQ ID NO: 2081798 - RNA, 19 nt, Homo sapiens
  misc_RNA (1)...(19): siRNA sense strand
ggauggccuucugcauuuc

SEQ ID NO: 2081799 - RNA, 19 nt, Homo sapiens
  misc_RNA (1)...(19): siRNA sense strand
uuauaaggccucugaugga

SEQ ID NO: 2081800 - RNA, 19 nt, Homo sapiens
  misc_RNA (1)...(19): siRNA sense strand
gagcucuuaaagccaauuu

SEQ ID NO: 2081801 - RNA, 19 nt, Homo sapiens
  misc_RNA (1)...(19): siRNA sense strand
cagaaaaguaccagaauug

SEQ ID NO: 2081802 - RNA, 19 nt, Homo sapiens
  misc_RNA (1)...(19): siRNA sense strand
ggaacgagaaugccuacac

SEQ ID NO: 2081803 - RNA, 19 nt, Homo sapiens
  misc_RNA (1)...(19): siRNA sense strand
cugaaaguuuauugcauuc

SEQ ID NO: 2081804 - RNA, 19 nt, Homo sapiens
  misc_RNA (1)...(19): siRNA sense strand
gaagacaauuuccaguuua

SEQ ID NO: 2081805 - RNA, 19 nt, Homo sapiens
  misc_RNA (1)...(19): siRNA sense strand
gaaauuaccucagaagaau

SEQ ID NO: 2081806 - RNA, 19 nt, Homo sapiens
  misc_RNA (1)...(19): siRNA sense strand
gcaauugucugguccuuca

SEQ ID NO: 2081807 - RNA, 19 nt, Homo sapiens
  misc_RNA (1)...(19): siRNA sense strand
ggaagaaauuaccucagaa

SEQ ID NO: 2081808 - RNA, 19 nt, Homo sapiens
  misc_RNA (1)...(19): siRNA sense strand
ggaggguuccuacuuguua

SEQ ID NO: 2081809 - RNA, 19 nt, Homo sapiens
  misc_RNA (1)...(19): siRNA sense strand
ccaccgaaaucacuggaua

SEQ ID NO: 2081810 - RNA, 19 nt, Homo sapiens
  misc_RNA (1)...(19): siRNA sense strand
gaagaauaccuuguacuuu

SEQ ID NO: 2081811 - RNA, 19 nt, Homo sapiens
  misc_RNA (1)...(19): siRNA sense strand
ggaagaauaccuuguacuu

SEQ ID NO: 2081812 - RNA, 19 nt, Homo sapiens
  misc_RNA (1)...(19): siRNA sense strand
agaagacaauuuccaguuu

SEQ ID NO: 2081813 - RNA, 19 nt, Homo sapiens
  misc_RNA (1)...(19): siRNA sense strand
cuuauggacugaaaguuua

SEQ ID NO: 2081814 - RNA, 19 nt, Homo sapiens
  misc_RNA (1)...(19): siRNA sense strand
guaccagaauugcccuuaa

SEQ ID NO: 2081815 - RNA, 19 nt, Homo sapiens
  misc_RNA (1)...(19): siRNA sense strand
auucuucacuccugauuua

SEQ ID NO: 2081816 - RNA, 19 nt, Homo sapiens
  misc_RNA (1)...(19): siRNA sense strand
ggacuauguugaagauaca

SEQ ID NO: 2081817 - RNA, 19 nt, Homo sapiens
  misc_RNA (1)...(19): siRNA sense strand
uggaagaaauuaccucaga

SEQ ID NO: 2081818 - RNA, 19 nt, Homo sapiens
  misc_RNA (1)...(19): siRNA sense strand
uggauggccuucugcauuu

SEQ ID NO: 2081819 - RNA, 19 nt, Homo sapiens
  misc_RNA (1)...(19): siRNA sense strand
cacucaagauuuccaauuu

SEQ ID NO: 2081820 - RNA, 19 nt, Homo sapiens
  misc_RNA (1)...(19): siRNA sense strand
gcacucaagauuuccaauu

SEQ ID NO: 2081821 - RNA, 19 nt, Homo sapiens
  misc_RNA (1)...(19): siRNA sense strand
uagaguaucaagcuuguua

SEQ ID NO: 2081822 - RNA, 19 nt, Homo sapiens
  misc_RNA (1)...(19): siRNA sense strand
gacaagaccacguucuaaa

SEQ ID NO: 2081823 - RNA, 19 nt, Homo sapiens
  misc_RNA (1)...(19): siRNA sense strand
aaaggacgauugccauaug

SEQ ID NO: 2081824 - RNA, 19 nt, Homo sapiens
  misc_RNA (1)...(19): siRNA sense strand
gaaaguuuauugcauucca

SEQ ID NO: 2081825 - RNA, 19 nt, Homo sapiens
  misc_RNA (1)...(19): siRNA sense strand
gagacaagaccacguucua

SEQ ID NO: 2081826 - RNA, 19 nt, Homo sapiens
  misc_RNA (1)...(19): siRNA sense strand
cuucacuccugauuuauaa

SEQ ID NO: 2081827 - RNA, 19 nt, Homo sapiens
  misc_RNA (1)...(19): siRNA sense strand
gaacuucaggacuauguug

SEQ ID NO: 2081828 - RNA, 19 nt, Homo sapiens
  misc_RNA (1)...(19): siRNA sense strand
gcuuauggacugaaaguuu

SEQ ID NO: 2081829 - RNA, 19 nt, Homo sapiens
  misc_RNA (1)...(19): siRNA sense strand
cagaauugcccuuaaugaa

SEQ ID NO: 2081830 - RNA, 19 nt, Homo sapiens
  misc_RNA (1)...(19): siRNA sense strand
uaacauccuccaacacauu

SEQ ID NO: 2081831 - RNA, 19 nt, Homo sapiens
  misc_RNA (1)...(19): siRNA sense strand
gaagaaauuaccucagaag

SEQ ID NO: 2081832 - RNA, 19 nt, Homo sapiens
  misc_RNA (1)...(19): siRNA sense strand
uauaaggccucugauggaa

SEQ ID NO: 2081833 - RNA, 19 nt, Homo sapiens
  misc_RNA (1)...(19): siRNA sense strand
agaaauuaccucagaagaa

SEQ ID NO: 2081834 - RNA, 19 nt, Homo sapiens
  misc_RNA (1)...(19): siRNA sense strand
gaagauacaucggaauacc

SEQ ID NO: 2081835 - RNA, 19 nt, Homo sapiens
  misc_RNA (1)...(19): siRNA sense strand
cauggaagaauaccuugua

SEQ ID NO: 2081836 - RNA, 19 nt, Homo sapiens
  misc_RNA (1)...(19): siRNA sense strand
ggacugaaaguuuauugca

SEQ ID NO: 2081837 - RNA, 19 nt, Homo sapiens
  misc_RNA (1)...(19): siRNA sense strand
gaacuuugucgcuuaugga

SEQ ID NO: 2081838 - RNA, 19 nt, Homo sapiens
  misc_RNA (1)...(19): siRNA sense strand
uuucagcacucaagauuuc

SEQ ID NO: 2081839 - RNA, 19 nt, Homo sapiens
  misc_RNA (1)...(19): siRNA sense strand
ucaggacuauguugaagau

SEQ ID NO: 2081840 - RNA, 19 nt, Homo sapiens
  misc_RNA (1)...(19): siRNA sense strand
uaggacagcauacaauuug

SEQ ID NO: 2081841 - RNA, 19 nt, Homo sapiens
  misc_RNA (1)...(19): siRNA sense strand
uaaguuauuuagccugcaa

SEQ ID NO: 2081842 - RNA, 19 nt, Homo sapiens
  misc_RNA (1)...(19): siRNA sense strand
ccagaauugcccuuaauga

SEQ ID NO: 2081843 - RNA, 19 nt, Homo sapiens
  misc_RNA (1)...(19): siRNA sense strand
gaguugaagcucugacuga

SEQ ID NO: 2081844 - RNA, 19 nt, Homo sapiens
  misc_RNA (1)...(19): siRNA sense strand
cagaagacaauuuccaguu

SEQ ID NO: 2081845 - RNA, 19 nt, Homo sapiens
  misc_RNA (1)...(19): siRNA sense strand
gacaauuuccaguuuaugu

SEQ ID NO: 2081846 - RNA, 19 nt, Homo sapiens
  misc_RNA (1)...(19): siRNA sense strand
gaucccagccuguuauuac

SEQ ID NO: 2081847 - RNA, 19 nt, Homo sapiens
  misc_RNA (1)...(19): siRNA sense strand
gaggguuccuacuuguuau

SEQ ID NO: 2081848 - RNA, 19 nt, Homo sapiens
  misc_RNA (1)...(19): siRNA sense strand
agaauugcccuuaaugaau

SEQ ID NO: 2081849 - RNA, 19 nt, Homo sapiens
  misc_RNA (1)...(19): siRNA sense strand
uaccagaauugcccuuaau

SEQ ID NO: 2081850 - RNA, 19 nt, Homo sapiens
  misc_RNA (1)...(19): siRNA sense strand
caguuuauguacuaccaaa

SEQ ID NO: 2081851 - RNA, 19 nt, Homo sapiens
  misc_RNA (1)...(19): siRNA sense strand
ccagaaaaguaccagaauu

SEQ ID NO: 2081852 - RNA, 19 nt, Homo sapiens
  misc_RNA (1)...(19): siRNA sense strand
guuccuacuuguuaucuca

SEQ ID NO: 2081853 - RNA, 19 nt, Homo sapiens
  misc_RNA (1)...(19): siRNA sense strand
ucgaugcauuuacuucaaa

SEQ ID NO: 2081854 - RNA, 19 nt, Homo sapiens
  misc_RNA (1)...(19): siRNA sense strand
gagcaauugucugguccuu

SEQ ID NO: 2081855 - RNA, 19 nt, Homo sapiens
  misc_RNA (1)...(19): siRNA sense strand
gauaccacaacacaacaaa

SEQ ID NO: 2081856 - RNA, 19 nt, Homo sapiens
  misc_RNA (1)...(19): siRNA sense strand
gcuuucagcacucaagauu

SEQ ID NO: 2081857 - RNA, 19 nt, Homo sapiens
  misc_RNA (1)...(19): siRNA sense strand
agacaagaccacguucuaa

SEQ ID NO: 2081858 - RNA, 19 nt, Homo sapiens
  misc_RNA (1)...(19): siRNA sense strand
uugaagauacaucggaaua

SEQ ID NO: 2081859 - RNA, 19 nt, Homo sapiens
  misc_RNA (1)...(19): siRNA sense strand
gacugaaaguuuauugcau

SEQ ID NO: 2081860 - RNA, 19 nt, Homo sapiens
  misc_RNA (1)...(19): siRNA sense strand
aaaguagaguaucaagcuu

SEQ ID NO: 2081861 - RNA, 19 nt, Homo sapiens
  misc_RNA (1)...(19): siRNA sense strand
ggaagaaaaucagaagaca

SEQ ID NO: 2081862 - RNA, 19 nt, Homo sapiens
  misc_RNA (1)...(19): siRNA sense strand
cuaaagaaacuaaguagcu

SEQ ID NO: 2081863 - RNA, 19 nt, Homo sapiens
  misc_RNA (1)...(19): siRNA sense strand
caucauggaagaauaccuu

SEQ ID NO: 2081864 - RNA, 19 nt, Homo sapiens
  misc_RNA (1)...(19): siRNA sense strand
ugcaagaccuguuguuacu

SEQ ID NO: 2081865 - RNA, 19 nt, Homo sapiens
  misc_RNA (1)...(19): siRNA sense strand
cuaggacagcauacaauuu

SEQ ID NO: 2081866 - RNA, 19 nt, Homo sapiens
  misc_RNA (1)...(19): siRNA sense strand
uugaagcucugacugaaag

SEQ ID NO: 2081867 - RNA, 19 nt, Homo sapiens
  misc_RNA (1)...(19): siRNA sense strand
uauuuaacauccuccaaca

SEQ ID NO: 2081868 - RNA, 19 nt, Homo sapiens
  misc_RNA (1)...(19): siRNA sense strand
aaggacgauugccauauga

SEQ ID NO: 2081869 - RNA, 19 nt, Homo sapiens
  misc_RNA (1)...(19): siRNA sense strand
caaaaggacgauugccaua

SEQ ID NO: 2081870 - RNA, 19 nt, Homo sapiens
  misc_RNA (1)...(19): siRNA sense strand
uaaggccucugauggaaaa

SEQ ID NO: 2081871 - RNA, 19 nt, Homo sapiens
  misc_RNA (1)...(19): siRNA sense strand
gcauuccaacagcucauuu

SEQ ID NO: 2081872 - RNA, 19 nt, Homo sapiens
  misc_RNA (1)...(19): siRNA sense strand
ccugcaagaccuguuguua

SEQ ID NO: 2081873 - RNA, 19 nt, Homo sapiens
  misc_RNA (1)...(19): siRNA sense strand
gcaggaugagcucuuaaag

SEQ ID NO: 2081874 - RNA, 19 nt, Homo sapiens
  misc_RNA (1)...(19): siRNA sense strand
uuaaagccaauuuccagaa

SEQ ID NO: 2081875 - RNA, 19 nt, Homo sapiens
  misc_RNA (1)...(19): siRNA sense strand
agauacaucggaauaccua

SEQ ID NO: 2081876 - RNA, 19 nt, Homo sapiens
  misc_RNA (1)...(19): siRNA sense strand
ggauaccacaacacaacaa

SEQ ID NO: 2081877 - RNA, 19 nt, Homo sapiens
  misc_RNA (1)...(19): siRNA sense strand
ugauuuauaaggccucuga

SEQ ID NO: 2081878 - RNA, 19 nt, Homo sapiens
  misc_RNA (1)...(19): siRNA sense strand
ugaacuuugucgcuuaugg

SEQ ID NO: 2081879 - RNA, 19 nt, Homo sapiens
  misc_RNA (1)...(19): siRNA sense strand
ccuucagacuccucuaguu

SEQ ID NO: 2081880 - RNA, 19 nt, Homo sapiens
  misc_RNA (1)...(19): siRNA sense strand
ggauggccuucugcauuuc

SEQ ID NO: 2081881 - RNA, 19 nt, Homo sapiens
  misc_RNA (1)...(19): siRNA sense strand
gagcucuuaaagccaauuu

SEQ ID NO: 2081882 - RNA, 19 nt, Homo sapiens
  misc_RNA (1)...(19): siRNA sense strand
uuauaaggccucugaugga

SEQ ID NO: 2081883 - RNA, 19 nt, Homo sapiens
  misc_RNA (1)...(19): siRNA sense strand
cugaaaguuuauugcauuc

SEQ ID NO: 2081884 - RNA, 19 nt, Homo sapiens
  misc_RNA (1)...(19): siRNA sense strand
ggaacgagaaugccuacac

SEQ ID NO: 2081885 - RNA, 19 nt, Homo sapiens
  misc_RNA (1)...(19): siRNA sense strand
cuggauggccuucugcauu

SEQ ID NO: 2081886 - RNA, 19 nt, Homo sapiens
  misc_RNA (1)...(19): siRNA sense strand
cagaaaaguaccagaauug

SEQ ID NO: 2081887 - RNA, 19 nt, Homo sapiens
  misc_RNA (1)...(19): siRNA sense strand
gaagaaaaucagaagacaa

SEQ ID NO: 2081888 - RNA, 19 nt, Homo sapiens
  misc_RNA (1)...(19): siRNA sense strand
uuacuaggacagcauacaa

SEQ ID NO: 2081889 - RNA, 19 nt, Homo sapiens
  misc_RNA (1)...(19): siRNA sense strand
guuaucucaugcagcagaa

SEQ ID NO: 2081890 - RNA, 19 nt, Homo sapiens
  misc_RNA (1)...(19): siRNA sense strand
cuucagacuccucuaguug

SEQ ID NO: 2081891 - RNA, 19 nt, Homo sapiens
  misc_RNA (1)...(19): siRNA sense strand
uccaacagcucauuuuaug

SEQ ID NO: 2081892 - RNA, 19 nt, Homo sapiens
  misc_RNA (1)...(19): siRNA sense strand
guugaagcucugacugaaa

SEQ ID NO: 2081893 - RNA, 19 nt, Homo sapiens
  misc_RNA (1)...(19): siRNA sense strand
ggacgauugccauaugaac

SEQ ID NO: 2081894 - RNA, 19 nt, Homo sapiens
  misc_RNA (1)...(19): siRNA sense strand
gcccuuaaugaauuuagaa

SEQ ID NO: 2081895 - RNA, 19 nt, Homo sapiens
  misc_RNA (1)...(19): siRNA sense strand
uaccaaaaguagaguauca

SEQ ID NO: 2081896 - RNA, 19 nt, Homo sapiens
  misc_RNA (1)...(19): siRNA sense strand
acacgcagccacaggaauc

SEQ ID NO: 2081897 - RNA, 19 nt, Homo sapiens
  misc_RNA (1)...(19): siRNA sense strand
gguguaccuuccagucucu

SEQ ID NO: 2081898 - RNA, 19 nt, Homo sapiens
  misc_RNA (1)...(19): siRNA sense strand
aggacuauguugaagauac

SEQ ID NO: 2081899 - RNA, 19 nt, Homo sapiens
  misc_RNA (1)...(19): siRNA sense strand
gauucuucacuccugauuu

SEQ ID NO: 2081900 - RNA, 19 nt, Homo sapiens
  misc_RNA (1)...(19): siRNA sense strand
cuccaacacauucuaaaga

SEQ ID NO: 2081901 - RNA, 19 nt, Homo sapiens
  misc_RNA (1)...(19): siRNA sense strand
aguagaguaucaagcuugu

SEQ ID NO: 2081902 - RNA, 19 nt, Homo sapiens
  misc_RNA (1)...(19): siRNA sense strand
uuagaucccagccuguuau

SEQ ID NO: 2081903 - RNA, 19 nt, Homo sapiens
  misc_RNA (1)...(19): siRNA sense strand
ccagccuguuauuaccaua

SEQ ID NO: 2081904 - RNA, 19 nt, Homo sapiens
  misc_RNA (1)...(19): siRNA sense strand
ggacggagcuggauaagaa

SEQ ID NO: 2081905 - RNA, 19 nt, Homo sapiens
  misc_RNA (1)...(19): siRNA sense strand
ggagagaaccgcauacuga

SEQ ID NO: 2081906 - RNA, 19 nt, Homo sapiens
  misc_RNA (1)...(19): siRNA sense strand
ugagugagcuggauaugaa

SEQ ID NO: 2081907 - RNA, 19 nt, Homo sapiens
  misc_RNA (1)...(19): siRNA sense strand
ggaggagacuugacagaga

SEQ ID NO: 2081908 - RNA, 19 nt, Homo sapiens
  misc_RNA (1)...(19): siRNA sense strand
ggaaggagagaaccgcaua

SEQ ID NO: 2081909 - RNA, 19 nt, Homo sapiens
  misc_RNA (1)...(19): siRNA sense strand
gggacagggugcagcauuu

SEQ ID NO: 2081910 - RNA, 19 nt, Homo sapiens
  misc_RNA (1)...(19): siRNA sense strand
agaaacugcugcugaguga

SEQ ID NO: 2081911 - RNA, 19 nt, Homo sapiens
  misc_RNA (1)...(19): siRNA sense strand
aagagaaggugaucgagaa

SEQ ID NO: 2081912 - RNA, 19 nt, Homo sapiens
  misc_RNA (1)...(19): siRNA sense strand
gaaagaaugaucgagagaa

SEQ ID NO: 2081913 - RNA, 19 nt, Homo sapiens
  misc_RNA (1)...(19): siRNA sense strand
ugacagagaggcuacaaga

SEQ ID NO: 2081914 - RNA, 19 nt, Homo sapiens
  misc_RNA (1)...(19): siRNA sense strand
cgaacuccaucaucauaga

SEQ ID NO: 2081915 - RNA, 19 nt, Homo sapiens
  misc_RNA (1)...(19): siRNA sense strand
gaucuccucucugguacuu

SEQ ID NO: 2081916 - RNA, 19 nt, Homo sapiens
  misc_RNA (1)...(19): siRNA sense strand
aaagaaugaucgagagaag

SEQ ID NO: 2081917 - RNA, 19 nt, Homo sapiens
  misc_RNA (1)...(19): siRNA sense strand
gaacuccaucaucauagaa

SEQ ID NO: 2081918 - RNA, 19 nt, Homo sapiens
  misc_RNA (1)...(19): siRNA sense strand
acagagaggcuacaagaga

SEQ ID NO: 2081919 - RNA, 19 nt, Homo sapiens
  misc_RNA (1)...(19): siRNA sense strand
gcaagcugcagaagaugaa

SEQ ID NO: 2081920 - RNA, 19 nt, Homo sapiens
  misc_RNA (1)...(19): siRNA sense strand
agaaggugaucgagaagau

SEQ ID NO: 2081921 - RNA, 19 nt, Homo sapiens
  misc_RNA (1)...(19): siRNA sense strand
ggacagggugcagcauuug

SEQ ID NO: 2081922 - RNA, 19 nt, Homo sapiens
  misc_RNA (1)...(19): siRNA sense strand
ggccuucccuuggguucua

SEQ ID NO: 2081923 - RNA, 19 nt, Homo sapiens
  misc_RNA (1)...(19): siRNA sense strand
gggcuucccuaugcucuca

SEQ ID NO: 2081924 - RNA, 19 nt, Homo sapiens
  misc_RNA (1)...(19): siRNA sense strand
cgaaagaaugaucgagaga

SEQ ID NO: 2081925 - RNA, 19 nt, Homo sapiens
  misc_RNA (1)...(19): siRNA sense strand
gggagcaggaggagacuug

SEQ ID NO: 2081926 - RNA, 19 nt, Homo sapiens
  misc_RNA (1)...(19): siRNA sense strand
agaaugaucgagagaagga

SEQ ID NO: 2081927 - RNA, 19 nt, Homo sapiens
  misc_RNA (1)...(19): siRNA sense strand
agggcaagcugcagaagau

SEQ ID NO: 2081928 - RNA, 19 nt, Homo sapiens
  misc_RNA (1)...(19): siRNA sense strand
gaacaggcagcagggaaag

SEQ ID NO: 2081929 - RNA, 19 nt, Homo sapiens
  misc_RNA (1)...(19): siRNA sense strand
ugagcuggauaugaagaaa

SEQ ID NO: 2081930 - RNA, 19 nt, Homo sapiens
  misc_RNA (1)...(19): siRNA sense strand
ugaacaggcagcagggaaa

SEQ ID NO: 2081931 - RNA, 19 nt, Homo sapiens
  misc_RNA (1)...(19): siRNA sense strand
gaaggugaucgagaagaug

SEQ ID NO: 2081932 - RNA, 19 nt, Homo sapiens
  misc_RNA (1)...(19): siRNA sense strand
gagaaggugaucgagaaga

SEQ ID NO: 2081933 - RNA, 19 nt, Homo sapiens
  misc_RNA (1)...(19): siRNA sense strand
ggcaagcugcagaagauga

SEQ ID NO: 2081934 - RNA, 19 nt, Homo sapiens
  misc_RNA (1)...(19): siRNA sense strand
gacgagagaagcaggaucu

SEQ ID NO: 2081935 - RNA, 19 nt, Homo sapiens
  misc_RNA (1)...(19): siRNA sense strand
ucauugacagcuucucuga

SEQ ID NO: 2081936 - RNA, 19 nt, Homo sapiens
  misc_RNA (1)...(19): siRNA sense strand
ucuccucucugguacuuca

SEQ ID NO: 2081937 - RNA, 19 nt, Homo sapiens
  misc_RNA (1)...(19): siRNA sense strand
uacacgggcuucccuaugc

SEQ ID NO: 2081938 - RNA, 19 nt, Homo sapiens
  misc_RNA (1)...(19): siRNA sense strand
cggauccugucccuggaaa

SEQ ID NO: 2081939 - RNA, 19 nt, Homo sapiens
  misc_RNA (1)...(19): siRNA sense strand
cuacacgggcuucccuaug

SEQ ID NO: 2081940 - RNA, 19 nt, Homo sapiens
  misc_RNA (1)...(19): siRNA sense strand
gaaggagagaaccgcauac

SEQ ID NO: 2081941 - RNA, 19 nt, Homo sapiens
  misc_RNA (1)...(19): siRNA sense strand
ggacggagcuggauaagaa

SEQ ID NO: 2081942 - RNA, 19 nt, Homo sapiens
  misc_RNA (1)...(19): siRNA sense strand
ggagagaaccgcauacuga

SEQ ID NO: 2081943 - RNA, 19 nt, Homo sapiens
  misc_RNA (1)...(19): siRNA sense strand
ugagugagcuggauaugaa

SEQ ID NO: 2081944 - RNA, 19 nt, Homo sapiens
  misc_RNA (1)...(19): siRNA sense strand
ggaggagacuugacagaga

SEQ ID NO: 2081945 - RNA, 19 nt, Homo sapiens
  misc_RNA (1)...(19): siRNA sense strand
ggaaggagagaaccgcaua

SEQ ID NO: 2081946 - RNA, 19 nt, Homo sapiens
  misc_RNA (1)...(19): siRNA sense strand
gggacagggugcagcauuu

SEQ ID NO: 2081947 - RNA, 19 nt, Homo sapiens
  misc_RNA (1)...(19): siRNA sense strand
agaaacugcugcugaguga

SEQ ID NO: 2081948 - RNA, 19 nt, Homo sapiens
  misc_RNA (1)...(19): siRNA sense strand
aagagaaggugaucgagaa

SEQ ID NO: 2081949 - RNA, 19 nt, Homo sapiens
  misc_RNA (1)...(19): siRNA sense strand
gaaagaaugaucgagagaa

SEQ ID NO: 2081950 - RNA, 19 nt, Homo sapiens
  misc_RNA (1)...(19): siRNA sense strand
ugacagagaggcuacaaga

SEQ ID NO: 2081951 - RNA, 19 nt, Homo sapiens
  misc_RNA (1)...(19): siRNA sense strand
cgaacuccaucaucauaga

SEQ ID NO: 2081952 - RNA, 19 nt, Homo sapiens
  misc_RNA (1)...(19): siRNA sense strand
gaucuccucucugguacuu

SEQ ID NO: 2081953 - RNA, 19 nt, Homo sapiens
  misc_RNA (1)...(19): siRNA sense strand
aaagaaugaucgagagaag

SEQ ID NO: 2081954 - RNA, 19 nt, Homo sapiens
  misc_RNA (1)...(19): siRNA sense strand
gaacuccaucaucauagaa

SEQ ID NO: 2081955 - RNA, 19 nt, Homo sapiens
  misc_RNA (1)...(19): siRNA sense strand
acagagaggcuacaagaga

SEQ ID NO: 2081956 - RNA, 19 nt, Homo sapiens
  misc_RNA (1)...(19): siRNA sense strand
gcaagcugcagaagaugaa

SEQ ID NO: 2081957 - RNA, 19 nt, Homo sapiens
  misc_RNA (1)...(19): siRNA sense strand
agaaggugaucgagaagau

SEQ ID NO: 2081958 - RNA, 19 nt, Homo sapiens
  misc_RNA (1)...(19): siRNA sense strand
ggacagggugcagcauuug

SEQ ID NO: 2081959 - RNA, 19 nt, Homo sapiens
  misc_RNA (1)...(19): siRNA sense strand
ggccuucccuuggguucua

SEQ ID NO: 2081960 - RNA, 19 nt, Homo sapiens
  misc_RNA (1)...(19): siRNA sense strand
gggcuucccuaugcucuca

SEQ ID NO: 2081961 - RNA, 19 nt, Homo sapiens
  misc_RNA (1)...(19): siRNA sense strand
cgaaagaaugaucgagaga

SEQ ID NO: 2081962 - RNA, 19 nt, Homo sapiens
  misc_RNA (1)...(19): siRNA sense strand
gggagcaggaggagacuug

SEQ ID NO: 2081963 - RNA, 19 nt, Homo sapiens
  misc_RNA (1)...(19): siRNA sense strand
agaaugaucgagagaagga

SEQ ID NO: 2081964 - RNA, 19 nt, Homo sapiens
  misc_RNA (1)...(19): siRNA sense strand
agggcaagcugcagaagau

SEQ ID NO: 2081965 - RNA, 19 nt, Homo sapiens
  misc_RNA (1)...(19): siRNA sense strand
gaacaggcagcagggaaag

SEQ ID NO: 2081966 - RNA, 19 nt, Homo sapiens
  misc_RNA (1)...(19): siRNA sense strand
ugagcuggauaugaagaaa

SEQ ID NO: 2081967 - RNA, 19 nt, Homo sapiens
  misc_RNA (1)...(19): siRNA sense strand
ugaacaggcagcagggaaa

SEQ ID NO: 2081968 - RNA, 19 nt, Homo sapiens
  misc_RNA (1)...(19): siRNA sense strand
gaaggugaucgagaagaug

SEQ ID NO: 2081969 - RNA, 19 nt, Homo sapiens
  misc_RNA (1)...(19): siRNA sense strand
gagaaggugaucgagaaga

SEQ ID NO: 2081970 - RNA, 19 nt, Homo sapiens
  misc_RNA (1)...(19): siRNA sense strand
ggcaagcugcagaagauga

SEQ ID NO: 2081971 - RNA, 19 nt, Homo sapiens
  misc_RNA (1)...(19): siRNA sense strand
gacgagagaagcaggaucu

SEQ ID NO: 2081972 - RNA, 19 nt, Homo sapiens
  misc_RNA (1)...(19): siRNA sense strand
ucauugacagcuucucuga

SEQ ID NO: 2081973 - RNA, 19 nt, Homo sapiens
  misc_RNA (1)...(19): siRNA sense strand
ucuccucucugguacuuca

SEQ ID NO: 2081974 - RNA, 19 nt, Homo sapiens
  misc_RNA (1)...(19): siRNA sense strand
uacacgggcuucccuaugc

SEQ ID NO: 2081975 - RNA, 19 nt, Homo sapiens
  misc_RNA (1)...(19): siRNA sense strand
cggauccugucccuggaaa

SEQ ID NO: 2081976 - RNA, 19 nt, Homo sapiens
  misc_RNA (1)...(19): siRNA sense strand
cuacacgggcuucccuaug

SEQ ID NO: 2081977 - RNA, 19 nt, Homo sapiens
  misc_RNA (1)...(19): siRNA sense strand
gaaggagagaaccgcauac

SEQ ID NO: 2081978 - RNA, 19 nt, Homo sapiens
  misc_RNA (1)...(19): siRNA sense strand
cauagaaccugucaacaua

SEQ ID NO: 2081979 - RNA, 19 nt, Homo sapiens
  misc_RNA (1)...(19): siRNA sense strand
ggagcugccuguacaaaua

SEQ ID NO: 2081980 - RNA, 19 nt, Homo sapiens
  misc_RNA (1)...(19): siRNA sense strand
caacuuugcuuaccucuug

SEQ ID NO: 2081981 - RNA, 19 nt, Homo sapiens
  misc_RNA (1)...(19): siRNA sense strand
acucagaacuuuauccuua

SEQ ID NO: 2081982 - RNA, 19 nt, Homo sapiens
  misc_RNA (1)...(19): siRNA sense strand
cagaagcucuuuccuguuu

SEQ ID NO: 2081983 - RNA, 19 nt, Homo sapiens
  misc_RNA (1)...(19): siRNA sense strand
caucaugccuucaguauuc

SEQ ID NO: 2081984 - RNA, 19 nt, Homo sapiens
  misc_RNA (1)...(19): siRNA sense strand
gauaugagcaugaaaccua

SEQ ID NO: 2081985 - RNA, 19 nt, Homo sapiens
  misc_RNA (1)...(19): siRNA sense strand
auagagagcuuccaaguug

SEQ ID NO: 2081986 - RNA, 19 nt, Homo sapiens
  misc_RNA (1)...(19): siRNA sense strand
gaggacaccugcccacuga

SEQ ID NO: 2081987 - RNA, 19 nt, Homo sapiens
  misc_RNA (1)...(19): siRNA sense strand
ccaaggacguuuaugagaa

SEQ ID NO: 2081988 - RNA, 19 nt, Homo sapiens
  misc_RNA (1)...(19): siRNA sense strand
acacacagcugaugaaugg

SEQ ID NO: 2081989 - RNA, 19 nt, Homo sapiens
  misc_RNA (1)...(19): siRNA sense strand
gagcagaggcaauuccuuu

SEQ ID NO: 2081990 - RNA, 19 nt, Homo sapiens
  misc_RNA (1)...(19): siRNA sense strand
cagaagcugugaaggagua

SEQ ID NO: 2081991 - RNA, 19 nt, Homo sapiens
  misc_RNA (1)...(19): siRNA sense strand
gcagaaaggacaacaaaca

SEQ ID NO: 2081992 - RNA, 19 nt, Homo sapiens
  misc_RNA (1)...(19): siRNA sense strand
aaacuuagccucucaccaa

SEQ ID NO: 2081993 - RNA, 19 nt, Homo sapiens
  misc_RNA (1)...(19): siRNA sense strand
gcaaggucauugucaaagu

SEQ ID NO: 2081994 - RNA, 19 nt, Homo sapiens
  misc_RNA (1)...(19): siRNA sense strand
cagaaagguucauggaguu

SEQ ID NO: 2081995 - RNA, 19 nt, Homo sapiens
  misc_RNA (1)...(19): siRNA sense strand
ugagagcacucccaguuug

SEQ ID NO: 2081996 - RNA, 19 nt, Homo sapiens
  misc_RNA (1)...(19): siRNA sense strand
aaaccuugcuccuuuacaa

SEQ ID NO: 2081997 - RNA, 19 nt, Homo sapiens
  misc_RNA (1)...(19): siRNA sense strand
gaguuuggcugagcaguga

SEQ ID NO: 2081998 - RNA, 19 nt, Homo sapiens
  misc_RNA (1)...(19): siRNA sense strand
aaacuuccauauccuguug

SEQ ID NO: 2081999 - RNA, 19 nt, Homo sapiens
  misc_RNA (1)...(19): siRNA sense strand
uaugagaacuuccgucagu

SEQ ID NO: 2082000 - RNA, 19 nt, Homo sapiens
  misc_RNA (1)...(19): siRNA sense strand
ccagaguccugacacagaa

SEQ ID NO: 2082001 - RNA, 19 nt, Homo sapiens
  misc_RNA (1)...(19): siRNA sense strand
ggugaccgcuccaaaauuu

SEQ ID NO: 2082002 - RNA, 19 nt, Homo sapiens
  misc_RNA (1)...(19): siRNA sense strand
acaaauagaggaggucaua

SEQ ID NO: 2082003 - RNA, 19 nt, Homo sapiens
  misc_RNA (1)...(19): siRNA sense strand
ggagagggacgaugucugu

SEQ ID NO: 2082004 - RNA, 19 nt, Homo sapiens
  misc_RNA (1)...(19): siRNA sense strand
gagagggucugggaagguu

SEQ ID NO: 2082005 - RNA, 19 nt, Homo sapiens
  misc_RNA (1)...(19): siRNA sense strand
ggagcuagagcaagaagaa

SEQ ID NO: 2082006 - RNA, 19 nt, Homo sapiens
  misc_RNA (1)...(19): siRNA sense strand
gcucuuuccuguuuucuua

SEQ ID NO: 2082007 - RNA, 19 nt, Homo sapiens
  misc_RNA (1)...(19): siRNA sense strand
gcucagaguuaugaucaga

SEQ ID NO: 2082008 - RNA, 19 nt, Homo sapiens
  misc_RNA (1)...(19): siRNA sense strand
gcagggagcagaggcaauu

SEQ ID NO: 2082009 - RNA, 19 nt, Homo sapiens
  misc_RNA (1)...(19): siRNA sense strand
agaaguguguaacugagua

SEQ ID NO: 2082010 - RNA, 19 nt, Homo sapiens
  misc_RNA (1)...(19): siRNA sense strand
gagcacaccagcaacuuug

SEQ ID NO: 2082011 - RNA, 19 nt, Homo sapiens
  misc_RNA (1)...(19): siRNA sense strand
gcacagggaugggaacacu

SEQ ID NO: 2082012 - RNA, 19 nt, Homo sapiens
  misc_RNA (1)...(19): siRNA sense strand
ggacguuuaugagaacuuc

SEQ ID NO: 2082013 - RNA, 19 nt, Homo sapiens
  misc_RNA (1)...(19): siRNA sense strand
gcagacagggccaaaggaa

SEQ ID NO: 2082014 - RNA, 19 nt, Homo sapiens
  misc_RNA (1)...(19): siRNA sense strand
caguguacauuccgaagaa

SEQ ID NO: 2082015 - RNA, 19 nt, Homo sapiens
  misc_RNA (1)...(19): siRNA sense strand
agagaucccuuggccuuaa

SEQ ID NO: 2082016 - RNA, 19 nt, Homo sapiens
  misc_RNA (1)...(19): siRNA sense strand
gaccggauaugagcaugaa

SEQ ID NO: 2082017 - RNA, 19 nt, Homo sapiens
  misc_RNA (1)...(19): siRNA sense strand
agaccauucugcccucuaa

SEQ ID NO: 2082018 - RNA, 19 nt, Homo sapiens
  misc_RNA (1)...(19): siRNA sense strand
gcaaggacaaggguuagaa

SEQ ID NO: 2082019 - RNA, 19 nt, Homo sapiens
  misc_RNA (1)...(19): siRNA sense strand
gacagcaucuaaugugaag

SEQ ID NO: 2082020 - RNA, 19 nt, Homo sapiens
  misc_RNA (1)...(19): siRNA sense strand
gacuguggccuccaacuaa

SEQ ID NO: 2082021 - RNA, 19 nt, Homo sapiens
  misc_RNA (1)...(19): siRNA sense strand
ccagguaucucuacaucag

SEQ ID NO: 2082022 - RNA, 19 nt, Homo sapiens
  misc_RNA (1)...(19): siRNA sense strand
ggagucagauggaaaacaa

SEQ ID NO: 2082023 - RNA, 19 nt, Homo sapiens
  misc_RNA (1)...(19): siRNA sense strand
gaacacacagcugaugaau

SEQ ID NO: 2082024 - RNA, 19 nt, Homo sapiens
  misc_RNA (1)...(19): siRNA sense strand
ggagcacaccagcaacuuu

SEQ ID NO: 2082025 - RNA, 19 nt, Homo sapiens
  misc_RNA (1)...(19): siRNA sense strand
caucuaaugugaagaccau

SEQ ID NO: 2082026 - RNA, 19 nt, Homo sapiens
  misc_RNA (1)...(19): siRNA sense strand
aaagguucauggaguuuga

SEQ ID NO: 2082027 - RNA, 19 nt, Homo sapiens
  misc_RNA (1)...(19): siRNA sense strand
gccaacagcccacccuuga

SEQ ID NO: 2082028 - RNA, 19 nt, Homo sapiens
  misc_RNA (1)...(19): siRNA sense strand
gcuuggagcugccuguaca

SEQ ID NO: 2082029 - RNA, 19 nt, Homo sapiens
  misc_RNA (1)...(19): siRNA sense strand
cugaggagaugcagauuca

SEQ ID NO: 2082030 - RNA, 19 nt, Homo sapiens
  misc_RNA (1)...(19): siRNA sense strand
caaggucauugucaaaguc

SEQ ID NO: 2082031 - RNA, 19 nt, Homo sapiens
  misc_RNA (1)...(19): siRNA sense strand
ggucugggaagguuauaaa

SEQ ID NO: 2082032 - RNA, 19 nt, Homo sapiens
  misc_RNA (1)...(19): siRNA sense strand
gcaagaagaaggacucacu

SEQ ID NO: 2082033 - RNA, 19 nt, Homo sapiens
  misc_RNA (1)...(19): siRNA sense strand
gaggagaugcagauucaga

SEQ ID NO: 2082034 - RNA, 19 nt, Homo sapiens
  misc_RNA (1)...(19): siRNA sense strand
gugacagcaucuaauguga

SEQ ID NO: 2082035 - RNA, 19 nt, Homo sapiens
  misc_RNA (1)...(19): siRNA sense strand
caaggacguuuaugagaac

SEQ ID NO: 2082036 - RNA, 19 nt, Homo sapiens
  misc_RNA (1)...(19): siRNA sense strand
gaaccugucaacauacuag

SEQ ID NO: 2082037 - RNA, 19 nt, Homo sapiens
  misc_RNA (1)...(19): siRNA sense strand
ucagaguuaugaucagaau

SEQ ID NO: 2082038 - RNA, 19 nt, Homo sapiens
  misc_RNA (1)...(19): siRNA sense strand
gagagaucccuuggccuua

SEQ ID NO: 2082039 - RNA, 19 nt, Homo sapiens
  misc_RNA (1)...(19): siRNA sense strand
caagguggaggcugucauu

SEQ ID NO: 2082040 - RNA, 19 nt, Homo sapiens
  misc_RNA (1)...(19): siRNA sense strand
uugaggagcuagagcaaga

SEQ ID NO: 2082041 - RNA, 19 nt, Homo sapiens
  misc_RNA (1)...(19): siRNA sense strand
ccauagaaccugucaacau

SEQ ID NO: 2082042 - RNA, 19 nt, Homo sapiens
  misc_RNA (1)...(19): siRNA sense strand
ccagcaaacuuccauaucc

SEQ ID NO: 2082043 - RNA, 19 nt, Homo sapiens
  misc_RNA (1)...(19): siRNA sense strand
ggaagcagaggaagaggau

SEQ ID NO: 2082044 - RNA, 19 nt, Homo sapiens
  misc_RNA (1)...(19): siRNA sense strand
aaccaggaaugccauaguu

SEQ ID NO: 2082045 - RNA, 19 nt, Homo sapiens
  misc_RNA (1)...(19): siRNA sense strand
ggacaccugcccacugaau

SEQ ID NO: 2082046 - RNA, 19 nt, Homo sapiens
  misc_RNA (1)...(19): siRNA sense strand
gaaagguucauggaguuug

SEQ ID NO: 2082047 - RNA, 19 nt, Homo sapiens
  misc_RNA (1)...(19): siRNA sense strand
gaaccaggaaugccauagu

SEQ ID NO: 2082048 - RNA, 19 nt, Homo sapiens
  misc_RNA (1)...(19): siRNA sense strand
caaggacaaggguuagaaa

SEQ ID NO: 2082049 - RNA, 19 nt, Homo sapiens
  misc_RNA (1)...(19): siRNA sense strand
cuacaucaaugagcugugu

SEQ ID NO: 2082050 - RNA, 19 nt, Homo sapiens
  misc_RNA (1)...(19): siRNA sense strand
aaauagaggaggucauaga

SEQ ID NO: 2082051 - RNA, 19 nt, Homo sapiens
  misc_RNA (1)...(19): siRNA sense strand
ccucuuggccucuaaacuu

SEQ ID NO: 2082052 - RNA, 19 nt, Homo sapiens
  misc_RNA (1)...(19): siRNA sense strand
caaguugagaaguguguaa

SEQ ID NO: 2082053 - RNA, 19 nt, Homo sapiens
  misc_RNA (1)...(19): siRNA sense strand
cuccugagcuacaucaaug

SEQ ID NO: 2082054 - RNA, 19 nt, Homo sapiens
  misc_RNA (1)...(19): siRNA sense strand
cucuuggccucuaaacuua

SEQ ID NO: 2082055 - RNA, 19 nt, Homo sapiens
  misc_RNA (1)...(19): siRNA sense strand
ucucaaacucagaacuuua

SEQ ID NO: 2082056 - RNA, 19 nt, Homo sapiens
  misc_RNA (1)...(19): siRNA sense strand
ccaaagcaacaucuucuca

SEQ ID NO: 2082057 - RNA, 19 nt, Homo sapiens
  misc_RNA (1)...(19): siRNA sense strand
gcuagaaaguggugauucc

SEQ ID NO: 2082058 - RNA, 19 nt, Homo sapiens
  misc_RNA (1)...(19): siRNA sense strand
ggucauagagagcuuccaa

SEQ ID NO: 2082059 - RNA, 19 nt, Homo sapiens
  misc_RNA (1)...(19): siRNA sense strand
uaaaccagguaucucuaca

SEQ ID NO: 2082060 - RNA, 19 nt, Homo sapiens
  misc_RNA (1)...(19): siRNA sense strand
gcgcucaguuggacucaag

SEQ ID NO: 2082061 - RNA, 19 nt, Homo sapiens
  misc_RNA (1)...(19): siRNA sense strand
gagaucccuuggccuuaau

SEQ ID NO: 2082062 - RNA, 19 nt, Homo sapiens
  misc_RNA (1)...(19): siRNA sense strand
cggaugaucuuuuaugaga

SEQ ID NO: 2082063 - RNA, 19 nt, Homo sapiens
  misc_RNA (1)...(19): siRNA sense strand
ucaggagucuuacacaacu

SEQ ID NO: 2082064 - RNA, 19 nt, Homo sapiens
  misc_RNA (1)...(19): siRNA sense strand
caaagaaaaucaagaacag

SEQ ID NO: 2082065 - RNA, 19 nt, Homo sapiens
  misc_RNA (1)...(19): siRNA sense strand
cccuugagguccaaagaaa

SEQ ID NO: 2082066 - RNA, 19 nt, Homo sapiens
  misc_RNA (1)...(19): siRNA sense strand
cauagagagcuuccaaguu

SEQ ID NO: 2082067 - RNA, 19 nt, Homo sapiens
  misc_RNA (1)...(19): siRNA sense strand
ucaguauucucuccagaca

SEQ ID NO: 2082068 - RNA, 19 nt, Homo sapiens
  misc_RNA (1)...(19): siRNA sense strand
acacacaggucagcagaca

SEQ ID NO: 2082069 - RNA, 19 nt, Homo sapiens
  misc_RNA (1)...(19): siRNA sense strand
ggaagaggaggaagaugca

SEQ ID NO: 2082070 - RNA, 19 nt, Homo sapiens
  misc_RNA (1)...(19): siRNA sense strand
uuuaugagauggcagaaag

SEQ ID NO: 2082071 - RNA, 19 nt, Homo sapiens
  misc_RNA (1)...(19): siRNA sense strand
ggccuuaauugaggagcua

SEQ ID NO: 2082072 - RNA, 19 nt, Homo sapiens
  misc_RNA (1)...(19): siRNA sense strand
ugacuguggccuccaacua

SEQ ID NO: 2082073 - RNA, 19 nt, Homo sapiens
  misc_RNA (1)...(19): siRNA sense strand
gaaaccauagaaccuguca

SEQ ID NO: 2082074 - RNA, 19 nt, Homo sapiens
  misc_RNA (1)...(19): siRNA sense strand
guugagaaguguguaacug

SEQ ID NO: 2082075 - RNA, 19 nt, Homo sapiens
  misc_RNA (1)...(19): siRNA sense strand
uagagagcuuccaaguuga

SEQ ID NO: 2082076 - RNA, 19 nt, Homo sapiens
  misc_RNA (1)...(19): siRNA sense strand
ccugagagcacucccaguu

SEQ ID NO: 2082077 - RNA, 19 nt, Homo sapiens
  misc_RNA (1)...(19): siRNA sense strand
ggagcaagcccuagauagc

SEQ ID NO: 2082078 - RNA, 19 nt, Homo sapiens
  misc_RNA (1)...(19): siRNA sense strand
ggaagaggcugcucagauu

SEQ ID NO: 2082079 - RNA, 19 nt, Homo sapiens
  misc_RNA (1)...(19): siRNA sense strand
ggacaaaguucauuacugu

SEQ ID NO: 2082080 - RNA, 19 nt, Homo sapiens
  misc_RNA (1)...(19): siRNA sense strand
acaaggcgcugguuuaaua

SEQ ID NO: 2082081 - RNA, 19 nt, Homo sapiens
  misc_RNA (1)...(19): siRNA sense strand
ggacagaucuaaauaccuu

SEQ ID NO: 2082082 - RNA, 19 nt, Homo sapiens
  misc_RNA (1)...(19): siRNA sense strand
ggaaauugcugaaggaugu

SEQ ID NO: 2082083 - RNA, 19 nt, Homo sapiens
  misc_RNA (1)...(19): siRNA sense strand
gaacccagacccaaucuua

SEQ ID NO: 2082084 - RNA, 19 nt, Homo sapiens
  misc_RNA (1)...(19): siRNA sense strand
gaacaggcauaucaagaga

SEQ ID NO: 2082085 - RNA, 19 nt, Homo sapiens
  misc_RNA (1)...(19): siRNA sense strand
ucaagaaacuccagccuuu

SEQ ID NO: 2082086 - RNA, 19 nt, Homo sapiens
  misc_RNA (1)...(19): siRNA sense strand
ccaguuaccuccaguuauu

SEQ ID NO: 2082087 - RNA, 19 nt, Homo sapiens
  misc_RNA (1)...(19): siRNA sense strand
gaauuuagccaguaucuug

SEQ ID NO: 2082088 - RNA, 19 nt, Homo sapiens
  misc_RNA (1)...(19): siRNA sense strand
gagcagaggauguguauga

SEQ ID NO: 2082089 - RNA, 19 nt, Homo sapiens
  misc_RNA (1)...(19): siRNA sense strand
caagcuagguuucaaguau

SEQ ID NO: 2082090 - RNA, 19 nt, Homo sapiens
  misc_RNA (1)...(19): siRNA sense strand
gccaguaucuugaaaauua

SEQ ID NO: 2082091 - RNA, 19 nt, Homo sapiens
  misc_RNA (1)...(19): siRNA sense strand
caaacaaggugacaacugu

SEQ ID NO: 2082092 - RNA, 19 nt, Homo sapiens
  misc_RNA (1)...(19): siRNA sense strand
gaaggauguuucaggcaua

SEQ ID NO: 2082093 - RNA, 19 nt, Homo sapiens
  misc_RNA (1)...(19): siRNA sense strand
gaauacugauuguguggua

SEQ ID NO: 2082094 - RNA, 19 nt, Homo sapiens
  misc_RNA (1)...(19): siRNA sense strand
uaaaggacgugucauugaa

SEQ ID NO: 2082095 - RNA, 19 nt, Homo sapiens
  misc_RNA (1)...(19): siRNA sense strand
ugaaacugauggugaauuu

SEQ ID NO: 2082096 - RNA, 19 nt, Homo sapiens
  misc_RNA (1)...(19): siRNA sense strand
gcauauaauuccaacagaa

SEQ ID NO: 2082097 - RNA, 19 nt, Homo sapiens
  misc_RNA (1)...(19): siRNA sense strand
gaaguggacuggacagauc

SEQ ID NO: 2082098 - RNA, 19 nt, Homo sapiens
  misc_RNA (1)...(19): siRNA sense strand
aagaagagcuggagacaga

SEQ ID NO: 2082099 - RNA, 19 nt, Homo sapiens
  misc_RNA (1)...(19): siRNA sense strand
gugcagauguuaccauaaa

SEQ ID NO: 2082100 - RNA, 19 nt, Homo sapiens
  misc_RNA (1)...(19): siRNA sense strand
ggacaugcuuaaauucuau

SEQ ID NO: 2082101 - RNA, 19 nt, Homo sapiens
  misc_RNA (1)...(19): siRNA sense strand
ugucagagaucacaucaaa

SEQ ID NO: 2082102 - RNA, 19 nt, Homo sapiens
  misc_RNA (1)...(19): siRNA sense strand
uaaaguaacuguagaagac

SEQ ID NO: 2082103 - RNA, 19 nt, Homo sapiens
  misc_RNA (1)...(19): siRNA sense strand
aaacagaauuggaaacaga

SEQ ID NO: 2082104 - RNA, 19 nt, Homo sapiens
  misc_RNA (1)...(19): siRNA sense strand
ggaagaguauaucagcaaa

SEQ ID NO: 2082105 - RNA, 19 nt, Homo sapiens
  misc_RNA (1)...(19): siRNA sense strand
gaagaagacauggaaauug

SEQ ID NO: 2082106 - RNA, 19 nt, Homo sapiens
  misc_RNA (1)...(19): siRNA sense strand
uuacgcagcuugaggaauu

SEQ ID NO: 2082107 - RNA, 19 nt, Homo sapiens
  misc_RNA (1)...(19): siRNA sense strand
gcugguaucucgucaugaa

SEQ ID NO: 2082108 - RNA, 19 nt, Homo sapiens
  misc_RNA (1)...(19): siRNA sense strand
gggagaaucugaaccuaau

SEQ ID NO: 2082109 - RNA, 19 nt, Homo sapiens
  misc_RNA (1)...(19): siRNA sense strand
uagaagaagucaaacgauu

SEQ ID NO: 2082110 - RNA, 19 nt, Homo sapiens
  misc_RNA (1)...(19): siRNA sense strand
gaagauagugucagcagaa

SEQ ID NO: 2082111 - RNA, 19 nt, Homo sapiens
  misc_RNA (1)...(19): siRNA sense strand
caagagaacaggcauauca

SEQ ID NO: 2082112 - RNA, 19 nt, Homo sapiens
  misc_RNA (1)...(19): siRNA sense strand
gagccagacuuggacuuua

SEQ ID NO: 2082113 - RNA, 19 nt, Homo sapiens
  misc_RNA (1)...(19): siRNA sense strand
caagauaugaccaauacua

SEQ ID NO: 2082114 - RNA, 19 nt, Homo sapiens
  misc_RNA (1)...(19): siRNA sense strand
agaaugagaugaccacaau

SEQ ID NO: 2082115 - RNA, 19 nt, Homo sapiens
  misc_RNA (1)...(19): siRNA sense strand
aaacagauguggcaguuca

SEQ ID NO: 2082116 - RNA, 19 nt, Homo sapiens
  misc_RNA (1)...(19): siRNA sense strand
gaacgucgaauuucucaga

SEQ ID NO: 2082117 - RNA, 19 nt, Homo sapiens
  misc_RNA (1)...(19): siRNA sense strand
caucauaccucugcuuguu

SEQ ID NO: 2082118 - RNA, 19 nt, Homo sapiens
  misc_RNA (1)...(19): siRNA sense strand
gguaguacauugccagaug

SEQ ID NO: 2082119 - RNA, 19 nt, Homo sapiens
  misc_RNA (1)...(19): siRNA sense strand
gaggagauuucuuucacaa

SEQ ID NO: 2082120 - RNA, 19 nt, Homo sapiens
  misc_RNA (1)...(19): siRNA sense strand
gaaccuuucccaacuacua

SEQ ID NO: 2082121 - RNA, 19 nt, Homo sapiens
  misc_RNA (1)...(19): siRNA sense strand
aaucugaaccuaauccuua

SEQ ID NO: 2082122 - RNA, 19 nt, Homo sapiens
  misc_RNA (1)...(19): siRNA sense strand
ucaaggacauuuagagugu

SEQ ID NO: 2082123 - RNA, 19 nt, Homo sapiens
  misc_RNA (1)...(19): siRNA sense strand
ugaaccagaugccuuugua

SEQ ID NO: 2082124 - RNA, 19 nt, Homo sapiens
  misc_RNA (1)...(19): siRNA sense strand
aaaggaagaucuuaugaag

SEQ ID NO: 2082125 - RNA, 19 nt, Homo sapiens
  misc_RNA (1)...(19): siRNA sense strand
gaaagaugcggauguggaa

SEQ ID NO: 2082126 - RNA, 19 nt, Homo sapiens
  misc_RNA (1)...(19): siRNA sense strand
caacaagauaugaccaaua

SEQ ID NO: 2082127 - RNA, 19 nt, Homo sapiens
  misc_RNA (1)...(19): siRNA sense strand
gauagugucagcagaauga

SEQ ID NO: 2082128 - RNA, 19 nt, Homo sapiens
  misc_RNA (1)...(19): siRNA sense strand
uagcaaggccuauuuaaug

SEQ ID NO: 2082129 - RNA, 19 nt, Homo sapiens
  misc_RNA (1)...(19): siRNA sense strand
ggauguuucaggcauauua

SEQ ID NO: 2082130 - RNA, 19 nt, Homo sapiens
  misc_RNA (1)...(19): siRNA sense strand
ggagaaucaaggacauuua

SEQ ID NO: 2082131 - RNA, 19 nt, Homo sapiens
  misc_RNA (1)...(19): siRNA sense strand
gcuuacagcuggcacgauu

SEQ ID NO: 2082132 - RNA, 19 nt, Homo sapiens
  misc_RNA (1)...(19): siRNA sense strand
ggcauuagcugaaacugau

SEQ ID NO: 2082133 - RNA, 19 nt, Homo sapiens
  misc_RNA (1)...(19): siRNA sense strand
gaagaggccaugacuguuc

SEQ ID NO: 2082134 - RNA, 19 nt, Homo sapiens
  misc_RNA (1)...(19): siRNA sense strand
ggacuggacagaucuaaau

SEQ ID NO: 2082135 - RNA, 19 nt, Homo sapiens
  misc_RNA (1)...(19): siRNA sense strand
gaagucaaacgauugcaaa

SEQ ID NO: 2082136 - RNA, 19 nt, Homo sapiens
  misc_RNA (1)...(19): siRNA sense strand
ggaaccugaugaauacuga

SEQ ID NO: 2082137 - RNA, 19 nt, Homo sapiens
  misc_RNA (1)...(19): siRNA sense strand
ugaccacaauucacuauga

SEQ ID NO: 2082138 - RNA, 19 nt, Homo sapiens
  misc_RNA (1)...(19): siRNA sense strand
gaguauaucagcaaaguga

SEQ ID NO: 2082139 - RNA, 19 nt, Homo sapiens
  misc_RNA (1)...(19): siRNA sense strand
ggauguccgucgcuuggua

SEQ ID NO: 2082140 - RNA, 19 nt, Homo sapiens
  misc_RNA (1)...(19): siRNA sense strand
ggagauuucuuucacaacu

SEQ ID NO: 2082141 - RNA, 19 nt, Homo sapiens
  misc_RNA (1)...(19): siRNA sense strand
guacauguguuuacuuggu

SEQ ID NO: 2082142 - RNA, 19 nt, Homo sapiens
  misc_RNA (1)...(19): siRNA sense strand
gaucauauccaacaucuac

SEQ ID NO: 2082143 - RNA, 19 nt, Homo sapiens
  misc_RNA (1)...(19): siRNA sense strand
agacccugcucuacaaaua

SEQ ID NO: 2082144 - RNA, 19 nt, Homo sapiens
  misc_RNA (1)...(19): siRNA sense strand
agauaaugcucuuggaauu

SEQ ID NO: 2082145 - RNA, 19 nt, Homo sapiens
  misc_RNA (1)...(19): siRNA sense strand
uguucaagcugacaucaua

SEQ ID NO: 2082146 - RNA, 19 nt, Homo sapiens
  misc_RNA (1)...(19): siRNA sense strand
ggagaugccucauauaccu

SEQ ID NO: 2082147 - RNA, 19 nt, Homo sapiens
  misc_RNA (1)...(19): siRNA sense strand
caacaucuaccacaacuuc

SEQ ID NO: 2082148 - RNA, 19 nt, Homo sapiens
  misc_RNA (1)...(19): siRNA sense strand
gauaaugcucuuggaauuu

SEQ ID NO: 2082149 - RNA, 19 nt, Homo sapiens
  misc_RNA (1)...(19): siRNA sense strand
cuaaaacgauggauuauga

SEQ ID NO: 2082150 - RNA, 19 nt, Homo sapiens
  misc_RNA (1)...(19): siRNA sense strand
gguauggaagaguuaauua

SEQ ID NO: 2082151 - RNA, 19 nt, Homo sapiens
  misc_RNA (1)...(19): siRNA sense strand
auacauuucucuccauuga

SEQ ID NO: 2082152 - RNA, 19 nt, Homo sapiens
  misc_RNA (1)...(19): siRNA sense strand
gauaaaggacgugucauug

SEQ ID NO: 2082153 - RNA, 19 nt, Homo sapiens
  misc_RNA (1)...(19): siRNA sense strand
ucagagaucacaucaaaga

SEQ ID NO: 2082154 - RNA, 19 nt, Homo sapiens
  misc_RNA (1)...(19): siRNA sense strand
aaagauggauccagaagca

SEQ ID NO: 2082155 - RNA, 19 nt, Homo sapiens
  misc_RNA (1)...(19): siRNA sense strand
gauguuaccauaaaucuca

SEQ ID NO: 2082156 - RNA, 19 nt, Homo sapiens
  misc_RNA (1)...(19): siRNA sense strand
uagaaagaauggagagaga

SEQ ID NO: 2082157 - RNA, 19 nt, Homo sapiens
  misc_RNA (1)...(19): siRNA sense strand
gcucauuaauguugaagau

SEQ ID NO: 2082158 - RNA, 19 nt, Homo sapiens
  misc_RNA (1)...(19): siRNA sense strand
caggcuauuucuucuuaua

SEQ ID NO: 2082159 - RNA, 19 nt, Homo sapiens
  misc_RNA (1)...(19): siRNA sense strand
cagcagguauggaagaguu

SEQ ID NO: 2082160 - RNA, 19 nt, Homo sapiens
  misc_RNA (1)...(19): siRNA sense strand
ggacucuaauuguuacuca

SEQ ID NO: 2082161 - RNA, 19 nt, Homo sapiens
  misc_RNA (1)...(19): siRNA sense strand
caggauaacuuuuccagua

SEQ ID NO: 2082162 - RNA, 19 nt, Homo sapiens
  misc_RNA (1)...(19): siRNA sense strand
agaagacccugcucuacaa

SEQ ID NO: 2082163 - RNA, 19 nt, Homo sapiens
  misc_RNA (1)...(19): siRNA sense strand
ugucagaggcugugaaauu

SEQ ID NO: 2082164 - RNA, 19 nt, Homo sapiens
  misc_RNA (1)...(19): siRNA sense strand
gagaacaggcauaucaaga

SEQ ID NO: 2082165 - RNA, 19 nt, Homo sapiens
  misc_RNA (1)...(19): siRNA sense strand
uuccugaacucuaugauuu

SEQ ID NO: 2082166 - RNA, 19 nt, Homo sapiens
  misc_RNA (1)...(19): siRNA sense strand
ccacaaggcgcugguuuaa

SEQ ID NO: 2082167 - RNA, 19 nt, Homo sapiens
  misc_RNA (1)...(19): siRNA sense strand
gaacuuaugauugaucuag

SEQ ID NO: 2082168 - RNA, 19 nt, Homo sapiens
  misc_RNA (1)...(19): siRNA sense strand
gagaggagauuucuuucac

SEQ ID NO: 2082169 - RNA, 19 nt, Homo sapiens
  misc_RNA (1)...(19): siRNA sense strand
ucaagaaacagaauuggaa

SEQ ID NO: 2082170 - RNA, 19 nt, Homo sapiens
  misc_RNA (1)...(19): siRNA sense strand
gauacaagaaucuaggaaa

SEQ ID NO: 2082171 - RNA, 19 nt, Homo sapiens
  misc_RNA (1)...(19): siRNA sense strand
uuaagaacauggccuuuca

SEQ ID NO: 2082172 - RNA, 19 nt, Homo sapiens
  misc_RNA (1)...(19): siRNA sense strand
ccaguuagcauguaaauac

SEQ ID NO: 2082173 - RNA, 19 nt, Homo sapiens
  misc_RNA (1)...(19): siRNA sense strand
cagcuucccuggucauaau

SEQ ID NO: 2082174 - RNA, 19 nt, Homo sapiens
  misc_RNA (1)...(19): siRNA sense strand
aaagacaccuaagcuaaga

SEQ ID NO: 2082175 - RNA, 19 nt, Homo sapiens
  misc_RNA (1)...(19): siRNA sense strand
ugcaggcuauuucuucuua

SEQ ID NO: 2082176 - RNA, 19 nt, Homo sapiens
  misc_RNA (1)...(19): siRNA sense strand
caaggccuauuuaauguca

SEQ ID NO: 2082177 - RNA, 19 nt, Homo sapiens
  misc_RNA (1)...(19): siRNA sense strand
gaauauguaguagcacuuu

SEQ ID NO: 2082178 - RNA, 19 nt, Homo sapiens
  misc_RNA (1)...(19): siRNA sense strand
ggaagaggcugcucagauu

SEQ ID NO: 2082179 - RNA, 19 nt, Homo sapiens
  misc_RNA (1)...(19): siRNA sense strand
ggacaaaguucauuacugu

SEQ ID NO: 2082180 - RNA, 19 nt, Homo sapiens
  misc_RNA (1)...(19): siRNA sense strand
acaaggcgcugguuuaaua

SEQ ID NO: 2082181 - RNA, 19 nt, Homo sapiens
  misc_RNA (1)...(19): siRNA sense strand
ggacagaucuaaauaccuu

SEQ ID NO: 2082182 - RNA, 19 nt, Homo sapiens
  misc_RNA (1)...(19): siRNA sense strand
ggaaauugcugaaggaugu

SEQ ID NO: 2082183 - RNA, 19 nt, Homo sapiens
  misc_RNA (1)...(19): siRNA sense strand
gaacccagacccaaucuua

SEQ ID NO: 2082184 - RNA, 19 nt, Homo sapiens
  misc_RNA (1)...(19): siRNA sense strand
gaacaggcauaucaagaga

SEQ ID NO: 2082185 - RNA, 19 nt, Homo sapiens
  misc_RNA (1)...(19): siRNA sense strand
ucaagaaacuccagccuuu

SEQ ID NO: 2082186 - RNA, 19 nt, Homo sapiens
  misc_RNA (1)...(19): siRNA sense strand
ccaguuaccuccaguuauu

SEQ ID NO: 2082187 - RNA, 19 nt, Homo sapiens
  misc_RNA (1)...(19): siRNA sense strand
gaauuuagccaguaucuug

SEQ ID NO: 2082188 - RNA, 19 nt, Homo sapiens
  misc_RNA (1)...(19): siRNA sense strand
gagcagaggauguguauga

SEQ ID NO: 2082189 - RNA, 19 nt, Homo sapiens
  misc_RNA (1)...(19): siRNA sense strand
caagcuagguuucaaguau

SEQ ID NO: 2082190 - RNA, 19 nt, Homo sapiens
  misc_RNA (1)...(19): siRNA sense strand
gccaguaucuugaaaauua

SEQ ID NO: 2082191 - RNA, 19 nt, Homo sapiens
  misc_RNA (1)...(19): siRNA sense strand
caaacaaggugacaacugu

SEQ ID NO: 2082192 - RNA, 19 nt, Homo sapiens
  misc_RNA (1)...(19): siRNA sense strand
gaaggauguuucaggcaua

SEQ ID NO: 2082193 - RNA, 19 nt, Homo sapiens
  misc_RNA (1)...(19): siRNA sense strand
gaauacugauuguguggua

SEQ ID NO: 2082194 - RNA, 19 nt, Homo sapiens
  misc_RNA (1)...(19): siRNA sense strand
uaaaggacgugucauugaa

SEQ ID NO: 2082195 - RNA, 19 nt, Homo sapiens
  misc_RNA (1)...(19): siRNA sense strand
ugaaacugauggugaauuu

SEQ ID NO: 2082196 - RNA, 19 nt, Homo sapiens
  misc_RNA (1)...(19): siRNA sense strand
gcauauaauuccaacagaa

SEQ ID NO: 2082197 - RNA, 19 nt, Homo sapiens
  misc_RNA (1)...(19): siRNA sense strand
gaaguggacuggacagauc

SEQ ID NO: 2082198 - RNA, 19 nt, Homo sapiens
  misc_RNA (1)...(19): siRNA sense strand
aagaagagcuggagacaga

SEQ ID NO: 2082199 - RNA, 19 nt, Homo sapiens
  misc_RNA (1)...(19): siRNA sense strand
gugcagauguuaccauaaa

SEQ ID NO: 2082200 - RNA, 19 nt, Homo sapiens
  misc_RNA (1)...(19): siRNA sense strand
ggacaugcuuaaauucuau

SEQ ID NO: 2082201 - RNA, 19 nt, Homo sapiens
  misc_RNA (1)...(19): siRNA sense strand
ugucagagaucacaucaaa

SEQ ID NO: 2082202 - RNA, 19 nt, Homo sapiens
  misc_RNA (1)...(19): siRNA sense strand
uaaaguaacuguagaagac

SEQ ID NO: 2082203 - RNA, 19 nt, Homo sapiens
  misc_RNA (1)...(19): siRNA sense strand
aaacagaauuggaaacaga

SEQ ID NO: 2082204 - RNA, 19 nt, Homo sapiens
  misc_RNA (1)...(19): siRNA sense strand
ggaagaguauaucagcaaa

SEQ ID NO: 2082205 - RNA, 19 nt, Homo sapiens
  misc_RNA (1)...(19): siRNA sense strand
gaagaagacauggaaauug

SEQ ID NO: 2082206 - RNA, 19 nt, Homo sapiens
  misc_RNA (1)...(19): siRNA sense strand
uuacgcagcuugaggaauu

SEQ ID NO: 2082207 - RNA, 19 nt, Homo sapiens
  misc_RNA (1)...(19): siRNA sense strand
gcugguaucucgucaugaa

SEQ ID NO: 2082208 - RNA, 19 nt, Homo sapiens
  misc_RNA (1)...(19): siRNA sense strand
gggagaaucugaaccuaau

SEQ ID NO: 2082209 - RNA, 19 nt, Homo sapiens
  misc_RNA (1)...(19): siRNA sense strand
uagaagaagucaaacgauu

SEQ ID NO: 2082210 - RNA, 19 nt, Homo sapiens
  misc_RNA (1)...(19): siRNA sense strand
gaagauagugucagcagaa

SEQ ID NO: 2082211 - RNA, 19 nt, Homo sapiens
  misc_RNA (1)...(19): siRNA sense strand
caagagaacaggcauauca

SEQ ID NO: 2082212 - RNA, 19 nt, Homo sapiens
  misc_RNA (1)...(19): siRNA sense strand
gagccagacuuggacuuua

SEQ ID NO: 2082213 - RNA, 19 nt, Homo sapiens
  misc_RNA (1)...(19): siRNA sense strand
caagauaugaccaauacua

SEQ ID NO: 2082214 - RNA, 19 nt, Homo sapiens
  misc_RNA (1)...(19): siRNA sense strand
agaaugagaugaccacaau

SEQ ID NO: 2082215 - RNA, 19 nt, Homo sapiens
  misc_RNA (1)...(19): siRNA sense strand
aaacagauguggcaguuca

SEQ ID NO: 2082216 - RNA, 19 nt, Homo sapiens
  misc_RNA (1)...(19): siRNA sense strand
gaacgucgaauuucucaga

SEQ ID NO: 2082217 - RNA, 19 nt, Homo sapiens
  misc_RNA (1)...(19): siRNA sense strand
caucauaccucugcuuguu

SEQ ID NO: 2082218 - RNA, 19 nt, Homo sapiens
  misc_RNA (1)...(19): siRNA sense strand
gguaguacauugccagaug

SEQ ID NO: 2082219 - RNA, 19 nt, Homo sapiens
  misc_RNA (1)...(19): siRNA sense strand
gaggagauuucuuucacaa

SEQ ID NO: 2082220 - RNA, 19 nt, Homo sapiens
  misc_RNA (1)...(19): siRNA sense strand
gaaccuuucccaacuacua

SEQ ID NO: 2082221 - RNA, 19 nt, Homo sapiens
  misc_RNA (1)...(19): siRNA sense strand
aaucugaaccuaauccuua

SEQ ID NO: 2082222 - RNA, 19 nt, Homo sapiens
  misc_RNA (1)...(19): siRNA sense strand
ucaaggacauuuagagugu

SEQ ID NO: 2082223 - RNA, 19 nt, Homo sapiens
  misc_RNA (1)...(19): siRNA sense strand
ugaaccagaugccuuugua

SEQ ID NO: 2082224 - RNA, 19 nt, Homo sapiens
  misc_RNA (1)...(19): siRNA sense strand
aaaggaagaucuuaugaag

SEQ ID NO: 2082225 - RNA, 19 nt, Homo sapiens
  misc_RNA (1)...(19): siRNA sense strand
gaaagaugcggauguggaa

SEQ ID NO: 2082226 - RNA, 19 nt, Homo sapiens
  misc_RNA (1)...(19): siRNA sense strand
caacaagauaugaccaaua

SEQ ID NO: 2082227 - RNA, 19 nt, Homo sapiens
  misc_RNA (1)...(19): siRNA sense strand
gauagugucagcagaauga

SEQ ID NO: 2082228 - RNA, 19 nt, Homo sapiens
  misc_RNA (1)...(19): siRNA sense strand
uagcaaggccuauuuaaug

SEQ ID NO: 2082229 - RNA, 19 nt, Homo sapiens
  misc_RNA (1)...(19): siRNA sense strand
ggauguuucaggcauauua

SEQ ID NO: 2082230 - RNA, 19 nt, Homo sapiens
  misc_RNA (1)...(19): siRNA sense strand
ggagaaucaaggacauuua

SEQ ID NO: 2082231 - RNA, 19 nt, Homo sapiens
  misc_RNA (1)...(19): siRNA sense strand
gcuuacagcuggcacgauu

SEQ ID NO: 2082232 - RNA, 19 nt, Homo sapiens
  misc_RNA (1)...(19): siRNA sense strand
ggcauuagcugaaacugau

SEQ ID NO: 2082233 - RNA, 19 nt, Homo sapiens
  misc_RNA (1)...(19): siRNA sense strand
gaagaggccaugacuguuc

SEQ ID NO: 2082234 - RNA, 19 nt, Homo sapiens
  misc_RNA (1)...(19): siRNA sense strand
ggacuggacagaucuaaau

SEQ ID NO: 2082235 - RNA, 19 nt, Homo sapiens
  misc_RNA (1)...(19): siRNA sense strand
gaagucaaacgauugcaaa

SEQ ID NO: 2082236 - RNA, 19 nt, Homo sapiens
  misc_RNA (1)...(19): siRNA sense strand
ggaaccugaugaauacuga

SEQ ID NO: 2082237 - RNA, 19 nt, Homo sapiens
  misc_RNA (1)...(19): siRNA sense strand
ugaccacaauucacuauga

SEQ ID NO: 2082238 - RNA, 19 nt, Homo sapiens
  misc_RNA (1)...(19): siRNA sense strand
gaguauaucagcaaaguga

SEQ ID NO: 2082239 - RNA, 19 nt, Homo sapiens
  misc_RNA (1)...(19): siRNA sense strand
ggauguccgucgcuuggua

SEQ ID NO: 2082240 - RNA, 19 nt, Homo sapiens
  misc_RNA (1)...(19): siRNA sense strand
ggagauuucuuucacaacu

SEQ ID NO: 2082241 - RNA, 19 nt, Homo sapiens
  misc_RNA (1)...(19): siRNA sense strand
guacauguguuuacuuggu

SEQ ID NO: 2082242 - RNA, 19 nt, Homo sapiens
  misc_RNA (1)...(19): siRNA sense strand
gaucauauccaacaucuac

SEQ ID NO: 2082243 - RNA, 19 nt, Homo sapiens
  misc_RNA (1)...(19): siRNA sense strand
agacccugcucuacaaaua

SEQ ID NO: 2082244 - RNA, 19 nt, Homo sapiens
  misc_RNA (1)...(19): siRNA sense strand
agauaaugcucuuggaauu

SEQ ID NO: 2082245 - RNA, 19 nt, Homo sapiens
  misc_RNA (1)...(19): siRNA sense strand
uguucaagcugacaucaua

SEQ ID NO: 2082246 - RNA, 19 nt, Homo sapiens
  misc_RNA (1)...(19): siRNA sense strand
ggagaugccucauauaccu

SEQ ID NO: 2082247 - RNA, 19 nt, Homo sapiens
  misc_RNA (1)...(19): siRNA sense strand
caacaucuaccacaacuuc

SEQ ID NO: 2082248 - RNA, 19 nt, Homo sapiens
  misc_RNA (1)...(19): siRNA sense strand
gauaaugcucuuggaauuu

SEQ ID NO: 2082249 - RNA, 19 nt, Homo sapiens
  misc_RNA (1)...(19): siRNA sense strand
cuaaaacgauggauuauga

SEQ ID NO: 2082250 - RNA, 19 nt, Homo sapiens
  misc_RNA (1)...(19): siRNA sense strand
gguauggaagaguuaauua

SEQ ID NO: 2082251 - RNA, 19 nt, Homo sapiens
  misc_RNA (1)...(19): siRNA sense strand
auacauuucucuccauuga

SEQ ID NO: 2082252 - RNA, 19 nt, Homo sapiens
  misc_RNA (1)...(19): siRNA sense strand
gauaaaggacgugucauug

SEQ ID NO: 2082253 - RNA, 19 nt, Homo sapiens
  misc_RNA (1)...(19): siRNA sense strand
ucagagaucacaucaaaga

SEQ ID NO: 2082254 - RNA, 19 nt, Homo sapiens
  misc_RNA (1)...(19): siRNA sense strand
aaagauggauccagaagca

SEQ ID NO: 2082255 - RNA, 19 nt, Homo sapiens
  misc_RNA (1)...(19): siRNA sense strand
gauguuaccauaaaucuca

SEQ ID NO: 2082256 - RNA, 19 nt, Homo sapiens
  misc_RNA (1)...(19): siRNA sense strand
uagaaagaauggagagaga

SEQ ID NO: 2082257 - RNA, 19 nt, Homo sapiens
  misc_RNA (1)...(19): siRNA sense strand
gcucauuaauguugaagau

SEQ ID NO: 2082258 - RNA, 19 nt, Homo sapiens
  misc_RNA (1)...(19): siRNA sense strand
caggcuauuucuucuuaua

SEQ ID NO: 2082259 - RNA, 19 nt, Homo sapiens
  misc_RNA (1)...(19): siRNA sense strand
cagcagguauggaagaguu

SEQ ID NO: 2082260 - RNA, 19 nt, Homo sapiens
  misc_RNA (1)...(19): siRNA sense strand
ggacucuaauuguuacuca

SEQ ID NO: 2082261 - RNA, 19 nt, Homo sapiens
  misc_RNA (1)...(19): siRNA sense strand
caggauaacuuuuccagua

SEQ ID NO: 2082262 - RNA, 19 nt, Homo sapiens
  misc_RNA (1)...(19): siRNA sense strand
agaagacccugcucuacaa

SEQ ID NO: 2082263 - RNA, 19 nt, Homo sapiens
  misc_RNA (1)...(19): siRNA sense strand
ugucagaggcugugaaauu

SEQ ID NO: 2082264 - RNA, 19 nt, Homo sapiens
  misc_RNA (1)...(19): siRNA sense strand
gagaacaggcauaucaaga

SEQ ID NO: 2082265 - RNA, 19 nt, Homo sapiens
  misc_RNA (1)...(19): siRNA sense strand
uuccugaacucuaugauuu

SEQ ID NO: 2082266 - RNA, 19 nt, Homo sapiens
  misc_RNA (1)...(19): siRNA sense strand
ccacaaggcgcugguuuaa

SEQ ID NO: 2082267 - RNA, 19 nt, Homo sapiens
  misc_RNA (1)...(19): siRNA sense strand
gaacuuaugauugaucuag

SEQ ID NO: 2082268 - RNA, 19 nt, Homo sapiens
  misc_RNA (1)...(19): siRNA sense strand
gagaggagauuucuuucac

SEQ ID NO: 2082269 - RNA, 19 nt, Homo sapiens
  misc_RNA (1)...(19): siRNA sense strand
ucaagaaacagaauuggaa

SEQ ID NO: 2082270 - RNA, 19 nt, Homo sapiens
  misc_RNA (1)...(19): siRNA sense strand
gauacaagaaucuaggaaa

SEQ ID NO: 2082271 - RNA, 19 nt, Homo sapiens
  misc_RNA (1)...(19): siRNA sense strand
uuaagaacauggccuuuca

SEQ ID NO: 2082272 - RNA, 19 nt, Homo sapiens
  misc_RNA (1)...(19): siRNA sense strand
ccaguuagcauguaaauac

SEQ ID NO: 2082273 - RNA, 19 nt, Homo sapiens
  misc_RNA (1)...(19): siRNA sense strand
cagcuucccuggucauaau

SEQ ID NO: 2082274 - RNA, 19 nt, Homo sapiens
  misc_RNA (1)...(19): siRNA sense strand
aaagacaccuaagcuaaga

SEQ ID NO: 2082275 - RNA, 19 nt, Homo sapiens
  misc_RNA (1)...(19): siRNA sense strand
ugcaggcuauuucuucuua

SEQ ID NO: 2082276 - RNA, 19 nt, Homo sapiens
  misc_RNA (1)...(19): siRNA sense strand
caaggccuauuuaauguca

SEQ ID NO: 2082277 - RNA, 19 nt, Homo sapiens
  misc_RNA (1)...(19): siRNA sense strand
gaauauguaguagcacuuu

SEQ ID NO: 2082278 - RNA, 19 nt, Homo sapiens
  misc_RNA (1)...(19): siRNA sense strand
gaucaaaugucaggaguua

SEQ ID NO: 2082279 - RNA, 19 nt, Homo sapiens
  misc_RNA (1)...(19): siRNA sense strand
gaaagacacuaccuaauuc

SEQ ID NO: 2082280 - RNA, 19 nt, Homo sapiens
  misc_RNA (1)...(19): siRNA sense strand
ggaaagacacuaccuaauu

SEQ ID NO: 2082281 - RNA, 19 nt, Homo sapiens
  misc_RNA (1)...(19): siRNA sense strand
ggugaggaauucuuuaaua

SEQ ID NO: 2082282 - RNA, 19 nt, Homo sapiens
  misc_RNA (1)...(19): siRNA sense strand
gauguccacucaauuuaua

SEQ ID NO: 2082283 - RNA, 19 nt, Homo sapiens
  misc_RNA (1)...(19): siRNA sense strand
gaaagugguugccuuagau

SEQ ID NO: 2082284 - RNA, 19 nt, Homo sapiens
  misc_RNA (1)...(19): siRNA sense strand
ggaaagugguugccuuaga

SEQ ID NO: 2082285 - RNA, 19 nt, Homo sapiens
  misc_RNA (1)...(19): siRNA sense strand
cagagcagauucucaauga

SEQ ID NO: 2082286 - RNA, 19 nt, Homo sapiens
  misc_RNA (1)...(19): siRNA sense strand
gaacaaacccagagaacau

SEQ ID NO: 2082287 - RNA, 19 nt, Homo sapiens
  misc_RNA (1)...(19): siRNA sense strand
gcaaacauggaacauauaa

SEQ ID NO: 2082288 - RNA, 19 nt, Homo sapiens
  misc_RNA (1)...(19): siRNA sense strand
ccaacaaacuaccuagaaa

SEQ ID NO: 2082289 - RNA, 19 nt, Homo sapiens
  misc_RNA (1)...(19): siRNA sense strand
gggcaacccugucuuccua

SEQ ID NO: 2082290 - RNA, 19 nt, Homo sapiens
  misc_RNA (1)...(19): siRNA sense strand
ugacaaaugugagaaggua

SEQ ID NO: 2082291 - RNA, 19 nt, Homo sapiens
  misc_RNA (1)...(19): siRNA sense strand
gacaucagcuuacucacuu

SEQ ID NO: 2082292 - RNA, 19 nt, Homo sapiens
  misc_RNA (1)...(19): siRNA sense strand
caucuaaacuggaaagaca

SEQ ID NO: 2082293 - RNA, 19 nt, Homo sapiens
  misc_RNA (1)...(19): siRNA sense strand
aaaugugucuuguguacua

SEQ ID NO: 2082294 - RNA, 19 nt, Homo sapiens
  misc_RNA (1)...(19): siRNA sense strand
gaagaggcguacagaaucu

SEQ ID NO: 2082295 - RNA, 19 nt, Homo sapiens
  misc_RNA (1)...(19): siRNA sense strand
aaacaaauccauacuagga

SEQ ID NO: 2082296 - RNA, 19 nt, Homo sapiens
  misc_RNA (1)...(19): siRNA sense strand
ggagaggcaucaacuaacu

SEQ ID NO: 2082297 - RNA, 19 nt, Homo sapiens
  misc_RNA (1)...(19): siRNA sense strand
gaagagacaucagcuuacu

SEQ ID NO: 2082298 - RNA, 19 nt, Homo sapiens
  misc_RNA (1)...(19): siRNA sense strand
uggcaaacauggaacauau

SEQ ID NO: 2082299 - RNA, 19 nt, Homo sapiens
  misc_RNA (1)...(19): siRNA sense strand
gagaauaauccacuugaug

SEQ ID NO: 2082300 - RNA, 19 nt, Homo sapiens
  misc_RNA (1)...(19): siRNA sense strand
uuaaacaggucagaagauu

SEQ ID NO: 2082301 - RNA, 19 nt, Homo sapiens
  misc_RNA (1)...(19): siRNA sense strand
gaggaaagaugggcauuac

SEQ ID NO: 2082302 - RNA, 19 nt, Homo sapiens
  misc_RNA (1)...(19): siRNA sense strand
cccuuuggcuguaauauuu

SEQ ID NO: 2082303 - RNA, 19 nt, Homo sapiens
  misc_RNA (1)...(19): siRNA sense strand
gcuaaagauucaacagugu

SEQ ID NO: 2082304 - RNA, 19 nt, Homo sapiens
  misc_RNA (1)...(19): siRNA sense strand
aagaaagacuugucaaucu

SEQ ID NO: 2082305 - RNA, 19 nt, Homo sapiens
  misc_RNA (1)...(19): siRNA sense strand
gcuaggcacuaucucauuc

SEQ ID NO: 2082306 - RNA, 19 nt, Homo sapiens
  misc_RNA (1)...(19): siRNA sense strand
ggagaauaauccacuugau

SEQ ID NO: 2082307 - RNA, 19 nt, Homo sapiens
  misc_RNA (1)...(19): siRNA sense strand
accaacaacuucacaauga

SEQ ID NO: 2082308 - RNA, 19 nt, Homo sapiens
  misc_RNA (1)...(19): siRNA sense strand
caaugaaaccuaucagaau

SEQ ID NO: 2082309 - RNA, 19 nt, Homo sapiens
  misc_RNA (1)...(19): siRNA sense strand
ugauaggcauguacuuauu

SEQ ID NO: 2082310 - RNA, 19 nt, Homo sapiens
  misc_RNA (1)...(19): siRNA sense strand
ggaaacuucaacaaucuuu

SEQ ID NO: 2082311 - RNA, 19 nt, Homo sapiens
  misc_RNA (1)...(19): siRNA sense strand
gaauauucaugcauguaca

SEQ ID NO: 2082312 - RNA, 19 nt, Homo sapiens
  misc_RNA (1)...(19): siRNA sense strand
gggcagaaaccauuugaau

SEQ ID NO: 2082313 - RNA, 19 nt, Homo sapiens
  misc_RNA (1)...(19): siRNA sense strand
aaacauacguacuagacau

SEQ ID NO: 2082314 - RNA, 19 nt, Homo sapiens
  misc_RNA (1)...(19): siRNA sense strand
uggaagagacaucagcuua

SEQ ID NO: 2082315 - RNA, 19 nt, Homo sapiens
  misc_RNA (1)...(19): siRNA sense strand
gucaauguauggaguguau

SEQ ID NO: 2082316 - RNA, 19 nt, Homo sapiens
  misc_RNA (1)...(19): siRNA sense strand
agagucagaucaaauguca

SEQ ID NO: 2082317 - RNA, 19 nt, Homo sapiens
  misc_RNA (1)...(19): siRNA sense strand
cuauaaugcuucccaacaa

SEQ ID NO: 2082318 - RNA, 19 nt, Homo sapiens
  misc_RNA (1)...(19): siRNA sense strand
gaauaagaaagacuuguca

SEQ ID NO: 2082319 - RNA, 19 nt, Homo sapiens
  misc_RNA (1)...(19): siRNA sense strand
gaaugugaugugugucaua

SEQ ID NO: 2082320 - RNA, 19 nt, Homo sapiens
  misc_RNA (1)...(19): siRNA sense strand
gugaaucugaggagaauaa

SEQ ID NO: 2082321 - RNA, 19 nt, Homo sapiens
  misc_RNA (1)...(19): siRNA sense strand
caauguauggaguguauaa

SEQ ID NO: 2082322 - RNA, 19 nt, Homo sapiens
  misc_RNA (1)...(19): siRNA sense strand
ggcacuaucucauucauac

SEQ ID NO: 2082323 - RNA, 19 nt, Homo sapiens
  misc_RNA (1)...(19): siRNA sense strand
caagaaaagucaauguaug

SEQ ID NO: 2082324 - RNA, 19 nt, Homo sapiens
  misc_RNA (1)...(19): siRNA sense strand
ggaaucagagcaaagcaau

SEQ ID NO: 2082325 - RNA, 19 nt, Homo sapiens
  misc_RNA (1)...(19): siRNA sense strand
gaaagacuugucaaucugu

SEQ ID NO: 2082326 - RNA, 19 nt, Homo sapiens
  misc_RNA (1)...(19): siRNA sense strand
aaacauugacuuugccauu

SEQ ID NO: 2082327 - RNA, 19 nt, Homo sapiens
  misc_RNA (1)...(19): siRNA sense strand
uaagucugaucccauguau

SEQ ID NO: 2082328 - RNA, 19 nt, Homo sapiens
  misc_RNA (1)...(19): siRNA sense strand
ucagcuuacucacuuuaaa

SEQ ID NO: 2082329 - RNA, 19 nt, Homo sapiens
  misc_RNA (1)...(19): siRNA sense strand
uaagaaagacuugucaauc

SEQ ID NO: 2082330 - RNA, 19 nt, Homo sapiens
  misc_RNA (1)...(19): siRNA sense strand
caaaagaagcuacaacuau

SEQ ID NO: 2082331 - RNA, 19 nt, Homo sapiens
  misc_RNA (1)...(19): siRNA sense strand
ccaagcagguucaaaagaa

SEQ ID NO: 2082332 - RNA, 19 nt, Homo sapiens
  misc_RNA (1)...(19): siRNA sense strand
uuaaaugugucuuguguac

SEQ ID NO: 2082333 - RNA, 19 nt, Homo sapiens
  misc_RNA (1)...(19): siRNA sense strand
ggcaucaacuaacucauag

SEQ ID NO: 2082334 - RNA, 19 nt, Homo sapiens
  misc_RNA (1)...(19): siRNA sense strand
aaaaugaugucuuccugua

SEQ ID NO: 2082335 - RNA, 19 nt, Homo sapiens
  misc_RNA (1)...(19): siRNA sense strand
aaagaguccuuaugcaucu

SEQ ID NO: 2082336 - RNA, 19 nt, Homo sapiens
  misc_RNA (1)...(19): siRNA sense strand
acagucagcucacuuaaaa

SEQ ID NO: 2082337 - RNA, 19 nt, Homo sapiens
  misc_RNA (1)...(19): siRNA sense strand
agaaagacuugucaaucug

SEQ ID NO: 2082338 - RNA, 19 nt, Homo sapiens
  misc_RNA (1)...(19): siRNA sense strand
aaugugaugugugucauaa

SEQ ID NO: 2082339 - RNA, 19 nt, Homo sapiens
  misc_RNA (1)...(19): siRNA sense strand
gacagucaacucacuuaaa

SEQ ID NO: 2082340 - RNA, 19 nt, Homo sapiens
  misc_RNA (1)...(19): siRNA sense strand
acaaugaaaccuaucagaa

SEQ ID NO: 2082341 - RNA, 19 nt, Homo sapiens
  misc_RNA (1)...(19): siRNA sense strand
gaaacaccaucaaaauuag

SEQ ID NO: 2082342 - RNA, 19 nt, Homo sapiens
  misc_RNA (1)...(19): siRNA sense strand
uaacucauagucugccuuu

SEQ ID NO: 2082343 - RNA, 19 nt, Homo sapiens
  misc_RNA (1)...(19): siRNA sense strand
uauaaugcuucccaacaau

SEQ ID NO: 2082344 - RNA, 19 nt, Homo sapiens
  misc_RNA (1)...(19): siRNA sense strand
ccuucuauauccaaacuaa

SEQ ID NO: 2082345 - RNA, 19 nt, Homo sapiens
  misc_RNA (1)...(19): siRNA sense strand
caaauccauacuaggaaua

SEQ ID NO: 2082346 - RNA, 19 nt, Homo sapiens
  misc_RNA (1)...(19): siRNA sense strand
gcaccaacaacuucacaau

SEQ ID NO: 2082347 - RNA, 19 nt, Homo sapiens
  misc_RNA (1)...(19): siRNA sense strand
gccaacaaacuaccuagaa

SEQ ID NO: 2082348 - RNA, 19 nt, Homo sapiens
  misc_RNA (1)...(19): siRNA sense strand
gucaaucugugguucauca

SEQ ID NO: 2082349 - RNA, 19 nt, Homo sapiens
  misc_RNA (1)...(19): siRNA sense strand
aacauugacuuugccauuu

SEQ ID NO: 2082350 - RNA, 19 nt, Homo sapiens
  misc_RNA (1)...(19): siRNA sense strand
caacuuacacauucagaag

SEQ ID NO: 2082351 - RNA, 19 nt, Homo sapiens
  misc_RNA (1)...(19): siRNA sense strand
gacagucagcucacuuaaa

SEQ ID NO: 2082352 - RNA, 19 nt, Homo sapiens
  misc_RNA (1)...(19): siRNA sense strand
cagaggcccuuuggcugua

SEQ ID NO: 2082353 - RNA, 19 nt, Homo sapiens
  misc_RNA (1)...(19): siRNA sense strand
uaauaacugugagguacuu

SEQ ID NO: 2082354 - RNA, 19 nt, Homo sapiens
  misc_RNA (1)...(19): siRNA sense strand
agaauaauccacuugaugu

SEQ ID NO: 2082355 - RNA, 19 nt, Homo sapiens
  misc_RNA (1)...(19): siRNA sense strand
aggcauguacuuauucaua

SEQ ID NO: 2082356 - RNA, 19 nt, Homo sapiens
  misc_RNA (1)...(19): siRNA sense strand
caucagcuuacucacuuua

SEQ ID NO: 2082357 - RNA, 19 nt, Homo sapiens
  misc_RNA (1)...(19): siRNA sense strand
gaugcaguguuugugcuaa

SEQ ID NO: 2082358 - RNA, 19 nt, Homo sapiens
  misc_RNA (1)...(19): siRNA sense strand
gcaacccugucuuccuaau

SEQ ID NO: 2082359 - RNA, 19 nt, Homo sapiens
  misc_RNA (1)...(19): siRNA sense strand
aagaagaggcguacagaau

SEQ ID NO: 2082360 - RNA, 19 nt, Homo sapiens
  misc_RNA (1)...(19): siRNA sense strand
acaaauccauacuaggaau

SEQ ID NO: 2082361 - RNA, 19 nt, Homo sapiens
  misc_RNA (1)...(19): siRNA sense strand
gcauuacacccgugcucua

SEQ ID NO: 2082362 - RNA, 19 nt, Homo sapiens
  misc_RNA (1)...(19): siRNA sense strand
aaaauuagcuaggcacuau

SEQ ID NO: 2082363 - RNA, 19 nt, Homo sapiens
  misc_RNA (1)...(19): siRNA sense strand
uagacagucagcucacuua

SEQ ID NO: 2082364 - RNA, 19 nt, Homo sapiens
  misc_RNA (1)...(19): siRNA sense strand
gguauuuccuucuauaucc

SEQ ID NO: 2082365 - RNA, 19 nt, Homo sapiens
  misc_RNA (1)...(19): siRNA sense strand
uaaagaagaggcguacaga

SEQ ID NO: 2082366 - RNA, 19 nt, Homo sapiens
  misc_RNA (1)...(19): siRNA sense strand
ucagaggccuuuuaaaugu

SEQ ID NO: 2082367 - RNA, 19 nt, Homo sapiens
  misc_RNA (1)...(19): siRNA sense strand
ugaagacauuugugaagca

SEQ ID NO: 2082368 - RNA, 19 nt, Homo sapiens
  misc_RNA (1)...(19): siRNA sense strand
gacaggcuccucacuggaa

SEQ ID NO: 2082369 - RNA, 19 nt, Homo sapiens
  misc_RNA (1)...(19): siRNA sense strand
caaguagaauuuggaaacu

SEQ ID NO: 2082370 - RNA, 19 nt, Homo sapiens
  misc_RNA (1)...(19): siRNA sense strand
caggugaggaauucuuuaa

SEQ ID NO: 2082371 - RNA, 19 nt, Homo sapiens
  misc_RNA (1)...(19): siRNA sense strand
cuugagaaauugugaucuu

SEQ ID NO: 2082372 - RNA, 19 nt, Homo sapiens
  misc_RNA (1)...(19): siRNA sense strand
ccaccaacuuacacauuca

SEQ ID NO: 2082373 - RNA, 19 nt, Homo sapiens
  misc_RNA (1)...(19): siRNA sense strand
acagucaacucacuuaaaa

SEQ ID NO: 2082374 - RNA, 19 nt, Homo sapiens
  misc_RNA (1)...(19): siRNA sense strand
ggcauguacuuauucauac

SEQ ID NO: 2082375 - RNA, 19 nt, Homo sapiens
  misc_RNA (1)...(19): siRNA sense strand
ggaaagaugggcauuacac

SEQ ID NO: 2082376 - RNA, 19 nt, Homo sapiens
  misc_RNA (1)...(19): siRNA sense strand
uuuccgaucuccaucuaaa

SEQ ID NO: 2082377 - RNA, 19 nt, Homo sapiens
  misc_RNA (1)...(19): siRNA sense strand
ggaagagacaucagcuuac

SEQ ID NO: 2082378 - RNA, 19 nt, Homo sapiens
  misc_RNA (1)...(19): siRNA sense strand
gcaaagauaccucaaauua

SEQ ID NO: 2082379 - RNA, 19 nt, Homo sapiens
  misc_RNA (1)...(19): siRNA sense strand
ggaggaaucuguuacaaua

SEQ ID NO: 2082380 - RNA, 19 nt, Homo sapiens
  misc_RNA (1)...(19): siRNA sense strand
ggaauuaucuucuuugaga

SEQ ID NO: 2082381 - RNA, 19 nt, Homo sapiens
  misc_RNA (1)...(19): siRNA sense strand
caacgaagcugcccuauuc

SEQ ID NO: 2082382 - RNA, 19 nt, Homo sapiens
  misc_RNA (1)...(19): siRNA sense strand
gcaaagggcuguaccugaa

SEQ ID NO: 2082383 - RNA, 19 nt, Homo sapiens
  misc_RNA (1)...(19): siRNA sense strand
ggagagaaguggaagcuaa

SEQ ID NO: 2082384 - RNA, 19 nt, Homo sapiens
  misc_RNA (1)...(19): siRNA sense strand
gcaauucuguggugcauaa

SEQ ID NO: 2082385 - RNA, 19 nt, Homo sapiens
  misc_RNA (1)...(19): siRNA sense strand
caagauauguggcaagaaa

SEQ ID NO: 2082386 - RNA, 19 nt, Homo sapiens
  misc_RNA (1)...(19): siRNA sense strand
gaacaggcauuuaacacaa

SEQ ID NO: 2082387 - RNA, 19 nt, Homo sapiens
  misc_RNA (1)...(19): siRNA sense strand
gaauucaacucacugguaa

SEQ ID NO: 2082388 - RNA, 19 nt, Homo sapiens
  misc_RNA (1)...(19): siRNA sense strand
ccaaaggucuaucaaauga

SEQ ID NO: 2082389 - RNA, 19 nt, Homo sapiens
  misc_RNA (1)...(19): siRNA sense strand
ggaaagaaauggcuaagca

SEQ ID NO: 2082390 - RNA, 19 nt, Homo sapiens
  misc_RNA (1)...(19): siRNA sense strand
gaccaucccuagugacuua

SEQ ID NO: 2082391 - RNA, 19 nt, Homo sapiens
  misc_RNA (1)...(19): siRNA sense strand
ggaaauugcuaguuuguca

SEQ ID NO: 2082392 - RNA, 19 nt, Homo sapiens
  misc_RNA (1)...(19): siRNA sense strand
acaaugcucugccuuauaa

SEQ ID NO: 2082393 - RNA, 19 nt, Homo sapiens
  misc_RNA (1)...(19): siRNA sense strand
gaaggcaccgucaagauua

SEQ ID NO: 2082394 - RNA, 19 nt, Homo sapiens
  misc_RNA (1)...(19): siRNA sense strand
uagaagaacuggccaagaa

SEQ ID NO: 2082395 - RNA, 19 nt, Homo sapiens
  misc_RNA (1)...(19): siRNA sense strand
ggaugaagauugcaaugaa

SEQ ID NO: 2082396 - RNA, 19 nt, Homo sapiens
  misc_RNA (1)...(19): siRNA sense strand
gaacgucaguauucuguau

SEQ ID NO: 2082397 - RNA, 19 nt, Homo sapiens
  misc_RNA (1)...(19): siRNA sense strand
ggaaauguauuggcaguga

SEQ ID NO: 2082398 - RNA, 19 nt, Homo sapiens
  misc_RNA (1)...(19): siRNA sense strand
gcagagaagcuuccgauaa

SEQ ID NO: 2082399 - RNA, 19 nt, Homo sapiens
  misc_RNA (1)...(19): siRNA sense strand
gaacaaaguccugaagauu

SEQ ID NO: 2082400 - RNA, 19 nt, Homo sapiens
  misc_RNA (1)...(19): siRNA sense strand
gaagggagauuugcaagau

SEQ ID NO: 2082401 - RNA, 19 nt, Homo sapiens
  misc_RNA (1)...(19): siRNA sense strand
gcaggaacguuuggaaauu

SEQ ID NO: 2082402 - RNA, 19 nt, Homo sapiens
  misc_RNA (1)...(19): siRNA sense strand
cagagaagcuuccgauaau

SEQ ID NO: 2082403 - RNA, 19 nt, Homo sapiens
  misc_RNA (1)...(19): siRNA sense strand
ccacagaacugcucaagag

SEQ ID NO: 2082404 - RNA, 19 nt, Homo sapiens
  misc_RNA (1)...(19): siRNA sense strand
uuacaggucuugaucaauu

SEQ ID NO: 2082405 - RNA, 19 nt, Homo sapiens
  misc_RNA (1)...(19): siRNA sense strand
gaagccaugucaagguuaa

SEQ ID NO: 2082406 - RNA, 19 nt, Homo sapiens
  misc_RNA (1)...(19): siRNA sense strand
gaacagaaacagaauucaa

SEQ ID NO: 2082407 - RNA, 19 nt, Homo sapiens
  misc_RNA (1)...(19): siRNA sense strand
ggaacaaaguccugaagau

SEQ ID NO: 2082408 - RNA, 19 nt, Homo sapiens
  misc_RNA (1)...(19): siRNA sense strand
gcaaggaggauguguuuga

SEQ ID NO: 2082409 - RNA, 19 nt, Homo sapiens
  misc_RNA (1)...(19): siRNA sense strand
gaugaagauugcaaugaaa

SEQ ID NO: 2082410 - RNA, 19 nt, Homo sapiens
  misc_RNA (1)...(19): siRNA sense strand
gaaagugagccaucaguga

SEQ ID NO: 2082411 - RNA, 19 nt, Homo sapiens
  misc_RNA (1)...(19): siRNA sense strand
agauguaguuccugaaaua

SEQ ID NO: 2082412 - RNA, 19 nt, Homo sapiens
  misc_RNA (1)...(19): siRNA sense strand
cagcauagcuauagacaag

SEQ ID NO: 2082413 - RNA, 19 nt, Homo sapiens
  misc_RNA (1)...(19): siRNA sense strand
gcacaaagggaaauguauu

SEQ ID NO: 2082414 - RNA, 19 nt, Homo sapiens
  misc_RNA (1)...(19): siRNA sense strand
gaaaagcagugaaauugaa

SEQ ID NO: 2082415 - RNA, 19 nt, Homo sapiens
  misc_RNA (1)...(19): siRNA sense strand
gaagauaaacucagucaag

SEQ ID NO: 2082416 - RNA, 19 nt, Homo sapiens
  misc_RNA (1)...(19): siRNA sense strand
caaguuagaucgauuucau

SEQ ID NO: 2082417 - RNA, 19 nt, Homo sapiens
  misc_RNA (1)...(19): siRNA sense strand
cagcugacuuucaagauuu

SEQ ID NO: 2082418 - RNA, 19 nt, Homo sapiens
  misc_RNA (1)...(19): siRNA sense strand
ggagauguuuggcgucuug

SEQ ID NO: 2082419 - RNA, 19 nt, Homo sapiens
  misc_RNA (1)...(19): siRNA sense strand
gcacugcucucuauguaag

SEQ ID NO: 2082420 - RNA, 19 nt, Homo sapiens
  misc_RNA (1)...(19): siRNA sense strand
aaaggugucugugcuauuu

SEQ ID NO: 2082421 - RNA, 19 nt, Homo sapiens
  misc_RNA (1)...(19): siRNA sense strand
caacagugguucccauugu

SEQ ID NO: 2082422 - RNA, 19 nt, Homo sapiens
  misc_RNA (1)...(19): siRNA sense strand
aaacagguauugcacaguu

SEQ ID NO: 2082423 - RNA, 19 nt, Homo sapiens
  misc_RNA (1)...(19): siRNA sense strand
gagaaggaaagaagagaua

SEQ ID NO: 2082424 - RNA, 19 nt, Homo sapiens
  misc_RNA (1)...(19): siRNA sense strand
caaauuagucugugaugaa

SEQ ID NO: 2082425 - RNA, 19 nt, Homo sapiens
  misc_RNA (1)...(19): siRNA sense strand
uaaagucacugaugaaagg

SEQ ID NO: 2082426 - RNA, 19 nt, Homo sapiens
  misc_RNA (1)...(19): siRNA sense strand
gaagaaaggagauguuugg

SEQ ID NO: 2082427 - RNA, 19 nt, Homo sapiens
  misc_RNA (1)...(19): siRNA sense strand
gagagauucuggauggauu

SEQ ID NO: 2082428 - RNA, 19 nt, Homo sapiens
  misc_RNA (1)...(19): siRNA sense strand
gaagauugauaagugcaaa

SEQ ID NO: 2082429 - RNA, 19 nt, Homo sapiens
  misc_RNA (1)...(19): siRNA sense strand
acauggagcuguucaguug

SEQ ID NO: 2082430 - RNA, 19 nt, Homo sapiens
  misc_RNA (1)...(19): siRNA sense strand
gaauuacaacuucuuggua

SEQ ID NO: 2082431 - RNA, 19 nt, Homo sapiens
  misc_RNA (1)...(19): siRNA sense strand
aagagaagauugauaagug

SEQ ID NO: 2082432 - RNA, 19 nt, Homo sapiens
  misc_RNA (1)...(19): siRNA sense strand
ugaaaggaauggcagagaa

SEQ ID NO: 2082433 - RNA, 19 nt, Homo sapiens
  misc_RNA (1)...(19): siRNA sense strand
cagcagaaaucauguacga

SEQ ID NO: 2082434 - RNA, 19 nt, Homo sapiens
  misc_RNA (1)...(19): siRNA sense strand
cagaacugcucaagaguga

SEQ ID NO: 2082435 - RNA, 19 nt, Homo sapiens
  misc_RNA (1)...(19): siRNA sense strand
caagaggaauuacaagagu

SEQ ID NO: 2082436 - RNA, 19 nt, Homo sapiens
  misc_RNA (1)...(19): siRNA sense strand
uagcuuauauccaugagaa

SEQ ID NO: 2082437 - RNA, 19 nt, Homo sapiens
  misc_RNA (1)...(19): siRNA sense strand
ucacuuaacugggaugguu

SEQ ID NO: 2082438 - RNA, 19 nt, Homo sapiens
  misc_RNA (1)...(19): siRNA sense strand
gaaggaaagaagagauaaa

SEQ ID NO: 2082439 - RNA, 19 nt, Homo sapiens
  misc_RNA (1)...(19): siRNA sense strand
gacagaccaucuagccuuu

SEQ ID NO: 2082440 - RNA, 19 nt, Homo sapiens
  misc_RNA (1)...(19): siRNA sense strand
aaaguggauuugaggguua

SEQ ID NO: 2082441 - RNA, 19 nt, Homo sapiens
  misc_RNA (1)...(19): siRNA sense strand
ccagcugacuuucaagauu

SEQ ID NO: 2082442 - RNA, 19 nt, Homo sapiens
  misc_RNA (1)...(19): siRNA sense strand
ugacuuaccagcugacuuu

SEQ ID NO: 2082443 - RNA, 19 nt, Homo sapiens
  misc_RNA (1)...(19): siRNA sense strand
gggaggugaugaucuuuga

SEQ ID NO: 2082444 - RNA, 19 nt, Homo sapiens
  misc_RNA (1)...(19): siRNA sense strand
guuuggaaauugcuaguuu

SEQ ID NO: 2082445 - RNA, 19 nt, Homo sapiens
  misc_RNA (1)...(19): siRNA sense strand
caagaguacugcagacauc

SEQ ID NO: 2082446 - RNA, 19 nt, Homo sapiens
  misc_RNA (1)...(19): siRNA sense strand
gauaugaccugcugauucc

SEQ ID NO: 2082447 - RNA, 19 nt, Homo sapiens
  misc_RNA (1)...(19): siRNA sense strand
gauacuucauugaguuuga

SEQ ID NO: 2082448 - RNA, 19 nt, Homo sapiens
  misc_RNA (1)...(19): siRNA sense strand
aagcaaagauaccucaaau

SEQ ID NO: 2082449 - RNA, 19 nt, Homo sapiens
  misc_RNA (1)...(19): siRNA sense strand
ggagguuguuggacuguug

SEQ ID NO: 2082450 - RNA, 19 nt, Homo sapiens
  misc_RNA (1)...(19): siRNA sense strand
ugucgacucuacaaguuua

SEQ ID NO: 2082451 - RNA, 19 nt, Homo sapiens
  misc_RNA (1)...(19): siRNA sense strand
gaaccacgauccagcaaaa

SEQ ID NO: 2082452 - RNA, 19 nt, Homo sapiens
  misc_RNA (1)...(19): siRNA sense strand
ggucacggcuucagaaagg

SEQ ID NO: 2082453 - RNA, 19 nt, Homo sapiens
  misc_RNA (1)...(19): siRNA sense strand
gagugcaucuaaugucuug

SEQ ID NO: 2082454 - RNA, 19 nt, Homo sapiens
  misc_RNA (1)...(19): siRNA sense strand
guacaaacucgacuucaga

SEQ ID NO: 2082455 - RNA, 19 nt, Homo sapiens
  misc_RNA (1)...(19): siRNA sense strand
ccaccuaccuauccagaug

SEQ ID NO: 2082456 - RNA, 19 nt, Homo sapiens
  misc_RNA (1)...(19): siRNA sense strand
ggagugugcauuugauauu

SEQ ID NO: 2082457 - RNA, 19 nt, Homo sapiens
  misc_RNA (1)...(19): siRNA sense strand
cgacugaggcugugcacua

SEQ ID NO: 2082458 - RNA, 19 nt, Homo sapiens
  misc_RNA (1)...(19): siRNA sense strand
guuaaaaucucgccuagaa

SEQ ID NO: 2082459 - RNA, 19 nt, Homo sapiens
  misc_RNA (1)...(19): siRNA sense strand
gagcaaacccgaguucguu

SEQ ID NO: 2082460 - RNA, 19 nt, Homo sapiens
  misc_RNA (1)...(19): siRNA sense strand
ggacaagauuauguugaga

SEQ ID NO: 2082461 - RNA, 19 nt, Homo sapiens
  misc_RNA (1)...(19): siRNA sense strand
ugacuacuacagaaucuua

SEQ ID NO: 2082462 - RNA, 19 nt, Homo sapiens
  misc_RNA (1)...(19): siRNA sense strand
gaccucccuugccaacuua

SEQ ID NO: 2082463 - RNA, 19 nt, Homo sapiens
  misc_RNA (1)...(19): siRNA sense strand
ccuaacuggugaagaagua

SEQ ID NO: 2082464 - RNA, 19 nt, Homo sapiens
  misc_RNA (1)...(19): siRNA sense strand
gcauagcuauagacaagau

SEQ ID NO: 2082465 - RNA, 19 nt, Homo sapiens
  misc_RNA (1)...(19): siRNA sense strand
agucagagcugcaugaagu

SEQ ID NO: 2082466 - RNA, 19 nt, Homo sapiens
  misc_RNA (1)...(19): siRNA sense strand
ggacaggaauguggagagu

SEQ ID NO: 2082467 - RNA, 19 nt, Homo sapiens
  misc_RNA (1)...(19): siRNA sense strand
ugaaauccauggagcaaca

SEQ ID NO: 2082468 - RNA, 19 nt, Homo sapiens
  misc_RNA (1)...(19): siRNA sense strand
ugaagaaacucggcaucaa

SEQ ID NO: 2082469 - RNA, 19 nt, Homo sapiens
  misc_RNA (1)...(19): siRNA sense strand
agaaguggaagcuaaauuu

SEQ ID NO: 2082470 - RNA, 19 nt, Homo sapiens
  misc_RNA (1)...(19): siRNA sense strand
ucagucaagucuacauuau

SEQ ID NO: 2082471 - RNA, 19 nt, Homo sapiens
  misc_RNA (1)...(19): siRNA sense strand
gcacuucaggaaagaaauu

SEQ ID NO: 2082472 - RNA, 19 nt, Homo sapiens
  misc_RNA (1)...(19): siRNA sense strand
cgaaacagacaaauauaug

SEQ ID NO: 2082473 - RNA, 19 nt, Homo sapiens
  misc_RNA (1)...(19): siRNA sense strand
ugucacggcugcaccauga

SEQ ID NO: 2082474 - RNA, 19 nt, Homo sapiens
  misc_RNA (1)...(19): siRNA sense strand
agagaugacuacuacagaa

SEQ ID NO: 2082475 - RNA, 19 nt, Homo sapiens
  misc_RNA (1)...(19): siRNA sense strand
gaagaaacucggcaucaag

SEQ ID NO: 2082476 - RNA, 19 nt, Homo sapiens
  misc_RNA (1)...(19): siRNA sense strand
ugaaaucauccaagaguuu

SEQ ID NO: 2082477 - RNA, 19 nt, Homo sapiens
  misc_RNA (1)...(19): siRNA sense strand
caccaaaucugcauacaac

SEQ ID NO: 2082478 - RNA, 19 nt, Homo sapiens
  misc_RNA (1)...(19): siRNA sense strand
caacagcccuuaaggaaau

SEQ ID NO: 2082479 - RNA, 19 nt, Homo sapiens
  misc_RNA (1)...(19): siRNA sense strand
ggaaauggagcagcuauua

SEQ ID NO: 2082480 - RNA, 19 nt, Homo sapiens
  misc_RNA (1)...(19): siRNA sense strand
cagcaaaccuuauguaaca

SEQ ID NO: 2082481 - RNA, 19 nt, Homo sapiens
  misc_RNA (1)...(19): siRNA sense strand
gaacagcaaaccuuaugua

SEQ ID NO: 2082482 - RNA, 19 nt, Homo sapiens
  misc_RNA (1)...(19): siRNA sense strand
ggacaacuguuuggcaauu

SEQ ID NO: 2082483 - RNA, 19 nt, Homo sapiens
  misc_RNA (1)...(19): siRNA sense strand
ccaaagaagucgauguuuc

SEQ ID NO: 2082484 - RNA, 19 nt, Homo sapiens
  misc_RNA (1)...(19): siRNA sense strand
ggacaagaaccagcuguua

SEQ ID NO: 2082485 - RNA, 19 nt, Homo sapiens
  misc_RNA (1)...(19): siRNA sense strand
ugaaggaccugacccagaa

SEQ ID NO: 2082486 - RNA, 19 nt, Homo sapiens
  misc_RNA (1)...(19): siRNA sense strand
caccagaaguugacugaaa

SEQ ID NO: 2082487 - RNA, 19 nt, Homo sapiens
  misc_RNA (1)...(19): siRNA sense strand
gagcagcuauuagaaaugu

SEQ ID NO: 2082488 - RNA, 19 nt, Homo sapiens
  misc_RNA (1)...(19): siRNA sense strand
agaagucgauguuuccaaa

SEQ ID NO: 2082489 - RNA, 19 nt, Homo sapiens
  misc_RNA (1)...(19): siRNA sense strand
aggaagagcucaaggacaa

SEQ ID NO: 2082490 - RNA, 19 nt, Homo sapiens
  misc_RNA (1)...(19): siRNA sense strand
cgacaagaauccacuacug

SEQ ID NO: 2082491 - RNA, 19 nt, Homo sapiens
  misc_RNA (1)...(19): siRNA sense strand
gggccuugauccagcuuua

SEQ ID NO: 2082492 - RNA, 19 nt, Homo sapiens
  misc_RNA (1)...(19): siRNA sense strand
gcuacaaaccacugaguaa

SEQ ID NO: 2082493 - RNA, 19 nt, Homo sapiens
  misc_RNA (1)...(19): siRNA sense strand
gacaagaauccacuacuga

SEQ ID NO: 2082494 - RNA, 19 nt, Homo sapiens
  misc_RNA (1)...(19): siRNA sense strand
uaccggaaguuucuauuug

SEQ ID NO: 2082495 - RNA, 19 nt, Homo sapiens
  misc_RNA (1)...(19): siRNA sense strand
uaacaacagcccuuaagga

SEQ ID NO: 2082496 - RNA, 19 nt, Homo sapiens
  misc_RNA (1)...(19): siRNA sense strand
gaaauggagcagcuauuag

SEQ ID NO: 2082497 - RNA, 19 nt, Homo sapiens
  misc_RNA (1)...(19): siRNA sense strand
gcagcuauuagaaauguaa

SEQ ID NO: 2082498 - RNA, 19 nt, Homo sapiens
  misc_RNA (1)...(19): siRNA sense strand
gacaacuguuuggcaauuu

SEQ ID NO: 2082499 - RNA, 19 nt, Homo sapiens
  misc_RNA (1)...(19): siRNA sense strand
agguaaagcuggagaugaa

SEQ ID NO: 2082500 - RNA, 19 nt, Homo sapiens
  misc_RNA (1)...(19): siRNA sense strand
gagagaaugggcaaaugaa

SEQ ID NO: 2082501 - RNA, 19 nt, Homo sapiens
  misc_RNA (1)...(19): siRNA sense strand
ccagaaggaaugucagaaa

SEQ ID NO: 2082502 - RNA, 19 nt, Homo sapiens
  misc_RNA (1)...(19): siRNA sense strand
gacaguugcugcagggaau

SEQ ID NO: 2082503 - RNA, 19 nt, Homo sapiens
  misc_RNA (1)...(19): siRNA sense strand
aaacucgggccacuucuaa

SEQ ID NO: 2082504 - RNA, 19 nt, Homo sapiens
  misc_RNA (1)...(19): siRNA sense strand
guuagaaacuuugcaagag

SEQ ID NO: 2082505 - RNA, 19 nt, Homo sapiens
  misc_RNA (1)...(19): siRNA sense strand
caaaugaaagcuacugaca

SEQ ID NO: 2082506 - RNA, 19 nt, Homo sapiens
  misc_RNA (1)...(19): siRNA sense strand
cagagaaugauguuacaaa

SEQ ID NO: 2082507 - RNA, 19 nt, Homo sapiens
  misc_RNA (1)...(19): siRNA sense strand
ggacagaguuuuccguaca

SEQ ID NO: 2082508 - RNA, 19 nt, Homo sapiens
  misc_RNA (1)...(19): siRNA sense strand
acaagcaguugcaccagaa

SEQ ID NO: 2082509 - RNA, 19 nt, Homo sapiens
  misc_RNA (1)...(19): siRNA sense strand
cgagagaaugggcaaauga

SEQ ID NO: 2082510 - RNA, 19 nt, Homo sapiens
  misc_RNA (1)...(19): siRNA sense strand
guuagaagccgucaacaag

SEQ ID NO: 2082511 - RNA, 19 nt, Homo sapiens
  misc_RNA (1)...(19): siRNA sense strand
uggagcagcuauuagaaau

SEQ ID NO: 2082512 - RNA, 19 nt, Homo sapiens
  misc_RNA (1)...(19): siRNA sense strand
uagagcugcuggagaaguu

SEQ ID NO: 2082513 - RNA, 19 nt, Homo sapiens
  misc_RNA (1)...(19): siRNA sense strand
agguagagcugcuggagaa

SEQ ID NO: 2082514 - RNA, 19 nt, Homo sapiens
  misc_RNA (1)...(19): siRNA sense strand
gagaaugggcaaaugaaag

SEQ ID NO: 2082515 - RNA, 19 nt, Homo sapiens
  misc_RNA (1)...(19): siRNA sense strand
ccuagaacagcaaaccuua

SEQ ID NO: 2082516 - RNA, 19 nt, Homo sapiens
  misc_RNA (1)...(19): siRNA sense strand
ggaguuacaggccuuaaag

SEQ ID NO: 2082517 - RNA, 19 nt, Homo sapiens
  misc_RNA (1)...(19): siRNA sense strand
gacaagaaccagcuguuag

SEQ ID NO: 2082518 - RNA, 19 nt, Homo sapiens
  misc_RNA (1)...(19): siRNA sense strand
aaauggagcagcuauuaga

SEQ ID NO: 2082519 - RNA, 19 nt, Homo sapiens
  misc_RNA (1)...(19): siRNA sense strand
uaaacgagagcgagaagga

SEQ ID NO: 2082520 - RNA, 19 nt, Homo sapiens
  misc_RNA (1)...(19): siRNA sense strand
aaugaaagcuacugacacu

SEQ ID NO: 2082521 - RNA, 19 nt, Homo sapiens
  misc_RNA (1)...(19): siRNA sense strand
aaacugagacgagagaaug

SEQ ID NO: 2082522 - RNA, 19 nt, Homo sapiens
  misc_RNA (1)...(19): siRNA sense strand
ccuguuagguccaaagaag

SEQ ID NO: 2082523 - RNA, 19 nt, Homo sapiens
  misc_RNA (1)...(19): siRNA sense strand
ggagaugaaagaggaaaga

SEQ ID NO: 2082524 - RNA, 19 nt, Homo sapiens
  misc_RNA (1)...(19): siRNA sense strand
uagaagccgucaacaagca

SEQ ID NO: 2082525 - RNA, 19 nt, Homo sapiens
  misc_RNA (1)...(19): siRNA sense strand
acaagaaccagcuguuaga

SEQ ID NO: 2082526 - RNA, 19 nt, Homo sapiens
  misc_RNA (1)...(19): siRNA sense strand
gaagagcucaaggacaaga

SEQ ID NO: 2082527 - RNA, 19 nt, Homo sapiens
  misc_RNA (1)...(19): siRNA sense strand
caggagguccagagaauga

SEQ ID NO: 2082528 - RNA, 19 nt, Homo sapiens
  misc_RNA (1)...(19): siRNA sense strand
cagaaggaaugucagaaaa

SEQ ID NO: 2082529 - RNA, 19 nt, Homo sapiens
  misc_RNA (1)...(19): siRNA sense strand
gcaaaccuuauguaacaau

SEQ ID NO: 2082530 - RNA, 19 nt, Homo sapiens
  misc_RNA (1)...(19): siRNA sense strand
caaacucgggccacuucua

SEQ ID NO: 2082531 - RNA, 19 nt, Homo sapiens
  misc_RNA (1)...(19): siRNA sense strand
aacaacagcccuuaaggaa

SEQ ID NO: 2082532 - RNA, 19 nt, Homo sapiens
  misc_RNA (1)...(19): siRNA sense strand
ccagugugguuaagacagu

SEQ ID NO: 2082533 - RNA, 19 nt, Homo sapiens
  misc_RNA (1)...(19): siRNA sense strand
gauuuaacaacagcccuua

SEQ ID NO: 2082534 - RNA, 19 nt, Homo sapiens
  misc_RNA (1)...(19): siRNA sense strand
ccggaaguuucuauuugaa

SEQ ID NO: 2082535 - RNA, 19 nt, Homo sapiens
  misc_RNA (1)...(19): siRNA sense strand
cguacaacauggcugucua

SEQ ID NO: 2082536 - RNA, 19 nt, Homo sapiens
  misc_RNA (1)...(19): siRNA sense strand
gcaguugcaccagaaguug

SEQ ID NO: 2082537 - RNA, 19 nt, Homo sapiens
  misc_RNA (1)...(19): siRNA sense strand
caaaccuuauguaacaauc

SEQ ID NO: 2082538 - RNA, 19 nt, Homo sapiens
  misc_RNA (1)...(19): siRNA sense strand
uagaacagcaaaccuuaug

SEQ ID NO: 2082539 - RNA, 19 nt, Homo sapiens
  misc_RNA (1)...(19): siRNA sense strand
cuaccggaaguuucuauuu

SEQ ID NO: 2082540 - RNA, 19 nt, Homo sapiens
  misc_RNA (1)...(19): siRNA sense strand
aaaagcagauggaggaguu

SEQ ID NO: 2082541 - RNA, 19 nt, Homo sapiens
  misc_RNA (1)...(19): siRNA sense strand
cugaucacauggacucuau

SEQ ID NO: 2082542 - RNA, 19 nt, Homo sapiens
  misc_RNA (1)...(19): siRNA sense strand
caagaaccagcuguuagaa

SEQ ID NO: 2082543 - RNA, 19 nt, Homo sapiens
  misc_RNA (1)...(19): siRNA sense strand
acaaaccacugaguaagca

SEQ ID NO: 2082544 - RNA, 19 nt, Homo sapiens
  misc_RNA (1)...(19): siRNA sense strand
guccaaagaagucgauguu

SEQ ID NO: 2082545 - RNA, 19 nt, Homo sapiens
  misc_RNA (1)...(19): siRNA sense strand
caaagaagucgauguuucc

SEQ ID NO: 2082546 - RNA, 19 nt, Homo sapiens
  misc_RNA (1)...(19): siRNA sense strand
caagaauccacuacugauc

SEQ ID NO: 2082547 - RNA, 19 nt, Homo sapiens
  misc_RNA (1)...(19): siRNA sense strand
gaaggaaugucagaaaagg

SEQ ID NO: 2082548 - RNA, 19 nt, Homo sapiens
  misc_RNA (1)...(19): siRNA sense strand
accggaaguuucuauuuga

SEQ ID NO: 2082549 - RNA, 19 nt, Homo sapiens
  misc_RNA (1)...(19): siRNA sense strand
cagggaaucuuuuaaacga

SEQ ID NO: 2082550 - RNA, 19 nt, Homo sapiens
  misc_RNA (1)...(19): siRNA sense strand
ccgccuagcuaccggaagu

SEQ ID NO: 2082551 - RNA, 19 nt, Homo sapiens
  misc_RNA (1)...(19): siRNA sense strand
acaacagcccuuaaggaaa

SEQ ID NO: 2082552 - RNA, 19 nt, Homo sapiens
  misc_RNA (1)...(19): siRNA sense strand
uaaagcuggagaugaaaga

SEQ ID NO: 2082553 - RNA, 19 nt, Homo sapiens
  misc_RNA (1)...(19): siRNA sense strand
ggagaaguuucgggacaac

SEQ ID NO: 2082554 - RNA, 19 nt, Homo sapiens
  misc_RNA (1)...(19): siRNA sense strand
aagaauccacuacugauca

SEQ ID NO: 2082555 - RNA, 19 nt, Homo sapiens
  misc_RNA (1)...(19): siRNA sense strand
aacagcaaaccuuauguaa

SEQ ID NO: 2082556 - RNA, 19 nt, Homo sapiens
  misc_RNA (1)...(19): siRNA sense strand
ggaggaguuacaggccuua

SEQ ID NO: 2082557 - RNA, 19 nt, Homo sapiens
  misc_RNA (1)...(19): siRNA sense strand
agagaaugggcaaaugaaa

SEQ ID NO: 2082558 - RNA, 19 nt, Homo sapiens
  misc_RNA (1)...(19): siRNA sense strand
gcuguuagaaacuuugcaa

SEQ ID NO: 2082559 - RNA, 19 nt, Homo sapiens
  misc_RNA (1)...(19): siRNA sense strand
gacucuauguugcuguuag

SEQ ID NO: 2082560 - RNA, 19 nt, Homo sapiens
  misc_RNA (1)...(19): siRNA sense strand
ggacucuauguugcuguua

SEQ ID NO: 2082561 - RNA, 19 nt, Homo sapiens
  misc_RNA (1)...(19): siRNA sense strand
cagaggaagagcucaagga

SEQ ID NO: 2082562 - RNA, 19 nt, Homo sapiens
  misc_RNA (1)...(19): siRNA sense strand
uucaggagguccagagaau

SEQ ID NO: 2082563 - RNA, 19 nt, Homo sapiens
  misc_RNA (1)...(19): siRNA sense strand
ggagcagcuauuagaaaug

SEQ ID NO: 2082564 - RNA, 19 nt, Homo sapiens
  misc_RNA (1)...(19): siRNA sense strand
ggcuacaaaccacugagua

SEQ ID NO: 2082565 - RNA, 19 nt, Homo sapiens
  misc_RNA (1)...(19): siRNA sense strand
caaacugagacgagagaau

SEQ ID NO: 2082566 - RNA, 19 nt, Homo sapiens
  misc_RNA (1)...(19): siRNA sense strand
gacgagagaaugggcaaau

SEQ ID NO: 2082567 - RNA, 19 nt, Homo sapiens
  misc_RNA (1)...(19): siRNA sense strand
guaaagcuggagaugaaag

SEQ ID NO: 2082568 - RNA, 19 nt, Homo sapiens
  misc_RNA (1)...(19): siRNA sense strand
cuauguugcuguuagaaac

SEQ ID NO: 2082569 - RNA, 19 nt, Homo sapiens
  misc_RNA (1)...(19): siRNA sense strand
acaagaauccacuacugau

SEQ ID NO: 2082570 - RNA, 19 nt, Homo sapiens
  misc_RNA (1)...(19): siRNA sense strand
ggagguccagagaaugaug

SEQ ID NO: 2082571 - RNA, 19 nt, Homo sapiens
  misc_RNA (1)...(19): siRNA sense strand
guacaacauggcugucuac

SEQ ID NO: 2082572 - RNA, 19 nt, Homo sapiens
  misc_RNA (1)...(19): siRNA sense strand
uguuagaaacuuugcaaga

SEQ ID NO: 2082573 - RNA, 19 nt, Homo sapiens
  misc_RNA (1)...(19): siRNA sense strand
cacaaacucgggccacuuc

SEQ ID NO: 2082574 - RNA, 19 nt, Homo sapiens
  misc_RNA (1)...(19): siRNA sense strand
ccacuacugaucacaugga

SEQ ID NO: 2082575 - RNA, 19 nt, Homo sapiens
  misc_RNA (1)...(19): siRNA sense strand
uggagaaguuucgggacaa

SEQ ID NO: 2082576 - RNA, 19 nt, Homo sapiens
  misc_RNA (1)...(19): siRNA sense strand
gguaaagcuggagaugaaa

SEQ ID NO: 2082577 - RNA, 19 nt, Homo sapiens
  misc_RNA (1)...(19): siRNA sense strand
gacccuggcaucacgacaa

SEQ ID NO: 2082578 - RNA, 19 nt, Homo sapiens
  misc_RNA (1)...(19): siRNA sense strand
gaacagcucugaccaagaa

SEQ ID NO: 2082579 - RNA, 19 nt, Homo sapiens
  misc_RNA (1)...(19): siRNA sense strand
gaaauacucucaugugauu

SEQ ID NO: 2082580 - RNA, 19 nt, Homo sapiens
  misc_RNA (1)...(19): siRNA sense strand
ggauaaaucuucuauguug

SEQ ID NO: 2082581 - RNA, 19 nt, Homo sapiens
  misc_RNA (1)...(19): siRNA sense strand
gaagaacccuccuguuuau

SEQ ID NO: 2082582 - RNA, 19 nt, Homo sapiens
  misc_RNA (1)...(19): siRNA sense strand
gagauaagguuaccaagaa

SEQ ID NO: 2082583 - RNA, 19 nt, Homo sapiens
  misc_RNA (1)...(19): siRNA sense strand
ggacauacaucacagaaga

SEQ ID NO: 2082584 - RNA, 19 nt, Homo sapiens
  misc_RNA (1)...(19): siRNA sense strand
gaacaacuaugcuuaagau

SEQ ID NO: 2082585 - RNA, 19 nt, Homo sapiens
  misc_RNA (1)...(19): siRNA sense strand
ggaagaagaugaugaagau

SEQ ID NO: 2082586 - RNA, 19 nt, Homo sapiens
  misc_RNA (1)...(19): siRNA sense strand
gaaagaagcagaagcguuu

SEQ ID NO: 2082587 - RNA, 19 nt, Homo sapiens
  misc_RNA (1)...(19): siRNA sense strand
gaaaguaacaucagcuaua

SEQ ID NO: 2082588 - RNA, 19 nt, Homo sapiens
  misc_RNA (1)...(19): siRNA sense strand
gaagacgcauguuuccuua

SEQ ID NO: 2082589 - RNA, 19 nt, Homo sapiens
  misc_RNA (1)...(19): siRNA sense strand
ugacauaucucccagaauu

SEQ ID NO: 2082590 - RNA, 19 nt, Homo sapiens
  misc_RNA (1)...(19): siRNA sense strand
gugauaagcuagaugaaua

SEQ ID NO: 2082591 - RNA, 19 nt, Homo sapiens
  misc_RNA (1)...(19): siRNA sense strand
ggacaaagauccagucuac

SEQ ID NO: 2082592 - RNA, 19 nt, Homo sapiens
  misc_RNA (1)...(19): siRNA sense strand
ugaagaagcuagaguauau

SEQ ID NO: 2082593 - RNA, 19 nt, Homo sapiens
  misc_RNA (1)...(19): siRNA sense strand
gaaagagagugaaucaaga

SEQ ID NO: 2082594 - RNA, 19 nt, Homo sapiens
  misc_RNA (1)...(19): siRNA sense strand
gauaacagguuuagauuca

SEQ ID NO: 2082595 - RNA, 19 nt, Homo sapiens
  misc_RNA (1)...(19): siRNA sense strand
aaaggaagcucuagacauu

SEQ ID NO: 2082596 - RNA, 19 nt, Homo sapiens
  misc_RNA (1)...(19): siRNA sense strand
gaagaugacucccguguag

SEQ ID NO: 2082597 - RNA, 19 nt, Homo sapiens
  misc_RNA (1)...(19): siRNA sense strand
caagaaagcuauugaugga

SEQ ID NO: 2082598 - RNA, 19 nt, Homo sapiens
  misc_RNA (1)...(19): siRNA sense strand
ugagagggauucaguauaa

SEQ ID NO: 2082599 - RNA, 19 nt, Homo sapiens
  misc_RNA (1)...(19): siRNA sense strand
ccaauaggcuagcugcuua

SEQ ID NO: 2082600 - RNA, 19 nt, Homo sapiens
  misc_RNA (1)...(19): siRNA sense strand
gagaagaacccuccuguuu

SEQ ID NO: 2082601 - RNA, 19 nt, Homo sapiens
  misc_RNA (1)...(19): siRNA sense strand
uaucagaccuucuccagua

SEQ ID NO: 2082602 - RNA, 19 nt, Homo sapiens
  misc_RNA (1)...(19): siRNA sense strand
gaaaauaccucacccuuga

SEQ ID NO: 2082603 - RNA, 19 nt, Homo sapiens
  misc_RNA (1)...(19): siRNA sense strand
gaaagaagcuagaauacac

SEQ ID NO: 2082604 - RNA, 19 nt, Homo sapiens
  misc_RNA (1)...(19): siRNA sense strand
gcaccuaccuucuuuguca

SEQ ID NO: 2082605 - RNA, 19 nt, Homo sapiens
  misc_RNA (1)...(19): siRNA sense strand
gaugaugggcugaauaaua

SEQ ID NO: 2082606 - RNA, 19 nt, Homo sapiens
  misc_RNA (1)...(19): siRNA sense strand
gcgagcagauguauccuua

SEQ ID NO: 2082607 - RNA, 19 nt, Homo sapiens
  misc_RNA (1)...(19): siRNA sense strand
caaauauccucaugaaguu

SEQ ID NO: 2082608 - RNA, 19 nt, Homo sapiens
  misc_RNA (1)...(19): siRNA sense strand
gaaagagccucaguggaaa

SEQ ID NO: 2082609 - RNA, 19 nt, Homo sapiens
  misc_RNA (1)...(19): siRNA sense strand
ugacuucacugcucaauga

SEQ ID NO: 2082610 - RNA, 19 nt, Homo sapiens
  misc_RNA (1)...(19): siRNA sense strand
gcaaauauccucaugaagu

SEQ ID NO: 2082611 - RNA, 19 nt, Homo sapiens
  misc_RNA (1)...(19): siRNA sense strand
caaaggaaccugauucuga

SEQ ID NO: 2082612 - RNA, 19 nt, Homo sapiens
  misc_RNA (1)...(19): siRNA sense strand
gcagauguauccuuaacaa

SEQ ID NO: 2082613 - RNA, 19 nt, Homo sapiens
  misc_RNA (1)...(19): siRNA sense strand
gaagauaccuggaguuagc

SEQ ID NO: 2082614 - RNA, 19 nt, Homo sapiens
  misc_RNA (1)...(19): siRNA sense strand
gaagaaacucugaaugauu

SEQ ID NO: 2082615 - RNA, 19 nt, Homo sapiens
  misc_RNA (1)...(19): siRNA sense strand
ggauauaucuccuguggau

SEQ ID NO: 2082616 - RNA, 19 nt, Homo sapiens
  misc_RNA (1)...(19): siRNA sense strand
gagaacagauacaaccaaa

SEQ ID NO: 2082617 - RNA, 19 nt, Homo sapiens
  misc_RNA (1)...(19): siRNA sense strand
gaagaaaacucaagugaau

SEQ ID NO: 2082618 - RNA, 19 nt, Homo sapiens
  misc_RNA (1)...(19): siRNA sense strand
gagauuacauggaggcaaa

SEQ ID NO: 2082619 - RNA, 19 nt, Homo sapiens
  misc_RNA (1)...(19): siRNA sense strand
ccacuaagaguaccaguua

SEQ ID NO: 2082620 - RNA, 19 nt, Homo sapiens
  misc_RNA (1)...(19): siRNA sense strand
gaagugggcuuaaaauuga

SEQ ID NO: 2082621 - RNA, 19 nt, Homo sapiens
  misc_RNA (1)...(19): siRNA sense strand
gcaaggugaugccuacauu

SEQ ID NO: 2082622 - RNA, 19 nt, Homo sapiens
  misc_RNA (1)...(19): siRNA sense strand
uagaauacauugaggauga

SEQ ID NO: 2082623 - RNA, 19 nt, Homo sapiens
  misc_RNA (1)...(19): siRNA sense strand
gaauaacuguguagaauac

SEQ ID NO: 2082624 - RNA, 19 nt, Homo sapiens
  misc_RNA (1)...(19): siRNA sense strand
uaagcuagaugaauacuug

SEQ ID NO: 2082625 - RNA, 19 nt, Homo sapiens
  misc_RNA (1)...(19): siRNA sense strand
caaccaguaucuuucuaua

SEQ ID NO: 2082626 - RNA, 19 nt, Homo sapiens
  misc_RNA (1)...(19): siRNA sense strand
ugacuaacauggaagauga

SEQ ID NO: 2082627 - RNA, 19 nt, Homo sapiens
  misc_RNA (1)...(19): siRNA sense strand
gcagaaagcacaagaguuc

SEQ ID NO: 2082628 - RNA, 19 nt, Homo sapiens
  misc_RNA (1)...(19): siRNA sense strand
gaacggaagcuucaauguu

SEQ ID NO: 2082629 - RNA, 19 nt, Homo sapiens
  misc_RNA (1)...(19): siRNA sense strand
acacagaaguucaguauca

SEQ ID NO: 2082630 - RNA, 19 nt, Homo sapiens
  misc_RNA (1)...(19): siRNA sense strand
gcacaucaauagcaacaug

SEQ ID NO: 2082631 - RNA, 19 nt, Homo sapiens
  misc_RNA (1)...(19): siRNA sense strand
ggaggaugauucugauaaa

SEQ ID NO: 2082632 - RNA, 19 nt, Homo sapiens
  misc_RNA (1)...(19): siRNA sense strand
gagcaagaauuucccaguu

SEQ ID NO: 2082633 - RNA, 19 nt, Homo sapiens
  misc_RNA (1)...(19): siRNA sense strand
gcaagagauuucugaaugu

SEQ ID NO: 2082634 - RNA, 19 nt, Homo sapiens
  misc_RNA (1)...(19): siRNA sense strand
gucaaaggauucuucauuu

SEQ ID NO: 2082635 - RNA, 19 nt, Homo sapiens
  misc_RNA (1)...(19): siRNA sense strand
gggaaaccuuugauucuuu

SEQ ID NO: 2082636 - RNA, 19 nt, Homo sapiens
  misc_RNA (1)...(19): siRNA sense strand
ggacacacacugccaauga

SEQ ID NO: 2082637 - RNA, 19 nt, Homo sapiens
  misc_RNA (1)...(19): siRNA sense strand
ggaccucgauuguuguuga

SEQ ID NO: 2082638 - RNA, 19 nt, Homo sapiens
  misc_RNA (1)...(19): siRNA sense strand
gaagcuagaauacacuaua

SEQ ID NO: 2082639 - RNA, 19 nt, Homo sapiens
  misc_RNA (1)...(19): siRNA sense strand
gagcauugaucuuaaauac

SEQ ID NO: 2082640 - RNA, 19 nt, Homo sapiens
  misc_RNA (1)...(19): siRNA sense strand
gggaguaccuuuccagaug

SEQ ID NO: 2082641 - RNA, 19 nt, Homo sapiens
  misc_RNA (1)...(19): siRNA sense strand
cagaaugccucuccaaaug

SEQ ID NO: 2082642 - RNA, 19 nt, Homo sapiens
  misc_RNA (1)...(19): siRNA sense strand
gaccaucuaucuucuaaau

SEQ ID NO: 2082643 - RNA, 19 nt, Homo sapiens
  misc_RNA (1)...(19): siRNA sense strand
cagcaaauauccucaugaa

SEQ ID NO: 2082644 - RNA, 19 nt, Homo sapiens
  misc_RNA (1)...(19): siRNA sense strand
ggagguugaugauguagaa

SEQ ID NO: 2082645 - RNA, 19 nt, Homo sapiens
  misc_RNA (1)...(19): siRNA sense strand
ccacaggucucuccuaaca

SEQ ID NO: 2082646 - RNA, 19 nt, Homo sapiens
  misc_RNA (1)...(19): siRNA sense strand
gaggagaaacagcagauua

SEQ ID NO: 2082647 - RNA, 19 nt, Homo sapiens
  misc_RNA (1)...(19): siRNA sense strand
gaaggaauguggagacucu

SEQ ID NO: 2082648 - RNA, 19 nt, Homo sapiens
  misc_RNA (1)...(19): siRNA sense strand
cguaagaguuccaaagaaa

SEQ ID NO: 2082649 - RNA, 19 nt, Homo sapiens
  misc_RNA (1)...(19): siRNA sense strand
ggaagcuuguggccuauaa

SEQ ID NO: 2082650 - RNA, 19 nt, Homo sapiens
  misc_RNA (1)...(19): siRNA sense strand
gaagaucggaacaagauuu

SEQ ID NO: 2082651 - RNA, 19 nt, Homo sapiens
  misc_RNA (1)...(19): siRNA sense strand
ugauauaucugacagcauu

SEQ ID NO: 2082652 - RNA, 19 nt, Homo sapiens
  misc_RNA (1)...(19): siRNA sense strand
ugaaagagccucaguggaa

SEQ ID NO: 2082653 - RNA, 19 nt, Homo sapiens
  misc_RNA (1)...(19): siRNA sense strand
aaacgagacuuucuugguu

SEQ ID NO: 2082654 - RNA, 19 nt, Homo sapiens
  misc_RNA (1)...(19): siRNA sense strand
acaaagacaugucaggaaa

SEQ ID NO: 2082655 - RNA, 19 nt, Homo sapiens
  misc_RNA (1)...(19): siRNA sense strand
gaggaacaauugaaagaga

SEQ ID NO: 2082656 - RNA, 19 nt, Homo sapiens
  misc_RNA (1)...(19): siRNA sense strand
uggcagaauuggaauauuu

SEQ ID NO: 2082657 - RNA, 19 nt, Homo sapiens
  misc_RNA (1)...(19): siRNA sense strand
ccacaaaugacucagguua

SEQ ID NO: 2082658 - RNA, 19 nt, Homo sapiens
  misc_RNA (1)...(19): siRNA sense strand
ugaaagaguugccugaugu

SEQ ID NO: 2082659 - RNA, 19 nt, Homo sapiens
  misc_RNA (1)...(19): siRNA sense strand
cagcaaacuucaugucauu

SEQ ID NO: 2082660 - RNA, 19 nt, Homo sapiens
  misc_RNA (1)...(19): siRNA sense strand
gcaaacugcucacuggaau

SEQ ID NO: 2082661 - RNA, 19 nt, Homo sapiens
  misc_RNA (1)...(19): siRNA sense strand
cagaaauacucucauguga

SEQ ID NO: 2082662 - RNA, 19 nt, Homo sapiens
  misc_RNA (1)...(19): siRNA sense strand
gcaaggaagacgcauguuu

SEQ ID NO: 2082663 - RNA, 19 nt, Homo sapiens
  misc_RNA (1)...(19): siRNA sense strand
cuacccagcucuauggaua

SEQ ID NO: 2082664 - RNA, 19 nt, Homo sapiens
  misc_RNA (1)...(19): siRNA sense strand
ggacacagaaguucaguau

SEQ ID NO: 2082665 - RNA, 19 nt, Homo sapiens
  misc_RNA (1)...(19): siRNA sense strand
ucaaguacaucugggcuua

SEQ ID NO: 2082666 - RNA, 19 nt, Homo sapiens
  misc_RNA (1)...(19): siRNA sense strand
caaagguagugaaugcuaa

SEQ ID NO: 2082667 - RNA, 19 nt, Homo sapiens
  misc_RNA (1)...(19): siRNA sense strand
uggaauauuugccuacaua

SEQ ID NO: 2082668 - RNA, 19 nt, Homo sapiens
  misc_RNA (1)...(19): siRNA sense strand
gaagcacaguuaagauuuc

SEQ ID NO: 2082669 - RNA, 19 nt, Homo sapiens
  misc_RNA (1)...(19): siRNA sense strand
ucaucgagauccaguauuu

SEQ ID NO: 2082670 - RNA, 19 nt, Homo sapiens
  misc_RNA (1)...(19): siRNA sense strand
ucgaaaggcuccaccaauu

SEQ ID NO: 2082671 - RNA, 19 nt, Homo sapiens
  misc_RNA (1)...(19): siRNA sense strand
gcagacgagcaguuaauua

SEQ ID NO: 2082672 - RNA, 19 nt, Homo sapiens
  misc_RNA (1)...(19): siRNA sense strand
agaagaacccuccuguuua

SEQ ID NO: 2082673 - RNA, 19 nt, Homo sapiens
  misc_RNA (1)...(19): siRNA sense strand
ccagaaagaugaaacaaac

SEQ ID NO: 2082674 - RNA, 19 nt, Homo sapiens
  misc_RNA (1)...(19): siRNA sense strand
ggaaagagagugaaucaag

SEQ ID NO: 2082675 - RNA, 19 nt, Homo sapiens
  misc_RNA (1)...(19): siRNA sense strand
uaucgucucuuucagguaa

SEQ ID NO: 2082676 - RNA, 19 nt, Homo sapiens
  misc_RNA (1)...(19): siRNA sense strand
gaaaugagggaucucuuug

SEQ ID NO: 2082677 - RNA, 19 nt, Homo sapiens
  misc_RNA (1)...(19): siRNA sense strand
gcagaaaggauuugacaau

SEQ ID NO: 2082678 - RNA, 19 nt, Homo sapiens
  misc_RNA (1)...(19): siRNA sense strand
gcagaggacuugccuguga

SEQ ID NO: 2082679 - RNA, 19 nt, Homo sapiens
  misc_RNA (1)...(19): siRNA sense strand
ggaacaaccuauucacuga

SEQ ID NO: 2082680 - RNA, 19 nt, Homo sapiens
  misc_RNA (1)...(19): siRNA sense strand
guacaacgaucauagcauu

SEQ ID NO: 2082681 - RNA, 19 nt, Homo sapiens
  misc_RNA (1)...(19): siRNA sense strand
guaaacaucucaucucugu

SEQ ID NO: 2082682 - RNA, 19 nt, Homo sapiens
  misc_RNA (1)...(19): siRNA sense strand
guggaagggucaaccauua

SEQ ID NO: 2082683 - RNA, 19 nt, Homo sapiens
  misc_RNA (1)...(19): siRNA sense strand
gaucagguuuaguugcuua

SEQ ID NO: 2082684 - RNA, 19 nt, Homo sapiens
  misc_RNA (1)...(19): siRNA sense strand
ggaagacgacccucuauga

SEQ ID NO: 2082685 - RNA, 19 nt, Homo sapiens
  misc_RNA (1)...(19): siRNA sense strand
gacaguaccuucugcauca

SEQ ID NO: 2082686 - RNA, 19 nt, Homo sapiens
  misc_RNA (1)...(19): siRNA sense strand
caucacugcuguuaaguuu

SEQ ID NO: 2082687 - RNA, 19 nt, Homo sapiens
  misc_RNA (1)...(19): siRNA sense strand
agaagaagcuguuuaaagg

SEQ ID NO: 2082688 - RNA, 19 nt, Homo sapiens
  misc_RNA (1)...(19): siRNA sense strand
gccaagauaucccgcagua

SEQ ID NO: 2082689 - RNA, 19 nt, Homo sapiens
  misc_RNA (1)...(19): siRNA sense strand
ggcaugaaauuuaguaaug

SEQ ID NO: 2082690 - RNA, 19 nt, Homo sapiens
  misc_RNA (1)...(19): siRNA sense strand
gagaaggugcugggaauua

SEQ ID NO: 2082691 - RNA, 19 nt, Homo sapiens
  misc_RNA (1)...(19): siRNA sense strand
ccaaguacauugucucugu

SEQ ID NO: 2082692 - RNA, 19 nt, Homo sapiens
  misc_RNA (1)...(19): siRNA sense strand
gaguaucucuucacgauuc

SEQ ID NO: 2082693 - RNA, 19 nt, Homo sapiens
  misc_RNA (1)...(19): siRNA sense strand
gaacacucauccuccauca

SEQ ID NO: 2082694 - RNA, 19 nt, Homo sapiens
  misc_RNA (1)...(19): siRNA sense strand
gcaauacucagaacuguug

SEQ ID NO: 2082695 - RNA, 19 nt, Homo sapiens
  misc_RNA (1)...(19): siRNA sense strand
gauugucacuggcaugaaa

SEQ ID NO: 2082696 - RNA, 19 nt, Homo sapiens
  misc_RNA (1)...(19): siRNA sense strand
gaggacggcacacucauua

SEQ ID NO: 2082697 - RNA, 19 nt, Homo sapiens
  misc_RNA (1)...(19): siRNA sense strand
ugacaagaaucucuccauu

SEQ ID NO: 2082698 - RNA, 19 nt, Homo sapiens
  misc_RNA (1)...(19): siRNA sense strand
gaaacauccucagcaguga

SEQ ID NO: 2082699 - RNA, 19 nt, Homo sapiens
  misc_RNA (1)...(19): siRNA sense strand
gcagugaccucauuaaaau

SEQ ID NO: 2082700 - RNA, 19 nt, Homo sapiens
  misc_RNA (1)...(19): siRNA sense strand
gacaagaaucucuccauuu

SEQ ID NO: 2082701 - RNA, 19 nt, Homo sapiens
  misc_RNA (1)...(19): siRNA sense strand
gaacugagcguuagaucca

SEQ ID NO: 2082702 - RNA, 19 nt, Homo sapiens
  misc_RNA (1)...(19): siRNA sense strand
gaccggcucucucaucaga

SEQ ID NO: 2082703 - RNA, 19 nt, Homo sapiens
  misc_RNA (1)...(19): siRNA sense strand
gaucgaagcucaggauggu

SEQ ID NO: 2082704 - RNA, 19 nt, Homo sapiens
  misc_RNA (1)...(19): siRNA sense strand
gaaagcagaagaagcuguu

SEQ ID NO: 2082705 - RNA, 19 nt, Homo sapiens
  misc_RNA (1)...(19): siRNA sense strand
gauugcagcuacuuuguca

SEQ ID NO: 2082706 - RNA, 19 nt, Homo sapiens
  misc_RNA (1)...(19): siRNA sense strand
acaagaaucucuccauuuu

SEQ ID NO: 2082707 - RNA, 19 nt, Homo sapiens
  misc_RNA (1)...(19): siRNA sense strand
gaccguaugggcacacuua

SEQ ID NO: 2082708 - RNA, 19 nt, Homo sapiens
  misc_RNA (1)...(19): siRNA sense strand
ucauuaaggugcagacaga

SEQ ID NO: 2082709 - RNA, 19 nt, Homo sapiens
  misc_RNA (1)...(19): siRNA sense strand
gagcaauacucagaacugu

SEQ ID NO: 2082710 - RNA, 19 nt, Homo sapiens
  misc_RNA (1)...(19): siRNA sense strand
caacgaucauagcauuuau

SEQ ID NO: 2082711 - RNA, 19 nt, Homo sapiens
  misc_RNA (1)...(19): siRNA sense strand
gcauuuauguuugggaugu

SEQ ID NO: 2082712 - RNA, 19 nt, Homo sapiens
  misc_RNA (1)...(19): siRNA sense strand
ucacuggcaugaaauuuag

SEQ ID NO: 2082713 - RNA, 19 nt, Homo sapiens
  misc_RNA (1)...(19): siRNA sense strand
ugagugagaugcugaaggu

SEQ ID NO: 2082714 - RNA, 19 nt, Homo sapiens
  misc_RNA (1)...(19): siRNA sense strand
gagcccagcuggaaguaca

SEQ ID NO: 2082715 - RNA, 19 nt, Homo sapiens
  misc_RNA (1)...(19): siRNA sense strand
gcaaccgacacaucaaauu

SEQ ID NO: 2082716 - RNA, 19 nt, Homo sapiens
  misc_RNA (1)...(19): siRNA sense strand
cggaguaucucuucacgau

SEQ ID NO: 2082717 - RNA, 19 nt, Homo sapiens
  misc_RNA (1)...(19): siRNA sense strand
ccucagcagugaccucauu

SEQ ID NO: 2082718 - RNA, 19 nt, Homo sapiens
  misc_RNA (1)...(19): siRNA sense strand
gcaggcaaccgacacauca

SEQ ID NO: 2082719 - RNA, 19 nt, Homo sapiens
  misc_RNA (1)...(19): siRNA sense strand
cagaagaagcuguuuaaag

SEQ ID NO: 2082720 - RNA, 19 nt, Homo sapiens
  misc_RNA (1)...(19): siRNA sense strand
gcagagcaaagucggauug

SEQ ID NO: 2082721 - RNA, 19 nt, Homo sapiens
  misc_RNA (1)...(19): siRNA sense strand
gcuccacccuccaccgaaa

SEQ ID NO: 2082722 - RNA, 19 nt, Homo sapiens
  misc_RNA (1)...(19): siRNA sense strand
cgccugagcucugagauga

SEQ ID NO: 2082723 - RNA, 19 nt, Homo sapiens
  misc_RNA (1)...(19): siRNA sense strand
ggggacagcugcauauuug

SEQ ID NO: 2082724 - RNA, 19 nt, Homo sapiens
  misc_RNA (1)...(19): siRNA sense strand
gggcaaguccgcaugauca

SEQ ID NO: 2082725 - RNA, 19 nt, Homo sapiens
  misc_RNA (1)...(19): siRNA sense strand
gcccaugacucugagauuc

SEQ ID NO: 2082726 - RNA, 19 nt, Homo sapiens
  misc_RNA (1)...(19): siRNA sense strand
aaacaucucaucucugugu

SEQ ID NO: 2082727 - RNA, 19 nt, Homo sapiens
  misc_RNA (1)...(19): siRNA sense strand
caaccgacacaucaaauuc

SEQ ID NO: 2082728 - RNA, 19 nt, Homo sapiens
  misc_RNA (1)...(19): siRNA sense strand
gaccaggagcaguuucuaa

SEQ ID NO: 2082729 - RNA, 19 nt, Homo sapiens
  misc_RNA (1)...(19): siRNA sense strand
acaacgaucauagcauuua

SEQ ID NO: 2082730 - RNA, 19 nt, Homo sapiens
  misc_RNA (1)...(19): siRNA sense strand
gaccuuugauccuacuaau

SEQ ID NO: 2082731 - RNA, 19 nt, Homo sapiens
  misc_RNA (1)...(19): siRNA sense strand
ggacagcugcauauuugug

SEQ ID NO: 2082732 - RNA, 19 nt, Homo sapiens
  misc_RNA (1)...(19): siRNA sense strand
gucacuggcaugaaauuua

SEQ ID NO: 2082733 - RNA, 19 nt, Homo sapiens
  misc_RNA (1)...(19): siRNA sense strand
ggagauggagugcaguuca

SEQ ID NO: 2082734 - RNA, 19 nt, Homo sapiens
  misc_RNA (1)...(19): siRNA sense strand
gcagaagaagcuguuuaaa

SEQ ID NO: 2082735 - RNA, 19 nt, Homo sapiens
  misc_RNA (1)...(19): siRNA sense strand
gcaguggaaagcagaagaa

SEQ ID NO: 2082736 - RNA, 19 nt, Homo sapiens
  misc_RNA (1)...(19): siRNA sense strand
gaggauugcagcuacuuug

SEQ ID NO: 2082737 - RNA, 19 nt, Homo sapiens
  misc_RNA (1)...(19): siRNA sense strand
ccaguuccauggccaagau

SEQ ID NO: 2082738 - RNA, 19 nt, Homo sapiens
  misc_RNA (1)...(19): siRNA sense strand
ggugugugguuguguuguu

SEQ ID NO: 2082739 - RNA, 19 nt, Homo sapiens
  misc_RNA (1)...(19): siRNA sense strand
ucuggaaccugcacccauu

SEQ ID NO: 2082740 - RNA, 19 nt, Homo sapiens
  misc_RNA (1)...(19): siRNA sense strand
gguguggaacugagcguua

SEQ ID NO: 2082741 - RNA, 19 nt, Homo sapiens
  misc_RNA (1)...(19): siRNA sense strand
gaagagggcgcuggguuca

SEQ ID NO: 2082742 - RNA, 19 nt, Homo sapiens
  misc_RNA (1)...(19): siRNA sense strand
gggaccggcugauccaugu

SEQ ID NO: 2082743 - RNA, 19 nt, Homo sapiens
  misc_RNA (1)...(19): siRNA sense strand
cagcagugaccucauuaaa

SEQ ID NO: 2082744 - RNA, 19 nt, Homo sapiens
  misc_RNA (1)...(19): siRNA sense strand
gagcagacaagagcaucua

SEQ ID NO: 2082745 - RNA, 19 nt, Homo sapiens
  misc_RNA (1)...(19): siRNA sense strand
gugcguggccaccauguuu

SEQ ID NO: 2082746 - RNA, 19 nt, Homo sapiens
  misc_RNA (1)...(19): siRNA sense strand
ggacggcacacucauuaag

SEQ ID NO: 2082747 - RNA, 19 nt, Homo sapiens
  misc_RNA (1)...(19): siRNA sense strand
gaacaaccuauucacugau

SEQ ID NO: 2082748 - RNA, 19 nt, Homo sapiens
  misc_RNA (1)...(19): siRNA sense strand
ggagaucgaagcucaggau

SEQ ID NO: 2082749 - RNA, 19 nt, Homo sapiens
  misc_RNA (1)...(19): siRNA sense strand
cauugaagaugguauuguc

SEQ ID NO: 2082750 - RNA, 19 nt, Homo sapiens
  misc_RNA (1)...(19): siRNA sense strand
gccaccagcuguucugaca

SEQ ID NO: 2082751 - RNA, 19 nt, Homo sapiens
  misc_RNA (1)...(19): siRNA sense strand
ccaagaaagugggcaaggu

SEQ ID NO: 2082752 - RNA, 19 nt, Homo sapiens
  misc_RNA (1)...(19): siRNA sense strand
guacucggcucuguaucau

SEQ ID NO: 2082753 - RNA, 19 nt, Homo sapiens
  misc_RNA (1)...(19): siRNA sense strand
ggucagagucucggaguau

SEQ ID NO: 2082754 - RNA, 19 nt, Homo sapiens
  misc_RNA (1)...(19): siRNA sense strand
caucagacagugacaagga

SEQ ID NO: 2082755 - RNA, 19 nt, Homo sapiens
  misc_RNA (1)...(19): siRNA sense strand
gagauugucacuggcauga

SEQ ID NO: 2082756 - RNA, 19 nt, Homo sapiens
  misc_RNA (1)...(19): siRNA sense strand
agacgacccucuaugacau

SEQ ID NO: 2082757 - RNA, 19 nt, Homo sapiens
  misc_RNA (1)...(19): siRNA sense strand
ggagcaauacucagaacug

SEQ ID NO: 2082758 - RNA, 19 nt, Homo sapiens
  misc_RNA (1)...(19): siRNA sense strand
guccuacccuggcugcauu

SEQ ID NO: 2082759 - RNA, 19 nt, Homo sapiens
  misc_RNA (1)...(19): siRNA sense strand
gaaccugcacccauugaag

SEQ ID NO: 2082760 - RNA, 19 nt, Homo sapiens
  misc_RNA (1)...(19): siRNA sense strand
uggagaaggugcugggaau

SEQ ID NO: 2082761 - RNA, 19 nt, Homo sapiens
  misc_RNA (1)...(19): siRNA sense strand
ccauugccuugaccuuuga

SEQ ID NO: 2082762 - RNA, 19 nt, Homo sapiens
  misc_RNA (1)...(19): siRNA sense strand
cagcugagggugaugaaga

SEQ ID NO: 2082763 - RNA, 19 nt, Homo sapiens
  misc_RNA (1)...(19): siRNA sense strand
gcaggaggcccuugagacu

SEQ ID NO: 2082764 - RNA, 19 nt, Homo sapiens
  misc_RNA (1)...(19): siRNA sense strand
aagcagaagaagcuguuua

SEQ ID NO: 2082765 - RNA, 19 nt, Homo sapiens
  misc_RNA (1)...(19): siRNA sense strand
caccacauccucaacaguu

SEQ ID NO: 2082766 - RNA, 19 nt, Homo sapiens
  misc_RNA (1)...(19): siRNA sense strand
acucggcucuguaucauuc

SEQ ID NO: 2082767 - RNA, 19 nt, Homo sapiens
  misc_RNA (1)...(19): siRNA sense strand
gccuugaccuuugauccua

SEQ ID NO: 2082768 - RNA, 19 nt, Homo sapiens
  misc_RNA (1)...(19): siRNA sense strand
uguguggccuucucuccua

SEQ ID NO: 2082769 - RNA, 19 nt, Homo sapiens
  misc_RNA (1)...(19): siRNA sense strand
ugacaaggagggagaagau

SEQ ID NO: 2082770 - RNA, 19 nt, Homo sapiens
  misc_RNA (1)...(19): siRNA sense strand
ccucagggaucuacauugc

SEQ ID NO: 2082771 - RNA, 19 nt, Homo sapiens
  misc_RNA (1)...(19): siRNA sense strand
ucacugcuguuaaguuugc

SEQ ID NO: 2082772 - RNA, 19 nt, Homo sapiens
  misc_RNA (1)...(19): siRNA sense strand
ugggagagcuacggaacaa

SEQ ID NO: 2082773 - RNA, 19 nt, Homo sapiens
  misc_RNA (1)...(19): siRNA sense strand
cggccucacuccuaucaga

SEQ ID NO: 2082774 - RNA, 19 nt, Homo sapiens
  misc_RNA (1)...(19): siRNA sense strand
ccucaagccuggcacugau

SEQ ID NO: 2082775 - RNA, 19 nt, Homo sapiens
  misc_RNA (1)...(19): siRNA sense strand
ugaagaagaggaagaagag

SEQ ID NO: 2082776 - RNA, 19 nt, Homo sapiens
  misc_RNA (1)...(19): siRNA sense strand
gaagacgacccucuaugac

SEQ ID NO: 2082777 - RNA, 19 nt, Homo sapiens
  misc_RNA (1)...(19): siRNA sense strand
acaaggagggagaagauga

SEQ ID NO: 2082778 - RNA, 19 nt, Homo sapiens
  misc_RNA (1)...(19): siRNA sense strand
gcaguaagaugggagcuuu

SEQ ID NO: 2082779 - RNA, 19 nt, Homo sapiens
  misc_RNA (1)...(19): siRNA sense strand
gcccagagcuuuaacuuca

SEQ ID NO: 2082780 - RNA, 19 nt, Homo sapiens
  misc_RNA (1)...(19): siRNA sense strand
aaacacaccuucccacuca

SEQ ID NO: 2082781 - RNA, 19 nt, Homo sapiens
  misc_RNA (1)...(19): siRNA sense strand
ggaagcaggucguguccaa

SEQ ID NO: 2082782 - RNA, 19 nt, Homo sapiens
  misc_RNA (1)...(19): siRNA sense strand
caagguggcuggcagacaa

SEQ ID NO: 2082783 - RNA, 19 nt, Homo sapiens
  misc_RNA (1)...(19): siRNA sense strand
gauacaacguccugaacaa

SEQ ID NO: 2082784 - RNA, 19 nt, Homo sapiens
  misc_RNA (1)...(19): siRNA sense strand
ccacggagcggcuacagua

SEQ ID NO: 2082785 - RNA, 19 nt, Homo sapiens
  misc_RNA (1)...(19): siRNA sense strand
ggaaaccuacccauacuau

SEQ ID NO: 2082786 - RNA, 19 nt, Homo sapiens
  misc_RNA (1)...(19): siRNA sense strand
uggaugagaucuuccuaaa

SEQ ID NO: 2082787 - RNA, 19 nt, Homo sapiens
  misc_RNA (1)...(19): siRNA sense strand
gcaugaagguggaaaugag

SEQ ID NO: 2082788 - RNA, 19 nt, Homo sapiens
  misc_RNA (1)...(19): siRNA sense strand
guacagaggcagugugaau

SEQ ID NO: 2082789 - RNA, 19 nt, Homo sapiens
  misc_RNA (1)...(19): siRNA sense strand
caucugaagucaucaccaa

SEQ ID NO: 2082790 - RNA, 19 nt, Homo sapiens
  misc_RNA (1)...(19): siRNA sense strand
guacuacacucaggaacug

SEQ ID NO: 2082791 - RNA, 19 nt, Homo sapiens
  misc_RNA (1)...(19): siRNA sense strand
gcaguggaccucauucugu

SEQ ID NO: 2082792 - RNA, 19 nt, Homo sapiens
  misc_RNA (1)...(19): siRNA sense strand
ccaaggcccugcagcaagu

SEQ ID NO: 2082793 - RNA, 19 nt, Homo sapiens
  misc_RNA (1)...(19): siRNA sense strand
acaaacagcugaggagaag

SEQ ID NO: 2082794 - RNA, 19 nt, Homo sapiens
  misc_RNA (1)...(19): siRNA sense strand
guccaaagccgacugcuau

SEQ ID NO: 2082795 - RNA, 19 nt, Homo sapiens
  misc_RNA (1)...(19): siRNA sense strand
gaaugagaccuuccacuac

SEQ ID NO: 2082796 - RNA, 19 nt, Homo sapiens
  misc_RNA (1)...(19): siRNA sense strand
ccaccaggauucacaagag

SEQ ID NO: 2082797 - RNA, 19 nt, Homo sapiens
  misc_RNA (1)...(19): siRNA sense strand
gacggaggcuuugccauca

SEQ ID NO: 2082798 - RNA, 19 nt, Homo sapiens
  misc_RNA (1)...(19): siRNA sense strand
cggagcggcuacaguacua

SEQ ID NO: 2082799 - RNA, 19 nt, Homo sapiens
  misc_RNA (1)...(19): siRNA sense strand
uggaggcacuggcggguaa

SEQ ID NO: 2082800 - RNA, 19 nt, Homo sapiens
  misc_RNA (1)...(19): siRNA sense strand
gacaaacagcugaggagaa

SEQ ID NO: 2082801 - RNA, 19 nt, Homo sapiens
  misc_RNA (1)...(19): siRNA sense strand
gaagaugacagagaaguac

SEQ ID NO: 2082802 - RNA, 19 nt, Homo sapiens
  misc_RNA (1)...(19): siRNA sense strand
gcagaguggugcgaguuca

SEQ ID NO: 2082803 - RNA, 19 nt, Homo sapiens
  misc_RNA (1)...(19): siRNA sense strand
ccuauggcaugaugaacuu

SEQ ID NO: 2082804 - RNA, 19 nt, Homo sapiens
  misc_RNA (1)...(19): siRNA sense strand
ugaagaugacagagaagua

SEQ ID NO: 2082805 - RNA, 19 nt, Homo sapiens
  misc_RNA (1)...(19): siRNA sense strand
gagcucggccuucuagaca

SEQ ID NO: 2082806 - RNA, 19 nt, Homo sapiens
  misc_RNA (1)...(19): siRNA sense strand
aggcugugcuggacauauu

SEQ ID NO: 2082807 - RNA, 19 nt, Homo sapiens
  misc_RNA (1)...(19): siRNA sense strand
ucagcuuccuggaguggua

SEQ ID NO: 2082808 - RNA, 19 nt, Homo sapiens
  misc_RNA (1)...(19): siRNA sense strand
gagagcaguggaccucauu

SEQ ID NO: 2082809 - RNA, 19 nt, Homo sapiens
  misc_RNA (1)...(19): siRNA sense strand
caacguccgcaccaacuug

SEQ ID NO: 2082810 - RNA, 19 nt, Homo sapiens
  misc_RNA (1)...(19): siRNA sense strand
cgugagugcuaucuguuug

SEQ ID NO: 2082811 - RNA, 19 nt, Homo sapiens
  misc_RNA (1)...(19): siRNA sense strand
gauccauggugcugugaag

SEQ ID NO: 2082812 - RNA, 19 nt, Homo sapiens
  misc_RNA (1)...(19): siRNA sense strand
gaggaugugcugccuguca

SEQ ID NO: 2082813 - RNA, 19 nt, Homo sapiens
  misc_RNA (1)...(19): siRNA sense strand
ccacucaaccaccaggauu

SEQ ID NO: 2082814 - RNA, 19 nt, Homo sapiens
  misc_RNA (1)...(19): siRNA sense strand
caaagccgacugcuaugug

SEQ ID NO: 2082815 - RNA, 19 nt, Homo sapiens
  misc_RNA (1)...(19): siRNA sense strand
gcccgugagugcuaucugu

SEQ ID NO: 2082816 - RNA, 19 nt, Homo sapiens
  misc_RNA (1)...(19): siRNA sense strand
gggaaaccuacccauacua

SEQ ID NO: 2082817 - RNA, 19 nt, Homo sapiens
  misc_RNA (1)...(19): siRNA sense strand
gggccuccuuguugaguau

SEQ ID NO: 2082818 - RNA, 19 nt, Homo sapiens
  misc_RNA (1)...(19): siRNA sense strand
gaacccgagccaugucuuc

SEQ ID NO: 2082819 - RNA, 19 nt, Homo sapiens
  misc_RNA (1)...(19): siRNA sense strand
gagcaugaagguggaaaug

SEQ ID NO: 2082820 - RNA, 19 nt, Homo sapiens
  misc_RNA (1)...(19): siRNA sense strand
gagugaggcucuggacagu

SEQ ID NO: 2082821 - RNA, 19 nt, Homo sapiens
  misc_RNA (1)...(19): siRNA sense strand
gggaguucguggccuggaa

SEQ ID NO: 2082822 - RNA, 19 nt, Homo sapiens
  misc_RNA (1)...(19): siRNA sense strand
gcuccuguuugaccugaga

SEQ ID NO: 2082823 - RNA, 19 nt, Homo sapiens
  misc_RNA (1)...(19): siRNA sense strand
cgagccaugucuucucugu

SEQ ID NO: 2082824 - RNA, 19 nt, Homo sapiens
  misc_RNA (1)...(19): siRNA sense strand
cgacugcuaugugcaacug

SEQ ID NO: 2082825 - RNA, 19 nt, Homo sapiens
  misc_RNA (1)...(19): siRNA sense strand
gaccuacgccuuggcuuug

SEQ ID NO: 2082826 - RNA, 19 nt, Homo sapiens
  misc_RNA (1)...(19): siRNA sense strand
gcugagggccacaaacauc

SEQ ID NO: 2082827 - RNA, 19 nt, Homo sapiens
  misc_RNA (1)...(19): siRNA sense strand
caccugagccagcaguuug

SEQ ID NO: 2082828 - RNA, 19 nt, Homo sapiens
  misc_RNA (1)...(19): siRNA sense strand
ggaguucguggccuggaaa

SEQ ID NO: 2082829 - RNA, 19 nt, Homo sapiens
  misc_RNA (1)...(19): siRNA sense strand
gcagguggaauuuguucug

SEQ ID NO: 2082830 - RNA, 19 nt, Homo sapiens
  misc_RNA (1)...(19): siRNA sense strand
gcgaguucacgcccuauga

SEQ ID NO: 2082831 - RNA, 19 nt, Homo sapiens
  misc_RNA (1)...(19): siRNA sense strand
ucagaacccuuaccccauu

SEQ ID NO: 2082832 - RNA, 19 nt, Homo sapiens
  misc_RNA (1)...(19): siRNA sense strand
gcaggagcucggccuucua

SEQ ID NO: 2082833 - RNA, 19 nt, Homo sapiens
  misc_RNA (1)...(19): siRNA sense strand
ccggaucuguuaccugcaa

SEQ ID NO: 2082834 - RNA, 19 nt, Homo sapiens
  misc_RNA (1)...(19): siRNA sense strand
guucacgcccuaugagguu

SEQ ID NO: 2082835 - RNA, 19 nt, Homo sapiens
  misc_RNA (1)...(19): siRNA sense strand
uugaguaucuccuguacca

SEQ ID NO: 2082836 - RNA, 19 nt, Homo sapiens
  misc_RNA (1)...(19): siRNA sense strand
agaccuacgccuuggcuuu

SEQ ID NO: 2082837 - RNA, 19 nt, Homo sapiens
  misc_RNA (1)...(19): siRNA sense strand
acagaggcagugugaauau

SEQ ID NO: 2082838 - RNA, 19 nt, Homo sapiens
  misc_RNA (1)...(19): siRNA sense strand
cagccuggaugagaucuuc

SEQ ID NO: 2082839 - RNA, 19 nt, Homo sapiens
  misc_RNA (1)...(19): siRNA sense strand
gggucuaccuggugcaucu

SEQ ID NO: 2082840 - RNA, 19 nt, Homo sapiens
  misc_RNA (1)...(19): siRNA sense strand
gcagugaccccgaguggaa

SEQ ID NO: 2082841 - RNA, 19 nt, Homo sapiens
  misc_RNA (1)...(19): siRNA sense strand
ggaggcccgugagugcuau

SEQ ID NO: 2082842 - RNA, 19 nt, Homo sapiens
  misc_RNA (1)...(19): siRNA sense strand
uacagaggcagugugaaua

SEQ ID NO: 2082843 - RNA, 19 nt, Homo sapiens
  misc_RNA (1)...(19): siRNA sense strand
gccugcaucugaagucauc

SEQ ID NO: 2082844 - RNA, 19 nt, Homo sapiens
  misc_RNA (1)...(19): siRNA sense strand
gugcugagggccacaaaca

SEQ ID NO: 2082845 - RNA, 19 nt, Homo sapiens
  misc_RNA (1)...(19): siRNA sense strand
cgggaaaccuacccauacu

SEQ ID NO: 2082846 - RNA, 19 nt, Homo sapiens
  misc_RNA (1)...(19): siRNA sense strand
cgagaagccacagcucuug

SEQ ID NO: 2082847 - RNA, 19 nt, Homo sapiens
  misc_RNA (1)...(19): siRNA sense strand
gagccaugucuucucugua

SEQ ID NO: 2082848 - RNA, 19 nt, Homo sapiens
  misc_RNA (1)...(19): siRNA sense strand
cagaggcagugugaauauc

SEQ ID NO: 2082849 - RNA, 19 nt, Homo sapiens
  misc_RNA (1)...(19): siRNA sense strand
ggaugagaucuuccuaaag

SEQ ID NO: 2082850 - RNA, 19 nt, Homo sapiens
  misc_RNA (1)...(19): siRNA sense strand
agccaugucuucucuguac

SEQ ID NO: 2082851 - RNA, 19 nt, Homo sapiens
  misc_RNA (1)...(19): siRNA sense strand
gagcugcagguggaauuug

SEQ ID NO: 2082852 - RNA, 19 nt, Homo sapiens
  misc_RNA (1)...(19): siRNA sense strand
gaccucauucuguccuuug

SEQ ID NO: 2082853 - RNA, 19 nt, Homo sapiens
  misc_RNA (1)...(19): siRNA sense strand
ucacagacgacugccagaa

SEQ ID NO: 2082854 - RNA, 19 nt, Homo sapiens
  misc_RNA (1)...(19): siRNA sense strand
gcucuucggcucagaacuc

SEQ ID NO: 2082855 - RNA, 19 nt, Homo sapiens
  misc_RNA (1)...(19): siRNA sense strand
gcauccugcucuccucucu

SEQ ID NO: 2082856 - RNA, 19 nt, Homo sapiens
  misc_RNA (1)...(19): siRNA sense strand
ggccucccacccaccuuua

SEQ ID NO: 2082857 - RNA, 19 nt, Homo sapiens
  misc_RNA (1)...(19): siRNA sense strand
cgauacaacguccugaaca

SEQ ID NO: 2082858 - RNA, 19 nt, Homo sapiens
  misc_RNA (1)...(19): siRNA sense strand
cggguaaccgggaaaccua

SEQ ID NO: 2082859 - RNA, 19 nt, Homo sapiens
  misc_RNA (1)...(19): siRNA sense strand
gagcaguggaccucauucu

SEQ ID NO: 2082860 - RNA, 19 nt, Homo sapiens
  misc_RNA (1)...(19): siRNA sense strand
gaccuuccacuaccagauc

SEQ ID NO: 2082861 - RNA, 19 nt, Homo sapiens
  misc_RNA (1)...(19): siRNA sense strand
cauugagcgugcccagguu

SEQ ID NO: 2082862 - RNA, 19 nt, Homo sapiens
  misc_RNA (1)...(19): siRNA sense strand
gcaagugcugggauugagu

SEQ ID NO: 2082863 - RNA, 19 nt, Homo sapiens
  misc_RNA (1)...(19): siRNA sense strand
ccaaagccgacugcuaugu

SEQ ID NO: 2082864 - RNA, 19 nt, Homo sapiens
  misc_RNA (1)...(19): siRNA sense strand
caaccaccaggauucacaa

SEQ ID NO: 2082865 - RNA, 19 nt, Homo sapiens
  misc_RNA (1)...(19): siRNA sense strand
ccacagcgugucccucauc

SEQ ID NO: 2082866 - RNA, 19 nt, Homo sapiens
  misc_RNA (1)...(19): siRNA sense strand
gguggaacccgagccaugu

SEQ ID NO: 2082867 - RNA, 19 nt, Homo sapiens
  misc_RNA (1)...(19): siRNA sense strand
gggccgaugacuuccagaa

SEQ ID NO: 2082868 - RNA, 19 nt, Homo sapiens
  misc_RNA (1)...(19): siRNA sense strand
gaaacgaagucaauuggua

SEQ ID NO: 2082869 - RNA, 19 nt, Homo sapiens
  misc_RNA (1)...(19): siRNA sense strand
aaacaaagauggcaacaaa

SEQ ID NO: 2082870 - RNA, 19 nt, Homo sapiens
  misc_RNA (1)...(19): siRNA sense strand
gagcaucacuguuuacuug

SEQ ID NO: 2082871 - RNA, 19 nt, Homo sapiens
  misc_RNA (1)...(19): siRNA sense strand
gaagauggccugaagauau

SEQ ID NO: 2082872 - RNA, 19 nt, Homo sapiens
  misc_RNA (1)...(19): siRNA sense strand
ucaggaggaucaaacauua

SEQ ID NO: 2082873 - RNA, 19 nt, Homo sapiens
  misc_RNA (1)...(19): siRNA sense strand
uaaagaaggcucacaagua

SEQ ID NO: 2082874 - RNA, 19 nt, Homo sapiens
  misc_RNA (1)...(19): siRNA sense strand
caacaaaucacuacgguuu

SEQ ID NO: 2082875 - RNA, 19 nt, Homo sapiens
  misc_RNA (1)...(19): siRNA sense strand
gaagucaauugguaaagaa

SEQ ID NO: 2082876 - RNA, 19 nt, Homo sapiens
  misc_RNA (1)...(19): siRNA sense strand
agaagaagcugcuacaaau

SEQ ID NO: 2082877 - RNA, 19 nt, Homo sapiens
  misc_RNA (1)...(19): siRNA sense strand
gaaagaugauucugacagu

SEQ ID NO: 2082878 - RNA, 19 nt, Homo sapiens
  misc_RNA (1)...(19): siRNA sense strand
gcacagaucccacccaugu

SEQ ID NO: 2082879 - RNA, 19 nt, Homo sapiens
  misc_RNA (1)...(19): siRNA sense strand
caacagauuugaagugaca

SEQ ID NO: 2082880 - RNA, 19 nt, Homo sapiens
  misc_RNA (1)...(19): siRNA sense strand
gagagacuacuaccuaaua

SEQ ID NO: 2082881 - RNA, 19 nt, Homo sapiens
  misc_RNA (1)...(19): siRNA sense strand
caagagagacuacuaccua

SEQ ID NO: 2082882 - RNA, 19 nt, Homo sapiens
  misc_RNA (1)...(19): siRNA sense strand
cuagagaaauccaauaaga

SEQ ID NO: 2082883 - RNA, 19 nt, Homo sapiens
  misc_RNA (1)...(19): siRNA sense strand
ggagaaggcucacuuagcu

SEQ ID NO: 2082884 - RNA, 19 nt, Homo sapiens
  misc_RNA (1)...(19): siRNA sense strand
ggacaagcaguuugaauug

SEQ ID NO: 2082885 - RNA, 19 nt, Homo sapiens
  misc_RNA (1)...(19): siRNA sense strand
ggacaucuucuucucuaua

SEQ ID NO: 2082886 - RNA, 19 nt, Homo sapiens
  misc_RNA (1)...(19): siRNA sense strand
agaacgagcucuccuguug

SEQ ID NO: 2082887 - RNA, 19 nt, Homo sapiens
  misc_RNA (1)...(19): siRNA sense strand
gaacuuguaugccuucaac

SEQ ID NO: 2082888 - RNA, 19 nt, Homo sapiens
  misc_RNA (1)...(19): siRNA sense strand
guccacaucuugaaggaua

SEQ ID NO: 2082889 - RNA, 19 nt, Homo sapiens
  misc_RNA (1)...(19): siRNA sense strand
aaagaaggcucacaaguac

SEQ ID NO: 2082890 - RNA, 19 nt, Homo sapiens
  misc_RNA (1)...(19): siRNA sense strand
ggacagggaauuucaugaa

SEQ ID NO: 2082891 - RNA, 19 nt, Homo sapiens
  misc_RNA (1)...(19): siRNA sense strand
ucgcagaaaugaaagauga

SEQ ID NO: 2082892 - RNA, 19 nt, Homo sapiens
  misc_RNA (1)...(19): siRNA sense strand
ucaaucaagugcucaagaa

SEQ ID NO: 2082893 - RNA, 19 nt, Homo sapiens
  misc_RNA (1)...(19): siRNA sense strand
aaacccagcugacacuuga

SEQ ID NO: 2082894 - RNA, 19 nt, Homo sapiens
  misc_RNA (1)...(19): siRNA sense strand
aaagggagcaucacuguuu

SEQ ID NO: 2082895 - RNA, 19 nt, Homo sapiens
  misc_RNA (1)...(19): siRNA sense strand
gcaacaaauucaucacauc

SEQ ID NO: 2082896 - RNA, 19 nt, Homo sapiens
  misc_RNA (1)...(19): siRNA sense strand
gaaagcaguugcaguaucc

SEQ ID NO: 2082897 - RNA, 19 nt, Homo sapiens
  misc_RNA (1)...(19): siRNA sense strand
acagaaagcaguugcagua

SEQ ID NO: 2082898 - RNA, 19 nt, Homo sapiens
  misc_RNA (1)...(19): siRNA sense strand
caaacacucagaucaauga

SEQ ID NO: 2082899 - RNA, 19 nt, Homo sapiens
  misc_RNA (1)...(19): siRNA sense strand
gcaccagccucccuacauc

SEQ ID NO: 2082900 - RNA, 19 nt, Homo sapiens
  misc_RNA (1)...(19): siRNA sense strand
gcaggucuuugcuaaacuu

SEQ ID NO: 2082901 - RNA, 19 nt, Homo sapiens
  misc_RNA (1)...(19): siRNA sense strand
gcaaagggagcaucacugu

SEQ ID NO: 2082902 - RNA, 19 nt, Homo sapiens
  misc_RNA (1)...(19): siRNA sense strand
aagauggccugaagauauu

SEQ ID NO: 2082903 - RNA, 19 nt, Homo sapiens
  misc_RNA (1)...(19): siRNA sense strand
cgaagucaauugguaaaga

SEQ ID NO: 2082904 - RNA, 19 nt, Homo sapiens
  misc_RNA (1)...(19): siRNA sense strand
ccaugcaggucuuugcuaa

SEQ ID NO: 2082905 - RNA, 19 nt, Homo sapiens
  misc_RNA (1)...(19): siRNA sense strand
ccaaagcauugaauugcaa

SEQ ID NO: 2082906 - RNA, 19 nt, Homo sapiens
  misc_RNA (1)...(19): siRNA sense strand
gaggagguguuacggaugu

SEQ ID NO: 2082907 - RNA, 19 nt, Homo sapiens
  misc_RNA (1)...(19): siRNA sense strand
gaaauccaauaagaacuuc

SEQ ID NO: 2082908 - RNA, 19 nt, Homo sapiens
  misc_RNA (1)...(19): siRNA sense strand
cuacaucauugcaguguug

SEQ ID NO: 2082909 - RNA, 19 nt, Homo sapiens
  misc_RNA (1)...(19): siRNA sense strand
ggauguguguggcaguaaa

SEQ ID NO: 2082910 - RNA, 19 nt, Homo sapiens
  misc_RNA (1)...(19): siRNA sense strand
ggaagaaaaugcacaaaag

SEQ ID NO: 2082911 - RNA, 19 nt, Homo sapiens
  misc_RNA (1)...(19): siRNA sense strand
guugagauccgaacauuug

SEQ ID NO: 2082912 - RNA, 19 nt, Homo sapiens
  misc_RNA (1)...(19): siRNA sense strand
gacagggaauuucaugaau

SEQ ID NO: 2082913 - RNA, 19 nt, Homo sapiens
  misc_RNA (1)...(19): siRNA sense strand
ggaaggacagggaauuuca

SEQ ID NO: 2082914 - RNA, 19 nt, Homo sapiens
  misc_RNA (1)...(19): siRNA sense strand
caacaaauucaucacauca

SEQ ID NO: 2082915 - RNA, 19 nt, Homo sapiens
  misc_RNA (1)...(19): siRNA sense strand
gcagcucgcagaaaugaaa

SEQ ID NO: 2082916 - RNA, 19 nt, Homo sapiens
  misc_RNA (1)...(19): siRNA sense strand
ccaugugguuucccaguuu

SEQ ID NO: 2082917 - RNA, 19 nt, Homo sapiens
  misc_RNA (1)...(19): siRNA sense strand
gaacaagcucuuuucauuu

SEQ ID NO: 2082918 - RNA, 19 nt, Homo sapiens
  misc_RNA (1)...(19): siRNA sense strand
gcugagagacuucccagaa

SEQ ID NO: 2082919 - RNA, 19 nt, Homo sapiens
  misc_RNA (1)...(19): siRNA sense strand
agagacuacuaccuaauaa

SEQ ID NO: 2082920 - RNA, 19 nt, Homo sapiens
  misc_RNA (1)...(19): siRNA sense strand
caagugcuaucuccauaca

SEQ ID NO: 2082921 - RNA, 19 nt, Homo sapiens
  misc_RNA (1)...(19): siRNA sense strand
ggucguccauuacuucugu

SEQ ID NO: 2082922 - RNA, 19 nt, Homo sapiens
  misc_RNA (1)...(19): siRNA sense strand
ggcaaaagcuccucauguu

SEQ ID NO: 2082923 - RNA, 19 nt, Homo sapiens
  misc_RNA (1)...(19): siRNA sense strand
gagcuuaucauccuguaug

SEQ ID NO: 2082924 - RNA, 19 nt, Homo sapiens
  misc_RNA (1)...(19): siRNA sense strand
caugugguuucccaguuua

SEQ ID NO: 2082925 - RNA, 19 nt, Homo sapiens
  misc_RNA (1)...(19): siRNA sense strand
gaagaagauugggaacagu

SEQ ID NO: 2082926 - RNA, 19 nt, Homo sapiens
  misc_RNA (1)...(19): siRNA sense strand
gaacaaucacugccacauc

SEQ ID NO: 2082927 - RNA, 19 nt, Homo sapiens
  misc_RNA (1)...(19): siRNA sense strand
aaacgaagucaauugguaa

SEQ ID NO: 2082928 - RNA, 19 nt, Homo sapiens
  misc_RNA (1)...(19): siRNA sense strand
gacaucuucuucucuauag

SEQ ID NO: 2082929 - RNA, 19 nt, Homo sapiens
  misc_RNA (1)...(19): siRNA sense strand
cuggucagcuuguuagaaa

SEQ ID NO: 2082930 - RNA, 19 nt, Homo sapiens
  misc_RNA (1)...(19): siRNA sense strand
aagagagacuacuaccuaa

SEQ ID NO: 2082931 - RNA, 19 nt, Homo sapiens
  misc_RNA (1)...(19): siRNA sense strand
gauauuuacugaagaucuc

SEQ ID NO: 2082932 - RNA, 19 nt, Homo sapiens
  misc_RNA (1)...(19): siRNA sense strand
gccugaagauauuuacuga

SEQ ID NO: 2082933 - RNA, 19 nt, Homo sapiens
  misc_RNA (1)...(19): siRNA sense strand
aaggacaucuucuucucua

SEQ ID NO: 2082934 - RNA, 19 nt, Homo sapiens
  misc_RNA (1)...(19): siRNA sense strand
acaaagauggcaacaaaga

SEQ ID NO: 2082935 - RNA, 19 nt, Homo sapiens
  misc_RNA (1)...(19): siRNA sense strand
ggagauuuccagcuacuau

SEQ ID NO: 2082936 - RNA, 19 nt, Homo sapiens
  misc_RNA (1)...(19): siRNA sense strand
agggugagcugggagaaua

SEQ ID NO: 2082937 - RNA, 19 nt, Homo sapiens
  misc_RNA (1)...(19): siRNA sense strand
gcacagaaaaccugcauuu

SEQ ID NO: 2082938 - RNA, 19 nt, Homo sapiens
  misc_RNA (1)...(19): siRNA sense strand
gaagcugaaugacucugau

SEQ ID NO: 2082939 - RNA, 19 nt, Homo sapiens
  misc_RNA (1)...(19): siRNA sense strand
guaaagaagcugaaugacu

SEQ ID NO: 2082940 - RNA, 19 nt, Homo sapiens
  misc_RNA (1)...(19): siRNA sense strand
aagaaacgguucaaucaag

SEQ ID NO: 2082941 - RNA, 19 nt, Homo sapiens
  misc_RNA (1)...(19): siRNA sense strand
aaacaaggacaucuucuuc

SEQ ID NO: 2082942 - RNA, 19 nt, Homo sapiens
  misc_RNA (1)...(19): siRNA sense strand
guccucggcuucuuaauag

SEQ ID NO: 2082943 - RNA, 19 nt, Homo sapiens
  misc_RNA (1)...(19): siRNA sense strand
gaagaagcugcuacaaauc

SEQ ID NO: 2082944 - RNA, 19 nt, Homo sapiens
  misc_RNA (1)...(19): siRNA sense strand
aagaagaagcugcuacaaa

SEQ ID NO: 2082945 - RNA, 19 nt, Homo sapiens
  misc_RNA (1)...(19): siRNA sense strand
gaggaucaaacauuaucua

SEQ ID NO: 2082946 - RNA, 19 nt, Homo sapiens
  misc_RNA (1)...(19): siRNA sense strand
gaacuggacggacauacca

SEQ ID NO: 2082947 - RNA, 19 nt, Homo sapiens
  misc_RNA (1)...(19): siRNA sense strand
ggaaagggguccaucaaag

SEQ ID NO: 2082948 - RNA, 19 nt, Homo sapiens
  misc_RNA (1)...(19): siRNA sense strand
aagggagcaucacuguuua

SEQ ID NO: 2082949 - RNA, 19 nt, Homo sapiens
  misc_RNA (1)...(19): siRNA sense strand
uccaugaccuauugacauu

SEQ ID NO: 2082950 - RNA, 19 nt, Homo sapiens
  misc_RNA (1)...(19): siRNA sense strand
gcaaacacucagaucaaug

SEQ ID NO: 2082951 - RNA, 19 nt, Homo sapiens
  misc_RNA (1)...(19): siRNA sense strand
cugaagauauuuacugaag

SEQ ID NO: 2082952 - RNA, 19 nt, Homo sapiens
  misc_RNA (1)...(19): siRNA sense strand
acacagaaacgaagucaau

SEQ ID NO: 2082953 - RNA, 19 nt, Homo sapiens
  misc_RNA (1)...(19): siRNA sense strand
ucacuuagcucugauugac

SEQ ID NO: 2082954 - RNA, 19 nt, Homo sapiens
  misc_RNA (1)...(19): siRNA sense strand
gcagaaaugaaagaugauu

SEQ ID NO: 2082955 - RNA, 19 nt, Homo sapiens
  misc_RNA (1)...(19): siRNA sense strand
caaacaaggacaucuucuu

SEQ ID NO: 2082956 - RNA, 19 nt, Homo sapiens
  misc_RNA (1)...(19): siRNA sense strand
caaucaagcuggaacuacu

SEQ ID NO: 2082957 - RNA, 19 nt, Homo sapiens
  misc_RNA (1)...(19): siRNA sense strand
gaaacaaagauggcaacaa

SEQ ID NO: 2082958 - RNA, 19 nt, Homo sapiens
  misc_RNA (1)...(19): siRNA sense strand
cugaagaucucccggaagu

SEQ ID NO: 2082959 - RNA, 19 nt, Homo sapiens
  misc_RNA (1)...(19): siRNA sense strand
acaaaucacuacgguuuca

SEQ ID NO: 2082960 - RNA, 19 nt, Homo sapiens
  misc_RNA (1)...(19): siRNA sense strand
caaggauggcugaggagua

SEQ ID NO: 2082961 - RNA, 19 nt, Homo sapiens
  misc_RNA (1)...(19): siRNA sense strand
ucccuuugauggccucuua

SEQ ID NO: 2082962 - RNA, 19 nt, Homo sapiens
  misc_RNA (1)...(19): siRNA sense strand
ugauccagcuauacuguga

SEQ ID NO: 2082963 - RNA, 19 nt, Homo sapiens
  misc_RNA (1)...(19): siRNA sense strand
ccacccugcucaagugcua

SEQ ID NO: 2082964 - RNA, 19 nt, Homo sapiens
  misc_RNA (1)...(19): siRNA sense strand
agugcuaucuccauacaaa

SEQ ID NO: 2082965 - RNA, 19 nt, Homo sapiens
  misc_RNA (1)...(19): siRNA sense strand
acacucagaucaaugacau

SEQ ID NO: 2082966 - RNA, 19 nt, Homo sapiens
  misc_RNA (1)...(19): siRNA sense strand
cagcaaacacucagaucaa

SEQ ID NO: 2082967 - RNA, 19 nt, Homo sapiens
  misc_RNA (1)...(19): siRNA sense strand
ugcaaggucugaugaagga

SEQ ID NO: 2082968 - RNA, 19 nt, Homo sapiens
  misc_RNA (1)...(19): siRNA sense strand
gaaacgaagucaauuggua

SEQ ID NO: 2082969 - RNA, 19 nt, Homo sapiens
  misc_RNA (1)...(19): siRNA sense strand
aaacaaagauggcaacaaa

SEQ ID NO: 2082970 - RNA, 19 nt, Homo sapiens
  misc_RNA (1)...(19): siRNA sense strand
gagcaucacuguuuacuug

SEQ ID NO: 2082971 - RNA, 19 nt, Homo sapiens
  misc_RNA (1)...(19): siRNA sense strand
gaagauggccugaagauau

SEQ ID NO: 2082972 - RNA, 19 nt, Homo sapiens
  misc_RNA (1)...(19): siRNA sense strand
ucaggaggaucaaacauua

SEQ ID NO: 2082973 - RNA, 19 nt, Homo sapiens
  misc_RNA (1)...(19): siRNA sense strand
uaaagaaggcucacaagua

SEQ ID NO: 2082974 - RNA, 19 nt, Homo sapiens
  misc_RNA (1)...(19): siRNA sense strand
caacaaaucacuacgguuu

SEQ ID NO: 2082975 - RNA, 19 nt, Homo sapiens
  misc_RNA (1)...(19): siRNA sense strand
gaagucaauugguaaagaa

SEQ ID NO: 2082976 - RNA, 19 nt, Homo sapiens
  misc_RNA (1)...(19): siRNA sense strand
agaagaagcugcuacaaau

SEQ ID NO: 2082977 - RNA, 19 nt, Homo sapiens
  misc_RNA (1)...(19): siRNA sense strand
gaaagaugauucugacagu

SEQ ID NO: 2082978 - RNA, 19 nt, Homo sapiens
  misc_RNA (1)...(19): siRNA sense strand
gcacagaucccacccaugu

SEQ ID NO: 2082979 - RNA, 19 nt, Homo sapiens
  misc_RNA (1)...(19): siRNA sense strand
caacagauuugaagugaca

SEQ ID NO: 2082980 - RNA, 19 nt, Homo sapiens
  misc_RNA (1)...(19): siRNA sense strand
gagagacuacuaccuaaua

SEQ ID NO: 2082981 - RNA, 19 nt, Homo sapiens
  misc_RNA (1)...(19): siRNA sense strand
caagagagacuacuaccua

SEQ ID NO: 2082982 - RNA, 19 nt, Homo sapiens
  misc_RNA (1)...(19): siRNA sense strand
cuagagaaauccaauaaga

SEQ ID NO: 2082983 - RNA, 19 nt, Homo sapiens
  misc_RNA (1)...(19): siRNA sense strand
ggagaaggcucacuuagcu

SEQ ID NO: 2082984 - RNA, 19 nt, Homo sapiens
  misc_RNA (1)...(19): siRNA sense strand
ggacaagcaguuugaauug

SEQ ID NO: 2082985 - RNA, 19 nt, Homo sapiens
  misc_RNA (1)...(19): siRNA sense strand
ggacaucuucuucucuaua

SEQ ID NO: 2082986 - RNA, 19 nt, Homo sapiens
  misc_RNA (1)...(19): siRNA sense strand
agaacgagcucuccuguug

SEQ ID NO: 2082987 - RNA, 19 nt, Homo sapiens
  misc_RNA (1)...(19): siRNA sense strand
gaacuuguaugccuucaac

SEQ ID NO: 2082988 - RNA, 19 nt, Homo sapiens
  misc_RNA (1)...(19): siRNA sense strand
guccacaucuugaaggaua

SEQ ID NO: 2082989 - RNA, 19 nt, Homo sapiens
  misc_RNA (1)...(19): siRNA sense strand
aaagaaggcucacaaguac

SEQ ID NO: 2082990 - RNA, 19 nt, Homo sapiens
  misc_RNA (1)...(19): siRNA sense strand
ggacagggaauuucaugaa

SEQ ID NO: 2082991 - RNA, 19 nt, Homo sapiens
  misc_RNA (1)...(19): siRNA sense strand
ucgcagaaaugaaagauga

SEQ ID NO: 2082992 - RNA, 19 nt, Homo sapiens
  misc_RNA (1)...(19): siRNA sense strand
ucaaucaagugcucaagaa

SEQ ID NO: 2082993 - RNA, 19 nt, Homo sapiens
  misc_RNA (1)...(19): siRNA sense strand
aaacccagcugacacuuga

SEQ ID NO: 2082994 - RNA, 19 nt, Homo sapiens
  misc_RNA (1)...(19): siRNA sense strand
aaagggagcaucacuguuu

SEQ ID NO: 2082995 - RNA, 19 nt, Homo sapiens
  misc_RNA (1)...(19): siRNA sense strand
gcaacaaauucaucacauc

SEQ ID NO: 2082996 - RNA, 19 nt, Homo sapiens
  misc_RNA (1)...(19): siRNA sense strand
gaaagcaguugcaguaucc

SEQ ID NO: 2082997 - RNA, 19 nt, Homo sapiens
  misc_RNA (1)...(19): siRNA sense strand
acagaaagcaguugcagua

SEQ ID NO: 2082998 - RNA, 19 nt, Homo sapiens
  misc_RNA (1)...(19): siRNA sense strand
caaacacucagaucaauga

SEQ ID NO: 2082999 - RNA, 19 nt, Homo sapiens
  misc_RNA (1)...(19): siRNA sense strand
gcaccagccucccuacauc

SEQ ID NO: 2083000 - RNA, 19 nt, Homo sapiens
  misc_RNA (1)...(19): siRNA sense strand
gcaggucuuugcuaaacuu

SEQ ID NO: 2083001 - RNA, 19 nt, Homo sapiens
  misc_RNA (1)...(19): siRNA sense strand
gcaaagggagcaucacugu

SEQ ID NO: 2083002 - RNA, 19 nt, Homo sapiens
  misc_RNA (1)...(19): siRNA sense strand
aagauggccugaagauauu

SEQ ID NO: 2083003 - RNA, 19 nt, Homo sapiens
  misc_RNA (1)...(19): siRNA sense strand
cgaagucaauugguaaaga

SEQ ID NO: 2083004 - RNA, 19 nt, Homo sapiens
  misc_RNA (1)...(19): siRNA sense strand
ccaugcaggucuuugcuaa

SEQ ID NO: 2083005 - RNA, 19 nt, Homo sapiens
  misc_RNA (1)...(19): siRNA sense strand
ccaaagcauugaauugcaa

SEQ ID NO: 2083006 - RNA, 19 nt, Homo sapiens
  misc_RNA (1)...(19): siRNA sense strand
gaggagguguuacggaugu

SEQ ID NO: 2083007 - RNA, 19 nt, Homo sapiens
  misc_RNA (1)...(19): siRNA sense strand
gaaauccaauaagaacuuc

SEQ ID NO: 2083008 - RNA, 19 nt, Homo sapiens
  misc_RNA (1)...(19): siRNA sense strand
cuacaucauugcaguguug

SEQ ID NO: 2083009 - RNA, 19 nt, Homo sapiens
  misc_RNA (1)...(19): siRNA sense strand
ggauguguguggcaguaaa

SEQ ID NO: 2083010 - RNA, 19 nt, Homo sapiens
  misc_RNA (1)...(19): siRNA sense strand
ggaagaaaaugcacaaaag

SEQ ID NO: 2083011 - RNA, 19 nt, Homo sapiens
  misc_RNA (1)...(19): siRNA sense strand
guugagauccgaacauuug

SEQ ID NO: 2083012 - RNA, 19 nt, Homo sapiens
  misc_RNA (1)...(19): siRNA sense strand
gacagggaauuucaugaau

SEQ ID NO: 2083013 - RNA, 19 nt, Homo sapiens
  misc_RNA (1)...(19): siRNA sense strand
ggaaggacagggaauuuca

SEQ ID NO: 2083014 - RNA, 19 nt, Homo sapiens
  misc_RNA (1)...(19): siRNA sense strand
caacaaauucaucacauca

SEQ ID NO: 2083015 - RNA, 19 nt, Homo sapiens
  misc_RNA (1)...(19): siRNA sense strand
gcagcucgcagaaaugaaa

SEQ ID NO: 2083016 - RNA, 19 nt, Homo sapiens
  misc_RNA (1)...(19): siRNA sense strand
ccaugugguuucccaguuu

SEQ ID NO: 2083017 - RNA, 19 nt, Homo sapiens
  misc_RNA (1)...(19): siRNA sense strand
gaacaagcucuuuucauuu

SEQ ID NO: 2083018 - RNA, 19 nt, Homo sapiens
  misc_RNA (1)...(19): siRNA sense strand
gcugagagacuucccagaa

SEQ ID NO: 2083019 - RNA, 19 nt, Homo sapiens
  misc_RNA (1)...(19): siRNA sense strand
agagacuacuaccuaauaa

SEQ ID NO: 2083020 - RNA, 19 nt, Homo sapiens
  misc_RNA (1)...(19): siRNA sense strand
caagugcuaucuccauaca

SEQ ID NO: 2083021 - RNA, 19 nt, Homo sapiens
  misc_RNA (1)...(19): siRNA sense strand
ggucguccauuacuucugu

SEQ ID NO: 2083022 - RNA, 19 nt, Homo sapiens
  misc_RNA (1)...(19): siRNA sense strand
ggcaaaagcuccucauguu

SEQ ID NO: 2083023 - RNA, 19 nt, Homo sapiens
  misc_RNA (1)...(19): siRNA sense strand
gagcuuaucauccuguaug

SEQ ID NO: 2083024 - RNA, 19 nt, Homo sapiens
  misc_RNA (1)...(19): siRNA sense strand
caugugguuucccaguuua

SEQ ID NO: 2083025 - RNA, 19 nt, Homo sapiens
  misc_RNA (1)...(19): siRNA sense strand
gaagaagauugggaacagu

SEQ ID NO: 2083026 - RNA, 19 nt, Homo sapiens
  misc_RNA (1)...(19): siRNA sense strand
gaacaaucacugccacauc

SEQ ID NO: 2083027 - RNA, 19 nt, Homo sapiens
  misc_RNA (1)...(19): siRNA sense strand
aaacgaagucaauugguaa

SEQ ID NO: 2083028 - RNA, 19 nt, Homo sapiens
  misc_RNA (1)...(19): siRNA sense strand
gacaucuucuucucuauag

SEQ ID NO: 2083029 - RNA, 19 nt, Homo sapiens
  misc_RNA (1)...(19): siRNA sense strand
cuggucagcuuguuagaaa

SEQ ID NO: 2083030 - RNA, 19 nt, Homo sapiens
  misc_RNA (1)...(19): siRNA sense strand
aagagagacuacuaccuaa

SEQ ID NO: 2083031 - RNA, 19 nt, Homo sapiens
  misc_RNA (1)...(19): siRNA sense strand
gauauuuacugaagaucuc

SEQ ID NO: 2083032 - RNA, 19 nt, Homo sapiens
  misc_RNA (1)...(19): siRNA sense strand
gccugaagauauuuacuga

SEQ ID NO: 2083033 - RNA, 19 nt, Homo sapiens
  misc_RNA (1)...(19): siRNA sense strand
aaggacaucuucuucucua

SEQ ID NO: 2083034 - RNA, 19 nt, Homo sapiens
  misc_RNA (1)...(19): siRNA sense strand
acaaagauggcaacaaaga

SEQ ID NO: 2083035 - RNA, 19 nt, Homo sapiens
  misc_RNA (1)...(19): siRNA sense strand
ggagauuuccagcuacuau

SEQ ID NO: 2083036 - RNA, 19 nt, Homo sapiens
  misc_RNA (1)...(19): siRNA sense strand
agggugagcugggagaaua

SEQ ID NO: 2083037 - RNA, 19 nt, Homo sapiens
  misc_RNA (1)...(19): siRNA sense strand
gcacagaaaaccugcauuu

SEQ ID NO: 2083038 - RNA, 19 nt, Homo sapiens
  misc_RNA (1)...(19): siRNA sense strand
gaagcugaaugacucugau

SEQ ID NO: 2083039 - RNA, 19 nt, Homo sapiens
  misc_RNA (1)...(19): siRNA sense strand
guaaagaagcugaaugacu

SEQ ID NO: 2083040 - RNA, 19 nt, Homo sapiens
  misc_RNA (1)...(19): siRNA sense strand
aagaaacgguucaaucaag

SEQ ID NO: 2083041 - RNA, 19 nt, Homo sapiens
  misc_RNA (1)...(19): siRNA sense strand
aaacaaggacaucuucuuc

SEQ ID NO: 2083042 - RNA, 19 nt, Homo sapiens
  misc_RNA (1)...(19): siRNA sense strand
guccucggcuucuuaauag

SEQ ID NO: 2083043 - RNA, 19 nt, Homo sapiens
  misc_RNA (1)...(19): siRNA sense strand
gaagaagcugcuacaaauc

SEQ ID NO: 2083044 - RNA, 19 nt, Homo sapiens
  misc_RNA (1)...(19): siRNA sense strand
aagaagaagcugcuacaaa

SEQ ID NO: 2083045 - RNA, 19 nt, Homo sapiens
  misc_RNA (1)...(19): siRNA sense strand
gaggaucaaacauuaucua

SEQ ID NO: 2083046 - RNA, 19 nt, Homo sapiens
  misc_RNA (1)...(19): siRNA sense strand
gaacuggacggacauacca

SEQ ID NO: 2083047 - RNA, 19 nt, Homo sapiens
  misc_RNA (1)...(19): siRNA sense strand
ggaaagggguccaucaaag

SEQ ID NO: 2083048 - RNA, 19 nt, Homo sapiens
  misc_RNA (1)...(19): siRNA sense strand
aagggagcaucacuguuua

SEQ ID NO: 2083049 - RNA, 19 nt, Homo sapiens
  misc_RNA (1)...(19): siRNA sense strand
uccaugaccuauugacauu

SEQ ID NO: 2083050 - RNA, 19 nt, Homo sapiens
  misc_RNA (1)...(19): siRNA sense strand
gcaaacacucagaucaaug

SEQ ID NO: 2083051 - RNA, 19 nt, Homo sapiens
  misc_RNA (1)...(19): siRNA sense strand
cugaagauauuuacugaag

SEQ ID NO: 2083052 - RNA, 19 nt, Homo sapiens
  misc_RNA (1)...(19): siRNA sense strand
acacagaaacgaagucaau

SEQ ID NO: 2083053 - RNA, 19 nt, Homo sapiens
  misc_RNA (1)...(19): siRNA sense strand
ucacuuagcucugauugac

SEQ ID NO: 2083054 - RNA, 19 nt, Homo sapiens
  misc_RNA (1)...(19): siRNA sense strand
gcagaaaugaaagaugauu

SEQ ID NO: 2083055 - RNA, 19 nt, Homo sapiens
  misc_RNA (1)...(19): siRNA sense strand
caaacaaggacaucuucuu

SEQ ID NO: 2083056 - RNA, 19 nt, Homo sapiens
  misc_RNA (1)...(19): siRNA sense strand
caaucaagcuggaacuacu

SEQ ID NO: 2083057 - RNA, 19 nt, Homo sapiens
  misc_RNA (1)...(19): siRNA sense strand
gaaacaaagauggcaacaa

SEQ ID NO: 2083058 - RNA, 19 nt, Homo sapiens
  misc_RNA (1)...(19): siRNA sense strand
cugaagaucucccggaagu

SEQ ID NO: 2083059 - RNA, 19 nt, Homo sapiens
  misc_RNA (1)...(19): siRNA sense strand
acaaaucacuacgguuuca

SEQ ID NO: 2083060 - RNA, 19 nt, Homo sapiens
  misc_RNA (1)...(19): siRNA sense strand
caaggauggcugaggagua

SEQ ID NO: 2083061 - RNA, 19 nt, Homo sapiens
  misc_RNA (1)...(19): siRNA sense strand
ucccuuugauggccucuua

SEQ ID NO: 2083062 - RNA, 19 nt, Homo sapiens
  misc_RNA (1)...(19): siRNA sense strand
ugauccagcuauacuguga

SEQ ID NO: 2083063 - RNA, 19 nt, Homo sapiens
  misc_RNA (1)...(19): siRNA sense strand
ccacccugcucaagugcua

SEQ ID NO: 2083064 - RNA, 19 nt, Homo sapiens
  misc_RNA (1)...(19): siRNA sense strand
agugcuaucuccauacaaa

SEQ ID NO: 2083065 - RNA, 19 nt, Homo sapiens
  misc_RNA (1)...(19): siRNA sense strand
acacucagaucaaugacau

SEQ ID NO: 2083066 - RNA, 19 nt, Homo sapiens
  misc_RNA (1)...(19): siRNA sense strand
cagcaaacacucagaucaa

SEQ ID NO: 2083067 - RNA, 19 nt, Homo sapiens
  misc_RNA (1)...(19): siRNA sense strand
ugcaaggucugaugaagga

SEQ ID NO: 2083068 - RNA, 19 nt, Homo sapiens
  misc_RNA (1)...(19): siRNA sense strand
gaaaucagcuaacaaacua

SEQ ID NO: 2083069 - RNA, 19 nt, Homo sapiens
  misc_RNA (1)...(19): siRNA sense strand
ccaaguagcugaacacgua

SEQ ID NO: 2083070 - RNA, 19 nt, Homo sapiens
  misc_RNA (1)...(19): siRNA sense strand
guacaaagccugcauauga

SEQ ID NO: 2083071 - RNA, 19 nt, Homo sapiens
  misc_RNA (1)...(19): siRNA sense strand
gaagaacgcuugucacagu

SEQ ID NO: 2083072 - RNA, 19 nt, Homo sapiens
  misc_RNA (1)...(19): siRNA sense strand
ccaaaccacugacgaguua

SEQ ID NO: 2083073 - RNA, 19 nt, Homo sapiens
  misc_RNA (1)...(19): siRNA sense strand
gcacagaaguuccgauuca

SEQ ID NO: 2083074 - RNA, 19 nt, Homo sapiens
  misc_RNA (1)...(19): siRNA sense strand
cgaaggaacuggaauuuga

SEQ ID NO: 2083075 - RNA, 19 nt, Homo sapiens
  misc_RNA (1)...(19): siRNA sense strand
ccaaagaucuucaccucua

SEQ ID NO: 2083076 - RNA, 19 nt, Homo sapiens
  misc_RNA (1)...(19): siRNA sense strand
gaaagaacaggacaguuua

SEQ ID NO: 2083077 - RNA, 19 nt, Homo sapiens
  misc_RNA (1)...(19): siRNA sense strand
gaccagcgguguuuccuua

SEQ ID NO: 2083078 - RNA, 19 nt, Homo sapiens
  misc_RNA (1)...(19): siRNA sense strand
gaacaggacaguuuaaaug

SEQ ID NO: 2083079 - RNA, 19 nt, Homo sapiens
  misc_RNA (1)...(19): siRNA sense strand
uaaaugcccuggaaauauu

SEQ ID NO: 2083080 - RNA, 19 nt, Homo sapiens
  misc_RNA (1)...(19): siRNA sense strand
gcaacuagggucagaaaua

SEQ ID NO: 2083081 - RNA, 19 nt, Homo sapiens
  misc_RNA (1)...(19): siRNA sense strand
gaaggaagaggauaaacua

SEQ ID NO: 2083082 - RNA, 19 nt, Homo sapiens
  misc_RNA (1)...(19): siRNA sense strand
gauacugucuuuagggaua

SEQ ID NO: 2083083 - RNA, 19 nt, Homo sapiens
  misc_RNA (1)...(19): siRNA sense strand
gaaauggcuaggcuaauua

SEQ ID NO: 2083084 - RNA, 19 nt, Homo sapiens
  misc_RNA (1)...(19): siRNA sense strand
gaagaaaugccuaugcaaa

SEQ ID NO: 2083085 - RNA, 19 nt, Homo sapiens
  misc_RNA (1)...(19): siRNA sense strand
gaagaucauuucccagcua

SEQ ID NO: 2083086 - RNA, 19 nt, Homo sapiens
  misc_RNA (1)...(19): siRNA sense strand
uuagauggcugucagauuu

SEQ ID NO: 2083087 - RNA, 19 nt, Homo sapiens
  misc_RNA (1)...(19): siRNA sense strand
ggaaaggaccucagaauca

SEQ ID NO: 2083088 - RNA, 19 nt, Homo sapiens
  misc_RNA (1)...(19): siRNA sense strand
gguagaaguuccuuacaaa

SEQ ID NO: 2083089 - RNA, 19 nt, Homo sapiens
  misc_RNA (1)...(19): siRNA sense strand
aaaugaggaugcaaacuua

SEQ ID NO: 2083090 - RNA, 19 nt, Homo sapiens
  misc_RNA (1)...(19): siRNA sense strand
ggagucauauugcuuaguu

SEQ ID NO: 2083091 - RNA, 19 nt, Homo sapiens
  misc_RNA (1)...(19): siRNA sense strand
aagaagagcuggaucagaa

SEQ ID NO: 2083092 - RNA, 19 nt, Homo sapiens
  misc_RNA (1)...(19): siRNA sense strand
gagaagagauugaaagacu

SEQ ID NO: 2083093 - RNA, 19 nt, Homo sapiens
  misc_RNA (1)...(19): siRNA sense strand
caacuagggucagaaauau

SEQ ID NO: 2083094 - RNA, 19 nt, Homo sapiens
  misc_RNA (1)...(19): siRNA sense strand
gaaugcaagucacaagaaa

SEQ ID NO: 2083095 - RNA, 19 nt, Homo sapiens
  misc_RNA (1)...(19): siRNA sense strand
gcaguuagaagacacauaa

SEQ ID NO: 2083096 - RNA, 19 nt, Homo sapiens
  misc_RNA (1)...(19): siRNA sense strand
gcaugcagcuuucaagaga

SEQ ID NO: 2083097 - RNA, 19 nt, Homo sapiens
  misc_RNA (1)...(19): siRNA sense strand
gggagaagguuauggcauu

SEQ ID NO: 2083098 - RNA, 19 nt, Homo sapiens
  misc_RNA (1)...(19): siRNA sense strand
gaagcaaauugacgaguug

SEQ ID NO: 2083099 - RNA, 19 nt, Homo sapiens
  misc_RNA (1)...(19): siRNA sense strand
caaccucccuucugaaaug

SEQ ID NO: 2083100 - RNA, 19 nt, Homo sapiens
  misc_RNA (1)...(19): siRNA sense strand
gagaauaccugcagcaacu

SEQ ID NO: 2083101 - RNA, 19 nt, Homo sapiens
  misc_RNA (1)...(19): siRNA sense strand
cgagggaguucuucaauug

SEQ ID NO: 2083102 - RNA, 19 nt, Homo sapiens
  misc_RNA (1)...(19): siRNA sense strand
gcacuuacgccaauauuug

SEQ ID NO: 2083103 - RNA, 19 nt, Homo sapiens
  misc_RNA (1)...(19): siRNA sense strand
ugaaauggcuaggcuaauu

SEQ ID NO: 2083104 - RNA, 19 nt, Homo sapiens
  misc_RNA (1)...(19): siRNA sense strand
ggucagaaauauuaccaaa

SEQ ID NO: 2083105 - RNA, 19 nt, Homo sapiens
  misc_RNA (1)...(19): siRNA sense strand
gccaaaggcuauaacauau

SEQ ID NO: 2083106 - RNA, 19 nt, Homo sapiens
  misc_RNA (1)...(19): siRNA sense strand
cagcaugaauguuuagaaa

SEQ ID NO: 2083107 - RNA, 19 nt, Homo sapiens
  misc_RNA (1)...(19): siRNA sense strand
gcaagugaaccauuuauau

SEQ ID NO: 2083108 - RNA, 19 nt, Homo sapiens
  misc_RNA (1)...(19): siRNA sense strand
ucaagaaucuggugucugu

SEQ ID NO: 2083109 - RNA, 19 nt, Homo sapiens
  misc_RNA (1)...(19): siRNA sense strand
uaugaggucuuccagauuu

SEQ ID NO: 2083110 - RNA, 19 nt, Homo sapiens
  misc_RNA (1)...(19): siRNA sense strand
cauacaaacuugccugauu

SEQ ID NO: 2083111 - RNA, 19 nt, Homo sapiens
  misc_RNA (1)...(19): siRNA sense strand
cuacauaccuuggccaauu

SEQ ID NO: 2083112 - RNA, 19 nt, Homo sapiens
  misc_RNA (1)...(19): siRNA sense strand
gaagagagaggcagaggaa

SEQ ID NO: 2083113 - RNA, 19 nt, Homo sapiens
  misc_RNA (1)...(19): siRNA sense strand
ggagaaguuucagauaauu

SEQ ID NO: 2083114 - RNA, 19 nt, Homo sapiens
  misc_RNA (1)...(19): siRNA sense strand
gaaacugggcuucuugaaa

SEQ ID NO: 2083115 - RNA, 19 nt, Homo sapiens
  misc_RNA (1)...(19): siRNA sense strand
gaaacugccuuagagauuc

SEQ ID NO: 2083116 - RNA, 19 nt, Homo sapiens
  misc_RNA (1)...(19): siRNA sense strand
uagaagguguuucagauuu

SEQ ID NO: 2083117 - RNA, 19 nt, Homo sapiens
  misc_RNA (1)...(19): siRNA sense strand
gcagguugguaacuccuua

SEQ ID NO: 2083118 - RNA, 19 nt, Homo sapiens
  misc_RNA (1)...(19): siRNA sense strand
ggaaggaagucaccagagu

SEQ ID NO: 2083119 - RNA, 19 nt, Homo sapiens
  misc_RNA (1)...(19): siRNA sense strand
ggaaguugauggcaaagug

SEQ ID NO: 2083120 - RNA, 19 nt, Homo sapiens
  misc_RNA (1)...(19): siRNA sense strand
uggagaagcucacgacauu

SEQ ID NO: 2083121 - RNA, 19 nt, Homo sapiens
  misc_RNA (1)...(19): siRNA sense strand
ucagauaccucgacugugu

SEQ ID NO: 2083122 - RNA, 19 nt, Homo sapiens
  misc_RNA (1)...(19): siRNA sense strand
gacgagcccugaaggagua

SEQ ID NO: 2083123 - RNA, 19 nt, Homo sapiens
  misc_RNA (1)...(19): siRNA sense strand
uaagaauaauggccaguuu

SEQ ID NO: 2083124 - RNA, 19 nt, Homo sapiens
  misc_RNA (1)...(19): siRNA sense strand
gaggaaaucagcuaacaaa

SEQ ID NO: 2083125 - RNA, 19 nt, Homo sapiens
  misc_RNA (1)...(19): siRNA sense strand
gaagaauuauuguggaagu

SEQ ID NO: 2083126 - RNA, 19 nt, Homo sapiens
  misc_RNA (1)...(19): siRNA sense strand
ucacacacccucugacaua

SEQ ID NO: 2083127 - RNA, 19 nt, Homo sapiens
  misc_RNA (1)...(19): siRNA sense strand
gaagaaagcacucccuaca

SEQ ID NO: 2083128 - RNA, 19 nt, Homo sapiens
  misc_RNA (1)...(19): siRNA sense strand
gggagcaagugaaccauuu

SEQ ID NO: 2083129 - RNA, 19 nt, Homo sapiens
  misc_RNA (1)...(19): siRNA sense strand
ccacugauguccauggauu

SEQ ID NO: 2083130 - RNA, 19 nt, Homo sapiens
  misc_RNA (1)...(19): siRNA sense strand
ggagggaauugcaaacaga

SEQ ID NO: 2083131 - RNA, 19 nt, Homo sapiens
  misc_RNA (1)...(19): siRNA sense strand
ggaagaggauaaacuacau

SEQ ID NO: 2083132 - RNA, 19 nt, Homo sapiens
  misc_RNA (1)...(19): siRNA sense strand
gaaaauggcaucuuagaaa

SEQ ID NO: 2083133 - RNA, 19 nt, Homo sapiens
  misc_RNA (1)...(19): siRNA sense strand
gaauuucacuccuguaagg

SEQ ID NO: 2083134 - RNA, 19 nt, Homo sapiens
  misc_RNA (1)...(19): siRNA sense strand
gaaguacugucuggaguug

SEQ ID NO: 2083135 - RNA, 19 nt, Homo sapiens
  misc_RNA (1)...(19): siRNA sense strand
ccagggcucuuucccagua

SEQ ID NO: 2083136 - RNA, 19 nt, Homo sapiens
  misc_RNA (1)...(19): siRNA sense strand
gaagggagcagaacaccaa

SEQ ID NO: 2083137 - RNA, 19 nt, Homo sapiens
  misc_RNA (1)...(19): siRNA sense strand
gauguuaacagggaauuua

SEQ ID NO: 2083138 - RNA, 19 nt, Homo sapiens
  misc_RNA (1)...(19): siRNA sense strand
gcaagucccaaacaagaua

SEQ ID NO: 2083139 - RNA, 19 nt, Homo sapiens
  misc_RNA (1)...(19): siRNA sense strand
ggaagaggauagugaccaa

SEQ ID NO: 2083140 - RNA, 19 nt, Homo sapiens
  misc_RNA (1)...(19): siRNA sense strand
gaaacccuuugcccucuaa

SEQ ID NO: 2083141 - RNA, 19 nt, Homo sapiens
  misc_RNA (1)...(19): siRNA sense strand
gaacucucuuguccuguuu

SEQ ID NO: 2083142 - RNA, 19 nt, Homo sapiens
  misc_RNA (1)...(19): siRNA sense strand
ggagaagguuauggcauuu

SEQ ID NO: 2083143 - RNA, 19 nt, Homo sapiens
  misc_RNA (1)...(19): siRNA sense strand
gaucagccaucuucuccaa

SEQ ID NO: 2083144 - RNA, 19 nt, Homo sapiens
  misc_RNA (1)...(19): siRNA sense strand
aaagauagcucagaagagu

SEQ ID NO: 2083145 - RNA, 19 nt, Homo sapiens
  misc_RNA (1)...(19): siRNA sense strand
agaaagaacaggacaguuu

SEQ ID NO: 2083146 - RNA, 19 nt, Homo sapiens
  misc_RNA (1)...(19): siRNA sense strand
ugaaauggcuagcaagauc

SEQ ID NO: 2083147 - RNA, 19 nt, Homo sapiens
  misc_RNA (1)...(19): siRNA sense strand
gagaagaagggaaucauug

SEQ ID NO: 2083148 - RNA, 19 nt, Homo sapiens
  misc_RNA (1)...(19): siRNA sense strand
caucugggaucuugacuug

SEQ ID NO: 2083149 - RNA, 19 nt, Homo sapiens
  misc_RNA (1)...(19): siRNA sense strand
ggagauccuuccuugaguu

SEQ ID NO: 2083150 - RNA, 19 nt, Homo sapiens
  misc_RNA (1)...(19): siRNA sense strand
gagccaaugugauccuuga

SEQ ID NO: 2083151 - RNA, 19 nt, Homo sapiens
  misc_RNA (1)...(19): siRNA sense strand
gaaagucaguggcaagaac

SEQ ID NO: 2083152 - RNA, 19 nt, Homo sapiens
  misc_RNA (1)...(19): siRNA sense strand
caccaagaccugaguaaua

SEQ ID NO: 2083153 - RNA, 19 nt, Homo sapiens
  misc_RNA (1)...(19): siRNA sense strand
uaggaagucuugaggaauu

SEQ ID NO: 2083154 - RNA, 19 nt, Homo sapiens
  misc_RNA (1)...(19): siRNA sense strand
gaagagcuggaucagaaua

SEQ ID NO: 2083155 - RNA, 19 nt, Homo sapiens
  misc_RNA (1)...(19): siRNA sense strand
gguaaaugcccuggaaaua

SEQ ID NO: 2083156 - RNA, 19 nt, Homo sapiens
  misc_RNA (1)...(19): siRNA sense strand
gacagaaacugccuuagag

SEQ ID NO: 2083157 - RNA, 19 nt, Homo sapiens
  misc_RNA (1)...(19): siRNA sense strand
aagaaugccuucagaguug

SEQ ID NO: 2083158 - RNA, 19 nt, Homo sapiens
  misc_RNA (1)...(19): siRNA sense strand
caaauuagaagguguuuca

SEQ ID NO: 2083159 - RNA, 19 nt, Homo sapiens
  misc_RNA (1)...(19): siRNA sense strand
gguaugaggucuuccagau

SEQ ID NO: 2083160 - RNA, 19 nt, Homo sapiens
  misc_RNA (1)...(19): siRNA sense strand
ccacaauucuagcguauca

SEQ ID NO: 2083161 - RNA, 19 nt, Homo sapiens
  misc_RNA (1)...(19): siRNA sense strand
gcacugacaucuccuuugc

SEQ ID NO: 2083162 - RNA, 19 nt, Homo sapiens
  misc_RNA (1)...(19): siRNA sense strand
caagucacaagaaauguua

SEQ ID NO: 2083163 - RNA, 19 nt, Homo sapiens
  misc_RNA (1)...(19): siRNA sense strand
guaaaugcccuggaaauau

SEQ ID NO: 2083164 - RNA, 19 nt, Homo sapiens
  misc_RNA (1)...(19): siRNA sense strand
ucagauuucuuuagcacua

SEQ ID NO: 2083165 - RNA, 19 nt, Homo sapiens
  misc_RNA (1)...(19): siRNA sense strand
gauacucuauugccaguug

SEQ ID NO: 2083166 - RNA, 19 nt, Homo sapiens
  misc_RNA (1)...(19): siRNA sense strand
ggcccaagcuucuagcaaa

SEQ ID NO: 2083167 - RNA, 19 nt, Homo sapiens
  misc_RNA (1)...(19): siRNA sense strand
ggaagucucuccucuuucg

SEQ ID NO: 2083168 - RNA, 19 nt, Homo sapiens
  misc_RNA (1)...(19): siRNA sense strand
gacuggagcucuuaaauuu

SEQ ID NO: 2083169 - RNA, 19 nt, Homo sapiens
  misc_RNA (1)...(19): siRNA sense strand
gaaccaaggaacacaaaua

SEQ ID NO: 2083170 - RNA, 19 nt, Homo sapiens
  misc_RNA (1)...(19): siRNA sense strand
ggacuggagcucuuaaauu

SEQ ID NO: 2083171 - RNA, 19 nt, Homo sapiens
  misc_RNA (1)...(19): siRNA sense strand
ggacagcagcgcccaguuu

SEQ ID NO: 2083172 - RNA, 19 nt, Homo sapiens
  misc_RNA (1)...(19): siRNA sense strand
acauuaaggucaucaaaga

SEQ ID NO: 2083173 - RNA, 19 nt, Homo sapiens
  misc_RNA (1)...(19): siRNA sense strand
ccaaggaacacaaauaugu

SEQ ID NO: 2083174 - RNA, 19 nt, Homo sapiens
  misc_RNA (1)...(19): siRNA sense strand
uaagggagccgaacacaug

SEQ ID NO: 2083175 - RNA, 19 nt, Homo sapiens
  misc_RNA (1)...(19): siRNA sense strand
gccgcaagcuacccauuaa

SEQ ID NO: 2083176 - RNA, 19 nt, Homo sapiens
  misc_RNA (1)...(19): siRNA sense strand
ugacuaucaugcuaucuga

SEQ ID NO: 2083177 - RNA, 19 nt, Homo sapiens
  misc_RNA (1)...(19): siRNA sense strand
cagcgucccugaaauugug

SEQ ID NO: 2083178 - RNA, 19 nt, Homo sapiens
  misc_RNA (1)...(19): siRNA sense strand
gaaauugugcaccacuaug

SEQ ID NO: 2083179 - RNA, 19 nt, Homo sapiens
  misc_RNA (1)...(19): siRNA sense strand
caugcuaucugaacgacuu

SEQ ID NO: 2083180 - RNA, 19 nt, Homo sapiens
  misc_RNA (1)...(19): siRNA sense strand
ggagaagagcugccuguca

SEQ ID NO: 2083181 - RNA, 19 nt, Homo sapiens
  misc_RNA (1)...(19): siRNA sense strand
gaaggucccugaaaaugau

SEQ ID NO: 2083182 - RNA, 19 nt, Homo sapiens
  misc_RNA (1)...(19): siRNA sense strand
cagcagcgucccugaaauu

SEQ ID NO: 2083183 - RNA, 19 nt, Homo sapiens
  misc_RNA (1)...(19): siRNA sense strand
ggaagaaggagcggauuuc

SEQ ID NO: 2083184 - RNA, 19 nt, Homo sapiens
  misc_RNA (1)...(19): siRNA sense strand
aaaagcaacuggcggagua

SEQ ID NO: 2083185 - RNA, 19 nt, Homo sapiens
  misc_RNA (1)...(19): siRNA sense strand
ccagagaaggucccugaaa

SEQ ID NO: 2083186 - RNA, 19 nt, Homo sapiens
  misc_RNA (1)...(19): siRNA sense strand
guucugacccaccaccaua

SEQ ID NO: 2083187 - RNA, 19 nt, Homo sapiens
  misc_RNA (1)...(19): siRNA sense strand
ccaaggagacagcaacuca

SEQ ID NO: 2083188 - RNA, 19 nt, Homo sapiens
  misc_RNA (1)...(19): siRNA sense strand
cagagaaggucccugaaaa

SEQ ID NO: 2083189 - RNA, 19 nt, Homo sapiens
  misc_RNA (1)...(19): siRNA sense strand
gaaaucggccaccgugucu

SEQ ID NO: 2083190 - RNA, 19 nt, Homo sapiens
  misc_RNA (1)...(19): siRNA sense strand
agaaggagcggauuuccaa

SEQ ID NO: 2083191 - RNA, 19 nt, Homo sapiens
  misc_RNA (1)...(19): siRNA sense strand
ccuuugcaguugacauuaa

SEQ ID NO: 2083192 - RNA, 19 nt, Homo sapiens
  misc_RNA (1)...(19): siRNA sense strand
uagcuauccuagaagacua

SEQ ID NO: 2083193 - RNA, 19 nt, Homo sapiens
  misc_RNA (1)...(19): siRNA sense strand
caccaugcccugacuauca

SEQ ID NO: 2083194 - RNA, 19 nt, Homo sapiens
  misc_RNA (1)...(19): siRNA sense strand
gagcagccagggauucaug

SEQ ID NO: 2083195 - RNA, 19 nt, Homo sapiens
  misc_RNA (1)...(19): siRNA sense strand
acucagcccuugccucugu

SEQ ID NO: 2083196 - RNA, 19 nt, Homo sapiens
  misc_RNA (1)...(19): siRNA sense strand
cagcagcgcccaguuugaa

SEQ ID NO: 2083197 - RNA, 19 nt, Homo sapiens
  misc_RNA (1)...(19): siRNA sense strand
gacagcagcgcccaguuug

SEQ ID NO: 2083198 - RNA, 19 nt, Homo sapiens
  misc_RNA (1)...(19): siRNA sense strand
gaaggagcggauuuccaaa

SEQ ID NO: 2083199 - RNA, 19 nt, Homo sapiens
  misc_RNA (1)...(19): siRNA sense strand
gcaaagaggccagcuaccu

SEQ ID NO: 2083200 - RNA, 19 nt, Homo sapiens
  misc_RNA (1)...(19): siRNA sense strand
caccauacaacuuccuuga

SEQ ID NO: 2083201 - RNA, 19 nt, Homo sapiens
  misc_RNA (1)...(19): siRNA sense strand
cugaaauugugcaccacua

SEQ ID NO: 2083202 - RNA, 19 nt, Homo sapiens
  misc_RNA (1)...(19): siRNA sense strand
aaccaaggaacacaaauau

SEQ ID NO: 2083203 - RNA, 19 nt, Homo sapiens
  misc_RNA (1)...(19): siRNA sense strand
gacauuaaggucaucaaag

SEQ ID NO: 2083204 - RNA, 19 nt, Homo sapiens
  misc_RNA (1)...(19): siRNA sense strand
ugaaaaugauggcuacaug

SEQ ID NO: 2083205 - RNA, 19 nt, Homo sapiens
  misc_RNA (1)...(19): siRNA sense strand
gggagcccaucucaucauc

SEQ ID NO: 2083206 - RNA, 19 nt, Homo sapiens
  misc_RNA (1)...(19): siRNA sense strand
uguaugacacacccuauga

SEQ ID NO: 2083207 - RNA, 19 nt, Homo sapiens
  misc_RNA (1)...(19): siRNA sense strand
gugagaccagcaagaauga

SEQ ID NO: 2083208 - RNA, 19 nt, Homo sapiens
  misc_RNA (1)...(19): siRNA sense strand
gagcccaucucaucaucac

SEQ ID NO: 2083209 - RNA, 19 nt, Homo sapiens
  misc_RNA (1)...(19): siRNA sense strand
acagugagaccagcaagaa

SEQ ID NO: 2083210 - RNA, 19 nt, Homo sapiens
  misc_RNA (1)...(19): siRNA sense strand
agacuaugcggacccguuu

SEQ ID NO: 2083211 - RNA, 19 nt, Homo sapiens
  misc_RNA (1)...(19): siRNA sense strand
caaaacagaagaagaaaag

SEQ ID NO: 2083212 - RNA, 19 nt, Homo sapiens
  misc_RNA (1)...(19): siRNA sense strand
gggacuggagcucuuaaau

SEQ ID NO: 2083213 - RNA, 19 nt, Homo sapiens
  misc_RNA (1)...(19): siRNA sense strand
ugaaauugugcaccacuau

SEQ ID NO: 2083214 - RNA, 19 nt, Homo sapiens
  misc_RNA (1)...(19): siRNA sense strand
ccaaggguagucugaguuc

SEQ ID NO: 2083215 - RNA, 19 nt, Homo sapiens
  misc_RNA (1)...(19): siRNA sense strand
gcagcgucccugaaauugu

SEQ ID NO: 2083216 - RNA, 19 nt, Homo sapiens
  misc_RNA (1)...(19): siRNA sense strand
uggaagaaggagcggauuu

SEQ ID NO: 2083217 - RNA, 19 nt, Homo sapiens
  misc_RNA (1)...(19): siRNA sense strand
caagagcagccagggauuc

SEQ ID NO: 2083218 - RNA, 19 nt, Homo sapiens
  misc_RNA (1)...(19): siRNA sense strand
gaaccgacgccgagaaccu

SEQ ID NO: 2083219 - RNA, 19 nt, Homo sapiens
  misc_RNA (1)...(19): siRNA sense strand
ggccaaaacagaagaagaa

SEQ ID NO: 2083220 - RNA, 19 nt, Homo sapiens
  misc_RNA (1)...(19): siRNA sense strand
gcaacagugagaccagcaa

SEQ ID NO: 2083221 - RNA, 19 nt, Homo sapiens
  misc_RNA (1)...(19): siRNA sense strand
gcggacccguuugauguuc

SEQ ID NO: 2083222 - RNA, 19 nt, Homo sapiens
  misc_RNA (1)...(19): siRNA sense strand
guggccauccggacucuuu

SEQ ID NO: 2083223 - RNA, 19 nt, Homo sapiens
  misc_RNA (1)...(19): siRNA sense strand
gcugggacuggagcucuua

SEQ ID NO: 2083224 - RNA, 19 nt, Homo sapiens
  misc_RNA (1)...(19): siRNA sense strand
gcuacauggagcccuauga

SEQ ID NO: 2083225 - RNA, 19 nt, Homo sapiens
  misc_RNA (1)...(19): siRNA sense strand
gagaaggucccugaaaaug

SEQ ID NO: 2083226 - RNA, 19 nt, Homo sapiens
  misc_RNA (1)...(19): siRNA sense strand
gcuaaugggccaaaacaga

SEQ ID NO: 2083227 - RNA, 19 nt, Homo sapiens
  misc_RNA (1)...(19): siRNA sense strand
gaccagcaagaaugacuuc

SEQ ID NO: 2083228 - RNA, 19 nt, Homo sapiens
  misc_RNA (1)...(19): siRNA sense strand
uguccacaaucuccacaga

SEQ ID NO: 2083229 - RNA, 19 nt, Homo sapiens
  misc_RNA (1)...(19): siRNA sense strand
gcacaaagcuguaguggaa

SEQ ID NO: 2083230 - RNA, 19 nt, Homo sapiens
  misc_RNA (1)...(19): siRNA sense strand
gaacaaggcuuugcaagaa

SEQ ID NO: 2083231 - RNA, 19 nt, Homo sapiens
  misc_RNA (1)...(19): siRNA sense strand
gaaagaugcgcaaauauua

SEQ ID NO: 2083232 - RNA, 19 nt, Homo sapiens
  misc_RNA (1)...(19): siRNA sense strand
ggaacgagcugcagaaaug

SEQ ID NO: 2083233 - RNA, 19 nt, Homo sapiens
  misc_RNA (1)...(19): siRNA sense strand
gcauugagguugagacuaa

SEQ ID NO: 2083234 - RNA, 19 nt, Homo sapiens
  misc_RNA (1)...(19): siRNA sense strand
gaaaggaauuggaagagaa

SEQ ID NO: 2083235 - RNA, 19 nt, Homo sapiens
  misc_RNA (1)...(19): siRNA sense strand
ugaagaaacucgaaauuga

SEQ ID NO: 2083236 - RNA, 19 nt, Homo sapiens
  misc_RNA (1)...(19): siRNA sense strand
gaaaucaugucgacuuguu

SEQ ID NO: 2083237 - RNA, 19 nt, Homo sapiens
  misc_RNA (1)...(19): siRNA sense strand
gcaggaauguuaccuagaa

SEQ ID NO: 2083238 - RNA, 19 nt, Homo sapiens
  misc_RNA (1)...(19): siRNA sense strand
gaaggauaaucuagaauug

SEQ ID NO: 2083239 - RNA, 19 nt, Homo sapiens
  misc_RNA (1)...(19): siRNA sense strand
agaaagagauggcaauuau

SEQ ID NO: 2083240 - RNA, 19 nt, Homo sapiens
  misc_RNA (1)...(19): siRNA sense strand
caaagacugucauaagaaa

SEQ ID NO: 2083241 - RNA, 19 nt, Homo sapiens
  misc_RNA (1)...(19): siRNA sense strand
gcccaaaucucaaagugua

SEQ ID NO: 2083242 - RNA, 19 nt, Homo sapiens
  misc_RNA (1)...(19): siRNA sense strand
guaggcaucuucagcauuu

SEQ ID NO: 2083243 - RNA, 19 nt, Homo sapiens
  misc_RNA (1)...(19): siRNA sense strand
ggaugucugugcaauauuu

SEQ ID NO: 2083244 - RNA, 19 nt, Homo sapiens
  misc_RNA (1)...(19): siRNA sense strand
gaaguuaaaggcagaagua

SEQ ID NO: 2083245 - RNA, 19 nt, Homo sapiens
  misc_RNA (1)...(19): siRNA sense strand
ugaaacaacuggaaaggaa

SEQ ID NO: 2083246 - RNA, 19 nt, Homo sapiens
  misc_RNA (1)...(19): siRNA sense strand
ggaaaggaaucaagaagca

SEQ ID NO: 2083247 - RNA, 19 nt, Homo sapiens
  misc_RNA (1)...(19): siRNA sense strand
cuaaagggcugcauacaga

SEQ ID NO: 2083248 - RNA, 19 nt, Homo sapiens
  misc_RNA (1)...(19): siRNA sense strand
cagccaaacugaccaagua

SEQ ID NO: 2083249 - RNA, 19 nt, Homo sapiens
  misc_RNA (1)...(19): siRNA sense strand
ucaagaagcaaucaaguua

SEQ ID NO: 2083250 - RNA, 19 nt, Homo sapiens
  misc_RNA (1)...(19): siRNA sense strand
gaaagugaacgucaaauuc

SEQ ID NO: 2083251 - RNA, 19 nt, Homo sapiens
  misc_RNA (1)...(19): siRNA sense strand
acaacgacaugaagaauaa

SEQ ID NO: 2083252 - RNA, 19 nt, Homo sapiens
  misc_RNA (1)...(19): siRNA sense strand
ggucugaguuggauaaguu

SEQ ID NO: 2083253 - RNA, 19 nt, Homo sapiens
  misc_RNA (1)...(19): siRNA sense strand
gcaagaagaauuaacagaa

SEQ ID NO: 2083254 - RNA, 19 nt, Homo sapiens
  misc_RNA (1)...(19): siRNA sense strand
ugaagaagguggagaugaa

SEQ ID NO: 2083255 - RNA, 19 nt, Homo sapiens
  misc_RNA (1)...(19): siRNA sense strand
gaagaaacucgaaauugaa

SEQ ID NO: 2083256 - RNA, 19 nt, Homo sapiens
  misc_RNA (1)...(19): siRNA sense strand
gaagaucuccaccaaguga

SEQ ID NO: 2083257 - RNA, 19 nt, Homo sapiens
  misc_RNA (1)...(19): siRNA sense strand
ggaaaggaauuggaagaga

SEQ ID NO: 2083258 - RNA, 19 nt, Homo sapiens
  misc_RNA (1)...(19): siRNA sense strand
gguaaugucugggaagaaa

SEQ ID NO: 2083259 - RNA, 19 nt, Homo sapiens
  misc_RNA (1)...(19): siRNA sense strand
gucaagaucugaaaggaaa

SEQ ID NO: 2083260 - RNA, 19 nt, Homo sapiens
  misc_RNA (1)...(19): siRNA sense strand
guacgaagagcaaguauug

SEQ ID NO: 2083261 - RNA, 19 nt, Homo sapiens
  misc_RNA (1)...(19): siRNA sense strand
aaagagagauacagcuuga

SEQ ID NO: 2083262 - RNA, 19 nt, Homo sapiens
  misc_RNA (1)...(19): siRNA sense strand
uaagcuggaucaaacuaua

SEQ ID NO: 2083263 - RNA, 19 nt, Homo sapiens
  misc_RNA (1)...(19): siRNA sense strand
gaugauauucugcugcuua

SEQ ID NO: 2083264 - RNA, 19 nt, Homo sapiens
  misc_RNA (1)...(19): siRNA sense strand
gacauuugcucucgucuga

SEQ ID NO: 2083265 - RNA, 19 nt, Homo sapiens
  misc_RNA (1)...(19): siRNA sense strand
aagaacagaugaucaagaa

SEQ ID NO: 2083266 - RNA, 19 nt, Homo sapiens
  misc_RNA (1)...(19): siRNA sense strand
cgaaagaugcgcaaauauu

SEQ ID NO: 2083267 - RNA, 19 nt, Homo sapiens
  misc_RNA (1)...(19): siRNA sense strand
gaacucaaacauugugaaa

SEQ ID NO: 2083268 - RNA, 19 nt, Homo sapiens
  misc_RNA (1)...(19): siRNA sense strand
ugacucagaaggagaauua

SEQ ID NO: 2083269 - RNA, 19 nt, Homo sapiens
  misc_RNA (1)...(19): siRNA sense strand
gugaacagacugauuuaua

SEQ ID NO: 2083270 - RNA, 19 nt, Homo sapiens
  misc_RNA (1)...(19): siRNA sense strand
gaacagaugaucaagaagu

SEQ ID NO: 2083271 - RNA, 19 nt, Homo sapiens
  misc_RNA (1)...(19): siRNA sense strand
cuggagaacuuaauugaaa

SEQ ID NO: 2083272 - RNA, 19 nt, Homo sapiens
  misc_RNA (1)...(19): siRNA sense strand
gaaggaaaacugagaaaua

SEQ ID NO: 2083273 - RNA, 19 nt, Homo sapiens
  misc_RNA (1)...(19): siRNA sense strand
gaagaagacccaaaugaag

SEQ ID NO: 2083274 - RNA, 19 nt, Homo sapiens
  misc_RNA (1)...(19): siRNA sense strand
agaaagaguugcagcaguu

SEQ ID NO: 2083275 - RNA, 19 nt, Homo sapiens
  misc_RNA (1)...(19): siRNA sense strand
gaugaaauuucucucuaug

SEQ ID NO: 2083276 - RNA, 19 nt, Homo sapiens
  misc_RNA (1)...(19): siRNA sense strand
ucugaaagaucacgugaaa

SEQ ID NO: 2083277 - RNA, 19 nt, Homo sapiens
  misc_RNA (1)...(19): siRNA sense strand
gcacagaaggcacaugcua

SEQ ID NO: 2083278 - RNA, 19 nt, Homo sapiens
  misc_RNA (1)...(19): siRNA sense strand
ucaccagcuuguaauaaua

SEQ ID NO: 2083279 - RNA, 19 nt, Homo sapiens
  misc_RNA (1)...(19): siRNA sense strand
ugacaugcuucguuauauu

SEQ ID NO: 2083280 - RNA, 19 nt, Homo sapiens
  misc_RNA (1)...(19): siRNA sense strand
gaaggcacaugcuaugagu

SEQ ID NO: 2083281 - RNA, 19 nt, Homo sapiens
  misc_RNA (1)...(19): siRNA sense strand
gaagacauccugacuguac

SEQ ID NO: 2083282 - RNA, 19 nt, Homo sapiens
  misc_RNA (1)...(19): siRNA sense strand
gaguuuauaugcuggagaa

SEQ ID NO: 2083283 - RNA, 19 nt, Homo sapiens
  misc_RNA (1)...(19): siRNA sense strand
gaagaauugcaaacacuuu

SEQ ID NO: 2083284 - RNA, 19 nt, Homo sapiens
  misc_RNA (1)...(19): siRNA sense strand
gaaggagacagaauuacaa

SEQ ID NO: 2083285 - RNA, 19 nt, Homo sapiens
  misc_RNA (1)...(19): siRNA sense strand
gaagcaaucaaguuagaaa

SEQ ID NO: 2083286 - RNA, 19 nt, Homo sapiens
  misc_RNA (1)...(19): siRNA sense strand
ccaaguaaaugugaacaga

SEQ ID NO: 2083287 - RNA, 19 nt, Homo sapiens
  misc_RNA (1)...(19): siRNA sense strand
gcaggaaugucaagaucug

SEQ ID NO: 2083288 - RNA, 19 nt, Homo sapiens
  misc_RNA (1)...(19): siRNA sense strand
gagacagaauuacaaacuu

SEQ ID NO: 2083289 - RNA, 19 nt, Homo sapiens
  misc_RNA (1)...(19): siRNA sense strand
gaagaggacuaugaaagag

SEQ ID NO: 2083290 - RNA, 19 nt, Homo sapiens
  misc_RNA (1)...(19): siRNA sense strand
gcagagagaaggauaaucu

SEQ ID NO: 2083291 - RNA, 19 nt, Homo sapiens
  misc_RNA (1)...(19): siRNA sense strand
cuccagagcuccaguauuc

SEQ ID NO: 2083292 - RNA, 19 nt, Homo sapiens
  misc_RNA (1)...(19): siRNA sense strand
agcagaagcugauaagaaa

SEQ ID NO: 2083293 - RNA, 19 nt, Homo sapiens
  misc_RNA (1)...(19): siRNA sense strand
agacagaauuacaaacuug

SEQ ID NO: 2083294 - RNA, 19 nt, Homo sapiens
  misc_RNA (1)...(19): siRNA sense strand
ccagugauguuauuuccaa

SEQ ID NO: 2083295 - RNA, 19 nt, Homo sapiens
  misc_RNA (1)...(19): siRNA sense strand
agagaaggauaaucuagaa

SEQ ID NO: 2083296 - RNA, 19 nt, Homo sapiens
  misc_RNA (1)...(19): siRNA sense strand
gugaaagccuauuagcaaa

SEQ ID NO: 2083297 - RNA, 19 nt, Homo sapiens
  misc_RNA (1)...(19): siRNA sense strand
gaaguacgaagagcaagua

SEQ ID NO: 2083298 - RNA, 19 nt, Homo sapiens
  misc_RNA (1)...(19): siRNA sense strand
gaagaacagaugaucaaga

SEQ ID NO: 2083299 - RNA, 19 nt, Homo sapiens
  misc_RNA (1)...(19): siRNA sense strand
gaagguggaagugguuaua

SEQ ID NO: 2083300 - RNA, 19 nt, Homo sapiens
  misc_RNA (1)...(19): siRNA sense strand
ggacacugcuuccaagaac

SEQ ID NO: 2083301 - RNA, 19 nt, Homo sapiens
  misc_RNA (1)...(19): siRNA sense strand
ucagaaggagacagaauua

SEQ ID NO: 2083302 - RNA, 19 nt, Homo sapiens
  misc_RNA (1)...(19): siRNA sense strand
gaauuggaacucaaacauu

SEQ ID NO: 2083303 - RNA, 19 nt, Homo sapiens
  misc_RNA (1)...(19): siRNA sense strand
gagcagaagugcacaaucc

SEQ ID NO: 2083304 - RNA, 19 nt, Homo sapiens
  misc_RNA (1)...(19): siRNA sense strand
aaagagauggcaauuauga

SEQ ID NO: 2083305 - RNA, 19 nt, Homo sapiens
  misc_RNA (1)...(19): siRNA sense strand
gcaggaauuuaauaaccaa

SEQ ID NO: 2083306 - RNA, 19 nt, Homo sapiens
  misc_RNA (1)...(19): siRNA sense strand
cgaagaggacuaugaaaga

SEQ ID NO: 2083307 - RNA, 19 nt, Homo sapiens
  misc_RNA (1)...(19): siRNA sense strand
cccgaaagaugcgcaaaua

SEQ ID NO: 2083308 - RNA, 19 nt, Homo sapiens
  misc_RNA (1)...(19): siRNA sense strand
aagaagaaauccacagaau

SEQ ID NO: 2083309 - RNA, 19 nt, Homo sapiens
  misc_RNA (1)...(19): siRNA sense strand
gcaagaagaaauccacaga

SEQ ID NO: 2083310 - RNA, 19 nt, Homo sapiens
  misc_RNA (1)...(19): siRNA sense strand
ugagacaaaugguacaaga

SEQ ID NO: 2083311 - RNA, 19 nt, Homo sapiens
  misc_RNA (1)...(19): siRNA sense strand
caagaagaauuaacagaac

SEQ ID NO: 2083312 - RNA, 19 nt, Homo sapiens
  misc_RNA (1)...(19): siRNA sense strand
gaaagaguugcagcaguua

SEQ ID NO: 2083313 - RNA, 19 nt, Homo sapiens
  misc_RNA (1)...(19): siRNA sense strand
agagacaacuggagaacuu

SEQ ID NO: 2083314 - RNA, 19 nt, Homo sapiens
  misc_RNA (1)...(19): siRNA sense strand
ccaagcaaccaauguaauu

SEQ ID NO: 2083315 - RNA, 19 nt, Homo sapiens
  misc_RNA (1)...(19): siRNA sense strand
uaaccaagcaaccaaugua

SEQ ID NO: 2083316 - RNA, 19 nt, Homo sapiens
  misc_RNA (1)...(19): siRNA sense strand
gaagaaauccacagaaucc

SEQ ID NO: 2083317 - RNA, 19 nt, Homo sapiens
  misc_RNA (1)...(19): siRNA sense strand
uaaagaacaggaagacauu

SEQ ID NO: 2083318 - RNA, 19 nt, Homo sapiens
  misc_RNA (1)...(19): siRNA sense strand
gagcaaguauuguccuuac

SEQ ID NO: 2083319 - RNA, 19 nt, Homo sapiens
  misc_RNA (1)...(19): siRNA sense strand
ucacaaagaaguacgaaga

SEQ ID NO: 2083320 - RNA, 19 nt, Homo sapiens
  misc_RNA (1)...(19): siRNA sense strand
guuuggaaccguauaauaa

SEQ ID NO: 2083321 - RNA, 19 nt, Homo sapiens
  misc_RNA (1)...(19): siRNA sense strand
gguuauaguccuccaagua

SEQ ID NO: 2083322 - RNA, 19 nt, Homo sapiens
  misc_RNA (1)...(19): siRNA sense strand
ggaaaucuaucaguaugag

SEQ ID NO: 2083323 - RNA, 19 nt, Homo sapiens
  misc_RNA (1)...(19): siRNA sense strand
gaaaaggaguggcagucua

SEQ ID NO: 2083324 - RNA, 19 nt, Homo sapiens
  misc_RNA (1)...(19): siRNA sense strand
gaaaagacugagaucauua

SEQ ID NO: 2083325 - RNA, 19 nt, Homo sapiens
  misc_RNA (1)...(19): siRNA sense strand
ugaaagaucacgugaaaca

SEQ ID NO: 2083326 - RNA, 19 nt, Homo sapiens
  misc_RNA (1)...(19): siRNA sense strand
caagcaaccaauguaauua

SEQ ID NO: 2083327 - RNA, 19 nt, Homo sapiens
  misc_RNA (1)...(19): siRNA sense strand
ggucagaagcaggaauuua

SEQ ID NO: 2083328 - RNA, 19 nt, Homo sapiens
  misc_RNA (1)...(19): siRNA sense strand
guuauaguccuccaaguaa

SEQ ID NO: 2083329 - RNA, 19 nt, Homo sapiens
  misc_RNA (1)...(19): siRNA sense strand
gaagaguccugauacauuu

SEQ ID NO: 2083330 - RNA, 19 nt, Homo sapiens
  misc_RNA (1)...(19): siRNA sense strand
guaaagagauugaugaaug

SEQ ID NO: 2083331 - RNA, 19 nt, Homo sapiens
  misc_RNA (1)...(19): siRNA sense strand
ggacauugcuucuucuaaa

SEQ ID NO: 2083332 - RNA, 19 nt, Homo sapiens
  misc_RNA (1)...(19): siRNA sense strand
gaaccgaucucugaaguaa

SEQ ID NO: 2083333 - RNA, 19 nt, Homo sapiens
  misc_RNA (1)...(19): siRNA sense strand
guaaucagguucuuuguaa

SEQ ID NO: 2083334 - RNA, 19 nt, Homo sapiens
  misc_RNA (1)...(19): siRNA sense strand
gcugagagccuguuuaaua

SEQ ID NO: 2083335 - RNA, 19 nt, Homo sapiens
  misc_RNA (1)...(19): siRNA sense strand
caacagaaaugcacuuaga

SEQ ID NO: 2083336 - RNA, 19 nt, Homo sapiens
  misc_RNA (1)...(19): siRNA sense strand
ggacaggucuucccauugu

SEQ ID NO: 2083337 - RNA, 19 nt, Homo sapiens
  misc_RNA (1)...(19): siRNA sense strand
ccaguaaacuuccauuuga

SEQ ID NO: 2083338 - RNA, 19 nt, Homo sapiens
  misc_RNA (1)...(19): siRNA sense strand
agaaagagguauccuguaa

SEQ ID NO: 2083339 - RNA, 19 nt, Homo sapiens
  misc_RNA (1)...(19): siRNA sense strand
ucacaaggcucuccugcua

SEQ ID NO: 2083340 - RNA, 19 nt, Homo sapiens
  misc_RNA (1)...(19): siRNA sense strand
gaaguuaccaaacauauga

SEQ ID NO: 2083341 - RNA, 19 nt, Homo sapiens
  misc_RNA (1)...(19): siRNA sense strand
gcagcucgcucaacaaaga

SEQ ID NO: 2083342 - RNA, 19 nt, Homo sapiens
  misc_RNA (1)...(19): siRNA sense strand
gaaacaaauuggagaaaca

SEQ ID NO: 2083343 - RNA, 19 nt, Homo sapiens
  misc_RNA (1)...(19): siRNA sense strand
gaggaagccuuaaagaaug

SEQ ID NO: 2083344 - RNA, 19 nt, Homo sapiens
  misc_RNA (1)...(19): siRNA sense strand
gaagauggguuucaagaac

SEQ ID NO: 2083345 - RNA, 19 nt, Homo sapiens
  misc_RNA (1)...(19): siRNA sense strand
gaggcucucuauaauguua

SEQ ID NO: 2083346 - RNA, 19 nt, Homo sapiens
  misc_RNA (1)...(19): siRNA sense strand
uaagagaaguuaccaaaca

SEQ ID NO: 2083347 - RNA, 19 nt, Homo sapiens
  misc_RNA (1)...(19): siRNA sense strand
gaagaagaguccugauaca

SEQ ID NO: 2083348 - RNA, 19 nt, Homo sapiens
  misc_RNA (1)...(19): siRNA sense strand
uaaacaagaucaagugugu

SEQ ID NO: 2083349 - RNA, 19 nt, Homo sapiens
  misc_RNA (1)...(19): siRNA sense strand
gaagugcagcucaauagua

SEQ ID NO: 2083350 - RNA, 19 nt, Homo sapiens
  misc_RNA (1)...(19): siRNA sense strand
ggaugaggcucucuauaau

SEQ ID NO: 2083351 - RNA, 19 nt, Homo sapiens
  misc_RNA (1)...(19): siRNA sense strand
caucagauaucgcuaacaa

SEQ ID NO: 2083352 - RNA, 19 nt, Homo sapiens
  misc_RNA (1)...(19): siRNA sense strand
aaauguagcuacucagaaa

SEQ ID NO: 2083353 - RNA, 19 nt, Homo sapiens
  misc_RNA (1)...(19): siRNA sense strand
gaaacaugguggaaacuuc

SEQ ID NO: 2083354 - RNA, 19 nt, Homo sapiens
  misc_RNA (1)...(19): siRNA sense strand
cauguuagcugcucuggaa

SEQ ID NO: 2083355 - RNA, 19 nt, Homo sapiens
  misc_RNA (1)...(19): siRNA sense strand
ggaagacaauguagagcaa

SEQ ID NO: 2083356 - RNA, 19 nt, Homo sapiens
  misc_RNA (1)...(19): siRNA sense strand
gcacugagcguccaaguca

SEQ ID NO: 2083357 - RNA, 19 nt, Homo sapiens
  misc_RNA (1)...(19): siRNA sense strand
gaauggaaaugcuaaggau

SEQ ID NO: 2083358 - RNA, 19 nt, Homo sapiens
  misc_RNA (1)...(19): siRNA sense strand
ccagcuaccugauuacuug

SEQ ID NO: 2083359 - RNA, 19 nt, Homo sapiens
  misc_RNA (1)...(19): siRNA sense strand
uaaagaaugugaagaaggu

SEQ ID NO: 2083360 - RNA, 19 nt, Homo sapiens
  misc_RNA (1)...(19): siRNA sense strand
gcaaauacuguaaaugcua

SEQ ID NO: 2083361 - RNA, 19 nt, Homo sapiens
  misc_RNA (1)...(19): siRNA sense strand
uaaaugcuaucaccacaga

SEQ ID NO: 2083362 - RNA, 19 nt, Homo sapiens
  misc_RNA (1)...(19): siRNA sense strand
ggaggaagauuauacucau

SEQ ID NO: 2083363 - RNA, 19 nt, Homo sapiens
  misc_RNA (1)...(19): siRNA sense strand
ggagaaacaugguggaaac

SEQ ID NO: 2083364 - RNA, 19 nt, Homo sapiens
  misc_RNA (1)...(19): siRNA sense strand
cugagagccuguuuaauaa

SEQ ID NO: 2083365 - RNA, 19 nt, Homo sapiens
  misc_RNA (1)...(19): siRNA sense strand
gcucaagaguauucagaaa

SEQ ID NO: 2083366 - RNA, 19 nt, Homo sapiens
  misc_RNA (1)...(19): siRNA sense strand
gaagcgauccaaauucuga

SEQ ID NO: 2083367 - RNA, 19 nt, Homo sapiens
  misc_RNA (1)...(19): siRNA sense strand
caauagacaguuuccuuua

SEQ ID NO: 2083368 - RNA, 19 nt, Homo sapiens
  misc_RNA (1)...(19): siRNA sense strand
cauuuaagcucuagucaau

SEQ ID NO: 2083369 - RNA, 19 nt, Homo sapiens
  misc_RNA (1)...(19): siRNA sense strand
gaccagauaauaagcauuu

SEQ ID NO: 2083370 - RNA, 19 nt, Homo sapiens
  misc_RNA (1)...(19): siRNA sense strand
caucgaagcagaaacagua

SEQ ID NO: 2083371 - RNA, 19 nt, Homo sapiens
  misc_RNA (1)...(19): siRNA sense strand
caagaucaaguguguuaua

SEQ ID NO: 2083372 - RNA, 19 nt, Homo sapiens
  misc_RNA (1)...(19): siRNA sense strand
aauggcaucuucaacaaua

SEQ ID NO: 2083373 - RNA, 19 nt, Homo sapiens
  misc_RNA (1)...(19): siRNA sense strand
gaaggaaauugcaaaacua

SEQ ID NO: 2083374 - RNA, 19 nt, Homo sapiens
  misc_RNA (1)...(19): siRNA sense strand
gaagguaccacaccacaug

SEQ ID NO: 2083375 - RNA, 19 nt, Homo sapiens
  misc_RNA (1)...(19): siRNA sense strand
gcuaccugauuacuuguua

SEQ ID NO: 2083376 - RNA, 19 nt, Homo sapiens
  misc_RNA (1)...(19): siRNA sense strand
gguggaaacuucagaugga

SEQ ID NO: 2083377 - RNA, 19 nt, Homo sapiens
  misc_RNA (1)...(19): siRNA sense strand
ucagaacucuccauacugu

SEQ ID NO: 2083378 - RNA, 19 nt, Homo sapiens
  misc_RNA (1)...(19): siRNA sense strand
caaaagagaccagauaaua

SEQ ID NO: 2083379 - RNA, 19 nt, Homo sapiens
  misc_RNA (1)...(19): siRNA sense strand
gaggaucaguggucccaaa

SEQ ID NO: 2083380 - RNA, 19 nt, Homo sapiens
  misc_RNA (1)...(19): siRNA sense strand
ccaauggcaucuucaacaa

SEQ ID NO: 2083381 - RNA, 19 nt, Homo sapiens
  misc_RNA (1)...(19): siRNA sense strand
cagcugagguggagccauu

SEQ ID NO: 2083382 - RNA, 19 nt, Homo sapiens
  misc_RNA (1)...(19): siRNA sense strand
caacaaugcucuggaaguc

SEQ ID NO: 2083383 - RNA, 19 nt, Homo sapiens
  misc_RNA (1)...(19): siRNA sense strand
gaaagaagacagaauuugc

SEQ ID NO: 2083384 - RNA, 19 nt, Homo sapiens
  misc_RNA (1)...(19): siRNA sense strand
ggaagauuauacucaugaa

SEQ ID NO: 2083385 - RNA, 19 nt, Homo sapiens
  misc_RNA (1)...(19): siRNA sense strand
ggaaauccacagcaaguga

SEQ ID NO: 2083386 - RNA, 19 nt, Homo sapiens
  misc_RNA (1)...(19): siRNA sense strand
caacuccaauucccagcua

SEQ ID NO: 2083387 - RNA, 19 nt, Homo sapiens
  misc_RNA (1)...(19): siRNA sense strand
gaaaugcuaaggaugagaa

SEQ ID NO: 2083388 - RNA, 19 nt, Homo sapiens
  misc_RNA (1)...(19): siRNA sense strand
cauagaagcgauccaaauu

SEQ ID NO: 2083389 - RNA, 19 nt, Homo sapiens
  misc_RNA (1)...(19): siRNA sense strand
ggaauaggcaguccaaugg

SEQ ID NO: 2083390 - RNA, 19 nt, Homo sapiens
  misc_RNA (1)...(19): siRNA sense strand
gaaauaaguauggagcaaa

SEQ ID NO: 2083391 - RNA, 19 nt, Homo sapiens
  misc_RNA (1)...(19): siRNA sense strand
gauauacgauggcaacaac

SEQ ID NO: 2083392 - RNA, 19 nt, Homo sapiens
  misc_RNA (1)...(19): siRNA sense strand
cagaagaagaguccugaua

SEQ ID NO: 2083393 - RNA, 19 nt, Homo sapiens
  misc_RNA (1)...(19): siRNA sense strand
ucagaaagaagacagaauu

SEQ ID NO: 2083394 - RNA, 19 nt, Homo sapiens
  misc_RNA (1)...(19): siRNA sense strand
gcagcucaauaguagaauu

SEQ ID NO: 2083395 - RNA, 19 nt, Homo sapiens
  misc_RNA (1)...(19): siRNA sense strand
gcaaugaaagcacggcaaa

SEQ ID NO: 2083396 - RNA, 19 nt, Homo sapiens
  misc_RNA (1)...(19): siRNA sense strand
acacaguacuuccucagaa

SEQ ID NO: 2083397 - RNA, 19 nt, Homo sapiens
  misc_RNA (1)...(19): siRNA sense strand
ugaggaagccuuaaagaau

SEQ ID NO: 2083398 - RNA, 19 nt, Homo sapiens
  misc_RNA (1)...(19): siRNA sense strand
uggaugaggcucucuauaa

SEQ ID NO: 2083399 - RNA, 19 nt, Homo sapiens
  misc_RNA (1)...(19): siRNA sense strand
ugacauccuuuaauucugu

SEQ ID NO: 2083400 - RNA, 19 nt, Homo sapiens
  misc_RNA (1)...(19): siRNA sense strand
gaacuaaaugagaauggaa

SEQ ID NO: 2083401 - RNA, 19 nt, Homo sapiens
  misc_RNA (1)...(19): siRNA sense strand
gcacucugauucuaauuac

SEQ ID NO: 2083402 - RNA, 19 nt, Homo sapiens
  misc_RNA (1)...(19): siRNA sense strand
caggaaagcauauaaagau

SEQ ID NO: 2083403 - RNA, 19 nt, Homo sapiens
  misc_RNA (1)...(19): siRNA sense strand
ggaagauacuggacuaagc

SEQ ID NO: 2083404 - RNA, 19 nt, Homo sapiens
  misc_RNA (1)...(19): siRNA sense strand
ccaauagacaguuuccuuu

SEQ ID NO: 2083405 - RNA, 19 nt, Homo sapiens
  misc_RNA (1)...(19): siRNA sense strand
ugccacagcucaagaguau

SEQ ID NO: 2083406 - RNA, 19 nt, Homo sapiens
  misc_RNA (1)...(19): siRNA sense strand
ggaugagaauauucaacaa

SEQ ID NO: 2083407 - RNA, 19 nt, Homo sapiens
  misc_RNA (1)...(19): siRNA sense strand
cuauggcucucccaaauga

SEQ ID NO: 2083408 - RNA, 19 nt, Homo sapiens
  misc_RNA (1)...(19): siRNA sense strand
gauuacuuguuacccauuu

SEQ ID NO: 2083409 - RNA, 19 nt, Homo sapiens
  misc_RNA (1)...(19): siRNA sense strand
ucagagacccagagaacua

SEQ ID NO: 2083410 - RNA, 19 nt, Homo sapiens
  misc_RNA (1)...(19): siRNA sense strand
guagaagugcagcucaaua

SEQ ID NO: 2083411 - RNA, 19 nt, Homo sapiens
  misc_RNA (1)...(19): siRNA sense strand
agaagaagaugaagaugag

SEQ ID NO: 2083412 - RNA, 19 nt, Homo sapiens
  misc_RNA (1)...(19): siRNA sense strand
ggacuggaagcaucagaaa

SEQ ID NO: 2083413 - RNA, 19 nt, Homo sapiens
  misc_RNA (1)...(19): siRNA sense strand
cagcaagugccauuucuuu

SEQ ID NO: 2083414 - RNA, 19 nt, Homo sapiens
  misc_RNA (1)...(19): siRNA sense strand
caagucagaacucuccaua

SEQ ID NO: 2083415 - RNA, 19 nt, Homo sapiens
  misc_RNA (1)...(19): siRNA sense strand
acaggaagcuuuaucaaaa

SEQ ID NO: 2083416 - RNA, 19 nt, Homo sapiens
  misc_RNA (1)...(19): siRNA sense strand
gcaguccaauggcaucuuc

SEQ ID NO: 2083417 - RNA, 19 nt, Homo sapiens
  misc_RNA (1)...(19): siRNA sense strand
gagaaguuaccaaacauau

SEQ ID NO: 2083418 - RNA, 19 nt, Homo sapiens
  misc_RNA (1)...(19): siRNA sense strand
aaggcaaacugaacaaaga

SEQ ID NO: 2083419 - RNA, 19 nt, Homo sapiens
  misc_RNA (1)...(19): siRNA sense strand
gcaaaguggagaagaggaa

SEQ ID NO: 2083420 - RNA, 19 nt, Homo sapiens
  misc_RNA (1)...(19): siRNA sense strand
ugaagaagaagaagaugaa

SEQ ID NO: 2083421 - RNA, 19 nt, Homo sapiens
  misc_RNA (1)...(19): siRNA sense strand
gagaaagagguauccugua

SEQ ID NO: 2083422 - RNA, 19 nt, Homo sapiens
  misc_RNA (1)...(19): siRNA sense strand
gaagaagaaagcuuuagca

SEQ ID NO: 2083423 - RNA, 19 nt, Homo sapiens
  misc_RNA (1)...(19): siRNA sense strand
ugaaucauguggaaucauc

SEQ ID NO: 2083424 - RNA, 19 nt, Homo sapiens
  misc_RNA (1)...(19): siRNA sense strand
gaacccauaucuguagaag

SEQ ID NO: 2083425 - RNA, 19 nt, Homo sapiens
  misc_RNA (1)...(19): siRNA sense strand
gaggaagauuauacucaug

SEQ ID NO: 2083426 - RNA, 19 nt, Homo sapiens
  misc_RNA (1)...(19): siRNA sense strand
gaagauacuggacuaagca

SEQ ID NO: 2083427 - RNA, 19 nt, Homo sapiens
  misc_RNA (1)...(19): siRNA sense strand
acacuaaagacucuacuaa

SEQ ID NO: 2083428 - RNA, 19 nt, Homo sapiens
  misc_RNA (1)...(19): siRNA sense strand
acacaacgcaaacuacgua

SEQ ID NO: 2083429 - RNA, 19 nt, Homo sapiens
  misc_RNA (1)...(19): siRNA sense strand
gaaagcauguccucaaaua

SEQ ID NO: 2083430 - RNA, 19 nt, Homo sapiens
  misc_RNA (1)...(19): siRNA sense strand
ggaaagaucuaccuccaua

SEQ ID NO: 2083431 - RNA, 19 nt, Homo sapiens
  misc_RNA (1)...(19): siRNA sense strand
gaagauguuuguugugaua

SEQ ID NO: 2083432 - RNA, 19 nt, Homo sapiens
  misc_RNA (1)...(19): siRNA sense strand
gagauacucuggaugaaua

SEQ ID NO: 2083433 - RNA, 19 nt, Homo sapiens
  misc_RNA (1)...(19): siRNA sense strand
gcaagaagauccaacuaau

SEQ ID NO: 2083434 - RNA, 19 nt, Homo sapiens
  misc_RNA (1)...(19): siRNA sense strand
caagugaccuuauuuaauc

SEQ ID NO: 2083435 - RNA, 19 nt, Homo sapiens
  misc_RNA (1)...(19): siRNA sense strand
ggacuacacugaaacauuc

SEQ ID NO: 2083436 - RNA, 19 nt, Homo sapiens
  misc_RNA (1)...(19): siRNA sense strand
gaagugaagagaaguguua

SEQ ID NO: 2083437 - RNA, 19 nt, Homo sapiens
  misc_RNA (1)...(19): siRNA sense strand
uaaaugauccugcgauuaa

SEQ ID NO: 2083438 - RNA, 19 nt, Homo sapiens
  misc_RNA (1)...(19): siRNA sense strand
gaacaauccuagugaaauc

SEQ ID NO: 2083439 - RNA, 19 nt, Homo sapiens
  misc_RNA (1)...(19): siRNA sense strand
gaaaguguguuacaugcaa

SEQ ID NO: 2083440 - RNA, 19 nt, Homo sapiens
  misc_RNA (1)...(19): siRNA sense strand
ggucugaggucacauuguu

SEQ ID NO: 2083441 - RNA, 19 nt, Homo sapiens
  misc_RNA (1)...(19): siRNA sense strand
ccaguucgguugcaucuaa

SEQ ID NO: 2083442 - RNA, 19 nt, Homo sapiens
  misc_RNA (1)...(19): siRNA sense strand
gagcauguguuuccuguuc

SEQ ID NO: 2083443 - RNA, 19 nt, Homo sapiens
  misc_RNA (1)...(19): siRNA sense strand
caagaaacaucagugagaa

SEQ ID NO: 2083444 - RNA, 19 nt, Homo sapiens
  misc_RNA (1)...(19): siRNA sense strand
gaagauccaacuaaugaaa

SEQ ID NO: 2083445 - RNA, 19 nt, Homo sapiens
  misc_RNA (1)...(19): siRNA sense strand
aaacaucagugagaacuuu

SEQ ID NO: 2083446 - RNA, 19 nt, Homo sapiens
  misc_RNA (1)...(19): siRNA sense strand
gaauaaccuuccaaucaug

SEQ ID NO: 2083447 - RNA, 19 nt, Homo sapiens
  misc_RNA (1)...(19): siRNA sense strand
acacuaauauuggccuuua

SEQ ID NO: 2083448 - RNA, 19 nt, Homo sapiens
  misc_RNA (1)...(19): siRNA sense strand
gaaaucauugcaagaauug

SEQ ID NO: 2083449 - RNA, 19 nt, Homo sapiens
  misc_RNA (1)...(19): siRNA sense strand
ggacaucucaagccaauau

SEQ ID NO: 2083450 - RNA, 19 nt, Homo sapiens
  misc_RNA (1)...(19): siRNA sense strand
ccaagcacuucacauguuu

SEQ ID NO: 2083451 - RNA, 19 nt, Homo sapiens
  misc_RNA (1)...(19): siRNA sense strand
ugaucuggauucuucauua

SEQ ID NO: 2083452 - RNA, 19 nt, Homo sapiens
  misc_RNA (1)...(19): siRNA sense strand
caaacuggauugccucuuc

SEQ ID NO: 2083453 - RNA, 19 nt, Homo sapiens
  misc_RNA (1)...(19): siRNA sense strand
gagacuaacccuuuaauag

SEQ ID NO: 2083454 - RNA, 19 nt, Homo sapiens
  misc_RNA (1)...(19): siRNA sense strand
gcaccacuauugacaaaca

SEQ ID NO: 2083455 - RNA, 19 nt, Homo sapiens
  misc_RNA (1)...(19): siRNA sense strand
cuaguucacuccauucaaa

SEQ ID NO: 2083456 - RNA, 19 nt, Homo sapiens
  misc_RNA (1)...(19): siRNA sense strand
uaaaagggguuaucgagua

SEQ ID NO: 2083457 - RNA, 19 nt, Homo sapiens
  misc_RNA (1)...(19): siRNA sense strand
gcagaacaaugugguacaa

SEQ ID NO: 2083458 - RNA, 19 nt, Homo sapiens
  misc_RNA (1)...(19): siRNA sense strand
gaacauccgacacacagaa

SEQ ID NO: 2083459 - RNA, 19 nt, Homo sapiens
  misc_RNA (1)...(19): siRNA sense strand
gugaagauguuuguuguga

SEQ ID NO: 2083460 - RNA, 19 nt, Homo sapiens
  misc_RNA (1)...(19): siRNA sense strand
ugaagaugauccagauauu

SEQ ID NO: 2083461 - RNA, 19 nt, Homo sapiens
  misc_RNA (1)...(19): siRNA sense strand
ggacguccauuuaauacuc

SEQ ID NO: 2083462 - RNA, 19 nt, Homo sapiens
  misc_RNA (1)...(19): siRNA sense strand
caagaaaucauugcaagaa

SEQ ID NO: 2083463 - RNA, 19 nt, Homo sapiens
  misc_RNA (1)...(19): siRNA sense strand
gugaagagaaguguuaaua

SEQ ID NO: 2083464 - RNA, 19 nt, Homo sapiens
  misc_RNA (1)...(19): siRNA sense strand
gcuuugaucuggauucuuc

SEQ ID NO: 2083465 - RNA, 19 nt, Homo sapiens
  misc_RNA (1)...(19): siRNA sense strand
ucacaauguugccuugaaa

SEQ ID NO: 2083466 - RNA, 19 nt, Homo sapiens
  misc_RNA (1)...(19): siRNA sense strand
ccaccuauaacaagucuua

SEQ ID NO: 2083467 - RNA, 19 nt, Homo sapiens
  misc_RNA (1)...(19): siRNA sense strand
caaauugcaccacuauuga

SEQ ID NO: 2083468 - RNA, 19 nt, Homo sapiens
  misc_RNA (1)...(19): siRNA sense strand
gaaaucagugucagaacaa

SEQ ID NO: 2083469 - RNA, 19 nt, Homo sapiens
  misc_RNA (1)...(19): siRNA sense strand
aagaauaaccuuccaauca

SEQ ID NO: 2083470 - RNA, 19 nt, Homo sapiens
  misc_RNA (1)...(19): siRNA sense strand
acucaaaucuuacacugaa

SEQ ID NO: 2083471 - RNA, 19 nt, Homo sapiens
  misc_RNA (1)...(19): siRNA sense strand
gggaauugaucuaaaugau

SEQ ID NO: 2083472 - RNA, 19 nt, Homo sapiens
  misc_RNA (1)...(19): siRNA sense strand
guuauuacgcuaccucaua

SEQ ID NO: 2083473 - RNA, 19 nt, Homo sapiens
  misc_RNA (1)...(19): siRNA sense strand
aagaagauccaacuaauga

SEQ ID NO: 2083474 - RNA, 19 nt, Homo sapiens
  misc_RNA (1)...(19): siRNA sense strand
ucaaauugcaccacuauug

SEQ ID NO: 2083475 - RNA, 19 nt, Homo sapiens
  misc_RNA (1)...(19): siRNA sense strand
gaagcuuucuccaugacuu

SEQ ID NO: 2083476 - RNA, 19 nt, Homo sapiens
  misc_RNA (1)...(19): siRNA sense strand
acagaauggugaccgauuu

SEQ ID NO: 2083477 - RNA, 19 nt, Homo sapiens
  misc_RNA (1)...(19): siRNA sense strand
gauuaagcaagaugcauua

SEQ ID NO: 2083478 - RNA, 19 nt, Homo sapiens
  misc_RNA (1)...(19): siRNA sense strand
agaauaaccuuccaaucau

SEQ ID NO: 2083479 - RNA, 19 nt, Homo sapiens
  misc_RNA (1)...(19): siRNA sense strand
gguugcaucuaaaguguuu

SEQ ID NO: 2083480 - RNA, 19 nt, Homo sapiens
  misc_RNA (1)...(19): siRNA sense strand
aaacucaucagcaccauaa

SEQ ID NO: 2083481 - RNA, 19 nt, Homo sapiens
  misc_RNA (1)...(19): siRNA sense strand
gaaucugucuugaacuauc

SEQ ID NO: 2083482 - RNA, 19 nt, Homo sapiens
  misc_RNA (1)...(19): siRNA sense strand
gauccaacagcaucacaua

SEQ ID NO: 2083483 - RNA, 19 nt, Homo sapiens
  misc_RNA (1)...(19): siRNA sense strand
gcccaacauuugauucauu

SEQ ID NO: 2083484 - RNA, 19 nt, Homo sapiens
  misc_RNA (1)...(19): siRNA sense strand
uaacccaaaugaagcagaa

SEQ ID NO: 2083485 - RNA, 19 nt, Homo sapiens
  misc_RNA (1)...(19): siRNA sense strand
caauguuucucacaauguu

SEQ ID NO: 2083486 - RNA, 19 nt, Homo sapiens
  misc_RNA (1)...(19): siRNA sense strand
acaccugaauguucuguaa

SEQ ID NO: 2083487 - RNA, 19 nt, Homo sapiens
  misc_RNA (1)...(19): siRNA sense strand
acacacagaagaacgguua

SEQ ID NO: 2083488 - RNA, 19 nt, Homo sapiens
  misc_RNA (1)...(19): siRNA sense strand
acaaugcucccucuccuua

SEQ ID NO: 2083489 - RNA, 19 nt, Homo sapiens
  misc_RNA (1)...(19): siRNA sense strand
caagaaaugagcaauggaa

SEQ ID NO: 2083490 - RNA, 19 nt, Homo sapiens
  misc_RNA (1)...(19): siRNA sense strand
gauccaagcacuucacaug

SEQ ID NO: 2083491 - RNA, 19 nt, Homo sapiens
  misc_RNA (1)...(19): siRNA sense strand
cagagggaauugaucuaaa

SEQ ID NO: 2083492 - RNA, 19 nt, Homo sapiens
  misc_RNA (1)...(19): siRNA sense strand
caagaauugcccaacauuu

SEQ ID NO: 2083493 - RNA, 19 nt, Homo sapiens
  misc_RNA (1)...(19): siRNA sense strand
gaacaaugugguacaaaca

SEQ ID NO: 2083494 - RNA, 19 nt, Homo sapiens
  misc_RNA (1)...(19): siRNA sense strand
caaaugaagcagaacaaug

SEQ ID NO: 2083495 - RNA, 19 nt, Homo sapiens
  misc_RNA (1)...(19): siRNA sense strand
ugauagcggugcugcauau

SEQ ID NO: 2083496 - RNA, 19 nt, Homo sapiens
  misc_RNA (1)...(19): siRNA sense strand
gaaacuccucgaagugaaa

SEQ ID NO: 2083497 - RNA, 19 nt, Homo sapiens
  misc_RNA (1)...(19): siRNA sense strand
auucuaggcuuuaguggua

SEQ ID NO: 2083498 - RNA, 19 nt, Homo sapiens
  misc_RNA (1)...(19): siRNA sense strand
gaauggugaccgauuuauu

SEQ ID NO: 2083499 - RNA, 19 nt, Homo sapiens
  misc_RNA (1)...(19): siRNA sense strand
acagagguauugaggacua

SEQ ID NO: 2083500 - RNA, 19 nt, Homo sapiens
  misc_RNA (1)...(19): siRNA sense strand
ugaacaagauaagcaagaa

SEQ ID NO: 2083501 - RNA, 19 nt, Homo sapiens
  misc_RNA (1)...(19): siRNA sense strand
gaaaucauccaaaguacgu

SEQ ID NO: 2083502 - RNA, 19 nt, Homo sapiens
  misc_RNA (1)...(19): siRNA sense strand
caagaaaucagugucagaa

SEQ ID NO: 2083503 - RNA, 19 nt, Homo sapiens
  misc_RNA (1)...(19): siRNA sense strand
gcuguccgcucauuugugu

SEQ ID NO: 2083504 - RNA, 19 nt, Homo sapiens
  misc_RNA (1)...(19): siRNA sense strand
cacagaagaacgguuauua

SEQ ID NO: 2083505 - RNA, 19 nt, Homo sapiens
  misc_RNA (1)...(19): siRNA sense strand
aggaaucugucuugaacua

SEQ ID NO: 2083506 - RNA, 19 nt, Homo sapiens
  misc_RNA (1)...(19): siRNA sense strand
gaagaugauccagauauuc

SEQ ID NO: 2083507 - RNA, 19 nt, Homo sapiens
  misc_RNA (1)...(19): siRNA sense strand
uguuggaaaugucugaaua

SEQ ID NO: 2083508 - RNA, 19 nt, Homo sapiens
  misc_RNA (1)...(19): siRNA sense strand
ucagaacaauccuagugaa

SEQ ID NO: 2083509 - RNA, 19 nt, Homo sapiens
  misc_RNA (1)...(19): siRNA sense strand
agaaaucagugucagaaca

SEQ ID NO: 2083510 - RNA, 19 nt, Homo sapiens
  misc_RNA (1)...(19): siRNA sense strand
gaaggacgaacaccugaau

SEQ ID NO: 2083511 - RNA, 19 nt, Homo sapiens
  misc_RNA (1)...(19): siRNA sense strand
ugaggaaucugucuugaac

SEQ ID NO: 2083512 - RNA, 19 nt, Homo sapiens
  misc_RNA (1)...(19): siRNA sense strand
gaaguccucgaccauguuu

SEQ ID NO: 2083513 - RNA, 19 nt, Homo sapiens
  misc_RNA (1)...(19): siRNA sense strand
caagaagauccaacuaaug

SEQ ID NO: 2083514 - RNA, 19 nt, Homo sapiens
  misc_RNA (1)...(19): siRNA sense strand
aagcauguccucaaauaaa

SEQ ID NO: 2083515 - RNA, 19 nt, Homo sapiens
  misc_RNA (1)...(19): siRNA sense strand
agagggaauugaucuaaau

SEQ ID NO: 2083516 - RNA, 19 nt, Homo sapiens
  misc_RNA (1)...(19): siRNA sense strand
uagcggugcugcauaugaa

SEQ ID NO: 2083517 - RNA, 19 nt, Homo sapiens
  misc_RNA (1)...(19): siRNA sense strand
gaacaauacaagugaccuu

SEQ ID NO: 2083518 - RNA, 19 nt, Homo sapiens
  misc_RNA (1)...(19): siRNA sense strand
caguugaagugucauucua

SEQ ID NO: 2083519 - RNA, 19 nt, Homo sapiens
  misc_RNA (1)...(19): siRNA sense strand
gaucuggauucuucauuac

SEQ ID NO: 2083520 - RNA, 19 nt, Homo sapiens
  misc_RNA (1)...(19): siRNA sense strand
caacuuaauagcauagaga

SEQ ID NO: 2083521 - RNA, 19 nt, Homo sapiens
  misc_RNA (1)...(19): siRNA sense strand
agagacuaauccuuugaua

SEQ ID NO: 2083522 - RNA, 19 nt, Homo sapiens
  misc_RNA (1)...(19): siRNA sense strand
aaaugaagcagaacaaugu

SEQ ID NO: 2083523 - RNA, 19 nt, Homo sapiens
  misc_RNA (1)...(19): siRNA sense strand
gugcauggcugaguguuuc

SEQ ID NO: 2083524 - RNA, 19 nt, Homo sapiens
  misc_RNA (1)...(19): siRNA sense strand
guacggcuccuguucucua

SEQ ID NO: 2083525 - RNA, 19 nt, Homo sapiens
  misc_RNA (1)...(19): siRNA sense strand
gagaaguguuaauaaagag

SEQ ID NO: 2083526 - RNA, 19 nt, Homo sapiens
  misc_RNA (1)...(19): siRNA sense strand
ccuaagacaugugagcaaa

SEQ ID NO: 2083527 - RNA, 19 nt, Homo sapiens
  misc_RNA (1)...(19): siRNA sense strand
gaagcagaacaauguggua

SEQ ID NO: 2083528 - RNA, 19 nt, Homo sapiens
  misc_RNA (1)...(19): siRNA sense strand
gagauaugccagccaauca

SEQ ID NO: 2083529 - RNA, 19 nt, Homo sapiens
  misc_RNA (1)...(19): siRNA sense strand
gcagguaacugaagcaaua

SEQ ID NO: 2083530 - RNA, 19 nt, Homo sapiens
  misc_RNA (1)...(19): siRNA sense strand
uaacaugccuuuagaauug

SEQ ID NO: 2083531 - RNA, 19 nt, Homo sapiens
  misc_RNA (1)...(19): siRNA sense strand
gaagauaauuucucacuga

SEQ ID NO: 2083532 - RNA, 19 nt, Homo sapiens
  misc_RNA (1)...(19): siRNA sense strand
ggagaaagagcacgaauua

SEQ ID NO: 2083533 - RNA, 19 nt, Homo sapiens
  misc_RNA (1)...(19): siRNA sense strand
gaacagagccgucccuuug

SEQ ID NO: 2083534 - RNA, 19 nt, Homo sapiens
  misc_RNA (1)...(19): siRNA sense strand
gaaggugguucuuuaguaa

SEQ ID NO: 2083535 - RNA, 19 nt, Homo sapiens
  misc_RNA (1)...(19): siRNA sense strand
gcagaugacucaguuuaua

SEQ ID NO: 2083536 - RNA, 19 nt, Homo sapiens
  misc_RNA (1)...(19): siRNA sense strand
ggaaggugguucuuuagua

SEQ ID NO: 2083537 - RNA, 19 nt, Homo sapiens
  misc_RNA (1)...(19): siRNA sense strand
guuggaagguuuaugauua

SEQ ID NO: 2083538 - RNA, 19 nt, Homo sapiens
  misc_RNA (1)...(19): siRNA sense strand
cgaaagaacuccuauuugg

SEQ ID NO: 2083539 - RNA, 19 nt, Homo sapiens
  misc_RNA (1)...(19): siRNA sense strand
caagauguccuuauaauug

SEQ ID NO: 2083540 - RNA, 19 nt, Homo sapiens
  misc_RNA (1)...(19): siRNA sense strand
ggaaagauacccgucaaua

SEQ ID NO: 2083541 - RNA, 19 nt, Homo sapiens
  misc_RNA (1)...(19): siRNA sense strand
gcacuagccaagccuauua

SEQ ID NO: 2083542 - RNA, 19 nt, Homo sapiens
  misc_RNA (1)...(19): siRNA sense strand
gauaauuucucacugaugu

SEQ ID NO: 2083543 - RNA, 19 nt, Homo sapiens
  misc_RNA (1)...(19): siRNA sense strand
gcaagggacuucucuaaac

SEQ ID NO: 2083544 - RNA, 19 nt, Homo sapiens
  misc_RNA (1)...(19): siRNA sense strand
gaauuggcauguagaguug

SEQ ID NO: 2083545 - RNA, 19 nt, Homo sapiens
  misc_RNA (1)...(19): siRNA sense strand
gaagaugggacaauuauca

SEQ ID NO: 2083546 - RNA, 19 nt, Homo sapiens
  misc_RNA (1)...(19): siRNA sense strand
gaucuuuccucaucuauca

SEQ ID NO: 2083547 - RNA, 19 nt, Homo sapiens
  misc_RNA (1)...(19): siRNA sense strand
gcauuaagcaccucaauau

SEQ ID NO: 2083548 - RNA, 19 nt, Homo sapiens
  misc_RNA (1)...(19): siRNA sense strand
gaacugcuguagucacuuc

SEQ ID NO: 2083549 - RNA, 19 nt, Homo sapiens
  misc_RNA (1)...(19): siRNA sense strand
acacugcaaucuguuauua

SEQ ID NO: 2083550 - RNA, 19 nt, Homo sapiens
  misc_RNA (1)...(19): siRNA sense strand
ugacagaugugccuuggaa

SEQ ID NO: 2083551 - RNA, 19 nt, Homo sapiens
  misc_RNA (1)...(19): siRNA sense strand
gaugggacaauuaucauua

SEQ ID NO: 2083552 - RNA, 19 nt, Homo sapiens
  misc_RNA (1)...(19): siRNA sense strand
gaacuccuauuuggucauu

SEQ ID NO: 2083553 - RNA, 19 nt, Homo sapiens
  misc_RNA (1)...(19): siRNA sense strand
ggaauggacagaagaacua

SEQ ID NO: 2083554 - RNA, 19 nt, Homo sapiens
  misc_RNA (1)...(19): siRNA sense strand
gaugagaggugcugggaau

SEQ ID NO: 2083555 - RNA, 19 nt, Homo sapiens
  misc_RNA (1)...(19): siRNA sense strand
gauguugacucuuccaguu

SEQ ID NO: 2083556 - RNA, 19 nt, Homo sapiens
  misc_RNA (1)...(19): siRNA sense strand
agaaagagcacgaauuauu

SEQ ID NO: 2083557 - RNA, 19 nt, Homo sapiens
  misc_RNA (1)...(19): siRNA sense strand
gaccuggacucauguguga

SEQ ID NO: 2083558 - RNA, 19 nt, Homo sapiens
  misc_RNA (1)...(19): siRNA sense strand
gaaacaggcacuuuggaaa

SEQ ID NO: 2083559 - RNA, 19 nt, Homo sapiens
  misc_RNA (1)...(19): siRNA sense strand
gaaagauacccgucaauag

SEQ ID NO: 2083560 - RNA, 19 nt, Homo sapiens
  misc_RNA (1)...(19): siRNA sense strand
gagcaagggacuucucuaa

SEQ ID NO: 2083561 - RNA, 19 nt, Homo sapiens
  misc_RNA (1)...(19): siRNA sense strand
ggacucaugugugaucuug

SEQ ID NO: 2083562 - RNA, 19 nt, Homo sapiens
  misc_RNA (1)...(19): siRNA sense strand
cagaagauggucacaguua

SEQ ID NO: 2083563 - RNA, 19 nt, Homo sapiens
  misc_RNA (1)...(19): siRNA sense strand
ggagauguguguuuggaau

SEQ ID NO: 2083564 - RNA, 19 nt, Homo sapiens
  misc_RNA (1)...(19): siRNA sense strand
cuacaugaaugaaaggaaa

SEQ ID NO: 2083565 - RNA, 19 nt, Homo sapiens
  misc_RNA (1)...(19): siRNA sense strand
ucuggaaggugguucuuua

SEQ ID NO: 2083566 - RNA, 19 nt, Homo sapiens
  misc_RNA (1)...(19): siRNA sense strand
cagcaucacugccaucaug

SEQ ID NO: 2083567 - RNA, 19 nt, Homo sapiens
  misc_RNA (1)...(19): siRNA sense strand
cagcuucgguaacauguuu

SEQ ID NO: 2083568 - RNA, 19 nt, Homo sapiens
  misc_RNA (1)...(19): siRNA sense strand
caacaacacaugaagaguu

SEQ ID NO: 2083569 - RNA, 19 nt, Homo sapiens
  misc_RNA (1)...(19): siRNA sense strand
guuuauaucugggaaauug

SEQ ID NO: 2083570 - RNA, 19 nt, Homo sapiens
  misc_RNA (1)...(19): siRNA sense strand
ugacugaaguuaguagaaa

SEQ ID NO: 2083571 - RNA, 19 nt, Homo sapiens
  misc_RNA (1)...(19): siRNA sense strand
aaagcaagaugucuaugaa

SEQ ID NO: 2083572 - RNA, 19 nt, Homo sapiens
  misc_RNA (1)...(19): siRNA sense strand
gacagaagauggucacagu

SEQ ID NO: 2083573 - RNA, 19 nt, Homo sapiens
  misc_RNA (1)...(19): siRNA sense strand
ucacugauguugccagguu

SEQ ID NO: 2083574 - RNA, 19 nt, Homo sapiens
  misc_RNA (1)...(19): siRNA sense strand
caagggacuucucuaaaca

SEQ ID NO: 2083575 - RNA, 19 nt, Homo sapiens
  misc_RNA (1)...(19): siRNA sense strand
ugugugaucuugugggaua

SEQ ID NO: 2083576 - RNA, 19 nt, Homo sapiens
  misc_RNA (1)...(19): siRNA sense strand
gaagucucaggaagaauua

SEQ ID NO: 2083577 - RNA, 19 nt, Homo sapiens
  misc_RNA (1)...(19): siRNA sense strand
ggaguaacguuggcuuuca

SEQ ID NO: 2083578 - RNA, 19 nt, Homo sapiens
  misc_RNA (1)...(19): siRNA sense strand
ggaagagugcuuaaagaga

SEQ ID NO: 2083579 - RNA, 19 nt, Homo sapiens
  misc_RNA (1)...(19): siRNA sense strand
gaaguucaacaacacauga

SEQ ID NO: 2083580 - RNA, 19 nt, Homo sapiens
  misc_RNA (1)...(19): siRNA sense strand
ggacuugucagauaaauac

SEQ ID NO: 2083581 - RNA, 19 nt, Homo sapiens
  misc_RNA (1)...(19): siRNA sense strand
cacaugaacuaaagauuuc

SEQ ID NO: 2083582 - RNA, 19 nt, Homo sapiens
  misc_RNA (1)...(19): siRNA sense strand
gggaauuucuuugaaugaa

SEQ ID NO: 2083583 - RNA, 19 nt, Homo sapiens
  misc_RNA (1)...(19): siRNA sense strand
gguuacugaugccaaauuu

SEQ ID NO: 2083584 - RNA, 19 nt, Homo sapiens
  misc_RNA (1)...(19): siRNA sense strand
uaagguuacugaugccaaa

SEQ ID NO: 2083585 - RNA, 19 nt, Homo sapiens
  misc_RNA (1)...(19): siRNA sense strand
guuaugggcuacaugaaug

SEQ ID NO: 2083586 - RNA, 19 nt, Homo sapiens
  misc_RNA (1)...(19): siRNA sense strand
ucuggaaucucucacauga

SEQ ID NO: 2083587 - RNA, 19 nt, Homo sapiens
  misc_RNA (1)...(19): siRNA sense strand
gcacauauacugagagacu

SEQ ID NO: 2083588 - RNA, 19 nt, Homo sapiens
  misc_RNA (1)...(19): siRNA sense strand
gaagaguuugggaaagaua

SEQ ID NO: 2083589 - RNA, 19 nt, Homo sapiens
  misc_RNA (1)...(19): siRNA sense strand
ucagugauguugacucuuc

SEQ ID NO: 2083590 - RNA, 19 nt, Homo sapiens
  misc_RNA (1)...(19): siRNA sense strand
cagagacacuuaagcacaa

SEQ ID NO: 2083591 - RNA, 19 nt, Homo sapiens
  misc_RNA (1)...(19): siRNA sense strand
gaaaugggcaguucuuugc

SEQ ID NO: 2083592 - RNA, 19 nt, Homo sapiens
  misc_RNA (1)...(19): siRNA sense strand
cuaaacagcccuacauugu

SEQ ID NO: 2083593 - RNA, 19 nt, Homo sapiens
  misc_RNA (1)...(19): siRNA sense strand
aacaacacaugaagaguuu

SEQ ID NO: 2083594 - RNA, 19 nt, Homo sapiens
  misc_RNA (1)...(19): siRNA sense strand
gaaaugguaagaaugaauc

SEQ ID NO: 2083595 - RNA, 19 nt, Homo sapiens
  misc_RNA (1)...(19): siRNA sense strand
uuuaaugucuugccuguga

SEQ ID NO: 2083596 - RNA, 19 nt, Homo sapiens
  misc_RNA (1)...(19): siRNA sense strand
gaucuugugggauaucuuu

SEQ ID NO: 2083597 - RNA, 19 nt, Homo sapiens
  misc_RNA (1)...(19): siRNA sense strand
caugagaauucaagaagau

SEQ ID NO: 2083598 - RNA, 19 nt, Homo sapiens
  misc_RNA (1)...(19): siRNA sense strand
cagccacucuuccaaauca

SEQ ID NO: 2083599 - RNA, 19 nt, Homo sapiens
  misc_RNA (1)...(19): siRNA sense strand
gugcagaugacucaguuua

SEQ ID NO: 2083600 - RNA, 19 nt, Homo sapiens
  misc_RNA (1)...(19): siRNA sense strand
gguaacauguuuggcaaga

SEQ ID NO: 2083601 - RNA, 19 nt, Homo sapiens
  misc_RNA (1)...(19): siRNA sense strand
gcgaaagaacuccuauuug

SEQ ID NO: 2083602 - RNA, 19 nt, Homo sapiens
  misc_RNA (1)...(19): siRNA sense strand
uagccaagccuauuacuga

SEQ ID NO: 2083603 - RNA, 19 nt, Homo sapiens
  misc_RNA (1)...(19): siRNA sense strand
cauauacccugcugaugga

SEQ ID NO: 2083604 - RNA, 19 nt, Homo sapiens
  misc_RNA (1)...(19): siRNA sense strand
gaaagaacuccuauuuggu

SEQ ID NO: 2083605 - RNA, 19 nt, Homo sapiens
  misc_RNA (1)...(19): siRNA sense strand
gaaucucucacaugaacua

SEQ ID NO: 2083606 - RNA, 19 nt, Homo sapiens
  misc_RNA (1)...(19): siRNA sense strand
cagauaauuugcugugugu

SEQ ID NO: 2083607 - RNA, 19 nt, Homo sapiens
  misc_RNA (1)...(19): siRNA sense strand
cagaguauauuccaagucu

SEQ ID NO: 2083608 - RNA, 19 nt, Homo sapiens
  misc_RNA (1)...(19): siRNA sense strand
uaacguuggcuuucauauu

SEQ ID NO: 2083609 - RNA, 19 nt, Homo sapiens
  misc_RNA (1)...(19): siRNA sense strand
uacaguugcuuacgaaaug

SEQ ID NO: 2083610 - RNA, 19 nt, Homo sapiens
  misc_RNA (1)...(19): siRNA sense strand
agagucagauacuauaguu

SEQ ID NO: 2083611 - RNA, 19 nt, Homo sapiens
  misc_RNA (1)...(19): siRNA sense strand
gcgagagucagauacuaua

SEQ ID NO: 2083612 - RNA, 19 nt, Homo sapiens
  misc_RNA (1)...(19): siRNA sense strand
gguugggauuuaugcaaua

SEQ ID NO: 2083613 - RNA, 19 nt, Homo sapiens
  misc_RNA (1)...(19): siRNA sense strand
ggaauuucuuugaaugaag

SEQ ID NO: 2083614 - RNA, 19 nt, Homo sapiens
  misc_RNA (1)...(19): siRNA sense strand
ggagauaauaccaucaaau

SEQ ID NO: 2083615 - RNA, 19 nt, Homo sapiens
  misc_RNA (1)...(19): siRNA sense strand
uaugggaucuuuccucauc

SEQ ID NO: 2083616 - RNA, 19 nt, Homo sapiens
  misc_RNA (1)...(19): siRNA sense strand
aaagauacccgucaauagu

SEQ ID NO: 2083617 - RNA, 19 nt, Homo sapiens
  misc_RNA (1)...(19): siRNA sense strand
gaggcugaccuuucacuuu

SEQ ID NO: 2083618 - RNA, 19 nt, Homo sapiens
  misc_RNA (1)...(19): siRNA sense strand
cagguggagucuucaugua

SEQ ID NO: 2083619 - RNA, 19 nt, Homo sapiens
  misc_RNA (1)...(19): siRNA sense strand
ggcacccgguugagaauuu

SEQ ID NO: 2083620 - RNA, 19 nt, Homo sapiens
  misc_RNA (1)...(19): siRNA sense strand
ugggauaucuuuacugaag

SEQ ID NO: 2083621 - RNA, 19 nt, Homo sapiens
  misc_RNA (1)...(19): siRNA sense strand
cauggucucucuucgaaau

SEQ ID NO: 2083622 - RNA, 19 nt, Homo sapiens
  misc_RNA (1)...(19): siRNA sense strand
cacauggucucucuucgaa

SEQ ID NO: 2083623 - RNA, 19 nt, Homo sapiens
  misc_RNA (1)...(19): siRNA sense strand
gacuauuucucugggcuua

SEQ ID NO: 2083624 - RNA, 19 nt, Homo sapiens
  misc_RNA (1)...(19): siRNA sense strand
aacguuggcuuucauauuc

SEQ ID NO: 2083625 - RNA, 19 nt, Homo sapiens
  misc_RNA (1)...(19): siRNA sense strand
ugugggauaucuuuacuga

SEQ ID NO: 2083626 - RNA, 19 nt, Homo sapiens
  misc_RNA (1)...(19): siRNA sense strand
caaaauuguuucugucuug

SEQ ID NO: 2083627 - RNA, 19 nt, Homo sapiens
  misc_RNA (1)...(19): siRNA sense strand
aaugguaacugugagauga

SEQ ID NO: 2083628 - RNA, 19 nt, Homo sapiens
  misc_RNA (1)...(19): siRNA sense strand
uaagaaugaaucccaugua

SEQ ID NO: 2083629 - RNA, 19 nt, Homo sapiens
  misc_RNA (1)...(19): siRNA sense strand
gcagguaacugaagcaaua

SEQ ID NO: 2083630 - RNA, 19 nt, Homo sapiens
  misc_RNA (1)...(19): siRNA sense strand
uaacaugccuuuagaauug

SEQ ID NO: 2083631 - RNA, 19 nt, Homo sapiens
  misc_RNA (1)...(19): siRNA sense strand
gaagauaauuucucacuga

SEQ ID NO: 2083632 - RNA, 19 nt, Homo sapiens
  misc_RNA (1)...(19): siRNA sense strand
ggagaaagagcacgaauua

SEQ ID NO: 2083633 - RNA, 19 nt, Homo sapiens
  misc_RNA (1)...(19): siRNA sense strand
gaacagagccgucccuuug

SEQ ID NO: 2083634 - RNA, 19 nt, Homo sapiens
  misc_RNA (1)...(19): siRNA sense strand
gaaggugguucuuuaguaa

SEQ ID NO: 2083635 - RNA, 19 nt, Homo sapiens
  misc_RNA (1)...(19): siRNA sense strand
gcagaugacucaguuuaua

SEQ ID NO: 2083636 - RNA, 19 nt, Homo sapiens
  misc_RNA (1)...(19): siRNA sense strand
ggaaggugguucuuuagua

SEQ ID NO: 2083637 - RNA, 19 nt, Homo sapiens
  misc_RNA (1)...(19): siRNA sense strand
guuggaagguuuaugauua

SEQ ID NO: 2083638 - RNA, 19 nt, Homo sapiens
  misc_RNA (1)...(19): siRNA sense strand
cgaaagaacuccuauuugg

SEQ ID NO: 2083639 - RNA, 19 nt, Homo sapiens
  misc_RNA (1)...(19): siRNA sense strand
caagauguccuuauaauug

SEQ ID NO: 2083640 - RNA, 19 nt, Homo sapiens
  misc_RNA (1)...(19): siRNA sense strand
ggaaagauacccgucaaua

SEQ ID NO: 2083641 - RNA, 19 nt, Homo sapiens
  misc_RNA (1)...(19): siRNA sense strand
gcacuagccaagccuauua

SEQ ID NO: 2083642 - RNA, 19 nt, Homo sapiens
  misc_RNA (1)...(19): siRNA sense strand
gauaauuucucacugaugu

SEQ ID NO: 2083643 - RNA, 19 nt, Homo sapiens
  misc_RNA (1)...(19): siRNA sense strand
gcaagggacuucucuaaac

SEQ ID NO: 2083644 - RNA, 19 nt, Homo sapiens
  misc_RNA (1)...(19): siRNA sense strand
gaauuggcauguagaguug

SEQ ID NO: 2083645 - RNA, 19 nt, Homo sapiens
  misc_RNA (1)...(19): siRNA sense strand
gaagaugggacaauuauca

SEQ ID NO: 2083646 - RNA, 19 nt, Homo sapiens
  misc_RNA (1)...(19): siRNA sense strand
gaucuuuccucaucuauca

SEQ ID NO: 2083647 - RNA, 19 nt, Homo sapiens
  misc_RNA (1)...(19): siRNA sense strand
gcauuaagcaccucaauau

SEQ ID NO: 2083648 - RNA, 19 nt, Homo sapiens
  misc_RNA (1)...(19): siRNA sense strand
gaacugcuguagucacuuc

SEQ ID NO: 2083649 - RNA, 19 nt, Homo sapiens
  misc_RNA (1)...(19): siRNA sense strand
acacugcaaucuguuauua

SEQ ID NO: 2083650 - RNA, 19 nt, Homo sapiens
  misc_RNA (1)...(19): siRNA sense strand
ugacagaugugccuuggaa

SEQ ID NO: 2083651 - RNA, 19 nt, Homo sapiens
  misc_RNA (1)...(19): siRNA sense strand
gaugggacaauuaucauua

SEQ ID NO: 2083652 - RNA, 19 nt, Homo sapiens
  misc_RNA (1)...(19): siRNA sense strand
gaacuccuauuuggucauu

SEQ ID NO: 2083653 - RNA, 19 nt, Homo sapiens
  misc_RNA (1)...(19): siRNA sense strand
ggaauggacagaagaacua

SEQ ID NO: 2083654 - RNA, 19 nt, Homo sapiens
  misc_RNA (1)...(19): siRNA sense strand
gaugagaggugcugggaau

SEQ ID NO: 2083655 - RNA, 19 nt, Homo sapiens
  misc_RNA (1)...(19): siRNA sense strand
gauguugacucuuccaguu

SEQ ID NO: 2083656 - RNA, 19 nt, Homo sapiens
  misc_RNA (1)...(19): siRNA sense strand
agaaagagcacgaauuauu

SEQ ID NO: 2083657 - RNA, 19 nt, Homo sapiens
  misc_RNA (1)...(19): siRNA sense strand
gaccuggacucauguguga

SEQ ID NO: 2083658 - RNA, 19 nt, Homo sapiens
  misc_RNA (1)...(19): siRNA sense strand
gaaacaggcacuuuggaaa

SEQ ID NO: 2083659 - RNA, 19 nt, Homo sapiens
  misc_RNA (1)...(19): siRNA sense strand
gaaagauacccgucaauag

SEQ ID NO: 2083660 - RNA, 19 nt, Homo sapiens
  misc_RNA (1)...(19): siRNA sense strand
gagcaagggacuucucuaa

SEQ ID NO: 2083661 - RNA, 19 nt, Homo sapiens
  misc_RNA (1)...(19): siRNA sense strand
ggacucaugugugaucuug

SEQ ID NO: 2083662 - RNA, 19 nt, Homo sapiens
  misc_RNA (1)...(19): siRNA sense strand
cagaagauggucacaguua

SEQ ID NO: 2083663 - RNA, 19 nt, Homo sapiens
  misc_RNA (1)...(19): siRNA sense strand
ggagauguguguuuggaau

SEQ ID NO: 2083664 - RNA, 19 nt, Homo sapiens
  misc_RNA (1)...(19): siRNA sense strand
cuacaugaaugaaaggaaa

SEQ ID NO: 2083665 - RNA, 19 nt, Homo sapiens
  misc_RNA (1)...(19): siRNA sense strand
ucuggaaggugguucuuua

SEQ ID NO: 2083666 - RNA, 19 nt, Homo sapiens
  misc_RNA (1)...(19): siRNA sense strand
cagcaucacugccaucaug

SEQ ID NO: 2083667 - RNA, 19 nt, Homo sapiens
  misc_RNA (1)...(19): siRNA sense strand
cagcuucgguaacauguuu

SEQ ID NO: 2083668 - RNA, 19 nt, Homo sapiens
  misc_RNA (1)...(19): siRNA sense strand
caacaacacaugaagaguu

SEQ ID NO: 2083669 - RNA, 19 nt, Homo sapiens
  misc_RNA (1)...(19): siRNA sense strand
guuuauaucugggaaauug

SEQ ID NO: 2083670 - RNA, 19 nt, Homo sapiens
  misc_RNA (1)...(19): siRNA sense strand
ugacugaaguuaguagaaa

SEQ ID NO: 2083671 - RNA, 19 nt, Homo sapiens
  misc_RNA (1)...(19): siRNA sense strand
aaagcaagaugucuaugaa

SEQ ID NO: 2083672 - RNA, 19 nt, Homo sapiens
  misc_RNA (1)...(19): siRNA sense strand
gacagaagauggucacagu

SEQ ID NO: 2083673 - RNA, 19 nt, Homo sapiens
  misc_RNA (1)...(19): siRNA sense strand
ucacugauguugccagguu

SEQ ID NO: 2083674 - RNA, 19 nt, Homo sapiens
  misc_RNA (1)...(19): siRNA sense strand
caagggacuucucuaaaca

SEQ ID NO: 2083675 - RNA, 19 nt, Homo sapiens
  misc_RNA (1)...(19): siRNA sense strand
ugugugaucuugugggaua

SEQ ID NO: 2083676 - RNA, 19 nt, Homo sapiens
  misc_RNA (1)...(19): siRNA sense strand
gaagucucaggaagaauua

SEQ ID NO: 2083677 - RNA, 19 nt, Homo sapiens
  misc_RNA (1)...(19): siRNA sense strand
ggaguaacguuggcuuuca

SEQ ID NO: 2083678 - RNA, 19 nt, Homo sapiens
  misc_RNA (1)...(19): siRNA sense strand
ggaagagugcuuaaagaga

SEQ ID NO: 2083679 - RNA, 19 nt, Homo sapiens
  misc_RNA (1)...(19): siRNA sense strand
gaaguucaacaacacauga

SEQ ID NO: 2083680 - RNA, 19 nt, Homo sapiens
  misc_RNA (1)...(19): siRNA sense strand
ggacuugucagauaaauac

SEQ ID NO: 2083681 - RNA, 19 nt, Homo sapiens
  misc_RNA (1)...(19): siRNA sense strand
cacaugaacuaaagauuuc

SEQ ID NO: 2083682 - RNA, 19 nt, Homo sapiens
  misc_RNA (1)...(19): siRNA sense strand
gggaauuucuuugaaugaa

SEQ ID NO: 2083683 - RNA, 19 nt, Homo sapiens
  misc_RNA (1)...(19): siRNA sense strand
gguuacugaugccaaauuu

SEQ ID NO: 2083684 - RNA, 19 nt, Homo sapiens
  misc_RNA (1)...(19): siRNA sense strand
uaagguuacugaugccaaa

SEQ ID NO: 2083685 - RNA, 19 nt, Homo sapiens
  misc_RNA (1)...(19): siRNA sense strand
guuaugggcuacaugaaug

SEQ ID NO: 2083686 - RNA, 19 nt, Homo sapiens
  misc_RNA (1)...(19): siRNA sense strand
ucuggaaucucucacauga

SEQ ID NO: 2083687 - RNA, 19 nt, Homo sapiens
  misc_RNA (1)...(19): siRNA sense strand
gcacauauacugagagacu

SEQ ID NO: 2083688 - RNA, 19 nt, Homo sapiens
  misc_RNA (1)...(19): siRNA sense strand
gaagaguuugggaaagaua

SEQ ID NO: 2083689 - RNA, 19 nt, Homo sapiens
  misc_RNA (1)...(19): siRNA sense strand
ucagugauguugacucuuc

SEQ ID NO: 2083690 - RNA, 19 nt, Homo sapiens
  misc_RNA (1)...(19): siRNA sense strand
cagagacacuuaagcacaa

SEQ ID NO: 2083691 - RNA, 19 nt, Homo sapiens
  misc_RNA (1)...(19): siRNA sense strand
gaaaugggcaguucuuugc

SEQ ID NO: 2083692 - RNA, 19 nt, Homo sapiens
  misc_RNA (1)...(19): siRNA sense strand
cuaaacagcccuacauugu

SEQ ID NO: 2083693 - RNA, 19 nt, Homo sapiens
  misc_RNA (1)...(19): siRNA sense strand
aacaacacaugaagaguuu

SEQ ID NO: 2083694 - RNA, 19 nt, Homo sapiens
  misc_RNA (1)...(19): siRNA sense strand
gaaaugguaagaaugaauc

SEQ ID NO: 2083695 - RNA, 19 nt, Homo sapiens
  misc_RNA (1)...(19): siRNA sense strand
uuuaaugucuugccuguga

SEQ ID NO: 2083696 - RNA, 19 nt, Homo sapiens
  misc_RNA (1)...(19): siRNA sense strand
gaucuugugggauaucuuu

SEQ ID NO: 2083697 - RNA, 19 nt, Homo sapiens
  misc_RNA (1)...(19): siRNA sense strand
caugagaauucaagaagau

SEQ ID NO: 2083698 - RNA, 19 nt, Homo sapiens
  misc_RNA (1)...(19): siRNA sense strand
cagccacucuuccaaauca

SEQ ID NO: 2083699 - RNA, 19 nt, Homo sapiens
  misc_RNA (1)...(19): siRNA sense strand
gugcagaugacucaguuua

SEQ ID NO: 2083700 - RNA, 19 nt, Homo sapiens
  misc_RNA (1)...(19): siRNA sense strand
gguaacauguuuggcaaga

SEQ ID NO: 2083701 - RNA, 19 nt, Homo sapiens
  misc_RNA (1)...(19): siRNA sense strand
gcgaaagaacuccuauuug

SEQ ID NO: 2083702 - RNA, 19 nt, Homo sapiens
  misc_RNA (1)...(19): siRNA sense strand
uagccaagccuauuacuga

SEQ ID NO: 2083703 - RNA, 19 nt, Homo sapiens
  misc_RNA (1)...(19): siRNA sense strand
cauauacccugcugaugga

SEQ ID NO: 2083704 - RNA, 19 nt, Homo sapiens
  misc_RNA (1)...(19): siRNA sense strand
gaaagaacuccuauuuggu

SEQ ID NO: 2083705 - RNA, 19 nt, Homo sapiens
  misc_RNA (1)...(19): siRNA sense strand
gaaucucucacaugaacua

SEQ ID NO: 2083706 - RNA, 19 nt, Homo sapiens
  misc_RNA (1)...(19): siRNA sense strand
cagauaauuugcugugugu

SEQ ID NO: 2083707 - RNA, 19 nt, Homo sapiens
  misc_RNA (1)...(19): siRNA sense strand
cagaguauauuccaagucu

SEQ ID NO: 2083708 - RNA, 19 nt, Homo sapiens
  misc_RNA (1)...(19): siRNA sense strand
uaacguuggcuuucauauu

SEQ ID NO: 2083709 - RNA, 19 nt, Homo sapiens
  misc_RNA (1)...(19): siRNA sense strand
uacaguugcuuacgaaaug

SEQ ID NO: 2083710 - RNA, 19 nt, Homo sapiens
  misc_RNA (1)...(19): siRNA sense strand
agagucagauacuauaguu

SEQ ID NO: 2083711 - RNA, 19 nt, Homo sapiens
  misc_RNA (1)...(19): siRNA sense strand
gcgagagucagauacuaua

SEQ ID NO: 2083712 - RNA, 19 nt, Homo sapiens
  misc_RNA (1)...(19): siRNA sense strand
gguugggauuuaugcaaua

SEQ ID NO: 2083713 - RNA, 19 nt, Homo sapiens
  misc_RNA (1)...(19): siRNA sense strand
ggaauuucuuugaaugaag

SEQ ID NO: 2083714 - RNA, 19 nt, Homo sapiens
  misc_RNA (1)...(19): siRNA sense strand
ggagauaauaccaucaaau

SEQ ID NO: 2083715 - RNA, 19 nt, Homo sapiens
  misc_RNA (1)...(19): siRNA sense strand
uaugggaucuuuccucauc

SEQ ID NO: 2083716 - RNA, 19 nt, Homo sapiens
  misc_RNA (1)...(19): siRNA sense strand
aaagauacccgucaauagu

SEQ ID NO: 2083717 - RNA, 19 nt, Homo sapiens
  misc_RNA (1)...(19): siRNA sense strand
gaggcugaccuuucacuuu

SEQ ID NO: 2083718 - RNA, 19 nt, Homo sapiens
  misc_RNA (1)...(19): siRNA sense strand
cagguggagucuucaugua

SEQ ID NO: 2083719 - RNA, 19 nt, Homo sapiens
  misc_RNA (1)...(19): siRNA sense strand
ggcacccgguugagaauuu

SEQ ID NO: 2083720 - RNA, 19 nt, Homo sapiens
  misc_RNA (1)...(19): siRNA sense strand
ugggauaucuuuacugaag

SEQ ID NO: 2083721 - RNA, 19 nt, Homo sapiens
  misc_RNA (1)...(19): siRNA sense strand
cauggucucucuucgaaau

SEQ ID NO: 2083722 - RNA, 19 nt, Homo sapiens
  misc_RNA (1)...(19): siRNA sense strand
cacauggucucucuucgaa

SEQ ID NO: 2083723 - RNA, 19 nt, Homo sapiens
  misc_RNA (1)...(19): siRNA sense strand
gacuauuucucugggcuua

SEQ ID NO: 2083724 - RNA, 19 nt, Homo sapiens
  misc_RNA (1)...(19): siRNA sense strand
aacguuggcuuucauauuc

SEQ ID NO: 2083725 - RNA, 19 nt, Homo sapiens
  misc_RNA (1)...(19): siRNA sense strand
ugugggauaucuuuacuga

SEQ ID NO: 2083726 - RNA, 19 nt, Homo sapiens
  misc_RNA (1)...(19): siRNA sense strand
caaaauuguuucugucuug

SEQ ID NO: 2083727 - RNA, 19 nt, Homo sapiens
  misc_RNA (1)...(19): siRNA sense strand
aaugguaacugugagauga

SEQ ID NO: 2083728 - RNA, 19 nt, Homo sapiens
  misc_RNA (1)...(19): siRNA sense strand
uaagaaugaaucccaugua

SEQ ID NO: 2083729 - RNA, 19 nt, Homo sapiens
  misc_RNA (1)...(19): siRNA sense strand
gaaauuauguggacucuuu

SEQ ID NO: 2083730 - RNA, 19 nt, Homo sapiens
  misc_RNA (1)...(19): siRNA sense strand
ggaaggagcuagauucuga

SEQ ID NO: 2083731 - RNA, 19 nt, Homo sapiens
  misc_RNA (1)...(19): siRNA sense strand
ggaaacaccacaucuaaua

SEQ ID NO: 2083732 - RNA, 19 nt, Homo sapiens
  misc_RNA (1)...(19): siRNA sense strand
gaagcuaguucucaacaaa

SEQ ID NO: 2083733 - RNA, 19 nt, Homo sapiens
  misc_RNA (1)...(19): siRNA sense strand
gaaacaagaucuacugaag

SEQ ID NO: 2083734 - RNA, 19 nt, Homo sapiens
  misc_RNA (1)...(19): siRNA sense strand
ugacugaagugaaaucuaa

SEQ ID NO: 2083735 - RNA, 19 nt, Homo sapiens
  misc_RNA (1)...(19): siRNA sense strand
ggacaauuauccaaacuga

SEQ ID NO: 2083736 - RNA, 19 nt, Homo sapiens
  misc_RNA (1)...(19): siRNA sense strand
gauaugcucucagucuuua

SEQ ID NO: 2083737 - RNA, 19 nt, Homo sapiens
  misc_RNA (1)...(19): siRNA sense strand
gaugaagccuggaagguuu

SEQ ID NO: 2083738 - RNA, 19 nt, Homo sapiens
  misc_RNA (1)...(19): siRNA sense strand
gcaccuugcuggcuaauau

SEQ ID NO: 2083739 - RNA, 19 nt, Homo sapiens
  misc_RNA (1)...(19): siRNA sense strand
gaacucuacucccagcuaa

SEQ ID NO: 2083740 - RNA, 19 nt, Homo sapiens
  misc_RNA (1)...(19): siRNA sense strand
gaagaugugucaauggaau

SEQ ID NO: 2083741 - RNA, 19 nt, Homo sapiens
  misc_RNA (1)...(19): siRNA sense strand
gaucauaaagucacuguaa

SEQ ID NO: 2083742 - RNA, 19 nt, Homo sapiens
  misc_RNA (1)...(19): siRNA sense strand
cuaaagaucuuggacaauu

SEQ ID NO: 2083743 - RNA, 19 nt, Homo sapiens
  misc_RNA (1)...(19): siRNA sense strand
ggaauugaauccauuuauc

SEQ ID NO: 2083744 - RNA, 19 nt, Homo sapiens
  misc_RNA (1)...(19): siRNA sense strand
gagcaccgauuauaugaau

SEQ ID NO: 2083745 - RNA, 19 nt, Homo sapiens
  misc_RNA (1)...(19): siRNA sense strand
gaaaaucaauguggagaua

SEQ ID NO: 2083746 - RNA, 19 nt, Homo sapiens
  misc_RNA (1)...(19): siRNA sense strand
ugauguggcuaaagaauuu

SEQ ID NO: 2083747 - RNA, 19 nt, Homo sapiens
  misc_RNA (1)...(19): siRNA sense strand
gaaacaccacaucuaauaa

SEQ ID NO: 2083748 - RNA, 19 nt, Homo sapiens
  misc_RNA (1)...(19): siRNA sense strand
ccaguaugcugcaauugua

SEQ ID NO: 2083749 - RNA, 19 nt, Homo sapiens
  misc_RNA (1)...(19): siRNA sense strand
augagaaucuguuccauua

SEQ ID NO: 2083750 - RNA, 19 nt, Homo sapiens
  misc_RNA (1)...(19): siRNA sense strand
acacaacaguuucaacaaa

SEQ ID NO: 2083751 - RNA, 19 nt, Homo sapiens
  misc_RNA (1)...(19): siRNA sense strand
aagagaagguugcuccaua

SEQ ID NO: 2083752 - RNA, 19 nt, Homo sapiens
  misc_RNA (1)...(19): siRNA sense strand
cgaacuaaaucaaaugaga

SEQ ID NO: 2083753 - RNA, 19 nt, Homo sapiens
  misc_RNA (1)...(19): siRNA sense strand
gaagcuaguacuauucuaa

SEQ ID NO: 2083754 - RNA, 19 nt, Homo sapiens
  misc_RNA (1)...(19): siRNA sense strand
ggaaugcccuaauccugaa

SEQ ID NO: 2083755 - RNA, 19 nt, Homo sapiens
  misc_RNA (1)...(19): siRNA sense strand
acacugaugguuacuauua

SEQ ID NO: 2083756 - RNA, 19 nt, Homo sapiens
  misc_RNA (1)...(19): siRNA sense strand
ccaagacaaugcgcuauaa

SEQ ID NO: 2083757 - RNA, 19 nt, Homo sapiens
  misc_RNA (1)...(19): siRNA sense strand
gaagcauuaucucacuuaa

SEQ ID NO: 2083758 - RNA, 19 nt, Homo sapiens
  misc_RNA (1)...(19): siRNA sense strand
gaagguugcuccauaucau

SEQ ID NO: 2083759 - RNA, 19 nt, Homo sapiens
  misc_RNA (1)...(19): siRNA sense strand
gcaagagcaccgauuauau

SEQ ID NO: 2083760 - RNA, 19 nt, Homo sapiens
  misc_RNA (1)...(19): siRNA sense strand
uaacagacccgaguaagaa

SEQ ID NO: 2083761 - RNA, 19 nt, Homo sapiens
  misc_RNA (1)...(19): siRNA sense strand
cagagaagaucgaauuauc

SEQ ID NO: 2083762 - RNA, 19 nt, Homo sapiens
  misc_RNA (1)...(19): siRNA sense strand
caaaugagagcaaauggaa

SEQ ID NO: 2083763 - RNA, 19 nt, Homo sapiens
  misc_RNA (1)...(19): siRNA sense strand
gaugaugcuucccaagaaa

SEQ ID NO: 2083764 - RNA, 19 nt, Homo sapiens
  misc_RNA (1)...(19): siRNA sense strand
gugaugauguggcuaaaga

SEQ ID NO: 2083765 - RNA, 19 nt, Homo sapiens
  misc_RNA (1)...(19): siRNA sense strand
auaaagugcugcuccagua

SEQ ID NO: 2083766 - RNA, 19 nt, Homo sapiens
  misc_RNA (1)...(19): siRNA sense strand
aaacgaagaugugucaaug

SEQ ID NO: 2083767 - RNA, 19 nt, Homo sapiens
  misc_RNA (1)...(19): siRNA sense strand
gcaccgauuauaugaauuu

SEQ ID NO: 2083768 - RNA, 19 nt, Homo sapiens
  misc_RNA (1)...(19): siRNA sense strand
gaccaaccaccaagaauuu

SEQ ID NO: 2083769 - RNA, 19 nt, Homo sapiens
  misc_RNA (1)...(19): siRNA sense strand
uuucaugucugucuucuaa

SEQ ID NO: 2083770 - RNA, 19 nt, Homo sapiens
  misc_RNA (1)...(19): siRNA sense strand
gaauacuccuugugguuug

SEQ ID NO: 2083771 - RNA, 19 nt, Homo sapiens
  misc_RNA (1)...(19): siRNA sense strand
ggaccaaccaccaagaauu

SEQ ID NO: 2083772 - RNA, 19 nt, Homo sapiens
  misc_RNA (1)...(19): siRNA sense strand
gcacaugauucgagaggau

SEQ ID NO: 2083773 - RNA, 19 nt, Homo sapiens
  misc_RNA (1)...(19): siRNA sense strand
uaagaacagugcagcaaug

SEQ ID NO: 2083774 - RNA, 19 nt, Homo sapiens
  misc_RNA (1)...(19): siRNA sense strand
cuacacaccuguccugaau

SEQ ID NO: 2083775 - RNA, 19 nt, Homo sapiens
  misc_RNA (1)...(19): siRNA sense strand
ggauauuccucgugaagau

SEQ ID NO: 2083776 - RNA, 19 nt, Homo sapiens
  misc_RNA (1)...(19): siRNA sense strand
caagagcaccgauuauaug

SEQ ID NO: 2083777 - RNA, 19 nt, Homo sapiens
  misc_RNA (1)...(19): siRNA sense strand
gagaagauuugcaaagacu

SEQ ID NO: 2083778 - RNA, 19 nt, Homo sapiens
  misc_RNA (1)...(19): siRNA sense strand
gcccagaucuucagucucu

SEQ ID NO: 2083779 - RNA, 19 nt, Homo sapiens
  misc_RNA (1)...(19): siRNA sense strand
gaacagugcagcaauggau

SEQ ID NO: 2083780 - RNA, 19 nt, Homo sapiens
  misc_RNA (1)...(19): siRNA sense strand
gcaaagacuaucaauaaag

SEQ ID NO: 2083781 - RNA, 19 nt, Homo sapiens
  misc_RNA (1)...(19): siRNA sense strand
guuaacaaguaucaccuuu

SEQ ID NO: 2083782 - RNA, 19 nt, Homo sapiens
  misc_RNA (1)...(19): siRNA sense strand
ugaaucaguuuccucaaga

SEQ ID NO: 2083783 - RNA, 19 nt, Homo sapiens
  misc_RNA (1)...(19): siRNA sense strand
gagaaucuguuccauuacu

SEQ ID NO: 2083784 - RNA, 19 nt, Homo sapiens
  misc_RNA (1)...(19): siRNA sense strand
ucaccaaaguacaaugaaa

SEQ ID NO: 2083785 - RNA, 19 nt, Homo sapiens
  misc_RNA (1)...(19): siRNA sense strand
ucaauggaauuccuucaug

SEQ ID NO: 2083786 - RNA, 19 nt, Homo sapiens
  misc_RNA (1)...(19): siRNA sense strand
guugaccuguuaacaagua

SEQ ID NO: 2083787 - RNA, 19 nt, Homo sapiens
  misc_RNA (1)...(19): siRNA sense strand
caacugccaugaacucuac

SEQ ID NO: 2083788 - RNA, 19 nt, Homo sapiens
  misc_RNA (1)...(19): siRNA sense strand
cauuaagucucucagcaaa

SEQ ID NO: 2083789 - RNA, 19 nt, Homo sapiens
  misc_RNA (1)...(19): siRNA sense strand
aaucagcgguuaugcaaga

SEQ ID NO: 2083790 - RNA, 19 nt, Homo sapiens
  misc_RNA (1)...(19): siRNA sense strand
gaaaaucccagaagucaaa

SEQ ID NO: 2083791 - RNA, 19 nt, Homo sapiens
  misc_RNA (1)...(19): siRNA sense strand
aaacuggaaugcccuaauc

SEQ ID NO: 2083792 - RNA, 19 nt, Homo sapiens
  misc_RNA (1)...(19): siRNA sense strand
gaaucagagcuuugaaauu

SEQ ID NO: 2083793 - RNA, 19 nt, Homo sapiens
  misc_RNA (1)...(19): siRNA sense strand
ggaugucugguacaacuua

SEQ ID NO: 2083794 - RNA, 19 nt, Homo sapiens
  misc_RNA (1)...(19): siRNA sense strand
ggaugcagagauuguguua

SEQ ID NO: 2083795 - RNA, 19 nt, Homo sapiens
  misc_RNA (1)...(19): siRNA sense strand
ggaagcuaguucucaacaa

SEQ ID NO: 2083796 - RNA, 19 nt, Homo sapiens
  misc_RNA (1)...(19): siRNA sense strand
ucagaucgauuugcugcua

SEQ ID NO: 2083797 - RNA, 19 nt, Homo sapiens
  misc_RNA (1)...(19): siRNA sense strand
uggcuaccaucaagcaaua

SEQ ID NO: 2083798 - RNA, 19 nt, Homo sapiens
  misc_RNA (1)...(19): siRNA sense strand
cccaagaaauaguugauga

SEQ ID NO: 2083799 - RNA, 19 nt, Homo sapiens
  misc_RNA (1)...(19): siRNA sense strand
gaacgggagaucauaaagu

SEQ ID NO: 2083800 - RNA, 19 nt, Homo sapiens
  misc_RNA (1)...(19): siRNA sense strand
gguuauaauugaagagugu

SEQ ID NO: 2083801 - RNA, 19 nt, Homo sapiens
  misc_RNA (1)...(19): siRNA sense strand
gagcucagcgucacuuaug

SEQ ID NO: 2083802 - RNA, 19 nt, Homo sapiens
  misc_RNA (1)...(19): siRNA sense strand
gaagauuugcaaagacuau

SEQ ID NO: 2083803 - RNA, 19 nt, Homo sapiens
  misc_RNA (1)...(19): siRNA sense strand
ugaugaugcuucccaagaa

SEQ ID NO: 2083804 - RNA, 19 nt, Homo sapiens
  misc_RNA (1)...(19): siRNA sense strand
acugaugccuugauaaaga

SEQ ID NO: 2083805 - RNA, 19 nt, Homo sapiens
  misc_RNA (1)...(19): siRNA sense strand
gcuccaguaugcugcaauu

SEQ ID NO: 2083806 - RNA, 19 nt, Homo sapiens
  misc_RNA (1)...(19): siRNA sense strand
agagaagguugcuccauau

SEQ ID NO: 2083807 - RNA, 19 nt, Homo sapiens
  misc_RNA (1)...(19): siRNA sense strand
guaagggcuugccuggauu

SEQ ID NO: 2083808 - RNA, 19 nt, Homo sapiens
  misc_RNA (1)...(19): siRNA sense strand
cuacugaugccuugauaaa

SEQ ID NO: 2083809 - RNA, 19 nt, Homo sapiens
  misc_RNA (1)...(19): siRNA sense strand
gggcuugccuggauucuac

SEQ ID NO: 2083810 - RNA, 19 nt, Homo sapiens
  misc_RNA (1)...(19): siRNA sense strand
ggaugaagccuggaagguu

SEQ ID NO: 2083811 - RNA, 19 nt, Homo sapiens
  misc_RNA (1)...(19): siRNA sense strand
gcagagauuguguuaagau

SEQ ID NO: 2083812 - RNA, 19 nt, Homo sapiens
  misc_RNA (1)...(19): siRNA sense strand
ggauaaaacugccuacaca

SEQ ID NO: 2083813 - RNA, 19 nt, Homo sapiens
  misc_RNA (1)...(19): siRNA sense strand
aaacuuuccugcaagcaau

SEQ ID NO: 2083814 - RNA, 19 nt, Homo sapiens
  misc_RNA (1)...(19): siRNA sense strand
acacaccuguccugaauca

SEQ ID NO: 2083815 - RNA, 19 nt, Homo sapiens
  misc_RNA (1)...(19): siRNA sense strand
uguaagggcuugccuggau

SEQ ID NO: 2083816 - RNA, 19 nt, Homo sapiens
  misc_RNA (1)...(19): siRNA sense strand
gcuaugcguuauggaauug

SEQ ID NO: 2083817 - RNA, 19 nt, Homo sapiens
  misc_RNA (1)...(19): siRNA sense strand
cuacagaacauagcagaaa

SEQ ID NO: 2083818 - RNA, 19 nt, Homo sapiens
  misc_RNA (1)...(19): siRNA sense strand
gaaaaggacagauaaguca

SEQ ID NO: 2083819 - RNA, 19 nt, Homo sapiens
  misc_RNA (1)...(19): siRNA sense strand
ugaagcauuaucucacuua

SEQ ID NO: 2083820 - RNA, 19 nt, Homo sapiens
  misc_RNA (1)...(19): siRNA sense strand
gcccuaauccugaagcauu

SEQ ID NO: 2083821 - RNA, 19 nt, Homo sapiens
  misc_RNA (1)...(19): siRNA sense strand
uuacacugaugguuacuau

SEQ ID NO: 2083822 - RNA, 19 nt, Homo sapiens
  misc_RNA (1)...(19): siRNA sense strand
cuuauuacacugaugguua

SEQ ID NO: 2083823 - RNA, 19 nt, Homo sapiens
  misc_RNA (1)...(19): siRNA sense strand
gaauccauuuaucaagcua

SEQ ID NO: 2083824 - RNA, 19 nt, Homo sapiens
  misc_RNA (1)...(19): siRNA sense strand
uauggaagcuaguucucaa

SEQ ID NO: 2083825 - RNA, 19 nt, Homo sapiens
  misc_RNA (1)...(19): siRNA sense strand
gccaagacaaugcgcuaua

SEQ ID NO: 2083826 - RNA, 19 nt, Homo sapiens
  misc_RNA (1)...(19): siRNA sense strand
ccgauuauaugaauuugca

SEQ ID NO: 2083827 - RNA, 19 nt, Homo sapiens
  misc_RNA (1)...(19): siRNA sense strand
aggaggaaauggccugaaa

SEQ ID NO: 2083828 - RNA, 19 nt, Homo sapiens
  misc_RNA (1)...(19): siRNA sense strand
gaaacuggaaugcccuaau

SEQ ID NO: 2083829 - RNA, 19 nt, Homo sapiens
  misc_RNA (1)...(19): siRNA sense strand
gaacugaccugauaauuaa

SEQ ID NO: 2083830 - RNA, 19 nt, Homo sapiens
  misc_RNA (1)...(19): siRNA sense strand
ggaaggagcuguaggaaau

SEQ ID NO: 2083831 - RNA, 19 nt, Homo sapiens
  misc_RNA (1)...(19): siRNA sense strand
gaaauuaguuugacaaguc

SEQ ID NO: 2083832 - RNA, 19 nt, Homo sapiens
  misc_RNA (1)...(19): siRNA sense strand
ggaacugaccugauaauua

SEQ ID NO: 2083833 - RNA, 19 nt, Homo sapiens
  misc_RNA (1)...(19): siRNA sense strand
gggaggaacugaccugaua

SEQ ID NO: 2083834 - RNA, 19 nt, Homo sapiens
  misc_RNA (1)...(19): siRNA sense strand
gaaggaagauacauucgaa

SEQ ID NO: 2083835 - RNA, 19 nt, Homo sapiens
  misc_RNA (1)...(19): siRNA sense strand
ccaaacagcuucauugaug

SEQ ID NO: 2083836 - RNA, 19 nt, Homo sapiens
  misc_RNA (1)...(19): siRNA sense strand
gaaaugagguaggaaagaa

SEQ ID NO: 2083837 - RNA, 19 nt, Homo sapiens
  misc_RNA (1)...(19): siRNA sense strand
gcagaagguuuaaauaaug

SEQ ID NO: 2083838 - RNA, 19 nt, Homo sapiens
  misc_RNA (1)...(19): siRNA sense strand
caaagaagauacaaguuga

SEQ ID NO: 2083839 - RNA, 19 nt, Homo sapiens
  misc_RNA (1)...(19): siRNA sense strand
ggaaaccucugaaucaaau

SEQ ID NO: 2083840 - RNA, 19 nt, Homo sapiens
  misc_RNA (1)...(19): siRNA sense strand
caagauaucugcauccaau

SEQ ID NO: 2083841 - RNA, 19 nt, Homo sapiens
  misc_RNA (1)...(19): siRNA sense strand
guacaacaguaaauuggua

SEQ ID NO: 2083842 - RNA, 19 nt, Homo sapiens
  misc_RNA (1)...(19): siRNA sense strand
ccaaagggauucuggaaau

SEQ ID NO: 2083843 - RNA, 19 nt, Homo sapiens
  misc_RNA (1)...(19): siRNA sense strand
ggacacagcugcuauucag

SEQ ID NO: 2083844 - RNA, 19 nt, Homo sapiens
  misc_RNA (1)...(19): siRNA sense strand
caugaaagcagaagguuua

SEQ ID NO: 2083845 - RNA, 19 nt, Homo sapiens
  misc_RNA (1)...(19): siRNA sense strand
ccugagaccuccugaaauu

SEQ ID NO: 2083846 - RNA, 19 nt, Homo sapiens
  misc_RNA (1)...(19): siRNA sense strand
gaaagcagaagguuuaaau

SEQ ID NO: 2083847 - RNA, 19 nt, Homo sapiens
  misc_RNA (1)...(19): siRNA sense strand
auacaucuguccucaguua

SEQ ID NO: 2083848 - RNA, 19 nt, Homo sapiens
  misc_RNA (1)...(19): siRNA sense strand
uaacugugauuccagcuaa

SEQ ID NO: 2083849 - RNA, 19 nt, Homo sapiens
  misc_RNA (1)...(19): siRNA sense strand
ccaaaccaaucauuucuug

SEQ ID NO: 2083850 - RNA, 19 nt, Homo sapiens
  misc_RNA (1)...(19): siRNA sense strand
gcuaugguccuauaauuaa

SEQ ID NO: 2083851 - RNA, 19 nt, Homo sapiens
  misc_RNA (1)...(19): siRNA sense strand
caaauccauugaugucuuu

SEQ ID NO: 2083852 - RNA, 19 nt, Homo sapiens
  misc_RNA (1)...(19): siRNA sense strand
gcacaaaucauuaacuaca

SEQ ID NO: 2083853 - RNA, 19 nt, Homo sapiens
  misc_RNA (1)...(19): siRNA sense strand
gaacauaacaacaucucuu

SEQ ID NO: 2083854 - RNA, 19 nt, Homo sapiens
  misc_RNA (1)...(19): siRNA sense strand
gcuacaacaugcuggagua

SEQ ID NO: 2083855 - RNA, 19 nt, Homo sapiens
  misc_RNA (1)...(19): siRNA sense strand
gggagaggccacuuuauaa

SEQ ID NO: 2083856 - RNA, 19 nt, Homo sapiens
  misc_RNA (1)...(19): siRNA sense strand
ccaaggaccuacucuauac

SEQ ID NO: 2083857 - RNA, 19 nt, Homo sapiens
  misc_RNA (1)...(19): siRNA sense strand
gagaauagccaaggaucua

SEQ ID NO: 2083858 - RNA, 19 nt, Homo sapiens
  misc_RNA (1)...(19): siRNA sense strand
ggaaauuaucguuguauug

SEQ ID NO: 2083859 - RNA, 19 nt, Homo sapiens
  misc_RNA (1)...(19): siRNA sense strand
gugaaacaccauucuauuu

SEQ ID NO: 2083860 - RNA, 19 nt, Homo sapiens
  misc_RNA (1)...(19): siRNA sense strand
gagaggccacuuuauaauu

SEQ ID NO: 2083861 - RNA, 19 nt, Homo sapiens
  misc_RNA (1)...(19): siRNA sense strand
ggaaaucccaaaccaauca

SEQ ID NO: 2083862 - RNA, 19 nt, Homo sapiens
  misc_RNA (1)...(19): siRNA sense strand
gaaaaguagcucaauguua

SEQ ID NO: 2083863 - RNA, 19 nt, Homo sapiens
  misc_RNA (1)...(19): siRNA sense strand
agagauguauggagaugua

SEQ ID NO: 2083864 - RNA, 19 nt, Homo sapiens
  misc_RNA (1)...(19): siRNA sense strand
ccacacaccaacaauuaua

SEQ ID NO: 2083865 - RNA, 19 nt, Homo sapiens
  misc_RNA (1)...(19): siRNA sense strand
caaagggauucuggaaauu

SEQ ID NO: 2083866 - RNA, 19 nt, Homo sapiens
  misc_RNA (1)...(19): siRNA sense strand
ggaugacacugcccugguu

SEQ ID NO: 2083867 - RNA, 19 nt, Homo sapiens
  misc_RNA (1)...(19): siRNA sense strand
gacccgcuauacuaucuua

SEQ ID NO: 2083868 - RNA, 19 nt, Homo sapiens
  misc_RNA (1)...(19): siRNA sense strand
acacugcccugguuucuug

SEQ ID NO: 2083869 - RNA, 19 nt, Homo sapiens
  misc_RNA (1)...(19): siRNA sense strand
ggagagauguauggagaug

SEQ ID NO: 2083870 - RNA, 19 nt, Homo sapiens
  misc_RNA (1)...(19): siRNA sense strand
caucuguccucaguuauaa

SEQ ID NO: 2083871 - RNA, 19 nt, Homo sapiens
  misc_RNA (1)...(19): siRNA sense strand
uagcuaugguccuauaauu

SEQ ID NO: 2083872 - RNA, 19 nt, Homo sapiens
  misc_RNA (1)...(19): siRNA sense strand
ggacaacucuaccuaugac

SEQ ID NO: 2083873 - RNA, 19 nt, Homo sapiens
  misc_RNA (1)...(19): siRNA sense strand
aaaggaaaccucugaauca

SEQ ID NO: 2083874 - RNA, 19 nt, Homo sapiens
  misc_RNA (1)...(19): siRNA sense strand
acaacaugcuggaguauau

SEQ ID NO: 2083875 - RNA, 19 nt, Homo sapiens
  misc_RNA (1)...(19): siRNA sense strand
caacaggaguauugcagau

SEQ ID NO: 2083876 - RNA, 19 nt, Homo sapiens
  misc_RNA (1)...(19): siRNA sense strand
ucaaagaagauacaaguug

SEQ ID NO: 2083877 - RNA, 19 nt, Homo sapiens
  misc_RNA (1)...(19): siRNA sense strand
ugaauggccagaaaguuua

SEQ ID NO: 2083878 - RNA, 19 nt, Homo sapiens
  misc_RNA (1)...(19): siRNA sense strand
uguauuagaugcucugaau

SEQ ID NO: 2083879 - RNA, 19 nt, Homo sapiens
  misc_RNA (1)...(19): siRNA sense strand
uauggcaacuuuaacugua

SEQ ID NO: 2083880 - RNA, 19 nt, Homo sapiens
  misc_RNA (1)...(19): siRNA sense strand
guaaucucaugauaucuga

SEQ ID NO: 2083881 - RNA, 19 nt, Homo sapiens
  misc_RNA (1)...(19): siRNA sense strand
ggaaaugguaaucucauga

SEQ ID NO: 2083882 - RNA, 19 nt, Homo sapiens
  misc_RNA (1)...(19): siRNA sense strand
gaccuacucuauacucuca

SEQ ID NO: 2083883 - RNA, 19 nt, Homo sapiens
  misc_RNA (1)...(19): siRNA sense strand
gaacauucagcaaauagug

SEQ ID NO: 2083884 - RNA, 19 nt, Homo sapiens
  misc_RNA (1)...(19): siRNA sense strand
cugcacaaaucauuaacua

SEQ ID NO: 2083885 - RNA, 19 nt, Homo sapiens
  misc_RNA (1)...(19): siRNA sense strand
ccauugaugucuuuaauac

SEQ ID NO: 2083886 - RNA, 19 nt, Homo sapiens
  misc_RNA (1)...(19): siRNA sense strand
ucaagacccuuugguguug

SEQ ID NO: 2083887 - RNA, 19 nt, Homo sapiens
  misc_RNA (1)...(19): siRNA sense strand
gaucagcuuuccaguccuu

SEQ ID NO: 2083888 - RNA, 19 nt, Homo sapiens
  misc_RNA (1)...(19): siRNA sense strand
ccacagaacauaacaacau

SEQ ID NO: 2083889 - RNA, 19 nt, Homo sapiens
  misc_RNA (1)...(19): siRNA sense strand
acagaacauucagcaaaua

SEQ ID NO: 2083890 - RNA, 19 nt, Homo sapiens
  misc_RNA (1)...(19): siRNA sense strand
gccaggcaccacuguauua

SEQ ID NO: 2083891 - RNA, 19 nt, Homo sapiens
  misc_RNA (1)...(19): siRNA sense strand
ugacauuaauagaggauga

SEQ ID NO: 2083892 - RNA, 19 nt, Homo sapiens
  misc_RNA (1)...(19): siRNA sense strand
ggagaggccacuuuauaau

SEQ ID NO: 2083893 - RNA, 19 nt, Homo sapiens
  misc_RNA (1)...(19): siRNA sense strand
cagcaucuccuccuucauu

SEQ ID NO: 2083894 - RNA, 19 nt, Homo sapiens
  misc_RNA (1)...(19): siRNA sense strand
gaguauugcagaucuauga

SEQ ID NO: 2083895 - RNA, 19 nt, Homo sapiens
  misc_RNA (1)...(19): siRNA sense strand
gaaccuggaaggagcugua

SEQ ID NO: 2083896 - RNA, 19 nt, Homo sapiens
  misc_RNA (1)...(19): siRNA sense strand
caaaggaaaccucugaauc

SEQ ID NO: 2083897 - RNA, 19 nt, Homo sapiens
  misc_RNA (1)...(19): siRNA sense strand
acaaagucauugccuauuc

SEQ ID NO: 2083898 - RNA, 19 nt, Homo sapiens
  misc_RNA (1)...(19): siRNA sense strand
aaaggcaccuggagagaug

SEQ ID NO: 2083899 - RNA, 19 nt, Homo sapiens
  misc_RNA (1)...(19): siRNA sense strand
gaaauuaucguuguauugc

SEQ ID NO: 2083900 - RNA, 19 nt, Homo sapiens
  misc_RNA (1)...(19): siRNA sense strand
aaaaguagcucaauguuag

SEQ ID NO: 2083901 - RNA, 19 nt, Homo sapiens
  misc_RNA (1)...(19): siRNA sense strand
ccaaugaucaugccaaaca

SEQ ID NO: 2083902 - RNA, 19 nt, Homo sapiens
  misc_RNA (1)...(19): siRNA sense strand
gaaguaaagccaggaaauc

SEQ ID NO: 2083903 - RNA, 19 nt, Homo sapiens
  misc_RNA (1)...(19): siRNA sense strand
caucagaaacucacauguu

SEQ ID NO: 2083904 - RNA, 19 nt, Homo sapiens
  misc_RNA (1)...(19): siRNA sense strand
gcuaacaccucaucuucca

SEQ ID NO: 2083905 - RNA, 19 nt, Homo sapiens
  misc_RNA (1)...(19): siRNA sense strand
gagccugccagcaauuaua

SEQ ID NO: 2083906 - RNA, 19 nt, Homo sapiens
  misc_RNA (1)...(19): siRNA sense strand
aaagggauucuggaaauua

SEQ ID NO: 2083907 - RNA, 19 nt, Homo sapiens
  misc_RNA (1)...(19): siRNA sense strand
caggauaacugcccuacca

SEQ ID NO: 2083908 - RNA, 19 nt, Homo sapiens
  misc_RNA (1)...(19): siRNA sense strand
aaacucacauguugguuca

SEQ ID NO: 2083909 - RNA, 19 nt, Homo sapiens
  misc_RNA (1)...(19): siRNA sense strand
cugaagaugaugcuauuua

SEQ ID NO: 2083910 - RNA, 19 nt, Homo sapiens
  misc_RNA (1)...(19): siRNA sense strand
gaaaugguaaucucaugau

SEQ ID NO: 2083911 - RNA, 19 nt, Homo sapiens
  misc_RNA (1)...(19): siRNA sense strand
gcagguccacagaacauaa

SEQ ID NO: 2083912 - RNA, 19 nt, Homo sapiens
  misc_RNA (1)...(19): siRNA sense strand
ggaaaugagguaggaaaga

SEQ ID NO: 2083913 - RNA, 19 nt, Homo sapiens
  misc_RNA (1)...(19): siRNA sense strand
ccacugauauucucaucuc

SEQ ID NO: 2083914 - RNA, 19 nt, Homo sapiens
  misc_RNA (1)...(19): siRNA sense strand
ugaagaguaucaaguaguc

SEQ ID NO: 2083915 - RNA, 19 nt, Homo sapiens
  misc_RNA (1)...(19): siRNA sense strand
caaagucauugccuauucu

SEQ ID NO: 2083916 - RNA, 19 nt, Homo sapiens
  misc_RNA (1)...(19): siRNA sense strand
agaggccacuuuauaauuc

SEQ ID NO: 2083917 - RNA, 19 nt, Homo sapiens
  misc_RNA (1)...(19): siRNA sense strand
gauuauuccugaagaugau

SEQ ID NO: 2083918 - RNA, 19 nt, Homo sapiens
  misc_RNA (1)...(19): siRNA sense strand
cccaagaugucaugguuga

SEQ ID NO: 2083919 - RNA, 19 nt, Homo sapiens
  misc_RNA (1)...(19): siRNA sense strand
gcagauaaacauccuagca

SEQ ID NO: 2083920 - RNA, 19 nt, Homo sapiens
  misc_RNA (1)...(19): siRNA sense strand
acucaacaguuaccucgua

SEQ ID NO: 2083921 - RNA, 19 nt, Homo sapiens
  misc_RNA (1)...(19): siRNA sense strand
aaccauggcuuugcuagaa

SEQ ID NO: 2083922 - RNA, 19 nt, Homo sapiens
  misc_RNA (1)...(19): siRNA sense strand
caccucaucuuccaucuuc

SEQ ID NO: 2083923 - RNA, 19 nt, Homo sapiens
  misc_RNA (1)...(19): siRNA sense strand
agaauacucuagaggaugu

SEQ ID NO: 2083924 - RNA, 19 nt, Homo sapiens
  misc_RNA (1)...(19): siRNA sense strand
ugggagaggccacuuuaua

SEQ ID NO: 2083925 - RNA, 19 nt, Homo sapiens
  misc_RNA (1)...(19): siRNA sense strand
cagacugacuguagugaug

SEQ ID NO: 2083926 - RNA, 19 nt, Homo sapiens
  misc_RNA (1)...(19): siRNA sense strand
ccacccuccugcagucaua

SEQ ID NO: 2083927 - RNA, 19 nt, Homo sapiens
  misc_RNA (1)...(19): siRNA sense strand
gccaggaaaucaucugcuu

SEQ ID NO: 2083928 - RNA, 19 nt, Homo sapiens
  misc_RNA (1)...(19): siRNA sense strand
guugugacccgcuauacua

SEQ ID NO: 2083929 - RNA, 19 nt, Homo sapiens
  misc_RNA (1)...(19): siRNA sense strand
gaacuuggccucagagaag

SEQ ID NO: 2083930 - RNA, 19 nt, Homo sapiens
  misc_RNA (1)...(19): siRNA sense strand
gcaggcaccucgagaagca

SEQ ID NO: 2083931 - RNA, 19 nt, Homo sapiens
  misc_RNA (1)...(19): siRNA sense strand
ggagaaagggcaaaacgua

SEQ ID NO: 2083932 - RNA, 19 nt, Homo sapiens
  misc_RNA (1)...(19): siRNA sense strand
gaucaagccagucucuuca

SEQ ID NO: 2083933 - RNA, 19 nt, Homo sapiens
  misc_RNA (1)...(19): siRNA sense strand
gggacuaguucuugggaau

SEQ ID NO: 2083934 - RNA, 19 nt, Homo sapiens
  misc_RNA (1)...(19): siRNA sense strand
gcacgugggacuaguucuu

SEQ ID NO: 2083935 - RNA, 19 nt, Homo sapiens
  misc_RNA (1)...(19): siRNA sense strand
ggaucaagccagucucuuc

SEQ ID NO: 2083936 - RNA, 19 nt, Homo sapiens
  misc_RNA (1)...(19): siRNA sense strand
gaacugcacgugggacuag

SEQ ID NO: 2083937 - RNA, 19 nt, Homo sapiens
  misc_RNA (1)...(19): siRNA sense strand
aagccagucucuucaucua

SEQ ID NO: 2083938 - RNA, 19 nt, Homo sapiens
  misc_RNA (1)...(19): siRNA sense strand
agcuucagguucucaaaua

SEQ ID NO: 2083939 - RNA, 19 nt, Homo sapiens
  misc_RNA (1)...(19): siRNA sense strand
gagcuucagguucucaaau

SEQ ID NO: 2083940 - RNA, 19 nt, Homo sapiens
  misc_RNA (1)...(19): siRNA sense strand
gggcaaaacguaccucaaa

SEQ ID NO: 2083941 - RNA, 19 nt, Homo sapiens
  misc_RNA (1)...(19): siRNA sense strand
ucaagccagucucuucauc

SEQ ID NO: 2083942 - RNA, 19 nt, Homo sapiens
  misc_RNA (1)...(19): siRNA sense strand
gaauggaucaagccagucu

SEQ ID NO: 2083943 - RNA, 19 nt, Homo sapiens
  misc_RNA (1)...(19): siRNA sense strand
guaccucaaaccagacaaa

SEQ ID NO: 2083944 - RNA, 19 nt, Homo sapiens
  misc_RNA (1)...(19): siRNA sense strand
cuugugagcuucagguucu

SEQ ID NO: 2083945 - RNA, 19 nt, Homo sapiens
  misc_RNA (1)...(19): siRNA sense strand
gccagucucuucaucuaac

SEQ ID NO: 2083946 - RNA, 19 nt, Homo sapiens
  misc_RNA (1)...(19): siRNA sense strand
aggcugccauucccgagua

SEQ ID NO: 2083947 - RNA, 19 nt, Homo sapiens
  misc_RNA (1)...(19): siRNA sense strand
ggacuaguucuugggaaug

SEQ ID NO: 2083948 - RNA, 19 nt, Homo sapiens
  misc_RNA (1)...(19): siRNA sense strand
cagaguagaaagaagacaa

SEQ ID NO: 2083949 - RNA, 19 nt, Homo sapiens
  misc_RNA (1)...(19): siRNA sense strand
gagaagccccagaguagaa

SEQ ID NO: 2083950 - RNA, 19 nt, Homo sapiens
  misc_RNA (1)...(19): siRNA sense strand
gcuucagguucucaaauac

SEQ ID NO: 2083951 - RNA, 19 nt, Homo sapiens
  misc_RNA (1)...(19): siRNA sense strand
gacuaguucuugggaaugg

SEQ ID NO: 2083952 - RNA, 19 nt, Homo sapiens
  misc_RNA (1)...(19): siRNA sense strand
agaguagaaagaagacaaa

SEQ ID NO: 2083953 - RNA, 19 nt, Homo sapiens
  misc_RNA (1)...(19): siRNA sense strand
gcugagcaguuucuaaaua

SEQ ID NO: 2083954 - RNA, 19 nt, Homo sapiens
  misc_RNA (1)...(19): siRNA sense strand
gcacaagccucuccaucaa

SEQ ID NO: 2083955 - RNA, 19 nt, Homo sapiens
  misc_RNA (1)...(19): siRNA sense strand
caacguagauggugaugga

SEQ ID NO: 2083956 - RNA, 19 nt, Homo sapiens
  misc_RNA (1)...(19): siRNA sense strand
ggaagacaaucugggaaua

SEQ ID NO: 2083957 - RNA, 19 nt, Homo sapiens
  misc_RNA (1)...(19): siRNA sense strand
gaacaaaucccggaaggaa

SEQ ID NO: 2083958 - RNA, 19 nt, Homo sapiens
  misc_RNA (1)...(19): siRNA sense strand
ggauguaaauguaagauuc

SEQ ID NO: 2083959 - RNA, 19 nt, Homo sapiens
  misc_RNA (1)...(19): siRNA sense strand
ucucuaaccugcauucuuu

SEQ ID NO: 2083960 - RNA, 19 nt, Homo sapiens
  misc_RNA (1)...(19): siRNA sense strand
gaagagaacacacccauca

SEQ ID NO: 2083961 - RNA, 19 nt, Homo sapiens
  misc_RNA (1)...(19): siRNA sense strand
ggcauuaucucuacaacaa

SEQ ID NO: 2083962 - RNA, 19 nt, Homo sapiens
  misc_RNA (1)...(19): siRNA sense strand
gaucaucucuuguaaacag

SEQ ID NO: 2083963 - RNA, 19 nt, Homo sapiens
  misc_RNA (1)...(19): siRNA sense strand
gaacagaauaugagugaug

SEQ ID NO: 2083964 - RNA, 19 nt, Homo sapiens
  misc_RNA (1)...(19): siRNA sense strand
ucagauugaugacauugua

SEQ ID NO: 2083965 - RNA, 19 nt, Homo sapiens
  misc_RNA (1)...(19): siRNA sense strand
ucagauagaucaggauuau

SEQ ID NO: 2083966 - RNA, 19 nt, Homo sapiens
  misc_RNA (1)...(19): siRNA sense strand
auagugagcugguuaguga

SEQ ID NO: 2083967 - RNA, 19 nt, Homo sapiens
  misc_RNA (1)...(19): siRNA sense strand
cugagcagcugauggaaua

SEQ ID NO: 2083968 - RNA, 19 nt, Homo sapiens
  misc_RNA (1)...(19): siRNA sense strand
gauggaauauuuaggagau

SEQ ID NO: 2083969 - RNA, 19 nt, Homo sapiens
  misc_RNA (1)...(19): siRNA sense strand
agacaggccuggauguaaa

SEQ ID NO: 2083970 - RNA, 19 nt, Homo sapiens
  misc_RNA (1)...(19): siRNA sense strand
cagaaugcauaguauuuga

SEQ ID NO: 2083971 - RNA, 19 nt, Homo sapiens
  misc_RNA (1)...(19): siRNA sense strand
caacugacauaccauggau

SEQ ID NO: 2083972 - RNA, 19 nt, Homo sapiens
  misc_RNA (1)...(19): siRNA sense strand
gaacagcagagccaagaga

SEQ ID NO: 2083973 - RNA, 19 nt, Homo sapiens
  misc_RNA (1)...(19): siRNA sense strand
cugagcaguuucuaaauaa

SEQ ID NO: 2083974 - RNA, 19 nt, Homo sapiens
  misc_RNA (1)...(19): siRNA sense strand
aggauuaucuuauggcauu

SEQ ID NO: 2083975 - RNA, 19 nt, Homo sapiens
  misc_RNA (1)...(19): siRNA sense strand
gcugcgaguucaauaguga

SEQ ID NO: 2083976 - RNA, 19 nt, Homo sapiens
  misc_RNA (1)...(19): siRNA sense strand
gaucaggauuaucuuaugg

SEQ ID NO: 2083977 - RNA, 19 nt, Homo sapiens
  misc_RNA (1)...(19): siRNA sense strand
ggaaagccuacacaacgua

SEQ ID NO: 2083978 - RNA, 19 nt, Homo sapiens
  misc_RNA (1)...(19): siRNA sense strand
gacaauagugagcugguua

SEQ ID NO: 2083979 - RNA, 19 nt, Homo sapiens
  misc_RNA (1)...(19): siRNA sense strand
guucgaguguuugaauaua

SEQ ID NO: 2083980 - RNA, 19 nt, Homo sapiens
  misc_RNA (1)...(19): siRNA sense strand
ccacucaacugacauacca

SEQ ID NO: 2083981 - RNA, 19 nt, Homo sapiens
  misc_RNA (1)...(19): siRNA sense strand
gaaggagaacuuugugugu

SEQ ID NO: 2083982 - RNA, 19 nt, Homo sapiens
  misc_RNA (1)...(19): siRNA sense strand
guuaguagacccucagauu

SEQ ID NO: 2083983 - RNA, 19 nt, Homo sapiens
  misc_RNA (1)...(19): siRNA sense strand
gagaucaauugggaacaaa

SEQ ID NO: 2083984 - RNA, 19 nt, Homo sapiens
  misc_RNA (1)...(19): siRNA sense strand
uguaaacagucagacaaua

SEQ ID NO: 2083985 - RNA, 19 nt, Homo sapiens
  misc_RNA (1)...(19): siRNA sense strand
gagaacacacccaucauca

SEQ ID NO: 2083986 - RNA, 19 nt, Homo sapiens
  misc_RNA (1)...(19): siRNA sense strand
cagacgggcuucucaauac

SEQ ID NO: 2083987 - RNA, 19 nt, Homo sapiens
  misc_RNA (1)...(19): siRNA sense strand
ggacagugguuuggagagu

SEQ ID NO: 2083988 - RNA, 19 nt, Homo sapiens
  misc_RNA (1)...(19): siRNA sense strand
uuagcaccaugaccaaaua

SEQ ID NO: 2083989 - RNA, 19 nt, Homo sapiens
  misc_RNA (1)...(19): siRNA sense strand
uaacacagccacucaacug

SEQ ID NO: 2083990 - RNA, 19 nt, Homo sapiens
  misc_RNA (1)...(19): siRNA sense strand
guaaacagucagacaauag

SEQ ID NO: 2083991 - RNA, 19 nt, Homo sapiens
  misc_RNA (1)...(19): siRNA sense strand
cggagugggucaugaguug

SEQ ID NO: 2083992 - RNA, 19 nt, Homo sapiens
  misc_RNA (1)...(19): siRNA sense strand
uagcugagcaguuucuaaa

SEQ ID NO: 2083993 - RNA, 19 nt, Homo sapiens
  misc_RNA (1)...(19): siRNA sense strand
cauuaucucuacaacaaga

SEQ ID NO: 2083994 - RNA, 19 nt, Homo sapiens
  misc_RNA (1)...(19): siRNA sense strand
gcagcugauggaauauuua

SEQ ID NO: 2083995 - RNA, 19 nt, Homo sapiens
  misc_RNA (1)...(19): siRNA sense strand
ggagauuacaugcuugaug

SEQ ID NO: 2083996 - RNA, 19 nt, Homo sapiens
  misc_RNA (1)...(19): siRNA sense strand
uguguguucuuucggaaua

SEQ ID NO: 2083997 - RNA, 19 nt, Homo sapiens
  misc_RNA (1)...(19): siRNA sense strand
uaaauaacacagccacuca

SEQ ID NO: 2083998 - RNA, 19 nt, Homo sapiens
  misc_RNA (1)...(19): siRNA sense strand
gacaaucugggaauaguga

SEQ ID NO: 2083999 - RNA, 19 nt, Homo sapiens
  misc_RNA (1)...(19): siRNA sense strand
gaagacaaucugggaauag

SEQ ID NO: 2084000 - RNA, 19 nt, Homo sapiens
  misc_RNA (1)...(19): siRNA sense strand
ggacagacgggcuucucaa

SEQ ID NO: 2084001 - RNA, 19 nt, Homo sapiens
  misc_RNA (1)...(19): siRNA sense strand
acaacaagaucagauagau

SEQ ID NO: 2084002 - RNA, 19 nt, Homo sapiens
  misc_RNA (1)...(19): siRNA sense strand
acaccagaaugcauaguau

SEQ ID NO: 2084003 - RNA, 19 nt, Homo sapiens
  misc_RNA (1)...(19): siRNA sense strand
ggacaacaagaucagauag

SEQ ID NO: 2084004 - RNA, 19 nt, Homo sapiens
  misc_RNA (1)...(19): siRNA sense strand
gggaaagccuacacaacgu

SEQ ID NO: 2084005 - RNA, 19 nt, Homo sapiens
  misc_RNA (1)...(19): siRNA sense strand
gcaccaugaccaaauacaa

SEQ ID NO: 2084006 - RNA, 19 nt, Homo sapiens
  misc_RNA (1)...(19): siRNA sense strand
gcugauggaauauuuagga

SEQ ID NO: 2084007 - RNA, 19 nt, Homo sapiens
  misc_RNA (1)...(19): siRNA sense strand
ggauuaucuuauggcauua

SEQ ID NO: 2084008 - RNA, 19 nt, Homo sapiens
  misc_RNA (1)...(19): siRNA sense strand
gauggaaauuucugugacu

SEQ ID NO: 2084009 - RNA, 19 nt, Homo sapiens
  misc_RNA (1)...(19): siRNA sense strand
acaagggucaacuguauuu

SEQ ID NO: 2084010 - RNA, 19 nt, Homo sapiens
  misc_RNA (1)...(19): siRNA sense strand
cuuuguagcugagcaguuu

SEQ ID NO: 2084011 - RNA, 19 nt, Homo sapiens
  misc_RNA (1)...(19): siRNA sense strand
uaguagacccucagauuga

SEQ ID NO: 2084012 - RNA, 19 nt, Homo sapiens
  misc_RNA (1)...(19): siRNA sense strand
uuuaggagauuacaugcuu

SEQ ID NO: 2084013 - RNA, 19 nt, Homo sapiens
  misc_RNA (1)...(19): siRNA sense strand
guugguaacugcagcuaca

SEQ ID NO: 2084014 - RNA, 19 nt, Homo sapiens
  misc_RNA (1)...(19): siRNA sense strand
acagacgggcuucucaaua

SEQ ID NO: 2084015 - RNA, 19 nt, Homo sapiens
  misc_RNA (1)...(19): siRNA sense strand
aaagaaacuccaagaggaa

SEQ ID NO: 2084016 - RNA, 19 nt, Homo sapiens
  misc_RNA (1)...(19): siRNA sense strand
uccugaaacuguauacaaa

SEQ ID NO: 2084017 - RNA, 19 nt, Homo sapiens
  misc_RNA (1)...(19): siRNA sense strand
gagaaaguuguuugggaaa

SEQ ID NO: 2084018 - RNA, 19 nt, Homo sapiens
  misc_RNA (1)...(19): siRNA sense strand
gcugguuagugaaggcuuu

SEQ ID NO: 2084019 - RNA, 19 nt, Homo sapiens
  misc_RNA (1)...(19): siRNA sense strand
aaggagaacuuuguguguu

SEQ ID NO: 2084020 - RNA, 19 nt, Homo sapiens
  misc_RNA (1)...(19): siRNA sense strand
gaaaguuguuugggaaagc

SEQ ID NO: 2084021 - RNA, 19 nt, Homo sapiens
  misc_RNA (1)...(19): siRNA sense strand
acaaccaacuaguggagaa

SEQ ID NO: 2084022 - RNA, 19 nt, Homo sapiens
  misc_RNA (1)...(19): siRNA sense strand
aggccuggauguaaaugua

SEQ ID NO: 2084023 - RNA, 19 nt, Homo sapiens
  misc_RNA (1)...(19): siRNA sense strand
cagcagagccaagagauca

SEQ ID NO: 2084024 - RNA, 19 nt, Homo sapiens
  misc_RNA (1)...(19): siRNA sense strand
gacaacaagaucagauaga

SEQ ID NO: 2084025 - RNA, 19 nt, Homo sapiens
  misc_RNA (1)...(19): siRNA sense strand
uggauuaugugaacuaacu

SEQ ID NO: 2084026 - RNA, 19 nt, Homo sapiens
  misc_RNA (1)...(19): siRNA sense strand
gaauauacaccagaaugca

SEQ ID NO: 2084027 - RNA, 19 nt, Homo sapiens
  misc_RNA (1)...(19): siRNA sense strand
guguucgaguguuugaaua

SEQ ID NO: 2084028 - RNA, 19 nt, Homo sapiens
  misc_RNA (1)...(19): siRNA sense strand
gaaugcauaguauuugauc

SEQ ID NO: 2084029 - RNA, 19 nt, Homo sapiens
  misc_RNA (1)...(19): siRNA sense strand
auacaaaggacaacaagau

SEQ ID NO: 2084030 - RNA, 19 nt, Homo sapiens
  misc_RNA (1)...(19): siRNA sense strand
acugacauaccauggauua

SEQ ID NO: 2084031 - RNA, 19 nt, Homo sapiens
  misc_RNA (1)...(19): siRNA sense strand
gagcaguuucuaaauaaca

SEQ ID NO: 2084032 - RNA, 19 nt, Homo sapiens
  misc_RNA (1)...(19): siRNA sense strand
gagcagcugauggaauauu

SEQ ID NO: 2084033 - RNA, 19 nt, Homo sapiens
  misc_RNA (1)...(19): siRNA sense strand
uagcaaagaaacuccaaga

SEQ ID NO: 2084034 - RNA, 19 nt, Homo sapiens
  misc_RNA (1)...(19): siRNA sense strand
gaucaauugggaacaaauc

SEQ ID NO: 2084035 - RNA, 19 nt, Homo sapiens
  misc_RNA (1)...(19): siRNA sense strand
agagaucaauugggaacaa

SEQ ID NO: 2084036 - RNA, 19 nt, Homo sapiens
  misc_RNA (1)...(19): siRNA sense strand
cauggauuaugugaacuaa

SEQ ID NO: 2084037 - RNA, 19 nt, Homo sapiens
  misc_RNA (1)...(19): siRNA sense strand
uaccauggauuaugugaac

SEQ ID NO: 2084038 - RNA, 19 nt, Homo sapiens
  misc_RNA (1)...(19): siRNA sense strand
uaacugcagcuacaaccaa

SEQ ID NO: 2084039 - RNA, 19 nt, Homo sapiens
  misc_RNA (1)...(19): siRNA sense strand
cagacaggccuggauguaa

SEQ ID NO: 2084040 - RNA, 19 nt, Homo sapiens
  misc_RNA (1)...(19): siRNA sense strand
acaagccucuccaucaagu

SEQ ID NO: 2084041 - RNA, 19 nt, Homo sapiens
  misc_RNA (1)...(19): siRNA sense strand
gggcuucucaauacuauca

SEQ ID NO: 2084042 - RNA, 19 nt, Homo sapiens
  misc_RNA (1)...(19): siRNA sense strand
cguagauggugauggaaau

SEQ ID NO: 2084043 - RNA, 19 nt, Homo sapiens
  misc_RNA (1)...(19): siRNA sense strand
gacagguucuucgcaggaa

SEQ ID NO: 2084044 - RNA, 19 nt, Homo sapiens
  misc_RNA (1)...(19): siRNA sense strand
ccagaaugcauaguauuug

SEQ ID NO: 2084045 - RNA, 19 nt, Homo sapiens
  misc_RNA (1)...(19): siRNA sense strand
guuugaauauacaccagaa

SEQ ID NO: 2084046 - RNA, 19 nt, Homo sapiens
  misc_RNA (1)...(19): siRNA sense strand
aagauucacugguguucga

SEQ ID NO: 2084047 - RNA, 19 nt, Homo sapiens
  misc_RNA (1)...(19): siRNA sense strand
uuacaugcuugaugcaaag

SEQ ID NO: 2084048 - RNA, 19 nt, Homo sapiens
  misc_RNA (1)...(19): siRNA sense strand
agggucaacuguauuuguu

SEQ ID NO: 2084049 - RNA, 19 nt, Homo sapiens
  misc_RNA (1)...(19): siRNA sense strand
caaauacaagggucaacug

SEQ ID NO: 2084050 - RNA, 19 nt, Homo sapiens
  misc_RNA (1)...(19): siRNA sense strand
uuaguagacccucagauug

SEQ ID NO: 2084051 - RNA, 19 nt, Homo sapiens
  misc_RNA (1)...(19): siRNA sense strand
ugacucagaauuucaucuu

SEQ ID NO: 2084052 - RNA, 19 nt, Homo sapiens
  misc_RNA (1)...(19): siRNA sense strand
cggaaggaaccacgagaaa

SEQ ID NO: 2084053 - RNA, 19 nt, Homo sapiens
  misc_RNA (1)...(19): siRNA sense strand
gagaacagcucaucuaaga

SEQ ID NO: 2084054 - RNA, 19 nt, Homo sapiens
  misc_RNA (1)...(19): siRNA sense strand
gaaaggaaguguauggaaa

SEQ ID NO: 2084055 - RNA, 19 nt, Homo sapiens
  misc_RNA (1)...(19): siRNA sense strand
gagcaagucucccacgaua

SEQ ID NO: 2084056 - RNA, 19 nt, Homo sapiens
  misc_RNA (1)...(19): siRNA sense strand
gcaaagacucaccauauua

SEQ ID NO: 2084057 - RNA, 19 nt, Homo sapiens
  misc_RNA (1)...(19): siRNA sense strand
uaaagaaagucaagucuga

SEQ ID NO: 2084058 - RNA, 19 nt, Homo sapiens
  misc_RNA (1)...(19): siRNA sense strand
gggcagcgcucaauccuuu

SEQ ID NO: 2084059 - RNA, 19 nt, Homo sapiens
  misc_RNA (1)...(19): siRNA sense strand
ggaaaggaguggaugcaaa

SEQ ID NO: 2084060 - RNA, 19 nt, Homo sapiens
  misc_RNA (1)...(19): siRNA sense strand
gaagaacgauaucugugaa

SEQ ID NO: 2084061 - RNA, 19 nt, Homo sapiens
  misc_RNA (1)...(19): siRNA sense strand
ugacagaccuggugaaauc

SEQ ID NO: 2084062 - RNA, 19 nt, Homo sapiens
  misc_RNA (1)...(19): siRNA sense strand
gagcaaagacucaccauau

SEQ ID NO: 2084063 - RNA, 19 nt, Homo sapiens
  misc_RNA (1)...(19): siRNA sense strand
gacaagaucuacaguuuca

SEQ ID NO: 2084064 - RNA, 19 nt, Homo sapiens
  misc_RNA (1)...(19): siRNA sense strand
caaguuagaugacucuuca

SEQ ID NO: 2084065 - RNA, 19 nt, Homo sapiens
  misc_RNA (1)...(19): siRNA sense strand
guaauacaccugucaauga

SEQ ID NO: 2084066 - RNA, 19 nt, Homo sapiens
  misc_RNA (1)...(19): siRNA sense strand
gcacaucaauggacuuaag

SEQ ID NO: 2084067 - RNA, 19 nt, Homo sapiens
  misc_RNA (1)...(19): siRNA sense strand
caacagcccugcauacucu

SEQ ID NO: 2084068 - RNA, 19 nt, Homo sapiens
  misc_RNA (1)...(19): siRNA sense strand
caaccaguaugccuaugua

SEQ ID NO: 2084069 - RNA, 19 nt, Homo sapiens
  misc_RNA (1)...(19): siRNA sense strand
caagacaggugcugagugu

SEQ ID NO: 2084070 - RNA, 19 nt, Homo sapiens
  misc_RNA (1)...(19): siRNA sense strand
gaacaagacauauguaggu

SEQ ID NO: 2084071 - RNA, 19 nt, Homo sapiens
  misc_RNA (1)...(19): siRNA sense strand
uagggaaucucaucauuga

SEQ ID NO: 2084072 - RNA, 19 nt, Homo sapiens
  misc_RNA (1)...(19): siRNA sense strand
gcaaugaugccuuugauuc

SEQ ID NO: 2084073 - RNA, 19 nt, Homo sapiens
  misc_RNA (1)...(19): siRNA sense strand
ggaaggaaggcaaaucaaa

SEQ ID NO: 2084074 - RNA, 19 nt, Homo sapiens
  misc_RNA (1)...(19): siRNA sense strand
ccaaagcccuggacaucuu

SEQ ID NO: 2084075 - RNA, 19 nt, Homo sapiens
  misc_RNA (1)...(19): siRNA sense strand
ccgacaagaucuacaguuu

SEQ ID NO: 2084076 - RNA, 19 nt, Homo sapiens
  misc_RNA (1)...(19): siRNA sense strand
gcagaaacgccagagcuua

SEQ ID NO: 2084077 - RNA, 19 nt, Homo sapiens
  misc_RNA (1)...(19): siRNA sense strand
gaaugagugucgccugcua

SEQ ID NO: 2084078 - RNA, 19 nt, Homo sapiens
  misc_RNA (1)...(19): siRNA sense strand
caaggaagaugggaaggaa

SEQ ID NO: 2084079 - RNA, 19 nt, Homo sapiens
  misc_RNA (1)...(19): siRNA sense strand
ccacagagccugagugcuu

SEQ ID NO: 2084080 - RNA, 19 nt, Homo sapiens
  misc_RNA (1)...(19): siRNA sense strand
ggagaaccuuucacaguca

SEQ ID NO: 2084081 - RNA, 19 nt, Homo sapiens
  misc_RNA (1)...(19): siRNA sense strand
cagcagggcuuucuucuac

SEQ ID NO: 2084082 - RNA, 19 nt, Homo sapiens
  misc_RNA (1)...(19): siRNA sense strand
gaggaaaggagucggagua

SEQ ID NO: 2084083 - RNA, 19 nt, Homo sapiens
  misc_RNA (1)...(19): siRNA sense strand
gagcagaucaugguucgua

SEQ ID NO: 2084084 - RNA, 19 nt, Homo sapiens
  misc_RNA (1)...(19): siRNA sense strand
ugaggaaccugagagcaua

SEQ ID NO: 2084085 - RNA, 19 nt, Homo sapiens
  misc_RNA (1)...(19): siRNA sense strand
gcaagcguguccguacuaa

SEQ ID NO: 2084086 - RNA, 19 nt, Homo sapiens
  misc_RNA (1)...(19): siRNA sense strand
gcacggcuauuccuacagu

SEQ ID NO: 2084087 - RNA, 19 nt, Homo sapiens
  misc_RNA (1)...(19): siRNA sense strand
gaugggauguuggugguaa

SEQ ID NO: 2084088 - RNA, 19 nt, Homo sapiens
  misc_RNA (1)...(19): siRNA sense strand
gaaaggagucggaguaagg

SEQ ID NO: 2084089 - RNA, 19 nt, Homo sapiens
  misc_RNA (1)...(19): siRNA sense strand
ggaaagugaagaacgauau

SEQ ID NO: 2084090 - RNA, 19 nt, Homo sapiens
  misc_RNA (1)...(19): siRNA sense strand
ggauguuggugguaaaugu

SEQ ID NO: 2084091 - RNA, 19 nt, Homo sapiens
  misc_RNA (1)...(19): siRNA sense strand
ccgaacaguugguuaaaga

SEQ ID NO: 2084092 - RNA, 19 nt, Homo sapiens
  misc_RNA (1)...(19): siRNA sense strand
gaugauggacccucaguga

SEQ ID NO: 2084093 - RNA, 19 nt, Homo sapiens
  misc_RNA (1)...(19): siRNA sense strand
acauggagcugaauucuag

SEQ ID NO: 2084094 - RNA, 19 nt, Homo sapiens
  misc_RNA (1)...(19): siRNA sense strand
ggucucagguggugaagau

SEQ ID NO: 2084095 - RNA, 19 nt, Homo sapiens
  misc_RNA (1)...(19): siRNA sense strand
ggcaguagccgccuugaaa

SEQ ID NO: 2084096 - RNA, 19 nt, Homo sapiens
  misc_RNA (1)...(19): siRNA sense strand
gcucagagaaggcggcuaa

SEQ ID NO: 2084097 - RNA, 19 nt, Homo sapiens
  misc_RNA (1)...(19): siRNA sense strand
agucaucauucccaaguua

SEQ ID NO: 2084098 - RNA, 19 nt, Homo sapiens
  misc_RNA (1)...(19): siRNA sense strand
cagcagcacuucugaggau

SEQ ID NO: 2084099 - RNA, 19 nt, Homo sapiens
  misc_RNA (1)...(19): siRNA sense strand
gaacgauaucugugaagaa

SEQ ID NO: 2084100 - RNA, 19 nt, Homo sapiens
  misc_RNA (1)...(19): siRNA sense strand
ggaaaugucaggcucaaag

SEQ ID NO: 2084101 - RNA, 19 nt, Homo sapiens
  misc_RNA (1)...(19): siRNA sense strand
caaaggacgccgaacaguu

SEQ ID NO: 2084102 - RNA, 19 nt, Homo sapiens
  misc_RNA (1)...(19): siRNA sense strand
gcuccuaaauggcucauca

SEQ ID NO: 2084103 - RNA, 19 nt, Homo sapiens
  misc_RNA (1)...(19): siRNA sense strand
ggaggaacaagacauaugu

SEQ ID NO: 2084104 - RNA, 19 nt, Homo sapiens
  misc_RNA (1)...(19): siRNA sense strand
ggaaggaaagcacaaguag

SEQ ID NO: 2084105 - RNA, 19 nt, Homo sapiens
  misc_RNA (1)...(19): siRNA sense strand
guacggagaggaaccuauu

SEQ ID NO: 2084106 - RNA, 19 nt, Homo sapiens
  misc_RNA (1)...(19): siRNA sense strand
ucaauggacuuaaguacca

SEQ ID NO: 2084107 - RNA, 19 nt, Homo sapiens
  misc_RNA (1)...(19): siRNA sense strand
ggaggcagcacucaaggaa

SEQ ID NO: 2084108 - RNA, 19 nt, Homo sapiens
  misc_RNA (1)...(19): siRNA sense strand
gggaaggaaagcacaagua

SEQ ID NO: 2084109 - RNA, 19 nt, Homo sapiens
  misc_RNA (1)...(19): siRNA sense strand
caaacugcaacaagaagua

SEQ ID NO: 2084110 - RNA, 19 nt, Homo sapiens
  misc_RNA (1)...(19): siRNA sense strand
gcaagucucccacgauaag

SEQ ID NO: 2084111 - RNA, 19 nt, Homo sapiens
  misc_RNA (1)...(19): siRNA sense strand
ggacaagaaggcagagaug

SEQ ID NO: 2084112 - RNA, 19 nt, Homo sapiens
  misc_RNA (1)...(19): siRNA sense strand
gaugaaacaagcaaugaug

SEQ ID NO: 2084113 - RNA, 19 nt, Homo sapiens
  misc_RNA (1)...(19): siRNA sense strand
caaaaggccucuguaagaa

SEQ ID NO: 2084114 - RNA, 19 nt, Homo sapiens
  misc_RNA (1)...(19): siRNA sense strand
ucaagcaaauucagcacaa

SEQ ID NO: 2084115 - RNA, 19 nt, Homo sapiens
  misc_RNA (1)...(19): siRNA sense strand
ggaguaagaguggcaaaga

SEQ ID NO: 2084116 - RNA, 19 nt, Homo sapiens
  misc_RNA (1)...(19): siRNA sense strand
aaaggacgccgaacaguug

SEQ ID NO: 2084117 - RNA, 19 nt, Homo sapiens
  misc_RNA (1)...(19): siRNA sense strand
gcacaagccaugcccaaca

SEQ ID NO: 2084118 - RNA, 19 nt, Homo sapiens
  misc_RNA (1)...(19): siRNA sense strand
cacccaaacugcaacaaga

SEQ ID NO: 2084119 - RNA, 19 nt, Homo sapiens
  misc_RNA (1)...(19): siRNA sense strand
guucguacccgaucaguug

SEQ ID NO: 2084120 - RNA, 19 nt, Homo sapiens
  misc_RNA (1)...(19): siRNA sense strand
gagugucgccugcuaaaga

SEQ ID NO: 2084121 - RNA, 19 nt, Homo sapiens
  misc_RNA (1)...(19): siRNA sense strand
uaauacaccugucaaugag

SEQ ID NO: 2084122 - RNA, 19 nt, Homo sapiens
  misc_RNA (1)...(19): siRNA sense strand
gcucaacucccucacucua

SEQ ID NO: 2084123 - RNA, 19 nt, Homo sapiens
  misc_RNA (1)...(19): siRNA sense strand
acucagacaucaagucaga

SEQ ID NO: 2084124 - RNA, 19 nt, Homo sapiens
  misc_RNA (1)...(19): siRNA sense strand
ccugaaggccuuaaaguga

SEQ ID NO: 2084125 - RNA, 19 nt, Homo sapiens
  misc_RNA (1)...(19): siRNA sense strand
guacgaagaacagcagaaa

SEQ ID NO: 2084126 - RNA, 19 nt, Homo sapiens
  misc_RNA (1)...(19): siRNA sense strand
guuacuauucuccaaguua

SEQ ID NO: 2084127 - RNA, 19 nt, Homo sapiens
  misc_RNA (1)...(19): siRNA sense strand
ccaaugauggcucugauga

SEQ ID NO: 2084128 - RNA, 19 nt, Homo sapiens
  misc_RNA (1)...(19): siRNA sense strand
gcaacaagaaguacaagca

SEQ ID NO: 2084129 - RNA, 19 nt, Homo sapiens
  misc_RNA (1)...(19): siRNA sense strand
gcagaaacuggaaauguca

SEQ ID NO: 2084130 - RNA, 19 nt, Homo sapiens
  misc_RNA (1)...(19): siRNA sense strand
gcaugcgucccaacaguaa

SEQ ID NO: 2084131 - RNA, 19 nt, Homo sapiens
  misc_RNA (1)...(19): siRNA sense strand
gcacaaguagugacugcaa

SEQ ID NO: 2084132 - RNA, 19 nt, Homo sapiens
  misc_RNA (1)...(19): siRNA sense strand
aacgauaucugugaagaaa

SEQ ID NO: 2084133 - RNA, 19 nt, Homo sapiens
  misc_RNA (1)...(19): siRNA sense strand
gagcauagaagggaaagug

SEQ ID NO: 2084134 - RNA, 19 nt, Homo sapiens
  misc_RNA (1)...(19): siRNA sense strand
uaccaaggcuuugagaguu

SEQ ID NO: 2084135 - RNA, 19 nt, Homo sapiens
  misc_RNA (1)...(19): siRNA sense strand
gaaaagauuccuuccaaga

SEQ ID NO: 2084136 - RNA, 19 nt, Homo sapiens
  misc_RNA (1)...(19): siRNA sense strand
gacccucagugauggauga

SEQ ID NO: 2084137 - RNA, 19 nt, Homo sapiens
  misc_RNA (1)...(19): siRNA sense strand
gcacaaaaggccucuguaa

SEQ ID NO: 2084138 - RNA, 19 nt, Homo sapiens
  misc_RNA (1)...(19): siRNA sense strand
caagcaaauucagcacaaa

SEQ ID NO: 2084139 - RNA, 19 nt, Homo sapiens
  misc_RNA (1)...(19): siRNA sense strand
ccauagcccuucuccuuca

SEQ ID NO: 2084140 - RNA, 19 nt, Homo sapiens
  misc_RNA (1)...(19): siRNA sense strand
gaaguacaagcacaucaau

SEQ ID NO: 2084141 - RNA, 19 nt, Homo sapiens
  misc_RNA (1)...(19): siRNA sense strand
gaaaggaguggaugcaaac

SEQ ID NO: 2084142 - RNA, 19 nt, Homo sapiens
  misc_RNA (1)...(19): siRNA sense strand
ggaaaggagucggaguaag

SEQ ID NO: 2084143 - RNA, 19 nt, Homo sapiens
  misc_RNA (1)...(19): siRNA sense strand
ugaagaacgauaucuguga

SEQ ID NO: 2084144 - RNA, 19 nt, Homo sapiens
  misc_RNA (1)...(19): siRNA sense strand
agcaaagacucaccauauu

SEQ ID NO: 2084145 - RNA, 19 nt, Homo sapiens
  misc_RNA (1)...(19): siRNA sense strand
gaaggaaggcaaaucaaaa

SEQ ID NO: 2084146 - RNA, 19 nt, Homo sapiens
  misc_RNA (1)...(19): siRNA sense strand
guagggaaucucaucauug

SEQ ID NO: 2084147 - RNA, 19 nt, Homo sapiens
  misc_RNA (1)...(19): siRNA sense strand
gaacaguugguuaaagaag

SEQ ID NO: 2084148 - RNA, 19 nt, Homo sapiens
  misc_RNA (1)...(19): siRNA sense strand
gaagccagcucagucaaaa

SEQ ID NO: 2084149 - RNA, 19 nt, Homo sapiens
  misc_RNA (1)...(19): siRNA sense strand
aacaagcaaugaugccuuu

SEQ ID NO: 2084150 - RNA, 19 nt, Homo sapiens
  misc_RNA (1)...(19): siRNA sense strand
cugaaggccuuaaagugaa

SEQ ID NO: 2084151 - RNA, 19 nt, Homo sapiens
  misc_RNA (1)...(19): siRNA sense strand
gcagcagggcuuucuucua

SEQ ID NO: 2084152 - RNA, 19 nt, Homo sapiens
  misc_RNA (1)...(19): siRNA sense strand
caguacaacuuacccuaug

SEQ ID NO: 2084153 - RNA, 19 nt, Homo sapiens
  misc_RNA (1)...(19): siRNA sense strand
gaaagaacuugaaagcuua

SEQ ID NO: 2084154 - RNA, 19 nt, Homo sapiens
  misc_RNA (1)...(19): siRNA sense strand
ggaaagagguugcacauga

SEQ ID NO: 2084155 - RNA, 19 nt, Homo sapiens
  misc_RNA (1)...(19): siRNA sense strand
gaaauucacuucaaugaug

SEQ ID NO: 2084156 - RNA, 19 nt, Homo sapiens
  misc_RNA (1)...(19): siRNA sense strand
ggaaagaacuugaaagcuu

SEQ ID NO: 2084157 - RNA, 19 nt, Homo sapiens
  misc_RNA (1)...(19): siRNA sense strand
ugaaagaccugaaggauuu

SEQ ID NO: 2084158 - RNA, 19 nt, Homo sapiens
  misc_RNA (1)...(19): siRNA sense strand
gaaacaggguugugaaauu

SEQ ID NO: 2084159 - RNA, 19 nt, Homo sapiens
  misc_RNA (1)...(19): siRNA sense strand
gaaauuaaaucagcccaua

SEQ ID NO: 2084160 - RNA, 19 nt, Homo sapiens
  misc_RNA (1)...(19): siRNA sense strand
uuacaaagcuggccuaauu

SEQ ID NO: 2084161 - RNA, 19 nt, Homo sapiens
  misc_RNA (1)...(19): siRNA sense strand
gaaaguaccuggccuucaa

SEQ ID NO: 2084162 - RNA, 19 nt, Homo sapiens
  misc_RNA (1)...(19): siRNA sense strand
uaacuuaccuggauugauu

SEQ ID NO: 2084163 - RNA, 19 nt, Homo sapiens
  misc_RNA (1)...(19): siRNA sense strand
ggacagcccuuguacauuc

SEQ ID NO: 2084164 - RNA, 19 nt, Homo sapiens
  misc_RNA (1)...(19): siRNA sense strand
caacacuacugcagaauuu

SEQ ID NO: 2084165 - RNA, 19 nt, Homo sapiens
  misc_RNA (1)...(19): siRNA sense strand
aaacaggguugugaaauua

SEQ ID NO: 2084166 - RNA, 19 nt, Homo sapiens
  misc_RNA (1)...(19): siRNA sense strand
gaauaagccuggaaaguuc

SEQ ID NO: 2084167 - RNA, 19 nt, Homo sapiens
  misc_RNA (1)...(19): siRNA sense strand
gggaguaccucaucacaaa

SEQ ID NO: 2084168 - RNA, 19 nt, Homo sapiens
  misc_RNA (1)...(19): siRNA sense strand
aaagaagcaugcacacuua

SEQ ID NO: 2084169 - RNA, 19 nt, Homo sapiens
  misc_RNA (1)...(19): siRNA sense strand
guacagcuauaauggauuu

SEQ ID NO: 2084170 - RNA, 19 nt, Homo sapiens
  misc_RNA (1)...(19): siRNA sense strand
gaagaugucugccaugagu

SEQ ID NO: 2084171 - RNA, 19 nt, Homo sapiens
  misc_RNA (1)...(19): siRNA sense strand
gaucuagucugccuccuaa

SEQ ID NO: 2084172 - RNA, 19 nt, Homo sapiens
  misc_RNA (1)...(19): siRNA sense strand
caacagugcugguaaaaua

SEQ ID NO: 2084173 - RNA, 19 nt, Homo sapiens
  misc_RNA (1)...(19): siRNA sense strand
ggcaugugaugauaaauua

SEQ ID NO: 2084174 - RNA, 19 nt, Homo sapiens
  misc_RNA (1)...(19): siRNA sense strand
ggaugaagaugauagcaaa

SEQ ID NO: 2084175 - RNA, 19 nt, Homo sapiens
  misc_RNA (1)...(19): siRNA sense strand
gcagaaagcugguauugac

SEQ ID NO: 2084176 - RNA, 19 nt, Homo sapiens
  misc_RNA (1)...(19): siRNA sense strand
ucaagaagauuaugaguca

SEQ ID NO: 2084177 - RNA, 19 nt, Homo sapiens
  misc_RNA (1)...(19): siRNA sense strand
gcauuagugucuaugauuu

SEQ ID NO: 2084178 - RNA, 19 nt, Homo sapiens
  misc_RNA (1)...(19): siRNA sense strand
ggacaagagcggugaagua

SEQ ID NO: 2084179 - RNA, 19 nt, Homo sapiens
  misc_RNA (1)...(19): siRNA sense strand
uggagaaccuuaucuuuaa

SEQ ID NO: 2084180 - RNA, 19 nt, Homo sapiens
  misc_RNA (1)...(19): siRNA sense strand
aaacagcuaugucuaaaug

SEQ ID NO: 2084181 - RNA, 19 nt, Homo sapiens
  misc_RNA (1)...(19): siRNA sense strand
gaagccaccuuuaagauca

SEQ ID NO: 2084182 - RNA, 19 nt, Homo sapiens
  misc_RNA (1)...(19): siRNA sense strand
gcaacucuguggacaauau

SEQ ID NO: 2084183 - RNA, 19 nt, Homo sapiens
  misc_RNA (1)...(19): siRNA sense strand
caaaugguauucaagauuc

SEQ ID NO: 2084184 - RNA, 19 nt, Homo sapiens
  misc_RNA (1)...(19): siRNA sense strand
ggaagaaucucaggauaca

SEQ ID NO: 2084185 - RNA, 19 nt, Homo sapiens
  misc_RNA (1)...(19): siRNA sense strand
guagauaccaacacuauuu

SEQ ID NO: 2084186 - RNA, 19 nt, Homo sapiens
  misc_RNA (1)...(19): siRNA sense strand
uaacaacagugcugguaaa

SEQ ID NO: 2084187 - RNA, 19 nt, Homo sapiens
  misc_RNA (1)...(19): siRNA sense strand
gaagauggauccaccugau

SEQ ID NO: 2084188 - RNA, 19 nt, Homo sapiens
  misc_RNA (1)...(19): siRNA sense strand
ccuacaagcuuucuuaaga

SEQ ID NO: 2084189 - RNA, 19 nt, Homo sapiens
  misc_RNA (1)...(19): siRNA sense strand
gaaagagguugcacaugau

SEQ ID NO: 2084190 - RNA, 19 nt, Homo sapiens
  misc_RNA (1)...(19): siRNA sense strand
cagcugaucuuaauaaugg

SEQ ID NO: 2084191 - RNA, 19 nt, Homo sapiens
  misc_RNA (1)...(19): siRNA sense strand
gcaagcaaaugguauucaa

SEQ ID NO: 2084192 - RNA, 19 nt, Homo sapiens
  misc_RNA (1)...(19): siRNA sense strand
ucaaauuggugacaagaaa

SEQ ID NO: 2084193 - RNA, 19 nt, Homo sapiens
  misc_RNA (1)...(19): siRNA sense strand
guagauauccucaagaaga

SEQ ID NO: 2084194 - RNA, 19 nt, Homo sapiens
  misc_RNA (1)...(19): siRNA sense strand
ugaaggugaucaugcaaua

SEQ ID NO: 2084195 - RNA, 19 nt, Homo sapiens
  misc_RNA (1)...(19): siRNA sense strand
ccaauggccaggaguauua

SEQ ID NO: 2084196 - RNA, 19 nt, Homo sapiens
  misc_RNA (1)...(19): siRNA sense strand
ggaccuaucuccucucaag

SEQ ID NO: 2084197 - RNA, 19 nt, Homo sapiens
  misc_RNA (1)...(19): siRNA sense strand
gaugauagaucuaguacag

SEQ ID NO: 2084198 - RNA, 19 nt, Homo sapiens
  misc_RNA (1)...(19): siRNA sense strand
ggagaaagcccaccacaca

SEQ ID NO: 2084199 - RNA, 19 nt, Homo sapiens
  misc_RNA (1)...(19): siRNA sense strand
gguuacagaucauacuuaa

SEQ ID NO: 2084200 - RNA, 19 nt, Homo sapiens
  misc_RNA (1)...(19): siRNA sense strand
acucauggauuuagcaaua

SEQ ID NO: 2084201 - RNA, 19 nt, Homo sapiens
  misc_RNA (1)...(19): siRNA sense strand
gaauguuggccaucaaaua

SEQ ID NO: 2084202 - RNA, 19 nt, Homo sapiens
  misc_RNA (1)...(19): siRNA sense strand
caacgggcaugugaugaua

SEQ ID NO: 2084203 - RNA, 19 nt, Homo sapiens
  misc_RNA (1)...(19): siRNA sense strand
cuugaaagcuuauuggaaa

SEQ ID NO: 2084204 - RNA, 19 nt, Homo sapiens
  misc_RNA (1)...(19): siRNA sense strand
aaaugcaucugucuucuuu

SEQ ID NO: 2084205 - RNA, 19 nt, Homo sapiens
  misc_RNA (1)...(19): siRNA sense strand
gcaaaugguauucaagauu

SEQ ID NO: 2084206 - RNA, 19 nt, Homo sapiens
  misc_RNA (1)...(19): siRNA sense strand
ucaccuacuugcccauuua

SEQ ID NO: 2084207 - RNA, 19 nt, Homo sapiens
  misc_RNA (1)...(19): siRNA sense strand
caaauacccucugccugua

SEQ ID NO: 2084208 - RNA, 19 nt, Homo sapiens
  misc_RNA (1)...(19): siRNA sense strand
uaaggaagauacuggaaga

SEQ ID NO: 2084209 - RNA, 19 nt, Homo sapiens
  misc_RNA (1)...(19): siRNA sense strand
ccaagaggauucaacguau

SEQ ID NO: 2084210 - RNA, 19 nt, Homo sapiens
  misc_RNA (1)...(19): siRNA sense strand
uaaaguggauucuccuguu

SEQ ID NO: 2084211 - RNA, 19 nt, Homo sapiens
  misc_RNA (1)...(19): siRNA sense strand
ggaaauagaaaccguaauc

SEQ ID NO: 2084212 - RNA, 19 nt, Homo sapiens
  misc_RNA (1)...(19): siRNA sense strand
gaaagucugucauucaaaa

SEQ ID NO: 2084213 - RNA, 19 nt, Homo sapiens
  misc_RNA (1)...(19): siRNA sense strand
agacgaacacuguaucuua

SEQ ID NO: 2084214 - RNA, 19 nt, Homo sapiens
  misc_RNA (1)...(19): siRNA sense strand
caaauguuaugggacaaua

SEQ ID NO: 2084215 - RNA, 19 nt, Homo sapiens
  misc_RNA (1)...(19): siRNA sense strand
gugauugucuuguccauga

SEQ ID NO: 2084216 - RNA, 19 nt, Homo sapiens
  misc_RNA (1)...(19): siRNA sense strand
cugaagaaauugugaugua

SEQ ID NO: 2084217 - RNA, 19 nt, Homo sapiens
  misc_RNA (1)...(19): siRNA sense strand
aaaguggauucuccuguua

SEQ ID NO: 2084218 - RNA, 19 nt, Homo sapiens
  misc_RNA (1)...(19): siRNA sense strand
caagagcggugaaguacga

SEQ ID NO: 2084219 - RNA, 19 nt, Homo sapiens
  misc_RNA (1)...(19): siRNA sense strand
gcacacuuaucacaaacaa

SEQ ID NO: 2084220 - RNA, 19 nt, Homo sapiens
  misc_RNA (1)...(19): siRNA sense strand
ucagaucccugcuaauaga

SEQ ID NO: 2084221 - RNA, 19 nt, Homo sapiens
  misc_RNA (1)...(19): siRNA sense strand
gaggagaaaccaagggaua

SEQ ID NO: 2084222 - RNA, 19 nt, Homo sapiens
  misc_RNA (1)...(19): siRNA sense strand
gaaaaggaaucuagugaug

SEQ ID NO: 2084223 - RNA, 19 nt, Homo sapiens
  misc_RNA (1)...(19): siRNA sense strand
acacgaaacauucaaagua

SEQ ID NO: 2084224 - RNA, 19 nt, Homo sapiens
  misc_RNA (1)...(19): siRNA sense strand
gaagacagaagcucauuuc

SEQ ID NO: 2084225 - RNA, 19 nt, Homo sapiens
  misc_RNA (1)...(19): siRNA sense strand
guauucagaucccugcuaa

SEQ ID NO: 2084226 - RNA, 19 nt, Homo sapiens
  misc_RNA (1)...(19): siRNA sense strand
gacagcagaugauucaaau

SEQ ID NO: 2084227 - RNA, 19 nt, Homo sapiens
  misc_RNA (1)...(19): siRNA sense strand
caaauaucuuccagaacua

SEQ ID NO: 2084228 - RNA, 19 nt, Homo sapiens
  misc_RNA (1)...(19): siRNA sense strand
acaaauaucuuccagaacu

SEQ ID NO: 2084229 - RNA, 19 nt, Homo sapiens
  misc_RNA (1)...(19): siRNA sense strand
cgaauaagccuggaaaguu

SEQ ID NO: 2084230 - RNA, 19 nt, Homo sapiens
  misc_RNA (1)...(19): siRNA sense strand
gaccaaauacucuugauau

SEQ ID NO: 2084231 - RNA, 19 nt, Homo sapiens
  misc_RNA (1)...(19): siRNA sense strand
agucugaucuuggauauaa

SEQ ID NO: 2084232 - RNA, 19 nt, Homo sapiens
  misc_RNA (1)...(19): siRNA sense strand
ggacagcagaugauucaaa

SEQ ID NO: 2084233 - RNA, 19 nt, Homo sapiens
  misc_RNA (1)...(19): siRNA sense strand
ucaaguugcucucggugua

SEQ ID NO: 2084234 - RNA, 19 nt, Homo sapiens
  misc_RNA (1)...(19): siRNA sense strand
gaauugaucucagccgaau

SEQ ID NO: 2084235 - RNA, 19 nt, Homo sapiens
  misc_RNA (1)...(19): siRNA sense strand
gaaucuaccucuuuaacag

SEQ ID NO: 2084236 - RNA, 19 nt, Homo sapiens
  misc_RNA (1)...(19): siRNA sense strand
gaaaaggaguugcagagaa

SEQ ID NO: 2084237 - RNA, 19 nt, Homo sapiens
  misc_RNA (1)...(19): siRNA sense strand
ggaggaggaugaagaugau

SEQ ID NO: 2084238 - RNA, 19 nt, Homo sapiens
  misc_RNA (1)...(19): siRNA sense strand
ggccacagauuuaccuuug

SEQ ID NO: 2084239 - RNA, 19 nt, Homo sapiens
  misc_RNA (1)...(19): siRNA sense strand
gaauaaguguccacauuuu

SEQ ID NO: 2084240 - RNA, 19 nt, Homo sapiens
  misc_RNA (1)...(19): siRNA sense strand
ggauuuaugcucaauagaa

SEQ ID NO: 2084241 - RNA, 19 nt, Homo sapiens
  misc_RNA (1)...(19): siRNA sense strand
ggaaagaaagauugaaaca

SEQ ID NO: 2084242 - RNA, 19 nt, Homo sapiens
  misc_RNA (1)...(19): siRNA sense strand
ggaccaaugagucagauuu

SEQ ID NO: 2084243 - RNA, 19 nt, Homo sapiens
  misc_RNA (1)...(19): siRNA sense strand
gauugauucuuucuucuga

SEQ ID NO: 2084244 - RNA, 19 nt, Homo sapiens
  misc_RNA (1)...(19): siRNA sense strand
uuaccuggauugauucuuu

SEQ ID NO: 2084245 - RNA, 19 nt, Homo sapiens
  misc_RNA (1)...(19): siRNA sense strand
caaagccucuagaagaaga

SEQ ID NO: 2084246 - RNA, 19 nt, Homo sapiens
  misc_RNA (1)...(19): siRNA sense strand
ccuggaagauacuuucuaa

SEQ ID NO: 2084247 - RNA, 19 nt, Homo sapiens
  misc_RNA (1)...(19): siRNA sense strand
cuaacuauuuggcagauaa

SEQ ID NO: 2084248 - RNA, 19 nt, Homo sapiens
  misc_RNA (1)...(19): siRNA sense strand
uauggacugugguuuauuu

SEQ ID NO: 2084249 - RNA, 19 nt, Homo sapiens
  misc_RNA (1)...(19): siRNA sense strand
caaauugccuucaaaauca

SEQ ID NO: 2084250 - RNA, 19 nt, Homo sapiens
  misc_RNA (1)...(19): siRNA sense strand
uaaagaagcaugcacacuu

SEQ ID NO: 2084251 - RNA, 19 nt, Homo sapiens
  misc_RNA (1)...(19): siRNA sense strand
ugacuugcccaguaacuua

SEQ ID NO: 2084252 - RNA, 19 nt, Homo sapiens
  misc_RNA (1)...(19): siRNA sense strand
acaaacaacucucucagau

SEQ ID NO: 2084253 - RNA, 19 nt, Homo sapiens
  misc_RNA (1)...(19): siRNA sense strand
gagaagagcuacauuaaag

SEQ ID NO: 2084254 - RNA, 19 nt, Homo sapiens
  misc_RNA (1)...(19): siRNA sense strand
gagaaaggauacucagaua

SEQ ID NO: 2084255 - RNA, 19 nt, Homo sapiens
  misc_RNA (1)...(19): siRNA sense strand
caagagagguggaaaguug

SEQ ID NO: 2084256 - RNA, 19 nt, Homo sapiens
  misc_RNA (1)...(19): siRNA sense strand
ggaaagugcuugggaauga

SEQ ID NO: 2084257 - RNA, 19 nt, Homo sapiens
  misc_RNA (1)...(19): siRNA sense strand
gaacgaucgugacuugaua

SEQ ID NO: 2084258 - RNA, 19 nt, Homo sapiens
  misc_RNA (1)...(19): siRNA sense strand
gaaaggauacucagauaga

SEQ ID NO: 2084259 - RNA, 19 nt, Homo sapiens
  misc_RNA (1)...(19): siRNA sense strand
gaaacuugcucuaucaaca

SEQ ID NO: 2084260 - RNA, 19 nt, Homo sapiens
  misc_RNA (1)...(19): siRNA sense strand
ccagaacgaucgugacuug

SEQ ID NO: 2084261 - RNA, 19 nt, Homo sapiens
  misc_RNA (1)...(19): siRNA sense strand
gcagagcccuugcuaaguc

SEQ ID NO: 2084262 - RNA, 19 nt, Homo sapiens
  misc_RNA (1)...(19): siRNA sense strand
cuaaauggcuauauucugu

SEQ ID NO: 2084263 - RNA, 19 nt, Homo sapiens
  misc_RNA (1)...(19): siRNA sense strand
ggaaugagacggcagaugu

SEQ ID NO: 2084264 - RNA, 19 nt, Homo sapiens
  misc_RNA (1)...(19): siRNA sense strand
caucacugcuguucuacua

SEQ ID NO: 2084265 - RNA, 19 nt, Homo sapiens
  misc_RNA (1)...(19): siRNA sense strand
guugguaccucaaagcuuu

SEQ ID NO: 2084266 - RNA, 19 nt, Homo sapiens
  misc_RNA (1)...(19): siRNA sense strand
gaacaagaagggaaucgaa

SEQ ID NO: 2084267 - RNA, 19 nt, Homo sapiens
  misc_RNA (1)...(19): siRNA sense strand
aggcuucaguucaauauua

SEQ ID NO: 2084268 - RNA, 19 nt, Homo sapiens
  misc_RNA (1)...(19): siRNA sense strand
gauauggauucuacuaugu

SEQ ID NO: 2084269 - RNA, 19 nt, Homo sapiens
  misc_RNA (1)...(19): siRNA sense strand
ccacuguacucaauuaugu

SEQ ID NO: 2084270 - RNA, 19 nt, Homo sapiens
  misc_RNA (1)...(19): siRNA sense strand
ggagaagagcuacauuaaa

SEQ ID NO: 2084271 - RNA, 19 nt, Homo sapiens
  misc_RNA (1)...(19): siRNA sense strand
ccucaucacugcuguucua

SEQ ID NO: 2084272 - RNA, 19 nt, Homo sapiens
  misc_RNA (1)...(19): siRNA sense strand
gcagcacaccacaucauua

SEQ ID NO: 2084273 - RNA, 19 nt, Homo sapiens
  misc_RNA (1)...(19): siRNA sense strand
gaaaguugguaccucaaag

SEQ ID NO: 2084274 - RNA, 19 nt, Homo sapiens
  misc_RNA (1)...(19): siRNA sense strand
gagcauggccaacuacuuc

SEQ ID NO: 2084275 - RNA, 19 nt, Homo sapiens
  misc_RNA (1)...(19): siRNA sense strand
gaaauaagccucgcuaucc

SEQ ID NO: 2084276 - RNA, 19 nt, Homo sapiens
  misc_RNA (1)...(19): siRNA sense strand
gaaugagacggcagaugua

SEQ ID NO: 2084277 - RNA, 19 nt, Homo sapiens
  misc_RNA (1)...(19): siRNA sense strand
ggagaaaggauacucagau

SEQ ID NO: 2084278 - RNA, 19 nt, Homo sapiens
  misc_RNA (1)...(19): siRNA sense strand
ccuggucucuguuggauaa

SEQ ID NO: 2084279 - RNA, 19 nt, Homo sapiens
  misc_RNA (1)...(19): siRNA sense strand
caggagaagagcuacauua

SEQ ID NO: 2084280 - RNA, 19 nt, Homo sapiens
  misc_RNA (1)...(19): siRNA sense strand
ggacuacauuggaagaaag

SEQ ID NO: 2084281 - RNA, 19 nt, Homo sapiens
  misc_RNA (1)...(19): siRNA sense strand
acaagaagauuaucauugc

SEQ ID NO: 2084282 - RNA, 19 nt, Homo sapiens
  misc_RNA (1)...(19): siRNA sense strand
cagcacaccacaucauuaa

SEQ ID NO: 2084283 - RNA, 19 nt, Homo sapiens
  misc_RNA (1)...(19): siRNA sense strand
ccaaagccuggcauucuua

SEQ ID NO: 2084284 - RNA, 19 nt, Homo sapiens
  misc_RNA (1)...(19): siRNA sense strand
gaaaauggagcaucucaaa

SEQ ID NO: 2084285 - RNA, 19 nt, Homo sapiens
  misc_RNA (1)...(19): siRNA sense strand
gaaccuguggacauuagua

SEQ ID NO: 2084286 - RNA, 19 nt, Homo sapiens
  misc_RNA (1)...(19): siRNA sense strand
ccgagcaggugaacaagaa

SEQ ID NO: 2084287 - RNA, 19 nt, Homo sapiens
  misc_RNA (1)...(19): siRNA sense strand
ccuagaggcugccgagaga

SEQ ID NO: 2084288 - RNA, 19 nt, Homo sapiens
  misc_RNA (1)...(19): siRNA sense strand
ggaaaguugguaccucaaa

SEQ ID NO: 2084289 - RNA, 19 nt, Homo sapiens
  misc_RNA (1)...(19): siRNA sense strand
gacccaaacuggccagauc

SEQ ID NO: 2084290 - RNA, 19 nt, Homo sapiens
  misc_RNA (1)...(19): siRNA sense strand
caaaggcuucaguucaaua

SEQ ID NO: 2084291 - RNA, 19 nt, Homo sapiens
  misc_RNA (1)...(19): siRNA sense strand
cggcagauguagccuguga

SEQ ID NO: 2084292 - RNA, 19 nt, Homo sapiens
  misc_RNA (1)...(19): siRNA sense strand
gcaaaugguuacggagauc

SEQ ID NO: 2084293 - RNA, 19 nt, Homo sapiens
  misc_RNA (1)...(19): siRNA sense strand
ggagaauucaauaccuuaa

SEQ ID NO: 2084294 - RNA, 19 nt, Homo sapiens
  misc_RNA (1)...(19): siRNA sense strand
gagccgagcaggugaacaa

SEQ ID NO: 2084295 - RNA, 19 nt, Homo sapiens
  misc_RNA (1)...(19): siRNA sense strand
gagcaaggccuggagaugu

SEQ ID NO: 2084296 - RNA, 19 nt, Homo sapiens
  misc_RNA (1)...(19): siRNA sense strand
cgagagauaccuacaguuc

SEQ ID NO: 2084297 - RNA, 19 nt, Homo sapiens
  misc_RNA (1)...(19): siRNA sense strand
cuacagugaucuuaucgau

SEQ ID NO: 2084298 - RNA, 19 nt, Homo sapiens
  misc_RNA (1)...(19): siRNA sense strand
gggucuaaauggcuauauu

SEQ ID NO: 2084299 - RNA, 19 nt, Homo sapiens
  misc_RNA (1)...(19): siRNA sense strand
ggaaagggccuagcaucug

SEQ ID NO: 2084300 - RNA, 19 nt, Homo sapiens
  misc_RNA (1)...(19): siRNA sense strand
gaaggacuacauuggaaga

SEQ ID NO: 2084301 - RNA, 19 nt, Homo sapiens
  misc_RNA (1)...(19): siRNA sense strand
ugagggaacugcacgucaa

SEQ ID NO: 2084302 - RNA, 19 nt, Homo sapiens
  misc_RNA (1)...(19): siRNA sense strand
gauccucccauauauguga

SEQ ID NO: 2084303 - RNA, 19 nt, Homo sapiens
  misc_RNA (1)...(19): siRNA sense strand
uccaaaggcuucaguucaa

SEQ ID NO: 2084304 - RNA, 19 nt, Homo sapiens
  misc_RNA (1)...(19): siRNA sense strand
gggaaccuguggacauuag

SEQ ID NO: 2084305 - RNA, 19 nt, Homo sapiens
  misc_RNA (1)...(19): siRNA sense strand
ucacugcuguucuacuaau

SEQ ID NO: 2084306 - RNA, 19 nt, Homo sapiens
  misc_RNA (1)...(19): siRNA sense strand
agauauggauucuacuaug

SEQ ID NO: 2084307 - RNA, 19 nt, Homo sapiens
  misc_RNA (1)...(19): siRNA sense strand
guacucaauuaugugauga

SEQ ID NO: 2084308 - RNA, 19 nt, Homo sapiens
  misc_RNA (1)...(19): siRNA sense strand
uaacuuugcucagacucaa

SEQ ID NO: 2084309 - RNA, 19 nt, Homo sapiens
  misc_RNA (1)...(19): siRNA sense strand
agagauaccuacaguucug

SEQ ID NO: 2084310 - RNA, 19 nt, Homo sapiens
  misc_RNA (1)...(19): siRNA sense strand
gcacaccacaucauuaagg

SEQ ID NO: 2084311 - RNA, 19 nt, Homo sapiens
  misc_RNA (1)...(19): siRNA sense strand
guggagaauucaauaccuu

SEQ ID NO: 2084312 - RNA, 19 nt, Homo sapiens
  misc_RNA (1)...(19): siRNA sense strand
uaaaggcacauccgauuuc

SEQ ID NO: 2084313 - RNA, 19 nt, Homo sapiens
  misc_RNA (1)...(19): siRNA sense strand
gaauucuacagugaucuua

SEQ ID NO: 2084314 - RNA, 19 nt, Homo sapiens
  misc_RNA (1)...(19): siRNA sense strand
aagccuggcauucuuauaa

SEQ ID NO: 2084315 - RNA, 19 nt, Homo sapiens
  misc_RNA (1)...(19): siRNA sense strand
ccaacuacuucagagacua

SEQ ID NO: 2084316 - RNA, 19 nt, Homo sapiens
  misc_RNA (1)...(19): siRNA sense strand
ccaaaggcuucaguucaau

SEQ ID NO: 2084317 - RNA, 19 nt, Homo sapiens
  misc_RNA (1)...(19): siRNA sense strand
ucagauagauauggauucu

SEQ ID NO: 2084318 - RNA, 19 nt, Homo sapiens
  misc_RNA (1)...(19): siRNA sense strand
ggucucuguuggauaaguu

SEQ ID NO: 2084319 - RNA, 19 nt, Homo sapiens
  misc_RNA (1)...(19): siRNA sense strand
ugugaugaguggagaauuc

SEQ ID NO: 2084320 - RNA, 19 nt, Homo sapiens
  misc_RNA (1)...(19): siRNA sense strand
auacggugauccucccaua

SEQ ID NO: 2084321 - RNA, 19 nt, Homo sapiens
  misc_RNA (1)...(19): siRNA sense strand
gccgagagauaccuacagu

SEQ ID NO: 2084322 - RNA, 19 nt, Homo sapiens
  misc_RNA (1)...(19): siRNA sense strand
aaauuccacuguacucaau

SEQ ID NO: 2084323 - RNA, 19 nt, Homo sapiens
  misc_RNA (1)...(19): siRNA sense strand
ggucuaaauggcuauauuc

SEQ ID NO: 2084324 - RNA, 19 nt, Homo sapiens
  misc_RNA (1)...(19): siRNA sense strand
gaaagugcuugggaaugag

SEQ ID NO: 2084325 - RNA, 19 nt, Homo sapiens
  misc_RNA (1)...(19): siRNA sense strand
aagaaagagugcagagcaa

SEQ ID NO: 2084326 - RNA, 19 nt, Homo sapiens
  misc_RNA (1)...(19): siRNA sense strand
uaagucacaugcaaauggu

SEQ ID NO: 2084327 - RNA, 19 nt, Homo sapiens
  misc_RNA (1)...(19): siRNA sense strand
gccuggagaugucgagguu

SEQ ID NO: 2084328 - RNA, 19 nt, Homo sapiens
  misc_RNA (1)...(19): siRNA sense strand
acaagaagggaaucgaauu

SEQ ID NO: 2084329 - RNA, 19 nt, Homo sapiens
  misc_RNA (1)...(19): siRNA sense strand
aggagaagagcuacauuaa

SEQ ID NO: 2084330 - RNA, 19 nt, Homo sapiens
  misc_RNA (1)...(19): siRNA sense strand
uauggauucuacuauguug

SEQ ID NO: 2084331 - RNA, 19 nt, Homo sapiens
  misc_RNA (1)...(19): siRNA sense strand
uuaaaggcacauccgauuu

SEQ ID NO: 2084332 - RNA, 19 nt, Homo sapiens
  misc_RNA (1)...(19): siRNA sense strand
caaggcagcacaccacauc

SEQ ID NO: 2084333 - RNA, 19 nt, Homo sapiens
  misc_RNA (1)...(19): siRNA sense strand
uaucaacaaucagaugcuu

SEQ ID NO: 2084334 - RNA, 19 nt, Homo sapiens
  misc_RNA (1)...(19): siRNA sense strand
acggugauccucccauaua

SEQ ID NO: 2084335 - RNA, 19 nt, Homo sapiens
  misc_RNA (1)...(19): siRNA sense strand
cauuaaggcccacgccaaa

SEQ ID NO: 2084336 - RNA, 19 nt, Homo sapiens
  misc_RNA (1)...(19): siRNA sense strand
caaggucuggugggaauuu

SEQ ID NO: 2084337 - RNA, 19 nt, Homo sapiens
  misc_RNA (1)...(19): siRNA sense strand
auacucagauagauaugga

SEQ ID NO: 2084338 - RNA, 19 nt, Homo sapiens
  misc_RNA (1)...(19): siRNA sense strand
uagaggcugccgagagaua

SEQ ID NO: 2084339 - RNA, 19 nt, Homo sapiens
  misc_RNA (1)...(19): siRNA sense strand
caugaaggacuacauugga

SEQ ID NO: 2084340 - RNA, 19 nt, Homo sapiens
  misc_RNA (1)...(19): siRNA sense strand
aaauaagccucgcuaucca

SEQ ID NO: 2084341 - RNA, 19 nt, Homo sapiens
  misc_RNA (1)...(19): siRNA sense strand
aaaggauacucagauagau

SEQ ID NO: 2084342 - RNA, 19 nt, Homo sapiens
  misc_RNA (1)...(19): siRNA sense strand
auuccacuguacucaauua

SEQ ID NO: 2084343 - RNA, 19 nt, Homo sapiens
  misc_RNA (1)...(19): siRNA sense strand
gggaaagggccuagcaucu

SEQ ID NO: 2084344 - RNA, 19 nt, Homo sapiens
  misc_RNA (1)...(19): siRNA sense strand
aggcacauccgauuucuug

SEQ ID NO: 2084345 - RNA, 19 nt, Homo sapiens
  misc_RNA (1)...(19): siRNA sense strand
aaacuugcucuaucaacaa

SEQ ID NO: 2084346 - RNA, 19 nt, Homo sapiens
  misc_RNA (1)...(19): siRNA sense strand
uuggaaacuugcucuauca

SEQ ID NO: 2084347 - RNA, 19 nt, Homo sapiens
  misc_RNA (1)...(19): siRNA sense strand
gaugaguggagaauucaau

SEQ ID NO: 2084348 - RNA, 19 nt, Homo sapiens
  misc_RNA (1)...(19): siRNA sense strand
aaggauacucagauagaua

SEQ ID NO: 2084349 - RNA, 19 nt, Homo sapiens
  misc_RNA (1)...(19): siRNA sense strand
agaaauaagccucgcuauc

SEQ ID NO: 2084350 - RNA, 19 nt, Homo sapiens
  misc_RNA (1)...(19): siRNA sense strand
gugauccucccauauaugu

SEQ ID NO: 2084351 - RNA, 19 nt, Homo sapiens
  misc_RNA (1)...(19): siRNA sense strand
uggagaauucaauaccuua

SEQ ID NO: 2084352 - RNA, 19 nt, Homo sapiens
  misc_RNA (1)...(19): siRNA sense strand
uguacucaauuaugugaug

SEQ ID NO: 2084353 - RNA, 19 nt, Homo sapiens
  misc_RNA (1)...(19): siRNA sense strand
gaaauugacugucucauaa

SEQ ID NO: 2084354 - RNA, 19 nt, Homo sapiens
  misc_RNA (1)...(19): siRNA sense strand
gaaaggugguucaguauga

SEQ ID NO: 2084355 - RNA, 19 nt, Homo sapiens
  misc_RNA (1)...(19): siRNA sense strand
gcaagaaucuaacugagaa

SEQ ID NO: 2084356 - RNA, 19 nt, Homo sapiens
  misc_RNA (1)...(19): siRNA sense strand
ucacuuggguugagaaaua

SEQ ID NO: 2084357 - RNA, 19 nt, Homo sapiens
  misc_RNA (1)...(19): siRNA sense strand
gaauaaacaugacugguau

SEQ ID NO: 2084358 - RNA, 19 nt, Homo sapiens
  misc_RNA (1)...(19): siRNA sense strand
gaccauauauuccucaauu

SEQ ID NO: 2084359 - RNA, 19 nt, Homo sapiens
  misc_RNA (1)...(19): siRNA sense strand
gcaagccauuucuacauua

SEQ ID NO: 2084360 - RNA, 19 nt, Homo sapiens
  misc_RNA (1)...(19): siRNA sense strand
ccaagaaggugguuagguu

SEQ ID NO: 2084361 - RNA, 19 nt, Homo sapiens
  misc_RNA (1)...(19): siRNA sense strand
gggaaggguucaagucuuu

SEQ ID NO: 2084362 - RNA, 19 nt, Homo sapiens
  misc_RNA (1)...(19): siRNA sense strand
gggccuaucuguuaacaaa

SEQ ID NO: 2084363 - RNA, 19 nt, Homo sapiens
  misc_RNA (1)...(19): siRNA sense strand
gaauguggcugauaagucu

SEQ ID NO: 2084364 - RNA, 19 nt, Homo sapiens
  misc_RNA (1)...(19): siRNA sense strand
agaaucagcucuucacuau

SEQ ID NO: 2084365 - RNA, 19 nt, Homo sapiens
  misc_RNA (1)...(19): siRNA sense strand
ugacaaagcaauccaguuu

SEQ ID NO: 2084366 - RNA, 19 nt, Homo sapiens
  misc_RNA (1)...(19): siRNA sense strand
caaagucuaugcacagaga

SEQ ID NO: 2084367 - RNA, 19 nt, Homo sapiens
  misc_RNA (1)...(19): siRNA sense strand
gagaguaacaacuauauga

SEQ ID NO: 2084368 - RNA, 19 nt, Homo sapiens
  misc_RNA (1)...(19): siRNA sense strand
ugacugguaugaagaauau

SEQ ID NO: 2084369 - RNA, 19 nt, Homo sapiens
  misc_RNA (1)...(19): siRNA sense strand
gcugauaagucuagauuca

SEQ ID NO: 2084370 - RNA, 19 nt, Homo sapiens
  misc_RNA (1)...(19): siRNA sense strand
ugaauucucucauagcuau

SEQ ID NO: 2084371 - RNA, 19 nt, Homo sapiens
  misc_RNA (1)...(19): siRNA sense strand
aaacaugacugguaugaag

SEQ ID NO: 2084372 - RNA, 19 nt, Homo sapiens
  misc_RNA (1)...(19): siRNA sense strand
gcucuucacuauacauuau

SEQ ID NO: 2084373 - RNA, 19 nt, Homo sapiens
  misc_RNA (1)...(19): siRNA sense strand
cagcucgggucaacuauaa

SEQ ID NO: 2084374 - RNA, 19 nt, Homo sapiens
  misc_RNA (1)...(19): siRNA sense strand
gguugaaggugugccauua

SEQ ID NO: 2084375 - RNA, 19 nt, Homo sapiens
  misc_RNA (1)...(19): siRNA sense strand
ugaauaaacaugacuggua

SEQ ID NO: 2084376 - RNA, 19 nt, Homo sapiens
  misc_RNA (1)...(19): siRNA sense strand
uguuagggcucaaauauga

SEQ ID NO: 2084377 - RNA, 19 nt, Homo sapiens
  misc_RNA (1)...(19): siRNA sense strand
caguauggauuaagucauu

SEQ ID NO: 2084378 - RNA, 19 nt, Homo sapiens
  misc_RNA (1)...(19): siRNA sense strand
ggcaagccauuucuacauu

SEQ ID NO: 2084379 - RNA, 19 nt, Homo sapiens
  misc_RNA (1)...(19): siRNA sense strand
gcuaugaucgguuugaauu

SEQ ID NO: 2084380 - RNA, 19 nt, Homo sapiens
  misc_RNA (1)...(19): siRNA sense strand
gaaggugugccauuaucua

SEQ ID NO: 2084381 - RNA, 19 nt, Homo sapiens
  misc_RNA (1)...(19): siRNA sense strand
uaauugggcuguaugacuu

SEQ ID NO: 2084382 - RNA, 19 nt, Homo sapiens
  misc_RNA (1)...(19): siRNA sense strand
agucagggccuaucuguua

SEQ ID NO: 2084383 - RNA, 19 nt, Homo sapiens
  misc_RNA (1)...(19): siRNA sense strand
gaaggugguuagguugauu

SEQ ID NO: 2084384 - RNA, 19 nt, Homo sapiens
  misc_RNA (1)...(19): siRNA sense strand
gcucaggaaccaucuauga

SEQ ID NO: 2084385 - RNA, 19 nt, Homo sapiens
  misc_RNA (1)...(19): siRNA sense strand
gugauuggcuaguaaggaa

SEQ ID NO: 2084386 - RNA, 19 nt, Homo sapiens
  misc_RNA (1)...(19): siRNA sense strand
agaaauugacugucucaua

SEQ ID NO: 2084387 - RNA, 19 nt, Homo sapiens
  misc_RNA (1)...(19): siRNA sense strand
ucaccaaugucaaacaguu

SEQ ID NO: 2084388 - RNA, 19 nt, Homo sapiens
  misc_RNA (1)...(19): siRNA sense strand
uggcgaauguggcugauaa

SEQ ID NO: 2084389 - RNA, 19 nt, Homo sapiens
  misc_RNA (1)...(19): siRNA sense strand
ucucauagcuauuccaaag

SEQ ID NO: 2084390 - RNA, 19 nt, Homo sapiens
  misc_RNA (1)...(19): siRNA sense strand
caucugagaguaacaacua

SEQ ID NO: 2084391 - RNA, 19 nt, Homo sapiens
  misc_RNA (1)...(19): siRNA sense strand
caauuauggugacccguaa

SEQ ID NO: 2084392 - RNA, 19 nt, Homo sapiens
  misc_RNA (1)...(19): siRNA sense strand
gaaccaggaugagaaaggu

SEQ ID NO: 2084393 - RNA, 19 nt, Homo sapiens
  misc_RNA (1)...(19): siRNA sense strand
aaucagcucuucacuauac

SEQ ID NO: 2084394 - RNA, 19 nt, Homo sapiens
  misc_RNA (1)...(19): siRNA sense strand
ugaaacagcagaagacaga

SEQ ID NO: 2084395 - RNA, 19 nt, Homo sapiens
  misc_RNA (1)...(19): siRNA sense strand
cauaaaugaugaacacaca

SEQ ID NO: 2084396 - RNA, 19 nt, Homo sapiens
  misc_RNA (1)...(19): siRNA sense strand
acaccuagcucuuuuguuu

SEQ ID NO: 2084397 - RNA, 19 nt, Homo sapiens
  misc_RNA (1)...(19): siRNA sense strand
gauauauacuauggcauug

SEQ ID NO: 2084398 - RNA, 19 nt, Homo sapiens
  misc_RNA (1)...(19): siRNA sense strand
gugguuagguugauugcaa

SEQ ID NO: 2084399 - RNA, 19 nt, Homo sapiens
  misc_RNA (1)...(19): siRNA sense strand
uauggugacccguaaguua

SEQ ID NO: 2084400 - RNA, 19 nt, Homo sapiens
  misc_RNA (1)...(19): siRNA sense strand
gguguuagggcucaaauau

SEQ ID NO: 2084401 - RNA, 19 nt, Homo sapiens
  misc_RNA (1)...(19): siRNA sense strand
gaugaacacacaauuaaag

SEQ ID NO: 2084402 - RNA, 19 nt, Homo sapiens
  misc_RNA (1)...(19): siRNA sense strand
gaagaaauugacugucuca

SEQ ID NO: 2084403 - RNA, 19 nt, Homo sapiens
  misc_RNA (1)...(19): siRNA sense strand
gaauauccaaccacaccua

SEQ ID NO: 2084404 - RNA, 19 nt, Homo sapiens
  misc_RNA (1)...(19): siRNA sense strand
agaaaccagugaaggugua

SEQ ID NO: 2084405 - RNA, 19 nt, Homo sapiens
  misc_RNA (1)...(19): siRNA sense strand
gaaaccuccucacauagag

SEQ ID NO: 2084406 - RNA, 19 nt, Homo sapiens
  misc_RNA (1)...(19): siRNA sense strand
ccacggcguucgaguagug

SEQ ID NO: 2084407 - RNA, 19 nt, Homo sapiens
  misc_RNA (1)...(19): siRNA sense strand
auggaaaggugguucagua

SEQ ID NO: 2084408 - RNA, 19 nt, Homo sapiens
  misc_RNA (1)...(19): siRNA sense strand
gcagcagcaucugagagua

SEQ ID NO: 2084409 - RNA, 19 nt, Homo sapiens
  misc_RNA (1)...(19): siRNA sense strand
gauugcacaguauggauua

SEQ ID NO: 2084410 - RNA, 19 nt, Homo sapiens
  misc_RNA (1)...(19): siRNA sense strand
ccacccacaucaaucaguu

SEQ ID NO: 2084411 - RNA, 19 nt, Homo sapiens
  misc_RNA (1)...(19): siRNA sense strand
uaaggaaccaggaugagaa

SEQ ID NO: 2084412 - RNA, 19 nt, Homo sapiens
  misc_RNA (1)...(19): siRNA sense strand
ggaaaggugguucaguaug

SEQ ID NO: 2084413 - RNA, 19 nt, Homo sapiens
  misc_RNA (1)...(19): siRNA sense strand
caaccacaccuagcucuuu

SEQ ID NO: 2084414 - RNA, 19 nt, Homo sapiens
  misc_RNA (1)...(19): siRNA sense strand
guaagggauuccucgacaa

SEQ ID NO: 2084415 - RNA, 19 nt, Homo sapiens
  misc_RNA (1)...(19): siRNA sense strand
ccucaaggcuauuucuauc

SEQ ID NO: 2084416 - RNA, 19 nt, Homo sapiens
  misc_RNA (1)...(19): siRNA sense strand
gaugguguguuuaugucuu

SEQ ID NO: 2084417 - RNA, 19 nt, Homo sapiens
  misc_RNA (1)...(19): siRNA sense strand
ggauuccucgacaacauua

SEQ ID NO: 2084418 - RNA, 19 nt, Homo sapiens
  misc_RNA (1)...(19): siRNA sense strand
ggucaacuauaagacuuug

SEQ ID NO: 2084419 - RNA, 19 nt, Homo sapiens
  misc_RNA (1)...(19): siRNA sense strand
caacagccccuuauaaguu

SEQ ID NO: 2084420 - RNA, 19 nt, Homo sapiens
  misc_RNA (1)...(19): siRNA sense strand
gagccaggaugguauucug

SEQ ID NO: 2084421 - RNA, 19 nt, Homo sapiens
  misc_RNA (1)...(19): siRNA sense strand
cgguuugaauucucucaua

SEQ ID NO: 2084422 - RNA, 19 nt, Homo sapiens
  misc_RNA (1)...(19): siRNA sense strand
gggcucaaauaugaagaaa

SEQ ID NO: 2084423 - RNA, 19 nt, Homo sapiens
  misc_RNA (1)...(19): siRNA sense strand
gcagggcaaagcacaacua

SEQ ID NO: 2084424 - RNA, 19 nt, Homo sapiens
  misc_RNA (1)...(19): siRNA sense strand
uaucauaccacccacauca

SEQ ID NO: 2084425 - RNA, 19 nt, Homo sapiens
  misc_RNA (1)...(19): siRNA sense strand
ggcauggaaucucuuaaag

SEQ ID NO: 2084426 - RNA, 19 nt, Homo sapiens
  misc_RNA (1)...(19): siRNA sense strand
gcagcucgggucaacuaua

SEQ ID NO: 2084427 - RNA, 19 nt, Homo sapiens
  misc_RNA (1)...(19): siRNA sense strand
ggagugggucuuucaaaca

SEQ ID NO: 2084428 - RNA, 19 nt, Homo sapiens
  misc_RNA (1)...(19): siRNA sense strand
caaacaacagucugaggaa

SEQ ID NO: 2084429 - RNA, 19 nt, Homo sapiens
  misc_RNA (1)...(19): siRNA sense strand
cagaguggauggguuugaa

SEQ ID NO: 2084430 - RNA, 19 nt, Homo sapiens
  misc_RNA (1)...(19): siRNA sense strand
cauuacagcaagaaucuaa

SEQ ID NO: 2084431 - RNA, 19 nt, Homo sapiens
  misc_RNA (1)...(19): siRNA sense strand
gacagagucaagugcauaa

SEQ ID NO: 2084432 - RNA, 19 nt, Homo sapiens
  misc_RNA (1)...(19): siRNA sense strand
ugauggcuaugaucgguuu

SEQ ID NO: 2084433 - RNA, 19 nt, Homo sapiens
  misc_RNA (1)...(19): siRNA sense strand
cagcagcaucugagaguaa

SEQ ID NO: 2084434 - RNA, 19 nt, Homo sapiens
  misc_RNA (1)...(19): siRNA sense strand
guaugagcguggcauggaa

SEQ ID NO: 2084435 - RNA, 19 nt, Homo sapiens
  misc_RNA (1)...(19): siRNA sense strand
ugagcagcauggaguuaaa

SEQ ID NO: 2084436 - RNA, 19 nt, Homo sapiens
  misc_RNA (1)...(19): siRNA sense strand
gucagggccuaucuguuaa

SEQ ID NO: 2084437 - RNA, 19 nt, Homo sapiens
  misc_RNA (1)...(19): siRNA sense strand
gaaccacguggccaaacaa

SEQ ID NO: 2084438 - RNA, 19 nt, Homo sapiens
  misc_RNA (1)...(19): siRNA sense strand
caagccauuucuacauuag

SEQ ID NO: 2084439 - RNA, 19 nt, Homo sapiens
  misc_RNA (1)...(19): siRNA sense strand
ggaaggguucaagucuuua

SEQ ID NO: 2084440 - RNA, 19 nt, Homo sapiens
  misc_RNA (1)...(19): siRNA sense strand
guaaggaaccaggaugaga

SEQ ID NO: 2084441 - RNA, 19 nt, Homo sapiens
  misc_RNA (1)...(19): siRNA sense strand
gaaucagcucuucacuaua

SEQ ID NO: 2084442 - RNA, 19 nt, Homo sapiens
  misc_RNA (1)...(19): siRNA sense strand
gguuugaauucucucauag

SEQ ID NO: 2084443 - RNA, 19 nt, Homo sapiens
  misc_RNA (1)...(19): siRNA sense strand
ucauagcuauuccaaaguc

SEQ ID NO: 2084444 - RNA, 19 nt, Homo sapiens
  misc_RNA (1)...(19): siRNA sense strand
aagccaugcugcccuugua

SEQ ID NO: 2084445 - RNA, 19 nt, Homo sapiens
  misc_RNA (1)...(19): siRNA sense strand
ucaaaugcucagcuaauug

SEQ ID NO: 2084446 - RNA, 19 nt, Homo sapiens
  misc_RNA (1)...(19): siRNA sense strand
ugucucaaaugcucagcua

SEQ ID NO: 2084447 - RNA, 19 nt, Homo sapiens
  misc_RNA (1)...(19): siRNA sense strand
gagaaaccuccucacauag

SEQ ID NO: 2084448 - RNA, 19 nt, Homo sapiens
  misc_RNA (1)...(19): siRNA sense strand
gaaucuaacugagaaaccu

SEQ ID NO: 2084449 - RNA, 19 nt, Homo sapiens
  misc_RNA (1)...(19): siRNA sense strand
agagucaagugcauaagug

SEQ ID NO: 2084450 - RNA, 19 nt, Homo sapiens
  misc_RNA (1)...(19): siRNA sense strand
uagauucaccaaugucaaa

SEQ ID NO: 2084451 - RNA, 19 nt, Homo sapiens
  misc_RNA (1)...(19): siRNA sense strand
augcucagcuaauugcuuu

SEQ ID NO: 2084452 - RNA, 19 nt, Homo sapiens
  misc_RNA (1)...(19): siRNA sense strand
cucaaaugcucagcuaauu

SEQ ID NO: 2084453 - RNA, 19 nt, Homo sapiens
  misc_RNA (1)...(19): siRNA sense strand
cauacgacauccuauagaa

SEQ ID NO: 2084454 - RNA, 19 nt, Homo sapiens
  misc_RNA (1)...(19): siRNA sense strand
ccacagcucugaggacaug

SEQ ID NO: 2084455 - RNA, 19 nt, Homo sapiens
  misc_RNA (1)...(19): siRNA sense strand
ugucaaggauucccaugaa

SEQ ID NO: 2084456 - RNA, 19 nt, Homo sapiens
  misc_RNA (1)...(19): siRNA sense strand
cacagaacauucagccauu

SEQ ID NO: 2084457 - RNA, 19 nt, Homo sapiens
  misc_RNA (1)...(19): siRNA sense strand
gaucagcccucugccuaca

SEQ ID NO: 2084458 - RNA, 19 nt, Homo sapiens
  misc_RNA (1)...(19): siRNA sense strand
cagccucccuuucuucuuc

SEQ ID NO: 2084459 - RNA, 19 nt, Homo sapiens
  misc_RNA (1)...(19): siRNA sense strand
ggauucccaugaaguguca

SEQ ID NO: 2084460 - RNA, 19 nt, Homo sapiens
  misc_RNA (1)...(19): siRNA sense strand
ggacaugcagacagaagga

SEQ ID NO: 2084461 - RNA, 19 nt, Homo sapiens
  misc_RNA (1)...(19): siRNA sense strand
acagaacauucagccauuu

SEQ ID NO: 2084462 - RNA, 19 nt, Homo sapiens
  misc_RNA (1)...(19): siRNA sense strand
gcacguggaacucuggaau

SEQ ID NO: 2084463 - RNA, 19 nt, Homo sapiens
  misc_RNA (1)...(19): siRNA sense strand
cuuaggacaugcagacaga

SEQ ID NO: 2084464 - RNA, 19 nt, Homo sapiens
  misc_RNA (1)...(19): siRNA sense strand
gcauacgacauccuauaga

SEQ ID NO: 2084465 - RNA, 19 nt, Homo sapiens
  misc_RNA (1)...(19): siRNA sense strand
caaggauucccaugaagug

SEQ ID NO: 2084466 - RNA, 19 nt, Homo sapiens
  misc_RNA (1)...(19): siRNA sense strand
ccacaacugggcaagagaa

SEQ ID NO: 2084467 - RNA, 19 nt, Homo sapiens
  misc_RNA (1)...(19): siRNA sense strand
augcugaccuacagucuga

SEQ ID NO: 2084468 - RNA, 19 nt, Homo sapiens
  misc_RNA (1)...(19): siRNA sense strand
gggcugacucucuacuuga

SEQ ID NO: 2084469 - RNA, 19 nt, Homo sapiens
  misc_RNA (1)...(19): siRNA sense strand
ccgaggcugcuucuccuua

SEQ ID NO: 2084470 - RNA, 19 nt, Homo sapiens
  misc_RNA (1)...(19): siRNA sense strand
gaacauucagccauuucuc

SEQ ID NO: 2084471 - RNA, 19 nt, Homo sapiens
  misc_RNA (1)...(19): siRNA sense strand
ccacagccucccuuucuuc

SEQ ID NO: 2084472 - RNA, 19 nt, Homo sapiens
  misc_RNA (1)...(19): siRNA sense strand
cgaggcugcuucuccuuag

SEQ ID NO: 2084473 - RNA, 19 nt, Homo sapiens
  misc_RNA (1)...(19): siRNA sense strand
acucuggaaugcugaccua

SEQ ID NO: 2084474 - RNA, 19 nt, Homo sapiens
  misc_RNA (1)...(19): siRNA sense strand
uacgacauccuauagaaga

SEQ ID NO: 2084475 - RNA, 19 nt, Homo sapiens
  misc_RNA (1)...(19): siRNA sense strand
gacaugagcaaaaugguuu

SEQ ID NO: 2084476 - RNA, 19 nt, Homo sapiens
  misc_RNA (1)...(19): siRNA sense strand
cagacggaaugucaaggau

SEQ ID NO: 2084477 - RNA, 19 nt, Homo sapiens
  misc_RNA (1)...(19): siRNA sense strand
ccagacggaaugucaagga

SEQ ID NO: 2084478 - RNA, 19 nt, Homo sapiens
  misc_RNA (1)...(19): siRNA sense strand
ucaaggauucccaugaagu

SEQ ID NO: 2084479 - RNA, 19 nt, Homo sapiens
  misc_RNA (1)...(19): siRNA sense strand
ggacaugagcaaaaugguu

SEQ ID NO: 2084480 - RNA, 19 nt, Homo sapiens
  misc_RNA (1)...(19): siRNA sense strand
ggccacacuucagccaaga

SEQ ID NO: 2084481 - RNA, 19 nt, Homo sapiens
  misc_RNA (1)...(19): siRNA sense strand
agccauuucuccugugguu

SEQ ID NO: 2084482 - RNA, 19 nt, Homo sapiens
  misc_RNA (1)...(19): siRNA sense strand
guccacagccucccuuucu

SEQ ID NO: 2084483 - RNA, 19 nt, Homo sapiens
  misc_RNA (1)...(19): siRNA sense strand
ccacacccacagaacauuc

SEQ ID NO: 2084484 - RNA, 19 nt, Homo sapiens
  misc_RNA (1)...(19): siRNA sense strand
ugaccuacagucugaguuc

SEQ ID NO: 2084485 - RNA, 19 nt, Homo sapiens
  misc_RNA (1)...(19): siRNA sense strand
acucucuacuugaccugua

SEQ ID NO: 2084486 - RNA, 19 nt, Homo sapiens
  misc_RNA (1)...(19): siRNA sense strand
gucaaggauucccaugaag

SEQ ID NO: 2084487 - RNA, 19 nt, Homo sapiens
  misc_RNA (1)...(19): siRNA sense strand
caacugggcaagagaaaau

SEQ ID NO: 2084488 - RNA, 19 nt, Homo sapiens
  misc_RNA (1)...(19): siRNA sense strand
augcauacgacauccuaua

SEQ ID NO: 2084489 - RNA, 19 nt, Homo sapiens
  misc_RNA (1)...(19): siRNA sense strand
agacggaaugucaaggauu

SEQ ID NO: 2084490 - RNA, 19 nt, Homo sapiens
  misc_RNA (1)...(19): siRNA sense strand
gaagggauaacacugaaua

SEQ ID NO: 2084491 - RNA, 19 nt, Homo sapiens
  misc_RNA (1)...(19): siRNA sense strand
caaagaaugcugucuauga

SEQ ID NO: 2084492 - RNA, 19 nt, Homo sapiens
  misc_RNA (1)...(19): siRNA sense strand
ggaagugguucucaaagug

SEQ ID NO: 2084493 - RNA, 19 nt, Homo sapiens
  misc_RNA (1)...(19): siRNA sense strand
caacaaaugcacagaaaga

SEQ ID NO: 2084494 - RNA, 19 nt, Homo sapiens
  misc_RNA (1)...(19): siRNA sense strand
gugaagagauaaagaagug

SEQ ID NO: 2084495 - RNA, 19 nt, Homo sapiens
  misc_RNA (1)...(19): siRNA sense strand
gagaagggauaacacugaa

SEQ ID NO: 2084496 - RNA, 19 nt, Homo sapiens
  misc_RNA (1)...(19): siRNA sense strand
ccaaguagcuucagaaaau

SEQ ID NO: 2084497 - RNA, 19 nt, Homo sapiens
  misc_RNA (1)...(19): siRNA sense strand
gagaugaaguggagaaagg

SEQ ID NO: 2084498 - RNA, 19 nt, Homo sapiens
  misc_RNA (1)...(19): siRNA sense strand
gcaagaagagucugagugu

SEQ ID NO: 2084499 - RNA, 19 nt, Homo sapiens
  misc_RNA (1)...(19): siRNA sense strand
gaaagacagcuucucugaa

SEQ ID NO: 2084500 - RNA, 19 nt, Homo sapiens
  misc_RNA (1)...(19): siRNA sense strand
cuaagaagaugccgaacug

SEQ ID NO: 2084501 - RNA, 19 nt, Homo sapiens
  misc_RNA (1)...(19): siRNA sense strand
caagaagagucugagugua

SEQ ID NO: 2084502 - RNA, 19 nt, Homo sapiens
  misc_RNA (1)...(19): siRNA sense strand
aaagacagcuucucugaac

SEQ ID NO: 2084503 - RNA, 19 nt, Homo sapiens
  misc_RNA (1)...(19): siRNA sense strand
cuugaagggugaagagaua

SEQ ID NO: 2084504 - RNA, 19 nt, Homo sapiens
  misc_RNA (1)...(19): siRNA sense strand
gggauaacacugaauaaau

SEQ ID NO: 2084505 - RNA, 19 nt, Homo sapiens
  misc_RNA (1)...(19): siRNA sense strand
gcacggcuccuucccaaug

SEQ ID NO: 2084506 - RNA, 19 nt, Homo sapiens
  misc_RNA (1)...(19): siRNA sense strand
gaauaaauacaaccagcaa

SEQ ID NO: 2084507 - RNA, 19 nt, Homo sapiens
  misc_RNA (1)...(19): siRNA sense strand
ggaggaagugguucucaaa

SEQ ID NO: 2084508 - RNA, 19 nt, Homo sapiens
  misc_RNA (1)...(19): siRNA sense strand
aaagaaguguggccgagaa

SEQ ID NO: 2084509 - RNA, 19 nt, Homo sapiens
  misc_RNA (1)...(19): siRNA sense strand
gguccugccugcccuaaga

SEQ ID NO: 2084510 - RNA, 19 nt, Homo sapiens
  misc_RNA (1)...(19): siRNA sense strand
aagaagagucugaguguaa

SEQ ID NO: 2084511 - RNA, 19 nt, Homo sapiens
  misc_RNA (1)...(19): siRNA sense strand
ggaagccuccaaugucuga

SEQ ID NO: 2084512 - RNA, 19 nt, Homo sapiens
  misc_RNA (1)...(19): siRNA sense strand
uaccuggcguuccguauuu

SEQ ID NO: 2084513 - RNA, 19 nt, Homo sapiens
  misc_RNA (1)...(19): siRNA sense strand
aaagaaugcugucuaugag

SEQ ID NO: 2084514 - RNA, 19 nt, Homo sapiens
  misc_RNA (1)...(19): siRNA sense strand
cgagaagggauaacacuga

SEQ ID NO: 2084515 - RNA, 19 nt, Homo sapiens
  misc_RNA (1)...(19): siRNA sense strand
ccagaaguauaucuuugug

SEQ ID NO: 2084516 - RNA, 19 nt, Homo sapiens
  misc_RNA (1)...(19): siRNA sense strand
gcaauaccacaagcuguuu

SEQ ID NO: 2084517 - RNA, 19 nt, Homo sapiens
  misc_RNA (1)...(19): siRNA sense strand
gcaguuaugcuccuugagu

SEQ ID NO: 2084518 - RNA, 19 nt, Homo sapiens
  misc_RNA (1)...(19): siRNA sense strand
gaagugguucucaaagugu

SEQ ID NO: 2084519 - RNA, 19 nt, Homo sapiens
  misc_RNA (1)...(19): siRNA sense strand
cuacagccuuccagcaaga

SEQ ID NO: 2084520 - RNA, 19 nt, Homo sapiens
  misc_RNA (1)...(19): siRNA sense strand
caggaagccuccaaugucu

SEQ ID NO: 2084521 - RNA, 19 nt, Homo sapiens
  misc_RNA (1)...(19): siRNA sense strand
caaagagaaaccagacaga

SEQ ID NO: 2084522 - RNA, 19 nt, Homo sapiens
  misc_RNA (1)...(19): siRNA sense strand
caauaccacaagcuguuua

SEQ ID NO: 2084523 - RNA, 19 nt, Homo sapiens
  misc_RNA (1)...(19): siRNA sense strand
accacaagcuguuuaagga

SEQ ID NO: 2084524 - RNA, 19 nt, Homo sapiens
  misc_RNA (1)...(19): siRNA sense strand
caguuaugcuccuugaguu

SEQ ID NO: 2084525 - RNA, 19 nt, Homo sapiens
  misc_RNA (1)...(19): siRNA sense strand
agagaaaccagacagaguu

SEQ ID NO: 2084526 - RNA, 19 nt, Homo sapiens
  misc_RNA (1)...(19): siRNA sense strand
gagaaaccagacagaguug

SEQ ID NO: 2084527 - RNA, 19 nt, Homo sapiens
  misc_RNA (1)...(19): siRNA sense strand
gagcccaaguagcuucaga

SEQ ID NO: 2084528 - RNA, 19 nt, Homo sapiens
  misc_RNA (1)...(19): siRNA sense strand
ccaggaagccuccaauguc

SEQ ID NO: 2084529 - RNA, 19 nt, Homo sapiens
  misc_RNA (1)...(19): siRNA sense strand
gaaguauaucuuuguguca

SEQ ID NO: 2084530 - RNA, 19 nt, Homo sapiens
  misc_RNA (1)...(19): siRNA sense strand
gaugaaguggagaaaggua

SEQ ID NO: 2084531 - RNA, 19 nt, Homo sapiens
  misc_RNA (1)...(19): siRNA sense strand
ugcaaagaaugcugucuau

SEQ ID NO: 2084532 - RNA, 19 nt, Homo sapiens
  misc_RNA (1)...(19): siRNA sense strand
gagucugaguguaagagaa

SEQ ID NO: 2084533 - RNA, 19 nt, Homo sapiens
  misc_RNA (1)...(19): siRNA sense strand
accaacaaaugcacagaaa

SEQ ID NO: 2084534 - RNA, 19 nt, Homo sapiens
  misc_RNA (1)...(19): siRNA sense strand
aaagucaagagcccaagua

SEQ ID NO: 2084535 - RNA, 19 nt, Homo sapiens
  misc_RNA (1)...(19): siRNA sense strand
gcaaagaaugcugucuaug

SEQ ID NO: 2084536 - RNA, 19 nt, Homo sapiens
  misc_RNA (1)...(19): siRNA sense strand
ggacuccacagacaguuuc

SEQ ID NO: 2084537 - RNA, 19 nt, Homo sapiens
  misc_RNA (1)...(19): siRNA sense strand
ccaacaccagccagaagua

SEQ ID NO: 2084538 - RNA, 19 nt, Homo sapiens
  misc_RNA (1)...(19): siRNA sense strand
caacaccagccagaaguau

SEQ ID NO: 2084539 - RNA, 19 nt, Homo sapiens
  misc_RNA (1)...(19): siRNA sense strand
gaaaccagacagaguugag

SEQ ID NO: 2084540 - RNA, 19 nt, Homo sapiens
  misc_RNA (1)...(19): siRNA sense strand
ggucauuccuguggugucu

SEQ ID NO: 2084541 - RNA, 19 nt, Homo sapiens
  misc_RNA (1)...(19): siRNA sense strand
ggcuagagcagcaguuaug

SEQ ID NO: 2084542 - RNA, 19 nt, Homo sapiens
  misc_RNA (1)...(19): siRNA sense strand
gcccaaguagcuucagaaa

SEQ ID NO: 2084543 - RNA, 19 nt, Homo sapiens
  misc_RNA (1)...(19): siRNA sense strand
gaagagucugaguguaaga

SEQ ID NO: 2084544 - RNA, 19 nt, Homo sapiens
  misc_RNA (1)...(19): siRNA sense strand
gagagucugcacccaccua

SEQ ID NO: 2084545 - RNA, 19 nt, Homo sapiens
  misc_RNA (1)...(19): siRNA sense strand
uaaauacaaccagcaauac

SEQ ID NO: 2084546 - RNA, 19 nt, Homo sapiens
  misc_RNA (1)...(19): siRNA sense strand
gcuccucaaggucuucuuu

SEQ ID NO: 2084547 - RNA, 19 nt, Homo sapiens
  misc_RNA (1)...(19): siRNA sense strand
gucaagagcccaaguagcu

SEQ ID NO: 2084548 - RNA, 19 nt, Homo sapiens
  misc_RNA (1)...(19): siRNA sense strand
agccagaaguauaucuuug

SEQ ID NO: 2084549 - RNA, 19 nt, Homo sapiens
  misc_RNA (1)...(19): siRNA sense strand
caagauggcacggcuccuu

SEQ ID NO: 2084550 - RNA, 19 nt, Homo sapiens
  misc_RNA (1)...(19): siRNA sense strand
ggauaucaagguggucauu

SEQ ID NO: 2084551 - RNA, 19 nt, Homo sapiens
  misc_RNA (1)...(19): siRNA sense strand
aggaagugguucucaaagu

SEQ ID NO: 2084552 - RNA, 19 nt, Homo sapiens
  misc_RNA (1)...(19): siRNA sense strand
uggaggaagugguucucaa

SEQ ID NO: 2084553 - RNA, 19 nt, Homo sapiens
  misc_RNA (1)...(19): siRNA sense strand
gggauuaccggcuccucaa

SEQ ID NO: 2084554 - RNA, 19 nt, Homo sapiens
  misc_RNA (1)...(19): siRNA sense strand
gcucucccacugcaaagaa

SEQ ID NO: 2084555 - RNA, 19 nt, Homo sapiens
  misc_RNA (1)...(19): siRNA sense strand
cagccagaaguauaucuuu

SEQ ID NO: 2084556 - RNA, 19 nt, Homo sapiens
  misc_RNA (1)...(19): siRNA sense strand
acaccagccagaaguauau

SEQ ID NO: 2084557 - RNA, 19 nt, Homo sapiens
  misc_RNA (1)...(19): siRNA sense strand
gccagaaguauaucuuugu

SEQ ID NO: 2084558 - RNA, 19 nt, Homo sapiens
  misc_RNA (1)...(19): siRNA sense strand
ccuguguccugcaaagaga

SEQ ID NO: 2084559 - RNA, 19 nt, Homo sapiens
  misc_RNA (1)...(19): siRNA sense strand
uguggugucugugcaaaug

SEQ ID NO: 2084560 - RNA, 19 nt, Homo sapiens
  misc_RNA (1)...(19): siRNA sense strand
cugcaaagaaugcugucua

SEQ ID NO: 2084561 - RNA, 19 nt, Homo sapiens
  misc_RNA (1)...(19): siRNA sense strand
agaagagucugaguguaag

SEQ ID NO: 2084562 - RNA, 19 nt, Homo sapiens
  misc_RNA (1)...(19): siRNA sense strand
gaagggugaagagauaaag

SEQ ID NO: 2084563 - RNA, 19 nt, Homo sapiens
  misc_RNA (1)...(19): siRNA sense strand
acaagcuguuuaaggaugu

SEQ ID NO: 2084564 - RNA, 19 nt, Homo sapiens
  misc_RNA (1)...(19): siRNA sense strand
cuaccuggcguuccguauu

SEQ ID NO: 2084565 - RNA, 19 nt, Homo sapiens
  misc_RNA (1)...(19): siRNA sense strand
agcugaggcucugggauua

SEQ ID NO: 2084566 - RNA, 19 nt, Homo sapiens
  misc_RNA (1)...(19): siRNA sense strand
ccaacuggcucugcuucca

SEQ ID NO: 2084567 - RNA, 19 nt, Homo sapiens
  misc_RNA (1)...(19): siRNA sense strand
gaggaagugguucucaaag

SEQ ID NO: 2084568 - RNA, 19 nt, Homo sapiens
  misc_RNA (1)...(19): siRNA sense strand
gauaucaagguggucauuc

SEQ ID NO: 2084569 - RNA, 19 nt, Homo sapiens
  misc_RNA (1)...(19): siRNA sense strand
ggucuucuuugugcugauc

SEQ ID NO: 2084570 - RNA, 19 nt, Homo sapiens
  misc_RNA (1)...(19): siRNA sense strand
ugaagggugaagagauaaa

SEQ ID NO: 2084571 - RNA, 19 nt, Homo sapiens
  misc_RNA (1)...(19): siRNA sense strand
ccacaagcuguuuaaggau

SEQ ID NO: 2084572 - RNA, 19 nt, Homo sapiens
  misc_RNA (1)...(19): siRNA sense strand
gacuggccaucaccaccaa

SEQ ID NO: 2084573 - RNA, 19 nt, Homo sapiens
  misc_RNA (1)...(19): siRNA sense strand
ggugaagagauaaagaagu

SEQ ID NO: 2084574 - RNA, 19 nt, Homo sapiens
  misc_RNA (1)...(19): siRNA sense strand
acaaaugcacagaaagaca

SEQ ID NO: 2084575 - RNA, 19 nt, Homo sapiens
  misc_RNA (1)...(19): siRNA sense strand
ccucaaggucuucuuugug

SEQ ID NO: 2084576 - RNA, 19 nt, Homo sapiens
  misc_RNA (1)...(19): siRNA sense strand
ggacugcgcuuacaaagag

SEQ ID NO: 2084577 - RNA, 19 nt, Homo sapiens
  misc_RNA (1)...(19): siRNA sense strand
caaguacgcucaccaguuc

SEQ ID NO: 2084578 - RNA, 19 nt, Homo sapiens
  misc_RNA (1)...(19): siRNA sense strand
caacaucgcccaggagauu

SEQ ID NO: 2084579 - RNA, 19 nt, Homo sapiens
  misc_RNA (1)...(19): siRNA sense strand
gggagggccuugaugaaga

SEQ ID NO: 2084580 - RNA, 19 nt, Homo sapiens
  misc_RNA (1)...(19): siRNA sense strand
ggaaggagagggagaagga

SEQ ID NO: 2084581 - RNA, 19 nt, Homo sapiens
  misc_RNA (1)...(19): siRNA sense strand
ggagauuaauggcaacuac

SEQ ID NO: 2084582 - RNA, 19 nt, Homo sapiens
  misc_RNA (1)...(19): siRNA sense strand
gcgccugcguggacaagua

SEQ ID NO: 2084583 - RNA, 19 nt, Homo sapiens
  misc_RNA (1)...(19): siRNA sense strand
ggcaagcccuaccgucuga

SEQ ID NO: 2084584 - RNA, 19 nt, Homo sapiens
  misc_RNA (1)...(19): siRNA sense strand
caacuucauauccagcuuu

SEQ ID NO: 2084585 - RNA, 19 nt, Homo sapiens
  misc_RNA (1)...(19): siRNA sense strand
cgccaacucuacgucaaua

SEQ ID NO: 2084586 - RNA, 19 nt, Homo sapiens
  misc_RNA (1)...(19): siRNA sense strand
gagcccgacuccauugcuu

SEQ ID NO: 2084587 - RNA, 19 nt, Homo sapiens
  misc_RNA (1)...(19): siRNA sense strand
ggucugggcgcuucuagga

SEQ ID NO: 2084588 - RNA, 19 nt, Homo sapiens
  misc_RNA (1)...(19): siRNA sense strand
gcaauggcaacuucagauc

SEQ ID NO: 2084589 - RNA, 19 nt, Homo sapiens
  misc_RNA (1)...(19): siRNA sense strand
gcucaagccgcacgucuuc

SEQ ID NO: 2084590 - RNA, 19 nt, Homo sapiens
  misc_RNA (1)...(19): siRNA sense strand
ggaggaaggagagggagaa

SEQ ID NO: 2084591 - RNA, 19 nt, Homo sapiens
  misc_RNA (1)...(19): siRNA sense strand
acaaguacgcucaccaguu

SEQ ID NO: 2084592 - RNA, 19 nt, Homo sapiens
  misc_RNA (1)...(19): siRNA sense strand
ggacuggcguucguguuac

SEQ ID NO: 2084593 - RNA, 19 nt, Homo sapiens
  misc_RNA (1)...(19): siRNA sense strand
gagcagggagacccaagug

SEQ ID NO: 2084594 - RNA, 19 nt, Homo sapiens
  misc_RNA (1)...(19): siRNA sense strand
cggaggaggacacaaguga

SEQ ID NO: 2084595 - RNA, 19 nt, Homo sapiens
  misc_RNA (1)...(19): siRNA sense strand
ggagggccuugaugaagac

SEQ ID NO: 2084596 - RNA, 19 nt, Homo sapiens
  misc_RNA (1)...(19): siRNA sense strand
uuagcgcgcugucacacuu

SEQ ID NO: 2084597 - RNA, 19 nt, Homo sapiens
  misc_RNA (1)...(19): siRNA sense strand
caucgcugcuggucauagu

SEQ ID NO: 2084598 - RNA, 19 nt, Homo sapiens
  misc_RNA (1)...(19): siRNA sense strand
ugucacacuugcaacucua

SEQ ID NO: 2084599 - RNA, 19 nt, Homo sapiens
  misc_RNA (1)...(19): siRNA sense strand
aggacuggcguucguguua

SEQ ID NO: 2084600 - RNA, 19 nt, Homo sapiens
  misc_RNA (1)...(19): siRNA sense strand
uugcaacucuaucacaauc

SEQ ID NO: 2084601 - RNA, 19 nt, Homo sapiens
  misc_RNA (1)...(19): siRNA sense strand
gagauuaauggcaacuaca

SEQ ID NO: 2084602 - RNA, 19 nt, Homo sapiens
  misc_RNA (1)...(19): siRNA sense strand
gccaacgugacgacgcuua

SEQ ID NO: 2084603 - RNA, 19 nt, Homo sapiens
  misc_RNA (1)...(19): siRNA sense strand
agaaggagauggggauuug

SEQ ID NO: 2084604 - RNA, 19 nt, Homo sapiens
  misc_RNA (1)...(19): siRNA sense strand
ggagagggagaaggagaug

SEQ ID NO: 2084605 - RNA, 19 nt, Homo sapiens
  misc_RNA (1)...(19): siRNA sense strand
cgccugcaauggcaacuuc

SEQ ID NO: 2084606 - RNA, 19 nt, Homo sapiens
  misc_RNA (1)...(19): siRNA sense strand
gacuggcguucguguuaca

SEQ ID NO: 2084607 - RNA, 19 nt, Homo sapiens
  misc_RNA (1)...(19): siRNA sense strand
gacaauaucuaccucauca

SEQ ID NO: 2084608 - RNA, 19 nt, Homo sapiens
  misc_RNA (1)...(19): siRNA sense strand
gaauaucucucaccuggau

SEQ ID NO: 2084609 - RNA, 19 nt, Homo sapiens
  misc_RNA (1)...(19): siRNA sense strand
gcaaggcucuggacuucuu

SEQ ID NO: 2084610 - RNA, 19 nt, Homo sapiens
  misc_RNA (1)...(19): siRNA sense strand
ggcccgagcugaauacuug

SEQ ID NO: 2084611 - RNA, 19 nt, Homo sapiens
  misc_RNA (1)...(19): siRNA sense strand
uaaaguguguagccaagaa

SEQ ID NO: 2084612 - RNA, 19 nt, Homo sapiens
  misc_RNA (1)...(19): siRNA sense strand
gcacguacgccacggugua

SEQ ID NO: 2084613 - RNA, 19 nt, Homo sapiens
  misc_RNA (1)...(19): siRNA sense strand
ggacaagccacgccuccua

SEQ ID NO: 2084614 - RNA, 19 nt, Homo sapiens
  misc_RNA (1)...(19): siRNA sense strand
gcucuggacuucuuuguac

SEQ ID NO: 2084615 - RNA, 19 nt, Homo sapiens
  misc_RNA (1)...(19): siRNA sense strand
gaagagaagauccguagca

SEQ ID NO: 2084616 - RNA, 19 nt, Homo sapiens
  misc_RNA (1)...(19): siRNA sense strand
gggagcugcuucacacuga

SEQ ID NO: 2084617 - RNA, 19 nt, Homo sapiens
  misc_RNA (1)...(19): siRNA sense strand
uaccugcccugcacuauga

SEQ ID NO: 2084618 - RNA, 19 nt, Homo sapiens
  misc_RNA (1)...(19): siRNA sense strand
ccuccuagcugcccuggaa

SEQ ID NO: 2084619 - RNA, 19 nt, Homo sapiens
  misc_RNA (1)...(19): siRNA sense strand
gcagcugccuuaucacucu

SEQ ID NO: 2084620 - RNA, 19 nt, Homo sapiens
  misc_RNA (1)...(19): siRNA sense strand
ugaaggagcaggucaagau

SEQ ID NO: 2084621 - RNA, 19 nt, Homo sapiens
  misc_RNA (1)...(19): siRNA sense strand
gugaagugguagccauaaa

SEQ ID NO: 2084622 - RNA, 19 nt, Homo sapiens
  misc_RNA (1)...(19): siRNA sense strand
ggugcaggcugugaagaaa

SEQ ID NO: 2084623 - RNA, 19 nt, Homo sapiens
  misc_RNA (1)...(19): siRNA sense strand
cgaccugucucgcuucauc

SEQ ID NO: 2084624 - RNA, 19 nt, Homo sapiens
  misc_RNA (1)...(19): siRNA sense strand
ggagaagccccaccuaaaa

SEQ ID NO: 2084625 - RNA, 19 nt, Homo sapiens
  misc_RNA (1)...(19): siRNA sense strand
gaagugguagccauaaagu

SEQ ID NO: 2084626 - RNA, 19 nt, Homo sapiens
  misc_RNA (1)...(19): siRNA sense strand
caauaucuaccucaucaug

SEQ ID NO: 2084627 - RNA, 19 nt, Homo sapiens
  misc_RNA (1)...(19): siRNA sense strand
gaaggagcaggucaagaug

SEQ ID NO: 2084628 - RNA, 19 nt, Homo sapiens
  misc_RNA (1)...(19): siRNA sense strand
cccgagaccugcucagaga

SEQ ID NO: 2084629 - RNA, 19 nt, Homo sapiens
  misc_RNA (1)...(19): siRNA sense strand
ggacagugacaauaucuac

SEQ ID NO: 2084630 - RNA, 19 nt, Homo sapiens
  misc_RNA (1)...(19): siRNA sense strand
caagaaggacacucgugaa

SEQ ID NO: 2084631 - RNA, 19 nt, Homo sapiens
  misc_RNA (1)...(19): siRNA sense strand
gagcugaauacuugaagga

SEQ ID NO: 2084632 - RNA, 19 nt, Homo sapiens
  misc_RNA (1)...(19): siRNA sense strand
cagcugccauggccaagga

SEQ ID NO: 2084633 - RNA, 19 nt, Homo sapiens
  misc_RNA (1)...(19): siRNA sense strand
agacuuugguuucgcacaa

SEQ ID NO: 2084634 - RNA, 19 nt, Homo sapiens
  misc_RNA (1)...(19): siRNA sense strand
ucucucaccuggaucugaa

SEQ ID NO: 2084635 - RNA, 19 nt, Homo sapiens
  misc_RNA (1)...(19): siRNA sense strand
ccuuaucacucuacugcaa

SEQ ID NO: 2084636 - RNA, 19 nt, Homo sapiens
  misc_RNA (1)...(19): siRNA sense strand
ucacggagauugagauccu

SEQ ID NO: 2084637 - RNA, 19 nt, Homo sapiens
  misc_RNA (1)...(19): siRNA sense strand
cugcaaggcucuggacuuc

SEQ ID NO: 2084638 - RNA, 19 nt, Homo sapiens
  misc_RNA (1)...(19): siRNA sense strand
aagagaagauccguagcaa

SEQ ID NO: 2084639 - RNA, 19 nt, Homo sapiens
  misc_RNA (1)...(19): siRNA sense strand
aggaugcccuggaccugua

SEQ ID NO: 2084640 - RNA, 19 nt, Homo sapiens
  misc_RNA (1)...(19): siRNA sense strand
aagagggacugucggaauc

SEQ ID NO: 2084641 - RNA, 19 nt, Homo sapiens
  misc_RNA (1)...(19): siRNA sense strand
cagcggaaggaggcaauua

SEQ ID NO: 2084642 - RNA, 19 nt, Homo sapiens
  misc_RNA (1)...(19): siRNA sense strand
cugacacccuggacaaaga

SEQ ID NO: 2084643 - RNA, 19 nt, Homo sapiens
  misc_RNA (1)...(19): siRNA sense strand
ccucauggcccgagcugaa

SEQ ID NO: 2084644 - RNA, 19 nt, Homo sapiens
  misc_RNA (1)...(19): siRNA sense strand
aaagagggacugucggaau

SEQ ID NO: 2084645 - RNA, 19 nt, Homo sapiens
  misc_RNA (1)...(19): siRNA sense strand
cugucucgcuucauccaua

SEQ ID NO: 2084646 - RNA, 19 nt, Homo sapiens
  misc_RNA (1)...(19): siRNA sense strand
ggguggaccuggagcacau

SEQ ID NO: 2084647 - RNA, 19 nt, Homo sapiens
  misc_RNA (1)...(19): siRNA sense strand
guaccugcccugcacuaug

SEQ ID NO: 2084648 - RNA, 19 nt, Homo sapiens
  misc_RNA (1)...(19): siRNA sense strand
aggaggcaauuaaggcaaa

SEQ ID NO: 2084649 - RNA, 19 nt, Homo sapiens
  misc_RNA (1)...(19): siRNA sense strand
ugcaggcugugaagaaaga

SEQ ID NO: 2084650 - RNA, 19 nt, Homo sapiens
  misc_RNA (1)...(19): siRNA sense strand
caucgucuccucuuccaau

SEQ ID NO: 2084651 - RNA, 19 nt, Homo sapiens
  misc_RNA (1)...(19): siRNA sense strand
gugggacagugacaauauc

SEQ ID NO: 2084652 - RNA, 19 nt, Homo sapiens
  misc_RNA (1)...(19): siRNA sense strand
caagaaaagucugaacaag

SEQ ID NO: 2084653 - RNA, 19 nt, Homo sapiens
  misc_RNA (1)...(19): siRNA sense strand
gguggcgcgugucuucaug

SEQ ID NO: 2084654 - RNA, 19 nt, Homo sapiens
  misc_RNA (1)...(19): siRNA sense strand
auaucuaccucaucaugga

SEQ ID NO: 2084655 - RNA, 19 nt, Homo sapiens
  misc_RNA (1)...(19): siRNA sense strand
gugacaauaucuaccucau

SEQ ID NO: 2084656 - RNA, 19 nt, Homo sapiens
  misc_RNA (1)...(19): siRNA sense strand
cagcugccuuaucacucua

SEQ ID NO: 2084657 - RNA, 19 nt, Homo sapiens
  misc_RNA (1)...(19): siRNA sense strand
uagcuagcgcccugcaauu

SEQ ID NO: 2084658 - RNA, 19 nt, Homo sapiens
  misc_RNA (1)...(19): siRNA sense strand
uacaaggccuacgccaaga

SEQ ID NO: 2084659 - RNA, 19 nt, Homo sapiens
  misc_RNA (1)...(19): siRNA sense strand
gagaccugcucagagagau

SEQ ID NO: 2084660 - RNA, 19 nt, Homo sapiens
  misc_RNA (1)...(19): siRNA sense strand
cgagaccugcucagagaga

SEQ ID NO: 2084661 - RNA, 19 nt, Homo sapiens
  misc_RNA (1)...(19): siRNA sense strand
gggacagugacaauaucua

SEQ ID NO: 2084662 - RNA, 19 nt, Homo sapiens
  misc_RNA (1)...(19): siRNA sense strand
gcggaaggaggcaauuaag

SEQ ID NO: 2084663 - RNA, 19 nt, Homo sapiens
  misc_RNA (1)...(19): siRNA sense strand
gagaagguggcgcgugucu

SEQ ID NO: 2084664 - RNA, 19 nt, Homo sapiens
  misc_RNA (1)...(19): siRNA sense strand
ggaggcaauuaaggcaaag

SEQ ID NO: 2084665 - RNA, 19 nt, Homo sapiens
  misc_RNA (1)...(19): siRNA sense strand
ugaagugguagccauaaag

SEQ ID NO: 2084666 - RNA, 19 nt, Homo sapiens
  misc_RNA (1)...(19): siRNA sense strand
aaaggucagugaaguuuaa

SEQ ID NO: 2084667 - RNA, 19 nt, Homo sapiens
  misc_RNA (1)...(19): siRNA sense strand
gguaucaccuggaugagau

SEQ ID NO: 2084668 - RNA, 19 nt, Homo sapiens
  misc_RNA (1)...(19): siRNA sense strand
gaaaaggucagugaaguuu

SEQ ID NO: 2084669 - RNA, 19 nt, Homo sapiens
  misc_RNA (1)...(19): siRNA sense strand
gggcagaucgguaauagag

SEQ ID NO: 2084670 - RNA, 19 nt, Homo sapiens
  misc_RNA (1)...(19): siRNA sense strand
aagccaagcugcagaagca

SEQ ID NO: 2084671 - RNA, 19 nt, Homo sapiens
  misc_RNA (1)...(19): siRNA sense strand
ggauggguaucaccuggau

SEQ ID NO: 2084672 - RNA, 19 nt, Homo sapiens
  misc_RNA (1)...(19): siRNA sense strand
gaaccgcccagacucuuca

SEQ ID NO: 2084673 - RNA, 19 nt, Homo sapiens
  misc_RNA (1)...(19): siRNA sense strand
gcccauggccucuucaaca

SEQ ID NO: 2084674 - RNA, 19 nt, Homo sapiens
  misc_RNA (1)...(19): siRNA sense strand
cccagacucuucagggaaa

SEQ ID NO: 2084675 - RNA, 19 nt, Homo sapiens
  misc_RNA (1)...(19): siRNA sense strand
ggucagugaaguuuaacaa

SEQ ID NO: 2084676 - RNA, 19 nt, Homo sapiens
  misc_RNA (1)...(19): siRNA sense strand
caagggcuauacugcucuu

SEQ ID NO: 2084677 - RNA, 19 nt, Homo sapiens
  misc_RNA (1)...(19): siRNA sense strand
gcgcgcacccuccauucaa

SEQ ID NO: 2084678 - RNA, 19 nt, Homo sapiens
  misc_RNA (1)...(19): siRNA sense strand
cuaagcccauggccucuuc

SEQ ID NO: 2084679 - RNA, 19 nt, Homo sapiens
  misc_RNA (1)...(19): siRNA sense strand
ccucgacucugacagugau

SEQ ID NO: 2084680 - RNA, 19 nt, Homo sapiens
  misc_RNA (1)...(19): siRNA sense strand
uagccagaguccagaugaa

SEQ ID NO: 2084681 - RNA, 19 nt, Homo sapiens
  misc_RNA (1)...(19): siRNA sense strand
ggaaaaggucagugaaguu

SEQ ID NO: 2084682 - RNA, 19 nt, Homo sapiens
  misc_RNA (1)...(19): siRNA sense strand
gggaaaaggucagugaagu

SEQ ID NO: 2084683 - RNA, 19 nt, Homo sapiens
  misc_RNA (1)...(19): siRNA sense strand
uggugucccucgacucuga

SEQ ID NO: 2084684 - RNA, 19 nt, Homo sapiens
  misc_RNA (1)...(19): siRNA sense strand
cccauggccucuucaacau

SEQ ID NO: 2084685 - RNA, 19 nt, Homo sapiens
  misc_RNA (1)...(19): siRNA sense strand
ccgggcagaucgguaauag

SEQ ID NO: 2084686 - RNA, 19 nt, Homo sapiens
  misc_RNA (1)...(19): siRNA sense strand
caggugaaccaggauguga

SEQ ID NO: 2084687 - RNA, 19 nt, Homo sapiens
  misc_RNA (1)...(19): siRNA sense strand
ggaugagauuccagaugac

SEQ ID NO: 2084688 - RNA, 19 nt, Homo sapiens
  misc_RNA (1)...(19): siRNA sense strand
aaaggucagugaaguuuaa

SEQ ID NO: 2084689 - RNA, 19 nt, Homo sapiens
  misc_RNA (1)...(19): siRNA sense strand
gguaucaccuggaugagau

SEQ ID NO: 2084690 - RNA, 19 nt, Homo sapiens
  misc_RNA (1)...(19): siRNA sense strand
gaaaaggucagugaaguuu

SEQ ID NO: 2084691 - RNA, 19 nt, Homo sapiens
  misc_RNA (1)...(19): siRNA sense strand
gggcagaucgguaauagag

SEQ ID NO: 2084692 - RNA, 19 nt, Homo sapiens
  misc_RNA (1)...(19): siRNA sense strand
aagccaagcugcagaagca

SEQ ID NO: 2084693 - RNA, 19 nt, Homo sapiens
  misc_RNA (1)...(19): siRNA sense strand
ggauggguaucaccuggau

SEQ ID NO: 2084694 - RNA, 19 nt, Homo sapiens
  misc_RNA (1)...(19): siRNA sense strand
gaaccgcccagacucuuca

SEQ ID NO: 2084695 - RNA, 19 nt, Homo sapiens
  misc_RNA (1)...(19): siRNA sense strand
gcccauggccucuucaaca

SEQ ID NO: 2084696 - RNA, 19 nt, Homo sapiens
  misc_RNA (1)...(19): siRNA sense strand
cccagacucuucagggaaa

SEQ ID NO: 2084697 - RNA, 19 nt, Homo sapiens
  misc_RNA (1)...(19): siRNA sense strand
ggucagugaaguuuaacaa

SEQ ID NO: 2084698 - RNA, 19 nt, Homo sapiens
  misc_RNA (1)...(19): siRNA sense strand
caagggcuauacugcucuu

SEQ ID NO: 2084699 - RNA, 19 nt, Homo sapiens
  misc_RNA (1)...(19): siRNA sense strand
gcgcgcacccuccauucaa

SEQ ID NO: 2084700 - RNA, 19 nt, Homo sapiens
  misc_RNA (1)...(19): siRNA sense strand
cuaagcccauggccucuuc

SEQ ID NO: 2084701 - RNA, 19 nt, Homo sapiens
  misc_RNA (1)...(19): siRNA sense strand
ccucgacucugacagugau

SEQ ID NO: 2084702 - RNA, 19 nt, Homo sapiens
  misc_RNA (1)...(19): siRNA sense strand
uagccagaguccagaugaa

SEQ ID NO: 2084703 - RNA, 19 nt, Homo sapiens
  misc_RNA (1)...(19): siRNA sense strand
ggaaaaggucagugaaguu

SEQ ID NO: 2084704 - RNA, 19 nt, Homo sapiens
  misc_RNA (1)...(19): siRNA sense strand
gggaaaaggucagugaagu

SEQ ID NO: 2084705 - RNA, 19 nt, Homo sapiens
  misc_RNA (1)...(19): siRNA sense strand
uggugucccucgacucuga

SEQ ID NO: 2084706 - RNA, 19 nt, Homo sapiens
  misc_RNA (1)...(19): siRNA sense strand
cccauggccucuucaacau

SEQ ID NO: 2084707 - RNA, 19 nt, Homo sapiens
  misc_RNA (1)...(19): siRNA sense strand
ccgggcagaucgguaauag

SEQ ID NO: 2084708 - RNA, 19 nt, Homo sapiens
  misc_RNA (1)...(19): siRNA sense strand
caggugaaccaggauguga

SEQ ID NO: 2084709 - RNA, 19 nt, Homo sapiens
  misc_RNA (1)...(19): siRNA sense strand
ggaugagauuccagaugac

SEQ ID NO: 2084710 - RNA, 19 nt, Homo sapiens
  misc_RNA (1)...(19): siRNA sense strand
ggaaagcucucuccaguua

SEQ ID NO: 2084711 - RNA, 19 nt, Homo sapiens
  misc_RNA (1)...(19): siRNA sense strand
ggaagaacauguuauacua

SEQ ID NO: 2084712 - RNA, 19 nt, Homo sapiens
  misc_RNA (1)...(19): siRNA sense strand
gaagguaucccacugauua

SEQ ID NO: 2084713 - RNA, 19 nt, Homo sapiens
  misc_RNA (1)...(19): siRNA sense strand
cgacagaucuuacaguuga

SEQ ID NO: 2084714 - RNA, 19 nt, Homo sapiens
  misc_RNA (1)...(19): siRNA sense strand
gaauauagauuuccagaca

SEQ ID NO: 2084715 - RNA, 19 nt, Homo sapiens
  misc_RNA (1)...(19): siRNA sense strand
uggaauggcucaucaaaua

SEQ ID NO: 2084716 - RNA, 19 nt, Homo sapiens
  misc_RNA (1)...(19): siRNA sense strand
gauauugucuccauucauu

SEQ ID NO: 2084717 - RNA, 19 nt, Homo sapiens
  misc_RNA (1)...(19): siRNA sense strand
ggaaguaucgcuaggaaua

SEQ ID NO: 2084718 - RNA, 19 nt, Homo sapiens
  misc_RNA (1)...(19): siRNA sense strand
gaaguggaguuucacaauu

SEQ ID NO: 2084719 - RNA, 19 nt, Homo sapiens
  misc_RNA (1)...(19): siRNA sense strand
auacaaacauggaggauua

SEQ ID NO: 2084720 - RNA, 19 nt, Homo sapiens
  misc_RNA (1)...(19): siRNA sense strand
uaaguaagcuuggauuuga

SEQ ID NO: 2084721 - RNA, 19 nt, Homo sapiens
  misc_RNA (1)...(19): siRNA sense strand
gaagaacugucuccuggaa

SEQ ID NO: 2084722 - RNA, 19 nt, Homo sapiens
  misc_RNA (1)...(19): siRNA sense strand
gaaggaagauguuaugaac

SEQ ID NO: 2084723 - RNA, 19 nt, Homo sapiens
  misc_RNA (1)...(19): siRNA sense strand
gaacuggaauggcucauca

SEQ ID NO: 2084724 - RNA, 19 nt, Homo sapiens
  misc_RNA (1)...(19): siRNA sense strand
gaaaugaccagaauucuuc

SEQ ID NO: 2084725 - RNA, 19 nt, Homo sapiens
  misc_RNA (1)...(19): siRNA sense strand
gcccaugucuuauuauauu

SEQ ID NO: 2084726 - RNA, 19 nt, Homo sapiens
  misc_RNA (1)...(19): siRNA sense strand
cggcacagauucacacaua

SEQ ID NO: 2084727 - RNA, 19 nt, Homo sapiens
  misc_RNA (1)...(19): siRNA sense strand
uuuaaaggcuuccaaauug

SEQ ID NO: 2084728 - RNA, 19 nt, Homo sapiens
  misc_RNA (1)...(19): siRNA sense strand
agaagaaguucaucgagua

SEQ ID NO: 2084729 - RNA, 19 nt, Homo sapiens
  misc_RNA (1)...(19): siRNA sense strand
gcacagugaauauagauuu

SEQ ID NO: 2084730 - RNA, 19 nt, Homo sapiens
  misc_RNA (1)...(19): siRNA sense strand
gaaaguccauccugcuugu

SEQ ID NO: 2084731 - RNA, 19 nt, Homo sapiens
  misc_RNA (1)...(19): siRNA sense strand
gcaaacauguguccggaau

SEQ ID NO: 2084732 - RNA, 19 nt, Homo sapiens
  misc_RNA (1)...(19): siRNA sense strand
guuaucaguuguaccaaua

SEQ ID NO: 2084733 - RNA, 19 nt, Homo sapiens
  misc_RNA (1)...(19): siRNA sense strand
uaacgauggugaaugguuu

SEQ ID NO: 2084734 - RNA, 19 nt, Homo sapiens
  misc_RNA (1)...(19): siRNA sense strand
cacaacagaucauauauca

SEQ ID NO: 2084735 - RNA, 19 nt, Homo sapiens
  misc_RNA (1)...(19): siRNA sense strand
gaacuacaauagcaaacau

SEQ ID NO: 2084736 - RNA, 19 nt, Homo sapiens
  misc_RNA (1)...(19): siRNA sense strand
gaauauaagcugucucaug

SEQ ID NO: 2084737 - RNA, 19 nt, Homo sapiens
  misc_RNA (1)...(19): siRNA sense strand
ggaagcugcuguacgaaau

SEQ ID NO: 2084738 - RNA, 19 nt, Homo sapiens
  misc_RNA (1)...(19): siRNA sense strand
gaaauaugguucaggaaac

SEQ ID NO: 2084739 - RNA, 19 nt, Homo sapiens
  misc_RNA (1)...(19): siRNA sense strand
ucgaaucaauggaaacaua

SEQ ID NO: 2084740 - RNA, 19 nt, Homo sapiens
  misc_RNA (1)...(19): siRNA sense strand
gccaguuucucuuacuuua

SEQ ID NO: 2084741 - RNA, 19 nt, Homo sapiens
  misc_RNA (1)...(19): siRNA sense strand
gaagaaggaagauguuaug

SEQ ID NO: 2084742 - RNA, 19 nt, Homo sapiens
  misc_RNA (1)...(19): siRNA sense strand
aaguggaguuucacaauua

SEQ ID NO: 2084743 - RNA, 19 nt, Homo sapiens
  misc_RNA (1)...(19): siRNA sense strand
ugaagaugauguggaaaua

SEQ ID NO: 2084744 - RNA, 19 nt, Homo sapiens
  misc_RNA (1)...(19): siRNA sense strand
caguucaaguggaguauua

SEQ ID NO: 2084745 - RNA, 19 nt, Homo sapiens
  misc_RNA (1)...(19): siRNA sense strand
ccuuaaagcugugaaauug

SEQ ID NO: 2084746 - RNA, 19 nt, Homo sapiens
  misc_RNA (1)...(19): siRNA sense strand
cugcagagcuguaccagaa

SEQ ID NO: 2084747 - RNA, 19 nt, Homo sapiens
  misc_RNA (1)...(19): siRNA sense strand
gacagacgcuagauguauu

SEQ ID NO: 2084748 - RNA, 19 nt, Homo sapiens
  misc_RNA (1)...(19): siRNA sense strand
caaguggaguauuaccaua

SEQ ID NO: 2084749 - RNA, 19 nt, Homo sapiens
  misc_RNA (1)...(19): siRNA sense strand
gaagcuggucugcguguua

SEQ ID NO: 2084750 - RNA, 19 nt, Homo sapiens
  misc_RNA (1)...(19): siRNA sense strand
ggauagaguugcugugaca

SEQ ID NO: 2084751 - RNA, 19 nt, Homo sapiens
  misc_RNA (1)...(19): siRNA sense strand
aaaugcccaugucuuauua

SEQ ID NO: 2084752 - RNA, 19 nt, Homo sapiens
  misc_RNA (1)...(19): siRNA sense strand
caaacauggaggauuauua

SEQ ID NO: 2084753 - RNA, 19 nt, Homo sapiens
  misc_RNA (1)...(19): siRNA sense strand
gaaguagaauucggcagaa

SEQ ID NO: 2084754 - RNA, 19 nt, Homo sapiens
  misc_RNA (1)...(19): siRNA sense strand
gggaauaaacgguggaauu

SEQ ID NO: 2084755 - RNA, 19 nt, Homo sapiens
  misc_RNA (1)...(19): siRNA sense strand
gaaggucgucuuugugauu

SEQ ID NO: 2084756 - RNA, 19 nt, Homo sapiens
  misc_RNA (1)...(19): siRNA sense strand
ggaaauacagcacccuuau

SEQ ID NO: 2084757 - RNA, 19 nt, Homo sapiens
  misc_RNA (1)...(19): siRNA sense strand
gcagugggaugguuacaca

SEQ ID NO: 2084758 - RNA, 19 nt, Homo sapiens
  misc_RNA (1)...(19): siRNA sense strand
ggucauugcugcaguuauc

SEQ ID NO: 2084759 - RNA, 19 nt, Homo sapiens
  misc_RNA (1)...(19): siRNA sense strand
gaccauucuuuacaaauug

SEQ ID NO: 2084760 - RNA, 19 nt, Homo sapiens
  misc_RNA (1)...(19): siRNA sense strand
ggaggauuauuaaacuuug

SEQ ID NO: 2084761 - RNA, 19 nt, Homo sapiens
  misc_RNA (1)...(19): siRNA sense strand
gacaagcacuggaaaagua

SEQ ID NO: 2084762 - RNA, 19 nt, Homo sapiens
  misc_RNA (1)...(19): siRNA sense strand
aaacauguguccggaauau

SEQ ID NO: 2084763 - RNA, 19 nt, Homo sapiens
  misc_RNA (1)...(19): siRNA sense strand
guucuucgauguaucuaaa

SEQ ID NO: 2084764 - RNA, 19 nt, Homo sapiens
  misc_RNA (1)...(19): siRNA sense strand
gcagugaucccuccuggaa

SEQ ID NO: 2084765 - RNA, 19 nt, Homo sapiens
  misc_RNA (1)...(19): siRNA sense strand
ggaauggcucaucaaauaa

SEQ ID NO: 2084766 - RNA, 19 nt, Homo sapiens
  misc_RNA (1)...(19): siRNA sense strand
ggacagacgcuagauguau

SEQ ID NO: 2084767 - RNA, 19 nt, Homo sapiens
  misc_RNA (1)...(19): siRNA sense strand
aguaugauguucugccuua

SEQ ID NO: 2084768 - RNA, 19 nt, Homo sapiens
  misc_RNA (1)...(19): siRNA sense strand
gaauggcucaucaaauaaa

SEQ ID NO: 2084769 - RNA, 19 nt, Homo sapiens
  misc_RNA (1)...(19): siRNA sense strand
aggaguggcuggaaaguuu

SEQ ID NO: 2084770 - RNA, 19 nt, Homo sapiens
  misc_RNA (1)...(19): siRNA sense strand
gaagaugauguggaaauaa

SEQ ID NO: 2084771 - RNA, 19 nt, Homo sapiens
  misc_RNA (1)...(19): siRNA sense strand
gaacugucuccuggaauua

SEQ ID NO: 2084772 - RNA, 19 nt, Homo sapiens
  misc_RNA (1)...(19): siRNA sense strand
agacugggcugccaaagga

SEQ ID NO: 2084773 - RNA, 19 nt, Homo sapiens
  misc_RNA (1)...(19): siRNA sense strand
acauuuaccugcaugauau

SEQ ID NO: 2084774 - RNA, 19 nt, Homo sapiens
  misc_RNA (1)...(19): siRNA sense strand
gugggaugguuacacauua

SEQ ID NO: 2084775 - RNA, 19 nt, Homo sapiens
  misc_RNA (1)...(19): siRNA sense strand
acaaagcaauguugaagug

SEQ ID NO: 2084776 - RNA, 19 nt, Homo sapiens
  misc_RNA (1)...(19): siRNA sense strand
gaauagugcugccgcuaag

SEQ ID NO: 2084777 - RNA, 19 nt, Homo sapiens
  misc_RNA (1)...(19): siRNA sense strand
ggaauagugcugccgcuaa

SEQ ID NO: 2084778 - RNA, 19 nt, Homo sapiens
  misc_RNA (1)...(19): siRNA sense strand
uaucagaugcccuucauuu

SEQ ID NO: 2084779 - RNA, 19 nt, Homo sapiens
  misc_RNA (1)...(19): siRNA sense strand
ugaaggaagugaauauaag

SEQ ID NO: 2084780 - RNA, 19 nt, Homo sapiens
  misc_RNA (1)...(19): siRNA sense strand
aaagcucucuccaguuaaa

SEQ ID NO: 2084781 - RNA, 19 nt, Homo sapiens
  misc_RNA (1)...(19): siRNA sense strand
uaaguggaguucaagaguu

SEQ ID NO: 2084782 - RNA, 19 nt, Homo sapiens
  misc_RNA (1)...(19): siRNA sense strand
ggaguauuaccauaucuaa

SEQ ID NO: 2084783 - RNA, 19 nt, Homo sapiens
  misc_RNA (1)...(19): siRNA sense strand
guuggaagcugcuguacga

SEQ ID NO: 2084784 - RNA, 19 nt, Homo sapiens
  misc_RNA (1)...(19): siRNA sense strand
ucaauaguuccaucuguua

SEQ ID NO: 2084785 - RNA, 19 nt, Homo sapiens
  misc_RNA (1)...(19): siRNA sense strand
caaaggaccguauuuacug

SEQ ID NO: 2084786 - RNA, 19 nt, Homo sapiens
  misc_RNA (1)...(19): siRNA sense strand
caauugcacuccaggcuau

SEQ ID NO: 2084787 - RNA, 19 nt, Homo sapiens
  misc_RNA (1)...(19): siRNA sense strand
ugaaaucguuggcuaugga

SEQ ID NO: 2084788 - RNA, 19 nt, Homo sapiens
  misc_RNA (1)...(19): siRNA sense strand
ggugaaugguuuagggauu

SEQ ID NO: 2084789 - RNA, 19 nt, Homo sapiens
  misc_RNA (1)...(19): siRNA sense strand
agaacugucuccuggaauu

SEQ ID NO: 2084790 - RNA, 19 nt, Homo sapiens
  misc_RNA (1)...(19): siRNA sense strand
gggagacucugucacaaca

SEQ ID NO: 2084791 - RNA, 19 nt, Homo sapiens
  misc_RNA (1)...(19): siRNA sense strand
guagaggaagaacauguua

SEQ ID NO: 2084792 - RNA, 19 nt, Homo sapiens
  misc_RNA (1)...(19): siRNA sense strand
uggaaaguuuguugaguuu

SEQ ID NO: 2084793 - RNA, 19 nt, Homo sapiens
  misc_RNA (1)...(19): siRNA sense strand
uaagcugucucauggauca

SEQ ID NO: 2084794 - RNA, 19 nt, Homo sapiens
  misc_RNA (1)...(19): siRNA sense strand
uagcaaagccaaacucgaa

SEQ ID NO: 2084795 - RNA, 19 nt, Homo sapiens
  misc_RNA (1)...(19): siRNA sense strand
ggaaguggaguuucacaau

SEQ ID NO: 2084796 - RNA, 19 nt, Homo sapiens
  misc_RNA (1)...(19): siRNA sense strand
gaggugauccugagaaagu

SEQ ID NO: 2084797 - RNA, 19 nt, Homo sapiens
  misc_RNA (1)...(19): siRNA sense strand
agaggaagaacauguuaua

SEQ ID NO: 2084798 - RNA, 19 nt, Homo sapiens
  misc_RNA (1)...(19): siRNA sense strand
aaacucgaaucaauggaaa

SEQ ID NO: 2084799 - RNA, 19 nt, Homo sapiens
  misc_RNA (1)...(19): siRNA sense strand
ggucugccaguuucucuua

SEQ ID NO: 2084800 - RNA, 19 nt, Homo sapiens
  misc_RNA (1)...(19): siRNA sense strand
guuugaagaugauguggaa

SEQ ID NO: 2084801 - RNA, 19 nt, Homo sapiens
  misc_RNA (1)...(19): siRNA sense strand
gggaaauacagcacccuua

SEQ ID NO: 2084802 - RNA, 19 nt, Homo sapiens
  misc_RNA (1)...(19): siRNA sense strand
gauguuguucuugguauua

SEQ ID NO: 2084803 - RNA, 19 nt, Homo sapiens
  misc_RNA (1)...(19): siRNA sense strand
ugaguuaacugggucauca

SEQ ID NO: 2084804 - RNA, 19 nt, Homo sapiens
  misc_RNA (1)...(19): siRNA sense strand
aaugacaguucacauaaga

SEQ ID NO: 2084805 - RNA, 19 nt, Homo sapiens
  misc_RNA (1)...(19): siRNA sense strand
gguaucccacugauuauuu

SEQ ID NO: 2084806 - RNA, 19 nt, Homo sapiens
  misc_RNA (1)...(19): siRNA sense strand
caggcuugcuuaaaugaaa

SEQ ID NO: 2084807 - RNA, 19 nt, Homo sapiens
  misc_RNA (1)...(19): siRNA sense strand
caguuaaagugcagccuaa

SEQ ID NO: 2084808 - RNA, 19 nt, Homo sapiens
  misc_RNA (1)...(19): siRNA sense strand
guaaaugugcaauacagaa

SEQ ID NO: 2084809 - RNA, 19 nt, Homo sapiens
  misc_RNA (1)...(19): siRNA sense strand
gcagagcuguaccagaaag

SEQ ID NO: 2084810 - RNA, 19 nt, Homo sapiens
  misc_RNA (1)...(19): siRNA sense strand
caacuuaccuugugccaaa

SEQ ID NO: 2084811 - RNA, 19 nt, Homo sapiens
  misc_RNA (1)...(19): siRNA sense strand
caagauagcugcucugauc

SEQ ID NO: 2084812 - RNA, 19 nt, Homo sapiens
  misc_RNA (1)...(19): siRNA sense strand
gaucugaacuccuugacaa

SEQ ID NO: 2084813 - RNA, 19 nt, Homo sapiens
  misc_RNA (1)...(19): siRNA sense strand
uaaagaagccgaauucaga

SEQ ID NO: 2084814 - RNA, 19 nt, Homo sapiens
  misc_RNA (1)...(19): siRNA sense strand
gaaggugagugugcagaua

SEQ ID NO: 2084815 - RNA, 19 nt, Homo sapiens
  misc_RNA (1)...(19): siRNA sense strand
gcuuugaaaugcccuauaa

SEQ ID NO: 2084816 - RNA, 19 nt, Homo sapiens
  misc_RNA (1)...(19): siRNA sense strand
ugaaaugcacugugaauaa

SEQ ID NO: 2084817 - RNA, 19 nt, Homo sapiens
  misc_RNA (1)...(19): siRNA sense strand
ggauacgauucauuacuaa

SEQ ID NO: 2084818 - RNA, 19 nt, Homo sapiens
  misc_RNA (1)...(19): siRNA sense strand
gaaaugcacugugaauaac

SEQ ID NO: 2084819 - RNA, 19 nt, Homo sapiens
  misc_RNA (1)...(19): siRNA sense strand
gacgaugacucagaaauug

SEQ ID NO: 2084820 - RNA, 19 nt, Homo sapiens
  misc_RNA (1)...(19): siRNA sense strand
aaaaugggcucaaaucuaa

SEQ ID NO: 2084821 - RNA, 19 nt, Homo sapiens
  misc_RNA (1)...(19): siRNA sense strand
cuacacagcuugucucgau

SEQ ID NO: 2084822 - RNA, 19 nt, Homo sapiens
  misc_RNA (1)...(19): siRNA sense strand
gagcacaacuuaaccaaaa

SEQ ID NO: 2084823 - RNA, 19 nt, Homo sapiens
  misc_RNA (1)...(19): siRNA sense strand
gaacuggacagcaagcaaa

SEQ ID NO: 2084824 - RNA, 19 nt, Homo sapiens
  misc_RNA (1)...(19): siRNA sense strand
ggaggcauccuuugaauca

SEQ ID NO: 2084825 - RNA, 19 nt, Homo sapiens
  misc_RNA (1)...(19): siRNA sense strand
ugaauaaccagcaaucaaa

SEQ ID NO: 2084826 - RNA, 19 nt, Homo sapiens
  misc_RNA (1)...(19): siRNA sense strand
aagaugaaaugcacuguga

SEQ ID NO: 2084827 - RNA, 19 nt, Homo sapiens
  misc_RNA (1)...(19): siRNA sense strand
gcacucagacgaugacuca

SEQ ID NO: 2084828 - RNA, 19 nt, Homo sapiens
  misc_RNA (1)...(19): siRNA sense strand
gggcucaaaucuaaagaga

SEQ ID NO: 2084829 - RNA, 19 nt, Homo sapiens
  misc_RNA (1)...(19): siRNA sense strand
cuucaagccucuacauauu

SEQ ID NO: 2084830 - RNA, 19 nt, Homo sapiens
  misc_RNA (1)...(19): siRNA sense strand
gcaaugcagcugaguguga

SEQ ID NO: 2084831 - RNA, 19 nt, Homo sapiens
  misc_RNA (1)...(19): siRNA sense strand
cagcagauauugugacgau

SEQ ID NO: 2084832 - RNA, 19 nt, Homo sapiens
  misc_RNA (1)...(19): siRNA sense strand
guaccugaauccaguguau

SEQ ID NO: 2084833 - RNA, 19 nt, Homo sapiens
  misc_RNA (1)...(19): siRNA sense strand
gccaaggucugcaagauag

SEQ ID NO: 2084834 - RNA, 19 nt, Homo sapiens
  misc_RNA (1)...(19): siRNA sense strand
gaagaccagugugugcaaa

SEQ ID NO: 2084835 - RNA, 19 nt, Homo sapiens
  misc_RNA (1)...(19): siRNA sense strand
gccaaaagcuggagccuaa

SEQ ID NO: 2084836 - RNA, 19 nt, Homo sapiens
  misc_RNA (1)...(19): siRNA sense strand
gacccaaacuagagaacaa

SEQ ID NO: 2084837 - RNA, 19 nt, Homo sapiens
  misc_RNA (1)...(19): siRNA sense strand
ucaaagacaagaugaaaug

SEQ ID NO: 2084838 - RNA, 19 nt, Homo sapiens
  misc_RNA (1)...(19): siRNA sense strand
gaagcuacacuauccaaau

SEQ ID NO: 2084839 - RNA, 19 nt, Homo sapiens
  misc_RNA (1)...(19): siRNA sense strand
cagccacgcuauucaaaga

SEQ ID NO: 2084840 - RNA, 19 nt, Homo sapiens
  misc_RNA (1)...(19): siRNA sense strand
aggauacgauucauuacua

SEQ ID NO: 2084841 - RNA, 19 nt, Homo sapiens
  misc_RNA (1)...(19): siRNA sense strand
gcaaacuggugcucaggau

SEQ ID NO: 2084842 - RNA, 19 nt, Homo sapiens
  misc_RNA (1)...(19): siRNA sense strand
ucaaugaggaggagauaaa

SEQ ID NO: 2084843 - RNA, 19 nt, Homo sapiens
  misc_RNA (1)...(19): siRNA sense strand
aagcuuagaugaccuucaa

SEQ ID NO: 2084844 - RNA, 19 nt, Homo sapiens
  misc_RNA (1)...(19): siRNA sense strand
gagccaaggucugcaagau

SEQ ID NO: 2084845 - RNA, 19 nt, Homo sapiens
  misc_RNA (1)...(19): siRNA sense strand
caaagaggauuuucacaau

SEQ ID NO: 2084846 - RNA, 19 nt, Homo sapiens
  misc_RNA (1)...(19): siRNA sense strand
aaacuucccucuucuuggu

SEQ ID NO: 2084847 - RNA, 19 nt, Homo sapiens
  misc_RNA (1)...(19): siRNA sense strand
aagcuacacuauccaaaug

SEQ ID NO: 2084848 - RNA, 19 nt, Homo sapiens
  misc_RNA (1)...(19): siRNA sense strand
gggcaaacuaaauaaauug

SEQ ID NO: 2084849 - RNA, 19 nt, Homo sapiens
  misc_RNA (1)...(19): siRNA sense strand
gaugaaaugcacugugaau

SEQ ID NO: 2084850 - RNA, 19 nt, Homo sapiens
  misc_RNA (1)...(19): siRNA sense strand
gcgaggguccgucugauga

SEQ ID NO: 2084851 - RNA, 19 nt, Homo sapiens
  misc_RNA (1)...(19): siRNA sense strand
ugucucagcuccauaaguc

SEQ ID NO: 2084852 - RNA, 19 nt, Homo sapiens
  misc_RNA (1)...(19): siRNA sense strand
gcuggagccuaaacacaga

SEQ ID NO: 2084853 - RNA, 19 nt, Homo sapiens
  misc_RNA (1)...(19): siRNA sense strand
caaccacagcuuugaaaug

SEQ ID NO: 2084854 - RNA, 19 nt, Homo sapiens
  misc_RNA (1)...(19): siRNA sense strand
uggaggaacuggacagcaa

SEQ ID NO: 2084855 - RNA, 19 nt, Homo sapiens
  misc_RNA (1)...(19): siRNA sense strand
gccagaagguacgcaagaa

SEQ ID NO: 2084856 - RNA, 19 nt, Homo sapiens
  misc_RNA (1)...(19): siRNA sense strand
gcaccgucauccucguuau

SEQ ID NO: 2084857 - RNA, 19 nt, Homo sapiens
  misc_RNA (1)...(19): siRNA sense strand
uccaggauacgauucauua

SEQ ID NO: 2084858 - RNA, 19 nt, Homo sapiens
  misc_RNA (1)...(19): siRNA sense strand
ugaaaucucccaggucuug

SEQ ID NO: 2084859 - RNA, 19 nt, Homo sapiens
  misc_RNA (1)...(19): siRNA sense strand
ccaguccuguguccagaaa

SEQ ID NO: 2084860 - RNA, 19 nt, Homo sapiens
  misc_RNA (1)...(19): siRNA sense strand
gccggaagauggacugcaa

SEQ ID NO: 2084861 - RNA, 19 nt, Homo sapiens
  misc_RNA (1)...(19): siRNA sense strand
gugaauaaccagcaaucaa

SEQ ID NO: 2084862 - RNA, 19 nt, Homo sapiens
  misc_RNA (1)...(19): siRNA sense strand
caaaaugggcucaaaucua

SEQ ID NO: 2084863 - RNA, 19 nt, Homo sapiens
  misc_RNA (1)...(19): siRNA sense strand
gcgcccaacuuaccuugug

SEQ ID NO: 2084864 - RNA, 19 nt, Homo sapiens
  misc_RNA (1)...(19): siRNA sense strand
ccacaagccacccuucuuc

SEQ ID NO: 2084865 - RNA, 19 nt, Homo sapiens
  misc_RNA (1)...(19): siRNA sense strand
caaaggaucaacagccaau

SEQ ID NO: 2084866 - RNA, 19 nt, Homo sapiens
  misc_RNA (1)...(19): siRNA sense strand
caaccuucuuggaccauug

SEQ ID NO: 2084867 - RNA, 19 nt, Homo sapiens
  misc_RNA (1)...(19): siRNA sense strand
gaagcaugaaccagucaaa

SEQ ID NO: 2084868 - RNA, 19 nt, Homo sapiens
  misc_RNA (1)...(19): siRNA sense strand
gaagccaggcgcugucuag

SEQ ID NO: 2084869 - RNA, 19 nt, Homo sapiens
  misc_RNA (1)...(19): siRNA sense strand
gacacaggcccaggagaua

SEQ ID NO: 2084870 - RNA, 19 nt, Homo sapiens
  misc_RNA (1)...(19): siRNA sense strand
aaacuggugcucaggauug

SEQ ID NO: 2084871 - RNA, 19 nt, Homo sapiens
  misc_RNA (1)...(19): siRNA sense strand
agacgaugacucagaaauu

SEQ ID NO: 2084872 - RNA, 19 nt, Homo sapiens
  misc_RNA (1)...(19): siRNA sense strand
gaauaaccagcaaucaaag

SEQ ID NO: 2084873 - RNA, 19 nt, Homo sapiens
  misc_RNA (1)...(19): siRNA sense strand
guaaagaagccgaauucag

SEQ ID NO: 2084874 - RNA, 19 nt, Homo sapiens
  misc_RNA (1)...(19): siRNA sense strand
ggucuugggcaaacuaaau

SEQ ID NO: 2084875 - RNA, 19 nt, Homo sapiens
  misc_RNA (1)...(19): siRNA sense strand
gaggagaagcuacacuauc

SEQ ID NO: 2084876 - RNA, 19 nt, Homo sapiens
  misc_RNA (1)...(19): siRNA sense strand
gcacgaaagcuuagaugac

SEQ ID NO: 2084877 - RNA, 19 nt, Homo sapiens
  misc_RNA (1)...(19): siRNA sense strand
uauucaaccugauccaaau

SEQ ID NO: 2084878 - RNA, 19 nt, Homo sapiens
  misc_RNA (1)...(19): siRNA sense strand
ggauggaagacauuuauac

SEQ ID NO: 2084879 - RNA, 19 nt, Homo sapiens
  misc_RNA (1)...(19): siRNA sense strand
caagcgaggguccgucuga

SEQ ID NO: 2084880 - RNA, 19 nt, Homo sapiens
  misc_RNA (1)...(19): siRNA sense strand
caaaauaccguuucuuauc

SEQ ID NO: 2084881 - RNA, 19 nt, Homo sapiens
  misc_RNA (1)...(19): siRNA sense strand
gagcugaagaccagugugu

SEQ ID NO: 2084882 - RNA, 19 nt, Homo sapiens
  misc_RNA (1)...(19): siRNA sense strand
gagaagcuacacuauccaa

SEQ ID NO: 2084883 - RNA, 19 nt, Homo sapiens
  misc_RNA (1)...(19): siRNA sense strand
uaacagccaguaccugaau

SEQ ID NO: 2084884 - RNA, 19 nt, Homo sapiens
  misc_RNA (1)...(19): siRNA sense strand
gacgacaucagugacauuu

SEQ ID NO: 2084885 - RNA, 19 nt, Homo sapiens
  misc_RNA (1)...(19): siRNA sense strand
acauuuauacuccaggaua

SEQ ID NO: 2084886 - RNA, 19 nt, Homo sapiens
  misc_RNA (1)...(19): siRNA sense strand
cgacaucagugacauuuuc

SEQ ID NO: 2084887 - RNA, 19 nt, Homo sapiens
  misc_RNA (1)...(19): siRNA sense strand
uaaccagcaaucaaagaaa

SEQ ID NO: 2084888 - RNA, 19 nt, Homo sapiens
  misc_RNA (1)...(19): siRNA sense strand
gacuggugcugcucugaug

SEQ ID NO: 2084889 - RNA, 19 nt, Homo sapiens
  misc_RNA (1)...(19): siRNA sense strand
ugucgcagcuugccaaacu

SEQ ID NO: 2084890 - RNA, 19 nt, Homo sapiens
  misc_RNA (1)...(19): siRNA sense strand
ucaaucagagcaucaagga

SEQ ID NO: 2084891 - RNA, 19 nt, Homo sapiens
  misc_RNA (1)...(19): siRNA sense strand
caugguggcagcagauauu

SEQ ID NO: 2084892 - RNA, 19 nt, Homo sapiens
  misc_RNA (1)...(19): siRNA sense strand
uaaagacuggcaucggaaa

SEQ ID NO: 2084893 - RNA, 19 nt, Homo sapiens
  misc_RNA (1)...(19): siRNA sense strand
gcaaaauaccguuucuuau

SEQ ID NO: 2084894 - RNA, 19 nt, Homo sapiens
  misc_RNA (1)...(19): siRNA sense strand
gagccuaaacacagaggaa

SEQ ID NO: 2084895 - RNA, 19 nt, Homo sapiens
  misc_RNA (1)...(19): siRNA sense strand
guacuggauggaagacauu

SEQ ID NO: 2084896 - RNA, 19 nt, Homo sapiens
  misc_RNA (1)...(19): siRNA sense strand
gcccaggagauaauaaaga

SEQ ID NO: 2084897 - RNA, 19 nt, Homo sapiens
  misc_RNA (1)...(19): siRNA sense strand
ucaaccugauccaaaugaa

SEQ ID NO: 2084898 - RNA, 19 nt, Homo sapiens
  misc_RNA (1)...(19): siRNA sense strand
gauggaagacauuuauacu

SEQ ID NO: 2084899 - RNA, 19 nt, Homo sapiens
  misc_RNA (1)...(19): siRNA sense strand
ggaacuggacagcaagcaa

SEQ ID NO: 2084900 - RNA, 19 nt, Homo sapiens
  misc_RNA (1)...(19): siRNA sense strand
ccacggacccaaacuagag

SEQ ID NO: 2084901 - RNA, 19 nt, Homo sapiens
  misc_RNA (1)...(19): siRNA sense strand
caacagcaagggagacaag

SEQ ID NO: 2084902 - RNA, 19 nt, Homo sapiens
  misc_RNA (1)...(19): siRNA sense strand
ucaagccucuacauauuuu

SEQ ID NO: 2084903 - RNA, 19 nt, Homo sapiens
  misc_RNA (1)...(19): siRNA sense strand
ugaggaguaugcacggaau

SEQ ID NO: 2084904 - RNA, 19 nt, Homo sapiens
  misc_RNA (1)...(19): siRNA sense strand
ccucaaggcccacaugaag

SEQ ID NO: 2084905 - RNA, 19 nt, Homo sapiens
  misc_RNA (1)...(19): siRNA sense strand
ggguguccgugaugaaauc

SEQ ID NO: 2084906 - RNA, 19 nt, Homo sapiens
  misc_RNA (1)...(19): siRNA sense strand
ggagaccagucaggaaacu

SEQ ID NO: 2084907 - RNA, 19 nt, Homo sapiens
  misc_RNA (1)...(19): siRNA sense strand
gcuauucaaagacaagaug

SEQ ID NO: 2084908 - RNA, 19 nt, Homo sapiens
  misc_RNA (1)...(19): siRNA sense strand
uagggaagcccaacaagca

SEQ ID NO: 2084909 - RNA, 19 nt, Homo sapiens
  misc_RNA (1)...(19): siRNA sense strand
cuuggaccauugaggagua

SEQ ID NO: 2084910 - RNA, 19 nt, Homo sapiens
  misc_RNA (1)...(19): siRNA sense strand
gacaagauaucuaaaguca

SEQ ID NO: 2084911 - RNA, 19 nt, Homo sapiens
  misc_RNA (1)...(19): siRNA sense strand
gcauugacaagauaucuaa

SEQ ID NO: 2084912 - RNA, 19 nt, Homo sapiens
  misc_RNA (1)...(19): siRNA sense strand
aaagucaccucuccugugu

SEQ ID NO: 2084913 - RNA, 19 nt, Homo sapiens
  misc_RNA (1)...(19): siRNA sense strand
ccgagaacauuauccucua

SEQ ID NO: 2084914 - RNA, 19 nt, Homo sapiens
  misc_RNA (1)...(19): siRNA sense strand
cgagaacauuauccucuau

SEQ ID NO: 2084915 - RNA, 19 nt, Homo sapiens
  misc_RNA (1)...(19): siRNA sense strand
cacaauaccuagaaagacu

SEQ ID NO: 2084916 - RNA, 19 nt, Homo sapiens
  misc_RNA (1)...(19): siRNA sense strand
ggcaagcccuccgagaaga

SEQ ID NO: 2084917 - RNA, 19 nt, Homo sapiens
  misc_RNA (1)...(19): siRNA sense strand
cauacugcuuugaugcuuu

SEQ ID NO: 2084918 - RNA, 19 nt, Homo sapiens
  misc_RNA (1)...(19): siRNA sense strand
gugagucccgagaacauua

SEQ ID NO: 2084919 - RNA, 19 nt, Homo sapiens
  misc_RNA (1)...(19): siRNA sense strand
ugaaugcgcagcgguaauu

SEQ ID NO: 2084920 - RNA, 19 nt, Homo sapiens
  misc_RNA (1)...(19): siRNA sense strand
cauaaugacauagagcuuu

SEQ ID NO: 2084921 - RNA, 19 nt, Homo sapiens
  misc_RNA (1)...(19): siRNA sense strand
agucaccucuccuguguug

SEQ ID NO: 2084922 - RNA, 19 nt, Homo sapiens
  misc_RNA (1)...(19): siRNA sense strand
gaaccucuacgccgacauc

SEQ ID NO: 2084923 - RNA, 19 nt, Homo sapiens
  misc_RNA (1)...(19): siRNA sense strand
cucacgaacuuccuaauuc

SEQ ID NO: 2084924 - RNA, 19 nt, Homo sapiens
  misc_RNA (1)...(19): siRNA sense strand
ggccagaugugcagcuucu

SEQ ID NO: 2084925 - RNA, 19 nt, Homo sapiens
  misc_RNA (1)...(19): siRNA sense strand
gaaaacauacugcuuugau

SEQ ID NO: 2084926 - RNA, 19 nt, Homo sapiens
  misc_RNA (1)...(19): siRNA sense strand
gaacauuauccucuauggu

SEQ ID NO: 2084927 - RNA, 19 nt, Homo sapiens
  misc_RNA (1)...(19): siRNA sense strand
gcuacacgcugcucuucuc

SEQ ID NO: 2084928 - RNA, 19 nt, Homo sapiens
  misc_RNA (1)...(19): siRNA sense strand
gcaacaucuucuccuacga

SEQ ID NO: 2084929 - RNA, 19 nt, Homo sapiens
  misc_RNA (1)...(19): siRNA sense strand
cagcgguaauucuccauuc

SEQ ID NO: 2084930 - RNA, 19 nt, Homo sapiens
  misc_RNA (1)...(19): siRNA sense strand
gcaagcccuccgagaagaa

SEQ ID NO: 2084931 - RNA, 19 nt, Homo sapiens
  misc_RNA (1)...(19): siRNA sense strand
cccauggccuagcgaugua

SEQ ID NO: 2084932 - RNA, 19 nt, Homo sapiens
  misc_RNA (1)...(19): siRNA sense strand
ggcugggcauaaugacaua

SEQ ID NO: 2084933 - RNA, 19 nt, Homo sapiens
  misc_RNA (1)...(19): siRNA sense strand
gagaacauuauccucuaug

SEQ ID NO: 2084934 - RNA, 19 nt, Homo sapiens
  misc_RNA (1)...(19): siRNA sense strand
gcacaauaccuagaaagac

SEQ ID NO: 2084935 - RNA, 19 nt, Homo sapiens
  misc_RNA (1)...(19): siRNA sense strand
gacuuggccucgagguaug

SEQ ID NO: 2084936 - RNA, 19 nt, Homo sapiens
  misc_RNA (1)...(19): siRNA sense strand
caauaccuagaaagacuaa

SEQ ID NO: 2084937 - RNA, 19 nt, Homo sapiens
  misc_RNA (1)...(19): siRNA sense strand
caucaacugcaacaucuuc

SEQ ID NO: 2084938 - RNA, 19 nt, Homo sapiens
  misc_RNA (1)...(19): siRNA sense strand
ucucacgaacuuccuaauu

SEQ ID NO: 2084939 - RNA, 19 nt, Homo sapiens
  misc_RNA (1)...(19): siRNA sense strand
gcauaaugacauagagcuu

SEQ ID NO: 2084940 - RNA, 19 nt, Homo sapiens
  misc_RNA (1)...(19): siRNA sense strand
caucuucuccuacgacuac

SEQ ID NO: 2084941 - RNA, 19 nt, Homo sapiens
  misc_RNA (1)...(19): siRNA sense strand
cgcaucaacugcaacaucu

SEQ ID NO: 2084942 - RNA, 19 nt, Homo sapiens
  misc_RNA (1)...(19): siRNA sense strand
ucacgaacuuccuaauucc

SEQ ID NO: 2084943 - RNA, 19 nt, Homo sapiens
  misc_RNA (1)...(19): siRNA sense strand
uaugcacaauaccuagaaa

SEQ ID NO: 2084944 - RNA, 19 nt, Homo sapiens
  misc_RNA (1)...(19): siRNA sense strand
gcagcgguaauucuccauu

SEQ ID NO: 2084945 - RNA, 19 nt, Homo sapiens
  misc_RNA (1)...(19): siRNA sense strand
gcuuuaugcacaauaccua

SEQ ID NO: 2084946 - RNA, 19 nt, Homo sapiens
  misc_RNA (1)...(19): siRNA sense strand
gggcugggcauaaugacau

SEQ ID NO: 2084947 - RNA, 19 nt, Homo sapiens
  misc_RNA (1)...(19): siRNA sense strand
agaacauuauccucuaugg

SEQ ID NO: 2084948 - RNA, 19 nt, Homo sapiens
  misc_RNA (1)...(19): siRNA sense strand
acugcaacaucuucuccua

SEQ ID NO: 2084949 - RNA, 19 nt, Homo sapiens
  misc_RNA (1)...(19): siRNA sense strand
agacuuggccucgagguau

SEQ ID NO: 2084950 - RNA, 19 nt, Homo sapiens
  misc_RNA (1)...(19): siRNA sense strand
caggaaaacauacugcuuu

SEQ ID NO: 2084951 - RNA, 19 nt, Homo sapiens
  misc_RNA (1)...(19): siRNA sense strand
ugacaagauaucuaaaguc

SEQ ID NO: 2084952 - RNA, 19 nt, Homo sapiens
  misc_RNA (1)...(19): siRNA sense strand
auacugcuuugaugcuuuc

SEQ ID NO: 2084953 - RNA, 19 nt, Homo sapiens
  misc_RNA (1)...(19): siRNA sense strand
gcucccgcaucaacugcaa

SEQ ID NO: 2084954 - RNA, 19 nt, Homo sapiens
  misc_RNA (1)...(19): siRNA sense strand
guguuggucauucauggua

SEQ ID NO: 2084955 - RNA, 19 nt, Homo sapiens
  misc_RNA (1)...(19): siRNA sense strand
gcacggagcugaagcauau

SEQ ID NO: 2084956 - RNA, 19 nt, Homo sapiens
  misc_RNA (1)...(19): siRNA sense strand
ggaaggcgaugaccaaauu

SEQ ID NO: 2084957 - RNA, 19 nt, Homo sapiens
  misc_RNA (1)...(19): siRNA sense strand
gaggcaagcuggucauuaa

SEQ ID NO: 2084958 - RNA, 19 nt, Homo sapiens
  misc_RNA (1)...(19): siRNA sense strand
gaaaggaaauccaucaucu

SEQ ID NO: 2084959 - RNA, 19 nt, Homo sapiens
  misc_RNA (1)...(19): siRNA sense strand
gaaaccacaucugcaauuu

SEQ ID NO: 2084960 - RNA, 19 nt, Homo sapiens
  misc_RNA (1)...(19): siRNA sense strand
ggaauucaguuauaugaug

SEQ ID NO: 2084961 - RNA, 19 nt, Homo sapiens
  misc_RNA (1)...(19): siRNA sense strand
cgacuucgcuuacauugaa

SEQ ID NO: 2084962 - RNA, 19 nt, Homo sapiens
  misc_RNA (1)...(19): siRNA sense strand
gaacuuggaggauaaugua

SEQ ID NO: 2084963 - RNA, 19 nt, Homo sapiens
  misc_RNA (1)...(19): siRNA sense strand
gaaaggcugugagaggaua

SEQ ID NO: 2084964 - RNA, 19 nt, Homo sapiens
  misc_RNA (1)...(19): siRNA sense strand
gcacagucauccauucuga

SEQ ID NO: 2084965 - RNA, 19 nt, Homo sapiens
  misc_RNA (1)...(19): siRNA sense strand
ggacggaaaugauggacaa

SEQ ID NO: 2084966 - RNA, 19 nt, Homo sapiens
  misc_RNA (1)...(19): siRNA sense strand
gcacagauguacauucaag

SEQ ID NO: 2084967 - RNA, 19 nt, Homo sapiens
  misc_RNA (1)...(19): siRNA sense strand
ggaaggacccucccuauag

SEQ ID NO: 2084968 - RNA, 19 nt, Homo sapiens
  misc_RNA (1)...(19): siRNA sense strand
gcaagcuggucauuaaaga

SEQ ID NO: 2084969 - RNA, 19 nt, Homo sapiens
  misc_RNA (1)...(19): siRNA sense strand
gcuccuaccucacgaagaa

SEQ ID NO: 2084970 - RNA, 19 nt, Homo sapiens
  misc_RNA (1)...(19): siRNA sense strand
uuaaagcucugauuccaaa

SEQ ID NO: 2084971 - RNA, 19 nt, Homo sapiens
  misc_RNA (1)...(19): siRNA sense strand
caaguuugcucugggauuu

SEQ ID NO: 2084972 - RNA, 19 nt, Homo sapiens
  misc_RNA (1)...(19): siRNA sense strand
ggacauuucugaacaagac

SEQ ID NO: 2084973 - RNA, 19 nt, Homo sapiens
  misc_RNA (1)...(19): siRNA sense strand
gcgaauauuucaauguuuc

SEQ ID NO: 2084974 - RNA, 19 nt, Homo sapiens
  misc_RNA (1)...(19): siRNA sense strand
gaugaagguucucgaaauc

SEQ ID NO: 2084975 - RNA, 19 nt, Homo sapiens
  misc_RNA (1)...(19): siRNA sense strand
gugagaggauaaagauuaa

SEQ ID NO: 2084976 - RNA, 19 nt, Homo sapiens
  misc_RNA (1)...(19): siRNA sense strand
ggagauacccuggucauug

SEQ ID NO: 2084977 - RNA, 19 nt, Homo sapiens
  misc_RNA (1)...(19): siRNA sense strand
agacaucuguguuccauga

SEQ ID NO: 2084978 - RNA, 19 nt, Homo sapiens
  misc_RNA (1)...(19): siRNA sense strand
guauucagccggauccuua

SEQ ID NO: 2084979 - RNA, 19 nt, Homo sapiens
  misc_RNA (1)...(19): siRNA sense strand
gcaaugcuguguccaccuu

SEQ ID NO: 2084980 - RNA, 19 nt, Homo sapiens
  misc_RNA (1)...(19): siRNA sense strand
gacagagcauggcgaauau

SEQ ID NO: 2084981 - RNA, 19 nt, Homo sapiens
  misc_RNA (1)...(19): siRNA sense strand
gaacgacuucgcuuacauu

SEQ ID NO: 2084982 - RNA, 19 nt, Homo sapiens
  misc_RNA (1)...(19): siRNA sense strand
ggaaagcucacccaggaaa

SEQ ID NO: 2084983 - RNA, 19 nt, Homo sapiens
  misc_RNA (1)...(19): siRNA sense strand
gaaaugauggacaauagga

SEQ ID NO: 2084984 - RNA, 19 nt, Homo sapiens
  misc_RNA (1)...(19): siRNA sense strand
gaaggacccucccuauagg

SEQ ID NO: 2084985 - RNA, 19 nt, Homo sapiens
  misc_RNA (1)...(19): siRNA sense strand
ggagugcccucugcccuuu

SEQ ID NO: 2084986 - RNA, 19 nt, Homo sapiens
  misc_RNA (1)...(19): siRNA sense strand
ggaaauccaucaucuucag

SEQ ID NO: 2084987 - RNA, 19 nt, Homo sapiens
  misc_RNA (1)...(19): siRNA sense strand
agacagagcauggcgaaua

SEQ ID NO: 2084988 - RNA, 19 nt, Homo sapiens
  misc_RNA (1)...(19): siRNA sense strand
guucgaucaugauaaagua

SEQ ID NO: 2084989 - RNA, 19 nt, Homo sapiens
  misc_RNA (1)...(19): siRNA sense strand
gugguucgaucaugauaaa

SEQ ID NO: 2084990 - RNA, 19 nt, Homo sapiens
  misc_RNA (1)...(19): siRNA sense strand
ugugagaggauaaagauua

SEQ ID NO: 2084991 - RNA, 19 nt, Homo sapiens
  misc_RNA (1)...(19): siRNA sense strand
ccaguaaccugcgaaugaa

SEQ ID NO: 2084992 - RNA, 19 nt, Homo sapiens
  misc_RNA (1)...(19): siRNA sense strand
gaggaauucaguuauauga

SEQ ID NO: 2084993 - RNA, 19 nt, Homo sapiens
  misc_RNA (1)...(19): siRNA sense strand
gcaccauucugaacuugga

SEQ ID NO: 2084994 - RNA, 19 nt, Homo sapiens
  misc_RNA (1)...(19): siRNA sense strand
caaaggaccauuucuugga

SEQ ID NO: 2084995 - RNA, 19 nt, Homo sapiens
  misc_RNA (1)...(19): siRNA sense strand
ccacaucugcaauuucuuu

SEQ ID NO: 2084996 - RNA, 19 nt, Homo sapiens
  misc_RNA (1)...(19): siRNA sense strand
gagcauggcgaauauuuca

SEQ ID NO: 2084997 - RNA, 19 nt, Homo sapiens
  misc_RNA (1)...(19): siRNA sense strand
gaacgagagagagaaguuu

SEQ ID NO: 2084998 - RNA, 19 nt, Homo sapiens
  misc_RNA (1)...(19): siRNA sense strand
ggaggauaauguacaguca

SEQ ID NO: 2084999 - RNA, 19 nt, Homo sapiens
  misc_RNA (1)...(19): siRNA sense strand
ugaugaagguucucgaaau

SEQ ID NO: 2085000 - RNA, 19 nt, Homo sapiens
  misc_RNA (1)...(19): siRNA sense strand
gccaaaaucuuccaaguug

SEQ ID NO: 2085001 - RNA, 19 nt, Homo sapiens
  misc_RNA (1)...(19): siRNA sense strand
gagauacccuggucauugc

SEQ ID NO: 2085002 - RNA, 19 nt, Homo sapiens
  misc_RNA (1)...(19): siRNA sense strand
gaacagcaccauucugaac

SEQ ID NO: 2085003 - RNA, 19 nt, Homo sapiens
  misc_RNA (1)...(19): siRNA sense strand
ucaaauuguuccagacaga

SEQ ID NO: 2085004 - RNA, 19 nt, Homo sapiens
  misc_RNA (1)...(19): siRNA sense strand
ggaggcaagcuggucauua

SEQ ID NO: 2085005 - RNA, 19 nt, Homo sapiens
  misc_RNA (1)...(19): siRNA sense strand
ggaacgacuucgcuuacau

SEQ ID NO: 2085006 - RNA, 19 nt, Homo sapiens
  misc_RNA (1)...(19): siRNA sense strand
aaacaaaggaccauuucuu

SEQ ID NO: 2085007 - RNA, 19 nt, Homo sapiens
  misc_RNA (1)...(19): siRNA sense strand
gauuaaagcucugauucca

SEQ ID NO: 2085008 - RNA, 19 nt, Homo sapiens
  misc_RNA (1)...(19): siRNA sense strand
uccaauggcuuguugauca

SEQ ID NO: 2085009 - RNA, 19 nt, Homo sapiens
  misc_RNA (1)...(19): siRNA sense strand
ugaguugcauggacagaaa

SEQ ID NO: 2085010 - RNA, 19 nt, Homo sapiens
  misc_RNA (1)...(19): siRNA sense strand
gugaacagcaccauucuga

SEQ ID NO: 2085011 - RNA, 19 nt, Homo sapiens
  misc_RNA (1)...(19): siRNA sense strand
ggcauucguuggcuucaaa

SEQ ID NO: 2085012 - RNA, 19 nt, Homo sapiens
  misc_RNA (1)...(19): siRNA sense strand
cgagagggcugucguagac

SEQ ID NO: 2085013 - RNA, 19 nt, Homo sapiens
  misc_RNA (1)...(19): siRNA sense strand
gagcacccauuaccagcaa

SEQ ID NO: 2085014 - RNA, 19 nt, Homo sapiens
  misc_RNA (1)...(19): siRNA sense strand
ucaaccagcuggacaugga

SEQ ID NO: 2085015 - RNA, 19 nt, Homo sapiens
  misc_RNA (1)...(19): siRNA sense strand
gggcuggcaugaucauaga

SEQ ID NO: 2085016 - RNA, 19 nt, Homo sapiens
  misc_RNA (1)...(19): siRNA sense strand
acaacaaccucaucaacug

SEQ ID NO: 2085017 - RNA, 19 nt, Homo sapiens
  misc_RNA (1)...(19): siRNA sense strand
ggcaggauccuuucuguug

SEQ ID NO: 2085018 - RNA, 19 nt, Homo sapiens
  misc_RNA (1)...(19): siRNA sense strand
cggaaaugauggacaauag

SEQ ID NO: 2085019 - RNA, 19 nt, Homo sapiens
  misc_RNA (1)...(19): siRNA sense strand
guacugauuacuccaugua

SEQ ID NO: 2085020 - RNA, 19 nt, Homo sapiens
  misc_RNA (1)...(19): siRNA sense strand
uggcgaauauuucaauguu

SEQ ID NO: 2085021 - RNA, 19 nt, Homo sapiens
  misc_RNA (1)...(19): siRNA sense strand
gggugacacuggacacuga

SEQ ID NO: 2085022 - RNA, 19 nt, Homo sapiens
  misc_RNA (1)...(19): siRNA sense strand
ggacggagugguucgauca

SEQ ID NO: 2085023 - RNA, 19 nt, Homo sapiens
  misc_RNA (1)...(19): siRNA sense strand
ggcauaccauggcagcuuu

SEQ ID NO: 2085024 - RNA, 19 nt, Homo sapiens
  misc_RNA (1)...(19): siRNA sense strand
agagagagaaguuugcuuu

SEQ ID NO: 2085025 - RNA, 19 nt, Homo sapiens
  misc_RNA (1)...(19): siRNA sense strand
ccaucuggcucaucaacuu

SEQ ID NO: 2085026 - RNA, 19 nt, Homo sapiens
  misc_RNA (1)...(19): siRNA sense strand
ggauaagacaucuguguuc

SEQ ID NO: 2085027 - RNA, 19 nt, Homo sapiens
  misc_RNA (1)...(19): siRNA sense strand
uggaagggcugaugaaggu

SEQ ID NO: 2085028 - RNA, 19 nt, Homo sapiens
  misc_RNA (1)...(19): siRNA sense strand
ggacacugaggaucacaaa

SEQ ID NO: 2085029 - RNA, 19 nt, Homo sapiens
  misc_RNA (1)...(19): siRNA sense strand
aggaggcgcucuugaguug

SEQ ID NO: 2085030 - RNA, 19 nt, Homo sapiens
  misc_RNA (1)...(19): siRNA sense strand
gaucugaggaaacuggauu

SEQ ID NO: 2085031 - RNA, 19 nt, Homo sapiens
  misc_RNA (1)...(19): siRNA sense strand
guucucagcugaaaacaaa

SEQ ID NO: 2085032 - RNA, 19 nt, Homo sapiens
  misc_RNA (1)...(19): siRNA sense strand
ggcgaauauuucaauguuu

SEQ ID NO: 2085033 - RNA, 19 nt, Homo sapiens
  misc_RNA (1)...(19): siRNA sense strand
gcacccagacugcaucaau

SEQ ID NO: 2085034 - RNA, 19 nt, Homo sapiens
  misc_RNA (1)...(19): siRNA sense strand
gcuccaagcaagagauaaa

SEQ ID NO: 2085035 - RNA, 19 nt, Homo sapiens
  misc_RNA (1)...(19): siRNA sense strand
agcaagaugugcaagauga

SEQ ID NO: 2085036 - RNA, 19 nt, Homo sapiens
  misc_RNA (1)...(19): siRNA sense strand
gauccaagaaagagaguga

SEQ ID NO: 2085037 - RNA, 19 nt, Homo sapiens
  misc_RNA (1)...(19): siRNA sense strand
gcucagaacgagagagaga

SEQ ID NO: 2085038 - RNA, 19 nt, Homo sapiens
  misc_RNA (1)...(19): siRNA sense strand
uaagacaucuguguuccau

SEQ ID NO: 2085039 - RNA, 19 nt, Homo sapiens
  misc_RNA (1)...(19): siRNA sense strand
ccaauggcuuguugaucaa

SEQ ID NO: 2085040 - RNA, 19 nt, Homo sapiens
  misc_RNA (1)...(19): siRNA sense strand
gcaauuucuuugacuucga

SEQ ID NO: 2085041 - RNA, 19 nt, Homo sapiens
  misc_RNA (1)...(19): siRNA sense strand
cggagugguucgaucauga

SEQ ID NO: 2085042 - RNA, 19 nt, Homo sapiens
  misc_RNA (1)...(19): siRNA sense strand
ggaguuauuguucauguca

SEQ ID NO: 2085043 - RNA, 19 nt, Homo sapiens
  misc_RNA (1)...(19): siRNA sense strand
gaagaagaagaaguuguga

SEQ ID NO: 2085044 - RNA, 19 nt, Homo sapiens
  misc_RNA (1)...(19): siRNA sense strand
ucaccaggagcacccauua

SEQ ID NO: 2085045 - RNA, 19 nt, Homo sapiens
  misc_RNA (1)...(19): siRNA sense strand
cggaaggacccucccuaua

SEQ ID NO: 2085046 - RNA, 19 nt, Homo sapiens
  misc_RNA (1)...(19): siRNA sense strand
cggaggaacgcaacacuuu

SEQ ID NO: 2085047 - RNA, 19 nt, Homo sapiens
  misc_RNA (1)...(19): siRNA sense strand
ggucaaaguggcagggaaa

SEQ ID NO: 2085048 - RNA, 19 nt, Homo sapiens
  misc_RNA (1)...(19): siRNA sense strand
cauccauucugaccgguuu

SEQ ID NO: 2085049 - RNA, 19 nt, Homo sapiens
  misc_RNA (1)...(19): siRNA sense strand
ggcaauuucaccaucauuu

SEQ ID NO: 2085050 - RNA, 19 nt, Homo sapiens
  misc_RNA (1)...(19): siRNA sense strand
gaccaucccugacaauucc

SEQ ID NO: 2085051 - RNA, 19 nt, Homo sapiens
  misc_RNA (1)...(19): siRNA sense strand
cauggcagcuuuucaacua

SEQ ID NO: 2085052 - RNA, 19 nt, Homo sapiens
  misc_RNA (1)...(19): siRNA sense strand
gcacccauuaccagcaaua

SEQ ID NO: 2085053 - RNA, 19 nt, Homo sapiens
  misc_RNA (1)...(19): siRNA sense strand
ccagagcccugaguugcaa

SEQ ID NO: 2085054 - RNA, 19 nt, Homo sapiens
  misc_RNA (1)...(19): siRNA sense strand
ccaagcaagagauaaagaa

SEQ ID NO: 2085055 - RNA, 19 nt, Homo sapiens
  misc_RNA (1)...(19): siRNA sense strand
gcacggagcugaagcauau

SEQ ID NO: 2085056 - RNA, 19 nt, Homo sapiens
  misc_RNA (1)...(19): siRNA sense strand
ggaaggcgaugaccaaauu

SEQ ID NO: 2085057 - RNA, 19 nt, Homo sapiens
  misc_RNA (1)...(19): siRNA sense strand
gaggcaagcuggucauuaa

SEQ ID NO: 2085058 - RNA, 19 nt, Homo sapiens
  misc_RNA (1)...(19): siRNA sense strand
gaaaggaaauccaucaucu

SEQ ID NO: 2085059 - RNA, 19 nt, Homo sapiens
  misc_RNA (1)...(19): siRNA sense strand
gaaaccacaucugcaauuu

SEQ ID NO: 2085060 - RNA, 19 nt, Homo sapiens
  misc_RNA (1)...(19): siRNA sense strand
ggaauucaguuauaugaug

SEQ ID NO: 2085061 - RNA, 19 nt, Homo sapiens
  misc_RNA (1)...(19): siRNA sense strand
cgacuucgcuuacauugaa

SEQ ID NO: 2085062 - RNA, 19 nt, Homo sapiens
  misc_RNA (1)...(19): siRNA sense strand
gaacuuggaggauaaugua

SEQ ID NO: 2085063 - RNA, 19 nt, Homo sapiens
  misc_RNA (1)...(19): siRNA sense strand
gaaaggcugugagaggaua

SEQ ID NO: 2085064 - RNA, 19 nt, Homo sapiens
  misc_RNA (1)...(19): siRNA sense strand
gcacagucauccauucuga

SEQ ID NO: 2085065 - RNA, 19 nt, Homo sapiens
  misc_RNA (1)...(19): siRNA sense strand
ggacggaaaugauggacaa

SEQ ID NO: 2085066 - RNA, 19 nt, Homo sapiens
  misc_RNA (1)...(19): siRNA sense strand
gcacagauguacauucaag

SEQ ID NO: 2085067 - RNA, 19 nt, Homo sapiens
  misc_RNA (1)...(19): siRNA sense strand
ggaaggacccucccuauag

SEQ ID NO: 2085068 - RNA, 19 nt, Homo sapiens
  misc_RNA (1)...(19): siRNA sense strand
gcaagcuggucauuaaaga

SEQ ID NO: 2085069 - RNA, 19 nt, Homo sapiens
  misc_RNA (1)...(19): siRNA sense strand
gcuccuaccucacgaagaa

SEQ ID NO: 2085070 - RNA, 19 nt, Homo sapiens
  misc_RNA (1)...(19): siRNA sense strand
uuaaagcucugauuccaaa

SEQ ID NO: 2085071 - RNA, 19 nt, Homo sapiens
  misc_RNA (1)...(19): siRNA sense strand
caaguuugcucugggauuu

SEQ ID NO: 2085072 - RNA, 19 nt, Homo sapiens
  misc_RNA (1)...(19): siRNA sense strand
ggacauuucugaacaagac

SEQ ID NO: 2085073 - RNA, 19 nt, Homo sapiens
  misc_RNA (1)...(19): siRNA sense strand
gcgaauauuucaauguuuc

SEQ ID NO: 2085074 - RNA, 19 nt, Homo sapiens
  misc_RNA (1)...(19): siRNA sense strand
gaugaagguucucgaaauc

SEQ ID NO: 2085075 - RNA, 19 nt, Homo sapiens
  misc_RNA (1)...(19): siRNA sense strand
gugagaggauaaagauuaa

SEQ ID NO: 2085076 - RNA, 19 nt, Homo sapiens
  misc_RNA (1)...(19): siRNA sense strand
ggagauacccuggucauug

SEQ ID NO: 2085077 - RNA, 19 nt, Homo sapiens
  misc_RNA (1)...(19): siRNA sense strand
agacaucuguguuccauga

SEQ ID NO: 2085078 - RNA, 19 nt, Homo sapiens
  misc_RNA (1)...(19): siRNA sense strand
guauucagccggauccuua

SEQ ID NO: 2085079 - RNA, 19 nt, Homo sapiens
  misc_RNA (1)...(19): siRNA sense strand
gcaaugcuguguccaccuu

SEQ ID NO: 2085080 - RNA, 19 nt, Homo sapiens
  misc_RNA (1)...(19): siRNA sense strand
gacagagcauggcgaauau

SEQ ID NO: 2085081 - RNA, 19 nt, Homo sapiens
  misc_RNA (1)...(19): siRNA sense strand
gaacgacuucgcuuacauu

SEQ ID NO: 2085082 - RNA, 19 nt, Homo sapiens
  misc_RNA (1)...(19): siRNA sense strand
ggaaagcucacccaggaaa

SEQ ID NO: 2085083 - RNA, 19 nt, Homo sapiens
  misc_RNA (1)...(19): siRNA sense strand
gaaaugauggacaauagga

SEQ ID NO: 2085084 - RNA, 19 nt, Homo sapiens
  misc_RNA (1)...(19): siRNA sense strand
gaaggacccucccuauagg

SEQ ID NO: 2085085 - RNA, 19 nt, Homo sapiens
  misc_RNA (1)...(19): siRNA sense strand
ggagugcccucugcccuuu

SEQ ID NO: 2085086 - RNA, 19 nt, Homo sapiens
  misc_RNA (1)...(19): siRNA sense strand
ggaaauccaucaucuucag

SEQ ID NO: 2085087 - RNA, 19 nt, Homo sapiens
  misc_RNA (1)...(19): siRNA sense strand
agacagagcauggcgaaua

SEQ ID NO: 2085088 - RNA, 19 nt, Homo sapiens
  misc_RNA (1)...(19): siRNA sense strand
guucgaucaugauaaagua

SEQ ID NO: 2085089 - RNA, 19 nt, Homo sapiens
  misc_RNA (1)...(19): siRNA sense strand
gugguucgaucaugauaaa

SEQ ID NO: 2085090 - RNA, 19 nt, Homo sapiens
  misc_RNA (1)...(19): siRNA sense strand
ugugagaggauaaagauua

SEQ ID NO: 2085091 - RNA, 19 nt, Homo sapiens
  misc_RNA (1)...(19): siRNA sense strand
ccaguaaccugcgaaugaa

SEQ ID NO: 2085092 - RNA, 19 nt, Homo sapiens
  misc_RNA (1)...(19): siRNA sense strand
gaggaauucaguuauauga

SEQ ID NO: 2085093 - RNA, 19 nt, Homo sapiens
  misc_RNA (1)...(19): siRNA sense strand
gcaccauucugaacuugga

SEQ ID NO: 2085094 - RNA, 19 nt, Homo sapiens
  misc_RNA (1)...(19): siRNA sense strand
caaaggaccauuucuugga

SEQ ID NO: 2085095 - RNA, 19 nt, Homo sapiens
  misc_RNA (1)...(19): siRNA sense strand
ccacaucugcaauuucuuu

SEQ ID NO: 2085096 - RNA, 19 nt, Homo sapiens
  misc_RNA (1)...(19): siRNA sense strand
gagcauggcgaauauuuca

SEQ ID NO: 2085097 - RNA, 19 nt, Homo sapiens
  misc_RNA (1)...(19): siRNA sense strand
gaacgagagagagaaguuu

SEQ ID NO: 2085098 - RNA, 19 nt, Homo sapiens
  misc_RNA (1)...(19): siRNA sense strand
ggaggauaauguacaguca

SEQ ID NO: 2085099 - RNA, 19 nt, Homo sapiens
  misc_RNA (1)...(19): siRNA sense strand
ugaugaagguucucgaaau

SEQ ID NO: 2085100 - RNA, 19 nt, Homo sapiens
  misc_RNA (1)...(19): siRNA sense strand
gccaaaaucuuccaaguug

SEQ ID NO: 2085101 - RNA, 19 nt, Homo sapiens
  misc_RNA (1)...(19): siRNA sense strand
gagauacccuggucauugc

SEQ ID NO: 2085102 - RNA, 19 nt, Homo sapiens
  misc_RNA (1)...(19): siRNA sense strand
gaacagcaccauucugaac

SEQ ID NO: 2085103 - RNA, 19 nt, Homo sapiens
  misc_RNA (1)...(19): siRNA sense strand
ucaaauuguuccagacaga

SEQ ID NO: 2085104 - RNA, 19 nt, Homo sapiens
  misc_RNA (1)...(19): siRNA sense strand
ggaggcaagcuggucauua

SEQ ID NO: 2085105 - RNA, 19 nt, Homo sapiens
  misc_RNA (1)...(19): siRNA sense strand
ggaacgacuucgcuuacau

SEQ ID NO: 2085106 - RNA, 19 nt, Homo sapiens
  misc_RNA (1)...(19): siRNA sense strand
aaacaaaggaccauuucuu

SEQ ID NO: 2085107 - RNA, 19 nt, Homo sapiens
  misc_RNA (1)...(19): siRNA sense strand
gauuaaagcucugauucca

SEQ ID NO: 2085108 - RNA, 19 nt, Homo sapiens
  misc_RNA (1)...(19): siRNA sense strand
uccaauggcuuguugauca

SEQ ID NO: 2085109 - RNA, 19 nt, Homo sapiens
  misc_RNA (1)...(19): siRNA sense strand
ugaguugcauggacagaaa

SEQ ID NO: 2085110 - RNA, 19 nt, Homo sapiens
  misc_RNA (1)...(19): siRNA sense strand
gugaacagcaccauucuga

SEQ ID NO: 2085111 - RNA, 19 nt, Homo sapiens
  misc_RNA (1)...(19): siRNA sense strand
ggcauucguuggcuucaaa

SEQ ID NO: 2085112 - RNA, 19 nt, Homo sapiens
  misc_RNA (1)...(19): siRNA sense strand
cgagagggcugucguagac

SEQ ID NO: 2085113 - RNA, 19 nt, Homo sapiens
  misc_RNA (1)...(19): siRNA sense strand
gagcacccauuaccagcaa

SEQ ID NO: 2085114 - RNA, 19 nt, Homo sapiens
  misc_RNA (1)...(19): siRNA sense strand
ucaaccagcuggacaugga

SEQ ID NO: 2085115 - RNA, 19 nt, Homo sapiens
  misc_RNA (1)...(19): siRNA sense strand
gggcuggcaugaucauaga

SEQ ID NO: 2085116 - RNA, 19 nt, Homo sapiens
  misc_RNA (1)...(19): siRNA sense strand
acaacaaccucaucaacug

SEQ ID NO: 2085117 - RNA, 19 nt, Homo sapiens
  misc_RNA (1)...(19): siRNA sense strand
ggcaggauccuuucuguug

SEQ ID NO: 2085118 - RNA, 19 nt, Homo sapiens
  misc_RNA (1)...(19): siRNA sense strand
cggaaaugauggacaauag

SEQ ID NO: 2085119 - RNA, 19 nt, Homo sapiens
  misc_RNA (1)...(19): siRNA sense strand
guacugauuacuccaugua

SEQ ID NO: 2085120 - RNA, 19 nt, Homo sapiens
  misc_RNA (1)...(19): siRNA sense strand
uggcgaauauuucaauguu

SEQ ID NO: 2085121 - RNA, 19 nt, Homo sapiens
  misc_RNA (1)...(19): siRNA sense strand
gggugacacuggacacuga

SEQ ID NO: 2085122 - RNA, 19 nt, Homo sapiens
  misc_RNA (1)...(19): siRNA sense strand
ggacggagugguucgauca

SEQ ID NO: 2085123 - RNA, 19 nt, Homo sapiens
  misc_RNA (1)...(19): siRNA sense strand
ggcauaccauggcagcuuu

SEQ ID NO: 2085124 - RNA, 19 nt, Homo sapiens
  misc_RNA (1)...(19): siRNA sense strand
agagagagaaguuugcuuu

SEQ ID NO: 2085125 - RNA, 19 nt, Homo sapiens
  misc_RNA (1)...(19): siRNA sense strand
ccaucuggcucaucaacuu

SEQ ID NO: 2085126 - RNA, 19 nt, Homo sapiens
  misc_RNA (1)...(19): siRNA sense strand
ggauaagacaucuguguuc

SEQ ID NO: 2085127 - RNA, 19 nt, Homo sapiens
  misc_RNA (1)...(19): siRNA sense strand
uggaagggcugaugaaggu

SEQ ID NO: 2085128 - RNA, 19 nt, Homo sapiens
  misc_RNA (1)...(19): siRNA sense strand
ggacacugaggaucacaaa

SEQ ID NO: 2085129 - RNA, 19 nt, Homo sapiens
  misc_RNA (1)...(19): siRNA sense strand
aggaggcgcucuugaguug

SEQ ID NO: 2085130 - RNA, 19 nt, Homo sapiens
  misc_RNA (1)...(19): siRNA sense strand
gaucugaggaaacuggauu

SEQ ID NO: 2085131 - RNA, 19 nt, Homo sapiens
  misc_RNA (1)...(19): siRNA sense strand
guucucagcugaaaacaaa

SEQ ID NO: 2085132 - RNA, 19 nt, Homo sapiens
  misc_RNA (1)...(19): siRNA sense strand
ggcgaauauuucaauguuu

SEQ ID NO: 2085133 - RNA, 19 nt, Homo sapiens
  misc_RNA (1)...(19): siRNA sense strand
gcacccagacugcaucaau

SEQ ID NO: 2085134 - RNA, 19 nt, Homo sapiens
  misc_RNA (1)...(19): siRNA sense strand
gcuccaagcaagagauaaa

SEQ ID NO: 2085135 - RNA, 19 nt, Homo sapiens
  misc_RNA (1)...(19): siRNA sense strand
agcaagaugugcaagauga

SEQ ID NO: 2085136 - RNA, 19 nt, Homo sapiens
  misc_RNA (1)...(19): siRNA sense strand
gauccaagaaagagaguga

SEQ ID NO: 2085137 - RNA, 19 nt, Homo sapiens
  misc_RNA (1)...(19): siRNA sense strand
gcucagaacgagagagaga

SEQ ID NO: 2085138 - RNA, 19 nt, Homo sapiens
  misc_RNA (1)...(19): siRNA sense strand
uaagacaucuguguuccau

SEQ ID NO: 2085139 - RNA, 19 nt, Homo sapiens
  misc_RNA (1)...(19): siRNA sense strand
ccaauggcuuguugaucaa

SEQ ID NO: 2085140 - RNA, 19 nt, Homo sapiens
  misc_RNA (1)...(19): siRNA sense strand
gcaauuucuuugacuucga

SEQ ID NO: 2085141 - RNA, 19 nt, Homo sapiens
  misc_RNA (1)...(19): siRNA sense strand
cggagugguucgaucauga

SEQ ID NO: 2085142 - RNA, 19 nt, Homo sapiens
  misc_RNA (1)...(19): siRNA sense strand
ggaguuauuguucauguca

SEQ ID NO: 2085143 - RNA, 19 nt, Homo sapiens
  misc_RNA (1)...(19): siRNA sense strand
gaagaagaagaaguuguga

SEQ ID NO: 2085144 - RNA, 19 nt, Homo sapiens
  misc_RNA (1)...(19): siRNA sense strand
ucaccaggagcacccauua

SEQ ID NO: 2085145 - RNA, 19 nt, Homo sapiens
  misc_RNA (1)...(19): siRNA sense strand
cggaaggacccucccuaua

SEQ ID NO: 2085146 - RNA, 19 nt, Homo sapiens
  misc_RNA (1)...(19): siRNA sense strand
cggaggaacgcaacacuuu

SEQ ID NO: 2085147 - RNA, 19 nt, Homo sapiens
  misc_RNA (1)...(19): siRNA sense strand
ggucaaaguggcagggaaa

SEQ ID NO: 2085148 - RNA, 19 nt, Homo sapiens
  misc_RNA (1)...(19): siRNA sense strand
cauccauucugaccgguuu

SEQ ID NO: 2085149 - RNA, 19 nt, Homo sapiens
  misc_RNA (1)...(19): siRNA sense strand
ggcaauuucaccaucauuu

SEQ ID NO: 2085150 - RNA, 19 nt, Homo sapiens
  misc_RNA (1)...(19): siRNA sense strand
gaccaucccugacaauucc

SEQ ID NO: 2085151 - RNA, 19 nt, Homo sapiens
  misc_RNA (1)...(19): siRNA sense strand
cauggcagcuuuucaacua

SEQ ID NO: 2085152 - RNA, 19 nt, Homo sapiens
  misc_RNA (1)...(19): siRNA sense strand
gcacccauuaccagcaaua

SEQ ID NO: 2085153 - RNA, 19 nt, Homo sapiens
  misc_RNA (1)...(19): siRNA sense strand
ccagagcccugaguugcaa

SEQ ID NO: 2085154 - RNA, 19 nt, Homo sapiens
  misc_RNA (1)...(19): siRNA sense strand
ccaagcaagagauaaagaa

SEQ ID NO: 2085155 - RNA, 19 nt, Homo sapiens
  misc_RNA (1)...(19): siRNA sense strand
gggcgaagaccaauacuua

SEQ ID NO: 2085156 - RNA, 19 nt, Homo sapiens
  misc_RNA (1)...(19): siRNA sense strand
ggaggagccugucuuuguu

SEQ ID NO: 2085157 - RNA, 19 nt, Homo sapiens
  misc_RNA (1)...(19): siRNA sense strand
gcgcacaacggaaacaaua

SEQ ID NO: 2085158 - RNA, 19 nt, Homo sapiens
  misc_RNA (1)...(19): siRNA sense strand
gaagaccaauacuuacauc

SEQ ID NO: 2085159 - RNA, 19 nt, Homo sapiens
  misc_RNA (1)...(19): siRNA sense strand
gagccugucuuuguuguga

SEQ ID NO: 2085160 - RNA, 19 nt, Homo sapiens
  misc_RNA (1)...(19): siRNA sense strand
gcaagccuuucucuagcua

SEQ ID NO: 2085161 - RNA, 19 nt, Homo sapiens
  misc_RNA (1)...(19): siRNA sense strand
gccgagcacuucuccauga

SEQ ID NO: 2085162 - RNA, 19 nt, Homo sapiens
  misc_RNA (1)...(19): siRNA sense strand
aagaagagcgugaacauga

SEQ ID NO: 2085163 - RNA, 19 nt, Homo sapiens
  misc_RNA (1)...(19): siRNA sense strand
gaccaauacuuacaucaag

SEQ ID NO: 2085164 - RNA, 19 nt, Homo sapiens
  misc_RNA (1)...(19): siRNA sense strand
gacccuggaugaccaaaga

SEQ ID NO: 2085165 - RNA, 19 nt, Homo sapiens
  misc_RNA (1)...(19): siRNA sense strand
gggaggagccugucuuugu

SEQ ID NO: 2085166 - RNA, 19 nt, Homo sapiens
  misc_RNA (1)...(19): siRNA sense strand
gcaagaagagcgugaacau

SEQ ID NO: 2085167 - RNA, 19 nt, Homo sapiens
  misc_RNA (1)...(19): siRNA sense strand
caacggaaacaauaacaau

SEQ ID NO: 2085168 - RNA, 19 nt, Homo sapiens
  misc_RNA (1)...(19): siRNA sense strand
caauaacaauaacggcaau

SEQ ID NO: 2085169 - RNA, 19 nt, Homo sapiens
  misc_RNA (1)...(19): siRNA sense strand
caaaggcgccacaaucaag

SEQ ID NO: 2085170 - RNA, 19 nt, Homo sapiens
  misc_RNA (1)...(19): siRNA sense strand
gccaaucgcaucugugaga

SEQ ID NO: 2085171 - RNA, 19 nt, Homo sapiens
  misc_RNA (1)...(19): siRNA sense strand
gcgccaaucgcaucuguga

SEQ ID NO: 2085172 - RNA, 19 nt, Homo sapiens
  misc_RNA (1)...(19): siRNA sense strand
gcgaagaccaauacuuaca

SEQ ID NO: 2085173 - RNA, 19 nt, Homo sapiens
  misc_RNA (1)...(19): siRNA sense strand
gagauugaggcgcacauug

SEQ ID NO: 2085174 - RNA, 19 nt, Homo sapiens
  misc_RNA (1)...(19): siRNA sense strand
gcagaccaccauccaagug

SEQ ID NO: 2085175 - RNA, 19 nt, Homo sapiens
  misc_RNA (1)...(19): siRNA sense strand
gugcuuccacagacucuua

SEQ ID NO: 2085176 - RNA, 19 nt, Homo sapiens
  misc_RNA (1)...(19): siRNA sense strand
gcaagguuguaaaaucaaa

SEQ ID NO: 2085177 - RNA, 19 nt, Homo sapiens
  misc_RNA (1)...(19): siRNA sense strand
gcacaacggaaacaauaac

SEQ ID NO: 2085178 - RNA, 19 nt, Homo sapiens
  misc_RNA (1)...(19): siRNA sense strand
gcaccgaugugggcuucga

SEQ ID NO: 2085179 - RNA, 19 nt, Homo sapiens
  misc_RNA (1)...(19): siRNA sense strand
ccaaaggcgccacaaucaa

SEQ ID NO: 2085180 - RNA, 19 nt, Homo sapiens
  misc_RNA (1)...(19): siRNA sense strand
gcccaaaggcgccacaauc

SEQ ID NO: 2085181 - RNA, 19 nt, Homo sapiens
  misc_RNA (1)...(19): siRNA sense strand
ugaccggcaugccagagaa

SEQ ID NO: 2085182 - RNA, 19 nt, Homo sapiens
  misc_RNA (1)...(19): siRNA sense strand
aaucgcaucugugagaaga

SEQ ID NO: 2085183 - RNA, 19 nt, Homo sapiens
  misc_RNA (1)...(19): siRNA sense strand
gccacaaccucuucugcau

SEQ ID NO: 2085184 - RNA, 19 nt, Homo sapiens
  misc_RNA (1)...(19): siRNA sense strand
ccaaucgcaucugugagaa

SEQ ID NO: 2085185 - RNA, 19 nt, Homo sapiens
  misc_RNA (1)...(19): siRNA sense strand
ucacagacgagaacgacuu

SEQ ID NO: 2085186 - RNA, 19 nt, Homo sapiens
  misc_RNA (1)...(19): siRNA sense strand
cagcuccgguaucuucuuc

SEQ ID NO: 2085187 - RNA, 19 nt, Homo sapiens
  misc_RNA (1)...(19): siRNA sense strand
ggcaauggguacaccuaca

SEQ ID NO: 2085188 - RNA, 19 nt, Homo sapiens
  misc_RNA (1)...(19): siRNA sense strand
gggauaaggagccgguguu

SEQ ID NO: 2085189 - RNA, 19 nt, Homo sapiens
  misc_RNA (1)...(19): siRNA sense strand
caagaagagcgugaacaug

SEQ ID NO: 2085190 - RNA, 19 nt, Homo sapiens
  misc_RNA (1)...(19): siRNA sense strand
ggagauugaggcgcacauu

SEQ ID NO: 2085191 - RNA, 19 nt, Homo sapiens
  misc_RNA (1)...(19): siRNA sense strand
gaggagccugucuuuguug

SEQ ID NO: 2085192 - RNA, 19 nt, Homo sapiens
  misc_RNA (1)...(19): siRNA sense strand
gcgccucccggaauaagaa

SEQ ID NO: 2085193 - RNA, 19 nt, Homo sapiens
  misc_RNA (1)...(19): siRNA sense strand
cccaaaggcgccacaauca

SEQ ID NO: 2085194 - RNA, 19 nt, Homo sapiens
  misc_RNA (1)...(19): siRNA sense strand
auaaggagccgguguucga

SEQ ID NO: 2085195 - RNA, 19 nt, Homo sapiens
  misc_RNA (1)...(19): siRNA sense strand
caucuucgucugcuucuuc

SEQ ID NO: 2085196 - RNA, 19 nt, Homo sapiens
  misc_RNA (1)...(19): siRNA sense strand
cggaaacaauaacaauaac

SEQ ID NO: 2085197 - RNA, 19 nt, Homo sapiens
  misc_RNA (1)...(19): siRNA sense strand
gccgcaagccuuucucuag

SEQ ID NO: 2085198 - RNA, 19 nt, Homo sapiens
  misc_RNA (1)...(19): siRNA sense strand
gggcuucgaucugcaucau

SEQ ID NO: 2085199 - RNA, 19 nt, Homo sapiens
  misc_RNA (1)...(19): siRNA sense strand
agaccaauacuuacaucaa

SEQ ID NO: 2085200 - RNA, 19 nt, Homo sapiens
  misc_RNA (1)...(19): siRNA sense strand
gcuuugcgcacaacggaaa

SEQ ID NO: 2085201 - RNA, 19 nt, Homo sapiens
  misc_RNA (1)...(19): siRNA sense strand
gcucuucuucugcaucuuc

SEQ ID NO: 2085202 - RNA, 19 nt, Homo sapiens
  misc_RNA (1)...(19): siRNA sense strand
uaagaacacggcacucaac

SEQ ID NO: 2085203 - RNA, 19 nt, Homo sapiens
  misc_RNA (1)...(19): siRNA sense strand
cggcaagguuguaaaauca

SEQ ID NO: 2085204 - RNA, 19 nt, Homo sapiens
  misc_RNA (1)...(19): siRNA sense strand
accaauacuuacaucaaga

SEQ ID NO: 2085205 - RNA, 19 nt, Homo sapiens
  misc_RNA (1)...(19): siRNA sense strand
ggauaaggagccgguguuc

SEQ ID NO: 2085206 - RNA, 19 nt, Homo sapiens
  misc_RNA (1)...(19): siRNA sense strand
gcggcaagguuguaaaauc

SEQ ID NO: 2085207 - RNA, 19 nt, Homo sapiens
  misc_RNA (1)...(19): siRNA sense strand
cgaagaccaauacuuacau

SEQ ID NO: 2085208 - RNA, 19 nt, Homo sapiens
  misc_RNA (1)...(19): siRNA sense strand
aauaagaacacggcacuca

SEQ ID NO: 2085209 - RNA, 19 nt, Homo sapiens
  misc_RNA (1)...(19): siRNA sense strand
ggaccugcagcuccgguau

SEQ ID NO: 2085210 - RNA, 19 nt, Homo sapiens
  misc_RNA (1)...(19): siRNA sense strand
ggaaacaauaacaauaacg

SEQ ID NO: 2085211 - RNA, 19 nt, Homo sapiens
  misc_RNA (1)...(19): siRNA sense strand
ggggagagacccuggauga

SEQ ID NO: 2085212 - RNA, 19 nt, Homo sapiens
  misc_RNA (1)...(19): siRNA sense strand
cugcagcuccgguaucuuc

SEQ ID NO: 2085213 - RNA, 19 nt, Homo sapiens
  misc_RNA (1)...(19): siRNA sense strand
gaccgagugcgugccagua

SEQ ID NO: 2085214 - RNA, 19 nt, Homo sapiens
  misc_RNA (1)...(19): siRNA sense strand
gcaauaaccucaacucuau

SEQ ID NO: 2085215 - RNA, 19 nt, Homo sapiens
  misc_RNA (1)...(19): siRNA sense strand
gcaagaaacuaguaugauu

SEQ ID NO: 2085216 - RNA, 19 nt, Homo sapiens
  misc_RNA (1)...(19): siRNA sense strand
gaagaaaugcugcaagaua

SEQ ID NO: 2085217 - RNA, 19 nt, Homo sapiens
  misc_RNA (1)...(19): siRNA sense strand
gcaaaugagugagaagaua

SEQ ID NO: 2085218 - RNA, 19 nt, Homo sapiens
  misc_RNA (1)...(19): siRNA sense strand
gaagaaagcaagcaagaaa

SEQ ID NO: 2085219 - RNA, 19 nt, Homo sapiens
  misc_RNA (1)...(19): siRNA sense strand
agaauuaggugaaguguuu

SEQ ID NO: 2085220 - RNA, 19 nt, Homo sapiens
  misc_RNA (1)...(19): siRNA sense strand
gaagagauaugccuagaag

SEQ ID NO: 2085221 - RNA, 19 nt, Homo sapiens
  misc_RNA (1)...(19): siRNA sense strand
gacacuaucuucucuauug

SEQ ID NO: 2085222 - RNA, 19 nt, Homo sapiens
  misc_RNA (1)...(19): siRNA sense strand
gaacaucacauuaaaggaa

SEQ ID NO: 2085223 - RNA, 19 nt, Homo sapiens
  misc_RNA (1)...(19): siRNA sense strand
ucagaaagauuuggaagua

SEQ ID NO: 2085224 - RNA, 19 nt, Homo sapiens
  misc_RNA (1)...(19): siRNA sense strand
ggaaagugauaguguauuc

SEQ ID NO: 2085225 - RNA, 19 nt, Homo sapiens
  misc_RNA (1)...(19): siRNA sense strand
gagauacgauggauuuaga

SEQ ID NO: 2085226 - RNA, 19 nt, Homo sapiens
  misc_RNA (1)...(19): siRNA sense strand
agaaaugacucuagacuug

SEQ ID NO: 2085227 - RNA, 19 nt, Homo sapiens
  misc_RNA (1)...(19): siRNA sense strand
ccacuaggcuuaagagaau

SEQ ID NO: 2085228 - RNA, 19 nt, Homo sapiens
  misc_RNA (1)...(19): siRNA sense strand
gaacuguccuuguugugaa

SEQ ID NO: 2085229 - RNA, 19 nt, Homo sapiens
  misc_RNA (1)...(19): siRNA sense strand
caagagauacgauggauuu

SEQ ID NO: 2085230 - RNA, 19 nt, Homo sapiens
  misc_RNA (1)...(19): siRNA sense strand
gaagaaagcucaugaaaac

SEQ ID NO: 2085231 - RNA, 19 nt, Homo sapiens
  misc_RNA (1)...(19): siRNA sense strand
caagaaaucuauagagaag

SEQ ID NO: 2085232 - RNA, 19 nt, Homo sapiens
  misc_RNA (1)...(19): siRNA sense strand
ccagguaguucaugaauau

SEQ ID NO: 2085233 - RNA, 19 nt, Homo sapiens
  misc_RNA (1)...(19): siRNA sense strand
guaaagaaauuggaagaug

SEQ ID NO: 2085234 - RNA, 19 nt, Homo sapiens
  misc_RNA (1)...(19): siRNA sense strand
gauaaggucuuccgugcuu

SEQ ID NO: 2085235 - RNA, 19 nt, Homo sapiens
  misc_RNA (1)...(19): siRNA sense strand
gcaggcaguuugauguuaa

SEQ ID NO: 2085236 - RNA, 19 nt, Homo sapiens
  misc_RNA (1)...(19): siRNA sense strand
aagaaaugcugcaagauaa

SEQ ID NO: 2085237 - RNA, 19 nt, Homo sapiens
  misc_RNA (1)...(19): siRNA sense strand
agaaauggaggaugaauua

SEQ ID NO: 2085238 - RNA, 19 nt, Homo sapiens
  misc_RNA (1)...(19): siRNA sense strand
gaagacagcagaacuuaau

SEQ ID NO: 2085239 - RNA, 19 nt, Homo sapiens
  misc_RNA (1)...(19): siRNA sense strand
gcaaaacggucuaaagaaa

SEQ ID NO: 2085240 - RNA, 19 nt, Homo sapiens
  misc_RNA (1)...(19): siRNA sense strand
gcaagaagaaccugugauu

SEQ ID NO: 2085241 - RNA, 19 nt, Homo sapiens
  misc_RNA (1)...(19): siRNA sense strand
aaagaaacauguucaggaa

SEQ ID NO: 2085242 - RNA, 19 nt, Homo sapiens
  misc_RNA (1)...(19): siRNA sense strand
caacagaugagacggauuu

SEQ ID NO: 2085243 - RNA, 19 nt, Homo sapiens
  misc_RNA (1)...(19): siRNA sense strand
agacagagcggucauuuaa

SEQ ID NO: 2085244 - RNA, 19 nt, Homo sapiens
  misc_RNA (1)...(19): siRNA sense strand
gcaugaagauaauuucuca

SEQ ID NO: 2085245 - RNA, 19 nt, Homo sapiens
  misc_RNA (1)...(19): siRNA sense strand
caaagaagagcuacaaguu

SEQ ID NO: 2085246 - RNA, 19 nt, Homo sapiens
  misc_RNA (1)...(19): siRNA sense strand
gaggaugaauuacagaaga

SEQ ID NO: 2085247 - RNA, 19 nt, Homo sapiens
  misc_RNA (1)...(19): siRNA sense strand
ggagggagacgcuuuggua

SEQ ID NO: 2085248 - RNA, 19 nt, Homo sapiens
  misc_RNA (1)...(19): siRNA sense strand
uuacuuaccuuuacagaug

SEQ ID NO: 2085249 - RNA, 19 nt, Homo sapiens
  misc_RNA (1)...(19): siRNA sense strand
guucucaggucucaaauga

SEQ ID NO: 2085250 - RNA, 19 nt, Homo sapiens
  misc_RNA (1)...(19): siRNA sense strand
gaccagcuuuccuuucuaa

SEQ ID NO: 2085251 - RNA, 19 nt, Homo sapiens
  misc_RNA (1)...(19): siRNA sense strand
uucaagaccucaucuauuu

SEQ ID NO: 2085252 - RNA, 19 nt, Homo sapiens
  misc_RNA (1)...(19): siRNA sense strand
gaacagcaaauuucugaga

SEQ ID NO: 2085253 - RNA, 19 nt, Homo sapiens
  misc_RNA (1)...(19): siRNA sense strand
agaagaaccugugauugua

SEQ ID NO: 2085254 - RNA, 19 nt, Homo sapiens
  misc_RNA (1)...(19): siRNA sense strand
gaucaaggaaucaaagaaa

SEQ ID NO: 2085255 - RNA, 19 nt, Homo sapiens
  misc_RNA (1)...(19): siRNA sense strand
caaccagacucguuacuuc

SEQ ID NO: 2085256 - RNA, 19 nt, Homo sapiens
  misc_RNA (1)...(19): siRNA sense strand
gagaagaaagcucaugaaa

SEQ ID NO: 2085257 - RNA, 19 nt, Homo sapiens
  misc_RNA (1)...(19): siRNA sense strand
gaacagaagaucaaggaau

SEQ ID NO: 2085258 - RNA, 19 nt, Homo sapiens
  misc_RNA (1)...(19): siRNA sense strand
ugaagacuaucaugaaaga

SEQ ID NO: 2085259 - RNA, 19 nt, Homo sapiens
  misc_RNA (1)...(19): siRNA sense strand
gagaagacagcagaacuua

SEQ ID NO: 2085260 - RNA, 19 nt, Homo sapiens
  misc_RNA (1)...(19): siRNA sense strand
gaaaggaagaugaggagaa

SEQ ID NO: 2085261 - RNA, 19 nt, Homo sapiens
  misc_RNA (1)...(19): siRNA sense strand
gcaagaggauggccugaag

SEQ ID NO: 2085262 - RNA, 19 nt, Homo sapiens
  misc_RNA (1)...(19): siRNA sense strand
gaagaggaucuaaagcuuu

SEQ ID NO: 2085263 - RNA, 19 nt, Homo sapiens
  misc_RNA (1)...(19): siRNA sense strand
gcuagaaucugagagagaa

SEQ ID NO: 2085264 - RNA, 19 nt, Homo sapiens
  misc_RNA (1)...(19): siRNA sense strand
gaagccaaauacugagaaa

SEQ ID NO: 2085265 - RNA, 19 nt, Homo sapiens
  misc_RNA (1)...(19): siRNA sense strand
acagaaagcugcagggaau

SEQ ID NO: 2085266 - RNA, 19 nt, Homo sapiens
  misc_RNA (1)...(19): siRNA sense strand
gaagaaccugugauuguaa

SEQ ID NO: 2085267 - RNA, 19 nt, Homo sapiens
  misc_RNA (1)...(19): siRNA sense strand
gcggagaauugaagaaaug

SEQ ID NO: 2085268 - RNA, 19 nt, Homo sapiens
  misc_RNA (1)...(19): siRNA sense strand
aagagaaggugaagucuga

SEQ ID NO: 2085269 - RNA, 19 nt, Homo sapiens
  misc_RNA (1)...(19): siRNA sense strand
gagaacagaaugucaagaa

SEQ ID NO: 2085270 - RNA, 19 nt, Homo sapiens
  misc_RNA (1)...(19): siRNA sense strand
caaaugaacaggauaagau

SEQ ID NO: 2085271 - RNA, 19 nt, Homo sapiens
  misc_RNA (1)...(19): siRNA sense strand
gaaacugagucaagaagag

SEQ ID NO: 2085272 - RNA, 19 nt, Homo sapiens
  misc_RNA (1)...(19): siRNA sense strand
gcacagagaccauuugaac

SEQ ID NO: 2085273 - RNA, 19 nt, Homo sapiens
  misc_RNA (1)...(19): siRNA sense strand
gagacaaccagacucguua

SEQ ID NO: 2085274 - RNA, 19 nt, Homo sapiens
  misc_RNA (1)...(19): siRNA sense strand
gggagacgcuuugguaaau

SEQ ID NO: 2085275 - RNA, 19 nt, Homo sapiens
  misc_RNA (1)...(19): siRNA sense strand
aagggaagcugccaauuug

SEQ ID NO: 2085276 - RNA, 19 nt, Homo sapiens
  misc_RNA (1)...(19): siRNA sense strand
ggacacagacugcaauauc

SEQ ID NO: 2085277 - RNA, 19 nt, Homo sapiens
  misc_RNA (1)...(19): siRNA sense strand
ggagaacuguccuuguugu

SEQ ID NO: 2085278 - RNA, 19 nt, Homo sapiens
  misc_RNA (1)...(19): siRNA sense strand
gcacuuguaucugaugaug

SEQ ID NO: 2085279 - RNA, 19 nt, Homo sapiens
  misc_RNA (1)...(19): siRNA sense strand
gaagacagagcggucauuu

SEQ ID NO: 2085280 - RNA, 19 nt, Homo sapiens
  misc_RNA (1)...(19): siRNA sense strand
caauaucgguaguugaaga

SEQ ID NO: 2085281 - RNA, 19 nt, Homo sapiens
  misc_RNA (1)...(19): siRNA sense strand
gaacagaaugucaagaauc

SEQ ID NO: 2085282 - RNA, 19 nt, Homo sapiens
  misc_RNA (1)...(19): siRNA sense strand
caaaugagugagaagauaa

SEQ ID NO: 2085283 - RNA, 19 nt, Homo sapiens
  misc_RNA (1)...(19): siRNA sense strand
gaugaguugccauuacuua

SEQ ID NO: 2085284 - RNA, 19 nt, Homo sapiens
  misc_RNA (1)...(19): siRNA sense strand
gaagccaacucagaggaaa

SEQ ID NO: 2085285 - RNA, 19 nt, Homo sapiens
  misc_RNA (1)...(19): siRNA sense strand
gagccuccguguccacuaa

SEQ ID NO: 2085286 - RNA, 19 nt, Homo sapiens
  misc_RNA (1)...(19): siRNA sense strand
guugaagacuaucaugaaa

SEQ ID NO: 2085287 - RNA, 19 nt, Homo sapiens
  misc_RNA (1)...(19): siRNA sense strand
ugaagaggcugcagugcuu

SEQ ID NO: 2085288 - RNA, 19 nt, Homo sapiens
  misc_RNA (1)...(19): siRNA sense strand
gaggauggccugaaguuug

SEQ ID NO: 2085289 - RNA, 19 nt, Homo sapiens
  misc_RNA (1)...(19): siRNA sense strand
ggagaaccaagaagacuuu

SEQ ID NO: 2085290 - RNA, 19 nt, Homo sapiens
  misc_RNA (1)...(19): siRNA sense strand
gagagcaggcuucauuuga

SEQ ID NO: 2085291 - RNA, 19 nt, Homo sapiens
  misc_RNA (1)...(19): siRNA sense strand
ccaagagaguacuuuauuc

SEQ ID NO: 2085292 - RNA, 19 nt, Homo sapiens
  misc_RNA (1)...(19): siRNA sense strand
gaugaaggcaagguuaaua

SEQ ID NO: 2085293 - RNA, 19 nt, Homo sapiens
  misc_RNA (1)...(19): siRNA sense strand
gaacgacaacccugaggaa

SEQ ID NO: 2085294 - RNA, 19 nt, Homo sapiens
  misc_RNA (1)...(19): siRNA sense strand
gaaagcacagagaccauuu

SEQ ID NO: 2085295 - RNA, 19 nt, Homo sapiens
  misc_RNA (1)...(19): siRNA sense strand
ugagaaauauccaacagau

SEQ ID NO: 2085296 - RNA, 19 nt, Homo sapiens
  misc_RNA (1)...(19): siRNA sense strand
caagaagacuuugaugagu

SEQ ID NO: 2085297 - RNA, 19 nt, Homo sapiens
  misc_RNA (1)...(19): siRNA sense strand
ugccaaagcuggacuggaa

SEQ ID NO: 2085298 - RNA, 19 nt, Homo sapiens
  misc_RNA (1)...(19): siRNA sense strand
ugaagaggaucuaaagcuu

SEQ ID NO: 2085299 - RNA, 19 nt, Homo sapiens
  misc_RNA (1)...(19): siRNA sense strand
gugagcaaaucaaaucauu

SEQ ID NO: 2085300 - RNA, 19 nt, Homo sapiens
  misc_RNA (1)...(19): siRNA sense strand
acgcaauccuucuaauaua

SEQ ID NO: 2085301 - RNA, 19 nt, Homo sapiens
  misc_RNA (1)...(19): siRNA sense strand
ccucagaagugucacagaa

SEQ ID NO: 2085302 - RNA, 19 nt, Homo sapiens
  misc_RNA (1)...(19): siRNA sense strand
caauguagaugauggucuu

SEQ ID NO: 2085303 - RNA, 19 nt, Homo sapiens
  misc_RNA (1)...(19): siRNA sense strand
cagacucguuacuucauua

SEQ ID NO: 2085304 - RNA, 19 nt, Homo sapiens
  misc_RNA (1)...(19): siRNA sense strand
aaagggaagcugccaauuu

SEQ ID NO: 2085305 - RNA, 19 nt, Homo sapiens
  misc_RNA (1)...(19): siRNA sense strand
ucaaaugaaugacagaaag

SEQ ID NO: 2085306 - RNA, 19 nt, Homo sapiens
  misc_RNA (1)...(19): siRNA sense strand
agacagaauuagaggauga

SEQ ID NO: 2085307 - RNA, 19 nt, Homo sapiens
  misc_RNA (1)...(19): siRNA sense strand
agaugaugaugaugcauua

SEQ ID NO: 2085308 - RNA, 19 nt, Homo sapiens
  misc_RNA (1)...(19): siRNA sense strand
cgaagacuggaguaaauua

SEQ ID NO: 2085309 - RNA, 19 nt, Homo sapiens
  misc_RNA (1)...(19): siRNA sense strand
aaacgcaauccuucuaaua

SEQ ID NO: 2085310 - RNA, 19 nt, Homo sapiens
  misc_RNA (1)...(19): siRNA sense strand
ggacacucaugccucagaa

SEQ ID NO: 2085311 - RNA, 19 nt, Homo sapiens
  misc_RNA (1)...(19): siRNA sense strand
gagagccugcccuauaaua

SEQ ID NO: 2085312 - RNA, 19 nt, Homo sapiens
  misc_RNA (1)...(19): siRNA sense strand
ggaggcagggaaccaaaua

SEQ ID NO: 2085313 - RNA, 19 nt, Homo sapiens
  misc_RNA (1)...(19): siRNA sense strand
ggaccagcuuuccuuucua

SEQ ID NO: 2085314 - RNA, 19 nt, Homo sapiens
  misc_RNA (1)...(19): siRNA sense strand
gucuuuaccuuugugauuu

SEQ ID NO: 2085315 - RNA, 19 nt, Homo sapiens
  misc_RNA (1)...(19): siRNA sense strand
ugacagucuuuaccuuugu

SEQ ID NO: 2085316 - RNA, 19 nt, Homo sapiens
  misc_RNA (1)...(19): siRNA sense strand
cugacagucuuuaccuuug

SEQ ID NO: 2085317 - RNA, 19 nt, Homo sapiens
  misc_RNA (1)...(19): siRNA sense strand
ccuuugugauuucuucuau

SEQ ID NO: 2085318 - RNA, 19 nt, Homo sapiens
  misc_RNA (1)...(19): siRNA sense strand
gacagucuuuaccuuugug

SEQ ID NO: 2085319 - RNA, 19 nt, Homo sapiens
  misc_RNA (1)...(19): siRNA sense strand
ugugauuucuucuaucucu

SEQ ID NO: 2085320 - RNA, 19 nt, Homo sapiens
  misc_RNA (1)...(19): siRNA sense strand
ucugacagucuuuaccuuu

SEQ ID NO: 2085321 - RNA, 19 nt, Homo sapiens
  misc_RNA (1)...(19): siRNA sense strand
uuaccuuugugauuucuuc

SEQ ID NO: 2085322 - RNA, 19 nt, Homo sapiens
  misc_RNA (1)...(19): siRNA sense strand
ucuucuaucucuuacaaag

SEQ ID NO: 2085323 - RNA, 19 nt, Homo sapiens
  misc_RNA (1)...(19): siRNA sense strand
agucuuuaccuuugugauu

SEQ ID NO: 2085324 - RNA, 19 nt, Homo sapiens
  misc_RNA (1)...(19): siRNA sense strand
gaaggucccuccgccgaua

SEQ ID NO: 2085325 - RNA, 19 nt, Homo sapiens
  misc_RNA (1)...(19): siRNA sense strand
caagacaucucccaaagca

SEQ ID NO: 2085326 - RNA, 19 nt, Homo sapiens
  misc_RNA (1)...(19): siRNA sense strand
gggcagagguggagaagcu

SEQ ID NO: 2085327 - RNA, 19 nt, Homo sapiens
  misc_RNA (1)...(19): siRNA sense strand
gcgagugguucaucaagau

SEQ ID NO: 2085328 - RNA, 19 nt, Homo sapiens
  misc_RNA (1)...(19): siRNA sense strand
gcccaaggcugagggaaga

SEQ ID NO: 2085329 - RNA, 19 nt, Homo sapiens
  misc_RNA (1)...(19): siRNA sense strand
agacaaggcccugcaguuu

SEQ ID NO: 2085330 - RNA, 19 nt, Homo sapiens
  misc_RNA (1)...(19): siRNA sense strand
gagcggcagcuacaucaaa

SEQ ID NO: 2085331 - RNA, 19 nt, Homo sapiens
  misc_RNA (1)...(19): siRNA sense strand
gacaaggcccugcaguuug

SEQ ID NO: 2085332 - RNA, 19 nt, Homo sapiens
  misc_RNA (1)...(19): siRNA sense strand
gcaagaggagcaagagcaa

SEQ ID NO: 2085333 - RNA, 19 nt, Homo sapiens
  misc_RNA (1)...(19): siRNA sense strand
cccagaagguucagcaguu

SEQ ID NO: 2085334 - RNA, 19 nt, Homo sapiens
  misc_RNA (1)...(19): siRNA sense strand
ccaaagccaggacuuauca

SEQ ID NO: 2085335 - RNA, 19 nt, Homo sapiens
  misc_RNA (1)...(19): siRNA sense strand
ggaugugacccucaaguuc

SEQ ID NO: 2085336 - RNA, 19 nt, Homo sapiens
  misc_RNA (1)...(19): siRNA sense strand
agccaggacuuaucacuau

SEQ ID NO: 2085337 - RNA, 19 nt, Homo sapiens
  misc_RNA (1)...(19): siRNA sense strand
ccagaagguucagcaguuc

SEQ ID NO: 2085338 - RNA, 19 nt, Homo sapiens
  misc_RNA (1)...(19): siRNA sense strand
uucaagcgcuccaauagug

SEQ ID NO: 2085339 - RNA, 19 nt, Homo sapiens
  misc_RNA (1)...(19): siRNA sense strand
ggcgagugguucaucaaga

SEQ ID NO: 2085340 - RNA, 19 nt, Homo sapiens
  misc_RNA (1)...(19): siRNA sense strand
acaaggcccugcaguuugg

SEQ ID NO: 2085341 - RNA, 19 nt, Homo sapiens
  misc_RNA (1)...(19): siRNA sense strand
cuggacagcucagcgauga

SEQ ID NO: 2085342 - RNA, 19 nt, Homo sapiens
  misc_RNA (1)...(19): siRNA sense strand
cccaagacaucucccaaag

SEQ ID NO: 2085343 - RNA, 19 nt, Homo sapiens
  misc_RNA (1)...(19): siRNA sense strand
ucaaguuccuggagcuaca

SEQ ID NO: 2085344 - RNA, 19 nt, Homo sapiens
  misc_RNA (1)...(19): siRNA sense strand
auagagcgcgguucacgua

SEQ ID NO: 2085345 - RNA, 19 nt, Homo sapiens
  misc_RNA (1)...(19): siRNA sense strand
ggccaaagccaggacuuau

SEQ ID NO: 2085346 - RNA, 19 nt, Homo sapiens
  misc_RNA (1)...(19): siRNA sense strand
gugaggcggaggacuauga

SEQ ID NO: 2085347 - RNA, 19 nt, Homo sapiens
  misc_RNA (1)...(19): siRNA sense strand
uaccgggacuugagcuuca

SEQ ID NO: 2085348 - RNA, 19 nt, Homo sapiens
  misc_RNA (1)...(19): siRNA sense strand
gcugguggaguuccgauga

SEQ ID NO: 2085349 - RNA, 19 nt, Homo sapiens
  misc_RNA (1)...(19): siRNA sense strand
gcuacccacugccguacga

SEQ ID NO: 2085350 - RNA, 19 nt, Homo sapiens
  misc_RNA (1)...(19): siRNA sense strand
gacaagaggcgagcaaggu

SEQ ID NO: 2085351 - RNA, 19 nt, Homo sapiens
  misc_RNA (1)...(19): siRNA sense strand
gguucaagcgcuccaauag

SEQ ID NO: 2085352 - RNA, 19 nt, Homo sapiens
  misc_RNA (1)...(19): siRNA sense strand
ccgacagcaucgagaucua

SEQ ID NO: 2085353 - RNA, 19 nt, Homo sapiens
  misc_RNA (1)...(19): siRNA sense strand
cgccgugacuccuggauag

SEQ ID NO: 2085354 - RNA, 19 nt, Homo sapiens
  misc_RNA (1)...(19): siRNA sense strand
gacggcgagugguucauca

SEQ ID NO: 2085355 - RNA, 19 nt, Homo sapiens
  misc_RNA (1)...(19): siRNA sense strand
cuaaggaggagaagaaggu

SEQ ID NO: 2085356 - RNA, 19 nt, Homo sapiens
  misc_RNA (1)...(19): siRNA sense strand
ccacacucaucaucaagac

SEQ ID NO: 2085357 - RNA, 19 nt, Homo sapiens
  misc_RNA (1)...(19): siRNA sense strand
gggugcagguggagacgau

SEQ ID NO: 2085358 - RNA, 19 nt, Homo sapiens
  misc_RNA (1)...(19): siRNA sense strand
gccaaagccaggacuuauc

SEQ ID NO: 2085359 - RNA, 19 nt, Homo sapiens
  misc_RNA (1)...(19): siRNA sense strand
ggagcuacagcaacucaag

SEQ ID NO: 2085360 - RNA, 19 nt, Homo sapiens
  misc_RNA (1)...(19): siRNA sense strand
ggcggaggacuaugagcua

SEQ ID NO: 2085361 - RNA, 19 nt, Homo sapiens
  misc_RNA (1)...(19): siRNA sense strand
acaagaggcgagcaagguu

SEQ ID NO: 2085362 - RNA, 19 nt, Homo sapiens
  misc_RNA (1)...(19): siRNA sense strand
gaggacaagaggcgagcaa

SEQ ID NO: 2085363 - RNA, 19 nt, Homo sapiens
  misc_RNA (1)...(19): siRNA sense strand
gacaacuuggacagugaua

SEQ ID NO: 2085364 - RNA, 19 nt, Homo sapiens
  misc_RNA (1)...(19): siRNA sense strand
gugggcagcacacaacuuc

SEQ ID NO: 2085365 - RNA, 19 nt, Homo sapiens
  misc_RNA (1)...(19): siRNA sense strand
caacuuggacagugauagc

SEQ ID NO: 2085366 - RNA, 19 nt, Homo sapiens
  misc_RNA (1)...(19): siRNA sense strand
aagacaaggcccugcaguu

SEQ ID NO: 2085367 - RNA, 19 nt, Homo sapiens
  misc_RNA (1)...(19): siRNA sense strand
aagccaggacuuaucacua

SEQ ID NO: 2085368 - RNA, 19 nt, Homo sapiens
  misc_RNA (1)...(19): siRNA sense strand
guucaagcgcuccaauagu

SEQ ID NO: 2085369 - RNA, 19 nt, Homo sapiens
  misc_RNA (1)...(19): siRNA sense strand
gccaggacuuaucacuauc

SEQ ID NO: 2085370 - RNA, 19 nt, Homo sapiens
  misc_RNA (1)...(19): siRNA sense strand
gcaugcggagccacagcua

SEQ ID NO: 2085371 - RNA, 19 nt, Homo sapiens
  misc_RNA (1)...(19): siRNA sense strand
ccacagaacugaaugaaga

SEQ ID NO: 2085372 - RNA, 19 nt, Homo sapiens
  misc_RNA (1)...(19): siRNA sense strand
gauaagcaacuccaaguaa

SEQ ID NO: 2085373 - RNA, 19 nt, Homo sapiens
  misc_RNA (1)...(19): siRNA sense strand
ggaauacuuuguagauaag

SEQ ID NO: 2085374 - RNA, 19 nt, Homo sapiens
  misc_RNA (1)...(19): siRNA sense strand
guggaauacuuuguagaua

SEQ ID NO: 2085375 - RNA, 19 nt, Homo sapiens
  misc_RNA (1)...(19): siRNA sense strand
auaagcaacuccaaguaaa

SEQ ID NO: 2085376 - RNA, 19 nt, Homo sapiens
  misc_RNA (1)...(19): siRNA sense strand
gggcucagaugcagucaag

SEQ ID NO: 2085377 - RNA, 19 nt, Homo sapiens
  misc_RNA (1)...(19): siRNA sense strand
gggcuggcauucugugugu

SEQ ID NO: 2085378 - RNA, 19 nt, Homo sapiens
  misc_RNA (1)...(19): siRNA sense strand
ggaagccacagaacugaau

SEQ ID NO: 2085379 - RNA, 19 nt, Homo sapiens
  misc_RNA (1)...(19): siRNA sense strand
gaaccuggcagaggaugga

SEQ ID NO: 2085380 - RNA, 19 nt, Homo sapiens
  misc_RNA (1)...(19): siRNA sense strand
ggacaccaccagcuuggau

SEQ ID NO: 2085381 - RNA, 19 nt, Homo sapiens
  misc_RNA (1)...(19): siRNA sense strand
gaacugaaugaagaugguu

SEQ ID NO: 2085382 - RNA, 19 nt, Homo sapiens
  misc_RNA (1)...(19): siRNA sense strand
cguguaugcuguggagaaa

SEQ ID NO: 2085383 - RNA, 19 nt, Homo sapiens
  misc_RNA (1)...(19): siRNA sense strand
agauaagcaacuccaagua

SEQ ID NO: 2085384 - RNA, 19 nt, Homo sapiens
  misc_RNA (1)...(19): siRNA sense strand
ggcagaggauggagagacu

SEQ ID NO: 2085385 - RNA, 19 nt, Homo sapiens
  misc_RNA (1)...(19): siRNA sense strand
uagauaagcaacuccaagu

SEQ ID NO: 2085386 - RNA, 19 nt, Homo sapiens
  misc_RNA (1)...(19): siRNA sense strand
caagggaagccacagaacu

SEQ ID NO: 2085387 - RNA, 19 nt, Homo sapiens
  misc_RNA (1)...(19): siRNA sense strand
ggccucgccguguggaaua

SEQ ID NO: 2085388 - RNA, 19 nt, Homo sapiens
  misc_RNA (1)...(19): siRNA sense strand
gaagccacagaacugaaug

SEQ ID NO: 2085389 - RNA, 19 nt, Homo sapiens
  misc_RNA (1)...(19): siRNA sense strand
gggaagccacagaacugaa

SEQ ID NO: 2085390 - RNA, 19 nt, Homo sapiens
  misc_RNA (1)...(19): siRNA sense strand
uaagcaacuccaaguaaag

SEQ ID NO: 2085391 - RNA, 19 nt, Homo sapiens
  misc_RNA (1)...(19): siRNA sense strand
agaacugaaugaagauggu

SEQ ID NO: 2085392 - RNA, 19 nt, Homo sapiens
  misc_RNA (1)...(19): siRNA sense strand
ugaaugaagaugguucuca

SEQ ID NO: 2085393 - RNA, 19 nt, Homo sapiens
  misc_RNA (1)...(19): siRNA sense strand
gcaagggaagccacagaac

SEQ ID NO: 2085394 - RNA, 19 nt, Homo sapiens
  misc_RNA (1)...(19): siRNA sense strand
uguaugcuguggagaaagg

SEQ ID NO: 2085395 - RNA, 19 nt, Homo sapiens
  misc_RNA (1)...(19): siRNA sense strand
cguguggaauacuuuguag

SEQ ID NO: 2085396 - RNA, 19 nt, Homo sapiens
  misc_RNA (1)...(19): siRNA sense strand
ugacuaaucuccuucagaa

SEQ ID NO: 2085397 - RNA, 19 nt, Homo sapiens
  misc_RNA (1)...(19): siRNA sense strand
ugaauuagccaaugaguuu

SEQ ID NO: 2085398 - RNA, 19 nt, Homo sapiens
  misc_RNA (1)...(19): siRNA sense strand
cagaagagguggaauuugu

SEQ ID NO: 2085399 - RNA, 19 nt, Homo sapiens
  misc_RNA (1)...(19): siRNA sense strand
cagacaaacugcaagaauu

SEQ ID NO: 2085400 - RNA, 19 nt, Homo sapiens
  misc_RNA (1)...(19): siRNA sense strand
gaaauagcgucugagauca

SEQ ID NO: 2085401 - RNA, 19 nt, Homo sapiens
  misc_RNA (1)...(19): siRNA sense strand
caacucaccuccauguuca

SEQ ID NO: 2085402 - RNA, 19 nt, Homo sapiens
  misc_RNA (1)...(19): siRNA sense strand
gacguaagauauacacuug

SEQ ID NO: 2085403 - RNA, 19 nt, Homo sapiens
  misc_RNA (1)...(19): siRNA sense strand
agaaagaaauagcgucuga

SEQ ID NO: 2085404 - RNA, 19 nt, Homo sapiens
  misc_RNA (1)...(19): siRNA sense strand
gagagaaggugauuugacu

SEQ ID NO: 2085405 - RNA, 19 nt, Homo sapiens
  misc_RNA (1)...(19): siRNA sense strand
ugaggaagcuggaacacuu

SEQ ID NO: 2085406 - RNA, 19 nt, Homo sapiens
  misc_RNA (1)...(19): siRNA sense strand
gagaaggugauuugacuaa

SEQ ID NO: 2085407 - RNA, 19 nt, Homo sapiens
  misc_RNA (1)...(19): siRNA sense strand
uagauaagcagcacaauga

SEQ ID NO: 2085408 - RNA, 19 nt, Homo sapiens
  misc_RNA (1)...(19): siRNA sense strand
cgucugagaucauaggauu

SEQ ID NO: 2085409 - RNA, 19 nt, Homo sapiens
  misc_RNA (1)...(19): siRNA sense strand
gcaggugggaucagcaaua

SEQ ID NO: 2085410 - RNA, 19 nt, Homo sapiens
  misc_RNA (1)...(19): siRNA sense strand
ggaagcagaaagaguguuu

SEQ ID NO: 2085411 - RNA, 19 nt, Homo sapiens
  misc_RNA (1)...(19): siRNA sense strand
gccaaugaguuuauuagug

SEQ ID NO: 2085412 - RNA, 19 nt, Homo sapiens
  misc_RNA (1)...(19): siRNA sense strand
ucacugcccuggcuacgaa

SEQ ID NO: 2085413 - RNA, 19 nt, Homo sapiens
  misc_RNA (1)...(19): siRNA sense strand
cguaagauauacacuuguu

SEQ ID NO: 2085414 - RNA, 19 nt, Homo sapiens
  misc_RNA (1)...(19): siRNA sense strand
agacaaacugcaagaauuu

SEQ ID NO: 2085415 - RNA, 19 nt, Homo sapiens
  misc_RNA (1)...(19): siRNA sense strand
agaaauagcgucugagauc

SEQ ID NO: 2085416 - RNA, 19 nt, Homo sapiens
  misc_RNA (1)...(19): siRNA sense strand
gaggaagcuggaacacuua

SEQ ID NO: 2085417 - RNA, 19 nt, Homo sapiens
  misc_RNA (1)...(19): siRNA sense strand
uggaaaaucuuuggaguua

SEQ ID NO: 2085418 - RNA, 19 nt, Homo sapiens
  misc_RNA (1)...(19): siRNA sense strand
gagaucauaggauuacuga

SEQ ID NO: 2085419 - RNA, 19 nt, Homo sapiens
  misc_RNA (1)...(19): siRNA sense strand
aaucauagccuucuucagu

SEQ ID NO: 2085420 - RNA, 19 nt, Homo sapiens
  misc_RNA (1)...(19): siRNA sense strand
caagaaauaccaccuuugg

SEQ ID NO: 2085421 - RNA, 19 nt, Homo sapiens
  misc_RNA (1)...(19): siRNA sense strand
ggaguuacuaccuaucauu

SEQ ID NO: 2085422 - RNA, 19 nt, Homo sapiens
  misc_RNA (1)...(19): siRNA sense strand
ccugagagccaucuucaaa

SEQ ID NO: 2085423 - RNA, 19 nt, Homo sapiens
  misc_RNA (1)...(19): siRNA sense strand
ggaagaauguaagaaacag

SEQ ID NO: 2085424 - RNA, 19 nt, Homo sapiens
  misc_RNA (1)...(19): siRNA sense strand
gaauuagccaaugaguuua

SEQ ID NO: 2085425 - RNA, 19 nt, Homo sapiens
  misc_RNA (1)...(19): siRNA sense strand
cuaaucuccuucagaauca

SEQ ID NO: 2085426 - RNA, 19 nt, Homo sapiens
  misc_RNA (1)...(19): siRNA sense strand
acagaguggugacgaguga

SEQ ID NO: 2085427 - RNA, 19 nt, Homo sapiens
  misc_RNA (1)...(19): siRNA sense strand
gcuggaggcucaccauuuu

SEQ ID NO: 2085428 - RNA, 19 nt, Homo sapiens
  misc_RNA (1)...(19): siRNA sense strand
ucagcaauauguaauccaa

SEQ ID NO: 2085429 - RNA, 19 nt, Homo sapiens
  misc_RNA (1)...(19): siRNA sense strand
uauuagugcugucagagaa

SEQ ID NO: 2085430 - RNA, 19 nt, Homo sapiens
  misc_RNA (1)...(19): siRNA sense strand
gaagcuggaacacuuagga

SEQ ID NO: 2085431 - RNA, 19 nt, Homo sapiens
  misc_RNA (1)...(19): siRNA sense strand
gaauguaagaaacaguuga

SEQ ID NO: 2085432 - RNA, 19 nt, Homo sapiens
  misc_RNA (1)...(19): siRNA sense strand
gaaucaagcagugaaagga

SEQ ID NO: 2085433 - RNA, 19 nt, Homo sapiens
  misc_RNA (1)...(19): siRNA sense strand
aauagcgucugagaucaua

SEQ ID NO: 2085434 - RNA, 19 nt, Homo sapiens
  misc_RNA (1)...(19): siRNA sense strand
caggugggaucagcaauau

SEQ ID NO: 2085435 - RNA, 19 nt, Homo sapiens
  misc_RNA (1)...(19): siRNA sense strand
aaagaaauagcgucugaga

SEQ ID NO: 2085436 - RNA, 19 nt, Homo sapiens
  misc_RNA (1)...(19): siRNA sense strand
gagcauguucuccaagaug

SEQ ID NO: 2085437 - RNA, 19 nt, Homo sapiens
  misc_RNA (1)...(19): siRNA sense strand
ggugggaucagcaauaugu

SEQ ID NO: 2085438 - RNA, 19 nt, Homo sapiens
  misc_RNA (1)...(19): siRNA sense strand
ucaccuccauguucaagga

SEQ ID NO: 2085439 - RNA, 19 nt, Homo sapiens
  misc_RNA (1)...(19): siRNA sense strand
ugagagccaucuucaaagg

SEQ ID NO: 2085440 - RNA, 19 nt, Homo sapiens
  misc_RNA (1)...(19): siRNA sense strand
gcacaaugaggaacagagu

SEQ ID NO: 2085441 - RNA, 19 nt, Homo sapiens
  misc_RNA (1)...(19): siRNA sense strand
ggaaucauagccuucuuca

SEQ ID NO: 2085442 - RNA, 19 nt, Homo sapiens
  misc_RNA (1)...(19): siRNA sense strand
gggaagaauguaagaaaca

SEQ ID NO: 2085443 - RNA, 19 nt, Homo sapiens
  misc_RNA (1)...(19): siRNA sense strand
uuaggagacguaagauaua

SEQ ID NO: 2085444 - RNA, 19 nt, Homo sapiens
  misc_RNA (1)...(19): siRNA sense strand
agagccaucuucaaagguu

SEQ ID NO: 2085445 - RNA, 19 nt, Homo sapiens
  misc_RNA (1)...(19): siRNA sense strand
gaaaaucuuuggaguuacu

SEQ ID NO: 2085446 - RNA, 19 nt, Homo sapiens
  misc_RNA (1)...(19): siRNA sense strand
ucagugcacuagauaagca

SEQ ID NO: 2085447 - RNA, 19 nt, Homo sapiens
  misc_RNA (1)...(19): siRNA sense strand
gaaaaucuggcuuauggaa

SEQ ID NO: 2085448 - RNA, 19 nt, Homo sapiens
  misc_RNA (1)...(19): siRNA sense strand
agaaacaguugauuaacac

SEQ ID NO: 2085449 - RNA, 19 nt, Homo sapiens
  misc_RNA (1)...(19): siRNA sense strand
gcagaagagguggaauuug

SEQ ID NO: 2085450 - RNA, 19 nt, Homo sapiens
  misc_RNA (1)...(19): siRNA sense strand
ggaacacuuaggagacgua

SEQ ID NO: 2085451 - RNA, 19 nt, Homo sapiens
  misc_RNA (1)...(19): siRNA sense strand
ccugagagaaggugauuug

SEQ ID NO: 2085452 - RNA, 19 nt, Homo sapiens
  misc_RNA (1)...(19): siRNA sense strand
ucuaucagcuucugguucu

SEQ ID NO: 2085453 - RNA, 19 nt, Homo sapiens
  misc_RNA (1)...(19): siRNA sense strand
ccaacucaccuccauguuc

SEQ ID NO: 2085454 - RNA, 19 nt, Homo sapiens
  misc_RNA (1)...(19): siRNA sense strand
gaacacuuaggagacguaa

SEQ ID NO: 2085455 - RNA, 19 nt, Homo sapiens
  misc_RNA (1)...(19): siRNA sense strand
caauauguaauccaacuca

SEQ ID NO: 2085456 - RNA, 19 nt, Homo sapiens
  misc_RNA (1)...(19): siRNA sense strand
uucaagaaauaccaccuuu

SEQ ID NO: 2085457 - RNA, 19 nt, Homo sapiens
  misc_RNA (1)...(19): siRNA sense strand
gguggaauuugugguggaa

SEQ ID NO: 2085458 - RNA, 19 nt, Homo sapiens
  misc_RNA (1)...(19): siRNA sense strand
gcagccuagugaauggaaa

SEQ ID NO: 2085459 - RNA, 19 nt, Homo sapiens
  misc_RNA (1)...(19): siRNA sense strand
gaucagcaauauguaaucc

SEQ ID NO: 2085460 - RNA, 19 nt, Homo sapiens
  misc_RNA (1)...(19): siRNA sense strand
cagaaagaguguuuuggaa

SEQ ID NO: 2085461 - RNA, 19 nt, Homo sapiens
  misc_RNA (1)...(19): siRNA sense strand
gaguuacuaccuaucauuc

SEQ ID NO: 2085462 - RNA, 19 nt, Homo sapiens
  misc_RNA (1)...(19): siRNA sense strand
gcagaaagaguguuuugga

SEQ ID NO: 2085463 - RNA, 19 nt, Homo sapiens
  misc_RNA (1)...(19): siRNA sense strand
gggaucagcaauauguaau

SEQ ID NO: 2085464 - RNA, 19 nt, Homo sapiens
  misc_RNA (1)...(19): siRNA sense strand
aaaaggaaaaucuggcuua

SEQ ID NO: 2085465 - RNA, 19 nt, Homo sapiens
  misc_RNA (1)...(19): siRNA sense strand
aaaucuggcuuauggaaaa

SEQ ID NO: 2085466 - RNA, 19 nt, Homo sapiens
  misc_RNA (1)...(19): siRNA sense strand
cuagauaagcagcacaaug

SEQ ID NO: 2085467 - RNA, 19 nt, Homo sapiens
  misc_RNA (1)...(19): siRNA sense strand
guuacuaccuaucauucuc

SEQ ID NO: 2085468 - RNA, 19 nt, Homo sapiens
  misc_RNA (1)...(19): siRNA sense strand
ucaagaaauaccaccuuug

SEQ ID NO: 2085469 - RNA, 19 nt, Homo sapiens
  misc_RNA (1)...(19): siRNA sense strand
gaagaauguaagaaacagu

SEQ ID NO: 2085470 - RNA, 19 nt, Homo sapiens
  misc_RNA (1)...(19): siRNA sense strand
guuuauuagugcugucaga

SEQ ID NO: 2085471 - RNA, 19 nt, Homo sapiens
  misc_RNA (1)...(19): siRNA sense strand
caagggaagcagaaagagu

SEQ ID NO: 2085472 - RNA, 19 nt, Homo sapiens
  misc_RNA (1)...(19): siRNA sense strand
guaagauauacacuuguug

SEQ ID NO: 2085473 - RNA, 19 nt, Homo sapiens
  misc_RNA (1)...(19): siRNA sense strand
uaggagacguaagauauac

SEQ ID NO: 2085474 - RNA, 19 nt, Homo sapiens
  misc_RNA (1)...(19): siRNA sense strand
agacguaagauauacacuu

SEQ ID NO: 2085475 - RNA, 19 nt, Homo sapiens
  misc_RNA (1)...(19): siRNA sense strand
gcagugaaaggaaaaguug

SEQ ID NO: 2085476 - RNA, 19 nt, Homo sapiens
  misc_RNA (1)...(19): siRNA sense strand
cuucuucagugcacuagau

SEQ ID NO: 2085477 - RNA, 19 nt, Homo sapiens
  misc_RNA (1)...(19): siRNA sense strand
uaauccaacucaccuccau

SEQ ID NO: 2085478 - RNA, 19 nt, Homo sapiens
  misc_RNA (1)...(19): siRNA sense strand
cauugagcauguucuccaa

SEQ ID NO: 2085479 - RNA, 19 nt, Homo sapiens
  misc_RNA (1)...(19): siRNA sense strand
agcauguucuccaagauga

SEQ ID NO: 2085480 - RNA, 19 nt, Homo sapiens
  misc_RNA (1)...(19): siRNA sense strand
acuaaucuccuucagaauc

SEQ ID NO: 2085481 - RNA, 19 nt, Homo sapiens
  misc_RNA (1)...(19): siRNA sense strand
agaaggugauuugacuaau

SEQ ID NO: 2085482 - RNA, 19 nt, Homo sapiens
  misc_RNA (1)...(19): siRNA sense strand
uugagcauguucuccaaga

SEQ ID NO: 2085483 - RNA, 19 nt, Homo sapiens
  misc_RNA (1)...(19): siRNA sense strand
aggaaaaucuggcuuaugg

SEQ ID NO: 2085484 - RNA, 19 nt, Homo sapiens
  misc_RNA (1)...(19): siRNA sense strand
ugguugaauuagccaauga

SEQ ID NO: 2085485 - RNA, 19 nt, Homo sapiens
  misc_RNA (1)...(19): siRNA sense strand
ucuuuggaguuacuaccua

SEQ ID NO: 2085486 - RNA, 19 nt, Homo sapiens
  misc_RNA (1)...(19): siRNA sense strand
cugcagaagagguggaauu

SEQ ID NO: 2085487 - RNA, 19 nt, Homo sapiens
  misc_RNA (1)...(19): siRNA sense strand
ugggaucagcaauauguaa

SEQ ID NO: 2085488 - RNA, 19 nt, Homo sapiens
  misc_RNA (1)...(19): siRNA sense strand
ucagaaucaagcagugaaa

SEQ ID NO: 2085489 - RNA, 19 nt, Homo sapiens
  misc_RNA (1)...(19): siRNA sense strand
uggaaaagguguacugagu

SEQ ID NO: 2085490 - RNA, 19 nt, Homo sapiens
  misc_RNA (1)...(19): siRNA sense strand
gacaaacugcaagaauuuc

SEQ ID NO: 2085491 - RNA, 19 nt, Homo sapiens
  misc_RNA (1)...(19): siRNA sense strand
ugcagaagagguggaauuu

SEQ ID NO: 2085492 - RNA, 19 nt, Homo sapiens
  misc_RNA (1)...(19): siRNA sense strand
aaucaagcagugaaaggaa

SEQ ID NO: 2085493 - RNA, 19 nt, Homo sapiens
  misc_RNA (1)...(19): siRNA sense strand
ggaucagcaauauguaauc

SEQ ID NO: 2085494 - RNA, 19 nt, Homo sapiens
  misc_RNA (1)...(19): siRNA sense strand
gaaagaggcuuccggacau

SEQ ID NO: 2085495 - RNA, 19 nt, Homo sapiens
  misc_RNA (1)...(19): siRNA sense strand
ccagacagaugcccgguua

SEQ ID NO: 2085496 - RNA, 19 nt, Homo sapiens
  misc_RNA (1)...(19): siRNA sense strand
gaugcccgguuauucauua

SEQ ID NO: 2085497 - RNA, 19 nt, Homo sapiens
  misc_RNA (1)...(19): siRNA sense strand
gcaagagccuaagcaaaga

SEQ ID NO: 2085498 - RNA, 19 nt, Homo sapiens
  misc_RNA (1)...(19): siRNA sense strand
ggcaagagccuaagcaaag

SEQ ID NO: 2085499 - RNA, 19 nt, Homo sapiens
  misc_RNA (1)...(19): siRNA sense strand
gaagacagcgaaaagagaa

SEQ ID NO: 2085500 - RNA, 19 nt, Homo sapiens
  misc_RNA (1)...(19): siRNA sense strand
gagcuagggaaacuggaaa

SEQ ID NO: 2085501 - RNA, 19 nt, Homo sapiens
  misc_RNA (1)...(19): siRNA sense strand
acagaugcccgguuauuca

SEQ ID NO: 2085502 - RNA, 19 nt, Homo sapiens
  misc_RNA (1)...(19): siRNA sense strand
agacagaugcccgguuauu

SEQ ID NO: 2085503 - RNA, 19 nt, Homo sapiens
  misc_RNA (1)...(19): siRNA sense strand
gacagaugcccgguuauuc

SEQ ID NO: 2085504 - RNA, 19 nt, Homo sapiens
  misc_RNA (1)...(19): siRNA sense strand
cugaggcgcucgguugcua

SEQ ID NO: 2085505 - RNA, 19 nt, Homo sapiens
  misc_RNA (1)...(19): siRNA sense strand
caagagccuaagcaaagaa

SEQ ID NO: 2085506 - RNA, 19 nt, Homo sapiens
  misc_RNA (1)...(19): siRNA sense strand
cggcaagagccuaagcaaa

SEQ ID NO: 2085507 - RNA, 19 nt, Homo sapiens
  misc_RNA (1)...(19): siRNA sense strand
aaagaggcuuccggacaug

SEQ ID NO: 2085508 - RNA, 19 nt, Homo sapiens
  misc_RNA (1)...(19): siRNA sense strand
ggauccagagcuagggaaa

SEQ ID NO: 2085509 - RNA, 19 nt, Homo sapiens
  misc_RNA (1)...(19): siRNA sense strand
cucgguugcuagagccuua

SEQ ID NO: 2085510 - RNA, 19 nt, Homo sapiens
  misc_RNA (1)...(19): siRNA sense strand
guacagugcuaaacaaaua

SEQ ID NO: 2085511 - RNA, 19 nt, Homo sapiens
  misc_RNA (1)...(19): siRNA sense strand
caaacuaccuguauaaaga

SEQ ID NO: 2085512 - RNA, 19 nt, Homo sapiens
  misc_RNA (1)...(19): siRNA sense strand
ccaaaggauucucaauuua

SEQ ID NO: 2085513 - RNA, 19 nt, Homo sapiens
  misc_RNA (1)...(19): siRNA sense strand
caagugaaaucccaaauga

SEQ ID NO: 2085514 - RNA, 19 nt, Homo sapiens
  misc_RNA (1)...(19): siRNA sense strand
gccaaaggauucucaauuu

SEQ ID NO: 2085515 - RNA, 19 nt, Homo sapiens
  misc_RNA (1)...(19): siRNA sense strand
gggagaagcuuaagguuga

SEQ ID NO: 2085516 - RNA, 19 nt, Homo sapiens
  misc_RNA (1)...(19): siRNA sense strand
gaaaucaucugugccuuug

SEQ ID NO: 2085517 - RNA, 19 nt, Homo sapiens
  misc_RNA (1)...(19): siRNA sense strand
gaaauggaugcaaauguua

SEQ ID NO: 2085518 - RNA, 19 nt, Homo sapiens
  misc_RNA (1)...(19): siRNA sense strand
gagaaggacuggccuaaag

SEQ ID NO: 2085519 - RNA, 19 nt, Homo sapiens
  misc_RNA (1)...(19): siRNA sense strand
caagcaaacuaccuguaua

SEQ ID NO: 2085520 - RNA, 19 nt, Homo sapiens
  misc_RNA (1)...(19): siRNA sense strand
gaccagaagucacaauuuc

SEQ ID NO: 2085521 - RNA, 19 nt, Homo sapiens
  misc_RNA (1)...(19): siRNA sense strand
ucacuaaaccgaacucuaa

SEQ ID NO: 2085522 - RNA, 19 nt, Homo sapiens
  misc_RNA (1)...(19): siRNA sense strand
gacauuaaauugagucuuc

SEQ ID NO: 2085523 - RNA, 19 nt, Homo sapiens
  misc_RNA (1)...(19): siRNA sense strand
ggaaauuauugaagagaga

SEQ ID NO: 2085524 - RNA, 19 nt, Homo sapiens
  misc_RNA (1)...(19): siRNA sense strand
gaagagaugugagcguuuc

SEQ ID NO: 2085525 - RNA, 19 nt, Homo sapiens
  misc_RNA (1)...(19): siRNA sense strand
agaaauggaugcaaauguu

SEQ ID NO: 2085526 - RNA, 19 nt, Homo sapiens
  misc_RNA (1)...(19): siRNA sense strand
uaaauugagucuuccaguu

SEQ ID NO: 2085527 - RNA, 19 nt, Homo sapiens
  misc_RNA (1)...(19): siRNA sense strand
gaauauguauccugaaggu

SEQ ID NO: 2085528 - RNA, 19 nt, Homo sapiens
  misc_RNA (1)...(19): siRNA sense strand
gccaaaggauucccucuug

SEQ ID NO: 2085529 - RNA, 19 nt, Homo sapiens
  misc_RNA (1)...(19): siRNA sense strand
caaauuguauggcuguuuc

SEQ ID NO: 2085530 - RNA, 19 nt, Homo sapiens
  misc_RNA (1)...(19): siRNA sense strand
uacaagaaguaccuagaua

SEQ ID NO: 2085531 - RNA, 19 nt, Homo sapiens
  misc_RNA (1)...(19): siRNA sense strand
uaaagacgaugaacaggau

SEQ ID NO: 2085532 - RNA, 19 nt, Homo sapiens
  misc_RNA (1)...(19): siRNA sense strand
caaagggacuuggauaaca

SEQ ID NO: 2085533 - RNA, 19 nt, Homo sapiens
  misc_RNA (1)...(19): siRNA sense strand
ccaaagcauucacuuccua

SEQ ID NO: 2085534 - RNA, 19 nt, Homo sapiens
  misc_RNA (1)...(19): siRNA sense strand
guacggccaccuucuauuu

SEQ ID NO: 2085535 - RNA, 19 nt, Homo sapiens
  misc_RNA (1)...(19): siRNA sense strand
ggacuggccuaaagacgau

SEQ ID NO: 2085536 - RNA, 19 nt, Homo sapiens
  misc_RNA (1)...(19): siRNA sense strand
acaaggagccggagauauu

SEQ ID NO: 2085537 - RNA, 19 nt, Homo sapiens
  misc_RNA (1)...(19): siRNA sense strand
ccacagauuuagggaauga

SEQ ID NO: 2085538 - RNA, 19 nt, Homo sapiens
  misc_RNA (1)...(19): siRNA sense strand
aaaccgaacucuaaaggau

SEQ ID NO: 2085539 - RNA, 19 nt, Homo sapiens
  misc_RNA (1)...(19): siRNA sense strand
gcaagcaaacuaccuguau

SEQ ID NO: 2085540 - RNA, 19 nt, Homo sapiens
  misc_RNA (1)...(19): siRNA sense strand
gaugauaccagcaagcaaa

SEQ ID NO: 2085541 - RNA, 19 nt, Homo sapiens
  misc_RNA (1)...(19): siRNA sense strand
gaccagucuugggaaauua

SEQ ID NO: 2085542 - RNA, 19 nt, Homo sapiens
  misc_RNA (1)...(19): siRNA sense strand
gaacucccuuggucccauu

SEQ ID NO: 2085543 - RNA, 19 nt, Homo sapiens
  misc_RNA (1)...(19): siRNA sense strand
ccaagacuauguguuuauu

SEQ ID NO: 2085544 - RNA, 19 nt, Homo sapiens
  misc_RNA (1)...(19): siRNA sense strand
ggaccagaagucacaauuu

SEQ ID NO: 2085545 - RNA, 19 nt, Homo sapiens
  misc_RNA (1)...(19): siRNA sense strand
ggagaaauccagcucaaca

SEQ ID NO: 2085546 - RNA, 19 nt, Homo sapiens
  misc_RNA (1)...(19): siRNA sense strand
gcagaaucauuucaucaag

SEQ ID NO: 2085547 - RNA, 19 nt, Homo sapiens
  misc_RNA (1)...(19): siRNA sense strand
caacucacuucaaauccaa

SEQ ID NO: 2085548 - RNA, 19 nt, Homo sapiens
  misc_RNA (1)...(19): siRNA sense strand
ucaaugaaguggaugauac

SEQ ID NO: 2085549 - RNA, 19 nt, Homo sapiens
  misc_RNA (1)...(19): siRNA sense strand
gaagagagaaacgcacuga

SEQ ID NO: 2085550 - RNA, 19 nt, Homo sapiens
  misc_RNA (1)...(19): siRNA sense strand
ucaaagccaucaaugaagu

SEQ ID NO: 2085551 - RNA, 19 nt, Homo sapiens
  misc_RNA (1)...(19): siRNA sense strand
acaaaggacagaauaugua

SEQ ID NO: 2085552 - RNA, 19 nt, Homo sapiens
  misc_RNA (1)...(19): siRNA sense strand
cuuccuagcugccuauuug

SEQ ID NO: 2085553 - RNA, 19 nt, Homo sapiens
  misc_RNA (1)...(19): siRNA sense strand
ggcuggauguguauaaauu

SEQ ID NO: 2085554 - RNA, 19 nt, Homo sapiens
  misc_RNA (1)...(19): siRNA sense strand
aauugagucuuccaguuua

SEQ ID NO: 2085555 - RNA, 19 nt, Homo sapiens
  misc_RNA (1)...(19): siRNA sense strand
ugaccagucuugggaaauu

SEQ ID NO: 2085556 - RNA, 19 nt, Homo sapiens
  misc_RNA (1)...(19): siRNA sense strand
cacaauuucuuccuguauu

SEQ ID NO: 2085557 - RNA, 19 nt, Homo sapiens
  misc_RNA (1)...(19): siRNA sense strand
gcaaacuaccuguauaaag

SEQ ID NO: 2085558 - RNA, 19 nt, Homo sapiens
  misc_RNA (1)...(19): siRNA sense strand
uauaaucuguacagugcua

SEQ ID NO: 2085559 - RNA, 19 nt, Homo sapiens
  misc_RNA (1)...(19): siRNA sense strand
cagaauauguauccugaag

SEQ ID NO: 2085560 - RNA, 19 nt, Homo sapiens
  misc_RNA (1)...(19): siRNA sense strand
gaggaagagccacucagua

SEQ ID NO: 2085561 - RNA, 19 nt, Homo sapiens
  misc_RNA (1)...(19): siRNA sense strand
uaaggaaggacuuuaccua

SEQ ID NO: 2085562 - RNA, 19 nt, Homo sapiens
  misc_RNA (1)...(19): siRNA sense strand
ggccacagauuuagggaau

SEQ ID NO: 2085563 - RNA, 19 nt, Homo sapiens
  misc_RNA (1)...(19): siRNA sense strand
caaaggacagaauauguau

SEQ ID NO: 2085564 - RNA, 19 nt, Homo sapiens
  misc_RNA (1)...(19): siRNA sense strand
cgaggagacuauucacaug

SEQ ID NO: 2085565 - RNA, 19 nt, Homo sapiens
  misc_RNA (1)...(19): siRNA sense strand
gcagauccuuuagaaaugg

SEQ ID NO: 2085566 - RNA, 19 nt, Homo sapiens
  misc_RNA (1)...(19): siRNA sense strand
agagagagaacuucaagaa

SEQ ID NO: 2085567 - RNA, 19 nt, Homo sapiens
  misc_RNA (1)...(19): siRNA sense strand
gauaccagcaagcaaacua

SEQ ID NO: 2085568 - RNA, 19 nt, Homo sapiens
  misc_RNA (1)...(19): siRNA sense strand
gcauucacuuccuaaaaua

SEQ ID NO: 2085569 - RNA, 19 nt, Homo sapiens
  misc_RNA (1)...(19): siRNA sense strand
ggaccuggccaaaggauuc

SEQ ID NO: 2085570 - RNA, 19 nt, Homo sapiens
  misc_RNA (1)...(19): siRNA sense strand
gaaaauaaagcaccccauu

SEQ ID NO: 2085571 - RNA, 19 nt, Homo sapiens
  misc_RNA (1)...(19): siRNA sense strand
aaauugagucuuccaguuu

SEQ ID NO: 2085572 - RNA, 19 nt, Homo sapiens
  misc_RNA (1)...(19): siRNA sense strand
caaggagccggagauauuu

SEQ ID NO: 2085573 - RNA, 19 nt, Homo sapiens
  misc_RNA (1)...(19): siRNA sense strand
gaggagacuauucacauga

SEQ ID NO: 2085574 - RNA, 19 nt, Homo sapiens
  misc_RNA (1)...(19): siRNA sense strand
ugaaaucccaaaugaaaug

SEQ ID NO: 2085575 - RNA, 19 nt, Homo sapiens
  misc_RNA (1)...(19): siRNA sense strand
cuucaacgcuuccuacaag

SEQ ID NO: 2085576 - RNA, 19 nt, Homo sapiens
  misc_RNA (1)...(19): siRNA sense strand
gcuccgggcagaaucauuu

SEQ ID NO: 2085577 - RNA, 19 nt, Homo sapiens
  misc_RNA (1)...(19): siRNA sense strand
uggugaaccuucuguuuga

SEQ ID NO: 2085578 - RNA, 19 nt, Homo sapiens
  misc_RNA (1)...(19): siRNA sense strand
ggauguuucugccaaagca

SEQ ID NO: 2085579 - RNA, 19 nt, Homo sapiens
  misc_RNA (1)...(19): siRNA sense strand
agaaucauuucaucaagga

SEQ ID NO: 2085580 - RNA, 19 nt, Homo sapiens
  misc_RNA (1)...(19): siRNA sense strand
auauuuggcuggaugugua

SEQ ID NO: 2085581 - RNA, 19 nt, Homo sapiens
  misc_RNA (1)...(19): siRNA sense strand
gagaaauccagcucaacaa

SEQ ID NO: 2085582 - RNA, 19 nt, Homo sapiens
  misc_RNA (1)...(19): siRNA sense strand
agugaaaucccaaaugaaa

SEQ ID NO: 2085583 - RNA, 19 nt, Homo sapiens
  misc_RNA (1)...(19): siRNA sense strand
ccacaaaggacagaauaug

SEQ ID NO: 2085584 - RNA, 19 nt, Homo sapiens
  misc_RNA (1)...(19): siRNA sense strand
ucaacaagcuggugaaccu

SEQ ID NO: 2085585 - RNA, 19 nt, Homo sapiens
  misc_RNA (1)...(19): siRNA sense strand
aagcaaacuaccuguauaa

SEQ ID NO: 2085586 - RNA, 19 nt, Homo sapiens
  misc_RNA (1)...(19): siRNA sense strand
ggguaucauuagacucuuu

SEQ ID NO: 2085587 - RNA, 19 nt, Homo sapiens
  misc_RNA (1)...(19): siRNA sense strand
guauggcuguuucccaaga

SEQ ID NO: 2085588 - RNA, 19 nt, Homo sapiens
  misc_RNA (1)...(19): siRNA sense strand
gaggaagucagacccagaa

SEQ ID NO: 2085589 - RNA, 19 nt, Homo sapiens
  misc_RNA (1)...(19): siRNA sense strand
ugaaaucaucugugccuuu

SEQ ID NO: 2085590 - RNA, 19 nt, Homo sapiens
  misc_RNA (1)...(19): siRNA sense strand
ucaacaaaaugccaaauug

SEQ ID NO: 2085591 - RNA, 19 nt, Homo sapiens
  misc_RNA (1)...(19): siRNA sense strand
ggccaagcgugaaaucauc

SEQ ID NO: 2085592 - RNA, 19 nt, Homo sapiens
  misc_RNA (1)...(19): siRNA sense strand
ccucagccuuaucgaauga

SEQ ID NO: 2085593 - RNA, 19 nt, Homo sapiens
  misc_RNA (1)...(19): siRNA sense strand
agucaaagccaucaaugaa

SEQ ID NO: 2085594 - RNA, 19 nt, Homo sapiens
  misc_RNA (1)...(19): siRNA sense strand
caaagcauucacuuccuaa

SEQ ID NO: 2085595 - RNA, 19 nt, Homo sapiens
  misc_RNA (1)...(19): siRNA sense strand
ucccaagacuauguguuua

SEQ ID NO: 2085596 - RNA, 19 nt, Homo sapiens
  misc_RNA (1)...(19): siRNA sense strand
ggagaagaacccagagaag

SEQ ID NO: 2085597 - RNA, 19 nt, Homo sapiens
  misc_RNA (1)...(19): siRNA sense strand
gagcguuuccuccagaaga

SEQ ID NO: 2085598 - RNA, 19 nt, Homo sapiens
  misc_RNA (1)...(19): siRNA sense strand
aaagggacuuggauaacau

SEQ ID NO: 2085599 - RNA, 19 nt, Homo sapiens
  misc_RNA (1)...(19): siRNA sense strand
ccucaaagggacuuggaua

SEQ ID NO: 2085600 - RNA, 19 nt, Homo sapiens
  misc_RNA (1)...(19): siRNA sense strand
gcuggugaaccuucuguuu

SEQ ID NO: 2085601 - RNA, 19 nt, Homo sapiens
  misc_RNA (1)...(19): siRNA sense strand
ggaggaagagccacucagu

SEQ ID NO: 2085602 - RNA, 19 nt, Homo sapiens
  misc_RNA (1)...(19): siRNA sense strand
cuugggaaauuauugaaga

SEQ ID NO: 2085603 - RNA, 19 nt, Homo sapiens
  misc_RNA (1)...(19): siRNA sense strand
cugcagauccuuuagaaau

SEQ ID NO: 2085604 - RNA, 19 nt, Homo sapiens
  misc_RNA (1)...(19): siRNA sense strand
uguauaaauugcccaagga

SEQ ID NO: 2085605 - RNA, 19 nt, Homo sapiens
  misc_RNA (1)...(19): siRNA sense strand
ccaacucacuucaaaucca

SEQ ID NO: 2085606 - RNA, 19 nt, Homo sapiens
  misc_RNA (1)...(19): siRNA sense strand
ggaugcaaauguuaguuuu

SEQ ID NO: 2085607 - RNA, 19 nt, Homo sapiens
  misc_RNA (1)...(19): siRNA sense strand
cuuuagaaauggaugcaaa

SEQ ID NO: 2085608 - RNA, 19 nt, Homo sapiens
  misc_RNA (1)...(19): siRNA sense strand
acaauuucuuccuguauuc

SEQ ID NO: 2085609 - RNA, 19 nt, Homo sapiens
  misc_RNA (1)...(19): siRNA sense strand
gaagaucaaaccaccuaag

SEQ ID NO: 2085610 - RNA, 19 nt, Homo sapiens
  misc_RNA (1)...(19): siRNA sense strand
ggccagagccugaccaaga

SEQ ID NO: 2085611 - RNA, 19 nt, Homo sapiens
  misc_RNA (1)...(19): siRNA sense strand
gcccugaacuuuggcaaga

SEQ ID NO: 2085612 - RNA, 19 nt, Homo sapiens
  misc_RNA (1)...(19): siRNA sense strand
gccagagccugaccaagau

SEQ ID NO: 2085613 - RNA, 19 nt, Homo sapiens
  misc_RNA (1)...(19): siRNA sense strand
gccugggcaucuucuacua

SEQ ID NO: 2085614 - RNA, 19 nt, Homo sapiens
  misc_RNA (1)...(19): siRNA sense strand
gaacuuuggcaagaagauc

SEQ ID NO: 2085615 - RNA, 19 nt, Homo sapiens
  misc_RNA (1)...(19): siRNA sense strand
uggcugcccugaacuuugg

SEQ ID NO: 2085616 - RNA, 19 nt, Homo sapiens
  misc_RNA (1)...(19): siRNA sense strand
cuacaucggccaccuaucg

SEQ ID NO: 2085617 - RNA, 19 nt, Homo sapiens
  misc_RNA (1)...(19): siRNA sense strand
ccacccaucaugccagaga

SEQ ID NO: 2085618 - RNA, 19 nt, Homo sapiens
  misc_RNA (1)...(19): siRNA sense strand
cagagguggugcccaacuc

SEQ ID NO: 2085619 - RNA, 19 nt, Homo sapiens
  misc_RNA (1)...(19): siRNA sense strand
caacacaccagcauuauua

SEQ ID NO: 2085620 - RNA, 19 nt, Homo sapiens
  misc_RNA (1)...(19): siRNA sense strand
gaagagagccagccuguuu

SEQ ID NO: 2085621 - RNA, 19 nt, Homo sapiens
  misc_RNA (1)...(19): siRNA sense strand
gagaagcuauuccaaucua

SEQ ID NO: 2085622 - RNA, 19 nt, Homo sapiens
  misc_RNA (1)...(19): siRNA sense strand
gaagaauucucuagacaca

SEQ ID NO: 2085623 - RNA, 19 nt, Homo sapiens
  misc_RNA (1)...(19): siRNA sense strand
gaagugugcuguccugugu

SEQ ID NO: 2085624 - RNA, 19 nt, Homo sapiens
  misc_RNA (1)...(19): siRNA sense strand
gaaagaaagggauacugua

SEQ ID NO: 2085625 - RNA, 19 nt, Homo sapiens
  misc_RNA (1)...(19): siRNA sense strand
caagguaccugaucagagu

SEQ ID NO: 2085626 - RNA, 19 nt, Homo sapiens
  misc_RNA (1)...(19): siRNA sense strand
cuagacacauuccuccuua

SEQ ID NO: 2085627 - RNA, 19 nt, Homo sapiens
  misc_RNA (1)...(19): siRNA sense strand
agaaagggauacuguaaug

SEQ ID NO: 2085628 - RNA, 19 nt, Homo sapiens
  misc_RNA (1)...(19): siRNA sense strand
ccauuucgcuuucaacuuc

SEQ ID NO: 2085629 - RNA, 19 nt, Homo sapiens
  misc_RNA (1)...(19): siRNA sense strand
uccaaucuaugcagaaaua

SEQ ID NO: 2085630 - RNA, 19 nt, Homo sapiens
  misc_RNA (1)...(19): siRNA sense strand
gaauuuccauuucgcuuuc

SEQ ID NO: 2085631 - RNA, 19 nt, Homo sapiens
  misc_RNA (1)...(19): siRNA sense strand
ucacauuccuggugcuaaa

SEQ ID NO: 2085632 - RNA, 19 nt, Homo sapiens
  misc_RNA (1)...(19): siRNA sense strand
agaauucucuagacacauu

SEQ ID NO: 2085633 - RNA, 19 nt, Homo sapiens
  misc_RNA (1)...(19): siRNA sense strand
ggacuauuccuuagcugua

SEQ ID NO: 2085634 - RNA, 19 nt, Homo sapiens
  misc_RNA (1)...(19): siRNA sense strand
gcuuucaacuuccaucuga

SEQ ID NO: 2085635 - RNA, 19 nt, Homo sapiens
  misc_RNA (1)...(19): siRNA sense strand
cagaguggacuauuccuua

SEQ ID NO: 2085636 - RNA, 19 nt, Homo sapiens
  misc_RNA (1)...(19): siRNA sense strand
aaagaaagggauacuguaa

SEQ ID NO: 2085637 - RNA, 19 nt, Homo sapiens
  misc_RNA (1)...(19): siRNA sense strand
uuccuuagcuguauacauu

SEQ ID NO: 2085638 - RNA, 19 nt, Homo sapiens
  misc_RNA (1)...(19): siRNA sense strand
ucgguacaauuccauauaa

SEQ ID NO: 2085639 - RNA, 19 nt, Homo sapiens
  misc_RNA (1)...(19): siRNA sense strand
cugaagcaccaccaaauua

SEQ ID NO: 2085640 - RNA, 19 nt, Homo sapiens
  misc_RNA (1)...(19): siRNA sense strand
ugucaacacaccagcauua

SEQ ID NO: 2085641 - RNA, 19 nt, Homo sapiens
  misc_RNA (1)...(19): siRNA sense strand
ugggaaauauggaagcauu

SEQ ID NO: 2085642 - RNA, 19 nt, Homo sapiens
  misc_RNA (1)...(19): siRNA sense strand
gaggaagaauucucuagac

SEQ ID NO: 2085643 - RNA, 19 nt, Homo sapiens
  misc_RNA (1)...(19): siRNA sense strand
gggauacuguaauggagaa

SEQ ID NO: 2085644 - RNA, 19 nt, Homo sapiens
  misc_RNA (1)...(19): siRNA sense strand
caacuuccaucugaaccuu

SEQ ID NO: 2085645 - RNA, 19 nt, Homo sapiens
  misc_RNA (1)...(19): siRNA sense strand
gagguugacccacauccua

SEQ ID NO: 2085646 - RNA, 19 nt, Homo sapiens
  misc_RNA (1)...(19): siRNA sense strand
uccaaacgcagacauauuu

SEQ ID NO: 2085647 - RNA, 19 nt, Homo sapiens
  misc_RNA (1)...(19): siRNA sense strand
gacccaagguaccugauca

SEQ ID NO: 2085648 - RNA, 19 nt, Homo sapiens
  misc_RNA (1)...(19): siRNA sense strand
cagcagaaacuccagcauu

SEQ ID NO: 2085649 - RNA, 19 nt, Homo sapiens
  misc_RNA (1)...(19): siRNA sense strand
gaagcaccaccaaauuaug

SEQ ID NO: 2085650 - RNA, 19 nt, Homo sapiens
  misc_RNA (1)...(19): siRNA sense strand
ugaaagaaagggauacugu

SEQ ID NO: 2085651 - RNA, 19 nt, Homo sapiens
  misc_RNA (1)...(19): siRNA sense strand
agcagaaacuccagcauug

SEQ ID NO: 2085652 - RNA, 19 nt, Homo sapiens
  misc_RNA (1)...(19): siRNA sense strand
cuggauugcugcauuauca

SEQ ID NO: 2085653 - RNA, 19 nt, Homo sapiens
  misc_RNA (1)...(19): siRNA sense strand
gcagacauauuuggcuagu

SEQ ID NO: 2085654 - RNA, 19 nt, Homo sapiens
  misc_RNA (1)...(19): siRNA sense strand
ggaaauauggaagcauuca

SEQ ID NO: 2085655 - RNA, 19 nt, Homo sapiens
  misc_RNA (1)...(19): siRNA sense strand
gaagcuauuccaaucuaug

SEQ ID NO: 2085656 - RNA, 19 nt, Homo sapiens
  misc_RNA (1)...(19): siRNA sense strand
guauggauaugagcugguu

SEQ ID NO: 2085657 - RNA, 19 nt, Homo sapiens
  misc_RNA (1)...(19): siRNA sense strand
gcacagacacauggaaugg

SEQ ID NO: 2085658 - RNA, 19 nt, Homo sapiens
  misc_RNA (1)...(19): siRNA sense strand
ugaagcaccaccaaauuau

SEQ ID NO: 2085659 - RNA, 19 nt, Homo sapiens
  misc_RNA (1)...(19): siRNA sense strand
gguacaauuccauauaaug

SEQ ID NO: 2085660 - RNA, 19 nt, Homo sapiens
  misc_RNA (1)...(19): siRNA sense strand
acaaagaccauucgacaca

SEQ ID NO: 2085661 - RNA, 19 nt, Homo sapiens
  misc_RNA (1)...(19): siRNA sense strand
auacaagaauuccgguuuc

SEQ ID NO: 2085662 - RNA, 19 nt, Homo sapiens
  misc_RNA (1)...(19): siRNA sense strand
gagcacagacacauggaau

SEQ ID NO: 2085663 - RNA, 19 nt, Homo sapiens
  misc_RNA (1)...(19): siRNA sense strand
gagccugggucugguguuc

SEQ ID NO: 2085664 - RNA, 19 nt, Homo sapiens
  misc_RNA (1)...(19): siRNA sense strand
ugaauuuccauuucgcuuu

SEQ ID NO: 2085665 - RNA, 19 nt, Homo sapiens
  misc_RNA (1)...(19): siRNA sense strand
uauacaagaauuccgguuu

SEQ ID NO: 2085666 - RNA, 19 nt, Homo sapiens
  misc_RNA (1)...(19): siRNA sense strand
uuagugaucgguacaauuc

SEQ ID NO: 2085667 - RNA, 19 nt, Homo sapiens
  misc_RNA (1)...(19): siRNA sense strand
caaagaccauucgacacau

SEQ ID NO: 2085668 - RNA, 19 nt, Homo sapiens
  misc_RNA (1)...(19): siRNA sense strand
ucaugucgaugucaacaca

SEQ ID NO: 2085669 - RNA, 19 nt, Homo sapiens
  misc_RNA (1)...(19): siRNA sense strand
gacuauuccuuagcuguau

SEQ ID NO: 2085670 - RNA, 19 nt, Homo sapiens
  misc_RNA (1)...(19): siRNA sense strand
aaagaccauucgacacaug

SEQ ID NO: 2085671 - RNA, 19 nt, Homo sapiens
  misc_RNA (1)...(19): siRNA sense strand
aaagggauacuguaaugga

SEQ ID NO: 2085672 - RNA, 19 nt, Homo sapiens
  misc_RNA (1)...(19): siRNA sense strand
gaugcucgaacugccauua

SEQ ID NO: 2085673 - RNA, 19 nt, Homo sapiens
  misc_RNA (1)...(19): siRNA sense strand
gugaaggcaucauuuuauu

SEQ ID NO: 2085674 - RNA, 19 nt, Homo sapiens
  misc_RNA (1)...(19): siRNA sense strand
aaauuaugcagauguggua

SEQ ID NO: 2085675 - RNA, 19 nt, Homo sapiens
  misc_RNA (1)...(19): siRNA sense strand
gaagcauucaguacugugu

SEQ ID NO: 2085676 - RNA, 19 nt, Homo sapiens
  misc_RNA (1)...(19): siRNA sense strand
aggaagaauucucuagaca

SEQ ID NO: 2085677 - RNA, 19 nt, Homo sapiens
  misc_RNA (1)...(19): siRNA sense strand
ucaacacaccagcauuauu

SEQ ID NO: 2085678 - RNA, 19 nt, Homo sapiens
  misc_RNA (1)...(19): siRNA sense strand
ggagaagcuauuccaaucu

SEQ ID NO: 2085679 - RNA, 19 nt, Homo sapiens
  misc_RNA (1)...(19): siRNA sense strand
gaucgguacaauuccauau

SEQ ID NO: 2085680 - RNA, 19 nt, Homo sapiens
  misc_RNA (1)...(19): siRNA sense strand
agugugcuguccuguguuu

SEQ ID NO: 2085681 - RNA, 19 nt, Homo sapiens
  misc_RNA (1)...(19): siRNA sense strand
caagaauuccgguuucaac

SEQ ID NO: 2085682 - RNA, 19 nt, Homo sapiens
  misc_RNA (1)...(19): siRNA sense strand
guaccugaucagaguguaa

SEQ ID NO: 2085683 - RNA, 19 nt, Homo sapiens
  misc_RNA (1)...(19): siRNA sense strand
agaguggacuauuccuuag

SEQ ID NO: 2085684 - RNA, 19 nt, Homo sapiens
  misc_RNA (1)...(19): siRNA sense strand
gugccaaaauugaaagaaa

SEQ ID NO: 2085685 - RNA, 19 nt, Homo sapiens
  misc_RNA (1)...(19): siRNA sense strand
uacaagaauuccgguuuca

SEQ ID NO: 2085686 - RNA, 19 nt, Homo sapiens
  misc_RNA (1)...(19): siRNA sense strand
guguuugccuguauacaag

SEQ ID NO: 2085687 - RNA, 19 nt, Homo sapiens
  misc_RNA (1)...(19): siRNA sense strand
ggauugcugcauuaucaga

SEQ ID NO: 2085688 - RNA, 19 nt, Homo sapiens
  misc_RNA (1)...(19): siRNA sense strand
gaaagggauacuguaaugg

SEQ ID NO: 2085689 - RNA, 19 nt, Homo sapiens
  misc_RNA (1)...(19): siRNA sense strand
cgcaagggcugcuauucca

SEQ ID NO: 2085690 - RNA, 19 nt, Homo sapiens
  misc_RNA (1)...(19): siRNA sense strand
cgggaacuccagguuguua

SEQ ID NO: 2085691 - RNA, 19 nt, Homo sapiens
  misc_RNA (1)...(19): siRNA sense strand
cagccuguuuccuucauuc

SEQ ID NO: 2085692 - RNA, 19 nt, Homo sapiens
  misc_RNA (1)...(19): siRNA sense strand
uaacugugagggagaagug

SEQ ID NO: 2085693 - RNA, 19 nt, Homo sapiens
  misc_RNA (1)...(19): siRNA sense strand
cagcauugccagccaguuc

SEQ ID NO: 2085694 - RNA, 19 nt, Homo sapiens
  misc_RNA (1)...(19): siRNA sense strand
gagcgcaagggcugcuauu

SEQ ID NO: 2085695 - RNA, 19 nt, Homo sapiens
  misc_RNA (1)...(19): siRNA sense strand
aauauggaagcauucagua

SEQ ID NO: 2085696 - RNA, 19 nt, Homo sapiens
  misc_RNA (1)...(19): siRNA sense strand
ccaccaaauuaugcagaug

SEQ ID NO: 2085697 - RNA, 19 nt, Homo sapiens
  misc_RNA (1)...(19): siRNA sense strand
ccaguucaguauggauaug

SEQ ID NO: 2085698 - RNA, 19 nt, Homo sapiens
  misc_RNA (1)...(19): siRNA sense strand
aauuguuccucucgucuga

SEQ ID NO: 2085699 - RNA, 19 nt, Homo sapiens
  misc_RNA (1)...(19): siRNA sense strand
acuauuccuuagcuguaua

SEQ ID NO: 2085700 - RNA, 19 nt, Homo sapiens
  misc_RNA (1)...(19): siRNA sense strand
agaagcuauuccaaucuau

SEQ ID NO: 2085701 - RNA, 19 nt, Homo sapiens
  misc_RNA (1)...(19): siRNA sense strand
gccagccaguucaguaugg

SEQ ID NO: 2085702 - RNA, 19 nt, Homo sapiens
  misc_RNA (1)...(19): siRNA sense strand
gcucgaacugccauuagug

SEQ ID NO: 2085703 - RNA, 19 nt, Homo sapiens
  misc_RNA (1)...(19): siRNA sense strand
ggaacuccagguuguuagu

SEQ ID NO: 2085704 - RNA, 19 nt, Homo sapiens
  misc_RNA (1)...(19): siRNA sense strand
guccuguguuugccuguau

SEQ ID NO: 2085705 - RNA, 19 nt, Homo sapiens
  misc_RNA (1)...(19): siRNA sense strand
cgguacaauuccauauaau

SEQ ID NO: 2085706 - RNA, 19 nt, Homo sapiens
  misc_RNA (1)...(19): siRNA sense strand
ggagcacagacacauggaa

SEQ ID NO: 2085707 - RNA, 19 nt, Homo sapiens
  misc_RNA (1)...(19): siRNA sense strand
guuccaaaggcugcuauuu

SEQ ID NO: 2085708 - RNA, 19 nt, Homo sapiens
  misc_RNA (1)...(19): siRNA sense strand
ggugaaggcaucauuuuau

SEQ ID NO: 2085709 - RNA, 19 nt, Homo sapiens
  misc_RNA (1)...(19): siRNA sense strand
uuagucaugucgaugucaa

SEQ ID NO: 2085710 - RNA, 19 nt, Homo sapiens
  misc_RNA (1)...(19): siRNA sense strand
uuaucagaguggacuauuc

SEQ ID NO: 2085711 - RNA, 19 nt, Homo sapiens
  misc_RNA (1)...(19): siRNA sense strand
ccagccuguuuccuucauu

SEQ ID NO: 2085712 - RNA, 19 nt, Homo sapiens
  misc_RNA (1)...(19): siRNA sense strand
gaaggcaucauuuuauuac

SEQ ID NO: 2085713 - RNA, 19 nt, Homo sapiens
  misc_RNA (1)...(19): siRNA sense strand
cgaacugccauuagugauc

SEQ ID NO: 2085714 - RNA, 19 nt, Homo sapiens
  misc_RNA (1)...(19): siRNA sense strand
gcuguauacauucacauuc

SEQ ID NO: 2085715 - RNA, 19 nt, Homo sapiens
  misc_RNA (1)...(19): siRNA sense strand
ccuuagcuguauacauuca

SEQ ID NO: 2085716 - RNA, 19 nt, Homo sapiens
  misc_RNA (1)...(19): siRNA sense strand
ggaaaccacaucgcuucug

SEQ ID NO: 2085717 - RNA, 19 nt, Homo sapiens
  misc_RNA (1)...(19): siRNA sense strand
aaauauggaagcauucagu

SEQ ID NO: 2085718 - RNA, 19 nt, Homo sapiens
  misc_RNA (1)...(19): siRNA sense strand
cauuagugaucgguacaau

SEQ ID NO: 2085719 - RNA, 19 nt, Homo sapiens
  misc_RNA (1)...(19): siRNA sense strand
caacacaccagcauuauua

SEQ ID NO: 2085720 - RNA, 19 nt, Homo sapiens
  misc_RNA (1)...(19): siRNA sense strand
gaagagagccagccuguuu

SEQ ID NO: 2085721 - RNA, 19 nt, Homo sapiens
  misc_RNA (1)...(19): siRNA sense strand
gagaagcuauuccaaucua

SEQ ID NO: 2085722 - RNA, 19 nt, Homo sapiens
  misc_RNA (1)...(19): siRNA sense strand
gaagaauucucuagacaca

SEQ ID NO: 2085723 - RNA, 19 nt, Homo sapiens
  misc_RNA (1)...(19): siRNA sense strand
gaagugugcuguccugugu

SEQ ID NO: 2085724 - RNA, 19 nt, Homo sapiens
  misc_RNA (1)...(19): siRNA sense strand
gaaagaaagggauacugua

SEQ ID NO: 2085725 - RNA, 19 nt, Homo sapiens
  misc_RNA (1)...(19): siRNA sense strand
caagguaccugaucagagu

SEQ ID NO: 2085726 - RNA, 19 nt, Homo sapiens
  misc_RNA (1)...(19): siRNA sense strand
cuagacacauuccuccuua

SEQ ID NO: 2085727 - RNA, 19 nt, Homo sapiens
  misc_RNA (1)...(19): siRNA sense strand
agaaagggauacuguaaug

SEQ ID NO: 2085728 - RNA, 19 nt, Homo sapiens
  misc_RNA (1)...(19): siRNA sense strand
ccauuucgcuuucaacuuc

SEQ ID NO: 2085729 - RNA, 19 nt, Homo sapiens
  misc_RNA (1)...(19): siRNA sense strand
uccaaucuaugcagaaaua

SEQ ID NO: 2085730 - RNA, 19 nt, Homo sapiens
  misc_RNA (1)...(19): siRNA sense strand
gaauuuccauuucgcuuuc

SEQ ID NO: 2085731 - RNA, 19 nt, Homo sapiens
  misc_RNA (1)...(19): siRNA sense strand
ucacauuccuggugcuaaa

SEQ ID NO: 2085732 - RNA, 19 nt, Homo sapiens
  misc_RNA (1)...(19): siRNA sense strand
agaauucucuagacacauu

SEQ ID NO: 2085733 - RNA, 19 nt, Homo sapiens
  misc_RNA (1)...(19): siRNA sense strand
ggacuauuccuuagcugua

SEQ ID NO: 2085734 - RNA, 19 nt, Homo sapiens
  misc_RNA (1)...(19): siRNA sense strand
gcuuucaacuuccaucuga

SEQ ID NO: 2085735 - RNA, 19 nt, Homo sapiens
  misc_RNA (1)...(19): siRNA sense strand
cagaguggacuauuccuua

SEQ ID NO: 2085736 - RNA, 19 nt, Homo sapiens
  misc_RNA (1)...(19): siRNA sense strand
aaagaaagggauacuguaa

SEQ ID NO: 2085737 - RNA, 19 nt, Homo sapiens
  misc_RNA (1)...(19): siRNA sense strand
uuccuuagcuguauacauu

SEQ ID NO: 2085738 - RNA, 19 nt, Homo sapiens
  misc_RNA (1)...(19): siRNA sense strand
ucgguacaauuccauauaa

SEQ ID NO: 2085739 - RNA, 19 nt, Homo sapiens
  misc_RNA (1)...(19): siRNA sense strand
cugaagcaccaccaaauua

SEQ ID NO: 2085740 - RNA, 19 nt, Homo sapiens
  misc_RNA (1)...(19): siRNA sense strand
ugucaacacaccagcauua

SEQ ID NO: 2085741 - RNA, 19 nt, Homo sapiens
  misc_RNA (1)...(19): siRNA sense strand
ugggaaauauggaagcauu

SEQ ID NO: 2085742 - RNA, 19 nt, Homo sapiens
  misc_RNA (1)...(19): siRNA sense strand
gaggaagaauucucuagac

SEQ ID NO: 2085743 - RNA, 19 nt, Homo sapiens
  misc_RNA (1)...(19): siRNA sense strand
gggauacuguaauggagaa

SEQ ID NO: 2085744 - RNA, 19 nt, Homo sapiens
  misc_RNA (1)...(19): siRNA sense strand
caacuuccaucugaaccuu

SEQ ID NO: 2085745 - RNA, 19 nt, Homo sapiens
  misc_RNA (1)...(19): siRNA sense strand
gagguugacccacauccua

SEQ ID NO: 2085746 - RNA, 19 nt, Homo sapiens
  misc_RNA (1)...(19): siRNA sense strand
uccaaacgcagacauauuu

SEQ ID NO: 2085747 - RNA, 19 nt, Homo sapiens
  misc_RNA (1)...(19): siRNA sense strand
gacccaagguaccugauca

SEQ ID NO: 2085748 - RNA, 19 nt, Homo sapiens
  misc_RNA (1)...(19): siRNA sense strand
cagcagaaacuccagcauu

SEQ ID NO: 2085749 - RNA, 19 nt, Homo sapiens
  misc_RNA (1)...(19): siRNA sense strand
gaagcaccaccaaauuaug

SEQ ID NO: 2085750 - RNA, 19 nt, Homo sapiens
  misc_RNA (1)...(19): siRNA sense strand
ugaaagaaagggauacugu

SEQ ID NO: 2085751 - RNA, 19 nt, Homo sapiens
  misc_RNA (1)...(19): siRNA sense strand
agcagaaacuccagcauug

SEQ ID NO: 2085752 - RNA, 19 nt, Homo sapiens
  misc_RNA (1)...(19): siRNA sense strand
cuggauugcugcauuauca

SEQ ID NO: 2085753 - RNA, 19 nt, Homo sapiens
  misc_RNA (1)...(19): siRNA sense strand
gcagacauauuuggcuagu

SEQ ID NO: 2085754 - RNA, 19 nt, Homo sapiens
  misc_RNA (1)...(19): siRNA sense strand
ggaaauauggaagcauuca

SEQ ID NO: 2085755 - RNA, 19 nt, Homo sapiens
  misc_RNA (1)...(19): siRNA sense strand
gaagcuauuccaaucuaug

SEQ ID NO: 2085756 - RNA, 19 nt, Homo sapiens
  misc_RNA (1)...(19): siRNA sense strand
guauggauaugagcugguu

SEQ ID NO: 2085757 - RNA, 19 nt, Homo sapiens
  misc_RNA (1)...(19): siRNA sense strand
gcacagacacauggaaugg

SEQ ID NO: 2085758 - RNA, 19 nt, Homo sapiens
  misc_RNA (1)...(19): siRNA sense strand
ugaagcaccaccaaauuau

SEQ ID NO: 2085759 - RNA, 19 nt, Homo sapiens
  misc_RNA (1)...(19): siRNA sense strand
gguacaauuccauauaaug

SEQ ID NO: 2085760 - RNA, 19 nt, Homo sapiens
  misc_RNA (1)...(19): siRNA sense strand
acaaagaccauucgacaca

SEQ ID NO: 2085761 - RNA, 19 nt, Homo sapiens
  misc_RNA (1)...(19): siRNA sense strand
auacaagaauuccgguuuc

SEQ ID NO: 2085762 - RNA, 19 nt, Homo sapiens
  misc_RNA (1)...(19): siRNA sense strand
gagcacagacacauggaau

SEQ ID NO: 2085763 - RNA, 19 nt, Homo sapiens
  misc_RNA (1)...(19): siRNA sense strand
gagccugggucugguguuc

SEQ ID NO: 2085764 - RNA, 19 nt, Homo sapiens
  misc_RNA (1)...(19): siRNA sense strand
caaagaccauucgacacau

SEQ ID NO: 2085765 - RNA, 19 nt, Homo sapiens
  misc_RNA (1)...(19): siRNA sense strand
uauacaagaauuccgguuu

SEQ ID NO: 2085766 - RNA, 19 nt, Homo sapiens
  misc_RNA (1)...(19): siRNA sense strand
ugaauuuccauuucgcuuu

SEQ ID NO: 2085767 - RNA, 19 nt, Homo sapiens
  misc_RNA (1)...(19): siRNA sense strand
uuagugaucgguacaauuc

SEQ ID NO: 2085768 - RNA, 19 nt, Homo sapiens
  misc_RNA (1)...(19): siRNA sense strand
ucaugucgaugucaacaca

SEQ ID NO: 2085769 - RNA, 19 nt, Homo sapiens
  misc_RNA (1)...(19): siRNA sense strand
gacuauuccuuagcuguau

SEQ ID NO: 2085770 - RNA, 19 nt, Homo sapiens
  misc_RNA (1)...(19): siRNA sense strand
aaagaccauucgacacaug

SEQ ID NO: 2085771 - RNA, 19 nt, Homo sapiens
  misc_RNA (1)...(19): siRNA sense strand
aaagggauacuguaaugga

SEQ ID NO: 2085772 - RNA, 19 nt, Homo sapiens
  misc_RNA (1)...(19): siRNA sense strand
gaugcucgaacugccauua

SEQ ID NO: 2085773 - RNA, 19 nt, Homo sapiens
  misc_RNA (1)...(19): siRNA sense strand
gugaaggcaucauuuuauu

SEQ ID NO: 2085774 - RNA, 19 nt, Homo sapiens
  misc_RNA (1)...(19): siRNA sense strand
aaauuaugcagauguggua

SEQ ID NO: 2085775 - RNA, 19 nt, Homo sapiens
  misc_RNA (1)...(19): siRNA sense strand
gaagcauucaguacugugu

SEQ ID NO: 2085776 - RNA, 19 nt, Homo sapiens
  misc_RNA (1)...(19): siRNA sense strand
aggaagaauucucuagaca

SEQ ID NO: 2085777 - RNA, 19 nt, Homo sapiens
  misc_RNA (1)...(19): siRNA sense strand
ucaacacaccagcauuauu

SEQ ID NO: 2085778 - RNA, 19 nt, Homo sapiens
  misc_RNA (1)...(19): siRNA sense strand
ggagaagcuauuccaaucu

SEQ ID NO: 2085779 - RNA, 19 nt, Homo sapiens
  misc_RNA (1)...(19): siRNA sense strand
gaucgguacaauuccauau

SEQ ID NO: 2085780 - RNA, 19 nt, Homo sapiens
  misc_RNA (1)...(19): siRNA sense strand
agugugcuguccuguguuu

SEQ ID NO: 2085781 - RNA, 19 nt, Homo sapiens
  misc_RNA (1)...(19): siRNA sense strand
caagaauuccgguuucaac

SEQ ID NO: 2085782 - RNA, 19 nt, Homo sapiens
  misc_RNA (1)...(19): siRNA sense strand
guaccugaucagaguguaa

SEQ ID NO: 2085783 - RNA, 19 nt, Homo sapiens
  misc_RNA (1)...(19): siRNA sense strand
agaguggacuauuccuuag

SEQ ID NO: 2085784 - RNA, 19 nt, Homo sapiens
  misc_RNA (1)...(19): siRNA sense strand
gugccaaaauugaaagaaa

SEQ ID NO: 2085785 - RNA, 19 nt, Homo sapiens
  misc_RNA (1)...(19): siRNA sense strand
uacaagaauuccgguuuca

SEQ ID NO: 2085786 - RNA, 19 nt, Homo sapiens
  misc_RNA (1)...(19): siRNA sense strand
guguuugccuguauacaag

SEQ ID NO: 2085787 - RNA, 19 nt, Homo sapiens
  misc_RNA (1)...(19): siRNA sense strand
cgcaagggcugcuauucca

SEQ ID NO: 2085788 - RNA, 19 nt, Homo sapiens
  misc_RNA (1)...(19): siRNA sense strand
ggauugcugcauuaucaga

SEQ ID NO: 2085789 - RNA, 19 nt, Homo sapiens
  misc_RNA (1)...(19): siRNA sense strand
gaaagggauacuguaaugg

SEQ ID NO: 2085790 - RNA, 19 nt, Homo sapiens
  misc_RNA (1)...(19): siRNA sense strand
cgggaacuccagguuguua

SEQ ID NO: 2085791 - RNA, 19 nt, Homo sapiens
  misc_RNA (1)...(19): siRNA sense strand
cagccuguuuccuucauuc

SEQ ID NO: 2085792 - RNA, 19 nt, Homo sapiens
  misc_RNA (1)...(19): siRNA sense strand
uaacugugagggagaagug

SEQ ID NO: 2085793 - RNA, 19 nt, Homo sapiens
  misc_RNA (1)...(19): siRNA sense strand
cagcauugccagccaguuc

SEQ ID NO: 2085794 - RNA, 19 nt, Homo sapiens
  misc_RNA (1)...(19): siRNA sense strand
gagcgcaagggcugcuauu

SEQ ID NO: 2085795 - RNA, 19 nt, Homo sapiens
  misc_RNA (1)...(19): siRNA sense strand
aauauggaagcauucagua

SEQ ID NO: 2085796 - RNA, 19 nt, Homo sapiens
  misc_RNA (1)...(19): siRNA sense strand
ccaccaaauuaugcagaug

SEQ ID NO: 2085797 - RNA, 19 nt, Homo sapiens
  misc_RNA (1)...(19): siRNA sense strand
ccaguucaguauggauaug

SEQ ID NO: 2085798 - RNA, 19 nt, Homo sapiens
  misc_RNA (1)...(19): siRNA sense strand
aauuguuccucucgucuga

SEQ ID NO: 2085799 - RNA, 19 nt, Homo sapiens
  misc_RNA (1)...(19): siRNA sense strand
acuauuccuuagcuguaua

SEQ ID NO: 2085800 - RNA, 19 nt, Homo sapiens
  misc_RNA (1)...(19): siRNA sense strand
agaagcuauuccaaucuau

SEQ ID NO: 2085801 - RNA, 19 nt, Homo sapiens
  misc_RNA (1)...(19): siRNA sense strand
gccagccaguucaguaugg

SEQ ID NO: 2085802 - RNA, 19 nt, Homo sapiens
  misc_RNA (1)...(19): siRNA sense strand
gcucgaacugccauuagug

SEQ ID NO: 2085803 - RNA, 19 nt, Homo sapiens
  misc_RNA (1)...(19): siRNA sense strand
ggaacuccagguuguuagu

SEQ ID NO: 2085804 - RNA, 19 nt, Homo sapiens
  misc_RNA (1)...(19): siRNA sense strand
guccuguguuugccuguau

SEQ ID NO: 2085805 - RNA, 19 nt, Homo sapiens
  misc_RNA (1)...(19): siRNA sense strand
ggugaaggcaucauuuuau

SEQ ID NO: 2085806 - RNA, 19 nt, Homo sapiens
  misc_RNA (1)...(19): siRNA sense strand
cgguacaauuccauauaau

SEQ ID NO: 2085807 - RNA, 19 nt, Homo sapiens
  misc_RNA (1)...(19): siRNA sense strand
ggagcacagacacauggaa

SEQ ID NO: 2085808 - RNA, 19 nt, Homo sapiens
  misc_RNA (1)...(19): siRNA sense strand
guuccaaaggcugcuauuu

SEQ ID NO: 2085809 - RNA, 19 nt, Homo sapiens
  misc_RNA (1)...(19): siRNA sense strand
uuagucaugucgaugucaa

SEQ ID NO: 2085810 - RNA, 19 nt, Homo sapiens
  misc_RNA (1)...(19): siRNA sense strand
uuaucagaguggacuauuc

SEQ ID NO: 2085811 - RNA, 19 nt, Homo sapiens
  misc_RNA (1)...(19): siRNA sense strand
ccagccuguuuccuucauu

SEQ ID NO: 2085812 - RNA, 19 nt, Homo sapiens
  misc_RNA (1)...(19): siRNA sense strand
gaaggcaucauuuuauuac

SEQ ID NO: 2085813 - RNA, 19 nt, Homo sapiens
  misc_RNA (1)...(19): siRNA sense strand
cgaacugccauuagugauc

SEQ ID NO: 2085814 - RNA, 19 nt, Homo sapiens
  misc_RNA (1)...(19): siRNA sense strand
gcuguauacauucacauuc

SEQ ID NO: 2085815 - RNA, 19 nt, Homo sapiens
  misc_RNA (1)...(19): siRNA sense strand
ccuuagcuguauacauuca

SEQ ID NO: 2085816 - RNA, 19 nt, Homo sapiens
  misc_RNA (1)...(19): siRNA sense strand
ggaaaccacaucgcuucug

SEQ ID NO: 2085817 - RNA, 19 nt, Homo sapiens
  misc_RNA (1)...(19): siRNA sense strand
cauuagugaucgguacaau

SEQ ID NO: 2085818 - RNA, 19 nt, Homo sapiens
  misc_RNA (1)...(19): siRNA sense strand
aaauauggaagcauucagu

SEQ ID NO: 2085819 - RNA, 19 nt, Homo sapiens
  misc_RNA (1)...(19): siRNA sense strand
gaacuucgcuucauucaau

SEQ ID NO: 2085820 - RNA, 19 nt, Homo sapiens
  misc_RNA (1)...(19): siRNA sense strand
ucaaggagcugaacaauga

SEQ ID NO: 2085821 - RNA, 19 nt, Homo sapiens
  misc_RNA (1)...(19): siRNA sense strand
gcauaagucuccugaauga

SEQ ID NO: 2085822 - RNA, 19 nt, Homo sapiens
  misc_RNA (1)...(19): siRNA sense strand
uaaaggagcugcaggagaa

SEQ ID NO: 2085823 - RNA, 19 nt, Homo sapiens
  misc_RNA (1)...(19): siRNA sense strand
gaagaaacucgacaaagua

SEQ ID NO: 2085824 - RNA, 19 nt, Homo sapiens
  misc_RNA (1)...(19): siRNA sense strand
ugagugagcuggugaagaa

SEQ ID NO: 2085825 - RNA, 19 nt, Homo sapiens
  misc_RNA (1)...(19): siRNA sense strand
gaggacaucuggacaguga

SEQ ID NO: 2085826 - RNA, 19 nt, Homo sapiens
  misc_RNA (1)...(19): siRNA sense strand
ggaaggaacuagagagagu

SEQ ID NO: 2085827 - RNA, 19 nt, Homo sapiens
  misc_RNA (1)...(19): siRNA sense strand
gggaggagaugaagaugaa

SEQ ID NO: 2085828 - RNA, 19 nt, Homo sapiens
  misc_RNA (1)...(19): siRNA sense strand
gagaggagcuuguccaaac

SEQ ID NO: 2085829 - RNA, 19 nt, Homo sapiens
  misc_RNA (1)...(19): siRNA sense strand
ugaauaugcugaacaucua

SEQ ID NO: 2085830 - RNA, 19 nt, Homo sapiens
  misc_RNA (1)...(19): siRNA sense strand
gaacauacagaaagggaaa

SEQ ID NO: 2085831 - RNA, 19 nt, Homo sapiens
  misc_RNA (1)...(19): siRNA sense strand
gcgcauaagucuccugaau

SEQ ID NO: 2085832 - RNA, 19 nt, Homo sapiens
  misc_RNA (1)...(19): siRNA sense strand
gaaggagucacuuaaagaa

SEQ ID NO: 2085833 - RNA, 19 nt, Homo sapiens
  misc_RNA (1)...(19): siRNA sense strand
agaagaaacucgacaaagu

SEQ ID NO: 2085834 - RNA, 19 nt, Homo sapiens
  misc_RNA (1)...(19): siRNA sense strand
cagaugguauugcggcuua

SEQ ID NO: 2085835 - RNA, 19 nt, Homo sapiens
  misc_RNA (1)...(19): siRNA sense strand
gaaagcaaacaacgagaaa

SEQ ID NO: 2085836 - RNA, 19 nt, Homo sapiens
  misc_RNA (1)...(19): siRNA sense strand
ccacucaccuggagauuca

SEQ ID NO: 2085837 - RNA, 19 nt, Homo sapiens
  misc_RNA (1)...(19): siRNA sense strand
gagguuugcucguugaaga

SEQ ID NO: 2085838 - RNA, 19 nt, Homo sapiens
  misc_RNA (1)...(19): siRNA sense strand
gaagaacaccaucaaaucu

SEQ ID NO: 2085839 - RNA, 19 nt, Homo sapiens
  misc_RNA (1)...(19): siRNA sense strand
gaaacguucucucagauac

SEQ ID NO: 2085840 - RNA, 19 nt, Homo sapiens
  misc_RNA (1)...(19): siRNA sense strand
ucagauacuuugaagaaga

SEQ ID NO: 2085841 - RNA, 19 nt, Homo sapiens
  misc_RNA (1)...(19): siRNA sense strand
gaaacucgacaaaguaaau

SEQ ID NO: 2085842 - RNA, 19 nt, Homo sapiens
  misc_RNA (1)...(19): siRNA sense strand
ggaguacaaucagcgcaua

SEQ ID NO: 2085843 - RNA, 19 nt, Homo sapiens
  misc_RNA (1)...(19): siRNA sense strand
ggaugaauaugcugaacau

SEQ ID NO: 2085844 - RNA, 19 nt, Homo sapiens
  misc_RNA (1)...(19): siRNA sense strand
ggagagcccuacaucaucu

SEQ ID NO: 2085845 - RNA, 19 nt, Homo sapiens
  misc_RNA (1)...(19): siRNA sense strand
cagaaagggaaacuaaaua

SEQ ID NO: 2085846 - RNA, 19 nt, Homo sapiens
  misc_RNA (1)...(19): siRNA sense strand
gcaaacaacgagaaacaga

SEQ ID NO: 2085847 - RNA, 19 nt, Homo sapiens
  misc_RNA (1)...(19): siRNA sense strand
uuaaagaaguccagcuaga

SEQ ID NO: 2085848 - RNA, 19 nt, Homo sapiens
  misc_RNA (1)...(19): siRNA sense strand
acaagaacuucgcuucauu

SEQ ID NO: 2085849 - RNA, 19 nt, Homo sapiens
  misc_RNA (1)...(19): siRNA sense strand
ggagaagaagcaugauaaa

SEQ ID NO: 2085850 - RNA, 19 nt, Homo sapiens
  misc_RNA (1)...(19): siRNA sense strand
agaacaccaucaaaucuuu

SEQ ID NO: 2085851 - RNA, 19 nt, Homo sapiens
  misc_RNA (1)...(19): siRNA sense strand
aaagggagcuagagguuca

SEQ ID NO: 2085852 - RNA, 19 nt, Homo sapiens
  misc_RNA (1)...(19): siRNA sense strand
ggagagcccgugccaagaa

SEQ ID NO: 2085853 - RNA, 19 nt, Homo sapiens
  misc_RNA (1)...(19): siRNA sense strand
gcagaagaaacucgacaaa

SEQ ID NO: 2085854 - RNA, 19 nt, Homo sapiens
  misc_RNA (1)...(19): siRNA sense strand
gagcuuguccaaacucaaa

SEQ ID NO: 2085855 - RNA, 19 nt, Homo sapiens
  misc_RNA (1)...(19): siRNA sense strand
ccacaacccugcugaugag

SEQ ID NO: 2085856 - RNA, 19 nt, Homo sapiens
  misc_RNA (1)...(19): siRNA sense strand
gaacaagagcguacuacag

SEQ ID NO: 2085857 - RNA, 19 nt, Homo sapiens
  misc_RNA (1)...(19): siRNA sense strand
aagcgcagcugacacaguu

SEQ ID NO: 2085858 - RNA, 19 nt, Homo sapiens
  misc_RNA (1)...(19): siRNA sense strand
gagauugaacauacagaaa

SEQ ID NO: 2085859 - RNA, 19 nt, Homo sapiens
  misc_RNA (1)...(19): siRNA sense strand
aaacaacgagaaacagaaa

SEQ ID NO: 2085860 - RNA, 19 nt, Homo sapiens
  misc_RNA (1)...(19): siRNA sense strand
caacugcugugugccauuc

SEQ ID NO: 2085861 - RNA, 19 nt, Homo sapiens
  misc_RNA (1)...(19): siRNA sense strand
ggagaaggcagaccugagu

SEQ ID NO: 2085862 - RNA, 19 nt, Homo sapiens
  misc_RNA (1)...(19): siRNA sense strand
gagaagaagcaugauaaau

SEQ ID NO: 2085863 - RNA, 19 nt, Homo sapiens
  misc_RNA (1)...(19): siRNA sense strand
cacgaaacguucucucaga

SEQ ID NO: 2085864 - RNA, 19 nt, Homo sapiens
  misc_RNA (1)...(19): siRNA sense strand
auacagaaagggaaacuaa

SEQ ID NO: 2085865 - RNA, 19 nt, Homo sapiens
  misc_RNA (1)...(19): siRNA sense strand
agacaagcauggugaucuu

SEQ ID NO: 2085866 - RNA, 19 nt, Homo sapiens
  misc_RNA (1)...(19): siRNA sense strand
gcaccucggcccauuccua

SEQ ID NO: 2085867 - RNA, 19 nt, Homo sapiens
  misc_RNA (1)...(19): siRNA sense strand
gaauaugcugaacaucuaa

SEQ ID NO: 2085868 - RNA, 19 nt, Homo sapiens
  misc_RNA (1)...(19): siRNA sense strand
ucucagauacuuugaagaa

SEQ ID NO: 2085869 - RNA, 19 nt, Homo sapiens
  misc_RNA (1)...(19): siRNA sense strand
cgaaacguucucucagaua

SEQ ID NO: 2085870 - RNA, 19 nt, Homo sapiens
  misc_RNA (1)...(19): siRNA sense strand
ugaagaacaccaucaaauc

SEQ ID NO: 2085871 - RNA, 19 nt, Homo sapiens
  misc_RNA (1)...(19): siRNA sense strand
gcagcuaacggcccaguug

SEQ ID NO: 2085872 - RNA, 19 nt, Homo sapiens
  misc_RNA (1)...(19): siRNA sense strand
agaaggagaagaagcauga

SEQ ID NO: 2085873 - RNA, 19 nt, Homo sapiens
  misc_RNA (1)...(19): siRNA sense strand
ggagcuagagguucaaauc

SEQ ID NO: 2085874 - RNA, 19 nt, Homo sapiens
  misc_RNA (1)...(19): siRNA sense strand
caaacaacgagaaacagaa

SEQ ID NO: 2085875 - RNA, 19 nt, Homo sapiens
  misc_RNA (1)...(19): siRNA sense strand
cagcagaaacagcagcuaa

SEQ ID NO: 2085876 - RNA, 19 nt, Homo sapiens
  misc_RNA (1)...(19): siRNA sense strand
ggagauucagcaacaggua

SEQ ID NO: 2085877 - RNA, 19 nt, Homo sapiens
  misc_RNA (1)...(19): siRNA sense strand
caagagcguacuacaguug

SEQ ID NO: 2085878 - RNA, 19 nt, Homo sapiens
  misc_RNA (1)...(19): siRNA sense strand
gaggaaggaacuagagaga

SEQ ID NO: 2085879 - RNA, 19 nt, Homo sapiens
  misc_RNA (1)...(19): siRNA sense strand
ugaaggagucacuuaaaga

SEQ ID NO: 2085880 - RNA, 19 nt, Homo sapiens
  misc_RNA (1)...(19): siRNA sense strand
guacggaguggaaguuaga

SEQ ID NO: 2085881 - RNA, 19 nt, Homo sapiens
  misc_RNA (1)...(19): siRNA sense strand
cgaaagggagcuagagguu

SEQ ID NO: 2085882 - RNA, 19 nt, Homo sapiens
  misc_RNA (1)...(19): siRNA sense strand
caagcauggugaucuuugu

SEQ ID NO: 2085883 - RNA, 19 nt, Homo sapiens
  misc_RNA (1)...(19): siRNA sense strand
gaauauuggcagagaaaca

SEQ ID NO: 2085884 - RNA, 19 nt, Homo sapiens
  misc_RNA (1)...(19): siRNA sense strand
gagccaagaggaacaggaa

SEQ ID NO: 2085885 - RNA, 19 nt, Homo sapiens
  misc_RNA (1)...(19): siRNA sense strand
aaagaauauuggcagagaa

SEQ ID NO: 2085886 - RNA, 19 nt, Homo sapiens
  misc_RNA (1)...(19): siRNA sense strand
cuacaacaaugggcacaga

SEQ ID NO: 2085887 - RNA, 19 nt, Homo sapiens
  misc_RNA (1)...(19): siRNA sense strand
ggaccuguaccacacgaaa

SEQ ID NO: 2085888 - RNA, 19 nt, Homo sapiens
  misc_RNA (1)...(19): siRNA sense strand
gauugaacauacagaaagg

SEQ ID NO: 2085889 - RNA, 19 nt, Homo sapiens
  misc_RNA (1)...(19): siRNA sense strand
caagaacuucgcuucauuc

SEQ ID NO: 2085890 - RNA, 19 nt, Homo sapiens
  misc_RNA (1)...(19): siRNA sense strand
caacugaagaacaccauca

SEQ ID NO: 2085891 - RNA, 19 nt, Homo sapiens
  misc_RNA (1)...(19): siRNA sense strand
aaacaagaacuucgcuuca

SEQ ID NO: 2085892 - RNA, 19 nt, Homo sapiens
  misc_RNA (1)...(19): siRNA sense strand
aagaaacucgacaaaguaa

SEQ ID NO: 2085893 - RNA, 19 nt, Homo sapiens
  misc_RNA (1)...(19): siRNA sense strand
gcuagagagggaugaauau

SEQ ID NO: 2085894 - RNA, 19 nt, Homo sapiens
  misc_RNA (1)...(19): siRNA sense strand
ugaaagcgcagcugacaca

SEQ ID NO: 2085895 - RNA, 19 nt, Homo sapiens
  misc_RNA (1)...(19): siRNA sense strand
gcagcguaaaggagaguua

SEQ ID NO: 2085896 - RNA, 19 nt, Homo sapiens
  misc_RNA (1)...(19): siRNA sense strand
aaagaaguccagcuagaga

SEQ ID NO: 2085897 - RNA, 19 nt, Homo sapiens
  misc_RNA (1)...(19): siRNA sense strand
acagaaagggaaacuaaau

SEQ ID NO: 2085898 - RNA, 19 nt, Homo sapiens
  misc_RNA (1)...(19): siRNA sense strand
uacagcaacuacaacaaug

SEQ ID NO: 2085899 - RNA, 19 nt, Homo sapiens
  misc_RNA (1)...(19): siRNA sense strand
acaagagcguacuacaguu

SEQ ID NO: 2085900 - RNA, 19 nt, Homo sapiens
  misc_RNA (1)...(19): siRNA sense strand
ggagaggagcuuguccaaa

SEQ ID NO: 2085901 - RNA, 19 nt, Homo sapiens
  misc_RNA (1)...(19): siRNA sense strand
aggagaagaagcaugauaa

SEQ ID NO: 2085902 - RNA, 19 nt, Homo sapiens
  misc_RNA (1)...(19): siRNA sense strand
guugaaggagucacuuaaa

SEQ ID NO: 2085903 - RNA, 19 nt, Homo sapiens
  misc_RNA (1)...(19): siRNA sense strand
caggagguuugcucguuga

SEQ ID NO: 2085904 - RNA, 19 nt, Homo sapiens
  misc_RNA (1)...(19): siRNA sense strand
gcagccaagagaaaguuaa

SEQ ID NO: 2085905 - RNA, 19 nt, Homo sapiens
  misc_RNA (1)...(19): siRNA sense strand
ugaagaaggagaagaagca

SEQ ID NO: 2085906 - RNA, 19 nt, Homo sapiens
  misc_RNA (1)...(19): siRNA sense strand
ugaagaagaguccaaggau

SEQ ID NO: 2085907 - RNA, 19 nt, Homo sapiens
  misc_RNA (1)...(19): siRNA sense strand
gugccaagaacuagcagua

SEQ ID NO: 2085908 - RNA, 19 nt, Homo sapiens
  misc_RNA (1)...(19): siRNA sense strand
cagauacuuugaagaagag

SEQ ID NO: 2085909 - RNA, 19 nt, Homo sapiens
  misc_RNA (1)...(19): siRNA sense strand
gggagagcccuacaucauc

SEQ ID NO: 2085910 - RNA, 19 nt, Homo sapiens
  misc_RNA (1)...(19): siRNA sense strand
uuacagcaacuacaacaau

SEQ ID NO: 2085911 - RNA, 19 nt, Homo sapiens
  misc_RNA (1)...(19): siRNA sense strand
gagauucagcaacagguau

SEQ ID NO: 2085912 - RNA, 19 nt, Homo sapiens
  misc_RNA (1)...(19): siRNA sense strand
gcugaacaaugagaacaag

SEQ ID NO: 2085913 - RNA, 19 nt, Homo sapiens
  misc_RNA (1)...(19): siRNA sense strand
gaaacagaaagccgaaagg

SEQ ID NO: 2085914 - RNA, 19 nt, Homo sapiens
  misc_RNA (1)...(19): siRNA sense strand
aagaauauuggcagagaaa

SEQ ID NO: 2085915 - RNA, 19 nt, Homo sapiens
  misc_RNA (1)...(19): siRNA sense strand
gaaagggaaacuaaauacg

SEQ ID NO: 2085916 - RNA, 19 nt, Homo sapiens
  misc_RNA (1)...(19): siRNA sense strand
gaguacaaucagcgcauaa

SEQ ID NO: 2085917 - RNA, 19 nt, Homo sapiens
  misc_RNA (1)...(19): siRNA sense strand
cagccaagagaaaguuaaa

SEQ ID NO: 2085918 - RNA, 19 nt, Homo sapiens
  misc_RNA (1)...(19): siRNA sense strand
ggugaagaaacaagaacuu

SEQ ID NO: 2085919 - RNA, 19 nt, Homo sapiens
  misc_RNA (1)...(19): siRNA sense strand
gaaauggugucaaucuuaa

SEQ ID NO: 2085920 - RNA, 19 nt, Homo sapiens
  misc_RNA (1)...(19): siRNA sense strand
guuaugaccucaagacuua

SEQ ID NO: 2085921 - RNA, 19 nt, Homo sapiens
  misc_RNA (1)...(19): siRNA sense strand
agaaagcucuguugaguua

SEQ ID NO: 2085922 - RNA, 19 nt, Homo sapiens
  misc_RNA (1)...(19): siRNA sense strand
ggaacucucugaugaagua

SEQ ID NO: 2085923 - RNA, 19 nt, Homo sapiens
  misc_RNA (1)...(19): siRNA sense strand
gauaucaucugcuucagua

SEQ ID NO: 2085924 - RNA, 19 nt, Homo sapiens
  misc_RNA (1)...(19): siRNA sense strand
caacauugguuauggagua

SEQ ID NO: 2085925 - RNA, 19 nt, Homo sapiens
  misc_RNA (1)...(19): siRNA sense strand
caagauuaaugcucaguua

SEQ ID NO: 2085926 - RNA, 19 nt, Homo sapiens
  misc_RNA (1)...(19): siRNA sense strand
ggaaggaucugguuauuuu

SEQ ID NO: 2085927 - RNA, 19 nt, Homo sapiens
  misc_RNA (1)...(19): siRNA sense strand
caaauggcaucaccuguuu

SEQ ID NO: 2085928 - RNA, 19 nt, Homo sapiens
  misc_RNA (1)...(19): siRNA sense strand
gaaggacccugucagcauu

SEQ ID NO: 2085929 - RNA, 19 nt, Homo sapiens
  misc_RNA (1)...(19): siRNA sense strand
gaacguagcaagaauggaa

SEQ ID NO: 2085930 - RNA, 19 nt, Homo sapiens
  misc_RNA (1)...(19): siRNA sense strand
cuaccaagaugccaguuua

SEQ ID NO: 2085931 - RNA, 19 nt, Homo sapiens
  misc_RNA (1)...(19): siRNA sense strand
cauguacaguucaguaaua

SEQ ID NO: 2085932 - RNA, 19 nt, Homo sapiens
  misc_RNA (1)...(19): siRNA sense strand
caacauaggagaaaguuug

SEQ ID NO: 2085933 - RNA, 19 nt, Homo sapiens
  misc_RNA (1)...(19): siRNA sense strand
ccugaaagcugguuccauu

SEQ ID NO: 2085934 - RNA, 19 nt, Homo sapiens
  misc_RNA (1)...(19): siRNA sense strand
gauuaaugcucaguuauga

SEQ ID NO: 2085935 - RNA, 19 nt, Homo sapiens
  misc_RNA (1)...(19): siRNA sense strand
gagaugacuugcugcauau

SEQ ID NO: 2085936 - RNA, 19 nt, Homo sapiens
  misc_RNA (1)...(19): siRNA sense strand
agagaugacuugcugcaua

SEQ ID NO: 2085937 - RNA, 19 nt, Homo sapiens
  misc_RNA (1)...(19): siRNA sense strand
gaccguggcuguuguuaau

SEQ ID NO: 2085938 - RNA, 19 nt, Homo sapiens
  misc_RNA (1)...(19): siRNA sense strand
agacuuaucucaccaauac

SEQ ID NO: 2085939 - RNA, 19 nt, Homo sapiens
  misc_RNA (1)...(19): siRNA sense strand
gagaaugccaccaucuaua

SEQ ID NO: 2085940 - RNA, 19 nt, Homo sapiens
  misc_RNA (1)...(19): siRNA sense strand
gcaaauggcaucaccuguu

SEQ ID NO: 2085941 - RNA, 19 nt, Homo sapiens
  misc_RNA (1)...(19): siRNA sense strand
gaacaccacagccagguuu

SEQ ID NO: 2085942 - RNA, 19 nt, Homo sapiens
  misc_RNA (1)...(19): siRNA sense strand
ggaggucuaugaucuuugu

SEQ ID NO: 2085943 - RNA, 19 nt, Homo sapiens
  misc_RNA (1)...(19): siRNA sense strand
caaugcaucaucaagauua

SEQ ID NO: 2085944 - RNA, 19 nt, Homo sapiens
  misc_RNA (1)...(19): siRNA sense strand
gaugauuucugccaacaau

SEQ ID NO: 2085945 - RNA, 19 nt, Homo sapiens
  misc_RNA (1)...(19): siRNA sense strand
acaccaagcuuaccuuugu

SEQ ID NO: 2085946 - RNA, 19 nt, Homo sapiens
  misc_RNA (1)...(19): siRNA sense strand
ugagggcuaugaaagauaa

SEQ ID NO: 2085947 - RNA, 19 nt, Homo sapiens
  misc_RNA (1)...(19): siRNA sense strand
gguagaugauguaacugua

SEQ ID NO: 2085948 - RNA, 19 nt, Homo sapiens
  misc_RNA (1)...(19): siRNA sense strand
aaagucggcugcaacauug

SEQ ID NO: 2085949 - RNA, 19 nt, Homo sapiens
  misc_RNA (1)...(19): siRNA sense strand
caaagucggcugcaacauu

SEQ ID NO: 2085950 - RNA, 19 nt, Homo sapiens
  misc_RNA (1)...(19): siRNA sense strand
gaaccugggauauggauga

SEQ ID NO: 2085951 - RNA, 19 nt, Homo sapiens
  misc_RNA (1)...(19): siRNA sense strand
uaaccacccugauguaaag

SEQ ID NO: 2085952 - RNA, 19 nt, Homo sapiens
  misc_RNA (1)...(19): siRNA sense strand
agaaauggugucaaucuua

SEQ ID NO: 2085953 - RNA, 19 nt, Homo sapiens
  misc_RNA (1)...(19): siRNA sense strand
gagagaaauuccacacaca

SEQ ID NO: 2085954 - RNA, 19 nt, Homo sapiens
  misc_RNA (1)...(19): siRNA sense strand
ggaaacauuuagccuugug

SEQ ID NO: 2085955 - RNA, 19 nt, Homo sapiens
  misc_RNA (1)...(19): siRNA sense strand
ggaguggacagaguucuua

SEQ ID NO: 2085956 - RNA, 19 nt, Homo sapiens
  misc_RNA (1)...(19): siRNA sense strand
caauucaacuguauucaag

SEQ ID NO: 2085957 - RNA, 19 nt, Homo sapiens
  misc_RNA (1)...(19): siRNA sense strand
ccugggauauggaugauuu

SEQ ID NO: 2085958 - RNA, 19 nt, Homo sapiens
  misc_RNA (1)...(19): siRNA sense strand
guacagauccugguguuug

SEQ ID NO: 2085959 - RNA, 19 nt, Homo sapiens
  misc_RNA (1)...(19): siRNA sense strand
gagcuugaucugauugaua

SEQ ID NO: 2085960 - RNA, 19 nt, Homo sapiens
  misc_RNA (1)...(19): siRNA sense strand
ggucuaugaucuuuguuug

SEQ ID NO: 2085961 - RNA, 19 nt, Homo sapiens
  misc_RNA (1)...(19): siRNA sense strand
gaaauccuccaaugaaaca

SEQ ID NO: 2085962 - RNA, 19 nt, Homo sapiens
  misc_RNA (1)...(19): siRNA sense strand
gaacagagggcugacacuu

SEQ ID NO: 2085963 - RNA, 19 nt, Homo sapiens
  misc_RNA (1)...(19): siRNA sense strand
ucucuuaccuucacuguuc

SEQ ID NO: 2085964 - RNA, 19 nt, Homo sapiens
  misc_RNA (1)...(19): siRNA sense strand
gcauaacuuugccaugguu

SEQ ID NO: 2085965 - RNA, 19 nt, Homo sapiens
  misc_RNA (1)...(19): siRNA sense strand
gaagauacuggcaaaguca

SEQ ID NO: 2085966 - RNA, 19 nt, Homo sapiens
  misc_RNA (1)...(19): siRNA sense strand
gggcagacccgguuacaug

SEQ ID NO: 2085967 - RNA, 19 nt, Homo sapiens
  misc_RNA (1)...(19): siRNA sense strand
gaacugcuccugguagaug

SEQ ID NO: 2085968 - RNA, 19 nt, Homo sapiens
  misc_RNA (1)...(19): siRNA sense strand
cauaggagaaaguuugaua

SEQ ID NO: 2085969 - RNA, 19 nt, Homo sapiens
  misc_RNA (1)...(19): siRNA sense strand
ccaauacccucaauucaac

SEQ ID NO: 2085970 - RNA, 19 nt, Homo sapiens
  misc_RNA (1)...(19): siRNA sense strand
gaccagggaauaagaacua

SEQ ID NO: 2085971 - RNA, 19 nt, Homo sapiens
  misc_RNA (1)...(19): siRNA sense strand
guucacuucuccaucagua

SEQ ID NO: 2085972 - RNA, 19 nt, Homo sapiens
  misc_RNA (1)...(19): siRNA sense strand
gaagaaaagcccaaaagaa

SEQ ID NO: 2085973 - RNA, 19 nt, Homo sapiens
  misc_RNA (1)...(19): siRNA sense strand
gucaguaacuccaguauac

SEQ ID NO: 2085974 - RNA, 19 nt, Homo sapiens
  misc_RNA (1)...(19): siRNA sense strand
uacaaugccuuccuaaaca

SEQ ID NO: 2085975 - RNA, 19 nt, Homo sapiens
  misc_RNA (1)...(19): siRNA sense strand
caacaauauucuacagaca

SEQ ID NO: 2085976 - RNA, 19 nt, Homo sapiens
  misc_RNA (1)...(19): siRNA sense strand
gagaagacagagaagauug

SEQ ID NO: 2085977 - RNA, 19 nt, Homo sapiens
  misc_RNA (1)...(19): siRNA sense strand
gaaauuccacacacacaau

SEQ ID NO: 2085978 - RNA, 19 nt, Homo sapiens
  misc_RNA (1)...(19): siRNA sense strand
gcagccaacccaagcuaua

SEQ ID NO: 2085979 - RNA, 19 nt, Homo sapiens
  misc_RNA (1)...(19): siRNA sense strand
ucaaguguuucccuaauuc

SEQ ID NO: 2085980 - RNA, 19 nt, Homo sapiens
  misc_RNA (1)...(19): siRNA sense strand
aaaugaagauacuggcaaa

SEQ ID NO: 2085981 - RNA, 19 nt, Homo sapiens
  misc_RNA (1)...(19): siRNA sense strand
ucagaaacauggaacucaa

SEQ ID NO: 2085982 - RNA, 19 nt, Homo sapiens
  misc_RNA (1)...(19): siRNA sense strand
caucagauccuuaaaguac

SEQ ID NO: 2085983 - RNA, 19 nt, Homo sapiens
  misc_RNA (1)...(19): siRNA sense strand
cagguucgcuucauuugug

SEQ ID NO: 2085984 - RNA, 19 nt, Homo sapiens
  misc_RNA (1)...(19): siRNA sense strand
gcagaaauggugucaaucu

SEQ ID NO: 2085985 - RNA, 19 nt, Homo sapiens
  misc_RNA (1)...(19): siRNA sense strand
caucaccacuggcagaaau

SEQ ID NO: 2085986 - RNA, 19 nt, Homo sapiens
  misc_RNA (1)...(19): siRNA sense strand
gaaagcugguuccauugca

SEQ ID NO: 2085987 - RNA, 19 nt, Homo sapiens
  misc_RNA (1)...(19): siRNA sense strand
gaaaagcccaaaagaaauu

SEQ ID NO: 2085988 - RNA, 19 nt, Homo sapiens
  misc_RNA (1)...(19): siRNA sense strand
uagcccauuucgaagauua

SEQ ID NO: 2085989 - RNA, 19 nt, Homo sapiens
  misc_RNA (1)...(19): siRNA sense strand
gauacaaacaguuccaguu

SEQ ID NO: 2085990 - RNA, 19 nt, Homo sapiens
  misc_RNA (1)...(19): siRNA sense strand
acagagggcugacacuugu

SEQ ID NO: 2085991 - RNA, 19 nt, Homo sapiens
  misc_RNA (1)...(19): siRNA sense strand
ggaaggacccugucagcau

SEQ ID NO: 2085992 - RNA, 19 nt, Homo sapiens
  misc_RNA (1)...(19): siRNA sense strand
ugacacugauuccaaugaa

SEQ ID NO: 2085993 - RNA, 19 nt, Homo sapiens
  misc_RNA (1)...(19): siRNA sense strand
agaaugccaccaucuauaa

SEQ ID NO: 2085994 - RNA, 19 nt, Homo sapiens
  misc_RNA (1)...(19): siRNA sense strand
caacuugcccagaucugua

SEQ ID NO: 2085995 - RNA, 19 nt, Homo sapiens
  misc_RNA (1)...(19): siRNA sense strand
uaaaucaguggaaauggua

SEQ ID NO: 2085996 - RNA, 19 nt, Homo sapiens
  misc_RNA (1)...(19): siRNA sense strand
uaacuguagugccugagaa

SEQ ID NO: 2085997 - RNA, 19 nt, Homo sapiens
  misc_RNA (1)...(19): siRNA sense strand
cagaaauggugucaaucuu

SEQ ID NO: 2085998 - RNA, 19 nt, Homo sapiens
  misc_RNA (1)...(19): siRNA sense strand
gagccagacaccaagcuua

SEQ ID NO: 2085999 - RNA, 19 nt, Homo sapiens
  misc_RNA (1)...(19): siRNA sense strand
ggagaagacagagaagauu

SEQ ID NO: 2086000 - RNA, 19 nt, Homo sapiens
  misc_RNA (1)...(19): siRNA sense strand
caaguuacagggaagauug

SEQ ID NO: 2086001 - RNA, 19 nt, Homo sapiens
  misc_RNA (1)...(19): siRNA sense strand
ugaguuaguuccauuacau

SEQ ID NO: 2086002 - RNA, 19 nt, Homo sapiens
  misc_RNA (1)...(19): siRNA sense strand
gaacuagcaguguuugauc

SEQ ID NO: 2086003 - RNA, 19 nt, Homo sapiens
  misc_RNA (1)...(19): siRNA sense strand
uggcagaaauggugucaau

SEQ ID NO: 2086004 - RNA, 19 nt, Homo sapiens
  misc_RNA (1)...(19): siRNA sense strand
gaacccuaguccagcugua

SEQ ID NO: 2086005 - RNA, 19 nt, Homo sapiens
  misc_RNA (1)...(19): siRNA sense strand
cacaacaaauggcugauuc

SEQ ID NO: 2086006 - RNA, 19 nt, Homo sapiens
  misc_RNA (1)...(19): siRNA sense strand
ggaauugaaugcggagaag

SEQ ID NO: 2086007 - RNA, 19 nt, Homo sapiens
  misc_RNA (1)...(19): siRNA sense strand
uagcaagaauggaaugcaa

SEQ ID NO: 2086008 - RNA, 19 nt, Homo sapiens
  misc_RNA (1)...(19): siRNA sense strand
gugaagggcuccugaaagc

SEQ ID NO: 2086009 - RNA, 19 nt, Homo sapiens
  misc_RNA (1)...(19): siRNA sense strand
gcagcaggcaggaccagua

SEQ ID NO: 2086010 - RNA, 19 nt, Homo sapiens
  misc_RNA (1)...(19): siRNA sense strand
caaaagggauguauuggau

SEQ ID NO: 2086011 - RNA, 19 nt, Homo sapiens
  misc_RNA (1)...(19): siRNA sense strand
gcacaacaaauggcugauu

SEQ ID NO: 2086012 - RNA, 19 nt, Homo sapiens
  misc_RNA (1)...(19): siRNA sense strand
caucaauauuuccugugua

SEQ ID NO: 2086013 - RNA, 19 nt, Homo sapiens
  misc_RNA (1)...(19): siRNA sense strand
ccauucagauuucaguaug

SEQ ID NO: 2086014 - RNA, 19 nt, Homo sapiens
  misc_RNA (1)...(19): siRNA sense strand
gagcugccuucgugaguuc

SEQ ID NO: 2086015 - RNA, 19 nt, Homo sapiens
  misc_RNA (1)...(19): siRNA sense strand
guaucaaggucacuguuca

SEQ ID NO: 2086016 - RNA, 19 nt, Homo sapiens
  misc_RNA (1)...(19): siRNA sense strand
gaugccaguuuaugucaug

SEQ ID NO: 2086017 - RNA, 19 nt, Homo sapiens
  misc_RNA (1)...(19): siRNA sense strand
uguuggaacucucugauga

SEQ ID NO: 2086018 - RNA, 19 nt, Homo sapiens
  misc_RNA (1)...(19): siRNA sense strand
ggucaaugcaucaucaaga

SEQ ID NO: 2086019 - RNA, 19 nt, Homo sapiens
  misc_RNA (1)...(19): siRNA sense strand
gcaagaugcugacggauga

SEQ ID NO: 2086020 - RNA, 19 nt, Homo sapiens
  misc_RNA (1)...(19): siRNA sense strand
gaaaauaaguucccucuga

SEQ ID NO: 2086021 - RNA, 19 nt, Homo sapiens
  misc_RNA (1)...(19): siRNA sense strand
caucacagcuguuaaagau

SEQ ID NO: 2086022 - RNA, 19 nt, Homo sapiens
  misc_RNA (1)...(19): siRNA sense strand
gcgaguaacugcaucaaga

SEQ ID NO: 2086023 - RNA, 19 nt, Homo sapiens
  misc_RNA (1)...(19): siRNA sense strand
acaacaaacuggacaaauu

SEQ ID NO: 2086024 - RNA, 19 nt, Homo sapiens
  misc_RNA (1)...(19): siRNA sense strand
gaaaguacgucaggcgauu

SEQ ID NO: 2086025 - RNA, 19 nt, Homo sapiens
  misc_RNA (1)...(19): siRNA sense strand
gcaaugggcucuucgacau

SEQ ID NO: 2086026 - RNA, 19 nt, Homo sapiens
  misc_RNA (1)...(19): siRNA sense strand
ccaaggagaugcccgagaa

SEQ ID NO: 2086027 - RNA, 19 nt, Homo sapiens
  misc_RNA (1)...(19): siRNA sense strand
gcgauaaccaggugaauaa

SEQ ID NO: 2086028 - RNA, 19 nt, Homo sapiens
  misc_RNA (1)...(19): siRNA sense strand
acacacagcucgugaggaa

SEQ ID NO: 2086029 - RNA, 19 nt, Homo sapiens
  misc_RNA (1)...(19): siRNA sense strand
acaaggaucuggaugaaga

SEQ ID NO: 2086030 - RNA, 19 nt, Homo sapiens
  misc_RNA (1)...(19): siRNA sense strand
gaguaucgaucgccuaaug

SEQ ID NO: 2086031 - RNA, 19 nt, Homo sapiens
  misc_RNA (1)...(19): siRNA sense strand
ggaguacgcccuggucaua

SEQ ID NO: 2086032 - RNA, 19 nt, Homo sapiens
  misc_RNA (1)...(19): siRNA sense strand
gcaucaagaccuccaagua

SEQ ID NO: 2086033 - RNA, 19 nt, Homo sapiens
  misc_RNA (1)...(19): siRNA sense strand
gcggaacccucuacuggaa

SEQ ID NO: 2086034 - RNA, 19 nt, Homo sapiens
  misc_RNA (1)...(19): siRNA sense strand
gcacagcaaugggcucuuc

SEQ ID NO: 2086035 - RNA, 19 nt, Homo sapiens
  misc_RNA (1)...(19): siRNA sense strand
cagcuauggugauguguuu

SEQ ID NO: 2086036 - RNA, 19 nt, Homo sapiens
  misc_RNA (1)...(19): siRNA sense strand
caacaaacuggacaaauuc

SEQ ID NO: 2086037 - RNA, 19 nt, Homo sapiens
  misc_RNA (1)...(19): siRNA sense strand
ggacggccaucaaccacuu

SEQ ID NO: 2086038 - RNA, 19 nt, Homo sapiens
  misc_RNA (1)...(19): siRNA sense strand
gcacagccaucaccuacca

SEQ ID NO: 2086039 - RNA, 19 nt, Homo sapiens
  misc_RNA (1)...(19): siRNA sense strand
ggccacagcuacuucauca

SEQ ID NO: 2086040 - RNA, 19 nt, Homo sapiens
  misc_RNA (1)...(19): siRNA sense strand
uagaacuggucaagaagua

SEQ ID NO: 2086041 - RNA, 19 nt, Homo sapiens
  misc_RNA (1)...(19): siRNA sense strand
acacuaagcugaugcaaaa

SEQ ID NO: 2086042 - RNA, 19 nt, Homo sapiens
  misc_RNA (1)...(19): siRNA sense strand
caacggccauugaggacaa

SEQ ID NO: 2086043 - RNA, 19 nt, Homo sapiens
  misc_RNA (1)...(19): siRNA sense strand
gaacuuugguuuuguuuuc

SEQ ID NO: 2086044 - RNA, 19 nt, Homo sapiens
  misc_RNA (1)...(19): siRNA sense strand
gaccgucuaugaccaguau

SEQ ID NO: 2086045 - RNA, 19 nt, Homo sapiens
  misc_RNA (1)...(19): siRNA sense strand
gcagaaggcacagguggua

SEQ ID NO: 2086046 - RNA, 19 nt, Homo sapiens
  misc_RNA (1)...(19): siRNA sense strand
gcaacggcuucaccuauca

SEQ ID NO: 2086047 - RNA, 19 nt, Homo sapiens
  misc_RNA (1)...(19): siRNA sense strand
ggacagugccuucuucucu

SEQ ID NO: 2086048 - RNA, 19 nt, Homo sapiens
  misc_RNA (1)...(19): siRNA sense strand
ggaguacccuaagcuguau

SEQ ID NO: 2086049 - RNA, 19 nt, Homo sapiens
  misc_RNA (1)...(19): siRNA sense strand
caacugggauaagaagaug

SEQ ID NO: 2086050 - RNA, 19 nt, Homo sapiens
  misc_RNA (1)...(19): siRNA sense strand
ugguagaacuggucaagaa

SEQ ID NO: 2086051 - RNA, 19 nt, Homo sapiens
  misc_RNA (1)...(19): siRNA sense strand
gcuggaggcugucaagauc

SEQ ID NO: 2086052 - RNA, 19 nt, Homo sapiens
  misc_RNA (1)...(19): siRNA sense strand
caacaagugcuccaucaau

SEQ ID NO: 2086053 - RNA, 19 nt, Homo sapiens
  misc_RNA (1)...(19): siRNA sense strand
uuaaagaugccacugauga

SEQ ID NO: 2086054 - RNA, 19 nt, Homo sapiens
  misc_RNA (1)...(19): siRNA sense strand
ccacauccuuggucauugu

SEQ ID NO: 2086055 - RNA, 19 nt, Homo sapiens
  misc_RNA (1)...(19): siRNA sense strand
cuacaaggaucuggaugaa

SEQ ID NO: 2086056 - RNA, 19 nt, Homo sapiens
  misc_RNA (1)...(19): siRNA sense strand
aagccuugcuguuuacuuu

SEQ ID NO: 2086057 - RNA, 19 nt, Homo sapiens
  misc_RNA (1)...(19): siRNA sense strand
aggacaagcuuucuucuuc

SEQ ID NO: 2086058 - RNA, 19 nt, Homo sapiens
  misc_RNA (1)...(19): siRNA sense strand
caucaugucuggcaagaac

SEQ ID NO: 2086059 - RNA, 19 nt, Homo sapiens
  misc_RNA (1)...(19): siRNA sense strand
ggggaagccuugcuguuua

SEQ ID NO: 2086060 - RNA, 19 nt, Homo sapiens
  misc_RNA (1)...(19): siRNA sense strand
gaaugucuguguuggugau

SEQ ID NO: 2086061 - RNA, 19 nt, Homo sapiens
  misc_RNA (1)...(19): siRNA sense strand
gaauugggagacaucagua

SEQ ID NO: 2086062 - RNA, 19 nt, Homo sapiens
  misc_RNA (1)...(19): siRNA sense strand
ucaccaccauugugccuuu

SEQ ID NO: 2086063 - RNA, 19 nt, Homo sapiens
  misc_RNA (1)...(19): siRNA sense strand
gcggaucuccuccuccuuu

SEQ ID NO: 2086064 - RNA, 19 nt, Homo sapiens
  misc_RNA (1)...(19): siRNA sense strand
gcuagaaaauaaccaguuu

SEQ ID NO: 2086065 - RNA, 19 nt, Homo sapiens
  misc_RNA (1)...(19): siRNA sense strand
gugcucauguucuucauuc

SEQ ID NO: 2086066 - RNA, 19 nt, Homo sapiens
  misc_RNA (1)...(19): siRNA sense strand
aaugagaaauuccaguaug

SEQ ID NO: 2086067 - RNA, 19 nt, Homo sapiens
  misc_RNA (1)...(19): siRNA sense strand
cgaaugugcaaguuucuuu

SEQ ID NO: 2086068 - RNA, 19 nt, Homo sapiens
  misc_RNA (1)...(19): siRNA sense strand
gaccgagaauacaaugaga

SEQ ID NO: 2086069 - RNA, 19 nt, Homo sapiens
  misc_RNA (1)...(19): siRNA sense strand
acaaugagaaauuccagua

SEQ ID NO: 2086070 - RNA, 19 nt, Homo sapiens
  misc_RNA (1)...(19): siRNA sense strand
ggaaugcccagaacaccuu

SEQ ID NO: 2086071 - RNA, 19 nt, Homo sapiens
  misc_RNA (1)...(19): siRNA sense strand
ccaaugaugucagcaugau

SEQ ID NO: 2086072 - RNA, 19 nt, Homo sapiens
  misc_RNA (1)...(19): siRNA sense strand
ucaauccucuggcugacaa

SEQ ID NO: 2086073 - RNA, 19 nt, Homo sapiens
  misc_RNA (1)...(19): siRNA sense strand
agagaggccugaaccuguu

SEQ ID NO: 2086074 - RNA, 19 nt, Homo sapiens
  misc_RNA (1)...(19): siRNA sense strand
gaagauguucugcaugaag

SEQ ID NO: 2086075 - RNA, 19 nt, Homo sapiens
  misc_RNA (1)...(19): siRNA sense strand
caggagcaguggaugaaug

SEQ ID NO: 2086076 - RNA, 19 nt, Homo sapiens
  misc_RNA (1)...(19): siRNA sense strand
caaguuucuuugcuauuuc

SEQ ID NO: 2086077 - RNA, 19 nt, Homo sapiens
  misc_RNA (1)...(19): siRNA sense strand
gggaggagcucaggaaagc

SEQ ID NO: 2086078 - RNA, 19 nt, Homo sapiens
  misc_RNA (1)...(19): siRNA sense strand
gaacgaaggagagcuguac

SEQ ID NO: 2086079 - RNA, 19 nt, Homo sapiens
  misc_RNA (1)...(19): siRNA sense strand
gccugaaccuguugacuuc

SEQ ID NO: 2086080 - RNA, 19 nt, Homo sapiens
  misc_RNA (1)...(19): siRNA sense strand
caacaacaaacuggacaaa

SEQ ID NO: 2086081 - RNA, 19 nt, Homo sapiens
  misc_RNA (1)...(19): siRNA sense strand
ugaauaaccgccagucuca

SEQ ID NO: 2086082 - RNA, 19 nt, Homo sapiens
  misc_RNA (1)...(19): siRNA sense strand
gaucaaaacggcucacauu

SEQ ID NO: 2086083 - RNA, 19 nt, Homo sapiens
  misc_RNA (1)...(19): siRNA sense strand
acauggagcuggaguuucu

SEQ ID NO: 2086084 - RNA, 19 nt, Homo sapiens
  misc_RNA (1)...(19): siRNA sense strand
ggaucuggaugaagaguac

SEQ ID NO: 2086085 - RNA, 19 nt, Homo sapiens
  misc_RNA (1)...(19): siRNA sense strand
aacaagugcuccaucaaug

SEQ ID NO: 2086086 - RNA, 19 nt, Homo sapiens
  misc_RNA (1)...(19): siRNA sense strand
ggccacagcuauggugaug

SEQ ID NO: 2086087 - RNA, 19 nt, Homo sapiens
  misc_RNA (1)...(19): siRNA sense strand
gugguuagcgugcagauug

SEQ ID NO: 2086088 - RNA, 19 nt, Homo sapiens
  misc_RNA (1)...(19): siRNA sense strand
ggcaacggcuucaccuauc

SEQ ID NO: 2086089 - RNA, 19 nt, Homo sapiens
  misc_RNA (1)...(19): siRNA sense strand
gcaagcggaugucggucau

SEQ ID NO: 2086090 - RNA, 19 nt, Homo sapiens
  misc_RNA (1)...(19): siRNA sense strand
gcuaugccuucucccauca

SEQ ID NO: 2086091 - RNA, 19 nt, Homo sapiens
  misc_RNA (1)...(19): siRNA sense strand
gaacuggucaagaaguaca

SEQ ID NO: 2086092 - RNA, 19 nt, Homo sapiens
  misc_RNA (1)...(19): siRNA sense strand
uggccaacaucaagauuug

SEQ ID NO: 2086093 - RNA, 19 nt, Homo sapiens
  misc_RNA (1)...(19): siRNA sense strand
aagauguucugcaugaaga

SEQ ID NO: 2086094 - RNA, 19 nt, Homo sapiens
  misc_RNA (1)...(19): siRNA sense strand
ucucuucccuguccugguu

SEQ ID NO: 2086095 - RNA, 19 nt, Homo sapiens
  misc_RNA (1)...(19): siRNA sense strand
gaaugugcaaguuucuuug

SEQ ID NO: 2086096 - RNA, 19 nt, Homo sapiens
  misc_RNA (1)...(19): siRNA sense strand
ugacggaugacaugacuga

SEQ ID NO: 2086097 - RNA, 19 nt, Homo sapiens
  misc_RNA (1)...(19): siRNA sense strand
gcaaaggggcugacacuau

SEQ ID NO: 2086098 - RNA, 19 nt, Homo sapiens
  misc_RNA (1)...(19): siRNA sense strand
aaacaaucaccguccauga

SEQ ID NO: 2086099 - RNA, 19 nt, Homo sapiens
  misc_RNA (1)...(19): siRNA sense strand
guggaugaaugucuguguu

SEQ ID NO: 2086100 - RNA, 19 nt, Homo sapiens
  misc_RNA (1)...(19): siRNA sense strand
gggaagccuugcuguuuac

SEQ ID NO: 2086101 - RNA, 19 nt, Homo sapiens
  misc_RNA (1)...(19): siRNA sense strand
caucaagauuugggugcua

SEQ ID NO: 2086102 - RNA, 19 nt, Homo sapiens
  misc_RNA (1)...(19): siRNA sense strand
caggcuggcuagcaucuau

SEQ ID NO: 2086103 - RNA, 19 nt, Homo sapiens
  misc_RNA (1)...(19): siRNA sense strand
gggcuaaugaccgagaaua

SEQ ID NO: 2086104 - RNA, 19 nt, Homo sapiens
  misc_RNA (1)...(19): siRNA sense strand
gaagcggacgccugcagaa

SEQ ID NO: 2086105 - RNA, 19 nt, Homo sapiens
  misc_RNA (1)...(19): siRNA sense strand
uggaguacccuaagcugua

SEQ ID NO: 2086106 - RNA, 19 nt, Homo sapiens
  misc_RNA (1)...(19): siRNA sense strand
gguccuaccugcgaaugug

SEQ ID NO: 2086107 - RNA, 19 nt, Homo sapiens
  misc_RNA (1)...(19): siRNA sense strand
ggagacggagccaaugaug

SEQ ID NO: 2086108 - RNA, 19 nt, Homo sapiens
  misc_RNA (1)...(19): siRNA sense strand
cuuccaagcuaacuucugu

SEQ ID NO: 2086109 - RNA, 19 nt, Homo sapiens
  misc_RNA (1)...(19): siRNA sense strand
cauagucacuggccauacu

SEQ ID NO: 2086110 - RNA, 19 nt, Homo sapiens
  misc_RNA (1)...(19): siRNA sense strand
caaaggggcugacacuauc

SEQ ID NO: 2086111 - RNA, 19 nt, Homo sapiens
  misc_RNA (1)...(19): siRNA sense strand
ccacacgcaugaguucuuc

SEQ ID NO: 2086112 - RNA, 19 nt, Homo sapiens
  misc_RNA (1)...(19): siRNA sense strand
gucauacugucaugucaga

SEQ ID NO: 2086113 - RNA, 19 nt, Homo sapiens
  misc_RNA (1)...(19): siRNA sense strand
uuacuuugccauccucuuu

SEQ ID NO: 2086114 - RNA, 19 nt, Homo sapiens
  misc_RNA (1)...(19): siRNA sense strand
caccaucacagcuguuaaa

SEQ ID NO: 2086115 - RNA, 19 nt, Homo sapiens
  misc_RNA (1)...(19): siRNA sense strand
gacagcgugugccugcaaa

SEQ ID NO: 2086116 - RNA, 19 nt, Homo sapiens
  misc_RNA (1)...(19): siRNA sense strand
caucaagaccuccaaguac

SEQ ID NO: 2086117 - RNA, 19 nt, Homo sapiens
  misc_RNA (1)...(19): siRNA sense strand
augaggagguugagaacaa

SEQ ID NO: 2086118 - RNA, 19 nt, Homo sapiens
  misc_RNA (1)...(19): siRNA sense strand
uagcaucuaugaggagguu

SEQ ID NO: 2086119 - RNA, 19 nt, Homo sapiens
  misc_RNA (1)...(19): siRNA sense strand
gggaacaccuggacaagaa

SEQ ID NO: 2086120 - RNA, 19 nt, Homo sapiens
  misc_RNA (1)...(19): siRNA sense strand
ggaaguuuguagcugacua

SEQ ID NO: 2086121 - RNA, 19 nt, Homo sapiens
  misc_RNA (1)...(19): siRNA sense strand
ggagugcccucacauuguc

SEQ ID NO: 2086122 - RNA, 19 nt, Homo sapiens
  misc_RNA (1)...(19): siRNA sense strand
gcccuucuaucacuucuau

SEQ ID NO: 2086123 - RNA, 19 nt, Homo sapiens
  misc_RNA (1)...(19): siRNA sense strand
ccucaucucuggccagugu

SEQ ID NO: 2086124 - RNA, 19 nt, Homo sapiens
  misc_RNA (1)...(19): siRNA sense strand
cuucacugcuuaccuauau

SEQ ID NO: 2086125 - RNA, 19 nt, Homo sapiens
  misc_RNA (1)...(19): siRNA sense strand
gagcucacccggaaguuug

SEQ ID NO: 2086126 - RNA, 19 nt, Homo sapiens
  misc_RNA (1)...(19): siRNA sense strand
gcaucacagugcccauuga

SEQ ID NO: 2086127 - RNA, 19 nt, Homo sapiens
  misc_RNA (1)...(19): siRNA sense strand
uggcuucacugcuuaccua

SEQ ID NO: 2086128 - RNA, 19 nt, Homo sapiens
  misc_RNA (1)...(19): siRNA sense strand
gaggguuccuggucaauac

SEQ ID NO: 2086129 - RNA, 19 nt, Homo sapiens
  misc_RNA (1)...(19): siRNA sense strand
gaguaacacagucaaauca

SEQ ID NO: 2086130 - RNA, 19 nt, Homo sapiens
  misc_RNA (1)...(19): siRNA sense strand
ggacuucgcggcuucuauc

SEQ ID NO: 2086131 - RNA, 19 nt, Homo sapiens
  misc_RNA (1)...(19): siRNA sense strand
ucacagugcccauugaugu

SEQ ID NO: 2086132 - RNA, 19 nt, Homo sapiens
  misc_RNA (1)...(19): siRNA sense strand
uauguggcuucacugcuua

SEQ ID NO: 2086133 - RNA, 19 nt, Homo sapiens
  misc_RNA (1)...(19): siRNA sense strand
gaacaccuggacaagaaga

SEQ ID NO: 2086134 - RNA, 19 nt, Homo sapiens
  misc_RNA (1)...(19): siRNA sense strand
gcccucacauugucuuuca

SEQ ID NO: 2086135 - RNA, 19 nt, Homo sapiens
  misc_RNA (1)...(19): siRNA sense strand
gcgagcagaugguaucacu

SEQ ID NO: 2086136 - RNA, 19 nt, Homo sapiens
  misc_RNA (1)...(19): siRNA sense strand
cuauguggcuucacugcuu

SEQ ID NO: 2086137 - RNA, 19 nt, Homo sapiens
  misc_RNA (1)...(19): siRNA sense strand
gcaacgcaagggugagaaa

SEQ ID NO: 2086138 - RNA, 19 nt, Homo sapiens
  misc_RNA (1)...(19): siRNA sense strand
ggacucgagacacugguaa

SEQ ID NO: 2086139 - RNA, 19 nt, Homo sapiens
  misc_RNA (1)...(19): siRNA sense strand
gcacccgguugcaaguuca

SEQ ID NO: 2086140 - RNA, 19 nt, Homo sapiens
  misc_RNA (1)...(19): siRNA sense strand
guaacacagucaaaucacu

SEQ ID NO: 2086141 - RNA, 19 nt, Homo sapiens
  misc_RNA (1)...(19): siRNA sense strand
aaacgcaacauccagauca

SEQ ID NO: 2086142 - RNA, 19 nt, Homo sapiens
  misc_RNA (1)...(19): siRNA sense strand
gacagcugauggcagaaga

SEQ ID NO: 2086143 - RNA, 19 nt, Homo sapiens
  misc_RNA (1)...(19): siRNA sense strand
uaaggagugcccucacauu

SEQ ID NO: 2086144 - RNA, 19 nt, Homo sapiens
  misc_RNA (1)...(19): siRNA sense strand
ucuccuaccuguguccuaa

SEQ ID NO: 2086145 - RNA, 19 nt, Homo sapiens
  misc_RNA (1)...(19): siRNA sense strand
gcagcucuccuaccugugu

SEQ ID NO: 2086146 - RNA, 19 nt, Homo sapiens
  misc_RNA (1)...(19): siRNA sense strand
gagcaucacagugcccauu

SEQ ID NO: 2086147 - RNA, 19 nt, Homo sapiens
  misc_RNA (1)...(19): siRNA sense strand
cggcuucuaucgaggcuau

SEQ ID NO: 2086148 - RNA, 19 nt, Homo sapiens
  misc_RNA (1)...(19): siRNA sense strand
gggcaagaacuccaucauc

SEQ ID NO: 2086149 - RNA, 19 nt, Homo sapiens
  misc_RNA (1)...(19): siRNA sense strand
ucccauggaugucauacga

SEQ ID NO: 2086150 - RNA, 19 nt, Homo sapiens
  misc_RNA (1)...(19): siRNA sense strand
ccuaaggagugcccucaca

SEQ ID NO: 2086151 - RNA, 19 nt, Homo sapiens
  misc_RNA (1)...(19): siRNA sense strand
gucagugucuacccauuca

SEQ ID NO: 2086152 - RNA, 19 nt, Homo sapiens
  misc_RNA (1)...(19): siRNA sense strand
agccacaccuuccaccauu

SEQ ID NO: 2086153 - RNA, 19 nt, Homo sapiens
  misc_RNA (1)...(19): siRNA sense strand
gguguggcaaugacaauga

SEQ ID NO: 2086154 - RNA, 19 nt, Homo sapiens
  misc_RNA (1)...(19): siRNA sense strand
gaggcuauguggcuucacu

SEQ ID NO: 2086155 - RNA, 19 nt, Homo sapiens
  misc_RNA (1)...(19): siRNA sense strand
guuaugucaccacuuauga

SEQ ID NO: 2086156 - RNA, 19 nt, Homo sapiens
  misc_RNA (1)...(19): siRNA sense strand
gacuacagccagaguaaca

SEQ ID NO: 2086157 - RNA, 19 nt, Homo sapiens
  misc_RNA (1)...(19): siRNA sense strand
cgaggguuccuggucaaua

SEQ ID NO: 2086158 - RNA, 19 nt, Homo sapiens
  misc_RNA (1)...(19): siRNA sense strand
cacagugcccauugaugua

SEQ ID NO: 2086159 - RNA, 19 nt, Homo sapiens
  misc_RNA (1)...(19): siRNA sense strand
acaaugaugauccguguca

SEQ ID NO: 2086160 - RNA, 19 nt, Homo sapiens
  misc_RNA (1)...(19): siRNA sense strand
uuaccuauaucccaaacag

SEQ ID NO: 2086161 - RNA, 19 nt, Homo sapiens
  misc_RNA (1)...(19): siRNA sense strand
ccugcaggcugauggacuu

SEQ ID NO: 2086162 - RNA, 19 nt, Homo sapiens
  misc_RNA (1)...(19): siRNA sense strand
cagaguaacacagucaaau

SEQ ID NO: 2086163 - RNA, 19 nt, Homo sapiens
  misc_RNA (1)...(19): siRNA sense strand
ucugguggcccuucuauca

SEQ ID NO: 2086164 - RNA, 19 nt, Homo sapiens
  misc_RNA (1)...(19): siRNA sense strand
aaggagugcccucacauug

SEQ ID NO: 2086165 - RNA, 19 nt, Homo sapiens
  misc_RNA (1)...(19): siRNA sense strand
ccagaguaacacagucaaa

SEQ ID NO: 2086166 - RNA, 19 nt, Homo sapiens
  misc_RNA (1)...(19): siRNA sense strand
gccacaccuuccaccauug

SEQ ID NO: 2086167 - RNA, 19 nt, Homo sapiens
  misc_RNA (1)...(19): siRNA sense strand
ggaggacaaacgcaacauc

SEQ ID NO: 2086168 - RNA, 19 nt, Homo sapiens
  misc_RNA (1)...(19): siRNA sense strand
gaaguucuacguguuuggu

SEQ ID NO: 2086169 - RNA, 19 nt, Homo sapiens
  misc_RNA (1)...(19): siRNA sense strand
gagagccucaagaaacuca

SEQ ID NO: 2086170 - RNA, 19 nt, Homo sapiens
  misc_RNA (1)...(19): siRNA sense strand
agaguaacacagucaaauc

SEQ ID NO: 2086171 - RNA, 19 nt, Homo sapiens
  misc_RNA (1)...(19): siRNA sense strand
ccaaaccaaggacaucauc

SEQ ID NO: 2086172 - RNA, 19 nt, Homo sapiens
  misc_RNA (1)...(19): siRNA sense strand
gcaagaacuccaucauccu

SEQ ID NO: 2086173 - RNA, 19 nt, Homo sapiens
  misc_RNA (1)...(19): siRNA sense strand
ggaaugagcucuucaacaa

SEQ ID NO: 2086174 - RNA, 19 nt, Homo sapiens
  misc_RNA (1)...(19): siRNA sense strand
ggaaaggucucagaugaaa

SEQ ID NO: 2086175 - RNA, 19 nt, Homo sapiens
  misc_RNA (1)...(19): siRNA sense strand
ggaagaagcuacagcaucu

SEQ ID NO: 2086176 - RNA, 19 nt, Homo sapiens
  misc_RNA (1)...(19): siRNA sense strand
caaagauucugacugauga

SEQ ID NO: 2086177 - RNA, 19 nt, Homo sapiens
  misc_RNA (1)...(19): siRNA sense strand
gagagaagccaaacaaaga

SEQ ID NO: 2086178 - RNA, 19 nt, Homo sapiens
  misc_RNA (1)...(19): siRNA sense strand
gcagagagcaaaccaauca

SEQ ID NO: 2086179 - RNA, 19 nt, Homo sapiens
  misc_RNA (1)...(19): siRNA sense strand
ggaggacgcugcaggaaca

SEQ ID NO: 2086180 - RNA, 19 nt, Homo sapiens
  misc_RNA (1)...(19): siRNA sense strand
gaaagagaggguacaacua

SEQ ID NO: 2086181 - RNA, 19 nt, Homo sapiens
  misc_RNA (1)...(19): siRNA sense strand
aaggaaaggucucagauga

SEQ ID NO: 2086182 - RNA, 19 nt, Homo sapiens
  misc_RNA (1)...(19): siRNA sense strand
gaaagaagaggcagcaaca

SEQ ID NO: 2086183 - RNA, 19 nt, Homo sapiens
  misc_RNA (1)...(19): siRNA sense strand
aaagagaggguacaacuaa

SEQ ID NO: 2086184 - RNA, 19 nt, Homo sapiens
  misc_RNA (1)...(19): siRNA sense strand
gaagauagaggugaggaaa

SEQ ID NO: 2086185 - RNA, 19 nt, Homo sapiens
  misc_RNA (1)...(19): siRNA sense strand
cuaaggagaccacccguua

SEQ ID NO: 2086186 - RNA, 19 nt, Homo sapiens
  misc_RNA (1)...(19): siRNA sense strand
ccaacuugcuguaucagaa

SEQ ID NO: 2086187 - RNA, 19 nt, Homo sapiens
  misc_RNA (1)...(19): siRNA sense strand
gcagaaagaggaggaagaa

SEQ ID NO: 2086188 - RNA, 19 nt, Homo sapiens
  misc_RNA (1)...(19): siRNA sense strand
ggaaugaugcagaugagaa

SEQ ID NO: 2086189 - RNA, 19 nt, Homo sapiens
  misc_RNA (1)...(19): siRNA sense strand
gaaggagaaugguaucacu

SEQ ID NO: 2086190 - RNA, 19 nt, Homo sapiens
  misc_RNA (1)...(19): siRNA sense strand
gaagcuacagcaucugaaa

SEQ ID NO: 2086191 - RNA, 19 nt, Homo sapiens
  misc_RNA (1)...(19): siRNA sense strand
caacuaaagggaaugagaa

SEQ ID NO: 2086192 - RNA, 19 nt, Homo sapiens
  misc_RNA (1)...(19): siRNA sense strand
gaaggaaaggucucagaug

SEQ ID NO: 2086193 - RNA, 19 nt, Homo sapiens
  misc_RNA (1)...(19): siRNA sense strand
ugaaaggaaugaugcagau

SEQ ID NO: 2086194 - RNA, 19 nt, Homo sapiens
  misc_RNA (1)...(19): siRNA sense strand
ggagagaagccaaacaaag

SEQ ID NO: 2086195 - RNA, 19 nt, Homo sapiens
  misc_RNA (1)...(19): siRNA sense strand
ccaaggaguucacaaacca

SEQ ID NO: 2086196 - RNA, 19 nt, Homo sapiens
  misc_RNA (1)...(19): siRNA sense strand
ggacuugaaccuagaagau

SEQ ID NO: 2086197 - RNA, 19 nt, Homo sapiens
  misc_RNA (1)...(19): siRNA sense strand
acacaaggcugcccgucuu

SEQ ID NO: 2086198 - RNA, 19 nt, Homo sapiens
  misc_RNA (1)...(19): siRNA sense strand
gcaggauggaguacagaua

SEQ ID NO: 2086199 - RNA, 19 nt, Homo sapiens
  misc_RNA (1)...(19): siRNA sense strand
ccaaagauucugacugaug

SEQ ID NO: 2086200 - RNA, 19 nt, Homo sapiens
  misc_RNA (1)...(19): siRNA sense strand
gacaugacccugccaagga

SEQ ID NO: 2086201 - RNA, 19 nt, Homo sapiens
  misc_RNA (1)...(19): siRNA sense strand
ggagaccacccguuauaau

SEQ ID NO: 2086202 - RNA, 19 nt, Homo sapiens
  misc_RNA (1)...(19): siRNA sense strand
gauucugacugaugagaug

SEQ ID NO: 2086203 - RNA, 19 nt, Homo sapiens
  misc_RNA (1)...(19): siRNA sense strand
caggauggaguacagauaa

SEQ ID NO: 2086204 - RNA, 19 nt, Homo sapiens
  misc_RNA (1)...(19): siRNA sense strand
gggugacacugaagcaaga

SEQ ID NO: 2086205 - RNA, 19 nt, Homo sapiens
  misc_RNA (1)...(19): siRNA sense strand
gacuugaaccuagaagaua

SEQ ID NO: 2086206 - RNA, 19 nt, Homo sapiens
  misc_RNA (1)...(19): siRNA sense strand
guagagagcagggcauaug

SEQ ID NO: 2086207 - RNA, 19 nt, Homo sapiens
  misc_RNA (1)...(19): siRNA sense strand
gagaagcacccagaacaug

SEQ ID NO: 2086208 - RNA, 19 nt, Homo sapiens
  misc_RNA (1)...(19): siRNA sense strand
uggauggacucaaggcaaa

SEQ ID NO: 2086209 - RNA, 19 nt, Homo sapiens
  misc_RNA (1)...(19): siRNA sense strand
ccaugcagccgaagaaaga

SEQ ID NO: 2086210 - RNA, 19 nt, Homo sapiens
  misc_RNA (1)...(19): siRNA sense strand
aaggagaccacccguuaua

SEQ ID NO: 2086211 - RNA, 19 nt, Homo sapiens
  misc_RNA (1)...(19): siRNA sense strand
gaaagaggaggaagaagcu

SEQ ID NO: 2086212 - RNA, 19 nt, Homo sapiens
  misc_RNA (1)...(19): siRNA sense strand
gaagccaaacaaagacuug

SEQ ID NO: 2086213 - RNA, 19 nt, Homo sapiens
  misc_RNA (1)...(19): siRNA sense strand
gagaccacccguuauaauc

SEQ ID NO: 2086214 - RNA, 19 nt, Homo sapiens
  misc_RNA (1)...(19): siRNA sense strand
cuuccuggcucgucucaaa

SEQ ID NO: 2086215 - RNA, 19 nt, Homo sapiens
  misc_RNA (1)...(19): siRNA sense strand
aagcauggauggacucaag

SEQ ID NO: 2086216 - RNA, 19 nt, Homo sapiens
  misc_RNA (1)...(19): siRNA sense strand
ggaggaggacuugaaccua

SEQ ID NO: 2086217 - RNA, 19 nt, Homo sapiens
  misc_RNA (1)...(19): siRNA sense strand
aaaggaaugaugcagauga

SEQ ID NO: 2086218 - RNA, 19 nt, Homo sapiens
  misc_RNA (1)...(19): siRNA sense strand
aaaggucucagaugaaaga

SEQ ID NO: 2086219 - RNA, 19 nt, Homo sapiens
  misc_RNA (1)...(19): siRNA sense strand
gaaaaggcgacaucaagaa

SEQ ID NO: 2086220 - RNA, 19 nt, Homo sapiens
  misc_RNA (1)...(19): siRNA sense strand
caagcuugcucgccuagag

SEQ ID NO: 2086221 - RNA, 19 nt, Homo sapiens
  misc_RNA (1)...(19): siRNA sense strand
gcagagagcagagcaugca

SEQ ID NO: 2086222 - RNA, 19 nt, Homo sapiens
  misc_RNA (1)...(19): siRNA sense strand
cuaaagggaaugagaagga

SEQ ID NO: 2086223 - RNA, 19 nt, Homo sapiens
  misc_RNA (1)...(19): siRNA sense strand
aagagaggguacaacuaaa

SEQ ID NO: 2086224 - RNA, 19 nt, Homo sapiens
  misc_RNA (1)...(19): siRNA sense strand
ggguacaacuaaagggaau

SEQ ID NO: 2086225 - RNA, 19 nt, Homo sapiens
  misc_RNA (1)...(19): siRNA sense strand
ggagcggacccagcaauga

SEQ ID NO: 2086226 - RNA, 19 nt, Homo sapiens
  misc_RNA (1)...(19): siRNA sense strand
guacaacuaaagggaauga

SEQ ID NO: 2086227 - RNA, 19 nt, Homo sapiens
  misc_RNA (1)...(19): siRNA sense strand
uacagcaucugaaaggaau

SEQ ID NO: 2086228 - RNA, 19 nt, Homo sapiens
  misc_RNA (1)...(19): siRNA sense strand
ccaaucagucccucaggaa

SEQ ID NO: 2086229 - RNA, 19 nt, Homo sapiens
  misc_RNA (1)...(19): siRNA sense strand
gaccacccguuauaaucau

SEQ ID NO: 2086230 - RNA, 19 nt, Homo sapiens
  misc_RNA (1)...(19): siRNA sense strand
gaaugaugcagaugagaag

SEQ ID NO: 2086231 - RNA, 19 nt, Homo sapiens
  misc_RNA (1)...(19): siRNA sense strand
guggagagaagccaaacaa

SEQ ID NO: 2086232 - RNA, 19 nt, Homo sapiens
  misc_RNA (1)...(19): siRNA sense strand
ugaaagagaggguacaacu

SEQ ID NO: 2086233 - RNA, 19 nt, Homo sapiens
  misc_RNA (1)...(19): siRNA sense strand
cgucuugggaucacaauga

SEQ ID NO: 2086234 - RNA, 19 nt, Homo sapiens
  misc_RNA (1)...(19): siRNA sense strand
ccccaaagauucugacuga

SEQ ID NO: 2086235 - RNA, 19 nt, Homo sapiens
  misc_RNA (1)...(19): siRNA sense strand
gaaaggaaugaugcagaug

SEQ ID NO: 2086236 - RNA, 19 nt, Homo sapiens
  misc_RNA (1)...(19): siRNA sense strand
uagcagagagcaaaccaau

SEQ ID NO: 2086237 - RNA, 19 nt, Homo sapiens
  misc_RNA (1)...(19): siRNA sense strand
gaugaaagagaggguacaa

SEQ ID NO: 2086238 - RNA, 19 nt, Homo sapiens
  misc_RNA (1)...(19): siRNA sense strand
gcuacagcaucugaaagga

SEQ ID NO: 2086239 - RNA, 19 nt, Homo sapiens
  misc_RNA (1)...(19): siRNA sense strand
cuacagcaucugaaaggaa

SEQ ID NO: 2086240 - RNA, 19 nt, Homo sapiens
  misc_RNA (1)...(19): siRNA sense strand
caaucagucccucaggaaa

SEQ ID NO: 2086241 - RNA, 19 nt, Homo sapiens
  misc_RNA (1)...(19): siRNA sense strand
gauggaguacagauaagga

SEQ ID NO: 2086242 - RNA, 19 nt, Homo sapiens
  misc_RNA (1)...(19): siRNA sense strand
agauagaggugaggaaacu

SEQ ID NO: 2086243 - RNA, 19 nt, Homo sapiens
  misc_RNA (1)...(19): siRNA sense strand
gaagaaaaggcgacaucaa

SEQ ID NO: 2086244 - RNA, 19 nt, Homo sapiens
  misc_RNA (1)...(19): siRNA sense strand
uaaggagaccacccguuau

SEQ ID NO: 2086245 - RNA, 19 nt, Homo sapiens
  misc_RNA (1)...(19): siRNA sense strand
gucuugggaucacaaugaa

SEQ ID NO: 2086246 - RNA, 19 nt, Homo sapiens
  misc_RNA (1)...(19): siRNA sense strand
gaaugagcucuucaacaag

SEQ ID NO: 2086247 - RNA, 19 nt, Homo sapiens
  misc_RNA (1)...(19): siRNA sense strand
aaggcgacaucaagaagga

SEQ ID NO: 2086248 - RNA, 19 nt, Homo sapiens
  misc_RNA (1)...(19): siRNA sense strand
agaccacccguuauaauca

SEQ ID NO: 2086249 - RNA, 19 nt, Homo sapiens
  misc_RNA (1)...(19): siRNA sense strand
ggacgcugcaggaacaagu

SEQ ID NO: 2086250 - RNA, 19 nt, Homo sapiens
  misc_RNA (1)...(19): siRNA sense strand
caagagucgugggaugaag

SEQ ID NO: 2086251 - RNA, 19 nt, Homo sapiens
  misc_RNA (1)...(19): siRNA sense strand
ggaggacuugaaccuagaa

SEQ ID NO: 2086252 - RNA, 19 nt, Homo sapiens
  misc_RNA (1)...(19): siRNA sense strand
ggcagaaagaggaggaaga

SEQ ID NO: 2086253 - RNA, 19 nt, Homo sapiens
  misc_RNA (1)...(19): siRNA sense strand
auagaggugaggaaacuuu

SEQ ID NO: 2086254 - RNA, 19 nt, Homo sapiens
  misc_RNA (1)...(19): siRNA sense strand
uugaauagcagagagcaaa

SEQ ID NO: 2086255 - RNA, 19 nt, Homo sapiens
  misc_RNA (1)...(19): siRNA sense strand
acaacuaaagggaaugaga

SEQ ID NO: 2086256 - RNA, 19 nt, Homo sapiens
  misc_RNA (1)...(19): siRNA sense strand
aagaagcuacagcaucuga

SEQ ID NO: 2086257 - RNA, 19 nt, Homo sapiens
  misc_RNA (1)...(19): siRNA sense strand
gucaagagucgugggauga

SEQ ID NO: 2086258 - RNA, 19 nt, Homo sapiens
  misc_RNA (1)...(19): siRNA sense strand
ggaggaggaggacuugaac

SEQ ID NO: 2086259 - RNA, 19 nt, Homo sapiens
  misc_RNA (1)...(19): siRNA sense strand
gacccaugcagccgaagaa

SEQ ID NO: 2086260 - RNA, 19 nt, Homo sapiens
  misc_RNA (1)...(19): siRNA sense strand
gagaggguacaacuaaagg

SEQ ID NO: 2086261 - RNA, 19 nt, Homo sapiens
  misc_RNA (1)...(19): siRNA sense strand
gaaaggucucagaugaaag

SEQ ID NO: 2086262 - RNA, 19 nt, Homo sapiens
  misc_RNA (1)...(19): siRNA sense strand
gaugagaagcacccagaac

SEQ ID NO: 2086263 - RNA, 19 nt, Homo sapiens
  misc_RNA (1)...(19): siRNA sense strand
gccaaggaguucacaaacc

SEQ ID NO: 2086264 - RNA, 19 nt, Homo sapiens
  misc_RNA (1)...(19): siRNA sense strand
caacuugcuguaucagaag

SEQ ID NO: 2086265 - RNA, 19 nt, Homo sapiens
  misc_RNA (1)...(19): siRNA sense strand
acuugaaccuagaagauag

SEQ ID NO: 2086266 - RNA, 19 nt, Homo sapiens
  misc_RNA (1)...(19): siRNA sense strand
ggccggaaggagaauggua

SEQ ID NO: 2086267 - RNA, 19 nt, Homo sapiens
  misc_RNA (1)...(19): siRNA sense strand
gagcggacccagcaaugac

SEQ ID NO: 2086268 - RNA, 19 nt, Homo sapiens
  misc_RNA (1)...(19): siRNA sense strand
aggaggacuugaaccuaga

SEQ ID NO: 2086269 - RNA, 19 nt, Homo sapiens
  misc_RNA (1)...(19): siRNA sense strand
aagcccaacuugcuguauc

SEQ ID NO: 2086270 - RNA, 19 nt, Homo sapiens
  misc_RNA (1)...(19): siRNA sense strand
acaagacugcggccaacuu

SEQ ID NO: 2086271 - RNA, 19 nt, Homo sapiens
  misc_RNA (1)...(19): siRNA sense strand
gggaauugaauagcagaga

SEQ ID NO: 2086272 - RNA, 19 nt, Homo sapiens
  misc_RNA (1)...(19): siRNA sense strand
gguggaaugagcucuucaa

SEQ ID NO: 2086273 - RNA, 19 nt, Homo sapiens
  misc_RNA (1)...(19): siRNA sense strand
ggaaugagcucuucaacaa

SEQ ID NO: 2086274 - RNA, 19 nt, Homo sapiens
  misc_RNA (1)...(19): siRNA sense strand
cuaaggagaccacccguua

SEQ ID NO: 2086275 - RNA, 19 nt, Homo sapiens
  misc_RNA (1)...(19): siRNA sense strand
ccaacuugcuguaucagaa

SEQ ID NO: 2086276 - RNA, 19 nt, Homo sapiens
  misc_RNA (1)...(19): siRNA sense strand
gaaggagaaugguaucacu

SEQ ID NO: 2086277 - RNA, 19 nt, Homo sapiens
  misc_RNA (1)...(19): siRNA sense strand
ccaaggaguucacaaacca

SEQ ID NO: 2086278 - RNA, 19 nt, Homo sapiens
  misc_RNA (1)...(19): siRNA sense strand
gcaggauggaguacagaua

SEQ ID NO: 2086279 - RNA, 19 nt, Homo sapiens
  misc_RNA (1)...(19): siRNA sense strand
gacaugacccugccaagga

SEQ ID NO: 2086280 - RNA, 19 nt, Homo sapiens
  misc_RNA (1)...(19): siRNA sense strand
ggagaccacccguuauaau

SEQ ID NO: 2086281 - RNA, 19 nt, Homo sapiens
  misc_RNA (1)...(19): siRNA sense strand
caggauggaguacagauaa

SEQ ID NO: 2086282 - RNA, 19 nt, Homo sapiens
  misc_RNA (1)...(19): siRNA sense strand
gggugacacugaagcaaga

SEQ ID NO: 2086283 - RNA, 19 nt, Homo sapiens
  misc_RNA (1)...(19): siRNA sense strand
uggauggacucaaggcaaa

SEQ ID NO: 2086284 - RNA, 19 nt, Homo sapiens
  misc_RNA (1)...(19): siRNA sense strand
aaggagaccacccguuaua

SEQ ID NO: 2086285 - RNA, 19 nt, Homo sapiens
  misc_RNA (1)...(19): siRNA sense strand
gagaccacccguuauaauc

SEQ ID NO: 2086286 - RNA, 19 nt, Homo sapiens
  misc_RNA (1)...(19): siRNA sense strand
aagcauggauggacucaag

SEQ ID NO: 2086287 - RNA, 19 nt, Homo sapiens
  misc_RNA (1)...(19): siRNA sense strand
gaccacccguuauaaucau

SEQ ID NO: 2086288 - RNA, 19 nt, Homo sapiens
  misc_RNA (1)...(19): siRNA sense strand
gauggaguacagauaagga

SEQ ID NO: 2086289 - RNA, 19 nt, Homo sapiens
  misc_RNA (1)...(19): siRNA sense strand
uaaggagaccacccguuau

SEQ ID NO: 2086290 - RNA, 19 nt, Homo sapiens
  misc_RNA (1)...(19): siRNA sense strand
gaaugagcucuucaacaag

SEQ ID NO: 2086291 - RNA, 19 nt, Homo sapiens
  misc_RNA (1)...(19): siRNA sense strand
agaccacccguuauaauca

SEQ ID NO: 2086292 - RNA, 19 nt, Homo sapiens
  misc_RNA (1)...(19): siRNA sense strand
caagagucgugggaugaag

SEQ ID NO: 2086293 - RNA, 19 nt, Homo sapiens
  misc_RNA (1)...(19): siRNA sense strand
gccaaggaguucacaaacc

SEQ ID NO: 2086294 - RNA, 19 nt, Homo sapiens
  misc_RNA (1)...(19): siRNA sense strand
gucaagagucgugggauga

SEQ ID NO: 2086295 - RNA, 19 nt, Homo sapiens
  misc_RNA (1)...(19): siRNA sense strand
ggccggaaggagaauggua

SEQ ID NO: 2086296 - RNA, 19 nt, Homo sapiens
  misc_RNA (1)...(19): siRNA sense strand
caacuugcuguaucagaag

SEQ ID NO: 2086297 - RNA, 19 nt, Homo sapiens
  misc_RNA (1)...(19): siRNA sense strand
gguggaaugagcucuucaa

SEQ ID NO: 2086298 - RNA, 19 nt, Homo sapiens
  misc_RNA (1)...(19): siRNA sense strand
aagcccaacuugcuguauc

SEQ ID NO: 2086299 - RNA, 19 nt, Homo sapiens
  misc_RNA (1)...(19): siRNA sense strand
gccggaaggagaaugguau

SEQ ID NO: 2086300 - RNA, 19 nt, Homo sapiens
  misc_RNA (1)...(19): siRNA sense strand
acaagacugcggccaacuu

SEQ ID NO: 2086301 - RNA, 19 nt, Homo sapiens
  misc_RNA (1)...(19): siRNA sense strand
ggaaugagcucuucaacaa

SEQ ID NO: 2086302 - RNA, 19 nt, Homo sapiens
  misc_RNA (1)...(19): siRNA sense strand
ggaaaggucucagaugaaa

SEQ ID NO: 2086303 - RNA, 19 nt, Homo sapiens
  misc_RNA (1)...(19): siRNA sense strand
ggaagaagcuacagcaucu

SEQ ID NO: 2086304 - RNA, 19 nt, Homo sapiens
  misc_RNA (1)...(19): siRNA sense strand
caaagauucugacugauga

SEQ ID NO: 2086305 - RNA, 19 nt, Homo sapiens
  misc_RNA (1)...(19): siRNA sense strand
gagagaagccaaacaaaga

SEQ ID NO: 2086306 - RNA, 19 nt, Homo sapiens
  misc_RNA (1)...(19): siRNA sense strand
gcagagagcaaaccaauca

SEQ ID NO: 2086307 - RNA, 19 nt, Homo sapiens
  misc_RNA (1)...(19): siRNA sense strand
ggaggacgcugcaggaaca

SEQ ID NO: 2086308 - RNA, 19 nt, Homo sapiens
  misc_RNA (1)...(19): siRNA sense strand
gaaagagaggguacaacua

SEQ ID NO: 2086309 - RNA, 19 nt, Homo sapiens
  misc_RNA (1)...(19): siRNA sense strand
aaggaaaggucucagauga

SEQ ID NO: 2086310 - RNA, 19 nt, Homo sapiens
  misc_RNA (1)...(19): siRNA sense strand
gaaagaagaggcagcaaca

SEQ ID NO: 2086311 - RNA, 19 nt, Homo sapiens
  misc_RNA (1)...(19): siRNA sense strand
aaagagaggguacaacuaa

SEQ ID NO: 2086312 - RNA, 19 nt, Homo sapiens
  misc_RNA (1)...(19): siRNA sense strand
gaagauagaggugaggaaa

SEQ ID NO: 2086313 - RNA, 19 nt, Homo sapiens
  misc_RNA (1)...(19): siRNA sense strand
cuaaggagaccacccguua

SEQ ID NO: 2086314 - RNA, 19 nt, Homo sapiens
  misc_RNA (1)...(19): siRNA sense strand
ccaacuugcuguaucagaa

SEQ ID NO: 2086315 - RNA, 19 nt, Homo sapiens
  misc_RNA (1)...(19): siRNA sense strand
gcagaaagaggaggaagaa

SEQ ID NO: 2086316 - RNA, 19 nt, Homo sapiens
  misc_RNA (1)...(19): siRNA sense strand
ggaaugaugcagaugagaa

SEQ ID NO: 2086317 - RNA, 19 nt, Homo sapiens
  misc_RNA (1)...(19): siRNA sense strand
gaaggagaaugguaucacu

SEQ ID NO: 2086318 - RNA, 19 nt, Homo sapiens
  misc_RNA (1)...(19): siRNA sense strand
gaagcuacagcaucugaaa

SEQ ID NO: 2086319 - RNA, 19 nt, Homo sapiens
  misc_RNA (1)...(19): siRNA sense strand
caacuaaagggaaugagaa

SEQ ID NO: 2086320 - RNA, 19 nt, Homo sapiens
  misc_RNA (1)...(19): siRNA sense strand
gaaggaaaggucucagaug

SEQ ID NO: 2086321 - RNA, 19 nt, Homo sapiens
  misc_RNA (1)...(19): siRNA sense strand
ugaaaggaaugaugcagau

SEQ ID NO: 2086322 - RNA, 19 nt, Homo sapiens
  misc_RNA (1)...(19): siRNA sense strand
ggagagaagccaaacaaag

SEQ ID NO: 2086323 - RNA, 19 nt, Homo sapiens
  misc_RNA (1)...(19): siRNA sense strand
ccaaggaguucacaaacca

SEQ ID NO: 2086324 - RNA, 19 nt, Homo sapiens
  misc_RNA (1)...(19): siRNA sense strand
ggacuugaaccuagaagau

SEQ ID NO: 2086325 - RNA, 19 nt, Homo sapiens
  misc_RNA (1)...(19): siRNA sense strand
acacaaggcugcccgucuu

SEQ ID NO: 2086326 - RNA, 19 nt, Homo sapiens
  misc_RNA (1)...(19): siRNA sense strand
gcaggauggaguacagaua

SEQ ID NO: 2086327 - RNA, 19 nt, Homo sapiens
  misc_RNA (1)...(19): siRNA sense strand
ccaaagauucugacugaug

SEQ ID NO: 2086328 - RNA, 19 nt, Homo sapiens
  misc_RNA (1)...(19): siRNA sense strand
gacaugacccugccaagga

SEQ ID NO: 2086329 - RNA, 19 nt, Homo sapiens
  misc_RNA (1)...(19): siRNA sense strand
ggagaccacccguuauaau

SEQ ID NO: 2086330 - RNA, 19 nt, Homo sapiens
  misc_RNA (1)...(19): siRNA sense strand
gauucugacugaugagaug

SEQ ID NO: 2086331 - RNA, 19 nt, Homo sapiens
  misc_RNA (1)...(19): siRNA sense strand
caggauggaguacagauaa

SEQ ID NO: 2086332 - RNA, 19 nt, Homo sapiens
  misc_RNA (1)...(19): siRNA sense strand
gggugacacugaagcaaga

SEQ ID NO: 2086333 - RNA, 19 nt, Homo sapiens
  misc_RNA (1)...(19): siRNA sense strand
gacuugaaccuagaagaua

SEQ ID NO: 2086334 - RNA, 19 nt, Homo sapiens
  misc_RNA (1)...(19): siRNA sense strand
guagagagcagggcauaug

SEQ ID NO: 2086335 - RNA, 19 nt, Homo sapiens
  misc_RNA (1)...(19): siRNA sense strand
gagaagcacccagaacaug

SEQ ID NO: 2086336 - RNA, 19 nt, Homo sapiens
  misc_RNA (1)...(19): siRNA sense strand
uggauggacucaaggcaaa

SEQ ID NO: 2086337 - RNA, 19 nt, Homo sapiens
  misc_RNA (1)...(19): siRNA sense strand
ccaugcagccgaagaaaga

SEQ ID NO: 2086338 - RNA, 19 nt, Homo sapiens
  misc_RNA (1)...(19): siRNA sense strand
aaggagaccacccguuaua

SEQ ID NO: 2086339 - RNA, 19 nt, Homo sapiens
  misc_RNA (1)...(19): siRNA sense strand
gaaagaggaggaagaagcu

SEQ ID NO: 2086340 - RNA, 19 nt, Homo sapiens
  misc_RNA (1)...(19): siRNA sense strand
gaagccaaacaaagacuug

SEQ ID NO: 2086341 - RNA, 19 nt, Homo sapiens
  misc_RNA (1)...(19): siRNA sense strand
gagaccacccguuauaauc

SEQ ID NO: 2086342 - RNA, 19 nt, Homo sapiens
  misc_RNA (1)...(19): siRNA sense strand
cuuccuggcucgucucaaa

SEQ ID NO: 2086343 - RNA, 19 nt, Homo sapiens
  misc_RNA (1)...(19): siRNA sense strand
ggaggaggacuugaaccua

SEQ ID NO: 2086344 - RNA, 19 nt, Homo sapiens
  misc_RNA (1)...(19): siRNA sense strand
aagcauggauggacucaag

SEQ ID NO: 2086345 - RNA, 19 nt, Homo sapiens
  misc_RNA (1)...(19): siRNA sense strand
aaaggaaugaugcagauga

SEQ ID NO: 2086346 - RNA, 19 nt, Homo sapiens
  misc_RNA (1)...(19): siRNA sense strand
aaaggucucagaugaaaga

SEQ ID NO: 2086347 - RNA, 19 nt, Homo sapiens
  misc_RNA (1)...(19): siRNA sense strand
gaaaaggcgacaucaagaa

SEQ ID NO: 2086348 - RNA, 19 nt, Homo sapiens
  misc_RNA (1)...(19): siRNA sense strand
caagcuugcucgccuagag

SEQ ID NO: 2086349 - RNA, 19 nt, Homo sapiens
  misc_RNA (1)...(19): siRNA sense strand
gcagagagcagagcaugca

SEQ ID NO: 2086350 - RNA, 19 nt, Homo sapiens
  misc_RNA (1)...(19): siRNA sense strand
cuaaagggaaugagaagga

SEQ ID NO: 2086351 - RNA, 19 nt, Homo sapiens
  misc_RNA (1)...(19): siRNA sense strand
aagagaggguacaacuaaa

SEQ ID NO: 2086352 - RNA, 19 nt, Homo sapiens
  misc_RNA (1)...(19): siRNA sense strand
ggguacaacuaaagggaau

SEQ ID NO: 2086353 - RNA, 19 nt, Homo sapiens
  misc_RNA (1)...(19): siRNA sense strand
uacagcaucugaaaggaau

SEQ ID NO: 2086354 - RNA, 19 nt, Homo sapiens
  misc_RNA (1)...(19): siRNA sense strand
guacaacuaaagggaauga

SEQ ID NO: 2086355 - RNA, 19 nt, Homo sapiens
  misc_RNA (1)...(19): siRNA sense strand
ccaaucagucccucaggaa

SEQ ID NO: 2086356 - RNA, 19 nt, Homo sapiens
  misc_RNA (1)...(19): siRNA sense strand
gaccacccguuauaaucau

SEQ ID NO: 2086357 - RNA, 19 nt, Homo sapiens
  misc_RNA (1)...(19): siRNA sense strand
gaaugaugcagaugagaag

SEQ ID NO: 2086358 - RNA, 19 nt, Homo sapiens
  misc_RNA (1)...(19): siRNA sense strand
guggagagaagccaaacaa

SEQ ID NO: 2086359 - RNA, 19 nt, Homo sapiens
  misc_RNA (1)...(19): siRNA sense strand
ugaaagagaggguacaacu

SEQ ID NO: 2086360 - RNA, 19 nt, Homo sapiens
  misc_RNA (1)...(19): siRNA sense strand
cgucuugggaucacaauga

SEQ ID NO: 2086361 - RNA, 19 nt, Homo sapiens
  misc_RNA (1)...(19): siRNA sense strand
ccccaaagauucugacuga

SEQ ID NO: 2086362 - RNA, 19 nt, Homo sapiens
  misc_RNA (1)...(19): siRNA sense strand
gaaaggaaugaugcagaug

SEQ ID NO: 2086363 - RNA, 19 nt, Homo sapiens
  misc_RNA (1)...(19): siRNA sense strand
uagcagagagcaaaccaau

SEQ ID NO: 2086364 - RNA, 19 nt, Homo sapiens
  misc_RNA (1)...(19): siRNA sense strand
gaugaaagagaggguacaa

SEQ ID NO: 2086365 - RNA, 19 nt, Homo sapiens
  misc_RNA (1)...(19): siRNA sense strand
gcuacagcaucugaaagga

SEQ ID NO: 2086366 - RNA, 19 nt, Homo sapiens
  misc_RNA (1)...(19): siRNA sense strand
cuacagcaucugaaaggaa

SEQ ID NO: 2086367 - RNA, 19 nt, Homo sapiens
  misc_RNA (1)...(19): siRNA sense strand
caaucagucccucaggaaa

SEQ ID NO: 2086368 - RNA, 19 nt, Homo sapiens
  misc_RNA (1)...(19): siRNA sense strand
gauggaguacagauaagga

SEQ ID NO: 2086369 - RNA, 19 nt, Homo sapiens
  misc_RNA (1)...(19): siRNA sense strand
agauagaggugaggaaacu

SEQ ID NO: 2086370 - RNA, 19 nt, Homo sapiens
  misc_RNA (1)...(19): siRNA sense strand
gaagaaaaggcgacaucaa

SEQ ID NO: 2086371 - RNA, 19 nt, Homo sapiens
  misc_RNA (1)...(19): siRNA sense strand
uaaggagaccacccguuau

SEQ ID NO: 2086372 - RNA, 19 nt, Homo sapiens
  misc_RNA (1)...(19): siRNA sense strand
gucuugggaucacaaugaa

SEQ ID NO: 2086373 - RNA, 19 nt, Homo sapiens
  misc_RNA (1)...(19): siRNA sense strand
aaggcgacaucaagaagga

SEQ ID NO: 2086374 - RNA, 19 nt, Homo sapiens
  misc_RNA (1)...(19): siRNA sense strand
gaaugagcucuucaacaag

SEQ ID NO: 2086375 - RNA, 19 nt, Homo sapiens
  misc_RNA (1)...(19): siRNA sense strand
agaccacccguuauaauca

SEQ ID NO: 2086376 - RNA, 19 nt, Homo sapiens
  misc_RNA (1)...(19): siRNA sense strand
ggacgcugcaggaacaagu

SEQ ID NO: 2086377 - RNA, 19 nt, Homo sapiens
  misc_RNA (1)...(19): siRNA sense strand
caagagucgugggaugaag

SEQ ID NO: 2086378 - RNA, 19 nt, Homo sapiens
  misc_RNA (1)...(19): siRNA sense strand
ggaggacuugaaccuagaa

SEQ ID NO: 2086379 - RNA, 19 nt, Homo sapiens
  misc_RNA (1)...(19): siRNA sense strand
ggcagaaagaggaggaaga

SEQ ID NO: 2086380 - RNA, 19 nt, Homo sapiens
  misc_RNA (1)...(19): siRNA sense strand
auagaggugaggaaacuuu

SEQ ID NO: 2086381 - RNA, 19 nt, Homo sapiens
  misc_RNA (1)...(19): siRNA sense strand
uugaauagcagagagcaaa

SEQ ID NO: 2086382 - RNA, 19 nt, Homo sapiens
  misc_RNA (1)...(19): siRNA sense strand
acaacuaaagggaaugaga

SEQ ID NO: 2086383 - RNA, 19 nt, Homo sapiens
  misc_RNA (1)...(19): siRNA sense strand
aagaagcuacagcaucuga

SEQ ID NO: 2086384 - RNA, 19 nt, Homo sapiens
  misc_RNA (1)...(19): siRNA sense strand
gaugagaagcacccagaac

SEQ ID NO: 2086385 - RNA, 19 nt, Homo sapiens
  misc_RNA (1)...(19): siRNA sense strand
ggaggaggaggacuugaac

SEQ ID NO: 2086386 - RNA, 19 nt, Homo sapiens
  misc_RNA (1)...(19): siRNA sense strand
gacccaugcagccgaagaa

SEQ ID NO: 2086387 - RNA, 19 nt, Homo sapiens
  misc_RNA (1)...(19): siRNA sense strand
gucaagagucgugggauga

SEQ ID NO: 2086388 - RNA, 19 nt, Homo sapiens
  misc_RNA (1)...(19): siRNA sense strand
gagaggguacaacuaaagg

SEQ ID NO: 2086389 - RNA, 19 nt, Homo sapiens
  misc_RNA (1)...(19): siRNA sense strand
gccaaggaguucacaaacc

SEQ ID NO: 2086390 - RNA, 19 nt, Homo sapiens
  misc_RNA (1)...(19): siRNA sense strand
gaaaggucucagaugaaag

SEQ ID NO: 2086391 - RNA, 19 nt, Homo sapiens
  misc_RNA (1)...(19): siRNA sense strand
ggccggaaggagaauggua

SEQ ID NO: 2086392 - RNA, 19 nt, Homo sapiens
  misc_RNA (1)...(19): siRNA sense strand
acuugaaccuagaagauag

SEQ ID NO: 2086393 - RNA, 19 nt, Homo sapiens
  misc_RNA (1)...(19): siRNA sense strand
caacuugcuguaucagaag

SEQ ID NO: 2086394 - RNA, 19 nt, Homo sapiens
  misc_RNA (1)...(19): siRNA sense strand
aagcccaacuugcuguauc

SEQ ID NO: 2086395 - RNA, 19 nt, Homo sapiens
  misc_RNA (1)...(19): siRNA sense strand
aggaggacuugaaccuaga

SEQ ID NO: 2086396 - RNA, 19 nt, Homo sapiens
  misc_RNA (1)...(19): siRNA sense strand
gggaauugaauagcagaga

SEQ ID NO: 2086397 - RNA, 19 nt, Homo sapiens
  misc_RNA (1)...(19): siRNA sense strand
gguggaaugagcucuucaa

SEQ ID NO: 2086398 - RNA, 19 nt, Homo sapiens
  misc_RNA (1)...(19): siRNA sense strand
acaagacugcggccaacuu

SEQ ID NO: 2086399 - RNA, 19 nt, Homo sapiens
  misc_RNA (1)...(19): siRNA sense strand
gccggaaggagaaugguau

SEQ ID NO: 2086400 - RNA, 19 nt, Homo sapiens
  misc_RNA (1)...(19): siRNA sense strand
ggaaugagcucuucaacaa

SEQ ID NO: 2086401 - RNA, 19 nt, Homo sapiens
  misc_RNA (1)...(19): siRNA sense strand
ggaaaggucucagaugaaa

SEQ ID NO: 2086402 - RNA, 19 nt, Homo sapiens
  misc_RNA (1)...(19): siRNA sense strand
ggaagaagcuacagcaucu

SEQ ID NO: 2086403 - RNA, 19 nt, Homo sapiens
  misc_RNA (1)...(19): siRNA sense strand
caaagauucugacugauga

SEQ ID NO: 2086404 - RNA, 19 nt, Homo sapiens
  misc_RNA (1)...(19): siRNA sense strand
gagagaagccaaacaaaga

SEQ ID NO: 2086405 - RNA, 19 nt, Homo sapiens
  misc_RNA (1)...(19): siRNA sense strand
gcagagagcaaaccaauca

SEQ ID NO: 2086406 - RNA, 19 nt, Homo sapiens
  misc_RNA (1)...(19): siRNA sense strand
ggaggacgcugcaggaaca

SEQ ID NO: 2086407 - RNA, 19 nt, Homo sapiens
  misc_RNA (1)...(19): siRNA sense strand
gaaagagaggguacaacua

SEQ ID NO: 2086408 - RNA, 19 nt, Homo sapiens
  misc_RNA (1)...(19): siRNA sense strand
aaggaaaggucucagauga

SEQ ID NO: 2086409 - RNA, 19 nt, Homo sapiens
  misc_RNA (1)...(19): siRNA sense strand
gaaagaagaggcagcaaca

SEQ ID NO: 2086410 - RNA, 19 nt, Homo sapiens
  misc_RNA (1)...(19): siRNA sense strand
aaagagaggguacaacuaa

SEQ ID NO: 2086411 - RNA, 19 nt, Homo sapiens
  misc_RNA (1)...(19): siRNA sense strand
gaagauagaggugaggaaa

SEQ ID NO: 2086412 - RNA, 19 nt, Homo sapiens
  misc_RNA (1)...(19): siRNA sense strand
cuaaggagaccacccguua

SEQ ID NO: 2086413 - RNA, 19 nt, Homo sapiens
  misc_RNA (1)...(19): siRNA sense strand
ccaacuugcuguaucagaa

SEQ ID NO: 2086414 - RNA, 19 nt, Homo sapiens
  misc_RNA (1)...(19): siRNA sense strand
gcagaaagaggaggaagaa

SEQ ID NO: 2086415 - RNA, 19 nt, Homo sapiens
  misc_RNA (1)...(19): siRNA sense strand
ggaaugaugcagaugagaa

SEQ ID NO: 2086416 - RNA, 19 nt, Homo sapiens
  misc_RNA (1)...(19): siRNA sense strand
gaaggagaaugguaucacu

SEQ ID NO: 2086417 - RNA, 19 nt, Homo sapiens
  misc_RNA (1)...(19): siRNA sense strand
gaagcuacagcaucugaaa

SEQ ID NO: 2086418 - RNA, 19 nt, Homo sapiens
  misc_RNA (1)...(19): siRNA sense strand
caacuaaagggaaugagaa

SEQ ID NO: 2086419 - RNA, 19 nt, Homo sapiens
  misc_RNA (1)...(19): siRNA sense strand
gaaggaaaggucucagaug

SEQ ID NO: 2086420 - RNA, 19 nt, Homo sapiens
  misc_RNA (1)...(19): siRNA sense strand
ugaaaggaaugaugcagau

SEQ ID NO: 2086421 - RNA, 19 nt, Homo sapiens
  misc_RNA (1)...(19): siRNA sense strand
ggagagaagccaaacaaag

SEQ ID NO: 2086422 - RNA, 19 nt, Homo sapiens
  misc_RNA (1)...(19): siRNA sense strand
ccaaggaguucacaaacca

SEQ ID NO: 2086423 - RNA, 19 nt, Homo sapiens
  misc_RNA (1)...(19): siRNA sense strand
ggacuugaaccuagaagau

SEQ ID NO: 2086424 - RNA, 19 nt, Homo sapiens
  misc_RNA (1)...(19): siRNA sense strand
acacaaggcugcccgucuu

SEQ ID NO: 2086425 - RNA, 19 nt, Homo sapiens
  misc_RNA (1)...(19): siRNA sense strand
gcaggauggaguacagaua

SEQ ID NO: 2086426 - RNA, 19 nt, Homo sapiens
  misc_RNA (1)...(19): siRNA sense strand
ccaaagauucugacugaug

SEQ ID NO: 2086427 - RNA, 19 nt, Homo sapiens
  misc_RNA (1)...(19): siRNA sense strand
gacaugacccugccaagga

SEQ ID NO: 2086428 - RNA, 19 nt, Homo sapiens
  misc_RNA (1)...(19): siRNA sense strand
ggagaccacccguuauaau

SEQ ID NO: 2086429 - RNA, 19 nt, Homo sapiens
  misc_RNA (1)...(19): siRNA sense strand
gauucugacugaugagaug

SEQ ID NO: 2086430 - RNA, 19 nt, Homo sapiens
  misc_RNA (1)...(19): siRNA sense strand
caggauggaguacagauaa

SEQ ID NO: 2086431 - RNA, 19 nt, Homo sapiens
  misc_RNA (1)...(19): siRNA sense strand
gggugacacugaagcaaga

SEQ ID NO: 2086432 - RNA, 19 nt, Homo sapiens
  misc_RNA (1)...(19): siRNA sense strand
gacuugaaccuagaagaua

SEQ ID NO: 2086433 - RNA, 19 nt, Homo sapiens
  misc_RNA (1)...(19): siRNA sense strand
guagagagcagggcauaug

SEQ ID NO: 2086434 - RNA, 19 nt, Homo sapiens
  misc_RNA (1)...(19): siRNA sense strand
gagaagcacccagaacaug

SEQ ID NO: 2086435 - RNA, 19 nt, Homo sapiens
  misc_RNA (1)...(19): siRNA sense strand
uggauggacucaaggcaaa

SEQ ID NO: 2086436 - RNA, 19 nt, Homo sapiens
  misc_RNA (1)...(19): siRNA sense strand
ccaugcagccgaagaaaga

SEQ ID NO: 2086437 - RNA, 19 nt, Homo sapiens
  misc_RNA (1)...(19): siRNA sense strand
aaggagaccacccguuaua

SEQ ID NO: 2086438 - RNA, 19 nt, Homo sapiens
  misc_RNA (1)...(19): siRNA sense strand
gaaagaggaggaagaagcu

SEQ ID NO: 2086439 - RNA, 19 nt, Homo sapiens
  misc_RNA (1)...(19): siRNA sense strand
gaagccaaacaaagacuug

SEQ ID NO: 2086440 - RNA, 19 nt, Homo sapiens
  misc_RNA (1)...(19): siRNA sense strand
gagaccacccguuauaauc

SEQ ID NO: 2086441 - RNA, 19 nt, Homo sapiens
  misc_RNA (1)...(19): siRNA sense strand
cuuccuggcucgucucaaa

SEQ ID NO: 2086442 - RNA, 19 nt, Homo sapiens
  misc_RNA (1)...(19): siRNA sense strand
aagcauggauggacucaag

SEQ ID NO: 2086443 - RNA, 19 nt, Homo sapiens
  misc_RNA (1)...(19): siRNA sense strand
ggaggaggacuugaaccua

SEQ ID NO: 2086444 - RNA, 19 nt, Homo sapiens
  misc_RNA (1)...(19): siRNA sense strand
aaaggaaugaugcagauga

SEQ ID NO: 2086445 - RNA, 19 nt, Homo sapiens
  misc_RNA (1)...(19): siRNA sense strand
aaaggucucagaugaaaga

SEQ ID NO: 2086446 - RNA, 19 nt, Homo sapiens
  misc_RNA (1)...(19): siRNA sense strand
gaaaaggcgacaucaagaa

SEQ ID NO: 2086447 - RNA, 19 nt, Homo sapiens
  misc_RNA (1)...(19): siRNA sense strand
caagcuugcucgccuagag

SEQ ID NO: 2086448 - RNA, 19 nt, Homo sapiens
  misc_RNA (1)...(19): siRNA sense strand
gcagagagcagagcaugca

SEQ ID NO: 2086449 - RNA, 19 nt, Homo sapiens
  misc_RNA (1)...(19): siRNA sense strand
cuaaagggaaugagaagga

SEQ ID NO: 2086450 - RNA, 19 nt, Homo sapiens
  misc_RNA (1)...(19): siRNA sense strand
aagagaggguacaacuaaa

SEQ ID NO: 2086451 - RNA, 19 nt, Homo sapiens
  misc_RNA (1)...(19): siRNA sense strand
ggguacaacuaaagggaau

SEQ ID NO: 2086452 - RNA, 19 nt, Homo sapiens
  misc_RNA (1)...(19): siRNA sense strand
uacagcaucugaaaggaau

SEQ ID NO: 2086453 - RNA, 19 nt, Homo sapiens
  misc_RNA (1)...(19): siRNA sense strand
guacaacuaaagggaauga

SEQ ID NO: 2086454 - RNA, 19 nt, Homo sapiens
  misc_RNA (1)...(19): siRNA sense strand
ggagcggacccagcaauga

SEQ ID NO: 2086455 - RNA, 19 nt, Homo sapiens
  misc_RNA (1)...(19): siRNA sense strand
ccaaucagucccucaggaa

SEQ ID NO: 2086456 - RNA, 19 nt, Homo sapiens
  misc_RNA (1)...(19): siRNA sense strand
gaccacccguuauaaucau

SEQ ID NO: 2086457 - RNA, 19 nt, Homo sapiens
  misc_RNA (1)...(19): siRNA sense strand
gaaugaugcagaugagaag

SEQ ID NO: 2086458 - RNA, 19 nt, Homo sapiens
  misc_RNA (1)...(19): siRNA sense strand
guggagagaagccaaacaa

SEQ ID NO: 2086459 - RNA, 19 nt, Homo sapiens
  misc_RNA (1)...(19): siRNA sense strand
ugaaagagaggguacaacu

SEQ ID NO: 2086460 - RNA, 19 nt, Homo sapiens
  misc_RNA (1)...(19): siRNA sense strand
cgucuugggaucacaauga

SEQ ID NO: 2086461 - RNA, 19 nt, Homo sapiens
  misc_RNA (1)...(19): siRNA sense strand
ccccaaagauucugacuga

SEQ ID NO: 2086462 - RNA, 19 nt, Homo sapiens
  misc_RNA (1)...(19): siRNA sense strand
gaaaggaaugaugcagaug

SEQ ID NO: 2086463 - RNA, 19 nt, Homo sapiens
  misc_RNA (1)...(19): siRNA sense strand
uagcagagagcaaaccaau

SEQ ID NO: 2086464 - RNA, 19 nt, Homo sapiens
  misc_RNA (1)...(19): siRNA sense strand
gaugaaagagaggguacaa

SEQ ID NO: 2086465 - RNA, 19 nt, Homo sapiens
  misc_RNA (1)...(19): siRNA sense strand
gcuacagcaucugaaagga

SEQ ID NO: 2086466 - RNA, 19 nt, Homo sapiens
  misc_RNA (1)...(19): siRNA sense strand
cuacagcaucugaaaggaa

SEQ ID NO: 2086467 - RNA, 19 nt, Homo sapiens
  misc_RNA (1)...(19): siRNA sense strand
caaucagucccucaggaaa

SEQ ID NO: 2086468 - RNA, 19 nt, Homo sapiens
  misc_RNA (1)...(19): siRNA sense strand
gauggaguacagauaagga

SEQ ID NO: 2086469 - RNA, 19 nt, Homo sapiens
  misc_RNA (1)...(19): siRNA sense strand
agauagaggugaggaaacu

SEQ ID NO: 2086470 - RNA, 19 nt, Homo sapiens
  misc_RNA (1)...(19): siRNA sense strand
gaagaaaaggcgacaucaa

SEQ ID NO: 2086471 - RNA, 19 nt, Homo sapiens
  misc_RNA (1)...(19): siRNA sense strand
caagucagguccggcacau

SEQ ID NO: 2086472 - RNA, 19 nt, Homo sapiens
  misc_RNA (1)...(19): siRNA sense strand
uaaggagaccacccguuau

SEQ ID NO: 2086473 - RNA, 19 nt, Homo sapiens
  misc_RNA (1)...(19): siRNA sense strand
gucuugggaucacaaugaa

SEQ ID NO: 2086474 - RNA, 19 nt, Homo sapiens
  misc_RNA (1)...(19): siRNA sense strand
gaaugagcucuucaacaag

SEQ ID NO: 2086475 - RNA, 19 nt, Homo sapiens
  misc_RNA (1)...(19): siRNA sense strand
aaggcgacaucaagaagga

SEQ ID NO: 2086476 - RNA, 19 nt, Homo sapiens
  misc_RNA (1)...(19): siRNA sense strand
agaccacccguuauaauca

SEQ ID NO: 2086477 - RNA, 19 nt, Homo sapiens
  misc_RNA (1)...(19): siRNA sense strand
caagagucgugggaugaag

SEQ ID NO: 2086478 - RNA, 19 nt, Homo sapiens
  misc_RNA (1)...(19): siRNA sense strand
ggacgcugcaggaacaagu

SEQ ID NO: 2086479 - RNA, 19 nt, Homo sapiens
  misc_RNA (1)...(19): siRNA sense strand
ucagguccggcacauguuu

SEQ ID NO: 2086480 - RNA, 19 nt, Homo sapiens
  misc_RNA (1)...(19): siRNA sense strand
ggaggacuugaaccuagaa

SEQ ID NO: 2086481 - RNA, 19 nt, Homo sapiens
  misc_RNA (1)...(19): siRNA sense strand
ggcagaaagaggaggaaga

SEQ ID NO: 2086482 - RNA, 19 nt, Homo sapiens
  misc_RNA (1)...(19): siRNA sense strand
auagaggugaggaaacuuu

SEQ ID NO: 2086483 - RNA, 19 nt, Homo sapiens
  misc_RNA (1)...(19): siRNA sense strand
uugaauagcagagagcaaa

SEQ ID NO: 2086484 - RNA, 19 nt, Homo sapiens
  misc_RNA (1)...(19): siRNA sense strand
acaacuaaagggaaugaga

SEQ ID NO: 2086485 - RNA, 19 nt, Homo sapiens
  misc_RNA (1)...(19): siRNA sense strand
aagaagcuacagcaucuga

SEQ ID NO: 2086486 - RNA, 19 nt, Homo sapiens
  misc_RNA (1)...(19): siRNA sense strand
gaugagaagcacccagaac

SEQ ID NO: 2086487 - RNA, 19 nt, Homo sapiens
  misc_RNA (1)...(19): siRNA sense strand
ggaggaggaggacuugaac

SEQ ID NO: 2086488 - RNA, 19 nt, Homo sapiens
  misc_RNA (1)...(19): siRNA sense strand
gacccaugcagccgaagaa

SEQ ID NO: 2086489 - RNA, 19 nt, Homo sapiens
  misc_RNA (1)...(19): siRNA sense strand
gagaggguacaacuaaagg

SEQ ID NO: 2086490 - RNA, 19 nt, Homo sapiens
  misc_RNA (1)...(19): siRNA sense strand
gucaagagucgugggauga

SEQ ID NO: 2086491 - RNA, 19 nt, Homo sapiens
  misc_RNA (1)...(19): siRNA sense strand
gccaaggaguucacaaacc

SEQ ID NO: 2086492 - RNA, 19 nt, Homo sapiens
  misc_RNA (1)...(19): siRNA sense strand
gaaaggucucagaugaaag

SEQ ID NO: 2086493 - RNA, 19 nt, Homo sapiens
  misc_RNA (1)...(19): siRNA sense strand
caacuugcuguaucagaag

SEQ ID NO: 2086494 - RNA, 19 nt, Homo sapiens
  misc_RNA (1)...(19): siRNA sense strand
acuugaaccuagaagauag

SEQ ID NO: 2086495 - RNA, 19 nt, Homo sapiens
  misc_RNA (1)...(19): siRNA sense strand
ggccggaaggagaauggua

SEQ ID NO: 2086496 - RNA, 19 nt, Homo sapiens
  misc_RNA (1)...(19): siRNA sense strand
gguggaaugagcucuucaa

SEQ ID NO: 2086497 - RNA, 19 nt, Homo sapiens
  misc_RNA (1)...(19): siRNA sense strand
aggaggacuugaaccuaga

SEQ ID NO: 2086498 - RNA, 19 nt, Homo sapiens
  misc_RNA (1)...(19): siRNA sense strand
gagcggacccagcaaugac

SEQ ID NO: 2086499 - RNA, 19 nt, Homo sapiens
  misc_RNA (1)...(19): siRNA sense strand
gggaauugaauagcagaga

SEQ ID NO: 2086500 - RNA, 19 nt, Homo sapiens
  misc_RNA (1)...(19): siRNA sense strand
gagagaagaugcaaauuaa

SEQ ID NO: 2086501 - RNA, 19 nt, Homo sapiens
  misc_RNA (1)...(19): siRNA sense strand
ggagagaagaugcaaauua

SEQ ID NO: 2086502 - RNA, 19 nt, Homo sapiens
  misc_RNA (1)...(19): siRNA sense strand
gagauucccuuuaauucua

SEQ ID NO: 2086503 - RNA, 19 nt, Homo sapiens
  misc_RNA (1)...(19): siRNA sense strand
gccaagagcuccaagauca

SEQ ID NO: 2086504 - RNA, 19 nt, Homo sapiens
  misc_RNA (1)...(19): siRNA sense strand
cauggaugaucacaaauua

SEQ ID NO: 2086505 - RNA, 19 nt, Homo sapiens
  misc_RNA (1)...(19): siRNA sense strand
uggcagagauucccuuuaa

SEQ ID NO: 2086506 - RNA, 19 nt, Homo sapiens
  misc_RNA (1)...(19): siRNA sense strand
gcagagauucccuuuaauu

SEQ ID NO: 2086507 - RNA, 19 nt, Homo sapiens
  misc_RNA (1)...(19): siRNA sense strand
gaauuaaggugaucauggu

SEQ ID NO: 2086508 - RNA, 19 nt, Homo sapiens
  misc_RNA (1)...(19): siRNA sense strand
gaagaaauccaucauguac

SEQ ID NO: 2086509 - RNA, 19 nt, Homo sapiens
  misc_RNA (1)...(19): siRNA sense strand
gcaaauuaauguacaagag

SEQ ID NO: 2086510 - RNA, 19 nt, Homo sapiens
  misc_RNA (1)...(19): siRNA sense strand
ggacagcaguggaccuaug

SEQ ID NO: 2086511 - RNA, 19 nt, Homo sapiens
  misc_RNA (1)...(19): siRNA sense strand
gagaagaugcaaauuaaug

SEQ ID NO: 2086512 - RNA, 19 nt, Homo sapiens
  misc_RNA (1)...(19): siRNA sense strand
gcauugaucucggcacuga

SEQ ID NO: 2086513 - RNA, 19 nt, Homo sapiens
  misc_RNA (1)...(19): siRNA sense strand
ucagcaagcucugguaauu

SEQ ID NO: 2086514 - RNA, 19 nt, Homo sapiens
  misc_RNA (1)...(19): siRNA sense strand
gggcaggaguacucaauga

SEQ ID NO: 2086515 - RNA, 19 nt, Homo sapiens
  misc_RNA (1)...(19): siRNA sense strand
gggcugacuuuaaggcuaa

SEQ ID NO: 2086516 - RNA, 19 nt, Homo sapiens
  misc_RNA (1)...(19): siRNA sense strand
caaccgggcugacuuuaag

SEQ ID NO: 2086517 - RNA, 19 nt, Homo sapiens
  misc_RNA (1)...(19): siRNA sense strand
caugagaaacaaagucuua

SEQ ID NO: 2086518 - RNA, 19 nt, Homo sapiens
  misc_RNA (1)...(19): siRNA sense strand
gaacacuucauccaucuga

SEQ ID NO: 2086519 - RNA, 19 nt, Homo sapiens
  misc_RNA (1)...(19): siRNA sense strand
gaucaucccauuacagcua

SEQ ID NO: 2086520 - RNA, 19 nt, Homo sapiens
  misc_RNA (1)...(19): siRNA sense strand
ccagauauauuucaaugag

SEQ ID NO: 2086521 - RNA, 19 nt, Homo sapiens
  misc_RNA (1)...(19): siRNA sense strand
gauguaagguggacaacuc

SEQ ID NO: 2086522 - RNA, 19 nt, Homo sapiens
  misc_RNA (1)...(19): siRNA sense strand
cgaaacaucugcuucuuuu

SEQ ID NO: 2086523 - RNA, 19 nt, Homo sapiens
  misc_RNA (1)...(19): siRNA sense strand
gaaagcgacaucaugaaga

SEQ ID NO: 2086524 - RNA, 19 nt, Homo sapiens
  misc_RNA (1)...(19): siRNA sense strand
aaagggagacguacuacua

SEQ ID NO: 2086525 - RNA, 19 nt, Homo sapiens
  misc_RNA (1)...(19): siRNA sense strand
gcuuaucucugcacaagga

SEQ ID NO: 2086526 - RNA, 19 nt, Homo sapiens
  misc_RNA (1)...(19): siRNA sense strand
guggacaacucauccuuga

SEQ ID NO: 2086527 - RNA, 19 nt, Homo sapiens
  misc_RNA (1)...(19): siRNA sense strand
gcugaaagcgacaucauga

SEQ ID NO: 2086528 - RNA, 19 nt, Homo sapiens
  misc_RNA (1)...(19): siRNA sense strand
gugcagaacugaaggacau

SEQ ID NO: 2086529 - RNA, 19 nt, Homo sapiens
  misc_RNA (1)...(19): siRNA sense strand
uggaggaacugaagaagga

SEQ ID NO: 2086530 - RNA, 19 nt, Homo sapiens
  misc_RNA (1)...(19): siRNA sense strand
gguuugauaugaccgugua

SEQ ID NO: 2086531 - RNA, 19 nt, Homo sapiens
  misc_RNA (1)...(19): siRNA sense strand
gaauguacccacucaagau

SEQ ID NO: 2086532 - RNA, 19 nt, Homo sapiens
  misc_RNA (1)...(19): siRNA sense strand
gcucugacgucucuaagca

SEQ ID NO: 2086533 - RNA, 19 nt, Homo sapiens
  misc_RNA (1)...(19): siRNA sense strand
cagcagaagcucaucauug

SEQ ID NO: 2086534 - RNA, 19 nt, Homo sapiens
  misc_RNA (1)...(19): siRNA sense strand
gaacauggugccucagcaa

SEQ ID NO: 2086535 - RNA, 19 nt, Homo sapiens
  misc_RNA (1)...(19): siRNA sense strand
gcaaccgggcugacuuuaa

SEQ ID NO: 2086536 - RNA, 19 nt, Homo sapiens
  misc_RNA (1)...(19): siRNA sense strand
agaacugccuggugaagaa

SEQ ID NO: 2086537 - RNA, 19 nt, Homo sapiens
  misc_RNA (1)...(19): siRNA sense strand
gaggagagaagaugcaaau

SEQ ID NO: 2086538 - RNA, 19 nt, Homo sapiens
  misc_RNA (1)...(19): siRNA sense strand
aaacagaagcgcaauaugg

SEQ ID NO: 2086539 - RNA, 19 nt, Homo sapiens
  misc_RNA (1)...(19): siRNA sense strand
gccauucccuacaguauuc

SEQ ID NO: 2086540 - RNA, 19 nt, Homo sapiens
  misc_RNA (1)...(19): siRNA sense strand
ugaagaaauccaucaugua

SEQ ID NO: 2086541 - RNA, 19 nt, Homo sapiens
  misc_RNA (1)...(19): siRNA sense strand
caaauuaaccuuggaagag

SEQ ID NO: 2086542 - RNA, 19 nt, Homo sapiens
  misc_RNA (1)...(19): siRNA sense strand
gaucucaucaucuccaaga

SEQ ID NO: 2086543 - RNA, 19 nt, Homo sapiens
  misc_RNA (1)...(19): siRNA sense strand
cugaagaaauccaucaugu

SEQ ID NO: 2086544 - RNA, 19 nt, Homo sapiens
  misc_RNA (1)...(19): siRNA sense strand
gcaggcagccgacaugauc

SEQ ID NO: 2086545 - RNA, 19 nt, Homo sapiens
  misc_RNA (1)...(19): siRNA sense strand
gaccagaguccaagacgaa

SEQ ID NO: 2086546 - RNA, 19 nt, Homo sapiens
  misc_RNA (1)...(19): siRNA sense strand
ccuacagcauccagauaua

SEQ ID NO: 2086547 - RNA, 19 nt, Homo sapiens
  misc_RNA (1)...(19): siRNA sense strand
gggcggaucucaucaucuc

SEQ ID NO: 2086548 - RNA, 19 nt, Homo sapiens
  misc_RNA (1)...(19): siRNA sense strand
gagaggaucuuggaguuuu

SEQ ID NO: 2086549 - RNA, 19 nt, Homo sapiens
  misc_RNA (1)...(19): siRNA sense strand
agucagcccuccucaaguu

SEQ ID NO: 2086550 - RNA, 19 nt, Homo sapiens
  misc_RNA (1)...(19): siRNA sense strand
agaaggaaguggucaugga

SEQ ID NO: 2086551 - RNA, 19 nt, Homo sapiens
  misc_RNA (1)...(19): siRNA sense strand
gaagaaggaaguggucaug

SEQ ID NO: 2086552 - RNA, 19 nt, Homo sapiens
  misc_RNA (1)...(19): siRNA sense strand
gcaguggaccuaugagcaa

SEQ ID NO: 2086553 - RNA, 19 nt, Homo sapiens
  misc_RNA (1)...(19): siRNA sense strand
uggaagagcugagcaccaa

SEQ ID NO: 2086554 - RNA, 19 nt, Homo sapiens
  misc_RNA (1)...(19): siRNA sense strand
ugggagaccugguggaaau

SEQ ID NO: 2086555 - RNA, 19 nt, Homo sapiens
  misc_RNA (1)...(19): siRNA sense strand
ggcucuggcuggauucuuu

SEQ ID NO: 2086556 - RNA, 19 nt, Homo sapiens
  misc_RNA (1)...(19): siRNA sense strand
aacaggagaucaucccauu

SEQ ID NO: 2086557 - RNA, 19 nt, Homo sapiens
  misc_RNA (1)...(19): siRNA sense strand
ucugauaccugguuuaugc

SEQ ID NO: 2086558 - RNA, 19 nt, Homo sapiens
  misc_RNA (1)...(19): siRNA sense strand
gagcucugauaccugguuu

SEQ ID NO: 2086559 - RNA, 19 nt, Homo sapiens
  misc_RNA (1)...(19): siRNA sense strand
cgacaccacugaagaacag

SEQ ID NO: 2086560 - RNA, 19 nt, Homo sapiens
  misc_RNA (1)...(19): siRNA sense strand
gcauccagauauauuucaa

SEQ ID NO: 2086561 - RNA, 19 nt, Homo sapiens
  misc_RNA (1)...(19): siRNA sense strand
ggaccuaugagcaacgaaa

SEQ ID NO: 2086562 - RNA, 19 nt, Homo sapiens
  misc_RNA (1)...(19): siRNA sense strand
agcagaagcucaucauugu

SEQ ID NO: 2086563 - RNA, 19 nt, Homo sapiens
  misc_RNA (1)...(19): siRNA sense strand
cggagaggaucuuggaguu

SEQ ID NO: 2086564 - RNA, 19 nt, Homo sapiens
  misc_RNA (1)...(19): siRNA sense strand
gaaggaaguggucauggau

SEQ ID NO: 2086565 - RNA, 19 nt, Homo sapiens
  misc_RNA (1)...(19): siRNA sense strand
ggucaaauucuguaagcaa

SEQ ID NO: 2086566 - RNA, 19 nt, Homo sapiens
  misc_RNA (1)...(19): siRNA sense strand
ggacaacucauccuugacu

SEQ ID NO: 2086567 - RNA, 19 nt, Homo sapiens
  misc_RNA (1)...(19): siRNA sense strand
ggagaggaucuuggaguuu

SEQ ID NO: 2086568 - RNA, 19 nt, Homo sapiens
  misc_RNA (1)...(19): siRNA sense strand
gggaagauaaauacuugaa

SEQ ID NO: 2086569 - RNA, 19 nt, Homo sapiens
  misc_RNA (1)...(19): siRNA sense strand
uaaccauccucugcauuga

SEQ ID NO: 2086570 - RNA, 19 nt, Homo sapiens
  misc_RNA (1)...(19): siRNA sense strand
ccugcuggaugacaacuuu

SEQ ID NO: 2086571 - RNA, 19 nt, Homo sapiens
  misc_RNA (1)...(19): siRNA sense strand
ucaaugaacgaugaaauga

SEQ ID NO: 2086572 - RNA, 19 nt, Homo sapiens
  misc_RNA (1)...(19): siRNA sense strand
aaugaacgaugaaaugaag

SEQ ID NO: 2086573 - RNA, 19 nt, Homo sapiens
  misc_RNA (1)...(19): siRNA sense strand
cagcagggcaugagaaaca

SEQ ID NO: 2086574 - RNA, 19 nt, Homo sapiens
  misc_RNA (1)...(19): siRNA sense strand
cugggaagauaaauacuug

SEQ ID NO: 2086575 - RNA, 19 nt, Homo sapiens
  misc_RNA (1)...(19): siRNA sense strand
ccacagugaugggcagaau

SEQ ID NO: 2086576 - RNA, 19 nt, Homo sapiens
  misc_RNA (1)...(19): siRNA sense strand
gcagugggcggaucucauc

SEQ ID NO: 2086577 - RNA, 19 nt, Homo sapiens
  misc_RNA (1)...(19): siRNA sense strand
gugcuaggcuucugcuucu

SEQ ID NO: 2086578 - RNA, 19 nt, Homo sapiens
  misc_RNA (1)...(19): siRNA sense strand
caaauucuguaagcaacug

SEQ ID NO: 2086579 - RNA, 19 nt, Homo sapiens
  misc_RNA (1)...(19): siRNA sense strand
gcuuaugagucagcugaaa

SEQ ID NO: 2086580 - RNA, 19 nt, Homo sapiens
  misc_RNA (1)...(19): siRNA sense strand
ugaagaaggcugacauugg

SEQ ID NO: 2086581 - RNA, 19 nt, Homo sapiens
  misc_RNA (1)...(19): siRNA sense strand
cacaugugguuugauauga

SEQ ID NO: 2086582 - RNA, 19 nt, Homo sapiens
  misc_RNA (1)...(19): siRNA sense strand
ucacuucucuugggcuaug

SEQ ID NO: 2086583 - RNA, 19 nt, Homo sapiens
  misc_RNA (1)...(19): siRNA sense strand
cugcugagaucgaacacuu

SEQ ID NO: 2086584 - RNA, 19 nt, Homo sapiens
  misc_RNA (1)...(19): siRNA sense strand
gaagcgcaauauggaggaa

SEQ ID NO: 2086585 - RNA, 19 nt, Homo sapiens
  misc_RNA (1)...(19): siRNA sense strand
cuacaguauucucaucuuc

SEQ ID NO: 2086586 - RNA, 19 nt, Homo sapiens
  misc_RNA (1)...(19): siRNA sense strand
gaagagcugagcaccaagu

SEQ ID NO: 2086587 - RNA, 19 nt, Homo sapiens
  misc_RNA (1)...(19): siRNA sense strand
uguucuaccuuucuucuga

SEQ ID NO: 2086588 - RNA, 19 nt, Homo sapiens
  misc_RNA (1)...(19): siRNA sense strand
cagagauucccuuuaauuc

SEQ ID NO: 2086589 - RNA, 19 nt, Homo sapiens
  misc_RNA (1)...(19): siRNA sense strand
gaucgaacacuucauccau

SEQ ID NO: 2086590 - RNA, 19 nt, Homo sapiens
  misc_RNA (1)...(19): siRNA sense strand
caaugaacgaugaaaugaa

SEQ ID NO: 2086591 - RNA, 19 nt, Homo sapiens
  misc_RNA (1)...(19): siRNA sense strand
cgaauguacccacucaaga

SEQ ID NO: 2086592 - RNA, 19 nt, Homo sapiens
  misc_RNA (1)...(19): siRNA sense strand
ggaacccaaagacggauaa

SEQ ID NO: 2086593 - RNA, 19 nt, Homo sapiens
  misc_RNA (1)...(19): siRNA sense strand
gcaauauggaggaacugaa

SEQ ID NO: 2086594 - RNA, 19 nt, Homo sapiens
  misc_RNA (1)...(19): siRNA sense strand
caccaaagggcaaaggaaa

SEQ ID NO: 2086595 - RNA, 19 nt, Homo sapiens
  misc_RNA (1)...(19): siRNA sense strand
cuccuuggcuuaugaguca

SEQ ID NO: 2086596 - RNA, 19 nt, Homo sapiens
  misc_RNA (1)...(19): siRNA sense strand
ccggauggcuggguggaaa

SEQ ID NO: 2086597 - RNA, 19 nt, Homo sapiens
  misc_RNA (1)...(19): siRNA sense strand
ccacugggaagauaaauac

SEQ ID NO: 2086598 - RNA, 19 nt, Homo sapiens
  misc_RNA (1)...(19): siRNA sense strand
gugaaccaccgucucauug

SEQ ID NO: 2086599 - RNA, 19 nt, Homo sapiens
  misc_RNA (1)...(19): siRNA sense strand
aaagcgacaucaugaagag

SEQ ID NO: 2086600 - RNA, 19 nt, Homo sapiens
  misc_RNA (1)...(19): siRNA sense strand
gagagaagaugcaaauuaa

SEQ ID NO: 2086601 - RNA, 19 nt, Homo sapiens
  misc_RNA (1)...(19): siRNA sense strand
ggagagaagaugcaaauua

SEQ ID NO: 2086602 - RNA, 19 nt, Homo sapiens
  misc_RNA (1)...(19): siRNA sense strand
gagauucccuuuaauucua

SEQ ID NO: 2086603 - RNA, 19 nt, Homo sapiens
  misc_RNA (1)...(19): siRNA sense strand
gccaagagcuccaagauca

SEQ ID NO: 2086604 - RNA, 19 nt, Homo sapiens
  misc_RNA (1)...(19): siRNA sense strand
cauggaugaucacaaauua

SEQ ID NO: 2086605 - RNA, 19 nt, Homo sapiens
  misc_RNA (1)...(19): siRNA sense strand
uggcagagauucccuuuaa

SEQ ID NO: 2086606 - RNA, 19 nt, Homo sapiens
  misc_RNA (1)...(19): siRNA sense strand
gcagagauucccuuuaauu

SEQ ID NO: 2086607 - RNA, 19 nt, Homo sapiens
  misc_RNA (1)...(19): siRNA sense strand
gaauuaaggugaucauggu

SEQ ID NO: 2086608 - RNA, 19 nt, Homo sapiens
  misc_RNA (1)...(19): siRNA sense strand
gaagaaauccaucauguac

SEQ ID NO: 2086609 - RNA, 19 nt, Homo sapiens
  misc_RNA (1)...(19): siRNA sense strand
gcaaauuaauguacaagag

SEQ ID NO: 2086610 - RNA, 19 nt, Homo sapiens
  misc_RNA (1)...(19): siRNA sense strand
ggacagcaguggaccuaug

SEQ ID NO: 2086611 - RNA, 19 nt, Homo sapiens
  misc_RNA (1)...(19): siRNA sense strand
gagaagaugcaaauuaaug

SEQ ID NO: 2086612 - RNA, 19 nt, Homo sapiens
  misc_RNA (1)...(19): siRNA sense strand
gcauugaucucggcacuga

SEQ ID NO: 2086613 - RNA, 19 nt, Homo sapiens
  misc_RNA (1)...(19): siRNA sense strand
ucagcaagcucugguaauu

SEQ ID NO: 2086614 - RNA, 19 nt, Homo sapiens
  misc_RNA (1)...(19): siRNA sense strand
gggcaggaguacucaauga

SEQ ID NO: 2086615 - RNA, 19 nt, Homo sapiens
  misc_RNA (1)...(19): siRNA sense strand
gggcugacuuuaaggcuaa

SEQ ID NO: 2086616 - RNA, 19 nt, Homo sapiens
  misc_RNA (1)...(19): siRNA sense strand
caaccgggcugacuuuaag

SEQ ID NO: 2086617 - RNA, 19 nt, Homo sapiens
  misc_RNA (1)...(19): siRNA sense strand
caugagaaacaaagucuua

SEQ ID NO: 2086618 - RNA, 19 nt, Homo sapiens
  misc_RNA (1)...(19): siRNA sense strand
gaacacuucauccaucuga

SEQ ID NO: 2086619 - RNA, 19 nt, Homo sapiens
  misc_RNA (1)...(19): siRNA sense strand
gaucaucccauuacagcua

SEQ ID NO: 2086620 - RNA, 19 nt, Homo sapiens
  misc_RNA (1)...(19): siRNA sense strand
ccagauauauuucaaugag

SEQ ID NO: 2086621 - RNA, 19 nt, Homo sapiens
  misc_RNA (1)...(19): siRNA sense strand
gauguaagguggacaacuc

SEQ ID NO: 2086622 - RNA, 19 nt, Homo sapiens
  misc_RNA (1)...(19): siRNA sense strand
cgaaacaucugcuucuuuu

SEQ ID NO: 2086623 - RNA, 19 nt, Homo sapiens
  misc_RNA (1)...(19): siRNA sense strand
gaaagcgacaucaugaaga

SEQ ID NO: 2086624 - RNA, 19 nt, Homo sapiens
  misc_RNA (1)...(19): siRNA sense strand
aaagggagacguacuacua

SEQ ID NO: 2086625 - RNA, 19 nt, Homo sapiens
  misc_RNA (1)...(19): siRNA sense strand
gcuuaucucugcacaagga

SEQ ID NO: 2086626 - RNA, 19 nt, Homo sapiens
  misc_RNA (1)...(19): siRNA sense strand
guggacaacucauccuuga

SEQ ID NO: 2086627 - RNA, 19 nt, Homo sapiens
  misc_RNA (1)...(19): siRNA sense strand
gcugaaagcgacaucauga

SEQ ID NO: 2086628 - RNA, 19 nt, Homo sapiens
  misc_RNA (1)...(19): siRNA sense strand
gugcagaacugaaggacau

SEQ ID NO: 2086629 - RNA, 19 nt, Homo sapiens
  misc_RNA (1)...(19): siRNA sense strand
uggaggaacugaagaagga

SEQ ID NO: 2086630 - RNA, 19 nt, Homo sapiens
  misc_RNA (1)...(19): siRNA sense strand
gguuugauaugaccgugua

SEQ ID NO: 2086631 - RNA, 19 nt, Homo sapiens
  misc_RNA (1)...(19): siRNA sense strand
gaauguacccacucaagau

SEQ ID NO: 2086632 - RNA, 19 nt, Homo sapiens
  misc_RNA (1)...(19): siRNA sense strand
gcucugacgucucuaagca

SEQ ID NO: 2086633 - RNA, 19 nt, Homo sapiens
  misc_RNA (1)...(19): siRNA sense strand
cagcagaagcucaucauug

SEQ ID NO: 2086634 - RNA, 19 nt, Homo sapiens
  misc_RNA (1)...(19): siRNA sense strand
gaacauggugccucagcaa

SEQ ID NO: 2086635 - RNA, 19 nt, Homo sapiens
  misc_RNA (1)...(19): siRNA sense strand
gcaaccgggcugacuuuaa

SEQ ID NO: 2086636 - RNA, 19 nt, Homo sapiens
  misc_RNA (1)...(19): siRNA sense strand
agaacugccuggugaagaa

SEQ ID NO: 2086637 - RNA, 19 nt, Homo sapiens
  misc_RNA (1)...(19): siRNA sense strand
gaggagagaagaugcaaau

SEQ ID NO: 2086638 - RNA, 19 nt, Homo sapiens
  misc_RNA (1)...(19): siRNA sense strand
aaacagaagcgcaauaugg

SEQ ID NO: 2086639 - RNA, 19 nt, Homo sapiens
  misc_RNA (1)...(19): siRNA sense strand
gccauucccuacaguauuc

SEQ ID NO: 2086640 - RNA, 19 nt, Homo sapiens
  misc_RNA (1)...(19): siRNA sense strand
ugaagaaauccaucaugua

SEQ ID NO: 2086641 - RNA, 19 nt, Homo sapiens
  misc_RNA (1)...(19): siRNA sense strand
caaauuaaccuuggaagag

SEQ ID NO: 2086642 - RNA, 19 nt, Homo sapiens
  misc_RNA (1)...(19): siRNA sense strand
gaucucaucaucuccaaga

SEQ ID NO: 2086643 - RNA, 19 nt, Homo sapiens
  misc_RNA (1)...(19): siRNA sense strand
cugaagaaauccaucaugu

SEQ ID NO: 2086644 - RNA, 19 nt, Homo sapiens
  misc_RNA (1)...(19): siRNA sense strand
gcaggcagccgacaugauc

SEQ ID NO: 2086645 - RNA, 19 nt, Homo sapiens
  misc_RNA (1)...(19): siRNA sense strand
ccuacagcauccagauaua

SEQ ID NO: 2086646 - RNA, 19 nt, Homo sapiens
  misc_RNA (1)...(19): siRNA sense strand
gggcggaucucaucaucuc

SEQ ID NO: 2086647 - RNA, 19 nt, Homo sapiens
  misc_RNA (1)...(19): siRNA sense strand
agaaggaaguggucaugga

SEQ ID NO: 2086648 - RNA, 19 nt, Homo sapiens
  misc_RNA (1)...(19): siRNA sense strand
gagaggaucuuggaguuuu

SEQ ID NO: 2086649 - RNA, 19 nt, Homo sapiens
  misc_RNA (1)...(19): siRNA sense strand
agucagcccuccucaaguu

SEQ ID NO: 2086650 - RNA, 19 nt, Homo sapiens
  misc_RNA (1)...(19): siRNA sense strand
uggaagagcugagcaccaa

SEQ ID NO: 2086651 - RNA, 19 nt, Homo sapiens
  misc_RNA (1)...(19): siRNA sense strand
gcaguggaccuaugagcaa

SEQ ID NO: 2086652 - RNA, 19 nt, Homo sapiens
  misc_RNA (1)...(19): siRNA sense strand
gaagaaggaaguggucaug

SEQ ID NO: 2086653 - RNA, 19 nt, Homo sapiens
  misc_RNA (1)...(19): siRNA sense strand
ugggagaccugguggaaau

SEQ ID NO: 2086654 - RNA, 19 nt, Homo sapiens
  misc_RNA (1)...(19): siRNA sense strand
ggcucuggcuggauucuuu

SEQ ID NO: 2086655 - RNA, 19 nt, Homo sapiens
  misc_RNA (1)...(19): siRNA sense strand
aacaggagaucaucccauu

SEQ ID NO: 2086656 - RNA, 19 nt, Homo sapiens
  misc_RNA (1)...(19): siRNA sense strand
ucugauaccugguuuaugc

SEQ ID NO: 2086657 - RNA, 19 nt, Homo sapiens
  misc_RNA (1)...(19): siRNA sense strand
gagcucugauaccugguuu

SEQ ID NO: 2086658 - RNA, 19 nt, Homo sapiens
  misc_RNA (1)...(19): siRNA sense strand
cgacaccacugaagaacag

SEQ ID NO: 2086659 - RNA, 19 nt, Homo sapiens
  misc_RNA (1)...(19): siRNA sense strand
gcauccagauauauuucaa

SEQ ID NO: 2086660 - RNA, 19 nt, Homo sapiens
  misc_RNA (1)...(19): siRNA sense strand
ggaccuaugagcaacgaaa

SEQ ID NO: 2086661 - RNA, 19 nt, Homo sapiens
  misc_RNA (1)...(19): siRNA sense strand
agcagaagcucaucauugu

SEQ ID NO: 2086662 - RNA, 19 nt, Homo sapiens
  misc_RNA (1)...(19): siRNA sense strand
cggagaggaucuuggaguu

SEQ ID NO: 2086663 - RNA, 19 nt, Homo sapiens
  misc_RNA (1)...(19): siRNA sense strand
gaaggaaguggucauggau

SEQ ID NO: 2086664 - RNA, 19 nt, Homo sapiens
  misc_RNA (1)...(19): siRNA sense strand
ggucaaauucuguaagcaa

SEQ ID NO: 2086665 - RNA, 19 nt, Homo sapiens
  misc_RNA (1)...(19): siRNA sense strand
ggacaacucauccuugacu

SEQ ID NO: 2086666 - RNA, 19 nt, Homo sapiens
  misc_RNA (1)...(19): siRNA sense strand
ggagaggaucuuggaguuu

SEQ ID NO: 2086667 - RNA, 19 nt, Homo sapiens
  misc_RNA (1)...(19): siRNA sense strand
gggaagauaaauacuugaa

SEQ ID NO: 2086668 - RNA, 19 nt, Homo sapiens
  misc_RNA (1)...(19): siRNA sense strand
uaaccauccucugcauuga

SEQ ID NO: 2086669 - RNA, 19 nt, Homo sapiens
  misc_RNA (1)...(19): siRNA sense strand
ccugcuggaugacaacuuu

SEQ ID NO: 2086670 - RNA, 19 nt, Homo sapiens
  misc_RNA (1)...(19): siRNA sense strand
ucaaugaacgaugaaauga

SEQ ID NO: 2086671 - RNA, 19 nt, Homo sapiens
  misc_RNA (1)...(19): siRNA sense strand
aaugaacgaugaaaugaag

SEQ ID NO: 2086672 - RNA, 19 nt, Homo sapiens
  misc_RNA (1)...(19): siRNA sense strand
cagcagggcaugagaaaca

SEQ ID NO: 2086673 - RNA, 19 nt, Homo sapiens
  misc_RNA (1)...(19): siRNA sense strand
cugggaagauaaauacuug

SEQ ID NO: 2086674 - RNA, 19 nt, Homo sapiens
  misc_RNA (1)...(19): siRNA sense strand
ccacagugaugggcagaau

SEQ ID NO: 2086675 - RNA, 19 nt, Homo sapiens
  misc_RNA (1)...(19): siRNA sense strand
gcagugggcggaucucauc

SEQ ID NO: 2086676 - RNA, 19 nt, Homo sapiens
  misc_RNA (1)...(19): siRNA sense strand
gugcuaggcuucugcuucu

SEQ ID NO: 2086677 - RNA, 19 nt, Homo sapiens
  misc_RNA (1)...(19): siRNA sense strand
cugcugagaucgaacacuu

SEQ ID NO: 2086678 - RNA, 19 nt, Homo sapiens
  misc_RNA (1)...(19): siRNA sense strand
gcuuaugagucagcugaaa

SEQ ID NO: 2086679 - RNA, 19 nt, Homo sapiens
  misc_RNA (1)...(19): siRNA sense strand
caaauucuguaagcaacug

SEQ ID NO: 2086680 - RNA, 19 nt, Homo sapiens
  misc_RNA (1)...(19): siRNA sense strand
ugaagaaggcugacauugg

SEQ ID NO: 2086681 - RNA, 19 nt, Homo sapiens
  misc_RNA (1)...(19): siRNA sense strand
cacaugugguuugauauga

SEQ ID NO: 2086682 - RNA, 19 nt, Homo sapiens
  misc_RNA (1)...(19): siRNA sense strand
ucacuucucuugggcuaug

SEQ ID NO: 2086683 - RNA, 19 nt, Homo sapiens
  misc_RNA (1)...(19): siRNA sense strand
gaagcgcaauauggaggaa

SEQ ID NO: 2086684 - RNA, 19 nt, Homo sapiens
  misc_RNA (1)...(19): siRNA sense strand
cuacaguauucucaucuuc

SEQ ID NO: 2086685 - RNA, 19 nt, Homo sapiens
  misc_RNA (1)...(19): siRNA sense strand
uguucuaccuuucuucuga

SEQ ID NO: 2086686 - RNA, 19 nt, Homo sapiens
  misc_RNA (1)...(19): siRNA sense strand
cagagauucccuuuaauuc

SEQ ID NO: 2086687 - RNA, 19 nt, Homo sapiens
  misc_RNA (1)...(19): siRNA sense strand
gaucgaacacuucauccau

SEQ ID NO: 2086688 - RNA, 19 nt, Homo sapiens
  misc_RNA (1)...(19): siRNA sense strand
gaagagcugagcaccaagu

SEQ ID NO: 2086689 - RNA, 19 nt, Homo sapiens
  misc_RNA (1)...(19): siRNA sense strand
caccaaagggcaaaggaaa

SEQ ID NO: 2086690 - RNA, 19 nt, Homo sapiens
  misc_RNA (1)...(19): siRNA sense strand
cgaauguacccacucaaga

SEQ ID NO: 2086691 - RNA, 19 nt, Homo sapiens
  misc_RNA (1)...(19): siRNA sense strand
ggaacccaaagacggauaa

SEQ ID NO: 2086692 - RNA, 19 nt, Homo sapiens
  misc_RNA (1)...(19): siRNA sense strand
gcaauauggaggaacugaa

SEQ ID NO: 2086693 - RNA, 19 nt, Homo sapiens
  misc_RNA (1)...(19): siRNA sense strand
caaugaacgaugaaaugaa

SEQ ID NO: 2086694 - RNA, 19 nt, Homo sapiens
  misc_RNA (1)...(19): siRNA sense strand
uugacaaccugaagaaauc

SEQ ID NO: 2086695 - RNA, 19 nt, Homo sapiens
  misc_RNA (1)...(19): siRNA sense strand
ccggauggcuggguggaaa

SEQ ID NO: 2086696 - RNA, 19 nt, Homo sapiens
  misc_RNA (1)...(19): siRNA sense strand
ccacugggaagauaaauac

SEQ ID NO: 2086697 - RNA, 19 nt, Homo sapiens
  misc_RNA (1)...(19): siRNA sense strand
gugaaccaccgucucauug

SEQ ID NO: 2086698 - RNA, 19 nt, Homo sapiens
  misc_RNA (1)...(19): siRNA sense strand
aaagcgacaucaugaagag

SEQ ID NO: 2086699 - RNA, 19 nt, Homo sapiens
  misc_RNA (1)...(19): siRNA sense strand
cuccuuggcuuaugaguca

SEQ ID NO: 2086700 - RNA, 19 nt, Homo sapiens
  misc_RNA (1)...(19): siRNA sense strand
gaaagugucuggcuucaag

SEQ ID NO: 2086701 - RNA, 19 nt, Homo sapiens
  misc_RNA (1)...(19): siRNA sense strand
ggagaaaggaaguguguuu

SEQ ID NO: 2086702 - RNA, 19 nt, Homo sapiens
  misc_RNA (1)...(19): siRNA sense strand
uaaagaagccggugcugaa

SEQ ID NO: 2086703 - RNA, 19 nt, Homo sapiens
  misc_RNA (1)...(19): siRNA sense strand
ggacaacagucacaaugag

SEQ ID NO: 2086704 - RNA, 19 nt, Homo sapiens
  misc_RNA (1)...(19): siRNA sense strand
ggaaacgacgacaguagua

SEQ ID NO: 2086705 - RNA, 19 nt, Homo sapiens
  misc_RNA (1)...(19): siRNA sense strand
gaggaggccuucacucaca

SEQ ID NO: 2086706 - RNA, 19 nt, Homo sapiens
  misc_RNA (1)...(19): siRNA sense strand
ucaugaggcugcagucuga

SEQ ID NO: 2086707 - RNA, 19 nt, Homo sapiens
  misc_RNA (1)...(19): siRNA sense strand
gaaacgacgacaguaguaa

SEQ ID NO: 2086708 - RNA, 19 nt, Homo sapiens
  misc_RNA (1)...(19): siRNA sense strand
caaacucuccgaggaauuu

SEQ ID NO: 2086709 - RNA, 19 nt, Homo sapiens
  misc_RNA (1)...(19): siRNA sense strand
ggagaaguauuaccaugac

SEQ ID NO: 2086710 - RNA, 19 nt, Homo sapiens
  misc_RNA (1)...(19): siRNA sense strand
ucagaagucggguucauuu

SEQ ID NO: 2086711 - RNA, 19 nt, Homo sapiens
  misc_RNA (1)...(19): siRNA sense strand
gcaccaagaaggucccauu

SEQ ID NO: 2086712 - RNA, 19 nt, Homo sapiens
  misc_RNA (1)...(19): siRNA sense strand
cagcugggcucuguucuuc

SEQ ID NO: 2086713 - RNA, 19 nt, Homo sapiens
  misc_RNA (1)...(19): siRNA sense strand
uuaagcggcugcaggaaga

SEQ ID NO: 2086714 - RNA, 19 nt, Homo sapiens
  misc_RNA (1)...(19): siRNA sense strand
gagcgaagggugcgcaaga

SEQ ID NO: 2086715 - RNA, 19 nt, Homo sapiens
  misc_RNA (1)...(19): siRNA sense strand
gcaggaagaggagcagaaa

SEQ ID NO: 2086716 - RNA, 19 nt, Homo sapiens
  misc_RNA (1)...(19): siRNA sense strand
gaccgacaccgcucuaaga

SEQ ID NO: 2086717 - RNA, 19 nt, Homo sapiens
  misc_RNA (1)...(19): siRNA sense strand
gggaugagcgggaugacaa

SEQ ID NO: 2086718 - RNA, 19 nt, Homo sapiens
  misc_RNA (1)...(19): siRNA sense strand
uuacuguucugcaucuuug

SEQ ID NO: 2086719 - RNA, 19 nt, Homo sapiens
  misc_RNA (1)...(19): siRNA sense strand
ggccuucacucacauuaag

SEQ ID NO: 2086720 - RNA, 19 nt, Homo sapiens
  misc_RNA (1)...(19): siRNA sense strand
ugacuucccugucuacaac

SEQ ID NO: 2086721 - RNA, 19 nt, Homo sapiens
  misc_RNA (1)...(19): siRNA sense strand
uuaguucccugguguacuu

SEQ ID NO: 2086722 - RNA, 19 nt, Homo sapiens
  misc_RNA (1)...(19): siRNA sense strand
ucacacgcaucgccaagga

SEQ ID NO: 2086723 - RNA, 19 nt, Homo sapiens
  misc_RNA (1)...(19): siRNA sense strand
ccuacuggcucuucuaugg

SEQ ID NO: 2086724 - RNA, 19 nt, Homo sapiens
  misc_RNA (1)...(19): siRNA sense strand
gaggaaagacagaguuugg

SEQ ID NO: 2086725 - RNA, 19 nt, Homo sapiens
  misc_RNA (1)...(19): siRNA sense strand
gaucccaagucacacaagu

SEQ ID NO: 2086726 - RNA, 19 nt, Homo sapiens
  misc_RNA (1)...(19): siRNA sense strand
gaaaggaaguguguuuuac

SEQ ID NO: 2086727 - RNA, 19 nt, Homo sapiens
  misc_RNA (1)...(19): siRNA sense strand
gggacaacagucacaauga

SEQ ID NO: 2086728 - RNA, 19 nt, Homo sapiens
  misc_RNA (1)...(19): siRNA sense strand
cauauguucuucccucaca

SEQ ID NO: 2086729 - RNA, 19 nt, Homo sapiens
  misc_RNA (1)...(19): siRNA sense strand
guccaagaaucgaggcauu

SEQ ID NO: 2086730 - RNA, 19 nt, Homo sapiens
  misc_RNA (1)...(19): siRNA sense strand
ggaaguguguuuuacuguu

SEQ ID NO: 2086731 - RNA, 19 nt, Homo sapiens
  misc_RNA (1)...(19): siRNA sense strand
ggacaagucggugacaauc

SEQ ID NO: 2086732 - RNA, 19 nt, Homo sapiens
  misc_RNA (1)...(19): siRNA sense strand
gaggagggccaggcuugua

SEQ ID NO: 2086733 - RNA, 19 nt, Homo sapiens
  misc_RNA (1)...(19): siRNA sense strand
uguggauccuggagaagua

SEQ ID NO: 2086734 - RNA, 19 nt, Homo sapiens
  misc_RNA (1)...(19): siRNA sense strand
caccuugaauucugcauca

SEQ ID NO: 2086735 - RNA, 19 nt, Homo sapiens
  misc_RNA (1)...(19): siRNA sense strand
ccucaucuuuggacagguu

SEQ ID NO: 2086736 - RNA, 19 nt, Homo sapiens
  misc_RNA (1)...(19): siRNA sense strand
gcacagcaucucccaugau

SEQ ID NO: 2086737 - RNA, 19 nt, Homo sapiens
  misc_RNA (1)...(19): siRNA sense strand
agaagccggugcugaagga

SEQ ID NO: 2086738 - RNA, 19 nt, Homo sapiens
  misc_RNA (1)...(19): siRNA sense strand
uaccaugacuucccugucu

SEQ ID NO: 2086739 - RNA, 19 nt, Homo sapiens
  misc_RNA (1)...(19): siRNA sense strand
uggcaucguuuuccucuua

SEQ ID NO: 2086740 - RNA, 19 nt, Homo sapiens
  misc_RNA (1)...(19): siRNA sense strand
gaugaggaaagacagaguu

SEQ ID NO: 2086741 - RNA, 19 nt, Homo sapiens
  misc_RNA (1)...(19): siRNA sense strand
gaaguguguuuuacuguuc

SEQ ID NO: 2086742 - RNA, 19 nt, Homo sapiens
  misc_RNA (1)...(19): siRNA sense strand
ggauccuggagaaguauua

SEQ ID NO: 2086743 - RNA, 19 nt, Homo sapiens
  misc_RNA (1)...(19): siRNA sense strand
caguguggauccuggagaa

SEQ ID NO: 2086744 - RNA, 19 nt, Homo sapiens
  misc_RNA (1)...(19): siRNA sense strand
ggagcgcugcggauacaaa

SEQ ID NO: 2086745 - RNA, 19 nt, Homo sapiens
  misc_RNA (1)...(19): siRNA sense strand
gaaaacagcaccaacaacu

SEQ ID NO: 2086746 - RNA, 19 nt, Homo sapiens
  misc_RNA (1)...(19): siRNA sense strand
gaccaacggccucaaggau

SEQ ID NO: 2086747 - RNA, 19 nt, Homo sapiens
  misc_RNA (1)...(19): siRNA sense strand
gaccuaccauccaguacca

SEQ ID NO: 2086748 - RNA, 19 nt, Homo sapiens
  misc_RNA (1)...(19): siRNA sense strand
acaacagucacaaugagua

SEQ ID NO: 2086749 - RNA, 19 nt, Homo sapiens
  misc_RNA (1)...(19): siRNA sense strand
guucuguccucaucuuugg

SEQ ID NO: 2086750 - RNA, 19 nt, Homo sapiens
  misc_RNA (1)...(19): siRNA sense strand
cccgugccaugcagaagua

SEQ ID NO: 2086751 - RNA, 19 nt, Homo sapiens
  misc_RNA (1)...(19): siRNA sense strand
caaaggagaaaggaagugu

SEQ ID NO: 2086752 - RNA, 19 nt, Homo sapiens
  misc_RNA (1)...(19): siRNA sense strand
gggaaacgacgacaguagu

SEQ ID NO: 2086753 - RNA, 19 nt, Homo sapiens
  misc_RNA (1)...(19): siRNA sense strand
gcaggcaagggucucagaa

SEQ ID NO: 2086754 - RNA, 19 nt, Homo sapiens
  misc_RNA (1)...(19): siRNA sense strand
guuagaaugaaccaucaaa

SEQ ID NO: 2086755 - RNA, 19 nt, Homo sapiens
  misc_RNA (1)...(19): siRNA sense strand
acaagucggugacaaucca

SEQ ID NO: 2086756 - RNA, 19 nt, Homo sapiens
  misc_RNA (1)...(19): siRNA sense strand
ggauuaguucccuggugua

SEQ ID NO: 2086757 - RNA, 19 nt, Homo sapiens
  misc_RNA (1)...(19): siRNA sense strand
cuacaacguuggccaucuc

SEQ ID NO: 2086758 - RNA, 19 nt, Homo sapiens
  misc_RNA (1)...(19): siRNA sense strand
gcagcugggcucuguucuu

SEQ ID NO: 2086759 - RNA, 19 nt, Homo sapiens
  misc_RNA (1)...(19): siRNA sense strand
aggcaagggucucagaagu

SEQ ID NO: 2086760 - RNA, 19 nt, Homo sapiens
  misc_RNA (1)...(19): siRNA sense strand
cccuggcacugcugucuuu

SEQ ID NO: 2086761 - RNA, 19 nt, Homo sapiens
  misc_RNA (1)...(19): siRNA sense strand
ucccaagucacacaaguuu

SEQ ID NO: 2086762 - RNA, 19 nt, Homo sapiens
  misc_RNA (1)...(19): siRNA sense strand
gaggccuucacucacauua

SEQ ID NO: 2086763 - RNA, 19 nt, Homo sapiens
  misc_RNA (1)...(19): siRNA sense strand
gcagugcuuggauuaguuc

SEQ ID NO: 2086764 - RNA, 19 nt, Homo sapiens
  misc_RNA (1)...(19): siRNA sense strand
uggagaaguauuaccauga

SEQ ID NO: 2086765 - RNA, 19 nt, Homo sapiens
  misc_RNA (1)...(19): siRNA sense strand
gggacaagucggugacaau

SEQ ID NO: 2086766 - RNA, 19 nt, Homo sapiens
  misc_RNA (1)...(19): siRNA sense strand
gcaaaggagaaaggaagug

SEQ ID NO: 2086767 - RNA, 19 nt, Homo sapiens
  misc_RNA (1)...(19): siRNA sense strand
ggaccgacaccgcucuaag

SEQ ID NO: 2086768 - RNA, 19 nt, Homo sapiens
  misc_RNA (1)...(19): siRNA sense strand
agaaaggaaguguguuuua

SEQ ID NO: 2086769 - RNA, 19 nt, Homo sapiens
  misc_RNA (1)...(19): siRNA sense strand
ugucuggcuucaaggugua

SEQ ID NO: 2086770 - RNA, 19 nt, Homo sapiens
  misc_RNA (1)...(19): siRNA sense strand
gagaaguauuaccaugacu

SEQ ID NO: 2086771 - RNA, 19 nt, Homo sapiens
  misc_RNA (1)...(19): siRNA sense strand
gugcugcgugcccugcuua

SEQ ID NO: 2086772 - RNA, 19 nt, Homo sapiens
  misc_RNA (1)...(19): siRNA sense strand
ggccaaacaguggacauug

SEQ ID NO: 2086773 - RNA, 19 nt, Homo sapiens
  misc_RNA (1)...(19): siRNA sense strand
ccaagcagcagcccuacca

SEQ ID NO: 2086774 - RNA, 19 nt, Homo sapiens
  misc_RNA (1)...(19): siRNA sense strand
uggaggaggccuucacuca

SEQ ID NO: 2086775 - RNA, 19 nt, Homo sapiens
  misc_RNA (1)...(19): siRNA sense strand
ugaggaggcugagcaugag

SEQ ID NO: 2086776 - RNA, 19 nt, Homo sapiens
  misc_RNA (1)...(19): siRNA sense strand
caacagucacaaugaguac

SEQ ID NO: 2086777 - RNA, 19 nt, Homo sapiens
  misc_RNA (1)...(19): siRNA sense strand
gcagcauaguugguucugu

SEQ ID NO: 2086778 - RNA, 19 nt, Homo sapiens
  misc_RNA (1)...(19): siRNA sense strand
ggaggcgggacaacaguca

SEQ ID NO: 2086779 - RNA, 19 nt, Homo sapiens
  misc_RNA (1)...(19): siRNA sense strand
gacaacagucacaaugagu

SEQ ID NO: 2086780 - RNA, 19 nt, Homo sapiens
  misc_RNA (1)...(19): siRNA sense strand
acagucacaaugaguacua

SEQ ID NO: 2086781 - RNA, 19 nt, Homo sapiens
  misc_RNA (1)...(19): siRNA sense strand
aagaaagugucuggcuuca

SEQ ID NO: 2086782 - RNA, 19 nt, Homo sapiens
  misc_RNA (1)...(19): siRNA sense strand
uuggacagguuagaaugaa

SEQ ID NO: 2086783 - RNA, 19 nt, Homo sapiens
  misc_RNA (1)...(19): siRNA sense strand
caagccaucuuugcaucca

SEQ ID NO: 2086784 - RNA, 19 nt, Homo sapiens
  misc_RNA (1)...(19): siRNA sense strand
gagguuaugggagcaggaa

SEQ ID NO: 2086785 - RNA, 19 nt, Homo sapiens
  misc_RNA (1)...(19): siRNA sense strand
gaggagaucuuucacauga

SEQ ID NO: 2086786 - RNA, 19 nt, Homo sapiens
  misc_RNA (1)...(19): siRNA sense strand
gcgaggagaucauuaacuu

SEQ ID NO: 2086787 - RNA, 19 nt, Homo sapiens
  misc_RNA (1)...(19): siRNA sense strand
caagaagaauuccauacug

SEQ ID NO: 2086788 - RNA, 19 nt, Homo sapiens
  misc_RNA (1)...(19): siRNA sense strand
acaagcagguggagcagua

SEQ ID NO: 2086789 - RNA, 19 nt, Homo sapiens
  misc_RNA (1)...(19): siRNA sense strand
ggaggagggugcugagauc

SEQ ID NO: 2086790 - RNA, 19 nt, Homo sapiens
  misc_RNA (1)...(19): siRNA sense strand
gcaccugguuccugguuga

SEQ ID NO: 2086791 - RNA, 19 nt, Homo sapiens
  misc_RNA (1)...(19): siRNA sense strand
gggaggagaucuuucacau

SEQ ID NO: 2086792 - RNA, 19 nt, Homo sapiens
  misc_RNA (1)...(19): siRNA sense strand
gaggagaucauuaacuuca

SEQ ID NO: 2086793 - RNA, 19 nt, Homo sapiens
  misc_RNA (1)...(19): siRNA sense strand
ggaugaugcugcugcuaug

SEQ ID NO: 2086794 - RNA, 19 nt, Homo sapiens
  misc_RNA (1)...(19): siRNA sense strand
guacauguccuuccacaag

SEQ ID NO: 2086795 - RNA, 19 nt, Homo sapiens
  misc_RNA (1)...(19): siRNA sense strand
gagaucugccugcuaacua

SEQ ID NO: 2086796 - RNA, 19 nt, Homo sapiens
  misc_RNA (1)...(19): siRNA sense strand
gcaagaagaauuccauacu

SEQ ID NO: 2086797 - RNA, 19 nt, Homo sapiens
  misc_RNA (1)...(19): siRNA sense strand
cuacagcgacuuccgguuu

SEQ ID NO: 2086798 - RNA, 19 nt, Homo sapiens
  misc_RNA (1)...(19): siRNA sense strand
ggggagaucugccugcuaa

SEQ ID NO: 2086799 - RNA, 19 nt, Homo sapiens
  misc_RNA (1)...(19): siRNA sense strand
cagcagugguggcaucaug

SEQ ID NO: 2086800 - RNA, 19 nt, Homo sapiens
  misc_RNA (1)...(19): siRNA sense strand
ccauugcccugacucauca

SEQ ID NO: 2086801 - RNA, 19 nt, Homo sapiens
  misc_RNA (1)...(19): siRNA sense strand
gaccucaucucuucuaucc

SEQ ID NO: 2086802 - RNA, 19 nt, Homo sapiens
  misc_RNA (1)...(19): siRNA sense strand
ucacugcaguucucaccaa

SEQ ID NO: 2086803 - RNA, 19 nt, Homo sapiens
  misc_RNA (1)...(19): siRNA sense strand
gucaguaccaggagaagua

SEQ ID NO: 2086804 - RNA, 19 nt, Homo sapiens
  misc_RNA (1)...(19): siRNA sense strand
acaaagcaguggaaaucga

SEQ ID NO: 2086805 - RNA, 19 nt, Homo sapiens
  misc_RNA (1)...(19): siRNA sense strand
gggcaucaccuucuucaag

SEQ ID NO: 2086806 - RNA, 19 nt, Homo sapiens
  misc_RNA (1)...(19): siRNA sense strand
caagauguucgaugaggaa

SEQ ID NO: 2086807 - RNA, 19 nt, Homo sapiens
  misc_RNA (1)...(19): siRNA sense strand
gaucgucuucaacguauug

SEQ ID NO: 2086808 - RNA, 19 nt, Homo sapiens
  misc_RNA (1)...(19): siRNA sense strand
aaucugggccugagccuaa

SEQ ID NO: 2086809 - RNA, 19 nt, Homo sapiens
  misc_RNA (1)...(19): siRNA sense strand
gggaugaugcugcugcuau

SEQ ID NO: 2086810 - RNA, 19 nt, Homo sapiens
  misc_RNA (1)...(19): siRNA sense strand
cguaagggaucaggaagug

SEQ ID NO: 2086811 - RNA, 19 nt, Homo sapiens
  misc_RNA (1)...(19): siRNA sense strand
ucagcaggcucuccagcuu

SEQ ID NO: 2086812 - RNA, 19 nt, Homo sapiens
  misc_RNA (1)...(19): siRNA sense strand
ggacgcugaggucuacaaa

SEQ ID NO: 2086813 - RNA, 19 nt, Homo sapiens
  misc_RNA (1)...(19): siRNA sense strand
ggcagcgcauccacgagua

SEQ ID NO: 2086814 - RNA, 19 nt, Homo sapiens
  misc_RNA (1)...(19): siRNA sense strand
ggaggagaucuuucacaug

SEQ ID NO: 2086815 - RNA, 19 nt, Homo sapiens
  misc_RNA (1)...(19): siRNA sense strand
uucaacguauugucugaua

SEQ ID NO: 2086816 - RNA, 19 nt, Homo sapiens
  misc_RNA (1)...(19): siRNA sense strand
ccagcuuucugccaacaug

SEQ ID NO: 2086817 - RNA, 19 nt, Homo sapiens
  misc_RNA (1)...(19): siRNA sense strand
agggcaagauguucgauga

SEQ ID NO: 2086818 - RNA, 19 nt, Homo sapiens
  misc_RNA (1)...(19): siRNA sense strand
ugguugaccucaucucuuc

SEQ ID NO: 2086819 - RNA, 19 nt, Homo sapiens
  misc_RNA (1)...(19): siRNA sense strand
ucuuucacaugaccuauga

SEQ ID NO: 2086820 - RNA, 19 nt, Homo sapiens
  misc_RNA (1)...(19): siRNA sense strand
ggauggcugucugcaguuc

SEQ ID NO: 2086821 - RNA, 19 nt, Homo sapiens
  misc_RNA (1)...(19): siRNA sense strand
uggaucgucuucaacguau

SEQ ID NO: 2086822 - RNA, 19 nt, Homo sapiens
  misc_RNA (1)...(19): siRNA sense strand
cagcguggaccauuucaau

SEQ ID NO: 2086823 - RNA, 19 nt, Homo sapiens
  misc_RNA (1)...(19): siRNA sense strand
gauguucgaugaggaaagc

SEQ ID NO: 2086824 - RNA, 19 nt, Homo sapiens
  misc_RNA (1)...(19): siRNA sense strand
gggcguaagggaucaggaa

SEQ ID NO: 2086825 - RNA, 19 nt, Homo sapiens
  misc_RNA (1)...(19): siRNA sense strand
gacaccuacugccgccuuu

SEQ ID NO: 2086826 - RNA, 19 nt, Homo sapiens
  misc_RNA (1)...(19): siRNA sense strand
uggauuacaucuuccuagu

SEQ ID NO: 2086827 - RNA, 19 nt, Homo sapiens
  misc_RNA (1)...(19): siRNA sense strand
agccuacggucaacaaguu

SEQ ID NO: 2086828 - RNA, 19 nt, Homo sapiens
  misc_RNA (1)...(19): siRNA sense strand
guauucccaugcccuguuc

SEQ ID NO: 2086829 - RNA, 19 nt, Homo sapiens
  misc_RNA (1)...(19): siRNA sense strand
gcauccacgaguacuauga

SEQ ID NO: 2086830 - RNA, 19 nt, Homo sapiens
  misc_RNA (1)...(19): siRNA sense strand
ggauuacaucuuccuagug

SEQ ID NO: 2086831 - RNA, 19 nt, Homo sapiens
  misc_RNA (1)...(19): siRNA sense strand
gcgcauccacgaguacuau

SEQ ID NO: 2086832 - RNA, 19 nt, Homo sapiens
  misc_RNA (1)...(19): siRNA sense strand
ugaugcugcugcuauguca

SEQ ID NO: 2086833 - RNA, 19 nt, Homo sapiens
  misc_RNA (1)...(19): siRNA sense strand
cgccuuggaucgucuucaa

SEQ ID NO: 2086834 - RNA, 19 nt, Homo sapiens
  misc_RNA (1)...(19): siRNA sense strand
gguguucggcagccacaaa

SEQ ID NO: 2086835 - RNA, 19 nt, Homo sapiens
  misc_RNA (1)...(19): siRNA sense strand
caucauggagcagcacuug

SEQ ID NO: 2086836 - RNA, 19 nt, Homo sapiens
  misc_RNA (1)...(19): siRNA sense strand
ccagugggaggagaucuuu

SEQ ID NO: 2086837 - RNA, 19 nt, Homo sapiens
  misc_RNA (1)...(19): siRNA sense strand
gcagguggagcaguacaug

SEQ ID NO: 2086838 - RNA, 19 nt, Homo sapiens
  misc_RNA (1)...(19): siRNA sense strand
ucacucagcguggaccauu

SEQ ID NO: 2086839 - RNA, 19 nt, Homo sapiens
  misc_RNA (1)...(19): siRNA sense strand
ggaucgucuucaacguauu

SEQ ID NO: 2086840 - RNA, 19 nt, Homo sapiens
  misc_RNA (1)...(19): siRNA sense strand
gcagugguggcaucaugga

SEQ ID NO: 2086841 - RNA, 19 nt, Homo sapiens
  misc_RNA (1)...(19): siRNA sense strand
accgauggauccuacuuug

SEQ ID NO: 2086842 - RNA, 19 nt, Homo sapiens
  misc_RNA (1)...(19): siRNA sense strand
guuggacgcugaggucuac

SEQ ID NO: 2086843 - RNA, 19 nt, Homo sapiens
  misc_RNA (1)...(19): siRNA sense strand
gucugauacuuucuuccua

SEQ ID NO: 2086844 - RNA, 19 nt, Homo sapiens
  misc_RNA (1)...(19): siRNA sense strand
cggcaagaagaauuccaua

SEQ ID NO: 2086845 - RNA, 19 nt, Homo sapiens
  misc_RNA (1)...(19): siRNA sense strand
agaucugccugcuaacuag

SEQ ID NO: 2086846 - RNA, 19 nt, Homo sapiens
  misc_RNA (1)...(19): siRNA sense strand
gcccacaugccgcuguuug

SEQ ID NO: 2086847 - RNA, 19 nt, Homo sapiens
  misc_RNA (1)...(19): siRNA sense strand
guuccugguugaccucauc

SEQ ID NO: 2086848 - RNA, 19 nt, Homo sapiens
  misc_RNA (1)...(19): siRNA sense strand
gccauugcccugacucauc

SEQ ID NO: 2086849 - RNA, 19 nt, Homo sapiens
  misc_RNA (1)...(19): siRNA sense strand
augcugugcuugaggaguu

SEQ ID NO: 2086850 - RNA, 19 nt, Homo sapiens
  misc_RNA (1)...(19): siRNA sense strand
cuacugccgccuuuacuca

SEQ ID NO: 2086851 - RNA, 19 nt, Homo sapiens
  misc_RNA (1)...(19): siRNA sense strand
ggagaucugccugcuaacu

SEQ ID NO: 2086852 - RNA, 19 nt, Homo sapiens
  misc_RNA (1)...(19): siRNA sense strand
guugaccucaucucuucua

SEQ ID NO: 2086853 - RNA, 19 nt, Homo sapiens
  misc_RNA (1)...(19): siRNA sense strand
gcuuucugccaacauguaa

SEQ ID NO: 2086854 - RNA, 19 nt, Homo sapiens
  misc_RNA (1)...(19): siRNA sense strand
gcaucggcaagaagaauuc

SEQ ID NO: 2086855 - RNA, 19 nt, Homo sapiens
  misc_RNA (1)...(19): siRNA sense strand
gcuaccagggcaagauguu

SEQ ID NO: 2086856 - RNA, 19 nt, Homo sapiens
  misc_RNA (1)...(19): siRNA sense strand
gaggagaucuuucacauga

SEQ ID NO: 2086857 - RNA, 19 nt, Homo sapiens
  misc_RNA (1)...(19): siRNA sense strand
gcgaggagaucauuaacuu

SEQ ID NO: 2086858 - RNA, 19 nt, Homo sapiens
  misc_RNA (1)...(19): siRNA sense strand
caagaagaauuccauacug

SEQ ID NO: 2086859 - RNA, 19 nt, Homo sapiens
  misc_RNA (1)...(19): siRNA sense strand
acaagcagguggagcagua

SEQ ID NO: 2086860 - RNA, 19 nt, Homo sapiens
  misc_RNA (1)...(19): siRNA sense strand
ggaggagggugcugagauc

SEQ ID NO: 2086861 - RNA, 19 nt, Homo sapiens
  misc_RNA (1)...(19): siRNA sense strand
gcaccugguuccugguuga

SEQ ID NO: 2086862 - RNA, 19 nt, Homo sapiens
  misc_RNA (1)...(19): siRNA sense strand
gggaggagaucuuucacau

SEQ ID NO: 2086863 - RNA, 19 nt, Homo sapiens
  misc_RNA (1)...(19): siRNA sense strand
gaggagaucauuaacuuca

SEQ ID NO: 2086864 - RNA, 19 nt, Homo sapiens
  misc_RNA (1)...(19): siRNA sense strand
ggaugaugcugcugcuaug

SEQ ID NO: 2086865 - RNA, 19 nt, Homo sapiens
  misc_RNA (1)...(19): siRNA sense strand
guacauguccuuccacaag

SEQ ID NO: 2086866 - RNA, 19 nt, Homo sapiens
  misc_RNA (1)...(19): siRNA sense strand
gagaucugccugcuaacua

SEQ ID NO: 2086867 - RNA, 19 nt, Homo sapiens
  misc_RNA (1)...(19): siRNA sense strand
gcaagaagaauuccauacu

SEQ ID NO: 2086868 - RNA, 19 nt, Homo sapiens
  misc_RNA (1)...(19): siRNA sense strand
cuacagcgacuuccgguuu

SEQ ID NO: 2086869 - RNA, 19 nt, Homo sapiens
  misc_RNA (1)...(19): siRNA sense strand
ggggagaucugccugcuaa

SEQ ID NO: 2086870 - RNA, 19 nt, Homo sapiens
  misc_RNA (1)...(19): siRNA sense strand
cagcagugguggcaucaug

SEQ ID NO: 2086871 - RNA, 19 nt, Homo sapiens
  misc_RNA (1)...(19): siRNA sense strand
ccauugcccugacucauca

SEQ ID NO: 2086872 - RNA, 19 nt, Homo sapiens
  misc_RNA (1)...(19): siRNA sense strand
gaccucaucucuucuaucc

SEQ ID NO: 2086873 - RNA, 19 nt, Homo sapiens
  misc_RNA (1)...(19): siRNA sense strand
ucacugcaguucucaccaa

SEQ ID NO: 2086874 - RNA, 19 nt, Homo sapiens
  misc_RNA (1)...(19): siRNA sense strand
gucaguaccaggagaagua

SEQ ID NO: 2086875 - RNA, 19 nt, Homo sapiens
  misc_RNA (1)...(19): siRNA sense strand
acaaagcaguggaaaucga

SEQ ID NO: 2086876 - RNA, 19 nt, Homo sapiens
  misc_RNA (1)...(19): siRNA sense strand
gggcaucaccuucuucaag

SEQ ID NO: 2086877 - RNA, 19 nt, Homo sapiens
  misc_RNA (1)...(19): siRNA sense strand
caagauguucgaugaggaa

SEQ ID NO: 2086878 - RNA, 19 nt, Homo sapiens
  misc_RNA (1)...(19): siRNA sense strand
gaucgucuucaacguauug

SEQ ID NO: 2086879 - RNA, 19 nt, Homo sapiens
  misc_RNA (1)...(19): siRNA sense strand
aaucugggccugagccuaa

SEQ ID NO: 2086880 - RNA, 19 nt, Homo sapiens
  misc_RNA (1)...(19): siRNA sense strand
gggaugaugcugcugcuau

SEQ ID NO: 2086881 - RNA, 19 nt, Homo sapiens
  misc_RNA (1)...(19): siRNA sense strand
cguaagggaucaggaagug

SEQ ID NO: 2086882 - RNA, 19 nt, Homo sapiens
  misc_RNA (1)...(19): siRNA sense strand
ucagcaggcucuccagcuu

SEQ ID NO: 2086883 - RNA, 19 nt, Homo sapiens
  misc_RNA (1)...(19): siRNA sense strand
ggacgcugaggucuacaaa

SEQ ID NO: 2086884 - RNA, 19 nt, Homo sapiens
  misc_RNA (1)...(19): siRNA sense strand
ggcagcgcauccacgagua

SEQ ID NO: 2086885 - RNA, 19 nt, Homo sapiens
  misc_RNA (1)...(19): siRNA sense strand
ggaggagaucuuucacaug

SEQ ID NO: 2086886 - RNA, 19 nt, Homo sapiens
  misc_RNA (1)...(19): siRNA sense strand
uucaacguauugucugaua

SEQ ID NO: 2086887 - RNA, 19 nt, Homo sapiens
  misc_RNA (1)...(19): siRNA sense strand
ccagcuuucugccaacaug

SEQ ID NO: 2086888 - RNA, 19 nt, Homo sapiens
  misc_RNA (1)...(19): siRNA sense strand
agggcaagauguucgauga

SEQ ID NO: 2086889 - RNA, 19 nt, Homo sapiens
  misc_RNA (1)...(19): siRNA sense strand
ugguugaccucaucucuuc

SEQ ID NO: 2086890 - RNA, 19 nt, Homo sapiens
  misc_RNA (1)...(19): siRNA sense strand
ucuuucacaugaccuauga

SEQ ID NO: 2086891 - RNA, 19 nt, Homo sapiens
  misc_RNA (1)...(19): siRNA sense strand
ggauggcugucugcaguuc

SEQ ID NO: 2086892 - RNA, 19 nt, Homo sapiens
  misc_RNA (1)...(19): siRNA sense strand
uggaucgucuucaacguau

SEQ ID NO: 2086893 - RNA, 19 nt, Homo sapiens
  misc_RNA (1)...(19): siRNA sense strand
cagcguggaccauuucaau

SEQ ID NO: 2086894 - RNA, 19 nt, Homo sapiens
  misc_RNA (1)...(19): siRNA sense strand
gauguucgaugaggaaagc

SEQ ID NO: 2086895 - RNA, 19 nt, Homo sapiens
  misc_RNA (1)...(19): siRNA sense strand
gggcguaagggaucaggaa

SEQ ID NO: 2086896 - RNA, 19 nt, Homo sapiens
  misc_RNA (1)...(19): siRNA sense strand
gacaccuacugccgccuuu

SEQ ID NO: 2086897 - RNA, 19 nt, Homo sapiens
  misc_RNA (1)...(19): siRNA sense strand
uggauuacaucuuccuagu

SEQ ID NO: 2086898 - RNA, 19 nt, Homo sapiens
  misc_RNA (1)...(19): siRNA sense strand
agccuacggucaacaaguu

SEQ ID NO: 2086899 - RNA, 19 nt, Homo sapiens
  misc_RNA (1)...(19): siRNA sense strand
guauucccaugcccuguuc

SEQ ID NO: 2086900 - RNA, 19 nt, Homo sapiens
  misc_RNA (1)...(19): siRNA sense strand
gcauccacgaguacuauga

SEQ ID NO: 2086901 - RNA, 19 nt, Homo sapiens
  misc_RNA (1)...(19): siRNA sense strand
ggauuacaucuuccuagug

SEQ ID NO: 2086902 - RNA, 19 nt, Homo sapiens
  misc_RNA (1)...(19): siRNA sense strand
gcgcauccacgaguacuau

SEQ ID NO: 2086903 - RNA, 19 nt, Homo sapiens
  misc_RNA (1)...(19): siRNA sense strand
ugaugcugcugcuauguca

SEQ ID NO: 2086904 - RNA, 19 nt, Homo sapiens
  misc_RNA (1)...(19): siRNA sense strand
cgccuuggaucgucuucaa

SEQ ID NO: 2086905 - RNA, 19 nt, Homo sapiens
  misc_RNA (1)...(19): siRNA sense strand
gguguucggcagccacaaa

SEQ ID NO: 2086906 - RNA, 19 nt, Homo sapiens
  misc_RNA (1)...(19): siRNA sense strand
caucauggagcagcacuug

SEQ ID NO: 2086907 - RNA, 19 nt, Homo sapiens
  misc_RNA (1)...(19): siRNA sense strand
ccagugggaggagaucuuu

SEQ ID NO: 2086908 - RNA, 19 nt, Homo sapiens
  misc_RNA (1)...(19): siRNA sense strand
gcagguggagcaguacaug

SEQ ID NO: 2086909 - RNA, 19 nt, Homo sapiens
  misc_RNA (1)...(19): siRNA sense strand
ucacucagcguggaccauu

SEQ ID NO: 2086910 - RNA, 19 nt, Homo sapiens
  misc_RNA (1)...(19): siRNA sense strand
ggaucgucuucaacguauu

SEQ ID NO: 2086911 - RNA, 19 nt, Homo sapiens
  misc_RNA (1)...(19): siRNA sense strand
gcagugguggcaucaugga

SEQ ID NO: 2086912 - RNA, 19 nt, Homo sapiens
  misc_RNA (1)...(19): siRNA sense strand
accgauggauccuacuuug

SEQ ID NO: 2086913 - RNA, 19 nt, Homo sapiens
  misc_RNA (1)...(19): siRNA sense strand
guuggacgcugaggucuac

SEQ ID NO: 2086914 - RNA, 19 nt, Homo sapiens
  misc_RNA (1)...(19): siRNA sense strand
gucugauacuuucuuccua

SEQ ID NO: 2086915 - RNA, 19 nt, Homo sapiens
  misc_RNA (1)...(19): siRNA sense strand
cggcaagaagaauuccaua

SEQ ID NO: 2086916 - RNA, 19 nt, Homo sapiens
  misc_RNA (1)...(19): siRNA sense strand
agaucugccugcuaacuag

SEQ ID NO: 2086917 - RNA, 19 nt, Homo sapiens
  misc_RNA (1)...(19): siRNA sense strand
gcccacaugccgcuguuug

SEQ ID NO: 2086918 - RNA, 19 nt, Homo sapiens
  misc_RNA (1)...(19): siRNA sense strand
guuccugguugaccucauc

SEQ ID NO: 2086919 - RNA, 19 nt, Homo sapiens
  misc_RNA (1)...(19): siRNA sense strand
gccauugcccugacucauc

SEQ ID NO: 2086920 - RNA, 19 nt, Homo sapiens
  misc_RNA (1)...(19): siRNA sense strand
augcugugcuugaggaguu

SEQ ID NO: 2086921 - RNA, 19 nt, Homo sapiens
  misc_RNA (1)...(19): siRNA sense strand
cuacugccgccuuuacuca

SEQ ID NO: 2086922 - RNA, 19 nt, Homo sapiens
  misc_RNA (1)...(19): siRNA sense strand
ggagaucugccugcuaacu

SEQ ID NO: 2086923 - RNA, 19 nt, Homo sapiens
  misc_RNA (1)...(19): siRNA sense strand
guugaccucaucucuucua

SEQ ID NO: 2086924 - RNA, 19 nt, Homo sapiens
  misc_RNA (1)...(19): siRNA sense strand
gcuuucugccaacauguaa

SEQ ID NO: 2086925 - RNA, 19 nt, Homo sapiens
  misc_RNA (1)...(19): siRNA sense strand
gcaucggcaagaagaauuc

SEQ ID NO: 2086926 - RNA, 19 nt, Homo sapiens
  misc_RNA (1)...(19): siRNA sense strand
gcuaccagggcaagauguu

SEQ ID NO: 2086927 - RNA, 19 nt, Homo sapiens
  misc_RNA (1)...(19): siRNA sense strand
gcucugcgcucucuacaaa

SEQ ID NO: 2086928 - RNA, 19 nt, Homo sapiens
  misc_RNA (1)...(19): siRNA sense strand
aggcaaggcugcaagauua

SEQ ID NO: 2086929 - RNA, 19 nt, Homo sapiens
  misc_RNA (1)...(19): siRNA sense strand
caaaccaacacauacauua

SEQ ID NO: 2086930 - RNA, 19 nt, Homo sapiens
  misc_RNA (1)...(19): siRNA sense strand
gcaagauccucgaguacaa

SEQ ID NO: 2086931 - RNA, 19 nt, Homo sapiens
  misc_RNA (1)...(19): siRNA sense strand
gcaagcaggauguguacua

SEQ ID NO: 2086932 - RNA, 19 nt, Homo sapiens
  misc_RNA (1)...(19): siRNA sense strand
ccacaagccugcagggaau

SEQ ID NO: 2086933 - RNA, 19 nt, Homo sapiens
  misc_RNA (1)...(19): siRNA sense strand
ggaauaauggaaagaaaug

SEQ ID NO: 2086934 - RNA, 19 nt, Homo sapiens
  misc_RNA (1)...(19): siRNA sense strand
gaugagggccugaacuaug

SEQ ID NO: 2086935 - RNA, 19 nt, Homo sapiens
  misc_RNA (1)...(19): siRNA sense strand
gcaaaccaacacauacauu

SEQ ID NO: 2086936 - RNA, 19 nt, Homo sapiens
  misc_RNA (1)...(19): siRNA sense strand
agugguaucuggaauaaug

SEQ ID NO: 2086937 - RNA, 19 nt, Homo sapiens
  misc_RNA (1)...(19): siRNA sense strand
cuagugguaucuggaauaa

SEQ ID NO: 2086938 - RNA, 19 nt, Homo sapiens
  misc_RNA (1)...(19): siRNA sense strand
uaagucugcucucccuuug

SEQ ID NO: 2086939 - RNA, 19 nt, Homo sapiens
  misc_RNA (1)...(19): siRNA sense strand
gacacaaccuguucugcau

SEQ ID NO: 2086940 - RNA, 19 nt, Homo sapiens
  misc_RNA (1)...(19): siRNA sense strand
ggccugaacuaugcucuug

SEQ ID NO: 2086941 - RNA, 19 nt, Homo sapiens
  misc_RNA (1)...(19): siRNA sense strand
caacacauacauuaucaca

SEQ ID NO: 2086942 - RNA, 19 nt, Homo sapiens
  misc_RNA (1)...(19): siRNA sense strand
gggauugcauggucugcuu

SEQ ID NO: 2086943 - RNA, 19 nt, Homo sapiens
  misc_RNA (1)...(19): siRNA sense strand
ucagcuggcucucgaucaa

SEQ ID NO: 2086944 - RNA, 19 nt, Homo sapiens
  misc_RNA (1)...(19): siRNA sense strand
gaccaacaccuacaucaag

SEQ ID NO: 2086945 - RNA, 19 nt, Homo sapiens
  misc_RNA (1)...(19): siRNA sense strand
gggccaagaccaacaccua

SEQ ID NO: 2086946 - RNA, 19 nt, Homo sapiens
  misc_RNA (1)...(19): siRNA sense strand
gcaagccauccgaauauuc

SEQ ID NO: 2086947 - RNA, 19 nt, Homo sapiens
  misc_RNA (1)...(19): siRNA sense strand
gggcuucucuaaacuuggu

SEQ ID NO: 2086948 - RNA, 19 nt, Homo sapiens
  misc_RNA (1)...(19): siRNA sense strand
gugaaacuuuauccugaau

SEQ ID NO: 2086949 - RNA, 19 nt, Homo sapiens
  misc_RNA (1)...(19): siRNA sense strand
cuggcaagauccucgagua

SEQ ID NO: 2086950 - RNA, 19 nt, Homo sapiens
  misc_RNA (1)...(19): siRNA sense strand
uuggagaacuaggauguuu

SEQ ID NO: 2086951 - RNA, 19 nt, Homo sapiens
  misc_RNA (1)...(19): siRNA sense strand
gcagcaaaccaacacauac

SEQ ID NO: 2086952 - RNA, 19 nt, Homo sapiens
  misc_RNA (1)...(19): siRNA sense strand
ccucaauccuaaaucugaa

SEQ ID NO: 2086953 - RNA, 19 nt, Homo sapiens
  misc_RNA (1)...(19): siRNA sense strand
cagggcuucucuaaacuug

SEQ ID NO: 2086954 - RNA, 19 nt, Homo sapiens
  misc_RNA (1)...(19): siRNA sense strand
ugcauggucugcuuugaga

SEQ ID NO: 2086955 - RNA, 19 nt, Homo sapiens
  misc_RNA (1)...(19): siRNA sense strand
cacgcaagccauccgaaua

SEQ ID NO: 2086956 - RNA, 19 nt, Homo sapiens
  misc_RNA (1)...(19): siRNA sense strand
gauccucgaguacaacaau

SEQ ID NO: 2086957 - RNA, 19 nt, Homo sapiens
  misc_RNA (1)...(19): siRNA sense strand
cuggaauaauggaaagaaa

SEQ ID NO: 2086958 - RNA, 19 nt, Homo sapiens
  misc_RNA (1)...(19): siRNA sense strand
gacuccagaugucauaagu

SEQ ID NO: 2086959 - RNA, 19 nt, Homo sapiens
  misc_RNA (1)...(19): siRNA sense strand
cuccagggcuucucuaaac

SEQ ID NO: 2086960 - RNA, 19 nt, Homo sapiens
  misc_RNA (1)...(19): siRNA sense strand
caagcaggauguguacuac

SEQ ID NO: 2086961 - RNA, 19 nt, Homo sapiens
  misc_RNA (1)...(19): siRNA sense strand
cagcaaaccaacacauaca

SEQ ID NO: 2086962 - RNA, 19 nt, Homo sapiens
  misc_RNA (1)...(19): siRNA sense strand
caggcaaggcugcaagauu

SEQ ID NO: 2086963 - RNA, 19 nt, Homo sapiens
  misc_RNA (1)...(19): siRNA sense strand
ucugcgcucucuacaaaga

SEQ ID NO: 2086964 - RNA, 19 nt, Homo sapiens
  misc_RNA (1)...(19): siRNA sense strand
ggugcgcacuggcaagauc

SEQ ID NO: 2086965 - RNA, 19 nt, Homo sapiens
  misc_RNA (1)...(19): siRNA sense strand
gcuccagggcuucucuaaa

SEQ ID NO: 2086966 - RNA, 19 nt, Homo sapiens
  misc_RNA (1)...(19): siRNA sense strand
agugaaacuuuauccugaa

SEQ ID NO: 2086967 - RNA, 19 nt, Homo sapiens
  misc_RNA (1)...(19): siRNA sense strand
gaggacggacccagagugu

SEQ ID NO: 2086968 - RNA, 19 nt, Homo sapiens
  misc_RNA (1)...(19): siRNA sense strand
uaucuggaauaauggaaag

SEQ ID NO: 2086969 - RNA, 19 nt, Homo sapiens
  misc_RNA (1)...(19): siRNA sense strand
caagccauccgaauauucu

SEQ ID NO: 2086970 - RNA, 19 nt, Homo sapiens
  misc_RNA (1)...(19): siRNA sense strand
aauccuaaaucugaacuuc

SEQ ID NO: 2086971 - RNA, 19 nt, Homo sapiens
  misc_RNA (1)...(19): siRNA sense strand
caacaccuacaucaagaca

SEQ ID NO: 2086972 - RNA, 19 nt, Homo sapiens
  misc_RNA (1)...(19): siRNA sense strand
accaacaccuacaucaaga

SEQ ID NO: 2086973 - RNA, 19 nt, Homo sapiens
  misc_RNA (1)...(19): siRNA sense strand
ggcaaggcugcaagauuaa

SEQ ID NO: 2086974 - RNA, 19 nt, Homo sapiens
  misc_RNA (1)...(19): siRNA sense strand
gccucaauccuaaaucuga

SEQ ID NO: 2086975 - RNA, 19 nt, Homo sapiens
  misc_RNA (1)...(19): siRNA sense strand
accgagggcugcuggaaga

SEQ ID NO: 2086976 - RNA, 19 nt, Homo sapiens
  misc_RNA (1)...(19): siRNA sense strand
cgcaagccauccgaauauu

SEQ ID NO: 2086977 - RNA, 19 nt, Homo sapiens
  misc_RNA (1)...(19): siRNA sense strand
accaacacauacauuauca

SEQ ID NO: 2086978 - RNA, 19 nt, Homo sapiens
  misc_RNA (1)...(19): siRNA sense strand
gccaagcucugcgcucucu

SEQ ID NO: 2086979 - RNA, 19 nt, Homo sapiens
  misc_RNA (1)...(19): siRNA sense strand
ucuagugguaucuggaaua

SEQ ID NO: 2086980 - RNA, 19 nt, Homo sapiens
  misc_RNA (1)...(19): siRNA sense strand
gcaagccccucuccaccuu

SEQ ID NO: 2086981 - RNA, 19 nt, Homo sapiens
  misc_RNA (1)...(19): siRNA sense strand
cuccagaugucauaagucu

SEQ ID NO: 2086982 - RNA, 19 nt, Homo sapiens
  misc_RNA (1)...(19): siRNA sense strand
gcauccagcagcaaaccaa

SEQ ID NO: 2086983 - RNA, 19 nt, Homo sapiens
  misc_RNA (1)...(19): siRNA sense strand
ggagaacuaggauguuucg

SEQ ID NO: 2086984 - RNA, 19 nt, Homo sapiens
  misc_RNA (1)...(19): siRNA sense strand
acgcaagccauccgaauau

SEQ ID NO: 2086985 - RNA, 19 nt, Homo sapiens
  misc_RNA (1)...(19): siRNA sense strand
gaauauucaauccuaacuc

SEQ ID NO: 2086986 - RNA, 19 nt, Homo sapiens
  misc_RNA (1)...(19): siRNA sense strand
ggauugcauggucugcuuu

SEQ ID NO: 2086987 - RNA, 19 nt, Homo sapiens
  misc_RNA (1)...(19): siRNA sense strand
guaucuggaauaauggaaa

SEQ ID NO: 2086988 - RNA, 19 nt, Homo sapiens
  misc_RNA (1)...(19): siRNA sense strand
cauccgaauauucuccuaa

SEQ ID NO: 2086989 - RNA, 19 nt, Homo sapiens
  misc_RNA (1)...(19): siRNA sense strand
auaagucugcucucccuuu

SEQ ID NO: 2086990 - RNA, 19 nt, Homo sapiens
  misc_RNA (1)...(19): siRNA sense strand
ccugaacuaugcucuugca

SEQ ID NO: 2086991 - RNA, 19 nt, Homo sapiens
  misc_RNA (1)...(19): siRNA sense strand
ggacuccagaugucauaag

SEQ ID NO: 2086992 - RNA, 19 nt, Homo sapiens
  misc_RNA (1)...(19): siRNA sense strand
gcuauggcgugggcaagca

SEQ ID NO: 2086993 - RNA, 19 nt, Homo sapiens
  misc_RNA (1)...(19): siRNA sense strand
ugcagggaauagaugauga

SEQ ID NO: 2086994 - RNA, 19 nt, Homo sapiens
  misc_RNA (1)...(19): siRNA sense strand
cuaucaaggcccaggcuuu

SEQ ID NO: 2086995 - RNA, 19 nt, Homo sapiens
  misc_RNA (1)...(19): siRNA sense strand
ccacgcaagccauccgaau

SEQ ID NO: 2086996 - RNA, 19 nt, Homo sapiens
  misc_RNA (1)...(19): siRNA sense strand
guaccucuuuccgggcuau

SEQ ID NO: 2086997 - RNA, 19 nt, Homo sapiens
  misc_RNA (1)...(19): siRNA sense strand
ggcaagauccucgaguaca

SEQ ID NO: 2086998 - RNA, 19 nt, Homo sapiens
  misc_RNA (1)...(19): siRNA sense strand
gaauaauggaaagaaaugg

SEQ ID NO: 2086999 - RNA, 19 nt, Homo sapiens
  misc_RNA (1)...(19): siRNA sense strand
agaccaacaccuacaucaa

SEQ ID NO: 2087000 - RNA, 19 nt, Homo sapiens
  misc_RNA (1)...(19): siRNA sense strand
gggcuuuggagaacuagga

SEQ ID NO: 2087001 - RNA, 19 nt, Homo sapiens
  misc_RNA (1)...(19): siRNA sense strand
ggaggaagcucuaaacauu

SEQ ID NO: 2087002 - RNA, 19 nt, Homo sapiens
  misc_RNA (1)...(19): siRNA sense strand
ccaaccagcugaagaaaua

SEQ ID NO: 2087003 - RNA, 19 nt, Homo sapiens
  misc_RNA (1)...(19): siRNA sense strand
caaaagagcugacccaguu

SEQ ID NO: 2087004 - RNA, 19 nt, Homo sapiens
  misc_RNA (1)...(19): siRNA sense strand
gagaaucuguugccuugaa

SEQ ID NO: 2087005 - RNA, 19 nt, Homo sapiens
  misc_RNA (1)...(19): siRNA sense strand
ggaaugugcugucacuugu

SEQ ID NO: 2087006 - RNA, 19 nt, Homo sapiens
  misc_RNA (1)...(19): siRNA sense strand
gaagagcccagaucacuga

SEQ ID NO: 2087007 - RNA, 19 nt, Homo sapiens
  misc_RNA (1)...(19): siRNA sense strand
gcugucacuuguucaaaua

SEQ ID NO: 2087008 - RNA, 19 nt, Homo sapiens
  misc_RNA (1)...(19): siRNA sense strand
guuaaggacucuaaagugu

SEQ ID NO: 2087009 - RNA, 19 nt, Homo sapiens
  misc_RNA (1)...(19): siRNA sense strand
uaaggacucuaaaguguug

SEQ ID NO: 2087010 - RNA, 19 nt, Homo sapiens
  misc_RNA (1)...(19): siRNA sense strand
caaagagaaguuccuuaua

SEQ ID NO: 2087011 - RNA, 19 nt, Homo sapiens
  misc_RNA (1)...(19): siRNA sense strand
ggcauuggaugaacagaaa

SEQ ID NO: 2087012 - RNA, 19 nt, Homo sapiens
  misc_RNA (1)...(19): siRNA sense strand
uggagaagcuggcagagaa

SEQ ID NO: 2087013 - RNA, 19 nt, Homo sapiens
  misc_RNA (1)...(19): siRNA sense strand
ggaaaugguucagcaggau

SEQ ID NO: 2087014 - RNA, 19 nt, Homo sapiens
  misc_RNA (1)...(19): siRNA sense strand
gggaugaacugcaguccau

SEQ ID NO: 2087015 - RNA, 19 nt, Homo sapiens
  misc_RNA (1)...(19): siRNA sense strand
ucaaagagaaguuccuuau

SEQ ID NO: 2087016 - RNA, 19 nt, Homo sapiens
  misc_RNA (1)...(19): siRNA sense strand
ccagagaggugcagaagac

SEQ ID NO: 2087017 - RNA, 19 nt, Homo sapiens
  misc_RNA (1)...(19): siRNA sense strand
gaggagcucaggcaguaua

SEQ ID NO: 2087018 - RNA, 19 nt, Homo sapiens
  misc_RNA (1)...(19): siRNA sense strand
ggaggaaugugcugucacu

SEQ ID NO: 2087019 - RNA, 19 nt, Homo sapiens
  misc_RNA (1)...(19): siRNA sense strand
gcagaagacugaagaaaag

SEQ ID NO: 2087020 - RNA, 19 nt, Homo sapiens
  misc_RNA (1)...(19): siRNA sense strand
cgaggagguugagaaagua

SEQ ID NO: 2087021 - RNA, 19 nt, Homo sapiens
  misc_RNA (1)...(19): siRNA sense strand
gaagaaauacaagugugaa

SEQ ID NO: 2087022 - RNA, 19 nt, Homo sapiens
  misc_RNA (1)...(19): siRNA sense strand
gaaauacaagugugaagag

SEQ ID NO: 2087023 - RNA, 19 nt, Homo sapiens
  misc_RNA (1)...(19): siRNA sense strand
guacaaagacaucauagac

SEQ ID NO: 2087024 - RNA, 19 nt, Homo sapiens
  misc_RNA (1)...(19): siRNA sense strand
cgacucugcucugguugua

SEQ ID NO: 2087025 - RNA, 19 nt, Homo sapiens
  misc_RNA (1)...(19): siRNA sense strand
cgacaaagacgaggagguu

SEQ ID NO: 2087026 - RNA, 19 nt, Homo sapiens
  misc_RNA (1)...(19): siRNA sense strand
gagaggugcagaagacuga

SEQ ID NO: 2087027 - RNA, 19 nt, Homo sapiens
  misc_RNA (1)...(19): siRNA sense strand
uccgagaccucaaagagaa

SEQ ID NO: 2087028 - RNA, 19 nt, Homo sapiens
  misc_RNA (1)...(19): siRNA sense strand
ccaguuacgggagaaguua

SEQ ID NO: 2087029 - RNA, 19 nt, Homo sapiens
  misc_RNA (1)...(19): siRNA sense strand
ccacaaacgucagcauggu

SEQ ID NO: 2087030 - RNA, 19 nt, Homo sapiens
  misc_RNA (1)...(19): siRNA sense strand
acgaggagguugagaaagu

SEQ ID NO: 2087031 - RNA, 19 nt, Homo sapiens
  misc_RNA (1)...(19): siRNA sense strand
gaacauccuagaaaucaac

SEQ ID NO: 2087032 - RNA, 19 nt, Homo sapiens
  misc_RNA (1)...(19): siRNA sense strand
ugaugaagaugaagaugag

SEQ ID NO: 2087033 - RNA, 19 nt, Homo sapiens
  misc_RNA (1)...(19): siRNA sense strand
ugaagaaauacaaguguga

SEQ ID NO: 2087034 - RNA, 19 nt, Homo sapiens
  misc_RNA (1)...(19): siRNA sense strand
gcaguuccgagaccucaaa

SEQ ID NO: 2087035 - RNA, 19 nt, Homo sapiens
  misc_RNA (1)...(19): siRNA sense strand
gcagagcaccuuguucaca

SEQ ID NO: 2087036 - RNA, 19 nt, Homo sapiens
  misc_RNA (1)...(19): siRNA sense strand
agaaaucaaccaggaauug

SEQ ID NO: 2087037 - RNA, 19 nt, Homo sapiens
  misc_RNA (1)...(19): siRNA sense strand
ggacagugcguggaaaugg

SEQ ID NO: 2087038 - RNA, 19 nt, Homo sapiens
  misc_RNA (1)...(19): siRNA sense strand
gagcucaggcaguauaaag

SEQ ID NO: 2087039 - RNA, 19 nt, Homo sapiens
  misc_RNA (1)...(19): siRNA sense strand
auacaagugugaagaguac

SEQ ID NO: 2087040 - RNA, 19 nt, Homo sapiens
  misc_RNA (1)...(19): siRNA sense strand
gaggaagcucuaaacauuc

SEQ ID NO: 2087041 - RNA, 19 nt, Homo sapiens
  misc_RNA (1)...(19): siRNA sense strand
agagugaacacccucauga

SEQ ID NO: 2087042 - RNA, 19 nt, Homo sapiens
  misc_RNA (1)...(19): siRNA sense strand
gguuaaggacucuaaagug

SEQ ID NO: 2087043 - RNA, 19 nt, Homo sapiens
  misc_RNA (1)...(19): siRNA sense strand
ggaugaagacgacaaagac

SEQ ID NO: 2087044 - RNA, 19 nt, Homo sapiens
  misc_RNA (1)...(19): siRNA sense strand
agaugaagaugaggaugaa

SEQ ID NO: 2087045 - RNA, 19 nt, Homo sapiens
  misc_RNA (1)...(19): siRNA sense strand
gcugaacaagcaucugaaa

SEQ ID NO: 2087046 - RNA, 19 nt, Homo sapiens
  misc_RNA (1)...(19): siRNA sense strand
caugacaaguccaacucuu

SEQ ID NO: 2087047 - RNA, 19 nt, Homo sapiens
  misc_RNA (1)...(19): siRNA sense strand
aaaguguugugucguguuc

SEQ ID NO: 2087048 - RNA, 19 nt, Homo sapiens
  misc_RNA (1)...(19): siRNA sense strand
acaaagacgaggagguuga

SEQ ID NO: 2087049 - RNA, 19 nt, Homo sapiens
  misc_RNA (1)...(19): siRNA sense strand
aagagaaguuccuuauaac

SEQ ID NO: 2087050 - RNA, 19 nt, Homo sapiens
  misc_RNA (1)...(19): siRNA sense strand
gaaaucaaccaggaauugc

SEQ ID NO: 2087051 - RNA, 19 nt, Homo sapiens
  misc_RNA (1)...(19): siRNA sense strand
gacacacccuuggccagaa

SEQ ID NO: 2087052 - RNA, 19 nt, Homo sapiens
  misc_RNA (1)...(19): siRNA sense strand
gggaagagcccagaucacu

SEQ ID NO: 2087053 - RNA, 19 nt, Homo sapiens
  misc_RNA (1)...(19): siRNA sense strand
agucgacucugcucugguu

SEQ ID NO: 2087054 - RNA, 19 nt, Homo sapiens
  misc_RNA (1)...(19): siRNA sense strand
cuaccucccucacucuugu

SEQ ID NO: 2087055 - RNA, 19 nt, Homo sapiens
  misc_RNA (1)...(19): siRNA sense strand
agaguacaaagacaucaua

SEQ ID NO: 2087056 - RNA, 19 nt, Homo sapiens
  misc_RNA (1)...(19): siRNA sense strand
agacgaggagguugagaaa

SEQ ID NO: 2087057 - RNA, 19 nt, Homo sapiens
  misc_RNA (1)...(19): siRNA sense strand
gaggaggaagcucuaaaca

SEQ ID NO: 2087058 - RNA, 19 nt, Homo sapiens
  misc_RNA (1)...(19): siRNA sense strand
gaagaguacaaagacauca

SEQ ID NO: 2087059 - RNA, 19 nt, Homo sapiens
  misc_RNA (1)...(19): siRNA sense strand
gacagugcguggaaauggu

SEQ ID NO: 2087060 - RNA, 19 nt, Homo sapiens
  misc_RNA (1)...(19): siRNA sense strand
ugaacauccuagaaaucaa

SEQ ID NO: 2087061 - RNA, 19 nt, Homo sapiens
  misc_RNA (1)...(19): siRNA sense strand
uggcagcauucaucacaug

SEQ ID NO: 2087062 - RNA, 19 nt, Homo sapiens
  misc_RNA (1)...(19): siRNA sense strand
uggaugaacagaaaguuug

SEQ ID NO: 2087063 - RNA, 19 nt, Homo sapiens
  misc_RNA (1)...(19): siRNA sense strand
acucugcucugguuguaga

SEQ ID NO: 2087064 - RNA, 19 nt, Homo sapiens
  misc_RNA (1)...(19): siRNA sense strand
uggcagagcaccuuguuca

SEQ ID NO: 2087065 - RNA, 19 nt, Homo sapiens
  misc_RNA (1)...(19): siRNA sense strand
agagagcaaucagcaguuc

SEQ ID NO: 2087066 - RNA, 19 nt, Homo sapiens
  misc_RNA (1)...(19): siRNA sense strand
ccagacaccaugacaaguc

SEQ ID NO: 2087067 - RNA, 19 nt, Homo sapiens
  misc_RNA (1)...(19): siRNA sense strand
gagagugaacacccucaug

SEQ ID NO: 2087068 - RNA, 19 nt, Homo sapiens
  misc_RNA (1)...(19): siRNA sense strand
aagaugaagaugaggauga

SEQ ID NO: 2087069 - RNA, 19 nt, Homo sapiens
  misc_RNA (1)...(19): siRNA sense strand
agaaauacaagugugaaga

SEQ ID NO: 2087070 - RNA, 19 nt, Homo sapiens
  misc_RNA (1)...(19): siRNA sense strand
ccuuauaacucaagcuacu

SEQ ID NO: 2087071 - RNA, 19 nt, Homo sapiens
  misc_RNA (1)...(19): siRNA sense strand
gcugaagaaauacaagugu

SEQ ID NO: 2087072 - RNA, 19 nt, Homo sapiens
  misc_RNA (1)...(19): siRNA sense strand
uuacuccaaucccaaaugg

SEQ ID NO: 2087073 - RNA, 19 nt, Homo sapiens
  misc_RNA (1)...(19): siRNA sense strand
ugccagggauuacuccaau

SEQ ID NO: 2087074 - RNA, 19 nt, Homo sapiens
  misc_RNA (1)...(19): siRNA sense strand
aaugugcugucacuuguuc

SEQ ID NO: 2087075 - RNA, 19 nt, Homo sapiens
  misc_RNA (1)...(19): siRNA sense strand
gugcagaagacugaagaaa

SEQ ID NO: 2087076 - RNA, 19 nt, Homo sapiens
  misc_RNA (1)...(19): siRNA sense strand
ugagaaaguacaggaauca

SEQ ID NO: 2087077 - RNA, 19 nt, Homo sapiens
  misc_RNA (1)...(19): siRNA sense strand
gcgagagggcagagaugaa

SEQ ID NO: 2087078 - RNA, 19 nt, Homo sapiens
  misc_RNA (1)...(19): siRNA sense strand
ggaacacgaagucgacucu

SEQ ID NO: 2087079 - RNA, 19 nt, Homo sapiens
  misc_RNA (1)...(19): siRNA sense strand
gaaugugcugucacuuguu

SEQ ID NO: 2087080 - RNA, 19 nt, Homo sapiens
  misc_RNA (1)...(19): siRNA sense strand
gguaucugccgacccuuug

SEQ ID NO: 2087081 - RNA, 19 nt, Homo sapiens
  misc_RNA (1)...(19): siRNA sense strand
aauacaagugugaagagua

SEQ ID NO: 2087082 - RNA, 19 nt, Homo sapiens
  misc_RNA (1)...(19): siRNA sense strand
aaauacaagugugaagagu

SEQ ID NO: 2087083 - RNA, 19 nt, Homo sapiens
  misc_RNA (1)...(19): siRNA sense strand
augacaaguccaacucuua

SEQ ID NO: 2087084 - RNA, 19 nt, Homo sapiens
  misc_RNA (1)...(19): siRNA sense strand
ugacaaguccaacucuuac

SEQ ID NO: 2087085 - RNA, 19 nt, Homo sapiens
  misc_RNA (1)...(19): siRNA sense strand
cuagaaaucaaccaggaau

SEQ ID NO: 2087086 - RNA, 19 nt, Homo sapiens
  misc_RNA (1)...(19): siRNA sense strand
uucaucacaugcuaacuga

SEQ ID NO: 2087087 - RNA, 19 nt, Homo sapiens
  misc_RNA (1)...(19): siRNA sense strand
acucugugcugagggauga

SEQ ID NO: 2087088 - RNA, 19 nt, Homo sapiens
  misc_RNA (1)...(19): siRNA sense strand
caagugugaagaguacaaa

SEQ ID NO: 2087089 - RNA, 19 nt, Homo sapiens
  misc_RNA (1)...(19): siRNA sense strand
gcaguauaaagcccugguu

SEQ ID NO: 2087090 - RNA, 19 nt, Homo sapiens
  misc_RNA (1)...(19): siRNA sense strand
gagugaacacccucaugau

SEQ ID NO: 2087091 - RNA, 19 nt, Homo sapiens
  misc_RNA (1)...(19): siRNA sense strand
aggacucacuggaggaaug

SEQ ID NO: 2087092 - RNA, 19 nt, Homo sapiens
  misc_RNA (1)...(19): siRNA sense strand
cagaaaaugaugaagauga

SEQ ID NO: 2087093 - RNA, 19 nt, Homo sapiens
  misc_RNA (1)...(19): siRNA sense strand
uagaaaucaaccaggaauu

SEQ ID NO: 2087094 - RNA, 19 nt, Homo sapiens
  misc_RNA (1)...(19): siRNA sense strand
gguccuggcagcauucauc

SEQ ID NO: 2087095 - RNA, 19 nt, Homo sapiens
  misc_RNA (1)...(19): siRNA sense strand
uuaaggacucuaaaguguu

SEQ ID NO: 2087096 - RNA, 19 nt, Homo sapiens
  misc_RNA (1)...(19): siRNA sense strand
uggcugaacaagcaucuga

SEQ ID NO: 2087097 - RNA, 19 nt, Homo sapiens
  misc_RNA (1)...(19): siRNA sense strand
gugaagaguacaaagacau

SEQ ID NO: 2087098 - RNA, 19 nt, Homo sapiens
  misc_RNA (1)...(19): siRNA sense strand
aggaaugugcugucacuug

SEQ ID NO: 2087099 - RNA, 19 nt, Homo sapiens
  misc_RNA (1)...(19): siRNA sense strand
ggacucacuggaggaaugu

SEQ ID NO: 2087100 - RNA, 19 nt, Homo sapiens
  misc_RNA (1)...(19): siRNA sense strand
guugagaaaguacaggaau

SEQ ID NO: 2087101 - RNA, 19 nt, Homo sapiens
  misc_RNA (1)...(19): siRNA sense strand
gcagauggauuucguauua

SEQ ID NO: 2087102 - RNA, 19 nt, Homo sapiens
  misc_RNA (1)...(19): siRNA sense strand
gaagagagauuaaagaaug

SEQ ID NO: 2087103 - RNA, 19 nt, Homo sapiens
  misc_RNA (1)...(19): siRNA sense strand
gaaaguacaucccagauug

SEQ ID NO: 2087104 - RNA, 19 nt, Homo sapiens
  misc_RNA (1)...(19): siRNA sense strand
gaaucucccuuauaaaguu

SEQ ID NO: 2087105 - RNA, 19 nt, Homo sapiens
  misc_RNA (1)...(19): siRNA sense strand
agaagaagcugaagucguu

SEQ ID NO: 2087106 - RNA, 19 nt, Homo sapiens
  misc_RNA (1)...(19): siRNA sense strand
gaauuugccuguuacaugu

SEQ ID NO: 2087107 - RNA, 19 nt, Homo sapiens
  misc_RNA (1)...(19): siRNA sense strand
gaaacacacuaacgcagaa

SEQ ID NO: 2087108 - RNA, 19 nt, Homo sapiens
  misc_RNA (1)...(19): siRNA sense strand
gaguugaucucgcaucuga

SEQ ID NO: 2087109 - RNA, 19 nt, Homo sapiens
  misc_RNA (1)...(19): siRNA sense strand
gaagaaaggacagaagaaa

SEQ ID NO: 2087110 - RNA, 19 nt, Homo sapiens
  misc_RNA (1)...(19): siRNA sense strand
gaagaagagagauuaaaga

SEQ ID NO: 2087111 - RNA, 19 nt, Homo sapiens
  misc_RNA (1)...(19): siRNA sense strand
gcuaugugcucuuugagaa

SEQ ID NO: 2087112 - RNA, 19 nt, Homo sapiens
  misc_RNA (1)...(19): siRNA sense strand
ccaagaagaagagagauua

SEQ ID NO: 2087113 - RNA, 19 nt, Homo sapiens
  misc_RNA (1)...(19): siRNA sense strand
ggaauuugccuguuacaug

SEQ ID NO: 2087114 - RNA, 19 nt, Homo sapiens
  misc_RNA (1)...(19): siRNA sense strand
guugggaauuugccuguua

SEQ ID NO: 2087115 - RNA, 19 nt, Homo sapiens
  misc_RNA (1)...(19): siRNA sense strand
aagaagaaauucaccagaa

SEQ ID NO: 2087116 - RNA, 19 nt, Homo sapiens
  misc_RNA (1)...(19): siRNA sense strand
ugagagaacuguguuuguu

SEQ ID NO: 2087117 - RNA, 19 nt, Homo sapiens
  misc_RNA (1)...(19): siRNA sense strand
agaagaaauucaccagaaa

SEQ ID NO: 2087118 - RNA, 19 nt, Homo sapiens
  misc_RNA (1)...(19): siRNA sense strand
cgaagaagaaacacacuaa

SEQ ID NO: 2087119 - RNA, 19 nt, Homo sapiens
  misc_RNA (1)...(19): siRNA sense strand
gauugaagaaugucaguaa

SEQ ID NO: 2087120 - RNA, 19 nt, Homo sapiens
  misc_RNA (1)...(19): siRNA sense strand
gaaauucaccagaaacaag

SEQ ID NO: 2087121 - RNA, 19 nt, Homo sapiens
  misc_RNA (1)...(19): siRNA sense strand
gaaacggaaugaggaggaa

SEQ ID NO: 2087122 - RNA, 19 nt, Homo sapiens
  misc_RNA (1)...(19): siRNA sense strand
ugaagaaucugccauugag

SEQ ID NO: 2087123 - RNA, 19 nt, Homo sapiens
  misc_RNA (1)...(19): siRNA sense strand
guacgugccugugccuaaa

SEQ ID NO: 2087124 - RNA, 19 nt, Homo sapiens
  misc_RNA (1)...(19): siRNA sense strand
ucaucuugcucugaaauua

SEQ ID NO: 2087125 - RNA, 19 nt, Homo sapiens
  misc_RNA (1)...(19): siRNA sense strand
uaugugcucuuugagaaua

SEQ ID NO: 2087126 - RNA, 19 nt, Homo sapiens
  misc_RNA (1)...(19): siRNA sense strand
guaauaagaagaagcugaa

SEQ ID NO: 2087127 - RNA, 19 nt, Homo sapiens
  misc_RNA (1)...(19): siRNA sense strand
ucaaaucaaccaagaagaa

SEQ ID NO: 2087128 - RNA, 19 nt, Homo sapiens
  misc_RNA (1)...(19): siRNA sense strand
ggaaugaggaggaagaaag

SEQ ID NO: 2087129 - RNA, 19 nt, Homo sapiens
  misc_RNA (1)...(19): siRNA sense strand
ggucgccaguagcuuauuu

SEQ ID NO: 2087130 - RNA, 19 nt, Homo sapiens
  misc_RNA (1)...(19): siRNA sense strand
ccagauugcagauggauuu

SEQ ID NO: 2087131 - RNA, 19 nt, Homo sapiens
  misc_RNA (1)...(19): siRNA sense strand
uaaugccuauguuguguuu

SEQ ID NO: 2087132 - RNA, 19 nt, Homo sapiens
  misc_RNA (1)...(19): siRNA sense strand
ucaaccugguguuaaagua

SEQ ID NO: 2087133 - RNA, 19 nt, Homo sapiens
  misc_RNA (1)...(19): siRNA sense strand
caaauagaaucuguacgau

SEQ ID NO: 2087134 - RNA, 19 nt, Homo sapiens
  misc_RNA (1)...(19): siRNA sense strand
caagaagaagagagauuaa

SEQ ID NO: 2087135 - RNA, 19 nt, Homo sapiens
  misc_RNA (1)...(19): siRNA sense strand
caaccaagaagaagagaga

SEQ ID NO: 2087136 - RNA, 19 nt, Homo sapiens
  misc_RNA (1)...(19): siRNA sense strand
ggacaaauagaaucuguac

SEQ ID NO: 2087137 - RNA, 19 nt, Homo sapiens
  misc_RNA (1)...(19): siRNA sense strand
ucuagcgagugcugauuua

SEQ ID NO: 2087138 - RNA, 19 nt, Homo sapiens
  misc_RNA (1)...(19): siRNA sense strand
gucaugcguucuguuaaua

SEQ ID NO: 2087139 - RNA, 19 nt, Homo sapiens
  misc_RNA (1)...(19): siRNA sense strand
gagagaacuguguuuguug

SEQ ID NO: 2087140 - RNA, 19 nt, Homo sapiens
  misc_RNA (1)...(19): siRNA sense strand
acaaauagaaucuguacga

SEQ ID NO: 2087141 - RNA, 19 nt, Homo sapiens
  misc_RNA (1)...(19): siRNA sense strand
guacaucccagauugaaag

SEQ ID NO: 2087142 - RNA, 19 nt, Homo sapiens
  misc_RNA (1)...(19): siRNA sense strand
gaagaagaaaggacagaag

SEQ ID NO: 2087143 - RNA, 19 nt, Homo sapiens
  misc_RNA (1)...(19): siRNA sense strand
gagauuaaagaaugagaga

SEQ ID NO: 2087144 - RNA, 19 nt, Homo sapiens
  misc_RNA (1)...(19): siRNA sense strand
gagugcugauuuagaagaa

SEQ ID NO: 2087145 - RNA, 19 nt, Homo sapiens
  misc_RNA (1)...(19): siRNA sense strand
agagucaugcguucuguua

SEQ ID NO: 2087146 - RNA, 19 nt, Homo sapiens
  misc_RNA (1)...(19): siRNA sense strand
ggaaucucccuuauaaagu

SEQ ID NO: 2087147 - RNA, 19 nt, Homo sapiens
  misc_RNA (1)...(19): siRNA sense strand
gaaugaggaggaagaaagu

SEQ ID NO: 2087148 - RNA, 19 nt, Homo sapiens
  misc_RNA (1)...(19): siRNA sense strand
caugcguucuguuaauaaa

SEQ ID NO: 2087149 - RNA, 19 nt, Homo sapiens
  misc_RNA (1)...(19): siRNA sense strand
gaccucaucuagagacaag

SEQ ID NO: 2087150 - RNA, 19 nt, Homo sapiens
  misc_RNA (1)...(19): siRNA sense strand
gaaugagagaacuguguuu

SEQ ID NO: 2087151 - RNA, 19 nt, Homo sapiens
  misc_RNA (1)...(19): siRNA sense strand
ugaaagcgaagaagaaaca

SEQ ID NO: 2087152 - RNA, 19 nt, Homo sapiens
  misc_RNA (1)...(19): siRNA sense strand
acaggucgccaguagcuua

SEQ ID NO: 2087153 - RNA, 19 nt, Homo sapiens
  misc_RNA (1)...(19): siRNA sense strand
cgauuucguucucugauuc

SEQ ID NO: 2087154 - RNA, 19 nt, Homo sapiens
  misc_RNA (1)...(19): siRNA sense strand
ugacacagaagacacaguu

SEQ ID NO: 2087155 - RNA, 19 nt, Homo sapiens
  misc_RNA (1)...(19): siRNA sense strand
gcgaagaagaaacacacua

SEQ ID NO: 2087156 - RNA, 19 nt, Homo sapiens
  misc_RNA (1)...(19): siRNA sense strand
gaaugucaguaaaccuaag

SEQ ID NO: 2087157 - RNA, 19 nt, Homo sapiens
  misc_RNA (1)...(19): siRNA sense strand
caucuugcucugaaauuaa

SEQ ID NO: 2087158 - RNA, 19 nt, Homo sapiens
  misc_RNA (1)...(19): siRNA sense strand
aaacggaagagaaagagaa

SEQ ID NO: 2087159 - RNA, 19 nt, Homo sapiens
  misc_RNA (1)...(19): siRNA sense strand
gaagaaauucaccagaaac

SEQ ID NO: 2087160 - RNA, 19 nt, Homo sapiens
  misc_RNA (1)...(19): siRNA sense strand
gugcugauuuagaagaaga

SEQ ID NO: 2087161 - RNA, 19 nt, Homo sapiens
  misc_RNA (1)...(19): siRNA sense strand
ggauuucguauuagaguug

SEQ ID NO: 2087162 - RNA, 19 nt, Homo sapiens
  misc_RNA (1)...(19): siRNA sense strand
guugaagaaucugccauug

SEQ ID NO: 2087163 - RNA, 19 nt, Homo sapiens
  misc_RNA (1)...(19): siRNA sense strand
gguguuaaaguagcagaua

SEQ ID NO: 2087164 - RNA, 19 nt, Homo sapiens
  misc_RNA (1)...(19): siRNA sense strand
aagaaugucaguaaaccua

SEQ ID NO: 2087165 - RNA, 19 nt, Homo sapiens
  misc_RNA (1)...(19): siRNA sense strand
uuucuggacuguggaagua

SEQ ID NO: 2087166 - RNA, 19 nt, Homo sapiens
  misc_RNA (1)...(19): siRNA sense strand
gaguauggacaaauagaau

SEQ ID NO: 2087167 - RNA, 19 nt, Homo sapiens
  misc_RNA (1)...(19): siRNA sense strand
uggcgucccucuucaguuc

SEQ ID NO: 2087168 - RNA, 19 nt, Homo sapiens
  misc_RNA (1)...(19): siRNA sense strand
augccuauguuguguuuaa

SEQ ID NO: 2087169 - RNA, 19 nt, Homo sapiens
  misc_RNA (1)...(19): siRNA sense strand
aaauucauccugaucagaa

SEQ ID NO: 2087170 - RNA, 19 nt, Homo sapiens
  misc_RNA (1)...(19): siRNA sense strand
ggacaggucgccaguagcu

SEQ ID NO: 2087171 - RNA, 19 nt, Homo sapiens
  misc_RNA (1)...(19): siRNA sense strand
gaagcacuuucuggacugu

SEQ ID NO: 2087172 - RNA, 19 nt, Homo sapiens
  misc_RNA (1)...(19): siRNA sense strand
gaagaaucugccauugaga

SEQ ID NO: 2087173 - RNA, 19 nt, Homo sapiens
  misc_RNA (1)...(19): siRNA sense strand
agauggauuucguauuaga

SEQ ID NO: 2087174 - RNA, 19 nt, Homo sapiens
  misc_RNA (1)...(19): siRNA sense strand
gauuaaagaaugagagaac

SEQ ID NO: 2087175 - RNA, 19 nt, Homo sapiens
  misc_RNA (1)...(19): siRNA sense strand
gcccuaagaaacagagaaa

SEQ ID NO: 2087176 - RNA, 19 nt, Homo sapiens
  misc_RNA (1)...(19): siRNA sense strand
aaaguggacgcccuaagaa

SEQ ID NO: 2087177 - RNA, 19 nt, Homo sapiens
  misc_RNA (1)...(19): siRNA sense strand
agucaugcguucuguuaau

SEQ ID NO: 2087178 - RNA, 19 nt, Homo sapiens
  misc_RNA (1)...(19): siRNA sense strand
uaucauggccgugaggauu

SEQ ID NO: 2087179 - RNA, 19 nt, Homo sapiens
  misc_RNA (1)...(19): siRNA sense strand
agaaaguacaucccagauu

SEQ ID NO: 2087180 - RNA, 19 nt, Homo sapiens
  misc_RNA (1)...(19): siRNA sense strand
gaagaagaaacacacuaac

SEQ ID NO: 2087181 - RNA, 19 nt, Homo sapiens
  misc_RNA (1)...(19): siRNA sense strand
aagcagggacuuaauuuua

SEQ ID NO: 2087182 - RNA, 19 nt, Homo sapiens
  misc_RNA (1)...(19): siRNA sense strand
aaagugaaagcgaagaaga

SEQ ID NO: 2087183 - RNA, 19 nt, Homo sapiens
  misc_RNA (1)...(19): siRNA sense strand
ccuauguuguguuuaagga

SEQ ID NO: 2087184 - RNA, 19 nt, Homo sapiens
  misc_RNA (1)...(19): siRNA sense strand
agcgagugcugauuuagaa

SEQ ID NO: 2087185 - RNA, 19 nt, Homo sapiens
  misc_RNA (1)...(19): siRNA sense strand
ccagaaacaagggcagaaa

SEQ ID NO: 2087186 - RNA, 19 nt, Homo sapiens
  misc_RNA (1)...(19): siRNA sense strand
aagaagaaaggacagaaga

SEQ ID NO: 2087187 - RNA, 19 nt, Homo sapiens
  misc_RNA (1)...(19): siRNA sense strand
gauugcagauggauuucgu

SEQ ID NO: 2087188 - RNA, 19 nt, Homo sapiens
  misc_RNA (1)...(19): siRNA sense strand
uaaagaaugagagaacugu

SEQ ID NO: 2087189 - RNA, 19 nt, Homo sapiens
  misc_RNA (1)...(19): siRNA sense strand
acaguugucagucaaagaa

SEQ ID NO: 2087190 - RNA, 19 nt, Homo sapiens
  misc_RNA (1)...(19): siRNA sense strand
aauacuugaugacacagaa

SEQ ID NO: 2087191 - RNA, 19 nt, Homo sapiens
  misc_RNA (1)...(19): siRNA sense strand
ggacuguggaaguaucaug

SEQ ID NO: 2087192 - RNA, 19 nt, Homo sapiens
  misc_RNA (1)...(19): siRNA sense strand
agagggaacgcuauccaaa

SEQ ID NO: 2087193 - RNA, 19 nt, Homo sapiens
  misc_RNA (1)...(19): siRNA sense strand
agaagaagagagauuaaag

SEQ ID NO: 2087194 - RNA, 19 nt, Homo sapiens
  misc_RNA (1)...(19): siRNA sense strand
gaagaagcugaagucguuu

SEQ ID NO: 2087195 - RNA, 19 nt, Homo sapiens
  misc_RNA (1)...(19): siRNA sense strand
ggaagagaaagagaagugu

SEQ ID NO: 2087196 - RNA, 19 nt, Homo sapiens
  misc_RNA (1)...(19): siRNA sense strand
agaagaaaggacagaagaa

SEQ ID NO: 2087197 - RNA, 19 nt, Homo sapiens
  misc_RNA (1)...(19): siRNA sense strand
ggacuuaauuuuacuucca

SEQ ID NO: 2087198 - RNA, 19 nt, Homo sapiens
  misc_RNA (1)...(19): siRNA sense strand
ugcguucuguuaauaaaga

SEQ ID NO: 2087199 - RNA, 19 nt, Homo sapiens
  misc_RNA (1)...(19): siRNA sense strand
aagaaucugccauugagaa

SEQ ID NO: 2087200 - RNA, 19 nt, Homo sapiens
  misc_RNA (1)...(19): siRNA sense strand
gauuucguauuagaguuga

SEQ ID NO: 2087201 - RNA, 19 nt, Homo sapiens
  misc_RNA (1)...(19): siRNA sense strand
gcagauggauuucguauua

SEQ ID NO: 2087202 - RNA, 19 nt, Homo sapiens
  misc_RNA (1)...(19): siRNA sense strand
gaagagagauuaaagaaug

SEQ ID NO: 2087203 - RNA, 19 nt, Homo sapiens
  misc_RNA (1)...(19): siRNA sense strand
gaaaguacaucccagauug

SEQ ID NO: 2087204 - RNA, 19 nt, Homo sapiens
  misc_RNA (1)...(19): siRNA sense strand
gaaucucccuuauaaaguu

SEQ ID NO: 2087205 - RNA, 19 nt, Homo sapiens
  misc_RNA (1)...(19): siRNA sense strand
agaagaagcugaagucguu

SEQ ID NO: 2087206 - RNA, 19 nt, Homo sapiens
  misc_RNA (1)...(19): siRNA sense strand
gaauuugccuguuacaugu

SEQ ID NO: 2087207 - RNA, 19 nt, Homo sapiens
  misc_RNA (1)...(19): siRNA sense strand
gaaacacacuaacgcagaa

SEQ ID NO: 2087208 - RNA, 19 nt, Homo sapiens
  misc_RNA (1)...(19): siRNA sense strand
gaguugaucucgcaucuga

SEQ ID NO: 2087209 - RNA, 19 nt, Homo sapiens
  misc_RNA (1)...(19): siRNA sense strand
gaagaaaggacagaagaaa

SEQ ID NO: 2087210 - RNA, 19 nt, Homo sapiens
  misc_RNA (1)...(19): siRNA sense strand
gaagaagagagauuaaaga

SEQ ID NO: 2087211 - RNA, 19 nt, Homo sapiens
  misc_RNA (1)...(19): siRNA sense strand
gcuaugugcucuuugagaa

SEQ ID NO: 2087212 - RNA, 19 nt, Homo sapiens
  misc_RNA (1)...(19): siRNA sense strand
ccaagaagaagagagauua

SEQ ID NO: 2087213 - RNA, 19 nt, Homo sapiens
  misc_RNA (1)...(19): siRNA sense strand
ggaauuugccuguuacaug

SEQ ID NO: 2087214 - RNA, 19 nt, Homo sapiens
  misc_RNA (1)...(19): siRNA sense strand
guugggaauuugccuguua

SEQ ID NO: 2087215 - RNA, 19 nt, Homo sapiens
  misc_RNA (1)...(19): siRNA sense strand
aagaagaaauucaccagaa

SEQ ID NO: 2087216 - RNA, 19 nt, Homo sapiens
  misc_RNA (1)...(19): siRNA sense strand
ugagagaacuguguuuguu

SEQ ID NO: 2087217 - RNA, 19 nt, Homo sapiens
  misc_RNA (1)...(19): siRNA sense strand
agaagaaauucaccagaaa

SEQ ID NO: 2087218 - RNA, 19 nt, Homo sapiens
  misc_RNA (1)...(19): siRNA sense strand
cgaagaagaaacacacuaa

SEQ ID NO: 2087219 - RNA, 19 nt, Homo sapiens
  misc_RNA (1)...(19): siRNA sense strand
gauugaagaaugucaguaa

SEQ ID NO: 2087220 - RNA, 19 nt, Homo sapiens
  misc_RNA (1)...(19): siRNA sense strand
gaaauucaccagaaacaag

SEQ ID NO: 2087221 - RNA, 19 nt, Homo sapiens
  misc_RNA (1)...(19): siRNA sense strand
gaaacggaaugaggaggaa

SEQ ID NO: 2087222 - RNA, 19 nt, Homo sapiens
  misc_RNA (1)...(19): siRNA sense strand
ugaagaaucugccauugag

SEQ ID NO: 2087223 - RNA, 19 nt, Homo sapiens
  misc_RNA (1)...(19): siRNA sense strand
guacgugccugugccuaaa

SEQ ID NO: 2087224 - RNA, 19 nt, Homo sapiens
  misc_RNA (1)...(19): siRNA sense strand
ucaucuugcucugaaauua

SEQ ID NO: 2087225 - RNA, 19 nt, Homo sapiens
  misc_RNA (1)...(19): siRNA sense strand
uaugugcucuuugagaaua

SEQ ID NO: 2087226 - RNA, 19 nt, Homo sapiens
  misc_RNA (1)...(19): siRNA sense strand
guaauaagaagaagcugaa

SEQ ID NO: 2087227 - RNA, 19 nt, Homo sapiens
  misc_RNA (1)...(19): siRNA sense strand
ucaaaucaaccaagaagaa

SEQ ID NO: 2087228 - RNA, 19 nt, Homo sapiens
  misc_RNA (1)...(19): siRNA sense strand
ggucgccaguagcuuauuu

SEQ ID NO: 2087229 - RNA, 19 nt, Homo sapiens
  misc_RNA (1)...(19): siRNA sense strand
ccagauugcagauggauuu

SEQ ID NO: 2087230 - RNA, 19 nt, Homo sapiens
  misc_RNA (1)...(19): siRNA sense strand
ggaaugaggaggaagaaag

SEQ ID NO: 2087231 - RNA, 19 nt, Homo sapiens
  misc_RNA (1)...(19): siRNA sense strand
uaaugccuauguuguguuu

SEQ ID NO: 2087232 - RNA, 19 nt, Homo sapiens
  misc_RNA (1)...(19): siRNA sense strand
ucaaccugguguuaaagua

SEQ ID NO: 2087233 - RNA, 19 nt, Homo sapiens
  misc_RNA (1)...(19): siRNA sense strand
caaauagaaucuguacgau

SEQ ID NO: 2087234 - RNA, 19 nt, Homo sapiens
  misc_RNA (1)...(19): siRNA sense strand
caagaagaagagagauuaa

SEQ ID NO: 2087235 - RNA, 19 nt, Homo sapiens
  misc_RNA (1)...(19): siRNA sense strand
caaccaagaagaagagaga

SEQ ID NO: 2087236 - RNA, 19 nt, Homo sapiens
  misc_RNA (1)...(19): siRNA sense strand
ggacaaauagaaucuguac

SEQ ID NO: 2087237 - RNA, 19 nt, Homo sapiens
  misc_RNA (1)...(19): siRNA sense strand
ucuagcgagugcugauuua

SEQ ID NO: 2087238 - RNA, 19 nt, Homo sapiens
  misc_RNA (1)...(19): siRNA sense strand
gucaugcguucuguuaaua

SEQ ID NO: 2087239 - RNA, 19 nt, Homo sapiens
  misc_RNA (1)...(19): siRNA sense strand
gagagaacuguguuuguug

SEQ ID NO: 2087240 - RNA, 19 nt, Homo sapiens
  misc_RNA (1)...(19): siRNA sense strand
acaaauagaaucuguacga

SEQ ID NO: 2087241 - RNA, 19 nt, Homo sapiens
  misc_RNA (1)...(19): siRNA sense strand
guacaucccagauugaaag

SEQ ID NO: 2087242 - RNA, 19 nt, Homo sapiens
  misc_RNA (1)...(19): siRNA sense strand
gaagaagaaaggacagaag

SEQ ID NO: 2087243 - RNA, 19 nt, Homo sapiens
  misc_RNA (1)...(19): siRNA sense strand
gagauuaaagaaugagaga

SEQ ID NO: 2087244 - RNA, 19 nt, Homo sapiens
  misc_RNA (1)...(19): siRNA sense strand
gagugcugauuuagaagaa

SEQ ID NO: 2087245 - RNA, 19 nt, Homo sapiens
  misc_RNA (1)...(19): siRNA sense strand
agagucaugcguucuguua

SEQ ID NO: 2087246 - RNA, 19 nt, Homo sapiens
  misc_RNA (1)...(19): siRNA sense strand
gggaugagcaaacggaaga

SEQ ID NO: 2087247 - RNA, 19 nt, Homo sapiens
  misc_RNA (1)...(19): siRNA sense strand
ggaaucucccuuauaaagu

SEQ ID NO: 2087248 - RNA, 19 nt, Homo sapiens
  misc_RNA (1)...(19): siRNA sense strand
gaaugaggaggaagaaagu

SEQ ID NO: 2087249 - RNA, 19 nt, Homo sapiens
  misc_RNA (1)...(19): siRNA sense strand
caugcguucuguuaauaaa

SEQ ID NO: 2087250 - RNA, 19 nt, Homo sapiens
  misc_RNA (1)...(19): siRNA sense strand
gaccucaucuagagacaag

SEQ ID NO: 2087251 - RNA, 19 nt, Homo sapiens
  misc_RNA (1)...(19): siRNA sense strand
gaaugagagaacuguguuu

SEQ ID NO: 2087252 - RNA, 19 nt, Homo sapiens
  misc_RNA (1)...(19): siRNA sense strand
ugaaagcgaagaagaaaca

SEQ ID NO: 2087253 - RNA, 19 nt, Homo sapiens
  misc_RNA (1)...(19): siRNA sense strand
ugacacagaagacacaguu

SEQ ID NO: 2087254 - RNA, 19 nt, Homo sapiens
  misc_RNA (1)...(19): siRNA sense strand
acaggucgccaguagcuua

SEQ ID NO: 2087255 - RNA, 19 nt, Homo sapiens
  misc_RNA (1)...(19): siRNA sense strand
cgauuucguucucugauuc

SEQ ID NO: 2087256 - RNA, 19 nt, Homo sapiens
  misc_RNA (1)...(19): siRNA sense strand
gcgaagaagaaacacacua

SEQ ID NO: 2087257 - RNA, 19 nt, Homo sapiens
  misc_RNA (1)...(19): siRNA sense strand
gaaugucaguaaaccuaag

SEQ ID NO: 2087258 - RNA, 19 nt, Homo sapiens
  misc_RNA (1)...(19): siRNA sense strand
caucuugcucugaaauuaa

SEQ ID NO: 2087259 - RNA, 19 nt, Homo sapiens
  misc_RNA (1)...(19): siRNA sense strand
aaacggaagagaaagagaa

SEQ ID NO: 2087260 - RNA, 19 nt, Homo sapiens
  misc_RNA (1)...(19): siRNA sense strand
gaagaaauucaccagaaac

SEQ ID NO: 2087261 - RNA, 19 nt, Homo sapiens
  misc_RNA (1)...(19): siRNA sense strand
gugcugauuuagaagaaga

SEQ ID NO: 2087262 - RNA, 19 nt, Homo sapiens
  misc_RNA (1)...(19): siRNA sense strand
ggauuucguauuagaguug

SEQ ID NO: 2087263 - RNA, 19 nt, Homo sapiens
  misc_RNA (1)...(19): siRNA sense strand
guugaagaaucugccauug

SEQ ID NO: 2087264 - RNA, 19 nt, Homo sapiens
  misc_RNA (1)...(19): siRNA sense strand
gguguuaaaguagcagaua

SEQ ID NO: 2087265 - RNA, 19 nt, Homo sapiens
  misc_RNA (1)...(19): siRNA sense strand
aagaaugucaguaaaccua

SEQ ID NO: 2087266 - RNA, 19 nt, Homo sapiens
  misc_RNA (1)...(19): siRNA sense strand
uuucuggacuguggaagua

SEQ ID NO: 2087267 - RNA, 19 nt, Homo sapiens
  misc_RNA (1)...(19): siRNA sense strand
gaguauggacaaauagaau

SEQ ID NO: 2087268 - RNA, 19 nt, Homo sapiens
  misc_RNA (1)...(19): siRNA sense strand
augccuauguuguguuuaa

SEQ ID NO: 2087269 - RNA, 19 nt, Homo sapiens
  misc_RNA (1)...(19): siRNA sense strand
uggcgucccucuucaguuc

SEQ ID NO: 2087270 - RNA, 19 nt, Homo sapiens
  misc_RNA (1)...(19): siRNA sense strand
ggacaggucgccaguagcu

SEQ ID NO: 2087271 - RNA, 19 nt, Homo sapiens
  misc_RNA (1)...(19): siRNA sense strand
gaagcacuuucuggacugu

SEQ ID NO: 2087272 - RNA, 19 nt, Homo sapiens
  misc_RNA (1)...(19): siRNA sense strand
gaagaaucugccauugaga

SEQ ID NO: 2087273 - RNA, 19 nt, Homo sapiens
  misc_RNA (1)...(19): siRNA sense strand
ugagcaaacggaagagaaa

SEQ ID NO: 2087274 - RNA, 19 nt, Homo sapiens
  misc_RNA (1)...(19): siRNA sense strand
agauggauuucguauuaga

SEQ ID NO: 2087275 - RNA, 19 nt, Homo sapiens
  misc_RNA (1)...(19): siRNA sense strand
aaauucauccugaucagaa

SEQ ID NO: 2087276 - RNA, 19 nt, Homo sapiens
  misc_RNA (1)...(19): siRNA sense strand
gauuaaagaaugagagaac

SEQ ID NO: 2087277 - RNA, 19 nt, Homo sapiens
  misc_RNA (1)...(19): siRNA sense strand
gcccuaagaaacagagaaa

SEQ ID NO: 2087278 - RNA, 19 nt, Homo sapiens
  misc_RNA (1)...(19): siRNA sense strand
aaaguggacgcccuaagaa

SEQ ID NO: 2087279 - RNA, 19 nt, Homo sapiens
  misc_RNA (1)...(19): siRNA sense strand
agucaugcguucuguuaau

SEQ ID NO: 2087280 - RNA, 19 nt, Homo sapiens
  misc_RNA (1)...(19): siRNA sense strand
uaucauggccgugaggauu

SEQ ID NO: 2087281 - RNA, 19 nt, Homo sapiens
  misc_RNA (1)...(19): siRNA sense strand
agaaaguacaucccagauu

SEQ ID NO: 2087282 - RNA, 19 nt, Homo sapiens
  misc_RNA (1)...(19): siRNA sense strand
gaagaagaaacacacuaac

SEQ ID NO: 2087283 - RNA, 19 nt, Homo sapiens
  misc_RNA (1)...(19): siRNA sense strand
aagcagggacuuaauuuua

SEQ ID NO: 2087284 - RNA, 19 nt, Homo sapiens
  misc_RNA (1)...(19): siRNA sense strand
ccuauguuguguuuaagga

SEQ ID NO: 2087285 - RNA, 19 nt, Homo sapiens
  misc_RNA (1)...(19): siRNA sense strand
agcgagugcugauuuagaa

SEQ ID NO: 2087286 - RNA, 19 nt, Homo sapiens
  misc_RNA (1)...(19): siRNA sense strand
aaagugaaagcgaagaaga

SEQ ID NO: 2087287 - RNA, 19 nt, Homo sapiens
  misc_RNA (1)...(19): siRNA sense strand
ccagaaacaagggcagaaa

SEQ ID NO: 2087288 - RNA, 19 nt, Homo sapiens
  misc_RNA (1)...(19): siRNA sense strand
aagaagaaaggacagaaga

SEQ ID NO: 2087289 - RNA, 19 nt, Homo sapiens
  misc_RNA (1)...(19): siRNA sense strand
gauugcagauggauuucgu

SEQ ID NO: 2087290 - RNA, 19 nt, Homo sapiens
  misc_RNA (1)...(19): siRNA sense strand
uaaagaaugagagaacugu

SEQ ID NO: 2087291 - RNA, 19 nt, Homo sapiens
  misc_RNA (1)...(19): siRNA sense strand
acaguugucagucaaagaa

SEQ ID NO: 2087292 - RNA, 19 nt, Homo sapiens
  misc_RNA (1)...(19): siRNA sense strand
aauacuugaugacacagaa

SEQ ID NO: 2087293 - RNA, 19 nt, Homo sapiens
  misc_RNA (1)...(19): siRNA sense strand
ggacuguggaaguaucaug

SEQ ID NO: 2087294 - RNA, 19 nt, Homo sapiens
  misc_RNA (1)...(19): siRNA sense strand
agagggaacgcuauccaaa

SEQ ID NO: 2087295 - RNA, 19 nt, Homo sapiens
  misc_RNA (1)...(19): siRNA sense strand
agaagaagagagauuaaag

SEQ ID NO: 2087296 - RNA, 19 nt, Homo sapiens
  misc_RNA (1)...(19): siRNA sense strand
gauuucguauuagaguuga

SEQ ID NO: 2087297 - RNA, 19 nt, Homo sapiens
  misc_RNA (1)...(19): siRNA sense strand
agaagaaaggacagaagaa

SEQ ID NO: 2087298 - RNA, 19 nt, Homo sapiens
  misc_RNA (1)...(19): siRNA sense strand
ggacuuaauuuuacuucca

SEQ ID NO: 2087299 - RNA, 19 nt, Homo sapiens
  misc_RNA (1)...(19): siRNA sense strand
ugcguucuguuaauaaaga

SEQ ID NO: 2087300 - RNA, 19 nt, Homo sapiens
  misc_RNA (1)...(19): siRNA sense strand
aagaaucugccauugagaa

SEQ ID NO: 2087301 - RNA, 19 nt, Homo sapiens
  misc_RNA (1)...(19): siRNA sense strand
ggaaggagcuagagagugu

SEQ ID NO: 2087302 - RNA, 19 nt, Homo sapiens
  misc_RNA (1)...(19): siRNA sense strand
uaaaggagcuggagaaguc

SEQ ID NO: 2087303 - RNA, 19 nt, Homo sapiens
  misc_RNA (1)...(19): siRNA sense strand
gauucaagcuccgcaauaa

SEQ ID NO: 2087304 - RNA, 19 nt, Homo sapiens
  misc_RNA (1)...(19): siRNA sense strand
gcaauaaucagucaacuca

SEQ ID NO: 2087305 - RNA, 19 nt, Homo sapiens
  misc_RNA (1)...(19): siRNA sense strand
aaacaucaauucacugguu

SEQ ID NO: 2087306 - RNA, 19 nt, Homo sapiens
  misc_RNA (1)...(19): siRNA sense strand
ggagaagaagcaugagaua

SEQ ID NO: 2087307 - RNA, 19 nt, Homo sapiens
  misc_RNA (1)...(19): siRNA sense strand
aaacaucaccaucaucuaa

SEQ ID NO: 2087308 - RNA, 19 nt, Homo sapiens
  misc_RNA (1)...(19): siRNA sense strand
gggaggagcuuguucaaac

SEQ ID NO: 2087309 - RNA, 19 nt, Homo sapiens
  misc_RNA (1)...(19): siRNA sense strand
gaagagcccuggcauucca

SEQ ID NO: 2087310 - RNA, 19 nt, Homo sapiens
  misc_RNA (1)...(19): siRNA sense strand
gaacagggagcuaaacauc

SEQ ID NO: 2087311 - RNA, 19 nt, Homo sapiens
  misc_RNA (1)...(19): siRNA sense strand
gaagaagcaugagauacau

SEQ ID NO: 2087312 - RNA, 19 nt, Homo sapiens
  misc_RNA (1)...(19): siRNA sense strand
uagagcagcuacaagauga

SEQ ID NO: 2087313 - RNA, 19 nt, Homo sapiens
  misc_RNA (1)...(19): siRNA sense strand
gaagucggguggagcugaa

SEQ ID NO: 2087314 - RNA, 19 nt, Homo sapiens
  misc_RNA (1)...(19): siRNA sense strand
gagcuaaacaucaccauca

SEQ ID NO: 2087315 - RNA, 19 nt, Homo sapiens
  misc_RNA (1)...(19): siRNA sense strand
gcacaucuaaggaggagaa

SEQ ID NO: 2087316 - RNA, 19 nt, Homo sapiens
  misc_RNA (1)...(19): siRNA sense strand
ucgaggagcugaacaacga

SEQ ID NO: 2087317 - RNA, 19 nt, Homo sapiens
  misc_RNA (1)...(19): siRNA sense strand
gaugagaccaaccaccuaa

SEQ ID NO: 2087318 - RNA, 19 nt, Homo sapiens
  misc_RNA (1)...(19): siRNA sense strand
ggauucaagcuccgcaaua

SEQ ID NO: 2087319 - RNA, 19 nt, Homo sapiens
  misc_RNA (1)...(19): siRNA sense strand
ggagagccaguaccaagaa

SEQ ID NO: 2087320 - RNA, 19 nt, Homo sapiens
  misc_RNA (1)...(19): siRNA sense strand
ggccgugcauccucuacua

SEQ ID NO: 2087321 - RNA, 19 nt, Homo sapiens
  misc_RNA (1)...(19): siRNA sense strand
caucuaaggaggagaagaa

SEQ ID NO: 2087322 - RNA, 19 nt, Homo sapiens
  misc_RNA (1)...(19): siRNA sense strand
acaaucagauguugagucu

SEQ ID NO: 2087323 - RNA, 19 nt, Homo sapiens
  misc_RNA (1)...(19): siRNA sense strand
uggagaagcuguugguaca

SEQ ID NO: 2087324 - RNA, 19 nt, Homo sapiens
  misc_RNA (1)...(19): siRNA sense strand
gcaguuggagcagcaagua

SEQ ID NO: 2087325 - RNA, 19 nt, Homo sapiens
  misc_RNA (1)...(19): siRNA sense strand
gagccaguaccaagaacua

SEQ ID NO: 2087326 - RNA, 19 nt, Homo sapiens
  misc_RNA (1)...(19): siRNA sense strand
agaagaagcaugagauaca

SEQ ID NO: 2087327 - RNA, 19 nt, Homo sapiens
  misc_RNA (1)...(19): siRNA sense strand
cuacuacccugcaggaucu

SEQ ID NO: 2087328 - RNA, 19 nt, Homo sapiens
  misc_RNA (1)...(19): siRNA sense strand
gaggagaggcuacaugaac

SEQ ID NO: 2087329 - RNA, 19 nt, Homo sapiens
  misc_RNA (1)...(19): siRNA sense strand
gaggagaggcuacaugaac

SEQ ID NO: 2087330 - RNA, 19 nt, Homo sapiens
  misc_RNA (1)...(19): siRNA sense strand
ggaggagcuuguucaaacu

SEQ ID NO: 2087331 - RNA, 19 nt, Homo sapiens
  misc_RNA (1)...(19): siRNA sense strand
aggagaggcugcuggaaga

SEQ ID NO: 2087332 - RNA, 19 nt, Homo sapiens
  misc_RNA (1)...(19): siRNA sense strand
gaagaggcugcaugccauu

SEQ ID NO: 2087333 - RNA, 19 nt, Homo sapiens
  misc_RNA (1)...(19): siRNA sense strand
gagaacagggagcuaaaca

SEQ ID NO: 2087334 - RNA, 19 nt, Homo sapiens
  misc_RNA (1)...(19): siRNA sense strand
gaggagaggcugugugaac

SEQ ID NO: 2087335 - RNA, 19 nt, Homo sapiens
  misc_RNA (1)...(19): siRNA sense strand
gaggagaggcugugugaac

SEQ ID NO: 2087336 - RNA, 19 nt, Homo sapiens
  misc_RNA (1)...(19): siRNA sense strand
gaggagaggcuacgugaac

SEQ ID NO: 2087337 - RNA, 19 nt, Homo sapiens
  misc_RNA (1)...(19): siRNA sense strand
gcuagagagugugggaaga

SEQ ID NO: 2087338 - RNA, 19 nt, Homo sapiens
  misc_RNA (1)...(19): siRNA sense strand
caagagcacacugcaguug

SEQ ID NO: 2087339 - RNA, 19 nt, Homo sapiens
  misc_RNA (1)...(19): siRNA sense strand
agcaggagcuaacaggaaa

SEQ ID NO: 2087340 - RNA, 19 nt, Homo sapiens
  misc_RNA (1)...(19): siRNA sense strand
gauguugagucuccugaac

SEQ ID NO: 2087341 - RNA, 19 nt, Homo sapiens
  misc_RNA (1)...(19): siRNA sense strand
gagcuuguucaaacucaaa

SEQ ID NO: 2087342 - RNA, 19 nt, Homo sapiens
  misc_RNA (1)...(19): siRNA sense strand
gaggaagagcccuggcauu

SEQ ID NO: 2087343 - RNA, 19 nt, Homo sapiens
  misc_RNA (1)...(19): siRNA sense strand
gaggagaagaagcaugaga

SEQ ID NO: 2087344 - RNA, 19 nt, Homo sapiens
  misc_RNA (1)...(19): siRNA sense strand
gcggagaacagggagcuaa

SEQ ID NO: 2087345 - RNA, 19 nt, Homo sapiens
  misc_RNA (1)...(19): siRNA sense strand
cagcaggagcuaacaggaa

SEQ ID NO: 2087346 - RNA, 19 nt, Homo sapiens
  misc_RNA (1)...(19): siRNA sense strand
ggaggagaggcuacaugaa

SEQ ID NO: 2087347 - RNA, 19 nt, Homo sapiens
  misc_RNA (1)...(19): siRNA sense strand
ggaggagaggcuacaugaa

SEQ ID NO: 2087348 - RNA, 19 nt, Homo sapiens
  misc_RNA (1)...(19): siRNA sense strand
gcuccgcaauaaucaguca

SEQ ID NO: 2087349 - RNA, 19 nt, Homo sapiens
  misc_RNA (1)...(19): siRNA sense strand
gaggcugcaugccauucuu

SEQ ID NO: 2087350 - RNA, 19 nt, Homo sapiens
  misc_RNA (1)...(19): siRNA sense strand
aauaaucagucaacucacu

SEQ ID NO: 2087351 - RNA, 19 nt, Homo sapiens
  misc_RNA (1)...(19): siRNA sense strand
ccaaccaccuaaggaagga

SEQ ID NO: 2087352 - RNA, 19 nt, Homo sapiens
  misc_RNA (1)...(19): siRNA sense strand
gagaccaaccaccuaagga

SEQ ID NO: 2087353 - RNA, 19 nt, Homo sapiens
  misc_RNA (1)...(19): siRNA sense strand
ggagcuuguucaaacucaa

SEQ ID NO: 2087354 - RNA, 19 nt, Homo sapiens
  misc_RNA (1)...(19): siRNA sense strand
gccaagaggcuccgagucu

SEQ ID NO: 2087355 - RNA, 19 nt, Homo sapiens
  misc_RNA (1)...(19): siRNA sense strand
gcauauuggcagaggaaga

SEQ ID NO: 2087356 - RNA, 19 nt, Homo sapiens
  misc_RNA (1)...(19): siRNA sense strand
cuaaacaucaccaucaucu

SEQ ID NO: 2087357 - RNA, 19 nt, Homo sapiens
  misc_RNA (1)...(19): siRNA sense strand
gagaagaagcaugagauac

SEQ ID NO: 2087358 - RNA, 19 nt, Homo sapiens
  misc_RNA (1)...(19): siRNA sense strand
cagcagggccaucuaaggu

SEQ ID NO: 2087359 - RNA, 19 nt, Homo sapiens
  misc_RNA (1)...(19): siRNA sense strand
cuaaggaggagaagaagca

SEQ ID NO: 2087360 - RNA, 19 nt, Homo sapiens
  misc_RNA (1)...(19): siRNA sense strand
uaaacaucaccaucaucua

SEQ ID NO: 2087361 - RNA, 19 nt, Homo sapiens
  misc_RNA (1)...(19): siRNA sense strand
gcaguggcccuggauucaa

SEQ ID NO: 2087362 - RNA, 19 nt, Homo sapiens
  misc_RNA (1)...(19): siRNA sense strand
gagcagcuacaagaugaga

SEQ ID NO: 2087363 - RNA, 19 nt, Homo sapiens
  misc_RNA (1)...(19): siRNA sense strand
agagcacacugcaguugga

SEQ ID NO: 2087364 - RNA, 19 nt, Homo sapiens
  misc_RNA (1)...(19): siRNA sense strand
aggagaggcuacaugaaca

SEQ ID NO: 2087365 - RNA, 19 nt, Homo sapiens
  misc_RNA (1)...(19): siRNA sense strand
aggagaggcuacaugaaca

SEQ ID NO: 2087366 - RNA, 19 nt, Homo sapiens
  misc_RNA (1)...(19): siRNA sense strand
agaccaaccaccuaaggaa

SEQ ID NO: 2087367 - RNA, 19 nt, Homo sapiens
  misc_RNA (1)...(19): siRNA sense strand
guaaaggagcuggagaagu

SEQ ID NO: 2087368 - RNA, 19 nt, Homo sapiens
  misc_RNA (1)...(19): siRNA sense strand
ucacugguucgcacaucua

SEQ ID NO: 2087369 - RNA, 19 nt, Homo sapiens
  misc_RNA (1)...(19): siRNA sense strand
acagggagcuaaacaucac

SEQ ID NO: 2087370 - RNA, 19 nt, Homo sapiens
  misc_RNA (1)...(19): siRNA sense strand
aggaagagcccuggcauuc

SEQ ID NO: 2087371 - RNA, 19 nt, Homo sapiens
  misc_RNA (1)...(19): siRNA sense strand
ugcgggagcuggagaggau

SEQ ID NO: 2087372 - RNA, 19 nt, Homo sapiens
  misc_RNA (1)...(19): siRNA sense strand
ggaggagaggcuacgugaa

SEQ ID NO: 2087373 - RNA, 19 nt, Homo sapiens
  misc_RNA (1)...(19): siRNA sense strand
aggaggagaagaagcauga

SEQ ID NO: 2087374 - RNA, 19 nt, Homo sapiens
  misc_RNA (1)...(19): siRNA sense strand
caguggcccuggauucaag

SEQ ID NO: 2087375 - RNA, 19 nt, Homo sapiens
  misc_RNA (1)...(19): siRNA sense strand
aggaggagaggcuacauga

SEQ ID NO: 2087376 - RNA, 19 nt, Homo sapiens
  misc_RNA (1)...(19): siRNA sense strand
gagcugaacaacgagaaca

SEQ ID NO: 2087377 - RNA, 19 nt, Homo sapiens
  misc_RNA (1)...(19): siRNA sense strand
ggagaggcuucggcaacag

SEQ ID NO: 2087378 - RNA, 19 nt, Homo sapiens
  misc_RNA (1)...(19): siRNA sense strand
aggaggagaggcuacauga

SEQ ID NO: 2087379 - RNA, 19 nt, Homo sapiens
  misc_RNA (1)...(19): siRNA sense strand
gagagccaguaccaagaac

SEQ ID NO: 2087380 - RNA, 19 nt, Homo sapiens
  misc_RNA (1)...(19): siRNA sense strand
ggugggaagcccuguacga

SEQ ID NO: 2087381 - RNA, 19 nt, Homo sapiens
  misc_RNA (1)...(19): siRNA sense strand
aggagaggcugugugaaca

SEQ ID NO: 2087382 - RNA, 19 nt, Homo sapiens
  misc_RNA (1)...(19): siRNA sense strand
aggagaggcugugugaaca

SEQ ID NO: 2087383 - RNA, 19 nt, Homo sapiens
  misc_RNA (1)...(19): siRNA sense strand
ggaagaggaugaagaagaa

SEQ ID NO: 2087384 - RNA, 19 nt, Homo sapiens
  misc_RNA (1)...(19): siRNA sense strand
cagaacaacuccagauaua

SEQ ID NO: 2087385 - RNA, 19 nt, Homo sapiens
  misc_RNA (1)...(19): siRNA sense strand
gaacagggguuucagaaua

SEQ ID NO: 2087386 - RNA, 19 nt, Homo sapiens
  misc_RNA (1)...(19): siRNA sense strand
gaagauuggcauucuauua

SEQ ID NO: 2087387 - RNA, 19 nt, Homo sapiens
  misc_RNA (1)...(19): siRNA sense strand
gcaaagaacugauggaaac

SEQ ID NO: 2087388 - RNA, 19 nt, Homo sapiens
  misc_RNA (1)...(19): siRNA sense strand
gaagagaacacuaggauga

SEQ ID NO: 2087389 - RNA, 19 nt, Homo sapiens
  misc_RNA (1)...(19): siRNA sense strand
gaagguggauuucauaaag

SEQ ID NO: 2087390 - RNA, 19 nt, Homo sapiens
  misc_RNA (1)...(19): siRNA sense strand
ggaugaacuuguccacuua

SEQ ID NO: 2087391 - RNA, 19 nt, Homo sapiens
  misc_RNA (1)...(19): siRNA sense strand
cagagagacuggagacuua

SEQ ID NO: 2087392 - RNA, 19 nt, Homo sapiens
  misc_RNA (1)...(19): siRNA sense strand
gaauaacaguuccaccaaa

SEQ ID NO: 2087393 - RNA, 19 nt, Homo sapiens
  misc_RNA (1)...(19): siRNA sense strand
gggaugaguuuguugauga

SEQ ID NO: 2087394 - RNA, 19 nt, Homo sapiens
  misc_RNA (1)...(19): siRNA sense strand
ccacuuauauggacuugaa

SEQ ID NO: 2087395 - RNA, 19 nt, Homo sapiens
  misc_RNA (1)...(19): siRNA sense strand
gcacacauuugcaucauca

SEQ ID NO: 2087396 - RNA, 19 nt, Homo sapiens
  misc_RNA (1)...(19): siRNA sense strand
ggaagcuacuuucgccuaa

SEQ ID NO: 2087397 - RNA, 19 nt, Homo sapiens
  misc_RNA (1)...(19): siRNA sense strand
gaaaguaguccaagcugaa

SEQ ID NO: 2087398 - RNA, 19 nt, Homo sapiens
  misc_RNA (1)...(19): siRNA sense strand
uauauggacuugaagauga

SEQ ID NO: 2087399 - RNA, 19 nt, Homo sapiens
  misc_RNA (1)...(19): siRNA sense strand
gaacuuguccacuuauaug

SEQ ID NO: 2087400 - RNA, 19 nt, Homo sapiens
  misc_RNA (1)...(19): siRNA sense strand
gcagauaauugagauggaa

SEQ ID NO: 2087401 - RNA, 19 nt, Homo sapiens
  misc_RNA (1)...(19): siRNA sense strand
ggagaagguggauuucaua

SEQ ID NO: 2087402 - RNA, 19 nt, Homo sapiens
  misc_RNA (1)...(19): siRNA sense strand
gaacaacuccagauauaag

SEQ ID NO: 2087403 - RNA, 19 nt, Homo sapiens
  misc_RNA (1)...(19): siRNA sense strand
gggcggagcuacauuaucu

SEQ ID NO: 2087404 - RNA, 19 nt, Homo sapiens
  misc_RNA (1)...(19): siRNA sense strand
gcugaugucuucuguguca

SEQ ID NO: 2087405 - RNA, 19 nt, Homo sapiens
  misc_RNA (1)...(19): siRNA sense strand
gagaaaaccuagauacuug

SEQ ID NO: 2087406 - RNA, 19 nt, Homo sapiens
  misc_RNA (1)...(19): siRNA sense strand
gaaacauauugcucaguga

SEQ ID NO: 2087407 - RNA, 19 nt, Homo sapiens
  misc_RNA (1)...(19): siRNA sense strand
gaacugauggaaacaauag

SEQ ID NO: 2087408 - RNA, 19 nt, Homo sapiens
  misc_RNA (1)...(19): siRNA sense strand
ggagguggaugagcauuug

SEQ ID NO: 2087409 - RNA, 19 nt, Homo sapiens
  misc_RNA (1)...(19): siRNA sense strand
ccagaagccucggguguaa

SEQ ID NO: 2087410 - RNA, 19 nt, Homo sapiens
  misc_RNA (1)...(19): siRNA sense strand
ugaagaggcugugcugauu

SEQ ID NO: 2087411 - RNA, 19 nt, Homo sapiens
  misc_RNA (1)...(19): siRNA sense strand
aagcugaaauggccaauga

SEQ ID NO: 2087412 - RNA, 19 nt, Homo sapiens
  misc_RNA (1)...(19): siRNA sense strand
aaaccuagauacuugcaaa

SEQ ID NO: 2087413 - RNA, 19 nt, Homo sapiens
  misc_RNA (1)...(19): siRNA sense strand
agaagaagcugcugauguc

SEQ ID NO: 2087414 - RNA, 19 nt, Homo sapiens
  misc_RNA (1)...(19): siRNA sense strand
ggucuacucccaaggauuu

SEQ ID NO: 2087415 - RNA, 19 nt, Homo sapiens
  misc_RNA (1)...(19): siRNA sense strand
caagcagaguuuacaguga

SEQ ID NO: 2087416 - RNA, 19 nt, Homo sapiens
  misc_RNA (1)...(19): siRNA sense strand
ccaaggauuuccacuuuua

SEQ ID NO: 2087417 - RNA, 19 nt, Homo sapiens
  misc_RNA (1)...(19): siRNA sense strand
gaagaggcugugcugauuu

SEQ ID NO: 2087418 - RNA, 19 nt, Homo sapiens
  misc_RNA (1)...(19): siRNA sense strand
gaguaugaaugcuauguca

SEQ ID NO: 2087419 - RNA, 19 nt, Homo sapiens
  misc_RNA (1)...(19): siRNA sense strand
ggaccuguaugacucugaa

SEQ ID NO: 2087420 - RNA, 19 nt, Homo sapiens
  misc_RNA (1)...(19): siRNA sense strand
ucccaaggauuuccacuuu

SEQ ID NO: 2087421 - RNA, 19 nt, Homo sapiens
  misc_RNA (1)...(19): siRNA sense strand
caaaacaugucacuuucua

SEQ ID NO: 2087422 - RNA, 19 nt, Homo sapiens
  misc_RNA (1)...(19): siRNA sense strand
gaagcuggaagccuuauau

SEQ ID NO: 2087423 - RNA, 19 nt, Homo sapiens
  misc_RNA (1)...(19): siRNA sense strand
gaacauaaggagcaugaag

SEQ ID NO: 2087424 - RNA, 19 nt, Homo sapiens
  misc_RNA (1)...(19): siRNA sense strand
gaccagaccuuggauuucu

SEQ ID NO: 2087425 - RNA, 19 nt, Homo sapiens
  misc_RNA (1)...(19): siRNA sense strand
gagaagguggauuucauaa

SEQ ID NO: 2087426 - RNA, 19 nt, Homo sapiens
  misc_RNA (1)...(19): siRNA sense strand
aaacagacguggaaaucuc

SEQ ID NO: 2087427 - RNA, 19 nt, Homo sapiens
  misc_RNA (1)...(19): siRNA sense strand
gaagcuacuuucgccuaaa

SEQ ID NO: 2087428 - RNA, 19 nt, Homo sapiens
  misc_RNA (1)...(19): siRNA sense strand
ugaaauggccaaugaguca

SEQ ID NO: 2087429 - RNA, 19 nt, Homo sapiens
  misc_RNA (1)...(19): siRNA sense strand
caucaucaaggcauaagua

SEQ ID NO: 2087430 - RNA, 19 nt, Homo sapiens
  misc_RNA (1)...(19): siRNA sense strand
ugaauccuguggacucgua

SEQ ID NO: 2087431 - RNA, 19 nt, Homo sapiens
  misc_RNA (1)...(19): siRNA sense strand
ccuagauacuugcaaagaa

SEQ ID NO: 2087432 - RNA, 19 nt, Homo sapiens
  misc_RNA (1)...(19): siRNA sense strand
gcuggaagccuuauaugga

SEQ ID NO: 2087433 - RNA, 19 nt, Homo sapiens
  misc_RNA (1)...(19): siRNA sense strand
ggaugaguuuguugaugaa

SEQ ID NO: 2087434 - RNA, 19 nt, Homo sapiens
  misc_RNA (1)...(19): siRNA sense strand
ucaaagagaccuucaagag

SEQ ID NO: 2087435 - RNA, 19 nt, Homo sapiens
  misc_RNA (1)...(19): siRNA sense strand
cgagugugcuggagcuuau

SEQ ID NO: 2087436 - RNA, 19 nt, Homo sapiens
  misc_RNA (1)...(19): siRNA sense strand
ggaccuuucucagcaucua

SEQ ID NO: 2087437 - RNA, 19 nt, Homo sapiens
  misc_RNA (1)...(19): siRNA sense strand
cgaggaguaugaaugcuau

SEQ ID NO: 2087438 - RNA, 19 nt, Homo sapiens
  misc_RNA (1)...(19): siRNA sense strand
uaacaguuccaccaaagaa

SEQ ID NO: 2087439 - RNA, 19 nt, Homo sapiens
  misc_RNA (1)...(19): siRNA sense strand
caacagaacaacuccagau

SEQ ID NO: 2087440 - RNA, 19 nt, Homo sapiens
  misc_RNA (1)...(19): siRNA sense strand
ggacggaccaagcagaguu

SEQ ID NO: 2087441 - RNA, 19 nt, Homo sapiens
  misc_RNA (1)...(19): siRNA sense strand
gaaagugccaaggaugaaa

SEQ ID NO: 2087442 - RNA, 19 nt, Homo sapiens
  misc_RNA (1)...(19): siRNA sense strand
gcagagagacuggagacuu

SEQ ID NO: 2087443 - RNA, 19 nt, Homo sapiens
  misc_RNA (1)...(19): siRNA sense strand
caauagaggagauguguca

SEQ ID NO: 2087444 - RNA, 19 nt, Homo sapiens
  misc_RNA (1)...(19): siRNA sense strand
cgaggaagaggaugaagaa

SEQ ID NO: 2087445 - RNA, 19 nt, Homo sapiens
  misc_RNA (1)...(19): siRNA sense strand
gaccuuggauuucucugau

SEQ ID NO: 2087446 - RNA, 19 nt, Homo sapiens
  misc_RNA (1)...(19): siRNA sense strand
gcauuuggacuacagaguu

SEQ ID NO: 2087447 - RNA, 19 nt, Homo sapiens
  misc_RNA (1)...(19): siRNA sense strand
uaaggagcaugaagugauc

SEQ ID NO: 2087448 - RNA, 19 nt, Homo sapiens
  misc_RNA (1)...(19): siRNA sense strand
ggaaagugccaaggaugaa

SEQ ID NO: 2087449 - RNA, 19 nt, Homo sapiens
  misc_RNA (1)...(19): siRNA sense strand
gagauaaggagcugugaag

SEQ ID NO: 2087450 - RNA, 19 nt, Homo sapiens
  misc_RNA (1)...(19): siRNA sense strand
gaagaccagaccuuggauu

SEQ ID NO: 2087451 - RNA, 19 nt, Homo sapiens
  misc_RNA (1)...(19): siRNA sense strand
acaugucacuuucuauuag

SEQ ID NO: 2087452 - RNA, 19 nt, Homo sapiens
  misc_RNA (1)...(19): siRNA sense strand
caccauaggaagcuacuuu

SEQ ID NO: 2087453 - RNA, 19 nt, Homo sapiens
  misc_RNA (1)...(19): siRNA sense strand
uaaauccacaggucccuaa

SEQ ID NO: 2087454 - RNA, 19 nt, Homo sapiens
  misc_RNA (1)...(19): siRNA sense strand
aauaagagcuuuucagaag

SEQ ID NO: 2087455 - RNA, 19 nt, Homo sapiens
  misc_RNA (1)...(19): siRNA sense strand
ggaaaagccugggugucua

SEQ ID NO: 2087456 - RNA, 19 nt, Homo sapiens
  misc_RNA (1)...(19): siRNA sense strand
uggaugagcauuuggacua

SEQ ID NO: 2087457 - RNA, 19 nt, Homo sapiens
  misc_RNA (1)...(19): siRNA sense strand
gagcugacccaggcugaaa

SEQ ID NO: 2087458 - RNA, 19 nt, Homo sapiens
  misc_RNA (1)...(19): siRNA sense strand
gauaaggagcugugaagag

SEQ ID NO: 2087459 - RNA, 19 nt, Homo sapiens
  misc_RNA (1)...(19): siRNA sense strand
ggaccaagcagaguuuaca

SEQ ID NO: 2087460 - RNA, 19 nt, Homo sapiens
  misc_RNA (1)...(19): siRNA sense strand
cugcacagccugaguuuga

SEQ ID NO: 2087461 - RNA, 19 nt, Homo sapiens
  misc_RNA (1)...(19): siRNA sense strand
ucacuguggaggagaauuu

SEQ ID NO: 2087462 - RNA, 19 nt, Homo sapiens
  misc_RNA (1)...(19): siRNA sense strand
gcgaggaguaugaaugcua

SEQ ID NO: 2087463 - RNA, 19 nt, Homo sapiens
  misc_RNA (1)...(19): siRNA sense strand
cauuuggacuacagaguug

SEQ ID NO: 2087464 - RNA, 19 nt, Homo sapiens
  misc_RNA (1)...(19): siRNA sense strand
aagaggcugugcugauuug

SEQ ID NO: 2087465 - RNA, 19 nt, Homo sapiens
  misc_RNA (1)...(19): siRNA sense strand
gagcgugcaguguacauga

SEQ ID NO: 2087466 - RNA, 19 nt, Homo sapiens
  misc_RNA (1)...(19): siRNA sense strand
gaaaagcagauaauugaga

SEQ ID NO: 2087467 - RNA, 19 nt, Homo sapiens
  misc_RNA (1)...(19): siRNA sense strand
gaagaagaagcugcugaug

SEQ ID NO: 2087468 - RNA, 19 nt, Homo sapiens
  misc_RNA (1)...(19): siRNA sense strand
ggacuuacggcuguacgaa

SEQ ID NO: 2087469 - RNA, 19 nt, Homo sapiens
  misc_RNA (1)...(19): siRNA sense strand
cagaagagaacacuaggau

SEQ ID NO: 2087470 - RNA, 19 nt, Homo sapiens
  misc_RNA (1)...(19): siRNA sense strand
agacagacugcaccucuuu

SEQ ID NO: 2087471 - RNA, 19 nt, Homo sapiens
  misc_RNA (1)...(19): siRNA sense strand
uaaaggaugcaguggcuau

SEQ ID NO: 2087472 - RNA, 19 nt, Homo sapiens
  misc_RNA (1)...(19): siRNA sense strand
acaacgagaucuuggaaac

SEQ ID NO: 2087473 - RNA, 19 nt, Homo sapiens
  misc_RNA (1)...(19): siRNA sense strand
acacuaggaugaggaaagu

SEQ ID NO: 2087474 - RNA, 19 nt, Homo sapiens
  misc_RNA (1)...(19): siRNA sense strand
aauaacaguuccaccaaag

SEQ ID NO: 2087475 - RNA, 19 nt, Homo sapiens
  misc_RNA (1)...(19): siRNA sense strand
guacgaagugaaaggagaa

SEQ ID NO: 2087476 - RNA, 19 nt, Homo sapiens
  misc_RNA (1)...(19): siRNA sense strand
uuguaagacuccaauaaga

SEQ ID NO: 2087477 - RNA, 19 nt, Homo sapiens
  misc_RNA (1)...(19): siRNA sense strand
gguguggccuuugcagaug

SEQ ID NO: 2087478 - RNA, 19 nt, Homo sapiens
  misc_RNA (1)...(19): siRNA sense strand
cuagauacuugcaaagaac

SEQ ID NO: 2087479 - RNA, 19 nt, Homo sapiens
  misc_RNA (1)...(19): siRNA sense strand
gaaaagccugggugucuaa

SEQ ID NO: 2087480 - RNA, 19 nt, Homo sapiens
  misc_RNA (1)...(19): siRNA sense strand
gcugucaugggaaaucuaa

SEQ ID NO: 2087481 - RNA, 19 nt, Homo sapiens
  misc_RNA (1)...(19): siRNA sense strand
ggagcgagccagcuacagu

SEQ ID NO: 2087482 - RNA, 19 nt, Homo sapiens
  misc_RNA (1)...(19): siRNA sense strand
ggguguaacugagucuguu

SEQ ID NO: 2087483 - RNA, 19 nt, Homo sapiens
  misc_RNA (1)...(19): siRNA sense strand
gaaagaagcugaagaaugg

SEQ ID NO: 2087484 - RNA, 19 nt, Homo sapiens
  misc_RNA (1)...(19): siRNA sense strand
gaagaaauacugcuuacua

SEQ ID NO: 2087485 - RNA, 19 nt, Homo sapiens
  misc_RNA (1)...(19): siRNA sense strand
gaagaaaguucacccugau

SEQ ID NO: 2087486 - RNA, 19 nt, Homo sapiens
  misc_RNA (1)...(19): siRNA sense strand
gauaagaauuuggaaguga

SEQ ID NO: 2087487 - RNA, 19 nt, Homo sapiens
  misc_RNA (1)...(19): siRNA sense strand
ggagaaagaagcugaagaa

SEQ ID NO: 2087488 - RNA, 19 nt, Homo sapiens
  misc_RNA (1)...(19): siRNA sense strand
gaagaaagcauaagauacu

SEQ ID NO: 2087489 - RNA, 19 nt, Homo sapiens
  misc_RNA (1)...(19): siRNA sense strand
gaaaggaucagugcaaaga

SEQ ID NO: 2087490 - RNA, 19 nt, Homo sapiens
  misc_RNA (1)...(19): siRNA sense strand
ugaagaagcugucgucucu

SEQ ID NO: 2087491 - RNA, 19 nt, Homo sapiens
  misc_RNA (1)...(19): siRNA sense strand
ccacgugacuccuuggaaa

SEQ ID NO: 2087492 - RNA, 19 nt, Homo sapiens
  misc_RNA (1)...(19): siRNA sense strand
cgauugagaucauuuaaag

SEQ ID NO: 2087493 - RNA, 19 nt, Homo sapiens
  misc_RNA (1)...(19): siRNA sense strand
ccacagcaauucccagguu

SEQ ID NO: 2087494 - RNA, 19 nt, Homo sapiens
  misc_RNA (1)...(19): siRNA sense strand
gcaacaggcugaagaaagc

SEQ ID NO: 2087495 - RNA, 19 nt, Homo sapiens
  misc_RNA (1)...(19): siRNA sense strand
uaaugaacguuuaccaaga

SEQ ID NO: 2087496 - RNA, 19 nt, Homo sapiens
  misc_RNA (1)...(19): siRNA sense strand
ggaagcugguaaugugaaa

SEQ ID NO: 2087497 - RNA, 19 nt, Homo sapiens
  misc_RNA (1)...(19): siRNA sense strand
uagcaggaaugcagaaaga

SEQ ID NO: 2087498 - RNA, 19 nt, Homo sapiens
  misc_RNA (1)...(19): siRNA sense strand
aagaauggaucaaccaaga

SEQ ID NO: 2087499 - RNA, 19 nt, Homo sapiens
  misc_RNA (1)...(19): siRNA sense strand
caaccauguucuuccagua

SEQ ID NO: 2087500 - RNA, 19 nt, Homo sapiens
  misc_RNA (1)...(19): siRNA sense strand
caaauccagugaggaauug

SEQ ID NO: 2087501 - RNA, 19 nt, Homo sapiens
  misc_RNA (1)...(19): siRNA sense strand
caacgauugagaucauuua

SEQ ID NO: 2087502 - RNA, 19 nt, Homo sapiens
  misc_RNA (1)...(19): siRNA sense strand
gauaaacgccuagcucaau

SEQ ID NO: 2087503 - RNA, 19 nt, Homo sapiens
  misc_RNA (1)...(19): siRNA sense strand
gaucaaacacauuccaaau

SEQ ID NO: 2087504 - RNA, 19 nt, Homo sapiens
  misc_RNA (1)...(19): siRNA sense strand
gcaggaaugcagaaagaaa

SEQ ID NO: 2087505 - RNA, 19 nt, Homo sapiens
  misc_RNA (1)...(19): siRNA sense strand
caacaccaugguagcauua

SEQ ID NO: 2087506 - RNA, 19 nt, Homo sapiens
  misc_RNA (1)...(19): siRNA sense strand
gaacguuuaccaagaggaa

SEQ ID NO: 2087507 - RNA, 19 nt, Homo sapiens
  misc_RNA (1)...(19): siRNA sense strand
gaagcugucgucucuauuc

SEQ ID NO: 2087508 - RNA, 19 nt, Homo sapiens
  misc_RNA (1)...(19): siRNA sense strand
cuccaaaccugccaaguga

SEQ ID NO: 2087509 - RNA, 19 nt, Homo sapiens
  misc_RNA (1)...(19): siRNA sense strand
gaagugaaagaacucagaa

SEQ ID NO: 2087510 - RNA, 19 nt, Homo sapiens
  misc_RNA (1)...(19): siRNA sense strand
ggaugaggaugaccuaggu

SEQ ID NO: 2087511 - RNA, 19 nt, Homo sapiens
  misc_RNA (1)...(19): siRNA sense strand
guaauucacccguccucua

SEQ ID NO: 2087512 - RNA, 19 nt, Homo sapiens
  misc_RNA (1)...(19): siRNA sense strand
uagaaaggaucagugcaaa

SEQ ID NO: 2087513 - RNA, 19 nt, Homo sapiens
  misc_RNA (1)...(19): siRNA sense strand
gaaagaaauggaacaggau

SEQ ID NO: 2087514 - RNA, 19 nt, Homo sapiens
  misc_RNA (1)...(19): siRNA sense strand
agaaagaagcugaagaaug

SEQ ID NO: 2087515 - RNA, 19 nt, Homo sapiens
  misc_RNA (1)...(19): siRNA sense strand
gggcuccagugaaagauga

SEQ ID NO: 2087516 - RNA, 19 nt, Homo sapiens
  misc_RNA (1)...(19): siRNA sense strand
guagaaaggaucagugcaa

SEQ ID NO: 2087517 - RNA, 19 nt, Homo sapiens
  misc_RNA (1)...(19): siRNA sense strand
gcaggaugauaagaauuug

SEQ ID NO: 2087518 - RNA, 19 nt, Homo sapiens
  misc_RNA (1)...(19): siRNA sense strand
agaggaagaugaagcauac

SEQ ID NO: 2087519 - RNA, 19 nt, Homo sapiens
  misc_RNA (1)...(19): siRNA sense strand
gcaacagacgcaccaguga

SEQ ID NO: 2087520 - RNA, 19 nt, Homo sapiens
  misc_RNA (1)...(19): siRNA sense strand
ggaagugaaagaacucaga

SEQ ID NO: 2087521 - RNA, 19 nt, Homo sapiens
  misc_RNA (1)...(19): siRNA sense strand
aagaagcugucgucucuau

SEQ ID NO: 2087522 - RNA, 19 nt, Homo sapiens
  misc_RNA (1)...(19): siRNA sense strand
aaggaucagugcaaagaaa

SEQ ID NO: 2087523 - RNA, 19 nt, Homo sapiens
  misc_RNA (1)...(19): siRNA sense strand
gagggugucugcugacucu

SEQ ID NO: 2087524 - RNA, 19 nt, Homo sapiens
  misc_RNA (1)...(19): siRNA sense strand
ccaaauccagugaggaauu

SEQ ID NO: 2087525 - RNA, 19 nt, Homo sapiens
  misc_RNA (1)...(19): siRNA sense strand
ccaacaccaugguagcauu

SEQ ID NO: 2087526 - RNA, 19 nt, Homo sapiens
  misc_RNA (1)...(19): siRNA sense strand
gggucaaacugaagaaagu

SEQ ID NO: 2087527 - RNA, 19 nt, Homo sapiens
  misc_RNA (1)...(19): siRNA sense strand
gaugaagcauaccaggaau

SEQ ID NO: 2087528 - RNA, 19 nt, Homo sapiens
  misc_RNA (1)...(19): siRNA sense strand
ucaaacacauuccaaaucc

SEQ ID NO: 2087529 - RNA, 19 nt, Homo sapiens
  misc_RNA (1)...(19): siRNA sense strand
cagaugugcuugccagcuu

SEQ ID NO: 2087530 - RNA, 19 nt, Homo sapiens
  misc_RNA (1)...(19): siRNA sense strand
cugaagaaagcauaagaua

SEQ ID NO: 2087531 - RNA, 19 nt, Homo sapiens
  misc_RNA (1)...(19): siRNA sense strand
gaauuuggaagugaaagaa

SEQ ID NO: 2087532 - RNA, 19 nt, Homo sapiens
  misc_RNA (1)...(19): siRNA sense strand
gaccagacgggcugaagaa

SEQ ID NO: 2087533 - RNA, 19 nt, Homo sapiens
  misc_RNA (1)...(19): siRNA sense strand
gaaaguucacccugaucuu

SEQ ID NO: 2087534 - RNA, 19 nt, Homo sapiens
  misc_RNA (1)...(19): siRNA sense strand
gcugcaggaugauaagaau

SEQ ID NO: 2087535 - RNA, 19 nt, Homo sapiens
  misc_RNA (1)...(19): siRNA sense strand
gaaauacugcuuacuacac

SEQ ID NO: 2087536 - RNA, 19 nt, Homo sapiens
  misc_RNA (1)...(19): siRNA sense strand
cagaaccuguggcuccaaa

SEQ ID NO: 2087537 - RNA, 19 nt, Homo sapiens
  misc_RNA (1)...(19): siRNA sense strand
gagggcaaguucgcuguga

SEQ ID NO: 2087538 - RNA, 19 nt, Homo sapiens
  misc_RNA (1)...(19): siRNA sense strand
cagcaucacaguauucaga

SEQ ID NO: 2087539 - RNA, 19 nt, Homo sapiens
  misc_RNA (1)...(19): siRNA sense strand
cuacacaguuggacucucu

SEQ ID NO: 2087540 - RNA, 19 nt, Homo sapiens
  misc_RNA (1)...(19): siRNA sense strand
aaauacugcuuacuacaca

SEQ ID NO: 2087541 - RNA, 19 nt, Homo sapiens
  misc_RNA (1)...(19): siRNA sense strand
aaacugucauggaaauauc

SEQ ID NO: 2087542 - RNA, 19 nt, Homo sapiens
  misc_RNA (1)...(19): siRNA sense strand
gagacaagauaaaagaaga

SEQ ID NO: 2087543 - RNA, 19 nt, Homo sapiens
  misc_RNA (1)...(19): siRNA sense strand
guacuuauugcagccauuu

SEQ ID NO: 2087544 - RNA, 19 nt, Homo sapiens
  misc_RNA (1)...(19): siRNA sense strand
gaaguguuggccuccuuaa

SEQ ID NO: 2087545 - RNA, 19 nt, Homo sapiens
  misc_RNA (1)...(19): siRNA sense strand
caggaucuauggaugaagu

SEQ ID NO: 2087546 - RNA, 19 nt, Homo sapiens
  misc_RNA (1)...(19): siRNA sense strand
gugacuccuuggaaaguuu

SEQ ID NO: 2087547 - RNA, 19 nt, Homo sapiens
  misc_RNA (1)...(19): siRNA sense strand
gcuccaaaccugccaagug

SEQ ID NO: 2087548 - RNA, 19 nt, Homo sapiens
  misc_RNA (1)...(19): siRNA sense strand
gaugaaaagagacaagaua

SEQ ID NO: 2087549 - RNA, 19 nt, Homo sapiens
  misc_RNA (1)...(19): siRNA sense strand
aagaaauacugcuuacuac

SEQ ID NO: 2087550 - RNA, 19 nt, Homo sapiens
  misc_RNA (1)...(19): siRNA sense strand
uaguugcccuggagaaaga

SEQ ID NO: 2087551 - RNA, 19 nt, Homo sapiens
  misc_RNA (1)...(19): siRNA sense strand
cuuccgggcuccagugaaa

SEQ ID NO: 2087552 - RNA, 19 nt, Homo sapiens
  misc_RNA (1)...(19): siRNA sense strand
ggaccagacgggcugaaga

SEQ ID NO: 2087553 - RNA, 19 nt, Homo sapiens
  misc_RNA (1)...(19): siRNA sense strand
caaaccaaccagcaacaga

SEQ ID NO: 2087554 - RNA, 19 nt, Homo sapiens
  misc_RNA (1)...(19): siRNA sense strand
ugucaaaacugucauggaa

SEQ ID NO: 2087555 - RNA, 19 nt, Homo sapiens
  misc_RNA (1)...(19): siRNA sense strand
acaguuggacucucuuaaa

SEQ ID NO: 2087556 - RNA, 19 nt, Homo sapiens
  misc_RNA (1)...(19): siRNA sense strand
cuauuacgauccaugugaa

SEQ ID NO: 2087557 - RNA, 19 nt, Homo sapiens
  misc_RNA (1)...(19): siRNA sense strand
gcagcaaaccaaccagcaa

SEQ ID NO: 2087558 - RNA, 19 nt, Homo sapiens
  misc_RNA (1)...(19): siRNA sense strand
gagccucucuccggaguag

SEQ ID NO: 2087559 - RNA, 19 nt, Homo sapiens
  misc_RNA (1)...(19): siRNA sense strand
gaaaauccagaggaacuua

SEQ ID NO: 2087560 - RNA, 19 nt, Homo sapiens
  misc_RNA (1)...(19): siRNA sense strand
aggcugcgcuccagagaau

SEQ ID NO: 2087561 - RNA, 19 nt, Homo sapiens
  misc_RNA (1)...(19): siRNA sense strand
guucuuccaguacuuauug

SEQ ID NO: 2087562 - RNA, 19 nt, Homo sapiens
  misc_RNA (1)...(19): siRNA sense strand
gauacucucgucagcauca

SEQ ID NO: 2087563 - RNA, 19 nt, Homo sapiens
  misc_RNA (1)...(19): siRNA sense strand
ugauaagaauuuggaagug

SEQ ID NO: 2087564 - RNA, 19 nt, Homo sapiens
  misc_RNA (1)...(19): siRNA sense strand
aaacgaagaaauacugcuu

SEQ ID NO: 2087565 - RNA, 19 nt, Homo sapiens
  misc_RNA (1)...(19): siRNA sense strand
ggagacaguaaaagcauua

SEQ ID NO: 2087566 - RNA, 19 nt, Homo sapiens
  misc_RNA (1)...(19): siRNA sense strand
caacucaucagaacuuagg

SEQ ID NO: 2087567 - RNA, 19 nt, Homo sapiens
  misc_RNA (1)...(19): siRNA sense strand
gaagaggagcaaaagaaaa

SEQ ID NO: 2087568 - RNA, 19 nt, Homo sapiens
  misc_RNA (1)...(19): siRNA sense strand
uaaaagaagaggagcaaaa

SEQ ID NO: 2087569 - RNA, 19 nt, Homo sapiens
  misc_RNA (1)...(19): siRNA sense strand
agaugaaguugucuauuac

SEQ ID NO: 2087570 - RNA, 19 nt, Homo sapiens
  misc_RNA (1)...(19): siRNA sense strand
gguaguugcccuggagaaa

SEQ ID NO: 2087571 - RNA, 19 nt, Homo sapiens
  misc_RNA (1)...(19): siRNA sense strand
aagaggaagaugaagcaua

SEQ ID NO: 2087572 - RNA, 19 nt, Homo sapiens
  misc_RNA (1)...(19): siRNA sense strand
ucaaaacugucauggaaau

SEQ ID NO: 2087573 - RNA, 19 nt, Homo sapiens
  misc_RNA (1)...(19): siRNA sense strand
ugaagcauaccaggaauug

SEQ ID NO: 2087574 - RNA, 19 nt, Homo sapiens
  misc_RNA (1)...(19): siRNA sense strand
gaaugcagaaagaaaugga

SEQ ID NO: 2087575 - RNA, 19 nt, Homo sapiens
  misc_RNA (1)...(19): siRNA sense strand
guaaaagcauuagcaggaa

SEQ ID NO: 2087576 - RNA, 19 nt, Homo sapiens
  misc_RNA (1)...(19): siRNA sense strand
aaaguucacccugaucuug

SEQ ID NO: 2087577 - RNA, 19 nt, Homo sapiens
  misc_RNA (1)...(19): siRNA sense strand
ugaaguguuggccuccuua

SEQ ID NO: 2087578 - RNA, 19 nt, Homo sapiens
  misc_RNA (1)...(19): siRNA sense strand
gaucaaccaagaacgucaa

SEQ ID NO: 2087579 - RNA, 19 nt, Homo sapiens
  misc_RNA (1)...(19): siRNA sense strand
ugcaggaugauaagaauuu

SEQ ID NO: 2087580 - RNA, 19 nt, Homo sapiens
  misc_RNA (1)...(19): siRNA sense strand
gcgccagguuauucaagga

SEQ ID NO: 2087581 - RNA, 19 nt, Homo sapiens
  misc_RNA (1)...(19): siRNA sense strand
caagaugaaguugucuauu

SEQ ID NO: 2087582 - RNA, 19 nt, Homo sapiens
  misc_RNA (1)...(19): siRNA sense strand
agaugaagcauaccaggaa

SEQ ID NO: 2087583 - RNA, 19 nt, Homo sapiens
  misc_RNA (1)...(19): siRNA sense strand
ggacagaggucaucaauau

SEQ ID NO: 2087584 - RNA, 19 nt, Homo sapiens
  misc_RNA (1)...(19): siRNA sense strand
gaaaggaccuguucucaug

SEQ ID NO: 2087585 - RNA, 19 nt, Homo sapiens
  misc_RNA (1)...(19): siRNA sense strand
gaacgaagauggccagaga

SEQ ID NO: 2087586 - RNA, 19 nt, Homo sapiens
  misc_RNA (1)...(19): siRNA sense strand
gagacaaacugacuucuuu

SEQ ID NO: 2087587 - RNA, 19 nt, Homo sapiens
  misc_RNA (1)...(19): siRNA sense strand
gaaacaagcacaagaacua

SEQ ID NO: 2087588 - RNA, 19 nt, Homo sapiens
  misc_RNA (1)...(19): siRNA sense strand
gaacaaggcauauaugaau

SEQ ID NO: 2087589 - RNA, 19 nt, Homo sapiens
  misc_RNA (1)...(19): siRNA sense strand
gaagaaagcagguguguca

SEQ ID NO: 2087590 - RNA, 19 nt, Homo sapiens
  misc_RNA (1)...(19): siRNA sense strand
gaaagaacaaggcauauau

SEQ ID NO: 2087591 - RNA, 19 nt, Homo sapiens
  misc_RNA (1)...(19): siRNA sense strand
gaccagaccucaagaaaca

SEQ ID NO: 2087592 - RNA, 19 nt, Homo sapiens
  misc_RNA (1)...(19): siRNA sense strand
ggauggaacugggaagaua

SEQ ID NO: 2087593 - RNA, 19 nt, Homo sapiens
  misc_RNA (1)...(19): siRNA sense strand
aaugacagcuugugugaua

SEQ ID NO: 2087594 - RNA, 19 nt, Homo sapiens
  misc_RNA (1)...(19): siRNA sense strand
aaucagagaugaagacaaa

SEQ ID NO: 2087595 - RNA, 19 nt, Homo sapiens
  misc_RNA (1)...(19): siRNA sense strand
gggagcaguuccucacuua

SEQ ID NO: 2087596 - RNA, 19 nt, Homo sapiens
  misc_RNA (1)...(19): siRNA sense strand
ggacaacuguggagucugu

SEQ ID NO: 2087597 - RNA, 19 nt, Homo sapiens
  misc_RNA (1)...(19): siRNA sense strand
acacauccgugauuauuaa

SEQ ID NO: 2087598 - RNA, 19 nt, Homo sapiens
  misc_RNA (1)...(19): siRNA sense strand
ggaaagaacaaggcauaua

SEQ ID NO: 2087599 - RNA, 19 nt, Homo sapiens
  misc_RNA (1)...(19): siRNA sense strand
gaagagaccagaauagcaa

SEQ ID NO: 2087600 - RNA, 19 nt, Homo sapiens
  misc_RNA (1)...(19): siRNA sense strand
gaaaggcaguggcaacauc

SEQ ID NO: 2087601 - RNA, 19 nt, Homo sapiens
  misc_RNA (1)...(19): siRNA sense strand
gaaguuacacaucaaagaa

SEQ ID NO: 2087602 - RNA, 19 nt, Homo sapiens
  misc_RNA (1)...(19): siRNA sense strand
agacuguccuccacauuua

SEQ ID NO: 2087603 - RNA, 19 nt, Homo sapiens
  misc_RNA (1)...(19): siRNA sense strand
gaugaugaccacauuagua

SEQ ID NO: 2087604 - RNA, 19 nt, Homo sapiens
  misc_RNA (1)...(19): siRNA sense strand
uugaugagcugauaagaaa

SEQ ID NO: 2087605 - RNA, 19 nt, Homo sapiens
  misc_RNA (1)...(19): siRNA sense strand
gaaacacucguucagauga

SEQ ID NO: 2087606 - RNA, 19 nt, Homo sapiens
  misc_RNA (1)...(19): siRNA sense strand
gcacagacacaacucacua

SEQ ID NO: 2087607 - RNA, 19 nt, Homo sapiens
  misc_RNA (1)...(19): siRNA sense strand
gauagagacugcacagaca

SEQ ID NO: 2087608 - RNA, 19 nt, Homo sapiens
  misc_RNA (1)...(19): siRNA sense strand
caacagcaaugacccaaca

SEQ ID NO: 2087609 - RNA, 19 nt, Homo sapiens
  misc_RNA (1)...(19): siRNA sense strand
gaagauggccagagaguag

SEQ ID NO: 2087610 - RNA, 19 nt, Homo sapiens
  misc_RNA (1)...(19): siRNA sense strand
gaaagcaggugugucaaag

SEQ ID NO: 2087611 - RNA, 19 nt, Homo sapiens
  misc_RNA (1)...(19): siRNA sense strand
gcuaacggauggcagcuuu

SEQ ID NO: 2087612 - RNA, 19 nt, Homo sapiens
  misc_RNA (1)...(19): siRNA sense strand
gaaguguucugucaguugu

SEQ ID NO: 2087613 - RNA, 19 nt, Homo sapiens
  misc_RNA (1)...(19): siRNA sense strand
guucagauguggaaaguuc

SEQ ID NO: 2087614 - RNA, 19 nt, Homo sapiens
  misc_RNA (1)...(19): siRNA sense strand
ccugggaguugaagaauaa

SEQ ID NO: 2087615 - RNA, 19 nt, Homo sapiens
  misc_RNA (1)...(19): siRNA sense strand
uaaccagccuuucuugaga

SEQ ID NO: 2087616 - RNA, 19 nt, Homo sapiens
  misc_RNA (1)...(19): siRNA sense strand
agacacaacucacuacugu

SEQ ID NO: 2087617 - RNA, 19 nt, Homo sapiens
  misc_RNA (1)...(19): siRNA sense strand
gcagaauguuucccuugaa

SEQ ID NO: 2087618 - RNA, 19 nt, Homo sapiens
  misc_RNA (1)...(19): siRNA sense strand
caacacauccgugauuauu

SEQ ID NO: 2087619 - RNA, 19 nt, Homo sapiens
  misc_RNA (1)...(19): siRNA sense strand
agaaagagacccaccuuaa

SEQ ID NO: 2087620 - RNA, 19 nt, Homo sapiens
  misc_RNA (1)...(19): siRNA sense strand
gaaagagacccaccuuaag

SEQ ID NO: 2087621 - RNA, 19 nt, Homo sapiens
  misc_RNA (1)...(19): siRNA sense strand
cuacaaugauguccaguau

SEQ ID NO: 2087622 - RNA, 19 nt, Homo sapiens
  misc_RNA (1)...(19): siRNA sense strand
gaccacagcugagaaaucu

SEQ ID NO: 2087623 - RNA, 19 nt, Homo sapiens
  misc_RNA (1)...(19): siRNA sense strand
acaauccgauguccuguaa

SEQ ID NO: 2087624 - RNA, 19 nt, Homo sapiens
  misc_RNA (1)...(19): siRNA sense strand
cagaauagcaacagaagaa

SEQ ID NO: 2087625 - RNA, 19 nt, Homo sapiens
  misc_RNA (1)...(19): siRNA sense strand
caaucaaagucacacguuu

SEQ ID NO: 2087626 - RNA, 19 nt, Homo sapiens
  misc_RNA (1)...(19): siRNA sense strand
gcaaauguggaauaacaaa

SEQ ID NO: 2087627 - RNA, 19 nt, Homo sapiens
  misc_RNA (1)...(19): siRNA sense strand
caacaucuguacuccacuu

SEQ ID NO: 2087628 - RNA, 19 nt, Homo sapiens
  misc_RNA (1)...(19): siRNA sense strand
gcacaaccaucugucuguu

SEQ ID NO: 2087629 - RNA, 19 nt, Homo sapiens
  misc_RNA (1)...(19): siRNA sense strand
ucacuuaucgcuaugauga

SEQ ID NO: 2087630 - RNA, 19 nt, Homo sapiens
  misc_RNA (1)...(19): siRNA sense strand
ccugguaacuggucacauu

SEQ ID NO: 2087631 - RNA, 19 nt, Homo sapiens
  misc_RNA (1)...(19): siRNA sense strand
gaagauacagauacagaau

SEQ ID NO: 2087632 - RNA, 19 nt, Homo sapiens
  misc_RNA (1)...(19): siRNA sense strand
gagcugauaagaaacauga

SEQ ID NO: 2087633 - RNA, 19 nt, Homo sapiens
  misc_RNA (1)...(19): siRNA sense strand
gguaguuccugaccauuau

SEQ ID NO: 2087634 - RNA, 19 nt, Homo sapiens
  misc_RNA (1)...(19): siRNA sense strand
augaauggcuuccacgaua

SEQ ID NO: 2087635 - RNA, 19 nt, Homo sapiens
  misc_RNA (1)...(19): siRNA sense strand
guauuaaccugaccauugg

SEQ ID NO: 2087636 - RNA, 19 nt, Homo sapiens
  misc_RNA (1)...(19): siRNA sense strand
ccaaguggauugccaugga

SEQ ID NO: 2087637 - RNA, 19 nt, Homo sapiens
  misc_RNA (1)...(19): siRNA sense strand
aaacacaacaguggaauuu

SEQ ID NO: 2087638 - RNA, 19 nt, Homo sapiens
  misc_RNA (1)...(19): siRNA sense strand
ggagaacacagcuuuaaca

SEQ ID NO: 2087639 - RNA, 19 nt, Homo sapiens
  misc_RNA (1)...(19): siRNA sense strand
cuagaccgcuacaaacaaa

SEQ ID NO: 2087640 - RNA, 19 nt, Homo sapiens
  misc_RNA (1)...(19): siRNA sense strand
ggaaacaguugugcucaag

SEQ ID NO: 2087641 - RNA, 19 nt, Homo sapiens
  misc_RNA (1)...(19): siRNA sense strand
gagguuaucagcucaauuc

SEQ ID NO: 2087642 - RNA, 19 nt, Homo sapiens
  misc_RNA (1)...(19): siRNA sense strand
acacaacaguggaauuuca

SEQ ID NO: 2087643 - RNA, 19 nt, Homo sapiens
  misc_RNA (1)...(19): siRNA sense strand
ggaccugcccaccucuuua

SEQ ID NO: 2087644 - RNA, 19 nt, Homo sapiens
  misc_RNA (1)...(19): siRNA sense strand
ggucaucaauauacugugu

SEQ ID NO: 2087645 - RNA, 19 nt, Homo sapiens
  misc_RNA (1)...(19): siRNA sense strand
gggaagagaagcguauuaa

SEQ ID NO: 2087646 - RNA, 19 nt, Homo sapiens
  misc_RNA (1)...(19): siRNA sense strand
uguaauugcuguuccuuug

SEQ ID NO: 2087647 - RNA, 19 nt, Homo sapiens
  misc_RNA (1)...(19): siRNA sense strand
gcaaaccuguggccaagag

SEQ ID NO: 2087648 - RNA, 19 nt, Homo sapiens
  misc_RNA (1)...(19): siRNA sense strand
aaagagacccaccuuaaga

SEQ ID NO: 2087649 - RNA, 19 nt, Homo sapiens
  misc_RNA (1)...(19): siRNA sense strand
ucacacagcuugucaacac

SEQ ID NO: 2087650 - RNA, 19 nt, Homo sapiens
  misc_RNA (1)...(19): siRNA sense strand
gaacugggaagauacagau

SEQ ID NO: 2087651 - RNA, 19 nt, Homo sapiens
  misc_RNA (1)...(19): siRNA sense strand
ugaggcaaauguggaauaa

SEQ ID NO: 2087652 - RNA, 19 nt, Homo sapiens
  misc_RNA (1)...(19): siRNA sense strand
gcaguaaaaucaaaucaga

SEQ ID NO: 2087653 - RNA, 19 nt, Homo sapiens
  misc_RNA (1)...(19): siRNA sense strand
gaauggcuuccacgauaua

SEQ ID NO: 2087654 - RNA, 19 nt, Homo sapiens
  misc_RNA (1)...(19): siRNA sense strand
gcagugugcuuacauaucc

SEQ ID NO: 2087655 - RNA, 19 nt, Homo sapiens
  misc_RNA (1)...(19): siRNA sense strand
gcccaccucuuuauugaau

SEQ ID NO: 2087656 - RNA, 19 nt, Homo sapiens
  misc_RNA (1)...(19): siRNA sense strand
caggcaagcugacauucaa

SEQ ID NO: 2087657 - RNA, 19 nt, Homo sapiens
  misc_RNA (1)...(19): siRNA sense strand
ccaguuugaugagcugaua

SEQ ID NO: 2087658 - RNA, 19 nt, Homo sapiens
  misc_RNA (1)...(19): siRNA sense strand
cagagagucuacauucaga

SEQ ID NO: 2087659 - RNA, 19 nt, Homo sapiens
  misc_RNA (1)...(19): siRNA sense strand
gaccucugauggcugauuu

SEQ ID NO: 2087660 - RNA, 19 nt, Homo sapiens
  misc_RNA (1)...(19): siRNA sense strand
gcacaagaacuagaagaga

SEQ ID NO: 2087661 - RNA, 19 nt, Homo sapiens
  misc_RNA (1)...(19): siRNA sense strand
gguaacuggucacauuguu

SEQ ID NO: 2087662 - RNA, 19 nt, Homo sapiens
  misc_RNA (1)...(19): siRNA sense strand
agaggcaccugucaucuug

SEQ ID NO: 2087663 - RNA, 19 nt, Homo sapiens
  misc_RNA (1)...(19): siRNA sense strand
caaccucccucaauuucau

SEQ ID NO: 2087664 - RNA, 19 nt, Homo sapiens
  misc_RNA (1)...(19): siRNA sense strand
aagccaaccucccucaauu

SEQ ID NO: 2087665 - RNA, 19 nt, Homo sapiens
  misc_RNA (1)...(19): siRNA sense strand
ucccaaagcucgcaugcaa

SEQ ID NO: 2087666 - RNA, 19 nt, Homo sapiens
  misc_RNA (1)...(19): siRNA sense strand
cguauuaaccugaccauug

SEQ ID NO: 2087667 - RNA, 19 nt, Homo sapiens
  misc_RNA (1)...(19): siRNA sense strand
gaggcaaacuuuuaagauu

SEQ ID NO: 2087668 - RNA, 19 nt, Homo sapiens
  misc_RNA (1)...(19): siRNA sense strand
cuaaucaucuugguucaga

SEQ ID NO: 2087669 - RNA, 19 nt, Homo sapiens
  misc_RNA (1)...(19): siRNA sense strand
ggaagauacagauacagaa

SEQ ID NO: 2087670 - RNA, 19 nt, Homo sapiens
  misc_RNA (1)...(19): siRNA sense strand
gauccucaguguccagaga

SEQ ID NO: 2087671 - RNA, 19 nt, Homo sapiens
  misc_RNA (1)...(19): siRNA sense strand
ggagacuggucgaaguguu

SEQ ID NO: 2087672 - RNA, 19 nt, Homo sapiens
  misc_RNA (1)...(19): siRNA sense strand
ccugucaucuugucuguug

SEQ ID NO: 2087673 - RNA, 19 nt, Homo sapiens
  misc_RNA (1)...(19): siRNA sense strand
aagaaacacucguucagau

SEQ ID NO: 2087674 - RNA, 19 nt, Homo sapiens
  misc_RNA (1)...(19): siRNA sense strand
gcagaccacagcugagaaa

SEQ ID NO: 2087675 - RNA, 19 nt, Homo sapiens
  misc_RNA (1)...(19): siRNA sense strand
ggguaguuccugaccauua

SEQ ID NO: 2087676 - RNA, 19 nt, Homo sapiens
  misc_RNA (1)...(19): siRNA sense strand
ugaagcagcaguuaaacaa

SEQ ID NO: 2087677 - RNA, 19 nt, Homo sapiens
  misc_RNA (1)...(19): siRNA sense strand
ugaagaauaagcaguuuga

SEQ ID NO: 2087678 - RNA, 19 nt, Homo sapiens
  misc_RNA (1)...(19): siRNA sense strand
aggcaaauguggaauaaca

SEQ ID NO: 2087679 - RNA, 19 nt, Homo sapiens
  misc_RNA (1)...(19): siRNA sense strand
cagcgaagccaauaguuug

SEQ ID NO: 2087680 - RNA, 19 nt, Homo sapiens
  misc_RNA (1)...(19): siRNA sense strand
gugcgacgauuccagaaau

SEQ ID NO: 2087681 - RNA, 19 nt, Homo sapiens
  misc_RNA (1)...(19): siRNA sense strand
gaagagaagcguauuaacc

SEQ ID NO: 2087682 - RNA, 19 nt, Homo sapiens
  misc_RNA (1)...(19): siRNA sense strand
caacagaagaaccaacguu

SEQ ID NO: 2087683 - RNA, 19 nt, Homo sapiens
  misc_RNA (1)...(19): siRNA sense strand
gcacuugccucaacuagga

SEQ ID NO: 2087684 - RNA, 19 nt, Homo sapiens
  misc_RNA (1)...(19): siRNA sense strand
gagccugucugucuagcua
